United States Patent Application Publication US 2005/0244851 A1 - sequence listing, part 54

SEQ ID NO: 2095478 - DNA, 25 bp, Homo sapien
gaactccgtcagtagtccctggctg

SEQ ID NO: 2095479 - DNA, 25 bp, Homo sapien
gtatcaagttgtatggaggaacacc

SEQ ID NO: 2095480 - DNA, 25 bp, Homo sapien
tatcaagttgtatggaggaacaccc

SEQ ID NO: 2095481 - DNA, 25 bp, Homo sapien
accctctttcgggagtatcaagttg

SEQ ID NO: 2095482 - DNA, 25 bp, Homo sapien
ctctttcgggagtatcaagttgtat

SEQ ID NO: 2095483 - DNA, 25 bp, Homo sapien
cctgccaccatccatcatcatgatc

SEQ ID NO: 2095484 - DNA, 25 bp, Homo sapien
cagtgggcatgtcagggtacctgcc

SEQ ID NO: 2095485 - DNA, 25 bp, Homo sapien
tgatctaaagcattcacaacattag

SEQ ID NO: 2095486 - DNA, 25 bp, Homo sapien
ttcacaacattagcagcagtgggca

SEQ ID NO: 2095487 - DNA, 25 bp, Homo sapien
aggaaatgctcctgtgatgatgctg

SEQ ID NO: 2095488 - DNA, 25 bp, Homo sapien
gaggaaatgctcctgtgatgatgct

SEQ ID NO: 2095489 - DNA, 25 bp, Homo sapien
cctttctgtcgtgcttattctaagc

SEQ ID NO: 2095490 - DNA, 25 bp, Homo sapien
aacctttctgtcgtgcttattctaa

SEQ ID NO: 2095491 - DNA, 25 bp, Homo sapien
aaacctttctgtcgtgcttattcta

SEQ ID NO: 2095492 - DNA, 25 bp, Homo sapien
taaacctttctgtcgtgcttattct

SEQ ID NO: 2095493 - DNA, 25 bp, Homo sapien
gagaagtgcccacgtatgcccttcc

SEQ ID NO: 2095494 - DNA, 25 bp, Homo sapien
gaagtgcccacgtatgcccttcctt

SEQ ID NO: 2095495 - DNA, 25 bp, Homo sapien
cagagaagtgcccacgtatgccctt

SEQ ID NO: 2095496 - DNA, 25 bp, Homo sapien
ccagagaagtgcccacgtatgccct

SEQ ID NO: 2095497 - DNA, 25 bp, Homo sapien
gagactgagtcaatcgaagaatagc

SEQ ID NO: 2095498 - DNA, 25 bp, Homo sapien
agattccagcgctccagactttggg

SEQ ID NO: 2095499 - DNA, 25 bp, Homo sapien
gctgaaacttcaatggcagagactg

SEQ ID NO: 2095500 - DNA, 25 bp, Homo sapien
taatgagttatgagaaggcatggga

SEQ ID NO: 2095501 - DNA, 25 bp, Homo sapien
aagctgatgggtattggctattttc

SEQ ID NO: 2095502 - DNA, 25 bp, Homo sapien
tttattaaagctgatgggtattggc

SEQ ID NO: 2095503 - DNA, 25 bp, Homo sapien
tttcatgggtagtcatgcaattcag

SEQ ID NO: 2095504 - DNA, 25 bp, Homo sapien
ttttcatgggtagtcatgcaattca

SEQ ID NO: 2095505 - DNA, 25 bp, Homo sapien
ggctgaaggtcgttatcaattagat

SEQ ID NO: 2095506 - DNA, 25 bp, Homo sapien
caaatagagtaatgaataattgttc

SEQ ID NO: 2095507 - DNA, 25 bp, Homo sapien
tatttcagggcagtctgatggtagg

SEQ ID NO: 2095508 - DNA, 25 bp, Homo sapien
gaaaactaaaggctactgagctatt

SEQ ID NO: 2095509 - DNA, 25 bp, Homo sapien
tagctgcagtgatgatctgatttag

SEQ ID NO: 2095510 - DNA, 25 bp, Homo sapien
ttagctgcagtgatgatctgattta

SEQ ID NO: 2095511 - DNA, 25 bp, Homo sapien
ggtaactcactgcaaaaaaggccag

SEQ ID NO: 2095512 - DNA, 25 bp, Homo sapien
gtaactcactgcaaaaaaggccagc

SEQ ID NO: 2095513 - DNA, 25 bp, Homo sapien
tctttagagtatgcctcttggttgt

SEQ ID NO: 2095514 - DNA, 25 bp, Homo sapien
ctctctttctttagagtatgcctct

SEQ ID NO: 2095515 - DNA, 25 bp, Homo sapien
gagtatgcctcttggttgttgtgct

SEQ ID NO: 2095516 - DNA, 25 bp, Homo sapien
tatgcctcttggttgttgtgctcca

SEQ ID NO: 2095517 - DNA, 25 bp, Homo sapien
atgccggggggagaaaaagcatatc

SEQ ID NO: 2095518 - DNA, 25 bp, Homo sapien
tgccggggggagaaaaagcatatcc

SEQ ID NO: 2095519 - DNA, 25 bp, Homo sapien
gggagaaaaagcatatcctttttga

SEQ ID NO: 2095520 - DNA, 25 bp, Homo sapien
agaaaaagcatatcctttttgaggg

SEQ ID NO: 2095521 - DNA, 25 bp, Homo sapien
ttcttgtaagctgagtgaacgagct

SEQ ID NO: 2095522 - DNA, 25 bp, Homo sapien
gagctgccagacatatctcctggaa

SEQ ID NO: 2095523 - DNA, 25 bp, Homo sapien
caaggaacactttgccagtgacgaa

SEQ ID NO: 2095524 - DNA, 25 bp, Homo sapien
tgctcttcccctcgtgatacactgg

SEQ ID NO: 2095525 - DNA, 25 bp, Homo sapien
cacatctgttcatcgttctgtgaca

SEQ ID NO: 2095526 - DNA, 25 bp, Homo sapien
tgacagctgcagcataacctgggcg

SEQ ID NO: 2095527 - DNA, 25 bp, Homo sapien
ctcgtatacatcatatccatgttga

SEQ ID NO: 2095528 - DNA, 25 bp, Homo sapien
aacctgggcggcatactcgtataca

SEQ ID NO: 2095529 - DNA, 25 bp, Homo sapien
ttgcacagggatcatgctagtcttc

SEQ ID NO: 2095530 - DNA, 25 bp, Homo sapien
ccttgcacagggatcatgctagtct

SEQ ID NO: 2095531 - DNA, 25 bp, Homo sapien
atccttgcacagggatcatgctagt

SEQ ID NO: 2095532 - DNA, 25 bp, Homo sapien
tgcacagggatcatgctagtcttct

SEQ ID NO: 2095533 - DNA, 25 bp, Homo sapien
ctgaaatttgtatgccgctgtcttc

SEQ ID NO: 2095534 - DNA, 25 bp, Homo sapien
tcaatataaaccacctgcatttggg

SEQ ID NO: 2095535 - DNA, 25 bp, Homo sapien
cctgcatttgggtttctttaacaat

SEQ ID NO: 2095536 - DNA, 25 bp, Homo sapien
tctttaacaattgtaataattccac

SEQ ID NO: 2095537 - DNA, 25 bp, Homo sapien
tcaagccctggcgaatctttgctag

SEQ ID NO: 2095538 - DNA, 25 bp, Homo sapien
ttgtttcaagccctggcgaatcttt

SEQ ID NO: 2095539 - DNA, 25 bp, Homo sapien
ttgctctgattgttgtttcaagccc

SEQ ID NO: 2095540 - DNA, 25 bp, Homo sapien
gccctggcgaatctttgctagtttg

SEQ ID NO: 2095541 - DNA, 25 bp, Homo sapien
tgttagtaatgtaaaaaccagtgac

SEQ ID NO: 2095542 - DNA, 25 bp, Homo sapien
taaaaaccagtgactagtattttca

SEQ ID NO: 2095543 - DNA, 25 bp, Homo sapien
taatgtaaaaaccagtgactagtat

SEQ ID NO: 2095544 - DNA, 25 bp, Homo sapien
ttgttagtaatgtaaaaaccagtga

SEQ ID NO: 2095545 - DNA, 25 bp, Homo sapien
gccttagtcttctttgcaatcttcc

SEQ ID NO: 2095546 - DNA, 25 bp, Homo sapien
tccaccactgaagagtgacaaggtg

SEQ ID NO: 2095547 - DNA, 25 bp, Homo sapien
ttagtcttctttgcaatcttccctt

SEQ ID NO: 2095548 - DNA, 25 bp, Homo sapien
cactgaagagtgacaaggtgtttct

SEQ ID NO: 2095549 - DNA, 25 bp, Homo sapien
gcactgatggtgactaaagggagcc

SEQ ID NO: 2095550 - DNA, 25 bp, Homo sapien
caacttgtggcctgaaaggttcccg

SEQ ID NO: 2095551 - DNA, 25 bp, Homo sapien
tgcaggcactgatggtgactaaagg

SEQ ID NO: 2095552 - DNA, 25 bp, Homo sapien
caggcactgatggtgactaaaggga

SEQ ID NO: 2095553 - DNA, 25 bp, Homo sapien
ccatgagggtcatacggtagccaaa

SEQ ID NO: 2095554 - DNA, 25 bp, Homo sapien
ttgtttccccagcttagatagaggc

SEQ ID NO: 2095555 - DNA, 25 bp, Homo sapien
tcgagacctcgaaagggcagttggt

SEQ ID NO: 2095556 - DNA, 25 bp, Homo sapien
gaatatagagtcctgcatgtggccc

SEQ ID NO: 2095557 - DNA, 25 bp, Homo sapien
ctcgttctttgccacgaaggagaaa

SEQ ID NO: 2095558 - DNA, 25 bp, Homo sapien
cgttctttgccacgaaggagaaaga

SEQ ID NO: 2095559 - DNA, 25 bp, Homo sapien
ctcctcgttctttgccacgaaggag

SEQ ID NO: 2095560 - DNA, 25 bp, Homo sapien
tcctcgttctttgccacgaaggaga

SEQ ID NO: 2095561 - DNA, 25 bp, Homo sapien
ggatcaaccatgctgatgcagtgct

SEQ ID NO: 2095562 - DNA, 25 bp, Homo sapien
agcctagtccctctagcaacattgg

SEQ ID NO: 2095563 - DNA, 25 bp, Homo sapien
tgtgttggtccgatcagctggatca

SEQ ID NO: 2095564 - DNA, 25 bp, Homo sapien
atttgtcttcaatgtccggcaccat

SEQ ID NO: 2095565 - DNA, 25 bp, Homo sapien
agtgttggaaacagaactgcattgt

SEQ ID NO: 2095566 - DNA, 25 bp, Homo sapien
gcagtgttggaaacagaactgcatt

SEQ ID NO: 2095567 - DNA, 25 bp, Homo sapien
agaactgcattgtggaagaagccat

SEQ ID NO: 2095568 - DNA, 25 bp, Homo sapien
atgcagtgttggaaacagaactgca

SEQ ID NO: 2095569 - DNA, 25 bp, Homo sapien
gatgtaagacacttgaaaaattgtg

SEQ ID NO: 2095570 - DNA, 25 bp, Homo sapien
atctcgatgtaagacacttgaaaaa

SEQ ID NO: 2095571 - DNA, 25 bp, Homo sapien
gacacttgaaaaattgtgatgcctt

SEQ ID NO: 2095572 - DNA, 25 bp, Homo sapien
taagacacttgaaaaattgtgatgc

SEQ ID NO: 2095573 - DNA, 25 bp, Homo sapien
tctgttgttcggcatttggaaaagc

SEQ ID NO: 2095574 - DNA, 25 bp, Homo sapien
ctgccagatgcgcaagagtgtagca

SEQ ID NO: 2095575 - DNA, 25 bp, Homo sapien
agcttgaatattgctggcttttcag

SEQ ID NO: 2095576 - DNA, 25 bp, Homo sapien
gccagatgcgcaagagtgtagcatc

SEQ ID NO: 2095577 - DNA, 25 bp, Homo sapien
atcagatggtccaaaatagggatat

SEQ ID NO: 2095578 - DNA, 25 bp, Homo sapien
tcagatggtccaaaatagggatata

SEQ ID NO: 2095579 - DNA, 25 bp, Homo sapien
cagatggtccaaaatagggatatac

SEQ ID NO: 2095580 - DNA, 25 bp, Homo sapien
cttcactcagggcagttaaatgggt

SEQ ID NO: 2095581 - DNA, 25 bp, Homo sapien
tcactcagggcagttaaatgggtga

SEQ ID NO: 2095582 - DNA, 25 bp, Homo sapien
caggatctttgaggatgacgttgat

SEQ ID NO: 2095583 - DNA, 25 bp, Homo sapien
gatgacgttgatatgaagtgatcca

SEQ ID NO: 2095584 - DNA, 25 bp, Homo sapien
tctgtcaaggagagtcaattgtcca

SEQ ID NO: 2095585 - DNA, 25 bp, Homo sapien
tggatcccacagttgcactaggaga

SEQ ID NO: 2095586 - DNA, 25 bp, Homo sapien
taggttgcaagaagcctggatccca

SEQ ID NO: 2095587 - DNA, 25 bp, Homo sapien
caattgtccaactgacactgggcta

SEQ ID NO: 2095588 - DNA, 25 bp, Homo sapien
tcttagatacaggagttactgttat

SEQ ID NO: 2095589 - DNA, 25 bp, Homo sapien
taagttatcccatcttgttctcttg

SEQ ID NO: 2095590 - DNA, 25 bp, Homo sapien
caaaatcaaggtgcataagttatcc

SEQ ID NO: 2095591 - DNA, 25 bp, Homo sapien
gttctcttgaaaatcttagatacag

SEQ ID NO: 2095592 - DNA, 25 bp, Homo sapien
tcaggccccacgttgtacttctctt

SEQ ID NO: 2095593 - DNA, 25 bp, Homo sapien
ggatgaactctggagaaaactcaga

SEQ ID NO: 2095594 - DNA, 25 bp, Homo sapien
tcattggaatcaggaagggaatctc

SEQ ID NO: 2095595 - DNA, 25 bp, Homo sapien
tagtttcatatggagacattgatcg

SEQ ID NO: 2095596 - DNA, 25 bp, Homo sapien
catgtgttattttaataagtgctac

SEQ ID NO: 2095597 - DNA, 25 bp, Homo sapien
aagcatgtgttattttaataagtgc

SEQ ID NO: 2095598 - DNA, 25 bp, Homo sapien
cttgataagcatgtgttattttaat

SEQ ID NO: 2095599 - DNA, 25 bp, Homo sapien
gataagcatgtgttattttaataag

SEQ ID NO: 2095600 - DNA, 25 bp, Homo sapien
tggaccaaagttctgcagttgtagc

SEQ ID NO: 2095601 - DNA, 25 bp, Homo sapien
ggtctgtatgagaggcgcactcaat

SEQ ID NO: 2095602 - DNA, 25 bp, Homo sapien
catttgatgtgtagggctctgcttc

SEQ ID NO: 2095603 - DNA, 25 bp, Homo sapien
tctagagtcccttgttgattcacca

SEQ ID NO: 2095604 - DNA, 25 bp, Homo sapien
ctgatctgctcgtgctgataatggg

SEQ ID NO: 2095605 - DNA, 25 bp, Homo sapien
tgcccccttggagctaagagaaggt

SEQ ID NO: 2095606 - DNA, 25 bp, Homo sapien
cacttagagtctcttgatgccaaga

SEQ ID NO: 2095607 - DNA, 25 bp, Homo sapien
gcttccttggcgtccagatagcaga

SEQ ID NO: 2095608 - DNA, 25 bp, Homo sapien
gaataaatttaactcaactctagaa

SEQ ID NO: 2095609 - DNA, 25 bp, Homo sapien
gctggattgaatcagcagatatatg

SEQ ID NO: 2095610 - DNA, 25 bp, Homo sapien
ggccttaagatctgtctgtgctgga

SEQ ID NO: 2095611 - DNA, 25 bp, Homo sapien
tgagccatcaaccaaggccttaaga

SEQ ID NO: 2095612 - DNA, 25 bp, Homo sapien
tgggcagagtgtgctcaagctgcac

SEQ ID NO: 2095613 - DNA, 25 bp, Homo sapien
tctcatagctacagcccttgggcag

SEQ ID NO: 2095614 - DNA, 25 bp, Homo sapien
tggactgagagcctttctcatagct

SEQ ID NO: 2095615 - DNA, 25 bp, Homo sapien
ccttcactgtaacagctcatggact

SEQ ID NO: 2095616 - DNA, 25 bp, Homo sapien
ccatctggcacattcctgtctcctt

SEQ ID NO: 2095617 - DNA, 25 bp, Homo sapien
caaaactcagttccaattttggctt

SEQ ID NO: 2095618 - DNA, 25 bp, Homo sapien
tgtctccttcaaaactcagttccaa

SEQ ID NO: 2095619 - DNA, 25 bp, Homo sapien
ccccatctggcacattcctgtctcc

SEQ ID NO: 2095620 - DNA, 25 bp, Homo sapien
actctcccagtaaaatttcactcct

SEQ ID NO: 2095621 - DNA, 25 bp, Homo sapien
ttactctcccagtaaaatttcactc

SEQ ID NO: 2095622 - DNA, 25 bp, Homo sapien
tactctcccagtaaaatttcactcc

SEQ ID NO: 2095623 - DNA, 25 bp, Homo sapien
cttaaggcatccaaaagaatcaaat

SEQ ID NO: 2095624 - DNA, 25 bp, Homo sapien
taaggcatccaaaagaatcaaatac

SEQ ID NO: 2095625 - DNA, 25 bp, Homo sapien
catccaaaagaatcaaatacagcca

SEQ ID NO: 2095626 - DNA, 25 bp, Homo sapien
aggcatccaaaagaatcaaatacag

SEQ ID NO: 2095627 - DNA, 25 bp, Homo sapien
ttcttgcccatacccgtgatttttc

SEQ ID NO: 2095628 - DNA, 25 bp, Homo sapien
ttcttcttgcccatacccgtgattt

SEQ ID NO: 2095629 - DNA, 25 bp, Homo sapien
cccatacccgtgatttttctgaggg

SEQ ID NO: 2095630 - DNA, 25 bp, Homo sapien
tgcccatacccgtgatttttctgag

SEQ ID NO: 2095631 - DNA, 25 bp, Homo sapien
ccaggaagccttaattgttgagttc

SEQ ID NO: 2095632 - DNA, 25 bp, Homo sapien
gtgaggacaggccattcttaatgtt

SEQ ID NO: 2095633 - DNA, 25 bp, Homo sapien
tttccaactatataagagcttctcc

SEQ ID NO: 2095634 - DNA, 25 bp, Homo sapien
ctggtaatcatcaagtctaagtgta

SEQ ID NO: 2095635 - DNA, 25 bp, Homo sapien
tccttcagtgtttcacttgtaattg

SEQ ID NO: 2095636 - DNA, 25 bp, Homo sapien
atccttcagtgtttcacttgtaatt

SEQ ID NO: 2095637 - DNA, 25 bp, Homo sapien
ctgtctaccccatccttcagtgttt

SEQ ID NO: 2095638 - DNA, 25 bp, Homo sapien
ttcctgtctaccccatccttcagtg

SEQ ID NO: 2095639 - DNA, 25 bp, Homo sapien
ttgaagtggctgtaacacaggacac

SEQ ID NO: 2095640 - DNA, 25 bp, Homo sapien
cagaagaattaaagtacacggcaca

SEQ ID NO: 2095641 - DNA, 25 bp, Homo sapien
cagagacctgaagatagtttgaagt

SEQ ID NO: 2095642 - DNA, 25 bp, Homo sapien
gaaaggatgcatacaggaagttcca

SEQ ID NO: 2095643 - DNA, 25 bp, Homo sapien
aatcccctggatttgcctctgagac

SEQ ID NO: 2095644 - DNA, 25 bp, Homo sapien
gacctcgtattaagggcagtctaga

SEQ ID NO: 2095645 - DNA, 25 bp, Homo sapien
tacggactgaaatgactagcaagca

SEQ ID NO: 2095646 - DNA, 25 bp, Homo sapien
ctgggctactgttttgggcaaggac

SEQ ID NO: 2095647 - DNA, 25 bp, Homo sapien
gaaaccaatttgtctacactggaag

SEQ ID NO: 2095648 - DNA, 25 bp, Homo sapien
gacaatgataaaaacacctgctctc

SEQ ID NO: 2095649 - DNA, 25 bp, Homo sapien
gaaaaaggcttgtggtgtcagccag

SEQ ID NO: 2095650 - DNA, 25 bp, Homo sapien
aggtgcttccatctgaatagtgaca

SEQ ID NO: 2095651 - DNA, 25 bp, Homo sapien
tgccccagcgtcttggaatccaaag

SEQ ID NO: 2095652 - DNA, 25 bp, Homo sapien
ctgaacctcatatccttgatgcctg

SEQ ID NO: 2095653 - DNA, 25 bp, Homo sapien
cttggaatccaaagtcaagcctcat

SEQ ID NO: 2095654 - DNA, 25 bp, Homo sapien
gaacctcatatccttgatgcctgcc

SEQ ID NO: 2095655 - DNA, 25 bp, Homo sapien
ttcagaaccacatgagaagattctc

SEQ ID NO: 2095656 - DNA, 25 bp, Homo sapien
ttcttcagaaccacatgagaagatt

SEQ ID NO: 2095657 - DNA, 25 bp, Homo sapien
tcagaaccacatgagaagattctca

SEQ ID NO: 2095658 - DNA, 25 bp, Homo sapien
tcttcagaaccacatgagaagattc

SEQ ID NO: 2095659 - DNA, 25 bp, Homo sapien
ttcatattgcgttgctgtgttccgc

SEQ ID NO: 2095660 - DNA, 25 bp, Homo sapien
gaacaaaagcctcaaattccttaga

SEQ ID NO: 2095661 - DNA, 25 bp, Homo sapien
gcaaagttgggtgaagaacaaaagc

SEQ ID NO: 2095662 - DNA, 25 bp, Homo sapien
cgttgctgtgttccgctaaagcttg

SEQ ID NO: 2095663 - DNA, 25 bp, Homo sapien
caagatgaatgaagaactctcgtac

SEQ ID NO: 2095664 - DNA, 25 bp, Homo sapien
gtgctcagttagtactgtgggttga

SEQ ID NO: 2095665 - DNA, 25 bp, Homo sapien
tgaagaactctcgtactctctgatc

SEQ ID NO: 2095666 - DNA, 25 bp, Homo sapien
gttgagtgactaacaagatgaatga

SEQ ID NO: 2095667 - DNA, 25 bp, Homo sapien
atagtgggagtatcggcaccggctt

SEQ ID NO: 2095668 - DNA, 25 bp, Homo sapien
tgggagtatcggcaccggcttctcg

SEQ ID NO: 2095669 - DNA, 25 bp, Homo sapien
catacggttggaagttcaggtctgc

SEQ ID NO: 2095670 - DNA, 25 bp, Homo sapien
cggcttctcgcctacatacggttgg

SEQ ID NO: 2095671 - DNA, 25 bp, Homo sapien
ggtgtaaggactagcatcccaggcc

SEQ ID NO: 2095672 - DNA, 25 bp, Homo sapien
caaggtctcttggattagcctccgc

SEQ ID NO: 2095673 - DNA, 25 bp, Homo sapien
cataacagtctgtcggtctgggcgc

SEQ ID NO: 2095674 - DNA, 25 bp, Homo sapien
cattaagatcaagacctcgggatac

SEQ ID NO: 2095675 - DNA, 25 bp, Homo sapien
gtatgtttccaatacttccttacat

SEQ ID NO: 2095676 - DNA, 25 bp, Homo sapien
gcatatctttaacatgcctggaatc

SEQ ID NO: 2095677 - DNA, 25 bp, Homo sapien
gaattagttatgtcttcaaatggct

SEQ ID NO: 2095678 - DNA, 25 bp, Homo sapien
ggaatcttccagtagcctggtacaa

SEQ ID NO: 2095679 - DNA, 25 bp, Homo sapien
gcaatttcccctagattagacaaaa

SEQ ID NO: 2095680 - DNA, 25 bp, Homo sapien
gacaaaatgcatacaaggacctgaa

SEQ ID NO: 2095681 - DNA, 25 bp, Homo sapien
taaccaagggttagtgacaaaatgc

SEQ ID NO: 2095682 - DNA, 25 bp, Homo sapien
tatgagtagagaaattgaggcctag

SEQ ID NO: 2095683 - DNA, 25 bp, Homo sapien
ggaaatatactatctcaagtggttg

SEQ ID NO: 2095684 - DNA, 25 bp, Homo sapien
caaaatcacccttggttaacagtca

SEQ ID NO: 2095685 - DNA, 25 bp, Homo sapien
tagctgtaacaaccaatactgtcca

SEQ ID NO: 2095686 - DNA, 25 bp, Homo sapien
cctgtagattgtagggtgttcagcc

SEQ ID NO: 2095687 - DNA, 25 bp, Homo sapien
ttctgaattaaatatggattgtcca

SEQ ID NO: 2095688 - DNA, 25 bp, Homo sapien
tggccctcctcattcaggaaagcca

SEQ ID NO: 2095689 - DNA, 25 bp, Homo sapien
cttggccctcctcattcaggaaagc

SEQ ID NO: 2095690 - DNA, 25 bp, Homo sapien
ggccctcctcattcaggaaagccat

SEQ ID NO: 2095691 - DNA, 25 bp, Homo sapien
ttggccctcctcattcaggaaagcc

SEQ ID NO: 2095692 - DNA, 25 bp, Homo sapien
ctcgcgcctccgcttcctctcggac

SEQ ID NO: 2095693 - DNA, 25 bp, Homo sapien
agtcctgccggaggccgacgggagc

SEQ ID NO: 2095694 - DNA, 25 bp, Homo sapien
tcgcgcctccgcttcctctcggact

SEQ ID NO: 2095695 - DNA, 25 bp, Homo sapien
gctcagtcctgccggaggccgacgg

SEQ ID NO: 2095696 - DNA, 25 bp, Homo sapien
acactgccacagctaccaccaactt

SEQ ID NO: 2095697 - DNA, 25 bp, Homo sapien
cataaaatgtcagtaaaaacactgc

SEQ ID NO: 2095698 - DNA, 25 bp, Homo sapien
aactttgcagcacctgctaccctca

SEQ ID NO: 2095699 - DNA, 25 bp, Homo sapien
gccacagctaccaccaactttgcag

SEQ ID NO: 2095700 - DNA, 25 bp, Homo sapien
caatgctgatcttgcaaatagattt

SEQ ID NO: 2095701 - DNA, 25 bp, Homo sapien
ccaatgctgatcttgcaaatagatt

SEQ ID NO: 2095702 - DNA, 25 bp, Homo sapien
ttttgggtcccaccacgttggctgc

SEQ ID NO: 2095703 - DNA, 25 bp, Homo sapien
gattagtaatagatgtgctccccaa

SEQ ID NO: 2095704 - DNA, 25 bp, Homo sapien
tgctccccaaatcagcaatgagccg

SEQ ID NO: 2095705 - DNA, 25 bp, Homo sapien
cagggcaagcttttgagatcccaca

SEQ ID NO: 2095706 - DNA, 25 bp, Homo sapien
gctttttgtcttaatgcccttccca

SEQ ID NO: 2095707 - DNA, 25 bp, Homo sapien
tcttgcttctgggggatgcatcctt

SEQ ID NO: 2095708 - DNA, 25 bp, Homo sapien
cttgcttctgggggatgcatccttc

SEQ ID NO: 2095709 - DNA, 25 bp, Homo sapien
aagaggtacatcaggagagtcggac

SEQ ID NO: 2095710 - DNA, 25 bp, Homo sapien
tatagctctcccattaagagtgaaa

SEQ ID NO: 2095711 - DNA, 25 bp, Homo sapien
agtgcgctttcttcaattctctcca

SEQ ID NO: 2095712 - DNA, 25 bp, Homo sapien
tacttttagggaaatgtgcggagac

SEQ ID NO: 2095713 - DNA, 25 bp, Homo sapien
tattgtgatattaaagcatgcctcc

SEQ ID NO: 2095714 - DNA, 25 bp, Homo sapien
gacttagctgtcctgaatgacctaa

SEQ ID NO: 2095715 - DNA, 25 bp, Homo sapien
aaccacttggtcaatgctgataaca

SEQ ID NO: 2095716 - DNA, 25 bp, Homo sapien
gaaaaacgtatgctagtattgctct

SEQ ID NO: 2095717 - DNA, 25 bp, Homo sapien
agtgctgccttacactgtgaatggc

SEQ ID NO: 2095718 - DNA, 25 bp, Homo sapien
gcttccaacttggtttacagctaaa

SEQ ID NO: 2095719 - DNA, 25 bp, Homo sapien
ttaggttcgaaatttaagtgctgcc

SEQ ID NO: 2095720 - DNA, 25 bp, Homo sapien
gaaattatccgaatagcttccaact

SEQ ID NO: 2095721 - DNA, 25 bp, Homo sapien
tcaattttcgaacttagcgaaggag

SEQ ID NO: 2095722 - DNA, 25 bp, Homo sapien
ttttcgaacttagcgaaggagcaca

SEQ ID NO: 2095723 - DNA, 25 bp, Homo sapien
ttcgaacttagcgaaggagcacagg

SEQ ID NO: 2095724 - DNA, 25 bp, Homo sapien
aacttagcgaaggagcacaggtggc

SEQ ID NO: 2095725 - DNA, 25 bp, Homo sapien
cggaggggagtgtctagctggctgc

SEQ ID NO: 2095726 - DNA, 25 bp, Homo sapien
ttgtactgctgtgattgacggcgga

SEQ ID NO: 2095727 - DNA, 25 bp, Homo sapien
tagctggctgcaaatatttgtcttt

SEQ ID NO: 2095728 - DNA, 25 bp, Homo sapien
cttgtactgctgtgattgacggcgg

SEQ ID NO: 2095729 - DNA, 25 bp, Homo sapien
gtgatttgccaatgattagcaaagg

SEQ ID NO: 2095730 - DNA, 25 bp, Homo sapien
tagcaaaggatacccaaaagaagcc

SEQ ID NO: 2095731 - DNA, 25 bp, Homo sapien
cattgatattgaaatgctccaggtc

SEQ ID NO: 2095732 - DNA, 25 bp, Homo sapien
aaaagaagccgcagtgaacagcaca

SEQ ID NO: 2095733 - DNA, 25 bp, Homo sapien
gctcagtgtgagataattgctcatt

SEQ ID NO: 2095734 - DNA, 25 bp, Homo sapien
tgtgagataattgctcattgctgtt

SEQ ID NO: 2095735 - DNA, 25 bp, Homo sapien
cagtgtgagataattgctcattgct

SEQ ID NO: 2095736 - DNA, 25 bp, Homo sapien
tttgctcagtgtgagataattgctc

SEQ ID NO: 2095737 - DNA, 25 bp, Homo sapien
tgcaagccaatagaatatgttctgg

SEQ ID NO: 2095738 - DNA, 25 bp, Homo sapien
ttttccctgagtacacacaaagctt

SEQ ID NO: 2095739 - DNA, 25 bp, Homo sapien
caaagcttcactgcaaggtccaatg

SEQ ID NO: 2095740 - DNA, 25 bp, Homo sapien
gctgtcttggcaacattaattccta

SEQ ID NO: 2095741 - DNA, 25 bp, Homo sapien
ctctggttgagaattgcttgcggta

SEQ ID NO: 2095742 - DNA, 25 bp, Homo sapien
tctagggtccgtggatttaaggagc

SEQ ID NO: 2095743 - DNA, 25 bp, Homo sapien
cccggaaaatgtcgtgtaagctatg

SEQ ID NO: 2095744 - DNA, 25 bp, Homo sapien
cttgcggtaaacacatctagggtcc

SEQ ID NO: 2095745 - DNA, 25 bp, Homo sapien
tcaactacagccaatacctttgagt

SEQ ID NO: 2095746 - DNA, 25 bp, Homo sapien
gccaatacctttgagtttttcatat

SEQ ID NO: 2095747 - DNA, 25 bp, Homo sapien
gatgatcaactacagccaatacctt

SEQ ID NO: 2095748 - DNA, 25 bp, Homo sapien
ctttggaagatgatcaactacagcc

SEQ ID NO: 2095749 - DNA, 25 bp, Homo sapien
gaagaacctaatgtatatgttacgg

SEQ ID NO: 2095750 - DNA, 25 bp, Homo sapien
tgagaagaacctaatgtatatgtta

SEQ ID NO: 2095751 - DNA, 25 bp, Homo sapien
ttttgagaagaacctaatgtatatg

SEQ ID NO: 2095752 - DNA, 25 bp, Homo sapien
agaagaacctaatgtatatgttacg

SEQ ID NO: 2095753 - DNA, 25 bp, Homo sapien
cacttgcaaagtcgttttctatgaa

SEQ ID NO: 2095754 - DNA, 25 bp, Homo sapien
cttgcaaagtcgttttctatgaatg

SEQ ID NO: 2095755 - DNA, 25 bp, Homo sapien
cagtaaccttccacttgcaaagtcg

SEQ ID NO: 2095756 - DNA, 25 bp, Homo sapien
ctagacagtaaccttccacttgcaa

SEQ ID NO: 2095757 - DNA, 25 bp, Homo sapien
gcttcagggacgtatcgtccagttg

SEQ ID NO: 2095758 - DNA, 25 bp, Homo sapien
tatcgtccagttgctctggctccat

SEQ ID NO: 2095759 - DNA, 25 bp, Homo sapien
ctggcatacgtttctacactggtga

SEQ ID NO: 2095760 - DNA, 25 bp, Homo sapien
tggcccatacggtgaagaaatgtac

SEQ ID NO: 2095761 - DNA, 25 bp, Homo sapien
ttgcatatcttcatcgaattcatct

SEQ ID NO: 2095762 - DNA, 25 bp, Homo sapien
ccccaagagtgcctatgatagttgt

SEQ ID NO: 2095763 - DNA, 25 bp, Homo sapien
tatctgtattaagggcgttagcctc

SEQ ID NO: 2095764 - DNA, 25 bp, Homo sapien
cctgcagttcctttagtattccgtc

SEQ ID NO: 2095765 - DNA, 25 bp, Homo sapien
gagactaatgtcatcaaagcagctg

SEQ ID NO: 2095766 - DNA, 25 bp, Homo sapien
gcctttccttgcaggttagccttag

SEQ ID NO: 2095767 - DNA, 25 bp, Homo sapien
atttatttagcgatgaaattatcat

SEQ ID NO: 2095768 - DNA, 25 bp, Homo sapien
ctttccttgcaggttagccttagtg

SEQ ID NO: 2095769 - DNA, 25 bp, Homo sapien
ccttgcaggttagccttagtgtcca

SEQ ID NO: 2095770 - DNA, 25 bp, Homo sapien
cctggctacctggagcttgccactt

SEQ ID NO: 2095771 - DNA, 25 bp, Homo sapien
tggctacctggagcttgccacttgg

SEQ ID NO: 2095772 - DNA, 25 bp, Homo sapien
ctggctacctggagcttgccacttg

SEQ ID NO: 2095773 - DNA, 25 bp, Homo sapien
accattttttggcacatgtcaccta

SEQ ID NO: 2095774 - DNA, 25 bp, Homo sapien
tcagccattgctgtggcaaccattt

SEQ ID NO: 2095775 - DNA, 25 bp, Homo sapien
tgctgtggcaaccattttttggcac

SEQ ID NO: 2095776 - DNA, 25 bp, Homo sapien
tcttcagccattgctgtggcaacca

SEQ ID NO: 2095777 - DNA, 25 bp, Homo sapien
tgtggaaaaaccagtagggagacca

SEQ ID NO: 2095778 - DNA, 25 bp, Homo sapien
gaaacagctgttagcatggtactgg

SEQ ID NO: 2095779 - DNA, 25 bp, Homo sapien
gagttctgaattgaatgtatcctgg

SEQ ID NO: 2095780 - DNA, 25 bp, Homo sapien
tgtatcctggaagctcagattttga

SEQ ID NO: 2095781 - DNA, 25 bp, Homo sapien
taatgtacaatattaccaacggtct

SEQ ID NO: 2095782 - DNA, 25 bp, Homo sapien
ggttgtttgtatgccttcctttgag

SEQ ID NO: 2095783 - DNA, 25 bp, Homo sapien
tccgaatctgtacgttgtccctttg

SEQ ID NO: 2095784 - DNA, 25 bp, Homo sapien
tctaacaattgtgaggtgatttcac

SEQ ID NO: 2095785 - DNA, 25 bp, Homo sapien
tcttctctcggctattctgtgaata

SEQ ID NO: 2095786 - DNA, 25 bp, Homo sapien
tggacatttgcctcacacgtgtgaa

SEQ ID NO: 2095787 - DNA, 25 bp, Homo sapien
tacagaactctgtaggccattagag

SEQ ID NO: 2095788 - DNA, 25 bp, Homo sapien
cacgtgtgaactcctggtggtctct

SEQ ID NO: 2095789 - DNA, 25 bp, Homo sapien
tgccttctctacccccgttctgtgg

SEQ ID NO: 2095790 - DNA, 25 bp, Homo sapien
aaaagtgaacaatgccttctctacc

SEQ ID NO: 2095791 - DNA, 25 bp, Homo sapien
cgttctgtggcccgtgctgctctgg

SEQ ID NO: 2095792 - DNA, 25 bp, Homo sapien
ttaaaaagtgaacaatgccttctct

SEQ ID NO: 2095793 - DNA, 25 bp, Homo sapien
tttctgggcccattgaacccagcct

SEQ ID NO: 2095794 - DNA, 25 bp, Homo sapien
tattcagttgatcagcttcgttgct

SEQ ID NO: 2095795 - DNA, 25 bp, Homo sapien
gagactcaatgttggcttgttcctt

SEQ ID NO: 2095796 - DNA, 25 bp, Homo sapien
ccttcttatgtgaatgatgactttc

SEQ ID NO: 2095797 - DNA, 25 bp, Homo sapien
gtgctgatttcttccggttgcccgt

SEQ ID NO: 2095798 - DNA, 25 bp, Homo sapien
taggcatctccctgcttgcctagtt

SEQ ID NO: 2095799 - DNA, 25 bp, Homo sapien
tgcttgcctagttctccatctgtgg

SEQ ID NO: 2095800 - DNA, 25 bp, Homo sapien
tgctgatttcttccggttgcccgtt

SEQ ID NO: 2095801 - DNA, 25 bp, Homo sapien
cagtgttaccaggatggcagctagg

SEQ ID NO: 2095802 - DNA, 25 bp, Homo sapien
gtgttaccaggatggcagctagggc

SEQ ID NO: 2095803 - DNA, 25 bp, Homo sapien
agtgttaccaggatggcagctaggg

SEQ ID NO: 2095804 - DNA, 25 bp, Homo sapien
ggaagccgctatcaccagagctctg

SEQ ID NO: 2095805 - DNA, 25 bp, Homo sapien
cagagctctcccacttgaggttaga

SEQ ID NO: 2095806 - DNA, 25 bp, Homo sapien
ggcctcaagatgacttccctcaatg

SEQ ID NO: 2095807 - DNA, 25 bp, Homo sapien
tgtagccacctttcctgaagacggg

SEQ ID NO: 2095808 - DNA, 25 bp, Homo sapien
gaaggcacccatagtttttgtctct

SEQ ID NO: 2095809 - DNA, 25 bp, Homo sapien
agggccagacctgagccaacatctt

SEQ ID NO: 2095810 - DNA, 25 bp, Homo sapien
tttcctgagaactgcctcctggtct

SEQ ID NO: 2095811 - DNA, 25 bp, Homo sapien
ctgccaaggtcaggctggatatccc

SEQ ID NO: 2095812 - DNA, 25 bp, Homo sapien
tgccgatacggcactcaagttggga

SEQ ID NO: 2095813 - DNA, 25 bp, Homo sapien
tacggcactcaagttgggaactgtg

SEQ ID NO: 2095814 - DNA, 25 bp, Homo sapien
cacaatgccgatacggcactcaagt

SEQ ID NO: 2095815 - DNA, 25 bp, Homo sapien
gaccacaatgccgatacggcactca

SEQ ID NO: 2095816 - DNA, 25 bp, Homo sapien
tggtttgaccctgatttctctcagg

SEQ ID NO: 2095817 - DNA, 25 bp, Homo sapien
aggttcagcaaagtggaatgccaac

SEQ ID NO: 2095818 - DNA, 25 bp, Homo sapien
gtgggttaatgccagatcctggctc

SEQ ID NO: 2095819 - DNA, 25 bp, Homo sapien
agtggaatgccaaccaagaactggg

SEQ ID NO: 2095820 - DNA, 25 bp, Homo sapien
tgggaagggccgtgacatttccaga

SEQ ID NO: 2095821 - DNA, 25 bp, Homo sapien
tggcttcagaagcagacttcttagg

SEQ ID NO: 2095822 - DNA, 25 bp, Homo sapien
gccgtgacatttccagaaacccttc

SEQ ID NO: 2095823 - DNA, 25 bp, Homo sapien
acttcttaggttgcagtcttgagac

SEQ ID NO: 2095824 - DNA, 25 bp, Homo sapien
gtgatgtgactcactccagggccca

SEQ ID NO: 2095825 - DNA, 25 bp, Homo sapien
ggccctcacaactgcagcgagagaa

SEQ ID NO: 2095826 - DNA, 25 bp, Homo sapien
cagtggtgcatggagacagcgtctt

SEQ ID NO: 2095827 - DNA, 25 bp, Homo sapien
catgaaaacaggtggtcccagctgc

SEQ ID NO: 2095828 - DNA, 25 bp, Homo sapien
cagtggagcgtgaaaaccaggtcct

SEQ ID NO: 2095829 - DNA, 25 bp, Homo sapien
tcctggctgcctggaattcataggg

SEQ ID NO: 2095830 - DNA, 25 bp, Homo sapien
ggaatttgccaagtacattgtacct

SEQ ID NO: 2095831 - DNA, 25 bp, Homo sapien
tacctctgtatatctaaagactggg

SEQ ID NO: 2095832 - DNA, 25 bp, Homo sapien
agctattggcctgctcttgtccatc

SEQ ID NO: 2095833 - DNA, 25 bp, Homo sapien
aaagctattggcctgctcttgtcca

SEQ ID NO: 2095834 - DNA, 25 bp, Homo sapien
gggaaagctattggcctgctcttgt

SEQ ID NO: 2095835 - DNA, 25 bp, Homo sapien
ggggaaagctattggcctgctcttg

SEQ ID NO: 2095836 - DNA, 25 bp, Homo sapien
gatcttgcacttcagttatgtcaca

SEQ ID NO: 2095837 - DNA, 25 bp, Homo sapien
ctgattatgattgagccacttctga

SEQ ID NO: 2095838 - DNA, 25 bp, Homo sapien
tcctgtttgacttctagtggagagt

SEQ ID NO: 2095839 - DNA, 25 bp, Homo sapien
tctgtggtcccactaaggatcttgc

SEQ ID NO: 2095840 - DNA, 25 bp, Homo sapien
aatccactttttcttcattgagcat

SEQ ID NO: 2095841 - DNA, 25 bp, Homo sapien
cagcaatggaaaaatccactttttc

SEQ ID NO: 2095842 - DNA, 25 bp, Homo sapien
agcaatggaaaaatccactttttct

SEQ ID NO: 2095843 - DNA, 25 bp, Homo sapien
aaaaatccactttttcttcattgag

SEQ ID NO: 2095844 - DNA, 25 bp, Homo sapien
tctgcagcgctttgctgattcacca

SEQ ID NO: 2095845 - DNA, 25 bp, Homo sapien
taatttctgctcgtggaggtgccgc

SEQ ID NO: 2095846 - DNA, 25 bp, Homo sapien
ctgccacactccactcgtgccgttc

SEQ ID NO: 2095847 - DNA, 25 bp, Homo sapien
gtgccgttcccccagcatcttaatt

SEQ ID NO: 2095848 - DNA, 25 bp, Homo sapien
tgtgctcatcttcgttattccctac

SEQ ID NO: 2095849 - DNA, 25 bp, Homo sapien
gcgacgcctaagtccagcagcttcc

SEQ ID NO: 2095850 - DNA, 25 bp, Homo sapien
tgcttgtgctccctagatccttcca

SEQ ID NO: 2095851 - DNA, 25 bp, Homo sapien
ccttccacccatttctcgtccactt

SEQ ID NO: 2095852 - DNA, 25 bp, Homo sapien
ctcctgctgcgctgcccaccccggg

SEQ ID NO: 2095853 - DNA, 25 bp, Homo sapien
ctgctgcgctgcccaccccgggggc

SEQ ID NO: 2095854 - DNA, 25 bp, Homo sapien
ctgctcctgctgcgctgcccacccc

SEQ ID NO: 2095855 - DNA, 25 bp, Homo sapien
gctcctgctgcgctgcccaccccgg

SEQ ID NO: 2095856 - DNA, 25 bp, Homo sapien
tcccctcgcactccccctccggaga

SEQ ID NO: 2095857 - DNA, 25 bp, Homo sapien
ctccggagaattccccgagaaggcg

SEQ ID NO: 2095858 - DNA, 25 bp, Homo sapien
gcgccggcttcggccccgggataga

SEQ ID NO: 2095859 - DNA, 25 bp, Homo sapien
cgagaaggcgggcgccggcttcggc

SEQ ID NO: 2095860 - DNA, 25 bp, Homo sapien
aagacgctcgaacgtggaaatcacg

SEQ ID NO: 2095861 - DNA, 25 bp, Homo sapien
ctcctccgggaagacccagagataa

SEQ ID NO: 2095862 - DNA, 25 bp, Homo sapien
aaagtaaagagttctcaggagtggg

SEQ ID NO: 2095863 - DNA, 25 bp, Homo sapien
gcaggctgaagactgcgtgcgtccc

SEQ ID NO: 2095864 - DNA, 25 bp, Homo sapien
cggcggcggcgagaccctgagctct

SEQ ID NO: 2095865 - DNA, 25 bp, Homo sapien
agccgcggcaccaccatcggggagt

SEQ ID NO: 2095866 - DNA, 25 bp, Homo sapien
agggtcccctcgagccggagacacg

SEQ ID NO: 2095867 - DNA, 25 bp, Homo sapien
gcggcgacggcgctatcgccaggag

SEQ ID NO: 2095868 - DNA, 25 bp, Homo sapien
tgactggcaatgaagtggccgagcc

SEQ ID NO: 2095869 - DNA, 25 bp, Homo sapien
gccgagccgggagaaacacgtcctc

SEQ ID NO: 2095870 - DNA, 25 bp, Homo sapien
cgagccgggagaaacacgtcctcaa

SEQ ID NO: 2095871 - DNA, 25 bp, Homo sapien
ggcgccgaggcgaagaagacagggt

SEQ ID NO: 2095872 - DNA, 25 bp, Homo sapien
gctctcctcgacctggtagcggctg

SEQ ID NO: 2095873 - DNA, 25 bp, Homo sapien
tccacgctctcctcgacctggtagc

SEQ ID NO: 2095874 - DNA, 25 bp, Homo sapien
ctcgacctggtagcggctgaagctg

SEQ ID NO: 2095875 - DNA, 25 bp, Homo sapien
gaagctggcgccgagcaggatggag

SEQ ID NO: 2095876 - DNA, 25 bp, Homo sapien
ttggagcggttgaccgggaagaggc

SEQ ID NO: 2095877 - DNA, 25 bp, Homo sapien
gagacggtgcttggagcggttgacc

SEQ ID NO: 2095878 - DNA, 25 bp, Homo sapien
aagaggctgttaacgaggttgcgct

SEQ ID NO: 2095879 - DNA, 25 bp, Homo sapien
tggaaggaggtgacgatgacccggc

SEQ ID NO: 2095880 - DNA, 25 bp, Homo sapien
ttaagatcaggtcggtgtgatgctg

SEQ ID NO: 2095881 - DNA, 25 bp, Homo sapien
agatcaggtcggtgtgatgctggtc

SEQ ID NO: 2095882 - DNA, 25 bp, Homo sapien
tcaggtcggtgtgatgctggtccag

SEQ ID NO: 2095883 - DNA, 25 bp, Homo sapien
ctttaagatcaggtcggtgtgatgc

SEQ ID NO: 2095884 - DNA, 25 bp, Homo sapien
cggggtggcggtagaggcgacgcgg

SEQ ID NO: 2095885 - DNA, 25 bp, Homo sapien
ctgcggggtggcggtagaggcgacg

SEQ ID NO: 2095886 - DNA, 25 bp, Homo sapien
gggtggcggtagaggcgacgcgggc

SEQ ID NO: 2095887 - DNA, 25 bp, Homo sapien
ggtggcggtagaggcgacgcgggca

SEQ ID NO: 2095888 - DNA, 25 bp, Homo sapien
gccgccgccgccccaactgttgcag

SEQ ID NO: 2095889 - DNA, 25 bp, Homo sapien
caagtagtaggactttccagaatgt

SEQ ID NO: 2095890 - DNA, 25 bp, Homo sapien
ccttgctggcccagttaccccaaag

SEQ ID NO: 2095891 - DNA, 25 bp, Homo sapien
cagaatgtcttctctcgttctgctc

SEQ ID NO: 2095892 - DNA, 25 bp, Homo sapien
tcttctctcgttctgctccttgctg

SEQ ID NO: 2095893 - DNA, 25 bp, Homo sapien
atagagatggctacctcgctccgga

SEQ ID NO: 2095894 - DNA, 25 bp, Homo sapien
tgctcagatgcacccaaataaaagt

SEQ ID NO: 2095895 - DNA, 25 bp, Homo sapien
taaaagtggattgatcggttccctc

SEQ ID NO: 2095896 - DNA, 25 bp, Homo sapien
tactgtgaaagacgaaggaactgcg

SEQ ID NO: 2095897 - DNA, 25 bp, Homo sapien
ggtccctagaccagcaagaacagca

SEQ ID NO: 2095898 - DNA, 25 bp, Homo sapien
agtggctctgaaagtgtggtcccta

SEQ ID NO: 2095899 - DNA, 25 bp, Homo sapien
catcctgcttgtatcttattggcca

SEQ ID NO: 2095900 - DNA, 25 bp, Homo sapien
gcatcaccttgcgaacctgtcagaa

SEQ ID NO: 2095901 - DNA, 25 bp, Homo sapien
atttaagacctgaaattttgaagat

SEQ ID NO: 2095902 - DNA, 25 bp, Homo sapien
tttaagacctgaaattttgaagatg

SEQ ID NO: 2095903 - DNA, 25 bp, Homo sapien
ttaagacctgaaattttgaagatgg

SEQ ID NO: 2095904 - DNA, 25 bp, Homo sapien
ctgtccagtgattccaccgaaattc

SEQ ID NO: 2095905 - DNA, 25 bp, Homo sapien
gcaaaattgtgtaagttgtccaaca

SEQ ID NO: 2095906 - DNA, 25 bp, Homo sapien
gtccagtgattccaccgaaattcca

SEQ ID NO: 2095907 - DNA, 25 bp, Homo sapien
agtgattccaccgaaattccaatct

SEQ ID NO: 2095908 - DNA, 25 bp, Homo sapien
aatctgagggtagggtgcgcactca

SEQ ID NO: 2095909 - DNA, 25 bp, Homo sapien
ttagcactgagtgctgaggaagctt

SEQ ID NO: 2095910 - DNA, 25 bp, Homo sapien
gctgctttcaacgtgtgaatctgag

SEQ ID NO: 2095911 - DNA, 25 bp, Homo sapien
aggacaccttccgtggaatctcggg

SEQ ID NO: 2095912 - DNA, 25 bp, Homo sapien
tttagagccctgtcctctattctgg

SEQ ID NO: 2095913 - DNA, 25 bp, Homo sapien
cgaatcagcactaataagaaactgg

SEQ ID NO: 2095914 - DNA, 25 bp, Homo sapien
tattctggggaaaaagctggtgcga

SEQ ID NO: 2095915 - DNA, 25 bp, Homo sapien
cgggcactctttagagccctgtcct

SEQ ID NO: 2095916 - DNA, 25 bp, Homo sapien
tatgtgctgatggagacaaattctc

SEQ ID NO: 2095917 - DNA, 25 bp, Homo sapien
ttggatgtcactaaaactgggctga

SEQ ID NO: 2095918 - DNA, 25 bp, Homo sapien
ggtgctgaaagtccccacgatggca

SEQ ID NO: 2095919 - DNA, 25 bp, Homo sapien
gagacagctgatgtgttcactggat

SEQ ID NO: 2095920 - DNA, 25 bp, Homo sapien
caaatgctggaatattgcccaagtt

SEQ ID NO: 2095921 - DNA, 25 bp, Homo sapien
gcaaatgctggaatattgcccaagt

SEQ ID NO: 2095922 - DNA, 25 bp, Homo sapien
gacaaatggatatggttaaactata

SEQ ID NO: 2095923 - DNA, 25 bp, Homo sapien
caaatggatatggttaaactataat

SEQ ID NO: 2095924 - DNA, 25 bp, Homo sapien
agacaaatggatatggttaaactat

SEQ ID NO: 2095925 - DNA, 25 bp, Homo sapien
acaaatggatatggttaaactataa

SEQ ID NO: 2095926 - DNA, 25 bp, Homo sapien
ctctctcaagagtatagatagccat

SEQ ID NO: 2095927 - DNA, 25 bp, Homo sapien
ggactctctcaagagtatagatagc

SEQ ID NO: 2095928 - DNA, 25 bp, Homo sapien
acatctacgactgtgcttagcactg

SEQ ID NO: 2095929 - DNA, 25 bp, Homo sapien
aagtaaactagtacatctacgactg

SEQ ID NO: 2095930 - DNA, 25 bp, Homo sapien
gtccttgttgtctctggctttcctt

SEQ ID NO: 2095931 - DNA, 25 bp, Homo sapien
ccttgttgtctctggctttccttgc

SEQ ID NO: 2095932 - DNA, 25 bp, Homo sapien
cttgagggtccttgttgtctctggc

SEQ ID NO: 2095933 - DNA, 25 bp, Homo sapien
gagggtccttgttgtctctggcttt

SEQ ID NO: 2095934 - DNA, 25 bp, Homo sapien
gacagtgtcgcagaagctggactcc

SEQ ID NO: 2095935 - DNA, 25 bp, Homo sapien
taacgttctgatacgcggctggtct

SEQ ID NO: 2095936 - DNA, 25 bp, Homo sapien
aaattggtccgattggtggcccgag

SEQ ID NO: 2095937 - DNA, 25 bp, Homo sapien
ccttggaacctggatcttggtgaca

SEQ ID NO: 2095938 - DNA, 25 bp, Homo sapien
aacacaggatggccatggtaaccac

SEQ ID NO: 2095939 - DNA, 25 bp, Homo sapien
atagagcaacacaggatggccatgg

SEQ ID NO: 2095940 - DNA, 25 bp, Homo sapien
ctgcatagagcaacacaggatggcc

SEQ ID NO: 2095941 - DNA, 25 bp, Homo sapien
gcatagagcaacacaggatggccat

SEQ ID NO: 2095942 - DNA, 25 bp, Homo sapien
ttatggtcaccaatccgagcaggcc

SEQ ID NO: 2095943 - DNA, 25 bp, Homo sapien
ctagccagggtttgctgcggacgca

SEQ ID NO: 2095944 - DNA, 25 bp, Homo sapien
ctagcatgacgaaagggactcccag

SEQ ID NO: 2095945 - DNA, 25 bp, Homo sapien
taagattgatgatcccggctgcagt

SEQ ID NO: 2095946 - DNA, 25 bp, Homo sapien
gaaacagaagaaagaagagtagtaa

SEQ ID NO: 2095947 - DNA, 25 bp, Homo sapien
aacagaagaaagaagagtagtaatt

SEQ ID NO: 2095948 - DNA, 25 bp, Homo sapien
cagaagaaagaagagtagtaattac

SEQ ID NO: 2095949 - DNA, 25 bp, Homo sapien
cagcaggcggaaacagaagaaagaa

SEQ ID NO: 2095950 - DNA, 25 bp, Homo sapien
tcctggccttttaggaacctagtca

SEQ ID NO: 2095951 - DNA, 25 bp, Homo sapien
tggccttttaggaacctagtcaaca

SEQ ID NO: 2095952 - DNA, 25 bp, Homo sapien
caaccgatgttatggccactatggc

SEQ ID NO: 2095953 - DNA, 25 bp, Homo sapien
aacctcttgaatccttggcccgcaa

SEQ ID NO: 2095954 - DNA, 25 bp, Homo sapien
gagtggacacactggaagcacgctg

SEQ ID NO: 2095955 - DNA, 25 bp, Homo sapien
tgggcatgccattttcgataacaga

SEQ ID NO: 2095956 - DNA, 25 bp, Homo sapien
ggcacgaccgggtagacagaccacc

SEQ ID NO: 2095957 - DNA, 25 bp, Homo sapien
ggacttgtgcccccaagtcctgttc

SEQ ID NO: 2095958 - DNA, 25 bp, Homo sapien
tatctgggaatcctgggtcaaagac

SEQ ID NO: 2095959 - DNA, 25 bp, Homo sapien
tcattccctgggcacgaccgggtag

SEQ ID NO: 2095960 - DNA, 25 bp, Homo sapien
tgaggagttgccaacgggaactgtt

SEQ ID NO: 2095961 - DNA, 25 bp, Homo sapien
gaggagttgccaacgggaactgtta

SEQ ID NO: 2095962 - DNA, 25 bp, Homo sapien
cctggatgatacaacatcccagggg

SEQ ID NO: 2095963 - DNA, 25 bp, Homo sapien
gatgatacaacatcccaggggattc

SEQ ID NO: 2095964 - DNA, 25 bp, Homo sapien
caaagtcccaagtctgttcacaagg

SEQ ID NO: 2095965 - DNA, 25 bp, Homo sapien
cagcaagcggaactctgacgccaaa

SEQ ID NO: 2095966 - DNA, 25 bp, Homo sapien
tctgttaaatctgaccagtgggcct

SEQ ID NO: 2095967 - DNA, 25 bp, Homo sapien
tcatttgagggccaggtcgcagcct

SEQ ID NO: 2095968 - DNA, 25 bp, Homo sapien
aaaagaccagagcagaagtttaaag

SEQ ID NO: 2095969 - DNA, 25 bp, Homo sapien
gcagaaaaagaccagagcagaagtt

SEQ ID NO: 2095970 - DNA, 25 bp, Homo sapien
taagagggcagaaaaagaccagagc

SEQ ID NO: 2095971 - DNA, 25 bp, Homo sapien
gggcagaaaaagaccagagcagaag

SEQ ID NO: 2095972 - DNA, 25 bp, Homo sapien
tcaaaagtcccatataatccatgac

SEQ ID NO: 2095973 - DNA, 25 bp, Homo sapien
tctctctttaacatgttggtcttct

SEQ ID NO: 2095974 - DNA, 25 bp, Homo sapien
tttcaaaagtcccatataatccatg

SEQ ID NO: 2095975 - DNA, 25 bp, Homo sapien
tgctgcagttctctctttaacatgt

SEQ ID NO: 2095976 - DNA, 25 bp, Homo sapien
caatggtttgtgtcgcggttgctac

SEQ ID NO: 2095977 - DNA, 25 bp, Homo sapien
caaaaacattctggaggccactaca

SEQ ID NO: 2095978 - DNA, 25 bp, Homo sapien
ggatatccgcacaaaccccttggtg

SEQ ID NO: 2095979 - DNA, 25 bp, Homo sapien
gaatctggccgtcaggagaaacctg

SEQ ID NO: 2095980 - DNA, 25 bp, Homo sapien
ggcaatgcctgtttcctatctttaa

SEQ ID NO: 2095981 - DNA, 25 bp, Homo sapien
cttgataagacctaaggtgaaaata

SEQ ID NO: 2095982 - DNA, 25 bp, Homo sapien
gcaatgcctgtttcctatctttaaa

SEQ ID NO: 2095983 - DNA, 25 bp, Homo sapien
aatctctttggtcttgataagacct

SEQ ID NO: 2095984 - DNA, 25 bp, Homo sapien
gggcctgggcaacgtatacagcctt

SEQ ID NO: 2095985 - DNA, 25 bp, Homo sapien
aaaccctttagtggtgtgacctgag

SEQ ID NO: 2095986 - DNA, 25 bp, Homo sapien
taaggaagctacatctctaaaaggg

SEQ ID NO: 2095987 - DNA, 25 bp, Homo sapien
tacaaagcttctcagcgtcaggact

SEQ ID NO: 2095988 - DNA, 25 bp, Homo sapien
gaagactgaacgactgtgtaatgca

SEQ ID NO: 2095989 - DNA, 25 bp, Homo sapien
gaataatagcctagttgcgggcccc

SEQ ID NO: 2095990 - DNA, 25 bp, Homo sapien
gctttaagccgaggtgctccacgtg

SEQ ID NO: 2095991 - DNA, 25 bp, Homo sapien
gtaatgcattagctacaatcccctg

SEQ ID NO: 2095992 - DNA, 25 bp, Homo sapien
catttgtgtccaagaggttctgcct

SEQ ID NO: 2095993 - DNA, 25 bp, Homo sapien
cataatgccacttacgattgggtga

SEQ ID NO: 2095994 - DNA, 25 bp, Homo sapien
catacataagcgtggccatggagga

SEQ ID NO: 2095995 - DNA, 25 bp, Homo sapien
caaggtcctcatttggagcggtata

SEQ ID NO: 2095996 - DNA, 25 bp, Homo sapien
taacagttgtaaccaccacagggag

SEQ ID NO: 2095997 - DNA, 25 bp, Homo sapien
ggcactgcctattcaggtgaacgga

SEQ ID NO: 2095998 - DNA, 25 bp, Homo sapien
tgcacagaggccatagctctccggt

SEQ ID NO: 2095999 - DNA, 25 bp, Homo sapien
tcaaacaaatcagctgggcagcagc

SEQ ID NO: 2096000 - DNA, 25 bp, Homo sapien
tccctgttatactctatgccaaggt

SEQ ID NO: 2096001 - DNA, 25 bp, Homo sapien
tgaaatgcaccggttttcccgtcaa

SEQ ID NO: 2096002 - DNA, 25 bp, Homo sapien
taaatggatgttgcctatcaccagg

SEQ ID NO: 2096003 - DNA, 25 bp, Homo sapien
ccgtcaaactgatgctagggatcaa

SEQ ID NO: 2096004 - DNA, 25 bp, Homo sapien
tattatgaccagaatcacccacttg

SEQ ID NO: 2096005 - DNA, 25 bp, Homo sapien
gacaagctgtggtcttacgatctat

SEQ ID NO: 2096006 - DNA, 25 bp, Homo sapien
tctagggtgaggatcttttccaaca

SEQ ID NO: 2096007 - DNA, 25 bp, Homo sapien
tctgtctcaaaactgaccaagctga

SEQ ID NO: 2096008 - DNA, 25 bp, Homo sapien
tgtataaactcgatgtgcaagcatg

SEQ ID NO: 2096009 - DNA, 25 bp, Homo sapien
gcaagcatgaaagatcgccctctgg

SEQ ID NO: 2096010 - DNA, 25 bp, Homo sapien
gactccatgtatttggcatgagcca

SEQ ID NO: 2096011 - DNA, 25 bp, Homo sapien
tggaattgccaatcatcagtgggat

SEQ ID NO: 2096012 - DNA, 25 bp, Homo sapien
ccccatctcctatctcatctacctc

SEQ ID NO: 2096013 - DNA, 25 bp, Homo sapien
cccatctcctatctcatctacctct

SEQ ID NO: 2096014 - DNA, 25 bp, Homo sapien
tctcatctacctcttgccggttcag

SEQ ID NO: 2096015 - DNA, 25 bp, Homo sapien
catctacctcttgccggttcaggta

SEQ ID NO: 2096016 - DNA, 25 bp, Homo sapien
agtggatctttgggattatgggtga

SEQ ID NO: 2096017 - DNA, 25 bp, Homo sapien
tcatcagatcttgagtctttgggcc

SEQ ID NO: 2096018 - DNA, 25 bp, Homo sapien
cagttcatcagatcttgagtctttg

SEQ ID NO: 2096019 - DNA, 25 bp, Homo sapien
tcacagttcatcagatcttgagtct

SEQ ID NO: 2096020 - DNA, 25 bp, Homo sapien
tgctgcagggaagacttgttaatag

SEQ ID NO: 2096021 - DNA, 25 bp, Homo sapien
tgaagtattggcgggcagagctctc

SEQ ID NO: 2096022 - DNA, 25 bp, Homo sapien
gggcagagctctcaaaggtaagctt

SEQ ID NO: 2096023 - DNA, 25 bp, Homo sapien
tttagcaaggttcctgcttcattct

SEQ ID NO: 2096024 - DNA, 25 bp, Homo sapien
tatcagaaagggttcagacaggaaa

SEQ ID NO: 2096025 - DNA, 25 bp, Homo sapien
gagggataagtctttatcaccccta

SEQ ID NO: 2096026 - DNA, 25 bp, Homo sapien
tgaccatataggagataaaaagagg

SEQ ID NO: 2096027 - DNA, 25 bp, Homo sapien
ccacagagacattaagtccttcata

SEQ ID NO: 2096028 - DNA, 25 bp, Homo sapien
tctaagatggcttgtattatctttg

SEQ ID NO: 2096029 - DNA, 25 bp, Homo sapien
tatctttgtctaaccacagagacat

SEQ ID NO: 2096030 - DNA, 25 bp, Homo sapien
taagtccttcatatgatggatagac

SEQ ID NO: 2096031 - DNA, 25 bp, Homo sapien
ctgattgtaaatcatgagacgtctc

SEQ ID NO: 2096032 - DNA, 25 bp, Homo sapien
tcatgagacgtctctatatacattc

SEQ ID NO: 2096033 - DNA, 25 bp, Homo sapien
tagctctcagagtatctgcttcctt

SEQ ID NO: 2096034 - DNA, 25 bp, Homo sapien
cacagttcctgatgccaattgcttt

SEQ ID NO: 2096035 - DNA, 25 bp, Homo sapien
cacttcttggaaaagcccacctgag

SEQ ID NO: 2096036 - DNA, 25 bp, Homo sapien
tttagcactgtttccatacggagcc

SEQ ID NO: 2096037 - DNA, 25 bp, Homo sapien
cagtcttatatagctgctctgggca

SEQ ID NO: 2096038 - DNA, 25 bp, Homo sapien
gaacggttgtctgacttagtgcctc

SEQ ID NO: 2096039 - DNA, 25 bp, Homo sapien
ctggtattcacactatcgtctctat

SEQ ID NO: 2096040 - DNA, 25 bp, Homo sapien
ggtattcacactatcgtctctataa

SEQ ID NO: 2096041 - DNA, 25 bp, Homo sapien
cacactatcgtctctataattcaac

SEQ ID NO: 2096042 - DNA, 25 bp, Homo sapien
tatcgtctctataattcaacatagt

SEQ ID NO: 2096043 - DNA, 25 bp, Homo sapien
actccttctgctggtcctcttgaga

SEQ ID NO: 2096044 - DNA, 25 bp, Homo sapien
ccactccttctgctggtcctcttga

SEQ ID NO: 2096045 - DNA, 25 bp, Homo sapien
cttccactccttctgctggtcctct

SEQ ID NO: 2096046 - DNA, 25 bp, Homo sapien
tccttctgctggtcctcttgagaca

SEQ ID NO: 2096047 - DNA, 25 bp, Homo sapien
ccttggttactaagccacagctggg

SEQ ID NO: 2096048 - DNA, 25 bp, Homo sapien
ttccttggttactaagccacagctg

SEQ ID NO: 2096049 - DNA, 25 bp, Homo sapien
tgtgccgactgctggatcagaagga

SEQ ID NO: 2096050 - DNA, 25 bp, Homo sapien
ttttccttggttactaagccacagc

SEQ ID NO: 2096051 - DNA, 25 bp, Homo sapien
tgtctcagatatagctttgggagtt

SEQ ID NO: 2096052 - DNA, 25 bp, Homo sapien
cacaattgagatggctttgaaatgt

SEQ ID NO: 2096053 - DNA, 25 bp, Homo sapien
acaattgagatggctttgaaatgta

SEQ ID NO: 2096054 - DNA, 25 bp, Homo sapien
caattgagatggctttgaaatgtat

SEQ ID NO: 2096055 - DNA, 25 bp, Homo sapien
tgttccaggtttgatctcaatctgt

SEQ ID NO: 2096056 - DNA, 25 bp, Homo sapien
tgggtcagcagtttcacccttcatc

SEQ ID NO: 2096057 - DNA, 25 bp, Homo sapien
taggtgtctacttcttgtgcaaagg

SEQ ID NO: 2096058 - DNA, 25 bp, Homo sapien
cgtaataggtatttttgggtcagca

SEQ ID NO: 2096059 - DNA, 25 bp, Homo sapien
tagtcctcttaagtgtggcagggat

SEQ ID NO: 2096060 - DNA, 25 bp, Homo sapien
tccatttgaatgtaacccttgaggc

SEQ ID NO: 2096061 - DNA, 25 bp, Homo sapien
tggaatattccagagtgataaagtt

SEQ ID NO: 2096062 - DNA, 25 bp, Homo sapien
gaatgtaacccttgaggctgcaaac

SEQ ID NO: 2096063 - DNA, 25 bp, Homo sapien
ctgaacacccatgaagtgtcagagt

SEQ ID NO: 2096064 - DNA, 25 bp, Homo sapien
cacccatgaagtgtcagagttgatc

SEQ ID NO: 2096065 - DNA, 25 bp, Homo sapien
gaacacccatgaagtgtcagagttg

SEQ ID NO: 2096066 - DNA, 25 bp, Homo sapien
aacacccatgaagtgtcagagttga

SEQ ID NO: 2096067 - DNA, 25 bp, Homo sapien
gagcagcgggttgtataatcaacaa

SEQ ID NO: 2096068 - DNA, 25 bp, Homo sapien
gggtagtgtgacctttttcaggatg

SEQ ID NO: 2096069 - DNA, 25 bp, Homo sapien
cctggtttctcaattaaatgagagc

SEQ ID NO: 2096070 - DNA, 25 bp, Homo sapien
ctttaaggtagtgaccactgaggta

SEQ ID NO: 2096071 - DNA, 25 bp, Homo sapien
tcagaatataatgactggcaaagct

SEQ ID NO: 2096072 - DNA, 25 bp, Homo sapien
ttcagaatataatgactggcaaagc

SEQ ID NO: 2096073 - DNA, 25 bp, Homo sapien
cagtaatcgacagttattcagaata

SEQ ID NO: 2096074 - DNA, 25 bp, Homo sapien
ttgacacaatgtgtcagtaatcgac

SEQ ID NO: 2096075 - DNA, 25 bp, Homo sapien
ctttccacttgggccagtcatcagt

SEQ ID NO: 2096076 - DNA, 25 bp, Homo sapien
tccacttgggccagtcatcagtgcc

SEQ ID NO: 2096077 - DNA, 25 bp, Homo sapien
ttccacttgggccagtcatcagtgc

SEQ ID NO: 2096078 - DNA, 25 bp, Homo sapien
ccacttgggccagtcatcagtgccc

SEQ ID NO: 2096079 - DNA, 25 bp, Homo sapien
gaggaactcgaacacctagaaaatc

SEQ ID NO: 2096080 - DNA, 25 bp, Homo sapien
tttagaggaggaactcgaacaccta

SEQ ID NO: 2096081 - DNA, 25 bp, Homo sapien
tctgactgtttatctaacacattca

SEQ ID NO: 2096082 - DNA, 25 bp, Homo sapien
gtttatctaacacattcaacaccac

SEQ ID NO: 2096083 - DNA, 25 bp, Homo sapien
ggatgattatgcgacttatgagtgt

SEQ ID NO: 2096084 - DNA, 25 bp, Homo sapien
agaaacaggtggtaggtaatggaca

SEQ ID NO: 2096085 - DNA, 25 bp, Homo sapien
ggtaatggacagtgtcagcttcttc

SEQ ID NO: 2096086 - DNA, 25 bp, Homo sapien
tgtcagcttcttccgtggatgatta

SEQ ID NO: 2096087 - DNA, 25 bp, Homo sapien
ttaactcgcaaggaagcccacttct

SEQ ID NO: 2096088 - DNA, 25 bp, Homo sapien
ccatcgtgggtctccagtcgtgcaa

SEQ ID NO: 2096089 - DNA, 25 bp, Homo sapien
tctgtgttccaataagtcaggatca

SEQ ID NO: 2096090 - DNA, 25 bp, Homo sapien
tctcttgtaaaaggagcaactcctg

SEQ ID NO: 2096091 - DNA, 25 bp, Homo sapien
ttttgagtgaaggttattgaagctg

SEQ ID NO: 2096092 - DNA, 25 bp, Homo sapien
gattctcttcatatgtgagtgagac

SEQ ID NO: 2096093 - DNA, 25 bp, Homo sapien
gagtgagacattaatgtctttgtcc

SEQ ID NO: 2096094 - DNA, 25 bp, Homo sapien
tgtaccagtcatgctctccttcatc

SEQ ID NO: 2096095 - DNA, 25 bp, Homo sapien
cagccccaggtgcatatgttctttc

SEQ ID NO: 2096096 - DNA, 25 bp, Homo sapien
ttcatgaatcttggggactgatctt

SEQ ID NO: 2096097 - DNA, 25 bp, Homo sapien
tttcccctgatgagatccccacagt

SEQ ID NO: 2096098 - DNA, 25 bp, Homo sapien
tctgcaccccagttgactgctcatt

SEQ ID NO: 2096099 - DNA, 25 bp, Homo sapien
tgtactcgatttttccatcgtaatg

SEQ ID NO: 2096100 - DNA, 25 bp, Homo sapien
gcatttgtactcgatttttccatcg

SEQ ID NO: 2096101 - DNA, 25 bp, Homo sapien
cgatttttccatcgtaatgtgacat

SEQ ID NO: 2096102 - DNA, 25 bp, Homo sapien
ttttgcatttgtactcgatttttcc

SEQ ID NO: 2096103 - DNA, 25 bp, Homo sapien
tcctcttgatggtggagaaaatccc

SEQ ID NO: 2096104 - DNA, 25 bp, Homo sapien
gggtgtaagacaaggcttcagatgc

SEQ ID NO: 2096105 - DNA, 25 bp, Homo sapien
tggagaaaatcccatcacactccct

SEQ ID NO: 2096106 - DNA, 25 bp, Homo sapien
tgtgtttcaacactccaggggtgta

SEQ ID NO: 2096107 - DNA, 25 bp, Homo sapien
catttcctcaggtaaaacttgcaat

SEQ ID NO: 2096108 - DNA, 25 bp, Homo sapien
caaggggctaaagtctgtagcaggg

SEQ ID NO: 2096109 - DNA, 25 bp, Homo sapien
tgtagcccctagaaggaaaggcaag

SEQ ID NO: 2096110 - DNA, 25 bp, Homo sapien
ggcctggacatttcctcaggtaaaa

SEQ ID NO: 2096111 - DNA, 25 bp, Homo sapien
ttacgctgccatcttaaactcttgc

SEQ ID NO: 2096112 - DNA, 25 bp, Homo sapien
tgtccacatggagatcacaagcctt

SEQ ID NO: 2096113 - DNA, 25 bp, Homo sapien
tccacatggagatcacaagcctttt

SEQ ID NO: 2096114 - DNA, 25 bp, Homo sapien
gtccacatggagatcacaagccttt

SEQ ID NO: 2096115 - DNA, 25 bp, Homo sapien
gctttgattttaatacgatctcagg

SEQ ID NO: 2096116 - DNA, 25 bp, Homo sapien
caagtgttcctcttggatgctttga

SEQ ID NO: 2096117 - DNA, 25 bp, Homo sapien
catgtagacactggaaagcgcagtt

SEQ ID NO: 2096118 - DNA, 25 bp, Homo sapien
tctcaggccactcaacattatagcc

SEQ ID NO: 2096119 - DNA, 25 bp, Homo sapien
tggagcatattcagttagaaattcg

SEQ ID NO: 2096120 - DNA, 25 bp, Homo sapien
tcattataatttcttggctgtccga

SEQ ID NO: 2096121 - DNA, 25 bp, Homo sapien
agttagaaattcgttcactgtgtcc

SEQ ID NO: 2096122 - DNA, 25 bp, Homo sapien
ggctgtccgatttctctggagcata

SEQ ID NO: 2096123 - DNA, 25 bp, Homo sapien
tgtttccagcatatgagaccaaggg

SEQ ID NO: 2096124 - DNA, 25 bp, Homo sapien
ccaagggagtctggcaaatgtgtcc

SEQ ID NO: 2096125 - DNA, 25 bp, Homo sapien
cagggtgccagctgtctagtcgagt

SEQ ID NO: 2096126 - DNA, 25 bp, Homo sapien
gctgtctagtcgagtagaaagatct

SEQ ID NO: 2096127 - DNA, 25 bp, Homo sapien
gaaattgtacattctgtacacaacc

SEQ ID NO: 2096128 - DNA, 25 bp, Homo sapien
cagatggggtgtagtaggctgcaga

SEQ ID NO: 2096129 - DNA, 25 bp, Homo sapien
tgcagaaattgtacattctgtacac

SEQ ID NO: 2096130 - DNA, 25 bp, Homo sapien
attgtacattctgtacacaacctgc

SEQ ID NO: 2096131 - DNA, 25 bp, Homo sapien
ctttggtgcatccaggttcctgagt

SEQ ID NO: 2096132 - DNA, 25 bp, Homo sapien
tgcatccaggttcctgagtgttcct

SEQ ID NO: 2096133 - DNA, 25 bp, Homo sapien
ggtgcatccaggttcctgagtgttc

SEQ ID NO: 2096134 - DNA, 25 bp, Homo sapien
catccaggttcctgagtgttcctga

SEQ ID NO: 2096135 - DNA, 25 bp, Homo sapien
tcttatcattgagaggcctgtgagc

SEQ ID NO: 2096136 - DNA, 25 bp, Homo sapien
tcctggaagccggtattgtagtgtc

SEQ ID NO: 2096137 - DNA, 25 bp, Homo sapien
tacaaactcgtgcttactggtgcca

SEQ ID NO: 2096138 - DNA, 25 bp, Homo sapien
ttttgtaaccccagaggatggctga

SEQ ID NO: 2096139 - DNA, 25 bp, Homo sapien
tgggcctctaagtttggacctggga

SEQ ID NO: 2096140 - DNA, 25 bp, Homo sapien
agagagtgaccagatcggccagctc

SEQ ID NO: 2096141 - DNA, 25 bp, Homo sapien
agctgagatgccctagctggcagca

SEQ ID NO: 2096142 - DNA, 25 bp, Homo sapien
gaggaaagcgttatgtccctacacg

SEQ ID NO: 2096143 - DNA, 25 bp, Homo sapien
tggcagctcttcactttctggtggc

SEQ ID NO: 2096144 - DNA, 25 bp, Homo sapien
gtcccagggattcggttcaggcctg

SEQ ID NO: 2096145 - DNA, 25 bp, Homo sapien
ctggcctcctgttgcacgtggaagg

SEQ ID NO: 2096146 - DNA, 25 bp, Homo sapien
tctggtggctcatagataggaggcc

SEQ ID NO: 2096147 - DNA, 25 bp, Homo sapien
gaaaagccatatccctagaccattt

SEQ ID NO: 2096148 - DNA, 25 bp, Homo sapien
gccatatccctagaccatttcttct

SEQ ID NO: 2096149 - DNA, 25 bp, Homo sapien
acctgaaaagccatatccctagacc

SEQ ID NO: 2096150 - DNA, 25 bp, Homo sapien
tcaagtcggagcccttttcaggtcc

SEQ ID NO: 2096151 - DNA, 25 bp, Homo sapien
ccaggaccgggagcgttgcccaact

SEQ ID NO: 2096152 - DNA, 25 bp, Homo sapien
ggagcgttgcccaactctgtgaagg

SEQ ID NO: 2096153 - DNA, 25 bp, Homo sapien
tctgtgaaggcagcgacaaggtctc

SEQ ID NO: 2096154 - DNA, 25 bp, Homo sapien
gacctccgcgctgttttagacatct

SEQ ID NO: 2096155 - DNA, 25 bp, Homo sapien
gggcagctacaaccgcgtgcacgac

SEQ ID NO: 2096156 - DNA, 25 bp, Homo sapien
gaccacgcgagcgcagaaacacgtc

SEQ ID NO: 2096157 - DNA, 25 bp, Homo sapien
gaaacacgtcccttggcgcgagcgc

SEQ ID NO: 2096158 - DNA, 25 bp, Homo sapien
gccgccgggcagctacaaccgcgtg

SEQ ID NO: 2096159 - DNA, 25 bp, Homo sapien
gtccggagttgtcgcggctagcagc

SEQ ID NO: 2096160 - DNA, 25 bp, Homo sapien
gttgtcgcggctagcagcggcagcg

SEQ ID NO: 2096161 - DNA, 25 bp, Homo sapien
agcagaagcagccttcggtggcggc

SEQ ID NO: 2096162 - DNA, 25 bp, Homo sapien
tggcggccgtggtccggagttgtcg

SEQ ID NO: 2096163 - DNA, 25 bp, Homo sapien
cccgcgtagaagtggcactcctctt

SEQ ID NO: 2096164 - DNA, 25 bp, Homo sapien
gtggcactcctcttcgcgagtccgg

SEQ ID NO: 2096165 - DNA, 25 bp, Homo sapien
cgggatgcctctcccgggtacactt

SEQ ID NO: 2096166 - DNA, 25 bp, Homo sapien
gggtacacttgtccacccgcgtaga

SEQ ID NO: 2096167 - DNA, 25 bp, Homo sapien
ttcgctttgcttaggtgcagggagt

SEQ ID NO: 2096168 - DNA, 25 bp, Homo sapien
tgcttaggtgcagggagtggtcggc

SEQ ID NO: 2096169 - DNA, 25 bp, Homo sapien
gcagggagtggtcggcgaccgatac

SEQ ID NO: 2096170 - DNA, 25 bp, Homo sapien
tcttcgctttgcttaggtgcaggga

SEQ ID NO: 2096171 - DNA, 25 bp, Homo sapien
cagggggtgccgcccaagcccagat

SEQ ID NO: 2096172 - DNA, 25 bp, Homo sapien
ggtacacgtgtctccggaatctccc

SEQ ID NO: 2096173 - DNA, 25 bp, Homo sapien
cggggtacacgtgtctccggaatct

SEQ ID NO: 2096174 - DNA, 25 bp, Homo sapien
agggggtgccgcccaagcccagatt

SEQ ID NO: 2096175 - DNA, 25 bp, Homo sapien
gcagtctggtgaagcttacagactt

SEQ ID NO: 2096176 - DNA, 25 bp, Homo sapien
tcccagtagggcgctggcttggaaa

SEQ ID NO: 2096177 - DNA, 25 bp, Homo sapien
ttaaattctccatcgatcacagctg

SEQ ID NO: 2096178 - DNA, 25 bp, Homo sapien
cacgataatcagttaacttcagctc

SEQ ID NO: 2096179 - DNA, 25 bp, Homo sapien
aaccaagtatttcccacgataatca

SEQ ID NO: 2096180 - DNA, 25 bp, Homo sapien
tcttcaagtctgtcgccaaaagcga

SEQ ID NO: 2096181 - DNA, 25 bp, Homo sapien
caggccaaatgggtaaactgtgaat

SEQ ID NO: 2096182 - DNA, 25 bp, Homo sapien
catgctaccacttcagtatttatag

SEQ ID NO: 2096183 - DNA, 25 bp, Homo sapien
tgtgaatcaacagagcatgctacca

SEQ ID NO: 2096184 - DNA, 25 bp, Homo sapien
tcctccagattatggtaacccaatt

SEQ ID NO: 2096185 - DNA, 25 bp, Homo sapien
tactcttagataaagctattcctga

SEQ ID NO: 2096186 - DNA, 25 bp, Homo sapien
cagtggttttcgctatagaaatcac

SEQ ID NO: 2096187 - DNA, 25 bp, Homo sapien
gagttatctgtccatgctttaagag

SEQ ID NO: 2096188 - DNA, 25 bp, Homo sapien
tgaaaccaggagacatgggctgatg

SEQ ID NO: 2096189 - DNA, 25 bp, Homo sapien
gacaggcaggatacaaatggatgac

SEQ ID NO: 2096190 - DNA, 25 bp, Homo sapien
tctaacaggagggtactgacacagc

SEQ ID NO: 2096191 - DNA, 25 bp, Homo sapien
tgtggatttcaggttagggacgctc

SEQ ID NO: 2096192 - DNA, 25 bp, Homo sapien
gcctgagtcctctaggtatacacca

SEQ ID NO: 2096193 - DNA, 25 bp, Homo sapien
tagtcctttgagatctgatgggtca

SEQ ID NO: 2096194 - DNA, 25 bp, Homo sapien
gtggaatccttattggcccaagtcc

SEQ ID NO: 2096195 - DNA, 25 bp, Homo sapien
tgatgggtcaaatctgaaagaagtg

SEQ ID NO: 2096196 - DNA, 25 bp, Homo sapien
acttggttaatgttcaaatgattcc

SEQ ID NO: 2096197 - DNA, 25 bp, Homo sapien
tactggtagcaatacatgatacaat

SEQ ID NO: 2096198 - DNA, 25 bp, Homo sapien
agatttgtggttgcctaaagccagg

SEQ ID NO: 2096199 - DNA, 25 bp, Homo sapien
cgtgaaagaggctagtcataaaagc

SEQ ID NO: 2096200 - DNA, 25 bp, Homo sapien
tagtgtctcatccactgatctaccc

SEQ ID NO: 2096201 - DNA, 25 bp, Homo sapien
tgcttgaaccaaacgtagtgtctca

SEQ ID NO: 2096202 - DNA, 25 bp, Homo sapien
gaagatcattcagagtaatttgtct

SEQ ID NO: 2096203 - DNA, 25 bp, Homo sapien
ctccgtgtttgtcagtgtactggaa

SEQ ID NO: 2096204 - DNA, 25 bp, Homo sapien
actaccaggtttccagccagcaggg

SEQ ID NO: 2096205 - DNA, 25 bp, Homo sapien
tgtttcactaccaggtttccagcca

SEQ ID NO: 2096206 - DNA, 25 bp, Homo sapien
ccaggtttccagccagcagggcaga

SEQ ID NO: 2096207 - DNA, 25 bp, Homo sapien
taccaggtttccagccagcagggca

SEQ ID NO: 2096208 - DNA, 25 bp, Homo sapien
gccttagaatcctgttagacttaaa

SEQ ID NO: 2096209 - DNA, 25 bp, Homo sapien
cagccttagaatcctgttagactta

SEQ ID NO: 2096210 - DNA, 25 bp, Homo sapien
atcaagcactactgtcaatagttaa

SEQ ID NO: 2096211 - DNA, 25 bp, Homo sapien
tactgtcaatagttaatgaatactg

SEQ ID NO: 2096212 - DNA, 25 bp, Homo sapien
tttagagagcatggctacagatgtt

SEQ ID NO: 2096213 - DNA, 25 bp, Homo sapien
acatttagagagcatggctacagat

SEQ ID NO: 2096214 - DNA, 25 bp, Homo sapien
attaagtcaaacacatttagagagc

SEQ ID NO: 2096215 - DNA, 25 bp, Homo sapien
aattaagtcaaacacatttagagag

SEQ ID NO: 2096216 - DNA, 25 bp, Homo sapien
ggccaccaggctttcatggtatctt

SEQ ID NO: 2096217 - DNA, 25 bp, Homo sapien
tggccaccaggctttcatggtatct

SEQ ID NO: 2096218 - DNA, 25 bp, Homo sapien
ttggccaccaggctttcatggtatc

SEQ ID NO: 2096219 - DNA, 25 bp, Homo sapien
gccaccaggctttcatggtatcttc

SEQ ID NO: 2096220 - DNA, 25 bp, Homo sapien
ctgacattagttgcccatgccttga

SEQ ID NO: 2096221 - DNA, 25 bp, Homo sapien
gatttgtcctgcctactaatttcgg

SEQ ID NO: 2096222 - DNA, 25 bp, Homo sapien
caaagtacataatgagtagtctgac

SEQ ID NO: 2096223 - DNA, 25 bp, Homo sapien
tactaatttcggctattccaaaaga

SEQ ID NO: 2096224 - DNA, 25 bp, Homo sapien
tatcgaaatacttcagctttccagc

SEQ ID NO: 2096225 - DNA, 25 bp, Homo sapien
tcaattcagtttatcgaaatacttc

SEQ ID NO: 2096226 - DNA, 25 bp, Homo sapien
tcagtttatcgaaatacttcagctt

SEQ ID NO: 2096227 - DNA, 25 bp, Homo sapien
gtttatcgaaatacttcagctttcc

SEQ ID NO: 2096228 - DNA, 25 bp, Homo sapien
tgaaaccgtgaactttattgagaac

SEQ ID NO: 2096229 - DNA, 25 bp, Homo sapien
tattgagaactttcaagcatcataa

SEQ ID NO: 2096230 - DNA, 25 bp, Homo sapien
taatgaaaccgtgaactttattgag

SEQ ID NO: 2096231 - DNA, 25 bp, Homo sapien
aatgaaaccgtgaactttattgaga

SEQ ID NO: 2096232 - DNA, 25 bp, Homo sapien
gaggcacacgcatgtaatcctagat

SEQ ID NO: 2096233 - DNA, 25 bp, Homo sapien
aggcacacgcatgtaatcctagata

SEQ ID NO: 2096234 - DNA, 25 bp, Homo sapien
tcacagtgtcaacaagcacctctgg

SEQ ID NO: 2096235 - DNA, 25 bp, Homo sapien
taacttgtctctccatgccgtaatg

SEQ ID NO: 2096236 - DNA, 25 bp, Homo sapien
tgaaatagtcacaggagcgaacaca

SEQ ID NO: 2096237 - DNA, 25 bp, Homo sapien
taagtggagttaagagacctactgc

SEQ ID NO: 2096238 - DNA, 25 bp, Homo sapien
tcacggtgcagtagggagacagtca

SEQ ID NO: 2096239 - DNA, 25 bp, Homo sapien
tgtgccaggcatacagcagtgagca

SEQ ID NO: 2096240 - DNA, 25 bp, Homo sapien
cctgcattgtgagggatttagctcc

SEQ ID NO: 2096241 - DNA, 25 bp, Homo sapien
caaatgcccgcctattagagtgaca

SEQ ID NO: 2096242 - DNA, 25 bp, Homo sapien
tggccccggcggaagaagtgggcca

SEQ ID NO: 2096243 - DNA, 25 bp, Homo sapien
gctctatgataaggggcgctcgccc

SEQ ID NO: 2096244 - DNA, 25 bp, Homo sapien
ccacgcatgggcatttgggctctat

SEQ ID NO: 2096245 - DNA, 25 bp, Homo sapien
gcgggcagcactgcggtaggtggcg

SEQ ID NO: 2096246 - DNA, 25 bp, Homo sapien
agaataggccggtcctcgctgtagc

SEQ ID NO: 2096247 - DNA, 25 bp, Homo sapien
ctgtcctcagcaagggcgcggtctg

SEQ ID NO: 2096248 - DNA, 25 bp, Homo sapien
cggtctggtactcgtgcgtctttta

SEQ ID NO: 2096249 - DNA, 25 bp, Homo sapien
aactgattgagtgggaagctccgca

SEQ ID NO: 2096250 - DNA, 25 bp, Homo sapien
cctcagccgcccgagcaggtgggac

SEQ ID NO: 2096251 - DNA, 25 bp, Homo sapien
cagccgcccgagcaggtgggactac

SEQ ID NO: 2096252 - DNA, 25 bp, Homo sapien
ctcagccgcccgagcaggtgggact

SEQ ID NO: 2096253 - DNA, 25 bp, Homo sapien
ttgaatttcatgcttattaccatcc

SEQ ID NO: 2096254 - DNA, 25 bp, Homo sapien
ttaccatcctgtcatcacctactgt

SEQ ID NO: 2096255 - DNA, 25 bp, Homo sapien
tattaccatcctgtcatcacctact

SEQ ID NO: 2096256 - DNA, 25 bp, Homo sapien
gaatttcatgcttattaccatcctg

SEQ ID NO: 2096257 - DNA, 25 bp, Homo sapien
ttgattcatcttctgtgcttcattt

SEQ ID NO: 2096258 - DNA, 25 bp, Homo sapien
ctgtgcttcatttcctttaactttt

SEQ ID NO: 2096259 - DNA, 25 bp, Homo sapien
attcatcttctgtgcttcatttcct

SEQ ID NO: 2096260 - DNA, 25 bp, Homo sapien
tctgtgcttcatttcctttaacttt

SEQ ID NO: 2096261 - DNA, 25 bp, Homo sapien
agtgcagtagtcagagtaaaataag

SEQ ID NO: 2096262 - DNA, 25 bp, Homo sapien
tgcagtagtcagagtaaaataagga

SEQ ID NO: 2096263 - DNA, 25 bp, Homo sapien
gtgcagtagtcagagtaaaataagg

SEQ ID NO: 2096264 - DNA, 25 bp, Homo sapien
gcttttaagcgcaaagaagccccgc

SEQ ID NO: 2096265 - DNA, 25 bp, Homo sapien
gaggtgggacctctcatccaatgag

SEQ ID NO: 2096266 - DNA, 25 bp, Homo sapien
gctgcgcatttgaacattggcccgg

SEQ ID NO: 2096267 - DNA, 25 bp, Homo sapien
gagtgacggataaacaccagtcggc

SEQ ID NO: 2096268 - DNA, 25 bp, Homo sapien
gcccctgtacttgaacagtaggagg

SEQ ID NO: 2096269 - DNA, 25 bp, Homo sapien
ccctgtacttgaacagtaggaggag

SEQ ID NO: 2096270 - DNA, 25 bp, Homo sapien
ggcccctgtacttgaacagtaggag

SEQ ID NO: 2096271 - DNA, 25 bp, Homo sapien
cccctgtacttgaacagtaggagga

SEQ ID NO: 2096272 - DNA, 25 bp, Homo sapien
agccgcagtatgtcactgcagtcgg

SEQ ID NO: 2096273 - DNA, 25 bp, Homo sapien
cagtatgtcactgcagtcggcggca

SEQ ID NO: 2096274 - DNA, 25 bp, Homo sapien
tgcagtcggcggcagtggctgggcg

SEQ ID NO: 2096275 - DNA, 25 bp, Homo sapien
ccgcagtatgtcactgcagtcggcg

SEQ ID NO: 2096276 - DNA, 25 bp, Homo sapien
gagacctcaagacgtgaatcacccc

SEQ ID NO: 2096277 - DNA, 25 bp, Homo sapien
tgggctctcacaccggccgagacct

SEQ ID NO: 2096278 - DNA, 25 bp, Homo sapien
acaccggccgagacctcaagacgtg

SEQ ID NO: 2096279 - DNA, 25 bp, Homo sapien
aagacgtgaatcaccccactctggg

SEQ ID NO: 2096280 - DNA, 25 bp, Homo sapien
tcagttaagattacttgttcttcca

SEQ ID NO: 2096281 - DNA, 25 bp, Homo sapien
ttcagttaagattacttgttcttcc

SEQ ID NO: 2096282 - DNA, 25 bp, Homo sapien
tttcagttaagattacttgttcttc

SEQ ID NO: 2096283 - DNA, 25 bp, Homo sapien
cagttaagattacttgttcttccat

SEQ ID NO: 2096284 - DNA, 25 bp, Homo sapien
gtgacaggcaccgaacgcttgtccc

SEQ ID NO: 2096285 - DNA, 25 bp, Homo sapien
cttgtcccccgtcccgccactgttg

SEQ ID NO: 2096286 - DNA, 25 bp, Homo sapien
gagcaggggcggtaatggccttggc

SEQ ID NO: 2096287 - DNA, 25 bp, Homo sapien
ggtaatggccttggcgaaggtgaca

SEQ ID NO: 2096288 - DNA, 25 bp, Homo sapien
tcggcacttctgcaaccaggcagtg

SEQ ID NO: 2096289 - DNA, 25 bp, Homo sapien
ctttcggcacttctgcaaccaggca

SEQ ID NO: 2096290 - DNA, 25 bp, Homo sapien
cacttctgcaaccaggcagtggtaa

SEQ ID NO: 2096291 - DNA, 25 bp, Homo sapien
tctgcaaccaggcagtggtaaaagg

SEQ ID NO: 2096292 - DNA, 25 bp, Homo sapien
cagctcttttaacctgccctagtat

SEQ ID NO: 2096293 - DNA, 25 bp, Homo sapien
taacttcggcctgtgtagtcagtgg

SEQ ID NO: 2096294 - DNA, 25 bp, Homo sapien
gccctagtattcttaagtgcagcat

SEQ ID NO: 2096295 - DNA, 25 bp, Homo sapien
tagtcagtggttctacacagccgac

SEQ ID NO: 2096296 - DNA, 25 bp, Homo sapien
gcacttatacttacttaagcagctt

SEQ ID NO: 2096297 - DNA, 25 bp, Homo sapien
tatatctaactcttccgggtctcca

SEQ ID NO: 2096298 - DNA, 25 bp, Homo sapien
taagcagcttaaacacttccgagtc

SEQ ID NO: 2096299 - DNA, 25 bp, Homo sapien
ctgaagattgggacaaattaaagaa

SEQ ID NO: 2096300 - DNA, 25 bp, Homo sapien
acatggcgaagctagagactgtaac

SEQ ID NO: 2096301 - DNA, 25 bp, Homo sapien
atgtacatggcgaagctagagactg

SEQ ID NO: 2096302 - DNA, 25 bp, Homo sapien
acacggaagggccatgtacatggcg

SEQ ID NO: 2096303 - DNA, 25 bp, Homo sapien
cacggaagggccatgtacatggcga

SEQ ID NO: 2096304 - DNA, 25 bp, Homo sapien
catttatcatgatcatctactttat

SEQ ID NO: 2096305 - DNA, 25 bp, Homo sapien
ctttattgtgtaaaggatcttttag

SEQ ID NO: 2096306 - DNA, 25 bp, Homo sapien
catgatcatctactttattgtgtaa

SEQ ID NO: 2096307 - DNA, 25 bp, Homo sapien
ggtgtctactattccaaatggaggc

SEQ ID NO: 2096308 - DNA, 25 bp, Homo sapien
gaatacgtcaggtttacacggcagt

SEQ ID NO: 2096309 - DNA, 25 bp, Homo sapien
ggagctcacactcaggaagcgagaa

SEQ ID NO: 2096310 - DNA, 25 bp, Homo sapien
tcaggctacaactgtggactggcca

SEQ ID NO: 2096311 - DNA, 25 bp, Homo sapien
tgcagaatcagaggcctatcatagg

SEQ ID NO: 2096312 - DNA, 25 bp, Homo sapien
gaacatgtatttgcaaaaagcacac

SEQ ID NO: 2096313 - DNA, 25 bp, Homo sapien
gaaacaagtagccatggctgtctca

SEQ ID NO: 2096314 - DNA, 25 bp, Homo sapien
aacattccataaaagttgcagctgc

SEQ ID NO: 2096315 - DNA, 25 bp, Homo sapien
tctataatcactcatcacgaagaag

SEQ ID NO: 2096316 - DNA, 25 bp, Homo sapien
aatccacgggtcataggtaaaatag

SEQ ID NO: 2096317 - DNA, 25 bp, Homo sapien
gaagaagtcctcaagatacaataac

SEQ ID NO: 2096318 - DNA, 25 bp, Homo sapien
gatacaataacttgccaatccacgg

SEQ ID NO: 2096319 - DNA, 25 bp, Homo sapien
aaaagtcattgtaagcatttataac

SEQ ID NO: 2096320 - DNA, 25 bp, Homo sapien
tctcttcagaccctctgctccgaac

SEQ ID NO: 2096321 - DNA, 25 bp, Homo sapien
agcatttataactctgaactctctt

SEQ ID NO: 2096322 - DNA, 25 bp, Homo sapien
ctgaactctcttcagaccctctgct

SEQ ID NO: 2096323 - DNA, 25 bp, Homo sapien
cagaatttctgatcctatgccaaag

SEQ ID NO: 2096324 - DNA, 25 bp, Homo sapien
agaatttctgatcctatgccaaagc

SEQ ID NO: 2096325 - DNA, 25 bp, Homo sapien
tcagcctgctctcaagacccaattt

SEQ ID NO: 2096326 - DNA, 25 bp, Homo sapien
gacatttcagcctgctctcaagacc

SEQ ID NO: 2096327 - DNA, 25 bp, Homo sapien
atttcagcctgctctcaagacccaa

SEQ ID NO: 2096328 - DNA, 25 bp, Homo sapien
gcctgctctcaagacccaattttta

SEQ ID NO: 2096329 - DNA, 25 bp, Homo sapien
taccaagaagtgcatgctgctgcag

SEQ ID NO: 2096330 - DNA, 25 bp, Homo sapien
gctgctgcagcgacacctcattgca

SEQ ID NO: 2096331 - DNA, 25 bp, Homo sapien
agtactccttgtcgatcttgaacag

SEQ ID NO: 2096332 - DNA, 25 bp, Homo sapien
tgatggatggttcattccattctgc

SEQ ID NO: 2096333 - DNA, 25 bp, Homo sapien
tggaggttgtcatctacagcagcac

SEQ ID NO: 2096334 - DNA, 25 bp, Homo sapien
aggttgtcatctacagcagcactcc

SEQ ID NO: 2096335 - DNA, 25 bp, Homo sapien
ggaggttgtcatctacagcagcact

SEQ ID NO: 2096336 - DNA, 25 bp, Homo sapien
gaatggaggttgtcatctacagcag

SEQ ID NO: 2096337 - DNA, 25 bp, Homo sapien
tcaaacatgcaacaacgccactggt

SEQ ID NO: 2096338 - DNA, 25 bp, Homo sapien
gaaactctaagtaccagtgtgtaca

SEQ ID NO: 2096339 - DNA, 25 bp, Homo sapien
gattgccactttaaacagacctcat

SEQ ID NO: 2096340 - DNA, 25 bp, Homo sapien
cgccactggtaataaagctttggaa

SEQ ID NO: 2096341 - DNA, 25 bp, Homo sapien
gaattccatccggtctggcggagac

SEQ ID NO: 2096342 - DNA, 25 bp, Homo sapien
atggtgcccctgagcataacacaag

SEQ ID NO: 2096343 - DNA, 25 bp, Homo sapien
gacattcagctccttaagcctttga

SEQ ID NO: 2096344 - DNA, 25 bp, Homo sapien
taacaaacagtaccccgacattcag

SEQ ID NO: 2096345 - DNA, 25 bp, Homo sapien
tatcctttggactcttcattagggc

SEQ ID NO: 2096346 - DNA, 25 bp, Homo sapien
tttggactcttcattagggcttgtt

SEQ ID NO: 2096347 - DNA, 25 bp, Homo sapien
gactcttcattagggcttgttttgg

SEQ ID NO: 2096348 - DNA, 25 bp, Homo sapien
cttcattagggcttgttttggactt

SEQ ID NO: 2096349 - DNA, 25 bp, Homo sapien
aggcagtccggtttcatattctctc

SEQ ID NO: 2096350 - DNA, 25 bp, Homo sapien
ccgaggggtttactaggtctgaatg

SEQ ID NO: 2096351 - DNA, 25 bp, Homo sapien
tttactaggtctgaatgggtcagtc

SEQ ID NO: 2096352 - DNA, 25 bp, Homo sapien
caaattagtaggcagtccggtttca

SEQ ID NO: 2096353 - DNA, 25 bp, Homo sapien
actttgccacagttgacagattcac

SEQ ID NO: 2096354 - DNA, 25 bp, Homo sapien
ttgctactttgccacagttgacaga

SEQ ID NO: 2096355 - DNA, 25 bp, Homo sapien
ctgagcatcagttgctactttgcca

SEQ ID NO: 2096356 - DNA, 25 bp, Homo sapien
tgagcatcagttgctactttgccac

SEQ ID NO: 2096357 - DNA, 25 bp, Homo sapien
tcagaatccttgaattcagaaaaag

SEQ ID NO: 2096358 - DNA, 25 bp, Homo sapien
atagataggggttatattttcctca

SEQ ID NO: 2096359 - DNA, 25 bp, Homo sapien
gtggcatgcacggtcacagctgctg

SEQ ID NO: 2096360 - DNA, 25 bp, Homo sapien
aattcagaaaaagtaatagataggg

SEQ ID NO: 2096361 - DNA, 25 bp, Homo sapien
tacagttggttcgtttgaaccagga

SEQ ID NO: 2096362 - DNA, 25 bp, Homo sapien
acagttggttcgtttgaaccaggat

SEQ ID NO: 2096363 - DNA, 25 bp, Homo sapien
agaaagaaattgcactaattcctta

SEQ ID NO: 2096364 - DNA, 25 bp, Homo sapien
gaaattgcactaattccttaacatc

SEQ ID NO: 2096365 - DNA, 25 bp, Homo sapien
cacagttatcgtgaagggccccaga

SEQ ID NO: 2096366 - DNA, 25 bp, Homo sapien
gatgacacttaagacctacttgtga

SEQ ID NO: 2096367 - DNA, 25 bp, Homo sapien
tcaatgtagaactcagccttcttgg

SEQ ID NO: 2096368 - DNA, 25 bp, Homo sapien
tactctgaagggacgcacagttatc

SEQ ID NO: 2096369 - DNA, 25 bp, Homo sapien
tccttcatccatgaataactctgaa

SEQ ID NO: 2096370 - DNA, 25 bp, Homo sapien
cttccttcatccatgaataactctg

SEQ ID NO: 2096371 - DNA, 25 bp, Homo sapien
gaaactgctccaagtctatacaaca

SEQ ID NO: 2096372 - DNA, 25 bp, Homo sapien
aactgctccaagtctatacaacaga

SEQ ID NO: 2096373 - DNA, 25 bp, Homo sapien
tcttgtcccagtagggagtttgtca

SEQ ID NO: 2096374 - DNA, 25 bp, Homo sapien
tgcaaaggtcttgtcccagtaggga

SEQ ID NO: 2096375 - DNA, 25 bp, Homo sapien
tgtcaatttcgagcaacagcaaaaa

SEQ ID NO: 2096376 - DNA, 25 bp, Homo sapien
gggtatgtgtgttcgcttgtgtgca

SEQ ID NO: 2096377 - DNA, 25 bp, Homo sapien
gattttccccaataatgcttaagtg

SEQ ID NO: 2096378 - DNA, 25 bp, Homo sapien
ttagaggctaggaaacgaacttgca

SEQ ID NO: 2096379 - DNA, 25 bp, Homo sapien
tctaggctagactggaacttcttag

SEQ ID NO: 2096380 - DNA, 25 bp, Homo sapien
tatgtatatgtgttccacacccatg

SEQ ID NO: 2096381 - DNA, 25 bp, Homo sapien
cacaccaaggagcctgagtgaacat

SEQ ID NO: 2096382 - DNA, 25 bp, Homo sapien
tttcccgccactgggccggctgcgt

SEQ ID NO: 2096383 - DNA, 25 bp, Homo sapien
ttcccgccactgggccggctgcgtc

SEQ ID NO: 2096384 - DNA, 25 bp, Homo sapien
ctgcggctcagcgacgcggcttcta

SEQ ID NO: 2096385 - DNA, 25 bp, Homo sapien
caccgagtttgcagtacggccgtca

SEQ ID NO: 2096386 - DNA, 25 bp, Homo sapien
tctagaaccgggtgattgaactaaa

SEQ ID NO: 2096387 - DNA, 25 bp, Homo sapien
gtgattgaactaaaccttcgccgca

SEQ ID NO: 2096388 - DNA, 25 bp, Homo sapien
aaatcccagtacacgccgctgggcg

SEQ ID NO: 2096389 - DNA, 25 bp, Homo sapien
gagccggcgctttcttgccgcctag

SEQ ID NO: 2096390 - DNA, 25 bp, Homo sapien
ttcgtaaggtaaatccaggccgcca

SEQ ID NO: 2096391 - DNA, 25 bp, Homo sapien
tgcgaagctttcgaagccgccggtg

SEQ ID NO: 2096392 - DNA, 25 bp, Homo sapien
taaggtcagagccttttccgattaa

SEQ ID NO: 2096393 - DNA, 25 bp, Homo sapien
aggtcagagccttttccgattaaag

SEQ ID NO: 2096394 - DNA, 25 bp, Homo sapien
tcagagccttttccgattaaaggac

SEQ ID NO: 2096395 - DNA, 25 bp, Homo sapien
gccttttccgattaaaggacacagc

SEQ ID NO: 2096396 - DNA, 25 bp, Homo sapien
catttgcgaaatgtactctgcgaac

SEQ ID NO: 2096397 - DNA, 25 bp, Homo sapien
cgtggtacatttgaggaacgattca

SEQ ID NO: 2096398 - DNA, 25 bp, Homo sapien
gcgaactttttgtaaggatcttgta

SEQ ID NO: 2096399 - DNA, 25 bp, Homo sapien
gatcttgcatttcgtgcatttgcga

SEQ ID NO: 2096400 - DNA, 25 bp, Homo sapien
tgcacaaattgcgtgttttaggagt

SEQ ID NO: 2096401 - DNA, 25 bp, Homo sapien
tttgagctgaaatgtctttaagcat

SEQ ID NO: 2096402 - DNA, 25 bp, Homo sapien
tttaggagtcgaaatatcattttgt

SEQ ID NO: 2096403 - DNA, 25 bp, Homo sapien
tgtatgagataaccaagccctctgt

SEQ ID NO: 2096404 - DNA, 25 bp, Homo sapien
tcagtatttcatgtgttacatagaa

SEQ ID NO: 2096405 - DNA, 25 bp, Homo sapien
taggatccttaataagcttagcctc

SEQ ID NO: 2096406 - DNA, 25 bp, Homo sapien
attttacactgcatagtaggatcct

SEQ ID NO: 2096407 - DNA, 25 bp, Homo sapien
taagcttagcctctaagggggccac

SEQ ID NO: 2096408 - DNA, 25 bp, Homo sapien
acttgtaaccatggccatcagtatg

SEQ ID NO: 2096409 - DNA, 25 bp, Homo sapien
tacttgtaaccatggccatcagtat

SEQ ID NO: 2096410 - DNA, 25 bp, Homo sapien
taaaatgtacatcatgaaacgtcac

SEQ ID NO: 2096411 - DNA, 25 bp, Homo sapien
tgcaattcagatactatgtagatgt

SEQ ID NO: 2096412 - DNA, 25 bp, Homo sapien
tctgtataatttgaatgcaattcag

SEQ ID NO: 2096413 - DNA, 25 bp, Homo sapien
aaacacactacctacctggtgggct

SEQ ID NO: 2096414 - DNA, 25 bp, Homo sapien
ttagtttgcaagcatcatccactgc

SEQ ID NO: 2096415 - DNA, 25 bp, Homo sapien
tggacttcgggaaaatacgttcatc

SEQ ID NO: 2096416 - DNA, 25 bp, Homo sapien
ccattatatcagttactttggactt

SEQ ID NO: 2096417 - DNA, 25 bp, Homo sapien
tacataatcttgcatggtgacaaca

SEQ ID NO: 2096418 - DNA, 25 bp, Homo sapien
tatggatctcttgcgttactggtct

SEQ ID NO: 2096419 - DNA, 25 bp, Homo sapien
tagacggtttgagatcactccagac

SEQ ID NO: 2096420 - DNA, 25 bp, Homo sapien
tcaagatttaatttgcgccagctgt

SEQ ID NO: 2096421 - DNA, 25 bp, Homo sapien
cagaaacaatccgtagctggtgctt

SEQ ID NO: 2096422 - DNA, 25 bp, Homo sapien
tcgacgacccagaaatttaacttga

SEQ ID NO: 2096423 - DNA, 25 bp, Homo sapien
ttgattttgctgtttgtagggccga

SEQ ID NO: 2096424 - DNA, 25 bp, Homo sapien
gccgatatagaggttggacagttaa

SEQ ID NO: 2096425 - DNA, 25 bp, Homo sapien
tttgagcttgcttggatcgacgacc

SEQ ID NO: 2096426 - DNA, 25 bp, Homo sapien
tggagtggagatgatagttatcctt

SEQ ID NO: 2096427 - DNA, 25 bp, Homo sapien
agatggagtggagatgatagttatc

SEQ ID NO: 2096428 - DNA, 25 bp, Homo sapien
tggagatgatagttatcctttgtac

SEQ ID NO: 2096429 - DNA, 25 bp, Homo sapien
gagatgatagttatcctttgtacct

SEQ ID NO: 2096430 - DNA, 25 bp, Homo sapien
tatcatgatggagaatcaccagctg

SEQ ID NO: 2096431 - DNA, 25 bp, Homo sapien
tatttatagacagacaagcagattg

SEQ ID NO: 2096432 - DNA, 25 bp, Homo sapien
gccaagttttgataccaggaaaatg

SEQ ID NO: 2096433 - DNA, 25 bp, Homo sapien
catagattccttagttttcacaatg

SEQ ID NO: 2096434 - DNA, 25 bp, Homo sapien
gatttccggaaatgctaatccaacg

SEQ ID NO: 2096435 - DNA, 25 bp, Homo sapien
ttagtcatagatttccggaaatgct

SEQ ID NO: 2096436 - DNA, 25 bp, Homo sapien
caacgtcttttaacactggaggtgt

SEQ ID NO: 2096437 - DNA, 25 bp, Homo sapien
cactggaggtgttttattcatagaa

SEQ ID NO: 2096438 - DNA, 25 bp, Homo sapien
ctttgaggttgtgccttcagaaata

SEQ ID NO: 2096439 - DNA, 25 bp, Homo sapien
cctttgaggttgtgccttcagaaat

SEQ ID NO: 2096440 - DNA, 25 bp, Homo sapien
ttgaggttgtgccttcagaaataat

SEQ ID NO: 2096441 - DNA, 25 bp, Homo sapien
tcctttgaggttgtgccttcagaaa

SEQ ID NO: 2096442 - DNA, 25 bp, Homo sapien
cacacatccagtaaatgggagagcc

SEQ ID NO: 2096443 - DNA, 25 bp, Homo sapien
cagtggccaacagaattcagtgaga

SEQ ID NO: 2096444 - DNA, 25 bp, Homo sapien
cattacaggagagatcaacttgtcc

SEQ ID NO: 2096445 - DNA, 25 bp, Homo sapien
tgtcttcagggtacatgctcaacac

SEQ ID NO: 2096446 - DNA, 25 bp, Homo sapien
tagctgggatgacactcccagctag

SEQ ID NO: 2096447 - DNA, 25 bp, Homo sapien
gtagctgggatgacactcccagcta

SEQ ID NO: 2096448 - DNA, 25 bp, Homo sapien
gctgggatgacactcccagctagtt

SEQ ID NO: 2096449 - DNA, 25 bp, Homo sapien
agctgggatgacactcccagctagt

SEQ ID NO: 2096450 - DNA, 25 bp, Homo sapien
ctaatgacttcagctagagccagat

SEQ ID NO: 2096451 - DNA, 25 bp, Homo sapien
taggtgctgtatgcccctccagaat

SEQ ID NO: 2096452 - DNA, 25 bp, Homo sapien
tgggcaaagccacatctatgtaaac

SEQ ID NO: 2096453 - DNA, 25 bp, Homo sapien
ggttaattgaggcacaacccatttg

SEQ ID NO: 2096454 - DNA, 25 bp, Homo sapien
gtgcccacagttgctctttgacatg

SEQ ID NO: 2096455 - DNA, 25 bp, Homo sapien
cccacatggcagacagaagtgggtg

SEQ ID NO: 2096456 - DNA, 25 bp, Homo sapien
tccagttcccgtcatacacagtcaa

SEQ ID NO: 2096457 - DNA, 25 bp, Homo sapien
tacacagtcaatacacgtctctctc

SEQ ID NO: 2096458 - DNA, 25 bp, Homo sapien
ccccggcgtgggtgatcccgaggct

SEQ ID NO: 2096459 - DNA, 25 bp, Homo sapien
ccggcgtgggtgatcccgaggctcg

SEQ ID NO: 2096460 - DNA, 25 bp, Homo sapien
cacccccggcgtgggtgatcccgag

SEQ ID NO: 2096461 - DNA, 25 bp, Homo sapien
ggcgtgggtgatcccgaggctcggc

SEQ ID NO: 2096462 - DNA, 25 bp, Homo sapien
gcactgggccccctgccggccagcc

SEQ ID NO: 2096463 - DNA, 25 bp, Homo sapien
agcgcactgggccccctgccggcca

SEQ ID NO: 2096464 - DNA, 25 bp, Homo sapien
ccgggcggctcccgcggcccgcagg

SEQ ID NO: 2096465 - DNA, 25 bp, Homo sapien
cagggggcgcgcggcccggagcggc

SEQ ID NO: 2096466 - DNA, 25 bp, Homo sapien
tacattgaggggaccggtttgcctc

SEQ ID NO: 2096467 - DNA, 25 bp, Homo sapien
gtttgcctcctccactctataagct

SEQ ID NO: 2096468 - DNA, 25 bp, Homo sapien
gctgtaggtgaccatctggtacatt

SEQ ID NO: 2096469 - DNA, 25 bp, Homo sapien
cagagtttcattgagcccagctgca

SEQ ID NO: 2096470 - DNA, 25 bp, Homo sapien
tgagtggaaaacacggtgcgaagtt

SEQ ID NO: 2096471 - DNA, 25 bp, Homo sapien
ctgcttggacatctctccgcttgaa

SEQ ID NO: 2096472 - DNA, 25 bp, Homo sapien
aagcggagacgggaaggccgagtag

SEQ ID NO: 2096473 - DNA, 25 bp, Homo sapien
tcactgcttggacatctctccgctt

SEQ ID NO: 2096474 - DNA, 25 bp, Homo sapien
aagatgcggctgccctagagtcact

SEQ ID NO: 2096475 - DNA, 25 bp, Homo sapien
agatgcggctgccctagagtcactc

SEQ ID NO: 2096476 - DNA, 25 bp, Homo sapien
gatgcggctgccctagagtcactcc

SEQ ID NO: 2096477 - DNA, 25 bp, Homo sapien
atgcggctgccctagagtcactcca

SEQ ID NO: 2096478 - DNA, 25 bp, Homo sapien
aaagtggcgtcaacttggtaacatc

SEQ ID NO: 2096479 - DNA, 25 bp, Homo sapien
aacttcgtgtgaaagtggcgtcaac

SEQ ID NO: 2096480 - DNA, 25 bp, Homo sapien
gtctgctgataacttcgtgtgaaag

SEQ ID NO: 2096481 - DNA, 25 bp, Homo sapien
tcgtgtgaaagtggcgtcaacttgg

SEQ ID NO: 2096482 - DNA, 25 bp, Homo sapien
atgtgggcagcattctttgtgctcc

SEQ ID NO: 2096483 - DNA, 25 bp, Homo sapien
ctgtaagctacatgtgggcagcatt

SEQ ID NO: 2096484 - DNA, 25 bp, Homo sapien
cgagtctgtaagctacatgtgggca

SEQ ID NO: 2096485 - DNA, 25 bp, Homo sapien
tacatgtgggcagcattctttgtgc

SEQ ID NO: 2096486 - DNA, 25 bp, Homo sapien
ggatttcccatgagctacatgacca

SEQ ID NO: 2096487 - DNA, 25 bp, Homo sapien
tgaactccagaaatagctttgacga

SEQ ID NO: 2096488 - DNA, 25 bp, Homo sapien
agctttgacgactgtggatttccca

SEQ ID NO: 2096489 - DNA, 25 bp, Homo sapien
cttagcattagcatatccaagcttg

SEQ ID NO: 2096490 - DNA, 25 bp, Homo sapien
gaaactcgtcaggtgtactgctccc

SEQ ID NO: 2096491 - DNA, 25 bp, Homo sapien
tccgtaggaaactcgtcaggtgtac

SEQ ID NO: 2096492 - DNA, 25 bp, Homo sapien
ccctggaatgtccgtaggaaactcg

SEQ ID NO: 2096493 - DNA, 25 bp, Homo sapien
aatgtccgtaggaaactcgtcaggt

SEQ ID NO: 2096494 - DNA, 25 bp, Homo sapien
taatgattgagaaataacaatcagc

SEQ ID NO: 2096495 - DNA, 25 bp, Homo sapien
ctaatgattgagaaataacaatcag

SEQ ID NO: 2096496 - DNA, 25 bp, Homo sapien
catcactgctgcaccgttcagcata

SEQ ID NO: 2096497 - DNA, 25 bp, Homo sapien
gctgcaccgttcagcatagtagcca

SEQ ID NO: 2096498 - DNA, 25 bp, Homo sapien
tatcgtggccaggacagtcaacaaa

SEQ ID NO: 2096499 - DNA, 25 bp, Homo sapien
catcaaaatatcgtggccaggacag

SEQ ID NO: 2096500 - DNA, 25 bp, Homo sapien
catcctggatgacatgttagttccc

SEQ ID NO: 2096501 - DNA, 25 bp, Homo sapien
cacccttaggtaatagatatgatcc

SEQ ID NO: 2096502 - DNA, 25 bp, Homo sapien
tagctgataggtaggaaagtcatcc

SEQ ID NO: 2096503 - DNA, 25 bp, Homo sapien
gaattctcgcaagctatcagcccca

SEQ ID NO: 2096504 - DNA, 25 bp, Homo sapien
aggatctgctcgtattgttctttag

SEQ ID NO: 2096505 - DNA, 25 bp, Homo sapien
gatctgctcgtattgttctttagcc

SEQ ID NO: 2096506 - DNA, 25 bp, Homo sapien
aaggatctgctcgtattgttcttta

SEQ ID NO: 2096507 - DNA, 25 bp, Homo sapien
ggatctgctcgtattgttctttagc

SEQ ID NO: 2096508 - DNA, 25 bp, Homo sapien
tatgtactcacaaacaacttcaata

SEQ ID NO: 2096509 - DNA, 25 bp, Homo sapien
ctatgtactcacaaacaacttcaat

SEQ ID NO: 2096510 - DNA, 25 bp, Homo sapien
taatactccttttaggatactacca

SEQ ID NO: 2096511 - DNA, 25 bp, Homo sapien
ccagctacacctcccttaaggtcat

SEQ ID NO: 2096512 - DNA, 25 bp, Homo sapien
ccaccagctacacctcccttaaggt

SEQ ID NO: 2096513 - DNA, 25 bp, Homo sapien
tactccttttaggatactaccacca

SEQ ID NO: 2096514 - DNA, 25 bp, Homo sapien
gatcattatgctccgcaaaaagtga

SEQ ID NO: 2096515 - DNA, 25 bp, Homo sapien
cctggagcagcatattgcagatcat

SEQ ID NO: 2096516 - DNA, 25 bp, Homo sapien
tattgcagatcattatgctccgcaa

SEQ ID NO: 2096517 - DNA, 25 bp, Homo sapien
cgcctggagcagcatattgcagatc

SEQ ID NO: 2096518 - DNA, 25 bp, Homo sapien
tgaatatctcaggtaaagctccgac

SEQ ID NO: 2096519 - DNA, 25 bp, Homo sapien
tgtctccttcagtgcgtacacctag

SEQ ID NO: 2096520 - DNA, 25 bp, Homo sapien
accattctgtcagcccggcacaaag

SEQ ID NO: 2096521 - DNA, 25 bp, Homo sapien
tagaagccgtctaagcaggaaatag

SEQ ID NO: 2096522 - DNA, 25 bp, Homo sapien
tctgtgcacactggattggtcaaaa

SEQ ID NO: 2096523 - DNA, 25 bp, Homo sapien
tgttcaccatgagcacttcattctt

SEQ ID NO: 2096524 - DNA, 25 bp, Homo sapien
ccaaatcggccttgacagcactaac

SEQ ID NO: 2096525 - DNA, 25 bp, Homo sapien
cttcattcttagacagcttttgaac

SEQ ID NO: 2096526 - DNA, 25 bp, Homo sapien
ccagtgtttttcaactcttcggcta

SEQ ID NO: 2096527 - DNA, 25 bp, Homo sapien
ttttcaactcttcggctaagggcaa

SEQ ID NO: 2096528 - DNA, 25 bp, Homo sapien
agtgtttttcaactcttcggctaag

SEQ ID NO: 2096529 - DNA, 25 bp, Homo sapien
tttttcaactcttcggctaagggca

SEQ ID NO: 2096530 - DNA, 25 bp, Homo sapien
tcatccaaataaatagttgagactg

SEQ ID NO: 2096531 - DNA, 25 bp, Homo sapien
ccacagtaactgttgtcctcaagga

SEQ ID NO: 2096532 - DNA, 25 bp, Homo sapien
tgtcctcaaggaagattgtgtgctt

SEQ ID NO: 2096533 - DNA, 25 bp, Homo sapien
gactgaaagccacagtaactgttgt

SEQ ID NO: 2096534 - DNA, 25 bp, Homo sapien
tatatagcctacactcaaatggttc

SEQ ID NO: 2096535 - DNA, 25 bp, Homo sapien
aaagccaatgacgatagaaataccg

SEQ ID NO: 2096536 - DNA, 25 bp, Homo sapien
tgtgtttgtcaatctaggaaaaagc

SEQ ID NO: 2096537 - DNA, 25 bp, Homo sapien
tgcataggttgtgtctaacaggaag

SEQ ID NO: 2096538 - DNA, 25 bp, Homo sapien
cctagctacttagacactgaggctg

SEQ ID NO: 2096539 - DNA, 25 bp, Homo sapien
ggcaaactcaataacctgggaaaga

SEQ ID NO: 2096540 - DNA, 25 bp, Homo sapien
ggagtctttcgcactaactgtgaag

SEQ ID NO: 2096541 - DNA, 25 bp, Homo sapien
tcacggtggtgtgagccaatagtcc

SEQ ID NO: 2096542 - DNA, 25 bp, Homo sapien
ggaagtcgtgtgtctgtaatagcaa

SEQ ID NO: 2096543 - DNA, 25 bp, Homo sapien
aaatcaaaagggcataagtcaccac

SEQ ID NO: 2096544 - DNA, 25 bp, Homo sapien
taaattacagggcaataattcagat

SEQ ID NO: 2096545 - DNA, 25 bp, Homo sapien
ttcagataaatctcctggacaagtg

SEQ ID NO: 2096546 - DNA, 25 bp, Homo sapien
aagaaagcccacactatattcttag

SEQ ID NO: 2096547 - DNA, 25 bp, Homo sapien
aatcataaatcttacatccacttca

SEQ ID NO: 2096548 - DNA, 25 bp, Homo sapien
cataaatcttacatccacttcactc

SEQ ID NO: 2096549 - DNA, 25 bp, Homo sapien
gctcctccataaagaaagcccacac

SEQ ID NO: 2096550 - DNA, 25 bp, Homo sapien
gcttgattgtcactcctcttcttat

SEQ ID NO: 2096551 - DNA, 25 bp, Homo sapien
aaaaaacagaactgcatgatgtata

SEQ ID NO: 2096552 - DNA, 25 bp, Homo sapien
tgtgggaatgtttaacttctgccaa

SEQ ID NO: 2096553 - DNA, 25 bp, Homo sapien
aggagagaccggcctagccaacatg

SEQ ID NO: 2096554 - DNA, 25 bp, Homo sapien
ttatgtgggaatgtttaacttctgc

SEQ ID NO: 2096555 - DNA, 25 bp, Homo sapien
gatatatgtgtgtgctacagcaaag

SEQ ID NO: 2096556 - DNA, 25 bp, Homo sapien
tatttcaaacaggttcagtgatata

SEQ ID NO: 2096557 - DNA, 25 bp, Homo sapien
aaactgtatgatgtgggctgggcaa

SEQ ID NO: 2096558 - DNA, 25 bp, Homo sapien
gctggttgtggcaaagtttcatttc

SEQ ID NO: 2096559 - DNA, 25 bp, Homo sapien
tggtttcccgtgtttcaggccagga

SEQ ID NO: 2096560 - DNA, 25 bp, Homo sapien
ttccccagcaacgtcagcaagagtt

SEQ ID NO: 2096561 - DNA, 25 bp, Homo sapien
aaaaaatctcaaggcatcacaggga

SEQ ID NO: 2096562 - DNA, 25 bp, Homo sapien
ggtacaacagtctttcagcctggag

SEQ ID NO: 2096563 - DNA, 25 bp, Homo sapien
cttacatgagattaattacaatgtc

SEQ ID NO: 2096564 - DNA, 25 bp, Homo sapien
acaaatttgctaattcatgtggatg

SEQ ID NO: 2096565 - DNA, 25 bp, Homo sapien
catgtggatgtctgaaattaattat

SEQ ID NO: 2096566 - DNA, 25 bp, Homo sapien
tataatagaattctggtttcaaatc

SEQ ID NO: 2096567 - DNA, 25 bp, Homo sapien
cgtcttgtactacagtgagaccctg

SEQ ID NO: 2096568 - DNA, 25 bp, Homo sapien
aaaaaatggcatggtcatctgtaca

SEQ ID NO: 2096569 - DNA, 25 bp, Homo sapien
tgaactttgtcaccttactgaactc

SEQ ID NO: 2096570 - DNA, 25 bp, Homo sapien
tcctgggctctacctcgtcttgtac

SEQ ID NO: 2096571 - DNA, 25 bp, Homo sapien
ctccctaaattctgggatttacagg

SEQ ID NO: 2096572 - DNA, 25 bp, Homo sapien
tgcctccctaaattctgggatttac

SEQ ID NO: 2096573 - DNA, 25 bp, Homo sapien
ctcgaactcctaggcgaagctatcc

SEQ ID NO: 2096574 - DNA, 25 bp, Homo sapien
tcctgcctctgcctccctaaattct

SEQ ID NO: 2096575 - DNA, 25 bp, Homo sapien
gaagagtgggagtctgcagtgttct

SEQ ID NO: 2096576 - DNA, 25 bp, Homo sapien
agggcaaaacttagtctcaataata

SEQ ID NO: 2096577 - DNA, 25 bp, Homo sapien
ggcaggacttccagtgaagatggaa

SEQ ID NO: 2096578 - DNA, 25 bp, Homo sapien
caattgtacaatgatctgagaagtg

SEQ ID NO: 2096579 - DNA, 25 bp, Homo sapien
tgcagaaaaattagaaccttcctac

SEQ ID NO: 2096580 - DNA, 25 bp, Homo sapien
tagaaccttcctacattgctagtgg

SEQ ID NO: 2096581 - DNA, 25 bp, Homo sapien
tagtggcaacgtaaaatgctgcagc

SEQ ID NO: 2096582 - DNA, 25 bp, Homo sapien
tggaaagatgctcagtatccttact

SEQ ID NO: 2096583 - DNA, 25 bp, Homo sapien
tcaagaaacagtgattctttgggtt

SEQ ID NO: 2096584 - DNA, 25 bp, Homo sapien
aacagtgattctttgggtttaggtg

SEQ ID NO: 2096585 - DNA, 25 bp, Homo sapien
cttcaagaaacagtgattctttggg

SEQ ID NO: 2096586 - DNA, 25 bp, Homo sapien
agaaacagtgattctttgggtttag

SEQ ID NO: 2096587 - DNA, 25 bp, Homo sapien
aaagtaatgagattcgcttgctgtt

SEQ ID NO: 2096588 - DNA, 25 bp, Homo sapien
aagtaatgagattcgcttgctgttt

SEQ ID NO: 2096589 - DNA, 25 bp, Homo sapien
taatgagattcgcttgctgtttgca

SEQ ID NO: 2096590 - DNA, 25 bp, Homo sapien
agtaatgagattcgcttgctgtttg

SEQ ID NO: 2096591 - DNA, 25 bp, Homo sapien
gagcctctaagttcactttaaggag

SEQ ID NO: 2096592 - DNA, 25 bp, Homo sapien
tagagcctctaagttcactttaagg

SEQ ID NO: 2096593 - DNA, 25 bp, Homo sapien
agcctctaagttcactttaaggagc

SEQ ID NO: 2096594 - DNA, 25 bp, Homo sapien
gtagagcctctaagttcactttaag

SEQ ID NO: 2096595 - DNA, 25 bp, Homo sapien
tgactggggggccagatggccacag

SEQ ID NO: 2096596 - DNA, 25 bp, Homo sapien
cacagccattgcctgggggcgatga

SEQ ID NO: 2096597 - DNA, 25 bp, Homo sapien
cctgtccagtgacctggtacattct

SEQ ID NO: 2096598 - DNA, 25 bp, Homo sapien
tgggggcgatgacttggggctgact

SEQ ID NO: 2096599 - DNA, 25 bp, Homo sapien
ccgagtttatatggggcacactggg

SEQ ID NO: 2096600 - DNA, 25 bp, Homo sapien
tcctcttggtagtgaagcatggctt

SEQ ID NO: 2096601 - DNA, 25 bp, Homo sapien
caactagcagaaggtgttggtcctc

SEQ ID NO: 2096602 - DNA, 25 bp, Homo sapien
caggaacttgatggatttgtggaac

SEQ ID NO: 2096603 - DNA, 25 bp, Homo sapien
cacacatccagtaaatgggagagcc

SEQ ID NO: 2096604 - DNA, 25 bp, Homo sapien
cagtggccaacagaattcagtgaga

SEQ ID NO: 2096605 - DNA, 25 bp, Homo sapien
cattacaggagagatcaacttgtcc

SEQ ID NO: 2096606 - DNA, 25 bp, Homo sapien
tgtcttcagggtacatgctcaacac

SEQ ID NO: 2096607 - DNA, 25 bp, Homo sapien
accaagtcctatatcacccacacct

SEQ ID NO: 2096608 - DNA, 25 bp, Homo sapien
gctttgcagaaagtctgtgtcacca

SEQ ID NO: 2096609 - DNA, 25 bp, Homo sapien
ttcccactggctttgcagaaagtct

SEQ ID NO: 2096610 - DNA, 25 bp, Homo sapien
cactggctttgcagaaagtctgtgt

SEQ ID NO: 2096611 - DNA, 25 bp, Homo sapien
aggctgagtgacagagggagacacc

SEQ ID NO: 2096612 - DNA, 25 bp, Homo sapien
ggcggatcacctcggatcacctgag

SEQ ID NO: 2096613 - DNA, 25 bp, Homo sapien
aaaaaacctgtcttggccaggtgca

SEQ ID NO: 2096614 - DNA, 25 bp, Homo sapien
gcaggcggatcacctcggatcacct

SEQ ID NO: 2096615 - DNA, 25 bp, Homo sapien
tcgcgccggtcctggccgaggctcc

SEQ ID NO: 2096616 - DNA, 25 bp, Homo sapien
cgaggctccagctcgagttgtttgc

SEQ ID NO: 2096617 - DNA, 25 bp, Homo sapien
ggctccagctcgagttgtttgcagg

SEQ ID NO: 2096618 - DNA, 25 bp, Homo sapien
cctctcgcgccggtcctggccgagg

SEQ ID NO: 2096619 - DNA, 25 bp, Homo sapien
gtcaccgcccgggagagagacccag

SEQ ID NO: 2096620 - DNA, 25 bp, Homo sapien
cggagctgacaaaaagcggcccagc

SEQ ID NO: 2096621 - DNA, 25 bp, Homo sapien
tcggagctgacaaaaagcggcccag

SEQ ID NO: 2096622 - DNA, 25 bp, Homo sapien
ctccccggcacgggcccgccgtcag

SEQ ID NO: 2096623 - DNA, 25 bp, Homo sapien
cccggcacgggcccgccgtcagcac

SEQ ID NO: 2096624 - DNA, 25 bp, Homo sapien
cggccggcgacggtggcgggtgctg

SEQ ID NO: 2096625 - DNA, 25 bp, Homo sapien
gcggccggcgacggtggcgggtgct

SEQ ID NO: 2096626 - DNA, 25 bp, Homo sapien
gaccgcctccggcacaaccgggcga

SEQ ID NO: 2096627 - DNA, 25 bp, Homo sapien
ccccgcccgcttacggagcgcgcct

SEQ ID NO: 2096628 - DNA, 25 bp, Homo sapien
cggtgccccaggtcggccgcggagc

SEQ ID NO: 2096629 - DNA, 25 bp, Homo sapien
ggcccctcgaccgcctccggcacaa

SEQ ID NO: 2096630 - DNA, 25 bp, Homo sapien
agacaccgcctccaagatggcggct

SEQ ID NO: 2096631 - DNA, 25 bp, Homo sapien
atcgtcccctgcagcaggcgccgag

SEQ ID NO: 2096632 - DNA, 25 bp, Homo sapien
gggctgtagcggaattttctctcca

SEQ ID NO: 2096633 - DNA, 25 bp, Homo sapien
ggcaaccccctctatcgtcccctgc

SEQ ID NO: 2096634 - DNA, 25 bp, Homo sapien
tggtaagcccaggtgtccggaatgc

SEQ ID NO: 2096635 - DNA, 25 bp, Homo sapien
ctggggtcccgtatgccctggtaag

SEQ ID NO: 2096636 - DNA, 25 bp, Homo sapien
actgccctcgggtggctacaggcgc

SEQ ID NO: 2096637 - DNA, 25 bp, Homo sapien
gcgctgagggtgaaacggtcccggc

SEQ ID NO: 2096638 - DNA, 25 bp, Homo sapien
ctttattcagatactcggggcggca

SEQ ID NO: 2096639 - DNA, 25 bp, Homo sapien
ccttagcagccacatatgatttgac

SEQ ID NO: 2096640 - DNA, 25 bp, Homo sapien
gaaagcaccttagcagccacatatg

SEQ ID NO: 2096641 - DNA, 25 bp, Homo sapien
aaaaacaactgcatcgaaagcacct

SEQ ID NO: 2096642 - DNA, 25 bp, Homo sapien
gaagaagcttcacccttgaaacgtc

SEQ ID NO: 2096643 - DNA, 25 bp, Homo sapien
tgaagaagcttcacccttgaaacgt

SEQ ID NO: 2096644 - DNA, 25 bp, Homo sapien
agaagcttcacccttgaaacgtcct

SEQ ID NO: 2096645 - DNA, 25 bp, Homo sapien
ctgaagaagcttcacccttgaaacg

SEQ ID NO: 2096646 - DNA, 25 bp, Homo sapien
cgggcagtgggaggcgggagaacgg

SEQ ID NO: 2096647 - DNA, 25 bp, Homo sapien
tcagggaacagacggcagtgacagg

SEQ ID NO: 2096648 - DNA, 25 bp, Homo sapien
acagctcagggaacagacggcagtg

SEQ ID NO: 2096649 - DNA, 25 bp, Homo sapien
ggcgggcagtgggaggcgggagaac

SEQ ID NO: 2096650 - DNA, 25 bp, Homo sapien
taatcttaatcttgaacatccactg

SEQ ID NO: 2096651 - DNA, 25 bp, Homo sapien
aatagttcttctatgtctttcccag

SEQ ID NO: 2096652 - DNA, 25 bp, Homo sapien
tgtcttaatcacacaacttgactct

SEQ ID NO: 2096653 - DNA, 25 bp, Homo sapien
tccactgttgctgtactgcgcagca

SEQ ID NO: 2096654 - DNA, 25 bp, Homo sapien
cacatgggtaaacttctgtcacggg

SEQ ID NO: 2096655 - DNA, 25 bp, Homo sapien
tgtttccgcaaaagacacgacctcg

SEQ ID NO: 2096656 - DNA, 25 bp, Homo sapien
tcatcagttagctcccacctgtatg

SEQ ID NO: 2096657 - DNA, 25 bp, Homo sapien
cctgtatgtgagaatattcggtatt

SEQ ID NO: 2096658 - DNA, 25 bp, Homo sapien
aaaatactccccaatttatcttatg

SEQ ID NO: 2096659 - DNA, 25 bp, Homo sapien
tactccccaatttatcttatgaggt

SEQ ID NO: 2096660 - DNA, 25 bp, Homo sapien
aatactccccaatttatcttatgag

SEQ ID NO: 2096661 - DNA, 25 bp, Homo sapien
ctccccaatttatcttatgaggtta

SEQ ID NO: 2096662 - DNA, 25 bp, Homo sapien
taagaaacagatcgtctcgctcgga

SEQ ID NO: 2096663 - DNA, 25 bp, Homo sapien
gataatctcacagatgggttcttac

SEQ ID NO: 2096664 - DNA, 25 bp, Homo sapien
ggcagttactggcaatactgatcag

SEQ ID NO: 2096665 - DNA, 25 bp, Homo sapien
ttaaatatgaatgagctaagcctct

SEQ ID NO: 2096666 - DNA, 25 bp, Homo sapien
cataaatacgtgtatttcggctggg

SEQ ID NO: 2096667 - DNA, 25 bp, Homo sapien
atacgtgtatttcggctgggctcag

SEQ ID NO: 2096668 - DNA, 25 bp, Homo sapien
tctaccccataaatacgtgtatttc

SEQ ID NO: 2096669 - DNA, 25 bp, Homo sapien
ccccataaatacgtgtatttcggct

SEQ ID NO: 2096670 - DNA, 25 bp, Homo sapien
tgagaactagcctatccaaaagaaa

SEQ ID NO: 2096671 - DNA, 25 bp, Homo sapien
cactggtcaatctggctttgcgccc

SEQ ID NO: 2096672 - DNA, 25 bp, Homo sapien
gcagcaacagccctattgagatatt

SEQ ID NO: 2096673 - DNA, 25 bp, Homo sapien
gagatatttattgcgattgcactga

SEQ ID NO: 2096674 - DNA, 25 bp, Homo sapien
agccaaatttgcaccactgcactgc

SEQ ID NO: 2096675 - DNA, 25 bp, Homo sapien
cacttgaacacagaaggcagaggct

SEQ ID NO: 2096676 - DNA, 25 bp, Homo sapien
gcagtgagccaaatttgcaccactg

SEQ ID NO: 2096677 - DNA, 25 bp, Homo sapien
attccagcctggatgacagaggaag

SEQ ID NO: 2096678 - DNA, 25 bp, Homo sapien
tatttaaagcagtacagcctcctta

SEQ ID NO: 2096679 - DNA, 25 bp, Homo sapien
cctttagttgcagacttagttcgag

SEQ ID NO: 2096680 - DNA, 25 bp, Homo sapien
gattctgacatggtatcaagtggag

SEQ ID NO: 2096681 - DNA, 25 bp, Homo sapien
ttagttcgagcagtgtgagaaacac

SEQ ID NO: 2096682 - DNA, 25 bp, Homo sapien
taatagatattctggcctacatggg

SEQ ID NO: 2096683 - DNA, 25 bp, Homo sapien
aaaggctctgcagtattaacccaag

SEQ ID NO: 2096684 - DNA, 25 bp, Homo sapien
gggtgcccgctcatctcatcttaag

SEQ ID NO: 2096685 - DNA, 25 bp, Homo sapien
taaaactacacgtaagggctggtgc

SEQ ID NO: 2096686 - DNA, 25 bp, Homo sapien
cagctgtttagctcctggttctaga

SEQ ID NO: 2096687 - DNA, 25 bp, Homo sapien
agacattccaatggccttaattctc

SEQ ID NO: 2096688 - DNA, 25 bp, Homo sapien
tcctggttctagacctatctgaggt

SEQ ID NO: 2096689 - DNA, 25 bp, Homo sapien
tatctgaggtccagctatattcctg

SEQ ID NO: 2096690 - DNA, 25 bp, Homo sapien
cctttaattctcatcagtcacagct

SEQ ID NO: 2096691 - DNA, 25 bp, Homo sapien
gcctttaattctcatcagtcacagc

SEQ ID NO: 2096692 - DNA, 25 bp, Homo sapien
ggcctttaattctcatcagtcacag

SEQ ID NO: 2096693 - DNA, 25 bp, Homo sapien
ctttaattctcatcagtcacagctc

SEQ ID NO: 2096694 - DNA, 25 bp, Homo sapien
ctgttgcatcaaaaaatgagtttgg

SEQ ID NO: 2096695 - DNA, 25 bp, Homo sapien
tgttgcatcaaaaaatgagtttggc

SEQ ID NO: 2096696 - DNA, 25 bp, Homo sapien
ctcttgttgtaattcaagcccatct

SEQ ID NO: 2096697 - DNA, 25 bp, Homo sapien
tttggctcttgttgtaattcaagcc

SEQ ID NO: 2096698 - DNA, 25 bp, Homo sapien
tgatgacaaccaactccaaatctgg

SEQ ID NO: 2096699 - DNA, 25 bp, Homo sapien
gaatgatcaatgtgagagttctagc

SEQ ID NO: 2096700 - DNA, 25 bp, Homo sapien
caactccaaatctggtagatgggaa

SEQ ID NO: 2096701 - DNA, 25 bp, Homo sapien
tgggaagtggaacaattcaagtagt

SEQ ID NO: 2096702 - DNA, 25 bp, Homo sapien
gcagtggacccagatggcgccactg

SEQ ID NO: 2096703 - DNA, 25 bp, Homo sapien
agtggacccagatggcgccactgtg

SEQ ID NO: 2096704 - DNA, 25 bp, Homo sapien
actcgggaagctgagcagatcactt

SEQ ID NO: 2096705 - DNA, 25 bp, Homo sapien
aggttgcagtggacccagatggcgc

SEQ ID NO: 2096706 - DNA, 25 bp, Homo sapien
tgatgatcaaatgggaatgtatggg

SEQ ID NO: 2096707 - DNA, 25 bp, Homo sapien
caaatgggaatgtatgggaagtgtt

SEQ ID NO: 2096708 - DNA, 25 bp, Homo sapien
aatgggaatgtatgggaagtgttct

SEQ ID NO: 2096709 - DNA, 25 bp, Homo sapien
gactgtggtgatgatcaaatgggaa

SEQ ID NO: 2096710 - DNA, 25 bp, Homo sapien
ttttgttctggtgcaatataccacc

SEQ ID NO: 2096711 - DNA, 25 bp, Homo sapien
tccctctcctcaactcatatttgtt

SEQ ID NO: 2096712 - DNA, 25 bp, Homo sapien
ctatggctatagaaatttagaaatc

SEQ ID NO: 2096713 - DNA, 25 bp, Homo sapien
caccaatatgctccatctatggcta

SEQ ID NO: 2096714 - DNA, 25 bp, Homo sapien
ccgtcaagacgtgttctggcataga

SEQ ID NO: 2096715 - DNA, 25 bp, Homo sapien
ctcaggaatgatgaccgtttcagac

SEQ ID NO: 2096716 - DNA, 25 bp, Homo sapien
tcttccatgatatctgggcactgaa

SEQ ID NO: 2096717 - DNA, 25 bp, Homo sapien
tataacaacgtcctcaataacatct

SEQ ID NO: 2096718 - DNA, 25 bp, Homo sapien
atgtccaacatgtccaacgtcagac

SEQ ID NO: 2096719 - DNA, 25 bp, Homo sapien
ctatcatgaaccacatgttcaacat

SEQ ID NO: 2096720 - DNA, 25 bp, Homo sapien
tcatgaaccacatgttcaacatgtc

SEQ ID NO: 2096721 - DNA, 25 bp, Homo sapien
acatgtccaacatgtccaacgtcag

SEQ ID NO: 2096722 - DNA, 25 bp, Homo sapien
ctacgtcggtagtcagaggatcagt

SEQ ID NO: 2096723 - DNA, 25 bp, Homo sapien
ggtagtcagaggatcagtgacaatt

SEQ ID NO: 2096724 - DNA, 25 bp, Homo sapien
tcggtagtcagaggatcagtgacaa

SEQ ID NO: 2096725 - DNA, 25 bp, Homo sapien
cgtcggtagtcagaggatcagtgac

SEQ ID NO: 2096726 - DNA, 25 bp, Homo sapien
cctcacagttgcctttgtcatcatc

SEQ ID NO: 2096727 - DNA, 25 bp, Homo sapien
agtcctcacagttgcctttgtcatc

SEQ ID NO: 2096728 - DNA, 25 bp, Homo sapien
cagttgcctttgtcatcatcctgct

SEQ ID NO: 2096729 - DNA, 25 bp, Homo sapien
cacagttgcctttgtcatcatcctg

SEQ ID NO: 2096730 - DNA, 25 bp, Homo sapien
gacaatcactgtaccccaagactta

SEQ ID NO: 2096731 - DNA, 25 bp, Homo sapien
tttgacaatcactgtaccccaagac

SEQ ID NO: 2096732 - DNA, 25 bp, Homo sapien
tgtaaattagaagaggcagcctaca

SEQ ID NO: 2096733 - DNA, 25 bp, Homo sapien
aaatttcacccctgatgtaaattag

SEQ ID NO: 2096734 - DNA, 25 bp, Homo sapien
gctctccagggataatggtcttatg

SEQ ID NO: 2096735 - DNA, 25 bp, Homo sapien
tctccatggcagtttagtcacacct

SEQ ID NO: 2096736 - DNA, 25 bp, Homo sapien
caacaatgtctcacacattcagggt

SEQ ID NO: 2096737 - DNA, 25 bp, Homo sapien
cattcagggtccaataaacgtgttg

SEQ ID NO: 2096738 - DNA, 25 bp, Homo sapien
ctccaactccttaccctcgagatcc

SEQ ID NO: 2096739 - DNA, 25 bp, Homo sapien
actccttaccctcgagatcctccca

SEQ ID NO: 2096740 - DNA, 25 bp, Homo sapien
tcacccgggcggaagtacaatggta

SEQ ID NO: 2096741 - DNA, 25 bp, Homo sapien
cccgggcggaagtacaatggtatga

SEQ ID NO: 2096742 - DNA, 25 bp, Homo sapien
cgcttttgtagcatttgtctccctc

SEQ ID NO: 2096743 - DNA, 25 bp, Homo sapien
ggtcaatatcttcaagtgagcttcc

SEQ ID NO: 2096744 - DNA, 25 bp, Homo sapien
tgtctccctcaagcgtaccaaaaaa

SEQ ID NO: 2096745 - DNA, 25 bp, Homo sapien
accagcgtgcagtggctagagtgca

SEQ ID NO: 2096746 - DNA, 25 bp, Homo sapien
tctcccgatgttgtcaagtctagtt

SEQ ID NO: 2096747 - DNA, 25 bp, Homo sapien
gttgtcaagtctagtttgaactcct

SEQ ID NO: 2096748 - DNA, 25 bp, Homo sapien
gccattgtgccaggcttcaaaatct

SEQ ID NO: 2096749 - DNA, 25 bp, Homo sapien
ggtctcccgatgttgtcaagtctag

SEQ ID NO: 2096750 - DNA, 25 bp, Homo sapien
gaggtcgctgatgttcttggttaaa

SEQ ID NO: 2096751 - DNA, 25 bp, Homo sapien
gcatgaggtcgctgatgttcttggt

SEQ ID NO: 2096752 - DNA, 25 bp, Homo sapien
tccaccgtagtagcatgaggtcgct

SEQ ID NO: 2096753 - DNA, 25 bp, Homo sapien
ggaatgtccaccgtagtagcatgag

SEQ ID NO: 2096754 - DNA, 25 bp, Homo sapien
gacctcagggcaagtgccatccact

SEQ ID NO: 2096755 - DNA, 25 bp, Homo sapien
ccttgatgacctcagggcaagtgcc

SEQ ID NO: 2096756 - DNA, 25 bp, Homo sapien
caatttccgactctgtgtccatggt

SEQ ID NO: 2096757 - DNA, 25 bp, Homo sapien
cactttacaaggatcaatttccgac

SEQ ID NO: 2096758 - DNA, 25 bp, Homo sapien
cctgggaacacgaatactgctgttc

SEQ ID NO: 2096759 - DNA, 25 bp, Homo sapien
ggaacacgaatactgctgttctgat

SEQ ID NO: 2096760 - DNA, 25 bp, Homo sapien
ctctccacaatgtctacagttccac

SEQ ID NO: 2096761 - DNA, 25 bp, Homo sapien
tccctgggaacacgaatactgctgt

SEQ ID NO: 2096762 - DNA, 25 bp, Homo sapien
ttcattgtcatccatttgctgctcg

SEQ ID NO: 2096763 - DNA, 25 bp, Homo sapien
tcatccatttgctgctcgtgcacgg

SEQ ID NO: 2096764 - DNA, 25 bp, Homo sapien
tgctgcccatgcaatcggcatgaag

SEQ ID NO: 2096765 - DNA, 25 bp, Homo sapien
catgcaatcggcatgaaggttttga

SEQ ID NO: 2096766 - DNA, 25 bp, Homo sapien
gaccgtaggaaacgcctagcttcca

SEQ ID NO: 2096767 - DNA, 25 bp, Homo sapien
gcatttttgcgccatggactccctt

SEQ ID NO: 2096768 - DNA, 25 bp, Homo sapien
agacttctgaaacctaagaccacag

SEQ ID NO: 2096769 - DNA, 25 bp, Homo sapien
tcttcaatgctaagagctgctgggc

SEQ ID NO: 2096770 - DNA, 25 bp, Homo sapien
ggcacttgcagtgccattccggttt

SEQ ID NO: 2096771 - DNA, 25 bp, Homo sapien
catctatgtgcaagagggcacttgc

SEQ ID NO: 2096772 - DNA, 25 bp, Homo sapien
aggccagcagactcatctatgtgca

SEQ ID NO: 2096773 - DNA, 25 bp, Homo sapien
cattccggttttcaattccatcaga

SEQ ID NO: 2096774 - DNA, 25 bp, Homo sapien
gataagagcatgttgctgcacctct

SEQ ID NO: 2096775 - DNA, 25 bp, Homo sapien
ttttgcccttgtgggcagccacgtg

SEQ ID NO: 2096776 - DNA, 25 bp, Homo sapien
tgaaagcctttatcacacatgtcac

SEQ ID NO: 2096777 - DNA, 25 bp, Homo sapien
gagctctgacgggtgacgaaaaccc

SEQ ID NO: 2096778 - DNA, 25 bp, Homo sapien
catttgggctggagttcacacctgc

SEQ ID NO: 2096779 - DNA, 25 bp, Homo sapien
cagagctttcaagaatcgcagggca

SEQ ID NO: 2096780 - DNA, 25 bp, Homo sapien
gcagggcaatgaatcacggatcaca

SEQ ID NO: 2096781 - DNA, 25 bp, Homo sapien
taagataggctaggaaaacccatgc

SEQ ID NO: 2096782 - DNA, 25 bp, Homo sapien
gaatgtaaccatgggaggccacacg

SEQ ID NO: 2096783 - DNA, 25 bp, Homo sapien
cacacgagatttaggaagtgcaggc

SEQ ID NO: 2096784 - DNA, 25 bp, Homo sapien
tatcggacttgttggatcacagaca

SEQ ID NO: 2096785 - DNA, 25 bp, Homo sapien
caaggacatgctcatcaaaggactc

SEQ ID NO: 2096786 - DNA, 25 bp, Homo sapien
aatgtgcagcaaatgtattggaaag

SEQ ID NO: 2096787 - DNA, 25 bp, Homo sapien
ggaaagttaataggcttaatgtaca

SEQ ID NO: 2096788 - DNA, 25 bp, Homo sapien
taacaagataaatcatggactacaa

SEQ ID NO: 2096789 - DNA, 25 bp, Homo sapien
tgaataggcagtttatcagagcgac

SEQ ID NO: 2096790 - DNA, 25 bp, Homo sapien
tttccactagggatgcacccaggag

SEQ ID NO: 2096791 - DNA, 25 bp, Homo sapien
cttgctgctaggaggtccgggctca

SEQ ID NO: 2096792 - DNA, 25 bp, Homo sapien
tcacgtcaggaggatggtgaccctt

SEQ ID NO: 2096793 - DNA, 25 bp, Homo sapien
taggccctctagataaccatttcca

SEQ ID NO: 2096794 - DNA, 25 bp, Homo sapien
gtgcctccaggaagcgatagataaa

SEQ ID NO: 2096795 - DNA, 25 bp, Homo sapien
tagggggccagagataccagtaatg

SEQ ID NO: 2096796 - DNA, 25 bp, Homo sapien
gggcccaagttagaccccactgtga

SEQ ID NO: 2096797 - DNA, 25 bp, Homo sapien
ccaggaagcgatagataaagggcat

SEQ ID NO: 2096798 - DNA, 25 bp, Homo sapien
caagacaggaagtaccccaaagtgg

SEQ ID NO: 2096799 - DNA, 25 bp, Homo sapien
ttaaagcaaagtccgaagtacattg

SEQ ID NO: 2096800 - DNA, 25 bp, Homo sapien
cattgtaagatcagtgttggcagaa

SEQ ID NO: 2096801 - DNA, 25 bp, Homo sapien
gagtgccaaggacgccaggatgccc

SEQ ID NO: 2096802 - DNA, 25 bp, Homo sapien
cgttctgaagcgcaagtcttggttt

SEQ ID NO: 2096803 - DNA, 25 bp, Homo sapien
ccattttctggtttgcgttctgaag

SEQ ID NO: 2096804 - DNA, 25 bp, Homo sapien
tggcagcccttggaaatgactctca

SEQ ID NO: 2096805 - DNA, 25 bp, Homo sapien
ggcagcccttggaaatgactctcac

SEQ ID NO: 2096806 - DNA, 25 bp, Homo sapien
ggttggcgaaatgcataaaccgcct

SEQ ID NO: 2096807 - DNA, 25 bp, Homo sapien
ctcagctgaattgaaggaggttggc

SEQ ID NO: 2096808 - DNA, 25 bp, Homo sapien
aattgaaggaggttggcgaaatgca

SEQ ID NO: 2096809 - DNA, 25 bp, Homo sapien
tgcataaaccgcctcaggatctaaa

SEQ ID NO: 2096810 - DNA, 25 bp, Homo sapien
cagctgaagatcgagtccatcccat

SEQ ID NO: 2096811 - DNA, 25 bp, Homo sapien
tccatttacccacaagtcccaggtc

SEQ ID NO: 2096812 - DNA, 25 bp, Homo sapien
tggttatccatttacccacaagtcc

SEQ ID NO: 2096813 - DNA, 25 bp, Homo sapien
tatccatttacccacaagtcccagg

SEQ ID NO: 2096814 - DNA, 25 bp, Homo sapien
gttatccatttacccacaagtccca

SEQ ID NO: 2096815 - DNA, 25 bp, Homo sapien
gctgggccacctaagacttcagctg

SEQ ID NO: 2096816 - DNA, 25 bp, Homo sapien
tgggccacctaagacttcagctgct

SEQ ID NO: 2096817 - DNA, 25 bp, Homo sapien
ctgggccacctaagacttcagctgc

SEQ ID NO: 2096818 - DNA, 25 bp, Homo sapien
tcctgagtatatccctgcttcagta

SEQ ID NO: 2096819 - DNA, 25 bp, Homo sapien
gttcctgagtatatccctgcttcag

SEQ ID NO: 2096820 - DNA, 25 bp, Homo sapien
tggttcctgagtatatccctgcttc

SEQ ID NO: 2096821 - DNA, 25 bp, Homo sapien
tgagtatatccctgcttcagtaaca

SEQ ID NO: 2096822 - DNA, 25 bp, Homo sapien
ctgctgcccgcacttgcactcgact

SEQ ID NO: 2096823 - DNA, 25 bp, Homo sapien
gcccgcacttgcactcgactacttg

SEQ ID NO: 2096824 - DNA, 25 bp, Homo sapien
tgcccgcacttgcactcgactactt

SEQ ID NO: 2096825 - DNA, 25 bp, Homo sapien
gggtctgctgcccgcacttgcactc

SEQ ID NO: 2096826 - DNA, 25 bp, Homo sapien
tctgcatgctacaccggaagcgaac

SEQ ID NO: 2096827 - DNA, 25 bp, Homo sapien
ttcacgtctctgcatgctacaccgg

SEQ ID NO: 2096828 - DNA, 25 bp, Homo sapien
catgctacaccggaagcgaacggga

SEQ ID NO: 2096829 - DNA, 25 bp, Homo sapien
acgtctctgcatgctacaccggaag

SEQ ID NO: 2096830 - DNA, 25 bp, Homo sapien
cagggaagcgctacccaatctgttt

SEQ ID NO: 2096831 - DNA, 25 bp, Homo sapien
gaagcgctacccaatctgtttgagg

SEQ ID NO: 2096832 - DNA, 25 bp, Homo sapien
ggaagcgctacccaatctgtttgag

SEQ ID NO: 2096833 - DNA, 25 bp, Homo sapien
cccagggaagcgctacccaatctgt

SEQ ID NO: 2096834 - DNA, 25 bp, Homo sapien
tcagcttctaggcgcgtctgggcac

SEQ ID NO: 2096835 - DNA, 25 bp, Homo sapien
ccggggtcagcttctaggcgcgtct

SEQ ID NO: 2096836 - DNA, 25 bp, Homo sapien
gggtcagcttctaggcgcgtctggg

SEQ ID NO: 2096837 - DNA, 25 bp, Homo sapien
gagggccggggtcagcttctaggcg

SEQ ID NO: 2096838 - DNA, 25 bp, Homo sapien
ggtcgtcgtcgtggccggacttcgc

SEQ ID NO: 2096839 - DNA, 25 bp, Homo sapien
tcgtcgtggccggacttcgcgtctc

SEQ ID NO: 2096840 - DNA, 25 bp, Homo sapien
gtcgtggccggacttcgcgtctctg

SEQ ID NO: 2096841 - DNA, 25 bp, Homo sapien
cgtggccggacttcgcgtctctgcg

SEQ ID NO: 2096842 - DNA, 25 bp, Homo sapien
ctgtttgagggtttctgaaaacatg

SEQ ID NO: 2096843 - DNA, 25 bp, Homo sapien
caatctgtttgagggtttctgaaaa

SEQ ID NO: 2096844 - DNA, 25 bp, Homo sapien
ccaatctgtttgagggtttctgaaa

SEQ ID NO: 2096845 - DNA, 25 bp, Homo sapien
tgagggtttctgaaaacatgggtac

SEQ ID NO: 2096846 - DNA, 25 bp, Homo sapien
tgagttcaacgtgggcatctgccca

SEQ ID NO: 2096847 - DNA, 25 bp, Homo sapien
gtgggcatctgcccagaaacccgcc

SEQ ID NO: 2096848 - DNA, 25 bp, Homo sapien
tcaacgtgggcatctgcccagaaac

SEQ ID NO: 2096849 - DNA, 25 bp, Homo sapien
aacgtgggcatctgcccagaaaccc

SEQ ID NO: 2096850 - DNA, 25 bp, Homo sapien
cccgcaagatgccacaagtccacac

SEQ ID NO: 2096851 - DNA, 25 bp, Homo sapien
acaggcccgcaagatgccacaagtc

SEQ ID NO: 2096852 - DNA, 25 bp, Homo sapien
aggcccgcaagatgccacaagtcca

SEQ ID NO: 2096853 - DNA, 25 bp, Homo sapien
ctacaggcccgcaagatgccacaag

SEQ ID NO: 2096854 - DNA, 25 bp, Homo sapien
tctggagcatcacagaatacccctg

SEQ ID NO: 2096855 - DNA, 25 bp, Homo sapien
tttcccgccctaggtgagtatctcc

SEQ ID NO: 2096856 - DNA, 25 bp, Homo sapien
taaggcagccgaatggtctctgcaa

SEQ ID NO: 2096857 - DNA, 25 bp, Homo sapien
cagtaaacatggcaaggactctctc

SEQ ID NO: 2096858 - DNA, 25 bp, Homo sapien
tgcctgtagtcacgaacttctacta

SEQ ID NO: 2096859 - DNA, 25 bp, Homo sapien
tccaagtagtccagcaatgcccttt

SEQ ID NO: 2096860 - DNA, 25 bp, Homo sapien
taaccgaagctttatccaggacatc

SEQ ID NO: 2096861 - DNA, 25 bp, Homo sapien
tatgacacacccactatgaaaaatg

SEQ ID NO: 2096862 - DNA, 25 bp, Homo sapien
agaatatgcctgctttggtaaccag

SEQ ID NO: 2096863 - DNA, 25 bp, Homo sapien
cgttggacgtagaagaatatgcctg

SEQ ID NO: 2096864 - DNA, 25 bp, Homo sapien
aatatgcctgctttggtaaccagga

SEQ ID NO: 2096865 - DNA, 25 bp, Homo sapien
tggtaaccaggaggttgcatattac

SEQ ID NO: 2096866 - DNA, 25 bp, Homo sapien
catcgggtcggtattcatcttttgc

SEQ ID NO: 2096867 - DNA, 25 bp, Homo sapien
tgcagtgcaggcaactgctacagaa

SEQ ID NO: 2096868 - DNA, 25 bp, Homo sapien
gtacagcagcctgtttgcagtgcag

SEQ ID NO: 2096869 - DNA, 25 bp, Homo sapien
gacacagtggttcagctgtcgctaa

SEQ ID NO: 2096870 - DNA, 25 bp, Homo sapien
aggtggacagtcagactgctcctgc

SEQ ID NO: 2096871 - DNA, 25 bp, Homo sapien
ttttggccagaagtcgacactctca

SEQ ID NO: 2096872 - DNA, 25 bp, Homo sapien
cagaagtcgacactctcagctcagg

SEQ ID NO: 2096873 - DNA, 25 bp, Homo sapien
aggaggtggacagtcagactgctcc

SEQ ID NO: 2096874 - DNA, 25 bp, Homo sapien
cagcttccaacgcaaatccaaaagg

SEQ ID NO: 2096875 - DNA, 25 bp, Homo sapien
ccagcttccaacgcaaatccaaaag

SEQ ID NO: 2096876 - DNA, 25 bp, Homo sapien
agcttccaacgcaaatccaaaaggg

SEQ ID NO: 2096877 - DNA, 25 bp, Homo sapien
caacgcaaatccaaaagggtcttct

SEQ ID NO: 2096878 - DNA, 25 bp, Homo sapien
gaaaatggacgcttaagagggctgc

SEQ ID NO: 2096879 - DNA, 25 bp, Homo sapien
ctgcctgcctgttgtgggggaaaac

SEQ ID NO: 2096880 - DNA, 25 bp, Homo sapien
tggacgcttaagagggctgcctgcc

SEQ ID NO: 2096881 - DNA, 25 bp, Homo sapien
aatggacgcttaagagggctgcctg

SEQ ID NO: 2096882 - DNA, 25 bp, Homo sapien
aggcacagagggcttctgagaatga

SEQ ID NO: 2096883 - DNA, 25 bp, Homo sapien
cttgaatgagaggcacagagggctt

SEQ ID NO: 2096884 - DNA, 25 bp, Homo sapien
agaggcacagagggcttctgagaat

SEQ ID NO: 2096885 - DNA, 25 bp, Homo sapien
tgagaggcacagagggcttctgaga

SEQ ID NO: 2096886 - DNA, 25 bp, Homo sapien
gagcctgtcctcaactgaatggctg

SEQ ID NO: 2096887 - DNA, 25 bp, Homo sapien
ggagcctgtcctcaactgaatggct

SEQ ID NO: 2096888 - DNA, 25 bp, Homo sapien
agtggagcctgtcctcaactgaatg

SEQ ID NO: 2096889 - DNA, 25 bp, Homo sapien
cagtggagcctgtcctcaactgaat

SEQ ID NO: 2096890 - DNA, 25 bp, Homo sapien
gcagaccacttctggctctagtggg

SEQ ID NO: 2096891 - DNA, 25 bp, Homo sapien
tgcagaccacttctggctctagtgg

SEQ ID NO: 2096892 - DNA, 25 bp, Homo sapien
cagaccacttctggctctagtgggg

SEQ ID NO: 2096893 - DNA, 25 bp, Homo sapien
gctgcagaccacttctggctctagt

SEQ ID NO: 2096894 - DNA, 25 bp, Homo sapien
caagactctcaactgctgagtctgg

SEQ ID NO: 2096895 - DNA, 25 bp, Homo sapien
agactctcaactgctgagtctggag

SEQ ID NO: 2096896 - DNA, 25 bp, Homo sapien
ctgcaagactctcaactgctgagtc

SEQ ID NO: 2096897 - DNA, 25 bp, Homo sapien
tgcaagactctcaactgctgagtct

SEQ ID NO: 2096898 - DNA, 25 bp, Homo sapien
ctggatgtggctgcactatctgaac

SEQ ID NO: 2096899 - DNA, 25 bp, Homo sapien
tctgaacagcgcctgttgccaaaaa

SEQ ID NO: 2096900 - DNA, 25 bp, Homo sapien
tgtggctgcactatctgaacagcgc

SEQ ID NO: 2096901 - DNA, 25 bp, Homo sapien
tgcactatctgaacagcgcctgttg

SEQ ID NO: 2096902 - DNA, 25 bp, Homo sapien
gatctaccaactggctccctacttg

SEQ ID NO: 2096903 - DNA, 25 bp, Homo sapien
ttccttcctctgatctaccaactgg

SEQ ID NO: 2096904 - DNA, 25 bp, Homo sapien
cagggcgctggaggggttggcttgc

SEQ ID NO: 2096905 - DNA, 25 bp, Homo sapien
ctctgatctaccaactggctcccta

SEQ ID NO: 2096906 - DNA, 25 bp, Homo sapien
tacttgaaaggaccagatagacaac

SEQ ID NO: 2096907 - DNA, 25 bp, Homo sapien
cactgatgtcttttggaactgccag

SEQ ID NO: 2096908 - DNA, 25 bp, Homo sapien
tcactcaagcacaagtttggctggt

SEQ ID NO: 2096909 - DNA, 25 bp, Homo sapien
tcaggtctctagttggcacccaaag

SEQ ID NO: 2096910 - DNA, 25 bp, Homo sapien
atggctggggcgacttgatcctgca

SEQ ID NO: 2096911 - DNA, 25 bp, Homo sapien
gaagctccagcccactacatgcaat

SEQ ID NO: 2096912 - DNA, 25 bp, Homo sapien
gccatgaggatctcaagaagctcca

SEQ ID NO: 2096913 - DNA, 25 bp, Homo sapien
ctacatgcaatcagcatcataaatc

SEQ ID NO: 2096914 - DNA, 25 bp, Homo sapien
aattaactcgcacaccctttgctgc

SEQ ID NO: 2096915 - DNA, 25 bp, Homo sapien
aaattagcagatttcaaactcaggt

SEQ ID NO: 2096916 - DNA, 25 bp, Homo sapien
aaactcaggtaatttgtccctaatg

SEQ ID NO: 2096917 - DNA, 25 bp, Homo sapien
taacaattaactcgcacaccctttg

SEQ ID NO: 2096918 - DNA, 25 bp, Homo sapien
ggtaattatttccaaatcataagtg

SEQ ID NO: 2096919 - DNA, 25 bp, Homo sapien
tttccaaatcataagtgcaaacact

SEQ ID NO: 2096920 - DNA, 25 bp, Homo sapien
ccaaatcataagtgcaaacactcac

SEQ ID NO: 2096921 - DNA, 25 bp, Homo sapien
aattatttccaaatcataagtgcaa

SEQ ID NO: 2096922 - DNA, 25 bp, Homo sapien
ctttgagggatgtgttgtatgtgaa

SEQ ID NO: 2096923 - DNA, 25 bp, Homo sapien
gcttgacgcatattctttgagggat

SEQ ID NO: 2096924 - DNA, 25 bp, Homo sapien
gagccttggaaactgtgggcgagct

SEQ ID NO: 2096925 - DNA, 25 bp, Homo sapien
ggtgcccccttgtggtctagagaca

SEQ ID NO: 2096926 - DNA, 25 bp, Homo sapien
tactgcctgggctcgtgtggagctg

SEQ ID NO: 2096927 - DNA, 25 bp, Homo sapien
ctgcctgggctcgtgtggagctgca

SEQ ID NO: 2096928 - DNA, 25 bp, Homo sapien
ttactgcctgggctcgtgtggagct

SEQ ID NO: 2096929 - DNA, 25 bp, Homo sapien
cctgggctcgtgtggagctgcacag

SEQ ID NO: 2096930 - DNA, 25 bp, Homo sapien
taagttaggttggtagaacagtctg

SEQ ID NO: 2096931 - DNA, 25 bp, Homo sapien
tgactattcaccacatcatgctatg

SEQ ID NO: 2096932 - DNA, 25 bp, Homo sapien
cgtggccctatcactgaactcttga

SEQ ID NO: 2096933 - DNA, 25 bp, Homo sapien
gcattatgtctatcggtcatcacag

SEQ ID NO: 2096934 - DNA, 25 bp, Homo sapien
ccagggttgttttgtcattggtgtt

SEQ ID NO: 2096935 - DNA, 25 bp, Homo sapien
tcaggaaagtgccagggttgttttg

SEQ ID NO: 2096936 - DNA, 25 bp, Homo sapien
ttgtaaggctatgtttagaatagac

SEQ ID NO: 2096937 - DNA, 25 bp, Homo sapien
tttcctccccagtaatagattctct

SEQ ID NO: 2096938 - DNA, 25 bp, Homo sapien
ccagttggcctgatattcatggcag

SEQ ID NO: 2096939 - DNA, 25 bp, Homo sapien
gctggtctaaccacactttcctctt

SEQ ID NO: 2096940 - DNA, 25 bp, Homo sapien
aaagctggtctaaccacactttcct

SEQ ID NO: 2096941 - DNA, 25 bp, Homo sapien
cagaaaaagctggtctaaccacact

SEQ ID NO: 2096942 - DNA, 25 bp, Homo sapien
atcctttgggatggaggtggtgtca

SEQ ID NO: 2096943 - DNA, 25 bp, Homo sapien
cctttgggatggaggtggtgtcagc

SEQ ID NO: 2096944 - DNA, 25 bp, Homo sapien
ttctcttcatcctttgggatggagg

SEQ ID NO: 2096945 - DNA, 25 bp, Homo sapien
ctcttcatcctttgggatggaggtg

SEQ ID NO: 2096946 - DNA, 25 bp, Homo sapien
cagatatctgatttggaagtctgaa

SEQ ID NO: 2096947 - DNA, 25 bp, Homo sapien
gtctgaagtttggagtccaattctt

SEQ ID NO: 2096948 - DNA, 25 bp, Homo sapien
ggcacagatatctgatttggaagtc

SEQ ID NO: 2096949 - DNA, 25 bp, Homo sapien
ctatagggcacagatatctgatttg

SEQ ID NO: 2096950 - DNA, 25 bp, Homo sapien
tgtgtatgcatttgtgaaacctccg

SEQ ID NO: 2096951 - DNA, 25 bp, Homo sapien
caccacggatggataaccagactac

SEQ ID NO: 2096952 - DNA, 25 bp, Homo sapien
cccaaagtcgatttccacggacaca

SEQ ID NO: 2096953 - DNA, 25 bp, Homo sapien
tactatttgactggccagcaagtcc

SEQ ID NO: 2096954 - DNA, 25 bp, Homo sapien
taaatgtgcccgatgcgtgcccaag

SEQ ID NO: 2096955 - DNA, 25 bp, Homo sapien
cattactgtgtgagttgtgcaattc

SEQ ID NO: 2096956 - DNA, 25 bp, Homo sapien
tgcactaaatgtgcccgatgcgtgc

SEQ ID NO: 2096957 - DNA, 25 bp, Homo sapien
cctattcgctgcactaaatgtgccc

SEQ ID NO: 2096958 - DNA, 25 bp, Homo sapien
ctatgtgtccagcactatgctaggt

SEQ ID NO: 2096959 - DNA, 25 bp, Homo sapien
gacttaccagcttccttcaacagat

SEQ ID NO: 2096960 - DNA, 25 bp, Homo sapien
ttatctagaactttggcccctgact

SEQ ID NO: 2096961 - DNA, 25 bp, Homo sapien
cttagtgctacaaaggagaggtacc

SEQ ID NO: 2096962 - DNA, 25 bp, Homo sapien
cctgatcctcaaaatgctacctatg

SEQ ID NO: 2096963 - DNA, 25 bp, Homo sapien
tgctacctatggaccactgcgcatc

SEQ ID NO: 2096964 - DNA, 25 bp, Homo sapien
actgcgcatccacctcagagttggg

SEQ ID NO: 2096965 - DNA, 25 bp, Homo sapien
cctcaaaatgctacctatggaccac

SEQ ID NO: 2096966 - DNA, 25 bp, Homo sapien
ggatggtcacaagttgtctcaggtg

SEQ ID NO: 2096967 - DNA, 25 bp, Homo sapien
tccaagtccgctatccaaactgtca

SEQ ID NO: 2096968 - DNA, 25 bp, Homo sapien
actccaagtccgctatccaaactgt

SEQ ID NO: 2096969 - DNA, 25 bp, Homo sapien
cacaagttgtctcaggtggaagaat

SEQ ID NO: 2096970 - DNA, 25 bp, Homo sapien
caagccgcacggatagggcacgttt

SEQ ID NO: 2096971 - DNA, 25 bp, Homo sapien
agacgcccgggtggccgcaagggct

SEQ ID NO: 2096972 - DNA, 25 bp, Homo sapien
caagggctggcgcagccaagccgca

SEQ ID NO: 2096973 - DNA, 25 bp, Homo sapien
tagggcacgtttgcgaagcgcgcac

SEQ ID NO: 2096974 - DNA, 25 bp, Homo sapien
atctgcttgggcaccggctgcttca

SEQ ID NO: 2096975 - DNA, 25 bp, Homo sapien
agcggcgacggcgaaaagcgcgagt

SEQ ID NO: 2096976 - DNA, 25 bp, Homo sapien
tccaggaattgtttgatggagagcg

SEQ ID NO: 2096977 - DNA, 25 bp, Homo sapien
gagtagcgctcgatctgcttgggca

SEQ ID NO: 2096978 - DNA, 25 bp, Homo sapien
gaatttggaaccatgtgactgtaat

SEQ ID NO: 2096979 - DNA, 25 bp, Homo sapien
tccttttgaaccctctgaatttgga

SEQ ID NO: 2096980 - DNA, 25 bp, Homo sapien
gactgtaatcttaggcccaaaagaa

SEQ ID NO: 2096981 - DNA, 25 bp, Homo sapien
ctgtgtccttttgaaccctctgaat

SEQ ID NO: 2096982 - DNA, 25 bp, Homo sapien
caactaacctactcaagaagaaggg

SEQ ID NO: 2096983 - DNA, 25 bp, Homo sapien
gactgttcagtgacaactatctcag

SEQ ID NO: 2096984 - DNA, 25 bp, Homo sapien
aactgacttaaaaacctcaatgagt

SEQ ID NO: 2096985 - DNA, 25 bp, Homo sapien
cagggaaaattaagactgttcagtg

SEQ ID NO: 2096986 - DNA, 25 bp, Homo sapien
tttaagggcgaggtagggacagcag

SEQ ID NO: 2096987 - DNA, 25 bp, Homo sapien
ttaagggcgaggtagggacagcagc

SEQ ID NO: 2096988 - DNA, 25 bp, Homo sapien
taagggcgaggtagggacagcagca

SEQ ID NO: 2096989 - DNA, 25 bp, Homo sapien
ctttaagggcgaggtagggacagca

SEQ ID NO: 2096990 - DNA, 25 bp, Homo sapien
tcaatgataaattccccaagggtaa

SEQ ID NO: 2096991 - DNA, 25 bp, Homo sapien
caagggtaataactgtatcatggtt

SEQ ID NO: 2096992 - DNA, 25 bp, Homo sapien
catacttaagtatctaggggtaaag

SEQ ID NO: 2096993 - DNA, 25 bp, Homo sapien
ttccccaagggtaataactgtatca

SEQ ID NO: 2096994 - DNA, 25 bp, Homo sapien
ttgccgatagggataactgcctgct

SEQ ID NO: 2096995 - DNA, 25 bp, Homo sapien
cttgccgatagggataactgcctgc

SEQ ID NO: 2096996 - DNA, 25 bp, Homo sapien
ggtcacactgtagaaaagtatcctc

SEQ ID NO: 2096997 - DNA, 25 bp, Homo sapien
ggaaatttcgactcctgctcctgac

SEQ ID NO: 2096998 - DNA, 25 bp, Homo sapien
ggcttccctcagacgtgtggtgatc

SEQ ID NO: 2096999 - DNA, 25 bp, Homo sapien
ttaggctaagtagccagggcctgcc

SEQ ID NO: 2097000 - DNA, 25 bp, Homo sapien
catgtgtatgttgcacctaggcagt

SEQ ID NO: 2097001 - DNA, 25 bp, Homo sapien
tcttcaatcaacagagaccatgcct

SEQ ID NO: 2097002 - DNA, 25 bp, Homo sapien
catggaaaaattacccgcaaggcac

SEQ ID NO: 2097003 - DNA, 25 bp, Homo sapien
cagaggctgaggacatattttgtac

SEQ ID NO: 2097004 - DNA, 25 bp, Homo sapien
tctcctaagtttgacgatcctttca

SEQ ID NO: 2097005 - DNA, 25 bp, Homo sapien
ccctggtatcagttcaaagatgaca

SEQ ID NO: 2097006 - DNA, 25 bp, Homo sapien
gacttagtggatgcaaacaggtcat

SEQ ID NO: 2097007 - DNA, 25 bp, Homo sapien
ttggctcaccaagtggcggcaacct

SEQ ID NO: 2097008 - DNA, 25 bp, Homo sapien
tctacattccttaattttgactttc

SEQ ID NO: 2097009 - DNA, 25 bp, Homo sapien
acattccttaattttgactttctat

SEQ ID NO: 2097010 - DNA, 25 bp, Homo sapien
ggcttctctacattccttaattttg

SEQ ID NO: 2097011 - DNA, 25 bp, Homo sapien
ttggcttctctacattccttaattt

SEQ ID NO: 2097012 - DNA, 25 bp, Homo sapien
aaacctgagctctttcccctgctgt

SEQ ID NO: 2097013 - DNA, 25 bp, Homo sapien
gaggaaacctgagctctttcccctg

SEQ ID NO: 2097014 - DNA, 25 bp, Homo sapien
agaggaaacctgagctctttcccct

SEQ ID NO: 2097015 - DNA, 25 bp, Homo sapien
ggaaacctgagctctttcccctgct

SEQ ID NO: 2097016 - DNA, 25 bp, Homo sapien
actctgaaccaatcccactgaaggg

SEQ ID NO: 2097017 - DNA, 25 bp, Homo sapien
caggaagttcctttcgtagaaacat

SEQ ID NO: 2097018 - DNA, 25 bp, Homo sapien
ttaagtaaattatccggcagaagat

SEQ ID NO: 2097019 - DNA, 25 bp, Homo sapien
cattgtgttagccagccgcacagga

SEQ ID NO: 2097020 - DNA, 25 bp, Homo sapien
attttcatattctaaaagttcaaga

SEQ ID NO: 2097021 - DNA, 25 bp, Homo sapien
ggatcctcagggctcttattttcat

SEQ ID NO: 2097022 - DNA, 25 bp, Homo sapien
aagttcaagaaaactctgcatatac

SEQ ID NO: 2097023 - DNA, 25 bp, Homo sapien
ttatccaagacctgtggatcctcag

SEQ ID NO: 2097024 - DNA, 25 bp, Homo sapien
gaaaatgaacgcttttgtccacatt

SEQ ID NO: 2097025 - DNA, 25 bp, Homo sapien
tactttcagctaagtggtaccatac

SEQ ID NO: 2097026 - DNA, 25 bp, Homo sapien
ccttgagtcttaatgacttgaatta

SEQ ID NO: 2097027 - DNA, 25 bp, Homo sapien
tgttgagtcactactcattaagaaa

SEQ ID NO: 2097028 - DNA, 25 bp, Homo sapien
taagcatgcggaaagagatgcggtt

SEQ ID NO: 2097029 - DNA, 25 bp, Homo sapien
gatgcggttggtataaaaccgatcc

SEQ ID NO: 2097030 - DNA, 25 bp, Homo sapien
tagtgctaatgaaaggatcaaaccc

SEQ ID NO: 2097031 - DNA, 25 bp, Homo sapien
tgtgccattgtaggaaccacatcat

SEQ ID NO: 2097032 - DNA, 25 bp, Homo sapien
ttcaaaactggaccaacaaactcca

SEQ ID NO: 2097033 - DNA, 25 bp, Homo sapien
tcaaaactggaccaacaaactccaa

SEQ ID NO: 2097034 - DNA, 25 bp, Homo sapien
ggtgggatcgatacttcctatgtgt

SEQ ID NO: 2097035 - DNA, 25 bp, Homo sapien
gccacgttacaggtgggatcgatac

SEQ ID NO: 2097036 - DNA, 25 bp, Homo sapien
cctatgtgtttaggatgaacaggat

SEQ ID NO: 2097037 - DNA, 25 bp, Homo sapien
accacatccgccacgttacaggtgg

SEQ ID NO: 2097038 - DNA, 25 bp, Homo sapien
gagtgacctgatgaatcagcagact

SEQ ID NO: 2097039 - DNA, 25 bp, Homo sapien
agtgacctgatgaatcagcagactg

SEQ ID NO: 2097040 - DNA, 25 bp, Homo sapien
cttaaagtccaatgaacccatgaag

SEQ ID NO: 2097041 - DNA, 25 bp, Homo sapien
ccatgaagcttacatgccacataaa

SEQ ID NO: 2097042 - DNA, 25 bp, Homo sapien
atgaagcttacatgccacataaatt

SEQ ID NO: 2097043 - DNA, 25 bp, Homo sapien
tgaacccatgaagcttacatgccac

SEQ ID NO: 2097044 - DNA, 25 bp, Homo sapien
cccggaggatactggaacaatgtct

SEQ ID NO: 2097045 - DNA, 25 bp, Homo sapien
tcttcccggaggatactggaacaat

SEQ ID NO: 2097046 - DNA, 25 bp, Homo sapien
gcttggttcttcccggaggatactg

SEQ ID NO: 2097047 - DNA, 25 bp, Homo sapien
tggttcttcccggaggatactggaa

SEQ ID NO: 2097048 - DNA, 25 bp, Homo sapien
tggaggttctgatcaaccacaaagt

SEQ ID NO: 2097049 - DNA, 25 bp, Homo sapien
gaggttctgatcaaccacaaagtta

SEQ ID NO: 2097050 - DNA, 25 bp, Homo sapien
ctttggaggttctgatcaaccacaa

SEQ ID NO: 2097051 - DNA, 25 bp, Homo sapien
cctttggaggttctgatcaaccaca

SEQ ID NO: 2097052 - DNA, 25 bp, Homo sapien
cttgagctagcgtgagtgggtctct

SEQ ID NO: 2097053 - DNA, 25 bp, Homo sapien
tcttgagctagcgtgagtgggtctc

SEQ ID NO: 2097054 - DNA, 25 bp, Homo sapien
tctttcttgagctagcgtgagtggg

SEQ ID NO: 2097055 - DNA, 25 bp, Homo sapien
tttcttgagctagcgtgagtgggtc

SEQ ID NO: 2097056 - DNA, 25 bp, Homo sapien
aaggtaaggttgatgggctatattc

SEQ ID NO: 2097057 - DNA, 25 bp, Homo sapien
atgaaggtaaggttgatgggctata

SEQ ID NO: 2097058 - DNA, 25 bp, Homo sapien
gaagatgaaggtaaggttgatgggc

SEQ ID NO: 2097059 - DNA, 25 bp, Homo sapien
ggtaaggttgatgggctatattcac

SEQ ID NO: 2097060 - DNA, 25 bp, Homo sapien
cagactcgtcaaaaccaatgacacg

SEQ ID NO: 2097061 - DNA, 25 bp, Homo sapien
ctgatatgaggttcacagactcgtc

SEQ ID NO: 2097062 - DNA, 25 bp, Homo sapien
tacctgaatccgagatctattttgc

SEQ ID NO: 2097063 - DNA, 25 bp, Homo sapien
gacacggccctctatcagcatattc

SEQ ID NO: 2097064 - DNA, 25 bp, Homo sapien
gtaatactgttcacacagcatcttg

SEQ ID NO: 2097065 - DNA, 25 bp, Homo sapien
aacttccagctctggagctaccagg

SEQ ID NO: 2097066 - DNA, 25 bp, Homo sapien
tgaattcttcaacttccagctctgg

SEQ ID NO: 2097067 - DNA, 25 bp, Homo sapien
gctctggagctaccaggtaatactg

SEQ ID NO: 2097068 - DNA, 25 bp, Homo sapien
gagaatacaagcaagtgccaccacg

SEQ ID NO: 2097069 - DNA, 25 bp, Homo sapien
ggaccaaagaatatgaccattatta

SEQ ID NO: 2097070 - DNA, 25 bp, Homo sapien
gtttcgccatgtcactcgggttggt

SEQ ID NO: 2097071 - DNA, 25 bp, Homo sapien
ttactgggccaaatagaaagaacat

SEQ ID NO: 2097072 - DNA, 25 bp, Homo sapien
aaagagtcggaaagctcctctcctg

SEQ ID NO: 2097073 - DNA, 25 bp, Homo sapien
gacaagcccactcggtcctggtagt

SEQ ID NO: 2097074 - DNA, 25 bp, Homo sapien
acttgggaatcagcaagaacaggcc

SEQ ID NO: 2097075 - DNA, 25 bp, Homo sapien
tagaagctacctagaaacaccagca

SEQ ID NO: 2097076 - DNA, 25 bp, Homo sapien
gggcacataaaccacctgaataggt

SEQ ID NO: 2097077 - DNA, 25 bp, Homo sapien
taaaccacctgaataggtttgtctg

SEQ ID NO: 2097078 - DNA, 25 bp, Homo sapien
cttgaacaactcaaatagcatatga

SEQ ID NO: 2097079 - DNA, 25 bp, Homo sapien
gatgtgagggcacataaaccacctg

SEQ ID NO: 2097080 - DNA, 25 bp, Homo sapien
taacagcagggtagccctcttttct

SEQ ID NO: 2097081 - DNA, 25 bp, Homo sapien
tcatagagttcaactgtcgctctca

SEQ ID NO: 2097082 - DNA, 25 bp, Homo sapien
ttaacagcagggtagccctcttttc

SEQ ID NO: 2097083 - DNA, 25 bp, Homo sapien
gtcttcatagagttcaactgtcgct

SEQ ID NO: 2097084 - DNA, 25 bp, Homo sapien
taggagcagtagaatacatgtagtt

SEQ ID NO: 2097085 - DNA, 25 bp, Homo sapien
gacgatctatttttcgaagtgggac

SEQ ID NO: 2097086 - DNA, 25 bp, Homo sapien
gctgggtctaggagcagtagaatac

SEQ ID NO: 2097087 - DNA, 25 bp, Homo sapien
aaaagacgatctatttttcgaagtg

SEQ ID NO: 2097088 - DNA, 25 bp, Homo sapien
tgaaaatatctagcatacagacggg

SEQ ID NO: 2097089 - DNA, 25 bp, Homo sapien
tcagtacccactccttccatggaat

SEQ ID NO: 2097090 - DNA, 25 bp, Homo sapien
tacagacgggaaattggcaaaccat

SEQ ID NO: 2097091 - DNA, 25 bp, Homo sapien
actccttccatggaatacagtttca

SEQ ID NO: 2097092 - DNA, 25 bp, Homo sapien
gtaatggcgccatgcggacttatta

SEQ ID NO: 2097093 - DNA, 25 bp, Homo sapien
gcgccatgcggacttattaaaaact

SEQ ID NO: 2097094 - DNA, 25 bp, Homo sapien
tcggcttcaggcgtggtcttgtaat

SEQ ID NO: 2097095 - DNA, 25 bp, Homo sapien
ctgggattgctccaatcatcggctt

SEQ ID NO: 2097096 - DNA, 25 bp, Homo sapien
gtgggacacctttattcagacaaat

SEQ ID NO: 2097097 - DNA, 25 bp, Homo sapien
ggacacctttattcagacaaatcag

SEQ ID NO: 2097098 - DNA, 25 bp, Homo sapien
gtgagtgggacacctttattcagac

SEQ ID NO: 2097099 - DNA, 25 bp, Homo sapien
gagtgggacacctttattcagacaa

SEQ ID NO: 2097100 - DNA, 25 bp, Homo sapien
tacaacgtttatgaggacaaactgc

SEQ ID NO: 2097101 - DNA, 25 bp, Homo sapien
gttgtgaatacctctacactgcaag

SEQ ID NO: 2097102 - DNA, 25 bp, Homo sapien
gatggatagatcaccttttatcttg

SEQ ID NO: 2097103 - DNA, 25 bp, Homo sapien
aaattgatggcaggccaaatccctg

SEQ ID NO: 2097104 - DNA, 25 bp, Homo sapien
tcacaaggagcaacagtacgatctg

SEQ ID NO: 2097105 - DNA, 25 bp, Homo sapien
caagatggagagtacgagggcacaa

SEQ ID NO: 2097106 - DNA, 25 bp, Homo sapien
gctcttcggtgacaggcatcaatca

SEQ ID NO: 2097107 - DNA, 25 bp, Homo sapien
ggagggctctgggactaaatcatca

SEQ ID NO: 2097108 - DNA, 25 bp, Homo sapien
tggtattgaccaggaggcagttttt

SEQ ID NO: 2097109 - DNA, 25 bp, Homo sapien
tacaactagtaaagcgcatcataca

SEQ ID NO: 2097110 - DNA, 25 bp, Homo sapien
tatgacacaggtacagtattagatg

SEQ ID NO: 2097111 - DNA, 25 bp, Homo sapien
ggccttttccctctgatagtctatt

SEQ ID NO: 2097112 - DNA, 25 bp, Homo sapien
gaaacaggaatgcaatcaagccaca

SEQ ID NO: 2097113 - DNA, 25 bp, Homo sapien
ggagctaattgcatcggtactatca

SEQ ID NO: 2097114 - DNA, 25 bp, Homo sapien
gaacttctacatcagtggactcaac

SEQ ID NO: 2097115 - DNA, 25 bp, Homo sapien
taaagatgaacggaactaccctgag

SEQ ID NO: 2097116 - DNA, 25 bp, Homo sapien
aaacccaaccgaagctgtaatccag

SEQ ID NO: 2097117 - DNA, 25 bp, Homo sapien
caagaatccgatagccagccaagtt

SEQ ID NO: 2097118 - DNA, 25 bp, Homo sapien
tccagggcaaacaatcaggtcatct

SEQ ID NO: 2097119 - DNA, 25 bp, Homo sapien
tgatacaaaacgcagtgaggcttga

SEQ ID NO: 2097120 - DNA, 25 bp, Homo sapien
taccacggactccagggcaatgtct

SEQ ID NO: 2097121 - DNA, 25 bp, Homo sapien
gtctgacagatacaaccaagttggg

SEQ ID NO: 2097122 - DNA, 25 bp, Homo sapien
taaaagctacaactccataccacgg

SEQ ID NO: 2097123 - DNA, 25 bp, Homo sapien
agaagagttcttgcatttgccaggc

SEQ ID NO: 2097124 - DNA, 25 bp, Homo sapien
tttcacaccaggacagacattaggg

SEQ ID NO: 2097125 - DNA, 25 bp, Homo sapien
gactagttgggctatgacagacacc

SEQ ID NO: 2097126 - DNA, 25 bp, Homo sapien
tgaacacttattgcaaagccaggcg

SEQ ID NO: 2097127 - DNA, 25 bp, Homo sapien
gaatttataagaaagcggtgccacg

SEQ ID NO: 2097128 - DNA, 25 bp, Homo sapien
gatgctgcaggccttatccccgaag

SEQ ID NO: 2097129 - DNA, 25 bp, Homo sapien
tccaggagaggagcagccggatgct

SEQ ID NO: 2097130 - DNA, 25 bp, Homo sapien
tgcaggccttatccccgaagcagag

SEQ ID NO: 2097131 - DNA, 25 bp, Homo sapien
cttcctcacccaaagcagcctcagc

SEQ ID NO: 2097132 - DNA, 25 bp, Homo sapien
ataggcgcgtgccaccatgccgggc

SEQ ID NO: 2097133 - DNA, 25 bp, Homo sapien
atttttagtagagacagcatttcac

SEQ ID NO: 2097134 - DNA, 25 bp, Homo sapien
tagtagagacagcatttcaccatgt

SEQ ID NO: 2097135 - DNA, 25 bp, Homo sapien
tataggcgcgtgccaccatgccggg

SEQ ID NO: 2097136 - DNA, 25 bp, Homo sapien
ggaagaagtagattctttctgaagt

SEQ ID NO: 2097137 - DNA, 25 bp, Homo sapien
gaagaagtagattctttctgaagtc

SEQ ID NO: 2097138 - DNA, 25 bp, Homo sapien
atatagaggactgtgatatgcattt

SEQ ID NO: 2097139 - DNA, 25 bp, Homo sapien
aatatagaggactgtgatatgcatt

SEQ ID NO: 2097140 - DNA, 25 bp, Homo sapien
aatgcttttctgaaccgctttttgg

SEQ ID NO: 2097141 - DNA, 25 bp, Homo sapien
ttctgaaccgctttttggtgctggg

SEQ ID NO: 2097142 - DNA, 25 bp, Homo sapien
ctggggttctgccttacatggaagg

SEQ ID NO: 2097143 - DNA, 25 bp, Homo sapien
tcagggtgcacgttcgtttggcccc

SEQ ID NO: 2097144 - DNA, 25 bp, Homo sapien
aggaacagacttggctgattcaggc

SEQ ID NO: 2097145 - DNA, 25 bp, Homo sapien
ggaacagacttggctgattcaggca

SEQ ID NO: 2097146 - DNA, 25 bp, Homo sapien
caggaacagacttggctgattcagg

SEQ ID NO: 2097147 - DNA, 25 bp, Homo sapien
ttggtcacaccaccttcttggcacc

SEQ ID NO: 2097148 - DNA, 25 bp, Homo sapien
tggtcacaccaccttcttggcaccc

SEQ ID NO: 2097149 - DNA, 25 bp, Homo sapien
gtcacaccaccttcttggcaccctt

SEQ ID NO: 2097150 - DNA, 25 bp, Homo sapien
cttggtcacaccaccttcttggcac

SEQ ID NO: 2097151 - DNA, 25 bp, Homo sapien
ttgagatggacctgcttcaatacct

SEQ ID NO: 2097152 - DNA, 25 bp, Homo sapien
gctatgcttgtgattcttgccatcc

SEQ ID NO: 2097153 - DNA, 25 bp, Homo sapien
agttgagatggacctgcttcaatac

SEQ ID NO: 2097154 - DNA, 25 bp, Homo sapien
tgtggctatgcttgtgattcttgcc

SEQ ID NO: 2097155 - DNA, 25 bp, Homo sapien
gcacaagctgtatggatctccctgg

SEQ ID NO: 2097156 - DNA, 25 bp, Homo sapien
tccctaggcagcaggcacaagctgt

SEQ ID NO: 2097157 - DNA, 25 bp, Homo sapien
ttgtgagacacagtgtgattggcca

SEQ ID NO: 2097158 - DNA, 25 bp, Homo sapien
tccctggaggtgatcgtcgagtact

SEQ ID NO: 2097159 - DNA, 25 bp, Homo sapien
atcacgtcctcccttcaatatctta

SEQ ID NO: 2097160 - DNA, 25 bp, Homo sapien
actggaagacccatcacgtcctccc

SEQ ID NO: 2097161 - DNA, 25 bp, Homo sapien
cacgtcctcccttcaatatcttaaa

SEQ ID NO: 2097162 - DNA, 25 bp, Homo sapien
gacccatcacgtcctcccttcaata

SEQ ID NO: 2097163 - DNA, 25 bp, Homo sapien
tgtagccatcaccacatcacccaca

SEQ ID NO: 2097164 - DNA, 25 bp, Homo sapien
cagcacagttgattccactcctaac

SEQ ID NO: 2097165 - DNA, 25 bp, Homo sapien
gtagccatcaccacatcacccacac

SEQ ID NO: 2097166 - DNA, 25 bp, Homo sapien
gtcagcacagttgattccactccta

SEQ ID NO: 2097167 - DNA, 25 bp, Homo sapien
aatactggggcacaattctgcaccc

SEQ ID NO: 2097168 - DNA, 25 bp, Homo sapien
tggggcacaattctgcaccctcctt

SEQ ID NO: 2097169 - DNA, 25 bp, Homo sapien
tgtatctaatactggggcacaattc

SEQ ID NO: 2097170 - DNA, 25 bp, Homo sapien
cagagctgtatctaatactggggca

SEQ ID NO: 2097171 - DNA, 25 bp, Homo sapien
gcgtttgttagcatgaatctggcct

SEQ ID NO: 2097172 - DNA, 25 bp, Homo sapien
tctgtgggtatgaagatcggctttg

SEQ ID NO: 2097173 - DNA, 25 bp, Homo sapien
tcatggcaaagcagtaaagtagcac

SEQ ID NO: 2097174 - DNA, 25 bp, Homo sapien
caaagattctgagcccaacgaggta

SEQ ID NO: 2097175 - DNA, 25 bp, Homo sapien
cggccttcccgcggacgcgcgtttg

SEQ ID NO: 2097176 - DNA, 25 bp, Homo sapien
gggaggctgcggacttccggccgga

SEQ ID NO: 2097177 - DNA, 25 bp, Homo sapien
tcgggaggctgcggacttccggccg

SEQ ID NO: 2097178 - DNA, 25 bp, Homo sapien
ccttcccgcggacgcgcgtttggcg

SEQ ID NO: 2097179 - DNA, 25 bp, Homo sapien
ggtcccgaatctcccgattccgcgc

SEQ ID NO: 2097180 - DNA, 25 bp, Homo sapien
aatctcccgattccgcgccaaccag

SEQ ID NO: 2097181 - DNA, 25 bp, Homo sapien
cccgaatctcccgattccgcgccaa

SEQ ID NO: 2097182 - DNA, 25 bp, Homo sapien
gaatctcccgattccgcgccaacca

SEQ ID NO: 2097183 - DNA, 25 bp, Homo sapien
agtcgtcgccgtgcacaggtgccat

SEQ ID NO: 2097184 - DNA, 25 bp, Homo sapien
gagccccgcgcgcggaattgtccct

SEQ ID NO: 2097185 - DNA, 25 bp, Homo sapien
agccccgcgcgcggaattgtccctc

SEQ ID NO: 2097186 - DNA, 25 bp, Homo sapien
ccccgcgcgcggaattgtccctcac

SEQ ID NO: 2097187 - DNA, 25 bp, Homo sapien
gccccgcgcgcggaattgtccctca

SEQ ID NO: 2097188 - DNA, 25 bp, Homo sapien
aggaagcgagttctcattaatggtg

SEQ ID NO: 2097189 - DNA, 25 bp, Homo sapien
caaaggaagctgattaggaagcgag

SEQ ID NO: 2097190 - DNA, 25 bp, Homo sapien
gcgagttctcattaatggtgatgta

SEQ ID NO: 2097191 - DNA, 25 bp, Homo sapien
ggaagctgattaggaagcgagttct

SEQ ID NO: 2097192 - DNA, 25 bp, Homo sapien
agtctttctagggcttcttggcgcc

SEQ ID NO: 2097193 - DNA, 25 bp, Homo sapien
gccgggctcgagaagatacaaaact

SEQ ID NO: 2097194 - DNA, 25 bp, Homo sapien
tgattttttttctcgccgggctcga

SEQ ID NO: 2097195 - DNA, 25 bp, Homo sapien
gcttcttggcgccccttctttgatt

SEQ ID NO: 2097196 - DNA, 25 bp, Homo sapien
cataaacacctgtgaagtcctcgac

SEQ ID NO: 2097197 - DNA, 25 bp, Homo sapien
tcgaatactgttcttcatcaacttc

SEQ ID NO: 2097198 - DNA, 25 bp, Homo sapien
tgcctgaaccagcttcgaatactgt

SEQ ID NO: 2097199 - DNA, 25 bp, Homo sapien
agtcatcatcctggcgtgcctgaac

SEQ ID NO: 2097200 - DNA, 25 bp, Homo sapien
gggacaaaatttaatactgggatca

SEQ ID NO: 2097201 - DNA, 25 bp, Homo sapien
caaaatttaatactgggatcaaatt

SEQ ID NO: 2097202 - DNA, 25 bp, Homo sapien
ggacaaaatttaatactgggatcaa

SEQ ID NO: 2097203 - DNA, 25 bp, Homo sapien
gacaaaatttaatactgggatcaaa

SEQ ID NO: 2097204 - DNA, 25 bp, Homo sapien
gcatcaagggcatcatcttcaaggt

SEQ ID NO: 2097205 - DNA, 25 bp, Homo sapien
gtcatcatcaaaaatctctcggcca

SEQ ID NO: 2097206 - DNA, 25 bp, Homo sapien
catcagcatcaagggcatcatcttc

SEQ ID NO: 2097207 - DNA, 25 bp, Homo sapien
tcatcaaaaatctctcggccatctt

SEQ ID NO: 2097208 - DNA, 25 bp, Homo sapien
gtcactgcgagcttctttacattcc

SEQ ID NO: 2097209 - DNA, 25 bp, Homo sapien
tgtctttattgcgtgctttaccatc

SEQ ID NO: 2097210 - DNA, 25 bp, Homo sapien
tgaacattgacttaatgttgttcgg

SEQ ID NO: 2097211 - DNA, 25 bp, Homo sapien
cattcctcttgtctttattgcgtgc

SEQ ID NO: 2097212 - DNA, 25 bp, Homo sapien
cagtgttaagatcctgtagaatgtc

SEQ ID NO: 2097213 - DNA, 25 bp, Homo sapien
gaatgtcacctagcagaccatcctt

SEQ ID NO: 2097214 - DNA, 25 bp, Homo sapien
ttaagatcctgtagaatgtcaccta

SEQ ID NO: 2097215 - DNA, 25 bp, Homo sapien
acctagcagaccatccttggacaag

SEQ ID NO: 2097216 - DNA, 25 bp, Homo sapien
gtgcacagagaaaggattcggtgaa

SEQ ID NO: 2097217 - DNA, 25 bp, Homo sapien
gattcggtgaagctccaatggatct

SEQ ID NO: 2097218 - DNA, 25 bp, Homo sapien
ggtgaagctccaatggatcttttct

SEQ ID NO: 2097219 - DNA, 25 bp, Homo sapien
cattacaggtggtggagttatttga

SEQ ID NO: 2097220 - DNA, 25 bp, Homo sapien
gacaggggaagcaatttttcctgaa

SEQ ID NO: 2097221 - DNA, 25 bp, Homo sapien
aagcaatttttcctgaaggaactgc

SEQ ID NO: 2097222 - DNA, 25 bp, Homo sapien
ctggagacaggggaagcaatttttc

SEQ ID NO: 2097223 - DNA, 25 bp, Homo sapien
gaagcaatttttcctgaaggaactg

SEQ ID NO: 2097224 - DNA, 25 bp, Homo sapien
cagcacgtttaagaggaacaggagt

SEQ ID NO: 2097225 - DNA, 25 bp, Homo sapien
ttcagcacgtttaagaggaacagga

SEQ ID NO: 2097226 - DNA, 25 bp, Homo sapien
caaattcagcacgtttaagaggaac

SEQ ID NO: 2097227 - DNA, 25 bp, Homo sapien
cagcaaattcagcacgtttaagagg

SEQ ID NO: 2097228 - DNA, 25 bp, Homo sapien
tgtactctcgacctgtacatcatcg

SEQ ID NO: 2097229 - DNA, 25 bp, Homo sapien
tcttcaaactccattgcccctgact

SEQ ID NO: 2097230 - DNA, 25 bp, Homo sapien
cattgcccctgactcctgctcttct

SEQ ID NO: 2097231 - DNA, 25 bp, Homo sapien
catgggctcatcaaagtcaccatct

SEQ ID NO: 2097232 - DNA, 25 bp, Homo sapien
tcttgatcaatgtcccaacaagaga

SEQ ID NO: 2097233 - DNA, 25 bp, Homo sapien
gatcctcataagcatccaaccaata

SEQ ID NO: 2097234 - DNA, 25 bp, Homo sapien
gcactgagaaactgctatcaccttc

SEQ ID NO: 2097235 - DNA, 25 bp, Homo sapien
ctggttggttgtactgatcctcata

SEQ ID NO: 2097236 - DNA, 25 bp, Homo sapien
tgctccaggaaagtcacgtgaaaat

SEQ ID NO: 2097237 - DNA, 25 bp, Homo sapien
gatgggaccattaaccaagataggg

SEQ ID NO: 2097238 - DNA, 25 bp, Homo sapien
gagtaatactgggatagccaggcca

SEQ ID NO: 2097239 - DNA, 25 bp, Homo sapien
tcagtccctctagcagtgatgtgga

SEQ ID NO: 2097240 - DNA, 25 bp, Homo sapien
gggtctcggctgattcaatccaaac

SEQ ID NO: 2097241 - DNA, 25 bp, Homo sapien
ggaaggaagtaaagcgttcgctcga

SEQ ID NO: 2097242 - DNA, 25 bp, Homo sapien
accatgacacaacagctcacatggg

SEQ ID NO: 2097243 - DNA, 25 bp, Homo sapien
gcgttcgctcgatatttttcaccat

SEQ ID NO: 2097244 - DNA, 25 bp, Homo sapien
acatccttcattgaaattggagttc

SEQ ID NO: 2097245 - DNA, 25 bp, Homo sapien
taaacatccttcattgaaattggag

SEQ ID NO: 2097246 - DNA, 25 bp, Homo sapien
tcctcataaacatccttcattgaaa

SEQ ID NO: 2097247 - DNA, 25 bp, Homo sapien
tcataaacatccttcattgaaattg

SEQ ID NO: 2097248 - DNA, 25 bp, Homo sapien
aggtatctcaaaagcatagttcttt

SEQ ID NO: 2097249 - DNA, 25 bp, Homo sapien
aacttccaagtactcagatttttct

SEQ ID NO: 2097250 - DNA, 25 bp, Homo sapien
gtgttggtcccaaatacatgagaaa

SEQ ID NO: 2097251 - DNA, 25 bp, Homo sapien
cagttccaggctagatgtgttggtc

SEQ ID NO: 2097252 - DNA, 25 bp, Homo sapien
tctgttcatcaagaacagttccagg

SEQ ID NO: 2097253 - DNA, 25 bp, Homo sapien
tggactttttacttcaagccaacaa

SEQ ID NO: 2097254 - DNA, 25 bp, Homo sapien
caactgactggctgattcaagagct

SEQ ID NO: 2097255 - DNA, 25 bp, Homo sapien
gacaagcggtggtggactgacatcc

SEQ ID NO: 2097256 - DNA, 25 bp, Homo sapien
tgaaagccatcacgacaagcggtgg

SEQ ID NO: 2097257 - DNA, 25 bp, Homo sapien
ccatcacgacaagcggtggtggact

SEQ ID NO: 2097258 - DNA, 25 bp, Homo sapien
gatggttctttgcattctgcattgt

SEQ ID NO: 2097259 - DNA, 25 bp, Homo sapien
gaagcataccaaggttcacagggaa

SEQ ID NO: 2097260 - DNA, 25 bp, Homo sapien
tgtgcaagttcaggcaagtaacaca

SEQ ID NO: 2097261 - DNA, 25 bp, Homo sapien
tctgcgaatcttgtgtgaatcctga

SEQ ID NO: 2097262 - DNA, 25 bp, Homo sapien
taaggcatgggtacaaaatctgtcc

SEQ ID NO: 2097263 - DNA, 25 bp, Homo sapien
tttggggctgctttatccaatgcaa

SEQ ID NO: 2097264 - DNA, 25 bp, Homo sapien
atgcaaaactgtgatggaccaaagc

SEQ ID NO: 2097265 - DNA, 25 bp, Homo sapien
tgtgatggaccaaagctgccatagc

SEQ ID NO: 2097266 - DNA, 25 bp, Homo sapien
aaactgtgatggaccaaagctgcca

SEQ ID NO: 2097267 - DNA, 25 bp, Homo sapien
atacagtcctttggtttagacacaa

SEQ ID NO: 2097268 - DNA, 25 bp, Homo sapien
catatggaaaaatacagtcctttgg

SEQ ID NO: 2097269 - DNA, 25 bp, Homo sapien
gacttctttgaaagcatatggaaaa

SEQ ID NO: 2097270 - DNA, 25 bp, Homo sapien
tttctcaatgacttctttgaaagca

SEQ ID NO: 2097271 - DNA, 25 bp, Homo sapien
ttctcgctccaaacaaacagatgct

SEQ ID NO: 2097272 - DNA, 25 bp, Homo sapien
gatgtcatagtccaatctggcagga

SEQ ID NO: 2097273 - DNA, 25 bp, Homo sapien
tttggccaaccccatgtcaactttg

SEQ ID NO: 2097274 - DNA, 25 bp, Homo sapien
catggagcacgctggaatttagaga

SEQ ID NO: 2097275 - DNA, 25 bp, Homo sapien
tgttgcagcaacctcaaccttcaca

SEQ ID NO: 2097276 - DNA, 25 bp, Homo sapien
aaacctagcagtgttctttctgttg

SEQ ID NO: 2097277 - DNA, 25 bp, Homo sapien
caggatcaattttgtgaacttttgc

SEQ ID NO: 2097278 - DNA, 25 bp, Homo sapien
caattttgtgaacttttgcaaggaa

SEQ ID NO: 2097279 - DNA, 25 bp, Homo sapien
cagtagtacttccagttcaaaccca

SEQ ID NO: 2097280 - DNA, 25 bp, Homo sapien
gttcaaacccataaatattatgacc

SEQ ID NO: 2097281 - DNA, 25 bp, Homo sapien
tagtacttccagttcaaacccataa

SEQ ID NO: 2097282 - DNA, 25 bp, Homo sapien
attctctgcagtagtacttccagtt

SEQ ID NO: 2097283 - DNA, 25 bp, Homo sapien
tggaccagtgaggagctttgcacac

SEQ ID NO: 2097284 - DNA, 25 bp, Homo sapien
cagtcgacctatcttggaccagtga

SEQ ID NO: 2097285 - DNA, 25 bp, Homo sapien
gatcgcttcagtcgacctatcttgg

SEQ ID NO: 2097286 - DNA, 25 bp, Homo sapien
tttggcatgttggatcgcttcagtc

SEQ ID NO: 2097287 - DNA, 25 bp, Homo sapien
tccattgggattacaaccctttcag

SEQ ID NO: 2097288 - DNA, 25 bp, Homo sapien
tacaacgaatcaattcctttgctga

SEQ ID NO: 2097289 - DNA, 25 bp, Homo sapien
acatcacagatcattcgaccacagg

SEQ ID NO: 2097290 - DNA, 25 bp, Homo sapien
tgaacaagttcagacagatggtagc

SEQ ID NO: 2097291 - DNA, 25 bp, Homo sapien
aatgttcccagcgatgttagtgatc

SEQ ID NO: 2097292 - DNA, 25 bp, Homo sapien
tgatctgcaatgctaatggaagaac

SEQ ID NO: 2097293 - DNA, 25 bp, Homo sapien
tcccagcgatgttagtgatctgcaa

SEQ ID NO: 2097294 - DNA, 25 bp, Homo sapien
ccaacaggtataacagttgagaaga

SEQ ID NO: 2097295 - DNA, 25 bp, Homo sapien
gagatgatccgtatgttcacccaaa

SEQ ID NO: 2097296 - DNA, 25 bp, Homo sapien
tatcatataacaactaccccaagca

SEQ ID NO: 2097297 - DNA, 25 bp, Homo sapien
caaatttcaacacgctgcacctggc

SEQ ID NO: 2097298 - DNA, 25 bp, Homo sapien
gctttcagaatccaagttactcatt

SEQ ID NO: 2097299 - DNA, 25 bp, Homo sapien
gaactcgttacgctcggatcgtcca

SEQ ID NO: 2097300 - DNA, 25 bp, Homo sapien
ttgttttcgtaaaatgcatgaagca

SEQ ID NO: 2097301 - DNA, 25 bp, Homo sapien
gaagcaacaagaactcgttacgctc

SEQ ID NO: 2097302 - DNA, 25 bp, Homo sapien
tgcttgtcaggcacaatatagttgt

SEQ ID NO: 2097303 - DNA, 25 bp, Homo sapien
cttgtatttattggtatctccatca

SEQ ID NO: 2097304 - DNA, 25 bp, Homo sapien
gctgctttcttacgtcctttcttgt

SEQ ID NO: 2097305 - DNA, 25 bp, Homo sapien
cagcataagctgctttcttacgtcc

SEQ ID NO: 2097306 - DNA, 25 bp, Homo sapien
taagctgctttcttacgtcctttct

SEQ ID NO: 2097307 - DNA, 25 bp, Homo sapien
tgtcagtagtggaacgacccaccct

SEQ ID NO: 2097308 - DNA, 25 bp, Homo sapien
aatgtcagtagtggaacgacccacc

SEQ ID NO: 2097309 - DNA, 25 bp, Homo sapien
atgtcagtagtggaacgacccaccc

SEQ ID NO: 2097310 - DNA, 25 bp, Homo sapien
aaatgtcagtagtggaacgacccac

SEQ ID NO: 2097311 - DNA, 25 bp, Homo sapien
tccagaagcaaaatgaacttatcat

SEQ ID NO: 2097312 - DNA, 25 bp, Homo sapien
gaagtccagaagcaaaatgaactta

SEQ ID NO: 2097313 - DNA, 25 bp, Homo sapien
tgatggaaggatatagactgttgaa

SEQ ID NO: 2097314 - DNA, 25 bp, Homo sapien
aggatatagactgttgaagtccaga

SEQ ID NO: 2097315 - DNA, 25 bp, Homo sapien
tctggcaactcagggatctgttctt

SEQ ID NO: 2097316 - DNA, 25 bp, Homo sapien
catttctaagcttggatctggcaac

SEQ ID NO: 2097317 - DNA, 25 bp, Homo sapien
tccggatctctctgggcaaaatgcc

SEQ ID NO: 2097318 - DNA, 25 bp, Homo sapien
tgacttgttttctccgttctaccag

SEQ ID NO: 2097319 - DNA, 25 bp, Homo sapien
tactgttcgctgtgagcttcaaagc

SEQ ID NO: 2097320 - DNA, 25 bp, Homo sapien
aaaatctgctataggaaaatcccag

SEQ ID NO: 2097321 - DNA, 25 bp, Homo sapien
ctttgtatgtcaccaaggcagccag

SEQ ID NO: 2097322 - DNA, 25 bp, Homo sapien
ggcaaccatacatactgttcgctgt

SEQ ID NO: 2097323 - DNA, 25 bp, Homo sapien
acccatgtattatcacccagttggg

SEQ ID NO: 2097324 - DNA, 25 bp, Homo sapien
taagagtaaccttgatccaatctca

SEQ ID NO: 2097325 - DNA, 25 bp, Homo sapien
tccaagggagtaaattgtcaactat

SEQ ID NO: 2097326 - DNA, 25 bp, Homo sapien
ttgcctctcgtgagaaacttaagag

SEQ ID NO: 2097327 - DNA, 25 bp, Homo sapien
cgctagagccaaacgtgcacgattc

SEQ ID NO: 2097328 - DNA, 25 bp, Homo sapien
gagccaaacgtgcacgattccagga

SEQ ID NO: 2097329 - DNA, 25 bp, Homo sapien
ccaaacgtgcacgattccaggaaaa

SEQ ID NO: 2097330 - DNA, 25 bp, Homo sapien
ttaggtcgctagagccaaacgtgca

SEQ ID NO: 2097331 - DNA, 25 bp, Homo sapien
ttttactggaatcattaccgaaggc

SEQ ID NO: 2097332 - DNA, 25 bp, Homo sapien
caagctctagctctagttttactgg

SEQ ID NO: 2097333 - DNA, 25 bp, Homo sapien
tcctctcaaggcagtgggtcacaag

SEQ ID NO: 2097334 - DNA, 25 bp, Homo sapien
taagtaatcacaagtttagcttccc

SEQ ID NO: 2097335 - DNA, 25 bp, Homo sapien
gaggtgaagtgatccacgtaggacc

SEQ ID NO: 2097336 - DNA, 25 bp, Homo sapien
taaaactgagtgaacaaacttcgca

SEQ ID NO: 2097337 - DNA, 25 bp, Homo sapien
taataactgcaccttacgactgtaa

SEQ ID NO: 2097338 - DNA, 25 bp, Homo sapien
gatggtggtctaaactaatcagagc

SEQ ID NO: 2097339 - DNA, 25 bp, Homo sapien
ggaagcattacacttcccatcacat

SEQ ID NO: 2097340 - DNA, 25 bp, Homo sapien
cttcccatcacatgagaattcagca

SEQ ID NO: 2097341 - DNA, 25 bp, Homo sapien
tgagaattcagcacctcaggttcat

SEQ ID NO: 2097342 - DNA, 25 bp, Homo sapien
gaaggaagcattacacttcccatca

SEQ ID NO: 2097343 - DNA, 25 bp, Homo sapien
gcatggaatttgttcacagggcaat

SEQ ID NO: 2097344 - DNA, 25 bp, Homo sapien
gaaagagctctctgttaaagtgcaa

SEQ ID NO: 2097345 - DNA, 25 bp, Homo sapien
cacatagtaggccagacgactgaac

SEQ ID NO: 2097346 - DNA, 25 bp, Homo sapien
tagccttttcagtggttgtaccaca

SEQ ID NO: 2097347 - DNA, 25 bp, Homo sapien
caacagcaaaatgcggtggtgccag

SEQ ID NO: 2097348 - DNA, 25 bp, Homo sapien
gtaccacaagctatagacacacact

SEQ ID NO: 2097349 - DNA, 25 bp, Homo sapien
tcacttagtgcttctgtaccacaag

SEQ ID NO: 2097350 - DNA, 25 bp, Homo sapien
actctttcggcttctcactgtacag

SEQ ID NO: 2097351 - DNA, 25 bp, Homo sapien
tccagtgggatacggaattaagaaa

SEQ ID NO: 2097352 - DNA, 25 bp, Homo sapien
ggagcgcgtcagaagcattcaagca

SEQ ID NO: 2097353 - DNA, 25 bp, Homo sapien
gctcatctaaactagttccagtggg

SEQ ID NO: 2097354 - DNA, 25 bp, Homo sapien
cattcaagcagacggcttagtctgg

SEQ ID NO: 2097355 - DNA, 25 bp, Homo sapien
cagtgaccaaggtggtgctgtcacc

SEQ ID NO: 2097356 - DNA, 25 bp, Homo sapien
cgaagttggacagtgaccaaggtgg

SEQ ID NO: 2097357 - DNA, 25 bp, Homo sapien
tctgaagctcaatcctggaagagca

SEQ ID NO: 2097358 - DNA, 25 bp, Homo sapien
gctggtagtctggagaacccgaagt

SEQ ID NO: 2097359 - DNA, 25 bp, Homo sapien
gacagcgttttctctatccaggcac

SEQ ID NO: 2097360 - DNA, 25 bp, Homo sapien
caccggttgagaatcagtgatacac

SEQ ID NO: 2097361 - DNA, 25 bp, Homo sapien
gtgatacacactgatgacagcgttt

SEQ ID NO: 2097362 - DNA, 25 bp, Homo sapien
aacatgataactggcccctccagaa

SEQ ID NO: 2097363 - DNA, 25 bp, Homo sapien
catattctaggttgcttttgagggc

SEQ ID NO: 2097364 - DNA, 25 bp, Homo sapien
tctagaatccaactttgacatgtag

SEQ ID NO: 2097365 - DNA, 25 bp, Homo sapien
gaaacacgtaagttctcacaagttg

SEQ ID NO: 2097366 - DNA, 25 bp, Homo sapien
gaagtactagtgtacctaacaagga

SEQ ID NO: 2097367 - DNA, 25 bp, Homo sapien
tgcaatgcagcagccgatttcctga

SEQ ID NO: 2097368 - DNA, 25 bp, Homo sapien
taatagcagtaatgatctccccaat

SEQ ID NO: 2097369 - DNA, 25 bp, Homo sapien
caggagactcggtgtcacacaaggc

SEQ ID NO: 2097370 - DNA, 25 bp, Homo sapien
gcaagtcgagtcataatagcagtaa

SEQ ID NO: 2097371 - DNA, 25 bp, Homo sapien
gtcctcaccacagtttgtcaactct

SEQ ID NO: 2097372 - DNA, 25 bp, Homo sapien
ctcaggttcaaggtcctcaccacag

SEQ ID NO: 2097373 - DNA, 25 bp, Homo sapien
tcaggttcaaggtcctcaccacagt

SEQ ID NO: 2097374 - DNA, 25 bp, Homo sapien
ctcaccacagtttgtcaactcttca

SEQ ID NO: 2097375 - DNA, 25 bp, Homo sapien
tgggcctcactagcagctgatgata

SEQ ID NO: 2097376 - DNA, 25 bp, Homo sapien
agtgggcctcactagcagctgatga

SEQ ID NO: 2097377 - DNA, 25 bp, Homo sapien
catcttttcagtgggcctcactagc

SEQ ID NO: 2097378 - DNA, 25 bp, Homo sapien
tcagtgggcctcactagcagctgat

SEQ ID NO: 2097379 - DNA, 25 bp, Homo sapien
gaactggcaaccttcacctttcaga

SEQ ID NO: 2097380 - DNA, 25 bp, Homo sapien
cttcaatgtgaactggcaaccttca

SEQ ID NO: 2097381 - DNA, 25 bp, Homo sapien
ggcaaccttcacctttcagatccat

SEQ ID NO: 2097382 - DNA, 25 bp, Homo sapien
tgtgaactggcaaccttcacctttc

SEQ ID NO: 2097383 - DNA, 25 bp, Homo sapien
accatctctttcgtatgcatcaaaa

SEQ ID NO: 2097384 - DNA, 25 bp, Homo sapien
ttgtaccatctctttcgtatgcatc

SEQ ID NO: 2097385 - DNA, 25 bp, Homo sapien
gtaccatctctttcgtatgcatcaa

SEQ ID NO: 2097386 - DNA, 25 bp, Homo sapien
ttttgtaccatctctttcgtatgca

SEQ ID NO: 2097387 - DNA, 25 bp, Homo sapien
taagcccctataaaccagaaaggca

SEQ ID NO: 2097388 - DNA, 25 bp, Homo sapien
gcaagcaacctgacatcaagaaaat

SEQ ID NO: 2097389 - DNA, 25 bp, Homo sapien
tatacaattaaagattaagccccta

SEQ ID NO: 2097390 - DNA, 25 bp, Homo sapien
cacagtgaccattacatacaatgaa

SEQ ID NO: 2097391 - DNA, 25 bp, Homo sapien
atctgtatctccataaataacttca

SEQ ID NO: 2097392 - DNA, 25 bp, Homo sapien
cagattggtgctattggtgtttatc

SEQ ID NO: 2097393 - DNA, 25 bp, Homo sapien
tctccataaataacttcaagattca

SEQ ID NO: 2097394 - DNA, 25 bp, Homo sapien
tcttccagattggtgctattggtgt

SEQ ID NO: 2097395 - DNA, 25 bp, Homo sapien
acacatgaatttatagtgttccatg

SEQ ID NO: 2097396 - DNA, 25 bp, Homo sapien
ttcacaaaaataggtaaagcagata

SEQ ID NO: 2097397 - DNA, 25 bp, Homo sapien
tatagtgttccatgttagaaacaga

SEQ ID NO: 2097398 - DNA, 25 bp, Homo sapien
gaattcacaaaaataggtaaagcag

SEQ ID NO: 2097399 - DNA, 25 bp, Homo sapien
tcccaagagttaatctaaacagaat

SEQ ID NO: 2097400 - DNA, 25 bp, Homo sapien
gaatttgaagtcatacaacattgga

SEQ ID NO: 2097401 - DNA, 25 bp, Homo sapien
gaacatgttacaaattcccaagagt

SEQ ID NO: 2097402 - DNA, 25 bp, Homo sapien
aagacattgaaaactgcagggacaa

SEQ ID NO: 2097403 - DNA, 25 bp, Homo sapien
caacaaccagagcagcgtacttctt

SEQ ID NO: 2097404 - DNA, 25 bp, Homo sapien
aactatatctaatcctttgagctcc

SEQ ID NO: 2097405 - DNA, 25 bp, Homo sapien
tgtacaacttattcacttcactttt

SEQ ID NO: 2097406 - DNA, 25 bp, Homo sapien
ggtgacataattcccatccgacgtt

SEQ ID NO: 2097407 - DNA, 25 bp, Homo sapien
gttaatttcaaactggctcactggg

SEQ ID NO: 2097408 - DNA, 25 bp, Homo sapien
cctcttctgaatgttttccactata

SEQ ID NO: 2097409 - DNA, 25 bp, Homo sapien
taatttcaaactggctcactgggac

SEQ ID NO: 2097410 - DNA, 25 bp, Homo sapien
tagtgtcccggctttgatcagaaag

SEQ ID NO: 2097411 - DNA, 25 bp, Homo sapien
gccgacagtaaatacttttaataga

SEQ ID NO: 2097412 - DNA, 25 bp, Homo sapien
cataagaggtactccatgtttgctg

SEQ ID NO: 2097413 - DNA, 25 bp, Homo sapien
tatggaccacgtattccttattcaa

SEQ ID NO: 2097414 - DNA, 25 bp, Homo sapien
tcaactttatatcccagaatcagca

SEQ ID NO: 2097415 - DNA, 25 bp, Homo sapien
tccagagggcaacatgtacatgagg

SEQ ID NO: 2097416 - DNA, 25 bp, Homo sapien
cagatgacatatgacacagtatctc

SEQ ID NO: 2097417 - DNA, 25 bp, Homo sapien
tgacacagtatctccagctttcacc

SEQ ID NO: 2097418 - DNA, 25 bp, Homo sapien
aatcctggggatcctttgtcaatgc

SEQ ID NO: 2097419 - DNA, 25 bp, Homo sapien
tattggttcacagatccgagccacg

SEQ ID NO: 2097420 - DNA, 25 bp, Homo sapien
ggacagcatcaattccgtctattgg

SEQ ID NO: 2097421 - DNA, 25 bp, Homo sapien
tgctcaggcgcataggccctctgac

SEQ ID NO: 2097422 - DNA, 25 bp, Homo sapien
cgagccacgactgggtggatctgct

SEQ ID NO: 2097423 - DNA, 25 bp, Homo sapien
gacttgtgggcctacacttcattaa

SEQ ID NO: 2097424 - DNA, 25 bp, Homo sapien
tgggcctacacttcattaatgctga

SEQ ID NO: 2097425 - DNA, 25 bp, Homo sapien
ttgtgggcctacacttcattaatgc

SEQ ID NO: 2097426 - DNA, 25 bp, Homo sapien
ggacttgtgggcctacacttcatta

SEQ ID NO: 2097427 - DNA, 25 bp, Homo sapien
aatactacagatccaatttaaagat

SEQ ID NO: 2097428 - DNA, 25 bp, Homo sapien
tactacagatccaatttaaagataa

SEQ ID NO: 2097429 - DNA, 25 bp, Homo sapien
ttaaaatactacagatccaatttaa

SEQ ID NO: 2097430 - DNA, 25 bp, Homo sapien
aaaatactacagatccaatttaaag

SEQ ID NO: 2097431 - DNA, 25 bp, Homo sapien
tcacctgaggtcaggagttcaagaa

SEQ ID NO: 2097432 - DNA, 25 bp, Homo sapien
actctgggaggtcaaggcaggagaa

SEQ ID NO: 2097433 - DNA, 25 bp, Homo sapien
acctgaggtcaggagttcaagaaca

SEQ ID NO: 2097434 - DNA, 25 bp, Homo sapien
ctgaggtcaggagttcaagaacagc

SEQ ID NO: 2097435 - DNA, 25 bp, Homo sapien
gatgaactctaaattgggtggggtc

SEQ ID NO: 2097436 - DNA, 25 bp, Homo sapien
tatcataaatattctcagttccaca

SEQ ID NO: 2097437 - DNA, 25 bp, Homo sapien
ctttcacagtccctgtatttctctt

SEQ ID NO: 2097438 - DNA, 25 bp, Homo sapien
agggcatggacatttgaatctttca

SEQ ID NO: 2097439 - DNA, 25 bp, Homo sapien
gacagcagaaaagataagagtacct

SEQ ID NO: 2097440 - DNA, 25 bp, Homo sapien
aaccaaggtcaagcactctaggaag

SEQ ID NO: 2097441 - DNA, 25 bp, Homo sapien
gccaatggctagtacatgcataaca

SEQ ID NO: 2097442 - DNA, 25 bp, Homo sapien
taaattggccaagtttcaagctctg

SEQ ID NO: 2097443 - DNA, 25 bp, Homo sapien
tactgcaacgatacaagctgggctc

SEQ ID NO: 2097444 - DNA, 25 bp, Homo sapien
ccttacaatcgatgttactgcaacg

SEQ ID NO: 2097445 - DNA, 25 bp, Homo sapien
cagttgtactgtaaaggtcagaggt

SEQ ID NO: 2097446 - DNA, 25 bp, Homo sapien
taatgaaacgtctaatgtccatgat

SEQ ID NO: 2097447 - DNA, 25 bp, Homo sapien
taagaatatcattatggatacttac

SEQ ID NO: 2097448 - DNA, 25 bp, Homo sapien
tatgtaagaatatcattatggatac

SEQ ID NO: 2097449 - DNA, 25 bp, Homo sapien
tgtgtatgtaagaatatcattatgg

SEQ ID NO: 2097450 - DNA, 25 bp, Homo sapien
aagttgtgtatgtaagaatatcatt

SEQ ID NO: 2097451 - DNA, 25 bp, Homo sapien
ttacagtaaactttcaagtaacaga

SEQ ID NO: 2097452 - DNA, 25 bp, Homo sapien
taaagaggtctctcttgaatctggg

SEQ ID NO: 2097453 - DNA, 25 bp, Homo sapien
tataccacttgcatacattcgtcag

SEQ ID NO: 2097454 - DNA, 25 bp, Homo sapien
catacattcgtcagtaagagaatct

SEQ ID NO: 2097455 - DNA, 25 bp, Homo sapien
tttaaagaggtctctcttgaatctg

SEQ ID NO: 2097456 - DNA, 25 bp, Homo sapien
ctacagagttgcttctactagcaac

SEQ ID NO: 2097457 - DNA, 25 bp, Homo sapien
tactattatctgaaaatacttaatt

SEQ ID NO: 2097458 - DNA, 25 bp, Homo sapien
cagagttgcttctactagcaacccc

SEQ ID NO: 2097459 - DNA, 25 bp, Homo sapien
actattatctgaaaatacttaattc

SEQ ID NO: 2097460 - DNA, 25 bp, Homo sapien
tagtactgtcccgaaagctgttgaa

SEQ ID NO: 2097461 - DNA, 25 bp, Homo sapien
gggcgactcgcatggtgaacataat

SEQ ID NO: 2097462 - DNA, 25 bp, Homo sapien
aatgggctcaaatgcggcacatcag

SEQ ID NO: 2097463 - DNA, 25 bp, Homo sapien
ggcacatcagttttaatagaccagg

SEQ ID NO: 2097464 - DNA, 25 bp, Homo sapien
tctaacctttggctgcaacatggga

SEQ ID NO: 2097465 - DNA, 25 bp, Homo sapien
tccaaaattcactccctgcagatgt

SEQ ID NO: 2097466 - DNA, 25 bp, Homo sapien
agagaagaaatccatctaacctttg

SEQ ID NO: 2097467 - DNA, 25 bp, Homo sapien
gaaatccatctaacctttggctgca

SEQ ID NO: 2097468 - DNA, 25 bp, Homo sapien
tatctttcatggtttcgaagggccg

SEQ ID NO: 2097469 - DNA, 25 bp, Homo sapien
gagttcaaactatcaccaggcaatg

SEQ ID NO: 2097470 - DNA, 25 bp, Homo sapien
tatgcctttgggtagtgaacgacaa

SEQ ID NO: 2097471 - DNA, 25 bp, Homo sapien
actaagggtagacaagagatctggc

SEQ ID NO: 2097472 - DNA, 25 bp, Homo sapien
gaaggtgacgagttcgattgcgaca

SEQ ID NO: 2097473 - DNA, 25 bp, Homo sapien
gattgcgacaggttggctcttcaca

SEQ ID NO: 2097474 - DNA, 25 bp, Homo sapien
aaagaggcccagttcgggagaattg

SEQ ID NO: 2097475 - DNA, 25 bp, Homo sapien
gaagtgtagctttcatgcaggctgg

SEQ ID NO: 2097476 - DNA, 25 bp, Homo sapien
aatggactcgctttgaattgaagtg

SEQ ID NO: 2097477 - DNA, 25 bp, Homo sapien
tctgaaaggcactcaattatccttg

SEQ ID NO: 2097478 - DNA, 25 bp, Homo sapien
tagtgtttaaagaccgattaggcga

SEQ ID NO: 2097479 - DNA, 25 bp, Homo sapien
aattgaagtgaatgcacccgtttcc

SEQ ID NO: 2097480 - DNA, 25 bp, Homo sapien
gaaattgtttcttgagatactgccc

SEQ ID NO: 2097481 - DNA, 25 bp, Homo sapien
tggcttaggagcaaaccagctgtga

SEQ ID NO: 2097482 - DNA, 25 bp, Homo sapien
cacctgtctttgtttgggagtgaca

SEQ ID NO: 2097483 - DNA, 25 bp, Homo sapien
ccaggaattcggtgcatttttaggc

SEQ ID NO: 2097484 - DNA, 25 bp, Homo sapien
ataaccttccattctctacgtcatc

SEQ ID NO: 2097485 - DNA, 25 bp, Homo sapien
cagctgcaatccttctgagtccact

SEQ ID NO: 2097486 - DNA, 25 bp, Homo sapien
ccattctctacgtcatcatgactca

SEQ ID NO: 2097487 - DNA, 25 bp, Homo sapien
cacagctgcaatccttctgagtcca

SEQ ID NO: 2097488 - DNA, 25 bp, Homo sapien
caaaggtctgcgcttagttccccat

SEQ ID NO: 2097489 - DNA, 25 bp, Homo sapien
ttccccatattcaagcagtataaag

SEQ ID NO: 2097490 - DNA, 25 bp, Homo sapien
tctgcgcttagttccccatattcaa

SEQ ID NO: 2097491 - DNA, 25 bp, Homo sapien
gcttagttccccatattcaagcagt

SEQ ID NO: 2097492 - DNA, 25 bp, Homo sapien
gccatcataatgagagataagcagt

SEQ ID NO: 2097493 - DNA, 25 bp, Homo sapien
tactgaatcacggtagaggtcttgt

SEQ ID NO: 2097494 - DNA, 25 bp, Homo sapien
aagaaagggtattaacacacatgca

SEQ ID NO: 2097495 - DNA, 25 bp, Homo sapien
aaattcttccaatttgccaggacaa

SEQ ID NO: 2097496 - DNA, 25 bp, Homo sapien
gttatttttagcgaatcctgattac

SEQ ID NO: 2097497 - DNA, 25 bp, Homo sapien
ccagttatttttagcgaatcctgat

SEQ ID NO: 2097498 - DNA, 25 bp, Homo sapien
tatttttagcgaatcctgattactg

SEQ ID NO: 2097499 - DNA, 25 bp, Homo sapien
tttagcgaatcctgattactgcttc

SEQ ID NO: 2097500 - DNA, 25 bp, Homo sapien
gtaatataacagaaaataaatgaat

SEQ ID NO: 2097501 - DNA, 25 bp, Homo sapien
ctgtaatataacagaaaataaatga

SEQ ID NO: 2097502 - DNA, 25 bp, Homo sapien
taatataacagaaaataaatgaata

SEQ ID NO: 2097503 - DNA, 25 bp, Homo sapien
tgtaatataacagaaaataaatgaa

SEQ ID NO: 2097504 - DNA, 25 bp, Homo sapien
tccagtgcacactccgcatcaaaaa

SEQ ID NO: 2097505 - DNA, 25 bp, Homo sapien
aaatgtaccggtaaaagcacagctg

SEQ ID NO: 2097506 - DNA, 25 bp, Homo sapien
catgatcggtagtaagtttctccag

SEQ ID NO: 2097507 - DNA, 25 bp, Homo sapien
gggtgtacagggacttgtcagaata

SEQ ID NO: 2097508 - DNA, 25 bp, Homo sapien
ggatccctgtgttcacataggcccc

SEQ ID NO: 2097509 - DNA, 25 bp, Homo sapien
ccacggcctgcttctgagacagcaa

SEQ ID NO: 2097510 - DNA, 25 bp, Homo sapien
gttactaaactctgtagaaaatagc

SEQ ID NO: 2097511 - DNA, 25 bp, Homo sapien
caaagccttgctttaatagaggaca

SEQ ID NO: 2097512 - DNA, 25 bp, Homo sapien
ccacagtgcccgcaagtcttgtata

SEQ ID NO: 2097513 - DNA, 25 bp, Homo sapien
tcttgtataaggaaacgccgagtgc

SEQ ID NO: 2097514 - DNA, 25 bp, Homo sapien
catgcaacagctgatcatacgggct

SEQ ID NO: 2097515 - DNA, 25 bp, Homo sapien
catacgggctgaggcgcctatatac

SEQ ID NO: 2097516 - DNA, 25 bp, Homo sapien
ggctgctactatgcgacctctggtt

SEQ ID NO: 2097517 - DNA, 25 bp, Homo sapien
tggtttctaagacgctatggcagct

SEQ ID NO: 2097518 - DNA, 25 bp, Homo sapien
tcaggaatgttgacctactgtagcc

SEQ ID NO: 2097519 - DNA, 25 bp, Homo sapien
ggcagctatacttcttcccatgtgg

SEQ ID NO: 2097520 - DNA, 25 bp, Homo sapien
ggctgggtcctcgaagccacttcaa

SEQ ID NO: 2097521 - DNA, 25 bp, Homo sapien
tcactcgccgtcagctcttagtggg

SEQ ID NO: 2097522 - DNA, 25 bp, Homo sapien
ttcaatctcctcagagtgcccacta

SEQ ID NO: 2097523 - DNA, 25 bp, Homo sapien
ctcagagtgcccactaacacatatg

SEQ ID NO: 2097524 - DNA, 25 bp, Homo sapien
gtttcttggcatattaatatgctga

SEQ ID NO: 2097525 - DNA, 25 bp, Homo sapien
atctttagaactgaatgcctcccac

SEQ ID NO: 2097526 - DNA, 25 bp, Homo sapien
tctatgtgtatgttttggggtcagt

SEQ ID NO: 2097527 - DNA, 25 bp, Homo sapien
tatataatctttagaactgaatgcc

SEQ ID NO: 2097528 - DNA, 25 bp, Homo sapien
tgcgactgctctgagcaagagttgg

SEQ ID NO: 2097529 - DNA, 25 bp, Homo sapien
gctctttcttcatcacgatgaattg

SEQ ID NO: 2097530 - DNA, 25 bp, Homo sapien
ttcatcacgatgaattggaatcaga

SEQ ID NO: 2097531 - DNA, 25 bp, Homo sapien
aatcctgtgcgactgctctgagcaa

SEQ ID NO: 2097532 - DNA, 25 bp, Homo sapien
cctatgggttctctaccggctgtaa

SEQ ID NO: 2097533 - DNA, 25 bp, Homo sapien
cacagcacagtaatcttctggagac

SEQ ID NO: 2097534 - DNA, 25 bp, Homo sapien
cggctgtaacccctgaaagaggatt

SEQ ID NO: 2097535 - DNA, 25 bp, Homo sapien
taaaggacaggcattactaaaacat

SEQ ID NO: 2097536 - DNA, 25 bp, Homo sapien
caggatttagcagcagaaaggtttc

SEQ ID NO: 2097537 - DNA, 25 bp, Homo sapien
ggatttagcagcagaaaggtttctt

SEQ ID NO: 2097538 - DNA, 25 bp, Homo sapien
cacaggatttagcagcagaaaggtt

SEQ ID NO: 2097539 - DNA, 25 bp, Homo sapien
cagcacaggatttagcagcagaaag

SEQ ID NO: 2097540 - DNA, 25 bp, Homo sapien
gagttgcaagccacgatcttcagca

SEQ ID NO: 2097541 - DNA, 25 bp, Homo sapien
tctacaggatatcttgcacaggaag

SEQ ID NO: 2097542 - DNA, 25 bp, Homo sapien
tctgcagagacgtggaatcaattta

SEQ ID NO: 2097543 - DNA, 25 bp, Homo sapien
gagaatagctaatggaccctgggct

SEQ ID NO: 2097544 - DNA, 25 bp, Homo sapien
tatatattccatttgtcgatatttg

SEQ ID NO: 2097545 - DNA, 25 bp, Homo sapien
ccttctgaagtggtgctcatttgac

SEQ ID NO: 2097546 - DNA, 25 bp, Homo sapien
gcctcttgtgaccagggaagaagac

SEQ ID NO: 2097547 - DNA, 25 bp, Homo sapien
gaacagacccatcgacactgtcctg

SEQ ID NO: 2097548 - DNA, 25 bp, Homo sapien
ggttcaagattgaacagacccatcg

SEQ ID NO: 2097549 - DNA, 25 bp, Homo sapien
gggcatcccggcttcacaggattta

SEQ ID NO: 2097550 - DNA, 25 bp, Homo sapien
gcaggtcaggtgtaaggggcatccc

SEQ ID NO: 2097551 - DNA, 25 bp, Homo sapien
tgtaaggggcatcccggcttcacag

SEQ ID NO: 2097552 - DNA, 25 bp, Homo sapien
tcccggcttcacaggatttaaagca

SEQ ID NO: 2097553 - DNA, 25 bp, Homo sapien
tcattcactgaggtccacgtacatg

SEQ ID NO: 2097554 - DNA, 25 bp, Homo sapien
aggtccacgtacatgacagtctgca

SEQ ID NO: 2097555 - DNA, 25 bp, Homo sapien
tcactgaggtccacgtacatgacag

SEQ ID NO: 2097556 - DNA, 25 bp, Homo sapien
ctgaggtccacgtacatgacagtct

SEQ ID NO: 2097557 - DNA, 25 bp, Homo sapien
tgagcagcaggtaagatatggacac

SEQ ID NO: 2097558 - DNA, 25 bp, Homo sapien
cctggtaggggtagtacaactgctc

SEQ ID NO: 2097559 - DNA, 25 bp, Homo sapien
gggtagtacaactgctcatcaaaag

SEQ ID NO: 2097560 - DNA, 25 bp, Homo sapien
cagcaggtaagatatggacacccag

SEQ ID NO: 2097561 - DNA, 25 bp, Homo sapien
cataaaatgactttaatttgtgact

SEQ ID NO: 2097562 - DNA, 25 bp, Homo sapien
taaaatgactttaatttgtgactct

SEQ ID NO: 2097563 - DNA, 25 bp, Homo sapien
aaaatgactttaatttgtgactctc

SEQ ID NO: 2097564 - DNA, 25 bp, Homo sapien
aatgactttaatttgtgactctctc

SEQ ID NO: 2097565 - DNA, 25 bp, Homo sapien
aagtagaatggtggaagattggttt

SEQ ID NO: 2097566 - DNA, 25 bp, Homo sapien
gcaattcgctgctcatcactgaaat

SEQ ID NO: 2097567 - DNA, 25 bp, Homo sapien
ctttaaaagcaattcgctgctcatc

SEQ ID NO: 2097568 - DNA, 25 bp, Homo sapien
aatctggcagacacgacactaaatg

SEQ ID NO: 2097569 - DNA, 25 bp, Homo sapien
tgggttttgggtgtttgcatttgtc

SEQ ID NO: 2097570 - DNA, 25 bp, Homo sapien
ggttttgggtgtttgcatttgtcat

SEQ ID NO: 2097571 - DNA, 25 bp, Homo sapien
aagtgattctctcagggttgggttt

SEQ ID NO: 2097572 - DNA, 25 bp, Homo sapien
cctttcaactggatgaagtgattct

SEQ ID NO: 2097573 - DNA, 25 bp, Homo sapien
gagttagaatgacaaccagcgtcac

SEQ ID NO: 2097574 - DNA, 25 bp, Homo sapien
acaaccagcgtcactcggtgctctt

SEQ ID NO: 2097575 - DNA, 25 bp, Homo sapien
ggactatttacgctgccacacagca

SEQ ID NO: 2097576 - DNA, 25 bp, Homo sapien
gactatttacgctgccacacagcag

SEQ ID NO: 2097577 - DNA, 25 bp, Homo sapien
cacttcgggacaagaattgctctgc

SEQ ID NO: 2097578 - DNA, 25 bp, Homo sapien
cagcgaagagtttgctcagattcac

SEQ ID NO: 2097579 - DNA, 25 bp, Homo sapien
aggatttcacggcacaaccagcgaa

SEQ ID NO: 2097580 - DNA, 25 bp, Homo sapien
tcagattcacttcggagtagccact

SEQ ID NO: 2097581 - DNA, 25 bp, Homo sapien
aaaaaatagcaagcgccagggccaa

SEQ ID NO: 2097582 - DNA, 25 bp, Homo sapien
gctgctgccaaagacggtcctattg

SEQ ID NO: 2097583 - DNA, 25 bp, Homo sapien
cagaaaccgggtcttcaggagcttg

SEQ ID NO: 2097584 - DNA, 25 bp, Homo sapien
gacaagactgaaaaggacagccact

SEQ ID NO: 2097585 - DNA, 25 bp, Homo sapien
gtttgaagaagtatattgaggagca

SEQ ID NO: 2097586 - DNA, 25 bp, Homo sapien
tttgaagaagtatattgaggagcat

SEQ ID NO: 2097587 - DNA, 25 bp, Homo sapien
tgttgcatcttccgccaaactaatt

SEQ ID NO: 2097588 - DNA, 25 bp, Homo sapien
gcatcttccgccaaactaattttaa

SEQ ID NO: 2097589 - DNA, 25 bp, Homo sapien
tacttgaatccactaacacgttcat

SEQ ID NO: 2097590 - DNA, 25 bp, Homo sapien
caataattagtgtattacttgaatc

SEQ ID NO: 2097591 - DNA, 25 bp, Homo sapien
tgtattacttgaatccactaacacg

SEQ ID NO: 2097592 - DNA, 25 bp, Homo sapien
aaaaccagtagtggtatttatactg

SEQ ID NO: 2097593 - DNA, 25 bp, Homo sapien
gcatggctgtgtcctatcacaccca

SEQ ID NO: 2097594 - DNA, 25 bp, Homo sapien
tcctatcacacccaaggcagaatgg

SEQ ID NO: 2097595 - DNA, 25 bp, Homo sapien
ggcagaatggcccaacacctgcttt

SEQ ID NO: 2097596 - DNA, 25 bp, Homo sapien
cagggagtttgcgagggcccagttc

SEQ ID NO: 2097597 - DNA, 25 bp, Homo sapien
gctctccctgagtgaaagccgcttt

SEQ ID NO: 2097598 - DNA, 25 bp, Homo sapien
ccctgagtgaaagccgctttcctgg

SEQ ID NO: 2097599 - DNA, 25 bp, Homo sapien
tggtcagggccgctggagagtttgg

SEQ ID NO: 2097600 - DNA, 25 bp, Homo sapien
tctccctgagtgaaagccgctttcc

SEQ ID NO: 2097601 - DNA, 25 bp, Homo sapien
cacccaacgctagccctggactcac

SEQ ID NO: 2097602 - DNA, 25 bp, Homo sapien
ggtcgtcgggtggatcaccgccacc

SEQ ID NO: 2097603 - DNA, 25 bp, Homo sapien
ggctcgccggctggtggccgcttct

SEQ ID NO: 2097604 - DNA, 25 bp, Homo sapien
gccgcttctggcacttgggtcgtcg

SEQ ID NO: 2097605 - DNA, 25 bp, Homo sapien
ccaggaagtgaagtgcgcagtccga

SEQ ID NO: 2097606 - DNA, 25 bp, Homo sapien
gcgagagcgagaagcccaggcgctc

SEQ ID NO: 2097607 - DNA, 25 bp, Homo sapien
ttggaaagtgccacgtagccaggaa

SEQ ID NO: 2097608 - DNA, 25 bp, Homo sapien
tccgagatgacaggtaatggcgaga

SEQ ID NO: 2097609 - DNA, 25 bp, Homo sapien
gaaatttgaagcaagcgggagtctt

SEQ ID NO: 2097610 - DNA, 25 bp, Homo sapien
ccgggtcgtgtcacagcgggagctg

SEQ ID NO: 2097611 - DNA, 25 bp, Homo sapien
cgggagtcttggctcggaaggcgaa

SEQ ID NO: 2097612 - DNA, 25 bp, Homo sapien
cgttgttgacggtggagtcagaaat

SEQ ID NO: 2097613 - DNA, 25 bp, Homo sapien
tcacagcagtctggatgcgggcatg

SEQ ID NO: 2097614 - DNA, 25 bp, Homo sapien
cccgggaagcaaatgcgagcctgta

SEQ ID NO: 2097615 - DNA, 25 bp, Homo sapien
cccagacgcctgatattgaagtaaa

SEQ ID NO: 2097616 - DNA, 25 bp, Homo sapien
caaggaggtgtgctaaaggctgccc

SEQ ID NO: 2097617 - DNA, 25 bp, Homo sapien
agacgcgtccgaaaacaacctgagg

SEQ ID NO: 2097618 - DNA, 25 bp, Homo sapien
aagcatgtccctcatctcttggtgg

SEQ ID NO: 2097619 - DNA, 25 bp, Homo sapien
gaagttgcggctcctattcactgct

SEQ ID NO: 2097620 - DNA, 25 bp, Homo sapien
taaagatcctagcaagcgtcagcac

SEQ ID NO: 2097621 - DNA, 25 bp, Homo sapien
tatggagacggtttacctctggtgc

SEQ ID NO: 2097622 - DNA, 25 bp, Homo sapien
tgagctggtgtcagttggcatccac

SEQ ID NO: 2097623 - DNA, 25 bp, Homo sapien
gccgctttagatttgctgatgccca

SEQ ID NO: 2097624 - DNA, 25 bp, Homo sapien
tcaaatagcgaattggccgaccagc

SEQ ID NO: 2097625 - DNA, 25 bp, Homo sapien
caggaggagacacctcgatttgtgc

SEQ ID NO: 2097626 - DNA, 25 bp, Homo sapien
gagacacctcgatttgtgcataaaa

SEQ ID NO: 2097627 - DNA, 25 bp, Homo sapien
ccaggaggagacacctcgatttgtg

SEQ ID NO: 2097628 - DNA, 25 bp, Homo sapien
gaggagacacctcgatttgtgcata

SEQ ID NO: 2097629 - DNA, 25 bp, Homo sapien
caacaaataaacaccgtccacagag

SEQ ID NO: 2097630 - DNA, 25 bp, Homo sapien
accgtccacagagagatcccaacag

SEQ ID NO: 2097631 - DNA, 25 bp, Homo sapien
ccacagagagatcccaacagccgtg

SEQ ID NO: 2097632 - DNA, 25 bp, Homo sapien
aataaacaccgtccacagagagatc

SEQ ID NO: 2097633 - DNA, 25 bp, Homo sapien
gaacccacggcttaggaggaggaca

SEQ ID NO: 2097634 - DNA, 25 bp, Homo sapien
agccaagccctaactgtggaaccca

SEQ ID NO: 2097635 - DNA, 25 bp, Homo sapien
ccaggaaatccaagttctatcagtc

SEQ ID NO: 2097636 - DNA, 25 bp, Homo sapien
gagggaaggattagcaaacgcgaca

SEQ ID NO: 2097637 - DNA, 25 bp, Homo sapien
ctcgtccagctttatgcttggagca

SEQ ID NO: 2097638 - DNA, 25 bp, Homo sapien
gctgccgcccggatggctgatggtg

SEQ ID NO: 2097639 - DNA, 25 bp, Homo sapien
cctcggctgccgcccggatggctga

SEQ ID NO: 2097640 - DNA, 25 bp, Homo sapien
cggctgccgcccggatggctgatgg

SEQ ID NO: 2097641 - DNA, 25 bp, Homo sapien
tgagagcagacaggaggctgcgacc

SEQ ID NO: 2097642 - DNA, 25 bp, Homo sapien
tctgagagcagacaggaggctgcga

SEQ ID NO: 2097643 - DNA, 25 bp, Homo sapien
agagcagacaggaggctgcgaccat

SEQ ID NO: 2097644 - DNA, 25 bp, Homo sapien
cccctcttctgagagcagacaggag

SEQ ID NO: 2097645 - DNA, 25 bp, Homo sapien
tttcgaggcgcgatcgagtctgtgc

SEQ ID NO: 2097646 - DNA, 25 bp, Homo sapien
tttctgtgcattagcatctgagtag

SEQ ID NO: 2097647 - DNA, 25 bp, Homo sapien
gctaccaccacggtcattttcgagg

SEQ ID NO: 2097648 - DNA, 25 bp, Homo sapien
atctgagtagatgtatttgctctcc

SEQ ID NO: 2097649 - DNA, 25 bp, Homo sapien
catcatcagttcttgcaggtttgtc

SEQ ID NO: 2097650 - DNA, 25 bp, Homo sapien
catcagttcttgcaggtttgtccga

SEQ ID NO: 2097651 - DNA, 25 bp, Homo sapien
ttcttgcaggtttgtccgaaaggtc

SEQ ID NO: 2097652 - DNA, 25 bp, Homo sapien
tcagttcttgcaggtttgtccgaaa

SEQ ID NO: 2097653 - DNA, 25 bp, Homo sapien
cagccccgggtgcttgtgttaaata

SEQ ID NO: 2097654 - DNA, 25 bp, Homo sapien
tcagaatcctttggctcatcaagcc

SEQ ID NO: 2097655 - DNA, 25 bp, Homo sapien
taagcttctggcattcaggatgccc

SEQ ID NO: 2097656 - DNA, 25 bp, Homo sapien
gcacattttagctctgcggaaccag

SEQ ID NO: 2097657 - DNA, 25 bp, Homo sapien
gagggtccgtgcaggccccaagcgg

SEQ ID NO: 2097658 - DNA, 25 bp, Homo sapien
cagagggtccgtgcaggccccaagc

SEQ ID NO: 2097659 - DNA, 25 bp, Homo sapien
agcagagggtccgtgcaggccccaa

SEQ ID NO: 2097660 - DNA, 25 bp, Homo sapien
ctgaagcagagggtccgtgcaggcc

SEQ ID NO: 2097661 - DNA, 25 bp, Homo sapien
gataagttgtacgatggccgccata

SEQ ID NO: 2097662 - DNA, 25 bp, Homo sapien
attccccagttctccgctctttagt

SEQ ID NO: 2097663 - DNA, 25 bp, Homo sapien
ggagcctcccgcaaatggtacatca

SEQ ID NO: 2097664 - DNA, 25 bp, Homo sapien
tgaatgtcttctgccgcatgcggag

SEQ ID NO: 2097665 - DNA, 25 bp, Homo sapien
caccttgaggtaacagatcaaatac

SEQ ID NO: 2097666 - DNA, 25 bp, Homo sapien
gcgaaatcttgacgagtgggttcac

SEQ ID NO: 2097667 - DNA, 25 bp, Homo sapien
tgcacgttggttaagtttcagcagc

SEQ ID NO: 2097668 - DNA, 25 bp, Homo sapien
cacgttggttaagtttcagcagcga

SEQ ID NO: 2097669 - DNA, 25 bp, Homo sapien
gtttcagcagcgaaatcttgacgag

SEQ ID NO: 2097670 - DNA, 25 bp, Homo sapien
gagatggcacggtcggagtgcacga

SEQ ID NO: 2097671 - DNA, 25 bp, Homo sapien
acggtcggagtgcacgaaacccctg

SEQ ID NO: 2097672 - DNA, 25 bp, Homo sapien
ctttgagtagccacctcctgtcaaa

SEQ ID NO: 2097673 - DNA, 25 bp, Homo sapien
tgcagacctttgagtagccacctcc

SEQ ID NO: 2097674 - DNA, 25 bp, Homo sapien
cagctagcagcagtgatccccaagc

SEQ ID NO: 2097675 - DNA, 25 bp, Homo sapien
ccagtcagctagcagcagtgatccc

SEQ ID NO: 2097676 - DNA, 25 bp, Homo sapien
tctccaaaaagcctcctttcaagag

SEQ ID NO: 2097677 - DNA, 25 bp, Homo sapien
tccaaaaagcctcctttcaagaggc

SEQ ID NO: 2097678 - DNA, 25 bp, Homo sapien
catgtagcagtcagtccttctaggc

SEQ ID NO: 2097679 - DNA, 25 bp, Homo sapien
gccagtgtccttctagagtaccagt

SEQ ID NO: 2097680 - DNA, 25 bp, Homo sapien
catgtgcagtagtaagccagggccc

SEQ ID NO: 2097681 - DNA, 25 bp, Homo sapien
gagaactgtattggagacccttagg

SEQ ID NO: 2097682 - DNA, 25 bp, Homo sapien
tggtatcctggagggacttccggtc

SEQ ID NO: 2097683 - DNA, 25 bp, Homo sapien
cctggtatcctggagggacttccgg

SEQ ID NO: 2097684 - DNA, 25 bp, Homo sapien
ctggtatcctggagggacttccggt

SEQ ID NO: 2097685 - DNA, 25 bp, Homo sapien
agtggatccttcagggccccaacct

SEQ ID NO: 2097686 - DNA, 25 bp, Homo sapien
tgaggaactctaagacccgccccca

SEQ ID NO: 2097687 - DNA, 25 bp, Homo sapien
ctccaggcactatgtaagacagatg

SEQ ID NO: 2097688 - DNA, 25 bp, Homo sapien
atgccttttggcaactgtttcccac

SEQ ID NO: 2097689 - DNA, 25 bp, Homo sapien
ggataacaggattggaggcccttct

SEQ ID NO: 2097690 - DNA, 25 bp, Homo sapien
tggataacaggattggaggcccttc

SEQ ID NO: 2097691 - DNA, 25 bp, Homo sapien
gctggataacaggattggaggccct

SEQ ID NO: 2097692 - DNA, 25 bp, Homo sapien
gataacaggattggaggcccttctg

SEQ ID NO: 2097693 - DNA, 25 bp, Homo sapien
tgtggaaatgagagctctttgggcc

SEQ ID NO: 2097694 - DNA, 25 bp, Homo sapien
gaggacttttctggtctcgggctgt

SEQ ID NO: 2097695 - DNA, 25 bp, Homo sapien
aatgagagctctttgggccaccata

SEQ ID NO: 2097696 - DNA, 25 bp, Homo sapien
tctgaggacttttctggtctcgggc

SEQ ID NO: 2097697 - DNA, 25 bp, Homo sapien
catccatggatccttaaggtcccca

SEQ ID NO: 2097698 - DNA, 25 bp, Homo sapien
tacaacttgcccacgtactgcagaa

SEQ ID NO: 2097699 - DNA, 25 bp, Homo sapien
cagaagtgagatcctgctcagccac

SEQ ID NO: 2097700 - DNA, 25 bp, Homo sapien
tgaattggaggccattccagccacc

SEQ ID NO: 2097701 - DNA, 25 bp, Homo sapien
ctgggactggggaaccaagcgccaa

SEQ ID NO: 2097702 - DNA, 25 bp, Homo sapien
tgggactggggaaccaagcgccaac

SEQ ID NO: 2097703 - DNA, 25 bp, Homo sapien
agaaaaatgcccacccactagagtt

SEQ ID NO: 2097704 - DNA, 25 bp, Homo sapien
gaaaaatgcccacccactagagttc

SEQ ID NO: 2097705 - DNA, 25 bp, Homo sapien
aaatgcccacccactagagttccct

SEQ ID NO: 2097706 - DNA, 25 bp, Homo sapien
tcagatctcaggtttaccgtgggca

SEQ ID NO: 2097707 - DNA, 25 bp, Homo sapien
taccatatgggcctcgcgtagtggg

SEQ ID NO: 2097708 - DNA, 25 bp, Homo sapien
catgctgagaaagagagtgccaacc

SEQ ID NO: 2097709 - DNA, 25 bp, Homo sapien
cacgccttgtggaaatgagagcctt

SEQ ID NO: 2097710 - DNA, 25 bp, Homo sapien
actgggccactatgcttcacctgca

SEQ ID NO: 2097711 - DNA, 25 bp, Homo sapien
cactggttcatggaaggtcccatga

SEQ ID NO: 2097712 - DNA, 25 bp, Homo sapien
tgtggacatgagaacccactgggcc

SEQ ID NO: 2097713 - DNA, 25 bp, Homo sapien
gaagccaagggctcttctggaccca

SEQ ID NO: 2097714 - DNA, 25 bp, Homo sapien
accatgatctctgggggatgtgctg

SEQ ID NO: 2097715 - DNA, 25 bp, Homo sapien
ccagataaaagaccatgatctctgg

SEQ ID NO: 2097716 - DNA, 25 bp, Homo sapien
tctgggggatgtgctgttctcccca

SEQ ID NO: 2097717 - DNA, 25 bp, Homo sapien
atccagataaaagaccatgatctct

SEQ ID NO: 2097718 - DNA, 25 bp, Homo sapien
tgtacccatgaactgctgctctctg

SEQ ID NO: 2097719 - DNA, 25 bp, Homo sapien
tcagagctccaaagaactaccaagg

SEQ ID NO: 2097720 - DNA, 25 bp, Homo sapien
ctgggttaggaaggagatagatttt

SEQ ID NO: 2097721 - DNA, 25 bp, Homo sapien
tagctgataatcctgtattgagcag

SEQ ID NO: 2097722 - DNA, 25 bp, Homo sapien
ccccggcatcatttgtagggaccaa

SEQ ID NO: 2097723 - DNA, 25 bp, Homo sapien
ggatgaggtccaagacagaactcca

SEQ ID NO: 2097724 - DNA, 25 bp, Homo sapien
gagatttacattagggacagcagca

SEQ ID NO: 2097725 - DNA, 25 bp, Homo sapien
gcaaatgggaagtcacagtacagct

SEQ ID NO: 2097726 - DNA, 25 bp, Homo sapien
tagttcctggtataactgggaacaa

SEQ ID NO: 2097727 - DNA, 25 bp, Homo sapien
ttagttcctggtataactgggaaca

SEQ ID NO: 2097728 - DNA, 25 bp, Homo sapien
tgtttagttcctggtataactggga

SEQ ID NO: 2097729 - DNA, 25 bp, Homo sapien
ctgtttagttcctggtataactggg

SEQ ID NO: 2097730 - DNA, 25 bp, Homo sapien
ctcttctacacctttccgcttgcct

SEQ ID NO: 2097731 - DNA, 25 bp, Homo sapien
ttttaacatcttcacacagattgag

SEQ ID NO: 2097732 - DNA, 25 bp, Homo sapien
taacatcttcacacagattgagcat

SEQ ID NO: 2097733 - DNA, 25 bp, Homo sapien
tccgcttgcctggatttttaacatc

SEQ ID NO: 2097734 - DNA, 25 bp, Homo sapien
ttgttggaaactcatctcagtgaaa

SEQ ID NO: 2097735 - DNA, 25 bp, Homo sapien
tgttggaaactcatctcagtgaaaa

SEQ ID NO: 2097736 - DNA, 25 bp, Homo sapien
cttgttggaaactcatctcagtgaa

SEQ ID NO: 2097737 - DNA, 25 bp, Homo sapien
tgctttctcctgtccacactgactg

SEQ ID NO: 2097738 - DNA, 25 bp, Homo sapien
ttaagtaatcatgctgtcaaactct

SEQ ID NO: 2097739 - DNA, 25 bp, Homo sapien
aatcatgctgtcaaactctggtgag

SEQ ID NO: 2097740 - DNA, 25 bp, Homo sapien
catgctgtcaaactctggtgagtgt

SEQ ID NO: 2097741 - DNA, 25 bp, Homo sapien
gtaatcatgctgtcaaactctggtg

SEQ ID NO: 2097742 - DNA, 25 bp, Homo sapien
gaggtgttttcgaaggtttcagaga

SEQ ID NO: 2097743 - DNA, 25 bp, Homo sapien
ctctggcaagcatcgagttgcagaa

SEQ ID NO: 2097744 - DNA, 25 bp, Homo sapien
caagcatcgagttgcagaatggcaa

SEQ ID NO: 2097745 - DNA, 25 bp, Homo sapien
tggagaggtgttttcgaaggtttca

SEQ ID NO: 2097746 - DNA, 25 bp, Homo sapien
tcatcaatccagacagaagctctta

SEQ ID NO: 2097747 - DNA, 25 bp, Homo sapien
tgtcatcaatccagacagaagctct

SEQ ID NO: 2097748 - DNA, 25 bp, Homo sapien
gtcatcaatccagacagaagctctt

SEQ ID NO: 2097749 - DNA, 25 bp, Homo sapien
gtgtcatcaatccagacagaagctc

SEQ ID NO: 2097750 - DNA, 25 bp, Homo sapien
tagtatgtccccaagaactcccgaa

SEQ ID NO: 2097751 - DNA, 25 bp, Homo sapien
gaatccttcgcccttctctgagaac

SEQ ID NO: 2097752 - DNA, 25 bp, Homo sapien
acttagccaaggaatcagaatctga

SEQ ID NO: 2097753 - DNA, 25 bp, Homo sapien
ggatgtctgcaaacttagccaagga

SEQ ID NO: 2097754 - DNA, 25 bp, Homo sapien
gtttagtgctgccaaccacgccaaa

SEQ ID NO: 2097755 - DNA, 25 bp, Homo sapien
ttgtcatagggtttagtgctgccaa

SEQ ID NO: 2097756 - DNA, 25 bp, Homo sapien
gtgctgccaaccacgccaaacaatg

SEQ ID NO: 2097757 - DNA, 25 bp, Homo sapien
tagggtttagtgctgccaaccacgc

SEQ ID NO: 2097758 - DNA, 25 bp, Homo sapien
ttaaacatttgaccagagatcacaa

SEQ ID NO: 2097759 - DNA, 25 bp, Homo sapien
aataggaacgcttttgctcgtcttt

SEQ ID NO: 2097760 - DNA, 25 bp, Homo sapien
aacatttgaccagagatcacaaagc

SEQ ID NO: 2097761 - DNA, 25 bp, Homo sapien
ataggaacgcttttgctcgtctttc

SEQ ID NO: 2097762 - DNA, 25 bp, Homo sapien
tgaagaccacccataggctcagagg

SEQ ID NO: 2097763 - DNA, 25 bp, Homo sapien
gagcctttgcaatgacatttcttga

SEQ ID NO: 2097764 - DNA, 25 bp, Homo sapien
ctaaaatggtggttgtgagtaatct

SEQ ID NO: 2097765 - DNA, 25 bp, Homo sapien
tgagccttgagggttgaagaccacc

SEQ ID NO: 2097766 - DNA, 25 bp, Homo sapien
cttcatccgataccagccatttgtg

SEQ ID NO: 2097767 - DNA, 25 bp, Homo sapien
cagacatgcacatactcactcatag

SEQ ID NO: 2097768 - DNA, 25 bp, Homo sapien
aattttggaccattgcttcatccga

SEQ ID NO: 2097769 - DNA, 25 bp, Homo sapien
caattggtggatgtttgtctgcgaa

SEQ ID NO: 2097770 - DNA, 25 bp, Homo sapien
gccactttatcattacgcagagatg

SEQ ID NO: 2097771 - DNA, 25 bp, Homo sapien
actttatcattacgcagagatgcca

SEQ ID NO: 2097772 - DNA, 25 bp, Homo sapien
aatgccactttatcattacgcagag

SEQ ID NO: 2097773 - DNA, 25 bp, Homo sapien
cactttatcattacgcagagatgcc

SEQ ID NO: 2097774 - DNA, 25 bp, Homo sapien
taaagggtgtataataatagacatg

SEQ ID NO: 2097775 - DNA, 25 bp, Homo sapien
tgccaccatgttgcagtcacaaaac

SEQ ID NO: 2097776 - DNA, 25 bp, Homo sapien
ctccttgtcgtttgttcataggaca

SEQ ID NO: 2097777 - DNA, 25 bp, Homo sapien
tccaaatccaaaggacacagcagaa

SEQ ID NO: 2097778 - DNA, 25 bp, Homo sapien
caactgaagacccatgtccaaagat

SEQ ID NO: 2097779 - DNA, 25 bp, Homo sapien
actgaagacccatgtccaaagatgt

SEQ ID NO: 2097780 - DNA, 25 bp, Homo sapien
aactgaagacccatgtccaaagatg

SEQ ID NO: 2097781 - DNA, 25 bp, Homo sapien
aaaccacttcctgcacagtattgtg

SEQ ID NO: 2097782 - DNA, 25 bp, Homo sapien
tattaccaggaacatcaatgcaaag

SEQ ID NO: 2097783 - DNA, 25 bp, Homo sapien
gaagtatgcgaatgttattaccagg

SEQ ID NO: 2097784 - DNA, 25 bp, Homo sapien
caattacacccatctgaagtatgcg

SEQ ID NO: 2097785 - DNA, 25 bp, Homo sapien
ttctgagctatgtattgcacaattt

SEQ ID NO: 2097786 - DNA, 25 bp, Homo sapien
tttccacttgcatgtgggaatgcct

SEQ ID NO: 2097787 - DNA, 25 bp, Homo sapien
aagcctgcttgcactaaaattatct

SEQ ID NO: 2097788 - DNA, 25 bp, Homo sapien
gagacaattatctcgggtactgaag

SEQ ID NO: 2097789 - DNA, 25 bp, Homo sapien
tcagtgtgaattctgatagagcaat

SEQ ID NO: 2097790 - DNA, 25 bp, Homo sapien
tgatagagcaatagctcctctaaat

SEQ ID NO: 2097791 - DNA, 25 bp, Homo sapien
gagcaatagctcctctaaatgacag

SEQ ID NO: 2097792 - DNA, 25 bp, Homo sapien
cagtgtgaattctgatagagcaata

SEQ ID NO: 2097793 - DNA, 25 bp, Homo sapien
tcttgccacatcaaactggacaggg

SEQ ID NO: 2097794 - DNA, 25 bp, Homo sapien
cttgccacatcaaactggacaggga

SEQ ID NO: 2097795 - DNA, 25 bp, Homo sapien
cactcggtagattagtatattttat

SEQ ID NO: 2097796 - DNA, 25 bp, Homo sapien
cctgccagaagttcactcggtagat

SEQ ID NO: 2097797 - DNA, 25 bp, Homo sapien
cttccatcagccgtgaaagtccaat

SEQ ID NO: 2097798 - DNA, 25 bp, Homo sapien
gaaagtccaatgcaatccactcgat

SEQ ID NO: 2097799 - DNA, 25 bp, Homo sapien
tcagctgggcctattgctccttagg

SEQ ID NO: 2097800 - DNA, 25 bp, Homo sapien
gattggctgcttagactctgctact

SEQ ID NO: 2097801 - DNA, 25 bp, Homo sapien
agtgatgggaactatatgagtaagg

SEQ ID NO: 2097802 - DNA, 25 bp, Homo sapien
gatgggaactatatgagtaaggacc

SEQ ID NO: 2097803 - DNA, 25 bp, Homo sapien
catctgagtcttcatctagcttcac

SEQ ID NO: 2097804 - DNA, 25 bp, Homo sapien
ctagcttcactaaattagtatgtga

SEQ ID NO: 2097805 - DNA, 25 bp, Homo sapien
gcagattctcaatatcatgaatgac

SEQ ID NO: 2097806 - DNA, 25 bp, Homo sapien
gatactctgacctatctgtgaggcc

SEQ ID NO: 2097807 - DNA, 25 bp, Homo sapien
gaaaaatagacttttcgtgcaagtc

SEQ ID NO: 2097808 - DNA, 25 bp, Homo sapien
tgtactttcagccactctttgcctc

SEQ ID NO: 2097809 - DNA, 25 bp, Homo sapien
cttaagcaaagatgtcacatgctcc

SEQ ID NO: 2097810 - DNA, 25 bp, Homo sapien
tcagaagctgcagaatgtcctcgcc

SEQ ID NO: 2097811 - DNA, 25 bp, Homo sapien
cacattgcaggccttcttaagcaaa

SEQ ID NO: 2097812 - DNA, 25 bp, Homo sapien
cacatgctccaagtcagggacagtc

SEQ ID NO: 2097813 - DNA, 25 bp, Homo sapien
gatctgctgattttctccgatatgg

SEQ ID NO: 2097814 - DNA, 25 bp, Homo sapien
actgggctggtgaatgaaatgctgc

SEQ ID NO: 2097815 - DNA, 25 bp, Homo sapien
ggtgaatgaaatgctgctcatgttt

SEQ ID NO: 2097816 - DNA, 25 bp, Homo sapien
cttcaaataatgagcactgggctgg

SEQ ID NO: 2097817 - DNA, 25 bp, Homo sapien
tcaatcccgcaaatgtacccttcat

SEQ ID NO: 2097818 - DNA, 25 bp, Homo sapien
gcttcaatcccgcaaatgtaccctt

SEQ ID NO: 2097819 - DNA, 25 bp, Homo sapien
ccagcttcaatcccgcaaatgtacc

SEQ ID NO: 2097820 - DNA, 25 bp, Homo sapien
ttcaatcccgcaaatgtacccttca

SEQ ID NO: 2097821 - DNA, 25 bp, Homo sapien
cttgacagcccaggcatagttccaa

SEQ ID NO: 2097822 - DNA, 25 bp, Homo sapien
agcccaggcatagttccaaagtcat

SEQ ID NO: 2097823 - DNA, 25 bp, Homo sapien
cagcccaggcatagttccaaagtca

SEQ ID NO: 2097824 - DNA, 25 bp, Homo sapien
gacagcccaggcatagttccaaagt

SEQ ID NO: 2097825 - DNA, 25 bp, Homo sapien
tggctgacatacttccggtcccaga

SEQ ID NO: 2097826 - DNA, 25 bp, Homo sapien
ttctgtggatctccttctgtatggc

SEQ ID NO: 2097827 - DNA, 25 bp, Homo sapien
gactgtattccatgtggacctgcaa

SEQ ID NO: 2097828 - DNA, 25 bp, Homo sapien
gaccagtcctcactgggatgagact

SEQ ID NO: 2097829 - DNA, 25 bp, Homo sapien
gccgttaggaagtgtagatgagaaa

SEQ ID NO: 2097830 - DNA, 25 bp, Homo sapien
aagtgtagatgagaaaaaaggtctc

SEQ ID NO: 2097831 - DNA, 25 bp, Homo sapien
ctagtcttccgaagccgttaggaag

SEQ ID NO: 2097832 - DNA, 25 bp, Homo sapien
ccgaagccgttaggaagtgtagatg

SEQ ID NO: 2097833 - DNA, 25 bp, Homo sapien
ggaacataacactttgctcatccac

SEQ ID NO: 2097834 - DNA, 25 bp, Homo sapien
gaacataacactttgctcatccaca

SEQ ID NO: 2097835 - DNA, 25 bp, Homo sapien
tggaacataacactttgctcatcca

SEQ ID NO: 2097836 - DNA, 25 bp, Homo sapien
gtggaacataacactttgctcatcc

SEQ ID NO: 2097837 - DNA, 25 bp, Homo sapien
tgacggcaatccgagctgagcacag

SEQ ID NO: 2097838 - DNA, 25 bp, Homo sapien
taatcgttgtttgattcatcctgcc

SEQ ID NO: 2097839 - DNA, 25 bp, Homo sapien
tgtttgattcatcctgcccacagtt

SEQ ID NO: 2097840 - DNA, 25 bp, Homo sapien
gagcacaggcggcagtgatgtaatc

SEQ ID NO: 2097841 - DNA, 25 bp, Homo sapien
gcattgagactctttatgacatccg

SEQ ID NO: 2097842 - DNA, 25 bp, Homo sapien
ttgagactctttatgacatccgggc

SEQ ID NO: 2097843 - DNA, 25 bp, Homo sapien
attgagactctttatgacatccggg

SEQ ID NO: 2097844 - DNA, 25 bp, Homo sapien
gagactctttatgacatccgggctc

SEQ ID NO: 2097845 - DNA, 25 bp, Homo sapien
caacagaatccacagtgttgccagc

SEQ ID NO: 2097846 - DNA, 25 bp, Homo sapien
aacaacagaatccacagtgttgcca

SEQ ID NO: 2097847 - DNA, 25 bp, Homo sapien
acagaatccacagtgttgccagcag

SEQ ID NO: 2097848 - DNA, 25 bp, Homo sapien
agaatccacagtgttgccagcagat

SEQ ID NO: 2097849 - DNA, 25 bp, Homo sapien
atccaggaagaccagttccaaacca

SEQ ID NO: 2097850 - DNA, 25 bp, Homo sapien
tattccatttgcgtgaaaatccagg

SEQ ID NO: 2097851 - DNA, 25 bp, Homo sapien
gaccagttccaaaccaccagagcta

SEQ ID NO: 2097852 - DNA, 25 bp, Homo sapien
aaatattccatttgcgtgaaaatcc

SEQ ID NO: 2097853 - DNA, 25 bp, Homo sapien
tatgtgtctgtaacaacttggtgtt

SEQ ID NO: 2097854 - DNA, 25 bp, Homo sapien
tcactctcattattaacataagcaa

SEQ ID NO: 2097855 - DNA, 25 bp, Homo sapien
ggagagactggattttaggcttaca

SEQ ID NO: 2097856 - DNA, 25 bp, Homo sapien
gggagccacatctactcctatgtct

SEQ ID NO: 2097857 - DNA, 25 bp, Homo sapien
gtctctgctgagcataatccctcat

SEQ ID NO: 2097858 - DNA, 25 bp, Homo sapien
aggtgtgcccagtggagagaaaata

SEQ ID NO: 2097859 - DNA, 25 bp, Homo sapien
tgtatatgtgaaatgaggtgtgccc

SEQ ID NO: 2097860 - DNA, 25 bp, Homo sapien
caagcgacacagtacactattgcgt

SEQ ID NO: 2097861 - DNA, 25 bp, Homo sapien
tgtgtggccaagatgtaagctgcgc

SEQ ID NO: 2097862 - DNA, 25 bp, Homo sapien
caagatgtaagctgcgcttttggct

SEQ ID NO: 2097863 - DNA, 25 bp, Homo sapien
tggccaagatgtaagctgcgctttt

SEQ ID NO: 2097864 - DNA, 25 bp, Homo sapien
tgtggccaagatgtaagctgcgctt

SEQ ID NO: 2097865 - DNA, 25 bp, Homo sapien
agccagcaaccctgtcatcccacat

SEQ ID NO: 2097866 - DNA, 25 bp, Homo sapien
gatctccaaacttgaagccagcaac

SEQ ID NO: 2097867 - DNA, 25 bp, Homo sapien
tccaaacttgaagccagcaaccctg

SEQ ID NO: 2097868 - DNA, 25 bp, Homo sapien
ctgactgatctccaaacttgaagcc

SEQ ID NO: 2097869 - DNA, 25 bp, Homo sapien
tccaggacctgtgacattagaatgc

SEQ ID NO: 2097870 - DNA, 25 bp, Homo sapien
ctgcaatgaaaaatccttcctccag

SEQ ID NO: 2097871 - DNA, 25 bp, Homo sapien
cattagaatgcgctttttgtagaac

SEQ ID NO: 2097872 - DNA, 25 bp, Homo sapien
tcacacctcaaccatcagatggact

SEQ ID NO: 2097873 - DNA, 25 bp, Homo sapien
tgatcatagcctgaataaatgggtg

SEQ ID NO: 2097874 - DNA, 25 bp, Homo sapien
ttgatcatagcctgaataaatgggt

SEQ ID NO: 2097875 - DNA, 25 bp, Homo sapien
ataaatgggtgggatggcaaagggg

SEQ ID NO: 2097876 - DNA, 25 bp, Homo sapien
tgaataaatgggtgggatggcaaag

SEQ ID NO: 2097877 - DNA, 25 bp, Homo sapien
aatcccaatatcagaagccactgga

SEQ ID NO: 2097878 - DNA, 25 bp, Homo sapien
ataatcccaatatcagaagccactg

SEQ ID NO: 2097879 - DNA, 25 bp, Homo sapien
taatcccaatatcagaagccactgg

SEQ ID NO: 2097880 - DNA, 25 bp, Homo sapien
gccgttctagcctctgcttgatttc

SEQ ID NO: 2097881 - DNA, 25 bp, Homo sapien
acttgccgttctagcctctgcttga

SEQ ID NO: 2097882 - DNA, 25 bp, Homo sapien
tgccgttctagcctctgcttgattt

SEQ ID NO: 2097883 - DNA, 25 bp, Homo sapien
tgtacttgccgttctagcctctgct

SEQ ID NO: 2097884 - DNA, 25 bp, Homo sapien
gacatcaggccaagtaaggcatcct

SEQ ID NO: 2097885 - DNA, 25 bp, Homo sapien
tgacctcctgcacaattccttacag

SEQ ID NO: 2097886 - DNA, 25 bp, Homo sapien
gcacaattccttacagcattaatat

SEQ ID NO: 2097887 - DNA, 25 bp, Homo sapien
caagtaaggcatcctccaggttttt

SEQ ID NO: 2097888 - DNA, 25 bp, Homo sapien
catggttgggtcaaaaaacctctgt

SEQ ID NO: 2097889 - DNA, 25 bp, Homo sapien
gtatccacatagatttccctcatgg

SEQ ID NO: 2097890 - DNA, 25 bp, Homo sapien
ctgaagtatgagcacagaggatttc

SEQ ID NO: 2097891 - DNA, 25 bp, Homo sapien
tctgtagaaaatcccacttgaggtt

SEQ ID NO: 2097892 - DNA, 25 bp, Homo sapien
gggcctctcaaaagccatctgcatc

SEQ ID NO: 2097893 - DNA, 25 bp, Homo sapien
aagccatctgcatcagttcacgcat

SEQ ID NO: 2097894 - DNA, 25 bp, Homo sapien
tcatcactgggcctctcaaaagcca

SEQ ID NO: 2097895 - DNA, 25 bp, Homo sapien
caaaagccatctgcatcagttcacg

SEQ ID NO: 2097896 - DNA, 25 bp, Homo sapien
tgttgctaacatttcacggagatgt

SEQ ID NO: 2097897 - DNA, 25 bp, Homo sapien
ccaactttgtccacaaataatgttg

SEQ ID NO: 2097898 - DNA, 25 bp, Homo sapien
tacagtaacccagtgcgggttgtga

SEQ ID NO: 2097899 - DNA, 25 bp, Homo sapien
tgtgagagggtcctagccatgtgct

SEQ ID NO: 2097900 - DNA, 25 bp, Homo sapien
tggttgcgatttgcctccgagaacg

SEQ ID NO: 2097901 - DNA, 25 bp, Homo sapien
tggccatccgcttcctgaatgctga

SEQ ID NO: 2097902 - DNA, 25 bp, Homo sapien
tccgagaacgatctcccagaatgga

SEQ ID NO: 2097903 - DNA, 25 bp, Homo sapien
tgaggaccatgatacttccactgag

SEQ ID NO: 2097904 - DNA, 25 bp, Homo sapien
aaatgtctcttgaggccctgctctg

SEQ ID NO: 2097905 - DNA, 25 bp, Homo sapien
ctggcttcaagaaaacggtatcttc

SEQ ID NO: 2097906 - DNA, 25 bp, Homo sapien
agaaaacggtatcttcaaacaaatg

SEQ ID NO: 2097907 - DNA, 25 bp, Homo sapien
aaacaaatgtctcttgaggccctgc

SEQ ID NO: 2097908 - DNA, 25 bp, Homo sapien
gacaggagataagagacagcgctta

SEQ ID NO: 2097909 - DNA, 25 bp, Homo sapien
caggagataagagacagcgcttatg

SEQ ID NO: 2097910 - DNA, 25 bp, Homo sapien
gaagacaggagataagagacagcgc

SEQ ID NO: 2097911 - DNA, 25 bp, Homo sapien
gagaagacaggagataagagacagc

SEQ ID NO: 2097912 - DNA, 25 bp, Homo sapien
tgagtaaacgacatcctgggaaaca

SEQ ID NO: 2097913 - DNA, 25 bp, Homo sapien
caccgtcaatactttctaagttgga

SEQ ID NO: 2097914 - DNA, 25 bp, Homo sapien
ctgtgtggtaggaaatgagtaaacg

SEQ ID NO: 2097915 - DNA, 25 bp, Homo sapien
atcctgggaaacaccgtcaatactt

SEQ ID NO: 2097916 - DNA, 25 bp, Homo sapien
ctaggcagcagaatctgaactgttt

SEQ ID NO: 2097917 - DNA, 25 bp, Homo sapien
agcagaatctgaactgtttttccgg

SEQ ID NO: 2097918 - DNA, 25 bp, Homo sapien
taggcagcagaatctgaactgtttt

SEQ ID NO: 2097919 - DNA, 25 bp, Homo sapien
gcagcagaatctgaactgtttttcc

SEQ ID NO: 2097920 - DNA, 25 bp, Homo sapien
tcttgtagcctgtcttctaacctca

SEQ ID NO: 2097921 - DNA, 25 bp, Homo sapien
cactgttcttgtagcctgtcttcta

SEQ ID NO: 2097922 - DNA, 25 bp, Homo sapien
tgtagcctgtcttctaacctcacca

SEQ ID NO: 2097923 - DNA, 25 bp, Homo sapien
tgttcttgtagcctgtcttctaacc

SEQ ID NO: 2097924 - DNA, 25 bp, Homo sapien
cagtactgggaacgcagagtcctga

SEQ ID NO: 2097925 - DNA, 25 bp, Homo sapien
tgtgagccagtactgggaacgcaga

SEQ ID NO: 2097926 - DNA, 25 bp, Homo sapien
tgatccaaccagacagccagctgtt

SEQ ID NO: 2097927 - DNA, 25 bp, Homo sapien
tcctgagtttgccacgggggactga

SEQ ID NO: 2097928 - DNA, 25 bp, Homo sapien
aattcaccactggcaaaaataatga

SEQ ID NO: 2097929 - DNA, 25 bp, Homo sapien
ttgtgatatgatggagtttctactc

SEQ ID NO: 2097930 - DNA, 25 bp, Homo sapien
aattttgctaagattgtgcttcgtg

SEQ ID NO: 2097931 - DNA, 25 bp, Homo sapien
aaaacttttggccataatcttgtga

SEQ ID NO: 2097932 - DNA, 25 bp, Homo sapien
gctaggaattgagccaagttgtctt

SEQ ID NO: 2097933 - DNA, 25 bp, Homo sapien
acaaacctagtaagtaagttgcaga

SEQ ID NO: 2097934 - DNA, 25 bp, Homo sapien
ttgcagagctaggaattgagccaag

SEQ ID NO: 2097935 - DNA, 25 bp, Homo sapien
ggaattgagccaagttgtcttctca

SEQ ID NO: 2097936 - DNA, 25 bp, Homo sapien
tcccaatcattcttgccagtgcatt

SEQ ID NO: 2097937 - DNA, 25 bp, Homo sapien
cttgacacagttgtttgttaggatg

SEQ ID NO: 2097938 - DNA, 25 bp, Homo sapien
gtcccaatcattcttgccagtgcat

SEQ ID NO: 2097939 - DNA, 25 bp, Homo sapien
taataagctgcagcgcttgctttta

SEQ ID NO: 2097940 - DNA, 25 bp, Homo sapien
cagttttaataagctgcagcgcttg

SEQ ID NO: 2097941 - DNA, 25 bp, Homo sapien
gcagtctcacgtgcggatgatcaaa

SEQ ID NO: 2097942 - DNA, 25 bp, Homo sapien
agcctggatccaacgtagtctgtgg

SEQ ID NO: 2097943 - DNA, 25 bp, Homo sapien
gatcccttaattgagcttgagaaac

SEQ ID NO: 2097944 - DNA, 25 bp, Homo sapien
tatactgttgctgttatctgataac

SEQ ID NO: 2097945 - DNA, 25 bp, Homo sapien
gtagagtagggccaaagcagtccta

SEQ ID NO: 2097946 - DNA, 25 bp, Homo sapien
tgcataagatcccttaattgagctt

SEQ ID NO: 2097947 - DNA, 25 bp, Homo sapien
gaattccaaggactgtttgataggt

SEQ ID NO: 2097948 - DNA, 25 bp, Homo sapien
aattccaaggactgtttgataggtt

SEQ ID NO: 2097949 - DNA, 25 bp, Homo sapien
attccaaggactgtttgataggttt

SEQ ID NO: 2097950 - DNA, 25 bp, Homo sapien
gatttccagtagttatttgcctaag

SEQ ID NO: 2097951 - DNA, 25 bp, Homo sapien
tctcctgtactagaatctggacgtt

SEQ ID NO: 2097952 - DNA, 25 bp, Homo sapien
tttgctccctttgcatcgctcagag

SEQ ID NO: 2097953 - DNA, 25 bp, Homo sapien
cactgcataatcttgtgaatgaaca

SEQ ID NO: 2097954 - DNA, 25 bp, Homo sapien
ttgtcaggtagatagattgcaaaag

SEQ ID NO: 2097955 - DNA, 25 bp, Homo sapien
tcaggtagatagattgcaaaagttt

SEQ ID NO: 2097956 - DNA, 25 bp, Homo sapien
acctttgtcaggtagatagattgca

SEQ ID NO: 2097957 - DNA, 25 bp, Homo sapien
aggtagatagattgcaaaagttttc

SEQ ID NO: 2097958 - DNA, 25 bp, Homo sapien
tgagtggatgaggaataagtcttgc

SEQ ID NO: 2097959 - DNA, 25 bp, Homo sapien
aggtgagtggatgaggaataagtct

SEQ ID NO: 2097960 - DNA, 25 bp, Homo sapien
ggtgagtggatgaggaataagtctt

SEQ ID NO: 2097961 - DNA, 25 bp, Homo sapien
gtgagtggatgaggaataagtcttg

SEQ ID NO: 2097962 - DNA, 25 bp, Homo sapien
gaaagcagaattgacatcctcttag

SEQ ID NO: 2097963 - DNA, 25 bp, Homo sapien
ggagaacattgatcacagacttgga

SEQ ID NO: 2097964 - DNA, 25 bp, Homo sapien
tcctcttagttgtagtgggagaaca

SEQ ID NO: 2097965 - DNA, 25 bp, Homo sapien
cagtttcccagtacaggtatgttgt

SEQ ID NO: 2097966 - DNA, 25 bp, Homo sapien
aacaggcctgcttaaaagctaaatc

SEQ ID NO: 2097967 - DNA, 25 bp, Homo sapien
acaggcctgcttaaaagctaaatca

SEQ ID NO: 2097968 - DNA, 25 bp, Homo sapien
caggcctgcttaaaagctaaatcac

SEQ ID NO: 2097969 - DNA, 25 bp, Homo sapien
caaacaggcctgcttaaaagctaaa

SEQ ID NO: 2097970 - DNA, 25 bp, Homo sapien
gcagctgtagcttctatgaaaacca

SEQ ID NO: 2097971 - DNA, 25 bp, Homo sapien
ggaaaatccaaagcaggcactgcag

SEQ ID NO: 2097972 - DNA, 25 bp, Homo sapien
gccaccagggtacagctctcagatt

SEQ ID NO: 2097973 - DNA, 25 bp, Homo sapien
gcactgcagtgcaagagcagctgta

SEQ ID NO: 2097974 - DNA, 25 bp, Homo sapien
tcttgtctttcaaacgttacagaca

SEQ ID NO: 2097975 - DNA, 25 bp, Homo sapien
cttgtctttcaaacgttacagacat

SEQ ID NO: 2097976 - DNA, 25 bp, Homo sapien
ggtcttgtctttcaaacgttacaga

SEQ ID NO: 2097977 - DNA, 25 bp, Homo sapien
gtcttgtctttcaaacgttacagac

SEQ ID NO: 2097978 - DNA, 25 bp, Homo sapien
ccaatatgactgtgaaaagaagcca

SEQ ID NO: 2097979 - DNA, 25 bp, Homo sapien
tgccaatatgactgtgaaaagaagc

SEQ ID NO: 2097980 - DNA, 25 bp, Homo sapien
ctgccaatatgactgtgaaaagaag

SEQ ID NO: 2097981 - DNA, 25 bp, Homo sapien
gccaatatgactgtgaaaagaagcc

SEQ ID NO: 2097982 - DNA, 25 bp, Homo sapien
tggatgaaactggttgacgctgacc

SEQ ID NO: 2097983 - DNA, 25 bp, Homo sapien
tgagaccatttgaagcccattgata

SEQ ID NO: 2097984 - DNA, 25 bp, Homo sapien
gactaattgaagctgactgaaactg

SEQ ID NO: 2097985 - DNA, 25 bp, Homo sapien
ccaatactgcatggaactggatgtc

SEQ ID NO: 2097986 - DNA, 25 bp, Homo sapien
aatttgttcattcaggcgagagtgt

SEQ ID NO: 2097987 - DNA, 25 bp, Homo sapien
taagccaagaagtaaatcgataact

SEQ ID NO: 2097988 - DNA, 25 bp, Homo sapien
gttcattcaggcgagagtgttcttt

SEQ ID NO: 2097989 - DNA, 25 bp, Homo sapien
cttcaaggaagactgagtttatggg

SEQ ID NO: 2097990 - DNA, 25 bp, Homo sapien
tgacacctgccggatcctgagattt

SEQ ID NO: 2097991 - DNA, 25 bp, Homo sapien
cagaccaaggtttcgcccgtaacag

SEQ ID NO: 2097992 - DNA, 25 bp, Homo sapien
gagatttatttctctggccgcatgt

SEQ ID NO: 2097993 - DNA, 25 bp, Homo sapien
cccgtaacagcttgatgatgtggaa

SEQ ID NO: 2097994 - DNA, 25 bp, Homo sapien
gacaatagtgcaggcagttgaattg

SEQ ID NO: 2097995 - DNA, 25 bp, Homo sapien
agtgcaggcagttgaattgatgaag

SEQ ID NO: 2097996 - DNA, 25 bp, Homo sapien
acagacaatagtgcaggcagttgaa

SEQ ID NO: 2097997 - DNA, 25 bp, Homo sapien
caatagtgcaggcagttgaattgat

SEQ ID NO: 2097998 - DNA, 25 bp, Homo sapien
cacggagcttactcttctgacctcg

SEQ ID NO: 2097999 - DNA, 25 bp, Homo sapien
agcctggtggcgtttctcacgggca

SEQ ID NO: 2098000 - DNA, 25 bp, Homo sapien
ctggtggcgtttctcacgggcacgg

SEQ ID NO: 2098001 - DNA, 25 bp, Homo sapien
cacgggcacggagcttactcttctg

SEQ ID NO: 2098002 - DNA, 25 bp, Homo sapien
cagggatgctaggtgtctcagcagc

SEQ ID NO: 2098003 - DNA, 25 bp, Homo sapien
gggctccctgaagcgcttcagggat

SEQ ID NO: 2098004 - DNA, 25 bp, Homo sapien
acagtggcctgcgtagctcccagat

SEQ ID NO: 2098005 - DNA, 25 bp, Homo sapien
ctgaagcgcttcagggatgctaggt

SEQ ID NO: 2098006 - DNA, 25 bp, Homo sapien
catagtagtgcctgatgggatccac

SEQ ID NO: 2098007 - DNA, 25 bp, Homo sapien
cacggttgccattcagaaagatcac

SEQ ID NO: 2098008 - DNA, 25 bp, Homo sapien
tagtttcagcgtgagctcttggacc

SEQ ID NO: 2098009 - DNA, 25 bp, Homo sapien
tgggatccccatagaggaagtgctt

SEQ ID NO: 2098010 - DNA, 25 bp, Homo sapien
gaaggcactagggacggtatcatgt

SEQ ID NO: 2098011 - DNA, 25 bp, Homo sapien
tctggaacgtgcatttgccatggca

SEQ ID NO: 2098012 - DNA, 25 bp, Homo sapien
ccatggcagcagtatgagccctggc

SEQ ID NO: 2098013 - DNA, 25 bp, Homo sapien
cacttagcatgggagaagctgctag

SEQ ID NO: 2098014 - DNA, 25 bp, Homo sapien
aaaagtgaagaacaagcctcagatt

SEQ ID NO: 2098015 - DNA, 25 bp, Homo sapien
tcgaccaaaaagtgaagaacaagcc

SEQ ID NO: 2098016 - DNA, 25 bp, Homo sapien
ccaaaaagtgaagaacaagcctcag

SEQ ID NO: 2098017 - DNA, 25 bp, Homo sapien
ttcgaccaaaaagtgaagaacaagc

SEQ ID NO: 2098018 - DNA, 25 bp, Homo sapien
tagcaatacgtgtgtaaccaaagtc

SEQ ID NO: 2098019 - DNA, 25 bp, Homo sapien
ggaaatacctattccaatactgtgt

SEQ ID NO: 2098020 - DNA, 25 bp, Homo sapien
ttcagtaagctaagccaatccaggt

SEQ ID NO: 2098021 - DNA, 25 bp, Homo sapien
tacaactccgagttactatagacta

SEQ ID NO: 2098022 - DNA, 25 bp, Homo sapien
ggacacgtgccagtattccaggtac

SEQ ID NO: 2098023 - DNA, 25 bp, Homo sapien
cagatggtatcattgatcttagcca

SEQ ID NO: 2098024 - DNA, 25 bp, Homo sapien
catgggctctttgaccctgctggaa

SEQ ID NO: 2098025 - DNA, 25 bp, Homo sapien
gattcaggaagatactacagatggt

SEQ ID NO: 2098026 - DNA, 25 bp, Homo sapien
ggacctgtgagaccttgcggctgat

SEQ ID NO: 2098027 - DNA, 25 bp, Homo sapien
catggcttgtactgtctgcggagac

SEQ ID NO: 2098028 - DNA, 25 bp, Homo sapien
tgatcatgggtctctcggcgtttcc

SEQ ID NO: 2098029 - DNA, 25 bp, Homo sapien
tcaaacccaggatcgacatcaggag

SEQ ID NO: 2098030 - DNA, 25 bp, Homo sapien
taagctctcagtctcaatgctctct

SEQ ID NO: 2098031 - DNA, 25 bp, Homo sapien
ttaagctctcagtctcaatgctctc

SEQ ID NO: 2098032 - DNA, 25 bp, Homo sapien
aagctctcagtctcaatgctctctc

SEQ ID NO: 2098033 - DNA, 25 bp, Homo sapien
gctctcagtctcaatgctctctcta

SEQ ID NO: 2098034 - DNA, 25 bp, Homo sapien
aatttgactcctagaaggacctgca

SEQ ID NO: 2098035 - DNA, 25 bp, Homo sapien
tctttgacttgaaggcatctcctca

SEQ ID NO: 2098036 - DNA, 25 bp, Homo sapien
tcctcatagcaaggcccagaactct

SEQ ID NO: 2098037 - DNA, 25 bp, Homo sapien
tagtcttcaccaagggtcctcaatt

SEQ ID NO: 2098038 - DNA, 25 bp, Homo sapien
cagtcttctctcacgcaggtcttca

SEQ ID NO: 2098039 - DNA, 25 bp, Homo sapien
ggatccttgttttttgatcaaaggc

SEQ ID NO: 2098040 - DNA, 25 bp, Homo sapien
tcttctctcacgcaggtcttcatgt

SEQ ID NO: 2098041 - DNA, 25 bp, Homo sapien
tggtaataacaccttcctgcaagct

SEQ ID NO: 2098042 - DNA, 25 bp, Homo sapien
tcagtcaaccggagatagaggctct

SEQ ID NO: 2098043 - DNA, 25 bp, Homo sapien
cgctccctgcgtaacagtagctgca

SEQ ID NO: 2098044 - DNA, 25 bp, Homo sapien
agattccagggaactcacgtaaagt

SEQ ID NO: 2098045 - DNA, 25 bp, Homo sapien
tagctgcagggctctgttactcccc

SEQ ID NO: 2098046 - DNA, 25 bp, Homo sapien
ctgacgtgacagcacttttcaggct

SEQ ID NO: 2098047 - DNA, 25 bp, Homo sapien
gggacgcctccttccgctgacgtga

SEQ ID NO: 2098048 - DNA, 25 bp, Homo sapien
gagaagatctgggacgcctccttcc

SEQ ID NO: 2098049 - DNA, 25 bp, Homo sapien
ttttcaggctcaggcgaccggctca

SEQ ID NO: 2098050 - DNA, 25 bp, Homo sapien
aaatgaatggactttgggcctaaca

SEQ ID NO: 2098051 - DNA, 25 bp, Homo sapien
tcatgttcttcaacacgacggaaaa

SEQ ID NO: 2098052 - DNA, 25 bp, Homo sapien
actttgggcctaacagccatgtttg

SEQ ID NO: 2098053 - DNA, 25 bp, Homo sapien
tccacaagccttggaccgaggcctt

SEQ ID NO: 2098054 - DNA, 25 bp, Homo sapien
aggtaggagtgtgggtaggaagact

SEQ ID NO: 2098055 - DNA, 25 bp, Homo sapien
taggagtgtgggtaggaagactagg

SEQ ID NO: 2098056 - DNA, 25 bp, Homo sapien
gagtgtgggtaggaagactaggaag

SEQ ID NO: 2098057 - DNA, 25 bp, Homo sapien
ggagtgtgggtaggaagactaggaa

SEQ ID NO: 2098058 - DNA, 25 bp, Homo sapien
tcttggcgtttctcacaggtacgga

SEQ ID NO: 2098059 - DNA, 25 bp, Homo sapien
ttggcgtttctcacaggtacggagc

SEQ ID NO: 2098060 - DNA, 25 bp, Homo sapien
caggtacggagcttactcttgtgac

SEQ ID NO: 2098061 - DNA, 25 bp, Homo sapien
ctcacaggtacggagcttactcttg

SEQ ID NO: 2098062 - DNA, 25 bp, Homo sapien
agaagacctacgacaatcacccaga

SEQ ID NO: 2098063 - DNA, 25 bp, Homo sapien
ccagacaagcgcgagaagaggatga

SEQ ID NO: 2098064 - DNA, 25 bp, Homo sapien
atcacccagacaagcgcgagaagag

SEQ ID NO: 2098065 - DNA, 25 bp, Homo sapien
gggacccgtgagaccctgtggctga

SEQ ID NO: 2098066 - DNA, 25 bp, Homo sapien
ttctgcaggaattgcgccaacgtgc

SEQ ID NO: 2098067 - DNA, 25 bp, Homo sapien
gagacatcatgggaagtgcttggac

SEQ ID NO: 2098068 - DNA, 25 bp, Homo sapien
gcttaagcgcttaaaaatgatggct

SEQ ID NO: 2098069 - DNA, 25 bp, Homo sapien
tactctctgcggacacacttcagca

SEQ ID NO: 2098070 - DNA, 25 bp, Homo sapien
agatcacaaccaggagcgacatcag

SEQ ID NO: 2098071 - DNA, 25 bp, Homo sapien
caaccaggagcgacatcaggagacc

SEQ ID NO: 2098072 - DNA, 25 bp, Homo sapien
tgaagatcacaaccaggagcgacat

SEQ ID NO: 2098073 - DNA, 25 bp, Homo sapien
gaagatcacaaccaggagcgacatc

SEQ ID NO: 2098074 - DNA, 25 bp, Homo sapien
ggactggtgttactgctgtcggcca

SEQ ID NO: 2098075 - DNA, 25 bp, Homo sapien
actggtgttactgctgtcggccaaa

SEQ ID NO: 2098076 - DNA, 25 bp, Homo sapien
tgttactgctgtcggccaaaacacg

SEQ ID NO: 2098077 - DNA, 25 bp, Homo sapien
tggtgttactgctgtcggccaaaac

SEQ ID NO: 2098078 - DNA, 25 bp, Homo sapien
taagctctcagtctcaatgctctct

SEQ ID NO: 2098079 - DNA, 25 bp, Homo sapien
ttaagctctcagtctcaatgctctc

SEQ ID NO: 2098080 - DNA, 25 bp, Homo sapien
aagctctcagtctcaatgctctctc

SEQ ID NO: 2098081 - DNA, 25 bp, Homo sapien
gctctcagtctcaatgctctctcta

SEQ ID NO: 2098082 - DNA, 25 bp, Homo sapien
aactttcagattggttaaacagcca

SEQ ID NO: 2098083 - DNA, 25 bp, Homo sapien
ggccaaggaaatagtgccagccctg

SEQ ID NO: 2098084 - DNA, 25 bp, Homo sapien
tatactgcactacttagaaagctca

SEQ ID NO: 2098085 - DNA, 25 bp, Homo sapien
tgagacagtttaagcctatggaagt

SEQ ID NO: 2098086 - DNA, 25 bp, Homo sapien
tctttgacttgaaggcatctcctca

SEQ ID NO: 2098087 - DNA, 25 bp, Homo sapien
gcatctcctcatagcaaggcccaga

SEQ ID NO: 2098088 - DNA, 25 bp, Homo sapien
gactcctagaaggacttgcagctcc

SEQ ID NO: 2098089 - DNA, 25 bp, Homo sapien
tagtcttcaccaagggtcctcaatt

SEQ ID NO: 2098090 - DNA, 25 bp, Homo sapien
gaaaagagcattgacatgactgctg

SEQ ID NO: 2098091 - DNA, 25 bp, Homo sapien
tgttaataacgttcagcaatgctgc

SEQ ID NO: 2098092 - DNA, 25 bp, Homo sapien
ctcagggaaatggtccttgcacttt

SEQ ID NO: 2098093 - DNA, 25 bp, Homo sapien
gggtcaacttcttcaattcaaggcc

SEQ ID NO: 2098094 - DNA, 25 bp, Homo sapien
tactcagaaatgttcggatctcctc

SEQ ID NO: 2098095 - DNA, 25 bp, Homo sapien
gcagtgcagttacctttcatgaagc

SEQ ID NO: 2098096 - DNA, 25 bp, Homo sapien
catatatgaaatcactctcccagtg

SEQ ID NO: 2098097 - DNA, 25 bp, Homo sapien
tacccaggagcatcatcaagatacc

SEQ ID NO: 2098098 - DNA, 25 bp, Homo sapien
tgtggtcccctcagttattaacgta

SEQ ID NO: 2098099 - DNA, 25 bp, Homo sapien
tcagttattaacgtacttactgtgg

SEQ ID NO: 2098100 - DNA, 25 bp, Homo sapien
attaacgtacttactgtggcctctg

SEQ ID NO: 2098101 - DNA, 25 bp, Homo sapien
atgtggtcccctcagttattaacgt

SEQ ID NO: 2098102 - DNA, 25 bp, Homo sapien
gtcatcttggatctggtagtgtttc

SEQ ID NO: 2098103 - DNA, 25 bp, Homo sapien
tcttggatctggtagtgtttctcac

SEQ ID NO: 2098104 - DNA, 25 bp, Homo sapien
agagagtcatcttggatctggtagt

SEQ ID NO: 2098105 - DNA, 25 bp, Homo sapien
tggatctggtagtgtttctcacaag

SEQ ID NO: 2098106 - DNA, 25 bp, Homo sapien
gctggattcgcaaggctcctgggaa

SEQ ID NO: 2098107 - DNA, 25 bp, Homo sapien
ggtgctggattcgcaaggctcctgg

SEQ ID NO: 2098108 - DNA, 25 bp, Homo sapien
tgctggattcgcaaggctcctggga

SEQ ID NO: 2098109 - DNA, 25 bp, Homo sapien
gtgctggattcgcaaggctcctggg

SEQ ID NO: 2098110 - DNA, 25 bp, Homo sapien
tgaaattgctgcatgaactctcagt

SEQ ID NO: 2098111 - DNA, 25 bp, Homo sapien
gacctctgaggaacatgggtactcc

SEQ ID NO: 2098112 - DNA, 25 bp, Homo sapien
ggtatcttgggttgacaatcttcag

SEQ ID NO: 2098113 - DNA, 25 bp, Homo sapien
gttagccctttcgtcagatcctgca

SEQ ID NO: 2098114 - DNA, 25 bp, Homo sapien
ccagtcttgggtaacactttgccaa

SEQ ID NO: 2098115 - DNA, 25 bp, Homo sapien
caacatgaatcctcccattgttggg

SEQ ID NO: 2098116 - DNA, 25 bp, Homo sapien
tcttccttgttggcacagttgcctt

SEQ ID NO: 2098117 - DNA, 25 bp, Homo sapien
cccattgttggggagtttcagcttg

SEQ ID NO: 2098118 - DNA, 25 bp, Homo sapien
cagtagtgccagtttcggctgcatc

SEQ ID NO: 2098119 - DNA, 25 bp, Homo sapien
gaagctgctgaacttcgccctgaga

SEQ ID NO: 2098120 - DNA, 25 bp, Homo sapien
tcagtataggctcttggaccccaaa

SEQ ID NO: 2098121 - DNA, 25 bp, Homo sapien
ttgaccttggccaaatattccagga

SEQ ID NO: 2098122 - DNA, 25 bp, Homo sapien
cccttttggtgatgttatatttgct

SEQ ID NO: 2098123 - DNA, 25 bp, Homo sapien
aaaatcccttttggtgatgttatat

SEQ ID NO: 2098124 - DNA, 25 bp, Homo sapien
ttggtgatgttatatttgcttgact

SEQ ID NO: 2098125 - DNA, 25 bp, Homo sapien
tcccttttggtgatgttatatttgc

SEQ ID NO: 2098126 - DNA, 25 bp, Homo sapien
catcatttggccatggtctgcgggt

SEQ ID NO: 2098127 - DNA, 25 bp, Homo sapien
gacatccatgttcgggcactcaggg

SEQ ID NO: 2098128 - DNA, 25 bp, Homo sapien
tcagctcccggtatcatcaagtagg

SEQ ID NO: 2098129 - DNA, 25 bp, Homo sapien
catatactcacagcccagggtagca

SEQ ID NO: 2098130 - DNA, 25 bp, Homo sapien
tgagaccccagacgataaagtgaag

SEQ ID NO: 2098131 - DNA, 25 bp, Homo sapien
gagcactgctttaggaacccatgga

SEQ ID NO: 2098132 - DNA, 25 bp, Homo sapien
tctattcaatggtgggtggtcctcc

SEQ ID NO: 2098133 - DNA, 25 bp, Homo sapien
tcatatcaattgttggcaggccctg

SEQ ID NO: 2098134 - DNA, 25 bp, Homo sapien
atgactctggttaggcagagtagga

SEQ ID NO: 2098135 - DNA, 25 bp, Homo sapien
gacaggatggctggcaatgtgggca

SEQ ID NO: 2098136 - DNA, 25 bp, Homo sapien
tggacaggatggctggcaatgtggg

SEQ ID NO: 2098137 - DNA, 25 bp, Homo sapien
ctggttaggcagagtaggaaaaagt

SEQ ID NO: 2098138 - DNA, 25 bp, Homo sapien
cagtaggtaggctctcagtaacacc

SEQ ID NO: 2098139 - DNA, 25 bp, Homo sapien
tctgaggctccttcaaagtgctaca

SEQ ID NO: 2098140 - DNA, 25 bp, Homo sapien
aagtgctacatgacccagcagtagg

SEQ ID NO: 2098141 - DNA, 25 bp, Homo sapien
catttcttatggacatggaacttac

SEQ ID NO: 2098142 - DNA, 25 bp, Homo sapien
gatcactgttgagcagtactccagg

SEQ ID NO: 2098143 - DNA, 25 bp, Homo sapien
tagctttggcagtagcgccaggcat

SEQ ID NO: 2098144 - DNA, 25 bp, Homo sapien
catggctgcatctatggcttgggct

SEQ ID NO: 2098145 - DNA, 25 bp, Homo sapien
gagacactagggacagtatcactga

SEQ ID NO: 2098146 - DNA, 25 bp, Homo sapien
aatgccttaggatagtgagacagcc

SEQ ID NO: 2098147 - DNA, 25 bp, Homo sapien
ttttgtgtagacgaggaaacctgcc

SEQ ID NO: 2098148 - DNA, 25 bp, Homo sapien
tgagccttaccagttcaatattggg

SEQ ID NO: 2098149 - DNA, 25 bp, Homo sapien
cagaatggagcctgacttgcgcact

SEQ ID NO: 2098150 - DNA, 25 bp, Homo sapien
cagcacagattgaactgctgtgata

SEQ ID NO: 2098151 - DNA, 25 bp, Homo sapien
cttaagcagcacagattgaactgct

SEQ ID NO: 2098152 - DNA, 25 bp, Homo sapien
acagattgaactgctgtgataatca

SEQ ID NO: 2098153 - DNA, 25 bp, Homo sapien
taagcagcacagattgaactgctgt

SEQ ID NO: 2098154 - DNA, 25 bp, Homo sapien
catactggctttaggcttaagctct

SEQ ID NO: 2098155 - DNA, 25 bp, Homo sapien
gctttaggcttaagctctccacctg

SEQ ID NO: 2098156 - DNA, 25 bp, Homo sapien
ctgcatactggctttaggcttaagc

SEQ ID NO: 2098157 - DNA, 25 bp, Homo sapien
actggctttaggcttaagctctcca

SEQ ID NO: 2098158 - DNA, 25 bp, Homo sapien
tgaaatataccagttttggcttccc

SEQ ID NO: 2098159 - DNA, 25 bp, Homo sapien
ggttccctgaagcaatcactaaaag

SEQ ID NO: 2098160 - DNA, 25 bp, Homo sapien
aggtattcccactctgggtagaggg

SEQ ID NO: 2098161 - DNA, 25 bp, Homo sapien
agggggcagaggaggtattcccact

SEQ ID NO: 2098162 - DNA, 25 bp, Homo sapien
gagggggcagaggaggtattcccac

SEQ ID NO: 2098163 - DNA, 25 bp, Homo sapien
gggaggtattcccactctgggtaga

SEQ ID NO: 2098164 - DNA, 25 bp, Homo sapien
tagagtgggtggaggatgtattccc

SEQ ID NO: 2098165 - DNA, 25 bp, Homo sapien
ggcagagagggtattccagctccgg

SEQ ID NO: 2098166 - DNA, 25 bp, Homo sapien
tggtcgacaaggctctatgggctgc

SEQ ID NO: 2098167 - DNA, 25 bp, Homo sapien
ggtcgacaaggctctatgggctgct

SEQ ID NO: 2098168 - DNA, 25 bp, Homo sapien
cgacaaggctctatgggctgcttcc

SEQ ID NO: 2098169 - DNA, 25 bp, Homo sapien
tcgacaaggctctatgggctgcttc

SEQ ID NO: 2098170 - DNA, 25 bp, Homo sapien
gactaggggatgtcttctcacaaag

SEQ ID NO: 2098171 - DNA, 25 bp, Homo sapien
tgagggtcaagtggctccaagagac

SEQ ID NO: 2098172 - DNA, 25 bp, Homo sapien
ttgtgagggtcaagtggctccaaga

SEQ ID NO: 2098173 - DNA, 25 bp, Homo sapien
gtcaagtggctccaagagactaggg

SEQ ID NO: 2098174 - DNA, 25 bp, Homo sapien
tcaatattcagtcagagaatatgca

SEQ ID NO: 2098175 - DNA, 25 bp, Homo sapien
gatcataagggagaattatttctat

SEQ ID NO: 2098176 - DNA, 25 bp, Homo sapien
tgatcataagggagaattatttcta

SEQ ID NO: 2098177 - DNA, 25 bp, Homo sapien
ttaaaggcaacatctacagaatgat

SEQ ID NO: 2098178 - DNA, 25 bp, Homo sapien
aaggcaacatctacagaatgatcat

SEQ ID NO: 2098179 - DNA, 25 bp, Homo sapien
aggcctggtgtaggtcggccccgag

SEQ ID NO: 2098180 - DNA, 25 bp, Homo sapien
gaggcgagacgcatggcggtcagct

SEQ ID NO: 2098181 - DNA, 25 bp, Homo sapien
gtcgacctgccccatggtgaaggca

SEQ ID NO: 2098182 - DNA, 25 bp, Homo sapien
tgcatttgccggctccagagggccc

SEQ ID NO: 2098183 - DNA, 25 bp, Homo sapien
caaaatgcatccccccggtctccag

SEQ ID NO: 2098184 - DNA, 25 bp, Homo sapien
catccccccggtctccagaagaaca

SEQ ID NO: 2098185 - DNA, 25 bp, Homo sapien
tgcatccccccggtctccagaagaa

SEQ ID NO: 2098186 - DNA, 25 bp, Homo sapien
aatgcatccccccggtctccagaag

SEQ ID NO: 2098187 - DNA, 25 bp, Homo sapien
tgagtgcctagctaccaaacaatgc

SEQ ID NO: 2098188 - DNA, 25 bp, Homo sapien
tgttagctgcacagaccgcgtgtgt

SEQ ID NO: 2098189 - DNA, 25 bp, Homo sapien
tatctctgagcaaaaggtatcggcc

SEQ ID NO: 2098190 - DNA, 25 bp, Homo sapien
caacatggatggatgcccgcttgtc

SEQ ID NO: 2098191 - DNA, 25 bp, Homo sapien
acagggcctggaatataagaagtat

SEQ ID NO: 2098192 - DNA, 25 bp, Homo sapien
gttgccatttgatactgttattttt

SEQ ID NO: 2098193 - DNA, 25 bp, Homo sapien
gttgttgccatttgatactgttatt

SEQ ID NO: 2098194 - DNA, 25 bp, Homo sapien
ttgttgttgccatttgatactgtta

SEQ ID NO: 2098195 - DNA, 25 bp, Homo sapien
tggttgttacatcatatccatcgcc

SEQ ID NO: 2098196 - DNA, 25 bp, Homo sapien
ctaagctagccaaaaggtggttgtt

SEQ ID NO: 2098197 - DNA, 25 bp, Homo sapien
aaggtggttgttacatcatatccat

SEQ ID NO: 2098198 - DNA, 25 bp, Homo sapien
catatccatcgccaatcatgttcaa

SEQ ID NO: 2098199 - DNA, 25 bp, Homo sapien
tgctgaccagtacagtcatgaactg

SEQ ID NO: 2098200 - DNA, 25 bp, Homo sapien
gatgagaggtaatacagctggacag

SEQ ID NO: 2098201 - DNA, 25 bp, Homo sapien
gccttctcgcctattgctttggtga

SEQ ID NO: 2098202 - DNA, 25 bp, Homo sapien
ttggtgaaaatctccagtaaataca

SEQ ID NO: 2098203 - DNA, 25 bp, Homo sapien
tattgactctatggatttgcattga

SEQ ID NO: 2098204 - DNA, 25 bp, Homo sapien
ttatattgactctatggatttgcat

SEQ ID NO: 2098205 - DNA, 25 bp, Homo sapien
gaccccagtatttggttactgagtg

SEQ ID NO: 2098206 - DNA, 25 bp, Homo sapien
ttagaccccagtatttggttactga

SEQ ID NO: 2098207 - DNA, 25 bp, Homo sapien
taagagatcctaaagacatttatgt

SEQ ID NO: 2098208 - DNA, 25 bp, Homo sapien
ctcattaatgtaagagatcctaaag

SEQ ID NO: 2098209 - DNA, 25 bp, Homo sapien
gtaagagatcctaaagacatttatg

SEQ ID NO: 2098210 - DNA, 25 bp, Homo sapien
tgtaagagatcctaaagacatttat

SEQ ID NO: 2098211 - DNA, 25 bp, Homo sapien
tcacaggggctcaaaaagctctgct

SEQ ID NO: 2098212 - DNA, 25 bp, Homo sapien
atctctttgaaacggaaggcatttt

SEQ ID NO: 2098213 - DNA, 25 bp, Homo sapien
tgtgtatctctttgaaacggaaggc

SEQ ID NO: 2098214 - DNA, 25 bp, Homo sapien
acaggggctcaaaaagctctgcttt

SEQ ID NO: 2098215 - DNA, 25 bp, Homo sapien
ctccaaaagtatttgctgatgtccc

SEQ ID NO: 2098216 - DNA, 25 bp, Homo sapien
ctcatgtgtctcctttctccaaaag

SEQ ID NO: 2098217 - DNA, 25 bp, Homo sapien
gtctcctttctccaaaagtatttgc

SEQ ID NO: 2098218 - DNA, 25 bp, Homo sapien
tctccaaaagtatttgctgatgtcc

SEQ ID NO: 2098219 - DNA, 25 bp, Homo sapien
cttttgagaaaatctgacttcatga

SEQ ID NO: 2098220 - DNA, 25 bp, Homo sapien
ttttgagaaaatctgacttcatgag

SEQ ID NO: 2098221 - DNA, 25 bp, Homo sapien
caccactggctcattgtctgggttt

SEQ ID NO: 2098222 - DNA, 25 bp, Homo sapien
cctctccaccactggctcattgtct

SEQ ID NO: 2098223 - DNA, 25 bp, Homo sapien
ccactggctcattgtctgggtttcc

SEQ ID NO: 2098224 - DNA, 25 bp, Homo sapien
ctccaccactggctcattgtctggg

SEQ ID NO: 2098225 - DNA, 25 bp, Homo sapien
cttttcttgctatccttgccattcg

SEQ ID NO: 2098226 - DNA, 25 bp, Homo sapien
tttcttgctatccttgccattcgaa

SEQ ID NO: 2098227 - DNA, 25 bp, Homo sapien
tcttgctatccttgccattcgaatt

SEQ ID NO: 2098228 - DNA, 25 bp, Homo sapien
cttgctatccttgccattcgaattt

SEQ ID NO: 2098229 - DNA, 25 bp, Homo sapien
ggacctttgggctcagaccatcgat

SEQ ID NO: 2098230 - DNA, 25 bp, Homo sapien
gttaactgtaaccttgatgagcttc

SEQ ID NO: 2098231 - DNA, 25 bp, Homo sapien
gctcagaccatcgatacctctgatt

SEQ ID NO: 2098232 - DNA, 25 bp, Homo sapien
tgggctcagaccatcgatacctctg

SEQ ID NO: 2098233 - DNA, 25 bp, Homo sapien
cttcagatttgggtacccacaggca

SEQ ID NO: 2098234 - DNA, 25 bp, Homo sapien
gatcgagcaatcaaaacattatctg

SEQ ID NO: 2098235 - DNA, 25 bp, Homo sapien
caggcaatatatggctctacagtcc

SEQ ID NO: 2098236 - DNA, 25 bp, Homo sapien
cagatttgggtacccacaggcaata

SEQ ID NO: 2098237 - DNA, 25 bp, Homo sapien
agcctgttgatatcatcctccctgt

SEQ ID NO: 2098238 - DNA, 25 bp, Homo sapien
ataagcctgttgatatcatcctccc

SEQ ID NO: 2098239 - DNA, 25 bp, Homo sapien
aataagcctgttgatatcatcctcc

SEQ ID NO: 2098240 - DNA, 25 bp, Homo sapien
accagcttagaaaaataatcatggt

SEQ ID NO: 2098241 - DNA, 25 bp, Homo sapien
ttagaaaaataatcatggtagacac

SEQ ID NO: 2098242 - DNA, 25 bp, Homo sapien
tactgtttattaaccgaccagctta

SEQ ID NO: 2098243 - DNA, 25 bp, Homo sapien
actgtttattaaccgaccagcttag

SEQ ID NO: 2098244 - DNA, 25 bp, Homo sapien
aggttttggcacttcactgggctcc

SEQ ID NO: 2098245 - DNA, 25 bp, Homo sapien
tggacttcgagatcgactcgctcat

SEQ ID NO: 2098246 - DNA, 25 bp, Homo sapien
atttggtcggccctgaggtctctta

SEQ ID NO: 2098247 - DNA, 25 bp, Homo sapien
gcgctgtcctgggactcaccagagg

SEQ ID NO: 2098248 - DNA, 25 bp, Homo sapien
ttttccaggtcttggcagcgtcctt

SEQ ID NO: 2098249 - DNA, 25 bp, Homo sapien
tccaggtcttggcagcgtccttgtt

SEQ ID NO: 2098250 - DNA, 25 bp, Homo sapien
tttccaggtcttggcagcgtccttg

SEQ ID NO: 2098251 - DNA, 25 bp, Homo sapien
gtcttggcagcgtccttgtttttcc

SEQ ID NO: 2098252 - DNA, 25 bp, Homo sapien
ctcttcctccttctccagttttttg

SEQ ID NO: 2098253 - DNA, 25 bp, Homo sapien
tcctgtgagatgccctcctcttcct

SEQ ID NO: 2098254 - DNA, 25 bp, Homo sapien
tgtgagatgccctcctcttcctcct

SEQ ID NO: 2098255 - DNA, 25 bp, Homo sapien
ctgtgagatgccctcctcttcctcc

SEQ ID NO: 2098256 - DNA, 25 bp, Homo sapien
gagcaggcgacacgcaagcacggtc

SEQ ID NO: 2098257 - DNA, 25 bp, Homo sapien
gcacggtcattgctcctcctccgag

SEQ ID NO: 2098258 - DNA, 25 bp, Homo sapien
aggcgacacgcaagcacggtcattg

SEQ ID NO: 2098259 - DNA, 25 bp, Homo sapien
gacacgcaagcacggtcattgctcc

SEQ ID NO: 2098260 - DNA, 25 bp, Homo sapien
gtagtgtggtggtgaagtcgcaggt

SEQ ID NO: 2098261 - DNA, 25 bp, Homo sapien
gggcctcacctggacaataagtgac

SEQ ID NO: 2098262 - DNA, 25 bp, Homo sapien
tgggcctcacctggacaataagtga

SEQ ID NO: 2098263 - DNA, 25 bp, Homo sapien
gataggaggtcttcactcttctaga

SEQ ID NO: 2098264 - DNA, 25 bp, Homo sapien
tttcacagtttggagtaaatgaggc

SEQ ID NO: 2098265 - DNA, 25 bp, Homo sapien
cgaatatgctgtctagttaaagtga

SEQ ID NO: 2098266 - DNA, 25 bp, Homo sapien
caagcacacaaaatcctagagtatg

SEQ ID NO: 2098267 - DNA, 25 bp, Homo sapien
taagaatctcaggttcagcacatcc

SEQ ID NO: 2098268 - DNA, 25 bp, Homo sapien
tagacaagcctcaccctagcaaaac

SEQ ID NO: 2098269 - DNA, 25 bp, Homo sapien
cctagcaaaacccattttgtgatca

SEQ ID NO: 2098270 - DNA, 25 bp, Homo sapien
cagcacatccctggtgtaatagaca

SEQ ID NO: 2098271 - DNA, 25 bp, Homo sapien
tgaataacatctttccttggggtct

SEQ ID NO: 2098272 - DNA, 25 bp, Homo sapien
tccaaagtggaacatctgaaataag

SEQ ID NO: 2098273 - DNA, 25 bp, Homo sapien
ttccactatccaaaatgtatccaga

SEQ ID NO: 2098274 - DNA, 25 bp, Homo sapien
ggtctttgcggttttctgagcctgc

SEQ ID NO: 2098275 - DNA, 25 bp, Homo sapien
gtttgtgtttccatgaggttccgag

SEQ ID NO: 2098276 - DNA, 25 bp, Homo sapien
cctcttcacttgatcacgtctgcaa

SEQ ID NO: 2098277 - DNA, 25 bp, Homo sapien
tttccatgaggttccgagtggacat

SEQ ID NO: 2098278 - DNA, 25 bp, Homo sapien
cacttgatcacgtctgcaaagtttg

SEQ ID NO: 2098279 - DNA, 25 bp, Homo sapien
gattctccagagagtagtcccatgg

SEQ ID NO: 2098280 - DNA, 25 bp, Homo sapien
aacaaaatttggcaagccagtcagg

SEQ ID NO: 2098281 - DNA, 25 bp, Homo sapien
ccagtggcttgcaatgagacagtct

SEQ ID NO: 2098282 - DNA, 25 bp, Homo sapien
ggccctcaggttggtccaggaacaa

SEQ ID NO: 2098283 - DNA, 25 bp, Homo sapien
gccagatgcagaaacgctgatccag

SEQ ID NO: 2098284 - DNA, 25 bp, Homo sapien
gcaaattgtgtacaatgccagatgc

SEQ ID NO: 2098285 - DNA, 25 bp, Homo sapien
tcatgccataatgagatgggcttca

SEQ ID NO: 2098286 - DNA, 25 bp, Homo sapien
cagttgccaagttctatggagggca

SEQ ID NO: 2098287 - DNA, 25 bp, Homo sapien
tatctcagcgtagttttaacttgca

SEQ ID NO: 2098288 - DNA, 25 bp, Homo sapien
tacatagtatttcattgcggaagtg

SEQ ID NO: 2098289 - DNA, 25 bp, Homo sapien
taatttggccagtatgctttggaac

SEQ ID NO: 2098290 - DNA, 25 bp, Homo sapien
tttttcatatacataagggccaact

SEQ ID NO: 2098291 - DNA, 25 bp, Homo sapien
ttgtaattcccatcaaaggcagcat

SEQ ID NO: 2098292 - DNA, 25 bp, Homo sapien
aattgtaattcccatcaaaggcagc

SEQ ID NO: 2098293 - DNA, 25 bp, Homo sapien
ctaattgtaattcccatcaaaggca

SEQ ID NO: 2098294 - DNA, 25 bp, Homo sapien
attgtaattcccatcaaaggcagca

SEQ ID NO: 2098295 - DNA, 25 bp, Homo sapien
atcaaagtttatgatctccagtgtc

SEQ ID NO: 2098296 - DNA, 25 bp, Homo sapien
ccctcattcaagcactctgtatgaa

SEQ ID NO: 2098297 - DNA, 25 bp, Homo sapien
gcttcaatgatatcaaagtttatga

SEQ ID NO: 2098298 - DNA, 25 bp, Homo sapien
aagcactctgtatgaaaattggaag

SEQ ID NO: 2098299 - DNA, 25 bp, Homo sapien
gaacctctgagacattgtagtttct

SEQ ID NO: 2098300 - DNA, 25 bp, Homo sapien
tctgtacatggataagccatcttga

SEQ ID NO: 2098301 - DNA, 25 bp, Homo sapien
tcttgaaggctagctgaacctctga

SEQ ID NO: 2098302 - DNA, 25 bp, Homo sapien
ccaaatctgaatgactatctgtaca

SEQ ID NO: 2098303 - DNA, 25 bp, Homo sapien
tagggcattaggtaaaggattccaa

SEQ ID NO: 2098304 - DNA, 25 bp, Homo sapien
ggcaaatcaggagttgggtagggca

SEQ ID NO: 2098305 - DNA, 25 bp, Homo sapien
acaagtatctgacttgggcagctcc

SEQ ID NO: 2098306 - DNA, 25 bp, Homo sapien
ttccaaaagctgcaaccagaaaaac

SEQ ID NO: 2098307 - DNA, 25 bp, Homo sapien
gaatcatgaagcattgtcctggaag

SEQ ID NO: 2098308 - DNA, 25 bp, Homo sapien
agaatcatgaagcattgtcctggaa

SEQ ID NO: 2098309 - DNA, 25 bp, Homo sapien
atttcactgaaatacccatcaaaat

SEQ ID NO: 2098310 - DNA, 25 bp, Homo sapien
gatgcaatggattaagactcttgac

SEQ ID NO: 2098311 - DNA, 25 bp, Homo sapien
gcaatggattaagactcttgactag

SEQ ID NO: 2098312 - DNA, 25 bp, Homo sapien
ttttttcacttagatgcaatggatt

SEQ ID NO: 2098313 - DNA, 25 bp, Homo sapien
tcacttagatgcaatggattaagac

SEQ ID NO: 2098314 - DNA, 25 bp, Homo sapien
ttgcttaatgtaaacacaaggaggg

SEQ ID NO: 2098315 - DNA, 25 bp, Homo sapien
acatcaaatcacacacaatggaggg

SEQ ID NO: 2098316 - DNA, 25 bp, Homo sapien
gagagtaaccaatatctgtaataac

SEQ ID NO: 2098317 - DNA, 25 bp, Homo sapien
ttgggtaaggcaagaaaccactctg

SEQ ID NO: 2098318 - DNA, 25 bp, Homo sapien
catgaagaattaggcgttgaggttg

SEQ ID NO: 2098319 - DNA, 25 bp, Homo sapien
tgaggttgagggatcacagatttga

SEQ ID NO: 2098320 - DNA, 25 bp, Homo sapien
tttcttttaagtgaccaggcacagg

SEQ ID NO: 2098321 - DNA, 25 bp, Homo sapien
gaacaggaattgtcatgactccagc

SEQ ID NO: 2098322 - DNA, 25 bp, Homo sapien
cccactaaaggtaatggccacaaag

SEQ ID NO: 2098323 - DNA, 25 bp, Homo sapien
tgtgcattgcctaggccacccacta

SEQ ID NO: 2098324 - DNA, 25 bp, Homo sapien
ttgcctaggccacccactaaaggta

SEQ ID NO: 2098325 - DNA, 25 bp, Homo sapien
taggccacccactaaaggtaatggc

SEQ ID NO: 2098326 - DNA, 25 bp, Homo sapien
ggatataaaatctctttggcagtta

SEQ ID NO: 2098327 - DNA, 25 bp, Homo sapien
tataaaatctctttggcagttagca

SEQ ID NO: 2098328 - DNA, 25 bp, Homo sapien
ataaaatctctttggcagttagcag

SEQ ID NO: 2098329 - DNA, 25 bp, Homo sapien
cgtaccattcattaaggatataaaa

SEQ ID NO: 2098330 - DNA, 25 bp, Homo sapien
tttgctgtcataatctgccatgata

SEQ ID NO: 2098331 - DNA, 25 bp, Homo sapien
gctgtcataatctgccatgatattt

SEQ ID NO: 2098332 - DNA, 25 bp, Homo sapien
gtatatctggtctcgtcttgctgtt

SEQ ID NO: 2098333 - DNA, 25 bp, Homo sapien
atgtatatctggtctcgtcttgctg

SEQ ID NO: 2098334 - DNA, 25 bp, Homo sapien
ctttgggccatgggtttcagacttt

SEQ ID NO: 2098335 - DNA, 25 bp, Homo sapien
cagcattcgattggtaaaaagatat

SEQ ID NO: 2098336 - DNA, 25 bp, Homo sapien
gatattattcggaaagaaccaatca

SEQ ID NO: 2098337 - DNA, 25 bp, Homo sapien
aaaggcagcattcgattggtaaaaa

SEQ ID NO: 2098338 - DNA, 25 bp, Homo sapien
atttctcctgcattcagtgactctt

SEQ ID NO: 2098339 - DNA, 25 bp, Homo sapien
cttaatttctcctgcattcagtgac

SEQ ID NO: 2098340 - DNA, 25 bp, Homo sapien
ttctcctgcattcagtgactcttcc

SEQ ID NO: 2098341 - DNA, 25 bp, Homo sapien
ctcctgcattcagtgactcttccat

SEQ ID NO: 2098342 - DNA, 25 bp, Homo sapien
ttaaaacattcaagtttctcataaa

SEQ ID NO: 2098343 - DNA, 25 bp, Homo sapien
tcaagtttctcataaagttccttgt

SEQ ID NO: 2098344 - DNA, 25 bp, Homo sapien
tttaaaacattcaagtttctcataa

SEQ ID NO: 2098345 - DNA, 25 bp, Homo sapien
ttctcataaagttccttgttctcat

SEQ ID NO: 2098346 - DNA, 25 bp, Homo sapien
gattattggccgaatgcttccgact

SEQ ID NO: 2098347 - DNA, 25 bp, Homo sapien
gaagccgtatagattccaacatcat

SEQ ID NO: 2098348 - DNA, 25 bp, Homo sapien
tgggctggctttgctgattattggc

SEQ ID NO: 2098349 - DNA, 25 bp, Homo sapien
caaaattaattgtctctgaagccgt

SEQ ID NO: 2098350 - DNA, 25 bp, Homo sapien
gcaatggtatttgtccaacttgagc

SEQ ID NO: 2098351 - DNA, 25 bp, Homo sapien
gaagcactggactccatatgaagtg

SEQ ID NO: 2098352 - DNA, 25 bp, Homo sapien
tcagctgcgtctaagtactggtagt

SEQ ID NO: 2098353 - DNA, 25 bp, Homo sapien
agactgtaagtgaaatttggctgca

SEQ ID NO: 2098354 - DNA, 25 bp, Homo sapien
tctccacatttgagtttataccaga

SEQ ID NO: 2098355 - DNA, 25 bp, Homo sapien
tttgagtttataccagatgatgttc

SEQ ID NO: 2098356 - DNA, 25 bp, Homo sapien
tgttctcaatagaatctttggaata

SEQ ID NO: 2098357 - DNA, 25 bp, Homo sapien
tctcaatagaatctttggaatactg

SEQ ID NO: 2098358 - DNA, 25 bp, Homo sapien
aacagccacggctctgttaccctaa

SEQ ID NO: 2098359 - DNA, 25 bp, Homo sapien
cgttcttccgaagtatcactacctt

SEQ ID NO: 2098360 - DNA, 25 bp, Homo sapien
taggcttagaatccattggatcgtt

SEQ ID NO: 2098361 - DNA, 25 bp, Homo sapien
cttgaagacaatgaaggcattaggc

SEQ ID NO: 2098362 - DNA, 25 bp, Homo sapien
tctcgcatgtcataaaaatgatatg

SEQ ID NO: 2098363 - DNA, 25 bp, Homo sapien
cattccactggatgtacttcaccag

SEQ ID NO: 2098364 - DNA, 25 bp, Homo sapien
gatgtctgacatctgactcgttaca

SEQ ID NO: 2098365 - DNA, 25 bp, Homo sapien
aatgatatgtccatgaatctgacac

SEQ ID NO: 2098366 - DNA, 25 bp, Homo sapien
tccttcagcacctgctagacgtgca

SEQ ID NO: 2098367 - DNA, 25 bp, Homo sapien
agtgagttcacccataatgccctgc

SEQ ID NO: 2098368 - DNA, 25 bp, Homo sapien
tctgttcaaaatgcttagtgagttc

SEQ ID NO: 2098369 - DNA, 25 bp, Homo sapien
caggacatagcacagttttatggca

SEQ ID NO: 2098370 - DNA, 25 bp, Homo sapien
cttatccctcgagcctcgtgctctt

SEQ ID NO: 2098371 - DNA, 25 bp, Homo sapien
caacatgtgcctggtatggaccata

SEQ ID NO: 2098372 - DNA, 25 bp, Homo sapien
tcagttcacaacatgtgcctggtat

SEQ ID NO: 2098373 - DNA, 25 bp, Homo sapien
cctggtatggaccatatgatgttag

SEQ ID NO: 2098374 - DNA, 25 bp, Homo sapien
tgtgcctggtatggaccatatgatg

SEQ ID NO: 2098375 - DNA, 25 bp, Homo sapien
catattccagctccaacctccaaac

SEQ ID NO: 2098376 - DNA, 25 bp, Homo sapien
gccacttacttaagcttatgtcaag

SEQ ID NO: 2098377 - DNA, 25 bp, Homo sapien
ctgccaaatcattctggttgccaga

SEQ ID NO: 2098378 - DNA, 25 bp, Homo sapien
agctccaacctccaaacccttgatt

SEQ ID NO: 2098379 - DNA, 25 bp, Homo sapien
gcttcttaaacttgcaagaagagtc

SEQ ID NO: 2098380 - DNA, 25 bp, Homo sapien
cttcttaaacttgcaagaagagtct

SEQ ID NO: 2098381 - DNA, 25 bp, Homo sapien
aaaatccccttatggattctcagat

SEQ ID NO: 2098382 - DNA, 25 bp, Homo sapien
aaatccccttatggattctcagatg

SEQ ID NO: 2098383 - DNA, 25 bp, Homo sapien
tccccttatggattctcagatgagg

SEQ ID NO: 2098384 - DNA, 25 bp, Homo sapien
atccccttatggattctcagatgag

SEQ ID NO: 2098385 - DNA, 25 bp, Homo sapien
aatagtatcaggcttccttcttcgc

SEQ ID NO: 2098386 - DNA, 25 bp, Homo sapien
tcaatagtatcaggcttccttcttc

SEQ ID NO: 2098387 - DNA, 25 bp, Homo sapien
ttcaatagtatcaggcttccttctt

SEQ ID NO: 2098388 - DNA, 25 bp, Homo sapien
atagtatcaggcttccttcttcgca

SEQ ID NO: 2098389 - DNA, 25 bp, Homo sapien
taattgtccgttcttcaatctgtct

SEQ ID NO: 2098390 - DNA, 25 bp, Homo sapien
tgggctttaattgtccgttcttcaa

SEQ ID NO: 2098391 - DNA, 25 bp, Homo sapien
tctgggctttaattgtccgttcttc

SEQ ID NO: 2098392 - DNA, 25 bp, Homo sapien
tttaattgtccgttcttcaatctgt

SEQ ID NO: 2098393 - DNA, 25 bp, Homo sapien
gagagagggtagacatcacagtttt

SEQ ID NO: 2098394 - DNA, 25 bp, Homo sapien
cagattaaaagcctcaaattggttt

SEQ ID NO: 2098395 - DNA, 25 bp, Homo sapien
tcagattaaaagcctcaaattggtt

SEQ ID NO: 2098396 - DNA, 25 bp, Homo sapien
tctaagctttatacacttgcttggg

SEQ ID NO: 2098397 - DNA, 25 bp, Homo sapien
tatcaactgcttgggatttctaagc

SEQ ID NO: 2098398 - DNA, 25 bp, Homo sapien
tgattttgcacttctagtcttcgac

SEQ ID NO: 2098399 - DNA, 25 bp, Homo sapien
ggctgcattagcattcagctgtgtg

SEQ ID NO: 2098400 - DNA, 25 bp, Homo sapien
aaaggatgcatttggcaggtgaaaa

SEQ ID NO: 2098401 - DNA, 25 bp, Homo sapien
ttggcaggtgaaaagcacggatgac

SEQ ID NO: 2098402 - DNA, 25 bp, Homo sapien
caatatttaccaagcattcccttta

SEQ ID NO: 2098403 - DNA, 25 bp, Homo sapien
gcattccctttaaaggatgcatttg

SEQ ID NO: 2098404 - DNA, 25 bp, Homo sapien
ctcaagggtgtcagagtgaggatct

SEQ ID NO: 2098405 - DNA, 25 bp, Homo sapien
gcagagtgaccaggcactcaagggt

SEQ ID NO: 2098406 - DNA, 25 bp, Homo sapien
gtgtcagagtgaggatctgcgtcat

SEQ ID NO: 2098407 - DNA, 25 bp, Homo sapien
gaccaggcactcaagggtgtcagag

SEQ ID NO: 2098408 - DNA, 25 bp, Homo sapien
acatgaattcgaggtgatccacttg

SEQ ID NO: 2098409 - DNA, 25 bp, Homo sapien
atcctgaggaggaagtaaggctgct

SEQ ID NO: 2098410 - DNA, 25 bp, Homo sapien
ctacagtggtagcattagaggaatg

SEQ ID NO: 2098411 - DNA, 25 bp, Homo sapien
aagaggcagtttttacagtctgttg

SEQ ID NO: 2098412 - DNA, 25 bp, Homo sapien
ttcccttgccttcagttgtaggaag

SEQ ID NO: 2098413 - DNA, 25 bp, Homo sapien
ttggttgctgcagaggcttcccttg

SEQ ID NO: 2098414 - DNA, 25 bp, Homo sapien
ttcccctgaattcttcacaaatgct

SEQ ID NO: 2098415 - DNA, 25 bp, Homo sapien
caaatgctctccagtaatttacagg

SEQ ID NO: 2098416 - DNA, 25 bp, Homo sapien
atctgcatcgccctcgccttctctc

SEQ ID NO: 2098417 - DNA, 25 bp, Homo sapien
ttctctctcaccacggtggtcagca

SEQ ID NO: 2098418 - DNA, 25 bp, Homo sapien
agcagcaggcgctactcctcctacc

SEQ ID NO: 2098419 - DNA, 25 bp, Homo sapien
ctactcctcctacccatctgcatcg

SEQ ID NO: 2098420 - DNA, 25 bp, Homo sapien
cagactccctttgaattttaggaga

SEQ ID NO: 2098421 - DNA, 25 bp, Homo sapien
gcagactccctttgaattttaggag

SEQ ID NO: 2098422 - DNA, 25 bp, Homo sapien
cgtgccccattaaaacccagtactg

SEQ ID NO: 2098423 - DNA, 25 bp, Homo sapien
gagcactttgctgtgaggtccaaca

SEQ ID NO: 2098424 - DNA, 25 bp, Homo sapien
tttacctgagattgagcttcccaag

SEQ ID NO: 2098425 - DNA, 25 bp, Homo sapien
agatgagctgcactaccaccaggct

SEQ ID NO: 2098426 - DNA, 25 bp, Homo sapien
catggtaaaccttgacctgttctga

SEQ ID NO: 2098427 - DNA, 25 bp, Homo sapien
ctgggacagagtgaacaaggagtac

SEQ ID NO: 2098428 - DNA, 25 bp, Homo sapien
gtttgtgagcaacagccaatgtgcc

SEQ ID NO: 2098429 - DNA, 25 bp, Homo sapien
tgcaaagaccctaaaatgcctcgtg

SEQ ID NO: 2098430 - DNA, 25 bp, Homo sapien
tgtatgttaggacaccttcaaggtg

SEQ ID NO: 2098431 - DNA, 25 bp, Homo sapien
caagggttaaaggtagctcagaagc

SEQ ID NO: 2098432 - DNA, 25 bp, Homo sapien
tacactgacccctgcaaatgtgcca

SEQ ID NO: 2098433 - DNA, 25 bp, Homo sapien
gtcttaggaaataggtgcaccgagc

SEQ ID NO: 2098434 - DNA, 25 bp, Homo sapien
gcgttgaactgaacaccataatttc

SEQ ID NO: 2098435 - DNA, 25 bp, Homo sapien
gaacaccataatttcaatttcaaca

SEQ ID NO: 2098436 - DNA, 25 bp, Homo sapien
tctccaacatctggcatatttagcg

SEQ ID NO: 2098437 - DNA, 25 bp, Homo sapien
tcaacagggtttttcgaattagcca

SEQ ID NO: 2098438 - DNA, 25 bp, Homo sapien
cagaactcaaccgcctttatcagag

SEQ ID NO: 2098439 - DNA, 25 bp, Homo sapien
gaactcaaccgcctttatcagagaa

SEQ ID NO: 2098440 - DNA, 25 bp, Homo sapien
aagagcaagccattgatttattcac

SEQ ID NO: 2098441 - DNA, 25 bp, Homo sapien
gagaagagcaagccattgatttatt

SEQ ID NO: 2098442 - DNA, 25 bp, Homo sapien
gtcattctgatgaacctctaaagtg

SEQ ID NO: 2098443 - DNA, 25 bp, Homo sapien
ggtcattctgatgaacctctaaagt

SEQ ID NO: 2098444 - DNA, 25 bp, Homo sapien
ttataggtcattctgatgaacctct

SEQ ID NO: 2098445 - DNA, 25 bp, Homo sapien
taggtcattctgatgaacctctaaa

SEQ ID NO: 2098446 - DNA, 25 bp, Homo sapien
aaagagctgtgcattagtactgatg

SEQ ID NO: 2098447 - DNA, 25 bp, Homo sapien
ctgtgggcaaaagccccttcagcag

SEQ ID NO: 2098448 - DNA, 25 bp, Homo sapien
ttgaggactaaagagctgtgcatta

SEQ ID NO: 2098449 - DNA, 25 bp, Homo sapien
tcagcagcttgaggactaaagagct

SEQ ID NO: 2098450 - DNA, 25 bp, Homo sapien
acttcttctcctttggttccagaca

SEQ ID NO: 2098451 - DNA, 25 bp, Homo sapien
cacttcttctcctttggttccagac

SEQ ID NO: 2098452 - DNA, 25 bp, Homo sapien
ctgtggtcatgtttgctgtcacttc

SEQ ID NO: 2098453 - DNA, 25 bp, Homo sapien
tcatgtttgctgtcacttcttctcc

SEQ ID NO: 2098454 - DNA, 25 bp, Homo sapien
gtaaagggcttgtcaaagataccca

SEQ ID NO: 2098455 - DNA, 25 bp, Homo sapien
ttttaggagggtgcaagctcacaca

SEQ ID NO: 2098456 - DNA, 25 bp, Homo sapien
aactgaggcctattactgtgaagga

SEQ ID NO: 2098457 - DNA, 25 bp, Homo sapien
cacagagggccagatctgaaaacca

SEQ ID NO: 2098458 - DNA, 25 bp, Homo sapien
aggtggcaaaattcgtatttcccag

SEQ ID NO: 2098459 - DNA, 25 bp, Homo sapien
tcaggtggcaaaattcgtatttccc

SEQ ID NO: 2098460 - DNA, 25 bp, Homo sapien
tttcaggtggcaaaattcgtatttc

SEQ ID NO: 2098461 - DNA, 25 bp, Homo sapien
gtggcaaaattcgtatttcccagta

SEQ ID NO: 2098462 - DNA, 25 bp, Homo sapien
ggaaagagaaggtacaccatcatgt

SEQ ID NO: 2098463 - DNA, 25 bp, Homo sapien
ccatcatgtcggccatctgtctgct

SEQ ID NO: 2098464 - DNA, 25 bp, Homo sapien
catcatgtcggccatctgtctgctt

SEQ ID NO: 2098465 - DNA, 25 bp, Homo sapien
aaggaaagagaaggtacaccatcat

SEQ ID NO: 2098466 - DNA, 25 bp, Homo sapien
ctgaattcattgttgactgccggga

SEQ ID NO: 2098467 - DNA, 25 bp, Homo sapien
ttgactgccgggaaatgtcattgac

SEQ ID NO: 2098468 - DNA, 25 bp, Homo sapien
tcattgttgactgccgggaaatgtc

SEQ ID NO: 2098469 - DNA, 25 bp, Homo sapien
aacagaggagtaaattcaagagatg

SEQ ID NO: 2098470 - DNA, 25 bp, Homo sapien
tttctgtctggtatacaacaaggtg

SEQ ID NO: 2098471 - DNA, 25 bp, Homo sapien
ctctttgtcttaaggtgcaggctgc

SEQ ID NO: 2098472 - DNA, 25 bp, Homo sapien
tggatgctgctctccgataagtgag

SEQ ID NO: 2098473 - DNA, 25 bp, Homo sapien
tgattagctagcacaaggaactttg

SEQ ID NO: 2098474 - DNA, 25 bp, Homo sapien
gaggtggcgctcatcattctgtgcc

SEQ ID NO: 2098475 - DNA, 25 bp, Homo sapien
ttttagaagcctctcagtgttttgc

SEQ ID NO: 2098476 - DNA, 25 bp, Homo sapien
agtttttagaagcctctcagtgttt

SEQ ID NO: 2098477 - DNA, 25 bp, Homo sapien
tttttagaagcctctcagtgttttg

SEQ ID NO: 2098478 - DNA, 25 bp, Homo sapien
atagtttttagaagcctctcagtgt

SEQ ID NO: 2098479 - DNA, 25 bp, Homo sapien
tcttacactgtgagtagctgcgggt

SEQ ID NO: 2098480 - DNA, 25 bp, Homo sapien
accccgacaggcatcttacactgtg

SEQ ID NO: 2098481 - DNA, 25 bp, Homo sapien
ttgaagatcgaaacttgctgcacct

SEQ ID NO: 2098482 - DNA, 25 bp, Homo sapien
gcctcgcagcatccagactgctcta

SEQ ID NO: 2098483 - DNA, 25 bp, Homo sapien
tgcaaaggccaggcccctaaaagct

SEQ ID NO: 2098484 - DNA, 25 bp, Homo sapien
tttgctgtagtagatctggaactgc

SEQ ID NO: 2098485 - DNA, 25 bp, Homo sapien
cttgaacgatgtttgctgtagtaga

SEQ ID NO: 2098486 - DNA, 25 bp, Homo sapien
ctgcaaaggccaggcccctaaaagc

SEQ ID NO: 2098487 - DNA, 25 bp, Homo sapien
tgaggaggcctctgtcgccgccacg

SEQ ID NO: 2098488 - DNA, 25 bp, Homo sapien
tgcgctttcttggtctgagcttcga

SEQ ID NO: 2098489 - DNA, 25 bp, Homo sapien
gctggcatcgttggggaatccacca

SEQ ID NO: 2098490 - DNA, 25 bp, Homo sapien
ctgaggtcgctatgtcaatgtctga

SEQ ID NO: 2098491 - DNA, 25 bp, Homo sapien
tccaagctctcaagttcgatgtctt

SEQ ID NO: 2098492 - DNA, 25 bp, Homo sapien
caagctctcaagttcgatgtcttca

SEQ ID NO: 2098493 - DNA, 25 bp, Homo sapien
aagctctcaagttcgatgtcttcac

SEQ ID NO: 2098494 - DNA, 25 bp, Homo sapien
tcctccaagctctcaagttcgatgt

SEQ ID NO: 2098495 - DNA, 25 bp, Homo sapien
tgatcctcctctaacgaatactgct

SEQ ID NO: 2098496 - DNA, 25 bp, Homo sapien
agcgcctgatcctcctctaacgaat

SEQ ID NO: 2098497 - DNA, 25 bp, Homo sapien
cctcctctaacgaatactgctcatg

SEQ ID NO: 2098498 - DNA, 25 bp, Homo sapien
tctaacgaatactgctcatggttgc

SEQ ID NO: 2098499 - DNA, 25 bp, Homo sapien
cgaggtcggggcagggcagatgtct

SEQ ID NO: 2098500 - DNA, 25 bp, Homo sapien
ccagcgaggtcggggcagggcagat

SEQ ID NO: 2098501 - DNA, 25 bp, Homo sapien
gcgaggtcggggcagggcagatgtc

SEQ ID NO: 2098502 - DNA, 25 bp, Homo sapien
ctgccagcgaggtcggggcagggca

SEQ ID NO: 2098503 - DNA, 25 bp, Homo sapien
tttgtgtgaccactttcaaagttca

SEQ ID NO: 2098504 - DNA, 25 bp, Homo sapien
aacttggcctggaagacattatttg

SEQ ID NO: 2098505 - DNA, 25 bp, Homo sapien
taaagtgtacagtattgacacagcc

SEQ ID NO: 2098506 - DNA, 25 bp, Homo sapien
cagccgacatggtctgcaagacgat

SEQ ID NO: 2098507 - DNA, 25 bp, Homo sapien
gtattgttgaaatatgatgcattaa

SEQ ID NO: 2098508 - DNA, 25 bp, Homo sapien
ctgggccacacacttagtattgttg

SEQ ID NO: 2098509 - DNA, 25 bp, Homo sapien
ggccacacacttagtattgttgaaa

SEQ ID NO: 2098510 - DNA, 25 bp, Homo sapien
gggccacacacttagtattgttgaa

SEQ ID NO: 2098511 - DNA, 25 bp, Homo sapien
tctcttactgtattgagcaccatca

SEQ ID NO: 2098512 - DNA, 25 bp, Homo sapien
atgatctaggccactgcacgccaac

SEQ ID NO: 2098513 - DNA, 25 bp, Homo sapien
gggtgtccagatcttgacatcatga

SEQ ID NO: 2098514 - DNA, 25 bp, Homo sapien
attggtaggtattggcgggattcac

SEQ ID NO: 2098515 - DNA, 25 bp, Homo sapien
gaggaaccaaagcatgtactggtca

SEQ ID NO: 2098516 - DNA, 25 bp, Homo sapien
gacgacctctctgcgtcacgtgacg

SEQ ID NO: 2098517 - DNA, 25 bp, Homo sapien
tactggtcaaacaggctgccatggt

SEQ ID NO: 2098518 - DNA, 25 bp, Homo sapien
ggcatgcactgcactcggtcttgga

SEQ ID NO: 2098519 - DNA, 25 bp, Homo sapien
tgtgtgcggccaagtgtcagtatcg

SEQ ID NO: 2098520 - DNA, 25 bp, Homo sapien
aaggtaaccgttttcagactgtcag

SEQ ID NO: 2098521 - DNA, 25 bp, Homo sapien
tacttaggtggcatgtagctggact

SEQ ID NO: 2098522 - DNA, 25 bp, Homo sapien
ggtcaactgaggaactcgatcttca

SEQ ID NO: 2098523 - DNA, 25 bp, Homo sapien
tggacatccagtacccttatttaat

SEQ ID NO: 2098524 - DNA, 25 bp, Homo sapien
tttattgagcagtaattggacatcc

SEQ ID NO: 2098525 - DNA, 25 bp, Homo sapien
tcagtaagctggcatttataggaca

SEQ ID NO: 2098526 - DNA, 25 bp, Homo sapien
gcaatgtgaggatgtcaaataggat

SEQ ID NO: 2098527 - DNA, 25 bp, Homo sapien
ccctggttgtcatctttcttgatca

SEQ ID NO: 2098528 - DNA, 25 bp, Homo sapien
ggttgtcatctttcttgatcaacat

SEQ ID NO: 2098529 - DNA, 25 bp, Homo sapien
tggttgtcatctttcttgatcaaca

SEQ ID NO: 2098530 - DNA, 25 bp, Homo sapien
cctggttgtcatctttcttgatcaa

SEQ ID NO: 2098531 - DNA, 25 bp, Homo sapien
caccctgttccataacctatcactg

SEQ ID NO: 2098532 - DNA, 25 bp, Homo sapien
ccctgttccataacctatcactgct

SEQ ID NO: 2098533 - DNA, 25 bp, Homo sapien
accctgttccataacctatcactgc

SEQ ID NO: 2098534 - DNA, 25 bp, Homo sapien
acccatgaccattgtggaatccagc

SEQ ID NO: 2098535 - DNA, 25 bp, Homo sapien
tctgtggtcaggcttaattacagaa

SEQ ID NO: 2098536 - DNA, 25 bp, Homo sapien
ccatgaccattgtggaatccagcat

SEQ ID NO: 2098537 - DNA, 25 bp, Homo sapien
ggtcaggcttaattacagaaaagtc

SEQ ID NO: 2098538 - DNA, 25 bp, Homo sapien
aagtgtacgtgacatccgggcatcc

SEQ ID NO: 2098539 - DNA, 25 bp, Homo sapien
taagtcctctcggaagtagatccat

SEQ ID NO: 2098540 - DNA, 25 bp, Homo sapien
cgcagcacaaaggtagggtgcccaa

SEQ ID NO: 2098541 - DNA, 25 bp, Homo sapien
gggtctcttcactggcgaaatgtag

SEQ ID NO: 2098542 - DNA, 25 bp, Homo sapien
cctggcggggcctggatgcctttct

SEQ ID NO: 2098543 - DNA, 25 bp, Homo sapien
caatcgcctcactgcaaggcctcac

SEQ ID NO: 2098544 - DNA, 25 bp, Homo sapien
tctctgctgaccagataccaatcgc

SEQ ID NO: 2098545 - DNA, 25 bp, Homo sapien
agataccaatcgcctcactgcaagg

SEQ ID NO: 2098546 - DNA, 25 bp, Homo sapien
atgctattcagtgtctttgccttac

SEQ ID NO: 2098547 - DNA, 25 bp, Homo sapien
tcaaatgctattcagtgtctttgcc

SEQ ID NO: 2098548 - DNA, 25 bp, Homo sapien
aatgctattcagtgtctttgcctta

SEQ ID NO: 2098549 - DNA, 25 bp, Homo sapien
caaatgctattcagtgtctttgcct

SEQ ID NO: 2098550 - DNA, 25 bp, Homo sapien
gctgacctcaatgcgctagccttag

SEQ ID NO: 2098551 - DNA, 25 bp, Homo sapien
taaattgagggataccttagccgag

SEQ ID NO: 2098552 - DNA, 25 bp, Homo sapien
tatcccagagtatgcagttggaggg

SEQ ID NO: 2098553 - DNA, 25 bp, Homo sapien
tagtagtggtactctgttgggtccc

SEQ ID NO: 2098554 - DNA, 25 bp, Homo sapien
tcaaggaaagaaggtgtgatcctcc

SEQ ID NO: 2098555 - DNA, 25 bp, Homo sapien
tattacctgcatcttactgggactg

SEQ ID NO: 2098556 - DNA, 25 bp, Homo sapien
gactggcaggtccagactctatgga

SEQ ID NO: 2098557 - DNA, 25 bp, Homo sapien
gaacactgttcaaggatcctatgag

SEQ ID NO: 2098558 - DNA, 25 bp, Homo sapien
tcttcttatctatagggcctctggg

SEQ ID NO: 2098559 - DNA, 25 bp, Homo sapien
tgggtgtttcgacagcagatgacct

SEQ ID NO: 2098560 - DNA, 25 bp, Homo sapien
tacagcaggtaatgcaccaacatag

SEQ ID NO: 2098561 - DNA, 25 bp, Homo sapien
ggtgatggctagagctatcccaggc

SEQ ID NO: 2098562 - DNA, 25 bp, Homo sapien
gctctccatagatgacgtgctcctg

SEQ ID NO: 2098563 - DNA, 25 bp, Homo sapien
aattcccctggctgaagatcgcact

SEQ ID NO: 2098564 - DNA, 25 bp, Homo sapien
caactccaggtgatcagaagctctc

SEQ ID NO: 2098565 - DNA, 25 bp, Homo sapien
gggatccacttctctcacgtcaagg

SEQ ID NO: 2098566 - DNA, 25 bp, Homo sapien
ctggacgtggccttggaacgtgcac

SEQ ID NO: 2098567 - DNA, 25 bp, Homo sapien
gctgctggacgtggccttggaacgt

SEQ ID NO: 2098568 - DNA, 25 bp, Homo sapien
aggctgctggacgtggccttggaac

SEQ ID NO: 2098569 - DNA, 25 bp, Homo sapien
aggcaaggctgctggacgtggcctt

SEQ ID NO: 2098570 - DNA, 25 bp, Homo sapien
ctgtactcctagctgcttgaaaggc

SEQ ID NO: 2098571 - DNA, 25 bp, Homo sapien
agttctaggctatactgagttatga

SEQ ID NO: 2098572 - DNA, 25 bp, Homo sapien
actgtactcctagctgcttgaaagg

SEQ ID NO: 2098573 - DNA, 25 bp, Homo sapien
aggagttctaggctatactgagtta

SEQ ID NO: 2098574 - DNA, 25 bp, Homo sapien
cagccaaaaaggcaggtgatcccgt

SEQ ID NO: 2098575 - DNA, 25 bp, Homo sapien
agccaaaaaggcaggtgatcccgtg

SEQ ID NO: 2098576 - DNA, 25 bp, Homo sapien
gccaaaaaggcaggtgatcccgtga

SEQ ID NO: 2098577 - DNA, 25 bp, Homo sapien
ccaaaaaggcaggtgatcccgtgac

SEQ ID NO: 2098578 - DNA, 25 bp, Homo sapien
tggatgccccatcaagtgaactctg

SEQ ID NO: 2098579 - DNA, 25 bp, Homo sapien
tgacggcgtttttccctggcacgga

SEQ ID NO: 2098580 - DNA, 25 bp, Homo sapien
cagtggcttctagatcttgtgtgca

SEQ ID NO: 2098581 - DNA, 25 bp, Homo sapien
catttggtcgttgactccttcggga

SEQ ID NO: 2098582 - DNA, 25 bp, Homo sapien
ggcactaacgcgagccttggctgca

SEQ ID NO: 2098583 - DNA, 25 bp, Homo sapien
ttggaacgtgcaccggctgtggcac

SEQ ID NO: 2098584 - DNA, 25 bp, Homo sapien
tgtgaagataatacccaggacagtc

SEQ ID NO: 2098585 - DNA, 25 bp, Homo sapien
gacttcctcctcagcgacacaattg

SEQ ID NO: 2098586 - DNA, 25 bp, Homo sapien
tactgcagttgggaggacttgctgg

SEQ ID NO: 2098587 - DNA, 25 bp, Homo sapien
ttactgcagttgggaggacttgctg

SEQ ID NO: 2098588 - DNA, 25 bp, Homo sapien
actgcagttgggaggacttgctgga

SEQ ID NO: 2098589 - DNA, 25 bp, Homo sapien
ctgcagttgggaggacttgctggac

SEQ ID NO: 2098590 - DNA, 25 bp, Homo sapien
catattattcactgtgttgtctcca

SEQ ID NO: 2098591 - DNA, 25 bp, Homo sapien
ggagagtttcccaattagacttata

SEQ ID NO: 2098592 - DNA, 25 bp, Homo sapien
cgtgtttcgatcactaaataaatgg

SEQ ID NO: 2098593 - DNA, 25 bp, Homo sapien
ggaaatgcctaatttactaccatgc

SEQ ID NO: 2098594 - DNA, 25 bp, Homo sapien
gaactttctctagttggaggcagaa

SEQ ID NO: 2098595 - DNA, 25 bp, Homo sapien
tacactaggttattcaggaaagtcc

SEQ ID NO: 2098596 - DNA, 25 bp, Homo sapien
gacacgagaatttacaggcagagaa

SEQ ID NO: 2098597 - DNA, 25 bp, Homo sapien
ggaaagtccgatatcatgacacgag

SEQ ID NO: 2098598 - DNA, 25 bp, Homo sapien
ccctcgtttccagaaggcgaagtga

SEQ ID NO: 2098599 - DNA, 25 bp, Homo sapien
accctcgtttccagaaggcgaagtg

SEQ ID NO: 2098600 - DNA, 25 bp, Homo sapien
caccctcgtttccagaaggcgaagt

SEQ ID NO: 2098601 - DNA, 25 bp, Homo sapien
agtggcttgagcacccatcagaggc

SEQ ID NO: 2098602 - DNA, 25 bp, Homo sapien
tagacagttagacacgtgagctctg

SEQ ID NO: 2098603 - DNA, 25 bp, Homo sapien
cgaagcttactctttgaccccgagg

SEQ ID NO: 2098604 - DNA, 25 bp, Homo sapien
gatcttacatacgaaacagctgcgg

SEQ ID NO: 2098605 - DNA, 25 bp, Homo sapien
tctcctgggaatttggactatatct

SEQ ID NO: 2098606 - DNA, 25 bp, Homo sapien
atctcctgggaatttggactatatc

SEQ ID NO: 2098607 - DNA, 25 bp, Homo sapien
agcatagctgcctttataataagct

SEQ ID NO: 2098608 - DNA, 25 bp, Homo sapien
gctgcctttataataagctctttca

SEQ ID NO: 2098609 - DNA, 25 bp, Homo sapien
ggtggtttctacatgagctcgtgga

SEQ ID NO: 2098610 - DNA, 25 bp, Homo sapien
gacagtattgtggatcttcgctaaa

SEQ ID NO: 2098611 - DNA, 25 bp, Homo sapien
agtcctgggcacacgtctgtcatca

SEQ ID NO: 2098612 - DNA, 25 bp, Homo sapien
tcgtggaccccatagaaattgatgg

SEQ ID NO: 2098613 - DNA, 25 bp, Homo sapien
gcattggccacagccctaatgtgag

SEQ ID NO: 2098614 - DNA, 25 bp, Homo sapien
tctgctaaatatggccttggaacgt

SEQ ID NO: 2098615 - DNA, 25 bp, Homo sapien
atgtgagcccttgctgcaagtctga

SEQ ID NO: 2098616 - DNA, 25 bp, Homo sapien
gtgggagaatctgctaaatatggcc

SEQ ID NO: 2098617 - DNA, 25 bp, Homo sapien
cagataagcaggtacgtaacgttca

SEQ ID NO: 2098618 - DNA, 25 bp, Homo sapien
cccagaacagataagcaggtacgta

SEQ ID NO: 2098619 - DNA, 25 bp, Homo sapien
taacgttcactgcttaagtaaacaa

SEQ ID NO: 2098620 - DNA, 25 bp, Homo sapien
caagctgagtgatgtggcaaacaga

SEQ ID NO: 2098621 - DNA, 25 bp, Homo sapien
agcttcagatcaaagtcttcacttc

SEQ ID NO: 2098622 - DNA, 25 bp, Homo sapien
ctggccgcgtttgtcacgggtacac

SEQ ID NO: 2098623 - DNA, 25 bp, Homo sapien
gccgcgtttgtcacgggtacacagc

SEQ ID NO: 2098624 - DNA, 25 bp, Homo sapien
tggccgcgtttgtcacgggtacaca

SEQ ID NO: 2098625 - DNA, 25 bp, Homo sapien
ccgcgtttgtcacgggtacacagct

SEQ ID NO: 2098626 - DNA, 25 bp, Homo sapien
ttaacaccataaagaggacaggagg

SEQ ID NO: 2098627 - DNA, 25 bp, Homo sapien
gattaacaccataaagaggacagga

SEQ ID NO: 2098628 - DNA, 25 bp, Homo sapien
taacaccataaagaggacaggagga

SEQ ID NO: 2098629 - DNA, 25 bp, Homo sapien
gagattaacaccataaagaggacag

SEQ ID NO: 2098630 - DNA, 25 bp, Homo sapien
ggctccttcatgttgtacttgcgca

SEQ ID NO: 2098631 - DNA, 25 bp, Homo sapien
cttgaggatctcatggaagtgtgcc

SEQ ID NO: 2098632 - DNA, 25 bp, Homo sapien
gccttgcctcacaggtgcgattcaa

SEQ ID NO: 2098633 - DNA, 25 bp, Homo sapien
tagtgcctggttggatggacttcct

SEQ ID NO: 2098634 - DNA, 25 bp, Homo sapien
tttctggcatctattcccattacat

SEQ ID NO: 2098635 - DNA, 25 bp, Homo sapien
tccccatagaaatagtggttctttc

SEQ ID NO: 2098636 - DNA, 25 bp, Homo sapien
ctggcatctattcccattacattaa

SEQ ID NO: 2098637 - DNA, 25 bp, Homo sapien
ctccccatagaaatagtggttcttt

SEQ ID NO: 2098638 - DNA, 25 bp, Homo sapien
actggccctggcactagtaggaagc

SEQ ID NO: 2098639 - DNA, 25 bp, Homo sapien
tgggaccccgcagaaattcataccg

SEQ ID NO: 2098640 - DNA, 25 bp, Homo sapien
gatcactgttgagtacctgccggtg

SEQ ID NO: 2098641 - DNA, 25 bp, Homo sapien
gcatagctgcaaatctgcctcggac

SEQ ID NO: 2098642 - DNA, 25 bp, Homo sapien
gacttctctaggggtgaagctgctg

SEQ ID NO: 2098643 - DNA, 25 bp, Homo sapien
agacttctctaggggtgaagctgct

SEQ ID NO: 2098644 - DNA, 25 bp, Homo sapien
tcagacttctctaggggtgaagctg

SEQ ID NO: 2098645 - DNA, 25 bp, Homo sapien
cagacttctctaggggtgaagctgc

SEQ ID NO: 2098646 - DNA, 25 bp, Homo sapien
catatctaaaggtcccgcccgaggt

SEQ ID NO: 2098647 - DNA, 25 bp, Homo sapien
tctccatatctaaaggtcccgcccg

SEQ ID NO: 2098648 - DNA, 25 bp, Homo sapien
tccatatctaaaggtcccgcccgag

SEQ ID NO: 2098649 - DNA, 25 bp, Homo sapien
ctctccatatctaaaggtcccgccc

SEQ ID NO: 2098650 - DNA, 25 bp, Homo sapien
agagagcgcggtaatcccggtcccg

SEQ ID NO: 2098651 - DNA, 25 bp, Homo sapien
cgcggacagctaatggcggtgccca

SEQ ID NO: 2098652 - DNA, 25 bp, Homo sapien
tgcccacgtcgcagagagcgcggta

SEQ ID NO: 2098653 - DNA, 25 bp, Homo sapien
agaagacgcgcggacagctaatggc

SEQ ID NO: 2098654 - DNA, 25 bp, Homo sapien
acgtgctccaccagcccgaagcccc

SEQ ID NO: 2098655 - DNA, 25 bp, Homo sapien
tatcggattgattgaggatgctgtc

SEQ ID NO: 2098656 - DNA, 25 bp, Homo sapien
gattgaggatgctgtcctgtcccag

SEQ ID NO: 2098657 - DNA, 25 bp, Homo sapien
gtcctgtcccagcacgtgctccacc

SEQ ID NO: 2098658 - DNA, 25 bp, Homo sapien
tcagaaccttcactccctgggcaat

SEQ ID NO: 2098659 - DNA, 25 bp, Homo sapien
agagcttcggagaccagcccttggg

SEQ ID NO: 2098660 - DNA, 25 bp, Homo sapien
tccctgggcaatggcaagagcttcg

SEQ ID NO: 2098661 - DNA, 25 bp, Homo sapien
cagagtcagaggcactgggtggaaa

SEQ ID NO: 2098662 - DNA, 25 bp, Homo sapien
gcctacgacagtataataactaccc

SEQ ID NO: 2098663 - DNA, 25 bp, Homo sapien
tatagttatattcgtaatgaaggcc

SEQ ID NO: 2098664 - DNA, 25 bp, Homo sapien
atgtagtctgggctgcaataactta

SEQ ID NO: 2098665 - DNA, 25 bp, Homo sapien
gtctgggctgcaataacttatagtt

SEQ ID NO: 2098666 - DNA, 25 bp, Homo sapien
gatagcctaatcatacagacacacc

SEQ ID NO: 2098667 - DNA, 25 bp, Homo sapien
gccaattagcaaacacagatagcct

SEQ ID NO: 2098668 - DNA, 25 bp, Homo sapien
gatcagttattgcacctataccagg

SEQ ID NO: 2098669 - DNA, 25 bp, Homo sapien
gaacctgtgagccatccctttgaaa

SEQ ID NO: 2098670 - DNA, 25 bp, Homo sapien
tgatgatctaaagagtcattcatgt

SEQ ID NO: 2098671 - DNA, 25 bp, Homo sapien
ttggtccagttgatgatgatctaaa

SEQ ID NO: 2098672 - DNA, 25 bp, Homo sapien
tgatctaaagagtcattcatgtatt

SEQ ID NO: 2098673 - DNA, 25 bp, Homo sapien
aaattggtccagttgatgatgatct

SEQ ID NO: 2098674 - DNA, 25 bp, Homo sapien
ttaattctggtgtagctctgcatcg

SEQ ID NO: 2098675 - DNA, 25 bp, Homo sapien
gtccaattggcctattacaatagaa

SEQ ID NO: 2098676 - DNA, 25 bp, Homo sapien
tatgaatgtcgatcactgaagtttg

SEQ ID NO: 2098677 - DNA, 25 bp, Homo sapien
gctctgcatcgtcttcaatgacaag

SEQ ID NO: 2098678 - DNA, 25 bp, Homo sapien
cacgacattggcaagtggtttgaga

SEQ ID NO: 2098679 - DNA, 25 bp, Homo sapien
tactccgtggagatatgcgctttca

SEQ ID NO: 2098680 - DNA, 25 bp, Homo sapien
agattgatgacacaaaactgctcca

SEQ ID NO: 2098681 - DNA, 25 bp, Homo sapien
gatttggcattgtatgctcttctcc

SEQ ID NO: 2098682 - DNA, 25 bp, Homo sapien
gacagcaccacttatatatttgcca

SEQ ID NO: 2098683 - DNA, 25 bp, Homo sapien
atatttgccatcatatgttactata

SEQ ID NO: 2098684 - DNA, 25 bp, Homo sapien
atggacagcaccacttatatatttg

SEQ ID NO: 2098685 - DNA, 25 bp, Homo sapien
tatatttgccatcatatgttactat

SEQ ID NO: 2098686 - DNA, 25 bp, Homo sapien
ctagatgggagaaatctctctggac

SEQ ID NO: 2098687 - DNA, 25 bp, Homo sapien
tagatgggagaaatctctctggact

SEQ ID NO: 2098688 - DNA, 25 bp, Homo sapien
ttcttcactagctacttggacacta

SEQ ID NO: 2098689 - DNA, 25 bp, Homo sapien
cagtttggctttcttcactagctac

SEQ ID NO: 2098690 - DNA, 25 bp, Homo sapien
tactatggaattagggacctgttgg

SEQ ID NO: 2098691 - DNA, 25 bp, Homo sapien
aaatgtagggttggggtatctctgc

SEQ ID NO: 2098692 - DNA, 25 bp, Homo sapien
ccagagtgcttgtgtgtcgggaaaa

SEQ ID NO: 2098693 - DNA, 25 bp, Homo sapien
tgtcgggaaaacttcaggccaccag

SEQ ID NO: 2098694 - DNA, 25 bp, Homo sapien
ggaccttttcggagaccagactgcc

SEQ ID NO: 2098695 - DNA, 25 bp, Homo sapien
ccccatggaccttttcggagaccag

SEQ ID NO: 2098696 - DNA, 25 bp, Homo sapien
gtgagaccttatgggcactagatcc

SEQ ID NO: 2098697 - DNA, 25 bp, Homo sapien
acacattagattccagtgagacctt

SEQ ID NO: 2098698 - DNA, 25 bp, Homo sapien
tctagacatgtgttggacagtgcgc

SEQ ID NO: 2098699 - DNA, 25 bp, Homo sapien
gaatctgttgggcactgagtacacc

SEQ ID NO: 2098700 - DNA, 25 bp, Homo sapien
acagtgcgctggtaccctggagaac

SEQ ID NO: 2098701 - DNA, 25 bp, Homo sapien
gcaactgcgatagcttttggaccac

SEQ ID NO: 2098702 - DNA, 25 bp, Homo sapien
cccatctgtaatggcaactggaact

SEQ ID NO: 2098703 - DNA, 25 bp, Homo sapien
catctgtaatggcaactggaactct

SEQ ID NO: 2098704 - DNA, 25 bp, Homo sapien
taatggcaactggaactctttggtc

SEQ ID NO: 2098705 - DNA, 25 bp, Homo sapien
caactggaactctttggtcactgac

SEQ ID NO: 2098706 - DNA, 25 bp, Homo sapien
tcgggttctttagctacctgccggc

SEQ ID NO: 2098707 - DNA, 25 bp, Homo sapien
cctcgggttctttagctacctgccg

SEQ ID NO: 2098708 - DNA, 25 bp, Homo sapien
ctcgggttctttagctacctgccgg

SEQ ID NO: 2098709 - DNA, 25 bp, Homo sapien
acttggggaagtttctggtcacaag

SEQ ID NO: 2098710 - DNA, 25 bp, Homo sapien
cttcatcacggtggtgacttgggga

SEQ ID NO: 2098711 - DNA, 25 bp, Homo sapien
ggaagtttctggtcacaaggctcac

SEQ ID NO: 2098712 - DNA, 25 bp, Homo sapien
ggggaagtttctggtcacaaggctc

SEQ ID NO: 2098713 - DNA, 25 bp, Homo sapien
ttgagactcttaactgacacgtggc

SEQ ID NO: 2098714 - DNA, 25 bp, Homo sapien
ccggatgcctttttggtgacaagac

SEQ ID NO: 2098715 - DNA, 25 bp, Homo sapien
tagggacccttatgggcactagcct

SEQ ID NO: 2098716 - DNA, 25 bp, Homo sapien
ggtgttggcagagcacttccagtct

SEQ ID NO: 2098717 - DNA, 25 bp, Homo sapien
gcctgcatgctagggtactgaaagc

SEQ ID NO: 2098718 - DNA, 25 bp, Homo sapien
tgcctgcatgctagggtactgaaag

SEQ ID NO: 2098719 - DNA, 25 bp, Homo sapien
gttgcctgcatgctagggtactgaa

SEQ ID NO: 2098720 - DNA, 25 bp, Homo sapien
aggttgcctgcatgctagggtactg

SEQ ID NO: 2098721 - DNA, 25 bp, Homo sapien
cacaagtcattgagcgtgcttggga

SEQ ID NO: 2098722 - DNA, 25 bp, Homo sapien
tccctcattaggatttcgggactcc

SEQ ID NO: 2098723 - DNA, 25 bp, Homo sapien
taggatttcgggactccttcctgtc

SEQ ID NO: 2098724 - DNA, 25 bp, Homo sapien
ttgagcgtgcttgggaaggttcttt

SEQ ID NO: 2098725 - DNA, 25 bp, Homo sapien
accgcaggatccttttggacatatg

SEQ ID NO: 2098726 - DNA, 25 bp, Homo sapien
ctttttgcgtctagactgactgtga

SEQ ID NO: 2098727 - DNA, 25 bp, Homo sapien
agaggacttcgggacaccatctgcc

SEQ ID NO: 2098728 - DNA, 25 bp, Homo sapien
ccttttggacatatgccagctcctt

SEQ ID NO: 2098729 - DNA, 25 bp, Homo sapien
cctgctgtcgcgtatcctgtgtctc

SEQ ID NO: 2098730 - DNA, 25 bp, Homo sapien
tagattcctgctgtcgcgtatcctg

SEQ ID NO: 2098731 - DNA, 25 bp, Homo sapien
ctgtcgcgtatcctgtgtctctggg

SEQ ID NO: 2098732 - DNA, 25 bp, Homo sapien
ttttagattcctgctgtcgcgtatc

SEQ ID NO: 2098733 - DNA, 25 bp, Homo sapien
ccactggacgttgtgtccatcccca

SEQ ID NO: 2098734 - DNA, 25 bp, Homo sapien
ccagagcccactggacgttgtgtcc

SEQ ID NO: 2098735 - DNA, 25 bp, Homo sapien
cagagcccactggacgttgtgtcca

SEQ ID NO: 2098736 - DNA, 25 bp, Homo sapien
agcccactggacgttgtgtccatcc

SEQ ID NO: 2098737 - DNA, 25 bp, Homo sapien
tgtagaaacctgtgcaagttcggtg

SEQ ID NO: 2098738 - DNA, 25 bp, Homo sapien
tgaaagtacagacctcacactggga

SEQ ID NO: 2098739 - DNA, 25 bp, Homo sapien
ggactttgcgatcagaaattggagc

SEQ ID NO: 2098740 - DNA, 25 bp, Homo sapien
cagtgtgggcgctcagaggaacctt

SEQ ID NO: 2098741 - DNA, 25 bp, Homo sapien
tcgtatctgagagcacttccggaca

SEQ ID NO: 2098742 - DNA, 25 bp, Homo sapien
ctgccacttcagtcgtatctgagag

SEQ ID NO: 2098743 - DNA, 25 bp, Homo sapien
tctgagagcacttccggacactttc

SEQ ID NO: 2098744 - DNA, 25 bp, Homo sapien
cacttcagtcgtatctgagagcact

SEQ ID NO: 2098745 - DNA, 25 bp, Homo sapien
cagaactagcccgtttggcctgggt

SEQ ID NO: 2098746 - DNA, 25 bp, Homo sapien
gtttggcctgggtccatctcacgct

SEQ ID NO: 2098747 - DNA, 25 bp, Homo sapien
tctcacgctcagaatccaggactct

SEQ ID NO: 2098748 - DNA, 25 bp, Homo sapien
gagctatcagcagaactagcccgtt

SEQ ID NO: 2098749 - DNA, 25 bp, Homo sapien
aactggtgtagcgaaggccttggaa

SEQ ID NO: 2098750 - DNA, 25 bp, Homo sapien
ccagcatgaccaagaactggtgtag

SEQ ID NO: 2098751 - DNA, 25 bp, Homo sapien
cagatgccgacccagatccttaggg

SEQ ID NO: 2098752 - DNA, 25 bp, Homo sapien
tccagatgccgacccagatccttag

SEQ ID NO: 2098753 - DNA, 25 bp, Homo sapien
tggaaattttagggtgatgtacacc

SEQ ID NO: 2098754 - DNA, 25 bp, Homo sapien
gggtgatgtacacctcaatgtgttc

SEQ ID NO: 2098755 - DNA, 25 bp, Homo sapien
gaaattttagggtgatgtacacctc

SEQ ID NO: 2098756 - DNA, 25 bp, Homo sapien
ttttagggtgatgtacacctcaatg

SEQ ID NO: 2098757 - DNA, 25 bp, Homo sapien
aattatctgagctaccagacctgca

SEQ ID NO: 2098758 - DNA, 25 bp, Homo sapien
tcaattatctgagctaccagacctg

SEQ ID NO: 2098759 - DNA, 25 bp, Homo sapien
aatcaattatctgagctaccagacc

SEQ ID NO: 2098760 - DNA, 25 bp, Homo sapien
tatctgagctaccagacctgcagac

SEQ ID NO: 2098761 - DNA, 25 bp, Homo sapien
ttggagatgctcatatcctgacacc

SEQ ID NO: 2098762 - DNA, 25 bp, Homo sapien
accatgtgctgcctcggatccaaca

SEQ ID NO: 2098763 - DNA, 25 bp, Homo sapien
tgcctcggatccaacagttctgctg

SEQ ID NO: 2098764 - DNA, 25 bp, Homo sapien
catatcctgacaccatgtgctgcct

SEQ ID NO: 2098765 - DNA, 25 bp, Homo sapien
ctaaaataggtaatgtgggcagccc

SEQ ID NO: 2098766 - DNA, 25 bp, Homo sapien
tgggcagcccttccattctgaaatt

SEQ ID NO: 2098767 - DNA, 25 bp, Homo sapien
tctaattgtgtcttcattgtcatca

SEQ ID NO: 2098768 - DNA, 25 bp, Homo sapien
gtcatcaaatccatcaccctccacc

SEQ ID NO: 2098769 - DNA, 25 bp, Homo sapien
cccttcatctagattttcaatattc

SEQ ID NO: 2098770 - DNA, 25 bp, Homo sapien
agcgctatagctactcatttcttgg

SEQ ID NO: 2098771 - DNA, 25 bp, Homo sapien
tgccaaaccagattatgattacttt

SEQ ID NO: 2098772 - DNA, 25 bp, Homo sapien
ttcaatattcatatgccaaaccaga

SEQ ID NO: 2098773 - DNA, 25 bp, Homo sapien
ccagcaagggaacataacttgttag

SEQ ID NO: 2098774 - DNA, 25 bp, Homo sapien
atttcatagagtgttactgaagaga

SEQ ID NO: 2098775 - DNA, 25 bp, Homo sapien
catttcatagagtgttactgaagag

SEQ ID NO: 2098776 - DNA, 25 bp, Homo sapien
aacatttcatagagtgttactgaag

SEQ ID NO: 2098777 - DNA, 25 bp, Homo sapien
agtggacaccagaatgtttactgcc

SEQ ID NO: 2098778 - DNA, 25 bp, Homo sapien
caccagaatgtttactgccattgtc

SEQ ID NO: 2098779 - DNA, 25 bp, Homo sapien
tctgcttagagtggacaccagaatg

SEQ ID NO: 2098780 - DNA, 25 bp, Homo sapien
tagagtggacaccagaatgtttact

SEQ ID NO: 2098781 - DNA, 25 bp, Homo sapien
ggctttcacaacaacccttgagatt

SEQ ID NO: 2098782 - DNA, 25 bp, Homo sapien
tcatcatgcaggaaagtgtgcaatt

SEQ ID NO: 2098783 - DNA, 25 bp, Homo sapien
ccttggctttcacaacaacccttga

SEQ ID NO: 2098784 - DNA, 25 bp, Homo sapien
gcaggaaagtgtgcaattcttcatt

SEQ ID NO: 2098785 - DNA, 25 bp, Homo sapien
ttggcactgggtaagacactgagat

SEQ ID NO: 2098786 - DNA, 25 bp, Homo sapien
cagaaagctatagtcaagaagcaaa

SEQ ID NO: 2098787 - DNA, 25 bp, Homo sapien
gcttcttggcactgggtaagacact

SEQ ID NO: 2098788 - DNA, 25 bp, Homo sapien
catttccctattctggcatctgcag

SEQ ID NO: 2098789 - DNA, 25 bp, Homo sapien
cattcaaatatactccactcattcc

SEQ ID NO: 2098790 - DNA, 25 bp, Homo sapien
ttgccttgttgtttcctcgtatcca

SEQ ID NO: 2098791 - DNA, 25 bp, Homo sapien
tcaaatatactccactcattccaaa

SEQ ID NO: 2098792 - DNA, 25 bp, Homo sapien
tgccttgttgtttcctcgtatccat

SEQ ID NO: 2098793 - DNA, 25 bp, Homo sapien
gtgggggccaatattcaacattctt

SEQ ID NO: 2098794 - DNA, 25 bp, Homo sapien
cagaaactctacaagccagaagaga

SEQ ID NO: 2098795 - DNA, 25 bp, Homo sapien
gcccatcgactaacagctgatttct

SEQ ID NO: 2098796 - DNA, 25 bp, Homo sapien
catcgactaacagctgatttctcgg

SEQ ID NO: 2098797 - DNA, 25 bp, Homo sapien
cttctgtgtcacatctgtatctcat

SEQ ID NO: 2098798 - DNA, 25 bp, Homo sapien
gggtttgtgaaggtacatttcagaa

SEQ ID NO: 2098799 - DNA, 25 bp, Homo sapien
gtttgtgaaggtacatttcagaaga

SEQ ID NO: 2098800 - DNA, 25 bp, Homo sapien
tgtgaaggtacatttcagaagattt

SEQ ID NO: 2098801 - DNA, 25 bp, Homo sapien
tgaaatctcccaaggggtttgtgaa

SEQ ID NO: 2098802 - DNA, 25 bp, Homo sapien
gcctattaggaacggtgttccatgg

SEQ ID NO: 2098803 - DNA, 25 bp, Homo sapien
taatcgttttaatggcctattagga

SEQ ID NO: 2098804 - DNA, 25 bp, Homo sapien
cctattaggaacggtgttccatggc

SEQ ID NO: 2098805 - DNA, 25 bp, Homo sapien
tcttgacccaagtttagtgttttca

SEQ ID NO: 2098806 - DNA, 25 bp, Homo sapien
tgatcaaatctcttgacccaagttt

SEQ ID NO: 2098807 - DNA, 25 bp, Homo sapien
caaatctcttgacccaagtttagtg

SEQ ID NO: 2098808 - DNA, 25 bp, Homo sapien
aatctcttgacccaagtttagtgtt

SEQ ID NO: 2098809 - DNA, 25 bp, Homo sapien
cacctcgccaactctgaacttccag

SEQ ID NO: 2098810 - DNA, 25 bp, Homo sapien
tccacctcgccaactctgaacttcc

SEQ ID NO: 2098811 - DNA, 25 bp, Homo sapien
cttccacctcgccaactctgaactt

SEQ ID NO: 2098812 - DNA, 25 bp, Homo sapien
ttccacctcgccaactctgaacttc

SEQ ID NO: 2098813 - DNA, 25 bp, Homo sapien
tgtagcgagctcatggactttttgg

SEQ ID NO: 2098814 - DNA, 25 bp, Homo sapien
aaccggttcctaagtgtagcgagct

SEQ ID NO: 2098815 - DNA, 25 bp, Homo sapien
agatgtatgaaaaccggttcctaag

SEQ ID NO: 2098816 - DNA, 25 bp, Homo sapien
cctaagtgtagcgagctcatggact

SEQ ID NO: 2098817 - DNA, 25 bp, Homo sapien
acagtagctcggtacatttttgaac

SEQ ID NO: 2098818 - DNA, 25 bp, Homo sapien
cacagtagctcggtacatttttgaa

SEQ ID NO: 2098819 - DNA, 25 bp, Homo sapien
agcacagtagctcggtacatttttg

SEQ ID NO: 2098820 - DNA, 25 bp, Homo sapien
attagcacagtagctcggtacattt

SEQ ID NO: 2098821 - DNA, 25 bp, Homo sapien
cagcaagagacacgatgtttcttca

SEQ ID NO: 2098822 - DNA, 25 bp, Homo sapien
caagagacacgatgtttcttcagag

SEQ ID NO: 2098823 - DNA, 25 bp, Homo sapien
tcctttttcctgacctgggtcacga

SEQ ID NO: 2098824 - DNA, 25 bp, Homo sapien
ggtcacgaacacaaatagattttgg

SEQ ID NO: 2098825 - DNA, 25 bp, Homo sapien
caaaagggcccagcgatattctgtg

SEQ ID NO: 2098826 - DNA, 25 bp, Homo sapien
gatcaacactgagttggataagttg

SEQ ID NO: 2098827 - DNA, 25 bp, Homo sapien
tgggaagctagccaacaaaagggcc

SEQ ID NO: 2098828 - DNA, 25 bp, Homo sapien
caacctccaatcctctgtcaatggg

SEQ ID NO: 2098829 - DNA, 25 bp, Homo sapien
tggacttttgatcaaaaagggctgc

SEQ ID NO: 2098830 - DNA, 25 bp, Homo sapien
accctgtgggtaggactgattactg

SEQ ID NO: 2098831 - DNA, 25 bp, Homo sapien
ttttggcggctgaatcctgctatgc

SEQ ID NO: 2098832 - DNA, 25 bp, Homo sapien
gatctgaccgtatgaaccctgtggg

SEQ ID NO: 2098833 - DNA, 25 bp, Homo sapien
cactgagctttactaacattgaact

SEQ ID NO: 2098834 - DNA, 25 bp, Homo sapien
ccaatggttatgagttcagagacat

SEQ ID NO: 2098835 - DNA, 25 bp, Homo sapien
aaaaagttaagcatggtagaagaga

SEQ ID NO: 2098836 - DNA, 25 bp, Homo sapien
aaattgtgcgcatgtttttgcagaa

SEQ ID NO: 2098837 - DNA, 25 bp, Homo sapien
taaaatttccagatccgggatgcag

SEQ ID NO: 2098838 - DNA, 25 bp, Homo sapien
acacaacccctgctgtttgggaagg

SEQ ID NO: 2098839 - DNA, 25 bp, Homo sapien
aaagccgataagtgagaagtctgcg

SEQ ID NO: 2098840 - DNA, 25 bp, Homo sapien
gatacaatccaggtgcagagcagga

SEQ ID NO: 2098841 - DNA, 25 bp, Homo sapien
gatgcagcaatcattcaagtcaccc

SEQ ID NO: 2098842 - DNA, 25 bp, Homo sapien
cagttattccattcagtgccaataa

SEQ ID NO: 2098843 - DNA, 25 bp, Homo sapien
cagtgccaataacggccacatcaca

SEQ ID NO: 2098844 - DNA, 25 bp, Homo sapien
cacagccatcaatgcgatgcagcaa

SEQ ID NO: 2098845 - DNA, 25 bp, Homo sapien
caacctagagaacaattaacgatga

SEQ ID NO: 2098846 - DNA, 25 bp, Homo sapien
taacgatgattatcaccttaaagtt

SEQ ID NO: 2098847 - DNA, 25 bp, Homo sapien
tagcccagggcgcttaataatctcc

SEQ ID NO: 2098848 - DNA, 25 bp, Homo sapien
ggcgcttaataatctccagtaacca

SEQ ID NO: 2098849 - DNA, 25 bp, Homo sapien
tttaaagcaagctaggtgctggtag

SEQ ID NO: 2098850 - DNA, 25 bp, Homo sapien
ttttaaagcaagctaggtgctggta

SEQ ID NO: 2098851 - DNA, 25 bp, Homo sapien
cttttaaagcaagctaggtgctggt

SEQ ID NO: 2098852 - DNA, 25 bp, Homo sapien
ttaaagcaagctaggtgctggtagc

SEQ ID NO: 2098853 - DNA, 25 bp, Homo sapien
tatttaacttgtgttgaaaagccca

SEQ ID NO: 2098854 - DNA, 25 bp, Homo sapien
aagaaaatttctgaggacctaatgc

SEQ ID NO: 2098855 - DNA, 25 bp, Homo sapien
tctgtgccagcctatatttaacttg

SEQ ID NO: 2098856 - DNA, 25 bp, Homo sapien
aatttctgaggacctaatgcttctg

SEQ ID NO: 2098857 - DNA, 25 bp, Homo sapien
gctgttggcttcacagggaaactca

SEQ ID NO: 2098858 - DNA, 25 bp, Homo sapien
caggacaagggcctgttgatggctt

SEQ ID NO: 2098859 - DNA, 25 bp, Homo sapien
gcagtgtctgaccttcaagcttcca

SEQ ID NO: 2098860 - DNA, 25 bp, Homo sapien
aaatctgcaggtgacccctacacgc

SEQ ID NO: 2098861 - DNA, 25 bp, Homo sapien
atgctagattgaacagtcaaggcca

SEQ ID NO: 2098862 - DNA, 25 bp, Homo sapien
tctttaatgctagattgaacagtca

SEQ ID NO: 2098863 - DNA, 25 bp, Homo sapien
ttatctttaatgctagattgaacag

SEQ ID NO: 2098864 - DNA, 25 bp, Homo sapien
taatgctagattgaacagtcaaggc

SEQ ID NO: 2098865 - DNA, 25 bp, Homo sapien
gctgaagaagctcaaccaaggtggc

SEQ ID NO: 2098866 - DNA, 25 bp, Homo sapien
tagacgaatagaaaacctgaattag

SEQ ID NO: 2098867 - DNA, 25 bp, Homo sapien
aacctgaattaggaaagcatgaagg

SEQ ID NO: 2098868 - DNA, 25 bp, Homo sapien
gaaaatatcagttgcagtagacgaa

SEQ ID NO: 2098869 - DNA, 25 bp, Homo sapien
tcagaggattgcagccctagccaaa

SEQ ID NO: 2098870 - DNA, 25 bp, Homo sapien
cctacatttctagtcaagccttcag

SEQ ID NO: 2098871 - DNA, 25 bp, Homo sapien
gagacaccaagtcagagctacccag

SEQ ID NO: 2098872 - DNA, 25 bp, Homo sapien
ctttatggccatcttattagagaca

SEQ ID NO: 2098873 - DNA, 25 bp, Homo sapien
cacaatcagaagagtaggagaagaa

SEQ ID NO: 2098874 - DNA, 25 bp, Homo sapien
ctcagcacaatcagaagagtaggag

SEQ ID NO: 2098875 - DNA, 25 bp, Homo sapien
aatttcaacggccacctgaaatgca

SEQ ID NO: 2098876 - DNA, 25 bp, Homo sapien
tgaaatgcaatttcaacggccacct

SEQ ID NO: 2098877 - DNA, 25 bp, Homo sapien
accagagtgcgcgtgcgtgctccat

SEQ ID NO: 2098878 - DNA, 25 bp, Homo sapien
agagtgtcggtctgagtgatcctgt

SEQ ID NO: 2098879 - DNA, 25 bp, Homo sapien
agtgtaggccagtgcagcgtgggca

SEQ ID NO: 2098880 - DNA, 25 bp, Homo sapien
cgtgggccagtgtaggccagtgcag

SEQ ID NO: 2098881 - DNA, 25 bp, Homo sapien
tagtatgtaacatcgccttccgact

SEQ ID NO: 2098882 - DNA, 25 bp, Homo sapien
caaaggaagcaatccttagtatgta

SEQ ID NO: 2098883 - DNA, 25 bp, Homo sapien
cgccttccgacttctgagggtacca

SEQ ID NO: 2098884 - DNA, 25 bp, Homo sapien
agatttttttcaccgggcatcctgc

SEQ ID NO: 2098885 - DNA, 25 bp, Homo sapien
ggaagacatgggtcaacaagggtca

SEQ ID NO: 2098886 - DNA, 25 bp, Homo sapien
ggtcatggatcacaccctccgagat

SEQ ID NO: 2098887 - DNA, 25 bp, Homo sapien
tgaggatctacattgttgcaggcac

SEQ ID NO: 2098888 - DNA, 25 bp, Homo sapien
tgcaggcactcctaggtgtgaggaa

SEQ ID NO: 2098889 - DNA, 25 bp, Homo sapien
agtcagcagattggatgaggcaagt

SEQ ID NO: 2098890 - DNA, 25 bp, Homo sapien
tttcgtattcatcatgccctccact

SEQ ID NO: 2098891 - DNA, 25 bp, Homo sapien
cagattggatgaggcaagtgacaga

SEQ ID NO: 2098892 - DNA, 25 bp, Homo sapien
atgccctccactgtaattcagctcc

SEQ ID NO: 2098893 - DNA, 25 bp, Homo sapien
tctatctgccacttttctaattcac

SEQ ID NO: 2098894 - DNA, 25 bp, Homo sapien
gtttctatctgccacttttctaatt

SEQ ID NO: 2098895 - DNA, 25 bp, Homo sapien
ctacacagtttctatctgccacttt

SEQ ID NO: 2098896 - DNA, 25 bp, Homo sapien
cacagtttctatctgccacttttct

SEQ ID NO: 2098897 - DNA, 25 bp, Homo sapien
cggagcctcttttggtcacaacctt

SEQ ID NO: 2098898 - DNA, 25 bp, Homo sapien
gagaatcaagtgtggaatcggagct

SEQ ID NO: 2098899 - DNA, 25 bp, Homo sapien
tcaaactctgagtaaaagtagcgta

SEQ ID NO: 2098900 - DNA, 25 bp, Homo sapien
aaaagtagcgtataagagaatcaag

SEQ ID NO: 2098901 - DNA, 25 bp, Homo sapien
tctttctaatatcgttttggtcctg

SEQ ID NO: 2098902 - DNA, 25 bp, Homo sapien
taatatcgttttggtcctgtagcat

SEQ ID NO: 2098903 - DNA, 25 bp, Homo sapien
tctaatatcgttttggtcctgtagc

SEQ ID NO: 2098904 - DNA, 25 bp, Homo sapien
tatctttctaatatcgttttggtcc

SEQ ID NO: 2098905 - DNA, 25 bp, Homo sapien
atctgtgccaactctatataaaatt

SEQ ID NO: 2098906 - DNA, 25 bp, Homo sapien
catactgccttttatccttaactca

SEQ ID NO: 2098907 - DNA, 25 bp, Homo sapien
ggaatactatacttattaacttgga

SEQ ID NO: 2098908 - DNA, 25 bp, Homo sapien
tattaacttggaatattctcctcct

SEQ ID NO: 2098909 - DNA, 25 bp, Homo sapien
cttagtcaacttggaagattcattc

SEQ ID NO: 2098910 - DNA, 25 bp, Homo sapien
gctcctggctgacaattcttgctct

SEQ ID NO: 2098911 - DNA, 25 bp, Homo sapien
tacatggcaaaaggtacgtttccaa

SEQ ID NO: 2098912 - DNA, 25 bp, Homo sapien
gatgataaagaacctcaagaactgt

SEQ ID NO: 2098913 - DNA, 25 bp, Homo sapien
tagaaagatgtctactgcctcatcc

SEQ ID NO: 2098914 - DNA, 25 bp, Homo sapien
tgatcatctatttcaattgagtcta

SEQ ID NO: 2098915 - DNA, 25 bp, Homo sapien
tataacctctcacatctaattgatc

SEQ ID NO: 2098916 - DNA, 25 bp, Homo sapien
tactttgttgaaaggaacacagacg

SEQ ID NO: 2098917 - DNA, 25 bp, Homo sapien
cactgctattactttacgtctggaa

SEQ ID NO: 2098918 - DNA, 25 bp, Homo sapien
ggcttcatcttagtcacaaagacct

SEQ ID NO: 2098919 - DNA, 25 bp, Homo sapien
attctatcctcaatctacatttggg

SEQ ID NO: 2098920 - DNA, 25 bp, Homo sapien
cacccagactgaattttctactaaa

SEQ ID NO: 2098921 - DNA, 25 bp, Homo sapien
cctttaatatgatggatggtatccc

SEQ ID NO: 2098922 - DNA, 25 bp, Homo sapien
tgatcctacatagtttgattgtgtg

SEQ ID NO: 2098923 - DNA, 25 bp, Homo sapien
actgatggactcacaaatgtgtgta

SEQ ID NO: 2098924 - DNA, 25 bp, Homo sapien
caaacaccaggtttgaccatgccat

SEQ ID NO: 2098925 - DNA, 25 bp, Homo sapien
tagagaagacaccacaatgaacaga

SEQ ID NO: 2098926 - DNA, 25 bp, Homo sapien
agtcttttctacagggagtgttaca

SEQ ID NO: 2098927 - DNA, 25 bp, Homo sapien
atcgagtcccttactggtcattctg

SEQ ID NO: 2098928 - DNA, 25 bp, Homo sapien
ccaccctagtcttttctacagggag

SEQ ID NO: 2098929 - DNA, 25 bp, Homo sapien
tgtaaatacgatttttatcgagtcc

SEQ ID NO: 2098930 - DNA, 25 bp, Homo sapien
aacttggcaaagttattcactgtca

SEQ ID NO: 2098931 - DNA, 25 bp, Homo sapien
gcaacatttcccatgcaaggtgtct

SEQ ID NO: 2098932 - DNA, 25 bp, Homo sapien
tgcatagatgtcttaagagaccata

SEQ ID NO: 2098933 - DNA, 25 bp, Homo sapien
ctgtcatcgccttaaggcaacattt

SEQ ID NO: 2098934 - DNA, 25 bp, Homo sapien
caacggagcttccaaacttgctttg

SEQ ID NO: 2098935 - DNA, 25 bp, Homo sapien
cttagaaggtaataacctctcctca

SEQ ID NO: 2098936 - DNA, 25 bp, Homo sapien
taataacctctcctcaattcacagg

SEQ ID NO: 2098937 - DNA, 25 bp, Homo sapien
gtcccaacggagcttccaaacttgc

SEQ ID NO: 2098938 - DNA, 25 bp, Homo sapien
taacagttgcaagacagctaaatgc

SEQ ID NO: 2098939 - DNA, 25 bp, Homo sapien
taattgccttcaacacacttacatg

SEQ ID NO: 2098940 - DNA, 25 bp, Homo sapien
cctctaattaatctgatagcagctg

SEQ ID NO: 2098941 - DNA, 25 bp, Homo sapien
taaggcctgtgctgattaacagttg

SEQ ID NO: 2098942 - DNA, 25 bp, Homo sapien
taggttgcaagtttaatcaggtggc

SEQ ID NO: 2098943 - DNA, 25 bp, Homo sapien
tgtgccctggagtcgagcaaacaag

SEQ ID NO: 2098944 - DNA, 25 bp, Homo sapien
gagaaggactcactaagcagaggtg

SEQ ID NO: 2098945 - DNA, 25 bp, Homo sapien
tctgatgtaacagaggagccttgtg

SEQ ID NO: 2098946 - DNA, 25 bp, Homo sapien
tgagacaatacatagacagtacacc

SEQ ID NO: 2098947 - DNA, 25 bp, Homo sapien
tccctgttctctgctgtaaggtagc

SEQ ID NO: 2098948 - DNA, 25 bp, Homo sapien
tgaaaatccctgtgtgcgtccctgt

SEQ ID NO: 2098949 - DNA, 25 bp, Homo sapien
aaaagttatggattaggttgctcct

SEQ ID NO: 2098950 - DNA, 25 bp, Homo sapien
ttgcttattaaccttggccctgctc

SEQ ID NO: 2098951 - DNA, 25 bp, Homo sapien
aacttggtccgaaatctttgcttat

SEQ ID NO: 2098952 - DNA, 25 bp, Homo sapien
tatttcgacaccaatgatacctaca

SEQ ID NO: 2098953 - DNA, 25 bp, Homo sapien
taacaaacatacattatggctgcct

SEQ ID NO: 2098954 - DNA, 25 bp, Homo sapien
gacttaaagacctgtacccatggag

SEQ ID NO: 2098955 - DNA, 25 bp, Homo sapien
cagagcagtctgagtagagagtcta

SEQ ID NO: 2098956 - DNA, 25 bp, Homo sapien
tgccaactggcatggccaagctagt

SEQ ID NO: 2098957 - DNA, 25 bp, Homo sapien
tcagctaggcatggtcgcgagtgcc

SEQ ID NO: 2098958 - DNA, 25 bp, Homo sapien
ttagggtgagctcagaatcagcagc

SEQ ID NO: 2098959 - DNA, 25 bp, Homo sapien
gatgcctggacctttgctctgatgg

SEQ ID NO: 2098960 - DNA, 25 bp, Homo sapien
ctttgtttgccgagatgggatgcct

SEQ ID NO: 2098961 - DNA, 25 bp, Homo sapien
tcctcagatgtgacagagatatcta

SEQ ID NO: 2098962 - DNA, 25 bp, Homo sapien
tttacagagtgatacattattagac

SEQ ID NO: 2098963 - DNA, 25 bp, Homo sapien
tacattattagactaaagttttgaa

SEQ ID NO: 2098964 - DNA, 25 bp, Homo sapien
atacattattagactaaagttttga

SEQ ID NO: 2098965 - DNA, 25 bp, Homo sapien
gatacaactcattagacagggtcct

SEQ ID NO: 2098966 - DNA, 25 bp, Homo sapien
ccagtacgtggcctattaagacgat

SEQ ID NO: 2098967 - DNA, 25 bp, Homo sapien
aaccaagtcacttcatcatgattga

SEQ ID NO: 2098968 - DNA, 25 bp, Homo sapien
gattgaatccagaaccttactagca

SEQ ID NO: 2098969 - DNA, 25 bp, Homo sapien
tctggacataggaatacaactgtga

SEQ ID NO: 2098970 - DNA, 25 bp, Homo sapien
tcatggctccctagtagcctaaaca

SEQ ID NO: 2098971 - DNA, 25 bp, Homo sapien
caaagtccctgacgattggaagcaa

SEQ ID NO: 2098972 - DNA, 25 bp, Homo sapien
cctccacatggaatcaaaggcaaag

SEQ ID NO: 2098973 - DNA, 25 bp, Homo sapien
catgtttcggcatgtattctttgaa

SEQ ID NO: 2098974 - DNA, 25 bp, Homo sapien
cttttccaggattcatgtttcggca

SEQ ID NO: 2098975 - DNA, 25 bp, Homo sapien
ttcttttccaggattcatgtttcgg

SEQ ID NO: 2098976 - DNA, 25 bp, Homo sapien
ccaggattcatgtttcggcatgtat

SEQ ID NO: 2098977 - DNA, 25 bp, Homo sapien
atggttttaggtatatagccttatt

SEQ ID NO: 2098978 - DNA, 25 bp, Homo sapien
caccgtttattgaataactggggag

SEQ ID NO: 2098979 - DNA, 25 bp, Homo sapien
gatggttttaggtatatagccttat

SEQ ID NO: 2098980 - DNA, 25 bp, Homo sapien
aaaatgtgattggtggagacttagc

SEQ ID NO: 2098981 - DNA, 25 bp, Homo sapien
tagcattatcttggctgtgactttc

SEQ ID NO: 2098982 - DNA, 25 bp, Homo sapien
tagagagagggccaaaggcaagcac

SEQ ID NO: 2098983 - DNA, 25 bp, Homo sapien
ggcaagcacaccacataataaaatg

SEQ ID NO: 2098984 - DNA, 25 bp, Homo sapien
cacacaaacttcgagtctgagacac

SEQ ID NO: 2098985 - DNA, 25 bp, Homo sapien
tcacacaaacttcgagtctgagaca

SEQ ID NO: 2098986 - DNA, 25 bp, Homo sapien
atagcacgcagtattcccaggtggt

SEQ ID NO: 2098987 - DNA, 25 bp, Homo sapien
accaggccgaactctgcttagctta

SEQ ID NO: 2098988 - DNA, 25 bp, Homo sapien
aaagcctatagcacgcagtattccc

SEQ ID NO: 2098989 - DNA, 25 bp, Homo sapien
aaccaggccgaactctgcttagctt

SEQ ID NO: 2098990 - DNA, 25 bp, Homo sapien
tagtgagaaaacacagccatgcatt

SEQ ID NO: 2098991 - DNA, 25 bp, Homo sapien
gaaaacacagccatgcattgattat

SEQ ID NO: 2098992 - DNA, 25 bp, Homo sapien
ccatgtattagtgagaaaacacagc

SEQ ID NO: 2098993 - DNA, 25 bp, Homo sapien
cacagccatgcattgattattgcta

SEQ ID NO: 2098994 - DNA, 25 bp, Homo sapien
tagcctatggatcaaatcaagtctg

SEQ ID NO: 2098995 - DNA, 25 bp, Homo sapien
gtttcacctttgacaaataagcaga

SEQ ID NO: 2098996 - DNA, 25 bp, Homo sapien
taaatctaatggtcaattcctcagt

SEQ ID NO: 2098997 - DNA, 25 bp, Homo sapien
tctggccatgtaagacaaccttgtt

SEQ ID NO: 2098998 - DNA, 25 bp, Homo sapien
tcaagttggctcctagtatgactca

SEQ ID NO: 2098999 - DNA, 25 bp, Homo sapien
actctcatgctatggaaacttctgg

SEQ ID NO: 2099000 - DNA, 25 bp, Homo sapien
agtactaaagcaaggcatcacccca

SEQ ID NO: 2099001 - DNA, 25 bp, Homo sapien
ttctggaggaaaacacataatctga

SEQ ID NO: 2099002 - DNA, 25 bp, Homo sapien
ggaaaacgctagtacctgactacac

SEQ ID NO: 2099003 - DNA, 25 bp, Homo sapien
gaattggctctgcacaaatagtgac

SEQ ID NO: 2099004 - DNA, 25 bp, Homo sapien
taattctattaccattgctggacca

SEQ ID NO: 2099005 - DNA, 25 bp, Homo sapien
aaatgaggagctatctaagtatggg

SEQ ID NO: 2099006 - DNA, 25 bp, Homo sapien
ccatggcagccagccaaaaacagtg

SEQ ID NO: 2099007 - DNA, 25 bp, Homo sapien
acaaagctatatgtgagggacagca

SEQ ID NO: 2099008 - DNA, 25 bp, Homo sapien
ggctgcaacttcgtgtatactccca

SEQ ID NO: 2099009 - DNA, 25 bp, Homo sapien
tgtaggtgagaaatcaaccctgaag

SEQ ID NO: 2099010 - DNA, 25 bp, Homo sapien
tacctggtacaaagtagccactcca

SEQ ID NO: 2099011 - DNA, 25 bp, Homo sapien
tcaagttaaattcgtcactaccagc

SEQ ID NO: 2099012 - DNA, 25 bp, Homo sapien
catatccttggtattaactggctta

SEQ ID NO: 2099013 - DNA, 25 bp, Homo sapien
tgaaagctctatcagggcagagatt

SEQ ID NO: 2099014 - DNA, 25 bp, Homo sapien
gaaatctattgttttatcctaccat

SEQ ID NO: 2099015 - DNA, 25 bp, Homo sapien
ttgttttatcctaccattggcagaa

SEQ ID NO: 2099016 - DNA, 25 bp, Homo sapien
cttttaccaacacaagttgctttca

SEQ ID NO: 2099017 - DNA, 25 bp, Homo sapien
tggtagttttaatcagtcttccacc

SEQ ID NO: 2099018 - DNA, 25 bp, Homo sapien
tacccacttgcagtatgtacatgga

SEQ ID NO: 2099019 - DNA, 25 bp, Homo sapien
taaatcgggctagatgatacgaccc

SEQ ID NO: 2099020 - DNA, 25 bp, Homo sapien
gaagagtctatgctatttcccactg

SEQ ID NO: 2099021 - DNA, 25 bp, Homo sapien
tataagtaatcagcttcctgtcagg

SEQ ID NO: 2099022 - DNA, 25 bp, Homo sapien
ttcagtgcaactgcaacatccacca

SEQ ID NO: 2099023 - DNA, 25 bp, Homo sapien
tcagtgcaactgcaacatccaccat

SEQ ID NO: 2099024 - DNA, 25 bp, Homo sapien
cttcagtgcaactgcaacatccacc

SEQ ID NO: 2099025 - DNA, 25 bp, Homo sapien
aagctgtaggtgatgacacctgaac

SEQ ID NO: 2099026 - DNA, 25 bp, Homo sapien
tctttgagcccttcaacgttctcct

SEQ ID NO: 2099027 - DNA, 25 bp, Homo sapien
tcctcacttgacataaagctgtagg

SEQ ID NO: 2099028 - DNA, 25 bp, Homo sapien
tcattcgttcgttctttatgtgagc

SEQ ID NO: 2099029 - DNA, 25 bp, Homo sapien
cgcacctggcccgtcatacctattt

SEQ ID NO: 2099030 - DNA, 25 bp, Homo sapien
ctggttaaatatgattcctgaacaa

SEQ ID NO: 2099031 - DNA, 25 bp, Homo sapien
aaactggttaaatatgattcctgaa

SEQ ID NO: 2099032 - DNA, 25 bp, Homo sapien
tggcccgtcatacctatttctaaat

SEQ ID NO: 2099033 - DNA, 25 bp, Homo sapien
cgttgaaggcaatgagttaaagagt

SEQ ID NO: 2099034 - DNA, 25 bp, Homo sapien
agttgcagacataattctggaattc

SEQ ID NO: 2099035 - DNA, 25 bp, Homo sapien
tcaaaagcacagtgtagtgagcgtt

SEQ ID NO: 2099036 - DNA, 25 bp, Homo sapien
tatgtcaagaaaataacagttgcag

SEQ ID NO: 2099037 - DNA, 25 bp, Homo sapien
catgtataagtatctgtgtagacac

SEQ ID NO: 2099038 - DNA, 25 bp, Homo sapien
tattcctgtagtataacctgagact

SEQ ID NO: 2099039 - DNA, 25 bp, Homo sapien
tcaaacatgcagagactatcagggt

SEQ ID NO: 2099040 - DNA, 25 bp, Homo sapien
cacagtccactaccaaacaattttg

SEQ ID NO: 2099041 - DNA, 25 bp, Homo sapien
aagtcactcacaacatgttgccagg

SEQ ID NO: 2099042 - DNA, 25 bp, Homo sapien
gcctaatatatcaaggtcacctgat

SEQ ID NO: 2099043 - DNA, 25 bp, Homo sapien
aataacgtagcccattctaaagagc

SEQ ID NO: 2099044 - DNA, 25 bp, Homo sapien
tcacctgattgatcttgtttggcag

SEQ ID NO: 2099045 - DNA, 25 bp, Homo sapien
gaatgctcagatgctttatttgctt

SEQ ID NO: 2099046 - DNA, 25 bp, Homo sapien
cagatgttcataaccaaacagaaag

SEQ ID NO: 2099047 - DNA, 25 bp, Homo sapien
gaaaggaatgctcagatgctttatt

SEQ ID NO: 2099048 - DNA, 25 bp, Homo sapien
cctcagatgttcataaccaaacaga

SEQ ID NO: 2099049 - DNA, 25 bp, Homo sapien
cctgcatcaccagtaattgattgcc

SEQ ID NO: 2099050 - DNA, 25 bp, Homo sapien
tatccctgctgtatactcatagagc

SEQ ID NO: 2099051 - DNA, 25 bp, Homo sapien
ttcagaaagttctccatacatcact

SEQ ID NO: 2099052 - DNA, 25 bp, Homo sapien
cctttcaatggatggtcagcccttt

SEQ ID NO: 2099053 - DNA, 25 bp, Homo sapien
taaagacagccacatcggcctctga

SEQ ID NO: 2099054 - DNA, 25 bp, Homo sapien
aaagacagccacatcggcctctgac

SEQ ID NO: 2099055 - DNA, 25 bp, Homo sapien
agacagccacatcggcctctgacat

SEQ ID NO: 2099056 - DNA, 25 bp, Homo sapien
tctaaagacagccacatcggcctct

SEQ ID NO: 2099057 - DNA, 25 bp, Homo sapien
gcatgatgatgtgtcaagtaactcc

SEQ ID NO: 2099058 - DNA, 25 bp, Homo sapien
gatgatgtgtcaagtaactcctcag

SEQ ID NO: 2099059 - DNA, 25 bp, Homo sapien
tatactgccaatggcatgatgatgt

SEQ ID NO: 2099060 - DNA, 25 bp, Homo sapien
caatggcatgatgatgtgtcaagta

SEQ ID NO: 2099061 - DNA, 25 bp, Homo sapien
aaattagggtcatcgaagtctgagc

SEQ ID NO: 2099062 - DNA, 25 bp, Homo sapien
tgaagagctgccaaattagggtcat

SEQ ID NO: 2099063 - DNA, 25 bp, Homo sapien
gagctgccaaattagggtcatcgaa

SEQ ID NO: 2099064 - DNA, 25 bp, Homo sapien
gccaaattagggtcatcgaagtctg

SEQ ID NO: 2099065 - DNA, 25 bp, Homo sapien
ctccttcaggacctttccttctcat

SEQ ID NO: 2099066 - DNA, 25 bp, Homo sapien
gtccccatagggcaggtacatcaac

SEQ ID NO: 2099067 - DNA, 25 bp, Homo sapien
ccatagggcaggtacatcaacatta

SEQ ID NO: 2099068 - DNA, 25 bp, Homo sapien
ggcaggtacatcaacattatcatca

SEQ ID NO: 2099069 - DNA, 25 bp, Homo sapien
acaggtccccatagggcaggtacat

SEQ ID NO: 2099070 - DNA, 25 bp, Homo sapien
catttgattcgaacaggctctccca

SEQ ID NO: 2099071 - DNA, 25 bp, Homo sapien
tctacttccgtcaaaggctattggc

SEQ ID NO: 2099072 - DNA, 25 bp, Homo sapien
cctgtagcaatgttggccggaacca

SEQ ID NO: 2099073 - DNA, 25 bp, Homo sapien
tatcgatagaccagtcagtgcatcc

SEQ ID NO: 2099074 - DNA, 25 bp, Homo sapien
agcagcaacatttaagtacgagaaa

SEQ ID NO: 2099075 - DNA, 25 bp, Homo sapien
taagtacgagaaagcagcctgtgct

SEQ ID NO: 2099076 - DNA, 25 bp, Homo sapien
agtacgagaaagcagcctgtgcttt

SEQ ID NO: 2099077 - DNA, 25 bp, Homo sapien
cagcctgtgctttctttgattcagc

SEQ ID NO: 2099078 - DNA, 25 bp, Homo sapien
tgttgatctataatgatgagtactt

SEQ ID NO: 2099079 - DNA, 25 bp, Homo sapien
cattatcacttatggtatcacagtt

SEQ ID NO: 2099080 - DNA, 25 bp, Homo sapien
aagtgagcagcataacattatcact

SEQ ID NO: 2099081 - DNA, 25 bp, Homo sapien
acatgttttactggctctttgaaag

SEQ ID NO: 2099082 - DNA, 25 bp, Homo sapien
acagatttaaagacgccgcctgcca

SEQ ID NO: 2099083 - DNA, 25 bp, Homo sapien
aggaacagatttaaagacgccgcct

SEQ ID NO: 2099084 - DNA, 25 bp, Homo sapien
caaggtgtaagcaggagagaagtcc

SEQ ID NO: 2099085 - DNA, 25 bp, Homo sapien
tgtaagcaggagagaagtccaagga

SEQ ID NO: 2099086 - DNA, 25 bp, Homo sapien
tctgagtgaggatattaacaacagc

SEQ ID NO: 2099087 - DNA, 25 bp, Homo sapien
tttgggcttcaaatcgaagaactga

SEQ ID NO: 2099088 - DNA, 25 bp, Homo sapien
gtgaggatattaacaacagcaccaa

SEQ ID NO: 2099089 - DNA, 25 bp, Homo sapien
gcttcaaatcgaagaactgactggc

SEQ ID NO: 2099090 - DNA, 25 bp, Homo sapien
tgccgctccatcagttgattctgca

SEQ ID NO: 2099091 - DNA, 25 bp, Homo sapien
cacaacttctcatgctccacagcca

SEQ ID NO: 2099092 - DNA, 25 bp, Homo sapien
ttctgccgctccatcagttgattct

SEQ ID NO: 2099093 - DNA, 25 bp, Homo sapien
cacacaacttctcatgctccacagc

SEQ ID NO: 2099094 - DNA, 25 bp, Homo sapien
aacaaagcagaataaatacagtgac

SEQ ID NO: 2099095 - DNA, 25 bp, Homo sapien
taacaaagcagaataaatacagtga

SEQ ID NO: 2099096 - DNA, 25 bp, Homo sapien
ctgtaacaaagcagaataaatacag

SEQ ID NO: 2099097 - DNA, 25 bp, Homo sapien
gtaacaaagcagaataaatacagtg

SEQ ID NO: 2099098 - DNA, 25 bp, Homo sapien
ccagtgtcattttcacccactgtca

SEQ ID NO: 2099099 - DNA, 25 bp, Homo sapien
cttggaattatagcagagtccagtg

SEQ ID NO: 2099100 - DNA, 25 bp, Homo sapien
agtgtcattttcacccactgtcagt

SEQ ID NO: 2099101 - DNA, 25 bp, Homo sapien
cagtgtcattttcacccactgtcag

SEQ ID NO: 2099102 - DNA, 25 bp, Homo sapien
ctctggttggcagtagaaaatcctc

SEQ ID NO: 2099103 - DNA, 25 bp, Homo sapien
gaaaatcctctatgtcacggcatga

SEQ ID NO: 2099104 - DNA, 25 bp, Homo sapien
catgaaatttccttgcttttgctaa

SEQ ID NO: 2099105 - DNA, 25 bp, Homo sapien
gcttttgctaagttcagctttttca

SEQ ID NO: 2099106 - DNA, 25 bp, Homo sapien
ttgaagcaatcatcagggcttgcct

SEQ ID NO: 2099107 - DNA, 25 bp, Homo sapien
gaagcaatcatcagggcttgcctca

SEQ ID NO: 2099108 - DNA, 25 bp, Homo sapien
ccccttgaagcaatcatcagggctt

SEQ ID NO: 2099109 - DNA, 25 bp, Homo sapien
ccttgaagcaatcatcagggcttgc

SEQ ID NO: 2099110 - DNA, 25 bp, Homo sapien
ttcagtagttcttctcacaacaaag

SEQ ID NO: 2099111 - DNA, 25 bp, Homo sapien
ggcctccatgtttttgtcctgcatt

SEQ ID NO: 2099112 - DNA, 25 bp, Homo sapien
tgaatacaatacttggcctccatgt

SEQ ID NO: 2099113 - DNA, 25 bp, Homo sapien
tcttataagcagagtatctcttttg

SEQ ID NO: 2099114 - DNA, 25 bp, Homo sapien
caagtgaaatattgaagactgtgat

SEQ ID NO: 2099115 - DNA, 25 bp, Homo sapien
gtgaaatattgaagactgtgattac

SEQ ID NO: 2099116 - DNA, 25 bp, Homo sapien
cacttgcaagtgaaatattgaagac

SEQ ID NO: 2099117 - DNA, 25 bp, Homo sapien
tgcaagtgaaatattgaagactgtg

SEQ ID NO: 2099118 - DNA, 25 bp, Homo sapien
gctgtcttgaaccaggaggaccctg

SEQ ID NO: 2099119 - DNA, 25 bp, Homo sapien
gagactggtcaattcttcttgagca

SEQ ID NO: 2099120 - DNA, 25 bp, Homo sapien
tcaatgtctgactatatagcacagg

SEQ ID NO: 2099121 - DNA, 25 bp, Homo sapien
tgtgacccatcattttaggcatagc

SEQ ID NO: 2099122 - DNA, 25 bp, Homo sapien
taattctatcaagggatatttattg

SEQ ID NO: 2099123 - DNA, 25 bp, Homo sapien
gggatatttattgaacagctttttg

SEQ ID NO: 2099124 - DNA, 25 bp, Homo sapien
tctatcaagggatatttattgaaca

SEQ ID NO: 2099125 - DNA, 25 bp, Homo sapien
caagggatatttattgaacagcttt

SEQ ID NO: 2099126 - DNA, 25 bp, Homo sapien
ctgctcttccattattctgaacact

SEQ ID NO: 2099127 - DNA, 25 bp, Homo sapien
tccattattctgaacacttccagta

SEQ ID NO: 2099128 - DNA, 25 bp, Homo sapien
tctgaacacttccagtacttaacat

SEQ ID NO: 2099129 - DNA, 25 bp, Homo sapien
tttaatgtagtcaccctttgctgct

SEQ ID NO: 2099130 - DNA, 25 bp, Homo sapien
ggaatatatccaattggccaaatca

SEQ ID NO: 2099131 - DNA, 25 bp, Homo sapien
taggaatatatccaattggccaaat

SEQ ID NO: 2099132 - DNA, 25 bp, Homo sapien
gtgtgaaagagtaggaatatatcca

SEQ ID NO: 2099133 - DNA, 25 bp, Homo sapien
ctagtgtgaaagagtaggaatatat

SEQ ID NO: 2099134 - DNA, 25 bp, Homo sapien
cataattgagtgctactgctgtgtt

SEQ ID NO: 2099135 - DNA, 25 bp, Homo sapien
tgtagaccgcatcataattgagtgc

SEQ ID NO: 2099136 - DNA, 25 bp, Homo sapien
gagtgctactgctgtgtttgtggct

SEQ ID NO: 2099137 - DNA, 25 bp, Homo sapien
actgcattgtgttatattgtagacc

SEQ ID NO: 2099138 - DNA, 25 bp, Homo sapien
tagagagagtcaaccattttccgtc

SEQ ID NO: 2099139 - DNA, 25 bp, Homo sapien
tatttgaggcactgacaagcatgaa

SEQ ID NO: 2099140 - DNA, 25 bp, Homo sapien
cagatatcggcaccttagttaagct

SEQ ID NO: 2099141 - DNA, 25 bp, Homo sapien
gtcactgtggctccttaagataaat

SEQ ID NO: 2099142 - DNA, 25 bp, Homo sapien
ctttggtgatggcatctctcattgg

SEQ ID NO: 2099143 - DNA, 25 bp, Homo sapien
tggcatctctcattggtggtgtagt

SEQ ID NO: 2099144 - DNA, 25 bp, Homo sapien
ctctttggtgatggcatctctcatt

SEQ ID NO: 2099145 - DNA, 25 bp, Homo sapien
catctctcattggtggtgtagtcat

SEQ ID NO: 2099146 - DNA, 25 bp, Homo sapien
ctctactatgcatgagaagttgttc

SEQ ID NO: 2099147 - DNA, 25 bp, Homo sapien
ctgaagacatggaactatcagatgc

SEQ ID NO: 2099148 - DNA, 25 bp, Homo sapien
tggtttttgcctctactatgcatga

SEQ ID NO: 2099149 - DNA, 25 bp, Homo sapien
gaactatcagatgctggtttttgcc

SEQ ID NO: 2099150 - DNA, 25 bp, Homo sapien
tgcatttcctgtgcactcgggatct

SEQ ID NO: 2099151 - DNA, 25 bp, Homo sapien
aacataagtgcatttcctgtgcact

SEQ ID NO: 2099152 - DNA, 25 bp, Homo sapien
ttcctgtgcactcgggatctaccca

SEQ ID NO: 2099153 - DNA, 25 bp, Homo sapien
tgtgcactcgggatctacccactct

SEQ ID NO: 2099154 - DNA, 25 bp, Homo sapien
gagagggaatgatggatgcccatgg

SEQ ID NO: 2099155 - DNA, 25 bp, Homo sapien
tgaccttgctagaggctgtgactcc

SEQ ID NO: 2099156 - DNA, 25 bp, Homo sapien
attactgaccttgctagaggctgtg

SEQ ID NO: 2099157 - DNA, 25 bp, Homo sapien
tactgaccttgctagaggctgtgac

SEQ ID NO: 2099158 - DNA, 25 bp, Homo sapien
tatcacatcactaaggaagagtttt

SEQ ID NO: 2099159 - DNA, 25 bp, Homo sapien
tctcttgtgggatgatttaagtcca

SEQ ID NO: 2099160 - DNA, 25 bp, Homo sapien
ccccaaataccgacagacacatata

SEQ ID NO: 2099161 - DNA, 25 bp, Homo sapien
atacacatggctctagagaaaccat

SEQ ID NO: 2099162 - DNA, 25 bp, Homo sapien
ccagcctagaagatgagagaattcc

SEQ ID NO: 2099163 - DNA, 25 bp, Homo sapien
ggacagaaacatggcttgactctaa

SEQ ID NO: 2099164 - DNA, 25 bp, Homo sapien
tcctactacggaattctggctctag

SEQ ID NO: 2099165 - DNA, 25 bp, Homo sapien
caaaaggatgcagtcaagtgaaagg

SEQ ID NO: 2099166 - DNA, 25 bp, Homo sapien
tattctagcactctgttgacagcca

SEQ ID NO: 2099167 - DNA, 25 bp, Homo sapien
tctgttgacagccaatgtcctccat

SEQ ID NO: 2099168 - DNA, 25 bp, Homo sapien
cactctgttgacagccaatgtcctc

SEQ ID NO: 2099169 - DNA, 25 bp, Homo sapien
ctttctgcttattctagcactctgt

SEQ ID NO: 2099170 - DNA, 25 bp, Homo sapien
ttttcaagaacaggtagcaaattgg

SEQ ID NO: 2099171 - DNA, 25 bp, Homo sapien
agttgctttcctaagtaactgattg

SEQ ID NO: 2099172 - DNA, 25 bp, Homo sapien
attggagtccctattgttctgagtc

SEQ ID NO: 2099173 - DNA, 25 bp, Homo sapien
tttttgatgatgcttgaccttcatt

SEQ ID NO: 2099174 - DNA, 25 bp, Homo sapien
gttggatcagtgtcaatcctgggga

SEQ ID NO: 2099175 - DNA, 25 bp, Homo sapien
atttcaagaaaggttccactcaaga

SEQ ID NO: 2099176 - DNA, 25 bp, Homo sapien
ttggatcagtgtcaatcctggggaa

SEQ ID NO: 2099177 - DNA, 25 bp, Homo sapien
ttcatttcaagaaaggttccactca

SEQ ID NO: 2099178 - DNA, 25 bp, Homo sapien
tagtcagaatgttgcccaagaggcc

SEQ ID NO: 2099179 - DNA, 25 bp, Homo sapien
tctgcgagacccctagaatgtcagg

SEQ ID NO: 2099180 - DNA, 25 bp, Homo sapien
tgatccacgattaccttgaagaggg

SEQ ID NO: 2099181 - DNA, 25 bp, Homo sapien
tatccatagtaaaggtctgcgagac

SEQ ID NO: 2099182 - DNA, 25 bp, Homo sapien
gccactcctaataatgaaagccttt

SEQ ID NO: 2099183 - DNA, 25 bp, Homo sapien
ccactcctaataatgaaagcctttt

SEQ ID NO: 2099184 - DNA, 25 bp, Homo sapien
tatctgtttttatgattgccactaa

SEQ ID NO: 2099185 - DNA, 25 bp, Homo sapien
tttttatctgtttttatgattgcca

SEQ ID NO: 2099186 - DNA, 25 bp, Homo sapien
gttctatcttgccaatagtatcaac

SEQ ID NO: 2099187 - DNA, 25 bp, Homo sapien
gctctctttgtcatgttctatcttg

SEQ ID NO: 2099188 - DNA, 25 bp, Homo sapien
taatgcataagtcataatggtcatg

SEQ ID NO: 2099189 - DNA, 25 bp, Homo sapien
caaaacacctcacttaatgcataag

SEQ ID NO: 2099190 - DNA, 25 bp, Homo sapien
aatgcacggagtttctagaagcctg

SEQ ID NO: 2099191 - DNA, 25 bp, Homo sapien
gccaagagctatttcagttccaaag

SEQ ID NO: 2099192 - DNA, 25 bp, Homo sapien
ccaaaccttgtagccagaaagagcc

SEQ ID NO: 2099193 - DNA, 25 bp, Homo sapien
tttatttccattgaggccagccagg

SEQ ID NO: 2099194 - DNA, 25 bp, Homo sapien
tcagtgggcctggttctccggtgac

SEQ ID NO: 2099195 - DNA, 25 bp, Homo sapien
tgggcctggttctccggtgactgct

SEQ ID NO: 2099196 - DNA, 25 bp, Homo sapien
gctgggcacttaggccactggctgt

SEQ ID NO: 2099197 - DNA, 25 bp, Homo sapien
cagtgggcctggttctccggtgact

SEQ ID NO: 2099198 - DNA, 25 bp, Homo sapien
gtgtcacgcattcaccaatacttac

SEQ ID NO: 2099199 - DNA, 25 bp, Homo sapien
gatagtccctcatcaataataccag

SEQ ID NO: 2099200 - DNA, 25 bp, Homo sapien
gcagttatcagtgtcacgcattcac

SEQ ID NO: 2099201 - DNA, 25 bp, Homo sapien
aataccagcagttatcagtgtcacg

SEQ ID NO: 2099202 - DNA, 25 bp, Homo sapien
cagctgtagccacagtgatgtctct

SEQ ID NO: 2099203 - DNA, 25 bp, Homo sapien
accagctgtagccacagtgatgtct

SEQ ID NO: 2099204 - DNA, 25 bp, Homo sapien
taacaccagctgtagccacagtgat

SEQ ID NO: 2099205 - DNA, 25 bp, Homo sapien
ctccgtaacaccagctgtagccaca

SEQ ID NO: 2099206 - DNA, 25 bp, Homo sapien
ttactttccataggatacaaaagct

SEQ ID NO: 2099207 - DNA, 25 bp, Homo sapien
aagcttgggtggcttatcagtcaga

SEQ ID NO: 2099208 - DNA, 25 bp, Homo sapien
ctgggtctcctgaattgtcagttta

SEQ ID NO: 2099209 - DNA, 25 bp, Homo sapien
agcttgggtggcttatcagtcagag

SEQ ID NO: 2099210 - DNA, 25 bp, Homo sapien
ctcttagtgctgcagcaaaagagta

SEQ ID NO: 2099211 - DNA, 25 bp, Homo sapien
tggactctctgcattgctctgtgac

SEQ ID NO: 2099212 - DNA, 25 bp, Homo sapien
gagtaatctgcataatatgtgtcag

SEQ ID NO: 2099213 - DNA, 25 bp, Homo sapien
gtgacagcactctttcttgggcctt

SEQ ID NO: 2099214 - DNA, 25 bp, Homo sapien
ccaactgccacatctacgtactcac

SEQ ID NO: 2099215 - DNA, 25 bp, Homo sapien
acatctacgtactcacacaaaaata

SEQ ID NO: 2099216 - DNA, 25 bp, Homo sapien
tgccacatctacgtactcacacaaa

SEQ ID NO: 2099217 - DNA, 25 bp, Homo sapien
caactgccacatctacgtactcaca

SEQ ID NO: 2099218 - DNA, 25 bp, Homo sapien
aaagctcattagaacgagagctgac

SEQ ID NO: 2099219 - DNA, 25 bp, Homo sapien
tcattagaacgagagctgacattca

SEQ ID NO: 2099220 - DNA, 25 bp, Homo sapien
tactggatcacgactgtgtgattaa

SEQ ID NO: 2099221 - DNA, 25 bp, Homo sapien
acgagagctgacattcatgactgaa

SEQ ID NO: 2099222 - DNA, 25 bp, Homo sapien
cacaggtgtacttgtgcctcaatga

SEQ ID NO: 2099223 - DNA, 25 bp, Homo sapien
ggatcagactgaagcatgtctccag

SEQ ID NO: 2099224 - DNA, 25 bp, Homo sapien
tgcagaggtccccatgggatcagac

SEQ ID NO: 2099225 - DNA, 25 bp, Homo sapien
gctaatgtctgtcccctgttcaagg

SEQ ID NO: 2099226 - DNA, 25 bp, Homo sapien
tcagaatattcgacaccaccattgg

SEQ ID NO: 2099227 - DNA, 25 bp, Homo sapien
cattggctagacatgtgactttggg

SEQ ID NO: 2099228 - DNA, 25 bp, Homo sapien
tctgggaatagttagagaacaaccc

SEQ ID NO: 2099229 - DNA, 25 bp, Homo sapien
acttatcctgagagcttagagggca

SEQ ID NO: 2099230 - DNA, 25 bp, Homo sapien
ccctggcctcagaagtcaatactat

SEQ ID NO: 2099231 - DNA, 25 bp, Homo sapien
tgaccaggaacacaagatcgctttg

SEQ ID NO: 2099232 - DNA, 25 bp, Homo sapien
taaaggagcctctactgaccaggaa

SEQ ID NO: 2099233 - DNA, 25 bp, Homo sapien
gcatctgcaggacaatcaagctctg

SEQ ID NO: 2099234 - DNA, 25 bp, Homo sapien
tgtcttttaaatggataagaacaga

SEQ ID NO: 2099235 - DNA, 25 bp, Homo sapien
tcttttaaatggataagaacagata

SEQ ID NO: 2099236 - DNA, 25 bp, Homo sapien
cctcaggtattatggtagattgtct

SEQ ID NO: 2099237 - DNA, 25 bp, Homo sapien
ttcttcctcaggtattatggtagat

SEQ ID NO: 2099238 - DNA, 25 bp, Homo sapien
tgaatattcaaaacgacaggataga

SEQ ID NO: 2099239 - DNA, 25 bp, Homo sapien
tctgagcaattacctgatcccaatt

SEQ ID NO: 2099240 - DNA, 25 bp, Homo sapien
tcccaattaaattgtgctggcactg

SEQ ID NO: 2099241 - DNA, 25 bp, Homo sapien
caacatcaggataagtaggtgtgca

SEQ ID NO: 2099242 - DNA, 25 bp, Homo sapien
gaagttagaatcactaactctaaaa

SEQ ID NO: 2099243 - DNA, 25 bp, Homo sapien
catgtgaccaattaaattcatctca

SEQ ID NO: 2099244 - DNA, 25 bp, Homo sapien
aattcatctcatagtggatttcccc

SEQ ID NO: 2099245 - DNA, 25 bp, Homo sapien
tcatagtggatttccccatttttat

SEQ ID NO: 2099246 - DNA, 25 bp, Homo sapien
cttccatgtgaccaattaaattcat

SEQ ID NO: 2099247 - DNA, 25 bp, Homo sapien
tggaaagcatgatggaactggaaga

SEQ ID NO: 2099248 - DNA, 25 bp, Homo sapien
ggttttggtggagatatatctggaa

SEQ ID NO: 2099249 - DNA, 25 bp, Homo sapien
tcaccagagcatccgctgttgagct

SEQ ID NO: 2099250 - DNA, 25 bp, Homo sapien
caataagaatttagctttttggagg

SEQ ID NO: 2099251 - DNA, 25 bp, Homo sapien
aggcagcaccgccatgtttggctaa

SEQ ID NO: 2099252 - DNA, 25 bp, Homo sapien
catgcataatacgtaattttaggaa

SEQ ID NO: 2099253 - DNA, 25 bp, Homo sapien
aactacaggcagcaccgccatgttt

SEQ ID NO: 2099254 - DNA, 25 bp, Homo sapien
cagcttttatggaagtatattatgc

SEQ ID NO: 2099255 - DNA, 25 bp, Homo sapien
tgtacaagtgtaggatctgaaaggc

SEQ ID NO: 2099256 - DNA, 25 bp, Homo sapien
cagtgagcagcgaatatacagcaat

SEQ ID NO: 2099257 - DNA, 25 bp, Homo sapien
tcctagtgaaatacagggatagttc

SEQ ID NO: 2099258 - DNA, 25 bp, Homo sapien
gatagttctgttttgggttgtacaa

SEQ ID NO: 2099259 - DNA, 25 bp, Homo sapien
tcaattgtggcagccgtgaaccatg

SEQ ID NO: 2099260 - DNA, 25 bp, Homo sapien
ggaaggcaatgtattcctgccctgc

SEQ ID NO: 2099261 - DNA, 25 bp, Homo sapien
tgtccccacgagcagcaataaggtg

SEQ ID NO: 2099262 - DNA, 25 bp, Homo sapien
gcagcaataaggtgaattccttctg

SEQ ID NO: 2099263 - DNA, 25 bp, Homo sapien
gattcgtagactgaaagacttccaa

SEQ ID NO: 2099264 - DNA, 25 bp, Homo sapien
gcttggtctcccttaagtgagcaga

SEQ ID NO: 2099265 - DNA, 25 bp, Homo sapien
cattaagagggagtaccctgttcaa

SEQ ID NO: 2099266 - DNA, 25 bp, Homo sapien
gattgatgccggttatcttaccaga

SEQ ID NO: 2099267 - DNA, 25 bp, Homo sapien
gcatgaacttgcaggagaaaatctg

SEQ ID NO: 2099268 - DNA, 25 bp, Homo sapien
cttgcaggagaaaatctggaagttc

SEQ ID NO: 2099269 - DNA, 25 bp, Homo sapien
taaataaagcatgaacttgcaggag

SEQ ID NO: 2099270 - DNA, 25 bp, Homo sapien
caggagaaaatctggaagttccaca

SEQ ID NO: 2099271 - DNA, 25 bp, Homo sapien
gatttgctctaaaaggctactcaga

SEQ ID NO: 2099272 - DNA, 25 bp, Homo sapien
gatgaagggcagaaagtacagccat

SEQ ID NO: 2099273 - DNA, 25 bp, Homo sapien
aattgatttgctctaaaaggctact

SEQ ID NO: 2099274 - DNA, 25 bp, Homo sapien
tgatttgctctaaaaggctactcag

SEQ ID NO: 2099275 - DNA, 25 bp, Homo sapien
aatatatcagtcagccaggtctgca

SEQ ID NO: 2099276 - DNA, 25 bp, Homo sapien
cagaaaggtgcacagtcagctcaac

SEQ ID NO: 2099277 - DNA, 25 bp, Homo sapien
taaattgcactaaatgcttctgcct

SEQ ID NO: 2099278 - DNA, 25 bp, Homo sapien
tgctgcctccagttgatacctgtaa

SEQ ID NO: 2099279 - DNA, 25 bp, Homo sapien
gacatctccgctgtacccaaagaaa

SEQ ID NO: 2099280 - DNA, 25 bp, Homo sapien
taaaggactgacatctccgctgtac

SEQ ID NO: 2099281 - DNA, 25 bp, Homo sapien
tgtcactttcccaaactcgattttc

SEQ ID NO: 2099282 - DNA, 25 bp, Homo sapien
ggactgacatctccgctgtacccaa

SEQ ID NO: 2099283 - DNA, 25 bp, Homo sapien
ggcgtgtcgacgtccatttccattt

SEQ ID NO: 2099284 - DNA, 25 bp, Homo sapien
caggagtaatttcccaagtcacctt

SEQ ID NO: 2099285 - DNA, 25 bp, Homo sapien
tcaacataacaggagtaatttccca

SEQ ID NO: 2099286 - DNA, 25 bp, Homo sapien
gagaacgctggcgtgtcgacgtcca

SEQ ID NO: 2099287 - DNA, 25 bp, Homo sapien
gatggtcaccaaacatacaagcagc

SEQ ID NO: 2099288 - DNA, 25 bp, Homo sapien
tccaaaatgattcctgtagaagagc

SEQ ID NO: 2099289 - DNA, 25 bp, Homo sapien
cttgtaacacttgtagatggtcacc

SEQ ID NO: 2099290 - DNA, 25 bp, Homo sapien
aagagtatagcaccaaggcctccag

SEQ ID NO: 2099291 - DNA, 25 bp, Homo sapien
cattttccttggtaccatttactgc

SEQ ID NO: 2099292 - DNA, 25 bp, Homo sapien
cgtggcaacataggcaattgcctca

SEQ ID NO: 2099293 - DNA, 25 bp, Homo sapien
ggtaccatttactgcaaaactgaaa

SEQ ID NO: 2099294 - DNA, 25 bp, Homo sapien
gatttattattccagaggaccctgg

SEQ ID NO: 2099295 - DNA, 25 bp, Homo sapien
taggcattctgaataaaccacttct

SEQ ID NO: 2099296 - DNA, 25 bp, Homo sapien
caagactcggatcatttctcaggag

SEQ ID NO: 2099297 - DNA, 25 bp, Homo sapien
gagatttttctcaagactcggatca

SEQ ID NO: 2099298 - DNA, 25 bp, Homo sapien
actcggatcatttctcaggagagac

SEQ ID NO: 2099299 - DNA, 25 bp, Homo sapien
tttttctcaagactcggatcatttc

SEQ ID NO: 2099300 - DNA, 25 bp, Homo sapien
gcaagatgttttctgcggtccactt

SEQ ID NO: 2099301 - DNA, 25 bp, Homo sapien
tagatgcctcctcaatttggatgca

SEQ ID NO: 2099302 - DNA, 25 bp, Homo sapien
tcctacctgtaacctgaacacttta

SEQ ID NO: 2099303 - DNA, 25 bp, Homo sapien
cataacatcaacttccataacatca

SEQ ID NO: 2099304 - DNA, 25 bp, Homo sapien
ttccaaagaaaagtcgaagtcacta

SEQ ID NO: 2099305 - DNA, 25 bp, Homo sapien
attccaaagaaaagtcgaagtcact

SEQ ID NO: 2099306 - DNA, 25 bp, Homo sapien
tccaaagaaaagtcgaagtcactac

SEQ ID NO: 2099307 - DNA, 25 bp, Homo sapien
ccaaagaaaagtcgaagtcactact

SEQ ID NO: 2099308 - DNA, 25 bp, Homo sapien
tggtcaggatccactttggtgtatg

SEQ ID NO: 2099309 - DNA, 25 bp, Homo sapien
tctctatctggtataaacaacttat

SEQ ID NO: 2099310 - DNA, 25 bp, Homo sapien
catatcaggtaggatttcaagggca

SEQ ID NO: 2099311 - DNA, 25 bp, Homo sapien
ccagttgggattaaatctctatctg

SEQ ID NO: 2099312 - DNA, 25 bp, Homo sapien
ggtacgtcgtactcatagcttcggt

SEQ ID NO: 2099313 - DNA, 25 bp, Homo sapien
gatatactggtctcccttggcaaca

SEQ ID NO: 2099314 - DNA, 25 bp, Homo sapien
ggtttccagctcaaagatgctccag

SEQ ID NO: 2099315 - DNA, 25 bp, Homo sapien
tggaaatggccgagacagtctgcag

SEQ ID NO: 2099316 - DNA, 25 bp, Homo sapien
cagcagcagtcgaggatttagttcc

SEQ ID NO: 2099317 - DNA, 25 bp, Homo sapien
tagatttgtccaagcaccccaagga

SEQ ID NO: 2099318 - DNA, 25 bp, Homo sapien
tcatgccgccattagaaaggtagag

SEQ ID NO: 2099319 - DNA, 25 bp, Homo sapien
gacgtggcccagttgatgctaggca

SEQ ID NO: 2099320 - DNA, 25 bp, Homo sapien
atttattccacacttccatcgtgca

SEQ ID NO: 2099321 - DNA, 25 bp, Homo sapien
tatgctaaacacttatggaccacgg

SEQ ID NO: 2099322 - DNA, 25 bp, Homo sapien
tgaacaccagcagaggaaaatgact

SEQ ID NO: 2099323 - DNA, 25 bp, Homo sapien
tactgcaaggaatatggacaaccac

SEQ ID NO: 2099324 - DNA, 25 bp, Homo sapien
gaaacatgagtttgtcagtggaccc

SEQ ID NO: 2099325 - DNA, 25 bp, Homo sapien
tacaggatatatagagagcatactc

SEQ ID NO: 2099326 - DNA, 25 bp, Homo sapien
ccagaagaaacatttgtagcttaat

SEQ ID NO: 2099327 - DNA, 25 bp, Homo sapien
tagagagcaacagacttatgaaacg

SEQ ID NO: 2099328 - DNA, 25 bp, Homo sapien
tcatagagagcaacagacttatgaa

SEQ ID NO: 2099329 - DNA, 25 bp, Homo sapien
gtcagagtaagcgattgaaggataa

SEQ ID NO: 2099330 - DNA, 25 bp, Homo sapien
cagagtaagcgattgaaggataaaa

SEQ ID NO: 2099331 - DNA, 25 bp, Homo sapien
gtattgtcagagtaagcgattgaag

SEQ ID NO: 2099332 - DNA, 25 bp, Homo sapien
ttgtcagagtaagcgattgaaggat

SEQ ID NO: 2099333 - DNA, 25 bp, Homo sapien
tatttcacgtcagtgatggcacaga

SEQ ID NO: 2099334 - DNA, 25 bp, Homo sapien
gactatgaatacaaggtcacctcat

SEQ ID NO: 2099335 - DNA, 25 bp, Homo sapien
cacctcatggtgcagaatacttaag

SEQ ID NO: 2099336 - DNA, 25 bp, Homo sapien
aaaaatgtcatttcacagccctgga

SEQ ID NO: 2099337 - DNA, 25 bp, Homo sapien
taatactactttgagcaactgcatc

SEQ ID NO: 2099338 - DNA, 25 bp, Homo sapien
atactactttgagcaactgcatcca

SEQ ID NO: 2099339 - DNA, 25 bp, Homo sapien
tgtaatactactttgagcaactgca

SEQ ID NO: 2099340 - DNA, 25 bp, Homo sapien
ctgtaatactactttgagcaactgc

SEQ ID NO: 2099341 - DNA, 25 bp, Homo sapien
ttgctgatctgttcttcacctgact

SEQ ID NO: 2099342 - DNA, 25 bp, Homo sapien
ttttgcaccttcaaccttggcggcc

SEQ ID NO: 2099343 - DNA, 25 bp, Homo sapien
tgtattctataatcacaatacagac

SEQ ID NO: 2099344 - DNA, 25 bp, Homo sapien
tcacctgactccttgcttctgttga

SEQ ID NO: 2099345 - DNA, 25 bp, Homo sapien
gtctacggggcttccgaggcgattg

SEQ ID NO: 2099346 - DNA, 25 bp, Homo sapien
acggggcttccgaggcgattgggca

SEQ ID NO: 2099347 - DNA, 25 bp, Homo sapien
ggcttccgaggcgattgggcagcgt

SEQ ID NO: 2099348 - DNA, 25 bp, Homo sapien
ctaaagcttggcgtctgtgatggtc

SEQ ID NO: 2099349 - DNA, 25 bp, Homo sapien
tctctcgccccatagattggatctg

SEQ ID NO: 2099350 - DNA, 25 bp, Homo sapien
cccatagattggatctgttgagaaa

SEQ ID NO: 2099351 - DNA, 25 bp, Homo sapien
agtttcagtagtcgctgtctctcgc

SEQ ID NO: 2099352 - DNA, 25 bp, Homo sapien
ctgtaagtttcagtagtcgctgtct

SEQ ID NO: 2099353 - DNA, 25 bp, Homo sapien
ggctttctttatgagtgaagtcagg

SEQ ID NO: 2099354 - DNA, 25 bp, Homo sapien
tgagaccgtgaagaatgtggcagct

SEQ ID NO: 2099355 - DNA, 25 bp, Homo sapien
gaaaagaattgaaggtgcatttggt

SEQ ID NO: 2099356 - DNA, 25 bp, Homo sapien
aagccccatattatagcaggtaaag

SEQ ID NO: 2099357 - DNA, 25 bp, Homo sapien
taatccagttttagatccagaattc

SEQ ID NO: 2099358 - DNA, 25 bp, Homo sapien
ttggtttcagagcttgcatatagcc

SEQ ID NO: 2099359 - DNA, 25 bp, Homo sapien
gcatatagccaatcctataaagtaa

SEQ ID NO: 2099360 - DNA, 25 bp, Homo sapien
ggtttgaattctaccctctggaggc

SEQ ID NO: 2099361 - DNA, 25 bp, Homo sapien
ggcatgtgctaatgctcccctaacc

SEQ ID NO: 2099362 - DNA, 25 bp, Homo sapien
gccatgccttatagcccttgctctg

SEQ ID NO: 2099363 - DNA, 25 bp, Homo sapien
gcctggctgtggcatgtgctaatgc

SEQ ID NO: 2099364 - DNA, 25 bp, Homo sapien
tttctgctgccaacgctgatggcca

SEQ ID NO: 2099365 - DNA, 25 bp, Homo sapien
tgaaggaagaaaacgacataggccc

SEQ ID NO: 2099366 - DNA, 25 bp, Homo sapien
aacgacataggccccttgaaagtca

SEQ ID NO: 2099367 - DNA, 25 bp, Homo sapien
tctgaaggaagaaaacgacataggc

SEQ ID NO: 2099368 - DNA, 25 bp, Homo sapien
gaagaaaacgacataggccccttga

SEQ ID NO: 2099369 - DNA, 25 bp, Homo sapien
aaagattgacttgaccattgaccat

SEQ ID NO: 2099370 - DNA, 25 bp, Homo sapien
taaaagattgacttgaccattgacc

SEQ ID NO: 2099371 - DNA, 25 bp, Homo sapien
tttgtgaagagggttggcacataaa

SEQ ID NO: 2099372 - DNA, 25 bp, Homo sapien
gggttggcacataaaagattgactt

SEQ ID NO: 2099373 - DNA, 25 bp, Homo sapien
agtcaaaggggttgttatctggcag

SEQ ID NO: 2099374 - DNA, 25 bp, Homo sapien
tcaaaggggttgttatctggcaggc

SEQ ID NO: 2099375 - DNA, 25 bp, Homo sapien
caaaggggttgttatctggcaggca

SEQ ID NO: 2099376 - DNA, 25 bp, Homo sapien
acagtcaaaggggttgttatctggc

SEQ ID NO: 2099377 - DNA, 25 bp, Homo sapien
ttgagtcctgagaagaggttctgag

SEQ ID NO: 2099378 - DNA, 25 bp, Homo sapien
caggtagagtagtgcatagaaaccc

SEQ ID NO: 2099379 - DNA, 25 bp, Homo sapien
tctctgactcaaagccctgactcag

SEQ ID NO: 2099380 - DNA, 25 bp, Homo sapien
gtcctgagaagaggttctgagctcc

SEQ ID NO: 2099381 - DNA, 25 bp, Homo sapien
actaactgaatctggcaagcagcag

SEQ ID NO: 2099382 - DNA, 25 bp, Homo sapien
gttttcatgattctccaggtagcct

SEQ ID NO: 2099383 - DNA, 25 bp, Homo sapien
cccttgcttctctgaactaactgaa

SEQ ID NO: 2099384 - DNA, 25 bp, Homo sapien
tctgaactaactgaatctggcaagc

SEQ ID NO: 2099385 - DNA, 25 bp, Homo sapien
tgaaatatcactagtgtccacagta

SEQ ID NO: 2099386 - DNA, 25 bp, Homo sapien
gctgaaatatcactagtgtccacag

SEQ ID NO: 2099387 - DNA, 25 bp, Homo sapien
aatatcactagtgtccacagtaaca

SEQ ID NO: 2099388 - DNA, 25 bp, Homo sapien
atcactagtgtccacagtaacaagc

SEQ ID NO: 2099389 - DNA, 25 bp, Homo sapien
tgctgaactcgggtccttcagacag

SEQ ID NO: 2099390 - DNA, 25 bp, Homo sapien
cagagtctggaatgtatccttttgc

SEQ ID NO: 2099391 - DNA, 25 bp, Homo sapien
tcagacagaggaccttacttccttg

SEQ ID NO: 2099392 - DNA, 25 bp, Homo sapien
tgacagagtctggaatgtatccttt

SEQ ID NO: 2099393 - DNA, 25 bp, Homo sapien
gctggtcttggacatgcccttttca

SEQ ID NO: 2099394 - DNA, 25 bp, Homo sapien
caagggcataagagtggtctacttc

SEQ ID NO: 2099395 - DNA, 25 bp, Homo sapien
tatcaggcctaggacagtcatcagg

SEQ ID NO: 2099396 - DNA, 25 bp, Homo sapien
cataggtgaggtccagttttctgac

SEQ ID NO: 2099397 - DNA, 25 bp, Homo sapien
cttcattcagggtcctcacgttcat

SEQ ID NO: 2099398 - DNA, 25 bp, Homo sapien
gaagttgaccttcttaggccatgtc

SEQ ID NO: 2099399 - DNA, 25 bp, Homo sapien
tgaactgcatctactgacatgaagt

SEQ ID NO: 2099400 - DNA, 25 bp, Homo sapien
catatctatcagaggctgaactgca

SEQ ID NO: 2099401 - DNA, 25 bp, Homo sapien
gcctgagctggactttttgggaccc

SEQ ID NO: 2099402 - DNA, 25 bp, Homo sapien
agcctgagctggactttttgggacc

SEQ ID NO: 2099403 - DNA, 25 bp, Homo sapien
ttgtggtgagctacatttagccagg

SEQ ID NO: 2099404 - DNA, 25 bp, Homo sapien
tggtgagctacatttagccagggct

SEQ ID NO: 2099405 - DNA, 25 bp, Homo sapien
ctgttctggactttgaagggctgac

SEQ ID NO: 2099406 - DNA, 25 bp, Homo sapien
gctgttctggactttgaagggctga

SEQ ID NO: 2099407 - DNA, 25 bp, Homo sapien
gaggctgttcccatcagatcaaggt

SEQ ID NO: 2099408 - DNA, 25 bp, Homo sapien
tgaggctgttcccatcagatcaagg

SEQ ID NO: 2099409 - DNA, 25 bp, Homo sapien
tgttcccatcagatcaaggtactca

SEQ ID NO: 2099410 - DNA, 25 bp, Homo sapien
ggctgttcccatcagatcaaggtac

SEQ ID NO: 2099411 - DNA, 25 bp, Homo sapien
acctggccagtcttggggcactcca

SEQ ID NO: 2099412 - DNA, 25 bp, Homo sapien
ttggggcactccatcctccactgac

SEQ ID NO: 2099413 - DNA, 25 bp, Homo sapien
tgacacctggccagtcttggggcac

SEQ ID NO: 2099414 - DNA, 25 bp, Homo sapien
cagtcttggggcactccatcctcca

SEQ ID NO: 2099415 - DNA, 25 bp, Homo sapien
catttccactagtccaaggtcttca

SEQ ID NO: 2099416 - DNA, 25 bp, Homo sapien
cttgattcctgttagggcgtgggtt

SEQ ID NO: 2099417 - DNA, 25 bp, Homo sapien
tagggccatttccactagtccaagg

SEQ ID NO: 2099418 - DNA, 25 bp, Homo sapien
gttttgtctctttgacctagggcca

SEQ ID NO: 2099419 - DNA, 25 bp, Homo sapien
attcccgtgaaagccaagactctct

SEQ ID NO: 2099420 - DNA, 25 bp, Homo sapien
tctctctctgcacaactggggtcac

SEQ ID NO: 2099421 - DNA, 25 bp, Homo sapien
cttgattcccgtgaaagccaagact

SEQ ID NO: 2099422 - DNA, 25 bp, Homo sapien
tgattcccgtgaaagccaagactct

SEQ ID NO: 2099423 - DNA, 25 bp, Homo sapien
atccgccagcctccaaacaataccc

SEQ ID NO: 2099424 - DNA, 25 bp, Homo sapien
ggacgaatatgcgtgctgacccaaa

SEQ ID NO: 2099425 - DNA, 25 bp, Homo sapien
ctgggacgaatatgcgtgctgaccc

SEQ ID NO: 2099426 - DNA, 25 bp, Homo sapien
cgaatatgcgtgctgacccaaatcc

SEQ ID NO: 2099427 - DNA, 25 bp, Homo sapien
agcccgtggcgtctgagggctgacg

SEQ ID NO: 2099428 - DNA, 25 bp, Homo sapien
tgttctagcgttgctggtcccttcg

SEQ ID NO: 2099429 - DNA, 25 bp, Homo sapien
tgctggtcccttcgtctccactagg

SEQ ID NO: 2099430 - DNA, 25 bp, Homo sapien
ctgacggctggacgctaccggacgt

SEQ ID NO: 2099431 - DNA, 25 bp, Homo sapien
agcggaagtcaggatgagccacatc

SEQ ID NO: 2099432 - DNA, 25 bp, Homo sapien
aaagcggaagtcaggatgagccaca

SEQ ID NO: 2099433 - DNA, 25 bp, Homo sapien
caaagcggaagtcaggatgagccac

SEQ ID NO: 2099434 - DNA, 25 bp, Homo sapien
aagcggaagtcaggatgagccacat

SEQ ID NO: 2099435 - DNA, 25 bp, Homo sapien
ttaccggagcctctcaggaccaaat

SEQ ID NO: 2099436 - DNA, 25 bp, Homo sapien
tctcaggaccaaatgcagaagcggg

SEQ ID NO: 2099437 - DNA, 25 bp, Homo sapien
agtggggccctctttgttacaggtg

SEQ ID NO: 2099438 - DNA, 25 bp, Homo sapien
caggaccaaatgcagaagcgggact

SEQ ID NO: 2099439 - DNA, 25 bp, Homo sapien
gggcacggagcttactcttctgacc

SEQ ID NO: 2099440 - DNA, 25 bp, Homo sapien
ggcacggagcttactcttctgacca

SEQ ID NO: 2099441 - DNA, 25 bp, Homo sapien
cggagcttactcttctgaccacgag

SEQ ID NO: 2099442 - DNA, 25 bp, Homo sapien
cacggagcttactcttctgaccacg

SEQ ID NO: 2099443 - DNA, 25 bp, Homo sapien
tgagaccccgggtctcatctcgggc

SEQ ID NO: 2099444 - DNA, 25 bp, Homo sapien
tttgtggatgaaacacccgcagccg

SEQ ID NO: 2099445 - DNA, 25 bp, Homo sapien
cagtgacctgaggaacattgagacc

SEQ ID NO: 2099446 - DNA, 25 bp, Homo sapien
aggagagcttgaagcagcaccccca

SEQ ID NO: 2099447 - DNA, 25 bp, Homo sapien
ctggttagaggatcttcgcttgggc

SEQ ID NO: 2099448 - DNA, 25 bp, Homo sapien
tccagggttccccaaagactgagtg

SEQ ID NO: 2099449 - DNA, 25 bp, Homo sapien
tcatagactcccaacatattcagga

SEQ ID NO: 2099450 - DNA, 25 bp, Homo sapien
tcagctcaaggccaaagacaacact

SEQ ID NO: 2099451 - DNA, 25 bp, Homo sapien
tttcagcataggctctcggacccca

SEQ ID NO: 2099452 - DNA, 25 bp, Homo sapien
cctgcaccagatctttggtgatgag

SEQ ID NO: 2099453 - DNA, 25 bp, Homo sapien
aattgaaagcgtgggggatcactgc

SEQ ID NO: 2099454 - DNA, 25 bp, Homo sapien
cctgcttgtactccagatatttttc

SEQ ID NO: 2099455 - DNA, 25 bp, Homo sapien
ttcaaagcttcttcgtaatgggttg

SEQ ID NO: 2099456 - DNA, 25 bp, Homo sapien
caaagcttcttcgtaatgggttggg

SEQ ID NO: 2099457 - DNA, 25 bp, Homo sapien
tcaaagcttcttcgtaatgggttgg

SEQ ID NO: 2099458 - DNA, 25 bp, Homo sapien
agcttcttcgtaatgggttgggaag

SEQ ID NO: 2099459 - DNA, 25 bp, Homo sapien
aagaatctgcctaagacctcattgg

SEQ ID NO: 2099460 - DNA, 25 bp, Homo sapien
ggtgagaacagcaggtaaacttggc

SEQ ID NO: 2099461 - DNA, 25 bp, Homo sapien
ctatggcagtagtgcaaggcctggc

SEQ ID NO: 2099462 - DNA, 25 bp, Homo sapien
tctactgtccctgaaaaacagcaat

SEQ ID NO: 2099463 - DNA, 25 bp, Homo sapien
cattttcttgtcctggattacaaaa

SEQ ID NO: 2099464 - DNA, 25 bp, Homo sapien
tgaccacttttacacctctggcttc

SEQ ID NO: 2099465 - DNA, 25 bp, Homo sapien
tcactatggggtctttcacatttcc

SEQ ID NO: 2099466 - DNA, 25 bp, Homo sapien
tatttctactctaatgccacatttt

SEQ ID NO: 2099467 - DNA, 25 bp, Homo sapien
caatagggacaaggttctatgtgac

SEQ ID NO: 2099468 - DNA, 25 bp, Homo sapien
tgggaagaagtgagtatgatacatc

SEQ ID NO: 2099469 - DNA, 25 bp, Homo sapien
tgacaatagggacaaggttctatgt

SEQ ID NO: 2099470 - DNA, 25 bp, Homo sapien
gacaaggttctatgtgaccctcttc

SEQ ID NO: 2099471 - DNA, 25 bp, Homo sapien
caaggtcctccgagatctaggctga

SEQ ID NO: 2099472 - DNA, 25 bp, Homo sapien
gagtcgggtttctatgggacatcac

SEQ ID NO: 2099473 - DNA, 25 bp, Homo sapien
tttgatgagccacattaggccaggg

SEQ ID NO: 2099474 - DNA, 25 bp, Homo sapien
tgggactccacattccatgccatga

SEQ ID NO: 2099475 - DNA, 25 bp, Homo sapien
gtgcttaagcgatgaggctggcttc

SEQ ID NO: 2099476 - DNA, 25 bp, Homo sapien
tgtgcttaagcgatgaggctggctt

SEQ ID NO: 2099477 - DNA, 25 bp, Homo sapien
tgcttaagcgatgaggctggcttcg

SEQ ID NO: 2099478 - DNA, 25 bp, Homo sapien
ctgtgcttaagcgatgaggctggct

SEQ ID NO: 2099479 - DNA, 25 bp, Homo sapien
tgcttaagcgatgaggctggcttcc

SEQ ID NO: 2099480 - DNA, 25 bp, Homo sapien
gcttaagcgatgaggctggcttcct

SEQ ID NO: 2099481 - DNA, 25 bp, Homo sapien
gtgcttaagcgatgaggctggcttc

SEQ ID NO: 2099482 - DNA, 25 bp, Homo sapien
tgtgcttaagcgatgaggctggctt

SEQ ID NO: 2099483 - DNA, 25 bp, Homo sapien
ctgtgcttaagcgatgaggctggct

SEQ ID NO: 2099484 - DNA, 25 bp, Homo sapien
tgcttaagcgatgaggctggcttcg

SEQ ID NO: 2099485 - DNA, 25 bp, Homo sapien
aggtccccgccaactgaataactgg

SEQ ID NO: 2099486 - DNA, 25 bp, Homo sapien
acagatcccatcctttagcactcgg

SEQ ID NO: 2099487 - DNA, 25 bp, Homo sapien
tagcactcggagacttcaccttggc

SEQ ID NO: 2099488 - DNA, 25 bp, Homo sapien
tgttgacgcccctactgggaacaga

SEQ ID NO: 2099489 - DNA, 25 bp, Homo sapien
gctgcactaaatttgacacctccag

SEQ ID NO: 2099490 - DNA, 25 bp, Homo sapien
gccgtggcatgtctagtccttgtgg

SEQ ID NO: 2099491 - DNA, 25 bp, Homo sapien
ccttgtggatctccttttactctgg

SEQ ID NO: 2099492 - DNA, 25 bp, Homo sapien
ggtcttctcccctgtgctgcactaa

SEQ ID NO: 2099493 - DNA, 25 bp, Homo sapien
ggcaggagtgtcagcagaagggcag

SEQ ID NO: 2099494 - DNA, 25 bp, Homo sapien
ctgtagtcaggaacagcaggcagga

SEQ ID NO: 2099495 - DNA, 25 bp, Homo sapien
agcaggcaggagtgtcagcagaagg

SEQ ID NO: 2099496 - DNA, 25 bp, Homo sapien
gcagaagggcaggtgatacaggcac

SEQ ID NO: 2099497 - DNA, 25 bp, Homo sapien
aatactaatattaacctctctaccg

SEQ ID NO: 2099498 - DNA, 25 bp, Homo sapien
cggtagagaggttaatattagtatt

SEQ ID NO: 2099499 - DNA, 25 bp, Homo sapien
gagagcactacgtgacctaccagca

SEQ ID NO: 2099500 - DNA, 25 bp, Homo sapien
cataggagtccttggtagaatcaac

SEQ ID NO: 2099501 - DNA, 25 bp, Homo sapien
gcagtgatctgagcaccctggtgat

SEQ ID NO: 2099502 - DNA, 25 bp, Homo sapien
tgcacagtggaggatagaccctgag

SEQ ID NO: 2099503 - DNA, 25 bp, Homo sapien
cactggggacagttttattgacctt

SEQ ID NO: 2099504 - DNA, 25 bp, Homo sapien
cccattgttggggagatccattttg

SEQ ID NO: 2099505 - DNA, 25 bp, Homo sapien
gcacttgtcggtactccaggtattt

SEQ ID NO: 2099506 - DNA, 25 bp, Homo sapien
agattcagcaggagacctgtcttgg

SEQ ID NO: 2099507 - DNA, 25 bp, Homo sapien
tggaacactttctgcccatggcact

SEQ ID NO: 2099508 - DNA, 25 bp, Homo sapien
gtgggaagagctgctagccttggcc

SEQ ID NO: 2099509 - DNA, 25 bp, Homo sapien
acactttctgcccatggcactactg

SEQ ID NO: 2099510 - DNA, 25 bp, Homo sapien
gctagccttggccttggaacacttt

SEQ ID NO: 2099511 - DNA, 25 bp, Homo sapien
aggtattatacagtgtgttccctcc

SEQ ID NO: 2099512 - DNA, 25 bp, Homo sapien
caacaaatgtgaccagtatcaatcc

SEQ ID NO: 2099513 - DNA, 25 bp, Homo sapien
tccaagttatcttgcaacagatcac

SEQ ID NO: 2099514 - DNA, 25 bp, Homo sapien
taggaaaccaaatattgaccatctt

SEQ ID NO: 2099515 - DNA, 25 bp, Homo sapien
gctgtggttaggcacagcaggcagg

SEQ ID NO: 2099516 - DNA, 25 bp, Homo sapien
gggcacggagcttactcttctgacc

SEQ ID NO: 2099517 - DNA, 25 bp, Homo sapien
cggagcttactcttctgaccccgag

SEQ ID NO: 2099518 - DNA, 25 bp, Homo sapien
gcttactcttctgaccccgaggcat

SEQ ID NO: 2099519 - DNA, 25 bp, Homo sapien
gagcttactcttctgaccccgaggc

SEQ ID NO: 2099520 - DNA, 25 bp, Homo sapien
gatccagtgcatgacatagctgcag

SEQ ID NO: 2099521 - DNA, 25 bp, Homo sapien
gataaggtgcctctttccatcatag

SEQ ID NO: 2099522 - DNA, 25 bp, Homo sapien
tctctgctgcagtaggctgaccaac

SEQ ID NO: 2099523 - DNA, 25 bp, Homo sapien
aagaccagctccgtgcgctgagaga

SEQ ID NO: 2099524 - DNA, 25 bp, Homo sapien
ctcttcataaagcagtgggaagtta

SEQ ID NO: 2099525 - DNA, 25 bp, Homo sapien
tcataaagcagtgggaagttattgg

SEQ ID NO: 2099526 - DNA, 25 bp, Homo sapien
gatgtggccctggaatacgcactag

SEQ ID NO: 2099527 - DNA, 25 bp, Homo sapien
tcatggctgtagtgccacgcctggc

SEQ ID NO: 2099528 - DNA, 25 bp, Homo sapien
ggacaccacactgaaacatgccagg

SEQ ID NO: 2099529 - DNA, 25 bp, Homo sapien
tgaactgagtaagacaaaccacgaa

SEQ ID NO: 2099530 - DNA, 25 bp, Homo sapien
catgccaggcccagttgcaacactg

SEQ ID NO: 2099531 - DNA, 25 bp, Homo sapien
gacttcacaaggagtgggagacact

SEQ ID NO: 2099532 - DNA, 25 bp, Homo sapien
cccaccaactttattgcaaggtaat

SEQ ID NO: 2099533 - DNA, 25 bp, Homo sapien
tatgttatacatggtgttcccacca

SEQ ID NO: 2099534 - DNA, 25 bp, Homo sapien
taaatgagtgattcatgccattcat

SEQ ID NO: 2099535 - DNA, 25 bp, Homo sapien
aaaattctcactctccaacctgata

SEQ ID NO: 2099536 - DNA, 25 bp, Homo sapien
tcatccaaaccagtcttattttcat

SEQ ID NO: 2099537 - DNA, 25 bp, Homo sapien
ctttcatccaaaccagtcttatttt

SEQ ID NO: 2099538 - DNA, 25 bp, Homo sapien
atccaaaccagtcttattttcattc

SEQ ID NO: 2099539 - DNA, 25 bp, Homo sapien
ttcatccaaaccagtcttattttca

SEQ ID NO: 2099540 - DNA, 25 bp, Homo sapien
ctgtcccagaagtgatgtgatgttg

SEQ ID NO: 2099541 - DNA, 25 bp, Homo sapien
ccagaagtgatgtgatgttgggaaa

SEQ ID NO: 2099542 - DNA, 25 bp, Homo sapien
tcccagaagtgatgtgatgttggga

SEQ ID NO: 2099543 - DNA, 25 bp, Homo sapien
tgtcccagaagtgatgtgatgttgg

SEQ ID NO: 2099544 - DNA, 25 bp, Homo sapien
atgtcacatccctgcaaaaatttga

SEQ ID NO: 2099545 - DNA, 25 bp, Homo sapien
tgtcacatccctgcaaaaatttgac

SEQ ID NO: 2099546 - DNA, 25 bp, Homo sapien
cttctgtctcttgatcaaactcttc

SEQ ID NO: 2099547 - DNA, 25 bp, Homo sapien
ctgtctcttgatcaaactcttccag

SEQ ID NO: 2099548 - DNA, 25 bp, Homo sapien
gatgatcttcatatgatcacagtcc

SEQ ID NO: 2099549 - DNA, 25 bp, Homo sapien
gttttctgagaatttcgagttgtac

SEQ ID NO: 2099550 - DNA, 25 bp, Homo sapien
tgagaatttcgagttgtactcctgg

SEQ ID NO: 2099551 - DNA, 25 bp, Homo sapien
ggatgatcttcatatgatcacagtc

SEQ ID NO: 2099552 - DNA, 25 bp, Homo sapien
tgaaagtcccgttttgggcagaggc

SEQ ID NO: 2099553 - DNA, 25 bp, Homo sapien
gaggccttctcatcagctctcagag

SEQ ID NO: 2099554 - DNA, 25 bp, Homo sapien
ctctccaggcagaactgaagctact

SEQ ID NO: 2099555 - DNA, 25 bp, Homo sapien
agctctcagagtcctcaccgtgact

SEQ ID NO: 2099556 - DNA, 25 bp, Homo sapien
agcggaagtcaggatgagccacatc

SEQ ID NO: 2099557 - DNA, 25 bp, Homo sapien
aaagcggaagtcaggatgagccaca

SEQ ID NO: 2099558 - DNA, 25 bp, Homo sapien
caaagcggaagtcaggatgagccac

SEQ ID NO: 2099559 - DNA, 25 bp, Homo sapien
aagcggaagtcaggatgagccacat

SEQ ID NO: 2099560 - DNA, 25 bp, Homo sapien
acgacttccgcctgctgacccaaat

SEQ ID NO: 2099561 - DNA, 25 bp, Homo sapien
ccaaatccgccaggcggacactgcg

SEQ ID NO: 2099562 - DNA, 25 bp, Homo sapien
gcctgggacgacttccgcctgctga

SEQ ID NO: 2099563 - DNA, 25 bp, Homo sapien
acccaaatccgccaggcggacactg

SEQ ID NO: 2099564 - DNA, 25 bp, Homo sapien
tctagtgtcgctggtccctacgtcc

SEQ ID NO: 2099565 - DNA, 25 bp, Homo sapien
actgttctagtgtcgctggtcccta

SEQ ID NO: 2099566 - DNA, 25 bp, Homo sapien
agaggcaggacgctacgggacgtca

SEQ ID NO: 2099567 - DNA, 25 bp, Homo sapien
aggcaggacgctacgggacgtcact

SEQ ID NO: 2099568 - DNA, 25 bp, Homo sapien
cctgagaattcaccctccgctgacc

SEQ ID NO: 2099569 - DNA, 25 bp, Homo sapien
cactccttaagctcgctcgggtcct

SEQ ID NO: 2099570 - DNA, 25 bp, Homo sapien
ttcaccctccgctgaccagacgctg

SEQ ID NO: 2099571 - DNA, 25 bp, Homo sapien
accccactccttaagctcgctcggg

SEQ ID NO: 2099572 - DNA, 25 bp, Homo sapien
taacataaggctgccccctttgatg

SEQ ID NO: 2099573 - DNA, 25 bp, Homo sapien
cctctagctgctaacataaggctgc

SEQ ID NO: 2099574 - DNA, 25 bp, Homo sapien
tctagctgctaacataaggctgccc

SEQ ID NO: 2099575 - DNA, 25 bp, Homo sapien
atcctctagctgctaacataaggct

SEQ ID NO: 2099576 - DNA, 25 bp, Homo sapien
tctgtgttcaagggccctctcaatt

SEQ ID NO: 2099577 - DNA, 25 bp, Homo sapien
ggccctctcaattcatatacaggat

SEQ ID NO: 2099578 - DNA, 25 bp, Homo sapien
ggatcttcatatctactcttggaag

SEQ ID NO: 2099579 - DNA, 25 bp, Homo sapien
tatctactcttggaagggtctggga

SEQ ID NO: 2099580 - DNA, 25 bp, Homo sapien
caggaaagtgagcagaaaggcagga

SEQ ID NO: 2099581 - DNA, 25 bp, Homo sapien
tggcgtgagcaaccttgagaccctg

SEQ ID NO: 2099582 - DNA, 25 bp, Homo sapien
tgcagtggcgtgagcaaccttgaga

SEQ ID NO: 2099583 - DNA, 25 bp, Homo sapien
tgggtctcctctcgcgccttgcggc

SEQ ID NO: 2099584 - DNA, 25 bp, Homo sapien
cagtggcgtgagcaaccttgagacc

SEQ ID NO: 2099585 - DNA, 25 bp, Homo sapien
ggcaccttcgtcagattcggtacat

SEQ ID NO: 2099586 - DNA, 25 bp, Homo sapien
tcgtcagattcggtacatgacacag

SEQ ID NO: 2099587 - DNA, 25 bp, Homo sapien
cttggcatttggcaccttcgtcaga

SEQ ID NO: 2099588 - DNA, 25 bp, Homo sapien
ttcggtacatgacacagctgcagca

SEQ ID NO: 2099589 - DNA, 25 bp, Homo sapien
gggaaagtcccaatcattgctcagg

SEQ ID NO: 2099590 - DNA, 25 bp, Homo sapien
ggttccccatagattaagtgctcct

SEQ ID NO: 2099591 - DNA, 25 bp, Homo sapien
aatcaaggccaaagacgagctccaa

SEQ ID NO: 2099592 - DNA, 25 bp, Homo sapien
gttgggcacctgctcgtacttcaga

SEQ ID NO: 2099593 - DNA, 25 bp, Homo sapien
tctaaaagtcgtggcagtagtgcga

SEQ ID NO: 2099594 - DNA, 25 bp, Homo sapien
gcgacgcctggctctaacactggat

SEQ ID NO: 2099595 - DNA, 25 bp, Homo sapien
tctagaacgcgctctaaaagtcgtg

SEQ ID NO: 2099596 - DNA, 25 bp, Homo sapien
ctggatcggacttgggctctctctt

SEQ ID NO: 2099597 - DNA, 25 bp, Homo sapien
agctggcagcaccaataaatgtgtg

SEQ ID NO: 2099598 - DNA, 25 bp, Homo sapien
tcaaaactcatatgcttaaagctgg

SEQ ID NO: 2099599 - DNA, 25 bp, Homo sapien
gatgatctctctagccatatcttgg

SEQ ID NO: 2099600 - DNA, 25 bp, Homo sapien
aaacaaagtgaacaatctgcctgag

SEQ ID NO: 2099601 - DNA, 25 bp, Homo sapien
ccatgagcccgggaaaaagagcagg

SEQ ID NO: 2099602 - DNA, 25 bp, Homo sapien
taggcctgacagacaatagaaatag

SEQ ID NO: 2099603 - DNA, 25 bp, Homo sapien
tgtggataaacacttgccatctctc

SEQ ID NO: 2099604 - DNA, 25 bp, Homo sapien
tgtggctccacacctcaatgtgggt

SEQ ID NO: 2099605 - DNA, 25 bp, Homo sapien
aatgctgcccttcaacctttggttc

SEQ ID NO: 2099606 - DNA, 25 bp, Homo sapien
tggatctggaaagactttcctaaaa

SEQ ID NO: 2099607 - DNA, 25 bp, Homo sapien
tgctgcccttcaacctttggttcat

SEQ ID NO: 2099608 - DNA, 25 bp, Homo sapien
actggatctggaaagactttcctaa

SEQ ID NO: 2099609 - DNA, 25 bp, Homo sapien
gtgtgcatggacttttccactctgc

SEQ ID NO: 2099610 - DNA, 25 bp, Homo sapien
aaaaatgtcctcatgtcatccgtga

SEQ ID NO: 2099611 - DNA, 25 bp, Homo sapien
tgtcctcatgtcatccgtgaagctg

SEQ ID NO: 2099612 - DNA, 25 bp, Homo sapien
cgtgaagctgatgatttgcccgata

SEQ ID NO: 2099613 - DNA, 25 bp, Homo sapien
tctggtcctatgtacccattctcac

SEQ ID NO: 2099614 - DNA, 25 bp, Homo sapien
gaatgacaccttctacctctggtcc

SEQ ID NO: 2099615 - DNA, 25 bp, Homo sapien
gttccattccatctacttgacctag

SEQ ID NO: 2099616 - DNA, 25 bp, Homo sapien
gacctagcatgtctatgctgtgctg

SEQ ID NO: 2099617 - DNA, 25 bp, Homo sapien
attccctgagctcatcacaagccat

SEQ ID NO: 2099618 - DNA, 25 bp, Homo sapien
cagattccctgagctcatcacaagc

SEQ ID NO: 2099619 - DNA, 25 bp, Homo sapien
tgggagcccctgtccagattccctg

SEQ ID NO: 2099620 - DNA, 25 bp, Homo sapien
ttggtgagtctgggagcccctgtcc

SEQ ID NO: 2099621 - DNA, 25 bp, Homo sapien
ttcaggatcctggttgtttccttca

SEQ ID NO: 2099622 - DNA, 25 bp, Homo sapien
caaatccctggaaaattgccgcaaa

SEQ ID NO: 2099623 - DNA, 25 bp, Homo sapien
gacatcatgtagctcaaatgcagcc

SEQ ID NO: 2099624 - DNA, 25 bp, Homo sapien
catgagctgatcctggttgtctcca

SEQ ID NO: 2099625 - DNA, 25 bp, Homo sapien
tctttggcaagcttggacatcatgt

SEQ ID NO: 2099626 - DNA, 25 bp, Homo sapien
ttggccaaaaatcctgggtgtaatg

SEQ ID NO: 2099627 - DNA, 25 bp, Homo sapien
agtgcagttcaccatgagggaagaa

SEQ ID NO: 2099628 - DNA, 25 bp, Homo sapien
gtgggccacacaagtgcagtagtgc

SEQ ID NO: 2099629 - DNA, 25 bp, Homo sapien
tagtgcagttcaccatgagggaaga

SEQ ID NO: 2099630 - DNA, 25 bp, Homo sapien
tgggccacacaagtgcagtagtgca

SEQ ID NO: 2099631 - DNA, 25 bp, Homo sapien
catcatcggcacagtcagcatggat

SEQ ID NO: 2099632 - DNA, 25 bp, Homo sapien
aagggccccatgacagattcatcga

SEQ ID NO: 2099633 - DNA, 25 bp, Homo sapien
tctgaaaacgtagactggtttggcc

SEQ ID NO: 2099634 - DNA, 25 bp, Homo sapien
gcaaatactcagtgaacacaccagg

SEQ ID NO: 2099635 - DNA, 25 bp, Homo sapien
tcatggccagtgtatttgcaaacgt

SEQ ID NO: 2099636 - DNA, 25 bp, Homo sapien
gcaatgagctaagtggccagtgtta

SEQ ID NO: 2099637 - DNA, 25 bp, Homo sapien
gctttcaaattattcgggcctctag

SEQ ID NO: 2099638 - DNA, 25 bp, Homo sapien
taccaccattggctgaacgatcagt

SEQ ID NO: 2099639 - DNA, 25 bp, Homo sapien
taggagtgcctctcgcttattacca

SEQ ID NO: 2099640 - DNA, 25 bp, Homo sapien
gatattcgcccataataggagtgcc

SEQ ID NO: 2099641 - DNA, 25 bp, Homo sapien
tgctctgtgatgattggcatggtgc

SEQ ID NO: 2099642 - DNA, 25 bp, Homo sapien
tacttcggtatcacactatactgca

SEQ ID NO: 2099643 - DNA, 25 bp, Homo sapien
gcacagatccaaacagatagtccat

SEQ ID NO: 2099644 - DNA, 25 bp, Homo sapien
ttgcatttgctgcagggtagcacag

SEQ ID NO: 2099645 - DNA, 25 bp, Homo sapien
caggaggcataactagcaaaggaat

SEQ ID NO: 2099646 - DNA, 25 bp, Homo sapien
tcagatgaatgggaagctcccggag

SEQ ID NO: 2099647 - DNA, 25 bp, Homo sapien
gcaaaggaatgatttggaggatgat

SEQ ID NO: 2099648 - DNA, 25 bp, Homo sapien
ttctgcacaggaggcataactagca

SEQ ID NO: 2099649 - DNA, 25 bp, Homo sapien
aatgtcgtatatgtgctttctgctc

SEQ ID NO: 2099650 - DNA, 25 bp, Homo sapien
tattaaatgtcgtatatgtgctttc

SEQ ID NO: 2099651 - DNA, 25 bp, Homo sapien
ctgtattaaatgtcgtatatgtgct

SEQ ID NO: 2099652 - DNA, 25 bp, Homo sapien
ggttctgtattaaatgtcgtatatg

SEQ ID NO: 2099653 - DNA, 25 bp, Homo sapien
tatccgagtgaatattgtacagact

SEQ ID NO: 2099654 - DNA, 25 bp, Homo sapien
ccgagtgaatattgtacagactgtt

SEQ ID NO: 2099655 - DNA, 25 bp, Homo sapien
caatatccgagtgaatattgtacag

SEQ ID NO: 2099656 - DNA, 25 bp, Homo sapien
tatgcaatatccgagtgaatattgt

SEQ ID NO: 2099657 - DNA, 25 bp, Homo sapien
tgcttggcacgcagcatgaatttgt

SEQ ID NO: 2099658 - DNA, 25 bp, Homo sapien
cacaaagtacgaacttcccagtttg

SEQ ID NO: 2099659 - DNA, 25 bp, Homo sapien
tgctccacaaagtacgaacttccca

SEQ ID NO: 2099660 - DNA, 25 bp, Homo sapien
tttggaagcattgccctatgtttcc

SEQ ID NO: 2099661 - DNA, 25 bp, Homo sapien
tctgggtacaaggttgaggaatcca

SEQ ID NO: 2099662 - DNA, 25 bp, Homo sapien
ccaaggctagggagttatgttttct

SEQ ID NO: 2099663 - DNA, 25 bp, Homo sapien
tcacagttttgtcccgcatcatctc

SEQ ID NO: 2099664 - DNA, 25 bp, Homo sapien
gttgacagggaatccaaagaccttc

SEQ ID NO: 2099665 - DNA, 25 bp, Homo sapien
tatcgagttcactgccatcttgctg

SEQ ID NO: 2099666 - DNA, 25 bp, Homo sapien
gtagtaacacaggtatcgagttcac

SEQ ID NO: 2099667 - DNA, 25 bp, Homo sapien
cgtccaactgtaggtcatcattctc

SEQ ID NO: 2099668 - DNA, 25 bp, Homo sapien
catcttgctgtcttagattatcata

SEQ ID NO: 2099669 - DNA, 25 bp, Homo sapien
ctgcaattcttctactcccacattt

SEQ ID NO: 2099670 - DNA, 25 bp, Homo sapien
gcaattcttctactcccacatttcc

SEQ ID NO: 2099671 - DNA, 25 bp, Homo sapien
tgcaattcttctactcccacatttc

SEQ ID NO: 2099672 - DNA, 25 bp, Homo sapien
ccctgcaattcttctactcccacat

SEQ ID NO: 2099673 - DNA, 25 bp, Homo sapien
gttccttttgatggacacatggcag

SEQ ID NO: 2099674 - DNA, 25 bp, Homo sapien
tggccaaagcagtccttcggagacc

SEQ ID NO: 2099675 - DNA, 25 bp, Homo sapien
gaacagctggatgcgaccatttagc

SEQ ID NO: 2099676 - DNA, 25 bp, Homo sapien
taaagggaaacattgccgttctgcc

SEQ ID NO: 2099677 - DNA, 25 bp, Homo sapien
tgcttgaccttggtttaaaagcaca

SEQ ID NO: 2099678 - DNA, 25 bp, Homo sapien
gagactggcatcaacaagattcatt

SEQ ID NO: 2099679 - DNA, 25 bp, Homo sapien
gcaaccttgagactggcatcaacaa

SEQ ID NO: 2099680 - DNA, 25 bp, Homo sapien
ttgtcaatgacaatctcaaggcctc

SEQ ID NO: 2099681 - DNA, 25 bp, Homo sapien
tatgaaccatgctgtatattataaa

SEQ ID NO: 2099682 - DNA, 25 bp, Homo sapien
gggacatgaaacctaatcatatcag

SEQ ID NO: 2099683 - DNA, 25 bp, Homo sapien
aacaacatggaggaaaccactctca

SEQ ID NO: 2099684 - DNA, 25 bp, Homo sapien
aatcattgcacaatgtatgtttata

SEQ ID NO: 2099685 - DNA, 25 bp, Homo sapien
cattgtttgtaaccatagatgcagg

SEQ ID NO: 2099686 - DNA, 25 bp, Homo sapien
ggatgtgctaaagtgatactcattg

SEQ ID NO: 2099687 - DNA, 25 bp, Homo sapien
gcgtcaattggcttggttggtagca

SEQ ID NO: 2099688 - DNA, 25 bp, Homo sapien
cagaagctcgaaaggcccaatgtgg

SEQ ID NO: 2099689 - DNA, 25 bp, Homo sapien
ctcttgatcacataagaggcagcag

SEQ ID NO: 2099690 - DNA, 25 bp, Homo sapien
gcctcttgatcacataagaggcagc

SEQ ID NO: 2099691 - DNA, 25 bp, Homo sapien
cctcttgatcacataagaggcagca

SEQ ID NO: 2099692 - DNA, 25 bp, Homo sapien
gcccgcccaggtgatctgtgtggct

SEQ ID NO: 2099693 - DNA, 25 bp, Homo sapien
ggcccgcccaggtgatctgtgtggc

SEQ ID NO: 2099694 - DNA, 25 bp, Homo sapien
tagtctatggagatcatgtctgcga

SEQ ID NO: 2099695 - DNA, 25 bp, Homo sapien
tgtgagcagacttgatgaggcagcc

SEQ ID NO: 2099696 - DNA, 25 bp, Homo sapien
tcttctccaggatttgaggctctca

SEQ ID NO: 2099697 - DNA, 25 bp, Homo sapien
ctggtccctggtttgtagtctatgg

SEQ ID NO: 2099698 - DNA, 25 bp, Homo sapien
tccctcttttcactgccattggaat

SEQ ID NO: 2099699 - DNA, 25 bp, Homo sapien
acttttattgcccttctctcctctg

SEQ ID NO: 2099700 - DNA, 25 bp, Homo sapien
cctctgtctgcaatgttttccctct

SEQ ID NO: 2099701 - DNA, 25 bp, Homo sapien
tcactgccattggaatcctttctgt

SEQ ID NO: 2099702 - DNA, 25 bp, Homo sapien
cagtgacagtcttcgacttggatct

SEQ ID NO: 2099703 - DNA, 25 bp, Homo sapien
tgctttcctccagtgacagtcttcg

SEQ ID NO: 2099704 - DNA, 25 bp, Homo sapien
gctcaggttatcctttgtgtaataa

SEQ ID NO: 2099705 - DNA, 25 bp, Homo sapien
tggatctaggattggtcttcttcat

SEQ ID NO: 2099706 - DNA, 25 bp, Homo sapien
tgcttggtttgctagccttcagccc

SEQ ID NO: 2099707 - DNA, 25 bp, Homo sapien
gattgcttggtttgctagccttcag

SEQ ID NO: 2099708 - DNA, 25 bp, Homo sapien
cttggtttgctagccttcagccctg

SEQ ID NO: 2099709 - DNA, 25 bp, Homo sapien
ttgcttggtttgctagccttcagcc

SEQ ID NO: 2099710 - DNA, 25 bp, Homo sapien
gactctgctgaatgccaagattcct

SEQ ID NO: 2099711 - DNA, 25 bp, Homo sapien
gcagcatgacatgtcgatactcaaa

SEQ ID NO: 2099712 - DNA, 25 bp, Homo sapien
aaatgggtttcagggaccagcttgg

SEQ ID NO: 2099713 - DNA, 25 bp, Homo sapien
gattcagacatcaaatgggtttcag

SEQ ID NO: 2099714 - DNA, 25 bp, Homo sapien
cggttctggttcatggatcatataa

SEQ ID NO: 2099715 - DNA, 25 bp, Homo sapien
gtgcggttctggttcatggatcata

SEQ ID NO: 2099716 - DNA, 25 bp, Homo sapien
ctggttcatggatcatataatggac

SEQ ID NO: 2099717 - DNA, 25 bp, Homo sapien
tctggttcatggatcatataatgga

SEQ ID NO: 2099718 - DNA, 25 bp, Homo sapien
gtagcgggcgccggaagagcaagac

SEQ ID NO: 2099719 - DNA, 25 bp, Homo sapien
gctcgaggctgaaaagtagcttgcc

SEQ ID NO: 2099720 - DNA, 25 bp, Homo sapien
tcaaagtgagaaacagaagtcaaca

SEQ ID NO: 2099721 - DNA, 25 bp, Homo sapien
tctgcatacagagcacatcgtggct

SEQ ID NO: 2099722 - DNA, 25 bp, Homo sapien
catacagagcacatcgtggcttctg

SEQ ID NO: 2099723 - DNA, 25 bp, Homo sapien
tccaaggcagacagttgcagagcct

SEQ ID NO: 2099724 - DNA, 25 bp, Homo sapien
cttcaagtacccctaatttcaatgt

SEQ ID NO: 2099725 - DNA, 25 bp, Homo sapien
tcaagtacccctaatttcaatgtct

SEQ ID NO: 2099726 - DNA, 25 bp, Homo sapien
tccttccagttaccgctcctccaag

SEQ ID NO: 2099727 - DNA, 25 bp, Homo sapien
cttataaatacagccaatgctagtt

SEQ ID NO: 2099728 - DNA, 25 bp, Homo sapien
gccaatgctagttgaagaccctggg

SEQ ID NO: 2099729 - DNA, 25 bp, Homo sapien
tctctgccagggccaccatagtttt

SEQ ID NO: 2099730 - DNA, 25 bp, Homo sapien
gggatgggcatacttctctctgcca

SEQ ID NO: 2099731 - DNA, 25 bp, Homo sapien
ttctctcttctcctttcattctacc

SEQ ID NO: 2099732 - DNA, 25 bp, Homo sapien
tctctcttctcctttcattctaccc

SEQ ID NO: 2099733 - DNA, 25 bp, Homo sapien
ctctcttctcctttcattctaccca

SEQ ID NO: 2099734 - DNA, 25 bp, Homo sapien
ctggaagaaagagtccccggaactg

SEQ ID NO: 2099735 - DNA, 25 bp, Homo sapien
aagtggagaggaaataggagggcgg

SEQ ID NO: 2099736 - DNA, 25 bp, Homo sapien
aataggagggcggtcggaagctgga

SEQ ID NO: 2099737 - DNA, 25 bp, Homo sapien
tcggaagctggaagaaagagtcccc

SEQ ID NO: 2099738 - DNA, 25 bp, Homo sapien
ggtcggcaagaaggagctaaccaca

SEQ ID NO: 2099739 - DNA, 25 bp, Homo sapien
gctaaccacaaaaacggtgctggca

SEQ ID NO: 2099740 - DNA, 25 bp, Homo sapien
cacaaaaacggtgctggcaggtccc

SEQ ID NO: 2099741 - DNA, 25 bp, Homo sapien
taaccacaaaaacggtgctggcagg

SEQ ID NO: 2099742 - DNA, 25 bp, Homo sapien
ccatggcggctttcatggtgtccgg

SEQ ID NO: 2099743 - DNA, 25 bp, Homo sapien
cacttttcctcagccaattcgcgga

SEQ ID NO: 2099744 - DNA, 25 bp, Homo sapien
aagatccaaaagagcctgattcagt

SEQ ID NO: 2099745 - DNA, 25 bp, Homo sapien
gagccacatgatcgccgtcgaaata

SEQ ID NO: 2099746 - DNA, 25 bp, Homo sapien
gggtggtcaggtggtcacccatctt

SEQ ID NO: 2099747 - DNA, 25 bp, Homo sapien
cccagcccagcctccgggccggcca

SEQ ID NO: 2099748 - DNA, 25 bp, Homo sapien
ccgggccggccagcctgtggagggt

SEQ ID NO: 2099749 - DNA, 25 bp, Homo sapien
agggtggtcaggtggtcacccatct

SEQ ID NO: 2099750 - DNA, 25 bp, Homo sapien
tagaacatggagtctcagctcagcc

SEQ ID NO: 2099751 - DNA, 25 bp, Homo sapien
tctgagtctacgcttgaccaggtga

SEQ ID NO: 2099752 - DNA, 25 bp, Homo sapien
agacaagtcattgccactgaggccc

SEQ ID NO: 2099753 - DNA, 25 bp, Homo sapien
ccaggtgactcgctttggctaaggg

SEQ ID NO: 2099754 - DNA, 25 bp, Homo sapien
caaccttgaaccaccagttcaagtg

SEQ ID NO: 2099755 - DNA, 25 bp, Homo sapien
ctcagcccaccaccaaccttgaacc

SEQ ID NO: 2099756 - DNA, 25 bp, Homo sapien
gcccaccaccaaccttgaaccacca

SEQ ID NO: 2099757 - DNA, 25 bp, Homo sapien
aaccttgaaccaccagttcaagtga

SEQ ID NO: 2099758 - DNA, 25 bp, Homo sapien
cggagacgagtactgccctttggca

SEQ ID NO: 2099759 - DNA, 25 bp, Homo sapien
aggcagcgctcctggccggcgaaaa

SEQ ID NO: 2099760 - DNA, 25 bp, Homo sapien
gagcgcacttccactagtgtcctgg

SEQ ID NO: 2099761 - DNA, 25 bp, Homo sapien
cgacgtgagtcgctgtgtggaccta

SEQ ID NO: 2099762 - DNA, 25 bp, Homo sapien
aaaagagccgaacgctcggacaggc

SEQ ID NO: 2099763 - DNA, 25 bp, Homo sapien
tcagcaaacgcaaaagagccgaacg

SEQ ID NO: 2099764 - DNA, 25 bp, Homo sapien
aggcagagggcgatgagacgtcacg

SEQ ID NO: 2099765 - DNA, 25 bp, Homo sapien
acctgggctggccaatcagcaaacg

SEQ ID NO: 2099766 - DNA, 25 bp, Homo sapien
gcgcgcgtccgctgaacgctcggac

SEQ ID NO: 2099767 - DNA, 25 bp, Homo sapien
tttacccgcgcgcagccttctcacc

SEQ ID NO: 2099768 - DNA, 25 bp, Homo sapien
tccagagatcgaggccgcgcgcgtc

SEQ ID NO: 2099769 - DNA, 25 bp, Homo sapien
ggcaggtgacgagtccagagatcga

SEQ ID NO: 2099770 - DNA, 25 bp, Homo sapien
aaccagcttcaggtcggccggcgat

SEQ ID NO: 2099771 - DNA, 25 bp, Homo sapien
tcggccggcgattgcggccggtttc

SEQ ID NO: 2099772 - DNA, 25 bp, Homo sapien
caggtcggccggcgattgcggccgg

SEQ ID NO: 2099773 - DNA, 25 bp, Homo sapien
ccagcttcaggtcggccggcgattg

SEQ ID NO: 2099774 - DNA, 25 bp, Homo sapien
aaaagcgcgtcgaactggtgccctg

SEQ ID NO: 2099775 - DNA, 25 bp, Homo sapien
aatggccccaaaactgccttctttg

SEQ ID NO: 2099776 - DNA, 25 bp, Homo sapien
gcgcgtcgaactggtgccctggtcc

SEQ ID NO: 2099777 - DNA, 25 bp, Homo sapien
caaaaagcgcgtcgaactggtgccc

SEQ ID NO: 2099778 - DNA, 25 bp, Homo sapien
gaagagtcaccccattagtaggtga

SEQ ID NO: 2099779 - DNA, 25 bp, Homo sapien
ggatgctcggagagtccctgctccc

SEQ ID NO: 2099780 - DNA, 25 bp, Homo sapien
aagcgggccgctctgcgcggatgct

SEQ ID NO: 2099781 - DNA, 25 bp, Homo sapien
caaaactgcgactgttcaactcggc

SEQ ID NO: 2099782 - DNA, 25 bp, Homo sapien
gaaaggacgctgtgttagctaccac

SEQ ID NO: 2099783 - DNA, 25 bp, Homo sapien
aaggacgtcctgtgtctcgcaggcc

SEQ ID NO: 2099784 - DNA, 25 bp, Homo sapien
tactttattcgttctactgctggaa

SEQ ID NO: 2099785 - DNA, 25 bp, Homo sapien
caatttttatgggagaggatgacaa

SEQ ID NO: 2099786 - DNA, 25 bp, Homo sapien
tgatgactaagtagttcagctgttt

SEQ ID NO: 2099787 - DNA, 25 bp, Homo sapien
tatttctacttgatgatgactaagt

SEQ ID NO: 2099788 - DNA, 25 bp, Homo sapien
ttctacttgatgatgactaagtagt

SEQ ID NO: 2099789 - DNA, 25 bp, Homo sapien
tttatttctacttgatgatgactaa

SEQ ID NO: 2099790 - DNA, 25 bp, Homo sapien
ctatacactcatagacagaatgtag

SEQ ID NO: 2099791 - DNA, 25 bp, Homo sapien
tatacactcatagacagaatgtaga

SEQ ID NO: 2099792 - DNA, 25 bp, Homo sapien
caatattgagctgtccaagtttctc

SEQ ID NO: 2099793 - DNA, 25 bp, Homo sapien
gctgcctggattacttacgtctttg

SEQ ID NO: 2099794 - DNA, 25 bp, Homo sapien
cattgtatccttagcacatctggca

SEQ ID NO: 2099795 - DNA, 25 bp, Homo sapien
tgaagcccttccacttagatgtagg

SEQ ID NO: 2099796 - DNA, 25 bp, Homo sapien
caggagcgatggtaagtatcaaagc

SEQ ID NO: 2099797 - DNA, 25 bp, Homo sapien
tgactctaccgctagaaggaaagaa

SEQ ID NO: 2099798 - DNA, 25 bp, Homo sapien
cagccgtaactctttgtattttgga

SEQ ID NO: 2099799 - DNA, 25 bp, Homo sapien
taattgccttgagctagtgtgtgct

SEQ ID NO: 2099800 - DNA, 25 bp, Homo sapien
gaggcactgttcctagtgacttgaa

SEQ ID NO: 2099801 - DNA, 25 bp, Homo sapien
atgatctcggctcggcgtgatcttg

SEQ ID NO: 2099802 - DNA, 25 bp, Homo sapien
tcactgctacctctgcctcctgggt

SEQ ID NO: 2099803 - DNA, 25 bp, Homo sapien
gatctcggctcggcgtgatcttggc

SEQ ID NO: 2099804 - DNA, 25 bp, Homo sapien
gcatgatctcggctcggcgtgatct

SEQ ID NO: 2099805 - DNA, 25 bp, Homo sapien
tccctctggttgctgacaccaatag

SEQ ID NO: 2099806 - DNA, 25 bp, Homo sapien
cagttatcttgtcccagactacagt

SEQ ID NO: 2099807 - DNA, 25 bp, Homo sapien
gctctccagttatcttgtcccagac

SEQ ID NO: 2099808 - DNA, 25 bp, Homo sapien
cacagcattgtagagaggctctcca

SEQ ID NO: 2099809 - DNA, 25 bp, Homo sapien
caaacagcaggggttataaaacaat

SEQ ID NO: 2099810 - DNA, 25 bp, Homo sapien
cccttctcagtctttaccttcatca

SEQ ID NO: 2099811 - DNA, 25 bp, Homo sapien
ctttaccttcatcaagcctatgccg

SEQ ID NO: 2099812 - DNA, 25 bp, Homo sapien
ttcatcaagcctatgccgtggccac

SEQ ID NO: 2099813 - DNA, 25 bp, Homo sapien
aagcctatgccgtggccaccaatga

SEQ ID NO: 2099814 - DNA, 25 bp, Homo sapien
taagggcaattcacgctagagatgg

SEQ ID NO: 2099815 - DNA, 25 bp, Homo sapien
gaaataagggcaattcacgctagag

SEQ ID NO: 2099816 - DNA, 25 bp, Homo sapien
caattcacgctagagatggccaggt

SEQ ID NO: 2099817 - DNA, 25 bp, Homo sapien
ttcacgctagagatggccaggttca

SEQ ID NO: 2099818 - DNA, 25 bp, Homo sapien
aggaagtaccaggagctggaactga

SEQ ID NO: 2099819 - DNA, 25 bp, Homo sapien
ggaagtaccaggagctggaactgaa

SEQ ID NO: 2099820 - DNA, 25 bp, Homo sapien
gaagtaccaggagctggaactgaag

SEQ ID NO: 2099821 - DNA, 25 bp, Homo sapien
gaggaagtaccaggagctggaactg

SEQ ID NO: 2099822 - DNA, 25 bp, Homo sapien
gaatgacagatccagatctggcagc

SEQ ID NO: 2099823 - DNA, 25 bp, Homo sapien
gactaagccccttgtgtaggtaatc

SEQ ID NO: 2099824 - DNA, 25 bp, Homo sapien
ggctgggaagtgagcaatagccaga

SEQ ID NO: 2099825 - DNA, 25 bp, Homo sapien
ccaacatataggacttgggaggctg

SEQ ID NO: 2099826 - DNA, 25 bp, Homo sapien
tattcctcacttgaaagtttgcagc

SEQ ID NO: 2099827 - DNA, 25 bp, Homo sapien
cccgataatcagatggttctccaag

SEQ ID NO: 2099828 - DNA, 25 bp, Homo sapien
ggcaaggaccacttaggcactttat

SEQ ID NO: 2099829 - DNA, 25 bp, Homo sapien
gcagctgtgactgacaatagtggta

SEQ ID NO: 2099830 - DNA, 25 bp, Homo sapien
gcctgctgccctcatgaagtgggag

SEQ ID NO: 2099831 - DNA, 25 bp, Homo sapien
tctgagtctggaatcaaacagcacc

SEQ ID NO: 2099832 - DNA, 25 bp, Homo sapien
gaatatgccacatcaggagccatcc

SEQ ID NO: 2099833 - DNA, 25 bp, Homo sapien
gatgcaggtgatactgtctgagtct

SEQ ID NO: 2099834 - DNA, 25 bp, Homo sapien
aataaaataatatacatgaaaaact

SEQ ID NO: 2099835 - DNA, 25 bp, Homo sapien
aaataatatacatgaaaaacttcat

SEQ ID NO: 2099836 - DNA, 25 bp, Homo sapien
taaaataatatacatgaaaaacttc

SEQ ID NO: 2099837 - DNA, 25 bp, Homo sapien
ctatagaccaaaataaaataatata

SEQ ID NO: 2099838 - DNA, 25 bp, Homo sapien
tcctggaattcttttactaagactc

SEQ ID NO: 2099839 - DNA, 25 bp, Homo sapien
tctcaacggtagactgggttcttag

SEQ ID NO: 2099840 - DNA, 25 bp, Homo sapien
gactgggttcttagatcaagccaca

SEQ ID NO: 2099841 - DNA, 25 bp, Homo sapien
actaagactctcaacggtagactgg

SEQ ID NO: 2099842 - DNA, 25 bp, Homo sapien
agagctcgtttttcttcaacggcct

SEQ ID NO: 2099843 - DNA, 25 bp, Homo sapien
tgtcaaggagccaacgaagtttcac

SEQ ID NO: 2099844 - DNA, 25 bp, Homo sapien
tgaagtaagtgctaagtggaaggcc

SEQ ID NO: 2099845 - DNA, 25 bp, Homo sapien
tcaatagtcccaaaaagagctcgtt

SEQ ID NO: 2099846 - DNA, 25 bp, Homo sapien
atgttgaaaagcatagtcctacttg

SEQ ID NO: 2099847 - DNA, 25 bp, Homo sapien
tctgtacagtggacacctccattga

SEQ ID NO: 2099848 - DNA, 25 bp, Homo sapien
tgttgaaaagcatagtcctacttgc

SEQ ID NO: 2099849 - DNA, 25 bp, Homo sapien
tgttacatctgtacagtggacacct

SEQ ID NO: 2099850 - DNA, 25 bp, Homo sapien
attaggccatagatctcagaagaac

SEQ ID NO: 2099851 - DNA, 25 bp, Homo sapien
tagataagcagtgactatggcttcc

SEQ ID NO: 2099852 - DNA, 25 bp, Homo sapien
tccttaagaaattctatgttgcctt

SEQ ID NO: 2099853 - DNA, 25 bp, Homo sapien
ttgacccaagtcagtttgcagacag

SEQ ID NO: 2099854 - DNA, 25 bp, Homo sapien
tcaagctttatccagagcacttagt

SEQ ID NO: 2099855 - DNA, 25 bp, Homo sapien
gtgcatttccaactaactggtctgg

SEQ ID NO: 2099856 - DNA, 25 bp, Homo sapien
aattgccctattatggtaaagccca

SEQ ID NO: 2099857 - DNA, 25 bp, Homo sapien
aaagcccaaagcacatcacagttgt

SEQ ID NO: 2099858 - DNA, 25 bp, Homo sapien
gagcatccttgatgaagcatgcaga

SEQ ID NO: 2099859 - DNA, 25 bp, Homo sapien
ttttggctctactaacatagctgca

SEQ ID NO: 2099860 - DNA, 25 bp, Homo sapien
gtattaatctactagcaggctgttg

SEQ ID NO: 2099861 - DNA, 25 bp, Homo sapien
acaagtagcaatgtgccagaggatg

SEQ ID NO: 2099862 - DNA, 25 bp, Homo sapien
cataaaacgttagactgggagccag

SEQ ID NO: 2099863 - DNA, 25 bp, Homo sapien
ttggcacaccttccaaggccccagc

SEQ ID NO: 2099864 - DNA, 25 bp, Homo sapien
cccagatattggcacaccttccaag

SEQ ID NO: 2099865 - DNA, 25 bp, Homo sapien
ccagatattggcacaccttccaagg

SEQ ID NO: 2099866 - DNA, 25 bp, Homo sapien
gcacaccttccaaggccccagcttt

SEQ ID NO: 2099867 - DNA, 25 bp, Homo sapien
aagattctcaatggcccacagtatg

SEQ ID NO: 2099868 - DNA, 25 bp, Homo sapien
tttaaaaagaggcacactgatgaac

SEQ ID NO: 2099869 - DNA, 25 bp, Homo sapien
ctgatgaactaagaggaggaaagcc

SEQ ID NO: 2099870 - DNA, 25 bp, Homo sapien
ggagacacttggtgatgaaacttac

SEQ ID NO: 2099871 - DNA, 25 bp, Homo sapien
atttttggcttgtccaatctggaag

SEQ ID NO: 2099872 - DNA, 25 bp, Homo sapien
atgcagcagactggtcccctaaaca

SEQ ID NO: 2099873 - DNA, 25 bp, Homo sapien
ttggcttgtccaatctggaagcaca

SEQ ID NO: 2099874 - DNA, 25 bp, Homo sapien
tggaagcacatttgtcccaccaatg

SEQ ID NO: 2099875 - DNA, 25 bp, Homo sapien
ttacatagtaagaaacatcctgttc

SEQ ID NO: 2099876 - DNA, 25 bp, Homo sapien
cttatggcctgtattacatagtaag

SEQ ID NO: 2099877 - DNA, 25 bp, Homo sapien
ttatggcctgtattacatagtaaga

SEQ ID NO: 2099878 - DNA, 25 bp, Homo sapien
gtattacatagtaagaaacatcctg

SEQ ID NO: 2099879 - DNA, 25 bp, Homo sapien
gtctctgccaagtttgtaagccact

SEQ ID NO: 2099880 - DNA, 25 bp, Homo sapien
aatatactggtttgtctctgccaag

SEQ ID NO: 2099881 - DNA, 25 bp, Homo sapien
ttccaaagcataatatactggtttg

SEQ ID NO: 2099882 - DNA, 25 bp, Homo sapien
cactgtggtgagaaggccatgatca

SEQ ID NO: 2099883 - DNA, 25 bp, Homo sapien
taattccaagattgtctcttagcca

SEQ ID NO: 2099884 - DNA, 25 bp, Homo sapien
ataattccaagattgtctcttagcc

SEQ ID NO: 2099885 - DNA, 25 bp, Homo sapien
tataattccaagattgtctcttagc

SEQ ID NO: 2099886 - DNA, 25 bp, Homo sapien
tgggctcccaataaggtgcatataa

SEQ ID NO: 2099887 - DNA, 25 bp, Homo sapien
gctcccaataaggtgcatataaccc

SEQ ID NO: 2099888 - DNA, 25 bp, Homo sapien
ctgggctcccaataaggtgcatata

SEQ ID NO: 2099889 - DNA, 25 bp, Homo sapien
gggctcccaataaggtgcatataac

SEQ ID NO: 2099890 - DNA, 25 bp, Homo sapien
gcttctaatgcagcaaaagcaatat

SEQ ID NO: 2099891 - DNA, 25 bp, Homo sapien
agcttctaatgcagcaaaagcaata

SEQ ID NO: 2099892 - DNA, 25 bp, Homo sapien
cttctaatgcagcaaaagcaatatg

SEQ ID NO: 2099893 - DNA, 25 bp, Homo sapien
ctaagtacaagaaaacaggcccata

SEQ ID NO: 2099894 - DNA, 25 bp, Homo sapien
aagtacaagaaaacaggcccatatt

SEQ ID NO: 2099895 - DNA, 25 bp, Homo sapien
caagaaaacaggcccatatttgtta

SEQ ID NO: 2099896 - DNA, 25 bp, Homo sapien
gtacaagaaaacaggcccatatttg

SEQ ID NO: 2099897 - DNA, 25 bp, Homo sapien
taaaccagtgcaattaatgttataa

SEQ ID NO: 2099898 - DNA, 25 bp, Homo sapien
taaataaaccagtgcaattaatgtt

SEQ ID NO: 2099899 - DNA, 25 bp, Homo sapien
aaccagtgcaattaatgttataaat

SEQ ID NO: 2099900 - DNA, 25 bp, Homo sapien
cttaaataaaccagtgcaattaatg

SEQ ID NO: 2099901 - DNA, 25 bp, Homo sapien
attccacagtctcgattcatggcat

SEQ ID NO: 2099902 - DNA, 25 bp, Homo sapien
ttccacagtctcgattcatggcatc

SEQ ID NO: 2099903 - DNA, 25 bp, Homo sapien
ccacagtctcgattcatggcatcca

SEQ ID NO: 2099904 - DNA, 25 bp, Homo sapien
tccacagtctcgattcatggcatcc

SEQ ID NO: 2099905 - DNA, 25 bp, Homo sapien
gacggcagacaaatcctcgggttcg

SEQ ID NO: 2099906 - DNA, 25 bp, Homo sapien
tcctcgggttcgagactccatacgc

SEQ ID NO: 2099907 - DNA, 25 bp, Homo sapien
cagacaaatcctcgggttcgagact

SEQ ID NO: 2099908 - DNA, 25 bp, Homo sapien
gggttcgagactccatacgccgact

SEQ ID NO: 2099909 - DNA, 25 bp, Homo sapien
acaaaactcccgtgcactaaggtcg

SEQ ID NO: 2099910 - DNA, 25 bp, Homo sapien
aagcccaatatgcttggcagccgaa

SEQ ID NO: 2099911 - DNA, 25 bp, Homo sapien
cgttttcacagtatatcactgaaca

SEQ ID NO: 2099912 - DNA, 25 bp, Homo sapien
aatatgcttggcagccgaatctgca

SEQ ID NO: 2099913 - DNA, 25 bp, Homo sapien
ccaaccccagcatcttaaagcaaga

SEQ ID NO: 2099914 - DNA, 25 bp, Homo sapien
cacgccccgcaggagacgtttttat

SEQ ID NO: 2099915 - DNA, 25 bp, Homo sapien
gatgttgtacacttctaagggtgct

SEQ ID NO: 2099916 - DNA, 25 bp, Homo sapien
tgcattcctctgagacagccccatg

SEQ ID NO: 2099917 - DNA, 25 bp, Homo sapien
tggagattgagttgtaacccaaccc

SEQ ID NO: 2099918 - DNA, 25 bp, Homo sapien
agattgagttgtaacccaacccatt

SEQ ID NO: 2099919 - DNA, 25 bp, Homo sapien
gagattgagttgtaacccaacccat

SEQ ID NO: 2099920 - DNA, 25 bp, Homo sapien
tctggagattgagttgtaacccaac

SEQ ID NO: 2099921 - DNA, 25 bp, Homo sapien
tactaagaaaatgtgacaataataa

SEQ ID NO: 2099922 - DNA, 25 bp, Homo sapien
taagaaaatgtgacaataataaaca

SEQ ID NO: 2099923 - DNA, 25 bp, Homo sapien
ctaagaaaatgtgacaataataaac

SEQ ID NO: 2099924 - DNA, 25 bp, Homo sapien
atactaagaaaatgtgacaataata

SEQ ID NO: 2099925 - DNA, 25 bp, Homo sapien
taccatgctactcactataaaaaag

SEQ ID NO: 2099926 - DNA, 25 bp, Homo sapien
ccttgctccgattaacattaccatg

SEQ ID NO: 2099927 - DNA, 25 bp, Homo sapien
ccaagggcagactacagaagatact

SEQ ID NO: 2099928 - DNA, 25 bp, Homo sapien
tgagatgtaccttgctccgattaac

SEQ ID NO: 2099929 - DNA, 25 bp, Homo sapien
actctgtggacatgctctggctgaa

SEQ ID NO: 2099930 - DNA, 25 bp, Homo sapien
aaattgagctatcaccaggagcagc

SEQ ID NO: 2099931 - DNA, 25 bp, Homo sapien
tatgtcaccgaagagataacctaca

SEQ ID NO: 2099932 - DNA, 25 bp, Homo sapien
gcttagagagatgcaacctgtctca

SEQ ID NO: 2099933 - DNA, 25 bp, Homo sapien
taagccacaggtctacttggagggt

SEQ ID NO: 2099934 - DNA, 25 bp, Homo sapien
attttaagccacaggtctacttgga

SEQ ID NO: 2099935 - DNA, 25 bp, Homo sapien
tttaagccacaggtctacttggagg

SEQ ID NO: 2099936 - DNA, 25 bp, Homo sapien
agccacaggtctacttggagggtca

SEQ ID NO: 2099937 - DNA, 25 bp, Homo sapien
gtagctggcccaaccttaactgtgg

SEQ ID NO: 2099938 - DNA, 25 bp, Homo sapien
cttagagggaatggagcaggatgtt

SEQ ID NO: 2099939 - DNA, 25 bp, Homo sapien
ggtagctggcccaaccttaactgtg

SEQ ID NO: 2099940 - DNA, 25 bp, Homo sapien
aaggtagctggcccaaccttaactg

SEQ ID NO: 2099941 - DNA, 25 bp, Homo sapien
gtaaggatccgaattcttcctacat

SEQ ID NO: 2099942 - DNA, 25 bp, Homo sapien
tggtaaggatccgaattcttcctac

SEQ ID NO: 2099943 - DNA, 25 bp, Homo sapien
caatggtaaggatccgaattcttcc

SEQ ID NO: 2099944 - DNA, 25 bp, Homo sapien
aatggtaaggatccgaattcttcct

SEQ ID NO: 2099945 - DNA, 25 bp, Homo sapien
gttaaaagcaaagagctgctgattt

SEQ ID NO: 2099946 - DNA, 25 bp, Homo sapien
gggctaccctcagtgtataaaatat

SEQ ID NO: 2099947 - DNA, 25 bp, Homo sapien
tacacagtggttcacttaagaccag

SEQ ID NO: 2099948 - DNA, 25 bp, Homo sapien
accgttgcccaaaaatgtatacagc

SEQ ID NO: 2099949 - DNA, 25 bp, Homo sapien
taagaccagccctgttagaaccttc

SEQ ID NO: 2099950 - DNA, 25 bp, Homo sapien
ttcagttataatgagatactaagca

SEQ ID NO: 2099951 - DNA, 25 bp, Homo sapien
gataagaaatatagttgaagtcaca

SEQ ID NO: 2099952 - DNA, 25 bp, Homo sapien
tgttttcccattcagcactcattga

SEQ ID NO: 2099953 - DNA, 25 bp, Homo sapien
agaggtaattctgtcatcccagata

SEQ ID NO: 2099954 - DNA, 25 bp, Homo sapien
caactaagttctagtctgtaaatga

SEQ ID NO: 2099955 - DNA, 25 bp, Homo sapien
ttcaactaagttctagtctgtaaat

SEQ ID NO: 2099956 - DNA, 25 bp, Homo sapien
tcaactaagttctagtctgtaaatg

SEQ ID NO: 2099957 - DNA, 25 bp, Homo sapien
actaagttctagtctgtaaatgaga

SEQ ID NO: 2099958 - DNA, 25 bp, Homo sapien
tcaaagttagccatgcaaggccctg

SEQ ID NO: 2099959 - DNA, 25 bp, Homo sapien
tgttgataatggctgctgaccttac

SEQ ID NO: 2099960 - DNA, 25 bp, Homo sapien
acaaaggattgaggtgttgcctatc

SEQ ID NO: 2099961 - DNA, 25 bp, Homo sapien
ttttgcaaatgctgagatgggacag

SEQ ID NO: 2099962 - DNA, 25 bp, Homo sapien
tgtctacatacatgacagccctgac

SEQ ID NO: 2099963 - DNA, 25 bp, Homo sapien
tacccaccgctaagcagtgccaaat

SEQ ID NO: 2099964 - DNA, 25 bp, Homo sapien
gaataaagacatgtgtacccaccgc

SEQ ID NO: 2099965 - DNA, 25 bp, Homo sapien
cagccctgactagtttgcatgttga

SEQ ID NO: 2099966 - DNA, 25 bp, Homo sapien
tccgattccgtctgctgtgagaaag

SEQ ID NO: 2099967 - DNA, 25 bp, Homo sapien
ttcaggtcagataccattttctggg

SEQ ID NO: 2099968 - DNA, 25 bp, Homo sapien
ggcacccagagttttcaggtcagat

SEQ ID NO: 2099969 - DNA, 25 bp, Homo sapien
gggaggattctctccgattccgtct

SEQ ID NO: 2099970 - DNA, 25 bp, Homo sapien
gggatgatcttgtgaagtatcttac

SEQ ID NO: 2099971 - DNA, 25 bp, Homo sapien
catacctagcccttggttagtattt

SEQ ID NO: 2099972 - DNA, 25 bp, Homo sapien
ggcatgagcagccatacctagccct

SEQ ID NO: 2099973 - DNA, 25 bp, Homo sapien
gaagtatcttactggagctctctgt

SEQ ID NO: 2099974 - DNA, 25 bp, Homo sapien
tgggctttaagatctcaggaccttt

SEQ ID NO: 2099975 - DNA, 25 bp, Homo sapien
ctcctccttggatacctcctcccct

SEQ ID NO: 2099976 - DNA, 25 bp, Homo sapien
ttgggctttaagatctcaggacctt

SEQ ID NO: 2099977 - DNA, 25 bp, Homo sapien
taggtttcctctacccttgatgact

SEQ ID NO: 2099978 - DNA, 25 bp, Homo sapien
gaggtcttaggttcagagtctgtag

SEQ ID NO: 2099979 - DNA, 25 bp, Homo sapien
agccaatgttactgcaaggtcctga

SEQ ID NO: 2099980 - DNA, 25 bp, Homo sapien
tgcaaggtcctgaagaggtcttagg

SEQ ID NO: 2099981 - DNA, 25 bp, Homo sapien
gctgaggaggcagccaatgttactg

SEQ ID NO: 2099982 - DNA, 25 bp, Homo sapien
ctagaacatgcatgaaagaacttac

SEQ ID NO: 2099983 - DNA, 25 bp, Homo sapien
tgaatgcagataggaggattctgga

SEQ ID NO: 2099984 - DNA, 25 bp, Homo sapien
actgatgaatgcagataggaggatt

SEQ ID NO: 2099985 - DNA, 25 bp, Homo sapien
tcaaattaggcagcaagagtggact

SEQ ID NO: 2099986 - DNA, 25 bp, Homo sapien
aatgcagataggaggattctggaac

SEQ ID NO: 2099987 - DNA, 25 bp, Homo sapien
ggagctggtctcaattttagtactt

SEQ ID NO: 2099988 - DNA, 25 bp, Homo sapien
gaagaaatgggaagtgtgataagca

SEQ ID NO: 2099989 - DNA, 25 bp, Homo sapien
tgatattgactttgtttggaagaga

SEQ ID NO: 2099990 - DNA, 25 bp, Homo sapien
cattttgttaaagtacattgcccct

SEQ ID NO: 2099991 - DNA, 25 bp, Homo sapien
tagaacttcagggtgcggataagag

SEQ ID NO: 2099992 - DNA, 25 bp, Homo sapien
tacagttggccaacgacaaagttgc

SEQ ID NO: 2099993 - DNA, 25 bp, Homo sapien
tcactagggtgcatcgctggaaact

SEQ ID NO: 2099994 - DNA, 25 bp, Homo sapien
agtaggttctcccatcctaaaggat

SEQ ID NO: 2099995 - DNA, 25 bp, Homo sapien
aggcaggaggatcacttgagcccag

SEQ ID NO: 2099996 - DNA, 25 bp, Homo sapien
gtagtcttggatacttgggaggctg

SEQ ID NO: 2099997 - DNA, 25 bp, Homo sapien
attgtgccactgtactccagcctgg

SEQ ID NO: 2099998 - DNA, 25 bp, Homo sapien
gagatcaaggctgcagtgagccatt

SEQ ID NO: 2099999 - DNA, 25 bp, Homo sapien
ttccaaagatgagttgtactgtggg

SEQ ID NO: 2100000 - DNA, 25 bp, Homo sapien
ccaaagatgagttgtactgtgggct

SEQ ID NO: 2100001 - DNA, 25 bp, Homo sapien
tccaaagatgagttgtactgtgggc

SEQ ID NO: 2100002 - DNA, 25 bp, Homo sapien
aggatgtctattctcaccaccttta

SEQ ID NO: 2100003 - DNA, 25 bp, Homo sapien
tcaccacctttattcaacgttgtac

SEQ ID NO: 2100004 - DNA, 25 bp, Homo sapien
ttattcaacgttgtacctggagttc

SEQ ID NO: 2100005 - DNA, 25 bp, Homo sapien
ggatgtctattctcaccacctttat

SEQ ID NO: 2100006 - DNA, 25 bp, Homo sapien
ctggcccccgatctatcttcttgag

SEQ ID NO: 2100007 - DNA, 25 bp, Homo sapien
aagttggtgaaactgctgccctggg

SEQ ID NO: 2100008 - DNA, 25 bp, Homo sapien
gagaagttggtgaaactgctgccct

SEQ ID NO: 2100009 - DNA, 25 bp, Homo sapien
gcccccgatctatcttcttgagaaa

SEQ ID NO: 2100010 - DNA, 25 bp, Homo sapien
cctactgttgaacagaagccttatc

SEQ ID NO: 2100011 - DNA, 25 bp, Homo sapien
tgactcccccagaacttaactagta

SEQ ID NO: 2100012 - DNA, 25 bp, Homo sapien
tcagtaatataaacaattaacacat

SEQ ID NO: 2100013 - DNA, 25 bp, Homo sapien
cccagccaatgtgccacttttgact

SEQ ID NO: 2100014 - DNA, 25 bp, Homo sapien
aagttggtaaaagcccacgtgctgc

SEQ ID NO: 2100015 - DNA, 25 bp, Homo sapien
aatagccaagagtgagggaggcact

SEQ ID NO: 2100016 - DNA, 25 bp, Homo sapien
caggaacaggcactgtacactcatc

SEQ ID NO: 2100017 - DNA, 25 bp, Homo sapien
gcactgtcaagaccctccaatggtt

SEQ ID NO: 2100018 - DNA, 25 bp, Homo sapien
ccttagttttccattgacactgaag

SEQ ID NO: 2100019 - DNA, 25 bp, Homo sapien
ctgaagtctttgatagggtggatgc

SEQ ID NO: 2100020 - DNA, 25 bp, Homo sapien
tgatagggtggatgctaacaaggaa

SEQ ID NO: 2100021 - DNA, 25 bp, Homo sapien
gcacccttagttttccattgacact

SEQ ID NO: 2100022 - DNA, 25 bp, Homo sapien
tcagtgacgtttgtcaatcaggcag

SEQ ID NO: 2100023 - DNA, 25 bp, Homo sapien
tgagcctctgtggaccggctttaag

SEQ ID NO: 2100024 - DNA, 25 bp, Homo sapien
ctaggcattgcggagagtgagcctc

SEQ ID NO: 2100025 - DNA, 25 bp, Homo sapien
agcctctgtggaccggctttaagcc

SEQ ID NO: 2100026 - DNA, 25 bp, Homo sapien
agagtgagcctctgtggaccggctt

SEQ ID NO: 2100027 - DNA, 25 bp, Homo sapien
tgccggaggtttgcgcagggcctgg

SEQ ID NO: 2100028 - DNA, 25 bp, Homo sapien
acggaggggacgatgcccttcctcg

SEQ ID NO: 2100029 - DNA, 25 bp, Homo sapien
tgacagcgggaactgcggggctgcc

SEQ ID NO: 2100030 - DNA, 25 bp, Homo sapien
tgtcgacttgattggccttggtccc

SEQ ID NO: 2100031 - DNA, 25 bp, Homo sapien
aagcgtttgctcaggcttccctaac

SEQ ID NO: 2100032 - DNA, 25 bp, Homo sapien
tcttcggtaactggtactgcccatt

SEQ ID NO: 2100033 - DNA, 25 bp, Homo sapien
tccgatatgggaagcgtttgctcag

SEQ ID NO: 2100034 - DNA, 25 bp, Homo sapien
gcaggcgcagtaacttcttcggtaa

SEQ ID NO: 2100035 - DNA, 25 bp, Homo sapien
gtgtgtgataggagtgaatgacccc

SEQ ID NO: 2100036 - DNA, 25 bp, Homo sapien
tgcttggtccgaaacctgaacttga

SEQ ID NO: 2100037 - DNA, 25 bp, Homo sapien
caaaatgagtggctcttgacactgg

SEQ ID NO: 2100038 - DNA, 25 bp, Homo sapien
tgaacttgaagcaggttttctacaa

SEQ ID NO: 2100039 - DNA, 25 bp, Homo sapien
ctatggttagcaagatagggtagga

SEQ ID NO: 2100040 - DNA, 25 bp, Homo sapien
cctcttcatccctggaggagataca

SEQ ID NO: 2100041 - DNA, 25 bp, Homo sapien
tcttcatccctggaggagatacagc

SEQ ID NO: 2100042 - DNA, 25 bp, Homo sapien
ggaggagatacagctatggttagca

SEQ ID NO: 2100043 - DNA, 25 bp, Homo sapien
cctatgagagccagcattcggatgc

SEQ ID NO: 2100044 - DNA, 25 bp, Homo sapien
cattcggatgccagtcacatagaag

SEQ ID NO: 2100045 - DNA, 25 bp, Homo sapien
catagaaggcattgacaaccaatag

SEQ ID NO: 2100046 - DNA, 25 bp, Homo sapien
gacaaccaatagaggacttacagca

SEQ ID NO: 2100047 - DNA, 25 bp, Homo sapien
tatctgtaggtccaacctggagaga

SEQ ID NO: 2100048 - DNA, 25 bp, Homo sapien
tttggaggcccatgtcagtatagac

SEQ ID NO: 2100049 - DNA, 25 bp, Homo sapien
tcaagatatatcaccctccagatgc

SEQ ID NO: 2100050 - DNA, 25 bp, Homo sapien
gagagcctgctatgtatccctggag

SEQ ID NO: 2100051 - DNA, 25 bp, Homo sapien
ttagataacttagaatcataccgtc

SEQ ID NO: 2100052 - DNA, 25 bp, Homo sapien
gaatcataccgtctcactttaactc

SEQ ID NO: 2100053 - DNA, 25 bp, Homo sapien
taacttagaatcataccgtctcact

SEQ ID NO: 2100054 - DNA, 25 bp, Homo sapien
ccttttagataacttagaatcatac

SEQ ID NO: 2100055 - DNA, 25 bp, Homo sapien
ttcctctccttaatggagtcatcac

SEQ ID NO: 2100056 - DNA, 25 bp, Homo sapien
tttcctctccaaatctgaactcttc

SEQ ID NO: 2100057 - DNA, 25 bp, Homo sapien
ctcttcctctccttaatggagtcat

SEQ ID NO: 2100058 - DNA, 25 bp, Homo sapien
tccaaatctgaactcttcctctcct

SEQ ID NO: 2100059 - DNA, 25 bp, Homo sapien
catcaggtagatctgcttggcgacc

SEQ ID NO: 2100060 - DNA, 25 bp, Homo sapien
ctaatgtgcatgaggccctgtgagg

SEQ ID NO: 2100061 - DNA, 25 bp, Homo sapien
tcttagaggctttcagtctcctggc

SEQ ID NO: 2100062 - DNA, 25 bp, Homo sapien
cgtactctgagggacactcactgat

SEQ ID NO: 2100063 - DNA, 25 bp, Homo sapien
ctcatctggtctcaagaatggattg

SEQ ID NO: 2100064 - DNA, 25 bp, Homo sapien
ggtccgcctggtacattctttgaag

SEQ ID NO: 2100065 - DNA, 25 bp, Homo sapien
tggccaagccctgtaggtccgcctg

SEQ ID NO: 2100066 - DNA, 25 bp, Homo sapien
ggattgaccacattccatggccaag

SEQ ID NO: 2100067 - DNA, 25 bp, Homo sapien
ccagaagtcagttacacgatcccac

SEQ ID NO: 2100068 - DNA, 25 bp, Homo sapien
gaatgccaacattcttgaccacagc

SEQ ID NO: 2100069 - DNA, 25 bp, Homo sapien
tacacctggaagtgacatacatcag

SEQ ID NO: 2100070 - DNA, 25 bp, Homo sapien
gaaatttagtttagctgcgtgccca

SEQ ID NO: 2100071 - DNA, 25 bp, Homo sapien
caaggtcaggaaacagggaatattc

SEQ ID NO: 2100072 - DNA, 25 bp, Homo sapien
cagggaatattctgcccatgttatt

SEQ ID NO: 2100073 - DNA, 25 bp, Homo sapien
tttcaaggtcaggaaacagggaata

SEQ ID NO: 2100074 - DNA, 25 bp, Homo sapien
aggtcaggaaacagggaatattctg

SEQ ID NO: 2100075 - DNA, 25 bp, Homo sapien
gcataagcacctccaaataaagcca

SEQ ID NO: 2100076 - DNA, 25 bp, Homo sapien
cacacactcaattgcataagcacct

SEQ ID NO: 2100077 - DNA, 25 bp, Homo sapien
caattgcataagcacctccaaataa

SEQ ID NO: 2100078 - DNA, 25 bp, Homo sapien
gtgcgcacacactcaattgcataag

SEQ ID NO: 2100079 - DNA, 25 bp, Homo sapien
gagactgttggtttactgcagagca

SEQ ID NO: 2100080 - DNA, 25 bp, Homo sapien
tgagttccggccaagtttagaggag

SEQ ID NO: 2100081 - DNA, 25 bp, Homo sapien
taatggaccggcagctgtcagttca

SEQ ID NO: 2100082 - DNA, 25 bp, Homo sapien
gagtgttaaaacaaagccgcttctg

SEQ ID NO: 2100083 - DNA, 25 bp, Homo sapien
tgtgagctcagagaagccagatgtg

SEQ ID NO: 2100084 - DNA, 25 bp, Homo sapien
gagttgacagaacagctgtgtgagc

SEQ ID NO: 2100085 - DNA, 25 bp, Homo sapien
ctgtgtgagctcagagaagccagat

SEQ ID NO: 2100086 - DNA, 25 bp, Homo sapien
gctcagagaagccagatgtggccat

SEQ ID NO: 2100087 - DNA, 25 bp, Homo sapien
ttactttcatggagccagaggcccc

SEQ ID NO: 2100088 - DNA, 25 bp, Homo sapien
gcttcattagggctattggcagtgc

SEQ ID NO: 2100089 - DNA, 25 bp, Homo sapien
taggtgcagctttagcagtcctgct

SEQ ID NO: 2100090 - DNA, 25 bp, Homo sapien
tgtcagcaatgcattcccctcagga

SEQ ID NO: 2100091 - DNA, 25 bp, Homo sapien
catggagccttgcaacctgttgagg

SEQ ID NO: 2100092 - DNA, 25 bp, Homo sapien
ggagccttgcaacctgttgaggcag

SEQ ID NO: 2100093 - DNA, 25 bp, Homo sapien
cagccatggagccttgcaacctgtt

SEQ ID NO: 2100094 - DNA, 25 bp, Homo sapien
agccttgcaacctgttgaggcagaa

SEQ ID NO: 2100095 - DNA, 25 bp, Homo sapien
ataatctaactccacaaaagcatgc

SEQ ID NO: 2100096 - DNA, 25 bp, Homo sapien
ctgtttttgtcagacgtttggaaga

SEQ ID NO: 2100097 - DNA, 25 bp, Homo sapien
ctttcagagaaagaacatcaggctc

SEQ ID NO: 2100098 - DNA, 25 bp, Homo sapien
tttgtcagacgtttggaagaaggaa

SEQ ID NO: 2100099 - DNA, 25 bp, Homo sapien
tcactgtttttgtcagacgtttgga

SEQ ID NO: 2100100 - DNA, 25 bp, Homo sapien
tcaatacttcaccacgtctaagaca

SEQ ID NO: 2100101 - DNA, 25 bp, Homo sapien
ttcaccacgtctaagacaactgtgt

SEQ ID NO: 2100102 - DNA, 25 bp, Homo sapien
taagacaactgtgtgtggatgactc

SEQ ID NO: 2100103 - DNA, 25 bp, Homo sapien
ggatgactctgaggagggcatttgg

SEQ ID NO: 2100104 - DNA, 25 bp, Homo sapien
ttagacacattagctctggagtgag

SEQ ID NO: 2100105 - DNA, 25 bp, Homo sapien
ctttatgtgacgctggaccttttct

SEQ ID NO: 2100106 - DNA, 25 bp, Homo sapien
ttcctgataattgtgcacacctgag

SEQ ID NO: 2100107 - DNA, 25 bp, Homo sapien
tgagttcacagcttcaccacttgtc

SEQ ID NO: 2100108 - DNA, 25 bp, Homo sapien
tctctgcgagtagttccacacaggt

SEQ ID NO: 2100109 - DNA, 25 bp, Homo sapien
tccctgtgaaggagtaggccactct

SEQ ID NO: 2100110 - DNA, 25 bp, Homo sapien
ttaactcccaagcagtagcaggacg

SEQ ID NO: 2100111 - DNA, 25 bp, Homo sapien
cagaagcccatgaactgtgtttcca

SEQ ID NO: 2100112 - DNA, 25 bp, Homo sapien
tggtctagaatggatttttcccgga

SEQ ID NO: 2100113 - DNA, 25 bp, Homo sapien
tgtctacagctccagatgtttctca

SEQ ID NO: 2100114 - DNA, 25 bp, Homo sapien
catttgagaactgtcagctgagtgg

SEQ ID NO: 2100115 - DNA, 25 bp, Homo sapien
gccaggaggaaactacaccacacta

SEQ ID NO: 2100116 - DNA, 25 bp, Homo sapien
ttcccctcatctgttctttctgttt

SEQ ID NO: 2100117 - DNA, 25 bp, Homo sapien
catctgttctttctgttttctcaaa

SEQ ID NO: 2100118 - DNA, 25 bp, Homo sapien
tgttctttctgttttctcaaatgcc

SEQ ID NO: 2100119 - DNA, 25 bp, Homo sapien
tctgttctttctgttttctcaaatg

SEQ ID NO: 2100120 - DNA, 25 bp, Homo sapien
ggaatctatgaatcaaggccagtgg

SEQ ID NO: 2100121 - DNA, 25 bp, Homo sapien
tgcctcgtaaggctcctgatatttg

SEQ ID NO: 2100122 - DNA, 25 bp, Homo sapien
aggccagtgggtctttagccattgc

SEQ ID NO: 2100123 - DNA, 25 bp, Homo sapien
gcatacagatgtaggaatctatgaa

SEQ ID NO: 2100124 - DNA, 25 bp, Homo sapien
ccttgaattcagtgttgcttaagga

SEQ ID NO: 2100125 - DNA, 25 bp, Homo sapien
taaggagcctttaatttgccatttc

SEQ ID NO: 2100126 - DNA, 25 bp, Homo sapien
tagatttgccttcgctacccttgaa

SEQ ID NO: 2100127 - DNA, 25 bp, Homo sapien
tctgcgcaaggagcttcagagccct

SEQ ID NO: 2100128 - DNA, 25 bp, Homo sapien
cgaaatgatcaggatgagcttcctt

SEQ ID NO: 2100129 - DNA, 25 bp, Homo sapien
aaatgatcaggatgagcttccttca

SEQ ID NO: 2100130 - DNA, 25 bp, Homo sapien
cttcacgaaatgatcaggatgagct

SEQ ID NO: 2100131 - DNA, 25 bp, Homo sapien
cacgaaatgatcaggatgagcttcc

SEQ ID NO: 2100132 - DNA, 25 bp, Homo sapien
gagtgtcccggaataaacctgttca

SEQ ID NO: 2100133 - DNA, 25 bp, Homo sapien
gatatccaagaccattctccaagaa

SEQ ID NO: 2100134 - DNA, 25 bp, Homo sapien
tacttgtggcacagcgataaccgct

SEQ ID NO: 2100135 - DNA, 25 bp, Homo sapien
cgctttaccctggaagatatccaag

SEQ ID NO: 2100136 - DNA, 25 bp, Homo sapien
tcgctcttactcgtagaaggaaggg

SEQ ID NO: 2100137 - DNA, 25 bp, Homo sapien
ggcgctaccttccattgcactgcaa

SEQ ID NO: 2100138 - DNA, 25 bp, Homo sapien
ggctggctgttcctaaatcgtcgct

SEQ ID NO: 2100139 - DNA, 25 bp, Homo sapien
tgcactgcaagtgccaaaaggtcaa

SEQ ID NO: 2100140 - DNA, 25 bp, Homo sapien
gctgcaggtgcgcccccggggtttc

SEQ ID NO: 2100141 - DNA, 25 bp, Homo sapien
cggctgcaggtgcgcccccggggtt

SEQ ID NO: 2100142 - DNA, 25 bp, Homo sapien
ctgcaggtgcgcccccggggtttct

SEQ ID NO: 2100143 - DNA, 25 bp, Homo sapien
tgcaggtgcgcccccggggtttctc

SEQ ID NO: 2100144 - DNA, 25 bp, Homo sapien
tgtgagtctaatcgaatacaaagcc

SEQ ID NO: 2100145 - DNA, 25 bp, Homo sapien
ggttttcacctgctgtgagtctaat

SEQ ID NO: 2100146 - DNA, 25 bp, Homo sapien
cctgctgtgagtctaatcgaataca

SEQ ID NO: 2100147 - DNA, 25 bp, Homo sapien
gagtctaatcgaatacaaagcctta

SEQ ID NO: 2100148 - DNA, 25 bp, Homo sapien
tcctagtctagagaaattataatga

SEQ ID NO: 2100149 - DNA, 25 bp, Homo sapien
ggaataagactgcaaactgtcttcc

SEQ ID NO: 2100150 - DNA, 25 bp, Homo sapien
ctgcaaactgtcttccgtcaacttc

SEQ ID NO: 2100151 - DNA, 25 bp, Homo sapien
taagactgcaaactgtcttccgtca

SEQ ID NO: 2100152 - DNA, 25 bp, Homo sapien
tatcactctgggaatagcggtcttc

SEQ ID NO: 2100153 - DNA, 25 bp, Homo sapien
tccaggactgtaggcccatagaact

SEQ ID NO: 2100154 - DNA, 25 bp, Homo sapien
taaagtggaacattgtgccctcgct

SEQ ID NO: 2100155 - DNA, 25 bp, Homo sapien
cattagcattcagggcaacaggagg

SEQ ID NO: 2100156 - DNA, 25 bp, Homo sapien
gaaactctcaactgcttttttctgt

SEQ ID NO: 2100157 - DNA, 25 bp, Homo sapien
ttctgtgataccattaactcctggg

SEQ ID NO: 2100158 - DNA, 25 bp, Homo sapien
gtcggcattcggcaaatgatcacgt

SEQ ID NO: 2100159 - DNA, 25 bp, Homo sapien
tcctggggggatgaaactgaaaagc

SEQ ID NO: 2100160 - DNA, 25 bp, Homo sapien
tccttgacggaaagataagctttcc

SEQ ID NO: 2100161 - DNA, 25 bp, Homo sapien
tctgtccttgacggaaagataagct

SEQ ID NO: 2100162 - DNA, 25 bp, Homo sapien
gctttccccttgattatcttagttg

SEQ ID NO: 2100163 - DNA, 25 bp, Homo sapien
agctttccccttgattatcttagtt

SEQ ID NO: 2100164 - DNA, 25 bp, Homo sapien
aatttgatgtacaaggttcggtgga

SEQ ID NO: 2100165 - DNA, 25 bp, Homo sapien
gcttaatgccgttcataatctgaga

SEQ ID NO: 2100166 - DNA, 25 bp, Homo sapien
aggttcggtggactttatgcacagc

SEQ ID NO: 2100167 - DNA, 25 bp, Homo sapien
gatgtacaaggttcggtggacttta

SEQ ID NO: 2100168 - DNA, 25 bp, Homo sapien
aggcccagtttcaaagcaacctcct

SEQ ID NO: 2100169 - DNA, 25 bp, Homo sapien
gcccagtttcaaagcaacctccttc

SEQ ID NO: 2100170 - DNA, 25 bp, Homo sapien
ccacaaactcttaatgtcaagacca

SEQ ID NO: 2100171 - DNA, 25 bp, Homo sapien
gaacaccaattccacaaactcttaa

SEQ ID NO: 2100172 - DNA, 25 bp, Homo sapien
ggaacaccaattccacaaactctta

SEQ ID NO: 2100173 - DNA, 25 bp, Homo sapien
ccaattccacaaactcttaatgtca

SEQ ID NO: 2100174 - DNA, 25 bp, Homo sapien
ggagcctaatttgccgtccctgaga

SEQ ID NO: 2100175 - DNA, 25 bp, Homo sapien
taattcccatatccagggagcctaa

SEQ ID NO: 2100176 - DNA, 25 bp, Homo sapien
tgattcctggtgttcacgggtttaa

SEQ ID NO: 2100177 - DNA, 25 bp, Homo sapien
tcagtgacacaatataagaatgggc

SEQ ID NO: 2100178 - DNA, 25 bp, Homo sapien
cagatgtttgttgttggctccatat

SEQ ID NO: 2100179 - DNA, 25 bp, Homo sapien
gttggctccatatctacattctttg

SEQ ID NO: 2100180 - DNA, 25 bp, Homo sapien
gatactttaccgtcttctctgattg

SEQ ID NO: 2100181 - DNA, 25 bp, Homo sapien
ttttgaagaccatgcaactaacaga

SEQ ID NO: 2100182 - DNA, 25 bp, Homo sapien
tgtaatgacggcattttcctactgc

SEQ ID NO: 2100183 - DNA, 25 bp, Homo sapien
cctactgcttccttagttgtgaaga

SEQ ID NO: 2100184 - DNA, 25 bp, Homo sapien
tcctactgcttccttagttgtgaag

SEQ ID NO: 2100185 - DNA, 25 bp, Homo sapien
agtgagtgtaatgacggcattttcc

SEQ ID NO: 2100186 - DNA, 25 bp, Homo sapien
gctgtcccttcaggtaatgaaattt

SEQ ID NO: 2100187 - DNA, 25 bp, Homo sapien
gatgactagacatgtagccccagaa

SEQ ID NO: 2100188 - DNA, 25 bp, Homo sapien
tttctactgagcaaagcacctggtt

SEQ ID NO: 2100189 - DNA, 25 bp, Homo sapien
taagtagcagacaccacagtattct

SEQ ID NO: 2100190 - DNA, 25 bp, Homo sapien
gggagccaccaatctcttagagatg

SEQ ID NO: 2100191 - DNA, 25 bp, Homo sapien
gccttttctgctcttacaccaagca

SEQ ID NO: 2100192 - DNA, 25 bp, Homo sapien
cattatcgctgcctttccagccttt

SEQ ID NO: 2100193 - DNA, 25 bp, Homo sapien
tctctgctgatagtcaggatctagg

SEQ ID NO: 2100194 - DNA, 25 bp, Homo sapien
gatgctgatcctggtcattatcgct

SEQ ID NO: 2100195 - DNA, 25 bp, Homo sapien
ctgaataggaacttgtgtgactata

SEQ ID NO: 2100196 - DNA, 25 bp, Homo sapien
ctatatgtgaactaaaagaaggaga

SEQ ID NO: 2100197 - DNA, 25 bp, Homo sapien
agagtctccctggactagcctgaat

SEQ ID NO: 2100198 - DNA, 25 bp, Homo sapien
gaaatatgcctaaacttctcatcca

SEQ ID NO: 2100199 - DNA, 25 bp, Homo sapien
ttcacatgtttctagcagggatggg

SEQ ID NO: 2100200 - DNA, 25 bp, Homo sapien
tgcttcaccttctgcttgccagttg

SEQ ID NO: 2100201 - DNA, 25 bp, Homo sapien
tttggtcttcacatgtttctagcag

SEQ ID NO: 2100202 - DNA, 25 bp, Homo sapien
ttgccagttggtttttggtcttcac

SEQ ID NO: 2100203 - DNA, 25 bp, Homo sapien
agcagactgtatgcaacggcatttt

SEQ ID NO: 2100204 - DNA, 25 bp, Homo sapien
gcagactgtatgcaacggcatttta

SEQ ID NO: 2100205 - DNA, 25 bp, Homo sapien
cagactgtatgcaacggcattttac

SEQ ID NO: 2100206 - DNA, 25 bp, Homo sapien
caagcagactgtatgcaacggcatt

SEQ ID NO: 2100207 - DNA, 25 bp, Homo sapien
ttctgaagtaaggaatctttcagca

SEQ ID NO: 2100208 - DNA, 25 bp, Homo sapien
tgaagtaaggaatctttcagcacat

SEQ ID NO: 2100209 - DNA, 25 bp, Homo sapien
aattctgaagtaaggaatctttcag

SEQ ID NO: 2100210 - DNA, 25 bp, Homo sapien
tctgaagtaaggaatctttcagcac

SEQ ID NO: 2100211 - DNA, 25 bp, Homo sapien
gcaaactgctccgtccttccacagg

SEQ ID NO: 2100212 - DNA, 25 bp, Homo sapien
gcccctggctgaatgcacccttttc

SEQ ID NO: 2100213 - DNA, 25 bp, Homo sapien
ccctggctgaatgcacccttttctc

SEQ ID NO: 2100214 - DNA, 25 bp, Homo sapien
aggtgcaaactgctccgtccttcca

SEQ ID NO: 2100215 - DNA, 25 bp, Homo sapien
ccgtgctcaaggagtttcttgttgc

SEQ ID NO: 2100216 - DNA, 25 bp, Homo sapien
ctgtccgtttgttagtgttcacttc

SEQ ID NO: 2100217 - DNA, 25 bp, Homo sapien
tcacttccgtgctcaaggagtttct

SEQ ID NO: 2100218 - DNA, 25 bp, Homo sapien
cgtttgttagtgttcacttccgtgc

SEQ ID NO: 2100219 - DNA, 25 bp, Homo sapien
tactgagaatggtgttgtcttttca

SEQ ID NO: 2100220 - DNA, 25 bp, Homo sapien
ggctaactgagtgtaagcaaacagt

SEQ ID NO: 2100221 - DNA, 25 bp, Homo sapien
gagtgtaagcaaacagttctactga

SEQ ID NO: 2100222 - DNA, 25 bp, Homo sapien
tagtagaagcttggctaactgagtg

SEQ ID NO: 2100223 - DNA, 25 bp, Homo sapien
gctttgccagcatgcatgaactgct

SEQ ID NO: 2100224 - DNA, 25 bp, Homo sapien
tggctttgccagcatgcatgaactg

SEQ ID NO: 2100225 - DNA, 25 bp, Homo sapien
ggctttgccagcatgcatgaactgc

SEQ ID NO: 2100226 - DNA, 25 bp, Homo sapien
gatcatccttaggagggaacctgta

SEQ ID NO: 2100227 - DNA, 25 bp, Homo sapien
gcattgttgtaaacagaagccacca

SEQ ID NO: 2100228 - DNA, 25 bp, Homo sapien
tatgggtcaagaatgcgaaggtcaa

SEQ ID NO: 2100229 - DNA, 25 bp, Homo sapien
gtagtgttaactgcttggcgtggca

SEQ ID NO: 2100230 - DNA, 25 bp, Homo sapien
cctttttgtcggctttgtgattgct

SEQ ID NO: 2100231 - DNA, 25 bp, Homo sapien
ttttaagattggtccaaacttggca

SEQ ID NO: 2100232 - DNA, 25 bp, Homo sapien
tgtgtcaaattcagcgtaaaagctt

SEQ ID NO: 2100233 - DNA, 25 bp, Homo sapien
cccaggctccgagttttcatttatt

SEQ ID NO: 2100234 - DNA, 25 bp, Homo sapien
gcaatttaagcctttcaccttggca

SEQ ID NO: 2100235 - DNA, 25 bp, Homo sapien
aactctggcgtactctgtgggatca

SEQ ID NO: 2100236 - DNA, 25 bp, Homo sapien
tgcaatttaagcctttcaccttggc

SEQ ID NO: 2100237 - DNA, 25 bp, Homo sapien
ttctacctggaactctggcgtactc

SEQ ID NO: 2100238 - DNA, 25 bp, Homo sapien
acagtccattagtttcatctttttc

SEQ ID NO: 2100239 - DNA, 25 bp, Homo sapien
cacagtccattagtttcatcttttt

SEQ ID NO: 2100240 - DNA, 25 bp, Homo sapien
tcacagtccattagtttcatctttt

SEQ ID NO: 2100241 - DNA, 25 bp, Homo sapien
gttggaagaactcattaccgctgcc

SEQ ID NO: 2100242 - DNA, 25 bp, Homo sapien
caagaggctagaacaatcattacgg

SEQ ID NO: 2100243 - DNA, 25 bp, Homo sapien
gatttggaacagaggcgtccccagt

SEQ ID NO: 2100244 - DNA, 25 bp, Homo sapien
gaatacacaacgctgaagaaccctg

SEQ ID NO: 2100245 - DNA, 25 bp, Homo sapien
tgtgtttgcttggaactatgccaca

SEQ ID NO: 2100246 - DNA, 25 bp, Homo sapien
tttagaagctgtgcacatttcccta

SEQ ID NO: 2100247 - DNA, 25 bp, Homo sapien
cctcagaatcggcttcatttgtgcc

SEQ ID NO: 2100248 - DNA, 25 bp, Homo sapien
tcaaacagtacataaagtttccata

SEQ ID NO: 2100249 - DNA, 25 bp, Homo sapien
aggagtcgaatttgtttccatctga

SEQ ID NO: 2100250 - DNA, 25 bp, Homo sapien
tccaggagtcgaatttgtttccatc

SEQ ID NO: 2100251 - DNA, 25 bp, Homo sapien
catccaggagtcgaatttgtttcca

SEQ ID NO: 2100252 - DNA, 25 bp, Homo sapien
tgccatccaggagtcgaatttgttt

SEQ ID NO: 2100253 - DNA, 25 bp, Homo sapien
tctttggagaaagatactcgctgca

SEQ ID NO: 2100254 - DNA, 25 bp, Homo sapien
taattattcttaactcccatacgct

SEQ ID NO: 2100255 - DNA, 25 bp, Homo sapien
ctgccttctcatggatatagtgtga

SEQ ID NO: 2100256 - DNA, 25 bp, Homo sapien
cataaagtgctttaagctctttgga

SEQ ID NO: 2100257 - DNA, 25 bp, Homo sapien
caaggtcaaggtactgtgtttttca

SEQ ID NO: 2100258 - DNA, 25 bp, Homo sapien
tttttataatgccactccatttaac

SEQ ID NO: 2100259 - DNA, 25 bp, Homo sapien
ttagaggatattatggaaatgagca

SEQ ID NO: 2100260 - DNA, 25 bp, Homo sapien
taaaatacaaggtcaaggtactgtg

SEQ ID NO: 2100261 - DNA, 25 bp, Homo sapien
atgtggctgcgatgaacagccacag

SEQ ID NO: 2100262 - DNA, 25 bp, Homo sapien
catttaaacctacaaatgtggctgc

SEQ ID NO: 2100263 - DNA, 25 bp, Homo sapien
tctgaacatttaaacctacaaatgt

SEQ ID NO: 2100264 - DNA, 25 bp, Homo sapien
taaacctacaaatgtggctgcgatg

SEQ ID NO: 2100265 - DNA, 25 bp, Homo sapien
tgcctgatatgcataaagctcctag

SEQ ID NO: 2100266 - DNA, 25 bp, Homo sapien
tatgctggaggtaaaaagagttcct

SEQ ID NO: 2100267 - DNA, 25 bp, Homo sapien
taaagaagcccatagctctatatgc

SEQ ID NO: 2100268 - DNA, 25 bp, Homo sapien
caccgtggaacctgtctgaccttga

SEQ ID NO: 2100269 - DNA, 25 bp, Homo sapien
gcgcgtttaggctggtgtggctgta

SEQ ID NO: 2100270 - DNA, 25 bp, Homo sapien
agtactaaccaggtcgaacctcact

SEQ ID NO: 2100271 - DNA, 25 bp, Homo sapien
gatcagataagagtgggcgcgttta

SEQ ID NO: 2100272 - DNA, 25 bp, Homo sapien
ggtcgaacctcacttagcttccaag

SEQ ID NO: 2100273 - DNA, 25 bp, Homo sapien
gatcagccttagctccaacttgcca

SEQ ID NO: 2100274 - DNA, 25 bp, Homo sapien
ctagttgattccaggatcagcctta

SEQ ID NO: 2100275 - DNA, 25 bp, Homo sapien
gaaacttctataggataaatcgagg

SEQ ID NO: 2100276 - DNA, 25 bp, Homo sapien
tcacaggaaacttctataggataaa

SEQ ID NO: 2100277 - DNA, 25 bp, Homo sapien
tatattctttgtctaacctttcatg

SEQ ID NO: 2100278 - DNA, 25 bp, Homo sapien
atattctttgtctaacctttcatgt

SEQ ID NO: 2100279 - DNA, 25 bp, Homo sapien
attctttgtctaacctttcatgttt

SEQ ID NO: 2100280 - DNA, 25 bp, Homo sapien
ctttgtctaacctttcatgtttctc

SEQ ID NO: 2100281 - DNA, 25 bp, Homo sapien
cagtgaccctttgaaataatatagc

SEQ ID NO: 2100282 - DNA, 25 bp, Homo sapien
acattttgccttcaaagtatacctc

SEQ ID NO: 2100283 - DNA, 25 bp, Homo sapien
tcatctgacttatacaagtggcaat

SEQ ID NO: 2100284 - DNA, 25 bp, Homo sapien
caacgtctggttcccatgaagtaac

SEQ ID NO: 2100285 - DNA, 25 bp, Homo sapien
caagtattttaagcgttcaccagaa

SEQ ID NO: 2100286 - DNA, 25 bp, Homo sapien
tgggacacctattctcaagcaacag

SEQ ID NO: 2100287 - DNA, 25 bp, Homo sapien
tataggtaccatcatgaagggaccc

SEQ ID NO: 2100288 - DNA, 25 bp, Homo sapien
gatgtagatgaaaccatatgggccc

SEQ ID NO: 2100289 - DNA, 25 bp, Homo sapien
tgccaattttatttgcttgtttatg

SEQ ID NO: 2100290 - DNA, 25 bp, Homo sapien
tttatttgcttgtttatgtgtttcc

SEQ ID NO: 2100291 - DNA, 25 bp, Homo sapien
atttgccaattttatttgcttgttt

SEQ ID NO: 2100292 - DNA, 25 bp, Homo sapien
tatttgcttgtttatgtgtttccaa

SEQ ID NO: 2100293 - DNA, 25 bp, Homo sapien
cagctctctgacagtggaagaaaag

SEQ ID NO: 2100294 - DNA, 25 bp, Homo sapien
tcagctctctgacagtggaagaaaa

SEQ ID NO: 2100295 - DNA, 25 bp, Homo sapien
aggtgaaaatgcatgtttgggtcat

SEQ ID NO: 2100296 - DNA, 25 bp, Homo sapien
taagaatacctgtgcaattttgctt

SEQ ID NO: 2100297 - DNA, 25 bp, Homo sapien
ggaaccagggattcttcttgaggcc

SEQ ID NO: 2100298 - DNA, 25 bp, Homo sapien
aaggaaccagggattcttcttgagg

SEQ ID NO: 2100299 - DNA, 25 bp, Homo sapien
aggaaccagggattcttcttgaggc

SEQ ID NO: 2100300 - DNA, 25 bp, Homo sapien
agataactgttgctcaatttcatta

SEQ ID NO: 2100301 - DNA, 25 bp, Homo sapien
cctcaagggaaaccatgggctgtac

SEQ ID NO: 2100302 - DNA, 25 bp, Homo sapien
taaatgctgtccactcacatgcact

SEQ ID NO: 2100303 - DNA, 25 bp, Homo sapien
cctcctgttcgtcttctgactctgt

SEQ ID NO: 2100304 - DNA, 25 bp, Homo sapien
catcatcatcaaaatcatcatcttc

SEQ ID NO: 2100305 - DNA, 25 bp, Homo sapien
tggcgctttttcttcagtttcctca

SEQ ID NO: 2100306 - DNA, 25 bp, Homo sapien
cagtttcctcatcatcaaaatcatc

SEQ ID NO: 2100307 - DNA, 25 bp, Homo sapien
atcatcaaaatcatcatcttcatca

SEQ ID NO: 2100308 - DNA, 25 bp, Homo sapien
aactattttcttagagagacttcct

SEQ ID NO: 2100309 - DNA, 25 bp, Homo sapien
gcctctggtcagtcatctggaagca

SEQ ID NO: 2100310 - DNA, 25 bp, Homo sapien
attttcttagagagacttcctccac

SEQ ID NO: 2100311 - DNA, 25 bp, Homo sapien
gaatagcctctggtcagtcatctgg

SEQ ID NO: 2100312 - DNA, 25 bp, Homo sapien
ctgttacagaaacgaaatcagatgg

SEQ ID NO: 2100313 - DNA, 25 bp, Homo sapien
gttacagaaacgaaatcagatggaa

SEQ ID NO: 2100314 - DNA, 25 bp, Homo sapien
tacagaaacgaaatcagatggaaaa

SEQ ID NO: 2100315 - DNA, 25 bp, Homo sapien
cagaaacgaaatcagatggaaaatt

SEQ ID NO: 2100316 - DNA, 25 bp, Homo sapien
ctgcattatcaaaacgacagccaga

SEQ ID NO: 2100317 - DNA, 25 bp, Homo sapien
cattatcaaaacgacagccagatat

SEQ ID NO: 2100318 - DNA, 25 bp, Homo sapien
tcactctgcattatcaaaacgacag

SEQ ID NO: 2100319 - DNA, 25 bp, Homo sapien
ttatcaaaacgacagccagatatca

SEQ ID NO: 2100320 - DNA, 25 bp, Homo sapien
tattttacatgtatacttttgtcta

SEQ ID NO: 2100321 - DNA, 25 bp, Homo sapien
ttttacatgtatacttttgtctacc

SEQ ID NO: 2100322 - DNA, 25 bp, Homo sapien
tacatgtatacttttgtctacccac

SEQ ID NO: 2100323 - DNA, 25 bp, Homo sapien
ttacatgtatacttttgtctaccca

SEQ ID NO: 2100324 - DNA, 25 bp, Homo sapien
taagtcgtgaccaactggtacttct

SEQ ID NO: 2100325 - DNA, 25 bp, Homo sapien
ggagactgatggttgctacaaaggt

SEQ ID NO: 2100326 - DNA, 25 bp, Homo sapien
ctacaaaggtggagtggtaagtcgt

SEQ ID NO: 2100327 - DNA, 25 bp, Homo sapien
tgtgctctggttagctgctgactgt

SEQ ID NO: 2100328 - DNA, 25 bp, Homo sapien
tggcaaaagtatagttcaagtgatt

SEQ ID NO: 2100329 - DNA, 25 bp, Homo sapien
tagttcaagtgattgggtaggaaaa

SEQ ID NO: 2100330 - DNA, 25 bp, Homo sapien
caaaagtatagttcaagtgattggg

SEQ ID NO: 2100331 - DNA, 25 bp, Homo sapien
agtatagttcaagtgattgggtagg

SEQ ID NO: 2100332 - DNA, 25 bp, Homo sapien
gcatttacagtgaaaccatgaagga

SEQ ID NO: 2100333 - DNA, 25 bp, Homo sapien
gggctgtttgataatatccttcctt

SEQ ID NO: 2100334 - DNA, 25 bp, Homo sapien
ataaacacccttcacattatgaatc

SEQ ID NO: 2100335 - DNA, 25 bp, Homo sapien
tataaacacccttcacattatgaat

SEQ ID NO: 2100336 - DNA, 25 bp, Homo sapien
taaacacccttcacattatgaatca

SEQ ID NO: 2100337 - DNA, 25 bp, Homo sapien
agggataatgtatagttcttggaaa

SEQ ID NO: 2100338 - DNA, 25 bp, Homo sapien
tggagggataatgtatagttcttgg

SEQ ID NO: 2100339 - DNA, 25 bp, Homo sapien
gagggataatgtatagttcttggaa

SEQ ID NO: 2100340 - DNA, 25 bp, Homo sapien
ggataatgtatagttcttggaaatg

SEQ ID NO: 2100341 - DNA, 25 bp, Homo sapien
aagagagctgaaggatatgttttgc

SEQ ID NO: 2100342 - DNA, 25 bp, Homo sapien
catttcccagcacaggaaccttcag

SEQ ID NO: 2100343 - DNA, 25 bp, Homo sapien
caggagaaaagagagctgaaggata

SEQ ID NO: 2100344 - DNA, 25 bp, Homo sapien
tgatttcaaacgggtagccccagga

SEQ ID NO: 2100345 - DNA, 25 bp, Homo sapien
aaatcactgtttcttttgaaagagt

SEQ ID NO: 2100346 - DNA, 25 bp, Homo sapien
cccaaatcactgtttcttttgaaag

SEQ ID NO: 2100347 - DNA, 25 bp, Homo sapien
tccacccaaatcactgtttcttttg

SEQ ID NO: 2100348 - DNA, 25 bp, Homo sapien
cttgtaagagatctctctccaccca

SEQ ID NO: 2100349 - DNA, 25 bp, Homo sapien
tattatgcaatcagccatatctcct

SEQ ID NO: 2100350 - DNA, 25 bp, Homo sapien
cctcaatagttgacagtctgcaaaa

SEQ ID NO: 2100351 - DNA, 25 bp, Homo sapien
tattctattatgcaatcagccatat

SEQ ID NO: 2100352 - DNA, 25 bp, Homo sapien
ttccaaacatgccagcgtcctcaat

SEQ ID NO: 2100353 - DNA, 25 bp, Homo sapien
gccttcaagtgtcacctttcccttg

SEQ ID NO: 2100354 - DNA, 25 bp, Homo sapien
tcgttgcttcgtactttgtctttag

SEQ ID NO: 2100355 - DNA, 25 bp, Homo sapien
tagtcaatccaaaccatcccatgca

SEQ ID NO: 2100356 - DNA, 25 bp, Homo sapien
acctttcccttgtagtcattcatgc

SEQ ID NO: 2100357 - DNA, 25 bp, Homo sapien
agatcttctagaaccctctccactt

SEQ ID NO: 2100358 - DNA, 25 bp, Homo sapien
aaggcagaagaaggcatgtatgctg

SEQ ID NO: 2100359 - DNA, 25 bp, Homo sapien
gaggaaatgccatatcttttcagct

SEQ ID NO: 2100360 - DNA, 25 bp, Homo sapien
tgagaatcggatgcttttgaaaagg

SEQ ID NO: 2100361 - DNA, 25 bp, Homo sapien
gcccggccaaattaatgactttcac

SEQ ID NO: 2100362 - DNA, 25 bp, Homo sapien
gataatattgtcaagggcagaggta

SEQ ID NO: 2100363 - DNA, 25 bp, Homo sapien
gaacatggcaatttcgaggaggtaa

SEQ ID NO: 2100364 - DNA, 25 bp, Homo sapien
taccagtatcaggacttgagctgaa

SEQ ID NO: 2100365 - DNA, 25 bp, Homo sapien
caggagctggcttggcacttcagtt

SEQ ID NO: 2100366 - DNA, 25 bp, Homo sapien
tcagctactgatagccaggagctgg

SEQ ID NO: 2100367 - DNA, 25 bp, Homo sapien
aacccagggtgatatatctgactgc

SEQ ID NO: 2100368 - DNA, 25 bp, Homo sapien
taagatgacaatcctgtagctggtc

SEQ ID NO: 2100369 - DNA, 25 bp, Homo sapien
agccgccttggccatccaaagttct

SEQ ID NO: 2100370 - DNA, 25 bp, Homo sapien
tgatccagccgccttggccatccaa

SEQ ID NO: 2100371 - DNA, 25 bp, Homo sapien
ccagccgccttggccatccaaagtt

SEQ ID NO: 2100372 - DNA, 25 bp, Homo sapien
ggtgatccagccgccttggccatcc

SEQ ID NO: 2100373 - DNA, 25 bp, Homo sapien
tttttaatagtaggcatccaacagg

SEQ ID NO: 2100374 - DNA, 25 bp, Homo sapien
catggcattgcaggtatcccttcaa

SEQ ID NO: 2100375 - DNA, 25 bp, Homo sapien
caccaacggtgtacaatagttccaa

SEQ ID NO: 2100376 - DNA, 25 bp, Homo sapien
tatccaaaagtgagattgctagatc

SEQ ID NO: 2100377 - DNA, 25 bp, Homo sapien
tgtaatgtacagagaactgaaggta

SEQ ID NO: 2100378 - DNA, 25 bp, Homo sapien
atatcagcttatggcttggcaaaca

SEQ ID NO: 2100379 - DNA, 25 bp, Homo sapien
aaatatcagcttatggcttggcaaa

SEQ ID NO: 2100380 - DNA, 25 bp, Homo sapien
aatgtacagagaactgaaggtaaaa

SEQ ID NO: 2100381 - DNA, 25 bp, Homo sapien
cttctacgaaaagtccaggttaatg

SEQ ID NO: 2100382 - DNA, 25 bp, Homo sapien
gaagctgctgaaatatgacgttctc

SEQ ID NO: 2100383 - DNA, 25 bp, Homo sapien
gactgaatttcttgttgagccggaa

SEQ ID NO: 2100384 - DNA, 25 bp, Homo sapien
ggtactttgtcattgtagaagcaag

SEQ ID NO: 2100385 - DNA, 25 bp, Homo sapien
ggtttctgttagcagatctagcagc

SEQ ID NO: 2100386 - DNA, 25 bp, Homo sapien
tgttcagtctggagctgcactcgcc

SEQ ID NO: 2100387 - DNA, 25 bp, Homo sapien
tcaaagcgggcacattactgttcag

SEQ ID NO: 2100388 - DNA, 25 bp, Homo sapien
tggcaccatcctggtagtactgagg

SEQ ID NO: 2100389 - DNA, 25 bp, Homo sapien
ttggagtatgatcttctataacacg

SEQ ID NO: 2100390 - DNA, 25 bp, Homo sapien
gtcaattttggagtatgatcttcta

SEQ ID NO: 2100391 - DNA, 25 bp, Homo sapien
gatcttctataacacggaaaatcat

SEQ ID NO: 2100392 - DNA, 25 bp, Homo sapien
gagtatgatcttctataacacggaa

SEQ ID NO: 2100393 - DNA, 25 bp, Homo sapien
gacaaactgccctcaatggtagaag

SEQ ID NO: 2100394 - DNA, 25 bp, Homo sapien
ttagctctggtctgttgtacttggc

SEQ ID NO: 2100395 - DNA, 25 bp, Homo sapien
tcgggacttgaatcacaaaaggcac

SEQ ID NO: 2100396 - DNA, 25 bp, Homo sapien
tccagcagtgctcatttctataggg

SEQ ID NO: 2100397 - DNA, 25 bp, Homo sapien
atgtgtgtgcacgtactcatgtgcc

SEQ ID NO: 2100398 - DNA, 25 bp, Homo sapien
tcttgtcaatacatggagagatgga

SEQ ID NO: 2100399 - DNA, 25 bp, Homo sapien
taagacgaatgtagtatgtctgggg

SEQ ID NO: 2100400 - DNA, 25 bp, Homo sapien
cccatcttgtcaatacatggagaga

SEQ ID NO: 2100401 - DNA, 25 bp, Homo sapien
cctttacccgtaactgccttgatca

SEQ ID NO: 2100402 - DNA, 25 bp, Homo sapien
cagctgccttcgtggtttctgcttc

SEQ ID NO: 2100403 - DNA, 25 bp, Homo sapien
gctgccttcgtggtttctgcttcat

SEQ ID NO: 2100404 - DNA, 25 bp, Homo sapien
agctgccttcgtggtttctgcttca

SEQ ID NO: 2100405 - DNA, 25 bp, Homo sapien
ttaagttaggactataccatcctgt

SEQ ID NO: 2100406 - DNA, 25 bp, Homo sapien
ggactataccatcctgtttccatcc

SEQ ID NO: 2100407 - DNA, 25 bp, Homo sapien
gtttccatccattcttgatcacaag

SEQ ID NO: 2100408 - DNA, 25 bp, Homo sapien
aatgctgtgctggattatctttact

SEQ ID NO: 2100409 - DNA, 25 bp, Homo sapien
cactagatagcaagcccaaacatgc

SEQ ID NO: 2100410 - DNA, 25 bp, Homo sapien
ttttcataggttgtcactagatagc

SEQ ID NO: 2100411 - DNA, 25 bp, Homo sapien
ggttgtcactagatagcaagcccaa

SEQ ID NO: 2100412 - DNA, 25 bp, Homo sapien
cataggttgtcactagatagcaagc

SEQ ID NO: 2100413 - DNA, 25 bp, Homo sapien
tgctaggcttggctttcagcggcag

SEQ ID NO: 2100414 - DNA, 25 bp, Homo sapien
gatctagatttggttctgcatcagg

SEQ ID NO: 2100415 - DNA, 25 bp, Homo sapien
tttgatgtgtcacgtccagaggcac

SEQ ID NO: 2100416 - DNA, 25 bp, Homo sapien
tgcatcaggctggtagttgctaggc

SEQ ID NO: 2100417 - DNA, 25 bp, Homo sapien
catggtcatgcggggtttggctgac

SEQ ID NO: 2100418 - DNA, 25 bp, Homo sapien
aatagcattaattctcatggtcatg

SEQ ID NO: 2100419 - DNA, 25 bp, Homo sapien
tagcattaattctcatggtcatgcg

SEQ ID NO: 2100420 - DNA, 25 bp, Homo sapien
gcattaattctcatggtcatgcggg

SEQ ID NO: 2100421 - DNA, 25 bp, Homo sapien
ttattgcctgacatcccctttattt

SEQ ID NO: 2100422 - DNA, 25 bp, Homo sapien
gagattctcattacgtttccatttg

SEQ ID NO: 2100423 - DNA, 25 bp, Homo sapien
cctgacatcccctttattttggcag

SEQ ID NO: 2100424 - DNA, 25 bp, Homo sapien
ctatgagattctcattacgtttcca

SEQ ID NO: 2100425 - DNA, 25 bp, Homo sapien
ggctcttgaccccacttatccaaaa

SEQ ID NO: 2100426 - DNA, 25 bp, Homo sapien
ctctctactacacctcttcttataa

SEQ ID NO: 2100427 - DNA, 25 bp, Homo sapien
cacttatccaaaattaaacctatct

SEQ ID NO: 2100428 - DNA, 25 bp, Homo sapien
tttgaatatcccacaggctcttgac

SEQ ID NO: 2100429 - DNA, 25 bp, Homo sapien
cagagcaaatcctggcatgacagga

SEQ ID NO: 2100430 - DNA, 25 bp, Homo sapien
catgacaggatgtactgggagtctc

SEQ ID NO: 2100431 - DNA, 25 bp, Homo sapien
cttccttcttgtcaggcagagcaaa

SEQ ID NO: 2100432 - DNA, 25 bp, Homo sapien
cgatagtgggaactgacaaagatgt

SEQ ID NO: 2100433 - DNA, 25 bp, Homo sapien
gagtcagtgcttttagttttgggga

SEQ ID NO: 2100434 - DNA, 25 bp, Homo sapien
tgagtcagtgcttttagttttgggg

SEQ ID NO: 2100435 - DNA, 25 bp, Homo sapien
ccagtagacgaagtagagatacaaa

SEQ ID NO: 2100436 - DNA, 25 bp, Homo sapien
cccagtagacgaagtagagatacaa

SEQ ID NO: 2100437 - DNA, 25 bp, Homo sapien
tcccagtagacgaagtagagataca

SEQ ID NO: 2100438 - DNA, 25 bp, Homo sapien
cttcccagtagacgaagtagagata

SEQ ID NO: 2100439 - DNA, 25 bp, Homo sapien
tcttattccatctggagcctatgcc

SEQ ID NO: 2100440 - DNA, 25 bp, Homo sapien
tattccatctggagcctatgccatc

SEQ ID NO: 2100441 - DNA, 25 bp, Homo sapien
tccatctggagcctatgccatcaga

SEQ ID NO: 2100442 - DNA, 25 bp, Homo sapien
catctggagcctatgccatcagaca

SEQ ID NO: 2100443 - DNA, 25 bp, Homo sapien
cgtgcacggttttatctatatgatg

SEQ ID NO: 2100444 - DNA, 25 bp, Homo sapien
tgatgttggcgtgcacggttttatc

SEQ ID NO: 2100445 - DNA, 25 bp, Homo sapien
tggcgtgcacggttttatctatatg

SEQ ID NO: 2100446 - DNA, 25 bp, Homo sapien
cacggttttatctatatgatgtgac

SEQ ID NO: 2100447 - DNA, 25 bp, Homo sapien
tccagaggttgtgtagatccatgaa

SEQ ID NO: 2100448 - DNA, 25 bp, Homo sapien
tgtcttacactagtacccttcaggg

SEQ ID NO: 2100449 - DNA, 25 bp, Homo sapien
tagtgaaactgatgccctggcttgt

SEQ ID NO: 2100450 - DNA, 25 bp, Homo sapien
catgaaggacagttatcgggtcaca

SEQ ID NO: 2100451 - DNA, 25 bp, Homo sapien
cccttgacactgtgctttttgcagc

SEQ ID NO: 2100452 - DNA, 25 bp, Homo sapien
ttgacactgtgctttttgcagctcc

SEQ ID NO: 2100453 - DNA, 25 bp, Homo sapien
gacactgtgctttttgcagctcctc

SEQ ID NO: 2100454 - DNA, 25 bp, Homo sapien
ctgtgctttttgcagctcctcatat

SEQ ID NO: 2100455 - DNA, 25 bp, Homo sapien
acactccatgtgtctctggtgatca

SEQ ID NO: 2100456 - DNA, 25 bp, Homo sapien
gatcacttggtaccacttcttttct

SEQ ID NO: 2100457 - DNA, 25 bp, Homo sapien
tctggtgatcacttggtaccacttc

SEQ ID NO: 2100458 - DNA, 25 bp, Homo sapien
tgtctctggtgatcacttggtacca

SEQ ID NO: 2100459 - DNA, 25 bp, Homo sapien
ccgtctagctttactgttgatgtca

SEQ ID NO: 2100460 - DNA, 25 bp, Homo sapien
gaggcaccttttgatccgtctagct

SEQ ID NO: 2100461 - DNA, 25 bp, Homo sapien
tgacacgggcattggaggcaccttt

SEQ ID NO: 2100462 - DNA, 25 bp, Homo sapien
agctgacgctgacacgggcattgga

SEQ ID NO: 2100463 - DNA, 25 bp, Homo sapien
tggtatgtgggccatctggctcctg

SEQ ID NO: 2100464 - DNA, 25 bp, Homo sapien
tctggctgctatacttggtatgtgg

SEQ ID NO: 2100465 - DNA, 25 bp, Homo sapien
tccagtaaggtttgcatattcacac

SEQ ID NO: 2100466 - DNA, 25 bp, Homo sapien
tgtaactctccaacagtttgctgaa

SEQ ID NO: 2100467 - DNA, 25 bp, Homo sapien
gctgacttccctaggactaaactga

SEQ ID NO: 2100468 - DNA, 25 bp, Homo sapien
tctttgcacagaagtgcaactttgt

SEQ ID NO: 2100469 - DNA, 25 bp, Homo sapien
tgattgcgggcccagtctttgcaca

SEQ ID NO: 2100470 - DNA, 25 bp, Homo sapien
cacaggagagtgtcctatgtaactc

SEQ ID NO: 2100471 - DNA, 25 bp, Homo sapien
agaggtcttaaggaggctctccagc

SEQ ID NO: 2100472 - DNA, 25 bp, Homo sapien
aagaggtcttaaggaggctctccag

SEQ ID NO: 2100473 - DNA, 25 bp, Homo sapien
gaggtcttaaggaggctctccagca

SEQ ID NO: 2100474 - DNA, 25 bp, Homo sapien
tttcaggctcttcataaataggttg

SEQ ID NO: 2100475 - DNA, 25 bp, Homo sapien
taaataggttgatgataatttcact

SEQ ID NO: 2100476 - DNA, 25 bp, Homo sapien
tagggtcatctctgccatttttatc

SEQ ID NO: 2100477 - DNA, 25 bp, Homo sapien
ttctagggtcatctctgccattttt

SEQ ID NO: 2100478 - DNA, 25 bp, Homo sapien
caatatgagctgacatggctttcca

SEQ ID NO: 2100479 - DNA, 25 bp, Homo sapien
gacatggctttccaatctggtttct

SEQ ID NO: 2100480 - DNA, 25 bp, Homo sapien
tattcaatatgagctgacatggctt

SEQ ID NO: 2100481 - DNA, 25 bp, Homo sapien
gagctgacatggctttccaatctgg

SEQ ID NO: 2100482 - DNA, 25 bp, Homo sapien
tctgtctcacgcgaggatcggccat

SEQ ID NO: 2100483 - DNA, 25 bp, Homo sapien
ttgatctgtctcacgcgaggatcgg

SEQ ID NO: 2100484 - DNA, 25 bp, Homo sapien
tgatctgtctcacgcgaggatcggc

SEQ ID NO: 2100485 - DNA, 25 bp, Homo sapien
atcttgatctgtctcacgcgaggat

SEQ ID NO: 2100486 - DNA, 25 bp, Homo sapien
tgttgttttgcctctttttcataca

SEQ ID NO: 2100487 - DNA, 25 bp, Homo sapien
tgtcataattttcaccatcttcagc

SEQ ID NO: 2100488 - DNA, 25 bp, Homo sapien
ttgatgtcataattttcaccatctt

SEQ ID NO: 2100489 - DNA, 25 bp, Homo sapien
catcttcagctctcattttttcaat

SEQ ID NO: 2100490 - DNA, 25 bp, Homo sapien
tccaacctgcgctggcaatctggga

SEQ ID NO: 2100491 - DNA, 25 bp, Homo sapien
cttccaacctgcgctggcaatctgg

SEQ ID NO: 2100492 - DNA, 25 bp, Homo sapien
ttccaacctgcgctggcaatctggg

SEQ ID NO: 2100493 - DNA, 25 bp, Homo sapien
aatggaccccaggatttaatgcaaa

SEQ ID NO: 2100494 - DNA, 25 bp, Homo sapien
ataatggattgtaaaatggacccca

SEQ ID NO: 2100495 - DNA, 25 bp, Homo sapien
atgtaaccagataaaaacaatcaca

SEQ ID NO: 2100496 - DNA, 25 bp, Homo sapien
aatatatatgtaaccagataaaaac

SEQ ID NO: 2100497 - DNA, 25 bp, Homo sapien
tttcacctgagtgattacaatagcc

SEQ ID NO: 2100498 - DNA, 25 bp, Homo sapien
taaacccctgccaaacatattttgc

SEQ ID NO: 2100499 - DNA, 25 bp, Homo sapien
tttgcacgtttgaaatattagttga

SEQ ID NO: 2100500 - DNA, 25 bp, Homo sapien
catggctgttaccttagtttatacc

SEQ ID NO: 2100501 - DNA, 25 bp, Homo sapien
ctttgcctggaatctttgtaacaag

SEQ ID NO: 2100502 - DNA, 25 bp, Homo sapien
ttattgtaattggaaccatctcttc

SEQ ID NO: 2100503 - DNA, 25 bp, Homo sapien
ttctttgcctggaatctttgtaaca

SEQ ID NO: 2100504 - DNA, 25 bp, Homo sapien
ttgattattgtaattggaaccatct

SEQ ID NO: 2100505 - DNA, 25 bp, Homo sapien
catgatacaagtagaatctgcgaac

SEQ ID NO: 2100506 - DNA, 25 bp, Homo sapien
tgatacaagtagaatctgcgaacat

SEQ ID NO: 2100507 - DNA, 25 bp, Homo sapien
catcatgatacaagtagaatctgcg

SEQ ID NO: 2100508 - DNA, 25 bp, Homo sapien
ccatcatgatacaagtagaatctgc

SEQ ID NO: 2100509 - DNA, 25 bp, Homo sapien
tcaaggatgtgttgtagggactgct

SEQ ID NO: 2100510 - DNA, 25 bp, Homo sapien
gttatcagcaacattgtcaacttca

SEQ ID NO: 2100511 - DNA, 25 bp, Homo sapien
ctgctgagtttctgtagaggtttaa

SEQ ID NO: 2100512 - DNA, 25 bp, Homo sapien
tttgagcagctgaaattattgacac

SEQ ID NO: 2100513 - DNA, 25 bp, Homo sapien
tcacagcttgaactatgccaccaag

SEQ ID NO: 2100514 - DNA, 25 bp, Homo sapien
gagattatctctaaatgcatgtaca

SEQ ID NO: 2100515 - DNA, 25 bp, Homo sapien
cgctgacattgctgagattatctct

SEQ ID NO: 2100516 - DNA, 25 bp, Homo sapien
caccaagctcgctgacattgctgag

SEQ ID NO: 2100517 - DNA, 25 bp, Homo sapien
cagcagttctgtgggtttgtcagga

SEQ ID NO: 2100518 - DNA, 25 bp, Homo sapien
aagaaggatagcgtgatactcaggc

SEQ ID NO: 2100519 - DNA, 25 bp, Homo sapien
atttcctcaagccaccaaagagttt

SEQ ID NO: 2100520 - DNA, 25 bp, Homo sapien
gctgaaacccaaactgacatgtagg

SEQ ID NO: 2100521 - DNA, 25 bp, Homo sapien
cctgtatcctgccatctccgatttc

SEQ ID NO: 2100522 - DNA, 25 bp, Homo sapien
cctgccatctccgatttcccacact

SEQ ID NO: 2100523 - DNA, 25 bp, Homo sapien
gtatcctgccatctccgatttccca

SEQ ID NO: 2100524 - DNA, 25 bp, Homo sapien
ctgccatctccgatttcccacactg

SEQ ID NO: 2100525 - DNA, 25 bp, Homo sapien
caagcgttgtttcctactacagaaa

SEQ ID NO: 2100526 - DNA, 25 bp, Homo sapien
tgtgcaaggagaaagacctaaatcg

SEQ ID NO: 2100527 - DNA, 25 bp, Homo sapien
gaacagtcctccctgaagttgtgca

SEQ ID NO: 2100528 - DNA, 25 bp, Homo sapien
cagcatctgctccatagtaggtact

SEQ ID NO: 2100529 - DNA, 25 bp, Homo sapien
aaaagtataagacagggtacctgag

SEQ ID NO: 2100530 - DNA, 25 bp, Homo sapien
aagtataagacagggtacctgaggg

SEQ ID NO: 2100531 - DNA, 25 bp, Homo sapien
gtataagacagggtacctgagggat

SEQ ID NO: 2100532 - DNA, 25 bp, Homo sapien
taaaagtataagacagggtacctga

SEQ ID NO: 2100533 - DNA, 25 bp, Homo sapien
cttttgtagtggcagccagaggcgc

SEQ ID NO: 2100534 - DNA, 25 bp, Homo sapien
tttgacaaatagctgagagttggtg

SEQ ID NO: 2100535 - DNA, 25 bp, Homo sapien
ttagctttgacaaatagctgagagt

SEQ ID NO: 2100536 - DNA, 25 bp, Homo sapien
ccagaggcgcagctgtgtggggact

SEQ ID NO: 2100537 - DNA, 25 bp, Homo sapien
ggcagcagcacactaggaagagcca

SEQ ID NO: 2100538 - DNA, 25 bp, Homo sapien
ggggcagcagcacactaggaagagc

SEQ ID NO: 2100539 - DNA, 25 bp, Homo sapien
tgaggggcagcagcacactaggaag

SEQ ID NO: 2100540 - DNA, 25 bp, Homo sapien
gaggggcagcagcacactaggaaga

SEQ ID NO: 2100541 - DNA, 25 bp, Homo sapien
caaccctccagtaaaggccagtatt

SEQ ID NO: 2100542 - DNA, 25 bp, Homo sapien
cctacagaactctctgatggagttg

SEQ ID NO: 2100543 - DNA, 25 bp, Homo sapien
cagtaaaggccagtattcctacaga

SEQ ID NO: 2100544 - DNA, 25 bp, Homo sapien
gactataagggtgagtagtaacagg

SEQ ID NO: 2100545 - DNA, 25 bp, Homo sapien
ttgttagtatagagtttggcctttc

SEQ ID NO: 2100546 - DNA, 25 bp, Homo sapien
ttctccatcccttaacgtaattctc

SEQ ID NO: 2100547 - DNA, 25 bp, Homo sapien
ccatcccttaacgtaattctcttag

SEQ ID NO: 2100548 - DNA, 25 bp, Homo sapien
aagaccaagccattgttagtataga

SEQ ID NO: 2100549 - DNA, 25 bp, Homo sapien
gggctgacatagtctatccttactt

SEQ ID NO: 2100550 - DNA, 25 bp, Homo sapien
cttccctctgtcacagttggatggg

SEQ ID NO: 2100551 - DNA, 25 bp, Homo sapien
tatattgtacaaccgtttccctcaa

SEQ ID NO: 2100552 - DNA, 25 bp, Homo sapien
gctcgctggatgcatgaacatgttg

SEQ ID NO: 2100553 - DNA, 25 bp, Homo sapien
agcttttctgtcattggtttaggca

SEQ ID NO: 2100554 - DNA, 25 bp, Homo sapien
tgaataccagataaatgtagctcgg

SEQ ID NO: 2100555 - DNA, 25 bp, Homo sapien
atgtagctcgggaaaaaaggtgaat

SEQ ID NO: 2100556 - DNA, 25 bp, Homo sapien
aggtgaattatttcatgtagcaagg

SEQ ID NO: 2100557 - DNA, 25 bp, Homo sapien
ccctttgcaagttcaaggaacaaag

SEQ ID NO: 2100558 - DNA, 25 bp, Homo sapien
cctttgcaagttcaaggaacaaaga

SEQ ID NO: 2100559 - DNA, 25 bp, Homo sapien
ccattaatgagattagttaactgtc

SEQ ID NO: 2100560 - DNA, 25 bp, Homo sapien
atgagattagttaactgtccctttg

SEQ ID NO: 2100561 - DNA, 25 bp, Homo sapien
gacccagtaatgtctcaattctttc

SEQ ID NO: 2100562 - DNA, 25 bp, Homo sapien
aattctttcccagaacaatgtggag

SEQ ID NO: 2100563 - DNA, 25 bp, Homo sapien
gctccacctctaattacaatctgcg

SEQ ID NO: 2100564 - DNA, 25 bp, Homo sapien
tggagataaccagatcataaacagc

SEQ ID NO: 2100565 - DNA, 25 bp, Homo sapien
cagtcatgggctcctcgatggcaga

SEQ ID NO: 2100566 - DNA, 25 bp, Homo sapien
catgggctcctcgatggcagatccc

SEQ ID NO: 2100567 - DNA, 25 bp, Homo sapien
gtcatgggctcctcgatggcagatc

SEQ ID NO: 2100568 - DNA, 25 bp, Homo sapien
tgggctcctcgatggcagatcccat

SEQ ID NO: 2100569 - DNA, 25 bp, Homo sapien
tgatggggccataggccatctccat

SEQ ID NO: 2100570 - DNA, 25 bp, Homo sapien
aatgatggggccataggccatctcc

SEQ ID NO: 2100571 - DNA, 25 bp, Homo sapien
tgggaatgatggggccataggccat

SEQ ID NO: 2100572 - DNA, 25 bp, Homo sapien
ggaatgatggggccataggccatct

SEQ ID NO: 2100573 - DNA, 25 bp, Homo sapien
gcttgtgtctatagtaactgagccc

SEQ ID NO: 2100574 - DNA, 25 bp, Homo sapien
gaaacctcacagtctcgtcttcctg

SEQ ID NO: 2100575 - DNA, 25 bp, Homo sapien
gtaattttgttggtagctcaggtca

SEQ ID NO: 2100576 - DNA, 25 bp, Homo sapien
actgagcccttttcgactttaggca

SEQ ID NO: 2100577 - DNA, 25 bp, Homo sapien
caggagttttcaagcctctgtgcca

SEQ ID NO: 2100578 - DNA, 25 bp, Homo sapien
aacatgccaggagttttcaagcctc

SEQ ID NO: 2100579 - DNA, 25 bp, Homo sapien
gcctctgtgccatttgcctttcccc

SEQ ID NO: 2100580 - DNA, 25 bp, Homo sapien
ccaaacatgccaggagttttcaagc

SEQ ID NO: 2100581 - DNA, 25 bp, Homo sapien
caaaacatcacatagaagtatggca

SEQ ID NO: 2100582 - DNA, 25 bp, Homo sapien
agtatggcaattgtactaaacgtat

SEQ ID NO: 2100583 - DNA, 25 bp, Homo sapien
ccctgtggctattgctccaacatca

SEQ ID NO: 2100584 - DNA, 25 bp, Homo sapien
taaacgtattgtaccattggcattt

SEQ ID NO: 2100585 - DNA, 25 bp, Homo sapien
attatgagtgtgttcttgatcaaat

SEQ ID NO: 2100586 - DNA, 25 bp, Homo sapien
tatgagtgtgttcttgatcaaatat

SEQ ID NO: 2100587 - DNA, 25 bp, Homo sapien
tgagtgtgttcttgatcaaatatgt

SEQ ID NO: 2100588 - DNA, 25 bp, Homo sapien
gagtgtgttcttgatcaaatatgtt

SEQ ID NO: 2100589 - DNA, 25 bp, Homo sapien
ctgcagagtgatgagaccacgtgaa

SEQ ID NO: 2100590 - DNA, 25 bp, Homo sapien
tgcagagtgatgagaccacgtgaag

SEQ ID NO: 2100591 - DNA, 25 bp, Homo sapien
gcagagtgatgagaccacgtgaagt

SEQ ID NO: 2100592 - DNA, 25 bp, Homo sapien
caggcaaacccttattgataaatgc

SEQ ID NO: 2100593 - DNA, 25 bp, Homo sapien
tttcttgctctaaaacagggtcagc

SEQ ID NO: 2100594 - DNA, 25 bp, Homo sapien
aagagcaggcaaacccttattgata

SEQ ID NO: 2100595 - DNA, 25 bp, Homo sapien
ggaaatgtctgccaatatttcttgc

SEQ ID NO: 2100596 - DNA, 25 bp, Homo sapien
gacccagctggtctatgatttctcg

SEQ ID NO: 2100597 - DNA, 25 bp, Homo sapien
tgatttctcgcttgattactgctct

SEQ ID NO: 2100598 - DNA, 25 bp, Homo sapien
gttttgccaagttgatgtcgaccca

SEQ ID NO: 2100599 - DNA, 25 bp, Homo sapien
aatttctctgtatcagcttgtttca

SEQ ID NO: 2100600 - DNA, 25 bp, Homo sapien
ggttaccacaccgacgttgtagcag

SEQ ID NO: 2100601 - DNA, 25 bp, Homo sapien
tatcagatagtcagagtggttacca

SEQ ID NO: 2100602 - DNA, 25 bp, Homo sapien
tcgttaaatgcaaacgctgctctgg

SEQ ID NO: 2100603 - DNA, 25 bp, Homo sapien
ggctcatgtgtttgctccgaggtat

SEQ ID NO: 2100604 - DNA, 25 bp, Homo sapien
gacattattgttccacttagttttg

SEQ ID NO: 2100605 - DNA, 25 bp, Homo sapien
cattattgttccacttagttttggt

SEQ ID NO: 2100606 - DNA, 25 bp, Homo sapien
tattgttccacttagttttggtcat

SEQ ID NO: 2100607 - DNA, 25 bp, Homo sapien
ttgacattattgttccacttagttt

SEQ ID NO: 2100608 - DNA, 25 bp, Homo sapien
gtgaagaatccatatgtttgggcat

SEQ ID NO: 2100609 - DNA, 25 bp, Homo sapien
tgtgaagaatccatatgtttgggca

SEQ ID NO: 2100610 - DNA, 25 bp, Homo sapien
ctgtgaagaatccatatgtttgggc

SEQ ID NO: 2100611 - DNA, 25 bp, Homo sapien
ctctgtgaagaatccatatgtttgg

SEQ ID NO: 2100612 - DNA, 25 bp, Homo sapien
gcatcagtcggaacagctgtagcct

SEQ ID NO: 2100613 - DNA, 25 bp, Homo sapien
cactgacggtggctacaggtgcaag

SEQ ID NO: 2100614 - DNA, 25 bp, Homo sapien
catgtatgagtcctatgagcatcag

SEQ ID NO: 2100615 - DNA, 25 bp, Homo sapien
gaaacccacaccgtcacgatttgcc

SEQ ID NO: 2100616 - DNA, 25 bp, Homo sapien
tgagaattataggtcattgttctcc

SEQ ID NO: 2100617 - DNA, 25 bp, Homo sapien
gcactaaatgagaattataggtcat

SEQ ID NO: 2100618 - DNA, 25 bp, Homo sapien
tgatatttaatactcctgtcacagt

SEQ ID NO: 2100619 - DNA, 25 bp, Homo sapien
tgggttgatatttaatactcctgtc

SEQ ID NO: 2100620 - DNA, 25 bp, Homo sapien
cgtttgtaacatgaacactttcctt

SEQ ID NO: 2100621 - DNA, 25 bp, Homo sapien
tctggtgtcacctagaactgtattg

SEQ ID NO: 2100622 - DNA, 25 bp, Homo sapien
tggcttgaaaggctctcagtgagtc

SEQ ID NO: 2100623 - DNA, 25 bp, Homo sapien
tttccttaggattgcatttaaaaga

SEQ ID NO: 2100624 - DNA, 25 bp, Homo sapien
cctgtcaatgagataagcaactgag

SEQ ID NO: 2100625 - DNA, 25 bp, Homo sapien
tgaagacaatccctgtatgagggcc

SEQ ID NO: 2100626 - DNA, 25 bp, Homo sapien
tgatgccaggcatgagttctgttcc

SEQ ID NO: 2100627 - DNA, 25 bp, Homo sapien
gctggcaacagaactcatcatattt

SEQ ID NO: 2100628 - DNA, 25 bp, Homo sapien
taccgaccatggctactgtcctctg

SEQ ID NO: 2100629 - DNA, 25 bp, Homo sapien
tcctctgtgagttcccagctgaaga

SEQ ID NO: 2100630 - DNA, 25 bp, Homo sapien
tccagttaatttttccgattgagta

SEQ ID NO: 2100631 - DNA, 25 bp, Homo sapien
gttcccagctgaagatctgtggcag

SEQ ID NO: 2100632 - DNA, 25 bp, Homo sapien
tcaccttaaatacgtgggtctgtct

SEQ ID NO: 2100633 - DNA, 25 bp, Homo sapien
ttccccacaaaatcaactaagcagt

SEQ ID NO: 2100634 - DNA, 25 bp, Homo sapien
gccaattagtgatcaatattcccca

SEQ ID NO: 2100635 - DNA, 25 bp, Homo sapien
cttttataatacatcaactcacctt

SEQ ID NO: 2100636 - DNA, 25 bp, Homo sapien
gacattgatgaaatgtgcctgtact

SEQ ID NO: 2100637 - DNA, 25 bp, Homo sapien
tggagacattgatgaaatgtgcctg

SEQ ID NO: 2100638 - DNA, 25 bp, Homo sapien
gacaatggagacattgatgaaatgt

SEQ ID NO: 2100639 - DNA, 25 bp, Homo sapien
gattcctgacaatggagacattgat

SEQ ID NO: 2100640 - DNA, 25 bp, Homo sapien
tgtatacccaggctaaaggagaagt

SEQ ID NO: 2100641 - DNA, 25 bp, Homo sapien
ctgtatacccaggctaaaggagaag

SEQ ID NO: 2100642 - DNA, 25 bp, Homo sapien
cagacaagttgctgtagtcacctat

SEQ ID NO: 2100643 - DNA, 25 bp, Homo sapien
tgttcaagacagacaagttgctgta

SEQ ID NO: 2100644 - DNA, 25 bp, Homo sapien
gttgctgtagtcacctatatctggg

SEQ ID NO: 2100645 - DNA, 25 bp, Homo sapien
gctgtagtcacctatatctgggagt

SEQ ID NO: 2100646 - DNA, 25 bp, Homo sapien
tgtgtcatggcatatagaaccatga

SEQ ID NO: 2100647 - DNA, 25 bp, Homo sapien
aatgggcatgacacagtgcattcac

SEQ ID NO: 2100648 - DNA, 25 bp, Homo sapien
tagaaccatgaatgagtaatgggca

SEQ ID NO: 2100649 - DNA, 25 bp, Homo sapien
tcagtgtgtcatggcatatagaacc

SEQ ID NO: 2100650 - DNA, 25 bp, Homo sapien
gcagtcagctccgatctaatgtgat

SEQ ID NO: 2100651 - DNA, 25 bp, Homo sapien
cagcagtcagctccgatctaatgtg

SEQ ID NO: 2100652 - DNA, 25 bp, Homo sapien
cagtcagctccgatctaatgtgatt

SEQ ID NO: 2100653 - DNA, 25 bp, Homo sapien
agtcagctccgatctaatgtgatta

SEQ ID NO: 2100654 - DNA, 25 bp, Homo sapien
acgtctgtcttgcatttgtgatttc

SEQ ID NO: 2100655 - DNA, 25 bp, Homo sapien
cgtctgtcttgcatttgtgatttca

SEQ ID NO: 2100656 - DNA, 25 bp, Homo sapien
aaacgtctgtcttgcatttgtgatt

SEQ ID NO: 2100657 - DNA, 25 bp, Homo sapien
tctgtcttgcatttgtgatttcatc

SEQ ID NO: 2100658 - DNA, 25 bp, Homo sapien
agtctgcaatggtgaagctagccat

SEQ ID NO: 2100659 - DNA, 25 bp, Homo sapien
gagtctgcaatggtgaagctagcca

SEQ ID NO: 2100660 - DNA, 25 bp, Homo sapien
cttcagagtctgcaatggtgaagct

SEQ ID NO: 2100661 - DNA, 25 bp, Homo sapien
tttcttcagagtctgcaatggtgaa

SEQ ID NO: 2100662 - DNA, 25 bp, Homo sapien
cataactcatgacctctaaaagcaa

SEQ ID NO: 2100663 - DNA, 25 bp, Homo sapien
tgtacccatgctaaaggaaaaattg

SEQ ID NO: 2100664 - DNA, 25 bp, Homo sapien
ttctcctaaggatgagtcataactc

SEQ ID NO: 2100665 - DNA, 25 bp, Homo sapien
cactgaataagcagccatctgtacc

SEQ ID NO: 2100666 - DNA, 25 bp, Homo sapien
aataccacccaatgtctactgtatc

SEQ ID NO: 2100667 - DNA, 25 bp, Homo sapien
ctattgtgataaaattcagaggtaa

SEQ ID NO: 2100668 - DNA, 25 bp, Homo sapien
tgataaaattcagaggtaagaagac

SEQ ID NO: 2100669 - DNA, 25 bp, Homo sapien
gaaaataccacccaatgtctactgt

SEQ ID NO: 2100670 - DNA, 25 bp, Homo sapien
tgcccctccttcaaactgtcctgtt

SEQ ID NO: 2100671 - DNA, 25 bp, Homo sapien
taacatcgtttgaggtactgaagat

SEQ ID NO: 2100672 - DNA, 25 bp, Homo sapien
cctactgtcccttcttgtaacatcg

SEQ ID NO: 2100673 - DNA, 25 bp, Homo sapien
gaggtactgaagatgagctattcat

SEQ ID NO: 2100674 - DNA, 25 bp, Homo sapien
caagaaatctagaggcaggcctttt

SEQ ID NO: 2100675 - DNA, 25 bp, Homo sapien
gccaccgttcagctactatttgagg

SEQ ID NO: 2100676 - DNA, 25 bp, Homo sapien
tctttctgattacaagctgacagcc

SEQ ID NO: 2100677 - DNA, 25 bp, Homo sapien
gacatttcagtgctatcaggactgg

SEQ ID NO: 2100678 - DNA, 25 bp, Homo sapien
gcagctgttaagctctctctaagga

SEQ ID NO: 2100679 - DNA, 25 bp, Homo sapien
ttggacacgcagcaaattgtggacg

SEQ ID NO: 2100680 - DNA, 25 bp, Homo sapien
tgagcccgctcctttcgcctttgga

SEQ ID NO: 2100681 - DNA, 25 bp, Homo sapien
tgtggacgttaaaatcacaggacca

SEQ ID NO: 2100682 - DNA, 25 bp, Homo sapien
accccagaaaatgccgctgaggacg

SEQ ID NO: 2100683 - DNA, 25 bp, Homo sapien
ggagaccccagaaaatgccgctgag

SEQ ID NO: 2100684 - DNA, 25 bp, Homo sapien
acgtggcgtttggttatggcacagc

SEQ ID NO: 2100685 - DNA, 25 bp, Homo sapien
tggcgtttggttatggcacagctga

SEQ ID NO: 2100686 - DNA, 25 bp, Homo sapien
ccacaatgtgaacttgataagattc

SEQ ID NO: 2100687 - DNA, 25 bp, Homo sapien
acaatgtgaacttgataagattcat

SEQ ID NO: 2100688 - DNA, 25 bp, Homo sapien
gccacaatgtgaacttgataagatt

SEQ ID NO: 2100689 - DNA, 25 bp, Homo sapien
tgccacaatgtgaacttgataagat

SEQ ID NO: 2100690 - DNA, 25 bp, Homo sapien
ttcactaaaactgcttggcttggca

SEQ ID NO: 2100691 - DNA, 25 bp, Homo sapien
tttcactaaaactgcttggcttggc

SEQ ID NO: 2100692 - DNA, 25 bp, Homo sapien
aggccacggcagacatttcactaaa

SEQ ID NO: 2100693 - DNA, 25 bp, Homo sapien
atttcactaaaactgcttggcttgg

SEQ ID NO: 2100694 - DNA, 25 bp, Homo sapien
tatgttgtaggcatcaggggtaata

SEQ ID NO: 2100695 - DNA, 25 bp, Homo sapien
tcaactgtgtagcaaaattatatgt

SEQ ID NO: 2100696 - DNA, 25 bp, Homo sapien
aattatatgttgtaggcatcagggg

SEQ ID NO: 2100697 - DNA, 25 bp, Homo sapien
actgtgtagcaaaattatatgttgt

SEQ ID NO: 2100698 - DNA, 25 bp, Homo sapien
gaatatggaccagcttcgtacccta

SEQ ID NO: 2100699 - DNA, 25 bp, Homo sapien
gctgccagtcaaccagtttcatgtt

SEQ ID NO: 2100700 - DNA, 25 bp, Homo sapien
agatctcaatccaagctgccagtca

SEQ ID NO: 2100701 - DNA, 25 bp, Homo sapien
ggatcagcttggaactttgccttca

SEQ ID NO: 2100702 - DNA, 25 bp, Homo sapien
caatatcaatgattccggatacctg

SEQ ID NO: 2100703 - DNA, 25 bp, Homo sapien
tcaatgattccggatacctgcatgc

SEQ ID NO: 2100704 - DNA, 25 bp, Homo sapien
gattccggatacctgcatgcaatgc

SEQ ID NO: 2100705 - DNA, 25 bp, Homo sapien
agaccaatatcaatgattccggata

SEQ ID NO: 2100706 - DNA, 25 bp, Homo sapien
tgttccctacttgtgctttcttaga

SEQ ID NO: 2100707 - DNA, 25 bp, Homo sapien
cttagtgttccctacttgtgctttc

SEQ ID NO: 2100708 - DNA, 25 bp, Homo sapien
tagtgttccctacttgtgctttctt

SEQ ID NO: 2100709 - DNA, 25 bp, Homo sapien
ccctacttgtgctttcttagataac

SEQ ID NO: 2100710 - DNA, 25 bp, Homo sapien
tctgccactggaaacgtccttcatg

SEQ ID NO: 2100711 - DNA, 25 bp, Homo sapien
ctaatgattttgatgcagaggagtt

SEQ ID NO: 2100712 - DNA, 25 bp, Homo sapien
tctgatagctttgactggaaaagag

SEQ ID NO: 2100713 - DNA, 25 bp, Homo sapien
aagaggcattttcatactcaaatgg

SEQ ID NO: 2100714 - DNA, 25 bp, Homo sapien
tgcagcatccacttattaagaatgg

SEQ ID NO: 2100715 - DNA, 25 bp, Homo sapien
ctaaaaatatgcagcatccacttat

SEQ ID NO: 2100716 - DNA, 25 bp, Homo sapien
aaatatgcagcatccacttattaag

SEQ ID NO: 2100717 - DNA, 25 bp, Homo sapien
tatgcagcatccacttattaagaat

SEQ ID NO: 2100718 - DNA, 25 bp, Homo sapien
gattccaactcgtaggttccacctg

SEQ ID NO: 2100719 - DNA, 25 bp, Homo sapien
caactgactccttgaggattccaac

SEQ ID NO: 2100720 - DNA, 25 bp, Homo sapien
gacttgcctaaagcatacttgtgta

SEQ ID NO: 2100721 - DNA, 25 bp, Homo sapien
tacttgtgtatgaggctagactgtg

SEQ ID NO: 2100722 - DNA, 25 bp, Homo sapien
taggaaactctgagtcacattgacc

SEQ ID NO: 2100723 - DNA, 25 bp, Homo sapien
atttacagttagattaggaaactct

SEQ ID NO: 2100724 - DNA, 25 bp, Homo sapien
gattaggaaactctgagtcacattg

SEQ ID NO: 2100725 - DNA, 25 bp, Homo sapien
ttggagaatttacagttagattagg

SEQ ID NO: 2100726 - DNA, 25 bp, Homo sapien
tggccaggctgtagctacctcaaga

SEQ ID NO: 2100727 - DNA, 25 bp, Homo sapien
tacctcaagactcaaaggaagctga

SEQ ID NO: 2100728 - DNA, 25 bp, Homo sapien
tctccgtagggctcattataaatgg

SEQ ID NO: 2100729 - DNA, 25 bp, Homo sapien
tgtatgtggttgctggcaggcctca

SEQ ID NO: 2100730 - DNA, 25 bp, Homo sapien
tagtttctgtttctcgtatctgttg

SEQ ID NO: 2100731 - DNA, 25 bp, Homo sapien
gtttctcgtatctgttgtttcaaca

SEQ ID NO: 2100732 - DNA, 25 bp, Homo sapien
tttcatatccaatggtagtttctgt

SEQ ID NO: 2100733 - DNA, 25 bp, Homo sapien
ttctgtttctcgtatctgttgtttc

SEQ ID NO: 2100734 - DNA, 25 bp, Homo sapien
aggcaattccgctggatgagaaggc

SEQ ID NO: 2100735 - DNA, 25 bp, Homo sapien
cctcacaggcaattccgctggatga

SEQ ID NO: 2100736 - DNA, 25 bp, Homo sapien
tagacccctatctactggtggtggg

SEQ ID NO: 2100737 - DNA, 25 bp, Homo sapien
tcacctagacccctatctactggtg

SEQ ID NO: 2100738 - DNA, 25 bp, Homo sapien
tctgtgggatacctttagcaaaccc

SEQ ID NO: 2100739 - DNA, 25 bp, Homo sapien
gagccagttgactgttggaagacaa

SEQ ID NO: 2100740 - DNA, 25 bp, Homo sapien
tcagtacgagaaatcccacaaagca

SEQ ID NO: 2100741 - DNA, 25 bp, Homo sapien
tgtggatgcaattactctactgagc

SEQ ID NO: 2100742 - DNA, 25 bp, Homo sapien
ggagtgtgcctatttccaatgtcga

SEQ ID NO: 2100743 - DNA, 25 bp, Homo sapien
ctgaaggctgtaaaggtgaatgtaa

SEQ ID NO: 2100744 - DNA, 25 bp, Homo sapien
aaaccagggagtgtgcctatttcca

SEQ ID NO: 2100745 - DNA, 25 bp, Homo sapien
ccaatgtcgattcctctgaaggctg

SEQ ID NO: 2100746 - DNA, 25 bp, Homo sapien
gcaagttttcttttgaatgcgtcta

SEQ ID NO: 2100747 - DNA, 25 bp, Homo sapien
tagtaatacacgcagtagacgccat

SEQ ID NO: 2100748 - DNA, 25 bp, Homo sapien
tattcaacgttctgcatcatccctt

SEQ ID NO: 2100749 - DNA, 25 bp, Homo sapien
tcccttcttgtggtgcaagttttct

SEQ ID NO: 2100750 - DNA, 25 bp, Homo sapien
cagtattcacgctctggtttccaga

SEQ ID NO: 2100751 - DNA, 25 bp, Homo sapien
tcttctcttgcgactggctcaggaa

SEQ ID NO: 2100752 - DNA, 25 bp, Homo sapien
cggctgaaacgctccagggtcacgt

SEQ ID NO: 2100753 - DNA, 25 bp, Homo sapien
cattatcagcttctgggcgtgctcc

SEQ ID NO: 2100754 - DNA, 25 bp, Homo sapien
tctttacaaaaagatagctcctgga

SEQ ID NO: 2100755 - DNA, 25 bp, Homo sapien
ctttacaaaaagatagctcctggat

SEQ ID NO: 2100756 - DNA, 25 bp, Homo sapien
cagagtgtgtatgagtccagaaatt

SEQ ID NO: 2100757 - DNA, 25 bp, Homo sapien
tcttcctggtttagttttcagagtg

SEQ ID NO: 2100758 - DNA, 25 bp, Homo sapien
gtaatatggatccagagggtagaaa

SEQ ID NO: 2100759 - DNA, 25 bp, Homo sapien
tcacaactaagcatgacatagccat

SEQ ID NO: 2100760 - DNA, 25 bp, Homo sapien
ctgtaatatggatccagagggtaga

SEQ ID NO: 2100761 - DNA, 25 bp, Homo sapien
gaaaatgtctcacaactaagcatga

SEQ ID NO: 2100762 - DNA, 25 bp, Homo sapien
aatttatagttaaggcacagtccgt

SEQ ID NO: 2100763 - DNA, 25 bp, Homo sapien
taagccttcagtatgcctacctgga

SEQ ID NO: 2100764 - DNA, 25 bp, Homo sapien
tacctggattcaccaaatttatagt

SEQ ID NO: 2100765 - DNA, 25 bp, Homo sapien
tgattttccccctaagccttcagta

SEQ ID NO: 2100766 - DNA, 25 bp, Homo sapien
caattttggcaaagttcagggtagg

SEQ ID NO: 2100767 - DNA, 25 bp, Homo sapien
aagcaccctgattatgtttgtcaag

SEQ ID NO: 2100768 - DNA, 25 bp, Homo sapien
tattgtcagggatcataaaagcacc

SEQ ID NO: 2100769 - DNA, 25 bp, Homo sapien
caagttggttactatcaattttggc

SEQ ID NO: 2100770 - DNA, 25 bp, Homo sapien
cagacctgttactgctcaatctgaa

SEQ ID NO: 2100771 - DNA, 25 bp, Homo sapien
cacagaaccagacatacatcctaga

SEQ ID NO: 2100772 - DNA, 25 bp, Homo sapien
tatgccagctctatgccagtaagaa

SEQ ID NO: 2100773 - DNA, 25 bp, Homo sapien
tatgcaaaatgtacctaggactagc

SEQ ID NO: 2100774 - DNA, 25 bp, Homo sapien
tacggatagtgtttcccatttggtc

SEQ ID NO: 2100775 - DNA, 25 bp, Homo sapien
ggacttgacactatggagagcttga

SEQ ID NO: 2100776 - DNA, 25 bp, Homo sapien
acttgacactatggagagcttgatc

SEQ ID NO: 2100777 - DNA, 25 bp, Homo sapien
tgaggacttgacactatggagagct

SEQ ID NO: 2100778 - DNA, 25 bp, Homo sapien
gaggacttgacactatggagagctt

SEQ ID NO: 2100779 - DNA, 25 bp, Homo sapien
gcaatgtatcatgcccttctcggtg

SEQ ID NO: 2100780 - DNA, 25 bp, Homo sapien
aatgtatcatgcccttctcggtgct

SEQ ID NO: 2100781 - DNA, 25 bp, Homo sapien
aaagcaatgtatcatgcccttctcg

SEQ ID NO: 2100782 - DNA, 25 bp, Homo sapien
aagcaatgtatcatgcccttctcgg

SEQ ID NO: 2100783 - DNA, 25 bp, Homo sapien
ccatgtcagggttcgatgttccacc

SEQ ID NO: 2100784 - DNA, 25 bp, Homo sapien
cagggataggatgtggccaaaacac

SEQ ID NO: 2100785 - DNA, 25 bp, Homo sapien
ctcattgaacagagtgcggagacca

SEQ ID NO: 2100786 - DNA, 25 bp, Homo sapien
gggacagggtctactatagagaaca

SEQ ID NO: 2100787 - DNA, 25 bp, Homo sapien
gaaattgtttcgcatgcacactaga

SEQ ID NO: 2100788 - DNA, 25 bp, Homo sapien
gcacactagaaactatgcacattgg

SEQ ID NO: 2100789 - DNA, 25 bp, Homo sapien
gaatcagaacctactataaagcaca

SEQ ID NO: 2100790 - DNA, 25 bp, Homo sapien
aaaaacttccgcaatggagtagaca

SEQ ID NO: 2100791 - DNA, 25 bp, Homo sapien
aaaatgaggtattcgtcccctcaag

SEQ ID NO: 2100792 - DNA, 25 bp, Homo sapien
acaatgtgtaataataccatcatga

SEQ ID NO: 2100793 - DNA, 25 bp, Homo sapien
tgaaaaatgaggtattcgtcccctc

SEQ ID NO: 2100794 - DNA, 25 bp, Homo sapien
aatgtgtaataataccatcatgaaa

SEQ ID NO: 2100795 - DNA, 25 bp, Homo sapien
tcttccccagttgttacaatcaaaa

SEQ ID NO: 2100796 - DNA, 25 bp, Homo sapien
ccaaacattgccagatatctctggg

SEQ ID NO: 2100797 - DNA, 25 bp, Homo sapien
tctctgggggttaaaactgtctctg

SEQ ID NO: 2100798 - DNA, 25 bp, Homo sapien
aactggactgtacgcaaaatgctca

SEQ ID NO: 2100799 - DNA, 25 bp, Homo sapien
tgtccttcccattaatccccttgaa

SEQ ID NO: 2100800 - DNA, 25 bp, Homo sapien
taatccccttgaatctgaaggcaga

SEQ ID NO: 2100801 - DNA, 25 bp, Homo sapien
catatcattgtcatgaacctctgat

SEQ ID NO: 2100802 - DNA, 25 bp, Homo sapien
tcatgaacctctgatgtccttccca

SEQ ID NO: 2100803 - DNA, 25 bp, Homo sapien
caaagctgtctttgacataaacatc

SEQ ID NO: 2100804 - DNA, 25 bp, Homo sapien
ctgattgatatctgacaggaagtcc

SEQ ID NO: 2100805 - DNA, 25 bp, Homo sapien
tcatatagctgaggatagagcagtc

SEQ ID NO: 2100806 - DNA, 25 bp, Homo sapien
ggaagtcctcctcatattgaaaaat

SEQ ID NO: 2100807 - DNA, 25 bp, Homo sapien
cagtcactgttttgttgggggccca

SEQ ID NO: 2100808 - DNA, 25 bp, Homo sapien
gaaccgagtaaatttacagtcactg

SEQ ID NO: 2100809 - DNA, 25 bp, Homo sapien
ttttgttgggggcccacagcaggct

SEQ ID NO: 2100810 - DNA, 25 bp, Homo sapien
caatacacagtttggaagtttaagg

SEQ ID NO: 2100811 - DNA, 25 bp, Homo sapien
cattgggaggaaggcgactgtaact

SEQ ID NO: 2100812 - DNA, 25 bp, Homo sapien
ttcttgaacacagctcgcagggtgt

SEQ ID NO: 2100813 - DNA, 25 bp, Homo sapien
tggcatcctcgacctggtgcttgaa

SEQ ID NO: 2100814 - DNA, 25 bp, Homo sapien
aagtcatgccttcgacattgggagg

SEQ ID NO: 2100815 - DNA, 25 bp, Homo sapien
ggtagaaacgtgggggatgaccatg

SEQ ID NO: 2100816 - DNA, 25 bp, Homo sapien
cggtagaaacgtgggggatgaccat

SEQ ID NO: 2100817 - DNA, 25 bp, Homo sapien
gatgacgacgccttcggctgagcct

SEQ ID NO: 2100818 - DNA, 25 bp, Homo sapien
aagggagatctgccgctgggatcca

SEQ ID NO: 2100819 - DNA, 25 bp, Homo sapien
cggctgagcctctggcgtttgtagt

SEQ ID NO: 2100820 - DNA, 25 bp, Homo sapien
cctgctacaggaacggctgggatga

SEQ ID NO: 2100821 - DNA, 25 bp, Homo sapien
gggacctcgactctagtgagaggac

SEQ ID NO: 2100822 - DNA, 25 bp, Homo sapien
cgagagaacttcgacttggagtgag

SEQ ID NO: 2100823 - DNA, 25 bp, Homo sapien
ccgagcgcgtgcgtgagcgagagaa

SEQ ID NO: 2100824 - DNA, 25 bp, Homo sapien
tgcaagagcgagtgcccgagcgcgt

SEQ ID NO: 2100825 - DNA, 25 bp, Homo sapien
cactgaagaggaattgaatttggat

SEQ ID NO: 2100826 - DNA, 25 bp, Homo sapien
gatccagaggttgatggagagtgag

SEQ ID NO: 2100827 - DNA, 25 bp, Homo sapien
gagctggacccagtcagcaaacaag

SEQ ID NO: 2100828 - DNA, 25 bp, Homo sapien
tggattttcgggtagatccagatcc

SEQ ID NO: 2100829 - DNA, 25 bp, Homo sapien
tattcacgatgcttggaggcattct

SEQ ID NO: 2100830 - DNA, 25 bp, Homo sapien
tgcttggaggcattcttggatagcc

SEQ ID NO: 2100831 - DNA, 25 bp, Homo sapien
ctattcacgatgcttggaggcattc

SEQ ID NO: 2100832 - DNA, 25 bp, Homo sapien
cacgatgcttggaggcattcttgga

SEQ ID NO: 2100833 - DNA, 25 bp, Homo sapien
agtccaaggcttcagtggacaacct

SEQ ID NO: 2100834 - DNA, 25 bp, Homo sapien
tccaaggcttcagtggacaacctca

SEQ ID NO: 2100835 - DNA, 25 bp, Homo sapien
ccaaggcttcagtggacaacctcag

SEQ ID NO: 2100836 - DNA, 25 bp, Homo sapien
gaagtccaaggcttcagtggacaac

SEQ ID NO: 2100837 - DNA, 25 bp, Homo sapien
aactaaacattgaatgctgctgcat

SEQ ID NO: 2100838 - DNA, 25 bp, Homo sapien
taggtctgtctcttgttgaagagaa

SEQ ID NO: 2100839 - DNA, 25 bp, Homo sapien
tgtgtagataaggatatatcctcct

SEQ ID NO: 2100840 - DNA, 25 bp, Homo sapien
gtgtccattgtgtagataaggatat

SEQ ID NO: 2100841 - DNA, 25 bp, Homo sapien
ctcttgcaatctccacttttctcct

SEQ ID NO: 2100842 - DNA, 25 bp, Homo sapien
ttagctcttgcaatctccacttttc

SEQ ID NO: 2100843 - DNA, 25 bp, Homo sapien
agctcttgcaatctccacttttctc

SEQ ID NO: 2100844 - DNA, 25 bp, Homo sapien
tagctcttgcaatctccacttttct

SEQ ID NO: 2100845 - DNA, 25 bp, Homo sapien
atttcctctgtcgaatggtttttca

SEQ ID NO: 2100846 - DNA, 25 bp, Homo sapien
gggtcaagtcctacagagtttggac

SEQ ID NO: 2100847 - DNA, 25 bp, Homo sapien
caggggtcaagtcctacagagtttg

SEQ ID NO: 2100848 - DNA, 25 bp, Homo sapien
ttcctctgtcgaatggtttttcaca

SEQ ID NO: 2100849 - DNA, 25 bp, Homo sapien
gccatagcaacatatctacactcgt

SEQ ID NO: 2100850 - DNA, 25 bp, Homo sapien
gtaaggactcactcttcataaccat

SEQ ID NO: 2100851 - DNA, 25 bp, Homo sapien
ttaatactcgtacaacaagccatag

SEQ ID NO: 2100852 - DNA, 25 bp, Homo sapien
tacactcgtgatgtaaggactcact

SEQ ID NO: 2100853 - DNA, 25 bp, Homo sapien
tggacttttgccaacaataacactg

SEQ ID NO: 2100854 - DNA, 25 bp, Homo sapien
gtactgacaactgaaagacctggac

SEQ ID NO: 2100855 - DNA, 25 bp, Homo sapien
acactgtagcattccgtctcctggt

SEQ ID NO: 2100856 - DNA, 25 bp, Homo sapien
catgcattgccagggagtactgaca

SEQ ID NO: 2100857 - DNA, 25 bp, Homo sapien
gaaactgtgagcttgaaaatttacc

SEQ ID NO: 2100858 - DNA, 25 bp, Homo sapien
cccaatcaagttcattgaaactgtg

SEQ ID NO: 2100859 - DNA, 25 bp, Homo sapien
gtttgcagcctggtcctttacccaa

SEQ ID NO: 2100860 - DNA, 25 bp, Homo sapien
gggtgccatcctttattgcctgaac

SEQ ID NO: 2100861 - DNA, 25 bp, Homo sapien
cgtttctatagacctgttgcggtca

SEQ ID NO: 2100862 - DNA, 25 bp, Homo sapien
tatctgcgtgggatctcgaaggcgt

SEQ ID NO: 2100863 - DNA, 25 bp, Homo sapien
tctggctttactcctgggcggcgct

SEQ ID NO: 2100864 - DNA, 25 bp, Homo sapien
gttgcggtcatgctttttgcagcag

SEQ ID NO: 2100865 - DNA, 25 bp, Homo sapien
ccttacgtttttgatggatatgaag

SEQ ID NO: 2100866 - DNA, 25 bp, Homo sapien
cttatctgcgttttcaccaatgtat

SEQ ID NO: 2100867 - DNA, 25 bp, Homo sapien
cttttttggtgacgccgccgttgat

SEQ ID NO: 2100868 - DNA, 25 bp, Homo sapien
cgccgttgattgtgagttgcctttc

SEQ ID NO: 2100869 - DNA, 25 bp, Homo sapien
tgggtcacagctgaccaccagtact

SEQ ID NO: 2100870 - DNA, 25 bp, Homo sapien
tggtgtgcatcttcctggcgctgtg

SEQ ID NO: 2100871 - DNA, 25 bp, Homo sapien
gcttggacatctggcactgcgagtc

SEQ ID NO: 2100872 - DNA, 25 bp, Homo sapien
tacctgtcgttgtgggagtcctgcc

SEQ ID NO: 2100873 - DNA, 25 bp, Homo sapien
ccgcctggcgtcctcgcctgcggcg

SEQ ID NO: 2100874 - DNA, 25 bp, Homo sapien
gcgtcctcgcctgcggcggggcgga

SEQ ID NO: 2100875 - DNA, 25 bp, Homo sapien
gcctgcggcggggcggacgacagcg

SEQ ID NO: 2100876 - DNA, 25 bp, Homo sapien
tcgcctgcggcggggcggacgacag

SEQ ID NO: 2100877 - DNA, 25 bp, Homo sapien
gtccccgcgcgtggcagctcggcgg

SEQ ID NO: 2100878 - DNA, 25 bp, Homo sapien
agagccccgagggagcgagtccccg

SEQ ID NO: 2100879 - DNA, 25 bp, Homo sapien
gccgcctccgcagacccaccttggc

SEQ ID NO: 2100880 - DNA, 25 bp, Homo sapien
gcagagccccgagggagcgagtccc

SEQ ID NO: 2100881 - DNA, 25 bp, Homo sapien
gtccggggtggaatcgacgtcgctg

SEQ ID NO: 2100882 - DNA, 25 bp, Homo sapien
tccggggtggaatcgacgtcgctgc

SEQ ID NO: 2100883 - DNA, 25 bp, Homo sapien
gggtggaatcgacgtcgctgcggct

SEQ ID NO: 2100884 - DNA, 25 bp, Homo sapien
tggaatcgacgtcgctgcggctgcc

SEQ ID NO: 2100885 - DNA, 25 bp, Homo sapien
gcgttttcagagcaaatgcccttca

SEQ ID NO: 2100886 - DNA, 25 bp, Homo sapien
tttttagcgcctgcgttttcagagc

SEQ ID NO: 2100887 - DNA, 25 bp, Homo sapien
catatttcgcaggagctctcatttc

SEQ ID NO: 2100888 - DNA, 25 bp, Homo sapien
atgcccttcataggggggcgcaaaa

SEQ ID NO: 2100889 - DNA, 25 bp, Homo sapien
attgcaggtcctgggctagatcttg

SEQ ID NO: 2100890 - DNA, 25 bp, Homo sapien
tattgcaggtcctgggctagatctt

SEQ ID NO: 2100891 - DNA, 25 bp, Homo sapien
ctattgcaggtcctgggctagatct

SEQ ID NO: 2100892 - DNA, 25 bp, Homo sapien
agcaaagaggtctaaccagtgcatg

SEQ ID NO: 2100893 - DNA, 25 bp, Homo sapien
cacagtgtatgaacaactttccagg

SEQ ID NO: 2100894 - DNA, 25 bp, Homo sapien
cagtgtatgaacaactttccaggat

SEQ ID NO: 2100895 - DNA, 25 bp, Homo sapien
cagtgcatgtctggatgtgatccca

SEQ ID NO: 2100896 - DNA, 25 bp, Homo sapien
tctgagtgatgttcatactgtcccc

SEQ ID NO: 2100897 - DNA, 25 bp, Homo sapien
gacagttcttgaccagccatctgag

SEQ ID NO: 2100898 - DNA, 25 bp, Homo sapien
actgggtgtcataatggaactcccc

SEQ ID NO: 2100899 - DNA, 25 bp, Homo sapien
taagtgaggtgccaaatagaacaga

SEQ ID NO: 2100900 - DNA, 25 bp, Homo sapien
cctttccagaatccatgctgtctat

SEQ ID NO: 2100901 - DNA, 25 bp, Homo sapien
tttccagaatccatgctgtctatgg

SEQ ID NO: 2100902 - DNA, 25 bp, Homo sapien
ccagaatccatgctgtctatggttg

SEQ ID NO: 2100903 - DNA, 25 bp, Homo sapien
gcctgcatgaactcacctgcattca

SEQ ID NO: 2100904 - DNA, 25 bp, Homo sapien
caggagttaccttaaagagctccct

SEQ ID NO: 2100905 - DNA, 25 bp, Homo sapien
gcttgctcaggagttaccttaaaga

SEQ ID NO: 2100906 - DNA, 25 bp, Homo sapien
tccctctcctgagggtacaccctgt

SEQ ID NO: 2100907 - DNA, 25 bp, Homo sapien
ttaatgagcttgctcaggagttacc

SEQ ID NO: 2100908 - DNA, 25 bp, Homo sapien
catctagctacaggagattgacccc

SEQ ID NO: 2100909 - DNA, 25 bp, Homo sapien
caaatccattgatcatctagctaca

SEQ ID NO: 2100910 - DNA, 25 bp, Homo sapien
gcatgttagatatgtctatccttca

SEQ ID NO: 2100911 - DNA, 25 bp, Homo sapien
cttatcaattgaaccatagtctgcc

SEQ ID NO: 2100912 - DNA, 25 bp, Homo sapien
caaagggttgaaatgggagatcctc

SEQ ID NO: 2100913 - DNA, 25 bp, Homo sapien
aaattgctaagtactccattaatgt

SEQ ID NO: 2100914 - DNA, 25 bp, Homo sapien
aaatgggagatcctcaataggaaaa

SEQ ID NO: 2100915 - DNA, 25 bp, Homo sapien
taagtactccattaatgtatgccat

SEQ ID NO: 2100916 - DNA, 25 bp, Homo sapien
ttccagcaaaggtagggcacaggtg

SEQ ID NO: 2100917 - DNA, 25 bp, Homo sapien
tctgaggattcactccagcacagat

SEQ ID NO: 2100918 - DNA, 25 bp, Homo sapien
ggaccaaatacgaccttgagaaagc

SEQ ID NO: 2100919 - DNA, 25 bp, Homo sapien
tgagaaagcggtacagtctggagtt

SEQ ID NO: 2100920 - DNA, 25 bp, Homo sapien
taaccctcaatgaggaactttggaa

SEQ ID NO: 2100921 - DNA, 25 bp, Homo sapien
ttaaccctcaatgaggaactttgga

SEQ ID NO: 2100922 - DNA, 25 bp, Homo sapien
agaagtcagctcatcttgtccgagg

SEQ ID NO: 2100923 - DNA, 25 bp, Homo sapien
agcatcttgaggttgacacaatctc

SEQ ID NO: 2100924 - DNA, 25 bp, Homo sapien
ctcctctgtattcccttgtacaagg

SEQ ID NO: 2100925 - DNA, 25 bp, Homo sapien
tagttattcacgaatgcggccaccc

SEQ ID NO: 2100926 - DNA, 25 bp, Homo sapien
cctggactcctctgtattcccttgt

SEQ ID NO: 2100927 - DNA, 25 bp, Homo sapien
tcttcataccatctgtgagatttct

SEQ ID NO: 2100928 - DNA, 25 bp, Homo sapien
cctgcatgcactgtctaagagttct

SEQ ID NO: 2100929 - DNA, 25 bp, Homo sapien
cataccatctgtgagatttctttac

SEQ ID NO: 2100930 - DNA, 25 bp, Homo sapien
cattcctgcaatccgtagccctgca

SEQ ID NO: 2100931 - DNA, 25 bp, Homo sapien
cattgccagtgtctgctgcagaaac

SEQ ID NO: 2100932 - DNA, 25 bp, Homo sapien
tgccagtgtctgctgcagaaaccat

SEQ ID NO: 2100933 - DNA, 25 bp, Homo sapien
tgagttatgtcattgccagtgtctg

SEQ ID NO: 2100934 - DNA, 25 bp, Homo sapien
ctgagttatgtcattgccagtgtct

SEQ ID NO: 2100935 - DNA, 25 bp, Homo sapien
actaagcatgccttgcaacatctta

SEQ ID NO: 2100936 - DNA, 25 bp, Homo sapien
tcttatgtctcagtgccaaagagga

SEQ ID NO: 2100937 - DNA, 25 bp, Homo sapien
tactgctccaaggtttgctccatta

SEQ ID NO: 2100938 - DNA, 25 bp, Homo sapien
gctggctccaggttcccagttctta

SEQ ID NO: 2100939 - DNA, 25 bp, Homo sapien
cagccttagaactcctctgaccacc

SEQ ID NO: 2100940 - DNA, 25 bp, Homo sapien
actcctctgaccaccctcttcttcc

SEQ ID NO: 2100941 - DNA, 25 bp, Homo sapien
ctctgaccaccctcttcttccccat

SEQ ID NO: 2100942 - DNA, 25 bp, Homo sapien
ctcctctgaccaccctcttcttccc

SEQ ID NO: 2100943 - DNA, 25 bp, Homo sapien
catgtggaaggcaactattgactgg

SEQ ID NO: 2100944 - DNA, 25 bp, Homo sapien
tatactcacagtggttccctctcag

SEQ ID NO: 2100945 - DNA, 25 bp, Homo sapien
tatctgccacctatgggctcctgag

SEQ ID NO: 2100946 - DNA, 25 bp, Homo sapien
tattgactggagatgtacgagactc

SEQ ID NO: 2100947 - DNA, 25 bp, Homo sapien
ctgttacctgagcacattgctgcat

SEQ ID NO: 2100948 - DNA, 25 bp, Homo sapien
tacctcacattcaaggtcattattc

SEQ ID NO: 2100949 - DNA, 25 bp, Homo sapien
tgcttacctcacattcaaggtcatt

SEQ ID NO: 2100950 - DNA, 25 bp, Homo sapien
cctcacattcaaggtcattattcat

SEQ ID NO: 2100951 - DNA, 25 bp, Homo sapien
cttacctcacattcaaggtcattat

SEQ ID NO: 2100952 - DNA, 25 bp, Homo sapien
agaagtagcaacaatcaggccaagg

SEQ ID NO: 2100953 - DNA, 25 bp, Homo sapien
aagtagcaacaatcaggccaaggtt

SEQ ID NO: 2100954 - DNA, 25 bp, Homo sapien
gaagtagcaacaatcaggccaaggt

SEQ ID NO: 2100955 - DNA, 25 bp, Homo sapien
ggattttctttgcagctgcatgtgt

SEQ ID NO: 2100956 - DNA, 25 bp, Homo sapien
tcccctcctgtaggggtaactgcag

SEQ ID NO: 2100957 - DNA, 25 bp, Homo sapien
ttttctttgcagctgcatgtgtctg

SEQ ID NO: 2100958 - DNA, 25 bp, Homo sapien
ttgccgataagaaacaaccaatgtg

SEQ ID NO: 2100959 - DNA, 25 bp, Homo sapien
caaatacagttgtgttggattccag

SEQ ID NO: 2100960 - DNA, 25 bp, Homo sapien
tctttactaggccaacaaatacagt

SEQ ID NO: 2100961 - DNA, 25 bp, Homo sapien
cgtgactgtgcatctttactaggcc

SEQ ID NO: 2100962 - DNA, 25 bp, Homo sapien
gggagatgaggcctacatcattcat

SEQ ID NO: 2100963 - DNA, 25 bp, Homo sapien
gtggccctctctgttgtgccacctc

SEQ ID NO: 2100964 - DNA, 25 bp, Homo sapien
ggtggccctctctgttgtgccacct

SEQ ID NO: 2100965 - DNA, 25 bp, Homo sapien
ccttgggaccttggccggtcctgtg

SEQ ID NO: 2100966 - DNA, 25 bp, Homo sapien
ggagtccatgccttgggaccttggc

SEQ ID NO: 2100967 - DNA, 25 bp, Homo sapien
catgccttgggaccttggccggtcc

SEQ ID NO: 2100968 - DNA, 25 bp, Homo sapien
tccatgccttgggaccttggccggt

SEQ ID NO: 2100969 - DNA, 25 bp, Homo sapien
cattcgacgagttatgggaagcacc

SEQ ID NO: 2100970 - DNA, 25 bp, Homo sapien
aacagcttttcaatgacgccaggca

SEQ ID NO: 2100971 - DNA, 25 bp, Homo sapien
ggcatccgactctcaaaaggccgcg

SEQ ID NO: 2100972 - DNA, 25 bp, Homo sapien
cactataagaatgcggtgccgcccg

SEQ ID NO: 2100973 - DNA, 25 bp, Homo sapien
tctgattgatgtttagaatgagagc

SEQ ID NO: 2100974 - DNA, 25 bp, Homo sapien
taagacatatttataagcattgggt

SEQ ID NO: 2100975 - DNA, 25 bp, Homo sapien
caaagttgtacattcacggggccag

SEQ ID NO: 2100976 - DNA, 25 bp, Homo sapien
caattaagcagtaaattgaaaacca

SEQ ID NO: 2100977 - DNA, 25 bp, Homo sapien
ccatcgtgtaaatgaggatacatcc

SEQ ID NO: 2100978 - DNA, 25 bp, Homo sapien
gaactgaacattggatgctgttgca

SEQ ID NO: 2100979 - DNA, 25 bp, Homo sapien
ggaactgaacattggatgctgttgc

SEQ ID NO: 2100980 - DNA, 25 bp, Homo sapien
agaatttgagcttcatcatatggta

SEQ ID NO: 2100981 - DNA, 25 bp, Homo sapien
gcatcacatccatagaggccaacta

SEQ ID NO: 2100982 - DNA, 25 bp, Homo sapien
atcacatccatagaggccaactata

SEQ ID NO: 2100983 - DNA, 25 bp, Homo sapien
tgggcatcacatccatagaggccaa

SEQ ID NO: 2100984 - DNA, 25 bp, Homo sapien
ggcatcacatccatagaggccaact

SEQ ID NO: 2100985 - DNA, 25 bp, Homo sapien
ctcttctccaaataagacttctccc

SEQ ID NO: 2100986 - DNA, 25 bp, Homo sapien
ctcttttctaagtggatctcttcct

SEQ ID NO: 2100987 - DNA, 25 bp, Homo sapien
caaacactcttttctaagtggatct

SEQ ID NO: 2100988 - DNA, 25 bp, Homo sapien
cttctccaaataagacttctcccat

SEQ ID NO: 2100989 - DNA, 25 bp, Homo sapien
tgcttctagttctggcccgtatttc

SEQ ID NO: 2100990 - DNA, 25 bp, Homo sapien
ttctagttctggcccgtatttccag

SEQ ID NO: 2100991 - DNA, 25 bp, Homo sapien
gcatttctggtagtaatgaatcctc

SEQ ID NO: 2100992 - DNA, 25 bp, Homo sapien
acataggcctctaatgtcttgtggc

SEQ ID NO: 2100993 - DNA, 25 bp, Homo sapien
ttttcaagaccttgtgtaaggcatt

SEQ ID NO: 2100994 - DNA, 25 bp, Homo sapien
tatttgttggtagtggcctttctat

SEQ ID NO: 2100995 - DNA, 25 bp, Homo sapien
ttcaaacaatgtcgtcaaaatggca

SEQ ID NO: 2100996 - DNA, 25 bp, Homo sapien
catttcaaacaatgtcgtcaaaatg

SEQ ID NO: 2100997 - DNA, 25 bp, Homo sapien
aacaatgtcgtcaaaatggcattct

SEQ ID NO: 2100998 - DNA, 25 bp, Homo sapien
caaacaatgtcgtcaaaatggcatt

SEQ ID NO: 2100999 - DNA, 25 bp, Homo sapien
tctgctgacctgaaccagcactcct

SEQ ID NO: 2101000 - DNA, 25 bp, Homo sapien
cttaactcctggcagagtctgggac

SEQ ID NO: 2101001 - DNA, 25 bp, Homo sapien
agcactcctcagaacaagtctcaca

SEQ ID NO: 2101002 - DNA, 25 bp, Homo sapien
ttaactcctggcagagtctgggact

SEQ ID NO: 2101003 - DNA, 25 bp, Homo sapien
tcctccataatcttggatacctgca

SEQ ID NO: 2101004 - DNA, 25 bp, Homo sapien
atacctgcacaacctctaggccctg

SEQ ID NO: 2101005 - DNA, 25 bp, Homo sapien
ctggagtgtacagggtgtctcagca

SEQ ID NO: 2101006 - DNA, 25 bp, Homo sapien
tccaggttgcgaggcattagaaaat

SEQ ID NO: 2101007 - DNA, 25 bp, Homo sapien
tctaaagaagctgtactatcctcct

SEQ ID NO: 2101008 - DNA, 25 bp, Homo sapien
gaagatgaacaggcatttcgaagac

SEQ ID NO: 2101009 - DNA, 25 bp, Homo sapien
caggttctcagtgtcttgtgaagac

SEQ ID NO: 2101010 - DNA, 25 bp, Homo sapien
ctgctggagctctcatttgactggc

SEQ ID NO: 2101011 - DNA, 25 bp, Homo sapien
tcagttctttcgtttgatatttttg

SEQ ID NO: 2101012 - DNA, 25 bp, Homo sapien
cagttctttcgtttgatatttttgc

SEQ ID NO: 2101013 - DNA, 25 bp, Homo sapien
atcagttctttcgtttgatattttt

SEQ ID NO: 2101014 - DNA, 25 bp, Homo sapien
actcagaagctctcttgaagatctc

SEQ ID NO: 2101015 - DNA, 25 bp, Homo sapien
aaattcatccttgtactcgttgatg

SEQ ID NO: 2101016 - DNA, 25 bp, Homo sapien
tactcgttgatgacaatatccagca

SEQ ID NO: 2101017 - DNA, 25 bp, Homo sapien
atgcactcagaagctctcttgaaga

SEQ ID NO: 2101018 - DNA, 25 bp, Homo sapien
tgttgacaagggagtaactgtggct

SEQ ID NO: 2101019 - DNA, 25 bp, Homo sapien
cactgagccttgcatcataggtgag

SEQ ID NO: 2101020 - DNA, 25 bp, Homo sapien
atgtcctcatcaccactgagccttg

SEQ ID NO: 2101021 - DNA, 25 bp, Homo sapien
tcaggaggccaatcttaggcatgtc

SEQ ID NO: 2101022 - DNA, 25 bp, Homo sapien
ctggcagtactccaagtacttttcc

SEQ ID NO: 2101023 - DNA, 25 bp, Homo sapien
tggcagtactccaagtacttttcct

SEQ ID NO: 2101024 - DNA, 25 bp, Homo sapien
tcttgctgatttcagaatgggctct

SEQ ID NO: 2101025 - DNA, 25 bp, Homo sapien
catagcatggaggatcactgttggg

SEQ ID NO: 2101026 - DNA, 25 bp, Homo sapien
aactccagcaatctcatcttgctga

SEQ ID NO: 2101027 - DNA, 25 bp, Homo sapien
gctgatttcagaatgggctcttgga

SEQ ID NO: 2101028 - DNA, 25 bp, Homo sapien
gagatgggaagcacttggggtcaga

SEQ ID NO: 2101029 - DNA, 25 bp, Homo sapien
agatgggaagcacttggggtcagac

SEQ ID NO: 2101030 - DNA, 25 bp, Homo sapien
gcagtagggctagccctagctgcag

SEQ ID NO: 2101031 - DNA, 25 bp, Homo sapien
ggccatggcagtagggctagcccta

SEQ ID NO: 2101032 - DNA, 25 bp, Homo sapien
cttggccatggcagtagggctagcc

SEQ ID NO: 2101033 - DNA, 25 bp, Homo sapien
tagggctagccctagctgcagctgt

SEQ ID NO: 2101034 - DNA, 25 bp, Homo sapien
gacataaagatagccttcagctcag

SEQ ID NO: 2101035 - DNA, 25 bp, Homo sapien
cattgggtcccagggtcatcaagaa

SEQ ID NO: 2101036 - DNA, 25 bp, Homo sapien
caagaaatgttgctccctcaggagc

SEQ ID NO: 2101037 - DNA, 25 bp, Homo sapien
attggcaagaatgcattgggtccca

SEQ ID NO: 2101038 - DNA, 25 bp, Homo sapien
cgatttctgtgagtaacagggccca

SEQ ID NO: 2101039 - DNA, 25 bp, Homo sapien
tctgaggaagtgtcttttagcactg

SEQ ID NO: 2101040 - DNA, 25 bp, Homo sapien
tcccagtagtgcttaggatactccc

SEQ ID NO: 2101041 - DNA, 25 bp, Homo sapien
tagatgaagtccgtgtctgaggaag

SEQ ID NO: 2101042 - DNA, 25 bp, Homo sapien
catataagagtagtagtttttcagg

SEQ ID NO: 2101043 - DNA, 25 bp, Homo sapien
ttcaaagcatctatagtacctactg

SEQ ID NO: 2101044 - DNA, 25 bp, Homo sapien
tcttgaactatctctttcctgtagg

SEQ ID NO: 2101045 - DNA, 25 bp, Homo sapien
tcctgtaggtttcagggtctttctg

SEQ ID NO: 2101046 - DNA, 25 bp, Homo sapien
cttgaactatctctttcctgtaggt

SEQ ID NO: 2101047 - DNA, 25 bp, Homo sapien
ttcttgaactatctctttcctgtag

SEQ ID NO: 2101048 - DNA, 25 bp, Homo sapien
gatgtacttggaatccaatatcctc

SEQ ID NO: 2101049 - DNA, 25 bp, Homo sapien
tctcttaagcttttactattggaaa

SEQ ID NO: 2101050 - DNA, 25 bp, Homo sapien
aatatcctcttaagagcacttagag

SEQ ID NO: 2101051 - DNA, 25 bp, Homo sapien
tattggaaatccctagatagatgta

SEQ ID NO: 2101052 - DNA, 25 bp, Homo sapien
ggttgccagagcattgggaatctca

SEQ ID NO: 2101053 - DNA, 25 bp, Homo sapien
caggaatcctacactttgagctgga

SEQ ID NO: 2101054 - DNA, 25 bp, Homo sapien
gttgaatgtataggaaccaggaatc

SEQ ID NO: 2101055 - DNA, 25 bp, Homo sapien
tatctttttagcttgtaggttgcca

SEQ ID NO: 2101056 - DNA, 25 bp, Homo sapien
caaactgttgtagggcaagattgtg

SEQ ID NO: 2101057 - DNA, 25 bp, Homo sapien
gttgaagtgggtgtatgtatttgtc

SEQ ID NO: 2101058 - DNA, 25 bp, Homo sapien
tttggctcgtaatgggaaacaattc

SEQ ID NO: 2101059 - DNA, 25 bp, Homo sapien
tgacttaggtactaactgccctttg

SEQ ID NO: 2101060 - DNA, 25 bp, Homo sapien
ttccaaattctgaagccaaaagctg

SEQ ID NO: 2101061 - DNA, 25 bp, Homo sapien
ttttagccaaattgtagggttcatg

SEQ ID NO: 2101062 - DNA, 25 bp, Homo sapien
catgatgaaattcaattcaaaactg

SEQ ID NO: 2101063 - DNA, 25 bp, Homo sapien
tgtgaacccacttgagagataggat

SEQ ID NO: 2101064 - DNA, 25 bp, Homo sapien
tcttcctttaagaaccagcttgctt

SEQ ID NO: 2101065 - DNA, 25 bp, Homo sapien
catgtctttgtcgatgcttctccac

SEQ ID NO: 2101066 - DNA, 25 bp, Homo sapien
tctgtcttaggctcattacatagca

SEQ ID NO: 2101067 - DNA, 25 bp, Homo sapien
tcactgtgctaaagtccctcaaatg

SEQ ID NO: 2101068 - DNA, 25 bp, Homo sapien
acaatattaggcgactttgtttctt

SEQ ID NO: 2101069 - DNA, 25 bp, Homo sapien
taacaatattaggcgactttgtttc

SEQ ID NO: 2101070 - DNA, 25 bp, Homo sapien
ataacaatattaggcgactttgttt

SEQ ID NO: 2101071 - DNA, 25 bp, Homo sapien
aataacaatattaggcgactttgtt

SEQ ID NO: 2101072 - DNA, 25 bp, Homo sapien
ctttgaagaaacgttcaaactccat

SEQ ID NO: 2101073 - DNA, 25 bp, Homo sapien
tttcccacgccattgtgttcgagtt

SEQ ID NO: 2101074 - DNA, 25 bp, Homo sapien
gaaactgaatgtcatcaatgaggac

SEQ ID NO: 2101075 - DNA, 25 bp, Homo sapien
ttcccacgccattgtgttcgagttc

SEQ ID NO: 2101076 - DNA, 25 bp, Homo sapien
caatgaggacatatgtcttcagaga

SEQ ID NO: 2101077 - DNA, 25 bp, Homo sapien
tcagggaaagtcttcttctcatatt

SEQ ID NO: 2101078 - DNA, 25 bp, Homo sapien
aagtgtcagggaaagtcttcttctc

SEQ ID NO: 2101079 - DNA, 25 bp, Homo sapien
tgtcagggaaagtcttcttctcata

SEQ ID NO: 2101080 - DNA, 25 bp, Homo sapien
tgaagtgtcagggaaagtcttcttc

SEQ ID NO: 2101081 - DNA, 25 bp, Homo sapien
gaaaagcttgaaaagcggtggtgga

SEQ ID NO: 2101082 - DNA, 25 bp, Homo sapien
aggaaaagcttgaaaagcggtggtg

SEQ ID NO: 2101083 - DNA, 25 bp, Homo sapien
aaagcttgaaaagcggtggtggatg

SEQ ID NO: 2101084 - DNA, 25 bp, Homo sapien
aaaagcttgaaaagcggtggtggat

SEQ ID NO: 2101085 - DNA, 25 bp, Homo sapien
tctcagactccatttgcttcgttgt

SEQ ID NO: 2101086 - DNA, 25 bp, Homo sapien
tgcgtcttttaataaccatctcaga

SEQ ID NO: 2101087 - DNA, 25 bp, Homo sapien
cttcgttgtaatatggaagccagta

SEQ ID NO: 2101088 - DNA, 25 bp, Homo sapien
tgggtttttgatgcgtcttttaata

SEQ ID NO: 2101089 - DNA, 25 bp, Homo sapien
tggacaaggttcctccaattcctta

SEQ ID NO: 2101090 - DNA, 25 bp, Homo sapien
ttctcctctgttatgataagtctgt

SEQ ID NO: 2101091 - DNA, 25 bp, Homo sapien
tcatctttctcaaggctaataccgc

SEQ ID NO: 2101092 - DNA, 25 bp, Homo sapien
tttctggatgattcctttggctgct

SEQ ID NO: 2101093 - DNA, 25 bp, Homo sapien
ctgctcaggctttctactcctggaa

SEQ ID NO: 2101094 - DNA, 25 bp, Homo sapien
catgggtttctggatgattcctttg

SEQ ID NO: 2101095 - DNA, 25 bp, Homo sapien
gtcaggttcccaggacctacgctct

SEQ ID NO: 2101096 - DNA, 25 bp, Homo sapien
tcttcctgtgggatccttagcagtc

SEQ ID NO: 2101097 - DNA, 25 bp, Homo sapien
tcagttgcgtgtgttggtctcttcc

SEQ ID NO: 2101098 - DNA, 25 bp, Homo sapien
tgaacaatttccacgggctgctctg

SEQ ID NO: 2101099 - DNA, 25 bp, Homo sapien
tactcagcacattaaagagtgccca

SEQ ID NO: 2101100 - DNA, 25 bp, Homo sapien
tgttcgtgccattttgtacttccgg

SEQ ID NO: 2101101 - DNA, 25 bp, Homo sapien
tctcctaaatcccttgtgatggaaa

SEQ ID NO: 2101102 - DNA, 25 bp, Homo sapien
tgatggaaattgaagccctatactc

SEQ ID NO: 2101103 - DNA, 25 bp, Homo sapien
tgaatgttcaattccatagtcacac

SEQ ID NO: 2101104 - DNA, 25 bp, Homo sapien
tcaagaagtgtagtgcctttgtccc

SEQ ID NO: 2101105 - DNA, 25 bp, Homo sapien
gccttcctgtgaatgttcaattcca

SEQ ID NO: 2101106 - DNA, 25 bp, Homo sapien
tgtattatccgaggacccaggttct

SEQ ID NO: 2101107 - DNA, 25 bp, Homo sapien
gccctgtagccctcaatcagatggg

SEQ ID NO: 2101108 - DNA, 25 bp, Homo sapien
cagatgggctctttgaccaaccttg

SEQ ID NO: 2101109 - DNA, 25 bp, Homo sapien
ctccagcctacaccatcaattattt

SEQ ID NO: 2101110 - DNA, 25 bp, Homo sapien
tgttgattacaactccaatggaacc

SEQ ID NO: 2101111 - DNA, 25 bp, Homo sapien
catttcgtcctgcaacctgaaggag

SEQ ID NO: 2101112 - DNA, 25 bp, Homo sapien
tatcatcccatttcgtcctgcaacc

SEQ ID NO: 2101113 - DNA, 25 bp, Homo sapien
ttcgtcctgcaacctgaaggagcca

SEQ ID NO: 2101114 - DNA, 25 bp, Homo sapien
atcccatttcgtcctgcaacctgaa

SEQ ID NO: 2101115 - DNA, 25 bp, Homo sapien
aagctgacagtttaatgcccctggc

SEQ ID NO: 2101116 - DNA, 25 bp, Homo sapien
acagtggagctgtcttctttaagga

SEQ ID NO: 2101117 - DNA, 25 bp, Homo sapien
tggccagaacaccaagacagtggag

SEQ ID NO: 2101118 - DNA, 25 bp, Homo sapien
cactgccaacacatatctgtgatgg

SEQ ID NO: 2101119 - DNA, 25 bp, Homo sapien
atctcgcgagttctcgagcccgtct

SEQ ID NO: 2101120 - DNA, 25 bp, Homo sapien
cattggccgcagtcatctcgcgagt

SEQ ID NO: 2101121 - DNA, 25 bp, Homo sapien
tcgcgagtcctcaagcctggctccc

SEQ ID NO: 2101122 - DNA, 25 bp, Homo sapien
tcaatggccaccgtcatctcgcgag

SEQ ID NO: 2101123 - DNA, 25 bp, Homo sapien
gtgatgaaacaaacgggacaccctg

SEQ ID NO: 2101124 - DNA, 25 bp, Homo sapien
tggtgatgaaacaaacgggacaccc

SEQ ID NO: 2101125 - DNA, 25 bp, Homo sapien
ctggtgatgaaacaaacgggacacc

SEQ ID NO: 2101126 - DNA, 25 bp, Homo sapien
tgatgaaacaaacgggacaccctgg

SEQ ID NO: 2101127 - DNA, 25 bp, Homo sapien
tgtcgccagtcactccaagaatgcc

SEQ ID NO: 2101128 - DNA, 25 bp, Homo sapien
gtattctgtcgccagtcactccaag

SEQ ID NO: 2101129 - DNA, 25 bp, Homo sapien
ccggttccgtcacgaacgtattctg

SEQ ID NO: 2101130 - DNA, 25 bp, Homo sapien
tcacgaacgtattctgtcgccagtc

SEQ ID NO: 2101131 - DNA, 25 bp, Homo sapien
gaccggacactggaagatacttgcc

SEQ ID NO: 2101132 - DNA, 25 bp, Homo sapien
caaaaagcagcgcagtgttggcgtc

SEQ ID NO: 2101133 - DNA, 25 bp, Homo sapien
caagactaacatgaagcgaacgcca

SEQ ID NO: 2101134 - DNA, 25 bp, Homo sapien
gatacagtcctgtcagaacgggcag

SEQ ID NO: 2101135 - DNA, 25 bp, Homo sapien
tggaactcctatcttcacaaaacag

SEQ ID NO: 2101136 - DNA, 25 bp, Homo sapien
taatctcaaagatatgactcatctg

SEQ ID NO: 2101137 - DNA, 25 bp, Homo sapien
gatgggaagaccatcttatagatgt

SEQ ID NO: 2101138 - DNA, 25 bp, Homo sapien
taagttctgtgcatgacaatgcctt

SEQ ID NO: 2101139 - DNA, 25 bp, Homo sapien
tctgagcttccttgataatcttgcc

SEQ ID NO: 2101140 - DNA, 25 bp, Homo sapien
gactttcccatatctcgcagctctg

SEQ ID NO: 2101141 - DNA, 25 bp, Homo sapien
gcccctctgagacaacaagacttgg

SEQ ID NO: 2101142 - DNA, 25 bp, Homo sapien
gggacctatcccatttgtgcagggt

SEQ ID NO: 2101143 - DNA, 25 bp, Homo sapien
ctttccctccatttttctgctgatg

SEQ ID NO: 2101144 - DNA, 25 bp, Homo sapien
ccctccatttttctgctgatggtgt

SEQ ID NO: 2101145 - DNA, 25 bp, Homo sapien
ctccatttttctgctgatggtgttg

SEQ ID NO: 2101146 - DNA, 25 bp, Homo sapien
ttccctccatttttctgctgatggt

SEQ ID NO: 2101147 - DNA, 25 bp, Homo sapien
tgtgatacccagcatgtgaacatct

SEQ ID NO: 2101148 - DNA, 25 bp, Homo sapien
tgtattgacacaaccctgggctcta

SEQ ID NO: 2101149 - DNA, 25 bp, Homo sapien
cacataagaaatcagcagatgttac

SEQ ID NO: 2101150 - DNA, 25 bp, Homo sapien
ctgagttcccacataagaaatcagc

SEQ ID NO: 2101151 - DNA, 25 bp, Homo sapien
gccactttaatggagtaaccaggaa

SEQ ID NO: 2101152 - DNA, 25 bp, Homo sapien
taaccaggaacaggtgacttgaagg

SEQ ID NO: 2101153 - DNA, 25 bp, Homo sapien
catctgtgctactgtggagagggca

SEQ ID NO: 2101154 - DNA, 25 bp, Homo sapien
tgtggtttgtgctttcagcatgggc

SEQ ID NO: 2101155 - DNA, 25 bp, Homo sapien
ttccctcgatgaccctttggatgac

SEQ ID NO: 2101156 - DNA, 25 bp, Homo sapien
ctcgatgaccctttggatgactctt

SEQ ID NO: 2101157 - DNA, 25 bp, Homo sapien
ccctcgatgaccctttggatgactc

SEQ ID NO: 2101158 - DNA, 25 bp, Homo sapien
cctcgatgaccctttggatgactct

SEQ ID NO: 2101159 - DNA, 25 bp, Homo sapien
ctctggcaagcgtggccgagtcagt

SEQ ID NO: 2101160 - DNA, 25 bp, Homo sapien
agtgatgattgtcaggaacacagag

SEQ ID NO: 2101161 - DNA, 25 bp, Homo sapien
tcagtgtgaggagtgatgattgtca

SEQ ID NO: 2101162 - DNA, 25 bp, Homo sapien
tctctggcaagcgtggccgagtcag

SEQ ID NO: 2101163 - DNA, 25 bp, Homo sapien
tgccttgttttgctgaacagattct

SEQ ID NO: 2101164 - DNA, 25 bp, Homo sapien
cagattctccattagcagtgtttaa

SEQ ID NO: 2101165 - DNA, 25 bp, Homo sapien
gattctccattagcagtgtttaaaa

SEQ ID NO: 2101166 - DNA, 25 bp, Homo sapien
attctccattagcagtgtttaaaaa

SEQ ID NO: 2101167 - DNA, 25 bp, Homo sapien
ctgcagtgaaggggaagatggtgat

SEQ ID NO: 2101168 - DNA, 25 bp, Homo sapien
ggggaagatggtgattgtccttaga

SEQ ID NO: 2101169 - DNA, 25 bp, Homo sapien
tgcagtgaaggggaagatggtgatt

SEQ ID NO: 2101170 - DNA, 25 bp, Homo sapien
gaagatggtgattgtccttagacaa

SEQ ID NO: 2101171 - DNA, 25 bp, Homo sapien
gcatccacacatccagcctactgat

SEQ ID NO: 2101172 - DNA, 25 bp, Homo sapien
cacacatccagcctactgatgcttt

SEQ ID NO: 2101173 - DNA, 25 bp, Homo sapien
cacatccagcctactgatgcttttt

SEQ ID NO: 2101174 - DNA, 25 bp, Homo sapien
tccacacatccagcctactgatgct

SEQ ID NO: 2101175 - DNA, 25 bp, Homo sapien
atctgccccctttttgtgtcacctt

SEQ ID NO: 2101176 - DNA, 25 bp, Homo sapien
ggccctaatattgtaatccaccagc

SEQ ID NO: 2101177 - DNA, 25 bp, Homo sapien
cagcagcagcgcgaggccctaatat

SEQ ID NO: 2101178 - DNA, 25 bp, Homo sapien
cagcgcgaggccctaatattgtaat

SEQ ID NO: 2101179 - DNA, 25 bp, Homo sapien
gggatgaagcatcagccactttgtc

SEQ ID NO: 2101180 - DNA, 25 bp, Homo sapien
ctggtcctgagtactggagaaattc

SEQ ID NO: 2101181 - DNA, 25 bp, Homo sapien
atcagccactttgtctggtcctgag

SEQ ID NO: 2101182 - DNA, 25 bp, Homo sapien
gaagcatcagccactttgtctggtc

SEQ ID NO: 2101183 - DNA, 25 bp, Homo sapien
tgggcaagttctcagtatctggtgg

SEQ ID NO: 2101184 - DNA, 25 bp, Homo sapien
tatctggtggggactgcaaggtgct

SEQ ID NO: 2101185 - DNA, 25 bp, Homo sapien
ctagaggaagtatgggcaagttctc

SEQ ID NO: 2101186 - DNA, 25 bp, Homo sapien
cttggatttatttcccctcttcttg

SEQ ID NO: 2101187 - DNA, 25 bp, Homo sapien
tttcatacttgagcagcaggacttt

SEQ ID NO: 2101188 - DNA, 25 bp, Homo sapien
tgagcagcaggactttgacaattcc

SEQ ID NO: 2101189 - DNA, 25 bp, Homo sapien
atacttgagcagcaggactttgaca

SEQ ID NO: 2101190 - DNA, 25 bp, Homo sapien
ttgagcagcaggactttgacaattc

SEQ ID NO: 2101191 - DNA, 25 bp, Homo sapien
tgatcccacacaagataagaattgg

SEQ ID NO: 2101192 - DNA, 25 bp, Homo sapien
agaattgggagcctagtcttgggca

SEQ ID NO: 2101193 - DNA, 25 bp, Homo sapien
tttgttgacaagagcatagcagtgg

SEQ ID NO: 2101194 - DNA, 25 bp, Homo sapien
caaagggtagctccatatgctcaga

SEQ ID NO: 2101195 - DNA, 25 bp, Homo sapien
ttgccttgctcttttcgtggtcttc

SEQ ID NO: 2101196 - DNA, 25 bp, Homo sapien
cttgctcttttcgtggtcttctccc

SEQ ID NO: 2101197 - DNA, 25 bp, Homo sapien
tcttttcgtggtcttctccctaaca

SEQ ID NO: 2101198 - DNA, 25 bp, Homo sapien
ttcgtggtcttctccctaacacatc

SEQ ID NO: 2101199 - DNA, 25 bp, Homo sapien
tatctttgctcatagcatgtataac

SEQ ID NO: 2101200 - DNA, 25 bp, Homo sapien
aaaactatctttgctcatagcatgt

SEQ ID NO: 2101201 - DNA, 25 bp, Homo sapien
ataacatctgaagctaagacagagc

SEQ ID NO: 2101202 - DNA, 25 bp, Homo sapien
tgctcatagcatgtataacatctga

SEQ ID NO: 2101203 - DNA, 25 bp, Homo sapien
tctgcgtgattgaattccacagaag

SEQ ID NO: 2101204 - DNA, 25 bp, Homo sapien
tgaagcaaaacatatattctgcgtg

SEQ ID NO: 2101205 - DNA, 25 bp, Homo sapien
catatattctgcgtgattgaattcc

SEQ ID NO: 2101206 - DNA, 25 bp, Homo sapien
tgtggctgaagcaaaacatatattc

SEQ ID NO: 2101207 - DNA, 25 bp, Homo sapien
agcttttctcgcctctgtctgtagc

SEQ ID NO: 2101208 - DNA, 25 bp, Homo sapien
tttctcgcctctgtctgtagcactg

SEQ ID NO: 2101209 - DNA, 25 bp, Homo sapien
tgttctgagcttttctcgcctctgt

SEQ ID NO: 2101210 - DNA, 25 bp, Homo sapien
tctgagcttttctcgcctctgtctg

SEQ ID NO: 2101211 - DNA, 25 bp, Homo sapien
tgtgggagaagctgtaaactggatg

SEQ ID NO: 2101212 - DNA, 25 bp, Homo sapien
gaacaccagacgcatgctctgctct

SEQ ID NO: 2101213 - DNA, 25 bp, Homo sapien
gggagaagctgtaaactggatgctc

SEQ ID NO: 2101214 - DNA, 25 bp, Homo sapien
gctggaacaccagacgcatgctctg

SEQ ID NO: 2101215 - DNA, 25 bp, Homo sapien
gccgtggaagttcctgcactagtaa

SEQ ID NO: 2101216 - DNA, 25 bp, Homo sapien
cagccgtggaagttcctgcactagt

SEQ ID NO: 2101217 - DNA, 25 bp, Homo sapien
cgtggaagttcctgcactagtaaat

SEQ ID NO: 2101218 - DNA, 25 bp, Homo sapien
gaagttcctgcactagtaaatcttt

SEQ ID NO: 2101219 - DNA, 25 bp, Homo sapien
ggatctctcctgttttagtaataat

SEQ ID NO: 2101220 - DNA, 25 bp, Homo sapien
gtaataatctgttgcataacttcca

SEQ ID NO: 2101221 - DNA, 25 bp, Homo sapien
tatattctagctggcccaacttcag

SEQ ID NO: 2101222 - DNA, 25 bp, Homo sapien
tacaggctggactaagagaatatat

SEQ ID NO: 2101223 - DNA, 25 bp, Homo sapien
tgacctggttgaactgccgctgtcc

SEQ ID NO: 2101224 - DNA, 25 bp, Homo sapien
gggtgaggtcctagtccacaggaat

SEQ ID NO: 2101225 - DNA, 25 bp, Homo sapien
gtgtccatctgtgacctggttgaac

SEQ ID NO: 2101226 - DNA, 25 bp, Homo sapien
ctagtccacaggaatggtgacttgc

SEQ ID NO: 2101227 - DNA, 25 bp, Homo sapien
tggtttccaatttctggactgggga

SEQ ID NO: 2101228 - DNA, 25 bp, Homo sapien
ttgaaaatggtttccaatttctgga

SEQ ID NO: 2101229 - DNA, 25 bp, Homo sapien
gtttccaatttctggactggggaca

SEQ ID NO: 2101230 - DNA, 25 bp, Homo sapien
aaatggtttccaatttctggactgg

SEQ ID NO: 2101231 - DNA, 25 bp, Homo sapien
taatagtcttgcagtgctaaaatta

SEQ ID NO: 2101232 - DNA, 25 bp, Homo sapien
tagtcttgcagtgctaaaattatta

SEQ ID NO: 2101233 - DNA, 25 bp, Homo sapien
ttaatagtcttgcagtgctaaaatt

SEQ ID NO: 2101234 - DNA, 25 bp, Homo sapien
aatagtcttgcagtgctaaaattat

SEQ ID NO: 2101235 - DNA, 25 bp, Homo sapien
cttcaagaatacctcatcctcctga

SEQ ID NO: 2101236 - DNA, 25 bp, Homo sapien
ctctccaccttcaagaatacctcat

SEQ ID NO: 2101237 - DNA, 25 bp, Homo sapien
ccaccttcaagaatacctcatcctc

SEQ ID NO: 2101238 - DNA, 25 bp, Homo sapien
tctccaccttcaagaatacctcatc

SEQ ID NO: 2101239 - DNA, 25 bp, Homo sapien
tgacccttgtgggtggcagtaggca

SEQ ID NO: 2101240 - DNA, 25 bp, Homo sapien
gacccttgtgggtggcagtaggcag

SEQ ID NO: 2101241 - DNA, 25 bp, Homo sapien
acccttgtgggtggcagtaggcagg

SEQ ID NO: 2101242 - DNA, 25 bp, Homo sapien
gatgacccttgtgggtggcagtagg

SEQ ID NO: 2101243 - DNA, 25 bp, Homo sapien
tctgaaggtgctgatcatgtgtgca

SEQ ID NO: 2101244 - DNA, 25 bp, Homo sapien
ggctctgggtctcactgaaggtctg

SEQ ID NO: 2101245 - DNA, 25 bp, Homo sapien
caggctctgggtctcactgaaggtc

SEQ ID NO: 2101246 - DNA, 25 bp, Homo sapien
cgtggactctcctgatcctgagaca

SEQ ID NO: 2101247 - DNA, 25 bp, Homo sapien
tgaggaacctcaagaggactctctg

SEQ ID NO: 2101248 - DNA, 25 bp, Homo sapien
catctgacacttgtgcagcatgaaa

SEQ ID NO: 2101249 - DNA, 25 bp, Homo sapien
tatcctctgaggagcttggactatc

SEQ ID NO: 2101250 - DNA, 25 bp, Homo sapien
ggtcgagagcatctgcgggcacatt

SEQ ID NO: 2101251 - DNA, 25 bp, Homo sapien
gccaaatatcatctctaggtgctca

SEQ ID NO: 2101252 - DNA, 25 bp, Homo sapien
tgaggcccagtttgatgaagaggcc

SEQ ID NO: 2101253 - DNA, 25 bp, Homo sapien
ttcttcccagaatatactcccgtca

SEQ ID NO: 2101254 - DNA, 25 bp, Homo sapien
attctgggctctccaaagatgaagt

SEQ ID NO: 2101255 - DNA, 25 bp, Homo sapien
ctttcagagcttccgcatactgaga

SEQ ID NO: 2101256 - DNA, 25 bp, Homo sapien
gagcttccgcatactgagatgggaa

SEQ ID NO: 2101257 - DNA, 25 bp, Homo sapien
tcagagcttccgcatactgagatgg

SEQ ID NO: 2101258 - DNA, 25 bp, Homo sapien
ttcctctttcagagcttccgcatac

SEQ ID NO: 2101259 - DNA, 25 bp, Homo sapien
atctttgtacttctatgcaggttga

SEQ ID NO: 2101260 - DNA, 25 bp, Homo sapien
gagctgcatcaaacactccttctgg

SEQ ID NO: 2101261 - DNA, 25 bp, Homo sapien
tccttctggattttggatgcattca

SEQ ID NO: 2101262 - DNA, 25 bp, Homo sapien
tatgcaggttgataagcagccactg

SEQ ID NO: 2101263 - DNA, 25 bp, Homo sapien
tcctctttgtcactaagcttttcaa

SEQ ID NO: 2101264 - DNA, 25 bp, Homo sapien
tgtgatcaccaagtctatgttcctt

SEQ ID NO: 2101265 - DNA, 25 bp, Homo sapien
gcaatgacatcctcaagttgagctt

SEQ ID NO: 2101266 - DNA, 25 bp, Homo sapien
tcaaaaatctgcttttgggaacagg

SEQ ID NO: 2101267 - DNA, 25 bp, Homo sapien
tatactttgtccccactctgactgg

SEQ ID NO: 2101268 - DNA, 25 bp, Homo sapien
ctgactggccctgttatactggctg

SEQ ID NO: 2101269 - DNA, 25 bp, Homo sapien
ccctgttatactggctgtagagcat

SEQ ID NO: 2101270 - DNA, 25 bp, Homo sapien
tggccctgttatactggctgtagag

SEQ ID NO: 2101271 - DNA, 25 bp, Homo sapien
caatcaaccacaagtgatagcttga

SEQ ID NO: 2101272 - DNA, 25 bp, Homo sapien
cattactgtcataataatcaagttt

SEQ ID NO: 2101273 - DNA, 25 bp, Homo sapien
gcttgattaattttgaggccaccac

SEQ ID NO: 2101274 - DNA, 25 bp, Homo sapien
ggctcctaaggcacaagtttcagtt

SEQ ID NO: 2101275 - DNA, 25 bp, Homo sapien
ttataggcagctgtaagttgtctgt

SEQ ID NO: 2101276 - DNA, 25 bp, Homo sapien
aatgtaaatagccagccagttggta

SEQ ID NO: 2101277 - DNA, 25 bp, Homo sapien
aaatagccagccagttggtactctc

SEQ ID NO: 2101278 - DNA, 25 bp, Homo sapien
caagtgtcctccactatatttatag

SEQ ID NO: 2101279 - DNA, 25 bp, Homo sapien
aatgtaaaagcaatcctctgggtct

SEQ ID NO: 2101280 - DNA, 25 bp, Homo sapien
gatagagatcacacgtcttcgctgc

SEQ ID NO: 2101281 - DNA, 25 bp, Homo sapien
tatttatgacaagcaagcttccagg

SEQ ID NO: 2101282 - DNA, 25 bp, Homo sapien
cagtatgtctgaagcaaggtctaag

SEQ ID NO: 2101283 - DNA, 25 bp, Homo sapien
cagaaaacagatgtggatccgtccg

SEQ ID NO: 2101284 - DNA, 25 bp, Homo sapien
gccctctcggtagccagaaaacaga

SEQ ID NO: 2101285 - DNA, 25 bp, Homo sapien
ctctcggtagccagaaaacagatgt

SEQ ID NO: 2101286 - DNA, 25 bp, Homo sapien
aaaacagatgtggatccgtccggcc

SEQ ID NO: 2101287 - DNA, 25 bp, Homo sapien
gagctatccatatcccgggggacga

SEQ ID NO: 2101288 - DNA, 25 bp, Homo sapien
tctacccgagctatccatatcccgg

SEQ ID NO: 2101289 - DNA, 25 bp, Homo sapien
tgtggacgtttatggtgagggaacc

SEQ ID NO: 2101290 - DNA, 25 bp, Homo sapien
ttggatgctcatggcgagggaacct

SEQ ID NO: 2101291 - DNA, 25 bp, Homo sapien
ggcttgacgggctccttaaatcgga

SEQ ID NO: 2101292 - DNA, 25 bp, Homo sapien
ggttccagcggcaaatattatgcac

SEQ ID NO: 2101293 - DNA, 25 bp, Homo sapien
aggaacttcacctcagccgggatca

SEQ ID NO: 2101294 - DNA, 25 bp, Homo sapien
attatgcacagtaatcgggaggcgg

SEQ ID NO: 2101295 - DNA, 25 bp, Homo sapien
ggagaaagagagtcaaattatacat

SEQ ID NO: 2101296 - DNA, 25 bp, Homo sapien
cttcagtgggagaaagagagtcaaa

SEQ ID NO: 2101297 - DNA, 25 bp, Homo sapien
tgggagaaagagagtcaaattatac

SEQ ID NO: 2101298 - DNA, 25 bp, Homo sapien
agtgggagaaagagagtcaaattat

SEQ ID NO: 2101299 - DNA, 25 bp, Homo sapien
ccagactggtcaacatcagtttgaa

SEQ ID NO: 2101300 - DNA, 25 bp, Homo sapien
tcatctgaaggccagaagcaagttc

SEQ ID NO: 2101301 - DNA, 25 bp, Homo sapien
aagttctttatccagactggtcaac

SEQ ID NO: 2101302 - DNA, 25 bp, Homo sapien
ctgaaggccagaagcaagttcttta

SEQ ID NO: 2101303 - DNA, 25 bp, Homo sapien
aataagtagccggtcaaaagtgtct

SEQ ID NO: 2101304 - DNA, 25 bp, Homo sapien
tattgaaataagtagccggtcaaaa

SEQ ID NO: 2101305 - DNA, 25 bp, Homo sapien
tagccggtcaaaagtgtcttcgtct

SEQ ID NO: 2101306 - DNA, 25 bp, Homo sapien
agtgtcttcgtctttatcaggatga

SEQ ID NO: 2101307 - DNA, 25 bp, Homo sapien
agtgatagtaatctctttagaatat

SEQ ID NO: 2101308 - DNA, 25 bp, Homo sapien
ttccaattgacaggatggaatcaac

SEQ ID NO: 2101309 - DNA, 25 bp, Homo sapien
aatttccaattgacaggatggaatc

SEQ ID NO: 2101310 - DNA, 25 bp, Homo sapien
tagtgatagtaatctctttagaata

SEQ ID NO: 2101311 - DNA, 25 bp, Homo sapien
gatgaggggtccctcacacaaatct

SEQ ID NO: 2101312 - DNA, 25 bp, Homo sapien
tgaggggtccctcacacaaatctgt

SEQ ID NO: 2101313 - DNA, 25 bp, Homo sapien
tacagctgcgatgaggggtccctca

SEQ ID NO: 2101314 - DNA, 25 bp, Homo sapien
ccacagctacagctgcgatgagggg

SEQ ID NO: 2101315 - DNA, 25 bp, Homo sapien
ggctggtctgcacagaaatctactt

SEQ ID NO: 2101316 - DNA, 25 bp, Homo sapien
cacgataccactagttggaaaaatg

SEQ ID NO: 2101317 - DNA, 25 bp, Homo sapien
ctttaataaccattgatgacttagc

SEQ ID NO: 2101318 - DNA, 25 bp, Homo sapien
ggtaattggccgtggtattctgcct

SEQ ID NO: 2101319 - DNA, 25 bp, Homo sapien
gtatgatggccacccaatttatggg

SEQ ID NO: 2101320 - DNA, 25 bp, Homo sapien
gaaaacaggaccaaagtgtatgcat

SEQ ID NO: 2101321 - DNA, 25 bp, Homo sapien
tactcaagagcatctcaggttgacc

SEQ ID NO: 2101322 - DNA, 25 bp, Homo sapien
tctcccacggcatcatcttgtatga

SEQ ID NO: 2101323 - DNA, 25 bp, Homo sapien
taattacagtcttttgataaggttg

SEQ ID NO: 2101324 - DNA, 25 bp, Homo sapien
tgataaggttgtaaagtcccttcat

SEQ ID NO: 2101325 - DNA, 25 bp, Homo sapien
tcattaggaagacaggagataatga

SEQ ID NO: 2101326 - DNA, 25 bp, Homo sapien
acagtcttttgataaggttgtaaag

SEQ ID NO: 2101327 - DNA, 25 bp, Homo sapien
tgaaggtccaatatcctttttacca

SEQ ID NO: 2101328 - DNA, 25 bp, Homo sapien
gagagcatagtcctgtctgtatgaa

SEQ ID NO: 2101329 - DNA, 25 bp, Homo sapien
gactcaaatctcaaaaagagagcat

SEQ ID NO: 2101330 - DNA, 25 bp, Homo sapien
tccatctttacttcctacggactca

SEQ ID NO: 2101331 - DNA, 25 bp, Homo sapien
tgtgcctgtcagtgctaattccact

SEQ ID NO: 2101332 - DNA, 25 bp, Homo sapien
taaagtggtacgtcacaggaagtaa

SEQ ID NO: 2101333 - DNA, 25 bp, Homo sapien
cactgaatttctgaacgttcaccca

SEQ ID NO: 2101334 - DNA, 25 bp, Homo sapien
gaactggtcctggatcaaactgtag

SEQ ID NO: 2101335 - DNA, 25 bp, Homo sapien
ctttgaagactccaagttgatgtgg

SEQ ID NO: 2101336 - DNA, 25 bp, Homo sapien
ttgaagactccaagttgatgtggaa

SEQ ID NO: 2101337 - DNA, 25 bp, Homo sapien
tgcttcactttgaagactccaagtt

SEQ ID NO: 2101338 - DNA, 25 bp, Homo sapien
tcactttgaagactccaagttgatg

SEQ ID NO: 2101339 - DNA, 25 bp, Homo sapien
ttcttggtggaagctttacagatgc

SEQ ID NO: 2101340 - DNA, 25 bp, Homo sapien
aatttcatcacaactttcttggtgg

SEQ ID NO: 2101341 - DNA, 25 bp, Homo sapien
tacgtgatggaaagattttaccgac

SEQ ID NO: 2101342 - DNA, 25 bp, Homo sapien
aagctaaatatacgtgatggaaaga

SEQ ID NO: 2101343 - DNA, 25 bp, Homo sapien
gaatataagtttatagatggtattt

SEQ ID NO: 2101344 - DNA, 25 bp, Homo sapien
tataagtttatagatggtattttta

SEQ ID NO: 2101345 - DNA, 25 bp, Homo sapien
ttgaatataagtttatagatggtat

SEQ ID NO: 2101346 - DNA, 25 bp, Homo sapien
agaattgaatataagtttatagatg

SEQ ID NO: 2101347 - DNA, 25 bp, Homo sapien
ggattacggatcgaaggcaatatac

SEQ ID NO: 2101348 - DNA, 25 bp, Homo sapien
tttagacctgatagttgcagctcgg

SEQ ID NO: 2101349 - DNA, 25 bp, Homo sapien
tcggtcattgggaaaggctaatagc

SEQ ID NO: 2101350 - DNA, 25 bp, Homo sapien
ggctaatagcatatccttcactggc

SEQ ID NO: 2101351 - DNA, 25 bp, Homo sapien
ttcacatagttaaatcttggaactt

SEQ ID NO: 2101352 - DNA, 25 bp, Homo sapien
gtatatgcaaaatcatgattcacat

SEQ ID NO: 2101353 - DNA, 25 bp, Homo sapien
gcaaaatcatgattcacatagttaa

SEQ ID NO: 2101354 - DNA, 25 bp, Homo sapien
taagatacattgcataatagttttc

SEQ ID NO: 2101355 - DNA, 25 bp, Homo sapien
ggtggttaacaatcgattcgctcta

SEQ ID NO: 2101356 - DNA, 25 bp, Homo sapien
tatcatcatatgaatacatgcgctc

SEQ ID NO: 2101357 - DNA, 25 bp, Homo sapien
ctgagagtgagggtgactttagacc

SEQ ID NO: 2101358 - DNA, 25 bp, Homo sapien
gatcctggctctaagcctatgtctg

SEQ ID NO: 2101359 - DNA, 25 bp, Homo sapien
agactcttcctcctgagatgctata

SEQ ID NO: 2101360 - DNA, 25 bp, Homo sapien
ctcttcctcctgagatgctataccc

SEQ ID NO: 2101361 - DNA, 25 bp, Homo sapien
gactcttcctcctgagatgctatac

SEQ ID NO: 2101362 - DNA, 25 bp, Homo sapien
actcttcctcctgagatgctatacc

SEQ ID NO: 2101363 - DNA, 25 bp, Homo sapien
ggtgtcaacattaagctgcaatcat

SEQ ID NO: 2101364 - DNA, 25 bp, Homo sapien
ttgatgaatttgctttggtgtcaac

SEQ ID NO: 2101365 - DNA, 25 bp, Homo sapien
tcttgtggagtggatggttctgatt

SEQ ID NO: 2101366 - DNA, 25 bp, Homo sapien
cattaagctgcaatcatgtttttct

SEQ ID NO: 2101367 - DNA, 25 bp, Homo sapien
atattaataacatgaagtagatgag

SEQ ID NO: 2101368 - DNA, 25 bp, Homo sapien
ttaataacatgaagtagatgagtat

SEQ ID NO: 2101369 - DNA, 25 bp, Homo sapien
catgaagtagatgagtatttggaga

SEQ ID NO: 2101370 - DNA, 25 bp, Homo sapien
taacatgaagtagatgagtatttgg

SEQ ID NO: 2101371 - DNA, 25 bp, Homo sapien
ggtgggagagtcaaataccattgaa

SEQ ID NO: 2101372 - DNA, 25 bp, Homo sapien
tcacgtatgaaaattggttggtctt

SEQ ID NO: 2101373 - DNA, 25 bp, Homo sapien
attgaaatataagtactggatgtag

SEQ ID NO: 2101374 - DNA, 25 bp, Homo sapien
ggatgtaggtagaatcacgtatgaa

SEQ ID NO: 2101375 - DNA, 25 bp, Homo sapien
gcctcgtggtctcaatactagctca

SEQ ID NO: 2101376 - DNA, 25 bp, Homo sapien
aagtgttactggctggacaactgcc

SEQ ID NO: 2101377 - DNA, 25 bp, Homo sapien
caccactaggatgtgtccactgggt

SEQ ID NO: 2101378 - DNA, 25 bp, Homo sapien
tgttttcatgaagaagcctcgtggt

SEQ ID NO: 2101379 - DNA, 25 bp, Homo sapien
ttacgggttgccattgaaactgagc

SEQ ID NO: 2101380 - DNA, 25 bp, Homo sapien
tgtttacgggttgccattgaaactg

SEQ ID NO: 2101381 - DNA, 25 bp, Homo sapien
caattctgacgattatacaatctaa

SEQ ID NO: 2101382 - DNA, 25 bp, Homo sapien
ctgagcacaacaattctgacgatta

SEQ ID NO: 2101383 - DNA, 25 bp, Homo sapien
ggagtgagctgttttatctgtttag

SEQ ID NO: 2101384 - DNA, 25 bp, Homo sapien
tcatgtggtatcaggtacatttgga

SEQ ID NO: 2101385 - DNA, 25 bp, Homo sapien
tgtggtatcaggtacatttggagtg

SEQ ID NO: 2101386 - DNA, 25 bp, Homo sapien
ttggagtgagctgttttatctgttt

SEQ ID NO: 2101387 - DNA, 25 bp, Homo sapien
acgcgtttccttgaaagacatgaag

SEQ ID NO: 2101388 - DNA, 25 bp, Homo sapien
acattttagcttcaacgcgtttcct

SEQ ID NO: 2101389 - DNA, 25 bp, Homo sapien
ccaagttacttcacattccagtgag

SEQ ID NO: 2101390 - DNA, 25 bp, Homo sapien
tgaagccctgctgccaagttacttc

SEQ ID NO: 2101391 - DNA, 25 bp, Homo sapien
cagtgtatacccaacaaattcatag

SEQ ID NO: 2101392 - DNA, 25 bp, Homo sapien
tatacccaacaaattcatagccctc

SEQ ID NO: 2101393 - DNA, 25 bp, Homo sapien
tgtatacccaacaaattcatagccc

SEQ ID NO: 2101394 - DNA, 25 bp, Homo sapien
agtgtatacccaacaaattcatagc

SEQ ID NO: 2101395 - DNA, 25 bp, Homo sapien
gtaagagtatcatcatgtcctagaa

SEQ ID NO: 2101396 - DNA, 25 bp, Homo sapien
gaatttaaggccctctggactgtac

SEQ ID NO: 2101397 - DNA, 25 bp, Homo sapien
cattgagtgggaaatttggtacaca

SEQ ID NO: 2101398 - DNA, 25 bp, Homo sapien
tagtaggacccagcttattttaggc

SEQ ID NO: 2101399 - DNA, 25 bp, Homo sapien
caattactaaagagtatccttggct

SEQ ID NO: 2101400 - DNA, 25 bp, Homo sapien
catggttttgtcctacattttgaag

SEQ ID NO: 2101401 - DNA, 25 bp, Homo sapien
cttggctgcaaaagtaaaaccttgg

SEQ ID NO: 2101402 - DNA, 25 bp, Homo sapien
tgttaaaccttgagggcaattacta

SEQ ID NO: 2101403 - DNA, 25 bp, Homo sapien
cttttctgccacagtgggtttacag

SEQ ID NO: 2101404 - DNA, 25 bp, Homo sapien
aatggaactattccttgcgatggaa

SEQ ID NO: 2101405 - DNA, 25 bp, Homo sapien
ttgctcttgtatcaaacttttctgc

SEQ ID NO: 2101406 - DNA, 25 bp, Homo sapien
gagatattgagaacagttattcccc

SEQ ID NO: 2101407 - DNA, 25 bp, Homo sapien
catccatttggtagtataatctagt

SEQ ID NO: 2101408 - DNA, 25 bp, Homo sapien
atccatttggtagtataatctagtc

SEQ ID NO: 2101409 - DNA, 25 bp, Homo sapien
ccatttggtagtataatctagtcat

SEQ ID NO: 2101410 - DNA, 25 bp, Homo sapien
tccatttggtagtataatctagtca

SEQ ID NO: 2101411 - DNA, 25 bp, Homo sapien
cacatctggacccatagagcaacag

SEQ ID NO: 2101412 - DNA, 25 bp, Homo sapien
catctggacccatagagcaacagta

SEQ ID NO: 2101413 - DNA, 25 bp, Homo sapien
tctggacccatagagcaacagtaga

SEQ ID NO: 2101414 - DNA, 25 bp, Homo sapien
ctggacccatagagcaacagtagaa

SEQ ID NO: 2101415 - DNA, 25 bp, Homo sapien
ggattgatttctacatcagcaattt

SEQ ID NO: 2101416 - DNA, 25 bp, Homo sapien
taaggtctataacattcgcatgacg

SEQ ID NO: 2101417 - DNA, 25 bp, Homo sapien
gatccaccaatcctaaggtctataa

SEQ ID NO: 2101418 - DNA, 25 bp, Homo sapien
taacattcgcatgacgaatagaaac

SEQ ID NO: 2101419 - DNA, 25 bp, Homo sapien
tcacacaaataagtaacatactcac

SEQ ID NO: 2101420 - DNA, 25 bp, Homo sapien
catcacacaaataagtaacatactc

SEQ ID NO: 2101421 - DNA, 25 bp, Homo sapien
gtttcatcacacaaataagtaacat

SEQ ID NO: 2101422 - DNA, 25 bp, Homo sapien
tcagagtttcatcacacaaataagt

SEQ ID NO: 2101423 - DNA, 25 bp, Homo sapien
ggtaccaccaatataggcgccactg

SEQ ID NO: 2101424 - DNA, 25 bp, Homo sapien
ctgggtaccaccaatataggcgcca

SEQ ID NO: 2101425 - DNA, 25 bp, Homo sapien
taccaccaatataggcgccactgaa

SEQ ID NO: 2101426 - DNA, 25 bp, Homo sapien
caatataggcgccactgaaattaaa

SEQ ID NO: 2101427 - DNA, 25 bp, Homo sapien
tcttttagattaaactccactctgg

SEQ ID NO: 2101428 - DNA, 25 bp, Homo sapien
ctctggcacgtgttatacctttgtt

SEQ ID NO: 2101429 - DNA, 25 bp, Homo sapien
gatccattgaaaaatccggaaagtc

SEQ ID NO: 2101430 - DNA, 25 bp, Homo sapien
ctttaagatccattgaaaaatccgg

SEQ ID NO: 2101431 - DNA, 25 bp, Homo sapien
aggaactgcagggtctttaaattct

SEQ ID NO: 2101432 - DNA, 25 bp, Homo sapien
tgttatgctacattccagagatgta

SEQ ID NO: 2101433 - DNA, 25 bp, Homo sapien
gggagaaaatgttatgctacattcc

SEQ ID NO: 2101434 - DNA, 25 bp, Homo sapien
tatataaggaactgcagggtcttta

SEQ ID NO: 2101435 - DNA, 25 bp, Homo sapien
gaaattaatctgaacttgaatgatg

SEQ ID NO: 2101436 - DNA, 25 bp, Homo sapien
cagtagcttgaacgtaacatggtcg

SEQ ID NO: 2101437 - DNA, 25 bp, Homo sapien
tggattcgaaggagaactggacaaa

SEQ ID NO: 2101438 - DNA, 25 bp, Homo sapien
atttagtgtagagctttgaagactc

SEQ ID NO: 2101439 - DNA, 25 bp, Homo sapien
gatttcaaatacaaacttagtacta

SEQ ID NO: 2101440 - DNA, 25 bp, Homo sapien
tttgtgaccttgttattaggattca

SEQ ID NO: 2101441 - DNA, 25 bp, Homo sapien
aggattcatctcatgtaaagggatt

SEQ ID NO: 2101442 - DNA, 25 bp, Homo sapien
tagtactagataagttcaatggtga

SEQ ID NO: 2101443 - DNA, 25 bp, Homo sapien
gacagaaacttatggaaacattata

SEQ ID NO: 2101444 - DNA, 25 bp, Homo sapien
cttttcatttggtcgtagaatccca

SEQ ID NO: 2101445 - DNA, 25 bp, Homo sapien
gtattactaagatccaaagtccatg

SEQ ID NO: 2101446 - DNA, 25 bp, Homo sapien
ttcagtacactgaacttgaatgtgc

SEQ ID NO: 2101447 - DNA, 25 bp, Homo sapien
cccttagcaaagattggggccatca

SEQ ID NO: 2101448 - DNA, 25 bp, Homo sapien
gattggggccatcaagggtatcttc

SEQ ID NO: 2101449 - DNA, 25 bp, Homo sapien
caagaccatgttcaaaagtggcact

SEQ ID NO: 2101450 - DNA, 25 bp, Homo sapien
aaaatgacagtgcactgggtgatgc

SEQ ID NO: 2101451 - DNA, 25 bp, Homo sapien
tacttccccagtaagatgtaatatt

SEQ ID NO: 2101452 - DNA, 25 bp, Homo sapien
tatctgctgtgtatgtcccaggacg

SEQ ID NO: 2101453 - DNA, 25 bp, Homo sapien
agttgttatatccaaaggaacagga

SEQ ID NO: 2101454 - DNA, 25 bp, Homo sapien
tttaaaagcataggaatatctgctg

SEQ ID NO: 2101455 - DNA, 25 bp, Homo sapien
ggaatctggacacatagagttgaat

SEQ ID NO: 2101456 - DNA, 25 bp, Homo sapien
agaaagagggtgaatctcttcacca

SEQ ID NO: 2101457 - DNA, 25 bp, Homo sapien
gcaagtgagcttattattaattcca

SEQ ID NO: 2101458 - DNA, 25 bp, Homo sapien
aatgacacaggtttagatgacttga

SEQ ID NO: 2101459 - DNA, 25 bp, Homo sapien
cagttcctaaggtagcattgccaac

SEQ ID NO: 2101460 - DNA, 25 bp, Homo sapien
gctagcctcctttatgtgatgcagt

SEQ ID NO: 2101461 - DNA, 25 bp, Homo sapien
cattttaaagcactagggactgacc

SEQ ID NO: 2101462 - DNA, 25 bp, Homo sapien
caaactgatttgactctggatctga

SEQ ID NO: 2101463 - DNA, 25 bp, Homo sapien
cattatgttgccagacacaagaatc

SEQ ID NO: 2101464 - DNA, 25 bp, Homo sapien
gctcattgagtatgagtagagctca

SEQ ID NO: 2101465 - DNA, 25 bp, Homo sapien
tctcttgatcacaagtgaggacatc

SEQ ID NO: 2101466 - DNA, 25 bp, Homo sapien
gagctcattcattatgttgccagac

SEQ ID NO: 2101467 - DNA, 25 bp, Homo sapien
tgttgcagtaactggaagtgaaaac

SEQ ID NO: 2101468 - DNA, 25 bp, Homo sapien
gctgttgcagtaactggaagtgaaa

SEQ ID NO: 2101469 - DNA, 25 bp, Homo sapien
tgctgttgcagtaactggaagtgaa

SEQ ID NO: 2101470 - DNA, 25 bp, Homo sapien
tagtaagaatgcagttttctgctgt

SEQ ID NO: 2101471 - DNA, 25 bp, Homo sapien
tttgcttatccagatgaattgccat

SEQ ID NO: 2101472 - DNA, 25 bp, Homo sapien
gttttgcttatccagatgaattgcc

SEQ ID NO: 2101473 - DNA, 25 bp, Homo sapien
ttttgcttatccagatgaattgcca

SEQ ID NO: 2101474 - DNA, 25 bp, Homo sapien
tgttttgcttatccagatgaattgc

SEQ ID NO: 2101475 - DNA, 25 bp, Homo sapien
aaaagagtcacgatacatgcttgtg

SEQ ID NO: 2101476 - DNA, 25 bp, Homo sapien
gatacatgcttgtgacttgcttgtc

SEQ ID NO: 2101477 - DNA, 25 bp, Homo sapien
cagtaaaaagagtcacgatacatgc

SEQ ID NO: 2101478 - DNA, 25 bp, Homo sapien
cacaatccagttccaatccaagagg

SEQ ID NO: 2101479 - DNA, 25 bp, Homo sapien
gaatttgctagtggtgtatgtcttt

SEQ ID NO: 2101480 - DNA, 25 bp, Homo sapien
tcctggtagggaggcaaaacaccat

SEQ ID NO: 2101481 - DNA, 25 bp, Homo sapien
tccctttgcaggttcagcatcattg

SEQ ID NO: 2101482 - DNA, 25 bp, Homo sapien
aaacaccatctctagtcttcttaag

SEQ ID NO: 2101483 - DNA, 25 bp, Homo sapien
ttcatccaagtgcaaattttcaggc

SEQ ID NO: 2101484 - DNA, 25 bp, Homo sapien
aagtagtgtgcctttgttccttcct

SEQ ID NO: 2101485 - DNA, 25 bp, Homo sapien
ctcaaaaaagtagtgtgcctttgtt

SEQ ID NO: 2101486 - DNA, 25 bp, Homo sapien
tccagagacccatgatcttcctctg

SEQ ID NO: 2101487 - DNA, 25 bp, Homo sapien
ttatagtctctggaatagaaaaaga

SEQ ID NO: 2101488 - DNA, 25 bp, Homo sapien
cttcaggccagccaaagagactgaa

SEQ ID NO: 2101489 - DNA, 25 bp, Homo sapien
agccaaagagactgaaccaggtctg

SEQ ID NO: 2101490 - DNA, 25 bp, Homo sapien
ccaggtctgtgctgcatttacaacc

SEQ ID NO: 2101491 - DNA, 25 bp, Homo sapien
gaaagatgaatattacatgatctca

SEQ ID NO: 2101492 - DNA, 25 bp, Homo sapien
aacgatataatcactcccaggttta

SEQ ID NO: 2101493 - DNA, 25 bp, Homo sapien
gagtgaaatccagtagtttttgaca

SEQ ID NO: 2101494 - DNA, 25 bp, Homo sapien
gaaaatgtaacactcctcagcctta

SEQ ID NO: 2101495 - DNA, 25 bp, Homo sapien
tctacaggtaaagattgacttgaat

SEQ ID NO: 2101496 - DNA, 25 bp, Homo sapien
ttaattccaggtggcatttttccac

SEQ ID NO: 2101497 - DNA, 25 bp, Homo sapien
tgttgcaaatggagttgaattaccc

SEQ ID NO: 2101498 - DNA, 25 bp, Homo sapien
agtcattctgtctggaaaacttttg

SEQ ID NO: 2101499 - DNA, 25 bp, Homo sapien
caaaaattctggcaggacatgtgaa

SEQ ID NO: 2101500 - DNA, 25 bp, Homo sapien
acctcttataatcttctggttcaag

SEQ ID NO: 2101501 - DNA, 25 bp, Homo sapien
ttctggttcaagcaaaaattctggc

SEQ ID NO: 2101502 - DNA, 25 bp, Homo sapien
atgtgaaatacatcctccttgagca

SEQ ID NO: 2101503 - DNA, 25 bp, Homo sapien
tcacaggcatcgtattagtggaaga

SEQ ID NO: 2101504 - DNA, 25 bp, Homo sapien
ggaactcacaggcatcgtattagtg

SEQ ID NO: 2101505 - DNA, 25 bp, Homo sapien
actcacaggcatcgtattagtggaa

SEQ ID NO: 2101506 - DNA, 25 bp, Homo sapien
gaactcacaggcatcgtattagtgg

SEQ ID NO: 2101507 - DNA, 25 bp, Homo sapien
aatacatctgtccatgcccgtttac

SEQ ID NO: 2101508 - DNA, 25 bp, Homo sapien
agaaatacatctgtccatgcccgtt

SEQ ID NO: 2101509 - DNA, 25 bp, Homo sapien
tacatctgtccatgcccgtttactc

SEQ ID NO: 2101510 - DNA, 25 bp, Homo sapien
gaaatacatctgtccatgcccgttt

SEQ ID NO: 2101511 - DNA, 25 bp, Homo sapien
tattccacttcttgtaaccatttct

SEQ ID NO: 2101512 - DNA, 25 bp, Homo sapien
tcagtgggacactggaagctatgct

SEQ ID NO: 2101513 - DNA, 25 bp, Homo sapien
ccatttctgacgtgagtgtgaagtc

SEQ ID NO: 2101514 - DNA, 25 bp, Homo sapien
cacagctcttggcttcgctgttggt

SEQ ID NO: 2101515 - DNA, 25 bp, Homo sapien
tatatgttgctggatgcaaaacaag

SEQ ID NO: 2101516 - DNA, 25 bp, Homo sapien
ggcatattattgctgcagtatggca

SEQ ID NO: 2101517 - DNA, 25 bp, Homo sapien
gacttttggtgtattttgcacacat

SEQ ID NO: 2101518 - DNA, 25 bp, Homo sapien
ccatatcacatgtcgagtattctca

SEQ ID NO: 2101519 - DNA, 25 bp, Homo sapien
caataggctcccaactgtgttgcaa

SEQ ID NO: 2101520 - DNA, 25 bp, Homo sapien
aactgtgttgcaaaaacaagaccat

SEQ ID NO: 2101521 - DNA, 25 bp, Homo sapien
aagaatgggcaataggctcccaact

SEQ ID NO: 2101522 - DNA, 25 bp, Homo sapien
ctgtgttgcaaaaacaagaccatct

SEQ ID NO: 2101523 - DNA, 25 bp, Homo sapien
caggactttttggtcgtgtgtacat

SEQ ID NO: 2101524 - DNA, 25 bp, Homo sapien
ttacaataatcaggcaattgtgcag

SEQ ID NO: 2101525 - DNA, 25 bp, Homo sapien
tgtgcagatactcttcaggactttt

SEQ ID NO: 2101526 - DNA, 25 bp, Homo sapien
ctgtatttccacgtcaaagtcaatt

SEQ ID NO: 2101527 - DNA, 25 bp, Homo sapien
gcattgcgactggtctgcgttccct

SEQ ID NO: 2101528 - DNA, 25 bp, Homo sapien
ttgttgttgcaagagtaaaggcctt

SEQ ID NO: 2101529 - DNA, 25 bp, Homo sapien
tgcgttccctgtcaccagttccttt

SEQ ID NO: 2101530 - DNA, 25 bp, Homo sapien
tcctctcggtccatcctgacaattg

SEQ ID NO: 2101531 - DNA, 25 bp, Homo sapien
aatcggatggtaacaacccacactg

SEQ ID NO: 2101532 - DNA, 25 bp, Homo sapien
ctgccacagccaatcggatggtaac

SEQ ID NO: 2101533 - DNA, 25 bp, Homo sapien
gggagaaagagatcacgacaaaaat

SEQ ID NO: 2101534 - DNA, 25 bp, Homo sapien
aaaatgcatcctgctccaaagggag

SEQ ID NO: 2101535 - DNA, 25 bp, Homo sapien
tgaggccgaaggctgaaagcccaaa

SEQ ID NO: 2101536 - DNA, 25 bp, Homo sapien
ccagaagcatggctcaggccaagtc

SEQ ID NO: 2101537 - DNA, 25 bp, Homo sapien
taggctggctacaaactgcagaatg

SEQ ID NO: 2101538 - DNA, 25 bp, Homo sapien
tcacaaaggcgaagtcccacagtag

SEQ ID NO: 2101539 - DNA, 25 bp, Homo sapien
tcagcaccgtgtcatgtagagtaca

SEQ ID NO: 2101540 - DNA, 25 bp, Homo sapien
caaaggacaccaccttcttagggag

SEQ ID NO: 2101541 - DNA, 25 bp, Homo sapien
tcaggattggatttgggtcacagat

SEQ ID NO: 2101542 - DNA, 25 bp, Homo sapien
cacaaagcatgagcatcaggattgg

SEQ ID NO: 2101543 - DNA, 25 bp, Homo sapien
tggagaaattgtcacaacattccct

SEQ ID NO: 2101544 - DNA, 25 bp, Homo sapien
taagtttcgcgagctggaatttttc

SEQ ID NO: 2101545 - DNA, 25 bp, Homo sapien
tatacactaagtttcgcgagctgga

SEQ ID NO: 2101546 - DNA, 25 bp, Homo sapien
caacaattctagcattatacactaa

SEQ ID NO: 2101547 - DNA, 25 bp, Homo sapien
cttcagcaggacgaataaagcgact

SEQ ID NO: 2101548 - DNA, 25 bp, Homo sapien
taattcctcttactgcattcttggg

SEQ ID NO: 2101549 - DNA, 25 bp, Homo sapien
tggctttaaaatcgaggactttgcc

SEQ ID NO: 2101550 - DNA, 25 bp, Homo sapien
taagagcaaaagtcattgtaattcc

SEQ ID NO: 2101551 - DNA, 25 bp, Homo sapien
acttcctgaaattgataacatgggc

SEQ ID NO: 2101552 - DNA, 25 bp, Homo sapien
gacttcctgaaattgataacatggg

SEQ ID NO: 2101553 - DNA, 25 bp, Homo sapien
gtgacttcctgaaattgataacatg

SEQ ID NO: 2101554 - DNA, 25 bp, Homo sapien
cttcctgaaattgataacatgggct

SEQ ID NO: 2101555 - DNA, 25 bp, Homo sapien
tacttaaagtgtgttcaaaatgcag

SEQ ID NO: 2101556 - DNA, 25 bp, Homo sapien
gaatcatccctgcttaaatacaaag

SEQ ID NO: 2101557 - DNA, 25 bp, Homo sapien
cactgtacatacaccattttgagac

SEQ ID NO: 2101558 - DNA, 25 bp, Homo sapien
gtgataatctgttctggctaaaaag

SEQ ID NO: 2101559 - DNA, 25 bp, Homo sapien
tgttgaggattccaccaaaatgaca

SEQ ID NO: 2101560 - DNA, 25 bp, Homo sapien
agagacaaatgttgaggattccacc

SEQ ID NO: 2101561 - DNA, 25 bp, Homo sapien
tcagttaacttcgttggcgaagaga

SEQ ID NO: 2101562 - DNA, 25 bp, Homo sapien
tcgttggcgaagagacaaatgttga

SEQ ID NO: 2101563 - DNA, 25 bp, Homo sapien
gaagaaagcggagctctaggcttga

SEQ ID NO: 2101564 - DNA, 25 bp, Homo sapien
agcggagctctaggcttgaagttcc

SEQ ID NO: 2101565 - DNA, 25 bp, Homo sapien
gaaagcggagctctaggcttgaagt

SEQ ID NO: 2101566 - DNA, 25 bp, Homo sapien
cggagctctaggcttgaagttcctt

SEQ ID NO: 2101567 - DNA, 25 bp, Homo sapien
gatgatgacacagtagcgcacgtgc

SEQ ID NO: 2101568 - DNA, 25 bp, Homo sapien
ttgctcaagatgatgacacagtagc

SEQ ID NO: 2101569 - DNA, 25 bp, Homo sapien
tgatgacacagtagcgcacgtgcat

SEQ ID NO: 2101570 - DNA, 25 bp, Homo sapien
caagatgatgacacagtagcgcacg

SEQ ID NO: 2101571 - DNA, 25 bp, Homo sapien
tcaaagcaattataggccaaatggg

SEQ ID NO: 2101572 - DNA, 25 bp, Homo sapien
cagcaggctttatgaggttaacaaa

SEQ ID NO: 2101573 - DNA, 25 bp, Homo sapien
tatatgccacattgacagagacttc

SEQ ID NO: 2101574 - DNA, 25 bp, Homo sapien
gacttcaaggttgacataacctgcc

SEQ ID NO: 2101575 - DNA, 25 bp, Homo sapien
taccttttccttccgcaacatatat

SEQ ID NO: 2101576 - DNA, 25 bp, Homo sapien
ttttccttccgcaacatatattaat

SEQ ID NO: 2101577 - DNA, 25 bp, Homo sapien
cataccttttccttccgcaacatat

SEQ ID NO: 2101578 - DNA, 25 bp, Homo sapien
ccttttccttccgcaacatatatta

SEQ ID NO: 2101579 - DNA, 25 bp, Homo sapien
cttcttctcgagtagtgctgtaata

SEQ ID NO: 2101580 - DNA, 25 bp, Homo sapien
tcttctcgagtagtgctgtaataaa

SEQ ID NO: 2101581 - DNA, 25 bp, Homo sapien
aaactggacttgaagacgtattcat

SEQ ID NO: 2101582 - DNA, 25 bp, Homo sapien
ataaactggacttgaagacgtattc

SEQ ID NO: 2101583 - DNA, 25 bp, Homo sapien
atttaaggtccacatacaggatttg

SEQ ID NO: 2101584 - DNA, 25 bp, Homo sapien
gcaatttaaggtccacatacaggat

SEQ ID NO: 2101585 - DNA, 25 bp, Homo sapien
tccttggcttcattagtcattggca

SEQ ID NO: 2101586 - DNA, 25 bp, Homo sapien
ttttccttggcttcattagtcattg

SEQ ID NO: 2101587 - DNA, 25 bp, Homo sapien
gatcaaccttcgctcatactcaata

SEQ ID NO: 2101588 - DNA, 25 bp, Homo sapien
tcaatactcgacatctgttgctgtg

SEQ ID NO: 2101589 - DNA, 25 bp, Homo sapien
gatactactgctctctagagtgcct

SEQ ID NO: 2101590 - DNA, 25 bp, Homo sapien
ggcgatggccacacggatactactg

SEQ ID NO: 2101591 - DNA, 25 bp, Homo sapien
cctgaagtaactgagagaggtagcc

SEQ ID NO: 2101592 - DNA, 25 bp, Homo sapien
tgaagcaaagcaaccaggcatgtgc

SEQ ID NO: 2101593 - DNA, 25 bp, Homo sapien
gacacctggcatgtttgaagcaaag

SEQ ID NO: 2101594 - DNA, 25 bp, Homo sapien
gtaagagcactttaacagacacctg

SEQ ID NO: 2101595 - DNA, 25 bp, Homo sapien
cctggttctccagataaattcttgt

SEQ ID NO: 2101596 - DNA, 25 bp, Homo sapien
tgtcttctgcagttaggggaacact

SEQ ID NO: 2101597 - DNA, 25 bp, Homo sapien
ggaacactgggctatccctggttct

SEQ ID NO: 2101598 - DNA, 25 bp, Homo sapien
cagataaattcttgtcatttgtttc

SEQ ID NO: 2101599 - DNA, 25 bp, Homo sapien
tgaagcatctagttgtttcttcttg

SEQ ID NO: 2101600 - DNA, 25 bp, Homo sapien
tggctgcttagggtctcttttgccc

SEQ ID NO: 2101601 - DNA, 25 bp, Homo sapien
ctcttggctgcttagggtctctttt

SEQ ID NO: 2101602 - DNA, 25 bp, Homo sapien
agcatctagttgtttcttcttgtgc

SEQ ID NO: 2101603 - DNA, 25 bp, Homo sapien
ctctgagcagttcttagaaaactct

SEQ ID NO: 2101604 - DNA, 25 bp, Homo sapien
acctctctgagcagttcttagaaaa

SEQ ID NO: 2101605 - DNA, 25 bp, Homo sapien
aggccttgtctgcctttgccatgtc

SEQ ID NO: 2101606 - DNA, 25 bp, Homo sapien
ttcctttctctttaacagacatggt

SEQ ID NO: 2101607 - DNA, 25 bp, Homo sapien
gatccttgaacttcttttttgtctc

SEQ ID NO: 2101608 - DNA, 25 bp, Homo sapien
ctttaagtagggatatattttcatt

SEQ ID NO: 2101609 - DNA, 25 bp, Homo sapien
cttaggtgcattgagatccttgaac

SEQ ID NO: 2101610 - DNA, 25 bp, Homo sapien
tgtctcccctttaagtagggatata

SEQ ID NO: 2101611 - DNA, 25 bp, Homo sapien
cagaacagaaaaaaggccgaaggag

SEQ ID NO: 2101612 - DNA, 25 bp, Homo sapien
acagaaaaaaggccgaaggaggcat

SEQ ID NO: 2101613 - DNA, 25 bp, Homo sapien
tggacaggatgttctcctttggttt

SEQ ID NO: 2101614 - DNA, 25 bp, Homo sapien
gactggacaggatgttctcctttgg

SEQ ID NO: 2101615 - DNA, 25 bp, Homo sapien
tggactggacaggatgttctccttt

SEQ ID NO: 2101616 - DNA, 25 bp, Homo sapien
acaggatgttctcctttggtttttg

SEQ ID NO: 2101617 - DNA, 25 bp, Homo sapien
cacattcctcccagtttctttacaa

SEQ ID NO: 2101618 - DNA, 25 bp, Homo sapien
catgaggctgcttttcatctgcagc

SEQ ID NO: 2101619 - DNA, 25 bp, Homo sapien
cacagccttcttttcatgaggctgc

SEQ ID NO: 2101620 - DNA, 25 bp, Homo sapien
agtgttattccacattcctcccagt

SEQ ID NO: 2101621 - DNA, 25 bp, Homo sapien
ttcatcttcttcctccccttgatct

SEQ ID NO: 2101622 - DNA, 25 bp, Homo sapien
ttcttcctccccttgatcttcatct

SEQ ID NO: 2101623 - DNA, 25 bp, Homo sapien
atcttcttcctccccttgatcttca

SEQ ID NO: 2101624 - DNA, 25 bp, Homo sapien
tcatcttcttcctccccttgatctt

SEQ ID NO: 2101625 - DNA, 25 bp, Homo sapien
tctgatttaaatttccacgccaatt

SEQ ID NO: 2101626 - DNA, 25 bp, Homo sapien
gctgtgcactaacgagaatctgatt

SEQ ID NO: 2101627 - DNA, 25 bp, Homo sapien
cgagaatctgatttaaatttccacg

SEQ ID NO: 2101628 - DNA, 25 bp, Homo sapien
gtgctgtgcactaacgagaatctga

SEQ ID NO: 2101629 - DNA, 25 bp, Homo sapien
tacaagggtagcgtccagattggag

SEQ ID NO: 2101630 - DNA, 25 bp, Homo sapien
aattttacaagggtagcgtccagat

SEQ ID NO: 2101631 - DNA, 25 bp, Homo sapien
acaagggtagcgtccagattggaga

SEQ ID NO: 2101632 - DNA, 25 bp, Homo sapien
tttacaagggtagcgtccagattgg

SEQ ID NO: 2101633 - DNA, 25 bp, Homo sapien
aacataataggcacgcacatcatac

SEQ ID NO: 2101634 - DNA, 25 bp, Homo sapien
cttcaacataataggcacgcacatc

SEQ ID NO: 2101635 - DNA, 25 bp, Homo sapien
ttcaacataataggcacgcacatca

SEQ ID NO: 2101636 - DNA, 25 bp, Homo sapien
caacataataggcacgcacatcata

SEQ ID NO: 2101637 - DNA, 25 bp, Homo sapien
tattggaatattctgagtaagggct

SEQ ID NO: 2101638 - DNA, 25 bp, Homo sapien
ggaatattctgagtaagggcttcaa

SEQ ID NO: 2101639 - DNA, 25 bp, Homo sapien
ctgagtaagggcttcaaatgctggt

SEQ ID NO: 2101640 - DNA, 25 bp, Homo sapien
atattctgagtaagggcttcaaatg

SEQ ID NO: 2101641 - DNA, 25 bp, Homo sapien
catgtaaatcaacaggtccataaaa

SEQ ID NO: 2101642 - DNA, 25 bp, Homo sapien
taggtttgaatgtgagaggatactc

SEQ ID NO: 2101643 - DNA, 25 bp, Homo sapien
acttgaaaggtccatttatcgtttg

SEQ ID NO: 2101644 - DNA, 25 bp, Homo sapien
caatttcatctggtccaacatgtaa

SEQ ID NO: 2101645 - DNA, 25 bp, Homo sapien
tgatgtgttccaaggccgaaggttt

SEQ ID NO: 2101646 - DNA, 25 bp, Homo sapien
ccacttgacattccacagtgatgtg

SEQ ID NO: 2101647 - DNA, 25 bp, Homo sapien
tatgcttttgtgtcacattccccac

SEQ ID NO: 2101648 - DNA, 25 bp, Homo sapien
taaatgttagggcagtatttgtgaa

SEQ ID NO: 2101649 - DNA, 25 bp, Homo sapien
ttcaatataccacgtttccaagggc

SEQ ID NO: 2101650 - DNA, 25 bp, Homo sapien
tggatttccccacactattggaaga

SEQ ID NO: 2101651 - DNA, 25 bp, Homo sapien
caagggcgcacatgaatcaggtaca

SEQ ID NO: 2101652 - DNA, 25 bp, Homo sapien
taatttgtggatttccccacactat

SEQ ID NO: 2101653 - DNA, 25 bp, Homo sapien
cctgccagaagggttcccacccaca

SEQ ID NO: 2101654 - DNA, 25 bp, Homo sapien
cactgtcccaccgaagtactttctg

SEQ ID NO: 2101655 - DNA, 25 bp, Homo sapien
tcccaccgaagtactttctgaccat

SEQ ID NO: 2101656 - DNA, 25 bp, Homo sapien
tgggtcacaatcagctgcggcatca

SEQ ID NO: 2101657 - DNA, 25 bp, Homo sapien
ctgtccctatgggtcacaatcagct

SEQ ID NO: 2101658 - DNA, 25 bp, Homo sapien
caactgctaaggagacgtactgtaa

SEQ ID NO: 2101659 - DNA, 25 bp, Homo sapien
tcatcagtttgtgaaccatggaagc

SEQ ID NO: 2101660 - DNA, 25 bp, Homo sapien
aggaaaatctctgtatgactggaat

SEQ ID NO: 2101661 - DNA, 25 bp, Homo sapien
cagtcaagaagttttggtataagta

SEQ ID NO: 2101662 - DNA, 25 bp, Homo sapien
gattgttctgttattgaatcaagac

SEQ ID NO: 2101663 - DNA, 25 bp, Homo sapien
caggagagggcttgatcttgatctg

SEQ ID NO: 2101664 - DNA, 25 bp, Homo sapien
gttattgaatcaagacaggagaggg

SEQ ID NO: 2101665 - DNA, 25 bp, Homo sapien
gcatcatccaaaatgctagattgtt

SEQ ID NO: 2101666 - DNA, 25 bp, Homo sapien
tggtccaggagtgctatggatctca

SEQ ID NO: 2101667 - DNA, 25 bp, Homo sapien
cagagcaatacatgtcatttccata

SEQ ID NO: 2101668 - DNA, 25 bp, Homo sapien
cataatctctatgggtggtccagga

SEQ ID NO: 2101669 - DNA, 25 bp, Homo sapien
gctatggatctcaagattataccag

SEQ ID NO: 2101670 - DNA, 25 bp, Homo sapien
cgacaattacgactagaaacgtgag

SEQ ID NO: 2101671 - DNA, 25 bp, Homo sapien
cttcgacaattacgactagaaacgt

SEQ ID NO: 2101672 - DNA, 25 bp, Homo sapien
caattacgactagaaacgtgagaaa

SEQ ID NO: 2101673 - DNA, 25 bp, Homo sapien
tggcaacatcactagccacgatagc

SEQ ID NO: 2101674 - DNA, 25 bp, Homo sapien
gaggtatttcaatgcaagtgctgtc

SEQ ID NO: 2101675 - DNA, 25 bp, Homo sapien
gagaggtatttcaatgcaagtgctg

SEQ ID NO: 2101676 - DNA, 25 bp, Homo sapien
gagagaggtatttcaatgcaagtgc

SEQ ID NO: 2101677 - DNA, 25 bp, Homo sapien
agagagaggtatttcaatgcaagtg

SEQ ID NO: 2101678 - DNA, 25 bp, Homo sapien
ttaagggcagcactcgttaactgca

SEQ ID NO: 2101679 - DNA, 25 bp, Homo sapien
cctgtagttgctggagaataccata

SEQ ID NO: 2101680 - DNA, 25 bp, Homo sapien
gttaactgcacctctaagtgaagac

SEQ ID NO: 2101681 - DNA, 25 bp, Homo sapien
tatttggtgcactgtagtggactca

SEQ ID NO: 2101682 - DNA, 25 bp, Homo sapien
ttgccaaggtcgcactgtatttctg

SEQ ID NO: 2101683 - DNA, 25 bp, Homo sapien
gtaaataccagaactcttcagccat

SEQ ID NO: 2101684 - DNA, 25 bp, Homo sapien
ggtaattcaatagttaacttcagta

SEQ ID NO: 2101685 - DNA, 25 bp, Homo sapien
tgccaaggtcgcactgtatttctgg

SEQ ID NO: 2101686 - DNA, 25 bp, Homo sapien
taaaggaatgatctgagtgacatgc

SEQ ID NO: 2101687 - DNA, 25 bp, Homo sapien
tacttgcaattttaaggtttcatgc

SEQ ID NO: 2101688 - DNA, 25 bp, Homo sapien
tgcgtacaattaactaaaggaatga

SEQ ID NO: 2101689 - DNA, 25 bp, Homo sapien
aaggtttcatgcgtacaattaacta

SEQ ID NO: 2101690 - DNA, 25 bp, Homo sapien
ctgagtacagtagaagttgatgcaa

SEQ ID NO: 2101691 - DNA, 25 bp, Homo sapien
agagaacaggtaattctgtggtgga

SEQ ID NO: 2101692 - DNA, 25 bp, Homo sapien
gatgatcagctcttccaagtgcaga

SEQ ID NO: 2101693 - DNA, 25 bp, Homo sapien
agaagttgatgcaagcttgatgatc

SEQ ID NO: 2101694 - DNA, 25 bp, Homo sapien
gaaatagtcctactccagataagta

SEQ ID NO: 2101695 - DNA, 25 bp, Homo sapien
ctggggaaatagtcctactccagat

SEQ ID NO: 2101696 - DNA, 25 bp, Homo sapien
tagtcctactccagataagtagaat

SEQ ID NO: 2101697 - DNA, 25 bp, Homo sapien
tactccagataagtagaatttccat

SEQ ID NO: 2101698 - DNA, 25 bp, Homo sapien
gaaaggtataacaatagttgactga

SEQ ID NO: 2101699 - DNA, 25 bp, Homo sapien
actgaagaccaatgcgtgtggttat

SEQ ID NO: 2101700 - DNA, 25 bp, Homo sapien
caatgaggacatcttccattgtggg

SEQ ID NO: 2101701 - DNA, 25 bp, Homo sapien
ccattgtgggatttttgaaaggtat

SEQ ID NO: 2101702 - DNA, 25 bp, Homo sapien
caacccatccatatccgtcatccac

SEQ ID NO: 2101703 - DNA, 25 bp, Homo sapien
ccatatccgtcatccacaaataatt

SEQ ID NO: 2101704 - DNA, 25 bp, Homo sapien
catccatatccgtcatccacaaata

SEQ ID NO: 2101705 - DNA, 25 bp, Homo sapien
aacccatccatatccgtcatccaca

SEQ ID NO: 2101706 - DNA, 25 bp, Homo sapien
aatgatccatgacaagattcctggg

SEQ ID NO: 2101707 - DNA, 25 bp, Homo sapien
ggcagaactctcatagatgaagcta

SEQ ID NO: 2101708 - DNA, 25 bp, Homo sapien
ctcggagaactaaatctgaaggcag

SEQ ID NO: 2101709 - DNA, 25 bp, Homo sapien
tgaagctatcccagcaatgatccat

SEQ ID NO: 2101710 - DNA, 25 bp, Homo sapien
tcacaattcacctacactcttgtgt

SEQ ID NO: 2101711 - DNA, 25 bp, Homo sapien
acctacactcttgtgtcgttcttgg

SEQ ID NO: 2101712 - DNA, 25 bp, Homo sapien
tgtcgttcttggttatttgacctaa

SEQ ID NO: 2101713 - DNA, 25 bp, Homo sapien
cttgtgtcgttcttggttatttgac

SEQ ID NO: 2101714 - DNA, 25 bp, Homo sapien
tttcctttaggaggcagtgcaattc

SEQ ID NO: 2101715 - DNA, 25 bp, Homo sapien
aatttgaggtataaataacaatgag

SEQ ID NO: 2101716 - DNA, 25 bp, Homo sapien
gagatatctatatttcctttaggag

SEQ ID NO: 2101717 - DNA, 25 bp, Homo sapien
ttttgtgtaatttcataatttgagg

SEQ ID NO: 2101718 - DNA, 25 bp, Homo sapien
tcaaaattgtcaataggccaatatt

SEQ ID NO: 2101719 - DNA, 25 bp, Homo sapien
aaaattgtcaataggccaatatttt

SEQ ID NO: 2101720 - DNA, 25 bp, Homo sapien
catcaaaattgtcaataggccaata

SEQ ID NO: 2101721 - DNA, 25 bp, Homo sapien
tatccaactcatcaaaattgtcaat

SEQ ID NO: 2101722 - DNA, 25 bp, Homo sapien
ggatttcttcgctgtcgattcccac

SEQ ID NO: 2101723 - DNA, 25 bp, Homo sapien
gatttcttcgctgtcgattcccaca

SEQ ID NO: 2101724 - DNA, 25 bp, Homo sapien
ttggatttcttcgctgtcgattccc

SEQ ID NO: 2101725 - DNA, 25 bp, Homo sapien
ttcttcgctgtcgattcccacaata

SEQ ID NO: 2101726 - DNA, 25 bp, Homo sapien
gcttgtgggagtccaacaatagggt

SEQ ID NO: 2101727 - DNA, 25 bp, Homo sapien
gaggtggtgcttgtgggagtccaac

SEQ ID NO: 2101728 - DNA, 25 bp, Homo sapien
ccaacaatagggtatatccagtgta

SEQ ID NO: 2101729 - DNA, 25 bp, Homo sapien
tccaacaatagggtatatccagtgt

SEQ ID NO: 2101730 - DNA, 25 bp, Homo sapien
gatctggagtaagactaaatccgaa

SEQ ID NO: 2101731 - DNA, 25 bp, Homo sapien
taaatccgaaaaaaccagcattcag

SEQ ID NO: 2101732 - DNA, 25 bp, Homo sapien
ccagcattcagtatgatttctacct

SEQ ID NO: 2101733 - DNA, 25 bp, Homo sapien
ctgtcagatctggagtaagactaaa

SEQ ID NO: 2101734 - DNA, 25 bp, Homo sapien
ccaacttagacttcatagcttcaga

SEQ ID NO: 2101735 - DNA, 25 bp, Homo sapien
tctttggtgtgaataccagattgaa

SEQ ID NO: 2101736 - DNA, 25 bp, Homo sapien
tataaagctacacaggattccaact

SEQ ID NO: 2101737 - DNA, 25 bp, Homo sapien
tactcgaattcatgtattttaggaa

SEQ ID NO: 2101738 - DNA, 25 bp, Homo sapien
gcatccgtatcaggttcagtagcga

SEQ ID NO: 2101739 - DNA, 25 bp, Homo sapien
tcagtagcgatcaacattatgggaa

SEQ ID NO: 2101740 - DNA, 25 bp, Homo sapien
ttttcagcctaagttcaaaaacaga

SEQ ID NO: 2101741 - DNA, 25 bp, Homo sapien
gatcccttctgttacgcactctatt

SEQ ID NO: 2101742 - DNA, 25 bp, Homo sapien
tccgtttctattccatggcgatatt

SEQ ID NO: 2101743 - DNA, 25 bp, Homo sapien
ctatcataataccttttgtttccgt

SEQ ID NO: 2101744 - DNA, 25 bp, Homo sapien
tttccgtttctattccatggcgata

SEQ ID NO: 2101745 - DNA, 25 bp, Homo sapien
agctatcataataccttttgtttcc

SEQ ID NO: 2101746 - DNA, 25 bp, Homo sapien
ggtaggaagtgtgcggtgaacggct

SEQ ID NO: 2101747 - DNA, 25 bp, Homo sapien
aggaagtgtgcggtgaacggctcag

SEQ ID NO: 2101748 - DNA, 25 bp, Homo sapien
ctgccaggtaggaagtgtgcggtga

SEQ ID NO: 2101749 - DNA, 25 bp, Homo sapien
gtgtgcggtgaacggctcaggattt

SEQ ID NO: 2101750 - DNA, 25 bp, Homo sapien
cctacagtgatgagagttccgtttg

SEQ ID NO: 2101751 - DNA, 25 bp, Homo sapien
tatatttcctacagtacattttagg

SEQ ID NO: 2101752 - DNA, 25 bp, Homo sapien
tgctttatatttcctacagtacatt

SEQ ID NO: 2101753 - DNA, 25 bp, Homo sapien
ttaaatcctacagtgatgagagttc

SEQ ID NO: 2101754 - DNA, 25 bp, Homo sapien
ggtaaaccaagatgtagcagttgag

SEQ ID NO: 2101755 - DNA, 25 bp, Homo sapien
tctgtcaccatgtagtaaaaccttt

SEQ ID NO: 2101756 - DNA, 25 bp, Homo sapien
aactttcctctagtgttgacaactg

SEQ ID NO: 2101757 - DNA, 25 bp, Homo sapien
acatccttggctattgcccttatag

SEQ ID NO: 2101758 - DNA, 25 bp, Homo sapien
ggaagacacccctgttcttatgagt

SEQ ID NO: 2101759 - DNA, 25 bp, Homo sapien
caaaggagcacccttgatggtggaa

SEQ ID NO: 2101760 - DNA, 25 bp, Homo sapien
gtggcacggtagttggagttaatcc

SEQ ID NO: 2101761 - DNA, 25 bp, Homo sapien
acaaaattatgtggacggactggca

SEQ ID NO: 2101762 - DNA, 25 bp, Homo sapien
gcaacgctgttattggaaatactgt

SEQ ID NO: 2101763 - DNA, 25 bp, Homo sapien
catcaaagttctacctgagaccaag

SEQ ID NO: 2101764 - DNA, 25 bp, Homo sapien
gactaacaaggaatatctacatgag

SEQ ID NO: 2101765 - DNA, 25 bp, Homo sapien
gagacatttagctttattagcaacg

SEQ ID NO: 2101766 - DNA, 25 bp, Homo sapien
ccacaacaactaatgggactctaga

SEQ ID NO: 2101767 - DNA, 25 bp, Homo sapien
ctaatgggactctagaagagagaga

SEQ ID NO: 2101768 - DNA, 25 bp, Homo sapien
caactaatgggactctagaagagag

SEQ ID NO: 2101769 - DNA, 25 bp, Homo sapien
aacaactaatgggactctagaagag

SEQ ID NO: 2101770 - DNA, 25 bp, Homo sapien
atcacctcatagccacttctgatac

SEQ ID NO: 2101771 - DNA, 25 bp, Homo sapien
tcacctcatagccacttctgataca

SEQ ID NO: 2101772 - DNA, 25 bp, Homo sapien
tcgaagattaagcacaagaagaggc

SEQ ID NO: 2101773 - DNA, 25 bp, Homo sapien
catgtttatactcaggaagcagccc

SEQ ID NO: 2101774 - DNA, 25 bp, Homo sapien
tatatttaaatgcaggatttcgaag

SEQ ID NO: 2101775 - DNA, 25 bp, Homo sapien
aagaagaggcctgccatgtttatac

SEQ ID NO: 2101776 - DNA, 25 bp, Homo sapien
cagctctagactgaagtaatttcca

SEQ ID NO: 2101777 - DNA, 25 bp, Homo sapien
gaagtaatttccacagcatacaata

SEQ ID NO: 2101778 - DNA, 25 bp, Homo sapien
cttctagtggtgtttcagctctaga

SEQ ID NO: 2101779 - DNA, 25 bp, Homo sapien
ggtgtttcagctctagactgaagta

SEQ ID NO: 2101780 - DNA, 25 bp, Homo sapien
gcttggcactgtaataagtttacgg

SEQ ID NO: 2101781 - DNA, 25 bp, Homo sapien
tagacattctactgaccagaggtgg

SEQ ID NO: 2101782 - DNA, 25 bp, Homo sapien
gagagacgaagtaaatttgccaaga

SEQ ID NO: 2101783 - DNA, 25 bp, Homo sapien
tcatcagcacccttcaattgcatgg

SEQ ID NO: 2101784 - DNA, 25 bp, Homo sapien
gtgggtgcgtgcaccgtgcacgagc

SEQ ID NO: 2101785 - DNA, 25 bp, Homo sapien
cggacagcacctggaaaattgggtc

SEQ ID NO: 2101786 - DNA, 25 bp, Homo sapien
tgcgtgcaccgtgcacgagccgaag

SEQ ID NO: 2101787 - DNA, 25 bp, Homo sapien
gacggacagcacctggaaaattggg

SEQ ID NO: 2101788 - DNA, 25 bp, Homo sapien
caatatccatcaagtactaatggct

SEQ ID NO: 2101789 - DNA, 25 bp, Homo sapien
atccatcaagtactaatggctgatg

SEQ ID NO: 2101790 - DNA, 25 bp, Homo sapien
aatatccatcaagtactaatggctg

SEQ ID NO: 2101791 - DNA, 25 bp, Homo sapien
tatccatcaagtactaatggctgat

SEQ ID NO: 2101792 - DNA, 25 bp, Homo sapien
gccaatttggatgcacaatccctga

SEQ ID NO: 2101793 - DNA, 25 bp, Homo sapien
ccaatttggatgcacaatccctgaa

SEQ ID NO: 2101794 - DNA, 25 bp, Homo sapien
tggccaatttggatgcacaatccct

SEQ ID NO: 2101795 - DNA, 25 bp, Homo sapien
gatggccaatttggatgcacaatcc

SEQ ID NO: 2101796 - DNA, 25 bp, Homo sapien
cagtggcatgctctttgccaaactg

SEQ ID NO: 2101797 - DNA, 25 bp, Homo sapien
ctttgatagacagcaggaacagtgg

SEQ ID NO: 2101798 - DNA, 25 bp, Homo sapien
tttgatagacagcaggaacagtggc

SEQ ID NO: 2101799 - DNA, 25 bp, Homo sapien
ctgttgctatctgctccacatccag

SEQ ID NO: 2101800 - DNA, 25 bp, Homo sapien
ctgatttctgttgctatctgctcca

SEQ ID NO: 2101801 - DNA, 25 bp, Homo sapien
ttgctatctgctccacatccagaga

SEQ ID NO: 2101802 - DNA, 25 bp, Homo sapien
tgatttctgttgctatctgctccac

SEQ ID NO: 2101803 - DNA, 25 bp, Homo sapien
cactgccatgaagccaacagctgta

SEQ ID NO: 2101804 - DNA, 25 bp, Homo sapien
gaaaggccagagcaaattgtttagc

SEQ ID NO: 2101805 - DNA, 25 bp, Homo sapien
tgaaatctgatatggtgaaacaggt

SEQ ID NO: 2101806 - DNA, 25 bp, Homo sapien
tttagccagtctagtcacatctgca

SEQ ID NO: 2101807 - DNA, 25 bp, Homo sapien
attttctgagagtgctgttggtttc

SEQ ID NO: 2101808 - DNA, 25 bp, Homo sapien
gattgatacacagcctttaaaagtt

SEQ ID NO: 2101809 - DNA, 25 bp, Homo sapien
tttctgagagtgctgttggtttctg

SEQ ID NO: 2101810 - DNA, 25 bp, Homo sapien
caggaaacagattgatacacagcct

SEQ ID NO: 2101811 - DNA, 25 bp, Homo sapien
tgggagttgggggtgatgctatcca

SEQ ID NO: 2101812 - DNA, 25 bp, Homo sapien
gggagttgggggtgatgctatccat

SEQ ID NO: 2101813 - DNA, 25 bp, Homo sapien
cattgaccctggtggcatgcatctc

SEQ ID NO: 2101814 - DNA, 25 bp, Homo sapien
catgcatctcaatctgaacttcagg

SEQ ID NO: 2101815 - DNA, 25 bp, Homo sapien
actttgactgagtttgaagctgtgg

SEQ ID NO: 2101816 - DNA, 25 bp, Homo sapien
caggtttaagtctcagaaagcttac

SEQ ID NO: 2101817 - DNA, 25 bp, Homo sapien
gaaaggaactgattctctggcatca

SEQ ID NO: 2101818 - DNA, 25 bp, Homo sapien
ccagagtctaaaccaggacagaaag

SEQ ID NO: 2101819 - DNA, 25 bp, Homo sapien
gctctccaactctaacagggctgga

SEQ ID NO: 2101820 - DNA, 25 bp, Homo sapien
gagttatcttgcagtccagagtcta

SEQ ID NO: 2101821 - DNA, 25 bp, Homo sapien
tatctcccagggaatatgcttcatc

SEQ ID NO: 2101822 - DNA, 25 bp, Homo sapien
tgcttcatcatttcgatgctccttt

SEQ ID NO: 2101823 - DNA, 25 bp, Homo sapien
atattatctcccagggaatatgctt

SEQ ID NO: 2101824 - DNA, 25 bp, Homo sapien
tctcccagggaatatgcttcatcat

SEQ ID NO: 2101825 - DNA, 25 bp, Homo sapien
aatcttgaattgtttagcaccaata

SEQ ID NO: 2101826 - DNA, 25 bp, Homo sapien
tggaaggtcccccaaattctgccaa

SEQ ID NO: 2101827 - DNA, 25 bp, Homo sapien
tattggaaggtcccccaaattctgc

SEQ ID NO: 2101828 - DNA, 25 bp, Homo sapien
tcttgaattgtttagcaccaataat

SEQ ID NO: 2101829 - DNA, 25 bp, Homo sapien
gattctcgacaacaataatctatta

SEQ ID NO: 2101830 - DNA, 25 bp, Homo sapien
taaatggactgatatattctgtaaa

SEQ ID NO: 2101831 - DNA, 25 bp, Homo sapien
atttgctgggtgatattctgtatac

SEQ ID NO: 2101832 - DNA, 25 bp, Homo sapien
aggactaatgacagattctcgacaa

SEQ ID NO: 2101833 - DNA, 25 bp, Homo sapien
cagcatcaggaataatttcatattt

SEQ ID NO: 2101834 - DNA, 25 bp, Homo sapien
tccagcatcaggaataatttcatat

SEQ ID NO: 2101835 - DNA, 25 bp, Homo sapien
ccagcatcaggaataatttcatatt

SEQ ID NO: 2101836 - DNA, 25 bp, Homo sapien
ttccagcatcaggaataatttcata

SEQ ID NO: 2101837 - DNA, 25 bp, Homo sapien
ttgccgaccgaggatatgtaggaag

SEQ ID NO: 2101838 - DNA, 25 bp, Homo sapien
gcttgccgaccgaggatatgtagga

SEQ ID NO: 2101839 - DNA, 25 bp, Homo sapien
accgaggatatgtaggaaggagact

SEQ ID NO: 2101840 - DNA, 25 bp, Homo sapien
ttacggcttgccgaccgaggatatg

SEQ ID NO: 2101841 - DNA, 25 bp, Homo sapien
caaggagtgctagttcctgaaggag

SEQ ID NO: 2101842 - DNA, 25 bp, Homo sapien
tctcctgaacatctactagttcaag

SEQ ID NO: 2101843 - DNA, 25 bp, Homo sapien
atctttagtttaaaggttgccagct

SEQ ID NO: 2101844 - DNA, 25 bp, Homo sapien
catctactagttcaaggagtgctag

SEQ ID NO: 2101845 - DNA, 25 bp, Homo sapien
tctcccagtatgactggatagccat

SEQ ID NO: 2101846 - DNA, 25 bp, Homo sapien
gaatctgggaaacaggatctaggtt

SEQ ID NO: 2101847 - DNA, 25 bp, Homo sapien
ggcatcaatagtggcagggacaacc

SEQ ID NO: 2101848 - DNA, 25 bp, Homo sapien
tcaatagtggcagggacaacctcat

SEQ ID NO: 2101849 - DNA, 25 bp, Homo sapien
tctgtgatccatggctttgaagaac

SEQ ID NO: 2101850 - DNA, 25 bp, Homo sapien
catggcttctaaaggcagggcctgt

SEQ ID NO: 2101851 - DNA, 25 bp, Homo sapien
taatcatggccttggaggacagagc

SEQ ID NO: 2101852 - DNA, 25 bp, Homo sapien
gggcctggcatgttggtgtgattga

SEQ ID NO: 2101853 - DNA, 25 bp, Homo sapien
taccatgtacttatagccaattctc

SEQ ID NO: 2101854 - DNA, 25 bp, Homo sapien
tggatgcctcctttaccatgtactt

SEQ ID NO: 2101855 - DNA, 25 bp, Homo sapien
ttaccatgtacttatagccaattct

SEQ ID NO: 2101856 - DNA, 25 bp, Homo sapien
ccatgtacttatagccaattctcct

SEQ ID NO: 2101857 - DNA, 25 bp, Homo sapien
ggctagtttcactctccaaccatac

SEQ ID NO: 2101858 - DNA, 25 bp, Homo sapien
caaccatacaccacctgaaactttt

SEQ ID NO: 2101859 - DNA, 25 bp, Homo sapien
cactgtctgctgaatcctatcttat

SEQ ID NO: 2101860 - DNA, 25 bp, Homo sapien
tccccctagattgagtgtattctcc

SEQ ID NO: 2101861 - DNA, 25 bp, Homo sapien
tatactcactgaatactccatccat

SEQ ID NO: 2101862 - DNA, 25 bp, Homo sapien
cctataatggctgctccattaccca

SEQ ID NO: 2101863 - DNA, 25 bp, Homo sapien
ccattacccatgagcttatagccat

SEQ ID NO: 2101864 - DNA, 25 bp, Homo sapien
catatctgtccctatactcactgaa

SEQ ID NO: 2101865 - DNA, 25 bp, Homo sapien
cttctggaacgggaaaggcactgtc

SEQ ID NO: 2101866 - DNA, 25 bp, Homo sapien
gagctgcgactgtgtttgtttccag

SEQ ID NO: 2101867 - DNA, 25 bp, Homo sapien
tggtcatcagttgccttagtgacaa

SEQ ID NO: 2101868 - DNA, 25 bp, Homo sapien
ggcactgtcttctaggcttacagga

SEQ ID NO: 2101869 - DNA, 25 bp, Homo sapien
tgcctgcctgttccaggatgttggc

SEQ ID NO: 2101870 - DNA, 25 bp, Homo sapien
cagccaggaaaacaggtgtggttga

SEQ ID NO: 2101871 - DNA, 25 bp, Homo sapien
tgtcaggtactcgagaacagcagcc

SEQ ID NO: 2101872 - DNA, 25 bp, Homo sapien
tggttgagctcaggtgccgggcata

SEQ ID NO: 2101873 - DNA, 25 bp, Homo sapien
gaaaaaggcagtaccctcagtacta

SEQ ID NO: 2101874 - DNA, 25 bp, Homo sapien
ctagtacttcgaagaacagtctctt

SEQ ID NO: 2101875 - DNA, 25 bp, Homo sapien
ggcagtaccctcagtactagtactt

SEQ ID NO: 2101876 - DNA, 25 bp, Homo sapien
tcagtactagtacttcgaagaacag

SEQ ID NO: 2101877 - DNA, 25 bp, Homo sapien
gaaattcctctagatttgctgtgcc

SEQ ID NO: 2101878 - DNA, 25 bp, Homo sapien
tcctagactgtatgcactttccact

SEQ ID NO: 2101879 - DNA, 25 bp, Homo sapien
tccaccgacataccatctgataatt

SEQ ID NO: 2101880 - DNA, 25 bp, Homo sapien
tctaggctggatgcccctttcaaca

SEQ ID NO: 2101881 - DNA, 25 bp, Homo sapien
tcttcctttcctgtgaatgcttcct

SEQ ID NO: 2101882 - DNA, 25 bp, Homo sapien
cctttcctgtgaatgcttcctccat

SEQ ID NO: 2101883 - DNA, 25 bp, Homo sapien
ttcctttcctgtgaatgcttcctcc

SEQ ID NO: 2101884 - DNA, 25 bp, Homo sapien
ttcttcctttcctgtgaatgcttcc

SEQ ID NO: 2101885 - DNA, 25 bp, Homo sapien
gggaagaagtacatgagtgaagaga

SEQ ID NO: 2101886 - DNA, 25 bp, Homo sapien
gaagaagtacatgagtgaagagagc

SEQ ID NO: 2101887 - DNA, 25 bp, Homo sapien
agaagtacatgagtgaagagagcat

SEQ ID NO: 2101888 - DNA, 25 bp, Homo sapien
ctgggaagaagtacatgagtgaaga

SEQ ID NO: 2101889 - DNA, 25 bp, Homo sapien
caggataagccagatcagaagagga

SEQ ID NO: 2101890 - DNA, 25 bp, Homo sapien
gatacaacagggtattgcatcagtg

SEQ ID NO: 2101891 - DNA, 25 bp, Homo sapien
attgcatcagtgtcaggataagcca

SEQ ID NO: 2101892 - DNA, 25 bp, Homo sapien
cagtgtcaggataagccagatcaga

SEQ ID NO: 2101893 - DNA, 25 bp, Homo sapien
ggaagtacatgggtgaaagtagcat

SEQ ID NO: 2101894 - DNA, 25 bp, Homo sapien
gtgaaagtagcattcaggcaagagg

SEQ ID NO: 2101895 - DNA, 25 bp, Homo sapien
aagaggaggacttgaccagaggtcc

SEQ ID NO: 2101896 - DNA, 25 bp, Homo sapien
cagaggtccatgattgtagggtgca

SEQ ID NO: 2101897 - DNA, 25 bp, Homo sapien
cagccagtctaggagagtatttagc

SEQ ID NO: 2101898 - DNA, 25 bp, Homo sapien
tgttcataatagaggatccagccaa

SEQ ID NO: 2101899 - DNA, 25 bp, Homo sapien
gaagactcagtagaaggagcaccag

SEQ ID NO: 2101900 - DNA, 25 bp, Homo sapien
tacatcggtagaaggtacagctaac

SEQ ID NO: 2101901 - DNA, 25 bp, Homo sapien
tatgtggttagtccaaggagggcaa

SEQ ID NO: 2101902 - DNA, 25 bp, Homo sapien
tgttacttgtttcaaagtccaggca

SEQ ID NO: 2101903 - DNA, 25 bp, Homo sapien
tggatatcctgttcttgcagccaga

SEQ ID NO: 2101904 - DNA, 25 bp, Homo sapien
taaagctgtcccaacaggaatcctc

SEQ ID NO: 2101905 - DNA, 25 bp, Homo sapien
ggagcattcggcctgtaggagtact

SEQ ID NO: 2101906 - DNA, 25 bp, Homo sapien
cggcctgtaggagtacttgaaaata

SEQ ID NO: 2101907 - DNA, 25 bp, Homo sapien
agggcaccgttgatggtatatccac

SEQ ID NO: 2101908 - DNA, 25 bp, Homo sapien
tgaaaataagggcaccgttgatggt

SEQ ID NO: 2101909 - DNA, 25 bp, Homo sapien
gcttgcttcagtgtagagttctgat

SEQ ID NO: 2101910 - DNA, 25 bp, Homo sapien
gtaccacctgctccataatattcag

SEQ ID NO: 2101911 - DNA, 25 bp, Homo sapien
caaaaactttgactggattattaat

SEQ ID NO: 2101912 - DNA, 25 bp, Homo sapien
gatattagacctgaagacatgactg

SEQ ID NO: 2101913 - DNA, 25 bp, Homo sapien
ctcaacttgaaagtgaattcctcat

SEQ ID NO: 2101914 - DNA, 25 bp, Homo sapien
aaatgctttgtaaatccagggtcac

SEQ ID NO: 2101915 - DNA, 25 bp, Homo sapien
cctctgggcttctctcttaggtaaa

SEQ ID NO: 2101916 - DNA, 25 bp, Homo sapien
tgtttatctccctcagatctctttt

SEQ ID NO: 2101917 - DNA, 25 bp, Homo sapien
actgctcttctctactaccatttct

SEQ ID NO: 2101918 - DNA, 25 bp, Homo sapien
tttctgccgagcctagctggagcca

SEQ ID NO: 2101919 - DNA, 25 bp, Homo sapien
tggagccaggaaccgggagcggact

SEQ ID NO: 2101920 - DNA, 25 bp, Homo sapien
gctactcgccgttctgcgagccgca

SEQ ID NO: 2101921 - DNA, 25 bp, Homo sapien
cacgtcgcgcctgcgcgctcctatt

SEQ ID NO: 2101922 - DNA, 25 bp, Homo sapien
ttcctggggcgcttcgcctggatca

SEQ ID NO: 2101923 - DNA, 25 bp, Homo sapien
cctggggcgcttcgcctggatcacg

SEQ ID NO: 2101924 - DNA, 25 bp, Homo sapien
ggggcgcttcgcctggatcacgttt

SEQ ID NO: 2101925 - DNA, 25 bp, Homo sapien
ggcgcttcgcctggatcacgtttcc

SEQ ID NO: 2101926 - DNA, 25 bp, Homo sapien
ggttctaaagtgagtcggcccaaga

SEQ ID NO: 2101927 - DNA, 25 bp, Homo sapien
gttaaaatgtccacgggcacaatgg

SEQ ID NO: 2101928 - DNA, 25 bp, Homo sapien
tgatcaaattcagcggaccaggaag

SEQ ID NO: 2101929 - DNA, 25 bp, Homo sapien
taaaggaaagtcacacgaacgccac

SEQ ID NO: 2101930 - DNA, 25 bp, Homo sapien
gtgagaaatggtattatggcagttt

SEQ ID NO: 2101931 - DNA, 25 bp, Homo sapien
gtttcctacatgacagggatgagaa

SEQ ID NO: 2101932 - DNA, 25 bp, Homo sapien
cagtttcctacatgacagggatgag

SEQ ID NO: 2101933 - DNA, 25 bp, Homo sapien
gacatcgaaagctaaatcagcatgg

SEQ ID NO: 2101934 - DNA, 25 bp, Homo sapien
agctaaatcagcatggtatcagttc

SEQ ID NO: 2101935 - DNA, 25 bp, Homo sapien
gattacttacacagacatcgaaagc

SEQ ID NO: 2101936 - DNA, 25 bp, Homo sapien
tacacagacatcgaaagctaaatca

SEQ ID NO: 2101937 - DNA, 25 bp, Homo sapien
gctaacagggccacaagtattactg

SEQ ID NO: 2101938 - DNA, 25 bp, Homo sapien
tacagctgttaggttggcttgccac

SEQ ID NO: 2101939 - DNA, 25 bp, Homo sapien
gaaggctcaaggaatatcccatagt

SEQ ID NO: 2101940 - DNA, 25 bp, Homo sapien
tccattatgcccagagacaagtaga

SEQ ID NO: 2101941 - DNA, 25 bp, Homo sapien
caatgagcgggtcttggtatcttcc

SEQ ID NO: 2101942 - DNA, 25 bp, Homo sapien
gagaccacaggattgacgagcagga

SEQ ID NO: 2101943 - DNA, 25 bp, Homo sapien
gaggcaaccacatattcaaagtgca

SEQ ID NO: 2101944 - DNA, 25 bp, Homo sapien
gcagcttcagaattggtatggccct

SEQ ID NO: 2101945 - DNA, 25 bp, Homo sapien
aaaaggctgcatacagcttgatctg

SEQ ID NO: 2101946 - DNA, 25 bp, Homo sapien
cagaagtctcaacccttcttaaggt

SEQ ID NO: 2101947 - DNA, 25 bp, Homo sapien
tctgtagttacaggtcactagagtc

SEQ ID NO: 2101948 - DNA, 25 bp, Homo sapien
actagagtcaacaacagcaagatgg

SEQ ID NO: 2101949 - DNA, 25 bp, Homo sapien
tcttcagatagcagaacaatcagtt

SEQ ID NO: 2101950 - DNA, 25 bp, Homo sapien
gacaaatgtgatatgcctctgaggc

SEQ ID NO: 2101951 - DNA, 25 bp, Homo sapien
tcatcttaggcataccacagcacag

SEQ ID NO: 2101952 - DNA, 25 bp, Homo sapien
tagctccaaatgtaacaatctggtg

SEQ ID NO: 2101953 - DNA, 25 bp, Homo sapien
gtaatctggctctatgatgatatac

SEQ ID NO: 2101954 - DNA, 25 bp, Homo sapien
taggtaatctggctctatgatgata

SEQ ID NO: 2101955 - DNA, 25 bp, Homo sapien
tagcaggttcttgattggggttggg

SEQ ID NO: 2101956 - DNA, 25 bp, Homo sapien
ctaggtaatctggctctatgatgat

SEQ ID NO: 2101957 - DNA, 25 bp, Homo sapien
taagagtagtggtggtgtctacagt

SEQ ID NO: 2101958 - DNA, 25 bp, Homo sapien
agtaagagtagtggtggtgtctaca

SEQ ID NO: 2101959 - DNA, 25 bp, Homo sapien
agagtagtggtggtgtctacagtga

SEQ ID NO: 2101960 - DNA, 25 bp, Homo sapien
gtagtggtggtgtctacagtgatga

SEQ ID NO: 2101961 - DNA, 25 bp, Homo sapien
tgtttccttgtagatagccatcctt

SEQ ID NO: 2101962 - DNA, 25 bp, Homo sapien
tccctggaacttataagccctgaag

SEQ ID NO: 2101963 - DNA, 25 bp, Homo sapien
cctgaagaagacgatcctggacact

SEQ ID NO: 2101964 - DNA, 25 bp, Homo sapien
gatagccatccttgtaacttccctg

SEQ ID NO: 2101965 - DNA, 25 bp, Homo sapien
gggtgggttcagcatctacagacca

SEQ ID NO: 2101966 - DNA, 25 bp, Homo sapien
gtgtatttaccatctgccctgcaag

SEQ ID NO: 2101967 - DNA, 25 bp, Homo sapien
catttcttgaatgctcaggaggccc

SEQ ID NO: 2101968 - DNA, 25 bp, Homo sapien
gaaggagcatttttagtgacgacca

SEQ ID NO: 2101969 - DNA, 25 bp, Homo sapien
tggcacgtccctggatgatgattcc

SEQ ID NO: 2101970 - DNA, 25 bp, Homo sapien
ttctggcacgtccctggatgatgat

SEQ ID NO: 2101971 - DNA, 25 bp, Homo sapien
tctggcacgtccctggatgatgatt

SEQ ID NO: 2101972 - DNA, 25 bp, Homo sapien
ctggcacgtccctggatgatgattc

SEQ ID NO: 2101973 - DNA, 25 bp, Homo sapien
ccttaggaatggtggccaagacttg

SEQ ID NO: 2101974 - DNA, 25 bp, Homo sapien
ttaggaatggtggccaagacttgat

SEQ ID NO: 2101975 - DNA, 25 bp, Homo sapien
cttaggaatggtggccaagacttga

SEQ ID NO: 2101976 - DNA, 25 bp, Homo sapien
tgtcattaccattgtggcagttatt

SEQ ID NO: 2101977 - DNA, 25 bp, Homo sapien
tcttctttgcactcacgctcaatgt

SEQ ID NO: 2101978 - DNA, 25 bp, Homo sapien
ggtagcgttttaatatggaattggc

SEQ ID NO: 2101979 - DNA, 25 bp, Homo sapien
aaaacccattagctcttgggtagcg

SEQ ID NO: 2101980 - DNA, 25 bp, Homo sapien
tgcactcacgctcaatgttgccctg

SEQ ID NO: 2101981 - DNA, 25 bp, Homo sapien
aaaaaacattgttcaccatgatggc

SEQ ID NO: 2101982 - DNA, 25 bp, Homo sapien
tggattgcctgagctcaggatttcg

SEQ ID NO: 2101983 - DNA, 25 bp, Homo sapien
caggtgtggtggctcatgcctataa

SEQ ID NO: 2101984 - DNA, 25 bp, Homo sapien
aaaaaaaaacattgttcaccatgat

SEQ ID NO: 2101985 - DNA, 25 bp, Homo sapien
gtgggtgggaaatgatatatagaag

SEQ ID NO: 2101986 - DNA, 25 bp, Homo sapien
aaacattgttcacggtccgggtgca

SEQ ID NO: 2101987 - DNA, 25 bp, Homo sapien
cattgttcacggtccgggtgcagtg

SEQ ID NO: 2101988 - DNA, 25 bp, Homo sapien
tgggtgggaaatgatatatagaagc

SEQ ID NO: 2101989 - DNA, 25 bp, Homo sapien
tgaactctgcactgtctgacctgtg

SEQ ID NO: 2101990 - DNA, 25 bp, Homo sapien
ttcttgtttctggtataatagctcc

SEQ ID NO: 2101991 - DNA, 25 bp, Homo sapien
tgagtactatgttccatgtgcaacc

SEQ ID NO: 2101992 - DNA, 25 bp, Homo sapien
taattggtcccctctgtaatagctt

SEQ ID NO: 2101993 - DNA, 25 bp, Homo sapien
agtagtagctggctgaaggcggatg

SEQ ID NO: 2101994 - DNA, 25 bp, Homo sapien
tggtagtagtagctggctgaaggcg

SEQ ID NO: 2101995 - DNA, 25 bp, Homo sapien
gctgtggtagtagtagctggctgaa

SEQ ID NO: 2101996 - DNA, 25 bp, Homo sapien
aggcgggagctgtggtagtagtagc

SEQ ID NO: 2101997 - DNA, 25 bp, Homo sapien
gcattgtcccggtcgaagtagaagg

SEQ ID NO: 2101998 - DNA, 25 bp, Homo sapien
tgatgtcgtgaaagcagatgcagcc

SEQ ID NO: 2101999 - DNA, 25 bp, Homo sapien
caggtacacgtaggaagcatgcaac

SEQ ID NO: 2102000 - DNA, 25 bp, Homo sapien
tcttcttgtgcaactggcgcaggaa

SEQ ID NO: 2102001 - DNA, 25 bp, Homo sapien
tagtcacccagctttttgatggcct

SEQ ID NO: 2102002 - DNA, 25 bp, Homo sapien
ggttgctcaggtagtcacccagctt

SEQ ID NO: 2102003 - DNA, 25 bp, Homo sapien
gctcaggtagtcacccagctttttg

SEQ ID NO: 2102004 - DNA, 25 bp, Homo sapien
tgcacaggttgctcaggtagtcacc

SEQ ID NO: 2102005 - DNA, 25 bp, Homo sapien
ggcccatcttggctcaggtgtcttc

SEQ ID NO: 2102006 - DNA, 25 bp, Homo sapien
tggggcccatcttggctcaggtgtc

SEQ ID NO: 2102007 - DNA, 25 bp, Homo sapien
gcccatcttggctcaggtgtcttcc

SEQ ID NO: 2102008 - DNA, 25 bp, Homo sapien
gggcccatcttggctcaggtgtctt

SEQ ID NO: 2102009 - DNA, 25 bp, Homo sapien
aacagataactttattgccaataat

SEQ ID NO: 2102010 - DNA, 25 bp, Homo sapien
aactttattgccaataatggtaaca

SEQ ID NO: 2102011 - DNA, 25 bp, Homo sapien
ttgagaacagataactttattgcca

SEQ ID NO: 2102012 - DNA, 25 bp, Homo sapien
cagataactttattgccaataatgg

SEQ ID NO: 2102013 - DNA, 25 bp, Homo sapien
tttgaaaatacactaggagtggaca

SEQ ID NO: 2102014 - DNA, 25 bp, Homo sapien
tgaaaatacactaggagtggacact

SEQ ID NO: 2102015 - DNA, 25 bp, Homo sapien
ttgaaaatacactaggagtggacac

SEQ ID NO: 2102016 - DNA, 25 bp, Homo sapien
aaaagatgctcgctttgttcttcct

SEQ ID NO: 2102017 - DNA, 25 bp, Homo sapien
aaaaagatgctcgctttgttcttcc

SEQ ID NO: 2102018 - DNA, 25 bp, Homo sapien
ggctcaggcaacctgggtttgggaa

SEQ ID NO: 2102019 - DNA, 25 bp, Homo sapien
ggatttcatcctgttgctcttgtcc

SEQ ID NO: 2102020 - DNA, 25 bp, Homo sapien
tttcagctccaaacatccagatgaa

SEQ ID NO: 2102021 - DNA, 25 bp, Homo sapien
gggatctgggttaggatttcatcct

SEQ ID NO: 2102022 - DNA, 25 bp, Homo sapien
acatccagatgaaggtggggatctg

SEQ ID NO: 2102023 - DNA, 25 bp, Homo sapien
ataaaaaagttgggaagtggatgat

SEQ ID NO: 2102024 - DNA, 25 bp, Homo sapien
gttgggaagtggatgattttcccat

SEQ ID NO: 2102025 - DNA, 25 bp, Homo sapien
agttgggaagtggatgattttccca

SEQ ID NO: 2102026 - DNA, 25 bp, Homo sapien
acataaaaaagttgggaagtggatg

SEQ ID NO: 2102027 - DNA, 25 bp, Homo sapien
tagagtggggcatgttttgcaatct

SEQ ID NO: 2102028 - DNA, 25 bp, Homo sapien
gtagagtggggcatgttttgcaatc

SEQ ID NO: 2102029 - DNA, 25 bp, Homo sapien
agtagagtggggcatgttttgcaat

SEQ ID NO: 2102030 - DNA, 25 bp, Homo sapien
tttggggttccttgccaccagacat

SEQ ID NO: 2102031 - DNA, 25 bp, Homo sapien
agtcactgtctgtctacgagttttg

SEQ ID NO: 2102032 - DNA, 25 bp, Homo sapien
actctccccttgttgcgcttttgtg

SEQ ID NO: 2102033 - DNA, 25 bp, Homo sapien
tgtttcttaggaagcatctccagat

SEQ ID NO: 2102034 - DNA, 25 bp, Homo sapien
ttgtgtaggtgctccaaaactcctt

SEQ ID NO: 2102035 - DNA, 25 bp, Homo sapien
gagtagagacggaatctgagcgccc

SEQ ID NO: 2102036 - DNA, 25 bp, Homo sapien
gaaagcctggagacaatccactgct

SEQ ID NO: 2102037 - DNA, 25 bp, Homo sapien
gagcgcccaactacatatcccagaa

SEQ ID NO: 2102038 - DNA, 25 bp, Homo sapien
cacaattggacaggcgagtagagac

SEQ ID NO: 2102039 - DNA, 25 bp, Homo sapien
tcccctagcaaaaatgagcatggat

SEQ ID NO: 2102040 - DNA, 25 bp, Homo sapien
tggtgagtaatgctctccttccagg

SEQ ID NO: 2102041 - DNA, 25 bp, Homo sapien
agatgttaatatacaccgcaggaga

SEQ ID NO: 2102042 - DNA, 25 bp, Homo sapien
gcaaaaatctacagcatgtcactgg

SEQ ID NO: 2102043 - DNA, 25 bp, Homo sapien
taacagcccacacactcagattagg

SEQ ID NO: 2102044 - DNA, 25 bp, Homo sapien
tgttggcaacccatttacagcctgt

SEQ ID NO: 2102045 - DNA, 25 bp, Homo sapien
gagaccagggtcaagatacaatcaa

SEQ ID NO: 2102046 - DNA, 25 bp, Homo sapien
tgaaaggctctcaaggaacccaggg

SEQ ID NO: 2102047 - DNA, 25 bp, Homo sapien
catctgattctgagggagagttggg

SEQ ID NO: 2102048 - DNA, 25 bp, Homo sapien
caataagtggactggttcttcccta

SEQ ID NO: 2102049 - DNA, 25 bp, Homo sapien
gatggccctttttccgatgtccttc

SEQ ID NO: 2102050 - DNA, 25 bp, Homo sapien
gttgggcttgacagccactttggtc

SEQ ID NO: 2102051 - DNA, 25 bp, Homo sapien
ggcagtactccattaccaaaggcaa

SEQ ID NO: 2102052 - DNA, 25 bp, Homo sapien
gaggagaaccccagcatacttcaag

SEQ ID NO: 2102053 - DNA, 25 bp, Homo sapien
tacagagggaactgcaatcactgag

SEQ ID NO: 2102054 - DNA, 25 bp, Homo sapien
aaggcaaggtgcacattgttaacca

SEQ ID NO: 2102055 - DNA, 25 bp, Homo sapien
tggtgggactcaagagacagagccc

SEQ ID NO: 2102056 - DNA, 25 bp, Homo sapien
ggtgggactcaagagacagagcccc

SEQ ID NO: 2102057 - DNA, 25 bp, Homo sapien
tgaattcacttgggccatccatggg

SEQ ID NO: 2102058 - DNA, 25 bp, Homo sapien
acttacaattggtatagatggttcc

SEQ ID NO: 2102059 - DNA, 25 bp, Homo sapien
cttacaattggtatagatggttcct

SEQ ID NO: 2102060 - DNA, 25 bp, Homo sapien
tatgacagagcaggtcatcggaatg

SEQ ID NO: 2102061 - DNA, 25 bp, Homo sapien
catgcttacacatggagcaatggtg

SEQ ID NO: 2102062 - DNA, 25 bp, Homo sapien
ctatagaagggtgcatgcttacaca

SEQ ID NO: 2102063 - DNA, 25 bp, Homo sapien
aatggttatgacagagcaggtcatc

SEQ ID NO: 2102064 - DNA, 25 bp, Homo sapien
gcccggtggtagtgtggtcacaggc

SEQ ID NO: 2102065 - DNA, 25 bp, Homo sapien
ggcccggtggtagtgtggtcacagg

SEQ ID NO: 2102066 - DNA, 25 bp, Homo sapien
cccggtggtagtgtggtcacaggct

SEQ ID NO: 2102067 - DNA, 25 bp, Homo sapien
cgggcccggtggtagtgtggtcaca

SEQ ID NO: 2102068 - DNA, 25 bp, Homo sapien
agcgggtagtggcatcggcgtgggc

SEQ ID NO: 2102069 - DNA, 25 bp, Homo sapien
ggcggggtcctcggagcaccaccat

SEQ ID NO: 2102070 - DNA, 25 bp, Homo sapien
agcggcggggtcctcggagcaccac

SEQ ID NO: 2102071 - DNA, 25 bp, Homo sapien
gggtagtggcatcggcgtgggcagt

SEQ ID NO: 2102072 - DNA, 25 bp, Homo sapien
atgtgggtgttgatggcagcctcac

SEQ ID NO: 2102073 - DNA, 25 bp, Homo sapien
ccgcgtcgtcctggtcgaagtagaa

SEQ ID NO: 2102074 - DNA, 25 bp, Homo sapien
aggtgcactccatggccttgagccc

SEQ ID NO: 2102075 - DNA, 25 bp, Homo sapien
tggtggtaccgtcgcaccggcgaca

SEQ ID NO: 2102076 - DNA, 25 bp, Homo sapien
gtcccgcctggtggcgcgagcaggg

SEQ ID NO: 2102077 - DNA, 25 bp, Homo sapien
gccaacaacggtaaaactgagagga

SEQ ID NO: 2102078 - DNA, 25 bp, Homo sapien
ctgaaaagggaacatggacgtcccg

SEQ ID NO: 2102079 - DNA, 25 bp, Homo sapien
tgccaacaacggtaaaactgagagg

SEQ ID NO: 2102080 - DNA, 25 bp, Homo sapien
cacccccgcagatcctgagctgcat

SEQ ID NO: 2102081 - DNA, 25 bp, Homo sapien
cctactttaaacctgcatggggatg

SEQ ID NO: 2102082 - DNA, 25 bp, Homo sapien
tttaaacctgcatggggatgtgccc

SEQ ID NO: 2102083 - DNA, 25 bp, Homo sapien
ccccgcagatcctgagctgcatgca

SEQ ID NO: 2102084 - DNA, 25 bp, Homo sapien
ccattatccgtgtcactcagggtga

SEQ ID NO: 2102085 - DNA, 25 bp, Homo sapien
ctaaggctcagtcccattatccgtg

SEQ ID NO: 2102086 - DNA, 25 bp, Homo sapien
ggctcagtcccattatccgtgtcac

SEQ ID NO: 2102087 - DNA, 25 bp, Homo sapien
cagtcccattatccgtgtcactcag

SEQ ID NO: 2102088 - DNA, 25 bp, Homo sapien
ggtgaccaataggattctcccatga

SEQ ID NO: 2102089 - DNA, 25 bp, Homo sapien
gaaaacgtttgtccattcatgattg

SEQ ID NO: 2102090 - DNA, 25 bp, Homo sapien
tgagcatggatcgaatgcacagctg

SEQ ID NO: 2102091 - DNA, 25 bp, Homo sapien
gaatcaaggactgggttagcctcgg

SEQ ID NO: 2102092 - DNA, 25 bp, Homo sapien
ggcgggcagtgcgggcgcgaggagc

SEQ ID NO: 2102093 - DNA, 25 bp, Homo sapien
cttgatgttgatggcgacctcgcag

SEQ ID NO: 2102094 - DNA, 25 bp, Homo sapien
tgtcgcgaaggtagatgcggccacc

SEQ ID NO: 2102095 - DNA, 25 bp, Homo sapien
gaaatagcggctgaagctctccagg

SEQ ID NO: 2102096 - DNA, 25 bp, Homo sapien
tcttctcgtgccactggtgcaagaa

SEQ ID NO: 2102097 - DNA, 25 bp, Homo sapien
tcctgctagggggtgatactttcat

SEQ ID NO: 2102098 - DNA, 25 bp, Homo sapien
catgatatttccacttaatcctgct

SEQ ID NO: 2102099 - DNA, 25 bp, Homo sapien
tgatatttccacttaatcctgctag

SEQ ID NO: 2102100 - DNA, 25 bp, Homo sapien
atatttccacttaatcctgctaggg

SEQ ID NO: 2102101 - DNA, 25 bp, Homo sapien
caggttgctaatctcatttgcgtgc

SEQ ID NO: 2102102 - DNA, 25 bp, Homo sapien
gaagaatatcccaaggcattgtagg

SEQ ID NO: 2102103 - DNA, 25 bp, Homo sapien
aaaggtgcattttgctcggcaacca

SEQ ID NO: 2102104 - DNA, 25 bp, Homo sapien
tgtctgtatcccaaatgtggctgaa

SEQ ID NO: 2102105 - DNA, 25 bp, Homo sapien
gatcccttggggaatagagctccat

SEQ ID NO: 2102106 - DNA, 25 bp, Homo sapien
atcccttggggaatagagctccatc

SEQ ID NO: 2102107 - DNA, 25 bp, Homo sapien
agatcccttggggaatagagctcca

SEQ ID NO: 2102108 - DNA, 25 bp, Homo sapien
ttcctcagaagtgttaaatgtcacc

SEQ ID NO: 2102109 - DNA, 25 bp, Homo sapien
tttcctcagaagtgttaaatgtcac

SEQ ID NO: 2102110 - DNA, 25 bp, Homo sapien
tcctcagaagtgttaaatgtcacca

SEQ ID NO: 2102111 - DNA, 25 bp, Homo sapien
cctcagaagtgttaaatgtcaccat

SEQ ID NO: 2102112 - DNA, 25 bp, Homo sapien
gttttcttcgagtatacaggagtaa

SEQ ID NO: 2102113 - DNA, 25 bp, Homo sapien
tattaggataaacgctctgtgagaa

SEQ ID NO: 2102114 - DNA, 25 bp, Homo sapien
gaaccacaccaggttaaggcaagga

SEQ ID NO: 2102115 - DNA, 25 bp, Homo sapien
tcctgccatgcgtgcatagtaaaag

SEQ ID NO: 2102116 - DNA, 25 bp, Homo sapien
ctgccgcgaggctcccgagtggccc

SEQ ID NO: 2102117 - DNA, 25 bp, Homo sapien
aggctcccgagtggcccgggcgatc

SEQ ID NO: 2102118 - DNA, 25 bp, Homo sapien
cgatcgcgggggatgcgtgtcctgc

SEQ ID NO: 2102119 - DNA, 25 bp, Homo sapien
gcgggggatgcgtgtcctgcgcccc

SEQ ID NO: 2102120 - DNA, 25 bp, Homo sapien
tctctgaggcactcggatgccggtg

SEQ ID NO: 2102121 - DNA, 25 bp, Homo sapien
gaggaccgcttgaagtcgtgccctg

SEQ ID NO: 2102122 - DNA, 25 bp, Homo sapien
ccgtgccccctagtgcggagctgag

SEQ ID NO: 2102123 - DNA, 25 bp, Homo sapien
cgagaaggatgagacgggaggtgac

SEQ ID NO: 2102124 - DNA, 25 bp, Homo sapien
ttagccgagcgcaggtagcgttccc

SEQ ID NO: 2102125 - DNA, 25 bp, Homo sapien
acgcgtcgatgaggcgcttagccga

SEQ ID NO: 2102126 - DNA, 25 bp, Homo sapien
tggtagagcatatacgccactccgg

SEQ ID NO: 2102127 - DNA, 25 bp, Homo sapien
tcatcgaagcgattggcgaagcagc

SEQ ID NO: 2102128 - DNA, 25 bp, Homo sapien
aacaaagacttggagagcaactcgg

SEQ ID NO: 2102129 - DNA, 25 bp, Homo sapien
aggagatagacctcaagggactgaa

SEQ ID NO: 2102130 - DNA, 25 bp, Homo sapien
gagatagacctcaagggactgaaga

SEQ ID NO: 2102131 - DNA, 25 bp, Homo sapien
acttggagagcaactcgggacagtg

SEQ ID NO: 2102132 - DNA, 25 bp, Homo sapien
gagacgccgaatctcaacaaatgag

SEQ ID NO: 2102133 - DNA, 25 bp, Homo sapien
gagtgatgccacgtaaaaacacgaa

SEQ ID NO: 2102134 - DNA, 25 bp, Homo sapien
tagcactctaacattcgaggatgcc

SEQ ID NO: 2102135 - DNA, 25 bp, Homo sapien
aaacacgaacaaagcgcagagacgc

SEQ ID NO: 2102136 - DNA, 25 bp, Homo sapien
aaatggcagatgctttggtaaccaa

SEQ ID NO: 2102137 - DNA, 25 bp, Homo sapien
ccaagggacgccaaatggcagatgc

SEQ ID NO: 2102138 - DNA, 25 bp, Homo sapien
cagatgctttggtaaccaaccagca

SEQ ID NO: 2102139 - DNA, 25 bp, Homo sapien
caagggacgccaaatggcagatgct

SEQ ID NO: 2102140 - DNA, 25 bp, Homo sapien
gggttctgggtcatgcataacaaag

SEQ ID NO: 2102141 - DNA, 25 bp, Homo sapien
catgcataacaaagggtctaagcca

SEQ ID NO: 2102142 - DNA, 25 bp, Homo sapien
ccatagcccatagaagtgcctgctt

SEQ ID NO: 2102143 - DNA, 25 bp, Homo sapien
taacaaagggtctaagccatagccc

SEQ ID NO: 2102144 - DNA, 25 bp, Homo sapien
tatgacccagatagccatactcaca

SEQ ID NO: 2102145 - DNA, 25 bp, Homo sapien
ccagatagccatactcacactttaa

SEQ ID NO: 2102146 - DNA, 25 bp, Homo sapien
ctctcatctgaaaaaccgcttcttt

SEQ ID NO: 2102147 - DNA, 25 bp, Homo sapien
aaaaccgcttctttatgacccagat

SEQ ID NO: 2102148 - DNA, 25 bp, Homo sapien
tgctcaggacccaaagtgccaactt

SEQ ID NO: 2102149 - DNA, 25 bp, Homo sapien
ggtttgaggtttcgggtctgctctc

SEQ ID NO: 2102150 - DNA, 25 bp, Homo sapien
ggtctgctctcaaagaactctcagc

SEQ ID NO: 2102151 - DNA, 25 bp, Homo sapien
aaagaactctcagcactggcagtgc

SEQ ID NO: 2102152 - DNA, 25 bp, Homo sapien
tatacttgcattggtctaagaagga

SEQ ID NO: 2102153 - DNA, 25 bp, Homo sapien
tcattgttgttaagtgggctgtata

SEQ ID NO: 2102154 - DNA, 25 bp, Homo sapien
tgtatacttgcattggtctaagaag

SEQ ID NO: 2102155 - DNA, 25 bp, Homo sapien
cttcattgttgttaagtgggctgta

SEQ ID NO: 2102156 - DNA, 25 bp, Homo sapien
ccaaatgagggaccttgatgaatgc

SEQ ID NO: 2102157 - DNA, 25 bp, Homo sapien
aatgagggaccttgatgaatgcctt

SEQ ID NO: 2102158 - DNA, 25 bp, Homo sapien
gagggaccttgatgaatgccttgtg

SEQ ID NO: 2102159 - DNA, 25 bp, Homo sapien
gaccttgatgaatgccttgtggcct

SEQ ID NO: 2102160 - DNA, 25 bp, Homo sapien
tctccctggctaagtcttgaaggaa

SEQ ID NO: 2102161 - DNA, 25 bp, Homo sapien
tccactgaatgagaggaaacagtct

SEQ ID NO: 2102162 - DNA, 25 bp, Homo sapien
gaatggcacattaggagtctacaca

SEQ ID NO: 2102163 - DNA, 25 bp, Homo sapien
tgaatgaaggctctgcgcagctgtt

SEQ ID NO: 2102164 - DNA, 25 bp, Homo sapien
ggctcttaggaatgtacagttccag

SEQ ID NO: 2102165 - DNA, 25 bp, Homo sapien
tccagaaaaccccactcgtcaatat

SEQ ID NO: 2102166 - DNA, 25 bp, Homo sapien
cccactcgtcaatattgaggagcat

SEQ ID NO: 2102167 - DNA, 25 bp, Homo sapien
tatttcactctagaagtcaactggc

SEQ ID NO: 2102168 - DNA, 25 bp, Homo sapien
catgcatgcgatggtgagggcctct

SEQ ID NO: 2102169 - DNA, 25 bp, Homo sapien
aaaagacagtgcattacctcaaggc

SEQ ID NO: 2102170 - DNA, 25 bp, Homo sapien
gaatttgtgctggagtagtgcccca

SEQ ID NO: 2102171 - DNA, 25 bp, Homo sapien
acttaagaaagtagctgagcccctc

SEQ ID NO: 2102172 - DNA, 25 bp, Homo sapien
tctattatgggtacgcagaagctac

SEQ ID NO: 2102173 - DNA, 25 bp, Homo sapien
catttgtgagctcaatatggtggta

SEQ ID NO: 2102174 - DNA, 25 bp, Homo sapien
cctgtgttgtgttctattatgggta

SEQ ID NO: 2102175 - DNA, 25 bp, Homo sapien
ctaccaggaggtcccttcaacttgg

SEQ ID NO: 2102176 - DNA, 25 bp, Homo sapien
tacataacatagcaaacctggtgac

SEQ ID NO: 2102177 - DNA, 25 bp, Homo sapien
gaaaaggcagtctagcaatgcagca

SEQ ID NO: 2102178 - DNA, 25 bp, Homo sapien
tgtatgccccaagaaaggatggctc

SEQ ID NO: 2102179 - DNA, 25 bp, Homo sapien
caagggcgttactcacagggaacaa

SEQ ID NO: 2102180 - DNA, 25 bp, Homo sapien
ccaagtattcggttccatagtaaga

SEQ ID NO: 2102181 - DNA, 25 bp, Homo sapien
tcttctttatggcatactgcttccc

SEQ ID NO: 2102182 - DNA, 25 bp, Homo sapien
gacaaattgacttgatctgtgctgg

SEQ ID NO: 2102183 - DNA, 25 bp, Homo sapien
atacatcagggggaatggtttcctc

SEQ ID NO: 2102184 - DNA, 25 bp, Homo sapien
aatagacgacaagccgtgagctgcc

SEQ ID NO: 2102185 - DNA, 25 bp, Homo sapien
ccgagctcaggtggccagttgcagt

SEQ ID NO: 2102186 - DNA, 25 bp, Homo sapien
tgagaaagtccacgctctgccatac

SEQ ID NO: 2102187 - DNA, 25 bp, Homo sapien
tctgccataccaattcccgatctga

SEQ ID NO: 2102188 - DNA, 25 bp, Homo sapien
tgcggtttcttggaaaccagataag

SEQ ID NO: 2102189 - DNA, 25 bp, Homo sapien
gctttggcaaacagataggcaattc

SEQ ID NO: 2102190 - DNA, 25 bp, Homo sapien
ccagataagctttggcaaacagata

SEQ ID NO: 2102191 - DNA, 25 bp, Homo sapien
gaaaccagataagctttggcaaaca

SEQ ID NO: 2102192 - DNA, 25 bp, Homo sapien
agatgtatttagagtttcccgtgag

SEQ ID NO: 2102193 - DNA, 25 bp, Homo sapien
gagttccccacaccgaatacatgtg

SEQ ID NO: 2102194 - DNA, 25 bp, Homo sapien
gcactgccggctactccatggcaaa

SEQ ID NO: 2102195 - DNA, 25 bp, Homo sapien
caggaagacataggcactgccggct

SEQ ID NO: 2102196 - DNA, 25 bp, Homo sapien
aagcaatgttgtctggtatacagca

SEQ ID NO: 2102197 - DNA, 25 bp, Homo sapien
gaagtcagcatgctaattacaggac

SEQ ID NO: 2102198 - DNA, 25 bp, Homo sapien
cttaaaatagtaccagcaatgtctg

SEQ ID NO: 2102199 - DNA, 25 bp, Homo sapien
tgattatgaccaaaactgaatgcag

SEQ ID NO: 2102200 - DNA, 25 bp, Homo sapien
tccttcaaaggattaacaagacaga

SEQ ID NO: 2102201 - DNA, 25 bp, Homo sapien
gcagcaggtcaatcagaaagcacac

SEQ ID NO: 2102202 - DNA, 25 bp, Homo sapien
cagagaagccttcatacaagctgta

SEQ ID NO: 2102203 - DNA, 25 bp, Homo sapien
gctgtatatactttcaaggacccga

SEQ ID NO: 2102204 - DNA, 25 bp, Homo sapien
gccttgaattcctcggtaaataaga

SEQ ID NO: 2102205 - DNA, 25 bp, Homo sapien
tttaagggtagagggcacacacaaa

SEQ ID NO: 2102206 - DNA, 25 bp, Homo sapien
tggcttatgtggaaactgcctcggc

SEQ ID NO: 2102207 - DNA, 25 bp, Homo sapien
catcatgttgccttcacctgcctga

SEQ ID NO: 2102208 - DNA, 25 bp, Homo sapien
tgttaaggctcatggttgcgatacc

SEQ ID NO: 2102209 - DNA, 25 bp, Homo sapien
ttcagcaacctgacaatccattcct

SEQ ID NO: 2102210 - DNA, 25 bp, Homo sapien
ctgacaatccattcctcatagcagt

SEQ ID NO: 2102211 - DNA, 25 bp, Homo sapien
ttttatacttcagcaacctgacaat

SEQ ID NO: 2102212 - DNA, 25 bp, Homo sapien
caacctgacaatccattcctcatag

SEQ ID NO: 2102213 - DNA, 25 bp, Homo sapien
ttatgaatgctagagatccttgtcc

SEQ ID NO: 2102214 - DNA, 25 bp, Homo sapien
cacgtctttgtagtggttcccctga

SEQ ID NO: 2102215 - DNA, 25 bp, Homo sapien
aaagagatgttctagggcctaagga

SEQ ID NO: 2102216 - DNA, 25 bp, Homo sapien
tgaagtgacagatgctcctacagtg

SEQ ID NO: 2102217 - DNA, 25 bp, Homo sapien
tctgtccaaagggtaatccagctgt

SEQ ID NO: 2102218 - DNA, 25 bp, Homo sapien
acttgtgatctgactactaggccca

SEQ ID NO: 2102219 - DNA, 25 bp, Homo sapien
gagagatcacacctccagtatgaga

SEQ ID NO: 2102220 - DNA, 25 bp, Homo sapien
aactctaaaggcatcatccaccagg

SEQ ID NO: 2102221 - DNA, 25 bp, Homo sapien
catagggattctactgctgctacag

SEQ ID NO: 2102222 - DNA, 25 bp, Homo sapien
catgtggtgcttgacccagtatata

SEQ ID NO: 2102223 - DNA, 25 bp, Homo sapien
tcctcataagtaagaaattgcccta

SEQ ID NO: 2102224 - DNA, 25 bp, Homo sapien
tactgctagagagtctatgtgcaac

SEQ ID NO: 2102225 - DNA, 25 bp, Homo sapien
gatttcattataccatgcagtgggc

SEQ ID NO: 2102226 - DNA, 25 bp, Homo sapien
tgtgagcaaactcccacatgaaagg

SEQ ID NO: 2102227 - DNA, 25 bp, Homo sapien
tagtctgcacaccagctaacttgct

SEQ ID NO: 2102228 - DNA, 25 bp, Homo sapien
gactagtactatcccctgcagaaca

SEQ ID NO: 2102229 - DNA, 25 bp, Homo sapien
gccgaccggcctgggctctggaact

SEQ ID NO: 2102230 - DNA, 25 bp, Homo sapien
gacggacgcagtggcggcggctgtg

SEQ ID NO: 2102231 - DNA, 25 bp, Homo sapien
agccccaaaccgctcccgcgctctg

SEQ ID NO: 2102232 - DNA, 25 bp, Homo sapien
ctccgcgcgtcagcggcgctcaccg

SEQ ID NO: 2102233 - DNA, 25 bp, Homo sapien
aacgtcagcgcctgccacatgcggt

SEQ ID NO: 2102234 - DNA, 25 bp, Homo sapien
cgcgcaaggcagtagcgagaaaagc

SEQ ID NO: 2102235 - DNA, 25 bp, Homo sapien
ccgcccgagcggtaggtgctgctca

SEQ ID NO: 2102236 - DNA, 25 bp, Homo sapien
ctgaggtcgcggtgtacgaagagaa

SEQ ID NO: 2102237 - DNA, 25 bp, Homo sapien
gcctccctccactcgagcaggtggg

SEQ ID NO: 2102238 - DNA, 25 bp, Homo sapien
gagatcaggctacaggaccgaggct

SEQ ID NO: 2102239 - DNA, 25 bp, Homo sapien
atcaggctacaggaccgaggctgcg

SEQ ID NO: 2102240 - DNA, 25 bp, Homo sapien
ctacaggaccgaggctgcggcctgg

SEQ ID NO: 2102241 - DNA, 25 bp, Homo sapien
agcagaagctatggctcggaaatcc

SEQ ID NO: 2102242 - DNA, 25 bp, Homo sapien
cagaagctatggctcggaaatcctc

SEQ ID NO: 2102243 - DNA, 25 bp, Homo sapien
aagcagaagctatggctcggaaatc

SEQ ID NO: 2102244 - DNA, 25 bp, Homo sapien
aaagcagaagctatggctcggaaat

SEQ ID NO: 2102245 - DNA, 25 bp, Homo sapien
tgttgcctgactgaaagtagatgca

SEQ ID NO: 2102246 - DNA, 25 bp, Homo sapien
cattgttgcctgactgaaagtagat

SEQ ID NO: 2102247 - DNA, 25 bp, Homo sapien
gatactgacataaggctcttcattg

SEQ ID NO: 2102248 - DNA, 25 bp, Homo sapien
cttcattgttgcctgactgaaagta

SEQ ID NO: 2102249 - DNA, 25 bp, Homo sapien
acacttatgtacagctgtagggtca

SEQ ID NO: 2102250 - DNA, 25 bp, Homo sapien
acgcccggctgaacgctgatcggtg

SEQ ID NO: 2102251 - DNA, 25 bp, Homo sapien
gacgtcctgctgcatgacacttatg

SEQ ID NO: 2102252 - DNA, 25 bp, Homo sapien
tgatcggtgggtgattagtttgcct

SEQ ID NO: 2102253 - DNA, 25 bp, Homo sapien
gtaacccttttgagccctgcctaga

SEQ ID NO: 2102254 - DNA, 25 bp, Homo sapien
cagtggatcacagattaggtaaccc

SEQ ID NO: 2102255 - DNA, 25 bp, Homo sapien
cagctaccatgctataaggaagccc

SEQ ID NO: 2102256 - DNA, 25 bp, Homo sapien
tacctttgagccaccctagctgatc

SEQ ID NO: 2102257 - DNA, 25 bp, Homo sapien
tagaactctaccattccacaacaag

SEQ ID NO: 2102258 - DNA, 25 bp, Homo sapien
cccaaaggtagaatattgtcttgac

SEQ ID NO: 2102259 - DNA, 25 bp, Homo sapien
gacagagtgaaatcccaagagaagc

SEQ ID NO: 2102260 - DNA, 25 bp, Homo sapien
aatttgatgatgtgagaatagccca

SEQ ID NO: 2102261 - DNA, 25 bp, Homo sapien
agggagatggctctaacatgtaagt

SEQ ID NO: 2102262 - DNA, 25 bp, Homo sapien
cctggataagggagatggctctaac

SEQ ID NO: 2102263 - DNA, 25 bp, Homo sapien
gcaacctggataagggagatggctc

SEQ ID NO: 2102264 - DNA, 25 bp, Homo sapien
gataagggagatggctctaacatgt

SEQ ID NO: 2102265 - DNA, 25 bp, Homo sapien
cactgggcatactgacctcgcagaa

SEQ ID NO: 2102266 - DNA, 25 bp, Homo sapien
tcgattttcccactagcctgagcct

SEQ ID NO: 2102267 - DNA, 25 bp, Homo sapien
cagaaagccgtccatgtggctaaca

SEQ ID NO: 2102268 - DNA, 25 bp, Homo sapien
gttttgttttgatcagccctcgtcg

SEQ ID NO: 2102269 - DNA, 25 bp, Homo sapien
gcatctgagctgcttatccttgtgc

SEQ ID NO: 2102270 - DNA, 25 bp, Homo sapien
gatgcgcaccctgcaattgttctgg

SEQ ID NO: 2102271 - DNA, 25 bp, Homo sapien
tgatggtgggtacatcctccaagag

SEQ ID NO: 2102272 - DNA, 25 bp, Homo sapien
tgtgttctggtgtgatgcgcaccct

SEQ ID NO: 2102273 - DNA, 25 bp, Homo sapien
ccaagcatccctccttctcgggctg

SEQ ID NO: 2102274 - DNA, 25 bp, Homo sapien
tcagacccaagcatccctccttctc

SEQ ID NO: 2102275 - DNA, 25 bp, Homo sapien
aagcatccctccttctcgggctggg

SEQ ID NO: 2102276 - DNA, 25 bp, Homo sapien
acccaagcatccctccttctcgggc

SEQ ID NO: 2102277 - DNA, 25 bp, Homo sapien
agcctggggtctctcatctatggga

SEQ ID NO: 2102278 - DNA, 25 bp, Homo sapien
catctatgggaatttttgaggctgg

SEQ ID NO: 2102279 - DNA, 25 bp, Homo sapien
gggtctctcatctatgggaattttt

SEQ ID NO: 2102280 - DNA, 25 bp, Homo sapien
tctcatctatgggaatttttgaggc

SEQ ID NO: 2102281 - DNA, 25 bp, Homo sapien
tgcttattaagggccacactgtgca

SEQ ID NO: 2102282 - DNA, 25 bp, Homo sapien
acactgtgcatatccaaagtggact

SEQ ID NO: 2102283 - DNA, 25 bp, Homo sapien
tgtgcatatccaaagtggactcaat

SEQ ID NO: 2102284 - DNA, 25 bp, Homo sapien
gagacagatgcagctgcttattaag

SEQ ID NO: 2102285 - DNA, 25 bp, Homo sapien
cgtgtccctcttccgctgtctcctt

SEQ ID NO: 2102286 - DNA, 25 bp, Homo sapien
tggctcgtgtccctcttccgctgtc

SEQ ID NO: 2102287 - DNA, 25 bp, Homo sapien
aaagggacaccagagtggggactgc

SEQ ID NO: 2102288 - DNA, 25 bp, Homo sapien
gcaggatgtcactctcacagccagt

SEQ ID NO: 2102289 - DNA, 25 bp, Homo sapien
tgagctgcattccctgccagaggag

SEQ ID NO: 2102290 - DNA, 25 bp, Homo sapien
gcattccctgccagaggagaaagac

SEQ ID NO: 2102291 - DNA, 25 bp, Homo sapien
ctgagctgcattccctgccagagga

SEQ ID NO: 2102292 - DNA, 25 bp, Homo sapien
gctgcattccctgccagaggagaaa

SEQ ID NO: 2102293 - DNA, 25 bp, Homo sapien
gtggtcatatgtgccagaactgggc

SEQ ID NO: 2102294 - DNA, 25 bp, Homo sapien
agaactgggcatgcacaaacgagca

SEQ ID NO: 2102295 - DNA, 25 bp, Homo sapien
attgagtggtcatatgtgccagaac

SEQ ID NO: 2102296 - DNA, 25 bp, Homo sapien
cacaaacgagcaaaacaaagaccca

SEQ ID NO: 2102297 - DNA, 25 bp, Homo sapien
tatgaatctgcctatgtcagctgca

SEQ ID NO: 2102298 - DNA, 25 bp, Homo sapien
taaatattcgcatataagtgcaacc

SEQ ID NO: 2102299 - DNA, 25 bp, Homo sapien
ctttcttacgatctggagccgggat

SEQ ID NO: 2102300 - DNA, 25 bp, Homo sapien
taattgttgaagacgtgatagatgc

SEQ ID NO: 2102301 - DNA, 25 bp, Homo sapien
gaagatacagacataggccagaggc

SEQ ID NO: 2102302 - DNA, 25 bp, Homo sapien
ttcaggacggaggtaaagaggacca

SEQ ID NO: 2102303 - DNA, 25 bp, Homo sapien
gagggccttctctatgttctcaggg

SEQ ID NO: 2102304 - DNA, 25 bp, Homo sapien
catagtacaatggtggtgcccactc

SEQ ID NO: 2102305 - DNA, 25 bp, Homo sapien
tgcaggcccagcaaaaacacctgag

SEQ ID NO: 2102306 - DNA, 25 bp, Homo sapien
ttcctttcctatcggctcacagggt

SEQ ID NO: 2102307 - DNA, 25 bp, Homo sapien
tatcatgtaatacaccagtagctgg

SEQ ID NO: 2102308 - DNA, 25 bp, Homo sapien
agctgcaggaccaacagaggtgcgc

SEQ ID NO: 2102309 - DNA, 25 bp, Homo sapien
gagatcttcagcattcaagaactga

SEQ ID NO: 2102310 - DNA, 25 bp, Homo sapien
ttaagcagagcagagatcttcagca

SEQ ID NO: 2102311 - DNA, 25 bp, Homo sapien
gcagagcagagatcttcagcattca

SEQ ID NO: 2102312 - DNA, 25 bp, Homo sapien
agatcttcagcattcaagaactgac

SEQ ID NO: 2102313 - DNA, 25 bp, Homo sapien
gaataacgagtatcaaacccagaaa

SEQ ID NO: 2102314 - DNA, 25 bp, Homo sapien
ccctgtgtagggctcattatttgta

SEQ ID NO: 2102315 - DNA, 25 bp, Homo sapien
agcagctcacaaggagttaacagct

SEQ ID NO: 2102316 - DNA, 25 bp, Homo sapien
ccttgttccctgtgtagggctcatt

SEQ ID NO: 2102317 - DNA, 25 bp, Homo sapien
gccccttcaacactcagaggttttc

SEQ ID NO: 2102318 - DNA, 25 bp, Homo sapien
tgctggacagggaagtgccaatctc

SEQ ID NO: 2102319 - DNA, 25 bp, Homo sapien
taggacaacctagctctgcagtgtg

SEQ ID NO: 2102320 - DNA, 25 bp, Homo sapien
gaaagggcacctgtcgagaagacca

SEQ ID NO: 2102321 - DNA, 25 bp, Homo sapien
gtaaaatcgagtccatagagtccct

SEQ ID NO: 2102322 - DNA, 25 bp, Homo sapien
tgcctccttccggaactcttgggac

SEQ ID NO: 2102323 - DNA, 25 bp, Homo sapien
tgaccctggcggctgaaaaagacca

SEQ ID NO: 2102324 - DNA, 25 bp, Homo sapien
ggctgaaaaagaccactttgcctcc

SEQ ID NO: 2102325 - DNA, 25 bp, Homo sapien
tactggaggaaatgtgtgaccctgg

SEQ ID NO: 2102326 - DNA, 25 bp, Homo sapien
tcccattgggcactgtctgagggtc

SEQ ID NO: 2102327 - DNA, 25 bp, Homo sapien
tggggtgctgtctgatcccacattc

SEQ ID NO: 2102328 - DNA, 25 bp, Homo sapien
tctctgtctcttcccattgggcact

SEQ ID NO: 2102329 - DNA, 25 bp, Homo sapien
actgtctgagggtcccttgtctggg

SEQ ID NO: 2102330 - DNA, 25 bp, Homo sapien
tcccataatgctggagatgggaccc

SEQ ID NO: 2102331 - DNA, 25 bp, Homo sapien
gatgggaccctgaactaaaggacca

SEQ ID NO: 2102332 - DNA, 25 bp, Homo sapien
gatggcgttgctccacttttagcag

SEQ ID NO: 2102333 - DNA, 25 bp, Homo sapien
tccagagcagcagatcggctgccaa

SEQ ID NO: 2102334 - DNA, 25 bp, Homo sapien
caaaactatcatggcaatctgcccc

SEQ ID NO: 2102335 - DNA, 25 bp, Homo sapien
gtcaatgaaattagtgatgcagtca

SEQ ID NO: 2102336 - DNA, 25 bp, Homo sapien
gatgcagtcaaccaaaactatcatg

SEQ ID NO: 2102337 - DNA, 25 bp, Homo sapien
gaaattagtgatgcagtcaaccaaa

SEQ ID NO: 2102338 - DNA, 25 bp, Homo sapien
ggggacaacagaatggccataagtt

SEQ ID NO: 2102339 - DNA, 25 bp, Homo sapien
tgggggacaacagaatggccataag

SEQ ID NO: 2102340 - DNA, 25 bp, Homo sapien
gggggacaacagaatggccataagt

SEQ ID NO: 2102341 - DNA, 25 bp, Homo sapien
tcaagtgagtaatacctaaactcac

SEQ ID NO: 2102342 - DNA, 25 bp, Homo sapien
ttggataccctatctctgtccttgt

SEQ ID NO: 2102343 - DNA, 25 bp, Homo sapien
ggaatttttggataccctatctctg

SEQ ID NO: 2102344 - DNA, 25 bp, Homo sapien
tgagtgactgtaatacctcaagtga

SEQ ID NO: 2102345 - DNA, 25 bp, Homo sapien
tcagtgtgtgcacatttctctggga

SEQ ID NO: 2102346 - DNA, 25 bp, Homo sapien
cagtgtgtgcacatttctctgggaa

SEQ ID NO: 2102347 - DNA, 25 bp, Homo sapien
gagaggctgctcttctagtagggca

SEQ ID NO: 2102348 - DNA, 25 bp, Homo sapien
tagtagggcagacactttgatggac

SEQ ID NO: 2102349 - DNA, 25 bp, Homo sapien
gtggcagaggttgaatgtgttgtgt

SEQ ID NO: 2102350 - DNA, 25 bp, Homo sapien
tggcagaggttgaatgtgttgtgtt

SEQ ID NO: 2102351 - DNA, 25 bp, Homo sapien
aatgacaaaaatggagagcccctca

SEQ ID NO: 2102352 - DNA, 25 bp, Homo sapien
ccctcattcacagcccagttcccca

SEQ ID NO: 2102353 - DNA, 25 bp, Homo sapien
tgacaaaaatggagagcccctcatt

SEQ ID NO: 2102354 - DNA, 25 bp, Homo sapien
caaaaatggagagcccctcattcac

SEQ ID NO: 2102355 - DNA, 25 bp, Homo sapien
tgaagtttccgcatttccacagtag

SEQ ID NO: 2102356 - DNA, 25 bp, Homo sapien
gaagtttccgcatttccacagtaga

SEQ ID NO: 2102357 - DNA, 25 bp, Homo sapien
aagtttccgcatttccacagtagat

SEQ ID NO: 2102358 - DNA, 25 bp, Homo sapien
catgaagtttccgcatttccacagt

SEQ ID NO: 2102359 - DNA, 25 bp, Homo sapien
caaagaggaagacgttcaaccccag

SEQ ID NO: 2102360 - DNA, 25 bp, Homo sapien
gaggaagacgttcaaccccagccaa

SEQ ID NO: 2102361 - DNA, 25 bp, Homo sapien
agacgttcaaccccagccaaaccag

SEQ ID NO: 2102362 - DNA, 25 bp, Homo sapien
agaggaagacgttcaaccccagcca

SEQ ID NO: 2102363 - DNA, 25 bp, Homo sapien
tcttgtgtaaaagaacttaggtgga

SEQ ID NO: 2102364 - DNA, 25 bp, Homo sapien
tgtgtaaaagaacttaggtggaata

SEQ ID NO: 2102365 - DNA, 25 bp, Homo sapien
gttacagacaacagttcactttctc

SEQ ID NO: 2102366 - DNA, 25 bp, Homo sapien
taaggtgcatatcattaactagagt

SEQ ID NO: 2102367 - DNA, 25 bp, Homo sapien
taactagagttaagtatcaagactt

SEQ ID NO: 2102368 - DNA, 25 bp, Homo sapien
tagcacttaaattgatcttaacagt

SEQ ID NO: 2102369 - DNA, 25 bp, Homo sapien
cagatttcgacagactggcaagaga

SEQ ID NO: 2102370 - DNA, 25 bp, Homo sapien
tcgacagactggcaagagaatcagc

SEQ ID NO: 2102371 - DNA, 25 bp, Homo sapien
gacagcagatttcgacagactggca

SEQ ID NO: 2102372 - DNA, 25 bp, Homo sapien
cgcactggaacccctgaggaaggac

SEQ ID NO: 2102373 - DNA, 25 bp, Homo sapien
ggccttcaagaatacgatttcctca

SEQ ID NO: 2102374 - DNA, 25 bp, Homo sapien
tgtcaccttctctaaaatgcccttc

SEQ ID NO: 2102375 - DNA, 25 bp, Homo sapien
aataataatacaaagagaagccaag

SEQ ID NO: 2102376 - DNA, 25 bp, Homo sapien
gtaaagctttgtggaacccatcata

SEQ ID NO: 2102377 - DNA, 25 bp, Homo sapien
ttggtgtggacaggaatggcaaaca

SEQ ID NO: 2102378 - DNA, 25 bp, Homo sapien
ggacaggaatggcaaacaaatccaa

SEQ ID NO: 2102379 - DNA, 25 bp, Homo sapien
tctttggtgtggacaggaatggcaa

SEQ ID NO: 2102380 - DNA, 25 bp, Homo sapien
tgtggacaggaatggcaaacaaatc

SEQ ID NO: 2102381 - DNA, 25 bp, Homo sapien
gattttgcagaggtaaagtcccaag

SEQ ID NO: 2102382 - DNA, 25 bp, Homo sapien
taaatgttcaccagtggagctgagc

SEQ ID NO: 2102383 - DNA, 25 bp, Homo sapien
gggacctctagtgctacatctgtaa

SEQ ID NO: 2102384 - DNA, 25 bp, Homo sapien
tgagtggaccctagatgatcaccag

SEQ ID NO: 2102385 - DNA, 25 bp, Homo sapien
ccatccatgattggctgagggctgc

SEQ ID NO: 2102386 - DNA, 25 bp, Homo sapien
gcttgggtgttcaaccaccaactgc

SEQ ID NO: 2102387 - DNA, 25 bp, Homo sapien
gttaagaagcttgggtgttcaacca

SEQ ID NO: 2102388 - DNA, 25 bp, Homo sapien
catcaatcccctgggatttcaggct

SEQ ID NO: 2102389 - DNA, 25 bp, Homo sapien
tcagttagccataactagggagggc

SEQ ID NO: 2102390 - DNA, 25 bp, Homo sapien
ggcaggaagtttaaaccatgaggtc

SEQ ID NO: 2102391 - DNA, 25 bp, Homo sapien
acagaaaattgtgcttactccacca

SEQ ID NO: 2102392 - DNA, 25 bp, Homo sapien
tctgtgaactaggtagtttacccat

SEQ ID NO: 2102393 - DNA, 25 bp, Homo sapien
gagagatgcagtcatcttcctcagg

SEQ ID NO: 2102394 - DNA, 25 bp, Homo sapien
tcatgaccaccctgcaaactgtatc

SEQ ID NO: 2102395 - DNA, 25 bp, Homo sapien
catcttcctcaggtcaaacagccag

SEQ ID NO: 2102396 - DNA, 25 bp, Homo sapien
caccctgcaaactgtatcattatat

SEQ ID NO: 2102397 - DNA, 25 bp, Homo sapien
gttgtcttcgaactcttgttgagca

SEQ ID NO: 2102398 - DNA, 25 bp, Homo sapien
tgtcttcgaactcttgttgagcagc

SEQ ID NO: 2102399 - DNA, 25 bp, Homo sapien
ccagttgtcttcgaactcttgttga

SEQ ID NO: 2102400 - DNA, 25 bp, Homo sapien
gtcttcgaactcttgttgagcagca

SEQ ID NO: 2102401 - DNA, 25 bp, Homo sapien
gaagatgttgagctatatgctccta

SEQ ID NO: 2102402 - DNA, 25 bp, Homo sapien
ggacagcctctgactctatgataag

SEQ ID NO: 2102403 - DNA, 25 bp, Homo sapien
ccagaaccaaggagacaaggcaatt

SEQ ID NO: 2102404 - DNA, 25 bp, Homo sapien
gaggcccaggacacttatagacaag

SEQ ID NO: 2102405 - DNA, 25 bp, Homo sapien
tattctctttcgagcaaaattgaga

SEQ ID NO: 2102406 - DNA, 25 bp, Homo sapien
tattgactcgggcattcacacacca

SEQ ID NO: 2102407 - DNA, 25 bp, Homo sapien
cattaaatagatgtgcaatggtgtg

SEQ ID NO: 2102408 - DNA, 25 bp, Homo sapien
cagagagtgctactgaataaggatc

SEQ ID NO: 2102409 - DNA, 25 bp, Homo sapien
aatctagtcctcaattgtaatggcc

SEQ ID NO: 2102410 - DNA, 25 bp, Homo sapien
tcctcaattgtaatggcctagagaa

SEQ ID NO: 2102411 - DNA, 25 bp, Homo sapien
atggcctagagaatatctaagtcag

SEQ ID NO: 2102412 - DNA, 25 bp, Homo sapien
tagtcctcaattgtaatggcctaga

SEQ ID NO: 2102413 - DNA, 25 bp, Homo sapien
tacccctagagaaatgctgagttac

SEQ ID NO: 2102414 - DNA, 25 bp, Homo sapien
taatacttaggccaggatgttccct

SEQ ID NO: 2102415 - DNA, 25 bp, Homo sapien
tcaacaactgctgggatagaagaag

SEQ ID NO: 2102416 - DNA, 25 bp, Homo sapien
gacaatctgtagacacaggccatcc

SEQ ID NO: 2102417 - DNA, 25 bp, Homo sapien
ggactttagtagccccagggcagtc

SEQ ID NO: 2102418 - DNA, 25 bp, Homo sapien
gactttagtagccccagggcagtcc

SEQ ID NO: 2102419 - DNA, 25 bp, Homo sapien
actttagtagccccagggcagtcct

SEQ ID NO: 2102420 - DNA, 25 bp, Homo sapien
tgaagaagatcacaaagagatgatg

SEQ ID NO: 2102421 - DNA, 25 bp, Homo sapien
gacttcaaagtaagacctccggatg

SEQ ID NO: 2102422 - DNA, 25 bp, Homo sapien
ggcacagcgtgatgacaactccagt

SEQ ID NO: 2102423 - DNA, 25 bp, Homo sapien
gagatgatgtgtgtaccaaaagact

SEQ ID NO: 2102424 - DNA, 25 bp, Homo sapien
tgagcaactaccaaatcataagaca

SEQ ID NO: 2102425 - DNA, 25 bp, Homo sapien
taccaaatcataagacaattattgg

SEQ ID NO: 2102426 - DNA, 25 bp, Homo sapien
taaatgctagttgagcaactaccaa

SEQ ID NO: 2102427 - DNA, 25 bp, Homo sapien
cagagcccattcatttcaattcaat

SEQ ID NO: 2102428 - DNA, 25 bp, Homo sapien
ctgggtgaaaaatgtaagtccagat

SEQ ID NO: 2102429 - DNA, 25 bp, Homo sapien
ccagatcatttagtaataggaaatt

SEQ ID NO: 2102430 - DNA, 25 bp, Homo sapien
aagtccagatcatttagtaatagga

SEQ ID NO: 2102431 - DNA, 25 bp, Homo sapien
gggtgaaaaatgtaagtccagatca

SEQ ID NO: 2102432 - DNA, 25 bp, Homo sapien
aaactctctgcggtctgcccacgta

SEQ ID NO: 2102433 - DNA, 25 bp, Homo sapien
caaactgagggattgggcattcctt

SEQ ID NO: 2102434 - DNA, 25 bp, Homo sapien
tatattatgcacagccaaactctct

SEQ ID NO: 2102435 - DNA, 25 bp, Homo sapien
tgcggtctgcccacgtacaattcgt

SEQ ID NO: 2102436 - DNA, 25 bp, Homo sapien
gatttggatattgctgctagtatac

SEQ ID NO: 2102437 - DNA, 25 bp, Homo sapien
aaggtactagtactctgactccagc

SEQ ID NO: 2102438 - DNA, 25 bp, Homo sapien
ccagctgtcatcgaggaaatgtgcc

SEQ ID NO: 2102439 - DNA, 25 bp, Homo sapien
cccactgaatggagccagatttgga

SEQ ID NO: 2102440 - DNA, 25 bp, Homo sapien
agatcgccaaaaccgcaccaacctc

SEQ ID NO: 2102441 - DNA, 25 bp, Homo sapien
tctgttgagatcgccaaaaccgcac

SEQ ID NO: 2102442 - DNA, 25 bp, Homo sapien
tgttgagatcgccaaaaccgcacca

SEQ ID NO: 2102443 - DNA, 25 bp, Homo sapien
ttgagatcgccaaaaccgcaccaac

SEQ ID NO: 2102444 - DNA, 25 bp, Homo sapien
tgtccagtccccaacgatgcggata

SEQ ID NO: 2102445 - DNA, 25 bp, Homo sapien
tgcggatatggatactaaagaagtc

SEQ ID NO: 2102446 - DNA, 25 bp, Homo sapien
tgtcagtgtaaaagggtgccactcc

SEQ ID NO: 2102447 - DNA, 25 bp, Homo sapien
taggtagtttccacgcatcttgaaa

SEQ ID NO: 2102448 - DNA, 25 bp, Homo sapien
tgccaaagggcccatcaaccgctat

SEQ ID NO: 2102449 - DNA, 25 bp, Homo sapien
ttgcaatatttgtaccagactgact

SEQ ID NO: 2102450 - DNA, 25 bp, Homo sapien
gactgacttgagaatggatgcgaag

SEQ ID NO: 2102451 - DNA, 25 bp, Homo sapien
gcttcagattggtggcgttattgca

SEQ ID NO: 2102452 - DNA, 25 bp, Homo sapien
tgccagacattcatgagttccgagg

SEQ ID NO: 2102453 - DNA, 25 bp, Homo sapien
tctagactagcagggattgccacag

SEQ ID NO: 2102454 - DNA, 25 bp, Homo sapien
gaaattcttccctggctgctactgc

SEQ ID NO: 2102455 - DNA, 25 bp, Homo sapien
tgacctcagaaatacacaacttaag

SEQ ID NO: 2102456 - DNA, 25 bp, Homo sapien
gatcatgaagcagattatatttggc

SEQ ID NO: 2102457 - DNA, 25 bp, Homo sapien
gcagattatatttggcaggccctat

SEQ ID NO: 2102458 - DNA, 25 bp, Homo sapien
ctgaaaatggggtggatcatgaagc

SEQ ID NO: 2102459 - DNA, 25 bp, Homo sapien
gggtggatcatgaagcagattatat

SEQ ID NO: 2102460 - DNA, 25 bp, Homo sapien
caaaggcatgtgtgtcccggcacag

SEQ ID NO: 2102461 - DNA, 25 bp, Homo sapien
aaggcatgtgtgtcccggcacagcc

SEQ ID NO: 2102462 - DNA, 25 bp, Homo sapien
tcccggcacagccagtagaagtaga

SEQ ID NO: 2102463 - DNA, 25 bp, Homo sapien
cccggcacagccagtagaagtagat

SEQ ID NO: 2102464 - DNA, 25 bp, Homo sapien
tagctgaggaagccggcattgttcc

SEQ ID NO: 2102465 - DNA, 25 bp, Homo sapien
aggaagccggcattgttcctttcct

SEQ ID NO: 2102466 - DNA, 25 bp, Homo sapien
ccagtgaggtagatgttgtagctga

SEQ ID NO: 2102467 - DNA, 25 bp, Homo sapien
tgaggaagccggcattgttcctttc

SEQ ID NO: 2102468 - DNA, 25 bp, Homo sapien
cgtaagccctgtacactatgggaag

SEQ ID NO: 2102469 - DNA, 25 bp, Homo sapien
cctgtacactatgggaaggacctga

SEQ ID NO: 2102470 - DNA, 25 bp, Homo sapien
ctgagccttggagtcttgtccttac

SEQ ID NO: 2102471 - DNA, 25 bp, Homo sapien
gacctgagccttggagtcttgtcct

SEQ ID NO: 2102472 - DNA, 25 bp, Homo sapien
catggtgcacagcaaagtgattggc

SEQ ID NO: 2102473 - DNA, 25 bp, Homo sapien
gcaattgtcttgaattcattatccc

SEQ ID NO: 2102474 - DNA, 25 bp, Homo sapien
ttagggtgttgacttgcaattgtct

SEQ ID NO: 2102475 - DNA, 25 bp, Homo sapien
tgggccgtccatacaaagtcttttg

SEQ ID NO: 2102476 - DNA, 25 bp, Homo sapien
tagtctgaagggtacacgtatggtg

SEQ ID NO: 2102477 - DNA, 25 bp, Homo sapien
aaaaaatgcagattacctggcccta

SEQ ID NO: 2102478 - DNA, 25 bp, Homo sapien
gaaagcaccttgagacatctgtcaa

SEQ ID NO: 2102479 - DNA, 25 bp, Homo sapien
tgttctagcaagataagggatcccc

SEQ ID NO: 2102480 - DNA, 25 bp, Homo sapien
aaaagacaatttcaagctttgggat

SEQ ID NO: 2102481 - DNA, 25 bp, Homo sapien
caatttcaagctttgggatgagatg

SEQ ID NO: 2102482 - DNA, 25 bp, Homo sapien
gacaatttcaagctttgggatgaga

SEQ ID NO: 2102483 - DNA, 25 bp, Homo sapien
aagacaatttcaagctttgggatga

SEQ ID NO: 2102484 - DNA, 25 bp, Homo sapien
tgctttgtttactcagggtttcagc

SEQ ID NO: 2102485 - DNA, 25 bp, Homo sapien
agactcagagttggagatgctttgt

SEQ ID NO: 2102486 - DNA, 25 bp, Homo sapien
tgaaatgcactccccgagggccaga

SEQ ID NO: 2102487 - DNA, 25 bp, Homo sapien
tggagatgctttgtttactcagggt

SEQ ID NO: 2102488 - DNA, 25 bp, Homo sapien
atttatttcctcatggaagagacaa

SEQ ID NO: 2102489 - DNA, 25 bp, Homo sapien
tttatttcctcatggaagagacaag

SEQ ID NO: 2102490 - DNA, 25 bp, Homo sapien
tagcctgttcttgaccctagggaga

SEQ ID NO: 2102491 - DNA, 25 bp, Homo sapien
tcaaacctggagtaagatgggctag

SEQ ID NO: 2102492 - DNA, 25 bp, Homo sapien
tatttgtcagacctaccctcagtgc

SEQ ID NO: 2102493 - DNA, 25 bp, Homo sapien
gaaaggctatattcgcacagcaggc

SEQ ID NO: 2102494 - DNA, 25 bp, Homo sapien
aaacaggataatcagatagctgtgc

SEQ ID NO: 2102495 - DNA, 25 bp, Homo sapien
acaggataatcagatagctgtgctg

SEQ ID NO: 2102496 - DNA, 25 bp, Homo sapien
ctccaatagcttggtctggaataac

SEQ ID NO: 2102497 - DNA, 25 bp, Homo sapien
aacaggataatcagatagctgtgct

SEQ ID NO: 2102498 - DNA, 25 bp, Homo sapien
cagttcgttatgagaatagcccaga

SEQ ID NO: 2102499 - DNA, 25 bp, Homo sapien
ccttgagcgggctagcctgagcatt

SEQ ID NO: 2102500 - DNA, 25 bp, Homo sapien
tcatgcatctacaggacatctgggt

SEQ ID NO: 2102501 - DNA, 25 bp, Homo sapien
ttcaagggatgagcaaaaggactcc

SEQ ID NO: 2102502 - DNA, 25 bp, Homo sapien
gtaatgtcccaatgcaaagtgtaag

SEQ ID NO: 2102503 - DNA, 25 bp, Homo sapien
cttcccgatttggatgtaatgtccc

SEQ ID NO: 2102504 - DNA, 25 bp, Homo sapien
cctcttcttcccgatttggatgtaa

SEQ ID NO: 2102505 - DNA, 25 bp, Homo sapien
tgcaaagtgtaaggtctagttcctg

SEQ ID NO: 2102506 - DNA, 25 bp, Homo sapien
gtttgtagcaactctttttcagaga

SEQ ID NO: 2102507 - DNA, 25 bp, Homo sapien
tctctcagctgtgtctcatttggat

SEQ ID NO: 2102508 - DNA, 25 bp, Homo sapien
ttttagcctaacttcccaagactca

SEQ ID NO: 2102509 - DNA, 25 bp, Homo sapien
taaactcatcatgctggaaccacat

SEQ ID NO: 2102510 - DNA, 25 bp, Homo sapien
tatatagtcacatatatccagcttt

SEQ ID NO: 2102511 - DNA, 25 bp, Homo sapien
caagatatatagtcacatatatcca

SEQ ID NO: 2102512 - DNA, 25 bp, Homo sapien
tacccaagatatatagtcacatata

SEQ ID NO: 2102513 - DNA, 25 bp, Homo sapien
ctacccaagatatatagtcacatat

SEQ ID NO: 2102514 - DNA, 25 bp, Homo sapien
gtaagcctcgaagtttgtgctctcc

SEQ ID NO: 2102515 - DNA, 25 bp, Homo sapien
tctccctaagattcaaaatgatggc

SEQ ID NO: 2102516 - DNA, 25 bp, Homo sapien
tcgaagtttgtgctctccctaagat

SEQ ID NO: 2102517 - DNA, 25 bp, Homo sapien
agaaggatgccattgattgtattgt

SEQ ID NO: 2102518 - DNA, 25 bp, Homo sapien
taacaccagcagcagtactgataat

SEQ ID NO: 2102519 - DNA, 25 bp, Homo sapien
cagcaattgtggcagagagcatgat

SEQ ID NO: 2102520 - DNA, 25 bp, Homo sapien
ctccaatccagggaagactgtccaa

SEQ ID NO: 2102521 - DNA, 25 bp, Homo sapien
caagcttcaatactactaacaccag

SEQ ID NO: 2102522 - DNA, 25 bp, Homo sapien
cagtttaacagtagtatctagccat

SEQ ID NO: 2102523 - DNA, 25 bp, Homo sapien
ttatccagtttaacagtagtatcta

SEQ ID NO: 2102524 - DNA, 25 bp, Homo sapien
tccagtttaacagtagtatctagcc

SEQ ID NO: 2102525 - DNA, 25 bp, Homo sapien
atccagtttaacagtagtatctagc

SEQ ID NO: 2102526 - DNA, 25 bp, Homo sapien
tgctcccaaggtaaggtgaacttgg

SEQ ID NO: 2102527 - DNA, 25 bp, Homo sapien
ctgctcccaaggtaaggtgaacttg

SEQ ID NO: 2102528 - DNA, 25 bp, Homo sapien
gctcccaaggtaaggtgaacttgga

SEQ ID NO: 2102529 - DNA, 25 bp, Homo sapien
ctcccaaggtaaggtgaacttggat

SEQ ID NO: 2102530 - DNA, 25 bp, Homo sapien
cagagcacctggggtctggttccat

SEQ ID NO: 2102531 - DNA, 25 bp, Homo sapien
ctgagggagattcatggcagagcac

SEQ ID NO: 2102532 - DNA, 25 bp, Homo sapien
ggcagagcacctggggtctggttcc

SEQ ID NO: 2102533 - DNA, 25 bp, Homo sapien
gagggagattcatggcagagcacct

SEQ ID NO: 2102534 - DNA, 25 bp, Homo sapien
tgccttgcatcctgtgagagcctca

SEQ ID NO: 2102535 - DNA, 25 bp, Homo sapien
taagatctttgggatgcccggatca

SEQ ID NO: 2102536 - DNA, 25 bp, Homo sapien
ctggcagggtagtgtcagcagtcct

SEQ ID NO: 2102537 - DNA, 25 bp, Homo sapien
taatgacaacgctgcatcaatgcct

SEQ ID NO: 2102538 - DNA, 25 bp, Homo sapien
tccaagatcccaactcaggctacag

SEQ ID NO: 2102539 - DNA, 25 bp, Homo sapien
tctggcaaaggatcccagctaagcc

SEQ ID NO: 2102540 - DNA, 25 bp, Homo sapien
cgcattcggacatgtgaaggtaccc

SEQ ID NO: 2102541 - DNA, 25 bp, Homo sapien
tagctccataaacgccgcattcgga

SEQ ID NO: 2102542 - DNA, 25 bp, Homo sapien
tatatcaaatactggcacctactgg

SEQ ID NO: 2102543 - DNA, 25 bp, Homo sapien
ctaatatgcaagctgggaaccatga

SEQ ID NO: 2102544 - DNA, 25 bp, Homo sapien
tatgtagacatatccgtcagaagga

SEQ ID NO: 2102545 - DNA, 25 bp, Homo sapien
tgtgtagcccaaatgcatggaagac

SEQ ID NO: 2102546 - DNA, 25 bp, Homo sapien
tctgtatcttgactaattgcattaa

SEQ ID NO: 2102547 - DNA, 25 bp, Homo sapien
ttaatgtgtataattgatggcgctc

SEQ ID NO: 2102548 - DNA, 25 bp, Homo sapien
aattgatggcgctcagccagtgcac

SEQ ID NO: 2102549 - DNA, 25 bp, Homo sapien
acacagatgcctcagatgtaggaaa

SEQ ID NO: 2102550 - DNA, 25 bp, Homo sapien
cacttggcatgggtgtctggcaagt

SEQ ID NO: 2102551 - DNA, 25 bp, Homo sapien
gtgcccgcattcatggaatgaccct

SEQ ID NO: 2102552 - DNA, 25 bp, Homo sapien
gcattcatggaatgaccctccattt

SEQ ID NO: 2102553 - DNA, 25 bp, Homo sapien
tggaatgaccctccattttttgccc

SEQ ID NO: 2102554 - DNA, 25 bp, Homo sapien
ttggctaaggattgtctctggaggt

SEQ ID NO: 2102555 - DNA, 25 bp, Homo sapien
attgtctctggaggtgttaacttac

SEQ ID NO: 2102556 - DNA, 25 bp, Homo sapien
aggattgtctctggaggtgttaact

SEQ ID NO: 2102557 - DNA, 25 bp, Homo sapien
cattggctaaggattgtctctggag

SEQ ID NO: 2102558 - DNA, 25 bp, Homo sapien
ggttcttgcagaggactgtcaggta

SEQ ID NO: 2102559 - DNA, 25 bp, Homo sapien
aaaagtgaatctacatactccacag

SEQ ID NO: 2102560 - DNA, 25 bp, Homo sapien
cacagctacaaatgctgaactacag

SEQ ID NO: 2102561 - DNA, 25 bp, Homo sapien
aatgctgaactacagatgctggcac

SEQ ID NO: 2102562 - DNA, 25 bp, Homo sapien
gttctttgaatggttgcttcatggt

SEQ ID NO: 2102563 - DNA, 25 bp, Homo sapien
ctttgaatggttgcttcatggtttc

SEQ ID NO: 2102564 - DNA, 25 bp, Homo sapien
tctttgaatggttgcttcatggttt

SEQ ID NO: 2102565 - DNA, 25 bp, Homo sapien
ttgttctttgaatggttgcttcatg

SEQ ID NO: 2102566 - DNA, 25 bp, Homo sapien
ggaactctggctttggacgtctcgt

SEQ ID NO: 2102567 - DNA, 25 bp, Homo sapien
gacctgtagctcatttctagaaggg

SEQ ID NO: 2102568 - DNA, 25 bp, Homo sapien
tcagcaaggcaatcgagcaaggtaa

SEQ ID NO: 2102569 - DNA, 25 bp, Homo sapien
taagcctgtgaggttcccttcaagg

SEQ ID NO: 2102570 - DNA, 25 bp, Homo sapien
tcagggagttgcctttgtgacaacc

SEQ ID NO: 2102571 - DNA, 25 bp, Homo sapien
ccatgaggaattgctgggttttgcc

SEQ ID NO: 2102572 - DNA, 25 bp, Homo sapien
tattgccacccactgtatccctatg

SEQ ID NO: 2102573 - DNA, 25 bp, Homo sapien
ggaaaggcgttgtctcctaggccta

SEQ ID NO: 2102574 - DNA, 25 bp, Homo sapien
gcagctgttcttgacctccttgccc

SEQ ID NO: 2102575 - DNA, 25 bp, Homo sapien
tgcagctgttcttgacctccttgcc

SEQ ID NO: 2102576 - DNA, 25 bp, Homo sapien
ttgagagtgggtgtcatcttccaac

SEQ ID NO: 2102577 - DNA, 25 bp, Homo sapien
gctgctcatccttttgcagtgccct

SEQ ID NO: 2102578 - DNA, 25 bp, Homo sapien
ttacacagtttaatagcttgggcag

SEQ ID NO: 2102579 - DNA, 25 bp, Homo sapien
ccaaagcaacggaaacggagacgag

SEQ ID NO: 2102580 - DNA, 25 bp, Homo sapien
cggagacgagtcaggagcactgtca

SEQ ID NO: 2102581 - DNA, 25 bp, Homo sapien
tagcttgggcagatggaagcaacct

SEQ ID NO: 2102582 - DNA, 25 bp, Homo sapien
ggcagccacagtcaccccggcctct

SEQ ID NO: 2102583 - DNA, 25 bp, Homo sapien
gactctggggcttgtctatcttcac

SEQ ID NO: 2102584 - DNA, 25 bp, Homo sapien
cagcctgccctgacactgcttgtga

SEQ ID NO: 2102585 - DNA, 25 bp, Homo sapien
ttgcccacttgggcgttagttttca

SEQ ID NO: 2102586 - DNA, 25 bp, Homo sapien
acacacaaactgtagaatgctggac

SEQ ID NO: 2102587 - DNA, 25 bp, Homo sapien
cacaaactgtagaatgctggactac

SEQ ID NO: 2102588 - DNA, 25 bp, Homo sapien
caaactgtagaatgctggactactt

SEQ ID NO: 2102589 - DNA, 25 bp, Homo sapien
caaacacacaaactgtagaatgctg

SEQ ID NO: 2102590 - DNA, 25 bp, Homo sapien
caggaatgggggagctaagctagga

SEQ ID NO: 2102591 - DNA, 25 bp, Homo sapien
gccttgagtaatgatgaggggccca

SEQ ID NO: 2102592 - DNA, 25 bp, Homo sapien
gggccagtagatctaggggccttga

SEQ ID NO: 2102593 - DNA, 25 bp, Homo sapien
actgagggggccagtagatctaggg

SEQ ID NO: 2102594 - DNA, 25 bp, Homo sapien
catgtctgccacatgtagcaaggag

SEQ ID NO: 2102595 - DNA, 25 bp, Homo sapien
ttggttaggattcctataagtctga

SEQ ID NO: 2102596 - DNA, 25 bp, Homo sapien
cctataagtctgattgataatgtca

SEQ ID NO: 2102597 - DNA, 25 bp, Homo sapien
gattgataatgtcatgtctgccaca

SEQ ID NO: 2102598 - DNA, 25 bp, Homo sapien
tcagaaaagcaggtgtgacgacata

SEQ ID NO: 2102599 - DNA, 25 bp, Homo sapien
gatgtgattacgtgaaaggtcttga

SEQ ID NO: 2102600 - DNA, 25 bp, Homo sapien
taatcacaatgatccttacaagagg

SEQ ID NO: 2102601 - DNA, 25 bp, Homo sapien
tagcctggattagatgggtgatccc

SEQ ID NO: 2102602 - DNA, 25 bp, Homo sapien
aggactcctgtaagcccgctgttca

SEQ ID NO: 2102603 - DNA, 25 bp, Homo sapien
tgtaagcccgctgttcaagccagcc

SEQ ID NO: 2102604 - DNA, 25 bp, Homo sapien
gcttaggactcctgtaagcccgctg

SEQ ID NO: 2102605 - DNA, 25 bp, Homo sapien
aacacaggcttaggactcctgtaag

SEQ ID NO: 2102606 - DNA, 25 bp, Homo sapien
gctatacgtagaacagcctccactg

SEQ ID NO: 2102607 - DNA, 25 bp, Homo sapien
gctctgagtagcagtggttgaatct

SEQ ID NO: 2102608 - DNA, 25 bp, Homo sapien
tcttcagaacaggaatcagatccgc

SEQ ID NO: 2102609 - DNA, 25 bp, Homo sapien
tttacaaggtctctgcagaattgcg

SEQ ID NO: 2102610 - DNA, 25 bp, Homo sapien
aaatgacagattgatgaactctgag

SEQ ID NO: 2102611 - DNA, 25 bp, Homo sapien
tgacagattgatgaactctgagttc

SEQ ID NO: 2102612 - DNA, 25 bp, Homo sapien
cttctcatgatctaataaaaatgac

SEQ ID NO: 2102613 - DNA, 25 bp, Homo sapien
tccttctcatgatctaataaaaatg

SEQ ID NO: 2102614 - DNA, 25 bp, Homo sapien
ctctctttaggacgcccaggatcat

SEQ ID NO: 2102615 - DNA, 25 bp, Homo sapien
atctctctttaggacgcccaggatc

SEQ ID NO: 2102616 - DNA, 25 bp, Homo sapien
catctctctttaggacgcccaggat

SEQ ID NO: 2102617 - DNA, 25 bp, Homo sapien
tctctctttaggacgcccaggatca

SEQ ID NO: 2102618 - DNA, 25 bp, Homo sapien
agtgaaaacctgtgtctcgctatct

SEQ ID NO: 2102619 - DNA, 25 bp, Homo sapien
aaacctgtgtctcgctatctcctac

SEQ ID NO: 2102620 - DNA, 25 bp, Homo sapien
tgaaaacctgtgtctcgctatctcc

SEQ ID NO: 2102621 - DNA, 25 bp, Homo sapien
cgctatctcctaccactccttcctg

SEQ ID NO: 2102622 - DNA, 25 bp, Homo sapien
aggtgatacttatggggattcacat

SEQ ID NO: 2102623 - DNA, 25 bp, Homo sapien
tttcacagataaaggttattgcaaa

SEQ ID NO: 2102624 - DNA, 25 bp, Homo sapien
ggtgatacttatggggattcacatt

SEQ ID NO: 2102625 - DNA, 25 bp, Homo sapien
tgtcacagacagtgcacttccagct

SEQ ID NO: 2102626 - DNA, 25 bp, Homo sapien
tctccccggtcaaagattaggccca

SEQ ID NO: 2102627 - DNA, 25 bp, Homo sapien
cagtgagcaagcctgacaagggtct

SEQ ID NO: 2102628 - DNA, 25 bp, Homo sapien
agtgaacacaaactctgctggcctc

SEQ ID NO: 2102629 - DNA, 25 bp, Homo sapien
tcatacttgtcaactataacagggc

SEQ ID NO: 2102630 - DNA, 25 bp, Homo sapien
catgtcagtcaccaagtaataggct

SEQ ID NO: 2102631 - DNA, 25 bp, Homo sapien
cattacctcttgctacccttggaga

SEQ ID NO: 2102632 - DNA, 25 bp, Homo sapien
gaaagtggacacatccagtctacat

SEQ ID NO: 2102633 - DNA, 25 bp, Homo sapien
accactcaccagttataatccttag

SEQ ID NO: 2102634 - DNA, 25 bp, Homo sapien
tcagtgccgagaacattgacttgct

SEQ ID NO: 2102635 - DNA, 25 bp, Homo sapien
ttgacttgcttgaaacgttttgcct

SEQ ID NO: 2102636 - DNA, 25 bp, Homo sapien
tcttcttaaaatggactgtcggaca

SEQ ID NO: 2102637 - DNA, 25 bp, Homo sapien
tttctgcatcctggcgggtttgctc

SEQ ID NO: 2102638 - DNA, 25 bp, Homo sapien
acaggtgaagtgtctgacttttctg

SEQ ID NO: 2102639 - DNA, 25 bp, Homo sapien
aagtgtctgacttttctgcatcctg

SEQ ID NO: 2102640 - DNA, 25 bp, Homo sapien
agcaacaggtgaagtgtctgacttt

SEQ ID NO: 2102641 - DNA, 25 bp, Homo sapien
tgattttaaactccgaaaatgttga

SEQ ID NO: 2102642 - DNA, 25 bp, Homo sapien
tagctccgcccagtgtcagttttgg

SEQ ID NO: 2102643 - DNA, 25 bp, Homo sapien
aaatgttgaccgtctaagtccaagc

SEQ ID NO: 2102644 - DNA, 25 bp, Homo sapien
tctcctctggttgccgatctgaact

SEQ ID NO: 2102645 - DNA, 25 bp, Homo sapien
tcatgataatatccaaagtgccata

SEQ ID NO: 2102646 - DNA, 25 bp, Homo sapien
aattcatgataatatccaaagtgcc

SEQ ID NO: 2102647 - DNA, 25 bp, Homo sapien
taaattcatgataatatccaaagtg

SEQ ID NO: 2102648 - DNA, 25 bp, Homo sapien
tagatatgaggaatggatgattctt

SEQ ID NO: 2102649 - DNA, 25 bp, Homo sapien
tgctcttcggggtcctaggaccagg

SEQ ID NO: 2102650 - DNA, 25 bp, Homo sapien
tcctggtcattgagatctgatgagc

SEQ ID NO: 2102651 - DNA, 25 bp, Homo sapien
aactctgagtgcctggggtcacacc

SEQ ID NO: 2102652 - DNA, 25 bp, Homo sapien
gtcacaccattgctccgactgctct

SEQ ID NO: 2102653 - DNA, 25 bp, Homo sapien
gacactgctatggaaggtgtgccag

SEQ ID NO: 2102654 - DNA, 25 bp, Homo sapien
cagaagtgtttctgcggtgactctt

SEQ ID NO: 2102655 - DNA, 25 bp, Homo sapien
tctgcggtgactctttgtgagctcc

SEQ ID NO: 2102656 - DNA, 25 bp, Homo sapien
ctcctgagaggtaccttcaatagca

SEQ ID NO: 2102657 - DNA, 25 bp, Homo sapien
tgcttcttatgcttacagtatcctc

SEQ ID NO: 2102658 - DNA, 25 bp, Homo sapien
cttgcttcttatgcttacagtatcc

SEQ ID NO: 2102659 - DNA, 25 bp, Homo sapien
gacttgcttcttatgcttacagtat

SEQ ID NO: 2102660 - DNA, 25 bp, Homo sapien
cttcttatgcttacagtatcctctg

SEQ ID NO: 2102661 - DNA, 25 bp, Homo sapien
cgaggacactaaggcatcaatgctt

SEQ ID NO: 2102662 - DNA, 25 bp, Homo sapien
tgtttgtagataactgcgaggacac

SEQ ID NO: 2102663 - DNA, 25 bp, Homo sapien
agttgataggccacttgccagacgg

SEQ ID NO: 2102664 - DNA, 25 bp, Homo sapien
acttgccagacggtgagtgtttgta

SEQ ID NO: 2102665 - DNA, 25 bp, Homo sapien
tgacaaaaatgtacagcccaccagt

SEQ ID NO: 2102666 - DNA, 25 bp, Homo sapien
aaggatttcaccactgactttcacg

SEQ ID NO: 2102667 - DNA, 25 bp, Homo sapien
ccaccagttttgtagcagtagctga

SEQ ID NO: 2102668 - DNA, 25 bp, Homo sapien
taaacgctcatcatgctgttaaggc

SEQ ID NO: 2102669 - DNA, 25 bp, Homo sapien
cattgaattctggattggtgcctgt

SEQ ID NO: 2102670 - DNA, 25 bp, Homo sapien
gttctgattttggtcttacgcttgt

SEQ ID NO: 2102671 - DNA, 25 bp, Homo sapien
tcaggaagaagatatgacttgacat

SEQ ID NO: 2102672 - DNA, 25 bp, Homo sapien
tacgcttgttgttccgggacttgtc

SEQ ID NO: 2102673 - DNA, 25 bp, Homo sapien
gccagactgagagctgcagagttct

SEQ ID NO: 2102674 - DNA, 25 bp, Homo sapien
cttgtttccagctgggtatggctga

SEQ ID NO: 2102675 - DNA, 25 bp, Homo sapien
caaatcgatcatagtgccagactga

SEQ ID NO: 2102676 - DNA, 25 bp, Homo sapien
gaatctctacttccccgaggaagct

SEQ ID NO: 2102677 - DNA, 25 bp, Homo sapien
tcctttgtattgaaggccaatatca

SEQ ID NO: 2102678 - DNA, 25 bp, Homo sapien
aaacaactgtcagctctcctttgta

SEQ ID NO: 2102679 - DNA, 25 bp, Homo sapien
atgtaacgtaaaacaactgtcagct

SEQ ID NO: 2102680 - DNA, 25 bp, Homo sapien
taacgtaaaacaactgtcagctctc

SEQ ID NO: 2102681 - DNA, 25 bp, Homo sapien
gatagtgagttacttgcacagggtc

SEQ ID NO: 2102682 - DNA, 25 bp, Homo sapien
taaaccagtatcacaaccagcacct

SEQ ID NO: 2102683 - DNA, 25 bp, Homo sapien
ggctgcctgcaagaattgatggtaa

SEQ ID NO: 2102684 - DNA, 25 bp, Homo sapien
caagatagtttggatgttatcctca

SEQ ID NO: 2102685 - DNA, 25 bp, Homo sapien
agagattacaggtgactccttcttc

SEQ ID NO: 2102686 - DNA, 25 bp, Homo sapien
cccttcacaaagctatcagaagtgc

SEQ ID NO: 2102687 - DNA, 25 bp, Homo sapien
tagtattcctccagagattacaggt

SEQ ID NO: 2102688 - DNA, 25 bp, Homo sapien
gaagtgcctcctgacttcactgctg

SEQ ID NO: 2102689 - DNA, 25 bp, Homo sapien
gatggatgccactgaacatgaatgt

SEQ ID NO: 2102690 - DNA, 25 bp, Homo sapien
caaacgaactcctcccagaaagatg

SEQ ID NO: 2102691 - DNA, 25 bp, Homo sapien
gcctccttgtcccagatagtaagtt

SEQ ID NO: 2102692 - DNA, 25 bp, Homo sapien
cagaaagatgttgctggaaaaggcc

SEQ ID NO: 2102693 - DNA, 25 bp, Homo sapien
atcttctgccaaaggcgctgctctt

SEQ ID NO: 2102694 - DNA, 25 bp, Homo sapien
tttcccatgctggaacgaagcatga

SEQ ID NO: 2102695 - DNA, 25 bp, Homo sapien
agttccagggttgttggccatcttc

SEQ ID NO: 2102696 - DNA, 25 bp, Homo sapien
tgagtacaccctcaaagggagttcc

SEQ ID NO: 2102697 - DNA, 25 bp, Homo sapien
gctctcttaggtcatcagtagggtg

SEQ ID NO: 2102698 - DNA, 25 bp, Homo sapien
taaactagtctcgtcagtgaacaca

SEQ ID NO: 2102699 - DNA, 25 bp, Homo sapien
tgttttttaggcactcagcaagacc

SEQ ID NO: 2102700 - DNA, 25 bp, Homo sapien
tagaaagccctgtcaatccatcttg

SEQ ID NO: 2102701 - DNA, 25 bp, Homo sapien
gcaggtagagtacctcctttttcat

SEQ ID NO: 2102702 - DNA, 25 bp, Homo sapien
aaaatagcaggtagagtacctcctt

SEQ ID NO: 2102703 - DNA, 25 bp, Homo sapien
tcattcagcattattgtgacaatag

SEQ ID NO: 2102704 - DNA, 25 bp, Homo sapien
cattcagcattattgtgacaatagt

SEQ ID NO: 2102705 - DNA, 25 bp, Homo sapien
cagcattattgtgacaatagttaac

SEQ ID NO: 2102706 - DNA, 25 bp, Homo sapien
ttcagcattattgtgacaatagtta

SEQ ID NO: 2102707 - DNA, 25 bp, Homo sapien
tttaagccactgacatttggtgtgt

SEQ ID NO: 2102708 - DNA, 25 bp, Homo sapien
agccactgacatttggtgtgttttt

SEQ ID NO: 2102709 - DNA, 25 bp, Homo sapien
ggatggtcattttaagccactgaca

SEQ ID NO: 2102710 - DNA, 25 bp, Homo sapien
gaaaaaggatggtcattttaagcca

SEQ ID NO: 2102711 - DNA, 25 bp, Homo sapien
aagcagaggtgccatagccaatctt

SEQ ID NO: 2102712 - DNA, 25 bp, Homo sapien
cctcaggcctatagcaggaagcaga

SEQ ID NO: 2102713 - DNA, 25 bp, Homo sapien
agaggtgccatagccaatcttcata

SEQ ID NO: 2102714 - DNA, 25 bp, Homo sapien
cctagaacctcaggcctatagcagg

SEQ ID NO: 2102715 - DNA, 25 bp, Homo sapien
tatcagtagacatgacacaaccagg

SEQ ID NO: 2102716 - DNA, 25 bp, Homo sapien
tatggtagattgaactgttggcccc

SEQ ID NO: 2102717 - DNA, 25 bp, Homo sapien
gctgaaaatgtacccgagcagtggg

SEQ ID NO: 2102718 - DNA, 25 bp, Homo sapien
taagtttcgtagctcaagcatctgg

SEQ ID NO: 2102719 - DNA, 25 bp, Homo sapien
gacagagctaactcgagtcattaat

SEQ ID NO: 2102720 - DNA, 25 bp, Homo sapien
aagtctggagggaagttctctgaat

SEQ ID NO: 2102721 - DNA, 25 bp, Homo sapien
actgctcactggaattcaatattta

SEQ ID NO: 2102722 - DNA, 25 bp, Homo sapien
taatacacagacgttctctctgagg

SEQ ID NO: 2102723 - DNA, 25 bp, Homo sapien
gccttaaatacagtatctgtttctg

SEQ ID NO: 2102724 - DNA, 25 bp, Homo sapien
taaatacagtatctgtttctgtaag

SEQ ID NO: 2102725 - DNA, 25 bp, Homo sapien
tttgtgccttaaatacagtatctgt

SEQ ID NO: 2102726 - DNA, 25 bp, Homo sapien
tgtgccttaaatacagtatctgttt

SEQ ID NO: 2102727 - DNA, 25 bp, Homo sapien
tagccatctgtaaaaaacttcaagt

SEQ ID NO: 2102728 - DNA, 25 bp, Homo sapien
ttttgttcttgggtgctcgtgttct

SEQ ID NO: 2102729 - DNA, 25 bp, Homo sapien
ttcttgggtgctcgtgttctattcc

SEQ ID NO: 2102730 - DNA, 25 bp, Homo sapien
gcagagctggataaaatagccatct

SEQ ID NO: 2102731 - DNA, 25 bp, Homo sapien
gcaaagttccctttagggcacatac

SEQ ID NO: 2102732 - DNA, 25 bp, Homo sapien
ttagggcacatactgcctttttcac

SEQ ID NO: 2102733 - DNA, 25 bp, Homo sapien
gaactgccctcatcgctgcaaatga

SEQ ID NO: 2102734 - DNA, 25 bp, Homo sapien
agaactgccctcatcgctgcaaatg

SEQ ID NO: 2102735 - DNA, 25 bp, Homo sapien
ctgatgccaggatccagcgatgcca

SEQ ID NO: 2102736 - DNA, 25 bp, Homo sapien
gggcagcctagaaaccctgtcctga

SEQ ID NO: 2102737 - DNA, 25 bp, Homo sapien
aagaaaccagatccgtcctgcgggc

SEQ ID NO: 2102738 - DNA, 25 bp, Homo sapien
tttgacgtcggcagaactacacacc

SEQ ID NO: 2102739 - DNA, 25 bp, Homo sapien
cactccttctggataaacaaattca

SEQ ID NO: 2102740 - DNA, 25 bp, Homo sapien
aacagcactccttctggataaacaa

SEQ ID NO: 2102741 - DNA, 25 bp, Homo sapien
cagcactccttctggataaacaaat

SEQ ID NO: 2102742 - DNA, 25 bp, Homo sapien
ctccttctggataaacaaattcaaa

SEQ ID NO: 2102743 - DNA, 25 bp, Homo sapien
attaagaagcgagtagggagagaca

SEQ ID NO: 2102744 - DNA, 25 bp, Homo sapien
cagttgcaccatctttgaagtgggc

SEQ ID NO: 2102745 - DNA, 25 bp, Homo sapien
gagacagttcaatgaatgcagcctt

SEQ ID NO: 2102746 - DNA, 25 bp, Homo sapien
aaggccccaggatgtgccaaagcag

SEQ ID NO: 2102747 - DNA, 25 bp, Homo sapien
ggtggatgctacttcctgaaactct

SEQ ID NO: 2102748 - DNA, 25 bp, Homo sapien
ctagatttttcacaatagggaaagg

SEQ ID NO: 2102749 - DNA, 25 bp, Homo sapien
aaataaagaagaatcaggtggatgc

SEQ ID NO: 2102750 - DNA, 25 bp, Homo sapien
tcttgggctttcatagttggacggg

SEQ ID NO: 2102751 - DNA, 25 bp, Homo sapien
ctggatgtggtcacggtcgcgtgga

SEQ ID NO: 2102752 - DNA, 25 bp, Homo sapien
gaggatgcgaacctcccggagctcg

SEQ ID NO: 2102753 - DNA, 25 bp, Homo sapien
cggccccgaggatcacggcgatggg

SEQ ID NO: 2102754 - DNA, 25 bp, Homo sapien
tgggtccgataactgggctcccagt

SEQ ID NO: 2102755 - DNA, 25 bp, Homo sapien
ggattgtctgctgcactggcatgac

SEQ ID NO: 2102756 - DNA, 25 bp, Homo sapien
tgtccccaggccagacgtgcgtgtg

SEQ ID NO: 2102757 - DNA, 25 bp, Homo sapien
cgtgcgtgtgtacatggattgtctg

SEQ ID NO: 2102758 - DNA, 25 bp, Homo sapien
cagtctctgagatgatgggagtgga

SEQ ID NO: 2102759 - DNA, 25 bp, Homo sapien
cagttacatcaaagcaggaattttc

SEQ ID NO: 2102760 - DNA, 25 bp, Homo sapien
gagactcttgctgaatcctagattt

SEQ ID NO: 2102761 - DNA, 25 bp, Homo sapien
ctccagttacatcaaagcaggaatt

SEQ ID NO: 2102762 - DNA, 25 bp, Homo sapien
gtctccagtggaggctctttgtgat

SEQ ID NO: 2102763 - DNA, 25 bp, Homo sapien
gtgttgtggccttaactgttcagta

SEQ ID NO: 2102764 - DNA, 25 bp, Homo sapien
tttcacagtcaccaagtgtattgta

SEQ ID NO: 2102765 - DNA, 25 bp, Homo sapien
ttctataagtgtgaccagttttgat

SEQ ID NO: 2102766 - DNA, 25 bp, Homo sapien
ccctaaagtgttgtggccttaactg

SEQ ID NO: 2102767 - DNA, 25 bp, Homo sapien
ggtccaaaatgccagtccagtcaaa

SEQ ID NO: 2102768 - DNA, 25 bp, Homo sapien
taaatgtgacccgattatggccagt

SEQ ID NO: 2102769 - DNA, 25 bp, Homo sapien
gttactaacacacagggaaatggga

SEQ ID NO: 2102770 - DNA, 25 bp, Homo sapien
taaatgccttgcatataacgggcac

SEQ ID NO: 2102771 - DNA, 25 bp, Homo sapien
aggtgagtgaaggcaaggcaaaatc

SEQ ID NO: 2102772 - DNA, 25 bp, Homo sapien
tatcagatgaccttacagacaaagc

SEQ ID NO: 2102773 - DNA, 25 bp, Homo sapien
atcagatgaccttacagacaaagca

SEQ ID NO: 2102774 - DNA, 25 bp, Homo sapien
tcagatgaccttacagacaaagcag

SEQ ID NO: 2102775 - DNA, 25 bp, Homo sapien
tcgccacggaaaattaggacttgga

SEQ ID NO: 2102776 - DNA, 25 bp, Homo sapien
tacttttggagatggtcgccacgga

SEQ ID NO: 2102777 - DNA, 25 bp, Homo sapien
ggaccacagagaccatagagagtgt

SEQ ID NO: 2102778 - DNA, 25 bp, Homo sapien
tatcggccttatgtatacttttgga

SEQ ID NO: 2102779 - DNA, 25 bp, Homo sapien
gaatgccgcccatcacaaattgtaa

SEQ ID NO: 2102780 - DNA, 25 bp, Homo sapien
tatggattaaaagcactcaccttcc

SEQ ID NO: 2102781 - DNA, 25 bp, Homo sapien
cccgcagcctaggatggcttagaat

SEQ ID NO: 2102782 - DNA, 25 bp, Homo sapien
ggaaggtcctactgatagctacagg

SEQ ID NO: 2102783 - DNA, 25 bp, Homo sapien
cagaacatattactaagatagttat

SEQ ID NO: 2102784 - DNA, 25 bp, Homo sapien
tagttatgtttaagacttcctacag

SEQ ID NO: 2102785 - DNA, 25 bp, Homo sapien
tactaagatagttatgtttaagact

SEQ ID NO: 2102786 - DNA, 25 bp, Homo sapien
taagatagttatgtttaagacttcc

SEQ ID NO: 2102787 - DNA, 25 bp, Homo sapien
taatgcaaatacccactgctgtctt

SEQ ID NO: 2102788 - DNA, 25 bp, Homo sapien
ttaatgcaaatacccactgctgtct

SEQ ID NO: 2102789 - DNA, 25 bp, Homo sapien
aatgcaaatacccactgctgtcttc

SEQ ID NO: 2102790 - DNA, 25 bp, Homo sapien
atgcaaatacccactgctgtcttct

SEQ ID NO: 2102791 - DNA, 25 bp, Homo sapien
acaaatagaaagaagtgccctggaa

SEQ ID NO: 2102792 - DNA, 25 bp, Homo sapien
gaactttatgccaagctccaccgct

SEQ ID NO: 2102793 - DNA, 25 bp, Homo sapien
tgagggagcaaaggtaatatcaccc

SEQ ID NO: 2102794 - DNA, 25 bp, Homo sapien
atgcaaggcactgcggtaccggctg

SEQ ID NO: 2102795 - DNA, 25 bp, Homo sapien
ggacgattctatgcccttgaaaact

SEQ ID NO: 2102796 - DNA, 25 bp, Homo sapien
tttaattgtgtaaaggacgattcta

SEQ ID NO: 2102797 - DNA, 25 bp, Homo sapien
actccacagcaagttagccagcggg

SEQ ID NO: 2102798 - DNA, 25 bp, Homo sapien
ttgtgtaaaggacgattctatgccc

SEQ ID NO: 2102799 - DNA, 25 bp, Homo sapien
taacaggatcctcagattaaacagc

SEQ ID NO: 2102800 - DNA, 25 bp, Homo sapien
accatgaagttgtgaccatttctaa

SEQ ID NO: 2102801 - DNA, 25 bp, Homo sapien
acaggatcctcagattaaacagcat

SEQ ID NO: 2102802 - DNA, 25 bp, Homo sapien
cgaaaatttcgaaccatgaagttgt

SEQ ID NO: 2102803 - DNA, 25 bp, Homo sapien
agtgagaaggtcacggcccttcagc

SEQ ID NO: 2102804 - DNA, 25 bp, Homo sapien
tagagtgagaaggtcacggcccttc

SEQ ID NO: 2102805 - DNA, 25 bp, Homo sapien
gagtgagaaggtcacggcccttcag

SEQ ID NO: 2102806 - DNA, 25 bp, Homo sapien
tttagagtgagaaggtcacggccct

SEQ ID NO: 2102807 - DNA, 25 bp, Homo sapien
aaatcatgcctaaggacttcccttg

SEQ ID NO: 2102808 - DNA, 25 bp, Homo sapien
ggacttcccttgcaataaaggcaaa

SEQ ID NO: 2102809 - DNA, 25 bp, Homo sapien
ttgttcgagtacttcttttctcaaa

SEQ ID NO: 2102810 - DNA, 25 bp, Homo sapien
tgtagacaatcttgttcgagtactt

SEQ ID NO: 2102811 - DNA, 25 bp, Homo sapien
aaaaactgatggacctttgatactg

SEQ ID NO: 2102812 - DNA, 25 bp, Homo sapien
gatggacctttgatactgtactctg

SEQ ID NO: 2102813 - DNA, 25 bp, Homo sapien
tgttccccaagtcaacttctgaagg

SEQ ID NO: 2102814 - DNA, 25 bp, Homo sapien
tgatactgtactctgctatgtgttc

SEQ ID NO: 2102815 - DNA, 25 bp, Homo sapien
gagtccatggatagtcagagccagt

SEQ ID NO: 2102816 - DNA, 25 bp, Homo sapien
tagaaagctctgacactcgtaaggt

SEQ ID NO: 2102817 - DNA, 25 bp, Homo sapien
tgaccctgtctgattgctcatttgg

SEQ ID NO: 2102818 - DNA, 25 bp, Homo sapien
tgtggcttacgagtttcaaagtgtc

SEQ ID NO: 2102819 - DNA, 25 bp, Homo sapien
cgggccgtgtccgtgagactttcat

SEQ ID NO: 2102820 - DNA, 25 bp, Homo sapien
gaatatcttgtgtggtaagaaaaca

SEQ ID NO: 2102821 - DNA, 25 bp, Homo sapien
cgtgtccgtgagactttcattcaca

SEQ ID NO: 2102822 - DNA, 25 bp, Homo sapien
tgaatatcttgtgtggtaagaaaac

SEQ ID NO: 2102823 - DNA, 25 bp, Homo sapien
gaaatcagctttggagagaagaaaa

SEQ ID NO: 2102824 - DNA, 25 bp, Homo sapien
tatccatcagattctgaaatcagct

SEQ ID NO: 2102825 - DNA, 25 bp, Homo sapien
tcagctttggagagaagaaaatatt

SEQ ID NO: 2102826 - DNA, 25 bp, Homo sapien
ttatccatcagattctgaaatcagc

SEQ ID NO: 2102827 - DNA, 25 bp, Homo sapien
cccactgaaccctcttccaaccagt

SEQ ID NO: 2102828 - DNA, 25 bp, Homo sapien
aactccttttttggatgctcagctg

SEQ ID NO: 2102829 - DNA, 25 bp, Homo sapien
actccttttttggatgctcagctgt

SEQ ID NO: 2102830 - DNA, 25 bp, Homo sapien
gaaggtggtcacttctggtgtcaca

SEQ ID NO: 2102831 - DNA, 25 bp, Homo sapien
cgcgaaggtggtcacttctggtgtc

SEQ ID NO: 2102832 - DNA, 25 bp, Homo sapien
tcacgcgaaggtggtcacttctggt

SEQ ID NO: 2102833 - DNA, 25 bp, Homo sapien
aaggtggtcacttctggtgtcacat

SEQ ID NO: 2102834 - DNA, 25 bp, Homo sapien
tgctgttgctaaattccatatgatt

SEQ ID NO: 2102835 - DNA, 25 bp, Homo sapien
ttgctgttgctaaattccatatgat

SEQ ID NO: 2102836 - DNA, 25 bp, Homo sapien
tagccagggtgtccaaatctgattg

SEQ ID NO: 2102837 - DNA, 25 bp, Homo sapien
tacactcgagccaatactgcatctg

SEQ ID NO: 2102838 - DNA, 25 bp, Homo sapien
caggatctggataggatggtacaaa

SEQ ID NO: 2102839 - DNA, 25 bp, Homo sapien
cgtgaggtaatcagccaggatctgg

SEQ ID NO: 2102840 - DNA, 25 bp, Homo sapien
aatttcgctgcgctcatcatgatgg

SEQ ID NO: 2102841 - DNA, 25 bp, Homo sapien
gacctttcagagagctatagtgttc

SEQ ID NO: 2102842 - DNA, 25 bp, Homo sapien
cccgatccagctgagggtaagacct

SEQ ID NO: 2102843 - DNA, 25 bp, Homo sapien
gcctgaaggtgcattccgaatttcg

SEQ ID NO: 2102844 - DNA, 25 bp, Homo sapien
caacttggttacactagcatccggc

SEQ ID NO: 2102845 - DNA, 25 bp, Homo sapien
gccaacttggttacactagcatccg

SEQ ID NO: 2102846 - DNA, 25 bp, Homo sapien
tggttacactagcatccggctcata

SEQ ID NO: 2102847 - DNA, 25 bp, Homo sapien
tctgccaacttggttacactagcat

SEQ ID NO: 2102848 - DNA, 25 bp, Homo sapien
caatggatcatttgtcagcaacagc

SEQ ID NO: 2102849 - DNA, 25 bp, Homo sapien
cttcattgtaacctggtaaccttgg

SEQ ID NO: 2102850 - DNA, 25 bp, Homo sapien
taattaatacattgcctccatgcgc

SEQ ID NO: 2102851 - DNA, 25 bp, Homo sapien
cccatgcttatccaagtgtctgtaa

SEQ ID NO: 2102852 - DNA, 25 bp, Homo sapien
tagtgatcgaggagaataaaagact

SEQ ID NO: 2102853 - DNA, 25 bp, Homo sapien
gaacactagtgatcgaggagaataa

SEQ ID NO: 2102854 - DNA, 25 bp, Homo sapien
gcctctgggaacactagtgatcgag

SEQ ID NO: 2102855 - DNA, 25 bp, Homo sapien
tctgggaacactagtgatcgaggag

SEQ ID NO: 2102856 - DNA, 25 bp, Homo sapien
gatgctcactatatggctgctgaaa

SEQ ID NO: 2102857 - DNA, 25 bp, Homo sapien
tcagagacataaagagcgcaacaca

SEQ ID NO: 2102858 - DNA, 25 bp, Homo sapien
tgcttatttcatgggagaggacact

SEQ ID NO: 2102859 - DNA, 25 bp, Homo sapien
gaactgaactcaaagggacctccaa

SEQ ID NO: 2102860 - DNA, 25 bp, Homo sapien
tcacggcagtgctgaacctaaaggc

SEQ ID NO: 2102861 - DNA, 25 bp, Homo sapien
ttaaaaagccatatgtgcctactgg

SEQ ID NO: 2102862 - DNA, 25 bp, Homo sapien
cctaaaggccattctaaataagctg

SEQ ID NO: 2102863 - DNA, 25 bp, Homo sapien
tactgtattggatagggtagtctgg

SEQ ID NO: 2102864 - DNA, 25 bp, Homo sapien
gattagtgaagcgttctgaacagca

SEQ ID NO: 2102865 - DNA, 25 bp, Homo sapien
tgtccaatagagctctcggcagtga

SEQ ID NO: 2102866 - DNA, 25 bp, Homo sapien
caataccaatagtgtagccaccagc

SEQ ID NO: 2102867 - DNA, 25 bp, Homo sapien
gcatctcagaactggagggcgacat

SEQ ID NO: 2102868 - DNA, 25 bp, Homo sapien
gaaggaactagtttagccagggcaa

SEQ ID NO: 2102869 - DNA, 25 bp, Homo sapien
ggcataagaatgtctaccaggtaaa

SEQ ID NO: 2102870 - DNA, 25 bp, Homo sapien
taattgtctatggattgtgtcaacc

SEQ ID NO: 2102871 - DNA, 25 bp, Homo sapien
ggaagatcttgctcaacagtaacat

SEQ ID NO: 2102872 - DNA, 25 bp, Homo sapien
cattagcgacagtctgcttagggac

SEQ ID NO: 2102873 - DNA, 25 bp, Homo sapien
taaacattagcgacagtctgcttag

SEQ ID NO: 2102874 - DNA, 25 bp, Homo sapien
tggataaacattagcgacagtctgc

SEQ ID NO: 2102875 - DNA, 25 bp, Homo sapien
ggataaacattagcgacagtctgct

SEQ ID NO: 2102876 - DNA, 25 bp, Homo sapien
ctgaggtgagtaatctgtcagcagg

SEQ ID NO: 2102877 - DNA, 25 bp, Homo sapien
agctgaggtgagtaatctgtcagca

SEQ ID NO: 2102878 - DNA, 25 bp, Homo sapien
gagctgaggtgagtaatctgtcagc

SEQ ID NO: 2102879 - DNA, 25 bp, Homo sapien
cataaaccaactcattctgttactg

SEQ ID NO: 2102880 - DNA, 25 bp, Homo sapien
aaccaactcattctgttactgaaga

SEQ ID NO: 2102881 - DNA, 25 bp, Homo sapien
ttccccataaaccaactcattctgt

SEQ ID NO: 2102882 - DNA, 25 bp, Homo sapien
caactcattctgttactgaagaaca

SEQ ID NO: 2102883 - DNA, 25 bp, Homo sapien
aattgggaattagagagtttaagca

SEQ ID NO: 2102884 - DNA, 25 bp, Homo sapien
gcaaagttaagcacgtattacagtg

SEQ ID NO: 2102885 - DNA, 25 bp, Homo sapien
tagattacacttaatggcttagaca

SEQ ID NO: 2102886 - DNA, 25 bp, Homo sapien
gcatgggtgataatttatttaggta

SEQ ID NO: 2102887 - DNA, 25 bp, Homo sapien
cagtagctgactgcctggtaaatgt

SEQ ID NO: 2102888 - DNA, 25 bp, Homo sapien
accagtagctgactgcctggtaaat

SEQ ID NO: 2102889 - DNA, 25 bp, Homo sapien
cagcccacagatttaccagtagctg

SEQ ID NO: 2102890 - DNA, 25 bp, Homo sapien
cagatttaccagtagctgactgcct

SEQ ID NO: 2102891 - DNA, 25 bp, Homo sapien
ctgaaaattgtaccacatctgcaag

SEQ ID NO: 2102892 - DNA, 25 bp, Homo sapien
tcattggcctgaaaattgtaccaca

SEQ ID NO: 2102893 - DNA, 25 bp, Homo sapien
cattggcctgaaaattgtaccacat

SEQ ID NO: 2102894 - DNA, 25 bp, Homo sapien
ggcctgaaaattgtaccacatctgc

SEQ ID NO: 2102895 - DNA, 25 bp, Homo sapien
tatggcttgtaacagtaagtactca

SEQ ID NO: 2102896 - DNA, 25 bp, Homo sapien
gatacatgctcttggaggattcccc

SEQ ID NO: 2102897 - DNA, 25 bp, Homo sapien
gaaaatgctactctaggtatccatg

SEQ ID NO: 2102898 - DNA, 25 bp, Homo sapien
ttggagtttgggcacagtaatagct

SEQ ID NO: 2102899 - DNA, 25 bp, Homo sapien
tgcttactcatttaagtcagagctg

SEQ ID NO: 2102900 - DNA, 25 bp, Homo sapien
tacaaatgttagtcacccgcaagag

SEQ ID NO: 2102901 - DNA, 25 bp, Homo sapien
cccgcaagagaaatctagttgtaat

SEQ ID NO: 2102902 - DNA, 25 bp, Homo sapien
gaagaatatcagtcaaccagcctgg

SEQ ID NO: 2102903 - DNA, 25 bp, Homo sapien
tccagggacagtccagcaagtagtc

SEQ ID NO: 2102904 - DNA, 25 bp, Homo sapien
cctccagggacagtccagcaagtag

SEQ ID NO: 2102905 - DNA, 25 bp, Homo sapien
cagggacagtccagcaagtagtctg

SEQ ID NO: 2102906 - DNA, 25 bp, Homo sapien
gggacagtccagcaagtagtctggc

SEQ ID NO: 2102907 - DNA, 25 bp, Homo sapien
tgagtgacggtcatgctgagcttgg

SEQ ID NO: 2102908 - DNA, 25 bp, Homo sapien
agtgacggtcatgctgagcttggct

SEQ ID NO: 2102909 - DNA, 25 bp, Homo sapien
tgctgtgagtgacggtcatgctgag

SEQ ID NO: 2102910 - DNA, 25 bp, Homo sapien
ctgtgagtgacggtcatgctgagct

SEQ ID NO: 2102911 - DNA, 25 bp, Homo sapien
tgggtcaggtcttgggcaattggtt

SEQ ID NO: 2102912 - DNA, 25 bp, Homo sapien
gaaaagacagtggaacccctgtggc

SEQ ID NO: 2102913 - DNA, 25 bp, Homo sapien
tcaggtcttgggcaattggttcacc

SEQ ID NO: 2102914 - DNA, 25 bp, Homo sapien
ttgggcaattggttcaccgctggac

SEQ ID NO: 2102915 - DNA, 25 bp, Homo sapien
ccacaggcttcaccaactctttcaa

SEQ ID NO: 2102916 - DNA, 25 bp, Homo sapien
tgctgacaaaggtatctccatttcc

SEQ ID NO: 2102917 - DNA, 25 bp, Homo sapien
attaacatgacttggcaaccatttt

SEQ ID NO: 2102918 - DNA, 25 bp, Homo sapien
ttgtattccacatgctgacaaaggt

SEQ ID NO: 2102919 - DNA, 25 bp, Homo sapien
cagctgctgggtctcccggcagatg

SEQ ID NO: 2102920 - DNA, 25 bp, Homo sapien
cacttctttcgcaagctggctgaag

SEQ ID NO: 2102921 - DNA, 25 bp, Homo sapien
ctgaagagaaatgcgagggtgccaa

SEQ ID NO: 2102922 - DNA, 25 bp, Homo sapien
gacgaagtggctctcaagggcgtgg

SEQ ID NO: 2102923 - DNA, 25 bp, Homo sapien
tctctgagctatttcgaaggcgacg

SEQ ID NO: 2102924 - DNA, 25 bp, Homo sapien
ggccgctattgaccgcctgatcaac

SEQ ID NO: 2102925 - DNA, 25 bp, Homo sapien
tggaggccgctattgaccgcctgat

SEQ ID NO: 2102926 - DNA, 25 bp, Homo sapien
gcgtggaggccgctattgaccgcct

SEQ ID NO: 2102927 - DNA, 25 bp, Homo sapien
gctattgaccgcctgatcaacatgc

SEQ ID NO: 2102928 - DNA, 25 bp, Homo sapien
caaccaaccatgagcacccggagcc

SEQ ID NO: 2102929 - DNA, 25 bp, Homo sapien
aaccaaccatgagcacccggagccg

SEQ ID NO: 2102930 - DNA, 25 bp, Homo sapien
catgagcacccggagccgccaaaag

SEQ ID NO: 2102931 - DNA, 25 bp, Homo sapien
gcacccggagccgccaaaagtatac

SEQ ID NO: 2102932 - DNA, 25 bp, Homo sapien
gagacctgaactccaagtccagctg

SEQ ID NO: 2102933 - DNA, 25 bp, Homo sapien
agtctgtctccccaggaccatgtaa

SEQ ID NO: 2102934 - DNA, 25 bp, Homo sapien
tacaaagagtacatctccaatgaac

SEQ ID NO: 2102935 - DNA, 25 bp, Homo sapien
aagagcatgactaagctttgagacc

SEQ ID NO: 2102936 - DNA, 25 bp, Homo sapien
gagccagaaggagcactacaaaaag

SEQ ID NO: 2102937 - DNA, 25 bp, Homo sapien
ctgccactgaaggagcgcatggtgg

SEQ ID NO: 2102938 - DNA, 25 bp, Homo sapien
ctggttgctagaaactcttccagga

SEQ ID NO: 2102939 - DNA, 25 bp, Homo sapien
tgtccaatggggagctgaaccacct

SEQ ID NO: 2102940 - DNA, 25 bp, Homo sapien
cagctcaaggacaagtttgatggat

SEQ ID NO: 2102941 - DNA, 25 bp, Homo sapien
tatcagtggggtcggcatcaccaag

SEQ ID NO: 2102942 - DNA, 25 bp, Homo sapien
gtttgatggatgacccaccaagcca

SEQ ID NO: 2102943 - DNA, 25 bp, Homo sapien
tacttgccgtactgagaagagctca

SEQ ID NO: 2102944 - DNA, 25 bp, Homo sapien
tatgtcttctaaagggtgaggtggc

SEQ ID NO: 2102945 - DNA, 25 bp, Homo sapien
tggtatgtcttctaaagggtgaggt

SEQ ID NO: 2102946 - DNA, 25 bp, Homo sapien
aggtggctttgatcctgggttgcca

SEQ ID NO: 2102947 - DNA, 25 bp, Homo sapien
agccagcaccatggaagaggtagct

SEQ ID NO: 2102948 - DNA, 25 bp, Homo sapien
actacagagctccggcggcggcggc

SEQ ID NO: 2102949 - DNA, 25 bp, Homo sapien
caggcggcgggcgggcgcgcgggag

SEQ ID NO: 2102950 - DNA, 25 bp, Homo sapien
cggcggcaggcggcgggcgggcgcg

SEQ ID NO: 2102951 - DNA, 25 bp, Homo sapien
cggcggcggcaggcggcgggcgggc

SEQ ID NO: 2102952 - DNA, 25 bp, Homo sapien
gggttttgagacaggttatcacagg

SEQ ID NO: 2102953 - DNA, 25 bp, Homo sapien
ccagaagacgaaggagtagatgatg

SEQ ID NO: 2102954 - DNA, 25 bp, Homo sapien
caggttatcacaggtttggtctcca

SEQ ID NO: 2102955 - DNA, 25 bp, Homo sapien
ggagtagatgatgaggagggttttg

SEQ ID NO: 2102956 - DNA, 25 bp, Homo sapien
gaccgatggacagcgactcggccac

SEQ ID NO: 2102957 - DNA, 25 bp, Homo sapien
gatggacagcgactcggccaccggc

SEQ ID NO: 2102958 - DNA, 25 bp, Homo sapien
ggaccgatggacagcgactcggcca

SEQ ID NO: 2102959 - DNA, 25 bp, Homo sapien
ccgatggacagcgactcggccaccg

SEQ ID NO: 2102960 - DNA, 25 bp, Homo sapien
ttcttttctcagagcatcatcatac

SEQ ID NO: 2102961 - DNA, 25 bp, Homo sapien
ctgcagtcaccgacactccgcagcc

SEQ ID NO: 2102962 - DNA, 25 bp, Homo sapien
gcgaggtctagggttccagcagccc

SEQ ID NO: 2102963 - DNA, 25 bp, Homo sapien
tggaaggtcgacaacctgcagtcac

SEQ ID NO: 2102964 - DNA, 25 bp, Homo sapien
gcagcctgcgcggagcgaggtctag

SEQ ID NO: 2102965 - DNA, 25 bp, Homo sapien
cattgcaaacagtccggtttgccat

SEQ ID NO: 2102966 - DNA, 25 bp, Homo sapien
aagaaccaccaacgccagcgataag

SEQ ID NO: 2102967 - DNA, 25 bp, Homo sapien
gaaatgtccgggtgcattaggaata

SEQ ID NO: 2102968 - DNA, 25 bp, Homo sapien
cagcgataaggaaatgtccgggtgc

SEQ ID NO: 2102969 - DNA, 25 bp, Homo sapien
tcttgatgaatagtggggttctgca

SEQ ID NO: 2102970 - DNA, 25 bp, Homo sapien
caaggggaataacagccaaaataag

SEQ ID NO: 2102971 - DNA, 25 bp, Homo sapien
gaatagtggggttctgcagtaagat

SEQ ID NO: 2102972 - DNA, 25 bp, Homo sapien
gaaaatcattctgtcatggcaaggg

SEQ ID NO: 2102973 - DNA, 25 bp, Homo sapien
tggtagctgtcagccagagattgcc

SEQ ID NO: 2102974 - DNA, 25 bp, Homo sapien
agggccttgcaaagcttcgatcaaa

SEQ ID NO: 2102975 - DNA, 25 bp, Homo sapien
agagattgccctgagttccttgtca

SEQ ID NO: 2102976 - DNA, 25 bp, Homo sapien
tcgatcaaagcatcagacagggctg

SEQ ID NO: 2102977 - DNA, 25 bp, Homo sapien
acagctaaacttattcctgtcctaa

SEQ ID NO: 2102978 - DNA, 25 bp, Homo sapien
attcctgtcctaaacacagaaacca

SEQ ID NO: 2102979 - DNA, 25 bp, Homo sapien
ttacagctaaacttattcctgtcct

SEQ ID NO: 2102980 - DNA, 25 bp, Homo sapien
tattcctgtcctaaacacagaaacc

SEQ ID NO: 2102981 - DNA, 25 bp, Homo sapien
gaggaagtatagagatggtcaaaaa

SEQ ID NO: 2102982 - DNA, 25 bp, Homo sapien
tcttttaaatctacctttgtctcaa

SEQ ID NO: 2102983 - DNA, 25 bp, Homo sapien
tcatattagtctcaaacccgctttt

SEQ ID NO: 2102984 - DNA, 25 bp, Homo sapien
gcattttcatgagagtatcaccatc

SEQ ID NO: 2102985 - DNA, 25 bp, Homo sapien
gctagtgtcagctcatgggaaaatg

SEQ ID NO: 2102986 - DNA, 25 bp, Homo sapien
gattactgtgtctagctagtgtcag

SEQ ID NO: 2102987 - DNA, 25 bp, Homo sapien
gaaaatgcctgaagattcccattgc

SEQ ID NO: 2102988 - DNA, 25 bp, Homo sapien
gtgtgtccgtgtgcagattactgtg

SEQ ID NO: 2102989 - DNA, 25 bp, Homo sapien
tgctgtcaacgcagggagagtgaca

SEQ ID NO: 2102990 - DNA, 25 bp, Homo sapien
tacgtgcttcagcagatatcaataa

SEQ ID NO: 2102991 - DNA, 25 bp, Homo sapien
ttagaaaggtaaatctggcgatgct

SEQ ID NO: 2102992 - DNA, 25 bp, Homo sapien
gacttctaagttacgtgcttcagca

SEQ ID NO: 2102993 - DNA, 25 bp, Homo sapien
accattacagagcagcccagtgcag

SEQ ID NO: 2102994 - DNA, 25 bp, Homo sapien
ctgtggcaaccattacagagcagcc

SEQ ID NO: 2102995 - DNA, 25 bp, Homo sapien
gtggcaaccattacagagcagccca

SEQ ID NO: 2102996 - DNA, 25 bp, Homo sapien
cattacagagcagcccagtgcagtc

SEQ ID NO: 2102997 - DNA, 25 bp, Homo sapien
tgtcttttcgtttttacatcactac

SEQ ID NO: 2102998 - DNA, 25 bp, Homo sapien
tgtacctgcaggtctctggattatc

SEQ ID NO: 2102999 - DNA, 25 bp, Homo sapien
gcaggtctctggattatctttcatt

SEQ ID NO: 2103000 - DNA, 25 bp, Homo sapien
gtttttacatcactacccttggaga

SEQ ID NO: 2103001 - DNA, 25 bp, Homo sapien
attctaaaagagctgtaacattact

SEQ ID NO: 2103002 - DNA, 25 bp, Homo sapien
caaattctaaaagagctgtaacatt

SEQ ID NO: 2103003 - DNA, 25 bp, Homo sapien
taaaaaccggaaagcctgctagaca

SEQ ID NO: 2103004 - DNA, 25 bp, Homo sapien
ctgctagacaaattctaaaagagct

SEQ ID NO: 2103005 - DNA, 25 bp, Homo sapien
tgccgttaaacctgaaaacaatgat

SEQ ID NO: 2103006 - DNA, 25 bp, Homo sapien
agaactttcatcacaagatgcctgc

SEQ ID NO: 2103007 - DNA, 25 bp, Homo sapien
tcatcacaagatgcctgctgccgtt

SEQ ID NO: 2103008 - DNA, 25 bp, Homo sapien
tgagctggatgaggcttcttctgtt

SEQ ID NO: 2103009 - DNA, 25 bp, Homo sapien
ctcccttgtaccctttctcacaaag

SEQ ID NO: 2103010 - DNA, 25 bp, Homo sapien
ctttctcacaaagttactggaagtg

SEQ ID NO: 2103011 - DNA, 25 bp, Homo sapien
tgtaccctttctcacaaagttactg

SEQ ID NO: 2103012 - DNA, 25 bp, Homo sapien
ccctttctcacaaagttactggaag

SEQ ID NO: 2103013 - DNA, 25 bp, Homo sapien
caaggtagctcagcgactagaggta

SEQ ID NO: 2103014 - DNA, 25 bp, Homo sapien
aaatgtctgccctgtaaactgctga

SEQ ID NO: 2103015 - DNA, 25 bp, Homo sapien
caaattccacagtagggcagactcc

SEQ ID NO: 2103016 - DNA, 25 bp, Homo sapien
gacacagtttcaccgccaagaagaa

SEQ ID NO: 2103017 - DNA, 25 bp, Homo sapien
cacttctttcctaaaacatggcttc

SEQ ID NO: 2103018 - DNA, 25 bp, Homo sapien
caccacttctttcctaaaacatggc

SEQ ID NO: 2103019 - DNA, 25 bp, Homo sapien
ttcctaaaacatggcttccacactg

SEQ ID NO: 2103020 - DNA, 25 bp, Homo sapien
tctttcctaaaacatggcttccaca

SEQ ID NO: 2103021 - DNA, 25 bp, Homo sapien
caaaaatccccgtcaaaagctgtgg

SEQ ID NO: 2103022 - DNA, 25 bp, Homo sapien
gtcaggaatttcagcgtgccaaggg

SEQ ID NO: 2103023 - DNA, 25 bp, Homo sapien
ccttgaaggtggacagtagacaaca

SEQ ID NO: 2103024 - DNA, 25 bp, Homo sapien
gacaagtgttaggtatggccatccc

SEQ ID NO: 2103025 - DNA, 25 bp, Homo sapien
ggaagttcaccttcatccaagggag

SEQ ID NO: 2103026 - DNA, 25 bp, Homo sapien
gactttacatggtaatctggcccca

SEQ ID NO: 2103027 - DNA, 25 bp, Homo sapien
tagatgtgaccaggatcactcccgg

SEQ ID NO: 2103028 - DNA, 25 bp, Homo sapien
cttgcttgggacttacaggatgctc

SEQ ID NO: 2103029 - DNA, 25 bp, Homo sapien
tggactcctttcgtcatagttaact

SEQ ID NO: 2103030 - DNA, 25 bp, Homo sapien
cctttcgtcatagttaactctgtca

SEQ ID NO: 2103031 - DNA, 25 bp, Homo sapien
catagttaactctgtcaacgccacc

SEQ ID NO: 2103032 - DNA, 25 bp, Homo sapien
gtttggactcctttcgtcatagtta

SEQ ID NO: 2103033 - DNA, 25 bp, Homo sapien
caagcaatggtaattgcgaacgcac

SEQ ID NO: 2103034 - DNA, 25 bp, Homo sapien
gcacattctcgttcttaaaggcaga

SEQ ID NO: 2103035 - DNA, 25 bp, Homo sapien
tgacctcagtgagggaccgtgaact

SEQ ID NO: 2103036 - DNA, 25 bp, Homo sapien
tgtcccagaagtacagataaaagca

SEQ ID NO: 2103037 - DNA, 25 bp, Homo sapien
tgtgagtgactgtgaccaaggactg

SEQ ID NO: 2103038 - DNA, 25 bp, Homo sapien
gtgagtgactgtgaccaaggactgc

SEQ ID NO: 2103039 - DNA, 25 bp, Homo sapien
tgaccaaggactgcactggcttgct

SEQ ID NO: 2103040 - DNA, 25 bp, Homo sapien
ctgtgagtgactgtgaccaaggact

SEQ ID NO: 2103041 - DNA, 25 bp, Homo sapien
aaatccacgttcctcagatgttagg

SEQ ID NO: 2103042 - DNA, 25 bp, Homo sapien
ttcatagcaactacacacaaaggta

SEQ ID NO: 2103043 - DNA, 25 bp, Homo sapien
tcaatcatcccagaggtttacaggt

SEQ ID NO: 2103044 - DNA, 25 bp, Homo sapien
cacaatgttgggacctgattaggta

SEQ ID NO: 2103045 - DNA, 25 bp, Homo sapien
gctgttttgtgcgtgcagaccacag

SEQ ID NO: 2103046 - DNA, 25 bp, Homo sapien
aatacaaggttcataagccccacct

SEQ ID NO: 2103047 - DNA, 25 bp, Homo sapien
cagaccacagaccttatgatgaaac

SEQ ID NO: 2103048 - DNA, 25 bp, Homo sapien
ggcattttacttgagcccacgctgt

SEQ ID NO: 2103049 - DNA, 25 bp, Homo sapien
ggccagtaatctggggaaataacaa

SEQ ID NO: 2103050 - DNA, 25 bp, Homo sapien
gaatgccactctggaccagaaaggg

SEQ ID NO: 2103051 - DNA, 25 bp, Homo sapien
gtgaagaactatcagaaatgataag

SEQ ID NO: 2103052 - DNA, 25 bp, Homo sapien
cctctgaacctctgtgaagaactat

SEQ ID NO: 2103053 - DNA, 25 bp, Homo sapien
ccttgtcaatcaatacacagttcct

SEQ ID NO: 2103054 - DNA, 25 bp, Homo sapien
cttgccaaggtttcccttgtcaatc

SEQ ID NO: 2103055 - DNA, 25 bp, Homo sapien
gtcaatcaatacacagttcctaata

SEQ ID NO: 2103056 - DNA, 25 bp, Homo sapien
ttcccttgtcaatcaatacacagtt

SEQ ID NO: 2103057 - DNA, 25 bp, Homo sapien
ccaagctgggtataaccccatgaag

SEQ ID NO: 2103058 - DNA, 25 bp, Homo sapien
caccaagctgggtataaccccatga

SEQ ID NO: 2103059 - DNA, 25 bp, Homo sapien
agctgggtataaccccatgaagaat

SEQ ID NO: 2103060 - DNA, 25 bp, Homo sapien
caagctgggtataaccccatgaaga

SEQ ID NO: 2103061 - DNA, 25 bp, Homo sapien
aacctctaaaagtagttgtgtgtct

SEQ ID NO: 2103062 - DNA, 25 bp, Homo sapien
agacacacaactacttttagaggtt

SEQ ID NO: 2103063 - DNA, 25 bp, Homo sapien
cagttccgatgagcacatagggagc

SEQ ID NO: 2103064 - DNA, 25 bp, Homo sapien
gcaataagggagatataggtgccca

SEQ ID NO: 2103065 - DNA, 25 bp, Homo sapien
caaagacaacaatagtggtgccagt

SEQ ID NO: 2103066 - DNA, 25 bp, Homo sapien
taccacgacatgtagcaaagcatcc

SEQ ID NO: 2103067 - DNA, 25 bp, Homo sapien
tatgggatacttctgccccacaagc

SEQ ID NO: 2103068 - DNA, 25 bp, Homo sapien
tatgacattatactcagctatggga

SEQ ID NO: 2103069 - DNA, 25 bp, Homo sapien
cagtcatagtatttgggccgggaga

SEQ ID NO: 2103070 - DNA, 25 bp, Homo sapien
ttcccaaaatgctcacctgccagtg

SEQ ID NO: 2103071 - DNA, 25 bp, Homo sapien
tgagaatgccccatgtacatgactt

SEQ ID NO: 2103072 - DNA, 25 bp, Homo sapien
actaaacatgtagttatgagaatgc

SEQ ID NO: 2103073 - DNA, 25 bp, Homo sapien
acatatatcgaaaaaggaaatgttg

SEQ ID NO: 2103074 - DNA, 25 bp, Homo sapien
gaaagcacagccactcaaatactaa

SEQ ID NO: 2103075 - DNA, 25 bp, Homo sapien
catgacgaaacacaaaccctgaaat

SEQ ID NO: 2103076 - DNA, 25 bp, Homo sapien
gacgaaacacaaaccctgaaatgcc

SEQ ID NO: 2103077 - DNA, 25 bp, Homo sapien
tgacgaaacacaaaccctgaaatgc

SEQ ID NO: 2103078 - DNA, 25 bp, Homo sapien
ctcatgacgaaacacaaaccctgaa

SEQ ID NO: 2103079 - DNA, 25 bp, Homo sapien
tggcttgcctttatagtcttagaaa

SEQ ID NO: 2103080 - DNA, 25 bp, Homo sapien
ttttgaggcagcaagacaattagtt

SEQ ID NO: 2103081 - DNA, 25 bp, Homo sapien
tactattatttatggagagtcaatg

SEQ ID NO: 2103082 - DNA, 25 bp, Homo sapien
acttgtgccttactgaagcagctat

SEQ ID NO: 2103083 - DNA, 25 bp, Homo sapien
taagtctgcatagcgtccgtgtaag

SEQ ID NO: 2103084 - DNA, 25 bp, Homo sapien
gctgcgctgcacatggtccactgcc

SEQ ID NO: 2103085 - DNA, 25 bp, Homo sapien
gcgtccgtgtaagtcctcaggaagg

SEQ ID NO: 2103086 - DNA, 25 bp, Homo sapien
ttgccattgtaagtctgcatagcgt

SEQ ID NO: 2103087 - DNA, 25 bp, Homo sapien
aatcagtttcgttcatgcagcagct

SEQ ID NO: 2103088 - DNA, 25 bp, Homo sapien
gggatgccatgctccaggaagtagg

SEQ ID NO: 2103089 - DNA, 25 bp, Homo sapien
tggttaactttggtggcggccacag

SEQ ID NO: 2103090 - DNA, 25 bp, Homo sapien
gggattacaatcagtttcgttcatg

SEQ ID NO: 2103091 - DNA, 25 bp, Homo sapien
ccatctgggccaggagaaagcgggt

SEQ ID NO: 2103092 - DNA, 25 bp, Homo sapien
accactggtcccatctgggccagga

SEQ ID NO: 2103093 - DNA, 25 bp, Homo sapien
atctgggccaggagaaagcgggtac

SEQ ID NO: 2103094 - DNA, 25 bp, Homo sapien
tcaccactggtcccatctgggccag

SEQ ID NO: 2103095 - DNA, 25 bp, Homo sapien
aactagttaccagatcataacaacc

SEQ ID NO: 2103096 - DNA, 25 bp, Homo sapien
tccagcgatgattcccatgttagtc

SEQ ID NO: 2103097 - DNA, 25 bp, Homo sapien
ggagaatgcgattccaaacgccact

SEQ ID NO: 2103098 - DNA, 25 bp, Homo sapien
tagtctccatgaaactagttaccag

SEQ ID NO: 2103099 - DNA, 25 bp, Homo sapien
gaccaggttctgcacaattatgtag

SEQ ID NO: 2103100 - DNA, 25 bp, Homo sapien
caggttctgcacaattatgtaggct

SEQ ID NO: 2103101 - DNA, 25 bp, Homo sapien
ggttctgcacaattatgtaggctac

SEQ ID NO: 2103102 - DNA, 25 bp, Homo sapien
ttagaccaggttctgcacaattatg

SEQ ID NO: 2103103 - DNA, 25 bp, Homo sapien
ctttaaagggagagatctcatctgt

SEQ ID NO: 2103104 - DNA, 25 bp, Homo sapien
gagatctcatctgtaatacatagga

SEQ ID NO: 2103105 - DNA, 25 bp, Homo sapien
cacaagttgaagtttgctaaattta

SEQ ID NO: 2103106 - DNA, 25 bp, Homo sapien
tgaagtttgctaaatttaggctttc

SEQ ID NO: 2103107 - DNA, 25 bp, Homo sapien
tggcctagagggtcacagtgcatat

SEQ ID NO: 2103108 - DNA, 25 bp, Homo sapien
ggcctagagggtcacagtgcatatt

SEQ ID NO: 2103109 - DNA, 25 bp, Homo sapien
gcctagagggtcacagtgcatattc

SEQ ID NO: 2103110 - DNA, 25 bp, Homo sapien
ctgcctggccacatgggtgagcagt

SEQ ID NO: 2103111 - DNA, 25 bp, Homo sapien
gcctggccacatgggtgagcagtat

SEQ ID NO: 2103112 - DNA, 25 bp, Homo sapien
catgggtgagcagtatgggcaccat

SEQ ID NO: 2103113 - DNA, 25 bp, Homo sapien
gccacatgggtgagcagtatgggca

SEQ ID NO: 2103114 - DNA, 25 bp, Homo sapien
aacttcagctttcaggacccctgag

SEQ ID NO: 2103115 - DNA, 25 bp, Homo sapien
gaacaggcatctggtaagtggccac

SEQ ID NO: 2103116 - DNA, 25 bp, Homo sapien
tagggctggttctttgtgaacaggc

SEQ ID NO: 2103117 - DNA, 25 bp, Homo sapien
ggatctatggacgtctggaagccaa

SEQ ID NO: 2103118 - DNA, 25 bp, Homo sapien
gaccaccagtgatgtagtacctcca

SEQ ID NO: 2103119 - DNA, 25 bp, Homo sapien
gatcaggcacattcaccagtgaggt

SEQ ID NO: 2103120 - DNA, 25 bp, Homo sapien
taagtgggctcatctacacccaggg

SEQ ID NO: 2103121 - DNA, 25 bp, Homo sapien
tatattctgtctctcggccatgtag

SEQ ID NO: 2103122 - DNA, 25 bp, Homo sapien
tgattggccgtgatgaaccgggaca

SEQ ID NO: 2103123 - DNA, 25 bp, Homo sapien
tactgattggccgtgatgaaccggg

SEQ ID NO: 2103124 - DNA, 25 bp, Homo sapien
ttggccgtgatgaaccgggacagac

SEQ ID NO: 2103125 - DNA, 25 bp, Homo sapien
actgattggccgtgatgaaccggga

SEQ ID NO: 2103126 - DNA, 25 bp, Homo sapien
aaatggacactacacgtgacgtggg

SEQ ID NO: 2103127 - DNA, 25 bp, Homo sapien
cgttacatgtcttaggcagcctgaa

SEQ ID NO: 2103128 - DNA, 25 bp, Homo sapien
cacagtgaggagctaacaggagcct

SEQ ID NO: 2103129 - DNA, 25 bp, Homo sapien
ggacctggctacactctgtggcaca

SEQ ID NO: 2103130 - DNA, 25 bp, Homo sapien
tccccaaagagagtcacttctcctg

SEQ ID NO: 2103131 - DNA, 25 bp, Homo sapien
tcctgcaaagccatcaagaattagg

SEQ ID NO: 2103132 - DNA, 25 bp, Homo sapien
catgccccatagctcccttggatga

SEQ ID NO: 2103133 - DNA, 25 bp, Homo sapien
agcagaggaacccttgcacatgccc

SEQ ID NO: 2103134 - DNA, 25 bp, Homo sapien
tatttgtgagtaaaccctgcaccca

SEQ ID NO: 2103135 - DNA, 25 bp, Homo sapien
tttggctctgatagatgaaagtggg

SEQ ID NO: 2103136 - DNA, 25 bp, Homo sapien
tgccatgatatttgtgagtaaaccc

SEQ ID NO: 2103137 - DNA, 25 bp, Homo sapien
gcagctgtttggctctgatagatga

SEQ ID NO: 2103138 - DNA, 25 bp, Homo sapien
ggactaagccaataagagctaaggc

SEQ ID NO: 2103139 - DNA, 25 bp, Homo sapien
tcagtaaaatcaagtaggtaagccc

SEQ ID NO: 2103140 - DNA, 25 bp, Homo sapien
agatcttcccaaatcctagcatgga

SEQ ID NO: 2103141 - DNA, 25 bp, Homo sapien
caagtagtcggagacagatcttccc

SEQ ID NO: 2103142 - DNA, 25 bp, Homo sapien
cacctcattgggcaggccggttgga

SEQ ID NO: 2103143 - DNA, 25 bp, Homo sapien
gcaaacatcgtgaacttcccaaggc

SEQ ID NO: 2103144 - DNA, 25 bp, Homo sapien
actacagtgagaggttttgaatccc

SEQ ID NO: 2103145 - DNA, 25 bp, Homo sapien
ttggccaacataacccagaagaagc

SEQ ID NO: 2103146 - DNA, 25 bp, Homo sapien
tttgccatccagcatagctattctt

SEQ ID NO: 2103147 - DNA, 25 bp, Homo sapien
ttcatgtgattgcacttggtttccc

SEQ ID NO: 2103148 - DNA, 25 bp, Homo sapien
cttagatttggcaggataatcaata

SEQ ID NO: 2103149 - DNA, 25 bp, Homo sapien
gacccaaatggcaatcaatttcatg

SEQ ID NO: 2103150 - DNA, 25 bp, Homo sapien
ttctttgaattctgaagctcgaaac

SEQ ID NO: 2103151 - DNA, 25 bp, Homo sapien
tctttgaattctgaagctcgaaaca

SEQ ID NO: 2103152 - DNA, 25 bp, Homo sapien
ctttctttgaattctgaagctcgaa

SEQ ID NO: 2103153 - DNA, 25 bp, Homo sapien
ctttgaattctgaagctcgaaacat

SEQ ID NO: 2103154 - DNA, 25 bp, Homo sapien
cagaggtgatgaattgccttggagt

SEQ ID NO: 2103155 - DNA, 25 bp, Homo sapien
catcatgcctctctcgtcagtgcag

SEQ ID NO: 2103156 - DNA, 25 bp, Homo sapien
catgcctctctcgtcagtgcagaca

SEQ ID NO: 2103157 - DNA, 25 bp, Homo sapien
atcgcagaggtgatgaattgccttg

SEQ ID NO: 2103158 - DNA, 25 bp, Homo sapien
tgacacaagtgagctcagcggctct

SEQ ID NO: 2103159 - DNA, 25 bp, Homo sapien
gacacaagtgagctcagcggctctc

SEQ ID NO: 2103160 - DNA, 25 bp, Homo sapien
gccctcaacactgttattgcctctt

SEQ ID NO: 2103161 - DNA, 25 bp, Homo sapien
gaagatgttttcctagaaagctctt

SEQ ID NO: 2103162 - DNA, 25 bp, Homo sapien
tcttcttttgctcccagccctcaac

SEQ ID NO: 2103163 - DNA, 25 bp, Homo sapien
ggaagggctgtttgctggggaagat

SEQ ID NO: 2103164 - DNA, 25 bp, Homo sapien
tttgggcttgatttcgcatctttca

SEQ ID NO: 2103165 - DNA, 25 bp, Homo sapien
ggcttgatttcgcatctttcaattc

SEQ ID NO: 2103166 - DNA, 25 bp, Homo sapien
cttgatttcgcatctttcaattcct

SEQ ID NO: 2103167 - DNA, 25 bp, Homo sapien
tgggcttgatttcgcatctttcaat

SEQ ID NO: 2103168 - DNA, 25 bp, Homo sapien
gggcttcatgctgcttatgccgatg

SEQ ID NO: 2103169 - DNA, 25 bp, Homo sapien
gaaggcaaagcccaatcctctggca

SEQ ID NO: 2103170 - DNA, 25 bp, Homo sapien
gatgcatccttctccgccagttgga

SEQ ID NO: 2103171 - DNA, 25 bp, Homo sapien
caacgtgaggaaccagttcccacag

SEQ ID NO: 2103172 - DNA, 25 bp, Homo sapien
ccttgggattcccctatgcagagtc

SEQ ID NO: 2103173 - DNA, 25 bp, Homo sapien
ttgggattcccctatgcagagtctc

SEQ ID NO: 2103174 - DNA, 25 bp, Homo sapien
tgggattcccctatgcagagtctca

SEQ ID NO: 2103175 - DNA, 25 bp, Homo sapien
atccttgggattcccctatgcagag

SEQ ID NO: 2103176 - DNA, 25 bp, Homo sapien
gctgcaagtaggtctaagttgctca

SEQ ID NO: 2103177 - DNA, 25 bp, Homo sapien
agcagctgcaagtaggtctaagttg

SEQ ID NO: 2103178 - DNA, 25 bp, Homo sapien
cagctgcaagtaggtctaagttgct

SEQ ID NO: 2103179 - DNA, 25 bp, Homo sapien
gagcagctgcaagtaggtctaagtt

SEQ ID NO: 2103180 - DNA, 25 bp, Homo sapien
tctctctactcttctccgatgtgtt

SEQ ID NO: 2103181 - DNA, 25 bp, Homo sapien
tatggcatcgatggggtttgcaacc

SEQ ID NO: 2103182 - DNA, 25 bp, Homo sapien
ttctccgatgtgtttttctccctca

SEQ ID NO: 2103183 - DNA, 25 bp, Homo sapien
ttaagggtttgccagggaccatcta

SEQ ID NO: 2103184 - DNA, 25 bp, Homo sapien
ttttgagggttttatgtaatgttca

SEQ ID NO: 2103185 - DNA, 25 bp, Homo sapien
ttgagggttttatgtaatgttcaaa

SEQ ID NO: 2103186 - DNA, 25 bp, Homo sapien
tgagggttttatgtaatgttcaaaa

SEQ ID NO: 2103187 - DNA, 25 bp, Homo sapien
tttgagggttttatgtaatgttcaa

SEQ ID NO: 2103188 - DNA, 25 bp, Homo sapien
gctggtgagtggtgatacatcacgc

SEQ ID NO: 2103189 - DNA, 25 bp, Homo sapien
tctaaacaggtctccggcaagggct

SEQ ID NO: 2103190 - DNA, 25 bp, Homo sapien
ggtgatacatcacgcagctctctcc

SEQ ID NO: 2103191 - DNA, 25 bp, Homo sapien
tgagtggtgatacatcacgcagctc

SEQ ID NO: 2103192 - DNA, 25 bp, Homo sapien
tgccttcctgtagcacaagttgtaa

SEQ ID NO: 2103193 - DNA, 25 bp, Homo sapien
agtgctctgtaaccccgtgaccagg

SEQ ID NO: 2103194 - DNA, 25 bp, Homo sapien
tgagaggctctgctgagactgtaat

SEQ ID NO: 2103195 - DNA, 25 bp, Homo sapien
ggtttatggagggtctcttccagtc

SEQ ID NO: 2103196 - DNA, 25 bp, Homo sapien
catacagctgtaggggctcatccac

SEQ ID NO: 2103197 - DNA, 25 bp, Homo sapien
acagctgtaggggctcatccactac

SEQ ID NO: 2103198 - DNA, 25 bp, Homo sapien
tacagctgtaggggctcatccacta

SEQ ID NO: 2103199 - DNA, 25 bp, Homo sapien
ttcatacagctgtaggggctcatcc

SEQ ID NO: 2103200 - DNA, 25 bp, Homo sapien
gataagtgggcaaaaacagctcgtg

SEQ ID NO: 2103201 - DNA, 25 bp, Homo sapien
gagaaatcagagcaaggtcacgcag

SEQ ID NO: 2103202 - DNA, 25 bp, Homo sapien
ggtcacgcagtgaggcagctttagt

SEQ ID NO: 2103203 - DNA, 25 bp, Homo sapien
cagtggtatcaaagtgggcagtgac

SEQ ID NO: 2103204 - DNA, 25 bp, Homo sapien
tcaaggtaccagcagggttgggttc

SEQ ID NO: 2103205 - DNA, 25 bp, Homo sapien
gaccatcttcttgctatatcctcat

SEQ ID NO: 2103206 - DNA, 25 bp, Homo sapien
agatgaccatcttcttgctatatcc

SEQ ID NO: 2103207 - DNA, 25 bp, Homo sapien
ggttctggtgaggatcctcctcctg

SEQ ID NO: 2103208 - DNA, 25 bp, Homo sapien
tttgtctggtatcctcttcttgttt

SEQ ID NO: 2103209 - DNA, 25 bp, Homo sapien
gggtcttccctaatcatactatcta

SEQ ID NO: 2103210 - DNA, 25 bp, Homo sapien
tcagaagggtcttccctaatcatac

SEQ ID NO: 2103211 - DNA, 25 bp, Homo sapien
agacaaatctccatcggcgtgactc

SEQ ID NO: 2103212 - DNA, 25 bp, Homo sapien
cctagatccttaggattccaggact

SEQ ID NO: 2103213 - DNA, 25 bp, Homo sapien
tttttcctagatccttaggattcca

SEQ ID NO: 2103214 - DNA, 25 bp, Homo sapien
tccaggactttcttgtaccatcagc

SEQ ID NO: 2103215 - DNA, 25 bp, Homo sapien
caagttgatttttcctagatcctta

SEQ ID NO: 2103216 - DNA, 25 bp, Homo sapien
gaccacaggatattatgagagacct

SEQ ID NO: 2103217 - DNA, 25 bp, Homo sapien
ggcataagttgttccagccagctat

SEQ ID NO: 2103218 - DNA, 25 bp, Homo sapien
accactgggcaagaggcaaattgct

SEQ ID NO: 2103219 - DNA, 25 bp, Homo sapien
tgataataggtaccaggcaccactg

SEQ ID NO: 2103220 - DNA, 25 bp, Homo sapien
gagatctggcctagaactggaagaa

SEQ ID NO: 2103221 - DNA, 25 bp, Homo sapien
cagactctcgtgttaaaggccatgt

SEQ ID NO: 2103222 - DNA, 25 bp, Homo sapien
caacccaagatagcagagatcctgg

SEQ ID NO: 2103223 - DNA, 25 bp, Homo sapien
catgtagtccaaccatccacttgtg

SEQ ID NO: 2103224 - DNA, 25 bp, Homo sapien
tattttaagtacgtatgcacccgga

SEQ ID NO: 2103225 - DNA, 25 bp, Homo sapien
ccaatgagattgaaagagcactgca

SEQ ID NO: 2103226 - DNA, 25 bp, Homo sapien
gatggctcatgcacctgcctgcaaa

SEQ ID NO: 2103227 - DNA, 25 bp, Homo sapien
caagggatctagcaaaaggattcca

SEQ ID NO: 2103228 - DNA, 25 bp, Homo sapien
gggcctaagctatgtaccgaatcgc

SEQ ID NO: 2103229 - DNA, 25 bp, Homo sapien
tccaagtcggctacacagtgatgct

SEQ ID NO: 2103230 - DNA, 25 bp, Homo sapien
gcactgggtcatttaatagggccta

SEQ ID NO: 2103231 - DNA, 25 bp, Homo sapien
tgagacttccaaaccacagcctatt

SEQ ID NO: 2103232 - DNA, 25 bp, Homo sapien
aatgcacgtgccttggttgcagagt

SEQ ID NO: 2103233 - DNA, 25 bp, Homo sapien
caggtgctcaatttatagtccagga

SEQ ID NO: 2103234 - DNA, 25 bp, Homo sapien
ggcagcaccgagataaaaggcccag

SEQ ID NO: 2103235 - DNA, 25 bp, Homo sapien
cccgcgtgggatgaccagaatgcac

SEQ ID NO: 2103236 - DNA, 25 bp, Homo sapien
caagcggctgctacgcaagggcgct

SEQ ID NO: 2103237 - DNA, 25 bp, Homo sapien
gctcgttggcaattcagtgttctcg

SEQ ID NO: 2103238 - DNA, 25 bp, Homo sapien
tgttctcgctgcaagcggctgctac

SEQ ID NO: 2103239 - DNA, 25 bp, Homo sapien
tcttgcgccttgagactctcctgct

SEQ ID NO: 2103240 - DNA, 25 bp, Homo sapien
ttctctggctacagctcgtccggga

SEQ ID NO: 2103241 - DNA, 25 bp, Homo sapien
tgagctcaagcaaccaagctggccg

SEQ ID NO: 2103242 - DNA, 25 bp, Homo sapien
gattagattattcaccctgctaggg

SEQ ID NO: 2103243 - DNA, 25 bp, Homo sapien
cacggagacgaaagaacagattaga

SEQ ID NO: 2103244 - DNA, 25 bp, Homo sapien
aactctcgtctcgctggcagaccgg

SEQ ID NO: 2103245 - DNA, 25 bp, Homo sapien
aactcgcgatggctgagggtgctct

SEQ ID NO: 2103246 - DNA, 25 bp, Homo sapien
tggccgcgcggacgttggagcgcag

SEQ ID NO: 2103247 - DNA, 25 bp, Homo sapien
ctatagccggtgtggcgggattccc

SEQ ID NO: 2103248 - DNA, 25 bp, Homo sapien
ggtccatgttgttcacggcgccaat

SEQ ID NO: 2103249 - DNA, 25 bp, Homo sapien
tagtggctgtacatgtcccgagagg

SEQ ID NO: 2103250 - DNA, 25 bp, Homo sapien
cgtgagtttcgagagcacagtgtgc

SEQ ID NO: 2103251 - DNA, 25 bp, Homo sapien
catggcgttaaagagcgagtgcttc

SEQ ID NO: 2103252 - DNA, 25 bp, Homo sapien
taccgattaccgacagacagtgctg

SEQ ID NO: 2103253 - DNA, 25 bp, Homo sapien
gacagtgctgtttgtgcgcttatca

SEQ ID NO: 2103254 - DNA, 25 bp, Homo sapien
ctacgtacaagctggcgaaatgcca

SEQ ID NO: 2103255 - DNA, 25 bp, Homo sapien
tgatgcaatcctagcaacgcctggg

SEQ ID NO: 2103256 - DNA, 25 bp, Homo sapien
tttaatgacgaaaccattcattggc

SEQ ID NO: 2103257 - DNA, 25 bp, Homo sapien
taatgaggaccagacgcttgtccaa

SEQ ID NO: 2103258 - DNA, 25 bp, Homo sapien
cattcattggcagattaatgaggac

SEQ ID NO: 2103259 - DNA, 25 bp, Homo sapien
ttttatttaatgacgaaaccattca

SEQ ID NO: 2103260 - DNA, 25 bp, Homo sapien
tggcacctaagcattcccaagggct

SEQ ID NO: 2103261 - DNA, 25 bp, Homo sapien
gccctacgagcttagagaatgcctc

SEQ ID NO: 2103262 - DNA, 25 bp, Homo sapien
cacaattgcagactggctcactgaa

SEQ ID NO: 2103263 - DNA, 25 bp, Homo sapien
ggaagcattactggacgccgctcaa

SEQ ID NO: 2103264 - DNA, 25 bp, Homo sapien
cctgccagtgcgagaaaagaacatg

SEQ ID NO: 2103265 - DNA, 25 bp, Homo sapien
gattgccctattgtgcagcaggaga

SEQ ID NO: 2103266 - DNA, 25 bp, Homo sapien
aatttccatgatgcttcagagcgca

SEQ ID NO: 2103267 - DNA, 25 bp, Homo sapien
tgttgctacataaaaagtcttcggc

SEQ ID NO: 2103268 - DNA, 25 bp, Homo sapien
catgttttgtccgtgtccgatattc

SEQ ID NO: 2103269 - DNA, 25 bp, Homo sapien
caccatgttttgtccgtgtccgata

SEQ ID NO: 2103270 - DNA, 25 bp, Homo sapien
gtccgtgtccgatattctctagtca

SEQ ID NO: 2103271 - DNA, 25 bp, Homo sapien
ggtgacaccatgttttgtccgtgtc

SEQ ID NO: 2103272 - DNA, 25 bp, Homo sapien
ctgtgaagccccaagaaaatagccc

SEQ ID NO: 2103273 - DNA, 25 bp, Homo sapien
cccaagaaaatagcccagagaagtg

SEQ ID NO: 2103274 - DNA, 25 bp, Homo sapien
gagaagtgggtagcattgttgtttc

SEQ ID NO: 2103275 - DNA, 25 bp, Homo sapien
ccagagaagtgggtagcattgttgt

SEQ ID NO: 2103276 - DNA, 25 bp, Homo sapien
agcagagcctcttgcctcatccata

SEQ ID NO: 2103277 - DNA, 25 bp, Homo sapien
gttctgtagtttggggacttcctca

SEQ ID NO: 2103278 - DNA, 25 bp, Homo sapien
tggggacttcctcagctacaactgc

SEQ ID NO: 2103279 - DNA, 25 bp, Homo sapien
gccagattatgttggatagaatggg

SEQ ID NO: 2103280 - DNA, 25 bp, Homo sapien
cccatttcagtcgtgttgacaggaa

SEQ ID NO: 2103281 - DNA, 25 bp, Homo sapien
atttcagtcgtgttgacaggaaaac

SEQ ID NO: 2103282 - DNA, 25 bp, Homo sapien
atctcccatttcagtcgtgttgaca

SEQ ID NO: 2103283 - DNA, 25 bp, Homo sapien
atcattcatgtcactctctaaagtg

SEQ ID NO: 2103284 - DNA, 25 bp, Homo sapien
cctgatggtaatgttctgcagttcc

SEQ ID NO: 2103285 - DNA, 25 bp, Homo sapien
taatgttctgcagttccaggcagga

SEQ ID NO: 2103286 - DNA, 25 bp, Homo sapien
tatttaatggaccagcctgatggta

SEQ ID NO: 2103287 - DNA, 25 bp, Homo sapien
taatggaccagcctgatggtaatgt

SEQ ID NO: 2103288 - DNA, 25 bp, Homo sapien
tcatggaacagcactcatctatctc

SEQ ID NO: 2103289 - DNA, 25 bp, Homo sapien
tctatttccattatggaattcatgg

SEQ ID NO: 2103290 - DNA, 25 bp, Homo sapien
ggaacagcactcatctatctcatca

SEQ ID NO: 2103291 - DNA, 25 bp, Homo sapien
cattatggaattcatggaacagcac

SEQ ID NO: 2103292 - DNA, 25 bp, Homo sapien
gtaattaatgtaccccacatccagg

SEQ ID NO: 2103293 - DNA, 25 bp, Homo sapien
caggccaaaaattcccaaggtgttg

SEQ ID NO: 2103294 - DNA, 25 bp, Homo sapien
ggctgcatttgcctgcaggccaaaa

SEQ ID NO: 2103295 - DNA, 25 bp, Homo sapien
ccctggtaattaatgtaccccacat

SEQ ID NO: 2103296 - DNA, 25 bp, Homo sapien
ttttagtatcaccaatggtccctac

SEQ ID NO: 2103297 - DNA, 25 bp, Homo sapien
ttggatcacctcctatttttgttga

SEQ ID NO: 2103298 - DNA, 25 bp, Homo sapien
ttttcaggcttctccctaacttgac

SEQ ID NO: 2103299 - DNA, 25 bp, Homo sapien
taagtccaagactaattttcaggct

SEQ ID NO: 2103300 - DNA, 25 bp, Homo sapien
ggacagatgtctggtattttagaaa

SEQ ID NO: 2103301 - DNA, 25 bp, Homo sapien
aagggctgaaatgcatctggacaga

SEQ ID NO: 2103302 - DNA, 25 bp, Homo sapien
tatctttagaaatgtagttgctaca

SEQ ID NO: 2103303 - DNA, 25 bp, Homo sapien
taatgtggagttaacttggctgtgc

SEQ ID NO: 2103304 - DNA, 25 bp, Homo sapien
tggtttacagacctggatcctcccc

SEQ ID NO: 2103305 - DNA, 25 bp, Homo sapien
tttcagcaaagcctactgaaatgca

SEQ ID NO: 2103306 - DNA, 25 bp, Homo sapien
cctactgaaatgcaggtattgtggt

SEQ ID NO: 2103307 - DNA, 25 bp, Homo sapien
aatgcaggtattgtggtttacagac

SEQ ID NO: 2103308 - DNA, 25 bp, Homo sapien
tgcagagaagttgcctcttcccaga

SEQ ID NO: 2103309 - DNA, 25 bp, Homo sapien
aatggcagctgtctcagagaaaatg

SEQ ID NO: 2103310 - DNA, 25 bp, Homo sapien
agagacaggcacgtctcttcctaag

SEQ ID NO: 2103311 - DNA, 25 bp, Homo sapien
cgtctcttcctaagaatggctggga

SEQ ID NO: 2103312 - DNA, 25 bp, Homo sapien
caggtacagacttctcgggctcgtg

SEQ ID NO: 2103313 - DNA, 25 bp, Homo sapien
gctcgtgagcacatgtggacattcc

SEQ ID NO: 2103314 - DNA, 25 bp, Homo sapien
gagcaggtacattcacgagctcatc

SEQ ID NO: 2103315 - DNA, 25 bp, Homo sapien
tatacggaggcaactgctgttggag

SEQ ID NO: 2103316 - DNA, 25 bp, Homo sapien
gaaagcttgcaggaacgccagttgg

SEQ ID NO: 2103317 - DNA, 25 bp, Homo sapien
cagttggggagtgccatagagggcc

SEQ ID NO: 2103318 - DNA, 25 bp, Homo sapien
tagtacaggagatgaggagtcactg

SEQ ID NO: 2103319 - DNA, 25 bp, Homo sapien
cccaatcatagtacaggagatgagg

SEQ ID NO: 2103320 - DNA, 25 bp, Homo sapien
tgccttgttagttatttccctccac

SEQ ID NO: 2103321 - DNA, 25 bp, Homo sapien
gccttgttagttatttccctccaca

SEQ ID NO: 2103322 - DNA, 25 bp, Homo sapien
aaggcactgaagatgataacatcta

SEQ ID NO: 2103323 - DNA, 25 bp, Homo sapien
actgaagatgataacatctaattct

SEQ ID NO: 2103324 - DNA, 25 bp, Homo sapien
cactgaagatgataacatctaattc

SEQ ID NO: 2103325 - DNA, 25 bp, Homo sapien
ggcactgaagatgataacatctaat

SEQ ID NO: 2103326 - DNA, 25 bp, Homo sapien
tctgaataacatcggtgtcctttca

SEQ ID NO: 2103327 - DNA, 25 bp, Homo sapien
cttctgaataacatcggtgtccttt

SEQ ID NO: 2103328 - DNA, 25 bp, Homo sapien
gaataacatcggtgtcctttcatag

SEQ ID NO: 2103329 - DNA, 25 bp, Homo sapien
tgaataacatcggtgtcctttcata

SEQ ID NO: 2103330 - DNA, 25 bp, Homo sapien
acccattgaccatttaaacagccaa

SEQ ID NO: 2103331 - DNA, 25 bp, Homo sapien
gctgttattctgcaatatttaccca

SEQ ID NO: 2103332 - DNA, 25 bp, Homo sapien
cagccaatcaagttccttccggaaa

SEQ ID NO: 2103333 - DNA, 25 bp, Homo sapien
tattctgcaatatttacccattgac

SEQ ID NO: 2103334 - DNA, 25 bp, Homo sapien
cacttgtgctacaggaggttgtgca

SEQ ID NO: 2103335 - DNA, 25 bp, Homo sapien
ctacaggaggttgtgcactgaggac

SEQ ID NO: 2103336 - DNA, 25 bp, Homo sapien
gcagttccaatttccggggatgtga

SEQ ID NO: 2103337 - DNA, 25 bp, Homo sapien
gggatgtgacacttgtgctacagga

SEQ ID NO: 2103338 - DNA, 25 bp, Homo sapien
tgttcctatggtatactcaaccaaa

SEQ ID NO: 2103339 - DNA, 25 bp, Homo sapien
ctctggagaaattgtctgggggcca

SEQ ID NO: 2103340 - DNA, 25 bp, Homo sapien
gcaagtcccaggaattaatgttcct

SEQ ID NO: 2103341 - DNA, 25 bp, Homo sapien
gaattaatgttcctatggtatactc

SEQ ID NO: 2103342 - DNA, 25 bp, Homo sapien
ctatgcatcaactatggacgggctg

SEQ ID NO: 2103343 - DNA, 25 bp, Homo sapien
ctatggacgggctgaaaatggtagc

SEQ ID NO: 2103344 - DNA, 25 bp, Homo sapien
catcaactatggacgggctgaaaat

SEQ ID NO: 2103345 - DNA, 25 bp, Homo sapien
aatggtagctagaaactgaaacagg

SEQ ID NO: 2103346 - DNA, 25 bp, Homo sapien
ttggccccatcaagggatgagttgt

SEQ ID NO: 2103347 - DNA, 25 bp, Homo sapien
ctagaccaagccatcccaagagggc

SEQ ID NO: 2103348 - DNA, 25 bp, Homo sapien
gggatgagttgtcccatagccagga

SEQ ID NO: 2103349 - DNA, 25 bp, Homo sapien
caaagtggccacttgtagggcgatt

SEQ ID NO: 2103350 - DNA, 25 bp, Homo sapien
tctctataaccatagatggggttga

SEQ ID NO: 2103351 - DNA, 25 bp, Homo sapien
gagaagcaaaattcctgtctctata

SEQ ID NO: 2103352 - DNA, 25 bp, Homo sapien
aagcaaaattcctgtctctataacc

SEQ ID NO: 2103353 - DNA, 25 bp, Homo sapien
gcaaagggaagtatttgcaatgagg

SEQ ID NO: 2103354 - DNA, 25 bp, Homo sapien
gaaagctgcccgatatcaatgactt

SEQ ID NO: 2103355 - DNA, 25 bp, Homo sapien
tcacagttgctaacagagggccaga

SEQ ID NO: 2103356 - DNA, 25 bp, Homo sapien
caatgacttgacttgtcacgaggga

SEQ ID NO: 2103357 - DNA, 25 bp, Homo sapien
gaatcagcccgatgatgatgcatct

SEQ ID NO: 2103358 - DNA, 25 bp, Homo sapien
aaattcatatgttgggctgagtgcg

SEQ ID NO: 2103359 - DNA, 25 bp, Homo sapien
tattcggttccatctctagacttcc

SEQ ID NO: 2103360 - DNA, 25 bp, Homo sapien
tgaacactgactgccgtggactgaa

SEQ ID NO: 2103361 - DNA, 25 bp, Homo sapien
tctagatggttaaccagttgtccca

SEQ ID NO: 2103362 - DNA, 25 bp, Homo sapien
catggcctggaacaaacctttgtaa

SEQ ID NO: 2103363 - DNA, 25 bp, Homo sapien
gcatggcctggaacaaacctttgta

SEQ ID NO: 2103364 - DNA, 25 bp, Homo sapien
cctttgtaaagtaagggcagagcca

SEQ ID NO: 2103365 - DNA, 25 bp, Homo sapien
cattgtagcaggacacatcatgtgc

SEQ ID NO: 2103366 - DNA, 25 bp, Homo sapien
cctcataatctgcaataatgtgtgc

SEQ ID NO: 2103367 - DNA, 25 bp, Homo sapien
gacacatcatgtgcaagcagagagt

SEQ ID NO: 2103368 - DNA, 25 bp, Homo sapien
agagagtgtgctggatcatcaagcc

SEQ ID NO: 2103369 - DNA, 25 bp, Homo sapien
cttccatgcccacaaccagggcccc

SEQ ID NO: 2103370 - DNA, 25 bp, Homo sapien
atgcccacaaccagggccccagctt

SEQ ID NO: 2103371 - DNA, 25 bp, Homo sapien
cacaaccagggccccagctttaatc

SEQ ID NO: 2103372 - DNA, 25 bp, Homo sapien
caaccagggccccagctttaatcat

SEQ ID NO: 2103373 - DNA, 25 bp, Homo sapien
atcagcaggtgagaaatgtaggttc

SEQ ID NO: 2103374 - DNA, 25 bp, Homo sapien
aggccccagctggtagtggctaatt

SEQ ID NO: 2103375 - DNA, 25 bp, Homo sapien
agctggtagtggctaattgcaatca

SEQ ID NO: 2103376 - DNA, 25 bp, Homo sapien
gtggctaattgcaatcagcaggtga

SEQ ID NO: 2103377 - DNA, 25 bp, Homo sapien
agtgtcccaaatgcggctctgctct

SEQ ID NO: 2103378 - DNA, 25 bp, Homo sapien
aagctcccccagtgtcccaaatgcg

SEQ ID NO: 2103379 - DNA, 25 bp, Homo sapien
ccccagtgtcccaaatgcggctctg

SEQ ID NO: 2103380 - DNA, 25 bp, Homo sapien
ccagtgtcccaaatgcggctctgct

SEQ ID NO: 2103381 - DNA, 25 bp, Homo sapien
gagcttgctagaactgagatttcca

SEQ ID NO: 2103382 - DNA, 25 bp, Homo sapien
tattcacaggttgagtatgttccct

SEQ ID NO: 2103383 - DNA, 25 bp, Homo sapien
tgtagtgctagtccctgagcttgct

SEQ ID NO: 2103384 - DNA, 25 bp, Homo sapien
tccagatgtccgtctgttgcacaga

SEQ ID NO: 2103385 - DNA, 25 bp, Homo sapien
ttgaagcaactataacactaaagtc

SEQ ID NO: 2103386 - DNA, 25 bp, Homo sapien
taacactaaagtctataacaccctg

SEQ ID NO: 2103387 - DNA, 25 bp, Homo sapien
cccacagataattgaagcaactata

SEQ ID NO: 2103388 - DNA, 25 bp, Homo sapien
aagtctataacaccctgtggctcaa

SEQ ID NO: 2103389 - DNA, 25 bp, Homo sapien
tcctcctgtcaaaccagggaaggga

SEQ ID NO: 2103390 - DNA, 25 bp, Homo sapien
ctgtcctcctgtcaaaccagggaag

SEQ ID NO: 2103391 - DNA, 25 bp, Homo sapien
tgtcctcctgtcaaaccagggaagg

SEQ ID NO: 2103392 - DNA, 25 bp, Homo sapien
cttttgaggctgcattctcttctgc

SEQ ID NO: 2103393 - DNA, 25 bp, Homo sapien
gcttttgaggctgcattctcttctg

SEQ ID NO: 2103394 - DNA, 25 bp, Homo sapien
tgtccccatctgtgatttactaata

SEQ ID NO: 2103395 - DNA, 25 bp, Homo sapien
atttccaggggtcatactccgattt

SEQ ID NO: 2103396 - DNA, 25 bp, Homo sapien
ttgtccccatctgtgatttactaat

SEQ ID NO: 2103397 - DNA, 25 bp, Homo sapien
aggggtcatactccgatttggcaga

SEQ ID NO: 2103398 - DNA, 25 bp, Homo sapien
tgtgctcccagtggctgtccaaccc

SEQ ID NO: 2103399 - DNA, 25 bp, Homo sapien
acggcccagtgatagcatccagcag

SEQ ID NO: 2103400 - DNA, 25 bp, Homo sapien
ccagtggctgtccaaccctcactgt

SEQ ID NO: 2103401 - DNA, 25 bp, Homo sapien
cttttcccacggcccagtgatagca

SEQ ID NO: 2103402 - DNA, 25 bp, Homo sapien
aatatatatcccactagtcttggga

SEQ ID NO: 2103403 - DNA, 25 bp, Homo sapien
tatcccactagtcttgggatgtggc

SEQ ID NO: 2103404 - DNA, 25 bp, Homo sapien
tgtcatctccttatgagctgtctgt

SEQ ID NO: 2103405 - DNA, 25 bp, Homo sapien
tgttgagtcccttcaggaagaagaa

SEQ ID NO: 2103406 - DNA, 25 bp, Homo sapien
tggagaagaagcatggagaacggac

SEQ ID NO: 2103407 - DNA, 25 bp, Homo sapien
ggagaagaagcatggagaacggaca

SEQ ID NO: 2103408 - DNA, 25 bp, Homo sapien
ctggagaagaagcatggagaacgga

SEQ ID NO: 2103409 - DNA, 25 bp, Homo sapien
gagaagaagcatggagaacggacat

SEQ ID NO: 2103410 - DNA, 25 bp, Homo sapien
gttccaggacatagcattgtactgt

SEQ ID NO: 2103411 - DNA, 25 bp, Homo sapien
tattgagttccaggacatagcattg

SEQ ID NO: 2103412 - DNA, 25 bp, Homo sapien
ccaggacatagcattgtactgtgat

SEQ ID NO: 2103413 - DNA, 25 bp, Homo sapien
cttaaacccattgccaccagtgcct

SEQ ID NO: 2103414 - DNA, 25 bp, Homo sapien
tgatgacacacagtaaagactctgg

SEQ ID NO: 2103415 - DNA, 25 bp, Homo sapien
gagcttctttgcttgctgccacggg

SEQ ID NO: 2103416 - DNA, 25 bp, Homo sapien
catcttgtgtgctctcggtactccc

SEQ ID NO: 2103417 - DNA, 25 bp, Homo sapien
ccttcctggcttatatgggctcttg

SEQ ID NO: 2103418 - DNA, 25 bp, Homo sapien
gaacagccaacagcatagtcagcac

SEQ ID NO: 2103419 - DNA, 25 bp, Homo sapien
tcaacaggccagtgtaacgatcctc

SEQ ID NO: 2103420 - DNA, 25 bp, Homo sapien
aatccaatctgatggctatggccag

SEQ ID NO: 2103421 - DNA, 25 bp, Homo sapien
tatggatagctcagtcctcaacagg

SEQ ID NO: 2103422 - DNA, 25 bp, Homo sapien
gttgagaaacatcagccaagagccc

SEQ ID NO: 2103423 - DNA, 25 bp, Homo sapien
ggcagttgagaaacatcagccaaga

SEQ ID NO: 2103424 - DNA, 25 bp, Homo sapien
tgagaaacatcagccaagagcccag

SEQ ID NO: 2103425 - DNA, 25 bp, Homo sapien
cagttgagaaacatcagccaagagc

SEQ ID NO: 2103426 - DNA, 25 bp, Homo sapien
agggaacagggaccacaagagaagc

SEQ ID NO: 2103427 - DNA, 25 bp, Homo sapien
aagggaacagggaccacaagagaag

SEQ ID NO: 2103428 - DNA, 25 bp, Homo sapien
gaaagggaacagggaccacaagaga

SEQ ID NO: 2103429 - DNA, 25 bp, Homo sapien
ctactgcctgcaacttgccctgtcc

SEQ ID NO: 2103430 - DNA, 25 bp, Homo sapien
actgcctgcaacttgccctgtccaa

SEQ ID NO: 2103431 - DNA, 25 bp, Homo sapien
ctgtccaagcacctacctggagcca

SEQ ID NO: 2103432 - DNA, 25 bp, Homo sapien
gccctgtccaagcacctacctggag

SEQ ID NO: 2103433 - DNA, 25 bp, Homo sapien
tatcaggagataactgatgtgactt

SEQ ID NO: 2103434 - DNA, 25 bp, Homo sapien
tctttatcaggagataactgatgtg

SEQ ID NO: 2103435 - DNA, 25 bp, Homo sapien
ggagataactgatgtgacttattaa

SEQ ID NO: 2103436 - DNA, 25 bp, Homo sapien
caggagataactgatgtgacttatt

SEQ ID NO: 2103437 - DNA, 25 bp, Homo sapien
ctgcagcatgagtgagttcagaggc

SEQ ID NO: 2103438 - DNA, 25 bp, Homo sapien
tgcagcatgagtgagttcagaggca

SEQ ID NO: 2103439 - DNA, 25 bp, Homo sapien
ctgccagagggccaatgcactaatg

SEQ ID NO: 2103440 - DNA, 25 bp, Homo sapien
gctgagagtatcagcaagtgggcaa

SEQ ID NO: 2103441 - DNA, 25 bp, Homo sapien
tgtactcctgactgctgacaagtgg

SEQ ID NO: 2103442 - DNA, 25 bp, Homo sapien
ccaggaggtctaataggctgagagt

SEQ ID NO: 2103443 - DNA, 25 bp, Homo sapien
tagccccagtgaaagcaaggtagtc

SEQ ID NO: 2103444 - DNA, 25 bp, Homo sapien
ttgacaatcttgctccagactagcc

SEQ ID NO: 2103445 - DNA, 25 bp, Homo sapien
gtgccaccttgacaatcttgctcca

SEQ ID NO: 2103446 - DNA, 25 bp, Homo sapien
ccagactagccccagtgaaagcaag

SEQ ID NO: 2103447 - DNA, 25 bp, Homo sapien
tcagtgcaaatagctcctggacgga

SEQ ID NO: 2103448 - DNA, 25 bp, Homo sapien
gctcctggacggaggtgacaaatta

SEQ ID NO: 2103449 - DNA, 25 bp, Homo sapien
cagtgcaaatagctcctggacggag

SEQ ID NO: 2103450 - DNA, 25 bp, Homo sapien
tttcagtgcaaatagctcctggacg

SEQ ID NO: 2103451 - DNA, 25 bp, Homo sapien
taaataacaaaagggctgctttctg

SEQ ID NO: 2103452 - DNA, 25 bp, Homo sapien
ctatcctaaataacaaaagggctgc

SEQ ID NO: 2103453 - DNA, 25 bp, Homo sapien
ctaaataacaaaagggctgctttct

SEQ ID NO: 2103454 - DNA, 25 bp, Homo sapien
atcctaaataacaaaagggctgctt

SEQ ID NO: 2103455 - DNA, 25 bp, Homo sapien
gcagcacagtgcattaatgtcatca

SEQ ID NO: 2103456 - DNA, 25 bp, Homo sapien
ggcacatgcgatggagaagcagcac

SEQ ID NO: 2103457 - DNA, 25 bp, Homo sapien
tgtcatcagcaacgatcacagccat

SEQ ID NO: 2103458 - DNA, 25 bp, Homo sapien
atggcacatgcgatggagaagcagc

SEQ ID NO: 2103459 - DNA, 25 bp, Homo sapien
gaaaatcgcagcaataattccttgc

SEQ ID NO: 2103460 - DNA, 25 bp, Homo sapien
ttccaagaagcccaaagcactcccc

SEQ ID NO: 2103461 - DNA, 25 bp, Homo sapien
gcactccccatatattatcatattc

SEQ ID NO: 2103462 - DNA, 25 bp, Homo sapien
ttttccgaggtgatatattaatatg

SEQ ID NO: 2103463 - DNA, 25 bp, Homo sapien
tgccatcagccagtgtctgggtcac

SEQ ID NO: 2103464 - DNA, 25 bp, Homo sapien
ggtgccatcagccagtgtctgggtc

SEQ ID NO: 2103465 - DNA, 25 bp, Homo sapien
cagtgtctgggtcacctcacagatc

SEQ ID NO: 2103466 - DNA, 25 bp, Homo sapien
gtgtctgggtcacctcacagatcat

SEQ ID NO: 2103467 - DNA, 25 bp, Homo sapien
ttttggcgtcatagcgcatgaacat

SEQ ID NO: 2103468 - DNA, 25 bp, Homo sapien
gacttttgattaagagttgctgttg

SEQ ID NO: 2103469 - DNA, 25 bp, Homo sapien
cctgaccacagccttttggcgtcat

SEQ ID NO: 2103470 - DNA, 25 bp, Homo sapien
cagccttttggcgtcatagcgcatg

SEQ ID NO: 2103471 - DNA, 25 bp, Homo sapien
caccttgcaaagagtcaatctgtgc

SEQ ID NO: 2103472 - DNA, 25 bp, Homo sapien
aattctaggaggatgcagtaacagc

SEQ ID NO: 2103473 - DNA, 25 bp, Homo sapien
taacagcaggtgtctaagccactga

SEQ ID NO: 2103474 - DNA, 25 bp, Homo sapien
tctgtgcagaacctcacgcttttgg

SEQ ID NO: 2103475 - DNA, 25 bp, Homo sapien
agaggatcaagtaaaggaaagcaaa

SEQ ID NO: 2103476 - DNA, 25 bp, Homo sapien
ggagaggatcaagtaaaggaaagca

SEQ ID NO: 2103477 - DNA, 25 bp, Homo sapien
tggagaggatcaagtaaaggaaagc

SEQ ID NO: 2103478 - DNA, 25 bp, Homo sapien
cttggagaggatcaagtaaaggaaa

SEQ ID NO: 2103479 - DNA, 25 bp, Homo sapien
catctgttgtggtggagacatgaag

SEQ ID NO: 2103480 - DNA, 25 bp, Homo sapien
ggatgtagcatgttcccaccccata

SEQ ID NO: 2103481 - DNA, 25 bp, Homo sapien
tgataacactgatagatccccttcc

SEQ ID NO: 2103482 - DNA, 25 bp, Homo sapien
cgcccaggaattggaatgataacac

SEQ ID NO: 2103483 - DNA, 25 bp, Homo sapien
gcacttaatgcatagggagagcctg

SEQ ID NO: 2103484 - DNA, 25 bp, Homo sapien
tctatggcagccagggtatctctga

SEQ ID NO: 2103485 - DNA, 25 bp, Homo sapien
ggcagcaatagtgcctttggcagac

SEQ ID NO: 2103486 - DNA, 25 bp, Homo sapien
tttcggcaccccaatcagacattag

SEQ ID NO: 2103487 - DNA, 25 bp, Homo sapien
gaccctccaggatcgatgacaacag

SEQ ID NO: 2103488 - DNA, 25 bp, Homo sapien
tttgagtagtcataggaagacccct

SEQ ID NO: 2103489 - DNA, 25 bp, Homo sapien
aactccaaaggctctacgtaccagg

SEQ ID NO: 2103490 - DNA, 25 bp, Homo sapien
tgccatgaatatgtacaggtctctg

SEQ ID NO: 2103491 - DNA, 25 bp, Homo sapien
agggatgcctctggggcttctttca

SEQ ID NO: 2103492 - DNA, 25 bp, Homo sapien
tctttcactgcagttaatttccagg

SEQ ID NO: 2103493 - DNA, 25 bp, Homo sapien
atgcctctggggcttctttcactgc

SEQ ID NO: 2103494 - DNA, 25 bp, Homo sapien
gggcttctttcactgcagttaattt

SEQ ID NO: 2103495 - DNA, 25 bp, Homo sapien
actggatattccatcaccaatgcct

SEQ ID NO: 2103496 - DNA, 25 bp, Homo sapien
ggcacttgaatcagccagcagaatt

SEQ ID NO: 2103497 - DNA, 25 bp, Homo sapien
aggcacttgaatcagccagcagaat

SEQ ID NO: 2103498 - DNA, 25 bp, Homo sapien
tcagatccaccagcagataaaggcc

SEQ ID NO: 2103499 - DNA, 25 bp, Homo sapien
agattagctcgcaaagcctctgggt

SEQ ID NO: 2103500 - DNA, 25 bp, Homo sapien
aatatgtccttcaatccagtgagtc

SEQ ID NO: 2103501 - DNA, 25 bp, Homo sapien
tttgatgccgattagacctggtgcc

SEQ ID NO: 2103502 - DNA, 25 bp, Homo sapien
tgcaggataaagttctttaaggggc

SEQ ID NO: 2103503 - DNA, 25 bp, Homo sapien
aaaatgcaggataaagttctttaag

SEQ ID NO: 2103504 - DNA, 25 bp, Homo sapien
aaatgcaggataaagttctttaagg

SEQ ID NO: 2103505 - DNA, 25 bp, Homo sapien
aatgcaggataaagttctttaaggg

SEQ ID NO: 2103506 - DNA, 25 bp, Homo sapien
catttaatctatcactgtcactcca

SEQ ID NO: 2103507 - DNA, 25 bp, Homo sapien
ctgttgccccaggtcttgtgaacta

SEQ ID NO: 2103508 - DNA, 25 bp, Homo sapien
tgatgggaagacttaagtggcccca

SEQ ID NO: 2103509 - DNA, 25 bp, Homo sapien
gagaatctcatcgtagtggtaggtg

SEQ ID NO: 2103510 - DNA, 25 bp, Homo sapien
atcgtccactatctgaggggctgag

SEQ ID NO: 2103511 - DNA, 25 bp, Homo sapien
gccaggatcgtccactatctgaggg

SEQ ID NO: 2103512 - DNA, 25 bp, Homo sapien
ggatcgtccactatctgaggggctg

SEQ ID NO: 2103513 - DNA, 25 bp, Homo sapien
ctgccaggatcgtccactatctgag

SEQ ID NO: 2103514 - DNA, 25 bp, Homo sapien
tgacaatactgccagctactctctt

SEQ ID NO: 2103515 - DNA, 25 bp, Homo sapien
tgggctcttgttggttgacatgaca

SEQ ID NO: 2103516 - DNA, 25 bp, Homo sapien
tcagggaatagcattccttgcaggg

SEQ ID NO: 2103517 - DNA, 25 bp, Homo sapien
tagaggtgcacttcctggcaatggc

SEQ ID NO: 2103518 - DNA, 25 bp, Homo sapien
tttctagaagactcttgtctcccca

SEQ ID NO: 2103519 - DNA, 25 bp, Homo sapien
cagccattagttctgtggctacatc

SEQ ID NO: 2103520 - DNA, 25 bp, Homo sapien
tcacccatttttgaggctacggccc

SEQ ID NO: 2103521 - DNA, 25 bp, Homo sapien
catttttgaggctacggcccttctc

SEQ ID NO: 2103522 - DNA, 25 bp, Homo sapien
caagatctggttcttgcagatgcta

SEQ ID NO: 2103523 - DNA, 25 bp, Homo sapien
ttgcagatgctatttggagcagctc

SEQ ID NO: 2103524 - DNA, 25 bp, Homo sapien
ctgctcaagatctggttcttgcaga

SEQ ID NO: 2103525 - DNA, 25 bp, Homo sapien
caagccattaaacccttcctcctgg

SEQ ID NO: 2103526 - DNA, 25 bp, Homo sapien
tggcaaagacactcagtgacagtgg

SEQ ID NO: 2103527 - DNA, 25 bp, Homo sapien
acaattatagtctctgctttctggc

SEQ ID NO: 2103528 - DNA, 25 bp, Homo sapien
cagaggagacaattatagtctctgc

SEQ ID NO: 2103529 - DNA, 25 bp, Homo sapien
tgacagtgggttcctgtggccctga

SEQ ID NO: 2103530 - DNA, 25 bp, Homo sapien
ctggtctgagttggcaaaggctggc

SEQ ID NO: 2103531 - DNA, 25 bp, Homo sapien
tctgtgagctcacacgctccaggct

SEQ ID NO: 2103532 - DNA, 25 bp, Homo sapien
ttctgtgagctcacacgctccaggc

SEQ ID NO: 2103533 - DNA, 25 bp, Homo sapien
tgtgctagaatctttggcagttcct

SEQ ID NO: 2103534 - DNA, 25 bp, Homo sapien
aattatgtccgtgtttctcgcccca

SEQ ID NO: 2103535 - DNA, 25 bp, Homo sapien
gaccttgcaattgtctcttggactg

SEQ ID NO: 2103536 - DNA, 25 bp, Homo sapien
ggatctctcctttgtaacgtactga

SEQ ID NO: 2103537 - DNA, 25 bp, Homo sapien
ccttgatttggtagcggtgactgat

SEQ ID NO: 2103538 - DNA, 25 bp, Homo sapien
tgcaacttgcatagcatctccttga

SEQ ID NO: 2103539 - DNA, 25 bp, Homo sapien
tagcatctccttgatttggtagcgg

SEQ ID NO: 2103540 - DNA, 25 bp, Homo sapien
ccaatgggccacttgtctgcaactt

SEQ ID NO: 2103541 - DNA, 25 bp, Homo sapien
tagatgctcagtgtggctgttaaat

SEQ ID NO: 2103542 - DNA, 25 bp, Homo sapien
ctagatgctcagtgtggctgttaaa

SEQ ID NO: 2103543 - DNA, 25 bp, Homo sapien
atgctcagtgtggctgttaaataat

SEQ ID NO: 2103544 - DNA, 25 bp, Homo sapien
gatgctcagtgtggctgttaaataa

SEQ ID NO: 2103545 - DNA, 25 bp, Homo sapien
cagcataactggtagtgggagaagg

SEQ ID NO: 2103546 - DNA, 25 bp, Homo sapien
agggccaaagtttgaccaatgtcca

SEQ ID NO: 2103547 - DNA, 25 bp, Homo sapien
cataactggtagtgggagaaggtgt

SEQ ID NO: 2103548 - DNA, 25 bp, Homo sapien
ccaaagtttgaccaatgtccagcat

SEQ ID NO: 2103549 - DNA, 25 bp, Homo sapien
tagggtacacacagttgaagacagg

SEQ ID NO: 2103550 - DNA, 25 bp, Homo sapien
taggctggccctaaagataaggcta

SEQ ID NO: 2103551 - DNA, 25 bp, Homo sapien
caaagcactggaacggagtctgtcc

SEQ ID NO: 2103552 - DNA, 25 bp, Homo sapien
tgccacgtccagatcatgccatttg

SEQ ID NO: 2103553 - DNA, 25 bp, Homo sapien
tggaagtcgtaaattccacaggccc

SEQ ID NO: 2103554 - DNA, 25 bp, Homo sapien
gctgtgtatggaagtcgtaaattcc

SEQ ID NO: 2103555 - DNA, 25 bp, Homo sapien
tcgtaaattccacaggccctaatgg

SEQ ID NO: 2103556 - DNA, 25 bp, Homo sapien
gtaaattccacaggccctaatggga

SEQ ID NO: 2103557 - DNA, 25 bp, Homo sapien
aagtcaagcaggtatggtctttctc

SEQ ID NO: 2103558 - DNA, 25 bp, Homo sapien
caagtcaagcaggtatggtctttct

SEQ ID NO: 2103559 - DNA, 25 bp, Homo sapien
gtcaagcaggtatggtctttctcct

SEQ ID NO: 2103560 - DNA, 25 bp, Homo sapien
agtcaagcaggtatggtctttctcc

SEQ ID NO: 2103561 - DNA, 25 bp, Homo sapien
gacttgttgcgaggaatgataaaat

SEQ ID NO: 2103562 - DNA, 25 bp, Homo sapien
gatggacttgttgcgaggaatgata

SEQ ID NO: 2103563 - DNA, 25 bp, Homo sapien
tgtgaggatggacttgttgcgagga

SEQ ID NO: 2103564 - DNA, 25 bp, Homo sapien
tgaggatggacttgttgcgaggaat

SEQ ID NO: 2103565 - DNA, 25 bp, Homo sapien
cccggtagctggagagattctttga

SEQ ID NO: 2103566 - DNA, 25 bp, Homo sapien
gaacccggtagctggagagattctt

SEQ ID NO: 2103567 - DNA, 25 bp, Homo sapien
ggctggaacccggtagctggagaga

SEQ ID NO: 2103568 - DNA, 25 bp, Homo sapien
ctggaacccggtagctggagagatt

SEQ ID NO: 2103569 - DNA, 25 bp, Homo sapien
ggacagcccgtgtcatcagctgctg

SEQ ID NO: 2103570 - DNA, 25 bp, Homo sapien
agcgccatctagattggcaatcagg

SEQ ID NO: 2103571 - DNA, 25 bp, Homo sapien
gagagcccttgactcccacttctgt

SEQ ID NO: 2103572 - DNA, 25 bp, Homo sapien
gggatgggatgtttcaaagcgccat

SEQ ID NO: 2103573 - DNA, 25 bp, Homo sapien
ctaatcacagctgcctttgagggga

SEQ ID NO: 2103574 - DNA, 25 bp, Homo sapien
aatcacagctgcctttgaggggatc

SEQ ID NO: 2103575 - DNA, 25 bp, Homo sapien
tcacagctgcctttgaggggatcac

SEQ ID NO: 2103576 - DNA, 25 bp, Homo sapien
atcacagctgcctttgaggggatca

SEQ ID NO: 2103577 - DNA, 25 bp, Homo sapien
ctcatagtgcctgatgcgtgcagct

SEQ ID NO: 2103578 - DNA, 25 bp, Homo sapien
gatgggtgccctctcacagggctcc

SEQ ID NO: 2103579 - DNA, 25 bp, Homo sapien
tccaggccctggttggatgggtgcc

SEQ ID NO: 2103580 - DNA, 25 bp, Homo sapien
gcctgatgcgtgcagctgcatggct

SEQ ID NO: 2103581 - DNA, 25 bp, Homo sapien
ctctctgctcagactccagtgtgtc

SEQ ID NO: 2103582 - DNA, 25 bp, Homo sapien
agtgtgtcagagaagacaggaagac

SEQ ID NO: 2103583 - DNA, 25 bp, Homo sapien
caggaagaccaagaaacagccaagg

SEQ ID NO: 2103584 - DNA, 25 bp, Homo sapien
gactccagtgtgtcagagaagacag

SEQ ID NO: 2103585 - DNA, 25 bp, Homo sapien
caggtctaattccatggcttctcca

SEQ ID NO: 2103586 - DNA, 25 bp, Homo sapien
ctacctctcacggtggtccaaggtt

SEQ ID NO: 2103587 - DNA, 25 bp, Homo sapien
caagccctgctctgtagttctgaga

SEQ ID NO: 2103588 - DNA, 25 bp, Homo sapien
ggtggtccaaggttttcaatgccag

SEQ ID NO: 2103589 - DNA, 25 bp, Homo sapien
gccttttccataattggaagaacca

SEQ ID NO: 2103590 - DNA, 25 bp, Homo sapien
tttgtggtatgccaatcaggggacg

SEQ ID NO: 2103591 - DNA, 25 bp, Homo sapien
ttttccataattggaagaaccagtc

SEQ ID NO: 2103592 - DNA, 25 bp, Homo sapien
tggtatgccaatcaggggacgtttg

SEQ ID NO: 2103593 - DNA, 25 bp, Homo sapien
ttcactttggtcacccgattattct

SEQ ID NO: 2103594 - DNA, 25 bp, Homo sapien
ttagcacaccgtcaatccccaggag

SEQ ID NO: 2103595 - DNA, 25 bp, Homo sapien
cggtaccaggactattcttagcaca

SEQ ID NO: 2103596 - DNA, 25 bp, Homo sapien
tcttgaatgccggtaccaggactat

SEQ ID NO: 2103597 - DNA, 25 bp, Homo sapien
gcccatttggcaagcaggatcccac

SEQ ID NO: 2103598 - DNA, 25 bp, Homo sapien
agcccatttggcaagcaggatccca

SEQ ID NO: 2103599 - DNA, 25 bp, Homo sapien
ggaccaatttaccatggacagaagc

SEQ ID NO: 2103600 - DNA, 25 bp, Homo sapien
gaatcgatattctatgctggtgtta

SEQ ID NO: 2103601 - DNA, 25 bp, Homo sapien
gacatgctgaaatggtggaccaatt

SEQ ID NO: 2103602 - DNA, 25 bp, Homo sapien
ttttgagagaggacgcagctctccg

SEQ ID NO: 2103603 - DNA, 25 bp, Homo sapien
caatggccatcaggatccatggggt

SEQ ID NO: 2103604 - DNA, 25 bp, Homo sapien
ggccatcaggatccatggggttaat

SEQ ID NO: 2103605 - DNA, 25 bp, Homo sapien
atggccatcaggatccatggggtta

SEQ ID NO: 2103606 - DNA, 25 bp, Homo sapien
catcaggatccatggggttaatccg

SEQ ID NO: 2103607 - DNA, 25 bp, Homo sapien
gggctgctgctacacctgggtctgt

SEQ ID NO: 2103608 - DNA, 25 bp, Homo sapien
cacagtgatattagaaagctgggct

SEQ ID NO: 2103609 - DNA, 25 bp, Homo sapien
tggccagggatttgcacataaagac

SEQ ID NO: 2103610 - DNA, 25 bp, Homo sapien
cttcacacatttttgcgacagccag

SEQ ID NO: 2103611 - DNA, 25 bp, Homo sapien
gccccaggggactgcgtggcccaaa

SEQ ID NO: 2103612 - DNA, 25 bp, Homo sapien
ccaggggactgcgtggcccaaattg

SEQ ID NO: 2103613 - DNA, 25 bp, Homo sapien
ggactgcgtggcccaaattgtcctc

SEQ ID NO: 2103614 - DNA, 25 bp, Homo sapien
aggggactgcgtggcccaaattgtc

SEQ ID NO: 2103615 - DNA, 25 bp, Homo sapien
tcattccccgtgagtgtaacttcca

SEQ ID NO: 2103616 - DNA, 25 bp, Homo sapien
ggacctgttgcccataaaccacatt

SEQ ID NO: 2103617 - DNA, 25 bp, Homo sapien
ggtcataggtagaattgcttgggct

SEQ ID NO: 2103618 - DNA, 25 bp, Homo sapien
tgcttgggctttagatttgtggacc

SEQ ID NO: 2103619 - DNA, 25 bp, Homo sapien
tagattgcagggttgcggagaagcc

SEQ ID NO: 2103620 - DNA, 25 bp, Homo sapien
ctttgctttggtagattgcagggtt

SEQ ID NO: 2103621 - DNA, 25 bp, Homo sapien
ttgctttggtagattgcagggttgc

SEQ ID NO: 2103622 - DNA, 25 bp, Homo sapien
gcagggttgcggagaagcccatccc

SEQ ID NO: 2103623 - DNA, 25 bp, Homo sapien
gtaggtcctggcatctgtctatggc

SEQ ID NO: 2103624 - DNA, 25 bp, Homo sapien
taggtcctggcatctgtctatggcc

SEQ ID NO: 2103625 - DNA, 25 bp, Homo sapien
ggtcctggcatctgtctatggcctt

SEQ ID NO: 2103626 - DNA, 25 bp, Homo sapien
cctggcatctgtctatggccttctg

SEQ ID NO: 2103627 - DNA, 25 bp, Homo sapien
acagtgcaccgcagcagtgcccaga

SEQ ID NO: 2103628 - DNA, 25 bp, Homo sapien
tagcagcgggtttctgtaaacttct

SEQ ID NO: 2103629 - DNA, 25 bp, Homo sapien
gagtgttctctggtttgagtgagag

SEQ ID NO: 2103630 - DNA, 25 bp, Homo sapien
aagaaaggtattccctaagtagcag

SEQ ID NO: 2103631 - DNA, 25 bp, Homo sapien
gtgcccctctttcgtccccatgctt

SEQ ID NO: 2103632 - DNA, 25 bp, Homo sapien
tgcaagctcgctgttctggaaacag

SEQ ID NO: 2103633 - DNA, 25 bp, Homo sapien
ctgctgctgcaagctcgctgttctg

SEQ ID NO: 2103634 - DNA, 25 bp, Homo sapien
gggtgcccctctttcgtccccatgc

SEQ ID NO: 2103635 - DNA, 25 bp, Homo sapien
aaggcttgtaaagcccgcagaggga

SEQ ID NO: 2103636 - DNA, 25 bp, Homo sapien
tcgcacggcgttgacttggaaggct

SEQ ID NO: 2103637 - DNA, 25 bp, Homo sapien
tccatgctgtgactcgcacggcgtt

SEQ ID NO: 2103638 - DNA, 25 bp, Homo sapien
aggagctgggcgagggcctgtgccc

SEQ ID NO: 2103639 - DNA, 25 bp, Homo sapien
tggctccactttccggtccccctca

SEQ ID NO: 2103640 - DNA, 25 bp, Homo sapien
tgagaaaggtctggctccactttcc

SEQ ID NO: 2103641 - DNA, 25 bp, Homo sapien
ggagcatgagaaaggtctggctcca

SEQ ID NO: 2103642 - DNA, 25 bp, Homo sapien
cctcagtggatctggccagagtgac

SEQ ID NO: 2103643 - DNA, 25 bp, Homo sapien
ctggtgatttgtaggacaattcgac

SEQ ID NO: 2103644 - DNA, 25 bp, Homo sapien
cccgatcaaagaaacctggtgattt

SEQ ID NO: 2103645 - DNA, 25 bp, Homo sapien
catagccccgactggtcgtattctc

SEQ ID NO: 2103646 - DNA, 25 bp, Homo sapien
tccctgctggcacccgatcaaagaa

SEQ ID NO: 2103647 - DNA, 25 bp, Homo sapien
tcatctgtcagacctctggacatag

SEQ ID NO: 2103648 - DNA, 25 bp, Homo sapien
tgtctcatctgtcagacctctggac

SEQ ID NO: 2103649 - DNA, 25 bp, Homo sapien
gaagactgtctcatctgtcagacct

SEQ ID NO: 2103650 - DNA, 25 bp, Homo sapien
atctgtcagacctctggacatagcc

SEQ ID NO: 2103651 - DNA, 25 bp, Homo sapien
caggaacgtcatcactggccctgca

SEQ ID NO: 2103652 - DNA, 25 bp, Homo sapien
tccttgctggcttaagagctctgtc

SEQ ID NO: 2103653 - DNA, 25 bp, Homo sapien
agggaagtgggcattccctgccccg

SEQ ID NO: 2103654 - DNA, 25 bp, Homo sapien
ccggcactgagcaggaacgtcatca

SEQ ID NO: 2103655 - DNA, 25 bp, Homo sapien
ggtggagatggtggccctttgagaa

SEQ ID NO: 2103656 - DNA, 25 bp, Homo sapien
gggtggagatggtggccctttgaga

SEQ ID NO: 2103657 - DNA, 25 bp, Homo sapien
cttgggggtggagatggtggccctt

SEQ ID NO: 2103658 - DNA, 25 bp, Homo sapien
tgggggtggagatggtggccctttg

SEQ ID NO: 2103659 - DNA, 25 bp, Homo sapien
ctgctcccctagatctttagtggga

SEQ ID NO: 2103660 - DNA, 25 bp, Homo sapien
gatctttagtgggaatagtgccctt

SEQ ID NO: 2103661 - DNA, 25 bp, Homo sapien
tgttgactttttccaagagtgacac

SEQ ID NO: 2103662 - DNA, 25 bp, Homo sapien
cccttagatgtgagattgttgactt

SEQ ID NO: 2103663 - DNA, 25 bp, Homo sapien
ctttgcaaactttatcacgtttcct

SEQ ID NO: 2103664 - DNA, 25 bp, Homo sapien
tcaaaagcggaagtggcactttgca

SEQ ID NO: 2103665 - DNA, 25 bp, Homo sapien
actttatcacgtttcctctgaaaag

SEQ ID NO: 2103666 - DNA, 25 bp, Homo sapien
cctctgaaaagtcccgttgaattcg

SEQ ID NO: 2103667 - DNA, 25 bp, Homo sapien
ggagaaggtttatcgtgaattttga

SEQ ID NO: 2103668 - DNA, 25 bp, Homo sapien
agaaggtttatcgtgaattttgaag

SEQ ID NO: 2103669 - DNA, 25 bp, Homo sapien
ggtgaggagaaggtttatcgtgaat

SEQ ID NO: 2103670 - DNA, 25 bp, Homo sapien
tgaggagaaggtttatcgtgaattt

SEQ ID NO: 2103671 - DNA, 25 bp, Homo sapien
tcccagttggcggttgtccctctgg

SEQ ID NO: 2103672 - DNA, 25 bp, Homo sapien
cacctgtctcccagttggcggttgt

SEQ ID NO: 2103673 - DNA, 25 bp, Homo sapien
caccacctgtctcccagttggcggt

SEQ ID NO: 2103674 - DNA, 25 bp, Homo sapien
tgtctcccagttggcggttgtccct

SEQ ID NO: 2103675 - DNA, 25 bp, Homo sapien
tttccctgtgggaagactctttctg

SEQ ID NO: 2103676 - DNA, 25 bp, Homo sapien
ctttctcgttatagaacttggaagc

SEQ ID NO: 2103677 - DNA, 25 bp, Homo sapien
agcagggttgttagcaaataggaaa

SEQ ID NO: 2103678 - DNA, 25 bp, Homo sapien
ctgtgggaagactctttctgagcac

SEQ ID NO: 2103679 - DNA, 25 bp, Homo sapien
gaaggtccattccacttagactggc

SEQ ID NO: 2103680 - DNA, 25 bp, Homo sapien
gatgtcatgcctctgtcaggactca

SEQ ID NO: 2103681 - DNA, 25 bp, Homo sapien
cctttacacgctggctttagggatg

SEQ ID NO: 2103682 - DNA, 25 bp, Homo sapien
gatgcccgcattggcctggtggctt

SEQ ID NO: 2103683 - DNA, 25 bp, Homo sapien
ttggccctcgctccgggtctggcga

SEQ ID NO: 2103684 - DNA, 25 bp, Homo sapien
gaatccaatctagttgctgtgagcc

SEQ ID NO: 2103685 - DNA, 25 bp, Homo sapien
tctggcgaggcgctgctgtcgtatc

SEQ ID NO: 2103686 - DNA, 25 bp, Homo sapien
tcatctacaagatctgaatccaatc

SEQ ID NO: 2103687 - DNA, 25 bp, Homo sapien
gatgttaggaaagcagcccctgttg

SEQ ID NO: 2103688 - DNA, 25 bp, Homo sapien
gatcggatatgaccagcgtgggttc

SEQ ID NO: 2103689 - DNA, 25 bp, Homo sapien
tttctgatttgtgcggaggctctcc

SEQ ID NO: 2103690 - DNA, 25 bp, Homo sapien
gcaccgcccggagaataatagcatc

SEQ ID NO: 2103691 - DNA, 25 bp, Homo sapien
caggtccttatctgtgtcacgggca

SEQ ID NO: 2103692 - DNA, 25 bp, Homo sapien
gcccacccagaggtccattgtgttg

SEQ ID NO: 2103693 - DNA, 25 bp, Homo sapien
agcgacagaccagcaccgcagacat

SEQ ID NO: 2103694 - DNA, 25 bp, Homo sapien
attgtgttggctgctcggagcgaca

SEQ ID NO: 2103695 - DNA, 25 bp, Homo sapien
acacgcagcgatcctctttgtgagg

SEQ ID NO: 2103696 - DNA, 25 bp, Homo sapien
tcctctttgtgaggcgggaaagggc

SEQ ID NO: 2103697 - DNA, 25 bp, Homo sapien
agaggcggccttttgtgtcggggca

SEQ ID NO: 2103698 - DNA, 25 bp, Homo sapien
gaaaaagacacgcagcgatcctctt

SEQ ID NO: 2103699 - DNA, 25 bp, Homo sapien
gagctcagctgactcattgacttca

SEQ ID NO: 2103700 - DNA, 25 bp, Homo sapien
gctgactcattgacttcatttccca

SEQ ID NO: 2103701 - DNA, 25 bp, Homo sapien
tcagctgactcattgacttcatttc

SEQ ID NO: 2103702 - DNA, 25 bp, Homo sapien
aagagctcagctgactcattgactt

SEQ ID NO: 2103703 - DNA, 25 bp, Homo sapien
gtgcacaattatcaaacagaagttc

SEQ ID NO: 2103704 - DNA, 25 bp, Homo sapien
gcatgcacctggttgctgatgtagg

SEQ ID NO: 2103705 - DNA, 25 bp, Homo sapien
tcttcccacttgtccctattatggg

SEQ ID NO: 2103706 - DNA, 25 bp, Homo sapien
ttgctgatgtaggtcccactgccca

SEQ ID NO: 2103707 - DNA, 25 bp, Homo sapien
tgagccacggggtacatcagcaact

SEQ ID NO: 2103708 - DNA, 25 bp, Homo sapien
agggaggtgataatagatggctgtc

SEQ ID NO: 2103709 - DNA, 25 bp, Homo sapien
tggcctgggagacacgttgtggctg

SEQ ID NO: 2103710 - DNA, 25 bp, Homo sapien
ggatcttcagcaactccccaatctg

SEQ ID NO: 2103711 - DNA, 25 bp, Homo sapien
taatattccggtgtggaggtctccc

SEQ ID NO: 2103712 - DNA, 25 bp, Homo sapien
tctcggcaactcagtgcaggcttga

SEQ ID NO: 2103713 - DNA, 25 bp, Homo sapien
gggctccatgcagtcgacctaatat

SEQ ID NO: 2103714 - DNA, 25 bp, Homo sapien
gagagtgcttgtcgacagggttcac

SEQ ID NO: 2103715 - DNA, 25 bp, Homo sapien
atttgcatcgaagaggcactggtga

SEQ ID NO: 2103716 - DNA, 25 bp, Homo sapien
catttgcatcgaagaggcactggtg

SEQ ID NO: 2103717 - DNA, 25 bp, Homo sapien
tgtggttagagtgtataaatatgag

SEQ ID NO: 2103718 - DNA, 25 bp, Homo sapien
gctctgtgctgttgatggttaacag

SEQ ID NO: 2103719 - DNA, 25 bp, Homo sapien
gtgctgttgatggttaacagaacca

SEQ ID NO: 2103720 - DNA, 25 bp, Homo sapien
taaatgtagaatgtggttagagtgt

SEQ ID NO: 2103721 - DNA, 25 bp, Homo sapien
tcagcaaaccatatgctgccgccgc

SEQ ID NO: 2103722 - DNA, 25 bp, Homo sapien
tgcttattcacagagccgataaagc

SEQ ID NO: 2103723 - DNA, 25 bp, Homo sapien
aagcactctgcctccgctctcagca

SEQ ID NO: 2103724 - DNA, 25 bp, Homo sapien
ttttccccttcagcaagcctccaaa

SEQ ID NO: 2103725 - DNA, 25 bp, Homo sapien
tctgggggaaccaagatgatgtatt

SEQ ID NO: 2103726 - DNA, 25 bp, Homo sapien
gggaaccaagatgatgtattctgca

SEQ ID NO: 2103727 - DNA, 25 bp, Homo sapien
ttctgggaaggagtctgccacagtt

SEQ ID NO: 2103728 - DNA, 25 bp, Homo sapien
gtgtcattctgggaaggagtctgcc

SEQ ID NO: 2103729 - DNA, 25 bp, Homo sapien
aagagctgtgtgcttgtattcatct

SEQ ID NO: 2103730 - DNA, 25 bp, Homo sapien
tgtatgggcaggatatgatgttgta

SEQ ID NO: 2103731 - DNA, 25 bp, Homo sapien
tgggcaggatatgatgttgtagtca

SEQ ID NO: 2103732 - DNA, 25 bp, Homo sapien
gggtgtatgggcaggatatgatgtt

SEQ ID NO: 2103733 - DNA, 25 bp, Homo sapien
caggatatgatgttgtagtcagagg

SEQ ID NO: 2103734 - DNA, 25 bp, Homo sapien
gggacaccacgaggaggcttttgct

SEQ ID NO: 2103735 - DNA, 25 bp, Homo sapien
tggagttcattaggaggcagaatat

SEQ ID NO: 2103736 - DNA, 25 bp, Homo sapien
cacactgatcttagctggagttcat

SEQ ID NO: 2103737 - DNA, 25 bp, Homo sapien
tccaggtgggaggcaatagagttct

SEQ ID NO: 2103738 - DNA, 25 bp, Homo sapien
aactgccatgctctttgacttctgt

SEQ ID NO: 2103739 - DNA, 25 bp, Homo sapien
ctgccatgctctttgacttctgtgt

SEQ ID NO: 2103740 - DNA, 25 bp, Homo sapien
caaaggcacggggatgtaaaccagc

SEQ ID NO: 2103741 - DNA, 25 bp, Homo sapien
actgccatgctctttgacttctgtg

SEQ ID NO: 2103742 - DNA, 25 bp, Homo sapien
tagccacttgaggtgtgttaggaag

SEQ ID NO: 2103743 - DNA, 25 bp, Homo sapien
tgcctagccacttgaggtgtgttag

SEQ ID NO: 2103744 - DNA, 25 bp, Homo sapien
ccacttgaggtgtgttaggaaggct

SEQ ID NO: 2103745 - DNA, 25 bp, Homo sapien
ggctgcctagccacttgaggtgtgt

SEQ ID NO: 2103746 - DNA, 25 bp, Homo sapien
ccgatgtggcctgcggtgactggtt

SEQ ID NO: 2103747 - DNA, 25 bp, Homo sapien
atgtggcctgcggtgactggttgga

SEQ ID NO: 2103748 - DNA, 25 bp, Homo sapien
tgtggcctgcggtgactggttggag

SEQ ID NO: 2103749 - DNA, 25 bp, Homo sapien
gccccgatgtggcctgcggtgactg

SEQ ID NO: 2103750 - DNA, 25 bp, Homo sapien
ttttccaaaaaccatccctgctggc

SEQ ID NO: 2103751 - DNA, 25 bp, Homo sapien
tgggacctggaagtgcccttttcca

SEQ ID NO: 2103752 - DNA, 25 bp, Homo sapien
ctctgagtcagaggggtctcccagc

SEQ ID NO: 2103753 - DNA, 25 bp, Homo sapien
gtctcccagcatccgctgagctcag

SEQ ID NO: 2103754 - DNA, 25 bp, Homo sapien
caatgagaggcaaatgtaccagcac

SEQ ID NO: 2103755 - DNA, 25 bp, Homo sapien
caatgatagatatcccctattttgt

SEQ ID NO: 2103756 - DNA, 25 bp, Homo sapien
gcgcgcatctagaccattccaaaaa

SEQ ID NO: 2103757 - DNA, 25 bp, Homo sapien
ttgttagagtggcagcaattaaact

SEQ ID NO: 2103758 - DNA, 25 bp, Homo sapien
cttgaccggcacctcccatcctccg

SEQ ID NO: 2103759 - DNA, 25 bp, Homo sapien
atcctccggggtcctccagcacacc

SEQ ID NO: 2103760 - DNA, 25 bp, Homo sapien
gtcctccagcacaccttctggaatg

SEQ ID NO: 2103761 - DNA, 25 bp, Homo sapien
tgaccggcacctcccatcctccggg

SEQ ID NO: 2103762 - DNA, 25 bp, Homo sapien
accaaagttgaattgagtgtccctg

SEQ ID NO: 2103763 - DNA, 25 bp, Homo sapien
caaagttgaattgagtgtccctgaa

SEQ ID NO: 2103764 - DNA, 25 bp, Homo sapien
gtgtccctgaaaaatatagcgtagc

SEQ ID NO: 2103765 - DNA, 25 bp, Homo sapien
aatatagcgtagcatcctttccctg

SEQ ID NO: 2103766 - DNA, 25 bp, Homo sapien
ttttctgggcccgacatctctcagc

SEQ ID NO: 2103767 - DNA, 25 bp, Homo sapien
ggttcccatcccgaaatgctgattg

SEQ ID NO: 2103768 - DNA, 25 bp, Homo sapien
tcagctgccaatcctctgtgacaag

SEQ ID NO: 2103769 - DNA, 25 bp, Homo sapien
ccccaagggctgttagggtgatttg

SEQ ID NO: 2103770 - DNA, 25 bp, Homo sapien
tgggactcccaggttcctggggctc

SEQ ID NO: 2103771 - DNA, 25 bp, Homo sapien
ctgtggtttctgggactcccaggtt

SEQ ID NO: 2103772 - DNA, 25 bp, Homo sapien
tgtggtttctgggactcccaggttc

SEQ ID NO: 2103773 - DNA, 25 bp, Homo sapien
tcccaggttcctggggctcagcctg

SEQ ID NO: 2103774 - DNA, 25 bp, Homo sapien
tgtttgcccagggtccctttctgtc

SEQ ID NO: 2103775 - DNA, 25 bp, Homo sapien
caagcctctccaccagcctcactgt

SEQ ID NO: 2103776 - DNA, 25 bp, Homo sapien
accagcctcactgtttgcccagggt

SEQ ID NO: 2103777 - DNA, 25 bp, Homo sapien
cactgtttgcccagggtccctttct

SEQ ID NO: 2103778 - DNA, 25 bp, Homo sapien
acatgggtcatccatcatggcaatg

SEQ ID NO: 2103779 - DNA, 25 bp, Homo sapien
ccatccagggcagtagcaggtggct

SEQ ID NO: 2103780 - DNA, 25 bp, Homo sapien
ggcagtagcaggtggcttgtcattt

SEQ ID NO: 2103781 - DNA, 25 bp, Homo sapien
tcaggacatgggtcatccatcatgg

SEQ ID NO: 2103782 - DNA, 25 bp, Homo sapien
cgggcagtcatctagggcatccagg

SEQ ID NO: 2103783 - DNA, 25 bp, Homo sapien
accatccccgggcagtcatctaggg

SEQ ID NO: 2103784 - DNA, 25 bp, Homo sapien
tcggaggcccgaccatccccgggca

SEQ ID NO: 2103785 - DNA, 25 bp, Homo sapien
tccccgggcagtcatctagggcatc

SEQ ID NO: 2103786 - DNA, 25 bp, Homo sapien
agccagctctggatccaagttcaca

SEQ ID NO: 2103787 - DNA, 25 bp, Homo sapien
gccagctctggatccaagttcacat

SEQ ID NO: 2103788 - DNA, 25 bp, Homo sapien
ttgagcagaagggccatcttcagaa

SEQ ID NO: 2103789 - DNA, 25 bp, Homo sapien
gagcagaagggccatcttcagaaag

SEQ ID NO: 2103790 - DNA, 25 bp, Homo sapien
gcagaagggccatcttcagaaaggg

SEQ ID NO: 2103791 - DNA, 25 bp, Homo sapien
cagaagggccatcttcagaaagggg

SEQ ID NO: 2103792 - DNA, 25 bp, Homo sapien
cttaggcactaagtgcttttgtggc

SEQ ID NO: 2103793 - DNA, 25 bp, Homo sapien
ttaggcactaagtgcttttgtggct

SEQ ID NO: 2103794 - DNA, 25 bp, Homo sapien
tttgtggctgtcctttgctggtcat

SEQ ID NO: 2103795 - DNA, 25 bp, Homo sapien
gcttttgtggctgtcctttgctggt

SEQ ID NO: 2103796 - DNA, 25 bp, Homo sapien
ccaggaaggcagacagcggctggct

SEQ ID NO: 2103797 - DNA, 25 bp, Homo sapien
cctttcacgtgcagcaccagcgagc

SEQ ID NO: 2103798 - DNA, 25 bp, Homo sapien
tcttcatggggcctttcacgtgcag

SEQ ID NO: 2103799 - DNA, 25 bp, Homo sapien
caggaaggcagacagcggctggctg

SEQ ID NO: 2103800 - DNA, 25 bp, Homo sapien
agtctaaatcgcacccggcttgggc

SEQ ID NO: 2103801 - DNA, 25 bp, Homo sapien
gccaggagctcccttgcagattcca

SEQ ID NO: 2103802 - DNA, 25 bp, Homo sapien
aaacttttaccactgagcgccggca

SEQ ID NO: 2103803 - DNA, 25 bp, Homo sapien
tttcaccacacggaattagcatttg

SEQ ID NO: 2103804 - DNA, 25 bp, Homo sapien
tagggtcaaccagatctagagcctg

SEQ ID NO: 2103805 - DNA, 25 bp, Homo sapien
cattactagggtcaaccagatctag

SEQ ID NO: 2103806 - DNA, 25 bp, Homo sapien
tcagcattactagggtcaaccagat

SEQ ID NO: 2103807 - DNA, 25 bp, Homo sapien
actgagctcagcattactagggtca

SEQ ID NO: 2103808 - DNA, 25 bp, Homo sapien
ctttgactgtctgaggcattcggga

SEQ ID NO: 2103809 - DNA, 25 bp, Homo sapien
ccgggccatttggatcaggaacaag

SEQ ID NO: 2103810 - DNA, 25 bp, Homo sapien
aaagggctgcgccttgtccagatgt

SEQ ID NO: 2103811 - DNA, 25 bp, Homo sapien
tcgggacggcctcgtgcttggccaa

SEQ ID NO: 2103812 - DNA, 25 bp, Homo sapien
agaaatcctgaagttacagttgctc

SEQ ID NO: 2103813 - DNA, 25 bp, Homo sapien
ctgtgagcatgcttgacgtgatttg

SEQ ID NO: 2103814 - DNA, 25 bp, Homo sapien
agctgtgtgcccagacttggctact

SEQ ID NO: 2103815 - DNA, 25 bp, Homo sapien
tgtgtgcccagacttggctactggc

SEQ ID NO: 2103816 - DNA, 25 bp, Homo sapien
tgagcatgcttgacgtgatttggtg

SEQ ID NO: 2103817 - DNA, 25 bp, Homo sapien
ctgaagagggttgccccagagatgc

SEQ ID NO: 2103818 - DNA, 25 bp, Homo sapien
tgggcagtctgagactatccctgtt

SEQ ID NO: 2103819 - DNA, 25 bp, Homo sapien
tgcagctctttcacattggaggatt

SEQ ID NO: 2103820 - DNA, 25 bp, Homo sapien
gaggattggtaaccggccctgaaga

SEQ ID NO: 2103821 - DNA, 25 bp, Homo sapien
agcagctttgccataatgcttactc

SEQ ID NO: 2103822 - DNA, 25 bp, Homo sapien
cagctttgccataatgcttactctg

SEQ ID NO: 2103823 - DNA, 25 bp, Homo sapien
gcagctttgccataatgcttactct

SEQ ID NO: 2103824 - DNA, 25 bp, Homo sapien
gctttgccataatgcttactctgtg

SEQ ID NO: 2103825 - DNA, 25 bp, Homo sapien
tcactgaaggaagcaattggcagag

SEQ ID NO: 2103826 - DNA, 25 bp, Homo sapien
tctgccacgagagcccgggagacag

SEQ ID NO: 2103827 - DNA, 25 bp, Homo sapien
tagagcagtgcgtttatgagagacc

SEQ ID NO: 2103828 - DNA, 25 bp, Homo sapien
ccgggagacagtcattgggttatgt

SEQ ID NO: 2103829 - DNA, 25 bp, Homo sapien
tgattttggcattcaggcacgcagt

SEQ ID NO: 2103830 - DNA, 25 bp, Homo sapien
ttttggcattcaggcacgcagtggg

SEQ ID NO: 2103831 - DNA, 25 bp, Homo sapien
tggcattcaggcacgcagtgggtct

SEQ ID NO: 2103832 - DNA, 25 bp, Homo sapien
ttcaggcacgcagtgggtctgtgct

SEQ ID NO: 2103833 - DNA, 25 bp, Homo sapien
ctgcgagggtgatgttagtatgcca

SEQ ID NO: 2103834 - DNA, 25 bp, Homo sapien
gcccgatccccggatatatttgcct

SEQ ID NO: 2103835 - DNA, 25 bp, Homo sapien
tatttgccttgtggagcccattcag

SEQ ID NO: 2103836 - DNA, 25 bp, Homo sapien
tgatgttagtatgccagcacttcct

SEQ ID NO: 2103837 - DNA, 25 bp, Homo sapien
ttcccacatgcctagactgcaaaag

SEQ ID NO: 2103838 - DNA, 25 bp, Homo sapien
agctggggaacatgaagctggcccc

SEQ ID NO: 2103839 - DNA, 25 bp, Homo sapien
gaccctcgactcatcactgctgaag

SEQ ID NO: 2103840 - DNA, 25 bp, Homo sapien
ccagggtttggtcatggccagcttt

SEQ ID NO: 2103841 - DNA, 25 bp, Homo sapien
ccgcgcgttctgtccctggcatttc

SEQ ID NO: 2103842 - DNA, 25 bp, Homo sapien
aagggatgcccctcagggcgccggt

SEQ ID NO: 2103843 - DNA, 25 bp, Homo sapien
tgctggagcaggtttcgcagctgcc

SEQ ID NO: 2103844 - DNA, 25 bp, Homo sapien
ttggcacggccgcagggtaattgga

SEQ ID NO: 2103845 - DNA, 25 bp, Homo sapien
cccaggagatgactgcacagcaaat

SEQ ID NO: 2103846 - DNA, 25 bp, Homo sapien
tgtgccctgcgatgaaggactggcc

SEQ ID NO: 2103847 - DNA, 25 bp, Homo sapien
gcaggtactcttctcagccacatta

SEQ ID NO: 2103848 - DNA, 25 bp, Homo sapien
taagtggctcgacatttgcaggtac

SEQ ID NO: 2103849 - DNA, 25 bp, Homo sapien
gaaagagtgagagacataggcagac

SEQ ID NO: 2103850 - DNA, 25 bp, Homo sapien
caactgtctttactgggagcgaggg

SEQ ID NO: 2103851 - DNA, 25 bp, Homo sapien
tgttatgggcaaagagacactctcc

SEQ ID NO: 2103852 - DNA, 25 bp, Homo sapien
ggtagaatatcagcctggactggcc

SEQ ID NO: 2103853 - DNA, 25 bp, Homo sapien
acttctgatttttgtggtcctgctg

SEQ ID NO: 2103854 - DNA, 25 bp, Homo sapien
gggaggctgaatggtacagcccaga

SEQ ID NO: 2103855 - DNA, 25 bp, Homo sapien
gaggctgaatggtacagcccagacc

SEQ ID NO: 2103856 - DNA, 25 bp, Homo sapien
agacttctgatttttgtggtcctgc

SEQ ID NO: 2103857 - DNA, 25 bp, Homo sapien
gggagagaattatgacaacacttaa

SEQ ID NO: 2103858 - DNA, 25 bp, Homo sapien
ggccattagaagcatgcagctccca

SEQ ID NO: 2103859 - DNA, 25 bp, Homo sapien
gacaacacttaaccgctgtgaccca

SEQ ID NO: 2103860 - DNA, 25 bp, Homo sapien
gagggagatggagttcattgctcca

SEQ ID NO: 2103861 - DNA, 25 bp, Homo sapien
tccagttgatcacggtcctccttgc

SEQ ID NO: 2103862 - DNA, 25 bp, Homo sapien
catttctccagttgatcacggtcct

SEQ ID NO: 2103863 - DNA, 25 bp, Homo sapien
tttctccagttgatcacggtcctcc

SEQ ID NO: 2103864 - DNA, 25 bp, Homo sapien
agttgatcacggtcctccttgccca

SEQ ID NO: 2103865 - DNA, 25 bp, Homo sapien
cagcatgaaaatgcacggcctctga

SEQ ID NO: 2103866 - DNA, 25 bp, Homo sapien
catgaaaatgcacggcctctgagaa

SEQ ID NO: 2103867 - DNA, 25 bp, Homo sapien
gaaaatgcacggcctctgagaaatg

SEQ ID NO: 2103868 - DNA, 25 bp, Homo sapien
gcatgaaaatgcacggcctctgaga

SEQ ID NO: 2103869 - DNA, 25 bp, Homo sapien
taacattgcaaaatgagggttgtgg

SEQ ID NO: 2103870 - DNA, 25 bp, Homo sapien
cactgcgctcaacgcccacagttaa

SEQ ID NO: 2103871 - DNA, 25 bp, Homo sapien
agggttgtggatgcattctcccttc

SEQ ID NO: 2103872 - DNA, 25 bp, Homo sapien
tcaacgcccacagttaataacattg

SEQ ID NO: 2103873 - DNA, 25 bp, Homo sapien
gatcgcttttcagtgtggctgcaaa

SEQ ID NO: 2103874 - DNA, 25 bp, Homo sapien
cactggctgggtccgttgttagcag

SEQ ID NO: 2103875 - DNA, 25 bp, Homo sapien
cccggagctgagtgctggccgcatt

SEQ ID NO: 2103876 - DNA, 25 bp, Homo sapien
tttcacatttgatcgcttttcagtg

SEQ ID NO: 2103877 - DNA, 25 bp, Homo sapien
acaagactggtcctacatccgtagc

SEQ ID NO: 2103878 - DNA, 25 bp, Homo sapien
tggccgtgccatttcaagtcaagaa

SEQ ID NO: 2103879 - DNA, 25 bp, Homo sapien
cagtctgggcaaaacgcatgagcac

SEQ ID NO: 2103880 - DNA, 25 bp, Homo sapien
tgaaaacatctaaggcttgccccag

SEQ ID NO: 2103881 - DNA, 25 bp, Homo sapien
cttagttccttgggtttggcgatgg

SEQ ID NO: 2103882 - DNA, 25 bp, Homo sapien
cctgggtcaccgtccagatggcgga

SEQ ID NO: 2103883 - DNA, 25 bp, Homo sapien
tttggcgatggtgcccctgtgtggg

SEQ ID NO: 2103884 - DNA, 25 bp, Homo sapien
aaagtaggtgtgtcgaggccccgtg

SEQ ID NO: 2103885 - DNA, 25 bp, Homo sapien
tctttgagccccctgaccggctgtg

SEQ ID NO: 2103886 - DNA, 25 bp, Homo sapien
tcctcaggtggttcttggcaggcct

SEQ ID NO: 2103887 - DNA, 25 bp, Homo sapien
caggcctggcgcctctttgagcccc

SEQ ID NO: 2103888 - DNA, 25 bp, Homo sapien
ttttgctgcctgggagtgggccagc

SEQ ID NO: 2103889 - DNA, 25 bp, Homo sapien
gaacagcatctcgatgagtaatctg

SEQ ID NO: 2103890 - DNA, 25 bp, Homo sapien
ggtgctgaacagcatctcgatgagt

SEQ ID NO: 2103891 - DNA, 25 bp, Homo sapien
tttcagaggtgttgtatgtgaagag

SEQ ID NO: 2103892 - DNA, 25 bp, Homo sapien
cccaggggaggtgctgaacagcatc

SEQ ID NO: 2103893 - DNA, 25 bp, Homo sapien
agtccagcaggccagtccttagagc

SEQ ID NO: 2103894 - DNA, 25 bp, Homo sapien
caaacagaaggcggaagagggaaca

SEQ ID NO: 2103895 - DNA, 25 bp, Homo sapien
gcaggccagtccttagagcagaacc

SEQ ID NO: 2103896 - DNA, 25 bp, Homo sapien
cagaaccagtaaccaacccgtctgt

SEQ ID NO: 2103897 - DNA, 25 bp, Homo sapien
tgcgctcaagccaaaaccctgggtt

SEQ ID NO: 2103898 - DNA, 25 bp, Homo sapien
ggttctgtatataagcaatcattcc

SEQ ID NO: 2103899 - DNA, 25 bp, Homo sapien
gattgggttttaacacagtcaagac

SEQ ID NO: 2103900 - DNA, 25 bp, Homo sapien
ggattcagaattaaccccatgcgct

SEQ ID NO: 2103901 - DNA, 25 bp, Homo sapien
ttatcactcgctcaatatacgacga

SEQ ID NO: 2103902 - DNA, 25 bp, Homo sapien
tatacgacgattcgccatttctctg

SEQ ID NO: 2103903 - DNA, 25 bp, Homo sapien
tggccaccgctctgagactcatgca

SEQ ID NO: 2103904 - DNA, 25 bp, Homo sapien
ttcaacttgtaatttccacctcctg

SEQ ID NO: 2103905 - DNA, 25 bp, Homo sapien
cccatgcattgtgggctcaccagaa

SEQ ID NO: 2103906 - DNA, 25 bp, Homo sapien
tgaagacagcagagtattaaaccca

SEQ ID NO: 2103907 - DNA, 25 bp, Homo sapien
gcgcatgctccgttgttccatcaga

SEQ ID NO: 2103908 - DNA, 25 bp, Homo sapien
cacttacaaagcacgggctcaaaca

SEQ ID NO: 2103909 - DNA, 25 bp, Homo sapien
tgctgaacaagtcatcttgaagctt

SEQ ID NO: 2103910 - DNA, 25 bp, Homo sapien
gggagggacactgttctagttatct

SEQ ID NO: 2103911 - DNA, 25 bp, Homo sapien
ttctagttatctcttactgctgaac

SEQ ID NO: 2103912 - DNA, 25 bp, Homo sapien
tcatgattctgttggtcaacagagc

SEQ ID NO: 2103913 - DNA, 25 bp, Homo sapien
gctacttagcattatgatttcctgg

SEQ ID NO: 2103914 - DNA, 25 bp, Homo sapien
tttgctacttagcattatgatttcc

SEQ ID NO: 2103915 - DNA, 25 bp, Homo sapien
tagcattatgatttcctggaagaaa

SEQ ID NO: 2103916 - DNA, 25 bp, Homo sapien
tagtatttgctacttagcattatga

SEQ ID NO: 2103917 - DNA, 25 bp, Homo sapien
ggagccccaccttgtcatataccat

SEQ ID NO: 2103918 - DNA, 25 bp, Homo sapien
gtttccatgtagaccccttgaagag

SEQ ID NO: 2103919 - DNA, 25 bp, Homo sapien
aagagagagaccctcactgctgggg

SEQ ID NO: 2103920 - DNA, 25 bp, Homo sapien
agccccagtaagagcacaagaggaa

SEQ ID NO: 2103921 - DNA, 25 bp, Homo sapien
caacagatttggtcgtactgggcgc

SEQ ID NO: 2103922 - DNA, 25 bp, Homo sapien
atgctggcgctgagtacgtcatgga

SEQ ID NO: 2103923 - DNA, 25 bp, Homo sapien
ccaatatgactccacccatagcaaa

SEQ ID NO: 2103924 - DNA, 25 bp, Homo sapien
cgatgctggcgctgagtacgtcatg

SEQ ID NO: 2103925 - DNA, 25 bp, Homo sapien
actgtgcatggccgggacaaactta

SEQ ID NO: 2103926 - DNA, 25 bp, Homo sapien
cactgtgcatggccgggacaaactt

SEQ ID NO: 2103927 - DNA, 25 bp, Homo sapien
gtgcatggccgggacaaacttatac

SEQ ID NO: 2103928 - DNA, 25 bp, Homo sapien
tgtgcatggccgggacaaacttata

SEQ ID NO: 2103929 - DNA, 25 bp, Homo sapien
aaagttgttttcccggctggctgct

SEQ ID NO: 2103930 - DNA, 25 bp, Homo sapien
ggactttaccgcctgcagtggtctg

SEQ ID NO: 2103931 - DNA, 25 bp, Homo sapien
agggcattcttacttcagagagtcc

SEQ ID NO: 2103932 - DNA, 25 bp, Homo sapien
ggtgtctacactggccaacgccagc

SEQ ID NO: 2103933 - DNA, 25 bp, Homo sapien
gcacttgccgctgattttgttacat

SEQ ID NO: 2103934 - DNA, 25 bp, Homo sapien
aaaagacttacctttagcctcagca

SEQ ID NO: 2103935 - DNA, 25 bp, Homo sapien
ggtaagtctcacaatcccaagggct

SEQ ID NO: 2103936 - DNA, 25 bp, Homo sapien
tgctactgagcttcaatagcactgc

SEQ ID NO: 2103937 - DNA, 25 bp, Homo sapien
gaaccccaaggatcttccgatgagt

SEQ ID NO: 2103938 - DNA, 25 bp, Homo sapien
cctcaaccaatgactgatgggagct

SEQ ID NO: 2103939 - DNA, 25 bp, Homo sapien
gtcccctttcagtcacatgtgcagt

SEQ ID NO: 2103940 - DNA, 25 bp, Homo sapien
cagctccctcactccatggatggaa

SEQ ID NO: 2103941 - DNA, 25 bp, Homo sapien
caaagctttcggaaaccagaggcca

SEQ ID NO: 2103942 - DNA, 25 bp, Homo sapien
caccaggcgccatttgttattgctc

SEQ ID NO: 2103943 - DNA, 25 bp, Homo sapien
ttttttaagccaccagcaggcgagc

SEQ ID NO: 2103944 - DNA, 25 bp, Homo sapien
gaaggaacaatcaggccatgcaggc

SEQ ID NO: 2103945 - DNA, 25 bp, Homo sapien
aacagtcgagccgtgtgggagccca

SEQ ID NO: 2103946 - DNA, 25 bp, Homo sapien
agcccagctggcacgggaatccttg

SEQ ID NO: 2103947 - DNA, 25 bp, Homo sapien
tcgtctcccagggagcgtgcggcag

SEQ ID NO: 2103948 - DNA, 25 bp, Homo sapien
ttggtctggccatctggtgcaggaa

SEQ ID NO: 2103949 - DNA, 25 bp, Homo sapien
acggccactctgagcaccaatgtga

SEQ ID NO: 2103950 - DNA, 25 bp, Homo sapien
gaggcaaatgccagccctgcaaatc

SEQ ID NO: 2103951 - DNA, 25 bp, Homo sapien
ctgggaagtcagtcccacggccaga

SEQ ID NO: 2103952 - DNA, 25 bp, Homo sapien
tctgagcaccaatgtgagaggcaaa

SEQ ID NO: 2103953 - DNA, 25 bp, Homo sapien
ttaggagacgcctccgaagagcctc

SEQ ID NO: 2103954 - DNA, 25 bp, Homo sapien
gagctgcctagaacagcaatgtgtt

SEQ ID NO: 2103955 - DNA, 25 bp, Homo sapien
gggtaaactgtgtgcgggcctagcc

SEQ ID NO: 2103956 - DNA, 25 bp, Homo sapien
tggcaagaaacgcagactctcggca

SEQ ID NO: 2103957 - DNA, 25 bp, Homo sapien
gcgggcgcgccggcggaatgctaag

SEQ ID NO: 2103958 - DNA, 25 bp, Homo sapien
cgcgggggcgcacgcggcgatggcg

SEQ ID NO: 2103959 - DNA, 25 bp, Homo sapien
gggcgcgccggcggaatgctaaggg

SEQ ID NO: 2103960 - DNA, 25 bp, Homo sapien
gcacgcggcgatggcgggcgcgccg

SEQ ID NO: 2103961 - DNA, 25 bp, Homo sapien
taagcagtcctcaggtattccaacc

SEQ ID NO: 2103962 - DNA, 25 bp, Homo sapien
cttttgagctgagaccacaaatcac

SEQ ID NO: 2103963 - DNA, 25 bp, Homo sapien
accacaaatcactttgcaagcagag

SEQ ID NO: 2103964 - DNA, 25 bp, Homo sapien
aaccccctggctgcaaacattagtt

SEQ ID NO: 2103965 - DNA, 25 bp, Homo sapien
gctgtggtagtgaacaggaatgttc

SEQ ID NO: 2103966 - DNA, 25 bp, Homo sapien
ctctgaggcaggttagtgtggtggc

SEQ ID NO: 2103967 - DNA, 25 bp, Homo sapien
aacaggaatgttccagagtctttgc

SEQ ID NO: 2103968 - DNA, 25 bp, Homo sapien
ggcagctgtggtagtgaacaggaat

SEQ ID NO: 2103969 - DNA, 25 bp, Homo sapien
catcggtgagaattgcacaggcaga

SEQ ID NO: 2103970 - DNA, 25 bp, Homo sapien
cgcccgcgcctattgacatcggtga

SEQ ID NO: 2103971 - DNA, 25 bp, Homo sapien
tggaagccagcggagctgaaccaac

SEQ ID NO: 2103972 - DNA, 25 bp, Homo sapien
gttcaaaccgcattgagaatcctgg

SEQ ID NO: 2103973 - DNA, 25 bp, Homo sapien
aggctctcctggcagaaattgctcc

SEQ ID NO: 2103974 - DNA, 25 bp, Homo sapien
gcaggctctcctggcagaaattgct

SEQ ID NO: 2103975 - DNA, 25 bp, Homo sapien
tctgcaggctctcctggcagaaatt

SEQ ID NO: 2103976 - DNA, 25 bp, Homo sapien
gctctcctggcagaaattgctccat

SEQ ID NO: 2103977 - DNA, 25 bp, Homo sapien
gattgaaactcctgggtacttctgg

SEQ ID NO: 2103978 - DNA, 25 bp, Homo sapien
tgcatgctcccttgcaccagctagg

SEQ ID NO: 2103979 - DNA, 25 bp, Homo sapien
cgtgagtgtggggattgaaactcct

SEQ ID NO: 2103980 - DNA, 25 bp, Homo sapien
ccagctaggagctaccgtgagtgtg

SEQ ID NO: 2103981 - DNA, 25 bp, Homo sapien
gctggccccagattgcccctggaag

SEQ ID NO: 2103982 - DNA, 25 bp, Homo sapien
tggctggccccagattgcccctgga

SEQ ID NO: 2103983 - DNA, 25 bp, Homo sapien
ggctggccccagattgcccctggaa

SEQ ID NO: 2103984 - DNA, 25 bp, Homo sapien
ctggctggccccagattgcccctgg

SEQ ID NO: 2103985 - DNA, 25 bp, Homo sapien
gcatggcccacgtccggccctgttg

SEQ ID NO: 2103986 - DNA, 25 bp, Homo sapien
tgcttgcttccagttcacgcggcat

SEQ ID NO: 2103987 - DNA, 25 bp, Homo sapien
tctgtgccggggaattgctgaccca

SEQ ID NO: 2103988 - DNA, 25 bp, Homo sapien
cagttcacgcggcattctgtgccgg

SEQ ID NO: 2103989 - DNA, 25 bp, Homo sapien
ttctgtttcggctgtctaaatggca

SEQ ID NO: 2103990 - DNA, 25 bp, Homo sapien
tacaagcgcgtcctcagtgtgtatg

SEQ ID NO: 2103991 - DNA, 25 bp, Homo sapien
gtctggaagttctgtttcggctgtc

SEQ ID NO: 2103992 - DNA, 25 bp, Homo sapien
tcggctgtctaaatggcagcaatac

SEQ ID NO: 2103993 - DNA, 25 bp, Homo sapien
ctggaccttctgtgatcggtacatg

SEQ ID NO: 2103994 - DNA, 25 bp, Homo sapien
ctgctttaggtctggcagaggccac

SEQ ID NO: 2103995 - DNA, 25 bp, Homo sapien
gctgcttttggtaggctcactccgt

SEQ ID NO: 2103996 - DNA, 25 bp, Homo sapien
gatggtcggctgcttttggtaggct

SEQ ID NO: 2103997 - DNA, 25 bp, Homo sapien
ttgaaagatggtcggctgcttttgg

SEQ ID NO: 2103998 - DNA, 25 bp, Homo sapien
tcggctgcttttggtaggctcactc

SEQ ID NO: 2103999 - DNA, 25 bp, Homo sapien
ggtgccctcaatcgcctcttcaggt

SEQ ID NO: 2104000 - DNA, 25 bp, Homo sapien
caggtgtagtggagatagtctcggc

SEQ ID NO: 2104001 - DNA, 25 bp, Homo sapien
gtaggtgccctcaatcgcctcttca

SEQ ID NO: 2104002 - DNA, 25 bp, Homo sapien
gtgtagtggagatagtctcggcaga

SEQ ID NO: 2104003 - DNA, 25 bp, Homo sapien
ctgtgatgatgtcgctgatctggat

SEQ ID NO: 2104004 - DNA, 25 bp, Homo sapien
ttgaagcgtaccatcttgctcaggg

SEQ ID NO: 2104005 - DNA, 25 bp, Homo sapien
tgatgatgtcgctgatctggatgtc

SEQ ID NO: 2104006 - DNA, 25 bp, Homo sapien
cttgagcacgttgaagcgtaccatc

SEQ ID NO: 2104007 - DNA, 25 bp, Homo sapien
aactgcttcttggtgcccggtggtc

SEQ ID NO: 2104008 - DNA, 25 bp, Homo sapien
ctgcttcttggtgcccggtggtctt

SEQ ID NO: 2104009 - DNA, 25 bp, Homo sapien
ctggaactgcttcttggtgcccggt

SEQ ID NO: 2104010 - DNA, 25 bp, Homo sapien
ccagcctcagaacttctggaactgc

SEQ ID NO: 2104011 - DNA, 25 bp, Homo sapien
ttcattgtggggagcgggcagacat

SEQ ID NO: 2104012 - DNA, 25 bp, Homo sapien
tttcattgtggggagcgggcagaca

SEQ ID NO: 2104013 - DNA, 25 bp, Homo sapien
ttatttcattgtggggagcgggcag

SEQ ID NO: 2104014 - DNA, 25 bp, Homo sapien
tatttcattgtggggagcgggcaga

SEQ ID NO: 2104015 - DNA, 25 bp, Homo sapien
aagggttgaagagttggaggggctg

SEQ ID NO: 2104016 - DNA, 25 bp, Homo sapien
caagggttgaagagttggaggggct

SEQ ID NO: 2104017 - DNA, 25 bp, Homo sapien
gggttcaggcatatcacctcgatgg

SEQ ID NO: 2104018 - DNA, 25 bp, Homo sapien
tcagcctttagcaagaagaatccac

SEQ ID NO: 2104019 - DNA, 25 bp, Homo sapien
gacagagatgtacacgtgggcttta

SEQ ID NO: 2104020 - DNA, 25 bp, Homo sapien
tgtaggcaagcaagcactcaagtag

SEQ ID NO: 2104021 - DNA, 25 bp, Homo sapien
gaagcgctggccgtgttgctgtggg

SEQ ID NO: 2104022 - DNA, 25 bp, Homo sapien
aagcgctggccgtgttgctgtgggg

SEQ ID NO: 2104023 - DNA, 25 bp, Homo sapien
agggtgctgttggccgtccagcagg

SEQ ID NO: 2104024 - DNA, 25 bp, Homo sapien
gtgttcccagaacgatgatttgttt

SEQ ID NO: 2104025 - DNA, 25 bp, Homo sapien
gggcttcagcgccacacaggagaca

SEQ ID NO: 2104026 - DNA, 25 bp, Homo sapien
gacaacgggctttccttccagactg

SEQ ID NO: 2104027 - DNA, 25 bp, Homo sapien
agctctctgatgctgccggcccggg

SEQ ID NO: 2104028 - DNA, 25 bp, Homo sapien
gctgcaaagaccaaagagatgccat

SEQ ID NO: 2104029 - DNA, 25 bp, Homo sapien
cagtgctgctgcaaagaccaaagag

SEQ ID NO: 2104030 - DNA, 25 bp, Homo sapien
gtgctgctgcaaagaccaaagagat

SEQ ID NO: 2104031 - DNA, 25 bp, Homo sapien
ctgctgcaaagaccaaagagatgcc

SEQ ID NO: 2104032 - DNA, 25 bp, Homo sapien
cagctgacttgaggccgttggttcc

SEQ ID NO: 2104033 - DNA, 25 bp, Homo sapien
cttcatctggatatcagctgacttg

SEQ ID NO: 2104034 - DNA, 25 bp, Homo sapien
gagccttggactatccctgatgcag

SEQ ID NO: 2104035 - DNA, 25 bp, Homo sapien
aatgcccttgtgtgatggctcggaa

SEQ ID NO: 2104036 - DNA, 25 bp, Homo sapien
gctcttggaacgttctagaaacctc

SEQ ID NO: 2104037 - DNA, 25 bp, Homo sapien
ctgaaatgttggtgccagcagccct

SEQ ID NO: 2104038 - DNA, 25 bp, Homo sapien
ctgctgctcttggaacgttctagaa

SEQ ID NO: 2104039 - DNA, 25 bp, Homo sapien
acgttctagaaacctcatgggccct

SEQ ID NO: 2104040 - DNA, 25 bp, Homo sapien
ctctccaggctcaatgctcctcgcc

SEQ ID NO: 2104041 - DNA, 25 bp, Homo sapien
caggctcaatgctcctcgccctctg

SEQ ID NO: 2104042 - DNA, 25 bp, Homo sapien
ccggtgcgcccagcgcaccccacat

SEQ ID NO: 2104043 - DNA, 25 bp, Homo sapien
agaaacaccaagctaccggtgcgcc

SEQ ID NO: 2104044 - DNA, 25 bp, Homo sapien
ggcacgaagatttccctggctctca

SEQ ID NO: 2104045 - DNA, 25 bp, Homo sapien
gagccccgaatggacatacgcagat

SEQ ID NO: 2104046 - DNA, 25 bp, Homo sapien
ttttcaggcccctttggcacgaaga

SEQ ID NO: 2104047 - DNA, 25 bp, Homo sapien
tctgtgactgagaggttttcaggcc

SEQ ID NO: 2104048 - DNA, 25 bp, Homo sapien
gacgccgggcaaaaccttggcaaga

SEQ ID NO: 2104049 - DNA, 25 bp, Homo sapien
gcagttgagtccattcctctcggag

SEQ ID NO: 2104050 - DNA, 25 bp, Homo sapien
caagaaggctgttccttggctgcct

SEQ ID NO: 2104051 - DNA, 25 bp, Homo sapien
cctctcggagagcttagtgatgtcc

SEQ ID NO: 2104052 - DNA, 25 bp, Homo sapien
tcggagacaccgagagtcaattctt

SEQ ID NO: 2104053 - DNA, 25 bp, Homo sapien
gcaatcatcccagggagcatcggag

SEQ ID NO: 2104054 - DNA, 25 bp, Homo sapien
aaatgtgggcctgtggaaacactcc

SEQ ID NO: 2104055 - DNA, 25 bp, Homo sapien
atttcatattcgagccagggatgcc

SEQ ID NO: 2104056 - DNA, 25 bp, Homo sapien
tttgagcagttcctaatgtccccag

SEQ ID NO: 2104057 - DNA, 25 bp, Homo sapien
tccttgtccaccatacattagcagc

SEQ ID NO: 2104058 - DNA, 25 bp, Homo sapien
atgtccccagagaggtgttatcaac

SEQ ID NO: 2104059 - DNA, 25 bp, Homo sapien
ttatcaacatctgggaaaaaggtgg

SEQ ID NO: 2104060 - DNA, 25 bp, Homo sapien
gggaactcgcttcccatctccgagg

SEQ ID NO: 2104061 - DNA, 25 bp, Homo sapien
tgagttctctaaacccacgaggcgc

SEQ ID NO: 2104062 - DNA, 25 bp, Homo sapien
caaacatttagctacgggttgagtc

SEQ ID NO: 2104063 - DNA, 25 bp, Homo sapien
tgggtcaacgcaaaccctcagcagg

SEQ ID NO: 2104064 - DNA, 25 bp, Homo sapien
gaaaccattgtttgagtctgcaccc

SEQ ID NO: 2104065 - DNA, 25 bp, Homo sapien
agcttctgtgcggagtgtgtgcccc

SEQ ID NO: 2104066 - DNA, 25 bp, Homo sapien
gtaaagtgcagcctcaccggaagtg

SEQ ID NO: 2104067 - DNA, 25 bp, Homo sapien
cacctagggtttgtgtccgggcaag

SEQ ID NO: 2104068 - DNA, 25 bp, Homo sapien
gatcagcgttttgccgatatcctct

SEQ ID NO: 2104069 - DNA, 25 bp, Homo sapien
gtggatcagcgttttgccgatatcc

SEQ ID NO: 2104070 - DNA, 25 bp, Homo sapien
gcgttttgccgatatcctctggaga

SEQ ID NO: 2104071 - DNA, 25 bp, Homo sapien
tgccgatatcctctggagattgcag

SEQ ID NO: 2104072 - DNA, 25 bp, Homo sapien
tctaaggtcacctcgggcgttgaag

SEQ ID NO: 2104073 - DNA, 25 bp, Homo sapien
cacaggtttggagcaatcatgatct

SEQ ID NO: 2104074 - DNA, 25 bp, Homo sapien
tctccacaggcaaagatgttaacac

SEQ ID NO: 2104075 - DNA, 25 bp, Homo sapien
gagtgcccattccagtagaactcct

SEQ ID NO: 2104076 - DNA, 25 bp, Homo sapien
ttgtttacagagtacctgctcgggc

SEQ ID NO: 2104077 - DNA, 25 bp, Homo sapien
gttttcacgcatcaaaccggattgt

SEQ ID NO: 2104078 - DNA, 25 bp, Homo sapien
tgagtaaaaggagctccacactttg

SEQ ID NO: 2104079 - DNA, 25 bp, Homo sapien
ctgctcgggccaggtaaatgctatt

SEQ ID NO: 2104080 - DNA, 25 bp, Homo sapien
ccagtgtccccttcgttgtacatga

SEQ ID NO: 2104081 - DNA, 25 bp, Homo sapien
gcttggtgtgagccgtatggccttt

SEQ ID NO: 2104082 - DNA, 25 bp, Homo sapien
tgggctgtaggtaatggtgacccct

SEQ ID NO: 2104083 - DNA, 25 bp, Homo sapien
ccctgcttttgtaggtttggactgc

SEQ ID NO: 2104084 - DNA, 25 bp, Homo sapien
tgtgttttactcctacaaagccctg

SEQ ID NO: 2104085 - DNA, 25 bp, Homo sapien
aagccctggtggaaacaaaagtgca

SEQ ID NO: 2104086 - DNA, 25 bp, Homo sapien
gtatagcttgttcccttcggtggtg

SEQ ID NO: 2104087 - DNA, 25 bp, Homo sapien
gtggaaacaaaagtgcattgacaca

SEQ ID NO: 2104088 - DNA, 25 bp, Homo sapien
tatgcaggcccatggacgagctgca

SEQ ID NO: 2104089 - DNA, 25 bp, Homo sapien
cactatgcaggcccatggacgagct

SEQ ID NO: 2104090 - DNA, 25 bp, Homo sapien
atggacgagctgcagaggtggcggc

SEQ ID NO: 2104091 - DNA, 25 bp, Homo sapien
tgcaggcccatggacgagctgcaga

SEQ ID NO: 2104092 - DNA, 25 bp, Homo sapien
tgtacccatcgagccgagccggagg

SEQ ID NO: 2104093 - DNA, 25 bp, Homo sapien
caggctctgcgggtgtaggtagttc

SEQ ID NO: 2104094 - DNA, 25 bp, Homo sapien
tcagcgtctggaggagtaaccagtc

SEQ ID NO: 2104095 - DNA, 25 bp, Homo sapien
gccatttcgcacatccggagcttca

SEQ ID NO: 2104096 - DNA, 25 bp, Homo sapien
tttgcaaaaccggacgcgctgctga

SEQ ID NO: 2104097 - DNA, 25 bp, Homo sapien
tttgccagtgtttatggccgacggg

SEQ ID NO: 2104098 - DNA, 25 bp, Homo sapien
tcaacgtgttcatcaggaagggata

SEQ ID NO: 2104099 - DNA, 25 bp, Homo sapien
tgcgatatttctgtagaaggctccc

SEQ ID NO: 2104100 - DNA, 25 bp, Homo sapien
ctaaggtggagcagggcctcagtgg

SEQ ID NO: 2104101 - DNA, 25 bp, Homo sapien
taaggtggagcagggcctcagtggg

SEQ ID NO: 2104102 - DNA, 25 bp, Homo sapien
ggggtagctttccactttgtggtca

SEQ ID NO: 2104103 - DNA, 25 bp, Homo sapien
tggtcagtaggaatggctgttgcac

SEQ ID NO: 2104104 - DNA, 25 bp, Homo sapien
tggctggatcgtgtagccacaagag

SEQ ID NO: 2104105 - DNA, 25 bp, Homo sapien
cttgagtggctggatcgtgtagcca

SEQ ID NO: 2104106 - DNA, 25 bp, Homo sapien
gcgggttggtgacgagcaggtagga

SEQ ID NO: 2104107 - DNA, 25 bp, Homo sapien
gttggtgacgagcaggtaggagcct

SEQ ID NO: 2104108 - DNA, 25 bp, Homo sapien
gcagcgggttggtgacgagcaggta

SEQ ID NO: 2104109 - DNA, 25 bp, Homo sapien
gggttggtgacgagcaggtaggagc

SEQ ID NO: 2104110 - DNA, 25 bp, Homo sapien
ggcgatgattaatatgccatccagg

SEQ ID NO: 2104111 - DNA, 25 bp, Homo sapien
tgtcctttgaggcgctgtcaccagt

SEQ ID NO: 2104112 - DNA, 25 bp, Homo sapien
tggccttcagtgtgcgggtatacac

SEQ ID NO: 2104113 - DNA, 25 bp, Homo sapien
aggtttaatccgaggctggccttca

SEQ ID NO: 2104114 - DNA, 25 bp, Homo sapien
agaccgcgaccgagagcgggagcta

SEQ ID NO: 2104115 - DNA, 25 bp, Homo sapien
tgcggcggcagacggagcctgggct

SEQ ID NO: 2104116 - DNA, 25 bp, Homo sapien
agagctgcgctcctcgctgaacgcg

SEQ ID NO: 2104117 - DNA, 25 bp, Homo sapien
ctcccagcggcaaggtgaggcagag

SEQ ID NO: 2104118 - DNA, 25 bp, Homo sapien
tgtctttctgcttgttaccggagat

SEQ ID NO: 2104119 - DNA, 25 bp, Homo sapien
gttttacagcataatagtccaggtg

SEQ ID NO: 2104120 - DNA, 25 bp, Homo sapien
gaccaggaagaaaaaagcgtgcatt

SEQ ID NO: 2104121 - DNA, 25 bp, Homo sapien
cagttgttataagcagctctggagc

SEQ ID NO: 2104122 - DNA, 25 bp, Homo sapien
cttgggttggatacaggataaatcc

SEQ ID NO: 2104123 - DNA, 25 bp, Homo sapien
catcgaccagtaactaagagaagga

SEQ ID NO: 2104124 - DNA, 25 bp, Homo sapien
ggcactgagtgcgatggcgaaacac

SEQ ID NO: 2104125 - DNA, 25 bp, Homo sapien
agaaggaaaacccagccgcgagctt

SEQ ID NO: 2104126 - DNA, 25 bp, Homo sapien
tctgaggtcgtggagtctgatacca

SEQ ID NO: 2104127 - DNA, 25 bp, Homo sapien
ttcggctgggagctttcgggttcta

SEQ ID NO: 2104128 - DNA, 25 bp, Homo sapien
aaccccttcgcgaaattcctgtgcg

SEQ ID NO: 2104129 - DNA, 25 bp, Homo sapien
gggcgcccgccttgaggtttgcatt

SEQ ID NO: 2104130 - DNA, 25 bp, Homo sapien
tagacttggcatgtgccggacgcca

SEQ ID NO: 2104131 - DNA, 25 bp, Homo sapien
gcttgctcggagcttagaccgcggc

SEQ ID NO: 2104132 - DNA, 25 bp, Homo sapien
cccaacctttggatcttgcagcctg

SEQ ID NO: 2104133 - DNA, 25 bp, Homo sapien
tgtcagcggatacccgcttgctcgg

SEQ ID NO: 2104134 - DNA, 25 bp, Homo sapien
cgccgctttcggcttgcgctgggat

SEQ ID NO: 2104135 - DNA, 25 bp, Homo sapien
ctgcgtctggcagcgccgctttcgg

SEQ ID NO: 2104136 - DNA, 25 bp, Homo sapien
cggctctcggaacggcgccccagga

SEQ ID NO: 2104137 - DNA, 25 bp, Homo sapien
agcctctctgcgtctggcagcgccg

SEQ ID NO: 2104138 - DNA, 25 bp, Homo sapien
caggaagggtcctctcggcttacac

SEQ ID NO: 2104139 - DNA, 25 bp, Homo sapien
catctcatcggaccgcaggaagggt

SEQ ID NO: 2104140 - DNA, 25 bp, Homo sapien
tccggtcccagctgcggagctgcga

SEQ ID NO: 2104141 - DNA, 25 bp, Homo sapien
ggcttacaccgggataccgcagggc

SEQ ID NO: 2104142 - DNA, 25 bp, Homo sapien
aggtgcgggcttgaaaggcccggcg

SEQ ID NO: 2104143 - DNA, 25 bp, Homo sapien
caggcaaggtgcgggcttgaaaggc

SEQ ID NO: 2104144 - DNA, 25 bp, Homo sapien
tgcgggcttgaaaggcccggcgggc

SEQ ID NO: 2104145 - DNA, 25 bp, Homo sapien
caaggtgcgggcttgaaaggcccgg

SEQ ID NO: 2104146 - DNA, 25 bp, Homo sapien
gagcttgcccaagcgcgggacgctc

SEQ ID NO: 2104147 - DNA, 25 bp, Homo sapien
gccaggaggagcccggccggatccg

SEQ ID NO: 2104148 - DNA, 25 bp, Homo sapien
gcccggccggatccgaggagcttgc

SEQ ID NO: 2104149 - DNA, 25 bp, Homo sapien
aggagcttgcccaagcgcgggacgc

SEQ ID NO: 2104150 - DNA, 25 bp, Homo sapien
cagggtgcgatcagtttggtttagc

SEQ ID NO: 2104151 - DNA, 25 bp, Homo sapien
tgccgcagggagattggtcgataca

SEQ ID NO: 2104152 - DNA, 25 bp, Homo sapien
gattggtcgatacagggtgcgatca

SEQ ID NO: 2104153 - DNA, 25 bp, Homo sapien
agggaagagggtgccgcagggagat

SEQ ID NO: 2104154 - DNA, 25 bp, Homo sapien
gttttctcctcgcagccgaggagcc

SEQ ID NO: 2104155 - DNA, 25 bp, Homo sapien
cgcagccgaggagccagagcgaacc

SEQ ID NO: 2104156 - DNA, 25 bp, Homo sapien
agcactttgatcagcgttttctcct

SEQ ID NO: 2104157 - DNA, 25 bp, Homo sapien
taagcactttgatcagcgttttctc

SEQ ID NO: 2104158 - DNA, 25 bp, Homo sapien
agctccgcaaaaccgctcggtggct

SEQ ID NO: 2104159 - DNA, 25 bp, Homo sapien
caaaaccgctcggtggctgtagaac

SEQ ID NO: 2104160 - DNA, 25 bp, Homo sapien
tccgcaaaaccgctcggtggctgta

SEQ ID NO: 2104161 - DNA, 25 bp, Homo sapien
gggcagctccgcaaaaccgctcggt

SEQ ID NO: 2104162 - DNA, 25 bp, Homo sapien
aagctgtgctgtttcacaaattggc

SEQ ID NO: 2104163 - DNA, 25 bp, Homo sapien
ttggctgcaatattgttagaaagtg

SEQ ID NO: 2104164 - DNA, 25 bp, Homo sapien
tcctatgttgggtgctgcgggaaca

SEQ ID NO: 2104165 - DNA, 25 bp, Homo sapien
gcaggtatgaaacgatgacttaaaa

SEQ ID NO: 2104166 - DNA, 25 bp, Homo sapien
ttgctagtgttgcaccgtgatggca

SEQ ID NO: 2104167 - DNA, 25 bp, Homo sapien
catgccaggatgcagtaaggccact

SEQ ID NO: 2104168 - DNA, 25 bp, Homo sapien
cagagtaatgaagctgaccacaggt

SEQ ID NO: 2104169 - DNA, 25 bp, Homo sapien
caggacaaattcattgcccatcgtg

SEQ ID NO: 2104170 - DNA, 25 bp, Homo sapien
tctgtctgtggatcatccatagctt

SEQ ID NO: 2104171 - DNA, 25 bp, Homo sapien
ccttctgtctgtggatcatccatag

SEQ ID NO: 2104172 - DNA, 25 bp, Homo sapien
ctgtctgtggatcatccatagcttc

SEQ ID NO: 2104173 - DNA, 25 bp, Homo sapien
tcatccatagcttctgcttaggaag

SEQ ID NO: 2104174 - DNA, 25 bp, Homo sapien
catggaaccgatgggggcatccact

SEQ ID NO: 2104175 - DNA, 25 bp, Homo sapien
gccactggcatggaaccgatggggg

SEQ ID NO: 2104176 - DNA, 25 bp, Homo sapien
tgcctgcaagcaggggtcccggtgc

SEQ ID NO: 2104177 - DNA, 25 bp, Homo sapien
tgtgcctgcaagcaggggtcccggt

SEQ ID NO: 2104178 - DNA, 25 bp, Homo sapien
caccaagggcaatgctccagtctgt

SEQ ID NO: 2104179 - DNA, 25 bp, Homo sapien
ctactccaggaatggcccagtgcga

SEQ ID NO: 2104180 - DNA, 25 bp, Homo sapien
tctgacacctgggacgctttcaggg

SEQ ID NO: 2104181 - DNA, 25 bp, Homo sapien
gcaatgctccagtctgtatttactc

SEQ ID NO: 2104182 - DNA, 25 bp, Homo sapien
gggtaggcttggagctgcacagcga

SEQ ID NO: 2104183 - DNA, 25 bp, Homo sapien
taggcttggagctgcacagcgatgc

SEQ ID NO: 2104184 - DNA, 25 bp, Homo sapien
gcttggagctgcacagcgatgcgac

SEQ ID NO: 2104185 - DNA, 25 bp, Homo sapien
tggagctgcacagcgatgcgacaca

SEQ ID NO: 2104186 - DNA, 25 bp, Homo sapien
tctcacggtcatgagtgggcccctt

SEQ ID NO: 2104187 - DNA, 25 bp, Homo sapien
ttcaggtcagacaacctggtttggg

SEQ ID NO: 2104188 - DNA, 25 bp, Homo sapien
gctccgaatgggaacacctggctga

SEQ ID NO: 2104189 - DNA, 25 bp, Homo sapien
ggcccaggagggtcatctgttgcaa

SEQ ID NO: 2104190 - DNA, 25 bp, Homo sapien
aaagattcgcgttcttccttgcagc

SEQ ID NO: 2104191 - DNA, 25 bp, Homo sapien
tatgaaggtatatgagctggccaaa

SEQ ID NO: 2104192 - DNA, 25 bp, Homo sapien
tatgagctggccaaagattcgcgtt

SEQ ID NO: 2104193 - DNA, 25 bp, Homo sapien
catctgttgtatgaaggtatatgag

SEQ ID NO: 2104194 - DNA, 25 bp, Homo sapien
ttaacgtgtgatgccggcacaatgc

SEQ ID NO: 2104195 - DNA, 25 bp, Homo sapien
aaacctcctatggttgaggacagcc

SEQ ID NO: 2104196 - DNA, 25 bp, Homo sapien
tacggtatccagaaatttagctgcg

SEQ ID NO: 2104197 - DNA, 25 bp, Homo sapien
gaggacagcccctgatacggtatcc

SEQ ID NO: 2104198 - DNA, 25 bp, Homo sapien
ggctttgacggctataatatctgac

SEQ ID NO: 2104199 - DNA, 25 bp, Homo sapien
gactttgacattgaggtgtatctgc

SEQ ID NO: 2104200 - DNA, 25 bp, Homo sapien
tgaggtgtatctgccatataattta

SEQ ID NO: 2104201 - DNA, 25 bp, Homo sapien
gacggctataatatctgactttgac

SEQ ID NO: 2104202 - DNA, 25 bp, Homo sapien
aggcaagaggaatcctggctaaaca

SEQ ID NO: 2104203 - DNA, 25 bp, Homo sapien
gaggaatcctggctaaacaggcgca

SEQ ID NO: 2104204 - DNA, 25 bp, Homo sapien
caggcgcaagtcgtggaagccaact

SEQ ID NO: 2104205 - DNA, 25 bp, Homo sapien
tcctggctaaacaggcgcaagtcgt

SEQ ID NO: 2104206 - DNA, 25 bp, Homo sapien
aagaggatgtgatgcaaatcaccag

SEQ ID NO: 2104207 - DNA, 25 bp, Homo sapien
gaaaccacagttggacgcaaggcat

SEQ ID NO: 2104208 - DNA, 25 bp, Homo sapien
ttattgcccggaaaccacagttgga

SEQ ID NO: 2104209 - DNA, 25 bp, Homo sapien
atcaccagccgtgcctgagacttta

SEQ ID NO: 2104210 - DNA, 25 bp, Homo sapien
actgagcggagcggaggacaatcat

SEQ ID NO: 2104211 - DNA, 25 bp, Homo sapien
ctttcggaaactgattgcaactgcc

SEQ ID NO: 2104212 - DNA, 25 bp, Homo sapien
gattgcaactgcctgttaacagccc

SEQ ID NO: 2104213 - DNA, 25 bp, Homo sapien
ttaacagcccgtactgaccgcactg

SEQ ID NO: 2104214 - DNA, 25 bp, Homo sapien
ttaatcaatttcacgatattaaata

SEQ ID NO: 2104215 - DNA, 25 bp, Homo sapien
catcgccggcttccagccctttaat

SEQ ID NO: 2104216 - DNA, 25 bp, Homo sapien
acccatcgccggcttccagcccttt

SEQ ID NO: 2104217 - DNA, 25 bp, Homo sapien
caacccatcgccggcttccagccct

SEQ ID NO: 2104218 - DNA, 25 bp, Homo sapien
tccctggagacagcggcttcgagca

SEQ ID NO: 2104219 - DNA, 25 bp, Homo sapien
tggttcggtgacgactccctggaga

SEQ ID NO: 2104220 - DNA, 25 bp, Homo sapien
gctgaacgagttaagctgccccagg

SEQ ID NO: 2104221 - DNA, 25 bp, Homo sapien
gccccaggcgtgagcgtaccaggct

SEQ ID NO: 2104222 - DNA, 25 bp, Homo sapien
tcgtttctagaaccgcggactgtgt

SEQ ID NO: 2104223 - DNA, 25 bp, Homo sapien
ttttgtgcacacgtggagttccgcg

SEQ ID NO: 2104224 - DNA, 25 bp, Homo sapien
taacacgcagcaggattaaatcagg

SEQ ID NO: 2104225 - DNA, 25 bp, Homo sapien
aaatgccaatccgagggtgtccgtg

SEQ ID NO: 2104226 - DNA, 25 bp, Homo sapien
aggcctcgagcaacaggagccacca

SEQ ID NO: 2104227 - DNA, 25 bp, Homo sapien
cacccccgaggcctcgagcaacagg

SEQ ID NO: 2104228 - DNA, 25 bp, Homo sapien
acccccgaggcctcgagcaacagga

SEQ ID NO: 2104229 - DNA, 25 bp, Homo sapien
ccgaggcctcgagcaacaggagcca

SEQ ID NO: 2104230 - DNA, 25 bp, Homo sapien
cctgttccagtcgatagcgttgtac

SEQ ID NO: 2104231 - DNA, 25 bp, Homo sapien
tactcgaatctgttgagcacatcag

SEQ ID NO: 2104232 - DNA, 25 bp, Homo sapien
caagttttgaggctcgaaggacacc

SEQ ID NO: 2104233 - DNA, 25 bp, Homo sapien
gaaggacaccgaattcctgttccag

SEQ ID NO: 2104234 - DNA, 25 bp, Homo sapien
aaccacacacaactgcgctctggtc

SEQ ID NO: 2104235 - DNA, 25 bp, Homo sapien
accttgaaacccaggggagccgctg

SEQ ID NO: 2104236 - DNA, 25 bp, Homo sapien
tcttcgcgtgacgagcagcgagacg

SEQ ID NO: 2104237 - DNA, 25 bp, Homo sapien
cgagacgccggtgattaagtgtttc

SEQ ID NO: 2104238 - DNA, 25 bp, Homo sapien
ttgccggcgttgagagaggctctgt

SEQ ID NO: 2104239 - DNA, 25 bp, Homo sapien
tgccggcgttgagagaggctctgtg

SEQ ID NO: 2104240 - DNA, 25 bp, Homo sapien
gcgcgcacgctagtatccttaggaa

SEQ ID NO: 2104241 - DNA, 25 bp, Homo sapien
tttcagctcgcgaaaccccatggat

SEQ ID NO: 2104242 - DNA, 25 bp, Homo sapien
tagtagtctaccctgctcgtcttgc

SEQ ID NO: 2104243 - DNA, 25 bp, Homo sapien
gacctgttcgctccgtgtttcgcaa

SEQ ID NO: 2104244 - DNA, 25 bp, Homo sapien
tcgggcgcttcggaagcccgtggcg

SEQ ID NO: 2104245 - DNA, 25 bp, Homo sapien
gcgcttcggaagcccgtggcggttg

SEQ ID NO: 2104246 - DNA, 25 bp, Homo sapien
ctccccgctcgggcgcttcggaagc

SEQ ID NO: 2104247 - DNA, 25 bp, Homo sapien
ttcggaagcccgtggcggttgtgtg

SEQ ID NO: 2104248 - DNA, 25 bp, Homo sapien
ggaactccttatcgcccagtgtcag

SEQ ID NO: 2104249 - DNA, 25 bp, Homo sapien
gctgcatagcatccggcggtcacgt

SEQ ID NO: 2104250 - DNA, 25 bp, Homo sapien
gagcccagttcgtcagtccaggttg

SEQ ID NO: 2104251 - DNA, 25 bp, Homo sapien
ggtgccggagctaaacgtccgcctg

SEQ ID NO: 2104252 - DNA, 25 bp, Homo sapien
agttctggagagtcgtacagaggca

SEQ ID NO: 2104253 - DNA, 25 bp, Homo sapien
ctcctccgcggcaaggaaggggtca

SEQ ID NO: 2104254 - DNA, 25 bp, Homo sapien
ggaaggcaatgcaaaggcccccctg

SEQ ID NO: 2104255 - DNA, 25 bp, Homo sapien
ctggagagtcgtacagaggcatctt

SEQ ID NO: 2104256 - DNA, 25 bp, Homo sapien
tggaggcgcccgtgttctttgtctt

SEQ ID NO: 2104257 - DNA, 25 bp, Homo sapien
tccgataaggatctactgagagcta

SEQ ID NO: 2104258 - DNA, 25 bp, Homo sapien
ctggcagcttggcacgcacagttcc

SEQ ID NO: 2104259 - DNA, 25 bp, Homo sapien
cctcagaagcaaacctggaggcgcc

SEQ ID NO: 2104260 - DNA, 25 bp, Homo sapien
aaatgtgaactctccgggtggcgct

SEQ ID NO: 2104261 - DNA, 25 bp, Homo sapien
cctgcgtacacgctgctgggtacgg

SEQ ID NO: 2104262 - DNA, 25 bp, Homo sapien
tgatttagggctgcgggtttgttcc

SEQ ID NO: 2104263 - DNA, 25 bp, Homo sapien
tagttagtagtagatggttctgcgt

SEQ ID NO: 2104264 - DNA, 25 bp, Homo sapien
gacgacgcgagacgccatttgcatc

SEQ ID NO: 2104265 - DNA, 25 bp, Homo sapien
gtgtcgcccgccgcggaagcgtatt

SEQ ID NO: 2104266 - DNA, 25 bp, Homo sapien
gcgagggcggcggtgtcgcccgccg

SEQ ID NO: 2104267 - DNA, 25 bp, Homo sapien
ctaggacgacgcgagacgccatttg

SEQ ID NO: 2104268 - DNA, 25 bp, Homo sapien
ctagttcctcttccctgcgaccgct

SEQ ID NO: 2104269 - DNA, 25 bp, Homo sapien
ttggagtcgcggtagcgggtgctgc

SEQ ID NO: 2104270 - DNA, 25 bp, Homo sapien
tgcgcgttcgcgtccccagacgctg

SEQ ID NO: 2104271 - DNA, 25 bp, Homo sapien
cagtttgctgcaacgtctgcttgga

SEQ ID NO: 2104272 - DNA, 25 bp, Homo sapien
agtaagggcggctcttccggaggtg

SEQ ID NO: 2104273 - DNA, 25 bp, Homo sapien
cccagtcgagtaagggcggctcttc

SEQ ID NO: 2104274 - DNA, 25 bp, Homo sapien
aacggtctcgtagcggggagtggtg

SEQ ID NO: 2104275 - DNA, 25 bp, Homo sapien
tcgagtaagggcggctcttccggag

SEQ ID NO: 2104276 - DNA, 25 bp, Homo sapien
acgttcttctgaggtgccacgcggg

SEQ ID NO: 2104277 - DNA, 25 bp, Homo sapien
aagtagggtagcgtggtctggcctc

SEQ ID NO: 2104278 - DNA, 25 bp, Homo sapien
tggaaaagtagggtagcgtggtctg

SEQ ID NO: 2104279 - DNA, 25 bp, Homo sapien
ggaaggcgcggaacagtcttcttgc

SEQ ID NO: 2104280 - DNA, 25 bp, Homo sapien
gacgcctgtctttggtgtccctccg

SEQ ID NO: 2104281 - DNA, 25 bp, Homo sapien
gcagtggcccgaaatgtactctccc

SEQ ID NO: 2104282 - DNA, 25 bp, Homo sapien
ctcccgtagtccacgaggttcaggt

SEQ ID NO: 2104283 - DNA, 25 bp, Homo sapien
tagtccacgaggttcaggtccgaaa

SEQ ID NO: 2104284 - DNA, 25 bp, Homo sapien
cggaagggagtgctgcagacaaacc

SEQ ID NO: 2104285 - DNA, 25 bp, Homo sapien
gccggtggtgaacggtctcacgctt

SEQ ID NO: 2104286 - DNA, 25 bp, Homo sapien
cttccccaaagtggcgtgcgctact

SEQ ID NO: 2104287 - DNA, 25 bp, Homo sapien
cctggaagacattggtggcctcgtg

SEQ ID NO: 2104288 - DNA, 25 bp, Homo sapien
gggctcctttgcacgcggctgctcg

SEQ ID NO: 2104289 - DNA, 25 bp, Homo sapien
gcggctgctcgcgtttccccaaggc

SEQ ID NO: 2104290 - DNA, 25 bp, Homo sapien
tttgcacgcggctgctcgcgtttcc

SEQ ID NO: 2104291 - DNA, 25 bp, Homo sapien
cgggggggctcctttgcacgcggct

SEQ ID NO: 2104292 - DNA, 25 bp, Homo sapien
ggaaatcgggtcacactagacaagg

SEQ ID NO: 2104293 - DNA, 25 bp, Homo sapien
tgctgctgaccctggaaatcgggtc

SEQ ID NO: 2104294 - DNA, 25 bp, Homo sapien
cttggtggtatttccgaagctggcc

SEQ ID NO: 2104295 - DNA, 25 bp, Homo sapien
ttggtggtatttccgaagctggcca

SEQ ID NO: 2104296 - DNA, 25 bp, Homo sapien
cctctatatgtaatcggaaatttct

SEQ ID NO: 2104297 - DNA, 25 bp, Homo sapien
tgaattcaacttaaagggccaggtg

SEQ ID NO: 2104298 - DNA, 25 bp, Homo sapien
aattcaacttaaagggccaggtgcg

SEQ ID NO: 2104299 - DNA, 25 bp, Homo sapien
ttctcagctcctctatatgtaatcg

SEQ ID NO: 2104300 - DNA, 25 bp, Homo sapien
cagtggaaatggggactcaagagcc

SEQ ID NO: 2104301 - DNA, 25 bp, Homo sapien
caagtttagtttcaggaaaatagag

SEQ ID NO: 2104302 - DNA, 25 bp, Homo sapien
ttagtttcaggaaaatagagagcat

SEQ ID NO: 2104303 - DNA, 25 bp, Homo sapien
ctcaagagccaagtttagtttcagg

SEQ ID NO: 2104304 - DNA, 25 bp, Homo sapien
ccccaaaatatggatagatcatttt

SEQ ID NO: 2104305 - DNA, 25 bp, Homo sapien
cccccaaaatatggatagatcattt

SEQ ID NO: 2104306 - DNA, 25 bp, Homo sapien
gcattatggcactgactgttcagca

SEQ ID NO: 2104307 - DNA, 25 bp, Homo sapien
gcaatctcatccgagacaaaggctg

SEQ ID NO: 2104308 - DNA, 25 bp, Homo sapien
ggagctccgtttcaggcgtccttca

SEQ ID NO: 2104309 - DNA, 25 bp, Homo sapien
gcagcaaagttgtgttcggcgtcca

SEQ ID NO: 2104310 - DNA, 25 bp, Homo sapien
aaggtggaggatgggccttcacaga

SEQ ID NO: 2104311 - DNA, 25 bp, Homo sapien
taaggtggaggatgggccttcacag

SEQ ID NO: 2104312 - DNA, 25 bp, Homo sapien
attttattgatgttgacagcatctc

SEQ ID NO: 2104313 - DNA, 25 bp, Homo sapien
ttgcctttgttctcgtgatccctcg

SEQ ID NO: 2104314 - DNA, 25 bp, Homo sapien
aagtccactgggatgacgacagcgt

SEQ ID NO: 2104315 - DNA, 25 bp, Homo sapien
tgatccctcgctttcccaataaaag

SEQ ID NO: 2104316 - DNA, 25 bp, Homo sapien
cgacagcgtgctgtaaacttgggct

SEQ ID NO: 2104317 - DNA, 25 bp, Homo sapien
atttggcagcgaggtcatccctgga

SEQ ID NO: 2104318 - DNA, 25 bp, Homo sapien
gggcctagccatagcaaagcgagca

SEQ ID NO: 2104319 - DNA, 25 bp, Homo sapien
tacattaagagaactggcctggtct

SEQ ID NO: 2104320 - DNA, 25 bp, Homo sapien
tccctaggcacaagtgagagctcct

SEQ ID NO: 2104321 - DNA, 25 bp, Homo sapien
aggctccaggcggtgtccccagcgt

SEQ ID NO: 2104322 - DNA, 25 bp, Homo sapien
tcccggatgcgtccgcggcagaaga

SEQ ID NO: 2104323 - DNA, 25 bp, Homo sapien
atgcgtccgcggcagaagatggaat

SEQ ID NO: 2104324 - DNA, 25 bp, Homo sapien
ctgcgcgtcccggatgcgtccgcgg

SEQ ID NO: 2104325 - DNA, 25 bp, Homo sapien
cactttgggaactgctgacctagac

SEQ ID NO: 2104326 - DNA, 25 bp, Homo sapien
ggcttgggcatccaatgcgttgtga

SEQ ID NO: 2104327 - DNA, 25 bp, Homo sapien
tagggccctcacttcccaatcttgg

SEQ ID NO: 2104328 - DNA, 25 bp, Homo sapien
tctccaggtgcccaagtgacttagt

SEQ ID NO: 2104329 - DNA, 25 bp, Homo sapien
cattctcctagtgattccctggata

SEQ ID NO: 2104330 - DNA, 25 bp, Homo sapien
attctcctagtgattccctggataa

SEQ ID NO: 2104331 - DNA, 25 bp, Homo sapien
tctgaatagcggtgtatccttctgc

SEQ ID NO: 2104332 - DNA, 25 bp, Homo sapien
gaatagcggtgtatccttctgcttt

SEQ ID NO: 2104333 - DNA, 25 bp, Homo sapien
cctctctgaatagcggtgtatcctt

SEQ ID NO: 2104334 - DNA, 25 bp, Homo sapien
aaaatcctctctgaatagcggtgta

SEQ ID NO: 2104335 - DNA, 25 bp, Homo sapien
tcaacatacttatgaaccataaaag

SEQ ID NO: 2104336 - DNA, 25 bp, Homo sapien
taatcaacatacttatgaaccataa

SEQ ID NO: 2104337 - DNA, 25 bp, Homo sapien
aacataatcaacatacttatgaacc

SEQ ID NO: 2104338 - DNA, 25 bp, Homo sapien
acatacttatgaaccataaaaggat

SEQ ID NO: 2104339 - DNA, 25 bp, Homo sapien
gaaggtttaaccaagctggatgtcc

SEQ ID NO: 2104340 - DNA, 25 bp, Homo sapien
caagaaggagtatcccaagagcaag

SEQ ID NO: 2104341 - DNA, 25 bp, Homo sapien
ccggctgggaacttaactgtggctg

SEQ ID NO: 2104342 - DNA, 25 bp, Homo sapien
gaaaatgcaatcagtcccagctcta

SEQ ID NO: 2104343 - DNA, 25 bp, Homo sapien
ctctcctcttggatcaaaaacagca

SEQ ID NO: 2104344 - DNA, 25 bp, Homo sapien
cagacatttagagtagttatctgat

SEQ ID NO: 2104345 - DNA, 25 bp, Homo sapien
tcttgagtgtactttggacccacag

SEQ ID NO: 2104346 - DNA, 25 bp, Homo sapien
catatgttcatagccagaattttca

SEQ ID NO: 2104347 - DNA, 25 bp, Homo sapien
atccaagttctctgactggggtatt

SEQ ID NO: 2104348 - DNA, 25 bp, Homo sapien
caagttctctgactggggtattgga

SEQ ID NO: 2104349 - DNA, 25 bp, Homo sapien
ccaagttctctgactggggtattgg

SEQ ID NO: 2104350 - DNA, 25 bp, Homo sapien
tccaagttctctgactggggtattg

SEQ ID NO: 2104351 - DNA, 25 bp, Homo sapien
cttggcccttgaggtgtctgcaaca

SEQ ID NO: 2104352 - DNA, 25 bp, Homo sapien
tcttggcccttgaggtgtctgcaac

SEQ ID NO: 2104353 - DNA, 25 bp, Homo sapien
ttggcccttgaggtgtctgcaacat

SEQ ID NO: 2104354 - DNA, 25 bp, Homo sapien
cctgtccacaaggatggttctctgc

SEQ ID NO: 2104355 - DNA, 25 bp, Homo sapien
tggcgtggtcgctgctgccgggcat

SEQ ID NO: 2104356 - DNA, 25 bp, Homo sapien
tgcctgtccacaaggatggttctct

SEQ ID NO: 2104357 - DNA, 25 bp, Homo sapien
ctggcgtggtcgctgctgccgggca

SEQ ID NO: 2104358 - DNA, 25 bp, Homo sapien
tccaccgcagctgcgtgggaagttg

SEQ ID NO: 2104359 - DNA, 25 bp, Homo sapien
caccgaagcccacgttcaggggctg

SEQ ID NO: 2104360 - DNA, 25 bp, Homo sapien
cgttcaggggctgcgagcctctctc

SEQ ID NO: 2104361 - DNA, 25 bp, Homo sapien
gtccaccgcagctgcgtgggaagtt

SEQ ID NO: 2104362 - DNA, 25 bp, Homo sapien
ccccgccctcttgtttctgaaagag

SEQ ID NO: 2104363 - DNA, 25 bp, Homo sapien
taataagtatccaaccccggccaca

SEQ ID NO: 2104364 - DNA, 25 bp, Homo sapien
gagtaacaatcaggcctagaaagaa

SEQ ID NO: 2104365 - DNA, 25 bp, Homo sapien
ctggagacttctcgcttaacctaaa

SEQ ID NO: 2104366 - DNA, 25 bp, Homo sapien
ccaggccaagaacctgattgacgct

SEQ ID NO: 2104367 - DNA, 25 bp, Homo sapien
gccaagaacctgattgacgctggtg

SEQ ID NO: 2104368 - DNA, 25 bp, Homo sapien
agaacctgattgacgctggtgtgga

SEQ ID NO: 2104369 - DNA, 25 bp, Homo sapien
caagaacctgattgacgctggtgtg

SEQ ID NO: 2104370 - DNA, 25 bp, Homo sapien
tggcgaccatagtcccttgcagctc

SEQ ID NO: 2104371 - DNA, 25 bp, Homo sapien
taccattaccatggcgaccatagtc

SEQ ID NO: 2104372 - DNA, 25 bp, Homo sapien
ggaatctgagataccattaccatgg

SEQ ID NO: 2104373 - DNA, 25 bp, Homo sapien
ttggaatctgagataccattaccat

SEQ ID NO: 2104374 - DNA, 25 bp, Homo sapien
tgtgattgacagcccagccaggagc

SEQ ID NO: 2104375 - DNA, 25 bp, Homo sapien
tgattgacagcccagccaggagctc

SEQ ID NO: 2104376 - DNA, 25 bp, Homo sapien
attgacagcccagccaggagctcac

SEQ ID NO: 2104377 - DNA, 25 bp, Homo sapien
ctatgtgattgacagcccagccagg

SEQ ID NO: 2104378 - DNA, 25 bp, Homo sapien
ctcgactcacggaaagttctttggc

SEQ ID NO: 2104379 - DNA, 25 bp, Homo sapien
aatccttccatgcttggtagtgtcc

SEQ ID NO: 2104380 - DNA, 25 bp, Homo sapien
tctttggcagctgttgacttgaatt

SEQ ID NO: 2104381 - DNA, 25 bp, Homo sapien
tgaatttaacttccaaggagtctgg

SEQ ID NO: 2104382 - DNA, 25 bp, Homo sapien
gtaacagtcactaactcctctttgg

SEQ ID NO: 2104383 - DNA, 25 bp, Homo sapien
ccactgccttcttcgcagtaacagt

SEQ ID NO: 2104384 - DNA, 25 bp, Homo sapien
gccttcttcgcagtaacagtcacta

SEQ ID NO: 2104385 - DNA, 25 bp, Homo sapien
tcttcgcagtaacagtcactaactc

SEQ ID NO: 2104386 - DNA, 25 bp, Homo sapien
tctgatcaggattccctcattagaa

SEQ ID NO: 2104387 - DNA, 25 bp, Homo sapien
ctgatcaggattccctcattagaaa

SEQ ID NO: 2104388 - DNA, 25 bp, Homo sapien
ctgttttctggaagcgctgtgacct

SEQ ID NO: 2104389 - DNA, 25 bp, Homo sapien
ctccggaggactctgttttctggaa

SEQ ID NO: 2104390 - DNA, 25 bp, Homo sapien
agcgctgtgacctctgtggacccat

SEQ ID NO: 2104391 - DNA, 25 bp, Homo sapien
gaagcgctgtgacctctgtggaccc

SEQ ID NO: 2104392 - DNA, 25 bp, Homo sapien
gcccgaggacgctgaactggcttct

SEQ ID NO: 2104393 - DNA, 25 bp, Homo sapien
taatcaggatctccatgctccagcc

SEQ ID NO: 2104394 - DNA, 25 bp, Homo sapien
tcagacgcagagcagaagccgccag

SEQ ID NO: 2104395 - DNA, 25 bp, Homo sapien
ttcatgttaatcaggatctccatgc

SEQ ID NO: 2104396 - DNA, 25 bp, Homo sapien
gcattcccgtaatgcccgcccacag

SEQ ID NO: 2104397 - DNA, 25 bp, Homo sapien
cacagctgcaccctcagcatcaggc

SEQ ID NO: 2104398 - DNA, 25 bp, Homo sapien
ccacagctgcaccctcagcatcagg

SEQ ID NO: 2104399 - DNA, 25 bp, Homo sapien
cgcccacagctgcaccctcagcatc

SEQ ID NO: 2104400 - DNA, 25 bp, Homo sapien
ttgggagtgtcccaggtttctgctc

SEQ ID NO: 2104401 - DNA, 25 bp, Homo sapien
tctgcagcctcgctaaagaacttgc

SEQ ID NO: 2104402 - DNA, 25 bp, Homo sapien
tgttccggcacgtcctctttcatct

SEQ ID NO: 2104403 - DNA, 25 bp, Homo sapien
gaacttgccagggtagaaattgcca

SEQ ID NO: 2104404 - DNA, 25 bp, Homo sapien
tggaccagtgatcctttacaaaccc

SEQ ID NO: 2104405 - DNA, 25 bp, Homo sapien
tacaaacccgtttcaggggcattgc

SEQ ID NO: 2104406 - DNA, 25 bp, Homo sapien
tgagccctggaccagtgatccttta

SEQ ID NO: 2104407 - DNA, 25 bp, Homo sapien
gccctggaccagtgatcctttacaa

SEQ ID NO: 2104408 - DNA, 25 bp, Homo sapien
atcccctgctctcacattattctgg

SEQ ID NO: 2104409 - DNA, 25 bp, Homo sapien
atcaagaaaagcaaggtctctgtct

SEQ ID NO: 2104410 - DNA, 25 bp, Homo sapien
ttattctgggcacggtgcaggaggt

SEQ ID NO: 2104411 - DNA, 25 bp, Homo sapien
cattattctgggcacggtgcaggag

SEQ ID NO: 2104412 - DNA, 25 bp, Homo sapien
gcgagaaggaagtggtggacaaaat

SEQ ID NO: 2104413 - DNA, 25 bp, Homo sapien
cgagaaggaagtggtggacaaaata

SEQ ID NO: 2104414 - DNA, 25 bp, Homo sapien
gagaaggaagtggtggacaaaatac

SEQ ID NO: 2104415 - DNA, 25 bp, Homo sapien
ggaaggctatggtcgtgtagccata

SEQ ID NO: 2104416 - DNA, 25 bp, Homo sapien
aggctatggtcgtgtagccatagcc

SEQ ID NO: 2104417 - DNA, 25 bp, Homo sapien
aactccatggggaaggctatggtcg

SEQ ID NO: 2104418 - DNA, 25 bp, Homo sapien
gaactccatggggaaggctatggtc

SEQ ID NO: 2104419 - DNA, 25 bp, Homo sapien
tttgcccagaaagggttcacaaaca

SEQ ID NO: 2104420 - DNA, 25 bp, Homo sapien
aaagcattctggaaccttccggaga

SEQ ID NO: 2104421 - DNA, 25 bp, Homo sapien
aagacaatgtttttcccttgccaat

SEQ ID NO: 2104422 - DNA, 25 bp, Homo sapien
aagggttcacaaacaaaagcattct

SEQ ID NO: 2104423 - DNA, 25 bp, Homo sapien
tcgctgccgctcgagctgacaggct

SEQ ID NO: 2104424 - DNA, 25 bp, Homo sapien
atgatgtcagcggtctgtagggacc

SEQ ID NO: 2104425 - DNA, 25 bp, Homo sapien
ctgtagggaacctcatagcctcctt

SEQ ID NO: 2104426 - DNA, 25 bp, Homo sapien
tatgctctgatgagtggcagattcc

SEQ ID NO: 2104427 - DNA, 25 bp, Homo sapien
tatctgatttcgtgcaggatgtgtg

SEQ ID NO: 2104428 - DNA, 25 bp, Homo sapien
tccttgtcgacgtgttttgcattga

SEQ ID NO: 2104429 - DNA, 25 bp, Homo sapien
tggctgcccctaatctggcttcacg

SEQ ID NO: 2104430 - DNA, 25 bp, Homo sapien
ttcacgtggtgtcgtccagcctgag

SEQ ID NO: 2104431 - DNA, 25 bp, Homo sapien
gtgagagtggagacagaacaaagga

SEQ ID NO: 2104432 - DNA, 25 bp, Homo sapien
agagtggagacagaacaaaggaatc

SEQ ID NO: 2104433 - DNA, 25 bp, Homo sapien
tgtaaacaccaccacactcaggact

SEQ ID NO: 2104434 - DNA, 25 bp, Homo sapien
ttgtaaacaccaccacactcaggac

SEQ ID NO: 2104435 - DNA, 25 bp, Homo sapien
ggagggaatgatgtttctgggccat

SEQ ID NO: 2104436 - DNA, 25 bp, Homo sapien
actggggctctacaagctgcttgga

SEQ ID NO: 2104437 - DNA, 25 bp, Homo sapien
ggccactggggctctacaagctgct

SEQ ID NO: 2104438 - DNA, 25 bp, Homo sapien
cttctgcaccgtggttccccaacca

SEQ ID NO: 2104439 - DNA, 25 bp, Homo sapien
actgtcaccgttggttggaggttgg

SEQ ID NO: 2104440 - DNA, 25 bp, Homo sapien
gttggggaagctccaatgtcagcat

SEQ ID NO: 2104441 - DNA, 25 bp, Homo sapien
ctgtcaccgttggttggaggttggg

SEQ ID NO: 2104442 - DNA, 25 bp, Homo sapien
tactgtcaccgttggttggaggttg

SEQ ID NO: 2104443 - DNA, 25 bp, Homo sapien
gctgggacaccatatcgcattcaat

SEQ ID NO: 2104444 - DNA, 25 bp, Homo sapien
gtgacatgctgggacaccatatcgc

SEQ ID NO: 2104445 - DNA, 25 bp, Homo sapien
catgctgggacaccatatcgcattc

SEQ ID NO: 2104446 - DNA, 25 bp, Homo sapien
gggacaccatatcgcattcaatatc

SEQ ID NO: 2104447 - DNA, 25 bp, Homo sapien
tcactgcagcttggcttcctgaccg

SEQ ID NO: 2104448 - DNA, 25 bp, Homo sapien
ttggcttcctgaccgacttgttctt

SEQ ID NO: 2104449 - DNA, 25 bp, Homo sapien
cactgcagcttggcttcctgaccga

SEQ ID NO: 2104450 - DNA, 25 bp, Homo sapien
agcttggcttcctgaccgacttgtt

SEQ ID NO: 2104451 - DNA, 25 bp, Homo sapien
caatactgatagaagtaatttgctc

SEQ ID NO: 2104452 - DNA, 25 bp, Homo sapien
aagactgtgcaaaccaatgagtcgc

SEQ ID NO: 2104453 - DNA, 25 bp, Homo sapien
cagaaagactgtgcaaaccaatgag

SEQ ID NO: 2104454 - DNA, 25 bp, Homo sapien
ctcagaaagactgtgcaaaccaatg

SEQ ID NO: 2104455 - DNA, 25 bp, Homo sapien
tcattgctctccaaatagcaaatcg

SEQ ID NO: 2104456 - DNA, 25 bp, Homo sapien
tggaagattccggatgttaacttct

SEQ ID NO: 2104457 - DNA, 25 bp, Homo sapien
aatagcaaatcgagcccatttttca

SEQ ID NO: 2104458 - DNA, 25 bp, Homo sapien
ccaaatagcaaatcgagcccatttt

SEQ ID NO: 2104459 - DNA, 25 bp, Homo sapien
cccttcgtcgcttccgctgggacag

SEQ ID NO: 2104460 - DNA, 25 bp, Homo sapien
tcccgtcccttcgtcgcttccgctg

SEQ ID NO: 2104461 - DNA, 25 bp, Homo sapien
ccgtcccttcgtcgcttccgctggg

SEQ ID NO: 2104462 - DNA, 25 bp, Homo sapien
tcggactcgtccaggctcccgggtc

SEQ ID NO: 2104463 - DNA, 25 bp, Homo sapien
gggacacgggcgacagccgcagcgt

SEQ ID NO: 2104464 - DNA, 25 bp, Homo sapien
cagccgcagcgtgaggaggtgacgc

SEQ ID NO: 2104465 - DNA, 25 bp, Homo sapien
gggcgacagccgcagcgtgaggagg

SEQ ID NO: 2104466 - DNA, 25 bp, Homo sapien
acacgggcgacagccgcagcgtgag

SEQ ID NO: 2104467 - DNA, 25 bp, Homo sapien
aacgccaggagcacgacaaacacag

SEQ ID NO: 2104468 - DNA, 25 bp, Homo sapien
acgccaggagcacgacaaacacagc

SEQ ID NO: 2104469 - DNA, 25 bp, Homo sapien
gtataggccaatttccatttcggaa

SEQ ID NO: 2104470 - DNA, 25 bp, Homo sapien
tccgctctcctggtataggccaatt

SEQ ID NO: 2104471 - DNA, 25 bp, Homo sapien
ggtataggccaatttccatttcgga

SEQ ID NO: 2104472 - DNA, 25 bp, Homo sapien
gggatccgctctcctggtataggcc

SEQ ID NO: 2104473 - DNA, 25 bp, Homo sapien
gatgaaacaggttacccactgcgag

SEQ ID NO: 2104474 - DNA, 25 bp, Homo sapien
acaggttacccactgcgagtcctgg

SEQ ID NO: 2104475 - DNA, 25 bp, Homo sapien
tgaaacaggttacccactgcgagtc

SEQ ID NO: 2104476 - DNA, 25 bp, Homo sapien
ggacgatgaaacaggttacccactg

SEQ ID NO: 2104477 - DNA, 25 bp, Homo sapien
tagaatgcaattcataatgacagct

SEQ ID NO: 2104478 - DNA, 25 bp, Homo sapien
taagagaagtatgtttagaatgcaa

SEQ ID NO: 2104479 - DNA, 25 bp, Homo sapien
tctcttatcttaaacagtactctca

SEQ ID NO: 2104480 - DNA, 25 bp, Homo sapien
gccaagcctcagttaattacaatca

SEQ ID NO: 2104481 - DNA, 25 bp, Homo sapien
aaaatgtcttataactccctcatag

SEQ ID NO: 2104482 - DNA, 25 bp, Homo sapien
gatctcttggaaattggcctattct

SEQ ID NO: 2104483 - DNA, 25 bp, Homo sapien
cagctaaagcaccatgtatcaaaaa

SEQ ID NO: 2104484 - DNA, 25 bp, Homo sapien
ggcctattctccgtagttctaagga

SEQ ID NO: 2104485 - DNA, 25 bp, Homo sapien
cccctggtaagccaagtctgtatct

SEQ ID NO: 2104486 - DNA, 25 bp, Homo sapien
ccatcatgcctcagtggaaaataac

SEQ ID NO: 2104487 - DNA, 25 bp, Homo sapien
tgatggacacaacactatatctagc

SEQ ID NO: 2104488 - DNA, 25 bp, Homo sapien
tatggaaatttagaagcccgaaatc

SEQ ID NO: 2104489 - DNA, 25 bp, Homo sapien
tttgcaacactgtcaagactaaaag

SEQ ID NO: 2104490 - DNA, 25 bp, Homo sapien
tgcaacactgtcaagactaaaagga

SEQ ID NO: 2104491 - DNA, 25 bp, Homo sapien
cctcagaaaataaggagtgaatgga

SEQ ID NO: 2104492 - DNA, 25 bp, Homo sapien
ttcctcagaaaataaggagtgaatg

SEQ ID NO: 2104493 - DNA, 25 bp, Homo sapien
aacaggcgattacggagctggcgca

SEQ ID NO: 2104494 - DNA, 25 bp, Homo sapien
ttttcttgaaacaggcgattacgga

SEQ ID NO: 2104495 - DNA, 25 bp, Homo sapien
cttgaaacaggcgattacggagctg

SEQ ID NO: 2104496 - DNA, 25 bp, Homo sapien
gagctggcgcaaggtgactgaaagg

SEQ ID NO: 2104497 - DNA, 25 bp, Homo sapien
agcttgaaatatcatgtagcacttg

SEQ ID NO: 2104498 - DNA, 25 bp, Homo sapien
caagcttgaaatatcatgtagcact

SEQ ID NO: 2104499 - DNA, 25 bp, Homo sapien
aagcttgaaatatcatgtagcactt

SEQ ID NO: 2104500 - DNA, 25 bp, Homo sapien
ttcttggaagatatgttgtctctcc

SEQ ID NO: 2104501 - DNA, 25 bp, Homo sapien
gccagggtgttcttacgcccaggct

SEQ ID NO: 2104502 - DNA, 25 bp, Homo sapien
caagttaggactatggccagggtgt

SEQ ID NO: 2104503 - DNA, 25 bp, Homo sapien
cgcccaggcttgtgttcttggaaga

SEQ ID NO: 2104504 - DNA, 25 bp, Homo sapien
tgcagagcgtcaacaaggatcttag

SEQ ID NO: 2104505 - DNA, 25 bp, Homo sapien
caaggatcttagaagcatctctgaa

SEQ ID NO: 2104506 - DNA, 25 bp, Homo sapien
agagtcttccccataacgcttccca

SEQ ID NO: 2104507 - DNA, 25 bp, Homo sapien
cttagaagcatctctgaattgttca

SEQ ID NO: 2104508 - DNA, 25 bp, Homo sapien
cactgcattcccaccataaagactg

SEQ ID NO: 2104509 - DNA, 25 bp, Homo sapien
cattcccaccataaagactgtacat

SEQ ID NO: 2104510 - DNA, 25 bp, Homo sapien
ctgcattcccaccataaagactgta

SEQ ID NO: 2104511 - DNA, 25 bp, Homo sapien
tgcattcccaccataaagactgtac

SEQ ID NO: 2104512 - DNA, 25 bp, Homo sapien
gaagcaagcattctcttaagctatt

SEQ ID NO: 2104513 - DNA, 25 bp, Homo sapien
gaacaaatacatatgcagtcaatct

SEQ ID NO: 2104514 - DNA, 25 bp, Homo sapien
tgatatccaggacagcagttacctc

SEQ ID NO: 2104515 - DNA, 25 bp, Homo sapien
tagagggagaaaatagggagcttca

SEQ ID NO: 2104516 - DNA, 25 bp, Homo sapien
aaggagcgcctttgtggagacgaca

SEQ ID NO: 2104517 - DNA, 25 bp, Homo sapien
cagtaagtccatacgctagggaaaa

SEQ ID NO: 2104518 - DNA, 25 bp, Homo sapien
tgtataagaatatcagcagcaaggc

SEQ ID NO: 2104519 - DNA, 25 bp, Homo sapien
gaaggtgtgcatatcctgtgatcca

SEQ ID NO: 2104520 - DNA, 25 bp, Homo sapien
ccatgttgaaaaccacggaatattc

SEQ ID NO: 2104521 - DNA, 25 bp, Homo sapien
tccaaagtaccatgttgaaaaccac

SEQ ID NO: 2104522 - DNA, 25 bp, Homo sapien
tatgcaaggttatagggacttgctg

SEQ ID NO: 2104523 - DNA, 25 bp, Homo sapien
tatacttatatgcaaggttataggg

SEQ ID NO: 2104524 - DNA, 25 bp, Homo sapien
gcatctatatactccacaaggctag

SEQ ID NO: 2104525 - DNA, 25 bp, Homo sapien
tctagaaaaacatcacaggcacaca

SEQ ID NO: 2104526 - DNA, 25 bp, Homo sapien
ccatattagcccatgtaggtcaaca

SEQ ID NO: 2104527 - DNA, 25 bp, Homo sapien
taggtcaacaaacttgcagaagagg

SEQ ID NO: 2104528 - DNA, 25 bp, Homo sapien
actttatttgtcactcttgatagac

SEQ ID NO: 2104529 - DNA, 25 bp, Homo sapien
ctcttgatagacattggtccactcc

SEQ ID NO: 2104530 - DNA, 25 bp, Homo sapien
taactttatttgtcactcttgatag

SEQ ID NO: 2104531 - DNA, 25 bp, Homo sapien
ttgtcactcttgatagacattggtc

SEQ ID NO: 2104532 - DNA, 25 bp, Homo sapien
ccttacattagtactaaatctcagg

SEQ ID NO: 2104533 - DNA, 25 bp, Homo sapien
aaacagccaatcctgatgaaagaaa

SEQ ID NO: 2104534 - DNA, 25 bp, Homo sapien
aaaatagatttagtactgcaatgac

SEQ ID NO: 2104535 - DNA, 25 bp, Homo sapien
caggaggcagcgagaataaacaagt

SEQ ID NO: 2104536 - DNA, 25 bp, Homo sapien
gtggactgccataaagtgcatacag

SEQ ID NO: 2104537 - DNA, 25 bp, Homo sapien
tttccgtggactgccataaagtgca

SEQ ID NO: 2104538 - DNA, 25 bp, Homo sapien
gcacttttgcgctttccgtggactg

SEQ ID NO: 2104539 - DNA, 25 bp, Homo sapien
tgcgctttccgtggactgccataaa

SEQ ID NO: 2104540 - DNA, 25 bp, Homo sapien
tgcccttgtgcagacgtgactgctg

SEQ ID NO: 2104541 - DNA, 25 bp, Homo sapien
ccgtaaaatgctccagacagcagct

SEQ ID NO: 2104542 - DNA, 25 bp, Homo sapien
ctttgcctgactgccgtaaaatgct

SEQ ID NO: 2104543 - DNA, 25 bp, Homo sapien
cgtgggtttgcccttgtgcagacgt

SEQ ID NO: 2104544 - DNA, 25 bp, Homo sapien
gggcctttgcctgaatgccgttaaa

SEQ ID NO: 2104545 - DNA, 25 bp, Homo sapien
ctttgcctgaatgccgttaaagtgc

SEQ ID NO: 2104546 - DNA, 25 bp, Homo sapien
ccgcgggcctttgcctgaatgccgt

SEQ ID NO: 2104547 - DNA, 25 bp, Homo sapien
cctgaatgccgttaaagtgctgcag

SEQ ID NO: 2104548 - DNA, 25 bp, Homo sapien
gatggaatagccgtaggcgtgccta

SEQ ID NO: 2104549 - DNA, 25 bp, Homo sapien
cagccagaccacaacgaaatagagc

SEQ ID NO: 2104550 - DNA, 25 bp, Homo sapien
aaatagagcgcaaagccgagtaccc

SEQ ID NO: 2104551 - DNA, 25 bp, Homo sapien
gcgacctcgagccttcgcgtggctg

SEQ ID NO: 2104552 - DNA, 25 bp, Homo sapien
gaagcgcatgaagatcgccgagtac

SEQ ID NO: 2104553 - DNA, 25 bp, Homo sapien
tggtacagtggcacgccatcagcag

SEQ ID NO: 2104554 - DNA, 25 bp, Homo sapien
tcatgcggccactgatgatctccgg

SEQ ID NO: 2104555 - DNA, 25 bp, Homo sapien
gagtgctgctcacgtattcccggaa

SEQ ID NO: 2104556 - DNA, 25 bp, Homo sapien
cagttcagtgcttgtgacctgcaga

SEQ ID NO: 2104557 - DNA, 25 bp, Homo sapien
tcaggccctctcagttcttaagaag

SEQ ID NO: 2104558 - DNA, 25 bp, Homo sapien
ccgccgtagtagtagagtaggtagc

SEQ ID NO: 2104559 - DNA, 25 bp, Homo sapien
agtaggtagcgactggcctgcacac

SEQ ID NO: 2104560 - DNA, 25 bp, Homo sapien
gaagcttttatcaagggtccaccat

SEQ ID NO: 2104561 - DNA, 25 bp, Homo sapien
tttgtccgctctgttaaagatacgg

SEQ ID NO: 2104562 - DNA, 25 bp, Homo sapien
tatggatgatggtatacgaactgtc

SEQ ID NO: 2104563 - DNA, 25 bp, Homo sapien
taacaatgtatagcagctgggcgca

SEQ ID NO: 2104564 - DNA, 25 bp, Homo sapien
aaatggccttacagaagatatgcag

SEQ ID NO: 2104565 - DNA, 25 bp, Homo sapien
catgtctattctctcatgtgaggcc

SEQ ID NO: 2104566 - DNA, 25 bp, Homo sapien
aaatgacaccattgatgcctagctc

SEQ ID NO: 2104567 - DNA, 25 bp, Homo sapien
aaaactggattcacaggaacctggg

SEQ ID NO: 2104568 - DNA, 25 bp, Homo sapien
tagcctgtactacctccttatacca

SEQ ID NO: 2104569 - DNA, 25 bp, Homo sapien
cattggaatcctcttgtagcctgta

SEQ ID NO: 2104570 - DNA, 25 bp, Homo sapien
gttgctgtcacctacagaccttcta

SEQ ID NO: 2104571 - DNA, 25 bp, Homo sapien
gaaaactctgccctttacaatgcct

SEQ ID NO: 2104572 - DNA, 25 bp, Homo sapien
aagagtaaacccatgaatttgaatt

SEQ ID NO: 2104573 - DNA, 25 bp, Homo sapien
atctctgaatgcattgtgccaatca

SEQ ID NO: 2104574 - DNA, 25 bp, Homo sapien
caagagtaagataggattcagtgcg

SEQ ID NO: 2104575 - DNA, 25 bp, Homo sapien
atgcattcagtggacactctttttt

SEQ ID NO: 2104576 - DNA, 25 bp, Homo sapien
cagacattcctaacttgactagtgg

SEQ ID NO: 2104577 - DNA, 25 bp, Homo sapien
ggaacttagtctttgagaagggaca

SEQ ID NO: 2104578 - DNA, 25 bp, Homo sapien
taaactctagagacatcttaggccc

SEQ ID NO: 2104579 - DNA, 25 bp, Homo sapien
cagtatgtggttcgtattgatcaag

SEQ ID NO: 2104580 - DNA, 25 bp, Homo sapien
gaggctgctgtgttctccgctggac

SEQ ID NO: 2104581 - DNA, 25 bp, Homo sapien
ggtcttcctggcaacgatgcaacag

SEQ ID NO: 2104582 - DNA, 25 bp, Homo sapien
ccaaccggctgagacgtttgcacct

SEQ ID NO: 2104583 - DNA, 25 bp, Homo sapien
tgttgacggacctgtaagtgccccg

SEQ ID NO: 2104584 - DNA, 25 bp, Homo sapien
gtcggcgcacggcttcctgttctga

SEQ ID NO: 2104585 - DNA, 25 bp, Homo sapien
taggcggtggcgactctgcccgctc

SEQ ID NO: 2104586 - DNA, 25 bp, Homo sapien
ctcgaggaccgcatcgtgtgccgtt

SEQ ID NO: 2104587 - DNA, 25 bp, Homo sapien
ggtcggcggacttctcgctacatgg

SEQ ID NO: 2104588 - DNA, 25 bp, Homo sapien
ctgcttctgagcgtttgcggaggcg

SEQ ID NO: 2104589 - DNA, 25 bp, Homo sapien
atcgacttccgcctcgggcagtcaa

SEQ ID NO: 2104590 - DNA, 25 bp, Homo sapien
aacatgtacgttgcggctgtctggc

SEQ ID NO: 2104591 - DNA, 25 bp, Homo sapien
agcgtttgcggaggcgcagcttccc

SEQ ID NO: 2104592 - DNA, 25 bp, Homo sapien
gggcaactgctgacgttcccggtga

SEQ ID NO: 2104593 - DNA, 25 bp, Homo sapien
gttcccggtgacgactccggctcag

SEQ ID NO: 2104594 - DNA, 25 bp, Homo sapien
tctcccgcgcgctcacaggtaccgc

SEQ ID NO: 2104595 - DNA, 25 bp, Homo sapien
tcaccctggtttccggcggcgcgcg

SEQ ID NO: 2104596 - DNA, 25 bp, Homo sapien
tgaacatctcttacaccaagaggag

SEQ ID NO: 2104597 - DNA, 25 bp, Homo sapien
tcatgaacatctcttacaccaagag

SEQ ID NO: 2104598 - DNA, 25 bp, Homo sapien
aacatcatgaacatctcttacacca

SEQ ID NO: 2104599 - DNA, 25 bp, Homo sapien
catcatgaacatctcttacaccaag

SEQ ID NO: 2104600 - DNA, 25 bp, Homo sapien
tagtgaagtcgagaggaggaaccat

SEQ ID NO: 2104601 - DNA, 25 bp, Homo sapien
cattcatagtgaagtcgagaggagg

SEQ ID NO: 2104602 - DNA, 25 bp, Homo sapien
gcggcattcatagtgaagtcgagag

SEQ ID NO: 2104603 - DNA, 25 bp, Homo sapien
tcatagtgaagtcgagaggaggaac

SEQ ID NO: 2104604 - DNA, 25 bp, Homo sapien
catttaatgtacagctgcccctcag

SEQ ID NO: 2104605 - DNA, 25 bp, Homo sapien
gattcacacttcagatcgtttcaga

SEQ ID NO: 2104606 - DNA, 25 bp, Homo sapien
gaactagcagcatgatattttctca

SEQ ID NO: 2104607 - DNA, 25 bp, Homo sapien
cagttgttcccctatttggtgatca

SEQ ID NO: 2104608 - DNA, 25 bp, Homo sapien
aggcactggaaccagagctaccatg

SEQ ID NO: 2104609 - DNA, 25 bp, Homo sapien
catcacaacactccgtgagacttgg

SEQ ID NO: 2104610 - DNA, 25 bp, Homo sapien
gcactggaaccagagctaccatgct

SEQ ID NO: 2104611 - DNA, 25 bp, Homo sapien
caacactccgtgagacttggaggca

SEQ ID NO: 2104612 - DNA, 25 bp, Homo sapien
tggttttcgaaccagacctccagta

SEQ ID NO: 2104613 - DNA, 25 bp, Homo sapien
gatgtatgtcaattttcgaagccca

SEQ ID NO: 2104614 - DNA, 25 bp, Homo sapien
taccgtgtgtgtatttctcaggcca

SEQ ID NO: 2104615 - DNA, 25 bp, Homo sapien
aagattcatatacaccaggccgaca

SEQ ID NO: 2104616 - DNA, 25 bp, Homo sapien
ttttactgtagggttgcctgcccag

SEQ ID NO: 2104617 - DNA, 25 bp, Homo sapien
gaacttttccgtggctctgctaggc

SEQ ID NO: 2104618 - DNA, 25 bp, Homo sapien
gtgagactatcacttcaccagaggg

SEQ ID NO: 2104619 - DNA, 25 bp, Homo sapien
acaagatttgcggtcacccagccaa

SEQ ID NO: 2104620 - DNA, 25 bp, Homo sapien
gacagatgcttgacgaacagggatt

SEQ ID NO: 2104621 - DNA, 25 bp, Homo sapien
aaagtaggtgtccatttagtttgct

SEQ ID NO: 2104622 - DNA, 25 bp, Homo sapien
caacaaatacatcaggacagatgct

SEQ ID NO: 2104623 - DNA, 25 bp, Homo sapien
cttttatatggcaggatccacaatc

SEQ ID NO: 2104624 - DNA, 25 bp, Homo sapien
tgacacttttttgatcctaccgaga

SEQ ID NO: 2104625 - DNA, 25 bp, Homo sapien
gattttcacaactcggtccttgctg

SEQ ID NO: 2104626 - DNA, 25 bp, Homo sapien
cagccattggtacttactttgcaag

SEQ ID NO: 2104627 - DNA, 25 bp, Homo sapien
tcatgggagctgtatgattttcaca

SEQ ID NO: 2104628 - DNA, 25 bp, Homo sapien
caagtacttggccaccgatgcagtg

SEQ ID NO: 2104629 - DNA, 25 bp, Homo sapien
ccctttggctatggaacaggctggg

SEQ ID NO: 2104630 - DNA, 25 bp, Homo sapien
tgagatccaagtcccctagaatagg

SEQ ID NO: 2104631 - DNA, 25 bp, Homo sapien
tgacgaacaaggtgaagagctcctc

SEQ ID NO: 2104632 - DNA, 25 bp, Homo sapien
ccttctgcatgtatcctttgttggg

SEQ ID NO: 2104633 - DNA, 25 bp, Homo sapien
gaacttccgggatcatatagggcca

SEQ ID NO: 2104634 - DNA, 25 bp, Homo sapien
tgcaagtaaggcactgtactgtcct

SEQ ID NO: 2104635 - DNA, 25 bp, Homo sapien
tgtgcttgcacatcttgcaagtaag

SEQ ID NO: 2104636 - DNA, 25 bp, Homo sapien
cttatcccacgctccaaaggcccca

SEQ ID NO: 2104637 - DNA, 25 bp, Homo sapien
tactgcttatcccacgctccaaagg

SEQ ID NO: 2104638 - DNA, 25 bp, Homo sapien
ctgcttatcccacgctccaaaggcc

SEQ ID NO: 2104639 - DNA, 25 bp, Homo sapien
gcttatcccacgctccaaaggcccc

SEQ ID NO: 2104640 - DNA, 25 bp, Homo sapien
gctgccatcgcacgcgtcgctgccg

SEQ ID NO: 2104641 - DNA, 25 bp, Homo sapien
ctgccgccactaccgtcgctgccgt

SEQ ID NO: 2104642 - DNA, 25 bp, Homo sapien
gcacgcaccgctgccgtcatacgcg

SEQ ID NO: 2104643 - DNA, 25 bp, Homo sapien
gtcatacgcgccactgtcgcccctg

SEQ ID NO: 2104644 - DNA, 25 bp, Homo sapien
agaggtcatgcgagtagcgacagtt

SEQ ID NO: 2104645 - DNA, 25 bp, Homo sapien
gagaggtcatgcgagtagcgacagt

SEQ ID NO: 2104646 - DNA, 25 bp, Homo sapien
caagtggtccaactattgatgagag

SEQ ID NO: 2104647 - DNA, 25 bp, Homo sapien
ggtctccataaacacagcaccctcg

SEQ ID NO: 2104648 - DNA, 25 bp, Homo sapien
tggtccaactattgatgagagactt

SEQ ID NO: 2104649 - DNA, 25 bp, Homo sapien
tcaacaagtggtccaactattgatg

SEQ ID NO: 2104650 - DNA, 25 bp, Homo sapien
ggacttgacgatcctgctctcaaat

SEQ ID NO: 2104651 - DNA, 25 bp, Homo sapien
tgcacgcttgtatatgctgtgatct

SEQ ID NO: 2104652 - DNA, 25 bp, Homo sapien
attcggcattgtgggcaggacttga

SEQ ID NO: 2104653 - DNA, 25 bp, Homo sapien
tttctcatgggcttcaatgcacgct

SEQ ID NO: 2104654 - DNA, 25 bp, Homo sapien
cagaagtggttcctttgttggcctg

SEQ ID NO: 2104655 - DNA, 25 bp, Homo sapien
ggcctgggtttctgcttgatgttcc

SEQ ID NO: 2104656 - DNA, 25 bp, Homo sapien
gacagcctcttcttcatcgtcaaag

SEQ ID NO: 2104657 - DNA, 25 bp, Homo sapien
ccttcctcaaagaattcccagaagt

SEQ ID NO: 2104658 - DNA, 25 bp, Homo sapien
tacagaactagtgcatgcggtaggg

SEQ ID NO: 2104659 - DNA, 25 bp, Homo sapien
ggatccgcgtcccatgtctggagca

SEQ ID NO: 2104660 - DNA, 25 bp, Homo sapien
tgaacacattcacgcttggctctgg

SEQ ID NO: 2104661 - DNA, 25 bp, Homo sapien
caggccctgggtacatattcttaac

SEQ ID NO: 2104662 - DNA, 25 bp, Homo sapien
cagccttcagcagtgtttgtgttcc

SEQ ID NO: 2104663 - DNA, 25 bp, Homo sapien
gcagccttcagcagtgtttgtgttc

SEQ ID NO: 2104664 - DNA, 25 bp, Homo sapien
tgcagccttcagcagtgtttgtgtt

SEQ ID NO: 2104665 - DNA, 25 bp, Homo sapien
tggtgccatatcaaagactcagagc

SEQ ID NO: 2104666 - DNA, 25 bp, Homo sapien
taagatcatcgaggaaacaccagga

SEQ ID NO: 2104667 - DNA, 25 bp, Homo sapien
tataatagacgtccacttctggctg

SEQ ID NO: 2104668 - DNA, 25 bp, Homo sapien
ggcttagtcccagaggtccatccat

SEQ ID NO: 2104669 - DNA, 25 bp, Homo sapien
tgggcactgcaaatacagcgatgat

SEQ ID NO: 2104670 - DNA, 25 bp, Homo sapien
gggccatatcacttagaaccttgaa

SEQ ID NO: 2104671 - DNA, 25 bp, Homo sapien
tcaaagaggtaaggcttaggctgac

SEQ ID NO: 2104672 - DNA, 25 bp, Homo sapien
gagcatagcaaatttgaagggcaga

SEQ ID NO: 2104673 - DNA, 25 bp, Homo sapien
gtggaagctgttaatttaccacagt

SEQ ID NO: 2104674 - DNA, 25 bp, Homo sapien
aagctgttaatttaccacagttggc

SEQ ID NO: 2104675 - DNA, 25 bp, Homo sapien
taccacagttggctgctttccccat

SEQ ID NO: 2104676 - DNA, 25 bp, Homo sapien
ctgtgtggaagctgttaatttacca

SEQ ID NO: 2104677 - DNA, 25 bp, Homo sapien
ctagacagcagtcacttggggtttt

SEQ ID NO: 2104678 - DNA, 25 bp, Homo sapien
cagtcacttggggtttttctagaag

SEQ ID NO: 2104679 - DNA, 25 bp, Homo sapien
acagcagtcacttggggtttttcta

SEQ ID NO: 2104680 - DNA, 25 bp, Homo sapien
tctagaaggggccgaagggtgaaga

SEQ ID NO: 2104681 - DNA, 25 bp, Homo sapien
ggtaattttgctcatgggacatcag

SEQ ID NO: 2104682 - DNA, 25 bp, Homo sapien
tatagcttcagctgcaatcaggagg

SEQ ID NO: 2104683 - DNA, 25 bp, Homo sapien
tcccagtgaatacacaagttgatgc

SEQ ID NO: 2104684 - DNA, 25 bp, Homo sapien
cagaaagacgaagggaaaaggagca

SEQ ID NO: 2104685 - DNA, 25 bp, Homo sapien
tagggctttatagggaactgacaac

SEQ ID NO: 2104686 - DNA, 25 bp, Homo sapien
gcatgaacactctaagcagctcagg

SEQ ID NO: 2104687 - DNA, 25 bp, Homo sapien
ccacaggaaatgagacgctagtatt

SEQ ID NO: 2104688 - DNA, 25 bp, Homo sapien
ttagctaagctaggcacccctaggg

SEQ ID NO: 2104689 - DNA, 25 bp, Homo sapien
ttttagctcttcttccaatctggtg

SEQ ID NO: 2104690 - DNA, 25 bp, Homo sapien
gctcttcttccaatctggtgaaggg

SEQ ID NO: 2104691 - DNA, 25 bp, Homo sapien
cttcttccaatctggtgaagggaat

SEQ ID NO: 2104692 - DNA, 25 bp, Homo sapien
ttccaatctggtgaagggaattcct

SEQ ID NO: 2104693 - DNA, 25 bp, Homo sapien
tgtgcctgcacttctcgagtgattc

SEQ ID NO: 2104694 - DNA, 25 bp, Homo sapien
atacgagagaccaaaccaaagtttg

SEQ ID NO: 2104695 - DNA, 25 bp, Homo sapien
cctgcacttctcgagtgattctctt

SEQ ID NO: 2104696 - DNA, 25 bp, Homo sapien
gtttgtgcctgcacttctcgagtga

SEQ ID NO: 2104697 - DNA, 25 bp, Homo sapien
aagaagctattttaagcctagagga

SEQ ID NO: 2104698 - DNA, 25 bp, Homo sapien
ccaattaccagccacatcgggagct

SEQ ID NO: 2104699 - DNA, 25 bp, Homo sapien
gtctacttaataccataactatggg

SEQ ID NO: 2104700 - DNA, 25 bp, Homo sapien
tccacccgattagggtaaaatgtgc

SEQ ID NO: 2104701 - DNA, 25 bp, Homo sapien
tgctcagcacgattacattttcctt

SEQ ID NO: 2104702 - DNA, 25 bp, Homo sapien
tccgttcagtggcatcacaatgatg

SEQ ID NO: 2104703 - DNA, 25 bp, Homo sapien
cacaatgatgtgtattagttgagga

SEQ ID NO: 2104704 - DNA, 25 bp, Homo sapien
tgtattagttgaggatgatcattcc

SEQ ID NO: 2104705 - DNA, 25 bp, Homo sapien
tatttcatctgataccttgttcaga

SEQ ID NO: 2104706 - DNA, 25 bp, Homo sapien
tcagatttccaaatagttgtagcct

SEQ ID NO: 2104707 - DNA, 25 bp, Homo sapien
cagatttccaaatagttgtagcctt

SEQ ID NO: 2104708 - DNA, 25 bp, Homo sapien
atttccaaatagttgtagccttatc

SEQ ID NO: 2104709 - DNA, 25 bp, Homo sapien
ctcccaaggtgaacgtaagaaagag

SEQ ID NO: 2104710 - DNA, 25 bp, Homo sapien
gttggttgaaacttgaacacagctg

SEQ ID NO: 2104711 - DNA, 25 bp, Homo sapien
gtaagaaagaggctctcaagtgttg

SEQ ID NO: 2104712 - DNA, 25 bp, Homo sapien
caagtgttggttgaaacttgaacac

SEQ ID NO: 2104713 - DNA, 25 bp, Homo sapien
ccacgaaagaggatgcctgctctga

SEQ ID NO: 2104714 - DNA, 25 bp, Homo sapien
cagggggctaccttcccatacctgt

SEQ ID NO: 2104715 - DNA, 25 bp, Homo sapien
ctaggcagggggctaccttcccata

SEQ ID NO: 2104716 - DNA, 25 bp, Homo sapien
gaaagaggatgcctgctctgagccc

SEQ ID NO: 2104717 - DNA, 25 bp, Homo sapien
ctgcctgggttgtaggctctctgtt

SEQ ID NO: 2104718 - DNA, 25 bp, Homo sapien
cctgttctgcctgggttgtaggctc

SEQ ID NO: 2104719 - DNA, 25 bp, Homo sapien
tgttctgcctgggttgtaggctctc

SEQ ID NO: 2104720 - DNA, 25 bp, Homo sapien
gtcctgttctgcctgggttgtaggc

SEQ ID NO: 2104721 - DNA, 25 bp, Homo sapien
tagagcttttcctatttcgtcgtga

SEQ ID NO: 2104722 - DNA, 25 bp, Homo sapien
gctgctctgttacttagtgcaaaca

SEQ ID NO: 2104723 - DNA, 25 bp, Homo sapien
tagacagtatatagctgggtcatgc

SEQ ID NO: 2104724 - DNA, 25 bp, Homo sapien
tacacgttgattagaccctgttggt

SEQ ID NO: 2104725 - DNA, 25 bp, Homo sapien
tcttatctttattacgcatctcctt

SEQ ID NO: 2104726 - DNA, 25 bp, Homo sapien
ctcttatctttattacgcatctcct

SEQ ID NO: 2104727 - DNA, 25 bp, Homo sapien
caattttattgatgatttcaaagag

SEQ ID NO: 2104728 - DNA, 25 bp, Homo sapien
attttattgatgatttcaaagagca

SEQ ID NO: 2104729 - DNA, 25 bp, Homo sapien
aattttattgatgatttcaaagagc

SEQ ID NO: 2104730 - DNA, 25 bp, Homo sapien
tgatgccaaggaggagatggctgca

SEQ ID NO: 2104731 - DNA, 25 bp, Homo sapien
ctgtgatgccaaggaggagatggct

SEQ ID NO: 2104732 - DNA, 25 bp, Homo sapien
gccaaggaggagatggctgcaacct

SEQ ID NO: 2104733 - DNA, 25 bp, Homo sapien
atgccaaggaggagatggctgcaac

SEQ ID NO: 2104734 - DNA, 25 bp, Homo sapien
tcccataaccaacgatgggcttcaa

SEQ ID NO: 2104735 - DNA, 25 bp, Homo sapien
tgacataccagtctgactggtacag

SEQ ID NO: 2104736 - DNA, 25 bp, Homo sapien
cataccagtctgactggtacaggat

SEQ ID NO: 2104737 - DNA, 25 bp, Homo sapien
tgctcccataaccaacgatgggctt

SEQ ID NO: 2104738 - DNA, 25 bp, Homo sapien
tacaacatagggtttttacacaaga

SEQ ID NO: 2104739 - DNA, 25 bp, Homo sapien
catttctaagacctacagctacctg

SEQ ID NO: 2104740 - DNA, 25 bp, Homo sapien
tgtggctacaacatagggtttttac

SEQ ID NO: 2104741 - DNA, 25 bp, Homo sapien
agagtctccgtgcagcggactcagg

SEQ ID NO: 2104742 - DNA, 25 bp, Homo sapien
ccagttagcagttctgggtgactca

SEQ ID NO: 2104743 - DNA, 25 bp, Homo sapien
gtccagttagcagttctgggtgact

SEQ ID NO: 2104744 - DNA, 25 bp, Homo sapien
cagttagcagttctgggtgactcat

SEQ ID NO: 2104745 - DNA, 25 bp, Homo sapien
tccagttagcagttctgggtgactc

SEQ ID NO: 2104746 - DNA, 25 bp, Homo sapien
catccttctctctgaccagctgttc

SEQ ID NO: 2104747 - DNA, 25 bp, Homo sapien
atccttctctctgaccagctgttca

SEQ ID NO: 2104748 - DNA, 25 bp, Homo sapien
tccttctctctgaccagctgttcat

SEQ ID NO: 2104749 - DNA, 25 bp, Homo sapien
ctttaagtgcactgtgaattgctga

SEQ ID NO: 2104750 - DNA, 25 bp, Homo sapien
aacctttgatacagctttaagtgca

SEQ ID NO: 2104751 - DNA, 25 bp, Homo sapien
aattgctgataaagatgctacagca

SEQ ID NO: 2104752 - DNA, 25 bp, Homo sapien
ggagacctggctgcaacctttgata

SEQ ID NO: 2104753 - DNA, 25 bp, Homo sapien
ggaatgggctcaaacatgtcaggaa

SEQ ID NO: 2104754 - DNA, 25 bp, Homo sapien
taggaatgggctcaaacatgtcagg

SEQ ID NO: 2104755 - DNA, 25 bp, Homo sapien
ttaggaatgggctcaaacatgtcag

SEQ ID NO: 2104756 - DNA, 25 bp, Homo sapien
agttaggaatgggctcaaacatgtc

SEQ ID NO: 2104757 - DNA, 25 bp, Homo sapien
ggaagagtctcaagtagtcaacaaa

SEQ ID NO: 2104758 - DNA, 25 bp, Homo sapien
cagacattgtctcaaacatggcagg

SEQ ID NO: 2104759 - DNA, 25 bp, Homo sapien
ttctctaacatgtcaggatcgtctt

SEQ ID NO: 2104760 - DNA, 25 bp, Homo sapien
gagtctcaccgagtcaagaagggtc

SEQ ID NO: 2104761 - DNA, 25 bp, Homo sapien
taaaaggggtctattcattgtggaa

SEQ ID NO: 2104762 - DNA, 25 bp, Homo sapien
aacttctgtctaattgtcctattca

SEQ ID NO: 2104763 - DNA, 25 bp, Homo sapien
cacatgcacgtgtattgcatcgcat

SEQ ID NO: 2104764 - DNA, 25 bp, Homo sapien
catataccaaaaggagtataagtca

SEQ ID NO: 2104765 - DNA, 25 bp, Homo sapien
catctcctcgtgtagctcggctgga

SEQ ID NO: 2104766 - DNA, 25 bp, Homo sapien
tgtgcaaaccagtcctgacaagctg

SEQ ID NO: 2104767 - DNA, 25 bp, Homo sapien
gacagttggttcctttcgggtgcaa

SEQ ID NO: 2104768 - DNA, 25 bp, Homo sapien
tctttggccacgtagcccaggagct

SEQ ID NO: 2104769 - DNA, 25 bp, Homo sapien
ccgggatgattgtgtagcatttgca

SEQ ID NO: 2104770 - DNA, 25 bp, Homo sapien
tagcatttgcatgtattctgagtag

SEQ ID NO: 2104771 - DNA, 25 bp, Homo sapien
tctgagtagttgtagtagatcagct

SEQ ID NO: 2104772 - DNA, 25 bp, Homo sapien
tgtggataacacagacatatgtcac

SEQ ID NO: 2104773 - DNA, 25 bp, Homo sapien
agtaactgcaaagaagtttaaagag

SEQ ID NO: 2104774 - DNA, 25 bp, Homo sapien
tgcaaagaagtttaaagaggtccta

SEQ ID NO: 2104775 - DNA, 25 bp, Homo sapien
ctgcaaagaagtttaaagaggtcct

SEQ ID NO: 2104776 - DNA, 25 bp, Homo sapien
cttctctaaacttttcatgatggcc

SEQ ID NO: 2104777 - DNA, 25 bp, Homo sapien
agtcccgcaattctacagccgttct

SEQ ID NO: 2104778 - DNA, 25 bp, Homo sapien
acttttcatgatggcctgttgctgc

SEQ ID NO: 2104779 - DNA, 25 bp, Homo sapien
tccagtcccgcaattctacagccgt

SEQ ID NO: 2104780 - DNA, 25 bp, Homo sapien
gacttctgcttgtgtttggctaagg

SEQ ID NO: 2104781 - DNA, 25 bp, Homo sapien
gctaagggggagctccagcaagaaa

SEQ ID NO: 2104782 - DNA, 25 bp, Homo sapien
gacctcatctataccaaaagcaaaa

SEQ ID NO: 2104783 - DNA, 25 bp, Homo sapien
gctccagcaagaaatcaaaggaaga

SEQ ID NO: 2104784 - DNA, 25 bp, Homo sapien
tcctgggcacatactaggtaatttc

SEQ ID NO: 2104785 - DNA, 25 bp, Homo sapien
tgctaagtcctagaattcgtcattc

SEQ ID NO: 2104786 - DNA, 25 bp, Homo sapien
aatactgttggactttgctctggca

SEQ ID NO: 2104787 - DNA, 25 bp, Homo sapien
tgagcccatccaagaatatgtataa

SEQ ID NO: 2104788 - DNA, 25 bp, Homo sapien
cttggctgacttcagtactggcagg

SEQ ID NO: 2104789 - DNA, 25 bp, Homo sapien
ttggctgacttcagtactggcagga

SEQ ID NO: 2104790 - DNA, 25 bp, Homo sapien
cagcaggctgatcagccatcacacc

SEQ ID NO: 2104791 - DNA, 25 bp, Homo sapien
gccagcaggctgatcagccatcaca

SEQ ID NO: 2104792 - DNA, 25 bp, Homo sapien
gaagcagatccgagattgctccgct

SEQ ID NO: 2104793 - DNA, 25 bp, Homo sapien
tcaaatccaatagagaagagggcaa

SEQ ID NO: 2104794 - DNA, 25 bp, Homo sapien
ggaatcaggcattgatacacacaat

SEQ ID NO: 2104795 - DNA, 25 bp, Homo sapien
cgatagtatctagtgttggcaaaag

SEQ ID NO: 2104796 - DNA, 25 bp, Homo sapien
tgtactgcagggctcagatcccact

SEQ ID NO: 2104797 - DNA, 25 bp, Homo sapien
gcagctcacatcaaacgacacgggt

SEQ ID NO: 2104798 - DNA, 25 bp, Homo sapien
gatgctagcaatcacctactgaggg

SEQ ID NO: 2104799 - DNA, 25 bp, Homo sapien
gctactgggagtgctacaggcttca

SEQ ID NO: 2104800 - DNA, 25 bp, Homo sapien
actcccacagacatccaggtccact

SEQ ID NO: 2104801 - DNA, 25 bp, Homo sapien
agacatccaggtccactgttgccat

SEQ ID NO: 2104802 - DNA, 25 bp, Homo sapien
tttcttcctgcaagctgccactccc

SEQ ID NO: 2104803 - DNA, 25 bp, Homo sapien
agctgccactcccacagacatccag

SEQ ID NO: 2104804 - DNA, 25 bp, Homo sapien
agtgctctctggacagtacggcgtc

SEQ ID NO: 2104805 - DNA, 25 bp, Homo sapien
gacagtacggcgtctaactggccgc

SEQ ID NO: 2104806 - DNA, 25 bp, Homo sapien
ctctggacagtacggcgtctaactg

SEQ ID NO: 2104807 - DNA, 25 bp, Homo sapien
tacggcgtctaactggccgcggcct

SEQ ID NO: 2104808 - DNA, 25 bp, Homo sapien
catcactgccagctttgacgaggag

SEQ ID NO: 2104809 - DNA, 25 bp, Homo sapien
atcactgccagctttgacgaggagc

SEQ ID NO: 2104810 - DNA, 25 bp, Homo sapien
aaggggcagtttcctatgctttcac

SEQ ID NO: 2104811 - DNA, 25 bp, Homo sapien
ctgggaaaaggggcagtttcctatg

SEQ ID NO: 2104812 - DNA, 25 bp, Homo sapien
tgggaaaaggggcagtttcctatgc

SEQ ID NO: 2104813 - DNA, 25 bp, Homo sapien
aaaggggcagtttcctatgctttca

SEQ ID NO: 2104814 - DNA, 25 bp, Homo sapien
ctttgagtcaacgaatcatgaagaa

SEQ ID NO: 2104815 - DNA, 25 bp, Homo sapien
tttgagtcaacgaatcatgaagaac

SEQ ID NO: 2104816 - DNA, 25 bp, Homo sapien
acttcactgttgaaacttacaaacg

SEQ ID NO: 2104817 - DNA, 25 bp, Homo sapien
cctgggagctaagttctgtaggtct

SEQ ID NO: 2104818 - DNA, 25 bp, Homo sapien
gtcctgggagctaagttctgtaggt

SEQ ID NO: 2104819 - DNA, 25 bp, Homo sapien
cactgttgaaacttacaaacggtgg

SEQ ID NO: 2104820 - DNA, 25 bp, Homo sapien
gcagtatttgattctgggtgttttg

SEQ ID NO: 2104821 - DNA, 25 bp, Homo sapien
cagtatttgattctgggtgttttgg

SEQ ID NO: 2104822 - DNA, 25 bp, Homo sapien
gtatttgattctgggtgttttggtg

SEQ ID NO: 2104823 - DNA, 25 bp, Homo sapien
cagcagtatttgattctgggtgttt

SEQ ID NO: 2104824 - DNA, 25 bp, Homo sapien
tctccagtgcttcattagcctctcg

SEQ ID NO: 2104825 - DNA, 25 bp, Homo sapien
gcagggttttcaggagatccttctc

SEQ ID NO: 2104826 - DNA, 25 bp, Homo sapien
cttctccagtgcttcattagcctct

SEQ ID NO: 2104827 - DNA, 25 bp, Homo sapien
ttttcaggagatccttctccagtgc

SEQ ID NO: 2104828 - DNA, 25 bp, Homo sapien
actgggacaggtattgatgaactcg

SEQ ID NO: 2104829 - DNA, 25 bp, Homo sapien
ggtgggtcttttggcatcactatat

SEQ ID NO: 2104830 - DNA, 25 bp, Homo sapien
tgccatccagaaatttatgtgtaga

SEQ ID NO: 2104831 - DNA, 25 bp, Homo sapien
gtgatattttttggccaccaccttg

SEQ ID NO: 2104832 - DNA, 25 bp, Homo sapien
gctcatagtttgactcgggccgctt

SEQ ID NO: 2104833 - DNA, 25 bp, Homo sapien
tgttccattgtgaaccgtagccccg

SEQ ID NO: 2104834 - DNA, 25 bp, Homo sapien
aagatgagatctcgagaccacgcgc

SEQ ID NO: 2104835 - DNA, 25 bp, Homo sapien
tgtggccacgacagggttaatcgcg

SEQ ID NO: 2104836 - DNA, 25 bp, Homo sapien
caatatggcggatccggcaaaccaa

SEQ ID NO: 2104837 - DNA, 25 bp, Homo sapien
gcggatgcccgtcctcgtcaatatg

SEQ ID NO: 2104838 - DNA, 25 bp, Homo sapien
cctcgtcaatatggcggatccggca

SEQ ID NO: 2104839 - DNA, 25 bp, Homo sapien
ggcggcggagactagcgtccgcagc

SEQ ID NO: 2104840 - DNA, 25 bp, Homo sapien
tggtggctttgaagtagctcgctcc

SEQ ID NO: 2104841 - DNA, 25 bp, Homo sapien
agcgacggcttcaccttcccctagt

SEQ ID NO: 2104842 - DNA, 25 bp, Homo sapien
aagcaccgggcgctaaggcggccgc

SEQ ID NO: 2104843 - DNA, 25 bp, Homo sapien
cggccgcctcccgtgagagagaggc

SEQ ID NO: 2104844 - DNA, 25 bp, Homo sapien
tccgggcggtgcgtttctcctgcgt

SEQ ID NO: 2104845 - DNA, 25 bp, Homo sapien
gctccgggcggtgcgtttctcctgc

SEQ ID NO: 2104846 - DNA, 25 bp, Homo sapien
gggcggtgcgtttctcctgcgtcac

SEQ ID NO: 2104847 - DNA, 25 bp, Homo sapien
tcagacgggctccgggcggtgcgtt

SEQ ID NO: 2104848 - DNA, 25 bp, Homo sapien
cgggcgtctcaaccaaaaggctgca

SEQ ID NO: 2104849 - DNA, 25 bp, Homo sapien
caaagtgtatcgaaaggctgcggcg

SEQ ID NO: 2104850 - DNA, 25 bp, Homo sapien
acagacgtcttctcacaaccagggc

SEQ ID NO: 2104851 - DNA, 25 bp, Homo sapien
gggacgagacctaccctgggtgcat

SEQ ID NO: 2104852 - DNA, 25 bp, Homo sapien
ttctcagaaactaccaaggtcagca

SEQ ID NO: 2104853 - DNA, 25 bp, Homo sapien
ctagagaccccaataacctggtgaa

SEQ ID NO: 2104854 - DNA, 25 bp, Homo sapien
agattctcacatgtactgttgctgg

SEQ ID NO: 2104855 - DNA, 25 bp, Homo sapien
aactatggactatggaacaccaaac

SEQ ID NO: 2104856 - DNA, 25 bp, Homo sapien
caaagtcagcaggaataaaatggac

SEQ ID NO: 2104857 - DNA, 25 bp, Homo sapien
ttcctttccacccaattcacaggct

SEQ ID NO: 2104858 - DNA, 25 bp, Homo sapien
aatggacatcaaggatactaacagg

SEQ ID NO: 2104859 - DNA, 25 bp, Homo sapien
aacaggaggcttcgccactcccttt

SEQ ID NO: 2104860 - DNA, 25 bp, Homo sapien
taatgccaaatgctaggtttccagc

SEQ ID NO: 2104861 - DNA, 25 bp, Homo sapien
taatattaagtaagctggctcaagc

SEQ ID NO: 2104862 - DNA, 25 bp, Homo sapien
agtaaatacaaaactgcagtcccag

SEQ ID NO: 2104863 - DNA, 25 bp, Homo sapien
ggctcaagcttgcaaattctggttc

SEQ ID NO: 2104864 - DNA, 25 bp, Homo sapien
taacaagtgctggttattcctctct

SEQ ID NO: 2104865 - DNA, 25 bp, Homo sapien
tatgtgaagtaccagacacacagag

SEQ ID NO: 2104866 - DNA, 25 bp, Homo sapien
taaatataatctctagaccagccca

SEQ ID NO: 2104867 - DNA, 25 bp, Homo sapien
caagttaaaggtataggccgtgtga

SEQ ID NO: 2104868 - DNA, 25 bp, Homo sapien
gcagtttttctaccacagcatgaga

SEQ ID NO: 2104869 - DNA, 25 bp, Homo sapien
tgctggacttcaaggattcttttgg

SEQ ID NO: 2104870 - DNA, 25 bp, Homo sapien
gttatcacaggtttgacacacttct

SEQ ID NO: 2104871 - DNA, 25 bp, Homo sapien
tggtgcctcaatcgaaaacacatga

SEQ ID NO: 2104872 - DNA, 25 bp, Homo sapien
tgtttcttctacccgacaagctgtc

SEQ ID NO: 2104873 - DNA, 25 bp, Homo sapien
tagtctcgcctttctagctcttggt

SEQ ID NO: 2104874 - DNA, 25 bp, Homo sapien
gctgcttgctatccctatctcttat

SEQ ID NO: 2104875 - DNA, 25 bp, Homo sapien
tatatttccggtattgctgagcagg

SEQ ID NO: 2104876 - DNA, 25 bp, Homo sapien
gatgaagacaaagtaggtaagttgt

SEQ ID NO: 2104877 - DNA, 25 bp, Homo sapien
ttttcccacaagtcgtaagactgtc

SEQ ID NO: 2104878 - DNA, 25 bp, Homo sapien
tactgaaaatcaccagtgtctgccc

SEQ ID NO: 2104879 - DNA, 25 bp, Homo sapien
agggatgatgctccaatcatcatca

SEQ ID NO: 2104880 - DNA, 25 bp, Homo sapien
tcgacacagggcagatctttgcaat

SEQ ID NO: 2104881 - DNA, 25 bp, Homo sapien
cacttatagaagatgaagtaccagc

SEQ ID NO: 2104882 - DNA, 25 bp, Homo sapien
aaggtccaattcaagaataaaccat

SEQ ID NO: 2104883 - DNA, 25 bp, Homo sapien
accatcttgcagagaccattgcata

SEQ ID NO: 2104884 - DNA, 25 bp, Homo sapien
gttgtcattccctccgaccggagag

SEQ ID NO: 2104885 - DNA, 25 bp, Homo sapien
gagggggggctgagactgtccatca

SEQ ID NO: 2104886 - DNA, 25 bp, Homo sapien
agcctggccctggttgtcattccct

SEQ ID NO: 2104887 - DNA, 25 bp, Homo sapien
tccgaccggagagccacgagtcgtg

SEQ ID NO: 2104888 - DNA, 25 bp, Homo sapien
gagttgccggggaattttcattgga

SEQ ID NO: 2104889 - DNA, 25 bp, Homo sapien
atgtcatccaacttggccaagtcag

SEQ ID NO: 2104890 - DNA, 25 bp, Homo sapien
ccaacttggccaagtcagtatgtgg

SEQ ID NO: 2104891 - DNA, 25 bp, Homo sapien
tgatcatgtcatccaacttggccaa

SEQ ID NO: 2104892 - DNA, 25 bp, Homo sapien
caaaaacatgcttaatggttgtaca

SEQ ID NO: 2104893 - DNA, 25 bp, Homo sapien
accaaacaaaaacatgcttaatggt

SEQ ID NO: 2104894 - DNA, 25 bp, Homo sapien
aacaaaaacatgcttaatggttgta

SEQ ID NO: 2104895 - DNA, 25 bp, Homo sapien
ttaccaaacaaaaacatgcttaatg

SEQ ID NO: 2104896 - DNA, 25 bp, Homo sapien
ttcggcaaaactggaaccacccatc

SEQ ID NO: 2104897 - DNA, 25 bp, Homo sapien
ttactaagatcaatagcagcttcta

SEQ ID NO: 2104898 - DNA, 25 bp, Homo sapien
gcttctaaaagcacttctaattccc

SEQ ID NO: 2104899 - DNA, 25 bp, Homo sapien
gcacttctaattcccctttcggcaa

SEQ ID NO: 2104900 - DNA, 25 bp, Homo sapien
ttgttagcccatcacggaaaaatcg

SEQ ID NO: 2104901 - DNA, 25 bp, Homo sapien
tcacggaaaaatcgctgacatgctt

SEQ ID NO: 2104902 - DNA, 25 bp, Homo sapien
tagcccatcacggaaaaatcgctga

SEQ ID NO: 2104903 - DNA, 25 bp, Homo sapien
gaaaaatcgctgacatgcttcactt

SEQ ID NO: 2104904 - DNA, 25 bp, Homo sapien
catcactatgtaaatctgatccttt

SEQ ID NO: 2104905 - DNA, 25 bp, Homo sapien
aggcatcactatgtaaatctgatcc

SEQ ID NO: 2104906 - DNA, 25 bp, Homo sapien
ggcatcactatgtaaatctgatcct

SEQ ID NO: 2104907 - DNA, 25 bp, Homo sapien
gcatcactatgtaaatctgatcctt

SEQ ID NO: 2104908 - DNA, 25 bp, Homo sapien
ttgggacaacttggccacacatagc

SEQ ID NO: 2104909 - DNA, 25 bp, Homo sapien
ccagtcttgggacaacttggccaca

SEQ ID NO: 2104910 - DNA, 25 bp, Homo sapien
gaaaccagtcttgggacaacttggc

SEQ ID NO: 2104911 - DNA, 25 bp, Homo sapien
ttggccacacatagctccaccagac

SEQ ID NO: 2104912 - DNA, 25 bp, Homo sapien
ggaaactgattcacatggacgtgta

SEQ ID NO: 2104913 - DNA, 25 bp, Homo sapien
aactgattcacatggacgtgtacca

SEQ ID NO: 2104914 - DNA, 25 bp, Homo sapien
accattgtagatatggaatttgcaa

SEQ ID NO: 2104915 - DNA, 25 bp, Homo sapien
ctgattcacatggacgtgtaccatt

SEQ ID NO: 2104916 - DNA, 25 bp, Homo sapien
atttgaacgtttaatgctgatccat

SEQ ID NO: 2104917 - DNA, 25 bp, Homo sapien
aataaaacgatcatgcaaaatctgg

SEQ ID NO: 2104918 - DNA, 25 bp, Homo sapien
catttaaagtgccaaatttgttgag

SEQ ID NO: 2104919 - DNA, 25 bp, Homo sapien
tttgttgagaagatccactagccaa

SEQ ID NO: 2104920 - DNA, 25 bp, Homo sapien
tactttttcactgtatgaagagtga

SEQ ID NO: 2104921 - DNA, 25 bp, Homo sapien
actttttcactgtatgaagagtgag

SEQ ID NO: 2104922 - DNA, 25 bp, Homo sapien
catgtcgatgagtatagtatgatac

SEQ ID NO: 2104923 - DNA, 25 bp, Homo sapien
taccatgtcgatgagtatagtatga

SEQ ID NO: 2104924 - DNA, 25 bp, Homo sapien
aggattaccatgtcgatgagtatag

SEQ ID NO: 2104925 - DNA, 25 bp, Homo sapien
gattaccatgtcgatgagtatagta

SEQ ID NO: 2104926 - DNA, 25 bp, Homo sapien
gactatctcgcaacactatggataa

SEQ ID NO: 2104927 - DNA, 25 bp, Homo sapien
tattatcaagatcctgtaaggtcag

SEQ ID NO: 2104928 - DNA, 25 bp, Homo sapien
tgatgaagactatctcgcaacacta

SEQ ID NO: 2104929 - DNA, 25 bp, Homo sapien
atattatcaagatcctgtaaggtca

SEQ ID NO: 2104930 - DNA, 25 bp, Homo sapien
gagatcatgtacattcttcacaatg

SEQ ID NO: 2104931 - DNA, 25 bp, Homo sapien
ccaattttgccaggagatcatgtac

SEQ ID NO: 2104932 - DNA, 25 bp, Homo sapien
agaaaaatcccatgccaattttgcc

SEQ ID NO: 2104933 - DNA, 25 bp, Homo sapien
gatgatcaagttgttcaggagaaaa

SEQ ID NO: 2104934 - DNA, 25 bp, Homo sapien
catcactgtgagccagattccacag

SEQ ID NO: 2104935 - DNA, 25 bp, Homo sapien
acgtatcagctcaagtagcttttca

SEQ ID NO: 2104936 - DNA, 25 bp, Homo sapien
gacgacgtatcagctcaagtagctt

SEQ ID NO: 2104937 - DNA, 25 bp, Homo sapien
tgcaagacgacgtatcagctcaagt

SEQ ID NO: 2104938 - DNA, 25 bp, Homo sapien
gtcaaaacctgagtagtatctacat

SEQ ID NO: 2104939 - DNA, 25 bp, Homo sapien
gtatctacattaatacaccttcctg

SEQ ID NO: 2104940 - DNA, 25 bp, Homo sapien
gaactgtcacaagtaaacatagtca

SEQ ID NO: 2104941 - DNA, 25 bp, Homo sapien
acattaatacaccttcctgagcttt

SEQ ID NO: 2104942 - DNA, 25 bp, Homo sapien
cagtgcgggaataacccatttgtca

SEQ ID NO: 2104943 - DNA, 25 bp, Homo sapien
attggatcttttgtgtatcacggtc

SEQ ID NO: 2104944 - DNA, 25 bp, Homo sapien
tgtttcagtgcgggaataacccatt

SEQ ID NO: 2104945 - DNA, 25 bp, Homo sapien
aaagcgatctatccattggatcttt

SEQ ID NO: 2104946 - DNA, 25 bp, Homo sapien
gtttgacacaagattcacacctagg

SEQ ID NO: 2104947 - DNA, 25 bp, Homo sapien
tctagagctgtaaaggatcctggca

SEQ ID NO: 2104948 - DNA, 25 bp, Homo sapien
caagattaaattactggtttgacac

SEQ ID NO: 2104949 - DNA, 25 bp, Homo sapien
cttttcatgttatcagttccaactg

SEQ ID NO: 2104950 - DNA, 25 bp, Homo sapien
aagtcatggcgataaaacacatggg

SEQ ID NO: 2104951 - DNA, 25 bp, Homo sapien
aactagggcatgattgtgttgaagt

SEQ ID NO: 2104952 - DNA, 25 bp, Homo sapien
tctagcatatagtctcatgctttcc

SEQ ID NO: 2104953 - DNA, 25 bp, Homo sapien
catgctttccatgtaagttgcaagg

SEQ ID NO: 2104954 - DNA, 25 bp, Homo sapien
gtttgtgggtcataatcttcatggt

SEQ ID NO: 2104955 - DNA, 25 bp, Homo sapien
ttgaacatgactatatctacttccc

SEQ ID NO: 2104956 - DNA, 25 bp, Homo sapien
agcctcacagtttgtgggtcataat

SEQ ID NO: 2104957 - DNA, 25 bp, Homo sapien
tgaacatgactatatctacttccca

SEQ ID NO: 2104958 - DNA, 25 bp, Homo sapien
gattgcctgtcagccactgttagaa

SEQ ID NO: 2104959 - DNA, 25 bp, Homo sapien
taagtcagtatagtcctccttccgg

SEQ ID NO: 2104960 - DNA, 25 bp, Homo sapien
gaggactccaaccactcttttgagg

SEQ ID NO: 2104961 - DNA, 25 bp, Homo sapien
tgcagagaaaatccagccctagact

SEQ ID NO: 2104962 - DNA, 25 bp, Homo sapien
ggtggcttacaccttaataccagca

SEQ ID NO: 2104963 - DNA, 25 bp, Homo sapien
aggcaagtccttctatccaggtggt

SEQ ID NO: 2104964 - DNA, 25 bp, Homo sapien
tccataaataagcacagagttcaat

SEQ ID NO: 2104965 - DNA, 25 bp, Homo sapien
ccataattaacacagcccaggacaa

SEQ ID NO: 2104966 - DNA, 25 bp, Homo sapien
ctaccggtctaataggaagagcaca

SEQ ID NO: 2104967 - DNA, 25 bp, Homo sapien
tagtgcaattccatcgtatactggc

SEQ ID NO: 2104968 - DNA, 25 bp, Homo sapien
tactgatcagatgggagtaacacct

SEQ ID NO: 2104969 - DNA, 25 bp, Homo sapien
ttaaaaagtagagctgcaccagttg

SEQ ID NO: 2104970 - DNA, 25 bp, Homo sapien
caaaggtaaactgcattctcagcta

SEQ ID NO: 2104971 - DNA, 25 bp, Homo sapien
cacagctttgaagaatcgctcaaaa

SEQ ID NO: 2104972 - DNA, 25 bp, Homo sapien
agttttccttctcgacaattcacag

SEQ ID NO: 2104973 - DNA, 25 bp, Homo sapien
gtaatctaatcctattaactccaag

SEQ ID NO: 2104974 - DNA, 25 bp, Homo sapien
taaccaagtgagacactcaagaaga

SEQ ID NO: 2104975 - DNA, 25 bp, Homo sapien
tggtaagttgactttgataatcaag

SEQ ID NO: 2104976 - DNA, 25 bp, Homo sapien
tatcctcagttatcttaaacacact

SEQ ID NO: 2104977 - DNA, 25 bp, Homo sapien
tacgctttgaccactattatttaac

SEQ ID NO: 2104978 - DNA, 25 bp, Homo sapien
gtcttggaccaaggttcgtgtatat

SEQ ID NO: 2104979 - DNA, 25 bp, Homo sapien
ctgattgacttgtagtcttggacca

SEQ ID NO: 2104980 - DNA, 25 bp, Homo sapien
gatctatagctctgctggcaatatc

SEQ ID NO: 2104981 - DNA, 25 bp, Homo sapien
tctttgaggagatctatagctctgc

SEQ ID NO: 2104982 - DNA, 25 bp, Homo sapien
gtcttgcacaattaacactgtcttt

SEQ ID NO: 2104983 - DNA, 25 bp, Homo sapien
cgacatagggagaattgttctttcc

SEQ ID NO: 2104984 - DNA, 25 bp, Homo sapien
cataggaagccttcagacgatcaaa

SEQ ID NO: 2104985 - DNA, 25 bp, Homo sapien
gttaatactcgaaccattcgaacag

SEQ ID NO: 2104986 - DNA, 25 bp, Homo sapien
tcttattaaacaagaggatgtgaat

SEQ ID NO: 2104987 - DNA, 25 bp, Homo sapien
catcatattcagcagactctgaaat

SEQ ID NO: 2104988 - DNA, 25 bp, Homo sapien
agactctgaaattttgttgccaaga

SEQ ID NO: 2104989 - DNA, 25 bp, Homo sapien
aatgctggggatttaacactaagta

SEQ ID NO: 2104990 - DNA, 25 bp, Homo sapien
aagagaggtgtttaccgcggaatgc

SEQ ID NO: 2104991 - DNA, 25 bp, Homo sapien
gaaatcgaactacaaaagagaggtg

SEQ ID NO: 2104992 - DNA, 25 bp, Homo sapien
tatcatctgcaggatctatcagctc

SEQ ID NO: 2104993 - DNA, 25 bp, Homo sapien
tgagaatacatcgtcgtactgaacc

SEQ ID NO: 2104994 - DNA, 25 bp, Homo sapien
caaaacttagtgatataccaaccaa

SEQ ID NO: 2104995 - DNA, 25 bp, Homo sapien
cagtcccaaacataacaaatgctca

SEQ ID NO: 2104996 - DNA, 25 bp, Homo sapien
tactgattaaacgatagtctctggt

SEQ ID NO: 2104997 - DNA, 25 bp, Homo sapien
caaaaaatccgaaagactacatgct

SEQ ID NO: 2104998 - DNA, 25 bp, Homo sapien
gggcttgaaggcatattggaactta

SEQ ID NO: 2104999 - DNA, 25 bp, Homo sapien
ggaacttatctgtgtaagtttggct

SEQ ID NO: 2105000 - DNA, 25 bp, Homo sapien
atcagaagagctatcagggcttgaa

SEQ ID NO: 2105001 - DNA, 25 bp, Homo sapien
ccatcactgtaatgattaccatggt

SEQ ID NO: 2105002 - DNA, 25 bp, Homo sapien
atgatgccttacatacagtagttca

SEQ ID NO: 2105003 - DNA, 25 bp, Homo sapien
gtagttcaaaactgtatctactcac

SEQ ID NO: 2105004 - DNA, 25 bp, Homo sapien
gccttacatacagtagttcaaaact

SEQ ID NO: 2105005 - DNA, 25 bp, Homo sapien
tacagtagttcaaaactgtatctac

SEQ ID NO: 2105006 - DNA, 25 bp, Homo sapien
ggcataagtttcataagtactcttg

SEQ ID NO: 2105007 - DNA, 25 bp, Homo sapien
tgctacctaagtctgcaacttgcca

SEQ ID NO: 2105008 - DNA, 25 bp, Homo sapien
ttcataagtactcttgctccatctc

SEQ ID NO: 2105009 - DNA, 25 bp, Homo sapien
gctacctaagtctgcaacttgccaa

SEQ ID NO: 2105010 - DNA, 25 bp, Homo sapien
aatgccccactaaatctgagaaaag

SEQ ID NO: 2105011 - DNA, 25 bp, Homo sapien
ggaaggcacaaatgattcgaaggcc

SEQ ID NO: 2105012 - DNA, 25 bp, Homo sapien
gctggactggtacaagcgtgaacct

SEQ ID NO: 2105013 - DNA, 25 bp, Homo sapien
gatgagaagcccaacaaggtgttta

SEQ ID NO: 2105014 - DNA, 25 bp, Homo sapien
taaacatcaaagatcctagcagctg

SEQ ID NO: 2105015 - DNA, 25 bp, Homo sapien
aaacatcaaagatcctagcagctga

SEQ ID NO: 2105016 - DNA, 25 bp, Homo sapien
ttttaaacatcaaagatcctagcag

SEQ ID NO: 2105017 - DNA, 25 bp, Homo sapien
catcaaagatcctagcagctgaatt

SEQ ID NO: 2105018 - DNA, 25 bp, Homo sapien
taaatatcttctcgtgtcattgaat

SEQ ID NO: 2105019 - DNA, 25 bp, Homo sapien
tctgaaggcatagcgacatataatg

SEQ ID NO: 2105020 - DNA, 25 bp, Homo sapien
gtttgtgttgaaactgtcacttctc

SEQ ID NO: 2105021 - DNA, 25 bp, Homo sapien
caggcctagaaatagcagccattat

SEQ ID NO: 2105022 - DNA, 25 bp, Homo sapien
gcatggtctaaacaaatagctctta

SEQ ID NO: 2105023 - DNA, 25 bp, Homo sapien
gaaaagtgagtcaagagatggacta

SEQ ID NO: 2105024 - DNA, 25 bp, Homo sapien
ctgttagatatagcacttgtgaggc

SEQ ID NO: 2105025 - DNA, 25 bp, Homo sapien
ctgctttctccaagtttggcatggt

SEQ ID NO: 2105026 - DNA, 25 bp, Homo sapien
tgtgtcatgggattcacaccttcta

SEQ ID NO: 2105027 - DNA, 25 bp, Homo sapien
caatggcagttagcaaaagcttggc

SEQ ID NO: 2105028 - DNA, 25 bp, Homo sapien
tttaagagcattgaggtaggcaccc

SEQ ID NO: 2105029 - DNA, 25 bp, Homo sapien
gagtttccatatctgcattcggtag

SEQ ID NO: 2105030 - DNA, 25 bp, Homo sapien
tgctatctactattataaaaggatt

SEQ ID NO: 2105031 - DNA, 25 bp, Homo sapien
ctatctactattataaaaggatttt

SEQ ID NO: 2105032 - DNA, 25 bp, Homo sapien
gctatctactattataaaaggattt

SEQ ID NO: 2105033 - DNA, 25 bp, Homo sapien
ttgctatctactattataaaaggat

SEQ ID NO: 2105034 - DNA, 25 bp, Homo sapien
gacacatttctaagcatgcactcgg

SEQ ID NO: 2105035 - DNA, 25 bp, Homo sapien
agcatgcactcggatgatggattag

SEQ ID NO: 2105036 - DNA, 25 bp, Homo sapien
tgagcaagacgaactgacacatttc

SEQ ID NO: 2105037 - DNA, 25 bp, Homo sapien
tcatcagatatctgctgagcaagac

SEQ ID NO: 2105038 - DNA, 25 bp, Homo sapien
tgggctaaatactagctgtaacgac

SEQ ID NO: 2105039 - DNA, 25 bp, Homo sapien
gctgtaacgacccacatcctgatgc

SEQ ID NO: 2105040 - DNA, 25 bp, Homo sapien
tcatttgggctaaatactagctgta

SEQ ID NO: 2105041 - DNA, 25 bp, Homo sapien
gctaaatactagctgtaacgaccca

SEQ ID NO: 2105042 - DNA, 25 bp, Homo sapien
gctgtgacagtgcaatagtaagtca

SEQ ID NO: 2105043 - DNA, 25 bp, Homo sapien
tcttccaagtctggctcattgcctg

SEQ ID NO: 2105044 - DNA, 25 bp, Homo sapien
tcaatgatgaatgtctgccaagcct

SEQ ID NO: 2105045 - DNA, 25 bp, Homo sapien
tctttactaagagcatctaaggctg

SEQ ID NO: 2105046 - DNA, 25 bp, Homo sapien
tcctcaataccaatatgccatagag

SEQ ID NO: 2105047 - DNA, 25 bp, Homo sapien
ggctaatctatatacctcccaggta

SEQ ID NO: 2105048 - DNA, 25 bp, Homo sapien
aatctaagataggaggctaatgtcc

SEQ ID NO: 2105049 - DNA, 25 bp, Homo sapien
aaaacctggcatctaggaatctaag

SEQ ID NO: 2105050 - DNA, 25 bp, Homo sapien
gtttcacatttaatacattatttcc

SEQ ID NO: 2105051 - DNA, 25 bp, Homo sapien
aaaaaatgtttcacatttaatacat

SEQ ID NO: 2105052 - DNA, 25 bp, Homo sapien
tcacatttaatacattatttccatt

SEQ ID NO: 2105053 - DNA, 25 bp, Homo sapien
tttcacatttaatacattatttcca

SEQ ID NO: 2105054 - DNA, 25 bp, Homo sapien
tcccatgcaacatctggtgcacatt

SEQ ID NO: 2105055 - DNA, 25 bp, Homo sapien
tgtcccatgcaacatctggtgcaca

SEQ ID NO: 2105056 - DNA, 25 bp, Homo sapien
catgcaacatctggtgcacattaaa

SEQ ID NO: 2105057 - DNA, 25 bp, Homo sapien
caacatctggtgcacattaaaaaga

SEQ ID NO: 2105058 - DNA, 25 bp, Homo sapien
accacagtgcgggaaataaagtagt

SEQ ID NO: 2105059 - DNA, 25 bp, Homo sapien
tagactgtcctaactttaatgcaag

SEQ ID NO: 2105060 - DNA, 25 bp, Homo sapien
tatcaatttacacgtccatcctcaa

SEQ ID NO: 2105061 - DNA, 25 bp, Homo sapien
tagagaagatgactaccacagtgcg

SEQ ID NO: 2105062 - DNA, 25 bp, Homo sapien
taaaagagtaaagtagtcgcctgag

SEQ ID NO: 2105063 - DNA, 25 bp, Homo sapien
tagtcgcctgagtgtttagctctct

SEQ ID NO: 2105064 - DNA, 25 bp, Homo sapien
taaagtagtcgcctgagtgtttagc

SEQ ID NO: 2105065 - DNA, 25 bp, Homo sapien
agagtaaagtagtcgcctgagtgtt

SEQ ID NO: 2105066 - DNA, 25 bp, Homo sapien
agcattgggtacattaatattacta

SEQ ID NO: 2105067 - DNA, 25 bp, Homo sapien
tattgtaagcgtaattaagaaggtg

SEQ ID NO: 2105068 - DNA, 25 bp, Homo sapien
ttactattgtaagcgtaattaagaa

SEQ ID NO: 2105069 - DNA, 25 bp, Homo sapien
gcattgggtacattaatattactat

SEQ ID NO: 2105070 - DNA, 25 bp, Homo sapien
ttgaaaggccagtaactcctttgtc

SEQ ID NO: 2105071 - DNA, 25 bp, Homo sapien
caaggtggccctctaagatcgtctc

SEQ ID NO: 2105072 - DNA, 25 bp, Homo sapien
agatcgtctcttcaatacccgtttc

SEQ ID NO: 2105073 - DNA, 25 bp, Homo sapien
taactcctttgtcactccaaggtgg

SEQ ID NO: 2105074 - DNA, 25 bp, Homo sapien
attggatgcaggaaatatgaaatca

SEQ ID NO: 2105075 - DNA, 25 bp, Homo sapien
taaacattggatgcaggaaatatga

SEQ ID NO: 2105076 - DNA, 25 bp, Homo sapien
aacattggatgcaggaaatatgaaa

SEQ ID NO: 2105077 - DNA, 25 bp, Homo sapien
cattggatgcaggaaatatgaaatc

SEQ ID NO: 2105078 - DNA, 25 bp, Homo sapien
caaagaatctactatttgtttgaga

SEQ ID NO: 2105079 - DNA, 25 bp, Homo sapien
aaaaccagcattaattgtaggtggt

SEQ ID NO: 2105080 - DNA, 25 bp, Homo sapien
tggtgaaccacagaccggaatagcc

SEQ ID NO: 2105081 - DNA, 25 bp, Homo sapien
cacagaccggaatagcctgttcagc

SEQ ID NO: 2105082 - DNA, 25 bp, Homo sapien
gagaaggaaagattcttgtagcatg

SEQ ID NO: 2105083 - DNA, 25 bp, Homo sapien
aaagattcttgtagcatgaacacgg

SEQ ID NO: 2105084 - DNA, 25 bp, Homo sapien
aaggaaagattcttgtagcatgaac

SEQ ID NO: 2105085 - DNA, 25 bp, Homo sapien
tgagagaaggaaagattcttgtagc

SEQ ID NO: 2105086 - DNA, 25 bp, Homo sapien
tccaacaggtggcagatattcccac

SEQ ID NO: 2105087 - DNA, 25 bp, Homo sapien
caacaggtggcagatattcccactc

SEQ ID NO: 2105088 - DNA, 25 bp, Homo sapien
aggtggcagatattcccactcagta

SEQ ID NO: 2105089 - DNA, 25 bp, Homo sapien
gggtccaacaggtggcagatattcc

SEQ ID NO: 2105090 - DNA, 25 bp, Homo sapien
tcatcatctacatcactacctgtgc

SEQ ID NO: 2105091 - DNA, 25 bp, Homo sapien
ttcaatggcaagaataccgttccta

SEQ ID NO: 2105092 - DNA, 25 bp, Homo sapien
ttctcatccccagacatatcatcat

SEQ ID NO: 2105093 - DNA, 25 bp, Homo sapien
gtagcaccggcatttttcagcccca

SEQ ID NO: 2105094 - DNA, 25 bp, Homo sapien
taataaaatacgttgagacaaatgc

SEQ ID NO: 2105095 - DNA, 25 bp, Homo sapien
tacgttgagacaaatgccaagcagt

SEQ ID NO: 2105096 - DNA, 25 bp, Homo sapien
tcaccaatgagctaaagtataataa

SEQ ID NO: 2105097 - DNA, 25 bp, Homo sapien
aaatgccaagcagttattgaacaaa

SEQ ID NO: 2105098 - DNA, 25 bp, Homo sapien
gttgtactcttttctatcttcagtt

SEQ ID NO: 2105099 - DNA, 25 bp, Homo sapien
cacatagtattgcagtcgagaagca

SEQ ID NO: 2105100 - DNA, 25 bp, Homo sapien
ttgcagtcgagaagcagctaaatga

SEQ ID NO: 2105101 - DNA, 25 bp, Homo sapien
cctctgggcacatagtattgcagtc

SEQ ID NO: 2105102 - DNA, 25 bp, Homo sapien
gaagtatctctattactgtccatcc

SEQ ID NO: 2105103 - DNA, 25 bp, Homo sapien
gactaaaggatgttgcccttactta

SEQ ID NO: 2105104 - DNA, 25 bp, Homo sapien
ggacagtttgaatattaccagtgct

SEQ ID NO: 2105105 - DNA, 25 bp, Homo sapien
ccttacttactatggcagtttctac

SEQ ID NO: 2105106 - DNA, 25 bp, Homo sapien
aagcatcgtgttgttcacgcagatt

SEQ ID NO: 2105107 - DNA, 25 bp, Homo sapien
gaacctcctaagactttacttagca

SEQ ID NO: 2105108 - DNA, 25 bp, Homo sapien
gcatagctggatgtcctaaagcttt

SEQ ID NO: 2105109 - DNA, 25 bp, Homo sapien
gtgttgttcacgcagattaacaggc

SEQ ID NO: 2105110 - DNA, 25 bp, Homo sapien
gccccacagcagtaaggtatgcaaa

SEQ ID NO: 2105111 - DNA, 25 bp, Homo sapien
tatgagttacgaccatgccactgaa

SEQ ID NO: 2105112 - DNA, 25 bp, Homo sapien
aagaatgtaagagtaggccaggcgc

SEQ ID NO: 2105113 - DNA, 25 bp, Homo sapien
taaaatggctaagagatcaggcaga

SEQ ID NO: 2105114 - DNA, 25 bp, Homo sapien
tgatttctaatgtctacgtttaggg

SEQ ID NO: 2105115 - DNA, 25 bp, Homo sapien
ccttctagtaaatctcctttgacat

SEQ ID NO: 2105116 - DNA, 25 bp, Homo sapien
ggtgatttctaatgtctacgtttag

SEQ ID NO: 2105117 - DNA, 25 bp, Homo sapien
ttggtgatttctaatgtctacgttt

SEQ ID NO: 2105118 - DNA, 25 bp, Homo sapien
tgacttgtgaggatgaaccaaaaaa

SEQ ID NO: 2105119 - DNA, 25 bp, Homo sapien
catattgactacttctctgctacca

SEQ ID NO: 2105120 - DNA, 25 bp, Homo sapien
gagaatgtgctatcacgttatgact

SEQ ID NO: 2105121 - DNA, 25 bp, Homo sapien
tcttgacaagtaatcctggacatga

SEQ ID NO: 2105122 - DNA, 25 bp, Homo sapien
ctgtttgatgtttactgttgttccc

SEQ ID NO: 2105123 - DNA, 25 bp, Homo sapien
ttgatgtttactgttgttcccacga

SEQ ID NO: 2105124 - DNA, 25 bp, Homo sapien
gtttgatgtttactgttgttcccac

SEQ ID NO: 2105125 - DNA, 25 bp, Homo sapien
atgtttactgttgttcccacgaagg

SEQ ID NO: 2105126 - DNA, 25 bp, Homo sapien
gctttgcgacacctgcaactgtgta

SEQ ID NO: 2105127 - DNA, 25 bp, Homo sapien
tgtacgagcacacccacaagtctgt

SEQ ID NO: 2105128 - DNA, 25 bp, Homo sapien
ttctggcgcctgtatgacatacgct

SEQ ID NO: 2105129 - DNA, 25 bp, Homo sapien
tcagcaagcgctttacggtatcaac

SEQ ID NO: 2105130 - DNA, 25 bp, Homo sapien
ctggcagagccacggactactttct

SEQ ID NO: 2105131 - DNA, 25 bp, Homo sapien
tctttgtgtgaaatcctgtagtaaa

SEQ ID NO: 2105132 - DNA, 25 bp, Homo sapien
gttgaatactgatcatagtgatttc

SEQ ID NO: 2105133 - DNA, 25 bp, Homo sapien
gaacctagcagcaagttgaatactg

SEQ ID NO: 2105134 - DNA, 25 bp, Homo sapien
aaggagaatacacaatgcatcatac

SEQ ID NO: 2105135 - DNA, 25 bp, Homo sapien
aacattaaaaaggacgttatgagca

SEQ ID NO: 2105136 - DNA, 25 bp, Homo sapien
gacatgcacatatgctgatacaggc

SEQ ID NO: 2105137 - DNA, 25 bp, Homo sapien
ggtaaacatatcaagtggatgcaca

SEQ ID NO: 2105138 - DNA, 25 bp, Homo sapien
tatggaaggactgatcacacaaact

SEQ ID NO: 2105139 - DNA, 25 bp, Homo sapien
taagctactgcatgtaaccgaacag

SEQ ID NO: 2105140 - DNA, 25 bp, Homo sapien
ctcaagagatttagtactgctctta

SEQ ID NO: 2105141 - DNA, 25 bp, Homo sapien
taagtgatcactcaagcttaagttg

SEQ ID NO: 2105142 - DNA, 25 bp, Homo sapien
cactcaagcttaagttgtcataagc

SEQ ID NO: 2105143 - DNA, 25 bp, Homo sapien
tactgctcttagtaagtgatcactc

SEQ ID NO: 2105144 - DNA, 25 bp, Homo sapien
tgtggttggtgggataacctagccc

SEQ ID NO: 2105145 - DNA, 25 bp, Homo sapien
tcatattaaggtttacaggccctac

SEQ ID NO: 2105146 - DNA, 25 bp, Homo sapien
tagagatgttggtatatgcactgcc

SEQ ID NO: 2105147 - DNA, 25 bp, Homo sapien
tgtctcagaccctgctatagagatg

SEQ ID NO: 2105148 - DNA, 25 bp, Homo sapien
tgcaacagcggatcagctgtgacac

SEQ ID NO: 2105149 - DNA, 25 bp, Homo sapien
tgacactactgagtataatttgcct

SEQ ID NO: 2105150 - DNA, 25 bp, Homo sapien
tgaagagacattgcaacagcggatc

SEQ ID NO: 2105151 - DNA, 25 bp, Homo sapien
gactgcattcttgaagagacattgc

SEQ ID NO: 2105152 - DNA, 25 bp, Homo sapien
tcaccaaaaggattgggaagaggag

SEQ ID NO: 2105153 - DNA, 25 bp, Homo sapien
acgaagcaatttgacggtttcctct

SEQ ID NO: 2105154 - DNA, 25 bp, Homo sapien
gaagcaatttgacggtttcctctga

SEQ ID NO: 2105155 - DNA, 25 bp, Homo sapien
tgtgataaattaggatcaccaaaag

SEQ ID NO: 2105156 - DNA, 25 bp, Homo sapien
aaaacaagtaagacatggtgagtaa

SEQ ID NO: 2105157 - DNA, 25 bp, Homo sapien
gagtaacttaatgaaaggaataaca

SEQ ID NO: 2105158 - DNA, 25 bp, Homo sapien
gacatggtgagtaacttaatgaaag

SEQ ID NO: 2105159 - DNA, 25 bp, Homo sapien
caagtaagacatggtgagtaactta

SEQ ID NO: 2105160 - DNA, 25 bp, Homo sapien
gggccgcagttcataggtataggaa

SEQ ID NO: 2105161 - DNA, 25 bp, Homo sapien
gcagatccaaatagggccgcagttc

SEQ ID NO: 2105162 - DNA, 25 bp, Homo sapien
caaatagggccgcagttcataggta

SEQ ID NO: 2105163 - DNA, 25 bp, Homo sapien
aaaagcagatccaaatagggccgca

SEQ ID NO: 2105164 - DNA, 25 bp, Homo sapien
taacacctgggcaagcctaattgtt

SEQ ID NO: 2105165 - DNA, 25 bp, Homo sapien
tgaaacttaggcagtgagaaaaaag

SEQ ID NO: 2105166 - DNA, 25 bp, Homo sapien
ttaccaaatgcccaagctagctcct

SEQ ID NO: 2105167 - DNA, 25 bp, Homo sapien
cattcactagaactccaataggtta

SEQ ID NO: 2105168 - DNA, 25 bp, Homo sapien
gcagtgctgtcaactaataccataa

SEQ ID NO: 2105169 - DNA, 25 bp, Homo sapien
tgggaggcaaactgcgacatagact

SEQ ID NO: 2105170 - DNA, 25 bp, Homo sapien
tattaccttggcagatgggaggcaa

SEQ ID NO: 2105171 - DNA, 25 bp, Homo sapien
aattctagtgaaagtttgagggcca

SEQ ID NO: 2105172 - DNA, 25 bp, Homo sapien
attcttagagcgctggattgtgtca

SEQ ID NO: 2105173 - DNA, 25 bp, Homo sapien
ctgcaggatttggtaagcaacagga

SEQ ID NO: 2105174 - DNA, 25 bp, Homo sapien
caacaggacagttactaaatagagc

SEQ ID NO: 2105175 - DNA, 25 bp, Homo sapien
gattgtgtcaaacagcccatctcgg

SEQ ID NO: 2105176 - DNA, 25 bp, Homo sapien
ggacgtttcattgctttgcactggg

SEQ ID NO: 2105177 - DNA, 25 bp, Homo sapien
cattggacgtttcattgctttgcac

SEQ ID NO: 2105178 - DNA, 25 bp, Homo sapien
aaataaccattggacgtttcattgc

SEQ ID NO: 2105179 - DNA, 25 bp, Homo sapien
accattggacgtttcattgctttgc

SEQ ID NO: 2105180 - DNA, 25 bp, Homo sapien
catttctatctgctgcacactggtg

SEQ ID NO: 2105181 - DNA, 25 bp, Homo sapien
ctatctgctgcacactggtggcttt

SEQ ID NO: 2105182 - DNA, 25 bp, Homo sapien
ttctatctgctgcacactggtggct

SEQ ID NO: 2105183 - DNA, 25 bp, Homo sapien
ttccatttctatctgctgcacactg

SEQ ID NO: 2105184 - DNA, 25 bp, Homo sapien
tttgcattctctcagaactactaca

SEQ ID NO: 2105185 - DNA, 25 bp, Homo sapien
tcaagataaaaaattacgtaggcaa

SEQ ID NO: 2105186 - DNA, 25 bp, Homo sapien
tgatttgcattctctcagaactact

SEQ ID NO: 2105187 - DNA, 25 bp, Homo sapien
ccaaaagaaagctcccttcattagc

SEQ ID NO: 2105188 - DNA, 25 bp, Homo sapien
tcttcaggtggaggcgactcatgtt

SEQ ID NO: 2105189 - DNA, 25 bp, Homo sapien
gcatcttcaggtggaggcgactcat

SEQ ID NO: 2105190 - DNA, 25 bp, Homo sapien
tcaggtggaggcgactcatgttcat

SEQ ID NO: 2105191 - DNA, 25 bp, Homo sapien
caggtggaggcgactcatgttcatc

SEQ ID NO: 2105192 - DNA, 25 bp, Homo sapien
ttaaaatgtctgaaccctacagtgc

SEQ ID NO: 2105193 - DNA, 25 bp, Homo sapien
gatatataggagcagtaaccctgaa

SEQ ID NO: 2105194 - DNA, 25 bp, Homo sapien
ggattaacccactgttgctcttggt

SEQ ID NO: 2105195 - DNA, 25 bp, Homo sapien
taaccctgaactcacaataatgctg

SEQ ID NO: 2105196 - DNA, 25 bp, Homo sapien
gctgctgggcctgtatatggctgtc

SEQ ID NO: 2105197 - DNA, 25 bp, Homo sapien
ttttcttgtgctcgttggccagttc

SEQ ID NO: 2105198 - DNA, 25 bp, Homo sapien
tcattgatccttggtttgaggtggg

SEQ ID NO: 2105199 - DNA, 25 bp, Homo sapien
gccagttctctgagggttgttcatg

SEQ ID NO: 2105200 - DNA, 25 bp, Homo sapien
tgatggaaccagttaattatgtgca

SEQ ID NO: 2105201 - DNA, 25 bp, Homo sapien
gacagtgaataaactctccactcca

SEQ ID NO: 2105202 - DNA, 25 bp, Homo sapien
tgcaggcgggttatatattgacagc

SEQ ID NO: 2105203 - DNA, 25 bp, Homo sapien
actatacactttccactgcaggcgg

SEQ ID NO: 2105204 - DNA, 25 bp, Homo sapien
taaaggagctgatccaactgccatg

SEQ ID NO: 2105205 - DNA, 25 bp, Homo sapien
catgaaactattggtgtggctgaca

SEQ ID NO: 2105206 - DNA, 25 bp, Homo sapien
tatgtgcaactgaaaatagactgtc

SEQ ID NO: 2105207 - DNA, 25 bp, Homo sapien
taagtgttctttattccacccagag

SEQ ID NO: 2105208 - DNA, 25 bp, Homo sapien
tagagggccaaaggtcaaatctttc

SEQ ID NO: 2105209 - DNA, 25 bp, Homo sapien
tctcaaaatcttcagtagagggcca

SEQ ID NO: 2105210 - DNA, 25 bp, Homo sapien
cctgaatcagtgtcatgcctaggca

SEQ ID NO: 2105211 - DNA, 25 bp, Homo sapien
gctttgttcagttccaagtgtagcc

SEQ ID NO: 2105212 - DNA, 25 bp, Homo sapien
ggtgtcaaaatgtcctacaggaaca

SEQ ID NO: 2105213 - DNA, 25 bp, Homo sapien
gaagcacaggttgactatacagtac

SEQ ID NO: 2105214 - DNA, 25 bp, Homo sapien
tacaggaacacctagaagcacaggt

SEQ ID NO: 2105215 - DNA, 25 bp, Homo sapien
gttggaattgcaaacaccgtgtgtg

SEQ ID NO: 2105216 - DNA, 25 bp, Homo sapien
cttagatacaatagggcaaaagccc

SEQ ID NO: 2105217 - DNA, 25 bp, Homo sapien
caaaggaagactggcgattccgcaa

SEQ ID NO: 2105218 - DNA, 25 bp, Homo sapien
ctaaataaggcaggatatatccacc

SEQ ID NO: 2105219 - DNA, 25 bp, Homo sapien
tcctttatcggcagtatgtagtacc

SEQ ID NO: 2105220 - DNA, 25 bp, Homo sapien
gcctctggttcaagttactctcgtg

SEQ ID NO: 2105221 - DNA, 25 bp, Homo sapien
cagctgaaccatactggcagagcaa

SEQ ID NO: 2105222 - DNA, 25 bp, Homo sapien
taacatagggagtgctttgacaggc

SEQ ID NO: 2105223 - DNA, 25 bp, Homo sapien
cagagactagtccagggcagctgaa

SEQ ID NO: 2105224 - DNA, 25 bp, Homo sapien
gccaaacttcagaatttagtaggag

SEQ ID NO: 2105225 - DNA, 25 bp, Homo sapien
gaatgagagggacatcctgtagcca

SEQ ID NO: 2105226 - DNA, 25 bp, Homo sapien
catagcggaacagcagttaaaagcc

SEQ ID NO: 2105227 - DNA, 25 bp, Homo sapien
gctgcttttgtgatgagtattgccc

SEQ ID NO: 2105228 - DNA, 25 bp, Homo sapien
gagtcagggtacaacctgctatcac

SEQ ID NO: 2105229 - DNA, 25 bp, Homo sapien
atttggatggattggtgctgagtca

SEQ ID NO: 2105230 - DNA, 25 bp, Homo sapien
tgctgagtcagggtacaacctgcta

SEQ ID NO: 2105231 - DNA, 25 bp, Homo sapien
cacattttaaagctgctaaaggatt

SEQ ID NO: 2105232 - DNA, 25 bp, Homo sapien
tctcttgccatgacaattgagtgga

SEQ ID NO: 2105233 - DNA, 25 bp, Homo sapien
ttgccatgacaattgagtggagggt

SEQ ID NO: 2105234 - DNA, 25 bp, Homo sapien
tcttgccatgacaattgagtggagg

SEQ ID NO: 2105235 - DNA, 25 bp, Homo sapien
acaattgagtggagggtgggacagt

SEQ ID NO: 2105236 - DNA, 25 bp, Homo sapien
gacaacaaggcacagcgccttggcc

SEQ ID NO: 2105237 - DNA, 25 bp, Homo sapien
acaacaaggcacagcgccttggcca

SEQ ID NO: 2105238 - DNA, 25 bp, Homo sapien
caagcacctatcctggggggcctgt

SEQ ID NO: 2105239 - DNA, 25 bp, Homo sapien
caacaaggcacagcgccttggccag

SEQ ID NO: 2105240 - DNA, 25 bp, Homo sapien
ttgatttcgggtgtctggcacctgc

SEQ ID NO: 2105241 - DNA, 25 bp, Homo sapien
tgacgcggggatgcttgtgaccagg

SEQ ID NO: 2105242 - DNA, 25 bp, Homo sapien
ggtgttcatcagctgacgcggggat

SEQ ID NO: 2105243 - DNA, 25 bp, Homo sapien
actcctcttgatttcgggtgtctgg

SEQ ID NO: 2105244 - DNA, 25 bp, Homo sapien
atatgtcaacaagcctagcctcgcg

SEQ ID NO: 2105245 - DNA, 25 bp, Homo sapien
caggtgccgcttagttcctaacgga

SEQ ID NO: 2105246 - DNA, 25 bp, Homo sapien
taacggatgcgcgtgatagaaccgg

SEQ ID NO: 2105247 - DNA, 25 bp, Homo sapien
gaggacgccgccagcaagaaatatg

SEQ ID NO: 2105248 - DNA, 25 bp, Homo sapien
gcgtacccgtatgcctcttatattt

SEQ ID NO: 2105249 - DNA, 25 bp, Homo sapien
tctggcgtacccgtatgcctcttat

SEQ ID NO: 2105250 - DNA, 25 bp, Homo sapien
catctggcgtacccgtatgcctctt

SEQ ID NO: 2105251 - DNA, 25 bp, Homo sapien
tggcgtacccgtatgcctcttatat

SEQ ID NO: 2105252 - DNA, 25 bp, Homo sapien
tgagtccagtaagaagcaattctta

SEQ ID NO: 2105253 - DNA, 25 bp, Homo sapien
attgcactgctgacgctgagtccag

SEQ ID NO: 2105254 - DNA, 25 bp, Homo sapien
gaattgcactgctgacgctgagtcc

SEQ ID NO: 2105255 - DNA, 25 bp, Homo sapien
agtaagaagcaattcttactgctgg

SEQ ID NO: 2105256 - DNA, 25 bp, Homo sapien
gaaatagtgtctaatggcagagccc

SEQ ID NO: 2105257 - DNA, 25 bp, Homo sapien
tatctgttggctacaccttgatctg

SEQ ID NO: 2105258 - DNA, 25 bp, Homo sapien
cttgatctgccctgagcctttggga

SEQ ID NO: 2105259 - DNA, 25 bp, Homo sapien
ccccggcagttctgtggacccttgt

SEQ ID NO: 2105260 - DNA, 25 bp, Homo sapien
gcatggtgtggaggtatcgccctac

SEQ ID NO: 2105261 - DNA, 25 bp, Homo sapien
ggcatggtgtggaggtatcgcccta

SEQ ID NO: 2105262 - DNA, 25 bp, Homo sapien
gggcatggtgtggaggtatcgccct

SEQ ID NO: 2105263 - DNA, 25 bp, Homo sapien
cttgccaccccggacttggggactg

SEQ ID NO: 2105264 - DNA, 25 bp, Homo sapien
gggactgggggcttctgcactgttg

SEQ ID NO: 2105265 - DNA, 25 bp, Homo sapien
gcgagggagagccttgtcgcacctc

SEQ ID NO: 2105266 - DNA, 25 bp, Homo sapien
ccttttccgtggttgcagcgaggga

SEQ ID NO: 2105267 - DNA, 25 bp, Homo sapien
cctacagcggtttgtaatggaggct

SEQ ID NO: 2105268 - DNA, 25 bp, Homo sapien
aagatggatgcagggattcaacgac

SEQ ID NO: 2105269 - DNA, 25 bp, Homo sapien
ttaaatccgcaacgatcacagccca

SEQ ID NO: 2105270 - DNA, 25 bp, Homo sapien
gccatctccgcttccacagtgtggt

SEQ ID NO: 2105271 - DNA, 25 bp, Homo sapien
ttcagcggtgcacgcggggccatct

SEQ ID NO: 2105272 - DNA, 25 bp, Homo sapien
tgtggtgtttaaatccgcaacgatc

SEQ ID NO: 2105273 - DNA, 25 bp, Homo sapien
cattttttctgcagcctggcatcgg

SEQ ID NO: 2105274 - DNA, 25 bp, Homo sapien
tggcctcgaggtcggagaactcgca

SEQ ID NO: 2105275 - DNA, 25 bp, Homo sapien
ctggcatcgggaaccggaacgtttg

SEQ ID NO: 2105276 - DNA, 25 bp, Homo sapien
cagaatcttacagtgcggaggcgac

SEQ ID NO: 2105277 - DNA, 25 bp, Homo sapien
caatcctaaattcctgggcaagggg

SEQ ID NO: 2105278 - DNA, 25 bp, Homo sapien
ccaatcctaaattcctgggcaaggg

SEQ ID NO: 2105279 - DNA, 25 bp, Homo sapien
cccaatcctaaattcctgggcaagg

SEQ ID NO: 2105280 - DNA, 25 bp, Homo sapien
aataaggaggcgatgagtgtttgca

SEQ ID NO: 2105281 - DNA, 25 bp, Homo sapien
tctcgtcacggcagatggaatcacg

SEQ ID NO: 2105282 - DNA, 25 bp, Homo sapien
agagcgccgctggactctcgtcacg

SEQ ID NO: 2105283 - DNA, 25 bp, Homo sapien
catggctttgcttcaatgcagagcg

SEQ ID NO: 2105284 - DNA, 25 bp, Homo sapien
ctgccaatggcacaatgattatgac

SEQ ID NO: 2105285 - DNA, 25 bp, Homo sapien
ctcaccaaggactaagtttttcagg

SEQ ID NO: 2105286 - DNA, 25 bp, Homo sapien
ctttctctcaccaaggactaagttt

SEQ ID NO: 2105287 - DNA, 25 bp, Homo sapien
caaggactaagtttttcaggtctat

SEQ ID NO: 2105288 - DNA, 25 bp, Homo sapien
ctaagtttttcaggtctatttccat

SEQ ID NO: 2105289 - DNA, 25 bp, Homo sapien
tcaatcaggggtagtcatagacctg

SEQ ID NO: 2105290 - DNA, 25 bp, Homo sapien
ctaggtaagccgtggagctcttcct

SEQ ID NO: 2105291 - DNA, 25 bp, Homo sapien
tgtgcatgggggtcactagccccat

SEQ ID NO: 2105292 - DNA, 25 bp, Homo sapien
gggtagtcatagacctgagcagcct

SEQ ID NO: 2105293 - DNA, 25 bp, Homo sapien
tagaatccataaacgcgctgactgg

SEQ ID NO: 2105294 - DNA, 25 bp, Homo sapien
gactgcgagggaactggcatctgaa

SEQ ID NO: 2105295 - DNA, 25 bp, Homo sapien
cagacattctgcgttgcagggagaa

SEQ ID NO: 2105296 - DNA, 25 bp, Homo sapien
gctttgctcccaggttgctagggta

SEQ ID NO: 2105297 - DNA, 25 bp, Homo sapien
ggaggaagctaactcccagcaacct

SEQ ID NO: 2105298 - DNA, 25 bp, Homo sapien
ggctccggaggaagctaactcccag

SEQ ID NO: 2105299 - DNA, 25 bp, Homo sapien
tccggaggaagctaactcccagcaa

SEQ ID NO: 2105300 - DNA, 25 bp, Homo sapien
cccttgagcaaagggaccttggagg

SEQ ID NO: 2105301 - DNA, 25 bp, Homo sapien
gcaggggctctgctttctcgtaaat

SEQ ID NO: 2105302 - DNA, 25 bp, Homo sapien
aggggctctgctttctcgtaaatcc

SEQ ID NO: 2105303 - DNA, 25 bp, Homo sapien
gagcaggggctctgctttctcgtaa

SEQ ID NO: 2105304 - DNA, 25 bp, Homo sapien
agagcaggggctctgctttctcgta

SEQ ID NO: 2105305 - DNA, 25 bp, Homo sapien
ccgagatcagatgggtttgggtgca

SEQ ID NO: 2105306 - DNA, 25 bp, Homo sapien
gcttccgagatcagatgggtttggg

SEQ ID NO: 2105307 - DNA, 25 bp, Homo sapien
attcagggtggtatggccgtagacc

SEQ ID NO: 2105308 - DNA, 25 bp, Homo sapien
cattcagggtggtatggccgtagac

SEQ ID NO: 2105309 - DNA, 25 bp, Homo sapien
ttcaccattctctctgctcaccgcc

SEQ ID NO: 2105310 - DNA, 25 bp, Homo sapien
cttcaccattctctctgctcaccgc

SEQ ID NO: 2105311 - DNA, 25 bp, Homo sapien
caccattctctctgctcaccgccat

SEQ ID NO: 2105312 - DNA, 25 bp, Homo sapien
tcaccattctctctgctcaccgcca

SEQ ID NO: 2105313 - DNA, 25 bp, Homo sapien
aaggactggaatgaggtgatccgtt

SEQ ID NO: 2105314 - DNA, 25 bp, Homo sapien
gaatgaggtgatccgtttctcgcgc

SEQ ID NO: 2105315 - DNA, 25 bp, Homo sapien
cccagtcaactttgtcaattctgag

SEQ ID NO: 2105316 - DNA, 25 bp, Homo sapien
ctgtcacagatggactcccagtcaa

SEQ ID NO: 2105317 - DNA, 25 bp, Homo sapien
taggggaactgtttctccagaaaga

SEQ ID NO: 2105318 - DNA, 25 bp, Homo sapien
tctgtaagtagttgtgatcagctag

SEQ ID NO: 2105319 - DNA, 25 bp, Homo sapien
ctagtgcctatccagtcacgatggc

SEQ ID NO: 2105320 - DNA, 25 bp, Homo sapien
caaggtcattgcagacctagtgcct

SEQ ID NO: 2105321 - DNA, 25 bp, Homo sapien
agtcacgatggctcctatcctccat

SEQ ID NO: 2105322 - DNA, 25 bp, Homo sapien
tgaacacagtcctgttgtgccattt

SEQ ID NO: 2105323 - DNA, 25 bp, Homo sapien
gggtccagctgatccatacttttct

SEQ ID NO: 2105324 - DNA, 25 bp, Homo sapien
tagtgaatttcatgattgtcagtca

SEQ ID NO: 2105325 - DNA, 25 bp, Homo sapien
agtcatttttctgcaaggtccaggg

SEQ ID NO: 2105326 - DNA, 25 bp, Homo sapien
catacttttctttagggtggatttg

SEQ ID NO: 2105327 - DNA, 25 bp, Homo sapien
accgtcggtggaacctcttcctgtg

SEQ ID NO: 2105328 - DNA, 25 bp, Homo sapien
ccgtcggtggaacctcttcctgtgg

SEQ ID NO: 2105329 - DNA, 25 bp, Homo sapien
ctaccgtcggtggaacctcttcctg

SEQ ID NO: 2105330 - DNA, 25 bp, Homo sapien
caagggtgtcgggaatgtttgtagc

SEQ ID NO: 2105331 - DNA, 25 bp, Homo sapien
tgtttgtagccggtgcaacctgggc

SEQ ID NO: 2105332 - DNA, 25 bp, Homo sapien
tagccggtgcaacctgggcctgccg

SEQ ID NO: 2105333 - DNA, 25 bp, Homo sapien
tcgggaatgtttgtagccggtgcaa

SEQ ID NO: 2105334 - DNA, 25 bp, Homo sapien
gattcccgaaactgagagggcggca

SEQ ID NO: 2105335 - DNA, 25 bp, Homo sapien
tcaggtctaagctcaagggatttcc

SEQ ID NO: 2105336 - DNA, 25 bp, Homo sapien
gagtgtttgttccaccgcgaaggcc

SEQ ID NO: 2105337 - DNA, 25 bp, Homo sapien
taaaaccctagtctcagcctcggag

SEQ ID NO: 2105338 - DNA, 25 bp, Homo sapien
cagcccgagcgcattttccactgcc

SEQ ID NO: 2105339 - DNA, 25 bp, Homo sapien
tggtccagcccgagcgcattttcca

SEQ ID NO: 2105340 - DNA, 25 bp, Homo sapien
gtccagcccgagcgcattttccact

SEQ ID NO: 2105341 - DNA, 25 bp, Homo sapien
ctggtccagcccgagcgcattttcc

SEQ ID NO: 2105342 - DNA, 25 bp, Homo sapien
tcgcaggcacgcaaacaccgggtgc

SEQ ID NO: 2105343 - DNA, 25 bp, Homo sapien
aggccgaagccctccaagccaaaag

SEQ ID NO: 2105344 - DNA, 25 bp, Homo sapien
tcactaatcagtcgggattcgcgca

SEQ ID NO: 2105345 - DNA, 25 bp, Homo sapien
ggaatccaggctgcgccagccgtga

SEQ ID NO: 2105346 - DNA, 25 bp, Homo sapien
gtatgatacggccaaaccgcatgca

SEQ ID NO: 2105347 - DNA, 25 bp, Homo sapien
taaatggcacaactggcgttcaatg

SEQ ID NO: 2105348 - DNA, 25 bp, Homo sapien
tgaagcgaaaaagccagcggaagga

SEQ ID NO: 2105349 - DNA, 25 bp, Homo sapien
tgtgccactaaacttcgtctcagga

SEQ ID NO: 2105350 - DNA, 25 bp, Homo sapien
ttatctgaagagttcaggtctaggc

SEQ ID NO: 2105351 - DNA, 25 bp, Homo sapien
gattatctgaagagttcaggtctag

SEQ ID NO: 2105352 - DNA, 25 bp, Homo sapien
atctgaagagttcaggtctaggcca

SEQ ID NO: 2105353 - DNA, 25 bp, Homo sapien
ctgaagagttcaggtctaggccagc

SEQ ID NO: 2105354 - DNA, 25 bp, Homo sapien
gctgttcttgcctaaaaatgaggac

SEQ ID NO: 2105355 - DNA, 25 bp, Homo sapien
tatgcgagcaggagtacagcctaga

SEQ ID NO: 2105356 - DNA, 25 bp, Homo sapien
tcaggagaaaggagtagctataacc

SEQ ID NO: 2105357 - DNA, 25 bp, Homo sapien
tatcagaaaggcacagctattcggg

SEQ ID NO: 2105358 - DNA, 25 bp, Homo sapien
atatataaaattaattaaatgccaa

SEQ ID NO: 2105359 - DNA, 25 bp, Homo sapien
tatatataaaattaattaaatgcca

SEQ ID NO: 2105360 - DNA, 25 bp, Homo sapien
tatataaaattaattaaatgccaaa

SEQ ID NO: 2105361 - DNA, 25 bp, Homo sapien
cttaaatgaggaggaatatagcgcc

SEQ ID NO: 2105362 - DNA, 25 bp, Homo sapien
cgcattatgacgttgtgtgaccata

SEQ ID NO: 2105363 - DNA, 25 bp, Homo sapien
tctaagtggtcaacagctttgcctg

SEQ ID NO: 2105364 - DNA, 25 bp, Homo sapien
tacactaaatcaagcaatctgacag

SEQ ID NO: 2105365 - DNA, 25 bp, Homo sapien
caatgaatactacctctaagtggtc

SEQ ID NO: 2105366 - DNA, 25 bp, Homo sapien
cctcttgaatcactacgagatccaa

SEQ ID NO: 2105367 - DNA, 25 bp, Homo sapien
tcactacgagatccaaaactgctat

SEQ ID NO: 2105368 - DNA, 25 bp, Homo sapien
gaatcactacgagatccaaaactgc

SEQ ID NO: 2105369 - DNA, 25 bp, Homo sapien
tacgagatccaaaactgctatacgc

SEQ ID NO: 2105370 - DNA, 25 bp, Homo sapien
tgccaatgccatcgtaatcactccg

SEQ ID NO: 2105371 - DNA, 25 bp, Homo sapien
gtttccaccacgttcaaatttgcca

SEQ ID NO: 2105372 - DNA, 25 bp, Homo sapien
tctgatttgtcacaccagcgactgt

SEQ ID NO: 2105373 - DNA, 25 bp, Homo sapien
agcgactgtttccaccacgttcaaa

SEQ ID NO: 2105374 - DNA, 25 bp, Homo sapien
catttgttatactagctagtaaggc

SEQ ID NO: 2105375 - DNA, 25 bp, Homo sapien
tactagctagtaaggcttcatcaca

SEQ ID NO: 2105376 - DNA, 25 bp, Homo sapien
ggcttcatcacaagtaacatacact

SEQ ID NO: 2105377 - DNA, 25 bp, Homo sapien
ggataagttcatttgttatactagc

SEQ ID NO: 2105378 - DNA, 25 bp, Homo sapien
gacagttgttgcctgttgcctcaac

SEQ ID NO: 2105379 - DNA, 25 bp, Homo sapien
tctcaaaattaatcccagtgttgcc

SEQ ID NO: 2105380 - DNA, 25 bp, Homo sapien
atgtggaggacagttgttgcctgtt

SEQ ID NO: 2105381 - DNA, 25 bp, Homo sapien
ttgcctcaactggaatgtcatcgta

SEQ ID NO: 2105382 - DNA, 25 bp, Homo sapien
tatgaagcctctggtctacatgact

SEQ ID NO: 2105383 - DNA, 25 bp, Homo sapien
cattggagaagactttgggttgttc

SEQ ID NO: 2105384 - DNA, 25 bp, Homo sapien
cccaggcttactgcacattggagaa

SEQ ID NO: 2105385 - DNA, 25 bp, Homo sapien
tacatgactttatgaagcccatctc

SEQ ID NO: 2105386 - DNA, 25 bp, Homo sapien
tgataataggaatagcatgcttttg

SEQ ID NO: 2105387 - DNA, 25 bp, Homo sapien
acgagtaagctcaatgtttcccatg

SEQ ID NO: 2105388 - DNA, 25 bp, Homo sapien
ggcgagtataacgagtaagctcaat

SEQ ID NO: 2105389 - DNA, 25 bp, Homo sapien
cactggagttgggcgagtataacga

SEQ ID NO: 2105390 - DNA, 25 bp, Homo sapien
ataaagctcttacggaatacagccg

SEQ ID NO: 2105391 - DNA, 25 bp, Homo sapien
tagatgacagtgttttttaactacc

SEQ ID NO: 2105392 - DNA, 25 bp, Homo sapien
tgctccacctctaagaggagtcagc

SEQ ID NO: 2105393 - DNA, 25 bp, Homo sapien
acagtccaatagcagcgcagagcag

SEQ ID NO: 2105394 - DNA, 25 bp, Homo sapien
tctgaataaatctgactcaagatgg

SEQ ID NO: 2105395 - DNA, 25 bp, Homo sapien
gaccatctgaataaatctgactcaa

SEQ ID NO: 2105396 - DNA, 25 bp, Homo sapien
aatctgactcaagatgggcaacaga

SEQ ID NO: 2105397 - DNA, 25 bp, Homo sapien
ccctcaaagcctcgcctggaccatc

SEQ ID NO: 2105398 - DNA, 25 bp, Homo sapien
ttagaaagccctctcaatggccacc

SEQ ID NO: 2105399 - DNA, 25 bp, Homo sapien
tagattacagattacacttgaaaac

SEQ ID NO: 2105400 - DNA, 25 bp, Homo sapien
agttcatcacaacataattcccttt

SEQ ID NO: 2105401 - DNA, 25 bp, Homo sapien
tcccttttgtaatttatagattaca

SEQ ID NO: 2105402 - DNA, 25 bp, Homo sapien
ttgtttgcggcgcccataccttcca

SEQ ID NO: 2105403 - DNA, 25 bp, Homo sapien
tattgtttgcggcgcccataccttc

SEQ ID NO: 2105404 - DNA, 25 bp, Homo sapien
ttgcggcgcccataccttccatttt

SEQ ID NO: 2105405 - DNA, 25 bp, Homo sapien
gtttgcggcgcccataccttccatt

SEQ ID NO: 2105406 - DNA, 25 bp, Homo sapien
tgtactgccaactctctcgttggtg

SEQ ID NO: 2105407 - DNA, 25 bp, Homo sapien
tcctcgtagatctgtactgccaact

SEQ ID NO: 2105408 - DNA, 25 bp, Homo sapien
tcgtagatctgtactgccaactctc

SEQ ID NO: 2105409 - DNA, 25 bp, Homo sapien
gatctgtactgccaactctctcgtt

SEQ ID NO: 2105410 - DNA, 25 bp, Homo sapien
catcatatccactagacgtcctgga

SEQ ID NO: 2105411 - DNA, 25 bp, Homo sapien
tatccactagacgtcctggagtggc

SEQ ID NO: 2105412 - DNA, 25 bp, Homo sapien
catatccactagacgtcctggagtg

SEQ ID NO: 2105413 - DNA, 25 bp, Homo sapien
tcatatccactagacgtcctggagt

SEQ ID NO: 2105414 - DNA, 25 bp, Homo sapien
agtatcttgttcgactattctacga

SEQ ID NO: 2105415 - DNA, 25 bp, Homo sapien
tgttcgactattctacgaatctgag

SEQ ID NO: 2105416 - DNA, 25 bp, Homo sapien
actattctacgaatctgaggctcaa

SEQ ID NO: 2105417 - DNA, 25 bp, Homo sapien
catagtatcttgttcgactattcta

SEQ ID NO: 2105418 - DNA, 25 bp, Homo sapien
aataaaatttgcaacatcaaacagt

SEQ ID NO: 2105419 - DNA, 25 bp, Homo sapien
taaaatttgcaacatcaaacagtac

SEQ ID NO: 2105420 - DNA, 25 bp, Homo sapien
ctgagataaacaaatttctaaataa

SEQ ID NO: 2105421 - DNA, 25 bp, Homo sapien
taaataaaatttgcaacatcaaaca

SEQ ID NO: 2105422 - DNA, 25 bp, Homo sapien
cagaaatgaccgtttgtctgattct

SEQ ID NO: 2105423 - DNA, 25 bp, Homo sapien
ttttcagaggtagagccaactcttc

SEQ ID NO: 2105424 - DNA, 25 bp, Homo sapien
gttgcatttaggaggtcaagcagaa

SEQ ID NO: 2105425 - DNA, 25 bp, Homo sapien
ttcatctaagaaatcacgagccagc

SEQ ID NO: 2105426 - DNA, 25 bp, Homo sapien
tgtactatgcctatcaggtgtccac

SEQ ID NO: 2105427 - DNA, 25 bp, Homo sapien
cagcccaaatgggttattaccagag

SEQ ID NO: 2105428 - DNA, 25 bp, Homo sapien
tcaacatggtaacctcccggaagca

SEQ ID NO: 2105429 - DNA, 25 bp, Homo sapien
caacacagcatgttttgaattgagg

SEQ ID NO: 2105430 - DNA, 25 bp, Homo sapien
tctatccctctgagaacggtctcca

SEQ ID NO: 2105431 - DNA, 25 bp, Homo sapien
cctctgagaacggtctccatggatg

SEQ ID NO: 2105432 - DNA, 25 bp, Homo sapien
ggtacatgcgtatccttcatggtat

SEQ ID NO: 2105433 - DNA, 25 bp, Homo sapien
tctccatggatgctggtacatgcgt

SEQ ID NO: 2105434 - DNA, 25 bp, Homo sapien
acatgctcaatttgaataaaagaaa

SEQ ID NO: 2105435 - DNA, 25 bp, Homo sapien
aaataacttttatgagatatggccc

SEQ ID NO: 2105436 - DNA, 25 bp, Homo sapien
aataacttttatgagatatggccca

SEQ ID NO: 2105437 - DNA, 25 bp, Homo sapien
gaaaataacttttatgagatatggc

SEQ ID NO: 2105438 - DNA, 25 bp, Homo sapien
tggaaaataacttttatgagatatg

SEQ ID NO: 2105439 - DNA, 25 bp, Homo sapien
acgtcccgtacgaccaatacgatgt

SEQ ID NO: 2105440 - DNA, 25 bp, Homo sapien
cgtacgaccaatacgatgtacatat

SEQ ID NO: 2105441 - DNA, 25 bp, Homo sapien
cgtcccgtacgaccaatacgatgta

SEQ ID NO: 2105442 - DNA, 25 bp, Homo sapien
tcccgtacgaccaatacgatgtaca

SEQ ID NO: 2105443 - DNA, 25 bp, Homo sapien
ttcctctcgttaaagaatgaggttg

SEQ ID NO: 2105444 - DNA, 25 bp, Homo sapien
tcttagaacgtccacgactgctacc

SEQ ID NO: 2105445 - DNA, 25 bp, Homo sapien
cttagtaatatttatgttcctctcg

SEQ ID NO: 2105446 - DNA, 25 bp, Homo sapien
tttatgttcctctcgttaaagaatg

SEQ ID NO: 2105447 - DNA, 25 bp, Homo sapien
ctgctggcaccgctactttgtcggt

SEQ ID NO: 2105448 - DNA, 25 bp, Homo sapien
tggaactgctggcaccgctactttg

SEQ ID NO: 2105449 - DNA, 25 bp, Homo sapien
caccgctactttgtcggtagtctct

SEQ ID NO: 2105450 - DNA, 25 bp, Homo sapien
tgctgctaccgtggccacctccgcc

SEQ ID NO: 2105451 - DNA, 25 bp, Homo sapien
taatgaagttatccatcattaaata

SEQ ID NO: 2105452 - DNA, 25 bp, Homo sapien
gaaattaatgaagttatccatcatt

SEQ ID NO: 2105453 - DNA, 25 bp, Homo sapien
tatccatcactgttgtaaaagcctc

SEQ ID NO: 2105454 - DNA, 25 bp, Homo sapien
cagtcaaccccctgggagttataat

SEQ ID NO: 2105455 - DNA, 25 bp, Homo sapien
aatttcctccatatccatcactgtt

SEQ ID NO: 2105456 - DNA, 25 bp, Homo sapien
ccctgggagttataatttcctccat

SEQ ID NO: 2105457 - DNA, 25 bp, Homo sapien
tattagcttgtttggcagggtgacc

SEQ ID NO: 2105458 - DNA, 25 bp, Homo sapien
tttccatattagcttgtttggcagg

SEQ ID NO: 2105459 - DNA, 25 bp, Homo sapien
cagggtgacctactgcaaagcaggc

SEQ ID NO: 2105460 - DNA, 25 bp, Homo sapien
tgtttggcagggtgacctactgcaa

SEQ ID NO: 2105461 - DNA, 25 bp, Homo sapien
tgaacagggctgctgattgttcctt

SEQ ID NO: 2105462 - DNA, 25 bp, Homo sapien
tctgaacagggctgctgattgttcc

SEQ ID NO: 2105463 - DNA, 25 bp, Homo sapien
cttctgaacagggctgctgattgtt

SEQ ID NO: 2105464 - DNA, 25 bp, Homo sapien
tcatttcttcttgtgaccttgagct

SEQ ID NO: 2105465 - DNA, 25 bp, Homo sapien
ctacagcaatgaagtcttcaaacca

SEQ ID NO: 2105466 - DNA, 25 bp, Homo sapien
tacagcaatgaagtcttcaaaccac

SEQ ID NO: 2105467 - DNA, 25 bp, Homo sapien
gatcctcagtcacaaaattataaat

SEQ ID NO: 2105468 - DNA, 25 bp, Homo sapien
tcagtcacaaaattataaatgcagt

SEQ ID NO: 2105469 - DNA, 25 bp, Homo sapien
cagtcacaaaattataaatgcagtt

SEQ ID NO: 2105470 - DNA, 25 bp, Homo sapien
tcctcagtcacaaaattataaatgc

SEQ ID NO: 2105471 - DNA, 25 bp, Homo sapien
aaagatggagcgttttgatcaccgc

SEQ ID NO: 2105472 - DNA, 25 bp, Homo sapien
gacaagctgcgttcaacaatctcca

SEQ ID NO: 2105473 - DNA, 25 bp, Homo sapien
aagtatcaaaaagccctaatgcagg

SEQ ID NO: 2105474 - DNA, 25 bp, Homo sapien
gatcaccgcattctggccacaaaat

SEQ ID NO: 2105475 - DNA, 25 bp, Homo sapien
gtttgaggattgcaatgtgccagac

SEQ ID NO: 2105476 - DNA, 25 bp, Homo sapien
tatttacacctctgaaaataaacca

SEQ ID NO: 2105477 - DNA, 25 bp, Homo sapien
gaaaataaaccacaattgacaacaa

SEQ ID NO: 2105478 - DNA, 25 bp, Homo sapien
tttacacctctgaaaataaaccaca

SEQ ID NO: 2105479 - DNA, 25 bp, Homo sapien
taaaccacaattgacaacaacaaag

SEQ ID NO: 2105480 - DNA, 25 bp, Homo sapien
catcacttgttggactactgacaca

SEQ ID NO: 2105481 - DNA, 25 bp, Homo sapien
tcacttgttggactactgacacact

SEQ ID NO: 2105482 - DNA, 25 bp, Homo sapien
ttgttggactactgacacacttgac

SEQ ID NO: 2105483 - DNA, 25 bp, Homo sapien
gttggactactgacacacttgactt

SEQ ID NO: 2105484 - DNA, 25 bp, Homo sapien
ttagaaccacgccataggggccacg

SEQ ID NO: 2105485 - DNA, 25 bp, Homo sapien
aatacagagatgcttccacaatgaa

SEQ ID NO: 2105486 - DNA, 25 bp, Homo sapien
ggccacgtaatagaatgccattact

SEQ ID NO: 2105487 - DNA, 25 bp, Homo sapien
aatgaagaaccagaagcatgatcat

SEQ ID NO: 2105488 - DNA, 25 bp, Homo sapien
tcctgaatattcctgcatgcacttt

SEQ ID NO: 2105489 - DNA, 25 bp, Homo sapien
gactacatgctggactcctgaatat

SEQ ID NO: 2105490 - DNA, 25 bp, Homo sapien
tggaggcacttgctccacagaggag

SEQ ID NO: 2105491 - DNA, 25 bp, Homo sapien
tcggtctcaaatacctaaggctgcc

SEQ ID NO: 2105492 - DNA, 25 bp, Homo sapien
ctggagtgcgctacatgtagtgacc

SEQ ID NO: 2105493 - DNA, 25 bp, Homo sapien
ggaagcacaggctgtccttgacctg

SEQ ID NO: 2105494 - DNA, 25 bp, Homo sapien
tacatgtagtgaccaggagccagtg

SEQ ID NO: 2105495 - DNA, 25 bp, Homo sapien
tgcgctacatgtagtgaccaggagc

SEQ ID NO: 2105496 - DNA, 25 bp, Homo sapien
acacttctgggcatcacgctccaag

SEQ ID NO: 2105497 - DNA, 25 bp, Homo sapien
ctcatctttgtggtcacagaccagt

SEQ ID NO: 2105498 - DNA, 25 bp, Homo sapien
atctttgtggtcacagaccagttca

SEQ ID NO: 2105499 - DNA, 25 bp, Homo sapien
acttctgggcatcacgctccaagtt

SEQ ID NO: 2105500 - DNA, 25 bp, Homo sapien
gccaaggtgcataggtgtttatttt

SEQ ID NO: 2105501 - DNA, 25 bp, Homo sapien
gaggccaaggtgcataggtgtttat

SEQ ID NO: 2105502 - DNA, 25 bp, Homo sapien
gcacgggtgtcaccatgtcatctgc

SEQ ID NO: 2105503 - DNA, 25 bp, Homo sapien
tgggcacgggtgtcaccatgtcatc

SEQ ID NO: 2105504 - DNA, 25 bp, Homo sapien
aaatggcgtacttatgggtgtgatc

SEQ ID NO: 2105505 - DNA, 25 bp, Homo sapien
aactaaaggtccaagaaactgagcg

SEQ ID NO: 2105506 - DNA, 25 bp, Homo sapien
gcagtcccagtgctaaaactaaagg

SEQ ID NO: 2105507 - DNA, 25 bp, Homo sapien
aggaattaatcagggcagtcccagt

SEQ ID NO: 2105508 - DNA, 25 bp, Homo sapien
ccttgaagctcttgccccccggagc

SEQ ID NO: 2105509 - DNA, 25 bp, Homo sapien
cttgaagctcttgccccccggagct

SEQ ID NO: 2105510 - DNA, 25 bp, Homo sapien
ttgaagctcttgccccccggagctg

SEQ ID NO: 2105511 - DNA, 25 bp, Homo sapien
cgtggattagcctcgtgcttaggga

SEQ ID NO: 2105512 - DNA, 25 bp, Homo sapien
cacagccctttccacgtggattagc

SEQ ID NO: 2105513 - DNA, 25 bp, Homo sapien
gattagcctcgtgcttagggaacat

SEQ ID NO: 2105514 - DNA, 25 bp, Homo sapien
tttccacgtggattagcctcgtgct

SEQ ID NO: 2105515 - DNA, 25 bp, Homo sapien
gggatccaacaggactgctccaggg

SEQ ID NO: 2105516 - DNA, 25 bp, Homo sapien
ggacctgcttgcctgtcagcctggg

SEQ ID NO: 2105517 - DNA, 25 bp, Homo sapien
gaccctgccagtaaggccctgggtg

SEQ ID NO: 2105518 - DNA, 25 bp, Homo sapien
gctttagcagggaccctgccagtaa

SEQ ID NO: 2105519 - DNA, 25 bp, Homo sapien
ccttgtgtgtccaaatagaggagct

SEQ ID NO: 2105520 - DNA, 25 bp, Homo sapien
tgtgtccaaatagaggagctgtttc

SEQ ID NO: 2105521 - DNA, 25 bp, Homo sapien
tgtgtgtccaaatagaggagctgtt

SEQ ID NO: 2105522 - DNA, 25 bp, Homo sapien
tgtccaaatagaggagctgtttctt

SEQ ID NO: 2105523 - DNA, 25 bp, Homo sapien
gcccacaaatacaccttcctggggc

SEQ ID NO: 2105524 - DNA, 25 bp, Homo sapien
ctgcccacaaatacaccttcctggg

SEQ ID NO: 2105525 - DNA, 25 bp, Homo sapien
cactgcccacaaatacaccttcctg

SEQ ID NO: 2105526 - DNA, 25 bp, Homo sapien
actgcccacaaatacaccttcctgg

SEQ ID NO: 2105527 - DNA, 25 bp, Homo sapien
cgtagtgcgcatggcctgtttgtca

SEQ ID NO: 2105528 - DNA, 25 bp, Homo sapien
tcctgaccaggccgcgtagtgcgca

SEQ ID NO: 2105529 - DNA, 25 bp, Homo sapien
gggaagatctcccagtgccgtgtcc

SEQ ID NO: 2105530 - DNA, 25 bp, Homo sapien
ggaagatctcccagtgccgtgtcct

SEQ ID NO: 2105531 - DNA, 25 bp, Homo sapien
ctggagtcgcagaatgcccgggctg

SEQ ID NO: 2105532 - DNA, 25 bp, Homo sapien
gcccgggctggaagggatgccaggg

SEQ ID NO: 2105533 - DNA, 25 bp, Homo sapien
cccgggctggaagggatgccagggt

SEQ ID NO: 2105534 - DNA, 25 bp, Homo sapien
gagtcgcagaatgcccgggctggaa

SEQ ID NO: 2105535 - DNA, 25 bp, Homo sapien
cagagggcaccgaggttcgggagtc

SEQ ID NO: 2105536 - DNA, 25 bp, Homo sapien
gcggcacccgcacctactcggtggg

SEQ ID NO: 2105537 - DNA, 25 bp, Homo sapien
gtcctgcccagcgtggccgccagag

SEQ ID NO: 2105538 - DNA, 25 bp, Homo sapien
cgggacctctgtctgctccccgccg

SEQ ID NO: 2105539 - DNA, 25 bp, Homo sapien
tgagctggtaccaccgacttgggag

SEQ ID NO: 2105540 - DNA, 25 bp, Homo sapien
cataaaaaggaaggagcccatccac

SEQ ID NO: 2105541 - DNA, 25 bp, Homo sapien
cactgggatcccactaaggaagacc

SEQ ID NO: 2105542 - DNA, 25 bp, Homo sapien
gacttgggaggatgagcagccctta

SEQ ID NO: 2105543 - DNA, 25 bp, Homo sapien
acttgtgcaggtttgagtgcttatt

SEQ ID NO: 2105544 - DNA, 25 bp, Homo sapien
cttgtgcaggtttgagtgcttattt

SEQ ID NO: 2105545 - DNA, 25 bp, Homo sapien
gtgcaggtttgagtgcttatttttc

SEQ ID NO: 2105546 - DNA, 25 bp, Homo sapien
tgtgcaggtttgagtgcttattttt

SEQ ID NO: 2105547 - DNA, 25 bp, Homo sapien
ctcccaagtcaggcagccacagatg

SEQ ID NO: 2105548 - DNA, 25 bp, Homo sapien
tggtcctgctcctctgaggtccccc

SEQ ID NO: 2105549 - DNA, 25 bp, Homo sapien
ctcctctgaggtccccctccactcc

SEQ ID NO: 2105550 - DNA, 25 bp, Homo sapien
cctgctcctctgaggtccccctcca

SEQ ID NO: 2105551 - DNA, 25 bp, Homo sapien
tcctgggagtctccctggtcctgct

SEQ ID NO: 2105552 - DNA, 25 bp, Homo sapien
ggaaaccctttgtcaggctacagcc

SEQ ID NO: 2105553 - DNA, 25 bp, Homo sapien
cccctgcagagaagcgttagtgaat

SEQ ID NO: 2105554 - DNA, 25 bp, Homo sapien
tgaatggtcctcaaatgttgcttac

SEQ ID NO: 2105555 - DNA, 25 bp, Homo sapien
cactgacaacccagcaaggaaatgg

SEQ ID NO: 2105556 - DNA, 25 bp, Homo sapien
agtggcttaggaccacccagccgtg

SEQ ID NO: 2105557 - DNA, 25 bp, Homo sapien
ccagtggcttaggaccacccagccg

SEQ ID NO: 2105558 - DNA, 25 bp, Homo sapien
gtggcttaggaccacccagccgtgg

SEQ ID NO: 2105559 - DNA, 25 bp, Homo sapien
ggcttaggaccacccagccgtggga

SEQ ID NO: 2105560 - DNA, 25 bp, Homo sapien
ggaccaacatccctcggcctttcat

SEQ ID NO: 2105561 - DNA, 25 bp, Homo sapien
aggaccaacatccctcggcctttca

SEQ ID NO: 2105562 - DNA, 25 bp, Homo sapien
tgctttctgtgaggaacggtagagc

SEQ ID NO: 2105563 - DNA, 25 bp, Homo sapien
caggctatgaatacggtctgctttc

SEQ ID NO: 2105564 - DNA, 25 bp, Homo sapien
tggtgcacgtttaaaatgatactgg

SEQ ID NO: 2105565 - DNA, 25 bp, Homo sapien
tatatttcgggtttctgtagcaggg

SEQ ID NO: 2105566 - DNA, 25 bp, Homo sapien
tatgctgtgaacagcgggaagaccc

SEQ ID NO: 2105567 - DNA, 25 bp, Homo sapien
caaggaggtagagcactatccctgc

SEQ ID NO: 2105568 - DNA, 25 bp, Homo sapien
ccaaggtgttgttttgtgaggctca

SEQ ID NO: 2105569 - DNA, 25 bp, Homo sapien
cctgtgtgtccagaggagaatttct

SEQ ID NO: 2105570 - DNA, 25 bp, Homo sapien
gaaaggattcgagctgcagttttgc

SEQ ID NO: 2105571 - DNA, 25 bp, Homo sapien
cagttttgctggctaacgtgagtca

SEQ ID NO: 2105572 - DNA, 25 bp, Homo sapien
cgcaggcctggtgaaacttgaagat

SEQ ID NO: 2105573 - DNA, 25 bp, Homo sapien
tggagaagtcaatgtttccagaggg

SEQ ID NO: 2105574 - DNA, 25 bp, Homo sapien
attttggggaaggatccatctggaa

SEQ ID NO: 2105575 - DNA, 25 bp, Homo sapien
gaaggatccatctggaaatcggaaa

SEQ ID NO: 2105576 - DNA, 25 bp, Homo sapien
ttctcttcttgcaccggtattttgg

SEQ ID NO: 2105577 - DNA, 25 bp, Homo sapien
tttctcttcttgcaccggtattttg

SEQ ID NO: 2105578 - DNA, 25 bp, Homo sapien
cctttttgcttgaggctaagccact

SEQ ID NO: 2105579 - DNA, 25 bp, Homo sapien
tcacattgcacgagggtgtgcgtgt

SEQ ID NO: 2105580 - DNA, 25 bp, Homo sapien
ggtgagtcatcaggtgagcttcaca

SEQ ID NO: 2105581 - DNA, 25 bp, Homo sapien
aggtgagcttcacattgcacgaggg

SEQ ID NO: 2105582 - DNA, 25 bp, Homo sapien
cgagggtgtgcgtgtggccacccac

SEQ ID NO: 2105583 - DNA, 25 bp, Homo sapien
gcccccctgtagtcagaggttcttg

SEQ ID NO: 2105584 - DNA, 25 bp, Homo sapien
cgcagagcccccctgtagtcagagg

SEQ ID NO: 2105585 - DNA, 25 bp, Homo sapien
cagagcccccctgtagtcagaggtt

SEQ ID NO: 2105586 - DNA, 25 bp, Homo sapien
cctgtagtcagaggttcttgaaatc

SEQ ID NO: 2105587 - DNA, 25 bp, Homo sapien
cgaggccctgatggtctcagccgtg

SEQ ID NO: 2105588 - DNA, 25 bp, Homo sapien
aggccctgatggtctcagccgtggc

SEQ ID NO: 2105589 - DNA, 25 bp, Homo sapien
tgccccgaggccctgatggtctcag

SEQ ID NO: 2105590 - DNA, 25 bp, Homo sapien
cccgaggccctgatggtctcagccg

SEQ ID NO: 2105591 - DNA, 25 bp, Homo sapien
caggcggcgggacaagcgcgggcgc

SEQ ID NO: 2105592 - DNA, 25 bp, Homo sapien
gacaagcgcgggcgcaggcccccac

SEQ ID NO: 2105593 - DNA, 25 bp, Homo sapien
cgggacaagcgcgggcgcaggcccc

SEQ ID NO: 2105594 - DNA, 25 bp, Homo sapien
acaagcgcgggcgcaggcccccacg

SEQ ID NO: 2105595 - DNA, 25 bp, Homo sapien
agcgcgttgccacccaggttgagcg

SEQ ID NO: 2105596 - DNA, 25 bp, Homo sapien
agctcggccagcaggttgtcgttga

SEQ ID NO: 2105597 - DNA, 25 bp, Homo sapien
cacgaaggcgatgctgttgcggtcc

SEQ ID NO: 2105598 - DNA, 25 bp, Homo sapien
ccgttccggtccaggtcgatggaga

SEQ ID NO: 2105599 - DNA, 25 bp, Homo sapien
caggagacaagaggcgaggagaaac

SEQ ID NO: 2105600 - DNA, 25 bp, Homo sapien
ggcaggagacaagaggcgaggagaa

SEQ ID NO: 2105601 - DNA, 25 bp, Homo sapien
accacgtgctgggccacgctgggca

SEQ ID NO: 2105602 - DNA, 25 bp, Homo sapien
gctgggcaggagacaagaggcgagg

SEQ ID NO: 2105603 - DNA, 25 bp, Homo sapien
caatggatgcccgtgtgacaaaagc

SEQ ID NO: 2105604 - DNA, 25 bp, Homo sapien
tgtaatgggttaccccgccaggaga

SEQ ID NO: 2105605 - DNA, 25 bp, Homo sapien
aatggaagtctctctaattcaggcc

SEQ ID NO: 2105606 - DNA, 25 bp, Homo sapien
caggagaaatgggacggctcttaac

SEQ ID NO: 2105607 - DNA, 25 bp, Homo sapien
tcctgaatcctagtgtttccaggcc

SEQ ID NO: 2105608 - DNA, 25 bp, Homo sapien
cctgaatcctagtgtttccaggccc

SEQ ID NO: 2105609 - DNA, 25 bp, Homo sapien
ttcctgaatcctagtgtttccaggc

SEQ ID NO: 2105610 - DNA, 25 bp, Homo sapien
gaataactgtggagtaaatgaactg

SEQ ID NO: 2105611 - DNA, 25 bp, Homo sapien
tgttttaaacgcctcctaacacatc

SEQ ID NO: 2105612 - DNA, 25 bp, Homo sapien
cctgccctaaagttcctttgtggct

SEQ ID NO: 2105613 - DNA, 25 bp, Homo sapien
caaatttatttgtccacaaacacac

SEQ ID NO: 2105614 - DNA, 25 bp, Homo sapien
tgtcgccggaacaaccagaatgctg

SEQ ID NO: 2105615 - DNA, 25 bp, Homo sapien
taggatgctgtgtaatgggaaacca

SEQ ID NO: 2105616 - DNA, 25 bp, Homo sapien
gcgtttgtgcaggaggtgtccctca

SEQ ID NO: 2105617 - DNA, 25 bp, Homo sapien
gcgctgccggcacagtacaagttga

SEQ ID NO: 2105618 - DNA, 25 bp, Homo sapien
gcagtgtaggcacgtcgccattcaa

SEQ ID NO: 2105619 - DNA, 25 bp, Homo sapien
ccgtatccaattgtaagtatttgca

SEQ ID NO: 2105620 - DNA, 25 bp, Homo sapien
tgcataaagttttgccaacgtgttc

SEQ ID NO: 2105621 - DNA, 25 bp, Homo sapien
cccgagtatcgtgtttaattgcagt

SEQ ID NO: 2105622 - DNA, 25 bp, Homo sapien
gaactacttctgtatgggccccaca

SEQ ID NO: 2105623 - DNA, 25 bp, Homo sapien
gataagctcaacagtggtctcacac

SEQ ID NO: 2105624 - DNA, 25 bp, Homo sapien
tgaccaagccaccaaaccagagata

SEQ ID NO: 2105625 - DNA, 25 bp, Homo sapien
tcttaaaggaccaaacagagaaggc

SEQ ID NO: 2105626 - DNA, 25 bp, Homo sapien
ctggaccacgtctgactcgcacaga

SEQ ID NO: 2105627 - DNA, 25 bp, Homo sapien
gatgctcattgaacctttgaaggcc

SEQ ID NO: 2105628 - DNA, 25 bp, Homo sapien
tcttccaatacaggagattcgggct

SEQ ID NO: 2105629 - DNA, 25 bp, Homo sapien
gcttatattaacctgtgatccttga

SEQ ID NO: 2105630 - DNA, 25 bp, Homo sapien
ggcttccaagctgataatctttaca

SEQ ID NO: 2105631 - DNA, 25 bp, Homo sapien
aggcttccaagctgataatctttac

SEQ ID NO: 2105632 - DNA, 25 bp, Homo sapien
gcttccaagctgataatctttacaa

SEQ ID NO: 2105633 - DNA, 25 bp, Homo sapien
taagttgtaaacctatgcacatccc

SEQ ID NO: 2105634 - DNA, 25 bp, Homo sapien
tgtgcaatgaagaaaccagtttagg

SEQ ID NO: 2105635 - DNA, 25 bp, Homo sapien
gcacatcccttgcattttgggcaac

SEQ ID NO: 2105636 - DNA, 25 bp, Homo sapien
aaagaatcatctataacagccctgt

SEQ ID NO: 2105637 - DNA, 25 bp, Homo sapien
tcttaatgcatgtggacagtcgcga

SEQ ID NO: 2105638 - DNA, 25 bp, Homo sapien
tgaagcaccctgtaaaccttttaga

SEQ ID NO: 2105639 - DNA, 25 bp, Homo sapien
cagtcgcgagcgtttatgctgtcgg

SEQ ID NO: 2105640 - DNA, 25 bp, Homo sapien
catccagataatgtgatactgtctc

SEQ ID NO: 2105641 - DNA, 25 bp, Homo sapien
tgctccacccatagcgtccagctct

SEQ ID NO: 2105642 - DNA, 25 bp, Homo sapien
tgcacagccatgcattgctctgcac

SEQ ID NO: 2105643 - DNA, 25 bp, Homo sapien
gctgctccacccatagcgtccagct

SEQ ID NO: 2105644 - DNA, 25 bp, Homo sapien
ccttgcacagccatgcattgctctg

SEQ ID NO: 2105645 - DNA, 25 bp, Homo sapien
gaacgtcgttttctgctggtagtaa

SEQ ID NO: 2105646 - DNA, 25 bp, Homo sapien
tccttgggttccacactggtcttca

SEQ ID NO: 2105647 - DNA, 25 bp, Homo sapien
tgtctctagcagtatgctggctgca

SEQ ID NO: 2105648 - DNA, 25 bp, Homo sapien
tggtcttcgacatcctctccttggg

SEQ ID NO: 2105649 - DNA, 25 bp, Homo sapien
tcttcagtggacttctagaacagag

SEQ ID NO: 2105650 - DNA, 25 bp, Homo sapien
tagaactaggaacatcagcagggtc

SEQ ID NO: 2105651 - DNA, 25 bp, Homo sapien
cacagaatcagacttgggcctaaaa

SEQ ID NO: 2105652 - DNA, 25 bp, Homo sapien
ggatttaccacatccccttgcaggg

SEQ ID NO: 2105653 - DNA, 25 bp, Homo sapien
cagcacagatgtagcttgggacatt

SEQ ID NO: 2105654 - DNA, 25 bp, Homo sapien
gctcagtaaccacagttggctagtg

SEQ ID NO: 2105655 - DNA, 25 bp, Homo sapien
tacagaaggatctattcaaccatgc

SEQ ID NO: 2105656 - DNA, 25 bp, Homo sapien
gatatccacctaaacctgtgtagcc

SEQ ID NO: 2105657 - DNA, 25 bp, Homo sapien
caggttcgcctgaagtaaaaggagc

SEQ ID NO: 2105658 - DNA, 25 bp, Homo sapien
ccctagacactgagactcgtcttgg

SEQ ID NO: 2105659 - DNA, 25 bp, Homo sapien
tcttggttgtgtcagctgggctctt

SEQ ID NO: 2105660 - DNA, 25 bp, Homo sapien
tagacactgagactcgtcttggttg

SEQ ID NO: 2105661 - DNA, 25 bp, Homo sapien
aatgactgaatctattcagggcatg

SEQ ID NO: 2105662 - DNA, 25 bp, Homo sapien
tatttggtaatagtcgcaacctttc

SEQ ID NO: 2105663 - DNA, 25 bp, Homo sapien
ccgtttttagtttgacttgataatg

SEQ ID NO: 2105664 - DNA, 25 bp, Homo sapien
tggtaatagtcgcaacctttcaccg

SEQ ID NO: 2105665 - DNA, 25 bp, Homo sapien
ctaaatgacatattcctcatgtgta

SEQ ID NO: 2105666 - DNA, 25 bp, Homo sapien
atgtgtagttcttatgtcttcagat

SEQ ID NO: 2105667 - DNA, 25 bp, Homo sapien
taaatgacatattcctcatgtgtag

SEQ ID NO: 2105668 - DNA, 25 bp, Homo sapien
aaatgacatattcctcatgtgtagt

SEQ ID NO: 2105669 - DNA, 25 bp, Homo sapien
cgtcattgttatggtatgacttctc

SEQ ID NO: 2105670 - DNA, 25 bp, Homo sapien
cggttggtcgctatgattggttata

SEQ ID NO: 2105671 - DNA, 25 bp, Homo sapien
ctgactgaagttgtcgtcattgtta

SEQ ID NO: 2105672 - DNA, 25 bp, Homo sapien
tataaagcgcattctgtgggaggag

SEQ ID NO: 2105673 - DNA, 25 bp, Homo sapien
ggaggtctgcaatggctacgttaag

SEQ ID NO: 2105674 - DNA, 25 bp, Homo sapien
taaaggagttacgagctgtagtggc

SEQ ID NO: 2105675 - DNA, 25 bp, Homo sapien
gccttccgttgctgtatagaccgat

SEQ ID NO: 2105676 - DNA, 25 bp, Homo sapien
catagagggcgattatgttcccaac

SEQ ID NO: 2105677 - DNA, 25 bp, Homo sapien
tgaagtgctttcactcctacttggt

SEQ ID NO: 2105678 - DNA, 25 bp, Homo sapien
ggaaatacatgactggatctaagca

SEQ ID NO: 2105679 - DNA, 25 bp, Homo sapien
cagatgtatcatgcagggagtatcc

SEQ ID NO: 2105680 - DNA, 25 bp, Homo sapien
tttgcgaatgttactggacatcagg

SEQ ID NO: 2105681 - DNA, 25 bp, Homo sapien
gtcacttgagaaactatggcacttt

SEQ ID NO: 2105682 - DNA, 25 bp, Homo sapien
ttaataactactttagtcacttgag

SEQ ID NO: 2105683 - DNA, 25 bp, Homo sapien
tggtttacagttaagcaaatgaaat

SEQ ID NO: 2105684 - DNA, 25 bp, Homo sapien
tcaaagaattaagaggctgcattat

SEQ ID NO: 2105685 - DNA, 25 bp, Homo sapien
atctgttatagagatttaggcataa

SEQ ID NO: 2105686 - DNA, 25 bp, Homo sapien
tcatctgttatagagatttaggcat

SEQ ID NO: 2105687 - DNA, 25 bp, Homo sapien
tttcatctgttatagagatttaggc

SEQ ID NO: 2105688 - DNA, 25 bp, Homo sapien
catctgttatagagatttaggcata

SEQ ID NO: 2105689 - DNA, 25 bp, Homo sapien
caatatctttagtcagtgtgaatag

SEQ ID NO: 2105690 - DNA, 25 bp, Homo sapien
aaggttatattgttcagggcagtga

SEQ ID NO: 2105691 - DNA, 25 bp, Homo sapien
tgagtagtttatgccaactaaggtt

SEQ ID NO: 2105692 - DNA, 25 bp, Homo sapien
tagtcagtgtgaatagattcttgca

SEQ ID NO: 2105693 - DNA, 25 bp, Homo sapien
agacaaaaagttacttattgtgatg

SEQ ID NO: 2105694 - DNA, 25 bp, Homo sapien
tttctaatcacgattgtccggttga

SEQ ID NO: 2105695 - DNA, 25 bp, Homo sapien
cttttctaatcacgattgtccggtt

SEQ ID NO: 2105696 - DNA, 25 bp, Homo sapien
ctaatcacgattgtccggttgaaat

SEQ ID NO: 2105697 - DNA, 25 bp, Homo sapien
gtcaggttttcttgaattttgtcac

SEQ ID NO: 2105698 - DNA, 25 bp, Homo sapien
caggttttcttgaattttgtcacag

SEQ ID NO: 2105699 - DNA, 25 bp, Homo sapien
atgtcaggttttcttgaattttgtc

SEQ ID NO: 2105700 - DNA, 25 bp, Homo sapien
gttttcttgaattttgtcacaggag

SEQ ID NO: 2105701 - DNA, 25 bp, Homo sapien
tacggtaactggaatgattatgccc

SEQ ID NO: 2105702 - DNA, 25 bp, Homo sapien
gcatagcggcttatggcaatccaac

SEQ ID NO: 2105703 - DNA, 25 bp, Homo sapien
gaagtagtctcttgcgaggaatcct

SEQ ID NO: 2105704 - DNA, 25 bp, Homo sapien
gcatggcactgcacacaagtaagtt

SEQ ID NO: 2105705 - DNA, 25 bp, Homo sapien
tccataatggacgtacaggttctta

SEQ ID NO: 2105706 - DNA, 25 bp, Homo sapien
gacagttatctctttggtgtagaac

SEQ ID NO: 2105707 - DNA, 25 bp, Homo sapien
attagtagaatctggatgaccaaaa

SEQ ID NO: 2105708 - DNA, 25 bp, Homo sapien
gaagcaaactattagtagaatctgg

SEQ ID NO: 2105709 - DNA, 25 bp, Homo sapien
gattgcatatgtgctgaattagact

SEQ ID NO: 2105710 - DNA, 25 bp, Homo sapien
cttcttgaatgttttatctaataaa

SEQ ID NO: 2105711 - DNA, 25 bp, Homo sapien
atgattgcatatgtgctgaattaga

SEQ ID NO: 2105712 - DNA, 25 bp, Homo sapien
gtcttcttgaatgttttatctaata

SEQ ID NO: 2105713 - DNA, 25 bp, Homo sapien
tgttaatgatgtagtttagtgtccc

SEQ ID NO: 2105714 - DNA, 25 bp, Homo sapien
caaccaagctgtgacatgttaatga

SEQ ID NO: 2105715 - DNA, 25 bp, Homo sapien
ggtgattattgtcaaccaagctgtg

SEQ ID NO: 2105716 - DNA, 25 bp, Homo sapien
aaccaaagagattttcttggtgatt

SEQ ID NO: 2105717 - DNA, 25 bp, Homo sapien
tgaacagaagcactgacagttgagt

SEQ ID NO: 2105718 - DNA, 25 bp, Homo sapien
aagtttctgccatctcaacgttcag

SEQ ID NO: 2105719 - DNA, 25 bp, Homo sapien
cactagccatagattgacccttgta

SEQ ID NO: 2105720 - DNA, 25 bp, Homo sapien
taactaccagaaagcagacaagtca

SEQ ID NO: 2105721 - DNA, 25 bp, Homo sapien
gagaatatcagtaccatggaagtag

SEQ ID NO: 2105722 - DNA, 25 bp, Homo sapien
tctttgggcagatagtacacgcttt

SEQ ID NO: 2105723 - DNA, 25 bp, Homo sapien
aaagtagagccagattgaacccaag

SEQ ID NO: 2105724 - DNA, 25 bp, Homo sapien
tagaatgcttggcaaacagcaagtg

SEQ ID NO: 2105725 - DNA, 25 bp, Homo sapien
aacttcattttggacactgaagtaa

SEQ ID NO: 2105726 - DNA, 25 bp, Homo sapien
ttcattttggacactgaagtaatta

SEQ ID NO: 2105727 - DNA, 25 bp, Homo sapien
cttcattttggacactgaagtaatt

SEQ ID NO: 2105728 - DNA, 25 bp, Homo sapien
taaacttcattttggacactgaagt

SEQ ID NO: 2105729 - DNA, 25 bp, Homo sapien
tgtcttcccagatttgcccgtaact

SEQ ID NO: 2105730 - DNA, 25 bp, Homo sapien
tgcttagcagattaccagtgttccc

SEQ ID NO: 2105731 - DNA, 25 bp, Homo sapien
gaaatgcttatgcttagcagattac

SEQ ID NO: 2105732 - DNA, 25 bp, Homo sapien
ctccctttgtggtttgccggcagga

SEQ ID NO: 2105733 - DNA, 25 bp, Homo sapien
tctggcccagaatagatgaggttta

SEQ ID NO: 2105734 - DNA, 25 bp, Homo sapien
tgtgcctcagagatcccgtgttcta

SEQ ID NO: 2105735 - DNA, 25 bp, Homo sapien
taatctcaaggatacaggcagtcag

SEQ ID NO: 2105736 - DNA, 25 bp, Homo sapien
tttacaccccagagatttggatagc

SEQ ID NO: 2105737 - DNA, 25 bp, Homo sapien
aatacagctttgagctcagcatgac

SEQ ID NO: 2105738 - DNA, 25 bp, Homo sapien
ttcaaattcattgccctgactcctt

SEQ ID NO: 2105739 - DNA, 25 bp, Homo sapien
tggaaacaacttggagaccacctta

SEQ ID NO: 2105740 - DNA, 25 bp, Homo sapien
ctgactccttctggctgaagagcaa

SEQ ID NO: 2105741 - DNA, 25 bp, Homo sapien
actggacagtaactttggagcacaa

SEQ ID NO: 2105742 - DNA, 25 bp, Homo sapien
tggacagtaactttggagcacaacc

SEQ ID NO: 2105743 - DNA, 25 bp, Homo sapien
gacagtaactttggagcacaaccta

SEQ ID NO: 2105744 - DNA, 25 bp, Homo sapien
cagtaactttggagcacaacctaat

SEQ ID NO: 2105745 - DNA, 25 bp, Homo sapien
atcatcagtgatttcaaattcacca

SEQ ID NO: 2105746 - DNA, 25 bp, Homo sapien
aaattcaccaatgtaaccatgcttc

SEQ ID NO: 2105747 - DNA, 25 bp, Homo sapien
ctcaggttcacaacaattttcccag

SEQ ID NO: 2105748 - DNA, 25 bp, Homo sapien
attttcccagctctatgatcatcag

SEQ ID NO: 2105749 - DNA, 25 bp, Homo sapien
ttaagcaattggagaggaaaaatgt

SEQ ID NO: 2105750 - DNA, 25 bp, Homo sapien
tgcctgtcctccagtagtggccctg

SEQ ID NO: 2105751 - DNA, 25 bp, Homo sapien
ttgcctgtcctccagtagtggccct

SEQ ID NO: 2105752 - DNA, 25 bp, Homo sapien
tgactgagagactttacctgggaac

SEQ ID NO: 2105753 - DNA, 25 bp, Homo sapien
ggtattgagattcatccccatgtct

SEQ ID NO: 2105754 - DNA, 25 bp, Homo sapien
agagtgcagttgctaggtcattaag

SEQ ID NO: 2105755 - DNA, 25 bp, Homo sapien
ggaactttggcttacacttcatgtg

SEQ ID NO: 2105756 - DNA, 25 bp, Homo sapien
aggtcagcattagctttgcattttc

SEQ ID NO: 2105757 - DNA, 25 bp, Homo sapien
agcaaggtcagcattagctttgcat

SEQ ID NO: 2105758 - DNA, 25 bp, Homo sapien
ctttagctaaaatattgtagtagaa

SEQ ID NO: 2105759 - DNA, 25 bp, Homo sapien
gctaaaatattgtagtagaatctac

SEQ ID NO: 2105760 - DNA, 25 bp, Homo sapien
aaaatgcatttcagtgatgccccgg

SEQ ID NO: 2105761 - DNA, 25 bp, Homo sapien
tatctgacggttgcacagggacgtg

SEQ ID NO: 2105762 - DNA, 25 bp, Homo sapien
tgatcggaaagtgagtctccacgcg

SEQ ID NO: 2105763 - DNA, 25 bp, Homo sapien
tatagacgtgtacctggagctcctg

SEQ ID NO: 2105764 - DNA, 25 bp, Homo sapien
cgttcgccgtgacgcggccggcgcc

SEQ ID NO: 2105765 - DNA, 25 bp, Homo sapien
ccgcgccctctagaatcccggtgcc

SEQ ID NO: 2105766 - DNA, 25 bp, Homo sapien
cggtgcccgcccgttcgccgtgacg

SEQ ID NO: 2105767 - DNA, 25 bp, Homo sapien
gcgccctctagaatcccggtgcccg

SEQ ID NO: 2105768 - DNA, 25 bp, Homo sapien
tattgaatgcaacctagcacagcgg

SEQ ID NO: 2105769 - DNA, 25 bp, Homo sapien
cacttttgctgtgcggaggaacaaa

SEQ ID NO: 2105770 - DNA, 25 bp, Homo sapien
catatacctgtctgatggcgctggc

SEQ ID NO: 2105771 - DNA, 25 bp, Homo sapien
ggctcattccgcacatgctcagttg

SEQ ID NO: 2105772 - DNA, 25 bp, Homo sapien
ctagagtagttactgtcagtgccct

SEQ ID NO: 2105773 - DNA, 25 bp, Homo sapien
tctagagtagttactgtcagtgccc

SEQ ID NO: 2105774 - DNA, 25 bp, Homo sapien
acgacagcttgagtgaaattttcat

SEQ ID NO: 2105775 - DNA, 25 bp, Homo sapien
ctggaaagaggaacgacagcttgag

SEQ ID NO: 2105776 - DNA, 25 bp, Homo sapien
gaggaacgacagcttgagtgaaatt

SEQ ID NO: 2105777 - DNA, 25 bp, Homo sapien
gaaagaggaacgacagcttgagtga

SEQ ID NO: 2105778 - DNA, 25 bp, Homo sapien
tttgtgattctggtggtgatgctgc

SEQ ID NO: 2105779 - DNA, 25 bp, Homo sapien
ttgtttgtgattctggtggtgatgc

SEQ ID NO: 2105780 - DNA, 25 bp, Homo sapien
gttgtttgtgattctggtggtgatg

SEQ ID NO: 2105781 - DNA, 25 bp, Homo sapien
gtgattctggtggtgatgctgccag

SEQ ID NO: 2105782 - DNA, 25 bp, Homo sapien
caaagggattggtgccctgcttctc

SEQ ID NO: 2105783 - DNA, 25 bp, Homo sapien
ccttagagcaaagggattggtgccc

SEQ ID NO: 2105784 - DNA, 25 bp, Homo sapien
tggcagaagtaagggctcatgggac

SEQ ID NO: 2105785 - DNA, 25 bp, Homo sapien
ggctcatgggaccttagagcaaagg

SEQ ID NO: 2105786 - DNA, 25 bp, Homo sapien
tgtcatgagtaatgaggaccaccat

SEQ ID NO: 2105787 - DNA, 25 bp, Homo sapien
tatcgctggcaatctgcatgtcatg

SEQ ID NO: 2105788 - DNA, 25 bp, Homo sapien
tccctgattcttcactatcgctggc

SEQ ID NO: 2105789 - DNA, 25 bp, Homo sapien
tgcatgtcatgagtaatgaggacca

SEQ ID NO: 2105790 - DNA, 25 bp, Homo sapien
gcttctgagggataagtgatgatca

SEQ ID NO: 2105791 - DNA, 25 bp, Homo sapien
cttctgagggataagtgatgatcac

SEQ ID NO: 2105792 - DNA, 25 bp, Homo sapien
gacatcgtatgcgtggataagcttc

SEQ ID NO: 2105793 - DNA, 25 bp, Homo sapien
gaaagaactggcagctaccgatgta

SEQ ID NO: 2105794 - DNA, 25 bp, Homo sapien
cagtaagtagttcttgaaggagtac

SEQ ID NO: 2105795 - DNA, 25 bp, Homo sapien
aaaagtgggataggagaaagaactg

SEQ ID NO: 2105796 - DNA, 25 bp, Homo sapien
attcactgttctcaatccaattttc

SEQ ID NO: 2105797 - DNA, 25 bp, Homo sapien
tgcttttcccagactgacatgtctt

SEQ ID NO: 2105798 - DNA, 25 bp, Homo sapien
ttttcccagactgacatgtctttcc

SEQ ID NO: 2105799 - DNA, 25 bp, Homo sapien
cacccataaaagttctttaatcatc

SEQ ID NO: 2105800 - DNA, 25 bp, Homo sapien
tcccagactgacatgtctttccttg

SEQ ID NO: 2105801 - DNA, 25 bp, Homo sapien
taatagcatatttctcacatggttc

SEQ ID NO: 2105802 - DNA, 25 bp, Homo sapien
acattttctgtactgggattttcaa

SEQ ID NO: 2105803 - DNA, 25 bp, Homo sapien
ttcaataatagcatatttctcacat

SEQ ID NO: 2105804 - DNA, 25 bp, Homo sapien
caataatagcatatttctcacatgg

SEQ ID NO: 2105805 - DNA, 25 bp, Homo sapien
cccatttatccattggaaactgaac

SEQ ID NO: 2105806 - DNA, 25 bp, Homo sapien
catctcttgtgcacccaacacaggg

SEQ ID NO: 2105807 - DNA, 25 bp, Homo sapien
gaactgtacatctctcatccaaaat

SEQ ID NO: 2105808 - DNA, 25 bp, Homo sapien
gcatgccgaatcaaacccaaacact

SEQ ID NO: 2105809 - DNA, 25 bp, Homo sapien
tgcctttgctaagacctggaccttg

SEQ ID NO: 2105810 - DNA, 25 bp, Homo sapien
tccaccattgcctttgctaagacct

SEQ ID NO: 2105811 - DNA, 25 bp, Homo sapien
cctttgctaagacctggaccttggc

SEQ ID NO: 2105812 - DNA, 25 bp, Homo sapien
cattgcctttgctaagacctggacc

SEQ ID NO: 2105813 - DNA, 25 bp, Homo sapien
ttatagaagcttcccaaaggcctgg

SEQ ID NO: 2105814 - DNA, 25 bp, Homo sapien
tcccaaaggcctgggctactgtgag

SEQ ID NO: 2105815 - DNA, 25 bp, Homo sapien
agcttcccaaaggcctgggctactg

SEQ ID NO: 2105816 - DNA, 25 bp, Homo sapien
cttcccaaaggcctgggctactgtg

SEQ ID NO: 2105817 - DNA, 25 bp, Homo sapien
acatatctggaacttctccaaggcc

SEQ ID NO: 2105818 - DNA, 25 bp, Homo sapien
tcacatatctggaacttctccaagg

SEQ ID NO: 2105819 - DNA, 25 bp, Homo sapien
catatctggaacttctccaaggcct

SEQ ID NO: 2105820 - DNA, 25 bp, Homo sapien
atatctggaacttctccaaggcctt

SEQ ID NO: 2105821 - DNA, 25 bp, Homo sapien
ctgcggctcagattgggactgtgtt

SEQ ID NO: 2105822 - DNA, 25 bp, Homo sapien
tgaagcaacagctcttctcctacgc

SEQ ID NO: 2105823 - DNA, 25 bp, Homo sapien
gcctcatcattggttatgccaggaa

SEQ ID NO: 2105824 - DNA, 25 bp, Homo sapien
cctctgagacgccatggggtgcttt

SEQ ID NO: 2105825 - DNA, 25 bp, Homo sapien
aacagccaagttcactggagctggg

SEQ ID NO: 2105826 - DNA, 25 bp, Homo sapien
agccaagttcactggagctggggct

SEQ ID NO: 2105827 - DNA, 25 bp, Homo sapien
agcttggcagtctcacgtcccctta

SEQ ID NO: 2105828 - DNA, 25 bp, Homo sapien
tagccgcagcttccaaaccagcacc

SEQ ID NO: 2105829 - DNA, 25 bp, Homo sapien
gatactgacagatgagagcctcagc

SEQ ID NO: 2105830 - DNA, 25 bp, Homo sapien
cacttgtctctagccgcagcttcca

SEQ ID NO: 2105831 - DNA, 25 bp, Homo sapien
gctacctgctttatgcacatgtaac

SEQ ID NO: 2105832 - DNA, 25 bp, Homo sapien
ggctacctgctttatgcacatgtaa

SEQ ID NO: 2105833 - DNA, 25 bp, Homo sapien
tcaccagccactctcggtgtcaact

SEQ ID NO: 2105834 - DNA, 25 bp, Homo sapien
cagccactggtatgtcctctgatac

SEQ ID NO: 2105835 - DNA, 25 bp, Homo sapien
ctctcggtgtcaactcccctttagg

SEQ ID NO: 2105836 - DNA, 25 bp, Homo sapien
ggtatgtcctctgataccagcaagc

SEQ ID NO: 2105837 - DNA, 25 bp, Homo sapien
aatggggtgagattattgtctccct

SEQ ID NO: 2105838 - DNA, 25 bp, Homo sapien
ggggtgagattattgtctccctcac

SEQ ID NO: 2105839 - DNA, 25 bp, Homo sapien
agaatggggtgagattattgtctcc

SEQ ID NO: 2105840 - DNA, 25 bp, Homo sapien
ttagaatggggtgagattattgtct

SEQ ID NO: 2105841 - DNA, 25 bp, Homo sapien
tctgaatacaggatgctcaatctct

SEQ ID NO: 2105842 - DNA, 25 bp, Homo sapien
tcctcaattggatgtgtagagcccc

SEQ ID NO: 2105843 - DNA, 25 bp, Homo sapien
tctcgggcatcgattgctcatcttc

SEQ ID NO: 2105844 - DNA, 25 bp, Homo sapien
catggaatggcaaacttctcgggca

SEQ ID NO: 2105845 - DNA, 25 bp, Homo sapien
aatagacgagtgatccccagagctg

SEQ ID NO: 2105846 - DNA, 25 bp, Homo sapien
caatttcctgaaatagacgagtgat

SEQ ID NO: 2105847 - DNA, 25 bp, Homo sapien
agctctagagccctcttcctgaatt

SEQ ID NO: 2105848 - DNA, 25 bp, Homo sapien
ccagttcttggttctgacaatttcc

SEQ ID NO: 2105849 - DNA, 25 bp, Homo sapien
agttccttgtctcacatctatggtt

SEQ ID NO: 2105850 - DNA, 25 bp, Homo sapien
ttgtctcacatctatggtttgccat

SEQ ID NO: 2105851 - DNA, 25 bp, Homo sapien
ttccttgtctcacatctatggtttg

SEQ ID NO: 2105852 - DNA, 25 bp, Homo sapien
ccttgtctcacatctatggtttgcc

SEQ ID NO: 2105853 - DNA, 25 bp, Homo sapien
tttggattggccgacaactccaagg

SEQ ID NO: 2105854 - DNA, 25 bp, Homo sapien
ggactttggattggccgacaactcc

SEQ ID NO: 2105855 - DNA, 25 bp, Homo sapien
tggattggccgacaactccaaggga

SEQ ID NO: 2105856 - DNA, 25 bp, Homo sapien
gattggccgacaactccaagggagt

SEQ ID NO: 2105857 - DNA, 25 bp, Homo sapien
gctttgccacctggctttccaacat

SEQ ID NO: 2105858 - DNA, 25 bp, Homo sapien
ctcttcctcagggaaaaggtatcca

SEQ ID NO: 2105859 - DNA, 25 bp, Homo sapien
cagggaaaaggtatccacttcacca

SEQ ID NO: 2105860 - DNA, 25 bp, Homo sapien
ctcagggaaaaggtatccacttcac

SEQ ID NO: 2105861 - DNA, 25 bp, Homo sapien
tagggtactcgcctgggaagaactg

SEQ ID NO: 2105862 - DNA, 25 bp, Homo sapien
tggttgttttaatgtggttcatgtg

SEQ ID NO: 2105863 - DNA, 25 bp, Homo sapien
atgtagggtactcgcctgggaagaa

SEQ ID NO: 2105864 - DNA, 25 bp, Homo sapien
atcatgtagggtactcgcctgggaa

SEQ ID NO: 2105865 - DNA, 25 bp, Homo sapien
catcctgtggtttgagatggtttga

SEQ ID NO: 2105866 - DNA, 25 bp, Homo sapien
atacaaagtttccagtgcttgctgc

SEQ ID NO: 2105867 - DNA, 25 bp, Homo sapien
gcttgctgcacatgctgtcttgcta

SEQ ID NO: 2105868 - DNA, 25 bp, Homo sapien
gatggtttgattcacgctggttctc

SEQ ID NO: 2105869 - DNA, 25 bp, Homo sapien
cttggaagggcaatgcaccctccaa

SEQ ID NO: 2105870 - DNA, 25 bp, Homo sapien
gaatgacgttttcataatctttcac

SEQ ID NO: 2105871 - DNA, 25 bp, Homo sapien
atctttcacaaaggcaggttttgag

SEQ ID NO: 2105872 - DNA, 25 bp, Homo sapien
ccttcatgtgaatgacgttttcata

SEQ ID NO: 2105873 - DNA, 25 bp, Homo sapien
tacagctgatggacttgtaagacaa

SEQ ID NO: 2105874 - DNA, 25 bp, Homo sapien
tggacttgtaagacaatgcagactt

SEQ ID NO: 2105875 - DNA, 25 bp, Homo sapien
ccgtgttcggcccacgtgtccagag

SEQ ID NO: 2105876 - DNA, 25 bp, Homo sapien
caagggcaccatttggggctcccgt

SEQ ID NO: 2105877 - DNA, 25 bp, Homo sapien
tctcttctttattgtagcaactgag

SEQ ID NO: 2105878 - DNA, 25 bp, Homo sapien
gtcaacagggaatgcatccacctta

SEQ ID NO: 2105879 - DNA, 25 bp, Homo sapien
tcttctttattgtagcaactgagtc

SEQ ID NO: 2105880 - DNA, 25 bp, Homo sapien
tgagtcaacagggaatgcatccacc

SEQ ID NO: 2105881 - DNA, 25 bp, Homo sapien
gaagcctattaaaggagttattcca

SEQ ID NO: 2105882 - DNA, 25 bp, Homo sapien
tagcaaatcctccatacatacacac

SEQ ID NO: 2105883 - DNA, 25 bp, Homo sapien
ttccaagatgcaagattttcaaatg

SEQ ID NO: 2105884 - DNA, 25 bp, Homo sapien
aggaaatttagaccttccatttgag

SEQ ID NO: 2105885 - DNA, 25 bp, Homo sapien
gagaggtaaagatacggagacgatt

SEQ ID NO: 2105886 - DNA, 25 bp, Homo sapien
aagtagggtccctagttcatactgc

SEQ ID NO: 2105887 - DNA, 25 bp, Homo sapien
aattccaggttaacatgtccatttc

SEQ ID NO: 2105888 - DNA, 25 bp, Homo sapien
tgtttcccctgcaactacagagagg

SEQ ID NO: 2105889 - DNA, 25 bp, Homo sapien
tctcaggcatataatttctctaagc

SEQ ID NO: 2105890 - DNA, 25 bp, Homo sapien
gacccattaggtctgtagccaggac

SEQ ID NO: 2105891 - DNA, 25 bp, Homo sapien
tattggtgtttgcagagaaagccac

SEQ ID NO: 2105892 - DNA, 25 bp, Homo sapien
tctttcctctggaatacaaagtagg

SEQ ID NO: 2105893 - DNA, 25 bp, Homo sapien
cagggtagggtgctctatgtctctg

SEQ ID NO: 2105894 - DNA, 25 bp, Homo sapien
agggtagggtgctctatgtctctgc

SEQ ID NO: 2105895 - DNA, 25 bp, Homo sapien
tcagggtagggtgctctatgtctct

SEQ ID NO: 2105896 - DNA, 25 bp, Homo sapien
ggtagggtgctctatgtctctgctt

SEQ ID NO: 2105897 - DNA, 25 bp, Homo sapien
aacactcagaattcagcagttgtag

SEQ ID NO: 2105898 - DNA, 25 bp, Homo sapien
cagcagttgtagaccccacagtaat

SEQ ID NO: 2105899 - DNA, 25 bp, Homo sapien
ccacagtaattcaacttcacaggtt

SEQ ID NO: 2105900 - DNA, 25 bp, Homo sapien
tttattgtatggaaccaacactcag

SEQ ID NO: 2105901 - DNA, 25 bp, Homo sapien
caacataagctacagggtcagtgga

SEQ ID NO: 2105902 - DNA, 25 bp, Homo sapien
taaaatccacactgagccttttgtt

SEQ ID NO: 2105903 - DNA, 25 bp, Homo sapien
taagctacagggtcagtggagcctt

SEQ ID NO: 2105904 - DNA, 25 bp, Homo sapien
aataaaatccacactgagccttttg

SEQ ID NO: 2105905 - DNA, 25 bp, Homo sapien
tctacattatcatctacctcagttg

SEQ ID NO: 2105906 - DNA, 25 bp, Homo sapien
taaagttggaccatctacattatca

SEQ ID NO: 2105907 - DNA, 25 bp, Homo sapien
tcatcctaaagttggaccatctaca

SEQ ID NO: 2105908 - DNA, 25 bp, Homo sapien
tcctaaagttggaccatctacatta

SEQ ID NO: 2105909 - DNA, 25 bp, Homo sapien
ctatttctagtttggtcagagttct

SEQ ID NO: 2105910 - DNA, 25 bp, Homo sapien
tctttatcatcaatgggtgtagaat

SEQ ID NO: 2105911 - DNA, 25 bp, Homo sapien
ggctgaagaactttccttctatttc

SEQ ID NO: 2105912 - DNA, 25 bp, Homo sapien
ttggctgaagaactttccttctatt

SEQ ID NO: 2105913 - DNA, 25 bp, Homo sapien
gcagtggcgatccagttccttcaga

SEQ ID NO: 2105914 - DNA, 25 bp, Homo sapien
tgcagtggcgatccagttccttcag

SEQ ID NO: 2105915 - DNA, 25 bp, Homo sapien
tccatctgcagactcagccccatcc

SEQ ID NO: 2105916 - DNA, 25 bp, Homo sapien
agctgacctccatctgcagactcag

SEQ ID NO: 2105917 - DNA, 25 bp, Homo sapien
ctagctgacctccatctgcagactc

SEQ ID NO: 2105918 - DNA, 25 bp, Homo sapien
atctgcagactcagccccatcccag

SEQ ID NO: 2105919 - DNA, 25 bp, Homo sapien
gggagtcagcccccgccctggccag

SEQ ID NO: 2105920 - DNA, 25 bp, Homo sapien
ccggcagctgccctgtctgagaagt

SEQ ID NO: 2105921 - DNA, 25 bp, Homo sapien
ctccgcctggcaaccaccctgtctg

SEQ ID NO: 2105922 - DNA, 25 bp, Homo sapien
cgcctggcaaccaccctgtctgaga

SEQ ID NO: 2105923 - DNA, 25 bp, Homo sapien
gaagcaggtggacatggcagcagca

SEQ ID NO: 2105924 - DNA, 25 bp, Homo sapien
agcagcactggccacatacctacaa

SEQ ID NO: 2105925 - DNA, 25 bp, Homo sapien
ctggaagcaggtggacatggcagca

SEQ ID NO: 2105926 - DNA, 25 bp, Homo sapien
gcaggtggacatggcagcagcactg

SEQ ID NO: 2105927 - DNA, 25 bp, Homo sapien
tcagctttgggagcctattgaaaga

SEQ ID NO: 2105928 - DNA, 25 bp, Homo sapien
tattgaaagaattgtaaacactgcc

SEQ ID NO: 2105929 - DNA, 25 bp, Homo sapien
taaacactgccagggagaagccctc

SEQ ID NO: 2105930 - DNA, 25 bp, Homo sapien
cagccacggcaagttgactgagcaa

SEQ ID NO: 2105931 - DNA, 25 bp, Homo sapien
ccagcttttctggaagagtctttga

SEQ ID NO: 2105932 - DNA, 25 bp, Homo sapien
agcttttctggaagagtctttgaag

SEQ ID NO: 2105933 - DNA, 25 bp, Homo sapien
ttattccagcttttctggaagagtc

SEQ ID NO: 2105934 - DNA, 25 bp, Homo sapien
ctggaagagtctttgaagatattga

SEQ ID NO: 2105935 - DNA, 25 bp, Homo sapien
tgtattgttatacgtattgatcctg

SEQ ID NO: 2105936 - DNA, 25 bp, Homo sapien
gtattgttatacgtattgatcctgt

SEQ ID NO: 2105937 - DNA, 25 bp, Homo sapien
gaattgtattgttatacgtattgat

SEQ ID NO: 2105938 - DNA, 25 bp, Homo sapien
attgtattgttatacgtattgatcc

SEQ ID NO: 2105939 - DNA, 25 bp, Homo sapien
tttgttcacctgtgttgttcatcat

SEQ ID NO: 2105940 - DNA, 25 bp, Homo sapien
aaccttagggatttgttcacctgtg

SEQ ID NO: 2105941 - DNA, 25 bp, Homo sapien
tagggatttgttcacctgtgttgtt

SEQ ID NO: 2105942 - DNA, 25 bp, Homo sapien
ccttagggatttgttcacctgtgtt

SEQ ID NO: 2105943 - DNA, 25 bp, Homo sapien
ttactagattcagaatcagcagcat

SEQ ID NO: 2105944 - DNA, 25 bp, Homo sapien
tcctggaaaaattactagattcaga

SEQ ID NO: 2105945 - DNA, 25 bp, Homo sapien
tcagaaaccattgtttggtgaccct

SEQ ID NO: 2105946 - DNA, 25 bp, Homo sapien
tggtgacccttatgtcccctaggaa

SEQ ID NO: 2105947 - DNA, 25 bp, Homo sapien
tagcaatatagagattcattgcatt

SEQ ID NO: 2105948 - DNA, 25 bp, Homo sapien
gcaatatagagattcattgcattga

SEQ ID NO: 2105949 - DNA, 25 bp, Homo sapien
tatagcaatatagagattcattgca

SEQ ID NO: 2105950 - DNA, 25 bp, Homo sapien
aatatagagattcattgcattgatc

SEQ ID NO: 2105951 - DNA, 25 bp, Homo sapien
aagagtgtacgtttgctgggccttg

SEQ ID NO: 2105952 - DNA, 25 bp, Homo sapien
atagtaaaaagagtgtacgtttgct

SEQ ID NO: 2105953 - DNA, 25 bp, Homo sapien
aaaagagtgtacgtttgctgggcct

SEQ ID NO: 2105954 - DNA, 25 bp, Homo sapien
taaaaagagtgtacgtttgctgggc

SEQ ID NO: 2105955 - DNA, 25 bp, Homo sapien
gctaccagctgagatatgtccattt

SEQ ID NO: 2105956 - DNA, 25 bp, Homo sapien
gctaacggttggtggcaacatggaa

SEQ ID NO: 2105957 - DNA, 25 bp, Homo sapien
cattacaggcgagtcagaaactgtc

SEQ ID NO: 2105958 - DNA, 25 bp, Homo sapien
tctggcaagccaacttgctaacggt

SEQ ID NO: 2105959 - DNA, 25 bp, Homo sapien
gaagtccattgaggtttaacagtta

SEQ ID NO: 2105960 - DNA, 25 bp, Homo sapien
tcatgtgagttacaactacaaacac

SEQ ID NO: 2105961 - DNA, 25 bp, Homo sapien
gcaaatgcattctctaatcgccagt

SEQ ID NO: 2105962 - DNA, 25 bp, Homo sapien
acaaacacaaacaatgaagtccatt

SEQ ID NO: 2105963 - DNA, 25 bp, Homo sapien
tagtgcaccgatcaggcccagctct

SEQ ID NO: 2105964 - DNA, 25 bp, Homo sapien
gccactgagaccataagcccttgca

SEQ ID NO: 2105965 - DNA, 25 bp, Homo sapien
cttatggatttcagaagcgtgggcc

SEQ ID NO: 2105966 - DNA, 25 bp, Homo sapien
ctccacttgactatgaaagccaggt

SEQ ID NO: 2105967 - DNA, 25 bp, Homo sapien
tctggttgccgtccagccttgctgg

SEQ ID NO: 2105968 - DNA, 25 bp, Homo sapien
gatatgttaccataacaggtctggt

SEQ ID NO: 2105969 - DNA, 25 bp, Homo sapien
gactcgctttggcaccactatcaag

SEQ ID NO: 2105970 - DNA, 25 bp, Homo sapien
tgactgtgtaggactcgctttggca

SEQ ID NO: 2105971 - DNA, 25 bp, Homo sapien
tactgagtgccaattgactgacagg

SEQ ID NO: 2105972 - DNA, 25 bp, Homo sapien
catttacccgctcaaaagtgggact

SEQ ID NO: 2105973 - DNA, 25 bp, Homo sapien
ttgacctcggttgacactatcttgg

SEQ ID NO: 2105974 - DNA, 25 bp, Homo sapien
gaaacgagggctcccataggacaga

SEQ ID NO: 2105975 - DNA, 25 bp, Homo sapien
gaagtcaggccagcctgcatacgct

SEQ ID NO: 2105976 - DNA, 25 bp, Homo sapien
cacaacaaattaccgcaaactgtgt

SEQ ID NO: 2105977 - DNA, 25 bp, Homo sapien
ctgaggtggtgccttagtctcctgg

SEQ ID NO: 2105978 - DNA, 25 bp, Homo sapien
ataagtgggcagagtaggtcttggc

SEQ ID NO: 2105979 - DNA, 25 bp, Homo sapien
ttgaggagtttagtcatctgcaggg

SEQ ID NO: 2105980 - DNA, 25 bp, Homo sapien
tttgaggagtttagtcatctgcagg

SEQ ID NO: 2105981 - DNA, 25 bp, Homo sapien
ctttgaggagtttagtcatctgcag

SEQ ID NO: 2105982 - DNA, 25 bp, Homo sapien
agataaaaagatgctccatggccac

SEQ ID NO: 2105983 - DNA, 25 bp, Homo sapien
gataaaaagatgctccatggccact

SEQ ID NO: 2105984 - DNA, 25 bp, Homo sapien
taaaaagatgctccatggccactct

SEQ ID NO: 2105985 - DNA, 25 bp, Homo sapien
aaagatgctccatggccactctgag

SEQ ID NO: 2105986 - DNA, 25 bp, Homo sapien
caactcagtgcaccaagaccttggc

SEQ ID NO: 2105987 - DNA, 25 bp, Homo sapien
tccattctggaaattcctgtctgaa

SEQ ID NO: 2105988 - DNA, 25 bp, Homo sapien
ctcagtgcaccaagaccttggcagc

SEQ ID NO: 2105989 - DNA, 25 bp, Homo sapien
cagtgcaccaagaccttggcagcaa

SEQ ID NO: 2105990 - DNA, 25 bp, Homo sapien
taaattaaaatcccgcgttggatca

SEQ ID NO: 2105991 - DNA, 25 bp, Homo sapien
tatggcatccattttacagtttgtt

SEQ ID NO: 2105992 - DNA, 25 bp, Homo sapien
ctcttatggcatccattttacagtt

SEQ ID NO: 2105993 - DNA, 25 bp, Homo sapien
aatcccgcgttggatcaagccctca

SEQ ID NO: 2105994 - DNA, 25 bp, Homo sapien
tacaggaactactccagcaaagtgc

SEQ ID NO: 2105995 - DNA, 25 bp, Homo sapien
tccccaagccttttgcgtaagagct

SEQ ID NO: 2105996 - DNA, 25 bp, Homo sapien
gacatcgttagcatcgttcagccac

SEQ ID NO: 2105997 - DNA, 25 bp, Homo sapien
cattagtcagaaaggtgcatagacc

SEQ ID NO: 2105998 - DNA, 25 bp, Homo sapien
tatactacattctctttattccagt

SEQ ID NO: 2105999 - DNA, 25 bp, Homo sapien
tattccagtctactattgatggtca

SEQ ID NO: 2106000 - DNA, 25 bp, Homo sapien
acattctctttattccagtctacta

SEQ ID NO: 2106001 - DNA, 25 bp, Homo sapien
tcatttaggttgtctccatgtcttt

SEQ ID NO: 2106002 - DNA, 25 bp, Homo sapien
tggataatggtgtggggatccacca

SEQ ID NO: 2106003 - DNA, 25 bp, Homo sapien
tcttgcgcttggcaattgtcctaca

SEQ ID NO: 2106004 - DNA, 25 bp, Homo sapien
tgtcctacacattcctctgagtcac

SEQ ID NO: 2106005 - DNA, 25 bp, Homo sapien
gccctttccctatggagcacagggt

SEQ ID NO: 2106006 - DNA, 25 bp, Homo sapien
gaggaggagaagcccagattggtga

SEQ ID NO: 2106007 - DNA, 25 bp, Homo sapien
ttgtcattggcagaggaggagaagc

SEQ ID NO: 2106008 - DNA, 25 bp, Homo sapien
agaagcccagattggtgagtggcat

SEQ ID NO: 2106009 - DNA, 25 bp, Homo sapien
gaggagaagcccagattggtgagtg

SEQ ID NO: 2106010 - DNA, 25 bp, Homo sapien
ccagagtgtgtctgtttggacagca

SEQ ID NO: 2106011 - DNA, 25 bp, Homo sapien
tggacagcaggaaagtgtttgcttt

SEQ ID NO: 2106012 - DNA, 25 bp, Homo sapien
cagagtgtgtctgtttggacagcag

SEQ ID NO: 2106013 - DNA, 25 bp, Homo sapien
caggaaagtgtttgctttaatatca

SEQ ID NO: 2106014 - DNA, 25 bp, Homo sapien
agtgttaccgatggcctgtccttag

SEQ ID NO: 2106015 - DNA, 25 bp, Homo sapien
taggggtctgtagcaacttcagtcc

SEQ ID NO: 2106016 - DNA, 25 bp, Homo sapien
ccagtgttaccgatggcctgtcctt

SEQ ID NO: 2106017 - DNA, 25 bp, Homo sapien
tccttaggggtctgtagcaacttca

SEQ ID NO: 2106018 - DNA, 25 bp, Homo sapien
attggcttcgaagcgccccagcaat

SEQ ID NO: 2106019 - DNA, 25 bp, Homo sapien
ttccctgattggcttcgaagcgccc

SEQ ID NO: 2106020 - DNA, 25 bp, Homo sapien
ttcgaagcgccccagcaataattgc

SEQ ID NO: 2106021 - DNA, 25 bp, Homo sapien
gaagcgccccagcaataattgcata

SEQ ID NO: 2106022 - DNA, 25 bp, Homo sapien
gagatgcccctaagtttctggctag

SEQ ID NO: 2106023 - DNA, 25 bp, Homo sapien
ccagctccttctgtccgggaattag

SEQ ID NO: 2106024 - DNA, 25 bp, Homo sapien
tgtactgtctcttcccatacccagg

SEQ ID NO: 2106025 - DNA, 25 bp, Homo sapien
tccagtgacagaagcacgaactatt

SEQ ID NO: 2106026 - DNA, 25 bp, Homo sapien
caaaccatattcacttcacgcccct

SEQ ID NO: 2106027 - DNA, 25 bp, Homo sapien
caccacaaaccatattcacttcacg

SEQ ID NO: 2106028 - DNA, 25 bp, Homo sapien
gctcaccacaaaccatattcacttc

SEQ ID NO: 2106029 - DNA, 25 bp, Homo sapien
atattcacttcacgcccctcaagcc

SEQ ID NO: 2106030 - DNA, 25 bp, Homo sapien
tcatgactgagttttgcatgtgtca

SEQ ID NO: 2106031 - DNA, 25 bp, Homo sapien
tgtgtcatgagaatggctgcaaagg

SEQ ID NO: 2106032 - DNA, 25 bp, Homo sapien
tgcacttcccaagtttggtttgcca

SEQ ID NO: 2106033 - DNA, 25 bp, Homo sapien
gagacagcagagctactgtgaagca

SEQ ID NO: 2106034 - DNA, 25 bp, Homo sapien
acccagccactgtatgaggatcctc

SEQ ID NO: 2106035 - DNA, 25 bp, Homo sapien
cactgagacatcactacttgcagta

SEQ ID NO: 2106036 - DNA, 25 bp, Homo sapien
tacttgcagtagagaacaaaagtca

SEQ ID NO: 2106037 - DNA, 25 bp, Homo sapien
acttcacccagccactgtatgagga

SEQ ID NO: 2106038 - DNA, 25 bp, Homo sapien
gggcccagcaccagtccattaggac

SEQ ID NO: 2106039 - DNA, 25 bp, Homo sapien
cattaggacctccataccaacttct

SEQ ID NO: 2106040 - DNA, 25 bp, Homo sapien
aaagggagagcaatccgaactgtcc

SEQ ID NO: 2106041 - DNA, 25 bp, Homo sapien
ggagagcaatccgaactgtcctgcc

SEQ ID NO: 2106042 - DNA, 25 bp, Homo sapien
aagtgggagttctgtacccagactc

SEQ ID NO: 2106043 - DNA, 25 bp, Homo sapien
gagttctgtacccagactcatcata

SEQ ID NO: 2106044 - DNA, 25 bp, Homo sapien
cagaagtgggagttctgtacccaga

SEQ ID NO: 2106045 - DNA, 25 bp, Homo sapien
tgtacccagactcatcataatcatc

SEQ ID NO: 2106046 - DNA, 25 bp, Homo sapien
ttttctgcatgtgcaatagctagat

SEQ ID NO: 2106047 - DNA, 25 bp, Homo sapien
caatactgatcagtcagtgctccag

SEQ ID NO: 2106048 - DNA, 25 bp, Homo sapien
tcacaatactgatcagtcagtgctc

SEQ ID NO: 2106049 - DNA, 25 bp, Homo sapien
caatagctagatgtatgtcattttc

SEQ ID NO: 2106050 - DNA, 25 bp, Homo sapien
agcttcatcaatattagctggtttt

SEQ ID NO: 2106051 - DNA, 25 bp, Homo sapien
aacccacttcgtgcagactgctagg

SEQ ID NO: 2106052 - DNA, 25 bp, Homo sapien
aacctcagtgcaccatttccatgac

SEQ ID NO: 2106053 - DNA, 25 bp, Homo sapien
tcttcacgattgataaaaggtcaga

SEQ ID NO: 2106054 - DNA, 25 bp, Homo sapien
agaataattctcgtgctgaccaaag

SEQ ID NO: 2106055 - DNA, 25 bp, Homo sapien
caatcaggtttgagtataagtattt

SEQ ID NO: 2106056 - DNA, 25 bp, Homo sapien
gtttgagtataagtatttaaatgca

SEQ ID NO: 2106057 - DNA, 25 bp, Homo sapien
ccaatcaggtttgagtataagtatt

SEQ ID NO: 2106058 - DNA, 25 bp, Homo sapien
tcaggtttgagtataagtatttaaa

SEQ ID NO: 2106059 - DNA, 25 bp, Homo sapien
tttgcctgggcaccagaaaactttc

SEQ ID NO: 2106060 - DNA, 25 bp, Homo sapien
gtcaatgcaaacatatggcaagcag

SEQ ID NO: 2106061 - DNA, 25 bp, Homo sapien
taatcactgtgtcagcttctatgaa

SEQ ID NO: 2106062 - DNA, 25 bp, Homo sapien
tctatgaatgcattatttgagtcaa

SEQ ID NO: 2106063 - DNA, 25 bp, Homo sapien
gaatgttgtcataaaagtaaagcag

SEQ ID NO: 2106064 - DNA, 25 bp, Homo sapien
cataaaagtaaagcagaaggtttgg

SEQ ID NO: 2106065 - DNA, 25 bp, Homo sapien
tgggaatgttgtcataaaagtaaag

SEQ ID NO: 2106066 - DNA, 25 bp, Homo sapien
tgttgtcataaaagtaaagcagaag

SEQ ID NO: 2106067 - DNA, 25 bp, Homo sapien
agagagaaggcattgtcgaacaagg

SEQ ID NO: 2106068 - DNA, 25 bp, Homo sapien
aggcattgtcgaacaaggctttaga

SEQ ID NO: 2106069 - DNA, 25 bp, Homo sapien
gagaaggcattgtcgaacaaggctt

SEQ ID NO: 2106070 - DNA, 25 bp, Homo sapien
gctgaggacctgtgaagatagggta

SEQ ID NO: 2106071 - DNA, 25 bp, Homo sapien
caggtggaggcaatggaaggaccag

SEQ ID NO: 2106072 - DNA, 25 bp, Homo sapien
caatgcatgttattttccttgagta

SEQ ID NO: 2106073 - DNA, 25 bp, Homo sapien
tcacaaacaggcaattagtctgctg

SEQ ID NO: 2106074 - DNA, 25 bp, Homo sapien
ctattgagcaatcaccttcaatgca

SEQ ID NO: 2106075 - DNA, 25 bp, Homo sapien
aagttgattacatgggtgtcacaaa

SEQ ID NO: 2106076 - DNA, 25 bp, Homo sapien
cctgatgtttctcggcagtctgaaa

SEQ ID NO: 2106077 - DNA, 25 bp, Homo sapien
aacacagcctgaactgatgagtaca

SEQ ID NO: 2106078 - DNA, 25 bp, Homo sapien
tctctcagctgatgttgtcaggtga

SEQ ID NO: 2106079 - DNA, 25 bp, Homo sapien
gaattcatggcctcctgatgtttct

SEQ ID NO: 2106080 - DNA, 25 bp, Homo sapien
gggcccagcatttcgtttgttcata

SEQ ID NO: 2106081 - DNA, 25 bp, Homo sapien
catcacttggaactcgttggaaagg

SEQ ID NO: 2106082 - DNA, 25 bp, Homo sapien
cctacagagtcagaacactggagat

SEQ ID NO: 2106083 - DNA, 25 bp, Homo sapien
gttggaaaggcaaatcttcagcccc

SEQ ID NO: 2106084 - DNA, 25 bp, Homo sapien
tcccttgtggaattgcgtgagaatg

SEQ ID NO: 2106085 - DNA, 25 bp, Homo sapien
agtctcccagtgattgacacccagg

SEQ ID NO: 2106086 - DNA, 25 bp, Homo sapien
taccaggccgcagtgtacttaaact

SEQ ID NO: 2106087 - DNA, 25 bp, Homo sapien
gacacccaggtagtcggcaactcat

SEQ ID NO: 2106088 - DNA, 25 bp, Homo sapien
gaatgctcttgtaaaatgggtatca

SEQ ID NO: 2106089 - DNA, 25 bp, Homo sapien
tgtttttgaatgctcttgtaaaatg

SEQ ID NO: 2106090 - DNA, 25 bp, Homo sapien
tcttaattgtttttgaatgctcttg

SEQ ID NO: 2106091 - DNA, 25 bp, Homo sapien
tacccatccatcagcaactattttc

SEQ ID NO: 2106092 - DNA, 25 bp, Homo sapien
caaatcctgcatctcgaatttcaaa

SEQ ID NO: 2106093 - DNA, 25 bp, Homo sapien
cagaatcttaactctcaaggttggg

SEQ ID NO: 2106094 - DNA, 25 bp, Homo sapien
tcaaatcttccctctgtcattggct

SEQ ID NO: 2106095 - DNA, 25 bp, Homo sapien
ctgaaatatagtgctctctccagag

SEQ ID NO: 2106096 - DNA, 25 bp, Homo sapien
tgtagccaaacacatccgagcacct

SEQ ID NO: 2106097 - DNA, 25 bp, Homo sapien
cacatccgagcaccttgcattaata

SEQ ID NO: 2106098 - DNA, 25 bp, Homo sapien
ccgagcaccttgcattaatatgaac

SEQ ID NO: 2106099 - DNA, 25 bp, Homo sapien
caaacacatccgagcaccttgcatt

SEQ ID NO: 2106100 - DNA, 25 bp, Homo sapien
tgtacagacaaacttgggtcctcct

SEQ ID NO: 2106101 - DNA, 25 bp, Homo sapien
ctcagactcctcaaaatgagggaag

SEQ ID NO: 2106102 - DNA, 25 bp, Homo sapien
ggacagctggaaaaacgtgactacc

SEQ ID NO: 2106103 - DNA, 25 bp, Homo sapien
gaaatgaggatagcctgtgtccaca

SEQ ID NO: 2106104 - DNA, 25 bp, Homo sapien
tagagtaagtgaacaggccaccagc

SEQ ID NO: 2106105 - DNA, 25 bp, Homo sapien
cacactggtatctagcaggaacaaa

SEQ ID NO: 2106106 - DNA, 25 bp, Homo sapien
gacagttgaagaggtctcaagccca

SEQ ID NO: 2106107 - DNA, 25 bp, Homo sapien
caaactgaccctgaatgattgctca

SEQ ID NO: 2106108 - DNA, 25 bp, Homo sapien
cccctattggccatcaaatttttcg

SEQ ID NO: 2106109 - DNA, 25 bp, Homo sapien
tgtgtctgtatcaatgtaactttca

SEQ ID NO: 2106110 - DNA, 25 bp, Homo sapien
tggccatcaaatttttcgcttgtgt

SEQ ID NO: 2106111 - DNA, 25 bp, Homo sapien
tttttcgcttgtgtctgtatcaatg

SEQ ID NO: 2106112 - DNA, 25 bp, Homo sapien
tctttacacagtcccaagcagagag

SEQ ID NO: 2106113 - DNA, 25 bp, Homo sapien
tagagatagcttcttggaggccgag

SEQ ID NO: 2106114 - DNA, 25 bp, Homo sapien
gaggccgagtttcacaaatctagca

SEQ ID NO: 2106115 - DNA, 25 bp, Homo sapien
tttggccagtgggaaacaggaacca

SEQ ID NO: 2106116 - DNA, 25 bp, Homo sapien
gattctggatcacaaatagtcctat

SEQ ID NO: 2106117 - DNA, 25 bp, Homo sapien
ttcagatcaacctcaacctataggc

SEQ ID NO: 2106118 - DNA, 25 bp, Homo sapien
tttctgctccaaggatgaaattctc

SEQ ID NO: 2106119 - DNA, 25 bp, Homo sapien
catctttgttactacttttggctcc

SEQ ID NO: 2106120 - DNA, 25 bp, Homo sapien
gaagcagtcagtgagaagacattca

SEQ ID NO: 2106121 - DNA, 25 bp, Homo sapien
aacttagttgacacattggtaggcc

SEQ ID NO: 2106122 - DNA, 25 bp, Homo sapien
taggccatggttacttacaaggaat

SEQ ID NO: 2106123 - DNA, 25 bp, Homo sapien
taagttcatgaaaaacagtgagccc

SEQ ID NO: 2106124 - DNA, 25 bp, Homo sapien
ggaatcagagttaactttgtcttgg

SEQ ID NO: 2106125 - DNA, 25 bp, Homo sapien
ttgtcttggtcattatgacatgacc

SEQ ID NO: 2106126 - DNA, 25 bp, Homo sapien
tagaacactagcactgagaaaaaag

SEQ ID NO: 2106127 - DNA, 25 bp, Homo sapien
ggcttaaaatatactgtggaatcag

SEQ ID NO: 2106128 - DNA, 25 bp, Homo sapien
tttagagctatgtctggctgtcggc

SEQ ID NO: 2106129 - DNA, 25 bp, Homo sapien
gacctctggtaacaaaatgctgaag

SEQ ID NO: 2106130 - DNA, 25 bp, Homo sapien
taggtgtgatctaatggcagaccca

SEQ ID NO: 2106131 - DNA, 25 bp, Homo sapien
tggaacttctgaggtctgctgtagc

SEQ ID NO: 2106132 - DNA, 25 bp, Homo sapien
ctgggatagcccaccacccctgaat

SEQ ID NO: 2106133 - DNA, 25 bp, Homo sapien
ggatagcccaccacccctgaattcc

SEQ ID NO: 2106134 - DNA, 25 bp, Homo sapien
agcccaccacccctgaattcctcat

SEQ ID NO: 2106135 - DNA, 25 bp, Homo sapien
tagcccaccacccctgaattcctca

SEQ ID NO: 2106136 - DNA, 25 bp, Homo sapien
cctgagtgtaagatggtgtaagaga

SEQ ID NO: 2106137 - DNA, 25 bp, Homo sapien
atggtgtaagagaataccaaagatc

SEQ ID NO: 2106138 - DNA, 25 bp, Homo sapien
tggtaacacctgagtgtaagatggt

SEQ ID NO: 2106139 - DNA, 25 bp, Homo sapien
gctctcctggtaacacctgagtgta

SEQ ID NO: 2106140 - DNA, 25 bp, Homo sapien
cttctctttgaggatgtccttggtg

SEQ ID NO: 2106141 - DNA, 25 bp, Homo sapien
tccttggtgttttcatcatcactaa

SEQ ID NO: 2106142 - DNA, 25 bp, Homo sapien
cttggtgttttcatcatcactaagt

SEQ ID NO: 2106143 - DNA, 25 bp, Homo sapien
tctctttgaggatgtccttggtgtt

SEQ ID NO: 2106144 - DNA, 25 bp, Homo sapien
gttttagctccatgagctgtgaggg

SEQ ID NO: 2106145 - DNA, 25 bp, Homo sapien
caagttttagctccatgagctgtga

SEQ ID NO: 2106146 - DNA, 25 bp, Homo sapien
gataacagtctcaaagggcaagact

SEQ ID NO: 2106147 - DNA, 25 bp, Homo sapien
caaagggcaagacttgagtggcagc

SEQ ID NO: 2106148 - DNA, 25 bp, Homo sapien
taaccaagtgacgagaggtagactc

SEQ ID NO: 2106149 - DNA, 25 bp, Homo sapien
cacttggagttgatatcgaggataa

SEQ ID NO: 2106150 - DNA, 25 bp, Homo sapien
caaggtattctctatgggagaatgc

SEQ ID NO: 2106151 - DNA, 25 bp, Homo sapien
tcatagaagttagcattccagatgt

SEQ ID NO: 2106152 - DNA, 25 bp, Homo sapien
cagacaccagcatatatgaactgca

SEQ ID NO: 2106153 - DNA, 25 bp, Homo sapien
ctgggcagacaccagcatatatgaa

SEQ ID NO: 2106154 - DNA, 25 bp, Homo sapien
cattagctggatggttgatatatct

SEQ ID NO: 2106155 - DNA, 25 bp, Homo sapien
atgaactgcattagctggatggttg

SEQ ID NO: 2106156 - DNA, 25 bp, Homo sapien
ggacttagtgtatagaagatgctca

SEQ ID NO: 2106157 - DNA, 25 bp, Homo sapien
tctggtctaaaagctccaaagcagc

SEQ ID NO: 2106158 - DNA, 25 bp, Homo sapien
caagggaaagggtgtgttcaatgtc

SEQ ID NO: 2106159 - DNA, 25 bp, Homo sapien
caaagcagcagggattgccagtctc

SEQ ID NO: 2106160 - DNA, 25 bp, Homo sapien
ttctgcaagcctgagcattgagctc

SEQ ID NO: 2106161 - DNA, 25 bp, Homo sapien
atttctgcaagcctgagcattgagc

SEQ ID NO: 2106162 - DNA, 25 bp, Homo sapien
tgcaagcctgagcattgagctcctg

SEQ ID NO: 2106163 - DNA, 25 bp, Homo sapien
caatttctgcaagcctgagcattga

SEQ ID NO: 2106164 - DNA, 25 bp, Homo sapien
tctgtgctatagttattaacatcta

SEQ ID NO: 2106165 - DNA, 25 bp, Homo sapien
ttattaacatctagacccaccgagt

SEQ ID NO: 2106166 - DNA, 25 bp, Homo sapien
gttcaagtacttatctatggacaga

SEQ ID NO: 2106167 - DNA, 25 bp, Homo sapien
cccaccgagttcaagtacttatcta

SEQ ID NO: 2106168 - DNA, 25 bp, Homo sapien
cgaaggtacgcaatatattcccagt

SEQ ID NO: 2106169 - DNA, 25 bp, Homo sapien
ctgtgaagatcagtaaatgacatcg

SEQ ID NO: 2106170 - DNA, 25 bp, Homo sapien
cagttgaaggtaaggctttctaggt

SEQ ID NO: 2106171 - DNA, 25 bp, Homo sapien
tcccagttgaaggtaaggctttcta

SEQ ID NO: 2106172 - DNA, 25 bp, Homo sapien
tcaggaacacagcaatagacacagc

SEQ ID NO: 2106173 - DNA, 25 bp, Homo sapien
tcagtgatatgatcctcaggaacac

SEQ ID NO: 2106174 - DNA, 25 bp, Homo sapien
tagcactctgatagtaatacctttg

SEQ ID NO: 2106175 - DNA, 25 bp, Homo sapien
aacacagctatcaggatccaaggac

SEQ ID NO: 2106176 - DNA, 25 bp, Homo sapien
ggaccaaagggtccaatggcataac

SEQ ID NO: 2106177 - DNA, 25 bp, Homo sapien
gaccaaagggtccaatggcataacc

SEQ ID NO: 2106178 - DNA, 25 bp, Homo sapien
tttaaataatatgctcatcctctta

SEQ ID NO: 2106179 - DNA, 25 bp, Homo sapien
tattttcatctttgatgctcaaagg

SEQ ID NO: 2106180 - DNA, 25 bp, Homo sapien
taaataatatgctcatcctcttatt

SEQ ID NO: 2106181 - DNA, 25 bp, Homo sapien
tttcatctttgatgctcaaaggtac

SEQ ID NO: 2106182 - DNA, 25 bp, Homo sapien
ctttagaaccactgtggctcctttt

SEQ ID NO: 2106183 - DNA, 25 bp, Homo sapien
tttagaaccactgtggctccttttg

SEQ ID NO: 2106184 - DNA, 25 bp, Homo sapien
ttggggtaaacatgatgttggccat

SEQ ID NO: 2106185 - DNA, 25 bp, Homo sapien
tgtggctccttttggggtaaacatg

SEQ ID NO: 2106186 - DNA, 25 bp, Homo sapien
tctggcacccgtggcattgccagca

SEQ ID NO: 2106187 - DNA, 25 bp, Homo sapien
ccaaaagtctggcttttgaacactc

SEQ ID NO: 2106188 - DNA, 25 bp, Homo sapien
cttctccacagttcataatgaaggc

SEQ ID NO: 2106189 - DNA, 25 bp, Homo sapien
cgggtactgccccttgcgaagtcca

SEQ ID NO: 2106190 - DNA, 25 bp, Homo sapien
ttttccgataaagcgtgagcctcga

SEQ ID NO: 2106191 - DNA, 25 bp, Homo sapien
taaagcgtgagcctcgataatgtca

SEQ ID NO: 2106192 - DNA, 25 bp, Homo sapien
gagcctcgataatgtcagcataagg

SEQ ID NO: 2106193 - DNA, 25 bp, Homo sapien
tttccttttccgataaagcgtgagc

SEQ ID NO: 2106194 - DNA, 25 bp, Homo sapien
tcagcaagtgccatagtaactggga

SEQ ID NO: 2106195 - DNA, 25 bp, Homo sapien
aaatccgttggccatctagatgtgg

SEQ ID NO: 2106196 - DNA, 25 bp, Homo sapien
taaagactcagatgacaggattgcc

SEQ ID NO: 2106197 - DNA, 25 bp, Homo sapien
tcccatgcgagaagcctgtagtgcc

SEQ ID NO: 2106198 - DNA, 25 bp, Homo sapien
gaaatgagctgtgttgattcaatag

SEQ ID NO: 2106199 - DNA, 25 bp, Homo sapien
tgatctactcctggtgtgaaatgag

SEQ ID NO: 2106200 - DNA, 25 bp, Homo sapien
tactcctggtgtgaaatgagctgtg

SEQ ID NO: 2106201 - DNA, 25 bp, Homo sapien
cctggtgtgaaatgagctgtgttga

SEQ ID NO: 2106202 - DNA, 25 bp, Homo sapien
tgtgggggtgacacactacaacttg

SEQ ID NO: 2106203 - DNA, 25 bp, Homo sapien
actacaacttgttctgccagcacca

SEQ ID NO: 2106204 - DNA, 25 bp, Homo sapien
aacttgttctgccagcaccaaagcc

SEQ ID NO: 2106205 - DNA, 25 bp, Homo sapien
gaaatgtgggggtgacacactacaa

SEQ ID NO: 2106206 - DNA, 25 bp, Homo sapien
gccaaatataggcagtgccaccaaa

SEQ ID NO: 2106207 - DNA, 25 bp, Homo sapien
tataggcagtgccaccaaaactgcc

SEQ ID NO: 2106208 - DNA, 25 bp, Homo sapien
ccagtgccaaatataggcagtgcca

SEQ ID NO: 2106209 - DNA, 25 bp, Homo sapien
gggccccagtgccaaatataggcag

SEQ ID NO: 2106210 - DNA, 25 bp, Homo sapien
taggaacagtgtacatccacaattc

SEQ ID NO: 2106211 - DNA, 25 bp, Homo sapien
gaacagtgtacatccacaattcatt

SEQ ID NO: 2106212 - DNA, 25 bp, Homo sapien
tctataggaacagtgtacatccaca

SEQ ID NO: 2106213 - DNA, 25 bp, Homo sapien
tataggaacagtgtacatccacaat

SEQ ID NO: 2106214 - DNA, 25 bp, Homo sapien
tattattactctcctctttatccag

SEQ ID NO: 2106215 - DNA, 25 bp, Homo sapien
gtgcctcaactccacatgtatcaag

SEQ ID NO: 2106216 - DNA, 25 bp, Homo sapien
taaaggtcatgactagctgttagtg

SEQ ID NO: 2106217 - DNA, 25 bp, Homo sapien
tccagttggttattcctgagatttg

SEQ ID NO: 2106218 - DNA, 25 bp, Homo sapien
tgctctgagctagtgagtattctca

SEQ ID NO: 2106219 - DNA, 25 bp, Homo sapien
gggttactcaaacctcgcattgtca

SEQ ID NO: 2106220 - DNA, 25 bp, Homo sapien
caatttcacacgctgtaatctggag

SEQ ID NO: 2106221 - DNA, 25 bp, Homo sapien
taatctggagaagctagggttactc

SEQ ID NO: 2106222 - DNA, 25 bp, Homo sapien
tcatacctagtatgcctcttcttct

SEQ ID NO: 2106223 - DNA, 25 bp, Homo sapien
tgctcttactactacttcataccta

SEQ ID NO: 2106224 - DNA, 25 bp, Homo sapien
tactactacttcatacctagtatgc

SEQ ID NO: 2106225 - DNA, 25 bp, Homo sapien
tacttcatacctagtatgcctcttc

SEQ ID NO: 2106226 - DNA, 25 bp, Homo sapien
gccatccgatatggcaaagatattt

SEQ ID NO: 2106227 - DNA, 25 bp, Homo sapien
aaaatgccatccgatatggcaaaga

SEQ ID NO: 2106228 - DNA, 25 bp, Homo sapien
tttaaaaatgccatccgatatggca

SEQ ID NO: 2106229 - DNA, 25 bp, Homo sapien
agatatttgagttggagcagatatc

SEQ ID NO: 2106230 - DNA, 25 bp, Homo sapien
cttcaggtatatcctggatatacaa

SEQ ID NO: 2106231 - DNA, 25 bp, Homo sapien
gcggcaagtcagtattgaaaattgc

SEQ ID NO: 2106232 - DNA, 25 bp, Homo sapien
tttcttcttgctagcggcaagtcag

SEQ ID NO: 2106233 - DNA, 25 bp, Homo sapien
gtttcctccactccttcgtatgctt

SEQ ID NO: 2106234 - DNA, 25 bp, Homo sapien
aatgaggtgttgtaaaaactgatgc

SEQ ID NO: 2106235 - DNA, 25 bp, Homo sapien
ccagactaagctggaatacagaatg

SEQ ID NO: 2106236 - DNA, 25 bp, Homo sapien
gtcatccaaacccagactaagctgg

SEQ ID NO: 2106237 - DNA, 25 bp, Homo sapien
caaacccagactaagctggaataca

SEQ ID NO: 2106238 - DNA, 25 bp, Homo sapien
caggtgattgatcagtgatccccag

SEQ ID NO: 2106239 - DNA, 25 bp, Homo sapien
cagctgcaggtgattgatcagtgat

SEQ ID NO: 2106240 - DNA, 25 bp, Homo sapien
ttaggcacggaattgggccccaatg

SEQ ID NO: 2106241 - DNA, 25 bp, Homo sapien
taggcacggaattgggccccaatgc

SEQ ID NO: 2106242 - DNA, 25 bp, Homo sapien
gagccattggtccactgcggtacca

SEQ ID NO: 2106243 - DNA, 25 bp, Homo sapien
gcagacctccattaaggctccttct

SEQ ID NO: 2106244 - DNA, 25 bp, Homo sapien
ggtagagccattggtccactgcggt

SEQ ID NO: 2106245 - DNA, 25 bp, Homo sapien
ttggctttgcagacctccattaagg

SEQ ID NO: 2106246 - DNA, 25 bp, Homo sapien
tcatgtaccagtatgggtcaccaaa

SEQ ID NO: 2106247 - DNA, 25 bp, Homo sapien
cagtatgggtcaccaaaatgatcca

SEQ ID NO: 2106248 - DNA, 25 bp, Homo sapien
aaggggtccttccaacacgcatcca

SEQ ID NO: 2106249 - DNA, 25 bp, Homo sapien
caggatctttcgctccttagttcag

SEQ ID NO: 2106250 - DNA, 25 bp, Homo sapien
caaggaccagggtaatccagtcaga

SEQ ID NO: 2106251 - DNA, 25 bp, Homo sapien
caatgttattccatctcctaggtat

SEQ ID NO: 2106252 - DNA, 25 bp, Homo sapien
cctcttaatgacaacgtggatgctt

SEQ ID NO: 2106253 - DNA, 25 bp, Homo sapien
cagaatctatactctgagaatctgg

SEQ ID NO: 2106254 - DNA, 25 bp, Homo sapien
catgcccacaaagtctgaacagagg

SEQ ID NO: 2106255 - DNA, 25 bp, Homo sapien
gctgctcctgttgccactgacatgc

SEQ ID NO: 2106256 - DNA, 25 bp, Homo sapien
aatagcatccttgtgaggtgctgcc

SEQ ID NO: 2106257 - DNA, 25 bp, Homo sapien
aatcttggactgtgatttagtgagc

SEQ ID NO: 2106258 - DNA, 25 bp, Homo sapien
ttcagctcaacaattcttcatattt

SEQ ID NO: 2106259 - DNA, 25 bp, Homo sapien
aagtgtttatcctgcttttaagcaa

SEQ ID NO: 2106260 - DNA, 25 bp, Homo sapien
ctgcatccgcttcttcttaatcatc

SEQ ID NO: 2106261 - DNA, 25 bp, Homo sapien
acagagggttcctctcacaggaggg

SEQ ID NO: 2106262 - DNA, 25 bp, Homo sapien
ctgtgtagggaagggaaactatctt

SEQ ID NO: 2106263 - DNA, 25 bp, Homo sapien
ccttctgagttcttgattgtggcgt

SEQ ID NO: 2106264 - DNA, 25 bp, Homo sapien
tctacccttctgagttcttgattgt

SEQ ID NO: 2106265 - DNA, 25 bp, Homo sapien
ttcttctacccttctgagttcttga

SEQ ID NO: 2106266 - DNA, 25 bp, Homo sapien
gaccttgagatagggcttagcatgc

SEQ ID NO: 2106267 - DNA, 25 bp, Homo sapien
cttgagatagggcttagcatgcata

SEQ ID NO: 2106268 - DNA, 25 bp, Homo sapien
tagaccttgagatagggcttagcat

SEQ ID NO: 2106269 - DNA, 25 bp, Homo sapien
gatagggcttagcatgcataatatt

SEQ ID NO: 2106270 - DNA, 25 bp, Homo sapien
cttcaccctggaatgccatttctat

SEQ ID NO: 2106271 - DNA, 25 bp, Homo sapien
ttcaccctggaatgccatttctatt

SEQ ID NO: 2106272 - DNA, 25 bp, Homo sapien
tcccaaccatacttccctgctcctg

SEQ ID NO: 2106273 - DNA, 25 bp, Homo sapien
catgttcccaaccatacttccctgc

SEQ ID NO: 2106274 - DNA, 25 bp, Homo sapien
ggtataacaatcacccggagtcaga

SEQ ID NO: 2106275 - DNA, 25 bp, Homo sapien
gacagcaggttatacatgggcatcc

SEQ ID NO: 2106276 - DNA, 25 bp, Homo sapien
tacaattgtggcaaaaggtgcagct

SEQ ID NO: 2106277 - DNA, 25 bp, Homo sapien
tatcttagacaagggtcagtaccag

SEQ ID NO: 2106278 - DNA, 25 bp, Homo sapien
gggctcgctggatgccatggagaag

SEQ ID NO: 2106279 - DNA, 25 bp, Homo sapien
atgggctcgctggatgccatggaga

SEQ ID NO: 2106280 - DNA, 25 bp, Homo sapien
ggcatgggctcgctggatgccatgg

SEQ ID NO: 2106281 - DNA, 25 bp, Homo sapien
cggggcatgggctcgctggatgcca

SEQ ID NO: 2106282 - DNA, 25 bp, Homo sapien
tgaccttaccagaaacattctccat

SEQ ID NO: 2106283 - DNA, 25 bp, Homo sapien
gatatcatggaatggttaagggtaa

SEQ ID NO: 2106284 - DNA, 25 bp, Homo sapien
caggtatcccaggtatccgatatgg

SEQ ID NO: 2106285 - DNA, 25 bp, Homo sapien
gaagaaccacagatttccaggtatc

SEQ ID NO: 2106286 - DNA, 25 bp, Homo sapien
caggtatccgatatggttcttttca

SEQ ID NO: 2106287 - DNA, 25 bp, Homo sapien
gcaactcagcgccttcagtttcttt

SEQ ID NO: 2106288 - DNA, 25 bp, Homo sapien
gtttctactgtagcaactcagcgcc

SEQ ID NO: 2106289 - DNA, 25 bp, Homo sapien
tgcgagatgtttctactgtagcaac

SEQ ID NO: 2106290 - DNA, 25 bp, Homo sapien
catagggacttttgcgagatgtttc

SEQ ID NO: 2106291 - DNA, 25 bp, Homo sapien
tgggttcgagcgatactcctacctc

SEQ ID NO: 2106292 - DNA, 25 bp, Homo sapien
cagcctctcaagtacctgggggtta

SEQ ID NO: 2106293 - DNA, 25 bp, Homo sapien
gcatgcaccaccatgcccagctaat

SEQ ID NO: 2106294 - DNA, 25 bp, Homo sapien
caccatgcccagctaattttgtatt

SEQ ID NO: 2106295 - DNA, 25 bp, Homo sapien
tcagcttctttctgatctactagaa

SEQ ID NO: 2106296 - DNA, 25 bp, Homo sapien
cttctttctgatctactagaaggac

SEQ ID NO: 2106297 - DNA, 25 bp, Homo sapien
gcccatcagcttctttctgatctac

SEQ ID NO: 2106298 - DNA, 25 bp, Homo sapien
actctgcccatcagcttctttctga

SEQ ID NO: 2106299 - DNA, 25 bp, Homo sapien
tgggatttttagcaggtgaccatga

SEQ ID NO: 2106300 - DNA, 25 bp, Homo sapien
tcccaatcaatagaagtgccagcag

SEQ ID NO: 2106301 - DNA, 25 bp, Homo sapien
gtgccagcagcagaaagaactgaga

SEQ ID NO: 2106302 - DNA, 25 bp, Homo sapien
aaatccttgtcgagctgggaatgcc

SEQ ID NO: 2106303 - DNA, 25 bp, Homo sapien
gaggctcagtcctgtgcatgcctca

SEQ ID NO: 2106304 - DNA, 25 bp, Homo sapien
ctcagtcctgtgcatgcctcaagct

SEQ ID NO: 2106305 - DNA, 25 bp, Homo sapien
gctcgcccatcaggtctgacagcat

SEQ ID NO: 2106306 - DNA, 25 bp, Homo sapien
accaggaggctcagtcctgtgcatg

SEQ ID NO: 2106307 - DNA, 25 bp, Homo sapien
tacagttgttccactttgggatagc

SEQ ID NO: 2106308 - DNA, 25 bp, Homo sapien
gatagctggtatgcctgagtgagtt

SEQ ID NO: 2106309 - DNA, 25 bp, Homo sapien
gcggtgggctctacagttgttccac

SEQ ID NO: 2106310 - DNA, 25 bp, Homo sapien
gagtgagttgttgctggacatgact

SEQ ID NO: 2106311 - DNA, 25 bp, Homo sapien
accaccaatctctgctaagtttttc

SEQ ID NO: 2106312 - DNA, 25 bp, Homo sapien
ccaccaatctctgctaagtttttca

SEQ ID NO: 2106313 - DNA, 25 bp, Homo sapien
ccaagctggtgatgtggatttaggg

SEQ ID NO: 2106314 - DNA, 25 bp, Homo sapien
gattccgagaagtgttatgagccat

SEQ ID NO: 2106315 - DNA, 25 bp, Homo sapien
agaagtgttatgagccatcctccac

SEQ ID NO: 2106316 - DNA, 25 bp, Homo sapien
tggaggattccgagaagtgttatga

SEQ ID NO: 2106317 - DNA, 25 bp, Homo sapien
ggtttctagatgtctgcttgttccc

SEQ ID NO: 2106318 - DNA, 25 bp, Homo sapien
catatccatcattaggaatccaggt

SEQ ID NO: 2106319 - DNA, 25 bp, Homo sapien
tagattgttgctcatggtttctaga

SEQ ID NO: 2106320 - DNA, 25 bp, Homo sapien
caggtattggagacttggttcagga

SEQ ID NO: 2106321 - DNA, 25 bp, Homo sapien
ttatttaatcttggactgccctgga

SEQ ID NO: 2106322 - DNA, 25 bp, Homo sapien
gtgttatttaatcttggactgccct

SEQ ID NO: 2106323 - DNA, 25 bp, Homo sapien
tatttaatcttggactgccctggac

SEQ ID NO: 2106324 - DNA, 25 bp, Homo sapien
ttaatcttggactgccctggaccat

SEQ ID NO: 2106325 - DNA, 25 bp, Homo sapien
aggtatgggcactgggaacagccag

SEQ ID NO: 2106326 - DNA, 25 bp, Homo sapien
gaagcagaggtatgggcactgggaa

SEQ ID NO: 2106327 - DNA, 25 bp, Homo sapien
tgaaagaggctttatcctctttccc

SEQ ID NO: 2106328 - DNA, 25 bp, Homo sapien
tgagcatggatcaggagtaaaactg

SEQ ID NO: 2106329 - DNA, 25 bp, Homo sapien
taaaattcatgcctgagcttgtcag

SEQ ID NO: 2106330 - DNA, 25 bp, Homo sapien
tcctatgtgcctagacacagttggg

SEQ ID NO: 2106331 - DNA, 25 bp, Homo sapien
tgtgggctctgaatagcaggattta

SEQ ID NO: 2106332 - DNA, 25 bp, Homo sapien
cagaaaggatgacaactgtgggctc

SEQ ID NO: 2106333 - DNA, 25 bp, Homo sapien
gaaaatcttgttggaagtgcagaag

SEQ ID NO: 2106334 - DNA, 25 bp, Homo sapien
cagaagtgtaaatcatacccctggg

SEQ ID NO: 2106335 - DNA, 25 bp, Homo sapien
tcacaggtgcattcgttttctaggg

SEQ ID NO: 2106336 - DNA, 25 bp, Homo sapien
cagatgtccttcctaacttgtgata

SEQ ID NO: 2106337 - DNA, 25 bp, Homo sapien
atttactgaagctggcgttggtgct

SEQ ID NO: 2106338 - DNA, 25 bp, Homo sapien
gctggggtaggctggcatatcatga

SEQ ID NO: 2106339 - DNA, 25 bp, Homo sapien
ctggggtaggctggcatatcatgaa

SEQ ID NO: 2106340 - DNA, 25 bp, Homo sapien
tcatttactgaagctggcgttggtg

SEQ ID NO: 2106341 - DNA, 25 bp, Homo sapien
tagtagatatcttgtcttaagaaga

SEQ ID NO: 2106342 - DNA, 25 bp, Homo sapien
tgctgcagaagacttagacaatctt

SEQ ID NO: 2106343 - DNA, 25 bp, Homo sapien
gacaatcttctaatcacacgggtgc

SEQ ID NO: 2106344 - DNA, 25 bp, Homo sapien
tggactaatttctactcccagattg

SEQ ID NO: 2106345 - DNA, 25 bp, Homo sapien
tggatctctgttacgttgaatgcca

SEQ ID NO: 2106346 - DNA, 25 bp, Homo sapien
atggatctctgttacgttgaatgcc

SEQ ID NO: 2106347 - DNA, 25 bp, Homo sapien
ggatctctgttacgttgaatgccat

SEQ ID NO: 2106348 - DNA, 25 bp, Homo sapien
aagccagcatcctgatcaagtctct

SEQ ID NO: 2106349 - DNA, 25 bp, Homo sapien
tggtgcagaagccagcatcctgatc

SEQ ID NO: 2106350 - DNA, 25 bp, Homo sapien
gccagcatcctgatcaagtctcttt

SEQ ID NO: 2106351 - DNA, 25 bp, Homo sapien
agaagccagcatcctgatcaagtct

SEQ ID NO: 2106352 - DNA, 25 bp, Homo sapien
tttgtgtagaatcttcagttggtct

SEQ ID NO: 2106353 - DNA, 25 bp, Homo sapien
gaccatattctcttttggcaatgta

SEQ ID NO: 2106354 - DNA, 25 bp, Homo sapien
tctttggggttaaatcccatgacca

SEQ ID NO: 2106355 - DNA, 25 bp, Homo sapien
ttcgtaaacccaggaccatattctc

SEQ ID NO: 2106356 - DNA, 25 bp, Homo sapien
tctcacctatgatgacagagttgtt

SEQ ID NO: 2106357 - DNA, 25 bp, Homo sapien
ctgaaggacattgcctcttgagggc

SEQ ID NO: 2106358 - DNA, 25 bp, Homo sapien
atgacagagttgttataaactgaag

SEQ ID NO: 2106359 - DNA, 25 bp, Homo sapien
tggcagtgccaaggctctcacctat

SEQ ID NO: 2106360 - DNA, 25 bp, Homo sapien
ccttttagtgagagaacttcaattt

SEQ ID NO: 2106361 - DNA, 25 bp, Homo sapien
tgtaccataatctcagagcccagct

SEQ ID NO: 2106362 - DNA, 25 bp, Homo sapien
ttccgtgattcaagatggtgggtct

SEQ ID NO: 2106363 - DNA, 25 bp, Homo sapien
gagcccagctttgccggaaacgtgt

SEQ ID NO: 2106364 - DNA, 25 bp, Homo sapien
aggcagtaacctgagaggatcttca

SEQ ID NO: 2106365 - DNA, 25 bp, Homo sapien
gccctcattaccaaaggaagatgtt

SEQ ID NO: 2106366 - DNA, 25 bp, Homo sapien
cccagtgccctcattaccaaaggaa

SEQ ID NO: 2106367 - DNA, 25 bp, Homo sapien
catgtaaggcagtaacctgagagga

SEQ ID NO: 2106368 - DNA, 25 bp, Homo sapien
tatgctttgaaccagggccttccat

SEQ ID NO: 2106369 - DNA, 25 bp, Homo sapien
caggtgtttgatagtatgctttgaa

SEQ ID NO: 2106370 - DNA, 25 bp, Homo sapien
gatagtatgctttgaaccagggcct

SEQ ID NO: 2106371 - DNA, 25 bp, Homo sapien
gtttgatagtatgctttgaaccagg

SEQ ID NO: 2106372 - DNA, 25 bp, Homo sapien
caagtagtttcgtgcttcagacaga

SEQ ID NO: 2106373 - DNA, 25 bp, Homo sapien
ttccctgcaagtagtttcgtgcttc

SEQ ID NO: 2106374 - DNA, 25 bp, Homo sapien
cctgcaagtagtttcgtgcttcaga

SEQ ID NO: 2106375 - DNA, 25 bp, Homo sapien
agtttcgtgcttcagacagagctcc

SEQ ID NO: 2106376 - DNA, 25 bp, Homo sapien
gacgcagagttgagcgactacgttt

SEQ ID NO: 2106377 - DNA, 25 bp, Homo sapien
gcagagttgagcgactacgttttac

SEQ ID NO: 2106378 - DNA, 25 bp, Homo sapien
ttactgacgcagagttgagcgacta

SEQ ID NO: 2106379 - DNA, 25 bp, Homo sapien
gagttgagcgactacgttttactgt

SEQ ID NO: 2106380 - DNA, 25 bp, Homo sapien
ctgctgcaagttactgtcaacaaac

SEQ ID NO: 2106381 - DNA, 25 bp, Homo sapien
tatataaagtgtagaggcaactccc

SEQ ID NO: 2106382 - DNA, 25 bp, Homo sapien
tttgctatagctgccgggatccagg

SEQ ID NO: 2106383 - DNA, 25 bp, Homo sapien
gggatccaggctagttgtgctgtta

SEQ ID NO: 2106384 - DNA, 25 bp, Homo sapien
tgtgtagcccctaaattggtcatcc

SEQ ID NO: 2106385 - DNA, 25 bp, Homo sapien
tgtagcccctaaattggtcatccat

SEQ ID NO: 2106386 - DNA, 25 bp, Homo sapien
gttgtgtagcccctaaattggtcat

SEQ ID NO: 2106387 - DNA, 25 bp, Homo sapien
gtgtagcccctaaattggtcatcca

SEQ ID NO: 2106388 - DNA, 25 bp, Homo sapien
tctttcaaatctctcagtctgaata

SEQ ID NO: 2106389 - DNA, 25 bp, Homo sapien
ttcaaatctctcagtctgaatactc

SEQ ID NO: 2106390 - DNA, 25 bp, Homo sapien
caaatctctcagtctgaatactctt

SEQ ID NO: 2106391 - DNA, 25 bp, Homo sapien
aatctctcagtctgaatactctttc

SEQ ID NO: 2106392 - DNA, 25 bp, Homo sapien
aatggtgtgagtgttctgcttcatc

SEQ ID NO: 2106393 - DNA, 25 bp, Homo sapien
cacatcaacacatgagtcagcagat

SEQ ID NO: 2106394 - DNA, 25 bp, Homo sapien
gagaagttgctggttcagccactac

SEQ ID NO: 2106395 - DNA, 25 bp, Homo sapien
cttaatggtgtgagtgttctgcttc

SEQ ID NO: 2106396 - DNA, 25 bp, Homo sapien
tgagctgttagattgagggcctcag

SEQ ID NO: 2106397 - DNA, 25 bp, Homo sapien
ttctcagttcctgtcatatgggcct

SEQ ID NO: 2106398 - DNA, 25 bp, Homo sapien
tatgacagcttataacatggcagct

SEQ ID NO: 2106399 - DNA, 25 bp, Homo sapien
gttgctgtcaggactcagttccttg

SEQ ID NO: 2106400 - DNA, 25 bp, Homo sapien
agtcaaagtcaatcagctgtagaac

SEQ ID NO: 2106401 - DNA, 25 bp, Homo sapien
tccttgattgagtcaaagtcaatca

SEQ ID NO: 2106402 - DNA, 25 bp, Homo sapien
gctgttctcggtacccactcttaga

SEQ ID NO: 2106403 - DNA, 25 bp, Homo sapien
actcttagagaccagccccgggctc

SEQ ID NO: 2106404 - DNA, 25 bp, Homo sapien
ctgggcagttgtgcccccggcttcg

SEQ ID NO: 2106405 - DNA, 25 bp, Homo sapien
aggctgaggcgtttgtgctcatgtt

SEQ ID NO: 2106406 - DNA, 25 bp, Homo sapien
cgtccaagctggagtccgggttcgg

SEQ ID NO: 2106407 - DNA, 25 bp, Homo sapien
tccaagctggagtccgggttcggga

SEQ ID NO: 2106408 - DNA, 25 bp, Homo sapien
tcttgtattgaaccccgcggagtgt

SEQ ID NO: 2106409 - DNA, 25 bp, Homo sapien
gagtcagtactctcgctaagaccgg

SEQ ID NO: 2106410 - DNA, 25 bp, Homo sapien
taatacccagggaatgccggtgtcc

SEQ ID NO: 2106411 - DNA, 25 bp, Homo sapien
ccttgtactgacactcggcgagagt

SEQ ID NO: 2106412 - DNA, 25 bp, Homo sapien
tgatactccgggagcgcccaggggc

SEQ ID NO: 2106413 - DNA, 25 bp, Homo sapien
ccttttgctgatactccgggagcgc

SEQ ID NO: 2106414 - DNA, 25 bp, Homo sapien
gatactccgggagcgcccaggggcg

SEQ ID NO: 2106415 - DNA, 25 bp, Homo sapien
tttgctgatactccgggagcgccca

SEQ ID NO: 2106416 - DNA, 25 bp, Homo sapien
gggcggagccgatccttcttttgat

SEQ ID NO: 2106417 - DNA, 25 bp, Homo sapien
acgctcctgggtcgtaggcacagga

SEQ ID NO: 2106418 - DNA, 25 bp, Homo sapien
gctgacacgctcctgggtcgtaggc

SEQ ID NO: 2106419 - DNA, 25 bp, Homo sapien
tgggaaggacccttctatcaactcc

SEQ ID NO: 2106420 - DNA, 25 bp, Homo sapien
tgaaatgccacctccgatcacgact

SEQ ID NO: 2106421 - DNA, 25 bp, Homo sapien
atgtggcccgcgatactcgccttct

SEQ ID NO: 2106422 - DNA, 25 bp, Homo sapien
gatactcgccttctcttgattctcc

SEQ ID NO: 2106423 - DNA, 25 bp, Homo sapien
gatcacgactacgtcgaacatgtgg

SEQ ID NO: 2106424 - DNA, 25 bp, Homo sapien
ctccttcctcttcacctactaaatt

SEQ ID NO: 2106425 - DNA, 25 bp, Homo sapien
agaagacaagattcaggtggtggga

SEQ ID NO: 2106426 - DNA, 25 bp, Homo sapien
ccaccaactggctcatcagaagaca

SEQ ID NO: 2106427 - DNA, 25 bp, Homo sapien
tcagaagacaagattcaggtggtgg

SEQ ID NO: 2106428 - DNA, 25 bp, Homo sapien
accaactggctcatcagaagacaag

SEQ ID NO: 2106429 - DNA, 25 bp, Homo sapien
gacagtgacgcagaagaggtttcca

SEQ ID NO: 2106430 - DNA, 25 bp, Homo sapien
caagtcactgaatagacgatgggct

SEQ ID NO: 2106431 - DNA, 25 bp, Homo sapien
tttccagaacattggcctggtgcag

SEQ ID NO: 2106432 - DNA, 25 bp, Homo sapien
tatagcaaatgtaggtgccttcgtg

SEQ ID NO: 2106433 - DNA, 25 bp, Homo sapien
tccaagtgcctgatatgaccacaac

SEQ ID NO: 2106434 - DNA, 25 bp, Homo sapien
taaaatcgaatctagtatgtaactc

SEQ ID NO: 2106435 - DNA, 25 bp, Homo sapien
aacaaagtcttctgaaaagcgaagg

SEQ ID NO: 2106436 - DNA, 25 bp, Homo sapien
tctcacaccctcacttagagtctta

SEQ ID NO: 2106437 - DNA, 25 bp, Homo sapien
cactaacgccatattcagtcaagag

SEQ ID NO: 2106438 - DNA, 25 bp, Homo sapien
tattcagtcaagagtttggcagcag

SEQ ID NO: 2106439 - DNA, 25 bp, Homo sapien
ctccaaccctgtcccgagcttctaa

SEQ ID NO: 2106440 - DNA, 25 bp, Homo sapien
aaccaaaacactaacgccatattca

SEQ ID NO: 2106441 - DNA, 25 bp, Homo sapien
tgtgtcattggataaatagggaatc

SEQ ID NO: 2106442 - DNA, 25 bp, Homo sapien
acgtctctagtatggaaattatgac

SEQ ID NO: 2106443 - DNA, 25 bp, Homo sapien
gttttttgaattcactccactgaaa

SEQ ID NO: 2106444 - DNA, 25 bp, Homo sapien
tattgcgggtgtatagtcacttcca

SEQ ID NO: 2106445 - DNA, 25 bp, Homo sapien
gaaatagcaaggaggccaaagtggc

SEQ ID NO: 2106446 - DNA, 25 bp, Homo sapien
cacaggacattgtaaggacataggc

SEQ ID NO: 2106447 - DNA, 25 bp, Homo sapien
gagcaggtcacgtaaagcctcacag

SEQ ID NO: 2106448 - DNA, 25 bp, Homo sapien
caaagtggccggaacaatgtgagca

SEQ ID NO: 2106449 - DNA, 25 bp, Homo sapien
gatcctctttgttgggtgtctattt

SEQ ID NO: 2106450 - DNA, 25 bp, Homo sapien
ggctctgatctcgtatttatttggg

SEQ ID NO: 2106451 - DNA, 25 bp, Homo sapien
cttcttgtgtatctttaataggtct

SEQ ID NO: 2106452 - DNA, 25 bp, Homo sapien
ctttaataggtctcttcaaagaatc

SEQ ID NO: 2106453 - DNA, 25 bp, Homo sapien
gcccagctccttagacaagcgtaag

SEQ ID NO: 2106454 - DNA, 25 bp, Homo sapien
ttttgggttggtcccacataagctc

SEQ ID NO: 2106455 - DNA, 25 bp, Homo sapien
cttgacatattgaacgagacgctca

SEQ ID NO: 2106456 - DNA, 25 bp, Homo sapien
gagacgctcactgacattcactttg

SEQ ID NO: 2106457 - DNA, 25 bp, Homo sapien
agtcaagagcctacttttacaattg

SEQ ID NO: 2106458 - DNA, 25 bp, Homo sapien
caagagcctacttttacaattgctt

SEQ ID NO: 2106459 - DNA, 25 bp, Homo sapien
tcaaagtcaagagcctacttttaca

SEQ ID NO: 2106460 - DNA, 25 bp, Homo sapien
ctacttcaaagtcaagagcctactt

SEQ ID NO: 2106461 - DNA, 25 bp, Homo sapien
ggccttcaaatgcattaggagggaa

SEQ ID NO: 2106462 - DNA, 25 bp, Homo sapien
cattctgggagtgaggatagcttgt

SEQ ID NO: 2106463 - DNA, 25 bp, Homo sapien
caaatgcattaggagggaacccaga

SEQ ID NO: 2106464 - DNA, 25 bp, Homo sapien
cttcaaatgcattaggagggaaccc

SEQ ID NO: 2106465 - DNA, 25 bp, Homo sapien
ctgttaggaagtttggatagcatgt

SEQ ID NO: 2106466 - DNA, 25 bp, Homo sapien
ggaagtttggatagcatgtcacgat

SEQ ID NO: 2106467 - DNA, 25 bp, Homo sapien
taggaagtttggatagcatgtcacg

SEQ ID NO: 2106468 - DNA, 25 bp, Homo sapien
ttaggaagtttggatagcatgtcac

SEQ ID NO: 2106469 - DNA, 25 bp, Homo sapien
cacttaagatatgtaatttgtaagg

SEQ ID NO: 2106470 - DNA, 25 bp, Homo sapien
acacttaagatatgtaatttgtaag

SEQ ID NO: 2106471 - DNA, 25 bp, Homo sapien
cttaagatatgtaatttgtaaggtc

SEQ ID NO: 2106472 - DNA, 25 bp, Homo sapien
acttaagatatgtaatttgtaaggt

SEQ ID NO: 2106473 - DNA, 25 bp, Homo sapien
cctctattaaagcttgcagcaggac

SEQ ID NO: 2106474 - DNA, 25 bp, Homo sapien
gtacagaacaattacatctggattt

SEQ ID NO: 2106475 - DNA, 25 bp, Homo sapien
gcagcaggaccaccttcttaaagta

SEQ ID NO: 2106476 - DNA, 25 bp, Homo sapien
ttaggcacctaatgtaacgtgcatc

SEQ ID NO: 2106477 - DNA, 25 bp, Homo sapien
cataatgttcatggttcagcgtctc

SEQ ID NO: 2106478 - DNA, 25 bp, Homo sapien
ctcataatgttcatggttcagcgtc

SEQ ID NO: 2106479 - DNA, 25 bp, Homo sapien
tcataatgttcatggttcagcgtct

SEQ ID NO: 2106480 - DNA, 25 bp, Homo sapien
tcaaatgtgagctgcagtctttgtg

SEQ ID NO: 2106481 - DNA, 25 bp, Homo sapien
agtctttgtggcaggcgtgaaaaat

SEQ ID NO: 2106482 - DNA, 25 bp, Homo sapien
ctcaaatgtgagctgcagtctttgt

SEQ ID NO: 2106483 - DNA, 25 bp, Homo sapien
tgtggcaggcgtgaaaaatcatctt

SEQ ID NO: 2106484 - DNA, 25 bp, Homo sapien
cagtcaaggtcggagggatcgcatt

SEQ ID NO: 2106485 - DNA, 25 bp, Homo sapien
tctgaagtgaatcttggcagtcaag

SEQ ID NO: 2106486 - DNA, 25 bp, Homo sapien
gaaggcctccttgtaatacatcatg

SEQ ID NO: 2106487 - DNA, 25 bp, Homo sapien
gacagctcccattggaagccgctga

SEQ ID NO: 2106488 - DNA, 25 bp, Homo sapien
atcttcatcttcaatgatcatgcag

SEQ ID NO: 2106489 - DNA, 25 bp, Homo sapien
aggttattgaaattggagcatcttc

SEQ ID NO: 2106490 - DNA, 25 bp, Homo sapien
tcttcatcttcaatgatcatgcagc

SEQ ID NO: 2106491 - DNA, 25 bp, Homo sapien
tatgtagcttagcaagtcgatcagc

SEQ ID NO: 2106492 - DNA, 25 bp, Homo sapien
ttagcaagtcgatcagctttccggg

SEQ ID NO: 2106493 - DNA, 25 bp, Homo sapien
ttatttccttatgtagcttagcaag

SEQ ID NO: 2106494 - DNA, 25 bp, Homo sapien
tcgatcagctttccgggcaagaatg

SEQ ID NO: 2106495 - DNA, 25 bp, Homo sapien
gcactttggcatagagctcacagat

SEQ ID NO: 2106496 - DNA, 25 bp, Homo sapien
agcactttggcatagagctcacaga

SEQ ID NO: 2106497 - DNA, 25 bp, Homo sapien
actttggcatagagctcacagattt

SEQ ID NO: 2106498 - DNA, 25 bp, Homo sapien
ccagcactttggcatagagctcaca

SEQ ID NO: 2106499 - DNA, 25 bp, Homo sapien
gaagtaggccgtgtagcagccccca

SEQ ID NO: 2106500 - DNA, 25 bp, Homo sapien
aggagggaagtaggccgtgtagcag

SEQ ID NO: 2106501 - DNA, 25 bp, Homo sapien
caggagggaagtaggccgtgtagca

SEQ ID NO: 2106502 - DNA, 25 bp, Homo sapien
agggaagtaggccgtgtagcagccc

SEQ ID NO: 2106503 - DNA, 25 bp, Homo sapien
ggaaccaagaggttacacagagtta

SEQ ID NO: 2106504 - DNA, 25 bp, Homo sapien
ccaagaggttacacagagttacttg

SEQ ID NO: 2106505 - DNA, 25 bp, Homo sapien
aaccaagaggttacacagagttact

SEQ ID NO: 2106506 - DNA, 25 bp, Homo sapien
gaaccaagaggttacacagagttac

SEQ ID NO: 2106507 - DNA, 25 bp, Homo sapien
tcctgcccacgggttgacgaatcac

SEQ ID NO: 2106508 - DNA, 25 bp, Homo sapien
tccctagctgctcgttctccagcct

SEQ ID NO: 2106509 - DNA, 25 bp, Homo sapien
ctgtgcccgcaaagaaaatcctgcc

SEQ ID NO: 2106510 - DNA, 25 bp, Homo sapien
cgcaaagaaaatcctgcccacgggt

SEQ ID NO: 2106511 - DNA, 25 bp, Homo sapien
tatctttctcggtcaccttcccgag

SEQ ID NO: 2106512 - DNA, 25 bp, Homo sapien
agatatctttctcggtcaccttccc

SEQ ID NO: 2106513 - DNA, 25 bp, Homo sapien
tgtacccagatatctttctcggtca

SEQ ID NO: 2106514 - DNA, 25 bp, Homo sapien
cccagatatctttctcggtcacctt

SEQ ID NO: 2106515 - DNA, 25 bp, Homo sapien
gggtgatttctaccgctggaacgtc

SEQ ID NO: 2106516 - DNA, 25 bp, Homo sapien
tgggtgatttctaccgctggaacgt

SEQ ID NO: 2106517 - DNA, 25 bp, Homo sapien
ccaatgatcttcagcaggccagaaa

SEQ ID NO: 2106518 - DNA, 25 bp, Homo sapien
caatgatcttcagcaggccagaaac

SEQ ID NO: 2106519 - DNA, 25 bp, Homo sapien
tcaagaccgtggcaggagcttgtat

SEQ ID NO: 2106520 - DNA, 25 bp, Homo sapien
caggagcttgtatttgtacagcaca

SEQ ID NO: 2106521 - DNA, 25 bp, Homo sapien
tttgtacagcacaaaccccagggca

SEQ ID NO: 2106522 - DNA, 25 bp, Homo sapien
ccgtggcaggagcttgtatttgtac

SEQ ID NO: 2106523 - DNA, 25 bp, Homo sapien
tatgcggcaactccttatgtactgg

SEQ ID NO: 2106524 - DNA, 25 bp, Homo sapien
tggtctcccacagagctaagcaggg

SEQ ID NO: 2106525 - DNA, 25 bp, Homo sapien
tgtgggccgacattactcctaagat

SEQ ID NO: 2106526 - DNA, 25 bp, Homo sapien
gaagatttatgtcctcacaccaggg

SEQ ID NO: 2106527 - DNA, 25 bp, Homo sapien
tactcgtgggcacaatgccacactg

SEQ ID NO: 2106528 - DNA, 25 bp, Homo sapien
gcagaaggatgactttgtacaccag

SEQ ID NO: 2106529 - DNA, 25 bp, Homo sapien
cccacttatggtgtggctatttagc

SEQ ID NO: 2106530 - DNA, 25 bp, Homo sapien
ctttgtgattccctttactcgtggg

SEQ ID NO: 2106531 - DNA, 25 bp, Homo sapien
gaaattctttgcagccatattggca

SEQ ID NO: 2106532 - DNA, 25 bp, Homo sapien
tctctgactccgagacaagtccagg

SEQ ID NO: 2106533 - DNA, 25 bp, Homo sapien
taacttccagaagctagcactcggg

SEQ ID NO: 2106534 - DNA, 25 bp, Homo sapien
cagaataggtagtttgtggccagga

SEQ ID NO: 2106535 - DNA, 25 bp, Homo sapien
tttgagctcctagcccaatgactgg

SEQ ID NO: 2106536 - DNA, 25 bp, Homo sapien
acagcgcagagtgtgagaagaacca

SEQ ID NO: 2106537 - DNA, 25 bp, Homo sapien
gaaggcatggaaacactaaacagcg

SEQ ID NO: 2106538 - DNA, 25 bp, Homo sapien
gatatggaacctgaaagactgaagc

SEQ ID NO: 2106539 - DNA, 25 bp, Homo sapien
aactagatctcagccacaggcaccc

SEQ ID NO: 2106540 - DNA, 25 bp, Homo sapien
gggaaactagatctcagccacaggc

SEQ ID NO: 2106541 - DNA, 25 bp, Homo sapien
tggggaaactagatctcagccacag

SEQ ID NO: 2106542 - DNA, 25 bp, Homo sapien
gaaactagatctcagccacaggcac

SEQ ID NO: 2106543 - DNA, 25 bp, Homo sapien
catctgtcaaatacggtggccttaa

SEQ ID NO: 2106544 - DNA, 25 bp, Homo sapien
catttaattgtaggaaggcatctgt

SEQ ID NO: 2106545 - DNA, 25 bp, Homo sapien
gaggcatgatcatcagctgaagagg

SEQ ID NO: 2106546 - DNA, 25 bp, Homo sapien
caaaagatactgctcagattgctcc

SEQ ID NO: 2106547 - DNA, 25 bp, Homo sapien
tagtctcctggggtctagcctcaac

SEQ ID NO: 2106548 - DNA, 25 bp, Homo sapien
tgaatcccacaatgccgatccacca

SEQ ID NO: 2106549 - DNA, 25 bp, Homo sapien
cacactgcattgcttaagagtgtat

SEQ ID NO: 2106550 - DNA, 25 bp, Homo sapien
agcttccaccaaggacacactgcat

SEQ ID NO: 2106551 - DNA, 25 bp, Homo sapien
gtaattcacttgcaggctaggtggg

SEQ ID NO: 2106552 - DNA, 25 bp, Homo sapien
ggcacgtaattcacttgcaggctag

SEQ ID NO: 2106553 - DNA, 25 bp, Homo sapien
gacaagagtatccacagccaagaag

SEQ ID NO: 2106554 - DNA, 25 bp, Homo sapien
gggagacaagagtatccacagccaa

SEQ ID NO: 2106555 - DNA, 25 bp, Homo sapien
ttgacttggattgaagctgggctcc

SEQ ID NO: 2106556 - DNA, 25 bp, Homo sapien
tttgaggtgggcctagattctgtag

SEQ ID NO: 2106557 - DNA, 25 bp, Homo sapien
ggcatcttaaaccagcctgtggact

SEQ ID NO: 2106558 - DNA, 25 bp, Homo sapien
gatcaaatacctgaccaatccctgg

SEQ ID NO: 2106559 - DNA, 25 bp, Homo sapien
gctgctcgcaccctcttattaaggt

SEQ ID NO: 2106560 - DNA, 25 bp, Homo sapien
cacatacacatcgtggctgctcgca

SEQ ID NO: 2106561 - DNA, 25 bp, Homo sapien
ttgtctgcaaaagcagaatactcag

SEQ ID NO: 2106562 - DNA, 25 bp, Homo sapien
gaccttcccacttctcagactgata

SEQ ID NO: 2106563 - DNA, 25 bp, Homo sapien
aggaaggctttcttcgatctggcct

SEQ ID NO: 2106564 - DNA, 25 bp, Homo sapien
gaccaggaaggctttcttcgatctg

SEQ ID NO: 2106565 - DNA, 25 bp, Homo sapien
aggctttcttcgatctggccttcat

SEQ ID NO: 2106566 - DNA, 25 bp, Homo sapien
ggaaggctttcttcgatctggcctt

SEQ ID NO: 2106567 - DNA, 25 bp, Homo sapien
ttggaaatccctgccctatctcaag

SEQ ID NO: 2106568 - DNA, 25 bp, Homo sapien
ttagtttggactaaccatcccactc

SEQ ID NO: 2106569 - DNA, 25 bp, Homo sapien
tcaaggaatataccagcctctatgc

SEQ ID NO: 2106570 - DNA, 25 bp, Homo sapien
gctactgtctgcaggacaaagctca

SEQ ID NO: 2106571 - DNA, 25 bp, Homo sapien
cttcttcctgcagcaaggccataga

SEQ ID NO: 2106572 - DNA, 25 bp, Homo sapien
tgctgccatggtcaggcccagtaca

SEQ ID NO: 2106573 - DNA, 25 bp, Homo sapien
tgccaagtcatgcatagctccttgt

SEQ ID NO: 2106574 - DNA, 25 bp, Homo sapien
catcatttctagtcatgtctgccaa

SEQ ID NO: 2106575 - DNA, 25 bp, Homo sapien
cctttcctggatcactgaaatccat

SEQ ID NO: 2106576 - DNA, 25 bp, Homo sapien
tgagactgtgttggccttggttcag

SEQ ID NO: 2106577 - DNA, 25 bp, Homo sapien
gtgagactgtgttggccttggttca

SEQ ID NO: 2106578 - DNA, 25 bp, Homo sapien
actcctttcctggatcactgaaatc

SEQ ID NO: 2106579 - DNA, 25 bp, Homo sapien
gaaaatgcgtgcaattgggccgaaa

SEQ ID NO: 2106580 - DNA, 25 bp, Homo sapien
tgcatacgtctacttccttctggga

SEQ ID NO: 2106581 - DNA, 25 bp, Homo sapien
caacgtatctggattgtgtgcatag

SEQ ID NO: 2106582 - DNA, 25 bp, Homo sapien
tctttataccctccaagttcactga

SEQ ID NO: 2106583 - DNA, 25 bp, Homo sapien
cttttgtgcattgaagccctggata

SEQ ID NO: 2106584 - DNA, 25 bp, Homo sapien
tcaccaacactaatactgccatcat

SEQ ID NO: 2106585 - DNA, 25 bp, Homo sapien
catcatcatcacaaagtgtagataa

SEQ ID NO: 2106586 - DNA, 25 bp, Homo sapien
caaagtgtagataaagtatctgtgc

SEQ ID NO: 2106587 - DNA, 25 bp, Homo sapien
cttcaaaatgatcaccaacactaat

SEQ ID NO: 2106588 - DNA, 25 bp, Homo sapien
cctgtcactgcgaggaatgcaattc

SEQ ID NO: 2106589 - DNA, 25 bp, Homo sapien
tgcaattcctgaggcccgctgctgt

SEQ ID NO: 2106590 - DNA, 25 bp, Homo sapien
tggcatgcccacagagtaaccacct

SEQ ID NO: 2106591 - DNA, 25 bp, Homo sapien
ggtgtcgttcagcactgtcctcaag

SEQ ID NO: 2106592 - DNA, 25 bp, Homo sapien
atccggaagagatcaggagatgttc

SEQ ID NO: 2106593 - DNA, 25 bp, Homo sapien
gattcacacgcacattccagtctga

SEQ ID NO: 2106594 - DNA, 25 bp, Homo sapien
taacaagatcctagatgattcacac

SEQ ID NO: 2106595 - DNA, 25 bp, Homo sapien
agtctgagaagctctgatccggaag

SEQ ID NO: 2106596 - DNA, 25 bp, Homo sapien
tgtccaggtgctgtggaaggtgctg

SEQ ID NO: 2106597 - DNA, 25 bp, Homo sapien
ggtgctgtggaaggtgctggagact

SEQ ID NO: 2106598 - DNA, 25 bp, Homo sapien
catgtccaggtgctgtggaaggtgc

SEQ ID NO: 2106599 - DNA, 25 bp, Homo sapien
caggtgctgtggaaggtgctggaga

SEQ ID NO: 2106600 - DNA, 25 bp, Homo sapien
cttcatccttttgccattgactcct

SEQ ID NO: 2106601 - DNA, 25 bp, Homo sapien
gttgtttcagcacaggtatccccag

SEQ ID NO: 2106602 - DNA, 25 bp, Homo sapien
tgaggccataccacagccagcagta

SEQ ID NO: 2106603 - DNA, 25 bp, Homo sapien
tcctcctgaggccataccacagcca

SEQ ID NO: 2106604 - DNA, 25 bp, Homo sapien
tcctgaggccataccacagccagca

SEQ ID NO: 2106605 - DNA, 25 bp, Homo sapien
ctatgggaatgcctggatgcacttc

SEQ ID NO: 2106606 - DNA, 25 bp, Homo sapien
tgggaatgcctggatgcacttcggc

SEQ ID NO: 2106607 - DNA, 25 bp, Homo sapien
atgggaatgcctggatgcacttcgg

SEQ ID NO: 2106608 - DNA, 25 bp, Homo sapien
tatgggaatgcctggatgcacttcg

SEQ ID NO: 2106609 - DNA, 25 bp, Homo sapien
cagtgacccgaacatctccggcaaa

SEQ ID NO: 2106610 - DNA, 25 bp, Homo sapien
tgacccgaacatctccggcaaaggc

SEQ ID NO: 2106611 - DNA, 25 bp, Homo sapien
gtgacccgaacatctccggcaaagg

SEQ ID NO: 2106612 - DNA, 25 bp, Homo sapien
cacagtgacccgaacatctccggca

SEQ ID NO: 2106613 - DNA, 25 bp, Homo sapien
gggttggcaggaacgagcataccat

SEQ ID NO: 2106614 - DNA, 25 bp, Homo sapien
agtgaccgggttggcaggaacgagc

SEQ ID NO: 2106615 - DNA, 25 bp, Homo sapien
accgggttggcaggaacgagcatac

SEQ ID NO: 2106616 - DNA, 25 bp, Homo sapien
tggagtgaccgggttggcaggaacg

SEQ ID NO: 2106617 - DNA, 25 bp, Homo sapien
ccatagtattcccaggatgtcattc

SEQ ID NO: 2106618 - DNA, 25 bp, Homo sapien
gggctttttgtagtcccgagcctga

SEQ ID NO: 2106619 - DNA, 25 bp, Homo sapien
ggagaacagcccatgggatctcccc

SEQ ID NO: 2106620 - DNA, 25 bp, Homo sapien
cgagcctgaatccactcacagagag

SEQ ID NO: 2106621 - DNA, 25 bp, Homo sapien
gctggctggctatatatttcccttc

SEQ ID NO: 2106622 - DNA, 25 bp, Homo sapien
tcttcccatgacggccagtgactgc

SEQ ID NO: 2106623 - DNA, 25 bp, Homo sapien
cggccagtgactgcttctttgccca

SEQ ID NO: 2106624 - DNA, 25 bp, Homo sapien
tcccatgacggccagtgactgcttc

SEQ ID NO: 2106625 - DNA, 25 bp, Homo sapien
catgacggccagtgactgcttcttt

SEQ ID NO: 2106626 - DNA, 25 bp, Homo sapien
cgtcatttgcacagctaacacggct

SEQ ID NO: 2106627 - DNA, 25 bp, Homo sapien
tcctgggtacacgtcatttgcacag

SEQ ID NO: 2106628 - DNA, 25 bp, Homo sapien
gcacagctaacacggctagatcttt

SEQ ID NO: 2106629 - DNA, 25 bp, Homo sapien
catttatgattaagggattcccctt

SEQ ID NO: 2106630 - DNA, 25 bp, Homo sapien
caatcttaattcgagttccaatgac

SEQ ID NO: 2106631 - DNA, 25 bp, Homo sapien
agatggaaatgtgcctgtggagttt

SEQ ID NO: 2106632 - DNA, 25 bp, Homo sapien
aaatgtgcctgtggagttttcaatc

SEQ ID NO: 2106633 - DNA, 25 bp, Homo sapien
tggagttttcaatcttaattcgagt

SEQ ID NO: 2106634 - DNA, 25 bp, Homo sapien
cgggagaactggctgaggccttctt

SEQ ID NO: 2106635 - DNA, 25 bp, Homo sapien
tcaggtaacgggagaactggctgag

SEQ ID NO: 2106636 - DNA, 25 bp, Homo sapien
ggagaactggctgaggccttcttac

SEQ ID NO: 2106637 - DNA, 25 bp, Homo sapien
taacgggagaactggctgaggcctt

SEQ ID NO: 2106638 - DNA, 25 bp, Homo sapien
tcccttgcactcttctttcagcgtg

SEQ ID NO: 2106639 - DNA, 25 bp, Homo sapien
tcttcgcttccatagatgcattggg

SEQ ID NO: 2106640 - DNA, 25 bp, Homo sapien
tgtgtcacgctttgcaggaatcctg

SEQ ID NO: 2106641 - DNA, 25 bp, Homo sapien
tcttctttcagcgtgcaggtcttcg

SEQ ID NO: 2106642 - DNA, 25 bp, Homo sapien
tgcagcaagaagtcgggtcctgtct

SEQ ID NO: 2106643 - DNA, 25 bp, Homo sapien
gccagctgatagacatctccttctg

SEQ ID NO: 2106644 - DNA, 25 bp, Homo sapien
ctagggctaccatgaaagagaaacc

SEQ ID NO: 2106645 - DNA, 25 bp, Homo sapien
ttgaaggatttctcagccagctgat

SEQ ID NO: 2106646 - DNA, 25 bp, Homo sapien
ggatctcgattcctgtggaaccaca

SEQ ID NO: 2106647 - DNA, 25 bp, Homo sapien
cacaaaatcggcatgccttggtcat

SEQ ID NO: 2106648 - DNA, 25 bp, Homo sapien
cacactgctggactctgtagctccc

SEQ ID NO: 2106649 - DNA, 25 bp, Homo sapien
tgcaacctctgggatctcgattcct

SEQ ID NO: 2106650 - DNA, 25 bp, Homo sapien
actggacgtactggacgtatggtca

SEQ ID NO: 2106651 - DNA, 25 bp, Homo sapien
cactggacgtactggacgtatggtc

SEQ ID NO: 2106652 - DNA, 25 bp, Homo sapien
acactggacgtactggacgtatggt

SEQ ID NO: 2106653 - DNA, 25 bp, Homo sapien
ctggacgtactggacgtatggtcat

SEQ ID NO: 2106654 - DNA, 25 bp, Homo sapien
atccacccctgcgacggcgttggca

SEQ ID NO: 2106655 - DNA, 25 bp, Homo sapien
cacccctgcgacggcgttggcaagc

SEQ ID NO: 2106656 - DNA, 25 bp, Homo sapien
tccacccctgcgacggcgttggcaa

SEQ ID NO: 2106657 - DNA, 25 bp, Homo sapien
ccacccctgcgacggcgttggcaag

SEQ ID NO: 2106658 - DNA, 25 bp, Homo sapien
atggaattagagaagcccacgcggg

SEQ ID NO: 2106659 - DNA, 25 bp, Homo sapien
aatggaattagagaagcccacgcgg

SEQ ID NO: 2106660 - DNA, 25 bp, Homo sapien
caatggaattagagaagcccacgcg

SEQ ID NO: 2106661 - DNA, 25 bp, Homo sapien
aacaatggaattagagaagcccacg

SEQ ID NO: 2106662 - DNA, 25 bp, Homo sapien
gctgttgctactgttacgcccctac

SEQ ID NO: 2106663 - DNA, 25 bp, Homo sapien
taaacgcctctgtcggctttcgggc

SEQ ID NO: 2106664 - DNA, 25 bp, Homo sapien
gctcgtgtttgggaagagactgcgg

SEQ ID NO: 2106665 - DNA, 25 bp, Homo sapien
tagggctgcgatgacagctaggccc

SEQ ID NO: 2106666 - DNA, 25 bp, Homo sapien
ttcctttctcgatctgtactttgct

SEQ ID NO: 2106667 - DNA, 25 bp, Homo sapien
tttcctttctcgatctgtactttgc

SEQ ID NO: 2106668 - DNA, 25 bp, Homo sapien
ttttcctttctcgatctgtactttg

SEQ ID NO: 2106669 - DNA, 25 bp, Homo sapien
tcctttctcgatctgtactttgctt

SEQ ID NO: 2106670 - DNA, 25 bp, Homo sapien
ttcttgagcggctccgtcgcctctc

SEQ ID NO: 2106671 - DNA, 25 bp, Homo sapien
gcggctccgtcgcctctctgcttcg

SEQ ID NO: 2106672 - DNA, 25 bp, Homo sapien
tgagcggctccgtcgcctctctgct

SEQ ID NO: 2106673 - DNA, 25 bp, Homo sapien
ggctccgtcgcctctctgcttcgac

SEQ ID NO: 2106674 - DNA, 25 bp, Homo sapien
taaggcaatccagtctttcctcaga

SEQ ID NO: 2106675 - DNA, 25 bp, Homo sapien
cctcagatggcactgttaaattttg

SEQ ID NO: 2106676 - DNA, 25 bp, Homo sapien
ctataaggcaatccagtctttcctc

SEQ ID NO: 2106677 - DNA, 25 bp, Homo sapien
ttttggtccgcagtaaggacttctg

SEQ ID NO: 2106678 - DNA, 25 bp, Homo sapien
acttttgcttcgggaacgtcctatg

SEQ ID NO: 2106679 - DNA, 25 bp, Homo sapien
ctgagtggacttttgcttcgggaac

SEQ ID NO: 2106680 - DNA, 25 bp, Homo sapien
tgagtggacttttgcttcgggaacg

SEQ ID NO: 2106681 - DNA, 25 bp, Homo sapien
tgtcttgaatttctatcggaaatca

SEQ ID NO: 2106682 - DNA, 25 bp, Homo sapien
ggaaatcatcctcacgcctcgagcc

SEQ ID NO: 2106683 - DNA, 25 bp, Homo sapien
acgcctcgagcctttcctactgtag

SEQ ID NO: 2106684 - DNA, 25 bp, Homo sapien
agattatcaataggttccctcacag

SEQ ID NO: 2106685 - DNA, 25 bp, Homo sapien
ttgttagaggcactgaactaacacc

SEQ ID NO: 2106686 - DNA, 25 bp, Homo sapien
tgttagaggcactgaactaacaccc

SEQ ID NO: 2106687 - DNA, 25 bp, Homo sapien
gttagaggcactgaactaacaccca

SEQ ID NO: 2106688 - DNA, 25 bp, Homo sapien
attgttagaggcactgaactaacac

SEQ ID NO: 2106689 - DNA, 25 bp, Homo sapien
tgtacattgtttgccatggctgcag

SEQ ID NO: 2106690 - DNA, 25 bp, Homo sapien
aaagcctcttaggtccagcacttcc

SEQ ID NO: 2106691 - DNA, 25 bp, Homo sapien
ttttgtacattgtttgccatggctg

SEQ ID NO: 2106692 - DNA, 25 bp, Homo sapien
taaagcctcttaggtccagcacttc

SEQ ID NO: 2106693 - DNA, 25 bp, Homo sapien
caatccttccgaaaggctcaaagaa

SEQ ID NO: 2106694 - DNA, 25 bp, Homo sapien
ttatgttaaaagtgtaatgagtcca

SEQ ID NO: 2106695 - DNA, 25 bp, Homo sapien
tatgttaaaagtgtaatgagtccac

SEQ ID NO: 2106696 - DNA, 25 bp, Homo sapien
actttcaatccttccgaaaggctca

SEQ ID NO: 2106697 - DNA, 25 bp, Homo sapien
tactcgaagcatcagcacgttcaat

SEQ ID NO: 2106698 - DNA, 25 bp, Homo sapien
gtactcgaagcatcagcacgttcaa

SEQ ID NO: 2106699 - DNA, 25 bp, Homo sapien
ttgtttgcaaatccataacaaaaga

SEQ ID NO: 2106700 - DNA, 25 bp, Homo sapien
ctgggaaagtcttgtttgcaaatcc

SEQ ID NO: 2106701 - DNA, 25 bp, Homo sapien
ctgaagcttcagtctgctgggaaag

SEQ ID NO: 2106702 - DNA, 25 bp, Homo sapien
gcttcagtctgctgggaaagtcttg

SEQ ID NO: 2106703 - DNA, 25 bp, Homo sapien
ctcaatcacatcgtccttaatctct

SEQ ID NO: 2106704 - DNA, 25 bp, Homo sapien
cgggaattgtatacaaatgacagta

SEQ ID NO: 2106705 - DNA, 25 bp, Homo sapien
aggtaacgggaattgtatacaaatg

SEQ ID NO: 2106706 - DNA, 25 bp, Homo sapien
aacgggaattgtatacaaatgacag

SEQ ID NO: 2106707 - DNA, 25 bp, Homo sapien
tcaaggtaacgggaattgtatacaa

SEQ ID NO: 2106708 - DNA, 25 bp, Homo sapien
agtgagatttgctctttagggagaa

SEQ ID NO: 2106709 - DNA, 25 bp, Homo sapien
gctttgcttaccagactctcactga

SEQ ID NO: 2106710 - DNA, 25 bp, Homo sapien
gccagtagcttgttgataggagagt

SEQ ID NO: 2106711 - DNA, 25 bp, Homo sapien
gcaagatcatctgactgaaactgtc

SEQ ID NO: 2106712 - DNA, 25 bp, Homo sapien
taaacctgcgtcactattgagagat

SEQ ID NO: 2106713 - DNA, 25 bp, Homo sapien
caaaatatactggaatggcttatgg

SEQ ID NO: 2106714 - DNA, 25 bp, Homo sapien
tggctctgctagatgcgaattgctc

SEQ ID NO: 2106715 - DNA, 25 bp, Homo sapien
gtgagaatcctttgttggcctttgg

SEQ ID NO: 2106716 - DNA, 25 bp, Homo sapien
gatgcgaattgctcctaatctgcat

SEQ ID NO: 2106717 - DNA, 25 bp, Homo sapien
tgctagatgcgaattgctcctaatc

SEQ ID NO: 2106718 - DNA, 25 bp, Homo sapien
aagggcaccatgtttgtaattcacg

SEQ ID NO: 2106719 - DNA, 25 bp, Homo sapien
taattcacgccaggattctttcggg

SEQ ID NO: 2106720 - DNA, 25 bp, Homo sapien
tcttaggtggaagcagaatcaattt

SEQ ID NO: 2106721 - DNA, 25 bp, Homo sapien
tgggcaaaactgaattaagggcacc

SEQ ID NO: 2106722 - DNA, 25 bp, Homo sapien
agtaatgagtcagagggatttggct

SEQ ID NO: 2106723 - DNA, 25 bp, Homo sapien
ctaattgagcatgctgctcctacag

SEQ ID NO: 2106724 - DNA, 25 bp, Homo sapien
taattgagcatgctgctcctacagc

SEQ ID NO: 2106725 - DNA, 25 bp, Homo sapien
tcagtaatgagtcagagggatttgg

SEQ ID NO: 2106726 - DNA, 25 bp, Homo sapien
acttgagctctcctgccgcaagctt

SEQ ID NO: 2106727 - DNA, 25 bp, Homo sapien
tgtcctccagggtaactgccttaag

SEQ ID NO: 2106728 - DNA, 25 bp, Homo sapien
catagccccagtgtcatgccacata

SEQ ID NO: 2106729 - DNA, 25 bp, Homo sapien
ccccagtgtcatgccacatagtcaa

SEQ ID NO: 2106730 - DNA, 25 bp, Homo sapien
gaatcactggctaaacaactgagta

SEQ ID NO: 2106731 - DNA, 25 bp, Homo sapien
gcagtcaataacaaggccaacttga

SEQ ID NO: 2106732 - DNA, 25 bp, Homo sapien
caacttgatagtggcttccttgagg

SEQ ID NO: 2106733 - DNA, 25 bp, Homo sapien
tggtggtttattatgcagcagtcaa

SEQ ID NO: 2106734 - DNA, 25 bp, Homo sapien
ggttgtttctggttcaagcccacaa

SEQ ID NO: 2106735 - DNA, 25 bp, Homo sapien
gataaacatgatacgttgcagccat

SEQ ID NO: 2106736 - DNA, 25 bp, Homo sapien
ccacaattagcaatgaaatggccat

SEQ ID NO: 2106737 - DNA, 25 bp, Homo sapien
ggccattataggattcatgccgata

SEQ ID NO: 2106738 - DNA, 25 bp, Homo sapien
tgctgtttactgggttttcatccag

SEQ ID NO: 2106739 - DNA, 25 bp, Homo sapien
gctgtttactgggttttcatccagt

SEQ ID NO: 2106740 - DNA, 25 bp, Homo sapien
cagggttgggaagctgcacccttcc

SEQ ID NO: 2106741 - DNA, 25 bp, Homo sapien
tgtagaagttaccaggacaggccac

SEQ ID NO: 2106742 - DNA, 25 bp, Homo sapien
tccagtatatgagccggacaggctg

SEQ ID NO: 2106743 - DNA, 25 bp, Homo sapien
gcaggatctcatttctgcactggga

SEQ ID NO: 2106744 - DNA, 25 bp, Homo sapien
ctttttcatctcggtagaaaaggtg

SEQ ID NO: 2106745 - DNA, 25 bp, Homo sapien
ttttcatctcggtagaaaaggtgtc

SEQ ID NO: 2106746 - DNA, 25 bp, Homo sapien
cctaagctggaatatggctgggccc

SEQ ID NO: 2106747 - DNA, 25 bp, Homo sapien
ttaccattgcgacaaatgagctcag

SEQ ID NO: 2106748 - DNA, 25 bp, Homo sapien
cagtacaaattggaccctgcgagtc

SEQ ID NO: 2106749 - DNA, 25 bp, Homo sapien
tgccagcgcctgctagagttgcaca

SEQ ID NO: 2106750 - DNA, 25 bp, Homo sapien
tcaggtccccgttatcagttgcaga

SEQ ID NO: 2106751 - DNA, 25 bp, Homo sapien
tggtgtcaccaacaacagtaatagg

SEQ ID NO: 2106752 - DNA, 25 bp, Homo sapien
tggcaaacccagatctagctcttgg

SEQ ID NO: 2106753 - DNA, 25 bp, Homo sapien
gatagtaatacataggacacagctg

SEQ ID NO: 2106754 - DNA, 25 bp, Homo sapien
tgcagggtgcattgccatagcagtg

SEQ ID NO: 2106755 - DNA, 25 bp, Homo sapien
catctagtgagagaagtgtagcggc

SEQ ID NO: 2106756 - DNA, 25 bp, Homo sapien
tttccccttcgaggagagaggctgt

SEQ ID NO: 2106757 - DNA, 25 bp, Homo sapien
tctttcggaagagcagcttcatctc

SEQ ID NO: 2106758 - DNA, 25 bp, Homo sapien
ccttcaccctgtgtatgccagtcat

SEQ ID NO: 2106759 - DNA, 25 bp, Homo sapien
cagagagtcattgttccttcaccct

SEQ ID NO: 2106760 - DNA, 25 bp, Homo sapien
tcaccctgtgtatgccagtcatctt

SEQ ID NO: 2106761 - DNA, 25 bp, Homo sapien
gtgtatgccagtcatctttgtccat

SEQ ID NO: 2106762 - DNA, 25 bp, Homo sapien
ccttgccgtgagcagatcacttcct

SEQ ID NO: 2106763 - DNA, 25 bp, Homo sapien
cacttccttcacaacaccattaggg

SEQ ID NO: 2106764 - DNA, 25 bp, Homo sapien
gatcacttccttcacaacaccatta

SEQ ID NO: 2106765 - DNA, 25 bp, Homo sapien
caaaccctttggtcgccttgccgtg

SEQ ID NO: 2106766 - DNA, 25 bp, Homo sapien
ggcctgtggaggactgaagatcaca

SEQ ID NO: 2106767 - DNA, 25 bp, Homo sapien
tataatatcatagggcctgcagagc

SEQ ID NO: 2106768 - DNA, 25 bp, Homo sapien
ggcctaaagtgtttcaatcctcctg

SEQ ID NO: 2106769 - DNA, 25 bp, Homo sapien
aattccaaatgccttgaggatcagg

SEQ ID NO: 2106770 - DNA, 25 bp, Homo sapien
tcctttaccacgcctcttctcactg

SEQ ID NO: 2106771 - DNA, 25 bp, Homo sapien
ctttaccacgcctcttctcactgcc

SEQ ID NO: 2106772 - DNA, 25 bp, Homo sapien
gccacgtgtctacccgagctgcagc

SEQ ID NO: 2106773 - DNA, 25 bp, Homo sapien
ccctcctttaccacgcctcttctca

SEQ ID NO: 2106774 - DNA, 25 bp, Homo sapien
tgtgttttaggtcgcccctcactga

SEQ ID NO: 2106775 - DNA, 25 bp, Homo sapien
ggtctgattgtgaactaatgacagc

SEQ ID NO: 2106776 - DNA, 25 bp, Homo sapien
aatgaagagccactatcttgaggtc

SEQ ID NO: 2106777 - DNA, 25 bp, Homo sapien
tatccggaacatttaaaggtggaga

SEQ ID NO: 2106778 - DNA, 25 bp, Homo sapien
aaactggtggaataatcactcagga

SEQ ID NO: 2106779 - DNA, 25 bp, Homo sapien
aaaactggtggaataatcactcagg

SEQ ID NO: 2106780 - DNA, 25 bp, Homo sapien
gaaaactggtggaataatcactcag

SEQ ID NO: 2106781 - DNA, 25 bp, Homo sapien
tctctggatgtgttttcggagctca

SEQ ID NO: 2106782 - DNA, 25 bp, Homo sapien
tccttggcggaaagctagatgcacg

SEQ ID NO: 2106783 - DNA, 25 bp, Homo sapien
gggtatcaatgaaacccggttgctc

SEQ ID NO: 2106784 - DNA, 25 bp, Homo sapien
gatgcacgtcctccataaggatgtc

SEQ ID NO: 2106785 - DNA, 25 bp, Homo sapien
tgggagagcgacacacctttgattc

SEQ ID NO: 2106786 - DNA, 25 bp, Homo sapien
gatatgcgtggtgcacttactggag

SEQ ID NO: 2106787 - DNA, 25 bp, Homo sapien
ggccagccgcagcagtctcttaaat

SEQ ID NO: 2106788 - DNA, 25 bp, Homo sapien
tgttctcccgcaagacggtcaaggt

SEQ ID NO: 2106789 - DNA, 25 bp, Homo sapien
taataggtgattgtccattgctgcc

SEQ ID NO: 2106790 - DNA, 25 bp, Homo sapien
ccttaataggtgattgtccattgct

SEQ ID NO: 2106791 - DNA, 25 bp, Homo sapien
gtccttaataggtgattgtccattg

SEQ ID NO: 2106792 - DNA, 25 bp, Homo sapien
cgggtccttaataggtgattgtcca

SEQ ID NO: 2106793 - DNA, 25 bp, Homo sapien
tgattggtggctctttgggttgccc

SEQ ID NO: 2106794 - DNA, 25 bp, Homo sapien
ctttatgtgtgatcgtggcagtcct

SEQ ID NO: 2106795 - DNA, 25 bp, Homo sapien
tgggttgcccttcacgttctcagtg

SEQ ID NO: 2106796 - DNA, 25 bp, Homo sapien
cctcagttgactaagaaactgtgat

SEQ ID NO: 2106797 - DNA, 25 bp, Homo sapien
ttatttcctgcgttgtgttttgtgt

SEQ ID NO: 2106798 - DNA, 25 bp, Homo sapien
tatttcctgcgttgtgttttgtgtt

SEQ ID NO: 2106799 - DNA, 25 bp, Homo sapien
gccttccccgatcatctcagcaaga

SEQ ID NO: 2106800 - DNA, 25 bp, Homo sapien
tagatcctgaccttccctcaaaact

SEQ ID NO: 2106801 - DNA, 25 bp, Homo sapien
cagcaagaaccatctgtctacataa

SEQ ID NO: 2106802 - DNA, 25 bp, Homo sapien
tgtctacataagcttgcatgctcat

SEQ ID NO: 2106803 - DNA, 25 bp, Homo sapien
ctgggttggtggcaacttggaccaa

SEQ ID NO: 2106804 - DNA, 25 bp, Homo sapien
cttggaccaaactttataggctgct

SEQ ID NO: 2106805 - DNA, 25 bp, Homo sapien
cgaggtcacagctcccggctggagt

SEQ ID NO: 2106806 - DNA, 25 bp, Homo sapien
gcttcaaccgcaacgtgagtaggaa

SEQ ID NO: 2106807 - DNA, 25 bp, Homo sapien
cattttctgactcatgggtagtgcc

SEQ ID NO: 2106808 - DNA, 25 bp, Homo sapien
atgggtagtgccttcttactgtgtc

SEQ ID NO: 2106809 - DNA, 25 bp, Homo sapien
gactcatgggtagtgccttcttact

SEQ ID NO: 2106810 - DNA, 25 bp, Homo sapien
tttctgactcatgggtagtgccttc

SEQ ID NO: 2106811 - DNA, 25 bp, Homo sapien
tgtaaacaccgctgcacgcacacca

SEQ ID NO: 2106812 - DNA, 25 bp, Homo sapien
taaacaccgctgcacgcacaccagc

SEQ ID NO: 2106813 - DNA, 25 bp, Homo sapien
tagttgtaaacaccgctgcacgcac

SEQ ID NO: 2106814 - DNA, 25 bp, Homo sapien
gttgtaaacaccgctgcacgcacac

SEQ ID NO: 2106815 - DNA, 25 bp, Homo sapien
gctgggaccagagacatgagtcacc

SEQ ID NO: 2106816 - DNA, 25 bp, Homo sapien
tagctgggaccagagacatgagtca

SEQ ID NO: 2106817 - DNA, 25 bp, Homo sapien
aagcaatccgtctgcttcggcttcc

SEQ ID NO: 2106818 - DNA, 25 bp, Homo sapien
gggaccagagacatgagtcaccaca

SEQ ID NO: 2106819 - DNA, 25 bp, Homo sapien
agaagatacttgacttggagtggct

SEQ ID NO: 2106820 - DNA, 25 bp, Homo sapien
gtactctgagcttttgttgctaatg

SEQ ID NO: 2106821 - DNA, 25 bp, Homo sapien
gtggctacacaatcctcagacttgc

SEQ ID NO: 2106822 - DNA, 25 bp, Homo sapien
ctctgagcttttgttgctaatgtca

SEQ ID NO: 2106823 - DNA, 25 bp, Homo sapien
gcttcaagtccaaatctgtcagaga

SEQ ID NO: 2106824 - DNA, 25 bp, Homo sapien
agcacctccttgatttcatcactcc

SEQ ID NO: 2106825 - DNA, 25 bp, Homo sapien
cagagcacctccttgatttcatcac

SEQ ID NO: 2106826 - DNA, 25 bp, Homo sapien
ccagagcacctccttgatttcatca

SEQ ID NO: 2106827 - DNA, 25 bp, Homo sapien
agagcacctccttgatttcatcact

SEQ ID NO: 2106828 - DNA, 25 bp, Homo sapien
agactgacttgggtccaggttctgg

SEQ ID NO: 2106829 - DNA, 25 bp, Homo sapien
ctgacttgggtccaggttctgggtc

SEQ ID NO: 2106830 - DNA, 25 bp, Homo sapien
gatgtctgtggcaaactgtgttgct

SEQ ID NO: 2106831 - DNA, 25 bp, Homo sapien
tttagactgttgctcctctggaaag

SEQ ID NO: 2106832 - DNA, 25 bp, Homo sapien
ggaggagtagctgctagaagaaatc

SEQ ID NO: 2106833 - DNA, 25 bp, Homo sapien
aacagttgagagactgtccggtgga

SEQ ID NO: 2106834 - DNA, 25 bp, Homo sapien
agtaactttgttcctctccggctgc

SEQ ID NO: 2106835 - DNA, 25 bp, Homo sapien
catggtgggtttcaaggatgaggtc

SEQ ID NO: 2106836 - DNA, 25 bp, Homo sapien
gaaccgccacggtcagtttctggga

SEQ ID NO: 2106837 - DNA, 25 bp, Homo sapien
catagaggtctgttgctgcggtgct

SEQ ID NO: 2106838 - DNA, 25 bp, Homo sapien
gaagatttgaccaatgagagctttg

SEQ ID NO: 2106839 - DNA, 25 bp, Homo sapien
gaaccgcttgtaacgtctgcccata

SEQ ID NO: 2106840 - DNA, 25 bp, Homo sapien
taagaatgaagcaaactggcatgtc

SEQ ID NO: 2106841 - DNA, 25 bp, Homo sapien
ttcagttgccagaggcttgtggttc

SEQ ID NO: 2106842 - DNA, 25 bp, Homo sapien
tcagttgccagaggcttgtggttct

SEQ ID NO: 2106843 - DNA, 25 bp, Homo sapien
tctgattcagttgccagaggcttgt

SEQ ID NO: 2106844 - DNA, 25 bp, Homo sapien
gattcagttgccagaggcttgtggt

SEQ ID NO: 2106845 - DNA, 25 bp, Homo sapien
aagataactcagtggtttcaagaca

SEQ ID NO: 2106846 - DNA, 25 bp, Homo sapien
caagataactcagtggtttcaagac

SEQ ID NO: 2106847 - DNA, 25 bp, Homo sapien
ccgataacaagataactcagtggtt

SEQ ID NO: 2106848 - DNA, 25 bp, Homo sapien
taacaagataactcagtggtttcaa

SEQ ID NO: 2106849 - DNA, 25 bp, Homo sapien
cctgtccctggaatagtgccagttc

SEQ ID NO: 2106850 - DNA, 25 bp, Homo sapien
tccgtagggccagtttctttagaga

SEQ ID NO: 2106851 - DNA, 25 bp, Homo sapien
tggaatagtgccagttctacttctc

SEQ ID NO: 2106852 - DNA, 25 bp, Homo sapien
tggagagctagagggatgcggctgt

SEQ ID NO: 2106853 - DNA, 25 bp, Homo sapien
gaatttagaattaataagttactgc

SEQ ID NO: 2106854 - DNA, 25 bp, Homo sapien
ttttaacctttctgcttcattcact

SEQ ID NO: 2106855 - DNA, 25 bp, Homo sapien
tactgctattttagagggctttttc

SEQ ID NO: 2106856 - DNA, 25 bp, Homo sapien
gcagagaaatgctttagaagcctaa

SEQ ID NO: 2106857 - DNA, 25 bp, Homo sapien
tactgcattatgtcatattcaaatg

SEQ ID NO: 2106858 - DNA, 25 bp, Homo sapien
cacaggtgtgatcgtcgaacactac

SEQ ID NO: 2106859 - DNA, 25 bp, Homo sapien
tgatcgtcgaacactacagccttga

SEQ ID NO: 2106860 - DNA, 25 bp, Homo sapien
gctaattccctgtaatgaaagatga

SEQ ID NO: 2106861 - DNA, 25 bp, Homo sapien
ggctctgtgctccttgtttaatgat

SEQ ID NO: 2106862 - DNA, 25 bp, Homo sapien
gctctgtgctccttgtttaatgatg

SEQ ID NO: 2106863 - DNA, 25 bp, Homo sapien
tcaccttggtggtcatacctgactg

SEQ ID NO: 2106864 - DNA, 25 bp, Homo sapien
agaaggaggacaggcaaatgttgtc

SEQ ID NO: 2106865 - DNA, 25 bp, Homo sapien
agtgacattgacagaggaagacggc

SEQ ID NO: 2106866 - DNA, 25 bp, Homo sapien
gcaaatgttgtctggtcaccttggt

SEQ ID NO: 2106867 - DNA, 25 bp, Homo sapien
tgatgatgtgagatcattctaagac

SEQ ID NO: 2106868 - DNA, 25 bp, Homo sapien
ttctaagacactggagagagggcag

SEQ ID NO: 2106869 - DNA, 25 bp, Homo sapien
atgaggcactgccagggtttcctgg

SEQ ID NO: 2106870 - DNA, 25 bp, Homo sapien
cttcttgatgatgtgagatcattct

SEQ ID NO: 2106871 - DNA, 25 bp, Homo sapien
ccgccgctgctgccgcgagcactgc

SEQ ID NO: 2106872 - DNA, 25 bp, Homo sapien
gccgccgctgctgccgcgagcactg

SEQ ID NO: 2106873 - DNA, 25 bp, Homo sapien
agggactgcaaaagctttctccggg

SEQ ID NO: 2106874 - DNA, 25 bp, Homo sapien
ctgatatccaggagtgtgtttgaca

SEQ ID NO: 2106875 - DNA, 25 bp, Homo sapien
tccaggagtgtgtttgacagggact

SEQ ID NO: 2106876 - DNA, 25 bp, Homo sapien
gtgtgtttgacagggactgcaaaag

SEQ ID NO: 2106877 - DNA, 25 bp, Homo sapien
taccaagtgccagtcttgcggccaa

SEQ ID NO: 2106878 - DNA, 25 bp, Homo sapien
ggtaccaagtgccagtcttgcggcc

SEQ ID NO: 2106879 - DNA, 25 bp, Homo sapien
ccaggtaccaagtgccagtcttgcg

SEQ ID NO: 2106880 - DNA, 25 bp, Homo sapien
caagtgccagtcttgcggccaagct

SEQ ID NO: 2106881 - DNA, 25 bp, Homo sapien
gataatgggcttggggcaggttttg

SEQ ID NO: 2106882 - DNA, 25 bp, Homo sapien
tttcttggggacgttggtgataatg

SEQ ID NO: 2106883 - DNA, 25 bp, Homo sapien
ttgaaaaggatcttgtctttgatga

SEQ ID NO: 2106884 - DNA, 25 bp, Homo sapien
gttttgaaaaggatcttgtctttga

SEQ ID NO: 2106885 - DNA, 25 bp, Homo sapien
tagggaaaatccgagctctttcata

SEQ ID NO: 2106886 - DNA, 25 bp, Homo sapien
ctagggaaaatccgagctctttcat

SEQ ID NO: 2106887 - DNA, 25 bp, Homo sapien
agggaaaatccgagctctttcatac

SEQ ID NO: 2106888 - DNA, 25 bp, Homo sapien
cagggaaccgtccagccatccttga

SEQ ID NO: 2106889 - DNA, 25 bp, Homo sapien
acctgggattagacagaggccccag

SEQ ID NO: 2106890 - DNA, 25 bp, Homo sapien
aaccgtccagccatccttgaggtgg

SEQ ID NO: 2106891 - DNA, 25 bp, Homo sapien
tacctgcccttaggttggatatagg

SEQ ID NO: 2106892 - DNA, 25 bp, Homo sapien
tgaggtccagctattcttaagacca

SEQ ID NO: 2106893 - DNA, 25 bp, Homo sapien
tattcttaagaccaggtcctgtgcc

SEQ ID NO: 2106894 - DNA, 25 bp, Homo sapien
ctggcatctagattacggcccaggc

SEQ ID NO: 2106895 - DNA, 25 bp, Homo sapien
ggcatctagattacggcccaggccc

SEQ ID NO: 2106896 - DNA, 25 bp, Homo sapien
agctgaatttgctcctaaaagacct

SEQ ID NO: 2106897 - DNA, 25 bp, Homo sapien
gctgaatttgctcctaaaagacctg

SEQ ID NO: 2106898 - DNA, 25 bp, Homo sapien
aagctgaatttgctcctaaaagacc

SEQ ID NO: 2106899 - DNA, 25 bp, Homo sapien
ctgaatttgctcctaaaagacctgc

SEQ ID NO: 2106900 - DNA, 25 bp, Homo sapien
caggacccaagtttggacccatggg

SEQ ID NO: 2106901 - DNA, 25 bp, Homo sapien
tggaaggccaatttcccgagggcca

SEQ ID NO: 2106902 - DNA, 25 bp, Homo sapien
tcacaccaggctgaacgaagcacag

SEQ ID NO: 2106903 - DNA, 25 bp, Homo sapien
aatccggctactcctaagtcccagg

SEQ ID NO: 2106904 - DNA, 25 bp, Homo sapien
ctggatgggtagaggagccttaaat

SEQ ID NO: 2106905 - DNA, 25 bp, Homo sapien
catcctttcacaccaggctgaacga

SEQ ID NO: 2106906 - DNA, 25 bp, Homo sapien
gatttaagagactcatgcttcctga

SEQ ID NO: 2106907 - DNA, 25 bp, Homo sapien
cattctaaattctccccagggttga

SEQ ID NO: 2106908 - DNA, 25 bp, Homo sapien
tcccctcaggatgtgtttgtatagt

SEQ ID NO: 2106909 - DNA, 25 bp, Homo sapien
tagtcacagggtacacaggaaaccc

SEQ ID NO: 2106910 - DNA, 25 bp, Homo sapien
tgatgacaccctggacatacaattt

SEQ ID NO: 2106911 - DNA, 25 bp, Homo sapien
tggtgacctttggtgctctggttct

SEQ ID NO: 2106912 - DNA, 25 bp, Homo sapien
gagtaagtgcatagggaatgttgct

SEQ ID NO: 2106913 - DNA, 25 bp, Homo sapien
ggagccctgcgatgtctaaaatgac

SEQ ID NO: 2106914 - DNA, 25 bp, Homo sapien
tgggatacacgtggcaatcagtctt

SEQ ID NO: 2106915 - DNA, 25 bp, Homo sapien
ctgggatacacgtggcaatcagtct

SEQ ID NO: 2106916 - DNA, 25 bp, Homo sapien
tccgtgaaaatctgcttgtttttga

SEQ ID NO: 2106917 - DNA, 25 bp, Homo sapien
agaagcttcttgtgggcctcgtctg

SEQ ID NO: 2106918 - DNA, 25 bp, Homo sapien
tgggcctcgtctgtcttcagcttgt

SEQ ID NO: 2106919 - DNA, 25 bp, Homo sapien
ttgtggatgtgttccgtgaaaatct

SEQ ID NO: 2106920 - DNA, 25 bp, Homo sapien
tggtgcttgtgttcttccttggtct

SEQ ID NO: 2106921 - DNA, 25 bp, Homo sapien
gcttgtgttcttccttggtcttgga

SEQ ID NO: 2106922 - DNA, 25 bp, Homo sapien
tggaggcgctcttcatggtgcttgt

SEQ ID NO: 2106923 - DNA, 25 bp, Homo sapien
tcttgatcttttcctccttggacaa

SEQ ID NO: 2106924 - DNA, 25 bp, Homo sapien
gccaaaatttgcttaggtcgagtgt

SEQ ID NO: 2106925 - DNA, 25 bp, Homo sapien
tctacccctaggattctgaagacct

SEQ ID NO: 2106926 - DNA, 25 bp, Homo sapien
tgatcctgatattgcaaagccaaaa

SEQ ID NO: 2106927 - DNA, 25 bp, Homo sapien
cagtataattgcacaagaggccttc

SEQ ID NO: 2106928 - DNA, 25 bp, Homo sapien
ggaccatcgtgaacataggagttga

SEQ ID NO: 2106929 - DNA, 25 bp, Homo sapien
gatgaaggtagagcacggaagaaag

SEQ ID NO: 2106930 - DNA, 25 bp, Homo sapien
gcgggtcaggaccatcgtgaacata

SEQ ID NO: 2106931 - DNA, 25 bp, Homo sapien
aagaaaggcgggtcaggaccatcgt

SEQ ID NO: 2106932 - DNA, 25 bp, Homo sapien
tttgccctccataatcctccttcca

SEQ ID NO: 2106933 - DNA, 25 bp, Homo sapien
cataatcctccttccaatcattgag

SEQ ID NO: 2106934 - DNA, 25 bp, Homo sapien
tccataatcctccttccaatcattg

SEQ ID NO: 2106935 - DNA, 25 bp, Homo sapien
ggtttgccctccataatcctccttc

SEQ ID NO: 2106936 - DNA, 25 bp, Homo sapien
cagagacaataggtagtggagatga

SEQ ID NO: 2106937 - DNA, 25 bp, Homo sapien
caatagccatactcacccactttgg

SEQ ID NO: 2106938 - DNA, 25 bp, Homo sapien
tggcaatagccatactcacccactt

SEQ ID NO: 2106939 - DNA, 25 bp, Homo sapien
ccactttggccagtacatcatattc

SEQ ID NO: 2106940 - DNA, 25 bp, Homo sapien
caattggctttctgttatctgcccc

SEQ ID NO: 2106941 - DNA, 25 bp, Homo sapien
tttgcacaagtgactccaattggct

SEQ ID NO: 2106942 - DNA, 25 bp, Homo sapien
taaaagcctccagttcagtgcaaga

SEQ ID NO: 2106943 - DNA, 25 bp, Homo sapien
tgagctgatgactgtaatactgagg

SEQ ID NO: 2106944 - DNA, 25 bp, Homo sapien
cactgagctaggatggcccatcacc

SEQ ID NO: 2106945 - DNA, 25 bp, Homo sapien
tgctcaaggttacgctgccatgctg

SEQ ID NO: 2106946 - DNA, 25 bp, Homo sapien
cattgattcagtgcccatctcacaa

SEQ ID NO: 2106947 - DNA, 25 bp, Homo sapien
tcccagaggtgcttaattcttgagc

SEQ ID NO: 2106948 - DNA, 25 bp, Homo sapien
ctttaagttacgatgggaatccaga

SEQ ID NO: 2106949 - DNA, 25 bp, Homo sapien
atgggaatccagaacaacgccatat

SEQ ID NO: 2106950 - DNA, 25 bp, Homo sapien
ggaatccagaacaacgccatatgga

SEQ ID NO: 2106951 - DNA, 25 bp, Homo sapien
atccagaacaacgccatatggaccc

SEQ ID NO: 2106952 - DNA, 25 bp, Homo sapien
gattggtgccgcctaagtgggttcc

SEQ ID NO: 2106953 - DNA, 25 bp, Homo sapien
attggtgccgcctaagtgggttcct

SEQ ID NO: 2106954 - DNA, 25 bp, Homo sapien
caagattggtgccgcctaagtgggt

SEQ ID NO: 2106955 - DNA, 25 bp, Homo sapien
aagtcaagattggtgccgcctaagt

SEQ ID NO: 2106956 - DNA, 25 bp, Homo sapien
acagcacgagctgccagcagaaact

SEQ ID NO: 2106957 - DNA, 25 bp, Homo sapien
tttcaatggcaacaacagcacgagc

SEQ ID NO: 2106958 - DNA, 25 bp, Homo sapien
aatggcaacaacagcacgagctgcc

SEQ ID NO: 2106959 - DNA, 25 bp, Homo sapien
taagatgactccgtgagaggctggt

SEQ ID NO: 2106960 - DNA, 25 bp, Homo sapien
cccttgttgttgcaatgtccacata

SEQ ID NO: 2106961 - DNA, 25 bp, Homo sapien
ccttgttgttgcaatgtccacatag

SEQ ID NO: 2106962 - DNA, 25 bp, Homo sapien
acgggaaatggtgccacgcatgcgc

SEQ ID NO: 2106963 - DNA, 25 bp, Homo sapien
gcatgcgcagaacttcccgagccag

SEQ ID NO: 2106964 - DNA, 25 bp, Homo sapien
cctcccatgggtgtccacgggaaat

SEQ ID NO: 2106965 - DNA, 25 bp, Homo sapien
gacctcccatgggtgtccacgggaa

SEQ ID NO: 2106966 - DNA, 25 bp, Homo sapien
cctgtacaccttcagacaagtctgc

SEQ ID NO: 2106967 - DNA, 25 bp, Homo sapien
ctgagtgctccagtcgtcagtaggg

SEQ ID NO: 2106968 - DNA, 25 bp, Homo sapien
gagtgctccagtcgtcagtagggaa

SEQ ID NO: 2106969 - DNA, 25 bp, Homo sapien
gggcacctgtacaccttcagacaag

SEQ ID NO: 2106970 - DNA, 25 bp, Homo sapien
ttaagaccagtcagtggttgctcct

SEQ ID NO: 2106971 - DNA, 25 bp, Homo sapien
taagaccagtcagtggttgctccta

SEQ ID NO: 2106972 - DNA, 25 bp, Homo sapien
aagaccagtcagtggttgctcctac

SEQ ID NO: 2106973 - DNA, 25 bp, Homo sapien
atgttgcttaagagcctatgcaaga

SEQ ID NO: 2106974 - DNA, 25 bp, Homo sapien
tgatgtttattttccatcaaccatt

SEQ ID NO: 2106975 - DNA, 25 bp, Homo sapien
ccatgttgcttaagagcctatgcaa

SEQ ID NO: 2106976 - DNA, 25 bp, Homo sapien
ccatcaaccatttttccatgttgct

SEQ ID NO: 2106977 - DNA, 25 bp, Homo sapien
tctaaagagtggcaaactttctgga

SEQ ID NO: 2106978 - DNA, 25 bp, Homo sapien
actttctggaaaggataggcatacc

SEQ ID NO: 2106979 - DNA, 25 bp, Homo sapien
cataccttcttgagtccctcagtga

SEQ ID NO: 2106980 - DNA, 25 bp, Homo sapien
gagcttgactcagacttctaaagag

SEQ ID NO: 2106981 - DNA, 25 bp, Homo sapien
agagggtctttgcaaagttaagcat

SEQ ID NO: 2106982 - DNA, 25 bp, Homo sapien
tgcaaggcatagagggtctttgcaa

SEQ ID NO: 2106983 - DNA, 25 bp, Homo sapien
ctgcaaggcatagagggtctttgca

SEQ ID NO: 2106984 - DNA, 25 bp, Homo sapien
catagagggtctttgcaaagttaag

SEQ ID NO: 2106985 - DNA, 25 bp, Homo sapien
gagctaggtaaattcgagagcctct

SEQ ID NO: 2106986 - DNA, 25 bp, Homo sapien
catcagagtttgagatccactgagc

SEQ ID NO: 2106987 - DNA, 25 bp, Homo sapien
taggtaaattcgagagcctctttgt

SEQ ID NO: 2106988 - DNA, 25 bp, Homo sapien
gtaaattcgagagcctctttgtcct

SEQ ID NO: 2106989 - DNA, 25 bp, Homo sapien
caaaaaagggggtgccatgaaggca

SEQ ID NO: 2106990 - DNA, 25 bp, Homo sapien
gggtgccatgaaggcagatcattca

SEQ ID NO: 2106991 - DNA, 25 bp, Homo sapien
gggggtgccatgaaggcagatcatt

SEQ ID NO: 2106992 - DNA, 25 bp, Homo sapien
tgccatgaaggcagatcattcaaaa

SEQ ID NO: 2106993 - DNA, 25 bp, Homo sapien
agaccaaaagccttcgtacatctca

SEQ ID NO: 2106994 - DNA, 25 bp, Homo sapien
ggtctcaagtcagtgtacaggtaag

SEQ ID NO: 2106995 - DNA, 25 bp, Homo sapien
tattcaactggtctcaagtcagtgt

SEQ ID NO: 2106996 - DNA, 25 bp, Homo sapien
accaaaagccttcgtacatctcatg

SEQ ID NO: 2106997 - DNA, 25 bp, Homo sapien
ccacgcctggatgattttaaaattt

SEQ ID NO: 2106998 - DNA, 25 bp, Homo sapien
ccaccacgcctggatgattttaaaa

SEQ ID NO: 2106999 - DNA, 25 bp, Homo sapien
gtggctcacgcctgtaatcccagca

SEQ ID NO: 2107000 - DNA, 25 bp, Homo sapien
aaattttcagtagaggccgggtgcg

SEQ ID NO: 2107001 - DNA, 25 bp, Homo sapien
ggtgacgtattatacctaggagtgg

SEQ ID NO: 2107002 - DNA, 25 bp, Homo sapien
tcattcgaggcctcatcacctcaga

SEQ ID NO: 2107003 - DNA, 25 bp, Homo sapien
caagaaagtactgctatggtgacgt

SEQ ID NO: 2107004 - DNA, 25 bp, Homo sapien
tgctggttgtaccatttcagtgact

SEQ ID NO: 2107005 - DNA, 25 bp, Homo sapien
aagcttgattttgaactggagtccc

SEQ ID NO: 2107006 - DNA, 25 bp, Homo sapien
gtggggtgaaggcaatgtcaaaatg

SEQ ID NO: 2107007 - DNA, 25 bp, Homo sapien
ttgattttgaactggagtccctggg

SEQ ID NO: 2107008 - DNA, 25 bp, Homo sapien
tcataaagcttgattttgaactgga

SEQ ID NO: 2107009 - DNA, 25 bp, Homo sapien
caagactcagcttgattaatttaaa

SEQ ID NO: 2107010 - DNA, 25 bp, Homo sapien
atttaaaaacgggatcaactgagca

SEQ ID NO: 2107011 - DNA, 25 bp, Homo sapien
tttgctcatgccattcctctctctt

SEQ ID NO: 2107012 - DNA, 25 bp, Homo sapien
gcttcctgaattctatccgagcttc

SEQ ID NO: 2107013 - DNA, 25 bp, Homo sapien
atggccgcttgccgcaaggaggaca

SEQ ID NO: 2107014 - DNA, 25 bp, Homo sapien
ggcaatggccgcttgccgcaaggag

SEQ ID NO: 2107015 - DNA, 25 bp, Homo sapien
caatggccgcttgccgcaaggagga

SEQ ID NO: 2107016 - DNA, 25 bp, Homo sapien
gccgcttgccgcaaggaggacaggg

SEQ ID NO: 2107017 - DNA, 25 bp, Homo sapien
tgggcgtcacaatcccggacagata

SEQ ID NO: 2107018 - DNA, 25 bp, Homo sapien
catctgggcgtcacaatcccggaca

SEQ ID NO: 2107019 - DNA, 25 bp, Homo sapien
tcacaatcccggacagatagccctg

SEQ ID NO: 2107020 - DNA, 25 bp, Homo sapien
atcccggacagatagccctgcggct

SEQ ID NO: 2107021 - DNA, 25 bp, Homo sapien
gagaaagaggaccagctatcggcca

SEQ ID NO: 2107022 - DNA, 25 bp, Homo sapien
gggacacaacacttaccaagctagt

SEQ ID NO: 2107023 - DNA, 25 bp, Homo sapien
aagctagttcaggatagcagccgcg

SEQ ID NO: 2107024 - DNA, 25 bp, Homo sapien
tctctacgctggttcgggacacaac

SEQ ID NO: 2107025 - DNA, 25 bp, Homo sapien
tgaaaaggaggacgcggatgctgtc

SEQ ID NO: 2107026 - DNA, 25 bp, Homo sapien
aaaaggaggacgcggatgctgtcat

SEQ ID NO: 2107027 - DNA, 25 bp, Homo sapien
gatgaaaaggaggacgcggatgctg

SEQ ID NO: 2107028 - DNA, 25 bp, Homo sapien
atgaaaaggaggacgcggatgctgt

SEQ ID NO: 2107029 - DNA, 25 bp, Homo sapien
agaagctgtagatggagggctgctg

SEQ ID NO: 2107030 - DNA, 25 bp, Homo sapien
gcttctggttatttgggagaagctg

SEQ ID NO: 2107031 - DNA, 25 bp, Homo sapien
ttgggagaagctgtagatggagggc

SEQ ID NO: 2107032 - DNA, 25 bp, Homo sapien
agcttctggttatttgggagaagct

SEQ ID NO: 2107033 - DNA, 25 bp, Homo sapien
tgaatgccctcgaagaatacgttga

SEQ ID NO: 2107034 - DNA, 25 bp, Homo sapien
aaggagtttgtcgttggcggccaca

SEQ ID NO: 2107035 - DNA, 25 bp, Homo sapien
tatttcatgaggtacgcaaggcaca

SEQ ID NO: 2107036 - DNA, 25 bp, Homo sapien
tacggccctgcctcatatcgatggt

SEQ ID NO: 2107037 - DNA, 25 bp, Homo sapien
cggtgttgttattaaacagcttgaa

SEQ ID NO: 2107038 - DNA, 25 bp, Homo sapien
tgatcatgcgcacggtgttgttatt

SEQ ID NO: 2107039 - DNA, 25 bp, Homo sapien
gcgagttgatcatgcgcacggtgtt

SEQ ID NO: 2107040 - DNA, 25 bp, Homo sapien
gcgcacggtgttgttattaaacagc

SEQ ID NO: 2107041 - DNA, 25 bp, Homo sapien
catacgtaggtccttctcatagatg

SEQ ID NO: 2107042 - DNA, 25 bp, Homo sapien
attgatatcatcatacgtaggtcct

SEQ ID NO: 2107043 - DNA, 25 bp, Homo sapien
catcatacgtaggtccttctcatag

SEQ ID NO: 2107044 - DNA, 25 bp, Homo sapien
tatcatcatacgtaggtccttctca

SEQ ID NO: 2107045 - DNA, 25 bp, Homo sapien
tgccctttaacaaggcaccatccgg

SEQ ID NO: 2107046 - DNA, 25 bp, Homo sapien
cagtcttggtgcaagatcgatggca

SEQ ID NO: 2107047 - DNA, 25 bp, Homo sapien
tcttgccctttaacaaggcaccatc

SEQ ID NO: 2107048 - DNA, 25 bp, Homo sapien
tgcaagatcgatggcagatgtcagg

SEQ ID NO: 2107049 - DNA, 25 bp, Homo sapien
caagggatgccaagatgtctaaggc

SEQ ID NO: 2107050 - DNA, 25 bp, Homo sapien
ggatgccaagatgtctaaggctttg

SEQ ID NO: 2107051 - DNA, 25 bp, Homo sapien
tgcaagggatgccaagatgtctaag

SEQ ID NO: 2107052 - DNA, 25 bp, Homo sapien
agtgcaagggatgccaagatgtcta

SEQ ID NO: 2107053 - DNA, 25 bp, Homo sapien
agaaagtttccatctgggtcgctgc

SEQ ID NO: 2107054 - DNA, 25 bp, Homo sapien
aaagaaagtttccatctgggtcgct

SEQ ID NO: 2107055 - DNA, 25 bp, Homo sapien
catctgggtcgctgccagaaaggct

SEQ ID NO: 2107056 - DNA, 25 bp, Homo sapien
aagtttccatctgggtcgctgccag

SEQ ID NO: 2107057 - DNA, 25 bp, Homo sapien
gcagcggcggctttcggctgtaggg

SEQ ID NO: 2107058 - DNA, 25 bp, Homo sapien
agcactgaggggattcgttggagac

SEQ ID NO: 2107059 - DNA, 25 bp, Homo sapien
gcggctttcggctgtagggtcacat

SEQ ID NO: 2107060 - DNA, 25 bp, Homo sapien
ctttcggctgtagggtcacatcgcg

SEQ ID NO: 2107061 - DNA, 25 bp, Homo sapien
aaatcccaacgcggcggcggtgaag

SEQ ID NO: 2107062 - DNA, 25 bp, Homo sapien
agtgacgcccccaatctgcgcgcgg

SEQ ID NO: 2107063 - DNA, 25 bp, Homo sapien
acgcagcgaattcacaactccaacg

SEQ ID NO: 2107064 - DNA, 25 bp, Homo sapien
agcgaattcacaactccaacgccga

SEQ ID NO: 2107065 - DNA, 25 bp, Homo sapien
ggaaacgcagcgaattcacaactcc

SEQ ID NO: 2107066 - DNA, 25 bp, Homo sapien
tcctcatcaccgaaagcggcggcgg

SEQ ID NO: 2107067 - DNA, 25 bp, Homo sapien
ggcggcggtagcgagcgacactccg

SEQ ID NO: 2107068 - DNA, 25 bp, Homo sapien
cttttcctcatcaccgaaagcggcg

SEQ ID NO: 2107069 - DNA, 25 bp, Homo sapien
gcggcggcggtagcgagcgacactc

SEQ ID NO: 2107070 - DNA, 25 bp, Homo sapien
ccctctcctcggctgtcaggctggg

SEQ ID NO: 2107071 - DNA, 25 bp, Homo sapien
gtccagtccgccgagcgcctccctc

SEQ ID NO: 2107072 - DNA, 25 bp, Homo sapien
cctcctcgctctcgccgctcgcttt

SEQ ID NO: 2107073 - DNA, 25 bp, Homo sapien
gacgcctcctcgctctcgccgctcg

SEQ ID NO: 2107074 - DNA, 25 bp, Homo sapien
agagcggctactgcccgtccggagc

SEQ ID NO: 2107075 - DNA, 25 bp, Homo sapien
cgcgaagagcgccaaaccgaggtgc

SEQ ID NO: 2107076 - DNA, 25 bp, Homo sapien
tactcgttaacgctcagggaacgcc

SEQ ID NO: 2107077 - DNA, 25 bp, Homo sapien
gacagacacagtttactcgttaacg

SEQ ID NO: 2107078 - DNA, 25 bp, Homo sapien
aaatctcacgaacccaaagaggcgg

SEQ ID NO: 2107079 - DNA, 25 bp, Homo sapien
tgaaatctcacgaacccaaagaggc

SEQ ID NO: 2107080 - DNA, 25 bp, Homo sapien
ttcatgaaatctcacgaacccaaag

SEQ ID NO: 2107081 - DNA, 25 bp, Homo sapien
gcccagtagggccttcgtcctggcg

SEQ ID NO: 2107082 - DNA, 25 bp, Homo sapien
ttttagcaatagttccctgacgcag

SEQ ID NO: 2107083 - DNA, 25 bp, Homo sapien
ctgacaaaaacattcgggagacgat

SEQ ID NO: 2107084 - DNA, 25 bp, Homo sapien
gacttactctgcagctagccaagca

SEQ ID NO: 2107085 - DNA, 25 bp, Homo sapien
caaaaagtatctagaggtggcagtc

SEQ ID NO: 2107086 - DNA, 25 bp, Homo sapien
tgcatgaaggtatttcaaaagtcaa

SEQ ID NO: 2107087 - DNA, 25 bp, Homo sapien
caatatcatggctgcaattaggatg

SEQ ID NO: 2107088 - DNA, 25 bp, Homo sapien
gtatacctatattcaaaaaattgca

SEQ ID NO: 2107089 - DNA, 25 bp, Homo sapien
actatgtgcaagtatacctatattc

SEQ ID NO: 2107090 - DNA, 25 bp, Homo sapien
cagttttgcaagatgctacagttgg

SEQ ID NO: 2107091 - DNA, 25 bp, Homo sapien
ggaaactgggtaaagcacacactag

SEQ ID NO: 2107092 - DNA, 25 bp, Homo sapien
gctcaatgatcaaagggaattccaa

SEQ ID NO: 2107093 - DNA, 25 bp, Homo sapien
gataaatgggttagtggttgccagc

SEQ ID NO: 2107094 - DNA, 25 bp, Homo sapien
tgagattcataggtataaacttaac

SEQ ID NO: 2107095 - DNA, 25 bp, Homo sapien
gcatcatcatttgcaattgctcaaa

SEQ ID NO: 2107096 - DNA, 25 bp, Homo sapien
aacttaacaaatgttcatggaacaa

SEQ ID NO: 2107097 - DNA, 25 bp, Homo sapien
caaatgaattcactaaggttgcagg

SEQ ID NO: 2107098 - DNA, 25 bp, Homo sapien
gaggctggtattatcctgacaccaa

SEQ ID NO: 2107099 - DNA, 25 bp, Homo sapien
cattctcatccagaaatagaaggga

SEQ ID NO: 2107100 - DNA, 25 bp, Homo sapien
ttcaacttaaaagaaacagatcaac

SEQ ID NO: 2107101 - DNA, 25 bp, Homo sapien
tgattttctaatcaaaagctccaaa

SEQ ID NO: 2107102 - DNA, 25 bp, Homo sapien
caccatctgatgtgttgttcaatgt

SEQ ID NO: 2107103 - DNA, 25 bp, Homo sapien
gtaaaacaccaataccagtagacag

SEQ ID NO: 2107104 - DNA, 25 bp, Homo sapien
tctgtgcttaactgaaagtggtaaa

SEQ ID NO: 2107105 - DNA, 25 bp, Homo sapien
tggttgaagcaaaatttatcacacc

SEQ ID NO: 2107106 - DNA, 25 bp, Homo sapien
ccaccaccaagcagaagaagcaggt

SEQ ID NO: 2107107 - DNA, 25 bp, Homo sapien
agaagcaggtggtgctttgcaccag

SEQ ID NO: 2107108 - DNA, 25 bp, Homo sapien
gaagaagcaggtggtgctttgcacc

SEQ ID NO: 2107109 - DNA, 25 bp, Homo sapien
cagaagaagcaggtggtgctttgca

SEQ ID NO: 2107110 - DNA, 25 bp, Homo sapien
aattcgaaaccacgtacagtcatgc

SEQ ID NO: 2107111 - DNA, 25 bp, Homo sapien
tagccagctgataacgtaaccagac

SEQ ID NO: 2107112 - DNA, 25 bp, Homo sapien
gatggagggccatacacggtatctc

SEQ ID NO: 2107113 - DNA, 25 bp, Homo sapien
ctctggaaacgaatcaaaggcttgc

SEQ ID NO: 2107114 - DNA, 25 bp, Homo sapien
tgacacatcgatcctactgctgtgt

SEQ ID NO: 2107115 - DNA, 25 bp, Homo sapien
cactttacccaattggctactggtt

SEQ ID NO: 2107116 - DNA, 25 bp, Homo sapien
ccattggctgaaataggatctcaca

SEQ ID NO: 2107117 - DNA, 25 bp, Homo sapien
tttataacctgacacatcgatccta

SEQ ID NO: 2107118 - DNA, 25 bp, Homo sapien
agttgttgggcaagaatttgtgata

SEQ ID NO: 2107119 - DNA, 25 bp, Homo sapien
tgttgggcaagaatttgtgatagga

SEQ ID NO: 2107120 - DNA, 25 bp, Homo sapien
ttgttgggcaagaatttgtgatagg

SEQ ID NO: 2107121 - DNA, 25 bp, Homo sapien
ttgggcaagaatttgtgataggaac

SEQ ID NO: 2107122 - DNA, 25 bp, Homo sapien
ttttaaccgctagagctaccaggca

SEQ ID NO: 2107123 - DNA, 25 bp, Homo sapien
tctgataagccaaccagcaaagctg

SEQ ID NO: 2107124 - DNA, 25 bp, Homo sapien
cacagtacataagttcggctcagaa

SEQ ID NO: 2107125 - DNA, 25 bp, Homo sapien
tactggccaggtatgagtcaagatc

SEQ ID NO: 2107126 - DNA, 25 bp, Homo sapien
ttagagattcatagcagcgaacagc

SEQ ID NO: 2107127 - DNA, 25 bp, Homo sapien
tgaagtgacctaattgacaaaagaa

SEQ ID NO: 2107128 - DNA, 25 bp, Homo sapien
aaagaaatcagactccacttttcct

SEQ ID NO: 2107129 - DNA, 25 bp, Homo sapien
cttccaataagaggttgaagtgacc

SEQ ID NO: 2107130 - DNA, 25 bp, Homo sapien
cttagttaacagagtagtggcaggg

SEQ ID NO: 2107131 - DNA, 25 bp, Homo sapien
tgaacactgtggaaatgataacaac

SEQ ID NO: 2107132 - DNA, 25 bp, Homo sapien
tccactgatgcgacaaagttcaatg

SEQ ID NO: 2107133 - DNA, 25 bp, Homo sapien
tatcaacaacgatgccaagaccctc

SEQ ID NO: 2107134 - DNA, 25 bp, Homo sapien
gccttttttccttctgcatcaaatt

SEQ ID NO: 2107135 - DNA, 25 bp, Homo sapien
ttttttccttctgcatcaaattcat

SEQ ID NO: 2107136 - DNA, 25 bp, Homo sapien
ttacaaagccttttttccttctgca

SEQ ID NO: 2107137 - DNA, 25 bp, Homo sapien
agccttttttccttctgcatcaaat

SEQ ID NO: 2107138 - DNA, 25 bp, Homo sapien
gtcagactgtaaactgtagtacctc

SEQ ID NO: 2107139 - DNA, 25 bp, Homo sapien
tagtacctctggtatgcagataatg

SEQ ID NO: 2107140 - DNA, 25 bp, Homo sapien
gactgtaaactgtagtacctctggt

SEQ ID NO: 2107141 - DNA, 25 bp, Homo sapien
aactgtagtacctctggtatgcaga

SEQ ID NO: 2107142 - DNA, 25 bp, Homo sapien
tatattgatccaatggaatacagtg

SEQ ID NO: 2107143 - DNA, 25 bp, Homo sapien
gtatattgatccaatggaatacagt

SEQ ID NO: 2107144 - DNA, 25 bp, Homo sapien
tcttctccgtgacactgtaacactc

SEQ ID NO: 2107145 - DNA, 25 bp, Homo sapien
aggtcttctccgtgacactgtaaca

SEQ ID NO: 2107146 - DNA, 25 bp, Homo sapien
aaggtcttctccgtgacactgtaac

SEQ ID NO: 2107147 - DNA, 25 bp, Homo sapien
ggtcttctccgtgacactgtaacac

SEQ ID NO: 2107148 - DNA, 25 bp, Homo sapien
cattctgattactgattgcaccctg

SEQ ID NO: 2107149 - DNA, 25 bp, Homo sapien
gccaccatgctgttagatatgagtt

SEQ ID NO: 2107150 - DNA, 25 bp, Homo sapien
gactcattctgattactgattgcac

SEQ ID NO: 2107151 - DNA, 25 bp, Homo sapien
gattactgattgcaccctgactcat

SEQ ID NO: 2107152 - DNA, 25 bp, Homo sapien
aaaaaactgttgtcttgatctgtgc

SEQ ID NO: 2107153 - DNA, 25 bp, Homo sapien
ccactttcactatgactggatcaat

SEQ ID NO: 2107154 - DNA, 25 bp, Homo sapien
ttgatctgtgctcttgaccggtcca

SEQ ID NO: 2107155 - DNA, 25 bp, Homo sapien
tcacctcctgttacaatcctttgaa

SEQ ID NO: 2107156 - DNA, 25 bp, Homo sapien
aacgtaagactgtgacctactgagc

SEQ ID NO: 2107157 - DNA, 25 bp, Homo sapien
catcttgccctaagtatgaaggaac

SEQ ID NO: 2107158 - DNA, 25 bp, Homo sapien
tagcagcactatcacaacgtcagaa

SEQ ID NO: 2107159 - DNA, 25 bp, Homo sapien
ggagctgattatgactctaggcaac

SEQ ID NO: 2107160 - DNA, 25 bp, Homo sapien
gcattataatggaagtagaccaaac

SEQ ID NO: 2107161 - DNA, 25 bp, Homo sapien
aaatgcattataatggaagtagacc

SEQ ID NO: 2107162 - DNA, 25 bp, Homo sapien
cactgaaatgcattataatggaagt

SEQ ID NO: 2107163 - DNA, 25 bp, Homo sapien
ttataatggaagtagaccaaaccaa

SEQ ID NO: 2107164 - DNA, 25 bp, Homo sapien
tgtacatattccctcaaacgtgtgg

SEQ ID NO: 2107165 - DNA, 25 bp, Homo sapien
tactccatgggtgcctttagcacag

SEQ ID NO: 2107166 - DNA, 25 bp, Homo sapien
cacacgggcgcaaagaaacatgggt

SEQ ID NO: 2107167 - DNA, 25 bp, Homo sapien
taagtgcccaggacaaggtgcaacc

SEQ ID NO: 2107168 - DNA, 25 bp, Homo sapien
ctctaatggaatgggtcagaactaa

SEQ ID NO: 2107169 - DNA, 25 bp, Homo sapien
actctctaatggaatgggtcagaac

SEQ ID NO: 2107170 - DNA, 25 bp, Homo sapien
tcagaactaagcaatgtccacacat

SEQ ID NO: 2107171 - DNA, 25 bp, Homo sapien
gtcagaactaagcaatgtccacaca

SEQ ID NO: 2107172 - DNA, 25 bp, Homo sapien
ggatcaacataaagcacctcctgaa

SEQ ID NO: 2107173 - DNA, 25 bp, Homo sapien
tgggatcaacataaagcacctcctg

SEQ ID NO: 2107174 - DNA, 25 bp, Homo sapien
gggatcaacataaagcacctcctga

SEQ ID NO: 2107175 - DNA, 25 bp, Homo sapien
gatatgccaatactctgtagatcct

SEQ ID NO: 2107176 - DNA, 25 bp, Homo sapien
caaatgcagcttccatgatatgcca

SEQ ID NO: 2107177 - DNA, 25 bp, Homo sapien
catgttctaagccaaatctcaggat

SEQ ID NO: 2107178 - DNA, 25 bp, Homo sapien
cctatgaagattctacaaatgcagc

SEQ ID NO: 2107179 - DNA, 25 bp, Homo sapien
cacacaccagcaccctcgactaaat

SEQ ID NO: 2107180 - DNA, 25 bp, Homo sapien
acaccagcaccctcgactaaatttt

SEQ ID NO: 2107181 - DNA, 25 bp, Homo sapien
gcaccctcgactaaattttgtatgt

SEQ ID NO: 2107182 - DNA, 25 bp, Homo sapien
ccagcaccctcgactaaattttgta

SEQ ID NO: 2107183 - DNA, 25 bp, Homo sapien
agcaatgtttagattccagtaccaa

SEQ ID NO: 2107184 - DNA, 25 bp, Homo sapien
ttctttttatggagcacttctggcc

SEQ ID NO: 2107185 - DNA, 25 bp, Homo sapien
gcctaatacagccaatggaacttga

SEQ ID NO: 2107186 - DNA, 25 bp, Homo sapien
tcccaatcccgaaaacaagcaatgg

SEQ ID NO: 2107187 - DNA, 25 bp, Homo sapien
cagggattacagtcaaccaaagcta

SEQ ID NO: 2107188 - DNA, 25 bp, Homo sapien
cagcattggacaaagtgcagggatt

SEQ ID NO: 2107189 - DNA, 25 bp, Homo sapien
cagtcaaccaaagctaactgaaaat

SEQ ID NO: 2107190 - DNA, 25 bp, Homo sapien
tcagcattggacaaagtgcagggat

SEQ ID NO: 2107191 - DNA, 25 bp, Homo sapien
tgggtttcatataagtgggcaatgt

SEQ ID NO: 2107192 - DNA, 25 bp, Homo sapien
gtttcatataagtgggcaatgtgaa

SEQ ID NO: 2107193 - DNA, 25 bp, Homo sapien
tataagtgggcaatgtgaaattgaa

SEQ ID NO: 2107194 - DNA, 25 bp, Homo sapien
catataagtgggcaatgtgaaattg

SEQ ID NO: 2107195 - DNA, 25 bp, Homo sapien
agttgttcataagcttcttttgcag

SEQ ID NO: 2107196 - DNA, 25 bp, Homo sapien
gttgttcataagcttcttttgcaga

SEQ ID NO: 2107197 - DNA, 25 bp, Homo sapien
tgttcataagcttcttttgcagaat

SEQ ID NO: 2107198 - DNA, 25 bp, Homo sapien
aaaagttgttcataagcttcttttg

SEQ ID NO: 2107199 - DNA, 25 bp, Homo sapien
ggaaataccaggactggccagaatt

SEQ ID NO: 2107200 - DNA, 25 bp, Homo sapien
tattataatactgagagctgcatgc

SEQ ID NO: 2107201 - DNA, 25 bp, Homo sapien
tataggtgctaaaaagcatgctgca

SEQ ID NO: 2107202 - DNA, 25 bp, Homo sapien
gaaaggatggactatatatcacagc

SEQ ID NO: 2107203 - DNA, 25 bp, Homo sapien
tgaaacaaattaatcggctgaaagg

SEQ ID NO: 2107204 - DNA, 25 bp, Homo sapien
gtaagatataaaggcatcctgaact

SEQ ID NO: 2107205 - DNA, 25 bp, Homo sapien
gatataaaggcatcctgaactttcc

SEQ ID NO: 2107206 - DNA, 25 bp, Homo sapien
cctgaactttcccaatacttgaata

SEQ ID NO: 2107207 - DNA, 25 bp, Homo sapien
aaaggcatcctgaactttcccaata

SEQ ID NO: 2107208 - DNA, 25 bp, Homo sapien
taattcgtgctgcaagtgcagaggt

SEQ ID NO: 2107209 - DNA, 25 bp, Homo sapien
ctgcaagtgcagaggtattactaca

SEQ ID NO: 2107210 - DNA, 25 bp, Homo sapien
tgtaaatacttaattcgtgctgcaa

SEQ ID NO: 2107211 - DNA, 25 bp, Homo sapien
acttttgcttctagttgcatttaag

SEQ ID NO: 2107212 - DNA, 25 bp, Homo sapien
tagactaccttgtggaaggttacac

SEQ ID NO: 2107213 - DNA, 25 bp, Homo sapien
tagttttattctgtagactaccttg

SEQ ID NO: 2107214 - DNA, 25 bp, Homo sapien
tattctgtagactaccttgtggaag

SEQ ID NO: 2107215 - DNA, 25 bp, Homo sapien
cttgtggaaggttacacaactgagc

SEQ ID NO: 2107216 - DNA, 25 bp, Homo sapien
ggcaccctgcctggaggtaagctct

SEQ ID NO: 2107217 - DNA, 25 bp, Homo sapien
tgcgggaattggtaggctccacgcc

SEQ ID NO: 2107218 - DNA, 25 bp, Homo sapien
taagctctgcgggaattggtaggct

SEQ ID NO: 2107219 - DNA, 25 bp, Homo sapien
ttggtaggctccacgcctcctcaat

SEQ ID NO: 2107220 - DNA, 25 bp, Homo sapien
aggcctaatacaggttcagtatttg

SEQ ID NO: 2107221 - DNA, 25 bp, Homo sapien
gaggcctaatacaggttcagtattt

SEQ ID NO: 2107222 - DNA, 25 bp, Homo sapien
cttgttgctgtactggaggatgtga

SEQ ID NO: 2107223 - DNA, 25 bp, Homo sapien
aggatgtgacacagcatgtccacca

SEQ ID NO: 2107224 - DNA, 25 bp, Homo sapien
tggaggatgtgacacagcatgtcca

SEQ ID NO: 2107225 - DNA, 25 bp, Homo sapien
tgttgctgtactggaggatgtgaca

SEQ ID NO: 2107226 - DNA, 25 bp, Homo sapien
tatttctatttgcgcggagctgttc

SEQ ID NO: 2107227 - DNA, 25 bp, Homo sapien
atttctatttgcgcggagctgttcc

SEQ ID NO: 2107228 - DNA, 25 bp, Homo sapien
tttctatttgcgcggagctgttcca

SEQ ID NO: 2107229 - DNA, 25 bp, Homo sapien
tgatgtgctacagggaacatggcct

SEQ ID NO: 2107230 - DNA, 25 bp, Homo sapien
gatcgtacctgtgcaactcctgttg

SEQ ID NO: 2107231 - DNA, 25 bp, Homo sapien
aaagggtccattggccaaaggctgc

SEQ ID NO: 2107232 - DNA, 25 bp, Homo sapien
cagctgttggcccattaggaattcc

SEQ ID NO: 2107233 - DNA, 25 bp, Homo sapien
tgtgaactctgacctttgtgaagcc

SEQ ID NO: 2107234 - DNA, 25 bp, Homo sapien
ccgaatgtgaactctgacctttgtg

SEQ ID NO: 2107235 - DNA, 25 bp, Homo sapien
ctgccgaatgtgaactctgaccttt

SEQ ID NO: 2107236 - DNA, 25 bp, Homo sapien
gtgaactctgacctttgtgaagccc

SEQ ID NO: 2107237 - DNA, 25 bp, Homo sapien
ggcagtgctgttaggtgtctctcca

SEQ ID NO: 2107238 - DNA, 25 bp, Homo sapien
cagtggaagagagaggtcgttcacc

SEQ ID NO: 2107239 - DNA, 25 bp, Homo sapien
ttaggaagtccctcgacactggcag

SEQ ID NO: 2107240 - DNA, 25 bp, Homo sapien
tttcaggcaccgtcaatatgtttcc

SEQ ID NO: 2107241 - DNA, 25 bp, Homo sapien
gctgggtggatgttattgactttgt

SEQ ID NO: 2107242 - DNA, 25 bp, Homo sapien
tgggtggatgttattgactttgtca

SEQ ID NO: 2107243 - DNA, 25 bp, Homo sapien
ctgggtggatgttattgactttgtc

SEQ ID NO: 2107244 - DNA, 25 bp, Homo sapien
taattgtgtgtagcccactgtgagg

SEQ ID NO: 2107245 - DNA, 25 bp, Homo sapien
tctgtggactaggtttgtggttaac

SEQ ID NO: 2107246 - DNA, 25 bp, Homo sapien
acactgtttgtggttgtctgctcag

SEQ ID NO: 2107247 - DNA, 25 bp, Homo sapien
tgtggttaaccagaagcagatctgt

SEQ ID NO: 2107248 - DNA, 25 bp, Homo sapien
aatgctactgttagataagccattt

SEQ ID NO: 2107249 - DNA, 25 bp, Homo sapien
caaaatgctactgttagataagcca

SEQ ID NO: 2107250 - DNA, 25 bp, Homo sapien
aaaatgctactgttagataagccat

SEQ ID NO: 2107251 - DNA, 25 bp, Homo sapien
aaatgctactgttagataagccatt

SEQ ID NO: 2107252 - DNA, 25 bp, Homo sapien
ctccagcaaggccacgtattactgt

SEQ ID NO: 2107253 - DNA, 25 bp, Homo sapien
cagcaaggccacgtattactgtaac

SEQ ID NO: 2107254 - DNA, 25 bp, Homo sapien
caaaattgatgtaatggaggaaaga

SEQ ID NO: 2107255 - DNA, 25 bp, Homo sapien
caaggccacgtattactgtaacagg

SEQ ID NO: 2107256 - DNA, 25 bp, Homo sapien
tggtactgtgcatatttagcaattg

SEQ ID NO: 2107257 - DNA, 25 bp, Homo sapien
tactgtgcatatttagcaattgtag

SEQ ID NO: 2107258 - DNA, 25 bp, Homo sapien
ctgtgcatatttagcaattgtagta

SEQ ID NO: 2107259 - DNA, 25 bp, Homo sapien
gcctggtactgtgcatatttagcaa

SEQ ID NO: 2107260 - DNA, 25 bp, Homo sapien
tacaactggcaatcctttccaccat

SEQ ID NO: 2107261 - DNA, 25 bp, Homo sapien
gtttagtgttctacaactggcaatc

SEQ ID NO: 2107262 - DNA, 25 bp, Homo sapien
aagcagtctagtttagtgttctaca

SEQ ID NO: 2107263 - DNA, 25 bp, Homo sapien
aaaagttcatatctagattgaatag

SEQ ID NO: 2107264 - DNA, 25 bp, Homo sapien
ctgacgatgtagattcactatctga

SEQ ID NO: 2107265 - DNA, 25 bp, Homo sapien
gagtggtctttatgatgacttcttt

SEQ ID NO: 2107266 - DNA, 25 bp, Homo sapien
tgagtggtctttatgatgacttctt

SEQ ID NO: 2107267 - DNA, 25 bp, Homo sapien
ttatctgacgatgtagattcactat

SEQ ID NO: 2107268 - DNA, 25 bp, Homo sapien
tttgtcatcagataggtcaatattg

SEQ ID NO: 2107269 - DNA, 25 bp, Homo sapien
tgcccaatatggtatgaccaacatg

SEQ ID NO: 2107270 - DNA, 25 bp, Homo sapien
tacgacacgcacaaaagcaggaagt

SEQ ID NO: 2107271 - DNA, 25 bp, Homo sapien
atatggtatgaccaacatggcttag

SEQ ID NO: 2107272 - DNA, 25 bp, Homo sapien
agatttcctgctgatacgacacgca

SEQ ID NO: 2107273 - DNA, 25 bp, Homo sapien
ccctggaactttcatgtatagttga

SEQ ID NO: 2107274 - DNA, 25 bp, Homo sapien
ctggaactttcatgtatagttgaac

SEQ ID NO: 2107275 - DNA, 25 bp, Homo sapien
ctccctggaactttcatgtatagtt

SEQ ID NO: 2107276 - DNA, 25 bp, Homo sapien
ctggtgttctgctccctggaacttt

SEQ ID NO: 2107277 - DNA, 25 bp, Homo sapien
aaccattcacagtcacctgggccaa

SEQ ID NO: 2107278 - DNA, 25 bp, Homo sapien
cacagaagtcattcagaacacccca

SEQ ID NO: 2107279 - DNA, 25 bp, Homo sapien
ccagcttggtaagttgtcgtttaca

SEQ ID NO: 2107280 - DNA, 25 bp, Homo sapien
aatgtatccattaggagatccagct

SEQ ID NO: 2107281 - DNA, 25 bp, Homo sapien
cgctgaatggtaagtgaatactggc

SEQ ID NO: 2107282 - DNA, 25 bp, Homo sapien
gcatgaagttgtttcatggcatctt

SEQ ID NO: 2107283 - DNA, 25 bp, Homo sapien
ggcccagcattaccatcttaaattg

SEQ ID NO: 2107284 - DNA, 25 bp, Homo sapien
ggattacaggaattataatacctgt

SEQ ID NO: 2107285 - DNA, 25 bp, Homo sapien
gtagtaagtggaccggcccagcatt

SEQ ID NO: 2107286 - DNA, 25 bp, Homo sapien
tccaaatgaaatccaaagctacttt

SEQ ID NO: 2107287 - DNA, 25 bp, Homo sapien
agaaaaaaataatgcaaatggatca

SEQ ID NO: 2107288 - DNA, 25 bp, Homo sapien
aagaaaaaaataatgcaaatggatc

SEQ ID NO: 2107289 - DNA, 25 bp, Homo sapien
gaaaaaaataatgcaaatggatcaa

SEQ ID NO: 2107290 - DNA, 25 bp, Homo sapien
caccaagaacccattaggaaattca

SEQ ID NO: 2107291 - DNA, 25 bp, Homo sapien
ataaacctatacactggaacatttg

SEQ ID NO: 2107292 - DNA, 25 bp, Homo sapien
caatagcctgaacccaatgaacagt

SEQ ID NO: 2107293 - DNA, 25 bp, Homo sapien
cgctgaataaacctatacactggaa

SEQ ID NO: 2107294 - DNA, 25 bp, Homo sapien
aagatgaaccatgggtactattgac

SEQ ID NO: 2107295 - DNA, 25 bp, Homo sapien
atgaaccatgggtactattgacttc

SEQ ID NO: 2107296 - DNA, 25 bp, Homo sapien
aaagatgaaccatgggtactattga

SEQ ID NO: 2107297 - DNA, 25 bp, Homo sapien
gatgaaccatgggtactattgactt

SEQ ID NO: 2107298 - DNA, 25 bp, Homo sapien
ctagacttttgcaccattttgcttt

SEQ ID NO: 2107299 - DNA, 25 bp, Homo sapien
tttgcaccattttgctttgatgtca

SEQ ID NO: 2107300 - DNA, 25 bp, Homo sapien
cattttgctttgatgtcaacgtaat

SEQ ID NO: 2107301 - DNA, 25 bp, Homo sapien
attttgctttgatgtcaacgtaatt

SEQ ID NO: 2107302 - DNA, 25 bp, Homo sapien
aaagtttcgatctagatttgaaatc

SEQ ID NO: 2107303 - DNA, 25 bp, Homo sapien
ccttaattcaatagggagaggcaag

SEQ ID NO: 2107304 - DNA, 25 bp, Homo sapien
tagaactctgcacaacacaaaggtc

SEQ ID NO: 2107305 - DNA, 25 bp, Homo sapien
gactaaagaagacacaatgactaca

SEQ ID NO: 2107306 - DNA, 25 bp, Homo sapien
aatgtgaaccttaattcaataggga

SEQ ID NO: 2107307 - DNA, 25 bp, Homo sapien
gaatcttagtggctcaggttctcca

SEQ ID NO: 2107308 - DNA, 25 bp, Homo sapien
tcagcaggcctgatgaagacaatat

SEQ ID NO: 2107309 - DNA, 25 bp, Homo sapien
tctagtaaggcaggaaggcacatta

SEQ ID NO: 2107310 - DNA, 25 bp, Homo sapien
ccatttgaacggagaggttgaacta

SEQ ID NO: 2107311 - DNA, 25 bp, Homo sapien
ttttcctgcagcaatgagagcttcc

SEQ ID NO: 2107312 - DNA, 25 bp, Homo sapien
tgtctgacattgcttcagagttctt

SEQ ID NO: 2107313 - DNA, 25 bp, Homo sapien
cttttcctgcagcaatgagagcttc

SEQ ID NO: 2107314 - DNA, 25 bp, Homo sapien
tgcttcagagttcttagaagacaat

SEQ ID NO: 2107315 - DNA, 25 bp, Homo sapien
ggaataatcaaagggaatgacatac

SEQ ID NO: 2107316 - DNA, 25 bp, Homo sapien
tgacatactcatgacaaccactggc

SEQ ID NO: 2107317 - DNA, 25 bp, Homo sapien
gaaattgtggacagtgatctctggt

SEQ ID NO: 2107318 - DNA, 25 bp, Homo sapien
gtttgagaatctttaacagaccagg

SEQ ID NO: 2107319 - DNA, 25 bp, Homo sapien
gtcatagacttgcatcaggtcctcc

SEQ ID NO: 2107320 - DNA, 25 bp, Homo sapien
ctatgtaggtctttcgtgaattact

SEQ ID NO: 2107321 - DNA, 25 bp, Homo sapien
tcatagacttgcatcaggtcctcca

SEQ ID NO: 2107322 - DNA, 25 bp, Homo sapien
ttcgtgaattactctcattagtgac

SEQ ID NO: 2107323 - DNA, 25 bp, Homo sapien
tcataaagctattgatctgcgaaag

SEQ ID NO: 2107324 - DNA, 25 bp, Homo sapien
tgaggttaatacttctggcaaggac

SEQ ID NO: 2107325 - DNA, 25 bp, Homo sapien
caaaaagttcaacagcctgctatgc

SEQ ID NO: 2107326 - DNA, 25 bp, Homo sapien
tcatggctacaaacatatagtctgc

SEQ ID NO: 2107327 - DNA, 25 bp, Homo sapien
agatgaggcggatggtaatggagga

SEQ ID NO: 2107328 - DNA, 25 bp, Homo sapien
atgaggcggatggtaatggaggagc

SEQ ID NO: 2107329 - DNA, 25 bp, Homo sapien
caagatgaggcggatggtaatggag

SEQ ID NO: 2107330 - DNA, 25 bp, Homo sapien
tcaagatgaggcggatggtaatgga

SEQ ID NO: 2107331 - DNA, 25 bp, Homo sapien
gtctcatttaatgtccatggaacaa

SEQ ID NO: 2107332 - DNA, 25 bp, Homo sapien
aaggtctcatttaatgtccatggaa

SEQ ID NO: 2107333 - DNA, 25 bp, Homo sapien
tgcagaactgggttatttcctgaat

SEQ ID NO: 2107334 - DNA, 25 bp, Homo sapien
agtggtgcagaactgggttatttcc

SEQ ID NO: 2107335 - DNA, 25 bp, Homo sapien
gtacagctcatcagctttgtgagag

SEQ ID NO: 2107336 - DNA, 25 bp, Homo sapien
tcctggagtaggagcagtactctct

SEQ ID NO: 2107337 - DNA, 25 bp, Homo sapien
tactctctcccgtccagttggttga

SEQ ID NO: 2107338 - DNA, 25 bp, Homo sapien
agttggttgacactccgcacttgga

SEQ ID NO: 2107339 - DNA, 25 bp, Homo sapien
gtgtcttacctaacttttcacatta

SEQ ID NO: 2107340 - DNA, 25 bp, Homo sapien
aaagtgtaaccatcatggtctcaaa

SEQ ID NO: 2107341 - DNA, 25 bp, Homo sapien
accaaaagtgtaaccatcatggtct

SEQ ID NO: 2107342 - DNA, 25 bp, Homo sapien
aagtgtcttacctaacttttcacat

SEQ ID NO: 2107343 - DNA, 25 bp, Homo sapien
atgtgcaatccattacctttgtgac

SEQ ID NO: 2107344 - DNA, 25 bp, Homo sapien
caatccattacctttgtgacttggc

SEQ ID NO: 2107345 - DNA, 25 bp, Homo sapien
tgcaatccattacctttgtgacttg

SEQ ID NO: 2107346 - DNA, 25 bp, Homo sapien
atccattacctttgtgacttggctg

SEQ ID NO: 2107347 - DNA, 25 bp, Homo sapien
agtttctgtacaatgctaagcagtt

SEQ ID NO: 2107348 - DNA, 25 bp, Homo sapien
aagtttctgtacaatgctaagcagt

SEQ ID NO: 2107349 - DNA, 25 bp, Homo sapien
ctccttaaaatttcaatggcaggta

SEQ ID NO: 2107350 - DNA, 25 bp, Homo sapien
tttaggtcttgaggatacataccat

SEQ ID NO: 2107351 - DNA, 25 bp, Homo sapien
caataaaccagtctgacattttagg

SEQ ID NO: 2107352 - DNA, 25 bp, Homo sapien
ttggtctgtcattgcagtaattgca

SEQ ID NO: 2107353 - DNA, 25 bp, Homo sapien
aaaactgggcactgtacataaagtc

SEQ ID NO: 2107354 - DNA, 25 bp, Homo sapien
ccccgttttatagctgttgcccagg

SEQ ID NO: 2107355 - DNA, 25 bp, Homo sapien
tatgctacacatatgatgtgcccag

SEQ ID NO: 2107356 - DNA, 25 bp, Homo sapien
aacatgactgtggagtaagcactca

SEQ ID NO: 2107357 - DNA, 25 bp, Homo sapien
tgggtcctaatgcacgtcaactcat

SEQ ID NO: 2107358 - DNA, 25 bp, Homo sapien
tcatagatttgggtactgattccca

SEQ ID NO: 2107359 - DNA, 25 bp, Homo sapien
taaacagattcctctctacgtgcag

SEQ ID NO: 2107360 - DNA, 25 bp, Homo sapien
catgtagttttgaaattgccctccc

SEQ ID NO: 2107361 - DNA, 25 bp, Homo sapien
gcatccaacgaccacatttcatagg

SEQ ID NO: 2107362 - DNA, 25 bp, Homo sapien
ctcttcgatcggctcttattcatga

SEQ ID NO: 2107363 - DNA, 25 bp, Homo sapien
cacacagctcttcgatcggctctta

SEQ ID NO: 2107364 - DNA, 25 bp, Homo sapien
gctcttattcatgagactttcagca

SEQ ID NO: 2107365 - DNA, 25 bp, Homo sapien
tgttagacacacagctcttcgatcg

SEQ ID NO: 2107366 - DNA, 25 bp, Homo sapien
gaggaagtgctccaaacaaagtgga

SEQ ID NO: 2107367 - DNA, 25 bp, Homo sapien
aaatagctaagcaccatatatgagg

SEQ ID NO: 2107368 - DNA, 25 bp, Homo sapien
tgagcctggagcatcctgtggtgcc

SEQ ID NO: 2107369 - DNA, 25 bp, Homo sapien
gcttgaacagtttgagcaacaacaa

SEQ ID NO: 2107370 - DNA, 25 bp, Homo sapien
ccaatcaagtaagctgtccagttct

SEQ ID NO: 2107371 - DNA, 25 bp, Homo sapien
agaagctgtcctgatttgtcccaat

SEQ ID NO: 2107372 - DNA, 25 bp, Homo sapien
tcttgtggcggtaaaacgcgatggc

SEQ ID NO: 2107373 - DNA, 25 bp, Homo sapien
taacagtcgaaaggcatctgggtct

SEQ ID NO: 2107374 - DNA, 25 bp, Homo sapien
caacacatagaaattgagtaggatt

SEQ ID NO: 2107375 - DNA, 25 bp, Homo sapien
caagatggtcccgacaacacataga

SEQ ID NO: 2107376 - DNA, 25 bp, Homo sapien
tttaggtcttattctagggtaatgc

SEQ ID NO: 2107377 - DNA, 25 bp, Homo sapien
gattaaacggaagattccaggctcc

SEQ ID NO: 2107378 - DNA, 25 bp, Homo sapien
caaaagtcagtgcttcaaagttgtt

SEQ ID NO: 2107379 - DNA, 25 bp, Homo sapien
gtccagacaggaaatgcagacttgg

SEQ ID NO: 2107380 - DNA, 25 bp, Homo sapien
gagtccagacaggaaatgcagactt

SEQ ID NO: 2107381 - DNA, 25 bp, Homo sapien
ctgagtccagacaggaaatgcagac

SEQ ID NO: 2107382 - DNA, 25 bp, Homo sapien
caggaaatgcagacttgggacccac

SEQ ID NO: 2107383 - DNA, 25 bp, Homo sapien
cagagagaccctctgatgcatgagc

SEQ ID NO: 2107384 - DNA, 25 bp, Homo sapien
cagaccagtcgcctgaaattctgag

SEQ ID NO: 2107385 - DNA, 25 bp, Homo sapien
cacgggttcaaggtaagcacttgcc

SEQ ID NO: 2107386 - DNA, 25 bp, Homo sapien
aatgagcgactttggccctgcgtgg

SEQ ID NO: 2107387 - DNA, 25 bp, Homo sapien
tcttgactgctacgggcattgcccc

SEQ ID NO: 2107388 - DNA, 25 bp, Homo sapien
tcttgagggtgaagactgaccaccc

SEQ ID NO: 2107389 - DNA, 25 bp, Homo sapien
tgagacgctttgaaatggctgcctt

SEQ ID NO: 2107390 - DNA, 25 bp, Homo sapien
ccatgacagtgaagatgactggcca

SEQ ID NO: 2107391 - DNA, 25 bp, Homo sapien
tgccctcctgcgaaagcatctctga

SEQ ID NO: 2107392 - DNA, 25 bp, Homo sapien
ccagtgcaagacgacatagactcca

SEQ ID NO: 2107393 - DNA, 25 bp, Homo sapien
gaaagacatcttgaggcccctgaga

SEQ ID NO: 2107394 - DNA, 25 bp, Homo sapien
gatttgcctatcgttacccagattg

SEQ ID NO: 2107395 - DNA, 25 bp, Homo sapien
ggctcctgtggcagattcctcgtca

SEQ ID NO: 2107396 - DNA, 25 bp, Homo sapien
tcatcgacaagcaggaaggtactca

SEQ ID NO: 2107397 - DNA, 25 bp, Homo sapien
gatgcaggcatgttcggcgtcttta

SEQ ID NO: 2107398 - DNA, 25 bp, Homo sapien
tacttcacccacattgatgcaggca

SEQ ID NO: 2107399 - DNA, 25 bp, Homo sapien
cccctgtgatctacttctggcaaga

SEQ ID NO: 2107400 - DNA, 25 bp, Homo sapien
tcagtctggacaggtcttccctatg

SEQ ID NO: 2107401 - DNA, 25 bp, Homo sapien
ggagctagggcaattctgacaacat

SEQ ID NO: 2107402 - DNA, 25 bp, Homo sapien
tagaacctgataaggagctagggca

SEQ ID NO: 2107403 - DNA, 25 bp, Homo sapien
aactccagcagtgtctctggttctt

SEQ ID NO: 2107404 - DNA, 25 bp, Homo sapien
gaactccagcagtgtctctggttct

SEQ ID NO: 2107405 - DNA, 25 bp, Homo sapien
actccagcagtgtctctggttcttt

SEQ ID NO: 2107406 - DNA, 25 bp, Homo sapien
agaactccagcagtgtctctggttc

SEQ ID NO: 2107407 - DNA, 25 bp, Homo sapien
tctgtgaggcttgtaaaccgagttt

SEQ ID NO: 2107408 - DNA, 25 bp, Homo sapien
gagtttgtgccgaaattccaaagag

SEQ ID NO: 2107409 - DNA, 25 bp, Homo sapien
cttttgcatgcgtgttctgtgaggc

SEQ ID NO: 2107410 - DNA, 25 bp, Homo sapien
gcttgtaaaccgagtttgtgccgaa

SEQ ID NO: 2107411 - DNA, 25 bp, Homo sapien
atagaatgaagggacgcaggcagtt

SEQ ID NO: 2107412 - DNA, 25 bp, Homo sapien
tccgcaggccgatgggaatacaaga

SEQ ID NO: 2107413 - DNA, 25 bp, Homo sapien
aatacaagatagaatgaagggacgc

SEQ ID NO: 2107414 - DNA, 25 bp, Homo sapien
agcagagaccgctccgcaggccgat

SEQ ID NO: 2107415 - DNA, 25 bp, Homo sapien
tcaagactgtcctgtgtcagttata

SEQ ID NO: 2107416 - DNA, 25 bp, Homo sapien
tagtcatggtgtggatgttgtttgt

SEQ ID NO: 2107417 - DNA, 25 bp, Homo sapien
tcctgtgtcagttatagtcatggtg

SEQ ID NO: 2107418 - DNA, 25 bp, Homo sapien
tgtttgtttggccctccacactacc

SEQ ID NO: 2107419 - DNA, 25 bp, Homo sapien
tagctgaatcgcctgccagaatgat

SEQ ID NO: 2107420 - DNA, 25 bp, Homo sapien
atcgcctgccagaatgattatttca

SEQ ID NO: 2107421 - DNA, 25 bp, Homo sapien
caactattagctgaatcgcctgcca

SEQ ID NO: 2107422 - DNA, 25 bp, Homo sapien
ctagccccaactattagctgaatcg

SEQ ID NO: 2107423 - DNA, 25 bp, Homo sapien
gctactttctcacacccagcctcta

SEQ ID NO: 2107424 - DNA, 25 bp, Homo sapien
agacccttccttctaccgcagaaag

SEQ ID NO: 2107425 - DNA, 25 bp, Homo sapien
ggctttgcggcctctctctctaggg

SEQ ID NO: 2107426 - DNA, 25 bp, Homo sapien
tctgtggctactttctcacacccag

SEQ ID NO: 2107427 - DNA, 25 bp, Homo sapien
taccacattttgcttcacctttttc

SEQ ID NO: 2107428 - DNA, 25 bp, Homo sapien
cttttcattcctgtttaccacattt

SEQ ID NO: 2107429 - DNA, 25 bp, Homo sapien
aacaatgaaggcttcctttattcat

SEQ ID NO: 2107430 - DNA, 25 bp, Homo sapien
tcagaacaatgaaggcttcctttat

SEQ ID NO: 2107431 - DNA, 25 bp, Homo sapien
ggctgttggctgcactgcagatttc

SEQ ID NO: 2107432 - DNA, 25 bp, Homo sapien
tgttggctgcactgcagatttcctc

SEQ ID NO: 2107433 - DNA, 25 bp, Homo sapien
ctggctgttggctgcactgcagatt

SEQ ID NO: 2107434 - DNA, 25 bp, Homo sapien
tggctgcactgcagatttcctccat

SEQ ID NO: 2107435 - DNA, 25 bp, Homo sapien
ataagggaggtgccaagagtctgaa

SEQ ID NO: 2107436 - DNA, 25 bp, Homo sapien
ggtgccaagagtctgaagatgttca

SEQ ID NO: 2107437 - DNA, 25 bp, Homo sapien
gactgccacaatgtggaataaggga

SEQ ID NO: 2107438 - DNA, 25 bp, Homo sapien
ggaataagggaggtgccaagagtct

SEQ ID NO: 2107439 - DNA, 25 bp, Homo sapien
cttgacctgcatagagtgcacctcc

SEQ ID NO: 2107440 - DNA, 25 bp, Homo sapien
tttcttgacctgcatagagtgcacc

SEQ ID NO: 2107441 - DNA, 25 bp, Homo sapien
ttcttgacctgcatagagtgcacct

SEQ ID NO: 2107442 - DNA, 25 bp, Homo sapien
tcttgacctgcatagagtgcacctc

SEQ ID NO: 2107443 - DNA, 25 bp, Homo sapien
cctctgcatccacaccttgttctgg

SEQ ID NO: 2107444 - DNA, 25 bp, Homo sapien
tctgcatccacaccttgttctggtt

SEQ ID NO: 2107445 - DNA, 25 bp, Homo sapien
ctctgcatccacaccttgttctggt

SEQ ID NO: 2107446 - DNA, 25 bp, Homo sapien
taaatagcgcagatctagatgctga

SEQ ID NO: 2107447 - DNA, 25 bp, Homo sapien
aaaagagcaaggtcgctccaggccc

SEQ ID NO: 2107448 - DNA, 25 bp, Homo sapien
gagggcaatactcccaaaagagcaa

SEQ ID NO: 2107449 - DNA, 25 bp, Homo sapien
tacatgtatcttcccactaaatagc

SEQ ID NO: 2107450 - DNA, 25 bp, Homo sapien
taatatgtccacttggagtatgttc

SEQ ID NO: 2107451 - DNA, 25 bp, Homo sapien
tgtaatatgtccacttggagtatgt

SEQ ID NO: 2107452 - DNA, 25 bp, Homo sapien
gcttgtaatatgtccacttggagta

SEQ ID NO: 2107453 - DNA, 25 bp, Homo sapien
cttgtaatatgtccacttggagtat

SEQ ID NO: 2107454 - DNA, 25 bp, Homo sapien
tcgagtttgccttggtaaccataac

SEQ ID NO: 2107455 - DNA, 25 bp, Homo sapien
caaaagaagcgaccagtgccaatct

SEQ ID NO: 2107456 - DNA, 25 bp, Homo sapien
gaccagtgccaatctctcttttcag

SEQ ID NO: 2107457 - DNA, 25 bp, Homo sapien
ctcttttcagaaagtcgagtttgcc

SEQ ID NO: 2107458 - DNA, 25 bp, Homo sapien
aggaagaagaaggtccttcttctga

SEQ ID NO: 2107459 - DNA, 25 bp, Homo sapien
gtggcaatgaggaagaagaaggtcc

SEQ ID NO: 2107460 - DNA, 25 bp, Homo sapien
agaagaaggtccttcttctgaaagc

SEQ ID NO: 2107461 - DNA, 25 bp, Homo sapien
gaagaagaaggtccttcttctgaaa

SEQ ID NO: 2107462 - DNA, 25 bp, Homo sapien
tttggtctcttgggtcatagaacca

SEQ ID NO: 2107463 - DNA, 25 bp, Homo sapien
ccagcatttctgaggggtgtcacac

SEQ ID NO: 2107464 - DNA, 25 bp, Homo sapien
ggtgtcacacagttgtgtacatgat

SEQ ID NO: 2107465 - DNA, 25 bp, Homo sapien
cacacagttgtgtacatgatgttac

SEQ ID NO: 2107466 - DNA, 25 bp, Homo sapien
tataagtccagcatttctgaggggt

SEQ ID NO: 2107467 - DNA, 25 bp, Homo sapien
ttatccagctgactgcacaatttgt

SEQ ID NO: 2107468 - DNA, 25 bp, Homo sapien
tccagctgactgcacaatttgttcg

SEQ ID NO: 2107469 - DNA, 25 bp, Homo sapien
ccagctgactgcacaatttgttcgg

SEQ ID NO: 2107470 - DNA, 25 bp, Homo sapien
gctgactgcacaatttgttcggcac

SEQ ID NO: 2107471 - DNA, 25 bp, Homo sapien
catcccacacactgatgacctgcat

SEQ ID NO: 2107472 - DNA, 25 bp, Homo sapien
caccactctcccactcttcaccttc

SEQ ID NO: 2107473 - DNA, 25 bp, Homo sapien
tcaccttcctctgttgtcccatccc

SEQ ID NO: 2107474 - DNA, 25 bp, Homo sapien
tcctctgttgtcccatcccacacac

SEQ ID NO: 2107475 - DNA, 25 bp, Homo sapien
ccaattgtgacataaatgtacgcca

SEQ ID NO: 2107476 - DNA, 25 bp, Homo sapien
aatgtacgccatctgtttgaaagga

SEQ ID NO: 2107477 - DNA, 25 bp, Homo sapien
caaattgacaatagtggtgactttg

SEQ ID NO: 2107478 - DNA, 25 bp, Homo sapien
gaaaggatgccagtcaaattgacaa

SEQ ID NO: 2107479 - DNA, 25 bp, Homo sapien
gtaaggtacgcagcagaggtcatgc

SEQ ID NO: 2107480 - DNA, 25 bp, Homo sapien
taagaacatcaggaggcagtaccag

SEQ ID NO: 2107481 - DNA, 25 bp, Homo sapien
gaagtggcaccctcagaagtttgag

SEQ ID NO: 2107482 - DNA, 25 bp, Homo sapien
gcagtaccagagtaaggtacgcagc

SEQ ID NO: 2107483 - DNA, 25 bp, Homo sapien
agcatctaccttcactccagggtgt

SEQ ID NO: 2107484 - DNA, 25 bp, Homo sapien
tagggagcaagtgacgttctcccca

SEQ ID NO: 2107485 - DNA, 25 bp, Homo sapien
cagcacgctgtttagggagcaagtg

SEQ ID NO: 2107486 - DNA, 25 bp, Homo sapien
ctgtttagggagcaagtgacgttct

SEQ ID NO: 2107487 - DNA, 25 bp, Homo sapien
gagcaagtgacgttctccccatttc

SEQ ID NO: 2107488 - DNA, 25 bp, Homo sapien
tcccaaccaccagtctggaacgacc

SEQ ID NO: 2107489 - DNA, 25 bp, Homo sapien
gctctcccaaccaccagtctggaac

SEQ ID NO: 2107490 - DNA, 25 bp, Homo sapien
tctcccaaccaccagtctggaacga

SEQ ID NO: 2107491 - DNA, 25 bp, Homo sapien
tctggaacgacctttctaaaccata

SEQ ID NO: 2107492 - DNA, 25 bp, Homo sapien
ttaatgtagtttttcccacactaga

SEQ ID NO: 2107493 - DNA, 25 bp, Homo sapien
gagtgtgggcactcttgggtaccac

SEQ ID NO: 2107494 - DNA, 25 bp, Homo sapien
ggtaccaccatatccatctgtgtat

SEQ ID NO: 2107495 - DNA, 25 bp, Homo sapien
tcacatgacatcatgggacaatttt

SEQ ID NO: 2107496 - DNA, 25 bp, Homo sapien
acatgtgatgtcttgttcagtgcac

SEQ ID NO: 2107497 - DNA, 25 bp, Homo sapien
tgaatggcacctccatacatgtgat

SEQ ID NO: 2107498 - DNA, 25 bp, Homo sapien
tgctccaacagtaaccagtagtagg

SEQ ID NO: 2107499 - DNA, 25 bp, Homo sapien
gcacagcttgaacatgtagacatgg

SEQ ID NO: 2107500 - DNA, 25 bp, Homo sapien
tgaaccttccctgccaaagtgggag

SEQ ID NO: 2107501 - DNA, 25 bp, Homo sapien
ggtaataacagcctatttactgaac

SEQ ID NO: 2107502 - DNA, 25 bp, Homo sapien
gactgtatcagatttctatttgggt

SEQ ID NO: 2107503 - DNA, 25 bp, Homo sapien
tgcttgcttgagtcatgcaggctcc

SEQ ID NO: 2107504 - DNA, 25 bp, Homo sapien
caataatagatgttaagctgaagct

SEQ ID NO: 2107505 - DNA, 25 bp, Homo sapien
taagctgaagctgacgaaagcagga

SEQ ID NO: 2107506 - DNA, 25 bp, Homo sapien
gatagacattccattctgctcactg

SEQ ID NO: 2107507 - DNA, 25 bp, Homo sapien
caggaagctgtggaaatctacggct

SEQ ID NO: 2107508 - DNA, 25 bp, Homo sapien
tgttaattgaattcatcgaagaaaa

SEQ ID NO: 2107509 - DNA, 25 bp, Homo sapien
ccaaataatgcctaacagaatgaag

SEQ ID NO: 2107510 - DNA, 25 bp, Homo sapien
tgaattcatcgaagaaaagccattc

SEQ ID NO: 2107511 - DNA, 25 bp, Homo sapien
cagaatgaagaaaggggtaaattgc

SEQ ID NO: 2107512 - DNA, 25 bp, Homo sapien
agctgctcaggagaaggctgaagca

SEQ ID NO: 2107513 - DNA, 25 bp, Homo sapien
caggcatgatggtgcgcacttgtaa

SEQ ID NO: 2107514 - DNA, 25 bp, Homo sapien
aggcatgatggtgcgcacttgtaat

SEQ ID NO: 2107515 - DNA, 25 bp, Homo sapien
cccagctgctcaggagaaggctgaa

SEQ ID NO: 2107516 - DNA, 25 bp, Homo sapien
agaaaattggactaattgcattgaa

SEQ ID NO: 2107517 - DNA, 25 bp, Homo sapien
ttattcttggtatatattcataaac

SEQ ID NO: 2107518 - DNA, 25 bp, Homo sapien
attggactaattgcattgaaaatac

SEQ ID NO: 2107519 - DNA, 25 bp, Homo sapien
ttatttctaataccatgttactgac

SEQ ID NO: 2107520 - DNA, 25 bp, Homo sapien
gacttctcaatgctgaaaagcctgt

SEQ ID NO: 2107521 - DNA, 25 bp, Homo sapien
tgtaatactccctttgggcaaagct

SEQ ID NO: 2107522 - DNA, 25 bp, Homo sapien
gcaaatccgttttaagtgacttctc

SEQ ID NO: 2107523 - DNA, 25 bp, Homo sapien
attgaaagcaaatccgttttaagtg

SEQ ID NO: 2107524 - DNA, 25 bp, Homo sapien
gctctgcggcagttgacctgacgtc

SEQ ID NO: 2107525 - DNA, 25 bp, Homo sapien
tgaagggcacgcagccgtataacca

SEQ ID NO: 2107526 - DNA, 25 bp, Homo sapien
gagtgagcgacttcttcagctacca

SEQ ID NO: 2107527 - DNA, 25 bp, Homo sapien
tgatgatcgcctacggagtgagcga

SEQ ID NO: 2107528 - DNA, 25 bp, Homo sapien
gggccctgattgcagacaccccgta

SEQ ID NO: 2107529 - DNA, 25 bp, Homo sapien
gcctcgggcgttcatgctgctgcag

SEQ ID NO: 2107530 - DNA, 25 bp, Homo sapien
cctatggctgggtgatgttcgtatc

SEQ ID NO: 2107531 - DNA, 25 bp, Homo sapien
tctggctggtgacaatcgtcttctt

SEQ ID NO: 2107532 - DNA, 25 bp, Homo sapien
ggatgaccttcttctagctcatatt

SEQ ID NO: 2107533 - DNA, 25 bp, Homo sapien
aataggaaatgccatgggtctaccc

SEQ ID NO: 2107534 - DNA, 25 bp, Homo sapien
catgggtctacccaatggatgacct

SEQ ID NO: 2107535 - DNA, 25 bp, Homo sapien
tcttctagctcatattcaatctgaa

SEQ ID NO: 2107536 - DNA, 25 bp, Homo sapien
tgtcagcttgatatttaaaaccagc

SEQ ID NO: 2107537 - DNA, 25 bp, Homo sapien
tgcctccttgtgtgttgtgctgtga

SEQ ID NO: 2107538 - DNA, 25 bp, Homo sapien
tgctgtgactatcttctaaatacca

SEQ ID NO: 2107539 - DNA, 25 bp, Homo sapien
tatgtagcattgttttacaagaaat

SEQ ID NO: 2107540 - DNA, 25 bp, Homo sapien
ccagaataatctagcttggtgcttc

SEQ ID NO: 2107541 - DNA, 25 bp, Homo sapien
tctcaaaccacctgcggtgaaggag

SEQ ID NO: 2107542 - DNA, 25 bp, Homo sapien
tgaaggagcagtatcatgttattct

SEQ ID NO: 2107543 - DNA, 25 bp, Homo sapien
ttagtgtactcatcatccaaacagt

SEQ ID NO: 2107544 - DNA, 25 bp, Homo sapien
aacaagcaagctaaaatgtgggcac

SEQ ID NO: 2107545 - DNA, 25 bp, Homo sapien
acaagcaagctaaaatgtgggcact

SEQ ID NO: 2107546 - DNA, 25 bp, Homo sapien
caacaagcaagctaaaatgtgggca

SEQ ID NO: 2107547 - DNA, 25 bp, Homo sapien
tctctggaaataagtgactgactaa

SEQ ID NO: 2107548 - DNA, 25 bp, Homo sapien
ctggaaataagtgactgactaaatg

SEQ ID NO: 2107549 - DNA, 25 bp, Homo sapien
tggcaaagtaatctggctggcacac

SEQ ID NO: 2107550 - DNA, 25 bp, Homo sapien
tgcatggagttatggcactgccacc

SEQ ID NO: 2107551 - DNA, 25 bp, Homo sapien
tgagtcactcggctcgcaaaggagg

SEQ ID NO: 2107552 - DNA, 25 bp, Homo sapien
tgacaaataccctgcactgcgaatt

SEQ ID NO: 2107553 - DNA, 25 bp, Homo sapien
agccttctgagaggatccagctaag

SEQ ID NO: 2107554 - DNA, 25 bp, Homo sapien
aagcagatcctctcctagtcgagcc

SEQ ID NO: 2107555 - DNA, 25 bp, Homo sapien
caacctgagggaacttggaagcaga

SEQ ID NO: 2107556 - DNA, 25 bp, Homo sapien
gctaagctgtgactggaatcctgac

SEQ ID NO: 2107557 - DNA, 25 bp, Homo sapien
tctcagagaatccagctaacacagg

SEQ ID NO: 2107558 - DNA, 25 bp, Homo sapien
ggaaatgttccccacactcagggtg

SEQ ID NO: 2107559 - DNA, 25 bp, Homo sapien
gatattagtgaaccccaacatgtga

SEQ ID NO: 2107560 - DNA, 25 bp, Homo sapien
tggtgaatgaaccagaccctgtggt

SEQ ID NO: 2107561 - DNA, 25 bp, Homo sapien
gaaaattcccttgatcataggctgg

SEQ ID NO: 2107562 - DNA, 25 bp, Homo sapien
tatcaagcactttctacatagcagg

SEQ ID NO: 2107563 - DNA, 25 bp, Homo sapien
tggaaattgtctcccaataggcagt

SEQ ID NO: 2107564 - DNA, 25 bp, Homo sapien
taacccaggtcagtatagcctcagg

SEQ ID NO: 2107565 - DNA, 25 bp, Homo sapien
agtcgtttttctggagagctaccca

SEQ ID NO: 2107566 - DNA, 25 bp, Homo sapien
tagacataagtcgtttttctggaga

SEQ ID NO: 2107567 - DNA, 25 bp, Homo sapien
gacataagtcgtttttctggagagc

SEQ ID NO: 2107568 - DNA, 25 bp, Homo sapien
cttctgggccacatgtagacataag

SEQ ID NO: 2107569 - DNA, 25 bp, Homo sapien
tcagcttgggttacatgcttcctgg

SEQ ID NO: 2107570 - DNA, 25 bp, Homo sapien
gcttgggttacatgcttcctggtaa

SEQ ID NO: 2107571 - DNA, 25 bp, Homo sapien
catgcttcctggtaaaggaaggcac

SEQ ID NO: 2107572 - DNA, 25 bp, Homo sapien
gggttacatgcttcctggtaaagga

SEQ ID NO: 2107573 - DNA, 25 bp, Homo sapien
tgtctcccatcctgtcatcagaggc

SEQ ID NO: 2107574 - DNA, 25 bp, Homo sapien
tgatgtctcccatcctgtcatcaga

SEQ ID NO: 2107575 - DNA, 25 bp, Homo sapien
agttggttagatccatgatgtctcc

SEQ ID NO: 2107576 - DNA, 25 bp, Homo sapien
agatccatgatgtctcccatcctgt

SEQ ID NO: 2107577 - DNA, 25 bp, Homo sapien
tacttcccaatagagagccttggcc

SEQ ID NO: 2107578 - DNA, 25 bp, Homo sapien
tctggaactctcaggataggcagct

SEQ ID NO: 2107579 - DNA, 25 bp, Homo sapien
tgagaagccttgaatatgttcctcc

SEQ ID NO: 2107580 - DNA, 25 bp, Homo sapien
agcaattcccaagtatacttcccaa

SEQ ID NO: 2107581 - DNA, 25 bp, Homo sapien
ggtcacctgcaggaaatgatgcccc

SEQ ID NO: 2107582 - DNA, 25 bp, Homo sapien
gaaatgatgcccctgatggctcagt

SEQ ID NO: 2107583 - DNA, 25 bp, Homo sapien
tgatggctcagtgccacttgcttct

SEQ ID NO: 2107584 - DNA, 25 bp, Homo sapien
ctgctgagaactgagtaggtttcat

SEQ ID NO: 2107585 - DNA, 25 bp, Homo sapien
gcccatgcattgactgggcaccatt

SEQ ID NO: 2107586 - DNA, 25 bp, Homo sapien
ataactgtgtgaaatgaagagcatc

SEQ ID NO: 2107587 - DNA, 25 bp, Homo sapien
attactggagctgttggaacctgcc

SEQ ID NO: 2107588 - DNA, 25 bp, Homo sapien
ctgttggaacctgcccatgcattga

SEQ ID NO: 2107589 - DNA, 25 bp, Homo sapien
gccagcaaatctttttgcaccgttt

SEQ ID NO: 2107590 - DNA, 25 bp, Homo sapien
cctcttccgccagcaaatctttttg

SEQ ID NO: 2107591 - DNA, 25 bp, Homo sapien
ttttgcaccgtttcttcccttgctg

SEQ ID NO: 2107592 - DNA, 25 bp, Homo sapien
tccgccagcaaatctttttgcaccg

SEQ ID NO: 2107593 - DNA, 25 bp, Homo sapien
gaggacatctgggtgttccatcaaa

SEQ ID NO: 2107594 - DNA, 25 bp, Homo sapien
tctgggtgttccatcaaattcgacc

SEQ ID NO: 2107595 - DNA, 25 bp, Homo sapien
aatatggtaagtattctccatggca

SEQ ID NO: 2107596 - DNA, 25 bp, Homo sapien
tggtaagtattctccatggcagctg

SEQ ID NO: 2107597 - DNA, 25 bp, Homo sapien
gccaatccagttagtgatggtcagg

SEQ ID NO: 2107598 - DNA, 25 bp, Homo sapien
gcttttggctgggacgccaatccag

SEQ ID NO: 2107599 - DNA, 25 bp, Homo sapien
tggaccagagctacatgatgtggaa

SEQ ID NO: 2107600 - DNA, 25 bp, Homo sapien
tttggttaccattggcacacatggc

SEQ ID NO: 2107601 - DNA, 25 bp, Homo sapien
tgatatgaatataaccatgatacaa

SEQ ID NO: 2107602 - DNA, 25 bp, Homo sapien
atgatatgaatataaccatgataca

SEQ ID NO: 2107603 - DNA, 25 bp, Homo sapien
taaccatgatacaaaaaacctgcaa

SEQ ID NO: 2107604 - DNA, 25 bp, Homo sapien
tctctcccaatttcagagtggtggt

SEQ ID NO: 2107605 - DNA, 25 bp, Homo sapien
gcaaatattagctgtacttctctgg

SEQ ID NO: 2107606 - DNA, 25 bp, Homo sapien
ggtggtctaccttgcaacttcagct

SEQ ID NO: 2107607 - DNA, 25 bp, Homo sapien
ggcttctgctccagatatgcaaata

SEQ ID NO: 2107608 - DNA, 25 bp, Homo sapien
aggagaagctgaagcctgaggcgga

SEQ ID NO: 2107609 - DNA, 25 bp, Homo sapien
aagctgaagcctgaggcggagcttg

SEQ ID NO: 2107610 - DNA, 25 bp, Homo sapien
agcctgaggcggagcttggcaacat

SEQ ID NO: 2107611 - DNA, 25 bp, Homo sapien
gctgaagcctgaggcggagcttggc

SEQ ID NO: 2107612 - DNA, 25 bp, Homo sapien
cagaagcagctgacttgcgggctct

SEQ ID NO: 2107613 - DNA, 25 bp, Homo sapien
agaagcagctgacttgcgggctctg

SEQ ID NO: 2107614 - DNA, 25 bp, Homo sapien
aagcagctgacttgcgggctctggc

SEQ ID NO: 2107615 - DNA, 25 bp, Homo sapien
aacagaagcagctgacttgcgggct

SEQ ID NO: 2107616 - DNA, 25 bp, Homo sapien
aaacatgagggtactctgttgggcc

SEQ ID NO: 2107617 - DNA, 25 bp, Homo sapien
ccagggaacaagtctagttagggca

SEQ ID NO: 2107618 - DNA, 25 bp, Homo sapien
tgagcaggtggcctgtaggttcacc

SEQ ID NO: 2107619 - DNA, 25 bp, Homo sapien
tctgcttactgggactaggaagatc

SEQ ID NO: 2107620 - DNA, 25 bp, Homo sapien
gagcagagtacatattctcaaggct

SEQ ID NO: 2107621 - DNA, 25 bp, Homo sapien
cagagtacatattctcaaggctttc

SEQ ID NO: 2107622 - DNA, 25 bp, Homo sapien
ctgtggagcagagtacatattctca

SEQ ID NO: 2107623 - DNA, 25 bp, Homo sapien
tggagcagagtacatattctcaagg

SEQ ID NO: 2107624 - DNA, 25 bp, Homo sapien
aggaatagggctgaaagcaaaagga

SEQ ID NO: 2107625 - DNA, 25 bp, Homo sapien
ggctttgatcttcctacaaaaccca

SEQ ID NO: 2107626 - DNA, 25 bp, Homo sapien
aaaggagagatagaggctttgatct

SEQ ID NO: 2107627 - DNA, 25 bp, Homo sapien
ttaccgaggaatagggctgaaagca

SEQ ID NO: 2107628 - DNA, 25 bp, Homo sapien
tcagaaggaaccgatcagggacaca

SEQ ID NO: 2107629 - DNA, 25 bp, Homo sapien
acccatcagaaggaaccgatcaggg

SEQ ID NO: 2107630 - DNA, 25 bp, Homo sapien
gaaggaaccgatcagggacacagtt

SEQ ID NO: 2107631 - DNA, 25 bp, Homo sapien
ccatcagaaggaaccgatcagggac

SEQ ID NO: 2107632 - DNA, 25 bp, Homo sapien
gatattcagtatcttttcacgtgct

SEQ ID NO: 2107633 - DNA, 25 bp, Homo sapien
gtgatattcagtatcttttcacgtg

SEQ ID NO: 2107634 - DNA, 25 bp, Homo sapien
atcctaatggatttgaagtggtatt

SEQ ID NO: 2107635 - DNA, 25 bp, Homo sapien
aatgtccattcagaatattgatgtt

SEQ ID NO: 2107636 - DNA, 25 bp, Homo sapien
gatcaacgtctattttggccaacaa

SEQ ID NO: 2107637 - DNA, 25 bp, Homo sapien
tccacgatatgctggtaagccctac

SEQ ID NO: 2107638 - DNA, 25 bp, Homo sapien
cacgatgcggattagaagtggtagc

SEQ ID NO: 2107639 - DNA, 25 bp, Homo sapien
tcgggtaacatgttgggaagacagc

SEQ ID NO: 2107640 - DNA, 25 bp, Homo sapien
catttctctcttggcacgttccttg

SEQ ID NO: 2107641 - DNA, 25 bp, Homo sapien
tctgcaacagtcatgtcatccgaag

SEQ ID NO: 2107642 - DNA, 25 bp, Homo sapien
gatgttgcaagcgtctatttagttt

SEQ ID NO: 2107643 - DNA, 25 bp, Homo sapien
tactaagcagccacaatcctatggt

SEQ ID NO: 2107644 - DNA, 25 bp, Homo sapien
tgttgaggcagtatgtttaagagct

SEQ ID NO: 2107645 - DNA, 25 bp, Homo sapien
gaggcagtatgtttaagagctgaag

SEQ ID NO: 2107646 - DNA, 25 bp, Homo sapien
cagtatgtttaagagctgaagttac

SEQ ID NO: 2107647 - DNA, 25 bp, Homo sapien
tttctagctgttgaggcagtatgtt

SEQ ID NO: 2107648 - DNA, 25 bp, Homo sapien
gcatgaacctggcatacaatgtaga

SEQ ID NO: 2107649 - DNA, 25 bp, Homo sapien
tgctgggtttcaggctacctggaaa

SEQ ID NO: 2107650 - DNA, 25 bp, Homo sapien
tgcaagctgaacatccaggtctggg

SEQ ID NO: 2107651 - DNA, 25 bp, Homo sapien
ggaccgcaagaaagctgatcacctc

SEQ ID NO: 2107652 - DNA, 25 bp, Homo sapien
taggcagttgtgttgaaatagtatg

SEQ ID NO: 2107653 - DNA, 25 bp, Homo sapien
cagttgtgttgaaatagtatgtgag

SEQ ID NO: 2107654 - DNA, 25 bp, Homo sapien
tgcagtaggcagttgtgttgaaata

SEQ ID NO: 2107655 - DNA, 25 bp, Homo sapien
cagtaggcagttgtgttgaaatagt

SEQ ID NO: 2107656 - DNA, 25 bp, Homo sapien
tttggtcagtgtagtcacaggatct

SEQ ID NO: 2107657 - DNA, 25 bp, Homo sapien
ccacgtgcccggttatggtgatacc

SEQ ID NO: 2107658 - DNA, 25 bp, Homo sapien
gcaagagctggacgggtttcaacca

SEQ ID NO: 2107659 - DNA, 25 bp, Homo sapien
cacaggatctcaggtatgcaagagc

SEQ ID NO: 2107660 - DNA, 25 bp, Homo sapien
tgttgaagaactgatcacacgtcca

SEQ ID NO: 2107661 - DNA, 25 bp, Homo sapien
gttgtcaaaaaaccttccactgtca

SEQ ID NO: 2107662 - DNA, 25 bp, Homo sapien
gatgctgttgtgctattatcaaggc

SEQ ID NO: 2107663 - DNA, 25 bp, Homo sapien
acacgtccactgtgtggcagccact

SEQ ID NO: 2107664 - DNA, 25 bp, Homo sapien
ggcacctctaaaaccagacatgatt

SEQ ID NO: 2107665 - DNA, 25 bp, Homo sapien
catatggtagtgcaaagagtatcaa

SEQ ID NO: 2107666 - DNA, 25 bp, Homo sapien
tcttgacttcggcttgagagttcca

SEQ ID NO: 2107667 - DNA, 25 bp, Homo sapien
cacgcgcagccccaatttgtagtat

SEQ ID NO: 2107668 - DNA, 25 bp, Homo sapien
taaggtagactatgaagagtaggct

SEQ ID NO: 2107669 - DNA, 25 bp, Homo sapien
aagagtttaattcccctgatgtgct

SEQ ID NO: 2107670 - DNA, 25 bp, Homo sapien
tatggtattgaaagcccattgttgg

SEQ ID NO: 2107671 - DNA, 25 bp, Homo sapien
gagactagagttcttaaagttgaga

SEQ ID NO: 2107672 - DNA, 25 bp, Homo sapien
ggcacacactgccacgcccggctaa

SEQ ID NO: 2107673 - DNA, 25 bp, Homo sapien
aggcacacactgccacgcccggcta

SEQ ID NO: 2107674 - DNA, 25 bp, Homo sapien
ttttgtaggaaaagcgcctcgtgtg

SEQ ID NO: 2107675 - DNA, 25 bp, Homo sapien
tatcaagctgcgaagagggagtttt

SEQ ID NO: 2107676 - DNA, 25 bp, Homo sapien
tgtgatctggaacaaagacgtttta

SEQ ID NO: 2107677 - DNA, 25 bp, Homo sapien
gagttttagtgaacggaagcagcag

SEQ ID NO: 2107678 - DNA, 25 bp, Homo sapien
ttgggtcgggcgtccggccactctc

SEQ ID NO: 2107679 - DNA, 25 bp, Homo sapien
tggcgggtccctataagaggtcttg

SEQ ID NO: 2107680 - DNA, 25 bp, Homo sapien
gctggctgcgattggtcagcagcta

SEQ ID NO: 2107681 - DNA, 25 bp, Homo sapien
gtcagcagctaattggcgggtccct

SEQ ID NO: 2107682 - DNA, 25 bp, Homo sapien
ggtttgtttgacatacacttccttc

SEQ ID NO: 2107683 - DNA, 25 bp, Homo sapien
cctttaggtttgaaggatgaggttg

SEQ ID NO: 2107684 - DNA, 25 bp, Homo sapien
tgcacgatcaaaatagggcctttag

SEQ ID NO: 2107685 - DNA, 25 bp, Homo sapien
ccataaattgggaatggcaagcggc

SEQ ID NO: 2107686 - DNA, 25 bp, Homo sapien
ttccaatgtcctgacacatctgggc

SEQ ID NO: 2107687 - DNA, 25 bp, Homo sapien
tctgcactggccttagcaggctcca

SEQ ID NO: 2107688 - DNA, 25 bp, Homo sapien
tggctggccccagctcgattctgca

SEQ ID NO: 2107689 - DNA, 25 bp, Homo sapien
ggaattggagttcttaaatgccctc

SEQ ID NO: 2107690 - DNA, 25 bp, Homo sapien
aatggagccttcccccatcactcat

SEQ ID NO: 2107691 - DNA, 25 bp, Homo sapien
agaatggagccttcccccatcactc

SEQ ID NO: 2107692 - DNA, 25 bp, Homo sapien
tggagccttcccccatcactcattt

SEQ ID NO: 2107693 - DNA, 25 bp, Homo sapien
gaatggagccttcccccatcactca

SEQ ID NO: 2107694 - DNA, 25 bp, Homo sapien
tgaactgaactgttgaatcaggtct

SEQ ID NO: 2107695 - DNA, 25 bp, Homo sapien
caagacaggagtggcggtggacagg

SEQ ID NO: 2107696 - DNA, 25 bp, Homo sapien
ccttgaactgaactgttgaatcagg

SEQ ID NO: 2107697 - DNA, 25 bp, Homo sapien
tccatgctggagctccaaaccagcc

SEQ ID NO: 2107698 - DNA, 25 bp, Homo sapien
tctagcttctaccaaaacaattgac

SEQ ID NO: 2107699 - DNA, 25 bp, Homo sapien
cttctagcttctaccaaaacaattg

SEQ ID NO: 2107700 - DNA, 25 bp, Homo sapien
ctcttctagcttctaccaaaacaat

SEQ ID NO: 2107701 - DNA, 25 bp, Homo sapien
tagcttctaccaaaacaattgactt

SEQ ID NO: 2107702 - DNA, 25 bp, Homo sapien
gaaccatggtatctggggcaataca

SEQ ID NO: 2107703 - DNA, 25 bp, Homo sapien
caatacatcattcttagacatttct

SEQ ID NO: 2107704 - DNA, 25 bp, Homo sapien
tctggtgacttatcatcaaatgtca

SEQ ID NO: 2107705 - DNA, 25 bp, Homo sapien
aatgtcagggcactaaaatcaatga

SEQ ID NO: 2107706 - DNA, 25 bp, Homo sapien
gaatttcagcggctttatggtgctg

SEQ ID NO: 2107707 - DNA, 25 bp, Homo sapien
gaatttgcacgtagaggaaatggaa

SEQ ID NO: 2107708 - DNA, 25 bp, Homo sapien
gctgtcatccagttcgacagattga

SEQ ID NO: 2107709 - DNA, 25 bp, Homo sapien
ttttaatcatcggaatgtattgtac

SEQ ID NO: 2107710 - DNA, 25 bp, Homo sapien
cacgtggtgggccagctggatccag

SEQ ID NO: 2107711 - DNA, 25 bp, Homo sapien
ccatggtctaatgcagtgggcttga

SEQ ID NO: 2107712 - DNA, 25 bp, Homo sapien
tgtgactaaggtcacggccacgcca

SEQ ID NO: 2107713 - DNA, 25 bp, Homo sapien
gggccgttgtggccacacatcctga

SEQ ID NO: 2107714 - DNA, 25 bp, Homo sapien
tgtgacaatctggaagatcccagat

SEQ ID NO: 2107715 - DNA, 25 bp, Homo sapien
gtgacaatctggaagatcccagatc

SEQ ID NO: 2107716 - DNA, 25 bp, Homo sapien
tagttgctgtagttggagagagagt

SEQ ID NO: 2107717 - DNA, 25 bp, Homo sapien
tcttgtacaatggaggaatcccaga

SEQ ID NO: 2107718 - DNA, 25 bp, Homo sapien
caggtggttcagagggtagttgctg

SEQ ID NO: 2107719 - DNA, 25 bp, Homo sapien
ccagaaggtagcctcccagcaggtg

SEQ ID NO: 2107720 - DNA, 25 bp, Homo sapien
ctggtgcccctctgtcttcaagtac

SEQ ID NO: 2107721 - DNA, 25 bp, Homo sapien
cctctgtcttcaagtacctgggctc

SEQ ID NO: 2107722 - DNA, 25 bp, Homo sapien
aggagcaggcgggaaaccacaccag

SEQ ID NO: 2107723 - DNA, 25 bp, Homo sapien
tgctcaggagcaggcgggaaaccac

SEQ ID NO: 2107724 - DNA, 25 bp, Homo sapien
cgtactcaaagataccgcatatttg

SEQ ID NO: 2107725 - DNA, 25 bp, Homo sapien
aagataccgcatatttgacaatgaa

SEQ ID NO: 2107726 - DNA, 25 bp, Homo sapien
cttctcacgaaccacgtactcaaag

SEQ ID NO: 2107727 - DNA, 25 bp, Homo sapien
tctcacgaaccacgtactcaaagat

SEQ ID NO: 2107728 - DNA, 25 bp, Homo sapien
tacattatatgagaagtgcagttgg

SEQ ID NO: 2107729 - DNA, 25 bp, Homo sapien
aaatcacgtttactctaatatgaag

SEQ ID NO: 2107730 - DNA, 25 bp, Homo sapien
ctatgagcgtattggaaaaatcacg

SEQ ID NO: 2107731 - DNA, 25 bp, Homo sapien
tgggaatgatagcatactatgagcg

SEQ ID NO: 2107732 - DNA, 25 bp, Homo sapien
cttctttgatgtcctccggaaagca

SEQ ID NO: 2107733 - DNA, 25 bp, Homo sapien
tcctccggaaagcaagacagtgtgc

SEQ ID NO: 2107734 - DNA, 25 bp, Homo sapien
tgatgtcctccggaaagcaagacag

SEQ ID NO: 2107735 - DNA, 25 bp, Homo sapien
taaggggagtcagggaatgctttgc

SEQ ID NO: 2107736 - DNA, 25 bp, Homo sapien
ctggggactatgggcactcaccacc

SEQ ID NO: 2107737 - DNA, 25 bp, Homo sapien
cactacaacctgtgcctccccgggt

SEQ ID NO: 2107738 - DNA, 25 bp, Homo sapien
cctgtgcctccccgggtacaagtga

SEQ ID NO: 2107739 - DNA, 25 bp, Homo sapien
agctggggactatgggcactcacca

SEQ ID NO: 2107740 - DNA, 25 bp, Homo sapien
gctgctgtatatagccttggaaatt

SEQ ID NO: 2107741 - DNA, 25 bp, Homo sapien
gctgtatatagccttggaaattggg

SEQ ID NO: 2107742 - DNA, 25 bp, Homo sapien
ctgtatatagccttggaaattgggg

SEQ ID NO: 2107743 - DNA, 25 bp, Homo sapien
ctgctgtatatagccttggaaattg

SEQ ID NO: 2107744 - DNA, 25 bp, Homo sapien
agcagtatcgatctctggcgggtcc

SEQ ID NO: 2107745 - DNA, 25 bp, Homo sapien
aggcacgtgggagcagtatcgatct

SEQ ID NO: 2107746 - DNA, 25 bp, Homo sapien
tcttgggatagtccagagcgtgttc

SEQ ID NO: 2107747 - DNA, 25 bp, Homo sapien
agagtgttccgtgtgaatgtgcgtc

SEQ ID NO: 2107748 - DNA, 25 bp, Homo sapien
catcttctttccaacgagtgaccat

SEQ ID NO: 2107749 - DNA, 25 bp, Homo sapien
aaattcccgatactcccttcacctg

SEQ ID NO: 2107750 - DNA, 25 bp, Homo sapien
gactaaattcccgatactcccttca

SEQ ID NO: 2107751 - DNA, 25 bp, Homo sapien
tgagagcatagctaccccgtcgtga

SEQ ID NO: 2107752 - DNA, 25 bp, Homo sapien
gttgataatctggatccaaacttgg

SEQ ID NO: 2107753 - DNA, 25 bp, Homo sapien
acttggctcttctgagagcatagct

SEQ ID NO: 2107754 - DNA, 25 bp, Homo sapien
cccgtcgtgattgaccacaacctca

SEQ ID NO: 2107755 - DNA, 25 bp, Homo sapien
tctcttttggtaggtcacaggggga

SEQ ID NO: 2107756 - DNA, 25 bp, Homo sapien
agatcaagacgaaagagacgagccc

SEQ ID NO: 2107757 - DNA, 25 bp, Homo sapien
tgtggctgcgagatcacagattgcc

SEQ ID NO: 2107758 - DNA, 25 bp, Homo sapien
gttccagatcaagacgaaagagacg

SEQ ID NO: 2107759 - DNA, 25 bp, Homo sapien
gagtatgaagagagcatactgttaa

SEQ ID NO: 2107760 - DNA, 25 bp, Homo sapien
ggtctgtgagttgcctacttaatgg

SEQ ID NO: 2107761 - DNA, 25 bp, Homo sapien
gttaagtactctgagtttgcattca

SEQ ID NO: 2107762 - DNA, 25 bp, Homo sapien
tgcattcaggtctgtgagttgccta

SEQ ID NO: 2107763 - DNA, 25 bp, Homo sapien
tattgtcaatgctttcacgatgagt

SEQ ID NO: 2107764 - DNA, 25 bp, Homo sapien
tgaacagtgaagagtggaagcttac

SEQ ID NO: 2107765 - DNA, 25 bp, Homo sapien
tgctgtaattaaggtaggactgaac

SEQ ID NO: 2107766 - DNA, 25 bp, Homo sapien
agtattcatttgatgctgtaattaa

SEQ ID NO: 2107767 - DNA, 25 bp, Homo sapien
taggactgaacagtgaagagtggaa

SEQ ID NO: 2107768 - DNA, 25 bp, Homo sapien
ctgggctgggttgtcttcttaggtg

SEQ ID NO: 2107769 - DNA, 25 bp, Homo sapien
aaatcaccggtacagagcccagagt

SEQ ID NO: 2107770 - DNA, 25 bp, Homo sapien
cagagcccagagtaaccttggagca

SEQ ID NO: 2107771 - DNA, 25 bp, Homo sapien
tcttaggtggcagaaatcaccggta

SEQ ID NO: 2107772 - DNA, 25 bp, Homo sapien
aataggagtgaaactcaacgccctc

SEQ ID NO: 2107773 - DNA, 25 bp, Homo sapien
tgtgagcatcaacataggttacttc

SEQ ID NO: 2107774 - DNA, 25 bp, Homo sapien
gcaagcttcatgtcaaaataggagt

SEQ ID NO: 2107775 - DNA, 25 bp, Homo sapien
taagctcgtattctgtatgaacagg

SEQ ID NO: 2107776 - DNA, 25 bp, Homo sapien
gctgctcctgcgactcctacttcgt

SEQ ID NO: 2107777 - DNA, 25 bp, Homo sapien
ggctgctcctgcgactcctacttcg

SEQ ID NO: 2107778 - DNA, 25 bp, Homo sapien
tgctcctgcgactcctacttcgtga

SEQ ID NO: 2107779 - DNA, 25 bp, Homo sapien
ctgctcctgcgactcctacttcgtg

SEQ ID NO: 2107780 - DNA, 25 bp, Homo sapien
atagatttgctccttgagctagatt

SEQ ID NO: 2107781 - DNA, 25 bp, Homo sapien
caggagcccagatcagatttgggca

SEQ ID NO: 2107782 - DNA, 25 bp, Homo sapien
cagatcagatttgggcatagatttg

SEQ ID NO: 2107783 - DNA, 25 bp, Homo sapien
aacaagaacaggagcccagatcaga

SEQ ID NO: 2107784 - DNA, 25 bp, Homo sapien
ggacacagaatgaccctttgagggt

SEQ ID NO: 2107785 - DNA, 25 bp, Homo sapien
gggtgaattggaacgagactggctc

SEQ ID NO: 2107786 - DNA, 25 bp, Homo sapien
tttctttggaagatcgggacagaga

SEQ ID NO: 2107787 - DNA, 25 bp, Homo sapien
agatcgggacagagacctgcttgga

SEQ ID NO: 2107788 - DNA, 25 bp, Homo sapien
cacagtaacaagcaaaaacagcccc

SEQ ID NO: 2107789 - DNA, 25 bp, Homo sapien
gatctgcacagtaacaagcaaaaac

SEQ ID NO: 2107790 - DNA, 25 bp, Homo sapien
ttaccatgagtaagatctgcacagt

SEQ ID NO: 2107791 - DNA, 25 bp, Homo sapien
taccatgagtaagatctgcacagta

SEQ ID NO: 2107792 - DNA, 25 bp, Homo sapien
cacattccttcttgtggacttggca

SEQ ID NO: 2107793 - DNA, 25 bp, Homo sapien
tggtgtgcaagctttgccacacatt

SEQ ID NO: 2107794 - DNA, 25 bp, Homo sapien
agggctggtgtgcaagctttgccac

SEQ ID NO: 2107795 - DNA, 25 bp, Homo sapien
tgccacacattccttcttgtggact

SEQ ID NO: 2107796 - DNA, 25 bp, Homo sapien
tgccaatatccctccacctctgaag

SEQ ID NO: 2107797 - DNA, 25 bp, Homo sapien
ttgagcaggcatctgccaatatccc

SEQ ID NO: 2107798 - DNA, 25 bp, Homo sapien
ggcatctgccaatatccctccacct

SEQ ID NO: 2107799 - DNA, 25 bp, Homo sapien
cttgagcaggcatctgccaatatcc

SEQ ID NO: 2107800 - DNA, 25 bp, Homo sapien
agaacaaaagccagccgacatccct

SEQ ID NO: 2107801 - DNA, 25 bp, Homo sapien
caggtgctaaaggacatcaacatgc

SEQ ID NO: 2107802 - DNA, 25 bp, Homo sapien
tgctaaaggacatcaacatgcagaa

SEQ ID NO: 2107803 - DNA, 25 bp, Homo sapien
tcaacatgcagaacaaaagccagcc

SEQ ID NO: 2107804 - DNA, 25 bp, Homo sapien
ccagtagttggtgaaggcggagcaa

SEQ ID NO: 2107805 - DNA, 25 bp, Homo sapien
gaccagtagttggtgaaggcggagc

SEQ ID NO: 2107806 - DNA, 25 bp, Homo sapien
ttggtgaaggcggagcaagtggtga

SEQ ID NO: 2107807 - DNA, 25 bp, Homo sapien
gtagttggtgaaggcggagcaagtg

SEQ ID NO: 2107808 - DNA, 25 bp, Homo sapien
ggctgcgtggctgacaggctgggtg

SEQ ID NO: 2107809 - DNA, 25 bp, Homo sapien
gtggctgacaggctgggtgccatag

SEQ ID NO: 2107810 - DNA, 25 bp, Homo sapien
acgctggctgcgtggctgacaggct

SEQ ID NO: 2107811 - DNA, 25 bp, Homo sapien
atagacgctggctgcgtggctgaca

SEQ ID NO: 2107812 - DNA, 25 bp, Homo sapien
ctgccagacccccggccatccccgt

SEQ ID NO: 2107813 - DNA, 25 bp, Homo sapien
tgccagacccccggccatccccgtg

SEQ ID NO: 2107814 - DNA, 25 bp, Homo sapien
ccaggcggtctctcaggctttgcat

SEQ ID NO: 2107815 - DNA, 25 bp, Homo sapien
aggcggtctctcaggctttgcatgg

SEQ ID NO: 2107816 - DNA, 25 bp, Homo sapien
cagcttccaattctcggtctccagg

SEQ ID NO: 2107817 - DNA, 25 bp, Homo sapien
gaggccaggcggtctctcaggcttt

SEQ ID NO: 2107818 - DNA, 25 bp, Homo sapien
gagccctcaggtcctccatggtctt

SEQ ID NO: 2107819 - DNA, 25 bp, Homo sapien
tgagccctcaggtcctccatggtct

SEQ ID NO: 2107820 - DNA, 25 bp, Homo sapien
atctgagccctcaggtcctccatgg

SEQ ID NO: 2107821 - DNA, 25 bp, Homo sapien
tccatggtcttgaagtaatggctcc

SEQ ID NO: 2107822 - DNA, 25 bp, Homo sapien
tgtgccatcaattatcttgcagagc

SEQ ID NO: 2107823 - DNA, 25 bp, Homo sapien
gccatcaattatcttgcagagccca

SEQ ID NO: 2107824 - DNA, 25 bp, Homo sapien
tttgtgccatcaattatcttgcaga

SEQ ID NO: 2107825 - DNA, 25 bp, Homo sapien
tgccatcaattatcttgcagagccc

SEQ ID NO: 2107826 - DNA, 25 bp, Homo sapien
taggccttttgcttcctcttcgttg

SEQ ID NO: 2107827 - DNA, 25 bp, Homo sapien
gccttttgcttcctcttcgttgttc

SEQ ID NO: 2107828 - DNA, 25 bp, Homo sapien
tttgcttcctcttcgttgttcttct

SEQ ID NO: 2107829 - DNA, 25 bp, Homo sapien
ccttttgcttcctcttcgttgttct

SEQ ID NO: 2107830 - DNA, 25 bp, Homo sapien
cttggcaaggtctgagatttggggg

SEQ ID NO: 2107831 - DNA, 25 bp, Homo sapien
ttggcaaggtctgagatttgggggc

SEQ ID NO: 2107832 - DNA, 25 bp, Homo sapien
aggtctgagatttgggggcatctac

SEQ ID NO: 2107833 - DNA, 25 bp, Homo sapien
gcaaggtctgagatttgggggcatc

SEQ ID NO: 2107834 - DNA, 25 bp, Homo sapien
ggtaaccactctggtgctctcctcg

SEQ ID NO: 2107835 - DNA, 25 bp, Homo sapien
agtatgatatctcccaaactctccc

SEQ ID NO: 2107836 - DNA, 25 bp, Homo sapien
gcaaaccagcatacaacaacttgct

SEQ ID NO: 2107837 - DNA, 25 bp, Homo sapien
caacaacttgcttgccctcaaagac

SEQ ID NO: 2107838 - DNA, 25 bp, Homo sapien
tgccctcaaagacatgtaagtatga

SEQ ID NO: 2107839 - DNA, 25 bp, Homo sapien
ctcaagacattcaacaaagatctgt

SEQ ID NO: 2107840 - DNA, 25 bp, Homo sapien
agtgtacacctctgagcaagaactg

SEQ ID NO: 2107841 - DNA, 25 bp, Homo sapien
ctcctcagagcatctgtcttgaaag

SEQ ID NO: 2107842 - DNA, 25 bp, Homo sapien
gggcaaggatccctctaaccaatct

SEQ ID NO: 2107843 - DNA, 25 bp, Homo sapien
taaccgaatccttgattttgcttct

SEQ ID NO: 2107844 - DNA, 25 bp, Homo sapien
tgctgatagtatgctggcaagattt

SEQ ID NO: 2107845 - DNA, 25 bp, Homo sapien
ataagaagctcattcttgatgctga

SEQ ID NO: 2107846 - DNA, 25 bp, Homo sapien
atacaatggtgagaacaacaaaaat

SEQ ID NO: 2107847 - DNA, 25 bp, Homo sapien
ttgatgctgatagtatgctggcaag

SEQ ID NO: 2107848 - DNA, 25 bp, Homo sapien
tacaataccggagatactatagcgg

SEQ ID NO: 2107849 - DNA, 25 bp, Homo sapien
tggtgtagctccaaatgtcttatag

SEQ ID NO: 2107850 - DNA, 25 bp, Homo sapien
tactatagcggaatctatgaagttt

SEQ ID NO: 2107851 - DNA, 25 bp, Homo sapien
gattgtcctgatacaataccggaga

SEQ ID NO: 2107852 - DNA, 25 bp, Homo sapien
atttgtgggagcagggccagtctac

SEQ ID NO: 2107853 - DNA, 25 bp, Homo sapien
gtgtctgcagatgtgatttgtggga

SEQ ID NO: 2107854 - DNA, 25 bp, Homo sapien
gagtgtctgcagatgtgatttgtgg

SEQ ID NO: 2107855 - DNA, 25 bp, Homo sapien
tgtgggagcagggccagtctaccat

SEQ ID NO: 2107856 - DNA, 25 bp, Homo sapien
gagttgtcgatgaggagctctgcct

SEQ ID NO: 2107857 - DNA, 25 bp, Homo sapien
acaaaacaacaatgagttgtcgatg

SEQ ID NO: 2107858 - DNA, 25 bp, Homo sapien
caacaatgagttgtcgatgaggagc

SEQ ID NO: 2107859 - DNA, 25 bp, Homo sapien
caatgagttgtcgatgaggagctct

SEQ ID NO: 2107860 - DNA, 25 bp, Homo sapien
tgctgtctatgagagtagagcctga

SEQ ID NO: 2107861 - DNA, 25 bp, Homo sapien
ctagaatgctgtctatgagagtaga

SEQ ID NO: 2107862 - DNA, 25 bp, Homo sapien
ctatactggccctggtaatgacact

SEQ ID NO: 2107863 - DNA, 25 bp, Homo sapien
gaattaagtctgttactatactggc

SEQ ID NO: 2107864 - DNA, 25 bp, Homo sapien
tctgccaaaggagctgcggtcagta

SEQ ID NO: 2107865 - DNA, 25 bp, Homo sapien
tcagtagtcctagtggtacagtctc

SEQ ID NO: 2107866 - DNA, 25 bp, Homo sapien
cagtctctgaaaaacgcacatgatt

SEQ ID NO: 2107867 - DNA, 25 bp, Homo sapien
accatttgcggttgaaacttctgcc

SEQ ID NO: 2107868 - DNA, 25 bp, Homo sapien
tgatgggcatttggtacaacactca

SEQ ID NO: 2107869 - DNA, 25 bp, Homo sapien
agttgggaaaatgccgaacattttg

SEQ ID NO: 2107870 - DNA, 25 bp, Homo sapien
ctcattttaatgtgccaaggaggtg

SEQ ID NO: 2107871 - DNA, 25 bp, Homo sapien
caaggaggtggatgtagttgggaaa

SEQ ID NO: 2107872 - DNA, 25 bp, Homo sapien
tcctgctttctgcaagtgccaacat

SEQ ID NO: 2107873 - DNA, 25 bp, Homo sapien
aagtgccaacatttcttcccttcca

SEQ ID NO: 2107874 - DNA, 25 bp, Homo sapien
tgctttctgcaagtgccaacatttc

SEQ ID NO: 2107875 - DNA, 25 bp, Homo sapien
ttctgcaagtgccaacatttcttcc

SEQ ID NO: 2107876 - DNA, 25 bp, Homo sapien
cttgatctccttgactaggatgacc

SEQ ID NO: 2107877 - DNA, 25 bp, Homo sapien
tcggcactcttgtgtttccaactgt

SEQ ID NO: 2107878 - DNA, 25 bp, Homo sapien
tcagtccccagtatcctctgggttg

SEQ ID NO: 2107879 - DNA, 25 bp, Homo sapien
tggcttcccttgactgctcggcact

SEQ ID NO: 2107880 - DNA, 25 bp, Homo sapien
tttctatcccttgggagcttccctg

SEQ ID NO: 2107881 - DNA, 25 bp, Homo sapien
tgggagcttccctgaaccttaactg

SEQ ID NO: 2107882 - DNA, 25 bp, Homo sapien
cctgaaccttaactggcattagaca

SEQ ID NO: 2107883 - DNA, 25 bp, Homo sapien
gagcttccctgaaccttaactggca

SEQ ID NO: 2107884 - DNA, 25 bp, Homo sapien
gccctcgataaaggagatcctcttt

SEQ ID NO: 2107885 - DNA, 25 bp, Homo sapien
ctggccctcgataaaggagatcctc

SEQ ID NO: 2107886 - DNA, 25 bp, Homo sapien
tggccctcgataaaggagatcctct

SEQ ID NO: 2107887 - DNA, 25 bp, Homo sapien
ggccctcgataaaggagatcctctt

SEQ ID NO: 2107888 - DNA, 25 bp, Homo sapien
gaactatgagttggcctattttctg

SEQ ID NO: 2107889 - DNA, 25 bp, Homo sapien
taagagcatttaacccatatgcaga

SEQ ID NO: 2107890 - DNA, 25 bp, Homo sapien
gtaggtcacacggatatgtatttca

SEQ ID NO: 2107891 - DNA, 25 bp, Homo sapien
tcttgatatgcacacatgctaccaa

SEQ ID NO: 2107892 - DNA, 25 bp, Homo sapien
gaccaggcccatttcgataagaagt

SEQ ID NO: 2107893 - DNA, 25 bp, Homo sapien
ccaggataggaaatcagatggacag

SEQ ID NO: 2107894 - DNA, 25 bp, Homo sapien
catttaccatctgagtccactagga

SEQ ID NO: 2107895 - DNA, 25 bp, Homo sapien
gaagatgaaatataggaccaggccc

SEQ ID NO: 2107896 - DNA, 25 bp, Homo sapien
ccttaggaaggagcgctacatttga

SEQ ID NO: 2107897 - DNA, 25 bp, Homo sapien
tgtatcttcccttggaaccttagga

SEQ ID NO: 2107898 - DNA, 25 bp, Homo sapien
tagagtgctctacttgaagatgact

SEQ ID NO: 2107899 - DNA, 25 bp, Homo sapien
gaacctataacatgttttgctgcca

SEQ ID NO: 2107900 - DNA, 25 bp, Homo sapien
cactgtcctgacttccagcacagta

SEQ ID NO: 2107901 - DNA, 25 bp, Homo sapien
tgtcctgacttccagcacagtaaag

SEQ ID NO: 2107902 - DNA, 25 bp, Homo sapien
gtcctgacttccagcacagtaaaga

SEQ ID NO: 2107903 - DNA, 25 bp, Homo sapien
ctgtcctgacttccagcacagtaaa

SEQ ID NO: 2107904 - DNA, 25 bp, Homo sapien
aaccagtggttccactgccccagta

SEQ ID NO: 2107905 - DNA, 25 bp, Homo sapien
cgggaaatcatgcttgacatcaagg

SEQ ID NO: 2107906 - DNA, 25 bp, Homo sapien
gagctaggagctgctcaacggccag

SEQ ID NO: 2107907 - DNA, 25 bp, Homo sapien
cgtgatggactctagcgatgggatc

SEQ ID NO: 2107908 - DNA, 25 bp, Homo sapien
agcaagagaggcatcctgaccccac

SEQ ID NO: 2107909 - DNA, 25 bp, Homo sapien
gtccagagcaagagaggcatcctga

SEQ ID NO: 2107910 - DNA, 25 bp, Homo sapien
ctacatgagcgatgaggtccagagc

SEQ ID NO: 2107911 - DNA, 25 bp, Homo sapien
tacatgagcgatgaggtccagagca

SEQ ID NO: 2107912 - DNA, 25 bp, Homo sapien
tggtgcccgtggcaccagggcgtga

SEQ ID NO: 2107913 - DNA, 25 bp, Homo sapien
tctggcatgtgcaaggctgccttca

SEQ ID NO: 2107914 - DNA, 25 bp, Homo sapien
tcatgggcgatgatgccccccagtt

SEQ ID NO: 2107915 - DNA, 25 bp, Homo sapien
ccatcatgtggtgcccgtggcacca

SEQ ID NO: 2107916 - DNA, 25 bp, Homo sapien
gaagccctgatctgatttttatcac

SEQ ID NO: 2107917 - DNA, 25 bp, Homo sapien
ctccaggtctctagtgatcataaaa

SEQ ID NO: 2107918 - DNA, 25 bp, Homo sapien
tgatcataaaagtgatcgaagccct

SEQ ID NO: 2107919 - DNA, 25 bp, Homo sapien
taaaagtgatcgaagccctgatctg

SEQ ID NO: 2107920 - DNA, 25 bp, Homo sapien
cacatgatttagcattgtgctagaa

SEQ ID NO: 2107921 - DNA, 25 bp, Homo sapien
tgctagaagagcagagatttgagct

SEQ ID NO: 2107922 - DNA, 25 bp, Homo sapien
gaggccgctctagcatgctgcttct

SEQ ID NO: 2107923 - DNA, 25 bp, Homo sapien
gagagatagcaagtaagaccctcat

SEQ ID NO: 2107924 - DNA, 25 bp, Homo sapien
ttagcatcttaggtcccgaaaaatg

SEQ ID NO: 2107925 - DNA, 25 bp, Homo sapien
aagaaggaccctaagtttagcatct

SEQ ID NO: 2107926 - DNA, 25 bp, Homo sapien
tagcatcttaggtcccgaaaaatgg

SEQ ID NO: 2107927 - DNA, 25 bp, Homo sapien
agaaggaccctaagtttagcatctt

SEQ ID NO: 2107928 - DNA, 25 bp, Homo sapien
tggtcttctctagactgaaggtcct

SEQ ID NO: 2107929 - DNA, 25 bp, Homo sapien
ctatagaccggatggcctggtactg

SEQ ID NO: 2107930 - DNA, 25 bp, Homo sapien
ctctagactgaaggtcctccaccag

SEQ ID NO: 2107931 - DNA, 25 bp, Homo sapien
tggcctggtactggtcttctctaga

SEQ ID NO: 2107932 - DNA, 25 bp, Homo sapien
ccttctgtcccatcaatgcctggtg

SEQ ID NO: 2107933 - DNA, 25 bp, Homo sapien
tggctctttaggggggaatattgtg

SEQ ID NO: 2107934 - DNA, 25 bp, Homo sapien
tcctgtgttactgtgttagcttctg

SEQ ID NO: 2107935 - DNA, 25 bp, Homo sapien
gagaaaagcatatccgacacagtca

SEQ ID NO: 2107936 - DNA, 25 bp, Homo sapien
tctgagaaaagcatatccgacacag

SEQ ID NO: 2107937 - DNA, 25 bp, Homo sapien
tgattctgagaaaagcatatccgac

SEQ ID NO: 2107938 - DNA, 25 bp, Homo sapien
gcatatccgacacagtcactttctc

SEQ ID NO: 2107939 - DNA, 25 bp, Homo sapien
tcccttcagaaatctgcttgcccat

SEQ ID NO: 2107940 - DNA, 25 bp, Homo sapien
ggttcccttcagaaatctgcttgcc

SEQ ID NO: 2107941 - DNA, 25 bp, Homo sapien
cccgggaggatccaactgtactgtg

SEQ ID NO: 2107942 - DNA, 25 bp, Homo sapien
aacacatgatttagctgcccgggag

SEQ ID NO: 2107943 - DNA, 25 bp, Homo sapien
acagggaagggagtatctagacttg

SEQ ID NO: 2107944 - DNA, 25 bp, Homo sapien
agggaagggagtatctagacttgag

SEQ ID NO: 2107945 - DNA, 25 bp, Homo sapien
gggaagggagtatctagacttgagt

SEQ ID NO: 2107946 - DNA, 25 bp, Homo sapien
cagggaagggagtatctagacttga

SEQ ID NO: 2107947 - DNA, 25 bp, Homo sapien
aagccagttgcaagtgctcatctcc

SEQ ID NO: 2107948 - DNA, 25 bp, Homo sapien
ccagttgcaagtgctcatctcctac

SEQ ID NO: 2107949 - DNA, 25 bp, Homo sapien
gccagttgcaagtgctcatctccta

SEQ ID NO: 2107950 - DNA, 25 bp, Homo sapien
gaaagccagttgcaagtgctcatct

SEQ ID NO: 2107951 - DNA, 25 bp, Homo sapien
gccttgatgacattccactctttga

SEQ ID NO: 2107952 - DNA, 25 bp, Homo sapien
caggagctgagtcatgcttggtttc

SEQ ID NO: 2107953 - DNA, 25 bp, Homo sapien
tatgttgctaatgatccctggaacc

SEQ ID NO: 2107954 - DNA, 25 bp, Homo sapien
ttagcagcagttactgcaaggcact

SEQ ID NO: 2107955 - DNA, 25 bp, Homo sapien
caaaagacttgcaaggttatttgtc

SEQ ID NO: 2107956 - DNA, 25 bp, Homo sapien
gagcctccctgtagcaaaagacttg

SEQ ID NO: 2107957 - DNA, 25 bp, Homo sapien
gaaatccagtttgagcctccctgta

SEQ ID NO: 2107958 - DNA, 25 bp, Homo sapien
caaggttatttgtcaggaagttcca

SEQ ID NO: 2107959 - DNA, 25 bp, Homo sapien
tccgtggcgagtggtacaaaaggcc

SEQ ID NO: 2107960 - DNA, 25 bp, Homo sapien
aaagcgtgtgaccattttccgtggc

SEQ ID NO: 2107961 - DNA, 25 bp, Homo sapien
cagggaccccgtgtttctgatagtg

SEQ ID NO: 2107962 - DNA, 25 bp, Homo sapien
tgtttgtgtccctccgtcctgaaag

SEQ ID NO: 2107963 - DNA, 25 bp, Homo sapien
ggatggggtcggagtgtgtcgcagc

SEQ ID NO: 2107964 - DNA, 25 bp, Homo sapien
ggagtgtgtcgcagcgccgcgcacg

SEQ ID NO: 2107965 - DNA, 25 bp, Homo sapien
gggtcggagtgtgtcgcagcgccgc

SEQ ID NO: 2107966 - DNA, 25 bp, Homo sapien
ctgggaacgcgggatggggtcggag

SEQ ID NO: 2107967 - DNA, 25 bp, Homo sapien
cccgggtcagcggagcacttccgct

SEQ ID NO: 2107968 - DNA, 25 bp, Homo sapien
ccctcccgggtcagcggagcacttc

SEQ ID NO: 2107969 - DNA, 25 bp, Homo sapien
tcccgggtcagcggagcacttccgc

SEQ ID NO: 2107970 - DNA, 25 bp, Homo sapien
cctcccgggtcagcggagcacttcc

SEQ ID NO: 2107971 - DNA, 25 bp, Homo sapien
ttcaccgccaagagcctgaaacctc

SEQ ID NO: 2107972 - DNA, 25 bp, Homo sapien
tcagaggccgctgacaacagccagt

SEQ ID NO: 2107973 - DNA, 25 bp, Homo sapien
ctcagaggccgctgacaacagccag

SEQ ID NO: 2107974 - DNA, 25 bp, Homo sapien
gccaagagcctgaaacctcagaggc

SEQ ID NO: 2107975 - DNA, 25 bp, Homo sapien
ataaactggagtctgaagtcggtga

SEQ ID NO: 2107976 - DNA, 25 bp, Homo sapien
tctgaagtcggtgagcagtggtctc

SEQ ID NO: 2107977 - DNA, 25 bp, Homo sapien
taagtcttctgagactaagtgagga

SEQ ID NO: 2107978 - DNA, 25 bp, Homo sapien
gtcttctgagactaagtgaggaagc

SEQ ID NO: 2107979 - DNA, 25 bp, Homo sapien
ttttgattaccaggctcctccttct

SEQ ID NO: 2107980 - DNA, 25 bp, Homo sapien
gcttctgtgcagagtaaccattgca

SEQ ID NO: 2107981 - DNA, 25 bp, Homo sapien
gcaaggagcttctgtgcagagtaac

SEQ ID NO: 2107982 - DNA, 25 bp, Homo sapien
taaccattgcatactgcaacaatca

SEQ ID NO: 2107983 - DNA, 25 bp, Homo sapien
tctacgcacatcaaaacattatgca

SEQ ID NO: 2107984 - DNA, 25 bp, Homo sapien
gggctactagctttttctacgcaca

SEQ ID NO: 2107985 - DNA, 25 bp, Homo sapien
cattatgcacaaacttattatcata

SEQ ID NO: 2107986 - DNA, 25 bp, Homo sapien
tctgacgaggaacatggtacttggg

SEQ ID NO: 2107987 - DNA, 25 bp, Homo sapien
gaaagcagccatttttgtaagcggg

SEQ ID NO: 2107988 - DNA, 25 bp, Homo sapien
tagtgccacactaagaaaccctggt

SEQ ID NO: 2107989 - DNA, 25 bp, Homo sapien
tattggcatctagtagagagagtcc

SEQ ID NO: 2107990 - DNA, 25 bp, Homo sapien
gaaaacgagtgattgtgcataggca

SEQ ID NO: 2107991 - DNA, 25 bp, Homo sapien
ggctgctcctactatgcttttctga

SEQ ID NO: 2107992 - DNA, 25 bp, Homo sapien
gcccggctgctcctactatgctttt

SEQ ID NO: 2107993 - DNA, 25 bp, Homo sapien
tgcccggctgctcctactatgcttt

SEQ ID NO: 2107994 - DNA, 25 bp, Homo sapien
ccggctgctcctactatgcttttct

SEQ ID NO: 2107995 - DNA, 25 bp, Homo sapien
agtatctcttgtaatggtcccagtg

SEQ ID NO: 2107996 - DNA, 25 bp, Homo sapien
accagtatctcttgtaatggtccca

SEQ ID NO: 2107997 - DNA, 25 bp, Homo sapien
cagtatctcttgtaatggtcccagt

SEQ ID NO: 2107998 - DNA, 25 bp, Homo sapien
ccagtatctcttgtaatggtcccag

SEQ ID NO: 2107999 - DNA, 25 bp, Homo sapien
tccctcgtgatagctccggtgctgg

SEQ ID NO: 2108000 - DNA, 25 bp, Homo sapien
caggagctgttagcccaatctgccc

SEQ ID NO: 2108001 - DNA, 25 bp, Homo sapien
agcaggagggcttctcagagcaatc

SEQ ID NO: 2108002 - DNA, 25 bp, Homo sapien
acagtggcaccagtttacccagctg

SEQ ID NO: 2108003 - DNA, 25 bp, Homo sapien
ttccttgcaaagactaataacccgc

SEQ ID NO: 2108004 - DNA, 25 bp, Homo sapien
ccaattccttgcaaagactaataac

SEQ ID NO: 2108005 - DNA, 25 bp, Homo sapien
tgcaaagactaataacccgcctgtt

SEQ ID NO: 2108006 - DNA, 25 bp, Homo sapien
cttgcaaagactaataacccgcctg

SEQ ID NO: 2108007 - DNA, 25 bp, Homo sapien
gggacacagagctacaacaaacagt

SEQ ID NO: 2108008 - DNA, 25 bp, Homo sapien
gagctacaacaaacagttctaaaca

SEQ ID NO: 2108009 - DNA, 25 bp, Homo sapien
gcttggccttgtcaccaccaaacaa

SEQ ID NO: 2108010 - DNA, 25 bp, Homo sapien
aacatagctaatcaatcatgaaaca

SEQ ID NO: 2108011 - DNA, 25 bp, Homo sapien
aaacagatagggtatgagaaatatt

SEQ ID NO: 2108012 - DNA, 25 bp, Homo sapien
gattgatacaaaaccacacctcttg

SEQ ID NO: 2108013 - DNA, 25 bp, Homo sapien
gatacaaaaccacacctcttgaact

SEQ ID NO: 2108014 - DNA, 25 bp, Homo sapien
aaaaccacacctcttgaactcaagg

SEQ ID NO: 2108015 - DNA, 25 bp, Homo sapien
ctgtaatggcacattcctctttagc

SEQ ID NO: 2108016 - DNA, 25 bp, Homo sapien
ctttagcaccccaggaccagcctgg

SEQ ID NO: 2108017 - DNA, 25 bp, Homo sapien
tttagcaccccaggaccagcctggg

SEQ ID NO: 2108018 - DNA, 25 bp, Homo sapien
taatggcacattcctctttagcacc

SEQ ID NO: 2108019 - DNA, 25 bp, Homo sapien
cagggtgaagtccacaaacacgtcc

SEQ ID NO: 2108020 - DNA, 25 bp, Homo sapien
tagaggttcttctgggcagagtcca

SEQ ID NO: 2108021 - DNA, 25 bp, Homo sapien
gttctcaagcatgacatccctgtag

SEQ ID NO: 2108022 - DNA, 25 bp, Homo sapien
caaacacgtccttgaaggtcaatga

SEQ ID NO: 2108023 - DNA, 25 bp, Homo sapien
agaaacacagtactggaggcattct

SEQ ID NO: 2108024 - DNA, 25 bp, Homo sapien
gaaacacagtactggaggcattctg

SEQ ID NO: 2108025 - DNA, 25 bp, Homo sapien
gaaagaaacacagtactggaggcat

SEQ ID NO: 2108026 - DNA, 25 bp, Homo sapien
aagaaacacagtactggaggcattc

SEQ ID NO: 2108027 - DNA, 25 bp, Homo sapien
ctggtcccaacctgaagatcacatc

SEQ ID NO: 2108028 - DNA, 25 bp, Homo sapien
cacatctggcttcgcaactagatac

SEQ ID NO: 2108029 - DNA, 25 bp, Homo sapien
gatcacatctggcttcgcaactaga

SEQ ID NO: 2108030 - DNA, 25 bp, Homo sapien
atccaggactcttcacctggtccca

SEQ ID NO: 2108031 - DNA, 25 bp, Homo sapien
tggtctcctttccccggcctgactc

SEQ ID NO: 2108032 - DNA, 25 bp, Homo sapien
ctggtctcctttccccggcctgact

SEQ ID NO: 2108033 - DNA, 25 bp, Homo sapien
gtctcctttccccggcctgactcac

SEQ ID NO: 2108034 - DNA, 25 bp, Homo sapien
ggtctcctttccccggcctgactca

SEQ ID NO: 2108035 - DNA, 25 bp, Homo sapien
ctggctgggtaaaggtcactggcaa

SEQ ID NO: 2108036 - DNA, 25 bp, Homo sapien
aacagaaaatggtgtgaggtttaca

SEQ ID NO: 2108037 - DNA, 25 bp, Homo sapien
ggtacgataatctaccttaggctaa

SEQ ID NO: 2108038 - DNA, 25 bp, Homo sapien
tgttaaccacaaagtgaaagcaggc

SEQ ID NO: 2108039 - DNA, 25 bp, Homo sapien
tactgttctgcactcttagactgaa

SEQ ID NO: 2108040 - DNA, 25 bp, Homo sapien
ggactcaggagggtagactgtgcct

SEQ ID NO: 2108041 - DNA, 25 bp, Homo sapien
atactgttctgcactcttagactga

SEQ ID NO: 2108042 - DNA, 25 bp, Homo sapien
gagggtagactgtgcctgaatttgc

SEQ ID NO: 2108043 - DNA, 25 bp, Homo sapien
ataaaatgtcgggggagaagctaga

SEQ ID NO: 2108044 - DNA, 25 bp, Homo sapien
ataataaaatgtcgggggagaagct

SEQ ID NO: 2108045 - DNA, 25 bp, Homo sapien
taataaaatgtcgggggagaagcta

SEQ ID NO: 2108046 - DNA, 25 bp, Homo sapien
tcataataaaatgtcgggggagaag

SEQ ID NO: 2108047 - DNA, 25 bp, Homo sapien
taaatatagcaaagcctggggtagg

SEQ ID NO: 2108048 - DNA, 25 bp, Homo sapien
tggacgtattatatgggtgttcaac

SEQ ID NO: 2108049 - DNA, 25 bp, Homo sapien
tattataaatctaggtggacgtatt

SEQ ID NO: 2108050 - DNA, 25 bp, Homo sapien
tcgaattgatggaaggacagaggaa

SEQ ID NO: 2108051 - DNA, 25 bp, Homo sapien
ctaattaatgatatgcctgtggagg

SEQ ID NO: 2108052 - DNA, 25 bp, Homo sapien
gtagttacacagctatatatttgtc

SEQ ID NO: 2108053 - DNA, 25 bp, Homo sapien
gccaaagatcatatggtgccataag

SEQ ID NO: 2108054 - DNA, 25 bp, Homo sapien
gtactaacaaatatggaactctaat

SEQ ID NO: 2108055 - DNA, 25 bp, Homo sapien
caaacaatggcaaaagattacaata

SEQ ID NO: 2108056 - DNA, 25 bp, Homo sapien
catagctggtcaggatttatatcca

SEQ ID NO: 2108057 - DNA, 25 bp, Homo sapien
tacctactagaaaggtgtgttgttg

SEQ ID NO: 2108058 - DNA, 25 bp, Homo sapien
ccacagcctaggagtaaatacttgt

SEQ ID NO: 2108059 - DNA, 25 bp, Homo sapien
tggaaactgggtagaatacacgaga

SEQ ID NO: 2108060 - DNA, 25 bp, Homo sapien
tatgagggacctttgtagtaatgga

SEQ ID NO: 2108061 - DNA, 25 bp, Homo sapien
taatcccataaagcatcatactgta

SEQ ID NO: 2108062 - DNA, 25 bp, Homo sapien
tattatttcctacaagggcatggga

SEQ ID NO: 2108063 - DNA, 25 bp, Homo sapien
atacatgaggcaaaaatggatacat

SEQ ID NO: 2108064 - DNA, 25 bp, Homo sapien
agcacttcaaaatacatgaggcaaa

SEQ ID NO: 2108065 - DNA, 25 bp, Homo sapien
acagcacttcaaaatacatgaggca

SEQ ID NO: 2108066 - DNA, 25 bp, Homo sapien
ataacagcacttcaaaatacatgag

SEQ ID NO: 2108067 - DNA, 25 bp, Homo sapien
gaggtgaattctaggccacagggca

SEQ ID NO: 2108068 - DNA, 25 bp, Homo sapien
cattagtgaaaccagtgggccccag

SEQ ID NO: 2108069 - DNA, 25 bp, Homo sapien
gctttcatagcttagggtacacaga

SEQ ID NO: 2108070 - DNA, 25 bp, Homo sapien
taccacatgtaggagtgcattccaa

SEQ ID NO: 2108071 - DNA, 25 bp, Homo sapien
gttctggattcttgaccgctttcat

SEQ ID NO: 2108072 - DNA, 25 bp, Homo sapien
tggattcttgaccgctttcatcctt

SEQ ID NO: 2108073 - DNA, 25 bp, Homo sapien
ttctggattcttgaccgctttcatc

SEQ ID NO: 2108074 - DNA, 25 bp, Homo sapien
tctggattcttgaccgctttcatcc

SEQ ID NO: 2108075 - DNA, 25 bp, Homo sapien
atgccttttcccacgaataatattt

SEQ ID NO: 2108076 - DNA, 25 bp, Homo sapien
gaatgccttttcccacgaataatat

SEQ ID NO: 2108077 - DNA, 25 bp, Homo sapien
aatgccttttcccacgaataatatt

SEQ ID NO: 2108078 - DNA, 25 bp, Homo sapien
tatgaagattataatggaagcatac

SEQ ID NO: 2108079 - DNA, 25 bp, Homo sapien
ctttatgaagattataatggaagca

SEQ ID NO: 2108080 - DNA, 25 bp, Homo sapien
gaagattataatggaagcatacttt

SEQ ID NO: 2108081 - DNA, 25 bp, Homo sapien
atggaagcatactttccaatatgct

SEQ ID NO: 2108082 - DNA, 25 bp, Homo sapien
ggctttccctcgttgattagggtca

SEQ ID NO: 2108083 - DNA, 25 bp, Homo sapien
ggcttttgcacattcgcagcattca

SEQ ID NO: 2108084 - DNA, 25 bp, Homo sapien
ctggtgtgctatgagggttgacttc

SEQ ID NO: 2108085 - DNA, 25 bp, Homo sapien
ctgactttttctaagggcttgcttt

SEQ ID NO: 2108086 - DNA, 25 bp, Homo sapien
acactaaaagatttcccacatttat

SEQ ID NO: 2108087 - DNA, 25 bp, Homo sapien
attcataaggtttctcccatatgaa

SEQ ID NO: 2108088 - DNA, 25 bp, Homo sapien
tacattcataaggtttctcccatat

SEQ ID NO: 2108089 - DNA, 25 bp, Homo sapien
cactaaaagatttcccacatttatt

SEQ ID NO: 2108090 - DNA, 25 bp, Homo sapien
aatagtaccgaacctgattgctgtc

SEQ ID NO: 2108091 - DNA, 25 bp, Homo sapien
tagcacttatgatgcactgtggcca

SEQ ID NO: 2108092 - DNA, 25 bp, Homo sapien
cacaatatgacaaggtacagtaccc

SEQ ID NO: 2108093 - DNA, 25 bp, Homo sapien
caaaaggatgattcaagccgggtgc

SEQ ID NO: 2108094 - DNA, 25 bp, Homo sapien
tacatgtgcaaggtctatttggcaa

SEQ ID NO: 2108095 - DNA, 25 bp, Homo sapien
gtatcccagaagagtataacctttc

SEQ ID NO: 2108096 - DNA, 25 bp, Homo sapien
tgcttgactgtaaccactgcgatct

SEQ ID NO: 2108097 - DNA, 25 bp, Homo sapien
gacatatctgagacatgactttcct

SEQ ID NO: 2108098 - DNA, 25 bp, Homo sapien
tgagatcaaacagacaaccacatgg

SEQ ID NO: 2108099 - DNA, 25 bp, Homo sapien
tgtagacatgtcaaagtgggatgat

SEQ ID NO: 2108100 - DNA, 25 bp, Homo sapien
ggtatcttccaatttaggtcacagg

SEQ ID NO: 2108101 - DNA, 25 bp, Homo sapien
taatagagggtgtagtttcttccta

SEQ ID NO: 2108102 - DNA, 25 bp, Homo sapien
taaacctataggagccatccaacct

SEQ ID NO: 2108103 - DNA, 25 bp, Homo sapien
taattaaacctataggagccatcca

SEQ ID NO: 2108104 - DNA, 25 bp, Homo sapien
ttaaacctataggagccatccaacc

SEQ ID NO: 2108105 - DNA, 25 bp, Homo sapien
aattaaacctataggagccatccaa

SEQ ID NO: 2108106 - DNA, 25 bp, Homo sapien
acaggctttcagctggaatctctga

SEQ ID NO: 2108107 - DNA, 25 bp, Homo sapien
gacagcaagatcatgtaagatgtga

SEQ ID NO: 2108108 - DNA, 25 bp, Homo sapien
tttggaaattcacagcagccaggtg

SEQ ID NO: 2108109 - DNA, 25 bp, Homo sapien
gatgggccttgttaaataccacagg

SEQ ID NO: 2108110 - DNA, 25 bp, Homo sapien
tagtagtgccaagtgaaccatgacc

SEQ ID NO: 2108111 - DNA, 25 bp, Homo sapien
aacaggtgttcagtgccctaggcag

SEQ ID NO: 2108112 - DNA, 25 bp, Homo sapien
caagttcccagactttagccaggag

SEQ ID NO: 2108113 - DNA, 25 bp, Homo sapien
tgcacatccaagtggcaagctaggc

SEQ ID NO: 2108114 - DNA, 25 bp, Homo sapien
taaagtaggctggttgttatccctg

SEQ ID NO: 2108115 - DNA, 25 bp, Homo sapien
tgaattaggacctgtagtacaatgt

SEQ ID NO: 2108116 - DNA, 25 bp, Homo sapien
tgccatgtgccacaaatgcattgtt

SEQ ID NO: 2108117 - DNA, 25 bp, Homo sapien
gatgtaacttctatagctttcacta

SEQ ID NO: 2108118 - DNA, 25 bp, Homo sapien
cctgcggactgggaaaatacttgat

SEQ ID NO: 2108119 - DNA, 25 bp, Homo sapien
gccaggtgggcagatacagcttcgt

SEQ ID NO: 2108120 - DNA, 25 bp, Homo sapien
caaattaatcccctaaaagcatgga

SEQ ID NO: 2108121 - DNA, 25 bp, Homo sapien
tagtgtgtgatttagactcgtgtac

SEQ ID NO: 2108122 - DNA, 25 bp, Homo sapien
atgaaacccttgacaaatttgcacg

SEQ ID NO: 2108123 - DNA, 25 bp, Homo sapien
gaaacccttgacaaatttgcacgtc

SEQ ID NO: 2108124 - DNA, 25 bp, Homo sapien
tgaaacccttgacaaatttgcacgt

SEQ ID NO: 2108125 - DNA, 25 bp, Homo sapien
gcgaacactgtcataaccactgaag

SEQ ID NO: 2108126 - DNA, 25 bp, Homo sapien
cgaggagcgccacatcggccacagg

SEQ ID NO: 2108127 - DNA, 25 bp, Homo sapien
ataaccactgaagcgcgggccgagg

SEQ ID NO: 2108128 - DNA, 25 bp, Homo sapien
acaggctttgttgccccgccttcaa

SEQ ID NO: 2108129 - DNA, 25 bp, Homo sapien
cagggtcctttgagccgaggctata

SEQ ID NO: 2108130 - DNA, 25 bp, Homo sapien
tatagtatgccatgatcacgcctct

SEQ ID NO: 2108131 - DNA, 25 bp, Homo sapien
tgaaaagtcatctggcgaaaacaac

SEQ ID NO: 2108132 - DNA, 25 bp, Homo sapien
caacagccatctaggttaggtggtc

SEQ ID NO: 2108133 - DNA, 25 bp, Homo sapien
gagaagtctatggatcctgcagccc

SEQ ID NO: 2108134 - DNA, 25 bp, Homo sapien
ggtgcttctgatgctcctggtctga

SEQ ID NO: 2108135 - DNA, 25 bp, Homo sapien
tgagctgacccaccaaattgtgaga

SEQ ID NO: 2108136 - DNA, 25 bp, Homo sapien
ggagacatctcagggcaactaggtg

SEQ ID NO: 2108137 - DNA, 25 bp, Homo sapien
gtggtgctactgacggcgcccctgc

SEQ ID NO: 2108138 - DNA, 25 bp, Homo sapien
gttcaccgaccctccagagcgggtc

SEQ ID NO: 2108139 - DNA, 25 bp, Homo sapien
ggaaacttggaaggcggtggtgcta

SEQ ID NO: 2108140 - DNA, 25 bp, Homo sapien
tcagaaatcccgtgccaggtccgct

SEQ ID NO: 2108141 - DNA, 25 bp, Homo sapien
ccgacagcgccgctgaggttgcttg

SEQ ID NO: 2108142 - DNA, 25 bp, Homo sapien
gatgtgctgcttctcgcgagacact

SEQ ID NO: 2108143 - DNA, 25 bp, Homo sapien
gggacgagcaacagcaccagcgtgt

SEQ ID NO: 2108144 - DNA, 25 bp, Homo sapien
accagcgtgtacagcaccaacagca

SEQ ID NO: 2108145 - DNA, 25 bp, Homo sapien
tccgggtgctggttaaagagttcgc

SEQ ID NO: 2108146 - DNA, 25 bp, Homo sapien
gatacagcgcctgccatagatgcca

SEQ ID NO: 2108147 - DNA, 25 bp, Homo sapien
tagatgccacatgggctcatacaag

SEQ ID NO: 2108148 - DNA, 25 bp, Homo sapien
catacaagtagaaaacgtccgggtg

SEQ ID NO: 2108149 - DNA, 25 bp, Homo sapien
cgtggtaagattggccgtgtccggg

SEQ ID NO: 2108150 - DNA, 25 bp, Homo sapien
ccaggacacagtggcggcgagcaga

SEQ ID NO: 2108151 - DNA, 25 bp, Homo sapien
tgaccttgttagtccgccagcggaa

SEQ ID NO: 2108152 - DNA, 25 bp, Homo sapien
gccagcggaagagggcggccgtggt

SEQ ID NO: 2108153 - DNA, 25 bp, Homo sapien
gagcaggcgcacgtccttgatgacc

SEQ ID NO: 2108154 - DNA, 25 bp, Homo sapien
acttgaggcgcgagttgtgcaccgc

SEQ ID NO: 2108155 - DNA, 25 bp, Homo sapien
ttgaggcctggatcacgcaacaggg

SEQ ID NO: 2108156 - DNA, 25 bp, Homo sapien
gcagtccctgcctagacttgaggcg

SEQ ID NO: 2108157 - DNA, 25 bp, Homo sapien
gaagcggtcgcccctctggcgggtg

SEQ ID NO: 2108158 - DNA, 25 bp, Homo sapien
tggaagcggtcgcccctctggcggg

SEQ ID NO: 2108159 - DNA, 25 bp, Homo sapien
agcggtcgcccctctggcgggtgcg

SEQ ID NO: 2108160 - DNA, 25 bp, Homo sapien
ggtggaagcggtcgcccctctggcg

SEQ ID NO: 2108161 - DNA, 25 bp, Homo sapien
tcgagcgcaccggtcaggaagaaat

SEQ ID NO: 2108162 - DNA, 25 bp, Homo sapien
gcaccggtcaggaagaaatcggcgc

SEQ ID NO: 2108163 - DNA, 25 bp, Homo sapien
gagcgcaccggtcaggaagaaatcg

SEQ ID NO: 2108164 - DNA, 25 bp, Homo sapien
accggtcaggaagaaatcggcgcgc

SEQ ID NO: 2108165 - DNA, 25 bp, Homo sapien
atagcgcagcctcaggtagcggcgc

SEQ ID NO: 2108166 - DNA, 25 bp, Homo sapien
gcagatcgcgcagccaggcttcgca

SEQ ID NO: 2108167 - DNA, 25 bp, Homo sapien
tcatagcgcagcctcaggtagcggc

SEQ ID NO: 2108168 - DNA, 25 bp, Homo sapien
cgcgccgcgcgcgaaaagcagatcg

SEQ ID NO: 2108169 - DNA, 25 bp, Homo sapien
tgcgagcgcgcgtagcccggagaag

SEQ ID NO: 2108170 - DNA, 25 bp, Homo sapien
cgagcgcgcgtagcccggagaagcg

SEQ ID NO: 2108171 - DNA, 25 bp, Homo sapien
gcgcgcgtagcccggagaagcgcag

SEQ ID NO: 2108172 - DNA, 25 bp, Homo sapien
ctgcgagcgcgcgtagcccggagaa

SEQ ID NO: 2108173 - DNA, 25 bp, Homo sapien
taggcgagcagacgcatggctggag

SEQ ID NO: 2108174 - DNA, 25 bp, Homo sapien
ctcctctccgctgcgagggtaggcg

SEQ ID NO: 2108175 - DNA, 25 bp, Homo sapien
ctgacaggtggaagggccggtcggc

SEQ ID NO: 2108176 - DNA, 25 bp, Homo sapien
ccgcgccgcgagtcatgttgagcgc

SEQ ID NO: 2108177 - DNA, 25 bp, Homo sapien
ccggatccgtgccggggacagggat

SEQ ID NO: 2108178 - DNA, 25 bp, Homo sapien
cggatccgtgccggggacagggatg

SEQ ID NO: 2108179 - DNA, 25 bp, Homo sapien
ggatccgtgccggggacagggatgg

SEQ ID NO: 2108180 - DNA, 25 bp, Homo sapien
gaacaaactattattaaacaagaca

SEQ ID NO: 2108181 - DNA, 25 bp, Homo sapien
ggattacaactgagtgaaaaatgcc

SEQ ID NO: 2108182 - DNA, 25 bp, Homo sapien
atctccagaggattacaactgagtg

SEQ ID NO: 2108183 - DNA, 25 bp, Homo sapien
tattaaacaagacaacctggatgaa

SEQ ID NO: 2108184 - DNA, 25 bp, Homo sapien
gttacttacataaagagccaccatg

SEQ ID NO: 2108185 - DNA, 25 bp, Homo sapien
taaggatgtgctcttaacacaagga

SEQ ID NO: 2108186 - DNA, 25 bp, Homo sapien
ccagggttaatcacaagtcaacata

SEQ ID NO: 2108187 - DNA, 25 bp, Homo sapien
tacacgtgtttcagagggaatgagt

SEQ ID NO: 2108188 - DNA, 25 bp, Homo sapien
ggcaccaaccacgtacccatccatt

SEQ ID NO: 2108189 - DNA, 25 bp, Homo sapien
ccatccattcttcacttatgtacca

SEQ ID NO: 2108190 - DNA, 25 bp, Homo sapien
ctttaggcaccaaccacgtacccat

SEQ ID NO: 2108191 - DNA, 25 bp, Homo sapien
cattcttcacttatgtaccagttca

SEQ ID NO: 2108192 - DNA, 25 bp, Homo sapien
actccgggggcgcctctgttagcat

SEQ ID NO: 2108193 - DNA, 25 bp, Homo sapien
aaaatgacccaagaggtgttgggtg

SEQ ID NO: 2108194 - DNA, 25 bp, Homo sapien
ggtgagggtgaagatgggaaaactc

SEQ ID NO: 2108195 - DNA, 25 bp, Homo sapien
ggagaaaatgacccaagaggtgttg

SEQ ID NO: 2108196 - DNA, 25 bp, Homo sapien
tgttggtagcaagtcaagtcccaga

SEQ ID NO: 2108197 - DNA, 25 bp, Homo sapien
gagtgcccctgttcgtggtgactga

SEQ ID NO: 2108198 - DNA, 25 bp, Homo sapien
gctcatgatattcctgctcagcaga

SEQ ID NO: 2108199 - DNA, 25 bp, Homo sapien
cagaattgcacagcagttgttggta

SEQ ID NO: 2108200 - DNA, 25 bp, Homo sapien
gtaatttaatcaagacaggactgca

SEQ ID NO: 2108201 - DNA, 25 bp, Homo sapien
cacattgatgttttcgtccagacac

SEQ ID NO: 2108202 - DNA, 25 bp, Homo sapien
ttcagcctgggaactaaagctcttc

SEQ ID NO: 2108203 - DNA, 25 bp, Homo sapien
ttgttgaaatggctccagcagtggc

SEQ ID NO: 2108204 - DNA, 25 bp, Homo sapien
gattacaaaaacgccagacagaaaa

SEQ ID NO: 2108205 - DNA, 25 bp, Homo sapien
gtatgattacaaaaacgccagacag

SEQ ID NO: 2108206 - DNA, 25 bp, Homo sapien
tatgattacaaaaacgccagacaga

SEQ ID NO: 2108207 - DNA, 25 bp, Homo sapien
ttcagttcattagggttttcccagc

SEQ ID NO: 2108208 - DNA, 25 bp, Homo sapien
tgggtgtaagctattcctctccagc

SEQ ID NO: 2108209 - DNA, 25 bp, Homo sapien
gccagcctctgatttagatgcttga

SEQ ID NO: 2108210 - DNA, 25 bp, Homo sapien
acagctggctcctgaaccaagtcca

SEQ ID NO: 2108211 - DNA, 25 bp, Homo sapien
caaagctgaggcgttgcaacagaga

SEQ ID NO: 2108212 - DNA, 25 bp, Homo sapien
caataaggaaaactgcagtaggccc

SEQ ID NO: 2108213 - DNA, 25 bp, Homo sapien
taaagacttggcgttatccacaacc

SEQ ID NO: 2108214 - DNA, 25 bp, Homo sapien
gtaaagctagccatgtgtgttcctg

SEQ ID NO: 2108215 - DNA, 25 bp, Homo sapien
ggaatgatgtgaccttctagggaac

SEQ ID NO: 2108216 - DNA, 25 bp, Homo sapien
taagtctatggattgggaatttacc

SEQ ID NO: 2108217 - DNA, 25 bp, Homo sapien
tgtgacttcatagtagggccagctc

SEQ ID NO: 2108218 - DNA, 25 bp, Homo sapien
gccagctcctcctaagttgtccttt

SEQ ID NO: 2108219 - DNA, 25 bp, Homo sapien
gaaattgatcgttcaaagtgtgact

SEQ ID NO: 2108220 - DNA, 25 bp, Homo sapien
tgtcacccagtgctagcaaaaattg

SEQ ID NO: 2108221 - DNA, 25 bp, Homo sapien
ggcttaacagaatcaccaagtgtca

SEQ ID NO: 2108222 - DNA, 25 bp, Homo sapien
tagtcgtggcccatatggaacacac

SEQ ID NO: 2108223 - DNA, 25 bp, Homo sapien
tttgaaaaggtccaaagcagacagg

SEQ ID NO: 2108224 - DNA, 25 bp, Homo sapien
caggaagggcatatggatccgagca

SEQ ID NO: 2108225 - DNA, 25 bp, Homo sapien
taaattaatagtcccctctggagtc

SEQ ID NO: 2108226 - DNA, 25 bp, Homo sapien
gatgcacacttttgtatagccctga

SEQ ID NO: 2108227 - DNA, 25 bp, Homo sapien
cctaggacacaatcacaggaagggc

SEQ ID NO: 2108228 - DNA, 25 bp, Homo sapien
tccaaactttgagccgacgaatgca

SEQ ID NO: 2108229 - DNA, 25 bp, Homo sapien
gagggctaccatatgagctgacagc

SEQ ID NO: 2108230 - DNA, 25 bp, Homo sapien
tgctgcaccagcttaacatgtgggt

SEQ ID NO: 2108231 - DNA, 25 bp, Homo sapien
tacaaggcaccaggctagaattcag

SEQ ID NO: 2108232 - DNA, 25 bp, Homo sapien
cattgaaaagtcctggtaggcagcg

SEQ ID NO: 2108233 - DNA, 25 bp, Homo sapien
taaaaatgtagttctgccacagccg

SEQ ID NO: 2108234 - DNA, 25 bp, Homo sapien
gtaggcagcgacagaactttacact

SEQ ID NO: 2108235 - DNA, 25 bp, Homo sapien
tgtgtgtctgtcatccctaggccct

SEQ ID NO: 2108236 - DNA, 25 bp, Homo sapien
taggagtctgtacctgcctgatgaa

SEQ ID NO: 2108237 - DNA, 25 bp, Homo sapien
gaaacagatcttgagggcatcaaag

SEQ ID NO: 2108238 - DNA, 25 bp, Homo sapien
taagtcttgagccaatttgtccaga

SEQ ID NO: 2108239 - DNA, 25 bp, Homo sapien
caagccacagatacctaaagaaagt

SEQ ID NO: 2108240 - DNA, 25 bp, Homo sapien
ctggagtgtggtggcgcactcagct

SEQ ID NO: 2108241 - DNA, 25 bp, Homo sapien
cactgcaaccttcccctcccaggct

SEQ ID NO: 2108242 - DNA, 25 bp, Homo sapien
agtgtggtggcgcactcagctcact

SEQ ID NO: 2108243 - DNA, 25 bp, Homo sapien
gctcactgcaaccttcccctcccag

SEQ ID NO: 2108244 - DNA, 25 bp, Homo sapien
catgtattgtaacgctaaacctgta

SEQ ID NO: 2108245 - DNA, 25 bp, Homo sapien
cctggttggtagaagctttcatgta

SEQ ID NO: 2108246 - DNA, 25 bp, Homo sapien
tattttaggtttgtggtccagctga

SEQ ID NO: 2108247 - DNA, 25 bp, Homo sapien
ggttttcatttaaggacgtctgtgc

SEQ ID NO: 2108248 - DNA, 25 bp, Homo sapien
ttgtcctctagctggcgaggagcca

SEQ ID NO: 2108249 - DNA, 25 bp, Homo sapien
tttgtcctctagctggcgaggagcc

SEQ ID NO: 2108250 - DNA, 25 bp, Homo sapien
tgtcctctagctggcgaggagccat

SEQ ID NO: 2108251 - DNA, 25 bp, Homo sapien
ccctcactgtccacttccctattcc

SEQ ID NO: 2108252 - DNA, 25 bp, Homo sapien
acttccctattccaggtacattcca

SEQ ID NO: 2108253 - DNA, 25 bp, Homo sapien
gccctcactgtccacttccctattc

SEQ ID NO: 2108254 - DNA, 25 bp, Homo sapien
cctcactgtccacttccctattcca

SEQ ID NO: 2108255 - DNA, 25 bp, Homo sapien
gcagcctttatcgttttggtcagag

SEQ ID NO: 2108256 - DNA, 25 bp, Homo sapien
cataactcatgagaccaggtgtcca

SEQ ID NO: 2108257 - DNA, 25 bp, Homo sapien
ttattctggtggatgcgtgttgcca

SEQ ID NO: 2108258 - DNA, 25 bp, Homo sapien
tgacttcagtacaaggtggtttccc

SEQ ID NO: 2108259 - DNA, 25 bp, Homo sapien
agggtccatggctttgatgctcctg

SEQ ID NO: 2108260 - DNA, 25 bp, Homo sapien
ctccaaaattcttgaggtcggaagg

SEQ ID NO: 2108261 - DNA, 25 bp, Homo sapien
cacatttcttgacccgctttgctac

SEQ ID NO: 2108262 - DNA, 25 bp, Homo sapien
gctttgatgctcctgtagtctccta

SEQ ID NO: 2108263 - DNA, 25 bp, Homo sapien
gaaggacaccaagaccacggttgat

SEQ ID NO: 2108264 - DNA, 25 bp, Homo sapien
tgagtcgcagttatggcacaccaga

SEQ ID NO: 2108265 - DNA, 25 bp, Homo sapien
tgaaatccaagaagcactgagtcgc

SEQ ID NO: 2108266 - DNA, 25 bp, Homo sapien
gattgaggatttacgagaccagcta

SEQ ID NO: 2108267 - DNA, 25 bp, Homo sapien
cataagtccttaaagggtatgaagg

SEQ ID NO: 2108268 - DNA, 25 bp, Homo sapien
aggctgagcatgaaccagaacttga

SEQ ID NO: 2108269 - DNA, 25 bp, Homo sapien
gctgaaccccagagtgtattttgac

SEQ ID NO: 2108270 - DNA, 25 bp, Homo sapien
gtaatggtgagtttatcataagtcc

SEQ ID NO: 2108271 - DNA, 25 bp, Homo sapien
gctgataagtcacgtggtagttgtt

SEQ ID NO: 2108272 - DNA, 25 bp, Homo sapien
taacgctacctagcattaaaggtcc

SEQ ID NO: 2108273 - DNA, 25 bp, Homo sapien
gaaaagtatgtgtttggctgataag

SEQ ID NO: 2108274 - DNA, 25 bp, Homo sapien
aagttttatggccatctccactatt

SEQ ID NO: 2108275 - DNA, 25 bp, Homo sapien
ttttcctgtgctagatcagcctggg

SEQ ID NO: 2108276 - DNA, 25 bp, Homo sapien
tctcaagctccagtgtagaacagtg

SEQ ID NO: 2108277 - DNA, 25 bp, Homo sapien
tatgttagctaggacttttgctctc

SEQ ID NO: 2108278 - DNA, 25 bp, Homo sapien
gtgtgactactgtgcctgacccaaa

SEQ ID NO: 2108279 - DNA, 25 bp, Homo sapien
caacggtccgcagccttagtttgcc

SEQ ID NO: 2108280 - DNA, 25 bp, Homo sapien
agcccgcggagctcgttggccagct

SEQ ID NO: 2108281 - DNA, 25 bp, Homo sapien
ttcctagagtgtggcgtgaaccctg

SEQ ID NO: 2108282 - DNA, 25 bp, Homo sapien
ctcactagctcaggcacttcctaga

SEQ ID NO: 2108283 - DNA, 25 bp, Homo sapien
tccttgtcagccttccgtctcttgg

SEQ ID NO: 2108284 - DNA, 25 bp, Homo sapien
ttctcgcgctgatcccagctgtact

SEQ ID NO: 2108285 - DNA, 25 bp, Homo sapien
cagctgtactgctttggccgctcct

SEQ ID NO: 2108286 - DNA, 25 bp, Homo sapien
tccgtctcttggagaagaagcagcc

SEQ ID NO: 2108287 - DNA, 25 bp, Homo sapien
gagacggcggctacacgactttcat

SEQ ID NO: 2108288 - DNA, 25 bp, Homo sapien
gacttcagctatccgcgttcaagag

SEQ ID NO: 2108289 - DNA, 25 bp, Homo sapien
gaatcggtcccatatacgtaactcg

SEQ ID NO: 2108290 - DNA, 25 bp, Homo sapien
cagggttcggagtcagagaaagctc

SEQ ID NO: 2108291 - DNA, 25 bp, Homo sapien
caagactgatgcgatattcattatt

SEQ ID NO: 2108292 - DNA, 25 bp, Homo sapien
acattccaagactgatgcgatattc

SEQ ID NO: 2108293 - DNA, 25 bp, Homo sapien
tccaagactgatgcgatattcatta

SEQ ID NO: 2108294 - DNA, 25 bp, Homo sapien
gactgatgcgatattcattatttct

SEQ ID NO: 2108295 - DNA, 25 bp, Homo sapien
aatatgcaactttctctaaggcaga

SEQ ID NO: 2108296 - DNA, 25 bp, Homo sapien
taaaatactgcctggtttatgccgc

SEQ ID NO: 2108297 - DNA, 25 bp, Homo sapien
tcttagagaccagagcttacctgaa

SEQ ID NO: 2108298 - DNA, 25 bp, Homo sapien
taaatggcaggtgcaatcttcttgt

SEQ ID NO: 2108299 - DNA, 25 bp, Homo sapien
tctgcaattccggaaaaacacgctg

SEQ ID NO: 2108300 - DNA, 25 bp, Homo sapien
gagaaactgttgtcctgctaccgtc

SEQ ID NO: 2108301 - DNA, 25 bp, Homo sapien
tcacgggtcccagaaaaattatgca

SEQ ID NO: 2108302 - DNA, 25 bp, Homo sapien
tgaccccgggatattggaacaatgc

SEQ ID NO: 2108303 - DNA, 25 bp, Homo sapien
gcttctctggaaatcatctagtata

SEQ ID NO: 2108304 - DNA, 25 bp, Homo sapien
catggaaaacaaataggcatcctat

SEQ ID NO: 2108305 - DNA, 25 bp, Homo sapien
gctatcaattataagatgcattcca

SEQ ID NO: 2108306 - DNA, 25 bp, Homo sapien
catctccagcatacactatagttca

SEQ ID NO: 2108307 - DNA, 25 bp, Homo sapien
tgtaggtaagagaagtcgaggaaag

SEQ ID NO: 2108308 - DNA, 25 bp, Homo sapien
ctgcagatatttgaagagactcctt

SEQ ID NO: 2108309 - DNA, 25 bp, Homo sapien
aactacccaacttcaatttcagatg

SEQ ID NO: 2108310 - DNA, 25 bp, Homo sapien
atagtggtaactacccaacttcaat

SEQ ID NO: 2108311 - DNA, 25 bp, Homo sapien
ttcagatgatgaagtactctcaaac

SEQ ID NO: 2108312 - DNA, 25 bp, Homo sapien
ccgaaaaaccctttgagcatcctca

SEQ ID NO: 2108313 - DNA, 25 bp, Homo sapien
cgaaaaaccctttgagcatcctcag

SEQ ID NO: 2108314 - DNA, 25 bp, Homo sapien
aaaaaccctttgagcatcctcagct

SEQ ID NO: 2108315 - DNA, 25 bp, Homo sapien
gaaaaaccctttgagcatcctcagc

SEQ ID NO: 2108316 - DNA, 25 bp, Homo sapien
ggtcccattgaatatctcgtttaca

SEQ ID NO: 2108317 - DNA, 25 bp, Homo sapien
caataagttgacatacttctacagc

SEQ ID NO: 2108318 - DNA, 25 bp, Homo sapien
tacttctacagcaccatccccatta

SEQ ID NO: 2108319 - DNA, 25 bp, Homo sapien
gaatatctcgtttacaataagttga

SEQ ID NO: 2108320 - DNA, 25 bp, Homo sapien
agattgaaatacagtcaataaaatc

SEQ ID NO: 2108321 - DNA, 25 bp, Homo sapien
tcccatctgtatatcagcaaagttg

SEQ ID NO: 2108322 - DNA, 25 bp, Homo sapien
agcaaagttgtagaagctgtctaca

SEQ ID NO: 2108323 - DNA, 25 bp, Homo sapien
tctccttgctttcagatacaaacat

SEQ ID NO: 2108324 - DNA, 25 bp, Homo sapien
tacatctccagatgccgtctccttg

SEQ ID NO: 2108325 - DNA, 25 bp, Homo sapien
taatggttagcacaaggccacgcac

SEQ ID NO: 2108326 - DNA, 25 bp, Homo sapien
cacgcacagggtgagcgctcaatat

SEQ ID NO: 2108327 - DNA, 25 bp, Homo sapien
gggaaaaactaatgccgtctgacca

SEQ ID NO: 2108328 - DNA, 25 bp, Homo sapien
tgaagactgaatccgtgcatctgag

SEQ ID NO: 2108329 - DNA, 25 bp, Homo sapien
ttttttctcagtgctccaaatgctg

SEQ ID NO: 2108330 - DNA, 25 bp, Homo sapien
ctcagtgctccaaatgctgcaaatg

SEQ ID NO: 2108331 - DNA, 25 bp, Homo sapien
gttattgtcttgtgcatgttttttc

SEQ ID NO: 2108332 - DNA, 25 bp, Homo sapien
tttctcagtgctccaaatgctgcaa

SEQ ID NO: 2108333 - DNA, 25 bp, Homo sapien
tgatgcccaagcttatccctgaaca

SEQ ID NO: 2108334 - DNA, 25 bp, Homo sapien
tttattggtgatgcccaagcttatc

SEQ ID NO: 2108335 - DNA, 25 bp, Homo sapien
tacatgttttattggtgatgcccaa

SEQ ID NO: 2108336 - DNA, 25 bp, Homo sapien
ttggtgatgcccaagcttatccctg

SEQ ID NO: 2108337 - DNA, 25 bp, Homo sapien
actgagtcttgtactgtgatgacag

SEQ ID NO: 2108338 - DNA, 25 bp, Homo sapien
gactgagtcttgtactgtgatgaca

SEQ ID NO: 2108339 - DNA, 25 bp, Homo sapien
tcaagactgagtcttgtactgtgat

SEQ ID NO: 2108340 - DNA, 25 bp, Homo sapien
aagactgagtcttgtactgtgatga

SEQ ID NO: 2108341 - DNA, 25 bp, Homo sapien
ggttcattgtcacgcgacaggaaaa

SEQ ID NO: 2108342 - DNA, 25 bp, Homo sapien
ggctggcagccacactaatcgtttt

SEQ ID NO: 2108343 - DNA, 25 bp, Homo sapien
gaatgttgcaccttggtatctcgga

SEQ ID NO: 2108344 - DNA, 25 bp, Homo sapien
gatgaggtccccattatgaagtgac

SEQ ID NO: 2108345 - DNA, 25 bp, Homo sapien
gacaccccatcgaggcaattggagg

SEQ ID NO: 2108346 - DNA, 25 bp, Homo sapien
gataagagatatggcggtcgcagac

SEQ ID NO: 2108347 - DNA, 25 bp, Homo sapien
gatggctaagtcttccgtgaaagga

SEQ ID NO: 2108348 - DNA, 25 bp, Homo sapien
tttggataacactgggagctagccc

SEQ ID NO: 2108349 - DNA, 25 bp, Homo sapien
taaagtgaccttgtgcgggcatcaa

SEQ ID NO: 2108350 - DNA, 25 bp, Homo sapien
cccagcttagggcattggagtttga

SEQ ID NO: 2108351 - DNA, 25 bp, Homo sapien
tctaaccccaggtaccatggtgagg

SEQ ID NO: 2108352 - DNA, 25 bp, Homo sapien
tgtccagtggagatagtcaggtatg

SEQ ID NO: 2108353 - DNA, 25 bp, Homo sapien
aaatgaatagtagtctataaaatgt

SEQ ID NO: 2108354 - DNA, 25 bp, Homo sapien
aaatgatttaatgtggcctgtgatg

SEQ ID NO: 2108355 - DNA, 25 bp, Homo sapien
taaaaatgaatagtagtctataaaa

SEQ ID NO: 2108356 - DNA, 25 bp, Homo sapien
aatgatttaatgtggcctgtgatga

SEQ ID NO: 2108357 - DNA, 25 bp, Homo sapien
tctgcccgccgcgcgttcttctggc

SEQ ID NO: 2108358 - DNA, 25 bp, Homo sapien
agccgtctgcccgccgcgcgttctt

SEQ ID NO: 2108359 - DNA, 25 bp, Homo sapien
ctcccagccgtctgcccgccgcgcg

SEQ ID NO: 2108360 - DNA, 25 bp, Homo sapien
tgcccgccgcgcgttcttctggcgg

SEQ ID NO: 2108361 - DNA, 25 bp, Homo sapien
tattgtattcctgacactgtgcgct

SEQ ID NO: 2108362 - DNA, 25 bp, Homo sapien
gtattcctgacactgtgcgctccca

SEQ ID NO: 2108363 - DNA, 25 bp, Homo sapien
gagcactattgtattcctgacactg

SEQ ID NO: 2108364 - DNA, 25 bp, Homo sapien
aggcggcgcggagcactattgtatt

SEQ ID NO: 2108365 - DNA, 25 bp, Homo sapien
tgagtccggtcggagtggtaaccgc

SEQ ID NO: 2108366 - DNA, 25 bp, Homo sapien
cttcgcgcagctggctcgcggctcc

SEQ ID NO: 2108367 - DNA, 25 bp, Homo sapien
gccgcggcccggcaatgtgccgggt

SEQ ID NO: 2108368 - DNA, 25 bp, Homo sapien
cctaaccgctcgctttcttctcttc

SEQ ID NO: 2108369 - DNA, 25 bp, Homo sapien
aaagcacagaggcagttctaatggt

SEQ ID NO: 2108370 - DNA, 25 bp, Homo sapien
acagaggcagttctaatggtaagaa

SEQ ID NO: 2108371 - DNA, 25 bp, Homo sapien
ttgttgttattatctatggaaagac

SEQ ID NO: 2108372 - DNA, 25 bp, Homo sapien
gaggcagttctaatggtaagaattt

SEQ ID NO: 2108373 - DNA, 25 bp, Homo sapien
ttcacaagcaaaggtcaaaggctga

SEQ ID NO: 2108374 - DNA, 25 bp, Homo sapien
tcaaaggctgatgccccaaattggt

SEQ ID NO: 2108375 - DNA, 25 bp, Homo sapien
tggccactcacttcacagtacaatg

SEQ ID NO: 2108376 - DNA, 25 bp, Homo sapien
tcacagtacaatgctggatttttca

SEQ ID NO: 2108377 - DNA, 25 bp, Homo sapien
cagtgttgacagggcaagtcaaacc

SEQ ID NO: 2108378 - DNA, 25 bp, Homo sapien
tgcgcacctcataggatacgggaaa

SEQ ID NO: 2108379 - DNA, 25 bp, Homo sapien
tcttctgtgcgcacctcataggata

SEQ ID NO: 2108380 - DNA, 25 bp, Homo sapien
aatgggtagtcttctgtgcgcacct

SEQ ID NO: 2108381 - DNA, 25 bp, Homo sapien
cctcataggatacgggaaaattctc

SEQ ID NO: 2108382 - DNA, 25 bp, Homo sapien
gatagaatttacaggaatttggaag

SEQ ID NO: 2108383 - DNA, 25 bp, Homo sapien
aaatatgtagtaggggatggcatcc

SEQ ID NO: 2108384 - DNA, 25 bp, Homo sapien
agaattggcccaggcaggattggca

SEQ ID NO: 2108385 - DNA, 25 bp, Homo sapien
gggatagtggaaaatctctcgctga

SEQ ID NO: 2108386 - DNA, 25 bp, Homo sapien
gtgaagacctcttcaagtactagca

SEQ ID NO: 2108387 - DNA, 25 bp, Homo sapien
tgtgaagacctcttcaagtactagc

SEQ ID NO: 2108388 - DNA, 25 bp, Homo sapien
tgaagacctcttcaagtactagcat

SEQ ID NO: 2108389 - DNA, 25 bp, Homo sapien
ccagtggagctagtttttgacaaag

SEQ ID NO: 2108390 - DNA, 25 bp, Homo sapien
tttgggtaatgacaaggccgactgc

SEQ ID NO: 2108391 - DNA, 25 bp, Homo sapien
tctggacaaccgcaaatcagtgatt

SEQ ID NO: 2108392 - DNA, 25 bp, Homo sapien
tgttaatgtgaaggagttccactct

SEQ ID NO: 2108393 - DNA, 25 bp, Homo sapien
gttctcaatccactccacctcatcc

SEQ ID NO: 2108394 - DNA, 25 bp, Homo sapien
agctggccgagctaattactttttc

SEQ ID NO: 2108395 - DNA, 25 bp, Homo sapien
ctggccgagctaattactttttcta

SEQ ID NO: 2108396 - DNA, 25 bp, Homo sapien
gaagctggccgagctaattactttt

SEQ ID NO: 2108397 - DNA, 25 bp, Homo sapien
gaaaatcttgcttagtgaatgacac

SEQ ID NO: 2108398 - DNA, 25 bp, Homo sapien
aaaatcttgcttagtgaatgacacc

SEQ ID NO: 2108399 - DNA, 25 bp, Homo sapien
aaatgaaaatcttgcttagtgaatg

SEQ ID NO: 2108400 - DNA, 25 bp, Homo sapien
atgaaaatcttgcttagtgaatgac

SEQ ID NO: 2108401 - DNA, 25 bp, Homo sapien
cttatgcaggtgaattttgtggtat

SEQ ID NO: 2108402 - DNA, 25 bp, Homo sapien
aaactatacagtatgtaaacttttg

SEQ ID NO: 2108403 - DNA, 25 bp, Homo sapien
tatatacttatgcaggtgaattttg

SEQ ID NO: 2108404 - DNA, 25 bp, Homo sapien
aagtgaaactatacagtatgtaaac

SEQ ID NO: 2108405 - DNA, 25 bp, Homo sapien
aatctatggacaccacaatatctat

SEQ ID NO: 2108406 - DNA, 25 bp, Homo sapien
tctatggacaccacaatatctatca

SEQ ID NO: 2108407 - DNA, 25 bp, Homo sapien
catttaaatctatggacaccacaat

SEQ ID NO: 2108408 - DNA, 25 bp, Homo sapien
taaatctatggacaccacaatatct

SEQ ID NO: 2108409 - DNA, 25 bp, Homo sapien
ctgtgggagcaatttgcctttggta

SEQ ID NO: 2108410 - DNA, 25 bp, Homo sapien
tagctgtgggagcaatttgcctttg

SEQ ID NO: 2108411 - DNA, 25 bp, Homo sapien
tctttagctgtgggagcaatttgcc

SEQ ID NO: 2108412 - DNA, 25 bp, Homo sapien
ctttagctgtgggagcaatttgcct

SEQ ID NO: 2108413 - DNA, 25 bp, Homo sapien
cacattagccttaggaggaagccca

SEQ ID NO: 2108414 - DNA, 25 bp, Homo sapien
gtcaaagactaagaaaggccacatt

SEQ ID NO: 2108415 - DNA, 25 bp, Homo sapien
gagtggtacagcactaactggagcc

SEQ ID NO: 2108416 - DNA, 25 bp, Homo sapien
gaagcccaagccacaaatgagtggt

SEQ ID NO: 2108417 - DNA, 25 bp, Homo sapien
tgctgctgacaggcctatggcgttt

SEQ ID NO: 2108418 - DNA, 25 bp, Homo sapien
tttcgtctgaactgtcactgctgct

SEQ ID NO: 2108419 - DNA, 25 bp, Homo sapien
tgctgacaggcctatggcgtttcat

SEQ ID NO: 2108420 - DNA, 25 bp, Homo sapien
cactgctgctgacaggcctatggcg

SEQ ID NO: 2108421 - DNA, 25 bp, Homo sapien
gaatttttgacttgatcctatacat

SEQ ID NO: 2108422 - DNA, 25 bp, Homo sapien
taatagctatcaggattaatgtggt

SEQ ID NO: 2108423 - DNA, 25 bp, Homo sapien
gctatcaggattaatgtggtgagaa

SEQ ID NO: 2108424 - DNA, 25 bp, Homo sapien
gattaatgtggtgagaatctggaag

SEQ ID NO: 2108425 - DNA, 25 bp, Homo sapien
tcagcaaagaggtaatagctatcag

SEQ ID NO: 2108426 - DNA, 25 bp, Homo sapien
gagaaggctgtggaacggtgtctgg

SEQ ID NO: 2108427 - DNA, 25 bp, Homo sapien
aaggctgtggaacggtgtctggact

SEQ ID NO: 2108428 - DNA, 25 bp, Homo sapien
gaaggctgtggaacggtgtctggac

SEQ ID NO: 2108429 - DNA, 25 bp, Homo sapien
gctgtggaacggtgtctggactggc

SEQ ID NO: 2108430 - DNA, 25 bp, Homo sapien
ccccatctgggtggcagataaatga

SEQ ID NO: 2108431 - DNA, 25 bp, Homo sapien
tatttccccatctgggtggcagata

SEQ ID NO: 2108432 - DNA, 25 bp, Homo sapien
tttccccatctgggtggcagataaa

SEQ ID NO: 2108433 - DNA, 25 bp, Homo sapien
tccccatctgggtggcagataaatg

SEQ ID NO: 2108434 - DNA, 25 bp, Homo sapien
tgggctggagcagtgaatatacttc

SEQ ID NO: 2108435 - DNA, 25 bp, Homo sapien
tcatctaggtcatagcggcaaacag

SEQ ID NO: 2108436 - DNA, 25 bp, Homo sapien
tccatgatgttgatgtagccaggct

SEQ ID NO: 2108437 - DNA, 25 bp, Homo sapien
tgtccatgtcatctaggtcatagcg

SEQ ID NO: 2108438 - DNA, 25 bp, Homo sapien
attttcatggcaatggcgttccagg

SEQ ID NO: 2108439 - DNA, 25 bp, Homo sapien
aagattctcatcaactggcccacaa

SEQ ID NO: 2108440 - DNA, 25 bp, Homo sapien
catggcaatggcgttccaggacttc

SEQ ID NO: 2108441 - DNA, 25 bp, Homo sapien
ggcgttccaggacttctactgtctt

SEQ ID NO: 2108442 - DNA, 25 bp, Homo sapien
cagaacaccatatcattcccttctt

SEQ ID NO: 2108443 - DNA, 25 bp, Homo sapien
tcatcatactctatgcctagccctt

SEQ ID NO: 2108444 - DNA, 25 bp, Homo sapien
cctctgtctcaatagcatggttcat

SEQ ID NO: 2108445 - DNA, 25 bp, Homo sapien
atcttcatcatactctatgcctagc

SEQ ID NO: 2108446 - DNA, 25 bp, Homo sapien
tgaccgtagggagatgacggtctcc

SEQ ID NO: 2108447 - DNA, 25 bp, Homo sapien
gatgacggtctccactctcactaac

SEQ ID NO: 2108448 - DNA, 25 bp, Homo sapien
gcttcagaaaggctgaccgtaggga

SEQ ID NO: 2108449 - DNA, 25 bp, Homo sapien
tgagcttcagaaaggctgaccgtag

SEQ ID NO: 2108450 - DNA, 25 bp, Homo sapien
cttggaatatcctttagctcctggc

SEQ ID NO: 2108451 - DNA, 25 bp, Homo sapien
tatcatcaatttacctggaatgccc

SEQ ID NO: 2108452 - DNA, 25 bp, Homo sapien
aactgaagctggactctaggtaggc

SEQ ID NO: 2108453 - DNA, 25 bp, Homo sapien
taggtaggctcctctcacaagagca

SEQ ID NO: 2108454 - DNA, 25 bp, Homo sapien
taaagccgaacaagcttatatccag

SEQ ID NO: 2108455 - DNA, 25 bp, Homo sapien
caagcttatatccagtatcgagtga

SEQ ID NO: 2108456 - DNA, 25 bp, Homo sapien
tatatccagtatcgagtgatttaaa

SEQ ID NO: 2108457 - DNA, 25 bp, Homo sapien
aaggcaaataaagccgaacaagctt

SEQ ID NO: 2108458 - DNA, 25 bp, Homo sapien
cacacattgcggataaatgcccagg

SEQ ID NO: 2108459 - DNA, 25 bp, Homo sapien
ggcacagctgacatgagcccattta

SEQ ID NO: 2108460 - DNA, 25 bp, Homo sapien
atgcccaggacacaggagcgacaca

SEQ ID NO: 2108461 - DNA, 25 bp, Homo sapien
ccttctgggaccttgaggatgccat

SEQ ID NO: 2108462 - DNA, 25 bp, Homo sapien
gaactcaaggagatagactgtagga

SEQ ID NO: 2108463 - DNA, 25 bp, Homo sapien
tccaacaacgtggacagaactggag

SEQ ID NO: 2108464 - DNA, 25 bp, Homo sapien
aatgggtacaaaaaggatagtcaga

SEQ ID NO: 2108465 - DNA, 25 bp, Homo sapien
gagggtgacgataattaatgggtac

SEQ ID NO: 2108466 - DNA, 25 bp, Homo sapien
gaaaacggtatatcaaagaggtatc

SEQ ID NO: 2108467 - DNA, 25 bp, Homo sapien
aagggaaccctcaaacactgtggag

SEQ ID NO: 2108468 - DNA, 25 bp, Homo sapien
ttggcttttatctaaatgacaggca

SEQ ID NO: 2108469 - DNA, 25 bp, Homo sapien
ggagaatagtttggaggattctaaa

SEQ ID NO: 2108470 - DNA, 25 bp, Homo sapien
tgtgggagatcttcgtgatcggttc

SEQ ID NO: 2108471 - DNA, 25 bp, Homo sapien
agttgcagactaaggcccaccgact

SEQ ID NO: 2108472 - DNA, 25 bp, Homo sapien
ctaaggcccaccgactgggtgggat

SEQ ID NO: 2108473 - DNA, 25 bp, Homo sapien
tcctctcaggacaagcaatgctgac

SEQ ID NO: 2108474 - DNA, 25 bp, Homo sapien
ccaggtcctggcgtagatgcataaa

SEQ ID NO: 2108475 - DNA, 25 bp, Homo sapien
cctgttttggctatgcttgaggcaa

SEQ ID NO: 2108476 - DNA, 25 bp, Homo sapien
tagataaagtccacagctagcgtgg

SEQ ID NO: 2108477 - DNA, 25 bp, Homo sapien
ggtcttcatctctaggccgtgctca

SEQ ID NO: 2108478 - DNA, 25 bp, Homo sapien
aacctgacaactgaaattgtttggc

SEQ ID NO: 2108479 - DNA, 25 bp, Homo sapien
ttaagcaaacctgacaactgaaatt

SEQ ID NO: 2108480 - DNA, 25 bp, Homo sapien
gcaaacctgacaactgaaattgttt

SEQ ID NO: 2108481 - DNA, 25 bp, Homo sapien
caacaaatagagatgtttgtcatgt

SEQ ID NO: 2108482 - DNA, 25 bp, Homo sapien
tcttggttaagaagctggacttgca

SEQ ID NO: 2108483 - DNA, 25 bp, Homo sapien
ttgcaaaccgaagatctgttcctgt

SEQ ID NO: 2108484 - DNA, 25 bp, Homo sapien
tttgttgtgtgacagcttcagcttc

SEQ ID NO: 2108485 - DNA, 25 bp, Homo sapien
cagcttctctcgtctgcttatcata

SEQ ID NO: 2108486 - DNA, 25 bp, Homo sapien
gagactggccagcaaacggttattc

SEQ ID NO: 2108487 - DNA, 25 bp, Homo sapien
cttgctctctagtgggtatctcgga

SEQ ID NO: 2108488 - DNA, 25 bp, Homo sapien
tcactcctagaatggctgagactgg

SEQ ID NO: 2108489 - DNA, 25 bp, Homo sapien
tccaagcaggactggactcctttgc

SEQ ID NO: 2108490 - DNA, 25 bp, Homo sapien
gcttcacatagcactggaggtcctc

SEQ ID NO: 2108491 - DNA, 25 bp, Homo sapien
tggtcacagaacatctcactcgagc

SEQ ID NO: 2108492 - DNA, 25 bp, Homo sapien
gactgcccatgatagcactccgagg

SEQ ID NO: 2108493 - DNA, 25 bp, Homo sapien
ggattttctaaagctgccctgactg

SEQ ID NO: 2108494 - DNA, 25 bp, Homo sapien
cttgcttttaccatggcaatcccgt

SEQ ID NO: 2108495 - DNA, 25 bp, Homo sapien
tggcaatcccgtctagagtcatggg

SEQ ID NO: 2108496 - DNA, 25 bp, Homo sapien
tccctgtctgagctatctttcctta

SEQ ID NO: 2108497 - DNA, 25 bp, Homo sapien
catggggaggattttccctgtctga

SEQ ID NO: 2108498 - DNA, 25 bp, Homo sapien
ttactgagcaaataccctgggccca

SEQ ID NO: 2108499 - DNA, 25 bp, Homo sapien
caagtttaggaacaggcactggaca

SEQ ID NO: 2108500 - DNA, 25 bp, Homo sapien
tgtgtccccaacaagcaagtttagg

SEQ ID NO: 2108501 - DNA, 25 bp, Homo sapien
gttatataaccggaaagctgcccca

SEQ ID NO: 2108502 - DNA, 25 bp, Homo sapien
tccatattgacggagagagggcccc

SEQ ID NO: 2108503 - DNA, 25 bp, Homo sapien
tgactggcacctactacaactgggc

SEQ ID NO: 2108504 - DNA, 25 bp, Homo sapien
catatggaatttggctgaagcactg

SEQ ID NO: 2108505 - DNA, 25 bp, Homo sapien
gactgagcttatcttggaaaactgg

SEQ ID NO: 2108506 - DNA, 25 bp, Homo sapien
cccgttggagttttattgctgtgca

SEQ ID NO: 2108507 - DNA, 25 bp, Homo sapien
taagggttcagaagtcacaggatga

SEQ ID NO: 2108508 - DNA, 25 bp, Homo sapien
cagcagtttctggagggcttctaag

SEQ ID NO: 2108509 - DNA, 25 bp, Homo sapien
taaccttgagttgaagctggccact

SEQ ID NO: 2108510 - DNA, 25 bp, Homo sapien
tccacaacaatctggtagagccgct

SEQ ID NO: 2108511 - DNA, 25 bp, Homo sapien
tcagtcgccttctgggagatcggga

SEQ ID NO: 2108512 - DNA, 25 bp, Homo sapien
agcagtcagtctcctggcgcgatct

SEQ ID NO: 2108513 - DNA, 25 bp, Homo sapien
ttctggcagtcagctgtcagtcgcc

SEQ ID NO: 2108514 - DNA, 25 bp, Homo sapien
ggcggtttccaggaatgatccacac

SEQ ID NO: 2108515 - DNA, 25 bp, Homo sapien
ctctgccctgagtaggcggtttcca

SEQ ID NO: 2108516 - DNA, 25 bp, Homo sapien
tctgccctgagtaggcggtttccag

SEQ ID NO: 2108517 - DNA, 25 bp, Homo sapien
catgaccagcgaactgggagaagac

SEQ ID NO: 2108518 - DNA, 25 bp, Homo sapien
ttaggactatgttcaccccaatgag

SEQ ID NO: 2108519 - DNA, 25 bp, Homo sapien
aaagagtgttagactccacaggaga

SEQ ID NO: 2108520 - DNA, 25 bp, Homo sapien
tggcaggaactgacaggccctcagt

SEQ ID NO: 2108521 - DNA, 25 bp, Homo sapien
ctcattggtggcccctctgggtgtc

SEQ ID NO: 2108522 - DNA, 25 bp, Homo sapien
agtttgctcattggtggcccctctg

SEQ ID NO: 2108523 - DNA, 25 bp, Homo sapien
gtttgctcattggtggcccctctgg

SEQ ID NO: 2108524 - DNA, 25 bp, Homo sapien
tttgctcattggtggcccctctggg

SEQ ID NO: 2108525 - DNA, 25 bp, Homo sapien
ctgttgaaatagtgcaaggccgtcc

SEQ ID NO: 2108526 - DNA, 25 bp, Homo sapien
gcaaggccgtcctttatgtcaatac

SEQ ID NO: 2108527 - DNA, 25 bp, Homo sapien
gaaatagtgcaaggccgtcctttat

SEQ ID NO: 2108528 - DNA, 25 bp, Homo sapien
tagtgcaaggccgtcctttatgtca

SEQ ID NO: 2108529 - DNA, 25 bp, Homo sapien
ccactccttggtgtttgtgaccctc

SEQ ID NO: 2108530 - DNA, 25 bp, Homo sapien
cactccttggtgtttgtgaccctca

SEQ ID NO: 2108531 - DNA, 25 bp, Homo sapien
tgagtgaaaggtcatcgcacagaac

SEQ ID NO: 2108532 - DNA, 25 bp, Homo sapien
ctggcaaggctggatacacttcccc

SEQ ID NO: 2108533 - DNA, 25 bp, Homo sapien
caggatatgcaatgtgacagggaga

SEQ ID NO: 2108534 - DNA, 25 bp, Homo sapien
aaacacctggctaagaactggcaag

SEQ ID NO: 2108535 - DNA, 25 bp, Homo sapien
aacacactcaatcttaatggaagac

SEQ ID NO: 2108536 - DNA, 25 bp, Homo sapien
acacactcaatcttaatggaagaca

SEQ ID NO: 2108537 - DNA, 25 bp, Homo sapien
tacttgcttggtgaatgaatcccac

SEQ ID NO: 2108538 - DNA, 25 bp, Homo sapien
ccggcaaaccttttttgcaggaatg

SEQ ID NO: 2108539 - DNA, 25 bp, Homo sapien
catggtcactcgctgtacttgcttg

SEQ ID NO: 2108540 - DNA, 25 bp, Homo sapien
ctggagactcaccacaccggcagtt

SEQ ID NO: 2108541 - DNA, 25 bp, Homo sapien
gacaactgctgattgttctttccag

SEQ ID NO: 2108542 - DNA, 25 bp, Homo sapien
ttcttgtcgttatccaccgtggcca

SEQ ID NO: 2108543 - DNA, 25 bp, Homo sapien
ctggcgaagagccacggagctgact

SEQ ID NO: 2108544 - DNA, 25 bp, Homo sapien
cagaactttgttccaatggtggcaa

SEQ ID NO: 2108545 - DNA, 25 bp, Homo sapien
ctcagtaataagtaggtgttaagag

SEQ ID NO: 2108546 - DNA, 25 bp, Homo sapien
ggctcatgcgacctactcgccttgg

SEQ ID NO: 2108547 - DNA, 25 bp, Homo sapien
accaccctggtcagtagtgagaact

SEQ ID NO: 2108548 - DNA, 25 bp, Homo sapien
cagtagtgagaactttgtatgtcaa

SEQ ID NO: 2108549 - DNA, 25 bp, Homo sapien
taatctttcaacctgtcccggacca

SEQ ID NO: 2108550 - DNA, 25 bp, Homo sapien
aatctttcaacctgtcccggaccat

SEQ ID NO: 2108551 - DNA, 25 bp, Homo sapien
tctttcaacctgtcccggaccatat

SEQ ID NO: 2108552 - DNA, 25 bp, Homo sapien
atctttcaacctgtcccggaccata

SEQ ID NO: 2108553 - DNA, 25 bp, Homo sapien
ctatcgttccaactttagtagatgt

SEQ ID NO: 2108554 - DNA, 25 bp, Homo sapien
aaaaatatggagctcttcatgcatt

SEQ ID NO: 2108555 - DNA, 25 bp, Homo sapien
ctctctatcgttccaactttagtag

SEQ ID NO: 2108556 - DNA, 25 bp, Homo sapien
tctatcgttccaactttagtagatg

SEQ ID NO: 2108557 - DNA, 25 bp, Homo sapien
gatgggaagcctgaatagcaagcaa

SEQ ID NO: 2108558 - DNA, 25 bp, Homo sapien
tcggcagtttcctgctctagggcag

SEQ ID NO: 2108559 - DNA, 25 bp, Homo sapien
ggatagaataatctagagccctggc

SEQ ID NO: 2108560 - DNA, 25 bp, Homo sapien
tagtaacaagcatagacaggtcaga

SEQ ID NO: 2108561 - DNA, 25 bp, Homo sapien
tcaagaactgctggagctgtttcct

SEQ ID NO: 2108562 - DNA, 25 bp, Homo sapien
gctcaagaactgctggagctgtttc

SEQ ID NO: 2108563 - DNA, 25 bp, Homo sapien
tggtgccgctcaagaactgctggag

SEQ ID NO: 2108564 - DNA, 25 bp, Homo sapien
ccctggtgccgctcaagaactgctg

SEQ ID NO: 2108565 - DNA, 25 bp, Homo sapien
gtcaaaggcatccacggagtaggac

SEQ ID NO: 2108566 - DNA, 25 bp, Homo sapien
ggtctagcgaccaatccaaaccatt

SEQ ID NO: 2108567 - DNA, 25 bp, Homo sapien
atagtcaaaggcatccacggagtag

SEQ ID NO: 2108568 - DNA, 25 bp, Homo sapien
taatagaagattttgtggtctagcg

SEQ ID NO: 2108569 - DNA, 25 bp, Homo sapien
tatgaaaacaatagtggcagcactg

SEQ ID NO: 2108570 - DNA, 25 bp, Homo sapien
tttaggcacctcctggtagaatagg

SEQ ID NO: 2108571 - DNA, 25 bp, Homo sapien
ggagaggcgccttactagtcacaaa

SEQ ID NO: 2108572 - DNA, 25 bp, Homo sapien
gaagacttcttcacatgaggcgagg

SEQ ID NO: 2108573 - DNA, 25 bp, Homo sapien
caggatctaaacgaatcactcttcc

SEQ ID NO: 2108574 - DNA, 25 bp, Homo sapien
tcttcctccattgtaacaggccacc

SEQ ID NO: 2108575 - DNA, 25 bp, Homo sapien
acaggatctaaacgaatcactcttc

SEQ ID NO: 2108576 - DNA, 25 bp, Homo sapien
gatctaaacgaatcactcttcctcc

SEQ ID NO: 2108577 - DNA, 25 bp, Homo sapien
accagcttcaggttgcctcaaaaga

SEQ ID NO: 2108578 - DNA, 25 bp, Homo sapien
catgaagttgttttatcaacaggca

SEQ ID NO: 2108579 - DNA, 25 bp, Homo sapien
caacaggcaacttcacagtttgaag

SEQ ID NO: 2108580 - DNA, 25 bp, Homo sapien
cgggcgcaggtcacatacatttcag

SEQ ID NO: 2108581 - DNA, 25 bp, Homo sapien
cccgcataggagtagggagcaattc

SEQ ID NO: 2108582 - DNA, 25 bp, Homo sapien
tcatcccgcataggagtagggagca

SEQ ID NO: 2108583 - DNA, 25 bp, Homo sapien
gggagcaattcctttgacccccaga

SEQ ID NO: 2108584 - DNA, 25 bp, Homo sapien
tagggagcaattcctttgaccccca

SEQ ID NO: 2108585 - DNA, 25 bp, Homo sapien
tctaactagattgaaatttcaggcc

SEQ ID NO: 2108586 - DNA, 25 bp, Homo sapien
gattgacagttgaacgattcttcgc

SEQ ID NO: 2108587 - DNA, 25 bp, Homo sapien
gaatcaagaagagatatgtacccac

SEQ ID NO: 2108588 - DNA, 25 bp, Homo sapien
gattcttcgcccttctatagtacct

SEQ ID NO: 2108589 - DNA, 25 bp, Homo sapien
tgtttgagtctaaccctccagccgt

SEQ ID NO: 2108590 - DNA, 25 bp, Homo sapien
tacttttacatccagtaggtggcag

SEQ ID NO: 2108591 - DNA, 25 bp, Homo sapien
tggattttgacagcatgtttgagtc

SEQ ID NO: 2108592 - DNA, 25 bp, Homo sapien
gaaatatctatgtaggttagttagc

SEQ ID NO: 2108593 - DNA, 25 bp, Homo sapien
caacaacagtctgaggaacttgtgg

SEQ ID NO: 2108594 - DNA, 25 bp, Homo sapien
tgggtaggcacaacagcagaataga

SEQ ID NO: 2108595 - DNA, 25 bp, Homo sapien
gaacaacaaccagtagatgccaaga

SEQ ID NO: 2108596 - DNA, 25 bp, Homo sapien
taatctgacaagcactttaaagcag

SEQ ID NO: 2108597 - DNA, 25 bp, Homo sapien
ctgtgttgggaaagcatgtactggt

SEQ ID NO: 2108598 - DNA, 25 bp, Homo sapien
ggcacccttagtgttagcgcctggg

SEQ ID NO: 2108599 - DNA, 25 bp, Homo sapien
catgtcagtcttgctgccctccaaa

SEQ ID NO: 2108600 - DNA, 25 bp, Homo sapien
acccaagaaatagggccaccaggtg

SEQ ID NO: 2108601 - DNA, 25 bp, Homo sapien
ccaggacgattgcaggtggccaatt

SEQ ID NO: 2108602 - DNA, 25 bp, Homo sapien
gggctgagcaagtcaatctggcttc

SEQ ID NO: 2108603 - DNA, 25 bp, Homo sapien
agtcaatctggcttccagaccatgg

SEQ ID NO: 2108604 - DNA, 25 bp, Homo sapien
agagagtgaccaggacgattgcagg

SEQ ID NO: 2108605 - DNA, 25 bp, Homo sapien
catggtcagggttaatgttagggtt

SEQ ID NO: 2108606 - DNA, 25 bp, Homo sapien
tataattaatgggagggtcaggttc

SEQ ID NO: 2108607 - DNA, 25 bp, Homo sapien
ggttggttaactagctgactgcagc

SEQ ID NO: 2108608 - DNA, 25 bp, Homo sapien
cagaattaggtgtgggttagaaaca

SEQ ID NO: 2108609 - DNA, 25 bp, Homo sapien
ggcaaatattgcctggctaccattg

SEQ ID NO: 2108610 - DNA, 25 bp, Homo sapien
tgtggtgaagtggaacataaactgc

SEQ ID NO: 2108611 - DNA, 25 bp, Homo sapien
gctccttattcagcttgttgtgaat

SEQ ID NO: 2108612 - DNA, 25 bp, Homo sapien
aatgttgtctaagagccaaggcctg

SEQ ID NO: 2108613 - DNA, 25 bp, Homo sapien
gcgggtgtttctgatagaagatttc

SEQ ID NO: 2108614 - DNA, 25 bp, Homo sapien
ttaggcctgagaggctacaatggag

SEQ ID NO: 2108615 - DNA, 25 bp, Homo sapien
ggctacaatggagggcgggtgtttc

SEQ ID NO: 2108616 - DNA, 25 bp, Homo sapien
tggagggcgggtgtttctgatagaa

SEQ ID NO: 2108617 - DNA, 25 bp, Homo sapien
cttttggcagtagagggttggtcct

SEQ ID NO: 2108618 - DNA, 25 bp, Homo sapien
cagtagagggttggtccttactttg

SEQ ID NO: 2108619 - DNA, 25 bp, Homo sapien
cttactttgactgaccctcttatca

SEQ ID NO: 2108620 - DNA, 25 bp, Homo sapien
gagggttggtccttactttgactga

SEQ ID NO: 2108621 - DNA, 25 bp, Homo sapien
gcctgagagagaggttagcacccat

SEQ ID NO: 2108622 - DNA, 25 bp, Homo sapien
cagaagttcgtgctctgatggccgg

SEQ ID NO: 2108623 - DNA, 25 bp, Homo sapien
tagcacccatagttcttccgcgaga

SEQ ID NO: 2108624 - DNA, 25 bp, Homo sapien
tttccgaccagtgagaacgtctgag

SEQ ID NO: 2108625 - DNA, 25 bp, Homo sapien
gtccaacagagaaacgcggatgggc

SEQ ID NO: 2108626 - DNA, 25 bp, Homo sapien
cgccagtctctggtgcaacagatga

SEQ ID NO: 2108627 - DNA, 25 bp, Homo sapien
agacccgccagtctctggtgcaaca

SEQ ID NO: 2108628 - DNA, 25 bp, Homo sapien
ggatgggctcagagcttctttccag

SEQ ID NO: 2108629 - DNA, 25 bp, Homo sapien
actgacattggacacggaacaagag

SEQ ID NO: 2108630 - DNA, 25 bp, Homo sapien
ctgacattggacacggaacaagaga

SEQ ID NO: 2108631 - DNA, 25 bp, Homo sapien
tgacattggacacggaacaagagac

SEQ ID NO: 2108632 - DNA, 25 bp, Homo sapien
aacccgcctccagattgttttcctg

SEQ ID NO: 2108633 - DNA, 25 bp, Homo sapien
tgaattgtggctgcgcagagactcc

SEQ ID NO: 2108634 - DNA, 25 bp, Homo sapien
tcagcgcgttcaatcaatcttagtg

SEQ ID NO: 2108635 - DNA, 25 bp, Homo sapien
tcttagtgttttgaacccgcctcca

SEQ ID NO: 2108636 - DNA, 25 bp, Homo sapien
aaacaatcatatgcacacatacggg

SEQ ID NO: 2108637 - DNA, 25 bp, Homo sapien
ggcggtctggataaaagccactacc

SEQ ID NO: 2108638 - DNA, 25 bp, Homo sapien
gaagggtcggtctggaatctgacct

SEQ ID NO: 2108639 - DNA, 25 bp, Homo sapien
atttctataccagggttcattccgg

SEQ ID NO: 2108640 - DNA, 25 bp, Homo sapien
acaggtgtgtaccactaggcccggc

SEQ ID NO: 2108641 - DNA, 25 bp, Homo sapien
caggtgtgtaccactaggcccggct

SEQ ID NO: 2108642 - DNA, 25 bp, Homo sapien
gtgtgtaccactaggcccggctaat

SEQ ID NO: 2108643 - DNA, 25 bp, Homo sapien
aggtgtgtaccactaggcccggcta

SEQ ID NO: 2108644 - DNA, 25 bp, Homo sapien
aacatcgtatgttctcacttttttg

SEQ ID NO: 2108645 - DNA, 25 bp, Homo sapien
catcgtatgttctcacttttttgtt

SEQ ID NO: 2108646 - DNA, 25 bp, Homo sapien
aaacatcgtatgttctcactttttt

SEQ ID NO: 2108647 - DNA, 25 bp, Homo sapien
cgtatgttctcacttttttgttctg

SEQ ID NO: 2108648 - DNA, 25 bp, Homo sapien
gcaaagtaggctggtcaccttaggg

SEQ ID NO: 2108649 - DNA, 25 bp, Homo sapien
aggattcgggcatcaccccgaataa

SEQ ID NO: 2108650 - DNA, 25 bp, Homo sapien
aggcagatcgcgactcctaggcatc

SEQ ID NO: 2108651 - DNA, 25 bp, Homo sapien
gcatcaccccgaataacaatcgtta

SEQ ID NO: 2108652 - DNA, 25 bp, Homo sapien
accacgactggccttaattccaatt

SEQ ID NO: 2108653 - DNA, 25 bp, Homo sapien
cacgactggccttaattccaattaa

SEQ ID NO: 2108654 - DNA, 25 bp, Homo sapien
ccacgactggccttaattccaatta

SEQ ID NO: 2108655 - DNA, 25 bp, Homo sapien
ttttggacgtctggaacatgcgact

SEQ ID NO: 2108656 - DNA, 25 bp, Homo sapien
tcccatggttatgacaaggaccccg

SEQ ID NO: 2108657 - DNA, 25 bp, Homo sapien
gagttttgttcctgcaccattggga

SEQ ID NO: 2108658 - DNA, 25 bp, Homo sapien
taccaggatgaaagagtggtcccgc

SEQ ID NO: 2108659 - DNA, 25 bp, Homo sapien
gcgattggctgggaactgtatccac

SEQ ID NO: 2108660 - DNA, 25 bp, Homo sapien
gaaagactagcggaagctctgcctc

SEQ ID NO: 2108661 - DNA, 25 bp, Homo sapien
tcaaaatggcgacgacgagaaggga

SEQ ID NO: 2108662 - DNA, 25 bp, Homo sapien
ctattagccaattcggcagggcccg

SEQ ID NO: 2108663 - DNA, 25 bp, Homo sapien
ttctcggcccgggctgtcaaggaag

SEQ ID NO: 2108664 - DNA, 25 bp, Homo sapien
cgggctgtcaaggaagggctcccag

SEQ ID NO: 2108665 - DNA, 25 bp, Homo sapien
gctgtcaaggaagggctcccagaca

SEQ ID NO: 2108666 - DNA, 25 bp, Homo sapien
cttctcggcccgggctgtcaaggaa

SEQ ID NO: 2108667 - DNA, 25 bp, Homo sapien
ctccgcccccacgaccagcgtcgac

SEQ ID NO: 2108668 - DNA, 25 bp, Homo sapien
cgcccccacgaccagcgtcgacgct

SEQ ID NO: 2108669 - DNA, 25 bp, Homo sapien
cccccacgaccagcgtcgacgctca

SEQ ID NO: 2108670 - DNA, 25 bp, Homo sapien
ccccacgaccagcgtcgacgctcac

SEQ ID NO: 2108671 - DNA, 25 bp, Homo sapien
gatgtagccgacacagtgatccaca

SEQ ID NO: 2108672 - DNA, 25 bp, Homo sapien
taaacaccagagtaacacagagcag

SEQ ID NO: 2108673 - DNA, 25 bp, Homo sapien
gaatatttccccatggaccgataaa

SEQ ID NO: 2108674 - DNA, 25 bp, Homo sapien
tctcctatgcacaaactcaaagtcg

SEQ ID NO: 2108675 - DNA, 25 bp, Homo sapien
caggtgggcaagagttagaatcaca

SEQ ID NO: 2108676 - DNA, 25 bp, Homo sapien
ggtgggcaagagttagaatcacaca

SEQ ID NO: 2108677 - DNA, 25 bp, Homo sapien
cccaggtgggcaagagttagaatca

SEQ ID NO: 2108678 - DNA, 25 bp, Homo sapien
ctggcgtctgagagcacaaaaacct

SEQ ID NO: 2108679 - DNA, 25 bp, Homo sapien
tgctaccatgatctgccagcctggg

SEQ ID NO: 2108680 - DNA, 25 bp, Homo sapien
tgccagcctgggtgatgcttcctgc

SEQ ID NO: 2108681 - DNA, 25 bp, Homo sapien
gatctgccagcctgggtgatgcttc

SEQ ID NO: 2108682 - DNA, 25 bp, Homo sapien
cctgggtgatgcttcctgcagggac

SEQ ID NO: 2108683 - DNA, 25 bp, Homo sapien
cagccgctggctccgtttcacttcc

SEQ ID NO: 2108684 - DNA, 25 bp, Homo sapien
cgctggctccgtttcacttcccagc

SEQ ID NO: 2108685 - DNA, 25 bp, Homo sapien
tcagccgctggctccgtttcacttc

SEQ ID NO: 2108686 - DNA, 25 bp, Homo sapien
gccgctggctccgtttcacttccca

SEQ ID NO: 2108687 - DNA, 25 bp, Homo sapien
tttaattggccaccaaagcactctg

SEQ ID NO: 2108688 - DNA, 25 bp, Homo sapien
tatatgaggatcttcacaaaatgag

SEQ ID NO: 2108689 - DNA, 25 bp, Homo sapien
tatcctgaactctcttgacatccaa

SEQ ID NO: 2108690 - DNA, 25 bp, Homo sapien
ctatctaaactcaggaagggaacat

SEQ ID NO: 2108691 - DNA, 25 bp, Homo sapien
tcctcccagtacccatggagccaag

SEQ ID NO: 2108692 - DNA, 25 bp, Homo sapien
ccatggagccaagatccagaggggt

SEQ ID NO: 2108693 - DNA, 25 bp, Homo sapien
ctgcaccaccagtatgtcgcccagc

SEQ ID NO: 2108694 - DNA, 25 bp, Homo sapien
gcaccaccagtatgtcgcccagctt

SEQ ID NO: 2108695 - DNA, 25 bp, Homo sapien
cacagtgtgtcaaagccagagtcat

SEQ ID NO: 2108696 - DNA, 25 bp, Homo sapien
gattgagatctacatggaaggcggc

SEQ ID NO: 2108697 - DNA, 25 bp, Homo sapien
ggtttcaggactacatcgatgccca

SEQ ID NO: 2108698 - DNA, 25 bp, Homo sapien
caaggtgttcgtggtcagcaagtcc

SEQ ID NO: 2108699 - DNA, 25 bp, Homo sapien
ctcagccggccaatcgaggagcagg

SEQ ID NO: 2108700 - DNA, 25 bp, Homo sapien
agccggccaatcgaggagcagggac

SEQ ID NO: 2108701 - DNA, 25 bp, Homo sapien
cagccggccaatcgaggagcaggga

SEQ ID NO: 2108702 - DNA, 25 bp, Homo sapien
tcagccggccaatcgaggagcaggg

SEQ ID NO: 2108703 - DNA, 25 bp, Homo sapien
gggtaattaagctctacctcctaga

SEQ ID NO: 2108704 - DNA, 25 bp, Homo sapien
acctcctagaggagggagtatctac

SEQ ID NO: 2108705 - DNA, 25 bp, Homo sapien
ggagaattcggcaatagctgacaaa

SEQ ID NO: 2108706 - DNA, 25 bp, Homo sapien
taagaccagcccacagtcaaaagga

SEQ ID NO: 2108707 - DNA, 25 bp, Homo sapien
cagaagtgagatagtgaaatgccct

SEQ ID NO: 2108708 - DNA, 25 bp, Homo sapien
tctggtgatgttaaccatgatcacc

SEQ ID NO: 2108709 - DNA, 25 bp, Homo sapien
tgatcacctagttaaggtgctgtct

SEQ ID NO: 2108710 - DNA, 25 bp, Homo sapien
tgatcatatcacagaagagtacatg

SEQ ID NO: 2108711 - DNA, 25 bp, Homo sapien
cttgccgacactagcagctctttca

SEQ ID NO: 2108712 - DNA, 25 bp, Homo sapien
ttgccgacactagcagctctttcat

SEQ ID NO: 2108713 - DNA, 25 bp, Homo sapien
tagtcgtggtctcggctgcggttct

SEQ ID NO: 2108714 - DNA, 25 bp, Homo sapien
catcatcctgcgagcggtcagtggc

SEQ ID NO: 2108715 - DNA, 25 bp, Homo sapien
tatgaacggtagtccatgtcccggt

SEQ ID NO: 2108716 - DNA, 25 bp, Homo sapien
cctggctgccatactcgcgaggata

SEQ ID NO: 2108717 - DNA, 25 bp, Homo sapien
ggccgctggctctgtgaggcaggca

SEQ ID NO: 2108718 - DNA, 25 bp, Homo sapien
aaagccagggatgtgcgggctccgg

SEQ ID NO: 2108719 - DNA, 25 bp, Homo sapien
agccagggatgtgcgggctccggct

SEQ ID NO: 2108720 - DNA, 25 bp, Homo sapien
cctaggagctggccgctggctctgt

SEQ ID NO: 2108721 - DNA, 25 bp, Homo sapien
gctgagtctcggagcccggggaggc

SEQ ID NO: 2108722 - DNA, 25 bp, Homo sapien
ctgagtctcggagcccggggaggcc

SEQ ID NO: 2108723 - DNA, 25 bp, Homo sapien
agtctcggagcccggggaggcctcg

SEQ ID NO: 2108724 - DNA, 25 bp, Homo sapien
ctcggagcccggggaggcctcgtag

SEQ ID NO: 2108725 - DNA, 25 bp, Homo sapien
tcctccccttgctcggtccgatagt

SEQ ID NO: 2108726 - DNA, 25 bp, Homo sapien
cccttgctcggtccgatagtcctgg

SEQ ID NO: 2108727 - DNA, 25 bp, Homo sapien
cctggtcccgatagtcgccgtctcg

SEQ ID NO: 2108728 - DNA, 25 bp, Homo sapien
tggtcccgatagtcgccgtctcggg

SEQ ID NO: 2108729 - DNA, 25 bp, Homo sapien
gtggctgcctgtggcagcatcctca

SEQ ID NO: 2108730 - DNA, 25 bp, Homo sapien
gtggcagcatcctcagcatgacgat

SEQ ID NO: 2108731 - DNA, 25 bp, Homo sapien
ggcagcatcctcagcatgacgatgt

SEQ ID NO: 2108732 - DNA, 25 bp, Homo sapien
cagcatcctcagcatgacgatgtta

SEQ ID NO: 2108733 - DNA, 25 bp, Homo sapien
aggactgctcttctcccgcccatac

SEQ ID NO: 2108734 - DNA, 25 bp, Homo sapien
gccaatgtcccttggccaagccggc

SEQ ID NO: 2108735 - DNA, 25 bp, Homo sapien
caatagccagcactggcccggtgag

SEQ ID NO: 2108736 - DNA, 25 bp, Homo sapien
atacccaccactaccagacacccat

SEQ ID NO: 2108737 - DNA, 25 bp, Homo sapien
cacagagcaaggtaaagcatggcag

SEQ ID NO: 2108738 - DNA, 25 bp, Homo sapien
ggctggaggcctctggatcccgagg

SEQ ID NO: 2108739 - DNA, 25 bp, Homo sapien
tctttcgcagcttttccctgagtga

SEQ ID NO: 2108740 - DNA, 25 bp, Homo sapien
tcttgactttcagccccagacttgc

SEQ ID NO: 2108741 - DNA, 25 bp, Homo sapien
ctatacggggagatacagagtaggg

SEQ ID NO: 2108742 - DNA, 25 bp, Homo sapien
tcccgtgcttgcacgccgtgcgact

SEQ ID NO: 2108743 - DNA, 25 bp, Homo sapien
tgcacgccgtgcgactgcagctggc

SEQ ID NO: 2108744 - DNA, 25 bp, Homo sapien
gcatcagccgaacctcccgtgcttg

SEQ ID NO: 2108745 - DNA, 25 bp, Homo sapien
gaacctcccgtgcttgcacgccgtg

SEQ ID NO: 2108746 - DNA, 25 bp, Homo sapien
tcaaaagaataaccgttaggatgca

SEQ ID NO: 2108747 - DNA, 25 bp, Homo sapien
cttgggggggcatgcttaatgttca

SEQ ID NO: 2108748 - DNA, 25 bp, Homo sapien
ctttagaggcagatacatggggagg

SEQ ID NO: 2108749 - DNA, 25 bp, Homo sapien
taaccgttaggatgcataggaggat

SEQ ID NO: 2108750 - DNA, 25 bp, Homo sapien
ggggtgatgcagagcaagacctaca

SEQ ID NO: 2108751 - DNA, 25 bp, Homo sapien
cacctccttgtggagagagagaccc

SEQ ID NO: 2108752 - DNA, 25 bp, Homo sapien
gacctacatgcaaccaagattccag

SEQ ID NO: 2108753 - DNA, 25 bp, Homo sapien
ggttgaggcctcaggatagcatgtc

SEQ ID NO: 2108754 - DNA, 25 bp, Homo sapien
acagccacaaacagtccaggttccc

SEQ ID NO: 2108755 - DNA, 25 bp, Homo sapien
gaggtaagaatcaatgggtgcctgg

SEQ ID NO: 2108756 - DNA, 25 bp, Homo sapien
aagaatcaatgggtgcctgggagaa

SEQ ID NO: 2108757 - DNA, 25 bp, Homo sapien
agccacaaacagtccaggttcccct

SEQ ID NO: 2108758 - DNA, 25 bp, Homo sapien
tggcttccatccatcgtgtagcgtc

SEQ ID NO: 2108759 - DNA, 25 bp, Homo sapien
gactaaactcgacgaaggcgaagcc

SEQ ID NO: 2108760 - DNA, 25 bp, Homo sapien
catccatcgtgtagcgtcctgcaag

SEQ ID NO: 2108761 - DNA, 25 bp, Homo sapien
ctgcaagtgactaaactcgacgaag

SEQ ID NO: 2108762 - DNA, 25 bp, Homo sapien
gggagcgctcgattacaaagtagta

SEQ ID NO: 2108763 - DNA, 25 bp, Homo sapien
ccataagaatcaggcgatggggagc

SEQ ID NO: 2108764 - DNA, 25 bp, Homo sapien
ggcagcactagtgcctggtggtagg

SEQ ID NO: 2108765 - DNA, 25 bp, Homo sapien
ttctctgaacgctcagctgggagag

SEQ ID NO: 2108766 - DNA, 25 bp, Homo sapien
ggtccttgccgagaagacagagctg

SEQ ID NO: 2108767 - DNA, 25 bp, Homo sapien
ggtctcggaggtcccaaagctgctg

SEQ ID NO: 2108768 - DNA, 25 bp, Homo sapien
gctgactgtgcacaggtccttgccg

SEQ ID NO: 2108769 - DNA, 25 bp, Homo sapien
ctgagttgggatcccgtgccaggct

SEQ ID NO: 2108770 - DNA, 25 bp, Homo sapien
tgcctctgccgggatcccccattct

SEQ ID NO: 2108771 - DNA, 25 bp, Homo sapien
ctgcctctgccgggatcccccattc

SEQ ID NO: 2108772 - DNA, 25 bp, Homo sapien
cctctgccgggatcccccattctac

SEQ ID NO: 2108773 - DNA, 25 bp, Homo sapien
gcctctgccgggatcccccattcta

SEQ ID NO: 2108774 - DNA, 25 bp, Homo sapien
ccatgaggccgtcttcccatggatg

SEQ ID NO: 2108775 - DNA, 25 bp, Homo sapien
gaaagagccatttcgaacagatgga

SEQ ID NO: 2108776 - DNA, 25 bp, Homo sapien
gcgcaggtgcgctagtgctggagaa

SEQ ID NO: 2108777 - DNA, 25 bp, Homo sapien
ggaagtttctgccatgaggccgtct

SEQ ID NO: 2108778 - DNA, 25 bp, Homo sapien
acacccagggccaggactacacagg

SEQ ID NO: 2108779 - DNA, 25 bp, Homo sapien
tcggccctgacactgccaggccaca

SEQ ID NO: 2108780 - DNA, 25 bp, Homo sapien
cagggccaggactacacaggctaca

SEQ ID NO: 2108781 - DNA, 25 bp, Homo sapien
acccagggccaggactacacaggct

SEQ ID NO: 2108782 - DNA, 25 bp, Homo sapien
agaagagagtgagcgagcccttcag

SEQ ID NO: 2108783 - DNA, 25 bp, Homo sapien
taggagaagagagtgagcgagccct

SEQ ID NO: 2108784 - DNA, 25 bp, Homo sapien
cgtttcagcataggagaagagagtg

SEQ ID NO: 2108785 - DNA, 25 bp, Homo sapien
agcataggagaagagagtgagcgag

SEQ ID NO: 2108786 - DNA, 25 bp, Homo sapien
cacagccagtcctcattgatcttgg

SEQ ID NO: 2108787 - DNA, 25 bp, Homo sapien
cagccagtcctcattgatcttgggc

SEQ ID NO: 2108788 - DNA, 25 bp, Homo sapien
agtgcatcgacaccttctggcccag

SEQ ID NO: 2108789 - DNA, 25 bp, Homo sapien
gggtcactgtagtgcatcgacacct

SEQ ID NO: 2108790 - DNA, 25 bp, Homo sapien
gggcctctacaaactgtggaatcac

SEQ ID NO: 2108791 - DNA, 25 bp, Homo sapien
cagggcacagctaaaggttcaccca

SEQ ID NO: 2108792 - DNA, 25 bp, Homo sapien
caggcttgagctacctgctatgggc

SEQ ID NO: 2108793 - DNA, 25 bp, Homo sapien
tgctatgggctctcagaacgctctg

SEQ ID NO: 2108794 - DNA, 25 bp, Homo sapien
ggaggatcttatgcttaagctgagc

SEQ ID NO: 2108795 - DNA, 25 bp, Homo sapien
aacaatggactttccgaaactggtg

SEQ ID NO: 2108796 - DNA, 25 bp, Homo sapien
attgttatcggagggaacaatggac

SEQ ID NO: 2108797 - DNA, 25 bp, Homo sapien
gaagccagttaggtaatggaggatc

SEQ ID NO: 2108798 - DNA, 25 bp, Homo sapien
tcggtctgcatggaccatccagcag

SEQ ID NO: 2108799 - DNA, 25 bp, Homo sapien
ggcaggtcggtctgcatggaccatc

SEQ ID NO: 2108800 - DNA, 25 bp, Homo sapien
caggggcagatgcagcatgaagagg

SEQ ID NO: 2108801 - DNA, 25 bp, Homo sapien
catggcctaatagcacaggggcaga

SEQ ID NO: 2108802 - DNA, 25 bp, Homo sapien
ctgacttgggcacgccacatttgaa

SEQ ID NO: 2108803 - DNA, 25 bp, Homo sapien
ttgaagcacttctctcggcgtttga

SEQ ID NO: 2108804 - DNA, 25 bp, Homo sapien
acttgggcacgccacatttgaagca

SEQ ID NO: 2108805 - DNA, 25 bp, Homo sapien
gaagcacttctctcggcgtttgaag

SEQ ID NO: 2108806 - DNA, 25 bp, Homo sapien
tgtcattggcgttctctgagcttgg

SEQ ID NO: 2108807 - DNA, 25 bp, Homo sapien
tggctccgagccctgtgacagggct

SEQ ID NO: 2108808 - DNA, 25 bp, Homo sapien
tgatccagcctcgtgccgaggggca

SEQ ID NO: 2108809 - DNA, 25 bp, Homo sapien
ggccaggactccctgggcctggtag

SEQ ID NO: 2108810 - DNA, 25 bp, Homo sapien
ttgcaactgccgcttccctcactgc

SEQ ID NO: 2108811 - DNA, 25 bp, Homo sapien
ctctgcttggcggtccaggtgccag

SEQ ID NO: 2108812 - DNA, 25 bp, Homo sapien
tgcttggcggtccaggtgccagcct

SEQ ID NO: 2108813 - DNA, 25 bp, Homo sapien
tcaactctgcttggcggtccaggtg

SEQ ID NO: 2108814 - DNA, 25 bp, Homo sapien
tgtgggttcaggttgcgcaaaatga

SEQ ID NO: 2108815 - DNA, 25 bp, Homo sapien
aaagccgcggttcagttgggtctgc

SEQ ID NO: 2108816 - DNA, 25 bp, Homo sapien
tgtcctttatgacgcgcacgttgga

SEQ ID NO: 2108817 - DNA, 25 bp, Homo sapien
gaatccatggtgctgtgtgggttca

SEQ ID NO: 2108818 - DNA, 25 bp, Homo sapien
ccgtcgatagtgagtggtgggtgca

SEQ ID NO: 2108819 - DNA, 25 bp, Homo sapien
ctcttagaacccttggcaaactcaa

SEQ ID NO: 2108820 - DNA, 25 bp, Homo sapien
gaacccttggcaaactcaacattga

SEQ ID NO: 2108821 - DNA, 25 bp, Homo sapien
atggtcttgccgtcgatagtgagtg

SEQ ID NO: 2108822 - DNA, 25 bp, Homo sapien
ccactgggccgcagcaatggcagtg

SEQ ID NO: 2108823 - DNA, 25 bp, Homo sapien
tgtgagatggcccactgggccgcag

SEQ ID NO: 2108824 - DNA, 25 bp, Homo sapien
ggcagcactgatgcgactgccttca

SEQ ID NO: 2108825 - DNA, 25 bp, Homo sapien
gatgcgactgccttcattggaggcc

SEQ ID NO: 2108826 - DNA, 25 bp, Homo sapien
gcaattgggaagaaagctgcggtga

SEQ ID NO: 2108827 - DNA, 25 bp, Homo sapien
tacatgagcgcatgggaggcaattg

SEQ ID NO: 2108828 - DNA, 25 bp, Homo sapien
aatggcgtcgtacatgagcgcatgg

SEQ ID NO: 2108829 - DNA, 25 bp, Homo sapien
aggcacaatggcgtcgtacatgagc

SEQ ID NO: 2108830 - DNA, 25 bp, Homo sapien
gcatagagggaagactctgtgccct

SEQ ID NO: 2108831 - DNA, 25 bp, Homo sapien
tttggttccagtgatgccagggccc

SEQ ID NO: 2108832 - DNA, 25 bp, Homo sapien
ccttgaggtagccatgggcatagag

SEQ ID NO: 2108833 - DNA, 25 bp, Homo sapien
catagccctcatcctgttggtagta

SEQ ID NO: 2108834 - DNA, 25 bp, Homo sapien
tcggctgattgttggtagatgccag

SEQ ID NO: 2108835 - DNA, 25 bp, Homo sapien
gcgagagaaagcctgcatcgacaca

SEQ ID NO: 2108836 - DNA, 25 bp, Homo sapien
atcgacacagagtcggccccaggct

SEQ ID NO: 2108837 - DNA, 25 bp, Homo sapien
tgctcgcctcggctgattgttggta

SEQ ID NO: 2108838 - DNA, 25 bp, Homo sapien
gcagaactaggatgggtagggctct

SEQ ID NO: 2108839 - DNA, 25 bp, Homo sapien
ggtactggctgtaggattcctgggc

SEQ ID NO: 2108840 - DNA, 25 bp, Homo sapien
tactggctgtaggattcctgggcag

SEQ ID NO: 2108841 - DNA, 25 bp, Homo sapien
tgggagagcagaactaggatgggta

SEQ ID NO: 2108842 - DNA, 25 bp, Homo sapien
ctggtaggtagagacgtcgggaaca

SEQ ID NO: 2108843 - DNA, 25 bp, Homo sapien
tggtaggtagagacgtcgggaacag

SEQ ID NO: 2108844 - DNA, 25 bp, Homo sapien
ccggtctgggggtcatagtagtagc

SEQ ID NO: 2108845 - DNA, 25 bp, Homo sapien
gtcatagtagtagccggaggtctca

SEQ ID NO: 2108846 - DNA, 25 bp, Homo sapien
agaggccggtctgggggtcatagta

SEQ ID NO: 2108847 - DNA, 25 bp, Homo sapien
gggtcatagtagaggccggtctggg

SEQ ID NO: 2108848 - DNA, 25 bp, Homo sapien
ctgcagggctagctgttcctgacgc

SEQ ID NO: 2108849 - DNA, 25 bp, Homo sapien
agggctagctgttcctgacgcgacc

SEQ ID NO: 2108850 - DNA, 25 bp, Homo sapien
ctagctgttcctgacgcgacctgac

SEQ ID NO: 2108851 - DNA, 25 bp, Homo sapien
tgttcctgacgcgacctgacccgat

SEQ ID NO: 2108852 - DNA, 25 bp, Homo sapien
gatgtgagggaagaccttgtgaagg

SEQ ID NO: 2108853 - DNA, 25 bp, Homo sapien
tgtgagggaagaccttgtgaaggga

SEQ ID NO: 2108854 - DNA, 25 bp, Homo sapien
ggatgtgagggaagaccttgtgaag

SEQ ID NO: 2108855 - DNA, 25 bp, Homo sapien
tgagggaagaccttgtgaagggaac

SEQ ID NO: 2108856 - DNA, 25 bp, Homo sapien
ctccagggcgggaacataggtccgc

SEQ ID NO: 2108857 - DNA, 25 bp, Homo sapien
tgtctccttatgtccgtcggccgac

SEQ ID NO: 2108858 - DNA, 25 bp, Homo sapien
tgtccgtcggccgactgctccaggg

SEQ ID NO: 2108859 - DNA, 25 bp, Homo sapien
tctttgccctccttcgagggtgccc

SEQ ID NO: 2108860 - DNA, 25 bp, Homo sapien
tcaaggccattcagcaaagagcaga

SEQ ID NO: 2108861 - DNA, 25 bp, Homo sapien
gggcaagagcatggtctgctaagca

SEQ ID NO: 2108862 - DNA, 25 bp, Homo sapien
agctgacagagtgccgttgctggaa

SEQ ID NO: 2108863 - DNA, 25 bp, Homo sapien
gcatggtctgctaagcagtcactgc

SEQ ID NO: 2108864 - DNA, 25 bp, Homo sapien
tgatgcaacagtgttgacaggcagg

SEQ ID NO: 2108865 - DNA, 25 bp, Homo sapien
aaaagataaatttaatccctgatgc

SEQ ID NO: 2108866 - DNA, 25 bp, Homo sapien
gagatcgcggctgctttttaaagaa

SEQ ID NO: 2108867 - DNA, 25 bp, Homo sapien
aggtgattaggtcacaaaggctctg

SEQ ID NO: 2108868 - DNA, 25 bp, Homo sapien
catctgcagtggctgactcccgcct

SEQ ID NO: 2108869 - DNA, 25 bp, Homo sapien
tcccgcctctcgtcatctcgcaggg

SEQ ID NO: 2108870 - DNA, 25 bp, Homo sapien
tgtttgttgagactgcgggcccagc

SEQ ID NO: 2108871 - DNA, 25 bp, Homo sapien
cgcagggagctgataggctggaagc

SEQ ID NO: 2108872 - DNA, 25 bp, Homo sapien
tgtgctgtctctcggctagtgctcc

SEQ ID NO: 2108873 - DNA, 25 bp, Homo sapien
gcggtcgtcactggccaatttcggg

SEQ ID NO: 2108874 - DNA, 25 bp, Homo sapien
ccaatttcgggagatccatgctggt

SEQ ID NO: 2108875 - DNA, 25 bp, Homo sapien
atgctggtgtgctgtctctcggcta

SEQ ID NO: 2108876 - DNA, 25 bp, Homo sapien
ctgccaccagtcctcgcggagggct

SEQ ID NO: 2108877 - DNA, 25 bp, Homo sapien
tgagagctgctggtgccggatgagc

SEQ ID NO: 2108878 - DNA, 25 bp, Homo sapien
ctgccagtcggtgagcttctcctcc

SEQ ID NO: 2108879 - DNA, 25 bp, Homo sapien
tcactgtcactctccccgctgtagg

SEQ ID NO: 2108880 - DNA, 25 bp, Homo sapien
cttctctagtgcttctagctcgttt

SEQ ID NO: 2108881 - DNA, 25 bp, Homo sapien
tctagctcgttttctgacaagtggg

SEQ ID NO: 2108882 - DNA, 25 bp, Homo sapien
ttttctgacaagtgggctcgccggt

SEQ ID NO: 2108883 - DNA, 25 bp, Homo sapien
ggctcgccggtgaatctcaaggttt

SEQ ID NO: 2108884 - DNA, 25 bp, Homo sapien
catctggctaatgaggctcaggtcc

SEQ ID NO: 2108885 - DNA, 25 bp, Homo sapien
gtgagaaattgaactccagctgcct

SEQ ID NO: 2108886 - DNA, 25 bp, Homo sapien
cacaagcagccaggataggaaaatg

SEQ ID NO: 2108887 - DNA, 25 bp, Homo sapien
ctcttttctcaggcaacacaggcat

SEQ ID NO: 2108888 - DNA, 25 bp, Homo sapien
tgcgttcagctgcacggtcccggta

SEQ ID NO: 2108889 - DNA, 25 bp, Homo sapien
ggcggctcggggatgccatactttt

SEQ ID NO: 2108890 - DNA, 25 bp, Homo sapien
tggcggctcggggatgccatacttt

SEQ ID NO: 2108891 - DNA, 25 bp, Homo sapien
gctgcacggtcccggtacttcattt

SEQ ID NO: 2108892 - DNA, 25 bp, Homo sapien
acagaggctgtggatatgccgccgt

SEQ ID NO: 2108893 - DNA, 25 bp, Homo sapien
gaggctgtggatatgccgccgtact

SEQ ID NO: 2108894 - DNA, 25 bp, Homo sapien
cagaggctgtggatatgccgccgta

SEQ ID NO: 2108895 - DNA, 25 bp, Homo sapien
ggctgtggatatgccgccgtacttc

SEQ ID NO: 2108896 - DNA, 25 bp, Homo sapien
gtgcacagcatgagtggtcggcctg

SEQ ID NO: 2108897 - DNA, 25 bp, Homo sapien
accccctcacctggcccagccactc

SEQ ID NO: 2108898 - DNA, 25 bp, Homo sapien
cggtgcacagcatgagtggtcggcc

SEQ ID NO: 2108899 - DNA, 25 bp, Homo sapien
agaccccctcacctggcccagccac

SEQ ID NO: 2108900 - DNA, 25 bp, Homo sapien
tgcagcatccgactgccaatgttgt

SEQ ID NO: 2108901 - DNA, 25 bp, Homo sapien
tcgataggcgttacaatgccctgct

SEQ ID NO: 2108902 - DNA, 25 bp, Homo sapien
gtcccgagtaggctgctcgaagtct

SEQ ID NO: 2108903 - DNA, 25 bp, Homo sapien
ttacaatgccctgcttcttgcggcc

SEQ ID NO: 2108904 - DNA, 25 bp, Homo sapien
gggatgggacaggactgcctgagac

SEQ ID NO: 2108905 - DNA, 25 bp, Homo sapien
gtgaccccgtaggagctgccccgtg

SEQ ID NO: 2108906 - DNA, 25 bp, Homo sapien
ccttgtaggactcggttgaggtgac

SEQ ID NO: 2108907 - DNA, 25 bp, Homo sapien
cattgtcttgtgcagtgtctccttg

SEQ ID NO: 2108908 - DNA, 25 bp, Homo sapien
tcttgtgcagtgtctccttgtagga

SEQ ID NO: 2108909 - DNA, 25 bp, Homo sapien
accacctcaatttgatttggtcaag

SEQ ID NO: 2108910 - DNA, 25 bp, Homo sapien
tgccccaggatggacacccaacatg

SEQ ID NO: 2108911 - DNA, 25 bp, Homo sapien
tggacacccaacatgtggagaagtt

SEQ ID NO: 2108912 - DNA, 25 bp, Homo sapien
tacaaaacaggacgtgatcccagcc

SEQ ID NO: 2108913 - DNA, 25 bp, Homo sapien
tggagatgcctgagggcattgtctc

SEQ ID NO: 2108914 - DNA, 25 bp, Homo sapien
ggagatgcctgagggcattgtctcc

SEQ ID NO: 2108915 - DNA, 25 bp, Homo sapien
tgtattctacttggagatgcctgag

SEQ ID NO: 2108916 - DNA, 25 bp, Homo sapien
ggaatcatgggttgcagtgactaga

SEQ ID NO: 2108917 - DNA, 25 bp, Homo sapien
aatcatgggttgcagtgactagagg

SEQ ID NO: 2108918 - DNA, 25 bp, Homo sapien
gagaaggtaggcctgaatggttctc

SEQ ID NO: 2108919 - DNA, 25 bp, Homo sapien
gggcactgtggtaacaacagagaag

SEQ ID NO: 2108920 - DNA, 25 bp, Homo sapien
agacccagatgaccctacaggttgt

SEQ ID NO: 2108921 - DNA, 25 bp, Homo sapien
gtacggcccaaatgcgcgcggcatg

SEQ ID NO: 2108922 - DNA, 25 bp, Homo sapien
tggtagttctgtctggccagtgcct

SEQ ID NO: 2108923 - DNA, 25 bp, Homo sapien
taagcctgagctgtggaattgccgg

SEQ ID NO: 2108924 - DNA, 25 bp, Homo sapien
ggcaacggaagagcaaaccacctct

SEQ ID NO: 2108925 - DNA, 25 bp, Homo sapien
agaagccagagtttgcgcggagctc

SEQ ID NO: 2108926 - DNA, 25 bp, Homo sapien
cacctctgtcgtacaagagaagcca

SEQ ID NO: 2108927 - DNA, 25 bp, Homo sapien
cggaagcctcgccttcctgccaaag

SEQ ID NO: 2108928 - DNA, 25 bp, Homo sapien
ctcctccaaatgctgtccagaggct

SEQ ID NO: 2108929 - DNA, 25 bp, Homo sapien
ctccaaatgctgtccagaggcttgg

SEQ ID NO: 2108930 - DNA, 25 bp, Homo sapien
agaggcttgggggcacggtgctcca

SEQ ID NO: 2108931 - DNA, 25 bp, Homo sapien
ccagaggcttgggggcacggtgctc

SEQ ID NO: 2108932 - DNA, 25 bp, Homo sapien
caatgaactcgtttgcgcggcagac

SEQ ID NO: 2108933 - DNA, 25 bp, Homo sapien
ttcacaagccgagaaccttcagcgg

SEQ ID NO: 2108934 - DNA, 25 bp, Homo sapien
catgaattaagcacggaacccctag

SEQ ID NO: 2108935 - DNA, 25 bp, Homo sapien
tacctgcaagggaaagctaaccgcg

SEQ ID NO: 2108936 - DNA, 25 bp, Homo sapien
aataagtagaaagggcttagaccag

SEQ ID NO: 2108937 - DNA, 25 bp, Homo sapien
cttgcgatggagtttaaatgaagaa

SEQ ID NO: 2108938 - DNA, 25 bp, Homo sapien
gtagaaagggcttagaccagtgcct

SEQ ID NO: 2108939 - DNA, 25 bp, Homo sapien
tagtagtagtactatcaaatggcgg

SEQ ID NO: 2108940 - DNA, 25 bp, Homo sapien
ccgacacaagatggcggacgctgag

SEQ ID NO: 2108941 - DNA, 25 bp, Homo sapien
cgccgacacaagatggcggacgctg

SEQ ID NO: 2108942 - DNA, 25 bp, Homo sapien
gagccgccgacacaagatggcggac

SEQ ID NO: 2108943 - DNA, 25 bp, Homo sapien
agccgagccgccgacacaagatggc

SEQ ID NO: 2108944 - DNA, 25 bp, Homo sapien
cgttgtggttgtggttgtccctgcc

SEQ ID NO: 2108945 - DNA, 25 bp, Homo sapien
tgggccgcctagaatcgccgctgcc

SEQ ID NO: 2108946 - DNA, 25 bp, Homo sapien
caactcctcaaggagccgaagccaa

SEQ ID NO: 2108947 - DNA, 25 bp, Homo sapien
gcctgggccgcctagaatcgccgct

SEQ ID NO: 2108948 - DNA, 25 bp, Homo sapien
ctgaggcctctcagtagtctctgaa

SEQ ID NO: 2108949 - DNA, 25 bp, Homo sapien
cagagtctaggaattgaagagtctc

SEQ ID NO: 2108950 - DNA, 25 bp, Homo sapien
gggctagaagccaacgggatctgca

SEQ ID NO: 2108951 - DNA, 25 bp, Homo sapien
cagtagtctctgaatactggaagta

SEQ ID NO: 2108952 - DNA, 25 bp, Homo sapien
tgagaggaggcaggttagcaggatg

SEQ ID NO: 2108953 - DNA, 25 bp, Homo sapien
gagaggaggcaggttagcaggatgg

SEQ ID NO: 2108954 - DNA, 25 bp, Homo sapien
gaggcaggttagcaggatggagaag

SEQ ID NO: 2108955 - DNA, 25 bp, Homo sapien
aactgaagattttcaagcgtaagca

SEQ ID NO: 2108956 - DNA, 25 bp, Homo sapien
aagcgtaagcattctctattcccaa

SEQ ID NO: 2108957 - DNA, 25 bp, Homo sapien
ccaaactgaagattttcaagcgtaa

SEQ ID NO: 2108958 - DNA, 25 bp, Homo sapien
ctattcccaaaccagagggtttgag

SEQ ID NO: 2108959 - DNA, 25 bp, Homo sapien
tccaaaagctgggacaaatgaaact

SEQ ID NO: 2108960 - DNA, 25 bp, Homo sapien
tggacatccatcagggtggcatgat

SEQ ID NO: 2108961 - DNA, 25 bp, Homo sapien
ggaagtgaggcttggacatccatca

SEQ ID NO: 2108962 - DNA, 25 bp, Homo sapien
catgatggcaggagcggtaacttgc

SEQ ID NO: 2108963 - DNA, 25 bp, Homo sapien
caagcctcatctgcatgcggagtcc

SEQ ID NO: 2108964 - DNA, 25 bp, Homo sapien
tggcacagagtaggtaggcagtaac

SEQ ID NO: 2108965 - DNA, 25 bp, Homo sapien
gagtaggtaggcagtaacaagcagc

SEQ ID NO: 2108966 - DNA, 25 bp, Homo sapien
taggcagtaacaagcagccattctc

SEQ ID NO: 2108967 - DNA, 25 bp, Homo sapien
cacagagtaggtaggcagtaacaag

SEQ ID NO: 2108968 - DNA, 25 bp, Homo sapien
cccacggggttatcgagatgataaa

SEQ ID NO: 2108969 - DNA, 25 bp, Homo sapien
cttccccacggggttatcgagatga

SEQ ID NO: 2108970 - DNA, 25 bp, Homo sapien
tccccacggggttatcgagatgata

SEQ ID NO: 2108971 - DNA, 25 bp, Homo sapien
gggttatcgagatgataaataacac

SEQ ID NO: 2108972 - DNA, 25 bp, Homo sapien
tgcccagggtaacacagctgtcaga

SEQ ID NO: 2108973 - DNA, 25 bp, Homo sapien
ccagcataatgagggagagactcca

SEQ ID NO: 2108974 - DNA, 25 bp, Homo sapien
cagtaataattaaccgccacaggcc

SEQ ID NO: 2108975 - DNA, 25 bp, Homo sapien
tttcaaatcttgagcctgccacgca

SEQ ID NO: 2108976 - DNA, 25 bp, Homo sapien
cacatgggtaccgtttttctgtttg

SEQ ID NO: 2108977 - DNA, 25 bp, Homo sapien
gagcacatgggtaccgtttttctgt

SEQ ID NO: 2108978 - DNA, 25 bp, Homo sapien
cctggagcacatgggtaccgttttt

SEQ ID NO: 2108979 - DNA, 25 bp, Homo sapien
gaccctggagcacatgggtaccgtt

SEQ ID NO: 2108980 - DNA, 25 bp, Homo sapien
tggcaccgagggcacttcggacaac

SEQ ID NO: 2108981 - DNA, 25 bp, Homo sapien
gcccggacacgcgacgtttcttgga

SEQ ID NO: 2108982 - DNA, 25 bp, Homo sapien
tagaacccggctttggatcaggccc

SEQ ID NO: 2108983 - DNA, 25 bp, Homo sapien
gacgtttcttggacagcggcgagct

SEQ ID NO: 2108984 - DNA, 25 bp, Homo sapien
gcttcactgccgttcttggccattc

SEQ ID NO: 2108985 - DNA, 25 bp, Homo sapien
ctcgtctatgtctgcttcactgccg

SEQ ID NO: 2108986 - DNA, 25 bp, Homo sapien
agctgccgggagtaaaggccctcgt

SEQ ID NO: 2108987 - DNA, 25 bp, Homo sapien
gtaaaggccctcgtctatgtctgct

SEQ ID NO: 2108988 - DNA, 25 bp, Homo sapien
tgttcttagcgatctccacgcccag

SEQ ID NO: 2108989 - DNA, 25 bp, Homo sapien
ccactgggcagtgccctggtcatgt

SEQ ID NO: 2108990 - DNA, 25 bp, Homo sapien
tagggtaacagccttgaccccacca

SEQ ID NO: 2108991 - DNA, 25 bp, Homo sapien
tggatgtctggagccgcttcattgc

SEQ ID NO: 2108992 - DNA, 25 bp, Homo sapien
ctcaacgaggggtccagtgtaggca

SEQ ID NO: 2108993 - DNA, 25 bp, Homo sapien
gtgacaggcacatagctgttgagct

SEQ ID NO: 2108994 - DNA, 25 bp, Homo sapien
catagctgttgagctcagcgaggcg

SEQ ID NO: 2108995 - DNA, 25 bp, Homo sapien
gaagtcctcaacgaggggtccagtg

SEQ ID NO: 2108996 - DNA, 25 bp, Homo sapien
ccagcttgatgccacggttgtgaca

SEQ ID NO: 2108997 - DNA, 25 bp, Homo sapien
ggttgtgacagaactcacccactcg

SEQ ID NO: 2108998 - DNA, 25 bp, Homo sapien
gatgccacggttgtgacagaactca

SEQ ID NO: 2108999 - DNA, 25 bp, Homo sapien
caccaccagcttgatgccacggttg

SEQ ID NO: 2109000 - DNA, 25 bp, Homo sapien
gaaaccatagcactgagtggctgct

SEQ ID NO: 2109001 - DNA, 25 bp, Homo sapien
ctccccattggaatctgtgaggatc

SEQ ID NO: 2109002 - DNA, 25 bp, Homo sapien
ccccattggaatctgtgaggatcat

SEQ ID NO: 2109003 - DNA, 25 bp, Homo sapien
tagaaaccatagcactgagtggctg

SEQ ID NO: 2109004 - DNA, 25 bp, Homo sapien
tctcaaacccgtgtcgggcctcatc

SEQ ID NO: 2109005 - DNA, 25 bp, Homo sapien
caggcaggtaaccacaccggggttg

SEQ ID NO: 2109006 - DNA, 25 bp, Homo sapien
cgttgagttcaaccatgccctgtac

SEQ ID NO: 2109007 - DNA, 25 bp, Homo sapien
gatctccatgggctgatttccgttg

SEQ ID NO: 2109008 - DNA, 25 bp, Homo sapien
ctgactgacgatgcctccacggatg

SEQ ID NO: 2109009 - DNA, 25 bp, Homo sapien
tggaggtgtcacagatgctaaaggt

SEQ ID NO: 2109010 - DNA, 25 bp, Homo sapien
tcacagatgctaaaggtataaggac

SEQ ID NO: 2109011 - DNA, 25 bp, Homo sapien
tccacggatgtagtcggagaagttg

SEQ ID NO: 2109012 - DNA, 25 bp, Homo sapien
aaagctaatcttcttaggtactttg

SEQ ID NO: 2109013 - DNA, 25 bp, Homo sapien
agctaatcttcttaggtactttgac

SEQ ID NO: 2109014 - DNA, 25 bp, Homo sapien
aagctaatcttcttaggtactttga

SEQ ID NO: 2109015 - DNA, 25 bp, Homo sapien
cctggaagccaatgtgcagctgggc

SEQ ID NO: 2109016 - DNA, 25 bp, Homo sapien
tggcgaagtccgtcaccacaaagtc

SEQ ID NO: 2109017 - DNA, 25 bp, Homo sapien
gccatgctgagcacagaactggtgc

SEQ ID NO: 2109018 - DNA, 25 bp, Homo sapien
caaagtcaggttctgccagtgaggc

SEQ ID NO: 2109019 - DNA, 25 bp, Homo sapien
gagaggatatgtcaggccacagtga

SEQ ID NO: 2109020 - DNA, 25 bp, Homo sapien
agagaggatatgtcaggccacagtg

SEQ ID NO: 2109021 - DNA, 25 bp, Homo sapien
agaaagaaccaagagaggatatgtc

SEQ ID NO: 2109022 - DNA, 25 bp, Homo sapien
tttatgggtgccagatccccagcag

SEQ ID NO: 2109023 - DNA, 25 bp, Homo sapien
tgctggcagggctcgagcattcaca

SEQ ID NO: 2109024 - DNA, 25 bp, Homo sapien
ccaatgaaggcgtttatgggtgcca

SEQ ID NO: 2109025 - DNA, 25 bp, Homo sapien
tgtgctaaggctaccagttctgctg

SEQ ID NO: 2109026 - DNA, 25 bp, Homo sapien
aggacctctttgtcctcagggagac

SEQ ID NO: 2109027 - DNA, 25 bp, Homo sapien
aagtatagccactgcatgatgggca

SEQ ID NO: 2109028 - DNA, 25 bp, Homo sapien
gcatcaaagtatagccactgcatga

SEQ ID NO: 2109029 - DNA, 25 bp, Homo sapien
tggaggcacttgtcctctgtgagga

SEQ ID NO: 2109030 - DNA, 25 bp, Homo sapien
gaaatacttctgcttgcccagcttc

SEQ ID NO: 2109031 - DNA, 25 bp, Homo sapien
aacacagccacttgcccgtcataac

SEQ ID NO: 2109032 - DNA, 25 bp, Homo sapien
ggaaatacttctgcttgcccagctt

SEQ ID NO: 2109033 - DNA, 25 bp, Homo sapien
cttgcccgtcataacggttctggcg

SEQ ID NO: 2109034 - DNA, 25 bp, Homo sapien
tgtaacgatgatttctccaccctcc

SEQ ID NO: 2109035 - DNA, 25 bp, Homo sapien
cagcccagcccaatcatggcaaagt

SEQ ID NO: 2109036 - DNA, 25 bp, Homo sapien
gaaactgtcgattcagatttgactt

SEQ ID NO: 2109037 - DNA, 25 bp, Homo sapien
catcccagggccggaaaagaaactg

SEQ ID NO: 2109038 - DNA, 25 bp, Homo sapien
cctcacgatcgtattgtgtctattg

SEQ ID NO: 2109039 - DNA, 25 bp, Homo sapien
cctttgaggagcactcatcaccaac

SEQ ID NO: 2109040 - DNA, 25 bp, Homo sapien
caacattaactatatacctcacgat

SEQ ID NO: 2109041 - DNA, 25 bp, Homo sapien
tattgtgtctattgtttgctgtccg

SEQ ID NO: 2109042 - DNA, 25 bp, Homo sapien
tatccttgaggtctttgcagaactc

SEQ ID NO: 2109043 - DNA, 25 bp, Homo sapien
tttgcagaactcaggccttccttaa

SEQ ID NO: 2109044 - DNA, 25 bp, Homo sapien
tcaggccttccttaaccattgtcat

SEQ ID NO: 2109045 - DNA, 25 bp, Homo sapien
gaactcaggccttccttaaccattg

SEQ ID NO: 2109046 - DNA, 25 bp, Homo sapien
tcccacctcaggatctttgcgcagg

SEQ ID NO: 2109047 - DNA, 25 bp, Homo sapien
taaagggctgtctgcctgagactga

SEQ ID NO: 2109048 - DNA, 25 bp, Homo sapien
cagcacccaggattgatgcagactc

SEQ ID NO: 2109049 - DNA, 25 bp, Homo sapien
cacttaccgtaaaatgagttggctc

SEQ ID NO: 2109050 - DNA, 25 bp, Homo sapien
gcttgtcacccggatatgtggattc

SEQ ID NO: 2109051 - DNA, 25 bp, Homo sapien
gtggattcatttggcgcacagctgc

SEQ ID NO: 2109052 - DNA, 25 bp, Homo sapien
tcaggacccacacggttctggtggc

SEQ ID NO: 2109053 - DNA, 25 bp, Homo sapien
catagatgcgctccgtgtcaggacc

SEQ ID NO: 2109054 - DNA, 25 bp, Homo sapien
catccacgttgtccagggcattggc

SEQ ID NO: 2109055 - DNA, 25 bp, Homo sapien
gggcatccacgttgtccagggcatt

SEQ ID NO: 2109056 - DNA, 25 bp, Homo sapien
tccacgttgtccagggcattggcca

SEQ ID NO: 2109057 - DNA, 25 bp, Homo sapien
ggcatccacgttgtccagggcattg

SEQ ID NO: 2109058 - DNA, 25 bp, Homo sapien
tcttggtatatacacaccgaaacac

SEQ ID NO: 2109059 - DNA, 25 bp, Homo sapien
acagaaagacggacacccctcttgg

SEQ ID NO: 2109060 - DNA, 25 bp, Homo sapien
ggacacccctcttggtatatacaca

SEQ ID NO: 2109061 - DNA, 25 bp, Homo sapien
aaacacacacaactttgcccgtgac

SEQ ID NO: 2109062 - DNA, 25 bp, Homo sapien
tcctggctggaactgtacgactctg

SEQ ID NO: 2109063 - DNA, 25 bp, Homo sapien
gctcgatggcattagggaagttctt

SEQ ID NO: 2109064 - DNA, 25 bp, Homo sapien
ggtagtagacacagcggcggtccat

SEQ ID NO: 2109065 - DNA, 25 bp, Homo sapien
ccagcagtggcttccggtagtagac

SEQ ID NO: 2109066 - DNA, 25 bp, Homo sapien
tctagtgggcagaagtcaggaatgc

SEQ ID NO: 2109067 - DNA, 25 bp, Homo sapien
tggacaccccgagctagataatata

SEQ ID NO: 2109068 - DNA, 25 bp, Homo sapien
taaagggctgtgatgtctgtgacac

SEQ ID NO: 2109069 - DNA, 25 bp, Homo sapien
tcaactgggagtgatgtggcacccc

SEQ ID NO: 2109070 - DNA, 25 bp, Homo sapien
tttccgcaggcattattagaaggac

SEQ ID NO: 2109071 - DNA, 25 bp, Homo sapien
cagttgacaaaatgggtttccgcag

SEQ ID NO: 2109072 - DNA, 25 bp, Homo sapien
caaggcgcacagctactctggaagt

SEQ ID NO: 2109073 - DNA, 25 bp, Homo sapien
tgaataaagcaagtacaaggcgcac

SEQ ID NO: 2109074 - DNA, 25 bp, Homo sapien
gaggccttcaaactcatcccgagcc

SEQ ID NO: 2109075 - DNA, 25 bp, Homo sapien
tgctggctgcttgaagaggccttca

SEQ ID NO: 2109076 - DNA, 25 bp, Homo sapien
tgaggtactggttgacattttctgc

SEQ ID NO: 2109077 - DNA, 25 bp, Homo sapien
gtactggttgacattttctgctggc

SEQ ID NO: 2109078 - DNA, 25 bp, Homo sapien
gtcacgcagtcagcccaggtctgtg

SEQ ID NO: 2109079 - DNA, 25 bp, Homo sapien
tcaggagggaagttgtgcagcagct

SEQ ID NO: 2109080 - DNA, 25 bp, Homo sapien
cagcagctgccggatgttgttcgag

SEQ ID NO: 2109081 - DNA, 25 bp, Homo sapien
gcagtgttcgctccacaaacttggg

SEQ ID NO: 2109082 - DNA, 25 bp, Homo sapien
aatggacccaacaactgggcattac

SEQ ID NO: 2109083 - DNA, 25 bp, Homo sapien
ccaaatggacccaacaactgggcat

SEQ ID NO: 2109084 - DNA, 25 bp, Homo sapien
caaatggacccaacaactgggcatt

SEQ ID NO: 2109085 - DNA, 25 bp, Homo sapien
gccaaatggacccaacaactgggca

SEQ ID NO: 2109086 - DNA, 25 bp, Homo sapien
tttgggcccagaccagaacggcgct

SEQ ID NO: 2109087 - DNA, 25 bp, Homo sapien
cgggtgtggacagcgtttgggccca

SEQ ID NO: 2109088 - DNA, 25 bp, Homo sapien
tggacagcgtttgggcccagaccag

SEQ ID NO: 2109089 - DNA, 25 bp, Homo sapien
ttgacatcaaaggtgagcgggtgtg

SEQ ID NO: 2109090 - DNA, 25 bp, Homo sapien
tcctggtcagaaacatggatcttga

SEQ ID NO: 2109091 - DNA, 25 bp, Homo sapien
catggatcttgacgccagacttggg

SEQ ID NO: 2109092 - DNA, 25 bp, Homo sapien
caacagaggcattggcgctctgcag

SEQ ID NO: 2109093 - DNA, 25 bp, Homo sapien
tgagagcctgtcagcccgtaggtct

SEQ ID NO: 2109094 - DNA, 25 bp, Homo sapien
tctctagagacactaaggaacggaa

SEQ ID NO: 2109095 - DNA, 25 bp, Homo sapien
cacagatgtggacatagaggaaaga

SEQ ID NO: 2109096 - DNA, 25 bp, Homo sapien
tgtcagccctttagatcccaggcta

SEQ ID NO: 2109097 - DNA, 25 bp, Homo sapien
gattggaagacatacataaaggaac

SEQ ID NO: 2109098 - DNA, 25 bp, Homo sapien
ttgaatccagggagcttgtctgggc

SEQ ID NO: 2109099 - DNA, 25 bp, Homo sapien
agtcaatggggtacatcttgaatcc

SEQ ID NO: 2109100 - DNA, 25 bp, Homo sapien
ttctcaaagtcaatggggtacatct

SEQ ID NO: 2109101 - DNA, 25 bp, Homo sapien
ggctttgagctcctctagacgactg

SEQ ID NO: 2109102 - DNA, 25 bp, Homo sapien
gatcacaaagggatggctgggaaca

SEQ ID NO: 2109103 - DNA, 25 bp, Homo sapien
aagaagatgtgtatcctccactgca

SEQ ID NO: 2109104 - DNA, 25 bp, Homo sapien
tccactgcaattgcctgctggactc

SEQ ID NO: 2109105 - DNA, 25 bp, Homo sapien
tactcattcagagccatatggcagg

SEQ ID NO: 2109106 - DNA, 25 bp, Homo sapien
agaaggaatgtcatagttttctgcc

SEQ ID NO: 2109107 - DNA, 25 bp, Homo sapien
ttttctgcccggaggttggatgcag

SEQ ID NO: 2109108 - DNA, 25 bp, Homo sapien
tggatgcagccacgatgaaatccat

SEQ ID NO: 2109109 - DNA, 25 bp, Homo sapien
tcatagttttctgcccggaggttgg

SEQ ID NO: 2109110 - DNA, 25 bp, Homo sapien
ggtgcccctgcacaaccttgtacag

SEQ ID NO: 2109111 - DNA, 25 bp, Homo sapien
cggctgctgtggtcgtggcaatggc

SEQ ID NO: 2109112 - DNA, 25 bp, Homo sapien
cacaaggccaaccacggctgctgtg

SEQ ID NO: 2109113 - DNA, 25 bp, Homo sapien
tgtaggagtcaagctgtcggtgccc

SEQ ID NO: 2109114 - DNA, 25 bp, Homo sapien
atgacgtgaatcagaaccagatcta

SEQ ID NO: 2109115 - DNA, 25 bp, Homo sapien
ggtgacagggtatgacgtgaatcag

SEQ ID NO: 2109116 - DNA, 25 bp, Homo sapien
acccaaaccctgcttcggatgcagg

SEQ ID NO: 2109117 - DNA, 25 bp, Homo sapien
gaaccagatctacacagatacaccc

SEQ ID NO: 2109118 - DNA, 25 bp, Homo sapien
ggtaggtacacagacagaaaccctc

SEQ ID NO: 2109119 - DNA, 25 bp, Homo sapien
caaaaagggtaggtacacagacaga

SEQ ID NO: 2109120 - DNA, 25 bp, Homo sapien
cacaaaaagggtaggtacacagaca

SEQ ID NO: 2109121 - DNA, 25 bp, Homo sapien
acaaaaagggtaggtacacagacag

SEQ ID NO: 2109122 - DNA, 25 bp, Homo sapien
gttactaataatctcccagggcaca

SEQ ID NO: 2109123 - DNA, 25 bp, Homo sapien
gaagcgtccaataaattttggctgc

SEQ ID NO: 2109124 - DNA, 25 bp, Homo sapien
gcacttaagtgtaggaagcgtccaa

SEQ ID NO: 2109125 - DNA, 25 bp, Homo sapien
tttcgcacgtactcaaataatgtga

SEQ ID NO: 2109126 - DNA, 25 bp, Homo sapien
caagcctgcacagtttgtcccctta

SEQ ID NO: 2109127 - DNA, 25 bp, Homo sapien
gtttagtcagatcacaaccctcttt

SEQ ID NO: 2109128 - DNA, 25 bp, Homo sapien
agcaaggccttttctgaccatccta

SEQ ID NO: 2109129 - DNA, 25 bp, Homo sapien
tcttttgttcgaaatcctcttgtgg

SEQ ID NO: 2109130 - DNA, 25 bp, Homo sapien
cttaaaatagtcgaggaactgtttg

SEQ ID NO: 2109131 - DNA, 25 bp, Homo sapien
gggtcatctcctcaccattaggctg

SEQ ID NO: 2109132 - DNA, 25 bp, Homo sapien
gtacctcaaagcgatcccacaatgt

SEQ ID NO: 2109133 - DNA, 25 bp, Homo sapien
acaatgtccactcttggttatagta

SEQ ID NO: 2109134 - DNA, 25 bp, Homo sapien
ggacaggccagcaagtcaccgtgta

SEQ ID NO: 2109135 - DNA, 25 bp, Homo sapien
tgtacacctcgccccctgaggtggg

SEQ ID NO: 2109136 - DNA, 25 bp, Homo sapien
ggccagcaagtcaccgtgtacacct

SEQ ID NO: 2109137 - DNA, 25 bp, Homo sapien
aggtggacaggccagcaagtcaccg

SEQ ID NO: 2109138 - DNA, 25 bp, Homo sapien
tgaagaaggaatagagcatggacac

SEQ ID NO: 2109139 - DNA, 25 bp, Homo sapien
gacagcatggtgatctctaatttgt

SEQ ID NO: 2109140 - DNA, 25 bp, Homo sapien
atggacacgccctgggacagcatgg

SEQ ID NO: 2109141 - DNA, 25 bp, Homo sapien
gatccaaccgttccttgagcttggc

SEQ ID NO: 2109142 - DNA, 25 bp, Homo sapien
gacatagggaacctcgacatcctcg

SEQ ID NO: 2109143 - DNA, 25 bp, Homo sapien
tctcgtcgttacagcacagctcaag

SEQ ID NO: 2109144 - DNA, 25 bp, Homo sapien
tggcggcccagctttcgcttcgaca

SEQ ID NO: 2109145 - DNA, 25 bp, Homo sapien
tcagcggatggtgtatcggacatag

SEQ ID NO: 2109146 - DNA, 25 bp, Homo sapien
caggtttcaaacaaggtagaaggca

SEQ ID NO: 2109147 - DNA, 25 bp, Homo sapien
aacaccagacttggctagttgggcc

SEQ ID NO: 2109148 - DNA, 25 bp, Homo sapien
taggattcaggtttcaaacaaggta

SEQ ID NO: 2109149 - DNA, 25 bp, Homo sapien
gggatgatgagggaacaccagactt

SEQ ID NO: 2109150 - DNA, 25 bp, Homo sapien
aattgaacccagctcaaattaacag

SEQ ID NO: 2109151 - DNA, 25 bp, Homo sapien
gctcaaattaacagtcacatggacc

SEQ ID NO: 2109152 - DNA, 25 bp, Homo sapien
gggttgagccctctgagttatcatc

SEQ ID NO: 2109153 - DNA, 25 bp, Homo sapien
ggacccaagtacctgctcactatgg

SEQ ID NO: 2109154 - DNA, 25 bp, Homo sapien
tacatccccatggtggcaaacggga

SEQ ID NO: 2109155 - DNA, 25 bp, Homo sapien
agatgacttttcgaggagaggcagc

SEQ ID NO: 2109156 - DNA, 25 bp, Homo sapien
tagtactcagttccgatcttggcag

SEQ ID NO: 2109157 - DNA, 25 bp, Homo sapien
cagaagtttgctagcgcctaggtga

SEQ ID NO: 2109158 - DNA, 25 bp, Homo sapien
actgcatgtaccaaaggacccgtcc

SEQ ID NO: 2109159 - DNA, 25 bp, Homo sapien
ggactgcatgtaccaaaggacccgt

SEQ ID NO: 2109160 - DNA, 25 bp, Homo sapien
ctcggactgcatgtaccaaaggacc

SEQ ID NO: 2109161 - DNA, 25 bp, Homo sapien
tcggactgcatgtaccaaaggaccc

SEQ ID NO: 2109162 - DNA, 25 bp, Homo sapien
gccgcgctccgcgcatgcgcacgca

SEQ ID NO: 2109163 - DNA, 25 bp, Homo sapien
gcgctccgcgcatgcgcacgcaggc

SEQ ID NO: 2109164 - DNA, 25 bp, Homo sapien
cgctccgcgcatgcgcacgcaggcg

SEQ ID NO: 2109165 - DNA, 25 bp, Homo sapien
cgcgctccgcgcatgcgcacgcagg

SEQ ID NO: 2109166 - DNA, 25 bp, Homo sapien
ggtctgatcgcggagtggcggcgga

SEQ ID NO: 2109167 - DNA, 25 bp, Homo sapien
cagagcggtctgatcgcggagtggc

SEQ ID NO: 2109168 - DNA, 25 bp, Homo sapien
tgatcgcggagtggcggcggatccc

SEQ ID NO: 2109169 - DNA, 25 bp, Homo sapien
gagcggtctgatcgcggagtggcgg

SEQ ID NO: 2109170 - DNA, 25 bp, Homo sapien
ggatgaggccgcgcgacctccttct

SEQ ID NO: 2109171 - DNA, 25 bp, Homo sapien
gcaggcgcccgtcccagtagtcttc

SEQ ID NO: 2109172 - DNA, 25 bp, Homo sapien
cccggactcgttggcgccggcttga

SEQ ID NO: 2109173 - DNA, 25 bp, Homo sapien
tgagcttggccgctgcgggcgatgc

SEQ ID NO: 2109174 - DNA, 25 bp, Homo sapien
cacggctatatcctgaggacctgga

SEQ ID NO: 2109175 - DNA, 25 bp, Homo sapien
gatcagctccgccagggtagatttc

SEQ ID NO: 2109176 - DNA, 25 bp, Homo sapien
tagatttctgtgtttaggtcacggc

SEQ ID NO: 2109177 - DNA, 25 bp, Homo sapien
tctgtgtttaggtcacggctatatc

SEQ ID NO: 2109178 - DNA, 25 bp, Homo sapien
agctgcagtgatgggcccagccatg

SEQ ID NO: 2109179 - DNA, 25 bp, Homo sapien
ggctccattgcagatcttctcaggt

SEQ ID NO: 2109180 - DNA, 25 bp, Homo sapien
caagggccctaacgatggattgttg

SEQ ID NO: 2109181 - DNA, 25 bp, Homo sapien
tggtctcgagcacggccatagagtg

SEQ ID NO: 2109182 - DNA, 25 bp, Homo sapien
agcaagggacaaggatggaaatggg

SEQ ID NO: 2109183 - DNA, 25 bp, Homo sapien
ccatgggttccctaaagcccacagc

SEQ ID NO: 2109184 - DNA, 25 bp, Homo sapien
tgacagctgccgtttgatcttcttc

SEQ ID NO: 2109185 - DNA, 25 bp, Homo sapien
tcattgacagctgccgtttgatctt

SEQ ID NO: 2109186 - DNA, 25 bp, Homo sapien
acagctgccgtttgatcttcttcat

SEQ ID NO: 2109187 - DNA, 25 bp, Homo sapien
cattgacagctgccgtttgatcttc

SEQ ID NO: 2109188 - DNA, 25 bp, Homo sapien
tgcagaacgaagttccccaggagca

SEQ ID NO: 2109189 - DNA, 25 bp, Homo sapien
gctcaggggcaccattggtcttgtc

SEQ ID NO: 2109190 - DNA, 25 bp, Homo sapien
tctcatccaggcctatctgctcagg

SEQ ID NO: 2109191 - DNA, 25 bp, Homo sapien
gcaccattggtcttgtctatgcctc

SEQ ID NO: 2109192 - DNA, 25 bp, Homo sapien
tcaggaaccacaggacaccccatcc

SEQ ID NO: 2109193 - DNA, 25 bp, Homo sapien
ccacgaaacatattccatcatcaca

SEQ ID NO: 2109194 - DNA, 25 bp, Homo sapien
gaagctcaggtacatctagggcagg

SEQ ID NO: 2109195 - DNA, 25 bp, Homo sapien
catattccatcatcacacatgtgtg

SEQ ID NO: 2109196 - DNA, 25 bp, Homo sapien
ctcatccgaggacgtggctgaagcc

SEQ ID NO: 2109197 - DNA, 25 bp, Homo sapien
catccgaggacgtggctgaagcctg

SEQ ID NO: 2109198 - DNA, 25 bp, Homo sapien
acctcatccgaggacgtggctgaag

SEQ ID NO: 2109199 - DNA, 25 bp, Homo sapien
cagaccccatcttcaagtcctcgtg

SEQ ID NO: 2109200 - DNA, 25 bp, Homo sapien
gtgggggatggttgcgcatacgcac

SEQ ID NO: 2109201 - DNA, 25 bp, Homo sapien
ctcagtggagatcttgcgtggggga

SEQ ID NO: 2109202 - DNA, 25 bp, Homo sapien
gagatcttgcgtgggggatggttgc

SEQ ID NO: 2109203 - DNA, 25 bp, Homo sapien
tcttgcgtgggggatggttgcgcat

SEQ ID NO: 2109204 - DNA, 25 bp, Homo sapien
ccaccatccagacggggtcaagcac

SEQ ID NO: 2109205 - DNA, 25 bp, Homo sapien
tccaccatccagacggggtcaagca

SEQ ID NO: 2109206 - DNA, 25 bp, Homo sapien
tcaaagatggggctattgagggtca

SEQ ID NO: 2109207 - DNA, 25 bp, Homo sapien
tccaggtagccctcaggcagccgga

SEQ ID NO: 2109208 - DNA, 25 bp, Homo sapien
tcagctggtagtgataggcgcttgt

SEQ ID NO: 2109209 - DNA, 25 bp, Homo sapien
tcaggcagccggatgtcagctggta

SEQ ID NO: 2109210 - DNA, 25 bp, Homo sapien
agtttgtccagcttaatgtaggtct

SEQ ID NO: 2109211 - DNA, 25 bp, Homo sapien
ttgcctttgtagacggtggcatagg

SEQ ID NO: 2109212 - DNA, 25 bp, Homo sapien
ctttgtagacggtggcataggtacc

SEQ ID NO: 2109213 - DNA, 25 bp, Homo sapien
atgttccagtctgatctccttgagt

SEQ ID NO: 2109214 - DNA, 25 bp, Homo sapien
catgttccagtctgatctccttgag

SEQ ID NO: 2109215 - DNA, 25 bp, Homo sapien
tcatgtagcgtaacgatgttggcgt

SEQ ID NO: 2109216 - DNA, 25 bp, Homo sapien
gtgagggacttctccgtgtggataa

SEQ ID NO: 2109217 - DNA, 25 bp, Homo sapien
ctccgtgtggataatgtcatgtagc

SEQ ID NO: 2109218 - DNA, 25 bp, Homo sapien
aacgatgttggcgtgtttgaggtcc

SEQ ID NO: 2109219 - DNA, 25 bp, Homo sapien
ctccccctgggacctactgccactc

SEQ ID NO: 2109220 - DNA, 25 bp, Homo sapien
catgttgatgatgttcccacagtca

SEQ ID NO: 2109221 - DNA, 25 bp, Homo sapien
catccaggtactgcttcaggtcctt

SEQ ID NO: 2109222 - DNA, 25 bp, Homo sapien
ttgtgcatgttgatgatgttcccac

SEQ ID NO: 2109223 - DNA, 25 bp, Homo sapien
tttcacgttgtgcatgttgatgatg

SEQ ID NO: 2109224 - DNA, 25 bp, Homo sapien
aggtcaaagactatccactagcccg

SEQ ID NO: 2109225 - DNA, 25 bp, Homo sapien
agaggtcaaagactatccactagcc

SEQ ID NO: 2109226 - DNA, 25 bp, Homo sapien
gactatccactagcccgacccccag

SEQ ID NO: 2109227 - DNA, 25 bp, Homo sapien
gtcaaagactatccactagcccgac

SEQ ID NO: 2109228 - DNA, 25 bp, Homo sapien
tcggtgtagcaccttctgccggtgg

SEQ ID NO: 2109229 - DNA, 25 bp, Homo sapien
cttgaggtctcggtgtagcaccttc

SEQ ID NO: 2109230 - DNA, 25 bp, Homo sapien
tgtagcaccttctgccggtggcagt

SEQ ID NO: 2109231 - DNA, 25 bp, Homo sapien
ccttctgccggtggcagtaggccag

SEQ ID NO: 2109232 - DNA, 25 bp, Homo sapien
catgggcaaagtctcggggagagtg

SEQ ID NO: 2109233 - DNA, 25 bp, Homo sapien
gtcatgggcaaagtctcggggagag

SEQ ID NO: 2109234 - DNA, 25 bp, Homo sapien
tcatgggcaaagtctcggggagagt

SEQ ID NO: 2109235 - DNA, 25 bp, Homo sapien
agtcatgggcaaagtctcggggaga

SEQ ID NO: 2109236 - DNA, 25 bp, Homo sapien
ggagtatgtctttgttgggattgac

SEQ ID NO: 2109237 - DNA, 25 bp, Homo sapien
tctgagtggagtagtccgtggaccc

SEQ ID NO: 2109238 - DNA, 25 bp, Homo sapien
tccgtggacccaagcaggatgtcag

SEQ ID NO: 2109239 - DNA, 25 bp, Homo sapien
tcattggagtatgtctttgttggga

SEQ ID NO: 2109240 - DNA, 25 bp, Homo sapien
ctccaccgtggagcccggaaagagg

SEQ ID NO: 2109241 - DNA, 25 bp, Homo sapien
taagatacggaagatgaagtgtagc

SEQ ID NO: 2109242 - DNA, 25 bp, Homo sapien
gtagctgttcctccaccgtggagcc

SEQ ID NO: 2109243 - DNA, 25 bp, Homo sapien
cctgtggccatctcatagaagatgc

SEQ ID NO: 2109244 - DNA, 25 bp, Homo sapien
tggccacgtctcctcagttggggtt

SEQ ID NO: 2109245 - DNA, 25 bp, Homo sapien
ctcaaaagggcctcggctcggtact

SEQ ID NO: 2109246 - DNA, 25 bp, Homo sapien
tcttgaactcctcgttggacaggat

SEQ ID NO: 2109247 - DNA, 25 bp, Homo sapien
cctcgttggacaggatgcctggcca

SEQ ID NO: 2109248 - DNA, 25 bp, Homo sapien
ggacaaagagacctgatttaaaatg

SEQ ID NO: 2109249 - DNA, 25 bp, Homo sapien
caaggacaaagagacctgatttaaa

SEQ ID NO: 2109250 - DNA, 25 bp, Homo sapien
acaaggacaaagagacctgatttaa

SEQ ID NO: 2109251 - DNA, 25 bp, Homo sapien
caaagagacctgatttaaaatgagt

SEQ ID NO: 2109252 - DNA, 25 bp, Homo sapien
tgaggaggtcggccccgtcgctatc

SEQ ID NO: 2109253 - DNA, 25 bp, Homo sapien
tggtgaggaggtcggccccgtcgct

SEQ ID NO: 2109254 - DNA, 25 bp, Homo sapien
gaggtcggccccgtcgctatcaagt

SEQ ID NO: 2109255 - DNA, 25 bp, Homo sapien
cttggtgaggaggtcggccccgtcg

SEQ ID NO: 2109256 - DNA, 25 bp, Homo sapien
atccgctcccccagactgaggaaga

SEQ ID NO: 2109257 - DNA, 25 bp, Homo sapien
gcggagatccgatttcgaccctcaa

SEQ ID NO: 2109258 - DNA, 25 bp, Homo sapien
ggaagtttgtggatccgctccccca

SEQ ID NO: 2109259 - DNA, 25 bp, Homo sapien
aagaatggatgtttcatggcatcct

SEQ ID NO: 2109260 - DNA, 25 bp, Homo sapien
caaatacaacccatcacacacgtga

SEQ ID NO: 2109261 - DNA, 25 bp, Homo sapien
tggcacagccagaatcctacacaac

SEQ ID NO: 2109262 - DNA, 25 bp, Homo sapien
aagatgtccccccacgtagaggtgg

SEQ ID NO: 2109263 - DNA, 25 bp, Homo sapien
acgctggccggtccattccccagct

SEQ ID NO: 2109264 - DNA, 25 bp, Homo sapien
tatagactattacatgacacaaaga

SEQ ID NO: 2109265 - DNA, 25 bp, Homo sapien
gacccatgaggtcatctaggaccag

SEQ ID NO: 2109266 - DNA, 25 bp, Homo sapien
atacacaaaccagctacaaccaggg

SEQ ID NO: 2109267 - DNA, 25 bp, Homo sapien
ggtattgcaattaccacctgttaag

SEQ ID NO: 2109268 - DNA, 25 bp, Homo sapien
cctccttttgtagctgaatctcctt

SEQ ID NO: 2109269 - DNA, 25 bp, Homo sapien
acgaagaccgaaggctggcctcctt

SEQ ID NO: 2109270 - DNA, 25 bp, Homo sapien
ctgagtcaggcatcgacgaagaccg

SEQ ID NO: 2109271 - DNA, 25 bp, Homo sapien
caggcatcgacgaagaccgaaggct

SEQ ID NO: 2109272 - DNA, 25 bp, Homo sapien
ctgtgggggaaagcagagcagatgg

SEQ ID NO: 2109273 - DNA, 25 bp, Homo sapien
gtccaccacgcggaaagctggcctg

SEQ ID NO: 2109274 - DNA, 25 bp, Homo sapien
ttagaactcggtgtccaccacgcgg

SEQ ID NO: 2109275 - DNA, 25 bp, Homo sapien
cggtgtccaccacgcggaaagctgg

SEQ ID NO: 2109276 - DNA, 25 bp, Homo sapien
aactcggtgtccaccacgcggaaag

SEQ ID NO: 2109277 - DNA, 25 bp, Homo sapien
ccaatgggtgggttgacaggccaat

SEQ ID NO: 2109278 - DNA, 25 bp, Homo sapien
ttgtctgagtcgagatccccagcct

SEQ ID NO: 2109279 - DNA, 25 bp, Homo sapien
gagagctttgttagcacccagcaga

SEQ ID NO: 2109280 - DNA, 25 bp, Homo sapien
cagagacagacagaccaagtgaagg

SEQ ID NO: 2109281 - DNA, 25 bp, Homo sapien
gtaggaaggcgagtggctgtggcat

SEQ ID NO: 2109282 - DNA, 25 bp, Homo sapien
ggtctggtgatgatcagggttccaa

SEQ ID NO: 2109283 - DNA, 25 bp, Homo sapien
cagggtctggtgatgatcagggttc

SEQ ID NO: 2109284 - DNA, 25 bp, Homo sapien
gtgatgatcagggttccaaataggg

SEQ ID NO: 2109285 - DNA, 25 bp, Homo sapien
agagtctctggtagtccccagatcc

SEQ ID NO: 2109286 - DNA, 25 bp, Homo sapien
tttcccagagtctctggtagtcccc

SEQ ID NO: 2109287 - DNA, 25 bp, Homo sapien
cccagagtctctggtagtccccaga

SEQ ID NO: 2109288 - DNA, 25 bp, Homo sapien
catttcccagagtctctggtagtcc

SEQ ID NO: 2109289 - DNA, 25 bp, Homo sapien
cacattatggctcctcgctgagctg

SEQ ID NO: 2109290 - DNA, 25 bp, Homo sapien
tatggtgcattcaggaacccaaccc

SEQ ID NO: 2109291 - DNA, 25 bp, Homo sapien
caaccctgcttgtgcacatatgcac

SEQ ID NO: 2109292 - DNA, 25 bp, Homo sapien
ccccagctacgggactgcaggagag

SEQ ID NO: 2109293 - DNA, 25 bp, Homo sapien
cgtcctgaacattccctcctcttca

SEQ ID NO: 2109294 - DNA, 25 bp, Homo sapien
gtcctgaacattccctcctcttcat

SEQ ID NO: 2109295 - DNA, 25 bp, Homo sapien
aatggccccgtgcacagacgcgtcg

SEQ ID NO: 2109296 - DNA, 25 bp, Homo sapien
tggccccgtgcacagacgcgtcgaa

SEQ ID NO: 2109297 - DNA, 25 bp, Homo sapien
ggaaatggccccgtgcacagacgcg

SEQ ID NO: 2109298 - DNA, 25 bp, Homo sapien
ccccgtgcacagacgcgtcgaaggg

SEQ ID NO: 2109299 - DNA, 25 bp, Homo sapien
cagctgtgcgagattggaagacgcc

SEQ ID NO: 2109300 - DNA, 25 bp, Homo sapien
tcaacagccacttccggattctggt

SEQ ID NO: 2109301 - DNA, 25 bp, Homo sapien
gagattggaagacgcccctcaacag

SEQ ID NO: 2109302 - DNA, 25 bp, Homo sapien
ttctggtcccggaaacggaagcaga

SEQ ID NO: 2109303 - DNA, 25 bp, Homo sapien
cgccgtccgttctcttctacagcca

SEQ ID NO: 2109304 - DNA, 25 bp, Homo sapien
ccgtccgttctcttctacagccaac

SEQ ID NO: 2109305 - DNA, 25 bp, Homo sapien
gccgtccgttctcttctacagccaa

SEQ ID NO: 2109306 - DNA, 25 bp, Homo sapien
agcagctggatttgctgcgaccgtc

SEQ ID NO: 2109307 - DNA, 25 bp, Homo sapien
ctggatttgctgcgaccgtcgccat

SEQ ID NO: 2109308 - DNA, 25 bp, Homo sapien
agctggatttgctgcgaccgtcgcc

SEQ ID NO: 2109309 - DNA, 25 bp, Homo sapien
cagctggatttgctgcgaccgtcgc

SEQ ID NO: 2109310 - DNA, 25 bp, Homo sapien
gcctggcagctcctcgtgctgtggc

SEQ ID NO: 2109311 - DNA, 25 bp, Homo sapien
ctggcagctcctcgtgctgtggctc

SEQ ID NO: 2109312 - DNA, 25 bp, Homo sapien
cctggcagctcctcgtgctgtggct

SEQ ID NO: 2109313 - DNA, 25 bp, Homo sapien
tggcagctcctcgtgctgtggctct

SEQ ID NO: 2109314 - DNA, 25 bp, Homo sapien
agtggacgttctcgcccactctcgc

SEQ ID NO: 2109315 - DNA, 25 bp, Homo sapien
agctttcgccggcccgcagtggacg

SEQ ID NO: 2109316 - DNA, 25 bp, Homo sapien
tttctatctggcgccactggctgtc

SEQ ID NO: 2109317 - DNA, 25 bp, Homo sapien
ctatctggcgccactggctgtccag

SEQ ID NO: 2109318 - DNA, 25 bp, Homo sapien
tgttctcaggcgtcagactgcacca

SEQ ID NO: 2109319 - DNA, 25 bp, Homo sapien
cagacgttgcgattcattcaaaggc

SEQ ID NO: 2109320 - DNA, 25 bp, Homo sapien
caggttcctacgcagtttcactacg

SEQ ID NO: 2109321 - DNA, 25 bp, Homo sapien
gccgaatccccagcggttgtcaatg

SEQ ID NO: 2109322 - DNA, 25 bp, Homo sapien
aaagttgcattacgcagcgcaggcc

SEQ ID NO: 2109323 - DNA, 25 bp, Homo sapien
tcttctgctgacgtcacaaagctcg

SEQ ID NO: 2109324 - DNA, 25 bp, Homo sapien
ggagcaatcggaaaccgctcctcgc

SEQ ID NO: 2109325 - DNA, 25 bp, Homo sapien
ccccgccttatgtagcagaacccac

SEQ ID NO: 2109326 - DNA, 25 bp, Homo sapien
ccacggcgcgtcataaactttgctt

SEQ ID NO: 2109327 - DNA, 25 bp, Homo sapien
tgcttattcgcaggcgccattttct

SEQ ID NO: 2109328 - DNA, 25 bp, Homo sapien
ctgcacgttctctcgactcgggaag

SEQ ID NO: 2109329 - DNA, 25 bp, Homo sapien
gaaggcttccgccagaatcaaaaac

SEQ ID NO: 2109330 - DNA, 25 bp, Homo sapien
atgttgtacaaccacaacctctccc

SEQ ID NO: 2109331 - DNA, 25 bp, Homo sapien
tttaaagcgtattatcaaggatgac

SEQ ID NO: 2109332 - DNA, 25 bp, Homo sapien
gatgacaggatgtcatgtcctacca

SEQ ID NO: 2109333 - DNA, 25 bp, Homo sapien
caacctctccctagttccaaaatat

SEQ ID NO: 2109334 - DNA, 25 bp, Homo sapien
catccaccctttgtggctttacttg

SEQ ID NO: 2109335 - DNA, 25 bp, Homo sapien
caccatccaccctttgtggctttac

SEQ ID NO: 2109336 - DNA, 25 bp, Homo sapien
cctttgtggctttacttgcctccat

SEQ ID NO: 2109337 - DNA, 25 bp, Homo sapien
atccaccctttgtggctttacttgc

SEQ ID NO: 2109338 - DNA, 25 bp, Homo sapien
gtatgcctcccactgcttataccag

SEQ ID NO: 2109339 - DNA, 25 bp, Homo sapien
atgcctcccactgcttataccagtg

SEQ ID NO: 2109340 - DNA, 25 bp, Homo sapien
tgcacgtatgcctcccactgcttat

SEQ ID NO: 2109341 - DNA, 25 bp, Homo sapien
tcccactgcttataccagtgcttct

SEQ ID NO: 2109342 - DNA, 25 bp, Homo sapien
gaaagagtgtggcattgttgatgca

SEQ ID NO: 2109343 - DNA, 25 bp, Homo sapien
aaagagtgtggcattgttgatgcag

SEQ ID NO: 2109344 - DNA, 25 bp, Homo sapien
ttgaaagagtgtggcattgttgatg

SEQ ID NO: 2109345 - DNA, 25 bp, Homo sapien
cttgaaagagtgtggcattgttgat

SEQ ID NO: 2109346 - DNA, 25 bp, Homo sapien
tgggagcagcacataatcctcgcct

SEQ ID NO: 2109347 - DNA, 25 bp, Homo sapien
cagtccctccttgaggcgccagttt

SEQ ID NO: 2109348 - DNA, 25 bp, Homo sapien
tccttgaggcgccagtttatctcat

SEQ ID NO: 2109349 - DNA, 25 bp, Homo sapien
cagctgaccaggtaatgccaagcag

SEQ ID NO: 2109350 - DNA, 25 bp, Homo sapien
cttgcgttcaatgggtggctggcca

SEQ ID NO: 2109351 - DNA, 25 bp, Homo sapien
ttgcgttcaatgggtggctggccat

SEQ ID NO: 2109352 - DNA, 25 bp, Homo sapien
tacctacccagcatacatggatctg

SEQ ID NO: 2109353 - DNA, 25 bp, Homo sapien
gagcagacatatgtgtacctaccca

SEQ ID NO: 2109354 - DNA, 25 bp, Homo sapien
catggatctgtacccatgctgggcc

SEQ ID NO: 2109355 - DNA, 25 bp, Homo sapien
agcgctgtgacctctcaaatgagag

SEQ ID NO: 2109356 - DNA, 25 bp, Homo sapien
caagcagcagttctactgggtacac

SEQ ID NO: 2109357 - DNA, 25 bp, Homo sapien
actgaacagtgtgagatttgcccaa

SEQ ID NO: 2109358 - DNA, 25 bp, Homo sapien
tagaatcggtatggctgaactgaac

SEQ ID NO: 2109359 - DNA, 25 bp, Homo sapien
tgcccaaatcattgtgccggacaag

SEQ ID NO: 2109360 - DNA, 25 bp, Homo sapien
catgcttggccaatacctgtgtcct

SEQ ID NO: 2109361 - DNA, 25 bp, Homo sapien
tgatcaatccatctgggcatacctg

SEQ ID NO: 2109362 - DNA, 25 bp, Homo sapien
gactagtagctaggaacaccaaccc

SEQ ID NO: 2109363 - DNA, 25 bp, Homo sapien
taccctcagggctctagtagatccc

SEQ ID NO: 2109364 - DNA, 25 bp, Homo sapien
catcgagaaccgtgatgtgtgtgtc

SEQ ID NO: 2109365 - DNA, 25 bp, Homo sapien
gagttcttggcccaaagccgagtgt

SEQ ID NO: 2109366 - DNA, 25 bp, Homo sapien
tgtgtcatacaacctatccaaagag

SEQ ID NO: 2109367 - DNA, 25 bp, Homo sapien
gctcccgagctgtgcgcaatactag

SEQ ID NO: 2109368 - DNA, 25 bp, Homo sapien
gctgggccaagtgccatctttcttg

SEQ ID NO: 2109369 - DNA, 25 bp, Homo sapien
gcgctgggccaagtgccatctttct

SEQ ID NO: 2109370 - DNA, 25 bp, Homo sapien
tgcgctgggccaagtgccatctttc

SEQ ID NO: 2109371 - DNA, 25 bp, Homo sapien
tgtgcgctgggccaagtgccatctt

SEQ ID NO: 2109372 - DNA, 25 bp, Homo sapien
tcatcctcttccgacatgttgttgt

SEQ ID NO: 2109373 - DNA, 25 bp, Homo sapien
gtcctcatcctcttccgacatgttg

SEQ ID NO: 2109374 - DNA, 25 bp, Homo sapien
cctcatcctcttccgacatgttgtt

SEQ ID NO: 2109375 - DNA, 25 bp, Homo sapien
gaagtcctcatcctcttccgacatg

SEQ ID NO: 2109376 - DNA, 25 bp, Homo sapien
ttgcccagattggtgaggccacaga

SEQ ID NO: 2109377 - DNA, 25 bp, Homo sapien
tgcccagattggtgaggccacagat

SEQ ID NO: 2109378 - DNA, 25 bp, Homo sapien
ctgcagggccgagttcatgaagcac

SEQ ID NO: 2109379 - DNA, 25 bp, Homo sapien
gccgagttcatgaagcacgtgttgc

SEQ ID NO: 2109380 - DNA, 25 bp, Homo sapien
ggctgtgccagacacaactataatg

SEQ ID NO: 2109381 - DNA, 25 bp, Homo sapien
tgagagaagaggctgatagttcagg

SEQ ID NO: 2109382 - DNA, 25 bp, Homo sapien
tgggcgtgccacttcagacttgtgg

SEQ ID NO: 2109383 - DNA, 25 bp, Homo sapien
ctcttgaagcccaaccacgtggctg

SEQ ID NO: 2109384 - DNA, 25 bp, Homo sapien
ctgcataggcctctgcgatctcacc

SEQ ID NO: 2109385 - DNA, 25 bp, Homo sapien
gatctcacccttcatgcccagtggg

SEQ ID NO: 2109386 - DNA, 25 bp, Homo sapien
ttgttgaggaagtactcggtgagct

SEQ ID NO: 2109387 - DNA, 25 bp, Homo sapien
cagtgggttgcggaagttgagctcc

SEQ ID NO: 2109388 - DNA, 25 bp, Homo sapien
acacatgtggcacaatggagcggtg

SEQ ID NO: 2109389 - DNA, 25 bp, Homo sapien
tgtggcacaatggagcggtggtggc

SEQ ID NO: 2109390 - DNA, 25 bp, Homo sapien
cttgaacacatgtggcacaatggag

SEQ ID NO: 2109391 - DNA, 25 bp, Homo sapien
tggcacaatggagcggtggtggcca

SEQ ID NO: 2109392 - DNA, 25 bp, Homo sapien
gagggagttaggagagccaagagac

SEQ ID NO: 2109393 - DNA, 25 bp, Homo sapien
ggagttaggagagccaagagacgta

SEQ ID NO: 2109394 - DNA, 25 bp, Homo sapien
gttaggagagccaagagacgtaggg

SEQ ID NO: 2109395 - DNA, 25 bp, Homo sapien
agttaggagagccaagagacgtagg

SEQ ID NO: 2109396 - DNA, 25 bp, Homo sapien
tcacccgattaaggtcctcatgcag

SEQ ID NO: 2109397 - DNA, 25 bp, Homo sapien
tcttcttcacccgattaaggtcctc

SEQ ID NO: 2109398 - DNA, 25 bp, Homo sapien
cggtcgcccagcagcatcgcacagc

SEQ ID NO: 2109399 - DNA, 25 bp, Homo sapien
gcagcatcgcacagctccacatact

SEQ ID NO: 2109400 - DNA, 25 bp, Homo sapien
cacaccagcgtggacttgaagaggc

SEQ ID NO: 2109401 - DNA, 25 bp, Homo sapien
aggccgtggaaagtgtccacgatca

SEQ ID NO: 2109402 - DNA, 25 bp, Homo sapien
gggtcgaaggtcacagatacattgc

SEQ ID NO: 2109403 - DNA, 25 bp, Homo sapien
gatacattgccacaatcggggcaca

SEQ ID NO: 2109404 - DNA, 25 bp, Homo sapien
aagaccctcttgtggctgataggca

SEQ ID NO: 2109405 - DNA, 25 bp, Homo sapien
ctgctctggcttgcggcgcggatcc

SEQ ID NO: 2109406 - DNA, 25 bp, Homo sapien
tcttgtggctgataggcagtggaac

SEQ ID NO: 2109407 - DNA, 25 bp, Homo sapien
gaagacctccaagaccctcttgtgg

SEQ ID NO: 2109408 - DNA, 25 bp, Homo sapien
tgagttaatgcaagaagccttgagc

SEQ ID NO: 2109409 - DNA, 25 bp, Homo sapien
caaaagggcttgtggtgagttaatg

SEQ ID NO: 2109410 - DNA, 25 bp, Homo sapien
cttgagctatggcagctaatcaaac

SEQ ID NO: 2109411 - DNA, 25 bp, Homo sapien
tcaaactctatgtgtccatcatcat

SEQ ID NO: 2109412 - DNA, 25 bp, Homo sapien
gatgcccgtgtgtttggacagagcc

SEQ ID NO: 2109413 - DNA, 25 bp, Homo sapien
gacagagccacacatagatccgaga

SEQ ID NO: 2109414 - DNA, 25 bp, Homo sapien
tcttgcctttcttggggaccacgag

SEQ ID NO: 2109415 - DNA, 25 bp, Homo sapien
cctctctggcgagatgcccgtgtgt

SEQ ID NO: 2109416 - DNA, 25 bp, Homo sapien
ggctcctctagctgatagagcttat

SEQ ID NO: 2109417 - DNA, 25 bp, Homo sapien
cggtgactgaagacatcagccacca

SEQ ID NO: 2109418 - DNA, 25 bp, Homo sapien
tcacggtccaagatgctgctcagag

SEQ ID NO: 2109419 - DNA, 25 bp, Homo sapien
acgaagatatcatcacggtccaaga

SEQ ID NO: 2109420 - DNA, 25 bp, Homo sapien
tccaaaaagcatcaggccgtagtag

SEQ ID NO: 2109421 - DNA, 25 bp, Homo sapien
tacatcaggacgttatacaggccct

SEQ ID NO: 2109422 - DNA, 25 bp, Homo sapien
ggaaccacgatgtcctctcttgagc

SEQ ID NO: 2109423 - DNA, 25 bp, Homo sapien
tcaatggcctcaatgcgacctgaca

SEQ ID NO: 2109424 - DNA, 25 bp, Homo sapien
ggaggtgtcaaataagcagctaaac

SEQ ID NO: 2109425 - DNA, 25 bp, Homo sapien
caggcagtagcaaagccagaggtct

SEQ ID NO: 2109426 - DNA, 25 bp, Homo sapien
gtatccctagcacccaagacaggca

SEQ ID NO: 2109427 - DNA, 25 bp, Homo sapien
taaacacccaagtcggagttcagac

SEQ ID NO: 2109428 - DNA, 25 bp, Homo sapien
tgtgtgccacagtaaagactctaga

SEQ ID NO: 2109429 - DNA, 25 bp, Homo sapien
gaattctgataacacaatgctttgt

SEQ ID NO: 2109430 - DNA, 25 bp, Homo sapien
tgtaacttcccatcagggaaagcct

SEQ ID NO: 2109431 - DNA, 25 bp, Homo sapien
cactgctagacaagacacataccgg

SEQ ID NO: 2109432 - DNA, 25 bp, Homo sapien
catgtaaaccgttctgaatctgagg

SEQ ID NO: 2109433 - DNA, 25 bp, Homo sapien
aaggggtgacgcgtaaatgcatgaa

SEQ ID NO: 2109434 - DNA, 25 bp, Homo sapien
gaatctgaggtgtgagagggctgaa

SEQ ID NO: 2109435 - DNA, 25 bp, Homo sapien
ggtagatccacatgtaaaccgttct

SEQ ID NO: 2109436 - DNA, 25 bp, Homo sapien
cccaagacgggtacaaggacagtgg

SEQ ID NO: 2109437 - DNA, 25 bp, Homo sapien
cagtggggatagagcccgggatttt

SEQ ID NO: 2109438 - DNA, 25 bp, Homo sapien
gagactcccaagacgggtacaagga

SEQ ID NO: 2109439 - DNA, 25 bp, Homo sapien
gcagaggagactcccaagacgggta

SEQ ID NO: 2109440 - DNA, 25 bp, Homo sapien
tgagttgggtttggtcacgtagcgt

SEQ ID NO: 2109441 - DNA, 25 bp, Homo sapien
atctgagttgggtttggtcacgtag

SEQ ID NO: 2109442 - DNA, 25 bp, Homo sapien
tctgagttgggtttggtcacgtagc

SEQ ID NO: 2109443 - DNA, 25 bp, Homo sapien
ctcatccccatcgtcctcatcatct

SEQ ID NO: 2109444 - DNA, 25 bp, Homo sapien
cctacgtgggtcagacctaacccag

SEQ ID NO: 2109445 - DNA, 25 bp, Homo sapien
ctaggacaggaggatgtcagagatg

SEQ ID NO: 2109446 - DNA, 25 bp, Homo sapien
gaaggtgtgagcctcaagtgctaag

SEQ ID NO: 2109447 - DNA, 25 bp, Homo sapien
gcaatgcacacctagacgaacccta

SEQ ID NO: 2109448 - DNA, 25 bp, Homo sapien
gcccagggacgtcatctttatcctc

SEQ ID NO: 2109449 - DNA, 25 bp, Homo sapien
gctgcccccagttgagggcccaggg

SEQ ID NO: 2109450 - DNA, 25 bp, Homo sapien
gagggcccagggacgtcatctttat

SEQ ID NO: 2109451 - DNA, 25 bp, Homo sapien
ctggctcagggtctcggaggctgcc

SEQ ID NO: 2109452 - DNA, 25 bp, Homo sapien
ttcgtgactccagagctgggcccag

SEQ ID NO: 2109453 - DNA, 25 bp, Homo sapien
ctgttcgtgactccagagctgggcc

SEQ ID NO: 2109454 - DNA, 25 bp, Homo sapien
tgttcgtgactccagagctgggccc

SEQ ID NO: 2109455 - DNA, 25 bp, Homo sapien
tcgtgactccagagctgggcccagc

SEQ ID NO: 2109456 - DNA, 25 bp, Homo sapien
cagctgcttgcgtcgtcgccttggg

SEQ ID NO: 2109457 - DNA, 25 bp, Homo sapien
cagggtgaacagctgcttgcgtcgt

SEQ ID NO: 2109458 - DNA, 25 bp, Homo sapien
ttgtgcggtcgctggtcccattgga

SEQ ID NO: 2109459 - DNA, 25 bp, Homo sapien
tgtgccaaggcaattgtccaggagg

SEQ ID NO: 2109460 - DNA, 25 bp, Homo sapien
ctcagcctctacctcgtcatagtaa

SEQ ID NO: 2109461 - DNA, 25 bp, Homo sapien
tctctggctcccagtcgatagcaat

SEQ ID NO: 2109462 - DNA, 25 bp, Homo sapien
tcgtcatagtaacgcttcttcatct

SEQ ID NO: 2109463 - DNA, 25 bp, Homo sapien
cagtcgatagcaatgtacggctggg

SEQ ID NO: 2109464 - DNA, 25 bp, Homo sapien
acgggagccttcttcatcacgtacc

SEQ ID NO: 2109465 - DNA, 25 bp, Homo sapien
gaagagctcaatgcactcctgcagc

SEQ ID NO: 2109466 - DNA, 25 bp, Homo sapien
cccgacgcagtcatgcttcacgtag

SEQ ID NO: 2109467 - DNA, 25 bp, Homo sapien
ttcttcatcacgtacccgacgcagt

SEQ ID NO: 2109468 - DNA, 25 bp, Homo sapien
gacatcacatcaagtggcatcgctg

SEQ ID NO: 2109469 - DNA, 25 bp, Homo sapien
catcgctgagctagaaagtaatgct

SEQ ID NO: 2109470 - DNA, 25 bp, Homo sapien
gaacttaagtcttcaccctcgagga

SEQ ID NO: 2109471 - DNA, 25 bp, Homo sapien
caggtagaagcaacacacagtgaac

SEQ ID NO: 2109472 - DNA, 25 bp, Homo sapien
gtggatgatgagaatctccggcagc

SEQ ID NO: 2109473 - DNA, 25 bp, Homo sapien
aggaaaagcgtttcaggtggatgat

SEQ ID NO: 2109474 - DNA, 25 bp, Homo sapien
tctcgggagaacttggtgtaggaaa

SEQ ID NO: 2109475 - DNA, 25 bp, Homo sapien
atgatgagaatctccggcagcatcc

SEQ ID NO: 2109476 - DNA, 25 bp, Homo sapien
ttcccccagccatcctctccctggc

SEQ ID NO: 2109477 - DNA, 25 bp, Homo sapien
tggggagagggttaatactggtaca

SEQ ID NO: 2109478 - DNA, 25 bp, Homo sapien
cctgccttcccccagccatcctctc

SEQ ID NO: 2109479 - DNA, 25 bp, Homo sapien
ctttccctgccttcccccagccatc

SEQ ID NO: 2109480 - DNA, 25 bp, Homo sapien
ccggattcgactcattctgtggctg

SEQ ID NO: 2109481 - DNA, 25 bp, Homo sapien
tgaggtcatatttgtacagctccgg

SEQ ID NO: 2109482 - DNA, 25 bp, Homo sapien
ccccataatggttggaaaccgcgat

SEQ ID NO: 2109483 - DNA, 25 bp, Homo sapien
gttggaaaccgcgatgaggtcatat

SEQ ID NO: 2109484 - DNA, 25 bp, Homo sapien
aaggtcctgatcgcccccctgccca

SEQ ID NO: 2109485 - DNA, 25 bp, Homo sapien
gaaggtcctgatcgcccccctgccc

SEQ ID NO: 2109486 - DNA, 25 bp, Homo sapien
ggtcctgatcgcccccctgcccaga

SEQ ID NO: 2109487 - DNA, 25 bp, Homo sapien
tgggaaggtcctgatcgcccccctg

SEQ ID NO: 2109488 - DNA, 25 bp, Homo sapien
ccaccacgataacctcaccactggc

SEQ ID NO: 2109489 - DNA, 25 bp, Homo sapien
tcagaagtgtccagattcactcttg

SEQ ID NO: 2109490 - DNA, 25 bp, Homo sapien
aagggaaggagagttatcctcgcct

SEQ ID NO: 2109491 - DNA, 25 bp, Homo sapien
ggagagttatcctcgcctacccttc

SEQ ID NO: 2109492 - DNA, 25 bp, Homo sapien
gtcatcaaagtagtgccactggccg

SEQ ID NO: 2109493 - DNA, 25 bp, Homo sapien
tcaaagtagtgccactggccgctgt

SEQ ID NO: 2109494 - DNA, 25 bp, Homo sapien
ttctcattgacaggggagacgctgt

SEQ ID NO: 2109495 - DNA, 25 bp, Homo sapien
gggagacgctgttgtcatcaaagta

SEQ ID NO: 2109496 - DNA, 25 bp, Homo sapien
aggctggggcgccagatgagccggc

SEQ ID NO: 2109497 - DNA, 25 bp, Homo sapien
gggacagcaggcgtcgcgccacgtc

SEQ ID NO: 2109498 - DNA, 25 bp, Homo sapien
gcgccacgtcctggcgttggtagaa

SEQ ID NO: 2109499 - DNA, 25 bp, Homo sapien
aggcgtcgcgccacgtcctggcgtt

SEQ ID NO: 2109500 - DNA, 25 bp, Homo sapien
gggcggacacgagaagcgagattgc

SEQ ID NO: 2109501 - DNA, 25 bp, Homo sapien
taacacgaataagagaagcggggcg

SEQ ID NO: 2109502 - DNA, 25 bp, Homo sapien
aagcgagattgcagagagggctttt

SEQ ID NO: 2109503 - DNA, 25 bp, Homo sapien
acacgagaagcgagattgcagagag

SEQ ID NO: 2109504 - DNA, 25 bp, Homo sapien
gactaagcctgcaatgcctggcggg

SEQ ID NO: 2109505 - DNA, 25 bp, Homo sapien
gagaacagtagccacgactaagcct

SEQ ID NO: 2109506 - DNA, 25 bp, Homo sapien
cagcggcacaggagaacagtagcca

SEQ ID NO: 2109507 - DNA, 25 bp, Homo sapien
tttcccgggagagagcgatgcagcg

SEQ ID NO: 2109508 - DNA, 25 bp, Homo sapien
actgctggaagggcaaacacaggcg

SEQ ID NO: 2109509 - DNA, 25 bp, Homo sapien
gaagggcacgaccataaataaagac

SEQ ID NO: 2109510 - DNA, 25 bp, Homo sapien
gcagactggtgctttatatatacac

SEQ ID NO: 2109511 - DNA, 25 bp, Homo sapien
caaaactggtgcttagttaagtcca

SEQ ID NO: 2109512 - DNA, 25 bp, Homo sapien
tttcttgtcagcgttcacctgaact

SEQ ID NO: 2109513 - DNA, 25 bp, Homo sapien
tcttgtcagcgttcacctgaactct

SEQ ID NO: 2109514 - DNA, 25 bp, Homo sapien
tgtcagcgttcacctgaactctggc

SEQ ID NO: 2109515 - DNA, 25 bp, Homo sapien
cttttcttgtcagcgttcacctgaa

SEQ ID NO: 2109516 - DNA, 25 bp, Homo sapien
gagaacaatcgtgcttcctgtggcc

SEQ ID NO: 2109517 - DNA, 25 bp, Homo sapien
ggcacgattgttccaacacctttat

SEQ ID NO: 2109518 - DNA, 25 bp, Homo sapien
tggccatattggcacgattgttcca

SEQ ID NO: 2109519 - DNA, 25 bp, Homo sapien
cagcccttgcaatgcgcaaggagag

SEQ ID NO: 2109520 - DNA, 25 bp, Homo sapien
acttcagagaatgggcttttgtggc

SEQ ID NO: 2109521 - DNA, 25 bp, Homo sapien
ttcagagaatgggcttttgtggcca

SEQ ID NO: 2109522 - DNA, 25 bp, Homo sapien
caacttcagagaatgggcttttgtg

SEQ ID NO: 2109523 - DNA, 25 bp, Homo sapien
tcagagaatgggcttttgtggccat

SEQ ID NO: 2109524 - DNA, 25 bp, Homo sapien
gtgcctgtgctgtaacaaggttgga

SEQ ID NO: 2109525 - DNA, 25 bp, Homo sapien
gaaccaccatacttatgaaccacaa

SEQ ID NO: 2109526 - DNA, 25 bp, Homo sapien
tgtgcctgtgctgtaacaaggttgg

SEQ ID NO: 2109527 - DNA, 25 bp, Homo sapien
taagcatgaaaaccgaaccaccata

SEQ ID NO: 2109528 - DNA, 25 bp, Homo sapien
taatgatttcgcctctatggctggc

SEQ ID NO: 2109529 - DNA, 25 bp, Homo sapien
ttctctcggtactcacacgtgaagg

SEQ ID NO: 2109530 - DNA, 25 bp, Homo sapien
tagcgtgcaagtgatagtctttctc

SEQ ID NO: 2109531 - DNA, 25 bp, Homo sapien
tgaagggcatcacttgcctgcgcgc

SEQ ID NO: 2109532 - DNA, 25 bp, Homo sapien
tatcaatacccgtgagcactaagga

SEQ ID NO: 2109533 - DNA, 25 bp, Homo sapien
gaaccctgcaccatattaggactgg

SEQ ID NO: 2109534 - DNA, 25 bp, Homo sapien
ggtcacattgccctaatatatcaat

SEQ ID NO: 2109535 - DNA, 25 bp, Homo sapien
tacaatttcccgcagcagcttcctg

SEQ ID NO: 2109536 - DNA, 25 bp, Homo sapien
ggaactgtttgaccacttgacacaa

SEQ ID NO: 2109537 - DNA, 25 bp, Homo sapien
tgagggaggatatgctctcgcacac

SEQ ID NO: 2109538 - DNA, 25 bp, Homo sapien
gatatgctctcgcacacttcggcat

SEQ ID NO: 2109539 - DNA, 25 bp, Homo sapien
cgttgcttaggaactgtttgaccac

SEQ ID NO: 2109540 - DNA, 25 bp, Homo sapien
tgcaagccaagttaagggcaatggg

SEQ ID NO: 2109541 - DNA, 25 bp, Homo sapien
ctgcaagccaagttaagggcaatgg

SEQ ID NO: 2109542 - DNA, 25 bp, Homo sapien
cccccaccgcccaggtctgatcaca

SEQ ID NO: 2109543 - DNA, 25 bp, Homo sapien
ccaccgcccaggtctgatcacacat

SEQ ID NO: 2109544 - DNA, 25 bp, Homo sapien
gcttaacaactgcttggccgcttga

SEQ ID NO: 2109545 - DNA, 25 bp, Homo sapien
catccaacgtgaagccaagtaaggt

SEQ ID NO: 2109546 - DNA, 25 bp, Homo sapien
gacaagccaactttactgtgctgct

SEQ ID NO: 2109547 - DNA, 25 bp, Homo sapien
gcttgacaaattggcatccaacgtg

SEQ ID NO: 2109548 - DNA, 25 bp, Homo sapien
gggaacagaaggcatggcagcaagg

SEQ ID NO: 2109549 - DNA, 25 bp, Homo sapien
ttccaaagaaccgtttctgcaatgc

SEQ ID NO: 2109550 - DNA, 25 bp, Homo sapien
gatcaataaacagcccctggagtga

SEQ ID NO: 2109551 - DNA, 25 bp, Homo sapien
caaagaaccgtttctgcaatgcttg

SEQ ID NO: 2109552 - DNA, 25 bp, Homo sapien
tgggcctgaagggttaatgatgtca

SEQ ID NO: 2109553 - DNA, 25 bp, Homo sapien
tcagggacctgcttgtccccaggag

SEQ ID NO: 2109554 - DNA, 25 bp, Homo sapien
cagccagaacaggttggcacttgtg

SEQ ID NO: 2109555 - DNA, 25 bp, Homo sapien
tgtgttcctgtataagagctacagc

SEQ ID NO: 2109556 - DNA, 25 bp, Homo sapien
gaatgttggccattcaggcagaggc

SEQ ID NO: 2109557 - DNA, 25 bp, Homo sapien
agtgggcattaacagtctcatggat

SEQ ID NO: 2109558 - DNA, 25 bp, Homo sapien
gcaggtctcagggactgtacgatca

SEQ ID NO: 2109559 - DNA, 25 bp, Homo sapien
gacaaatatcagtgggcaggtctca

SEQ ID NO: 2109560 - DNA, 25 bp, Homo sapien
gaaggtgtgacctgtgctgttgtcc

SEQ ID NO: 2109561 - DNA, 25 bp, Homo sapien
gatgctttaggcttcaatagcccca

SEQ ID NO: 2109562 - DNA, 25 bp, Homo sapien
cgcagaaaatgctaattggttaccc

SEQ ID NO: 2109563 - DNA, 25 bp, Homo sapien
tgatgcccaaacaaccacgcagaaa

SEQ ID NO: 2109564 - DNA, 25 bp, Homo sapien
tgaacacagcgctgttacggatcgg

SEQ ID NO: 2109565 - DNA, 25 bp, Homo sapien
acttggtccatgagtggcgttgtca

SEQ ID NO: 2109566 - DNA, 25 bp, Homo sapien
tacggatcggcggagacttggtcca

SEQ ID NO: 2109567 - DNA, 25 bp, Homo sapien
tcaggcgaggaatatggctgcgcta

SEQ ID NO: 2109568 - DNA, 25 bp, Homo sapien
ctgcagcctccagtaaggggtaagg

SEQ ID NO: 2109569 - DNA, 25 bp, Homo sapien
tgcagcctccagtaaggggtaaggc

SEQ ID NO: 2109570 - DNA, 25 bp, Homo sapien
ctccagtaaggggtaaggctcaatg

SEQ ID NO: 2109571 - DNA, 25 bp, Homo sapien
agcctccagtaaggggtaaggctca

SEQ ID NO: 2109572 - DNA, 25 bp, Homo sapien
tggggtgatgtcccattagctggca

SEQ ID NO: 2109573 - DNA, 25 bp, Homo sapien
ctggggtgatgtcccattagctggc

SEQ ID NO: 2109574 - DNA, 25 bp, Homo sapien
ggggtgatgtcccattagctggcat

SEQ ID NO: 2109575 - DNA, 25 bp, Homo sapien
ctcctggaatcagggcagggaatct

SEQ ID NO: 2109576 - DNA, 25 bp, Homo sapien
caaaagatctgccaggttctcctgg

SEQ ID NO: 2109577 - DNA, 25 bp, Homo sapien
ttctcctggaatcagggcagggaat

SEQ ID NO: 2109578 - DNA, 25 bp, Homo sapien
ctcaaaagatctgccaggttctcct

SEQ ID NO: 2109579 - DNA, 25 bp, Homo sapien
acagaagaagcattcttcaggcccc

SEQ ID NO: 2109580 - DNA, 25 bp, Homo sapien
tttcttgacactcaagtattaggaa

SEQ ID NO: 2109581 - DNA, 25 bp, Homo sapien
cttgacactcaagtattaggaactg

SEQ ID NO: 2109582 - DNA, 25 bp, Homo sapien
acactcaagtattaggaactgctgc

SEQ ID NO: 2109583 - DNA, 25 bp, Homo sapien
caggaactaatcttctcaatggagc

SEQ ID NO: 2109584 - DNA, 25 bp, Homo sapien
gcaggaactaatcttctcaatggag

SEQ ID NO: 2109585 - DNA, 25 bp, Homo sapien
aggaactaatcttctcaatggagcc

SEQ ID NO: 2109586 - DNA, 25 bp, Homo sapien
tgtaataacaatctccaatgatcag

SEQ ID NO: 2109587 - DNA, 25 bp, Homo sapien
agtctgtgccactcctgtcgggtga

SEQ ID NO: 2109588 - DNA, 25 bp, Homo sapien
cactcctgtcgggtgaaatccacag

SEQ ID NO: 2109589 - DNA, 25 bp, Homo sapien
gtgccactcctgtcgggtgaaatcc

SEQ ID NO: 2109590 - DNA, 25 bp, Homo sapien
ccacatcctcgaatgacacggaccc

SEQ ID NO: 2109591 - DNA, 25 bp, Homo sapien
cagatgccaggttgctgtaggtctc

SEQ ID NO: 2109592 - DNA, 25 bp, Homo sapien
agatgccaggttgctgtaggtctcc

SEQ ID NO: 2109593 - DNA, 25 bp, Homo sapien
tctccagcatcacatccttgtgcat

SEQ ID NO: 2109594 - DNA, 25 bp, Homo sapien
ccacagatgccaggttgctgtaggt

SEQ ID NO: 2109595 - DNA, 25 bp, Homo sapien
tgatggaggaggaaggtgcatcttc

SEQ ID NO: 2109596 - DNA, 25 bp, Homo sapien
gatggaggaggaaggtgcatcttca

SEQ ID NO: 2109597 - DNA, 25 bp, Homo sapien
atggaggaggaaggtgcatcttcat

SEQ ID NO: 2109598 - DNA, 25 bp, Homo sapien
ctgatggaggaggaaggtgcatctt

SEQ ID NO: 2109599 - DNA, 25 bp, Homo sapien
gggccaagttgtctgagctctaggg

SEQ ID NO: 2109600 - DNA, 25 bp, Homo sapien
ccaagttgtctgagctctagggcct

SEQ ID NO: 2109601 - DNA, 25 bp, Homo sapien
tgggccaagttgtctgagctctagg

SEQ ID NO: 2109602 - DNA, 25 bp, Homo sapien
catctctggtttggccacgcagagg

SEQ ID NO: 2109603 - DNA, 25 bp, Homo sapien
atcatctctggtttggccacgcaga

SEQ ID NO: 2109604 - DNA, 25 bp, Homo sapien
ccatggcctgaggattcctcctcta

SEQ ID NO: 2109605 - DNA, 25 bp, Homo sapien
agtaaccatggcctgaggattcctc

SEQ ID NO: 2109606 - DNA, 25 bp, Homo sapien
atatgtccagttcttgcccagtact

SEQ ID NO: 2109607 - DNA, 25 bp, Homo sapien
tgtccagttcttgcccagtacttac

SEQ ID NO: 2109608 - DNA, 25 bp, Homo sapien
tttccatatgtccagttcttgccca

SEQ ID NO: 2109609 - DNA, 25 bp, Homo sapien
ttttccatatgtccagttcttgccc

SEQ ID NO: 2109610 - DNA, 25 bp, Homo sapien
cagaaccattgccacacagcagtga

SEQ ID NO: 2109611 - DNA, 25 bp, Homo sapien
tgagggcattatccccaacagaacc

SEQ ID NO: 2109612 - DNA, 25 bp, Homo sapien
ctgagggcattatccccaacagaac

SEQ ID NO: 2109613 - DNA, 25 bp, Homo sapien
cccaacagaaccattgccacacagc

SEQ ID NO: 2109614 - DNA, 25 bp, Homo sapien
atggtgaagaaggtcattatcatgc

SEQ ID NO: 2109615 - DNA, 25 bp, Homo sapien
gatggtgaagaaggtcattatcatg

SEQ ID NO: 2109616 - DNA, 25 bp, Homo sapien
ctgatggtgaagaaggtcattatca

SEQ ID NO: 2109617 - DNA, 25 bp, Homo sapien
tgatggtgaagaaggtcattatcat

SEQ ID NO: 2109618 - DNA, 25 bp, Homo sapien
gccaggaccagcctatgtgagttct

SEQ ID NO: 2109619 - DNA, 25 bp, Homo sapien
tctctgatgaatcgtgagggttgcc

SEQ ID NO: 2109620 - DNA, 25 bp, Homo sapien
tcccaagagatgagtgcaccctgaa

SEQ ID NO: 2109621 - DNA, 25 bp, Homo sapien
tgagttctccggtgttgacaaaggg

SEQ ID NO: 2109622 - DNA, 25 bp, Homo sapien
agtgagaggctttcttcattgtaca

SEQ ID NO: 2109623 - DNA, 25 bp, Homo sapien
tgagaggctttcttcattgtacaac

SEQ ID NO: 2109624 - DNA, 25 bp, Homo sapien
gtgagaggctttcttcattgtacaa

SEQ ID NO: 2109625 - DNA, 25 bp, Homo sapien
tcagtgagaggctttcttcattgta

SEQ ID NO: 2109626 - DNA, 25 bp, Homo sapien
tgtgtgccctggtgatcatatgccc

SEQ ID NO: 2109627 - DNA, 25 bp, Homo sapien
ccaacgacagtctgggagaagatat

SEQ ID NO: 2109628 - DNA, 25 bp, Homo sapien
aaaacaatgagctatcccctaaggg

SEQ ID NO: 2109629 - DNA, 25 bp, Homo sapien
cccaaggagcttgatccaatggtga

SEQ ID NO: 2109630 - DNA, 25 bp, Homo sapien
taaatacagtgtgagcccatttatg

SEQ ID NO: 2109631 - DNA, 25 bp, Homo sapien
gccagacctatacttatcaacaagg

SEQ ID NO: 2109632 - DNA, 25 bp, Homo sapien
gagagataaatgactagccagacct

SEQ ID NO: 2109633 - DNA, 25 bp, Homo sapien
cagatcttggaaaggtaacattaca

SEQ ID NO: 2109634 - DNA, 25 bp, Homo sapien
gaaagtcagtataccccagactggg

SEQ ID NO: 2109635 - DNA, 25 bp, Homo sapien
cagacatgactcctgaaatgggaac

SEQ ID NO: 2109636 - DNA, 25 bp, Homo sapien
tactatgatggtggctactggagga

SEQ ID NO: 2109637 - DNA, 25 bp, Homo sapien
gagactatccttaggctcttgggag

SEQ ID NO: 2109638 - DNA, 25 bp, Homo sapien
gggctgtaatacatgggcagttgat

SEQ ID NO: 2109639 - DNA, 25 bp, Homo sapien
catgggcagttgatacaccattagg

SEQ ID NO: 2109640 - DNA, 25 bp, Homo sapien
gctatttttggggaagcagacacca

SEQ ID NO: 2109641 - DNA, 25 bp, Homo sapien
tatactcatgggctgtaatacatgg

SEQ ID NO: 2109642 - DNA, 25 bp, Homo sapien
acacagacacccctaatgctgggag

SEQ ID NO: 2109643 - DNA, 25 bp, Homo sapien
ctaagaaaccattaaggcacaggat

SEQ ID NO: 2109644 - DNA, 25 bp, Homo sapien
ccacagctaaagaggtctacctgga

SEQ ID NO: 2109645 - DNA, 25 bp, Homo sapien
gactcttgggctatagatatcctgc

SEQ ID NO: 2109646 - DNA, 25 bp, Homo sapien
aacagccgcactattttacatccta

SEQ ID NO: 2109647 - DNA, 25 bp, Homo sapien
ggcatttgtatatcatccatggaga

SEQ ID NO: 2109648 - DNA, 25 bp, Homo sapien
caccctatgggtgtgtagtgttatt

SEQ ID NO: 2109649 - DNA, 25 bp, Homo sapien
tacctgatggctaattacgttgagc

SEQ ID NO: 2109650 - DNA, 25 bp, Homo sapien
tggcagaatgtatcagcacctcatt

SEQ ID NO: 2109651 - DNA, 25 bp, Homo sapien
gagatgtaattcacacacgtacagt

SEQ ID NO: 2109652 - DNA, 25 bp, Homo sapien
tgtggtctttcccaacaggcttctt

SEQ ID NO: 2109653 - DNA, 25 bp, Homo sapien
gagaaacccagtacctgtgagcagt

SEQ ID NO: 2109654 - DNA, 25 bp, Homo sapien
gcctatattcgaaaaggagagggtg

SEQ ID NO: 2109655 - DNA, 25 bp, Homo sapien
taaatgcctatattcgaaaaggaga

SEQ ID NO: 2109656 - DNA, 25 bp, Homo sapien
accacaatttatgggatgcgactaa

SEQ ID NO: 2109657 - DNA, 25 bp, Homo sapien
ggatgcgactaaagcagtacttaaa

SEQ ID NO: 2109658 - DNA, 25 bp, Homo sapien
tatcagtccattatccttgcaaagg

SEQ ID NO: 2109659 - DNA, 25 bp, Homo sapien
tgcctaaccaaagattacaatgatt

SEQ ID NO: 2109660 - DNA, 25 bp, Homo sapien
tctgggtgtaacttcactatcagtc

SEQ ID NO: 2109661 - DNA, 25 bp, Homo sapien
gatattaatttacactgccctaatg

SEQ ID NO: 2109662 - DNA, 25 bp, Homo sapien
gcagctccggttgagtccacagatg

SEQ ID NO: 2109663 - DNA, 25 bp, Homo sapien
gccaggcttcttagtggaaactgca

SEQ ID NO: 2109664 - DNA, 25 bp, Homo sapien
gcagagggacgtggcagctcatgtg

SEQ ID NO: 2109665 - DNA, 25 bp, Homo sapien
aaaacatttgtgagtgaacgtggag

SEQ ID NO: 2109666 - DNA, 25 bp, Homo sapien
cagaggtgtatatagggtaggagct

SEQ ID NO: 2109667 - DNA, 25 bp, Homo sapien
ccattcacaattcagaccaggacta

SEQ ID NO: 2109668 - DNA, 25 bp, Homo sapien
tgggcagaggtgtatatagggtagg

SEQ ID NO: 2109669 - DNA, 25 bp, Homo sapien
cacaattcagaccaggactagagcc

SEQ ID NO: 2109670 - DNA, 25 bp, Homo sapien
cgagcggccgcttcggagctgacac

SEQ ID NO: 2109671 - DNA, 25 bp, Homo sapien
ggccgcttcggagctgacactaagc

SEQ ID NO: 2109672 - DNA, 25 bp, Homo sapien
ccaccaggtgtaattgtgggcgagc

SEQ ID NO: 2109673 - DNA, 25 bp, Homo sapien
cggcgcggtgtaagggcacccacca

SEQ ID NO: 2109674 - DNA, 25 bp, Homo sapien
cagacgcggtgggcgcggggtcccg

SEQ ID NO: 2109675 - DNA, 25 bp, Homo sapien
tggcctaaatctgacacgcacgact

SEQ ID NO: 2109676 - DNA, 25 bp, Homo sapien
gtccaggtcggaaatgtagccagtg

SEQ ID NO: 2109677 - DNA, 25 bp, Homo sapien
aactgcacaggttcggtgacagccg

SEQ ID NO: 2109678 - DNA, 25 bp, Homo sapien
gtgacagccgagacgccgagtgttt

SEQ ID NO: 2109679 - DNA, 25 bp, Homo sapien
aaaacttcaaccttaatgcttccag

SEQ ID NO: 2109680 - DNA, 25 bp, Homo sapien
aatgactgaattgtgaaaacgagcc

SEQ ID NO: 2109681 - DNA, 25 bp, Homo sapien
acagatccacggtcccgggcgctga

SEQ ID NO: 2109682 - DNA, 25 bp, Homo sapien
caaatcagcacttgaaaccgaacac

SEQ ID NO: 2109683 - DNA, 25 bp, Homo sapien
accaagctgggtcaaactgccgaca

SEQ ID NO: 2109684 - DNA, 25 bp, Homo sapien
gcagccggaataaagcgcccatggc

SEQ ID NO: 2109685 - DNA, 25 bp, Homo sapien
ggatgtttgccactccaacaatgga

SEQ ID NO: 2109686 - DNA, 25 bp, Homo sapien
tggccttgccctttgagtctcggag

SEQ ID NO: 2109687 - DNA, 25 bp, Homo sapien
aacttcttgttcgtttgcggaaatg

SEQ ID NO: 2109688 - DNA, 25 bp, Homo sapien
aaaatggtgttaagacctgtaacat

SEQ ID NO: 2109689 - DNA, 25 bp, Homo sapien
gttcgtttgcggaaatgcaaaatgg

SEQ ID NO: 2109690 - DNA, 25 bp, Homo sapien
tctgcagtccctctaaattccttct

SEQ ID NO: 2109691 - DNA, 25 bp, Homo sapien
caagcttgaaccaatagagccgcag

SEQ ID NO: 2109692 - DNA, 25 bp, Homo sapien
gagccgcagagtacgataaatccaa

SEQ ID NO: 2109693 - DNA, 25 bp, Homo sapien
ttaaaaggcccaacgcacaagcttg

SEQ ID NO: 2109694 - DNA, 25 bp, Homo sapien
tgaaagctggcctcgtacttgagcc

SEQ ID NO: 2109695 - DNA, 25 bp, Homo sapien
tctatctggaatagggaagtgaaac

SEQ ID NO: 2109696 - DNA, 25 bp, Homo sapien
gatttcataccatataccagagtaa

SEQ ID NO: 2109697 - DNA, 25 bp, Homo sapien
taaattccaactagattaaagtaga

SEQ ID NO: 2109698 - DNA, 25 bp, Homo sapien
catatctgatcagaggctacatttc

SEQ ID NO: 2109699 - DNA, 25 bp, Homo sapien
tagaagtcacggatgtcccctgttt

SEQ ID NO: 2109700 - DNA, 25 bp, Homo sapien
ggcttactgcaaagaaccatccttc

SEQ ID NO: 2109701 - DNA, 25 bp, Homo sapien
gtttcataaatggtgccaactggca

SEQ ID NO: 2109702 - DNA, 25 bp, Homo sapien
cctgtttacctatgagaaggccaga

SEQ ID NO: 2109703 - DNA, 25 bp, Homo sapien
gggcatggttaatacctgagatttt

SEQ ID NO: 2109704 - DNA, 25 bp, Homo sapien
aaatcctgatggttactgtgtgtaa

SEQ ID NO: 2109705 - DNA, 25 bp, Homo sapien
cagtaaatcctgatggttactgtgt

SEQ ID NO: 2109706 - DNA, 25 bp, Homo sapien
taatacctgagatttttactcagta

SEQ ID NO: 2109707 - DNA, 25 bp, Homo sapien
agaagagggcctgattagaactgtt

SEQ ID NO: 2109708 - DNA, 25 bp, Homo sapien
tattgacttactgaactgaagcatt

SEQ ID NO: 2109709 - DNA, 25 bp, Homo sapien
gaaggaaatacatagacctacaact

SEQ ID NO: 2109710 - DNA, 25 bp, Homo sapien
tagaactgttctggttgtgtttggc

SEQ ID NO: 2109711 - DNA, 25 bp, Homo sapien
atttggatgtagatacgttaggcag

SEQ ID NO: 2109712 - DNA, 25 bp, Homo sapien
tggatgtagatacgttaggcagttt

SEQ ID NO: 2109713 - DNA, 25 bp, Homo sapien
ggatgtagatacgttaggcagttta

SEQ ID NO: 2109714 - DNA, 25 bp, Homo sapien
tttggatgtagatacgttaggcagt

SEQ ID NO: 2109715 - DNA, 25 bp, Homo sapien
gtcgcgctgcgggagtgggcgggag

SEQ ID NO: 2109716 - DNA, 25 bp, Homo sapien
cggcagtcggcaggaaccgccgtca

SEQ ID NO: 2109717 - DNA, 25 bp, Homo sapien
cggacggtcgttccttggagaagct

SEQ ID NO: 2109718 - DNA, 25 bp, Homo sapien
gtccgagggccacaagagtatgacg

SEQ ID NO: 2109719 - DNA, 25 bp, Homo sapien
accaatttctcctggatactgaggg

SEQ ID NO: 2109720 - DNA, 25 bp, Homo sapien
aactggctctgcttgggaagtctgt

SEQ ID NO: 2109721 - DNA, 25 bp, Homo sapien
tcggctccagtgttggcaggtctcc

SEQ ID NO: 2109722 - DNA, 25 bp, Homo sapien
ttaaaatcatttgcgggaggcttgg

SEQ ID NO: 2109723 - DNA, 25 bp, Homo sapien
taaacttgttctgtgatttggcagt

SEQ ID NO: 2109724 - DNA, 25 bp, Homo sapien
ctggagtagtgtaaacttgttctgt

SEQ ID NO: 2109725 - DNA, 25 bp, Homo sapien
tcttctcagaatcacttgtctctag

SEQ ID NO: 2109726 - DNA, 25 bp, Homo sapien
gtgtaaacttgttctgtgatttggc

SEQ ID NO: 2109727 - DNA, 25 bp, Homo sapien
tgcaatgggtttgatgactgggccc

SEQ ID NO: 2109728 - DNA, 25 bp, Homo sapien
agaagccctccgtgtctgcaatggg

SEQ ID NO: 2109729 - DNA, 25 bp, Homo sapien
gcagaggccagttaaggtccaagga

SEQ ID NO: 2109730 - DNA, 25 bp, Homo sapien
gcccatccacgggtactgaggaagg

SEQ ID NO: 2109731 - DNA, 25 bp, Homo sapien
cggcccctgctgcggcctggagagc

SEQ ID NO: 2109732 - DNA, 25 bp, Homo sapien
ggcccctgctgcggcctggagagcg

SEQ ID NO: 2109733 - DNA, 25 bp, Homo sapien
cctgctgcggcctggagagcgccat

SEQ ID NO: 2109734 - DNA, 25 bp, Homo sapien
cccctgctgcggcctggagagcgcc

SEQ ID NO: 2109735 - DNA, 25 bp, Homo sapien
agttcatagcctttgaggacagcgg

SEQ ID NO: 2109736 - DNA, 25 bp, Homo sapien
gttggaatcagaaccaatgatcggc

SEQ ID NO: 2109737 - DNA, 25 bp, Homo sapien
aatgatcggcgatgttcaccagctc

SEQ ID NO: 2109738 - DNA, 25 bp, Homo sapien
ccagctctaggagactgtagttcat

SEQ ID NO: 2109739 - DNA, 25 bp, Homo sapien
gccgccgtctccatcttgggcctct

SEQ ID NO: 2109740 - DNA, 25 bp, Homo sapien
ctcgttattggctctgcgggactca

SEQ ID NO: 2109741 - DNA, 25 bp, Homo sapien
tgtttcctcacagagtccgcctccg

SEQ ID NO: 2109742 - DNA, 25 bp, Homo sapien
cgtcgcctctcggactctcgttatt

SEQ ID NO: 2109743 - DNA, 25 bp, Homo sapien
gagctgagctttcggtccgggctcc

SEQ ID NO: 2109744 - DNA, 25 bp, Homo sapien
cgctgtcgacgatggtctcgccccg

SEQ ID NO: 2109745 - DNA, 25 bp, Homo sapien
tgagctttcggtccgggctccctgc

SEQ ID NO: 2109746 - DNA, 25 bp, Homo sapien
gcagccgctccagaaaccgagccct

SEQ ID NO: 2109747 - DNA, 25 bp, Homo sapien
cccgcagttggtaaggaaaggtcat

SEQ ID NO: 2109748 - DNA, 25 bp, Homo sapien
tactggtctaaactgaatgagggat

SEQ ID NO: 2109749 - DNA, 25 bp, Homo sapien
aaaggtcattggacaccttagcggg

SEQ ID NO: 2109750 - DNA, 25 bp, Homo sapien
aaggcggttacagaggcgagaatcc

SEQ ID NO: 2109751 - DNA, 25 bp, Homo sapien
tactatgcggaagggagatgtaaca

SEQ ID NO: 2109752 - DNA, 25 bp, Homo sapien
gaagggagatgtaacaggcgtcact

SEQ ID NO: 2109753 - DNA, 25 bp, Homo sapien
agggagatgtaacaggcgtcactag

SEQ ID NO: 2109754 - DNA, 25 bp, Homo sapien
cactacatactatgcggaagggaga

SEQ ID NO: 2109755 - DNA, 25 bp, Homo sapien
gatggaggttgcaccaaacatgtcc

SEQ ID NO: 2109756 - DNA, 25 bp, Homo sapien
acagacaccgttgttaggtggctaa

SEQ ID NO: 2109757 - DNA, 25 bp, Homo sapien
tgtaatgttgatgttaggaccacag

SEQ ID NO: 2109758 - DNA, 25 bp, Homo sapien
acatgtccttaaagggcactgtgga

SEQ ID NO: 2109759 - DNA, 25 bp, Homo sapien
tagaggagcacacaagactctgtgc

SEQ ID NO: 2109760 - DNA, 25 bp, Homo sapien
gagccgtcaggtacataagaagcac

SEQ ID NO: 2109761 - DNA, 25 bp, Homo sapien
taagaagcacgaacagaatgtcctg

SEQ ID NO: 2109762 - DNA, 25 bp, Homo sapien
cagagcatactgtcttggagggtag

SEQ ID NO: 2109763 - DNA, 25 bp, Homo sapien
tgcagcctaattttcacacgacagt

SEQ ID NO: 2109764 - DNA, 25 bp, Homo sapien
ttcacacgacagtccaagagatcct

SEQ ID NO: 2109765 - DNA, 25 bp, Homo sapien
gacaagaattcagaggtccaataat

SEQ ID NO: 2109766 - DNA, 25 bp, Homo sapien
tgatagtctagaagcaaagtggcag

SEQ ID NO: 2109767 - DNA, 25 bp, Homo sapien
ttttgtcaagatgggctgaggtggg

SEQ ID NO: 2109768 - DNA, 25 bp, Homo sapien
cttagattttgtcaagatgggctga

SEQ ID NO: 2109769 - DNA, 25 bp, Homo sapien
tagattttgtcaagatgggctgagg

SEQ ID NO: 2109770 - DNA, 25 bp, Homo sapien
gattttgtcaagatgggctgaggtg

SEQ ID NO: 2109771 - DNA, 25 bp, Homo sapien
ggtatactttgacggtgcccactgc

SEQ ID NO: 2109772 - DNA, 25 bp, Homo sapien
gggcaggtatactttgacggtgccc

SEQ ID NO: 2109773 - DNA, 25 bp, Homo sapien
caggggggccccgtggtggctccat

SEQ ID NO: 2109774 - DNA, 25 bp, Homo sapien
caccgtgcgttgcttgttgggcagg

SEQ ID NO: 2109775 - DNA, 25 bp, Homo sapien
agcccctgccatttcgcttccatga

SEQ ID NO: 2109776 - DNA, 25 bp, Homo sapien
accgttgtcacccttttgatcccag

SEQ ID NO: 2109777 - DNA, 25 bp, Homo sapien
tgcccaacagaagcgcagctgatgt

SEQ ID NO: 2109778 - DNA, 25 bp, Homo sapien
cccagagttacaactgggtccatcc

SEQ ID NO: 2109779 - DNA, 25 bp, Homo sapien
ccttcagggccttgtctagagagtc

SEQ ID NO: 2109780 - DNA, 25 bp, Homo sapien
agacactcatgccatcccggacagt

SEQ ID NO: 2109781 - DNA, 25 bp, Homo sapien
tgagtcggtagaccacacagcagtc

SEQ ID NO: 2109782 - DNA, 25 bp, Homo sapien
cagcagtcctgatttagaccccgca

SEQ ID NO: 2109783 - DNA, 25 bp, Homo sapien
tgtcccaggcagtgaccgtctttcg

SEQ ID NO: 2109784 - DNA, 25 bp, Homo sapien
gacaatgagctcctcgccatccagg

SEQ ID NO: 2109785 - DNA, 25 bp, Homo sapien
ttcaaggacctcgacaatgagctcc

SEQ ID NO: 2109786 - DNA, 25 bp, Homo sapien
aaattgtgcatggtcagcgggacat

SEQ ID NO: 2109787 - DNA, 25 bp, Homo sapien
tgccacagagcagggaagtttgaga

SEQ ID NO: 2109788 - DNA, 25 bp, Homo sapien
ctgatgccacagagcagggaagttt

SEQ ID NO: 2109789 - DNA, 25 bp, Homo sapien
gccacagagcagggaagtttgagac

SEQ ID NO: 2109790 - DNA, 25 bp, Homo sapien
gatgccacagagcagggaagtttga

SEQ ID NO: 2109791 - DNA, 25 bp, Homo sapien
gtagccacaggtttggcaacggaag

SEQ ID NO: 2109792 - DNA, 25 bp, Homo sapien
cacaggtttggcaacggaagccatg

SEQ ID NO: 2109793 - DNA, 25 bp, Homo sapien
tgttggcggttggtactcatgtcaa

SEQ ID NO: 2109794 - DNA, 25 bp, Homo sapien
caacacagactgtggggaccttgga

SEQ ID NO: 2109795 - DNA, 25 bp, Homo sapien
cagctgtctgtaagggcctcgtggc

SEQ ID NO: 2109796 - DNA, 25 bp, Homo sapien
tcagctgtctgtaagggcctcgtgg

SEQ ID NO: 2109797 - DNA, 25 bp, Homo sapien
tcgagggagcctcatgctgtctgga

SEQ ID NO: 2109798 - DNA, 25 bp, Homo sapien
cctggggggttagcaactcattcag

SEQ ID NO: 2109799 - DNA, 25 bp, Homo sapien
gcctccggacaaatcctggacactg

SEQ ID NO: 2109800 - DNA, 25 bp, Homo sapien
gctgtctggagcctccggacaaatc

SEQ ID NO: 2109801 - DNA, 25 bp, Homo sapien
taaagtatggctcgtggtctacaag

SEQ ID NO: 2109802 - DNA, 25 bp, Homo sapien
cactgtaccagatcctgttctaggc

SEQ ID NO: 2109803 - DNA, 25 bp, Homo sapien
cagctcttcagctaaggcatcccta

SEQ ID NO: 2109804 - DNA, 25 bp, Homo sapien
taagcctcaccagaacctttatatg

SEQ ID NO: 2109805 - DNA, 25 bp, Homo sapien
aactcaaaggtaattaatgcacata

SEQ ID NO: 2109806 - DNA, 25 bp, Homo sapien
atgaaactcaaaggtaattaatgca

SEQ ID NO: 2109807 - DNA, 25 bp, Homo sapien
ccttcactatcctgaaatgaaactc

SEQ ID NO: 2109808 - DNA, 25 bp, Homo sapien
tatacatattaccatattgttatac

SEQ ID NO: 2109809 - DNA, 25 bp, Homo sapien
gacgtggagcggatgcgctgtaggg

SEQ ID NO: 2109810 - DNA, 25 bp, Homo sapien
gaaggggaagtgctccgggtcacag

SEQ ID NO: 2109811 - DNA, 25 bp, Homo sapien
ccatatggacgttgggagtggacgt

SEQ ID NO: 2109812 - DNA, 25 bp, Homo sapien
cgtggtgctgaccatatggacgttg

SEQ ID NO: 2109813 - DNA, 25 bp, Homo sapien
gccctgtggtccccggcattgtccc

SEQ ID NO: 2109814 - DNA, 25 bp, Homo sapien
ctgccctgtggtccccggcattgtc

SEQ ID NO: 2109815 - DNA, 25 bp, Homo sapien
cctctgccctgtggtccccggcatt

SEQ ID NO: 2109816 - DNA, 25 bp, Homo sapien
tctgccctgtggtccccggcattgt

SEQ ID NO: 2109817 - DNA, 25 bp, Homo sapien
catcagtgctgaaactctggccagt

SEQ ID NO: 2109818 - DNA, 25 bp, Homo sapien
atcagtgctgaaactctggccagtg

SEQ ID NO: 2109819 - DNA, 25 bp, Homo sapien
ttcttgtcatcggccaaggacttcc

SEQ ID NO: 2109820 - DNA, 25 bp, Homo sapien
ttcctccccgaggacacgctggctg

SEQ ID NO: 2109821 - DNA, 25 bp, Homo sapien
tcactacctcctctactaccggcag

SEQ ID NO: 2109822 - DNA, 25 bp, Homo sapien
aggacttccgctcgcgctgctctgc

SEQ ID NO: 2109823 - DNA, 25 bp, Homo sapien
gagcacctgcatctcattcttgaaa

SEQ ID NO: 2109824 - DNA, 25 bp, Homo sapien
tggtacctcccagtaatagcctgag

SEQ ID NO: 2109825 - DNA, 25 bp, Homo sapien
gccctcgaaacacggtgccaaacga

SEQ ID NO: 2109826 - DNA, 25 bp, Homo sapien
gagcccgtcccgatcctcttcagca

SEQ ID NO: 2109827 - DNA, 25 bp, Homo sapien
cccagggttggtagacgctatccag

SEQ ID NO: 2109828 - DNA, 25 bp, Homo sapien
attaccattgtagcccaagcagagg

SEQ ID NO: 2109829 - DNA, 25 bp, Homo sapien
aagggacacccttcagagagaaaca

SEQ ID NO: 2109830 - DNA, 25 bp, Homo sapien
gacccagttcgcagcaggcaaatga

SEQ ID NO: 2109831 - DNA, 25 bp, Homo sapien
caggaccaaagcattgccagattcc

SEQ ID NO: 2109832 - DNA, 25 bp, Homo sapien
gccagattccatgaatttgtgagat

SEQ ID NO: 2109833 - DNA, 25 bp, Homo sapien
tactgggctatgattctgtgctgtg

SEQ ID NO: 2109834 - DNA, 25 bp, Homo sapien
gctgtgggctcatatgtggagcttc

SEQ ID NO: 2109835 - DNA, 25 bp, Homo sapien
cagcaagatgttgacatgtcgcgtc

SEQ ID NO: 2109836 - DNA, 25 bp, Homo sapien
gccacgtcgatgagctggaccatgt

SEQ ID NO: 2109837 - DNA, 25 bp, Homo sapien
tgtgatgatggcaaatcccggccgg

SEQ ID NO: 2109838 - DNA, 25 bp, Homo sapien
gaccatgtcgaagcgtgtgtcggcc

SEQ ID NO: 2109839 - DNA, 25 bp, Homo sapien
cggtggatgatgttcttggcatgga

SEQ ID NO: 2109840 - DNA, 25 bp, Homo sapien
tgttagacttgagatctcggtggat

SEQ ID NO: 2109841 - DNA, 25 bp, Homo sapien
tggatgatgttcttggcatggaggt

SEQ ID NO: 2109842 - DNA, 25 bp, Homo sapien
ctcggtggatgatgttcttggcatg

SEQ ID NO: 2109843 - DNA, 25 bp, Homo sapien
gagtccccaagaatagtacctgaac

SEQ ID NO: 2109844 - DNA, 25 bp, Homo sapien
gaggcatccttctaagcccttgaca

SEQ ID NO: 2109845 - DNA, 25 bp, Homo sapien
caggagccccttaatatcacgcaaa

SEQ ID NO: 2109846 - DNA, 25 bp, Homo sapien
gccccgctgtgactcctgaacagga

SEQ ID NO: 2109847 - DNA, 25 bp, Homo sapien
gaccactacagggactcctaatagc

SEQ ID NO: 2109848 - DNA, 25 bp, Homo sapien
caaggaccactacagggactcctaa

SEQ ID NO: 2109849 - DNA, 25 bp, Homo sapien
ggtcaaggaccactacagggactcc

SEQ ID NO: 2109850 - DNA, 25 bp, Homo sapien
cagggtcaaggaccactacagggac

SEQ ID NO: 2109851 - DNA, 25 bp, Homo sapien
aagccaaagtcaccgatcttcaccg

SEQ ID NO: 2109852 - DNA, 25 bp, Homo sapien
gccaaagtcaccgatcttcaccgtg

SEQ ID NO: 2109853 - DNA, 25 bp, Homo sapien
aagtcaccgatcttcaccgtgagcc

SEQ ID NO: 2109854 - DNA, 25 bp, Homo sapien
caaagtcaccgatcttcaccgtgag

SEQ ID NO: 2109855 - DNA, 25 bp, Homo sapien
aagggctgggccccgctccatcgag

SEQ ID NO: 2109856 - DNA, 25 bp, Homo sapien
catccacagcacagatcctgagggc

SEQ ID NO: 2109857 - DNA, 25 bp, Homo sapien
gcacagatcctgagggctgctccaa

SEQ ID NO: 2109858 - DNA, 25 bp, Homo sapien
tgggccccgctccatcgagtcttca

SEQ ID NO: 2109859 - DNA, 25 bp, Homo sapien
cccggagcccacgtccccatgtgcc

SEQ ID NO: 2109860 - DNA, 25 bp, Homo sapien
cggagcccacgtccccatgtgcccc

SEQ ID NO: 2109861 - DNA, 25 bp, Homo sapien
ccggagcccacgtccccatgtgccc

SEQ ID NO: 2109862 - DNA, 25 bp, Homo sapien
gggttcgggtcctgcatacggatca

SEQ ID NO: 2109863 - DNA, 25 bp, Homo sapien
ggttcgggtcctgcatacggatcac

SEQ ID NO: 2109864 - DNA, 25 bp, Homo sapien
ttcgggtcctgcatacggatcacct

SEQ ID NO: 2109865 - DNA, 25 bp, Homo sapien
gggtcctgcatacggatcacctcag

SEQ ID NO: 2109866 - DNA, 25 bp, Homo sapien
ggcagtgagccagtcataagctcgt

SEQ ID NO: 2109867 - DNA, 25 bp, Homo sapien
taagctcgtagagcacaaccccgta

SEQ ID NO: 2109868 - DNA, 25 bp, Homo sapien
gagcacaaccccgtaggcatagacg

SEQ ID NO: 2109869 - DNA, 25 bp, Homo sapien
ccgtaggcatagacgtctgactgga

SEQ ID NO: 2109870 - DNA, 25 bp, Homo sapien
tattgtaagtgtctggagcccaagg

SEQ ID NO: 2109871 - DNA, 25 bp, Homo sapien
tctgggagtccttatcctagaaaat

SEQ ID NO: 2109872 - DNA, 25 bp, Homo sapien
gagcccaagggattctgggagtcct

SEQ ID NO: 2109873 - DNA, 25 bp, Homo sapien
tggcatttatcagtgcaaaggaggg

SEQ ID NO: 2109874 - DNA, 25 bp, Homo sapien
acagcaggcgccgcatggccttggg

SEQ ID NO: 2109875 - DNA, 25 bp, Homo sapien
gacagatagccacggcccaccataa

SEQ ID NO: 2109876 - DNA, 25 bp, Homo sapien
ttttgctgaggtccggggacagata

SEQ ID NO: 2109877 - DNA, 25 bp, Homo sapien
cgctcctcccgctggaacttgaggc

SEQ ID NO: 2109878 - DNA, 25 bp, Homo sapien
aatcttggggagtgaccgttgcagc

SEQ ID NO: 2109879 - DNA, 25 bp, Homo sapien
acaaggcgggctgcgctgagtaggc

SEQ ID NO: 2109880 - DNA, 25 bp, Homo sapien
taggcaggcaggcaactcatcggcc

SEQ ID NO: 2109881 - DNA, 25 bp, Homo sapien
ttccgaggcactccgctcaatcttg

SEQ ID NO: 2109882 - DNA, 25 bp, Homo sapien
catcagggcagagacgaacattgat

SEQ ID NO: 2109883 - DNA, 25 bp, Homo sapien
cgaacattgattggctggtgggcaa

SEQ ID NO: 2109884 - DNA, 25 bp, Homo sapien
ttgattggctggtgggcaaggctcc

SEQ ID NO: 2109885 - DNA, 25 bp, Homo sapien
gcaaggctccttggcgtggagggct

SEQ ID NO: 2109886 - DNA, 25 bp, Homo sapien
cattggagatggaggagctcccaaa

SEQ ID NO: 2109887 - DNA, 25 bp, Homo sapien
aaagagaggagtccttgaatggcgg

SEQ ID NO: 2109888 - DNA, 25 bp, Homo sapien
gctgggaaccccaaaatccagtgga

SEQ ID NO: 2109889 - DNA, 25 bp, Homo sapien
ctgccacaaatcccagccattggag

SEQ ID NO: 2109890 - DNA, 25 bp, Homo sapien
cactcgtggtcacttcaggatctac

SEQ ID NO: 2109891 - DNA, 25 bp, Homo sapien
taaatccggttctcacatgtggaat

SEQ ID NO: 2109892 - DNA, 25 bp, Homo sapien
tccgcagcctgaggaagtctttcgc

SEQ ID NO: 2109893 - DNA, 25 bp, Homo sapien
tccccgagtaccttgagaaacctga

SEQ ID NO: 2109894 - DNA, 25 bp, Homo sapien
ccaggcttcctggatgcattactca

SEQ ID NO: 2109895 - DNA, 25 bp, Homo sapien
agggcctgagcgctagaggataaat

SEQ ID NO: 2109896 - DNA, 25 bp, Homo sapien
tctctctgggcgctggatctgcggc

SEQ ID NO: 2109897 - DNA, 25 bp, Homo sapien
agcgggtgcggaaaccacaggcctc

SEQ ID NO: 2109898 - DNA, 25 bp, Homo sapien
acaggcatctggcacgggagtgcac

SEQ ID NO: 2109899 - DNA, 25 bp, Homo sapien
ccgcaggccaagctgagtagacagg

SEQ ID NO: 2109900 - DNA, 25 bp, Homo sapien
caagctgagtagacaggcatctggc

SEQ ID NO: 2109901 - DNA, 25 bp, Homo sapien
caggccaagctgagtagacaggcat

SEQ ID NO: 2109902 - DNA, 25 bp, Homo sapien
gccccggcccagctgatctgctgac

SEQ ID NO: 2109903 - DNA, 25 bp, Homo sapien
gctgggggctatcagccacagcaac

SEQ ID NO: 2109904 - DNA, 25 bp, Homo sapien
agcaacaacaggatgccagaagcca

SEQ ID NO: 2109905 - DNA, 25 bp, Homo sapien
cgaggtcggaattgcagaaggccgt

SEQ ID NO: 2109906 - DNA, 25 bp, Homo sapien
tcggaattgcagaaggccgtctgtg

SEQ ID NO: 2109907 - DNA, 25 bp, Homo sapien
gtgtccccacgaacttggccctgat

SEQ ID NO: 2109908 - DNA, 25 bp, Homo sapien
taacgctggtataaggtggtctggt

SEQ ID NO: 2109909 - DNA, 25 bp, Homo sapien
tggtgtccccacgaacttggccctg

SEQ ID NO: 2109910 - DNA, 25 bp, Homo sapien
tcatcttgatctcataacgctggta

SEQ ID NO: 2109911 - DNA, 25 bp, Homo sapien
ttctgttttgaccaggaggaagatg

SEQ ID NO: 2109912 - DNA, 25 bp, Homo sapien
gaccaggaggaagatgttagaaaat

SEQ ID NO: 2109913 - DNA, 25 bp, Homo sapien
ctgttttgaccaggaggaagatgtt

SEQ ID NO: 2109914 - DNA, 25 bp, Homo sapien
ttgaccaggaggaagatgttagaaa

SEQ ID NO: 2109915 - DNA, 25 bp, Homo sapien
gatgaggggaagtgtctcttttact

SEQ ID NO: 2109916 - DNA, 25 bp, Homo sapien
tgttgatggatgaggggaagtgtct

SEQ ID NO: 2109917 - DNA, 25 bp, Homo sapien
atggatgaggggaagtgtctctttt

SEQ ID NO: 2109918 - DNA, 25 bp, Homo sapien
ctgttgatggatgaggggaagtgtc

SEQ ID NO: 2109919 - DNA, 25 bp, Homo sapien
tagacgaaccggatgtcagcggcat

SEQ ID NO: 2109920 - DNA, 25 bp, Homo sapien
ctaaggcttggaaccctttatacat

SEQ ID NO: 2109921 - DNA, 25 bp, Homo sapien
ctgtggaagtatccgcagacactct

SEQ ID NO: 2109922 - DNA, 25 bp, Homo sapien
tgtcagcggcatcccctaaggcttg

SEQ ID NO: 2109923 - DNA, 25 bp, Homo sapien
gaaactcctcgctgcggttgtggga

SEQ ID NO: 2109924 - DNA, 25 bp, Homo sapien
aaactcctcgctgcggttgtgggac

SEQ ID NO: 2109925 - DNA, 25 bp, Homo sapien
agaaactcctcgctgcggttgtggg

SEQ ID NO: 2109926 - DNA, 25 bp, Homo sapien
aaaggcccggccttctgatagactg

SEQ ID NO: 2109927 - DNA, 25 bp, Homo sapien
tcgtggttgctaggccgcgccccag

SEQ ID NO: 2109928 - DNA, 25 bp, Homo sapien
ccgacaagcagcttgtgattggctg

SEQ ID NO: 2109929 - DNA, 25 bp, Homo sapien
tccagtgggaccattcccatcagag

SEQ ID NO: 2109930 - DNA, 25 bp, Homo sapien
tgatgtgcaagagtccatcctgcag

SEQ ID NO: 2109931 - DNA, 25 bp, Homo sapien
caacagtgtaggtcttggtgaagcc

SEQ ID NO: 2109932 - DNA, 25 bp, Homo sapien
caaaactgcaggtagtgatgtgcaa

SEQ ID NO: 2109933 - DNA, 25 bp, Homo sapien
gctgttccagggagccacaaaactg

SEQ ID NO: 2109934 - DNA, 25 bp, Homo sapien
atctcccgttggaggtcagggtcca

SEQ ID NO: 2109935 - DNA, 25 bp, Homo sapien
gggaaggatctcccgttggaggtca

SEQ ID NO: 2109936 - DNA, 25 bp, Homo sapien
gaaggatctcccgttggaggtcagg

SEQ ID NO: 2109937 - DNA, 25 bp, Homo sapien
ggatctcccgttggaggtcagggtc

SEQ ID NO: 2109938 - DNA, 25 bp, Homo sapien
tcacaagggagaattagagggacca

SEQ ID NO: 2109939 - DNA, 25 bp, Homo sapien
aatttgtaagggagcagtctcgggc

SEQ ID NO: 2109940 - DNA, 25 bp, Homo sapien
tgatcacacggtattggacacaggg

SEQ ID NO: 2109941 - DNA, 25 bp, Homo sapien
accagggagggacaggtgatcacac

SEQ ID NO: 2109942 - DNA, 25 bp, Homo sapien
ggtcagtgtaacaccctctggtgtc

SEQ ID NO: 2109943 - DNA, 25 bp, Homo sapien
tggaattgtcccaaaggacagggaa

SEQ ID NO: 2109944 - DNA, 25 bp, Homo sapien
gagggaaatgtcactgggtcctgaa

SEQ ID NO: 2109945 - DNA, 25 bp, Homo sapien
cagtaagccagtaaatcagtgtcct

SEQ ID NO: 2109946 - DNA, 25 bp, Homo sapien
tgcaggggatggataaacagggaaa

SEQ ID NO: 2109947 - DNA, 25 bp, Homo sapien
gcaggcaaggtgacgggactggaag

SEQ ID NO: 2109948 - DNA, 25 bp, Homo sapien
ggcaggcaaggtgacgggactggaa

SEQ ID NO: 2109949 - DNA, 25 bp, Homo sapien
aggcaggcaaggtgacgggactgga

SEQ ID NO: 2109950 - DNA, 25 bp, Homo sapien
tcaggctatctgggaccgcagggac

SEQ ID NO: 2109951 - DNA, 25 bp, Homo sapien
caggctatctgggaccgcagggact

SEQ ID NO: 2109952 - DNA, 25 bp, Homo sapien
cattgtccggaagaaagatgggagt

SEQ ID NO: 2109953 - DNA, 25 bp, Homo sapien
ggaacagggtggacactgtgcaggc

SEQ ID NO: 2109954 - DNA, 25 bp, Homo sapien
agtgggaacagggtggacactgtgc

SEQ ID NO: 2109955 - DNA, 25 bp, Homo sapien
tttcattgtccggaagaaagatggg

SEQ ID NO: 2109956 - DNA, 25 bp, Homo sapien
gtggaagcaggaaggcctcagaggg

SEQ ID NO: 2109957 - DNA, 25 bp, Homo sapien
gagtatttggaggttctctcactca

SEQ ID NO: 2109958 - DNA, 25 bp, Homo sapien
ctcagaggggagtatttggaggttc

SEQ ID NO: 2109959 - DNA, 25 bp, Homo sapien
aggggagtatttggaggttctctca

SEQ ID NO: 2109960 - DNA, 25 bp, Homo sapien
ggcaggagccagggactggaccccg

SEQ ID NO: 2109961 - DNA, 25 bp, Homo sapien
ctttggagtatgaggggcaggagcc

SEQ ID NO: 2109962 - DNA, 25 bp, Homo sapien
aggggcaggagccagggactggacc

SEQ ID NO: 2109963 - DNA, 25 bp, Homo sapien
tttggagtatgaggggcaggagcca

SEQ ID NO: 2109964 - DNA, 25 bp, Homo sapien
gcttggtgacctagaatgccctgga

SEQ ID NO: 2109965 - DNA, 25 bp, Homo sapien
tctgaaattctagttcccaagggcc

SEQ ID NO: 2109966 - DNA, 25 bp, Homo sapien
tcaagcacgttcaggtcaggaggac

SEQ ID NO: 2109967 - DNA, 25 bp, Homo sapien
tacagttgtgcccatcagcaaaggc

SEQ ID NO: 2109968 - DNA, 25 bp, Homo sapien
tgtgtcccctgagacctgttctggt

SEQ ID NO: 2109969 - DNA, 25 bp, Homo sapien
ttctgcattgcacttggcgaagggc

SEQ ID NO: 2109970 - DNA, 25 bp, Homo sapien
tctggtggaggtagcctcgtctgct

SEQ ID NO: 2109971 - DNA, 25 bp, Homo sapien
catgccaggtctctggtggaggtag

SEQ ID NO: 2109972 - DNA, 25 bp, Homo sapien
gctcactagagcctctgcctcccga

SEQ ID NO: 2109973 - DNA, 25 bp, Homo sapien
ctcactagagcctctgcctcccgag

SEQ ID NO: 2109974 - DNA, 25 bp, Homo sapien
atctcccaaagtgttgggattacag

SEQ ID NO: 2109975 - DNA, 25 bp, Homo sapien
aatctcccaaagtgttgggattaca

SEQ ID NO: 2109976 - DNA, 25 bp, Homo sapien
gtgggttcaaaagactcctgggctc

SEQ ID NO: 2109977 - DNA, 25 bp, Homo sapien
ttggccaaggaagaatcacaccctt

SEQ ID NO: 2109978 - DNA, 25 bp, Homo sapien
caatcgaggtctggcttgagaacga

SEQ ID NO: 2109979 - DNA, 25 bp, Homo sapien
tttctaaagagtcccagagaatggg

SEQ ID NO: 2109980 - DNA, 25 bp, Homo sapien
tacaattatctcgttctaagggcaa

SEQ ID NO: 2109981 - DNA, 25 bp, Homo sapien
cacaggaaagtggtatagattaact

SEQ ID NO: 2109982 - DNA, 25 bp, Homo sapien
tcatctccagcccatcagaattgtg

SEQ ID NO: 2109983 - DNA, 25 bp, Homo sapien
gtatctattccaatcacactcaatg

SEQ ID NO: 2109984 - DNA, 25 bp, Homo sapien
cacaggagaacgtctttgggagcta

SEQ ID NO: 2109985 - DNA, 25 bp, Homo sapien
tgaaaatgtgcacccataagccagg

SEQ ID NO: 2109986 - DNA, 25 bp, Homo sapien
taagccaggttaagaggtcgccagt

SEQ ID NO: 2109987 - DNA, 25 bp, Homo sapien
ccaacctctgtattggtgacaggca

SEQ ID NO: 2109988 - DNA, 25 bp, Homo sapien
cacagatgtgttgattcaccaaaaa

SEQ ID NO: 2109989 - DNA, 25 bp, Homo sapien
taaatgttttggttggcttcacaga

SEQ ID NO: 2109990 - DNA, 25 bp, Homo sapien
aatgttttggttggcttcacagatg

SEQ ID NO: 2109991 - DNA, 25 bp, Homo sapien
tcacagatgtgttgattcaccaaaa

SEQ ID NO: 2109992 - DNA, 25 bp, Homo sapien
gtttggacaggacagtactggtggt

SEQ ID NO: 2109993 - DNA, 25 bp, Homo sapien
tgtttggacaggacagtactggtgg

SEQ ID NO: 2109994 - DNA, 25 bp, Homo sapien
ctgtttggacaggacagtactggtg

SEQ ID NO: 2109995 - DNA, 25 bp, Homo sapien
gtaaagaaggctccgacgatgagca

SEQ ID NO: 2109996 - DNA, 25 bp, Homo sapien
aagtaaagaaggctccgacgatgag

SEQ ID NO: 2109997 - DNA, 25 bp, Homo sapien
ggaggagcagtttgttctttgatct

SEQ ID NO: 2109998 - DNA, 25 bp, Homo sapien
aagaaggctccgacgatgagcagtg

SEQ ID NO: 2109999 - DNA, 25 bp, Homo sapien
cacagagtgaacagatggccggaac

SEQ ID NO: 2110000 - DNA, 25 bp, Homo sapien
cagttattagacaggccagacggcc

SEQ ID NO: 2110001 - DNA, 25 bp, Homo sapien
ggccatctgtaaccccatacgtaga

SEQ ID NO: 2110002 - DNA, 25 bp, Homo sapien
tacgtagagaccttgactggctgct

SEQ ID NO: 2110003 - DNA, 25 bp, Homo sapien
tggcaaagtttgcatcggcaaagat

SEQ ID NO: 2110004 - DNA, 25 bp, Homo sapien
gcaaagtttgcatcggcaaagatgt

SEQ ID NO: 2110005 - DNA, 25 bp, Homo sapien
caaagtttgcatcggcaaagatgta

SEQ ID NO: 2110006 - DNA, 25 bp, Homo sapien
agtttgcatcggcaaagatgtactc

SEQ ID NO: 2110007 - DNA, 25 bp, Homo sapien
ggtgctgaaccacggagcctcgtgt

SEQ ID NO: 2110008 - DNA, 25 bp, Homo sapien
ctgaaccacggagcctcgtgtgagg

SEQ ID NO: 2110009 - DNA, 25 bp, Homo sapien
aaccacggagcctcgtgtgaggtgc

SEQ ID NO: 2110010 - DNA, 25 bp, Homo sapien
gtaggtgctgaaccacggagcctcg

SEQ ID NO: 2110011 - DNA, 25 bp, Homo sapien
tcccagactcttacagcaccacaag

SEQ ID NO: 2110012 - DNA, 25 bp, Homo sapien
cagactcttacagcaccacaagccc

SEQ ID NO: 2110013 - DNA, 25 bp, Homo sapien
ccttcccagactcttacagcaccac

SEQ ID NO: 2110014 - DNA, 25 bp, Homo sapien
ggcgtccggtcatacccagccccgc

SEQ ID NO: 2110015 - DNA, 25 bp, Homo sapien
cttacccttcgtgccctgtgggcct

SEQ ID NO: 2110016 - DNA, 25 bp, Homo sapien
gctccccattcaattcgtcaccttc

SEQ ID NO: 2110017 - DNA, 25 bp, Homo sapien
tccccattcaattcgtcaccttctg

SEQ ID NO: 2110018 - DNA, 25 bp, Homo sapien
ctccccattcaattcgtcaccttct

SEQ ID NO: 2110019 - DNA, 25 bp, Homo sapien
ccccattcaattcgtcaccttctgc

SEQ ID NO: 2110020 - DNA, 25 bp, Homo sapien
cttcaggacaagagtggtcagggca

SEQ ID NO: 2110021 - DNA, 25 bp, Homo sapien
ggttgatatcaacccccaatcctgc

SEQ ID NO: 2110022 - DNA, 25 bp, Homo sapien
caggatcaggagggttgatatcaac

SEQ ID NO: 2110023 - DNA, 25 bp, Homo sapien
gatcaggagggttgatatcaacccc

SEQ ID NO: 2110024 - DNA, 25 bp, Homo sapien
tggtgaggctgggtccttgacatgc

SEQ ID NO: 2110025 - DNA, 25 bp, Homo sapien
atgctccggatgcttccacttgcct

SEQ ID NO: 2110026 - DNA, 25 bp, Homo sapien
tccttgacatgctccggatgcttcc

SEQ ID NO: 2110027 - DNA, 25 bp, Homo sapien
ctgccgtggtgaggctgggtccttg

SEQ ID NO: 2110028 - DNA, 25 bp, Homo sapien
tcatctgaacagtacttggagcctg

SEQ ID NO: 2110029 - DNA, 25 bp, Homo sapien
tctgaacagtacttggagcctggcc

SEQ ID NO: 2110030 - DNA, 25 bp, Homo sapien
ctgaacagtacttggagcctggcca

SEQ ID NO: 2110031 - DNA, 25 bp, Homo sapien
catctgaacagtacttggagcctgg

SEQ ID NO: 2110032 - DNA, 25 bp, Homo sapien
atggaaatggtgctccatgtccttc

SEQ ID NO: 2110033 - DNA, 25 bp, Homo sapien
caggcaagtataggtgttctgttgc

SEQ ID NO: 2110034 - DNA, 25 bp, Homo sapien
tgcttatggtggatgtgctcgagca

SEQ ID NO: 2110035 - DNA, 25 bp, Homo sapien
tgctgtttgccatgcagaatgatgg

SEQ ID NO: 2110036 - DNA, 25 bp, Homo sapien
tcgccaatgccctctcgcctagtaa

SEQ ID NO: 2110037 - DNA, 25 bp, Homo sapien
atgccctctcgcctagtaatccgtg

SEQ ID NO: 2110038 - DNA, 25 bp, Homo sapien
ggtacctttaagctctacctcgcca

SEQ ID NO: 2110039 - DNA, 25 bp, Homo sapien
acctttaagctctacctcgccaatg

SEQ ID NO: 2110040 - DNA, 25 bp, Homo sapien
ctgcaggtctttgctgcccttttca

SEQ ID NO: 2110041 - DNA, 25 bp, Homo sapien
tgcaggtctttgctgcccttttcac

SEQ ID NO: 2110042 - DNA, 25 bp, Homo sapien
tttgctgcccttttcacctttgttg

SEQ ID NO: 2110043 - DNA, 25 bp, Homo sapien
gtctttgctgcccttttcacctttg

SEQ ID NO: 2110044 - DNA, 25 bp, Homo sapien
gtgaaaggtgacacgcttagagatg

SEQ ID NO: 2110045 - DNA, 25 bp, Homo sapien
atgggccgcctgcaggaggcgcaaa

SEQ ID NO: 2110046 - DNA, 25 bp, Homo sapien
tgctccatgtggtgaaaggtgacac

SEQ ID NO: 2110047 - DNA, 25 bp, Homo sapien
gccgcctgcaggaggcgcaaaagat

SEQ ID NO: 2110048 - DNA, 25 bp, Homo sapien
gaccttggctttcatactgggcatg

SEQ ID NO: 2110049 - DNA, 25 bp, Homo sapien
tatgacaaatatccaggcgccaaat

SEQ ID NO: 2110050 - DNA, 25 bp, Homo sapien
tgctgcatgtcctcctacaataaag

SEQ ID NO: 2110051 - DNA, 25 bp, Homo sapien
tcactggttaatgccctgaccttgg

SEQ ID NO: 2110052 - DNA, 25 bp, Homo sapien
tcaatacaagtagggtacagggacc

SEQ ID NO: 2110053 - DNA, 25 bp, Homo sapien
tacagggacccaacgggcaattggc

SEQ ID NO: 2110054 - DNA, 25 bp, Homo sapien
ctttcaatacaagtagggtacaggg

SEQ ID NO: 2110055 - DNA, 25 bp, Homo sapien
acccaacgggcaattggcactcata

SEQ ID NO: 2110056 - DNA, 25 bp, Homo sapien
cacctggaggcgcttacagtacctc

SEQ ID NO: 2110057 - DNA, 25 bp, Homo sapien
ggaggcgcttacagtacctcttact

SEQ ID NO: 2110058 - DNA, 25 bp, Homo sapien
acctcttacttttcagattgtagac

SEQ ID NO: 2110059 - DNA, 25 bp, Homo sapien
gcttacagtacctcttacttttcag

SEQ ID NO: 2110060 - DNA, 25 bp, Homo sapien
acccggttcatcatagacgtgcgca

SEQ ID NO: 2110061 - DNA, 25 bp, Homo sapien
caaagacattgtgcacgagcggaca

SEQ ID NO: 2110062 - DNA, 25 bp, Homo sapien
caactgtgggacctgaatatgcgag

SEQ ID NO: 2110063 - DNA, 25 bp, Homo sapien
tgaacgggtcgtgctggatcgtccc

SEQ ID NO: 2110064 - DNA, 25 bp, Homo sapien
tacagtatcagctccaagcctaaaa

SEQ ID NO: 2110065 - DNA, 25 bp, Homo sapien
ctcattacagtatcagctccaagcc

SEQ ID NO: 2110066 - DNA, 25 bp, Homo sapien
agcttctgaggcacaattcctctct

SEQ ID NO: 2110067 - DNA, 25 bp, Homo sapien
tcaccatattaggtccaggtgcaga

SEQ ID NO: 2110068 - DNA, 25 bp, Homo sapien
agagattctatctgcacccaaggag

SEQ ID NO: 2110069 - DNA, 25 bp, Homo sapien
tcattaagccagtaaggagaatctc

SEQ ID NO: 2110070 - DNA, 25 bp, Homo sapien
tagtgtgtgtccaccagagtcttcc

SEQ ID NO: 2110071 - DNA, 25 bp, Homo sapien
gaggccacccatggtttctagaggc

SEQ ID NO: 2110072 - DNA, 25 bp, Homo sapien
gattgcatcctaaggttctctccag

SEQ ID NO: 2110073 - DNA, 25 bp, Homo sapien
gagattgcatcctaaggttctctcc

SEQ ID NO: 2110074 - DNA, 25 bp, Homo sapien
tcatctggtgggtaatgaagtttga

SEQ ID NO: 2110075 - DNA, 25 bp, Homo sapien
gatgcatatttagtattgatttctg

SEQ ID NO: 2110076 - DNA, 25 bp, Homo sapien
tagcatttctccagcgtggaactgt

SEQ ID NO: 2110077 - DNA, 25 bp, Homo sapien
ctccagcgtggaactgttggtgaag

SEQ ID NO: 2110078 - DNA, 25 bp, Homo sapien
gcgtggaactgttggtgaaggcctt

SEQ ID NO: 2110079 - DNA, 25 bp, Homo sapien
catttctccagcgtggaactgttgg

SEQ ID NO: 2110080 - DNA, 25 bp, Homo sapien
tgctgaacttcccgttttcctccat

SEQ ID NO: 2110081 - DNA, 25 bp, Homo sapien
gccaaagtcatctctaactcaggca

SEQ ID NO: 2110082 - DNA, 25 bp, Homo sapien
cctgagcagggttttaagtatgcca

SEQ ID NO: 2110083 - DNA, 25 bp, Homo sapien
catgcttccgcatagaaggtggcaa

SEQ ID NO: 2110084 - DNA, 25 bp, Homo sapien
gcagcacaggtgcagtcgtgaacat

SEQ ID NO: 2110085 - DNA, 25 bp, Homo sapien
taacagggaggtacacattgccgag

SEQ ID NO: 2110086 - DNA, 25 bp, Homo sapien
gaggtacacattgccgagtactaag

SEQ ID NO: 2110087 - DNA, 25 bp, Homo sapien
tacacattgccgagtactaagccca

SEQ ID NO: 2110088 - DNA, 25 bp, Homo sapien
aggataacagggaggtacacattgc

SEQ ID NO: 2110089 - DNA, 25 bp, Homo sapien
tacatggaagagatgagatgatcgg

SEQ ID NO: 2110090 - DNA, 25 bp, Homo sapien
tcaaattttgttaatgtcttgcaac

SEQ ID NO: 2110091 - DNA, 25 bp, Homo sapien
tcggggtaagggtaaatgcattctg

SEQ ID NO: 2110092 - DNA, 25 bp, Homo sapien
tgttaatgtcttgcaacactttgat

SEQ ID NO: 2110093 - DNA, 25 bp, Homo sapien
actggcttaatcaagtttctgttca

SEQ ID NO: 2110094 - DNA, 25 bp, Homo sapien
tactggcttaatcaagtttctgttc

SEQ ID NO: 2110095 - DNA, 25 bp, Homo sapien
tttactggcttaatcaagtttctgt

SEQ ID NO: 2110096 - DNA, 25 bp, Homo sapien
ttttactggcttaatcaagtttctg

SEQ ID NO: 2110097 - DNA, 25 bp, Homo sapien
gatctaagtgtatgctgtagaatgc

SEQ ID NO: 2110098 - DNA, 25 bp, Homo sapien
gtttcttgaatatgagaaagccttc

SEQ ID NO: 2110099 - DNA, 25 bp, Homo sapien
catgtttcttgaatatgagaaagcc

SEQ ID NO: 2110100 - DNA, 25 bp, Homo sapien
ctcagagaagttggatctaagtgta

SEQ ID NO: 2110101 - DNA, 25 bp, Homo sapien
ggggatacatgacttgctgtcctgg

SEQ ID NO: 2110102 - DNA, 25 bp, Homo sapien
cctgggggatacatgacttgctgtc

SEQ ID NO: 2110103 - DNA, 25 bp, Homo sapien
tgggggatacatgacttgctgtcct

SEQ ID NO: 2110104 - DNA, 25 bp, Homo sapien
ggatacatgacttgctgtcctggag

SEQ ID NO: 2110105 - DNA, 25 bp, Homo sapien
tatccagagacctgcgtgtttcagt

SEQ ID NO: 2110106 - DNA, 25 bp, Homo sapien
ctatgtcccctttcagcagcttatc

SEQ ID NO: 2110107 - DNA, 25 bp, Homo sapien
gtactcatgagtatttccaaatcca

SEQ ID NO: 2110108 - DNA, 25 bp, Homo sapien
tgctccagacaatatcatctgtaag

SEQ ID NO: 2110109 - DNA, 25 bp, Homo sapien
aggctttcccagagaccttatggat

SEQ ID NO: 2110110 - DNA, 25 bp, Homo sapien
ctggaccgcagggataggcatatcc

SEQ ID NO: 2110111 - DNA, 25 bp, Homo sapien
ccctctgttgtggagtttactgctg

SEQ ID NO: 2110112 - DNA, 25 bp, Homo sapien
tcccagagaccttatggatgttgca

SEQ ID NO: 2110113 - DNA, 25 bp, Homo sapien
cacaggtgccttggctcgatgttcc

SEQ ID NO: 2110114 - DNA, 25 bp, Homo sapien
gctcgcttctaacgctaggcaacgt

SEQ ID NO: 2110115 - DNA, 25 bp, Homo sapien
taggcaacgtctgacggcacaggtg

SEQ ID NO: 2110116 - DNA, 25 bp, Homo sapien
aggctgcccagctgtcggatgacat

SEQ ID NO: 2110117 - DNA, 25 bp, Homo sapien
aacttgtagtccatcgaccctctca

SEQ ID NO: 2110118 - DNA, 25 bp, Homo sapien
acttgtagtccatcgaccctctcag

SEQ ID NO: 2110119 - DNA, 25 bp, Homo sapien
ttgtagtccatcgaccctctcagca

SEQ ID NO: 2110120 - DNA, 25 bp, Homo sapien
cttgtagtccatcgaccctctcagc

SEQ ID NO: 2110121 - DNA, 25 bp, Homo sapien
cacgttttcaacacagccaatgctg

SEQ ID NO: 2110122 - DNA, 25 bp, Homo sapien
aatgctgccattctggtacaccaag

SEQ ID NO: 2110123 - DNA, 25 bp, Homo sapien
tgatggtggtggatagctacttgca

SEQ ID NO: 2110124 - DNA, 25 bp, Homo sapien
ttgtccactgggtaactgaattctg

SEQ ID NO: 2110125 - DNA, 25 bp, Homo sapien
gaggcgtccctggagacccaaatcc

SEQ ID NO: 2110126 - DNA, 25 bp, Homo sapien
ggcgtccctggagacccaaatccta

SEQ ID NO: 2110127 - DNA, 25 bp, Homo sapien
tggtggaggtgggatgcctatcatt

SEQ ID NO: 2110128 - DNA, 25 bp, Homo sapien
gtgggatgcctatcattggaggcgg

SEQ ID NO: 2110129 - DNA, 25 bp, Homo sapien
tggtgtcagaaagcggtggtggtac

SEQ ID NO: 2110130 - DNA, 25 bp, Homo sapien
cttggtggtgtcagaaagcggtggt

SEQ ID NO: 2110131 - DNA, 25 bp, Homo sapien
gtcagaaagcggtggtggtacagca

SEQ ID NO: 2110132 - DNA, 25 bp, Homo sapien
tggtggtgtcagaaagcggtggtgg

SEQ ID NO: 2110133 - DNA, 25 bp, Homo sapien
tcgctatgggcatcgcttatggcag

SEQ ID NO: 2110134 - DNA, 25 bp, Homo sapien
tatgggcatcgcttatggcaggcaa

SEQ ID NO: 2110135 - DNA, 25 bp, Homo sapien
gcaggtcgctatgggcatcgcttat

SEQ ID NO: 2110136 - DNA, 25 bp, Homo sapien
ggtcgctatgggcatcgcttatggc

SEQ ID NO: 2110137 - DNA, 25 bp, Homo sapien
aagatggtggccacgtcattgccca

SEQ ID NO: 2110138 - DNA, 25 bp, Homo sapien
gagacaagatggtggccacgtcatt

SEQ ID NO: 2110139 - DNA, 25 bp, Homo sapien
caacagcaatgcgacgagacaagat

SEQ ID NO: 2110140 - DNA, 25 bp, Homo sapien
agtcactgtactcaacagcaatgcg

SEQ ID NO: 2110141 - DNA, 25 bp, Homo sapien
cctgtgctagagacacctgatctgg

SEQ ID NO: 2110142 - DNA, 25 bp, Homo sapien
tgtgctagagacacctgatctggag

SEQ ID NO: 2110143 - DNA, 25 bp, Homo sapien
ctgtgctagagacacctgatctgga

SEQ ID NO: 2110144 - DNA, 25 bp, Homo sapien
tgctagagacacctgatctggagag

SEQ ID NO: 2110145 - DNA, 25 bp, Homo sapien
gctgtgacaaagtgctgagcttggc

SEQ ID NO: 2110146 - DNA, 25 bp, Homo sapien
tgtgacaaagtgctgagcttggctg

SEQ ID NO: 2110147 - DNA, 25 bp, Homo sapien
ctgtgacaaagtgctgagcttggct

SEQ ID NO: 2110148 - DNA, 25 bp, Homo sapien
agtggggcacaaatgtggtatacac

SEQ ID NO: 2110149 - DNA, 25 bp, Homo sapien
tctgagaagaatagggcagaagagg

SEQ ID NO: 2110150 - DNA, 25 bp, Homo sapien
ctggcagggaagcaaatgagaccag

SEQ ID NO: 2110151 - DNA, 25 bp, Homo sapien
gttttcaaacggcatccctactaca

SEQ ID NO: 2110152 - DNA, 25 bp, Homo sapien
gagttatcaacaaaatgcctatgtg

SEQ ID NO: 2110153 - DNA, 25 bp, Homo sapien
cctctgtggtaagatctcagttttc

SEQ ID NO: 2110154 - DNA, 25 bp, Homo sapien
ccacaaagggactctactgaggaga

SEQ ID NO: 2110155 - DNA, 25 bp, Homo sapien
tttcaataatgactacctctgtggt

SEQ ID NO: 2110156 - DNA, 25 bp, Homo sapien
gaggttccgcgcgtgcgcaaaacca

SEQ ID NO: 2110157 - DNA, 25 bp, Homo sapien
atccctgggcactgaacgtcgaatc

SEQ ID NO: 2110158 - DNA, 25 bp, Homo sapien
ggtttgggacttcacatgaatgagg

SEQ ID NO: 2110159 - DNA, 25 bp, Homo sapien
tgacaactatcaaaccccggctgag

SEQ ID NO: 2110160 - DNA, 25 bp, Homo sapien
ccagcctgggtgacagagtgagact

SEQ ID NO: 2110161 - DNA, 25 bp, Homo sapien
gttgagatcacacaaactgcactcc

SEQ ID NO: 2110162 - DNA, 25 bp, Homo sapien
tccagcctgggtgacagagtgagac

SEQ ID NO: 2110163 - DNA, 25 bp, Homo sapien
agtgagttgagatcacacaaactgc

SEQ ID NO: 2110164 - DNA, 25 bp, Homo sapien
catgtcacatccactaaaatggcta

SEQ ID NO: 2110165 - DNA, 25 bp, Homo sapien
tacattctctgatcgtaacataaga

SEQ ID NO: 2110166 - DNA, 25 bp, Homo sapien
ctggttggattgtaaaatggtgcac

SEQ ID NO: 2110167 - DNA, 25 bp, Homo sapien
caaaatctttcatgtattaggagac

SEQ ID NO: 2110168 - DNA, 25 bp, Homo sapien
ttcccgacggacttggacttcagcc

SEQ ID NO: 2110169 - DNA, 25 bp, Homo sapien
ttccagtgggatcggtggactcaac

SEQ ID NO: 2110170 - DNA, 25 bp, Homo sapien
gctttcactgtgagatctggcccag

SEQ ID NO: 2110171 - DNA, 25 bp, Homo sapien
cagggactccgcagagactccaaga

SEQ ID NO: 2110172 - DNA, 25 bp, Homo sapien
ggggagcgtcctcgttagctggcat

SEQ ID NO: 2110173 - DNA, 25 bp, Homo sapien
tggctggggagcgtcctcgttagct

SEQ ID NO: 2110174 - DNA, 25 bp, Homo sapien
gctggggagcgtcctcgttagctgg

SEQ ID NO: 2110175 - DNA, 25 bp, Homo sapien
tggggagcgtcctcgttagctggca

SEQ ID NO: 2110176 - DNA, 25 bp, Homo sapien
tccagctagttgcagcagtaaaagt

SEQ ID NO: 2110177 - DNA, 25 bp, Homo sapien
aatcgaacccgcaatatctccaagg

SEQ ID NO: 2110178 - DNA, 25 bp, Homo sapien
caatgaggaacaatgaggaaggctt

SEQ ID NO: 2110179 - DNA, 25 bp, Homo sapien
tattgggacaaatgtgtaggcatct

SEQ ID NO: 2110180 - DNA, 25 bp, Homo sapien
tagcacccctatccacatacatagg

SEQ ID NO: 2110181 - DNA, 25 bp, Homo sapien
caggaaactgcatgggattaggagc

SEQ ID NO: 2110182 - DNA, 25 bp, Homo sapien
ttctacgtcttctccgggcgtgcca

SEQ ID NO: 2110183 - DNA, 25 bp, Homo sapien
tagaacagcagatgttcctagcacc

SEQ ID NO: 2110184 - DNA, 25 bp, Homo sapien
ttcagggttcttatgctgtggtgac

SEQ ID NO: 2110185 - DNA, 25 bp, Homo sapien
ggaaatcttgaacgcttatgttttg

SEQ ID NO: 2110186 - DNA, 25 bp, Homo sapien
ctcaggaaatcttgaacgcttatgt

SEQ ID NO: 2110187 - DNA, 25 bp, Homo sapien
gccaccttcagggttcttatgctgt

SEQ ID NO: 2110188 - DNA, 25 bp, Homo sapien
ggctgtgcttatttgatggaacagg

SEQ ID NO: 2110189 - DNA, 25 bp, Homo sapien
gctcctgcatggaattctgcaacca

SEQ ID NO: 2110190 - DNA, 25 bp, Homo sapien
ctgcatggaattctgcaaccagcag

SEQ ID NO: 2110191 - DNA, 25 bp, Homo sapien
ctggctcctgcatggaattctgcaa

SEQ ID NO: 2110192 - DNA, 25 bp, Homo sapien
caaaatgtgggacatagcacagggc

SEQ ID NO: 2110193 - DNA, 25 bp, Homo sapien
tcaagcctgttaatacagcaagcag

SEQ ID NO: 2110194 - DNA, 25 bp, Homo sapien
tgtatgtgcaggtatcatctagccc

SEQ ID NO: 2110195 - DNA, 25 bp, Homo sapien
gaattagcaagtgtgttcaacacca

SEQ ID NO: 2110196 - DNA, 25 bp, Homo sapien
tcttgttcaaggcaacatgatcagc

SEQ ID NO: 2110197 - DNA, 25 bp, Homo sapien
gtaacaacacaatcttgttcaaggc

SEQ ID NO: 2110198 - DNA, 25 bp, Homo sapien
tgtaacaacacaatcttgttcaagg

SEQ ID NO: 2110199 - DNA, 25 bp, Homo sapien
caatcttgttcaaggcaacatgatc

SEQ ID NO: 2110200 - DNA, 25 bp, Homo sapien
cctggtacaggcgtctttgagtaga

SEQ ID NO: 2110201 - DNA, 25 bp, Homo sapien
tacaggcgtctttgagtagagtcca

SEQ ID NO: 2110202 - DNA, 25 bp, Homo sapien
ggtacaggcgtctttgagtagagtc

SEQ ID NO: 2110203 - DNA, 25 bp, Homo sapien
ggcgtctttgagtagagtccagttg

SEQ ID NO: 2110204 - DNA, 25 bp, Homo sapien
taacaggctcctcacaacttcacag

SEQ ID NO: 2110205 - DNA, 25 bp, Homo sapien
cacaatttaacccataacaggctcc

SEQ ID NO: 2110206 - DNA, 25 bp, Homo sapien
aacaggctcctcacaacttcacagg

SEQ ID NO: 2110207 - DNA, 25 bp, Homo sapien
tttaacccataacaggctcctcaca

SEQ ID NO: 2110208 - DNA, 25 bp, Homo sapien
catggaccaaaaggtggcctacact

SEQ ID NO: 2110209 - DNA, 25 bp, Homo sapien
gaaatgccagaactgcctgggtact

SEQ ID NO: 2110210 - DNA, 25 bp, Homo sapien
gggaggtacttaatcgccaaatgca

SEQ ID NO: 2110211 - DNA, 25 bp, Homo sapien
tgtgtgtacaccaaaagaacggcac

SEQ ID NO: 2110212 - DNA, 25 bp, Homo sapien
catggggaactgagtaataatcaca

SEQ ID NO: 2110213 - DNA, 25 bp, Homo sapien
ctttggagaagtaaccacatttcat

SEQ ID NO: 2110214 - DNA, 25 bp, Homo sapien
accacatttcatggggaactgagta

SEQ ID NO: 2110215 - DNA, 25 bp, Homo sapien
catttcatggggaactgagtaataa

SEQ ID NO: 2110216 - DNA, 25 bp, Homo sapien
taacaggacacgatagagaattggg

SEQ ID NO: 2110217 - DNA, 25 bp, Homo sapien
ctgttaacaggacacgatagagaat

SEQ ID NO: 2110218 - DNA, 25 bp, Homo sapien
gttaacaggacacgatagagaattg

SEQ ID NO: 2110219 - DNA, 25 bp, Homo sapien
caggacacgatagagaattgggtcc

SEQ ID NO: 2110220 - DNA, 25 bp, Homo sapien
tccccttccaatgtccatggcccct

SEQ ID NO: 2110221 - DNA, 25 bp, Homo sapien
cttccccttccaatgtccatggccc

SEQ ID NO: 2110222 - DNA, 25 bp, Homo sapien
tgggcagttacagaaatggcagcag

SEQ ID NO: 2110223 - DNA, 25 bp, Homo sapien
gggtgcctctgtgtcaaaaaatata

SEQ ID NO: 2110224 - DNA, 25 bp, Homo sapien
tatagggcctggtcgtatgtcccac

SEQ ID NO: 2110225 - DNA, 25 bp, Homo sapien
aaaacagacactccgtaagggcaag

SEQ ID NO: 2110226 - DNA, 25 bp, Homo sapien
gaaacctaaatggacagcagatact

SEQ ID NO: 2110227 - DNA, 25 bp, Homo sapien
ctagctagtgcatcttagtgggaaa

SEQ ID NO: 2110228 - DNA, 25 bp, Homo sapien
aaataggcacacttgtggattgcac

SEQ ID NO: 2110229 - DNA, 25 bp, Homo sapien
aatctgaacgatgctgagtgttggc

SEQ ID NO: 2110230 - DNA, 25 bp, Homo sapien
accctccatttcactatgaaatgta

SEQ ID NO: 2110231 - DNA, 25 bp, Homo sapien
caccctccatttcactatgaaatgt

SEQ ID NO: 2110232 - DNA, 25 bp, Homo sapien
ccctccatttcactatgaaatgtag

SEQ ID NO: 2110233 - DNA, 25 bp, Homo sapien
gcctgagtagagatgacacctggaa

SEQ ID NO: 2110234 - DNA, 25 bp, Homo sapien
tgtttgaggctgaggacttttccac

SEQ ID NO: 2110235 - DNA, 25 bp, Homo sapien
gaccatgcccaatagttttatccag

SEQ ID NO: 2110236 - DNA, 25 bp, Homo sapien
tctgggtaaaaacttgaccatgccc

SEQ ID NO: 2110237 - DNA, 25 bp, Homo sapien
gcatttgtgatgtctctctccagtg

SEQ ID NO: 2110238 - DNA, 25 bp, Homo sapien
tcactgcatttgtgatgtctctctc

SEQ ID NO: 2110239 - DNA, 25 bp, Homo sapien
gatgcatcctgagtgttgatttttg

SEQ ID NO: 2110240 - DNA, 25 bp, Homo sapien
aattctctgatgcatcctgagtgtt

SEQ ID NO: 2110241 - DNA, 25 bp, Homo sapien
catctggagttgtgacttagaaggg

SEQ ID NO: 2110242 - DNA, 25 bp, Homo sapien
tgagtacagatataggacctctctc

SEQ ID NO: 2110243 - DNA, 25 bp, Homo sapien
tatgagacttctggtgagtattgag

SEQ ID NO: 2110244 - DNA, 25 bp, Homo sapien
gtgaatggtctggtgtttattgaaa

SEQ ID NO: 2110245 - DNA, 25 bp, Homo sapien
tgatttctgggtgaacccctttcca

SEQ ID NO: 2110246 - DNA, 25 bp, Homo sapien
gtatgaatattgcgatgcatactga

SEQ ID NO: 2110247 - DNA, 25 bp, Homo sapien
tgtatgaatattgcgatgcatactg

SEQ ID NO: 2110248 - DNA, 25 bp, Homo sapien
tcatgtatgaatattgcgatgcata

SEQ ID NO: 2110249 - DNA, 25 bp, Homo sapien
catgtatgaatattgcgatgcatac

SEQ ID NO: 2110250 - DNA, 25 bp, Homo sapien
caaagagacgctacttgggatggga

SEQ ID NO: 2110251 - DNA, 25 bp, Homo sapien
aattggcaggctacttggtctaagg

SEQ ID NO: 2110252 - DNA, 25 bp, Homo sapien
ccccgagtagggcaatttgagattc

SEQ ID NO: 2110253 - DNA, 25 bp, Homo sapien
catggaaaccagtacgaatgacagg

SEQ ID NO: 2110254 - DNA, 25 bp, Homo sapien
ccttcaatgggttcagcagtagact

SEQ ID NO: 2110255 - DNA, 25 bp, Homo sapien
gattcatggcctgacaaaaactgag

SEQ ID NO: 2110256 - DNA, 25 bp, Homo sapien
tttgcaaccttgaagagggccgtca

SEQ ID NO: 2110257 - DNA, 25 bp, Homo sapien
tctaccagtggaagagggcaggatc

SEQ ID NO: 2110258 - DNA, 25 bp, Homo sapien
gatggttggaaaggtgcacacgtca

SEQ ID NO: 2110259 - DNA, 25 bp, Homo sapien
tggaaggagccaaacaagagtacct

SEQ ID NO: 2110260 - DNA, 25 bp, Homo sapien
tctagctgctgatgtgggactgcca

SEQ ID NO: 2110261 - DNA, 25 bp, Homo sapien
catgagaagcttttgtgagcctgca

SEQ ID NO: 2110262 - DNA, 25 bp, Homo sapien
tcatctaaattaagcttgtccaacc

SEQ ID NO: 2110263 - DNA, 25 bp, Homo sapien
tatgctacaagttctagacagcgca

SEQ ID NO: 2110264 - DNA, 25 bp, Homo sapien
caaaagtcagttgtatcctatgtac

SEQ ID NO: 2110265 - DNA, 25 bp, Homo sapien
taagtgagctagcaaagttacagga

SEQ ID NO: 2110266 - DNA, 25 bp, Homo sapien
tccagtaggtacgactacagaaatg

SEQ ID NO: 2110267 - DNA, 25 bp, Homo sapien
taggtacgactacagaaatgcacca

SEQ ID NO: 2110268 - DNA, 25 bp, Homo sapien
ctctccagtaggtacgactacagaa

SEQ ID NO: 2110269 - DNA, 25 bp, Homo sapien
cagtaggtacgactacagaaatgca

SEQ ID NO: 2110270 - DNA, 25 bp, Homo sapien
cctggccaaagatagttgcgttcat

SEQ ID NO: 2110271 - DNA, 25 bp, Homo sapien
ttttgataaatgtgtggagccatca

SEQ ID NO: 2110272 - DNA, 25 bp, Homo sapien
taaatgtgtggagccatcaccacag

SEQ ID NO: 2110273 - DNA, 25 bp, Homo sapien
tgcctggccaaagatagttgcgttc

SEQ ID NO: 2110274 - DNA, 25 bp, Homo sapien
caagactcaggaaccttgacgtagt

SEQ ID NO: 2110275 - DNA, 25 bp, Homo sapien
caggaaccttgacgtagttcccaca

SEQ ID NO: 2110276 - DNA, 25 bp, Homo sapien
cagctttcacaagactcaggaacct

SEQ ID NO: 2110277 - DNA, 25 bp, Homo sapien
cttgacgtagttcccacagcaaagg

SEQ ID NO: 2110278 - DNA, 25 bp, Homo sapien
cggtctgttgaattcggcggctacg

SEQ ID NO: 2110279 - DNA, 25 bp, Homo sapien
aaggacgcccaactgtggctggcat

SEQ ID NO: 2110280 - DNA, 25 bp, Homo sapien
tcagaagggcaaactgtccccgatc

SEQ ID NO: 2110281 - DNA, 25 bp, Homo sapien
tgtttggattctggcgccaccacat

SEQ ID NO: 2110282 - DNA, 25 bp, Homo sapien
actgtgaggggatgggcaactgccc

SEQ ID NO: 2110283 - DNA, 25 bp, Homo sapien
aactgcccctccaaaaggtccatgg

SEQ ID NO: 2110284 - DNA, 25 bp, Homo sapien
caactgcccctccaaaaggtccatg

SEQ ID NO: 2110285 - DNA, 25 bp, Homo sapien
gtgaggggatgggcaactgcccctc

SEQ ID NO: 2110286 - DNA, 25 bp, Homo sapien
tcctgcaaggaaacaagccgtgggc

SEQ ID NO: 2110287 - DNA, 25 bp, Homo sapien
tctaaggttgctctagtgctggcga

SEQ ID NO: 2110288 - DNA, 25 bp, Homo sapien
caaatgaagtgattctccggtcagc

SEQ ID NO: 2110289 - DNA, 25 bp, Homo sapien
tttgcttcagaacgagaggtcctgc

SEQ ID NO: 2110290 - DNA, 25 bp, Homo sapien
tcatttcctactatgcacagttttt

SEQ ID NO: 2110291 - DNA, 25 bp, Homo sapien
catgagcctataagaatatatattt

SEQ ID NO: 2110292 - DNA, 25 bp, Homo sapien
tattcatttcctactatgcacagtt

SEQ ID NO: 2110293 - DNA, 25 bp, Homo sapien
aacatgagcctataagaatatatat

SEQ ID NO: 2110294 - DNA, 25 bp, Homo sapien
gccttcccgttattttacacctgca

SEQ ID NO: 2110295 - DNA, 25 bp, Homo sapien
tattttacacctgcaactctgttgc

SEQ ID NO: 2110296 - DNA, 25 bp, Homo sapien
gcagagcaatttagccacgcatccc

SEQ ID NO: 2110297 - DNA, 25 bp, Homo sapien
cctactctttgtgcacgcagagcaa

SEQ ID NO: 2110298 - DNA, 25 bp, Homo sapien
tgttcggaattaggggcattctgga

SEQ ID NO: 2110299 - DNA, 25 bp, Homo sapien
tcaccctgtggtgttcggaattagg

SEQ ID NO: 2110300 - DNA, 25 bp, Homo sapien
tggcacctgtaagccctcccaggtg

SEQ ID NO: 2110301 - DNA, 25 bp, Homo sapien
tatggcacctgtaagccctcccagg

SEQ ID NO: 2110302 - DNA, 25 bp, Homo sapien
gcgttcatagatcttggcatccaca

SEQ ID NO: 2110303 - DNA, 25 bp, Homo sapien
cacagtgacaaccatcagcgtggcc

SEQ ID NO: 2110304 - DNA, 25 bp, Homo sapien
cagcgtggccaaggtcactaccaca

SEQ ID NO: 2110305 - DNA, 25 bp, Homo sapien
gtagcccttgtagccgttcagccct

SEQ ID NO: 2110306 - DNA, 25 bp, Homo sapien
attgtggtccacgaaggcggtgtca

SEQ ID NO: 2110307 - DNA, 25 bp, Homo sapien
cttggtgggtgtaatgccattgtca

SEQ ID NO: 2110308 - DNA, 25 bp, Homo sapien
gtgtcaaagccactctcataatgag

SEQ ID NO: 2110309 - DNA, 25 bp, Homo sapien
tgctgccatcaggattgtggtccac

SEQ ID NO: 2110310 - DNA, 25 bp, Homo sapien
gagagggacatggtggtctggtgca

SEQ ID NO: 2110311 - DNA, 25 bp, Homo sapien
agagagggacatggtggtctggtgc

SEQ ID NO: 2110312 - DNA, 25 bp, Homo sapien
gaagagagggacatggtggtctggt

SEQ ID NO: 2110313 - DNA, 25 bp, Homo sapien
gggaagagagggacatggtggtctg

SEQ ID NO: 2110314 - DNA, 25 bp, Homo sapien
cttggcacacctgatgtcatccaga

SEQ ID NO: 2110315 - DNA, 25 bp, Homo sapien
atccagaatatggcgattgagcagg

SEQ ID NO: 2110316 - DNA, 25 bp, Homo sapien
tccagaatatggcgattgagcaggt

SEQ ID NO: 2110317 - DNA, 25 bp, Homo sapien
atatcacaccccttgagccattcag

SEQ ID NO: 2110318 - DNA, 25 bp, Homo sapien
tatcacaccccttgagccattcaga

SEQ ID NO: 2110319 - DNA, 25 bp, Homo sapien
tcagataaatcatggccagaacagt

SEQ ID NO: 2110320 - DNA, 25 bp, Homo sapien
atcatggccagaacagtgtagcctc

SEQ ID NO: 2110321 - DNA, 25 bp, Homo sapien
taaaatctgtctcttcgaatctgag

SEQ ID NO: 2110322 - DNA, 25 bp, Homo sapien
ctgttttcatgctcatctgtgatta

SEQ ID NO: 2110323 - DNA, 25 bp, Homo sapien
ctagctgttttcatgctcatctgtg

SEQ ID NO: 2110324 - DNA, 25 bp, Homo sapien
gttttcatgctcatctgtgattatc

SEQ ID NO: 2110325 - DNA, 25 bp, Homo sapien
agctgttttcatgctcatctgtgat

SEQ ID NO: 2110326 - DNA, 25 bp, Homo sapien
agaagcgcgcaagcccaacatgggt

SEQ ID NO: 2110327 - DNA, 25 bp, Homo sapien
tctgggccgtgtcctggcgagaagc

SEQ ID NO: 2110328 - DNA, 25 bp, Homo sapien
atgggtcccctggtttggattcaag

SEQ ID NO: 2110329 - DNA, 25 bp, Homo sapien
agtggacagccacctcctttggagt

SEQ ID NO: 2110330 - DNA, 25 bp, Homo sapien
cacctgtgggacagcgccttggtcc

SEQ ID NO: 2110331 - DNA, 25 bp, Homo sapien
cagtgacgaggatgttgccaatgtg

SEQ ID NO: 2110332 - DNA, 25 bp, Homo sapien
ccttggtccctttcagtgacgagga

SEQ ID NO: 2110333 - DNA, 25 bp, Homo sapien
caagactgcgaccacctgtgggaca

SEQ ID NO: 2110334 - DNA, 25 bp, Homo sapien
tagggtgtagatgatcagggtaggg

SEQ ID NO: 2110335 - DNA, 25 bp, Homo sapien
ttggtcagcagtagggtgtagatga

SEQ ID NO: 2110336 - DNA, 25 bp, Homo sapien
tcagcagtagggtgtagatgatcag

SEQ ID NO: 2110337 - DNA, 25 bp, Homo sapien
cagtagggtgtagatgatcagggta

SEQ ID NO: 2110338 - DNA, 25 bp, Homo sapien
tcatcttgatgagtgaggtttgttg

SEQ ID NO: 2110339 - DNA, 25 bp, Homo sapien
aacctctggatattgctgttggatg

SEQ ID NO: 2110340 - DNA, 25 bp, Homo sapien
tatagccagggaattaggctcatct

SEQ ID NO: 2110341 - DNA, 25 bp, Homo sapien
tatttgcatgagattaacctctgga

SEQ ID NO: 2110342 - DNA, 25 bp, Homo sapien
cagcctttacctcccaggtcaagtg

SEQ ID NO: 2110343 - DNA, 25 bp, Homo sapien
tgcagcctttacctcccaggtcaag

SEQ ID NO: 2110344 - DNA, 25 bp, Homo sapien
acgtgccaccacgtccaggtttgtt

SEQ ID NO: 2110345 - DNA, 25 bp, Homo sapien
tgccaccacgtccaggtttgtttgt

SEQ ID NO: 2110346 - DNA, 25 bp, Homo sapien
agtacttctgcaagcagagtgatcc

SEQ ID NO: 2110347 - DNA, 25 bp, Homo sapien
tgatcttggcttctcgagggggcac

SEQ ID NO: 2110348 - DNA, 25 bp, Homo sapien
gatccttcataatcaactggcatag

SEQ ID NO: 2110349 - DNA, 25 bp, Homo sapien
gcaagcagagtgatccttcataatc

SEQ ID NO: 2110350 - DNA, 25 bp, Homo sapien
agggttgctttgtgtaatctcctct

SEQ ID NO: 2110351 - DNA, 25 bp, Homo sapien
atgagggttgctttgtgtaatctcc

SEQ ID NO: 2110352 - DNA, 25 bp, Homo sapien
gcagttttccatgatgagggttgct

SEQ ID NO: 2110353 - DNA, 25 bp, Homo sapien
ccatgatgagggttgctttgtgtaa

SEQ ID NO: 2110354 - DNA, 25 bp, Homo sapien
atcaccttcactctctgcataactt

SEQ ID NO: 2110355 - DNA, 25 bp, Homo sapien
tcactctctgcataacttcctccat

SEQ ID NO: 2110356 - DNA, 25 bp, Homo sapien
agcatcaccttcactctctgcataa

SEQ ID NO: 2110357 - DNA, 25 bp, Homo sapien
cttcactctctgcataacttcctcc

SEQ ID NO: 2110358 - DNA, 25 bp, Homo sapien
ctggcttcctggaccctttgtgtct

SEQ ID NO: 2110359 - DNA, 25 bp, Homo sapien
tgctggcttcctggaccctttgtgt

SEQ ID NO: 2110360 - DNA, 25 bp, Homo sapien
tcatgctggcttcctggaccctttg

SEQ ID NO: 2110361 - DNA, 25 bp, Homo sapien
catgctggcttcctggaccctttgt

SEQ ID NO: 2110362 - DNA, 25 bp, Homo sapien
tctcaacctctgcctcccgggttca

SEQ ID NO: 2110363 - DNA, 25 bp, Homo sapien
catgatctcagctcatctcaacctc

SEQ ID NO: 2110364 - DNA, 25 bp, Homo sapien
tgggactacgggtgcacgccaccat

SEQ ID NO: 2110365 - DNA, 25 bp, Homo sapien
gagacggagtatctctctgtctcca

SEQ ID NO: 2110366 - DNA, 25 bp, Homo sapien
cttgagcaggccatgttcttgagaa

SEQ ID NO: 2110367 - DNA, 25 bp, Homo sapien
cagcttcagtaatcttggtttggca

SEQ ID NO: 2110368 - DNA, 25 bp, Homo sapien
aatagtggatgcgtttgtgtactcc

SEQ ID NO: 2110369 - DNA, 25 bp, Homo sapien
tggcagatactctcaaagtgaaggg

SEQ ID NO: 2110370 - DNA, 25 bp, Homo sapien
tgtcagtagttgttctaaagagact

SEQ ID NO: 2110371 - DNA, 25 bp, Homo sapien
cagtccagggtggtattgtcagtag

SEQ ID NO: 2110372 - DNA, 25 bp, Homo sapien
cttggagagtgggatagtttccttg

SEQ ID NO: 2110373 - DNA, 25 bp, Homo sapien
gggtctcaacccaactcaaggcagt

SEQ ID NO: 2110374 - DNA, 25 bp, Homo sapien
ggttaactcagcttgatctccgaag

SEQ ID NO: 2110375 - DNA, 25 bp, Homo sapien
tggcagcttcagtgaaaagggtaac

SEQ ID NO: 2110376 - DNA, 25 bp, Homo sapien
ccggaaatggaattaccgagtcaga

SEQ ID NO: 2110377 - DNA, 25 bp, Homo sapien
ttcaagtaaagagccagacaagacc

SEQ ID NO: 2110378 - DNA, 25 bp, Homo sapien
cctctttcctcactcgctcgttgcc

SEQ ID NO: 2110379 - DNA, 25 bp, Homo sapien
tctttcctcactcgctcgttgccca

SEQ ID NO: 2110380 - DNA, 25 bp, Homo sapien
ctctttcctcactcgctcgttgccc

SEQ ID NO: 2110381 - DNA, 25 bp, Homo sapien
cacggccagcgacagaggtcctggc

SEQ ID NO: 2110382 - DNA, 25 bp, Homo sapien
ggccagcgacagaggtcctggcgct

SEQ ID NO: 2110383 - DNA, 25 bp, Homo sapien
agcagtgcgagaccacggccagcga

SEQ ID NO: 2110384 - DNA, 25 bp, Homo sapien
agaagcagtgcgagaccacggccag

SEQ ID NO: 2110385 - DNA, 25 bp, Homo sapien
cctctgactctatgaactcttttag

SEQ ID NO: 2110386 - DNA, 25 bp, Homo sapien
ctcttttagttttgatacgggctgc

SEQ ID NO: 2110387 - DNA, 25 bp, Homo sapien
tcgaacctctgactctatgaactct

SEQ ID NO: 2110388 - DNA, 25 bp, Homo sapien
aaaaggccatataagcctacttgaa

SEQ ID NO: 2110389 - DNA, 25 bp, Homo sapien
taggcccatcctatgtgaacttaaa

SEQ ID NO: 2110390 - DNA, 25 bp, Homo sapien
caattctgacgtaacagcctggacc

SEQ ID NO: 2110391 - DNA, 25 bp, Homo sapien
aacattgggcattgtggtagacaga

SEQ ID NO: 2110392 - DNA, 25 bp, Homo sapien
tgaactcaggcccttgatgcaattc

SEQ ID NO: 2110393 - DNA, 25 bp, Homo sapien
gatctgtgaattaaatccaggtttc

SEQ ID NO: 2110394 - DNA, 25 bp, Homo sapien
ttctagcatgaaaaccaaacctgac

SEQ ID NO: 2110395 - DNA, 25 bp, Homo sapien
actgtgcctggactgttcagttttc

SEQ ID NO: 2110396 - DNA, 25 bp, Homo sapien
tgttaatgcttccacccctaatgcc

SEQ ID NO: 2110397 - DNA, 25 bp, Homo sapien
cacactgaatctaggccttgggtca

SEQ ID NO: 2110398 - DNA, 25 bp, Homo sapien
cagtcatgtagggtgttaggtcttc

SEQ ID NO: 2110399 - DNA, 25 bp, Homo sapien
catcacatggcggagagagaatctc

SEQ ID NO: 2110400 - DNA, 25 bp, Homo sapien
tataggccgtatctcccatgcagtc

SEQ ID NO: 2110401 - DNA, 25 bp, Homo sapien
cataaaagacaggtgcacctggggg

SEQ ID NO: 2110402 - DNA, 25 bp, Homo sapien
atctccaggtgcgtattctctttct

SEQ ID NO: 2110403 - DNA, 25 bp, Homo sapien
catccggctcaccggcattcagagt

SEQ ID NO: 2110404 - DNA, 25 bp, Homo sapien
gggccgttcataggcctatatctcc

SEQ ID NO: 2110405 - DNA, 25 bp, Homo sapien
aggcacatctcacataagcacatga

SEQ ID NO: 2110406 - DNA, 25 bp, Homo sapien
catctcacataagcacatgaacacc

SEQ ID NO: 2110407 - DNA, 25 bp, Homo sapien
cacatctcacataagcacatgaaca

SEQ ID NO: 2110408 - DNA, 25 bp, Homo sapien
atcagatgaataatgtgctgatgtc

SEQ ID NO: 2110409 - DNA, 25 bp, Homo sapien
gactaaagatgttggcggctgcatc

SEQ ID NO: 2110410 - DNA, 25 bp, Homo sapien
ctcttgactaaagatgttggcggct

SEQ ID NO: 2110411 - DNA, 25 bp, Homo sapien
gtccaaatcctaatactacaacaaa

SEQ ID NO: 2110412 - DNA, 25 bp, Homo sapien
tgcatctctagccaatgtccaaatc

SEQ ID NO: 2110413 - DNA, 25 bp, Homo sapien
taaagcgtcccctgggattggctac

SEQ ID NO: 2110414 - DNA, 25 bp, Homo sapien
agactctgattttcccgcctaaagc

SEQ ID NO: 2110415 - DNA, 25 bp, Homo sapien
ccgcctaaagcgtcccctgggattg

SEQ ID NO: 2110416 - DNA, 25 bp, Homo sapien
gattggctactccaagttcagagta

SEQ ID NO: 2110417 - DNA, 25 bp, Homo sapien
gtggtggcgaggtcggcagcagttg

SEQ ID NO: 2110418 - DNA, 25 bp, Homo sapien
tcagagacaaagcagtggtggcgag

SEQ ID NO: 2110419 - DNA, 25 bp, Homo sapien
cagcagttggtgacaaagtgtggtt

SEQ ID NO: 2110420 - DNA, 25 bp, Homo sapien
gaggaggagaaaatattctgcaatg

SEQ ID NO: 2110421 - DNA, 25 bp, Homo sapien
cgtacagacccttgttggggaggca

SEQ ID NO: 2110422 - DNA, 25 bp, Homo sapien
acccttgttggggaggcagggacat

SEQ ID NO: 2110423 - DNA, 25 bp, Homo sapien
ctgaaagacgtacagacccttgttg

SEQ ID NO: 2110424 - DNA, 25 bp, Homo sapien
agacgtacagacccttgttggggag

SEQ ID NO: 2110425 - DNA, 25 bp, Homo sapien
agaaacagcctgagtctttccagtc

SEQ ID NO: 2110426 - DNA, 25 bp, Homo sapien
ctgcaagagaaacagcctgagtctt

SEQ ID NO: 2110427 - DNA, 25 bp, Homo sapien
aagagaaacagcctgagtctttcca

SEQ ID NO: 2110428 - DNA, 25 bp, Homo sapien
tgcaagagaaacagcctgagtcttt

SEQ ID NO: 2110429 - DNA, 25 bp, Homo sapien
ctgatgctttagcatcatccctggg

SEQ ID NO: 2110430 - DNA, 25 bp, Homo sapien
ctctgatgctttagcatcatccctg

SEQ ID NO: 2110431 - DNA, 25 bp, Homo sapien
catccctgggtctctttgcaaaggc

SEQ ID NO: 2110432 - DNA, 25 bp, Homo sapien
cttctctgatgctttagcatcatcc

SEQ ID NO: 2110433 - DNA, 25 bp, Homo sapien
caaatgtagagcaaggtcacagact

SEQ ID NO: 2110434 - DNA, 25 bp, Homo sapien
ccagaatggagtgagagttaccaaa

SEQ ID NO: 2110435 - DNA, 25 bp, Homo sapien
gccacacagtagggcttcagtgatg

SEQ ID NO: 2110436 - DNA, 25 bp, Homo sapien
gtctccagggatggtaggtgatgac

SEQ ID NO: 2110437 - DNA, 25 bp, Homo sapien
tcttcatatgcacacagctgatttt

SEQ ID NO: 2110438 - DNA, 25 bp, Homo sapien
tgcacacagctgattttctccgaga

SEQ ID NO: 2110439 - DNA, 25 bp, Homo sapien
gcacacagctgattttctccgagaa

SEQ ID NO: 2110440 - DNA, 25 bp, Homo sapien
atatgcacacagctgattttctccg

SEQ ID NO: 2110441 - DNA, 25 bp, Homo sapien
gaatcattcctctgagagtctgtgg

SEQ ID NO: 2110442 - DNA, 25 bp, Homo sapien
ctgagagtctgtggcccgtttatta

SEQ ID NO: 2110443 - DNA, 25 bp, Homo sapien
tttattacgcatgaaaagtgagagg

SEQ ID NO: 2110444 - DNA, 25 bp, Homo sapien
cattatcagaatcattcctctgaga

SEQ ID NO: 2110445 - DNA, 25 bp, Homo sapien
gattcccaaactctagacagacttc

SEQ ID NO: 2110446 - DNA, 25 bp, Homo sapien
ggtaaagattcccaaactctagaca

SEQ ID NO: 2110447 - DNA, 25 bp, Homo sapien
aagattcccaaactctagacagact

SEQ ID NO: 2110448 - DNA, 25 bp, Homo sapien
taaagattcccaaactctagacaga

SEQ ID NO: 2110449 - DNA, 25 bp, Homo sapien
gagcctgccaaaagtcatctgagga

SEQ ID NO: 2110450 - DNA, 25 bp, Homo sapien
ccaaaagtcatctgaggacgttcaa

SEQ ID NO: 2110451 - DNA, 25 bp, Homo sapien
cttcgggatgattctctggagcctg

SEQ ID NO: 2110452 - DNA, 25 bp, Homo sapien
cgggatgattctctggagcctgcca

SEQ ID NO: 2110453 - DNA, 25 bp, Homo sapien
cagagctacttgcttttcccggcgg

SEQ ID NO: 2110454 - DNA, 25 bp, Homo sapien
gagctacttgcttttcccggcgggc

SEQ ID NO: 2110455 - DNA, 25 bp, Homo sapien
agctacttgcttttcccggcgggca

SEQ ID NO: 2110456 - DNA, 25 bp, Homo sapien
ctcagagctacttgcttttcccggc

SEQ ID NO: 2110457 - DNA, 25 bp, Homo sapien
agccagaggggttgttcccaaatcg

SEQ ID NO: 2110458 - DNA, 25 bp, Homo sapien
acacacctgaacatagccagggaag

SEQ ID NO: 2110459 - DNA, 25 bp, Homo sapien
ccagtccacacacctgaacatagcc

SEQ ID NO: 2110460 - DNA, 25 bp, Homo sapien
tccacacacctgaacatagccaggg

SEQ ID NO: 2110461 - DNA, 25 bp, Homo sapien
tgctttctctcacgcagtctgtggg

SEQ ID NO: 2110462 - DNA, 25 bp, Homo sapien
gctgctttctctcacgcagtctgtg

SEQ ID NO: 2110463 - DNA, 25 bp, Homo sapien
tctgtgggtccaggcatgtttcccc

SEQ ID NO: 2110464 - DNA, 25 bp, Homo sapien
ttgtcatcttcctcagggtcgctga

SEQ ID NO: 2110465 - DNA, 25 bp, Homo sapien
gagggtgagccgaaggttcacttat

SEQ ID NO: 2110466 - DNA, 25 bp, Homo sapien
gcagccatgcccacgttcgtgaaag

SEQ ID NO: 2110467 - DNA, 25 bp, Homo sapien
gaggggtccgcagccatgcccacgt

SEQ ID NO: 2110468 - DNA, 25 bp, Homo sapien
atgggcatgtgtcgtatccctgagg

SEQ ID NO: 2110469 - DNA, 25 bp, Homo sapien
cccacgttcgtgaaaggtcaccacg

SEQ ID NO: 2110470 - DNA, 25 bp, Homo sapien
aatgctaatgtctaacagaatggca

SEQ ID NO: 2110471 - DNA, 25 bp, Homo sapien
tgcaagaaaatacaacggaaacgcc

SEQ ID NO: 2110472 - DNA, 25 bp, Homo sapien
acacaagccgaaatatgcattaagc

SEQ ID NO: 2110473 - DNA, 25 bp, Homo sapien
tcttgctcatcaacgaaaatgctaa

SEQ ID NO: 2110474 - DNA, 25 bp, Homo sapien
ggcttgaccaggacacatggcagtg

SEQ ID NO: 2110475 - DNA, 25 bp, Homo sapien
gacacatggcagtggagaaaagcag

SEQ ID NO: 2110476 - DNA, 25 bp, Homo sapien
accaggacacatggcagtggagaaa

SEQ ID NO: 2110477 - DNA, 25 bp, Homo sapien
ttgaccaggacacatggcagtggag

SEQ ID NO: 2110478 - DNA, 25 bp, Homo sapien
tggtccaccagaaatattgaggcat

SEQ ID NO: 2110479 - DNA, 25 bp, Homo sapien
tcagtggtccaccagaaatattgag

SEQ ID NO: 2110480 - DNA, 25 bp, Homo sapien
gtccaccagaaatattgaggcattc

SEQ ID NO: 2110481 - DNA, 25 bp, Homo sapien
agtggtccaccagaaatattgaggc

SEQ ID NO: 2110482 - DNA, 25 bp, Homo sapien
tggcacctgtaagccctcccaggtg

SEQ ID NO: 2110483 - DNA, 25 bp, Homo sapien
tgttcggaattaggggcattctgga

SEQ ID NO: 2110484 - DNA, 25 bp, Homo sapien
tcaccctgtggtgttcggaattagg

SEQ ID NO: 2110485 - DNA, 25 bp, Homo sapien
tatggcacctgtaagccctcccagg

SEQ ID NO: 2110486 - DNA, 25 bp, Homo sapien
gcgttcatagatcttggcatccaca

SEQ ID NO: 2110487 - DNA, 25 bp, Homo sapien
cagcgtggccaaggtcactaccaca

SEQ ID NO: 2110488 - DNA, 25 bp, Homo sapien
cacagtgacaaccatcagcgtggcc

SEQ ID NO: 2110489 - DNA, 25 bp, Homo sapien
gtagcccttgtagccgttcagccct

SEQ ID NO: 2110490 - DNA, 25 bp, Homo sapien
attgtggtccacgaaggcggtgtca

SEQ ID NO: 2110491 - DNA, 25 bp, Homo sapien
gtgtcaaagccactctcataatgag

SEQ ID NO: 2110492 - DNA, 25 bp, Homo sapien
cttggtgggtgtaatgccattgtca

SEQ ID NO: 2110493 - DNA, 25 bp, Homo sapien
tgctgccatcaggattgtggtccac

SEQ ID NO: 2110494 - DNA, 25 bp, Homo sapien
gagagggacatggtggtctggtgca

SEQ ID NO: 2110495 - DNA, 25 bp, Homo sapien
agagagggacatggtggtctggtgc

SEQ ID NO: 2110496 - DNA, 25 bp, Homo sapien
gaagagagggacatggtggtctggt

SEQ ID NO: 2110497 - DNA, 25 bp, Homo sapien
gggaagagagggacatggtggtctg

SEQ ID NO: 2110498 - DNA, 25 bp, Homo sapien
cttggcacacctgatgtcatccaga

SEQ ID NO: 2110499 - DNA, 25 bp, Homo sapien
atccagaatatggcgattgagcagg

SEQ ID NO: 2110500 - DNA, 25 bp, Homo sapien
tccagaatatggcgattgagcaggt

SEQ ID NO: 2110501 - DNA, 25 bp, Homo sapien
tcagataaatcatggccagaacagt

SEQ ID NO: 2110502 - DNA, 25 bp, Homo sapien
atatcacaccccttgagccattcag

SEQ ID NO: 2110503 - DNA, 25 bp, Homo sapien
tatcacaccccttgagccattcaga

SEQ ID NO: 2110504 - DNA, 25 bp, Homo sapien
atcatggccagaacagtgtagcctc

SEQ ID NO: 2110505 - DNA, 25 bp, Homo sapien
taaaatctgtctcttcgaatctgag

SEQ ID NO: 2110506 - DNA, 25 bp, Homo sapien
caagacacaaagtgacactcaggca

SEQ ID NO: 2110507 - DNA, 25 bp, Homo sapien
tcaagacacaaagtgacactcaggc

SEQ ID NO: 2110508 - DNA, 25 bp, Homo sapien
agacacaaagtgacactcaggcact

SEQ ID NO: 2110509 - DNA, 25 bp, Homo sapien
aagacacaaagtgacactcaggcac

SEQ ID NO: 2110510 - DNA, 25 bp, Homo sapien
gttttcatgctcatctgtgattatc

SEQ ID NO: 2110511 - DNA, 25 bp, Homo sapien
agctgttttcatgctcatctgtgat

SEQ ID NO: 2110512 - DNA, 25 bp, Homo sapien
ctagctgttttcatgctcatctgtg

SEQ ID NO: 2110513 - DNA, 25 bp, Homo sapien
ctgttttcatgctcatctgtgatta

SEQ ID NO: 2110514 - DNA, 25 bp, Homo sapien
ggtccacatacggtggcaatccact

SEQ ID NO: 2110515 - DNA, 25 bp, Homo sapien
tgggtccacatacggtggcaatcca

SEQ ID NO: 2110516 - DNA, 25 bp, Homo sapien
gggtccacatacggtggcaatccac

SEQ ID NO: 2110517 - DNA, 25 bp, Homo sapien
tccattcgtggcactgggagcaatc

SEQ ID NO: 2110518 - DNA, 25 bp, Homo sapien
aggcgtcgtctccattcgtggcact

SEQ ID NO: 2110519 - DNA, 25 bp, Homo sapien
attcgtggcactgggagcaatctga

SEQ ID NO: 2110520 - DNA, 25 bp, Homo sapien
tctccattcgtggcactgggagcaa

SEQ ID NO: 2110521 - DNA, 25 bp, Homo sapien
tctcccaggctttcgtcttttcgca

SEQ ID NO: 2110522 - DNA, 25 bp, Homo sapien
ccaggctttcgtcttttcgcattct

SEQ ID NO: 2110523 - DNA, 25 bp, Homo sapien
cccaggctttcgtcttttcgcattc

SEQ ID NO: 2110524 - DNA, 25 bp, Homo sapien
tcccaggctttcgtcttttcgcatt

SEQ ID NO: 2110525 - DNA, 25 bp, Homo sapien
atcctttagatttgaagattccctg

SEQ ID NO: 2110526 - DNA, 25 bp, Homo sapien
ttgaatcctttagatttgaagattc

SEQ ID NO: 2110527 - DNA, 25 bp, Homo sapien
aatcctttagatttgaagattccct

SEQ ID NO: 2110528 - DNA, 25 bp, Homo sapien
gaatcctttagatttgaagattccc

SEQ ID NO: 2110529 - DNA, 25 bp, Homo sapien
ctatcacacagtctttgggtccagg

SEQ ID NO: 2110530 - DNA, 25 bp, Homo sapien
tctatcacacagtctttgggtccag

SEQ ID NO: 2110531 - DNA, 25 bp, Homo sapien
tatcacacagtctttgggtccaggc

SEQ ID NO: 2110532 - DNA, 25 bp, Homo sapien
atcacacagtctttgggtccaggca

SEQ ID NO: 2110533 - DNA, 25 bp, Homo sapien
ggactgcaatccaagtaccaaccaa

SEQ ID NO: 2110534 - DNA, 25 bp, Homo sapien
aagtaccaaccaagtctgaccctgt

SEQ ID NO: 2110535 - DNA, 25 bp, Homo sapien
aatatttggtgcattcaggtggtat

SEQ ID NO: 2110536 - DNA, 25 bp, Homo sapien
gcaatccaagtaccaaccaagtctg

SEQ ID NO: 2110537 - DNA, 25 bp, Homo sapien
gatgacagataaactgtatcagtga

SEQ ID NO: 2110538 - DNA, 25 bp, Homo sapien
ctcagagctacttgcttttcccggg

SEQ ID NO: 2110539 - DNA, 25 bp, Homo sapien
tcagagctacttgcttttcccgggg

SEQ ID NO: 2110540 - DNA, 25 bp, Homo sapien
agccagaggggttgttcccaaatcg

SEQ ID NO: 2110541 - DNA, 25 bp, Homo sapien
acacacctgaacatagccagggaag

SEQ ID NO: 2110542 - DNA, 25 bp, Homo sapien
ccagtccacacacctgaacatagcc

SEQ ID NO: 2110543 - DNA, 25 bp, Homo sapien
tccacacacctgaacatagccaggg

SEQ ID NO: 2110544 - DNA, 25 bp, Homo sapien
tctgtggatccaggcatgtttccct

SEQ ID NO: 2110545 - DNA, 25 bp, Homo sapien
ttgtcgtcttcctcagggtcgctga

SEQ ID NO: 2110546 - DNA, 25 bp, Homo sapien
gatccaggcatgtttccctcttttg

SEQ ID NO: 2110547 - DNA, 25 bp, Homo sapien
tgctttctctcacgcagtctgtgga

SEQ ID NO: 2110548 - DNA, 25 bp, Homo sapien
gggtccgcagccatgcccatgttcg

SEQ ID NO: 2110549 - DNA, 25 bp, Homo sapien
ccgcagccatgcccatgttcgtgaa

SEQ ID NO: 2110550 - DNA, 25 bp, Homo sapien
gtccgcagccatgcccatgttcgtg

SEQ ID NO: 2110551 - DNA, 25 bp, Homo sapien
gcagccatgcccatgttcgtgaaag

SEQ ID NO: 2110552 - DNA, 25 bp, Homo sapien
acacttgctttcacttgctatgcac

SEQ ID NO: 2110553 - DNA, 25 bp, Homo sapien
ttggagatatcaatgacctctggaa

SEQ ID NO: 2110554 - DNA, 25 bp, Homo sapien
gaactatggtgtgaggtctgcacac

SEQ ID NO: 2110555 - DNA, 25 bp, Homo sapien
cttggagatatcaatgacctctgga

SEQ ID NO: 2110556 - DNA, 25 bp, Homo sapien
ggtctgcacacttggcccccttgag

SEQ ID NO: 2110557 - DNA, 25 bp, Homo sapien
cagtggttgcgaggtcggcagcagt

SEQ ID NO: 2110558 - DNA, 25 bp, Homo sapien
cgagttggcagcagttggtgacaaa

SEQ ID NO: 2110559 - DNA, 25 bp, Homo sapien
cggcagcagtggtggcgagttggca

SEQ ID NO: 2110560 - DNA, 25 bp, Homo sapien
tcagagacaaagcagtggttgcgag

SEQ ID NO: 2110561 - DNA, 25 bp, Homo sapien
aggaggtcaagcccagttcggccaa

SEQ ID NO: 2110562 - DNA, 25 bp, Homo sapien
gaggtcaagcccagttcggccaaca

SEQ ID NO: 2110563 - DNA, 25 bp, Homo sapien
gaggaggtcaagcccagttcggcca

SEQ ID NO: 2110564 - DNA, 25 bp, Homo sapien
ggaggtcaagcccagttcggccaac

SEQ ID NO: 2110565 - DNA, 25 bp, Homo sapien
actttctagctacaggacccttggt

SEQ ID NO: 2110566 - DNA, 25 bp, Homo sapien
ctttctagctacaggacccttggtc

SEQ ID NO: 2110567 - DNA, 25 bp, Homo sapien
catccctgggtctctttgcaaaggt

SEQ ID NO: 2110568 - DNA, 25 bp, Homo sapien
ctgatgctttagcatcatccctggg

SEQ ID NO: 2110569 - DNA, 25 bp, Homo sapien
ctctgatgctttagcatcatccctg

SEQ ID NO: 2110570 - DNA, 25 bp, Homo sapien
cttctctgatgctttagcatcatcc

SEQ ID NO: 2110571 - DNA, 25 bp, Homo sapien
cttagagaagtatgtggcaatatca

SEQ ID NO: 2110572 - DNA, 25 bp, Homo sapien
agtatgtggcaatatcatcaaaggc

SEQ ID NO: 2110573 - DNA, 25 bp, Homo sapien
agagaagtatgtggcaatatcatca

SEQ ID NO: 2110574 - DNA, 25 bp, Homo sapien
agaagtatgtggcaatatcatcaaa

SEQ ID NO: 2110575 - DNA, 25 bp, Homo sapien
tagtcatggccttatagtttctctt

SEQ ID NO: 2110576 - DNA, 25 bp, Homo sapien
catagctgattttctccgagtattt

SEQ ID NO: 2110577 - DNA, 25 bp, Homo sapien
agctgattttctccgagtatttcat

SEQ ID NO: 2110578 - DNA, 25 bp, Homo sapien
cacatagctgattttctccgagtat

SEQ ID NO: 2110579 - DNA, 25 bp, Homo sapien
ctgtttattacacatgaaaggtggg

SEQ ID NO: 2110580 - DNA, 25 bp, Homo sapien
tacacatgaaaggtgggagggtgac

SEQ ID NO: 2110581 - DNA, 25 bp, Homo sapien
catgaaaggtgggagggtgactttg

SEQ ID NO: 2110582 - DNA, 25 bp, Homo sapien
tattacacatgaaaggtgggagggt

SEQ ID NO: 2110583 - DNA, 25 bp, Homo sapien
cctgaatcctgcggttatggtcatt

SEQ ID NO: 2110584 - DNA, 25 bp, Homo sapien
gaatcctgcggttatggtcattatc

SEQ ID NO: 2110585 - DNA, 25 bp, Homo sapien
ctgaatcctgcggttatggtcatta

SEQ ID NO: 2110586 - DNA, 25 bp, Homo sapien
atcctgcggttatggtcattatcaa

SEQ ID NO: 2110587 - DNA, 25 bp, Homo sapien
ctggagagacttccgttgcatgagg

SEQ ID NO: 2110588 - DNA, 25 bp, Homo sapien
ctctggagagacttccgttgcatga

SEQ ID NO: 2110589 - DNA, 25 bp, Homo sapien
aactctggagagacttccgttgcat

SEQ ID NO: 2110590 - DNA, 25 bp, Homo sapien
caaactctggagagacttccgttgc

SEQ ID NO: 2110591 - DNA, 25 bp, Homo sapien
tcgggatgattctgtggagcctgcc

SEQ ID NO: 2110592 - DNA, 25 bp, Homo sapien
ctgccgaaagtcatctgaggatgtt

SEQ ID NO: 2110593 - DNA, 25 bp, Homo sapien
cttcgggatgattctgtggagcctg

SEQ ID NO: 2110594 - DNA, 25 bp, Homo sapien
gatgattctgtggagcctgccgaaa

SEQ ID NO: 2110595 - DNA, 25 bp, Homo sapien
ctggggggtgcagttgtttcccatc

SEQ ID NO: 2110596 - DNA, 25 bp, Homo sapien
ttgcttttcctggggggtgcagttg

SEQ ID NO: 2110597 - DNA, 25 bp, Homo sapien
tcgaatcattttcgtcctctgctgg

SEQ ID NO: 2110598 - DNA, 25 bp, Homo sapien
atctcttattaatcttctcagaaat

SEQ ID NO: 2110599 - DNA, 25 bp, Homo sapien
tccacctagagaagataacgaacgt

SEQ ID NO: 2110600 - DNA, 25 bp, Homo sapien
attccctgagatacagcgatactga

SEQ ID NO: 2110601 - DNA, 25 bp, Homo sapien
ctgaaattaggacagttaacaatcc

SEQ ID NO: 2110602 - DNA, 25 bp, Homo sapien
aaatggccactaactgttcaaatga

SEQ ID NO: 2110603 - DNA, 25 bp, Homo sapien
cactgatctcttcataaatcaccag

SEQ ID NO: 2110604 - DNA, 25 bp, Homo sapien
tgctttctctcacgcagtctgtggg

SEQ ID NO: 2110605 - DNA, 25 bp, Homo sapien
gctgctttctctcacgcagtctgtg

SEQ ID NO: 2110606 - DNA, 25 bp, Homo sapien
tctgtgggtccaggcatgtttcccc

SEQ ID NO: 2110607 - DNA, 25 bp, Homo sapien
cgcagccatgcccatgttcgtgaaa

SEQ ID NO: 2110608 - DNA, 25 bp, Homo sapien
ccgcagccatgcccatgttcgtgaa

SEQ ID NO: 2110609 - DNA, 25 bp, Homo sapien
gcagccatgcccatgttcgtgaaag

SEQ ID NO: 2110610 - DNA, 25 bp, Homo sapien
acacttgctttcacttgctatgcac

SEQ ID NO: 2110611 - DNA, 25 bp, Homo sapien
cttgctcatcaattataaggatagt

SEQ ID NO: 2110612 - DNA, 25 bp, Homo sapien
tgctcatcaattataaggatagtat

SEQ ID NO: 2110613 - DNA, 25 bp, Homo sapien
catcaattataaggatagtatctaa

SEQ ID NO: 2110614 - DNA, 25 bp, Homo sapien
gtcttgctcatcaattataaggata

SEQ ID NO: 2110615 - DNA, 25 bp, Homo sapien
tgtggtgacctttcacgaacgtggg

SEQ ID NO: 2110616 - DNA, 25 bp, Homo sapien
aatgtggtgacctttcacgaacgtg

SEQ ID NO: 2110617 - DNA, 25 bp, Homo sapien
gtggtgacctttcacgaacgtgggc

SEQ ID NO: 2110618 - DNA, 25 bp, Homo sapien
agaatgtggtgacctttcacgaacg

SEQ ID NO: 2110619 - DNA, 25 bp, Homo sapien
tgaggtaggacagaatcagagtgtg

SEQ ID NO: 2110620 - DNA, 25 bp, Homo sapien
gaggtaggacagaatcagagtgtgc

SEQ ID NO: 2110621 - DNA, 25 bp, Homo sapien
aggtaggacagaatcagagtgtgca

SEQ ID NO: 2110622 - DNA, 25 bp, Homo sapien
cacttcgaggaaccgtggaaggcgt

SEQ ID NO: 2110623 - DNA, 25 bp, Homo sapien
aggaaccgtggaaggcgtgtacagg

SEQ ID NO: 2110624 - DNA, 25 bp, Homo sapien
ttcgaggaaccgtggaaggcgtgta

SEQ ID NO: 2110625 - DNA, 25 bp, Homo sapien
tcacttcgaggaaccgtggaaggcg

SEQ ID NO: 2110626 - DNA, 25 bp, Homo sapien
ggaatggataacccaggcgaagaag

SEQ ID NO: 2110627 - DNA, 25 bp, Homo sapien
cctaggaatggataacccaggcgaa

SEQ ID NO: 2110628 - DNA, 25 bp, Homo sapien
ctaggaatggataacccaggcgaag

SEQ ID NO: 2110629 - DNA, 25 bp, Homo sapien
taggaatggataacccaggcgaaga

SEQ ID NO: 2110630 - DNA, 25 bp, Homo sapien
gtaagtgaaccttcggctcatcccc

SEQ ID NO: 2110631 - DNA, 25 bp, Homo sapien
gcgaccctgaagaagacgacgagta

SEQ ID NO: 2110632 - DNA, 25 bp, Homo sapien
tattctgttatggtactggtatccc

SEQ ID NO: 2110633 - DNA, 25 bp, Homo sapien
gacgacgagtaactccgtaagtgaa

SEQ ID NO: 2110634 - DNA, 25 bp, Homo sapien
tctgtgggtccaggcatgtttccca

SEQ ID NO: 2110635 - DNA, 25 bp, Homo sapien
tctctcatgcagtctgtgggtccag

SEQ ID NO: 2110636 - DNA, 25 bp, Homo sapien
gctttctctcatgcagtctgtgggt

SEQ ID NO: 2110637 - DNA, 25 bp, Homo sapien
ctgctttctctcatgcagtctgtgg

SEQ ID NO: 2110638 - DNA, 25 bp, Homo sapien
cttatggatcccatcttcccaggga

SEQ ID NO: 2110639 - DNA, 25 bp, Homo sapien
ctttatctatccatgatagacagat

SEQ ID NO: 2110640 - DNA, 25 bp, Homo sapien
tatatactcatggaacctaaggaaa

SEQ ID NO: 2110641 - DNA, 25 bp, Homo sapien
acagatagttgggagctttatatac

SEQ ID NO: 2110642 - DNA, 25 bp, Homo sapien
gatttcactggactctcgaatctca

SEQ ID NO: 2110643 - DNA, 25 bp, Homo sapien
tccagggtcaattgttatcattaac

SEQ ID NO: 2110644 - DNA, 25 bp, Homo sapien
cagggtcaattgttatcattaacaa

SEQ ID NO: 2110645 - DNA, 25 bp, Homo sapien
ctctgctggtggtcaaggaggatga

SEQ ID NO: 2110646 - DNA, 25 bp, Homo sapien
attccagggtcaattgttatcatta

SEQ ID NO: 2110647 - DNA, 25 bp, Homo sapien
gctgtggaatgataacataatgctg

SEQ ID NO: 2110648 - DNA, 25 bp, Homo sapien
tgctgtggaatgataacataatgct

SEQ ID NO: 2110649 - DNA, 25 bp, Homo sapien
tctgtgtctgcggtgctgtggaatg

SEQ ID NO: 2110650 - DNA, 25 bp, Homo sapien
ctgtgtctgcggtgctgtggaatga

SEQ ID NO: 2110651 - DNA, 25 bp, Homo sapien
tagccaatccaaggggacgctttcg

SEQ ID NO: 2110652 - DNA, 25 bp, Homo sapien
ggcaaatcggcgtgtgcgtactctg

SEQ ID NO: 2110653 - DNA, 25 bp, Homo sapien
cggcgtgtgcgtactctgaatttaa

SEQ ID NO: 2110654 - DNA, 25 bp, Homo sapien
atcaaaagggcaaatcggcgtgtgc

SEQ ID NO: 2110655 - DNA, 25 bp, Homo sapien
tttgagcatcatccctgggtctcct

SEQ ID NO: 2110656 - DNA, 25 bp, Homo sapien
ctgatatttgagcatcatccctggg

SEQ ID NO: 2110657 - DNA, 25 bp, Homo sapien
acttctctgatatttgagcatcatc

SEQ ID NO: 2110658 - DNA, 25 bp, Homo sapien
ctttcgtaacttctctgatatttga

SEQ ID NO: 2110659 - DNA, 25 bp, Homo sapien
tagtcatgacctcatagtttagctt

SEQ ID NO: 2110660 - DNA, 25 bp, Homo sapien
gtttagtcatgacctcatagtttag

SEQ ID NO: 2110661 - DNA, 25 bp, Homo sapien
gtcatgacctcatagtttagcttca

SEQ ID NO: 2110662 - DNA, 25 bp, Homo sapien
tttagtcatgacctcatagtttagc

SEQ ID NO: 2110663 - DNA, 25 bp, Homo sapien
gattcctgtggtttcgatcgttacc

SEQ ID NO: 2110664 - DNA, 25 bp, Homo sapien
gtttcgatcgttaccaaaatcattc

SEQ ID NO: 2110665 - DNA, 25 bp, Homo sapien
cattcccgtggaagtctgcagcccg

SEQ ID NO: 2110666 - DNA, 25 bp, Homo sapien
gcagcccgtttactacgcatgaaag

SEQ ID NO: 2110667 - DNA, 25 bp, Homo sapien
ctctagagagacttctgtcgcatga

SEQ ID NO: 2110668 - DNA, 25 bp, Homo sapien
agagacttctgtcgcatgagggcat

SEQ ID NO: 2110669 - DNA, 25 bp, Homo sapien
tagagagacttctgtcgcatgaggg

SEQ ID NO: 2110670 - DNA, 25 bp, Homo sapien
gaaagagaatacatcagaatttttc

SEQ ID NO: 2110671 - DNA, 25 bp, Homo sapien
aagattctctggaggctgccgaaag

SEQ ID NO: 2110672 - DNA, 25 bp, Homo sapien
cgggaagattctctggaggctgccg

SEQ ID NO: 2110673 - DNA, 25 bp, Homo sapien
ggaagattctctggaggctgccgaa

SEQ ID NO: 2110674 - DNA, 25 bp, Homo sapien
cttcgggaagattctctggaggctg

SEQ ID NO: 2110675 - DNA, 25 bp, Homo sapien
ttaatcttctccaaggtacttggat

SEQ ID NO: 2110676 - DNA, 25 bp, Homo sapien
cctctggcacttccttcaaaccatt

SEQ ID NO: 2110677 - DNA, 25 bp, Homo sapien
tctggcacttccttcaaaccatttt

SEQ ID NO: 2110678 - DNA, 25 bp, Homo sapien
taatcttctccaaggtacttggatt

SEQ ID NO: 2110679 - DNA, 25 bp, Homo sapien
ccagtccacgcacctgaacacagcc

SEQ ID NO: 2110680 - DNA, 25 bp, Homo sapien
acgcacctgaacacagccagggaag

SEQ ID NO: 2110681 - DNA, 25 bp, Homo sapien
ccacgcacctgaacacagccaggga

SEQ ID NO: 2110682 - DNA, 25 bp, Homo sapien
agtccacgcacctgaacacagccag

SEQ ID NO: 2110683 - DNA, 25 bp, Homo sapien
tctgtgggtccaggcatgtttcccc

SEQ ID NO: 2110684 - DNA, 25 bp, Homo sapien
tgctttctctcacgcagtctgtggg

SEQ ID NO: 2110685 - DNA, 25 bp, Homo sapien
tcttcataaaccaccagctgctttc

SEQ ID NO: 2110686 - DNA, 25 bp, Homo sapien
cagggtcgctgatctcttcataaac

SEQ ID NO: 2110687 - DNA, 25 bp, Homo sapien
catgggcatgtgtcatatccccgag

SEQ ID NO: 2110688 - DNA, 25 bp, Homo sapien
tcatgggcatgtgtcatatccccga

SEQ ID NO: 2110689 - DNA, 25 bp, Homo sapien
atgggcatgtgtcatatccccgagg

SEQ ID NO: 2110690 - DNA, 25 bp, Homo sapien
gggtccgcagccatgcccatgttcg

SEQ ID NO: 2110691 - DNA, 25 bp, Homo sapien
ccgcagccatgcccatgttcgtgaa

SEQ ID NO: 2110692 - DNA, 25 bp, Homo sapien
gtccgcagccatgcccatgttcgtg

SEQ ID NO: 2110693 - DNA, 25 bp, Homo sapien
gcagccatgcccatgttcgtgaaag

SEQ ID NO: 2110694 - DNA, 25 bp, Homo sapien
acacttgctttcacttgctatgcac

SEQ ID NO: 2110695 - DNA, 25 bp, Homo sapien
gcggaaacgccaacatcgaactctt

SEQ ID NO: 2110696 - DNA, 25 bp, Homo sapien
tgtcttgctcatcaacgaaaacgct

SEQ ID NO: 2110697 - DNA, 25 bp, Homo sapien
gaccaggtcgcatggcaatggagaa

SEQ ID NO: 2110698 - DNA, 25 bp, Homo sapien
gtcagtgactgatacaacggaatcg

SEQ ID NO: 2110699 - DNA, 25 bp, Homo sapien
tcagcggtccaccagaaatattgag

SEQ ID NO: 2110700 - DNA, 25 bp, Homo sapien
gcggtccaccagaaatattgaggca

SEQ ID NO: 2110701 - DNA, 25 bp, Homo sapien
gtccaccagaaatattgaggcattc

SEQ ID NO: 2110702 - DNA, 25 bp, Homo sapien
cagcggtccaccagaaatattgagg

SEQ ID NO: 2110703 - DNA, 25 bp, Homo sapien
gcagcctagtggattgccaccgtat

SEQ ID NO: 2110704 - DNA, 25 bp, Homo sapien
cagcctagtggattgccaccgtatg

SEQ ID NO: 2110705 - DNA, 25 bp, Homo sapien
ggcagcctagtggattgccaccgta

SEQ ID NO: 2110706 - DNA, 25 bp, Homo sapien
agcctagtggattgccaccgtatgt

SEQ ID NO: 2110707 - DNA, 25 bp, Homo sapien
tacaacatcagaaggtagcttcatg

SEQ ID NO: 2110708 - DNA, 25 bp, Homo sapien
tctctgggggctcataggctaggga

SEQ ID NO: 2110709 - DNA, 25 bp, Homo sapien
gtaaggcagaaatcctgtaagggtc

SEQ ID NO: 2110710 - DNA, 25 bp, Homo sapien
agaccccctccacgctgtaaggcag

SEQ ID NO: 2110711 - DNA, 25 bp, Homo sapien
ggtctctgggggctcataggctagg

SEQ ID NO: 2110712 - DNA, 25 bp, Homo sapien
ctgggagaataaatgtaaaaacata

SEQ ID NO: 2110713 - DNA, 25 bp, Homo sapien
tgggagaataaatgtaaaaacatag

SEQ ID NO: 2110714 - DNA, 25 bp, Homo sapien
gagaataaatgtaaaaacataggga

SEQ ID NO: 2110715 - DNA, 25 bp, Homo sapien
agaataaatgtaaaaacatagggag

SEQ ID NO: 2110716 - DNA, 25 bp, Homo sapien
catcgttttgtgggatcccatataa

SEQ ID NO: 2110717 - DNA, 25 bp, Homo sapien
ccatcgttttgtgggatcccatata

SEQ ID NO: 2110718 - DNA, 25 bp, Homo sapien
ttgttcccaaactgtttgctcttac

SEQ ID NO: 2110719 - DNA, 25 bp, Homo sapien
gttgttcccaaactgtttgctctta

SEQ ID NO: 2110720 - DNA, 25 bp, Homo sapien
gtctgtgggtccagtcatgtttccg

SEQ ID NO: 2110721 - DNA, 25 bp, Homo sapien
tgggtccagtcatgtttccgccttt

SEQ ID NO: 2110722 - DNA, 25 bp, Homo sapien
tctgtgggtccagtcatgtttccgc

SEQ ID NO: 2110723 - DNA, 25 bp, Homo sapien
tgtgggtccagtcatgtttccgcct

SEQ ID NO: 2110724 - DNA, 25 bp, Homo sapien
taaacactcagacctgatctcagta

SEQ ID NO: 2110725 - DNA, 25 bp, Homo sapien
cagacctgatctcagtagtcacatc

SEQ ID NO: 2110726 - DNA, 25 bp, Homo sapien
tcctgcccaacatgtggaggtggct

SEQ ID NO: 2110727 - DNA, 25 bp, Homo sapien
cccagggatgccaagcttggatcat

SEQ ID NO: 2110728 - DNA, 25 bp, Homo sapien
agcttggatcatggccctaatccca

SEQ ID NO: 2110729 - DNA, 25 bp, Homo sapien
ggttcccatgaacgtggttgtcaga

SEQ ID NO: 2110730 - DNA, 25 bp, Homo sapien
tgtcatctgtgtgccaaccatccgg

SEQ ID NO: 2110731 - DNA, 25 bp, Homo sapien
agctggccacgacatgtggccatag

SEQ ID NO: 2110732 - DNA, 25 bp, Homo sapien
gctggccacgacatgtggccatagc

SEQ ID NO: 2110733 - DNA, 25 bp, Homo sapien
ttgtcatctgtgtgccaaccatccg

SEQ ID NO: 2110734 - DNA, 25 bp, Homo sapien
ctgctcgcggtgaccctcactgtgc

SEQ ID NO: 2110735 - DNA, 25 bp, Homo sapien
ctcgcggtgaccctcactgtgccag

SEQ ID NO: 2110736 - DNA, 25 bp, Homo sapien
ggtgaccctcactgtgccagtcgtg

SEQ ID NO: 2110737 - DNA, 25 bp, Homo sapien
gcggtgaccctcactgtgccagtcg

SEQ ID NO: 2110738 - DNA, 25 bp, Homo sapien
gggacattgggacatagcttcctcc

SEQ ID NO: 2110739 - DNA, 25 bp, Homo sapien
ccttgtttcggtgagtcacagagaa

SEQ ID NO: 2110740 - DNA, 25 bp, Homo sapien
tataggccacaatgaaacagcaatg

SEQ ID NO: 2110741 - DNA, 25 bp, Homo sapien
tctacaagaagttccaacttggctg

SEQ ID NO: 2110742 - DNA, 25 bp, Homo sapien
ttgcctccagggtcatctgaacctg

SEQ ID NO: 2110743 - DNA, 25 bp, Homo sapien
gggtcatctgaacctggattcaggt

SEQ ID NO: 2110744 - DNA, 25 bp, Homo sapien
aacctggattcaggttcagatccag

SEQ ID NO: 2110745 - DNA, 25 bp, Homo sapien
gattcaggttcagatccagggccat

SEQ ID NO: 2110746 - DNA, 25 bp, Homo sapien
tagcagagctgtcgggttctcagag

SEQ ID NO: 2110747 - DNA, 25 bp, Homo sapien
gaggttcatctctcccgtagaagag

SEQ ID NO: 2110748 - DNA, 25 bp, Homo sapien
taatacgacattagataagtggcct

SEQ ID NO: 2110749 - DNA, 25 bp, Homo sapien
tccatgttggaaggccagtagaggc

SEQ ID NO: 2110750 - DNA, 25 bp, Homo sapien
ggccgggacctgatgtgaacgtaca

SEQ ID NO: 2110751 - DNA, 25 bp, Homo sapien
cagtttgtgttcgtagtccacccga

SEQ ID NO: 2110752 - DNA, 25 bp, Homo sapien
tatgggctgtcgcagcgtggcaaac

SEQ ID NO: 2110753 - DNA, 25 bp, Homo sapien
tggcaaactcggcatcgtggatcgc

SEQ ID NO: 2110754 - DNA, 25 bp, Homo sapien
acctcgaatccaccccgtctactgg

SEQ ID NO: 2110755 - DNA, 25 bp, Homo sapien
ggctccgaccgctgcgtcccatgtc

SEQ ID NO: 2110756 - DNA, 25 bp, Homo sapien
ctccaggcggctccgaccgctgcgt

SEQ ID NO: 2110757 - DNA, 25 bp, Homo sapien
agatgatagctccatcgggaccacc

SEQ ID NO: 2110758 - DNA, 25 bp, Homo sapien
tctgtcccctaattcctcgacggtc

SEQ ID NO: 2110759 - DNA, 25 bp, Homo sapien
tgtcccctaattcctcgacggtcat

SEQ ID NO: 2110760 - DNA, 25 bp, Homo sapien
ctgtcccctaattcctcgacggtca

SEQ ID NO: 2110761 - DNA, 25 bp, Homo sapien
cagatgaatgggctaccacctacct

SEQ ID NO: 2110762 - DNA, 25 bp, Homo sapien
ctgatgccggccagtatcagtaacc

SEQ ID NO: 2110763 - DNA, 25 bp, Homo sapien
taaccagatgaatgggctaccacct

SEQ ID NO: 2110764 - DNA, 25 bp, Homo sapien
tgccggccagtatcagtaaccagat

SEQ ID NO: 2110765 - DNA, 25 bp, Homo sapien
tagcagtttgaaggcgctgcgagca

SEQ ID NO: 2110766 - DNA, 25 bp, Homo sapien
ttggaagagttggaattccttatcc

SEQ ID NO: 2110767 - DNA, 25 bp, Homo sapien
tggccaggcggtagtagacatcccg

SEQ ID NO: 2110768 - DNA, 25 bp, Homo sapien
gcttgtcctttgacgtccgtcccat

SEQ ID NO: 2110769 - DNA, 25 bp, Homo sapien
tggagacccttgcaaaattcacccc

SEQ ID NO: 2110770 - DNA, 25 bp, Homo sapien
tgcagacccagcctacttgtttacc

SEQ ID NO: 2110771 - DNA, 25 bp, Homo sapien
aactcctctccggtattctgcctat

SEQ ID NO: 2110772 - DNA, 25 bp, Homo sapien
ctgggcatacatagtgaaagcatcc

SEQ ID NO: 2110773 - DNA, 25 bp, Homo sapien
cacaggtcaactgcccgtgtcacgc

SEQ ID NO: 2110774 - DNA, 25 bp, Homo sapien
acacaggtcaactgcccgtgtcacg

SEQ ID NO: 2110775 - DNA, 25 bp, Homo sapien
cacacaggtcaactgcccgtgtcac

SEQ ID NO: 2110776 - DNA, 25 bp, Homo sapien
gcacacaggtcaactgcccgtgtca

SEQ ID NO: 2110777 - DNA, 25 bp, Homo sapien
tctggctcagcacctggctccagct

SEQ ID NO: 2110778 - DNA, 25 bp, Homo sapien
tggctcagcacctggctccagctgc

SEQ ID NO: 2110779 - DNA, 25 bp, Homo sapien
gatcttctggctcagcacctggctc

SEQ ID NO: 2110780 - DNA, 25 bp, Homo sapien
ccgatcttctggctcagcacctggc

SEQ ID NO: 2110781 - DNA, 25 bp, Homo sapien
tgcaggtccacagccaccacgtggc

SEQ ID NO: 2110782 - DNA, 25 bp, Homo sapien
agccaccacgtggccggacccttgg

SEQ ID NO: 2110783 - DNA, 25 bp, Homo sapien
tggagccatagcctgcaggtccaca

SEQ ID NO: 2110784 - DNA, 25 bp, Homo sapien
ctggtagtggagccatagcctgcag

SEQ ID NO: 2110785 - DNA, 25 bp, Homo sapien
gtgatgtccccctggatctgtacca

SEQ ID NO: 2110786 - DNA, 25 bp, Homo sapien
ctgggtgatgtccccctggatctgt

SEQ ID NO: 2110787 - DNA, 25 bp, Homo sapien
gggtgatgtccccctggatctgtac

SEQ ID NO: 2110788 - DNA, 25 bp, Homo sapien
gatgtccccctggatctgtaccaca

SEQ ID NO: 2110789 - DNA, 25 bp, Homo sapien
actaggtccgcagggcagcccttaa

SEQ ID NO: 2110790 - DNA, 25 bp, Homo sapien
ggcagcccttaaagtgctggatgat

SEQ ID NO: 2110791 - DNA, 25 bp, Homo sapien
gcagggcagcccttaaagtgctgga

SEQ ID NO: 2110792 - DNA, 25 bp, Homo sapien
cttaaagtgctggatgatctccttg

SEQ ID NO: 2110793 - DNA, 25 bp, Homo sapien
tcatcaacatcatggagaccggtta

SEQ ID NO: 2110794 - DNA, 25 bp, Homo sapien
gggcctgcatatactcatcaacatc

SEQ ID NO: 2110795 - DNA, 25 bp, Homo sapien
ggagctgggcctgcatatactcatc

SEQ ID NO: 2110796 - DNA, 25 bp, Homo sapien
gcatatactcatcaacatcatggag

SEQ ID NO: 2110797 - DNA, 25 bp, Homo sapien
ctgtgggcaggacagacggctgagg

SEQ ID NO: 2110798 - DNA, 25 bp, Homo sapien
cttcaggacatgtgtagcaatgttc

SEQ ID NO: 2110799 - DNA, 25 bp, Homo sapien
caggacatgtgtagcaatgttcaga

SEQ ID NO: 2110800 - DNA, 25 bp, Homo sapien
gccccctggcttcaggacatgtgta

SEQ ID NO: 2110801 - DNA, 25 bp, Homo sapien
cctggcttcaggacatgtgtagcaa

SEQ ID NO: 2110802 - DNA, 25 bp, Homo sapien
tggctgtagaggagcgtcacatccc

SEQ ID NO: 2110803 - DNA, 25 bp, Homo sapien
ctgtagaggagcgtcacatcccggc

SEQ ID NO: 2110804 - DNA, 25 bp, Homo sapien
ggcttggcacacagcacgctggaga

SEQ ID NO: 2110805 - DNA, 25 bp, Homo sapien
ggagcgtcacatcccggcctcggaa

SEQ ID NO: 2110806 - DNA, 25 bp, Homo sapien
tggagtgaggcatgactgccgcttc

SEQ ID NO: 2110807 - DNA, 25 bp, Homo sapien
ggagtgaggcatgactgccgcttcc

SEQ ID NO: 2110808 - DNA, 25 bp, Homo sapien
gtgcagtcggcgtcccagagatccc

SEQ ID NO: 2110809 - DNA, 25 bp, Homo sapien
tgccgcttcctcctcgtgcagtcgg

SEQ ID NO: 2110810 - DNA, 25 bp, Homo sapien
gaatggtccagcaggggtttgctca

SEQ ID NO: 2110811 - DNA, 25 bp, Homo sapien
cgtaagaatggtccagcaggggttt

SEQ ID NO: 2110812 - DNA, 25 bp, Homo sapien
cctcgggagggtcatagccctgaca

SEQ ID NO: 2110813 - DNA, 25 bp, Homo sapien
gccctcgggagggtcatagccctga

SEQ ID NO: 2110814 - DNA, 25 bp, Homo sapien
cataaggtgtggcagagtcccccag

SEQ ID NO: 2110815 - DNA, 25 bp, Homo sapien
cagggtggcccatgctccagctctc

SEQ ID NO: 2110816 - DNA, 25 bp, Homo sapien
gcataaggtgtggcagagtccccca

SEQ ID NO: 2110817 - DNA, 25 bp, Homo sapien
gggtggcccatgctccagctctcac

SEQ ID NO: 2110818 - DNA, 25 bp, Homo sapien
gtccagtgggtaactgcggtccgaa

SEQ ID NO: 2110819 - DNA, 25 bp, Homo sapien
taactgcggtccgaatcataggagc

SEQ ID NO: 2110820 - DNA, 25 bp, Homo sapien
tccgaatcataggagctcaggtccc

SEQ ID NO: 2110821 - DNA, 25 bp, Homo sapien
acaatgatgcgggtgggaccatcca

SEQ ID NO: 2110822 - DNA, 25 bp, Homo sapien
gtggagtgtacttgtactctgagcc

SEQ ID NO: 2110823 - DNA, 25 bp, Homo sapien
gggaaacgtgtccactctgctgatg

SEQ ID NO: 2110824 - DNA, 25 bp, Homo sapien
tcctggtatggtggcgagatggggg

SEQ ID NO: 2110825 - DNA, 25 bp, Homo sapien
cttcctcttcaacgtgcaggcctcc

SEQ ID NO: 2110826 - DNA, 25 bp, Homo sapien
cattcattatgcttggctttaccaa

SEQ ID NO: 2110827 - DNA, 25 bp, Homo sapien
atttgggtcagaaaaaggcacacgg

SEQ ID NO: 2110828 - DNA, 25 bp, Homo sapien
tttttatagctattgggaggcagga

SEQ ID NO: 2110829 - DNA, 25 bp, Homo sapien
tgagatttgggtcagaaaaaggcac

SEQ ID NO: 2110830 - DNA, 25 bp, Homo sapien
taaggtgaacaactcatttcattgt

SEQ ID NO: 2110831 - DNA, 25 bp, Homo sapien
ttaaggtgaacaactcatttcattg

SEQ ID NO: 2110832 - DNA, 25 bp, Homo sapien
aaggtgaacaactcatttcattgtc

SEQ ID NO: 2110833 - DNA, 25 bp, Homo sapien
agttcctggcatacaacaacagatg

SEQ ID NO: 2110834 - DNA, 25 bp, Homo sapien
ttcataaaggttgcccttactcaaa

SEQ ID NO: 2110835 - DNA, 25 bp, Homo sapien
gattaaaatcttatcagttgacata

SEQ ID NO: 2110836 - DNA, 25 bp, Homo sapien
ggcatacaacaacagatgtttagaa

SEQ ID NO: 2110837 - DNA, 25 bp, Homo sapien
attgttgcctcttttccaaactgga

SEQ ID NO: 2110838 - DNA, 25 bp, Homo sapien
tggaagtactgtgagagccaagata

SEQ ID NO: 2110839 - DNA, 25 bp, Homo sapien
agtactgtgagagccaagatatttc

SEQ ID NO: 2110840 - DNA, 25 bp, Homo sapien
tgtgagagccaagatatttctgttt

SEQ ID NO: 2110841 - DNA, 25 bp, Homo sapien
tagaattcctgattctcttcaccct

SEQ ID NO: 2110842 - DNA, 25 bp, Homo sapien
tattgcaagatatgtaaattgagaa

SEQ ID NO: 2110843 - DNA, 25 bp, Homo sapien
gagaaatgcaagctatatagtatat

SEQ ID NO: 2110844 - DNA, 25 bp, Homo sapien
gatgaaaactgccatgcctagaatt

SEQ ID NO: 2110845 - DNA, 25 bp, Homo sapien
tactatagatagtgctgctagcaac

SEQ ID NO: 2110846 - DNA, 25 bp, Homo sapien
tatttggtgtaattgcaggatgttc

SEQ ID NO: 2110847 - DNA, 25 bp, Homo sapien
tccacggtgaatgtaccacgattta

SEQ ID NO: 2110848 - DNA, 25 bp, Homo sapien
cctccttttatggtgaaccatgaca

SEQ ID NO: 2110849 - DNA, 25 bp, Homo sapien
tctggacataatcaggacactcctg

SEQ ID NO: 2110850 - DNA, 25 bp, Homo sapien
tgtcttcagggttgttgcagatccc

SEQ ID NO: 2110851 - DNA, 25 bp, Homo sapien
gcttgtttgtccaggcctcgttgat

SEQ ID NO: 2110852 - DNA, 25 bp, Homo sapien
gatctgctatcattccaagaggtga

SEQ ID NO: 2110853 - DNA, 25 bp, Homo sapien
acaatggaagccaattacattgaat

SEQ ID NO: 2110854 - DNA, 25 bp, Homo sapien
gaagccaattacattgaattacaat

SEQ ID NO: 2110855 - DNA, 25 bp, Homo sapien
gccaattacattgaattacaattat

SEQ ID NO: 2110856 - DNA, 25 bp, Homo sapien
tggaagccaattacattgaattaca

SEQ ID NO: 2110857 - DNA, 25 bp, Homo sapien
ggaccactctacatctgggccagct

SEQ ID NO: 2110858 - DNA, 25 bp, Homo sapien
cagctgtgccaatgggcttggatct

SEQ ID NO: 2110859 - DNA, 25 bp, Homo sapien
gtgtctgtgcaagtatacccttggg

SEQ ID NO: 2110860 - DNA, 25 bp, Homo sapien
gggcccatgcatgggaatgctcatg

SEQ ID NO: 2110861 - DNA, 25 bp, Homo sapien
caagaacaaacttccgaatctccaa

SEQ ID NO: 2110862 - DNA, 25 bp, Homo sapien
cagaccgtctgcctccggaggattt

SEQ ID NO: 2110863 - DNA, 25 bp, Homo sapien
ctccggaggatttctggccatccaa

SEQ ID NO: 2110864 - DNA, 25 bp, Homo sapien
ggcctgtggcggtttcagccccaga

SEQ ID NO: 2110865 - DNA, 25 bp, Homo sapien
tcccccgcaggccgcaaggccggga

SEQ ID NO: 2110866 - DNA, 25 bp, Homo sapien
caggccgcaaggccgggaccagcag

SEQ ID NO: 2110867 - DNA, 25 bp, Homo sapien
cgcaaggccgggaccagcagcggct

SEQ ID NO: 2110868 - DNA, 25 bp, Homo sapien
cccgcaggccgcaaggccgggacca

SEQ ID NO: 2110869 - DNA, 25 bp, Homo sapien
gcgagaggccgccaacaaagtcctg

SEQ ID NO: 2110870 - DNA, 25 bp, Homo sapien
gagaggccgccaacaaagtcctgcc

SEQ ID NO: 2110871 - DNA, 25 bp, Homo sapien
ccggcgagaggccgccaacaaagtc

SEQ ID NO: 2110872 - DNA, 25 bp, Homo sapien
ggcgagaggccgccaacaaagtcct

SEQ ID NO: 2110873 - DNA, 25 bp, Homo sapien
ccctggtttccaaggtagagtcgct

SEQ ID NO: 2110874 - DNA, 25 bp, Homo sapien
tgggtgttcggcatgcacacgcaca

SEQ ID NO: 2110875 - DNA, 25 bp, Homo sapien
gctgtgaacagtccagtccgatggt

SEQ ID NO: 2110876 - DNA, 25 bp, Homo sapien
aaggcgtgagaagtcaggtacatca

SEQ ID NO: 2110877 - DNA, 25 bp, Homo sapien
gcccagcccatgtagaggcacggta

SEQ ID NO: 2110878 - DNA, 25 bp, Homo sapien
cacatttcagtttggggctgcccag

SEQ ID NO: 2110879 - DNA, 25 bp, Homo sapien
tccgtggggcagacctcgcttaaag

SEQ ID NO: 2110880 - DNA, 25 bp, Homo sapien
cccatgtagaggcacggtactggag

SEQ ID NO: 2110881 - DNA, 25 bp, Homo sapien
cccccacggatggatggccagatgg

SEQ ID NO: 2110882 - DNA, 25 bp, Homo sapien
ccccacggatggatggccagatgga

SEQ ID NO: 2110883 - DNA, 25 bp, Homo sapien
tgcagacccccacggatggatggcc

SEQ ID NO: 2110884 - DNA, 25 bp, Homo sapien
agacccccacggatggatggccaga

SEQ ID NO: 2110885 - DNA, 25 bp, Homo sapien
caaggagcagccagatctggtcaag

SEQ ID NO: 2110886 - DNA, 25 bp, Homo sapien
attcctggcggctaaaggtggccat

SEQ ID NO: 2110887 - DNA, 25 bp, Homo sapien
ccttgcagtagctgctggaaaaatt

SEQ ID NO: 2110888 - DNA, 25 bp, Homo sapien
cggcaggcgaggcagatggcaagga

SEQ ID NO: 2110889 - DNA, 25 bp, Homo sapien
gtagaggctgaagaacccgcctgcc

SEQ ID NO: 2110890 - DNA, 25 bp, Homo sapien
aagaacccgcctgccacggtgcttg

SEQ ID NO: 2110891 - DNA, 25 bp, Homo sapien
gcatgcttcaggtaggatggcaacc

SEQ ID NO: 2110892 - DNA, 25 bp, Homo sapien
cggtgcttgcatgcttcaggtagga

SEQ ID NO: 2110893 - DNA, 25 bp, Homo sapien
aggaacagcacgaggtagcacagga

SEQ ID NO: 2110894 - DNA, 25 bp, Homo sapien
atggtgacggataggaagacgcctc

SEQ ID NO: 2110895 - DNA, 25 bp, Homo sapien
taggtagatgaggatggtgacggat

SEQ ID NO: 2110896 - DNA, 25 bp, Homo sapien
aagacgcctcgatgggaggaatgtc

SEQ ID NO: 2110897 - DNA, 25 bp, Homo sapien
gccaacagtgtgaggataaggatgc

SEQ ID NO: 2110898 - DNA, 25 bp, Homo sapien
gtgtgaggataaggatgcatactca

SEQ ID NO: 2110899 - DNA, 25 bp, Homo sapien
ttcagccaacagtgtgaggataagg

SEQ ID NO: 2110900 - DNA, 25 bp, Homo sapien
agtgtgaggataaggatgcatactc

SEQ ID NO: 2110901 - DNA, 25 bp, Homo sapien
aggtgctggtcttggtcccatgaca

SEQ ID NO: 2110902 - DNA, 25 bp, Homo sapien
gaggaaaaaggtgctggtcttggtc

SEQ ID NO: 2110903 - DNA, 25 bp, Homo sapien
gaaaaaggtgctggtcttggtccca

SEQ ID NO: 2110904 - DNA, 25 bp, Homo sapien
gtcttggtcccatgacactcatggc

SEQ ID NO: 2110905 - DNA, 25 bp, Homo sapien
gccatgtcacggtgtctaccatgtg

SEQ ID NO: 2110906 - DNA, 25 bp, Homo sapien
atcttgtgccatgtcacggtgtcta

SEQ ID NO: 2110907 - DNA, 25 bp, Homo sapien
tgtgccatgtcacggtgtctaccat

SEQ ID NO: 2110908 - DNA, 25 bp, Homo sapien
tcttgtgccatgtcacggtgtctac

SEQ ID NO: 2110909 - DNA, 25 bp, Homo sapien
gacagacttcgggaaaatgcacggt

SEQ ID NO: 2110910 - DNA, 25 bp, Homo sapien
tgcacggtggaaagagacacggacc

SEQ ID NO: 2110911 - DNA, 25 bp, Homo sapien
gacacggacccaagagtaatgtgag

SEQ ID NO: 2110912 - DNA, 25 bp, Homo sapien
taatgtgaggtctgcacgtccagtg

SEQ ID NO: 2110913 - DNA, 25 bp, Homo sapien
atgaactccactggcgagggcaccg

SEQ ID NO: 2110914 - DNA, 25 bp, Homo sapien
tgtaggtagctgtggaaggatatcc

SEQ ID NO: 2110915 - DNA, 25 bp, Homo sapien
cacgaagtagaggtagcccatgaac

SEQ ID NO: 2110916 - DNA, 25 bp, Homo sapien
cagggcccgaagacgatggtgccca

SEQ ID NO: 2110917 - DNA, 25 bp, Homo sapien
gggcccacgcaagtggacagcacaa

SEQ ID NO: 2110918 - DNA, 25 bp, Homo sapien
taggggcccacgcaagtggacagca

SEQ ID NO: 2110919 - DNA, 25 bp, Homo sapien
aggcggtcaccgttgagggggatga

SEQ ID NO: 2110920 - DNA, 25 bp, Homo sapien
ccacgcaagtggacagcacaaggca

SEQ ID NO: 2110921 - DNA, 25 bp, Homo sapien
agaaagaaaagagagtcagagaggc

SEQ ID NO: 2110922 - DNA, 25 bp, Homo sapien
ggcccccaggggtcaggaaggcagc

SEQ ID NO: 2110923 - DNA, 25 bp, Homo sapien
ccccaggggtcaggaaggcagcaga

SEQ ID NO: 2110924 - DNA, 25 bp, Homo sapien
gaaagaaaagagagtcagagaggcc

SEQ ID NO: 2110925 - DNA, 25 bp, Homo sapien
aaagcccacaaaatagttgctgaag

SEQ ID NO: 2110926 - DNA, 25 bp, Homo sapien
gaaggagacagcactctcgtaggct

SEQ ID NO: 2110927 - DNA, 25 bp, Homo sapien
caaaatagttgctgaagtggaagga

SEQ ID NO: 2110928 - DNA, 25 bp, Homo sapien
tgatccttctcctcggtaaagccag

SEQ ID NO: 2110929 - DNA, 25 bp, Homo sapien
ggggcagaagagatatgcaaatcca

SEQ ID NO: 2110930 - DNA, 25 bp, Homo sapien
gggggcagaagagatatgcaaatcc

SEQ ID NO: 2110931 - DNA, 25 bp, Homo sapien
tgggggcagaagagatatgcaaatc

SEQ ID NO: 2110932 - DNA, 25 bp, Homo sapien
ccatttgggatctcaactcatctga

SEQ ID NO: 2110933 - DNA, 25 bp, Homo sapien
ccaataagacatgggcaggttccag

SEQ ID NO: 2110934 - DNA, 25 bp, Homo sapien
tagccaataagacatgggcaggttc

SEQ ID NO: 2110935 - DNA, 25 bp, Homo sapien
taagacatgggcaggttccagcttg

SEQ ID NO: 2110936 - DNA, 25 bp, Homo sapien
gttatttagccaataagacatgggc

SEQ ID NO: 2110937 - DNA, 25 bp, Homo sapien
gcagctcgacaagggtagggatttt

SEQ ID NO: 2110938 - DNA, 25 bp, Homo sapien
tttctcgtatttatcatctgccccc

SEQ ID NO: 2110939 - DNA, 25 bp, Homo sapien
gattaccaacacagctggagtggtg

SEQ ID NO: 2110940 - DNA, 25 bp, Homo sapien
atgaaagggcctggattaccaacac

SEQ ID NO: 2110941 - DNA, 25 bp, Homo sapien
gcgctggctgcataggtgaccagca

SEQ ID NO: 2110942 - DNA, 25 bp, Homo sapien
aggtgaccagcacagccgagaaggt

SEQ ID NO: 2110943 - DNA, 25 bp, Homo sapien
gtccccaggcggagagcattcttga

SEQ ID NO: 2110944 - DNA, 25 bp, Homo sapien
acagccgagaaggtccccaggcgga

SEQ ID NO: 2110945 - DNA, 25 bp, Homo sapien
tccaccctgatcctgctccaccctg

SEQ ID NO: 2110946 - DNA, 25 bp, Homo sapien
gcttccaccctgatcctgctccacc

SEQ ID NO: 2110947 - DNA, 25 bp, Homo sapien
cagcttccaccctgatcctgctcca

SEQ ID NO: 2110948 - DNA, 25 bp, Homo sapien
ccctgatcctgctccaccctgctca

SEQ ID NO: 2110949 - DNA, 25 bp, Homo sapien
catgctccacgtaagtgataaaagc

SEQ ID NO: 2110950 - DNA, 25 bp, Homo sapien
tccacgtaagtgataaaagccaggg

SEQ ID NO: 2110951 - DNA, 25 bp, Homo sapien
gctccacgtaagtgataaaagccag

SEQ ID NO: 2110952 - DNA, 25 bp, Homo sapien
cgtaagtgataaaagccagggacag

SEQ ID NO: 2110953 - DNA, 25 bp, Homo sapien
acaggcactgaggatccgagccagg

SEQ ID NO: 2110954 - DNA, 25 bp, Homo sapien
acacaggcactgaggatccgagcca

SEQ ID NO: 2110955 - DNA, 25 bp, Homo sapien
caagcgatgctggtgcgaacagtct

SEQ ID NO: 2110956 - DNA, 25 bp, Homo sapien
gtctggcgggcaccgctttgacaag

SEQ ID NO: 2110957 - DNA, 25 bp, Homo sapien
tccaagatgagggtactgttcacag

SEQ ID NO: 2110958 - DNA, 25 bp, Homo sapien
ccaaaagaagaaggtgggcaccctg

SEQ ID NO: 2110959 - DNA, 25 bp, Homo sapien
tgttcacagtgagggcatcctgggt

SEQ ID NO: 2110960 - DNA, 25 bp, Homo sapien
gaaacggatgccagcgaatagagga

SEQ ID NO: 2110961 - DNA, 25 bp, Homo sapien
acacacagggcacagtgggttccag

SEQ ID NO: 2110962 - DNA, 25 bp, Homo sapien
aggactgaggatgcccagggtaccc

SEQ ID NO: 2110963 - DNA, 25 bp, Homo sapien
ggacacacagggcacagtgggttcc

SEQ ID NO: 2110964 - DNA, 25 bp, Homo sapien
ggttccaggactgaggatgcccagg

SEQ ID NO: 2110965 - DNA, 25 bp, Homo sapien
gggggacagatggatatacttggca

SEQ ID NO: 2110966 - DNA, 25 bp, Homo sapien
tgggggacagatggatatacttggc

SEQ ID NO: 2110967 - DNA, 25 bp, Homo sapien
tgtgggggacagatggatatacttg

SEQ ID NO: 2110968 - DNA, 25 bp, Homo sapien
ggggacagatggatatacttggcaa

SEQ ID NO: 2110969 - DNA, 25 bp, Homo sapien
tgctcctctgtggtgtcatccacat

SEQ ID NO: 2110970 - DNA, 25 bp, Homo sapien
atcaaacagggagcccaggtaggcc

SEQ ID NO: 2110971 - DNA, 25 bp, Homo sapien
gatggccagagctccaaagagcaag

SEQ ID NO: 2110972 - DNA, 25 bp, Homo sapien
tcatccacatcgacatcaaacaggg

SEQ ID NO: 2110973 - DNA, 25 bp, Homo sapien
gctgagctctgaccacttgtggaca

SEQ ID NO: 2110974 - DNA, 25 bp, Homo sapien
catccaaaagtgacccagtgactgg

SEQ ID NO: 2110975 - DNA, 25 bp, Homo sapien
tggacagtgtatgccatgccgtagc

SEQ ID NO: 2110976 - DNA, 25 bp, Homo sapien
tgagacggtagaagatccagcatcc

SEQ ID NO: 2110977 - DNA, 25 bp, Homo sapien
ggttatgagggtccacagatgtgcc

SEQ ID NO: 2110978 - DNA, 25 bp, Homo sapien
agtggcaccctgagaggggtcttaa

SEQ ID NO: 2110979 - DNA, 25 bp, Homo sapien
tcaaggagtagagagagggccttcc

SEQ ID NO: 2110980 - DNA, 25 bp, Homo sapien
ttaagagggttatgagggtccacag

SEQ ID NO: 2110981 - DNA, 25 bp, Homo sapien
gcgcgtggcgccattttcacctgag

SEQ ID NO: 2110982 - DNA, 25 bp, Homo sapien
gaactcctcagtcctaatagcagcg

SEQ ID NO: 2110983 - DNA, 25 bp, Homo sapien
gaccaattggcatgaagaccctcaa

SEQ ID NO: 2110984 - DNA, 25 bp, Homo sapien
ggatccgtagccaatctgcatcgag

SEQ ID NO: 2110985 - DNA, 25 bp, Homo sapien
tagttcgggctcatcccctagtggg

SEQ ID NO: 2110986 - DNA, 25 bp, Homo sapien
gcgctctgtcacatccctagttcgg

SEQ ID NO: 2110987 - DNA, 25 bp, Homo sapien
tctttaggctgggtctcgcgctctg

SEQ ID NO: 2110988 - DNA, 25 bp, Homo sapien
gctggctccgggctctctttaggct

SEQ ID NO: 2110989 - DNA, 25 bp, Homo sapien
cgctagaacggaacacaaagccggt

SEQ ID NO: 2110990 - DNA, 25 bp, Homo sapien
ctcggtgccagcgtttggaaagcca

SEQ ID NO: 2110991 - DNA, 25 bp, Homo sapien
tgtcctctggacaaccgtgcggtag

SEQ ID NO: 2110992 - DNA, 25 bp, Homo sapien
gctgcccaatgagaagacggatctt

SEQ ID NO: 2110993 - DNA, 25 bp, Homo sapien
gaaccaggcgtggtccagttgcaca

SEQ ID NO: 2110994 - DNA, 25 bp, Homo sapien
tgtggtagaaacagtcccggtctca

SEQ ID NO: 2110995 - DNA, 25 bp, Homo sapien
gaggcacatgggaacaacacctgat

SEQ ID NO: 2110996 - DNA, 25 bp, Homo sapien
ttcaagggtcacaaactgctcacga

SEQ ID NO: 2110997 - DNA, 25 bp, Homo sapien
gacaggattgtaacacttctaatta

SEQ ID NO: 2110998 - DNA, 25 bp, Homo sapien
tttaccagttaacagacaggattgt

SEQ ID NO: 2110999 - DNA, 25 bp, Homo sapien
ccgaatttaccagttaacagacagg

SEQ ID NO: 2111000 - DNA, 25 bp, Homo sapien
ttaacagacaggattgtaacacttc

SEQ ID NO: 2111001 - DNA, 25 bp, Homo sapien
ctgcgtgtgtataggcaggaagtta

SEQ ID NO: 2111002 - DNA, 25 bp, Homo sapien
gcgtgtgtataggcaggaagttaaa

SEQ ID NO: 2111003 - DNA, 25 bp, Homo sapien
tgcgtgtgtataggcaggaagttaa

SEQ ID NO: 2111004 - DNA, 25 bp, Homo sapien
tgtccagtcttaggtgctgaggcca

SEQ ID NO: 2111005 - DNA, 25 bp, Homo sapien
tatatgccaggtggggcggtcatta

SEQ ID NO: 2111006 - DNA, 25 bp, Homo sapien
tgctgaggccagtatgggtgcaagg

SEQ ID NO: 2111007 - DNA, 25 bp, Homo sapien
ggcggtcattaggtacaaagttgtc

SEQ ID NO: 2111008 - DNA, 25 bp, Homo sapien
acagccatgtggtcacgactaagac

SEQ ID NO: 2111009 - DNA, 25 bp, Homo sapien
acaacagccatgtggtcacgactaa

SEQ ID NO: 2111010 - DNA, 25 bp, Homo sapien
caacagccatgtggtcacgactaag

SEQ ID NO: 2111011 - DNA, 25 bp, Homo sapien
agccatgtggtcacgactaagaccc

SEQ ID NO: 2111012 - DNA, 25 bp, Homo sapien
caagtccccaatgggacaaccgcag

SEQ ID NO: 2111013 - DNA, 25 bp, Homo sapien
aaaccagcacagggacagtcgccgc

SEQ ID NO: 2111014 - DNA, 25 bp, Homo sapien
agtccccaatgggacaaccgcagca

SEQ ID NO: 2111015 - DNA, 25 bp, Homo sapien
gcacagggacagtcgccgccaagtc

SEQ ID NO: 2111016 - DNA, 25 bp, Homo sapien
cctcgatcaccaggtgaatgaaccc

SEQ ID NO: 2111017 - DNA, 25 bp, Homo sapien
tcgatcaccaggtgaatgaacccac

SEQ ID NO: 2111018 - DNA, 25 bp, Homo sapien
cagccctcgatcaccaggtgaatga

SEQ ID NO: 2111019 - DNA, 25 bp, Homo sapien
gatcaccaggtgaatgaacccacac

SEQ ID NO: 2111020 - DNA, 25 bp, Homo sapien
ccaagcaggtcttcgtagtagagaa

SEQ ID NO: 2111021 - DNA, 25 bp, Homo sapien
tccaagcaggtcttcgtagtagaga

SEQ ID NO: 2111022 - DNA, 25 bp, Homo sapien
tctccaagcaggtcttcgtagtaga

SEQ ID NO: 2111023 - DNA, 25 bp, Homo sapien
ggtctccaagcaggtcttcgtagta

SEQ ID NO: 2111024 - DNA, 25 bp, Homo sapien
gaaaggaacacacacttgtgagagc

SEQ ID NO: 2111025 - DNA, 25 bp, Homo sapien
taaccttcccatgcgtctgcttcct

SEQ ID NO: 2111026 - DNA, 25 bp, Homo sapien
cagtgaaaggaacacacacttgtga

SEQ ID NO: 2111027 - DNA, 25 bp, Homo sapien
tgcaagaagacagacttcataacct

SEQ ID NO: 2111028 - DNA, 25 bp, Homo sapien
aggatgtatcggctgtctcccttgg

SEQ ID NO: 2111029 - DNA, 25 bp, Homo sapien
tttccatgcacactgtgaagttgtc

SEQ ID NO: 2111030 - DNA, 25 bp, Homo sapien
ctgtgatggtttccatgcacactgt

SEQ ID NO: 2111031 - DNA, 25 bp, Homo sapien
cacagagaccacaagctgtagaatg

SEQ ID NO: 2111032 - DNA, 25 bp, Homo sapien
ctggcggagaaaggcgatcaccacc

SEQ ID NO: 2111033 - DNA, 25 bp, Homo sapien
tcagtctgacttacccctggaaggg

SEQ ID NO: 2111034 - DNA, 25 bp, Homo sapien
gatcccacccacagggatacatctg

SEQ ID NO: 2111035 - DNA, 25 bp, Homo sapien
cctggaagggcaccgttgagagatc

SEQ ID NO: 2111036 - DNA, 25 bp, Homo sapien
gaatcttacatgaagggatctcaga

SEQ ID NO: 2111037 - DNA, 25 bp, Homo sapien
ggaagtagagcacatccccatagat

SEQ ID NO: 2111038 - DNA, 25 bp, Homo sapien
gaagtagagcacatccccatagatc

SEQ ID NO: 2111039 - DNA, 25 bp, Homo sapien
aggaagtagagcacatccccataga

SEQ ID NO: 2111040 - DNA, 25 bp, Homo sapien
cagggcattcatgaagacaaagtaa

SEQ ID NO: 2111041 - DNA, 25 bp, Homo sapien
gcaccagccacagggcattcatgaa

SEQ ID NO: 2111042 - DNA, 25 bp, Homo sapien
ccgtgctggaatccgtcgcggtgct

SEQ ID NO: 2111043 - DNA, 25 bp, Homo sapien
cagctctccgtgctggaatccgtcg

SEQ ID NO: 2111044 - DNA, 25 bp, Homo sapien
taaaaatcgtcaccatcatagacct

SEQ ID NO: 2111045 - DNA, 25 bp, Homo sapien
agatcaattagctttgtccctccaa

SEQ ID NO: 2111046 - DNA, 25 bp, Homo sapien
tctgtgttctaatggctcccagcag

SEQ ID NO: 2111047 - DNA, 25 bp, Homo sapien
tcctcggccagtgttcgagcctggt

SEQ ID NO: 2111048 - DNA, 25 bp, Homo sapien
tctatttcagctagcgtgcagacgc

SEQ ID NO: 2111049 - DNA, 25 bp, Homo sapien
tgacagcatacttccggattcacgg

SEQ ID NO: 2111050 - DNA, 25 bp, Homo sapien
ttcacggaggtgttaaactgacgcc

SEQ ID NO: 2111051 - DNA, 25 bp, Homo sapien
tgcgcctgcgcctagagtgctgttg

SEQ ID NO: 2111052 - DNA, 25 bp, Homo sapien
ctccggagccagacaagtccgaggc

SEQ ID NO: 2111053 - DNA, 25 bp, Homo sapien
actcggacccgcaccacctctcgct

SEQ ID NO: 2111054 - DNA, 25 bp, Homo sapien
tgagctcccacaccgggcgggggcg

SEQ ID NO: 2111055 - DNA, 25 bp, Homo sapien
gggcgctccggagccagacaagtcc

SEQ ID NO: 2111056 - DNA, 25 bp, Homo sapien
gggagagaagacatggggtaggcca

SEQ ID NO: 2111057 - DNA, 25 bp, Homo sapien
ggagagaagacatggggtaggccac

SEQ ID NO: 2111058 - DNA, 25 bp, Homo sapien
gagagaagacatggggtaggccacc

SEQ ID NO: 2111059 - DNA, 25 bp, Homo sapien
agagaagacatggggtaggccacca

SEQ ID NO: 2111060 - DNA, 25 bp, Homo sapien
gctcggatgaggatgtgctgcaaca

SEQ ID NO: 2111061 - DNA, 25 bp, Homo sapien
ccactcaaatcaaaggctcggatga

SEQ ID NO: 2111062 - DNA, 25 bp, Homo sapien
tctacagcaaaagagcggaactctg

SEQ ID NO: 2111063 - DNA, 25 bp, Homo sapien
tgctgcaacacgtcgagcgaggtga

SEQ ID NO: 2111064 - DNA, 25 bp, Homo sapien
gggttatgtaccaataaactcatcg

SEQ ID NO: 2111065 - DNA, 25 bp, Homo sapien
tcttgacttatgacagggttatgta

SEQ ID NO: 2111066 - DNA, 25 bp, Homo sapien
tgtaagttgacaatgcatttggctg

SEQ ID NO: 2111067 - DNA, 25 bp, Homo sapien
gcctgaccaacctcatgaaaattag

SEQ ID NO: 2111068 - DNA, 25 bp, Homo sapien
agaggtaaacttcctgtcctagccg

SEQ ID NO: 2111069 - DNA, 25 bp, Homo sapien
ctccgagggccgaatatctacacgc

SEQ ID NO: 2111070 - DNA, 25 bp, Homo sapien
caattgcaggtaaggtttggaggca

SEQ ID NO: 2111071 - DNA, 25 bp, Homo sapien
tgaggtcccagtcagatagaagtga

SEQ ID NO: 2111072 - DNA, 25 bp, Homo sapien
tcctgaaatagtgctactgtgtctc

SEQ ID NO: 2111073 - DNA, 25 bp, Homo sapien
gacataagcacatatggctactcag

SEQ ID NO: 2111074 - DNA, 25 bp, Homo sapien
tccacatgtttcgtagccatgcaga

SEQ ID NO: 2111075 - DNA, 25 bp, Homo sapien
ggcccagggaattaagtgactgaca

SEQ ID NO: 2111076 - DNA, 25 bp, Homo sapien
gagattaggcatagcgttcccagga

SEQ ID NO: 2111077 - DNA, 25 bp, Homo sapien
gactccaatcaaattcccgtcagga

SEQ ID NO: 2111078 - DNA, 25 bp, Homo sapien
caggagacttcagcattatttaaaa

SEQ ID NO: 2111079 - DNA, 25 bp, Homo sapien
aactataatgattaaggctgggtgc

SEQ ID NO: 2111080 - DNA, 25 bp, Homo sapien
ccagactggagcacaatggtatgat

SEQ ID NO: 2111081 - DNA, 25 bp, Homo sapien
cacccagactggagcacaatggtat

SEQ ID NO: 2111082 - DNA, 25 bp, Homo sapien
gactggagcacaatggtatgatctc

SEQ ID NO: 2111083 - DNA, 25 bp, Homo sapien
gggattccaggggcataccaccacg

SEQ ID NO: 2111084 - DNA, 25 bp, Homo sapien
tagtcacttcagtcctatcggttga

SEQ ID NO: 2111085 - DNA, 25 bp, Homo sapien
taagtgaccaagattctacagccag

SEQ ID NO: 2111086 - DNA, 25 bp, Homo sapien
agggctgggatctgaacttcattca

SEQ ID NO: 2111087 - DNA, 25 bp, Homo sapien
cagtcatgataaggtacttgcccaa

SEQ ID NO: 2111088 - DNA, 25 bp, Homo sapien
taagaatggggatgataacccagac

SEQ ID NO: 2111089 - DNA, 25 bp, Homo sapien
aacagaacaaagtgctataagaatg

SEQ ID NO: 2111090 - DNA, 25 bp, Homo sapien
gggatgataacccagacctcagggc

SEQ ID NO: 2111091 - DNA, 25 bp, Homo sapien
cagaacaaagtgctataagaatggg

SEQ ID NO: 2111092 - DNA, 25 bp, Homo sapien
gaggatggactgtgtaaagggcagg

SEQ ID NO: 2111093 - DNA, 25 bp, Homo sapien
acacgtcggagccaatgacatcttt

SEQ ID NO: 2111094 - DNA, 25 bp, Homo sapien
agtgatgaccgtttctcagccagca

SEQ ID NO: 2111095 - DNA, 25 bp, Homo sapien
gcggcagtcgtcagtgatgaccgtt

SEQ ID NO: 2111096 - DNA, 25 bp, Homo sapien
ccaccatcagctgtgtggactaggg

SEQ ID NO: 2111097 - DNA, 25 bp, Homo sapien
gggcagatgccaaccagcatgctca

SEQ ID NO: 2111098 - DNA, 25 bp, Homo sapien
aaggctctgccctccaaccacagct

SEQ ID NO: 2111099 - DNA, 25 bp, Homo sapien
acagctgggtccctagggtccctga

SEQ ID NO: 2111100 - DNA, 25 bp, Homo sapien
agctcagcacttgttggaccttaga

SEQ ID NO: 2111101 - DNA, 25 bp, Homo sapien
atgatagatccgcaggcgcaactcc

SEQ ID NO: 2111102 - DNA, 25 bp, Homo sapien
gtgtgaaactcagcatcgctcaggg

SEQ ID NO: 2111103 - DNA, 25 bp, Homo sapien
cctcgtggttcaggtacgtgtgaaa

SEQ ID NO: 2111104 - DNA, 25 bp, Homo sapien
ggccaggcgtttcatgatgccacaa

SEQ ID NO: 2111105 - DNA, 25 bp, Homo sapien
cagtgcgcagtacatccttgaggac

SEQ ID NO: 2111106 - DNA, 25 bp, Homo sapien
tgccctggcagtaggacacctgtgg

SEQ ID NO: 2111107 - DNA, 25 bp, Homo sapien
cagcagccagcggtaacagaagaag

SEQ ID NO: 2111108 - DNA, 25 bp, Homo sapien
tctggggagttcaataaaggctcag

SEQ ID NO: 2111109 - DNA, 25 bp, Homo sapien
caagctggcctgtctcaggagacgc

SEQ ID NO: 2111110 - DNA, 25 bp, Homo sapien
tcagcatgtgcctctgtcgcacggg

SEQ ID NO: 2111111 - DNA, 25 bp, Homo sapien
gctggaggccatccaagctggcctg

SEQ ID NO: 2111112 - DNA, 25 bp, Homo sapien
cgcatgatgtggtcgcggtgctcca

SEQ ID NO: 2111113 - DNA, 25 bp, Homo sapien
ggtaatcagcaaagagagccctagc

SEQ ID NO: 2111114 - DNA, 25 bp, Homo sapien
taatccagcccattgcgcatgatgt

SEQ ID NO: 2111115 - DNA, 25 bp, Homo sapien
ccaggtggtgttttcgcacaaggcg

SEQ ID NO: 2111116 - DNA, 25 bp, Homo sapien
gaatcccagtttagggccgctaggc

SEQ ID NO: 2111117 - DNA, 25 bp, Homo sapien
tcctttgtggatgacagcacctggc

SEQ ID NO: 2111118 - DNA, 25 bp, Homo sapien
tatgctccaacaagtctagggctgg

SEQ ID NO: 2111119 - DNA, 25 bp, Homo sapien
tacagacccttacaggccgatggat

SEQ ID NO: 2111120 - DNA, 25 bp, Homo sapien
ccggaagacgattgataaagagtac

SEQ ID NO: 2111121 - DNA, 25 bp, Homo sapien
gagtacgtagcgagaacgtcccgga

SEQ ID NO: 2111122 - DNA, 25 bp, Homo sapien
ggctgcgccggaagacgattgataa

SEQ ID NO: 2111123 - DNA, 25 bp, Homo sapien
tgataaagagtacgtagcgagaacg

SEQ ID NO: 2111124 - DNA, 25 bp, Homo sapien
aaaacccggacgaacagcgagctcg

SEQ ID NO: 2111125 - DNA, 25 bp, Homo sapien
gagctcggaggagcacaaaaaacag

SEQ ID NO: 2111126 - DNA, 25 bp, Homo sapien
acccggacgaacagcgagctcggag

SEQ ID NO: 2111127 - DNA, 25 bp, Homo sapien
cgagctcggaggagcacaaaaaaca

SEQ ID NO: 2111128 - DNA, 25 bp, Homo sapien
caataaggtggtaatctgaggagct

SEQ ID NO: 2111129 - DNA, 25 bp, Homo sapien
taagtgtcggctgtcgcgtggtcac

SEQ ID NO: 2111130 - DNA, 25 bp, Homo sapien
gaaagccaagcctacgtgtcagtgg

SEQ ID NO: 2111131 - DNA, 25 bp, Homo sapien
gagccgccgtttcgcaggacatatg

SEQ ID NO: 2111132 - DNA, 25 bp, Homo sapien
agagctttccttcttcagaggacat

SEQ ID NO: 2111133 - DNA, 25 bp, Homo sapien
taggtccgaaactgctgaagtggtc

SEQ ID NO: 2111134 - DNA, 25 bp, Homo sapien
ctcagagataggtccgaaactgctg

SEQ ID NO: 2111135 - DNA, 25 bp, Homo sapien
aactgctgaagtggtcttccagtgc

SEQ ID NO: 2111136 - DNA, 25 bp, Homo sapien
cataggtagggaaaacggagcgctc

SEQ ID NO: 2111137 - DNA, 25 bp, Homo sapien
tgtggaccagtcagtaccccaaagg

SEQ ID NO: 2111138 - DNA, 25 bp, Homo sapien
tagtctacaccataggcttaggaag

SEQ ID NO: 2111139 - DNA, 25 bp, Homo sapien
cccattgtgagtatggcccgtctca

SEQ ID NO: 2111140 - DNA, 25 bp, Homo sapien
catgctctgggttggtgaaggtgat

SEQ ID NO: 2111141 - DNA, 25 bp, Homo sapien
tggaccgctgagtctcccggtcctt

SEQ ID NO: 2111142 - DNA, 25 bp, Homo sapien
gaagcatgctctgggttggtgaagg

SEQ ID NO: 2111143 - DNA, 25 bp, Homo sapien
tgagtctcccggtccttgacaacga

SEQ ID NO: 2111144 - DNA, 25 bp, Homo sapien
cagatggggacaaggtccctctgca

SEQ ID NO: 2111145 - DNA, 25 bp, Homo sapien
acgctgccccgagcagacacagagg

SEQ ID NO: 2111146 - DNA, 25 bp, Homo sapien
aaaggcagtcatgctcctgtgagtg

SEQ ID NO: 2111147 - DNA, 25 bp, Homo sapien
agaacaaaaggcagtcatgctcctg

SEQ ID NO: 2111148 - DNA, 25 bp, Homo sapien
taagctgcccgactatcagggctag

SEQ ID NO: 2111149 - DNA, 25 bp, Homo sapien
gcaggtcaaccatccacaggtggct

SEQ ID NO: 2111150 - DNA, 25 bp, Homo sapien
gcagactctactacctaagcccaag

SEQ ID NO: 2111151 - DNA, 25 bp, Homo sapien
catgtcagaagactcacgaggtcct

SEQ ID NO: 2111152 - DNA, 25 bp, Homo sapien
tcatcaggagctatagaatcccaca

SEQ ID NO: 2111153 - DNA, 25 bp, Homo sapien
ataagctcctttaccccagaatggc

SEQ ID NO: 2111154 - DNA, 25 bp, Homo sapien
tagaatcccacacaaaatgacctga

SEQ ID NO: 2111155 - DNA, 25 bp, Homo sapien
accatgttccccttgctactactta

SEQ ID NO: 2111156 - DNA, 25 bp, Homo sapien
caggcaagggtaagtgggcaaaaga

SEQ ID NO: 2111157 - DNA, 25 bp, Homo sapien
atgggttggcagtcagtcagggcaa

SEQ ID NO: 2111158 - DNA, 25 bp, Homo sapien
ctaagtgtgggagacacaaggatga

SEQ ID NO: 2111159 - DNA, 25 bp, Homo sapien
gagcaggcaagggtaagtgggcaaa

SEQ ID NO: 2111160 - DNA, 25 bp, Homo sapien
gatccacacggatctgacgaccatc

SEQ ID NO: 2111161 - DNA, 25 bp, Homo sapien
gcatgatccacacggatctgacgac

SEQ ID NO: 2111162 - DNA, 25 bp, Homo sapien
cacggatctgacgaccatccagaga

SEQ ID NO: 2111163 - DNA, 25 bp, Homo sapien
cacacggatctgacgaccatccaga

SEQ ID NO: 2111164 - DNA, 25 bp, Homo sapien
tctagagtagctgcgaccacgccca

SEQ ID NO: 2111165 - DNA, 25 bp, Homo sapien
gaccacgcccatgggccccaaagcc

SEQ ID NO: 2111166 - DNA, 25 bp, Homo sapien
cacctcctctggttccccgagcaga

SEQ ID NO: 2111167 - DNA, 25 bp, Homo sapien
tcctctggttccccgagcagacttg

SEQ ID NO: 2111168 - DNA, 25 bp, Homo sapien
tgatcaaaacgatcactgcactcac

SEQ ID NO: 2111169 - DNA, 25 bp, Homo sapien
atggcagttgtccacacataggcaa

SEQ ID NO: 2111170 - DNA, 25 bp, Homo sapien
tttaaatggcagttgtccacacata

SEQ ID NO: 2111171 - DNA, 25 bp, Homo sapien
gttgtccacacataggcaactctcc

SEQ ID NO: 2111172 - DNA, 25 bp, Homo sapien
cagttgtccacacataggcaactct

SEQ ID NO: 2111173 - DNA, 25 bp, Homo sapien
ctctggaacgtccatatccatatcc

SEQ ID NO: 2111174 - DNA, 25 bp, Homo sapien
ccctccaggtcgactgtcataatac

SEQ ID NO: 2111175 - DNA, 25 bp, Homo sapien
ggtcgactgtcataatacctgccac

SEQ ID NO: 2111176 - DNA, 25 bp, Homo sapien
tccaggtcgactgtcataatacctg

SEQ ID NO: 2111177 - DNA, 25 bp, Homo sapien
gcaataggagaacatcccagccctt

SEQ ID NO: 2111178 - DNA, 25 bp, Homo sapien
tggtatgcatgaacacccaggcgct

SEQ ID NO: 2111179 - DNA, 25 bp, Homo sapien
cccaggcgctgagttcttaaggaga

SEQ ID NO: 2111180 - DNA, 25 bp, Homo sapien
taggtacacattagtaacagcaagg

SEQ ID NO: 2111181 - DNA, 25 bp, Homo sapien
ttcctcctgagtagcggtcataacc

SEQ ID NO: 2111182 - DNA, 25 bp, Homo sapien
gagtagcggtcataaccaccctggt

SEQ ID NO: 2111183 - DNA, 25 bp, Homo sapien
agtagcggtcataaccaccctggtt

SEQ ID NO: 2111184 - DNA, 25 bp, Homo sapien
tcctgagtagcggtcataaccaccc

SEQ ID NO: 2111185 - DNA, 25 bp, Homo sapien
gcaaacttgctctgatatgcacctg

SEQ ID NO: 2111186 - DNA, 25 bp, Homo sapien
gacagagtgtgacaaacaggttcac

SEQ ID NO: 2111187 - DNA, 25 bp, Homo sapien
tgagggttggacaacagggacacac

SEQ ID NO: 2111188 - DNA, 25 bp, Homo sapien
gctgacaacatgctcacctcctaga

SEQ ID NO: 2111189 - DNA, 25 bp, Homo sapien
tttggaaggacgatcctggatcaga

SEQ ID NO: 2111190 - DNA, 25 bp, Homo sapien
agccatttggaaggacgatcctgga

SEQ ID NO: 2111191 - DNA, 25 bp, Homo sapien
ggtgcagctccaaaaacctttataa

SEQ ID NO: 2111192 - DNA, 25 bp, Homo sapien
taaaataagatgcttcggtgcagct

SEQ ID NO: 2111193 - DNA, 25 bp, Homo sapien
tcaggctggcttgatgcacatttct

SEQ ID NO: 2111194 - DNA, 25 bp, Homo sapien
tgaagtcagtctggccaaacttgcc

SEQ ID NO: 2111195 - DNA, 25 bp, Homo sapien
tactcaggttctacaaacgtcccat

SEQ ID NO: 2111196 - DNA, 25 bp, Homo sapien
gaaagacatcctaagcactgtatga

SEQ ID NO: 2111197 - DNA, 25 bp, Homo sapien
tgttctcagaacaatgggactaaga

SEQ ID NO: 2111198 - DNA, 25 bp, Homo sapien
aagcctccctctcgttgatgtgcca

SEQ ID NO: 2111199 - DNA, 25 bp, Homo sapien
tttatgatagggattagctcacgcc

SEQ ID NO: 2111200 - DNA, 25 bp, Homo sapien
aatgtacacctaaccctctggcagt

SEQ ID NO: 2111201 - DNA, 25 bp, Homo sapien
tatggcactatagagaactgtgggc

SEQ ID NO: 2111202 - DNA, 25 bp, Homo sapien
gaataagatgcgtcctcagaccaag

SEQ ID NO: 2111203 - DNA, 25 bp, Homo sapien
ttccttagagcagatagacagccag

SEQ ID NO: 2111204 - DNA, 25 bp, Homo sapien
tttggtacagacaagttccagggct

SEQ ID NO: 2111205 - DNA, 25 bp, Homo sapien
taaaggttataagaagcctcaggtc

SEQ ID NO: 2111206 - DNA, 25 bp, Homo sapien
ggtcaggtcttaccaccaaacttga

SEQ ID NO: 2111207 - DNA, 25 bp, Homo sapien
taatactcttaactcctaggccagg

SEQ ID NO: 2111208 - DNA, 25 bp, Homo sapien
cagaacactggcttattgtcaacca

SEQ ID NO: 2111209 - DNA, 25 bp, Homo sapien
gtggaccacgaaagcaagaacatcc

SEQ ID NO: 2111210 - DNA, 25 bp, Homo sapien
agcagttctatagcccagaggtgag

SEQ ID NO: 2111211 - DNA, 25 bp, Homo sapien
cagattctggttcatgtcccttgtg

SEQ ID NO: 2111212 - DNA, 25 bp, Homo sapien
ttgtgccgggcaacaccgaaatgaa

SEQ ID NO: 2111213 - DNA, 25 bp, Homo sapien
ttcccagggcgtgggagtctcgcag

SEQ ID NO: 2111214 - DNA, 25 bp, Homo sapien
gagcgaatcgataggcatccttccc

SEQ ID NO: 2111215 - DNA, 25 bp, Homo sapien
tatcagaaagaactgccgagcccag

SEQ ID NO: 2111216 - DNA, 25 bp, Homo sapien
ctgagaccactgtcgccggttcctt

SEQ ID NO: 2111217 - DNA, 25 bp, Homo sapien
ccgcctagcattccttgcttgacat

SEQ ID NO: 2111218 - DNA, 25 bp, Homo sapien
agcatagcccgggatcggggaccac

SEQ ID NO: 2111219 - DNA, 25 bp, Homo sapien
acagcgattcagaacagacaccgcc

SEQ ID NO: 2111220 - DNA, 25 bp, Homo sapien
agcgcccgggtgacacacagcgatt

SEQ ID NO: 2111221 - DNA, 25 bp, Homo sapien
cctggaatgtgagcgtcccgagcga

SEQ ID NO: 2111222 - DNA, 25 bp, Homo sapien
cgagcgaagggatctagttccgtcc

SEQ ID NO: 2111223 - DNA, 25 bp, Homo sapien
tccaccaggcgaccattgccataga

SEQ ID NO: 2111224 - DNA, 25 bp, Homo sapien
ttgccatagacatcgagtccctccg

SEQ ID NO: 2111225 - DNA, 25 bp, Homo sapien
ccggcctcctcctctggcgtgtccg

SEQ ID NO: 2111226 - DNA, 25 bp, Homo sapien
cctcctctggcgtgtccgcccgcgg

SEQ ID NO: 2111227 - DNA, 25 bp, Homo sapien
gcctcctcctctggcgtgtccgccc

SEQ ID NO: 2111228 - DNA, 25 bp, Homo sapien
cctctggcgtgtccgcccgcggcag

SEQ ID NO: 2111229 - DNA, 25 bp, Homo sapien
agcctcacttatcgccattgcgcat

SEQ ID NO: 2111230 - DNA, 25 bp, Homo sapien
ataaggcaagttctccgcccagcct

SEQ ID NO: 2111231 - DNA, 25 bp, Homo sapien
cccacgcagccgcataaggcaagtt

SEQ ID NO: 2111232 - DNA, 25 bp, Homo sapien
cagtaagttctgctcccatgggctt

SEQ ID NO: 2111233 - DNA, 25 bp, Homo sapien
ctctcacaggtagccgctttgcgca

SEQ ID NO: 2111234 - DNA, 25 bp, Homo sapien
cacatctgaccacattttcccagct

SEQ ID NO: 2111235 - DNA, 25 bp, Homo sapien
aggtagccgctttgcgcatgcccac

SEQ ID NO: 2111236 - DNA, 25 bp, Homo sapien
tgctgtttagaatcctctccggcgc

SEQ ID NO: 2111237 - DNA, 25 bp, Homo sapien
gacaacagagtcagtctgctgccgt

SEQ ID NO: 2111238 - DNA, 25 bp, Homo sapien
taattagggtcagtataccagggcg

SEQ ID NO: 2111239 - DNA, 25 bp, Homo sapien
cagggcgacagaaatcagactgaca

SEQ ID NO: 2111240 - DNA, 25 bp, Homo sapien
tgggtcagcgcagacaataattagg

SEQ ID NO: 2111241 - DNA, 25 bp, Homo sapien
tggaaacgttggtgtgcggtacgcg

SEQ ID NO: 2111242 - DNA, 25 bp, Homo sapien
aaacgttggtgtgcggtacgcgttg

SEQ ID NO: 2111243 - DNA, 25 bp, Homo sapien
cgttggtgtgcggtacgcgttgtac

SEQ ID NO: 2111244 - DNA, 25 bp, Homo sapien
ctgtggaaacgttggtgtgcggtac

SEQ ID NO: 2111245 - DNA, 25 bp, Homo sapien
gaagcctcaggtactgccgacgcag

SEQ ID NO: 2111246 - DNA, 25 bp, Homo sapien
tccatgcggtcaagagtagtgcggc

SEQ ID NO: 2111247 - DNA, 25 bp, Homo sapien
tagtgcggctactgcggacgatgct

SEQ ID NO: 2111248 - DNA, 25 bp, Homo sapien
tgttgctataggcacgagcactgcc

SEQ ID NO: 2111249 - DNA, 25 bp, Homo sapien
ggagcctctgctgacagaacgacgg

SEQ ID NO: 2111250 - DNA, 25 bp, Homo sapien
tctgctgacagaacgacggtgccca

SEQ ID NO: 2111251 - DNA, 25 bp, Homo sapien
agacggcacggttcatctgcgcctg

SEQ ID NO: 2111252 - DNA, 25 bp, Homo sapien
cctcatagacggcacggttcatctg

SEQ ID NO: 2111253 - DNA, 25 bp, Homo sapien
aaaacatgatacatgcccgcaaagg

SEQ ID NO: 2111254 - DNA, 25 bp, Homo sapien
ccgcaaaggcatagttctcgctcag

SEQ ID NO: 2111255 - DNA, 25 bp, Homo sapien
tgctgctgacgtgggcaccacgctg

SEQ ID NO: 2111256 - DNA, 25 bp, Homo sapien
tgcctcatccacgtgctggtcaaaa

SEQ ID NO: 2111257 - DNA, 25 bp, Homo sapien
ccgtagcacgcgaagcactgtgggt

SEQ ID NO: 2111258 - DNA, 25 bp, Homo sapien
ggaccaggcgaagtcggagacacca

SEQ ID NO: 2111259 - DNA, 25 bp, Homo sapien
tcatcattggcgaagcgcacccttg

SEQ ID NO: 2111260 - DNA, 25 bp, Homo sapien
aggccaggcggtgtcggtcatcatt

SEQ ID NO: 2111261 - DNA, 25 bp, Homo sapien
ggatgcagcgaccatcctcagaggc

SEQ ID NO: 2111262 - DNA, 25 bp, Homo sapien
ggatctctcggatgcagcgaccatc

SEQ ID NO: 2111263 - DNA, 25 bp, Homo sapien
gtcagggatctctcggatgcagcga

SEQ ID NO: 2111264 - DNA, 25 bp, Homo sapien
cagttcagcgctatcggggtcaggg

SEQ ID NO: 2111265 - DNA, 25 bp, Homo sapien
ccttggtgagtgggtgtcctggagc

SEQ ID NO: 2111266 - DNA, 25 bp, Homo sapien
tggtgagtgggtgtcctggagcctg

SEQ ID NO: 2111267 - DNA, 25 bp, Homo sapien
cttggtgagtgggtgtcctggagcc

SEQ ID NO: 2111268 - DNA, 25 bp, Homo sapien
gtgagtgggtgtcctggagcctgac

SEQ ID NO: 2111269 - DNA, 25 bp, Homo sapien
cagtgtgagaaccatagggcctgcc

SEQ ID NO: 2111270 - DNA, 25 bp, Homo sapien
tggccagtcctcctacagtgtgaga

SEQ ID NO: 2111271 - DNA, 25 bp, Homo sapien
tgttgatgcgactggctggtcccta

SEQ ID NO: 2111272 - DNA, 25 bp, Homo sapien
tctattcacaatagggctgtggcag

SEQ ID NO: 2111273 - DNA, 25 bp, Homo sapien
cctgtggagatgttcatgacatgca

SEQ ID NO: 2111274 - DNA, 25 bp, Homo sapien
aaggacacggcctgtcagcttgctg

SEQ ID NO: 2111275 - DNA, 25 bp, Homo sapien
tgcacgttgtgcttggcgttcccca

SEQ ID NO: 2111276 - DNA, 25 bp, Homo sapien
ccaggggcatcaaaggacagagcaa

SEQ ID NO: 2111277 - DNA, 25 bp, Homo sapien
atcaaagaggaaagagaagacactg

SEQ ID NO: 2111278 - DNA, 25 bp, Homo sapien
aagaggaaagagaagacactgccat

SEQ ID NO: 2111279 - DNA, 25 bp, Homo sapien
caaagaggaaagagaagacactgcc

SEQ ID NO: 2111280 - DNA, 25 bp, Homo sapien
ctgtggccatatcaaagaggaaaga

SEQ ID NO: 2111281 - DNA, 25 bp, Homo sapien
cattgatgagcagtgagggatcccg

SEQ ID NO: 2111282 - DNA, 25 bp, Homo sapien
caggaccgggctgagatgctggtca

SEQ ID NO: 2111283 - DNA, 25 bp, Homo sapien
tgcaccaccaaacgcttggctttgg

SEQ ID NO: 2111284 - DNA, 25 bp, Homo sapien
cttgttgaggcaagcattgatgagc

SEQ ID NO: 2111285 - DNA, 25 bp, Homo sapien
ggcccagacaggagtttttgaagct

SEQ ID NO: 2111286 - DNA, 25 bp, Homo sapien
aattactggcctgtagaggggccca

SEQ ID NO: 2111287 - DNA, 25 bp, Homo sapien
gagaactgcatttgggtaacatgac

SEQ ID NO: 2111288 - DNA, 25 bp, Homo sapien
tcaggtcattccaatgtgtggccca

SEQ ID NO: 2111289 - DNA, 25 bp, Homo sapien
ttactgatggttcagaaactgtctc

SEQ ID NO: 2111290 - DNA, 25 bp, Homo sapien
tgttgatataaatgggagcctctgc

SEQ ID NO: 2111291 - DNA, 25 bp, Homo sapien
gcccttagagagaataaaacactgt

SEQ ID NO: 2111292 - DNA, 25 bp, Homo sapien
tattaagataagcacaaagagagga

SEQ ID NO: 2111293 - DNA, 25 bp, Homo sapien
tgagagagtgggtcaaaacacagcc

SEQ ID NO: 2111294 - DNA, 25 bp, Homo sapien
gagagagtgggtcaaaacacagccc

SEQ ID NO: 2111295 - DNA, 25 bp, Homo sapien
agagagtgggtcaaaacacagcccc

SEQ ID NO: 2111296 - DNA, 25 bp, Homo sapien
atgagagagtgggtcaaaacacagc

SEQ ID NO: 2111297 - DNA, 25 bp, Homo sapien
atgctgcgcacaggatgtgagctct

SEQ ID NO: 2111298 - DNA, 25 bp, Homo sapien
tgcagggtcccctcgttgtctacca

SEQ ID NO: 2111299 - DNA, 25 bp, Homo sapien
tcgatggggaagcttctcttcagct

SEQ ID NO: 2111300 - DNA, 25 bp, Homo sapien
ggacagaagatgctgcgcacaggat

SEQ ID NO: 2111301 - DNA, 25 bp, Homo sapien
ctgtgtgcagaatgcgaggtctctg

SEQ ID NO: 2111302 - DNA, 25 bp, Homo sapien
catcggtgtcgtgatgtctgagcca

SEQ ID NO: 2111303 - DNA, 25 bp, Homo sapien
tggccgagatcaagtgcaaactgtg

SEQ ID NO: 2111304 - DNA, 25 bp, Homo sapien
ccatccctagatgggaggtcacctg

SEQ ID NO: 2111305 - DNA, 25 bp, Homo sapien
tgacatcaagcacaggtgcactgtg

SEQ ID NO: 2111306 - DNA, 25 bp, Homo sapien
ttctgctcccgcctccagacgatga

SEQ ID NO: 2111307 - DNA, 25 bp, Homo sapien
tctcgtcgcagttgaagctgacatc

SEQ ID NO: 2111308 - DNA, 25 bp, Homo sapien
actggaggccagtaggctctcgtcg

SEQ ID NO: 2111309 - DNA, 25 bp, Homo sapien
gctggagtaagaggggtgggatgga

SEQ ID NO: 2111310 - DNA, 25 bp, Homo sapien
gatggaggacagcagcagggccgac

SEQ ID NO: 2111311 - DNA, 25 bp, Homo sapien
ggctggagtaagaggggtgggatgg

SEQ ID NO: 2111312 - DNA, 25 bp, Homo sapien
ggacagcagcagggccgacaggacc

SEQ ID NO: 2111313 - DNA, 25 bp, Homo sapien
ttaggtcagagcagtatccccagtg

SEQ ID NO: 2111314 - DNA, 25 bp, Homo sapien
tgcacaaatgagtcaatgaaccccg

SEQ ID NO: 2111315 - DNA, 25 bp, Homo sapien
ttaaggcagggcctgtaacccagca

SEQ ID NO: 2111316 - DNA, 25 bp, Homo sapien
tactgtctccgctatgatgcaagcc

SEQ ID NO: 2111317 - DNA, 25 bp, Homo sapien
tggagattccgccacacagcaggag

SEQ ID NO: 2111318 - DNA, 25 bp, Homo sapien
taacttcccgttgctcctgcaccag

SEQ ID NO: 2111319 - DNA, 25 bp, Homo sapien
gagggatggagattccgccacacag

SEQ ID NO: 2111320 - DNA, 25 bp, Homo sapien
ccaggtcagccttaacttcccgttg

SEQ ID NO: 2111321 - DNA, 25 bp, Homo sapien
ttgacattttctggtgacgcaggcc

SEQ ID NO: 2111322 - DNA, 25 bp, Homo sapien
aactttgacattttctggtgacgca

SEQ ID NO: 2111323 - DNA, 25 bp, Homo sapien
tctggtgacgcaggccactgataag

SEQ ID NO: 2111324 - DNA, 25 bp, Homo sapien
cattttctggtgacgcaggccactg

SEQ ID NO: 2111325 - DNA, 25 bp, Homo sapien
acaagactgttggtgcgagttcagc

SEQ ID NO: 2111326 - DNA, 25 bp, Homo sapien
cagtcaacgcatatgtggcaacaaa

SEQ ID NO: 2111327 - DNA, 25 bp, Homo sapien
taaggtcccaagatgtcagtcgcag

SEQ ID NO: 2111328 - DNA, 25 bp, Homo sapien
taactggactgaacaaacgggagat

SEQ ID NO: 2111329 - DNA, 25 bp, Homo sapien
tctaagaacatagactccaggaggg

SEQ ID NO: 2111330 - DNA, 25 bp, Homo sapien
cagaccttggtagaaactgggcatc

SEQ ID NO: 2111331 - DNA, 25 bp, Homo sapien
tgaggctgcagcgaaccatgtttga

SEQ ID NO: 2111332 - DNA, 25 bp, Homo sapien
gataagaatggctcactcgggccgg

SEQ ID NO: 2111333 - DNA, 25 bp, Homo sapien
gactacttctggtgtcacacagagc

SEQ ID NO: 2111334 - DNA, 25 bp, Homo sapien
cagggaccaggatgccaacaatcct

SEQ ID NO: 2111335 - DNA, 25 bp, Homo sapien
gggttcagggaccaggatgccaaca

SEQ ID NO: 2111336 - DNA, 25 bp, Homo sapien
gatgccaacaatcctcaggccacag

SEQ ID NO: 2111337 - DNA, 25 bp, Homo sapien
ggaccaggatgccaacaatcctcag

SEQ ID NO: 2111338 - DNA, 25 bp, Homo sapien
tcactttatcggctgaagagtagtg

SEQ ID NO: 2111339 - DNA, 25 bp, Homo sapien
agcacatgagtggaatggtcacttt

SEQ ID NO: 2111340 - DNA, 25 bp, Homo sapien
gaagagtagtggaaagagtcaagaa

SEQ ID NO: 2111341 - DNA, 25 bp, Homo sapien
ggaatggtcactttatcggctgaag

SEQ ID NO: 2111342 - DNA, 25 bp, Homo sapien
gattatggtctgaagcacactcagg

SEQ ID NO: 2111343 - DNA, 25 bp, Homo sapien
taaatggtcaggtctgtgggctcag

SEQ ID NO: 2111344 - DNA, 25 bp, Homo sapien
ggctgatgattatggtctgaagcac

SEQ ID NO: 2111345 - DNA, 25 bp, Homo sapien
caatgacaccagagtaaggaggatc

SEQ ID NO: 2111346 - DNA, 25 bp, Homo sapien
gtgcatgagatgatgaaatcgaccc

SEQ ID NO: 2111347 - DNA, 25 bp, Homo sapien
aatcgacccagtagatgaccacaaa

SEQ ID NO: 2111348 - DNA, 25 bp, Homo sapien
cccatagcgaggttgaggtgcatga

SEQ ID NO: 2111349 - DNA, 25 bp, Homo sapien
catatgcccatagcgaggttgaggt

SEQ ID NO: 2111350 - DNA, 25 bp, Homo sapien
tagtcacagattagctaggttctct

SEQ ID NO: 2111351 - DNA, 25 bp, Homo sapien
gcctgatgggtaatggatccacttc

SEQ ID NO: 2111352 - DNA, 25 bp, Homo sapien
atagggcagctcacactgtggcagc

SEQ ID NO: 2111353 - DNA, 25 bp, Homo sapien
tttggagcctaatcatagaagtgac

SEQ ID NO: 2111354 - DNA, 25 bp, Homo sapien
caaaaatgtcggatttctcagtctc

SEQ ID NO: 2111355 - DNA, 25 bp, Homo sapien
ctgcaggagtaggacgggcacaggg

SEQ ID NO: 2111356 - DNA, 25 bp, Homo sapien
ggtcctcctcgcaccataaatcgca

SEQ ID NO: 2111357 - DNA, 25 bp, Homo sapien
atcgcagagcgagccccctgtggtc

SEQ ID NO: 2111358 - DNA, 25 bp, Homo sapien
gcacagggggtgtctggtcctcctc

SEQ ID NO: 2111359 - DNA, 25 bp, Homo sapien
gtttctcattccgaaaagtgtggct

SEQ ID NO: 2111360 - DNA, 25 bp, Homo sapien
ccagtttctcattccgaaaagtgtg

SEQ ID NO: 2111361 - DNA, 25 bp, Homo sapien
tcattccgaaaagtgtggctgtgag

SEQ ID NO: 2111362 - DNA, 25 bp, Homo sapien
tctcattccgaaaagtgtggctgtg

SEQ ID NO: 2111363 - DNA, 25 bp, Homo sapien
cctccaccgcaaccttcgtagcaaa

SEQ ID NO: 2111364 - DNA, 25 bp, Homo sapien
caaccttcgtagcaaacccagcggg

SEQ ID NO: 2111365 - DNA, 25 bp, Homo sapien
tgggcgcctccaccgcaaccttcgt

SEQ ID NO: 2111366 - DNA, 25 bp, Homo sapien
gggccttggcgcctggtgcactggg

SEQ ID NO: 2111367 - DNA, 25 bp, Homo sapien
cgtgtggggttgttggcccgagaag

SEQ ID NO: 2111368 - DNA, 25 bp, Homo sapien
ctgcgtcgtgtggggttgttggccc

SEQ ID NO: 2111369 - DNA, 25 bp, Homo sapien
gcgtcgtgtggggttgttggcccga

SEQ ID NO: 2111370 - DNA, 25 bp, Homo sapien
tcgtgtggggttgttggcccgagaa

SEQ ID NO: 2111371 - DNA, 25 bp, Homo sapien
gatgactgaagtcgggtccctgtgc

SEQ ID NO: 2111372 - DNA, 25 bp, Homo sapien
cacacgagctggcaattggctcagg

SEQ ID NO: 2111373 - DNA, 25 bp, Homo sapien
gtccctgtgcttctcggtagcggcc

SEQ ID NO: 2111374 - DNA, 25 bp, Homo sapien
tgcggttccggttgctggttctcac

SEQ ID NO: 2111375 - DNA, 25 bp, Homo sapien
ccgggcggccgttggcctctctcct

SEQ ID NO: 2111376 - DNA, 25 bp, Homo sapien
cgggcggccgttggcctctctcctg

SEQ ID NO: 2111377 - DNA, 25 bp, Homo sapien
gggcggccgttggcctctctcctgc

SEQ ID NO: 2111378 - DNA, 25 bp, Homo sapien
cgcggggccgggtcggccagtcctg

SEQ ID NO: 2111379 - DNA, 25 bp, Homo sapien
gccccgatgtggccttcaaggccat

SEQ ID NO: 2111380 - DNA, 25 bp, Homo sapien
tgctgatcagggcaagccccgatgt

SEQ ID NO: 2111381 - DNA, 25 bp, Homo sapien
agctaagcttcgggcctggagcacc

SEQ ID NO: 2111382 - DNA, 25 bp, Homo sapien
ggagcacctccaacctgctgatcag

SEQ ID NO: 2111383 - DNA, 25 bp, Homo sapien
tgggcaacatggcaaaaccccattt

SEQ ID NO: 2111384 - DNA, 25 bp, Homo sapien
ggccgagacgagtggatcacttgag

SEQ ID NO: 2111385 - DNA, 25 bp, Homo sapien
gtcaggagttcaagacgagcctggg

SEQ ID NO: 2111386 - DNA, 25 bp, Homo sapien
gcaacatggcaaaaccccatttcca

SEQ ID NO: 2111387 - DNA, 25 bp, Homo sapien
tgcccttgtcttctctggcgaggct

SEQ ID NO: 2111388 - DNA, 25 bp, Homo sapien
tctgcccttgtcttctctggcgagg

SEQ ID NO: 2111389 - DNA, 25 bp, Homo sapien
ctttctgcccttgtcttctctggcg

SEQ ID NO: 2111390 - DNA, 25 bp, Homo sapien
tgctttctgcccttgtcttctctgg

SEQ ID NO: 2111391 - DNA, 25 bp, Homo sapien
ttcctcccattgggcccccactcat

SEQ ID NO: 2111392 - DNA, 25 bp, Homo sapien
cttcctcccattgggcccccactca

SEQ ID NO: 2111393 - DNA, 25 bp, Homo sapien
tatgttctgctgaaccgctggtgct

SEQ ID NO: 2111394 - DNA, 25 bp, Homo sapien
agggtggagggtatgttctgctgaa

SEQ ID NO: 2111395 - DNA, 25 bp, Homo sapien
tggagggtatgttctgctgaaccgc

SEQ ID NO: 2111396 - DNA, 25 bp, Homo sapien
ctgctgaaccgctggtgctcctcgg

SEQ ID NO: 2111397 - DNA, 25 bp, Homo sapien
caagcattttcgtccaagcatctca

SEQ ID NO: 2111398 - DNA, 25 bp, Homo sapien
catctcaaagagtcgctggttctcg

SEQ ID NO: 2111399 - DNA, 25 bp, Homo sapien
caaagagtcgctggttctcgtggtc

SEQ ID NO: 2111400 - DNA, 25 bp, Homo sapien
caagcatctcaaagagtcgctggtt

SEQ ID NO: 2111401 - DNA, 25 bp, Homo sapien
ccaggtacagctgaacaactgcagt

SEQ ID NO: 2111402 - DNA, 25 bp, Homo sapien
ccgtaaaggcggatgaagtaggact

SEQ ID NO: 2111403 - DNA, 25 bp, Homo sapien
gacttctgggggttatccttcacga

SEQ ID NO: 2111404 - DNA, 25 bp, Homo sapien
gggttatccttcacgaagcacacag

SEQ ID NO: 2111405 - DNA, 25 bp, Homo sapien
gaactggcttgcaagtccagtcggg

SEQ ID NO: 2111406 - DNA, 25 bp, Homo sapien
gtcttgaagctatggacacatatgg

SEQ ID NO: 2111407 - DNA, 25 bp, Homo sapien
agatctgggtttgcgggttgagaac

SEQ ID NO: 2111408 - DNA, 25 bp, Homo sapien
acacatatggacacagatctgggtt

SEQ ID NO: 2111409 - DNA, 25 bp, Homo sapien
gtggagtagacaagctgtgagtaca

SEQ ID NO: 2111410 - DNA, 25 bp, Homo sapien
tgggggtggagtagacaagctgtga

SEQ ID NO: 2111411 - DNA, 25 bp, Homo sapien
cagcgaaggtgtggaagaagggggt

SEQ ID NO: 2111412 - DNA, 25 bp, Homo sapien
ccagcgaaggtgtggaagaaggggg

SEQ ID NO: 2111413 - DNA, 25 bp, Homo sapien
cttggggtcagccgcctcccaggtc

SEQ ID NO: 2111414 - DNA, 25 bp, Homo sapien
ttggggtcagccgcctcccaggtcc

SEQ ID NO: 2111415 - DNA, 25 bp, Homo sapien
gcccgagggctggttgatcacttac

SEQ ID NO: 2111416 - DNA, 25 bp, Homo sapien
gaggcccgagggctggttgatcact

SEQ ID NO: 2111417 - DNA, 25 bp, Homo sapien
tcgtctgcaaagttcagccccgctt

SEQ ID NO: 2111418 - DNA, 25 bp, Homo sapien
ctgcaaagttcagccccgcttggca

SEQ ID NO: 2111419 - DNA, 25 bp, Homo sapien
ttctcctgcacgagggcccggaagg

SEQ ID NO: 2111420 - DNA, 25 bp, Homo sapien
tcgtcctcgtctgcaaagttcagcc

SEQ ID NO: 2111421 - DNA, 25 bp, Homo sapien
tcctttcctcccctgtggcctcctc

SEQ ID NO: 2111422 - DNA, 25 bp, Homo sapien
ctgcccaacttcctttcctcccctg

SEQ ID NO: 2111423 - DNA, 25 bp, Homo sapien
ctttcctcccctgtggcctcctcac

SEQ ID NO: 2111424 - DNA, 25 bp, Homo sapien
cctttcctcccctgtggcctcctca

SEQ ID NO: 2111425 - DNA, 25 bp, Homo sapien
ttcattggctggtgttggtggtggg

SEQ ID NO: 2111426 - DNA, 25 bp, Homo sapien
cttcattggctggtgttggtggtgg

SEQ ID NO: 2111427 - DNA, 25 bp, Homo sapien
tgttggtggtgggggtagctggcgt

SEQ ID NO: 2111428 - DNA, 25 bp, Homo sapien
tggtggtgggggtagctggcgtctg

SEQ ID NO: 2111429 - DNA, 25 bp, Homo sapien
gcaggggtgggagccctcctcttct

SEQ ID NO: 2111430 - DNA, 25 bp, Homo sapien
ccttggtctccacctggatgcaggg

SEQ ID NO: 2111431 - DNA, 25 bp, Homo sapien
ctccttggtctccacctggatgcag

SEQ ID NO: 2111432 - DNA, 25 bp, Homo sapien
ttggtctccacctggatgcaggggc

SEQ ID NO: 2111433 - DNA, 25 bp, Homo sapien
cgtgaactcgtgatgtcagggttct

SEQ ID NO: 2111434 - DNA, 25 bp, Homo sapien
tgggagcccacggtatcgtgaactc

SEQ ID NO: 2111435 - DNA, 25 bp, Homo sapien
tccctgagcgtttcttatcagctgg

SEQ ID NO: 2111436 - DNA, 25 bp, Homo sapien
agccccagggagagcggacccactg

SEQ ID NO: 2111437 - DNA, 25 bp, Homo sapien
ggtcccaccccacgtggctgacatg

SEQ ID NO: 2111438 - DNA, 25 bp, Homo sapien
catcccagcaagggatctgagaggg

SEQ ID NO: 2111439 - DNA, 25 bp, Homo sapien
catggattgtcgttgggtccatccc

SEQ ID NO: 2111440 - DNA, 25 bp, Homo sapien
ggaagtttagtggagtccaagagac

SEQ ID NO: 2111441 - DNA, 25 bp, Homo sapien
tctcagcagtggtctttggaagggt

SEQ ID NO: 2111442 - DNA, 25 bp, Homo sapien
ggtcctcaatgaagtcgtagataag

SEQ ID NO: 2111443 - DNA, 25 bp, Homo sapien
ataagtttagaggtctcggcgtcgg

SEQ ID NO: 2111444 - DNA, 25 bp, Homo sapien
tcggcgtcggtgagctgggcctcgc

SEQ ID NO: 2111445 - DNA, 25 bp, Homo sapien
acagactccgcagatctgggtcgag

SEQ ID NO: 2111446 - DNA, 25 bp, Homo sapien
tcctgccgcacagcctccagcccac

SEQ ID NO: 2111447 - DNA, 25 bp, Homo sapien
gcgcctcatctcctgccgcacagcc

SEQ ID NO: 2111448 - DNA, 25 bp, Homo sapien
cctggcgcctcatctcctgccgcac

SEQ ID NO: 2111449 - DNA, 25 bp, Homo sapien
tggcgcctcatctcctgccgcacag

SEQ ID NO: 2111450 - DNA, 25 bp, Homo sapien
ggagctggttccctcctcgagatgg

SEQ ID NO: 2111451 - DNA, 25 bp, Homo sapien
atccccaaaggtacagggggcagtg

SEQ ID NO: 2111452 - DNA, 25 bp, Homo sapien
cagtggaccagaacgacccttgtta

SEQ ID NO: 2111453 - DNA, 25 bp, Homo sapien
tggttccctcctcgagatggcggtg

SEQ ID NO: 2111454 - DNA, 25 bp, Homo sapien
tggtccagaacgtccagtagctgga

SEQ ID NO: 2111455 - DNA, 25 bp, Homo sapien
gggcagtggtccagaacgtccagta

SEQ ID NO: 2111456 - DNA, 25 bp, Homo sapien
cagtggtccagaacgtccagtagct

SEQ ID NO: 2111457 - DNA, 25 bp, Homo sapien
tccagaacgtccagtagctggaggg

SEQ ID NO: 2111458 - DNA, 25 bp, Homo sapien
tggtccattcccggagctgggcggc

SEQ ID NO: 2111459 - DNA, 25 bp, Homo sapien
ggtccattcccggagctgggcggcg

SEQ ID NO: 2111460 - DNA, 25 bp, Homo sapien
tccctgccggatttgatccaaaagc

SEQ ID NO: 2111461 - DNA, 25 bp, Homo sapien
atttgatccaaaagcgctccccgac

SEQ ID NO: 2111462 - DNA, 25 bp, Homo sapien
tgccggatttgatccaaaagcgctc

SEQ ID NO: 2111463 - DNA, 25 bp, Homo sapien
cagctgaattccctgccggatttga

SEQ ID NO: 2111464 - DNA, 25 bp, Homo sapien
tctgcatcacgtgcatcagggcccc

SEQ ID NO: 2111465 - DNA, 25 bp, Homo sapien
tcttctgcatcacgtgcatcagggc

SEQ ID NO: 2111466 - DNA, 25 bp, Homo sapien
tctcttctgcatcacgtgcatcagg

SEQ ID NO: 2111467 - DNA, 25 bp, Homo sapien
ttctgcatcacgtgcatcagggccc

SEQ ID NO: 2111468 - DNA, 25 bp, Homo sapien
ttcatcttcatcgccagcctggtcc

SEQ ID NO: 2111469 - DNA, 25 bp, Homo sapien
tcagtcatcccattcatcatcttca

SEQ ID NO: 2111470 - DNA, 25 bp, Homo sapien
atcttcatcgccagcctggtcctcc

SEQ ID NO: 2111471 - DNA, 25 bp, Homo sapien
tcttcatcttcatcgccagcctggt

SEQ ID NO: 2111472 - DNA, 25 bp, Homo sapien
ggaccaggcagggataacagcattg

SEQ ID NO: 2111473 - DNA, 25 bp, Homo sapien
aggagcacagggcagcaagtaactc

SEQ ID NO: 2111474 - DNA, 25 bp, Homo sapien
gagcacagggcagcaagtaactcag

SEQ ID NO: 2111475 - DNA, 25 bp, Homo sapien
ccaggcagggataacagcattggag

SEQ ID NO: 2111476 - DNA, 25 bp, Homo sapien
gaccaaccggagagccgtgaccgaa

SEQ ID NO: 2111477 - DNA, 25 bp, Homo sapien
gctaacgacattcgggcctagccgg

SEQ ID NO: 2111478 - DNA, 25 bp, Homo sapien
gccgcgctttcccagagtgcgtctg

SEQ ID NO: 2111479 - DNA, 25 bp, Homo sapien
cgtggccgggaacgcgcagcctatt

SEQ ID NO: 2111480 - DNA, 25 bp, Homo sapien
caggcccgcgctccccgagcctcat

SEQ ID NO: 2111481 - DNA, 25 bp, Homo sapien
caccgaatgggtaacggtcaccagg

SEQ ID NO: 2111482 - DNA, 25 bp, Homo sapien
tccccttccggcgtctcgcgtggac

SEQ ID NO: 2111483 - DNA, 25 bp, Homo sapien
ttctcagtccccgcactctgaaggg

SEQ ID NO: 2111484 - DNA, 25 bp, Homo sapien
cggcgtctcgcgtggacaccgaatg

SEQ ID NO: 2111485 - DNA, 25 bp, Homo sapien
ctcttagagataccgagggcagggc

SEQ ID NO: 2111486 - DNA, 25 bp, Homo sapien
ggtactcgacttcaaagtcatagag

SEQ ID NO: 2111487 - DNA, 25 bp, Homo sapien
tcttgtaatcgcacaggtactcgac

SEQ ID NO: 2111488 - DNA, 25 bp, Homo sapien
caagaagacttgcaacacacgctgc

SEQ ID NO: 2111489 - DNA, 25 bp, Homo sapien
cacgatttgggcagtcatagccgca

SEQ ID NO: 2111490 - DNA, 25 bp, Homo sapien
gatgcagaggtcatatcggataccc

SEQ ID NO: 2111491 - DNA, 25 bp, Homo sapien
tacagtgatgcgtcccagatggctg

SEQ ID NO: 2111492 - DNA, 25 bp, Homo sapien
taggcaaacttgtgcagtgacgccc

SEQ ID NO: 2111493 - DNA, 25 bp, Homo sapien
gagccgggtgcacactgtgaacaca

SEQ ID NO: 2111494 - DNA, 25 bp, Homo sapien
gggaaagcagggagtttcagacaca

SEQ ID NO: 2111495 - DNA, 25 bp, Homo sapien
aacacagggtgggaagagctgcaca

SEQ ID NO: 2111496 - DNA, 25 bp, Homo sapien
tgtccctgtgacactcagatcagtc

SEQ ID NO: 2111497 - DNA, 25 bp, Homo sapien
tgttgccatagtaggcggcatccac

SEQ ID NO: 2111498 - DNA, 25 bp, Homo sapien
cacggtgtacacgtcctccacgtag

SEQ ID NO: 2111499 - DNA, 25 bp, Homo sapien
gtggcgccctgacggtcgtagatct

SEQ ID NO: 2111500 - DNA, 25 bp, Homo sapien
tgacaaagtgggagatgttgccata

SEQ ID NO: 2111501 - DNA, 25 bp, Homo sapien
gaagacgttgtacacctgcaggttg

SEQ ID NO: 2111502 - DNA, 25 bp, Homo sapien
tcttgtggcaaagaaagcgatgcgg

SEQ ID NO: 2111503 - DNA, 25 bp, Homo sapien
gccgctcgtcaaggttgtctatgaa

SEQ ID NO: 2111504 - DNA, 25 bp, Homo sapien
tgtctatgaagacgttgtacacctg

SEQ ID NO: 2111505 - DNA, 25 bp, Homo sapien
ctctgggatttgagttgggagatct

SEQ ID NO: 2111506 - DNA, 25 bp, Homo sapien
ggaggttgttcaggccaggggttga

SEQ ID NO: 2111507 - DNA, 25 bp, Homo sapien
ctgggatttgagttgggagatctta

SEQ ID NO: 2111508 - DNA, 25 bp, Homo sapien
agcactggaggttgttcaggccagg

SEQ ID NO: 2111509 - DNA, 25 bp, Homo sapien
cttcttaggggagccagggagccca

SEQ ID NO: 2111510 - DNA, 25 bp, Homo sapien
gaagaggtatttgcggcaggactca

SEQ ID NO: 2111511 - DNA, 25 bp, Homo sapien
gcaggactcagtcccacacttgcat

SEQ ID NO: 2111512 - DNA, 25 bp, Homo sapien
attcaatacggacccgcttcttagg

SEQ ID NO: 2111513 - DNA, 25 bp, Homo sapien
taggccatgaatcccaacgacagag

SEQ ID NO: 2111514 - DNA, 25 bp, Homo sapien
tacccagcactgtaagcacgagcag

SEQ ID NO: 2111515 - DNA, 25 bp, Homo sapien
ttcatgtcgggctaggcactctggc

SEQ ID NO: 2111516 - DNA, 25 bp, Homo sapien
cagtcattctcgacaggagggcagc

SEQ ID NO: 2111517 - DNA, 25 bp, Homo sapien
gtcgacagttcattttattgatgcc

SEQ ID NO: 2111518 - DNA, 25 bp, Homo sapien
agttcattttattgatgcccactcc

SEQ ID NO: 2111519 - DNA, 25 bp, Homo sapien
acagttcattttattgatgcccact

SEQ ID NO: 2111520 - DNA, 25 bp, Homo sapien
cagtcgacagttcattttattgatg

SEQ ID NO: 2111521 - DNA, 25 bp, Homo sapien
aggattagagtcaaatggctgaggt

SEQ ID NO: 2111522 - DNA, 25 bp, Homo sapien
ttcctgggcaaacccagctcccagc

SEQ ID NO: 2111523 - DNA, 25 bp, Homo sapien
ggtttgaggaacatgttcctgggca

SEQ ID NO: 2111524 - DNA, 25 bp, Homo sapien
cccacacaagcacctcacatcttgg

SEQ ID NO: 2111525 - DNA, 25 bp, Homo sapien
tcctcatcccgcgagtggatcggcc

SEQ ID NO: 2111526 - DNA, 25 bp, Homo sapien
ggaagataccattgtactagtggag

SEQ ID NO: 2111527 - DNA, 25 bp, Homo sapien
ggagacacgaaaggtctcctcatcc

SEQ ID NO: 2111528 - DNA, 25 bp, Homo sapien
cactacggtcatgggaggtaccaca

SEQ ID NO: 2111529 - DNA, 25 bp, Homo sapien
ggccccagcacatctcccaggacaa

SEQ ID NO: 2111530 - DNA, 25 bp, Homo sapien
caaagcccagagaaccagagaggca

SEQ ID NO: 2111531 - DNA, 25 bp, Homo sapien
caggacaaagcccagagaaccagag

SEQ ID NO: 2111532 - DNA, 25 bp, Homo sapien
cttccccatccactgctggccccag

SEQ ID NO: 2111533 - DNA, 25 bp, Homo sapien
gggcagatggcgcagcatggcaggg

SEQ ID NO: 2111534 - DNA, 25 bp, Homo sapien
cgcagcatggcagggtaggcgtctt

SEQ ID NO: 2111535 - DNA, 25 bp, Homo sapien
gatggcgcagcatggcagggtaggc

SEQ ID NO: 2111536 - DNA, 25 bp, Homo sapien
catggcagggtaggcgtctttgccc

SEQ ID NO: 2111537 - DNA, 25 bp, Homo sapien
ccatggcttagagccgggcctttcc

SEQ ID NO: 2111538 - DNA, 25 bp, Homo sapien
agggccctccatggcttagagccgg

SEQ ID NO: 2111539 - DNA, 25 bp, Homo sapien
cctccatggcttagagccgggcctt

SEQ ID NO: 2111540 - DNA, 25 bp, Homo sapien
gagcacagggccctccatggcttag

SEQ ID NO: 2111541 - DNA, 25 bp, Homo sapien
tgtccctggctaaactgggggagga

SEQ ID NO: 2111542 - DNA, 25 bp, Homo sapien
tgggggaggagccagccctcagccc

SEQ ID NO: 2111543 - DNA, 25 bp, Homo sapien
ctgtccctggctaaactgggggagg

SEQ ID NO: 2111544 - DNA, 25 bp, Homo sapien
gaggagccagccctcagccccggcc

SEQ ID NO: 2111545 - DNA, 25 bp, Homo sapien
aaatccctatagtcagagtgcccgg

SEQ ID NO: 2111546 - DNA, 25 bp, Homo sapien
cacagcatataaaatccctatagtc

SEQ ID NO: 2111547 - DNA, 25 bp, Homo sapien
tataaaatccctatagtcagagtgc

SEQ ID NO: 2111548 - DNA, 25 bp, Homo sapien
cagcatataaaatccctatagtcag

SEQ ID NO: 2111549 - DNA, 25 bp, Homo sapien
ctggaaccagattgacgtttaaata

SEQ ID NO: 2111550 - DNA, 25 bp, Homo sapien
caagtgctataaaacgattgatgat

SEQ ID NO: 2111551 - DNA, 25 bp, Homo sapien
atgatcactcaaccggactcctggg

SEQ ID NO: 2111552 - DNA, 25 bp, Homo sapien
gggcatagaacaatgcctaatacat

SEQ ID NO: 2111553 - DNA, 25 bp, Homo sapien
gggagtggagaccaagacaatgccc

SEQ ID NO: 2111554 - DNA, 25 bp, Homo sapien
gagtggagaccaagacaatgccctc

SEQ ID NO: 2111555 - DNA, 25 bp, Homo sapien
gtggagaccaagacaatgccctccc

SEQ ID NO: 2111556 - DNA, 25 bp, Homo sapien
attaggggagtggagaccaagacaa

SEQ ID NO: 2111557 - DNA, 25 bp, Homo sapien
atgtgtggattcatgagagcccaca

SEQ ID NO: 2111558 - DNA, 25 bp, Homo sapien
tcttactgcccatgtgtggattcat

SEQ ID NO: 2111559 - DNA, 25 bp, Homo sapien
gagtcttactgcccatgtgtggatt

SEQ ID NO: 2111560 - DNA, 25 bp, Homo sapien
tgtgtggattcatgagagcccacat

SEQ ID NO: 2111561 - DNA, 25 bp, Homo sapien
atgggggaggggtctgactgctgtc

SEQ ID NO: 2111562 - DNA, 25 bp, Homo sapien
gggggaggggtctgactgctgtccc

SEQ ID NO: 2111563 - DNA, 25 bp, Homo sapien
tgggggaggggtctgactgctgtcc

SEQ ID NO: 2111564 - DNA, 25 bp, Homo sapien
tttgatgctcttcaccgtcatcacg

SEQ ID NO: 2111565 - DNA, 25 bp, Homo sapien
ggaataaaacatggtggtgtctttg

SEQ ID NO: 2111566 - DNA, 25 bp, Homo sapien
tgcccaggatcttggaataaaacat

SEQ ID NO: 2111567 - DNA, 25 bp, Homo sapien
caccgtcatcacgatgtggtcaagt

SEQ ID NO: 2111568 - DNA, 25 bp, Homo sapien
atgctggatacttggttaacctttt

SEQ ID NO: 2111569 - DNA, 25 bp, Homo sapien
tccatgtagagactgcaaagttatc

SEQ ID NO: 2111570 - DNA, 25 bp, Homo sapien
gaaggatccatgttaagtgtcaaca

SEQ ID NO: 2111571 - DNA, 25 bp, Homo sapien
tggaagtccaaatattcagtttgga

SEQ ID NO: 2111572 - DNA, 25 bp, Homo sapien
acctctgtgatcagacatatgtcca

SEQ ID NO: 2111573 - DNA, 25 bp, Homo sapien
gccaggaactgggtgagcggctttg

SEQ ID NO: 2111574 - DNA, 25 bp, Homo sapien
tcaaattcctttcccacctcgtgga

SEQ ID NO: 2111575 - DNA, 25 bp, Homo sapien
ctcgtggaggttaaatttctggtct

SEQ ID NO: 2111576 - DNA, 25 bp, Homo sapien
actggcccctcctcaatagggacat

SEQ ID NO: 2111577 - DNA, 25 bp, Homo sapien
gcccctcctcaatagggacatcaca

SEQ ID NO: 2111578 - DNA, 25 bp, Homo sapien
ccctcctcaatagggacatcacaag

SEQ ID NO: 2111579 - DNA, 25 bp, Homo sapien
tggcccctcctcaatagggacatca

SEQ ID NO: 2111580 - DNA, 25 bp, Homo sapien
catgataggcccttttgcccctgtt

SEQ ID NO: 2111581 - DNA, 25 bp, Homo sapien
tcagatttctgtcggggtctcggaa

SEQ ID NO: 2111582 - DNA, 25 bp, Homo sapien
tcggaagtagatggacatgataggc

SEQ ID NO: 2111583 - DNA, 25 bp, Homo sapien
gatggacatgataggcccttttgcc

SEQ ID NO: 2111584 - DNA, 25 bp, Homo sapien
tgtgaagtgcctaagtcctcagtct

SEQ ID NO: 2111585 - DNA, 25 bp, Homo sapien
cagacatgtaggtttggtcccaaac

SEQ ID NO: 2111586 - DNA, 25 bp, Homo sapien
gagaggttatgcatttattaggcca

SEQ ID NO: 2111587 - DNA, 25 bp, Homo sapien
ccctcagcaggatgtgtgaagtgcc

SEQ ID NO: 2111588 - DNA, 25 bp, Homo sapien
gcatgtggatactcagctgtctcag

SEQ ID NO: 2111589 - DNA, 25 bp, Homo sapien
tgattcaagcgcgttacattagagt

SEQ ID NO: 2111590 - DNA, 25 bp, Homo sapien
aaaatcaattgctagctggacacag

SEQ ID NO: 2111591 - DNA, 25 bp, Homo sapien
caagcgcgttacattagagtctcat

SEQ ID NO: 2111592 - DNA, 25 bp, Homo sapien
ttatcagatgtaggcgaccgtggct

SEQ ID NO: 2111593 - DNA, 25 bp, Homo sapien
gggcagcagataagtcttatcagat

SEQ ID NO: 2111594 - DNA, 25 bp, Homo sapien
accgtggctgttggcgccgcagtaa

SEQ ID NO: 2111595 - DNA, 25 bp, Homo sapien
ggcgccgcagtaacaggctgtcttg

SEQ ID NO: 2111596 - DNA, 25 bp, Homo sapien
tgggctggtggttgcggagggttcg

SEQ ID NO: 2111597 - DNA, 25 bp, Homo sapien
gatgtggcaagctcagtgtgatccc

SEQ ID NO: 2111598 - DNA, 25 bp, Homo sapien
gggatgtggcaagctcagtgtgatc

SEQ ID NO: 2111599 - DNA, 25 bp, Homo sapien
ctggtggttgcggagggttcggccg

SEQ ID NO: 2111600 - DNA, 25 bp, Homo sapien
taggttgtgaaaacagacgaggttg

SEQ ID NO: 2111601 - DNA, 25 bp, Homo sapien
gttgtggagcagagacgagcttgga

SEQ ID NO: 2111602 - DNA, 25 bp, Homo sapien
ttttgggctcaggaataggttgtga

SEQ ID NO: 2111603 - DNA, 25 bp, Homo sapien
aggtggaatttgaaggtcagatatg

SEQ ID NO: 2111604 - DNA, 25 bp, Homo sapien
gggctgaagggagcagatataaggt

SEQ ID NO: 2111605 - DNA, 25 bp, Homo sapien
cgggctgaagggagcagatataagg

SEQ ID NO: 2111606 - DNA, 25 bp, Homo sapien
atcccagccctcaagggagggtctc

SEQ ID NO: 2111607 - DNA, 25 bp, Homo sapien
ttccaatcccagccctcaagggagg

SEQ ID NO: 2111608 - DNA, 25 bp, Homo sapien
cccagccctcaagggagggtctcac

SEQ ID NO: 2111609 - DNA, 25 bp, Homo sapien
tccaatcccagccctcaagggaggg

SEQ ID NO: 2111610 - DNA, 25 bp, Homo sapien
gccacatgcagctcaggataaggag

SEQ ID NO: 2111611 - DNA, 25 bp, Homo sapien
tactagtcccatacccctgaccgta

SEQ ID NO: 2111612 - DNA, 25 bp, Homo sapien
gctggccctggccctattgtgctgg

SEQ ID NO: 2111613 - DNA, 25 bp, Homo sapien
tgtccacgtgcctcttactagtccc

SEQ ID NO: 2111614 - DNA, 25 bp, Homo sapien
gtaggcctcagcgtccctgtagtag

SEQ ID NO: 2111615 - DNA, 25 bp, Homo sapien
cctgtagtaggccagtgccgcagct

SEQ ID NO: 2111616 - DNA, 25 bp, Homo sapien
ttctggtgtggaggacaccagagca

SEQ ID NO: 2111617 - DNA, 25 bp, Homo sapien
agaaaacccctgattctggtgtgga

SEQ ID NO: 2111618 - DNA, 25 bp, Homo sapien
tccacgaagcttgggagaggaatag

SEQ ID NO: 2111619 - DNA, 25 bp, Homo sapien
catacagttgagcaatgggtacacc

SEQ ID NO: 2111620 - DNA, 25 bp, Homo sapien
ttgaggcagggtagagccccgtctt

SEQ ID NO: 2111621 - DNA, 25 bp, Homo sapien
gggctcagccgctctgtcttcaaag

SEQ ID NO: 2111622 - DNA, 25 bp, Homo sapien
gcgttgcataggtagtggcctgtcc

SEQ ID NO: 2111623 - DNA, 25 bp, Homo sapien
gagtggctgttgctccgcagttcac

SEQ ID NO: 2111624 - DNA, 25 bp, Homo sapien
ataggtagtggcctgtcctgtccct

SEQ ID NO: 2111625 - DNA, 25 bp, Homo sapien
acagtggagtggctgttgctccgca

SEQ ID NO: 2111626 - DNA, 25 bp, Homo sapien
gggatccccactggcatttctccgc

SEQ ID NO: 2111627 - DNA, 25 bp, Homo sapien
cgccacagtgtcgtggtggtcgtct

SEQ ID NO: 2111628 - DNA, 25 bp, Homo sapien
gagtacctgcccgtttactgacaat

SEQ ID NO: 2111629 - DNA, 25 bp, Homo sapien
tcgtctggcagttggtgcactgagt

SEQ ID NO: 2111630 - DNA, 25 bp, Homo sapien
cccttttccagatgccttgcggttt

SEQ ID NO: 2111631 - DNA, 25 bp, Homo sapien
gggcccagtgtcaggcctgaagcca

SEQ ID NO: 2111632 - DNA, 25 bp, Homo sapien
tccgcatggtcagtggccggttcac

SEQ ID NO: 2111633 - DNA, 25 bp, Homo sapien
tcgagtctgaataccatccttccgc

SEQ ID NO: 2111634 - DNA, 25 bp, Homo sapien
aggtggctaacaggccctgacagca

SEQ ID NO: 2111635 - DNA, 25 bp, Homo sapien
ggagcccgtgggtgagcccagtagg

SEQ ID NO: 2111636 - DNA, 25 bp, Homo sapien
gcatgaggtggctaacaggccctga

SEQ ID NO: 2111637 - DNA, 25 bp, Homo sapien
ggaaggagcccgtgggtgagcccag

SEQ ID NO: 2111638 - DNA, 25 bp, Homo sapien
gcggagccaccacagtagtgctggt

SEQ ID NO: 2111639 - DNA, 25 bp, Homo sapien
gagcggagccaccacagtagtgctg

SEQ ID NO: 2111640 - DNA, 25 bp, Homo sapien
gctgagcggagccaccacagtagtg

SEQ ID NO: 2111641 - DNA, 25 bp, Homo sapien
tgagcggagccaccacagtagtgct

SEQ ID NO: 2111642 - DNA, 25 bp, Homo sapien
attctggctacaagaggagaaggac

SEQ ID NO: 2111643 - DNA, 25 bp, Homo sapien
tctggctacaagaggagaaggacac

SEQ ID NO: 2111644 - DNA, 25 bp, Homo sapien
agagacttgggttgtccagaattct

SEQ ID NO: 2111645 - DNA, 25 bp, Homo sapien
agaattctggctacaagaggagaag

SEQ ID NO: 2111646 - DNA, 25 bp, Homo sapien
tgggtccctgcaacccccatatccg

SEQ ID NO: 2111647 - DNA, 25 bp, Homo sapien
ctataatatggtcaggacctgtggg

SEQ ID NO: 2111648 - DNA, 25 bp, Homo sapien
aatatggtcaggacctgtgggtccc

SEQ ID NO: 2111649 - DNA, 25 bp, Homo sapien
tatggtcaggacctgtgggtccctg

SEQ ID NO: 2111650 - DNA, 25 bp, Homo sapien
cggccaaaataggcgtggtgacgat

SEQ ID NO: 2111651 - DNA, 25 bp, Homo sapien
ggtggtggcggccaaaataggcgtg

SEQ ID NO: 2111652 - DNA, 25 bp, Homo sapien
tggcggccaaaataggcgtggtgac

SEQ ID NO: 2111653 - DNA, 25 bp, Homo sapien
tggtggcggccaaaataggcgtggt

SEQ ID NO: 2111654 - DNA, 25 bp, Homo sapien
gacgcgccgtgatgacgtagcgcgg

SEQ ID NO: 2111655 - DNA, 25 bp, Homo sapien
ccgcgcgacgcgccgtgatgacgta

SEQ ID NO: 2111656 - DNA, 25 bp, Homo sapien
cgtgatgacgtagcgcgggcgggct

SEQ ID NO: 2111657 - DNA, 25 bp, Homo sapien
gacttcccgcgcgacgcgccgtgat

SEQ ID NO: 2111658 - DNA, 25 bp, Homo sapien
tgcctcggctatcgtcgctgtcgtc

SEQ ID NO: 2111659 - DNA, 25 bp, Homo sapien
cgtcgctgtcgtcccggatgccata

SEQ ID NO: 2111660 - DNA, 25 bp, Homo sapien
cagggctgcggtgcaagctttttct

SEQ ID NO: 2111661 - DNA, 25 bp, Homo sapien
tgcaagctttttcttgcctcggcta

SEQ ID NO: 2111662 - DNA, 25 bp, Homo sapien
actcattggacgcagcccctttctc

SEQ ID NO: 2111663 - DNA, 25 bp, Homo sapien
cctttctcaaactccgcccttggct

SEQ ID NO: 2111664 - DNA, 25 bp, Homo sapien
ccgcccttggctcgctccaccaagt

SEQ ID NO: 2111665 - DNA, 25 bp, Homo sapien
gctccactcattggacgcagcccct

SEQ ID NO: 2111666 - DNA, 25 bp, Homo sapien
tagcgtttcaaccagccccgctcct

SEQ ID NO: 2111667 - DNA, 25 bp, Homo sapien
atcccgcccctagcgtttcaaccag

SEQ ID NO: 2111668 - DNA, 25 bp, Homo sapien
cagatcccgcccctagcgtttcaac

SEQ ID NO: 2111669 - DNA, 25 bp, Homo sapien
actccgccagatcccgcccctagcg

SEQ ID NO: 2111670 - DNA, 25 bp, Homo sapien
tcgactccacccttaacgattcact

SEQ ID NO: 2111671 - DNA, 25 bp, Homo sapien
gactccacccttaacgattcactta

SEQ ID NO: 2111672 - DNA, 25 bp, Homo sapien
cgactccacccttaacgattcactt

SEQ ID NO: 2111673 - DNA, 25 bp, Homo sapien
tttcgactccacccttaacgattca

SEQ ID NO: 2111674 - DNA, 25 bp, Homo sapien
tcggcctatctcccgggataatcac

SEQ ID NO: 2111675 - DNA, 25 bp, Homo sapien
ggcctatctcccgggataatcaccc

SEQ ID NO: 2111676 - DNA, 25 bp, Homo sapien
ttcggcctatctcccgggataatca

SEQ ID NO: 2111677 - DNA, 25 bp, Homo sapien
cctatctcccgggataatcacccac

SEQ ID NO: 2111678 - DNA, 25 bp, Homo sapien
cgggctcacacagtccgtcttaggg

SEQ ID NO: 2111679 - DNA, 25 bp, Homo sapien
cagtccgtcttagggcctgcccttt

SEQ ID NO: 2111680 - DNA, 25 bp, Homo sapien
tgccctttcacggagcaatgagccc

SEQ ID NO: 2111681 - DNA, 25 bp, Homo sapien
actcaggtggccattctacccggcc

SEQ ID NO: 2111682 - DNA, 25 bp, Homo sapien
tgaggaggcttggcccctgccgcgg

SEQ ID NO: 2111683 - DNA, 25 bp, Homo sapien
aggaggcttggcccctgccgcggtt

SEQ ID NO: 2111684 - DNA, 25 bp, Homo sapien
gttgaggaggcttggcccctgccgc

SEQ ID NO: 2111685 - DNA, 25 bp, Homo sapien
agttgaggaggcttggcccctgccg

SEQ ID NO: 2111686 - DNA, 25 bp, Homo sapien
tgcctacttcttcgctgcctggttg

SEQ ID NO: 2111687 - DNA, 25 bp, Homo sapien
cgctgcctggttgtggtggaatcct

SEQ ID NO: 2111688 - DNA, 25 bp, Homo sapien
tacttcttcgctgcctggttgtggt

SEQ ID NO: 2111689 - DNA, 25 bp, Homo sapien
tcttcgctgcctggttgtggtggaa

SEQ ID NO: 2111690 - DNA, 25 bp, Homo sapien
tggggatagagcggggaacggctcc

SEQ ID NO: 2111691 - DNA, 25 bp, Homo sapien
gattggggatagagcggggaacggc

SEQ ID NO: 2111692 - DNA, 25 bp, Homo sapien
ctagattggggatagagcggggaac

SEQ ID NO: 2111693 - DNA, 25 bp, Homo sapien
tagattggggatagagcggggaacg

SEQ ID NO: 2111694 - DNA, 25 bp, Homo sapien
gcttggccgagcttcttcattttgc

SEQ ID NO: 2111695 - DNA, 25 bp, Homo sapien
tcttccattgcttggccgagcttct

SEQ ID NO: 2111696 - DNA, 25 bp, Homo sapien
cattgcttggccgagcttcttcatt

SEQ ID NO: 2111697 - DNA, 25 bp, Homo sapien
tggccgagcttcttcattttgcctt

SEQ ID NO: 2111698 - DNA, 25 bp, Homo sapien
catcccttgcagtcccacgattagg

SEQ ID NO: 2111699 - DNA, 25 bp, Homo sapien
atcccttgcagtcccacgattaggt

SEQ ID NO: 2111700 - DNA, 25 bp, Homo sapien
cagtgcttcagcctcaaggttcaga

SEQ ID NO: 2111701 - DNA, 25 bp, Homo sapien
agtgccagccagtgcttcagcctca

SEQ ID NO: 2111702 - DNA, 25 bp, Homo sapien
catttaactgctcatccaacaccaa

SEQ ID NO: 2111703 - DNA, 25 bp, Homo sapien
ggcaatggaattcatttaactgctc

SEQ ID NO: 2111704 - DNA, 25 bp, Homo sapien
ctggatcagttgctccttgatggca

SEQ ID NO: 2111705 - DNA, 25 bp, Homo sapien
tcctggatcagttgctccttgatgg

SEQ ID NO: 2111706 - DNA, 25 bp, Homo sapien
acacgcagcgatctaggaggccctc

SEQ ID NO: 2111707 - DNA, 25 bp, Homo sapien
tgaaaggacacgcagcgatctagga

SEQ ID NO: 2111708 - DNA, 25 bp, Homo sapien
ctgtgaaccaacatcagctcttcct

SEQ ID NO: 2111709 - DNA, 25 bp, Homo sapien
tgtgaaccaacatcagctcttcctt

SEQ ID NO: 2111710 - DNA, 25 bp, Homo sapien
tcagctcttccttttcagcaaaccg

SEQ ID NO: 2111711 - DNA, 25 bp, Homo sapien
gctcttccttttcagcaaaccgggc

SEQ ID NO: 2111712 - DNA, 25 bp, Homo sapien
gagaccatgacattgcttcccaaag

SEQ ID NO: 2111713 - DNA, 25 bp, Homo sapien
tactggtccccttgttacaggcgat

SEQ ID NO: 2111714 - DNA, 25 bp, Homo sapien
tcagaaaggctcagcgacttgccca

SEQ ID NO: 2111715 - DNA, 25 bp, Homo sapien
tacaggcgatgacacagattcagaa

SEQ ID NO: 2111716 - DNA, 25 bp, Homo sapien
gacacggagttctccctcattcatg

SEQ ID NO: 2111717 - DNA, 25 bp, Homo sapien
gataaactgagtcgtaggtgtctgc

SEQ ID NO: 2111718 - DNA, 25 bp, Homo sapien
tcgtaggtgtctgctaggacacgga

SEQ ID NO: 2111719 - DNA, 25 bp, Homo sapien
cggatgcagataaactgagtcgtag

SEQ ID NO: 2111720 - DNA, 25 bp, Homo sapien
cctgcccgcagagttctcatccata

SEQ ID NO: 2111721 - DNA, 25 bp, Homo sapien
ggggaccccaagattgccaccattc

SEQ ID NO: 2111722 - DNA, 25 bp, Homo sapien
gagaacagccctatccactcagctg

SEQ ID NO: 2111723 - DNA, 25 bp, Homo sapien
gggagagaacagccctatccactca

SEQ ID NO: 2111724 - DNA, 25 bp, Homo sapien
ctaatgatggccatgccattccgga

SEQ ID NO: 2111725 - DNA, 25 bp, Homo sapien
ccaggcaggcacaggagtatgagtt

SEQ ID NO: 2111726 - DNA, 25 bp, Homo sapien
tggccatgccattccggatctcagc

SEQ ID NO: 2111727 - DNA, 25 bp, Homo sapien
aggaccgcatccaccagcctgagga

SEQ ID NO: 2111728 - DNA, 25 bp, Homo sapien
ctacctcccatgagaggaggcaggt

SEQ ID NO: 2111729 - DNA, 25 bp, Homo sapien
gtggttccaatgactacctcccatg

SEQ ID NO: 2111730 - DNA, 25 bp, Homo sapien
tatttcttgaataagactttgtggg

SEQ ID NO: 2111731 - DNA, 25 bp, Homo sapien
gactttgtgggaggacacatgagtc

SEQ ID NO: 2111732 - DNA, 25 bp, Homo sapien
catgcaatagccatccataagactg

SEQ ID NO: 2111733 - DNA, 25 bp, Homo sapien
tccggatgcggtgtttctgttgagc

SEQ ID NO: 2111734 - DNA, 25 bp, Homo sapien
ttctgttgagcatagcgggctgcca

SEQ ID NO: 2111735 - DNA, 25 bp, Homo sapien
catccataagactgtgctgggcgtg

SEQ ID NO: 2111736 - DNA, 25 bp, Homo sapien
cgtggtgcacatcccaatctacgat

SEQ ID NO: 2111737 - DNA, 25 bp, Homo sapien
tgttccttgaccgtggtgcacatcc

SEQ ID NO: 2111738 - DNA, 25 bp, Homo sapien
cacatcccaatctacgataaggacc

SEQ ID NO: 2111739 - DNA, 25 bp, Homo sapien
aactgtgttccttgaccgtggtgca

SEQ ID NO: 2111740 - DNA, 25 bp, Homo sapien
taaatgttgaagcattaaattccag

SEQ ID NO: 2111741 - DNA, 25 bp, Homo sapien
tatctgggattagctttgaaggaaa

SEQ ID NO: 2111742 - DNA, 25 bp, Homo sapien
gatgaaatgagatcggccaatgagt

SEQ ID NO: 2111743 - DNA, 25 bp, Homo sapien
ggagaaattatatggtatctgggat

SEQ ID NO: 2111744 - DNA, 25 bp, Homo sapien
tcctactaccccattcaaaatacag

SEQ ID NO: 2111745 - DNA, 25 bp, Homo sapien
aaacagcagaactagcactcaagct

SEQ ID NO: 2111746 - DNA, 25 bp, Homo sapien
gattgatagcacaggtttacttcct

SEQ ID NO: 2111747 - DNA, 25 bp, Homo sapien
caaaataagttcaaccaccttcaag

SEQ ID NO: 2111748 - DNA, 25 bp, Homo sapien
ggtactctagatcatgtccgcccac

SEQ ID NO: 2111749 - DNA, 25 bp, Homo sapien
tgaccgacacgcaaaacagatactg

SEQ ID NO: 2111750 - DNA, 25 bp, Homo sapien
tagtagtaacagcaggtcaaaccct

SEQ ID NO: 2111751 - DNA, 25 bp, Homo sapien
gatactgaaaagatgcgatgcacgt

SEQ ID NO: 2111752 - DNA, 25 bp, Homo sapien
ttggccttggccgaaacctgtggtg

SEQ ID NO: 2111753 - DNA, 25 bp, Homo sapien
tggaccagttagaggccttcaggtg

SEQ ID NO: 2111754 - DNA, 25 bp, Homo sapien
taccctgctcgtagcggtggatgga

SEQ ID NO: 2111755 - DNA, 25 bp, Homo sapien
tggttccaaggcacattgatggtat

SEQ ID NO: 2111756 - DNA, 25 bp, Homo sapien
aagcagcaatgtagtcagcatcccg

SEQ ID NO: 2111757 - DNA, 25 bp, Homo sapien
tcgagggcgactggcagcaggacgt

SEQ ID NO: 2111758 - DNA, 25 bp, Homo sapien
gtgcaggaaagcagcaatgtagtca

SEQ ID NO: 2111759 - DNA, 25 bp, Homo sapien
gcaatgtagtcagcatcccgcatcc

SEQ ID NO: 2111760 - DNA, 25 bp, Homo sapien
ttcaaggccactcctcctcccaaca

SEQ ID NO: 2111761 - DNA, 25 bp, Homo sapien
tgaggctacctaccctcacagccta

SEQ ID NO: 2111762 - DNA, 25 bp, Homo sapien
tccatgaggctacctaccctcacag

SEQ ID NO: 2111763 - DNA, 25 bp, Homo sapien
ggggaacagactccatgaggctacc

SEQ ID NO: 2111764 - DNA, 25 bp, Homo sapien
aagggggaacagactccatgaggct

SEQ ID NO: 2111765 - DNA, 25 bp, Homo sapien
cttggggtccccttgcagggcatca

SEQ ID NO: 2111766 - DNA, 25 bp, Homo sapien
tggggtccccttgcagggcatcaaa

SEQ ID NO: 2111767 - DNA, 25 bp, Homo sapien
ggtccccttgcagggcatcaaatcc

SEQ ID NO: 2111768 - DNA, 25 bp, Homo sapien
cccttgcagggcatcaaatccagca

SEQ ID NO: 2111769 - DNA, 25 bp, Homo sapien
tccatgcaacccacctgccgcccca

SEQ ID NO: 2111770 - DNA, 25 bp, Homo sapien
ctggggggacatggagggtcagcct

SEQ ID NO: 2111771 - DNA, 25 bp, Homo sapien
gacatggagggtcagcctggctcca

SEQ ID NO: 2111772 - DNA, 25 bp, Homo sapien
agcctggctccatgcaacccacctg

SEQ ID NO: 2111773 - DNA, 25 bp, Homo sapien
ttagctgggcgaaccctgccggagt

SEQ ID NO: 2111774 - DNA, 25 bp, Homo sapien
ccatgagcaggtgggttagctgggc

SEQ ID NO: 2111775 - DNA, 25 bp, Homo sapien
aaccctgccggagtggcggccatct

SEQ ID NO: 2111776 - DNA, 25 bp, Homo sapien
gacaggatcagcttgcctcctgcca

SEQ ID NO: 2111777 - DNA, 25 bp, Homo sapien
caaggttgtccagctagtaagtgaa

SEQ ID NO: 2111778 - DNA, 25 bp, Homo sapien
gaaaggaccagacatgaccagggaa

SEQ ID NO: 2111779 - DNA, 25 bp, Homo sapien
caaggaacttagaagggtgcctcac

SEQ ID NO: 2111780 - DNA, 25 bp, Homo sapien
tttatagaaggaaagcggaggcaca

SEQ ID NO: 2111781 - DNA, 25 bp, Homo sapien
gccagggcgcggaggttgtagccac

SEQ ID NO: 2111782 - DNA, 25 bp, Homo sapien
gcgaagcactgacgccttcagccag

SEQ ID NO: 2111783 - DNA, 25 bp, Homo sapien
gaagggtgtggagcgaagcactgac

SEQ ID NO: 2111784 - DNA, 25 bp, Homo sapien
gtgtggagcgaagcactgacgcctt

SEQ ID NO: 2111785 - DNA, 25 bp, Homo sapien
caggtgactccagcatggggcaagg

SEQ ID NO: 2111786 - DNA, 25 bp, Homo sapien
atctcacaagaacctcccagaaggg

SEQ ID NO: 2111787 - DNA, 25 bp, Homo sapien
ttgatctcacaagaacctcccagaa

SEQ ID NO: 2111788 - DNA, 25 bp, Homo sapien
tcacaagaacctcccagaagggctc

SEQ ID NO: 2111789 - DNA, 25 bp, Homo sapien
gatctcacaagaacctcccagaagg

SEQ ID NO: 2111790 - DNA, 25 bp, Homo sapien
cactggccatgtcaggattgggagc

SEQ ID NO: 2111791 - DNA, 25 bp, Homo sapien
tcctcgctctcctctacattgtcct

SEQ ID NO: 2111792 - DNA, 25 bp, Homo sapien
tgtagcactggccatgtcaggattg

SEQ ID NO: 2111793 - DNA, 25 bp, Homo sapien
atgttgtccctctccacggtctcag

SEQ ID NO: 2111794 - DNA, 25 bp, Homo sapien
tcccacaagttgcagtgattcatca

SEQ ID NO: 2111795 - DNA, 25 bp, Homo sapien
cacaagttgcagtgattcatcatat

SEQ ID NO: 2111796 - DNA, 25 bp, Homo sapien
tgtcccacaagttgcagtgattcat

SEQ ID NO: 2111797 - DNA, 25 bp, Homo sapien
cccacaagttgcagtgattcatcat

SEQ ID NO: 2111798 - DNA, 25 bp, Homo sapien
cagctcctccagacggcacatgatc

SEQ ID NO: 2111799 - DNA, 25 bp, Homo sapien
gacggcacatgatccgcaagatgcg

SEQ ID NO: 2111800 - DNA, 25 bp, Homo sapien
ctccagacggcacatgatccgcaag

SEQ ID NO: 2111801 - DNA, 25 bp, Homo sapien
ggtgtcagggtgaggcagcgcccgg

SEQ ID NO: 2111802 - DNA, 25 bp, Homo sapien
cagcgccagtggcaagctgtgcaca

SEQ ID NO: 2111803 - DNA, 25 bp, Homo sapien
caagctgtgcacaggcgaaggtact

SEQ ID NO: 2111804 - DNA, 25 bp, Homo sapien
aagttggaactctcacggtgcagct

SEQ ID NO: 2111805 - DNA, 25 bp, Homo sapien
gtggcccggagatgacccacgtact

SEQ ID NO: 2111806 - DNA, 25 bp, Homo sapien
aggccctgcttgactctctcagagc

SEQ ID NO: 2111807 - DNA, 25 bp, Homo sapien
ctcaggccctgcttgactctctcag

SEQ ID NO: 2111808 - DNA, 25 bp, Homo sapien
tcctcaggccctgcttgactctctc

SEQ ID NO: 2111809 - DNA, 25 bp, Homo sapien
tttcctcaggccctgcttgactctc

SEQ ID NO: 2111810 - DNA, 25 bp, Homo sapien
tagggcatgcccactgatagtctgg

SEQ ID NO: 2111811 - DNA, 25 bp, Homo sapien
gaaaaagcaaaaaccgcaagctgca

SEQ ID NO: 2111812 - DNA, 25 bp, Homo sapien
tgggcatggcgagcagccacagcca

SEQ ID NO: 2111813 - DNA, 25 bp, Homo sapien
aaaccgcaagctgcatcctgctctg

SEQ ID NO: 2111814 - DNA, 25 bp, Homo sapien
tgcccggtaggcctgagcaagtgct

SEQ ID NO: 2111815 - DNA, 25 bp, Homo sapien
gcaggaccctgggtcctatcagtta

SEQ ID NO: 2111816 - DNA, 25 bp, Homo sapien
gggctggttcgtgggtcttctggag

SEQ ID NO: 2111817 - DNA, 25 bp, Homo sapien
tcagttaaggagaaaagtctgatcc

SEQ ID NO: 2111818 - DNA, 25 bp, Homo sapien
tggacatcccaatccacaatcagga

SEQ ID NO: 2111819 - DNA, 25 bp, Homo sapien
tccattaccgtggtggacatcccaa

SEQ ID NO: 2111820 - DNA, 25 bp, Homo sapien
ggggtcatcctcaaacatgtgctga

SEQ ID NO: 2111821 - DNA, 25 bp, Homo sapien
catgtgctgagttccattaccgtgg

SEQ ID NO: 2111822 - DNA, 25 bp, Homo sapien
ctcgtaggcaatgggaagcaccagg

SEQ ID NO: 2111823 - DNA, 25 bp, Homo sapien
aggtagtcagcatcacccatgcggg

SEQ ID NO: 2111824 - DNA, 25 bp, Homo sapien
gggcccgttccatgccacgttgacg

SEQ ID NO: 2111825 - DNA, 25 bp, Homo sapien
ccaggcgatgccaggcagctaggta

SEQ ID NO: 2111826 - DNA, 25 bp, Homo sapien
ggcataaccctcaggtgacacctgg

SEQ ID NO: 2111827 - DNA, 25 bp, Homo sapien
cataaccctcaggtgacacctggca

SEQ ID NO: 2111828 - DNA, 25 bp, Homo sapien
taaccctcaggtgacacctggcagc

SEQ ID NO: 2111829 - DNA, 25 bp, Homo sapien
gtgggcataaccctcaggtgacacc

SEQ ID NO: 2111830 - DNA, 25 bp, Homo sapien
gataaggataatgcggccactggca

SEQ ID NO: 2111831 - DNA, 25 bp, Homo sapien
taaggataatgcggccactggcaag

SEQ ID NO: 2111832 - DNA, 25 bp, Homo sapien
ggataaggataatgcggccactggc

SEQ ID NO: 2111833 - DNA, 25 bp, Homo sapien
aggataaggataatgcggccactgg

SEQ ID NO: 2111834 - DNA, 25 bp, Homo sapien
gattagcctgcctcataaagatgag

SEQ ID NO: 2111835 - DNA, 25 bp, Homo sapien
gtaaaaagcacaaaccctggagcca

SEQ ID NO: 2111836 - DNA, 25 bp, Homo sapien
tgccaggcattcctccatgattagc

SEQ ID NO: 2111837 - DNA, 25 bp, Homo sapien
aatgtgccatctcaggctagtcatc

SEQ ID NO: 2111838 - DNA, 25 bp, Homo sapien
caagacgactgctgtgaacccatac

SEQ ID NO: 2111839 - DNA, 25 bp, Homo sapien
cacaggcgctcaatctatacaggaa

SEQ ID NO: 2111840 - DNA, 25 bp, Homo sapien
gaaatccgtcttcacactgtccagg

SEQ ID NO: 2111841 - DNA, 25 bp, Homo sapien
cagagtggttagatgacttgtccga

SEQ ID NO: 2111842 - DNA, 25 bp, Homo sapien
tcatgacccgtaagctgcgccagta

SEQ ID NO: 2111843 - DNA, 25 bp, Homo sapien
tggtctcagtgattgaggccagggc

SEQ ID NO: 2111844 - DNA, 25 bp, Homo sapien
taagctgcgccagtatctgcgatgg

SEQ ID NO: 2111845 - DNA, 25 bp, Homo sapien
cagtatctgcgatggacttggatgg

SEQ ID NO: 2111846 - DNA, 25 bp, Homo sapien
tcttggtgaccaacttagaactgga

SEQ ID NO: 2111847 - DNA, 25 bp, Homo sapien
caaatgatgccgaggtgactttccc

SEQ ID NO: 2111848 - DNA, 25 bp, Homo sapien
tcgtgtggtcatccgctcagctaac

SEQ ID NO: 2111849 - DNA, 25 bp, Homo sapien
ggagtttggatcagctcggtgcccc

SEQ ID NO: 2111850 - DNA, 25 bp, Homo sapien
gattcgctgcctagctccaaggtcc

SEQ ID NO: 2111851 - DNA, 25 bp, Homo sapien
ggtcctgagactcccaatcagtgta

SEQ ID NO: 2111852 - DNA, 25 bp, Homo sapien
aatcagtgtactgggagatatctgg

SEQ ID NO: 2111853 - DNA, 25 bp, Homo sapien
ttcgctgcctagctccaaggtcctg

SEQ ID NO: 2111854 - DNA, 25 bp, Homo sapien
cctgcatcagcatcgaatcagccat

SEQ ID NO: 2111855 - DNA, 25 bp, Homo sapien
tgcctctcctagtaggttctcctct

SEQ ID NO: 2111856 - DNA, 25 bp, Homo sapien
gctgcctctcctagtaggttctcct

SEQ ID NO: 2111857 - DNA, 25 bp, Homo sapien
catcagcatcgaatcagccatgtcc

SEQ ID NO: 2111858 - DNA, 25 bp, Homo sapien
gtggtgtcacagcataaaatatggc

SEQ ID NO: 2111859 - DNA, 25 bp, Homo sapien
ctgccaccaaatggggacaccaggg

SEQ ID NO: 2111860 - DNA, 25 bp, Homo sapien
agtggtgtcacagcataaaatatgg

SEQ ID NO: 2111861 - DNA, 25 bp, Homo sapien
ggcagtggtgtcacagcataaaata

SEQ ID NO: 2111862 - DNA, 25 bp, Homo sapien
ccacagtccccacaaggttgggtca

SEQ ID NO: 2111863 - DNA, 25 bp, Homo sapien
tccccacaaggttgggtcacgtcta

SEQ ID NO: 2111864 - DNA, 25 bp, Homo sapien
ccacaaggttgggtcacgtctaggc

SEQ ID NO: 2111865 - DNA, 25 bp, Homo sapien
aggttgggtcacgtctaggcctgct

SEQ ID NO: 2111866 - DNA, 25 bp, Homo sapien
tggccattgatgtaacgaccacagt

SEQ ID NO: 2111867 - DNA, 25 bp, Homo sapien
caggctgacaggtcgatgtagctga

SEQ ID NO: 2111868 - DNA, 25 bp, Homo sapien
gaggaccagcgggtgtccagaattt

SEQ ID NO: 2111869 - DNA, 25 bp, Homo sapien
tgacagtagtaacaccaggctgaca

SEQ ID NO: 2111870 - DNA, 25 bp, Homo sapien
aaataatcacatgaggcagccatgc

SEQ ID NO: 2111871 - DNA, 25 bp, Homo sapien
gagagagtgaggacccctctacctc

SEQ ID NO: 2111872 - DNA, 25 bp, Homo sapien
tctgtcttctggactatcccacagc

SEQ ID NO: 2111873 - DNA, 25 bp, Homo sapien
agtgtgcacgtgtcgaagggtctac

SEQ ID NO: 2111874 - DNA, 25 bp, Homo sapien
tctggtgggcgatgttcttcacatc

SEQ ID NO: 2111875 - DNA, 25 bp, Homo sapien
ggtgggcgatgttcttcacatctag

SEQ ID NO: 2111876 - DNA, 25 bp, Homo sapien
ggcgatgttcttcacatctaggaga

SEQ ID NO: 2111877 - DNA, 25 bp, Homo sapien
ttctggtgggcgatgttcttcacat

SEQ ID NO: 2111878 - DNA, 25 bp, Homo sapien
gtgggtggggcatatcctccccaaa

SEQ ID NO: 2111879 - DNA, 25 bp, Homo sapien
gtgtgggtggggcatatcctcccca

SEQ ID NO: 2111880 - DNA, 25 bp, Homo sapien
tgggtggggcatatcctccccaaac

SEQ ID NO: 2111881 - DNA, 25 bp, Homo sapien
ttagtgtgggtggggcatatcctcc

SEQ ID NO: 2111882 - DNA, 25 bp, Homo sapien
caaggtacaggctggaatgagctac

SEQ ID NO: 2111883 - DNA, 25 bp, Homo sapien
tgagctacagctggtctatcgtggg

SEQ ID NO: 2111884 - DNA, 25 bp, Homo sapien
caaaggatattcaggatgggatgca

SEQ ID NO: 2111885 - DNA, 25 bp, Homo sapien
ggagatccacaattaatcgtcgcag

SEQ ID NO: 2111886 - DNA, 25 bp, Homo sapien
tgcctgccagttaactcccctcccg

SEQ ID NO: 2111887 - DNA, 25 bp, Homo sapien
atatgcaaccttgccatgcctgcca

SEQ ID NO: 2111888 - DNA, 25 bp, Homo sapien
gtagtggtgcccctcaagcaggcaa

SEQ ID NO: 2111889 - DNA, 25 bp, Homo sapien
cctcccgccaatgttatcctcatga

SEQ ID NO: 2111890 - DNA, 25 bp, Homo sapien
tggcggggggcgacgctgctccccg

SEQ ID NO: 2111891 - DNA, 25 bp, Homo sapien
cgcgctgggacgctctgacaggcct

SEQ ID NO: 2111892 - DNA, 25 bp, Homo sapien
cggcggcggttgggggagtggacat

SEQ ID NO: 2111893 - DNA, 25 bp, Homo sapien
tgtgtccgtggggaggcgggcgcgc

SEQ ID NO: 2111894 - DNA, 25 bp, Homo sapien
gtgtgagcagcgtcgcccgggcatc

SEQ ID NO: 2111895 - DNA, 25 bp, Homo sapien
gccaggtcgtgctttcccggacgag

SEQ ID NO: 2111896 - DNA, 25 bp, Homo sapien
cgaaaccaggactccacttcgggct

SEQ ID NO: 2111897 - DNA, 25 bp, Homo sapien
caaagctcggagtgcggaagggtcc

SEQ ID NO: 2111898 - DNA, 25 bp, Homo sapien
acgtggagggagaggtcggcttctg

SEQ ID NO: 2111899 - DNA, 25 bp, Homo sapien
cgtggagggagaggtcggcttctgg

SEQ ID NO: 2111900 - DNA, 25 bp, Homo sapien
gtggagggagaggtcggcttctggg

SEQ ID NO: 2111901 - DNA, 25 bp, Homo sapien
tggagggagaggtcggcttctgggg

SEQ ID NO: 2111902 - DNA, 25 bp, Homo sapien
tcctaatggctgttgccacgactcc

SEQ ID NO: 2111903 - DNA, 25 bp, Homo sapien
cctcagctctgagggatccctggga

SEQ ID NO: 2111904 - DNA, 25 bp, Homo sapien
ccctgcttagtgcatcctaatggct

SEQ ID NO: 2111905 - DNA, 25 bp, Homo sapien
cctgggaatagtcactggcggcgtt

SEQ ID NO: 2111906 - DNA, 25 bp, Homo sapien
ggtgagagacaacaaactaggttaa

SEQ ID NO: 2111907 - DNA, 25 bp, Homo sapien
caaggacatggagttgggcaataaa

SEQ ID NO: 2111908 - DNA, 25 bp, Homo sapien
ttatattctggtcggggtgagagac

SEQ ID NO: 2111909 - DNA, 25 bp, Homo sapien
gcaaggacatggagttgggcaataa

SEQ ID NO: 2111910 - DNA, 25 bp, Homo sapien
aagagaagaagcaagacaacagggg

SEQ ID NO: 2111911 - DNA, 25 bp, Homo sapien
gatacgttaggggagaccatttgag

SEQ ID NO: 2111912 - DNA, 25 bp, Homo sapien
gaagcaagacaacaggggatacgtt

SEQ ID NO: 2111913 - DNA, 25 bp, Homo sapien
gcctattgtgtgctgatcaccttcc

SEQ ID NO: 2111914 - DNA, 25 bp, Homo sapien
ggcagctcagggaagagacgtgggc

SEQ ID NO: 2111915 - DNA, 25 bp, Homo sapien
agcaggcagctcagggaagagacgt

SEQ ID NO: 2111916 - DNA, 25 bp, Homo sapien
agctcagggaagagacgtgggcagc

SEQ ID NO: 2111917 - DNA, 25 bp, Homo sapien
gcaggcagctcagggaagagacgtg

SEQ ID NO: 2111918 - DNA, 25 bp, Homo sapien
atccctgcggcgtgcctgagcccgg

SEQ ID NO: 2111919 - DNA, 25 bp, Homo sapien
ctgcggcgtgcctgagcccggtggg

SEQ ID NO: 2111920 - DNA, 25 bp, Homo sapien
ggccaggcccaggtcgaaggtgcca

SEQ ID NO: 2111921 - DNA, 25 bp, Homo sapien
tgccaacatccctgcggcgtgcctg

SEQ ID NO: 2111922 - DNA, 25 bp, Homo sapien
gcccatatctgctgcagctggatca

SEQ ID NO: 2111923 - DNA, 25 bp, Homo sapien
tggtcctccacgaagcactggtggt

SEQ ID NO: 2111924 - DNA, 25 bp, Homo sapien
cacgccttgccgtgttttggccgag

SEQ ID NO: 2111925 - DNA, 25 bp, Homo sapien
actggtcacgcagggccctatggat

SEQ ID NO: 2111926 - DNA, 25 bp, Homo sapien
ccaagtgaaaacaagagagatgtcc

SEQ ID NO: 2111927 - DNA, 25 bp, Homo sapien
aaaagcaacattaggcactcccatg

SEQ ID NO: 2111928 - DNA, 25 bp, Homo sapien
aaatgaacaatcaccctggcctggg

SEQ ID NO: 2111929 - DNA, 25 bp, Homo sapien
gatgtgtccctcaaagctagttgcc

SEQ ID NO: 2111930 - DNA, 25 bp, Homo sapien
gccatggcaaccgccagctctccac

SEQ ID NO: 2111931 - DNA, 25 bp, Homo sapien
ttacaggcatagctactgctgccag

SEQ ID NO: 2111932 - DNA, 25 bp, Homo sapien
ggcatagctactgctgccagcctaa

SEQ ID NO: 2111933 - DNA, 25 bp, Homo sapien
tacaggcatagctactgctgccagc

SEQ ID NO: 2111934 - DNA, 25 bp, Homo sapien
tagctactgctgccagcctaatttt

SEQ ID NO: 2111935 - DNA, 25 bp, Homo sapien
actcagggatgaacaagcgctgact

SEQ ID NO: 2111936 - DNA, 25 bp, Homo sapien
catccactcagggatgaacaagcgc

SEQ ID NO: 2111937 - DNA, 25 bp, Homo sapien
tccactcagggatgaacaagcgctg

SEQ ID NO: 2111938 - DNA, 25 bp, Homo sapien
taccatgcagcgcatgcctggtcca

SEQ ID NO: 2111939 - DNA, 25 bp, Homo sapien
tttgagcgactcaatgccgggcagg

SEQ ID NO: 2111940 - DNA, 25 bp, Homo sapien
taaagagtcctcagcggtgacagct

SEQ ID NO: 2111941 - DNA, 25 bp, Homo sapien
taagggtttcctctgcacaaactgc

SEQ ID NO: 2111942 - DNA, 25 bp, Homo sapien
tgctccagtggcgaatacctcgaga

SEQ ID NO: 2111943 - DNA, 25 bp, Homo sapien
gaaagtaactggactacgctcagga

SEQ ID NO: 2111944 - DNA, 25 bp, Homo sapien
gacatgcggtatagcgacccaatcg

SEQ ID NO: 2111945 - DNA, 25 bp, Homo sapien
tcgattggccaatgagagtgcgtcc

SEQ ID NO: 2111946 - DNA, 25 bp, Homo sapien
tccggaatattgctgcgacgccaag

SEQ ID NO: 2111947 - DNA, 25 bp, Homo sapien
aaggctgtcacaccgcccgtctctc

SEQ ID NO: 2111948 - DNA, 25 bp, Homo sapien
gcccgtctctctcgtgtcgccgcta

SEQ ID NO: 2111949 - DNA, 25 bp, Homo sapien
gtcacaccgcccgtctctctcgtgt

SEQ ID NO: 2111950 - DNA, 25 bp, Homo sapien
tctctctcgtgtcgccgctacgata

SEQ ID NO: 2111951 - DNA, 25 bp, Homo sapien
catgactgccgggtgggagaaacca

SEQ ID NO: 2111952 - DNA, 25 bp, Homo sapien
tcagaaatgggctcatccagcgtcc

SEQ ID NO: 2111953 - DNA, 25 bp, Homo sapien
ggcccctccgcacttcagaaatggg

SEQ ID NO: 2111954 - DNA, 25 bp, Homo sapien
agaggtaggtggcaatatcatcgca

SEQ ID NO: 2111955 - DNA, 25 bp, Homo sapien
taaacatgtactcatctgactccga

SEQ ID NO: 2111956 - DNA, 25 bp, Homo sapien
caaatgaaccagtagctgggtggac

SEQ ID NO: 2111957 - DNA, 25 bp, Homo sapien
caagcagctcagataaagattccta

SEQ ID NO: 2111958 - DNA, 25 bp, Homo sapien
gattcctatctggatcccgtaacca

SEQ ID NO: 2111959 - DNA, 25 bp, Homo sapien
gggtctgcagcgcaacgggcagcgg

SEQ ID NO: 2111960 - DNA, 25 bp, Homo sapien
gcgggtctgcagcgcaacgggcagc

SEQ ID NO: 2111961 - DNA, 25 bp, Homo sapien
gtctgcagcgcaacgggcagcggca

SEQ ID NO: 2111962 - DNA, 25 bp, Homo sapien
tctgcagcgcaacgggcagcggcat

SEQ ID NO: 2111963 - DNA, 25 bp, Homo sapien
tagtcctcggcaatgatctcttcct

SEQ ID NO: 2111964 - DNA, 25 bp, Homo sapien
caggatcatcgtcatagtcctcggc

SEQ ID NO: 2111965 - DNA, 25 bp, Homo sapien
tcgtcatagtcctcggcaatgatct

SEQ ID NO: 2111966 - DNA, 25 bp, Homo sapien
cctcgtagtccacaggatcatcgtc

SEQ ID NO: 2111967 - DNA, 25 bp, Homo sapien
ggccgcaggaaagaagtgtcagcac

SEQ ID NO: 2111968 - DNA, 25 bp, Homo sapien
tgccttggatcctcaactcttgtct

SEQ ID NO: 2111969 - DNA, 25 bp, Homo sapien
cagtctctgcctatacctgccccat

SEQ ID NO: 2111970 - DNA, 25 bp, Homo sapien
aggcaggatccccagaatctcttct

SEQ ID NO: 2111971 - DNA, 25 bp, Homo sapien
agccaggatacaaggtctgtgtctg

SEQ ID NO: 2111972 - DNA, 25 bp, Homo sapien
tcttggccgatttggtaaccacgga

SEQ ID NO: 2111973 - DNA, 25 bp, Homo sapien
tctgagcttcttggccgatttggta

SEQ ID NO: 2111974 - DNA, 25 bp, Homo sapien
gagagccaggatacaaggtctgtgt

SEQ ID NO: 2111975 - DNA, 25 bp, Homo sapien
cttgtcatggctccggtccaacttt

SEQ ID NO: 2111976 - DNA, 25 bp, Homo sapien
ggcccctgtccgacttgtcatggct

SEQ ID NO: 2111977 - DNA, 25 bp, Homo sapien
tcatggctgcggtccgacttgtcat

SEQ ID NO: 2111978 - DNA, 25 bp, Homo sapien
tgcggtccgacttgtcatggcccct

SEQ ID NO: 2111979 - DNA, 25 bp, Homo sapien
ccggtctgacttgtcgtggcccctg

SEQ ID NO: 2111980 - DNA, 25 bp, Homo sapien
ctgtcagacttgtcgtggccccggt

SEQ ID NO: 2111981 - DNA, 25 bp, Homo sapien
cgctctcgatccctgtcagacttgt

SEQ ID NO: 2111982 - DNA, 25 bp, Homo sapien
ttgtcatagccacgctctcgatccc

SEQ ID NO: 2111983 - DNA, 25 bp, Homo sapien
gtcccgatcccgttccctgtctcgc

SEQ ID NO: 2111984 - DNA, 25 bp, Homo sapien
tgccttgtcatacccgcggtcccga

SEQ ID NO: 2111985 - DNA, 25 bp, Homo sapien
ggtggcgccgttctttgccctcttc

SEQ ID NO: 2111986 - DNA, 25 bp, Homo sapien
tcctcccggcgatggtggcgccgtt

SEQ ID NO: 2111987 - DNA, 25 bp, Homo sapien
cttgttggtctcaccgagccccatt

SEQ ID NO: 2111988 - DNA, 25 bp, Homo sapien
gttggtctcaccgagccccattctg

SEQ ID NO: 2111989 - DNA, 25 bp, Homo sapien
agggaaggcttcctcacgcagtgca

SEQ ID NO: 2111990 - DNA, 25 bp, Homo sapien
gcagtgcaccctgcaccttgttggt

SEQ ID NO: 2111991 - DNA, 25 bp, Homo sapien
cagggcaaagtcttcaatagaggca

SEQ ID NO: 2111992 - DNA, 25 bp, Homo sapien
gaaatgaagcccctggctgccatgt

SEQ ID NO: 2111993 - DNA, 25 bp, Homo sapien
gagcccctgatcactgagccccacc

SEQ ID NO: 2111994 - DNA, 25 bp, Homo sapien
aaagtcttcaatagaggcaccagga

SEQ ID NO: 2111995 - DNA, 25 bp, Homo sapien
agggtccatggggtctaactcttca

SEQ ID NO: 2111996 - DNA, 25 bp, Homo sapien
gggcgtctgagtatgagctagggtc

SEQ ID NO: 2111997 - DNA, 25 bp, Homo sapien
tctgagtatgagctagggtccatgg

SEQ ID NO: 2111998 - DNA, 25 bp, Homo sapien
cgtctgagtatgagctagggtccat

SEQ ID NO: 2111999 - DNA, 25 bp, Homo sapien
gtgatgtggcggacacagcccacct

SEQ ID NO: 2112000 - DNA, 25 bp, Homo sapien
acctggtcccaatgaggaatggagg

SEQ ID NO: 2112001 - DNA, 25 bp, Homo sapien
atggtgtccacgtactgagtcaaga

SEQ ID NO: 2112002 - DNA, 25 bp, Homo sapien
gatgggtgatgtggcggacacagcc

SEQ ID NO: 2112003 - DNA, 25 bp, Homo sapien
cagtcttggcctcattccgcttggg

SEQ ID NO: 2112004 - DNA, 25 bp, Homo sapien
cctgctgcttggttcgggaggcctc

SEQ ID NO: 2112005 - DNA, 25 bp, Homo sapien
tggatacggccgctgctggaagagg

SEQ ID NO: 2112006 - DNA, 25 bp, Homo sapien
tggggagtcctgttgaccacgtgcc

SEQ ID NO: 2112007 - DNA, 25 bp, Homo sapien
acccagggccagggaggccgaagct

SEQ ID NO: 2112008 - DNA, 25 bp, Homo sapien
ggcccagctgggaccaaactctgat

SEQ ID NO: 2112009 - DNA, 25 bp, Homo sapien
tccacgtgtagctttctgaccaggt

SEQ ID NO: 2112010 - DNA, 25 bp, Homo sapien
ccaaggtgaagggttcctagccgct

SEQ ID NO: 2112011 - DNA, 25 bp, Homo sapien
ccgctgggattgaagacattggcct

SEQ ID NO: 2112012 - DNA, 25 bp, Homo sapien
tactagttccgtcttttgtgtggcc

SEQ ID NO: 2112013 - DNA, 25 bp, Homo sapien
ggaatgaccgatgcctacctgtggg

SEQ ID NO: 2112014 - DNA, 25 bp, Homo sapien
cttgggattgatgaactgtggaacc

SEQ ID NO: 2112015 - DNA, 25 bp, Homo sapien
catactcttgatatccgtctggctg

SEQ ID NO: 2112016 - DNA, 25 bp, Homo sapien
tgcttccaaatgctagctaacctgt

SEQ ID NO: 2112017 - DNA, 25 bp, Homo sapien
cacttgtcttcccttatgtgcgtca

SEQ ID NO: 2112018 - DNA, 25 bp, Homo sapien
ttatgtgcgtcaactttcctttgca

SEQ ID NO: 2112019 - DNA, 25 bp, Homo sapien
taacctgtgagcctttcgcctgtcc

SEQ ID NO: 2112020 - DNA, 25 bp, Homo sapien
tcctgagccgggattgtccaattac

SEQ ID NO: 2112021 - DNA, 25 bp, Homo sapien
caccagacactaggatgggatggat

SEQ ID NO: 2112022 - DNA, 25 bp, Homo sapien
aatggaagatggacaccaccggaca

SEQ ID NO: 2112023 - DNA, 25 bp, Homo sapien
taaaaagccatgtgtggaaacccac

SEQ ID NO: 2112024 - DNA, 25 bp, Homo sapien
tgagccccgggactcttattctgat

SEQ ID NO: 2112025 - DNA, 25 bp, Homo sapien
taccagtcattaaagtccagtatta

SEQ ID NO: 2112026 - DNA, 25 bp, Homo sapien
ttcccaatcctacaaaggagccttc

SEQ ID NO: 2112027 - DNA, 25 bp, Homo sapien
gaagacataaaccaagtctgcccag

SEQ ID NO: 2112028 - DNA, 25 bp, Homo sapien
cctggtccttgctaccctaagcctg

SEQ ID NO: 2112029 - DNA, 25 bp, Homo sapien
gcctggtccttgctaccctaagcct

SEQ ID NO: 2112030 - DNA, 25 bp, Homo sapien
gcttctctaaatctccctggaggga

SEQ ID NO: 2112031 - DNA, 25 bp, Homo sapien
tacttgatggccttgtgacctttgg

SEQ ID NO: 2112032 - DNA, 25 bp, Homo sapien
gaacatcctgatagacctacgccgt

SEQ ID NO: 2112033 - DNA, 25 bp, Homo sapien
gatgaaccctacactgactttgatg

SEQ ID NO: 2112034 - DNA, 25 bp, Homo sapien
gatatgggttgctgtcttctggcct

SEQ ID NO: 2112035 - DNA, 25 bp, Homo sapien
aaatgatatagacgacagcactggc

SEQ ID NO: 2112036 - DNA, 25 bp, Homo sapien
tccagctgcatggaggccggcccag

SEQ ID NO: 2112037 - DNA, 25 bp, Homo sapien
gattatggctgccacccgggatttg

SEQ ID NO: 2112038 - DNA, 25 bp, Homo sapien
tgaattgcattggaggatggacacc

SEQ ID NO: 2112039 - DNA, 25 bp, Homo sapien
taaactggcagacgtgtttcctggg

SEQ ID NO: 2112040 - DNA, 25 bp, Homo sapien
tgctctagcaagttagttgaacccc

SEQ ID NO: 2112041 - DNA, 25 bp, Homo sapien
cagttgtatacatacctgggagcaa

SEQ ID NO: 2112042 - DNA, 25 bp, Homo sapien
ggagcacacatctcaggaaccagac

SEQ ID NO: 2112043 - DNA, 25 bp, Homo sapien
tctaggtcatacaaccagtgtcaga

SEQ ID NO: 2112044 - DNA, 25 bp, Homo sapien
tcttggaacatcagcactaggaggg

SEQ ID NO: 2112045 - DNA, 25 bp, Homo sapien
ggaaccagactatccagtgggatga

SEQ ID NO: 2112046 - DNA, 25 bp, Homo sapien
cggtgccgcgatccctttatccggg

SEQ ID NO: 2112047 - DNA, 25 bp, Homo sapien
cgcgatccctttatccgggtctcgc

SEQ ID NO: 2112048 - DNA, 25 bp, Homo sapien
tgccgcgatccctttatccgggtct

SEQ ID NO: 2112049 - DNA, 25 bp, Homo sapien
cgatccctttatccgggtctcgccg

SEQ ID NO: 2112050 - DNA, 25 bp, Homo sapien
ggaactgaggtctttctggctccaa

SEQ ID NO: 2112051 - DNA, 25 bp, Homo sapien
tggcactatgcgaaaggatgacacg

SEQ ID NO: 2112052 - DNA, 25 bp, Homo sapien
taaccattccctgaggtagtctggg

SEQ ID NO: 2112053 - DNA, 25 bp, Homo sapien
tctcaagggaggcaaggctatactc

SEQ ID NO: 2112054 - DNA, 25 bp, Homo sapien
ccccactgagaactatgcaatggag

SEQ ID NO: 2112055 - DNA, 25 bp, Homo sapien
ccacatagtggggaagtagccagga

SEQ ID NO: 2112056 - DNA, 25 bp, Homo sapien
cctgctgattcagagggtcctcttc

SEQ ID NO: 2112057 - DNA, 25 bp, Homo sapien
gggcaggcttgggcaccccttctgc

SEQ ID NO: 2112058 - DNA, 25 bp, Homo sapien
tggtccatgttcagcgttctagcaa

SEQ ID NO: 2112059 - DNA, 25 bp, Homo sapien
aaaggctatgcagccaaaataccat

SEQ ID NO: 2112060 - DNA, 25 bp, Homo sapien
tcagcgttctagcaacacgtgtgtg

SEQ ID NO: 2112061 - DNA, 25 bp, Homo sapien
gtgtgtgtgtaaaggctatgcagcc

SEQ ID NO: 2112062 - DNA, 25 bp, Homo sapien
gaacaactcgtatcagtgtagcaaa

SEQ ID NO: 2112063 - DNA, 25 bp, Homo sapien
tggcagatgctagtcaagggctaac

SEQ ID NO: 2112064 - DNA, 25 bp, Homo sapien
aaactgtttactagccaaattggca

SEQ ID NO: 2112065 - DNA, 25 bp, Homo sapien
gggctaaccttgcaatcagatcttt

SEQ ID NO: 2112066 - DNA, 25 bp, Homo sapien
gagttcaggttaccagaaccagtac

SEQ ID NO: 2112067 - DNA, 25 bp, Homo sapien
caccccatttcagagttatcaagag

SEQ ID NO: 2112068 - DNA, 25 bp, Homo sapien
tcttcatttggaggaatcaccccat

SEQ ID NO: 2112069 - DNA, 25 bp, Homo sapien
gcatactgagaatctaggccacccc

SEQ ID NO: 2112070 - DNA, 25 bp, Homo sapien
cctaacctaggagggctctgagcca

SEQ ID NO: 2112071 - DNA, 25 bp, Homo sapien
caccgctagtgcttgtggagatcac

SEQ ID NO: 2112072 - DNA, 25 bp, Homo sapien
ctggccttctaggaatggaggagcc

SEQ ID NO: 2112073 - DNA, 25 bp, Homo sapien
aaagaatcagtaggaccaggccacc

SEQ ID NO: 2112074 - DNA, 25 bp, Homo sapien
gggactgtcctagccaggtctcctg

SEQ ID NO: 2112075 - DNA, 25 bp, Homo sapien
ccagtgcaggtatttcagaaggaga

SEQ ID NO: 2112076 - DNA, 25 bp, Homo sapien
caggatgaggtctcgaccctgtccc

SEQ ID NO: 2112077 - DNA, 25 bp, Homo sapien
agtctagtccgtcctggcacagaag

SEQ ID NO: 2112078 - DNA, 25 bp, Homo sapien
taagagtttagggaacagacaggtc

SEQ ID NO: 2112079 - DNA, 25 bp, Homo sapien
cagacaggtcaagcgtcaggacaga

SEQ ID NO: 2112080 - DNA, 25 bp, Homo sapien
tgagccaggatgcagatcacgagta

SEQ ID NO: 2112081 - DNA, 25 bp, Homo sapien
tcaggacagaactacaccagattgt

SEQ ID NO: 2112082 - DNA, 25 bp, Homo sapien
caaaaatagttgtctcgaccaggcc

SEQ ID NO: 2112083 - DNA, 25 bp, Homo sapien
aaaatagttgtctcgaccaggccct

SEQ ID NO: 2112084 - DNA, 25 bp, Homo sapien
ctcaaaaatagttgtctcgaccagg

SEQ ID NO: 2112085 - DNA, 25 bp, Homo sapien
aaatagttgtctcgaccaggccctg

SEQ ID NO: 2112086 - DNA, 25 bp, Homo sapien
agagtgctgtggggtagcctcagat

SEQ ID NO: 2112087 - DNA, 25 bp, Homo sapien
gagagtgctgtggggtagcctcaga

SEQ ID NO: 2112088 - DNA, 25 bp, Homo sapien
agagagtgctgtggggtagcctcag

SEQ ID NO: 2112089 - DNA, 25 bp, Homo sapien
agggaccagctgcagcgggagagca

SEQ ID NO: 2112090 - DNA, 25 bp, Homo sapien
agcgggagagcagtagagggcaccc

SEQ ID NO: 2112091 - DNA, 25 bp, Homo sapien
cccacacccagaggcgggcccggca

SEQ ID NO: 2112092 - DNA, 25 bp, Homo sapien
cccggcaggtttttcaggtctgcca

SEQ ID NO: 2112093 - DNA, 25 bp, Homo sapien
tggagatagggcctggctctgtcac

SEQ ID NO: 2112094 - DNA, 25 bp, Homo sapien
atagggcctggctctgtcacttagg

SEQ ID NO: 2112095 - DNA, 25 bp, Homo sapien
ttttttggagatagggcctggctct

SEQ ID NO: 2112096 - DNA, 25 bp, Homo sapien
gatagggcctggctctgtcacttag

SEQ ID NO: 2112097 - DNA, 25 bp, Homo sapien
ggaaggagaattaatgggacagatt

SEQ ID NO: 2112098 - DNA, 25 bp, Homo sapien
aactataacaacaatggacacgcag

SEQ ID NO: 2112099 - DNA, 25 bp, Homo sapien
taacaacaatggacacgcagtcaac

SEQ ID NO: 2112100 - DNA, 25 bp, Homo sapien
aattaatgggacagattcaaccaac

SEQ ID NO: 2112101 - DNA, 25 bp, Homo sapien
ggttcccttcgcattgagtgagagc

SEQ ID NO: 2112102 - DNA, 25 bp, Homo sapien
ggagctgggcggacttacaacgcct

SEQ ID NO: 2112103 - DNA, 25 bp, Homo sapien
catgggtcacagccacgagtcttgc

SEQ ID NO: 2112104 - DNA, 25 bp, Homo sapien
ggcggacttacaacgcctcctcaga

SEQ ID NO: 2112105 - DNA, 25 bp, Homo sapien
ccctttcagaatccgtgtggatgtc

SEQ ID NO: 2112106 - DNA, 25 bp, Homo sapien
ctgccctttcagaatccgtgtggat

SEQ ID NO: 2112107 - DNA, 25 bp, Homo sapien
tgccctttcagaatccgtgtggatg

SEQ ID NO: 2112108 - DNA, 25 bp, Homo sapien
tttcagaatccgtgtggatgtctgg

SEQ ID NO: 2112109 - DNA, 25 bp, Homo sapien
tcccatgccacagcggggaataagg

SEQ ID NO: 2112110 - DNA, 25 bp, Homo sapien
cagtgacacaaaggaaccgttaagg

SEQ ID NO: 2112111 - DNA, 25 bp, Homo sapien
ctggcagtgacacaaaggaaccgtt

SEQ ID NO: 2112112 - DNA, 25 bp, Homo sapien
ggaagcacatcccatgataccccaa

SEQ ID NO: 2112113 - DNA, 25 bp, Homo sapien
gctgtcgagaggccgtggctgatgg

SEQ ID NO: 2112114 - DNA, 25 bp, Homo sapien
tggtgctgtcgagaggccgtggctg

SEQ ID NO: 2112115 - DNA, 25 bp, Homo sapien
gtgctgtcgagaggccgtggctgat

SEQ ID NO: 2112116 - DNA, 25 bp, Homo sapien
cttggtgctgtcgagaggccgtggc

SEQ ID NO: 2112117 - DNA, 25 bp, Homo sapien
gcattgaaggtaggagagctgatca

SEQ ID NO: 2112118 - DNA, 25 bp, Homo sapien
aaggtaggagagctgatcagctgac

SEQ ID NO: 2112119 - DNA, 25 bp, Homo sapien
ggtaggagagctgatcagctgacct

SEQ ID NO: 2112120 - DNA, 25 bp, Homo sapien
ctggggcattgaaggtaggagagct

SEQ ID NO: 2112121 - DNA, 25 bp, Homo sapien
cacactttgcggagctcctgaagtt

SEQ ID NO: 2112122 - DNA, 25 bp, Homo sapien
tctgacttcacctggggggcagcct

SEQ ID NO: 2112123 - DNA, 25 bp, Homo sapien
cgcctcctggagacacactttgcgg

SEQ ID NO: 2112124 - DNA, 25 bp, Homo sapien
cccgcagacgctctgacttcacctg

SEQ ID NO: 2112125 - DNA, 25 bp, Homo sapien
tttcattcattctaacacatctaag

SEQ ID NO: 2112126 - DNA, 25 bp, Homo sapien
aagtctgtctacctaggggccccag

SEQ ID NO: 2112127 - DNA, 25 bp, Homo sapien
agtaggtgacagggaatctacagcc

SEQ ID NO: 2112128 - DNA, 25 bp, Homo sapien
taacacatctaagctgagctttgag

SEQ ID NO: 2112129 - DNA, 25 bp, Homo sapien
cacaaggagtggtgtgcttggttgg

SEQ ID NO: 2112130 - DNA, 25 bp, Homo sapien
caactggggccgttcaccaggctct

SEQ ID NO: 2112131 - DNA, 25 bp, Homo sapien
gcagggcacaaggagtggtgtgctt

SEQ ID NO: 2112132 - DNA, 25 bp, Homo sapien
tcaccaggctctagtgggcactcag

SEQ ID NO: 2112133 - DNA, 25 bp, Homo sapien
gcgatctgctgttgcactgacacct

SEQ ID NO: 2112134 - DNA, 25 bp, Homo sapien
acctcgcgttccagggcctcaagag

SEQ ID NO: 2112135 - DNA, 25 bp, Homo sapien
gcggccgccgcgatctgctgttgca

SEQ ID NO: 2112136 - DNA, 25 bp, Homo sapien
gcatctgcctggacctggcgccggc

SEQ ID NO: 2112137 - DNA, 25 bp, Homo sapien
ctgagctgagcaagacgcatgccca

SEQ ID NO: 2112138 - DNA, 25 bp, Homo sapien
gtggtgatcactgaccccgtggaca

SEQ ID NO: 2112139 - DNA, 25 bp, Homo sapien
caggcagactccctgggtggtgatc

SEQ ID NO: 2112140 - DNA, 25 bp, Homo sapien
agcaagacgcatgcccaggcagact

SEQ ID NO: 2112141 - DNA, 25 bp, Homo sapien
gtgggcacctctacttgggccacct

SEQ ID NO: 2112142 - DNA, 25 bp, Homo sapien
accactgggtgggcacctctacttg

SEQ ID NO: 2112143 - DNA, 25 bp, Homo sapien
gctgcccccttacaccactgggtgg

SEQ ID NO: 2112144 - DNA, 25 bp, Homo sapien
actgggtgggcacctctacttgggc

SEQ ID NO: 2112145 - DNA, 25 bp, Homo sapien
ctctctgagtgcagaactacgtcct

SEQ ID NO: 2112146 - DNA, 25 bp, Homo sapien
atgggctaaagggacgtaggagtcg

SEQ ID NO: 2112147 - DNA, 25 bp, Homo sapien
agtggaagagagcaagtgggataga

SEQ ID NO: 2112148 - DNA, 25 bp, Homo sapien
gatagaattcaatgaggggggccca

SEQ ID NO: 2112149 - DNA, 25 bp, Homo sapien
aagagagcaagtgggatagaattca

SEQ ID NO: 2112150 - DNA, 25 bp, Homo sapien
gagagcaagtgggatagaattcaat

SEQ ID NO: 2112151 - DNA, 25 bp, Homo sapien
tggccacagagttccgccggctctt

SEQ ID NO: 2112152 - DNA, 25 bp, Homo sapien
gggcgctcggccagagagaagcagc

SEQ ID NO: 2112153 - DNA, 25 bp, Homo sapien
ggtttccatggggttcgccgctcag

SEQ ID NO: 2112154 - DNA, 25 bp, Homo sapien
tcttcagatccccataaagatctga

SEQ ID NO: 2112155 - DNA, 25 bp, Homo sapien
caaaactggaggcactcctgggcag

SEQ ID NO: 2112156 - DNA, 25 bp, Homo sapien
ggtggcaggcacacttcgcccctca

SEQ ID NO: 2112157 - DNA, 25 bp, Homo sapien
gcactcctgggcagcgagcgtgtgg

SEQ ID NO: 2112158 - DNA, 25 bp, Homo sapien
acacttcgcccctcaaaactggagg

SEQ ID NO: 2112159 - DNA, 25 bp, Homo sapien
gaggcctggcactgttagctccaag

SEQ ID NO: 2112160 - DNA, 25 bp, Homo sapien
aacactaattcctagcagatggcag

SEQ ID NO: 2112161 - DNA, 25 bp, Homo sapien
gccttagggctcacatgtaaaaccc

SEQ ID NO: 2112162 - DNA, 25 bp, Homo sapien
tgctaaggccgttctcatggctcgg

SEQ ID NO: 2112163 - DNA, 25 bp, Homo sapien
ctacgaagagggaggcgcgatcgga

SEQ ID NO: 2112164 - DNA, 25 bp, Homo sapien
tgggagtcctggctgccggaccact

SEQ ID NO: 2112165 - DNA, 25 bp, Homo sapien
aggcgcgatcggaggcagggtccgc

SEQ ID NO: 2112166 - DNA, 25 bp, Homo sapien
ccactgacgagaatgaaggccttca

SEQ ID NO: 2112167 - DNA, 25 bp, Homo sapien
agcagggcctcagaactgttgctgc

SEQ ID NO: 2112168 - DNA, 25 bp, Homo sapien
cctcagaactgttgctgcggcgggt

SEQ ID NO: 2112169 - DNA, 25 bp, Homo sapien
gcctcagaactgttgctgcggcggg

SEQ ID NO: 2112170 - DNA, 25 bp, Homo sapien
agggcctcagaactgttgctgcggc

SEQ ID NO: 2112171 - DNA, 25 bp, Homo sapien
tggggggccagaggcagagggagcc

SEQ ID NO: 2112172 - DNA, 25 bp, Homo sapien
agaggggcaggcggggagccagctc

SEQ ID NO: 2112173 - DNA, 25 bp, Homo sapien
gccagaggggcaggcggggagccag

SEQ ID NO: 2112174 - DNA, 25 bp, Homo sapien
cagagggagccagaggggcaggcgg

SEQ ID NO: 2112175 - DNA, 25 bp, Homo sapien
gagttccggatgtaccagtcccgca

SEQ ID NO: 2112176 - DNA, 25 bp, Homo sapien
gggcgccgtgaaactcctcgagtgt

SEQ ID NO: 2112177 - DNA, 25 bp, Homo sapien
tgtcagctgcatacacaggtggtgg

SEQ ID NO: 2112178 - DNA, 25 bp, Homo sapien
tttggatgcacctcagggccttcgg

SEQ ID NO: 2112179 - DNA, 25 bp, Homo sapien
gcacaggacagcactttcaggctct

SEQ ID NO: 2112180 - DNA, 25 bp, Homo sapien
ggatatcttcgccatctgccttacg

SEQ ID NO: 2112181 - DNA, 25 bp, Homo sapien
gaattgctgctaccagtgcccaaga

SEQ ID NO: 2112182 - DNA, 25 bp, Homo sapien
gcagtagagtgaccctgtgccatca

SEQ ID NO: 2112183 - DNA, 25 bp, Homo sapien
tcaggtcacttaaacgagcgctcag

SEQ ID NO: 2112184 - DNA, 25 bp, Homo sapien
tgtgtgctccccagattggaatcgt

SEQ ID NO: 2112185 - DNA, 25 bp, Homo sapien
taaatggccctgagacccgatatgg

SEQ ID NO: 2112186 - DNA, 25 bp, Homo sapien
gaagattaggttggcgcactctgct

SEQ ID NO: 2112187 - DNA, 25 bp, Homo sapien
tatcacaggctattcccaaggtatg

SEQ ID NO: 2112188 - DNA, 25 bp, Homo sapien
tcaaaacagatgacactatcacagg

SEQ ID NO: 2112189 - DNA, 25 bp, Homo sapien
tattaccaagagttattgcttgagg

SEQ ID NO: 2112190 - DNA, 25 bp, Homo sapien
ttggctagaaatctgagtgcagaca

SEQ ID NO: 2112191 - DNA, 25 bp, Homo sapien
agtcgggtatcctgactgttggacc

SEQ ID NO: 2112192 - DNA, 25 bp, Homo sapien
ggcctggagcaaggcactctcaaat

SEQ ID NO: 2112193 - DNA, 25 bp, Homo sapien
gacattgccaaatcttgaactcaga

SEQ ID NO: 2112194 - DNA, 25 bp, Homo sapien
tctcaaatcttgaaccctggaccaa

SEQ ID NO: 2112195 - DNA, 25 bp, Homo sapien
actatattgcaagtcttcggggcgg

SEQ ID NO: 2112196 - DNA, 25 bp, Homo sapien
tattgcaagtcttcggggcggggta

SEQ ID NO: 2112197 - DNA, 25 bp, Homo sapien
tatattgcaagtcttcggggcgggg

SEQ ID NO: 2112198 - DNA, 25 bp, Homo sapien
attgcaagtcttcggggcggggtat

SEQ ID NO: 2112199 - DNA, 25 bp, Homo sapien
taaaggcgggctttcaccatgtcgt

SEQ ID NO: 2112200 - DNA, 25 bp, Homo sapien
agtaaaggcgggctttcaccatgtc

SEQ ID NO: 2112201 - DNA, 25 bp, Homo sapien
aaaggcgggctttcaccatgtcgtc

SEQ ID NO: 2112202 - DNA, 25 bp, Homo sapien
gtaaaggcgggctttcaccatgtcg

SEQ ID NO: 2112203 - DNA, 25 bp, Homo sapien
tcaaggtcagtgttcagccctacag

SEQ ID NO: 2112204 - DNA, 25 bp, Homo sapien
ccttatagaggttcaggcaccatgc

SEQ ID NO: 2112205 - DNA, 25 bp, Homo sapien
tgtgggttccatgctagttaaagac

SEQ ID NO: 2112206 - DNA, 25 bp, Homo sapien
taaagacaccctatgagaccagcct

SEQ ID NO: 2112207 - DNA, 25 bp, Homo sapien
ccaagagaacatggatagcttaata

SEQ ID NO: 2112208 - DNA, 25 bp, Homo sapien
caactctggcacatgtcagttacta

SEQ ID NO: 2112209 - DNA, 25 bp, Homo sapien
cactgcggcctaggtgacagcaaaa

SEQ ID NO: 2112210 - DNA, 25 bp, Homo sapien
gttactcatgatgcttggacttggg

SEQ ID NO: 2112211 - DNA, 25 bp, Homo sapien
gggatacacactgttaccatgtcca

SEQ ID NO: 2112212 - DNA, 25 bp, Homo sapien
tgcatgatagttctagctggcaagc

SEQ ID NO: 2112213 - DNA, 25 bp, Homo sapien
ctcataatggcctgtgggatacaca

SEQ ID NO: 2112214 - DNA, 25 bp, Homo sapien
caccgagtggttaaatgatttgcat

SEQ ID NO: 2112215 - DNA, 25 bp, Homo sapien
ccaggtaccatcctgcatgctaggg

SEQ ID NO: 2112216 - DNA, 25 bp, Homo sapien
ccgagtatggagctacaaacaaaac

SEQ ID NO: 2112217 - DNA, 25 bp, Homo sapien
ccacgcagagggatgaagtatccaa

SEQ ID NO: 2112218 - DNA, 25 bp, Homo sapien
gcagcatcctgggtaccgagtatgg

SEQ ID NO: 2112219 - DNA, 25 bp, Homo sapien
ggtacaggacaagttaaaggactca

SEQ ID NO: 2112220 - DNA, 25 bp, Homo sapien
tgcttttctgctcagggtacaggac

SEQ ID NO: 2112221 - DNA, 25 bp, Homo sapien
agttaaggtgggaactgagttgact

SEQ ID NO: 2112222 - DNA, 25 bp, Homo sapien
cataagtggtatgatgagctgcgag

SEQ ID NO: 2112223 - DNA, 25 bp, Homo sapien
ttccagaccggtgggactctgagca

SEQ ID NO: 2112224 - DNA, 25 bp, Homo sapien
tagcataggcaaagggagggcaact

SEQ ID NO: 2112225 - DNA, 25 bp, Homo sapien
tcacggaagaccctctggaatcaag

SEQ ID NO: 2112226 - DNA, 25 bp, Homo sapien
cagaacggaactgcctcatcacgga

SEQ ID NO: 2112227 - DNA, 25 bp, Homo sapien
cctacagccatctgtgtctgaggtc

SEQ ID NO: 2112228 - DNA, 25 bp, Homo sapien
gacctgttaacagagtggatactca

SEQ ID NO: 2112229 - DNA, 25 bp, Homo sapien
cagtcttcggtccattttggaagta

SEQ ID NO: 2112230 - DNA, 25 bp, Homo sapien
tagtgctgggcacaattaatcccca

SEQ ID NO: 2112231 - DNA, 25 bp, Homo sapien
ccaagctgaggaccaaggactacag

SEQ ID NO: 2112232 - DNA, 25 bp, Homo sapien
agctggtcaggcaaaagcagtacct

SEQ ID NO: 2112233 - DNA, 25 bp, Homo sapien
tccgggtccatctcaagcatctgag

SEQ ID NO: 2112234 - DNA, 25 bp, Homo sapien
gctgtcaccactcagtacacttgga

SEQ ID NO: 2112235 - DNA, 25 bp, Homo sapien
tagttgagaccgcaggcacggtcac

SEQ ID NO: 2112236 - DNA, 25 bp, Homo sapien
tgatgacaaagttagtgtgaacacc

SEQ ID NO: 2112237 - DNA, 25 bp, Homo sapien
gcgataccactactgagaagcacag

SEQ ID NO: 2112238 - DNA, 25 bp, Homo sapien
tgtttccagcgtgggtagattcacc

SEQ ID NO: 2112239 - DNA, 25 bp, Homo sapien
ccagggtgggccgaatggagtttgc

SEQ ID NO: 2112240 - DNA, 25 bp, Homo sapien
atgttttctgcgctttattaaaggg

SEQ ID NO: 2112241 - DNA, 25 bp, Homo sapien
aggtgttcaaatggccgggcccaag

SEQ ID NO: 2112242 - DNA, 25 bp, Homo sapien
tatttggagataatcctaaaggtgt

SEQ ID NO: 2112243 - DNA, 25 bp, Homo sapien
gccagattagttgagtgtgcgtagc

SEQ ID NO: 2112244 - DNA, 25 bp, Homo sapien
tatcgcagtaggtgagggccagatt

SEQ ID NO: 2112245 - DNA, 25 bp, Homo sapien
ttgagggtcctttccgagggcttga

SEQ ID NO: 2112246 - DNA, 25 bp, Homo sapien
agctggatccccgttctggtcggcg

SEQ ID NO: 2112247 - DNA, 25 bp, Homo sapien
tgttcggaggtgtctaggactattg

SEQ ID NO: 2112248 - DNA, 25 bp, Homo sapien
tgcagtcaaacagcgatctccaggg

SEQ ID NO: 2112249 - DNA, 25 bp, Homo sapien
ggtcccctgagatatcgtggatgaa

SEQ ID NO: 2112250 - DNA, 25 bp, Homo sapien
gggtgcacccgctacccgcgatggt

SEQ ID NO: 2112251 - DNA, 25 bp, Homo sapien
gggtctgaacggttcctgctttcat

SEQ ID NO: 2112252 - DNA, 25 bp, Homo sapien
ccttcactgctcctcccaattcttg

SEQ ID NO: 2112253 - DNA, 25 bp, Homo sapien
tgacctgaccttgtctaagggggga

SEQ ID NO: 2112254 - DNA, 25 bp, Homo sapien
cctcataggtgaaagggtctgaacg

SEQ ID NO: 2112255 - DNA, 25 bp, Homo sapien
ctggttgtgcaagcctctccgttca

SEQ ID NO: 2112256 - DNA, 25 bp, Homo sapien
tctggctggttgtgcaagcctctcc

SEQ ID NO: 2112257 - DNA, 25 bp, Homo sapien
gctggttgtgcaagcctctccgttc

SEQ ID NO: 2112258 - DNA, 25 bp, Homo sapien
tggctggttgtgcaagcctctccgt

SEQ ID NO: 2112259 - DNA, 25 bp, Homo sapien
tgactatttcactatggctgtggac

SEQ ID NO: 2112260 - DNA, 25 bp, Homo sapien
ttagtgactatttcactatggctgt

SEQ ID NO: 2112261 - DNA, 25 bp, Homo sapien
gtgactatttcactatggctgtgga

SEQ ID NO: 2112262 - DNA, 25 bp, Homo sapien
ttggttagtgactatttcactatgg

SEQ ID NO: 2112263 - DNA, 25 bp, Homo sapien
tggttcctgtatctgcggggtggcc

SEQ ID NO: 2112264 - DNA, 25 bp, Homo sapien
tctgcggggtggcctatctggcggc

SEQ ID NO: 2112265 - DNA, 25 bp, Homo sapien
gcggggtggcctatctggcggccag

SEQ ID NO: 2112266 - DNA, 25 bp, Homo sapien
cgggcccgtgcctggttcctgtatc

SEQ ID NO: 2112267 - DNA, 25 bp, Homo sapien
gaagacctagaaatgcccctcagga

SEQ ID NO: 2112268 - DNA, 25 bp, Homo sapien
cctggagatcgctgtttgactgcaa

SEQ ID NO: 2112269 - DNA, 25 bp, Homo sapien
tagtttcggaggtcactgctgtccc

SEQ ID NO: 2112270 - DNA, 25 bp, Homo sapien
tatgcttccggacgctcgaagacct

SEQ ID NO: 2112271 - DNA, 25 bp, Homo sapien
gggcgctagggcccgcgagcggtga

SEQ ID NO: 2112272 - DNA, 25 bp, Homo sapien
gcgctagggcccgcgagcggtgagg

SEQ ID NO: 2112273 - DNA, 25 bp, Homo sapien
cgctagggcccgcgagcggtgaggg

SEQ ID NO: 2112274 - DNA, 25 bp, Homo sapien
ggcgctagggcccgcgagcggtgag

SEQ ID NO: 2112275 - DNA, 25 bp, Homo sapien
caggcgcaatgtggcgcccgccctg

SEQ ID NO: 2112276 - DNA, 25 bp, Homo sapien
caagacagggcagtagctgctgacc

SEQ ID NO: 2112277 - DNA, 25 bp, Homo sapien
gctgctgaccccccaggcctgtccc

SEQ ID NO: 2112278 - DNA, 25 bp, Homo sapien
accctcccccagcggaggccctgcg

SEQ ID NO: 2112279 - DNA, 25 bp, Homo sapien
ctctccgaaccctcccccagcggag

SEQ ID NO: 2112280 - DNA, 25 bp, Homo sapien
tgggctcagccatgtgaataatctt

SEQ ID NO: 2112281 - DNA, 25 bp, Homo sapien
gccgactgcaataaccctcaaggaa

SEQ ID NO: 2112282 - DNA, 25 bp, Homo sapien
tatgctagaataaccccaaggctcc

SEQ ID NO: 2112283 - DNA, 25 bp, Homo sapien
tgccatggaaactacctaggacctg

SEQ ID NO: 2112284 - DNA, 25 bp, Homo sapien
gactgtctgtgacctctatgtccgc

SEQ ID NO: 2112285 - DNA, 25 bp, Homo sapien
gaggcaggcgactgtctgtgacctc

SEQ ID NO: 2112286 - DNA, 25 bp, Homo sapien
tccgcagagtccagcacgctaacag

SEQ ID NO: 2112287 - DNA, 25 bp, Homo sapien
ctctatgtccgcagagtccagcacg

SEQ ID NO: 2112288 - DNA, 25 bp, Homo sapien
ctggggccggtgatccacaatagtg

SEQ ID NO: 2112289 - DNA, 25 bp, Homo sapien
gggccggtgatccacaatagtggca

SEQ ID NO: 2112290 - DNA, 25 bp, Homo sapien
ggccggtgatccacaatagtggcat

SEQ ID NO: 2112291 - DNA, 25 bp, Homo sapien
tggggccggtgatccacaatagtgg

SEQ ID NO: 2112292 - DNA, 25 bp, Homo sapien
ggaggcctccgatagaaggatgaga

SEQ ID NO: 2112293 - DNA, 25 bp, Homo sapien
taaaggacacaggtgtacatagttt

SEQ ID NO: 2112294 - DNA, 25 bp, Homo sapien
cacaggtgtacatagtttgccctga

SEQ ID NO: 2112295 - DNA, 25 bp, Homo sapien
ggcaggaggcctccgatagaaggat

SEQ ID NO: 2112296 - DNA, 25 bp, Homo sapien
gatcaattggggaggtgcgttacat

SEQ ID NO: 2112297 - DNA, 25 bp, Homo sapien
gaggtgcgttacatgtctctaacca

SEQ ID NO: 2112298 - DNA, 25 bp, Homo sapien
caattggggaggtgcgttacatgtc

SEQ ID NO: 2112299 - DNA, 25 bp, Homo sapien
cgttacatgtctctaaccaacggtg

SEQ ID NO: 2112300 - DNA, 25 bp, Homo sapien
gcctgggatggcttcggagcactat

SEQ ID NO: 2112301 - DNA, 25 bp, Homo sapien
gatggcttcggagcactatgtgcct

SEQ ID NO: 2112302 - DNA, 25 bp, Homo sapien
gcttcggagcactatgtgccttacc

SEQ ID NO: 2112303 - DNA, 25 bp, Homo sapien
tgcgtaaccgcgaaccagctccaca

SEQ ID NO: 2112304 - DNA, 25 bp, Homo sapien
tccaaacgaccacagcgctgtgctg

SEQ ID NO: 2112305 - DNA, 25 bp, Homo sapien
caaacgaccacagcgctgtgctggg

SEQ ID NO: 2112306 - DNA, 25 bp, Homo sapien
cgcgcacggccagcggagtgtcccc

SEQ ID NO: 2112307 - DNA, 25 bp, Homo sapien
ggccagcggagtgtccccagctaca

SEQ ID NO: 2112308 - DNA, 25 bp, Homo sapien
atgggtgaggccctgcgttgactct

SEQ ID NO: 2112309 - DNA, 25 bp, Homo sapien
ttgatgtggagcacgacgtccccga

SEQ ID NO: 2112310 - DNA, 25 bp, Homo sapien
gactctccgttgatgtggagcacga

SEQ ID NO: 2112311 - DNA, 25 bp, Homo sapien
cctgcgttgactctccgttgatgtg

SEQ ID NO: 2112312 - DNA, 25 bp, Homo sapien
aggcttgccagggtgggtctccaga

SEQ ID NO: 2112313 - DNA, 25 bp, Homo sapien
tcgaggcttgccagggtgggtctcc

SEQ ID NO: 2112314 - DNA, 25 bp, Homo sapien
tctcccacccctcgaggcttgccag

SEQ ID NO: 2112315 - DNA, 25 bp, Homo sapien
acccctcgaggcttgccagggtggg

SEQ ID NO: 2112316 - DNA, 25 bp, Homo sapien
tgatctctgacttctctcccttggg

SEQ ID NO: 2112317 - DNA, 25 bp, Homo sapien
tgacttctctcccttgggaaaccca

SEQ ID NO: 2112318 - DNA, 25 bp, Homo sapien
tctgacttctctcccttgggaaacc

SEQ ID NO: 2112319 - DNA, 25 bp, Homo sapien
tctctgacttctctcccttgggaaa

SEQ ID NO: 2112320 - DNA, 25 bp, Homo sapien
gctgcgggagatgagaccctgacct

SEQ ID NO: 2112321 - DNA, 25 bp, Homo sapien
cctgacctttagagaaatctctctt

SEQ ID NO: 2112322 - DNA, 25 bp, Homo sapien
aacatgcccctcagaaatcatttcc

SEQ ID NO: 2112323 - DNA, 25 bp, Homo sapien
aatcaaaccccgctcatctaggagc

SEQ ID NO: 2112324 - DNA, 25 bp, Homo sapien
tgctgcgagaccccgttacctccgg

SEQ ID NO: 2112325 - DNA, 25 bp, Homo sapien
ctgctgcgagaccccgttacctccg

SEQ ID NO: 2112326 - DNA, 25 bp, Homo sapien
tgctgctgctgcgagaccccgttac

SEQ ID NO: 2112327 - DNA, 25 bp, Homo sapien
gctgcgagaccccgttacctccggc

SEQ ID NO: 2112328 - DNA, 25 bp, Homo sapien
tcttcttgagcgtcgtccgggatgg

SEQ ID NO: 2112329 - DNA, 25 bp, Homo sapien
ttcctcgctgggcactagccagggc

SEQ ID NO: 2112330 - DNA, 25 bp, Homo sapien
tgccatctcctgagcgaactgcgct

SEQ ID NO: 2112331 - DNA, 25 bp, Homo sapien
gatctggtcgttgggatcctcagcg

SEQ ID NO: 2112332 - DNA, 25 bp, Homo sapien
tggtagcctacgtgccagcaaaagc

SEQ ID NO: 2112333 - DNA, 25 bp, Homo sapien
tgctcctttacagagtggcccgggc

SEQ ID NO: 2112334 - DNA, 25 bp, Homo sapien
cctggcaagtcaagaccggatcgaa

SEQ ID NO: 2112335 - DNA, 25 bp, Homo sapien
tggaagggtcgtaccactgacgctg

SEQ ID NO: 2112336 - DNA, 25 bp, Homo sapien
tggagtcccgctggccatataagcc

SEQ ID NO: 2112337 - DNA, 25 bp, Homo sapien
gattaaatcgtgctttgaccctcct

SEQ ID NO: 2112338 - DNA, 25 bp, Homo sapien
taaaactaagtacatggtggctggg

SEQ ID NO: 2112339 - DNA, 25 bp, Homo sapien
tattgcaataaagccagtagcaggg

SEQ ID NO: 2112340 - DNA, 25 bp, Homo sapien
ggagaatcataactggatggccagg

SEQ ID NO: 2112341 - DNA, 25 bp, Homo sapien
tgaggacacgtctgaatttctgaaa

SEQ ID NO: 2112342 - DNA, 25 bp, Homo sapien
tcctagtgatgagtatgtgctttcc

SEQ ID NO: 2112343 - DNA, 25 bp, Homo sapien
ttcagccccggttgccggaagagtg

SEQ ID NO: 2112344 - DNA, 25 bp, Homo sapien
ttaactgaataaaacggccgaggca

SEQ ID NO: 2112345 - DNA, 25 bp, Homo sapien
taccaggagcagtaatagcgggacc

SEQ ID NO: 2112346 - DNA, 25 bp, Homo sapien
cagcttcagcttagaaccgcgggaa

SEQ ID NO: 2112347 - DNA, 25 bp, Homo sapien
gcccagtatgttgccagaattcgga

SEQ ID NO: 2112348 - DNA, 25 bp, Homo sapien
tttcgaggacgctgtacacccagct

SEQ ID NO: 2112349 - DNA, 25 bp, Homo sapien
tggtgcctcggaggatctgctcact

SEQ ID NO: 2112350 - DNA, 25 bp, Homo sapien
gtcttgcccgccgtctggccgggaa

SEQ ID NO: 2112351 - DNA, 25 bp, Homo sapien
ctcacttgctcgtggtttcgaggac

SEQ ID NO: 2112352 - DNA, 25 bp, Homo sapien
cagcaaacaggaggattccctttcg

SEQ ID NO: 2112353 - DNA, 25 bp, Homo sapien
ccgagaggcgctcagaatccgccat

SEQ ID NO: 2112354 - DNA, 25 bp, Homo sapien
cgcgagaagttggtgcaggcggccc

SEQ ID NO: 2112355 - DNA, 25 bp, Homo sapien
gattccctttcgagtgcgcgagaag

SEQ ID NO: 2112356 - DNA, 25 bp, Homo sapien
cccatcccgcttttgcccacgcgcc

SEQ ID NO: 2112357 - DNA, 25 bp, Homo sapien
cacgcgcctgccccagaacgctcac

SEQ ID NO: 2112358 - DNA, 25 bp, Homo sapien
cgcttttgcccacgcgcctgcccca

SEQ ID NO: 2112359 - DNA, 25 bp, Homo sapien
catcccgcttttgcccacgcgcctg

SEQ ID NO: 2112360 - DNA, 25 bp, Homo sapien
atccagttccgcatggtccagccac

SEQ ID NO: 2112361 - DNA, 25 bp, Homo sapien
tcaatcaccgacagggaggagtagc

SEQ ID NO: 2112362 - DNA, 25 bp, Homo sapien
ggtgtggaggcactgaagcagatca

SEQ ID NO: 2112363 - DNA, 25 bp, Homo sapien
gggccagttgatgaatggtatcttg

SEQ ID NO: 2112364 - DNA, 25 bp, Homo sapien
ggtcacacatgtagacaacaaagaa

SEQ ID NO: 2112365 - DNA, 25 bp, Homo sapien
gtgatcaggtagaggattgccgcta

SEQ ID NO: 2112366 - DNA, 25 bp, Homo sapien
caaggacaacaatggaggtgatcag

SEQ ID NO: 2112367 - DNA, 25 bp, Homo sapien
ccgctatgagggttcggaagaaatc

SEQ ID NO: 2112368 - DNA, 25 bp, Homo sapien
caacaaggacaacaatggaggtgat

SEQ ID NO: 2112369 - DNA, 25 bp, Homo sapien
cagaaatggtccctggctcctcaaa

SEQ ID NO: 2112370 - DNA, 25 bp, Homo sapien
ccatgtctgaggacaagtgtgactt

SEQ ID NO: 2112371 - DNA, 25 bp, Homo sapien
gggtcacacgatttctgccagaagc

SEQ ID NO: 2112372 - DNA, 25 bp, Homo sapien
cagcaaatgaagaccttgggaggca

SEQ ID NO: 2112373 - DNA, 25 bp, Homo sapien
ggtgacataggcatcatagccaaag

SEQ ID NO: 2112374 - DNA, 25 bp, Homo sapien
ggcacgtagcgattaggcccagtac

SEQ ID NO: 2112375 - DNA, 25 bp, Homo sapien
tcatagccaaagaggcacgtagcga

SEQ ID NO: 2112376 - DNA, 25 bp, Homo sapien
tgctgtatgtcttggctgccgaacg

SEQ ID NO: 2112377 - DNA, 25 bp, Homo sapien
cacccacaccgaggagattatttgg

SEQ ID NO: 2112378 - DNA, 25 bp, Homo sapien
tattggatcgtgcagaaggaggacc

SEQ ID NO: 2112379 - DNA, 25 bp, Homo sapien
tagggcctggactctgaaatctaac

SEQ ID NO: 2112380 - DNA, 25 bp, Homo sapien
ggaggacctaggcacacacatatgg

SEQ ID NO: 2112381 - DNA, 25 bp, Homo sapien
ccttgccccagctgtttccactcca

SEQ ID NO: 2112382 - DNA, 25 bp, Homo sapien
ttgttgtaaaacaggcctggcttct

SEQ ID NO: 2112383 - DNA, 25 bp, Homo sapien
tgttgtaaaacaggcctggcttctt

SEQ ID NO: 2112384 - DNA, 25 bp, Homo sapien
tttgcctccttgccccagctgtttc

SEQ ID NO: 2112385 - DNA, 25 bp, Homo sapien
tgcaatgggtgagtgtggtccgggc

SEQ ID NO: 2112386 - DNA, 25 bp, Homo sapien
gtcagttccgggtggtcaaggagcc

SEQ ID NO: 2112387 - DNA, 25 bp, Homo sapien
cctcggctttgtgaaggtgctgcaa

SEQ ID NO: 2112388 - DNA, 25 bp, Homo sapien
catcccctggggtcattgatgggca

SEQ ID NO: 2112389 - DNA, 25 bp, Homo sapien
tgtactgataagttagcacagtggc

SEQ ID NO: 2112390 - DNA, 25 bp, Homo sapien
tgggttcatatcctggttctaccaa

SEQ ID NO: 2112391 - DNA, 25 bp, Homo sapien
tatcaggtatctttcacagacatac

SEQ ID NO: 2112392 - DNA, 25 bp, Homo sapien
cacagtggctaagagtaacaggtgc

SEQ ID NO: 2112393 - DNA, 25 bp, Homo sapien
ctggtaccacgccgccgtctgctgc

SEQ ID NO: 2112394 - DNA, 25 bp, Homo sapien
tggtaccacgccgccgtctgctgcc

SEQ ID NO: 2112395 - DNA, 25 bp, Homo sapien
cgccgccgtctgctgccccccacac

SEQ ID NO: 2112396 - DNA, 25 bp, Homo sapien
ccacgccgccgtctgctgcccccca

SEQ ID NO: 2112397 - DNA, 25 bp, Homo sapien
ccgtgctcgcggtccacagagtgtc

SEQ ID NO: 2112398 - DNA, 25 bp, Homo sapien
gctgggtccaggaccgggtccgaga

SEQ ID NO: 2112399 - DNA, 25 bp, Homo sapien
ccctgctccgtgctcgcggtccaca

SEQ ID NO: 2112400 - DNA, 25 bp, Homo sapien
tccacagagtgtcacgggtcgtgtg

SEQ ID NO: 2112401 - DNA, 25 bp, Homo sapien
gccggcctggcgcagcgaatggatg

SEQ ID NO: 2112402 - DNA, 25 bp, Homo sapien
cctggcgcagcgaatggatgaggat

SEQ ID NO: 2112403 - DNA, 25 bp, Homo sapien
tgaggattcggtccgcctcctccat

SEQ ID NO: 2112404 - DNA, 25 bp, Homo sapien
gaatggatgaggattcggtccgcct

SEQ ID NO: 2112405 - DNA, 25 bp, Homo sapien
gcggaaccgggcagacatggcaaga

SEQ ID NO: 2112406 - DNA, 25 bp, Homo sapien
cgcaaggtctgcacatctggaggaa

SEQ ID NO: 2112407 - DNA, 25 bp, Homo sapien
gttgatcacacgcaggcagcggacc

SEQ ID NO: 2112408 - DNA, 25 bp, Homo sapien
aaccagctcagtggtgaaggcgcgc

SEQ ID NO: 2112409 - DNA, 25 bp, Homo sapien
taaactcatttgctcctcataaaag

SEQ ID NO: 2112410 - DNA, 25 bp, Homo sapien
cagcccaggtgcaaactggataaac

SEQ ID NO: 2112411 - DNA, 25 bp, Homo sapien
cccagaagggttagggtcacacagt

SEQ ID NO: 2112412 - DNA, 25 bp, Homo sapien
aatttaaaacatagaagccaggagc

SEQ ID NO: 2112413 - DNA, 25 bp, Homo sapien
taccaactatacgacctcaggcaga

SEQ ID NO: 2112414 - DNA, 25 bp, Homo sapien
catagactctgaaagcagacttcct

SEQ ID NO: 2112415 - DNA, 25 bp, Homo sapien
ttttcttccagagttgccactgctt

SEQ ID NO: 2112416 - DNA, 25 bp, Homo sapien
gctttgcctcttaccaactatacga

SEQ ID NO: 2112417 - DNA, 25 bp, Homo sapien
tagccaagctccaagggatagccca

SEQ ID NO: 2112418 - DNA, 25 bp, Homo sapien
caagctccaagggatagcccaggtc

SEQ ID NO: 2112419 - DNA, 25 bp, Homo sapien
ggaagttctgatagccaagctccaa

SEQ ID NO: 2112420 - DNA, 25 bp, Homo sapien
gggtagaggaagttctgatagccaa

SEQ ID NO: 2112421 - DNA, 25 bp, Homo sapien
gaagagaagcaggtctcggaggtca

SEQ ID NO: 2112422 - DNA, 25 bp, Homo sapien
tcctcagaggcatcggtgggcagac

SEQ ID NO: 2112423 - DNA, 25 bp, Homo sapien
aagagaagcaggtctcggaggtcag

SEQ ID NO: 2112424 - DNA, 25 bp, Homo sapien
tgcatcctcagaggcatcggtgggc

SEQ ID NO: 2112425 - DNA, 25 bp, Homo sapien
cagctggtcccgaatttggctccca

SEQ ID NO: 2112426 - DNA, 25 bp, Homo sapien
gctgcagcttgggagtgcgaaggtg

SEQ ID NO: 2112427 - DNA, 25 bp, Homo sapien
gaatttggctcccaatggcccggag

SEQ ID NO: 2112428 - DNA, 25 bp, Homo sapien
gcccggaggagaatagctgagtcac

SEQ ID NO: 2112429 - DNA, 25 bp, Homo sapien
tcaattctggcacgaccagcctgct

SEQ ID NO: 2112430 - DNA, 25 bp, Homo sapien
actcaattctggcacgaccagcctg

SEQ ID NO: 2112431 - DNA, 25 bp, Homo sapien
aattctggcacgaccagcctgctgg

SEQ ID NO: 2112432 - DNA, 25 bp, Homo sapien
tctggcacgaccagcctgctggcat

SEQ ID NO: 2112433 - DNA, 25 bp, Homo sapien
ggaggcaggaacagagtcagctggc

SEQ ID NO: 2112434 - DNA, 25 bp, Homo sapien
tggaggcaggaacagagtcagctgg

SEQ ID NO: 2112435 - DNA, 25 bp, Homo sapien
ctggaggcaggaacagagtcagctg

SEQ ID NO: 2112436 - DNA, 25 bp, Homo sapien
gaggcaggaacagagtcagctggcc

SEQ ID NO: 2112437 - DNA, 25 bp, Homo sapien
cagcaggggactcgcctggaactcc

SEQ ID NO: 2112438 - DNA, 25 bp, Homo sapien
ggactcgcctggaactcccgtggct

SEQ ID NO: 2112439 - DNA, 25 bp, Homo sapien
aagcagcaggggactcgcctggaac

SEQ ID NO: 2112440 - DNA, 25 bp, Homo sapien
caggggactcgcctggaactcccgt

SEQ ID NO: 2112441 - DNA, 25 bp, Homo sapien
gatgtccggtggacccagtcctcat

SEQ ID NO: 2112442 - DNA, 25 bp, Homo sapien
gaggcgggatgtccggtggacccag

SEQ ID NO: 2112443 - DNA, 25 bp, Homo sapien
cgggatgtccggtggacccagtcct

SEQ ID NO: 2112444 - DNA, 25 bp, Homo sapien
ggaggcgggatgtccggtggaccca

SEQ ID NO: 2112445 - DNA, 25 bp, Homo sapien
ggccccagctttggcgcagatgctc

SEQ ID NO: 2112446 - DNA, 25 bp, Homo sapien
aacttctctgagtgcgtgaagcggg

SEQ ID NO: 2112447 - DNA, 25 bp, Homo sapien
gagcccttaggagcaccagtcttgg

SEQ ID NO: 2112448 - DNA, 25 bp, Homo sapien
agcagttctcccaggtcccgggctt

SEQ ID NO: 2112449 - DNA, 25 bp, Homo sapien
ctgttcaggccgccgggaggtggct

SEQ ID NO: 2112450 - DNA, 25 bp, Homo sapien
ggaggtggctggcacatctgacacc

SEQ ID NO: 2112451 - DNA, 25 bp, Homo sapien
ctggcacatctgacacctgagtggc

SEQ ID NO: 2112452 - DNA, 25 bp, Homo sapien
catctgacacctgagtggcctgggc

SEQ ID NO: 2112453 - DNA, 25 bp, Homo sapien
ctgcacaaagctgacgcccagggtc

SEQ ID NO: 2112454 - DNA, 25 bp, Homo sapien
cccgaagggactcgagctcctgttc

SEQ ID NO: 2112455 - DNA, 25 bp, Homo sapien
caatgctgcggttcactccttccag

SEQ ID NO: 2112456 - DNA, 25 bp, Homo sapien
cagggtcttcatgtcggcctcaacc

SEQ ID NO: 2112457 - DNA, 25 bp, Homo sapien
caccgcgcggctcttcaggcgcagg

SEQ ID NO: 2112458 - DNA, 25 bp, Homo sapien
tgagcttgctgtgccggcactcaga

SEQ ID NO: 2112459 - DNA, 25 bp, Homo sapien
ctgtactgagcttgctgtgccggca

SEQ ID NO: 2112460 - DNA, 25 bp, Homo sapien
cctgctcacgctctgctgtactgag

SEQ ID NO: 2112461 - DNA, 25 bp, Homo sapien
gcaatcctgcagctttcggaggtgg

SEQ ID NO: 2112462 - DNA, 25 bp, Homo sapien
gaggtggcggtactcagcgaggagt

SEQ ID NO: 2112463 - DNA, 25 bp, Homo sapien
tactcagcgaggagtgggacccggt

SEQ ID NO: 2112464 - DNA, 25 bp, Homo sapien
actgacccgccaagtggatgacccg

SEQ ID NO: 2112465 - DNA, 25 bp, Homo sapien
tggatctctgccagccgtcgagaag

SEQ ID NO: 2112466 - DNA, 25 bp, Homo sapien
tctgccagccgtcgagaagattcca

SEQ ID NO: 2112467 - DNA, 25 bp, Homo sapien
tgcttatagacctcctccttcctgc

SEQ ID NO: 2112468 - DNA, 25 bp, Homo sapien
cagctgcttatagacctcctccttc

SEQ ID NO: 2112469 - DNA, 25 bp, Homo sapien
tccttctgcttccggatgttgccca

SEQ ID NO: 2112470 - DNA, 25 bp, Homo sapien
gggtgtaggccagccgggacacatc

SEQ ID NO: 2112471 - DNA, 25 bp, Homo sapien
tgggtgtaggccagccgggacacat

SEQ ID NO: 2112472 - DNA, 25 bp, Homo sapien
ttctgcttccggatgttgcccacga

SEQ ID NO: 2112473 - DNA, 25 bp, Homo sapien
acaccatggcagccatgagcccctg

SEQ ID NO: 2112474 - DNA, 25 bp, Homo sapien
gcaaacgtccggtccagcttcccag

SEQ ID NO: 2112475 - DNA, 25 bp, Homo sapien
ttgaacacaagctcatcagtcaccg

SEQ ID NO: 2112476 - DNA, 25 bp, Homo sapien
tgaagctccttcgtatcagacaaga

SEQ ID NO: 2112477 - DNA, 25 bp, Homo sapien
cagcttcccagatagggagttgatt

SEQ ID NO: 2112478 - DNA, 25 bp, Homo sapien
agagcagctagatacttataggcct

SEQ ID NO: 2112479 - DNA, 25 bp, Homo sapien
taggccttccgaacagcatcgtcct

SEQ ID NO: 2112480 - DNA, 25 bp, Homo sapien
acttataggccttccgaacagcatc

SEQ ID NO: 2112481 - DNA, 25 bp, Homo sapien
gagcagctagatacttataggcctt

SEQ ID NO: 2112482 - DNA, 25 bp, Homo sapien
gaacctcccgcatgatggtgcctgt

SEQ ID NO: 2112483 - DNA, 25 bp, Homo sapien
tggtgcctgtgtcctcgatggtctg

SEQ ID NO: 2112484 - DNA, 25 bp, Homo sapien
tgcctgtgtcctcgatggtctggat

SEQ ID NO: 2112485 - DNA, 25 bp, Homo sapien
tcgaggtctcgaacctcccgcatga

SEQ ID NO: 2112486 - DNA, 25 bp, Homo sapien
ggcctaggaggccagcgttctcctg

SEQ ID NO: 2112487 - DNA, 25 bp, Homo sapien
gctcggtagtcctcccggatcttct

SEQ ID NO: 2112488 - DNA, 25 bp, Homo sapien
cctggcggagggctcggtagtcctc

SEQ ID NO: 2112489 - DNA, 25 bp, Homo sapien
gagggctcggtagtcctcccggatc

SEQ ID NO: 2112490 - DNA, 25 bp, Homo sapien
acagcggaggaagtagctagggcat

SEQ ID NO: 2112491 - DNA, 25 bp, Homo sapien
gaactggacagcggaggaagtagct

SEQ ID NO: 2112492 - DNA, 25 bp, Homo sapien
cggaggaagtagctagggcatgtgc

SEQ ID NO: 2112493 - DNA, 25 bp, Homo sapien
gggagagacctctgccggcggctcc

SEQ ID NO: 2112494 - DNA, 25 bp, Homo sapien
ggactatcaccccatataagggttg

SEQ ID NO: 2112495 - DNA, 25 bp, Homo sapien
agtaccgtccccaataaactgcagc

SEQ ID NO: 2112496 - DNA, 25 bp, Homo sapien
aaactgcagccgagctccccacatg

SEQ ID NO: 2112497 - DNA, 25 bp, Homo sapien
cccatataagggttgcggtcagtgg

SEQ ID NO: 2112498 - DNA, 25 bp, Homo sapien
gacccataaaatagcctaaagctaa

SEQ ID NO: 2112499 - DNA, 25 bp, Homo sapien
aaatagcctaaagctaaccccatct

SEQ ID NO: 2112500 - DNA, 25 bp, Homo sapien
tgccctaaacgtaccccagctctta

SEQ ID NO: 2112501 - DNA, 25 bp, Homo sapien
tacctaaccctctcctggacccata

SEQ ID NO: 2112502 - DNA, 25 bp, Homo sapien
gggcagggcctgaaggggcgggcag

SEQ ID NO: 2112503 - DNA, 25 bp, Homo sapien
ggcagccaatgggaaggccagcgcg

SEQ ID NO: 2112504 - DNA, 25 bp, Homo sapien
gcctgaaggggcgggcagccaatgg

SEQ ID NO: 2112505 - DNA, 25 bp, Homo sapien
ccaatgggaaggccagcgcggaggg

SEQ ID NO: 2112506 - DNA, 25 bp, Homo sapien
ggggggcgcggaatgccgcagcggg

SEQ ID NO: 2112507 - DNA, 25 bp, Homo sapien
gcgaggggggcgcggaatgccgcag

SEQ ID NO: 2112508 - DNA, 25 bp, Homo sapien
ccaccgccgcctcgaccgaggtgcg

SEQ ID NO: 2112509 - DNA, 25 bp, Homo sapien
cgcctcgaccgaggtgcggggctca

SEQ ID NO: 2112510 - DNA, 25 bp, Homo sapien
ccccaaggcctcgtcggcgaacagc

SEQ ID NO: 2112511 - DNA, 25 bp, Homo sapien
ccaaggcctcgtcggcgaacagcac

SEQ ID NO: 2112512 - DNA, 25 bp, Homo sapien
gccccacggccggtagcggcgcaac

SEQ ID NO: 2112513 - DNA, 25 bp, Homo sapien
tagcggcgcaactgcgccagcggca

SEQ ID NO: 2112514 - DNA, 25 bp, Homo sapien
gcacagcggtgagggctcggggcaa

SEQ ID NO: 2112515 - DNA, 25 bp, Homo sapien
gacgcgccccaagcgctccagacgg

SEQ ID NO: 2112516 - DNA, 25 bp, Homo sapien
gcggcagcgaaaatgtggggaccag

SEQ ID NO: 2112517 - DNA, 25 bp, Homo sapien
caagcgctccagacggcccggcgcg

SEQ ID NO: 2112518 - DNA, 25 bp, Homo sapien
ggtggtcgcaaaaggaagcccagcc

SEQ ID NO: 2112519 - DNA, 25 bp, Homo sapien
cagccgtcgtgtgaggcccgcacgt

SEQ ID NO: 2112520 - DNA, 25 bp, Homo sapien
aggagcggttcagcacgcgtaccaa

SEQ ID NO: 2112521 - DNA, 25 bp, Homo sapien
cacgtgcaccgccttctcgaaggag

SEQ ID NO: 2112522 - DNA, 25 bp, Homo sapien
ggtctcatagcgcaccacgaagtcg

SEQ ID NO: 2112523 - DNA, 25 bp, Homo sapien
gcggccgtggttgttggcccagaaa

SEQ ID NO: 2112524 - DNA, 25 bp, Homo sapien
gctggaaggcaaagcggtcggtgcg

SEQ ID NO: 2112525 - DNA, 25 bp, Homo sapien
ccgagccccggatccaggatgggat

SEQ ID NO: 2112526 - DNA, 25 bp, Homo sapien
gctgcattcaatccaaccatgcaaa

SEQ ID NO: 2112527 - DNA, 25 bp, Homo sapien
gtttgctgcattcaatccaaccatg

SEQ ID NO: 2112528 - DNA, 25 bp, Homo sapien
attcaatccaaccatgcaaagtgac

SEQ ID NO: 2112529 - DNA, 25 bp, Homo sapien
catgtttgctgcattcaatccaacc

SEQ ID NO: 2112530 - DNA, 25 bp, Homo sapien
cacaaagggtggctagtcttcaaca

SEQ ID NO: 2112531 - DNA, 25 bp, Homo sapien
tcatgttaggaaccacagacctggg

SEQ ID NO: 2112532 - DNA, 25 bp, Homo sapien
tcccaagagggctaggtcacaaagg

SEQ ID NO: 2112533 - DNA, 25 bp, Homo sapien
gagatcctccgccatttcccaagag

SEQ ID NO: 2112534 - DNA, 25 bp, Homo sapien
tctaacaaagcttagcacgtgctgg

SEQ ID NO: 2112535 - DNA, 25 bp, Homo sapien
ccacaagttatagggagttccattc

SEQ ID NO: 2112536 - DNA, 25 bp, Homo sapien
gagcgaggccctttggagtaacaga

SEQ ID NO: 2112537 - DNA, 25 bp, Homo sapien
ggagctcagaaagaccactggtgtt

SEQ ID NO: 2112538 - DNA, 25 bp, Homo sapien
gggtcagcagtgaaggggagggtga

SEQ ID NO: 2112539 - DNA, 25 bp, Homo sapien
ctgcaggggtcagcagtgaagggga

SEQ ID NO: 2112540 - DNA, 25 bp, Homo sapien
tgcaggggtcagcagtgaaggggag

SEQ ID NO: 2112541 - DNA, 25 bp, Homo sapien
caggggtcagcagtgaaggggaggg

SEQ ID NO: 2112542 - DNA, 25 bp, Homo sapien
gtgcagaaggcaagtacaggcaact

SEQ ID NO: 2112543 - DNA, 25 bp, Homo sapien
aagtgcagaaggcaagtacaggcaa

SEQ ID NO: 2112544 - DNA, 25 bp, Homo sapien
gcaagtgcagaaggcaagtacaggc

SEQ ID NO: 2112545 - DNA, 25 bp, Homo sapien
agtgcagaaggcaagtacaggcaac

SEQ ID NO: 2112546 - DNA, 25 bp, Homo sapien
gaatgccctagaataagggtccctg

SEQ ID NO: 2112547 - DNA, 25 bp, Homo sapien
caggcctgcaggaatacagtggtga

SEQ ID NO: 2112548 - DNA, 25 bp, Homo sapien
cagcagagtgtggtctcaaggcaag

SEQ ID NO: 2112549 - DNA, 25 bp, Homo sapien
tatttgggccatcagtcaagtggag

SEQ ID NO: 2112550 - DNA, 25 bp, Homo sapien
aaggtgattcgccagtcacagagta

SEQ ID NO: 2112551 - DNA, 25 bp, Homo sapien
cgccagtctcctgggcgtgcaaatt

SEQ ID NO: 2112552 - DNA, 25 bp, Homo sapien
gtgcaaattcctccggccatcagga

SEQ ID NO: 2112553 - DNA, 25 bp, Homo sapien
caatggctgccaagctgataggccc

SEQ ID NO: 2112554 - DNA, 25 bp, Homo sapien
tgtgcgcagtagcaggcaagccttc

SEQ ID NO: 2112555 - DNA, 25 bp, Homo sapien
ctgtgcgcagtagcaggcaagcctt

SEQ ID NO: 2112556 - DNA, 25 bp, Homo sapien
gcagtagcaggcaagccttctcctc

SEQ ID NO: 2112557 - DNA, 25 bp, Homo sapien
gtagcaggcaagccttctcctccat

SEQ ID NO: 2112558 - DNA, 25 bp, Homo sapien
aagtagatagagggaggcatcaata

SEQ ID NO: 2112559 - DNA, 25 bp, Homo sapien
tttgcccacatattcattccccatt

SEQ ID NO: 2112560 - DNA, 25 bp, Homo sapien
tcaatactagacaagatccctccct

SEQ ID NO: 2112561 - DNA, 25 bp, Homo sapien
gggaggcatcaatactagacaagat

SEQ ID NO: 2112562 - DNA, 25 bp, Homo sapien
ggatgagggagactggggtcttacc

SEQ ID NO: 2112563 - DNA, 25 bp, Homo sapien
atgagggagactggggtcttaccca

SEQ ID NO: 2112564 - DNA, 25 bp, Homo sapien
tgagggagactggggtcttacccaa

SEQ ID NO: 2112565 - DNA, 25 bp, Homo sapien
ttggatgagggagactggggtctta

SEQ ID NO: 2112566 - DNA, 25 bp, Homo sapien
cacaacccaggccttttggctctta

SEQ ID NO: 2112567 - DNA, 25 bp, Homo sapien
gctcaaggtcatacacttcacatca

SEQ ID NO: 2112568 - DNA, 25 bp, Homo sapien
tcccgaagtcctagtactacaggca

SEQ ID NO: 2112569 - DNA, 25 bp, Homo sapien
gaagcaggcagtactattgtctcca

SEQ ID NO: 2112570 - DNA, 25 bp, Homo sapien
tcatcctaaaagtcctacagcctca

SEQ ID NO: 2112571 - DNA, 25 bp, Homo sapien
agacaactactgttaccattctgga

SEQ ID NO: 2112572 - DNA, 25 bp, Homo sapien
gaaaaacaatcacacatcagccaga

SEQ ID NO: 2112573 - DNA, 25 bp, Homo sapien
cagcctcattatagaaaattcgcaa

SEQ ID NO: 2112574 - DNA, 25 bp, Homo sapien
aaggtgttatcatccatgttcttcg

SEQ ID NO: 2112575 - DNA, 25 bp, Homo sapien
gtgttatcatccatgttcttcgtct

SEQ ID NO: 2112576 - DNA, 25 bp, Homo sapien
caaaggtgttatcatccatgttctt

SEQ ID NO: 2112577 - DNA, 25 bp, Homo sapien
ggtgttatcatccatgttcttcgtc

SEQ ID NO: 2112578 - DNA, 25 bp, Homo sapien
tctggggccatggacggagaggggt

SEQ ID NO: 2112579 - DNA, 25 bp, Homo sapien
atctggggccatggacggagagggg

SEQ ID NO: 2112580 - DNA, 25 bp, Homo sapien
tgggggctaccagtggacccactga

SEQ ID NO: 2112581 - DNA, 25 bp, Homo sapien
gggctaccagtggacccactgactc

SEQ ID NO: 2112582 - DNA, 25 bp, Homo sapien
gacagtaagaagtgtgacagcccac

SEQ ID NO: 2112583 - DNA, 25 bp, Homo sapien
tcaataagctcctactagccaggga

SEQ ID NO: 2112584 - DNA, 25 bp, Homo sapien
cacaattggatgcagtaaaacaggg

SEQ ID NO: 2112585 - DNA, 25 bp, Homo sapien
taaaaatgccttaaagcgccctctg

SEQ ID NO: 2112586 - DNA, 25 bp, Homo sapien
gggttgccagtcatcggaacgtcag

SEQ ID NO: 2112587 - DNA, 25 bp, Homo sapien
ttctgcggggttgccagtcatcgga

SEQ ID NO: 2112588 - DNA, 25 bp, Homo sapien
tgccagtcatcggaacgtcagaaac

SEQ ID NO: 2112589 - DNA, 25 bp, Homo sapien
tcttctgcggggttgccagtcatcg

SEQ ID NO: 2112590 - DNA, 25 bp, Homo sapien
gacctctgtaaaagccacaggtgga

SEQ ID NO: 2112591 - DNA, 25 bp, Homo sapien
ttcatcatcagggtcttcggtgtcc

SEQ ID NO: 2112592 - DNA, 25 bp, Homo sapien
catcgtggctaccacagaacgggcc

SEQ ID NO: 2112593 - DNA, 25 bp, Homo sapien
acttcaagatcaggtcgcggtccgt

SEQ ID NO: 2112594 - DNA, 25 bp, Homo sapien
gggactcagtcaccccagctatcac

SEQ ID NO: 2112595 - DNA, 25 bp, Homo sapien
cttcggcccccaagggactgaggag

SEQ ID NO: 2112596 - DNA, 25 bp, Homo sapien
cactagagagacagacttcggcccc

SEQ ID NO: 2112597 - DNA, 25 bp, Homo sapien
ttttgcccctgcagaaggacgggag

SEQ ID NO: 2112598 - DNA, 25 bp, Homo sapien
cctgggagctcacatgaggcctggc

SEQ ID NO: 2112599 - DNA, 25 bp, Homo sapien
agggaccaccactagcccggccagg

SEQ ID NO: 2112600 - DNA, 25 bp, Homo sapien
agagagaggcacagcgcaagcacca

SEQ ID NO: 2112601 - DNA, 25 bp, Homo sapien
caggagggacacaccgctgttcaga

SEQ ID NO: 2112602 - DNA, 25 bp, Homo sapien
acacaccgctgttcagagccacagg

SEQ ID NO: 2112603 - DNA, 25 bp, Homo sapien
gtaattgtgccccaagaccagctca

SEQ ID NO: 2112604 - DNA, 25 bp, Homo sapien
gtaggcggaggacatgcccagttcc

SEQ ID NO: 2112605 - DNA, 25 bp, Homo sapien
ttaggaccacgagacgaggagacac

SEQ ID NO: 2112606 - DNA, 25 bp, Homo sapien
ggagaacactacaccgcaagacact

SEQ ID NO: 2112607 - DNA, 25 bp, Homo sapien
gacattcctaattttaaggtcactg

SEQ ID NO: 2112608 - DNA, 25 bp, Homo sapien
aagaaaaactttgctaccatgagta

SEQ ID NO: 2112609 - DNA, 25 bp, Homo sapien
catgagtatacgaaggtgttttgcc

SEQ ID NO: 2112610 - DNA, 25 bp, Homo sapien
gtcttttgatcaatggacattccta

SEQ ID NO: 2112611 - DNA, 25 bp, Homo sapien
ggaaaagttattaccctgatgacag

SEQ ID NO: 2112612 - DNA, 25 bp, Homo sapien
tcagtgactgaagagtcatctcacc

SEQ ID NO: 2112613 - DNA, 25 bp, Homo sapien
ggcataacagtgattgcaagagctc

SEQ ID NO: 2112614 - DNA, 25 bp, Homo sapien
tgacaacgggcgtgtactcagtctt

SEQ ID NO: 2112615 - DNA, 25 bp, Homo sapien
ggccatgcctgaggtggccgcatcc

SEQ ID NO: 2112616 - DNA, 25 bp, Homo sapien
gactgtcctgagcactttgaggaag

SEQ ID NO: 2112617 - DNA, 25 bp, Homo sapien
tgactgtcctgagcactttgaggaa

SEQ ID NO: 2112618 - DNA, 25 bp, Homo sapien
ctgactgtcctgagcactttgagga

SEQ ID NO: 2112619 - DNA, 25 bp, Homo sapien
tcccgagttcacaccattctcagcc

SEQ ID NO: 2112620 - DNA, 25 bp, Homo sapien
cacctcccgagttcacaccattctc

SEQ ID NO: 2112621 - DNA, 25 bp, Homo sapien
cctcccgagttcacaccattctcag

SEQ ID NO: 2112622 - DNA, 25 bp, Homo sapien
cccgagttcacaccattctcagcct

SEQ ID NO: 2112623 - DNA, 25 bp, Homo sapien
acaataaaagggatatcagcactga

SEQ ID NO: 2112624 - DNA, 25 bp, Homo sapien
caataaaagggatatcagcactgat

SEQ ID NO: 2112625 - DNA, 25 bp, Homo sapien
aataaaagggatatcagcactgatc

SEQ ID NO: 2112626 - DNA, 25 bp, Homo sapien
tccacaaagatgaggaaaatccagc

SEQ ID NO: 2112627 - DNA, 25 bp, Homo sapien
tccacacagaaaccccatctgaagg

SEQ ID NO: 2112628 - DNA, 25 bp, Homo sapien
cacaaagatgaggaaaatccagcac

SEQ ID NO: 2112629 - DNA, 25 bp, Homo sapien
aatccacaaagatgaggaaaatcca

SEQ ID NO: 2112630 - DNA, 25 bp, Homo sapien
agcttcccagaggaaggaaaaggca

SEQ ID NO: 2112631 - DNA, 25 bp, Homo sapien
ctcatatacaagagctccggctggc

SEQ ID NO: 2112632 - DNA, 25 bp, Homo sapien
ccctctgggacgaagcttcccagag

SEQ ID NO: 2112633 - DNA, 25 bp, Homo sapien
gagtggaactccaacaaactccagc

SEQ ID NO: 2112634 - DNA, 25 bp, Homo sapien
catgtaaagcatactacagtttggg

SEQ ID NO: 2112635 - DNA, 25 bp, Homo sapien
caactgggaacattacttaacagca

SEQ ID NO: 2112636 - DNA, 25 bp, Homo sapien
aaacagaaccctaaaggtgatcctg

SEQ ID NO: 2112637 - DNA, 25 bp, Homo sapien
tatacactttgagggtagacctcca

SEQ ID NO: 2112638 - DNA, 25 bp, Homo sapien
ttgtcttcttttaactccgtgattg

SEQ ID NO: 2112639 - DNA, 25 bp, Homo sapien
ttgtcctggccccttcacgaccaca

SEQ ID NO: 2112640 - DNA, 25 bp, Homo sapien
cttcacgaccacaaagcagatggtg

SEQ ID NO: 2112641 - DNA, 25 bp, Homo sapien
cccttcacgaccacaaagcagatgg

SEQ ID NO: 2112642 - DNA, 25 bp, Homo sapien
ctggccccttcacgaccacaaagca

SEQ ID NO: 2112643 - DNA, 25 bp, Homo sapien
gagcccctgaccgcctcccctccat

SEQ ID NO: 2112644 - DNA, 25 bp, Homo sapien
gcccctgaccgcctcccctccatgg

SEQ ID NO: 2112645 - DNA, 25 bp, Homo sapien
ctgagcccctgaccgcctcccctcc

SEQ ID NO: 2112646 - DNA, 25 bp, Homo sapien
ccctgaccgcctcccctccatggcc

SEQ ID NO: 2112647 - DNA, 25 bp, Homo sapien
gggctctacatagagtcttggtcta

SEQ ID NO: 2112648 - DNA, 25 bp, Homo sapien
catttcagggggctctacatagagt

SEQ ID NO: 2112649 - DNA, 25 bp, Homo sapien
catagagtcttggtctagaccgata

SEQ ID NO: 2112650 - DNA, 25 bp, Homo sapien
tctacatagagtcttggtctagacc

SEQ ID NO: 2112651 - DNA, 25 bp, Homo sapien
ctggggaatacgtgtgggtgtgcaa

SEQ ID NO: 2112652 - DNA, 25 bp, Homo sapien
tggggaatacgtgtgggtgtgcaaa

SEQ ID NO: 2112653 - DNA, 25 bp, Homo sapien
gctgcaggatcctgacgttgagttg

SEQ ID NO: 2112654 - DNA, 25 bp, Homo sapien
caggatcctgacgttgagttgctgg

SEQ ID NO: 2112655 - DNA, 25 bp, Homo sapien
gatcctgacgttgagttgctggttc

SEQ ID NO: 2112656 - DNA, 25 bp, Homo sapien
tgcaggatcctgacgttgagttgct

SEQ ID NO: 2112657 - DNA, 25 bp, Homo sapien
cttgctgcacttgccactctattgg

SEQ ID NO: 2112658 - DNA, 25 bp, Homo sapien
cactgagccactttcactttattag

SEQ ID NO: 2112659 - DNA, 25 bp, Homo sapien
ctgagccactttcactttattaggg

SEQ ID NO: 2112660 - DNA, 25 bp, Homo sapien
gcacttgccactctattggcccatt

SEQ ID NO: 2112661 - DNA, 25 bp, Homo sapien
ctattatgggagtttcagaggctgc

SEQ ID NO: 2112662 - DNA, 25 bp, Homo sapien
tggtcctatcagctgtacacaacgt

SEQ ID NO: 2112663 - DNA, 25 bp, Homo sapien
cactctcgggtccactagactgggt

SEQ ID NO: 2112664 - DNA, 25 bp, Homo sapien
cagctgtacacaacgtcctaggtct

SEQ ID NO: 2112665 - DNA, 25 bp, Homo sapien
tgggtgaacctgttcctggctatca

SEQ ID NO: 2112666 - DNA, 25 bp, Homo sapien
ctttgggtgaacctgttcctggcta

SEQ ID NO: 2112667 - DNA, 25 bp, Homo sapien
acctgttcctggctatcagcttcag

SEQ ID NO: 2112668 - DNA, 25 bp, Homo sapien
aacctgttcctggctatcagcttca

SEQ ID NO: 2112669 - DNA, 25 bp, Homo sapien
tcaggaccatctccacactcacacc

SEQ ID NO: 2112670 - DNA, 25 bp, Homo sapien
tcctggccatcaggaccatctccac

SEQ ID NO: 2112671 - DNA, 25 bp, Homo sapien
atcaggaccatctccacactcacac

SEQ ID NO: 2112672 - DNA, 25 bp, Homo sapien
ggaccatctccacactcacacccag

SEQ ID NO: 2112673 - DNA, 25 bp, Homo sapien
cctcctctggatttggcaggcccat

SEQ ID NO: 2112674 - DNA, 25 bp, Homo sapien
tcaggccttttcacctcctctggat

SEQ ID NO: 2112675 - DNA, 25 bp, Homo sapien
tcttcaggccttttcacctcctctg

SEQ ID NO: 2112676 - DNA, 25 bp, Homo sapien
cttcttcaggccttttcacctcctc

SEQ ID NO: 2112677 - DNA, 25 bp, Homo sapien
gcctgcatcatttcaacgtgtcttc

SEQ ID NO: 2112678 - DNA, 25 bp, Homo sapien
gcagcctgcatcatttcaacgtgtc

SEQ ID NO: 2112679 - DNA, 25 bp, Homo sapien
cagcctgcatcatttcaacgtgtct

SEQ ID NO: 2112680 - DNA, 25 bp, Homo sapien
ctgcatcatttcaacgtgtcttctt

SEQ ID NO: 2112681 - DNA, 25 bp, Homo sapien
acggcaggaaccacacagcactgcc

SEQ ID NO: 2112682 - DNA, 25 bp, Homo sapien
ggaaccacacagcactgcctcacag

SEQ ID NO: 2112683 - DNA, 25 bp, Homo sapien
accacacagcactgcctcacagctc

SEQ ID NO: 2112684 - DNA, 25 bp, Homo sapien
aggaaccacacagcactgcctcaca

SEQ ID NO: 2112685 - DNA, 25 bp, Homo sapien
agcccctgaccgcctcccctccacg

SEQ ID NO: 2112686 - DNA, 25 bp, Homo sapien
ttcacgaccacgaagccgccggtgg

SEQ ID NO: 2112687 - DNA, 25 bp, Homo sapien
cgtccaggccccttcacgaccacga

SEQ ID NO: 2112688 - DNA, 25 bp, Homo sapien
ccccttcacgaccacgaagccgccg

SEQ ID NO: 2112689 - DNA, 25 bp, Homo sapien
taggccaataataggtcgatcttcc

SEQ ID NO: 2112690 - DNA, 25 bp, Homo sapien
ggtctaggccaataataggtcgatc

SEQ ID NO: 2112691 - DNA, 25 bp, Homo sapien
aataataggtcgatcttcctcgcca

SEQ ID NO: 2112692 - DNA, 25 bp, Homo sapien
gccaataataggtcgatcttcctcg

SEQ ID NO: 2112693 - DNA, 25 bp, Homo sapien
gctgcaggatcctgacgttgagttg

SEQ ID NO: 2112694 - DNA, 25 bp, Homo sapien
tccacttcatcactgaactgctcgg

SEQ ID NO: 2112695 - DNA, 25 bp, Homo sapien
ccacttcatcactgaactgctcggg

SEQ ID NO: 2112696 - DNA, 25 bp, Homo sapien
gatcctgacgttgagttgctggttc

SEQ ID NO: 2112697 - DNA, 25 bp, Homo sapien
tcctctggatttggcgggtccatct

SEQ ID NO: 2112698 - DNA, 25 bp, Homo sapien
tggatttggcgggtccatctcctgc

SEQ ID NO: 2112699 - DNA, 25 bp, Homo sapien
tctggatttggcgggtccatctcct

SEQ ID NO: 2112700 - DNA, 25 bp, Homo sapien
ctggatttggcgggtccatctcctg

SEQ ID NO: 2112701 - DNA, 25 bp, Homo sapien
acggcaggaaccacacagcactgcc

SEQ ID NO: 2112702 - DNA, 25 bp, Homo sapien
aggaaccacacagcactgcctcaca

SEQ ID NO: 2112703 - DNA, 25 bp, Homo sapien
ggaaccacacagcactgcctcacag

SEQ ID NO: 2112704 - DNA, 25 bp, Homo sapien
gaaccacacagcactgcctcacagc

SEQ ID NO: 2112705 - DNA, 25 bp, Homo sapien
ttcacgaccacgaagccgccggtgg

SEQ ID NO: 2112706 - DNA, 25 bp, Homo sapien
ccgtccaggccccttcacgaccacg

SEQ ID NO: 2112707 - DNA, 25 bp, Homo sapien
cgtccaggccccttcacgaccacga

SEQ ID NO: 2112708 - DNA, 25 bp, Homo sapien
cccttcacgaccacgaagccgccgg

SEQ ID NO: 2112709 - DNA, 25 bp, Homo sapien
ctgaccgcctcccctccacggccca

SEQ ID NO: 2112710 - DNA, 25 bp, Homo sapien
tgaccgcctcccctccacggcccac

SEQ ID NO: 2112711 - DNA, 25 bp, Homo sapien
agcccctgaccgcctcccctccacg

SEQ ID NO: 2112712 - DNA, 25 bp, Homo sapien
ctgagcccctgaccgcctcccctcc

SEQ ID NO: 2112713 - DNA, 25 bp, Homo sapien
ataataggtcgatcttcctcgccaa

SEQ ID NO: 2112714 - DNA, 25 bp, Homo sapien
ccgcataggcccaatcatttcagga

SEQ ID NO: 2112715 - DNA, 25 bp, Homo sapien
aggaggctctacgtagcgtcttggt

SEQ ID NO: 2112716 - DNA, 25 bp, Homo sapien
cgcataggcccaatcatttcaggag

SEQ ID NO: 2112717 - DNA, 25 bp, Homo sapien
atttcaggaggctctacgtagcgtc

SEQ ID NO: 2112718 - DNA, 25 bp, Homo sapien
ccacttcatcactgaactgctcggg

SEQ ID NO: 2112719 - DNA, 25 bp, Homo sapien
tccacttcatcactgaactgctcgg

SEQ ID NO: 2112720 - DNA, 25 bp, Homo sapien
tgcaggatcctgacattgagttgct

SEQ ID NO: 2112721 - DNA, 25 bp, Homo sapien
tcctctggatttggcgggtccatct

SEQ ID NO: 2112722 - DNA, 25 bp, Homo sapien
tggatttggcgggtccatctcctgc

SEQ ID NO: 2112723 - DNA, 25 bp, Homo sapien
tctggatttggcgggtccatctcct

SEQ ID NO: 2112724 - DNA, 25 bp, Homo sapien
ctggatttggcgggtccatctcctg

SEQ ID NO: 2112725 - DNA, 25 bp, Homo sapien
gcagcctgcatcatttcaacgtgtc

SEQ ID NO: 2112726 - DNA, 25 bp, Homo sapien
gcctgcatcatttcaacgtgtcttc

SEQ ID NO: 2112727 - DNA, 25 bp, Homo sapien
cagcctgcatcatttcaacgtgtct

SEQ ID NO: 2112728 - DNA, 25 bp, Homo sapien
ctgcatcatttcaacgtgtcttctt

SEQ ID NO: 2112729 - DNA, 25 bp, Homo sapien
tcagtagaggaaaaagagtccggac

SEQ ID NO: 2112730 - DNA, 25 bp, Homo sapien
cagatgaatctcagtagaggaaaaa

SEQ ID NO: 2112731 - DNA, 25 bp, Homo sapien
gatgaatctcagtagaggaaaaaga

SEQ ID NO: 2112732 - DNA, 25 bp, Homo sapien
tagaggaaaaagagtccggacggca

SEQ ID NO: 2112733 - DNA, 25 bp, Homo sapien
agcccctgaccgcctcccctccacg

SEQ ID NO: 2112734 - DNA, 25 bp, Homo sapien
ttcacgaccacgaagccgccggtgg

SEQ ID NO: 2112735 - DNA, 25 bp, Homo sapien
cgtccaggccccttcacgaccacga

SEQ ID NO: 2112736 - DNA, 25 bp, Homo sapien
ccccttcacgaccacgaagccgccg

SEQ ID NO: 2112737 - DNA, 25 bp, Homo sapien
aataataggtcgatcttcctcgcca

SEQ ID NO: 2112738 - DNA, 25 bp, Homo sapien
tacatagcgccttggtctaggccaa

SEQ ID NO: 2112739 - DNA, 25 bp, Homo sapien
cgcataggcccaatcatttcaggag

SEQ ID NO: 2112740 - DNA, 25 bp, Homo sapien
caggaggctgtacatagcgccttgg

SEQ ID NO: 2112741 - DNA, 25 bp, Homo sapien
ccacttcatcactgaactgctcggg

SEQ ID NO: 2112742 - DNA, 25 bp, Homo sapien
tccacttcatcactgaactgctcgg

SEQ ID NO: 2112743 - DNA, 25 bp, Homo sapien
tgcaggatcctgacattgagttgct

SEQ ID NO: 2112744 - DNA, 25 bp, Homo sapien
tcctctggatttggcgggtccatct

SEQ ID NO: 2112745 - DNA, 25 bp, Homo sapien
tctggatttggcgggtccatctcct

SEQ ID NO: 2112746 - DNA, 25 bp, Homo sapien
tggatttggcgggtccatctcctgc

SEQ ID NO: 2112747 - DNA, 25 bp, Homo sapien
ctggatttggcgggtccatctcctg

SEQ ID NO: 2112748 - DNA, 25 bp, Homo sapien
gcctgcatcatttcaacgtgtcttc

SEQ ID NO: 2112749 - DNA, 25 bp, Homo sapien
gcagcctgcatcatttcaacgtgtc

SEQ ID NO: 2112750 - DNA, 25 bp, Homo sapien
cagcctgcatcatttcaacgtgtct

SEQ ID NO: 2112751 - DNA, 25 bp, Homo sapien
ctgcatcatttcaacgtgtcttctt

SEQ ID NO: 2112752 - DNA, 25 bp, Homo sapien
cagatgaatctcagtagaggaaaaa

SEQ ID NO: 2112753 - DNA, 25 bp, Homo sapien
gatgaatctcagtagaggaaaaaga

SEQ ID NO: 2112754 - DNA, 25 bp, Homo sapien
tcagtagaggaaaaagagtccggac

SEQ ID NO: 2112755 - DNA, 25 bp, Homo sapien
tagaggaaaaagagtccggacggca

SEQ ID NO: 2112756 - DNA, 25 bp, Homo sapien
ttcacgaccacgaagccgccggtgg

SEQ ID NO: 2112757 - DNA, 25 bp, Homo sapien
agcccctgaccgcctcccctccacg

SEQ ID NO: 2112758 - DNA, 25 bp, Homo sapien
cgtccaggccccttcacgaccacga

SEQ ID NO: 2112759 - DNA, 25 bp, Homo sapien
ccccttcacgaccacgaagccgccg

SEQ ID NO: 2112760 - DNA, 25 bp, Homo sapien
tacatagcgccttggtctaggccaa

SEQ ID NO: 2112761 - DNA, 25 bp, Homo sapien
aataataggtcgatcttcctcgcca

SEQ ID NO: 2112762 - DNA, 25 bp, Homo sapien
cgcataggcccaatcatttcaggag

SEQ ID NO: 2112763 - DNA, 25 bp, Homo sapien
caggaggctgtacatagcgccttgg

SEQ ID NO: 2112764 - DNA, 25 bp, Homo sapien
tccacttcatcactgaactgctcgg

SEQ ID NO: 2112765 - DNA, 25 bp, Homo sapien
ccacttcatcactgaactgctcggg

SEQ ID NO: 2112766 - DNA, 25 bp, Homo sapien
tgcaggatcctgacattgagttgct

SEQ ID NO: 2112767 - DNA, 25 bp, Homo sapien
tggatttggcgggtccatctcctgc

SEQ ID NO: 2112768 - DNA, 25 bp, Homo sapien
tctggatttggcgggtccatctcct

SEQ ID NO: 2112769 - DNA, 25 bp, Homo sapien
ctggatttggcgggtccatctcctg

SEQ ID NO: 2112770 - DNA, 25 bp, Homo sapien
tcctctggatttggcgggtccatct

SEQ ID NO: 2112771 - DNA, 25 bp, Homo sapien
caacgattgggaacatgacttagca

SEQ ID NO: 2112772 - DNA, 25 bp, Homo sapien
gaaccctatgggtgatcccgtgtct

SEQ ID NO: 2112773 - DNA, 25 bp, Homo sapien
tgtcttacacgcaattgaacctctg

SEQ ID NO: 2112774 - DNA, 25 bp, Homo sapien
cataaactttgagcgtagacctgca

SEQ ID NO: 2112775 - DNA, 25 bp, Homo sapien
gcctgcatcatttcaacgtgtcttc

SEQ ID NO: 2112776 - DNA, 25 bp, Homo sapien
gcagcctgcatcatttcaacgtgtc

SEQ ID NO: 2112777 - DNA, 25 bp, Homo sapien
cagcctgcatcatttcaacgtgtct

SEQ ID NO: 2112778 - DNA, 25 bp, Homo sapien
ctgcatcatttcaacgtgtcttctt

SEQ ID NO: 2112779 - DNA, 25 bp, Homo sapien
acggcaggaaccacacagcactgcc

SEQ ID NO: 2112780 - DNA, 25 bp, Homo sapien
ggaaccacacagcactgcctcacag

SEQ ID NO: 2112781 - DNA, 25 bp, Homo sapien
accacacagcactgcctcacagctc

SEQ ID NO: 2112782 - DNA, 25 bp, Homo sapien
aggaaccacacagcactgcctcaca

SEQ ID NO: 2112783 - DNA, 25 bp, Homo sapien
agcccctgaccgcctcccctccacg

SEQ ID NO: 2112784 - DNA, 25 bp, Homo sapien
ttcacgaccacgaagccgccggtgg

SEQ ID NO: 2112785 - DNA, 25 bp, Homo sapien
ccccttcacgaccacgaagccgccg

SEQ ID NO: 2112786 - DNA, 25 bp, Homo sapien
cgtccaggccccttcacgaccacga

SEQ ID NO: 2112787 - DNA, 25 bp, Homo sapien
tacatagcgccttggtctaggccaa

SEQ ID NO: 2112788 - DNA, 25 bp, Homo sapien
aataataggtcgatcttcctcgcca

SEQ ID NO: 2112789 - DNA, 25 bp, Homo sapien
cgcataggcccaatcatttcaggag

SEQ ID NO: 2112790 - DNA, 25 bp, Homo sapien
caggaggctgtacatagcgccttgg

SEQ ID NO: 2112791 - DNA, 25 bp, Homo sapien
tggggaatacgtgtgggtgtgcaaa

SEQ ID NO: 2112792 - DNA, 25 bp, Homo sapien
ctggggaatacgtgtgggtgtgcaa

SEQ ID NO: 2112793 - DNA, 25 bp, Homo sapien
gctgcaggatcctgacgttgagttg

SEQ ID NO: 2112794 - DNA, 25 bp, Homo sapien
ccacttcatcactgaactgctcggg

SEQ ID NO: 2112795 - DNA, 25 bp, Homo sapien
gatcctgacgttgagttgctggttc

SEQ ID NO: 2112796 - DNA, 25 bp, Homo sapien
tccacttcatcactgaactgctcgg

SEQ ID NO: 2112797 - DNA, 25 bp, Homo sapien
tggatttggcgggtccatctcctgc

SEQ ID NO: 2112798 - DNA, 25 bp, Homo sapien
tcctctggatttggcgggtccatct

SEQ ID NO: 2112799 - DNA, 25 bp, Homo sapien
tctggatttggcgggtccatctcct

SEQ ID NO: 2112800 - DNA, 25 bp, Homo sapien
ctggatttggcgggtccatctcctg

SEQ ID NO: 2112801 - DNA, 25 bp, Homo sapien
ctgcatcatttcaacgtgtcttctt

SEQ ID NO: 2112802 - DNA, 25 bp, Homo sapien
gcctgcatcatttcaacgtgtcttc

SEQ ID NO: 2112803 - DNA, 25 bp, Homo sapien
cagcctgcatcatttcaacgtgtct

SEQ ID NO: 2112804 - DNA, 25 bp, Homo sapien
gcagcctgcatcatttcaacgtgtc

SEQ ID NO: 2112805 - DNA, 25 bp, Homo sapien
acggcaggaaccacacagcactgcc

SEQ ID NO: 2112806 - DNA, 25 bp, Homo sapien
ggaaccacacagcactgcctcacag

SEQ ID NO: 2112807 - DNA, 25 bp, Homo sapien
accacacagcactgcctcacagctc

SEQ ID NO: 2112808 - DNA, 25 bp, Homo sapien
aggaaccacacagcactgcctcaca

SEQ ID NO: 2112809 - DNA, 25 bp, Homo sapien
ttcacgaccacgaagccgccggtgg

SEQ ID NO: 2112810 - DNA, 25 bp, Homo sapien
cgtccaggccccttcacgaccacga

SEQ ID NO: 2112811 - DNA, 25 bp, Homo sapien
agcccctgaccgcctcccctccacg

SEQ ID NO: 2112812 - DNA, 25 bp, Homo sapien
ccccttcacgaccacgaagccgccg

SEQ ID NO: 2112813 - DNA, 25 bp, Homo sapien
tacatagcgccttggtctaggccaa

SEQ ID NO: 2112814 - DNA, 25 bp, Homo sapien
aataataggtcgatcttcctcgcca

SEQ ID NO: 2112815 - DNA, 25 bp, Homo sapien
cgcataggcccaatcatttcaggag

SEQ ID NO: 2112816 - DNA, 25 bp, Homo sapien
caggaggctgtacatagcgccttgg

SEQ ID NO: 2112817 - DNA, 25 bp, Homo sapien
gctgcaggatcctgacgttgagttg

SEQ ID NO: 2112818 - DNA, 25 bp, Homo sapien
ccacttcatcactgaactgctcggg

SEQ ID NO: 2112819 - DNA, 25 bp, Homo sapien
gatcctgacgttgagttgctggttc

SEQ ID NO: 2112820 - DNA, 25 bp, Homo sapien
tccacttcatcactgaactgctcgg

SEQ ID NO: 2112821 - DNA, 25 bp, Homo sapien
tggatttggcgggtccatctcctgc

SEQ ID NO: 2112822 - DNA, 25 bp, Homo sapien
tcctctggatttggcgggtccatct

SEQ ID NO: 2112823 - DNA, 25 bp, Homo sapien
tctggatttggcgggtccatctcct

SEQ ID NO: 2112824 - DNA, 25 bp, Homo sapien
ctggatttggcgggtccatctcctg

SEQ ID NO: 2112825 - DNA, 25 bp, Homo sapien
gcagcctgcatcatttcaacgtgtc

SEQ ID NO: 2112826 - DNA, 25 bp, Homo sapien
gcctgcatcatttcaacgtgtcttc

SEQ ID NO: 2112827 - DNA, 25 bp, Homo sapien
cagcctgcatcatttcaacgtgtct

SEQ ID NO: 2112828 - DNA, 25 bp, Homo sapien
ctgcatcatttcaacgtgtcttctt

SEQ ID NO: 2112829 - DNA, 25 bp, Homo sapien
cgtccaggccccttcacgaccacga

SEQ ID NO: 2112830 - DNA, 25 bp, Homo sapien
ttcacgaccacgaagccgccggtgg

SEQ ID NO: 2112831 - DNA, 25 bp, Homo sapien
agcccctgaccgcctcccctccacg

SEQ ID NO: 2112832 - DNA, 25 bp, Homo sapien
ccccttcacgaccacgaagccgccg

SEQ ID NO: 2112833 - DNA, 25 bp, Homo sapien
aataataggtcgatcttcctcgcca

SEQ ID NO: 2112834 - DNA, 25 bp, Homo sapien
tacatagcgccttggtctaggccaa

SEQ ID NO: 2112835 - DNA, 25 bp, Homo sapien
cgcataggcccaatcatttcaggag

SEQ ID NO: 2112836 - DNA, 25 bp, Homo sapien
caggaggctgtacatagcgccttgg

SEQ ID NO: 2112837 - DNA, 25 bp, Homo sapien
tccacttcatcactgaactgctcgg

SEQ ID NO: 2112838 - DNA, 25 bp, Homo sapien
ccacttcatcactgaactgctcggg

SEQ ID NO: 2112839 - DNA, 25 bp, Homo sapien
tgcaggatcctgacattgagttgct

SEQ ID NO: 2112840 - DNA, 25 bp, Homo sapien
tcctctggatttggcgggtccatct

SEQ ID NO: 2112841 - DNA, 25 bp, Homo sapien
tctggatttggcgggtccatctcct

SEQ ID NO: 2112842 - DNA, 25 bp, Homo sapien
tggatttggcgggtccatctcctgc

SEQ ID NO: 2112843 - DNA, 25 bp, Homo sapien
ctggatttggcgggtccatctcctg

SEQ ID NO: 2112844 - DNA, 25 bp, Homo sapien
gcctgcatcatttcaacgtgtcttc

SEQ ID NO: 2112845 - DNA, 25 bp, Homo sapien
cagcctgcatcatttcaacgtgtct

SEQ ID NO: 2112846 - DNA, 25 bp, Homo sapien
gcagcctgcatcatttcaacgtgtc

SEQ ID NO: 2112847 - DNA, 25 bp, Homo sapien
ctgcatcatttcaacgtgtcttctt

SEQ ID NO: 2112848 - DNA, 25 bp, Homo sapien
acggcaggaaccacacagcactgcc

SEQ ID NO: 2112849 - DNA, 25 bp, Homo sapien
aggaaccacacagcactgcctcaca

SEQ ID NO: 2112850 - DNA, 25 bp, Homo sapien
ggaaccacacagcactgcctcacag

SEQ ID NO: 2112851 - DNA, 25 bp, Homo sapien
accacacagcactgcctcacagctc

SEQ ID NO: 2112852 - DNA, 25 bp, Homo sapien
ttcacgaccacgaagccgccggtgg

SEQ ID NO: 2112853 - DNA, 25 bp, Homo sapien
agcccctgaccgcctcccctccacg

SEQ ID NO: 2112854 - DNA, 25 bp, Homo sapien
cgtccaggccccttcacgaccacga

SEQ ID NO: 2112855 - DNA, 25 bp, Homo sapien
ccccttcacgaccacgaagccgccg

SEQ ID NO: 2112856 - DNA, 25 bp, Homo sapien
ccgataggtcgatcttcctcgccaa

SEQ ID NO: 2112857 - DNA, 25 bp, Homo sapien
ccgcataggcccaatcatttcagga

SEQ ID NO: 2112858 - DNA, 25 bp, Homo sapien
atttcaggaggctctacgtagcgtc

SEQ ID NO: 2112859 - DNA, 25 bp, Homo sapien
aggaggctctacgtagcgtcttggt

SEQ ID NO: 2112860 - DNA, 25 bp, Homo sapien
cgcataggcccaatcatttcaggag

SEQ ID NO: 2112861 - DNA, 25 bp, Homo sapien
ccacttcatcactgaactgctcggg

SEQ ID NO: 2112862 - DNA, 25 bp, Homo sapien
tccacttcatcactgaactgctcgg

SEQ ID NO: 2112863 - DNA, 25 bp, Homo sapien
gatcctgacgttgagttgctggttc

SEQ ID NO: 2112864 - DNA, 25 bp, Homo sapien
gctgcaggatcctgacgttgagttg

SEQ ID NO: 2112865 - DNA, 25 bp, Homo sapien
tcctctggatttggcgggtccatct

SEQ ID NO: 2112866 - DNA, 25 bp, Homo sapien
tctggatttggcgggtccatctcct

SEQ ID NO: 2112867 - DNA, 25 bp, Homo sapien
tggatttggcgggtccatctcctgc

SEQ ID NO: 2112868 - DNA, 25 bp, Homo sapien
ctggatttggcgggtccatctcctg

SEQ ID NO: 2112869 - DNA, 25 bp, Homo sapien
cattaaaagccagagaaaccctgcc

SEQ ID NO: 2112870 - DNA, 25 bp, Homo sapien
aattgttcattaaaagccagagaaa

SEQ ID NO: 2112871 - DNA, 25 bp, Homo sapien
ttcattaaaagccagagaaaccctg

SEQ ID NO: 2112872 - DNA, 25 bp, Homo sapien
agcaattgttcattaaaagccagag

SEQ ID NO: 2112873 - DNA, 25 bp, Homo sapien
caacgattgggaacatgacttagca

SEQ ID NO: 2112874 - DNA, 25 bp, Homo sapien
gaaccctatgggtgatcccgtgtct

SEQ ID NO: 2112875 - DNA, 25 bp, Homo sapien
tgtcttacacgcaattgaacctctg

SEQ ID NO: 2112876 - DNA, 25 bp, Homo sapien
cataaactttgagcgtagacctgca

SEQ ID NO: 2112877 - DNA, 25 bp, Homo sapien
gcctgcatcatttcaacgtgtcttc

SEQ ID NO: 2112878 - DNA, 25 bp, Homo sapien
gcagcctgcatcatttcaacgtgtc

SEQ ID NO: 2112879 - DNA, 25 bp, Homo sapien
cagcctgcatcatttcaacgtgtct

SEQ ID NO: 2112880 - DNA, 25 bp, Homo sapien
ctgcatcatttcaacgtgtcttctt

SEQ ID NO: 2112881 - DNA, 25 bp, Homo sapien
ggaaccacacagcactgcctcacag

SEQ ID NO: 2112882 - DNA, 25 bp, Homo sapien
acggcaggaaccacacagcactgcc

SEQ ID NO: 2112883 - DNA, 25 bp, Homo sapien
accacacagcactgcctcacagctc

SEQ ID NO: 2112884 - DNA, 25 bp, Homo sapien
aggaaccacacagcactgcctcaca

SEQ ID NO: 2112885 - DNA, 25 bp, Homo sapien
cgtccaggccccttcacgaccacga

SEQ ID NO: 2112886 - DNA, 25 bp, Homo sapien
ttcacgaccacgaagccgccggtgg

SEQ ID NO: 2112887 - DNA, 25 bp, Homo sapien
agcccctgaccgcctcccctccacg

SEQ ID NO: 2112888 - DNA, 25 bp, Homo sapien
ccccttcacgaccacgaagccgccg

SEQ ID NO: 2112889 - DNA, 25 bp, Homo sapien
aataataggtcgatcttcctcgcca

SEQ ID NO: 2112890 - DNA, 25 bp, Homo sapien
ggtctaggccaataataggtcgatc

SEQ ID NO: 2112891 - DNA, 25 bp, Homo sapien
catagcgccttggtctaggccaata

SEQ ID NO: 2112892 - DNA, 25 bp, Homo sapien
caggaggctgtacatagcgccttgg

SEQ ID NO: 2112893 - DNA, 25 bp, Homo sapien
gctgcaggatcctgacgttgagttg

SEQ ID NO: 2112894 - DNA, 25 bp, Homo sapien
gatcctgacgttgagttgctggttc

SEQ ID NO: 2112895 - DNA, 25 bp, Homo sapien
ccacttcatcactgaactgctcggg

SEQ ID NO: 2112896 - DNA, 25 bp, Homo sapien
tccacttcatcactgaactgctcgg

SEQ ID NO: 2112897 - DNA, 25 bp, Homo sapien
tcctctggatttggcgggtccatct

SEQ ID NO: 2112898 - DNA, 25 bp, Homo sapien
tctggatttggcgggtccatctcct

SEQ ID NO: 2112899 - DNA, 25 bp, Homo sapien
tggatttggcgggtccatctcctgc

SEQ ID NO: 2112900 - DNA, 25 bp, Homo sapien
ctggatttggcgggtccatctcctg

SEQ ID NO: 2112901 - DNA, 25 bp, Homo sapien
tggggaaagatttaagaagcaattg

SEQ ID NO: 2112902 - DNA, 25 bp, Homo sapien
agccagagaatcccagtctgggcaa

SEQ ID NO: 2112903 - DNA, 25 bp, Homo sapien
tccgtggggaaagatttaagaagca

SEQ ID NO: 2112904 - DNA, 25 bp, Homo sapien
cgtggggaaagatttaagaagcaat

SEQ ID NO: 2112905 - DNA, 25 bp, Homo sapien
gaactaaacggtctcttgccatttg

SEQ ID NO: 2112906 - DNA, 25 bp, Homo sapien
cacagatgataggaactaaacggtc

SEQ ID NO: 2112907 - DNA, 25 bp, Homo sapien
gataggaactaaacggtctcttgcc

SEQ ID NO: 2112908 - DNA, 25 bp, Homo sapien
taaacggtctcttgccatttgatat

SEQ ID NO: 2112909 - DNA, 25 bp, Homo sapien
ctttattgggagaacttcaatgaag

SEQ ID NO: 2112910 - DNA, 25 bp, Homo sapien
ttattgggagaacttcaatgaagaa

SEQ ID NO: 2112911 - DNA, 25 bp, Homo sapien
tttattgggagaacttcaatgaaga

SEQ ID NO: 2112912 - DNA, 25 bp, Homo sapien
tatccggtagatctgctcaatgcca

SEQ ID NO: 2112913 - DNA, 25 bp, Homo sapien
taggctaaagcatcctcgcaacagg

SEQ ID NO: 2112914 - DNA, 25 bp, Homo sapien
cattatgggaaagcctagccctgca

SEQ ID NO: 2112915 - DNA, 25 bp, Homo sapien
tacacagatctagggtcagtcagcc

SEQ ID NO: 2112916 - DNA, 25 bp, Homo sapien
acaaatgtcagtctcgaggcaccga

SEQ ID NO: 2112917 - DNA, 25 bp, Homo sapien
ggagtttgccccttttgcgcgcaga

SEQ ID NO: 2112918 - DNA, 25 bp, Homo sapien
gaggcaccgagacaggattcgaatc

SEQ ID NO: 2112919 - DNA, 25 bp, Homo sapien
aaccagcggccaattggaggtcggc

SEQ ID NO: 2112920 - DNA, 25 bp, Homo sapien
acaacactcagaatctaaattggac

SEQ ID NO: 2112921 - DNA, 25 bp, Homo sapien
gcagaagacggctgtgccacccacg

SEQ ID NO: 2112922 - DNA, 25 bp, Homo sapien
cagaagacggctgtgccacccacgt

SEQ ID NO: 2112923 - DNA, 25 bp, Homo sapien
cacagagagtggtcccaagcgagtt

SEQ ID NO: 2112924 - DNA, 25 bp, Homo sapien
caggagttccataagtcacccagag

SEQ ID NO: 2112925 - DNA, 25 bp, Homo sapien
ccaagcgagtttgccaacggtttgt

SEQ ID NO: 2112926 - DNA, 25 bp, Homo sapien
ctcagagtctacgtcttccatgcag

SEQ ID NO: 2112927 - DNA, 25 bp, Homo sapien
ggcaaagaaggaatcatttccatca

SEQ ID NO: 2112928 - DNA, 25 bp, Homo sapien
ccatcagaataaggggaagcagtag

SEQ ID NO: 2112929 - DNA, 25 bp, Homo sapien
gaagcagtagtaatgtgtgctggca

SEQ ID NO: 2112930 - DNA, 25 bp, Homo sapien
tgtgctggcagcatgctctgggcac

SEQ ID NO: 2112931 - DNA, 25 bp, Homo sapien
tgggccattagaaattcgcaaggtg

SEQ ID NO: 2112932 - DNA, 25 bp, Homo sapien
cgcgctccttaacctgcattagaag

SEQ ID NO: 2112933 - DNA, 25 bp, Homo sapien
tagaaattcgcaaggtgaatagaac

SEQ ID NO: 2112934 - DNA, 25 bp, Homo sapien
tcagtggttccctgtgtcgcgctcc

SEQ ID NO: 2112935 - DNA, 25 bp, Homo sapien
tcagaataggagctagcaccatctg

SEQ ID NO: 2112936 - DNA, 25 bp, Homo sapien
gacttgcattaagccctcatcatcc

SEQ ID NO: 2112937 - DNA, 25 bp, Homo sapien
gtgacttgcattaagccctcatcat

SEQ ID NO: 2112938 - DNA, 25 bp, Homo sapien
tcatcatcctcttcacatggagtca

SEQ ID NO: 2112939 - DNA, 25 bp, Homo sapien
gagtccaggatgtgttgtctctgaa

SEQ ID NO: 2112940 - DNA, 25 bp, Homo sapien
taagtatttggagtactctggccgg

SEQ ID NO: 2112941 - DNA, 25 bp, Homo sapien
tgatctccggtataggtggtctgtg

SEQ ID NO: 2112942 - DNA, 25 bp, Homo sapien
tatccacatggtttgaatctgaggc

SEQ ID NO: 2112943 - DNA, 25 bp, Homo sapien
ttgaggatttgtttcctaagtttgc

SEQ ID NO: 2112944 - DNA, 25 bp, Homo sapien
tgttgttgttgtcatctaaattcat

SEQ ID NO: 2112945 - DNA, 25 bp, Homo sapien
ttgtttcctaagtttgcttctggga

SEQ ID NO: 2112946 - DNA, 25 bp, Homo sapien
gatttgtttcctaagtttgcttctg

SEQ ID NO: 2112947 - DNA, 25 bp, Homo sapien
tccatgctcagggtgtgaggtcgct

SEQ ID NO: 2112948 - DNA, 25 bp, Homo sapien
ttggaaatccatgctcagggtgtga

SEQ ID NO: 2112949 - DNA, 25 bp, Homo sapien
aatccatgctcagggtgtgaggtcg

SEQ ID NO: 2112950 - DNA, 25 bp, Homo sapien
gaaatccatgctcagggtgtgaggt

SEQ ID NO: 2112951 - DNA, 25 bp, Homo sapien
agagagcctggcgaagaatgaaggg

SEQ ID NO: 2112952 - DNA, 25 bp, Homo sapien
gagcctggcgaagaatgaagggaag

SEQ ID NO: 2112953 - DNA, 25 bp, Homo sapien
gcctggcgaagaatgaagggaagag

SEQ ID NO: 2112954 - DNA, 25 bp, Homo sapien
gagagcctggcgaagaatgaaggga

SEQ ID NO: 2112955 - DNA, 25 bp, Homo sapien
taaactcccatggaggaacgatcgg

SEQ ID NO: 2112956 - DNA, 25 bp, Homo sapien
ttcaagtcctagatcaaaacatggg

SEQ ID NO: 2112957 - DNA, 25 bp, Homo sapien
gactcagatagtgtcccgctccaaa

SEQ ID NO: 2112958 - DNA, 25 bp, Homo sapien
cagtctcaggtgaaagagtcccgac

SEQ ID NO: 2112959 - DNA, 25 bp, Homo sapien
gcaactagaagatcgtgaactgaag

SEQ ID NO: 2112960 - DNA, 25 bp, Homo sapien
caactagaagatcgtgaactgaaga

SEQ ID NO: 2112961 - DNA, 25 bp, Homo sapien
ctgcaactagaagatcgtgaactga

SEQ ID NO: 2112962 - DNA, 25 bp, Homo sapien
cgctgcaactagaagatcgtgaact

SEQ ID NO: 2112963 - DNA, 25 bp, Homo sapien
gatcttgatctcactcgtgcactca

SEQ ID NO: 2112964 - DNA, 25 bp, Homo sapien
acgaatgcaaccacatcgggagcct

SEQ ID NO: 2112965 - DNA, 25 bp, Homo sapien
aatgcaaccacatcgggagcctcct

SEQ ID NO: 2112966 - DNA, 25 bp, Homo sapien
agccacgaatgcaaccacatcggga

SEQ ID NO: 2112967 - DNA, 25 bp, Homo sapien
aggaaagtcataagactatttccag

SEQ ID NO: 2112968 - DNA, 25 bp, Homo sapien
ctgcaaggaccaataattctggaac

SEQ ID NO: 2112969 - DNA, 25 bp, Homo sapien
taggaaagtcataagactatttcca

SEQ ID NO: 2112970 - DNA, 25 bp, Homo sapien
tgcaaggaccaataattctggaacc

SEQ ID NO: 2112971 - DNA, 25 bp, Homo sapien
gttcctcttgctgagattcaccggg

SEQ ID NO: 2112972 - DNA, 25 bp, Homo sapien
cttcgatcggaggtgttccttctct

SEQ ID NO: 2112973 - DNA, 25 bp, Homo sapien
cagcagctgaaaactacactattcc

SEQ ID NO: 2112974 - DNA, 25 bp, Homo sapien
ttttccaagtatgccaaagaactct

SEQ ID NO: 2112975 - DNA, 25 bp, Homo sapien
gattactttacaggtttccagccaa

SEQ ID NO: 2112976 - DNA, 25 bp, Homo sapien
tttatcacaaggactacagcagctg

SEQ ID NO: 2112977 - DNA, 25 bp, Homo sapien
ttagtcttagcatgcttaggattag

SEQ ID NO: 2112978 - DNA, 25 bp, Homo sapien
agagccatctccacgctcactccga

SEQ ID NO: 2112979 - DNA, 25 bp, Homo sapien
gctcactccgagtcttttccagatc

SEQ ID NO: 2112980 - DNA, 25 bp, Homo sapien
tctttagtcttagcatgcttaggat

SEQ ID NO: 2112981 - DNA, 25 bp, Homo sapien
aacagttgagttcattacttagcag

SEQ ID NO: 2112982 - DNA, 25 bp, Homo sapien
tactgagatgacactaaaagcacac

SEQ ID NO: 2112983 - DNA, 25 bp, Homo sapien
ttaaaaccagaacgctaaccactgc

SEQ ID NO: 2112984 - DNA, 25 bp, Homo sapien
ctcactctagtggtacaaggaaaca

SEQ ID NO: 2112985 - DNA, 25 bp, Homo sapien
ttcaatgtgacatcagccatgtgtg

SEQ ID NO: 2112986 - DNA, 25 bp, Homo sapien
ccctcttgacatcaggaatatgaca

SEQ ID NO: 2112987 - DNA, 25 bp, Homo sapien
gagcatcacggaggcactcaaacag

SEQ ID NO: 2112988 - DNA, 25 bp, Homo sapien
caggttgagtataccatccctgaaa

SEQ ID NO: 2112989 - DNA, 25 bp, Homo sapien
gggataaaccaacagaataggcaag

SEQ ID NO: 2112990 - DNA, 25 bp, Homo sapien
agggtaagaatcagtgttaggctac

SEQ ID NO: 2112991 - DNA, 25 bp, Homo sapien
cagggtaagaatcagtgttaggcta

SEQ ID NO: 2112992 - DNA, 25 bp, Homo sapien
gagcaagtagtgtcatctggtgcac

SEQ ID NO: 2112993 - DNA, 25 bp, Homo sapien
tggtgcaccagagccccaggtgaca

SEQ ID NO: 2112994 - DNA, 25 bp, Homo sapien
agtgtgggagattggggaagctgac

SEQ ID NO: 2112995 - DNA, 25 bp, Homo sapien
tgtgtaccagggagcaagtagtgtc

SEQ ID NO: 2112996 - DNA, 25 bp, Homo sapien
tggtaacaaacagtgttgtgtggga

SEQ ID NO: 2112997 - DNA, 25 bp, Homo sapien
tcatggtaacaaacagtgttgtgtg

SEQ ID NO: 2112998 - DNA, 25 bp, Homo sapien
atggaacgtgcttggggactgccat

SEQ ID NO: 2112999 - DNA, 25 bp, Homo sapien
atttatcaagcatcatggtaacaaa

SEQ ID NO: 2113000 - DNA, 25 bp, Homo sapien
ttcaaggagagtggctatgtcctga

SEQ ID NO: 2113001 - DNA, 25 bp, Homo sapien
caaggagagtggctatgtcctgagg

SEQ ID NO: 2113002 - DNA, 25 bp, Homo sapien
aaggagagtggctatgtcctgaggc

SEQ ID NO: 2113003 - DNA, 25 bp, Homo sapien
tcaaggagagtggctatgtcctgag

SEQ ID NO: 2113004 - DNA, 25 bp, Homo sapien
ctgataacacaaaaactgatatttg

SEQ ID NO: 2113005 - DNA, 25 bp, Homo sapien
taacacaaaaactgatatttgtaag

SEQ ID NO: 2113006 - DNA, 25 bp, Homo sapien
cacaaaaactgatatttgtaaggtc

SEQ ID NO: 2113007 - DNA, 25 bp, Homo sapien
tgataacacaaaaactgatatttgt

SEQ ID NO: 2113008 - DNA, 25 bp, Homo sapien
atgtgcatcaccaatattagaacca

SEQ ID NO: 2113009 - DNA, 25 bp, Homo sapien
caccaaaaggtaattcatccgattc

SEQ ID NO: 2113010 - DNA, 25 bp, Homo sapien
gtgcatcaccaatattagaaccaat

SEQ ID NO: 2113011 - DNA, 25 bp, Homo sapien
aattcatccgattcaaatttaacaa

SEQ ID NO: 2113012 - DNA, 25 bp, Homo sapien
atggggtcatcaggatctaccacag

SEQ ID NO: 2113013 - DNA, 25 bp, Homo sapien
aatggggtcatcaggatctaccaca

SEQ ID NO: 2113014 - DNA, 25 bp, Homo sapien
ctaggccttgcatcctgtactcctg

SEQ ID NO: 2113015 - DNA, 25 bp, Homo sapien
ctggagaggcgcgtccctggcccat

SEQ ID NO: 2113016 - DNA, 25 bp, Homo sapien
gggcctggagaggcgcgtccctggc

SEQ ID NO: 2113017 - DNA, 25 bp, Homo sapien
ggcctggagaggcgcgtccctggcc

SEQ ID NO: 2113018 - DNA, 25 bp, Homo sapien
gcctggagaggcgcgtccctggccc

SEQ ID NO: 2113019 - DNA, 25 bp, Homo sapien
tcctccccctgctcgcagggctcgg

SEQ ID NO: 2113020 - DNA, 25 bp, Homo sapien
ggctcgggcggccactgggcgtggc

SEQ ID NO: 2113021 - DNA, 25 bp, Homo sapien
gctcgggcggccactgggcgtggcg

SEQ ID NO: 2113022 - DNA, 25 bp, Homo sapien
cgggcggccactgggcgtggcggcg

SEQ ID NO: 2113023 - DNA, 25 bp, Homo sapien
cagcggcgtccaccttccccgccgt

SEQ ID NO: 2113024 - DNA, 25 bp, Homo sapien
tccgccgtctccaccttcccagcgg

SEQ ID NO: 2113025 - DNA, 25 bp, Homo sapien
ccctccgccgtctccaccttcccag

SEQ ID NO: 2113026 - DNA, 25 bp, Homo sapien
cgtctccaccttctcggtggcgtcc

SEQ ID NO: 2113027 - DNA, 25 bp, Homo sapien
ctcgggttcgggctccagcttgagc

SEQ ID NO: 2113028 - DNA, 25 bp, Homo sapien
gaccggctcgggttcgggctccagc

SEQ ID NO: 2113029 - DNA, 25 bp, Homo sapien
ccggctcgggttcgggctccagctt

SEQ ID NO: 2113030 - DNA, 25 bp, Homo sapien
ggctcgggttcgggctccagcttga

SEQ ID NO: 2113031 - DNA, 25 bp, Homo sapien
ctcgtcgctgttgccgccaccgccg

SEQ ID NO: 2113032 - DNA, 25 bp, Homo sapien
accgccgctccgcgctgggttctca

SEQ ID NO: 2113033 - DNA, 25 bp, Homo sapien
cgccgctccgcgctgggttctcatc

SEQ ID NO: 2113034 - DNA, 25 bp, Homo sapien
gccaccgccgctccgcgctgggttc

SEQ ID NO: 2113035 - DNA, 25 bp, Homo sapien
ccgcggtggatcggagggaagggtg

SEQ ID NO: 2113036 - DNA, 25 bp, Homo sapien
ggcgcggcgcacgactgcgacgcgg

SEQ ID NO: 2113037 - DNA, 25 bp, Homo sapien
ctggtggccccacggcaaaatccac

SEQ ID NO: 2113038 - DNA, 25 bp, Homo sapien
gactgcgacgcggagagggatcggg

SEQ ID NO: 2113039 - DNA, 25 bp, Homo sapien
tcgtctctgcgtgctcgtgaatgtg

SEQ ID NO: 2113040 - DNA, 25 bp, Homo sapien
gcagatgcaggactttgccttgctt

SEQ ID NO: 2113041 - DNA, 25 bp, Homo sapien
cgtgaatgtgtttctccgtgaagca

SEQ ID NO: 2113042 - DNA, 25 bp, Homo sapien
gaagcactggtagataacccgcagt

SEQ ID NO: 2113043 - DNA, 25 bp, Homo sapien
tgtttcccaggttgggaatttctca

SEQ ID NO: 2113044 - DNA, 25 bp, Homo sapien
tttacttgaggccataaacggcgtc

SEQ ID NO: 2113045 - DNA, 25 bp, Homo sapien
taaatggcgggcatgtatccacacc

SEQ ID NO: 2113046 - DNA, 25 bp, Homo sapien
gaaatctctcagtatcggcgtgtgg

SEQ ID NO: 2113047 - DNA, 25 bp, Homo sapien
tcttaaaccgatcgtaaagctggag

SEQ ID NO: 2113048 - DNA, 25 bp, Homo sapien
taggtcctttagatctcgatgccag

SEQ ID NO: 2113049 - DNA, 25 bp, Homo sapien
tgaagctgaaacacccatggagaaa

SEQ ID NO: 2113050 - DNA, 25 bp, Homo sapien
tctgggcctggtccaaagaagtttc

SEQ ID NO: 2113051 - DNA, 25 bp, Homo sapien
ttctctacttttggagcgacggctc

SEQ ID NO: 2113052 - DNA, 25 bp, Homo sapien
aatcatgaaagcaacatgactgtcc

SEQ ID NO: 2113053 - DNA, 25 bp, Homo sapien
taatgaccttatgggacagctgtgg

SEQ ID NO: 2113054 - DNA, 25 bp, Homo sapien
gtgatgccctgcacacaagggacaa

SEQ ID NO: 2113055 - DNA, 25 bp, Homo sapien
agcaacatgactgtcctccaaaagg

SEQ ID NO: 2113056 - DNA, 25 bp, Homo sapien
tgccctctgacagtatcagggaagg

SEQ ID NO: 2113057 - DNA, 25 bp, Homo sapien
gaagaccaccaaattccctcgtgtg

SEQ ID NO: 2113058 - DNA, 25 bp, Homo sapien
tgtgagtaaacatagcaaccgaacc

SEQ ID NO: 2113059 - DNA, 25 bp, Homo sapien
gctgatgggccagtgaactttggaa

SEQ ID NO: 2113060 - DNA, 25 bp, Homo sapien
taaaggtcagtttctgtgcaagcag

SEQ ID NO: 2113061 - DNA, 25 bp, Homo sapien
tagtcagacaccctgcacgaagttg

SEQ ID NO: 2113062 - DNA, 25 bp, Homo sapien
tgcatcccaaggtacaagaggagac

SEQ ID NO: 2113063 - DNA, 25 bp, Homo sapien
gaagttgccaagtgccatccaaagt

SEQ ID NO: 2113064 - DNA, 25 bp, Homo sapien
gatggtatgatctgaaggcaggctc

SEQ ID NO: 2113065 - DNA, 25 bp, Homo sapien
gctgaatacatgatgccttgggttc

SEQ ID NO: 2113066 - DNA, 25 bp, Homo sapien
tgaatacatgatgccttgggttcca

SEQ ID NO: 2113067 - DNA, 25 bp, Homo sapien
ccttgggttccacgatggtatgatc

SEQ ID NO: 2113068 - DNA, 25 bp, Homo sapien
tctgtttcttgatcggaaaaaggcc

SEQ ID NO: 2113069 - DNA, 25 bp, Homo sapien
ggttgatggcgtccctgatcagaat

SEQ ID NO: 2113070 - DNA, 25 bp, Homo sapien
ggcaccaggtctactggatttgaaa

SEQ ID NO: 2113071 - DNA, 25 bp, Homo sapien
tggatttgaaagtaagagttgcgtg

SEQ ID NO: 2113072 - DNA, 25 bp, Homo sapien
aaaagagtagcagttcttctcagca

SEQ ID NO: 2113073 - DNA, 25 bp, Homo sapien
gtttcacctatagctcctctgcctg

SEQ ID NO: 2113074 - DNA, 25 bp, Homo sapien
cacatccacatagaacataggcctg

SEQ ID NO: 2113075 - DNA, 25 bp, Homo sapien
ggcaactggtgactctccttcatgg

SEQ ID NO: 2113076 - DNA, 25 bp, Homo sapien
cccagcaaacagtcggtgcgggggt

SEQ ID NO: 2113077 - DNA, 25 bp, Homo sapien
agcaaacagtcggtgcgggggtggg

SEQ ID NO: 2113078 - DNA, 25 bp, Homo sapien
tgctgctggtgaagaaaacctccca

SEQ ID NO: 2113079 - DNA, 25 bp, Homo sapien
ccagcaaacagtcggtgcgggggtg

SEQ ID NO: 2113080 - DNA, 25 bp, Homo sapien
gagggggagcgaagcgggcgcgcgg

SEQ ID NO: 2113081 - DNA, 25 bp, Homo sapien
tcacacagcccagccggggaggagg

SEQ ID NO: 2113082 - DNA, 25 bp, Homo sapien
ggaggagggggagcgaagcgggcgc

SEQ ID NO: 2113083 - DNA, 25 bp, Homo sapien
aggagggggagcgaagcgggcgcgc

SEQ ID NO: 2113084 - DNA, 25 bp, Homo sapien
tggcgtccaggacaccaagttgagt

SEQ ID NO: 2113085 - DNA, 25 bp, Homo sapien
caagttgagtgagcgccccacgtag

SEQ ID NO: 2113086 - DNA, 25 bp, Homo sapien
tgagcgccccacgtagccggcagag

SEQ ID NO: 2113087 - DNA, 25 bp, Homo sapien
ggacaccaagttgagtgagcgcccc

SEQ ID NO: 2113088 - DNA, 25 bp, Homo sapien
tcgccgaggtccggagcggcggagc

SEQ ID NO: 2113089 - DNA, 25 bp, Homo sapien
gcggcggagcccgtgtccgccgccg

SEQ ID NO: 2113090 - DNA, 25 bp, Homo sapien
cgccggtgggcagcgcgctcggtcg

SEQ ID NO: 2113091 - DNA, 25 bp, Homo sapien
gtgtccgccgccggtgggcagcgcg

SEQ ID NO: 2113092 - DNA, 25 bp, Homo sapien
catctccgggggtccaagccagcgg

SEQ ID NO: 2113093 - DNA, 25 bp, Homo sapien
tcgctgcgcttagggggtgctccgg

SEQ ID NO: 2113094 - DNA, 25 bp, Homo sapien
gggattgcgcttcccctgtgtcgct

SEQ ID NO: 2113095 - DNA, 25 bp, Homo sapien
taagcgccgggctgccaacgccggg

SEQ ID NO: 2113096 - DNA, 25 bp, Homo sapien
tgacgttatcgcacgggcacaggta

SEQ ID NO: 2113097 - DNA, 25 bp, Homo sapien
gggaactccaggcaactgatttgct

SEQ ID NO: 2113098 - DNA, 25 bp, Homo sapien
gcagcttccactgacgttatcgcac

SEQ ID NO: 2113099 - DNA, 25 bp, Homo sapien
acgggcacaggtacaacttcactgg

SEQ ID NO: 2113100 - DNA, 25 bp, Homo sapien
tcctatttcgcgtgcagttaagaag

SEQ ID NO: 2113101 - DNA, 25 bp, Homo sapien
aaagcgctccgatgacttctctgag

SEQ ID NO: 2113102 - DNA, 25 bp, Homo sapien
gaagttaaacccgagcagttgctaa

SEQ ID NO: 2113103 - DNA, 25 bp, Homo sapien
gaagtaatgatcatcgtcccgtggg

SEQ ID NO: 2113104 - DNA, 25 bp, Homo sapien
cctctcagttttgtagggagacttg

SEQ ID NO: 2113105 - DNA, 25 bp, Homo sapien
tagaaaggcagctatgtggccctgt

SEQ ID NO: 2113106 - DNA, 25 bp, Homo sapien
ttgatcctatcttcacccacgctgg

SEQ ID NO: 2113107 - DNA, 25 bp, Homo sapien
tagggagacttgatagaaaggcagc

SEQ ID NO: 2113108 - DNA, 25 bp, Homo sapien
tttgtagtcaatgggagagacagcc

SEQ ID NO: 2113109 - DNA, 25 bp, Homo sapien
tgacagtggtccaattagcaagcca

SEQ ID NO: 2113110 - DNA, 25 bp, Homo sapien
gatggcttctcttaggtgacagtgg

SEQ ID NO: 2113111 - DNA, 25 bp, Homo sapien
ttgtttcggtcaacaagcaggacca

SEQ ID NO: 2113112 - DNA, 25 bp, Homo sapien
tattcctcagtattaacccagctcc

SEQ ID NO: 2113113 - DNA, 25 bp, Homo sapien
gaagagaaagctatactgctcctgg

SEQ ID NO: 2113114 - DNA, 25 bp, Homo sapien
cattgaatatgtaagaacacagtac

SEQ ID NO: 2113115 - DNA, 25 bp, Homo sapien
catggcatgggatgaactaattgaa

SEQ ID NO: 2113116 - DNA, 25 bp, Homo sapien
ggcccttggttttatcagagtcagc

SEQ ID NO: 2113117 - DNA, 25 bp, Homo sapien
tagttattaatatacccagagatca

SEQ ID NO: 2113118 - DNA, 25 bp, Homo sapien
gtctggaatacaattactatgctgt

SEQ ID NO: 2113119 - DNA, 25 bp, Homo sapien
ttaacaaagcaacatctctcctaag

SEQ ID NO: 2113120 - DNA, 25 bp, Homo sapien
ttgtgcttcaactgtccccaccaga

SEQ ID NO: 2113121 - DNA, 25 bp, Homo sapien
gaggttgtgcttcaactgtccccac

SEQ ID NO: 2113122 - DNA, 25 bp, Homo sapien
aagaccacaacacccctttaatcat

SEQ ID NO: 2113123 - DNA, 25 bp, Homo sapien
ctttgtggaggttgtgcttcaactg

SEQ ID NO: 2113124 - DNA, 25 bp, Homo sapien
tgtggcagcacatctagatattggt

SEQ ID NO: 2113125 - DNA, 25 bp, Homo sapien
cttagggacatgtgcaggtaatgga

SEQ ID NO: 2113126 - DNA, 25 bp, Homo sapien
agtatacaagtggaggaactggtcc

SEQ ID NO: 2113127 - DNA, 25 bp, Homo sapien
gggatcaattgcaggagcactgtca

SEQ ID NO: 2113128 - DNA, 25 bp, Homo sapien
gggttttcagaaagctcaccctcca

SEQ ID NO: 2113129 - DNA, 25 bp, Homo sapien
gccatcctgcaaaccctgcatgtgg

SEQ ID NO: 2113130 - DNA, 25 bp, Homo sapien
cctgcaaaccctgcatgtgggaggg

SEQ ID NO: 2113131 - DNA, 25 bp, Homo sapien
tccaccatgcaagggatgtgagaga

SEQ ID NO: 2113132 - DNA, 25 bp, Homo sapien
ctttactgcaggttagattgggaga

SEQ ID NO: 2113133 - DNA, 25 bp, Homo sapien
tctttactgcaggttagattgggag

SEQ ID NO: 2113134 - DNA, 25 bp, Homo sapien
ttactgcaggttagattgggagaat

SEQ ID NO: 2113135 - DNA, 25 bp, Homo sapien
aatctttactgcaggttagattggg

SEQ ID NO: 2113136 - DNA, 25 bp, Homo sapien
ccatggtgcaagtgatattgcccat

SEQ ID NO: 2113137 - DNA, 25 bp, Homo sapien
tggagaaatccatagcggttgctgg

SEQ ID NO: 2113138 - DNA, 25 bp, Homo sapien
gctgttctggaagctactaaaactc

SEQ ID NO: 2113139 - DNA, 25 bp, Homo sapien
gagaaatccatagcggttgctggaa

SEQ ID NO: 2113140 - DNA, 25 bp, Homo sapien
ctcatggagaaatccatagcggttg

SEQ ID NO: 2113141 - DNA, 25 bp, Homo sapien
agccccagtctgaagtgctttagaa

SEQ ID NO: 2113142 - DNA, 25 bp, Homo sapien
aagtgctttagaagggcacttgctg

SEQ ID NO: 2113143 - DNA, 25 bp, Homo sapien
ggaagaaataaccttggcagcccgc

SEQ ID NO: 2113144 - DNA, 25 bp, Homo sapien
gcaacaaacgccacctaaagaacta

SEQ ID NO: 2113145 - DNA, 25 bp, Homo sapien
ctgactgtaaaatggatggctgctg

SEQ ID NO: 2113146 - DNA, 25 bp, Homo sapien
atactgataaagatgaaagctgatg

SEQ ID NO: 2113147 - DNA, 25 bp, Homo sapien
ctgataaagatgaaagctgatgtgt

SEQ ID NO: 2113148 - DNA, 25 bp, Homo sapien
atcatgtcagtgtcatactgataaa

SEQ ID NO: 2113149 - DNA, 25 bp, Homo sapien
acaggagttgatgtgcaatgggaaa

SEQ ID NO: 2113150 - DNA, 25 bp, Homo sapien
gaggttggagcagcttaggtatttc

SEQ ID NO: 2113151 - DNA, 25 bp, Homo sapien
caaaggcacttgcagccatatcaca

SEQ ID NO: 2113152 - DNA, 25 bp, Homo sapien
aatgatgagtggctaaaggcagtgt

SEQ ID NO: 2113153 - DNA, 25 bp, Homo sapien
ctatttgaagaacctattcctccac

SEQ ID NO: 2113154 - DNA, 25 bp, Homo sapien
ttcctccaccattgtacgacttgtc

SEQ ID NO: 2113155 - DNA, 25 bp, Homo sapien
gaagaacctattcctccaccattgt

SEQ ID NO: 2113156 - DNA, 25 bp, Homo sapien
gaacctattcctccaccattgtacg

SEQ ID NO: 2113157 - DNA, 25 bp, Homo sapien
atcatcataggtccctacaccaggg

SEQ ID NO: 2113158 - DNA, 25 bp, Homo sapien
ggtccctacaccagggattggctcc

SEQ ID NO: 2113159 - DNA, 25 bp, Homo sapien
tattgaaatcatcataggtccctac

SEQ ID NO: 2113160 - DNA, 25 bp, Homo sapien
ttgtattgaaatcatcataggtccc

SEQ ID NO: 2113161 - DNA, 25 bp, Homo sapien
tctcggtgcctatcccggtctcgag

SEQ ID NO: 2113162 - DNA, 25 bp, Homo sapien
tcggtgcctatcccggtctcgagac

SEQ ID NO: 2113163 - DNA, 25 bp, Homo sapien
ggtgcctatcccggtctcgagactt

SEQ ID NO: 2113164 - DNA, 25 bp, Homo sapien
ctctcggtgcctatcccggtctcga

SEQ ID NO: 2113165 - DNA, 25 bp, Homo sapien
tggttcaggtcaggcaaattcccag

SEQ ID NO: 2113166 - DNA, 25 bp, Homo sapien
tgtacagtggtcaccgatactaagt

SEQ ID NO: 2113167 - DNA, 25 bp, Homo sapien
acaacctgctggtaacatcaaggct

SEQ ID NO: 2113168 - DNA, 25 bp, Homo sapien
catcaaggctatcaggaggtgcaga

SEQ ID NO: 2113169 - DNA, 25 bp, Homo sapien
cactgtgaattaaggcccatgttga

SEQ ID NO: 2113170 - DNA, 25 bp, Homo sapien
aggagcatcaacaaccagccggaaa

SEQ ID NO: 2113171 - DNA, 25 bp, Homo sapien
gcatcaacaaccagccggaaaaagc

SEQ ID NO: 2113172 - DNA, 25 bp, Homo sapien
atcactcacactgtgaattaaggcc

SEQ ID NO: 2113173 - DNA, 25 bp, Homo sapien
acaatgttcatggttaaaccagaat

SEQ ID NO: 2113174 - DNA, 25 bp, Homo sapien
agctgggaccaactattccactctg

SEQ ID NO: 2113175 - DNA, 25 bp, Homo sapien
tcttttaagtctgtcatccaatgag

SEQ ID NO: 2113176 - DNA, 25 bp, Homo sapien
catctgtgctgatgataagctggga

SEQ ID NO: 2113177 - DNA, 25 bp, Homo sapien
ccctagtttgagaagcatagaccta

SEQ ID NO: 2113178 - DNA, 25 bp, Homo sapien
tatagtttcacctaccctctggcac

SEQ ID NO: 2113179 - DNA, 25 bp, Homo sapien
tgaaccctttacctaagccaagatg

SEQ ID NO: 2113180 - DNA, 25 bp, Homo sapien
gtgtgcacatgccacctcaaattgt

SEQ ID NO: 2113181 - DNA, 25 bp, Homo sapien
aattgactatgtaggcaaaggctcc

SEQ ID NO: 2113182 - DNA, 25 bp, Homo sapien
taaggcgcaaacaccttgacaagag

SEQ ID NO: 2113183 - DNA, 25 bp, Homo sapien
tgacaagagatacggcaaggaaggc

SEQ ID NO: 2113184 - DNA, 25 bp, Homo sapien
gagagcccagaggacgtacatgaaa

SEQ ID NO: 2113185 - DNA, 25 bp, Homo sapien
taaacacagaaagattgaatataga

SEQ ID NO: 2113186 - DNA, 25 bp, Homo sapien
ggttaaacacagaaagattgaatat

SEQ ID NO: 2113187 - DNA, 25 bp, Homo sapien
ctgcaggttaaacacagaaagattg

SEQ ID NO: 2113188 - DNA, 25 bp, Homo sapien
tgcaggttaaacacagaaagattga

SEQ ID NO: 2113189 - DNA, 25 bp, Homo sapien
aagcagtggcacaggatgttcccac

SEQ ID NO: 2113190 - DNA, 25 bp, Homo sapien
tagcccctaataatgaaaccactca

SEQ ID NO: 2113191 - DNA, 25 bp, Homo sapien
tgttcccacagcagcaagccacgtg

SEQ ID NO: 2113192 - DNA, 25 bp, Homo sapien
gccacgtgcactagagggccctctt

SEQ ID NO: 2113193 - DNA, 25 bp, Homo sapien
tgtgtcctactccatgcccaataac

SEQ ID NO: 2113194 - DNA, 25 bp, Homo sapien
ctgtgtcctactccatgcccaataa

SEQ ID NO: 2113195 - DNA, 25 bp, Homo sapien
cctgtgtcctactccatgcccaata

SEQ ID NO: 2113196 - DNA, 25 bp, Homo sapien
gctccaaaggctacagatacaccag

SEQ ID NO: 2113197 - DNA, 25 bp, Homo sapien
aaaggctacagatacaccagctgct

SEQ ID NO: 2113198 - DNA, 25 bp, Homo sapien
taggtgctccaaaggctacagatac

SEQ ID NO: 2113199 - DNA, 25 bp, Homo sapien
acctataggtgctccaaaggctaca

SEQ ID NO: 2113200 - DNA, 25 bp, Homo sapien
tgcaggcatgagagtcaactaatgg

SEQ ID NO: 2113201 - DNA, 25 bp, Homo sapien
gcactcagggactgggatatacaca

SEQ ID NO: 2113202 - DNA, 25 bp, Homo sapien
gccgactggatttctagtcacatgg

SEQ ID NO: 2113203 - DNA, 25 bp, Homo sapien
caactaatggatgaaaactgccgac

SEQ ID NO: 2113204 - DNA, 25 bp, Homo sapien
gaatgaacgccacaatgttttgagg

SEQ ID NO: 2113205 - DNA, 25 bp, Homo sapien
tataacaggatacttgcccaactgg

SEQ ID NO: 2113206 - DNA, 25 bp, Homo sapien
gaaacggttctcataatcacagagc

SEQ ID NO: 2113207 - DNA, 25 bp, Homo sapien
cataaaatagtaccaggcggctgtt

SEQ ID NO: 2113208 - DNA, 25 bp, Homo sapien
tagaagtcgacctgctatagcacca

SEQ ID NO: 2113209 - DNA, 25 bp, Homo sapien
ttgaagacggtccattcctggtggt

SEQ ID NO: 2113210 - DNA, 25 bp, Homo sapien
tgactacaccagctattgaagacgg

SEQ ID NO: 2113211 - DNA, 25 bp, Homo sapien
ccatgctagggataaagaggccaga

SEQ ID NO: 2113212 - DNA, 25 bp, Homo sapien
gatctcttcggaggacaaagcccac

SEQ ID NO: 2113213 - DNA, 25 bp, Homo sapien
tccattgagacggatgtgggcatca

SEQ ID NO: 2113214 - DNA, 25 bp, Homo sapien
aagagaaacagtcatccgagtcacc

SEQ ID NO: 2113215 - DNA, 25 bp, Homo sapien
tcagaggcacgatgtattctaagcc

SEQ ID NO: 2113216 - DNA, 25 bp, Homo sapien
gctgagatcgaggatgttccgaagc

SEQ ID NO: 2113217 - DNA, 25 bp, Homo sapien
tccatgggtgtaaggtcagtcacag

SEQ ID NO: 2113218 - DNA, 25 bp, Homo sapien
tggaagtgctaacaaccccatcctg

SEQ ID NO: 2113219 - DNA, 25 bp, Homo sapien
gaatgctccgtgaaataaatgatgg

SEQ ID NO: 2113220 - DNA, 25 bp, Homo sapien
gctatatgctttaacacatcctttt

SEQ ID NO: 2113221 - DNA, 25 bp, Homo sapien
tttggtaatgattccaagcaatcgc

SEQ ID NO: 2113222 - DNA, 25 bp, Homo sapien
tggttcgccatctgtgctatatgct

SEQ ID NO: 2113223 - DNA, 25 bp, Homo sapien
atcaggatcttggttcgccatctgt

SEQ ID NO: 2113224 - DNA, 25 bp, Homo sapien
tcgctgggaggtacaatgagtgtcc

SEQ ID NO: 2113225 - DNA, 25 bp, Homo sapien
gtaattccaccaagtgtccccagag

SEQ ID NO: 2113226 - DNA, 25 bp, Homo sapien
ggcaaagtccttgtctaccagctaa

SEQ ID NO: 2113227 - DNA, 25 bp, Homo sapien
caacagttagatcccaaaagagtga

SEQ ID NO: 2113228 - DNA, 25 bp, Homo sapien
gacaaaatatgtggttactgagcca

SEQ ID NO: 2113229 - DNA, 25 bp, Homo sapien
tgatacaacataccccagaaagatt

SEQ ID NO: 2113230 - DNA, 25 bp, Homo sapien
gctgaactcttaccccggcagtgaa

SEQ ID NO: 2113231 - DNA, 25 bp, Homo sapien
ggagaaactctagcgactgccttga

SEQ ID NO: 2113232 - DNA, 25 bp, Homo sapien
gagagctctagctgcaattagccaa

SEQ ID NO: 2113233 - DNA, 25 bp, Homo sapien
tctggagggccaatcggtgcttagc

SEQ ID NO: 2113234 - DNA, 25 bp, Homo sapien
tccttttatggctggatggctacca

SEQ ID NO: 2113235 - DNA, 25 bp, Homo sapien
gcatacaagctacaaggattcctga

SEQ ID NO: 2113236 - DNA, 25 bp, Homo sapien
tgtataaagcaatggcgacctgggt

SEQ ID NO: 2113237 - DNA, 25 bp, Homo sapien
cctctgaactgatgggtggcttgca

SEQ ID NO: 2113238 - DNA, 25 bp, Homo sapien
gaaattcaaatagtggcccatgggc

SEQ ID NO: 2113239 - DNA, 25 bp, Homo sapien
tgagcagatgtcttgggtcggccct

SEQ ID NO: 2113240 - DNA, 25 bp, Homo sapien
accaggccaactgcccaacttcacc

SEQ ID NO: 2113241 - DNA, 25 bp, Homo sapien
aggccaactgcccaacttcaccagg

SEQ ID NO: 2113242 - DNA, 25 bp, Homo sapien
acttcaccaggcaagcttctgttac

SEQ ID NO: 2113243 - DNA, 25 bp, Homo sapien
tcaccaggcaagcttctgttacctt

SEQ ID NO: 2113244 - DNA, 25 bp, Homo sapien
catctccatcagggcttgtttttcc

SEQ ID NO: 2113245 - DNA, 25 bp, Homo sapien
cacgttgaggtagtggcacagggaa

SEQ ID NO: 2113246 - DNA, 25 bp, Homo sapien
gccagaagtgctatggccacagcag

SEQ ID NO: 2113247 - DNA, 25 bp, Homo sapien
ctccagggactcgtcttcgccagga

SEQ ID NO: 2113248 - DNA, 25 bp, Homo sapien
gaagcataatagtggctcagctcct

SEQ ID NO: 2113249 - DNA, 25 bp, Homo sapien
ttcctagtggaactgcgggcatcca

SEQ ID NO: 2113250 - DNA, 25 bp, Homo sapien
cctagtggaactgcgggcatccagg

SEQ ID NO: 2113251 - DNA, 25 bp, Homo sapien
atggtggccttgggggagcagactg

SEQ ID NO: 2113252 - DNA, 25 bp, Homo sapien
caggtagtaggattgggagagggca

SEQ ID NO: 2113253 - DNA, 25 bp, Homo sapien
catagcagtttacttccttgattaa

SEQ ID NO: 2113254 - DNA, 25 bp, Homo sapien
gctgggtcccatagcagtttacttc

SEQ ID NO: 2113255 - DNA, 25 bp, Homo sapien
ttccttgattaacttggctcttacc

SEQ ID NO: 2113256 - DNA, 25 bp, Homo sapien
cttgattaacttggctcttaccttg

SEQ ID NO: 2113257 - DNA, 25 bp, Homo sapien
ggtgccctgggagagtgctctaatc

SEQ ID NO: 2113258 - DNA, 25 bp, Homo sapien
cctgggagagtgctctaatcatcca

SEQ ID NO: 2113259 - DNA, 25 bp, Homo sapien
gagagtgctctaatcatccatagta

SEQ ID NO: 2113260 - DNA, 25 bp, Homo sapien
gctctaatcatccatagtagttctc

SEQ ID NO: 2113261 - DNA, 25 bp, Homo sapien
taaaaggcatgctaatcaccacaca

SEQ ID NO: 2113262 - DNA, 25 bp, Homo sapien
agaaataaaaggcatgctaatcacc

SEQ ID NO: 2113263 - DNA, 25 bp, Homo sapien
aataaaaggcatgctaatcaccaca

SEQ ID NO: 2113264 - DNA, 25 bp, Homo sapien
aaaaggcatgctaatcaccacacac

SEQ ID NO: 2113265 - DNA, 25 bp, Homo sapien
tctcagggaatttctcttctatctc

SEQ ID NO: 2113266 - DNA, 25 bp, Homo sapien
tttttctcagggaatttctcttcta

SEQ ID NO: 2113267 - DNA, 25 bp, Homo sapien
tttctcagggaatttctcttctatc

SEQ ID NO: 2113268 - DNA, 25 bp, Homo sapien
tctttttctcagggaatttctcttc

SEQ ID NO: 2113269 - DNA, 25 bp, Homo sapien
aaagctattagcagaatgttctcca

SEQ ID NO: 2113270 - DNA, 25 bp, Homo sapien
gagagagaggcgaccaaccgcctca

SEQ ID NO: 2113271 - DNA, 25 bp, Homo sapien
tgttctccacctatcggaaactgaa

SEQ ID NO: 2113272 - DNA, 25 bp, Homo sapien
agcccaactgtctcagaatgacgga

SEQ ID NO: 2113273 - DNA, 25 bp, Homo sapien
gggttaacaatagagtgaggacacg

SEQ ID NO: 2113274 - DNA, 25 bp, Homo sapien
acgattctaagcgtagcagagggtg

SEQ ID NO: 2113275 - DNA, 25 bp, Homo sapien
ccttcaacctgtagctcaaaagaca

SEQ ID NO: 2113276 - DNA, 25 bp, Homo sapien
tgaggacacgtgtccatcctccctt

SEQ ID NO: 2113277 - DNA, 25 bp, Homo sapien
tgtattcgcgataggccaggcagta

SEQ ID NO: 2113278 - DNA, 25 bp, Homo sapien
ggccaggcagtattcaaaggctgcg

SEQ ID NO: 2113279 - DNA, 25 bp, Homo sapien
caaaggctgcgttcaatcagaagaa

SEQ ID NO: 2113280 - DNA, 25 bp, Homo sapien
atgtattcgcgataggccaggcagt

SEQ ID NO: 2113281 - DNA, 25 bp, Homo sapien
ttcagctgcgtcttgtccaaggcag

SEQ ID NO: 2113282 - DNA, 25 bp, Homo sapien
agattcagctgcgtcttgtccaagg

SEQ ID NO: 2113283 - DNA, 25 bp, Homo sapien
gattcagctgcgtcttgtccaaggc

SEQ ID NO: 2113284 - DNA, 25 bp, Homo sapien
gagattcagctgcgtcttgtccaag

SEQ ID NO: 2113285 - DNA, 25 bp, Homo sapien
tgggcacaattttgctggactgaga

SEQ ID NO: 2113286 - DNA, 25 bp, Homo sapien
gggcacaattttgctggactgagat

SEQ ID NO: 2113287 - DNA, 25 bp, Homo sapien
ggcacaattttgctggactgagatt

SEQ ID NO: 2113288 - DNA, 25 bp, Homo sapien
gcacaattttgctggactgagattt

SEQ ID NO: 2113289 - DNA, 25 bp, Homo sapien
taatacatggcacagtaagttacca

SEQ ID NO: 2113290 - DNA, 25 bp, Homo sapien
taccagaattggattcatgacacaa

SEQ ID NO: 2113291 - DNA, 25 bp, Homo sapien
tgttataatgtgaagcaggacactg

SEQ ID NO: 2113292 - DNA, 25 bp, Homo sapien
ggacactgggatcagaccatttgct

SEQ ID NO: 2113293 - DNA, 25 bp, Homo sapien
tgatctctttttgagtgctccctga

SEQ ID NO: 2113294 - DNA, 25 bp, Homo sapien
ttgagtgctccctgaagtgaagatg

SEQ ID NO: 2113295 - DNA, 25 bp, Homo sapien
agatatcttcgtttggcaattctcc

SEQ ID NO: 2113296 - DNA, 25 bp, Homo sapien
cctgaagtgaagatggagatatctt

SEQ ID NO: 2113297 - DNA, 25 bp, Homo sapien
ccagtccaagagcatgtgtgttcct

SEQ ID NO: 2113298 - DNA, 25 bp, Homo sapien
caagagcatgtgtgttcctgtttat

SEQ ID NO: 2113299 - DNA, 25 bp, Homo sapien
gctggacaggttgacattgagaagc

SEQ ID NO: 2113300 - DNA, 25 bp, Homo sapien
gggctggacaggttgacattgagaa

SEQ ID NO: 2113301 - DNA, 25 bp, Homo sapien
tactaatggcttcagacgggacctc

SEQ ID NO: 2113302 - DNA, 25 bp, Homo sapien
gactttagcaaggacgagggctcct

SEQ ID NO: 2113303 - DNA, 25 bp, Homo sapien
taatgagcgacttctctccagaggt

SEQ ID NO: 2113304 - DNA, 25 bp, Homo sapien
tgagtgtcgcttaaagagggcctcc

SEQ ID NO: 2113305 - DNA, 25 bp, Homo sapien
acaggtttatcagaagcagattcac

SEQ ID NO: 2113306 - DNA, 25 bp, Homo sapien
gcagattcacatgcactggactcgg

SEQ ID NO: 2113307 - DNA, 25 bp, Homo sapien
gtttatcagaagcagattcacatgc

SEQ ID NO: 2113308 - DNA, 25 bp, Homo sapien
ttcacatgcactggactcggtggtg

SEQ ID NO: 2113309 - DNA, 25 bp, Homo sapien
ttccttggcatacattgggttgaaa

SEQ ID NO: 2113310 - DNA, 25 bp, Homo sapien
ttggcatacattgggttgaaacttg

SEQ ID NO: 2113311 - DNA, 25 bp, Homo sapien
catacattgggttgaaacttggatc

SEQ ID NO: 2113312 - DNA, 25 bp, Homo sapien
tcatcaatatcttcccgtggggtta

SEQ ID NO: 2113313 - DNA, 25 bp, Homo sapien
tgtaatctgtaagtataaactgttc

SEQ ID NO: 2113314 - DNA, 25 bp, Homo sapien
ttcaatctgcctgttcatgtaatct

SEQ ID NO: 2113315 - DNA, 25 bp, Homo sapien
aatctgcctgttcatgtaatctgta

SEQ ID NO: 2113316 - DNA, 25 bp, Homo sapien
tcatgtaatctgtaagtataaactg

SEQ ID NO: 2113317 - DNA, 25 bp, Homo sapien
tccaccaaccagtccacaagaatgg

SEQ ID NO: 2113318 - DNA, 25 bp, Homo sapien
gtccacaagaatggccctcatgtca

SEQ ID NO: 2113319 - DNA, 25 bp, Homo sapien
ctgcacctccaccaaccagtccaca

SEQ ID NO: 2113320 - DNA, 25 bp, Homo sapien
cagtccacaagaatggccctcatgt

SEQ ID NO: 2113321 - DNA, 25 bp, Homo sapien
ggttagaacactcttccaattcttc

SEQ ID NO: 2113322 - DNA, 25 bp, Homo sapien
gcttctggttagaacactcttccaa

SEQ ID NO: 2113323 - DNA, 25 bp, Homo sapien
caagtgcttctggttagaacactct

SEQ ID NO: 2113324 - DNA, 25 bp, Homo sapien
tctggttagaacactcttccaattc

SEQ ID NO: 2113325 - DNA, 25 bp, Homo sapien
taacttatccttcttgcatactgcc

SEQ ID NO: 2113326 - DNA, 25 bp, Homo sapien
ttaggtagagatccaccagcttcac

SEQ ID NO: 2113327 - DNA, 25 bp, Homo sapien
tgctgcaatcataaaggcagtggca

SEQ ID NO: 2113328 - DNA, 25 bp, Homo sapien
tgcatactgccttcattaggtagag

SEQ ID NO: 2113329 - DNA, 25 bp, Homo sapien
tatctgcgcagaaaatggtaggcga

SEQ ID NO: 2113330 - DNA, 25 bp, Homo sapien
catccacacgaggtgagttgtgctc

SEQ ID NO: 2113331 - DNA, 25 bp, Homo sapien
gctgagtacctcagatcgctgataa

SEQ ID NO: 2113332 - DNA, 25 bp, Homo sapien
taggcgatgggaatgttaatgtcac

SEQ ID NO: 2113333 - DNA, 25 bp, Homo sapien
ggtcatctcgcagatgtagcgggac

SEQ ID NO: 2113334 - DNA, 25 bp, Homo sapien
tagtggtattcctgcagggtcatct

SEQ ID NO: 2113335 - DNA, 25 bp, Homo sapien
tagcgggacaaggtcagtgtcttca

SEQ ID NO: 2113336 - DNA, 25 bp, Homo sapien
tctcgcagatgtagcgggacaaggt

SEQ ID NO: 2113337 - DNA, 25 bp, Homo sapien
caccaccaccggcaaagggccgtca

SEQ ID NO: 2113338 - DNA, 25 bp, Homo sapien
accaccggcaaagggccgtcattgg

SEQ ID NO: 2113339 - DNA, 25 bp, Homo sapien
ccaccaccggcaaagggccgtcatt

SEQ ID NO: 2113340 - DNA, 25 bp, Homo sapien
accggcaaagggccgtcattggcgt

SEQ ID NO: 2113341 - DNA, 25 bp, Homo sapien
ttctactataggaagcacaccgttc

SEQ ID NO: 2113342 - DNA, 25 bp, Homo sapien
gatttctactataggaagcacaccg

SEQ ID NO: 2113343 - DNA, 25 bp, Homo sapien
tataggaagcacaccgttcctccat

SEQ ID NO: 2113344 - DNA, 25 bp, Homo sapien
aatagtgatttctactataggaagc

SEQ ID NO: 2113345 - DNA, 25 bp, Homo sapien
tagccactgtaatgctccaggaagg

SEQ ID NO: 2113346 - DNA, 25 bp, Homo sapien
tgagactatcgtaagaactgaaagt

SEQ ID NO: 2113347 - DNA, 25 bp, Homo sapien
ggtgaagctcagagatactgtagcc

SEQ ID NO: 2113348 - DNA, 25 bp, Homo sapien
tacacagccttgagactatcgtaag

SEQ ID NO: 2113349 - DNA, 25 bp, Homo sapien
caacatatccaaggcagggattttg

SEQ ID NO: 2113350 - DNA, 25 bp, Homo sapien
ggcagggattttggcgacttcaaag

SEQ ID NO: 2113351 - DNA, 25 bp, Homo sapien
gattttggcgacttcaaagaagacc

SEQ ID NO: 2113352 - DNA, 25 bp, Homo sapien
tcaacatatccaaggcagggatttt

SEQ ID NO: 2113353 - DNA, 25 bp, Homo sapien
ataaaagcgatcaaaagacaaattc

SEQ ID NO: 2113354 - DNA, 25 bp, Homo sapien
gatcaaaagacaaattcgaacatag

SEQ ID NO: 2113355 - DNA, 25 bp, Homo sapien
ctgttaacatgcatgcttagccctg

SEQ ID NO: 2113356 - DNA, 25 bp, Homo sapien
cctgttaacatgcatgcttagccct

SEQ ID NO: 2113357 - DNA, 25 bp, Homo sapien
tcagcataaagggagttgaatggtg

SEQ ID NO: 2113358 - DNA, 25 bp, Homo sapien
ccacatgcaggtcacgatggcaggt

SEQ ID NO: 2113359 - DNA, 25 bp, Homo sapien
gaagaactctaaaacctagctgcga

SEQ ID NO: 2113360 - DNA, 25 bp, Homo sapien
ccatcagggatgatcatgatactaa

SEQ ID NO: 2113361 - DNA, 25 bp, Homo sapien
ccataagagcaggttaagaataaga

SEQ ID NO: 2113362 - DNA, 25 bp, Homo sapien
cataagagcaggttaagaataagaa

SEQ ID NO: 2113363 - DNA, 25 bp, Homo sapien
tgcttctggtgtcaatactatagga

SEQ ID NO: 2113364 - DNA, 25 bp, Homo sapien
agccgatacatttgaactgccacca

SEQ ID NO: 2113365 - DNA, 25 bp, Homo sapien
gaagaaaaagccgatacatttgaac

SEQ ID NO: 2113366 - DNA, 25 bp, Homo sapien
tataggaggtaaacagttatgggtc

SEQ ID NO: 2113367 - DNA, 25 bp, Homo sapien
tctgacgaattggttgggtaggcaa

SEQ ID NO: 2113368 - DNA, 25 bp, Homo sapien
ggttgtatctttggtagcactttct

SEQ ID NO: 2113369 - DNA, 25 bp, Homo sapien
ttggtagcactttctgacgaattgg

SEQ ID NO: 2113370 - DNA, 25 bp, Homo sapien
cactttctgacgaattggttgggta

SEQ ID NO: 2113371 - DNA, 25 bp, Homo sapien
tcagacatcattaagacccaaagct

SEQ ID NO: 2113372 - DNA, 25 bp, Homo sapien
gaagcccttctgatgtaataggttc

SEQ ID NO: 2113373 - DNA, 25 bp, Homo sapien
gcccttctgatgtaataggttctgt

SEQ ID NO: 2113374 - DNA, 25 bp, Homo sapien
aagcccttctgatgtaataggttct

SEQ ID NO: 2113375 - DNA, 25 bp, Homo sapien
agcccttctgatgtaataggttctg

SEQ ID NO: 2113376 - DNA, 25 bp, Homo sapien
tcaaccaaggcttctactacagcag

SEQ ID NO: 2113377 - DNA, 25 bp, Homo sapien
gatggctattgatgaggtatttgaa

SEQ ID NO: 2113378 - DNA, 25 bp, Homo sapien
taccattgaacgttgtcttagatgt

SEQ ID NO: 2113379 - DNA, 25 bp, Homo sapien
aacgttgtcttagatgtttcaacca

SEQ ID NO: 2113380 - DNA, 25 bp, Homo sapien
tttgtgggtgccatccgagggtctg

SEQ ID NO: 2113381 - DNA, 25 bp, Homo sapien
catccgagggtctgcaatgctttcg

SEQ ID NO: 2113382 - DNA, 25 bp, Homo sapien
tgcaatgctttcgtttcccctctgg

SEQ ID NO: 2113383 - DNA, 25 bp, Homo sapien
tttcgtttcccctctggattgccca

SEQ ID NO: 2113384 - DNA, 25 bp, Homo sapien
tgaatttggagctaggtgtcagtag

SEQ ID NO: 2113385 - DNA, 25 bp, Homo sapien
caacagctaagctctgatgttcctt

SEQ ID NO: 2113386 - DNA, 25 bp, Homo sapien
tgatgttcctttggcagtccaagtt

SEQ ID NO: 2113387 - DNA, 25 bp, Homo sapien
tgtcagtaggactattccaaggctc

SEQ ID NO: 2113388 - DNA, 25 bp, Homo sapien
catcttcctgtagcaagctgcagca

SEQ ID NO: 2113389 - DNA, 25 bp, Homo sapien
tgactcaggcctcttaaagttggtg

SEQ ID NO: 2113390 - DNA, 25 bp, Homo sapien
cctttgatggtcgaaggactttggg

SEQ ID NO: 2113391 - DNA, 25 bp, Homo sapien
ttggtgtccaaggaagtttgagctg

SEQ ID NO: 2113392 - DNA, 25 bp, Homo sapien
tattccttcgcacttgtgagtcctc

SEQ ID NO: 2113393 - DNA, 25 bp, Homo sapien
catggaatcaaagtacccattagtg

SEQ ID NO: 2113394 - DNA, 25 bp, Homo sapien
cccattagtggttctcttcatggct

SEQ ID NO: 2113395 - DNA, 25 bp, Homo sapien
ccttactggcactgaactttttgaa

SEQ ID NO: 2113396 - DNA, 25 bp, Homo sapien
aatgatttgggaattcgctgcgtca

SEQ ID NO: 2113397 - DNA, 25 bp, Homo sapien
ctcttttccaaaccgaacaaatgat

SEQ ID NO: 2113398 - DNA, 25 bp, Homo sapien
caaaccgaacaaatgatttgggaat

SEQ ID NO: 2113399 - DNA, 25 bp, Homo sapien
caaatgatttgggaattcgctgcgt

SEQ ID NO: 2113400 - DNA, 25 bp, Homo sapien
tgtggccatcttaagcgaaattttg

SEQ ID NO: 2113401 - DNA, 25 bp, Homo sapien
tgctcccatgcgaaagcatctccta

SEQ ID NO: 2113402 - DNA, 25 bp, Homo sapien
ttgggaacatggctgtgaaactgac

SEQ ID NO: 2113403 - DNA, 25 bp, Homo sapien
ggacgtaatacccagagaatgcatc

SEQ ID NO: 2113404 - DNA, 25 bp, Homo sapien
tgatcttgtctttttggaagagttt

SEQ ID NO: 2113405 - DNA, 25 bp, Homo sapien
tgattgatcttgtctttttggaaga

SEQ ID NO: 2113406 - DNA, 25 bp, Homo sapien
gattgatcttgtctttttggaagag

SEQ ID NO: 2113407 - DNA, 25 bp, Homo sapien
ggtgattgatcttgtctttttggaa

SEQ ID NO: 2113408 - DNA, 25 bp, Homo sapien
tgatacaatgttgcgcagcgtcaca

SEQ ID NO: 2113409 - DNA, 25 bp, Homo sapien
gggctggccccgaatacatagcgga

SEQ ID NO: 2113410 - DNA, 25 bp, Homo sapien
gagagcatgcgtgtgtcgaagccac

SEQ ID NO: 2113411 - DNA, 25 bp, Homo sapien
cccttgaagagaagcgacagtgcgg

SEQ ID NO: 2113412 - DNA, 25 bp, Homo sapien
tctttaagcccagtaaaggcgaatg

SEQ ID NO: 2113413 - DNA, 25 bp, Homo sapien
atctttaagcccagtaaaggcgaat

SEQ ID NO: 2113414 - DNA, 25 bp, Homo sapien
ctttaagcccagtaaaggcgaatgg

SEQ ID NO: 2113415 - DNA, 25 bp, Homo sapien
cagagttcagatgagaattcagttg

SEQ ID NO: 2113416 - DNA, 25 bp, Homo sapien
cacaaggccaggtacacagtctaca

SEQ ID NO: 2113417 - DNA, 25 bp, Homo sapien
gagtggcaaaccacacctgccttct

SEQ ID NO: 2113418 - DNA, 25 bp, Homo sapien
ccattcctagttgctccaacacaag

SEQ ID NO: 2113419 - DNA, 25 bp, Homo sapien
aaagatggggcacaaaattcaagct

SEQ ID NO: 2113420 - DNA, 25 bp, Homo sapien
agggttgagcccatgactggtacat

SEQ ID NO: 2113421 - DNA, 25 bp, Homo sapien
agaaagctaggaaaagatggggcac

SEQ ID NO: 2113422 - DNA, 25 bp, Homo sapien
acatgtctatattcattacctgaag

SEQ ID NO: 2113423 - DNA, 25 bp, Homo sapien
gtttccatagagagggctgcttccc

SEQ ID NO: 2113424 - DNA, 25 bp, Homo sapien
atagagagggctgcttcccttaact

SEQ ID NO: 2113425 - DNA, 25 bp, Homo sapien
tccatagagagggctgcttccctta

SEQ ID NO: 2113426 - DNA, 25 bp, Homo sapien
tttccatagagagggctgcttccct

SEQ ID NO: 2113427 - DNA, 25 bp, Homo sapien
ttaggccatgaccacacgctcatcc

SEQ ID NO: 2113428 - DNA, 25 bp, Homo sapien
tgcaatctcccatccccatatccag

SEQ ID NO: 2113429 - DNA, 25 bp, Homo sapien
ggactgaggagaattgggacaaaga

SEQ ID NO: 2113430 - DNA, 25 bp, Homo sapien
ccaggaatccggaagtggagagatc

SEQ ID NO: 2113431 - DNA, 25 bp, Homo sapien
ccaatacgggtatagttacttcagt

SEQ ID NO: 2113432 - DNA, 25 bp, Homo sapien
tggctttaaacatgaccaatacggg

SEQ ID NO: 2113433 - DNA, 25 bp, Homo sapien
tcagtgacacctagaaaggctagta

SEQ ID NO: 2113434 - DNA, 25 bp, Homo sapien
ctgtggaagtatgggacattgtctc

SEQ ID NO: 2113435 - DNA, 25 bp, Homo sapien
aattctcttcttttaaatcttccat

SEQ ID NO: 2113436 - DNA, 25 bp, Homo sapien
cctgtttcagtccaattctgaagat

SEQ ID NO: 2113437 - DNA, 25 bp, Homo sapien
tgtgctctgggaagtctactgtcct

SEQ ID NO: 2113438 - DNA, 25 bp, Homo sapien
ctgtttcagtccaattctgaagata

SEQ ID NO: 2113439 - DNA, 25 bp, Homo sapien
ccaagccaaccattgcatctttaca

SEQ ID NO: 2113440 - DNA, 25 bp, Homo sapien
tctgtgcgttgttcctactgccctc

SEQ ID NO: 2113441 - DNA, 25 bp, Homo sapien
gctctagtaattgaatactcccttc

SEQ ID NO: 2113442 - DNA, 25 bp, Homo sapien
accattgcatctttacaccctgctg

SEQ ID NO: 2113443 - DNA, 25 bp, Homo sapien
ggatcattcaccaataacttaactg

SEQ ID NO: 2113444 - DNA, 25 bp, Homo sapien
ctaatttctatagccaactggatca

SEQ ID NO: 2113445 - DNA, 25 bp, Homo sapien
aacttaactggaacagtcactggtg

SEQ ID NO: 2113446 - DNA, 25 bp, Homo sapien
tggtgttttatgcaatgtcattact

SEQ ID NO: 2113447 - DNA, 25 bp, Homo sapien
ttttgctgccctgatatactctgat

SEQ ID NO: 2113448 - DNA, 25 bp, Homo sapien
gatatactctgatacaccctccata

SEQ ID NO: 2113449 - DNA, 25 bp, Homo sapien
tctgatacaccctccatacactggt

SEQ ID NO: 2113450 - DNA, 25 bp, Homo sapien
caccctccatacactggtaactatg

SEQ ID NO: 2113451 - DNA, 25 bp, Homo sapien
gattcagaagtggacaagatagaca

SEQ ID NO: 2113452 - DNA, 25 bp, Homo sapien
gatgactagtctatactcccaagaa

SEQ ID NO: 2113453 - DNA, 25 bp, Homo sapien
ggaactgttttgcatgtggaccact

SEQ ID NO: 2113454 - DNA, 25 bp, Homo sapien
tcccaccctgggttaagcactttca

SEQ ID NO: 2113455 - DNA, 25 bp, Homo sapien
tttgagatgtgtagctaaggacggc

SEQ ID NO: 2113456 - DNA, 25 bp, Homo sapien
catgaactccggtgctctttgagca

SEQ ID NO: 2113457 - DNA, 25 bp, Homo sapien
taaggacggcattgacaaggcacca

SEQ ID NO: 2113458 - DNA, 25 bp, Homo sapien
aaagctccatgcagctcatgaactc

SEQ ID NO: 2113459 - DNA, 25 bp, Homo sapien
ccttcggcaataacctgggagtgtc

SEQ ID NO: 2113460 - DNA, 25 bp, Homo sapien
ctagagaaggttcagggcaagcact

SEQ ID NO: 2113461 - DNA, 25 bp, Homo sapien
ttctcttggagcagtcttacttggc

SEQ ID NO: 2113462 - DNA, 25 bp, Homo sapien
actgccacttgcatttgttgttgcc

SEQ ID NO: 2113463 - DNA, 25 bp, Homo sapien
ctggagagatttcccggcagtgtgg

SEQ ID NO: 2113464 - DNA, 25 bp, Homo sapien
gagagatttcccggcagtgtggctt

SEQ ID NO: 2113465 - DNA, 25 bp, Homo sapien
agatttcccggcagtgtggctttgt

SEQ ID NO: 2113466 - DNA, 25 bp, Homo sapien
agctggagagatttcccggcagtgt

SEQ ID NO: 2113467 - DNA, 25 bp, Homo sapien
tctttttgcttcctaagaaaagcat

SEQ ID NO: 2113468 - DNA, 25 bp, Homo sapien
tttctttcttcaatatctctttctt

SEQ ID NO: 2113469 - DNA, 25 bp, Homo sapien
ggctgctgccactcttccccctctt

SEQ ID NO: 2113470 - DNA, 25 bp, Homo sapien
gctgccactcttccccctcttgctt

SEQ ID NO: 2113471 - DNA, 25 bp, Homo sapien
ttccatggtaggtacagccagtagc

SEQ ID NO: 2113472 - DNA, 25 bp, Homo sapien
catggtaggtacagccagtagccat

SEQ ID NO: 2113473 - DNA, 25 bp, Homo sapien
ctgggcaacttccatggtaggtaca

SEQ ID NO: 2113474 - DNA, 25 bp, Homo sapien
gcaacttccatggtaggtacagcca

SEQ ID NO: 2113475 - DNA, 25 bp, Homo sapien
gtgcctgagccccttggatcacact

SEQ ID NO: 2113476 - DNA, 25 bp, Homo sapien
tggtccctcgccccagaaggtctta

SEQ ID NO: 2113477 - DNA, 25 bp, Homo sapien
tgagccccttggatcacactcagca

SEQ ID NO: 2113478 - DNA, 25 bp, Homo sapien
gcctgagccccttggatcacactca

SEQ ID NO: 2113479 - DNA, 25 bp, Homo sapien
tggatctgctcaagtccgcacagga

SEQ ID NO: 2113480 - DNA, 25 bp, Homo sapien
gagccttcgtatctcaccaggacct

SEQ ID NO: 2113481 - DNA, 25 bp, Homo sapien
aatacatccgaaaatgtttgtgagc

SEQ ID NO: 2113482 - DNA, 25 bp, Homo sapien
aagtgcagacccctgtaaatacatc

SEQ ID NO: 2113483 - DNA, 25 bp, Homo sapien
gccactgagcaaaaggagaaagaca

SEQ ID NO: 2113484 - DNA, 25 bp, Homo sapien
catttggcgaccagaagagcaaggg

SEQ ID NO: 2113485 - DNA, 25 bp, Homo sapien
gccactggcagggtcacactgataa

SEQ ID NO: 2113486 - DNA, 25 bp, Homo sapien
caggcaagcgtttgcatgggctggg

SEQ ID NO: 2113487 - DNA, 25 bp, Homo sapien
caagccatgcattgttctgtcctcc

SEQ ID NO: 2113488 - DNA, 25 bp, Homo sapien
tctgtcaaataaacaagccatgcat

SEQ ID NO: 2113489 - DNA, 25 bp, Homo sapien
tcctccggcttgtctgtgggcttcc

SEQ ID NO: 2113490 - DNA, 25 bp, Homo sapien
ttgttctgtcctccggcttgtctgt

SEQ ID NO: 2113491 - DNA, 25 bp, Homo sapien
agccagggatggattctgaggtgga

SEQ ID NO: 2113492 - DNA, 25 bp, Homo sapien
ggacccagcagatttacatggaaga

SEQ ID NO: 2113493 - DNA, 25 bp, Homo sapien
acccagcagatttacatggaagaac

SEQ ID NO: 2113494 - DNA, 25 bp, Homo sapien
gtagccagggatggattctgaggtg

SEQ ID NO: 2113495 - DNA, 25 bp, Homo sapien
cctttaaggctatctgttgagtcag

SEQ ID NO: 2113496 - DNA, 25 bp, Homo sapien
gtgcactgtgaacttgatgccattt

SEQ ID NO: 2113497 - DNA, 25 bp, Homo sapien
tctgaagtctcccttagccctctgg

SEQ ID NO: 2113498 - DNA, 25 bp, Homo sapien
tttccctatgtgctcctctgaagtc

SEQ ID NO: 2113499 - DNA, 25 bp, Homo sapien
gaaaagtggtaggtcgaacagtgag

SEQ ID NO: 2113500 - DNA, 25 bp, Homo sapien
aagtggtaggtcgaacagtgagttt

SEQ ID NO: 2113501 - DNA, 25 bp, Homo sapien
aaaagtggtaggtcgaacagtgagt

SEQ ID NO: 2113502 - DNA, 25 bp, Homo sapien
tggtaggtcgaacagtgagtttgaa

SEQ ID NO: 2113503 - DNA, 25 bp, Homo sapien
ttgagacttgactctggggaaaacc

SEQ ID NO: 2113504 - DNA, 25 bp, Homo sapien
ctagggctccatgtctttagtagta

SEQ ID NO: 2113505 - DNA, 25 bp, Homo sapien
gggaaaacctttatggattccatca

SEQ ID NO: 2113506 - DNA, 25 bp, Homo sapien
ggctccatgtctttagtagtagaga

SEQ ID NO: 2113507 - DNA, 25 bp, Homo sapien
caattttagttatgtcagccaaagc

SEQ ID NO: 2113508 - DNA, 25 bp, Homo sapien
ttttagttatgtcagccaaagcaag

SEQ ID NO: 2113509 - DNA, 25 bp, Homo sapien
cattgcaattttagttatgtcagcc

SEQ ID NO: 2113510 - DNA, 25 bp, Homo sapien
ttagttatgtcagccaaagcaagca

SEQ ID NO: 2113511 - DNA, 25 bp, Homo sapien
ctctttgcacttcagaaagatattt

SEQ ID NO: 2113512 - DNA, 25 bp, Homo sapien
ccctctttgcacttcagaaagatat

SEQ ID NO: 2113513 - DNA, 25 bp, Homo sapien
tccctctttgcacttcagaaagata

SEQ ID NO: 2113514 - DNA, 25 bp, Homo sapien
tttccctctttgcacttcagaaaga

SEQ ID NO: 2113515 - DNA, 25 bp, Homo sapien
gggattagtctctgaactgccgact

SEQ ID NO: 2113516 - DNA, 25 bp, Homo sapien
ttagcgcaaatgtcaagatcccttc

SEQ ID NO: 2113517 - DNA, 25 bp, Homo sapien
tctatcctgagtgagagctccaatc

SEQ ID NO: 2113518 - DNA, 25 bp, Homo sapien
ccgactttttggacatcaggccagt

SEQ ID NO: 2113519 - DNA, 25 bp, Homo sapien
ttgggcctgcgacgcctaatgattc

SEQ ID NO: 2113520 - DNA, 25 bp, Homo sapien
aacaaagctgtggtcctattgggcc

SEQ ID NO: 2113521 - DNA, 25 bp, Homo sapien
gatatgcctcataaaagctcaagca

SEQ ID NO: 2113522 - DNA, 25 bp, Homo sapien
tcaggcctatgaactgagagaaact

SEQ ID NO: 2113523 - DNA, 25 bp, Homo sapien
tcaaaggctgggcattcatccaaga

SEQ ID NO: 2113524 - DNA, 25 bp, Homo sapien
tcatccaagaatgatgctcttggcc

SEQ ID NO: 2113525 - DNA, 25 bp, Homo sapien
caggtgtgggaatgcaaacagactg

SEQ ID NO: 2113526 - DNA, 25 bp, Homo sapien
ggccaggtgtgggaatgcaaacaga

SEQ ID NO: 2113527 - DNA, 25 bp, Homo sapien
catcagaaattacccttccttctgg

SEQ ID NO: 2113528 - DNA, 25 bp, Homo sapien
tccttgaagcccatcagaaattacc

SEQ ID NO: 2113529 - DNA, 25 bp, Homo sapien
ctgttccttgaagcccatcagaaat

SEQ ID NO: 2113530 - DNA, 25 bp, Homo sapien
gaagcccatcagaaattacccttcc

SEQ ID NO: 2113531 - DNA, 25 bp, Homo sapien
taaatcgactgcctctcttatctct

SEQ ID NO: 2113532 - DNA, 25 bp, Homo sapien
tctcctctgtaaatcgactgcctct

SEQ ID NO: 2113533 - DNA, 25 bp, Homo sapien
atctctatcctgtggatattcctca

SEQ ID NO: 2113534 - DNA, 25 bp, Homo sapien
tatcctgtggatattcctcaaggct

SEQ ID NO: 2113535 - DNA, 25 bp, Homo sapien
gctgccagtatagctcctgtaatac

SEQ ID NO: 2113536 - DNA, 25 bp, Homo sapien
tcctgtaatactgaactctcctgtt

SEQ ID NO: 2113537 - DNA, 25 bp, Homo sapien
tatagctcctgtaatactgaactct

SEQ ID NO: 2113538 - DNA, 25 bp, Homo sapien
aaactctgctgccagtatagctcct

SEQ ID NO: 2113539 - DNA, 25 bp, Homo sapien
tagtcattggcattgtttccaaacc

SEQ ID NO: 2113540 - DNA, 25 bp, Homo sapien
gtcattggcattgtttccaaaccat

SEQ ID NO: 2113541 - DNA, 25 bp, Homo sapien
agtcattggcattgtttccaaacca

SEQ ID NO: 2113542 - DNA, 25 bp, Homo sapien
ctagtcattggcattgtttccaaac

SEQ ID NO: 2113543 - DNA, 25 bp, Homo sapien
attctggcctccgattttctcacca

SEQ ID NO: 2113544 - DNA, 25 bp, Homo sapien
tgggaaattctggcctccgattttc

SEQ ID NO: 2113545 - DNA, 25 bp, Homo sapien
ttctggcctccgattttctcaccat

SEQ ID NO: 2113546 - DNA, 25 bp, Homo sapien
gaccaggcaaggatttggatacttc

SEQ ID NO: 2113547 - DNA, 25 bp, Homo sapien
ggatacttcagttgtgtggctgtgc

SEQ ID NO: 2113548 - DNA, 25 bp, Homo sapien
tcttgaacccaaaggtggtcaaagc

SEQ ID NO: 2113549 - DNA, 25 bp, Homo sapien
cttaaattggcgatcaggaaggatc

SEQ ID NO: 2113550 - DNA, 25 bp, Homo sapien
tcagggggtaagtatcaggcttgac

SEQ ID NO: 2113551 - DNA, 25 bp, Homo sapien
taagtatcaggcttgactctcacat

SEQ ID NO: 2113552 - DNA, 25 bp, Homo sapien
ggcatcttactctgactgagagtgt

SEQ ID NO: 2113553 - DNA, 25 bp, Homo sapien
aggcagctttggatggcatcttact

SEQ ID NO: 2113554 - DNA, 25 bp, Homo sapien
gggtggcgtagagctggagggcgat

SEQ ID NO: 2113555 - DNA, 25 bp, Homo sapien
gcggaggcaacgtagccccctcgga

SEQ ID NO: 2113556 - DNA, 25 bp, Homo sapien
gagctggagggcgatggtggcggag

SEQ ID NO: 2113557 - DNA, 25 bp, Homo sapien
ccagccgggagagtaggcggagcag

SEQ ID NO: 2113558 - DNA, 25 bp, Homo sapien
aaagcccagctcagaaactacaagg

SEQ ID NO: 2113559 - DNA, 25 bp, Homo sapien
tgaacgcgctaatcaggaaaccagc

SEQ ID NO: 2113560 - DNA, 25 bp, Homo sapien
aagtgcaaggccgtgccaggaactc

SEQ ID NO: 2113561 - DNA, 25 bp, Homo sapien
ctagcgcgtacacacagagcagtct

SEQ ID NO: 2113562 - DNA, 25 bp, Homo sapien
catgtaatctgcatatgaataatac

SEQ ID NO: 2113563 - DNA, 25 bp, Homo sapien
ctgcacacccttagatgtatagata

SEQ ID NO: 2113564 - DNA, 25 bp, Homo sapien
cacccttagatgtatagataaatgg

SEQ ID NO: 2113565 - DNA, 25 bp, Homo sapien
cactgcctatgattattgacccaga

SEQ ID NO: 2113566 - DNA, 25 bp, Homo sapien
gagatggcaggtggaagtacaccca

SEQ ID NO: 2113567 - DNA, 25 bp, Homo sapien
agttgggaaagcttaggttgacagt

SEQ ID NO: 2113568 - DNA, 25 bp, Homo sapien
tgggaacggacatcagccagtgttg

SEQ ID NO: 2113569 - DNA, 25 bp, Homo sapien
gatctactgttccataatgagatgg

SEQ ID NO: 2113570 - DNA, 25 bp, Homo sapien
tgtgaccctgatctttgaatcaatc

SEQ ID NO: 2113571 - DNA, 25 bp, Homo sapien
gtatccccatatcttgtgaccctga

SEQ ID NO: 2113572 - DNA, 25 bp, Homo sapien
catatcttgtgaccctgatctttga

SEQ ID NO: 2113573 - DNA, 25 bp, Homo sapien
tcttgtgaccctgatctttgaatca

SEQ ID NO: 2113574 - DNA, 25 bp, Homo sapien
gtaaatccttaacggcttgtctaca

SEQ ID NO: 2113575 - DNA, 25 bp, Homo sapien
acaaaaattgtacccttgctccaat

SEQ ID NO: 2113576 - DNA, 25 bp, Homo sapien
ctttctctgtaaatccttaacggct

SEQ ID NO: 2113577 - DNA, 25 bp, Homo sapien
gaccttgcctcctaattttcctatg

SEQ ID NO: 2113578 - DNA, 25 bp, Homo sapien
gagaccggaacctctgtcttcccaa

SEQ ID NO: 2113579 - DNA, 25 bp, Homo sapien
tcttggctgcccagctctagtcctg

SEQ ID NO: 2113580 - DNA, 25 bp, Homo sapien
cactctggtgccttgggtcagctct

SEQ ID NO: 2113581 - DNA, 25 bp, Homo sapien
tgcccaccatcctgaatctgagctt

SEQ ID NO: 2113582 - DNA, 25 bp, Homo sapien
aggtagcctgcgggtcccttctgca

SEQ ID NO: 2113583 - DNA, 25 bp, Homo sapien
ggtagcctgcgggtcccttctgcac

SEQ ID NO: 2113584 - DNA, 25 bp, Homo sapien
caggtagcctgcgggtcccttctgc

SEQ ID NO: 2113585 - DNA, 25 bp, Homo sapien
cagatccatcctagcccacttggaa

SEQ ID NO: 2113586 - DNA, 25 bp, Homo sapien
tccatcctagcccacttggaagata

SEQ ID NO: 2113587 - DNA, 25 bp, Homo sapien
catcctagcccacttggaagataca

SEQ ID NO: 2113588 - DNA, 25 bp, Homo sapien
gagcttccagatccatcctagccca

SEQ ID NO: 2113589 - DNA, 25 bp, Homo sapien
ctgttaccctagtaatatcctggac

SEQ ID NO: 2113590 - DNA, 25 bp, Homo sapien
ctctgttaccctagtaatatcctgg

SEQ ID NO: 2113591 - DNA, 25 bp, Homo sapien
tctgttaccctagtaatatcctgga

SEQ ID NO: 2113592 - DNA, 25 bp, Homo sapien
tcctctgttaccctagtaatatcct

SEQ ID NO: 2113593 - DNA, 25 bp, Homo sapien
tcaagggcaaggctaaacagagtcc

SEQ ID NO: 2113594 - DNA, 25 bp, Homo sapien
tcctcttttctcaatgtgtagcata

SEQ ID NO: 2113595 - DNA, 25 bp, Homo sapien
aggctaaacagagtcccttccactt

SEQ ID NO: 2113596 - DNA, 25 bp, Homo sapien
tagcatattcgaatttcatggtcaa

SEQ ID NO: 2113597 - DNA, 25 bp, Homo sapien
cagaagctgcagttctacccttttc

SEQ ID NO: 2113598 - DNA, 25 bp, Homo sapien
ttttccgaactgctccattgccttt

SEQ ID NO: 2113599 - DNA, 25 bp, Homo sapien
caaaaacagaagctgcagttctacc

SEQ ID NO: 2113600 - DNA, 25 bp, Homo sapien
cagctgccagagttgagcaaaaaca

SEQ ID NO: 2113601 - DNA, 25 bp, Homo sapien
tcaaagaatcctgatacagtgctgc

SEQ ID NO: 2113602 - DNA, 25 bp, Homo sapien
ccactggtgagtgacatgactgtct

SEQ ID NO: 2113603 - DNA, 25 bp, Homo sapien
taaaagtccactagtataagggctg

SEQ ID NO: 2113604 - DNA, 25 bp, Homo sapien
tggaggtcaactcactactggacac

SEQ ID NO: 2113605 - DNA, 25 bp, Homo sapien
ctcttgggctcctgacagagctgca

SEQ ID NO: 2113606 - DNA, 25 bp, Homo sapien
ggctcttgggctcctgacagagctg

SEQ ID NO: 2113607 - DNA, 25 bp, Homo sapien
ggggtaggggctcttgggctcctga

SEQ ID NO: 2113608 - DNA, 25 bp, Homo sapien
ggggctcttgggctcctgacagagc

SEQ ID NO: 2113609 - DNA, 25 bp, Homo sapien
gctaagaggcccacaacttctagag

SEQ ID NO: 2113610 - DNA, 25 bp, Homo sapien
ttatatatgtagacactgtccctca

SEQ ID NO: 2113611 - DNA, 25 bp, Homo sapien
gtagggatggcattgcccgtgctaa

SEQ ID NO: 2113612 - DNA, 25 bp, Homo sapien
gtgagcacggtgttatatatgtaga

SEQ ID NO: 2113613 - DNA, 25 bp, Homo sapien
gcagaaatgtaggtgctattcaact

SEQ ID NO: 2113614 - DNA, 25 bp, Homo sapien
tgctattcaactgacccaagcccat

SEQ ID NO: 2113615 - DNA, 25 bp, Homo sapien
taggtgctattcaactgacccaagc

SEQ ID NO: 2113616 - DNA, 25 bp, Homo sapien
gaaatgtaggtgctattcaactgac

SEQ ID NO: 2113617 - DNA, 25 bp, Homo sapien
agcttgggtcataaattggcagctt

SEQ ID NO: 2113618 - DNA, 25 bp, Homo sapien
tcctttgtctaagcttgggtcataa

SEQ ID NO: 2113619 - DNA, 25 bp, Homo sapien
tgggtcataaattggcagcttccag

SEQ ID NO: 2113620 - DNA, 25 bp, Homo sapien
cctttgtctaagcttgggtcataaa

SEQ ID NO: 2113621 - DNA, 25 bp, Homo sapien
gctaggtatgccagaccataagcat

SEQ ID NO: 2113622 - DNA, 25 bp, Homo sapien
taagcatcctatggagcaactctgg

SEQ ID NO: 2113623 - DNA, 25 bp, Homo sapien
tggagcaactctgggtctgattctt

SEQ ID NO: 2113624 - DNA, 25 bp, Homo sapien
ttcctctgctaggtatgccagacca

SEQ ID NO: 2113625 - DNA, 25 bp, Homo sapien
tgggatttcagtaccccagatcaaa

SEQ ID NO: 2113626 - DNA, 25 bp, Homo sapien
cagtcctatgggctttttggagctg

SEQ ID NO: 2113627 - DNA, 25 bp, Homo sapien
ctgactagggttgatatttctggga

SEQ ID NO: 2113628 - DNA, 25 bp, Homo sapien
agatcaaaagattcccactcttctg

SEQ ID NO: 2113629 - DNA, 25 bp, Homo sapien
tatcacaaacctggtgaacaagcca

SEQ ID NO: 2113630 - DNA, 25 bp, Homo sapien
ctggctcataagtatcacaaacctg

SEQ ID NO: 2113631 - DNA, 25 bp, Homo sapien
tggtgaacaagccaagaggcttcct

SEQ ID NO: 2113632 - DNA, 25 bp, Homo sapien
cctcctctggtcactttcaggccta

SEQ ID NO: 2113633 - DNA, 25 bp, Homo sapien
tttcctgagcaagggattggtatta

SEQ ID NO: 2113634 - DNA, 25 bp, Homo sapien
actcctattagactgtctctggatc

SEQ ID NO: 2113635 - DNA, 25 bp, Homo sapien
ctcctattagactgtctctggatca

SEQ ID NO: 2113636 - DNA, 25 bp, Homo sapien
ttcctgagcaagggattggtattac

SEQ ID NO: 2113637 - DNA, 25 bp, Homo sapien
gagggtaactccagctctcatgttg

SEQ ID NO: 2113638 - DNA, 25 bp, Homo sapien
ggtaactccagctctcatgttgaaa

SEQ ID NO: 2113639 - DNA, 25 bp, Homo sapien
gaggagggtaactccagctctcatg

SEQ ID NO: 2113640 - DNA, 25 bp, Homo sapien
accacgaggagggtaactccagctc

SEQ ID NO: 2113641 - DNA, 25 bp, Homo sapien
gaatctggaacataaccaccaggtg

SEQ ID NO: 2113642 - DNA, 25 bp, Homo sapien
atctggaacataaccaccaggtgtc

SEQ ID NO: 2113643 - DNA, 25 bp, Homo sapien
agccagaatctggaacataaccacc

SEQ ID NO: 2113644 - DNA, 25 bp, Homo sapien
cagaatctggaacataaccaccagg

SEQ ID NO: 2113645 - DNA, 25 bp, Homo sapien
ggtatagagacctccttcgttatcc

SEQ ID NO: 2113646 - DNA, 25 bp, Homo sapien
gtatagagacctccttcgttatccc

SEQ ID NO: 2113647 - DNA, 25 bp, Homo sapien
caccggtagatttgcgggcagtcca

SEQ ID NO: 2113648 - DNA, 25 bp, Homo sapien
tagatttgcgggcagtccaccttgt

SEQ ID NO: 2113649 - DNA, 25 bp, Homo sapien
atttgcgggcagtccaccttgtacg

SEQ ID NO: 2113650 - DNA, 25 bp, Homo sapien
accggtagatttgcgggcagtccac

SEQ ID NO: 2113651 - DNA, 25 bp, Homo sapien
tattctgaaacacgttctccacgta

SEQ ID NO: 2113652 - DNA, 25 bp, Homo sapien
tcacatcatggtgtattctgaaaca

SEQ ID NO: 2113653 - DNA, 25 bp, Homo sapien
gtattctgaaacacgttctccacgt

SEQ ID NO: 2113654 - DNA, 25 bp, Homo sapien
tgtattctgaaacacgttctccacg

SEQ ID NO: 2113655 - DNA, 25 bp, Homo sapien
tgctttctctaagaggatctcctgg

SEQ ID NO: 2113656 - DNA, 25 bp, Homo sapien
caaagttgcctcataacttggcctc

SEQ ID NO: 2113657 - DNA, 25 bp, Homo sapien
caacacaagcccaagggacgtcact

SEQ ID NO: 2113658 - DNA, 25 bp, Homo sapien
tgcagataactgcatcctggctcca

SEQ ID NO: 2113659 - DNA, 25 bp, Homo sapien
gttccatgaaaagcacgagttcaca

SEQ ID NO: 2113660 - DNA, 25 bp, Homo sapien
tccatgaaaagcacgagttcacaaa

SEQ ID NO: 2113661 - DNA, 25 bp, Homo sapien
tgttccatgaaaagcacgagttcac

SEQ ID NO: 2113662 - DNA, 25 bp, Homo sapien
ttccatgaaaagcacgagttcacaa

SEQ ID NO: 2113663 - DNA, 25 bp, Homo sapien
aaagtaggggcctcagccagaaggg

SEQ ID NO: 2113664 - DNA, 25 bp, Homo sapien
cagaagggcaatagaggactgccct

SEQ ID NO: 2113665 - DNA, 25 bp, Homo sapien
gcttccttggctgttcgccagggga

SEQ ID NO: 2113666 - DNA, 25 bp, Homo sapien
gattcttctagcagctcctcaatca

SEQ ID NO: 2113667 - DNA, 25 bp, Homo sapien
actccagcatgtaccgcagtgaatg

SEQ ID NO: 2113668 - DNA, 25 bp, Homo sapien
catgcgagtcagctgaacgccggta

SEQ ID NO: 2113669 - DNA, 25 bp, Homo sapien
aatggtgcggttctctctagggtgc

SEQ ID NO: 2113670 - DNA, 25 bp, Homo sapien
catggtggccccaatggtgcggttc

SEQ ID NO: 2113671 - DNA, 25 bp, Homo sapien
gccacattggtcaagggcttcacca

SEQ ID NO: 2113672 - DNA, 25 bp, Homo sapien
tgatggcggtaaaccacagtggctc

SEQ ID NO: 2113673 - DNA, 25 bp, Homo sapien
gatgaagtgccatgccagagctcaa

SEQ ID NO: 2113674 - DNA, 25 bp, Homo sapien
tctttccaagcgttagacatcaggg

SEQ ID NO: 2113675 - DNA, 25 bp, Homo sapien
cataaaacggagtcgtaggatcctg

SEQ ID NO: 2113676 - DNA, 25 bp, Homo sapien
atacttatacgggacacaggagggc

SEQ ID NO: 2113677 - DNA, 25 bp, Homo sapien
ggaattgagaccatcgcgtagtact

SEQ ID NO: 2113678 - DNA, 25 bp, Homo sapien
cgtagtactcggagacaagttcctt

SEQ ID NO: 2113679 - DNA, 25 bp, Homo sapien
tctggtccaccaactgattgataag

SEQ ID NO: 2113680 - DNA, 25 bp, Homo sapien
aaacctgatctagccgtactgttgc

SEQ ID NO: 2113681 - DNA, 25 bp, Homo sapien
attggtacaggattacttgcagctt

SEQ ID NO: 2113682 - DNA, 25 bp, Homo sapien
tacaggattacttgcagctttaaca

SEQ ID NO: 2113683 - DNA, 25 bp, Homo sapien
ccagtttcctgggaaacctgatcta

SEQ ID NO: 2113684 - DNA, 25 bp, Homo sapien
ctctgataaagcttggaatctccaa

SEQ ID NO: 2113685 - DNA, 25 bp, Homo sapien
tctccaaagccggccacccgatgtc

SEQ ID NO: 2113686 - DNA, 25 bp, Homo sapien
agccggccacccgatgtctacacat

SEQ ID NO: 2113687 - DNA, 25 bp, Homo sapien
tctgataaagcttggaatctccaaa

SEQ ID NO: 2113688 - DNA, 25 bp, Homo sapien
gtgaccccactcttacacttgccat

SEQ ID NO: 2113689 - DNA, 25 bp, Homo sapien
cccactccatactgtgaccccactc

SEQ ID NO: 2113690 - DNA, 25 bp, Homo sapien
ctgtgaccccactcttacacttgcc

SEQ ID NO: 2113691 - DNA, 25 bp, Homo sapien
ccccactccatactgtgaccccact

SEQ ID NO: 2113692 - DNA, 25 bp, Homo sapien
agcgcttcccgctcgcaacttgaat

SEQ ID NO: 2113693 - DNA, 25 bp, Homo sapien
tgctagagcgcttcccgctcgcaac

SEQ ID NO: 2113694 - DNA, 25 bp, Homo sapien
gacagggttttattggatgtaaaga

SEQ ID NO: 2113695 - DNA, 25 bp, Homo sapien
cgctcgcaacttgaatcccaggttc

SEQ ID NO: 2113696 - DNA, 25 bp, Homo sapien
gcactctggcaatccttctgtatca

SEQ ID NO: 2113697 - DNA, 25 bp, Homo sapien
tgaagctcactctgacaggatgagg

SEQ ID NO: 2113698 - DNA, 25 bp, Homo sapien
acatgatgtcctgaatatccagcaa

SEQ ID NO: 2113699 - DNA, 25 bp, Homo sapien
tctgtatcaataggatctgtggacc

SEQ ID NO: 2113700 - DNA, 25 bp, Homo sapien
ggtcatgtaggtcatgcttccagga

SEQ ID NO: 2113701 - DNA, 25 bp, Homo sapien
cagtccaggcttttctataaggtgc

SEQ ID NO: 2113702 - DNA, 25 bp, Homo sapien
cttccaggaagatgtgatgagctag

SEQ ID NO: 2113703 - DNA, 25 bp, Homo sapien
ccttagtctgcataagggaccttga

SEQ ID NO: 2113704 - DNA, 25 bp, Homo sapien
tgttctaaatatattgtttgctgca

SEQ ID NO: 2113705 - DNA, 25 bp, Homo sapien
atatattgtttgctgcaccccaggg

SEQ ID NO: 2113706 - DNA, 25 bp, Homo sapien
acgaagcggtcatgaggctcctctc

SEQ ID NO: 2113707 - DNA, 25 bp, Homo sapien
ccacgaagcggtcatgaggctcctc

SEQ ID NO: 2113708 - DNA, 25 bp, Homo sapien
ctgtctattttgtggggcttgctga

SEQ ID NO: 2113709 - DNA, 25 bp, Homo sapien
taaggccacaagtttagcagtcttt

SEQ ID NO: 2113710 - DNA, 25 bp, Homo sapien
gcaaagcaaatcatgccctttaaag

SEQ ID NO: 2113711 - DNA, 25 bp, Homo sapien
tttgagttgttgaatatataaggcc

SEQ ID NO: 2113712 - DNA, 25 bp, Homo sapien
ggacctcttgagcagtaatgtggct

SEQ ID NO: 2113713 - DNA, 25 bp, Homo sapien
tgctcgagaaccagaagaaggagcc

SEQ ID NO: 2113714 - DNA, 25 bp, Homo sapien
gaaatgctgaagcacatcatccaac

SEQ ID NO: 2113715 - DNA, 25 bp, Homo sapien
gatcatttccgtgaggccctcagca

SEQ ID NO: 2113716 - DNA, 25 bp, Homo sapien
tctcaggtctcagggtataggccaa

SEQ ID NO: 2113717 - DNA, 25 bp, Homo sapien
catgagattgaggtgcaccccagaa

SEQ ID NO: 2113718 - DNA, 25 bp, Homo sapien
gaatggcttcgttgaacctgaggca

SEQ ID NO: 2113719 - DNA, 25 bp, Homo sapien
gattgttcaccccatcacacagtgg

SEQ ID NO: 2113720 - DNA, 25 bp, Homo sapien
aatgaggctctatagagctccgtca

SEQ ID NO: 2113721 - DNA, 25 bp, Homo sapien
ggaggccaactgactctggcagtgc

SEQ ID NO: 2113722 - DNA, 25 bp, Homo sapien
aggctctatagagctccgtcaccac

SEQ ID NO: 2113723 - DNA, 25 bp, Homo sapien
gaggccaactgactctggcagtgca

SEQ ID NO: 2113724 - DNA, 25 bp, Homo sapien
ttggggagtaactggaggatgcagc

SEQ ID NO: 2113725 - DNA, 25 bp, Homo sapien
gcctggcgcacagtataagtgattg

SEQ ID NO: 2113726 - DNA, 25 bp, Homo sapien
agtgattggggagtaactggaggat

SEQ ID NO: 2113727 - DNA, 25 bp, Homo sapien
ctggcgcacagtataagtgattggg

SEQ ID NO: 2113728 - DNA, 25 bp, Homo sapien
tgagaactgcagaaaatggatgcct

SEQ ID NO: 2113729 - DNA, 25 bp, Homo sapien
gatgccaccttgtgacctacttcag

SEQ ID NO: 2113730 - DNA, 25 bp, Homo sapien
tcctctgcatgatataacagcctgc

SEQ ID NO: 2113731 - DNA, 25 bp, Homo sapien
tcagcatccttgagaagtggatatc

SEQ ID NO: 2113732 - DNA, 25 bp, Homo sapien
tgtcagctttgcacagccgctcagt

SEQ ID NO: 2113733 - DNA, 25 bp, Homo sapien
cagctttgcacagccgctcagtttt

SEQ ID NO: 2113734 - DNA, 25 bp, Homo sapien
tgcacagccgctcagtttttctctc

SEQ ID NO: 2113735 - DNA, 25 bp, Homo sapien
tttgcacagccgctcagtttttctc

SEQ ID NO: 2113736 - DNA, 25 bp, Homo sapien
gcctcactcgcaccaaagcattggg

SEQ ID NO: 2113737 - DNA, 25 bp, Homo sapien
tgactgggaacatagcctcactcgc

SEQ ID NO: 2113738 - DNA, 25 bp, Homo sapien
gaacatagcctcactcgcaccaaag

SEQ ID NO: 2113739 - DNA, 25 bp, Homo sapien
gaccatgactgggaacatagcctca

SEQ ID NO: 2113740 - DNA, 25 bp, Homo sapien
gtcttcaaggtagggcagtcaaaca

SEQ ID NO: 2113741 - DNA, 25 bp, Homo sapien
cttggtcttcaaggtagggcagtca

SEQ ID NO: 2113742 - DNA, 25 bp, Homo sapien
gaatcagctccttgaaatccaacca

SEQ ID NO: 2113743 - DNA, 25 bp, Homo sapien
gcacttatctgacaccaggagcttg

SEQ ID NO: 2113744 - DNA, 25 bp, Homo sapien
tactcggccagtttggaaactccca

SEQ ID NO: 2113745 - DNA, 25 bp, Homo sapien
tatagccattggatgttgacttttg

SEQ ID NO: 2113746 - DNA, 25 bp, Homo sapien
gatgttgacttttggtccccatgaa

SEQ ID NO: 2113747 - DNA, 25 bp, Homo sapien
ccctttggtgaagaatatagccatt

SEQ ID NO: 2113748 - DNA, 25 bp, Homo sapien
ggaaggctggctgaaatccattccc

SEQ ID NO: 2113749 - DNA, 25 bp, Homo sapien
gagaagagctttcaagcctgaatag

SEQ ID NO: 2113750 - DNA, 25 bp, Homo sapien
gctttcaagcctgaatagggtgtgt

SEQ ID NO: 2113751 - DNA, 25 bp, Homo sapien
ttcaagcctgaatagggtgtgtgag

SEQ ID NO: 2113752 - DNA, 25 bp, Homo sapien
gaagagctttcaagcctgaataggg

SEQ ID NO: 2113753 - DNA, 25 bp, Homo sapien
tacttaaagatccatcaaaggcatc

SEQ ID NO: 2113754 - DNA, 25 bp, Homo sapien
caaaggcatcacttacaccaaaaaa

SEQ ID NO: 2113755 - DNA, 25 bp, Homo sapien
aacagtctcgggacagaaaattggc

SEQ ID NO: 2113756 - DNA, 25 bp, Homo sapien
ctgagctcccaaggcagtacttaaa

SEQ ID NO: 2113757 - DNA, 25 bp, Homo sapien
cagatagagtggtgacggaagacct

SEQ ID NO: 2113758 - DNA, 25 bp, Homo sapien
agagtggtgacggaagacctggaca

SEQ ID NO: 2113759 - DNA, 25 bp, Homo sapien
tggtgacggaagacctggacagagc

SEQ ID NO: 2113760 - DNA, 25 bp, Homo sapien
agtggtgacggaagacctggacaga

SEQ ID NO: 2113761 - DNA, 25 bp, Homo sapien
ctacagacacacaaagcttcagact

SEQ ID NO: 2113762 - DNA, 25 bp, Homo sapien
gacacacaaagcttcagactcttga

SEQ ID NO: 2113763 - DNA, 25 bp, Homo sapien
caaagcttcagactcttgaatctgt

SEQ ID NO: 2113764 - DNA, 25 bp, Homo sapien
aagcttcagactcttgaatctgtag

SEQ ID NO: 2113765 - DNA, 25 bp, Homo sapien
gatgttcaatttagtgatgtgtttc

SEQ ID NO: 2113766 - DNA, 25 bp, Homo sapien
gttcaatttagtgatgtgtttccag

SEQ ID NO: 2113767 - DNA, 25 bp, Homo sapien
tcaatttagtgatgtgtttccagtc

SEQ ID NO: 2113768 - DNA, 25 bp, Homo sapien
ttgctgtcttcccatagccttcata

SEQ ID NO: 2113769 - DNA, 25 bp, Homo sapien
tatctgcgggaaggatgattctttc

SEQ ID NO: 2113770 - DNA, 25 bp, Homo sapien
ggaaggccacttctggcaggcgcaa

SEQ ID NO: 2113771 - DNA, 25 bp, Homo sapien
caacagagccactatgggagagctc

SEQ ID NO: 2113772 - DNA, 25 bp, Homo sapien
cccagaagttgcttgttgccctaaa

SEQ ID NO: 2113773 - DNA, 25 bp, Homo sapien
tccttctcaaggacaagggtccaga

SEQ ID NO: 2113774 - DNA, 25 bp, Homo sapien
tgatttgttaagaccagggctctgt

SEQ ID NO: 2113775 - DNA, 25 bp, Homo sapien
ggctctgtggtgtccttctcaagga

SEQ ID NO: 2113776 - DNA, 25 bp, Homo sapien
taaagtctgtaactctggtaaggga

SEQ ID NO: 2113777 - DNA, 25 bp, Homo sapien
cagacaaatggctctcgtccagtcc

SEQ ID NO: 2113778 - DNA, 25 bp, Homo sapien
acttctcaccttgcgtcagagtgaa

SEQ ID NO: 2113779 - DNA, 25 bp, Homo sapien
taaagagagcagttgtctcactggg

SEQ ID NO: 2113780 - DNA, 25 bp, Homo sapien
ttacttttaacagaggtgatgagcc

SEQ ID NO: 2113781 - DNA, 25 bp, Homo sapien
gaaagtcctctttgcttcacgaagt

SEQ ID NO: 2113782 - DNA, 25 bp, Homo sapien
caaggtctcaggtacacatgcatgc

SEQ ID NO: 2113783 - DNA, 25 bp, Homo sapien
tctccccaccctaaccaaggtctca

SEQ ID NO: 2113784 - DNA, 25 bp, Homo sapien
ttcacgaagttctatggaagcagaa

SEQ ID NO: 2113785 - DNA, 25 bp, Homo sapien
tgctgcccgccacagtaaaagtgtg

SEQ ID NO: 2113786 - DNA, 25 bp, Homo sapien
gaatttggctgctaaattgtaccat

SEQ ID NO: 2113787 - DNA, 25 bp, Homo sapien
tgtccattgggtgaattgagctcta

SEQ ID NO: 2113788 - DNA, 25 bp, Homo sapien
agtctgaacttgataagaatttggc

SEQ ID NO: 2113789 - DNA, 25 bp, Homo sapien
ccactgtggtgaatgcttgcaggga

SEQ ID NO: 2113790 - DNA, 25 bp, Homo sapien
tgtggtgaatgcttgcagggaagca

SEQ ID NO: 2113791 - DNA, 25 bp, Homo sapien
cactgtggtgaatgcttgcagggaa

SEQ ID NO: 2113792 - DNA, 25 bp, Homo sapien
caccactgtggtgaatgcttgcagg

SEQ ID NO: 2113793 - DNA, 25 bp, Homo sapien
ctgccagcaagggaccccatcccca

SEQ ID NO: 2113794 - DNA, 25 bp, Homo sapien
ggctgccagcaagggaccccatccc

SEQ ID NO: 2113795 - DNA, 25 bp, Homo sapien
agcaagggaccccatccccacacac

SEQ ID NO: 2113796 - DNA, 25 bp, Homo sapien
atggctgccagcaagggaccccatc

SEQ ID NO: 2113797 - DNA, 25 bp, Homo sapien
tgggggacagctccataattgtttc

SEQ ID NO: 2113798 - DNA, 25 bp, Homo sapien
cagctccataattgtttctgtgggc

SEQ ID NO: 2113799 - DNA, 25 bp, Homo sapien
gacagctccataattgtttctgtgg

SEQ ID NO: 2113800 - DNA, 25 bp, Homo sapien
gggacagctccataattgtttctgt

SEQ ID NO: 2113801 - DNA, 25 bp, Homo sapien
cagacacttcgtttcagtagaaatg

SEQ ID NO: 2113802 - DNA, 25 bp, Homo sapien
cacagacacttcgtttcagtagaaa

SEQ ID NO: 2113803 - DNA, 25 bp, Homo sapien
tcagtagaaatgattaatatggggt

SEQ ID NO: 2113804 - DNA, 25 bp, Homo sapien
gattaatatggggtttatatggctt

SEQ ID NO: 2113805 - DNA, 25 bp, Homo sapien
gtgctttgacataagacaatcggat

SEQ ID NO: 2113806 - DNA, 25 bp, Homo sapien
gactgaacagtgtggcttggaaaga

SEQ ID NO: 2113807 - DNA, 25 bp, Homo sapien
agatcaaatgttcaaacggccttgc

SEQ ID NO: 2113808 - DNA, 25 bp, Homo sapien
tgaaccctgtgaggggagctctgaa

SEQ ID NO: 2113809 - DNA, 25 bp, Homo sapien
agtcagattttgtgggaccccctct

SEQ ID NO: 2113810 - DNA, 25 bp, Homo sapien
ggggccttgcatggctgaccacaga

SEQ ID NO: 2113811 - DNA, 25 bp, Homo sapien
cagggaatgggtggcctcccttctg

SEQ ID NO: 2113812 - DNA, 25 bp, Homo sapien
agggtctgtgccttggtacctggca

SEQ ID NO: 2113813 - DNA, 25 bp, Homo sapien
ataagaatgtgggcaggagggcagg

SEQ ID NO: 2113814 - DNA, 25 bp, Homo sapien
gaatgtgggcaggagggcaggacat

SEQ ID NO: 2113815 - DNA, 25 bp, Homo sapien
cttgataagaatgtgggcaggaggg

SEQ ID NO: 2113816 - DNA, 25 bp, Homo sapien
aagaatgtgggcaggagggcaggac

SEQ ID NO: 2113817 - DNA, 25 bp, Homo sapien
agccccaagctcgactctgctcagg

SEQ ID NO: 2113818 - DNA, 25 bp, Homo sapien
gagccccaagctcgactctgctcag

SEQ ID NO: 2113819 - DNA, 25 bp, Homo sapien
tgagccccaagctcgactctgctca

SEQ ID NO: 2113820 - DNA, 25 bp, Homo sapien
ccccaagctcgactctgctcagggg

SEQ ID NO: 2113821 - DNA, 25 bp, Homo sapien
tgaaacggggattccaaggacatgg

SEQ ID NO: 2113822 - DNA, 25 bp, Homo sapien
aggtttccccttagcagcctgtgat

SEQ ID NO: 2113823 - DNA, 25 bp, Homo sapien
catggaggagcattgagtgtcccac

SEQ ID NO: 2113824 - DNA, 25 bp, Homo sapien
tccctgagggaggtaaggtggcagt

SEQ ID NO: 2113825 - DNA, 25 bp, Homo sapien
ctgttggatgatatgcttcagcatt

SEQ ID NO: 2113826 - DNA, 25 bp, Homo sapien
acctcagggaagtgatccatttgct

SEQ ID NO: 2113827 - DNA, 25 bp, Homo sapien
tctggttctcgagcagcaggaacac

SEQ ID NO: 2113828 - DNA, 25 bp, Homo sapien
gccacattactgctcaagaggtccc

SEQ ID NO: 2113829 - DNA, 25 bp, Homo sapien
tgcaaaacatcttcaacgaaaagct

SEQ ID NO: 2113830 - DNA, 25 bp, Homo sapien
cagaaatgatgtgcttcccctcagc

SEQ ID NO: 2113831 - DNA, 25 bp, Homo sapien
aaagctttctgggactttcagaaat

SEQ ID NO: 2113832 - DNA, 25 bp, Homo sapien
tcagcatcttcaactctctcagcat

SEQ ID NO: 2113833 - DNA, 25 bp, Homo sapien
gtatcgtaaaagcaagaaccttgcc

SEQ ID NO: 2113834 - DNA, 25 bp, Homo sapien
tttttgttagctcagaagacagtta

SEQ ID NO: 2113835 - DNA, 25 bp, Homo sapien
tatattactgtacattaggcaagta

SEQ ID NO: 2113836 - DNA, 25 bp, Homo sapien
gaaccttgccattaagcacatgtat

SEQ ID NO: 2113837 - DNA, 25 bp, Homo sapien
tctgcctgactgagtgccaaggact

SEQ ID NO: 2113838 - DNA, 25 bp, Homo sapien
ccctatgggaatactcgaggagcgg

SEQ ID NO: 2113839 - DNA, 25 bp, Homo sapien
atgaccagcagtgaccagccttgac

SEQ ID NO: 2113840 - DNA, 25 bp, Homo sapien
ccttgactggccgtttctggcatga

SEQ ID NO: 2113841 - DNA, 25 bp, Homo sapien
agaagccttcacgtgcacaggccca

SEQ ID NO: 2113842 - DNA, 25 bp, Homo sapien
tattaagacgactgtggacagatca

SEQ ID NO: 2113843 - DNA, 25 bp, Homo sapien
ttgctcctgtggataggaagcctcc

SEQ ID NO: 2113844 - DNA, 25 bp, Homo sapien
ttgagaggaattgcgctgttgctcc

SEQ ID NO: 2113845 - DNA, 25 bp, Homo sapien
atggactaataaagtagtccataat

SEQ ID NO: 2113846 - DNA, 25 bp, Homo sapien
agtgatttctgcacccttatgttca

SEQ ID NO: 2113847 - DNA, 25 bp, Homo sapien
tcttaagatgattattgaaaagaca

SEQ ID NO: 2113848 - DNA, 25 bp, Homo sapien
atgaaatcactatcttgaagtgatt

SEQ ID NO: 2113849 - DNA, 25 bp, Homo sapien
acatcccaaagctgacaagagactc

SEQ ID NO: 2113850 - DNA, 25 bp, Homo sapien
caagagactcgaggtttagcttcac

SEQ ID NO: 2113851 - DNA, 25 bp, Homo sapien
ccaaagctgacaagagactcgaggt

SEQ ID NO: 2113852 - DNA, 25 bp, Homo sapien
ggtttagcttcacccattctctcat

SEQ ID NO: 2113853 - DNA, 25 bp, Homo sapien
gaataattgggattgtggttctttg

SEQ ID NO: 2113854 - DNA, 25 bp, Homo sapien
agagctcacaggaataattgggatt

SEQ ID NO: 2113855 - DNA, 25 bp, Homo sapien
aaccaaggaggccctgtgagagctc

SEQ ID NO: 2113856 - DNA, 25 bp, Homo sapien
tctgtgtctctatggggagaggaac

SEQ ID NO: 2113857 - DNA, 25 bp, Homo sapien
gtttccatagaacagctggctcatt

SEQ ID NO: 2113858 - DNA, 25 bp, Homo sapien
ggctcatttgactccgcaagtcctc

SEQ ID NO: 2113859 - DNA, 25 bp, Homo sapien
agaagagctcttcgctgaatgcaga

SEQ ID NO: 2113860 - DNA, 25 bp, Homo sapien
tacctgtcggtttatcatcagcttc

SEQ ID NO: 2113861 - DNA, 25 bp, Homo sapien
catttctggacccttcttctaagat

SEQ ID NO: 2113862 - DNA, 25 bp, Homo sapien
ggttttcatgggctcctctactcct

SEQ ID NO: 2113863 - DNA, 25 bp, Homo sapien
tcctgtatagcagccccatgcttgt

SEQ ID NO: 2113864 - DNA, 25 bp, Homo sapien
ctggctgtgtatgtcccccgaggaa

SEQ ID NO: 2113865 - DNA, 25 bp, Homo sapien
cagctgtggcttccaataccctagc

SEQ ID NO: 2113866 - DNA, 25 bp, Homo sapien
tgcagcaaatagtataatctgcaaa

SEQ ID NO: 2113867 - DNA, 25 bp, Homo sapien
tctcctaatattaatgctctgcagc

SEQ ID NO: 2113868 - DNA, 25 bp, Homo sapien
cactgaattcttcccagactcagct

SEQ ID NO: 2113869 - DNA, 25 bp, Homo sapien
ccatttggattttccaacagattca

SEQ ID NO: 2113870 - DNA, 25 bp, Homo sapien
gaagcctaagccataccatttggat

SEQ ID NO: 2113871 - DNA, 25 bp, Homo sapien
gaaatctgctgccagctaactgcag

SEQ ID NO: 2113872 - DNA, 25 bp, Homo sapien
ttctgaagaagcctaagccatacca

SEQ ID NO: 2113873 - DNA, 25 bp, Homo sapien
tgatgcacgtaggggtagaaactcc

SEQ ID NO: 2113874 - DNA, 25 bp, Homo sapien
cacgtaggggtagaaactcctctgt

SEQ ID NO: 2113875 - DNA, 25 bp, Homo sapien
tgtctgctgaggaatttctacccac

SEQ ID NO: 2113876 - DNA, 25 bp, Homo sapien
tgctgaggaatttctacccactgac

SEQ ID NO: 2113877 - DNA, 25 bp, Homo sapien
gacttgtactgtcttattaagtctc

SEQ ID NO: 2113878 - DNA, 25 bp, Homo sapien
cagctctgacttgtactgtcttatt

SEQ ID NO: 2113879 - DNA, 25 bp, Homo sapien
ctctgacttgtactgtcttattaag

SEQ ID NO: 2113880 - DNA, 25 bp, Homo sapien
cttgtactgtcttattaagtctcat

SEQ ID NO: 2113881 - DNA, 25 bp, Homo sapien
tgcatgtttatgcttttcacccaaa

SEQ ID NO: 2113882 - DNA, 25 bp, Homo sapien
tcacatctggaggactgaatccttg

SEQ ID NO: 2113883 - DNA, 25 bp, Homo sapien
gtctgtgcttgaaaatgccgctgtt

SEQ ID NO: 2113884 - DNA, 25 bp, Homo sapien
gatttcatattcctgcatgtttatg

SEQ ID NO: 2113885 - DNA, 25 bp, Homo sapien
agttctggagagatttccaccatca

SEQ ID NO: 2113886 - DNA, 25 bp, Homo sapien
tttccaccatcaacgagtgtttctg

SEQ ID NO: 2113887 - DNA, 25 bp, Homo sapien
ttctggagagatttccaccatcaac

SEQ ID NO: 2113888 - DNA, 25 bp, Homo sapien
catcaacgagtgtttctgactgtgg

SEQ ID NO: 2113889 - DNA, 25 bp, Homo sapien
ttccacactaaaacatctcatactg

SEQ ID NO: 2113890 - DNA, 25 bp, Homo sapien
aaaattgttatcaggaaatggctgc

SEQ ID NO: 2113891 - DNA, 25 bp, Homo sapien
aaaacatctcatactgccaatgaac

SEQ ID NO: 2113892 - DNA, 25 bp, Homo sapien
tatcaaaattgttatcaggaaatgg

SEQ ID NO: 2113893 - DNA, 25 bp, Homo sapien
tgttgctgtcacacttgaagctgcc

SEQ ID NO: 2113894 - DNA, 25 bp, Homo sapien
gttgctgtcacacttgaagctgcct

SEQ ID NO: 2113895 - DNA, 25 bp, Homo sapien
aatgctgttatttgtgggttcagag

SEQ ID NO: 2113896 - DNA, 25 bp, Homo sapien
ggcagactgaatccttgtgactatg

SEQ ID NO: 2113897 - DNA, 25 bp, Homo sapien
atctggcagactgaatccttgtgac

SEQ ID NO: 2113898 - DNA, 25 bp, Homo sapien
aaaatgctgttatttgtgggttcag

SEQ ID NO: 2113899 - DNA, 25 bp, Homo sapien
ttatagtctgcacagggtgtatttg

SEQ ID NO: 2113900 - DNA, 25 bp, Homo sapien
tgacattcagcattgacttcttggg

SEQ ID NO: 2113901 - DNA, 25 bp, Homo sapien
tccacagctatggttgttgcggcct

SEQ ID NO: 2113902 - DNA, 25 bp, Homo sapien
taacgtgttgagtacagtccctgtg

SEQ ID NO: 2113903 - DNA, 25 bp, Homo sapien
gagaggtcctgtgttacgccctgca

SEQ ID NO: 2113904 - DNA, 25 bp, Homo sapien
ggattcttggcacagtagccgggca

SEQ ID NO: 2113905 - DNA, 25 bp, Homo sapien
ttgtctgcacaacccacgggattct

SEQ ID NO: 2113906 - DNA, 25 bp, Homo sapien
agtgttgtctgcacaacccacggga

SEQ ID NO: 2113907 - DNA, 25 bp, Homo sapien
gattcttggcacagtagccgggcat

SEQ ID NO: 2113908 - DNA, 25 bp, Homo sapien
ggggcaaaggcagcgtcgtcatcat

SEQ ID NO: 2113909 - DNA, 25 bp, Homo sapien
gggcaaaggcagcgtcgtcatcatc

SEQ ID NO: 2113910 - DNA, 25 bp, Homo sapien
aggggcaaaggcagcgtcgtcatca

SEQ ID NO: 2113911 - DNA, 25 bp, Homo sapien
gctcccgcagcgcgcaacgcctggg

SEQ ID NO: 2113912 - DNA, 25 bp, Homo sapien
agcgcgcaacgcctggggcccactg

SEQ ID NO: 2113913 - DNA, 25 bp, Homo sapien
ctgaggggcgaggaaccggggcgag

SEQ ID NO: 2113914 - DNA, 25 bp, Homo sapien
ctggctcccgcagcgcgcaacgcct

SEQ ID NO: 2113915 - DNA, 25 bp, Homo sapien
cttctgcgaggtgaagcgcattctc

SEQ ID NO: 2113916 - DNA, 25 bp, Homo sapien
ggcgcgtccgcgctcccgttcacgt

SEQ ID NO: 2113917 - DNA, 25 bp, Homo sapien
tgaagcgcattctcgggcgcgtccg

SEQ ID NO: 2113918 - DNA, 25 bp, Homo sapien
tcccgttcacgtgcgcgttcgcagg

SEQ ID NO: 2113919 - DNA, 25 bp, Homo sapien
agcgaggcgtgtcagtcagccagtc

SEQ ID NO: 2113920 - DNA, 25 bp, Homo sapien
gagcccgcgactctccacagagccc

SEQ ID NO: 2113921 - DNA, 25 bp, Homo sapien
gtccgccagtccgatgggcggccgg

SEQ ID NO: 2113922 - DNA, 25 bp, Homo sapien
ccgccggagtggaggaggcgctgct

SEQ ID NO: 2113923 - DNA, 25 bp, Homo sapien
tgtgtgggccgccgacgcagctgct

SEQ ID NO: 2113924 - DNA, 25 bp, Homo sapien
tacatacacgtacgttctgtgcttg

SEQ ID NO: 2113925 - DNA, 25 bp, Homo sapien
ggttctgttcgaagacgcccaggag

SEQ ID NO: 2113926 - DNA, 25 bp, Homo sapien
cagatattcggcgtgcacgggcttg

SEQ ID NO: 2113927 - DNA, 25 bp, Homo sapien
tgctactcactaacaggacctcgtc

SEQ ID NO: 2113928 - DNA, 25 bp, Homo sapien
tcctgaggcagacgcgtaacactgt

SEQ ID NO: 2113929 - DNA, 25 bp, Homo sapien
tagtgcaacaacctggagaatagtc

SEQ ID NO: 2113930 - DNA, 25 bp, Homo sapien
caagggcgtatactctgccgggaaa

SEQ ID NO: 2113931 - DNA, 25 bp, Homo sapien
tgtacagatacagcggtagtgcaac

SEQ ID NO: 2113932 - DNA, 25 bp, Homo sapien
tggccaggacctcaagaattatatt

SEQ ID NO: 2113933 - DNA, 25 bp, Homo sapien
aattcttatggccaggacctcaaga

SEQ ID NO: 2113934 - DNA, 25 bp, Homo sapien
tgtgggctttgcatatatggtcttt

SEQ ID NO: 2113935 - DNA, 25 bp, Homo sapien
tttcaatcttccaccatttagtatg

SEQ ID NO: 2113936 - DNA, 25 bp, Homo sapien
gatgctctttgctaccgccaggctc

SEQ ID NO: 2113937 - DNA, 25 bp, Homo sapien
cgccgagcgcccctgacgcccgtta

SEQ ID NO: 2113938 - DNA, 25 bp, Homo sapien
gtgatgctctttgctaccgccaggc

SEQ ID NO: 2113939 - DNA, 25 bp, Homo sapien
cccctgacgcccgttaccgagatgg

SEQ ID NO: 2113940 - DNA, 25 bp, Homo sapien
gggtgacgccgtacacccggtgtca

SEQ ID NO: 2113941 - DNA, 25 bp, Homo sapien
ccgtacacccggtgtcagacagctg

SEQ ID NO: 2113942 - DNA, 25 bp, Homo sapien
cagaaactacgcagcgccggtgtgt

SEQ ID NO: 2113943 - DNA, 25 bp, Homo sapien
gtcggtgataatgctttgatgctct

SEQ ID NO: 2113944 - DNA, 25 bp, Homo sapien
gcagatggatttgtgagactgtgcc

SEQ ID NO: 2113945 - DNA, 25 bp, Homo sapien
catgctctcatgactaggaaactac

SEQ ID NO: 2113946 - DNA, 25 bp, Homo sapien
ttggttcccaatcctagtggaagag

SEQ ID NO: 2113947 - DNA, 25 bp, Homo sapien
ggagagaggtatacataacagcaga

SEQ ID NO: 2113948 - DNA, 25 bp, Homo sapien
tgttcagcacctcagatgataggat

SEQ ID NO: 2113949 - DNA, 25 bp, Homo sapien
catttggtcccaagagtttcacaga

SEQ ID NO: 2113950 - DNA, 25 bp, Homo sapien
gaacttagaacgactgcagagtgca

SEQ ID NO: 2113951 - DNA, 25 bp, Homo sapien
cacagtattactacaggccttgaca

SEQ ID NO: 2113952 - DNA, 25 bp, Homo sapien
cacatacaatgatgggacgggcata

SEQ ID NO: 2113953 - DNA, 25 bp, Homo sapien
cgaggttcactgatctgggagcata

SEQ ID NO: 2113954 - DNA, 25 bp, Homo sapien
tgtggaccatcagcactaaagtgac

SEQ ID NO: 2113955 - DNA, 25 bp, Homo sapien
gaagttcatataagaccagaggtca

SEQ ID NO: 2113956 - DNA, 25 bp, Homo sapien
ggaggagagcgcgaactggtagagc

SEQ ID NO: 2113957 - DNA, 25 bp, Homo sapien
agagcgcgaactggtagagcaagaa

SEQ ID NO: 2113958 - DNA, 25 bp, Homo sapien
ctgccggaggagagcgcgaactggt

SEQ ID NO: 2113959 - DNA, 25 bp, Homo sapien
aggagagcgcgaactggtagagcaa

SEQ ID NO: 2113960 - DNA, 25 bp, Homo sapien
aacgccaggttctcccccagagagc

SEQ ID NO: 2113961 - DNA, 25 bp, Homo sapien
gccaggttctcccccagagagcaag

SEQ ID NO: 2113962 - DNA, 25 bp, Homo sapien
cagagagcaagagcgcagctgctac

SEQ ID NO: 2113963 - DNA, 25 bp, Homo sapien
ccagagagcaagagcgcagctgcta

SEQ ID NO: 2113964 - DNA, 25 bp, Homo sapien
caaaaacttcgtgaggactgcggca

SEQ ID NO: 2113965 - DNA, 25 bp, Homo sapien
tagaagccccggaacagggatagct

SEQ ID NO: 2113966 - DNA, 25 bp, Homo sapien
cacagcagctatgattggcagcccc

SEQ ID NO: 2113967 - DNA, 25 bp, Homo sapien
ctgggttgcctgactcgacgtagaa

SEQ ID NO: 2113968 - DNA, 25 bp, Homo sapien
gaggagaggcttctaaactactcag

SEQ ID NO: 2113969 - DNA, 25 bp, Homo sapien
caaaggccaacagcaggttaagtgc

SEQ ID NO: 2113970 - DNA, 25 bp, Homo sapien
tcgcagctaactacagggcaggcag

SEQ ID NO: 2113971 - DNA, 25 bp, Homo sapien
tactcaggatgttggttaacggctg

SEQ ID NO: 2113972 - DNA, 25 bp, Homo sapien
ctgagctttcactaagatttctctg

SEQ ID NO: 2113973 - DNA, 25 bp, Homo sapien
gctttcactaagatttctctggatt

SEQ ID NO: 2113974 - DNA, 25 bp, Homo sapien
gagctttcactaagatttctctgga

SEQ ID NO: 2113975 - DNA, 25 bp, Homo sapien
ctttcactaagatttctctggattt

SEQ ID NO: 2113976 - DNA, 25 bp, Homo sapien
tctgctgttctagggtaagcttccc

SEQ ID NO: 2113977 - DNA, 25 bp, Homo sapien
tcagtatggcctctataccttccct

SEQ ID NO: 2113978 - DNA, 25 bp, Homo sapien
tggcagagtttcatagaggtggtaa

SEQ ID NO: 2113979 - DNA, 25 bp, Homo sapien
ggtaaaatgccccacaaatctcagt

SEQ ID NO: 2113980 - DNA, 25 bp, Homo sapien
agaaaagctcttcgtttggttcagc

SEQ ID NO: 2113981 - DNA, 25 bp, Homo sapien
gcagtccattggcagtactcaatgt

SEQ ID NO: 2113982 - DNA, 25 bp, Homo sapien
gtaggtatagcagaaagctctggca

SEQ ID NO: 2113983 - DNA, 25 bp, Homo sapien
cagaaccccgcaataccatttttgt

SEQ ID NO: 2113984 - DNA, 25 bp, Homo sapien
ttctaaagaaatatggtgccactgt

SEQ ID NO: 2113985 - DNA, 25 bp, Homo sapien
aacactgtcacgattactttggaga

SEQ ID NO: 2113986 - DNA, 25 bp, Homo sapien
ttatgctgctaaacagtgagtgccg

SEQ ID NO: 2113987 - DNA, 25 bp, Homo sapien
aagtgcagatttgttccgcaggtaa

SEQ ID NO: 2113988 - DNA, 25 bp, Homo sapien
ggacgcgtccgttaatgcgcctcac

SEQ ID NO: 2113989 - DNA, 25 bp, Homo sapien
gttaatgcgcctcacctcgctcaaa

SEQ ID NO: 2113990 - DNA, 25 bp, Homo sapien
agcgcggacgcgtccgttaatgcgc

SEQ ID NO: 2113991 - DNA, 25 bp, Homo sapien
cgggagcgcggacgcgtccgttaat

SEQ ID NO: 2113992 - DNA, 25 bp, Homo sapien
agagagctcctcagaaacagctgtt

SEQ ID NO: 2113993 - DNA, 25 bp, Homo sapien
tcagaaagagagctcctcagaaaca

SEQ ID NO: 2113994 - DNA, 25 bp, Homo sapien
gaaagagagctcctcagaaacagct

SEQ ID NO: 2113995 - DNA, 25 bp, Homo sapien
aaagagagctcctcagaaacagctg

SEQ ID NO: 2113996 - DNA, 25 bp, Homo sapien
agcaacttttcatcacctttcttag

SEQ ID NO: 2113997 - DNA, 25 bp, Homo sapien
tttcttagctggaaccagaaatgta

SEQ ID NO: 2113998 - DNA, 25 bp, Homo sapien
tctgcttgtatttcaggagcaactt

SEQ ID NO: 2113999 - DNA, 25 bp, Homo sapien
tgagggtaagggcttattttgtcta

SEQ ID NO: 2114000 - DNA, 25 bp, Homo sapien
cttcggctcgcgtagggtgcacgca

SEQ ID NO: 2114001 - DNA, 25 bp, Homo sapien
ctgcttcggctcgcgtagggtgcac

SEQ ID NO: 2114002 - DNA, 25 bp, Homo sapien
tcggctcgcgtagggtgcacgcacc

SEQ ID NO: 2114003 - DNA, 25 bp, Homo sapien
ggctcgcgtagggtgcacgcaccca

SEQ ID NO: 2114004 - DNA, 25 bp, Homo sapien
ttaaatgaagtaccctggacttctc

SEQ ID NO: 2114005 - DNA, 25 bp, Homo sapien
aaatgaagtaccctggacttctctt

SEQ ID NO: 2114006 - DNA, 25 bp, Homo sapien
taaatgaagtaccctggacttctct

SEQ ID NO: 2114007 - DNA, 25 bp, Homo sapien
tcctgagacttgactctgagccact

SEQ ID NO: 2114008 - DNA, 25 bp, Homo sapien
gggaatggcaccacagtttctgtga

SEQ ID NO: 2114009 - DNA, 25 bp, Homo sapien
tgagccactatcacagtctgcatgc

SEQ ID NO: 2114010 - DNA, 25 bp, Homo sapien
tcttcccaatgtgaggtgtgcggtt

SEQ ID NO: 2114011 - DNA, 25 bp, Homo sapien
taaaaactgagcgtaaagcaattca

SEQ ID NO: 2114012 - DNA, 25 bp, Homo sapien
ggagccgtcatccacatttctttga

SEQ ID NO: 2114013 - DNA, 25 bp, Homo sapien
tctttgatgtaaaaactgagcgtaa

SEQ ID NO: 2114014 - DNA, 25 bp, Homo sapien
tcaggagccgtcatccacatttctt

SEQ ID NO: 2114015 - DNA, 25 bp, Homo sapien
tgctccagggcgcagaaagcatcgt

SEQ ID NO: 2114016 - DNA, 25 bp, Homo sapien
tgctggacaccttcgagtacccggg

SEQ ID NO: 2114017 - DNA, 25 bp, Homo sapien
aagggaagggtctctttacatcgca

SEQ ID NO: 2114018 - DNA, 25 bp, Homo sapien
gcagatctgcgcgtcgtggattgca

SEQ ID NO: 2114019 - DNA, 25 bp, Homo sapien
tgaccgcgatggccgcgcaggcggc

SEQ ID NO: 2114020 - DNA, 25 bp, Homo sapien
gcgtggctcccgaccccgacttgga

SEQ ID NO: 2114021 - DNA, 25 bp, Homo sapien
cttggccgccgcgtggctcccgacc

SEQ ID NO: 2114022 - DNA, 25 bp, Homo sapien
ccgctgagcagtggcgcggttcctc

SEQ ID NO: 2114023 - DNA, 25 bp, Homo sapien
gcaggaccttggcggcgccctcgca

SEQ ID NO: 2114024 - DNA, 25 bp, Homo sapien
gcggcgccctcgcagctgaggcccc

SEQ ID NO: 2114025 - DNA, 25 bp, Homo sapien
accttggcggcgccctcgcagctga

SEQ ID NO: 2114026 - DNA, 25 bp, Homo sapien
ttggcggcgccctcgcagctgaggc

SEQ ID NO: 2114027 - DNA, 25 bp, Homo sapien
gccgcagtggcagcccccggtgtga

SEQ ID NO: 2114028 - DNA, 25 bp, Homo sapien
ccagaccgcaaagcggaccgcgccg

SEQ ID NO: 2114029 - DNA, 25 bp, Homo sapien
cggtgtgatgcacgaggcccgggta

SEQ ID NO: 2114030 - DNA, 25 bp, Homo sapien
cggaccgcgccgcagtggcagcccc

SEQ ID NO: 2114031 - DNA, 25 bp, Homo sapien
tgttggaccgataggtgacgatgct

SEQ ID NO: 2114032 - DNA, 25 bp, Homo sapien
tgcagcgccgggtgcgtgttggacc

SEQ ID NO: 2114033 - DNA, 25 bp, Homo sapien
cagctgcaatccacgacgcgcagat

SEQ ID NO: 2114034 - DNA, 25 bp, Homo sapien
gtgacgatgctttctgcgccctgga

SEQ ID NO: 2114035 - DNA, 25 bp, Homo sapien
tcactgctcctgttcgcggggacag

SEQ ID NO: 2114036 - DNA, 25 bp, Homo sapien
gcagaacagtaaaagcgagagatac

SEQ ID NO: 2114037 - DNA, 25 bp, Homo sapien
ggcagaacagtaaaagcgagagata

SEQ ID NO: 2114038 - DNA, 25 bp, Homo sapien
cagaacagtaaaagcgagagataca

SEQ ID NO: 2114039 - DNA, 25 bp, Homo sapien
agcaccaggaacgtacagtacacag

SEQ ID NO: 2114040 - DNA, 25 bp, Homo sapien
acaagcctgttcacaatagcaccag

SEQ ID NO: 2114041 - DNA, 25 bp, Homo sapien
atcatctgcaggtgatttgtgacaa

SEQ ID NO: 2114042 - DNA, 25 bp, Homo sapien
caggaatcatctgcaggtgatttgt

SEQ ID NO: 2114043 - DNA, 25 bp, Homo sapien
ctgaaactcacaggtgcgggagccc

SEQ ID NO: 2114044 - DNA, 25 bp, Homo sapien
taaagagggcagacagtgcgcagat

SEQ ID NO: 2114045 - DNA, 25 bp, Homo sapien
taatcaatggaagacgtcctagcac

SEQ ID NO: 2114046 - DNA, 25 bp, Homo sapien
caaactggttgtgtgttgccgtcct

SEQ ID NO: 2114047 - DNA, 25 bp, Homo sapien
gagacaacgtggctccgcctgagtt

SEQ ID NO: 2114048 - DNA, 25 bp, Homo sapien
gcgtgcggctcgacatgtctctttc

SEQ ID NO: 2114049 - DNA, 25 bp, Homo sapien
gctctcttccattgcattaggtcca

SEQ ID NO: 2114050 - DNA, 25 bp, Homo sapien
tctgtcttgcagatagctctcttcc

SEQ ID NO: 2114051 - DNA, 25 bp, Homo sapien
tctgggttggatgactgagcaatgc

SEQ ID NO: 2114052 - DNA, 25 bp, Homo sapien
tacgattgtccgtggtactggtctc

SEQ ID NO: 2114053 - DNA, 25 bp, Homo sapien
tactggtctccggactcatctgact

SEQ ID NO: 2114054 - DNA, 25 bp, Homo sapien
tgagcaatgctagagtactcagttg

SEQ ID NO: 2114055 - DNA, 25 bp, Homo sapien
tatcaaaggataccatgcaggcatg

SEQ ID NO: 2114056 - DNA, 25 bp, Homo sapien
tacactgcatgggtgcaaatcctgg

SEQ ID NO: 2114057 - DNA, 25 bp, Homo sapien
ttgtctgtaatagcctaagcctggg

SEQ ID NO: 2114058 - DNA, 25 bp, Homo sapien
tacagcaatggcatagcaagcacgc

SEQ ID NO: 2114059 - DNA, 25 bp, Homo sapien
tctcggaacttgctgtgtggcagtg

SEQ ID NO: 2114060 - DNA, 25 bp, Homo sapien
cagcagcagatatggcggctcaaca

SEQ ID NO: 2114061 - DNA, 25 bp, Homo sapien
gggtagcgacacgaaccttagctgc

SEQ ID NO: 2114062 - DNA, 25 bp, Homo sapien
gctgcattcgcaactgcggcggcag

SEQ ID NO: 2114063 - DNA, 25 bp, Homo sapien
tgcacctgagggtacgatcacagat

SEQ ID NO: 2114064 - DNA, 25 bp, Homo sapien
caggtttcatcgttgctgccggagc

SEQ ID NO: 2114065 - DNA, 25 bp, Homo sapien
gaaaatctttgaacgtctcgaggca

SEQ ID NO: 2114066 - DNA, 25 bp, Homo sapien
tcaaacgtgcgtccagaatggcaga

SEQ ID NO: 2114067 - DNA, 25 bp, Homo sapien
gaaaagtcaatcaatgggcagtaaa

SEQ ID NO: 2114068 - DNA, 25 bp, Homo sapien
gaacaagggtggtctaaatatccta

SEQ ID NO: 2114069 - DNA, 25 bp, Homo sapien
cttgagggtaaattcatcagtgaca

SEQ ID NO: 2114070 - DNA, 25 bp, Homo sapien
tattactgatattgtccaaggaagc

SEQ ID NO: 2114071 - DNA, 25 bp, Homo sapien
tttgagaaagtaataaagctaattg

SEQ ID NO: 2114072 - DNA, 25 bp, Homo sapien
cacttatgcattgtttgtaaattcc

SEQ ID NO: 2114073 - DNA, 25 bp, Homo sapien
taattgaatagcattacataatgac

SEQ ID NO: 2114074 - DNA, 25 bp, Homo sapien
gagctcctttattgactggacttgg

SEQ ID NO: 2114075 - DNA, 25 bp, Homo sapien
ggatggatgagacaattcctctcct

SEQ ID NO: 2114076 - DNA, 25 bp, Homo sapien
gttggattcataacggtcaggtact

SEQ ID NO: 2114077 - DNA, 25 bp, Homo sapien
ctagttggactttatggatggatga

SEQ ID NO: 2114078 - DNA, 25 bp, Homo sapien
tcctctcctactaaagaaagaatag

SEQ ID NO: 2114079 - DNA, 25 bp, Homo sapien
gtgaatgaaaagaagagctacccaa

SEQ ID NO: 2114080 - DNA, 25 bp, Homo sapien
gagtatctcggatgagcagagcatg

SEQ ID NO: 2114081 - DNA, 25 bp, Homo sapien
gaagagctacccaaacccataagga

SEQ ID NO: 2114082 - DNA, 25 bp, Homo sapien
cagggatgatggcactatggtgaat

SEQ ID NO: 2114083 - DNA, 25 bp, Homo sapien
atggaatgcgaggaagggaacatac

SEQ ID NO: 2114084 - DNA, 25 bp, Homo sapien
ctataaatggaatgcgaggaaggga

SEQ ID NO: 2114085 - DNA, 25 bp, Homo sapien
tataaatggaatgcgaggaagggaa

SEQ ID NO: 2114086 - DNA, 25 bp, Homo sapien
taaatggaatgcgaggaagggaaca

SEQ ID NO: 2114087 - DNA, 25 bp, Homo sapien
tttgtttggcggaagctttagcttc

SEQ ID NO: 2114088 - DNA, 25 bp, Homo sapien
ttggcggaagctttagcttctgcag

SEQ ID NO: 2114089 - DNA, 25 bp, Homo sapien
caacgatggcgtgaccggaagtgct

SEQ ID NO: 2114090 - DNA, 25 bp, Homo sapien
cttgacgaagaaggcagcaacgatg

SEQ ID NO: 2114091 - DNA, 25 bp, Homo sapien
caaagagtcgcaggttaacaggatg

SEQ ID NO: 2114092 - DNA, 25 bp, Homo sapien
gcggaggtgagaggtaggaggtagg

SEQ ID NO: 2114093 - DNA, 25 bp, Homo sapien
tactgttgcaaagtacgtaatttac

SEQ ID NO: 2114094 - DNA, 25 bp, Homo sapien
cgtaatttactggtctccgcgggag

SEQ ID NO: 2114095 - DNA, 25 bp, Homo sapien
taacacacaggaaggagtccactgc

SEQ ID NO: 2114096 - DNA, 25 bp, Homo sapien
ttggtgtcacaaaagctctgcctca

SEQ ID NO: 2114097 - DNA, 25 bp, Homo sapien
cgttagatcctgatagagcctggaa

SEQ ID NO: 2114098 - DNA, 25 bp, Homo sapien
gcttacgctgaagctgaaaccaggt

SEQ ID NO: 2114099 - DNA, 25 bp, Homo sapien
catagcaccgctgttgcaatgtcta

SEQ ID NO: 2114100 - DNA, 25 bp, Homo sapien
caccttggtctctcctctagcatag

SEQ ID NO: 2114101 - DNA, 25 bp, Homo sapien
tctctgagcccttaaggtaggttag

SEQ ID NO: 2114102 - DNA, 25 bp, Homo sapien
tgtctatgtctacctcactcagttg

SEQ ID NO: 2114103 - DNA, 25 bp, Homo sapien
tcgtctggacgcactacaatttatc

SEQ ID NO: 2114104 - DNA, 25 bp, Homo sapien
caaggaacgcaatcgctggatcata

SEQ ID NO: 2114105 - DNA, 25 bp, Homo sapien
catttatgtgcagagttttgtgtag

SEQ ID NO: 2114106 - DNA, 25 bp, Homo sapien
ttggcactaaactccatcgtctgga

SEQ ID NO: 2114107 - DNA, 25 bp, Homo sapien
ctccttcccaccagtagttaaatct

SEQ ID NO: 2114108 - DNA, 25 bp, Homo sapien
atctatttgagtttttaccaccttg

SEQ ID NO: 2114109 - DNA, 25 bp, Homo sapien
tctatttgagtttttaccaccttga

SEQ ID NO: 2114110 - DNA, 25 bp, Homo sapien
tccttcccaccagtagttaaatcta

SEQ ID NO: 2114111 - DNA, 25 bp, Homo sapien
ataatgaggctttctgcagagagca

SEQ ID NO: 2114112 - DNA, 25 bp, Homo sapien
agagcaggggtggctctcagacaca

SEQ ID NO: 2114113 - DNA, 25 bp, Homo sapien
agcaggggtggctctcagacacatc

SEQ ID NO: 2114114 - DNA, 25 bp, Homo sapien
agagagcaggggtggctctcagaca

SEQ ID NO: 2114115 - DNA, 25 bp, Homo sapien
cctgaaccctctccgggagtgtgct

SEQ ID NO: 2114116 - DNA, 25 bp, Homo sapien
aaccctctccgggagtgtgctgcca

SEQ ID NO: 2114117 - DNA, 25 bp, Homo sapien
acagcctgaaccctctccgggagtg

SEQ ID NO: 2114118 - DNA, 25 bp, Homo sapien
tgtcaccgaggccattaagccatct

SEQ ID NO: 2114119 - DNA, 25 bp, Homo sapien
ttgctggtcctacatggctttggcc

SEQ ID NO: 2114120 - DNA, 25 bp, Homo sapien
aaaacaagtcctgctgatcgcctac

SEQ ID NO: 2114121 - DNA, 25 bp, Homo sapien
cagattggtccagagtagcacttgt

SEQ ID NO: 2114122 - DNA, 25 bp, Homo sapien
gagcaacagtgtacagccaagtgac

SEQ ID NO: 2114123 - DNA, 25 bp, Homo sapien
taaaatcttgatggataggcaaatc

SEQ ID NO: 2114124 - DNA, 25 bp, Homo sapien
cacttttttggacctgtcagagaaa

SEQ ID NO: 2114125 - DNA, 25 bp, Homo sapien
accatgcaagcaacaagagtaaagt

SEQ ID NO: 2114126 - DNA, 25 bp, Homo sapien
gctggaggcaccaacaaccagaaaa

SEQ ID NO: 2114127 - DNA, 25 bp, Homo sapien
ggccttgagataagaccaccgtggt

SEQ ID NO: 2114128 - DNA, 25 bp, Homo sapien
cataccccatgttttgagtagataa

SEQ ID NO: 2114129 - DNA, 25 bp, Homo sapien
gaatcacacctcaccaatgacagtg

SEQ ID NO: 2114130 - DNA, 25 bp, Homo sapien
ttttctactataagagccacatacc

SEQ ID NO: 2114131 - DNA, 25 bp, Homo sapien
aggaatatcgcttctacccaggagg

SEQ ID NO: 2114132 - DNA, 25 bp, Homo sapien
ggaatatcgcttctacccaggaggc

SEQ ID NO: 2114133 - DNA, 25 bp, Homo sapien
cagggaacttacctccatgttgatt

SEQ ID NO: 2114134 - DNA, 25 bp, Homo sapien
cctgaagtgactttaccattttgcc

SEQ ID NO: 2114135 - DNA, 25 bp, Homo sapien
tctgagttgctaaaacatcaagagc

SEQ ID NO: 2114136 - DNA, 25 bp, Homo sapien
catctggtctaggatgtatgcagca

SEQ ID NO: 2114137 - DNA, 25 bp, Homo sapien
agctgaagtgattgctcccgcctca

SEQ ID NO: 2114138 - DNA, 25 bp, Homo sapien
cacgtgctcattgctaggatataga

SEQ ID NO: 2114139 - DNA, 25 bp, Homo sapien
tttttaatttccacgtgctcattgc

SEQ ID NO: 2114140 - DNA, 25 bp, Homo sapien
tggtaagttgaccttgtaccctgtg

SEQ ID NO: 2114141 - DNA, 25 bp, Homo sapien
gatatccagtcaggccagtacaggg

SEQ ID NO: 2114142 - DNA, 25 bp, Homo sapien
gataggaactgcacttaaactgtgt

SEQ ID NO: 2114143 - DNA, 25 bp, Homo sapien
tcaacaagccctagtacctcacaat

SEQ ID NO: 2114144 - DNA, 25 bp, Homo sapien
cgggtgtcagagctatggatatcca

SEQ ID NO: 2114145 - DNA, 25 bp, Homo sapien
ttgcgaggatagtacagtgaggttc

SEQ ID NO: 2114146 - DNA, 25 bp, Homo sapien
cctttatctgcttccccaatggtta

SEQ ID NO: 2114147 - DNA, 25 bp, Homo sapien
cagatacacagggaattgcgaggat

SEQ ID NO: 2114148 - DNA, 25 bp, Homo sapien
tctgtgtaactgcagtacaaaatca

SEQ ID NO: 2114149 - DNA, 25 bp, Homo sapien
taaactagtatctctcagcccaagg

SEQ ID NO: 2114150 - DNA, 25 bp, Homo sapien
ttacagattatctcccaagagctgg

SEQ ID NO: 2114151 - DNA, 25 bp, Homo sapien
ttcagtcagataggcatggagcacc

SEQ ID NO: 2114152 - DNA, 25 bp, Homo sapien
caggatacttccaagggcttacaga

SEQ ID NO: 2114153 - DNA, 25 bp, Homo sapien
tgcccttggcagctaagagaatgtg

SEQ ID NO: 2114154 - DNA, 25 bp, Homo sapien
gagaatgtgatctaggatttaccag

SEQ ID NO: 2114155 - DNA, 25 bp, Homo sapien
caaaggccagatattcacttcttca

SEQ ID NO: 2114156 - DNA, 25 bp, Homo sapien
gatttaccagtgtggcaagctcctg

SEQ ID NO: 2114157 - DNA, 25 bp, Homo sapien
cactgaagagccaaagtcagtcccg

SEQ ID NO: 2114158 - DNA, 25 bp, Homo sapien
caacaaaagcttcgtcctggagacc

SEQ ID NO: 2114159 - DNA, 25 bp, Homo sapien
gcgcatgcgcaaacactgaagagcc

SEQ ID NO: 2114160 - DNA, 25 bp, Homo sapien
tcccgcctgctttcccaacaaaagc

SEQ ID NO: 2114161 - DNA, 25 bp, Homo sapien
ggattgctgggctcggctctcagca

SEQ ID NO: 2114162 - DNA, 25 bp, Homo sapien
ctcccttcttcacgactcagaggat

SEQ ID NO: 2114163 - DNA, 25 bp, Homo sapien
cacgactcagaggatcgggattgct

SEQ ID NO: 2114164 - DNA, 25 bp, Homo sapien
atcgggattgctgggctcggctctc

SEQ ID NO: 2114165 - DNA, 25 bp, Homo sapien
cctgtccctctggcaagagcggagc

SEQ ID NO: 2114166 - DNA, 25 bp, Homo sapien
tccctctggcaagagcggagcctgg

SEQ ID NO: 2114167 - DNA, 25 bp, Homo sapien
ctcctgtccctctggcaagagcgga

SEQ ID NO: 2114168 - DNA, 25 bp, Homo sapien
tgtccctctggcaagagcggagcct

SEQ ID NO: 2114169 - DNA, 25 bp, Homo sapien
aagccgaggaggcccgcaccacagt

SEQ ID NO: 2114170 - DNA, 25 bp, Homo sapien
cgaggaggcccgcaccacagtccat

SEQ ID NO: 2114171 - DNA, 25 bp, Homo sapien
ctggaagccgaggaggcccgcacca

SEQ ID NO: 2114172 - DNA, 25 bp, Homo sapien
gaggaggcccgcaccacagtccatt

SEQ ID NO: 2114173 - DNA, 25 bp, Homo sapien
ggacggcaggcggatcgcggagttg

SEQ ID NO: 2114174 - DNA, 25 bp, Homo sapien
gacgctccaagaggcgtgcagtagc

SEQ ID NO: 2114175 - DNA, 25 bp, Homo sapien
ggcggatcgcggagttgagaataag

SEQ ID NO: 2114176 - DNA, 25 bp, Homo sapien
cgtgcagtagcagctcaggacggca

SEQ ID NO: 2114177 - DNA, 25 bp, Homo sapien
gcaaggcgctgtcttctacggaggc

SEQ ID NO: 2114178 - DNA, 25 bp, Homo sapien
ccttgggctgcgtgttgggcacatc

SEQ ID NO: 2114179 - DNA, 25 bp, Homo sapien
tcaaggtctgcataagcaaggcgct

SEQ ID NO: 2114180 - DNA, 25 bp, Homo sapien
taaaggctgacttaggcctagcggc

SEQ ID NO: 2114181 - DNA, 25 bp, Homo sapien
gaaattgtaggtggcatttgggccc

SEQ ID NO: 2114182 - DNA, 25 bp, Homo sapien
agagaaattgtaggtggcatttggg

SEQ ID NO: 2114183 - DNA, 25 bp, Homo sapien
ctgagagaaattgtaggtggcattt

SEQ ID NO: 2114184 - DNA, 25 bp, Homo sapien
aattgtaggtggcatttgggcccac

SEQ ID NO: 2114185 - DNA, 25 bp, Homo sapien
ccttgaaaggggtcttaggcctgct

SEQ ID NO: 2114186 - DNA, 25 bp, Homo sapien
cattctgggtctgggtatcagctgt

SEQ ID NO: 2114187 - DNA, 25 bp, Homo sapien
tttggcctgatttacattctgggtc

SEQ ID NO: 2114188 - DNA, 25 bp, Homo sapien
gggccttagtggtatcattccaagc

SEQ ID NO: 2114189 - DNA, 25 bp, Homo sapien
aggttcagagatacctgggtcggtc

SEQ ID NO: 2114190 - DNA, 25 bp, Homo sapien
ttgtccgggactccagattctgagc

SEQ ID NO: 2114191 - DNA, 25 bp, Homo sapien
tgtgcagttgcaccgtcaggttcag

SEQ ID NO: 2114192 - DNA, 25 bp, Homo sapien
tgggtcggtctctatgtcagcctgg

SEQ ID NO: 2114193 - DNA, 25 bp, Homo sapien
tccaccactggttctgcctgtacca

SEQ ID NO: 2114194 - DNA, 25 bp, Homo sapien
tgtccaccactggttctgcctgtac

SEQ ID NO: 2114195 - DNA, 25 bp, Homo sapien
gtccaccactggttctgcctgtacc

SEQ ID NO: 2114196 - DNA, 25 bp, Homo sapien
acagcctgacccactagccattggt

SEQ ID NO: 2114197 - DNA, 25 bp, Homo sapien
tgtgtcctcaccttatctattccag

SEQ ID NO: 2114198 - DNA, 25 bp, Homo sapien
tccaggaatgccctctaaaccctca

SEQ ID NO: 2114199 - DNA, 25 bp, Homo sapien
aaccctcacctgtagtgacagcctg

SEQ ID NO: 2114200 - DNA, 25 bp, Homo sapien
caagccaatggcgtctgccagagca

SEQ ID NO: 2114201 - DNA, 25 bp, Homo sapien
aactggtgcagacctccaggtccct

SEQ ID NO: 2114202 - DNA, 25 bp, Homo sapien
ctggaactggtgcagacctccaggt

SEQ ID NO: 2114203 - DNA, 25 bp, Homo sapien
tgatccccactgctgttctcttcaa

SEQ ID NO: 2114204 - DNA, 25 bp, Homo sapien
tcactgggttctgccaagcgactgg

SEQ ID NO: 2114205 - DNA, 25 bp, Homo sapien
aaatcactgggttctgccaagcgac

SEQ ID NO: 2114206 - DNA, 25 bp, Homo sapien
tgccaagcgactgggttctgccagg

SEQ ID NO: 2114207 - DNA, 25 bp, Homo sapien
tgggttctgccaagcgactgggttc

SEQ ID NO: 2114208 - DNA, 25 bp, Homo sapien
ccagacaatggggtttggccagatc

SEQ ID NO: 2114209 - DNA, 25 bp, Homo sapien
acaatggggtttggccagatcactg

SEQ ID NO: 2114210 - DNA, 25 bp, Homo sapien
gccagtggattcggccagacaacag

SEQ ID NO: 2114211 - DNA, 25 bp, Homo sapien
ccagtggattcggccagacaacagg

SEQ ID NO: 2114212 - DNA, 25 bp, Homo sapien
gttctgtgaggcacgcgagttggga

SEQ ID NO: 2114213 - DNA, 25 bp, Homo sapien
tccagtcaggtggtagtggccagtc

SEQ ID NO: 2114214 - DNA, 25 bp, Homo sapien
gaattggccaatcagcggggatcca

SEQ ID NO: 2114215 - DNA, 25 bp, Homo sapien
cgagttgggagaagggcgcaggtta

SEQ ID NO: 2114216 - DNA, 25 bp, Homo sapien
gccacatctcggggctgtgcagcac

SEQ ID NO: 2114217 - DNA, 25 bp, Homo sapien
ggccacatctcggggctgtgcagca

SEQ ID NO: 2114218 - DNA, 25 bp, Homo sapien
gggccacatctcggggctgtgcagc

SEQ ID NO: 2114219 - DNA, 25 bp, Homo sapien
tctttcctgaagaagggccacatct

SEQ ID NO: 2114220 - DNA, 25 bp, Homo sapien
gaattacagatgagaggatgacaaa

SEQ ID NO: 2114221 - DNA, 25 bp, Homo sapien
aattacagatgagaggatgacaaag

SEQ ID NO: 2114222 - DNA, 25 bp, Homo sapien
ctgagcgcttgatgggcacctttgt

SEQ ID NO: 2114223 - DNA, 25 bp, Homo sapien
tccttaagcatcaagtacttgacca

SEQ ID NO: 2114224 - DNA, 25 bp, Homo sapien
cttgatgggcacctttgtgtagtcc

SEQ ID NO: 2114225 - DNA, 25 bp, Homo sapien
gcatcaagtacttgaccaacttatt

SEQ ID NO: 2114226 - DNA, 25 bp, Homo sapien
gacagagcatggagtgaagggaagg

SEQ ID NO: 2114227 - DNA, 25 bp, Homo sapien
acagagcatggagtgaagggaaggg

SEQ ID NO: 2114228 - DNA, 25 bp, Homo sapien
cagagcatggagtgaagggaagggc

SEQ ID NO: 2114229 - DNA, 25 bp, Homo sapien
aaggggaagggtcatacaagcagaa

SEQ ID NO: 2114230 - DNA, 25 bp, Homo sapien
ctcaagggtggaaagagccaaccat

SEQ ID NO: 2114231 - DNA, 25 bp, Homo sapien
tacaagcagaagaatgccgacagag

SEQ ID NO: 2114232 - DNA, 25 bp, Homo sapien
ctgggggtagcacagtcaaggtcct

SEQ ID NO: 2114233 - DNA, 25 bp, Homo sapien
tattcacggatgatatctctcagca

SEQ ID NO: 2114234 - DNA, 25 bp, Homo sapien
tggataaacatcagtgtattcacgg

SEQ ID NO: 2114235 - DNA, 25 bp, Homo sapien
cttctctaggacaaagcatgcacgt

SEQ ID NO: 2114236 - DNA, 25 bp, Homo sapien
caaagcatgcacgttcaatgatttc

SEQ ID NO: 2114237 - DNA, 25 bp, Homo sapien
agaaaacagactatgaaattacaac

SEQ ID NO: 2114238 - DNA, 25 bp, Homo sapien
tacaacatctagcataagctaccca

SEQ ID NO: 2114239 - DNA, 25 bp, Homo sapien
attacaacatctagcataagctacc

SEQ ID NO: 2114240 - DNA, 25 bp, Homo sapien
aacagactatgaaattacaacatct

SEQ ID NO: 2114241 - DNA, 25 bp, Homo sapien
gggactcgggggtactgatgagaat

SEQ ID NO: 2114242 - DNA, 25 bp, Homo sapien
gactcgggggtactgatgagaatat

SEQ ID NO: 2114243 - DNA, 25 bp, Homo sapien
gccagggactcgggggtactgatga

SEQ ID NO: 2114244 - DNA, 25 bp, Homo sapien
gttcccagtatgccagccagggact

SEQ ID NO: 2114245 - DNA, 25 bp, Homo sapien
gaaccctggaccctgatctacgtga

SEQ ID NO: 2114246 - DNA, 25 bp, Homo sapien
actgagaaaggccatgttccacctt

SEQ ID NO: 2114247 - DNA, 25 bp, Homo sapien
ttttcagtagccatttgcatgagag

SEQ ID NO: 2114248 - DNA, 25 bp, Homo sapien
ttgcatgagagaccccaaccagctt

SEQ ID NO: 2114249 - DNA, 25 bp, Homo sapien
gaagatgacacccagaatcaccaag

SEQ ID NO: 2114250 - DNA, 25 bp, Homo sapien
caccaagaggagaccgagcttgggt

SEQ ID NO: 2114251 - DNA, 25 bp, Homo sapien
gaatcaccaagaggagaccgagctt

SEQ ID NO: 2114252 - DNA, 25 bp, Homo sapien
accgagcttgggtgtgtctttggtc

SEQ ID NO: 2114253 - DNA, 25 bp, Homo sapien
gggacggaaaataagcatggaaatc

SEQ ID NO: 2114254 - DNA, 25 bp, Homo sapien
gacggaaaataagcatggaaatcag

SEQ ID NO: 2114255 - DNA, 25 bp, Homo sapien
agggacggaaaataagcatggaaat

SEQ ID NO: 2114256 - DNA, 25 bp, Homo sapien
caagggacggaaaataagcatggaa

SEQ ID NO: 2114257 - DNA, 25 bp, Homo sapien
cccatcttgcgtagtgcctcccaga

SEQ ID NO: 2114258 - DNA, 25 bp, Homo sapien
gcagtcccatcttgcgtagtgcctc

SEQ ID NO: 2114259 - DNA, 25 bp, Homo sapien
gtcccatcttgcgtagtgcctccca

SEQ ID NO: 2114260 - DNA, 25 bp, Homo sapien
cgcagtcccatcttgcgtagtgcct

SEQ ID NO: 2114261 - DNA, 25 bp, Homo sapien
gaggctattaccatgcccaaagagc

SEQ ID NO: 2114262 - DNA, 25 bp, Homo sapien
ctttccagaacagaggtcagagatg

SEQ ID NO: 2114263 - DNA, 25 bp, Homo sapien
ggatggcacaaacaggcaagagatg

SEQ ID NO: 2114264 - DNA, 25 bp, Homo sapien
tccactgttgccaaaggatggcaca

SEQ ID NO: 2114265 - DNA, 25 bp, Homo sapien
gagaagtttccttagatctccaagg

SEQ ID NO: 2114266 - DNA, 25 bp, Homo sapien
agtttccttagatctccaaggaggg

SEQ ID NO: 2114267 - DNA, 25 bp, Homo sapien
cataggtgagaagtttccttagatc

SEQ ID NO: 2114268 - DNA, 25 bp, Homo sapien
tacaaactcataggtgagaagtttc

SEQ ID NO: 2114269 - DNA, 25 bp, Homo sapien
cagtctttgtgtctacctacccagg

SEQ ID NO: 2114270 - DNA, 25 bp, Homo sapien
tgggcttcacttgcaagacaactgc

SEQ ID NO: 2114271 - DNA, 25 bp, Homo sapien
cccaggcagaatggtagtccactaa

SEQ ID NO: 2114272 - DNA, 25 bp, Homo sapien
caggcgaggcttgtatagggtcaca

SEQ ID NO: 2114273 - DNA, 25 bp, Homo sapien
ctagtctcatggtaggaacggaggc

SEQ ID NO: 2114274 - DNA, 25 bp, Homo sapien
ttgctagtctcatggtaggaacgga

SEQ ID NO: 2114275 - DNA, 25 bp, Homo sapien
gtctcatggtaggaacggaggcccc

SEQ ID NO: 2114276 - DNA, 25 bp, Homo sapien
tccggggggttgctgttgggcactc

SEQ ID NO: 2114277 - DNA, 25 bp, Homo sapien
caatgctggaacagttcctccatta

SEQ ID NO: 2114278 - DNA, 25 bp, Homo sapien
aatgctggaacagttcctccattac

SEQ ID NO: 2114279 - DNA, 25 bp, Homo sapien
tcaatgctggaacagttcctccatt

SEQ ID NO: 2114280 - DNA, 25 bp, Homo sapien
gagagttaactagcttgatgtaatc

SEQ ID NO: 2114281 - DNA, 25 bp, Homo sapien
gatcaaccgtatagcatgacgacta

SEQ ID NO: 2114282 - DNA, 25 bp, Homo sapien
tgtcaagtatatgaggctatggaga

SEQ ID NO: 2114283 - DNA, 25 bp, Homo sapien
aagaatatgttctggagatcaaccg

SEQ ID NO: 2114284 - DNA, 25 bp, Homo sapien
tgtgcagtccagtcacgagggtctc

SEQ ID NO: 2114285 - DNA, 25 bp, Homo sapien
ttcccatgcgggttcttgcttcagc

SEQ ID NO: 2114286 - DNA, 25 bp, Homo sapien
tgtaccaccaggaccaataatggga

SEQ ID NO: 2114287 - DNA, 25 bp, Homo sapien
accggcaaaggtctgagggaatctg

SEQ ID NO: 2114288 - DNA, 25 bp, Homo sapien
accaaagttggcagcgaagttggca

SEQ ID NO: 2114289 - DNA, 25 bp, Homo sapien
tcactcaacccagaagaaaccaatg

SEQ ID NO: 2114290 - DNA, 25 bp, Homo sapien
tatacataccaaagagtgctgcccc

SEQ ID NO: 2114291 - DNA, 25 bp, Homo sapien
taactgcccaatccaaagtgatgta

SEQ ID NO: 2114292 - DNA, 25 bp, Homo sapien
catctccctacaatgagtttcctaa

SEQ ID NO: 2114293 - DNA, 25 bp, Homo sapien
taaatacaaccccatggaccctata

SEQ ID NO: 2114294 - DNA, 25 bp, Homo sapien
ctcacacaggggaaagactactgcg

SEQ ID NO: 2114295 - DNA, 25 bp, Homo sapien
gatgtggctctctagatagctgtgt

SEQ ID NO: 2114296 - DNA, 25 bp, Homo sapien
ggaaagactactgcgattgatagca

SEQ ID NO: 2114297 - DNA, 25 bp, Homo sapien
ctttcagtcaacaggatgtggctct

SEQ ID NO: 2114298 - DNA, 25 bp, Homo sapien
tacagtttcgcagtcaacgtcggca

SEQ ID NO: 2114299 - DNA, 25 bp, Homo sapien
gaagactcgctcgaagaacaggacg

SEQ ID NO: 2114300 - DNA, 25 bp, Homo sapien
gatgtgctggtagatctcgtccgcg

SEQ ID NO: 2114301 - DNA, 25 bp, Homo sapien
catagcttcccctcgctgatgtgct

SEQ ID NO: 2114302 - DNA, 25 bp, Homo sapien
gagtctgttctgtaggtaaagctgt

SEQ ID NO: 2114303 - DNA, 25 bp, Homo sapien
tgaacagtggtacatgaaaagtaac

SEQ ID NO: 2114304 - DNA, 25 bp, Homo sapien
acagctggcgagtggacctggtcct

SEQ ID NO: 2114305 - DNA, 25 bp, Homo sapien
aagtaacttgagcatcgtcttcaag

SEQ ID NO: 2114306 - DNA, 25 bp, Homo sapien
ctatgagaagtagaggcacagggac

SEQ ID NO: 2114307 - DNA, 25 bp, Homo sapien
gaggggggccataagccacatgtcc

SEQ ID NO: 2114308 - DNA, 25 bp, Homo sapien
tagaggcacagggacaacactggga

SEQ ID NO: 2114309 - DNA, 25 bp, Homo sapien
gaagtagaggcacagggacaacact

SEQ ID NO: 2114310 - DNA, 25 bp, Homo sapien
catctccattccaggcccatgtgaa

SEQ ID NO: 2114311 - DNA, 25 bp, Homo sapien
atctccattccaggcccatgtgaag

SEQ ID NO: 2114312 - DNA, 25 bp, Homo sapien
gcaagagtttaaattcagcatctcc

SEQ ID NO: 2114313 - DNA, 25 bp, Homo sapien
caggcaagagtttaaattcagcatc

SEQ ID NO: 2114314 - DNA, 25 bp, Homo sapien
cagaaagcctaaaagccccctcatt

SEQ ID NO: 2114315 - DNA, 25 bp, Homo sapien
ggaaaggagatagtcccctccatta

SEQ ID NO: 2114316 - DNA, 25 bp, Homo sapien
ttcttttttaatcaacaatgggatc

SEQ ID NO: 2114317 - DNA, 25 bp, Homo sapien
ctctccctggaaaggagatagtccc

SEQ ID NO: 2114318 - DNA, 25 bp, Homo sapien
caatgggatcttcccacatttccac

SEQ ID NO: 2114319 - DNA, 25 bp, Homo sapien
gtgcacataccgctccccatctccc

SEQ ID NO: 2114320 - DNA, 25 bp, Homo sapien
cccacgtgcacataccgctccccat

SEQ ID NO: 2114321 - DNA, 25 bp, Homo sapien
accctcgcacccacgtgcacatacc

SEQ ID NO: 2114322 - DNA, 25 bp, Homo sapien
tcgcacccacgtgcacataccgctc

SEQ ID NO: 2114323 - DNA, 25 bp, Homo sapien
tctgacggacaatgaggtgggcccc

SEQ ID NO: 2114324 - DNA, 25 bp, Homo sapien
accccgtcctcggtacagagtctga

SEQ ID NO: 2114325 - DNA, 25 bp, Homo sapien
tgggccccgcagtgatgttcgcagc

SEQ ID NO: 2114326 - DNA, 25 bp, Homo sapien
tgttcgcagccctccagtgggtaga

SEQ ID NO: 2114327 - DNA, 25 bp, Homo sapien
ccaaaaaggcccacagggacaggtg

SEQ ID NO: 2114328 - DNA, 25 bp, Homo sapien
aaggcccacagggacaggtgggatg

SEQ ID NO: 2114329 - DNA, 25 bp, Homo sapien
ctgccaaaaaggcccacagggacag

SEQ ID NO: 2114330 - DNA, 25 bp, Homo sapien
caaaaaggcccacagggacaggtgg

SEQ ID NO: 2114331 - DNA, 25 bp, Homo sapien
gggcttgtagcaaggaaacttcttc

SEQ ID NO: 2114332 - DNA, 25 bp, Homo sapien
tatacctggccacgcttgggcttgt

SEQ ID NO: 2114333 - DNA, 25 bp, Homo sapien
cacgcttgggcttgtagcaaggaaa

SEQ ID NO: 2114334 - DNA, 25 bp, Homo sapien
tgcacacccattgctatacctggcc

SEQ ID NO: 2114335 - DNA, 25 bp, Homo sapien
accgtgccaacaggagggccacgtg

SEQ ID NO: 2114336 - DNA, 25 bp, Homo sapien
caccatccggaccagaaatgctgcc

SEQ ID NO: 2114337 - DNA, 25 bp, Homo sapien
tggcgtcagcagtggcaccaatgga

SEQ ID NO: 2114338 - DNA, 25 bp, Homo sapien
cattctgaatagcaaccgtgccaac

SEQ ID NO: 2114339 - DNA, 25 bp, Homo sapien
ccagtctctctgtcaagccatccat

SEQ ID NO: 2114340 - DNA, 25 bp, Homo sapien
accagtctctctgtcaagccatcca

SEQ ID NO: 2114341 - DNA, 25 bp, Homo sapien
tattcaccagtctctctgtcaagcc

SEQ ID NO: 2114342 - DNA, 25 bp, Homo sapien
atgtattcaccagtctctctgtcaa

SEQ ID NO: 2114343 - DNA, 25 bp, Homo sapien
cagtctactacccttgcaatatgtg

SEQ ID NO: 2114344 - DNA, 25 bp, Homo sapien
caccaaaagcaatgcctaaagtggt

SEQ ID NO: 2114345 - DNA, 25 bp, Homo sapien
gcaatgcctaaagtggtacctttag

SEQ ID NO: 2114346 - DNA, 25 bp, Homo sapien
ctactacccttgcaatatgtgtttc

SEQ ID NO: 2114347 - DNA, 25 bp, Homo sapien
gtgtaggaccctctgagccaggtgt

SEQ ID NO: 2114348 - DNA, 25 bp, Homo sapien
tgtaggaccctctgagccaggtgtg

SEQ ID NO: 2114349 - DNA, 25 bp, Homo sapien
ggaatagagccttgttcttccccca

SEQ ID NO: 2114350 - DNA, 25 bp, Homo sapien
tgcagtggtatttcactagtgcccc

SEQ ID NO: 2114351 - DNA, 25 bp, Homo sapien
gcttgatgttccgttgccccagtca

SEQ ID NO: 2114352 - DNA, 25 bp, Homo sapien
ccagtgatattctgcaccctgctaa

SEQ ID NO: 2114353 - DNA, 25 bp, Homo sapien
aaagcgtctgagaagatatcccagt

SEQ ID NO: 2114354 - DNA, 25 bp, Homo sapien
gttagagagtggaaaagatcctgct

SEQ ID NO: 2114355 - DNA, 25 bp, Homo sapien
tgttgtctgcacactaggggtcagc

SEQ ID NO: 2114356 - DNA, 25 bp, Homo sapien
cacactaggggtcagctggtgataa

SEQ ID NO: 2114357 - DNA, 25 bp, Homo sapien
gctggtgataagttgcagttagaga

SEQ ID NO: 2114358 - DNA, 25 bp, Homo sapien
caggacccctgtgtatgaatggaag

SEQ ID NO: 2114359 - DNA, 25 bp, Homo sapien
tttactctccgctgaccagtatcca

SEQ ID NO: 2114360 - DNA, 25 bp, Homo sapien
gcagcttttactctccgctgaccag

SEQ ID NO: 2114361 - DNA, 25 bp, Homo sapien
ggtattgctaggacagcagctttta

SEQ ID NO: 2114362 - DNA, 25 bp, Homo sapien
tctcgggaactccaatggcgtccgt

SEQ ID NO: 2114363 - DNA, 25 bp, Homo sapien
cgggaactccaatggcgtccgtcct

SEQ ID NO: 2114364 - DNA, 25 bp, Homo sapien
ccccgcggctgggtagcctgcgcat

SEQ ID NO: 2114365 - DNA, 25 bp, Homo sapien
cttctcgggaactccaatggcgtcc

SEQ ID NO: 2114366 - DNA, 25 bp, Homo sapien
ggcgcagcgtgtcgggttccactcg

SEQ ID NO: 2114367 - DNA, 25 bp, Homo sapien
ttgggctttgttcagatccggaggc

SEQ ID NO: 2114368 - DNA, 25 bp, Homo sapien
tccggttctgagtgcttgggctttg

SEQ ID NO: 2114369 - DNA, 25 bp, Homo sapien
tctaatggggttccggttctgagtg

SEQ ID NO: 2114370 - DNA, 25 bp, Homo sapien
gctccggtttcagtagggctcagat

SEQ ID NO: 2114371 - DNA, 25 bp, Homo sapien
tcagactcgagcactagaggcggat

SEQ ID NO: 2114372 - DNA, 25 bp, Homo sapien
caatcggagcgctgcagatctcaaa

SEQ ID NO: 2114373 - DNA, 25 bp, Homo sapien
gatctcaaacgcgaggactgggcac

SEQ ID NO: 2114374 - DNA, 25 bp, Homo sapien
agtggcaagccgcaagctctgcgaa

SEQ ID NO: 2114375 - DNA, 25 bp, Homo sapien
ccgaagagtcccaaagggaatgcat

SEQ ID NO: 2114376 - DNA, 25 bp, Homo sapien
ggcgccgcactgaaagcggagttta

SEQ ID NO: 2114377 - DNA, 25 bp, Homo sapien
catcccagcggctagatttgacgag

SEQ ID NO: 2114378 - DNA, 25 bp, Homo sapien
ggcgggatccaatgggaggcgggat

SEQ ID NO: 2114379 - DNA, 25 bp, Homo sapien
gggcgggatccaatgggaggcggga

SEQ ID NO: 2114380 - DNA, 25 bp, Homo sapien
ctgcgggtcccagggagatgagagc

SEQ ID NO: 2114381 - DNA, 25 bp, Homo sapien
cgggtcccagggagatgagagctca

SEQ ID NO: 2114382 - DNA, 25 bp, Homo sapien
ggtcccagggagatgagagctcagc

SEQ ID NO: 2114383 - DNA, 25 bp, Homo sapien
gcgggtcccagggagatgagagctc

SEQ ID NO: 2114384 - DNA, 25 bp, Homo sapien
ataagatgcgaaggcctggacccaa

SEQ ID NO: 2114385 - DNA, 25 bp, Homo sapien
aacactgtagctttccgattgcacg

SEQ ID NO: 2114386 - DNA, 25 bp, Homo sapien
caaagctggtgagggtgccatagcc

SEQ ID NO: 2114387 - DNA, 25 bp, Homo sapien
gattgcacgctgaagcttccctcag

SEQ ID NO: 2114388 - DNA, 25 bp, Homo sapien
gcacgggcggccgtctcattggcaa

SEQ ID NO: 2114389 - DNA, 25 bp, Homo sapien
ttggcaagtgtttccggatccagct

SEQ ID NO: 2114390 - DNA, 25 bp, Homo sapien
ccagcacagggttttccagttccca

SEQ ID NO: 2114391 - DNA, 25 bp, Homo sapien
cacctgactgaaggcggtacgggca

SEQ ID NO: 2114392 - DNA, 25 bp, Homo sapien
gggtgggcccctgagcctcggcggc

SEQ ID NO: 2114393 - DNA, 25 bp, Homo sapien
ctgcggagaagcaaggggtggctca

SEQ ID NO: 2114394 - DNA, 25 bp, Homo sapien
tcgtgggctgggtatcctctcctga

SEQ ID NO: 2114395 - DNA, 25 bp, Homo sapien
agcctcggcggcgtaggtcgtgggc

SEQ ID NO: 2114396 - DNA, 25 bp, Homo sapien
tactggtgactaacatctgggaggt

SEQ ID NO: 2114397 - DNA, 25 bp, Homo sapien
aatcgaagacatcattctggcccag

SEQ ID NO: 2114398 - DNA, 25 bp, Homo sapien
cctgccggctgagtgaaatcgaaga

SEQ ID NO: 2114399 - DNA, 25 bp, Homo sapien
agagaaagcacaggcgctactaggg

SEQ ID NO: 2114400 - DNA, 25 bp, Homo sapien
gtcttgggccgggtggctgccacct

SEQ ID NO: 2114401 - DNA, 25 bp, Homo sapien
gccctctgtggcagcctcttgggct

SEQ ID NO: 2114402 - DNA, 25 bp, Homo sapien
caggtcccgtctggggcacaccaga

SEQ ID NO: 2114403 - DNA, 25 bp, Homo sapien
agcgccttccccgacttggtggtct

SEQ ID NO: 2114404 - DNA, 25 bp, Homo sapien
tgctgccacaacattctgaggctcc

SEQ ID NO: 2114405 - DNA, 25 bp, Homo sapien
gctcagggatgctcgtggccatctt

SEQ ID NO: 2114406 - DNA, 25 bp, Homo sapien
gcagctgctgccacaacattctgag

SEQ ID NO: 2114407 - DNA, 25 bp, Homo sapien
tccggctcagggatgctcgtggcca

SEQ ID NO: 2114408 - DNA, 25 bp, Homo sapien
tggtcctcttgcctcccatcctggc

SEQ ID NO: 2114409 - DNA, 25 bp, Homo sapien
cccagggctcagcactgtgctgagc

SEQ ID NO: 2114410 - DNA, 25 bp, Homo sapien
agggctcagcactgtgctgagcagt

SEQ ID NO: 2114411 - DNA, 25 bp, Homo sapien
cttggtcctcttgcctcccatcctg

SEQ ID NO: 2114412 - DNA, 25 bp, Homo sapien
aaacttgtgttggagaaacatggac

SEQ ID NO: 2114413 - DNA, 25 bp, Homo sapien
tcagcaaacttgtgttggagaaaca

SEQ ID NO: 2114414 - DNA, 25 bp, Homo sapien
cttgtgttggagaaacatggactag

SEQ ID NO: 2114415 - DNA, 25 bp, Homo sapien
tgttggagaaacatggactagctga

SEQ ID NO: 2114416 - DNA, 25 bp, Homo sapien
ggagagacccagggctaccaggctc

SEQ ID NO: 2114417 - DNA, 25 bp, Homo sapien
gggactacgtggagtgaaaacatgc

SEQ ID NO: 2114418 - DNA, 25 bp, Homo sapien
cacctcacccgtagcaggctcttgg

SEQ ID NO: 2114419 - DNA, 25 bp, Homo sapien
tgtgctgcgtgcttactaagtgcca

SEQ ID NO: 2114420 - DNA, 25 bp, Homo sapien
gaggggccaactgagcccgcaccgt

SEQ ID NO: 2114421 - DNA, 25 bp, Homo sapien
caactgagcccgcaccgtcaatgag

SEQ ID NO: 2114422 - DNA, 25 bp, Homo sapien
caccgtcaatgagggctgtgatgct

SEQ ID NO: 2114423 - DNA, 25 bp, Homo sapien
tcctcgctgctctcatactcatcat

SEQ ID NO: 2114424 - DNA, 25 bp, Homo sapien
cttgatggggatcttcttgtagtcc

SEQ ID NO: 2114425 - DNA, 25 bp, Homo sapien
tggggatcttcttgtagtccttaat

SEQ ID NO: 2114426 - DNA, 25 bp, Homo sapien
ggatcttcttgtagtccttaatcat

SEQ ID NO: 2114427 - DNA, 25 bp, Homo sapien
ctgcgcgcttgatggggatcttctt

SEQ ID NO: 2114428 - DNA, 25 bp, Homo sapien
catagagctgtagccccttggtcag

SEQ ID NO: 2114429 - DNA, 25 bp, Homo sapien
agcaggggtcatagagctgtagccc

SEQ ID NO: 2114430 - DNA, 25 bp, Homo sapien
aagagttggagaaagcacctgggct

SEQ ID NO: 2114431 - DNA, 25 bp, Homo sapien
gggaagagttggagaaagcacctgg

SEQ ID NO: 2114432 - DNA, 25 bp, Homo sapien
tctctgatgacatccttcagcatgt

SEQ ID NO: 2114433 - DNA, 25 bp, Homo sapien
tccagggtgtacgttgctcgttcaa

SEQ ID NO: 2114434 - DNA, 25 bp, Homo sapien
agggtgtacgttgctcgttcaatga

SEQ ID NO: 2114435 - DNA, 25 bp, Homo sapien
tttccagggtgtacgttgctcgttc

SEQ ID NO: 2114436 - DNA, 25 bp, Homo sapien
tgtgagatccaaaccccatgctggg

SEQ ID NO: 2114437 - DNA, 25 bp, Homo sapien
caggaagcacgagtcaaactgccag

SEQ ID NO: 2114438 - DNA, 25 bp, Homo sapien
aaggaatccaaactcgtgagcgagg

SEQ ID NO: 2114439 - DNA, 25 bp, Homo sapien
gattccgggttagaactgctcctca

SEQ ID NO: 2114440 - DNA, 25 bp, Homo sapien
gttcttccttgtcgatctccttcag

SEQ ID NO: 2114441 - DNA, 25 bp, Homo sapien
ctgaggagtcccgtgtgcagacaag

SEQ ID NO: 2114442 - DNA, 25 bp, Homo sapien
ttccaaggaggcgagctgaggagtc

SEQ ID NO: 2114443 - DNA, 25 bp, Homo sapien
gacaagaatatacaggtgttcttcc

SEQ ID NO: 2114444 - DNA, 25 bp, Homo sapien
aatcaccaagaggagactcagcctg

SEQ ID NO: 2114445 - DNA, 25 bp, Homo sapien
gaatcaccaagaggagactcagcct

SEQ ID NO: 2114446 - DNA, 25 bp, Homo sapien
agaatcaccaagaggagactcagcc

SEQ ID NO: 2114447 - DNA, 25 bp, Homo sapien
atcaccaagaggagactcagcctgg

SEQ ID NO: 2114448 - DNA, 25 bp, Homo sapien
cccatcttgcgtagtgcctcccaga

SEQ ID NO: 2114449 - DNA, 25 bp, Homo sapien
gcagtcccatcttgcgtagtgcctc

SEQ ID NO: 2114450 - DNA, 25 bp, Homo sapien
gtcccatcttgcgtagtgcctccca

SEQ ID NO: 2114451 - DNA, 25 bp, Homo sapien
cgcagtcccatcttgcgtagtgcct

SEQ ID NO: 2114452 - DNA, 25 bp, Homo sapien
ctttggccagaggatagcaccgagg

SEQ ID NO: 2114453 - DNA, 25 bp, Homo sapien
ctctttggccagaggatagcaccga

SEQ ID NO: 2114454 - DNA, 25 bp, Homo sapien
gaggagctggagaggccaatcatac

SEQ ID NO: 2114455 - DNA, 25 bp, Homo sapien
gggaggagctggagaggccaatcat

SEQ ID NO: 2114456 - DNA, 25 bp, Homo sapien
tgatggaatccctgactctgactgt

SEQ ID NO: 2114457 - DNA, 25 bp, Homo sapien
caccaggctattgcaatcccaggac

SEQ ID NO: 2114458 - DNA, 25 bp, Homo sapien
aaaggaatccatgagcagagacggt

SEQ ID NO: 2114459 - DNA, 25 bp, Homo sapien
catccgccctggtgagatcctttgc

SEQ ID NO: 2114460 - DNA, 25 bp, Homo sapien
atcgccgaggaatgggtgcctcacc

SEQ ID NO: 2114461 - DNA, 25 bp, Homo sapien
tcagatcgccgaggaatgggtgcct

SEQ ID NO: 2114462 - DNA, 25 bp, Homo sapien
cctcagatcgccgaggaatgggtgc

SEQ ID NO: 2114463 - DNA, 25 bp, Homo sapien
ttcctcagatcgccgaggaatgggt

SEQ ID NO: 2114464 - DNA, 25 bp, Homo sapien
cgcagttagctcaggtgatacttac

SEQ ID NO: 2114465 - DNA, 25 bp, Homo sapien
gtgatggcggccgttttcacacccc

SEQ ID NO: 2114466 - DNA, 25 bp, Homo sapien
tgctcgagtgagagccgcagttagc

SEQ ID NO: 2114467 - DNA, 25 bp, Homo sapien
gtgtcagtctacagggcaggtgctc

SEQ ID NO: 2114468 - DNA, 25 bp, Homo sapien
catgctcagaggcgtctcctctctg

SEQ ID NO: 2114469 - DNA, 25 bp, Homo sapien
tgggagccatgctcagaggcgtctc

SEQ ID NO: 2114470 - DNA, 25 bp, Homo sapien
ctgggagccatgctcagaggcgtct

SEQ ID NO: 2114471 - DNA, 25 bp, Homo sapien
gctcagaggcgtctcctctctgagc

SEQ ID NO: 2114472 - DNA, 25 bp, Homo sapien
aggagagttgggctgaggcccttac

SEQ ID NO: 2114473 - DNA, 25 bp, Homo sapien
aaatcaggagagttgggctgaggcc

SEQ ID NO: 2114474 - DNA, 25 bp, Homo sapien
ctgaaaatcaggagagttgggctga

SEQ ID NO: 2114475 - DNA, 25 bp, Homo sapien
atcaggagagttgggctgaggccct

SEQ ID NO: 2114476 - DNA, 25 bp, Homo sapien
cctgaccctttgttggtgtgcatgc

SEQ ID NO: 2114477 - DNA, 25 bp, Homo sapien
cgcctgtgcgttggcaagtcctcca

SEQ ID NO: 2114478 - DNA, 25 bp, Homo sapien
agtcagccaggagaagcgtgctcca

SEQ ID NO: 2114479 - DNA, 25 bp, Homo sapien
tcagccaggagaagcgtgctccagg

SEQ ID NO: 2114480 - DNA, 25 bp, Homo sapien
cccggcggagccctggagaggccca

SEQ ID NO: 2114481 - DNA, 25 bp, Homo sapien
ccggcggagccctggagaggcccac

SEQ ID NO: 2114482 - DNA, 25 bp, Homo sapien
aaacagaggagccattcttcaggcc

SEQ ID NO: 2114483 - DNA, 25 bp, Homo sapien
acagaggagccattcttcaggcccc

SEQ ID NO: 2114484 - DNA, 25 bp, Homo sapien
tgttgtaaacagaggagccattctt

SEQ ID NO: 2114485 - DNA, 25 bp, Homo sapien
tgtgttgtaaacagaggagccattc

SEQ ID NO: 2114486 - DNA, 25 bp, Homo sapien
gtttgtgcccctcatcacgatgacc

SEQ ID NO: 2114487 - DNA, 25 bp, Homo sapien
ccacaagtttgtgcccctcatcacg

SEQ ID NO: 2114488 - DNA, 25 bp, Homo sapien
aagtttgtgcccctcatcacgatga

SEQ ID NO: 2114489 - DNA, 25 bp, Homo sapien
caagtttgtgcccctcatcacgatg

SEQ ID NO: 2114490 - DNA, 25 bp, Homo sapien
ctgttgctgaacggatgggttccag

SEQ ID NO: 2114491 - DNA, 25 bp, Homo sapien
tcctcaacccgatgccgcagctcag

SEQ ID NO: 2114492 - DNA, 25 bp, Homo sapien
cctggaagaggactgtcctgcccct

SEQ ID NO: 2114493 - DNA, 25 bp, Homo sapien
tccccggaagccatgcggaggtgca

SEQ ID NO: 2114494 - DNA, 25 bp, Homo sapien
aggaaagtaaactttgctgctagcc

SEQ ID NO: 2114495 - DNA, 25 bp, Homo sapien
ggcatgagaggaaagtaaactttgc

SEQ ID NO: 2114496 - DNA, 25 bp, Homo sapien
aagtaaactttgctgctagccaagc

SEQ ID NO: 2114497 - DNA, 25 bp, Homo sapien
aaactttgctgctagccaagcagac

SEQ ID NO: 2114498 - DNA, 25 bp, Homo sapien
tgggttgctgttggggatcttcttg

SEQ ID NO: 2114499 - DNA, 25 bp, Homo sapien
gaattcatactcaggtgggttgctg

SEQ ID NO: 2114500 - DNA, 25 bp, Homo sapien
tcttgctggtctcatggcgggctcg

SEQ ID NO: 2114501 - DNA, 25 bp, Homo sapien
ttgctggtctcatggcgggctcgca

SEQ ID NO: 2114502 - DNA, 25 bp, Homo sapien
atgagccttccattcccgggggtct

SEQ ID NO: 2114503 - DNA, 25 bp, Homo sapien
aatgtactgatggtatctggcccag

SEQ ID NO: 2114504 - DNA, 25 bp, Homo sapien
ggcacggttgctattcagaatgtac

SEQ ID NO: 2114505 - DNA, 25 bp, Homo sapien
gcttcatccccgatattcatctggg

SEQ ID NO: 2114506 - DNA, 25 bp, Homo sapien
ggtcaggagctcgacttgtatgtca

SEQ ID NO: 2114507 - DNA, 25 bp, Homo sapien
ggtgctggggccatctaggacgctg

SEQ ID NO: 2114508 - DNA, 25 bp, Homo sapien
tgctgacgccagctctccacgtggc

SEQ ID NO: 2114509 - DNA, 25 bp, Homo sapien
gggccatctaggacgctggtgctgg

SEQ ID NO: 2114510 - DNA, 25 bp, Homo sapien
tggcagcatttctggtccggatggt

SEQ ID NO: 2114511 - DNA, 25 bp, Homo sapien
taagtgtccgtccatgctgttgccg

SEQ ID NO: 2114512 - DNA, 25 bp, Homo sapien
caaagtgacaacatccgtggacaca

SEQ ID NO: 2114513 - DNA, 25 bp, Homo sapien
atccgtggacacacgcgaaccaggg

SEQ ID NO: 2114514 - DNA, 25 bp, Homo sapien
cgtaacaaaataagtgtccgtccat

SEQ ID NO: 2114515 - DNA, 25 bp, Homo sapien
tgctgtgtcgagaaggaatctgaga

SEQ ID NO: 2114516 - DNA, 25 bp, Homo sapien
aatctgagaggaggcgctctggctt

SEQ ID NO: 2114517 - DNA, 25 bp, Homo sapien
acctccgactgacaggaagaagccg

SEQ ID NO: 2114518 - DNA, 25 bp, Homo sapien
ctctggcttggccagtaagatcgct

SEQ ID NO: 2114519 - DNA, 25 bp, Homo sapien
gctgtgtacgcgtgcaccgtgcgtt

SEQ ID NO: 2114520 - DNA, 25 bp, Homo sapien
ctggagggctgcgaacatcactgcg

SEQ ID NO: 2114521 - DNA, 25 bp, Homo sapien
aagggctgcgaagctccaaacaggc

SEQ ID NO: 2114522 - DNA, 25 bp, Homo sapien
gccgccgttccgtcacaggcaaggg

SEQ ID NO: 2114523 - DNA, 25 bp, Homo sapien
tcttcccaggtgctctcagcgctgc

SEQ ID NO: 2114524 - DNA, 25 bp, Homo sapien
tctcttcccaggtgctctcagcgct

SEQ ID NO: 2114525 - DNA, 25 bp, Homo sapien
ttcccaggtgctctcagcgctgccc

SEQ ID NO: 2114526 - DNA, 25 bp, Homo sapien
cctctcttcccaggtgctctcagcg

SEQ ID NO: 2114527 - DNA, 25 bp, Homo sapien
atagtccttgttctgccatccacca

SEQ ID NO: 2114528 - DNA, 25 bp, Homo sapien
gatagtccttgttctgccatccacc

SEQ ID NO: 2114529 - DNA, 25 bp, Homo sapien
tcggagggcagtacatcctaaagtg

SEQ ID NO: 2114530 - DNA, 25 bp, Homo sapien
tgtttagctttcagcctcggagggc

SEQ ID NO: 2114531 - DNA, 25 bp, Homo sapien
taatccgcagttccttaagtggtac

SEQ ID NO: 2114532 - DNA, 25 bp, Homo sapien
tactgggcgtaacgtgggctctatg

SEQ ID NO: 2114533 - DNA, 25 bp, Homo sapien
gccattagcccctgttgccatggga

SEQ ID NO: 2114534 - DNA, 25 bp, Homo sapien
ggccattagcccctgttgccatggg

SEQ ID NO: 2114535 - DNA, 25 bp, Homo sapien
ccattagcccctgttgccatgggaa

SEQ ID NO: 2114536 - DNA, 25 bp, Homo sapien
ctgagtgtctgatgcattcattggg

SEQ ID NO: 2114537 - DNA, 25 bp, Homo sapien
caaatttatagtgtgggacgtctca

SEQ ID NO: 2114538 - DNA, 25 bp, Homo sapien
gagcagagcagtcaagcgaagcgtt

SEQ ID NO: 2114539 - DNA, 25 bp, Homo sapien
cacattgcagtgaagacgagtttac

SEQ ID NO: 2114540 - DNA, 25 bp, Homo sapien
aaattctggattcatgtcaggcccg

SEQ ID NO: 2114541 - DNA, 25 bp, Homo sapien
agccaggtgtgggatatagtctcat

SEQ ID NO: 2114542 - DNA, 25 bp, Homo sapien
ggtgtgggatatagtctcatggtgc

SEQ ID NO: 2114543 - DNA, 25 bp, Homo sapien
caggtgtgggatatagtctcatggt

SEQ ID NO: 2114544 - DNA, 25 bp, Homo sapien
ttttaagccggtctgaaaagcgcaa

SEQ ID NO: 2114545 - DNA, 25 bp, Homo sapien
gcctgcaggtggcaatattgctcca

SEQ ID NO: 2114546 - DNA, 25 bp, Homo sapien
gatgaattttcttccgcggttggtg

SEQ ID NO: 2114547 - DNA, 25 bp, Homo sapien
ggtggcgcttcattcttgtggcctg

SEQ ID NO: 2114548 - DNA, 25 bp, Homo sapien
tctttgccgagaagcagtagaaagg

SEQ ID NO: 2114549 - DNA, 25 bp, Homo sapien
aaggaagccagtctgggtccaaagc

SEQ ID NO: 2114550 - DNA, 25 bp, Homo sapien
ctgggtccaaagctgaagatcttgg

SEQ ID NO: 2114551 - DNA, 25 bp, Homo sapien
cagtctgggtccaaagctgaagatc

SEQ ID NO: 2114552 - DNA, 25 bp, Homo sapien
gtctgggtccaaagctgaagatctt

SEQ ID NO: 2114553 - DNA, 25 bp, Homo sapien
ccatgccttctactcccccatgact

SEQ ID NO: 2114554 - DNA, 25 bp, Homo sapien
tgtaagataaggcccttagaagaga

SEQ ID NO: 2114555 - DNA, 25 bp, Homo sapien
tctactcccccatgactggaacaga

SEQ ID NO: 2114556 - DNA, 25 bp, Homo sapien
gtaagataaggcccttagaagagag

SEQ ID NO: 2114557 - DNA, 25 bp, Homo sapien
ttggttacgttcagtgaagaggttg

SEQ ID NO: 2114558 - DNA, 25 bp, Homo sapien
tcatgatctgtcacgtgcctacatt

SEQ ID NO: 2114559 - DNA, 25 bp, Homo sapien
gatattatatgttccatgcttttca

SEQ ID NO: 2114560 - DNA, 25 bp, Homo sapien
gaagaggttgtcgttgatattatat

SEQ ID NO: 2114561 - DNA, 25 bp, Homo sapien
taaatctcctgactggtaactgatt

SEQ ID NO: 2114562 - DNA, 25 bp, Homo sapien
gactggtaactgatttccctgaata

SEQ ID NO: 2114563 - DNA, 25 bp, Homo sapien
tccagggggcgccacaacagcaaga

SEQ ID NO: 2114564 - DNA, 25 bp, Homo sapien
ccatagcggcatcgtagaataaata

SEQ ID NO: 2114565 - DNA, 25 bp, Homo sapien
cttttctgagctgatccacctcccc

SEQ ID NO: 2114566 - DNA, 25 bp, Homo sapien
gatccacctcccctctatggcccac

SEQ ID NO: 2114567 - DNA, 25 bp, Homo sapien
gctgatccacctcccctctatggcc

SEQ ID NO: 2114568 - DNA, 25 bp, Homo sapien
tgagctgatccacctcccctctatg

SEQ ID NO: 2114569 - DNA, 25 bp, Homo sapien
aacgacaaggctggcggcagaatag

SEQ ID NO: 2114570 - DNA, 25 bp, Homo sapien
ctgtcccacaacgacaaggctggcg

SEQ ID NO: 2114571 - DNA, 25 bp, Homo sapien
aaggctggcggcagaatagccacct

SEQ ID NO: 2114572 - DNA, 25 bp, Homo sapien
acaacgacaaggctggcggcagaat

SEQ ID NO: 2114573 - DNA, 25 bp, Homo sapien
aacttgctcaagttgtgaagatcca

SEQ ID NO: 2114574 - DNA, 25 bp, Homo sapien
caacggctgacaaggtcttggttga

SEQ ID NO: 2114575 - DNA, 25 bp, Homo sapien
ctacttgaggaaaaccttgggtgat

SEQ ID NO: 2114576 - DNA, 25 bp, Homo sapien
ccttgggtgataagacaacttgctc

SEQ ID NO: 2114577 - DNA, 25 bp, Homo sapien
taattggtgtactcaattttaaggc

SEQ ID NO: 2114578 - DNA, 25 bp, Homo sapien
gaaatcacgccatttgacaaaacaa

SEQ ID NO: 2114579 - DNA, 25 bp, Homo sapien
ttccattggaaatcacgccatttga

SEQ ID NO: 2114580 - DNA, 25 bp, Homo sapien
aatctcgcctcaccttgaaagcctg

SEQ ID NO: 2114581 - DNA, 25 bp, Homo sapien
cagtaccatatccatgtttacctcc

SEQ ID NO: 2114582 - DNA, 25 bp, Homo sapien
tcaagcaggctctatatttgacaca

SEQ ID NO: 2114583 - DNA, 25 bp, Homo sapien
gagacagttcctcaagattggcttc

SEQ ID NO: 2114584 - DNA, 25 bp, Homo sapien
cacaaactccccctttatatcagta

SEQ ID NO: 2114585 - DNA, 25 bp, Homo sapien
cctgcagttgcctgaccaagcgcat

SEQ ID NO: 2114586 - DNA, 25 bp, Homo sapien
gcatctcattggactctaaattcag

SEQ ID NO: 2114587 - DNA, 25 bp, Homo sapien
ttgcctgaccaagcgcatctcattg

SEQ ID NO: 2114588 - DNA, 25 bp, Homo sapien
gtgaggacacttggcagcattttcc

SEQ ID NO: 2114589 - DNA, 25 bp, Homo sapien
tggaagtaagaattcggacaggaac

SEQ ID NO: 2114590 - DNA, 25 bp, Homo sapien
gacaggaaccttagggagaaatgga

SEQ ID NO: 2114591 - DNA, 25 bp, Homo sapien
tgtcctcctcgtgcaaagggcagag

SEQ ID NO: 2114592 - DNA, 25 bp, Homo sapien
gaaatggaaattgtcctcctcgtgc

SEQ ID NO: 2114593 - DNA, 25 bp, Homo sapien
tgaagctcttattggatcttcaggg

SEQ ID NO: 2114594 - DNA, 25 bp, Homo sapien
cttgaagctcttattggatcttcag

SEQ ID NO: 2114595 - DNA, 25 bp, Homo sapien
ttgaagctcttattggatcttcagg

SEQ ID NO: 2114596 - DNA, 25 bp, Homo sapien
ctttggttggaatcagagatgaatc

SEQ ID NO: 2114597 - DNA, 25 bp, Homo sapien
tctttggttggaatcagagatgaat

SEQ ID NO: 2114598 - DNA, 25 bp, Homo sapien
agaattcaaagttggagtgactctc

SEQ ID NO: 2114599 - DNA, 25 bp, Homo sapien
tttggttggaatcagagatgaatca

SEQ ID NO: 2114600 - DNA, 25 bp, Homo sapien
ccatggttgaagttaattgggccca

SEQ ID NO: 2114601 - DNA, 25 bp, Homo sapien
cgtagttgctacaaggaccatggtt

SEQ ID NO: 2114602 - DNA, 25 bp, Homo sapien
ccttcagcccagtaaggtgccatgg

SEQ ID NO: 2114603 - DNA, 25 bp, Homo sapien
tcatcttcatactgcagttggagca

SEQ ID NO: 2114604 - DNA, 25 bp, Homo sapien
ggagcctaggctcttttgcctttct

SEQ ID NO: 2114605 - DNA, 25 bp, Homo sapien
cattttaggagcctaggctcttttg

SEQ ID NO: 2114606 - DNA, 25 bp, Homo sapien
ctcatgatggctcttctctctttac

SEQ ID NO: 2114607 - DNA, 25 bp, Homo sapien
cttctggctctcatgatggctcttc

SEQ ID NO: 2114608 - DNA, 25 bp, Homo sapien
cctggctttccccgaggtggcctca

SEQ ID NO: 2114609 - DNA, 25 bp, Homo sapien
ggctttccccgaggtggcctcatcc

SEQ ID NO: 2114610 - DNA, 25 bp, Homo sapien
ctttccccgaggtggcctcatccat

SEQ ID NO: 2114611 - DNA, 25 bp, Homo sapien
ctggctttccccgaggtggcctcat

SEQ ID NO: 2114612 - DNA, 25 bp, Homo sapien
taccttatactcattgaatatcaca

SEQ ID NO: 2114613 - DNA, 25 bp, Homo sapien
ctaccttatactcattgaatatcac

SEQ ID NO: 2114614 - DNA, 25 bp, Homo sapien
accttatactcattgaatatcacat

SEQ ID NO: 2114615 - DNA, 25 bp, Homo sapien
tggcatgtgtcttagtgggcactga

SEQ ID NO: 2114616 - DNA, 25 bp, Homo sapien
tgggttctctggtttaactattaca

SEQ ID NO: 2114617 - DNA, 25 bp, Homo sapien
ctatcatgactatggagccagtccc

SEQ ID NO: 2114618 - DNA, 25 bp, Homo sapien
tgtgaaagcaacatcaatgacattg

SEQ ID NO: 2114619 - DNA, 25 bp, Homo sapien
cattgattcttctactaatgggttc

SEQ ID NO: 2114620 - DNA, 25 bp, Homo sapien
gctgatgagttgtggggctttactt

SEQ ID NO: 2114621 - DNA, 25 bp, Homo sapien
aggctgatgagttgtggggctttac

SEQ ID NO: 2114622 - DNA, 25 bp, Homo sapien
ttgtggactcatgagttggtgagaa

SEQ ID NO: 2114623 - DNA, 25 bp, Homo sapien
tgagttgtggggctttacttcccac

SEQ ID NO: 2114624 - DNA, 25 bp, Homo sapien
tgcagtcctccctcccctccctggt

SEQ ID NO: 2114625 - DNA, 25 bp, Homo sapien
gtcatgcagtcctccctcccctccc

SEQ ID NO: 2114626 - DNA, 25 bp, Homo sapien
cccgcgtcatgcagtcctccctccc

SEQ ID NO: 2114627 - DNA, 25 bp, Homo sapien
atgcagtcctccctcccctccctgg

SEQ ID NO: 2114628 - DNA, 25 bp, Homo sapien
agctccccagcggtcaccacgtggg

SEQ ID NO: 2114629 - DNA, 25 bp, Homo sapien
cctgcgttgtgtgctgcagtgcccc

SEQ ID NO: 2114630 - DNA, 25 bp, Homo sapien
actgaagtcggtgcctgcgttgtgt

SEQ ID NO: 2114631 - DNA, 25 bp, Homo sapien
ggtgtccaaggaacatgcacactga

SEQ ID NO: 2114632 - DNA, 25 bp, Homo sapien
tggcctgcggacctataggctgcgt

SEQ ID NO: 2114633 - DNA, 25 bp, Homo sapien
gagaaagagtccagacggctggaac

SEQ ID NO: 2114634 - DNA, 25 bp, Homo sapien
taggctgcgtctcagtaggagagaa

SEQ ID NO: 2114635 - DNA, 25 bp, Homo sapien
agacggctggaacgtgcccctcaca

SEQ ID NO: 2114636 - DNA, 25 bp, Homo sapien
cagctcaggaggctgtaaacttctt

SEQ ID NO: 2114637 - DNA, 25 bp, Homo sapien
gctcaggaggctgtaaacttcttct

SEQ ID NO: 2114638 - DNA, 25 bp, Homo sapien
tcaggaggctgtaaacttcttcttg

SEQ ID NO: 2114639 - DNA, 25 bp, Homo sapien
aggaggctgtaaacttcttcttggc

SEQ ID NO: 2114640 - DNA, 25 bp, Homo sapien
aggtgtaggattccgacttttagtg

SEQ ID NO: 2114641 - DNA, 25 bp, Homo sapien
tctttaggctcttcatcagtgggtt

SEQ ID NO: 2114642 - DNA, 25 bp, Homo sapien
tcttctgatcaggtgtaggattccg

SEQ ID NO: 2114643 - DNA, 25 bp, Homo sapien
ctttaggctcttcatcagtgggttc

SEQ ID NO: 2114644 - DNA, 25 bp, Homo sapien
tctgacatagctcctggagatcggc

SEQ ID NO: 2114645 - DNA, 25 bp, Homo sapien
cattttaaagtgctctgcttttggt

SEQ ID NO: 2114646 - DNA, 25 bp, Homo sapien
ccttcacatccatccccagtctttg

SEQ ID NO: 2114647 - DNA, 25 bp, Homo sapien
tccccttgacatcagtaccaccttc

SEQ ID NO: 2114648 - DNA, 25 bp, Homo sapien
gctgttggttatactcagaagtaag

SEQ ID NO: 2114649 - DNA, 25 bp, Homo sapien
gagctgctactagaatctccttcag

SEQ ID NO: 2114650 - DNA, 25 bp, Homo sapien
tcacaaattgtcatagagctgctac

SEQ ID NO: 2114651 - DNA, 25 bp, Homo sapien
tcagcatatttcacacagtctggta

SEQ ID NO: 2114652 - DNA, 25 bp, Homo sapien
tatatatcatgaacagtatggcacg

SEQ ID NO: 2114653 - DNA, 25 bp, Homo sapien
tcaagggacaactagcaaatttcac

SEQ ID NO: 2114654 - DNA, 25 bp, Homo sapien
cacattagaagctgcatatgcgtgg

SEQ ID NO: 2114655 - DNA, 25 bp, Homo sapien
ggtatggtaaacatctgtccccagt

SEQ ID NO: 2114656 - DNA, 25 bp, Homo sapien
ggtggaacattactagcagaactgt

SEQ ID NO: 2114657 - DNA, 25 bp, Homo sapien
tggactaagaccataaacccaagag

SEQ ID NO: 2114658 - DNA, 25 bp, Homo sapien
gacagtccgaggtcagaacacatta

SEQ ID NO: 2114659 - DNA, 25 bp, Homo sapien
tagacctctgtggagactttggaga

SEQ ID NO: 2114660 - DNA, 25 bp, Homo sapien
acagtttgtgttgtttcagcttatc

SEQ ID NO: 2114661 - DNA, 25 bp, Homo sapien
ttgtgttgtttcagcttatcttcct

SEQ ID NO: 2114662 - DNA, 25 bp, Homo sapien
aaaaacagtttgtgttgtttcagct

SEQ ID NO: 2114663 - DNA, 25 bp, Homo sapien
agtttgtgttgtttcagcttatctt

SEQ ID NO: 2114664 - DNA, 25 bp, Homo sapien
tgtatgccagtaagcacagtcaatg

SEQ ID NO: 2114665 - DNA, 25 bp, Homo sapien
agggagtttccatggcctctacggg

SEQ ID NO: 2114666 - DNA, 25 bp, Homo sapien
tagggactgccagacattggtcaac

SEQ ID NO: 2114667 - DNA, 25 bp, Homo sapien
gagacagtgtaggtaggacccgtca

SEQ ID NO: 2114668 - DNA, 25 bp, Homo sapien
cctccaaggtatccactaaggactc

SEQ ID NO: 2114669 - DNA, 25 bp, Homo sapien
ctccaaggtatccactaaggactct

SEQ ID NO: 2114670 - DNA, 25 bp, Homo sapien
atccatcctttttgggcagttagtt

SEQ ID NO: 2114671 - DNA, 25 bp, Homo sapien
tccatcctttttgggcagttagttc

SEQ ID NO: 2114672 - DNA, 25 bp, Homo sapien
ctgccttgtaggctgtggtaccctg

SEQ ID NO: 2114673 - DNA, 25 bp, Homo sapien
gccttgtaggctgtggtaccctgcc

SEQ ID NO: 2114674 - DNA, 25 bp, Homo sapien
gagatgggtgcctgccttgtaggct

SEQ ID NO: 2114675 - DNA, 25 bp, Homo sapien
tgtaggctgtggtaccctgcctcac

SEQ ID NO: 2114676 - DNA, 25 bp, Homo sapien
caccatgtggtcgaaggggccgact

SEQ ID NO: 2114677 - DNA, 25 bp, Homo sapien
tcgaaggggccgactggaccatgcc

SEQ ID NO: 2114678 - DNA, 25 bp, Homo sapien
ccacggcattcaccatgtggtcgaa

SEQ ID NO: 2114679 - DNA, 25 bp, Homo sapien
cggcattcaccatgtggtcgaaggg

SEQ ID NO: 2114680 - DNA, 25 bp, Homo sapien
cagggactaggctgcctgaagctca

SEQ ID NO: 2114681 - DNA, 25 bp, Homo sapien
tactcatgacgtcgaaggctttcac

SEQ ID NO: 2114682 - DNA, 25 bp, Homo sapien
cttactcatgacgtcgaaggctttc

SEQ ID NO: 2114683 - DNA, 25 bp, Homo sapien
ctgtggtccaccttactcatgacgt

SEQ ID NO: 2114684 - DNA, 25 bp, Homo sapien
cactctgtggtccaccttactcatg

SEQ ID NO: 2114685 - DNA, 25 bp, Homo sapien
ctcctgaccatgtgtaggatcttga

SEQ ID NO: 2114686 - DNA, 25 bp, Homo sapien
tcctgaccatgtgtaggatcttgac

SEQ ID NO: 2114687 - DNA, 25 bp, Homo sapien
cctgaccatgtgtaggatcttgact

SEQ ID NO: 2114688 - DNA, 25 bp, Homo sapien
cctggacatcggactatctccccat

SEQ ID NO: 2114689 - DNA, 25 bp, Homo sapien
ccctggacatcggactatctcccca

SEQ ID NO: 2114690 - DNA, 25 bp, Homo sapien
gagcccataccctttgggtatctaa

SEQ ID NO: 2114691 - DNA, 25 bp, Homo sapien
gataggagcccataccctttgggta

SEQ ID NO: 2114692 - DNA, 25 bp, Homo sapien
ctgataggagcccataccctttggg

SEQ ID NO: 2114693 - DNA, 25 bp, Homo sapien
taggagcccataccctttgggtatc

SEQ ID NO: 2114694 - DNA, 25 bp, Homo sapien
gaagagaagacattggccctaagtc

SEQ ID NO: 2114695 - DNA, 25 bp, Homo sapien
tgcaggtaggtgtctgctagtgaag

SEQ ID NO: 2114696 - DNA, 25 bp, Homo sapien
taggtgtctgctagtgaagagaaga

SEQ ID NO: 2114697 - DNA, 25 bp, Homo sapien
cctaagtcctggcattgctccagat

SEQ ID NO: 2114698 - DNA, 25 bp, Homo sapien
aacaaatatttgccttttaaagatg

SEQ ID NO: 2114699 - DNA, 25 bp, Homo sapien
aaatatttgccttttaaagatgtct

SEQ ID NO: 2114700 - DNA, 25 bp, Homo sapien
tctagaaacaaatatttgcctttta

SEQ ID NO: 2114701 - DNA, 25 bp, Homo sapien
tatttgccttttaaagatgtcttac

SEQ ID NO: 2114702 - DNA, 25 bp, Homo sapien
cttgtgggacactcagaatgaagga

SEQ ID NO: 2114703 - DNA, 25 bp, Homo sapien
atagcattgccatgggccttgtggg

SEQ ID NO: 2114704 - DNA, 25 bp, Homo sapien
tgaaagcacctggaaccctcaacag

SEQ ID NO: 2114705 - DNA, 25 bp, Homo sapien
gaagacacattccagaccccttggt

SEQ ID NO: 2114706 - DNA, 25 bp, Homo sapien
ttttctcctaacagtcagtgacgca

SEQ ID NO: 2114707 - DNA, 25 bp, Homo sapien
cccgtttttctcctaacagtcagtg

SEQ ID NO: 2114708 - DNA, 25 bp, Homo sapien
taacagtcagtgacgcagctatggc

SEQ ID NO: 2114709 - DNA, 25 bp, Homo sapien
tcagtgacgcagctatggccttgct

SEQ ID NO: 2114710 - DNA, 25 bp, Homo sapien
tcactgactacgactaagtcggtag

SEQ ID NO: 2114711 - DNA, 25 bp, Homo sapien
ggtagatcctcagatcaatcctccc

SEQ ID NO: 2114712 - DNA, 25 bp, Homo sapien
acgactaagtcggtagatcctcaga

SEQ ID NO: 2114713 - DNA, 25 bp, Homo sapien
ctcagatcaatcctcccagaagttg

SEQ ID NO: 2114714 - DNA, 25 bp, Homo sapien
cccatataggcctccttctcccaat

SEQ ID NO: 2114715 - DNA, 25 bp, Homo sapien
tgttactggtcatggcataagccat

SEQ ID NO: 2114716 - DNA, 25 bp, Homo sapien
gagatcctttcctcatgttttcttt

SEQ ID NO: 2114717 - DNA, 25 bp, Homo sapien
ttgagatcctttcctcatgttttct

SEQ ID NO: 2114718 - DNA, 25 bp, Homo sapien
tcctcctgttactggtcatggcata

SEQ ID NO: 2114719 - DNA, 25 bp, Homo sapien
tcacagtgatgagccacatggatgt

SEQ ID NO: 2114720 - DNA, 25 bp, Homo sapien
ttgtgaacacactggctatgcccct

SEQ ID NO: 2114721 - DNA, 25 bp, Homo sapien
tgtgaacacactggctatgcccctt

SEQ ID NO: 2114722 - DNA, 25 bp, Homo sapien
gctgctgcaggtgtatctccctcac

SEQ ID NO: 2114723 - DNA, 25 bp, Homo sapien
ttccaggataagcttcccggcacac

SEQ ID NO: 2114724 - DNA, 25 bp, Homo sapien
tttccaggataagcttcccggcaca

SEQ ID NO: 2114725 - DNA, 25 bp, Homo sapien
aactgcagaagttgtctcccttctc

SEQ ID NO: 2114726 - DNA, 25 bp, Homo sapien
ccttcactaacaggcacctgctcct

SEQ ID NO: 2114727 - DNA, 25 bp, Homo sapien
cccttcactaacaggcacctgctcc

SEQ ID NO: 2114728 - DNA, 25 bp, Homo sapien
gagtatctccaattcagtgtagtac

SEQ ID NO: 2114729 - DNA, 25 bp, Homo sapien
tagtactgtgggagtagcgacacag

SEQ ID NO: 2114730 - DNA, 25 bp, Homo sapien
tgttccgtctgcaagtaatcaacca

SEQ ID NO: 2114731 - DNA, 25 bp, Homo sapien
gcgacacagtgttgacacaatgccg

SEQ ID NO: 2114732 - DNA, 25 bp, Homo sapien
cacctgaagatcttgggtttgtaca

SEQ ID NO: 2114733 - DNA, 25 bp, Homo sapien
taccataacggcagcatgtcttcac

SEQ ID NO: 2114734 - DNA, 25 bp, Homo sapien
agatggagacttgaaaggattggcc

SEQ ID NO: 2114735 - DNA, 25 bp, Homo sapien
cagtgccctgagtgtgtcattacca

SEQ ID NO: 2114736 - DNA, 25 bp, Homo sapien
ggtccggagttacagtccacaggaa

SEQ ID NO: 2114737 - DNA, 25 bp, Homo sapien
tcattcagcaggtccggagttacag

SEQ ID NO: 2114738 - DNA, 25 bp, Homo sapien
tcagcaggtccggagttacagtcca

SEQ ID NO: 2114739 - DNA, 25 bp, Homo sapien
ggagttacagtccacaggaatggca

SEQ ID NO: 2114740 - DNA, 25 bp, Homo sapien
tgtggtcgggccaaatgaggtattt

SEQ ID NO: 2114741 - DNA, 25 bp, Homo sapien
taactgggcgcctgacatggcatgg

SEQ ID NO: 2114742 - DNA, 25 bp, Homo sapien
cttgaaaaccatcaggagtgaccac

SEQ ID NO: 2114743 - DNA, 25 bp, Homo sapien
tgagaaaaccatggacagaagaagg

SEQ ID NO: 2114744 - DNA, 25 bp, Homo sapien
tacattcactgaggacagcttgccc

SEQ ID NO: 2114745 - DNA, 25 bp, Homo sapien
ggctcacgtccaggccattctggtg

SEQ ID NO: 2114746 - DNA, 25 bp, Homo sapien
tggagcacgcatggtttctgaaggc

SEQ ID NO: 2114747 - DNA, 25 bp, Homo sapien
gatgctgtagcgctcttggagcacg

SEQ ID NO: 2114748 - DNA, 25 bp, Homo sapien
tgccctcaggacagttgaggtctgt

SEQ ID NO: 2114749 - DNA, 25 bp, Homo sapien
tggacagtgcaagtgctgccctcag

SEQ ID NO: 2114750 - DNA, 25 bp, Homo sapien
ggtcctcctgctaccttcaggcaca

SEQ ID NO: 2114751 - DNA, 25 bp, Homo sapien
ccagagcagagggtcgtgtggacag

SEQ ID NO: 2114752 - DNA, 25 bp, Homo sapien
cctgctgttctctggcgttggtgct

SEQ ID NO: 2114753 - DNA, 25 bp, Homo sapien
ttgccgtcgtgacacacttggaggg

SEQ ID NO: 2114754 - DNA, 25 bp, Homo sapien
gtgttggctcgcacagatgggacca

SEQ ID NO: 2114755 - DNA, 25 bp, Homo sapien
tgcttgtgagtgaggcgcccctgct

SEQ ID NO: 2114756 - DNA, 25 bp, Homo sapien
tggtcctggcgatgtccagagcaga

SEQ ID NO: 2114757 - DNA, 25 bp, Homo sapien
tgtccattggtcctggcgatgtcca

SEQ ID NO: 2114758 - DNA, 25 bp, Homo sapien
cagggatgggcctgtccattggtcc

SEQ ID NO: 2114759 - DNA, 25 bp, Homo sapien
ccgggtctggttgttggagccctgc

SEQ ID NO: 2114760 - DNA, 25 bp, Homo sapien
tgtaatgatatttcagagggtcttc

SEQ ID NO: 2114761 - DNA, 25 bp, Homo sapien
caatggccatgtgcttatcttcttg

SEQ ID NO: 2114762 - DNA, 25 bp, Homo sapien
ctacaccagttactgtgcaatggcc

SEQ ID NO: 2114763 - DNA, 25 bp, Homo sapien
ttcagggattccatccacactacac

SEQ ID NO: 2114764 - DNA, 25 bp, Homo sapien
tgttggtggggatgttgcaatgtga

SEQ ID NO: 2114765 - DNA, 25 bp, Homo sapien
gggatgttgcaatgtgagggtatcc

SEQ ID NO: 2114766 - DNA, 25 bp, Homo sapien
atgtgagggtatccatcatcagtca

SEQ ID NO: 2114767 - DNA, 25 bp, Homo sapien
tgtgagggtatccatcatcagtcat

SEQ ID NO: 2114768 - DNA, 25 bp, Homo sapien
cctggattaacagctcagcggagga

SEQ ID NO: 2114769 - DNA, 25 bp, Homo sapien
ccctggattaacagctcagcggagg

SEQ ID NO: 2114770 - DNA, 25 bp, Homo sapien
tccctggattaacagctcagcggag

SEQ ID NO: 2114771 - DNA, 25 bp, Homo sapien
attcttcagaagggcaactcttccc

SEQ ID NO: 2114772 - DNA, 25 bp, Homo sapien
gcaaggaactttcatagaaagggac

SEQ ID NO: 2114773 - DNA, 25 bp, Homo sapien
cacgaaagaaggaagtcacgacgtc

SEQ ID NO: 2114774 - DNA, 25 bp, Homo sapien
agttagagagcaaggcgcataggca

SEQ ID NO: 2114775 - DNA, 25 bp, Homo sapien
gaagtcacgacgtctcctttcacag

SEQ ID NO: 2114776 - DNA, 25 bp, Homo sapien
gcagtatcgctgagttttagtagaa

SEQ ID NO: 2114777 - DNA, 25 bp, Homo sapien
gaaagatgacgacctcagaggccat

SEQ ID NO: 2114778 - DNA, 25 bp, Homo sapien
tagtagaaagatgacgacctcagag

SEQ ID NO: 2114779 - DNA, 25 bp, Homo sapien
gttttagtagaaagatgacgacctc

SEQ ID NO: 2114780 - DNA, 25 bp, Homo sapien
cgggaccccacaacagcaaggccat

SEQ ID NO: 2114781 - DNA, 25 bp, Homo sapien
gcccgggaccccacaacagcaaggc

SEQ ID NO: 2114782 - DNA, 25 bp, Homo sapien
atggccctccttcgtcccatgcccg

SEQ ID NO: 2114783 - DNA, 25 bp, Homo sapien
cctccccgctatggccctccttcgt

SEQ ID NO: 2114784 - DNA, 25 bp, Homo sapien
gccttaagggctgtggtgcccctcc

SEQ ID NO: 2114785 - DNA, 25 bp, Homo sapien
tgaggttccctcgtgccttaagggc

SEQ ID NO: 2114786 - DNA, 25 bp, Homo sapien
gcgcagtgaggttccctcgtgcctt

SEQ ID NO: 2114787 - DNA, 25 bp, Homo sapien
aagggctgtggtgcccctccttatc

SEQ ID NO: 2114788 - DNA, 25 bp, Homo sapien
tgggaagacgcccagtgaacatgcg

SEQ ID NO: 2114789 - DNA, 25 bp, Homo sapien
agctccgccgcgttccccacactgg

SEQ ID NO: 2114790 - DNA, 25 bp, Homo sapien
cagtagcggagaaagaatccagacc

SEQ ID NO: 2114791 - DNA, 25 bp, Homo sapien
tctcagtagcggagaaagaatccag

SEQ ID NO: 2114792 - DNA, 25 bp, Homo sapien
agacctcagggacccgagtcgccgg

SEQ ID NO: 2114793 - DNA, 25 bp, Homo sapien
ccgccgtgtctcagtagcggagaaa

SEQ ID NO: 2114794 - DNA, 25 bp, Homo sapien
acttcaactcccagttggatctgcc

SEQ ID NO: 2114795 - DNA, 25 bp, Homo sapien
gagtcactgaccacacaaccctccg

SEQ ID NO: 2114796 - DNA, 25 bp, Homo sapien
ggacgacgacttcgagggccttctc

SEQ ID NO: 2114797 - DNA, 25 bp, Homo sapien
ttcgagggccttctcactctgagtc

SEQ ID NO: 2114798 - DNA, 25 bp, Homo sapien
tatggccgtgacgagacaagaaggt

SEQ ID NO: 2114799 - DNA, 25 bp, Homo sapien
acaagaaggtccatgggcgtggcac

SEQ ID NO: 2114800 - DNA, 25 bp, Homo sapien
cgtgacgagacaagaaggtccatgg

SEQ ID NO: 2114801 - DNA, 25 bp, Homo sapien
ctagttatggccgtgacgagacaag

SEQ ID NO: 2114802 - DNA, 25 bp, Homo sapien
aacagcaccccagcttcgcctgagc

SEQ ID NO: 2114803 - DNA, 25 bp, Homo sapien
ggtgcttctgggactcggatacccc

SEQ ID NO: 2114804 - DNA, 25 bp, Homo sapien
tccaggtgcttctgggactcggata

SEQ ID NO: 2114805 - DNA, 25 bp, Homo sapien
tgggactcggatacccccaacagca

SEQ ID NO: 2114806 - DNA, 25 bp, Homo sapien
cgctcatgccgtccctctcctggtc

SEQ ID NO: 2114807 - DNA, 25 bp, Homo sapien
catgccgtccctctcctggtcccgt

SEQ ID NO: 2114808 - DNA, 25 bp, Homo sapien
tcatgccgtccctctcctggtcccg

SEQ ID NO: 2114809 - DNA, 25 bp, Homo sapien
ctcatgccgtccctctcctggtccc

SEQ ID NO: 2114810 - DNA, 25 bp, Homo sapien
gctgcggtcactagcccgcagcatg

SEQ ID NO: 2114811 - DNA, 25 bp, Homo sapien
agcccgcagcatgccccgtctccag

SEQ ID NO: 2114812 - DNA, 25 bp, Homo sapien
gggctgcggtcactagcccgcagca

SEQ ID NO: 2114813 - DNA, 25 bp, Homo sapien
ctcggggctgcggtcactagcccgc

SEQ ID NO: 2114814 - DNA, 25 bp, Homo sapien
cctgggactggctgtgtggttctgt

SEQ ID NO: 2114815 - DNA, 25 bp, Homo sapien
tgggactggctgtgtggttctgtgt

SEQ ID NO: 2114816 - DNA, 25 bp, Homo sapien
ctgggactggctgtgtggttctgtg

SEQ ID NO: 2114817 - DNA, 25 bp, Homo sapien
ggatctcagctgtatcctgatcttc

SEQ ID NO: 2114818 - DNA, 25 bp, Homo sapien
gggatctcagctgtatcctgatctt

SEQ ID NO: 2114819 - DNA, 25 bp, Homo sapien
caaaggttatcgatttaagcattcc

SEQ ID NO: 2114820 - DNA, 25 bp, Homo sapien
ttcgcgttacgaaataaagcctgag

SEQ ID NO: 2114821 - DNA, 25 bp, Homo sapien
aatacaaaggttatcgatttaagca

SEQ ID NO: 2114822 - DNA, 25 bp, Homo sapien
taaggaaatgataatattctcttcc

SEQ ID NO: 2114823 - DNA, 25 bp, Homo sapien
ctcttgcagatcaccttccatgtcg

SEQ ID NO: 2114824 - DNA, 25 bp, Homo sapien
gtttgactgatgcagctcttgcaga

SEQ ID NO: 2114825 - DNA, 25 bp, Homo sapien
ccaaatccagatttatccccggtgt

SEQ ID NO: 2114826 - DNA, 25 bp, Homo sapien
gtattatcttcaccttgacgccgga

SEQ ID NO: 2114827 - DNA, 25 bp, Homo sapien
ttctggcattttacagtgttcctct

SEQ ID NO: 2114828 - DNA, 25 bp, Homo sapien
ctgcttctggcattttacagtgttc

SEQ ID NO: 2114829 - DNA, 25 bp, Homo sapien
gcttctggcattttacagtgttcct

SEQ ID NO: 2114830 - DNA, 25 bp, Homo sapien
tgcttctggcattttacagtgttcc

SEQ ID NO: 2114831 - DNA, 25 bp, Homo sapien
actttattgagatagtttaagtcaa

SEQ ID NO: 2114832 - DNA, 25 bp, Homo sapien
tgaaagctgcaaaactttattgaga

SEQ ID NO: 2114833 - DNA, 25 bp, Homo sapien
tatctaatataaaaccagcttgcgt

SEQ ID NO: 2114834 - DNA, 25 bp, Homo sapien
aaccagcttgcgttgtttcagcttg

SEQ ID NO: 2114835 - DNA, 25 bp, Homo sapien
ggaaggaagtgaaccaaagatgagc

SEQ ID NO: 2114836 - DNA, 25 bp, Homo sapien
gaaggaagtgaaccaaagatgagca

SEQ ID NO: 2114837 - DNA, 25 bp, Homo sapien
gaaccaaagatgagcaagacttctt

SEQ ID NO: 2114838 - DNA, 25 bp, Homo sapien
ctgggaaggaagtgaaccaaagatg

SEQ ID NO: 2114839 - DNA, 25 bp, Homo sapien
tctgatgctcgtcagtctgcttaga

SEQ ID NO: 2114840 - DNA, 25 bp, Homo sapien
tcagtctgcttagaaagctgatcat

SEQ ID NO: 2114841 - DNA, 25 bp, Homo sapien
gggctgcgaagaaatcgcttaaata

SEQ ID NO: 2114842 - DNA, 25 bp, Homo sapien
ttcagtggggctgcgaagaaatcgc

SEQ ID NO: 2114843 - DNA, 25 bp, Homo sapien
gaaatcgcttaaatatagatctcat

SEQ ID NO: 2114844 - DNA, 25 bp, Homo sapien
gctgcgaagaaatcgcttaaatata

SEQ ID NO: 2114845 - DNA, 25 bp, Homo sapien
tggacgactgttgtcaaagtctctt

SEQ ID NO: 2114846 - DNA, 25 bp, Homo sapien
taatgtgttcggaccttggactgtc

SEQ ID NO: 2114847 - DNA, 25 bp, Homo sapien
tccttgtagcactagaaagcagggt

SEQ ID NO: 2114848 - DNA, 25 bp, Homo sapien
catctttaatgcatacacttggacg

SEQ ID NO: 2114849 - DNA, 25 bp, Homo sapien
ggcacatgatcagtagccggcacat

SEQ ID NO: 2114850 - DNA, 25 bp, Homo sapien
caggaggtggcacatgatcagtagc

SEQ ID NO: 2114851 - DNA, 25 bp, Homo sapien
ccaggaggtggcacatgatcagtag

SEQ ID NO: 2114852 - DNA, 25 bp, Homo sapien
aggtggcacatgatcagtagccggc

SEQ ID NO: 2114853 - DNA, 25 bp, Homo sapien
tgactgatgatggataccctcacat

SEQ ID NO: 2114854 - DNA, 25 bp, Homo sapien
tgaaaacggatcacaacactctcct

SEQ ID NO: 2114855 - DNA, 25 bp, Homo sapien
cacttgtggacaatcgtatttagaa

SEQ ID NO: 2114856 - DNA, 25 bp, Homo sapien
agtgcatttgaaaacggatcacaac

SEQ ID NO: 2114857 - DNA, 25 bp, Homo sapien
tctggcacagaatggagaaatcgac

SEQ ID NO: 2114858 - DNA, 25 bp, Homo sapien
ttgggatgcatgtgctcccccgggc

SEQ ID NO: 2114859 - DNA, 25 bp, Homo sapien
gaaatcgacgtcctcccagttttgc

SEQ ID NO: 2114860 - DNA, 25 bp, Homo sapien
gtttctctgagacatatctggcaca

SEQ ID NO: 2114861 - DNA, 25 bp, Homo sapien
taaggcttattcctcagccagtaca

SEQ ID NO: 2114862 - DNA, 25 bp, Homo sapien
agcaactggccatgttctatcaggg

SEQ ID NO: 2114863 - DNA, 25 bp, Homo sapien
catatctgcagtcacctttaaaggc

SEQ ID NO: 2114864 - DNA, 25 bp, Homo sapien
tcactactggacgtggctttcccca

SEQ ID NO: 2114865 - DNA, 25 bp, Homo sapien
tctggtggaatccttctctgctggt

SEQ ID NO: 2114866 - DNA, 25 bp, Homo sapien
gagtaatggtatccgccagatcacc

SEQ ID NO: 2114867 - DNA, 25 bp, Homo sapien
tctgctacagggtcattgtttccac

SEQ ID NO: 2114868 - DNA, 25 bp, Homo sapien
tctgctggtgattcaagatgaagcg

SEQ ID NO: 2114869 - DNA, 25 bp, Homo sapien
agccattgacaatcagtttattaga

SEQ ID NO: 2114870 - DNA, 25 bp, Homo sapien
agtttattagaggacttgtcggcac

SEQ ID NO: 2114871 - DNA, 25 bp, Homo sapien
aggacttgtcggcacccacttctgt

SEQ ID NO: 2114872 - DNA, 25 bp, Homo sapien
tattagaggacttgtcggcacccac

SEQ ID NO: 2114873 - DNA, 25 bp, Homo sapien
catctgctctggacatcgccaggac

SEQ ID NO: 2114874 - DNA, 25 bp, Homo sapien
tggtttctacagtgcagctttgagc

SEQ ID NO: 2114875 - DNA, 25 bp, Homo sapien
tggacatcgccaggaccaatggaca

SEQ ID NO: 2114876 - DNA, 25 bp, Homo sapien
ggcatgctgaactcctattccttcc

SEQ ID NO: 2114877 - DNA, 25 bp, Homo sapien
gccactagagacccccaaaactcca

SEQ ID NO: 2114878 - DNA, 25 bp, Homo sapien
ccaggggcccaggttcatgaggccc

SEQ ID NO: 2114879 - DNA, 25 bp, Homo sapien
tccaggggcccaggttcatgaggcc

SEQ ID NO: 2114880 - DNA, 25 bp, Homo sapien
agctgccagcaccaacgccagagaa

SEQ ID NO: 2114881 - DNA, 25 bp, Homo sapien
agcaggggcgcctcactcacaagca

SEQ ID NO: 2114882 - DNA, 25 bp, Homo sapien
actggaggggttggtcccatctgtg

SEQ ID NO: 2114883 - DNA, 25 bp, Homo sapien
gcaccaacgccagagaacagcaggg

SEQ ID NO: 2114884 - DNA, 25 bp, Homo sapien
cttgcactgtccacacgaccctctg

SEQ ID NO: 2114885 - DNA, 25 bp, Homo sapien
ctgtccacacgaccctctgctctgg

SEQ ID NO: 2114886 - DNA, 25 bp, Homo sapien
actgtccacacgaccctctgctctg

SEQ ID NO: 2114887 - DNA, 25 bp, Homo sapien
gcactgtccacacgaccctctgctc

SEQ ID NO: 2114888 - DNA, 25 bp, Homo sapien
gggatcccaataggctctgctcact

SEQ ID NO: 2114889 - DNA, 25 bp, Homo sapien
gctctgctcactccaccagccatca

SEQ ID NO: 2114890 - DNA, 25 bp, Homo sapien
tctgctcactccaccagccatcagc

SEQ ID NO: 2114891 - DNA, 25 bp, Homo sapien
ctgggatcccaataggctctgctca

SEQ ID NO: 2114892 - DNA, 25 bp, Homo sapien
tgtgcagagtgggtccccggcacta

SEQ ID NO: 2114893 - DNA, 25 bp, Homo sapien
ctgtgcagagtgggtccccggcact

SEQ ID NO: 2114894 - DNA, 25 bp, Homo sapien
cagagtgggtccccggcactacaga

SEQ ID NO: 2114895 - DNA, 25 bp, Homo sapien
tgcagagtgggtccccggcactaca

SEQ ID NO: 2114896 - DNA, 25 bp, Homo sapien
ttgtctgacatagcctcattgggaa

SEQ ID NO: 2114897 - DNA, 25 bp, Homo sapien
tgagtcgacccccatgaggatctgc

SEQ ID NO: 2114898 - DNA, 25 bp, Homo sapien
ctgcaggatcttgtctgacatagcc

SEQ ID NO: 2114899 - DNA, 25 bp, Homo sapien
gagatgagtcgacccccatgaggat

SEQ ID NO: 2114900 - DNA, 25 bp, Homo sapien
cactcaattgatggggcaaggatgc

SEQ ID NO: 2114901 - DNA, 25 bp, Homo sapien
ttctgacccctccagaatgatcctg

SEQ ID NO: 2114902 - DNA, 25 bp, Homo sapien
cttcccacagcactcaattgatggg

SEQ ID NO: 2114903 - DNA, 25 bp, Homo sapien
gcttccccgctgtagggttctgacc

SEQ ID NO: 2114904 - DNA, 25 bp, Homo sapien
tatgacagctgtttcggcagtgagt

SEQ ID NO: 2114905 - DNA, 25 bp, Homo sapien
tccctgcctttggaaacaaggagga

SEQ ID NO: 2114906 - DNA, 25 bp, Homo sapien
tctgatggctttccctgcctttgga

SEQ ID NO: 2114907 - DNA, 25 bp, Homo sapien
tgtctgttatgagggtgggtccccc

SEQ ID NO: 2114908 - DNA, 25 bp, Homo sapien
gctctgaggtcgctcttctcaactt

SEQ ID NO: 2114909 - DNA, 25 bp, Homo sapien
tctgaggtcgctcttctcaacttca

SEQ ID NO: 2114910 - DNA, 25 bp, Homo sapien
ctgaggtcgctcttctcaacttcat

SEQ ID NO: 2114911 - DNA, 25 bp, Homo sapien
tgctctgaggtcgctcttctcaact

SEQ ID NO: 2114912 - DNA, 25 bp, Homo sapien
agatcaggagaaggacagctgaaag

SEQ ID NO: 2114913 - DNA, 25 bp, Homo sapien
gagacgcactgctcaggcgaggggc

SEQ ID NO: 2114914 - DNA, 25 bp, Homo sapien
tgtctgctgtggaatggcagatgag

SEQ ID NO: 2114915 - DNA, 25 bp, Homo sapien
aggctacgagggacagctgtctgct

SEQ ID NO: 2114916 - DNA, 25 bp, Homo sapien
ctgggaccctgggactgatgtcctt

SEQ ID NO: 2114917 - DNA, 25 bp, Homo sapien
ggttctgtagtagtcatggctctgg

SEQ ID NO: 2114918 - DNA, 25 bp, Homo sapien
tgggactgatgtccttccactcggg

SEQ ID NO: 2114919 - DNA, 25 bp, Homo sapien
ccatgggacactgatgctaaggatg

SEQ ID NO: 2114920 - DNA, 25 bp, Homo sapien
tgcaacagcggtaacagcaacgggc

SEQ ID NO: 2114921 - DNA, 25 bp, Homo sapien
tgttcgtaggtatgttggattcccc

SEQ ID NO: 2114922 - DNA, 25 bp, Homo sapien
tgagggagatacacctgcaacagcg

SEQ ID NO: 2114923 - DNA, 25 bp, Homo sapien
caagaaggactttggagcctggtga

SEQ ID NO: 2114924 - DNA, 25 bp, Homo sapien
tccagaagctgtctcagtcaaagac

SEQ ID NO: 2114925 - DNA, 25 bp, Homo sapien
tggaagctgatctccagaagctgtc

SEQ ID NO: 2114926 - DNA, 25 bp, Homo sapien
gactggggatgaatgtggagttggc

SEQ ID NO: 2114927 - DNA, 25 bp, Homo sapien
gtggagttggccctggtgtccaggg

SEQ ID NO: 2114928 - DNA, 25 bp, Homo sapien
tcatattttgttccaaggtttgcat

SEQ ID NO: 2114929 - DNA, 25 bp, Homo sapien
aacacttgactcatggaggaggaat

SEQ ID NO: 2114930 - DNA, 25 bp, Homo sapien
ttcatattttgttccaaggtttgca

SEQ ID NO: 2114931 - DNA, 25 bp, Homo sapien
acacttgactcatggaggaggaatt

SEQ ID NO: 2114932 - DNA, 25 bp, Homo sapien
tcccacatgaccagagcttcccatc

SEQ ID NO: 2114933 - DNA, 25 bp, Homo sapien
catgaccagagcttcccatcctcca

SEQ ID NO: 2114934 - DNA, 25 bp, Homo sapien
ccacatgaccagagcttcccatcct

SEQ ID NO: 2114935 - DNA, 25 bp, Homo sapien
acatgaccagagcttcccatcctcc

SEQ ID NO: 2114936 - DNA, 25 bp, Homo sapien
acataggtctcctcccccccataga

SEQ ID NO: 2114937 - DNA, 25 bp, Homo sapien
ttttaaattgctctgactttgtcag

SEQ ID NO: 2114938 - DNA, 25 bp, Homo sapien
aaattgctctgactttgtcagaatc

SEQ ID NO: 2114939 - DNA, 25 bp, Homo sapien
ctctgactttgtcagaatcttcccc

SEQ ID NO: 2114940 - DNA, 25 bp, Homo sapien
ggaccatctccgcattcatccccag

SEQ ID NO: 2114941 - DNA, 25 bp, Homo sapien
aagggaatctctgttgcagattcag

SEQ ID NO: 2114942 - DNA, 25 bp, Homo sapien
tctctgttgcagattcagttttaag

SEQ ID NO: 2114943 - DNA, 25 bp, Homo sapien
tctgttgcagattcagttttaagga

SEQ ID NO: 2114944 - DNA, 25 bp, Homo sapien
ttataagggaatctctgttgcagat

SEQ ID NO: 2114945 - DNA, 25 bp, Homo sapien
tttggcaagttagccttatgggcag

SEQ ID NO: 2114946 - DNA, 25 bp, Homo sapien
aacctgtaactatagtggatcctac

SEQ ID NO: 2114947 - DNA, 25 bp, Homo sapien
ccttgagcaagggatgaagccattt

SEQ ID NO: 2114948 - DNA, 25 bp, Homo sapien
cttgttttttgagtgctggccttcc

SEQ ID NO: 2114949 - DNA, 25 bp, Homo sapien
ctttggttgaagatgttcatggatc

SEQ ID NO: 2114950 - DNA, 25 bp, Homo sapien
tggtgacctgaaccctcacctctct

SEQ ID NO: 2114951 - DNA, 25 bp, Homo sapien
tctgattaggctatttctgctttgg

SEQ ID NO: 2114952 - DNA, 25 bp, Homo sapien
tcacctctcttctgattaggctatt

SEQ ID NO: 2114953 - DNA, 25 bp, Homo sapien
cagggctatattatgcgaagattta

SEQ ID NO: 2114954 - DNA, 25 bp, Homo sapien
tgtctcatttaaattatcagggcta

SEQ ID NO: 2114955 - DNA, 25 bp, Homo sapien
aattatcagggctatattatgcgaa

SEQ ID NO: 2114956 - DNA, 25 bp, Homo sapien
tatattatgcgaagatttagaagat

SEQ ID NO: 2114957 - DNA, 25 bp, Homo sapien
ttacctcagactggagaaattgtgg

SEQ ID NO: 2114958 - DNA, 25 bp, Homo sapien
atagaagtgcaacacattgtttacc

SEQ ID NO: 2114959 - DNA, 25 bp, Homo sapien
tagcagtgtgctatcttgaatacat

SEQ ID NO: 2114960 - DNA, 25 bp, Homo sapien
tctagagggtcagaactaataagag

SEQ ID NO: 2114961 - DNA, 25 bp, Homo sapien
ctaggttgtcaagctaccatggaca

SEQ ID NO: 2114962 - DNA, 25 bp, Homo sapien
taggttgtcaagctaccatggacag

SEQ ID NO: 2114963 - DNA, 25 bp, Homo sapien
ctattggacattgatgctcaggatg

SEQ ID NO: 2114964 - DNA, 25 bp, Homo sapien
gatgtttccttggtagtcatagttc

SEQ ID NO: 2114965 - DNA, 25 bp, Homo sapien
ggactgatgtccttctcggcaagga

SEQ ID NO: 2114966 - DNA, 25 bp, Homo sapien
tagtcatagttctgagatcccagga

SEQ ID NO: 2114967 - DNA, 25 bp, Homo sapien
ctggaacccccgacagaggacagat

SEQ ID NO: 2114968 - DNA, 25 bp, Homo sapien
tggcgtgggcactaaggaaggagcc

SEQ ID NO: 2114969 - DNA, 25 bp, Homo sapien
gaaggagcctggaaactcggaacgc

SEQ ID NO: 2114970 - DNA, 25 bp, Homo sapien
ctgttgtgggtatctgagtgccaga

SEQ ID NO: 2114971 - DNA, 25 bp, Homo sapien
agaagagtttcaagttcatcgtcct

SEQ ID NO: 2114972 - DNA, 25 bp, Homo sapien
ctcctcttgtgggggcgccgccatg

SEQ ID NO: 2114973 - DNA, 25 bp, Homo sapien
aagagtttcaagttcatcgtcctcc

SEQ ID NO: 2114974 - DNA, 25 bp, Homo sapien
agtttcaagttcatcgtcctcctct

SEQ ID NO: 2114975 - DNA, 25 bp, Homo sapien
tgtggtccatggcttcctagggaga

SEQ ID NO: 2114976 - DNA, 25 bp, Homo sapien
acaaataagtcggtagatgctcacg

SEQ ID NO: 2114977 - DNA, 25 bp, Homo sapien
ggaggagcccgtgggtgtggtccat

SEQ ID NO: 2114978 - DNA, 25 bp, Homo sapien
aatcctaccagaaagttgaagtgtg

SEQ ID NO: 2114979 - DNA, 25 bp, Homo sapien
cgaggagatgtcgtgacttccttct

SEQ ID NO: 2114980 - DNA, 25 bp, Homo sapien
ggcgaggagatgtcgtgacttcctt

SEQ ID NO: 2114981 - DNA, 25 bp, Homo sapien
aactcccttgttgcccgtgcactgt

SEQ ID NO: 2114982 - DNA, 25 bp, Homo sapien
ttgttgcccgtgcactgtgctgtct

SEQ ID NO: 2114983 - DNA, 25 bp, Homo sapien
ggccaggctttaacctcatgccaaa

SEQ ID NO: 2114984 - DNA, 25 bp, Homo sapien
tcacaaggacctggaatttaatgat

SEQ ID NO: 2114985 - DNA, 25 bp, Homo sapien
gccaaatgtgagcttcctcctgcca

SEQ ID NO: 2114986 - DNA, 25 bp, Homo sapien
tctgcttcacaaggacctggaattt

SEQ ID NO: 2114987 - DNA, 25 bp, Homo sapien
tgagtgtcccacaaggcccatggca

SEQ ID NO: 2114988 - DNA, 25 bp, Homo sapien
agtgtcccacaaggcccatggcaat

SEQ ID NO: 2114989 - DNA, 25 bp, Homo sapien
gtgtcccacaaggcccatggcaatg

SEQ ID NO: 2114990 - DNA, 25 bp, Homo sapien
tctgagtgtcccacaaggcccatgg

SEQ ID NO: 2114991 - DNA, 25 bp, Homo sapien
cttctgttgagggttccaggtgctt

SEQ ID NO: 2114992 - DNA, 25 bp, Homo sapien
tcaggactaagaaaactccaatagc

SEQ ID NO: 2114993 - DNA, 25 bp, Homo sapien
tccaggtgctttcaggactaagaaa

SEQ ID NO: 2114994 - DNA, 25 bp, Homo sapien
ctgttgagggttccaggtgctttca

SEQ ID NO: 2114995 - DNA, 25 bp, Homo sapien
ctgtcatgaacaggtgtaggatcct

SEQ ID NO: 2114996 - DNA, 25 bp, Homo sapien
cagcaccttgaatttcagttgtacc

SEQ ID NO: 2114997 - DNA, 25 bp, Homo sapien
gactgcatgaagctgcaaaatatcc

SEQ ID NO: 2114998 - DNA, 25 bp, Homo sapien
aatttcagttgtaccctgatctctg

SEQ ID NO: 2114999 - DNA, 25 bp, Homo sapien
tgactcagtgtgaacgccccttact

SEQ ID NO: 2115000 - DNA, 25 bp, Homo sapien
cagtaggtctgcagttcagtagtcc

SEQ ID NO: 2115001 - DNA, 25 bp, Homo sapien
gatccatggcctcctaggtggaagg

SEQ ID NO: 2115002 - DNA, 25 bp, Homo sapien
tgtcttgccgactaggagtcagcca

SEQ ID NO: 2115003 - DNA, 25 bp, Homo sapien
cctggattaacagctcagcggagga

SEQ ID NO: 2115004 - DNA, 25 bp, Homo sapien
ccctggattaacagctcagcggagg

SEQ ID NO: 2115005 - DNA, 25 bp, Homo sapien
tccctggattaacagctcagcggag

SEQ ID NO: 2115006 - DNA, 25 bp, Homo sapien
attcttcagaagggcaactcttccc

SEQ ID NO: 2115007 - DNA, 25 bp, Homo sapien
gctatggccctccttcgtcccatgc

SEQ ID NO: 2115008 - DNA, 25 bp, Homo sapien
gaaagatgacgacctcagaggccat

SEQ ID NO: 2115009 - DNA, 25 bp, Homo sapien
gcagtatcgctgagttttagtagaa

SEQ ID NO: 2115010 - DNA, 25 bp, Homo sapien
ggaccccacaacagcaaggccatgg

SEQ ID NO: 2115011 - DNA, 25 bp, Homo sapien
gccttaagggctgtggtgcccctcc

SEQ ID NO: 2115012 - DNA, 25 bp, Homo sapien
tgaggttccctcgtgccttaagggc

SEQ ID NO: 2115013 - DNA, 25 bp, Homo sapien
gcgcagtgaggttccctcgtgcctt

SEQ ID NO: 2115014 - DNA, 25 bp, Homo sapien
aagggctgtggtgcccctccttatc

SEQ ID NO: 2115015 - DNA, 25 bp, Homo sapien
gtgaacatgcgcactgaggtgggca

SEQ ID NO: 2115016 - DNA, 25 bp, Homo sapien
cagtagcggagaaagaatccagacc

SEQ ID NO: 2115017 - DNA, 25 bp, Homo sapien
agacctcagggacccgagtcgccgg

SEQ ID NO: 2115018 - DNA, 25 bp, Homo sapien
tgggaagacgcccagtgaacatgcg

SEQ ID NO: 2115019 - DNA, 25 bp, Homo sapien
acttcaactcccagttggatctgcc

SEQ ID NO: 2115020 - DNA, 25 bp, Homo sapien
gagtcactgaccacacaaccctccg

SEQ ID NO: 2115021 - DNA, 25 bp, Homo sapien
ggacgacgacttcgagggccttctc

SEQ ID NO: 2115022 - DNA, 25 bp, Homo sapien
ttcgagggccttctcactctgagtc

SEQ ID NO: 2115023 - DNA, 25 bp, Homo sapien
ggtgcttctgggactcggatacccc

SEQ ID NO: 2115024 - DNA, 25 bp, Homo sapien
gccgtgacgagacaagaaggtccat

SEQ ID NO: 2115025 - DNA, 25 bp, Homo sapien
ccttcctccctagttatggccgtga

SEQ ID NO: 2115026 - DNA, 25 bp, Homo sapien
acaagaaggtccatgggcgtggcac

SEQ ID NO: 2115027 - DNA, 25 bp, Homo sapien
cctgggactggctgtgtggttctgt

SEQ ID NO: 2115028 - DNA, 25 bp, Homo sapien
tgggactggctgtgtggttctgtgt

SEQ ID NO: 2115029 - DNA, 25 bp, Homo sapien
ctgggactggctgtgtggttctgtg

SEQ ID NO: 2115030 - DNA, 25 bp, Homo sapien
ggatctcagctgtatcctgatcttc

SEQ ID NO: 2115031 - DNA, 25 bp, Homo sapien
gggatctcagctgtatcctgatctt

SEQ ID NO: 2115032 - DNA, 25 bp, Homo sapien
tgagcaaatgtttggtatcttttcc

SEQ ID NO: 2115033 - DNA, 25 bp, Homo sapien
ttgagcaaatgtttggtatcttttc

SEQ ID NO: 2115034 - DNA, 25 bp, Homo sapien
gctcatggcataggccacaatgcac

SEQ ID NO: 2115035 - DNA, 25 bp, Homo sapien
catagaccttctcccgccccataga

SEQ ID NO: 2115036 - DNA, 25 bp, Homo sapien
caaaggttatcgatttaagcattcc

SEQ ID NO: 2115037 - DNA, 25 bp, Homo sapien
aatacaaaggttatcgatttaagca

SEQ ID NO: 2115038 - DNA, 25 bp, Homo sapien
ttcgcgttacgaaataaagcctgag

SEQ ID NO: 2115039 - DNA, 25 bp, Homo sapien
taaggaaatgataatattctcttcc

SEQ ID NO: 2115040 - DNA, 25 bp, Homo sapien
tgtttgactgatgcagctcttgcag

SEQ ID NO: 2115041 - DNA, 25 bp, Homo sapien
ccaaatccagatttatccccggtgt

SEQ ID NO: 2115042 - DNA, 25 bp, Homo sapien
ctcttgcagatcaccttccatgtcg

SEQ ID NO: 2115043 - DNA, 25 bp, Homo sapien
ttgacgccggaacccaaatccagat

SEQ ID NO: 2115044 - DNA, 25 bp, Homo sapien
ttctggcattttacagtgttcctct

SEQ ID NO: 2115045 - DNA, 25 bp, Homo sapien
ctgcttctggcattttacagtgttc

SEQ ID NO: 2115046 - DNA, 25 bp, Homo sapien
gcttctggcattttacagtgttcct

SEQ ID NO: 2115047 - DNA, 25 bp, Homo sapien
tgcttctggcattttacagtgttcc

SEQ ID NO: 2115048 - DNA, 25 bp, Homo sapien
aagagactttgacaacagtcgtcca

SEQ ID NO: 2115049 - DNA, 25 bp, Homo sapien
cagtcgtccaagtgtatgcattaaa

SEQ ID NO: 2115050 - DNA, 25 bp, Homo sapien
ctttgacaacagtcgtccaagtgta

SEQ ID NO: 2115051 - DNA, 25 bp, Homo sapien
tgacaacagtcgtccaagtgtatgc

SEQ ID NO: 2115052 - DNA, 25 bp, Homo sapien
tgaaagctgcaaaactttattgaga

SEQ ID NO: 2115053 - DNA, 25 bp, Homo sapien
tatctaatataaaaccagcttgcgt

SEQ ID NO: 2115054 - DNA, 25 bp, Homo sapien
aaccagcttgcgttgtttcagcttg

SEQ ID NO: 2115055 - DNA, 25 bp, Homo sapien
actttattgagatagtttaagtcaa

SEQ ID NO: 2115056 - DNA, 25 bp, Homo sapien
ggcacatgatcagtagccggcacat

SEQ ID NO: 2115057 - DNA, 25 bp, Homo sapien
ccaggaggtggcacatgatcagtag

SEQ ID NO: 2115058 - DNA, 25 bp, Homo sapien
caggaggtggcacatgatcagtagc

SEQ ID NO: 2115059 - DNA, 25 bp, Homo sapien
aggtggcacatgatcagtagccggc

SEQ ID NO: 2115060 - DNA, 25 bp, Homo sapien
tgctgatgagcccatgggtggttaa

SEQ ID NO: 2115061 - DNA, 25 bp, Homo sapien
ggtgctgatgagcccatgggtggtt

SEQ ID NO: 2115062 - DNA, 25 bp, Homo sapien
aaaggtgctgatgagcccatgggtg

SEQ ID NO: 2115063 - DNA, 25 bp, Homo sapien
ctgatgagcccatgggtggttaatc

SEQ ID NO: 2115064 - DNA, 25 bp, Homo sapien
catatctgcagtcacctttaaaggc

SEQ ID NO: 2115065 - DNA, 25 bp, Homo sapien
taaggcttattcctcagccagtaca

SEQ ID NO: 2115066 - DNA, 25 bp, Homo sapien
agcaactggccatgttctatcaggg

SEQ ID NO: 2115067 - DNA, 25 bp, Homo sapien
tcactactggacgtggctttcccca

SEQ ID NO: 2115068 - DNA, 25 bp, Homo sapien
agccattgacaatcagtttattaga

SEQ ID NO: 2115069 - DNA, 25 bp, Homo sapien
aggacttgtcggcacccacttctgt

SEQ ID NO: 2115070 - DNA, 25 bp, Homo sapien
agtttattagaggacttgtcggcac

SEQ ID NO: 2115071 - DNA, 25 bp, Homo sapien
tattagaggacttgtcggcacccac

SEQ ID NO: 2115072 - DNA, 25 bp, Homo sapien
gcactgtccacacgaccctctgctc

SEQ ID NO: 2115073 - DNA, 25 bp, Homo sapien
cttgcactgtccacacgaccctctg

SEQ ID NO: 2115074 - DNA, 25 bp, Homo sapien
ctgtccacacgaccctctgctctgg

SEQ ID NO: 2115075 - DNA, 25 bp, Homo sapien
actgtccacacgaccctctgctctg

SEQ ID NO: 2115076 - DNA, 25 bp, Homo sapien
gctctgaggtcgctcttctcaactt

SEQ ID NO: 2115077 - DNA, 25 bp, Homo sapien
ctgaggtcgctcttctcaacttcat

SEQ ID NO: 2115078 - DNA, 25 bp, Homo sapien
tctgaggtcgctcttctcaacttca

SEQ ID NO: 2115079 - DNA, 25 bp, Homo sapien
tgctctgaggtcgctcttctcaact

SEQ ID NO: 2115080 - DNA, 25 bp, Homo sapien
agatcaggagaaggacagctgaaag

SEQ ID NO: 2115081 - DNA, 25 bp, Homo sapien
gagacgcactgctcaggcgaggggc

SEQ ID NO: 2115082 - DNA, 25 bp, Homo sapien
tgtctgctgtggaatggcagatgag

SEQ ID NO: 2115083 - DNA, 25 bp, Homo sapien
aggctacgagggacagctgtctgct

SEQ ID NO: 2115084 - DNA, 25 bp, Homo sapien
gcaagaaagaagtcacaacgtttcc

SEQ ID NO: 2115085 - DNA, 25 bp, Homo sapien
agaagtcacaacgtttccttccaca

SEQ ID NO: 2115086 - DNA, 25 bp, Homo sapien
gtgttgtgtcatagtaggcaagaaa

SEQ ID NO: 2115087 - DNA, 25 bp, Homo sapien
aagtcacaacgtttccttccacagc

SEQ ID NO: 2115088 - DNA, 25 bp, Homo sapien
tcctccttgaggagttcagaatctg

SEQ ID NO: 2115089 - DNA, 25 bp, Homo sapien
tgggactcgaataccgccagcagca

SEQ ID NO: 2115090 - DNA, 25 bp, Homo sapien
ggtttctgggactcgaataccgcca

SEQ ID NO: 2115091 - DNA, 25 bp, Homo sapien
tttctgggactcgaataccgccagc

SEQ ID NO: 2115092 - DNA, 25 bp, Homo sapien
tactatcctgactttcagctggtgg

SEQ ID NO: 2115093 - DNA, 25 bp, Homo sapien
tctgaccagatgtactatcctgact

SEQ ID NO: 2115094 - DNA, 25 bp, Homo sapien
gaccagatgtactatcctgactttc

SEQ ID NO: 2115095 - DNA, 25 bp, Homo sapien
gatgtactatcctgactttcagctg

SEQ ID NO: 2115096 - DNA, 25 bp, Homo sapien
ggatatcaggatcatctccgcattc

SEQ ID NO: 2115097 - DNA, 25 bp, Homo sapien
cccctggatatcaggatcatctccg

SEQ ID NO: 2115098 - DNA, 25 bp, Homo sapien
cctggatatcaggatcatctccgca

SEQ ID NO: 2115099 - DNA, 25 bp, Homo sapien
cttcccctggatatcaggatcatct

SEQ ID NO: 2115100 - DNA, 25 bp, Homo sapien
caaaagtgtaatattgtggaataca

SEQ ID NO: 2115101 - DNA, 25 bp, Homo sapien
ctttcgaagaaagtctgcatttgaa

SEQ ID NO: 2115102 - DNA, 25 bp, Homo sapien
cagaaagcacgtaattttgaatctt

SEQ ID NO: 2115103 - DNA, 25 bp, Homo sapien
ctctttttattgtcaaaagtgtaat

SEQ ID NO: 2115104 - DNA, 25 bp, Homo sapien
cagggacacctgtctgctgtgggat

SEQ ID NO: 2115105 - DNA, 25 bp, Homo sapien
gtcgtcaggctaccagggacacctg

SEQ ID NO: 2115106 - DNA, 25 bp, Homo sapien
cgtcaggctaccagggacacctgtc

SEQ ID NO: 2115107 - DNA, 25 bp, Homo sapien
accagggacacctgtctgctgtggg

SEQ ID NO: 2115108 - DNA, 25 bp, Homo sapien
cccaggagtggaagtgtgggtgagt

SEQ ID NO: 2115109 - DNA, 25 bp, Homo sapien
agtgtgaggaggggaacgtggcctt

SEQ ID NO: 2115110 - DNA, 25 bp, Homo sapien
gagtggaagtgtgggtgagtgtgag

SEQ ID NO: 2115111 - DNA, 25 bp, Homo sapien
aggggaacgtggccttccagagcat

SEQ ID NO: 2115112 - DNA, 25 bp, Homo sapien
ccacgtggtgaatgtcgcagagctg

SEQ ID NO: 2115113 - DNA, 25 bp, Homo sapien
actgagatgcagtccgtaggtccac

SEQ ID NO: 2115114 - DNA, 25 bp, Homo sapien
agggtgtgagggtcactttctccca

SEQ ID NO: 2115115 - DNA, 25 bp, Homo sapien
agggtcactttctcccactactgag

SEQ ID NO: 2115116 - DNA, 25 bp, Homo sapien
aggaccatctctgcctttaccccag

SEQ ID NO: 2115117 - DNA, 25 bp, Homo sapien
ctccttatgagattttaaattgctc

SEQ ID NO: 2115118 - DNA, 25 bp, Homo sapien
tggaaatcagctgccaggtcaggcg

SEQ ID NO: 2115119 - DNA, 25 bp, Homo sapien
tctctgcctttaccccagtctttga

SEQ ID NO: 2115120 - DNA, 25 bp, Homo sapien
cacatggatgattttctctgaggct

SEQ ID NO: 2115121 - DNA, 25 bp, Homo sapien
cattctttctcagagaagtatttgg

SEQ ID NO: 2115122 - DNA, 25 bp, Homo sapien
cctgtttagtcatggcctcatactt

SEQ ID NO: 2115123 - DNA, 25 bp, Homo sapien
catatacacatggatgattttctct

SEQ ID NO: 2115124 - DNA, 25 bp, Homo sapien
cctgattcccgcagttatggtcatt

SEQ ID NO: 2115125 - DNA, 25 bp, Homo sapien
gattcccgcagttatggtcattatc

SEQ ID NO: 2115126 - DNA, 25 bp, Homo sapien
ctggcagtctgcggcccctttgtca

SEQ ID NO: 2115127 - DNA, 25 bp, Homo sapien
tgtcatccatgaaagttgggatggt

SEQ ID NO: 2115128 - DNA, 25 bp, Homo sapien
ctggggtttgggagcccacagcatc

SEQ ID NO: 2115129 - DNA, 25 bp, Homo sapien
gcccacgttcgtgaatggtgaccat

SEQ ID NO: 2115130 - DNA, 25 bp, Homo sapien
cccacgttcgtgaatggtgaccatg

SEQ ID NO: 2115131 - DNA, 25 bp, Homo sapien
cacgttcgtgaatggtgaccatgtt

SEQ ID NO: 2115132 - DNA, 25 bp, Homo sapien
tggtgaccatgttctgtttctcatc

SEQ ID NO: 2115133 - DNA, 25 bp, Homo sapien
ctgttctgatgagtccaactgtctc

SEQ ID NO: 2115134 - DNA, 25 bp, Homo sapien
tcctgcacgtttctctccattaggc

SEQ ID NO: 2115135 - DNA, 25 bp, Homo sapien
cctctgttctgatgagtccaactgt

SEQ ID NO: 2115136 - DNA, 25 bp, Homo sapien
ggatcctgcacgtttctctccatta

SEQ ID NO: 2115137 - DNA, 25 bp, Homo sapien
ggtgttctgctcttctgtatcctgt

SEQ ID NO: 2115138 - DNA, 25 bp, Homo sapien
gggtgttctgctcttctgtatcctg

SEQ ID NO: 2115139 - DNA, 25 bp, Homo sapien
gggaaaaatcgcaaggcagcttctg

SEQ ID NO: 2115140 - DNA, 25 bp, Homo sapien
tgggtgttctgctcttctgtatcct

SEQ ID NO: 2115141 - DNA, 25 bp, Homo sapien
gactagtcccggtgccatgaacgga

SEQ ID NO: 2115142 - DNA, 25 bp, Homo sapien
tcaggaacagataagccccggatgg

SEQ ID NO: 2115143 - DNA, 25 bp, Homo sapien
caaaggtcctgtggctggaaagtct

SEQ ID NO: 2115144 - DNA, 25 bp, Homo sapien
catgaacggagacaacgactgtgca

SEQ ID NO: 2115145 - DNA, 25 bp, Homo sapien
ttggctgggccagaaatccataatc

SEQ ID NO: 2115146 - DNA, 25 bp, Homo sapien
cttccaagcatcacagtctttgttg

SEQ ID NO: 2115147 - DNA, 25 bp, Homo sapien
tccaagcatcacagtctttgttgtc

SEQ ID NO: 2115148 - DNA, 25 bp, Homo sapien
taatctcgaagttgtagatacacct

SEQ ID NO: 2115149 - DNA, 25 bp, Homo sapien
aaatatcctgcaatgtcactgctcc

SEQ ID NO: 2115150 - DNA, 25 bp, Homo sapien
aatatcctgcaatgtcactgctcca

SEQ ID NO: 2115151 - DNA, 25 bp, Homo sapien
atatcctgcaatgtcactgctccag

SEQ ID NO: 2115152 - DNA, 25 bp, Homo sapien
tatcctgcaatgtcactgctccagg

SEQ ID NO: 2115153 - DNA, 25 bp, Homo sapien
actttctagctacaggacccttggt

SEQ ID NO: 2115154 - DNA, 25 bp, Homo sapien
ctttctagctacaggacccttggtc

SEQ ID NO: 2115155 - DNA, 25 bp, Homo sapien
catccctgggtctctttgcaaaggc

SEQ ID NO: 2115156 - DNA, 25 bp, Homo sapien
cttctctgatgctttatcatcatcc

SEQ ID NO: 2115157 - DNA, 25 bp, Homo sapien
ctctgatgctttatcatcatccctg

SEQ ID NO: 2115158 - DNA, 25 bp, Homo sapien
ctcttctctgatgctttatcatcat

SEQ ID NO: 2115159 - DNA, 25 bp, Homo sapien
catagctgattttctccgagtattt

SEQ ID NO: 2115160 - DNA, 25 bp, Homo sapien
tagctgattttctccgagtatttca

SEQ ID NO: 2115161 - DNA, 25 bp, Homo sapien
cacatagctgattttctccgagtat

SEQ ID NO: 2115162 - DNA, 25 bp, Homo sapien
tcttagagaagtatgtggcaatatc

SEQ ID NO: 2115163 - DNA, 25 bp, Homo sapien
gaagtctgtggcctgtttattacac

SEQ ID NO: 2115164 - DNA, 25 bp, Homo sapien
ctctagagagacttctgtcgcatga

SEQ ID NO: 2115165 - DNA, 25 bp, Homo sapien
agagacttctgtcgcatgagggcat

SEQ ID NO: 2115166 - DNA, 25 bp, Homo sapien
tagagagacttctgtcgcatgaggg

SEQ ID NO: 2115167 - DNA, 25 bp, Homo sapien
ggaagagaatacatcagaatttttc

SEQ ID NO: 2115168 - DNA, 25 bp, Homo sapien
gagcctgccaaaagtcatctgagga

SEQ ID NO: 2115169 - DNA, 25 bp, Homo sapien
ccaaaagtcatctgaggacgttcaa

SEQ ID NO: 2115170 - DNA, 25 bp, Homo sapien
cttcgggatgattctctggagcctg

SEQ ID NO: 2115171 - DNA, 25 bp, Homo sapien
cgggatgattctctggagcctgcca

SEQ ID NO: 2115172 - DNA, 25 bp, Homo sapien
tttcccggggcggcgcagctgtttc

SEQ ID NO: 2115173 - DNA, 25 bp, Homo sapien
tgcttttcccggggcggcgcagctg

SEQ ID NO: 2115174 - DNA, 25 bp, Homo sapien
ttgcttttcccggggcggcgcagct

SEQ ID NO: 2115175 - DNA, 25 bp, Homo sapien
gcttttcccggggcggcgcagctgt

SEQ ID NO: 2115176 - DNA, 25 bp, Homo sapien
gctggtttctctcacgcagtctgtg

SEQ ID NO: 2115177 - DNA, 25 bp, Homo sapien
tcttcataaatcaccagctggtttc

SEQ ID NO: 2115178 - DNA, 25 bp, Homo sapien
tctgtgggtccaggcatgtctcccc

SEQ ID NO: 2115179 - DNA, 25 bp, Homo sapien
ggagttactcatcatcttcctcagg

SEQ ID NO: 2115180 - DNA, 25 bp, Homo sapien
cgcagccatgcccatgttcgtgaaa

SEQ ID NO: 2115181 - DNA, 25 bp, Homo sapien
gcagccatgcccatgttcgtgaaag

SEQ ID NO: 2115182 - DNA, 25 bp, Homo sapien
acaagatttggcatattcaggtggt

SEQ ID NO: 2115183 - DNA, 25 bp, Homo sapien
agatttggcatattcaggtggtatg

SEQ ID NO: 2115184 - DNA, 25 bp, Homo sapien
aagatttggcatattcaggtggtat

SEQ ID NO: 2115185 - DNA, 25 bp, Homo sapien
caagatttggcatattcaggtggta

SEQ ID NO: 2115186 - DNA, 25 bp, Homo sapien
ctcagggtcgctgatctcttcataa

SEQ ID NO: 2115187 - DNA, 25 bp, Homo sapien
tgctttctctcacgcagtctgtggg

SEQ ID NO: 2115188 - DNA, 25 bp, Homo sapien
tctgtgggtccaggcatgtttcccc

SEQ ID NO: 2115189 - DNA, 25 bp, Homo sapien
atcttcctcagggtcgctgatctct

SEQ ID NO: 2115190 - DNA, 25 bp, Homo sapien
catgggacaaagacaaccggcccac

SEQ ID NO: 2115191 - DNA, 25 bp, Homo sapien
atgggacaaagacaaccggcccacg

SEQ ID NO: 2115192 - DNA, 25 bp, Homo sapien
tggacctcactagtgatgggcagct

SEQ ID NO: 2115193 - DNA, 25 bp, Homo sapien
gaactggatgccttcatgaagaacc

SEQ ID NO: 2115194 - DNA, 25 bp, Homo sapien
ccccagtgtctttgaccacatgatg

SEQ ID NO: 2115195 - DNA, 25 bp, Homo sapien
tgaagaaactggacctcactagtga

SEQ ID NO: 2115196 - DNA, 25 bp, Homo sapien
gagtcctgtttagcaatgcacaaaa

SEQ ID NO: 2115197 - DNA, 25 bp, Homo sapien
cacaatgtttaaagcagagtcctgt

SEQ ID NO: 2115198 - DNA, 25 bp, Homo sapien
acaaaaattctcctttgtgacccat

SEQ ID NO: 2115199 - DNA, 25 bp, Homo sapien
gtttaaagcagagtcctgtttagca

SEQ ID NO: 2115200 - DNA, 25 bp, Homo sapien
gatttcactggactctcgaatctca

SEQ ID NO: 2115201 - DNA, 25 bp, Homo sapien
gtggcaatccactaggctgctgagt

SEQ ID NO: 2115202 - DNA, 25 bp, Homo sapien
ggcaatccactaggctgctgagtga

SEQ ID NO: 2115203 - DNA, 25 bp, Homo sapien
caatccactaggctgctgagtgacc

SEQ ID NO: 2115204 - DNA, 25 bp, Homo sapien
ggtggcaatccactaggctgctgag

SEQ ID NO: 2115205 - DNA, 25 bp, Homo sapien
attaagccaggggaacatgggtcca

SEQ ID NO: 2115206 - DNA, 25 bp, Homo sapien
gccaggggaacatgggtccacatac

SEQ ID NO: 2115207 - DNA, 25 bp, Homo sapien
aagccaggggaacatgggtccacat

SEQ ID NO: 2115208 - DNA, 25 bp, Homo sapien
taagccaggggaacatgggtccaca

SEQ ID NO: 2115209 - DNA, 25 bp, Homo sapien
ctgtgggacgatggcataatgctga

SEQ ID NO: 2115210 - DNA, 25 bp, Homo sapien
aggccctttctggaggttgatactc

SEQ ID NO: 2115211 - DNA, 25 bp, Homo sapien
ggaggttgatactctgtgtctgcag

SEQ ID NO: 2115212 - DNA, 25 bp, Homo sapien
gaaaatgtcagtcctgatatagtcc

SEQ ID NO: 2115213 - DNA, 25 bp, Homo sapien
gagaaaatcagaccgtgcgtactct

SEQ ID NO: 2115214 - DNA, 25 bp, Homo sapien
tttggaagaatccaaagagaaaatc

SEQ ID NO: 2115215 - DNA, 25 bp, Homo sapien
ttggaagaatccaaagagaaaatca

SEQ ID NO: 2115216 - DNA, 25 bp, Homo sapien
aagagaaaatcagaccgtgcgtact

SEQ ID NO: 2115217 - DNA, 25 bp, Homo sapien
ctgtgtaattttattcagtgggggc

SEQ ID NO: 2115218 - DNA, 25 bp, Homo sapien
gtgtaattttattcagtgggggcat

SEQ ID NO: 2115219 - DNA, 25 bp, Homo sapien
gactgtgtaattttattcagtgggg

SEQ ID NO: 2115220 - DNA, 25 bp, Homo sapien
tgtgtaattttattcagtgggggca

SEQ ID NO: 2115221 - DNA, 25 bp, Homo sapien
ctgaaagatgtacggaccctttttg

SEQ ID NO: 2115222 - DNA, 25 bp, Homo sapien
gcatttctccatccggggcttatct

SEQ ID NO: 2115223 - DNA, 25 bp, Homo sapien
ctgcatttctccatccggggcttat

SEQ ID NO: 2115224 - DNA, 25 bp, Homo sapien
ttctccatccggggcttatctgtcc

SEQ ID NO: 2115225 - DNA, 25 bp, Homo sapien
atttctccatccggggcttatctgt

SEQ ID NO: 2115226 - DNA, 25 bp, Homo sapien
ctttccagccacagcagctttgatc

SEQ ID NO: 2115227 - DNA, 25 bp, Homo sapien
ctgcaagagaaatagcctgagtctt

SEQ ID NO: 2115228 - DNA, 25 bp, Homo sapien
gcaagagaaatagcctgagtctttc

SEQ ID NO: 2115229 - DNA, 25 bp, Homo sapien
agagaaatagcctgagtctttccag

SEQ ID NO: 2115230 - DNA, 25 bp, Homo sapien
tgagcaccaaccgtgggtctccttg

SEQ ID NO: 2115231 - DNA, 25 bp, Homo sapien
tatttgagcaccaaccgtgggtctc

SEQ ID NO: 2115232 - DNA, 25 bp, Homo sapien
ggtatttgagcaccaaccgtgggtc

SEQ ID NO: 2115233 - DNA, 25 bp, Homo sapien
tcttctctggtatttgagcaccaac

SEQ ID NO: 2115234 - DNA, 25 bp, Homo sapien
cacatagaagattttctccgaggct

SEQ ID NO: 2115235 - DNA, 25 bp, Homo sapien
agaagattttctccgaggctttcat

SEQ ID NO: 2115236 - DNA, 25 bp, Homo sapien
tagaagattttctccgaggctttca

SEQ ID NO: 2115237 - DNA, 25 bp, Homo sapien
catagaagattttctccgaggcttt

SEQ ID NO: 2115238 - DNA, 25 bp, Homo sapien
tcttcggcccgtttattacacatga

SEQ ID NO: 2115239 - DNA, 25 bp, Homo sapien
agtcttcggcccgtttattacacat

SEQ ID NO: 2115240 - DNA, 25 bp, Homo sapien
acggttagggtcattatccaaatca

SEQ ID NO: 2115241 - DNA, 25 bp, Homo sapien
tcccacggttagggtcattatccaa

SEQ ID NO: 2115242 - DNA, 25 bp, Homo sapien
agagagacttctgtcgcatcagggt

SEQ ID NO: 2115243 - DNA, 25 bp, Homo sapien
ctctagagagacttctgtcgcatca

SEQ ID NO: 2115244 - DNA, 25 bp, Homo sapien
aaggtttccaaactctagagagact

SEQ ID NO: 2115245 - DNA, 25 bp, Homo sapien
tagagagacttctgtcgcatcaggg

SEQ ID NO: 2115246 - DNA, 25 bp, Homo sapien
gggagattccctggagcctgccgaa

SEQ ID NO: 2115247 - DNA, 25 bp, Homo sapien
ttccctggagcctgccgaaagtcat

SEQ ID NO: 2115248 - DNA, 25 bp, Homo sapien
agattccctggagcctgccgaaagt

SEQ ID NO: 2115249 - DNA, 25 bp, Homo sapien
attccctggagcctgccgaaagtca

SEQ ID NO: 2115250 - DNA, 25 bp, Homo sapien
tcctttagatctgagagacactcac

SEQ ID NO: 2115251 - DNA, 25 bp, Homo sapien
tcgcatccgtggagggacaaaggtt

SEQ ID NO: 2115252 - DNA, 25 bp, Homo sapien
cagtgttcgcatccgtggagggaca

SEQ ID NO: 2115253 - DNA, 25 bp, Homo sapien
tctggtcctttagatctgagagaca

SEQ ID NO: 2115254 - DNA, 25 bp, Homo sapien
gaagccctagtgagcaacatctgaa

SEQ ID NO: 2115255 - DNA, 25 bp, Homo sapien
gtgtctcattggaagcaccagcagg

SEQ ID NO: 2115256 - DNA, 25 bp, Homo sapien
caaagtgattcctaagccatgcaag

SEQ ID NO: 2115257 - DNA, 25 bp, Homo sapien
tgttggtactatcaagccgtcggtg

SEQ ID NO: 2115258 - DNA, 25 bp, Homo sapien
gaatcttctcagaggtagttggttt

SEQ ID NO: 2115259 - DNA, 25 bp, Homo sapien
cggggggcacagctctttcccatca

SEQ ID NO: 2115260 - DNA, 25 bp, Homo sapien
gcttctggcacttcctccgaatcat

SEQ ID NO: 2115261 - DNA, 25 bp, Homo sapien
cccatcattttgtgggccagatgct

SEQ ID NO: 2115262 - DNA, 25 bp, Homo sapien
agccagagggattgttcctgaattg

SEQ ID NO: 2115263 - DNA, 25 bp, Homo sapien
cagtccatatacctgaacatcgcca

SEQ ID NO: 2115264 - DNA, 25 bp, Homo sapien
gagggattgttcctgaattgcttcc

SEQ ID NO: 2115265 - DNA, 25 bp, Homo sapien
tatacctgaacatcgccagggaagc

SEQ ID NO: 2115266 - DNA, 25 bp, Homo sapien
caccgatgagctgttccgcgtctct

SEQ ID NO: 2115267 - DNA, 25 bp, Homo sapien
cgatgagctgttccgcgtctctctt

SEQ ID NO: 2115268 - DNA, 25 bp, Homo sapien
actgctccaccgatgagctgttccg

SEQ ID NO: 2115269 - DNA, 25 bp, Homo sapien
tgctccaccgatgagctgttccgcg

SEQ ID NO: 2115270 - DNA, 25 bp, Homo sapien
ttgttttgggggtaccatgaactgc

SEQ ID NO: 2115271 - DNA, 25 bp, Homo sapien
tgaactgcacccatagaagttgaca

SEQ ID NO: 2115272 - DNA, 25 bp, Homo sapien
cacccatagaagttgacaaactgaa

SEQ ID NO: 2115273 - DNA, 25 bp, Homo sapien
ttttgggggtaccatgaactgcacc

SEQ ID NO: 2115274 - DNA, 25 bp, Homo sapien
cagctgttttctctcacgcagtctg

SEQ ID NO: 2115275 - DNA, 25 bp, Homo sapien
tctgtgggtccaggcatgttccccc

SEQ ID NO: 2115276 - DNA, 25 bp, Homo sapien
ctgttttctctcacgcagtctgtgg

SEQ ID NO: 2115277 - DNA, 25 bp, Homo sapien
tcaccagctgttttctctcacgcag

SEQ ID NO: 2115278 - DNA, 25 bp, Homo sapien
cttcctcagggtcgctgatctcttc

SEQ ID NO: 2115279 - DNA, 25 bp, Homo sapien
ctcagggtcgctgatctcttcataa

SEQ ID NO: 2115280 - DNA, 25 bp, Homo sapien
atcttcctcagggtcgctgatctct

SEQ ID NO: 2115281 - DNA, 25 bp, Homo sapien
tcgtcatcttcctcagggtcgctga

SEQ ID NO: 2115282 - DNA, 25 bp, Homo sapien
gggtccgcagccatgcccatgttcg

SEQ ID NO: 2115283 - DNA, 25 bp, Homo sapien
ccgcagccatgcccatgttcgtgaa

SEQ ID NO: 2115284 - DNA, 25 bp, Homo sapien
gtccgcagccatgcccatgttcgtg

SEQ ID NO: 2115285 - DNA, 25 bp, Homo sapien
gcagccatgcccatgttcgtgaaag

SEQ ID NO: 2115286 - DNA, 25 bp, Homo sapien
acacttgctttcacttgctatgcac

SEQ ID NO: 2115287 - DNA, 25 bp, Homo sapien
gggataaagacaaccggcacaggtc

SEQ ID NO: 2115288 - DNA, 25 bp, Homo sapien
catgggataaagacaaccggcacag

SEQ ID NO: 2115289 - DNA, 25 bp, Homo sapien
tgggataaagacaaccggcacaggt

SEQ ID NO: 2115290 - DNA, 25 bp, Homo sapien
ggataaagacaaccggcacaggtcc

SEQ ID NO: 2115291 - DNA, 25 bp, Homo sapien
tgtattcatgaagcttgggaactcc

SEQ ID NO: 2115292 - DNA, 25 bp, Homo sapien
tattcatgaagcttgggaactccat

SEQ ID NO: 2115293 - DNA, 25 bp, Homo sapien
ctgtattcatgaagcttgggaactc

SEQ ID NO: 2115294 - DNA, 25 bp, Homo sapien
gtattcatgaagcttgggaactcca

SEQ ID NO: 2115295 - DNA, 25 bp, Homo sapien
atccatcagatgcagacattcttgg

SEQ ID NO: 2115296 - DNA, 25 bp, Homo sapien
aaagagtcatggtaagccacagtca

SEQ ID NO: 2115297 - DNA, 25 bp, Homo sapien
tcagatccgcttcttggaatgggca

SEQ ID NO: 2115298 - DNA, 25 bp, Homo sapien
tgcccatcactagtgaggtccagtt

SEQ ID NO: 2115299 - DNA, 25 bp, Homo sapien
aacgtggtgacctttcatgaacacg

SEQ ID NO: 2115300 - DNA, 25 bp, Homo sapien
cgtggtgacctttcatgaacacggg

SEQ ID NO: 2115301 - DNA, 25 bp, Homo sapien
agaacgtggtgacctttcatgaaca

SEQ ID NO: 2115302 - DNA, 25 bp, Homo sapien
gagaagcagaacgtggtgacctttc

SEQ ID NO: 2115303 - DNA, 25 bp, Homo sapien
tgaggtaggacagaatcagagtgtg

SEQ ID NO: 2115304 - DNA, 25 bp, Homo sapien
gaggtaggacagaatcagagtgtgc

SEQ ID NO: 2115305 - DNA, 25 bp, Homo sapien
aggtaggacagaatcagagtgtgca

SEQ ID NO: 2115306 - DNA, 25 bp, Homo sapien
ggaaccgtggaaggcgtgtgcaggt

SEQ ID NO: 2115307 - DNA, 25 bp, Homo sapien
cacttcgaggaaccgtggaaggcgt

SEQ ID NO: 2115308 - DNA, 25 bp, Homo sapien
tcgaggaaccgtggaaggcgtgtgc

SEQ ID NO: 2115309 - DNA, 25 bp, Homo sapien
tcacttcgaggaaccgtggaaggcg

SEQ ID NO: 2115310 - DNA, 25 bp, Homo sapien
cccaggcgaagaagtcactgtggca

SEQ ID NO: 2115311 - DNA, 25 bp, Homo sapien
acccaggcgaagaagtcactgtggc

SEQ ID NO: 2115312 - DNA, 25 bp, Homo sapien
aggcgaagaagtcactgtggcatga

SEQ ID NO: 2115313 - DNA, 25 bp, Homo sapien
ccaggcgaagaagtcactgtggcat

SEQ ID NO: 2115314 - DNA, 25 bp, Homo sapien
gacgctgatatctgcagatgaagca

SEQ ID NO: 2115315 - DNA, 25 bp, Homo sapien
acagacgctgatatctgcagatgaa

SEQ ID NO: 2115316 - DNA, 25 bp, Homo sapien
cctttgtggcccatatcaaagatga

SEQ ID NO: 2115317 - DNA, 25 bp, Homo sapien
tttgtagtagcctttgtggcccata

SEQ ID NO: 2115318 - DNA, 25 bp, Homo sapien
ctgctgtgtcatagttggcaagaaa

SEQ ID NO: 2115319 - DNA, 25 bp, Homo sapien
cattccagccttgatgtcccttgag

SEQ ID NO: 2115320 - DNA, 25 bp, Homo sapien
attccagccttgatgtcccttgagg

SEQ ID NO: 2115321 - DNA, 25 bp, Homo sapien
gaatattgtgattggaaaaatgcac

SEQ ID NO: 2115322 - DNA, 25 bp, Homo sapien
cacctgagtgtataccacacttgag

SEQ ID NO: 2115323 - DNA, 25 bp, Homo sapien
aatgcacctgagtgtataccacact

SEQ ID NO: 2115324 - DNA, 25 bp, Homo sapien
tgtataccacacttgagcacttcca

SEQ ID NO: 2115325 - DNA, 25 bp, Homo sapien
gagcaagtcgtaaacatcgtcttgg

SEQ ID NO: 2115326 - DNA, 25 bp, Homo sapien
agcaagtcgtaaacatcgtcttggt

SEQ ID NO: 2115327 - DNA, 25 bp, Homo sapien
tgagcaagtcgtaaacatcgtcttg

SEQ ID NO: 2115328 - DNA, 25 bp, Homo sapien
tctgaccaggtgtatgatcctgact

SEQ ID NO: 2115329 - DNA, 25 bp, Homo sapien
tcctgactttcagttggtggttctt

SEQ ID NO: 2115330 - DNA, 25 bp, Homo sapien
ctcttctgaccaggtgtatgatcct

SEQ ID NO: 2115331 - DNA, 25 bp, Homo sapien
cttgttgaggctctggcacactggg

SEQ ID NO: 2115332 - DNA, 25 bp, Homo sapien
ccaaaccagaatgataaataaggag

SEQ ID NO: 2115333 - DNA, 25 bp, Homo sapien
tcctcagtgttgtgcaataaaagcc

SEQ ID NO: 2115334 - DNA, 25 bp, Homo sapien
taccaaggatatggactggagcagc

SEQ ID NO: 2115335 - DNA, 25 bp, Homo sapien
taaggagatgatcctattcttttcc

SEQ ID NO: 2115336 - DNA, 25 bp, Homo sapien
atcaggactatctccgcattcatcc

SEQ ID NO: 2115337 - DNA, 25 bp, Homo sapien
aatcttcccctggacatcaggacta

SEQ ID NO: 2115338 - DNA, 25 bp, Homo sapien
cttcccctggacatcaggactatct

SEQ ID NO: 2115339 - DNA, 25 bp, Homo sapien
catcaggactatctccgcattcatc

SEQ ID NO: 2115340 - DNA, 25 bp, Homo sapien
gtctgaatgtatggtctgaatgtcc

SEQ ID NO: 2115341 - DNA, 25 bp, Homo sapien
tatggtctgaatgtccagtaggttc

SEQ ID NO: 2115342 - DNA, 25 bp, Homo sapien
cactgcgggaatggtctgaatgtat

SEQ ID NO: 2115343 - DNA, 25 bp, Homo sapien
tcaaggcttcactgcgggaatggtc

SEQ ID NO: 2115344 - DNA, 25 bp, Homo sapien
aaagtcaaatatctcggataaatcc

SEQ ID NO: 2115345 - DNA, 25 bp, Homo sapien
agtcaaatatctcggataaatccag

SEQ ID NO: 2115346 - DNA, 25 bp, Homo sapien
ctcggataaatccagtttgcattct

SEQ ID NO: 2115347 - DNA, 25 bp, Homo sapien
aatatctcggataaatccagtttgc

SEQ ID NO: 2115348 - DNA, 25 bp, Homo sapien
tggtcctgatgttcaggggacaatt

SEQ ID NO: 2115349 - DNA, 25 bp, Homo sapien
agatggtcctgatgttcaggggaca

SEQ ID NO: 2115350 - DNA, 25 bp, Homo sapien
atggtcctgatgttcaggggacaat

SEQ ID NO: 2115351 - DNA, 25 bp, Homo sapien
gatggtcctgatgttcaggggacaa

SEQ ID NO: 2115352 - DNA, 25 bp, Homo sapien
tcaggaagaggcgtctggattcctg

SEQ ID NO: 2115353 - DNA, 25 bp, Homo sapien
aggaagaggcgtctggattcctgtt

SEQ ID NO: 2115354 - DNA, 25 bp, Homo sapien
caggaagaggcgtctggattcctgt

SEQ ID NO: 2115355 - DNA, 25 bp, Homo sapien
tctaaatgcctgattctgctttaca

SEQ ID NO: 2115356 - DNA, 25 bp, Homo sapien
cgagggtatccatgcttcttgcagg

SEQ ID NO: 2115357 - DNA, 25 bp, Homo sapien
ttgtgcaaacggaaggagcccagac

SEQ ID NO: 2115358 - DNA, 25 bp, Homo sapien
tgctttacaagagacagcacacgag

SEQ ID NO: 2115359 - DNA, 25 bp, Homo sapien
gggtgggtcagacatgcgtcattac

SEQ ID NO: 2115360 - DNA, 25 bp, Homo sapien
agggtgggtcagacatgcgtcatta

SEQ ID NO: 2115361 - DNA, 25 bp, Homo sapien
taagactgtggcaataagacaccaa

SEQ ID NO: 2115362 - DNA, 25 bp, Homo sapien
gagatcttaagactgtggcaataag

SEQ ID NO: 2115363 - DNA, 25 bp, Homo sapien
acaggatcccgtccttgtcaccgtg

SEQ ID NO: 2115364 - DNA, 25 bp, Homo sapien
ctggcctgacaggatcccgtccttg

SEQ ID NO: 2115365 - DNA, 25 bp, Homo sapien
gctggtgtgctagtgtccttgtggc

SEQ ID NO: 2115366 - DNA, 25 bp, Homo sapien
gccatgttggaacgactcagcctct

SEQ ID NO: 2115367 - DNA, 25 bp, Homo sapien
actattgattgggttcaggcgtcct

SEQ ID NO: 2115368 - DNA, 25 bp, Homo sapien
tcagagtaccctagggcaagtgcat

SEQ ID NO: 2115369 - DNA, 25 bp, Homo sapien
caggcgtcctaatcgagtatgtggt

SEQ ID NO: 2115370 - DNA, 25 bp, Homo sapien
gacatgaacacctggatgaacgcgt

SEQ ID NO: 2115371 - DNA, 25 bp, Homo sapien
catgccgaatggtggtgatacccaa

SEQ ID NO: 2115372 - DNA, 25 bp, Homo sapien
agagtgttagagatcctgggtccca

SEQ ID NO: 2115373 - DNA, 25 bp, Homo sapien
caagccactgtatgggcaagtcgag

SEQ ID NO: 2115374 - DNA, 25 bp, Homo sapien
taagtcgttgagtcccatagcaagt

SEQ ID NO: 2115375 - DNA, 25 bp, Homo sapien
acacatgtggctcgattctctccct

SEQ ID NO: 2115376 - DNA, 25 bp, Homo sapien
tacagatttcttccgccaactgaca

SEQ ID NO: 2115377 - DNA, 25 bp, Homo sapien
gacttcatccccttcgtgctgtgca

SEQ ID NO: 2115378 - DNA, 25 bp, Homo sapien
aatccaggtgtctgtgacttcatcc

SEQ ID NO: 2115379 - DNA, 25 bp, Homo sapien
tttaggaggacagacttcccgtcta

SEQ ID NO: 2115380 - DNA, 25 bp, Homo sapien
tctctgtgcctagctacttttagga

SEQ ID NO: 2115381 - DNA, 25 bp, Homo sapien
ctgtgcctagctacttttaggagga

SEQ ID NO: 2115382 - DNA, 25 bp, Homo sapien
gtgaatcatttgtgataccctacct

SEQ ID NO: 2115383 - DNA, 25 bp, Homo sapien
aggcgtggaggtcatcccttccgga

SEQ ID NO: 2115384 - DNA, 25 bp, Homo sapien
ggcgttcccggagcggcttctctga

SEQ ID NO: 2115385 - DNA, 25 bp, Homo sapien
gactgccgaatgcttccggaggcca

SEQ ID NO: 2115386 - DNA, 25 bp, Homo sapien
ggcttgtggactgccgaatgcttcc

SEQ ID NO: 2115387 - DNA, 25 bp, Homo sapien
ccggagccggaagacggagcggttg

SEQ ID NO: 2115388 - DNA, 25 bp, Homo sapien
ggagcggttgggtggcttctcgcga

SEQ ID NO: 2115389 - DNA, 25 bp, Homo sapien
aagacggagcggttgggtggcttct

SEQ ID NO: 2115390 - DNA, 25 bp, Homo sapien
ttgggtggcttctcgcgacccacgc

SEQ ID NO: 2115391 - DNA, 25 bp, Homo sapien
acagggatgcgacgccgctgagaaa

SEQ ID NO: 2115392 - DNA, 25 bp, Homo sapien
atgcgacgccgctgagaaactgaac

SEQ ID NO: 2115393 - DNA, 25 bp, Homo sapien
ggatgcgacgccgctgagaaactga

SEQ ID NO: 2115394 - DNA, 25 bp, Homo sapien
tcacagggatgcgacgccgctgaga

SEQ ID NO: 2115395 - DNA, 25 bp, Homo sapien
ctagaggcgccgcagcgcggaaggg

SEQ ID NO: 2115396 - DNA, 25 bp, Homo sapien
ggggcgccggcgaggatgtgctcac

SEQ ID NO: 2115397 - DNA, 25 bp, Homo sapien
tgaagggttaagaccatcgagagga

SEQ ID NO: 2115398 - DNA, 25 bp, Homo sapien
ggttaagaccatcgagaggagccgc

SEQ ID NO: 2115399 - DNA, 25 bp, Homo sapien
gctcgtaattgaagggttaagacca

SEQ ID NO: 2115400 - DNA, 25 bp, Homo sapien
taattgaagggttaagaccatcgag

SEQ ID NO: 2115401 - DNA, 25 bp, Homo sapien
aacgcatgtctagtcgtatttcaca

SEQ ID NO: 2115402 - DNA, 25 bp, Homo sapien
tttcacattacgaccgtccctctgt

SEQ ID NO: 2115403 - DNA, 25 bp, Homo sapien
aatcacaccgcccattaaacgcatg

SEQ ID NO: 2115404 - DNA, 25 bp, Homo sapien
cgtatttcacattacgaccgtccct

SEQ ID NO: 2115405 - DNA, 25 bp, Homo sapien
gacacactgcccgttttataggaag

SEQ ID NO: 2115406 - DNA, 25 bp, Homo sapien
caaagtgcttccctatgaaaagtat

SEQ ID NO: 2115407 - DNA, 25 bp, Homo sapien
gataagctcagccaaccaaggccat

SEQ ID NO: 2115408 - DNA, 25 bp, Homo sapien
tccactgctagtgccctgataagct

SEQ ID NO: 2115409 - DNA, 25 bp, Homo sapien
ggctacacacggtatagatttcgtc

SEQ ID NO: 2115410 - DNA, 25 bp, Homo sapien
gaacctgaatttcccgtgcccggca

SEQ ID NO: 2115411 - DNA, 25 bp, Homo sapien
ttagtttcatattctcataagcggc

SEQ ID NO: 2115412 - DNA, 25 bp, Homo sapien
agatttcgtcttagcacatcaggcc

SEQ ID NO: 2115413 - DNA, 25 bp, Homo sapien
tctcccagggcatgctatgatatat

SEQ ID NO: 2115414 - DNA, 25 bp, Homo sapien
tattgtcacccgttttaattcgcat

SEQ ID NO: 2115415 - DNA, 25 bp, Homo sapien
gacaactatggcaggcatgagacgg

SEQ ID NO: 2115416 - DNA, 25 bp, Homo sapien
tcaccatagcccaggtggtcaggaa

SEQ ID NO: 2115417 - DNA, 25 bp, Homo sapien
aaagaaaataacctcactggccagg

SEQ ID NO: 2115418 - DNA, 25 bp, Homo sapien
tccattcagcggtgccttcggtgaa

SEQ ID NO: 2115419 - DNA, 25 bp, Homo sapien
gatgctgcacagctatggtcccagc

SEQ ID NO: 2115420 - DNA, 25 bp, Homo sapien
caaggacgtgtcttaatctgaggaa

SEQ ID NO: 2115421 - DNA, 25 bp, Homo sapien
aggcagtcaggtcgctgggttcaca

SEQ ID NO: 2115422 - DNA, 25 bp, Homo sapien
ggccgagtgactgctacacctttca

SEQ ID NO: 2115423 - DNA, 25 bp, Homo sapien
gctgggttcacaaggtcgatgctgt

SEQ ID NO: 2115424 - DNA, 25 bp, Homo sapien
tgctgtgggtgtaggccgagtgact

SEQ ID NO: 2115425 - DNA, 25 bp, Homo sapien
caaggagcaagtccgctctggcgag

SEQ ID NO: 2115426 - DNA, 25 bp, Homo sapien
ccagcaatgcccactttcaagaaag

SEQ ID NO: 2115427 - DNA, 25 bp, Homo sapien
cacagaaaagcagcgggagtacaac

SEQ ID NO: 2115428 - DNA, 25 bp, Homo sapien
ggtagtcagtaaagccagcaatgcc

SEQ ID NO: 2115429 - DNA, 25 bp, Homo sapien
aatgctgcaccaaacgcacctctca

SEQ ID NO: 2115430 - DNA, 25 bp, Homo sapien
tcctggccagttctgttcccatgcc

SEQ ID NO: 2115431 - DNA, 25 bp, Homo sapien
ctgcaccaaacgcacctctcacact

SEQ ID NO: 2115432 - DNA, 25 bp, Homo sapien
gttcccatgccagaaatgctgcacc

SEQ ID NO: 2115433 - DNA, 25 bp, Homo sapien
caggccctcgggtccagaaaaggag

SEQ ID NO: 2115434 - DNA, 25 bp, Homo sapien
tcagacaccaagaaggtggcgagga

SEQ ID NO: 2115435 - DNA, 25 bp, Homo sapien
ctggaagctccgccaggccctcggg

SEQ ID NO: 2115436 - DNA, 25 bp, Homo sapien
gtggcgaggaatgtgtgcgggcaga

SEQ ID NO: 2115437 - DNA, 25 bp, Homo sapien
ccttcctgggaagtctctgcagctg

SEQ ID NO: 2115438 - DNA, 25 bp, Homo sapien
ctgttctgagtacgaaggctgagag

SEQ ID NO: 2115439 - DNA, 25 bp, Homo sapien
gatttggaaggcgatgctggattcc

SEQ ID NO: 2115440 - DNA, 25 bp, Homo sapien
gattccgtttctggagtggatccat

SEQ ID NO: 2115441 - DNA, 25 bp, Homo sapien
agcctctcccaccgccgctcttcca

SEQ ID NO: 2115442 - DNA, 25 bp, Homo sapien
gaccggggctcaggttactgaggcc

SEQ ID NO: 2115443 - DNA, 25 bp, Homo sapien
atgccgcaggaatgctttcttcctc

SEQ ID NO: 2115444 - DNA, 25 bp, Homo sapien
tgcctaggctgagagtcaagccact

SEQ ID NO: 2115445 - DNA, 25 bp, Homo sapien
gggccatgtgatcgcggtgtctcct

SEQ ID NO: 2115446 - DNA, 25 bp, Homo sapien
gatcccagaaagattcggcctgtgg

SEQ ID NO: 2115447 - DNA, 25 bp, Homo sapien
ggctctggcagtatcgacattcaca

SEQ ID NO: 2115448 - DNA, 25 bp, Homo sapien
tacgcagcgtcccttgccaaggaat

SEQ ID NO: 2115449 - DNA, 25 bp, Homo sapien
tgacaggcacgaaacatgaggacct

SEQ ID NO: 2115450 - DNA, 25 bp, Homo sapien
tcacagccatccgagaatgacaggc

SEQ ID NO: 2115451 - DNA, 25 bp, Homo sapien
tcctcgggtcagtcaagcatcatgc

SEQ ID NO: 2115452 - DNA, 25 bp, Homo sapien
gtgatctcttactgacagcaggaag

SEQ ID NO: 2115453 - DNA, 25 bp, Homo sapien
gatcccgggtgggaaagcgacaaca

SEQ ID NO: 2115454 - DNA, 25 bp, Homo sapien
cgacaacatgcatcacaggagccat

SEQ ID NO: 2115455 - DNA, 25 bp, Homo sapien
gatctcttactgacagcaggaaggg

SEQ ID NO: 2115456 - DNA, 25 bp, Homo sapien
gcacattgcatttcaacaggcctag

SEQ ID NO: 2115457 - DNA, 25 bp, Homo sapien
tggtgcaaaagcacaggacagcgac

SEQ ID NO: 2115458 - DNA, 25 bp, Homo sapien
caaggcattcacactacacagacat

SEQ ID NO: 2115459 - DNA, 25 bp, Homo sapien
tcagaggcagtcaactcaatggtgc

SEQ ID NO: 2115460 - DNA, 25 bp, Homo sapien
gtattgatgatgaggaaccccgtca

SEQ ID NO: 2115461 - DNA, 25 bp, Homo sapien
cctgtaagggagactactactcgac

SEQ ID NO: 2115462 - DNA, 25 bp, Homo sapien
tttacctgcccattcttgaaactgg

SEQ ID NO: 2115463 - DNA, 25 bp, Homo sapien
acacaaatagtacagcggtgaacca

SEQ ID NO: 2115464 - DNA, 25 bp, Homo sapien
tgcttccacgtctcctgtgcacagg

SEQ ID NO: 2115465 - DNA, 25 bp, Homo sapien
cgtgggcggcggactctgcttccac

SEQ ID NO: 2115466 - DNA, 25 bp, Homo sapien
tgggcggcggactctgcttccacgt

SEQ ID NO: 2115467 - DNA, 25 bp, Homo sapien
ggcggcggactctgcttccacgtct

SEQ ID NO: 2115468 - DNA, 25 bp, Homo sapien
ttctgtcggcaggagatgtgtagac

SEQ ID NO: 2115469 - DNA, 25 bp, Homo sapien
tgtcggcaggagatgtgtagacttt

SEQ ID NO: 2115470 - DNA, 25 bp, Homo sapien
ctgtcggcaggagatgtgtagactt

SEQ ID NO: 2115471 - DNA, 25 bp, Homo sapien
tctgtcggcaggagatgtgtagact

SEQ ID NO: 2115472 - DNA, 25 bp, Homo sapien
aaatggaaaccctgatgattgctga

SEQ ID NO: 2115473 - DNA, 25 bp, Homo sapien
acagtcgacgtagcccagaagggag

SEQ ID NO: 2115474 - DNA, 25 bp, Homo sapien
atgactgtcactggcagcatggacc

SEQ ID NO: 2115475 - DNA, 25 bp, Homo sapien
gactgagaaggtccgcagagagcat

SEQ ID NO: 2115476 - DNA, 25 bp, Homo sapien
tgaattgtcttgatctagggcagtg

SEQ ID NO: 2115477 - DNA, 25 bp, Homo sapien
gaattgtcttgatctagggcagtgt

SEQ ID NO: 2115478 - DNA, 25 bp, Homo sapien
gtgaattgtcttgatctagggcagt

SEQ ID NO: 2115479 - DNA, 25 bp, Homo sapien
aattgtcttgatctagggcagtgtc

SEQ ID NO: 2115480 - DNA, 25 bp, Homo sapien
caagactgctgtttggcctctccag

SEQ ID NO: 2115481 - DNA, 25 bp, Homo sapien
atcagatgggcaatggagataccaa

SEQ ID NO: 2115482 - DNA, 25 bp, Homo sapien
tgtaaggtgtttcctgttagccaaa

SEQ ID NO: 2115483 - DNA, 25 bp, Homo sapien
atttgagtagcagatgatgtcccca

SEQ ID NO: 2115484 - DNA, 25 bp, Homo sapien
tgttgaagggcagcacattctgtgc

SEQ ID NO: 2115485 - DNA, 25 bp, Homo sapien
gaactccaggcagtttttgttgaag

SEQ ID NO: 2115486 - DNA, 25 bp, Homo sapien
gaagggcagcacattctgtgccagc

SEQ ID NO: 2115487 - DNA, 25 bp, Homo sapien
gcagtttttgttgaagggcagcaca

SEQ ID NO: 2115488 - DNA, 25 bp, Homo sapien
agcccaggtgccgtcgggaactgaa

SEQ ID NO: 2115489 - DNA, 25 bp, Homo sapien
cattgcaaagctccttaaactctct

SEQ ID NO: 2115490 - DNA, 25 bp, Homo sapien
gcagtctccgggtgtctacctgggt

SEQ ID NO: 2115491 - DNA, 25 bp, Homo sapien
ctttgtcaaggaaactcgtcattgc

SEQ ID NO: 2115492 - DNA, 25 bp, Homo sapien
ttgcagcagagtcacggggtgatct

SEQ ID NO: 2115493 - DNA, 25 bp, Homo sapien
agccaacctggcagtattcctaggt

SEQ ID NO: 2115494 - DNA, 25 bp, Homo sapien
tggctttttccagaggcttgcagca

SEQ ID NO: 2115495 - DNA, 25 bp, Homo sapien
aacctggcagtattcctaggttctg

SEQ ID NO: 2115496 - DNA, 25 bp, Homo sapien
cctgtgggggccacccaagccaggg

SEQ ID NO: 2115497 - DNA, 25 bp, Homo sapien
ttcacgggagactctttgctcatct

SEQ ID NO: 2115498 - DNA, 25 bp, Homo sapien
agagtctctgccaatacaaagcctt

SEQ ID NO: 2115499 - DNA, 25 bp, Homo sapien
gtagagagtctctgccaatacaaag

SEQ ID NO: 2115500 - DNA, 25 bp, Homo sapien
tatgtcccgatttagggatttggag

SEQ ID NO: 2115501 - DNA, 25 bp, Homo sapien
gtctctaaatgatgggctcctactg

SEQ ID NO: 2115502 - DNA, 25 bp, Homo sapien
ctgagttctcggaggagatgagcat

SEQ ID NO: 2115503 - DNA, 25 bp, Homo sapien
gatttggaggttatctgctgagttc

SEQ ID NO: 2115504 - DNA, 25 bp, Homo sapien
agttgcagaggtagccccgctccgg

SEQ ID NO: 2115505 - DNA, 25 bp, Homo sapien
ccgctccgggggattgagcgattca

SEQ ID NO: 2115506 - DNA, 25 bp, Homo sapien
ccccgctccgggggattgagcgatt

SEQ ID NO: 2115507 - DNA, 25 bp, Homo sapien
ggagttgcagaggtagccccgctcc

SEQ ID NO: 2115508 - DNA, 25 bp, Homo sapien
ctgtctcccttctgggctacgtcga

SEQ ID NO: 2115509 - DNA, 25 bp, Homo sapien
cctgtctcccttctgggctacgtcg

SEQ ID NO: 2115510 - DNA, 25 bp, Homo sapien
gatggagacccgaagggactcagac

SEQ ID NO: 2115511 - DNA, 25 bp, Homo sapien
agaggctgctcaagcagtggttaga

SEQ ID NO: 2115512 - DNA, 25 bp, Homo sapien
agcagtggttagaggaaaactgaga

SEQ ID NO: 2115513 - DNA, 25 bp, Homo sapien
gagccgccgtgttggcagcgcctgg

SEQ ID NO: 2115514 - DNA, 25 bp, Homo sapien
taagctggtgagatgtatgatctca

SEQ ID NO: 2115515 - DNA, 25 bp, Homo sapien
ttatcaccttgcgttgcagtctggg

SEQ ID NO: 2115516 - DNA, 25 bp, Homo sapien
ggttgagtaagatgaataattctgt

SEQ ID NO: 2115517 - DNA, 25 bp, Homo sapien
tagatggcattaatattctaagctg

SEQ ID NO: 2115518 - DNA, 25 bp, Homo sapien
tctgtgtactcacctgctgggagac

SEQ ID NO: 2115519 - DNA, 25 bp, Homo sapien
tacctggaggaatgtgacctggcca

SEQ ID NO: 2115520 - DNA, 25 bp, Homo sapien
ttcaccgaaggcaccgctgaatgga

SEQ ID NO: 2115521 - DNA, 25 bp, Homo sapien
tatatatcatagcatgccctgggag

SEQ ID NO: 2115522 - DNA, 25 bp, Homo sapien
gcacattcccgagctgttggtacag

SEQ ID NO: 2115523 - DNA, 25 bp, Homo sapien
ggtagggtatcacaaatgattcact

SEQ ID NO: 2115524 - DNA, 25 bp, Homo sapien
gattcacttagacgggaagtctgtc

SEQ ID NO: 2115525 - DNA, 25 bp, Homo sapien
tattcttggatgtgcttggactcag

SEQ ID NO: 2115526 - DNA, 25 bp, Homo sapien
gacagacgcgttcatccaggtgttc

SEQ ID NO: 2115527 - DNA, 25 bp, Homo sapien
cttgacagacgcgttcatccaggtg

SEQ ID NO: 2115528 - DNA, 25 bp, Homo sapien
ccagacttgacagacgcgttcatcc

SEQ ID NO: 2115529 - DNA, 25 bp, Homo sapien
agacttgacagacgcgttcatccag

SEQ ID NO: 2115530 - DNA, 25 bp, Homo sapien
gagcaaatagccctgccctagggct

SEQ ID NO: 2115531 - DNA, 25 bp, Homo sapien
catgagcaaatagccctgccctagg

SEQ ID NO: 2115532 - DNA, 25 bp, Homo sapien
tccatgagcaaatagccctgcccta

SEQ ID NO: 2115533 - DNA, 25 bp, Homo sapien
gcaaatagccctgccctagggctgg

SEQ ID NO: 2115534 - DNA, 25 bp, Homo sapien
tcgtcaggctgccagggacaggtgt

SEQ ID NO: 2115535 - DNA, 25 bp, Homo sapien
ctaggtcgtcaggctgccagggaca

SEQ ID NO: 2115536 - DNA, 25 bp, Homo sapien
ggtcgtcaggctgccagggacaggt

SEQ ID NO: 2115537 - DNA, 25 bp, Homo sapien
taggtcgtcaggctgccagggacag

SEQ ID NO: 2115538 - DNA, 25 bp, Homo sapien
agcacagtcctttgccgaggccttc

SEQ ID NO: 2115539 - DNA, 25 bp, Homo sapien
tgaccacctaacatgaatcatgctt

SEQ ID NO: 2115540 - DNA, 25 bp, Homo sapien
gactgtcaactctacttctatcacc

SEQ ID NO: 2115541 - DNA, 25 bp, Homo sapien
atcatgcttttctcacccaactccg

SEQ ID NO: 2115542 - DNA, 25 bp, Homo sapien
tggctgaccacctaacatgaatcat

SEQ ID NO: 2115543 - DNA, 25 bp, Homo sapien
gacagatggatcttagcctccaaga

SEQ ID NO: 2115544 - DNA, 25 bp, Homo sapien
ggtagacagatggatcttagcctcc

SEQ ID NO: 2115545 - DNA, 25 bp, Homo sapien
tagacagatggatcttagcctccaa

SEQ ID NO: 2115546 - DNA, 25 bp, Homo sapien
cagatggatcttagcctccaagaga

SEQ ID NO: 2115547 - DNA, 25 bp, Homo sapien
ttgacatgtggcactcattgacagg

SEQ ID NO: 2115548 - DNA, 25 bp, Homo sapien
ggagcaggccttgcaattacctgag

SEQ ID NO: 2115549 - DNA, 25 bp, Homo sapien
tccctggagaggtgatgactgagca

SEQ ID NO: 2115550 - DNA, 25 bp, Homo sapien
atggtaaagaaaggctcatccaagg

SEQ ID NO: 2115551 - DNA, 25 bp, Homo sapien
cagcccggaatggtccatgggtatc

SEQ ID NO: 2115552 - DNA, 25 bp, Homo sapien
aggggcgcgcgggatggaacagttc

SEQ ID NO: 2115553 - DNA, 25 bp, Homo sapien
ttgtttgcaccaccaaggggcgcgc

SEQ ID NO: 2115554 - DNA, 25 bp, Homo sapien
gaccagcccggaatggtccatgggt

SEQ ID NO: 2115555 - DNA, 25 bp, Homo sapien
cactcgtagagccgggtccctgggt

SEQ ID NO: 2115556 - DNA, 25 bp, Homo sapien
ccctgggtcttcgcgctcgcgcacg

SEQ ID NO: 2115557 - DNA, 25 bp, Homo sapien
tgcactcgtagagccgggtccctgg

SEQ ID NO: 2115558 - DNA, 25 bp, Homo sapien
agagtacagcgggatgcactcgtag

SEQ ID NO: 2115559 - DNA, 25 bp, Homo sapien
gacttctcggagacccctctagtcc

SEQ ID NO: 2115560 - DNA, 25 bp, Homo sapien
caggcccaagctgacacccattctc

SEQ ID NO: 2115561 - DNA, 25 bp, Homo sapien
ctagtcccatttttggccacgcccg

SEQ ID NO: 2115562 - DNA, 25 bp, Homo sapien
ctttcgacagtagggcgggcgcggc

SEQ ID NO: 2115563 - DNA, 25 bp, Homo sapien
caccattatgcgagataccgtaggg

SEQ ID NO: 2115564 - DNA, 25 bp, Homo sapien
ggcgtggaggatgtaacataccatt

SEQ ID NO: 2115565 - DNA, 25 bp, Homo sapien
ttgcgggtaccggaaatgaacacac

SEQ ID NO: 2115566 - DNA, 25 bp, Homo sapien
tgaacacaccattatgcgagatacc

SEQ ID NO: 2115567 - DNA, 25 bp, Homo sapien
tgtgaggatcgaatttctttcaggg

SEQ ID NO: 2115568 - DNA, 25 bp, Homo sapien
aaatgtctagtctttcttcagcatg

SEQ ID NO: 2115569 - DNA, 25 bp, Homo sapien
gacctttatgacagtggctaccact

SEQ ID NO: 2115570 - DNA, 25 bp, Homo sapien
tcagctttggctacctttatgacct

SEQ ID NO: 2115571 - DNA, 25 bp, Homo sapien
tctgttgccgtggatacagccgggc

SEQ ID NO: 2115572 - DNA, 25 bp, Homo sapien
acagcccgggccacattgtgggacc

SEQ ID NO: 2115573 - DNA, 25 bp, Homo sapien
tgggaccctcagtgatctggcggcc

SEQ ID NO: 2115574 - DNA, 25 bp, Homo sapien
gctcaagctgtctcacccaggtaaa

SEQ ID NO: 2115575 - DNA, 25 bp, Homo sapien
gagaccttgcagatccaacttacat

SEQ ID NO: 2115576 - DNA, 25 bp, Homo sapien
atgtgcacacccaatccagctgata

SEQ ID NO: 2115577 - DNA, 25 bp, Homo sapien
gcagaactaggattcgaacacaaag

SEQ ID NO: 2115578 - DNA, 25 bp, Homo sapien
ggtataaatggccacacgcacctag

SEQ ID NO: 2115579 - DNA, 25 bp, Homo sapien
taatcttatacagctaaattgctga

SEQ ID NO: 2115580 - DNA, 25 bp, Homo sapien
tggatctttaatcttatacagctaa

SEQ ID NO: 2115581 - DNA, 25 bp, Homo sapien
tacagctaaattgctgattatatat

SEQ ID NO: 2115582 - DNA, 25 bp, Homo sapien
aagataaagtaatggatctttaatc

SEQ ID NO: 2115583 - DNA, 25 bp, Homo sapien
ttttacctcttgtgtatatgtagag

SEQ ID NO: 2115584 - DNA, 25 bp, Homo sapien
tatatgtagagagtttacagggaaa

SEQ ID NO: 2115585 - DNA, 25 bp, Homo sapien
ccactgcgaccggccgtcatttttt

SEQ ID NO: 2115586 - DNA, 25 bp, Homo sapien
tcactttttacctcttgtgtatatg

SEQ ID NO: 2115587 - DNA, 25 bp, Homo sapien
ggagtcaaggaagaatgctacggct

SEQ ID NO: 2115588 - DNA, 25 bp, Homo sapien
gtttctatcataagaagggttcctg

SEQ ID NO: 2115589 - DNA, 25 bp, Homo sapien
tacggcttgaatgtgtcctccgaag

SEQ ID NO: 2115590 - DNA, 25 bp, Homo sapien
tttcataggctaacatctggagaga

SEQ ID NO: 2115591 - DNA, 25 bp, Homo sapien
agaggtggagattgcagtgagtgag

SEQ ID NO: 2115592 - DNA, 25 bp, Homo sapien
gctcacgcctgtaatcctaacactg

SEQ ID NO: 2115593 - DNA, 25 bp, Homo sapien
gtggagattgcagtgagtgagctga

SEQ ID NO: 2115594 - DNA, 25 bp, Homo sapien
gagaaaaggtcggctgggcacggtg

SEQ ID NO: 2115595 - DNA, 25 bp, Homo sapien
agactgtggaacagcccgcagctgg

SEQ ID NO: 2115596 - DNA, 25 bp, Homo sapien
tttaatggcaccctgaaatctcaga

SEQ ID NO: 2115597 - DNA, 25 bp, Homo sapien
gggagagagatccttacatacagag

SEQ ID NO: 2115598 - DNA, 25 bp, Homo sapien
ggccaaactagtacttagaaagtgc

SEQ ID NO: 2115599 - DNA, 25 bp, Homo sapien
ggctactgccaaccctagggggtca

SEQ ID NO: 2115600 - DNA, 25 bp, Homo sapien
cagccagtccggtactcgatgggcc

SEQ ID NO: 2115601 - DNA, 25 bp, Homo sapien
actgccaaccctagggggtcagcca

SEQ ID NO: 2115602 - DNA, 25 bp, Homo sapien
ccagtccggtactcgatgggcccgg

SEQ ID NO: 2115603 - DNA, 25 bp, Homo sapien
cagacaattgggttgacggcagcct

SEQ ID NO: 2115604 - DNA, 25 bp, Homo sapien
gatactcgaagaggagcagcttgcc

SEQ ID NO: 2115605 - DNA, 25 bp, Homo sapien
tgtgatcgcgtagaacatgcggccc

SEQ ID NO: 2115606 - DNA, 25 bp, Homo sapien
cgaataaacttgtaggtgcccacgt

SEQ ID NO: 2115607 - DNA, 25 bp, Homo sapien
gcagggggcgtgagtcctcaggcac

SEQ ID NO: 2115608 - DNA, 25 bp, Homo sapien
tcacatgacacagtagggttctctg

SEQ ID NO: 2115609 - DNA, 25 bp, Homo sapien
gtagggttctctgggagccggggca

SEQ ID NO: 2115610 - DNA, 25 bp, Homo sapien
acacagtagggttctctgggagccg

SEQ ID NO: 2115611 - DNA, 25 bp, Homo sapien
cagtagggttctctgggagccgggg

SEQ ID NO: 2115612 - DNA, 25 bp, Homo sapien
ttgctgttggccccatcacggtggc

SEQ ID NO: 2115613 - DNA, 25 bp, Homo sapien
tgcctagattacaggtggttcgagg

SEQ ID NO: 2115614 - DNA, 25 bp, Homo sapien
gacaggccccacaaaactaaatatg

SEQ ID NO: 2115615 - DNA, 25 bp, Homo sapien
aggaggactcctgtatgggccccta

SEQ ID NO: 2115616 - DNA, 25 bp, Homo sapien
taagaccagggcaaggagtgccagc

SEQ ID NO: 2115617 - DNA, 25 bp, Homo sapien
tcactatcgctgagagaacaggctc

SEQ ID NO: 2115618 - DNA, 25 bp, Homo sapien
tcaaagtaagcccagagtggactcc

SEQ ID NO: 2115619 - DNA, 25 bp, Homo sapien
tagggtgaacccgagagacaattct

SEQ ID NO: 2115620 - DNA, 25 bp, Homo sapien
agctgcatacagtggcccctaggaa

SEQ ID NO: 2115621 - DNA, 25 bp, Homo sapien
cattttacgtgtgtgcaccgggcaa

SEQ ID NO: 2115622 - DNA, 25 bp, Homo sapien
taaattaactgtctagggagcaggc

SEQ ID NO: 2115623 - DNA, 25 bp, Homo sapien
tgaggttttcaagttccctggcggc

SEQ ID NO: 2115624 - DNA, 25 bp, Homo sapien
gcagagctgaggagactcacgcaac

SEQ ID NO: 2115625 - DNA, 25 bp, Homo sapien
gcgaccgcgttcgtacagctcaggg

SEQ ID NO: 2115626 - DNA, 25 bp, Homo sapien
ttcgcttttagccgcgtcgctgccg

SEQ ID NO: 2115627 - DNA, 25 bp, Homo sapien
tagtcgcaccggtaagcagagctga

SEQ ID NO: 2115628 - DNA, 25 bp, Homo sapien
ggcgggtcgcgctgtggagactcgg

SEQ ID NO: 2115629 - DNA, 25 bp, Homo sapien
gggtcttggccggaggcccctcatc

SEQ ID NO: 2115630 - DNA, 25 bp, Homo sapien
gtcttggccggaggcccctcatctg

SEQ ID NO: 2115631 - DNA, 25 bp, Homo sapien
gaggcccctcatctgggcggtccat

SEQ ID NO: 2115632 - DNA, 25 bp, Homo sapien
atcggccagcacctgtgccgcctcc

SEQ ID NO: 2115633 - DNA, 25 bp, Homo sapien
gccagcacctgtgccgcctccgttt

SEQ ID NO: 2115634 - DNA, 25 bp, Homo sapien
tccgtttcctcctggagcctcgggc

SEQ ID NO: 2115635 - DNA, 25 bp, Homo sapien
ggccagcacctgtgccgcctccgtt

SEQ ID NO: 2115636 - DNA, 25 bp, Homo sapien
cccgactcgatggtagaatcccagc

SEQ ID NO: 2115637 - DNA, 25 bp, Homo sapien
ggacactcagcaccgagcgtgaagt

SEQ ID NO: 2115638 - DNA, 25 bp, Homo sapien
cccctcctcgagaatgacataggga

SEQ ID NO: 2115639 - DNA, 25 bp, Homo sapien
gagcgtgaagtatgcgcggatcccc

SEQ ID NO: 2115640 - DNA, 25 bp, Homo sapien
tatgatgatcgcctcttccttgctc

SEQ ID NO: 2115641 - DNA, 25 bp, Homo sapien
tgctcgactgtacaacctgaaaatc

SEQ ID NO: 2115642 - DNA, 25 bp, Homo sapien
gctcttcgggtcaactaacctctgg

SEQ ID NO: 2115643 - DNA, 25 bp, Homo sapien
actgcgctacaggtttctagggccc

SEQ ID NO: 2115644 - DNA, 25 bp, Homo sapien
ccgccgcctcctgctgctcctcata

SEQ ID NO: 2115645 - DNA, 25 bp, Homo sapien
cgccgcctcctgctgctcctcatac

SEQ ID NO: 2115646 - DNA, 25 bp, Homo sapien
gccgccgcctcctgctgctcctcat

SEQ ID NO: 2115647 - DNA, 25 bp, Homo sapien
ctctgctttccctcttcaccttcct

SEQ ID NO: 2115648 - DNA, 25 bp, Homo sapien
ttctctctctgctttccctcttcac

SEQ ID NO: 2115649 - DNA, 25 bp, Homo sapien
ctctcggcatttctctctctgcttt

SEQ ID NO: 2115650 - DNA, 25 bp, Homo sapien
tctctctgctttccctcttcacctt

SEQ ID NO: 2115651 - DNA, 25 bp, Homo sapien
catctggatgaacttgcgcttgaga

SEQ ID NO: 2115652 - DNA, 25 bp, Homo sapien
tgcgctccaggaagggtcttcgcat

SEQ ID NO: 2115653 - DNA, 25 bp, Homo sapien
cttgcgcttgagacgcaggaaggct

SEQ ID NO: 2115654 - DNA, 25 bp, Homo sapien
gaagggtcttcgcatctggatgaac

SEQ ID NO: 2115655 - DNA, 25 bp, Homo sapien
ctgatgagtggagcagtttaggtca

SEQ ID NO: 2115656 - DNA, 25 bp, Homo sapien
tggagcagtttaggtcaaggattga

SEQ ID NO: 2115657 - DNA, 25 bp, Homo sapien
tgagtggagcagtttaggtcaagga

SEQ ID NO: 2115658 - DNA, 25 bp, Homo sapien
tgatgagtggagcagtttaggtcaa

SEQ ID NO: 2115659 - DNA, 25 bp, Homo sapien
ctgcagattggtcaagtagcggaaa

SEQ ID NO: 2115660 - DNA, 25 bp, Homo sapien
aaaatgtcttcatcacgtcggttga

SEQ ID NO: 2115661 - DNA, 25 bp, Homo sapien
cacgtcggttgatcaaaattgaaat

SEQ ID NO: 2115662 - DNA, 25 bp, Homo sapien
tcaagtagcggaaaatgtcttcatc

SEQ ID NO: 2115663 - DNA, 25 bp, Homo sapien
ctgctccaggtgggggtgatggtgg

SEQ ID NO: 2115664 - DNA, 25 bp, Homo sapien
tccaggtgggggtgatggtggaatc

SEQ ID NO: 2115665 - DNA, 25 bp, Homo sapien
gctccaggtgggggtgatggtggaa

SEQ ID NO: 2115666 - DNA, 25 bp, Homo sapien
ccaggtgggggtgatggtggaatct

SEQ ID NO: 2115667 - DNA, 25 bp, Homo sapien
agcccatggagatatgtctgagatc

SEQ ID NO: 2115668 - DNA, 25 bp, Homo sapien
ggaactccttgacaatcaccatgtt

SEQ ID NO: 2115669 - DNA, 25 bp, Homo sapien
gaagtacagcttcattttgtagccc

SEQ ID NO: 2115670 - DNA, 25 bp, Homo sapien
cgctggaactccttgacaatcacca

SEQ ID NO: 2115671 - DNA, 25 bp, Homo sapien
ccagctgaaaaagctgtggctcgca

SEQ ID NO: 2115672 - DNA, 25 bp, Homo sapien
tctgggaggctatggtttgagaacc

SEQ ID NO: 2115673 - DNA, 25 bp, Homo sapien
cctggttcccgtgacgacgggcctg

SEQ ID NO: 2115674 - DNA, 25 bp, Homo sapien
ttcctggccccggtgccagcggatt

SEQ ID NO: 2115675 - DNA, 25 bp, Homo sapien
caggaacaagcctagcaaggccttc

SEQ ID NO: 2115676 - DNA, 25 bp, Homo sapien
ggaacaagcctagcaaggccttctc

SEQ ID NO: 2115677 - DNA, 25 bp, Homo sapien
gaacaagcctagcaaggccttctct

SEQ ID NO: 2115678 - DNA, 25 bp, Homo sapien
acaagcctagcaaggccttctctgg

SEQ ID NO: 2115679 - DNA, 25 bp, Homo sapien
gaataagacagccattagtacaagc

SEQ ID NO: 2115680 - DNA, 25 bp, Homo sapien
gacagccattagtacaagctccaga

SEQ ID NO: 2115681 - DNA, 25 bp, Homo sapien
taagacagccattagtacaagctcc

SEQ ID NO: 2115682 - DNA, 25 bp, Homo sapien
gaaggaataagacagccattagtac

SEQ ID NO: 2115683 - DNA, 25 bp, Homo sapien
cgtagagggttaacccacagatcat

SEQ ID NO: 2115684 - DNA, 25 bp, Homo sapien
ctctcaggtagtagcgtagagggtt

SEQ ID NO: 2115685 - DNA, 25 bp, Homo sapien
taacccacagatcattcttgataat

SEQ ID NO: 2115686 - DNA, 25 bp, Homo sapien
tagtagcgtagagggttaacccaca

SEQ ID NO: 2115687 - DNA, 25 bp, Homo sapien
gaggtggtgtactcatagcactcaa

SEQ ID NO: 2115688 - DNA, 25 bp, Homo sapien
tgggaggtggtgtactcatagcact

SEQ ID NO: 2115689 - DNA, 25 bp, Homo sapien
ggtggtgtactcatagcactcaaag

SEQ ID NO: 2115690 - DNA, 25 bp, Homo sapien
ggtgtactcatagcactcaaaggtg

SEQ ID NO: 2115691 - DNA, 25 bp, Homo sapien
cattgtcagtggtctcgaagtagtc

SEQ ID NO: 2115692 - DNA, 25 bp, Homo sapien
tgtcttccactgcataatagtcagg

SEQ ID NO: 2115693 - DNA, 25 bp, Homo sapien
tgtctgagatctcgctgaaaatgtc

SEQ ID NO: 2115694 - DNA, 25 bp, Homo sapien
cgaagtagtcggtggtctccatgaa

SEQ ID NO: 2115695 - DNA, 25 bp, Homo sapien
ggattctcgttgttgtcatctgcac

SEQ ID NO: 2115696 - DNA, 25 bp, Homo sapien
tctgcttcattgtcactgtcgctgc

SEQ ID NO: 2115697 - DNA, 25 bp, Homo sapien
gaagttgttgccgtaagtgttctcg

SEQ ID NO: 2115698 - DNA, 25 bp, Homo sapien
gtcagtggtttcgtggtcatcagca

SEQ ID NO: 2115699 - DNA, 25 bp, Homo sapien
tgattcgtctgagatgatctctatc

SEQ ID NO: 2115700 - DNA, 25 bp, Homo sapien
tcttccactgattcgtctgagatga

SEQ ID NO: 2115701 - DNA, 25 bp, Homo sapien
cactgattcgtctgagatgatctct

SEQ ID NO: 2115702 - DNA, 25 bp, Homo sapien
ctcttcttccactgattcgtctgag

SEQ ID NO: 2115703 - DNA, 25 bp, Homo sapien
gggaacagagaccatagccagggtt

SEQ ID NO: 2115704 - DNA, 25 bp, Homo sapien
gacaacttgtcagcgcctctgcttg

SEQ ID NO: 2115705 - DNA, 25 bp, Homo sapien
gggtgtactcaagcaagcccacaga

SEQ ID NO: 2115706 - DNA, 25 bp, Homo sapien
ttttagcggcctgggacaacttgtc

SEQ ID NO: 2115707 - DNA, 25 bp, Homo sapien
aggaaggcagttagatgagcagata

SEQ ID NO: 2115708 - DNA, 25 bp, Homo sapien
aggcagttagatgagcagataggtg

SEQ ID NO: 2115709 - DNA, 25 bp, Homo sapien
gaaggcagttagatgagcagatagg

SEQ ID NO: 2115710 - DNA, 25 bp, Homo sapien
aaggcagttagatgagcagataggt

SEQ ID NO: 2115711 - DNA, 25 bp, Homo sapien
taggtcagagtcgtccgaatcttcc

SEQ ID NO: 2115712 - DNA, 25 bp, Homo sapien
catcctctaggtcagagtcgtccga

SEQ ID NO: 2115713 - DNA, 25 bp, Homo sapien
tgaagcacatcctctaggtcagagt

SEQ ID NO: 2115714 - DNA, 25 bp, Homo sapien
tcagagtcgtccgaatcttcccctt

SEQ ID NO: 2115715 - DNA, 25 bp, Homo sapien
ccccagaagtgcaatgtggggccgc

SEQ ID NO: 2115716 - DNA, 25 bp, Homo sapien
gccgcgtggccctagctgaggagga

SEQ ID NO: 2115717 - DNA, 25 bp, Homo sapien
tgtacgaagtcggtcaccccccaga

SEQ ID NO: 2115718 - DNA, 25 bp, Homo sapien
actctgcaatgactaaaccataaaa

SEQ ID NO: 2115719 - DNA, 25 bp, Homo sapien
gaataccgcaatggcgaagcggcct

SEQ ID NO: 2115720 - DNA, 25 bp, Homo sapien
aataaatacagttagcagcacacag

SEQ ID NO: 2115721 - DNA, 25 bp, Homo sapien
gaagcggccttgcatagacaccgag

SEQ ID NO: 2115722 - DNA, 25 bp, Homo sapien
caagaataccgcaaagaataccgca

SEQ ID NO: 2115723 - DNA, 25 bp, Homo sapien
ttctcacagttccacacccacctgc

SEQ ID NO: 2115724 - DNA, 25 bp, Homo sapien
gacaccagaggcctacagcaagatc

SEQ ID NO: 2115725 - DNA, 25 bp, Homo sapien
gacggaacccttccacgggctgcag

SEQ ID NO: 2115726 - DNA, 25 bp, Homo sapien
caagatctgaaggatacgctggacg

SEQ ID NO: 2115727 - DNA, 25 bp, Homo sapien
tgaaggatacgctggacggaaccct

SEQ ID NO: 2115728 - DNA, 25 bp, Homo sapien
ctagggttgagaggccgccccagta

SEQ ID NO: 2115729 - DNA, 25 bp, Homo sapien
gaggccgccccagtaaaagctcgcg

SEQ ID NO: 2115730 - DNA, 25 bp, Homo sapien
aggccccacccctcgcgcgcttcgg

SEQ ID NO: 2115731 - DNA, 25 bp, Homo sapien
cctcgcgcgcttcggccggcctctt

SEQ ID NO: 2115732 - DNA, 25 bp, Homo sapien
ccgcacgatcctccgcaacccgctg

SEQ ID NO: 2115733 - DNA, 25 bp, Homo sapien
ggagccgcaggagcactcggcttcc

SEQ ID NO: 2115734 - DNA, 25 bp, Homo sapien
gcttccctttgcgacccgcacgatc

SEQ ID NO: 2115735 - DNA, 25 bp, Homo sapien
cgcaggagcactcggcttccctttg

SEQ ID NO: 2115736 - DNA, 25 bp, Homo sapien
gacacgcacgcagacgatcacgtga

SEQ ID NO: 2115737 - DNA, 25 bp, Homo sapien
gcagacctgcatggaaccgtttcga

SEQ ID NO: 2115738 - DNA, 25 bp, Homo sapien
tagtttaaactggtcaggattcagc

SEQ ID NO: 2115739 - DNA, 25 bp, Homo sapien
accgtttcgaaagacactgagggtg

SEQ ID NO: 2115740 - DNA, 25 bp, Homo sapien
tcaggggtttcaagacttcagtaga

SEQ ID NO: 2115741 - DNA, 25 bp, Homo sapien
cagggtgtagaagaagttaacttca

SEQ ID NO: 2115742 - DNA, 25 bp, Homo sapien
tcaacattaacagggtgtagaagaa

SEQ ID NO: 2115743 - DNA, 25 bp, Homo sapien
gttaacttcaaacctcagggatgac

SEQ ID NO: 2115744 - DNA, 25 bp, Homo sapien
gagacctgctactcagataaaaaga

SEQ ID NO: 2115745 - DNA, 25 bp, Homo sapien
taatccgtttgcagctgatgagccc

SEQ ID NO: 2115746 - DNA, 25 bp, Homo sapien
tgcagtccctgaaggtggtgagcac

SEQ ID NO: 2115747 - DNA, 25 bp, Homo sapien
gtagggtctgacaaatctctctgca

SEQ ID NO: 2115748 - DNA, 25 bp, Homo sapien
cagggccaagaaggtgctctattac

SEQ ID NO: 2115749 - DNA, 25 bp, Homo sapien
gattatgtagggactttgggccatg

SEQ ID NO: 2115750 - DNA, 25 bp, Homo sapien
cacactggaagtactagggcaactc

SEQ ID NO: 2115751 - DNA, 25 bp, Homo sapien
gaaaaggaagggtatctagcacact

SEQ ID NO: 2115752 - DNA, 25 bp, Homo sapien
ttgatcaggaaacacttctctaggg

SEQ ID NO: 2115753 - DNA, 25 bp, Homo sapien
caagctatattcaagttaactgttc

SEQ ID NO: 2115754 - DNA, 25 bp, Homo sapien
cctgccggtctgtcagagttggaaa

SEQ ID NO: 2115755 - DNA, 25 bp, Homo sapien
tcagcagtctccaatatgtgcaggg

SEQ ID NO: 2115756 - DNA, 25 bp, Homo sapien
cagggtattaatgtgtcatcagggc

SEQ ID NO: 2115757 - DNA, 25 bp, Homo sapien
tcaccatcggcaacaagtggttctg

SEQ ID NO: 2115758 - DNA, 25 bp, Homo sapien
tatgtatgatgagtctggcccctcc

SEQ ID NO: 2115759 - DNA, 25 bp, Homo sapien
aaatgcctctaaatggactgcgagc

SEQ ID NO: 2115760 - DNA, 25 bp, Homo sapien
gattagcaattaggtatgtggcccc

SEQ ID NO: 2115761 - DNA, 25 bp, Homo sapien
ttctacaacgagctgtgcatgaccc

SEQ ID NO: 2115762 - DNA, 25 bp, Homo sapien
caatggaaatagagatcgccgcgct

SEQ ID NO: 2115763 - DNA, 25 bp, Homo sapien
gctaattgttaacttcaaaatccag

SEQ ID NO: 2115764 - DNA, 25 bp, Homo sapien
cagtaatacagtcacttgctgccac

SEQ ID NO: 2115765 - DNA, 25 bp, Homo sapien
catgcccagcctagacagatttttt

SEQ ID NO: 2115766 - DNA, 25 bp, Homo sapien
cccagcctagacagattttttgttt

SEQ ID NO: 2115767 - DNA, 25 bp, Homo sapien
cagggtctggttctactgccaggct

SEQ ID NO: 2115768 - DNA, 25 bp, Homo sapien
acagggtctggttctactgccaggc

SEQ ID NO: 2115769 - DNA, 25 bp, Homo sapien
cctggtgagctatttgctaagactg

SEQ ID NO: 2115770 - DNA, 25 bp, Homo sapien
acgctcagtgcactgtacccactgt

SEQ ID NO: 2115771 - DNA, 25 bp, Homo sapien
tgctttggctcacgctcagtgcact

SEQ ID NO: 2115772 - DNA, 25 bp, Homo sapien
caatgagcgagaatctgtgggcgta

SEQ ID NO: 2115773 - DNA, 25 bp, Homo sapien
tgcttcgtaggtcttcctccatccc

SEQ ID NO: 2115774 - DNA, 25 bp, Homo sapien
agtctgttttatatgagactaggat

SEQ ID NO: 2115775 - DNA, 25 bp, Homo sapien
aagtctgttttatatgagactagga

SEQ ID NO: 2115776 - DNA, 25 bp, Homo sapien
cttcgtaggtcttcctccatccctt

SEQ ID NO: 2115777 - DNA, 25 bp, Homo sapien
tctctttgaagcgtcatcctgcatt

SEQ ID NO: 2115778 - DNA, 25 bp, Homo sapien
tctttgaagcgtcatcctgcattta

SEQ ID NO: 2115779 - DNA, 25 bp, Homo sapien
tgaagcgtcatcctgcatttaatta

SEQ ID NO: 2115780 - DNA, 25 bp, Homo sapien
tattctctttgaagcgtcatcctgc

SEQ ID NO: 2115781 - DNA, 25 bp, Homo sapien
caggcaggactactaatggcccaga

SEQ ID NO: 2115782 - DNA, 25 bp, Homo sapien
gtgattgatcctgtctaccaagagg

SEQ ID NO: 2115783 - DNA, 25 bp, Homo sapien
caacaatgaagctttgggttaccct

SEQ ID NO: 2115784 - DNA, 25 bp, Homo sapien
actagttgagttgcttgctgaaggc

SEQ ID NO: 2115785 - DNA, 25 bp, Homo sapien
tgcagggctagggtaagattctcca

SEQ ID NO: 2115786 - DNA, 25 bp, Homo sapien
ggagttccctacagtcagctgacag

SEQ ID NO: 2115787 - DNA, 25 bp, Homo sapien
gagtgtctaatctacaaccagcaga

SEQ ID NO: 2115788 - DNA, 25 bp, Homo sapien
tagatactggtctggcttccatgca

SEQ ID NO: 2115789 - DNA, 25 bp, Homo sapien
taaagttgggtgtgcacaccagtgc

SEQ ID NO: 2115790 - DNA, 25 bp, Homo sapien
gttaccatttgacctgagctgccca

SEQ ID NO: 2115791 - DNA, 25 bp, Homo sapien
tactctggcctatttatgaagcgac

SEQ ID NO: 2115792 - DNA, 25 bp, Homo sapien
tgtaatcatccccacgtgtaaagga

SEQ ID NO: 2115793 - DNA, 25 bp, Homo sapien
tctagggcatattgagatactcctt

SEQ ID NO: 2115794 - DNA, 25 bp, Homo sapien
ccatgacatcaatgagattatggtg

SEQ ID NO: 2115795 - DNA, 25 bp, Homo sapien
ctgtagacattggtaagatagttgc

SEQ ID NO: 2115796 - DNA, 25 bp, Homo sapien
gagagaaatagtacctactgtagac

SEQ ID NO: 2115797 - DNA, 25 bp, Homo sapien
tacataagaggactgtgatacacaa

SEQ ID NO: 2115798 - DNA, 25 bp, Homo sapien
taagttttacctaagctaattgctc

SEQ ID NO: 2115799 - DNA, 25 bp, Homo sapien
tcagtcacatagtgttaagaaaggg

SEQ ID NO: 2115800 - DNA, 25 bp, Homo sapien
tgcagagtgtgtcaaggaaaaatac

SEQ ID NO: 2115801 - DNA, 25 bp, Homo sapien
tatcttgtattggtccggatggaca

SEQ ID NO: 2115802 - DNA, 25 bp, Homo sapien
tccctagtgggagtaaacagctcaa

SEQ ID NO: 2115803 - DNA, 25 bp, Homo sapien
gctcaaagtgttcaacaaagcgctg

SEQ ID NO: 2115804 - DNA, 25 bp, Homo sapien
caattaacttctacgtccctagtgg

SEQ ID NO: 2115805 - DNA, 25 bp, Homo sapien
caaacagccgatggacaattacctg

SEQ ID NO: 2115806 - DNA, 25 bp, Homo sapien
gttacctactgagaaaatcagcgcc

SEQ ID NO: 2115807 - DNA, 25 bp, Homo sapien
taaggtatacaattgcagggagccg

SEQ ID NO: 2115808 - DNA, 25 bp, Homo sapien
tcagcgcctattgttcaaaggatgc

SEQ ID NO: 2115809 - DNA, 25 bp, Homo sapien
tgacttcagccacgccaagcagtta

SEQ ID NO: 2115810 - DNA, 25 bp, Homo sapien
tcagccgactgagaagaaccttttt

SEQ ID NO: 2115811 - DNA, 25 bp, Homo sapien
tacaccaaagctctcttacaatgcg

SEQ ID NO: 2115812 - DNA, 25 bp, Homo sapien
taccgcaaaactcaaaaccatcaga

SEQ ID NO: 2115813 - DNA, 25 bp, Homo sapien
ccaaaaagccaattaggaaggacag

SEQ ID NO: 2115814 - DNA, 25 bp, Homo sapien
ggacagttcccagactgccatagat

SEQ ID NO: 2115815 - DNA, 25 bp, Homo sapien
aaacacttgtctgcgaatggcaaca

SEQ ID NO: 2115816 - DNA, 25 bp, Homo sapien
caaagaagtttgtgtatatccatgg

SEQ ID NO: 2115817 - DNA, 25 bp, Homo sapien
tttgtgaacatgtcagttctttaaa

SEQ ID NO: 2115818 - DNA, 25 bp, Homo sapien
aactttctgagtgcaactcatttag

SEQ ID NO: 2115819 - DNA, 25 bp, Homo sapien
aattgtgtcccgctgacaaagaaaa

SEQ ID NO: 2115820 - DNA, 25 bp, Homo sapien
aatctgtaaagctattaaaacctgc

SEQ ID NO: 2115821 - DNA, 25 bp, Homo sapien
ggtcctcggaagaatggcctgtcca

SEQ ID NO: 2115822 - DNA, 25 bp, Homo sapien
attttgggcggcgactccttctggc

SEQ ID NO: 2115823 - DNA, 25 bp, Homo sapien
taatagagtgaggatagcaatttcc

SEQ ID NO: 2115824 - DNA, 25 bp, Homo sapien
ctagaggtattaatccaaaagcggc

SEQ ID NO: 2115825 - DNA, 25 bp, Homo sapien
tagctggaattacagacacacagca

SEQ ID NO: 2115826 - DNA, 25 bp, Homo sapien
gctggaattacagacacacagcagc

SEQ ID NO: 2115827 - DNA, 25 bp, Homo sapien
tggaattacagacacacagcagcac

SEQ ID NO: 2115828 - DNA, 25 bp, Homo sapien
gtagctggaattacagacacacagc

SEQ ID NO: 2115829 - DNA, 25 bp, Homo sapien
ggatcagctcccacacttaagtatg

SEQ ID NO: 2115830 - DNA, 25 bp, Homo sapien
tatattcagggatccaaagagtcag

SEQ ID NO: 2115831 - DNA, 25 bp, Homo sapien
gatctgccaggtgagaatcattcaa

SEQ ID NO: 2115832 - DNA, 25 bp, Homo sapien
taatttcacgacattgatgggtgca

SEQ ID NO: 2115833 - DNA, 25 bp, Homo sapien
ttatataaggttttatgctggaaac

SEQ ID NO: 2115834 - DNA, 25 bp, Homo sapien
ttcatgacatacttgagcatcttct

SEQ ID NO: 2115835 - DNA, 25 bp, Homo sapien
tcatgacatacttgagcatcttcta

SEQ ID NO: 2115836 - DNA, 25 bp, Homo sapien
tatataaggttttatgctggaaaca

SEQ ID NO: 2115837 - DNA, 25 bp, Homo sapien
tttcatatagttattacaaaaaaga

SEQ ID NO: 2115838 - DNA, 25 bp, Homo sapien
tcatatagttattacaaaaaagaaa

SEQ ID NO: 2115839 - DNA, 25 bp, Homo sapien
ttcatatagttattacaaaaaagaa

SEQ ID NO: 2115840 - DNA, 25 bp, Homo sapien
cctccatcatagttcttcttcagga

SEQ ID NO: 2115841 - DNA, 25 bp, Homo sapien
tacagtcggattagtagagtcggag

SEQ ID NO: 2115842 - DNA, 25 bp, Homo sapien
tgccagtactacactcttaattact

SEQ ID NO: 2115843 - DNA, 25 bp, Homo sapien
gagagatcaagtcctccatcatagt

SEQ ID NO: 2115844 - DNA, 25 bp, Homo sapien
ttttaccacttaagcatgacttcct

SEQ ID NO: 2115845 - DNA, 25 bp, Homo sapien
gttagattgtttgattcaggatcca

SEQ ID NO: 2115846 - DNA, 25 bp, Homo sapien
tattaacatcatagagtcgtacagt

SEQ ID NO: 2115847 - DNA, 25 bp, Homo sapien
tgatccacgttttaacatatagctg

SEQ ID NO: 2115848 - DNA, 25 bp, Homo sapien
gactaaagctcagatgtgtggtcat

SEQ ID NO: 2115849 - DNA, 25 bp, Homo sapien
taatgtacataccatacagtcaccc

SEQ ID NO: 2115850 - DNA, 25 bp, Homo sapien
tacagtcacccacttaaaagtatac

SEQ ID NO: 2115851 - DNA, 25 bp, Homo sapien
tgcaacccctgagttcactttttta

SEQ ID NO: 2115852 - DNA, 25 bp, Homo sapien
gaaacttcacatagccgtgctcaca

SEQ ID NO: 2115853 - DNA, 25 bp, Homo sapien
ccagacacctgaggcagatagatgg

SEQ ID NO: 2115854 - DNA, 25 bp, Homo sapien
gacaaggccagtgtatatgcaaact

SEQ ID NO: 2115855 - DNA, 25 bp, Homo sapien
caagaaacttggttccaactgaagc

SEQ ID NO: 2115856 - DNA, 25 bp, Homo sapien
aggagaaccagaatggcttggaacc

SEQ ID NO: 2115857 - DNA, 25 bp, Homo sapien
gagcctagcacagaccctgacagag

SEQ ID NO: 2115858 - DNA, 25 bp, Homo sapien
gcagccgcctcagcaacagttgtga

SEQ ID NO: 2115859 - DNA, 25 bp, Homo sapien
ccagaatggcttggaaccggcggaa

SEQ ID NO: 2115860 - DNA, 25 bp, Homo sapien
ccagaggcccgtctccaactcctca

SEQ ID NO: 2115861 - DNA, 25 bp, Homo sapien
cgccgccagaggagtacaagagcca

SEQ ID NO: 2115862 - DNA, 25 bp, Homo sapien
gcaagcggggcaaggggcccttcca

SEQ ID NO: 2115863 - DNA, 25 bp, Homo sapien
ggctccctatttggaagcaagcggg

SEQ ID NO: 2115864 - DNA, 25 bp, Homo sapien
gctgtgtgcttagtactggcatgag

SEQ ID NO: 2115865 - DNA, 25 bp, Homo sapien
aaaggtgaatcacaccgggccgctg

SEQ ID NO: 2115866 - DNA, 25 bp, Homo sapien
gctgctgagtaactgctgtgtgctt

SEQ ID NO: 2115867 - DNA, 25 bp, Homo sapien
tactggcatgagtgccataggtccg

SEQ ID NO: 2115868 - DNA, 25 bp, Homo sapien
tttgggcccagagcttctccttcct

SEQ ID NO: 2115869 - DNA, 25 bp, Homo sapien
cttctttgggcccagagcttctcct

SEQ ID NO: 2115870 - DNA, 25 bp, Homo sapien
tctcccccttctttgggcccagagc

SEQ ID NO: 2115871 - DNA, 25 bp, Homo sapien
tgggcccagagcttctccttcctcc

SEQ ID NO: 2115872 - DNA, 25 bp, Homo sapien
tctgatcaaagctagagatgttctc

SEQ ID NO: 2115873 - DNA, 25 bp, Homo sapien
tttgggatcacagacccatccgagg

SEQ ID NO: 2115874 - DNA, 25 bp, Homo sapien
gaatcatataagaagcttccctacc

SEQ ID NO: 2115875 - DNA, 25 bp, Homo sapien
catcatgggcacttagtgaatggaa

SEQ ID NO: 2115876 - DNA, 25 bp, Homo sapien
accaggaagtcgaggaccaaggttg

SEQ ID NO: 2115877 - DNA, 25 bp, Homo sapien
aagtcgaggaccaaggttgctgtct

SEQ ID NO: 2115878 - DNA, 25 bp, Homo sapien
gaggaccaaggttgctgtctcgctg

SEQ ID NO: 2115879 - DNA, 25 bp, Homo sapien
aggttgctgtctcgctgtctgcatc

SEQ ID NO: 2115880 - DNA, 25 bp, Homo sapien
tgcatgtgggtgtgcactgctgcat

SEQ ID NO: 2115881 - DNA, 25 bp, Homo sapien
cacctctgtgtttatgcatgtgggt

SEQ ID NO: 2115882 - DNA, 25 bp, Homo sapien
gcagcacctctgtgtttatgcatgt

SEQ ID NO: 2115883 - DNA, 25 bp, Homo sapien
gggcagcacctctgtgtttatgcat

SEQ ID NO: 2115884 - DNA, 25 bp, Homo sapien
tcagagctggattttgacagtggga

SEQ ID NO: 2115885 - DNA, 25 bp, Homo sapien
gagaggaggaggtaactttccagga

SEQ ID NO: 2115886 - DNA, 25 bp, Homo sapien
ggagtcagagctggattttgacagt

SEQ ID NO: 2115887 - DNA, 25 bp, Homo sapien
gattttgacagtgggagagaggagg

SEQ ID NO: 2115888 - DNA, 25 bp, Homo sapien
gatggtgtagacagccagtttgtga

SEQ ID NO: 2115889 - DNA, 25 bp, Homo sapien
cagcccaaatgggagcgtgatgatg

SEQ ID NO: 2115890 - DNA, 25 bp, Homo sapien
cagctcgggccagcccaaatgggag

SEQ ID NO: 2115891 - DNA, 25 bp, Homo sapien
cagacacagatgagccagctcgggc

SEQ ID NO: 2115892 - DNA, 25 bp, Homo sapien
gcccaggcctagaggcactgctgca

SEQ ID NO: 2115893 - DNA, 25 bp, Homo sapien
aggctggggttgctaggcacgcaag

SEQ ID NO: 2115894 - DNA, 25 bp, Homo sapien
gctgcagtgagggtcagcctgaact

SEQ ID NO: 2115895 - DNA, 25 bp, Homo sapien
tgctaggcacgcaaggatgaaagca

SEQ ID NO: 2115896 - DNA, 25 bp, Homo sapien
ctccttcgcagcatgagtgagggtg

SEQ ID NO: 2115897 - DNA, 25 bp, Homo sapien
atctctgtctccttcgcagcatgag

SEQ ID NO: 2115898 - DNA, 25 bp, Homo sapien
tgtctccttcgcagcatgagtgagg

SEQ ID NO: 2115899 - DNA, 25 bp, Homo sapien
ctctgtctccttcgcagcatgagtg

SEQ ID NO: 2115900 - DNA, 25 bp, Homo sapien
tagggcccaagcaagttaccagttg

SEQ ID NO: 2115901 - DNA, 25 bp, Homo sapien
tgtgattcgtaataggctggcctcc

SEQ ID NO: 2115902 - DNA, 25 bp, Homo sapien
cagtaatttgatagtgaagcccacc

SEQ ID NO: 2115903 - DNA, 25 bp, Homo sapien
ccagcctagggatgttaagatacgc

SEQ ID NO: 2115904 - DNA, 25 bp, Homo sapien
aaaggatagccagcaactgaaacca

SEQ ID NO: 2115905 - DNA, 25 bp, Homo sapien
caaaaggatagccagcaactgaaac

SEQ ID NO: 2115906 - DNA, 25 bp, Homo sapien
aaaaggatagccagcaactgaaacc

SEQ ID NO: 2115907 - DNA, 25 bp, Homo sapien
tgggtaagtcacattgctcctccgt

SEQ ID NO: 2115908 - DNA, 25 bp, Homo sapien
gatgaagtgccacttggctctggga

SEQ ID NO: 2115909 - DNA, 25 bp, Homo sapien
caaagtagtaggtacaactgtggac

SEQ ID NO: 2115910 - DNA, 25 bp, Homo sapien
aactgtggaccactgtaggtgcaac

SEQ ID NO: 2115911 - DNA, 25 bp, Homo sapien
tccgtccttgaatgattgtctcttc

SEQ ID NO: 2115912 - DNA, 25 bp, Homo sapien
gaagcgctccttgagtgttcatggg

SEQ ID NO: 2115913 - DNA, 25 bp, Homo sapien
tgattgtctcttctagaagcgctcc

SEQ ID NO: 2115914 - DNA, 25 bp, Homo sapien
cccctttccgtccttgaatgattgt

SEQ ID NO: 2115915 - DNA, 25 bp, Homo sapien
gctgatctgtgctacaatacctgtg

SEQ ID NO: 2115916 - DNA, 25 bp, Homo sapien
cattgtagtacccagctgatctgtg

SEQ ID NO: 2115917 - DNA, 25 bp, Homo sapien
gctacaatacctgtgcctaaccgca

SEQ ID NO: 2115918 - DNA, 25 bp, Homo sapien
ttgtagtacccagctgatctgtgct

SEQ ID NO: 2115919 - DNA, 25 bp, Homo sapien
caacagcaggctgtgctagctgctc

SEQ ID NO: 2115920 - DNA, 25 bp, Homo sapien
ctttgccgggattggctgggtgctt

SEQ ID NO: 2115921 - DNA, 25 bp, Homo sapien
tctccgtctgctgtaagctgggctt

SEQ ID NO: 2115922 - DNA, 25 bp, Homo sapien
cagcctctttgtccaggcggtggga

SEQ ID NO: 2115923 - DNA, 25 bp, Homo sapien
tccttcactttcattatggtggggt

SEQ ID NO: 2115924 - DNA, 25 bp, Homo sapien
ccttcactttcattatggtggggtc

SEQ ID NO: 2115925 - DNA, 25 bp, Homo sapien
gaggaagacgtcagaccagacttgc

SEQ ID NO: 2115926 - DNA, 25 bp, Homo sapien
tttgctgggcgcagagtaaaggcct

SEQ ID NO: 2115927 - DNA, 25 bp, Homo sapien
ccctgcctaccaaggtctctgaatt

SEQ ID NO: 2115928 - DNA, 25 bp, Homo sapien
tctctgaatttgctgggcgcagagt

SEQ ID NO: 2115929 - DNA, 25 bp, Homo sapien
aactcccccgtggtgaggcagcagg

SEQ ID NO: 2115930 - DNA, 25 bp, Homo sapien
catgtgccacaaccagtggagtgtc

SEQ ID NO: 2115931 - DNA, 25 bp, Homo sapien
gcagctgtagcttgagggctcggct

SEQ ID NO: 2115932 - DNA, 25 bp, Homo sapien
aatctgccgggagacagctctctgc

SEQ ID NO: 2115933 - DNA, 25 bp, Homo sapien
ctagcatcagtctggttttcaatgg

SEQ ID NO: 2115934 - DNA, 25 bp, Homo sapien
tagcatcagtctggttttcaatggc

SEQ ID NO: 2115935 - DNA, 25 bp, Homo sapien
gcatcagtctggttttcaatggcaa

SEQ ID NO: 2115936 - DNA, 25 bp, Homo sapien
agcatcagtctggttttcaatggca

SEQ ID NO: 2115937 - DNA, 25 bp, Homo sapien
gaagtgcccagcaataagagtggcc

SEQ ID NO: 2115938 - DNA, 25 bp, Homo sapien
cccagtggaaacagcaaactttagc

SEQ ID NO: 2115939 - DNA, 25 bp, Homo sapien
agcaataagagtggccccagtggaa

SEQ ID NO: 2115940 - DNA, 25 bp, Homo sapien
gtggccccagtggaaacagcaaact

SEQ ID NO: 2115941 - DNA, 25 bp, Homo sapien
agtggtcagccctgggatcagtaac

SEQ ID NO: 2115942 - DNA, 25 bp, Homo sapien
tagtggtcagccctgggatcagtaa

SEQ ID NO: 2115943 - DNA, 25 bp, Homo sapien
ttagtggtcagccctgggatcagta

SEQ ID NO: 2115944 - DNA, 25 bp, Homo sapien
ggaactcctgggttgttgcatggga

SEQ ID NO: 2115945 - DNA, 25 bp, Homo sapien
tgcaggggagactctgtgtgaccca

SEQ ID NO: 2115946 - DNA, 25 bp, Homo sapien
gcaatgataggcaagttaatataag

SEQ ID NO: 2115947 - DNA, 25 bp, Homo sapien
actagaccccctgagggaactcctg

SEQ ID NO: 2115948 - DNA, 25 bp, Homo sapien
ttgaatagcagtagactcaggagct

SEQ ID NO: 2115949 - DNA, 25 bp, Homo sapien
ccagtctgtaccctcaggttgaata

SEQ ID NO: 2115950 - DNA, 25 bp, Homo sapien
taccctcaggttgaatagcagtaga

SEQ ID NO: 2115951 - DNA, 25 bp, Homo sapien
caggttgaatagcagtagactcagg

SEQ ID NO: 2115952 - DNA, 25 bp, Homo sapien
ctgtaattgactgtgaacaaccaat

SEQ ID NO: 2115953 - DNA, 25 bp, Homo sapien
taactcactgcctttggaccagcct

SEQ ID NO: 2115954 - DNA, 25 bp, Homo sapien
cagtagtgagagatgggaaaagagt

SEQ ID NO: 2115955 - DNA, 25 bp, Homo sapien
agtgcagtagtgagagatgggaaaa

SEQ ID NO: 2115956 - DNA, 25 bp, Homo sapien
tctgctctagctccacgttgcttgg

SEQ ID NO: 2115957 - DNA, 25 bp, Homo sapien
tagctccacgttgcttggcaaagct

SEQ ID NO: 2115958 - DNA, 25 bp, Homo sapien
ttctgacgggttcttgttgactaga

SEQ ID NO: 2115959 - DNA, 25 bp, Homo sapien
tgttgactagatcctggcagtggtg

SEQ ID NO: 2115960 - DNA, 25 bp, Homo sapien
agccctggaacagggactgccccat

SEQ ID NO: 2115961 - DNA, 25 bp, Homo sapien
cagcccagtgtgttgatgaccagca

SEQ ID NO: 2115962 - DNA, 25 bp, Homo sapien
caccacagcccagtgtgttgatgac

SEQ ID NO: 2115963 - DNA, 25 bp, Homo sapien
cccagtgtgttgatgaccagcagca

SEQ ID NO: 2115964 - DNA, 25 bp, Homo sapien
agtagtgcgggaaaggatccacgct

SEQ ID NO: 2115965 - DNA, 25 bp, Homo sapien
ccacgctgccatccactgcaagcat

SEQ ID NO: 2115966 - DNA, 25 bp, Homo sapien
agtaggtggtccagccagaggtacc

SEQ ID NO: 2115967 - DNA, 25 bp, Homo sapien
ccagaggtaccagtagtgcgggaaa

SEQ ID NO: 2115968 - DNA, 25 bp, Homo sapien
ggtaggacagatatgtgtcccagcc

SEQ ID NO: 2115969 - DNA, 25 bp, Homo sapien
tcagaggaactggtacttcaggtag

SEQ ID NO: 2115970 - DNA, 25 bp, Homo sapien
gaggaactggtacttcaggtaggac

SEQ ID NO: 2115971 - DNA, 25 bp, Homo sapien
acttcaggtaggacagatatgtgtc

SEQ ID NO: 2115972 - DNA, 25 bp, Homo sapien
tggcaacaagtttggcaagcaagcc

SEQ ID NO: 2115973 - DNA, 25 bp, Homo sapien
ggttaaaatcttcgtctgcatctga

SEQ ID NO: 2115974 - DNA, 25 bp, Homo sapien
caagcaagccagtgctgcaagctcc

SEQ ID NO: 2115975 - DNA, 25 bp, Homo sapien
gagggagcaagaagcccttggccca

SEQ ID NO: 2115976 - DNA, 25 bp, Homo sapien
tctggaaacccttagcaaacctgcc

SEQ ID NO: 2115977 - DNA, 25 bp, Homo sapien
tgacctcacaatcctggccacagat

SEQ ID NO: 2115978 - DNA, 25 bp, Homo sapien
ggtttccttagcataagttgccatg

SEQ ID NO: 2115979 - DNA, 25 bp, Homo sapien
ccatgcttgcagtcccttctaaggg

SEQ ID NO: 2115980 - DNA, 25 bp, Homo sapien
gaatgagtacccatgaatagccatg

SEQ ID NO: 2115981 - DNA, 25 bp, Homo sapien
ttagctaggagactggaaaaagacc

SEQ ID NO: 2115982 - DNA, 25 bp, Homo sapien
cgaatggagatgacaagattagcta

SEQ ID NO: 2115983 - DNA, 25 bp, Homo sapien
accaggaggcctgcactagggcaaa

SEQ ID NO: 2115984 - DNA, 25 bp, Homo sapien
gcatcactatgcctgtgtgaaagta

SEQ ID NO: 2115985 - DNA, 25 bp, Homo sapien
gatagtctcattcagctaccaacca

SEQ ID NO: 2115986 - DNA, 25 bp, Homo sapien
gcttgtacgtacatatgtgaactca

SEQ ID NO: 2115987 - DNA, 25 bp, Homo sapien
tattacaaaatactacacaggagca

SEQ ID NO: 2115988 - DNA, 25 bp, Homo sapien
gacagggagtattctggcctctgaa

SEQ ID NO: 2115989 - DNA, 25 bp, Homo sapien
gctaatcaagcatgaagaggaacag

SEQ ID NO: 2115990 - DNA, 25 bp, Homo sapien
caaaaattcctgaacgacagggagt

SEQ ID NO: 2115991 - DNA, 25 bp, Homo sapien
tcatgggatttaggcactgctaatc

SEQ ID NO: 2115992 - DNA, 25 bp, Homo sapien
tccgggctcccgtgttcatgcaatt

SEQ ID NO: 2115993 - DNA, 25 bp, Homo sapien
tatcataatgggcaacgtgaggtgg

SEQ ID NO: 2115994 - DNA, 25 bp, Homo sapien
ttcaagccagtctcaagggatatag

SEQ ID NO: 2115995 - DNA, 25 bp, Homo sapien
gaggtcatcccttgtaccctgggct

SEQ ID NO: 2115996 - DNA, 25 bp, Homo sapien
atctggtccgcaggagcaagtgttt

SEQ ID NO: 2115997 - DNA, 25 bp, Homo sapien
tcccgttaggcctggacgtattctc

SEQ ID NO: 2115998 - DNA, 25 bp, Homo sapien
cagtcgtcagctcgctcctcgtata

SEQ ID NO: 2115999 - DNA, 25 bp, Homo sapien
cactcctgccggaaggcgaaaatcc

SEQ ID NO: 2116000 - DNA, 25 bp, Homo sapien
tcagcaagcgtgagctcaggtctcc

SEQ ID NO: 2116001 - DNA, 25 bp, Homo sapien
ttctgtctcagcaagcgtgagctca

SEQ ID NO: 2116002 - DNA, 25 bp, Homo sapien
tgaggggcataatcctgctgtgact

SEQ ID NO: 2116003 - DNA, 25 bp, Homo sapien
cttcctcttgccctgaggggcataa

SEQ ID NO: 2116004 - DNA, 25 bp, Homo sapien
tcagtaaggaatcccgattttgaag

SEQ ID NO: 2116005 - DNA, 25 bp, Homo sapien
tcttgggttacggcggcagtttctg

SEQ ID NO: 2116006 - DNA, 25 bp, Homo sapien
tgggttacggcggcagtttctgaac

SEQ ID NO: 2116007 - DNA, 25 bp, Homo sapien
ccgattttgaagctcttaggttggc

SEQ ID NO: 2116008 - DNA, 25 bp, Homo sapien
gaccaccgtctttgactacacgcca

SEQ ID NO: 2116009 - DNA, 25 bp, Homo sapien
cagtgccgaccaccgtctttgacta

SEQ ID NO: 2116010 - DNA, 25 bp, Homo sapien
gtgccgaccaccgtctttgactaca

SEQ ID NO: 2116011 - DNA, 25 bp, Homo sapien
gccgaccaccgtctttgactacacg

SEQ ID NO: 2116012 - DNA, 25 bp, Homo sapien
agcaaaagggaggtggaatggccca

SEQ ID NO: 2116013 - DNA, 25 bp, Homo sapien
ctggagcaaaagggaggtggaatgg

SEQ ID NO: 2116014 - DNA, 25 bp, Homo sapien
ggagcaaaagggaggtggaatggcc

SEQ ID NO: 2116015 - DNA, 25 bp, Homo sapien
gcaaaagggaggtggaatggcccat

SEQ ID NO: 2116016 - DNA, 25 bp, Homo sapien
ctgttgactgttttatgttatacat

SEQ ID NO: 2116017 - DNA, 25 bp, Homo sapien
cggttttgtcgctctttttctcgat

SEQ ID NO: 2116018 - DNA, 25 bp, Homo sapien
cccatgactcggttccgcacattga

SEQ ID NO: 2116019 - DNA, 25 bp, Homo sapien
ccgcacattgaagaatcggttttgt

SEQ ID NO: 2116020 - DNA, 25 bp, Homo sapien
ttctcgatttcttctagcctcgatg

SEQ ID NO: 2116021 - DNA, 25 bp, Homo sapien
agcaggccccgaggaaatgcttgtc

SEQ ID NO: 2116022 - DNA, 25 bp, Homo sapien
gcttgtcagctggatctcaatcaga

SEQ ID NO: 2116023 - DNA, 25 bp, Homo sapien
tgaaccctttcagggcagaaactgg

SEQ ID NO: 2116024 - DNA, 25 bp, Homo sapien
cctgtagaatctagaacccactgtc

SEQ ID NO: 2116025 - DNA, 25 bp, Homo sapien
tctgctgcttcccgacgctttcggt

SEQ ID NO: 2116026 - DNA, 25 bp, Homo sapien
ccgacgctttcggtctcccacctgg

SEQ ID NO: 2116027 - DNA, 25 bp, Homo sapien
tgctgcttcccgacgctttcggtct

SEQ ID NO: 2116028 - DNA, 25 bp, Homo sapien
tttctgctgcttcccgacgctttcg

SEQ ID NO: 2116029 - DNA, 25 bp, Homo sapien
gccagctgacgtgttcgatctgcct

SEQ ID NO: 2116030 - DNA, 25 bp, Homo sapien
aaattcacgcccgttcttgagctgc

SEQ ID NO: 2116031 - DNA, 25 bp, Homo sapien
gactaccacatcatactgcacctgg

SEQ ID NO: 2116032 - DNA, 25 bp, Homo sapien
tctgctcccgaaactcctggacttt

SEQ ID NO: 2116033 - DNA, 25 bp, Homo sapien
tgtaactaagataggttggaagccc

SEQ ID NO: 2116034 - DNA, 25 bp, Homo sapien
ctgtaactaagataggttggaagcc

SEQ ID NO: 2116035 - DNA, 25 bp, Homo sapien
gccgtgtgtccctgtctaggtcttc

SEQ ID NO: 2116036 - DNA, 25 bp, Homo sapien
agttgtacctgaactgcccctgctg

SEQ ID NO: 2116037 - DNA, 25 bp, Homo sapien
ctaggtcttccccagagaagtactg

SEQ ID NO: 2116038 - DNA, 25 bp, Homo sapien
catcaaccttggcttgctgttgctc

SEQ ID NO: 2116039 - DNA, 25 bp, Homo sapien
tcaggtctctgagtctggagggccg

SEQ ID NO: 2116040 - DNA, 25 bp, Homo sapien
gtctctgagtctggagggccgggct

SEQ ID NO: 2116041 - DNA, 25 bp, Homo sapien
gagtctggagggccgggctgcttac

SEQ ID NO: 2116042 - DNA, 25 bp, Homo sapien
caggtctctgagtctggagggccgg

SEQ ID NO: 2116043 - DNA, 25 bp, Homo sapien
caaccctatggataagtggacctcc

SEQ ID NO: 2116044 - DNA, 25 bp, Homo sapien
gagccattaggtctgtctgcactgt

SEQ ID NO: 2116045 - DNA, 25 bp, Homo sapien
tgtactcagcttaggacagatcccc

SEQ ID NO: 2116046 - DNA, 25 bp, Homo sapien
caactacaataagtggtccagcaga

SEQ ID NO: 2116047 - DNA, 25 bp, Homo sapien
taaaagagcaaagggcattccaggc

SEQ ID NO: 2116048 - DNA, 25 bp, Homo sapien
tctgaatctcagtctaagggccatg

SEQ ID NO: 2116049 - DNA, 25 bp, Homo sapien
tcagagaactccctgtctagttggg

SEQ ID NO: 2116050 - DNA, 25 bp, Homo sapien
catggcatgagcaaaggtactgaca

SEQ ID NO: 2116051 - DNA, 25 bp, Homo sapien
atcatggccgcacgacaggactcct

SEQ ID NO: 2116052 - DNA, 25 bp, Homo sapien
catccatggcgaggcgcagctggtt

SEQ ID NO: 2116053 - DNA, 25 bp, Homo sapien
ggcgttggccatggcacacatcatg

SEQ ID NO: 2116054 - DNA, 25 bp, Homo sapien
tggccagatgggtggcctgtgcatc

SEQ ID NO: 2116055 - DNA, 25 bp, Homo sapien
gggttttcagtcagtaggtcactcg

SEQ ID NO: 2116056 - DNA, 25 bp, Homo sapien
gctggatctccgcaaggttggcctt

SEQ ID NO: 2116057 - DNA, 25 bp, Homo sapien
tgctggttgaaggatcctagacccc

SEQ ID NO: 2116058 - DNA, 25 bp, Homo sapien
ggttggccttctgttcacgctgacg

SEQ ID NO: 2116059 - DNA, 25 bp, Homo sapien
gaaagaagtccagaggtctcagctg

SEQ ID NO: 2116060 - DNA, 25 bp, Homo sapien
aagtccagaggtctcagctgacatg

SEQ ID NO: 2116061 - DNA, 25 bp, Homo sapien
ctgtgaaagaagtccagaggtctca

SEQ ID NO: 2116062 - DNA, 25 bp, Homo sapien
tctccatggttcctcaccatccctc

SEQ ID NO: 2116063 - DNA, 25 bp, Homo sapien
ggtgtagattactgaattcaggtaa

SEQ ID NO: 2116064 - DNA, 25 bp, Homo sapien
tgatactgggctgtaggttgattgg

SEQ ID NO: 2116065 - DNA, 25 bp, Homo sapien
ctgctggtgttaaactgctggtgat

SEQ ID NO: 2116066 - DNA, 25 bp, Homo sapien
tgctggtgttaaactgctggtgata

SEQ ID NO: 2116067 - DNA, 25 bp, Homo sapien
catttttctctttgactcctaacca

SEQ ID NO: 2116068 - DNA, 25 bp, Homo sapien
tttgagtgcagaactttattaccta

SEQ ID NO: 2116069 - DNA, 25 bp, Homo sapien
ttgagtgcagaactttattacctag

SEQ ID NO: 2116070 - DNA, 25 bp, Homo sapien
ttctctttgactcctaaccacctgt

SEQ ID NO: 2116071 - DNA, 25 bp, Homo sapien
agaagtatctggctgtggaggaccc

SEQ ID NO: 2116072 - DNA, 25 bp, Homo sapien
tccagcgagttcttgatgtaaggcc

SEQ ID NO: 2116073 - DNA, 25 bp, Homo sapien
gatgtgcaaacagctctggctctag

SEQ ID NO: 2116074 - DNA, 25 bp, Homo sapien
tcgcggtggctagcaagacgtacaa

SEQ ID NO: 2116075 - DNA, 25 bp, Homo sapien
tggaaagcattgtcgaagtaaccgc

SEQ ID NO: 2116076 - DNA, 25 bp, Homo sapien
tggagagggcccacgggtctcaaac

SEQ ID NO: 2116077 - DNA, 25 bp, Homo sapien
gcccacgggtctcaaaccacccaga

SEQ ID NO: 2116078 - DNA, 25 bp, Homo sapien
gactggagagggcccacgggtctca

SEQ ID NO: 2116079 - DNA, 25 bp, Homo sapien
gcatggtagcgcacacttgtagttc

SEQ ID NO: 2116080 - DNA, 25 bp, Homo sapien
catggtagcgcacacttgtagttcc

SEQ ID NO: 2116081 - DNA, 25 bp, Homo sapien
ctccagctcgggtgacaagggcaag

SEQ ID NO: 2116082 - DNA, 25 bp, Homo sapien
cagctcgggtgacaagggcaagact

SEQ ID NO: 2116083 - DNA, 25 bp, Homo sapien
tcttaagcacatgctaggcatctgg

SEQ ID NO: 2116084 - DNA, 25 bp, Homo sapien
ggtgttagagattgcagcccaggac

SEQ ID NO: 2116085 - DNA, 25 bp, Homo sapien
agagagctcacttgacccaaccgag

SEQ ID NO: 2116086 - DNA, 25 bp, Homo sapien
gagtaatttaactaggtcgccagaa

SEQ ID NO: 2116087 - DNA, 25 bp, Homo sapien
gctttgagaagctccgccacatgct

SEQ ID NO: 2116088 - DNA, 25 bp, Homo sapien
ttcaatgcgagacaagattggcgtc

SEQ ID NO: 2116089 - DNA, 25 bp, Homo sapien
tatccaggagtgctctgaaggcttt

SEQ ID NO: 2116090 - DNA, 25 bp, Homo sapien
catgctactgttggctatccaggag

SEQ ID NO: 2116091 - DNA, 25 bp, Homo sapien
cagccctggttgctgccacggctat

SEQ ID NO: 2116092 - DNA, 25 bp, Homo sapien
ttccaccattgtcgtagctgcttcg

SEQ ID NO: 2116093 - DNA, 25 bp, Homo sapien
cacggctatttccaccattgtcgta

SEQ ID NO: 2116094 - DNA, 25 bp, Homo sapien
tagctgcttcgaccacagtgactac

SEQ ID NO: 2116095 - DNA, 25 bp, Homo sapien
ccatcagacaaagttgtagatgttc

SEQ ID NO: 2116096 - DNA, 25 bp, Homo sapien
ggcagatgtcattataaagtgactt

SEQ ID NO: 2116097 - DNA, 25 bp, Homo sapien
ctttcattaattggagcatataatt

SEQ ID NO: 2116098 - DNA, 25 bp, Homo sapien
tagcagtgttgcctccatcagacaa

SEQ ID NO: 2116099 - DNA, 25 bp, Homo sapien
ccaggttttatagtagagtacttga

SEQ ID NO: 2116100 - DNA, 25 bp, Homo sapien
aaccagttttctctaactcaagcct

SEQ ID NO: 2116101 - DNA, 25 bp, Homo sapien
cctcaacataaatttggagagtgag

SEQ ID NO: 2116102 - DNA, 25 bp, Homo sapien
tggaagttccagctatgtgcctgcc

SEQ ID NO: 2116103 - DNA, 25 bp, Homo sapien
ggagaattcctagatgcctggctta

SEQ ID NO: 2116104 - DNA, 25 bp, Homo sapien
tgtttctgagggattggaacactca

SEQ ID NO: 2116105 - DNA, 25 bp, Homo sapien
gatggtgaatcccaccacggtgctt

SEQ ID NO: 2116106 - DNA, 25 bp, Homo sapien
gaactttccccagttcagtgcactg

SEQ ID NO: 2116107 - DNA, 25 bp, Homo sapien
tgagtgcagagacgcagttgttccc

SEQ ID NO: 2116108 - DNA, 25 bp, Homo sapien
gcactatagtctacgccaggtacgt

SEQ ID NO: 2116109 - DNA, 25 bp, Homo sapien
ccagggtttgtagttggtgcatcac

SEQ ID NO: 2116110 - DNA, 25 bp, Homo sapien
ctcaaaagctggaggaagcacctga

SEQ ID NO: 2116111 - DNA, 25 bp, Homo sapien
gattgaatggatacaggtcgtacag

SEQ ID NO: 2116112 - DNA, 25 bp, Homo sapien
ccatagtactgagtatattggacta

SEQ ID NO: 2116113 - DNA, 25 bp, Homo sapien
ggtcgtacaggcaaatacacgctat

SEQ ID NO: 2116114 - DNA, 25 bp, Homo sapien
taatctggaattacacaccctaaat

SEQ ID NO: 2116115 - DNA, 25 bp, Homo sapien
gattacaggcttgtccttccacgcc

SEQ ID NO: 2116116 - DNA, 25 bp, Homo sapien
gcttgtccttccacgcccggctact

SEQ ID NO: 2116117 - DNA, 25 bp, Homo sapien
acaggcttgtccttccacgcccggc

SEQ ID NO: 2116118 - DNA, 25 bp, Homo sapien
ggattacaggcttgtccttccacgc

SEQ ID NO: 2116119 - DNA, 25 bp, Homo sapien
tcagctgcatgtcttaagaatgagg

SEQ ID NO: 2116120 - DNA, 25 bp, Homo sapien
cttcgaaggcttttcttaactgctc

SEQ ID NO: 2116121 - DNA, 25 bp, Homo sapien
cagctggatccaacaattaagtatt

SEQ ID NO: 2116122 - DNA, 25 bp, Homo sapien
tggtatgcagtatcttcttcgaagg

SEQ ID NO: 2116123 - DNA, 25 bp, Homo sapien
ccttctaatggtctaggaatttcag

SEQ ID NO: 2116124 - DNA, 25 bp, Homo sapien
tgaccaccagccataatgttcctgt

SEQ ID NO: 2116125 - DNA, 25 bp, Homo sapien
tgcgtaatcactatcctggaatgac

SEQ ID NO: 2116126 - DNA, 25 bp, Homo sapien
catgatgtttgaacgtgattcccac

SEQ ID NO: 2116127 - DNA, 25 bp, Homo sapien
cgacgacccggatgaataccctggt

SEQ ID NO: 2116128 - DNA, 25 bp, Homo sapien
ctccgttctcagcacctccgacgac

SEQ ID NO: 2116129 - DNA, 25 bp, Homo sapien
gcacctccgacgacccggatgaata

SEQ ID NO: 2116130 - DNA, 25 bp, Homo sapien
atgaataccctggtttttctcgagg

SEQ ID NO: 2116131 - DNA, 25 bp, Homo sapien
tggctcggttactgactgcagtagc

SEQ ID NO: 2116132 - DNA, 25 bp, Homo sapien
aggttctcgcgggatcgcgcggagg

SEQ ID NO: 2116133 - DNA, 25 bp, Homo sapien
gcggcggtggctcggttactgactg

SEQ ID NO: 2116134 - DNA, 25 bp, Homo sapien
ttctcgcgggatcgcgcggaggcgg

SEQ ID NO: 2116135 - DNA, 25 bp, Homo sapien
catgtttcctaaaggcgaggcgcgg

SEQ ID NO: 2116136 - DNA, 25 bp, Homo sapien
ttttcatgaagctccgcctttctcc

SEQ ID NO: 2116137 - DNA, 25 bp, Homo sapien
tctcctttttaggagtgtgcaccag

SEQ ID NO: 2116138 - DNA, 25 bp, Homo sapien
tgcaccaggtctcgcgatatctcat

SEQ ID NO: 2116139 - DNA, 25 bp, Homo sapien
acatggccgagatttggcgctgagc

SEQ ID NO: 2116140 - DNA, 25 bp, Homo sapien
ggaaacctcgtggtaggcgagatcc

SEQ ID NO: 2116141 - DNA, 25 bp, Homo sapien
gctccgcagtgggtcggaaacctcg

SEQ ID NO: 2116142 - DNA, 25 bp, Homo sapien
ctgagctgtgtcatcgcgaggtttg

SEQ ID NO: 2116143 - DNA, 25 bp, Homo sapien
cttgcggtgggtggagccccaaatc

SEQ ID NO: 2116144 - DNA, 25 bp, Homo sapien
cgttctcggtttctcgcgggtggca

SEQ ID NO: 2116145 - DNA, 25 bp, Homo sapien
caaatcgagtttgagctgagccgaa

SEQ ID NO: 2116146 - DNA, 25 bp, Homo sapien
cgaggtgagcgtctatccctgggct

SEQ ID NO: 2116147 - DNA, 25 bp, Homo sapien
tttgctcgcgtgaactctgggtggt

SEQ ID NO: 2116148 - DNA, 25 bp, Homo sapien
tacaggatccttgtcaatcgcactg

SEQ ID NO: 2116149 - DNA, 25 bp, Homo sapien
tgaagtgttttaagggtttgctcgc

SEQ ID NO: 2116150 - DNA, 25 bp, Homo sapien
tcttcacaaggcatctggcgaggtc

SEQ ID NO: 2116151 - DNA, 25 bp, Homo sapien
catctggttgagtgtaaggatcttc

SEQ ID NO: 2116152 - DNA, 25 bp, Homo sapien
tgaactgaaaaccaggttgagaacc

SEQ ID NO: 2116153 - DNA, 25 bp, Homo sapien
ttcagacacgtcttcttcttaggaa

SEQ ID NO: 2116154 - DNA, 25 bp, Homo sapien
taaaccacaataacaccggatgctt

SEQ ID NO: 2116155 - DNA, 25 bp, Homo sapien
ctgcttgcctccaatgcggcctctg

SEQ ID NO: 2116156 - DNA, 25 bp, Homo sapien
gcctccaatgcggcctctgaggttg

SEQ ID NO: 2116157 - DNA, 25 bp, Homo sapien
cttgcctccaatgcggcctctgagg

SEQ ID NO: 2116158 - DNA, 25 bp, Homo sapien
tgcttgcctccaatgcggcctctga

SEQ ID NO: 2116159 - DNA, 25 bp, Homo sapien
gccacgtgtctagctgggctccaag

SEQ ID NO: 2116160 - DNA, 25 bp, Homo sapien
gtgctgcgcaagtgagagttacctc

SEQ ID NO: 2116161 - DNA, 25 bp, Homo sapien
agcacccagaccgtggcctggtaca

SEQ ID NO: 2116162 - DNA, 25 bp, Homo sapien
gatgaacatgaaggtggtgccggtt

SEQ ID NO: 2116163 - DNA, 25 bp, Homo sapien
ctgcgtgacatcacttgttgcctgc

SEQ ID NO: 2116164 - DNA, 25 bp, Homo sapien
tctgtgattgtgcattgttgcttaa

SEQ ID NO: 2116165 - DNA, 25 bp, Homo sapien
gctctgtgattgtgcattgttgctt

SEQ ID NO: 2116166 - DNA, 25 bp, Homo sapien
cctgcgtgacatcacttgttgcctg

SEQ ID NO: 2116167 - DNA, 25 bp, Homo sapien
tggaagcttccgcagtagtcgctcc

SEQ ID NO: 2116168 - DNA, 25 bp, Homo sapien
ggctctgtggaagcttccgcagtag

SEQ ID NO: 2116169 - DNA, 25 bp, Homo sapien
caggctctgtggaagcttccgcagt

SEQ ID NO: 2116170 - DNA, 25 bp, Homo sapien
tctgtggaagcttccgcagtagtcg

SEQ ID NO: 2116171 - DNA, 25 bp, Homo sapien
gcactttctcatagcagtagccaca

SEQ ID NO: 2116172 - DNA, 25 bp, Homo sapien
tccttgcgcactttctcatagcagt

SEQ ID NO: 2116173 - DNA, 25 bp, Homo sapien
tgcagtctccttgcgcactttctca

SEQ ID NO: 2116174 - DNA, 25 bp, Homo sapien
tcccttcttgtttccgtctgtcgtc

SEQ ID NO: 2116175 - DNA, 25 bp, Homo sapien
cttctcgaaagcaccatgggagtcc

SEQ ID NO: 2116176 - DNA, 25 bp, Homo sapien
ccttctcgaaagcaccatgggagtc

SEQ ID NO: 2116177 - DNA, 25 bp, Homo sapien
ttctcgaaagcaccatgggagtccc

SEQ ID NO: 2116178 - DNA, 25 bp, Homo sapien
gacacacttcttaagagattcttta

SEQ ID NO: 2116179 - DNA, 25 bp, Homo sapien
gtgcattcttataatttacatgctt

SEQ ID NO: 2116180 - DNA, 25 bp, Homo sapien
aatttacatgctttccacacaagac

SEQ ID NO: 2116181 - DNA, 25 bp, Homo sapien
cacacaagacacacttcttaagaga

SEQ ID NO: 2116182 - DNA, 25 bp, Homo sapien
ccttgagatatgcaggatctttgta

SEQ ID NO: 2116183 - DNA, 25 bp, Homo sapien
gacctgtaacgtgccttccataaat

SEQ ID NO: 2116184 - DNA, 25 bp, Homo sapien
cacaaagacctgtaacgtgccttcc

SEQ ID NO: 2116185 - DNA, 25 bp, Homo sapien
caaagacctgtaacgtgccttccat

SEQ ID NO: 2116186 - DNA, 25 bp, Homo sapien
ttagcttccaagattggcatgttct

SEQ ID NO: 2116187 - DNA, 25 bp, Homo sapien
gcttccaagattggcatgttctggg

SEQ ID NO: 2116188 - DNA, 25 bp, Homo sapien
caactaccagccaggcctgacccag

SEQ ID NO: 2116189 - DNA, 25 bp, Homo sapien
ttccaagattggcatgttctgggtg

SEQ ID NO: 2116190 - DNA, 25 bp, Homo sapien
ttataaataggttagggtagcatca

SEQ ID NO: 2116191 - DNA, 25 bp, Homo sapien
gggtagcatcattcagacttctctg

SEQ ID NO: 2116192 - DNA, 25 bp, Homo sapien
tagaacaccatgagatagttacccc

SEQ ID NO: 2116193 - DNA, 25 bp, Homo sapien
gcccaccgcttctgtacatgtctaa

SEQ ID NO: 2116194 - DNA, 25 bp, Homo sapien
ctgtcactgccctccaaaaatggtt

SEQ ID NO: 2116195 - DNA, 25 bp, Homo sapien
cgaaagggcaaggagagttcagcct

SEQ ID NO: 2116196 - DNA, 25 bp, Homo sapien
caacagaacgttgggaagacgagca

SEQ ID NO: 2116197 - DNA, 25 bp, Homo sapien
ttcaagaaggcagagcgaaagggca

SEQ ID NO: 2116198 - DNA, 25 bp, Homo sapien
tggcatataccacgaggcagtaagg

SEQ ID NO: 2116199 - DNA, 25 bp, Homo sapien
cagtaaattctgacggtgggtcgtg

SEQ ID NO: 2116200 - DNA, 25 bp, Homo sapien
gctaatatatgtagagcccctcgca

SEQ ID NO: 2116201 - DNA, 25 bp, Homo sapien
caaagccatgtttcaacaggtggca

SEQ ID NO: 2116202 - DNA, 25 bp, Homo sapien
tctgaagcaccgttgagcggctggc

SEQ ID NO: 2116203 - DNA, 25 bp, Homo sapien
ggagtccttgcagcccaaagcatga

SEQ ID NO: 2116204 - DNA, 25 bp, Homo sapien
gactatcccagaattcgacgcgcgt

SEQ ID NO: 2116205 - DNA, 25 bp, Homo sapien
cctgtaggattctggactgaagacg

SEQ ID NO: 2116206 - DNA, 25 bp, Homo sapien
tgttctgtgatggaaattggtctgt

SEQ ID NO: 2116207 - DNA, 25 bp, Homo sapien
ggaaacttcaggagttaatggaaga

SEQ ID NO: 2116208 - DNA, 25 bp, Homo sapien
gaatgcctcaggagttgttctgtga

SEQ ID NO: 2116209 - DNA, 25 bp, Homo sapien
cctcaccacaaaagctccatagttt

SEQ ID NO: 2116210 - DNA, 25 bp, Homo sapien
ccatttctagcttttatgtgacctc

SEQ ID NO: 2116211 - DNA, 25 bp, Homo sapien
tcttgaacaaagtcatttgggaacc

SEQ ID NO: 2116212 - DNA, 25 bp, Homo sapien
tatgtgacctctcttgaacaaagtc

SEQ ID NO: 2116213 - DNA, 25 bp, Homo sapien
ctgaggttccatttctagcttttat

SEQ ID NO: 2116214 - DNA, 25 bp, Homo sapien
tctttgccacgacatactttgtagc

SEQ ID NO: 2116215 - DNA, 25 bp, Homo sapien
gatgtcagtctctaagtttgcattc

SEQ ID NO: 2116216 - DNA, 25 bp, Homo sapien
caaggtatctagaatatcagaggca

SEQ ID NO: 2116217 - DNA, 25 bp, Homo sapien
gagtcgtggaacctagattagaacc

SEQ ID NO: 2116218 - DNA, 25 bp, Homo sapien
agtcctcagtgacctacaaagagac

SEQ ID NO: 2116219 - DNA, 25 bp, Homo sapien
aagtcctcagtgacctacaaagaga

SEQ ID NO: 2116220 - DNA, 25 bp, Homo sapien
cataaagcaagtcctcagtgaccta

SEQ ID NO: 2116221 - DNA, 25 bp, Homo sapien
aagcaagtcctcagtgacctacaaa

SEQ ID NO: 2116222 - DNA, 25 bp, Homo sapien
ggagggtaacgacatttgccacaca

SEQ ID NO: 2116223 - DNA, 25 bp, Homo sapien
ggcaggtattagagctgtagcagca

SEQ ID NO: 2116224 - DNA, 25 bp, Homo sapien
tgcgtcttaatgtgaggctttccaa

SEQ ID NO: 2116225 - DNA, 25 bp, Homo sapien
gtagcagcagcgcaatgtgtgcgtc

SEQ ID NO: 2116226 - DNA, 25 bp, Homo sapien
gcttcgcgcccagatcgtcgcctat

SEQ ID NO: 2116227 - DNA, 25 bp, Homo sapien
cagcttcgcgcccagatcgtcgcct

SEQ ID NO: 2116228 - DNA, 25 bp, Homo sapien
atcgtcgcctatcctgcttgcgcag

SEQ ID NO: 2116229 - DNA, 25 bp, Homo sapien
cagatcgtcgcctatcctgcttgcg

SEQ ID NO: 2116230 - DNA, 25 bp, Homo sapien
tgggaaaattggttgacagcttcca

SEQ ID NO: 2116231 - DNA, 25 bp, Homo sapien
cagcttccaagctttacacttagag

SEQ ID NO: 2116232 - DNA, 25 bp, Homo sapien
ggttggattagctgcccacctctga

SEQ ID NO: 2116233 - DNA, 25 bp, Homo sapien
ccacctctgacccaataagctatgg

SEQ ID NO: 2116234 - DNA, 25 bp, Homo sapien
tgcttccctttcttagggcatttag

SEQ ID NO: 2116235 - DNA, 25 bp, Homo sapien
ctgcttccctttcttagggcattta

SEQ ID NO: 2116236 - DNA, 25 bp, Homo sapien
gagattgaggtttgcggtccagaac

SEQ ID NO: 2116237 - DNA, 25 bp, Homo sapien
gaacataccctcagcagatacagtg

SEQ ID NO: 2116238 - DNA, 25 bp, Homo sapien
gtttgcggtccagaacataccctca

SEQ ID NO: 2116239 - DNA, 25 bp, Homo sapien
cttaagatttgagattgaggtttgc

SEQ ID NO: 2116240 - DNA, 25 bp, Homo sapien
ttatggaaccaaatgccttcaggtc

SEQ ID NO: 2116241 - DNA, 25 bp, Homo sapien
gatagctagacgagtgtacaaacca

SEQ ID NO: 2116242 - DNA, 25 bp, Homo sapien
ggaaccctgacagccaatatatgaa

SEQ ID NO: 2116243 - DNA, 25 bp, Homo sapien
aactatctgaggtggtatgcaggcc

SEQ ID NO: 2116244 - DNA, 25 bp, Homo sapien
aaaattataccccatgggcttgcca

SEQ ID NO: 2116245 - DNA, 25 bp, Homo sapien
caggtaatgacgaaaacttaatggg

SEQ ID NO: 2116246 - DNA, 25 bp, Homo sapien
gggttacctaatgctcagtctgtga

SEQ ID NO: 2116247 - DNA, 25 bp, Homo sapien
taaaggctagtcacagggttaccta

SEQ ID NO: 2116248 - DNA, 25 bp, Homo sapien
gcagctgatatgaatctcgtttggg

SEQ ID NO: 2116249 - DNA, 25 bp, Homo sapien
gcatactacattggttttgagcatc

SEQ ID NO: 2116250 - DNA, 25 bp, Homo sapien
taattcaaagcagctgtctccttgt

SEQ ID NO: 2116251 - DNA, 25 bp, Homo sapien
gacacagtaggtttcgagacttaca

SEQ ID NO: 2116252 - DNA, 25 bp, Homo sapien
accaatacagaacatgagccctttt

SEQ ID NO: 2116253 - DNA, 25 bp, Homo sapien
gaacatgagccctttttaaatgtga

SEQ ID NO: 2116254 - DNA, 25 bp, Homo sapien
gatttcccgtcatcacagcagtagg

SEQ ID NO: 2116255 - DNA, 25 bp, Homo sapien
tgaagccttgttttgggtgagacag

SEQ ID NO: 2116256 - DNA, 25 bp, Homo sapien
ctttagttatagttcactgagcttc

SEQ ID NO: 2116257 - DNA, 25 bp, Homo sapien
ggaactcctattatgcatatttgtc

SEQ ID NO: 2116258 - DNA, 25 bp, Homo sapien
ccattgtcttttggcctgtatggtt

SEQ ID NO: 2116259 - DNA, 25 bp, Homo sapien
tttcaacactttgacagtgtcatcc

SEQ ID NO: 2116260 - DNA, 25 bp, Homo sapien
tcctcacaatagcaggagagggggc

SEQ ID NO: 2116261 - DNA, 25 bp, Homo sapien
caggagagggggccatcttcttcca

SEQ ID NO: 2116262 - DNA, 25 bp, Homo sapien
cctcacaatagcaggagagggggcc

SEQ ID NO: 2116263 - DNA, 25 bp, Homo sapien
agcatggtagcccaaattctaggaa

SEQ ID NO: 2116264 - DNA, 25 bp, Homo sapien
tactcagaatctctgccagggtttg

SEQ ID NO: 2116265 - DNA, 25 bp, Homo sapien
gacaatgtcagattcggatactcag

SEQ ID NO: 2116266 - DNA, 25 bp, Homo sapien
cactgtcaggtgtgtgacaatgtca

SEQ ID NO: 2116267 - DNA, 25 bp, Homo sapien
tatatatgctgccaaaacaagcacg

SEQ ID NO: 2116268 - DNA, 25 bp, Homo sapien
cgacgcggagcggagctcgagacat

SEQ ID NO: 2116269 - DNA, 25 bp, Homo sapien
gcgcgcaagcgcacacgacgcggag

SEQ ID NO: 2116270 - DNA, 25 bp, Homo sapien
aagcgcacacgacgcggagcggagc

SEQ ID NO: 2116271 - DNA, 25 bp, Homo sapien
ggccgtagctggcccggtgggctcg

SEQ ID NO: 2116272 - DNA, 25 bp, Homo sapien
gcattcagaggctcgcggagaccca

SEQ ID NO: 2116273 - DNA, 25 bp, Homo sapien
ggctcgcggagacccaagggtgggc

SEQ ID NO: 2116274 - DNA, 25 bp, Homo sapien
ctaacagcggcgctacagcattcag

SEQ ID NO: 2116275 - DNA, 25 bp, Homo sapien
agcggcgctacagcattcagaggct

SEQ ID NO: 2116276 - DNA, 25 bp, Homo sapien
tcaggggtggcgggcgaaaaggtgc

SEQ ID NO: 2116277 - DNA, 25 bp, Homo sapien
ctgccaccatcagggccgagggcca

SEQ ID NO: 2116278 - DNA, 25 bp, Homo sapien
tgccaccatcagggccgagggccat

SEQ ID NO: 2116279 - DNA, 25 bp, Homo sapien
acaggtatgaggtgaagcctaggtt

SEQ ID NO: 2116280 - DNA, 25 bp, Homo sapien
gtatgaggtgaagcctaggttcttt

SEQ ID NO: 2116281 - DNA, 25 bp, Homo sapien
tgaggtgaagcctaggttcttttat

SEQ ID NO: 2116282 - DNA, 25 bp, Homo sapien
acctcactgcctatcccgcaacagg

SEQ ID NO: 2116283 - DNA, 25 bp, Homo sapien
cccctttactgcctttgaatgcgat

SEQ ID NO: 2116284 - DNA, 25 bp, Homo sapien
gattcagcagcccatcttgcaagca

SEQ ID NO: 2116285 - DNA, 25 bp, Homo sapien
tgcaagcatgaagcaaaaagcctag

SEQ ID NO: 2116286 - DNA, 25 bp, Homo sapien
gattatgatatccagattcagcagc

SEQ ID NO: 2116287 - DNA, 25 bp, Homo sapien
catagaaatctggcagtaagaagca

SEQ ID NO: 2116288 - DNA, 25 bp, Homo sapien
atagaaatctggcagtaagaagcac

SEQ ID NO: 2116289 - DNA, 25 bp, Homo sapien
tcatagaaatctggcagtaagaagc

SEQ ID NO: 2116290 - DNA, 25 bp, Homo sapien
tagaaatctggcagtaagaagcaca

SEQ ID NO: 2116291 - DNA, 25 bp, Homo sapien
ccactcagaatgccttttcgcacca

SEQ ID NO: 2116292 - DNA, 25 bp, Homo sapien
tccactcagaatgccttttcgcacc

SEQ ID NO: 2116293 - DNA, 25 bp, Homo sapien
cactcagaatgccttttcgcaccat

SEQ ID NO: 2116294 - DNA, 25 bp, Homo sapien
cttttggactccattgaagttccca

SEQ ID NO: 2116295 - DNA, 25 bp, Homo sapien
ttgaagttcccacttagtctgctca

SEQ ID NO: 2116296 - DNA, 25 bp, Homo sapien
ctcaattccaggcttccaatctttt

SEQ ID NO: 2116297 - DNA, 25 bp, Homo sapien
tccaatcttttggactccattgaag

SEQ ID NO: 2116298 - DNA, 25 bp, Homo sapien
ttagccttgtggattggtgtctgaa

SEQ ID NO: 2116299 - DNA, 25 bp, Homo sapien
tagccttgtggattggtgtctgaac

SEQ ID NO: 2116300 - DNA, 25 bp, Homo sapien
agccttgtggattggtgtctgaacc

SEQ ID NO: 2116301 - DNA, 25 bp, Homo sapien
cacagctgaatctttgtaacacaca

SEQ ID NO: 2116302 - DNA, 25 bp, Homo sapien
gcaaaaccttttcgatgactctccc

SEQ ID NO: 2116303 - DNA, 25 bp, Homo sapien
tttcaagccactaatacgatgtcag

SEQ ID NO: 2116304 - DNA, 25 bp, Homo sapien
gactacaggcacttctaggctcaag

SEQ ID NO: 2116305 - DNA, 25 bp, Homo sapien
ccgcgcagcgctgaggcttagacat

SEQ ID NO: 2116306 - DNA, 25 bp, Homo sapien
tgtggcaatgaggcaaaacggcagg

SEQ ID NO: 2116307 - DNA, 25 bp, Homo sapien
ttgtggcaatgaggcaaaacggcag

SEQ ID NO: 2116308 - DNA, 25 bp, Homo sapien
ctttgtggcaatgaggcaaaacggc

SEQ ID NO: 2116309 - DNA, 25 bp, Homo sapien
gcaggcatagcagtggaggccttac

SEQ ID NO: 2116310 - DNA, 25 bp, Homo sapien
gcagtaccagatagaagcggactgg

SEQ ID NO: 2116311 - DNA, 25 bp, Homo sapien
agcggactggtgttccatagcgaca

SEQ ID NO: 2116312 - DNA, 25 bp, Homo sapien
cagatagaagcggactggtgttcca

SEQ ID NO: 2116313 - DNA, 25 bp, Homo sapien
tcagtagtagaccagcagtaccaga

SEQ ID NO: 2116314 - DNA, 25 bp, Homo sapien
gcagaccccagcccggaaaagagct

SEQ ID NO: 2116315 - DNA, 25 bp, Homo sapien
aagagctcgcgcatcttctgcagcg

SEQ ID NO: 2116316 - DNA, 25 bp, Homo sapien
cggaaaagagctcgcgcatcttctg

SEQ ID NO: 2116317 - DNA, 25 bp, Homo sapien
ccagcccggaaaagagctcgcgcat

SEQ ID NO: 2116318 - DNA, 25 bp, Homo sapien
ccaccaagtcagcttgggagcagac

SEQ ID NO: 2116319 - DNA, 25 bp, Homo sapien
aagcccaccaagtcagcttgggagc

SEQ ID NO: 2116320 - DNA, 25 bp, Homo sapien
tgtaaacacaggtccaagcccacca

SEQ ID NO: 2116321 - DNA, 25 bp, Homo sapien
gcccaccaagtcagcttgggagcag

SEQ ID NO: 2116322 - DNA, 25 bp, Homo sapien
ctcctggctgtgcacacccccgaag

SEQ ID NO: 2116323 - DNA, 25 bp, Homo sapien
cattgcgcatgaagtaatcctccac

SEQ ID NO: 2116324 - DNA, 25 bp, Homo sapien
gcatgaagtaatcctccactgcacc

SEQ ID NO: 2116325 - DNA, 25 bp, Homo sapien
ttgcgcatgaagtaatcctccactg

SEQ ID NO: 2116326 - DNA, 25 bp, Homo sapien
tgttcatgagtgttaagacttttca

SEQ ID NO: 2116327 - DNA, 25 bp, Homo sapien
gaactagttagcatgaattttggca

SEQ ID NO: 2116328 - DNA, 25 bp, Homo sapien
tcagtgggagcagaacaagagtttt

SEQ ID NO: 2116329 - DNA, 25 bp, Homo sapien
ccaagcctttaatatgttcatgagt

SEQ ID NO: 2116330 - DNA, 25 bp, Homo sapien
tcttccacaactgtatcaaactcgt

SEQ ID NO: 2116331 - DNA, 25 bp, Homo sapien
agactcccgtcttccacaactgtat

SEQ ID NO: 2116332 - DNA, 25 bp, Homo sapien
aactgtatcaaactcgttggtcaac

SEQ ID NO: 2116333 - DNA, 25 bp, Homo sapien
tcaaactcgttggtcaacagctctc

SEQ ID NO: 2116334 - DNA, 25 bp, Homo sapien
ctggaagtggtggaacatggtctgc

SEQ ID NO: 2116335 - DNA, 25 bp, Homo sapien
tggaacatggtctgcagttgctggc

SEQ ID NO: 2116336 - DNA, 25 bp, Homo sapien
aacatggtctgcagttgctggctca

SEQ ID NO: 2116337 - DNA, 25 bp, Homo sapien
aagtggtggaacatggtctgcagtt

SEQ ID NO: 2116338 - DNA, 25 bp, Homo sapien
ggctgtgaccttgcattttctctga

SEQ ID NO: 2116339 - DNA, 25 bp, Homo sapien
ctctctagctgtcttaagtgcagtg

SEQ ID NO: 2116340 - DNA, 25 bp, Homo sapien
ttcatcctcatcagtctctctagct

SEQ ID NO: 2116341 - DNA, 25 bp, Homo sapien
tgaccttgcattttctctgagtgat

SEQ ID NO: 2116342 - DNA, 25 bp, Homo sapien
ctgtagcagccccatcattcgtagc

SEQ ID NO: 2116343 - DNA, 25 bp, Homo sapien
ccttaatagtctgagcgtctggatc

SEQ ID NO: 2116344 - DNA, 25 bp, Homo sapien
gggggcagaccccatctgtagcagc

SEQ ID NO: 2116345 - DNA, 25 bp, Homo sapien
tttttctccggacaatggtccagcc

SEQ ID NO: 2116346 - DNA, 25 bp, Homo sapien
tcactcggatgttaactaaaggccc

SEQ ID NO: 2116347 - DNA, 25 bp, Homo sapien
cctgggaggttccaagttctgggca

SEQ ID NO: 2116348 - DNA, 25 bp, Homo sapien
tgaccgcacccaaaagacactgtac

SEQ ID NO: 2116349 - DNA, 25 bp, Homo sapien
tcttcgaattcctgagggaacccag

SEQ ID NO: 2116350 - DNA, 25 bp, Homo sapien
tactactcacaggtcaagccacaga

SEQ ID NO: 2116351 - DNA, 25 bp, Homo sapien
taaggctactactcacaggtcaagc

SEQ ID NO: 2116352 - DNA, 25 bp, Homo sapien
gaaactgctcccttgtaaactctga

SEQ ID NO: 2116353 - DNA, 25 bp, Homo sapien
ctgattctaaggctactactcacag

SEQ ID NO: 2116354 - DNA, 25 bp, Homo sapien
ctttcatagcactgctgtgctccgt

SEQ ID NO: 2116355 - DNA, 25 bp, Homo sapien
tgctgtgctccgttcgttcatctgt

SEQ ID NO: 2116356 - DNA, 25 bp, Homo sapien
gcactgctgtgctccgttcgttcat

SEQ ID NO: 2116357 - DNA, 25 bp, Homo sapien
tgctccgttcgttcatctgtttggt

SEQ ID NO: 2116358 - DNA, 25 bp, Homo sapien
agaaaaatacagtttatttcaggct

SEQ ID NO: 2116359 - DNA, 25 bp, Homo sapien
ttttatcgtccagacccatggcagg

SEQ ID NO: 2116360 - DNA, 25 bp, Homo sapien
ggagacctggattcaagtgccagct

SEQ ID NO: 2116361 - DNA, 25 bp, Homo sapien
gggtggcaactagacctctcctgcc

SEQ ID NO: 2116362 - DNA, 25 bp, Homo sapien
gagccgttgccagtcctacctgaat

SEQ ID NO: 2116363 - DNA, 25 bp, Homo sapien
gtattaaagctaggaggagccaggc

SEQ ID NO: 2116364 - DNA, 25 bp, Homo sapien
taacactggagccacggaaggttcc

SEQ ID NO: 2116365 - DNA, 25 bp, Homo sapien
cactgggtggcactggacaaatcac

SEQ ID NO: 2116366 - DNA, 25 bp, Homo sapien
cccagcagttttgtgagaagaggcg

SEQ ID NO: 2116367 - DNA, 25 bp, Homo sapien
ccattgtgagggcttatcctatctt

SEQ ID NO: 2116368 - DNA, 25 bp, Homo sapien
agtaactaatctgcccatgctattg

SEQ ID NO: 2116369 - DNA, 25 bp, Homo sapien
tacaaagtaggataagtagaccaat

SEQ ID NO: 2116370 - DNA, 25 bp, Homo sapien
tctttctaggcatatatgcacaaac

SEQ ID NO: 2116371 - DNA, 25 bp, Homo sapien
ttcaaagtgagctgctagtcaggca

SEQ ID NO: 2116372 - DNA, 25 bp, Homo sapien
gagacttagaaggagcagccctagg

SEQ ID NO: 2116373 - DNA, 25 bp, Homo sapien
gctggccaagatcaccaaagggagt

SEQ ID NO: 2116374 - DNA, 25 bp, Homo sapien
tattccaaagccataaggctggcca

SEQ ID NO: 2116375 - DNA, 25 bp, Homo sapien
tcgaggacctcccagtctgatgtgg

SEQ ID NO: 2116376 - DNA, 25 bp, Homo sapien
tatgaggttaggagccaaattggct

SEQ ID NO: 2116377 - DNA, 25 bp, Homo sapien
gcaacagaatagcatagcctacagg

SEQ ID NO: 2116378 - DNA, 25 bp, Homo sapien
ctgtgccacttgctagctttgagca

SEQ ID NO: 2116379 - DNA, 25 bp, Homo sapien
ggtgtggtgacccgaaattgcacca

SEQ ID NO: 2116380 - DNA, 25 bp, Homo sapien
ggaggtgtggtgacccgaaattgca

SEQ ID NO: 2116381 - DNA, 25 bp, Homo sapien
cggaggtgtggtgacccgaaattgc

SEQ ID NO: 2116382 - DNA, 25 bp, Homo sapien
gaggtgtggtgacccgaaattgcac

SEQ ID NO: 2116383 - DNA, 25 bp, Homo sapien
tatacgttcttatacttttgtgctt

SEQ ID NO: 2116384 - DNA, 25 bp, Homo sapien
ttatacgttcttatacttttgtgct

SEQ ID NO: 2116385 - DNA, 25 bp, Homo sapien
ctgttcccgtgcctgcgtctgcctc

SEQ ID NO: 2116386 - DNA, 25 bp, Homo sapien
cccgtgcctgcgtctgcctctgcat

SEQ ID NO: 2116387 - DNA, 25 bp, Homo sapien
gttcccgtgcctgcgtctgcctctg

SEQ ID NO: 2116388 - DNA, 25 bp, Homo sapien
tgtctgttcccgtgcctgcgtctgc

SEQ ID NO: 2116389 - DNA, 25 bp, Homo sapien
gcgatgcctggcacggcagcggcgg

SEQ ID NO: 2116390 - DNA, 25 bp, Homo sapien
tcgcccaaccgcagccgcatagaca

SEQ ID NO: 2116391 - DNA, 25 bp, Homo sapien
ggccggcgatgcctggcacggcagc

SEQ ID NO: 2116392 - DNA, 25 bp, Homo sapien
gcatagacagcgctccccagcgggc

SEQ ID NO: 2116393 - DNA, 25 bp, Homo sapien
tcctcttgaacccttttatagctcc

SEQ ID NO: 2116394 - DNA, 25 bp, Homo sapien
tcttcctcttgaacccttttatagc

SEQ ID NO: 2116395 - DNA, 25 bp, Homo sapien
cttgaacccttttatagctccacat

SEQ ID NO: 2116396 - DNA, 25 bp, Homo sapien
tcttgaacccttttatagctccaca

SEQ ID NO: 2116397 - DNA, 25 bp, Homo sapien
cagctaggctccgacttccggatcc

SEQ ID NO: 2116398 - DNA, 25 bp, Homo sapien
gcgagggcaacacgacaactcggtt

SEQ ID NO: 2116399 - DNA, 25 bp, Homo sapien
gggatctgagaagcgagggcaacac

SEQ ID NO: 2116400 - DNA, 25 bp, Homo sapien
agcagaaactctcgcgcagctaggc

SEQ ID NO: 2116401 - DNA, 25 bp, Homo sapien
caggttggcgggcatctctggtttc

SEQ ID NO: 2116402 - DNA, 25 bp, Homo sapien
aactgcccggccgtctaggtgagcg

SEQ ID NO: 2116403 - DNA, 25 bp, Homo sapien
ggtttcacatccaatagacgatcct

SEQ ID NO: 2116404 - DNA, 25 bp, Homo sapien
tctaggtgagcgcacattgtgagaa

SEQ ID NO: 2116405 - DNA, 25 bp, Homo sapien
ctcttcatggattaaggtctgttcc

SEQ ID NO: 2116406 - DNA, 25 bp, Homo sapien
ggtctgttcctgtttgcttcgaagc

SEQ ID NO: 2116407 - DNA, 25 bp, Homo sapien
tctgttcctgtttgcttcgaagcat

SEQ ID NO: 2116408 - DNA, 25 bp, Homo sapien
ctgactgtctcttcatggattaagg

SEQ ID NO: 2116409 - DNA, 25 bp, Homo sapien
tctatggaaggtggactgtgacaac

SEQ ID NO: 2116410 - DNA, 25 bp, Homo sapien
ggtaatcagcgatgtcactccctct

SEQ ID NO: 2116411 - DNA, 25 bp, Homo sapien
gggagagaccatacgcactgaactg

SEQ ID NO: 2116412 - DNA, 25 bp, Homo sapien
tgaagtcagcggcacactaacactg

SEQ ID NO: 2116413 - DNA, 25 bp, Homo sapien
tcagaatgggagaagaagcaatttg

SEQ ID NO: 2116414 - DNA, 25 bp, Homo sapien
gggagaagaagcaatttgaagacag

SEQ ID NO: 2116415 - DNA, 25 bp, Homo sapien
atgggagaagaagcaatttgaagac

SEQ ID NO: 2116416 - DNA, 25 bp, Homo sapien
tgtcagaatgggagaagaagcaatt

SEQ ID NO: 2116417 - DNA, 25 bp, Homo sapien
agataggttcaaatctgcttgctct

SEQ ID NO: 2116418 - DNA, 25 bp, Homo sapien
atgaccagcttgaaagcagataggt

SEQ ID NO: 2116419 - DNA, 25 bp, Homo sapien
gcttgaaagcagataggttcaaatc

SEQ ID NO: 2116420 - DNA, 25 bp, Homo sapien
ccagcttgaaagcagataggttcaa

SEQ ID NO: 2116421 - DNA, 25 bp, Homo sapien
caggaattcaaagttataatgagct

SEQ ID NO: 2116422 - DNA, 25 bp, Homo sapien
ggaattcaaagttataatgagctat

SEQ ID NO: 2116423 - DNA, 25 bp, Homo sapien
aggaattcaaagttataatgagcta

SEQ ID NO: 2116424 - DNA, 25 bp, Homo sapien
caccttcataggggctcaaggaatt

SEQ ID NO: 2116425 - DNA, 25 bp, Homo sapien
tgagggtagggccaacttatcttct

SEQ ID NO: 2116426 - DNA, 25 bp, Homo sapien
tagggccaacttatcttcttgtggc

SEQ ID NO: 2116427 - DNA, 25 bp, Homo sapien
cttcttgtggcccttggaaccttca

SEQ ID NO: 2116428 - DNA, 25 bp, Homo sapien
ttcttgtggcccttggaaccttcac

SEQ ID NO: 2116429 - DNA, 25 bp, Homo sapien
cactgactccaatgtggcactctgt

SEQ ID NO: 2116430 - DNA, 25 bp, Homo sapien
cagttgcgttaccttgaacctagga

SEQ ID NO: 2116431 - DNA, 25 bp, Homo sapien
taccaaggtaaatcaagcacgaagc

SEQ ID NO: 2116432 - DNA, 25 bp, Homo sapien
gcacgaagctgcatatgacttggga

SEQ ID NO: 2116433 - DNA, 25 bp, Homo sapien
ttcagcctctcgattggcatgatca

SEQ ID NO: 2116434 - DNA, 25 bp, Homo sapien
tcagcctctcgattggcatgatcat

SEQ ID NO: 2116435 - DNA, 25 bp, Homo sapien
gacagtagctctcaatggtcctgcg

SEQ ID NO: 2116436 - DNA, 25 bp, Homo sapien
gtagctctcaatggtcctgcgtttt

SEQ ID NO: 2116437 - DNA, 25 bp, Homo sapien
ctctcaatggtcctgcgtttttgtc

SEQ ID NO: 2116438 - DNA, 25 bp, Homo sapien
catcctgacagtagctctcaatggt

SEQ ID NO: 2116439 - DNA, 25 bp, Homo sapien
tccttgtaataagccttcctcgtgg

SEQ ID NO: 2116440 - DNA, 25 bp, Homo sapien
ttcctcgtggcctcgtcatccagct

SEQ ID NO: 2116441 - DNA, 25 bp, Homo sapien
tatttaattcctgcaaaacttcctc

SEQ ID NO: 2116442 - DNA, 25 bp, Homo sapien
gaactccttgtaataagccttcctc

SEQ ID NO: 2116443 - DNA, 25 bp, Homo sapien
tgttgccttgtgctcgcaggacagc

SEQ ID NO: 2116444 - DNA, 25 bp, Homo sapien
tcttgttgccttgtgctcgcaggac

SEQ ID NO: 2116445 - DNA, 25 bp, Homo sapien
gcttcttgttgccttgtgctcgcag

SEQ ID NO: 2116446 - DNA, 25 bp, Homo sapien
ttgccttgtgctcgcaggacagcct

SEQ ID NO: 2116447 - DNA, 25 bp, Homo sapien
cgggatgcgttagccctccctgaag

SEQ ID NO: 2116448 - DNA, 25 bp, Homo sapien
tggagttagaaaggatagtctggtc

SEQ ID NO: 2116449 - DNA, 25 bp, Homo sapien
tctggtctacgggatgcgttagccc

SEQ ID NO: 2116450 - DNA, 25 bp, Homo sapien
ccatccagtccgcaggttggagtta

SEQ ID NO: 2116451 - DNA, 25 bp, Homo sapien
tggggtaaatataggaacagatggg

SEQ ID NO: 2116452 - DNA, 25 bp, Homo sapien
ctggggtaaatataggaacagatgg

SEQ ID NO: 2116453 - DNA, 25 bp, Homo sapien
gcaactcattccgaaggtaatccag

SEQ ID NO: 2116454 - DNA, 25 bp, Homo sapien
tggcaactcattccgaaggtaatcc

SEQ ID NO: 2116455 - DNA, 25 bp, Homo sapien
gttggcaactcattccgaaggtaat

SEQ ID NO: 2116456 - DNA, 25 bp, Homo sapien
actcattccgaaggtaatccagcca

SEQ ID NO: 2116457 - DNA, 25 bp, Homo sapien
ctcagaggcctgatctactggcaca

SEQ ID NO: 2116458 - DNA, 25 bp, Homo sapien
gaggcctgatctactggcacactgc

SEQ ID NO: 2116459 - DNA, 25 bp, Homo sapien
ccacaacacccacacgaatgtgggt

SEQ ID NO: 2116460 - DNA, 25 bp, Homo sapien
acgaatgtgggtgcgcacttcacca

SEQ ID NO: 2116461 - DNA, 25 bp, Homo sapien
ggtcaaagtgtatgtgggcacatgc

SEQ ID NO: 2116462 - DNA, 25 bp, Homo sapien
gtcaaagtgtatgtgggcacatgcg

SEQ ID NO: 2116463 - DNA, 25 bp, Homo sapien
gggtcaaagtgtatgtgggcacatg

SEQ ID NO: 2116464 - DNA, 25 bp, Homo sapien
tcaaagtgtatgtgggcacatgcgt

SEQ ID NO: 2116465 - DNA, 25 bp, Homo sapien
ctgcatgcgcggctgcgcttcaggc

SEQ ID NO: 2116466 - DNA, 25 bp, Homo sapien
ctgcgcttcaggctattgatcaggc

SEQ ID NO: 2116467 - DNA, 25 bp, Homo sapien
ctgctcttcccaacattgggaagac

SEQ ID NO: 2116468 - DNA, 25 bp, Homo sapien
cttcaggctattgatcaggctgctc

SEQ ID NO: 2116469 - DNA, 25 bp, Homo sapien
cgtggacgcagttacgcaggatggt

SEQ ID NO: 2116470 - DNA, 25 bp, Homo sapien
tgcacgtggacgcagttacgcagga

SEQ ID NO: 2116471 - DNA, 25 bp, Homo sapien
cacgtggacgcagttacgcaggatg

SEQ ID NO: 2116472 - DNA, 25 bp, Homo sapien
gcacgtggacgcagttacgcaggat

SEQ ID NO: 2116473 - DNA, 25 bp, Homo sapien
agctttggccgcctgttcctgacta

SEQ ID NO: 2116474 - DNA, 25 bp, Homo sapien
cctgactatataagcctcccttctt

SEQ ID NO: 2116475 - DNA, 25 bp, Homo sapien
tggtctggaacccagagacgccata

SEQ ID NO: 2116476 - DNA, 25 bp, Homo sapien
cagagacgccataatagttggaaat

SEQ ID NO: 2116477 - DNA, 25 bp, Homo sapien
atggtgtcttcattggcctgctcag

SEQ ID NO: 2116478 - DNA, 25 bp, Homo sapien
ggcctgctcagtatcctcgatgtca

SEQ ID NO: 2116479 - DNA, 25 bp, Homo sapien
tcttcattggcctgctcagtatcct

SEQ ID NO: 2116480 - DNA, 25 bp, Homo sapien
tcattggcctgctcagtatcctcga

SEQ ID NO: 2116481 - DNA, 25 bp, Homo sapien
tgacttgggtaccttactcaccgat

SEQ ID NO: 2116482 - DNA, 25 bp, Homo sapien
taccttatcgggtggacttactgtc

SEQ ID NO: 2116483 - DNA, 25 bp, Homo sapien
agagtcttcaacagggcaggagaac

SEQ ID NO: 2116484 - DNA, 25 bp, Homo sapien
ccaggcagtctatacttttggacac

SEQ ID NO: 2116485 - DNA, 25 bp, Homo sapien
aatatctgaggagggcaaacattct

SEQ ID NO: 2116486 - DNA, 25 bp, Homo sapien
gaggagggcaaacattctcaggagt

SEQ ID NO: 2116487 - DNA, 25 bp, Homo sapien
tgaggagggcaaacattctcaggag

SEQ ID NO: 2116488 - DNA, 25 bp, Homo sapien
agagtaatatctgaggagggcaaac

SEQ ID NO: 2116489 - DNA, 25 bp, Homo sapien
cacggtggttttattttcaatggca

SEQ ID NO: 2116490 - DNA, 25 bp, Homo sapien
cggtggttttattttcaatggcatc

SEQ ID NO: 2116491 - DNA, 25 bp, Homo sapien
gtggttttattttcaatggcatctg

SEQ ID NO: 2116492 - DNA, 25 bp, Homo sapien
acggtggttttattttcaatggcat

SEQ ID NO: 2116493 - DNA, 25 bp, Homo sapien
taactgcccatcagaaacatgaagg

SEQ ID NO: 2116494 - DNA, 25 bp, Homo sapien
cggcctcggttccatcttcaggaaa

SEQ ID NO: 2116495 - DNA, 25 bp, Homo sapien
gatagtggtggtcaacatactactg

SEQ ID NO: 2116496 - DNA, 25 bp, Homo sapien
ccaggctaaagaaggtacaatgatc

SEQ ID NO: 2116497 - DNA, 25 bp, Homo sapien
catactgttgctcttagggcggtgg

SEQ ID NO: 2116498 - DNA, 25 bp, Homo sapien
ggcggtccactgagcagacatccac

SEQ ID NO: 2116499 - DNA, 25 bp, Homo sapien
actgagcggcggtccactgagcaga

SEQ ID NO: 2116500 - DNA, 25 bp, Homo sapien
gcggtggtccacattgcgtttagcc

SEQ ID NO: 2116501 - DNA, 25 bp, Homo sapien
gccagagaggtcgagagcagacatc

SEQ ID NO: 2116502 - DNA, 25 bp, Homo sapien
gaatcagacagcttgctggcgattt

SEQ ID NO: 2116503 - DNA, 25 bp, Homo sapien
gacatcatggaatcagacagcttgc

SEQ ID NO: 2116504 - DNA, 25 bp, Homo sapien
aacaccatcatcagcattgccagag

SEQ ID NO: 2116505 - DNA, 25 bp, Homo sapien
gcagatgcttcagggagaaccaaac

SEQ ID NO: 2116506 - DNA, 25 bp, Homo sapien
tgcttcagggagaaccaaactattt

SEQ ID NO: 2116507 - DNA, 25 bp, Homo sapien
aatatgcagatgcttcagggagaac

SEQ ID NO: 2116508 - DNA, 25 bp, Homo sapien
agggagaaccaaactatttcactgg

SEQ ID NO: 2116509 - DNA, 25 bp, Homo sapien
gactgcagtaatgctatgcccaggg

SEQ ID NO: 2116510 - DNA, 25 bp, Homo sapien
taggagacatggtcacacaagggca

SEQ ID NO: 2116511 - DNA, 25 bp, Homo sapien
tgtaggtcagccctcaacaggtgtt

SEQ ID NO: 2116512 - DNA, 25 bp, Homo sapien
tcttcacgcaaacagggtagtgcct

SEQ ID NO: 2116513 - DNA, 25 bp, Homo sapien
aagagtggtcttgtacttccctgcc

SEQ ID NO: 2116514 - DNA, 25 bp, Homo sapien
ggagacgaatcccttactagcagag

SEQ ID NO: 2116515 - DNA, 25 bp, Homo sapien
ctttggttgcccctgaatacaagag

SEQ ID NO: 2116516 - DNA, 25 bp, Homo sapien
ccagggcttggtgcagtttgtactc

SEQ ID NO: 2116517 - DNA, 25 bp, Homo sapien
ggtttaccaggaagtagccccatca

SEQ ID NO: 2116518 - DNA, 25 bp, Homo sapien
gagttgactacaaaagggcctggag

SEQ ID NO: 2116519 - DNA, 25 bp, Homo sapien
ggtagagaaactgcactcccaacgt

SEQ ID NO: 2116520 - DNA, 25 bp, Homo sapien
ggtgagagctatcgtaactggcctg

SEQ ID NO: 2116521 - DNA, 25 bp, Homo sapien
tcttgtaatcccagcactttgggag

SEQ ID NO: 2116522 - DNA, 25 bp, Homo sapien
gcgcagtggctcactcttgtaatcc

SEQ ID NO: 2116523 - DNA, 25 bp, Homo sapien
atataagaacaaagaaaaaggccag

SEQ ID NO: 2116524 - DNA, 25 bp, Homo sapien
ctggccagtgtggagaaacccccgc

SEQ ID NO: 2116525 - DNA, 25 bp, Homo sapien
gacgaaaatatatggccggacacgg

SEQ ID NO: 2116526 - DNA, 25 bp, Homo sapien
aaaggtgggaacaatgcacatgtcc

SEQ ID NO: 2116527 - DNA, 25 bp, Homo sapien
gaatgagaagacaagatactggcca

SEQ ID NO: 2116528 - DNA, 25 bp, Homo sapien
tactcatagcaaaagaagtcgctct

SEQ ID NO: 2116529 - DNA, 25 bp, Homo sapien
caccactcttactcagtgtagtact

SEQ ID NO: 2116530 - DNA, 25 bp, Homo sapien
tcccagcgactacaataagacaaaa

SEQ ID NO: 2116531 - DNA, 25 bp, Homo sapien
ctggaagtcccagcgactacaataa

SEQ ID NO: 2116532 - DNA, 25 bp, Homo sapien
tcttactcagtgtagtactggaagt

SEQ ID NO: 2116533 - DNA, 25 bp, Homo sapien
taacatacttaatggttaaaggcag

SEQ ID NO: 2116534 - DNA, 25 bp, Homo sapien
taaaacaaacccttagcacctcata

SEQ ID NO: 2116535 - DNA, 25 bp, Homo sapien
acatacttaatggttaaaggcagaa

SEQ ID NO: 2116536 - DNA, 25 bp, Homo sapien
tagcacctcatactagtaaagggca

SEQ ID NO: 2116537 - DNA, 25 bp, Homo sapien
gagagagtgtaaccctgacaacacc

SEQ ID NO: 2116538 - DNA, 25 bp, Homo sapien
taggaatctaagcagcctctagaag

SEQ ID NO: 2116539 - DNA, 25 bp, Homo sapien
ctacatagttattttgaagatgagg

SEQ ID NO: 2116540 - DNA, 25 bp, Homo sapien
gacaacaccaattttggcccagtga

SEQ ID NO: 2116541 - DNA, 25 bp, Homo sapien
caagagtccttttaagtgagaggca

SEQ ID NO: 2116542 - DNA, 25 bp, Homo sapien
tatcctagatgatcccaatgcatgc

SEQ ID NO: 2116543 - DNA, 25 bp, Homo sapien
gcatgcaaagtaatcacaagagtcc

SEQ ID NO: 2116544 - DNA, 25 bp, Homo sapien
caaattacatctgcagtaggctgaa

SEQ ID NO: 2116545 - DNA, 25 bp, Homo sapien
aagtaaaatttatgacactagcatg

SEQ ID NO: 2116546 - DNA, 25 bp, Homo sapien
taataaaacaatgaggtacagctaa

SEQ ID NO: 2116547 - DNA, 25 bp, Homo sapien
aaagggaacaaagcatacatggaac

SEQ ID NO: 2116548 - DNA, 25 bp, Homo sapien
caaacctagccatactgataataac

SEQ ID NO: 2116549 - DNA, 25 bp, Homo sapien
caagttcaagctatatgcagtctag

SEQ ID NO: 2116550 - DNA, 25 bp, Homo sapien
tgggttgacagtaaaagatatacca

SEQ ID NO: 2116551 - DNA, 25 bp, Homo sapien
gggcacagactgtgacaagcaagtt

SEQ ID NO: 2116552 - DNA, 25 bp, Homo sapien
tactaaggactaagacaatgatttt

SEQ ID NO: 2116553 - DNA, 25 bp, Homo sapien
tacaatggggtatgattcagtctta

SEQ ID NO: 2116554 - DNA, 25 bp, Homo sapien
gaaattgtgaactgttacaacatgg

SEQ ID NO: 2116555 - DNA, 25 bp, Homo sapien
agctggggtagaaaacggtgataca

SEQ ID NO: 2116556 - DNA, 25 bp, Homo sapien
ggagctagtgtttagagagtacaga

SEQ ID NO: 2116557 - DNA, 25 bp, Homo sapien
gaatagccaatgttatccttagcaa

SEQ ID NO: 2116558 - DNA, 25 bp, Homo sapien
acacagaatagccaatgttatcctt

SEQ ID NO: 2116559 - DNA, 25 bp, Homo sapien
attaaaatgtccatataaccctaag

SEQ ID NO: 2116560 - DNA, 25 bp, Homo sapien
catataaccctaagcaatctacaga

SEQ ID NO: 2116561 - DNA, 25 bp, Homo sapien
taaggtcctgtctgaaattccaata

SEQ ID NO: 2116562 - DNA, 25 bp, Homo sapien
aactcactgagttcaataacccagc

SEQ ID NO: 2116563 - DNA, 25 bp, Homo sapien
taacccagccataatgaatttactg

SEQ ID NO: 2116564 - DNA, 25 bp, Homo sapien
tctgatacttgcttggtcctttgag

SEQ ID NO: 2116565 - DNA, 25 bp, Homo sapien
caatatgtccaattgctgctaacgt

SEQ ID NO: 2116566 - DNA, 25 bp, Homo sapien
tactatgaaagtgatgttgtaccct

SEQ ID NO: 2116567 - DNA, 25 bp, Homo sapien
ccagatatggctagtgagagcacct

SEQ ID NO: 2116568 - DNA, 25 bp, Homo sapien
cagggtccttttgtcatagcttaca

SEQ ID NO: 2116569 - DNA, 25 bp, Homo sapien
aatgaaaactagtacgcaaatacat

SEQ ID NO: 2116570 - DNA, 25 bp, Homo sapien
tgaaaactagtacgcaaatacatgt

SEQ ID NO: 2116571 - DNA, 25 bp, Homo sapien
caaattgtggtatttacttacaatg

SEQ ID NO: 2116572 - DNA, 25 bp, Homo sapien
agaaatgaaaactagtacgcaaata

SEQ ID NO: 2116573 - DNA, 25 bp, Homo sapien
tctgaaaactttactggatgtccaa

SEQ ID NO: 2116574 - DNA, 25 bp, Homo sapien
tcaaatggcttatagtcgatactgc

SEQ ID NO: 2116575 - DNA, 25 bp, Homo sapien
tgtccaagaaggctcactcaaatgg

SEQ ID NO: 2116576 - DNA, 25 bp, Homo sapien
tcgatactgcttgtcagctaagagc

SEQ ID NO: 2116577 - DNA, 25 bp, Homo sapien
ggtggtgagacatcataagagcaca

SEQ ID NO: 2116578 - DNA, 25 bp, Homo sapien
caatccttactaatgctgctataga

SEQ ID NO: 2116579 - DNA, 25 bp, Homo sapien
ccttactaatgctgctatagaaggg

SEQ ID NO: 2116580 - DNA, 25 bp, Homo sapien
ctgcaatccttactaatgctgctat

SEQ ID NO: 2116581 - DNA, 25 bp, Homo sapien
gggttcaagttctcggccaattcat

SEQ ID NO: 2116582 - DNA, 25 bp, Homo sapien
cccctaagaactgcatggacttgat

SEQ ID NO: 2116583 - DNA, 25 bp, Homo sapien
cagatgcttgataatgcctgtaagg

SEQ ID NO: 2116584 - DNA, 25 bp, Homo sapien
tgtcatgggcttcaatcaatatcca

SEQ ID NO: 2116585 - DNA, 25 bp, Homo sapien
ttcctgagagcctaagcacattccc

SEQ ID NO: 2116586 - DNA, 25 bp, Homo sapien
tgggaccatctaggccaggagttcc

SEQ ID NO: 2116587 - DNA, 25 bp, Homo sapien
aatctcaagttccacaggtcccagc

SEQ ID NO: 2116588 - DNA, 25 bp, Homo sapien
gaggaccaggcaagttctgggacca

SEQ ID NO: 2116589 - DNA, 25 bp, Homo sapien
agatccaaaatggacaccctaacat

SEQ ID NO: 2116590 - DNA, 25 bp, Homo sapien
gatccaaaatggacaccctaacatc

SEQ ID NO: 2116591 - DNA, 25 bp, Homo sapien
agcaggaaagatccaaaatggacac

SEQ ID NO: 2116592 - DNA, 25 bp, Homo sapien
ggaaagatccaaaatggacacccta

SEQ ID NO: 2116593 - DNA, 25 bp, Homo sapien
cctccagcgagttcgggatgcgtct

SEQ ID NO: 2116594 - DNA, 25 bp, Homo sapien
tcgggatgcgtctgccttctctaag

SEQ ID NO: 2116595 - DNA, 25 bp, Homo sapien
tctctaagtccctctcgaagtctca

SEQ ID NO: 2116596 - DNA, 25 bp, Homo sapien
taagtccctctcgaagtctcagcct

SEQ ID NO: 2116597 - DNA, 25 bp, Homo sapien
ggtctggaaccactgtctgacctcc

SEQ ID NO: 2116598 - DNA, 25 bp, Homo sapien
agcctactactttctcagtcgtcct

SEQ ID NO: 2116599 - DNA, 25 bp, Homo sapien
tctgctcccagtctgtacagcctac

SEQ ID NO: 2116600 - DNA, 25 bp, Homo sapien
ctgcatccccgattctcttctctgg

SEQ ID NO: 2116601 - DNA, 25 bp, Homo sapien
aagcccctccgaaactcggagactg

SEQ ID NO: 2116602 - DNA, 25 bp, Homo sapien
gagtgcgtccactcactccaagccc

SEQ ID NO: 2116603 - DNA, 25 bp, Homo sapien
ctcgtcctcctacaattcccgagtg

SEQ ID NO: 2116604 - DNA, 25 bp, Homo sapien
ctccaagcccctccgaaactcggag

SEQ ID NO: 2116605 - DNA, 25 bp, Homo sapien
ccgttctcagatacaggaattcaaa

SEQ ID NO: 2116606 - DNA, 25 bp, Homo sapien
cgactccgttctcagatacaggaat

SEQ ID NO: 2116607 - DNA, 25 bp, Homo sapien
gttctcagatacaggaattcaaagc

SEQ ID NO: 2116608 - DNA, 25 bp, Homo sapien
ctccgttctcagatacaggaattca

SEQ ID NO: 2116609 - DNA, 25 bp, Homo sapien
gcctgggtcaagttgaagcccactg

SEQ ID NO: 2116610 - DNA, 25 bp, Homo sapien
actgaacgtcctctcccctgttgtg

SEQ ID NO: 2116611 - DNA, 25 bp, Homo sapien
ggtcaagttgaagcccactgaacgt

SEQ ID NO: 2116612 - DNA, 25 bp, Homo sapien
gttgaagcccactgaacgtcctctc

SEQ ID NO: 2116613 - DNA, 25 bp, Homo sapien
tctcaatttggcctggcaagagctg

SEQ ID NO: 2116614 - DNA, 25 bp, Homo sapien
gtctcaatttggcctggcaagagct

SEQ ID NO: 2116615 - DNA, 25 bp, Homo sapien
caccactctcgcttgtgtcagacat

SEQ ID NO: 2116616 - DNA, 25 bp, Homo sapien
gcgagttagacctgcaccactctcg

SEQ ID NO: 2116617 - DNA, 25 bp, Homo sapien
ctggaagcgagttagacctgcacca

SEQ ID NO: 2116618 - DNA, 25 bp, Homo sapien
gcaccactctcgcttgtgtcagaca

SEQ ID NO: 2116619 - DNA, 25 bp, Homo sapien
catcgagctactgtccttttctgaa

SEQ ID NO: 2116620 - DNA, 25 bp, Homo sapien
gcatcatcgagctactgtccttttc

SEQ ID NO: 2116621 - DNA, 25 bp, Homo sapien
acagagtctgcatcatcgagctact

SEQ ID NO: 2116622 - DNA, 25 bp, Homo sapien
gagtctgcatcatcgagctactgtc

SEQ ID NO: 2116623 - DNA, 25 bp, Homo sapien
atcctctgagacctccagtgccttt

SEQ ID NO: 2116624 - DNA, 25 bp, Homo sapien
ctgagacctccagtgcctttgaggc

SEQ ID NO: 2116625 - DNA, 25 bp, Homo sapien
ctctgagacctccagtgcctttgag

SEQ ID NO: 2116626 - DNA, 25 bp, Homo sapien
tcacatcctctgagacctccagtgc

SEQ ID NO: 2116627 - DNA, 25 bp, Homo sapien
tcctgagcctttgtattgacctttg

SEQ ID NO: 2116628 - DNA, 25 bp, Homo sapien
gaccttgggccgagtatcctgattc

SEQ ID NO: 2116629 - DNA, 25 bp, Homo sapien
ttgtcacagcctgcgggtcagcatt

SEQ ID NO: 2116630 - DNA, 25 bp, Homo sapien
ctgattctcctgagactgggcagct

SEQ ID NO: 2116631 - DNA, 25 bp, Homo sapien
tgagacccttcggccacctgtggtt

SEQ ID NO: 2116632 - DNA, 25 bp, Homo sapien
tgtggttccagaagcctgactctga

SEQ ID NO: 2116633 - DNA, 25 bp, Homo sapien
cagaagcctgactctgatcactgct

SEQ ID NO: 2116634 - DNA, 25 bp, Homo sapien
gacccttcggccacctgtggttcca

SEQ ID NO: 2116635 - DNA, 25 bp, Homo sapien
ccaagcagccaaccgagtccttgat

SEQ ID NO: 2116636 - DNA, 25 bp, Homo sapien
caaaaggctatgggaccccttgaag

SEQ ID NO: 2116637 - DNA, 25 bp, Homo sapien
gtccttgatgccctgcgggcccaaa

SEQ ID NO: 2116638 - DNA, 25 bp, Homo sapien
tgcccctacgggctttaggtgatct

SEQ ID NO: 2116639 - DNA, 25 bp, Homo sapien
ggatgactggagcttggcagctcta

SEQ ID NO: 2116640 - DNA, 25 bp, Homo sapien
ttgcaaaagggccacatcccgaggt

SEQ ID NO: 2116641 - DNA, 25 bp, Homo sapien
tgcttcaggctcttgggatgactgg

SEQ ID NO: 2116642 - DNA, 25 bp, Homo sapien
ggccacatcccgaggtggtggtgct

SEQ ID NO: 2116643 - DNA, 25 bp, Homo sapien
aaaggtacttcaccaaatcatttgc

SEQ ID NO: 2116644 - DNA, 25 bp, Homo sapien
gggaatcttcgtctggtctttagcc

SEQ ID NO: 2116645 - DNA, 25 bp, Homo sapien
ccgagcgcttgatgggaatcttcgt

SEQ ID NO: 2116646 - DNA, 25 bp, Homo sapien
tggtctttagccaaaaggtacttca

SEQ ID NO: 2116647 - DNA, 25 bp, Homo sapien
ggtggccctgatgcccaagctatag

SEQ ID NO: 2116648 - DNA, 25 bp, Homo sapien
tgactgaagagatgccaggtggccc

SEQ ID NO: 2116649 - DNA, 25 bp, Homo sapien
taacccggttctgtgcttatcaaca

SEQ ID NO: 2116650 - DNA, 25 bp, Homo sapien
caagctatagactctttgccaacca

SEQ ID NO: 2116651 - DNA, 25 bp, Homo sapien
ttctttgatgatgtccttcagcatg

SEQ ID NO: 2116652 - DNA, 25 bp, Homo sapien
aggaatagcctgctcgttcaatgat

SEQ ID NO: 2116653 - DNA, 25 bp, Homo sapien
atagcctgctcgttcaatgatttcg

SEQ ID NO: 2116654 - DNA, 25 bp, Homo sapien
gatttcggggtacacatcagtgtat

SEQ ID NO: 2116655 - DNA, 25 bp, Homo sapien
tgcccatcccccagggctgcccctt

SEQ ID NO: 2116656 - DNA, 25 bp, Homo sapien
tcaaggcttccccactgtgcccatc

SEQ ID NO: 2116657 - DNA, 25 bp, Homo sapien
ccatcccccagggctgccccttcac

SEQ ID NO: 2116658 - DNA, 25 bp, Homo sapien
tgtgcccatcccccagggctgcccc

SEQ ID NO: 2116659 - DNA, 25 bp, Homo sapien
ctgtggatggggagaacagcttgtg

SEQ ID NO: 2116660 - DNA, 25 bp, Homo sapien
gggagaacagcttgtgagatgacaa

SEQ ID NO: 2116661 - DNA, 25 bp, Homo sapien
gagaacagcttgtgagatgacaaaa

SEQ ID NO: 2116662 - DNA, 25 bp, Homo sapien
tggggagaacagcttgtgagatgac

SEQ ID NO: 2116663 - DNA, 25 bp, Homo sapien
tatgcctgcatcagtgggctctaag

SEQ ID NO: 2116664 - DNA, 25 bp, Homo sapien
gtacaagtggtcattcttatcaatt

SEQ ID NO: 2116665 - DNA, 25 bp, Homo sapien
ttcccagtatgcctgcatcagtggg

SEQ ID NO: 2116666 - DNA, 25 bp, Homo sapien
tttccttcaattgaatcccaaatac

SEQ ID NO: 2116667 - DNA, 25 bp, Homo sapien
cagagacagcaaacctgacagcagg

SEQ ID NO: 2116668 - DNA, 25 bp, Homo sapien
gccaccactgtaagcagggctccaa

SEQ ID NO: 2116669 - DNA, 25 bp, Homo sapien
gtcaatcataatcaggtgccaccac

SEQ ID NO: 2116670 - DNA, 25 bp, Homo sapien
tacaccctccagtcaatcataatca

SEQ ID NO: 2116671 - DNA, 25 bp, Homo sapien
agatgatgctaagaagcaccatgag

SEQ ID NO: 2116672 - DNA, 25 bp, Homo sapien
tgatgctaagaagcaccatgagcag

SEQ ID NO: 2116673 - DNA, 25 bp, Homo sapien
gatgctaagaagcaccatgagcaga

SEQ ID NO: 2116674 - DNA, 25 bp, Homo sapien
tgctaagaagcaccatgagcagacc

SEQ ID NO: 2116675 - DNA, 25 bp, Homo sapien
ccattcagctgcaagcccagccact

SEQ ID NO: 2116676 - DNA, 25 bp, Homo sapien
attcagctgcaagcccagccactca

SEQ ID NO: 2116677 - DNA, 25 bp, Homo sapien
ttcagctgcaagcccagccactcac

SEQ ID NO: 2116678 - DNA, 25 bp, Homo sapien
cattcagctgcaagcccagccactc

SEQ ID NO: 2116679 - DNA, 25 bp, Homo sapien
gggcgcagccccaacttgcgcagca

SEQ ID NO: 2116680 - DNA, 25 bp, Homo sapien
ccagggcgcagccccaacttgcgca

SEQ ID NO: 2116681 - DNA, 25 bp, Homo sapien
agggcgcagccccaacttgcgcagc

SEQ ID NO: 2116682 - DNA, 25 bp, Homo sapien
cagggcgcagccccaacttgcgcag

SEQ ID NO: 2116683 - DNA, 25 bp, Homo sapien
gacagcaagcgctgagagagcccaa

SEQ ID NO: 2116684 - DNA, 25 bp, Homo sapien
cagcaagcgctgagagagcccaatc

SEQ ID NO: 2116685 - DNA, 25 bp, Homo sapien
acagcaagcgctgagagagcccaat

SEQ ID NO: 2116686 - DNA, 25 bp, Homo sapien
gactgatgcaatcctaggaccgtcc

SEQ ID NO: 2116687 - DNA, 25 bp, Homo sapien
cagactgatgcaatcctaggaccgt

SEQ ID NO: 2116688 - DNA, 25 bp, Homo sapien
gatgcaatcctaggaccgtcctctc

SEQ ID NO: 2116689 - DNA, 25 bp, Homo sapien
ccaccagaccaccagactgatgcaa

SEQ ID NO: 2116690 - DNA, 25 bp, Homo sapien
gagttcaggaccattcacccatcat

SEQ ID NO: 2116691 - DNA, 25 bp, Homo sapien
acaagagggaagctccatagaagcc

SEQ ID NO: 2116692 - DNA, 25 bp, Homo sapien
gggagcagagagttcaggaccattc

SEQ ID NO: 2116693 - DNA, 25 bp, Homo sapien
ataaattcactcaaggctatggcac

SEQ ID NO: 2116694 - DNA, 25 bp, Homo sapien
aactcatcagtgatgagcttcttca

SEQ ID NO: 2116695 - DNA, 25 bp, Homo sapien
acaaactcatcagtgatgagcttct

SEQ ID NO: 2116696 - DNA, 25 bp, Homo sapien
gtccccaaagagtgaatgatgtatc

SEQ ID NO: 2116697 - DNA, 25 bp, Homo sapien
gagcttcttcacgtccccaaagagt

SEQ ID NO: 2116698 - DNA, 25 bp, Homo sapien
ggttgcctgaagctaccattctatg

SEQ ID NO: 2116699 - DNA, 25 bp, Homo sapien
gctacctgtgtaaccctgaccaaat

SEQ ID NO: 2116700 - DNA, 25 bp, Homo sapien
tcagttctgaaataggccaaatgca

SEQ ID NO: 2116701 - DNA, 25 bp, Homo sapien
gaataatcccacctgcatacatgca

SEQ ID NO: 2116702 - DNA, 25 bp, Homo sapien
taagaccattcatggcctacccatg

SEQ ID NO: 2116703 - DNA, 25 bp, Homo sapien
ttccaatattgagccctgtcccact

SEQ ID NO: 2116704 - DNA, 25 bp, Homo sapien
ccactaattactacagtctttcttc

SEQ ID NO: 2116705 - DNA, 25 bp, Homo sapien
tacccatgcatagactggacaggct

SEQ ID NO: 2116706 - DNA, 25 bp, Homo sapien
cttggaaagagaggttcaaagcctt

SEQ ID NO: 2116707 - DNA, 25 bp, Homo sapien
tggaaagagaggttcaaagccttta

SEQ ID NO: 2116708 - DNA, 25 bp, Homo sapien
gccccagaagaactcatattcaggg

SEQ ID NO: 2116709 - DNA, 25 bp, Homo sapien
ggggactctggcatagtccaggtac

SEQ ID NO: 2116710 - DNA, 25 bp, Homo sapien
gcaggcaaacttgaggactttcatc

SEQ ID NO: 2116711 - DNA, 25 bp, Homo sapien
tggtctcatagtaagagcgcaggcc

SEQ ID NO: 2116712 - DNA, 25 bp, Homo sapien
caagctcaaggagctctccaattac

SEQ ID NO: 2116713 - DNA, 25 bp, Homo sapien
gccaagctcaaggagctctccaatt

SEQ ID NO: 2116714 - DNA, 25 bp, Homo sapien
ttgccaagctcaaggagctctccaa

SEQ ID NO: 2116715 - DNA, 25 bp, Homo sapien
tgccaagctcaaggagctctccaat

SEQ ID NO: 2116716 - DNA, 25 bp, Homo sapien
cttcaaatccgcttccatcgcctct

SEQ ID NO: 2116717 - DNA, 25 bp, Homo sapien
tccatcgcctctcggtactgagctg

SEQ ID NO: 2116718 - DNA, 25 bp, Homo sapien
cgcttccatcgcctctcggtactga

SEQ ID NO: 2116719 - DNA, 25 bp, Homo sapien
gcagccttcaaatccgcttccatcg

SEQ ID NO: 2116720 - DNA, 25 bp, Homo sapien
gagcccaatgcccattcgagctcta

SEQ ID NO: 2116721 - DNA, 25 bp, Homo sapien
ttcgagctctaatctcggccctagc

SEQ ID NO: 2116722 - DNA, 25 bp, Homo sapien
gagccgagcccaatgcccattcgag

SEQ ID NO: 2116723 - DNA, 25 bp, Homo sapien
tgcccattcgagctctaatctcggc

SEQ ID NO: 2116724 - DNA, 25 bp, Homo sapien
tcagcttcgtcccagttgcagggcc

SEQ ID NO: 2116725 - DNA, 25 bp, Homo sapien
gctttggctttagcttctgctcccg

SEQ ID NO: 2116726 - DNA, 25 bp, Homo sapien
cgggctttggcccagggtccgatat

SEQ ID NO: 2116727 - DNA, 25 bp, Homo sapien
ggtccgatatcagcttcgtcccagt

SEQ ID NO: 2116728 - DNA, 25 bp, Homo sapien
gcactggcactgttattggtactgg

SEQ ID NO: 2116729 - DNA, 25 bp, Homo sapien
gcactgttattggtactggtactgg

SEQ ID NO: 2116730 - DNA, 25 bp, Homo sapien
ctggcactggcactgttattggtac

SEQ ID NO: 2116731 - DNA, 25 bp, Homo sapien
gttattggtactggtactggcacca

SEQ ID NO: 2116732 - DNA, 25 bp, Homo sapien
agcccaaatgtgagagtggcggtca

SEQ ID NO: 2116733 - DNA, 25 bp, Homo sapien
cagcgaagagcccaaatgtgagagt

SEQ ID NO: 2116734 - DNA, 25 bp, Homo sapien
aaggccagcgaagagcccaaatgtg

SEQ ID NO: 2116735 - DNA, 25 bp, Homo sapien
gtgagagtggcggtcaggctggcac

SEQ ID NO: 2116736 - DNA, 25 bp, Homo sapien
gcagtgtcttggcacactctccaca

SEQ ID NO: 2116737 - DNA, 25 bp, Homo sapien
aaaatgccaaaagcagtgtcttggc

SEQ ID NO: 2116738 - DNA, 25 bp, Homo sapien
ggtcaattgacatccagcaaacaga

SEQ ID NO: 2116739 - DNA, 25 bp, Homo sapien
atcccagccccataagccccagatg

SEQ ID NO: 2116740 - DNA, 25 bp, Homo sapien
gttgagtaggtttctgaggatgcac

SEQ ID NO: 2116741 - DNA, 25 bp, Homo sapien
gaaagactggcaggattaacaatat

SEQ ID NO: 2116742 - DNA, 25 bp, Homo sapien
gatgcaccctggcttgaagagaaag

SEQ ID NO: 2116743 - DNA, 25 bp, Homo sapien
gctgcctagagtgctgtgttgagta

SEQ ID NO: 2116744 - DNA, 25 bp, Homo sapien
ggcgggtgctcttcaagcccagtgt

SEQ ID NO: 2116745 - DNA, 25 bp, Homo sapien
aagaggcgggtgctcttcaagccca

SEQ ID NO: 2116746 - DNA, 25 bp, Homo sapien
gaagaggcgggtgctcttcaagccc

SEQ ID NO: 2116747 - DNA, 25 bp, Homo sapien
gaggcgggtgctcttcaagcccagt

SEQ ID NO: 2116748 - DNA, 25 bp, Homo sapien
gggaagatacatgatacaatctaca

SEQ ID NO: 2116749 - DNA, 25 bp, Homo sapien
gcctccaggctgataaagatggcaa

SEQ ID NO: 2116750 - DNA, 25 bp, Homo sapien
gagttcattcgtcacagtaacggcc

SEQ ID NO: 2116751 - DNA, 25 bp, Homo sapien
gcaaaaacatgaacaagggtctgtt

SEQ ID NO: 2116752 - DNA, 25 bp, Homo sapien
caggacagtgatctgcacattctgg

SEQ ID NO: 2116753 - DNA, 25 bp, Homo sapien
agcatttacccctgcacctgggctt

SEQ ID NO: 2116754 - DNA, 25 bp, Homo sapien
ccagttctggcccatgtgtggcttt

SEQ ID NO: 2116755 - DNA, 25 bp, Homo sapien
gctgaataaagggatccatttccac

SEQ ID NO: 2116756 - DNA, 25 bp, Homo sapien
tctgtcagcaggtgaccatcactgg

SEQ ID NO: 2116757 - DNA, 25 bp, Homo sapien
caacataggtgtcacactggcagcc

SEQ ID NO: 2116758 - DNA, 25 bp, Homo sapien
tggtcacacagaccgctgccctgag

SEQ ID NO: 2116759 - DNA, 25 bp, Homo sapien
agacacccacccttgaaccactctt

SEQ ID NO: 2116760 - DNA, 25 bp, Homo sapien
tggtcttgcaatgtcgggcagtagg

SEQ ID NO: 2116761 - DNA, 25 bp, Homo sapien
ggtcttgcaatgtcgggcagtaggt

SEQ ID NO: 2116762 - DNA, 25 bp, Homo sapien
gtcttgcaatgtcgggcagtaggtg

SEQ ID NO: 2116763 - DNA, 25 bp, Homo sapien
ctgcacggctctaatgatgtcctcc

SEQ ID NO: 2116764 - DNA, 25 bp, Homo sapien
tgaccacatcgtactgaaccgggaa

SEQ ID NO: 2116765 - DNA, 25 bp, Homo sapien
tactgaaccgggaagtcagccatga

SEQ ID NO: 2116766 - DNA, 25 bp, Homo sapien
acggctctaatgatgtcctccatga

SEQ ID NO: 2116767 - DNA, 25 bp, Homo sapien
aggtgtttcggcagtgtttcaggaa

SEQ ID NO: 2116768 - DNA, 25 bp, Homo sapien
ggcagacaaacgaattgttggtgga

SEQ ID NO: 2116769 - DNA, 25 bp, Homo sapien
acgaattgttggtggactggagtca

SEQ ID NO: 2116770 - DNA, 25 bp, Homo sapien
gaggaggtgtttcggcagtgtttca

SEQ ID NO: 2116771 - DNA, 25 bp, Homo sapien
gcaaagtagtgaatgaaatagtcat

SEQ ID NO: 2116772 - DNA, 25 bp, Homo sapien
ctgggggcaaagtagtgaatgaaat

SEQ ID NO: 2116773 - DNA, 25 bp, Homo sapien
gggcaaagtagtgaatgaaatagtc

SEQ ID NO: 2116774 - DNA, 25 bp, Homo sapien
gggggcaaagtagtgaatgaaatag

SEQ ID NO: 2116775 - DNA, 25 bp, Homo sapien
tgaagccacttatgtcaataacaaa

SEQ ID NO: 2116776 - DNA, 25 bp, Homo sapien
tgggccttctgatgctagcactaag

SEQ ID NO: 2116777 - DNA, 25 bp, Homo sapien
gctagcactaagaaaggtctccagg

SEQ ID NO: 2116778 - DNA, 25 bp, Homo sapien
tctgatgctagcactaagaaaggtc

SEQ ID NO: 2116779 - DNA, 25 bp, Homo sapien
gaaaggtctccaggatccttgttac

SEQ ID NO: 2116780 - DNA, 25 bp, Homo sapien
cccatagaacaatgtgtcaatgttc

SEQ ID NO: 2116781 - DNA, 25 bp, Homo sapien
tgttcttaggactctgtggctccag

SEQ ID NO: 2116782 - DNA, 25 bp, Homo sapien
gaacaatgtgtcaatgttcttagga

SEQ ID NO: 2116783 - DNA, 25 bp, Homo sapien
tcagtccccatagaacaatgtgtca

SEQ ID NO: 2116784 - DNA, 25 bp, Homo sapien
gtatctgcaccctaggcaccactga

SEQ ID NO: 2116785 - DNA, 25 bp, Homo sapien
taggcaccactgacactaccaccat

SEQ ID NO: 2116786 - DNA, 25 bp, Homo sapien
caagggtatctgcaccctaggcacc

SEQ ID NO: 2116787 - DNA, 25 bp, Homo sapien
agggtatctgcaccctaggcaccac

SEQ ID NO: 2116788 - DNA, 25 bp, Homo sapien
cagaataaacttatccgaggtggca

SEQ ID NO: 2116789 - DNA, 25 bp, Homo sapien
aggtggcattctgtgatatcgtgga

SEQ ID NO: 2116790 - DNA, 25 bp, Homo sapien
tatcgtctacctgtgagtgtcaggc

SEQ ID NO: 2116791 - DNA, 25 bp, Homo sapien
tatcgtggatatctaacaagagaat

SEQ ID NO: 2116792 - DNA, 25 bp, Homo sapien
cctttatggccacatggtgtttgac

SEQ ID NO: 2116793 - DNA, 25 bp, Homo sapien
tatggccacatggtgtttgaccatg

SEQ ID NO: 2116794 - DNA, 25 bp, Homo sapien
tgatgtcctttatggccacatggtg

SEQ ID NO: 2116795 - DNA, 25 bp, Homo sapien
cagtgatgtcctttatggccacatg

SEQ ID NO: 2116796 - DNA, 25 bp, Homo sapien
atttatgtaggtaggcttagaaata

SEQ ID NO: 2116797 - DNA, 25 bp, Homo sapien
aatatttatgtaggtaggcttagaa

SEQ ID NO: 2116798 - DNA, 25 bp, Homo sapien
atatttatgtaggtaggcttagaaa

SEQ ID NO: 2116799 - DNA, 25 bp, Homo sapien
tatttatgtaggtaggcttagaaat

SEQ ID NO: 2116800 - DNA, 25 bp, Homo sapien
tttgtccacagtaaatgctagtcct

SEQ ID NO: 2116801 - DNA, 25 bp, Homo sapien
cttagtaagagtgtctaggtcttct

SEQ ID NO: 2116802 - DNA, 25 bp, Homo sapien
cacagtaaatgctagtcctgcgtcc

SEQ ID NO: 2116803 - DNA, 25 bp, Homo sapien
taaatgctagtcctgcgtccaagat

SEQ ID NO: 2116804 - DNA, 25 bp, Homo sapien
tattctgaaattatgagcccttgtt

SEQ ID NO: 2116805 - DNA, 25 bp, Homo sapien
tatgggtagtgaagatttcaccagc

SEQ ID NO: 2116806 - DNA, 25 bp, Homo sapien
taggcttcctagtctcatattctga

SEQ ID NO: 2116807 - DNA, 25 bp, Homo sapien
ggcccagtactgaactgtagatgga

SEQ ID NO: 2116808 - DNA, 25 bp, Homo sapien
tctgtctttcaatgacgcctgctgc

SEQ ID NO: 2116809 - DNA, 25 bp, Homo sapien
ttctgtctttcaatgacgcctgctg

SEQ ID NO: 2116810 - DNA, 25 bp, Homo sapien
tattctgtctttcaatgacgcctgc

SEQ ID NO: 2116811 - DNA, 25 bp, Homo sapien
attctgtctttcaatgacgcctgct

SEQ ID NO: 2116812 - DNA, 25 bp, Homo sapien
agtgtgtgctccactggaagctgac

SEQ ID NO: 2116813 - DNA, 25 bp, Homo sapien
gagaggtacccttttgggccacaga

SEQ ID NO: 2116814 - DNA, 25 bp, Homo sapien
taattaagcattctatttaaatgag

SEQ ID NO: 2116815 - DNA, 25 bp, Homo sapien
gggccacagaccaaactgcctgact

SEQ ID NO: 2116816 - DNA, 25 bp, Homo sapien
aagcctctccttgtgtctgagccta

SEQ ID NO: 2116817 - DNA, 25 bp, Homo sapien
gaaggcgtctgctctctccaagcct

SEQ ID NO: 2116818 - DNA, 25 bp, Homo sapien
ctccaagcctctccttgtgtctgag

SEQ ID NO: 2116819 - DNA, 25 bp, Homo sapien
ttgaatccagaaggcgtctgctctc

SEQ ID NO: 2116820 - DNA, 25 bp, Homo sapien
ggcccgaaccgagtccagatcgtta

SEQ ID NO: 2116821 - DNA, 25 bp, Homo sapien
aggatttctcgatccttcctttctg

SEQ ID NO: 2116822 - DNA, 25 bp, Homo sapien
cagatcgttactttctgtggcccaa

SEQ ID NO: 2116823 - DNA, 25 bp, Homo sapien
tgcggtcccaactaggtctgcatcc

SEQ ID NO: 2116824 - DNA, 25 bp, Homo sapien
gtatgaaccttctgtgtattcctgt

SEQ ID NO: 2116825 - DNA, 25 bp, Homo sapien
gcaacatgaatacctcacccccaaa

SEQ ID NO: 2116826 - DNA, 25 bp, Homo sapien
ctgcaacatgaatacctcaccccca

SEQ ID NO: 2116827 - DNA, 25 bp, Homo sapien
ctgtatgaaccttctgtgtattcct

SEQ ID NO: 2116828 - DNA, 25 bp, Homo sapien
ccctctttccacgtctgcaagtgtg

SEQ ID NO: 2116829 - DNA, 25 bp, Homo sapien
tccctccgctctgcggtacgtctct

SEQ ID NO: 2116830 - DNA, 25 bp, Homo sapien
ctttccacgtctgcaagtgtgcagc

SEQ ID NO: 2116831 - DNA, 25 bp, Homo sapien
gctctgcggtacgtctctgcaccac

SEQ ID NO: 2116832 - DNA, 25 bp, Homo sapien
ggccatctggtttccaaggcccagc

SEQ ID NO: 2116833 - DNA, 25 bp, Homo sapien
aaacccaggccatctggtttccaag

SEQ ID NO: 2116834 - DNA, 25 bp, Homo sapien
aggcccagctccttttgcctccgag

SEQ ID NO: 2116835 - DNA, 25 bp, Homo sapien
aaggcccagctccttttgcctccga

SEQ ID NO: 2116836 - DNA, 25 bp, Homo sapien
ctttctgggaggccgagtaacaggt

SEQ ID NO: 2116837 - DNA, 25 bp, Homo sapien
aatagaggcaccctatatccgtagt

SEQ ID NO: 2116838 - DNA, 25 bp, Homo sapien
gaggcaccctatatccgtagtcatt

SEQ ID NO: 2116839 - DNA, 25 bp, Homo sapien
tatccgtagtcatttctcctatcca

SEQ ID NO: 2116840 - DNA, 25 bp, Homo sapien
ctgaaatagaggcaccctatatccg

SEQ ID NO: 2116841 - DNA, 25 bp, Homo sapien
gaattatgaaactacacggtggaag

SEQ ID NO: 2116842 - DNA, 25 bp, Homo sapien
cagatggcctagagagaatgcagag

SEQ ID NO: 2116843 - DNA, 25 bp, Homo sapien
cacttaggattaccatcctctgggc

SEQ ID NO: 2116844 - DNA, 25 bp, Homo sapien
ccttcaccatgtaagggaggactga

SEQ ID NO: 2116845 - DNA, 25 bp, Homo sapien
cccaggctccccgggggaggcagag

SEQ ID NO: 2116846 - DNA, 25 bp, Homo sapien
caggctccccgggggaggcagaggg

SEQ ID NO: 2116847 - DNA, 25 bp, Homo sapien
tggagggaagggaagccccaggctc

SEQ ID NO: 2116848 - DNA, 25 bp, Homo sapien
ctggagggaagggaagccccaggct

SEQ ID NO: 2116849 - DNA, 25 bp, Homo sapien
tgtcctcttctgtggtctcagtctg

SEQ ID NO: 2116850 - DNA, 25 bp, Homo sapien
ctcttctgtggtctcagtctgtata

SEQ ID NO: 2116851 - DNA, 25 bp, Homo sapien
cactgtcctcttctgtggtctcagt

SEQ ID NO: 2116852 - DNA, 25 bp, Homo sapien
tcctcttctgtggtctcagtctgta

SEQ ID NO: 2116853 - DNA, 25 bp, Homo sapien
tgggccccttggtcagcatttggag

SEQ ID NO: 2116854 - DNA, 25 bp, Homo sapien
tatttgcagccttcttagccttgga

SEQ ID NO: 2116855 - DNA, 25 bp, Homo sapien
ggcacttacgttggtctgagcagag

SEQ ID NO: 2116856 - DNA, 25 bp, Homo sapien
ttggttgccgccaacagggtatgca

SEQ ID NO: 2116857 - DNA, 25 bp, Homo sapien
actgagccagatagtcatctgccag

SEQ ID NO: 2116858 - DNA, 25 bp, Homo sapien
ctcaactgagccagatagtcatctg

SEQ ID NO: 2116859 - DNA, 25 bp, Homo sapien
caactgagccagatagtcatctgcc

SEQ ID NO: 2116860 - DNA, 25 bp, Homo sapien
gagccagatagtcatctgccagggc

SEQ ID NO: 2116861 - DNA, 25 bp, Homo sapien
tcatcatcagaaagaaggaaggtcc

SEQ ID NO: 2116862 - DNA, 25 bp, Homo sapien
cttcatcatcagaaagaaggaaggt

SEQ ID NO: 2116863 - DNA, 25 bp, Homo sapien
aaagaaggaaggtccagagtcacca

SEQ ID NO: 2116864 - DNA, 25 bp, Homo sapien
tcatcagaaagaaggaaggtccaga

SEQ ID NO: 2116865 - DNA, 25 bp, Homo sapien
gtaattactgccacttctctcatcc

SEQ ID NO: 2116866 - DNA, 25 bp, Homo sapien
tgtaaaatggccacatctcgcggtg

SEQ ID NO: 2116867 - DNA, 25 bp, Homo sapien
ccacatctcgcggtggtgcaggcct

SEQ ID NO: 2116868 - DNA, 25 bp, Homo sapien
ggccccatgggatccgcctgtaatt

SEQ ID NO: 2116869 - DNA, 25 bp, Homo sapien
ctgagcgtttgatggggatctttgt

SEQ ID NO: 2116870 - DNA, 25 bp, Homo sapien
gggatctttgtctggtccttaacca

SEQ ID NO: 2116871 - DNA, 25 bp, Homo sapien
gatggggatctttgtctggtcctta

SEQ ID NO: 2116872 - DNA, 25 bp, Homo sapien
tgtctggtccttaaccaacaggtat

SEQ ID NO: 2116873 - DNA, 25 bp, Homo sapien
ctgggaaatattcatcatattcttg

SEQ ID NO: 2116874 - DNA, 25 bp, Homo sapien
tattcttggatgacatccctcagca

SEQ ID NO: 2116875 - DNA, 25 bp, Homo sapien
catcatattcttggatgacatccct

SEQ ID NO: 2116876 - DNA, 25 bp, Homo sapien
gaaatattcatcatattcttggatg

SEQ ID NO: 2116877 - DNA, 25 bp, Homo sapien
agagtgtagcttgctcgttcaatga

SEQ ID NO: 2116878 - DNA, 25 bp, Homo sapien
ccagagtgtagcttgctcgttcaat

SEQ ID NO: 2116879 - DNA, 25 bp, Homo sapien
tctccagagtgtagcttgctcgttc

SEQ ID NO: 2116880 - DNA, 25 bp, Homo sapien
tccagagtgtagcttgctcgttcaa

SEQ ID NO: 2116881 - DNA, 25 bp, Homo sapien
agcttccccattgcgcccatccgcc

SEQ ID NO: 2116882 - DNA, 25 bp, Homo sapien
aaagcttccccattgcgcccatccg

SEQ ID NO: 2116883 - DNA, 25 bp, Homo sapien
tccccattgcgcccatccgccagca

SEQ ID NO: 2116884 - DNA, 25 bp, Homo sapien
tcaaagcttccccattgcgcccatc

SEQ ID NO: 2116885 - DNA, 25 bp, Homo sapien
gttcccagtatgcctgcagaggatt

SEQ ID NO: 2116886 - DNA, 25 bp, Homo sapien
gtatgcctgcagaggattcctgagt

SEQ ID NO: 2116887 - DNA, 25 bp, Homo sapien
tgagaatatacaagctactttgctt

SEQ ID NO: 2116888 - DNA, 25 bp, Homo sapien
caagctactttgcttatcaatttct

SEQ ID NO: 2116889 - DNA, 25 bp, Homo sapien
ctcagaatcaccatgaggagaccca

SEQ ID NO: 2116890 - DNA, 25 bp, Homo sapien
actcagaatcaccatgaggagaccc

SEQ ID NO: 2116891 - DNA, 25 bp, Homo sapien
tcagaatcaccatgaggagacccag

SEQ ID NO: 2116892 - DNA, 25 bp, Homo sapien
gggcgcagccccaacttgcgcagca

SEQ ID NO: 2116893 - DNA, 25 bp, Homo sapien
agggcgcagccccaacttgcgcagc

SEQ ID NO: 2116894 - DNA, 25 bp, Homo sapien
ccagggcgcagccccaacttgcgca

SEQ ID NO: 2116895 - DNA, 25 bp, Homo sapien
cagggcgcagccccaacttgcgcag

SEQ ID NO: 2116896 - DNA, 25 bp, Homo sapien
ccaccagaccaccagactgatgcaa

SEQ ID NO: 2116897 - DNA, 25 bp, Homo sapien
gacaacacggacagcaagcgctgag

SEQ ID NO: 2116898 - DNA, 25 bp, Homo sapien
ccaaaggacaacacggacagcaagc

SEQ ID NO: 2116899 - DNA, 25 bp, Homo sapien
cacggacagcaagcgctgagagagc

SEQ ID NO: 2116900 - DNA, 25 bp, Homo sapien
gatgcctctttgtcagggatccctg

SEQ ID NO: 2116901 - DNA, 25 bp, Homo sapien
tcagcttagaacagacagaggacat

SEQ ID NO: 2116902 - DNA, 25 bp, Homo sapien
gacagcagagagttcaggaccattt

SEQ ID NO: 2116903 - DNA, 25 bp, Homo sapien
tgaaggtctatctaacatctcagct

SEQ ID NO: 2116904 - DNA, 25 bp, Homo sapien
tgcttcacaaactcgtctgtgatga

SEQ ID NO: 2116905 - DNA, 25 bp, Homo sapien
ttccccaaagagtgaatgcctcacc

SEQ ID NO: 2116906 - DNA, 25 bp, Homo sapien
ttcctcacttccccaaagagtgaat

SEQ ID NO: 2116907 - DNA, 25 bp, Homo sapien
aactcgtctgtgatgagcttcctca

SEQ ID NO: 2116908 - DNA, 25 bp, Homo sapien
agtctcgtggtaggagcgcaagccc

SEQ ID NO: 2116909 - DNA, 25 bp, Homo sapien
tgttagggaccctcttgtactccag

SEQ ID NO: 2116910 - DNA, 25 bp, Homo sapien
aactcatattcaggtggtctgctgt

SEQ ID NO: 2116911 - DNA, 25 bp, Homo sapien
ttgctagtctcgtggtaggagcgca

SEQ ID NO: 2116912 - DNA, 25 bp, Homo sapien
tcccattgccttaatatgccaagct

SEQ ID NO: 2116913 - DNA, 25 bp, Homo sapien
ccaagggtatcccattgccttaata

SEQ ID NO: 2116914 - DNA, 25 bp, Homo sapien
cccattgccttaatatgccaagctc

SEQ ID NO: 2116915 - DNA, 25 bp, Homo sapien
gggtatcccattgccttaatatgcc

SEQ ID NO: 2116916 - DNA, 25 bp, Homo sapien
tgcacagcccagtccttggggtctt

SEQ ID NO: 2116917 - DNA, 25 bp, Homo sapien
cacagcccagtccttggggtctttc

SEQ ID NO: 2116918 - DNA, 25 bp, Homo sapien
ccagtccttggggtctttcttctgc

SEQ ID NO: 2116919 - DNA, 25 bp, Homo sapien
agtccttggggtctttcttctgcac

SEQ ID NO: 2116920 - DNA, 25 bp, Homo sapien
gcagcttggacttccatctccactg

SEQ ID NO: 2116921 - DNA, 25 bp, Homo sapien
ctctccaatccccatttgggctctt

SEQ ID NO: 2116922 - DNA, 25 bp, Homo sapien
tcctctccaatccccatttgggctc

SEQ ID NO: 2116923 - DNA, 25 bp, Homo sapien
ctccaatccccatttgggctcttgc

SEQ ID NO: 2116924 - DNA, 25 bp, Homo sapien
ttcctctccaatccccatttgggct

SEQ ID NO: 2116925 - DNA, 25 bp, Homo sapien
taaatgcaccgccaaagccagggtt

SEQ ID NO: 2116926 - DNA, 25 bp, Homo sapien
tgctaagcgcactactgaagactgt

SEQ ID NO: 2116927 - DNA, 25 bp, Homo sapien
caaaaactagggctggtagcaccac

SEQ ID NO: 2116928 - DNA, 25 bp, Homo sapien
tgagtacaccactaaagccagccgt

SEQ ID NO: 2116929 - DNA, 25 bp, Homo sapien
tgctgggttcgccagtaaagccagt

SEQ ID NO: 2116930 - DNA, 25 bp, Homo sapien
ctggtgctgggttcgccagtaaagc

SEQ ID NO: 2116931 - DNA, 25 bp, Homo sapien
cgtgctggtgctgggttcgccagta

SEQ ID NO: 2116932 - DNA, 25 bp, Homo sapien
ctgggttcgccagtaaagccagtgc

SEQ ID NO: 2116933 - DNA, 25 bp, Homo sapien
ctagccatacgagaagccacaggca

SEQ ID NO: 2116934 - DNA, 25 bp, Homo sapien
caaagccagcaccagtgtttggtcc

SEQ ID NO: 2116935 - DNA, 25 bp, Homo sapien
gaagccaacaccagtgcttggtcca

SEQ ID NO: 2116936 - DNA, 25 bp, Homo sapien
cgctgaagccaacaatagaactggg

SEQ ID NO: 2116937 - DNA, 25 bp, Homo sapien
taggaacacattttagcaccaaata

SEQ ID NO: 2116938 - DNA, 25 bp, Homo sapien
agctcttgtacccatccctgtgggt

SEQ ID NO: 2116939 - DNA, 25 bp, Homo sapien
ccctgctgtcctgccttagtgtttc

SEQ ID NO: 2116940 - DNA, 25 bp, Homo sapien
ttcttacaacatctcccagctcttg

SEQ ID NO: 2116941 - DNA, 25 bp, Homo sapien
ctcagctgattggccataactgcct

SEQ ID NO: 2116942 - DNA, 25 bp, Homo sapien
ttggctccatgggaaggactactgc

SEQ ID NO: 2116943 - DNA, 25 bp, Homo sapien
ggactactgcaatttattagcggta

SEQ ID NO: 2116944 - DNA, 25 bp, Homo sapien
tccaaggatgtactttggctccatg

SEQ ID NO: 2116945 - DNA, 25 bp, Homo sapien
accaaaatatgacagcacacagaaa

SEQ ID NO: 2116946 - DNA, 25 bp, Homo sapien
cacatggttggactgaagagaaaag

SEQ ID NO: 2116947 - DNA, 25 bp, Homo sapien
cacttaacaagggtacgtcctcagc

SEQ ID NO: 2116948 - DNA, 25 bp, Homo sapien
agccttctcagggaaccaacgaaca

SEQ ID NO: 2116949 - DNA, 25 bp, Homo sapien
acgtctttggcaactacaacagctg

SEQ ID NO: 2116950 - DNA, 25 bp, Homo sapien
ctgtttctcagataagtgaaatcga

SEQ ID NO: 2116951 - DNA, 25 bp, Homo sapien
caggaaatgtaagctcgtgagcagc

SEQ ID NO: 2116952 - DNA, 25 bp, Homo sapien
gcagcattgtctccggatgcatcca

SEQ ID NO: 2116953 - DNA, 25 bp, Homo sapien
taagtgaaatcgaagcccaggaaat

SEQ ID NO: 2116954 - DNA, 25 bp, Homo sapien
cagtaagagtcgctccactgagata

SEQ ID NO: 2116955 - DNA, 25 bp, Homo sapien
agcagtaagagtcgctccactgaga

SEQ ID NO: 2116956 - DNA, 25 bp, Homo sapien
ggagcagtaagagtcgctccactga

SEQ ID NO: 2116957 - DNA, 25 bp, Homo sapien
gtaagagtcgctccactgagataag

SEQ ID NO: 2116958 - DNA, 25 bp, Homo sapien
tttaagcgacggaaccctgagcgga

SEQ ID NO: 2116959 - DNA, 25 bp, Homo sapien
gcgcttgcgccccaggaatagctgg

SEQ ID NO: 2116960 - DNA, 25 bp, Homo sapien
gaatagctggcgctaagtgctcgcg

SEQ ID NO: 2116961 - DNA, 25 bp, Homo sapien
gaccgcccacctaagttcacagatg

SEQ ID NO: 2116962 - DNA, 25 bp, Homo sapien
tccgctcggacagctgagtctcaat

SEQ ID NO: 2116963 - DNA, 25 bp, Homo sapien
tcagaagtccaagtggtgcgtccgg

SEQ ID NO: 2116964 - DNA, 25 bp, Homo sapien
caggcgttctcgtgcgtaccactaa

SEQ ID NO: 2116965 - DNA, 25 bp, Homo sapien
caatgaatggcgagaggagtttcca

SEQ ID NO: 2116966 - DNA, 25 bp, Homo sapien
cttaaagggctggaacacctcccag

SEQ ID NO: 2116967 - DNA, 25 bp, Homo sapien
gctggaacacctcccagcccgcgcc

SEQ ID NO: 2116968 - DNA, 25 bp, Homo sapien
ttaaagggctggaacacctcccagc

SEQ ID NO: 2116969 - DNA, 25 bp, Homo sapien
ggaacacctcccagcccgcgccaac

SEQ ID NO: 2116970 - DNA, 25 bp, Homo sapien
tccgaatcccattgatgttccagct

SEQ ID NO: 2116971 - DNA, 25 bp, Homo sapien
gagacagacgatatccgcatccagc

SEQ ID NO: 2116972 - DNA, 25 bp, Homo sapien
gcatccagctcgtccaaaatgcgcc

SEQ ID NO: 2116973 - DNA, 25 bp, Homo sapien
gcggcacagttgctgggttcctgat

SEQ ID NO: 2116974 - DNA, 25 bp, Homo sapien
taaccctcaacgatagccaggggct

SEQ ID NO: 2116975 - DNA, 25 bp, Homo sapien
gaatagccgctacggttgcggctga

SEQ ID NO: 2116976 - DNA, 25 bp, Homo sapien
cagaatagccgctacggttgcggct

SEQ ID NO: 2116977 - DNA, 25 bp, Homo sapien
tagccgctacggttgcggctgaagc

SEQ ID NO: 2116978 - DNA, 25 bp, Homo sapien
tctgagcagacctggcagtcaatag

SEQ ID NO: 2116979 - DNA, 25 bp, Homo sapien
tgggcaaccttattcaaaccctgga

SEQ ID NO: 2116980 - DNA, 25 bp, Homo sapien
tcaatagcctgttgcacagcctgtc

SEQ ID NO: 2116981 - DNA, 25 bp, Homo sapien
gaacagacagggcactctgagcaga

SEQ ID NO: 2116982 - DNA, 25 bp, Homo sapien
gggtggcaaacaggccactcaggcc

SEQ ID NO: 2116983 - DNA, 25 bp, Homo sapien
cactggggtagcattgtccttacag

SEQ ID NO: 2116984 - DNA, 25 bp, Homo sapien
tcactatccagagcccggagttcct

SEQ ID NO: 2116985 - DNA, 25 bp, Homo sapien
gggtaaactcatccatgtttccata

SEQ ID NO: 2116986 - DNA, 25 bp, Homo sapien
gcatcttaaagactagccgctcagg

SEQ ID NO: 2116987 - DNA, 25 bp, Homo sapien
gattagggtcaaggtcttctcctta

SEQ ID NO: 2116988 - DNA, 25 bp, Homo sapien
gatttgcagcaaacgatagaagcgc

SEQ ID NO: 2116989 - DNA, 25 bp, Homo sapien
caggagggcttctgctcggatttgc

SEQ ID NO: 2116990 - DNA, 25 bp, Homo sapien
tcaatggggcggtgggctgtattca

SEQ ID NO: 2116991 - DNA, 25 bp, Homo sapien
tgactgcatcccagtggtcaatggg

SEQ ID NO: 2116992 - DNA, 25 bp, Homo sapien
caggttgactgcatcccagtggtca

SEQ ID NO: 2116993 - DNA, 25 bp, Homo sapien
ggttgactgcatcccagtggtcaat

SEQ ID NO: 2116994 - DNA, 25 bp, Homo sapien
gacaagactaaaagagcaagcctgg

SEQ ID NO: 2116995 - DNA, 25 bp, Homo sapien
caagcctggctgcacaataaagtca

SEQ ID NO: 2116996 - DNA, 25 bp, Homo sapien
gtgtgctgcgtacccaaaagacttg

SEQ ID NO: 2116997 - DNA, 25 bp, Homo sapien
aaatggctgccatagtcacacaagc

SEQ ID NO: 2116998 - DNA, 25 bp, Homo sapien
gaagggacttagactaactgctgca

SEQ ID NO: 2116999 - DNA, 25 bp, Homo sapien
ttaaaagtgtttgcctctaggaagc

SEQ ID NO: 2117000 - DNA, 25 bp, Homo sapien
tcacacagtccggaattggcagagc

SEQ ID NO: 2117001 - DNA, 25 bp, Homo sapien
tatctagtgtgtcaaagccctcaat

SEQ ID NO: 2117002 - DNA, 25 bp, Homo sapien
gatgaagggccctacatgagaggca

SEQ ID NO: 2117003 - DNA, 25 bp, Homo sapien
tttggttggaagcagcggtagctat

SEQ ID NO: 2117004 - DNA, 25 bp, Homo sapien
gactggcaccccaagttactgagca

SEQ ID NO: 2117005 - DNA, 25 bp, Homo sapien
agttactgagcaagctgtccatcca

SEQ ID NO: 2117006 - DNA, 25 bp, Homo sapien
caagccgggagccatagttgagatg

SEQ ID NO: 2117007 - DNA, 25 bp, Homo sapien
tgtctatgaccagggtcctgtcccc

SEQ ID NO: 2117008 - DNA, 25 bp, Homo sapien
tgggcactgttttgcaggcacagag

SEQ ID NO: 2117009 - DNA, 25 bp, Homo sapien
gcgaaggatcttgagctgggtgcct

SEQ ID NO: 2117010 - DNA, 25 bp, Homo sapien
tctgctagagccaacctgactgggc

SEQ ID NO: 2117011 - DNA, 25 bp, Homo sapien
ttggcatgtctgtacccgggtttga

SEQ ID NO: 2117012 - DNA, 25 bp, Homo sapien
tcgactgctccaacacaggactttg

SEQ ID NO: 2117013 - DNA, 25 bp, Homo sapien
tcatcagtggtaggctaggcagctc

SEQ ID NO: 2117014 - DNA, 25 bp, Homo sapien
gaatgaggtccgtaactccttctca

SEQ ID NO: 2117015 - DNA, 25 bp, Homo sapien
cccaagttgggtcctggcttcttca

SEQ ID NO: 2117016 - DNA, 25 bp, Homo sapien
acacatgtagaagcggcggcccaag

SEQ ID NO: 2117017 - DNA, 25 bp, Homo sapien
tcacagtacgcatcacacatggctc

SEQ ID NO: 2117018 - DNA, 25 bp, Homo sapien
gctgggtcacaggattaaggcacaa

SEQ ID NO: 2117019 - DNA, 25 bp, Homo sapien
ggcacaagaagctcaccaacaagga

SEQ ID NO: 2117020 - DNA, 25 bp, Homo sapien
gagctggcctcagatcatgtgcagg

SEQ ID NO: 2117021 - DNA, 25 bp, Homo sapien
ggcagctagtgtccgtgtacttcgg

SEQ ID NO: 2117022 - DNA, 25 bp, Homo sapien
gactcaactttatggagtacctcca

SEQ ID NO: 2117023 - DNA, 25 bp, Homo sapien
gagtacctccacaatgtccaaagtg

SEQ ID NO: 2117024 - DNA, 25 bp, Homo sapien
ttctctgactcaactttatggagta

SEQ ID NO: 2117025 - DNA, 25 bp, Homo sapien
ttatggagtacctccacaatgtcca

SEQ ID NO: 2117026 - DNA, 25 bp, Homo sapien
cactgtgttcaaagcaatgctccca

SEQ ID NO: 2117027 - DNA, 25 bp, Homo sapien
aatgctcccactttccaggtcacag

SEQ ID NO: 2117028 - DNA, 25 bp, Homo sapien
ggcttggctagagcaagcactgtgt

SEQ ID NO: 2117029 - DNA, 25 bp, Homo sapien
cctggtctaccagtcccattttcaa

SEQ ID NO: 2117030 - DNA, 25 bp, Homo sapien
aaatccagggattgacgcttcactg

SEQ ID NO: 2117031 - DNA, 25 bp, Homo sapien
tacacagtgagttgcaaagagctag

SEQ ID NO: 2117032 - DNA, 25 bp, Homo sapien
tattggacagggaacagacaagtgc

SEQ ID NO: 2117033 - DNA, 25 bp, Homo sapien
ggaaatgcccaaaaactacacagtg

SEQ ID NO: 2117034 - DNA, 25 bp, Homo sapien
ctgctgggctgacagcagagctcag

SEQ ID NO: 2117035 - DNA, 25 bp, Homo sapien
gacagcagagctcagtgggtcagag

SEQ ID NO: 2117036 - DNA, 25 bp, Homo sapien
gcagagctcagtgggtcagagccca

SEQ ID NO: 2117037 - DNA, 25 bp, Homo sapien
cagcagagctcagtgggtcagagcc

SEQ ID NO: 2117038 - DNA, 25 bp, Homo sapien
cagcctacccctactgtggctgccc

SEQ ID NO: 2117039 - DNA, 25 bp, Homo sapien
gatgtgaaccgccacggcagccgct

SEQ ID NO: 2117040 - DNA, 25 bp, Homo sapien
cctctgatgtcctgccgatgtgaac

SEQ ID NO: 2117041 - DNA, 25 bp, Homo sapien
tgtgaagaagattgaaacccgtgat

SEQ ID NO: 2117042 - DNA, 25 bp, Homo sapien
acaacagacacgtgtagcaacagac

SEQ ID NO: 2117043 - DNA, 25 bp, Homo sapien
tgaagacactctccttgcagagctg

SEQ ID NO: 2117044 - DNA, 25 bp, Homo sapien
gtgtggacagaaggcgggcagcaag

SEQ ID NO: 2117045 - DNA, 25 bp, Homo sapien
ggcagcaaggcgcatgcgcaacaac

SEQ ID NO: 2117046 - DNA, 25 bp, Homo sapien
ccacggtggcatcccgacctgggag

SEQ ID NO: 2117047 - DNA, 25 bp, Homo sapien
cacgacgacaagtcccacggtggca

SEQ ID NO: 2117048 - DNA, 25 bp, Homo sapien
cccaggaagaccgctctgcggacct

SEQ ID NO: 2117049 - DNA, 25 bp, Homo sapien
agcccagccacgacgacaagtccca

SEQ ID NO: 2117050 - DNA, 25 bp, Homo sapien
caggagttttcgagactcagacacc

SEQ ID NO: 2117051 - DNA, 25 bp, Homo sapien
ccaggagttttcgagactcagacac

SEQ ID NO: 2117052 - DNA, 25 bp, Homo sapien
gagttttcgagactcagacacctct

SEQ ID NO: 2117053 - DNA, 25 bp, Homo sapien
aggagttttcgagactcagacacct

SEQ ID NO: 2117054 - DNA, 25 bp, Homo sapien
ccacatggtctcttcccgcgtccct

SEQ ID NO: 2117055 - DNA, 25 bp, Homo sapien
acatggtctcttcccgcgtccctac

SEQ ID NO: 2117056 - DNA, 25 bp, Homo sapien
gaccacatggtctcttcccgcgtcc

SEQ ID NO: 2117057 - DNA, 25 bp, Homo sapien
tgaccacatggtctcttcccgcgtc

SEQ ID NO: 2117058 - DNA, 25 bp, Homo sapien
gattgggatcttgttctcacatgct

SEQ ID NO: 2117059 - DNA, 25 bp, Homo sapien
gctgggaagactcttggtcatttcc

SEQ ID NO: 2117060 - DNA, 25 bp, Homo sapien
aggattgggatcttgttctcacatg

SEQ ID NO: 2117061 - DNA, 25 bp, Homo sapien
ctgaggattgggatcttgttctcac

SEQ ID NO: 2117062 - DNA, 25 bp, Homo sapien
tcttcttgacgtttttcctcagtgg

SEQ ID NO: 2117063 - DNA, 25 bp, Homo sapien
cttgaacggcaggtgctccttcatt

SEQ ID NO: 2117064 - DNA, 25 bp, Homo sapien
ggtgcaataccctgattatcagttg

SEQ ID NO: 2117065 - DNA, 25 bp, Homo sapien
tcattttcgatctccccactaggtg

SEQ ID NO: 2117066 - DNA, 25 bp, Homo sapien
tctatcttaagcagagccagttcct

SEQ ID NO: 2117067 - DNA, 25 bp, Homo sapien
tcatcctctatcttaagcagagcca

SEQ ID NO: 2117068 - DNA, 25 bp, Homo sapien
gagccagttcctgttgaaaagcttc

SEQ ID NO: 2117069 - DNA, 25 bp, Homo sapien
taagcagagccagttcctgttgaaa

SEQ ID NO: 2117070 - DNA, 25 bp, Homo sapien
tgcttccagcactttagtgagatca

SEQ ID NO: 2117071 - DNA, 25 bp, Homo sapien
ccagattaagaataacgttcttggt

SEQ ID NO: 2117072 - DNA, 25 bp, Homo sapien
aagagaatattatcagtcaaatttc

SEQ ID NO: 2117073 - DNA, 25 bp, Homo sapien
gaatattatcagtcaaatttccaga

SEQ ID NO: 2117074 - DNA, 25 bp, Homo sapien
ttccagattaagaataacgttcttg

SEQ ID NO: 2117075 - DNA, 25 bp, Homo sapien
gaatcaagatggcggaaagaatgaa

SEQ ID NO: 2117076 - DNA, 25 bp, Homo sapien
aaagaatcaagatggcggaaagaat

SEQ ID NO: 2117077 - DNA, 25 bp, Homo sapien
aagatggcggaaagaatgaagacac

SEQ ID NO: 2117078 - DNA, 25 bp, Homo sapien
tcaagatggcggaaagaatgaagac

SEQ ID NO: 2117079 - DNA, 25 bp, Homo sapien
ttcccagtaacaccgttctgcagac

SEQ ID NO: 2117080 - DNA, 25 bp, Homo sapien
cagtaacaccgttctgcagacctac

SEQ ID NO: 2117081 - DNA, 25 bp, Homo sapien
aattcccagtaacaccgttctgcag

SEQ ID NO: 2117082 - DNA, 25 bp, Homo sapien
ctaaattcccagtaacaccgttctg

SEQ ID NO: 2117083 - DNA, 25 bp, Homo sapien
agctggatgacggccccgaggccct

SEQ ID NO: 2117084 - DNA, 25 bp, Homo sapien
ggagctggatgacggccccgaggcc

SEQ ID NO: 2117085 - DNA, 25 bp, Homo sapien
ggaggagctggatgacggccccgag

SEQ ID NO: 2117086 - DNA, 25 bp, Homo sapien
cagaagccacagactgtgccgcagg

SEQ ID NO: 2117087 - DNA, 25 bp, Homo sapien
gatcttgctcttagaagctcactca

SEQ ID NO: 2117088 - DNA, 25 bp, Homo sapien
ggattgggatcttgctcttagaagc

SEQ ID NO: 2117089 - DNA, 25 bp, Homo sapien
tgggatcttgctcttagaagctcac

SEQ ID NO: 2117090 - DNA, 25 bp, Homo sapien
gaggattgggatcttgctcttagaa

SEQ ID NO: 2117091 - DNA, 25 bp, Homo sapien
ttgacgtttttcctcagtgggctcc

SEQ ID NO: 2117092 - DNA, 25 bp, Homo sapien
gattatcagttggtggttcctcttc

SEQ ID NO: 2117093 - DNA, 25 bp, Homo sapien
tcctcttcttgacgtttttcctcag

SEQ ID NO: 2117094 - DNA, 25 bp, Homo sapien
cctgattatcagttggtggttcctc

SEQ ID NO: 2117095 - DNA, 25 bp, Homo sapien
agcaggcactgcttgattttcaatc

SEQ ID NO: 2117096 - DNA, 25 bp, Homo sapien
caggcactgcttgattttcaatctc

SEQ ID NO: 2117097 - DNA, 25 bp, Homo sapien
gcttgattttcaatctccccactag

SEQ ID NO: 2117098 - DNA, 25 bp, Homo sapien
cactgcttgattttcaatctcccca

SEQ ID NO: 2117099 - DNA, 25 bp, Homo sapien
atcaaaagtgggcataataccctcc

SEQ ID NO: 2117100 - DNA, 25 bp, Homo sapien
tcaaaagtgggcataataccctccc

SEQ ID NO: 2117101 - DNA, 25 bp, Homo sapien
gatcaaaagtgggcataataccctc

SEQ ID NO: 2117102 - DNA, 25 bp, Homo sapien
ccagattaagaataacgttcttggt

SEQ ID NO: 2117103 - DNA, 25 bp, Homo sapien
aagagaatattatcagtcaaatttc

SEQ ID NO: 2117104 - DNA, 25 bp, Homo sapien
ttccagattaagaataacgttcttg

SEQ ID NO: 2117105 - DNA, 25 bp, Homo sapien
gaatattatcagtcaaatttccaga

SEQ ID NO: 2117106 - DNA, 25 bp, Homo sapien
tgaagatagaaaggatgaccattaa

SEQ ID NO: 2117107 - DNA, 25 bp, Homo sapien
caacactgggtcacatacccatttc

SEQ ID NO: 2117108 - DNA, 25 bp, Homo sapien
ggccaacactgggtcacatacccat

SEQ ID NO: 2117109 - DNA, 25 bp, Homo sapien
ctaggccaacactgggtcacatacc

SEQ ID NO: 2117110 - DNA, 25 bp, Homo sapien
ccttacacacaaaactattcatggt

SEQ ID NO: 2117111 - DNA, 25 bp, Homo sapien
ttacacacaaaactattcatggtcc

SEQ ID NO: 2117112 - DNA, 25 bp, Homo sapien
cttacacacaaaactattcatggtc

SEQ ID NO: 2117113 - DNA, 25 bp, Homo sapien
ccaatgggatgggtgagacctcttt

SEQ ID NO: 2117114 - DNA, 25 bp, Homo sapien
ttttttctgcagaccgtactactct

SEQ ID NO: 2117115 - DNA, 25 bp, Homo sapien
taaatgagtgaagacctcacagaca

SEQ ID NO: 2117116 - DNA, 25 bp, Homo sapien
tgttctgtgctaagcggaattaaaa

SEQ ID NO: 2117117 - DNA, 25 bp, Homo sapien
gagatgatggactgggtttgtgcat

SEQ ID NO: 2117118 - DNA, 25 bp, Homo sapien
gcagtccgcactgtgtataagggaa

SEQ ID NO: 2117119 - DNA, 25 bp, Homo sapien
cactgtgtataagggaagattaatc

SEQ ID NO: 2117120 - DNA, 25 bp, Homo sapien
agaaaccccagcagtccgcactgtg

SEQ ID NO: 2117121 - DNA, 25 bp, Homo sapien
tcttgtcccgtgtattcccaggtac

SEQ ID NO: 2117122 - DNA, 25 bp, Homo sapien
gcagctcttgtcccgtgtattccca

SEQ ID NO: 2117123 - DNA, 25 bp, Homo sapien
tttcagctcccattagcagctcttg

SEQ ID NO: 2117124 - DNA, 25 bp, Homo sapien
ctttcagctcccattagcagctctt

SEQ ID NO: 2117125 - DNA, 25 bp, Homo sapien
tgtctggaccatgttagagacccat

SEQ ID NO: 2117126 - DNA, 25 bp, Homo sapien
gtctggaccatgttagagacccatg

SEQ ID NO: 2117127 - DNA, 25 bp, Homo sapien
ggaccatgttagagacccatgggac

SEQ ID NO: 2117128 - DNA, 25 bp, Homo sapien
gagcatatggaatgcgagtggaaag

SEQ ID NO: 2117129 - DNA, 25 bp, Homo sapien
tgagcatatggaatgcgagtggaaa

SEQ ID NO: 2117130 - DNA, 25 bp, Homo sapien
atgagcatatggaatgcgagtggaa

SEQ ID NO: 2117131 - DNA, 25 bp, Homo sapien
ggatgagcatatggaatgcgagtgg

SEQ ID NO: 2117132 - DNA, 25 bp, Homo sapien
gctacacccactcctgaaagtggat

SEQ ID NO: 2117133 - DNA, 25 bp, Homo sapien
ctacacccactcctgaaagtggatg

SEQ ID NO: 2117134 - DNA, 25 bp, Homo sapien
aagctacacccactcctgaaagtgg

SEQ ID NO: 2117135 - DNA, 25 bp, Homo sapien
ttaagctacacccactcctgaaagt

SEQ ID NO: 2117136 - DNA, 25 bp, Homo sapien
cctagcaactggtatttctgtttct

SEQ ID NO: 2117137 - DNA, 25 bp, Homo sapien
ttctgtttctctgattggttttgtc

SEQ ID NO: 2117138 - DNA, 25 bp, Homo sapien
gtatttctgtttctctgattggttt

SEQ ID NO: 2117139 - DNA, 25 bp, Homo sapien
atttctgtttctctgattggttttg

SEQ ID NO: 2117140 - DNA, 25 bp, Homo sapien
tggtccccacggtcatcacgctttg

SEQ ID NO: 2117141 - DNA, 25 bp, Homo sapien
tcagccaagatctcggggctcaggg

SEQ ID NO: 2117142 - DNA, 25 bp, Homo sapien
cggtcatcacgctttgctttctcag

SEQ ID NO: 2117143 - DNA, 25 bp, Homo sapien
ggcggaaacgcagcggatatgtatt

SEQ ID NO: 2117144 - DNA, 25 bp, Homo sapien
gaggtcgccgaggaggatcagcggt

SEQ ID NO: 2117145 - DNA, 25 bp, Homo sapien
tcagcggtgtgagggctgcgaggac

SEQ ID NO: 2117146 - DNA, 25 bp, Homo sapien
tgccacgtgagaagcgtgttcagag

SEQ ID NO: 2117147 - DNA, 25 bp, Homo sapien
cggatcgtccctcaggcgtcagctc

SEQ ID NO: 2117148 - DNA, 25 bp, Homo sapien
ctccttgctccctagctgtggcctt

SEQ ID NO: 2117149 - DNA, 25 bp, Homo sapien
cctccactccgtggccctccttgct

SEQ ID NO: 2117150 - DNA, 25 bp, Homo sapien
gtggccttgccaagaccagaaggcc

SEQ ID NO: 2117151 - DNA, 25 bp, Homo sapien
gcagtcgccccaactccgcctgacc

SEQ ID NO: 2117152 - DNA, 25 bp, Homo sapien
gggaccaggagggatgagtgtgtgc

SEQ ID NO: 2117153 - DNA, 25 bp, Homo sapien
ccaggagggatgagtgtgtgcaaat

SEQ ID NO: 2117154 - DNA, 25 bp, Homo sapien
gagggatgagtgtgtgcaaatacac

SEQ ID NO: 2117155 - DNA, 25 bp, Homo sapien
gatgagtgtgtgcaaatacactcac

SEQ ID NO: 2117156 - DNA, 25 bp, Homo sapien
tcttcttgagactcttcatgactgg

SEQ ID NO: 2117157 - DNA, 25 bp, Homo sapien
tcttgagactcttcatgactgggct

SEQ ID NO: 2117158 - DNA, 25 bp, Homo sapien
ttggtggttcctcttcttgagactc

SEQ ID NO: 2117159 - DNA, 25 bp, Homo sapien
ggttcctcttcttgagactcttcat

SEQ ID NO: 2117160 - DNA, 25 bp, Homo sapien
ccctgatcttcttctctttcctgac

SEQ ID NO: 2117161 - DNA, 25 bp, Homo sapien
caccctgatcttcttctctttcctg

SEQ ID NO: 2117162 - DNA, 25 bp, Homo sapien
cttgaatctcagctgcaccctgatc

SEQ ID NO: 2117163 - DNA, 25 bp, Homo sapien
tgaatctcagctgcaccctgatctt

SEQ ID NO: 2117164 - DNA, 25 bp, Homo sapien
aatgctctagttttggcagaatctt

SEQ ID NO: 2117165 - DNA, 25 bp, Homo sapien
ccttgacatcaggatcatctctgca

SEQ ID NO: 2117166 - DNA, 25 bp, Homo sapien
tccccttgacatcaggatcatctct

SEQ ID NO: 2117167 - DNA, 25 bp, Homo sapien
ttttaaaatgctctagttttggcag

SEQ ID NO: 2117168 - DNA, 25 bp, Homo sapien
cctctgataattggtgcacccaaca

SEQ ID NO: 2117169 - DNA, 25 bp, Homo sapien
attcagcaactgattagtccctctg

SEQ ID NO: 2117170 - DNA, 25 bp, Homo sapien
cataattgggggattcagcaactga

SEQ ID NO: 2117171 - DNA, 25 bp, Homo sapien
tctggtaataccagtcataattggg

SEQ ID NO: 2117172 - DNA, 25 bp, Homo sapien
ctaaaaagcggccttggcctctgtc

SEQ ID NO: 2117173 - DNA, 25 bp, Homo sapien
tacagtctaatgcttacccagccat

SEQ ID NO: 2117174 - DNA, 25 bp, Homo sapien
agatttacagtctaatgcttaccca

SEQ ID NO: 2117175 - DNA, 25 bp, Homo sapien
tttacagtctaatgcttacccagcc

SEQ ID NO: 2117176 - DNA, 25 bp, Homo sapien
cccagcaggactgaagcttctcctt

SEQ ID NO: 2117177 - DNA, 25 bp, Homo sapien
aagccccagcaggactgaagcttct

SEQ ID NO: 2117178 - DNA, 25 bp, Homo sapien
tcaacatgagaaatcccctcagggc

SEQ ID NO: 2117179 - DNA, 25 bp, Homo sapien
agcaggactgaagcttctcctttga

SEQ ID NO: 2117180 - DNA, 25 bp, Homo sapien
gattggtggaattcaaacccacgaa

SEQ ID NO: 2117181 - DNA, 25 bp, Homo sapien
tcgttaacagctaaacaccctaatc

SEQ ID NO: 2117182 - DNA, 25 bp, Homo sapien
caccctaatcaactggcttcaatct

SEQ ID NO: 2117183 - DNA, 25 bp, Homo sapien
ctagattggtggaattcaaacccac

SEQ ID NO: 2117184 - DNA, 25 bp, Homo sapien
aattgaatgcaaatcaaccacctta

SEQ ID NO: 2117185 - DNA, 25 bp, Homo sapien
atgcaaatcaaccaccttaattaag

SEQ ID NO: 2117186 - DNA, 25 bp, Homo sapien
atcaattgaatgcaaatcaaccacc

SEQ ID NO: 2117187 - DNA, 25 bp, Homo sapien
tgcaaatcaaccaccttaattaagc

SEQ ID NO: 2117188 - DNA, 25 bp, Homo sapien
tccatgctacctatcacaccatgtc

SEQ ID NO: 2117189 - DNA, 25 bp, Homo sapien
catgctacctatcacaccatgtcct

SEQ ID NO: 2117190 - DNA, 25 bp, Homo sapien
tgctacctatcacaccatgtcctag

SEQ ID NO: 2117191 - DNA, 25 bp, Homo sapien
ctccatgctacctatcacaccatgt

SEQ ID NO: 2117192 - DNA, 25 bp, Homo sapien
tgtgattatccccacaccagcagaa

SEQ ID NO: 2117193 - DNA, 25 bp, Homo sapien
taatgtgattatccccacaccagca

SEQ ID NO: 2117194 - DNA, 25 bp, Homo sapien
attacccctagccataatgtgatta

SEQ ID NO: 2117195 - DNA, 25 bp, Homo sapien
acccctagccataatgtgattatcc

SEQ ID NO: 2117196 - DNA, 25 bp, Homo sapien
cgaagatggcggaaagaacgaagac

SEQ ID NO: 2117197 - DNA, 25 bp, Homo sapien
gagaaagaacgaagatgttggaaag

SEQ ID NO: 2117198 - DNA, 25 bp, Homo sapien
gaacgaagacacaacctctccttgc

SEQ ID NO: 2117199 - DNA, 25 bp, Homo sapien
aagacacaacctctccttgcagagc

SEQ ID NO: 2117200 - DNA, 25 bp, Homo sapien
ggaaggcggaggaccaccgcgaggc

SEQ ID NO: 2117201 - DNA, 25 bp, Homo sapien
aggcggaggaccaccgcgaggccct

SEQ ID NO: 2117202 - DNA, 25 bp, Homo sapien
acgggacctgtcctaagcccgctgg

SEQ ID NO: 2117203 - DNA, 25 bp, Homo sapien
caaagccacggactgtgccacggga

SEQ ID NO: 2117204 - DNA, 25 bp, Homo sapien
cttcctccctcgttccagcccagcc

SEQ ID NO: 2117205 - DNA, 25 bp, Homo sapien
cagccacgattaccggcccatggcg

SEQ ID NO: 2117206 - DNA, 25 bp, Homo sapien
ttccagcccagccacgattaccggc

SEQ ID NO: 2117207 - DNA, 25 bp, Homo sapien
ctcgttccagcccagccacgattac

SEQ ID NO: 2117208 - DNA, 25 bp, Homo sapien
cctctttctgaggattgggatcttg

SEQ ID NO: 2117209 - DNA, 25 bp, Homo sapien
gctgggaagactcttggtcatttcc

SEQ ID NO: 2117210 - DNA, 25 bp, Homo sapien
gggatcttgttacatgctcactcat

SEQ ID NO: 2117211 - DNA, 25 bp, Homo sapien
aatcacaggtccaactggctgggaa

SEQ ID NO: 2117212 - DNA, 25 bp, Homo sapien
cgtttttcctcagtgggctgctgga

SEQ ID NO: 2117213 - DNA, 25 bp, Homo sapien
tcttcttgacgtttttcctcagtgg

SEQ ID NO: 2117214 - DNA, 25 bp, Homo sapien
gcaggtgctccttcatttttgatct

SEQ ID NO: 2117215 - DNA, 25 bp, Homo sapien
ggtgcaataccctgattatcagttg

SEQ ID NO: 2117216 - DNA, 25 bp, Homo sapien
cttccagcactttagtgggatcaaa

SEQ ID NO: 2117217 - DNA, 25 bp, Homo sapien
tgcttccagcactttagtgggatca

SEQ ID NO: 2117218 - DNA, 25 bp, Homo sapien
gcttccagcactttagtgggatcaa

SEQ ID NO: 2117219 - DNA, 25 bp, Homo sapien
ctatctctgatagtgtgtaaggcag

SEQ ID NO: 2117220 - DNA, 25 bp, Homo sapien
taaggcagccatttggggtctgaac

SEQ ID NO: 2117221 - DNA, 25 bp, Homo sapien
tctctgatagtgtgtaaggcagcca

SEQ ID NO: 2117222 - DNA, 25 bp, Homo sapien
gatagtgtgtaaggcagccatttgg

SEQ ID NO: 2117223 - DNA, 25 bp, Homo sapien
gttagcagtcaaatttccagcataa

SEQ ID NO: 2117224 - DNA, 25 bp, Homo sapien
ttagcagtcaaatttccagcataag

SEQ ID NO: 2117225 - DNA, 25 bp, Homo sapien
ctatgaccctgatcgatctgagctg

SEQ ID NO: 2117226 - DNA, 25 bp, Homo sapien
tggagatggtcctaatgtcaaggga

SEQ ID NO: 2117227 - DNA, 25 bp, Homo sapien
gtcctaatgtcaagggagaatttct

SEQ ID NO: 2117228 - DNA, 25 bp, Homo sapien
gtgaacgtggagatggtcctaatgt

SEQ ID NO: 2117229 - DNA, 25 bp, Homo sapien
gatggtcctaatgtcaagggagaat

SEQ ID NO: 2117230 - DNA, 25 bp, Homo sapien
ttgcaacttcacacctccgccactg

SEQ ID NO: 2117231 - DNA, 25 bp, Homo sapien
ccactgacatctcgggcaggaatgg

SEQ ID NO: 2117232 - DNA, 25 bp, Homo sapien
tccgccactgacatctcgggcagga

SEQ ID NO: 2117233 - DNA, 25 bp, Homo sapien
cactcggctttgcaacttcacacct

SEQ ID NO: 2117234 - DNA, 25 bp, Homo sapien
ctgataaccgctgccccgaggtctg

SEQ ID NO: 2117235 - DNA, 25 bp, Homo sapien
gaggtatctgagtgccgaaaggcct

SEQ ID NO: 2117236 - DNA, 25 bp, Homo sapien
cccagttcttaaccgggcagtggca

SEQ ID NO: 2117237 - DNA, 25 bp, Homo sapien
ctggaaactaggaacactgcgggct

SEQ ID NO: 2117238 - DNA, 25 bp, Homo sapien
cgccccatgggcctttgtcgtcgtt

SEQ ID NO: 2117239 - DNA, 25 bp, Homo sapien
cgccgtcgacgtccggctcctccca

SEQ ID NO: 2117240 - DNA, 25 bp, Homo sapien
ctcccaggtcgcgacgccccatggg

SEQ ID NO: 2117241 - DNA, 25 bp, Homo sapien
agagaaaagggcctcgccgtcgacg

SEQ ID NO: 2117242 - DNA, 25 bp, Homo sapien
gagcctcagtcagagagaaagaatc

SEQ ID NO: 2117243 - DNA, 25 bp, Homo sapien
gcctcagtcagagagaaagaatcaa

SEQ ID NO: 2117244 - DNA, 25 bp, Homo sapien
tgagcctcagtcagagagaaagaat

SEQ ID NO: 2117245 - DNA, 25 bp, Homo sapien
agcctcagtcagagagaaagaatca

SEQ ID NO: 2117246 - DNA, 25 bp, Homo sapien
actgtcctctctcagagggttccag

SEQ ID NO: 2117247 - DNA, 25 bp, Homo sapien
aaactgtcctctctcagagggttcc

SEQ ID NO: 2117248 - DNA, 25 bp, Homo sapien
aactgtcctctctcagagggttcca

SEQ ID NO: 2117249 - DNA, 25 bp, Homo sapien
gaaactgtcctctctcagagggttc

SEQ ID NO: 2117250 - DNA, 25 bp, Homo sapien
cctctttctgaggattgggatcttg

SEQ ID NO: 2117251 - DNA, 25 bp, Homo sapien
cacagatacaactggctgggaagac

SEQ ID NO: 2117252 - DNA, 25 bp, Homo sapien
gctgggaagactcttagtcatttcc

SEQ ID NO: 2117253 - DNA, 25 bp, Homo sapien
tcttgttcttacatgctcactcata

SEQ ID NO: 2117254 - DNA, 25 bp, Homo sapien
cgcttcattttcgatctccccagta

SEQ ID NO: 2117255 - DNA, 25 bp, Homo sapien
gccgcttcattttcgatctccccag

SEQ ID NO: 2117256 - DNA, 25 bp, Homo sapien
ccgcttcattttcgatctccccagt

SEQ ID NO: 2117257 - DNA, 25 bp, Homo sapien
atctccaggtgcatcctctatctta

SEQ ID NO: 2117258 - DNA, 25 bp, Homo sapien
catcctctatcttaagcagagccag

SEQ ID NO: 2117259 - DNA, 25 bp, Homo sapien
gagccagttcctgttgaaaagcttc

SEQ ID NO: 2117260 - DNA, 25 bp, Homo sapien
taagcagagccagttcctgttgaaa

SEQ ID NO: 2117261 - DNA, 25 bp, Homo sapien
ttccagcataagaacaacattcttg

SEQ ID NO: 2117262 - DNA, 25 bp, Homo sapien
atttccagcataagaacaacattct

SEQ ID NO: 2117263 - DNA, 25 bp, Homo sapien
tttccagcataagaacaacattctt

SEQ ID NO: 2117264 - DNA, 25 bp, Homo sapien
aagtcaaaggatcattactggctcc

SEQ ID NO: 2117265 - DNA, 25 bp, Homo sapien
ggaccaattcttagatacctacaac

SEQ ID NO: 2117266 - DNA, 25 bp, Homo sapien
gagacactacaactgaggctgcgga

SEQ ID NO: 2117267 - DNA, 25 bp, Homo sapien
cattactggctcctatgagcaaata

SEQ ID NO: 2117268 - DNA, 25 bp, Homo sapien
ctcacatataacaatatgaacctta

SEQ ID NO: 2117269 - DNA, 25 bp, Homo sapien
cttacaaagggaaacccatcagatt

SEQ ID NO: 2117270 - DNA, 25 bp, Homo sapien
tgaaggaaaaaaggtagccagagag

SEQ ID NO: 2117271 - DNA, 25 bp, Homo sapien
gatcaaactcacatataacaatatg

SEQ ID NO: 2117272 - DNA, 25 bp, Homo sapien
tctgcattcccaaccgaggtattgg

SEQ ID NO: 2117273 - DNA, 25 bp, Homo sapien
ccaggctggcttatggaaaggaaaa

SEQ ID NO: 2117274 - DNA, 25 bp, Homo sapien
cgcaccaagtatgagccgaagcagg

SEQ ID NO: 2117275 - DNA, 25 bp, Homo sapien
gaggtattgggttcatctaactggg

SEQ ID NO: 2117276 - DNA, 25 bp, Homo sapien
caggcctctctaccaggtctagatt

SEQ ID NO: 2117277 - DNA, 25 bp, Homo sapien
gggcctctaatctgttgttcatcag

SEQ ID NO: 2117278 - DNA, 25 bp, Homo sapien
cattcctgaaactctgtagctgtca

SEQ ID NO: 2117279 - DNA, 25 bp, Homo sapien
accaggtctagattcagaaaggagc

SEQ ID NO: 2117280 - DNA, 25 bp, Homo sapien
gacatgactcagtatcatgcagaga

SEQ ID NO: 2117281 - DNA, 25 bp, Homo sapien
tgcagagagcttagccctagggcat

SEQ ID NO: 2117282 - DNA, 25 bp, Homo sapien
tgactgtgatactgccaggctggat

SEQ ID NO: 2117283 - DNA, 25 bp, Homo sapien
gacactatcctaaaaggccccagtg

SEQ ID NO: 2117284 - DNA, 25 bp, Homo sapien
caggtaagaccgtttgaggacaggc

SEQ ID NO: 2117285 - DNA, 25 bp, Homo sapien
cagtaagggatacagcaggtaagac

SEQ ID NO: 2117286 - DNA, 25 bp, Homo sapien
aataagggcttcaactgggatgttg

SEQ ID NO: 2117287 - DNA, 25 bp, Homo sapien
caggaagttgcctaatttggtgaca

SEQ ID NO: 2117288 - DNA, 25 bp, Homo sapien
ggcagcactgagagatatgagaggg

SEQ ID NO: 2117289 - DNA, 25 bp, Homo sapien
tgacaggttgaagatgccatttgca

SEQ ID NO: 2117290 - DNA, 25 bp, Homo sapien
tgttctttgctccagcctgtagtgg

SEQ ID NO: 2117291 - DNA, 25 bp, Homo sapien
ccaaagaagaatatgttgcactgca

SEQ ID NO: 2117292 - DNA, 25 bp, Homo sapien
actgcatctggatgaaccatagcac

SEQ ID NO: 2117293 - DNA, 25 bp, Homo sapien
tgccgttgaatactcccaaagaaga

SEQ ID NO: 2117294 - DNA, 25 bp, Homo sapien
ccaatgcagctgagcaattgcttca

SEQ ID NO: 2117295 - DNA, 25 bp, Homo sapien
agttggctgcatttgtcctgtctga

SEQ ID NO: 2117296 - DNA, 25 bp, Homo sapien
ctggtgtgggtatgagctgtaccca

SEQ ID NO: 2117297 - DNA, 25 bp, Homo sapien
tctgctcccatgttccctgtcatag

SEQ ID NO: 2117298 - DNA, 25 bp, Homo sapien
cattgagggtcaagttgggagtctc

SEQ ID NO: 2117299 - DNA, 25 bp, Homo sapien
gggtcaagttgggagtctcacgtgg

SEQ ID NO: 2117300 - DNA, 25 bp, Homo sapien
gagggtcaagttgggagtctcacgt

SEQ ID NO: 2117301 - DNA, 25 bp, Homo sapien
ttgagggtcaagttgggagtctcac

SEQ ID NO: 2117302 - DNA, 25 bp, Homo sapien
aagcctggccaatctatcctcaagg

SEQ ID NO: 2117303 - DNA, 25 bp, Homo sapien
ggaagcctggccaatctatcctcaa

SEQ ID NO: 2117304 - DNA, 25 bp, Homo sapien
gaagcctggccaatctatcctcaag

SEQ ID NO: 2117305 - DNA, 25 bp, Homo sapien
cacagaggatgccaggaatacaaga

SEQ ID NO: 2117306 - DNA, 25 bp, Homo sapien
cagaggatgccaggaatacaagagt

SEQ ID NO: 2117307 - DNA, 25 bp, Homo sapien
acagaggatgccaggaatacaagag

SEQ ID NO: 2117308 - DNA, 25 bp, Homo sapien
ctcacagaggatgccaggaatacaa

SEQ ID NO: 2117309 - DNA, 25 bp, Homo sapien
tgcacacataaacctccatccatag

SEQ ID NO: 2117310 - DNA, 25 bp, Homo sapien
tcttgaacggaagaaatattccaac

SEQ ID NO: 2117311 - DNA, 25 bp, Homo sapien
gtggtgtctcttgttgaggttgttc

SEQ ID NO: 2117312 - DNA, 25 bp, Homo sapien
cacataaacctccatccataggcat

SEQ ID NO: 2117313 - DNA, 25 bp, Homo sapien
ccttctcacttcatttcattcactt

SEQ ID NO: 2117314 - DNA, 25 bp, Homo sapien
cccttctcacttcatttcattcact

SEQ ID NO: 2117315 - DNA, 25 bp, Homo sapien
gttggtaacccaatctttctctctg

SEQ ID NO: 2117316 - DNA, 25 bp, Homo sapien
tgttggtaacccaatctttctctct

SEQ ID NO: 2117317 - DNA, 25 bp, Homo sapien
agatgttcccgatagctgtgtctta

SEQ ID NO: 2117318 - DNA, 25 bp, Homo sapien
aataggttcatgactgggaccatag

SEQ ID NO: 2117319 - DNA, 25 bp, Homo sapien
catgactgggaccatagtgttccat

SEQ ID NO: 2117320 - DNA, 25 bp, Homo sapien
gatgttcccgatagctgtgtcttac

SEQ ID NO: 2117321 - DNA, 25 bp, Homo sapien
tcaaaagctgaaataagagcaaaga

SEQ ID NO: 2117322 - DNA, 25 bp, Homo sapien
catttcaaaagctgaaataagagca

SEQ ID NO: 2117323 - DNA, 25 bp, Homo sapien
tggtgttaggaacagactcggaatg

SEQ ID NO: 2117324 - DNA, 25 bp, Homo sapien
aacagactcggaatggaagcaggaa

SEQ ID NO: 2117325 - DNA, 25 bp, Homo sapien
caatggggtttggcccgtagaacat

SEQ ID NO: 2117326 - DNA, 25 bp, Homo sapien
tcaatggggtttggcccgtagaaca

SEQ ID NO: 2117327 - DNA, 25 bp, Homo sapien
gaaagctcagcaaaattggccccgc

SEQ ID NO: 2117328 - DNA, 25 bp, Homo sapien
cctagggaaggatgcttgtagcctc

SEQ ID NO: 2117329 - DNA, 25 bp, Homo sapien
tagaggctcaaagcttacagcagtc

SEQ ID NO: 2117330 - DNA, 25 bp, Homo sapien
ttataccgtaagaagctgctgccgc

SEQ ID NO: 2117331 - DNA, 25 bp, Homo sapien
gcggcgccgactctttcgtccccga

SEQ ID NO: 2117332 - DNA, 25 bp, Homo sapien
gattgttgcggttctcttctgcggc

SEQ ID NO: 2117333 - DNA, 25 bp, Homo sapien
ctggattttgcgattgttgcggttc

SEQ ID NO: 2117334 - DNA, 25 bp, Homo sapien
ttctgcggctctcgcattacggcgg

SEQ ID NO: 2117335 - DNA, 25 bp, Homo sapien
tcctctggagtgctcgggtcttcct

SEQ ID NO: 2117336 - DNA, 25 bp, Homo sapien
tcgtcttcgggggtgctcgctacca

SEQ ID NO: 2117337 - DNA, 25 bp, Homo sapien
tcggggccgctcaggtcgtcttcgg

SEQ ID NO: 2117338 - DNA, 25 bp, Homo sapien
ctcgctaccacagaggcggccatag

SEQ ID NO: 2117339 - DNA, 25 bp, Homo sapien
cagtctttagagcatcggttacgaa

SEQ ID NO: 2117340 - DNA, 25 bp, Homo sapien
gactttcagtttgctcgattccacg

SEQ ID NO: 2117341 - DNA, 25 bp, Homo sapien
caaagatgctgtgctgacgtccagg

SEQ ID NO: 2117342 - DNA, 25 bp, Homo sapien
tataaatcaggtaccctctgcgcac

SEQ ID NO: 2117343 - DNA, 25 bp, Homo sapien
catagattatgatggaacgacttca

SEQ ID NO: 2117344 - DNA, 25 bp, Homo sapien
gcaaacactctatttcgcagttgaa

SEQ ID NO: 2117345 - DNA, 25 bp, Homo sapien
cagacacaaagggtttcagaaacgt

SEQ ID NO: 2117346 - DNA, 25 bp, Homo sapien
tcattttcaacttaggaccctggca

SEQ ID NO: 2117347 - DNA, 25 bp, Homo sapien
ttggcaacagtatcggagcaatgtc

SEQ ID NO: 2117348 - DNA, 25 bp, Homo sapien
tgagcccaggccgaatccaaatctc

SEQ ID NO: 2117349 - DNA, 25 bp, Homo sapien
tgtttgcttggtccaccgtgggaaa

SEQ ID NO: 2117350 - DNA, 25 bp, Homo sapien
catggccattgtctgctctgcactt

SEQ ID NO: 2117351 - DNA, 25 bp, Homo sapien
acctccaccacgactccaaaataat

SEQ ID NO: 2117352 - DNA, 25 bp, Homo sapien
cctccaccacgactccaaaataatt

SEQ ID NO: 2117353 - DNA, 25 bp, Homo sapien
tcagcacatcttcgtaagaatcacc

SEQ ID NO: 2117354 - DNA, 25 bp, Homo sapien
tctctgacttggtgagaaagcaggc

SEQ ID NO: 2117355 - DNA, 25 bp, Homo sapien
gcctcagactcagaatcgagctcat

SEQ ID NO: 2117356 - DNA, 25 bp, Homo sapien
tctgttttaagcaagacaaggtcac

SEQ ID NO: 2117357 - DNA, 25 bp, Homo sapien
aaaagtcagtggaagggcagttctg

SEQ ID NO: 2117358 - DNA, 25 bp, Homo sapien
agagcagttcagcagcctttatgga

SEQ ID NO: 2117359 - DNA, 25 bp, Homo sapien
gctttggtatttgagccccatggcc

SEQ ID NO: 2117360 - DNA, 25 bp, Homo sapien
gaaatggctgcaaggcctaaacact

SEQ ID NO: 2117361 - DNA, 25 bp, Homo sapien
tgaggaagtggcagggacccatatc

SEQ ID NO: 2117362 - DNA, 25 bp, Homo sapien
gggactttcccatttagaactgcat

SEQ ID NO: 2117363 - DNA, 25 bp, Homo sapien
cacagcaagcatgtgcctgggctca

SEQ ID NO: 2117364 - DNA, 25 bp, Homo sapien
gattcctgccagagggttgccatct

SEQ ID NO: 2117365 - DNA, 25 bp, Homo sapien
tgacgttctatatcacgcgcctggg

SEQ ID NO: 2117366 - DNA, 25 bp, Homo sapien
agcggtgccattcatcactgcagga

SEQ ID NO: 2117367 - DNA, 25 bp, Homo sapien
tctagggctgctaacccagagtgga

SEQ ID NO: 2117368 - DNA, 25 bp, Homo sapien
tgccactgccaagttaagagagctg

SEQ ID NO: 2117369 - DNA, 25 bp, Homo sapien
tccctccgggtgctagtatgtgact

SEQ ID NO: 2117370 - DNA, 25 bp, Homo sapien
tgtgcggaggtatccactagatgcc

SEQ ID NO: 2117371 - DNA, 25 bp, Homo sapien
cgcgtaaggtttggtacatgatttc

SEQ ID NO: 2117372 - DNA, 25 bp, Homo sapien
ccactgaaatagttgaagttgactc

SEQ ID NO: 2117373 - DNA, 25 bp, Homo sapien
tcaacccattcttatggctacacac

SEQ ID NO: 2117374 - DNA, 25 bp, Homo sapien
tacacacagcatgtacgcgtaaggt

SEQ ID NO: 2117375 - DNA, 25 bp, Homo sapien
tttcctcaaggggatatcctctggg

SEQ ID NO: 2117376 - DNA, 25 bp, Homo sapien
gagacttaattctccggtataatgt

SEQ ID NO: 2117377 - DNA, 25 bp, Homo sapien
attgccagagacttaattctccggt

SEQ ID NO: 2117378 - DNA, 25 bp, Homo sapien
gccagagacttaattctccggtata

SEQ ID NO: 2117379 - DNA, 25 bp, Homo sapien
tgtggaagcaccatagattgcactg

SEQ ID NO: 2117380 - DNA, 25 bp, Homo sapien
taagccttgggcatatcagacactg

SEQ ID NO: 2117381 - DNA, 25 bp, Homo sapien
taatggtactaatccccgggctgtg

SEQ ID NO: 2117382 - DNA, 25 bp, Homo sapien
cagggagatctgtgcacagtgagca

SEQ ID NO: 2117383 - DNA, 25 bp, Homo sapien
tgttcatggcctttggacaccacca

SEQ ID NO: 2117384 - DNA, 25 bp, Homo sapien
ccctactgttgcagtaaggaatcac

SEQ ID NO: 2117385 - DNA, 25 bp, Homo sapien
tactgcgtactgcaccctactgttg

SEQ ID NO: 2117386 - DNA, 25 bp, Homo sapien
gacaccaccagtgggagcagtctca

SEQ ID NO: 2117387 - DNA, 25 bp, Homo sapien
tgcaaagaacctgtgggcagcagta

SEQ ID NO: 2117388 - DNA, 25 bp, Homo sapien
cctgcaaagaacctgtgggcagcag

SEQ ID NO: 2117389 - DNA, 25 bp, Homo sapien
gcagcagtagccttccccttcttcc

SEQ ID NO: 2117390 - DNA, 25 bp, Homo sapien
tgtgggcagcagtagccttcccctt

SEQ ID NO: 2117391 - DNA, 25 bp, Homo sapien
agggaatagaagattagcatgcaag

SEQ ID NO: 2117392 - DNA, 25 bp, Homo sapien
aatagaagattagcatgcaaggcag

SEQ ID NO: 2117393 - DNA, 25 bp, Homo sapien
aagattagcatgcaaggcagtggcc

SEQ ID NO: 2117394 - DNA, 25 bp, Homo sapien
tagaagattagcatgcaaggcagtg

SEQ ID NO: 2117395 - DNA, 25 bp, Homo sapien
atggactctgaagccgctctgccaa

SEQ ID NO: 2117396 - DNA, 25 bp, Homo sapien
cccgtatccaatcatggactctgaa

SEQ ID NO: 2117397 - DNA, 25 bp, Homo sapien
agccgctctgccaaacccacactgt

SEQ ID NO: 2117398 - DNA, 25 bp, Homo sapien
cgctctgccaaacccacactgtccc

SEQ ID NO: 2117399 - DNA, 25 bp, Homo sapien
tgcccaaagggcgatacaagtcact

SEQ ID NO: 2117400 - DNA, 25 bp, Homo sapien
gatgttgacattacccctgatcagc

SEQ ID NO: 2117401 - DNA, 25 bp, Homo sapien
aagggcaatctgcacactacaggca

SEQ ID NO: 2117402 - DNA, 25 bp, Homo sapien
acacgacgttgatgagattcccaca

SEQ ID NO: 2117403 - DNA, 25 bp, Homo sapien
ggaagctgcagcacggaaaccagct

SEQ ID NO: 2117404 - DNA, 25 bp, Homo sapien
gcctgcggtagggatcacattgtca

SEQ ID NO: 2117405 - DNA, 25 bp, Homo sapien
ccagctacacaatgggataatggtg

SEQ ID NO: 2117406 - DNA, 25 bp, Homo sapien
cacattgtcagtggcagtagaggcg

SEQ ID NO: 2117407 - DNA, 25 bp, Homo sapien
gcccacagtcatcagtatagcccat

SEQ ID NO: 2117408 - DNA, 25 bp, Homo sapien
cataggcccacagtcatcagtatag

SEQ ID NO: 2117409 - DNA, 25 bp, Homo sapien
taggcccacagtcatcagtatagcc

SEQ ID NO: 2117410 - DNA, 25 bp, Homo sapien
ggcccacagtcatcagtatagccca

SEQ ID NO: 2117411 - DNA, 25 bp, Homo sapien
tctggcctgctgatcctattatgca

SEQ ID NO: 2117412 - DNA, 25 bp, Homo sapien
ctctggcctgctgatcctattatgc

SEQ ID NO: 2117413 - DNA, 25 bp, Homo sapien
tctctggcctgctgatcctattatg

SEQ ID NO: 2117414 - DNA, 25 bp, Homo sapien
ttctctggcctgctgatcctattat

SEQ ID NO: 2117415 - DNA, 25 bp, Homo sapien
gatgacacccactgtttataatgct

SEQ ID NO: 2117416 - DNA, 25 bp, Homo sapien
ttcactggatgacacccactgttta

SEQ ID NO: 2117417 - DNA, 25 bp, Homo sapien
cactggatgacacccactgtttata

SEQ ID NO: 2117418 - DNA, 25 bp, Homo sapien
tccttcactggatgacacccactgt

SEQ ID NO: 2117419 - DNA, 25 bp, Homo sapien
gcttctgcaaggcaagtgaaaagtg

SEQ ID NO: 2117420 - DNA, 25 bp, Homo sapien
ccagacagaactggagcccttggtt

SEQ ID NO: 2117421 - DNA, 25 bp, Homo sapien
gacagaactggagcccttggttcct

SEQ ID NO: 2117422 - DNA, 25 bp, Homo sapien
gaaaagtgttgtctgcaggcaatga

SEQ ID NO: 2117423 - DNA, 25 bp, Homo sapien
tgcatactcaaatttgctgttgaac

SEQ ID NO: 2117424 - DNA, 25 bp, Homo sapien
tgtctcataacttccttaggctcta

SEQ ID NO: 2117425 - DNA, 25 bp, Homo sapien
gctccttagacttgataatttccaa

SEQ ID NO: 2117426 - DNA, 25 bp, Homo sapien
tggtccacttgatcatgtctcataa

SEQ ID NO: 2117427 - DNA, 25 bp, Homo sapien
tgaagcactgggagtacagaaagag

SEQ ID NO: 2117428 - DNA, 25 bp, Homo sapien
aagcactgggagtacagaaagagca

SEQ ID NO: 2117429 - DNA, 25 bp, Homo sapien
gcactgggagtacagaaagagcaaa

SEQ ID NO: 2117430 - DNA, 25 bp, Homo sapien
gttgtaagcatcactgcactcaaac

SEQ ID NO: 2117431 - DNA, 25 bp, Homo sapien
ggtggaactgcctagaggactgctt

SEQ ID NO: 2117432 - DNA, 25 bp, Homo sapien
tcctgtagtataggcagggattcac

SEQ ID NO: 2117433 - DNA, 25 bp, Homo sapien
tggtgtgtactcagacgaataaaga

SEQ ID NO: 2117434 - DNA, 25 bp, Homo sapien
gaactccttgcagagaaagatcctg

SEQ ID NO: 2117435 - DNA, 25 bp, Homo sapien
gaaatgcgaggtactctacagtggg

SEQ ID NO: 2117436 - DNA, 25 bp, Homo sapien
cggcttgtacgatagaggaccctta

SEQ ID NO: 2117437 - DNA, 25 bp, Homo sapien
cattatgatgctgggtggagccaac

SEQ ID NO: 2117438 - DNA, 25 bp, Homo sapien
ggaagcctgccaatagaaatgcgag

SEQ ID NO: 2117439 - DNA, 25 bp, Homo sapien
ttatggcgacacatgcgaccatccg

SEQ ID NO: 2117440 - DNA, 25 bp, Homo sapien
gaccatccgccatcgcaaaagagta

SEQ ID NO: 2117441 - DNA, 25 bp, Homo sapien
aataccctattatggcgacacatgc

SEQ ID NO: 2117442 - DNA, 25 bp, Homo sapien
catcgcaaaagagtaccatgctcac

SEQ ID NO: 2117443 - DNA, 25 bp, Homo sapien
tgataaggaccctgatgtcgcagaa

SEQ ID NO: 2117444 - DNA, 25 bp, Homo sapien
ctgtagtgatgataaggaccctgat

SEQ ID NO: 2117445 - DNA, 25 bp, Homo sapien
cgcagaattgaccagaagactgcct

SEQ ID NO: 2117446 - DNA, 25 bp, Homo sapien
ggaccctgatgtcgcagaattgacc

SEQ ID NO: 2117447 - DNA, 25 bp, Homo sapien
ctttccaagggttcagcctcaagtg

SEQ ID NO: 2117448 - DNA, 25 bp, Homo sapien
gggttcagcctcaagtgcctggaaa

SEQ ID NO: 2117449 - DNA, 25 bp, Homo sapien
ttcagcctcaagtgcctggaaaggg

SEQ ID NO: 2117450 - DNA, 25 bp, Homo sapien
tccaagggttcagcctcaagtgcct

SEQ ID NO: 2117451 - DNA, 25 bp, Homo sapien
catctagggagcttatcagtaggcc

SEQ ID NO: 2117452 - DNA, 25 bp, Homo sapien
gaacagatatctagcaggcacttaa

SEQ ID NO: 2117453 - DNA, 25 bp, Homo sapien
gaaagaggcaccaatgtctcactga

SEQ ID NO: 2117454 - DNA, 25 bp, Homo sapien
taggcctgctagaagcactgaagaa

SEQ ID NO: 2117455 - DNA, 25 bp, Homo sapien
cactggtctgtggtacaaggcagaa

SEQ ID NO: 2117456 - DNA, 25 bp, Homo sapien
cctggccatggagactataccaaaa

SEQ ID NO: 2117457 - DNA, 25 bp, Homo sapien
tactccgactctgtatttggcaagg

SEQ ID NO: 2117458 - DNA, 25 bp, Homo sapien
cacagattgggttcacagggaggac

SEQ ID NO: 2117459 - DNA, 25 bp, Homo sapien
tgagcagttagacccttcgtctttt

SEQ ID NO: 2117460 - DNA, 25 bp, Homo sapien
ggagttgtcgtctggttcctcagcc

SEQ ID NO: 2117461 - DNA, 25 bp, Homo sapien
gatttgccatagtttctggctctgg

SEQ ID NO: 2117462 - DNA, 25 bp, Homo sapien
agactctaccactttgtcctctgag

SEQ ID NO: 2117463 - DNA, 25 bp, Homo sapien
ttagtgagcttccaaaggcaagagc

SEQ ID NO: 2117464 - DNA, 25 bp, Homo sapien
tcttcatccttaaggctgtctggca

SEQ ID NO: 2117465 - DNA, 25 bp, Homo sapien
tgtagatctcctgcacactgaggcc

SEQ ID NO: 2117466 - DNA, 25 bp, Homo sapien
gtaatgaatggtgctcttccagcca

SEQ ID NO: 2117467 - DNA, 25 bp, Homo sapien
ggctgactcatgcactcttggattc

SEQ ID NO: 2117468 - DNA, 25 bp, Homo sapien
tcaaagatcaaagagagaggtcaac

SEQ ID NO: 2117469 - DNA, 25 bp, Homo sapien
tccctttgagcaaaggctaagacac

SEQ ID NO: 2117470 - DNA, 25 bp, Homo sapien
aagagagaggtcaacaactctggct

SEQ ID NO: 2117471 - DNA, 25 bp, Homo sapien
caaccaggctgggtaagtttagaga

SEQ ID NO: 2117472 - DNA, 25 bp, Homo sapien
gaaggcagtgttccaaaagggagca

SEQ ID NO: 2117473 - DNA, 25 bp, Homo sapien
tcttcacatggcactcgaggttctc

SEQ ID NO: 2117474 - DNA, 25 bp, Homo sapien
cacggtcctcatgtagttaagtcac

SEQ ID NO: 2117475 - DNA, 25 bp, Homo sapien
tctggcttatagtgtttctgccgat

SEQ ID NO: 2117476 - DNA, 25 bp, Homo sapien
tctgacattattcgtgagattctgg

SEQ ID NO: 2117477 - DNA, 25 bp, Homo sapien
cagctctgacattattcgtgagatt

SEQ ID NO: 2117478 - DNA, 25 bp, Homo sapien
tgaattccataaattctacacccat

SEQ ID NO: 2117479 - DNA, 25 bp, Homo sapien
cattattcgtgagattctggatgaa

SEQ ID NO: 2117480 - DNA, 25 bp, Homo sapien
tgcagagatggtcccgatgacaagg

SEQ ID NO: 2117481 - DNA, 25 bp, Homo sapien
atgaatgcagagatggtcccgatga

SEQ ID NO: 2117482 - DNA, 25 bp, Homo sapien
gaatgcagagatggtcccgatgaca

SEQ ID NO: 2117483 - DNA, 25 bp, Homo sapien
aatgcagagatggtcccgatgacaa

SEQ ID NO: 2117484 - DNA, 25 bp, Homo sapien
ctttgcccatgtggtgaacgccagg

SEQ ID NO: 2117485 - DNA, 25 bp, Homo sapien
gatcgcgttcctgctgtcgggactt

SEQ ID NO: 2117486 - DNA, 25 bp, Homo sapien
ctgtgaaggcttgaggatcgcgttc

SEQ ID NO: 2117487 - DNA, 25 bp, Homo sapien
tgtccactgggcgtcttcccctcgg

SEQ ID NO: 2117488 - DNA, 25 bp, Homo sapien
ggaagtgtctgtattcctgttcccc

SEQ ID NO: 2117489 - DNA, 25 bp, Homo sapien
gaggaagtgtctgtattcctgttcc

SEQ ID NO: 2117490 - DNA, 25 bp, Homo sapien
ggaggaagtgtctgtattcctgttc

SEQ ID NO: 2117491 - DNA, 25 bp, Homo sapien
aagtgtctgtattcctgttccccag

SEQ ID NO: 2117492 - DNA, 25 bp, Homo sapien
gaatatcagcagctataccttaaaa

SEQ ID NO: 2117493 - DNA, 25 bp, Homo sapien
taaaaccagtattccgaattgaatg

SEQ ID NO: 2117494 - DNA, 25 bp, Homo sapien
ccgaattgaatggacagctttattg

SEQ ID NO: 2117495 - DNA, 25 bp, Homo sapien
gaaagaatatcagcagctatacctt

SEQ ID NO: 2117496 - DNA, 25 bp, Homo sapien
ttactcctacatactgctagcagct

SEQ ID NO: 2117497 - DNA, 25 bp, Homo sapien
tactcctacatactgctagcagctc

SEQ ID NO: 2117498 - DNA, 25 bp, Homo sapien
ctgctagcagctcttttctccccat

SEQ ID NO: 2117499 - DNA, 25 bp, Homo sapien
actcctacatactgctagcagctct

SEQ ID NO: 2117500 - DNA, 25 bp, Homo sapien
cccggagtctgtcacgtgactgccg

SEQ ID NO: 2117501 - DNA, 25 bp, Homo sapien
cgctaccaaagggacgggtgggctg

SEQ ID NO: 2117502 - DNA, 25 bp, Homo sapien
caggaaagccagagtgccgtctgtc

SEQ ID NO: 2117503 - DNA, 25 bp, Homo sapien
agaataccatagagacagctccagg

SEQ ID NO: 2117504 - DNA, 25 bp, Homo sapien
gagaacgcctcagctggctcgtggc

SEQ ID NO: 2117505 - DNA, 25 bp, Homo sapien
acccgcaaagaggtgaggaccgcga

SEQ ID NO: 2117506 - DNA, 25 bp, Homo sapien
caaaggtaacttcacccgcaaagag

SEQ ID NO: 2117507 - DNA, 25 bp, Homo sapien
catgccgtaggcactaagcggagaa

SEQ ID NO: 2117508 - DNA, 25 bp, Homo sapien
ttcgtcccgagtttgggcctcaggc

SEQ ID NO: 2117509 - DNA, 25 bp, Homo sapien
ccgagctggctagctttaaggccaa

SEQ ID NO: 2117510 - DNA, 25 bp, Homo sapien
aagtgattccgtggtacaaagtaag

SEQ ID NO: 2117511 - DNA, 25 bp, Homo sapien
aactgcctattctcatcgcctatgg

SEQ ID NO: 2117512 - DNA, 25 bp, Homo sapien
tgcgcaacaagtcctttccagtccc

SEQ ID NO: 2117513 - DNA, 25 bp, Homo sapien
gcgcaacaagtcctttccagtccct

SEQ ID NO: 2117514 - DNA, 25 bp, Homo sapien
tccggttcccctagtggtggatcca

SEQ ID NO: 2117515 - DNA, 25 bp, Homo sapien
cgtcgttttctcagagtcagattct

SEQ ID NO: 2117516 - DNA, 25 bp, Homo sapien
ttctttctccgtcgttttctcagag

SEQ ID NO: 2117517 - DNA, 25 bp, Homo sapien
gtggatccattctcggccccagatt

SEQ ID NO: 2117518 - DNA, 25 bp, Homo sapien
ttttcttcatggctgtatttggtag

SEQ ID NO: 2117519 - DNA, 25 bp, Homo sapien
catggctgtatttggtagcacccac

SEQ ID NO: 2117520 - DNA, 25 bp, Homo sapien
tcttcatggctgtatttggtagcac

SEQ ID NO: 2117521 - DNA, 25 bp, Homo sapien
tcatggctgtatttggtagcaccca

SEQ ID NO: 2117522 - DNA, 25 bp, Homo sapien
ttttgacgtatctaacacgtcttac

SEQ ID NO: 2117523 - DNA, 25 bp, Homo sapien
tcatggttttgacgtatctaacacg

SEQ ID NO: 2117524 - DNA, 25 bp, Homo sapien
ctttaccttcatggttttgacgtat

SEQ ID NO: 2117525 - DNA, 25 bp, Homo sapien
ccttcatggttttgacgtatctaac

SEQ ID NO: 2117526 - DNA, 25 bp, Homo sapien
caccccacctgagccccccacctca

SEQ ID NO: 2117527 - DNA, 25 bp, Homo sapien
tcagccatcccatgcctgggattac

SEQ ID NO: 2117528 - DNA, 25 bp, Homo sapien
cctcagccaccccacctgagccccc

SEQ ID NO: 2117529 - DNA, 25 bp, Homo sapien
cacctcagccatcccatgcctggga

SEQ ID NO: 2117530 - DNA, 25 bp, Homo sapien
tttgcaaagataatagacctcatgc

SEQ ID NO: 2117531 - DNA, 25 bp, Homo sapien
caaagataatagacctcatgctggt

SEQ ID NO: 2117532 - DNA, 25 bp, Homo sapien
ttgttgcgccaaggcgacgtgtgtc

SEQ ID NO: 2117533 - DNA, 25 bp, Homo sapien
gtctctggcaatataatttgcaaag

SEQ ID NO: 2117534 - DNA, 25 bp, Homo sapien
ctgactttacaataagataaaacat

SEQ ID NO: 2117535 - DNA, 25 bp, Homo sapien
tttacaataagataaaacatcttac

SEQ ID NO: 2117536 - DNA, 25 bp, Homo sapien
actttacaataagataaaacatctt

SEQ ID NO: 2117537 - DNA, 25 bp, Homo sapien
gactttacaataagataaaacatct

SEQ ID NO: 2117538 - DNA, 25 bp, Homo sapien
tccaacagagtctacgagagagtag

SEQ ID NO: 2117539 - DNA, 25 bp, Homo sapien
agtctacgagagagtaggtgctcaa

SEQ ID NO: 2117540 - DNA, 25 bp, Homo sapien
tgctattaatttgaagactatgtat

SEQ ID NO: 2117541 - DNA, 25 bp, Homo sapien
tgaagactatgtatacggtctagta

SEQ ID NO: 2117542 - DNA, 25 bp, Homo sapien
cccagaaatcgaacatgagaatgtt

SEQ ID NO: 2117543 - DNA, 25 bp, Homo sapien
ggtttcccagaaatcgaacatgaga

SEQ ID NO: 2117544 - DNA, 25 bp, Homo sapien
ccaggtttcccagaaatcgaacatg

SEQ ID NO: 2117545 - DNA, 25 bp, Homo sapien
taccaggtttcccagaaatcgaaca

SEQ ID NO: 2117546 - DNA, 25 bp, Homo sapien
gaagtttgcagagcgtgtcaatcat

SEQ ID NO: 2117547 - DNA, 25 bp, Homo sapien
cctcaagtggcacatggtttatcca

SEQ ID NO: 2117548 - DNA, 25 bp, Homo sapien
gtcaatcatttggtgcagccccttt

SEQ ID NO: 2117549 - DNA, 25 bp, Homo sapien
gccacaacttgagccaacaaaagaa

SEQ ID NO: 2117550 - DNA, 25 bp, Homo sapien
tggcctccaggcatgattggtaata

SEQ ID NO: 2117551 - DNA, 25 bp, Homo sapien
gtcccgttgatcctcctgtaccaga

SEQ ID NO: 2117552 - DNA, 25 bp, Homo sapien
tgtcccgttggctagtgaaataatt

SEQ ID NO: 2117553 - DNA, 25 bp, Homo sapien
agaacctccacatttcggaagatgt

SEQ ID NO: 2117554 - DNA, 25 bp, Homo sapien
aaagcatgtcgagcatttggtgcag

SEQ ID NO: 2117555 - DNA, 25 bp, Homo sapien
gcaaagcatgtcgagcatttggtgc

SEQ ID NO: 2117556 - DNA, 25 bp, Homo sapien
gtttgcaaagcatgtcgagcatttg

SEQ ID NO: 2117557 - DNA, 25 bp, Homo sapien
agcatttggtgcagcacttcttctg

SEQ ID NO: 2117558 - DNA, 25 bp, Homo sapien
tgctgactttttattcctgaaaaaa

SEQ ID NO: 2117559 - DNA, 25 bp, Homo sapien
ctgactttttattcctgaaaaaatg

SEQ ID NO: 2117560 - DNA, 25 bp, Homo sapien
ctgctgactttttattcctgaaaaa

SEQ ID NO: 2117561 - DNA, 25 bp, Homo sapien
tagaggtctcagttccaaaggcaga

SEQ ID NO: 2117562 - DNA, 25 bp, Homo sapien
gactgactgatcctgactactatgg

SEQ ID NO: 2117563 - DNA, 25 bp, Homo sapien
caaaggcagaaatgtgtctaccagg

SEQ ID NO: 2117564 - DNA, 25 bp, Homo sapien
ttactatgctgactggactgactga

SEQ ID NO: 2117565 - DNA, 25 bp, Homo sapien
gagacaaacgcctcaaatcttcttc

SEQ ID NO: 2117566 - DNA, 25 bp, Homo sapien
tatagagggtttcatcccagataga

SEQ ID NO: 2117567 - DNA, 25 bp, Homo sapien
tcccagatagatgttcggaaacaag

SEQ ID NO: 2117568 - DNA, 25 bp, Homo sapien
tcggaaacaagaacattccaatggg

SEQ ID NO: 2117569 - DNA, 25 bp, Homo sapien
catccaaacttaggcagactagctt

SEQ ID NO: 2117570 - DNA, 25 bp, Homo sapien
ccacaacaggtcaaaatggatgatg

SEQ ID NO: 2117571 - DNA, 25 bp, Homo sapien
tgtgacttggtagctatgtcaaccc

SEQ ID NO: 2117572 - DNA, 25 bp, Homo sapien
gatggccagtaagtgaaacctctgc

SEQ ID NO: 2117573 - DNA, 25 bp, Homo sapien
gctgataaactatgctggaccaagc

SEQ ID NO: 2117574 - DNA, 25 bp, Homo sapien
ggaatcagctgataaactatgctgg

SEQ ID NO: 2117575 - DNA, 25 bp, Homo sapien
agcttcgataatttcagcaaaattc

SEQ ID NO: 2117576 - DNA, 25 bp, Homo sapien
gaagtacttcatcagcttcgataat

SEQ ID NO: 2117577 - DNA, 25 bp, Homo sapien
ctttcaggtcacttgctgacaatac

SEQ ID NO: 2117578 - DNA, 25 bp, Homo sapien
taagtctgtacatgctaaagttgac

SEQ ID NO: 2117579 - DNA, 25 bp, Homo sapien
aaggttcttcctgaaagtagtgaca

SEQ ID NO: 2117580 - DNA, 25 bp, Homo sapien
gtgtgaagtacatctgcaaagcaga

SEQ ID NO: 2117581 - DNA, 25 bp, Homo sapien
tcactaacttccaaagagctacaca

SEQ ID NO: 2117582 - DNA, 25 bp, Homo sapien
agtttcactaacttccaaagagcta

SEQ ID NO: 2117583 - DNA, 25 bp, Homo sapien
tttcactaacttccaaagagctaca

SEQ ID NO: 2117584 - DNA, 25 bp, Homo sapien
cactaacttccaaagagctacacac

SEQ ID NO: 2117585 - DNA, 25 bp, Homo sapien
ctatgggcatcacgctgctctttac

SEQ ID NO: 2117586 - DNA, 25 bp, Homo sapien
ttttctcaaatctatgggcatcacg

SEQ ID NO: 2117587 - DNA, 25 bp, Homo sapien
tctcaaatctatgggcatcacgctg

SEQ ID NO: 2117588 - DNA, 25 bp, Homo sapien
caaatctatgggcatcacgctgctc

SEQ ID NO: 2117589 - DNA, 25 bp, Homo sapien
gacttccatactctggaaagaggca

SEQ ID NO: 2117590 - DNA, 25 bp, Homo sapien
ggatcagacatcacaaccatcacat

SEQ ID NO: 2117591 - DNA, 25 bp, Homo sapien
gaaagcagcgaagttagagttcctg

SEQ ID NO: 2117592 - DNA, 25 bp, Homo sapien
cacataagtgttggatgtaaagatg

SEQ ID NO: 2117593 - DNA, 25 bp, Homo sapien
tgcggatgttgatcagagtagctgc

SEQ ID NO: 2117594 - DNA, 25 bp, Homo sapien
gaagacactgctttggtccatccac

SEQ ID NO: 2117595 - DNA, 25 bp, Homo sapien
ttagcgcatgagaagacactgcttt

SEQ ID NO: 2117596 - DNA, 25 bp, Homo sapien
gcttttcaaagtgtttcctggcatt

SEQ ID NO: 2117597 - DNA, 25 bp, Homo sapien
aatacaagatgatgccgagaaaggc

SEQ ID NO: 2117598 - DNA, 25 bp, Homo sapien
tggaaccaggttaccagtacattta

SEQ ID NO: 2117599 - DNA, 25 bp, Homo sapien
catcacaacatttcagagcctacat

SEQ ID NO: 2117600 - DNA, 25 bp, Homo sapien
gcttgggcaaacacaactattggaa

SEQ ID NO: 2117601 - DNA, 25 bp, Homo sapien
taaatagccatatcggaccatgaga

SEQ ID NO: 2117602 - DNA, 25 bp, Homo sapien
ttaccatacagccaaatcttagagg

SEQ ID NO: 2117603 - DNA, 25 bp, Homo sapien
atttctgaatctcccttgtaggtac

SEQ ID NO: 2117604 - DNA, 25 bp, Homo sapien
gatcgtgtgactagattctggacag

SEQ ID NO: 2117605 - DNA, 25 bp, Homo sapien
aaaaagccaggcacttaaatcaaca

SEQ ID NO: 2117606 - DNA, 25 bp, Homo sapien
caagagtcggctatgcatatctcca

SEQ ID NO: 2117607 - DNA, 25 bp, Homo sapien
taactataagtagcagcttgtggca

SEQ ID NO: 2117608 - DNA, 25 bp, Homo sapien
ggcagcactcttatcaagcgagaaa

SEQ ID NO: 2117609 - DNA, 25 bp, Homo sapien
gacttaaatattagacctgaaacca

SEQ ID NO: 2117610 - DNA, 25 bp, Homo sapien
caataccatttaggacacaggcatg

SEQ ID NO: 2117611 - DNA, 25 bp, Homo sapien
atttaggacacaggcatgggcaagg

SEQ ID NO: 2117612 - DNA, 25 bp, Homo sapien
cttaaatattagacctgaaaccata

SEQ ID NO: 2117613 - DNA, 25 bp, Homo sapien
cgcctggcctgatatgagtatgttg

SEQ ID NO: 2117614 - DNA, 25 bp, Homo sapien
cacgcctggcctgatatgagtatgt

SEQ ID NO: 2117615 - DNA, 25 bp, Homo sapien
cctggcctgatatgagtatgttgaa

SEQ ID NO: 2117616 - DNA, 25 bp, Homo sapien
tggcctgatatgagtatgttgaacc

SEQ ID NO: 2117617 - DNA, 25 bp, Homo sapien
cagttgtatcccagtgttgtgcaag

SEQ ID NO: 2117618 - DNA, 25 bp, Homo sapien
tcagttgtatcccagtgttgtgcaa

SEQ ID NO: 2117619 - DNA, 25 bp, Homo sapien
ttgtatcccagtgttgtgcaagcca

SEQ ID NO: 2117620 - DNA, 25 bp, Homo sapien
cttcagttgtatcccagtgttgtgc

SEQ ID NO: 2117621 - DNA, 25 bp, Homo sapien
taatctcaggatacttctgttaggg

SEQ ID NO: 2117622 - DNA, 25 bp, Homo sapien
gataccacaggtagatatgagttat

SEQ ID NO: 2117623 - DNA, 25 bp, Homo sapien
tagaccaataatactgtgtcaagaa

SEQ ID NO: 2117624 - DNA, 25 bp, Homo sapien
caagggaagtattgatataatctca

SEQ ID NO: 2117625 - DNA, 25 bp, Homo sapien
tacacacgtagttgagtgaagagtt

SEQ ID NO: 2117626 - DNA, 25 bp, Homo sapien
tgttcgtcccacttaggctggcgga

SEQ ID NO: 2117627 - DNA, 25 bp, Homo sapien
tgtcaatcaccagcccctttaaagc

SEQ ID NO: 2117628 - DNA, 25 bp, Homo sapien
cgactagggccggtgtacagtctat

SEQ ID NO: 2117629 - DNA, 25 bp, Homo sapien
ttcggattctgcgcctccgaaggca

SEQ ID NO: 2117630 - DNA, 25 bp, Homo sapien
tcggattctgcgcctccgaaggcat

SEQ ID NO: 2117631 - DNA, 25 bp, Homo sapien
tttcggattctgcgcctccgaaggc

SEQ ID NO: 2117632 - DNA, 25 bp, Homo sapien
tcttctagctggaattcccagtcac

SEQ ID NO: 2117633 - DNA, 25 bp, Homo sapien
tcccagtcacttggctttgagcata

SEQ ID NO: 2117634 - DNA, 25 bp, Homo sapien
catggataacgccaaagtggcatta

SEQ ID NO: 2117635 - DNA, 25 bp, Homo sapien
tggacatggataacgccaaagtggc

SEQ ID NO: 2117636 - DNA, 25 bp, Homo sapien
cacagtgcacaacttaaaaggaatc

SEQ ID NO: 2117637 - DNA, 25 bp, Homo sapien
tttatacttaaagctcccactggga

SEQ ID NO: 2117638 - DNA, 25 bp, Homo sapien
ctgaggctaatgaggtgttttatac

SEQ ID NO: 2117639 - DNA, 25 bp, Homo sapien
gggaagcacagtgcacaacttaaaa

SEQ ID NO: 2117640 - DNA, 25 bp, Homo sapien
agggagtcacaaggacaagtggaaa

SEQ ID NO: 2117641 - DNA, 25 bp, Homo sapien
caatgtatggaacagaggggttaaa

SEQ ID NO: 2117642 - DNA, 25 bp, Homo sapien
cttatctctaaaagggagtcacaag

SEQ ID NO: 2117643 - DNA, 25 bp, Homo sapien
tctctaaaagggagtcacaaggaca

SEQ ID NO: 2117644 - DNA, 25 bp, Homo sapien
tatcctcaactgattccagtgtgtg

SEQ ID NO: 2117645 - DNA, 25 bp, Homo sapien
tctctgaggatggacaaagttatca

SEQ ID NO: 2117646 - DNA, 25 bp, Homo sapien
tagaattacctagggagctctttta

SEQ ID NO: 2117647 - DNA, 25 bp, Homo sapien
cagtgtgtggccaaggttaagaatt

SEQ ID NO: 2117648 - DNA, 25 bp, Homo sapien
gctccagggcaagactgaggtctca

SEQ ID NO: 2117649 - DNA, 25 bp, Homo sapien
tatgtatcatgccatcactgaccag

SEQ ID NO: 2117650 - DNA, 25 bp, Homo sapien
cacagagctgactacatagagggtt

SEQ ID NO: 2117651 - DNA, 25 bp, Homo sapien
tctcagatttttgtatacccaggct

SEQ ID NO: 2117652 - DNA, 25 bp, Homo sapien
tgatgaaatcagctactgacgcatg

SEQ ID NO: 2117653 - DNA, 25 bp, Homo sapien
tgaaatcagctactgacgcatgtgc

SEQ ID NO: 2117654 - DNA, 25 bp, Homo sapien
gttgatgaaatcagctactgacgca

SEQ ID NO: 2117655 - DNA, 25 bp, Homo sapien
gaaatcagctactgacgcatgtgca

SEQ ID NO: 2117656 - DNA, 25 bp, Homo sapien
taatcttgaactatcactgcaggac

SEQ ID NO: 2117657 - DNA, 25 bp, Homo sapien
ggccaatggcagtgtcataacatga

SEQ ID NO: 2117658 - DNA, 25 bp, Homo sapien
tgttactgtgcaaagagcgttcatg

SEQ ID NO: 2117659 - DNA, 25 bp, Homo sapien
ggttcaaagtatcaccagggcatga

SEQ ID NO: 2117660 - DNA, 25 bp, Homo sapien
ggtgaggcctgggtggaaggcagtg

SEQ ID NO: 2117661 - DNA, 25 bp, Homo sapien
ggatcctggagaggacatggctgga

SEQ ID NO: 2117662 - DNA, 25 bp, Homo sapien
ggggatcctggagaggacatggctg

SEQ ID NO: 2117663 - DNA, 25 bp, Homo sapien
ctggagaggacatggctggagtgca

SEQ ID NO: 2117664 - DNA, 25 bp, Homo sapien
tccacataggtccaccaggacctct

SEQ ID NO: 2117665 - DNA, 25 bp, Homo sapien
tccattatcatcccagtagacacaa

SEQ ID NO: 2117666 - DNA, 25 bp, Homo sapien
cattatcatcccagtagacacaaac

SEQ ID NO: 2117667 - DNA, 25 bp, Homo sapien
ccattatcatcccagtagacacaaa

SEQ ID NO: 2117668 - DNA, 25 bp, Homo sapien
ttccattatcatcccagtagacaca

SEQ ID NO: 2117669 - DNA, 25 bp, Homo sapien
gaaatgtcctccatacgacctgtga

SEQ ID NO: 2117670 - DNA, 25 bp, Homo sapien
aacaggctctgatcgttaaggtcgc

SEQ ID NO: 2117671 - DNA, 25 bp, Homo sapien
gggcacaggcatgcagaaaaacact

SEQ ID NO: 2117672 - DNA, 25 bp, Homo sapien
gctctagacgaggttccactcccat

SEQ ID NO: 2117673 - DNA, 25 bp, Homo sapien
gttgccagatgtgggtagaaccctc

SEQ ID NO: 2117674 - DNA, 25 bp, Homo sapien
attttgtcagttatgtgttgccaga

SEQ ID NO: 2117675 - DNA, 25 bp, Homo sapien
gagtctgcatgttaatgatgtggtt

SEQ ID NO: 2117676 - DNA, 25 bp, Homo sapien
gtctgcatgttaatgatgtggttgg

SEQ ID NO: 2117677 - DNA, 25 bp, Homo sapien
tagcccatgttgctgaaggtgaccc

SEQ ID NO: 2117678 - DNA, 25 bp, Homo sapien
gagaactcattggtcagctgctcca

SEQ ID NO: 2117679 - DNA, 25 bp, Homo sapien
catcttctaccatgtagatggagaa

SEQ ID NO: 2117680 - DNA, 25 bp, Homo sapien
cagagatgtggccatcttctaccat

SEQ ID NO: 2117681 - DNA, 25 bp, Homo sapien
gcagcatttccacagtgctccatag

SEQ ID NO: 2117682 - DNA, 25 bp, Homo sapien
tatacattgttgtcattgttcggcc

SEQ ID NO: 2117683 - DNA, 25 bp, Homo sapien
ccttctccacagtgctttatgcttt

SEQ ID NO: 2117684 - DNA, 25 bp, Homo sapien
cattgttcggcctgtgcagcatttc

SEQ ID NO: 2117685 - DNA, 25 bp, Homo sapien
tcaccaatgctgttcaacatagtat

SEQ ID NO: 2117686 - DNA, 25 bp, Homo sapien
ggtattcgaatataaagagaggaag

SEQ ID NO: 2117687 - DNA, 25 bp, Homo sapien
taaaggtattcgaatataaagagag

SEQ ID NO: 2117688 - DNA, 25 bp, Homo sapien
aagaatgcactctctcaccaatgct

SEQ ID NO: 2117689 - DNA, 25 bp, Homo sapien
aacttgtcttcaatacctaacctca

SEQ ID NO: 2117690 - DNA, 25 bp, Homo sapien
tatattcccacggaaatctccaggt

SEQ ID NO: 2117691 - DNA, 25 bp, Homo sapien
tgtcagtcataccacaaatgctttg

SEQ ID NO: 2117692 - DNA, 25 bp, Homo sapien
caagcgagttgtcagtcataccaca

SEQ ID NO: 2117693 - DNA, 25 bp, Homo sapien
gttgagctctttctagctgtttgat

SEQ ID NO: 2117694 - DNA, 25 bp, Homo sapien
gtacattctttgttcatatcggttt

SEQ ID NO: 2117695 - DNA, 25 bp, Homo sapien
tagttgagatgttagtttgataagt

SEQ ID NO: 2117696 - DNA, 25 bp, Homo sapien
cattctttgttcatatcggtttcaa

SEQ ID NO: 2117697 - DNA, 25 bp, Homo sapien
aggataacagcttccagctccaacc

SEQ ID NO: 2117698 - DNA, 25 bp, Homo sapien
catgtccaaatgttctcatcattca

SEQ ID NO: 2117699 - DNA, 25 bp, Homo sapien
acagcttccagctccaaccacatct

SEQ ID NO: 2117700 - DNA, 25 bp, Homo sapien
gataacagcttccagctccaaccac

SEQ ID NO: 2117701 - DNA, 25 bp, Homo sapien
ctcctgccatactccccaacaggcc

SEQ ID NO: 2117702 - DNA, 25 bp, Homo sapien
gatcatcccatcatcaagttattaa

SEQ ID NO: 2117703 - DNA, 25 bp, Homo sapien
ccactgcatgttgtcctccccttac

SEQ ID NO: 2117704 - DNA, 25 bp, Homo sapien
cccagcatctattagtgaatttcct

SEQ ID NO: 2117705 - DNA, 25 bp, Homo sapien
tgtcagtctcagaccaactgcatct

SEQ ID NO: 2117706 - DNA, 25 bp, Homo sapien
agcaatcttttccataccctacagt

SEQ ID NO: 2117707 - DNA, 25 bp, Homo sapien
agtgaacattagtgtcagtctcaga

SEQ ID NO: 2117708 - DNA, 25 bp, Homo sapien
aatcttttccataccctacagtgaa

SEQ ID NO: 2117709 - DNA, 25 bp, Homo sapien
agtgcactgggggaatacttgctca

SEQ ID NO: 2117710 - DNA, 25 bp, Homo sapien
attatcactacatccagtgcactgg

SEQ ID NO: 2117711 - DNA, 25 bp, Homo sapien
ccactagcaaacatacactaccatt

SEQ ID NO: 2117712 - DNA, 25 bp, Homo sapien
acactaccattatcactacatccag

SEQ ID NO: 2117713 - DNA, 25 bp, Homo sapien
ggctttatgtccatcgttttttaca

SEQ ID NO: 2117714 - DNA, 25 bp, Homo sapien
gctttatgtccatcgttttttacaa

SEQ ID NO: 2117715 - DNA, 25 bp, Homo sapien
tatgactttcattcagagctatgtc

SEQ ID NO: 2117716 - DNA, 25 bp, Homo sapien
ccaaactttgcccaaagggcataat

SEQ ID NO: 2117717 - DNA, 25 bp, Homo sapien
tatttttccctcagagagttaggcc

SEQ ID NO: 2117718 - DNA, 25 bp, Homo sapien
gagctatgtcaaagataggtttctt

SEQ ID NO: 2117719 - DNA, 25 bp, Homo sapien
atccaaaacataggtctttgcagag

SEQ ID NO: 2117720 - DNA, 25 bp, Homo sapien
ccaaaacataggtctttgcagagtt

SEQ ID NO: 2117721 - DNA, 25 bp, Homo sapien
tatccaaaacataggtctttgcaga

SEQ ID NO: 2117722 - DNA, 25 bp, Homo sapien
tccaaaacataggtctttgcagagt

SEQ ID NO: 2117723 - DNA, 25 bp, Homo sapien
gctgatttccattatgttcaaaatg

SEQ ID NO: 2117724 - DNA, 25 bp, Homo sapien
caatacttgattgtggtcaattctc

SEQ ID NO: 2117725 - DNA, 25 bp, Homo sapien
caagcttatcattgtggccttctgt

SEQ ID NO: 2117726 - DNA, 25 bp, Homo sapien
gatgccacgacacatcaatacttga

SEQ ID NO: 2117727 - DNA, 25 bp, Homo sapien
ttcatatttctggtgccaattacac

SEQ ID NO: 2117728 - DNA, 25 bp, Homo sapien
aaatgtccatcagtcttagaaagag

SEQ ID NO: 2117729 - DNA, 25 bp, Homo sapien
tagccaaaaactgaacatgacccaa

SEQ ID NO: 2117730 - DNA, 25 bp, Homo sapien
aaagaacaaaccactgctgcacaca

SEQ ID NO: 2117731 - DNA, 25 bp, Homo sapien
tagtaaggtcgattaaattccaaga

SEQ ID NO: 2117732 - DNA, 25 bp, Homo sapien
aatggcacagggtagtaaggtcgat

SEQ ID NO: 2117733 - DNA, 25 bp, Homo sapien
tccaagacccattggcaagctgtct

SEQ ID NO: 2117734 - DNA, 25 bp, Homo sapien
gaaatcacacacatagacttaaagg

SEQ ID NO: 2117735 - DNA, 25 bp, Homo sapien
gctaaccctcaagttcatatggaat

SEQ ID NO: 2117736 - DNA, 25 bp, Homo sapien
ttgaaagtggccttacatagcctga

SEQ ID NO: 2117737 - DNA, 25 bp, Homo sapien
gacatgggttccaagggtattcaat

SEQ ID NO: 2117738 - DNA, 25 bp, Homo sapien
tgcagaaatggataagctaaccctc

SEQ ID NO: 2117739 - DNA, 25 bp, Homo sapien
agggacttaggggacaccatcaagc

SEQ ID NO: 2117740 - DNA, 25 bp, Homo sapien
ggacaccatcaagccaaataattta

SEQ ID NO: 2117741 - DNA, 25 bp, Homo sapien
cagagccttagggacttaggggaca

SEQ ID NO: 2117742 - DNA, 25 bp, Homo sapien
caccatcaagccaaataatttacac

SEQ ID NO: 2117743 - DNA, 25 bp, Homo sapien
tccaccatgcttaattatagttata

SEQ ID NO: 2117744 - DNA, 25 bp, Homo sapien
tatagttataattggctttttatag

SEQ ID NO: 2117745 - DNA, 25 bp, Homo sapien
catcacagccttgacttctagggct

SEQ ID NO: 2117746 - DNA, 25 bp, Homo sapien
tcatccaccatgcttaattatagtt

SEQ ID NO: 2117747 - DNA, 25 bp, Homo sapien
tttgtcatctctaagctcctcatat

SEQ ID NO: 2117748 - DNA, 25 bp, Homo sapien
ttgtcatctctaagctcctcatatt

SEQ ID NO: 2117749 - DNA, 25 bp, Homo sapien
ctttgtcatctctaagctcctcata

SEQ ID NO: 2117750 - DNA, 25 bp, Homo sapien
gatccacttttatcaatttaacaaa

SEQ ID NO: 2117751 - DNA, 25 bp, Homo sapien
tagatccacttttatcaatttaaca

SEQ ID NO: 2117752 - DNA, 25 bp, Homo sapien
ctgacagcttttattaagagtgatt

SEQ ID NO: 2117753 - DNA, 25 bp, Homo sapien
agagtgattgagatgggaattgaac

SEQ ID NO: 2117754 - DNA, 25 bp, Homo sapien
agactgccaaagcagtttcacgcca

SEQ ID NO: 2117755 - DNA, 25 bp, Homo sapien
tacagctccatatgagcattcaggc

SEQ ID NO: 2117756 - DNA, 25 bp, Homo sapien
cacgccatgtagtaacaactttaat

SEQ ID NO: 2117757 - DNA, 25 bp, Homo sapien
cattcaggcttgcagccaggatctc

SEQ ID NO: 2117758 - DNA, 25 bp, Homo sapien
ttctctcagaatcccgggctggatc

SEQ ID NO: 2117759 - DNA, 25 bp, Homo sapien
tatattgcaacagatccagcctttc

SEQ ID NO: 2117760 - DNA, 25 bp, Homo sapien
tggatcccatcaggctaccttctct

SEQ ID NO: 2117761 - DNA, 25 bp, Homo sapien
ttcttctcattggatcccatcaggc

SEQ ID NO: 2117762 - DNA, 25 bp, Homo sapien
gaatgcttatatccaactccgttga

SEQ ID NO: 2117763 - DNA, 25 bp, Homo sapien
gaatccttgttctccaagacactgg

SEQ ID NO: 2117764 - DNA, 25 bp, Homo sapien
ggtgaaagcttaagtaacacagaga

SEQ ID NO: 2117765 - DNA, 25 bp, Homo sapien
gaacagagtatgagagtcaacaaag

SEQ ID NO: 2117766 - DNA, 25 bp, Homo sapien
taagttattgatccatcatgacttg

SEQ ID NO: 2117767 - DNA, 25 bp, Homo sapien
cagaagttctttagtgaagttccac

SEQ ID NO: 2117768 - DNA, 25 bp, Homo sapien
gaggatatagtctcctagatgtggc

SEQ ID NO: 2117769 - DNA, 25 bp, Homo sapien
tgcccaagccaatatctagaatggt

SEQ ID NO: 2117770 - DNA, 25 bp, Homo sapien
tatggtagcattgggattggtttat

SEQ ID NO: 2117771 - DNA, 25 bp, Homo sapien
tggccactttgtcatttccggttgt

SEQ ID NO: 2117772 - DNA, 25 bp, Homo sapien
gattagtctatctagcagtctacca

SEQ ID NO: 2117773 - DNA, 25 bp, Homo sapien
ggttatttcttttggtatggtagca

SEQ ID NO: 2117774 - DNA, 25 bp, Homo sapien
ggaaatggtgagaattggcatcctt

SEQ ID NO: 2117775 - DNA, 25 bp, Homo sapien
gtttttagttccattgatgtgatga

SEQ ID NO: 2117776 - DNA, 25 bp, Homo sapien
tacctttttataatgtctgccatct

SEQ ID NO: 2117777 - DNA, 25 bp, Homo sapien
tgtactccaatgtttagctgtcact

SEQ ID NO: 2117778 - DNA, 25 bp, Homo sapien
tatgggttaattgcatgtcatgaag

SEQ ID NO: 2117779 - DNA, 25 bp, Homo sapien
taagcagtttttcgatcttcaccct

SEQ ID NO: 2117780 - DNA, 25 bp, Homo sapien
gaatagagtacccagacataagact

SEQ ID NO: 2117781 - DNA, 25 bp, Homo sapien
gagtacccagacataagactgcaca

SEQ ID NO: 2117782 - DNA, 25 bp, Homo sapien
tagagtacccagacataagactgca

SEQ ID NO: 2117783 - DNA, 25 bp, Homo sapien
aatagagtacccagacataagactg

SEQ ID NO: 2117784 - DNA, 25 bp, Homo sapien
tgacaacgttttgaagacccacaca

SEQ ID NO: 2117785 - DNA, 25 bp, Homo sapien
tttttaagtcaccaacgtggtgata

SEQ ID NO: 2117786 - DNA, 25 bp, Homo sapien
gttttgaagacccacacaactgagt

SEQ ID NO: 2117787 - DNA, 25 bp, Homo sapien
tattacgaaatcatgcataggaaaa

SEQ ID NO: 2117788 - DNA, 25 bp, Homo sapien
aagtcttcgatatccttgttaatct

SEQ ID NO: 2117789 - DNA, 25 bp, Homo sapien
agtcttcgatatccttgttaatctt

SEQ ID NO: 2117790 - DNA, 25 bp, Homo sapien
tgttccacttgataaacgaaataac

SEQ ID NO: 2117791 - DNA, 25 bp, Homo sapien
ttccacttgataaacgaaataactc

SEQ ID NO: 2117792 - DNA, 25 bp, Homo sapien
tgctgttccacttgataaacgaaat

SEQ ID NO: 2117793 - DNA, 25 bp, Homo sapien
ccacttgataaacgaaataactcat

SEQ ID NO: 2117794 - DNA, 25 bp, Homo sapien
gagtggatactcttctctaggaggc

SEQ ID NO: 2117795 - DNA, 25 bp, Homo sapien
cccgaatcccaagagagtcctgaat

SEQ ID NO: 2117796 - DNA, 25 bp, Homo sapien
tctaggaggctcagatacttgcaag

SEQ ID NO: 2117797 - DNA, 25 bp, Homo sapien
ggtaaggcatccacagatctcaatg

SEQ ID NO: 2117798 - DNA, 25 bp, Homo sapien
gactattggacagtacgagccttct

SEQ ID NO: 2117799 - DNA, 25 bp, Homo sapien
cagtacgagccttcttcatactcac

SEQ ID NO: 2117800 - DNA, 25 bp, Homo sapien
tggacagtacgagccttcttcatac

SEQ ID NO: 2117801 - DNA, 25 bp, Homo sapien
ctggaggactattggacagtacgag

SEQ ID NO: 2117802 - DNA, 25 bp, Homo sapien
tcaaaagtcagtttgtagctcttct

SEQ ID NO: 2117803 - DNA, 25 bp, Homo sapien
tgttaccatcacactaatagacaac

SEQ ID NO: 2117804 - DNA, 25 bp, Homo sapien
ataaaactgtaatatctgtaggtca

SEQ ID NO: 2117805 - DNA, 25 bp, Homo sapien
taccatcacactaatagacaacctc

SEQ ID NO: 2117806 - DNA, 25 bp, Homo sapien
tctgtaggtcattttgcagctcgat

SEQ ID NO: 2117807 - DNA, 25 bp, Homo sapien
tgttaaaatatatcccttgttatac

SEQ ID NO: 2117808 - DNA, 25 bp, Homo sapien
tagtgctactgatgcaatggctgct

SEQ ID NO: 2117809 - DNA, 25 bp, Homo sapien
ggctgctcagtagtcgcatctctga

SEQ ID NO: 2117810 - DNA, 25 bp, Homo sapien
gcatctctgacctgactagtttctg

SEQ ID NO: 2117811 - DNA, 25 bp, Homo sapien
gatgcaggcacaggtacaggttttc

SEQ ID NO: 2117812 - DNA, 25 bp, Homo sapien
tgtggatgcatcaatgggcactctg

SEQ ID NO: 2117813 - DNA, 25 bp, Homo sapien
tggatgcatcaatgggcactctgta

SEQ ID NO: 2117814 - DNA, 25 bp, Homo sapien
tttgtggatgcatcaatgggcactc

SEQ ID NO: 2117815 - DNA, 25 bp, Homo sapien
ggtttgtggatgcatcaatgggcac

SEQ ID NO: 2117816 - DNA, 25 bp, Homo sapien
cctgagaccgcctctcagccaggca

SEQ ID NO: 2117817 - DNA, 25 bp, Homo sapien
ccaggcattggcgaagatccccgta

SEQ ID NO: 2117818 - DNA, 25 bp, Homo sapien
gcgaagatccccgtaaagctgaatc

SEQ ID NO: 2117819 - DNA, 25 bp, Homo sapien
ctctaagaatagagttctcaacccc

SEQ ID NO: 2117820 - DNA, 25 bp, Homo sapien
ctctccatggtaacacgaacaagga

SEQ ID NO: 2117821 - DNA, 25 bp, Homo sapien
tccatggtaacacgaacaaggacag

SEQ ID NO: 2117822 - DNA, 25 bp, Homo sapien
caaggacagcgaggtcacagtgtct

SEQ ID NO: 2117823 - DNA, 25 bp, Homo sapien
acgaacaaggacagcgaggtcacag

SEQ ID NO: 2117824 - DNA, 25 bp, Homo sapien
tttactccggttatgctaattctcc

SEQ ID NO: 2117825 - DNA, 25 bp, Homo sapien
tactccggttatgctaattctccag

SEQ ID NO: 2117826 - DNA, 25 bp, Homo sapien
ctatttactccggttatgctaattc

SEQ ID NO: 2117827 - DNA, 25 bp, Homo sapien
ctccggttatgctaattctccaggg

SEQ ID NO: 2117828 - DNA, 25 bp, Homo sapien
cctgagtgggtagagtgattccgtc

SEQ ID NO: 2117829 - DNA, 25 bp, Homo sapien
tgccgacgattggtagaatcataga

SEQ ID NO: 2117830 - DNA, 25 bp, Homo sapien
cacgcgagtcagaacctaaagtgct

SEQ ID NO: 2117831 - DNA, 25 bp, Homo sapien
aaaatggcagcaactcgtgcgggtc

SEQ ID NO: 2117832 - DNA, 25 bp, Homo sapien
cgccgttgccgccgcacaccccagc

SEQ ID NO: 2117833 - DNA, 25 bp, Homo sapien
ccgttgccgccgcacaccccagcgc

SEQ ID NO: 2117834 - DNA, 25 bp, Homo sapien
ggagataccacaagaggatcccttc

SEQ ID NO: 2117835 - DNA, 25 bp, Homo sapien
gaggagataccacaagaggatccct

SEQ ID NO: 2117836 - DNA, 25 bp, Homo sapien
aaagttgaggcggagaagaaatcct

SEQ ID NO: 2117837 - DNA, 25 bp, Homo sapien
ctccacacaccctttaaaaggagag

SEQ ID NO: 2117838 - DNA, 25 bp, Homo sapien
gaaatccttcaagacaggaacccac

SEQ ID NO: 2117839 - DNA, 25 bp, Homo sapien
aaagcgctacttgaacataaagttg

SEQ ID NO: 2117840 - DNA, 25 bp, Homo sapien
ataaagtgggttcgctgggccgaag

SEQ ID NO: 2117841 - DNA, 25 bp, Homo sapien
cagagtagacttcctaaaaagaatc

SEQ ID NO: 2117842 - DNA, 25 bp, Homo sapien
atcaggggccggcagagtagacttc

SEQ ID NO: 2117843 - DNA, 25 bp, Homo sapien
tcaagcatccaacccaaaaatcagg

SEQ ID NO: 2117844 - DNA, 25 bp, Homo sapien
aggggagggagtcgattcagaccca

SEQ ID NO: 2117845 - DNA, 25 bp, Homo sapien
gggagggagtcgattcagacccagc

SEQ ID NO: 2117846 - DNA, 25 bp, Homo sapien
agggagtcgattcagacccagctgg

SEQ ID NO: 2117847 - DNA, 25 bp, Homo sapien
gagggagtcgattcagacccagctg

SEQ ID NO: 2117848 - DNA, 25 bp, Homo sapien
tcctccgggaggctcatactcctga

SEQ ID NO: 2117849 - DNA, 25 bp, Homo sapien
gcagggcgacgcgttctcgtcttct

SEQ ID NO: 2117850 - DNA, 25 bp, Homo sapien
gagctgatcgcaagagagctgttcc

SEQ ID NO: 2117851 - DNA, 25 bp, Homo sapien
ccattctgacatagcgcagggcgac

SEQ ID NO: 2117852 - DNA, 25 bp, Homo sapien
gacgaaccaactgccttggccacgt

SEQ ID NO: 2117853 - DNA, 25 bp, Homo sapien
ctacacagacgaaccaactgccttg

SEQ ID NO: 2117854 - DNA, 25 bp, Homo sapien
acacagacgaaccaactgccttggc

SEQ ID NO: 2117855 - DNA, 25 bp, Homo sapien
acagacgaaccaactgccttggcca

SEQ ID NO: 2117856 - DNA, 25 bp, Homo sapien
ccctttctttcagaagtgatgaagt

SEQ ID NO: 2117857 - DNA, 25 bp, Homo sapien
ctagtagccctttctttcagaagtg

SEQ ID NO: 2117858 - DNA, 25 bp, Homo sapien
agtagccctttctttcagaagtgat

SEQ ID NO: 2117859 - DNA, 25 bp, Homo sapien
tagccctttctttcagaagtgatga

SEQ ID NO: 2117860 - DNA, 25 bp, Homo sapien
agctctatgatactgatgtggcaaa

SEQ ID NO: 2117861 - DNA, 25 bp, Homo sapien
aagctctatgatactgatgtggcaa

SEQ ID NO: 2117862 - DNA, 25 bp, Homo sapien
atgtggcaaatcaacaccctgattt

SEQ ID NO: 2117863 - DNA, 25 bp, Homo sapien
tttttcctaagccacaacttgtcca

SEQ ID NO: 2117864 - DNA, 25 bp, Homo sapien
ttttcctaagccacaacttgtccat

SEQ ID NO: 2117865 - DNA, 25 bp, Homo sapien
atcccataatctttggcaaggcctt

SEQ ID NO: 2117866 - DNA, 25 bp, Homo sapien
cataatctttggcaaggcctttttt

SEQ ID NO: 2117867 - DNA, 25 bp, Homo sapien
tgcattgagccaccttctgaattaa

SEQ ID NO: 2117868 - DNA, 25 bp, Homo sapien
gcattgagccaccttctgaattaag

SEQ ID NO: 2117869 - DNA, 25 bp, Homo sapien
cattgagccaccttctgaattaagt

SEQ ID NO: 2117870 - DNA, 25 bp, Homo sapien
ttgagccaccttctgaattaagttg

SEQ ID NO: 2117871 - DNA, 25 bp, Homo sapien
cagcatgatacttgaattatgggag

SEQ ID NO: 2117872 - DNA, 25 bp, Homo sapien
cattatctatcagcatgatacttga

SEQ ID NO: 2117873 - DNA, 25 bp, Homo sapien
tggtaccacctctttagccagtaaa

SEQ ID NO: 2117874 - DNA, 25 bp, Homo sapien
cactgccaagcaacactctggatct

SEQ ID NO: 2117875 - DNA, 25 bp, Homo sapien
gggatctctgttccgaacagaagca

SEQ ID NO: 2117876 - DNA, 25 bp, Homo sapien
ctctgttccgaacagaagcagtgac

SEQ ID NO: 2117877 - DNA, 25 bp, Homo sapien
ggatctctgttccgaacagaagcag

SEQ ID NO: 2117878 - DNA, 25 bp, Homo sapien
tcttatttggcagactgactgaggg

SEQ ID NO: 2117879 - DNA, 25 bp, Homo sapien
tattggagcttgtagcatgctagca

SEQ ID NO: 2117880 - DNA, 25 bp, Homo sapien
gagactgcactaccactgggatggt

SEQ ID NO: 2117881 - DNA, 25 bp, Homo sapien
ttgacgtggacaccacaagggtctg

SEQ ID NO: 2117882 - DNA, 25 bp, Homo sapien
caatgagatgaaacgtatacctacc

SEQ ID NO: 2117883 - DNA, 25 bp, Homo sapien
cctgaaaagtccgagggtggatgcc

SEQ ID NO: 2117884 - DNA, 25 bp, Homo sapien
tccacctatgttgggagaagctgtc

SEQ ID NO: 2117885 - DNA, 25 bp, Homo sapien
aactaatacagacaccattgggcca

SEQ ID NO: 2117886 - DNA, 25 bp, Homo sapien
agatgtgagaacatccaccttggcc

SEQ ID NO: 2117887 - DNA, 25 bp, Homo sapien
tcctggctgtcctaaaatcaaattc

SEQ ID NO: 2117888 - DNA, 25 bp, Homo sapien
gctcctggctgtcctaaaatcaaat

SEQ ID NO: 2117889 - DNA, 25 bp, Homo sapien
tcaaattctaggattagtccagatg

SEQ ID NO: 2117890 - DNA, 25 bp, Homo sapien
tcaggattcccagtttgtcccacct

SEQ ID NO: 2117891 - DNA, 25 bp, Homo sapien
tgcatagcagggaacagaaatgcct

SEQ ID NO: 2117892 - DNA, 25 bp, Homo sapien
tgtgagctgaagatgtatgtgcctc

SEQ ID NO: 2117893 - DNA, 25 bp, Homo sapien
cagggtcagctgaaaagttagtttc

SEQ ID NO: 2117894 - DNA, 25 bp, Homo sapien
tcttgctgtagtccctgcagactct

SEQ ID NO: 2117895 - DNA, 25 bp, Homo sapien
tcaattgtactctcctcactgtcac

SEQ ID NO: 2117896 - DNA, 25 bp, Homo sapien
ttgctgtagtccctgcagactctgc

SEQ ID NO: 2117897 - DNA, 25 bp, Homo sapien
ggctgaggatccactctcaattgta

SEQ ID NO: 2117898 - DNA, 25 bp, Homo sapien
tctcttcaagtcaagcgactcttct

SEQ ID NO: 2117899 - DNA, 25 bp, Homo sapien
cacattggtgaatccgtcttctctt

SEQ ID NO: 2117900 - DNA, 25 bp, Homo sapien
tgcaaagtcacattggtgaatccgt

SEQ ID NO: 2117901 - DNA, 25 bp, Homo sapien
ttcaagtcaagcgactcttctccct

SEQ ID NO: 2117902 - DNA, 25 bp, Homo sapien
aaagctgcggttgcagtctgtgcac

SEQ ID NO: 2117903 - DNA, 25 bp, Homo sapien
tgcggaaatggcgagtgagctcatc

SEQ ID NO: 2117904 - DNA, 25 bp, Homo sapien
tgtgcaccgaaaaggcttgatgcct

SEQ ID NO: 2117905 - DNA, 25 bp, Homo sapien
tggcgacggcgatgcagggacaggt

SEQ ID NO: 2117906 - DNA, 25 bp, Homo sapien
gcttctctagtgtgacctgtgcggc

SEQ ID NO: 2117907 - DNA, 25 bp, Homo sapien
caggaaagataccagcgcagcttct

SEQ ID NO: 2117908 - DNA, 25 bp, Homo sapien
gtagaatatgaagagccccacggga

SEQ ID NO: 2117909 - DNA, 25 bp, Homo sapien
tcctcaacttggctcagtgggctgc

SEQ ID NO: 2117910 - DNA, 25 bp, Homo sapien
ttcactgggaatgtgcctcaaactc

SEQ ID NO: 2117911 - DNA, 25 bp, Homo sapien
aaagcagcgtatgtttgttcacagc

SEQ ID NO: 2117912 - DNA, 25 bp, Homo sapien
taggacactatcaaaccacttttag

SEQ ID NO: 2117913 - DNA, 25 bp, Homo sapien
taaatcttaccaatcaactacattg

SEQ ID NO: 2117914 - DNA, 25 bp, Homo sapien
tctcgacagcctgccatttgaatga

SEQ ID NO: 2117915 - DNA, 25 bp, Homo sapien
tctgtataacatgaccctagtgtgt

SEQ ID NO: 2117916 - DNA, 25 bp, Homo sapien
aattccatggagtgaacaacattcc

SEQ ID NO: 2117917 - DNA, 25 bp, Homo sapien
ccttgatgaacttaagaagcagaag

SEQ ID NO: 2117918 - DNA, 25 bp, Homo sapien
cagaggattttgtaccccaggtaat

SEQ ID NO: 2117919 - DNA, 25 bp, Homo sapien
gatccccaggagaataagcgtgcag

SEQ ID NO: 2117920 - DNA, 25 bp, Homo sapien
caatatagtgagaatggacagcctc

SEQ ID NO: 2117921 - DNA, 25 bp, Homo sapien
gcgtgcaggtgtataagggctcaaa

SEQ ID NO: 2117922 - DNA, 25 bp, Homo sapien
tagaggtcccctttaacagactggc

SEQ ID NO: 2117923 - DNA, 25 bp, Homo sapien
gataaaggctcagatgtcagggacc

SEQ ID NO: 2117924 - DNA, 25 bp, Homo sapien
caactgtccaggctaacggtgcttt

SEQ ID NO: 2117925 - DNA, 25 bp, Homo sapien
taagctcgggctctactgtgaaata

SEQ ID NO: 2117926 - DNA, 25 bp, Homo sapien
tattagatgtaatgtggaatcctga

SEQ ID NO: 2117927 - DNA, 25 bp, Homo sapien
caaaaggatcctaaggagatatgac

SEQ ID NO: 2117928 - DNA, 25 bp, Homo sapien
tgagatcaagtgtgtcgctctgtca

SEQ ID NO: 2117929 - DNA, 25 bp, Homo sapien
ggaatcctgaacaagatgctgaaac

SEQ ID NO: 2117930 - DNA, 25 bp, Homo sapien
gctcacttcgtgtttgtgccagtaa

SEQ ID NO: 2117931 - DNA, 25 bp, Homo sapien
ggcaaccctgtgaccaacaagtcta

SEQ ID NO: 2117932 - DNA, 25 bp, Homo sapien
tcttctccgtggtcctactttcaaa

SEQ ID NO: 2117933 - DNA, 25 bp, Homo sapien
cacatttaccagactacaggatagt

SEQ ID NO: 2117934 - DNA, 25 bp, Homo sapien
caggttaacaattcagatactgcta

SEQ ID NO: 2117935 - DNA, 25 bp, Homo sapien
cacactgtgctgtagttgataaagt

SEQ ID NO: 2117936 - DNA, 25 bp, Homo sapien
ccagaattttgcagaccactttgtt

SEQ ID NO: 2117937 - DNA, 25 bp, Homo sapien
aaagttgtttcccatgggtatacag

SEQ ID NO: 2117938 - DNA, 25 bp, Homo sapien
tatctccaggtgcataacagacttg

SEQ ID NO: 2117939 - DNA, 25 bp, Homo sapien
gatgccatagtggagggtctctgaa

SEQ ID NO: 2117940 - DNA, 25 bp, Homo sapien
ggatggacaccactaggaactctct

SEQ ID NO: 2117941 - DNA, 25 bp, Homo sapien
tgaacaagattgcttagtccccaag

SEQ ID NO: 2117942 - DNA, 25 bp, Homo sapien
tcagggctagaatttttactgcggt

SEQ ID NO: 2117943 - DNA, 25 bp, Homo sapien
tcaggcaacttcgacatcttcactc

SEQ ID NO: 2117944 - DNA, 25 bp, Homo sapien
tagaatttttactgcggtggctttg

SEQ ID NO: 2117945 - DNA, 25 bp, Homo sapien
tggctttgaggtttaaagctgtcca

SEQ ID NO: 2117946 - DNA, 25 bp, Homo sapien
ggcatgattttccagtgggtggtac

SEQ ID NO: 2117947 - DNA, 25 bp, Homo sapien
atgattttccagtgggtggtaccgg

SEQ ID NO: 2117948 - DNA, 25 bp, Homo sapien
catgattttccagtgggtggtaccg

SEQ ID NO: 2117949 - DNA, 25 bp, Homo sapien
ttggcatgattttccagtgggtggt

SEQ ID NO: 2117950 - DNA, 25 bp, Homo sapien
cagctcccactgtaaggtccataga

SEQ ID NO: 2117951 - DNA, 25 bp, Homo sapien
caaaatgcagtacccattcctgagt

SEQ ID NO: 2117952 - DNA, 25 bp, Homo sapien
aatgcagtacccattcctgagtcat

SEQ ID NO: 2117953 - DNA, 25 bp, Homo sapien
aaatgcagtacccattcctgagtca

SEQ ID NO: 2117954 - DNA, 25 bp, Homo sapien
aaaatgcagtacccattcctgagtc

SEQ ID NO: 2117955 - DNA, 25 bp, Homo sapien
cacagaaatatagggtgctgctgcc

SEQ ID NO: 2117956 - DNA, 25 bp, Homo sapien
tcaatccacagaaatatagggtgct

SEQ ID NO: 2117957 - DNA, 25 bp, Homo sapien
aatccacagaaatatagggtgctgc

SEQ ID NO: 2117958 - DNA, 25 bp, Homo sapien
tccacagaaatatagggtgctgctg

SEQ ID NO: 2117959 - DNA, 25 bp, Homo sapien
cacaaatggttcagtcaaggaaggg

SEQ ID NO: 2117960 - DNA, 25 bp, Homo sapien
gattgggcgagacctcctaaaaggc

SEQ ID NO: 2117961 - DNA, 25 bp, Homo sapien
tagagactggagcagaacctcagca

SEQ ID NO: 2117962 - DNA, 25 bp, Homo sapien
caggccagcaacaggtcagtattca

SEQ ID NO: 2117963 - DNA, 25 bp, Homo sapien
ctttgcattatctttctttacctta

SEQ ID NO: 2117964 - DNA, 25 bp, Homo sapien
gcggcgccaggcctagattgataga

SEQ ID NO: 2117965 - DNA, 25 bp, Homo sapien
gatagatttggctcggtcaaaatta

SEQ ID NO: 2117966 - DNA, 25 bp, Homo sapien
gccttgtgatccgaccgcgcgcact

SEQ ID NO: 2117967 - DNA, 25 bp, Homo sapien
ctccgccgccgccttgtgatccgac

SEQ ID NO: 2117968 - DNA, 25 bp, Homo sapien
ggcctgggcgtaggccgctggctga

SEQ ID NO: 2117969 - DNA, 25 bp, Homo sapien
gtgatgaagactgcggttccctggt

SEQ ID NO: 2117970 - DNA, 25 bp, Homo sapien
aggtctccgcgctccggtctctggg

SEQ ID NO: 2117971 - DNA, 25 bp, Homo sapien
gcgcggagcacggtacctctgtgat

SEQ ID NO: 2117972 - DNA, 25 bp, Homo sapien
gaaggaggcaccgccgcagcgggct

SEQ ID NO: 2117973 - DNA, 25 bp, Homo sapien
aaggaggcaccgccgcagcgggctg

SEQ ID NO: 2117974 - DNA, 25 bp, Homo sapien
cgctgctctcgccattctcagccat

SEQ ID NO: 2117975 - DNA, 25 bp, Homo sapien
ggggggccgctgctctcgccattct

SEQ ID NO: 2117976 - DNA, 25 bp, Homo sapien
ttgggccgcagcagggccgcgggag

SEQ ID NO: 2117977 - DNA, 25 bp, Homo sapien
gggccgctgctctcgccattctcag

SEQ ID NO: 2117978 - DNA, 25 bp, Homo sapien
aggtgaacagtcagcccatcatgga

SEQ ID NO: 2117979 - DNA, 25 bp, Homo sapien
cagcactagctgatcggtttgggat

SEQ ID NO: 2117980 - DNA, 25 bp, Homo sapien
ttttccggcaaaaatcagcactagc

SEQ ID NO: 2117981 - DNA, 25 bp, Homo sapien
tccttaaactgctgaaccgagctgt

SEQ ID NO: 2117982 - DNA, 25 bp, Homo sapien
actggccctgaggtcggttctggct

SEQ ID NO: 2117983 - DNA, 25 bp, Homo sapien
cctgaggtcggttctggcttttgat

SEQ ID NO: 2117984 - DNA, 25 bp, Homo sapien
tcccgcggcattgctaggctgcgtg

SEQ ID NO: 2117985 - DNA, 25 bp, Homo sapien
tcgacgccgaggtagtgttagttcc

SEQ ID NO: 2117986 - DNA, 25 bp, Homo sapien
tccccacggaggcaaatggattacc

SEQ ID NO: 2117987 - DNA, 25 bp, Homo sapien
taatgagctgcctcatcagatcggg

SEQ ID NO: 2117988 - DNA, 25 bp, Homo sapien
gaatgtcagtgtacatgcgccgtaa

SEQ ID NO: 2117989 - DNA, 25 bp, Homo sapien
agaagttggtcgagctcaagcccag

SEQ ID NO: 2117990 - DNA, 25 bp, Homo sapien
gcttgtggtcgtgctggtagttgca

SEQ ID NO: 2117991 - DNA, 25 bp, Homo sapien
ggaactattgccagacccactacca

SEQ ID NO: 2117992 - DNA, 25 bp, Homo sapien
accagtgcttgtggtcgtgctggta

SEQ ID NO: 2117993 - DNA, 25 bp, Homo sapien
aactctgggtagctggcggtggtgc

SEQ ID NO: 2117994 - DNA, 25 bp, Homo sapien
tgaggatttgcagtaaacagcgggc

SEQ ID NO: 2117995 - DNA, 25 bp, Homo sapien
taattagcggcagcaacggtgttcc

SEQ ID NO: 2117996 - DNA, 25 bp, Homo sapien
tctggattctggctcagcgactgca

SEQ ID NO: 2117997 - DNA, 25 bp, Homo sapien
tagggcgccgacagcatattctgaa

SEQ ID NO: 2117998 - DNA, 25 bp, Homo sapien
tgggcctacagggcctatagcggtt

SEQ ID NO: 2117999 - DNA, 25 bp, Homo sapien
gcctatgggggtgactgggcctaca

SEQ ID NO: 2118000 - DNA, 25 bp, Homo sapien
acagggcctatagcggttcccagca

SEQ ID NO: 2118001 - DNA, 25 bp, Homo sapien
cctacagggcctatagcggttccca

SEQ ID NO: 2118002 - DNA, 25 bp, Homo sapien
taagaaccccattgcgttgagctgt

SEQ ID NO: 2118003 - DNA, 25 bp, Homo sapien
gacttctggattcggcagctgtgga

SEQ ID NO: 2118004 - DNA, 25 bp, Homo sapien
ttcactaggtgcagcgctggacaca

SEQ ID NO: 2118005 - DNA, 25 bp, Homo sapien
cagggcctgcaccatttgctgaatg

SEQ ID NO: 2118006 - DNA, 25 bp, Homo sapien
ggcattactacactgatccttcagg

SEQ ID NO: 2118007 - DNA, 25 bp, Homo sapien
gatgtacagtgccaattgtgcttac

SEQ ID NO: 2118008 - DNA, 25 bp, Homo sapien
gacaacacttgttcacccaactgtg

SEQ ID NO: 2118009 - DNA, 25 bp, Homo sapien
caccactcaaaacggctaaggaagg

SEQ ID NO: 2118010 - DNA, 25 bp, Homo sapien
taaaaccatataagttagagaaata

SEQ ID NO: 2118011 - DNA, 25 bp, Homo sapien
agttagagaaatataggataagatt

SEQ ID NO: 2118012 - DNA, 25 bp, Homo sapien
ctaaacacgatcctagggccaaaag

SEQ ID NO: 2118013 - DNA, 25 bp, Homo sapien
taatctcggggtgggataatcctcc

SEQ ID NO: 2118014 - DNA, 25 bp, Homo sapien
taattgataggatttctcacctgga

SEQ ID NO: 2118015 - DNA, 25 bp, Homo sapien
tgtttaacccatgcagtcagaaatt

SEQ ID NO: 2118016 - DNA, 25 bp, Homo sapien
taagcagtatcaacgtgttccctgt

SEQ ID NO: 2118017 - DNA, 25 bp, Homo sapien
tctcctatatagcaaaaatgaccac

SEQ ID NO: 2118018 - DNA, 25 bp, Homo sapien
cataggttaacagttctgatactgc

SEQ ID NO: 2118019 - DNA, 25 bp, Homo sapien
tagagaaaggaagtttgaacgatcc

SEQ ID NO: 2118020 - DNA, 25 bp, Homo sapien
tcactgttgcagttgagaggttaca

SEQ ID NO: 2118021 - DNA, 25 bp, Homo sapien
tttcccatgaggcataggttaacag

SEQ ID NO: 2118022 - DNA, 25 bp, Homo sapien
gggtgcagcacaccgtgcaccagcc

SEQ ID NO: 2118023 - DNA, 25 bp, Homo sapien
agcacaccgtgcaccagccaaagca

SEQ ID NO: 2118024 - DNA, 25 bp, Homo sapien
ttcagacgggcttaaaaaatggtgc

SEQ ID NO: 2118025 - DNA, 25 bp, Homo sapien
cctaatacttcgcttttcagacggg

SEQ ID NO: 2118026 - DNA, 25 bp, Homo sapien
gagacacttcccagcaggggtcgac

SEQ ID NO: 2118027 - DNA, 25 bp, Homo sapien
catctggcgggtgtccctctgggaa

SEQ ID NO: 2118028 - DNA, 25 bp, Homo sapien
cacttcccagcaggggtcgacagac

SEQ ID NO: 2118029 - DNA, 25 bp, Homo sapien
tctggcgggtgtccctctgggaaga

SEQ ID NO: 2118030 - DNA, 25 bp, Homo sapien
ctgaggttgaaagtatgaagaatcc

SEQ ID NO: 2118031 - DNA, 25 bp, Homo sapien
cattcagtgggtacatacgcaaggg

SEQ ID NO: 2118032 - DNA, 25 bp, Homo sapien
tggattccccagagtgtattgtttc

SEQ ID NO: 2118033 - DNA, 25 bp, Homo sapien
aaaaagtatctgagaagagcgtcaa

SEQ ID NO: 2118034 - DNA, 25 bp, Homo sapien
gcaacacaaaggtcatgcactagat

SEQ ID NO: 2118035 - DNA, 25 bp, Homo sapien
tcagtgctcccggtatgggaaaaaa

SEQ ID NO: 2118036 - DNA, 25 bp, Homo sapien
taaagcggtaaatgtcacaagggtc

SEQ ID NO: 2118037 - DNA, 25 bp, Homo sapien
tgtttttatgggctcacatggtaga

SEQ ID NO: 2118038 - DNA, 25 bp, Homo sapien
cagccactgggatacttccaggtac

SEQ ID NO: 2118039 - DNA, 25 bp, Homo sapien
ctgggatacttccaggtacaatctc

SEQ ID NO: 2118040 - DNA, 25 bp, Homo sapien
tcagctctgcttgtgaagtgccttc

SEQ ID NO: 2118041 - DNA, 25 bp, Homo sapien
gctctgcttgtgaagtgccttcctc

SEQ ID NO: 2118042 - DNA, 25 bp, Homo sapien
aaggccaagaagtggtggtataact

SEQ ID NO: 2118043 - DNA, 25 bp, Homo sapien
ctcacttggtttggtttaacttgat

SEQ ID NO: 2118044 - DNA, 25 bp, Homo sapien
cttatcagttcaagaagtttttggg

SEQ ID NO: 2118045 - DNA, 25 bp, Homo sapien
taacttgatttctctggcatggaca

SEQ ID NO: 2118046 - DNA, 25 bp, Homo sapien
ggaggtcctgatctactcttggtag

SEQ ID NO: 2118047 - DNA, 25 bp, Homo sapien
tgttctcccttgctataaaagtaga

SEQ ID NO: 2118048 - DNA, 25 bp, Homo sapien
taagcaggtgtatggcaactcaggg

SEQ ID NO: 2118049 - DNA, 25 bp, Homo sapien
taaaagtagacatgttaagcaggtg

SEQ ID NO: 2118050 - DNA, 25 bp, Homo sapien
tgcaaactttactagaaggctacag

SEQ ID NO: 2118051 - DNA, 25 bp, Homo sapien
actgcaaactttactagaaggctac

SEQ ID NO: 2118052 - DNA, 25 bp, Homo sapien
gcaaactttactagaaggctacagt

SEQ ID NO: 2118053 - DNA, 25 bp, Homo sapien
ctgcaaactttactagaaggctaca

SEQ ID NO: 2118054 - DNA, 25 bp, Homo sapien
tggcaaagccaagagacctgagatg

SEQ ID NO: 2118055 - DNA, 25 bp, Homo sapien
tgagatggcggcgagtcccctccag

SEQ ID NO: 2118056 - DNA, 25 bp, Homo sapien
cgtcagttttctccggtgggccctg

SEQ ID NO: 2118057 - DNA, 25 bp, Homo sapien
aaggattacagaaacgggtcgtcag

SEQ ID NO: 2118058 - DNA, 25 bp, Homo sapien
ttttggaggcttggcttcccgtgcg

SEQ ID NO: 2118059 - DNA, 25 bp, Homo sapien
tctcccggaggcacaaggttggtct

SEQ ID NO: 2118060 - DNA, 25 bp, Homo sapien
ggataatcccaacgcggagcgagga

SEQ ID NO: 2118061 - DNA, 25 bp, Homo sapien
tagagtggtactacctccgttggga

SEQ ID NO: 2118062 - DNA, 25 bp, Homo sapien
actcctgacctgatctgctcacctc

SEQ ID NO: 2118063 - DNA, 25 bp, Homo sapien
gcatcccaaagtgctaggataatag

SEQ ID NO: 2118064 - DNA, 25 bp, Homo sapien
tgacctgatctgctcacctcggcat

SEQ ID NO: 2118065 - DNA, 25 bp, Homo sapien
tagttttttgctattgtcgcccagg

SEQ ID NO: 2118066 - DNA, 25 bp, Homo sapien
caccagggaaatggagtcatactgc

SEQ ID NO: 2118067 - DNA, 25 bp, Homo sapien
aagcacaacttccaggttcaggaca

SEQ ID NO: 2118068 - DNA, 25 bp, Homo sapien
gaactattatatgaatgcaccaggg

SEQ ID NO: 2118069 - DNA, 25 bp, Homo sapien
caccagaaaaagcagggtagcattg

SEQ ID NO: 2118070 - DNA, 25 bp, Homo sapien
taatgtttaaagcaagcctaagggc

SEQ ID NO: 2118071 - DNA, 25 bp, Homo sapien
tgtgatattacatagggcaacctct

SEQ ID NO: 2118072 - DNA, 25 bp, Homo sapien
tactgtgcacaattacaaggagact

SEQ ID NO: 2118073 - DNA, 25 bp, Homo sapien
tagtgtagccctacttcgcagaagg

SEQ ID NO: 2118074 - DNA, 25 bp, Homo sapien
gatacacaatctttccaggcacaca

SEQ ID NO: 2118075 - DNA, 25 bp, Homo sapien
gatcatgttctctaggacataaagc

SEQ ID NO: 2118076 - DNA, 25 bp, Homo sapien
tacacgcaaaaattagatacacaat

SEQ ID NO: 2118077 - DNA, 25 bp, Homo sapien
tttaatgaacagaacactacacgca

SEQ ID NO: 2118078 - DNA, 25 bp, Homo sapien
gcttgccctcccaaaacattgagat

SEQ ID NO: 2118079 - DNA, 25 bp, Homo sapien
ttttcctattcgtctgttgccttcc

SEQ ID NO: 2118080 - DNA, 25 bp, Homo sapien
tattcattgacagaggcaatgtttt

SEQ ID NO: 2118081 - DNA, 25 bp, Homo sapien
ccttccttaatgcacttcgctaata

SEQ ID NO: 2118082 - DNA, 25 bp, Homo sapien
ggataggctggttcattgggacccc

SEQ ID NO: 2118083 - DNA, 25 bp, Homo sapien
gatggaaccgggaagctgaagaacc

SEQ ID NO: 2118084 - DNA, 25 bp, Homo sapien
ttgggcagccagacaacaagggatg

SEQ ID NO: 2118085 - DNA, 25 bp, Homo sapien
tgagagttgcctgcacaacaggacc

SEQ ID NO: 2118086 - DNA, 25 bp, Homo sapien
cattgggacgctttggagaagcaac

SEQ ID NO: 2118087 - DNA, 25 bp, Homo sapien
gctttggagaagcaactactctaga

SEQ ID NO: 2118088 - DNA, 25 bp, Homo sapien
ctggcattgggacgctttggagaag

SEQ ID NO: 2118089 - DNA, 25 bp, Homo sapien
ccaagaccagtcagcccagagggcg

SEQ ID NO: 2118090 - DNA, 25 bp, Homo sapien
atacgcataagggaagccactggcc

SEQ ID NO: 2118091 - DNA, 25 bp, Homo sapien
gccccgagacagatcagccaggcat

SEQ ID NO: 2118092 - DNA, 25 bp, Homo sapien
cattgggaccccttggagaagcagc

SEQ ID NO: 2118093 - DNA, 25 bp, Homo sapien
tactctggtcgcttttgtgggcagc

SEQ ID NO: 2118094 - DNA, 25 bp, Homo sapien
atacgcataagggaagccactggcc

SEQ ID NO: 2118095 - DNA, 25 bp, Homo sapien
tttgagatacgcataagggaagcca

SEQ ID NO: 2118096 - DNA, 25 bp, Homo sapien
gccgtttactctggtcgcttttgtg

SEQ ID NO: 2118097 - DNA, 25 bp, Homo sapien
tttgtgggcagctccgcgatgccct

SEQ ID NO: 2118098 - DNA, 25 bp, Homo sapien
cattgggaccccttggagaagcagc

SEQ ID NO: 2118099 - DNA, 25 bp, Homo sapien
ccgaagaccagtcagcccacagggt

SEQ ID NO: 2118100 - DNA, 25 bp, Homo sapien
gccccgagacagatcagccaggcat

SEQ ID NO: 2118101 - DNA, 25 bp, Homo sapien
gccaggcatcccgaagaccagtcag

SEQ ID NO: 2118102 - DNA, 25 bp, Homo sapien
gaaaagacgtgaccgccattggcgg

SEQ ID NO: 2118103 - DNA, 25 bp, Homo sapien
tgggtgctccttggccggtatcttt

SEQ ID NO: 2118104 - DNA, 25 bp, Homo sapien
gaaggtgattctggacatgacaaca

SEQ ID NO: 2118105 - DNA, 25 bp, Homo sapien
catgacaacaggctgcagggacagg

SEQ ID NO: 2118106 - DNA, 25 bp, Homo sapien
tggcctacacatccaggaagatttg

SEQ ID NO: 2118107 - DNA, 25 bp, Homo sapien
gatttgtaacaagccaagacagaaa

SEQ ID NO: 2118108 - DNA, 25 bp, Homo sapien
acagaaaacatttgcaatattcggg

SEQ ID NO: 2118109 - DNA, 25 bp, Homo sapien
cagcgtgggaatcatcacccgtggg

SEQ ID NO: 2118110 - DNA, 25 bp, Homo sapien
catggcaatatggagacacggcaga

SEQ ID NO: 2118111 - DNA, 25 bp, Homo sapien
gaaaagaggtaatcagccacccatg

SEQ ID NO: 2118112 - DNA, 25 bp, Homo sapien
tcctcgcagggttcagctggagtcc

SEQ ID NO: 2118113 - DNA, 25 bp, Homo sapien
aaccatgtccccgtgcataactgac

SEQ ID NO: 2118114 - DNA, 25 bp, Homo sapien
ctagtgcatccacgaacagaacagg

SEQ ID NO: 2118115 - DNA, 25 bp, Homo sapien
cagaacaggaaataacagcaagcca

SEQ ID NO: 2118116 - DNA, 25 bp, Homo sapien
caggaaataacagcaagccatgagg

SEQ ID NO: 2118117 - DNA, 25 bp, Homo sapien
gtgcatccacgaacagaacaggaaa

SEQ ID NO: 2118118 - DNA, 25 bp, Homo sapien
tcatgcccggcagtttctggagact

SEQ ID NO: 2118119 - DNA, 25 bp, Homo sapien
gaaacaaaggagcttcggcgtgttg

SEQ ID NO: 2118120 - DNA, 25 bp, Homo sapien
cgactgccctttcttacatacagct

SEQ ID NO: 2118121 - DNA, 25 bp, Homo sapien
atacagctgtggagacaggccgcca

SEQ ID NO: 2118122 - DNA, 25 bp, Homo sapien
ttttgagatacgcataagggaagcc

SEQ ID NO: 2118123 - DNA, 25 bp, Homo sapien
atacgcataagggaagccactggcc

SEQ ID NO: 2118124 - DNA, 25 bp, Homo sapien
gaggccccgagacagatcagccagg

SEQ ID NO: 2118125 - DNA, 25 bp, Homo sapien
agccattttgagatacgcataaggg

SEQ ID NO: 2118126 - DNA, 25 bp, Homo sapien
tttctttgtttcttcgctttgtgtg

SEQ ID NO: 2118127 - DNA, 25 bp, Homo sapien
ttctttgtttcttcgctttgtgtgt

SEQ ID NO: 2118128 - DNA, 25 bp, Homo sapien
ggataggctcctctggttcactggg

SEQ ID NO: 2118129 - DNA, 25 bp, Homo sapien
tgccacagccataagggtgggatgt

SEQ ID NO: 2118130 - DNA, 25 bp, Homo sapien
tgggatgtattgaggataggctcct

SEQ ID NO: 2118131 - DNA, 25 bp, Homo sapien
cagccataagggtgggatgtattga

SEQ ID NO: 2118132 - DNA, 25 bp, Homo sapien
tgatggcccgcgtcaggatttctta

SEQ ID NO: 2118133 - DNA, 25 bp, Homo sapien
caagaagcgggctgtatgatggccc

SEQ ID NO: 2118134 - DNA, 25 bp, Homo sapien
gatttcttacgtctgcctggaaacc

SEQ ID NO: 2118135 - DNA, 25 bp, Homo sapien
tagagcaacgcggtcatggcttcgc

SEQ ID NO: 2118136 - DNA, 25 bp, Homo sapien
cgttgggaccccttggagaagcagc

SEQ ID NO: 2118137 - DNA, 25 bp, Homo sapien
ctgccgttgggaccccttggagaag

SEQ ID NO: 2118138 - DNA, 25 bp, Homo sapien
agcctgcagaccagtcaacccacag

SEQ ID NO: 2118139 - DNA, 25 bp, Homo sapien
cagagacagagcagccatgcagcct

SEQ ID NO: 2118140 - DNA, 25 bp, Homo sapien
catacacaacgagtggcagggagcc

SEQ ID NO: 2118141 - DNA, 25 bp, Homo sapien
ccaccggtcatgtcccacttaaagg

SEQ ID NO: 2118142 - DNA, 25 bp, Homo sapien
tgtcaatgagatctttcctgagtgg

SEQ ID NO: 2118143 - DNA, 25 bp, Homo sapien
cacttaaaggacacacaaccgagaa

SEQ ID NO: 2118144 - DNA, 25 bp, Homo sapien
ggaatactgtttaggcagccagtct

SEQ ID NO: 2118145 - DNA, 25 bp, Homo sapien
tggagaccctgcaggaatactgttt

SEQ ID NO: 2118146 - DNA, 25 bp, Homo sapien
gaccaaggaccagtaggctggagac

SEQ ID NO: 2118147 - DNA, 25 bp, Homo sapien
ccaaggaccagtaggctggagaccc

SEQ ID NO: 2118148 - DNA, 25 bp, Homo sapien
tgacaacagactacaaggacacttg

SEQ ID NO: 2118149 - DNA, 25 bp, Homo sapien
gatatcagcgaggatgtgccaggct

SEQ ID NO: 2118150 - DNA, 25 bp, Homo sapien
tcagagcccttaaggaagtgtacct

SEQ ID NO: 2118151 - DNA, 25 bp, Homo sapien
ttgtggagtcacagtgccatccggc

SEQ ID NO: 2118152 - DNA, 25 bp, Homo sapien
gatgtggggatctgagtgtgagcac

SEQ ID NO: 2118153 - DNA, 25 bp, Homo sapien
ctgggcagacaccttttagtgagta

SEQ ID NO: 2118154 - DNA, 25 bp, Homo sapien
ggcagacaccttttagtgagtattg

SEQ ID NO: 2118155 - DNA, 25 bp, Homo sapien
acaccttttagtgagtattggtggg

SEQ ID NO: 2118156 - DNA, 25 bp, Homo sapien
tcttttccgagtggtatcaagggct

SEQ ID NO: 2118157 - DNA, 25 bp, Homo sapien
gagaaacctgtgatgtcccggtgaa

SEQ ID NO: 2118158 - DNA, 25 bp, Homo sapien
ggtggcatacacaacaagaggcaaa

SEQ ID NO: 2118159 - DNA, 25 bp, Homo sapien
gctttgatctacaagtaggcctaga

SEQ ID NO: 2118160 - DNA, 25 bp, Homo sapien
ctataccccaagaacagacaaacac

SEQ ID NO: 2118161 - DNA, 25 bp, Homo sapien
taaggataactacaaactactgctc

SEQ ID NO: 2118162 - DNA, 25 bp, Homo sapien
ctttaaggataactacaaactactg

SEQ ID NO: 2118163 - DNA, 25 bp, Homo sapien
attcctataccccaagaacagacaa

SEQ ID NO: 2118164 - DNA, 25 bp, Homo sapien
gcaggtgtctctctgggacaaaggt

SEQ ID NO: 2118165 - DNA, 25 bp, Homo sapien
caaaggttccagaggaaagaacagg

SEQ ID NO: 2118166 - DNA, 25 bp, Homo sapien
gtgtctctctgggacaaaggttcca

SEQ ID NO: 2118167 - DNA, 25 bp, Homo sapien
gtctctctgggacaaaggttccaga

SEQ ID NO: 2118168 - DNA, 25 bp, Homo sapien
gaaattccattatcatacaggtcag

SEQ ID NO: 2118169 - DNA, 25 bp, Homo sapien
tattatcttaggcatatttctcccc

SEQ ID NO: 2118170 - DNA, 25 bp, Homo sapien
taatttatctgttaggtggaccaga

SEQ ID NO: 2118171 - DNA, 25 bp, Homo sapien
aaaaagtacagggatgtctaccgct

SEQ ID NO: 2118172 - DNA, 25 bp, Homo sapien
gtttgctttggtaagttcaccatga

SEQ ID NO: 2118173 - DNA, 25 bp, Homo sapien
gtcttacaacccgatcttgcccatg

SEQ ID NO: 2118174 - DNA, 25 bp, Homo sapien
gaaattcaggaagtgaaatcgcgct

SEQ ID NO: 2118175 - DNA, 25 bp, Homo sapien
cagggcatggccttaaatctcagag

SEQ ID NO: 2118176 - DNA, 25 bp, Homo sapien
gatgctagggactaatttcagagga

SEQ ID NO: 2118177 - DNA, 25 bp, Homo sapien
tagattccatgcaaaaactgacagc

SEQ ID NO: 2118178 - DNA, 25 bp, Homo sapien
ggaagaaggtcatatttcaacacta

SEQ ID NO: 2118179 - DNA, 25 bp, Homo sapien
gattgggtaaaatactcaggtttca

SEQ ID NO: 2118180 - DNA, 25 bp, Homo sapien
gcatgtagataccaagttgtcccag

SEQ ID NO: 2118181 - DNA, 25 bp, Homo sapien
tttgtgatgttcagcctggctcaga

SEQ ID NO: 2118182 - DNA, 25 bp, Homo sapien
cttttgtgagggcttatgtctggac

SEQ ID NO: 2118183 - DNA, 25 bp, Homo sapien
taaaatgcctttcaccagatgtcct

SEQ ID NO: 2118184 - DNA, 25 bp, Homo sapien
ctcttctttccataatggtaatttc

SEQ ID NO: 2118185 - DNA, 25 bp, Homo sapien
caatgacttggtgaagtcgtcaatc

SEQ ID NO: 2118186 - DNA, 25 bp, Homo sapien
gacttggtgaagtcgtcaatcaaga

SEQ ID NO: 2118187 - DNA, 25 bp, Homo sapien
tgaagtcgtcaatcaagatactgaa

SEQ ID NO: 2118188 - DNA, 25 bp, Homo sapien
gaagaaattgttatggattcatcag

SEQ ID NO: 2118189 - DNA, 25 bp, Homo sapien
caccttcaccagtgcggaagaaatt

SEQ ID NO: 2118190 - DNA, 25 bp, Homo sapien
gaagacaactgcttgcacattaaac

SEQ ID NO: 2118191 - DNA, 25 bp, Homo sapien
ttcatcagatttgaagacaactgct

SEQ ID NO: 2118192 - DNA, 25 bp, Homo sapien
catttcggcaagtctggtctcgagc

SEQ ID NO: 2118193 - DNA, 25 bp, Homo sapien
taccatttcggcaagtctggtctcg

SEQ ID NO: 2118194 - DNA, 25 bp, Homo sapien
aactgtgccttagtgcacgccacca

SEQ ID NO: 2118195 - DNA, 25 bp, Homo sapien
gagtagctagaactgtgccttagtg

SEQ ID NO: 2118196 - DNA, 25 bp, Homo sapien
tagggccaaaatgtgataatgtaca

SEQ ID NO: 2118197 - DNA, 25 bp, Homo sapien
gtgcatctgaaaaatccacccgtag

SEQ ID NO: 2118198 - DNA, 25 bp, Homo sapien
gaagtagttagaagcattccctcac

SEQ ID NO: 2118199 - DNA, 25 bp, Homo sapien
catttttaaactgacgtgggcctgc

SEQ ID NO: 2118200 - DNA, 25 bp, Homo sapien
gagccagattaccagacctggagtg

SEQ ID NO: 2118201 - DNA, 25 bp, Homo sapien
tcttgggtgaaatcgcagaactggt

SEQ ID NO: 2118202 - DNA, 25 bp, Homo sapien
gagccaggttaccagcctcaatctg

SEQ ID NO: 2118203 - DNA, 25 bp, Homo sapien
ggttgagccaggttaccagcctcaa

SEQ ID NO: 2118204 - DNA, 25 bp, Homo sapien
tctacctataaattgaaagcacccc

SEQ ID NO: 2118205 - DNA, 25 bp, Homo sapien
atcaggatgatgaaactttggtgtc

SEQ ID NO: 2118206 - DNA, 25 bp, Homo sapien
gggatcggacctacctcattatacc

SEQ ID NO: 2118207 - DNA, 25 bp, Homo sapien
gaagccatctacctggaggcaccat

SEQ ID NO: 2118208 - DNA, 25 bp, Homo sapien
tcaacagtctgatcaaggtttggct

SEQ ID NO: 2118209 - DNA, 25 bp, Homo sapien
tacatcacatgtaggccatcaacag

SEQ ID NO: 2118210 - DNA, 25 bp, Homo sapien
ggaggttcactctcactcatggcac

SEQ ID NO: 2118211 - DNA, 25 bp, Homo sapien
tgtctaggcctaaagcagtgtggtc

SEQ ID NO: 2118212 - DNA, 25 bp, Homo sapien
agacgcatcccagagtctcctacca

SEQ ID NO: 2118213 - DNA, 25 bp, Homo sapien
tcccagagtctcctaccaagttgac

SEQ ID NO: 2118214 - DNA, 25 bp, Homo sapien
cctaccaagttgactctcctgtctg

SEQ ID NO: 2118215 - DNA, 25 bp, Homo sapien
gagtctcctaccaagttgactctcc

SEQ ID NO: 2118216 - DNA, 25 bp, Homo sapien
ttctggtggtgctaaaccctgggca

SEQ ID NO: 2118217 - DNA, 25 bp, Homo sapien
gggcaatcatctctcctaggaacag

SEQ ID NO: 2118218 - DNA, 25 bp, Homo sapien
tcttgtgacggtagcatgttcctgc

SEQ ID NO: 2118219 - DNA, 25 bp, Homo sapien
gatcttctgctccagtcttgtgacg

SEQ ID NO: 2118220 - DNA, 25 bp, Homo sapien
tgtagagaccattgatgctagtaag

SEQ ID NO: 2118221 - DNA, 25 bp, Homo sapien
aattgtagagaccattgatgctagt

SEQ ID NO: 2118222 - DNA, 25 bp, Homo sapien
attgtagagaccattgatgctagta

SEQ ID NO: 2118223 - DNA, 25 bp, Homo sapien
tagagaccattgatgctagtaagaa

SEQ ID NO: 2118224 - DNA, 25 bp, Homo sapien
tggttagaccttccccacaaagctg

SEQ ID NO: 2118225 - DNA, 25 bp, Homo sapien
caaaaagtccctcagaactatggtg

SEQ ID NO: 2118226 - DNA, 25 bp, Homo sapien
acaggtggttccgacaaataatcca

SEQ ID NO: 2118227 - DNA, 25 bp, Homo sapien
taatccactaaaagaggcctgctgt

SEQ ID NO: 2118228 - DNA, 25 bp, Homo sapien
tgattataaggaaggtgacctccgc

SEQ ID NO: 2118229 - DNA, 25 bp, Homo sapien
tcatgccagaatccagtgagtctcc

SEQ ID NO: 2118230 - DNA, 25 bp, Homo sapien
caaaaggatcggcatggtcattcac

SEQ ID NO: 2118231 - DNA, 25 bp, Homo sapien
ccaggaggagttgtagatggcctaa

SEQ ID NO: 2118232 - DNA, 25 bp, Homo sapien
ggcaagaagcttgtttccacttcaa

SEQ ID NO: 2118233 - DNA, 25 bp, Homo sapien
gctctgcagtacttatcactatgtg

SEQ ID NO: 2118234 - DNA, 25 bp, Homo sapien
gaagcagtgctctatctgatctcac

SEQ ID NO: 2118235 - DNA, 25 bp, Homo sapien
tacttcatcctgcatacaggttgat

SEQ ID NO: 2118236 - DNA, 25 bp, Homo sapien
gaccagcactacaaaatcatagcaa

SEQ ID NO: 2118237 - DNA, 25 bp, Homo sapien
gagctcatggaagatacatgaaatg

SEQ ID NO: 2118238 - DNA, 25 bp, Homo sapien
tcttggatattacagaagcattgcc

SEQ ID NO: 2118239 - DNA, 25 bp, Homo sapien
catgaaatgtatgcaagaccagcac

SEQ ID NO: 2118240 - DNA, 25 bp, Homo sapien
gatggagaacttgctcacgcctcta

SEQ ID NO: 2118241 - DNA, 25 bp, Homo sapien
gataagctttatgggacctctgcca

SEQ ID NO: 2118242 - DNA, 25 bp, Homo sapien
agaaatagactacccaagtgagaag

SEQ ID NO: 2118243 - DNA, 25 bp, Homo sapien
taagtcactcaaggagacacaaagg

SEQ ID NO: 2118244 - DNA, 25 bp, Homo sapien
cctctgtcaaggatgggacttctca

SEQ ID NO: 2118245 - DNA, 25 bp, Homo sapien
cacaggaggagtgccttccaggttg

SEQ ID NO: 2118246 - DNA, 25 bp, Homo sapien
gaggcagattgctttcccattgacc

SEQ ID NO: 2118247 - DNA, 25 bp, Homo sapien
ttctgaaacactccagggtgactac

SEQ ID NO: 2118248 - DNA, 25 bp, Homo sapien
gtggatgggcatccaagattactga

SEQ ID NO: 2118249 - DNA, 25 bp, Homo sapien
cctggaagttgggactgtgaggaac

SEQ ID NO: 2118250 - DNA, 25 bp, Homo sapien
tttcccgtgacagcgctaaggaggc

SEQ ID NO: 2118251 - DNA, 25 bp, Homo sapien
gagacaaaactgtttgctgccctgg

SEQ ID NO: 2118252 - DNA, 25 bp, Homo sapien
gatggcagccattgttaagcctcca

SEQ ID NO: 2118253 - DNA, 25 bp, Homo sapien
caatttgccagacttatatagggca

SEQ ID NO: 2118254 - DNA, 25 bp, Homo sapien
tgccttctcctgctatgattccaag

SEQ ID NO: 2118255 - DNA, 25 bp, Homo sapien
tttgcatagaatgatggccactgag

SEQ ID NO: 2118256 - DNA, 25 bp, Homo sapien
acacatacgcgtacacacttctccc

SEQ ID NO: 2118257 - DNA, 25 bp, Homo sapien
tacgcgtacacacttctcccctaca

SEQ ID NO: 2118258 - DNA, 25 bp, Homo sapien
gcgtacacacttctcccctacataa

SEQ ID NO: 2118259 - DNA, 25 bp, Homo sapien
gtacacacttctcccctacataaag

SEQ ID NO: 2118260 - DNA, 25 bp, Homo sapien
catgccatgctcataaatgggtaga

SEQ ID NO: 2118261 - DNA, 25 bp, Homo sapien
cgttagcaccaagtgaggatgggac

SEQ ID NO: 2118262 - DNA, 25 bp, Homo sapien
tgtaacagtttgaaccccgagagtg

SEQ ID NO: 2118263 - DNA, 25 bp, Homo sapien
taatcagcaagaagtagataccctg

SEQ ID NO: 2118264 - DNA, 25 bp, Homo sapien
ttttctctgttaactgggcttctgg

SEQ ID NO: 2118265 - DNA, 25 bp, Homo sapien
tggaacaggattaaatggcttagag

SEQ ID NO: 2118266 - DNA, 25 bp, Homo sapien
tagataattatcgggtgcctggcac

SEQ ID NO: 2118267 - DNA, 25 bp, Homo sapien
gaggcgtccccttaagactagataa

SEQ ID NO: 2118268 - DNA, 25 bp, Homo sapien
tctggagcttgagccaaacattggg

SEQ ID NO: 2118269 - DNA, 25 bp, Homo sapien
caggataggtttacaagcctcagga

SEQ ID NO: 2118270 - DNA, 25 bp, Homo sapien
gtagaaaaataagtggatacagctg

SEQ ID NO: 2118271 - DNA, 25 bp, Homo sapien
gaaagcgcggttgagttaataggca

SEQ ID NO: 2118272 - DNA, 25 bp, Homo sapien
gaagcctcgttttttccagatggac

SEQ ID NO: 2118273 - DNA, 25 bp, Homo sapien
gagccgtttattggccagcatgtga

SEQ ID NO: 2118274 - DNA, 25 bp, Homo sapien
agcttgaggaagagcgacgagttca

SEQ ID NO: 2118275 - DNA, 25 bp, Homo sapien
taagacagttacgttcagaggacaa

SEQ ID NO: 2118276 - DNA, 25 bp, Homo sapien
atgtcgctgtagcagaagcatcatc

SEQ ID NO: 2118277 - DNA, 25 bp, Homo sapien
catgtcgctgtagcagaagcatcat

SEQ ID NO: 2118278 - DNA, 25 bp, Homo sapien
ccccgggagaatcttacattcctgt

SEQ ID NO: 2118279 - DNA, 25 bp, Homo sapien
caagtgatgataggacaaaggtttt

SEQ ID NO: 2118280 - DNA, 25 bp, Homo sapien
tgctgacacaagtggcccttgcgcc

SEQ ID NO: 2118281 - DNA, 25 bp, Homo sapien
tggccggcccttttcatgcttctgc

SEQ ID NO: 2118282 - DNA, 25 bp, Homo sapien
aaatggcgtccacatcaagtgatga

SEQ ID NO: 2118283 - DNA, 25 bp, Homo sapien
ccgtcatcttagatgttgcttcttc

SEQ ID NO: 2118284 - DNA, 25 bp, Homo sapien
taatttccgtcatcttagatgttgc

SEQ ID NO: 2118285 - DNA, 25 bp, Homo sapien
tctgaaataatttccgtcatcttag

SEQ ID NO: 2118286 - DNA, 25 bp, Homo sapien
gaaataatttccgtcatcttagatg

SEQ ID NO: 2118287 - DNA, 25 bp, Homo sapien
taaagtactagaagccctattggga

SEQ ID NO: 2118288 - DNA, 25 bp, Homo sapien
gaatgatgccgtccattgtgatgac

SEQ ID NO: 2118289 - DNA, 25 bp, Homo sapien
tttagatgagcgatagtccaagtgc

SEQ ID NO: 2118290 - DNA, 25 bp, Homo sapien
gaggagctttcaccaaaggcatgag

SEQ ID NO: 2118291 - DNA, 25 bp, Homo sapien
acccgccttgccctaacaaagagct

SEQ ID NO: 2118292 - DNA, 25 bp, Homo sapien
cacccgccttgccctaacaaagagc

SEQ ID NO: 2118293 - DNA, 25 bp, Homo sapien
cagatctggccaaatatagattttt

SEQ ID NO: 2118294 - DNA, 25 bp, Homo sapien
acagatctggccaaatatagatttt

SEQ ID NO: 2118295 - DNA, 25 bp, Homo sapien
cttccagcattgtaattaagagtgg

SEQ ID NO: 2118296 - DNA, 25 bp, Homo sapien
ttttgagtaatgaaccagccttgta

SEQ ID NO: 2118297 - DNA, 25 bp, Homo sapien
ataaagaaagctcccctatattctg

SEQ ID NO: 2118298 - DNA, 25 bp, Homo sapien
taactgcattgtctggaacttccag

SEQ ID NO: 2118299 - DNA, 25 bp, Homo sapien
tgtccacatgttcattcctagcata

SEQ ID NO: 2118300 - DNA, 25 bp, Homo sapien
tactatgttcaatcttccaatcgtg

SEQ ID NO: 2118301 - DNA, 25 bp, Homo sapien
tccaatcgtgaatgtggcatatctc

SEQ ID NO: 2118302 - DNA, 25 bp, Homo sapien
taatctgatcttctatcttgcaaac

SEQ ID NO: 2118303 - DNA, 25 bp, Homo sapien
aaactctcatcccagcattaaagcc

SEQ ID NO: 2118304 - DNA, 25 bp, Homo sapien
ggaatgtttaattgtactgaaagcc

SEQ ID NO: 2118305 - DNA, 25 bp, Homo sapien
tgtactgaaagcctgttctccatct

SEQ ID NO: 2118306 - DNA, 25 bp, Homo sapien
gttgagaacttttaacatgaaggaa

SEQ ID NO: 2118307 - DNA, 25 bp, Homo sapien
taagcaaagagggacttatgaagct

SEQ ID NO: 2118308 - DNA, 25 bp, Homo sapien
gaaaggacgagaaaagtactaagca

SEQ ID NO: 2118309 - DNA, 25 bp, Homo sapien
gcttttcgtttacaagtccagtgtc

SEQ ID NO: 2118310 - DNA, 25 bp, Homo sapien
ttatgaagcttttcgtttacaagtc

SEQ ID NO: 2118311 - DNA, 25 bp, Homo sapien
tccgcacggtcctagtgcttgaggg

SEQ ID NO: 2118312 - DNA, 25 bp, Homo sapien
gcacggtcctagtgcttgagggtta

SEQ ID NO: 2118313 - DNA, 25 bp, Homo sapien
ggattccgcacggtcctagtgcttg

SEQ ID NO: 2118314 - DNA, 25 bp, Homo sapien
gcagcctggattccgcacggtccta

SEQ ID NO: 2118315 - DNA, 25 bp, Homo sapien
gcatccccgaaagcagaagcaatgg

SEQ ID NO: 2118316 - DNA, 25 bp, Homo sapien
gcgcccgcaagaggaacaactgaat

SEQ ID NO: 2118317 - DNA, 25 bp, Homo sapien
cctaagactaaagctgctcggccta

SEQ ID NO: 2118318 - DNA, 25 bp, Homo sapien
taagcctatgagaaagcctagcgcc

SEQ ID NO: 2118319 - DNA, 25 bp, Homo sapien
tgggttcacgtccttgattctgttg

SEQ ID NO: 2118320 - DNA, 25 bp, Homo sapien
aattccattgatcattgggttcacg

SEQ ID NO: 2118321 - DNA, 25 bp, Homo sapien
ttgatcattgggttcacgtccttga

SEQ ID NO: 2118322 - DNA, 25 bp, Homo sapien
cattgggttcacgtccttgattctg

SEQ ID NO: 2118323 - DNA, 25 bp, Homo sapien
tgactgtcaaaggaaccccaaggaa

SEQ ID NO: 2118324 - DNA, 25 bp, Homo sapien
agcttccttgactgtcaaaggaacc

SEQ ID NO: 2118325 - DNA, 25 bp, Homo sapien
tctctgcaagcttttgatctacagc

SEQ ID NO: 2118326 - DNA, 25 bp, Homo sapien
tacagcatgagcctccttcatcgct

SEQ ID NO: 2118327 - DNA, 25 bp, Homo sapien
tcaatacactgaggttgggctgcag

SEQ ID NO: 2118328 - DNA, 25 bp, Homo sapien
gtgcatcaatacactgaggttgggc

SEQ ID NO: 2118329 - DNA, 25 bp, Homo sapien
catcaatacactgaggttgggctgc

SEQ ID NO: 2118330 - DNA, 25 bp, Homo sapien
gcaggggctgttatgtgcacctgct

SEQ ID NO: 2118331 - DNA, 25 bp, Homo sapien
tgtgtctcagagatcccagtacatt

SEQ ID NO: 2118332 - DNA, 25 bp, Homo sapien
tctcagagatcccagtacattgtgt

SEQ ID NO: 2118333 - DNA, 25 bp, Homo sapien
tagctgtgtctcagagatcccagta

SEQ ID NO: 2118334 - DNA, 25 bp, Homo sapien
tttagctgtgtctcagagatcccag

SEQ ID NO: 2118335 - DNA, 25 bp, Homo sapien
gccaccagtgtaaatgtatgcacag

SEQ ID NO: 2118336 - DNA, 25 bp, Homo sapien
tacaggaacatgcatagagggccca

SEQ ID NO: 2118337 - DNA, 25 bp, Homo sapien
tatgcacagttgctgctagaaagcc

SEQ ID NO: 2118338 - DNA, 25 bp, Homo sapien
tttcagtgctgaaacagctgccggc

SEQ ID NO: 2118339 - DNA, 25 bp, Homo sapien
caatggcatcacgacggttcatgag

SEQ ID NO: 2118340 - DNA, 25 bp, Homo sapien
gttcatgagtccagaagaattgggc

SEQ ID NO: 2118341 - DNA, 25 bp, Homo sapien
ttatgccaagaggaatggcaccagc

SEQ ID NO: 2118342 - DNA, 25 bp, Homo sapien
aatcatatgggttgtttgatcggcc

SEQ ID NO: 2118343 - DNA, 25 bp, Homo sapien
tcatatggccatcttacaagcaaag

SEQ ID NO: 2118344 - DNA, 25 bp, Homo sapien
catatatgctagaccagaaacctga

SEQ ID NO: 2118345 - DNA, 25 bp, Homo sapien
gaccaaggctgttacatgactccca

SEQ ID NO: 2118346 - DNA, 25 bp, Homo sapien
tgagcacctacttcatgtgaccaag

SEQ ID NO: 2118347 - DNA, 25 bp, Homo sapien
gaaagccaaacatgatgtactgaga

SEQ ID NO: 2118348 - DNA, 25 bp, Homo sapien
gagtcaaatcttgatggttgctttc

SEQ ID NO: 2118349 - DNA, 25 bp, Homo sapien
tacttgcatgttgaccagtttttcc

SEQ ID NO: 2118350 - DNA, 25 bp, Homo sapien
gtgtttactgtctgctgtagccata

SEQ ID NO: 2118351 - DNA, 25 bp, Homo sapien
tttttgtgtctttagatccaaagtg

SEQ ID NO: 2118352 - DNA, 25 bp, Homo sapien
tgttcacagcatatatttagatcat

SEQ ID NO: 2118353 - DNA, 25 bp, Homo sapien
ttttgttcacagcatatatttagat

SEQ ID NO: 2118354 - DNA, 25 bp, Homo sapien
ctttagatccaaagtgagtcttttg

SEQ ID NO: 2118355 - DNA, 25 bp, Homo sapien
ggcattcgaatgctaccaccaatat

SEQ ID NO: 2118356 - DNA, 25 bp, Homo sapien
cacaccaataactgagcaggcagct

SEQ ID NO: 2118357 - DNA, 25 bp, Homo sapien
accaatatcagagcccacaccaata

SEQ ID NO: 2118358 - DNA, 25 bp, Homo sapien
gcttgtgtccaaatataccattgaa

SEQ ID NO: 2118359 - DNA, 25 bp, Homo sapien
tctgtaccattgacctatgcatctg

SEQ ID NO: 2118360 - DNA, 25 bp, Homo sapien
gatcacttggctgtatttatgtggc

SEQ ID NO: 2118361 - DNA, 25 bp, Homo sapien
ttactgtcgcctcataatattaccg

SEQ ID NO: 2118362 - DNA, 25 bp, Homo sapien
taccgaagtgaggtaatgcactatt

SEQ ID NO: 2118363 - DNA, 25 bp, Homo sapien
cggcacataggaccagtgcacagaa

SEQ ID NO: 2118364 - DNA, 25 bp, Homo sapien
tcagcataacggcacataggaccag

SEQ ID NO: 2118365 - DNA, 25 bp, Homo sapien
gtcttcagcataacggcacatagga

SEQ ID NO: 2118366 - DNA, 25 bp, Homo sapien
cataacggcacataggaccagtgca

SEQ ID NO: 2118367 - DNA, 25 bp, Homo sapien
catcatgttccatccagtaaaattt

SEQ ID NO: 2118368 - DNA, 25 bp, Homo sapien
taaaaatgagcctccatcatgttcc

SEQ ID NO: 2118369 - DNA, 25 bp, Homo sapien
ttctgagtcataatgagatcttggt

SEQ ID NO: 2118370 - DNA, 25 bp, Homo sapien
gcctccatcatgttccatccagtaa

SEQ ID NO: 2118371 - DNA, 25 bp, Homo sapien
gatgtgttgcttgattcggtttggc

SEQ ID NO: 2118372 - DNA, 25 bp, Homo sapien
tgttgcttgattcggtttggcagta

SEQ ID NO: 2118373 - DNA, 25 bp, Homo sapien
ttgcttgattcggtttggcagtatt

SEQ ID NO: 2118374 - DNA, 25 bp, Homo sapien
tgtgttgcttgattcggtttggcag

SEQ ID NO: 2118375 - DNA, 25 bp, Homo sapien
tcctgacctatggtttgaatagatc

SEQ ID NO: 2118376 - DNA, 25 bp, Homo sapien
aaattcaggtgttgctaatgcatta

SEQ ID NO: 2118377 - DNA, 25 bp, Homo sapien
gaatagatcgcctccaaaattcagg

SEQ ID NO: 2118378 - DNA, 25 bp, Homo sapien
atggcctggatgtcctgacctatgg

SEQ ID NO: 2118379 - DNA, 25 bp, Homo sapien
catttatcctccagctcgccaggaa

SEQ ID NO: 2118380 - DNA, 25 bp, Homo sapien
caggaaagtaccaatttgctttgcc

SEQ ID NO: 2118381 - DNA, 25 bp, Homo sapien
tgcatttatcctccagctcgccagg

SEQ ID NO: 2118382 - DNA, 25 bp, Homo sapien
gtaccaatttgctttgccactagca

SEQ ID NO: 2118383 - DNA, 25 bp, Homo sapien
gatagctctccctgctacctgatgc

SEQ ID NO: 2118384 - DNA, 25 bp, Homo sapien
tgtgatagctctccctgctacctga

SEQ ID NO: 2118385 - DNA, 25 bp, Homo sapien
ctattctgtgatagctctccctgct

SEQ ID NO: 2118386 - DNA, 25 bp, Homo sapien
tctgtgatagctctccctgctacct

SEQ ID NO: 2118387 - DNA, 25 bp, Homo sapien
gcttctctggagtaccataacaaac

SEQ ID NO: 2118388 - DNA, 25 bp, Homo sapien
agtagagagtagaatcgtagttgcc

SEQ ID NO: 2118389 - DNA, 25 bp, Homo sapien
aacatgtctatggaaaaggtgcaca

SEQ ID NO: 2118390 - DNA, 25 bp, Homo sapien
cataacaaacccactttggaagaca

SEQ ID NO: 2118391 - DNA, 25 bp, Homo sapien
taagcactctataagaattccttgg

SEQ ID NO: 2118392 - DNA, 25 bp, Homo sapien
taggatccattgctaccaagttggt

SEQ ID NO: 2118393 - DNA, 25 bp, Homo sapien
gggaatgtcataacacccacatttt

SEQ ID NO: 2118394 - DNA, 25 bp, Homo sapien
ttccctttggagatatgactataat

SEQ ID NO: 2118395 - DNA, 25 bp, Homo sapien
ttaacatgttgaactgaggctccta

SEQ ID NO: 2118396 - DNA, 25 bp, Homo sapien
gttgaactgaggctcctagaatagt

SEQ ID NO: 2118397 - DNA, 25 bp, Homo sapien
tgaggctcctagaatagtttcaagg

SEQ ID NO: 2118398 - DNA, 25 bp, Homo sapien
ggctcctagaatagtttcaaggtga

SEQ ID NO: 2118399 - DNA, 25 bp, Homo sapien
atccacaactgaaaagagtacttca

SEQ ID NO: 2118400 - DNA, 25 bp, Homo sapien
tccacaactgaaaagagtacttcat

SEQ ID NO: 2118401 - DNA, 25 bp, Homo sapien
cttcccatcatgtccctttgctgac

SEQ ID NO: 2118402 - DNA, 25 bp, Homo sapien
aagtatgggttagaaaatggccaca

SEQ ID NO: 2118403 - DNA, 25 bp, Homo sapien
gaattggaaagttacaccacaaaga

SEQ ID NO: 2118404 - DNA, 25 bp, Homo sapien
aataaatgttatagtgcaaatgcac

SEQ ID NO: 2118405 - DNA, 25 bp, Homo sapien
tacgttgatttctgagcaaccaggg

SEQ ID NO: 2118406 - DNA, 25 bp, Homo sapien
ggtgtacactgacagacccaggcac

SEQ ID NO: 2118407 - DNA, 25 bp, Homo sapien
agaggactgacatgtttcccatggt

SEQ ID NO: 2118408 - DNA, 25 bp, Homo sapien
tacactgacagacccaggcaccatt

SEQ ID NO: 2118409 - DNA, 25 bp, Homo sapien
aggcaccatttgatcaactcccaca

SEQ ID NO: 2118410 - DNA, 25 bp, Homo sapien
catcatcacctagcatatccaccag

SEQ ID NO: 2118411 - DNA, 25 bp, Homo sapien
gctctttacgcaggctttcttccac

SEQ ID NO: 2118412 - DNA, 25 bp, Homo sapien
tctcattgctatatctgagcttttc

SEQ ID NO: 2118413 - DNA, 25 bp, Homo sapien
agcatatccaccagctctttacgca

SEQ ID NO: 2118414 - DNA, 25 bp, Homo sapien
ctgtgggatgtgagggatataagaa

SEQ ID NO: 2118415 - DNA, 25 bp, Homo sapien
gccactgtgggatgtgagggatata

SEQ ID NO: 2118416 - DNA, 25 bp, Homo sapien
cactgtgggatgtgagggatataag

SEQ ID NO: 2118417 - DNA, 25 bp, Homo sapien
ccactgtgggatgtgagggatataa

SEQ ID NO: 2118418 - DNA, 25 bp, Homo sapien
gcaaagttgaaaggccgtgttagag

SEQ ID NO: 2118419 - DNA, 25 bp, Homo sapien
agcaaagttgaaaggccgtgttaga

SEQ ID NO: 2118420 - DNA, 25 bp, Homo sapien
taggtgatagaaacttaaacgcagc

SEQ ID NO: 2118421 - DNA, 25 bp, Homo sapien
tcttcagaaactgagtaactaggtg

SEQ ID NO: 2118422 - DNA, 25 bp, Homo sapien
ttaaacgcagcaatttaggcagcat

SEQ ID NO: 2118423 - DNA, 25 bp, Homo sapien
cagaaactgagtaactaggtgatag

SEQ ID NO: 2118424 - DNA, 25 bp, Homo sapien
cagtttcctcaggttttacacaaag

SEQ ID NO: 2118425 - DNA, 25 bp, Homo sapien
aactgaatttcagtcctgaccctga

SEQ ID NO: 2118426 - DNA, 25 bp, Homo sapien
tctggcttctagtatctcgtatata

SEQ ID NO: 2118427 - DNA, 25 bp, Homo sapien
caggttttacacaaagataacttca

SEQ ID NO: 2118428 - DNA, 25 bp, Homo sapien
gattctattgtggagatctggaagt

SEQ ID NO: 2118429 - DNA, 25 bp, Homo sapien
gatctggaagtaaatttttcagttc

SEQ ID NO: 2118430 - DNA, 25 bp, Homo sapien
tgattgtataagctggtcttccagc

SEQ ID NO: 2118431 - DNA, 25 bp, Homo sapien
agttgattgtataagctggtcttcc

SEQ ID NO: 2118432 - DNA, 25 bp, Homo sapien
tacaaatttgtctcttaccactgct

SEQ ID NO: 2118433 - DNA, 25 bp, Homo sapien
caaagatttggtaagctgtgtctcc

SEQ ID NO: 2118434 - DNA, 25 bp, Homo sapien
ttgctttatgtccaaggatgtggtg

SEQ ID NO: 2118435 - DNA, 25 bp, Homo sapien
gatgaaggtgtttagcactacaaat

SEQ ID NO: 2118436 - DNA, 25 bp, Homo sapien
tcagttccaggagacttagcagagt

SEQ ID NO: 2118437 - DNA, 25 bp, Homo sapien
ctttaatgcttaatctgttgagggc

SEQ ID NO: 2118438 - DNA, 25 bp, Homo sapien
gattctcacctagaacaatattggt

SEQ ID NO: 2118439 - DNA, 25 bp, Homo sapien
cattgcgctggctagcacatccagt

SEQ ID NO: 2118440 - DNA, 25 bp, Homo sapien
gcacaagagggaatctcctgttctt

SEQ ID NO: 2118441 - DNA, 25 bp, Homo sapien
gccatgctgtgttgatttcccttca

SEQ ID NO: 2118442 - DNA, 25 bp, Homo sapien
cagtctggccatagctgcttttgcc

SEQ ID NO: 2118443 - DNA, 25 bp, Homo sapien
tgagaggtctatcccagtcacgagg

SEQ ID NO: 2118444 - DNA, 25 bp, Homo sapien
cacaaggtttagagacccacttgag

SEQ ID NO: 2118445 - DNA, 25 bp, Homo sapien
gagttttttatcacccacgttctga

SEQ ID NO: 2118446 - DNA, 25 bp, Homo sapien
tgctggagaggatttgtgatcactt

SEQ ID NO: 2118447 - DNA, 25 bp, Homo sapien
tgtcttcacgccttccttgcattgg

SEQ ID NO: 2118448 - DNA, 25 bp, Homo sapien
gaacacacttctttagcttagatga

SEQ ID NO: 2118449 - DNA, 25 bp, Homo sapien
ttggtcattgttggtttgcagtctg

SEQ ID NO: 2118450 - DNA, 25 bp, Homo sapien
gcgtctttgcacgtgaggtgggtcc

SEQ ID NO: 2118451 - DNA, 25 bp, Homo sapien
gagagtcactaataccttgatggga

SEQ ID NO: 2118452 - DNA, 25 bp, Homo sapien
ttggtgccaatactatggtgttttg

SEQ ID NO: 2118453 - DNA, 25 bp, Homo sapien
tccacatcctgaccagcaactgttg

SEQ ID NO: 2118454 - DNA, 25 bp, Homo sapien
gttatagaagtgtgttcttacttct

SEQ ID NO: 2118455 - DNA, 25 bp, Homo sapien
taataggccacggtatgtgatgttc

SEQ ID NO: 2118456 - DNA, 25 bp, Homo sapien
tttgccaaaacccatgtcaagaaaa

SEQ ID NO: 2118457 - DNA, 25 bp, Homo sapien
ttgccaaaacccatgtcaagaaaag

SEQ ID NO: 2118458 - DNA, 25 bp, Homo sapien
ccccaatgccataataggccacggt

SEQ ID NO: 2118459 - DNA, 25 bp, Homo sapien
gataaaagaatgattctattgcctg

SEQ ID NO: 2118460 - DNA, 25 bp, Homo sapien
tgagtaaattgtatgatgctgtggc

SEQ ID NO: 2118461 - DNA, 25 bp, Homo sapien
aggttctagtgatcctatcttccag

SEQ ID NO: 2118462 - DNA, 25 bp, Homo sapien
atagtacccaacatgtggttgttca

SEQ ID NO: 2118463 - DNA, 25 bp, Homo sapien
tgcgtgtgtatgaaagaagacaaga

SEQ ID NO: 2118464 - DNA, 25 bp, Homo sapien
ccaacaatacagtgctatagctttc

SEQ ID NO: 2118465 - DNA, 25 bp, Homo sapien
taacctgcttaccatttccagtagt

SEQ ID NO: 2118466 - DNA, 25 bp, Homo sapien
taaaacagccatcttaactcttcag

SEQ ID NO: 2118467 - DNA, 25 bp, Homo sapien
ttgtaggtcaggcctagtagtgata

SEQ ID NO: 2118468 - DNA, 25 bp, Homo sapien
tgtaggtcaggcctagtagtgataa

SEQ ID NO: 2118469 - DNA, 25 bp, Homo sapien
gtaggtcaggcctagtagtgataaa

SEQ ID NO: 2118470 - DNA, 25 bp, Homo sapien
cttgtaggtcaggcctagtagtgat

SEQ ID NO: 2118471 - DNA, 25 bp, Homo sapien
ttgtgcatccgactgggagagacct

SEQ ID NO: 2118472 - DNA, 25 bp, Homo sapien
ggtcgaaggacacttcatacaagac

SEQ ID NO: 2118473 - DNA, 25 bp, Homo sapien
cttgtgcatccgactgggagagacc

SEQ ID NO: 2118474 - DNA, 25 bp, Homo sapien
gccactaactttgcccctgacacct

SEQ ID NO: 2118475 - DNA, 25 bp, Homo sapien
aatcccacagattgctgccaaccat

SEQ ID NO: 2118476 - DNA, 25 bp, Homo sapien
cagattgctgccaaccattttgcag

SEQ ID NO: 2118477 - DNA, 25 bp, Homo sapien
ccacagattgctgccaaccattttg

SEQ ID NO: 2118478 - DNA, 25 bp, Homo sapien
ggggtttgcaggctccaggtcacca

SEQ ID NO: 2118479 - DNA, 25 bp, Homo sapien
aatggggtttgcaggctccaggtca

SEQ ID NO: 2118480 - DNA, 25 bp, Homo sapien
ggtttgcaggctccaggtcaccagt

SEQ ID NO: 2118481 - DNA, 25 bp, Homo sapien
caaatggggtttgcaggctccaggt

SEQ ID NO: 2118482 - DNA, 25 bp, Homo sapien
taaggcttcctcaggccagaaggca

SEQ ID NO: 2118483 - DNA, 25 bp, Homo sapien
tgaatttgggagatagcccctccag

SEQ ID NO: 2118484 - DNA, 25 bp, Homo sapien
gctgggaggcaactgtagagcatct

SEQ ID NO: 2118485 - DNA, 25 bp, Homo sapien
gtaccagcagagctagggcacctga

SEQ ID NO: 2118486 - DNA, 25 bp, Homo sapien
tagtgaatgtgcattgataactcct

SEQ ID NO: 2118487 - DNA, 25 bp, Homo sapien
tgaaatagttgagtcttatgacaaa

SEQ ID NO: 2118488 - DNA, 25 bp, Homo sapien
tttccaaagagtctgcaccaatgtg

SEQ ID NO: 2118489 - DNA, 25 bp, Homo sapien
ccaatgtgacaacagtcttaccaga

SEQ ID NO: 2118490 - DNA, 25 bp, Homo sapien
taagtgagaaatcaagacctgttcc

SEQ ID NO: 2118491 - DNA, 25 bp, Homo sapien
ccagtgggcattgggtcacaggcaa

SEQ ID NO: 2118492 - DNA, 25 bp, Homo sapien
cctggatgcctaaagggagtccttt

SEQ ID NO: 2118493 - DNA, 25 bp, Homo sapien
gttttctccaagtactgggccacag

SEQ ID NO: 2118494 - DNA, 25 bp, Homo sapien
gatcattaaagggtccagccacaac

SEQ ID NO: 2118495 - DNA, 25 bp, Homo sapien
tatccatttacatgtcctaattttc

SEQ ID NO: 2118496 - DNA, 25 bp, Homo sapien
agcatttaggaaactttattgcact

SEQ ID NO: 2118497 - DNA, 25 bp, Homo sapien
ggtgcttgatttcacccaattaata

SEQ ID NO: 2118498 - DNA, 25 bp, Homo sapien
tcacccaattaatagaaacaccacc

SEQ ID NO: 2118499 - DNA, 25 bp, Homo sapien
agacttatggaatcatttcatgttg

SEQ ID NO: 2118500 - DNA, 25 bp, Homo sapien
tgagacttatggaatcatttcatgt

SEQ ID NO: 2118501 - DNA, 25 bp, Homo sapien
tttcatgagacttatggaatcattt

SEQ ID NO: 2118502 - DNA, 25 bp, Homo sapien
tcatgagacttatggaatcatttca

SEQ ID NO: 2118503 - DNA, 25 bp, Homo sapien
ttaccagcctgcagctggccccaac

SEQ ID NO: 2118504 - DNA, 25 bp, Homo sapien
tattaccagcctgcagctggcccca

SEQ ID NO: 2118505 - DNA, 25 bp, Homo sapien
cagcctgcagctggccccaaccccc

SEQ ID NO: 2118506 - DNA, 25 bp, Homo sapien
gcctgcagctggccccaacccccat

SEQ ID NO: 2118507 - DNA, 25 bp, Homo sapien
agacacatgcaaccagcaggaacat

SEQ ID NO: 2118508 - DNA, 25 bp, Homo sapien
tttttccacagttgcatagacacat

SEQ ID NO: 2118509 - DNA, 25 bp, Homo sapien
ttccacagttgcatagacacatgca

SEQ ID NO: 2118510 - DNA, 25 bp, Homo sapien
ttttccacagttgcatagacacatg

SEQ ID NO: 2118511 - DNA, 25 bp, Homo sapien
gtcactacacctgctataactgcag

SEQ ID NO: 2118512 - DNA, 25 bp, Homo sapien
agtcactacacctgctataactgca

SEQ ID NO: 2118513 - DNA, 25 bp, Homo sapien
tgggattggtgcaaaattccagtag

SEQ ID NO: 2118514 - DNA, 25 bp, Homo sapien
agtacttgccgccaccaaaccacat

SEQ ID NO: 2118515 - DNA, 25 bp, Homo sapien
gattggtgcaaaattccagtagaat

SEQ ID NO: 2118516 - DNA, 25 bp, Homo sapien
tccgccaagtacttgccgccaccaa

SEQ ID NO: 2118517 - DNA, 25 bp, Homo sapien
tctgctcctattaacacaacctgga

SEQ ID NO: 2118518 - DNA, 25 bp, Homo sapien
gccatgtgaacttcccttcagtgga

SEQ ID NO: 2118519 - DNA, 25 bp, Homo sapien
tgtaaaggaatcagatggcttccct

SEQ ID NO: 2118520 - DNA, 25 bp, Homo sapien
tggaacttcacgaagccatgtgaac

SEQ ID NO: 2118521 - DNA, 25 bp, Homo sapien
ttagttaacccaggtgctgaatgca

SEQ ID NO: 2118522 - DNA, 25 bp, Homo sapien
ttaacccaggtgctgaatgcaaggt

SEQ ID NO: 2118523 - DNA, 25 bp, Homo sapien
gataacacaagcttgtttgactata

SEQ ID NO: 2118524 - DNA, 25 bp, Homo sapien
tgaatgcaaggtggataacacaagc

SEQ ID NO: 2118525 - DNA, 25 bp, Homo sapien
acagcaaaggaacttggctctttca

SEQ ID NO: 2118526 - DNA, 25 bp, Homo sapien
ttgacattggacattgtgcacctgt

SEQ ID NO: 2118527 - DNA, 25 bp, Homo sapien
cagttgacattggacattgtgcacc

SEQ ID NO: 2118528 - DNA, 25 bp, Homo sapien
tgggtccccccctcagttgacattg

SEQ ID NO: 2118529 - DNA, 25 bp, Homo sapien
cccctcagttgacattggacattgt

SEQ ID NO: 2118530 - DNA, 25 bp, Homo sapien
aaagtcttcggtacaatttgccgca

SEQ ID NO: 2118531 - DNA, 25 bp, Homo sapien
ctccccgcgggacaacttccatatt

SEQ ID NO: 2118532 - DNA, 25 bp, Homo sapien
tattcacaattatcttgagcaaagt

SEQ ID NO: 2118533 - DNA, 25 bp, Homo sapien
cccgcgggacaacttccatattcac

SEQ ID NO: 2118534 - DNA, 25 bp, Homo sapien
gaggctcggctggaaccagagccga

SEQ ID NO: 2118535 - DNA, 25 bp, Homo sapien
ccctgccgcgggcctgaacacgttc

SEQ ID NO: 2118536 - DNA, 25 bp, Homo sapien
agagccgaggaggaggcgcgatccc

SEQ ID NO: 2118537 - DNA, 25 bp, Homo sapien
ctctgcgtccgagaggctcggctgg

SEQ ID NO: 2118538 - DNA, 25 bp, Homo sapien
gtcagggcctcggtggactcggccg

SEQ ID NO: 2118539 - DNA, 25 bp, Homo sapien
gcgagtcagggcctcggtggactcg

SEQ ID NO: 2118540 - DNA, 25 bp, Homo sapien
cagccggcgagtcagggcctcggtg

SEQ ID NO: 2118541 - DNA, 25 bp, Homo sapien
agggcctcggtggactcggccgcca

SEQ ID NO: 2118542 - DNA, 25 bp, Homo sapien
gggcctagcgcagtgggccccgcgg

SEQ ID NO: 2118543 - DNA, 25 bp, Homo sapien
ggttcggccggctcagctagcagga

SEQ ID NO: 2118544 - DNA, 25 bp, Homo sapien
ctaggttgatcggtcctcggcgcca

SEQ ID NO: 2118545 - DNA, 25 bp, Homo sapien
ttgatcggtcctcggcgccaacagg

SEQ ID NO: 2118546 - DNA, 25 bp, Homo sapien
cagcggtccgcgggggcccagggcg

SEQ ID NO: 2118547 - DNA, 25 bp, Homo sapien
tgggccggagcccagcggtccgcgg

SEQ ID NO: 2118548 - DNA, 25 bp, Homo sapien
gagcccagcggtccgcgggggccca

SEQ ID NO: 2118549 - DNA, 25 bp, Homo sapien
ctgggccggagcccagcggtccgcg

SEQ ID NO: 2118550 - DNA, 25 bp, Homo sapien
ctcggggcacaagtacagcaccacg

SEQ ID NO: 2118551 - DNA, 25 bp, Homo sapien
tcggggcacaagtacagcaccacgc

SEQ ID NO: 2118552 - DNA, 25 bp, Homo sapien
gcctcttgagcttgtaagaggtggt

SEQ ID NO: 2118553 - DNA, 25 bp, Homo sapien
gcttcttggcgaaggtttgcccgca

SEQ ID NO: 2118554 - DNA, 25 bp, Homo sapien
agaaaacgcgcactggtaaggcctc

SEQ ID NO: 2118555 - DNA, 25 bp, Homo sapien
cttgcagccagaaaacgcgcactgg

SEQ ID NO: 2118556 - DNA, 25 bp, Homo sapien
cgcggttatgggaaaacagagcact

SEQ ID NO: 2118557 - DNA, 25 bp, Homo sapien
ggttatgggaaaacagagcactcac

SEQ ID NO: 2118558 - DNA, 25 bp, Homo sapien
tgaaatgggcgcggttatgggaaaa

SEQ ID NO: 2118559 - DNA, 25 bp, Homo sapien
ctgttccctgaaatgggcgcggtta

SEQ ID NO: 2118560 - DNA, 25 bp, Homo sapien
acaaaggaaaggtctctcgccggtg

SEQ ID NO: 2118561 - DNA, 25 bp, Homo sapien
ggagctctgctgaaaaccagtggcc

SEQ ID NO: 2118562 - DNA, 25 bp, Homo sapien
tattacaagaggagatcgggcaacg

SEQ ID NO: 2118563 - DNA, 25 bp, Homo sapien
gattccagagttcaccaatgctgtg

SEQ ID NO: 2118564 - DNA, 25 bp, Homo sapien
tggactggagtttttcatggccaaa

SEQ ID NO: 2118565 - DNA, 25 bp, Homo sapien
gctctggactggagtttttcatggc

SEQ ID NO: 2118566 - DNA, 25 bp, Homo sapien
gccaaagagtccagagatcccaatg

SEQ ID NO: 2118567 - DNA, 25 bp, Homo sapien
gtttttcatggccaaagagtccaga

SEQ ID NO: 2118568 - DNA, 25 bp, Homo sapien
actgttttcacaaagggtgctcgaa

SEQ ID NO: 2118569 - DNA, 25 bp, Homo sapien
cacaaagggtgctcgaaggagtcag

SEQ ID NO: 2118570 - DNA, 25 bp, Homo sapien
actgttagcttactgctgggtgtca

SEQ ID NO: 2118571 - DNA, 25 bp, Homo sapien
aaccatggtttcctgctgcattggg

SEQ ID NO: 2118572 - DNA, 25 bp, Homo sapien
aaatctccaaacttgtagtccaggg

SEQ ID NO: 2118573 - DNA, 25 bp, Homo sapien
taaaagtaagccacatgatgaggaa

SEQ ID NO: 2118574 - DNA, 25 bp, Homo sapien
aattggaagtttgaaccctcactgg

SEQ ID NO: 2118575 - DNA, 25 bp, Homo sapien
tcaaggaatcacagagcagaaagac

SEQ ID NO: 2118576 - DNA, 25 bp, Homo sapien
ctgatcgaatggagagatacgctct

SEQ ID NO: 2118577 - DNA, 25 bp, Homo sapien
ggtattacccacagcaattcttaga

SEQ ID NO: 2118578 - DNA, 25 bp, Homo sapien
aaacagcgactaaccttgacacagg

SEQ ID NO: 2118579 - DNA, 25 bp, Homo sapien
gatacgctcttatgcatgtgggcaa

SEQ ID NO: 2118580 - DNA, 25 bp, Homo sapien
gaatttaaaaaatgaagtcacagca

SEQ ID NO: 2118581 - DNA, 25 bp, Homo sapien
tttaaaaaatgaagtcacagcatta

SEQ ID NO: 2118582 - DNA, 25 bp, Homo sapien
aatttaaaaaatgaagtcacagcat

SEQ ID NO: 2118583 - DNA, 25 bp, Homo sapien
taaaaaatgaagtcacagcattaaa

SEQ ID NO: 2118584 - DNA, 25 bp, Homo sapien
gcactggtgaacttttaggttcctc

SEQ ID NO: 2118585 - DNA, 25 bp, Homo sapien
agcactggtgaacttttaggttcct

SEQ ID NO: 2118586 - DNA, 25 bp, Homo sapien
gaaaattctgaagttagcttctatg

SEQ ID NO: 2118587 - DNA, 25 bp, Homo sapien
ctaagcagacaagtggacagtttcc

SEQ ID NO: 2118588 - DNA, 25 bp, Homo sapien
ccttctgtcatttgaagggagaaaa

SEQ ID NO: 2118589 - DNA, 25 bp, Homo sapien
agtttccttctgtcatttgaaggga

SEQ ID NO: 2118590 - DNA, 25 bp, Homo sapien
gcattgatttcccgtggctagatga

SEQ ID NO: 2118591 - DNA, 25 bp, Homo sapien
aaatttgcctgtggcacacccctct

SEQ ID NO: 2118592 - DNA, 25 bp, Homo sapien
tgcagagaaaggatcctaacccttc

SEQ ID NO: 2118593 - DNA, 25 bp, Homo sapien
gcagagaaaggatcctaacccttcc

SEQ ID NO: 2118594 - DNA, 25 bp, Homo sapien
tcatcatctaggttataagccttgc

SEQ ID NO: 2118595 - DNA, 25 bp, Homo sapien
accagtcaactcatcatctaggtta

SEQ ID NO: 2118596 - DNA, 25 bp, Homo sapien
cagtcaactcatcatctaggttata

SEQ ID NO: 2118597 - DNA, 25 bp, Homo sapien
aactcatcatctaggttataagcct

SEQ ID NO: 2118598 - DNA, 25 bp, Homo sapien
tgaagaacagattaatgccttaagt

SEQ ID NO: 2118599 - DNA, 25 bp, Homo sapien
ggcaatcccagatacctagacatgt

SEQ ID NO: 2118600 - DNA, 25 bp, Homo sapien
cataaccttgattgtgattgatagc

SEQ ID NO: 2118601 - DNA, 25 bp, Homo sapien
gacatgttaactaatcctgtttacc

SEQ ID NO: 2118602 - DNA, 25 bp, Homo sapien
agaaccctcaggtttactatggtgg

SEQ ID NO: 2118603 - DNA, 25 bp, Homo sapien
cagaaccctcaggtttactatggtg

SEQ ID NO: 2118604 - DNA, 25 bp, Homo sapien
gcagaaccctcaggtttactatggt

SEQ ID NO: 2118605 - DNA, 25 bp, Homo sapien
acaaattcagcacctgcaaaatgag

SEQ ID NO: 2118606 - DNA, 25 bp, Homo sapien
tcagcacctgcaaaatgagcctcat

SEQ ID NO: 2118607 - DNA, 25 bp, Homo sapien
aattcagcacctgcaaaatgagcct

SEQ ID NO: 2118608 - DNA, 25 bp, Homo sapien
gggacaaattcagcacctgcaaaat

SEQ ID NO: 2118609 - DNA, 25 bp, Homo sapien
gctgcaatgacatatttccaaaggg

SEQ ID NO: 2118610 - DNA, 25 bp, Homo sapien
accatccaggacactcatcataggg

SEQ ID NO: 2118611 - DNA, 25 bp, Homo sapien
tatgcatcagcaaaagaattgtagg

SEQ ID NO: 2118612 - DNA, 25 bp, Homo sapien
aattcgaccagttgcttctttcaca

SEQ ID NO: 2118613 - DNA, 25 bp, Homo sapien
ttattatcaggaggcctaaggtctc

SEQ ID NO: 2118614 - DNA, 25 bp, Homo sapien
tgtcctcggtgtttgcataacggcg

SEQ ID NO: 2118615 - DNA, 25 bp, Homo sapien
actgctaagttcacgatggagtcca

SEQ ID NO: 2118616 - DNA, 25 bp, Homo sapien
cataacggcggacatcttgggaaga

SEQ ID NO: 2118617 - DNA, 25 bp, Homo sapien
ctgcccctagccttggtgttttctt

SEQ ID NO: 2118618 - DNA, 25 bp, Homo sapien
cttagataccctgcccctagccttg

SEQ ID NO: 2118619 - DNA, 25 bp, Homo sapien
ttggtcttagataccctgcccctag

SEQ ID NO: 2118620 - DNA, 25 bp, Homo sapien
gtcttagataccctgcccctagcct

SEQ ID NO: 2118621 - DNA, 25 bp, Homo sapien
gctgttgcgctttgagaacggcgtc

SEQ ID NO: 2118622 - DNA, 25 bp, Homo sapien
cctgctgttgcgctttgagaacggc

SEQ ID NO: 2118623 - DNA, 25 bp, Homo sapien
tgcgctttgagaacggcgtcctcac

SEQ ID NO: 2118624 - DNA, 25 bp, Homo sapien
aggacctgctgttgcgctttgagaa

SEQ ID NO: 2118625 - DNA, 25 bp, Homo sapien
tttcaggaacgtgttcaggcccgcg

SEQ ID NO: 2118626 - DNA, 25 bp, Homo sapien
cagagacccagtaccagaatattta

SEQ ID NO: 2118627 - DNA, 25 bp, Homo sapien
gatagatacctaggtgttccacagc

SEQ ID NO: 2118628 - DNA, 25 bp, Homo sapien
gggccagtttctgcgcattgcacat

SEQ ID NO: 2118629 - DNA, 25 bp, Homo sapien
cacacacacacacacgaccaggttc

SEQ ID NO: 2118630 - DNA, 25 bp, Homo sapien
cacacacacacacgaccaggttcat

SEQ ID NO: 2118631 - DNA, 25 bp, Homo sapien
ttgctccgcagccacacacacacac

SEQ ID NO: 2118632 - DNA, 25 bp, Homo sapien
gctccgcagccacacacacacacac

SEQ ID NO: 2118633 - DNA, 25 bp, Homo sapien
gccctgatgatcagcttcttgtggc

SEQ ID NO: 2118634 - DNA, 25 bp, Homo sapien
gcagtcctggtgtgccctgatgatc

SEQ ID NO: 2118635 - DNA, 25 bp, Homo sapien
cttgtggccctcttgatagggacat

SEQ ID NO: 2118636 - DNA, 25 bp, Homo sapien
tgcagtcctggtgtgccctgatgat

SEQ ID NO: 2118637 - DNA, 25 bp, Homo sapien
gaaacgcagaattactcctaacctc

SEQ ID NO: 2118638 - DNA, 25 bp, Homo sapien
gaattactcctaacctctactctca

SEQ ID NO: 2118639 - DNA, 25 bp, Homo sapien
ggcagaaacgcagaattactcctaa

SEQ ID NO: 2118640 - DNA, 25 bp, Homo sapien
ccttggcagaaacgcagaattactc

SEQ ID NO: 2118641 - DNA, 25 bp, Homo sapien
ctggaggggtcgcagggctttgtgt

SEQ ID NO: 2118642 - DNA, 25 bp, Homo sapien
tttccgtggtgcagtaattgtcaag

SEQ ID NO: 2118643 - DNA, 25 bp, Homo sapien
gggctttgtgtttgggctgctttcc

SEQ ID NO: 2118644 - DNA, 25 bp, Homo sapien
tgtttgggctgctttccgtggtgca

SEQ ID NO: 2118645 - DNA, 25 bp, Homo sapien
tggctggtggacctcattttgcacc

SEQ ID NO: 2118646 - DNA, 25 bp, Homo sapien
gctggtggacctcattttgcaccag

SEQ ID NO: 2118647 - DNA, 25 bp, Homo sapien
acagttcacctgatggagaactcag

SEQ ID NO: 2118648 - DNA, 25 bp, Homo sapien
agttcacctgatggagaactcagag

SEQ ID NO: 2118649 - DNA, 25 bp, Homo sapien
ttgctgccagcaaggtcagcacatg

SEQ ID NO: 2118650 - DNA, 25 bp, Homo sapien
cctggtgataaattgctgccagcaa

SEQ ID NO: 2118651 - DNA, 25 bp, Homo sapien
ataaattgctgccagcaaggtcagc

SEQ ID NO: 2118652 - DNA, 25 bp, Homo sapien
ctggtgataaattgctgccagcaag

SEQ ID NO: 2118653 - DNA, 25 bp, Homo sapien
cagggacctcttgtccaaactgtct

SEQ ID NO: 2118654 - DNA, 25 bp, Homo sapien
ccagggacctcttgtccaaactgtc

SEQ ID NO: 2118655 - DNA, 25 bp, Homo sapien
ggacctcttgtccaaactgtctctc

SEQ ID NO: 2118656 - DNA, 25 bp, Homo sapien
gagagcacctattctcctctccagg

SEQ ID NO: 2118657 - DNA, 25 bp, Homo sapien
gatgtcaccgatataatgccaaagc

SEQ ID NO: 2118658 - DNA, 25 bp, Homo sapien
tcaggttctgcgaggaggatgtcac

SEQ ID NO: 2118659 - DNA, 25 bp, Homo sapien
attgccaatccactctcagtgagag

SEQ ID NO: 2118660 - DNA, 25 bp, Homo sapien
tgtgaaacagagtcttggtcaggtt

SEQ ID NO: 2118661 - DNA, 25 bp, Homo sapien
aaatcatgttgtgtccagtgggtac

SEQ ID NO: 2118662 - DNA, 25 bp, Homo sapien
aatactagtaaatcatgttgtgtcc

SEQ ID NO: 2118663 - DNA, 25 bp, Homo sapien
tcacttcagggcccgcatgtttgtt

SEQ ID NO: 2118664 - DNA, 25 bp, Homo sapien
gtgggtacatacatcaccagaggtt

SEQ ID NO: 2118665 - DNA, 25 bp, Homo sapien
cagaagcaatgcaccctaggaacag

SEQ ID NO: 2118666 - DNA, 25 bp, Homo sapien
tgtattaccaatgcccctaacctag

SEQ ID NO: 2118667 - DNA, 25 bp, Homo sapien
gtccttgagtcatcccagtccttca

SEQ ID NO: 2118668 - DNA, 25 bp, Homo sapien
tccttcacttaaatcaaattctctg

SEQ ID NO: 2118669 - DNA, 25 bp, Homo sapien
ttggagtgtccccttctctaaagcc

SEQ ID NO: 2118670 - DNA, 25 bp, Homo sapien
catcgctgtcgtgccaggagccctt

SEQ ID NO: 2118671 - DNA, 25 bp, Homo sapien
ggagtgtccccttctctaaagccat

SEQ ID NO: 2118672 - DNA, 25 bp, Homo sapien
caggagcccttggagtgtccccttc

SEQ ID NO: 2118673 - DNA, 25 bp, Homo sapien
gggcccactcaagtaggagcagctg

SEQ ID NO: 2118674 - DNA, 25 bp, Homo sapien
tgaagaaccaggggccagaggtgga

SEQ ID NO: 2118675 - DNA, 25 bp, Homo sapien
ggagcagctgctgaagaaccagggg

SEQ ID NO: 2118676 - DNA, 25 bp, Homo sapien
actgggcccactcaagtaggagcag

SEQ ID NO: 2118677 - DNA, 25 bp, Homo sapien
gcctctgcccaggccaccctggaag

SEQ ID NO: 2118678 - DNA, 25 bp, Homo sapien
ctgctgcccgctcgggagaagctca

SEQ ID NO: 2118679 - DNA, 25 bp, Homo sapien
ctgcccgctcgggagaagctcaagg

SEQ ID NO: 2118680 - DNA, 25 bp, Homo sapien
cctctgcccaggccaccctggaagc

SEQ ID NO: 2118681 - DNA, 25 bp, Homo sapien
gttgaccattacagcagtgatgact

SEQ ID NO: 2118682 - DNA, 25 bp, Homo sapien
ggttgaccattacagcagtgatgac

SEQ ID NO: 2118683 - DNA, 25 bp, Homo sapien
cttgtcaatgaaggaggcaaacttg

SEQ ID NO: 2118684 - DNA, 25 bp, Homo sapien
cttgttgagggtcttgatctgctcc

SEQ ID NO: 2118685 - DNA, 25 bp, Homo sapien
tgtcaatgaaggaggcaaacttgtt

SEQ ID NO: 2118686 - DNA, 25 bp, Homo sapien
ggaggcaaacttgttgagggtcttg

SEQ ID NO: 2118687 - DNA, 25 bp, Homo sapien
tcttgttcatacaacttcctgagga

SEQ ID NO: 2118688 - DNA, 25 bp, Homo sapien
cctcagcccagctgcggttagcgat

SEQ ID NO: 2118689 - DNA, 25 bp, Homo sapien
cagctgcggttagcgatctcctcgt

SEQ ID NO: 2118690 - DNA, 25 bp, Homo sapien
agcccagctgcggttagcgatctcc

SEQ ID NO: 2118691 - DNA, 25 bp, Homo sapien
ctcagcccagctgcggttagcgatc

SEQ ID NO: 2118692 - DNA, 25 bp, Homo sapien
tccacatctgttatggtggactcca

SEQ ID NO: 2118693 - DNA, 25 bp, Homo sapien
agctccccacgttgttccacatctg

SEQ ID NO: 2118694 - DNA, 25 bp, Homo sapien
ccccacgttgttccacatctgttat

SEQ ID NO: 2118695 - DNA, 25 bp, Homo sapien
taatgaccagctccccacgttgttc

SEQ ID NO: 2118696 - DNA, 25 bp, Homo sapien
cctccagctgggaaagcttggcatt

SEQ ID NO: 2118697 - DNA, 25 bp, Homo sapien
cagcctccagctgggaaagcttggc

SEQ ID NO: 2118698 - DNA, 25 bp, Homo sapien
cagctgggaaagcttggcattggca

SEQ ID NO: 2118699 - DNA, 25 bp, Homo sapien
tccagctgggaaagcttggcattgg

SEQ ID NO: 2118700 - DNA, 25 bp, Homo sapien
gtggtgatcacgatgtcctgagcca

SEQ ID NO: 2118701 - DNA, 25 bp, Homo sapien
ctgtaggtggtgatcacgatgtcct

SEQ ID NO: 2118702 - DNA, 25 bp, Homo sapien
ggtggtgatcacgatgtcctgagcc

SEQ ID NO: 2118703 - DNA, 25 bp, Homo sapien
taggtggtgatcacgatgtcctgag

SEQ ID NO: 2118704 - DNA, 25 bp, Homo sapien
ggtcttcatatggatactcatgctc

SEQ ID NO: 2118705 - DNA, 25 bp, Homo sapien
ttcatatggatactcatgctctgca

SEQ ID NO: 2118706 - DNA, 25 bp, Homo sapien
tcttcatatggatactcatgctctg

SEQ ID NO: 2118707 - DNA, 25 bp, Homo sapien
tcatatggatactcatgctctgcat

SEQ ID NO: 2118708 - DNA, 25 bp, Homo sapien
gagctgtcttccaattgatctgttc

SEQ ID NO: 2118709 - DNA, 25 bp, Homo sapien
atttaccaccttctcgacttagcac

SEQ ID NO: 2118710 - DNA, 25 bp, Homo sapien
caccttctcgacttagcaccagcag

SEQ ID NO: 2118711 - DNA, 25 bp, Homo sapien
gctgtcttccaattgatctgttctt

SEQ ID NO: 2118712 - DNA, 25 bp, Homo sapien
taagtgagacaaagattatagtgct

SEQ ID NO: 2118713 - DNA, 25 bp, Homo sapien
cttccctgccgcaaattaaggcctt

SEQ ID NO: 2118714 - DNA, 25 bp, Homo sapien
gacaaagattatagtgctgatgaca

SEQ ID NO: 2118715 - DNA, 25 bp, Homo sapien
aaaatgtaccctccaatatttacag

SEQ ID NO: 2118716 - DNA, 25 bp, Homo sapien
gtgatgcctgcctgagtctcatacc

SEQ ID NO: 2118717 - DNA, 25 bp, Homo sapien
accgtgatgcctgcctgagtctcat

SEQ ID NO: 2118718 - DNA, 25 bp, Homo sapien
cgtgatgcctgcctgagtctcatac

SEQ ID NO: 2118719 - DNA, 25 bp, Homo sapien
ccgtgatgcctgcctgagtctcata

SEQ ID NO: 2118720 - DNA, 25 bp, Homo sapien
tcactgtagaggtcaattggccgag

SEQ ID NO: 2118721 - DNA, 25 bp, Homo sapien
gaagaatgtctccaacctggtaaat

SEQ ID NO: 2118722 - DNA, 25 bp, Homo sapien
tctgacctggtggatcaagacaaag

SEQ ID NO: 2118723 - DNA, 25 bp, Homo sapien
actataggcctcaactgactcagaa

SEQ ID NO: 2118724 - DNA, 25 bp, Homo sapien
gcatcagttgggaagtctttaatat

SEQ ID NO: 2118725 - DNA, 25 bp, Homo sapien
tcaacctcattttgatgacagattt

SEQ ID NO: 2118726 - DNA, 25 bp, Homo sapien
ttttatgtcttcaagagttgcatca

SEQ ID NO: 2118727 - DNA, 25 bp, Homo sapien
cattaaagtctgttagacggttcaa

SEQ ID NO: 2118728 - DNA, 25 bp, Homo sapien
aaaattgatcccttaaatgctttat

SEQ ID NO: 2118729 - DNA, 25 bp, Homo sapien
tattagcaggtatatttctttgtac

SEQ ID NO: 2118730 - DNA, 25 bp, Homo sapien
ctcatctaaatatatagtacttgac

SEQ ID NO: 2118731 - DNA, 25 bp, Homo sapien
caaagtaatcatccttgaaaagtat

SEQ ID NO: 2118732 - DNA, 25 bp, Homo sapien
gagaaaagtatgtgtaaatcacccg

SEQ ID NO: 2118733 - DNA, 25 bp, Homo sapien
cccgaaaatttcaacaagcatccaa

SEQ ID NO: 2118734 - DNA, 25 bp, Homo sapien
aagtatgtgtaaatcacccgaaaat

SEQ ID NO: 2118735 - DNA, 25 bp, Homo sapien
tttcaacaagcatccaatcttttct

SEQ ID NO: 2118736 - DNA, 25 bp, Homo sapien
gctttacccagtgcttccttggctt

SEQ ID NO: 2118737 - DNA, 25 bp, Homo sapien
taattagaattattccctcttttgc

SEQ ID NO: 2118738 - DNA, 25 bp, Homo sapien
ggctttacccagtgcttccttggct

SEQ ID NO: 2118739 - DNA, 25 bp, Homo sapien
gctcctctgacgaagtctatccatt

SEQ ID NO: 2118740 - DNA, 25 bp, Homo sapien
atctacgaccttttgacttccattt

SEQ ID NO: 2118741 - DNA, 25 bp, Homo sapien
tttacggattcttgttagtcttcta

SEQ ID NO: 2118742 - DNA, 25 bp, Homo sapien
tacggattcttgttagtcttctatt

SEQ ID NO: 2118743 - DNA, 25 bp, Homo sapien
cggattcttgttagtcttctattat

SEQ ID NO: 2118744 - DNA, 25 bp, Homo sapien
atattctattagtttgtactagtac

SEQ ID NO: 2118745 - DNA, 25 bp, Homo sapien
tctattagtttgtactagtacattc

SEQ ID NO: 2118746 - DNA, 25 bp, Homo sapien
cctgaaatgacacaaacagaactat

SEQ ID NO: 2118747 - DNA, 25 bp, Homo sapien
aaaagctgatgcaaacaaaagtagt

SEQ ID NO: 2118748 - DNA, 25 bp, Homo sapien
tgttttcagacatccccaccgttcc

SEQ ID NO: 2118749 - DNA, 25 bp, Homo sapien
atccccaccgttccactaccagaga

SEQ ID NO: 2118750 - DNA, 25 bp, Homo sapien
catccccaccgttccactaccagag

SEQ ID NO: 2118751 - DNA, 25 bp, Homo sapien
tgtgttttcagacatccccaccgtt

SEQ ID NO: 2118752 - DNA, 25 bp, Homo sapien
gttaatggaatcatgtgtattcatc

SEQ ID NO: 2118753 - DNA, 25 bp, Homo sapien
tgttaatggaatcatgtgtattcat

SEQ ID NO: 2118754 - DNA, 25 bp, Homo sapien
ttaatggaatcatgtgtattcatct

SEQ ID NO: 2118755 - DNA, 25 bp, Homo sapien
aagaagagggatttaacctctgatt

SEQ ID NO: 2118756 - DNA, 25 bp, Homo sapien
agagggatttaacctctgattataa

SEQ ID NO: 2118757 - DNA, 25 bp, Homo sapien
taagaagagggatttaacctctgat

SEQ ID NO: 2118758 - DNA, 25 bp, Homo sapien
gaagagggatttaacctctgattat

SEQ ID NO: 2118759 - DNA, 25 bp, Homo sapien
atctttacaatttactttctcaaag

SEQ ID NO: 2118760 - DNA, 25 bp, Homo sapien
gatgatttaatctttacaatttact

SEQ ID NO: 2118761 - DNA, 25 bp, Homo sapien
aaataagatgatttaatctttacaa

SEQ ID NO: 2118762 - DNA, 25 bp, Homo sapien
ttaatctttacaatttactttctca

SEQ ID NO: 2118763 - DNA, 25 bp, Homo sapien
tatgaacctgacagcttatttggct

SEQ ID NO: 2118764 - DNA, 25 bp, Homo sapien
aacctgacagcttatttggctgaca

SEQ ID NO: 2118765 - DNA, 25 bp, Homo sapien
tactatgaaagggatataaaccaac

SEQ ID NO: 2118766 - DNA, 25 bp, Homo sapien
gggtatgaacctgacagcttatttg

SEQ ID NO: 2118767 - DNA, 25 bp, Homo sapien
ctgggtctagggtctgtctggcatc

SEQ ID NO: 2118768 - DNA, 25 bp, Homo sapien
gtcaagaacctggaacattggctgg

SEQ ID NO: 2118769 - DNA, 25 bp, Homo sapien
tgtagatctctttcaggtaatgcag

SEQ ID NO: 2118770 - DNA, 25 bp, Homo sapien
gattattccgccctctaattagaag

SEQ ID NO: 2118771 - DNA, 25 bp, Homo sapien
cctgtagtctgtaaacatccccctt

SEQ ID NO: 2118772 - DNA, 25 bp, Homo sapien
ccctgtagtctgtaaacatccccct

SEQ ID NO: 2118773 - DNA, 25 bp, Homo sapien
ctgtagtctgtaaacatcccccttc

SEQ ID NO: 2118774 - DNA, 25 bp, Homo sapien
tccctgtagtctgtaaacatccccc

SEQ ID NO: 2118775 - DNA, 25 bp, Homo sapien
tctttggtgcagtagaagtgcctct

SEQ ID NO: 2118776 - DNA, 25 bp, Homo sapien
caatgtgggctctttggtgcagtag

SEQ ID NO: 2118777 - DNA, 25 bp, Homo sapien
ggtcatgtgagctaggtggatccca

SEQ ID NO: 2118778 - DNA, 25 bp, Homo sapien
tgggctattaatttcagtcttccct

SEQ ID NO: 2118779 - DNA, 25 bp, Homo sapien
tgcccatactctaatcgccaaaatc

SEQ ID NO: 2118780 - DNA, 25 bp, Homo sapien
agtcttcatgcccatactctaatcg

SEQ ID NO: 2118781 - DNA, 25 bp, Homo sapien
catgcccatactctaatcgccaaaa

SEQ ID NO: 2118782 - DNA, 25 bp, Homo sapien
ttcatgcccatactctaatcgccaa

SEQ ID NO: 2118783 - DNA, 25 bp, Homo sapien
tggagacttcttatctcatcctgtg

SEQ ID NO: 2118784 - DNA, 25 bp, Homo sapien
gatgatattcatgcctaacctcttg

SEQ ID NO: 2118785 - DNA, 25 bp, Homo sapien
ttattttacacagggactattcaag

SEQ ID NO: 2118786 - DNA, 25 bp, Homo sapien
tggccagcttctttatcacaaacag

SEQ ID NO: 2118787 - DNA, 25 bp, Homo sapien
tgtcttttaagtgggatatctggcc

SEQ ID NO: 2118788 - DNA, 25 bp, Homo sapien
gagatgttcaaaatatgcgcccaat

SEQ ID NO: 2118789 - DNA, 25 bp, Homo sapien
tctactgagaggtctactgctagcc

SEQ ID NO: 2118790 - DNA, 25 bp, Homo sapien
taagggcctcttgtaatgctgatct

SEQ ID NO: 2118791 - DNA, 25 bp, Homo sapien
ggaatcatattgtcagggaagagag

SEQ ID NO: 2118792 - DNA, 25 bp, Homo sapien
gatttcactctcagcctacgtgttg

SEQ ID NO: 2118793 - DNA, 25 bp, Homo sapien
ttctaggaaccttttggcatagcct

SEQ ID NO: 2118794 - DNA, 25 bp, Homo sapien
tgagcctactataagggaacttccg

SEQ ID NO: 2118795 - DNA, 25 bp, Homo sapien
ggtttgctgcaccgatcacctcata

SEQ ID NO: 2118796 - DNA, 25 bp, Homo sapien
tgcaccgatcacctcataacctagg

SEQ ID NO: 2118797 - DNA, 25 bp, Homo sapien
cgatcacctcataacctaggtatta

SEQ ID NO: 2118798 - DNA, 25 bp, Homo sapien
tccctgaccccaccgtcctgacagg

SEQ ID NO: 2118799 - DNA, 25 bp, Homo sapien
tggctggaagtggatgtagtgtgaa

SEQ ID NO: 2118800 - DNA, 25 bp, Homo sapien
gtggatgtagtgtgaagtctccctc

SEQ ID NO: 2118801 - DNA, 25 bp, Homo sapien
gctccaaacacagctcttgggctct

SEQ ID NO: 2118802 - DNA, 25 bp, Homo sapien
gaagtggatgtagtgtgaagtctcc

SEQ ID NO: 2118803 - DNA, 25 bp, Homo sapien
ggaagctgtagttctgtgtagtgag

SEQ ID NO: 2118804 - DNA, 25 bp, Homo sapien
ggcagttgggccccaccttcttgca

SEQ ID NO: 2118805 - DNA, 25 bp, Homo sapien
ctgggaagctgtagttctgtgtagt

SEQ ID NO: 2118806 - DNA, 25 bp, Homo sapien
gggaagctgtagttctgtgtagtga

SEQ ID NO: 2118807 - DNA, 25 bp, Homo sapien
caatgccgaggtggaacagtgtccg

SEQ ID NO: 2118808 - DNA, 25 bp, Homo sapien
aatgccgaggtggaacagtgtccgg

SEQ ID NO: 2118809 - DNA, 25 bp, Homo sapien
tgccgaggtggaacagtgtccggaa

SEQ ID NO: 2118810 - DNA, 25 bp, Homo sapien
gccgaggtggaacagtgtccggaat

SEQ ID NO: 2118811 - DNA, 25 bp, Homo sapien
gcagcccacagattcaattaagaag

SEQ ID NO: 2118812 - DNA, 25 bp, Homo sapien
cctggtcttccacggtggttcatgc

SEQ ID NO: 2118813 - DNA, 25 bp, Homo sapien
tgcagcccacagattcaattaagaa

SEQ ID NO: 2118814 - DNA, 25 bp, Homo sapien
gtggtatggtgctgaaaaaatgtat

SEQ ID NO: 2118815 - DNA, 25 bp, Homo sapien
gtgtggtatggtgctgaaaaaatgt

SEQ ID NO: 2118816 - DNA, 25 bp, Homo sapien
tgtggtatggtgctgaaaaaatgta

SEQ ID NO: 2118817 - DNA, 25 bp, Homo sapien
tgttcattgtagccctgtagcatag

SEQ ID NO: 2118818 - DNA, 25 bp, Homo sapien
taaaacaatctaatcctgatgacac

SEQ ID NO: 2118819 - DNA, 25 bp, Homo sapien
tgtttgttaaaagttagctaggaca

SEQ ID NO: 2118820 - DNA, 25 bp, Homo sapien
aaaaggtatatacattctctgtgac

SEQ ID NO: 2118821 - DNA, 25 bp, Homo sapien
tattgctgattgtactggttgttgc

SEQ ID NO: 2118822 - DNA, 25 bp, Homo sapien
gcgaagtacatccttccacctattt

SEQ ID NO: 2118823 - DNA, 25 bp, Homo sapien
aacaagtgttgaggatgcgaagtac

SEQ ID NO: 2118824 - DNA, 25 bp, Homo sapien
ttgaggatgcgaagtacatccttcc

SEQ ID NO: 2118825 - DNA, 25 bp, Homo sapien
caagtgttgaggatgcgaagtacat

SEQ ID NO: 2118826 - DNA, 25 bp, Homo sapien
tctggatggtaaaattaatggtagt

SEQ ID NO: 2118827 - DNA, 25 bp, Homo sapien
tatgttatagatcatgtaggataaa

SEQ ID NO: 2118828 - DNA, 25 bp, Homo sapien
tttcagagtatttaacaatcttgga

SEQ ID NO: 2118829 - DNA, 25 bp, Homo sapien
gataaatagtggactatcaaaagga

SEQ ID NO: 2118830 - DNA, 25 bp, Homo sapien
gcagatgctccataacagctctctg

SEQ ID NO: 2118831 - DNA, 25 bp, Homo sapien
aggctggagcaactgggactttcat

SEQ ID NO: 2118832 - DNA, 25 bp, Homo sapien
ctgctgactgcctggtacagagctg

SEQ ID NO: 2118833 - DNA, 25 bp, Homo sapien
tcccaaggctggagcaactgggact

SEQ ID NO: 2118834 - DNA, 25 bp, Homo sapien
taatacatagagcggaccttgtagc

SEQ ID NO: 2118835 - DNA, 25 bp, Homo sapien
acatagagcggaccttgtagccaaa

SEQ ID NO: 2118836 - DNA, 25 bp, Homo sapien
atacatagagcggaccttgtagcca

SEQ ID NO: 2118837 - DNA, 25 bp, Homo sapien
ttaatacatagagcggaccttgtag

SEQ ID NO: 2118838 - DNA, 25 bp, Homo sapien
tctatttttgcaggaagcatagaca

SEQ ID NO: 2118839 - DNA, 25 bp, Homo sapien
tatttttgcaggaagcatagacagg

SEQ ID NO: 2118840 - DNA, 25 bp, Homo sapien
ctatttttgcaggaagcatagacag

SEQ ID NO: 2118841 - DNA, 25 bp, Homo sapien
ctttgtggagtcaccccagctgctg

SEQ ID NO: 2118842 - DNA, 25 bp, Homo sapien
gaagctaggctgttgcacactgcca

SEQ ID NO: 2118843 - DNA, 25 bp, Homo sapien
tttgtcccagagacccagtgcagct

SEQ ID NO: 2118844 - DNA, 25 bp, Homo sapien
gcttgtgcccacagatagtcccagg

SEQ ID NO: 2118845 - DNA, 25 bp, Homo sapien
atagttagcccaactaggtgactca

SEQ ID NO: 2118846 - DNA, 25 bp, Homo sapien
tagttagcccaactaggtgactcac

SEQ ID NO: 2118847 - DNA, 25 bp, Homo sapien
catagttagcccaactaggtgactc

SEQ ID NO: 2118848 - DNA, 25 bp, Homo sapien
tcaccactgaggaaaactgccaaca

SEQ ID NO: 2118849 - DNA, 25 bp, Homo sapien
catgtactttagacactcccttttc

SEQ ID NO: 2118850 - DNA, 25 bp, Homo sapien
agcaacattgacagtcaccagatac

SEQ ID NO: 2118851 - DNA, 25 bp, Homo sapien
gcccagggactcatcaagcaacatt

SEQ ID NO: 2118852 - DNA, 25 bp, Homo sapien
taaatttgaacaggcgaatgccctc

SEQ ID NO: 2118853 - DNA, 25 bp, Homo sapien
taaggaaccatatctggcagctggc

SEQ ID NO: 2118854 - DNA, 25 bp, Homo sapien
tcttagcagattcggcagcctggca

SEQ ID NO: 2118855 - DNA, 25 bp, Homo sapien
tcgtaggcttcatgacagggctgca

SEQ ID NO: 2118856 - DNA, 25 bp, Homo sapien
caggttgttccataggtatacatgt

SEQ ID NO: 2118857 - DNA, 25 bp, Homo sapien
atgtgcataacgtgcaggttgttcc

SEQ ID NO: 2118858 - DNA, 25 bp, Homo sapien
cataacgtgcaggttgttccatagg

SEQ ID NO: 2118859 - DNA, 25 bp, Homo sapien
tcatcatttacatttctcctaatgc

SEQ ID NO: 2118860 - DNA, 25 bp, Homo sapien
gggctgttgaattttgtctaaggcc

SEQ ID NO: 2118861 - DNA, 25 bp, Homo sapien
tggggttttcctagatatgcaatca

SEQ ID NO: 2118862 - DNA, 25 bp, Homo sapien
gttttcctagatatgcaatcatgtc

SEQ ID NO: 2118863 - DNA, 25 bp, Homo sapien
gatggggttttcctagatatgcaat

SEQ ID NO: 2118864 - DNA, 25 bp, Homo sapien
tatatcatttccaaaatcccttgtt

SEQ ID NO: 2118865 - DNA, 25 bp, Homo sapien
cctgtaggtttgtcttgaaatctct

SEQ ID NO: 2118866 - DNA, 25 bp, Homo sapien
gtctttttgaatgatctatgtatat

SEQ ID NO: 2118867 - DNA, 25 bp, Homo sapien
tagggtgttgacgtctccagctgtt

SEQ ID NO: 2118868 - DNA, 25 bp, Homo sapien
ttctaatggatctataagaacagca

SEQ ID NO: 2118869 - DNA, 25 bp, Homo sapien
cagtgactttgattacccttgctgc

SEQ ID NO: 2118870 - DNA, 25 bp, Homo sapien
gagagttctaacaattctagtgtga

SEQ ID NO: 2118871 - DNA, 25 bp, Homo sapien
ctagtgtgaagccaaatagtgatct

SEQ ID NO: 2118872 - DNA, 25 bp, Homo sapien
tatagcatcaaagcagaccagtggc

SEQ ID NO: 2118873 - DNA, 25 bp, Homo sapien
tggagtattccctcagcctatagca

SEQ ID NO: 2118874 - DNA, 25 bp, Homo sapien
gagcccaattaaatacctgggttca

SEQ ID NO: 2118875 - DNA, 25 bp, Homo sapien
ggatcagggatattacttctcaacc

SEQ ID NO: 2118876 - DNA, 25 bp, Homo sapien
caagcgacgtttagagaatattgac

SEQ ID NO: 2118877 - DNA, 25 bp, Homo sapien
ttgacaagattgctcagtggcaggc

SEQ ID NO: 2118878 - DNA, 25 bp, Homo sapien
gactacaggtatgtggcagctgctt

SEQ ID NO: 2118879 - DNA, 25 bp, Homo sapien
gactcagcagatcaacgaacgcaag

SEQ ID NO: 2118880 - DNA, 25 bp, Homo sapien
tttgactccagtgcagaagatctgc

SEQ ID NO: 2118881 - DNA, 25 bp, Homo sapien
gaagatctgcaagtatcccttacag

SEQ ID NO: 2118882 - DNA, 25 bp, Homo sapien
gagctcctaaagtatactgcccaag

SEQ ID NO: 2118883 - DNA, 25 bp, Homo sapien
tcccttacagttggctgagctccta

SEQ ID NO: 2118884 - DNA, 25 bp, Homo sapien
gatcatacaggttttgtccttggtt

SEQ ID NO: 2118885 - DNA, 25 bp, Homo sapien
accaaacttttgtccctgggatgag

SEQ ID NO: 2118886 - DNA, 25 bp, Homo sapien
tctcatggagggatcttgaatttta

SEQ ID NO: 2118887 - DNA, 25 bp, Homo sapien
gatgagacccacttgatcatcgtga

SEQ ID NO: 2118888 - DNA, 25 bp, Homo sapien
ctgggactacatgtggtgttttgat

SEQ ID NO: 2118889 - DNA, 25 bp, Homo sapien
gcatgctcagtagacgtaaaggtgg

SEQ ID NO: 2118890 - DNA, 25 bp, Homo sapien
ccaaggtctagagtttttgcaagcc

SEQ ID NO: 2118891 - DNA, 25 bp, Homo sapien
tctttggaaacgtatgccaaggtct

SEQ ID NO: 2118892 - DNA, 25 bp, Homo sapien
caagcctgtgtccttgctgggcatg

SEQ ID NO: 2118893 - DNA, 25 bp, Homo sapien
cctgggaacgcgctgaatggagtcc

SEQ ID NO: 2118894 - DNA, 25 bp, Homo sapien
tggatgtgcaaactgtagtcgtttt

SEQ ID NO: 2118895 - DNA, 25 bp, Homo sapien
tgattgtagtcctcctgcttgtcaa

SEQ ID NO: 2118896 - DNA, 25 bp, Homo sapien
ttttgccgtgattgtagtcctcctg

SEQ ID NO: 2118897 - DNA, 25 bp, Homo sapien
atctcccaatctgccggccccccac

SEQ ID NO: 2118898 - DNA, 25 bp, Homo sapien
tagcatggtggctgtatggacagtc

SEQ ID NO: 2118899 - DNA, 25 bp, Homo sapien
gctgtatggacagtctgacagaaca

SEQ ID NO: 2118900 - DNA, 25 bp, Homo sapien
tggtggctgtatggacagtctgaca

SEQ ID NO: 2118901 - DNA, 25 bp, Homo sapien
ctcctttctagcatggtggctgtat

SEQ ID NO: 2118902 - DNA, 25 bp, Homo sapien
gccaaacccagcccttctctaacca

SEQ ID NO: 2118903 - DNA, 25 bp, Homo sapien
gggcgccaaacccagcccttctcta

SEQ ID NO: 2118904 - DNA, 25 bp, Homo sapien
ctcgggcgccaaacccagcccttct

SEQ ID NO: 2118905 - DNA, 25 bp, Homo sapien
gcgccaaacccagcccttctctaac

SEQ ID NO: 2118906 - DNA, 25 bp, Homo sapien
ttctcagctagggacaaacgatcag

SEQ ID NO: 2118907 - DNA, 25 bp, Homo sapien
gctagggacaaacgatcagcccaat

SEQ ID NO: 2118908 - DNA, 25 bp, Homo sapien
ggacaaacgatcagcccaatcctga

SEQ ID NO: 2118909 - DNA, 25 bp, Homo sapien
ctaagatttctcagctagggacaaa

SEQ ID NO: 2118910 - DNA, 25 bp, Homo sapien
gggatcgaacgagtgtctggcagcc

SEQ ID NO: 2118911 - DNA, 25 bp, Homo sapien
gaacgagtgtctggcagccgggagc

SEQ ID NO: 2118912 - DNA, 25 bp, Homo sapien
caaggcagggatcgaacgagtgtct

SEQ ID NO: 2118913 - DNA, 25 bp, Homo sapien
gcaaggcagggatcgaacgagtgtc

SEQ ID NO: 2118914 - DNA, 25 bp, Homo sapien
gcagtcgctcggtgaataaaaaggc

SEQ ID NO: 2118915 - DNA, 25 bp, Homo sapien
gcatctgttattggtcggcgggtat

SEQ ID NO: 2118916 - DNA, 25 bp, Homo sapien
ctctgattggcggtcgcggctagca

SEQ ID NO: 2118917 - DNA, 25 bp, Homo sapien
gaacgtgctactgcggcatctgtta

SEQ ID NO: 2118918 - DNA, 25 bp, Homo sapien
catgcttaatttgatgatgagtgat

SEQ ID NO: 2118919 - DNA, 25 bp, Homo sapien
tgtgtcccgaatgtccaatggcttg

SEQ ID NO: 2118920 - DNA, 25 bp, Homo sapien
gcttgcagttcaaataaagcttgta

SEQ ID NO: 2118921 - DNA, 25 bp, Homo sapien
tgatgatgagtgattgtgtcccgaa

SEQ ID NO: 2118922 - DNA, 25 bp, Homo sapien
tctttcatcttgtcggagtggatga

SEQ ID NO: 2118923 - DNA, 25 bp, Homo sapien
ggtgggttttcctggcccatgattg

SEQ ID NO: 2118924 - DNA, 25 bp, Homo sapien
gagcagttcctttcctgcagtttgg

SEQ ID NO: 2118925 - DNA, 25 bp, Homo sapien
tcggagtggatgaggggccgcgtgg

SEQ ID NO: 2118926 - DNA, 25 bp, Homo sapien
gctttatacattggattgttgctta

SEQ ID NO: 2118927 - DNA, 25 bp, Homo sapien
agcacctggggcctttgctttatac

SEQ ID NO: 2118928 - DNA, 25 bp, Homo sapien
tatacattggattgttgcttaagat

SEQ ID NO: 2118929 - DNA, 25 bp, Homo sapien
tctggtctagagcacctggggcctt

SEQ ID NO: 2118930 - DNA, 25 bp, Homo sapien
cagttaggttgggtcagcaggcact

SEQ ID NO: 2118931 - DNA, 25 bp, Homo sapien
cccgcagatgaaggaaagtagcctg

SEQ ID NO: 2118932 - DNA, 25 bp, Homo sapien
ctgggaggcataagcaaaagggcct

SEQ ID NO: 2118933 - DNA, 25 bp, Homo sapien
cctgaagtggttgggcaaaaactga

SEQ ID NO: 2118934 - DNA, 25 bp, Homo sapien
tgacttagccaggagcagcttaagc

SEQ ID NO: 2118935 - DNA, 25 bp, Homo sapien
gggaggcccccatgactttgtcctc

SEQ ID NO: 2118936 - DNA, 25 bp, Homo sapien
gcttaagcctggttagggcctctgg

SEQ ID NO: 2118937 - DNA, 25 bp, Homo sapien
ggctgcattttgatgcctctctgac

SEQ ID NO: 2118938 - DNA, 25 bp, Homo sapien
tccttgagacaccagtgagcttgct

SEQ ID NO: 2118939 - DNA, 25 bp, Homo sapien
ttgagacaccagtgagcttgctgtg

SEQ ID NO: 2118940 - DNA, 25 bp, Homo sapien
tagccgccgtccttgagacaccagt

SEQ ID NO: 2118941 - DNA, 25 bp, Homo sapien
gccgtccttgagacaccagtgagct

SEQ ID NO: 2118942 - DNA, 25 bp, Homo sapien
caaactgactgaaggcgaggtccgg

SEQ ID NO: 2118943 - DNA, 25 bp, Homo sapien
agagacagagcctgccggttggcat

SEQ ID NO: 2118944 - DNA, 25 bp, Homo sapien
tctccctgccaagacctctaggagc

SEQ ID NO: 2118945 - DNA, 25 bp, Homo sapien
ccggttggcatggaacaaactgact

SEQ ID NO: 2118946 - DNA, 25 bp, Homo sapien
cagccatttctagaacaacccattc

SEQ ID NO: 2118947 - DNA, 25 bp, Homo sapien
tggacacagccatttctagaacaac

SEQ ID NO: 2118948 - DNA, 25 bp, Homo sapien
ccattctgggtttggtctcctagac

SEQ ID NO: 2118949 - DNA, 25 bp, Homo sapien
ccctcatgtatggacacagccattt

SEQ ID NO: 2118950 - DNA, 25 bp, Homo sapien
gcaggcccaccaaacagaaggttta

SEQ ID NO: 2118951 - DNA, 25 bp, Homo sapien
actggagaaaggcttagcaggccca

SEQ ID NO: 2118952 - DNA, 25 bp, Homo sapien
gcttagcaggcccaccaaacagaag

SEQ ID NO: 2118953 - DNA, 25 bp, Homo sapien
agaaaggcttagcaggcccaccaaa

SEQ ID NO: 2118954 - DNA, 25 bp, Homo sapien
agttttcttctttttgcttagcatt

SEQ ID NO: 2118955 - DNA, 25 bp, Homo sapien
gttttcttctttttgcttagcattg

SEQ ID NO: 2118956 - DNA, 25 bp, Homo sapien
ttttcttctttttgcttagcattgt

SEQ ID NO: 2118957 - DNA, 25 bp, Homo sapien
acacagaattgctggccaatcttgc

SEQ ID NO: 2118958 - DNA, 25 bp, Homo sapien
tgcctcagatgacacaccagacaca

SEQ ID NO: 2118959 - DNA, 25 bp, Homo sapien
agacacacagaattgctggccaatc

SEQ ID NO: 2118960 - DNA, 25 bp, Homo sapien
aaatgcctcagatgacacaccagac

SEQ ID NO: 2118961 - DNA, 25 bp, Homo sapien
ttttccagtgaggttcgctgctcca

SEQ ID NO: 2118962 - DNA, 25 bp, Homo sapien
ggccaggttttccagtgaggttcgc

SEQ ID NO: 2118963 - DNA, 25 bp, Homo sapien
ctctacatctgtgactggtgggcca

SEQ ID NO: 2118964 - DNA, 25 bp, Homo sapien
gaggttcgctgctccatcagctctg

SEQ ID NO: 2118965 - DNA, 25 bp, Homo sapien
gattgcctggttctcgattaacatg

SEQ ID NO: 2118966 - DNA, 25 bp, Homo sapien
cctggattgcctggttctcgattaa

SEQ ID NO: 2118967 - DNA, 25 bp, Homo sapien
ctggttctcgattaacatgctgtct

SEQ ID NO: 2118968 - DNA, 25 bp, Homo sapien
tgcctggttctcgattaacatgctg

SEQ ID NO: 2118969 - DNA, 25 bp, Homo sapien
atagtcaggcctaccaaacccagag

SEQ ID NO: 2118970 - DNA, 25 bp, Homo sapien
gctgaagctatagtcaggcctacca

SEQ ID NO: 2118971 - DNA, 25 bp, Homo sapien
tcaggcctaccaaacccagaggcat

SEQ ID NO: 2118972 - DNA, 25 bp, Homo sapien
gagatctgctgaagctatagtcagg

SEQ ID NO: 2118973 - DNA, 25 bp, Homo sapien
cggaagccgccaagtcactgaagct

SEQ ID NO: 2118974 - DNA, 25 bp, Homo sapien
ccgttttagggctatcataggatag

SEQ ID NO: 2118975 - DNA, 25 bp, Homo sapien
gattgactgactctcggaagccgcc

SEQ ID NO: 2118976 - DNA, 25 bp, Homo sapien
tctctcagagctacttctatttccg

SEQ ID NO: 2118977 - DNA, 25 bp, Homo sapien
atttgctgcctttctgggtctccat

SEQ ID NO: 2118978 - DNA, 25 bp, Homo sapien
catttgctgcctttctgggtctcca

SEQ ID NO: 2118979 - DNA, 25 bp, Homo sapien
gaaggcccagcatacttcagatact

SEQ ID NO: 2118980 - DNA, 25 bp, Homo sapien
tcccaagatattccctgagcaatgg

SEQ ID NO: 2118981 - DNA, 25 bp, Homo sapien
tacatgagtatacccttccctctca

SEQ ID NO: 2118982 - DNA, 25 bp, Homo sapien
tcttcttgactaatttcagcccttt

SEQ ID NO: 2118983 - DNA, 25 bp, Homo sapien
cactgccaagtgaatcagataggcc

SEQ ID NO: 2118984 - DNA, 25 bp, Homo sapien
ttttgagcagctgataccattccac

SEQ ID NO: 2118985 - DNA, 25 bp, Homo sapien
ggcaattcgaagttttttgagcagc

SEQ ID NO: 2118986 - DNA, 25 bp, Homo sapien
gataggccctgtctaccatccttct

SEQ ID NO: 2118987 - DNA, 25 bp, Homo sapien
gcgttccaggaaggtaggagccaaa

SEQ ID NO: 2118988 - DNA, 25 bp, Homo sapien
aaagaaatcactggcttcggtcttg

SEQ ID NO: 2118989 - DNA, 25 bp, Homo sapien
cagagcttatttccaacctggtggc

SEQ ID NO: 2118990 - DNA, 25 bp, Homo sapien
cttgtgtggcatcatttccctcaga

SEQ ID NO: 2118991 - DNA, 25 bp, Homo sapien
cactgagtaactgatcctggttggt

SEQ ID NO: 2118992 - DNA, 25 bp, Homo sapien
tgtccacggtgacttaggagtgctg

SEQ ID NO: 2118993 - DNA, 25 bp, Homo sapien
gaagctctactttttaggccaagtg

SEQ ID NO: 2118994 - DNA, 25 bp, Homo sapien
cacagctgaaccatcaccagggact

SEQ ID NO: 2118995 - DNA, 25 bp, Homo sapien
tctagtgttagccaagtgggttctg

SEQ ID NO: 2118996 - DNA, 25 bp, Homo sapien
cacattctagtgttagccaagtggg

SEQ ID NO: 2118997 - DNA, 25 bp, Homo sapien
tgttagccaagtgggttctgtactg

SEQ ID NO: 2118998 - DNA, 25 bp, Homo sapien
tagttcacattctagtgttagccaa

SEQ ID NO: 2118999 - DNA, 25 bp, Homo sapien
gctactcatgcctttagcagggaag

SEQ ID NO: 2119000 - DNA, 25 bp, Homo sapien
tccattggctttgggctagggcttg

SEQ ID NO: 2119001 - DNA, 25 bp, Homo sapien
ggctgagcacatccacaagcctcgg

SEQ ID NO: 2119002 - DNA, 25 bp, Homo sapien
caggtggagtggtatcttcttcctc

SEQ ID NO: 2119003 - DNA, 25 bp, Homo sapien
catcaacagggacttcacacttatc

SEQ ID NO: 2119004 - DNA, 25 bp, Homo sapien
tcaacagggacttcacacttatcat

SEQ ID NO: 2119005 - DNA, 25 bp, Homo sapien
ctgtggtctgcatgcatggagaatt

SEQ ID NO: 2119006 - DNA, 25 bp, Homo sapien
tctgtggtctgcatgcatggagaat

SEQ ID NO: 2119007 - DNA, 25 bp, Homo sapien
ccagtgtgctggaggcctgatgtcc

SEQ ID NO: 2119008 - DNA, 25 bp, Homo sapien
tcgtgctgagaggtacaactgctcc

SEQ ID NO: 2119009 - DNA, 25 bp, Homo sapien
aattccaggcgggtgaaatgctctg

SEQ ID NO: 2119010 - DNA, 25 bp, Homo sapien
taggtcaatgtagccttcggatcac

SEQ ID NO: 2119011 - DNA, 25 bp, Homo sapien
gcggcatgctgcaaaccaaaactag

SEQ ID NO: 2119012 - DNA, 25 bp, Homo sapien
gctgtgagcccgctctacctggcga

SEQ ID NO: 2119013 - DNA, 25 bp, Homo sapien
cacaagacaaggaaggcgcgcacat

SEQ ID NO: 2119014 - DNA, 25 bp, Homo sapien
gcaaagtaatccccaccgctgctgt

SEQ ID NO: 2119015 - DNA, 25 bp, Homo sapien
ccaccaagccgcctaccgccgcggt

SEQ ID NO: 2119016 - DNA, 25 bp, Homo sapien
tgccgccgccctgtcccagctgaac

SEQ ID NO: 2119017 - DNA, 25 bp, Homo sapien
cctaccgccgcggttgctgctgccg

SEQ ID NO: 2119018 - DNA, 25 bp, Homo sapien
agctgaactcctcctccgacatagt

SEQ ID NO: 2119019 - DNA, 25 bp, Homo sapien
cttatctgcactctccgattcttta

SEQ ID NO: 2119020 - DNA, 25 bp, Homo sapien
gaccttatctgcactctccgattct

SEQ ID NO: 2119021 - DNA, 25 bp, Homo sapien
tctgcactctccgattctttaaaaa

SEQ ID NO: 2119022 - DNA, 25 bp, Homo sapien
tgcactctccgattctttaaaaagc

SEQ ID NO: 2119023 - DNA, 25 bp, Homo sapien
gataataaagctcaatccaagcctc

SEQ ID NO: 2119024 - DNA, 25 bp, Homo sapien
taataaagctcaatccaagcctctt

SEQ ID NO: 2119025 - DNA, 25 bp, Homo sapien
aataaagctcaatccaagcctctta

SEQ ID NO: 2119026 - DNA, 25 bp, Homo sapien
ataataaagctcaatccaagcctct

SEQ ID NO: 2119027 - DNA, 25 bp, Homo sapien
ttattcctttgacatggctactttt

SEQ ID NO: 2119028 - DNA, 25 bp, Homo sapien
tgacatggctacttttaattcacat

SEQ ID NO: 2119029 - DNA, 25 bp, Homo sapien
cctttgacatggctacttttaattc

SEQ ID NO: 2119030 - DNA, 25 bp, Homo sapien
acatggctacttttaattcacattt

SEQ ID NO: 2119031 - DNA, 25 bp, Homo sapien
tcttcctgcaaatcctcctctagat

SEQ ID NO: 2119032 - DNA, 25 bp, Homo sapien
tctagatccccactattgctgttgc

SEQ ID NO: 2119033 - DNA, 25 bp, Homo sapien
cctcctctagatccccactattgct

SEQ ID NO: 2119034 - DNA, 25 bp, Homo sapien
caccacctcttccacgagctcttcc

SEQ ID NO: 2119035 - DNA, 25 bp, Homo sapien
tgacactgtcacactagcacactag

SEQ ID NO: 2119036 - DNA, 25 bp, Homo sapien
tcaccacttgttggggataagctgc

SEQ ID NO: 2119037 - DNA, 25 bp, Homo sapien
tctgctgctataatcacaatatcca

SEQ ID NO: 2119038 - DNA, 25 bp, Homo sapien
gatcatctcccctggataccttccc

SEQ ID NO: 2119039 - DNA, 25 bp, Homo sapien
attggattaactgtcctgggctgtc

SEQ ID NO: 2119040 - DNA, 25 bp, Homo sapien
gaggggagttgatatttcatagaaa

SEQ ID NO: 2119041 - DNA, 25 bp, Homo sapien
ggaggggagttgatatttcatagaa

SEQ ID NO: 2119042 - DNA, 25 bp, Homo sapien
aggggagttgatatttcatagaaat

SEQ ID NO: 2119043 - DNA, 25 bp, Homo sapien
tttctagagctaagcagtttgtggc

SEQ ID NO: 2119044 - DNA, 25 bp, Homo sapien
aatttctagagctaagcagtttgtg

SEQ ID NO: 2119045 - DNA, 25 bp, Homo sapien
atttctagagctaagcagtttgtgg

SEQ ID NO: 2119046 - DNA, 25 bp, Homo sapien
ttctagagctaagcagtttgtggct

SEQ ID NO: 2119047 - DNA, 25 bp, Homo sapien
aggcggtagagccatcaccagcctc

SEQ ID NO: 2119048 - DNA, 25 bp, Homo sapien
agcaggcggtagagccatcaccagc

SEQ ID NO: 2119049 - DNA, 25 bp, Homo sapien
cctgctggagaagggccaccagcct

SEQ ID NO: 2119050 - DNA, 25 bp, Homo sapien
tgctggagaagggccaccagcctat

SEQ ID NO: 2119051 - DNA, 25 bp, Homo sapien
gacatggacagtatgacagacagca

SEQ ID NO: 2119052 - DNA, 25 bp, Homo sapien
ccagagagcaaaccgagatgggacc

SEQ ID NO: 2119053 - DNA, 25 bp, Homo sapien
gagatgggaccaagcgaagttcctg

SEQ ID NO: 2119054 - DNA, 25 bp, Homo sapien
gattcattgacaggttgtggtgaca

SEQ ID NO: 2119055 - DNA, 25 bp, Homo sapien
caggcctgaggaactatggctggtc

SEQ ID NO: 2119056 - DNA, 25 bp, Homo sapien
gaagactgtttggaacaggcctgag

SEQ ID NO: 2119057 - DNA, 25 bp, Homo sapien
ctgaggaactatggctggtcaaggc

SEQ ID NO: 2119058 - DNA, 25 bp, Homo sapien
caggtgggcctgaagtgggcttgct

SEQ ID NO: 2119059 - DNA, 25 bp, Homo sapien
ggaaaaggggagtagagtgacatgt

SEQ ID NO: 2119060 - DNA, 25 bp, Homo sapien
aaggaaaaggggagtagagtgacat

SEQ ID NO: 2119061 - DNA, 25 bp, Homo sapien
taaggaaaaggggagtagagtgaca

SEQ ID NO: 2119062 - DNA, 25 bp, Homo sapien
gaaaaggggagtagagtgacatgtc

SEQ ID NO: 2119063 - DNA, 25 bp, Homo sapien
cacgttggcaggtttctcgtttttg

SEQ ID NO: 2119064 - DNA, 25 bp, Homo sapien
tgcatctttgtccacgttggcaggt

SEQ ID NO: 2119065 - DNA, 25 bp, Homo sapien
tgtccacgttggcaggtttctcgtt

SEQ ID NO: 2119066 - DNA, 25 bp, Homo sapien
tctttgtccacgttggcaggtttct

SEQ ID NO: 2119067 - DNA, 25 bp, Homo sapien
gtttttatgtgctccgtttctgatc

SEQ ID NO: 2119068 - DNA, 25 bp, Homo sapien
tctgcagtggctatttcaaaccttg

SEQ ID NO: 2119069 - DNA, 25 bp, Homo sapien
gggtggctatacattcctgggtgac

SEQ ID NO: 2119070 - DNA, 25 bp, Homo sapien
tcaggtgcagtgaagttaagtaggc

SEQ ID NO: 2119071 - DNA, 25 bp, Homo sapien
tctaggtcagacagctaggaagcag

SEQ ID NO: 2119072 - DNA, 25 bp, Homo sapien
gatgtgaggtcataatggactcttg

SEQ ID NO: 2119073 - DNA, 25 bp, Homo sapien
caagccctataaaacatgtcttctc

SEQ ID NO: 2119074 - DNA, 25 bp, Homo sapien
gtatttgatggtggcatagaaactt

SEQ ID NO: 2119075 - DNA, 25 bp, Homo sapien
gatactgacagtctttgccttcccc

SEQ ID NO: 2119076 - DNA, 25 bp, Homo sapien
gcttattatgcgggatactttggca

SEQ ID NO: 2119077 - DNA, 25 bp, Homo sapien
cttattatgcgggatactttggcag

SEQ ID NO: 2119078 - DNA, 25 bp, Homo sapien
attatgcgggatactttggcagtga

SEQ ID NO: 2119079 - DNA, 25 bp, Homo sapien
tattatgcgggatactttggcagtg

SEQ ID NO: 2119080 - DNA, 25 bp, Homo sapien
ggacttgccaagtcatcatgctgca

SEQ ID NO: 2119081 - DNA, 25 bp, Homo sapien
gccctcctgagaaataagtcgttag

SEQ ID NO: 2119082 - DNA, 25 bp, Homo sapien
caaggtatatgtggactgaggcaca

SEQ ID NO: 2119083 - DNA, 25 bp, Homo sapien
tataggatggaaagcccaccaagcc

SEQ ID NO: 2119084 - DNA, 25 bp, Homo sapien
taaaccacggacctggctctacgtg

SEQ ID NO: 2119085 - DNA, 25 bp, Homo sapien
gccattattgcccaaaaagaggact

SEQ ID NO: 2119086 - DNA, 25 bp, Homo sapien
tactcagggttcaagctaaaccacg

SEQ ID NO: 2119087 - DNA, 25 bp, Homo sapien
gctctacgtggtttgcttggtctag

SEQ ID NO: 2119088 - DNA, 25 bp, Homo sapien
ttaactggttcccaccaggtagtgc

SEQ ID NO: 2119089 - DNA, 25 bp, Homo sapien
aggtagtgcccaccaataccataaa

SEQ ID NO: 2119090 - DNA, 25 bp, Homo sapien
tgtactgtgccgtatttaccacctg

SEQ ID NO: 2119091 - DNA, 25 bp, Homo sapien
cagggtcttgccttagcttgtactg

SEQ ID NO: 2119092 - DNA, 25 bp, Homo sapien
agcttgtactgtgccgtatttacca

SEQ ID NO: 2119093 - DNA, 25 bp, Homo sapien
ttagcttgtactgtgccgtatttac

SEQ ID NO: 2119094 - DNA, 25 bp, Homo sapien
ggcctttctctgtggaggataacca

SEQ ID NO: 2119095 - DNA, 25 bp, Homo sapien
ttctctgtggaggataaccacatcc

SEQ ID NO: 2119096 - DNA, 25 bp, Homo sapien
ggaggataaccacatcccgtgtaaa

SEQ ID NO: 2119097 - DNA, 25 bp, Homo sapien
cacatcccgtgtaaaagccagccag

SEQ ID NO: 2119098 - DNA, 25 bp, Homo sapien
cagctccacggcatgcctgtgaggg

SEQ ID NO: 2119099 - DNA, 25 bp, Homo sapien
ccacggcatgcctgtgagggtttgt

SEQ ID NO: 2119100 - DNA, 25 bp, Homo sapien
tccagccactaaccttccccaggga

SEQ ID NO: 2119101 - DNA, 25 bp, Homo sapien
agaaccccactctcgctccagctcc

SEQ ID NO: 2119102 - DNA, 25 bp, Homo sapien
cccacattgctctgcctcctgcgga

SEQ ID NO: 2119103 - DNA, 25 bp, Homo sapien
cacattgctctgcctcctgcggagt

SEQ ID NO: 2119104 - DNA, 25 bp, Homo sapien
cattgctctgcctcctgcggagtta

SEQ ID NO: 2119105 - DNA, 25 bp, Homo sapien
attgctctgcctcctgcggagttac

SEQ ID NO: 2119106 - DNA, 25 bp, Homo sapien
agccttctttgacgcgtctttcctg

SEQ ID NO: 2119107 - DNA, 25 bp, Homo sapien
cttctttgacgcgtctttcctgtgg

SEQ ID NO: 2119108 - DNA, 25 bp, Homo sapien
ttctttgacgcgtctttcctgtggg

SEQ ID NO: 2119109 - DNA, 25 bp, Homo sapien
ctttgacgcgtctttcctgtggggg

SEQ ID NO: 2119110 - DNA, 25 bp, Homo sapien
gaacggctacggtcaaagtgtcgcg

SEQ ID NO: 2119111 - DNA, 25 bp, Homo sapien
gagtagcactgagatcttccggtgg

SEQ ID NO: 2119112 - DNA, 25 bp, Homo sapien
aagactcggccaaacgttgaacctg

SEQ ID NO: 2119113 - DNA, 25 bp, Homo sapien
cgataggagctttcgccgaggatca

SEQ ID NO: 2119114 - DNA, 25 bp, Homo sapien
gagtaagatgctaataaccagggtg

SEQ ID NO: 2119115 - DNA, 25 bp, Homo sapien
taacatgtaccagtcagtaggaaga

SEQ ID NO: 2119116 - DNA, 25 bp, Homo sapien
tctctagcaagttggtcttcaaagg

SEQ ID NO: 2119117 - DNA, 25 bp, Homo sapien
ggaaactagttagcacttggctcaa

SEQ ID NO: 2119118 - DNA, 25 bp, Homo sapien
aacaagcatttggtccctgcaaggg

SEQ ID NO: 2119119 - DNA, 25 bp, Homo sapien
cctgcaagggtgactccttggagaa

SEQ ID NO: 2119120 - DNA, 25 bp, Homo sapien
cagtgtacagattgtctcaaatcaa

SEQ ID NO: 2119121 - DNA, 25 bp, Homo sapien
tcctgggtcaactggaacaagttac

SEQ ID NO: 2119122 - DNA, 25 bp, Homo sapien
caaaagcttcgaggttgagaggccc

SEQ ID NO: 2119123 - DNA, 25 bp, Homo sapien
actcgatctgaactaccgtcactgc

SEQ ID NO: 2119124 - DNA, 25 bp, Homo sapien
ttctgtccaatcaccacaagcctta

SEQ ID NO: 2119125 - DNA, 25 bp, Homo sapien
catgttgctcaatggcctctctgac

SEQ ID NO: 2119126 - DNA, 25 bp, Homo sapien
aaataatgccaggataactggctag

SEQ ID NO: 2119127 - DNA, 25 bp, Homo sapien
gcatgatactgcgacaaatacaaat

SEQ ID NO: 2119128 - DNA, 25 bp, Homo sapien
aggaaaatgttgagattagaactaa

SEQ ID NO: 2119129 - DNA, 25 bp, Homo sapien
cagggctactgtaagcaaaagagca

SEQ ID NO: 2119130 - DNA, 25 bp, Homo sapien
cccggcccaattggccagcctcagg

SEQ ID NO: 2119131 - DNA, 25 bp, Homo sapien
ggctccccattaggccccaggtgtc

SEQ ID NO: 2119132 - DNA, 25 bp, Homo sapien
ttcctggctccccattaggccccag

SEQ ID NO: 2119133 - DNA, 25 bp, Homo sapien
aatgccctccccatcattggctgcc

SEQ ID NO: 2119134 - DNA, 25 bp, Homo sapien
cccttccacctgagtcctgcaccca

SEQ ID NO: 2119135 - DNA, 25 bp, Homo sapien
tgggcttattgacaaagctcccatg

SEQ ID NO: 2119136 - DNA, 25 bp, Homo sapien
acaaagctcccatggcgggtccact

SEQ ID NO: 2119137 - DNA, 25 bp, Homo sapien
cttccacctgagtcctgcacccacc

SEQ ID NO: 2119138 - DNA, 25 bp, Homo sapien
caagtaggaaaccccaggtctcgtg

SEQ ID NO: 2119139 - DNA, 25 bp, Homo sapien
cagcctcacacacaaaactgatggc

SEQ ID NO: 2119140 - DNA, 25 bp, Homo sapien
aaactgatggcctccctggtgacct

SEQ ID NO: 2119141 - DNA, 25 bp, Homo sapien
cctgagtccaggtgttgaagtccag

SEQ ID NO: 2119142 - DNA, 25 bp, Homo sapien
tccagggcactcattgactgcagga

SEQ ID NO: 2119143 - DNA, 25 bp, Homo sapien
ctcctccttgtcacccccttggcac

SEQ ID NO: 2119144 - DNA, 25 bp, Homo sapien
tctcctccttgtcacccccttggca

SEQ ID NO: 2119145 - DNA, 25 bp, Homo sapien
ctttctcctccttgtcacccccttg

SEQ ID NO: 2119146 - DNA, 25 bp, Homo sapien
ttctcctccttgtcacccccttggc

SEQ ID NO: 2119147 - DNA, 25 bp, Homo sapien
agatagagctgagtggatggttaca

SEQ ID NO: 2119148 - DNA, 25 bp, Homo sapien
cttcccaagatagagctgagtggat

SEQ ID NO: 2119149 - DNA, 25 bp, Homo sapien
cccaagatagagctgagtggatggt

SEQ ID NO: 2119150 - DNA, 25 bp, Homo sapien
aagatagagctgagtggatggttac

SEQ ID NO: 2119151 - DNA, 25 bp, Homo sapien
tttggcaacgttggcgacatacttg

SEQ ID NO: 2119152 - DNA, 25 bp, Homo sapien
tgcatatggtggttagtgataatct

SEQ ID NO: 2119153 - DNA, 25 bp, Homo sapien
tctgcaaccatgacgttgaggctgc

SEQ ID NO: 2119154 - DNA, 25 bp, Homo sapien
tggtgagagtgattgtcattgcagc

SEQ ID NO: 2119155 - DNA, 25 bp, Homo sapien
ccagaatgtggcatgctttctgact

SEQ ID NO: 2119156 - DNA, 25 bp, Homo sapien
taaagtgcaacttgaaggcctggcc

SEQ ID NO: 2119157 - DNA, 25 bp, Homo sapien
tttaaagtgcaacttgaaggcctgg

SEQ ID NO: 2119158 - DNA, 25 bp, Homo sapien
ttgtttaaagtgcaacttgaaggcc

SEQ ID NO: 2119159 - DNA, 25 bp, Homo sapien
tctgaggtattgtttaaagtgcaac

SEQ ID NO: 2119160 - DNA, 25 bp, Homo sapien
caagctaagccatcaaagccagtca

SEQ ID NO: 2119161 - DNA, 25 bp, Homo sapien
aagctaagccatcaaagccagtcat

SEQ ID NO: 2119162 - DNA, 25 bp, Homo sapien
agctaagccatcaaagccagtcatc

SEQ ID NO: 2119163 - DNA, 25 bp, Homo sapien
aggaagtcattatagtgctgatggc

SEQ ID NO: 2119164 - DNA, 25 bp, Homo sapien
tagatcccaagtggctgggggtctg

SEQ ID NO: 2119165 - DNA, 25 bp, Homo sapien
tcccaagtggctgggggtctgggca

SEQ ID NO: 2119166 - DNA, 25 bp, Homo sapien
aggcagtgtagatcccaagtggctg

SEQ ID NO: 2119167 - DNA, 25 bp, Homo sapien
gatcccaagtggctgggggtctggg

SEQ ID NO: 2119168 - DNA, 25 bp, Homo sapien
tgccgggccttgtctaggttctgca

SEQ ID NO: 2119169 - DNA, 25 bp, Homo sapien
tgacattggagggatcatcaaagag

SEQ ID NO: 2119170 - DNA, 25 bp, Homo sapien
taggttctgcacgttgacattggag

SEQ ID NO: 2119171 - DNA, 25 bp, Homo sapien
cattggagggatcatcaaagagctc

SEQ ID NO: 2119172 - DNA, 25 bp, Homo sapien
gatggcaggattgggggtcccagca

SEQ ID NO: 2119173 - DNA, 25 bp, Homo sapien
ctgccattgatggcaggattggggg

SEQ ID NO: 2119174 - DNA, 25 bp, Homo sapien
ccattgatggcaggattgggggtcc

SEQ ID NO: 2119175 - DNA, 25 bp, Homo sapien
gcaggattgggggtcccagcaccac

SEQ ID NO: 2119176 - DNA, 25 bp, Homo sapien
gtagcagatgcttggactccccact

SEQ ID NO: 2119177 - DNA, 25 bp, Homo sapien
cggtgatcctttgtccgaactacac

SEQ ID NO: 2119178 - DNA, 25 bp, Homo sapien
tgtagacacaattcactgccagcag

SEQ ID NO: 2119179 - DNA, 25 bp, Homo sapien
ggtccaccagtagcagatgcttgga

SEQ ID NO: 2119180 - DNA, 25 bp, Homo sapien
aacatgctgtgtttggtttattgcc

SEQ ID NO: 2119181 - DNA, 25 bp, Homo sapien
tgtgtttggtttattgcccttgcga

SEQ ID NO: 2119182 - DNA, 25 bp, Homo sapien
tgctgtgtttggtttattgcccttg

SEQ ID NO: 2119183 - DNA, 25 bp, Homo sapien
ttaatgctatctctcccccctcctt

SEQ ID NO: 2119184 - DNA, 25 bp, Homo sapien
ccagggtcctgttgcaatgtaaatg

SEQ ID NO: 2119185 - DNA, 25 bp, Homo sapien
gatatagaaccgaacaatttgctca

SEQ ID NO: 2119186 - DNA, 25 bp, Homo sapien
tccagtatgggtcagtgcacctaag

SEQ ID NO: 2119187 - DNA, 25 bp, Homo sapien
gattggcttgctacgtatacactcc

SEQ ID NO: 2119188 - DNA, 25 bp, Homo sapien
cctcaaaccagaccgccgagcctta

SEQ ID NO: 2119189 - DNA, 25 bp, Homo sapien
tagcagcctcaaaccagaccgccga

SEQ ID NO: 2119190 - DNA, 25 bp, Homo sapien
cagcctcaaaccagaccgccgagcc

SEQ ID NO: 2119191 - DNA, 25 bp, Homo sapien
aaccagaccgccgagccttacccat

SEQ ID NO: 2119192 - DNA, 25 bp, Homo sapien
tgaagattatgtatcccacagcaga

SEQ ID NO: 2119193 - DNA, 25 bp, Homo sapien
gatcatagcctcatcggagtgccaa

SEQ ID NO: 2119194 - DNA, 25 bp, Homo sapien
gagactgtccctgatctagccgagc

SEQ ID NO: 2119195 - DNA, 25 bp, Homo sapien
ggagtgccaaggtgcatcctctgga

SEQ ID NO: 2119196 - DNA, 25 bp, Homo sapien
tggcgaaggccatcctaggcccaaa

SEQ ID NO: 2119197 - DNA, 25 bp, Homo sapien
gaggaaatctgatactgagctccct

SEQ ID NO: 2119198 - DNA, 25 bp, Homo sapien
gagtactgcttgcaagagtcccagg

SEQ ID NO: 2119199 - DNA, 25 bp, Homo sapien
gtgaagacactatacagaggacatg

SEQ ID NO: 2119200 - DNA, 25 bp, Homo sapien
caatgaggttcaggatagaacaagg

SEQ ID NO: 2119201 - DNA, 25 bp, Homo sapien
acaatgaggttcaggatagaacaag

SEQ ID NO: 2119202 - DNA, 25 bp, Homo sapien
tgagctttgttttcccgtttgcttg

SEQ ID NO: 2119203 - DNA, 25 bp, Homo sapien
ttgcttggtgcttccctcaacaatg

SEQ ID NO: 2119204 - DNA, 25 bp, Homo sapien
aagggtgtatccacttctgaaattt

SEQ ID NO: 2119205 - DNA, 25 bp, Homo sapien
agggtgtatccacttctgaaatttt

SEQ ID NO: 2119206 - DNA, 25 bp, Homo sapien
aaggggatttagcatgcaagctgtt

SEQ ID NO: 2119207 - DNA, 25 bp, Homo sapien
aggaaaggggatttagcatgcaagc

SEQ ID NO: 2119208 - DNA, 25 bp, Homo sapien
gaaaggggatttagcatgcaagctg

SEQ ID NO: 2119209 - DNA, 25 bp, Homo sapien
gaaggaaaggggatttagcatgcaa

SEQ ID NO: 2119210 - DNA, 25 bp, Homo sapien
aagggaacacatggagattaagggc

SEQ ID NO: 2119211 - DNA, 25 bp, Homo sapien
gaggaaagggaacacatggagatta

SEQ ID NO: 2119212 - DNA, 25 bp, Homo sapien
gaaagggaacacatggagattaagg

SEQ ID NO: 2119213 - DNA, 25 bp, Homo sapien
ggaaagggaacacatggagattaag

SEQ ID NO: 2119214 - DNA, 25 bp, Homo sapien
tctctactcttctccctgttaaact

SEQ ID NO: 2119215 - DNA, 25 bp, Homo sapien
gtctctactcttctccctgttaaac

SEQ ID NO: 2119216 - DNA, 25 bp, Homo sapien
tgtctctactcttctccctgttaaa

SEQ ID NO: 2119217 - DNA, 25 bp, Homo sapien
actggtcgagcaggccatatgatga

SEQ ID NO: 2119218 - DNA, 25 bp, Homo sapien
ggccaaactggtcgagcaggccata

SEQ ID NO: 2119219 - DNA, 25 bp, Homo sapien
gaagcccgtagattatcttggagga

SEQ ID NO: 2119220 - DNA, 25 bp, Homo sapien
tcttgtaactgagtaaggagctgaa

SEQ ID NO: 2119221 - DNA, 25 bp, Homo sapien
agagctggatgctttgtaggaattc

SEQ ID NO: 2119222 - DNA, 25 bp, Homo sapien
cagagctggatgctttgtaggaatt

SEQ ID NO: 2119223 - DNA, 25 bp, Homo sapien
ctgggcctgcttatgtaggagtggc

SEQ ID NO: 2119224 - DNA, 25 bp, Homo sapien
gttgttgaatgtcttgatgggctcc

SEQ ID NO: 2119225 - DNA, 25 bp, Homo sapien
ttgttgaatgtcttgatgggctcct

SEQ ID NO: 2119226 - DNA, 25 bp, Homo sapien
gcctgcaaagctcttgaatatgttc

SEQ ID NO: 2119227 - DNA, 25 bp, Homo sapien
tcagcatcctgtcctgctactccag

SEQ ID NO: 2119228 - DNA, 25 bp, Homo sapien
tcttgaatatgttcatgttgctcca

SEQ ID NO: 2119229 - DNA, 25 bp, Homo sapien
aagctcttgaatatgttcatgttgc

SEQ ID NO: 2119230 - DNA, 25 bp, Homo sapien
tacatgtttttagcgttggcccagc

SEQ ID NO: 2119231 - DNA, 25 bp, Homo sapien
ttccatctctgcacacttgttgatc

SEQ ID NO: 2119232 - DNA, 25 bp, Homo sapien
gctgttgttcctgaacagaaccaca

SEQ ID NO: 2119233 - DNA, 25 bp, Homo sapien
tatgttaaagatatgggactgcagc

SEQ ID NO: 2119234 - DNA, 25 bp, Homo sapien
tcaacacaaatcatccctctgcttc

SEQ ID NO: 2119235 - DNA, 25 bp, Homo sapien
agccagtgtctgcagcttctcatac

SEQ ID NO: 2119236 - DNA, 25 bp, Homo sapien
cccagccagtgtctgcagcttctca

SEQ ID NO: 2119237 - DNA, 25 bp, Homo sapien
cctctgcttcccagccagtgtctgc

SEQ ID NO: 2119238 - DNA, 25 bp, Homo sapien
gattgactctcatcagttcctgata

SEQ ID NO: 2119239 - DNA, 25 bp, Homo sapien
caccagcttggtgtaggcattctta

SEQ ID NO: 2119240 - DNA, 25 bp, Homo sapien
tcctgataattatgcagctcccatg

SEQ ID NO: 2119241 - DNA, 25 bp, Homo sapien
cagaagcttcctgtatgtggcagtc

SEQ ID NO: 2119242 - DNA, 25 bp, Homo sapien
gtagtcttcatatggataataatgt

SEQ ID NO: 2119243 - DNA, 25 bp, Homo sapien
tagtcttcatatggataataatgtt

SEQ ID NO: 2119244 - DNA, 25 bp, Homo sapien
accatggccctataggagctggtac

SEQ ID NO: 2119245 - DNA, 25 bp, Homo sapien
cagaggactcgaacattggcttccc

SEQ ID NO: 2119246 - DNA, 25 bp, Homo sapien
caggccattgttaaagccagagctt

SEQ ID NO: 2119247 - DNA, 25 bp, Homo sapien
attggcttcccatcataggtcttga

SEQ ID NO: 2119248 - DNA, 25 bp, Homo sapien
gatggatctcctgttccctatgctc

SEQ ID NO: 2119249 - DNA, 25 bp, Homo sapien
ggggtactccatgcaataaactgcc

SEQ ID NO: 2119250 - DNA, 25 bp, Homo sapien
taaactgcccacaagggtgggctga

SEQ ID NO: 2119251 - DNA, 25 bp, Homo sapien
cctatgctcccctgtactgcagcat

SEQ ID NO: 2119252 - DNA, 25 bp, Homo sapien
tctatggggtgatctcaatggagac

SEQ ID NO: 2119253 - DNA, 25 bp, Homo sapien
tattcttataatgaaaacgctagct

SEQ ID NO: 2119254 - DNA, 25 bp, Homo sapien
gcatgttcgtatctcttcagagatt

SEQ ID NO: 2119255 - DNA, 25 bp, Homo sapien
aacagtttgaatatgtcttgatgga

SEQ ID NO: 2119256 - DNA, 25 bp, Homo sapien
atgtccaagatagtccccactgtca

SEQ ID NO: 2119257 - DNA, 25 bp, Homo sapien
aatgcatctgaatcttgtaccccca

SEQ ID NO: 2119258 - DNA, 25 bp, Homo sapien
caagatagtccccactgtcattgac

SEQ ID NO: 2119259 - DNA, 25 bp, Homo sapien
tagtccccactgtcattgacatagg

SEQ ID NO: 2119260 - DNA, 25 bp, Homo sapien
aggagagcactgtccctttagactt

SEQ ID NO: 2119261 - DNA, 25 bp, Homo sapien
aaataaagtggggacagatgagtca

SEQ ID NO: 2119262 - DNA, 25 bp, Homo sapien
gaatctagacgtaaaagaagctgag

SEQ ID NO: 2119263 - DNA, 25 bp, Homo sapien
gaggtttgaaggagagcactgtccc

SEQ ID NO: 2119264 - DNA, 25 bp, Homo sapien
tccagtgactgggttacattggtct

SEQ ID NO: 2119265 - DNA, 25 bp, Homo sapien
gttacattggtctgctttgtcgtca

SEQ ID NO: 2119266 - DNA, 25 bp, Homo sapien
tacagagttgaatatccagtgactg

SEQ ID NO: 2119267 - DNA, 25 bp, Homo sapien
ttggtctgctttgtcgtcatcctct

SEQ ID NO: 2119268 - DNA, 25 bp, Homo sapien
gagaaggtcttccaacggttgtcac

SEQ ID NO: 2119269 - DNA, 25 bp, Homo sapien
tgaggactgccattccgaggacctt

SEQ ID NO: 2119270 - DNA, 25 bp, Homo sapien
cctcatgggagagcaagggatgccc

SEQ ID NO: 2119271 - DNA, 25 bp, Homo sapien
cttgagaagctgacacccattggtg

SEQ ID NO: 2119272 - DNA, 25 bp, Homo sapien
tgcttttagccttagccatgtttta

SEQ ID NO: 2119273 - DNA, 25 bp, Homo sapien
ctgcttttagccttagccatgtttt

SEQ ID NO: 2119274 - DNA, 25 bp, Homo sapien
ttggtagtctattaattattgtcgc

SEQ ID NO: 2119275 - DNA, 25 bp, Homo sapien
ggtagtctattaattattgtcgcaa

SEQ ID NO: 2119276 - DNA, 25 bp, Homo sapien
gagtgataccagctcccccttgtac

SEQ ID NO: 2119277 - DNA, 25 bp, Homo sapien
agaaggagtgataccagctccccct

SEQ ID NO: 2119278 - DNA, 25 bp, Homo sapien
ctaggcaagcttggctaggcaaggt

SEQ ID NO: 2119279 - DNA, 25 bp, Homo sapien
cacaaaggaccgtattgcaaaggtc

SEQ ID NO: 2119280 - DNA, 25 bp, Homo sapien
tagccccgcttacaggctgctgtgg

SEQ ID NO: 2119281 - DNA, 25 bp, Homo sapien
gaagccgctggtatgcttgaagcag

SEQ ID NO: 2119282 - DNA, 25 bp, Homo sapien
cagtttgagagatacttatattaga

SEQ ID NO: 2119283 - DNA, 25 bp, Homo sapien
gaagttaatccacagtttgagagat

SEQ ID NO: 2119284 - DNA, 25 bp, Homo sapien
gtatatacaattcacatatgggaga

SEQ ID NO: 2119285 - DNA, 25 bp, Homo sapien
tcagtgtaattagcacacccatcag

SEQ ID NO: 2119286 - DNA, 25 bp, Homo sapien
tcatgagacttttaaatactatctt

SEQ ID NO: 2119287 - DNA, 25 bp, Homo sapien
tatcatgagacttttaaatactatc

SEQ ID NO: 2119288 - DNA, 25 bp, Homo sapien
tttgtatatcaatggtatgcttttc

SEQ ID NO: 2119289 - DNA, 25 bp, Homo sapien
gttatcatgagacttttaaatacta

SEQ ID NO: 2119290 - DNA, 25 bp, Homo sapien
gcatctcggttccattcagaaggtg

SEQ ID NO: 2119291 - DNA, 25 bp, Homo sapien
acgtgtaactacactgcccaccagg

SEQ ID NO: 2119292 - DNA, 25 bp, Homo sapien
gcattcttcagcaccctgaccatgt

SEQ ID NO: 2119293 - DNA, 25 bp, Homo sapien
caggaggcatctcggttccattcag

SEQ ID NO: 2119294 - DNA, 25 bp, Homo sapien
tgttttacttctaattatgtggtaa

SEQ ID NO: 2119295 - DNA, 25 bp, Homo sapien
tctaattatgtggtaaattttagaa

SEQ ID NO: 2119296 - DNA, 25 bp, Homo sapien
cttctaattatgtggtaaattttag

SEQ ID NO: 2119297 - DNA, 25 bp, Homo sapien
ctaattatgtggtaaattttagaat

SEQ ID NO: 2119298 - DNA, 25 bp, Homo sapien
ctgagtcacctctgaaactgggtga

SEQ ID NO: 2119299 - DNA, 25 bp, Homo sapien
gaacttctccttctttgcacctgtc

SEQ ID NO: 2119300 - DNA, 25 bp, Homo sapien
gatccatggccctagaacttctcct

SEQ ID NO: 2119301 - DNA, 25 bp, Homo sapien
gtttgtcccagcaatggatgatcca

SEQ ID NO: 2119302 - DNA, 25 bp, Homo sapien
ctatcggtgtttccatggcattcat

SEQ ID NO: 2119303 - DNA, 25 bp, Homo sapien
tccaagagagtggtagaggactgct

SEQ ID NO: 2119304 - DNA, 25 bp, Homo sapien
cttgcaaatggagagcctagacttc

SEQ ID NO: 2119305 - DNA, 25 bp, Homo sapien
gaaaatagacctctcccagtgaaga

SEQ ID NO: 2119306 - DNA, 25 bp, Homo sapien
tcaaccagctaggatggaatcagca

SEQ ID NO: 2119307 - DNA, 25 bp, Homo sapien
tcttcttcttgaggggttgcatctc

SEQ ID NO: 2119308 - DNA, 25 bp, Homo sapien
cttcttcttgaggggttgcatctct

SEQ ID NO: 2119309 - DNA, 25 bp, Homo sapien
cttcttgaggggttgcatctctctt

SEQ ID NO: 2119310 - DNA, 25 bp, Homo sapien
tcttcttgaggggttgcatctctct

SEQ ID NO: 2119311 - DNA, 25 bp, Homo sapien
ctcgccttctcagcgtgagcccctg

SEQ ID NO: 2119312 - DNA, 25 bp, Homo sapien
agaacccaaggtggaagatgtcaag

SEQ ID NO: 2119313 - DNA, 25 bp, Homo sapien
ctgagaacccaaggtggaagatgtc

SEQ ID NO: 2119314 - DNA, 25 bp, Homo sapien
ttctcagcgtgagcccctgctttgg

SEQ ID NO: 2119315 - DNA, 25 bp, Homo sapien
tcgccactttcttccttcctatccc

SEQ ID NO: 2119316 - DNA, 25 bp, Homo sapien
cgccactttcttccttcctatcccg

SEQ ID NO: 2119317 - DNA, 25 bp, Homo sapien
gccactttcttccttcctatcccgc

SEQ ID NO: 2119318 - DNA, 25 bp, Homo sapien
ccactttcttccttcctatcccgcg

SEQ ID NO: 2119319 - DNA, 25 bp, Homo sapien
gcattcatggacacgttttttaaaa

SEQ ID NO: 2119320 - DNA, 25 bp, Homo sapien
aagtacttgtgtgccccaaggtgtc

SEQ ID NO: 2119321 - DNA, 25 bp, Homo sapien
ccttgctctttaggagtcgggattt

SEQ ID NO: 2119322 - DNA, 25 bp, Homo sapien
tcaacttcagaacctggagttcggg

SEQ ID NO: 2119323 - DNA, 25 bp, Homo sapien
ctataacaaattgatttaaagtgcg

SEQ ID NO: 2119324 - DNA, 25 bp, Homo sapien
tataacaaattgatttaaagtgcgg

SEQ ID NO: 2119325 - DNA, 25 bp, Homo sapien
caggcagcagctagcacattcaacg

SEQ ID NO: 2119326 - DNA, 25 bp, Homo sapien
catccccaaggcgtaattagcgact

SEQ ID NO: 2119327 - DNA, 25 bp, Homo sapien
gaatgccaaagttactggtccccag

SEQ ID NO: 2119328 - DNA, 25 bp, Homo sapien
attttcccacacacgggccagacga

SEQ ID NO: 2119329 - DNA, 25 bp, Homo sapien
tttcccccagcttttgcagcatctc

SEQ ID NO: 2119330 - DNA, 25 bp, Homo sapien
tcccccagcttttgcagcatctccc

SEQ ID NO: 2119331 - DNA, 25 bp, Homo sapien
tcctttcccccagcttttgcagcat

SEQ ID NO: 2119332 - DNA, 25 bp, Homo sapien
ctttcccccagcttttgcagcatct

SEQ ID NO: 2119333 - DNA, 25 bp, Homo sapien
gacacagcaacaatctgatttctct

SEQ ID NO: 2119334 - DNA, 25 bp, Homo sapien
cagcaacaatctgatttctctatct

SEQ ID NO: 2119335 - DNA, 25 bp, Homo sapien
acagcaacaatctgatttctctatc

SEQ ID NO: 2119336 - DNA, 25 bp, Homo sapien
acacagcaacaatctgatttctcta

SEQ ID NO: 2119337 - DNA, 25 bp, Homo sapien
cagatctatggggttgtaattttct

SEQ ID NO: 2119338 - DNA, 25 bp, Homo sapien
atctatggggttgtaattttcttgg

SEQ ID NO: 2119339 - DNA, 25 bp, Homo sapien
gtcccagatctatggggttgtaatt

SEQ ID NO: 2119340 - DNA, 25 bp, Homo sapien
ctcaatttgtgtcccagatctatgg

SEQ ID NO: 2119341 - DNA, 25 bp, Homo sapien
cagggaactcgttcacttccacaaa

SEQ ID NO: 2119342 - DNA, 25 bp, Homo sapien
tagaaagtgctcaaaaccccacttc

SEQ ID NO: 2119343 - DNA, 25 bp, Homo sapien
gcgccgctgtcggagctcagaccag

SEQ ID NO: 2119344 - DNA, 25 bp, Homo sapien
ctggcgccgctgtcggagctcagac

SEQ ID NO: 2119345 - DNA, 25 bp, Homo sapien
agaccagcaggcctacgacctagaa

SEQ ID NO: 2119346 - DNA, 25 bp, Homo sapien
gttaccagtcccctcagcgatgcga

SEQ ID NO: 2119347 - DNA, 25 bp, Homo sapien
cttggggccgcggtcgcagctgcat

SEQ ID NO: 2119348 - DNA, 25 bp, Homo sapien
ctctggagggaccgccgttaccagt

SEQ ID NO: 2119349 - DNA, 25 bp, Homo sapien
gggccgcggtcgcagctgcatcctc

SEQ ID NO: 2119350 - DNA, 25 bp, Homo sapien
aataaaccaggtttggctgtgtgct

SEQ ID NO: 2119351 - DNA, 25 bp, Homo sapien
gaatatgtaaacttgggatctcttg

SEQ ID NO: 2119352 - DNA, 25 bp, Homo sapien
cgtagatattgagtctcttctgatt

SEQ ID NO: 2119353 - DNA, 25 bp, Homo sapien
tcagaattgagaattggaattcgta

SEQ ID NO: 2119354 - DNA, 25 bp, Homo sapien
cagtggacgcctcagtaggaatcct

SEQ ID NO: 2119355 - DNA, 25 bp, Homo sapien
tggacgcctcagtaggaatcctaca

SEQ ID NO: 2119356 - DNA, 25 bp, Homo sapien
cctcagtaggaatcctacaagccag

SEQ ID NO: 2119357 - DNA, 25 bp, Homo sapien
agactaacagtggacgcctcagtag

SEQ ID NO: 2119358 - DNA, 25 bp, Homo sapien
gtaatcacatcaaagagaatagggc

SEQ ID NO: 2119359 - DNA, 25 bp, Homo sapien
gatcctcccatcttatacttccgag

SEQ ID NO: 2119360 - DNA, 25 bp, Homo sapien
gattaccagtgcttcaaaccaggcc

SEQ ID NO: 2119361 - DNA, 25 bp, Homo sapien
ttcagcctcggccacacaaactggg

SEQ ID NO: 2119362 - DNA, 25 bp, Homo sapien
gctccatcatcagttcatttatgtt

SEQ ID NO: 2119363 - DNA, 25 bp, Homo sapien
ttcagctccatcatcagttcattta

SEQ ID NO: 2119364 - DNA, 25 bp, Homo sapien
atttcattaagctgacttcaatctc

SEQ ID NO: 2119365 - DNA, 25 bp, Homo sapien
tttcattaagctgacttcaatctct

SEQ ID NO: 2119366 - DNA, 25 bp, Homo sapien
caggctctgcaaccaaaaacttggg

SEQ ID NO: 2119367 - DNA, 25 bp, Homo sapien
gaatctcggcttcaacttgtgctgt

SEQ ID NO: 2119368 - DNA, 25 bp, Homo sapien
taaatcaagaaccaatacgaaatgg

SEQ ID NO: 2119369 - DNA, 25 bp, Homo sapien
ctgactgtagtgtggtaagtgctca

SEQ ID NO: 2119370 - DNA, 25 bp, Homo sapien
ccatatagtctagttgtgtaataga

SEQ ID NO: 2119371 - DNA, 25 bp, Homo sapien
aacacttgtctttgggttacaactg

SEQ ID NO: 2119372 - DNA, 25 bp, Homo sapien
gagctaaaccatatcgaggtatatc

SEQ ID NO: 2119373 - DNA, 25 bp, Homo sapien
cagctggagaagtttgcagcctagg

SEQ ID NO: 2119374 - DNA, 25 bp, Homo sapien
attttattgaggatcttcacaacaa

SEQ ID NO: 2119375 - DNA, 25 bp, Homo sapien
tttcaatgtgctgctggatttggtt

SEQ ID NO: 2119376 - DNA, 25 bp, Homo sapien
tattttattgaggatcttcacaaca

SEQ ID NO: 2119377 - DNA, 25 bp, Homo sapien
caatgtgctgctggatttggtttgc

SEQ ID NO: 2119378 - DNA, 25 bp, Homo sapien
gagagcttgattattacattgaaca

SEQ ID NO: 2119379 - DNA, 25 bp, Homo sapien
tttgctgttggaagacaatgatgca

SEQ ID NO: 2119380 - DNA, 25 bp, Homo sapien
tgggtcttcatacgtttctctagct

SEQ ID NO: 2119381 - DNA, 25 bp, Homo sapien
tcatacagcccatcttacagctcag

SEQ ID NO: 2119382 - DNA, 25 bp, Homo sapien
aaggatcattcaagggtaggttatt

SEQ ID NO: 2119383 - DNA, 25 bp, Homo sapien
aggatcattcaagggtaggttattt

SEQ ID NO: 2119384 - DNA, 25 bp, Homo sapien
caaggatcattcaagggtaggttat

SEQ ID NO: 2119385 - DNA, 25 bp, Homo sapien
tgatgtaagtatagctgctcctcct

SEQ ID NO: 2119386 - DNA, 25 bp, Homo sapien
tgtagctttgttagcactctcttcc

SEQ ID NO: 2119387 - DNA, 25 bp, Homo sapien
ggcccatttggtctatactccagat

SEQ ID NO: 2119388 - DNA, 25 bp, Homo sapien
tttgtctacatgatctatccagtgc

SEQ ID NO: 2119389 - DNA, 25 bp, Homo sapien
gcctgcaagggtgccaaataaaaca

SEQ ID NO: 2119390 - DNA, 25 bp, Homo sapien
gaaaacttgtcactaccaggcaagc

SEQ ID NO: 2119391 - DNA, 25 bp, Homo sapien
cacagactggtgacactatcaagaa

SEQ ID NO: 2119392 - DNA, 25 bp, Homo sapien
gaaataagatcccttgaagacaagc

SEQ ID NO: 2119393 - DNA, 25 bp, Homo sapien
gcaaggtattgttctgtcacagagt

SEQ ID NO: 2119394 - DNA, 25 bp, Homo sapien
ggtattgttctgtcacagagtctgg

SEQ ID NO: 2119395 - DNA, 25 bp, Homo sapien
aaggtattgttctgtcacagagtct

SEQ ID NO: 2119396 - DNA, 25 bp, Homo sapien
gtcacagagtctggtgtgcagcagt

SEQ ID NO: 2119397 - DNA, 25 bp, Homo sapien
ttgactaggggttggtcatacatag

SEQ ID NO: 2119398 - DNA, 25 bp, Homo sapien
tttgtttgtatgatgaaccaaactt

SEQ ID NO: 2119399 - DNA, 25 bp, Homo sapien
gtatggtcctttgatgcttaattta

SEQ ID NO: 2119400 - DNA, 25 bp, Homo sapien
tgtagacccaaccttgccttccagg

SEQ ID NO: 2119401 - DNA, 25 bp, Homo sapien
ctaaaacggtcatttcatcttttat

SEQ ID NO: 2119402 - DNA, 25 bp, Homo sapien
tgtgattgtattctgaaattcttga

SEQ ID NO: 2119403 - DNA, 25 bp, Homo sapien
tcaggtcagcttggttttttcctaa

SEQ ID NO: 2119404 - DNA, 25 bp, Homo sapien
ttttctgctctatcaggtcagcttg

SEQ ID NO: 2119405 - DNA, 25 bp, Homo sapien
gaaaggatagatggacatggattcc

SEQ ID NO: 2119406 - DNA, 25 bp, Homo sapien
tggtctgaggcctgacaaacttggc

SEQ ID NO: 2119407 - DNA, 25 bp, Homo sapien
tcagtctttataggaacatttcctg

SEQ ID NO: 2119408 - DNA, 25 bp, Homo sapien
gccatgtagatgtttcccaaattga

SEQ ID NO: 2119409 - DNA, 25 bp, Homo sapien
gctagtgtaaatgaagttacctcca

SEQ ID NO: 2119410 - DNA, 25 bp, Homo sapien
tcagttgctaaagtcagaacaccaa

SEQ ID NO: 2119411 - DNA, 25 bp, Homo sapien
ccaacagaggttgggcaataatttc

SEQ ID NO: 2119412 - DNA, 25 bp, Homo sapien
gaatgtcacccttttggacagtaat

SEQ ID NO: 2119413 - DNA, 25 bp, Homo sapien
tattgattgtggtctcaccttttgc

SEQ ID NO: 2119414 - DNA, 25 bp, Homo sapien
tataattatagctactctgctcgct

SEQ ID NO: 2119415 - DNA, 25 bp, Homo sapien
ccagatgtaagactcacttgagcat

SEQ ID NO: 2119416 - DNA, 25 bp, Homo sapien
tcttccctttcagtctacgtgtgtc

SEQ ID NO: 2119417 - DNA, 25 bp, Homo sapien
tcattctttaatgtggtgcatcaca

SEQ ID NO: 2119418 - DNA, 25 bp, Homo sapien
gcagttttacatttcagctatgaca

SEQ ID NO: 2119419 - DNA, 25 bp, Homo sapien
gtttaccctgtgtttctttctagca

SEQ ID NO: 2119420 - DNA, 25 bp, Homo sapien
ccttgcgtcctagggataaatatca

SEQ ID NO: 2119421 - DNA, 25 bp, Homo sapien
gatcccttgatgttgtgctctttcc

SEQ ID NO: 2119422 - DNA, 25 bp, Homo sapien
acccagcagagctaccagactccag

SEQ ID NO: 2119423 - DNA, 25 bp, Homo sapien
ttctcttttgggtctaggcacccag

SEQ ID NO: 2119424 - DNA, 25 bp, Homo sapien
tggtaatctactgtgatctctcggg

SEQ ID NO: 2119425 - DNA, 25 bp, Homo sapien
tggtgtttcattacacgaatagttc

SEQ ID NO: 2119426 - DNA, 25 bp, Homo sapien
tcccacatctgcgtgagaacataag

SEQ ID NO: 2119427 - DNA, 25 bp, Homo sapien
tgagtctccaattctatacaggttg

SEQ ID NO: 2119428 - DNA, 25 bp, Homo sapien
gactgatgggcaatagagttggctc

SEQ ID NO: 2119429 - DNA, 25 bp, Homo sapien
gtcagatgcatggttcgcaaagttt

SEQ ID NO: 2119430 - DNA, 25 bp, Homo sapien
cagaagatggcgctttcaagacagc

SEQ ID NO: 2119431 - DNA, 25 bp, Homo sapien
tctggataagtactcaggttcctcc

SEQ ID NO: 2119432 - DNA, 25 bp, Homo sapien
gatgggcagggccatagtcttccca

SEQ ID NO: 2119433 - DNA, 25 bp, Homo sapien
ccctagggttattatgtattccaga

SEQ ID NO: 2119434 - DNA, 25 bp, Homo sapien
gctaagacagtgtaatagatgtgtg

SEQ ID NO: 2119435 - DNA, 25 bp, Homo sapien
tattttctccacgtctatagcttgt

SEQ ID NO: 2119436 - DNA, 25 bp, Homo sapien
tcttcattgataaaatacctgttca

SEQ ID NO: 2119437 - DNA, 25 bp, Homo sapien
tagttgttccataacctagccaaca

SEQ ID NO: 2119438 - DNA, 25 bp, Homo sapien
gtatgagttcttatattgcttggca

SEQ ID NO: 2119439 - DNA, 25 bp, Homo sapien
taaatctaagagtggaatggctgaa

SEQ ID NO: 2119440 - DNA, 25 bp, Homo sapien
aatgttggacaatttacaatcccac

SEQ ID NO: 2119441 - DNA, 25 bp, Homo sapien
tctactggcaccttaaccttggaca

SEQ ID NO: 2119442 - DNA, 25 bp, Homo sapien
cattactgtggcaggcattggagaa

SEQ ID NO: 2119443 - DNA, 25 bp, Homo sapien
tttaaactgggaaatgagacctcac

SEQ ID NO: 2119444 - DNA, 25 bp, Homo sapien
tgttctcaatgctctgaccaggaag

SEQ ID NO: 2119445 - DNA, 25 bp, Homo sapien
atcgccacactgtttactgcaatgg

SEQ ID NO: 2119446 - DNA, 25 bp, Homo sapien
ttttgggggcatatacacagtaatg

SEQ ID NO: 2119447 - DNA, 25 bp, Homo sapien
gtttactgcaatggctgaactcacg

SEQ ID NO: 2119448 - DNA, 25 bp, Homo sapien
tggctgaactcacgtacactcacac

SEQ ID NO: 2119449 - DNA, 25 bp, Homo sapien
tctttctacggagttcattgggttc

SEQ ID NO: 2119450 - DNA, 25 bp, Homo sapien
tgtgtcagacaagggtcaaatttta

SEQ ID NO: 2119451 - DNA, 25 bp, Homo sapien
taccctatactattcctggcctgtg

SEQ ID NO: 2119452 - DNA, 25 bp, Homo sapien
aataacattgctcaggcccctatgc

SEQ ID NO: 2119453 - DNA, 25 bp, Homo sapien
ctggtaatcctatatgacaaaatgc

SEQ ID NO: 2119454 - DNA, 25 bp, Homo sapien
atcctatatgacaaaatgctctcat

SEQ ID NO: 2119455 - DNA, 25 bp, Homo sapien
taatcctatatgacaaaatgctctc

SEQ ID NO: 2119456 - DNA, 25 bp, Homo sapien
tggtaatcctatatgacaaaatgct

SEQ ID NO: 2119457 - DNA, 25 bp, Homo sapien
gcagccatgttccaagtgtataaag

SEQ ID NO: 2119458 - DNA, 25 bp, Homo sapien
tacaaatttgagagcatagtatgct

SEQ ID NO: 2119459 - DNA, 25 bp, Homo sapien
tgtataaagtgccatatctactgag

SEQ ID NO: 2119460 - DNA, 25 bp, Homo sapien
aaattggagcaatgttggcctagac

SEQ ID NO: 2119461 - DNA, 25 bp, Homo sapien
tgtactttgtggtatgaatttttct

SEQ ID NO: 2119462 - DNA, 25 bp, Homo sapien
tagtcttaagctgtagtgaatatgt

SEQ ID NO: 2119463 - DNA, 25 bp, Homo sapien
ttgtgcaaactggttaaaggaatga

SEQ ID NO: 2119464 - DNA, 25 bp, Homo sapien
taagctgtagtgaatatgttgtact

SEQ ID NO: 2119465 - DNA, 25 bp, Homo sapien
gcaaaaatgcttgaccgaacttggg

SEQ ID NO: 2119466 - DNA, 25 bp, Homo sapien
tgggttcagggctcaacttaggaac

SEQ ID NO: 2119467 - DNA, 25 bp, Homo sapien
gagagagagttaaagacccctctta

SEQ ID NO: 2119468 - DNA, 25 bp, Homo sapien
tgaggagacccttggctgaaaggaa

SEQ ID NO: 2119469 - DNA, 25 bp, Homo sapien
acttctttgattagatgtattccta

SEQ ID NO: 2119470 - DNA, 25 bp, Homo sapien
ctgttgatgtaaagaaatgttacca

SEQ ID NO: 2119471 - DNA, 25 bp, Homo sapien
catggagagatcattcacttctttg

SEQ ID NO: 2119472 - DNA, 25 bp, Homo sapien
tgataggaatagtttgagtctgtat

SEQ ID NO: 2119473 - DNA, 25 bp, Homo sapien
cttctttcagtacagggctgtttcg

SEQ ID NO: 2119474 - DNA, 25 bp, Homo sapien
tatataagtcctaggtggcagcttc

SEQ ID NO: 2119475 - DNA, 25 bp, Homo sapien
aatgacttctcctgtctaggtatat

SEQ ID NO: 2119476 - DNA, 25 bp, Homo sapien
gctgcattatctcctaacaaagaag

SEQ ID NO: 2119477 - DNA, 25 bp, Homo sapien
tgaggtgtccgtctgcccttgctgg

SEQ ID NO: 2119478 - DNA, 25 bp, Homo sapien
tcctcccgtagcttggattaatttg

SEQ ID NO: 2119479 - DNA, 25 bp, Homo sapien
cgtagcttggattaatttgatcatc

SEQ ID NO: 2119480 - DNA, 25 bp, Homo sapien
tgtgaggtgtccgtctgcccttgct

SEQ ID NO: 2119481 - DNA, 25 bp, Homo sapien
cgtatgcggtcaattttggattagg

SEQ ID NO: 2119482 - DNA, 25 bp, Homo sapien
ttccacgtatgcggtcaattttgga

SEQ ID NO: 2119483 - DNA, 25 bp, Homo sapien
cacgtatgcggtcaattttggatta

SEQ ID NO: 2119484 - DNA, 25 bp, Homo sapien
ccacgtatgcggtcaattttggatt

SEQ ID NO: 2119485 - DNA, 25 bp, Homo sapien
gcagcccggttggagacactcctca

SEQ ID NO: 2119486 - DNA, 25 bp, Homo sapien
gggcagcccggttggagacactcct

SEQ ID NO: 2119487 - DNA, 25 bp, Homo sapien
atggggcagcccggttggagacact

SEQ ID NO: 2119488 - DNA, 25 bp, Homo sapien
tggggcagcccggttggagacactc

SEQ ID NO: 2119489 - DNA, 25 bp, Homo sapien
tcacttcccagacgtggcagccagg

SEQ ID NO: 2119490 - DNA, 25 bp, Homo sapien
ctcacttcccagacgtggcagccag

SEQ ID NO: 2119491 - DNA, 25 bp, Homo sapien
cttcccagacgtggcagccaggcag

SEQ ID NO: 2119492 - DNA, 25 bp, Homo sapien
cacttcccagacgtggcagccaggc

SEQ ID NO: 2119493 - DNA, 25 bp, Homo sapien
aattggtggagccttctattctgcc

SEQ ID NO: 2119494 - DNA, 25 bp, Homo sapien
gatgtccttgcgagggtgacaattg

SEQ ID NO: 2119495 - DNA, 25 bp, Homo sapien
tcttccctgagatgaattatcacca

SEQ ID NO: 2119496 - DNA, 25 bp, Homo sapien
tatactgagtactgccttgaaatga

SEQ ID NO: 2119497 - DNA, 25 bp, Homo sapien
gagatgtcgtcaggaaactagagcc

SEQ ID NO: 2119498 - DNA, 25 bp, Homo sapien
tcagtagatcatgtggcctcccagt

SEQ ID NO: 2119499 - DNA, 25 bp, Homo sapien
ttttggagcctcaagctgtgcagcc

SEQ ID NO: 2119500 - DNA, 25 bp, Homo sapien
gagatgccatccaagagtgaagtcc

SEQ ID NO: 2119501 - DNA, 25 bp, Homo sapien
ccaatttaaggctgtgatactgcgc

SEQ ID NO: 2119502 - DNA, 25 bp, Homo sapien
ttccaatttaaggctgtgatactgc

SEQ ID NO: 2119503 - DNA, 25 bp, Homo sapien
tccaatttaaggctgtgatactgcg

SEQ ID NO: 2119504 - DNA, 25 bp, Homo sapien
caatttaaggctgtgatactgcgcc

SEQ ID NO: 2119505 - DNA, 25 bp, Homo sapien
catatggcatttcgtaatacatcac

SEQ ID NO: 2119506 - DNA, 25 bp, Homo sapien
tatggcatttcgtaatacatcacat

SEQ ID NO: 2119507 - DNA, 25 bp, Homo sapien
tccatatggcatttcgtaatacatc

SEQ ID NO: 2119508 - DNA, 25 bp, Homo sapien
atccatatggcatttcgtaatacat

SEQ ID NO: 2119509 - DNA, 25 bp, Homo sapien
agtgcaagaagaccggcactgcccc

SEQ ID NO: 2119510 - DNA, 25 bp, Homo sapien
ggtccgtggccataagaaagatgct

SEQ ID NO: 2119511 - DNA, 25 bp, Homo sapien
tttattgccaagtgagattgcccac

SEQ ID NO: 2119512 - DNA, 25 bp, Homo sapien
cactcagagcactagacagtgcaag

SEQ ID NO: 2119513 - DNA, 25 bp, Homo sapien
tctgcatcttgatgcttcttgtcat

SEQ ID NO: 2119514 - DNA, 25 bp, Homo sapien
ccgggcctctcatctctgtggtgct

SEQ ID NO: 2119515 - DNA, 25 bp, Homo sapien
ctaatctggcttgccgggcctctca

SEQ ID NO: 2119516 - DNA, 25 bp, Homo sapien
tggcttgccgggcctctcatctctg

SEQ ID NO: 2119517 - DNA, 25 bp, Homo sapien
cagttgccaagatgtcaagatgcct

SEQ ID NO: 2119518 - DNA, 25 bp, Homo sapien
caggccactggcattaactaggcag

SEQ ID NO: 2119519 - DNA, 25 bp, Homo sapien
gatgcctgcaatctaacgagatcga

SEQ ID NO: 2119520 - DNA, 25 bp, Homo sapien
tcgagaaatctacagatgcccacag

SEQ ID NO: 2119521 - DNA, 25 bp, Homo sapien
tgaatccacccatgaccagaaagct

SEQ ID NO: 2119522 - DNA, 25 bp, Homo sapien
cacctactatgttgctgaagatcac

SEQ ID NO: 2119523 - DNA, 25 bp, Homo sapien
ggctgtgtcacagtccattgttcac

SEQ ID NO: 2119524 - DNA, 25 bp, Homo sapien
gctagctaactagtggcaggtccca

SEQ ID NO: 2119525 - DNA, 25 bp, Homo sapien
ggaatagagctaacaaaggaagtga

SEQ ID NO: 2119526 - DNA, 25 bp, Homo sapien
gaaggatctcttcaaggagagctag

SEQ ID NO: 2119527 - DNA, 25 bp, Homo sapien
tctatgctcatgaatagaaagaatc

SEQ ID NO: 2119528 - DNA, 25 bp, Homo sapien
atggaaaaaacattctatgctcatg

SEQ ID NO: 2119529 - DNA, 25 bp, Homo sapien
tttagcatgagggactgttgaattt

SEQ ID NO: 2119530 - DNA, 25 bp, Homo sapien
ttagcatgagggactgttgaatttt

SEQ ID NO: 2119531 - DNA, 25 bp, Homo sapien
catgagggactgttgaattttgtca

SEQ ID NO: 2119532 - DNA, 25 bp, Homo sapien
agcatgagggactgttgaattttgt

SEQ ID NO: 2119533 - DNA, 25 bp, Homo sapien
caggacacagcgttgttgatggtga

SEQ ID NO: 2119534 - DNA, 25 bp, Homo sapien
ttgttgatggtgagtggcacctttg

SEQ ID NO: 2119535 - DNA, 25 bp, Homo sapien
ctttgacttgcccctttgcagcttg

SEQ ID NO: 2119536 - DNA, 25 bp, Homo sapien
gtggcacctttgacttgcccctttg

SEQ ID NO: 2119537 - DNA, 25 bp, Homo sapien
aagagcatggagtcattgaggccca

SEQ ID NO: 2119538 - DNA, 25 bp, Homo sapien
agagcatggagtcattgaggcccag

SEQ ID NO: 2119539 - DNA, 25 bp, Homo sapien
ttggcgctgcacacgctggtcttca

SEQ ID NO: 2119540 - DNA, 25 bp, Homo sapien
tgcacacgctggtcttcaggtgcgg

SEQ ID NO: 2119541 - DNA, 25 bp, Homo sapien
gagtcggcatcgttgggtatgggta

SEQ ID NO: 2119542 - DNA, 25 bp, Homo sapien
ggtatgggtacagacatctccacac

SEQ ID NO: 2119543 - DNA, 25 bp, Homo sapien
agacctggatcccagagaccgtgga

SEQ ID NO: 2119544 - DNA, 25 bp, Homo sapien
tggagtaggggatctcaaacttgac

SEQ ID NO: 2119545 - DNA, 25 bp, Homo sapien
agaccgtggagtaggggatctcaaa

SEQ ID NO: 2119546 - DNA, 25 bp, Homo sapien
atctcaaacttgaccctaataaggg

SEQ ID NO: 2119547 - DNA, 25 bp, Homo sapien
gcttatctgttcagggtcactctca

SEQ ID NO: 2119548 - DNA, 25 bp, Homo sapien
aactgaccatccctaggttggcagc

SEQ ID NO: 2119549 - DNA, 25 bp, Homo sapien
gaaacttggacgatctaggcagggt

SEQ ID NO: 2119550 - DNA, 25 bp, Homo sapien
ggtgtctctacctcagctgtggccg

SEQ ID NO: 2119551 - DNA, 25 bp, Homo sapien
agcttgtttagcactgattgaatct

SEQ ID NO: 2119552 - DNA, 25 bp, Homo sapien
gaatctgttcctctgcatagcccag

SEQ ID NO: 2119553 - DNA, 25 bp, Homo sapien
cttagcttggtattccttctccaag

SEQ ID NO: 2119554 - DNA, 25 bp, Homo sapien
agctttagcgcaaactccatcttag

SEQ ID NO: 2119555 - DNA, 25 bp, Homo sapien
tgacaagctctgccaatacatcatt

SEQ ID NO: 2119556 - DNA, 25 bp, Homo sapien
tctgccaatacatcattaataagtg

SEQ ID NO: 2119557 - DNA, 25 bp, Homo sapien
gctctgccaatacatcattaataag

SEQ ID NO: 2119558 - DNA, 25 bp, Homo sapien
caagctctgccaatacatcattaat

SEQ ID NO: 2119559 - DNA, 25 bp, Homo sapien
tgggcccacgaggcactaacagact

SEQ ID NO: 2119560 - DNA, 25 bp, Homo sapien
gggcccacgaggcactaacagactc

SEQ ID NO: 2119561 - DNA, 25 bp, Homo sapien
ctgggcccacgaggcactaacagac

SEQ ID NO: 2119562 - DNA, 25 bp, Homo sapien
attgccacattacttccatcaatga

SEQ ID NO: 2119563 - DNA, 25 bp, Homo sapien
ttacttccatcaatgacaactggcc

SEQ ID NO: 2119564 - DNA, 25 bp, Homo sapien
caattcagggcttgcaatctctctg

SEQ ID NO: 2119565 - DNA, 25 bp, Homo sapien
ggcctcaaattgtcactgttatcta

SEQ ID NO: 2119566 - DNA, 25 bp, Homo sapien
catgtagtttgtctaagaaatacca

SEQ ID NO: 2119567 - DNA, 25 bp, Homo sapien
cataattttaatgcaggataatcca

SEQ ID NO: 2119568 - DNA, 25 bp, Homo sapien
taatccaacaggctgagaaacaaca

SEQ ID NO: 2119569 - DNA, 25 bp, Homo sapien
gaaacaacagacattaacatgtagt

SEQ ID NO: 2119570 - DNA, 25 bp, Homo sapien
acgccaccaccacacccggctaatt

SEQ ID NO: 2119571 - DNA, 25 bp, Homo sapien
gcgattctcctgtacaggcacgcca

SEQ ID NO: 2119572 - DNA, 25 bp, Homo sapien
agatgaagttttgccttgttggcca

SEQ ID NO: 2119573 - DNA, 25 bp, Homo sapien
aagcgattctcctgtacaggcacgc

SEQ ID NO: 2119574 - DNA, 25 bp, Homo sapien
ataagaggagagaagattgataata

SEQ ID NO: 2119575 - DNA, 25 bp, Homo sapien
agattgataatagatagcaaagaaa

SEQ ID NO: 2119576 - DNA, 25 bp, Homo sapien
attgataatagatagcaaagaaata

SEQ ID NO: 2119577 - DNA, 25 bp, Homo sapien
gaataagaggagagaagattgataa

SEQ ID NO: 2119578 - DNA, 25 bp, Homo sapien
ccacagcaagttgtattcctctgca

SEQ ID NO: 2119579 - DNA, 25 bp, Homo sapien
ctttatggcctttatctagaaacca

SEQ ID NO: 2119580 - DNA, 25 bp, Homo sapien
tatctagaaaccaatccacagcaag

SEQ ID NO: 2119581 - DNA, 25 bp, Homo sapien
gcatcagggcgggattgctcctttc

SEQ ID NO: 2119582 - DNA, 25 bp, Homo sapien
cagtattaccccaatattaaaaatg

SEQ ID NO: 2119583 - DNA, 25 bp, Homo sapien
caatattaaaaatgcaaaagttggt

SEQ ID NO: 2119584 - DNA, 25 bp, Homo sapien
tattaccccaatattaaaaatgcaa

SEQ ID NO: 2119585 - DNA, 25 bp, Homo sapien
cccaatattaaaaatgcaaaagttg

SEQ ID NO: 2119586 - DNA, 25 bp, Homo sapien
tcaaaatatgattatatgccacaga

SEQ ID NO: 2119587 - DNA, 25 bp, Homo sapien
ctgtcaaaatatgattatatgccac

SEQ ID NO: 2119588 - DNA, 25 bp, Homo sapien
atatgattatatgccacagagcaga

SEQ ID NO: 2119589 - DNA, 25 bp, Homo sapien
ttatatgccacagagcagaaatcat

SEQ ID NO: 2119590 - DNA, 25 bp, Homo sapien
gaaggtctcggtagttatcattgga

SEQ ID NO: 2119591 - DNA, 25 bp, Homo sapien
cagtttgactatgaaccggtcatca

SEQ ID NO: 2119592 - DNA, 25 bp, Homo sapien
ccttggactcttcgggatggtgtga

SEQ ID NO: 2119593 - DNA, 25 bp, Homo sapien
gaatacatcagcaaccgctcctcta

SEQ ID NO: 2119594 - DNA, 25 bp, Homo sapien
aaggcttgggccgtggcgtcctaat

SEQ ID NO: 2119595 - DNA, 25 bp, Homo sapien
gccgtggcgtcctaatggatcatct

SEQ ID NO: 2119596 - DNA, 25 bp, Homo sapien
acatggttgcttcttatgctcagga

SEQ ID NO: 2119597 - DNA, 25 bp, Homo sapien
gaacaatgggtctctttcttaagaa

SEQ ID NO: 2119598 - DNA, 25 bp, Homo sapien
agctcatcagccaccgaacgctggg

SEQ ID NO: 2119599 - DNA, 25 bp, Homo sapien
cgctccggatggtagtatttgcact

SEQ ID NO: 2119600 - DNA, 25 bp, Homo sapien
tatttgcacttgtggccgtaggtgc

SEQ ID NO: 2119601 - DNA, 25 bp, Homo sapien
ttggttggcccgctccggatggtag

SEQ ID NO: 2119602 - DNA, 25 bp, Homo sapien
taagcttagcaacaatcaaggctgc

SEQ ID NO: 2119603 - DNA, 25 bp, Homo sapien
ggccatagctctgcactcgtgttaa

SEQ ID NO: 2119604 - DNA, 25 bp, Homo sapien
ggccacacgtttgacctctgaggtt

SEQ ID NO: 2119605 - DNA, 25 bp, Homo sapien
tctgcaggacagctggaacgtgttc

SEQ ID NO: 2119606 - DNA, 25 bp, Homo sapien
aaacgctttgtagtaacccctgctg

SEQ ID NO: 2119607 - DNA, 25 bp, Homo sapien
gactattttagacgagcaggttcca

SEQ ID NO: 2119608 - DNA, 25 bp, Homo sapien
tacgaaaactctggtaggctgggcg

SEQ ID NO: 2119609 - DNA, 25 bp, Homo sapien
tacaagttgcgcaaatggtgtcgcc

SEQ ID NO: 2119610 - DNA, 25 bp, Homo sapien
tggcctcaactgtcggaacaggctc

SEQ ID NO: 2119611 - DNA, 25 bp, Homo sapien
ggcgccgtcttttgtgtgcacagtg

SEQ ID NO: 2119612 - DNA, 25 bp, Homo sapien
gatcttcagaaacatagccttcatg

SEQ ID NO: 2119613 - DNA, 25 bp, Homo sapien
cagaattggcaggtgaaccctcaca

SEQ ID NO: 2119614 - DNA, 25 bp, Homo sapien
tcaccccgttacacagagtggagaa

SEQ ID NO: 2119615 - DNA, 25 bp, Homo sapien
agatagcctgtccttagtcccatgc

SEQ ID NO: 2119616 - DNA, 25 bp, Homo sapien
gatgcgacacatgccggcagtaaca

SEQ ID NO: 2119617 - DNA, 25 bp, Homo sapien
tcctaagtgcctgcagagtggaagc

SEQ ID NO: 2119618 - DNA, 25 bp, Homo sapien
agggaaagggtcgttgccactctcg

SEQ ID NO: 2119619 - DNA, 25 bp, Homo sapien
ggtacgcgcttaaccgcatcacggt

SEQ ID NO: 2119620 - DNA, 25 bp, Homo sapien
tttgtcgagtttctataaggccctg

SEQ ID NO: 2119621 - DNA, 25 bp, Homo sapien
gaccataagttgcagcggtacgcgc

SEQ ID NO: 2119622 - DNA, 25 bp, Homo sapien
tctaggctctcagtgggagtaacca

SEQ ID NO: 2119623 - DNA, 25 bp, Homo sapien
aaagaagattaaacagtcctggaat

SEQ ID NO: 2119624 - DNA, 25 bp, Homo sapien
gaaagaagattaaacagtcctggaa

SEQ ID NO: 2119625 - DNA, 25 bp, Homo sapien
ctaggctctcagtgggagtaaccat

SEQ ID NO: 2119626 - DNA, 25 bp, Homo sapien
accttcgccgtctgcccatagagaa

SEQ ID NO: 2119627 - DNA, 25 bp, Homo sapien
ctgatccaagaccttcgccgtctgc

SEQ ID NO: 2119628 - DNA, 25 bp, Homo sapien
aagaccttcgccgtctgcccataga

SEQ ID NO: 2119629 - DNA, 25 bp, Homo sapien
tgatccaagaccttcgccgtctgcc

SEQ ID NO: 2119630 - DNA, 25 bp, Homo sapien
ggagtcagggttctcagggaggaag

SEQ ID NO: 2119631 - DNA, 25 bp, Homo sapien
tggagtcagggttctcagggaggaa

SEQ ID NO: 2119632 - DNA, 25 bp, Homo sapien
ctcgctggagtcagggttctcaggg

SEQ ID NO: 2119633 - DNA, 25 bp, Homo sapien
cgctggagtcagggttctcagggag

SEQ ID NO: 2119634 - DNA, 25 bp, Homo sapien
tttctgagcatccattgtgccttaa

SEQ ID NO: 2119635 - DNA, 25 bp, Homo sapien
gttttctgagcatccattgtgcctt

SEQ ID NO: 2119636 - DNA, 25 bp, Homo sapien
tctgagcatccattgtgccttaaca

SEQ ID NO: 2119637 - DNA, 25 bp, Homo sapien
gagcatccattgtgccttaacattt

SEQ ID NO: 2119638 - DNA, 25 bp, Homo sapien
tgtcttgtcgcagatgagctgagcc

SEQ ID NO: 2119639 - DNA, 25 bp, Homo sapien
gggctctgtcttgtcgcagatgagc

SEQ ID NO: 2119640 - DNA, 25 bp, Homo sapien
ggacacttggaaaggtgactgatgt

SEQ ID NO: 2119641 - DNA, 25 bp, Homo sapien
ggacagtctctcttttctcgaggac

SEQ ID NO: 2119642 - DNA, 25 bp, Homo sapien
tctggtgctcgctccttcccaggcg

SEQ ID NO: 2119643 - DNA, 25 bp, Homo sapien
ctctggtgctcgctccttcccaggc

SEQ ID NO: 2119644 - DNA, 25 bp, Homo sapien
gtgctcgctccttcccaggcggcac

SEQ ID NO: 2119645 - DNA, 25 bp, Homo sapien
tggtgctcgctccttcccaggcggc

SEQ ID NO: 2119646 - DNA, 25 bp, Homo sapien
agacaccagaaagagcatgcctttc

SEQ ID NO: 2119647 - DNA, 25 bp, Homo sapien
acctttggtgatgtcactgctggaa

SEQ ID NO: 2119648 - DNA, 25 bp, Homo sapien
ggtcctgtgcccctcgttctggtct

SEQ ID NO: 2119649 - DNA, 25 bp, Homo sapien
gtggctgtcctgtggaccacctggc

SEQ ID NO: 2119650 - DNA, 25 bp, Homo sapien
gtgcagcccagcgacagcctggagc

SEQ ID NO: 2119651 - DNA, 25 bp, Homo sapien
tacaccgtggtgcagcccagcgaca

SEQ ID NO: 2119652 - DNA, 25 bp, Homo sapien
cccagcgacagcctggagcagggct

SEQ ID NO: 2119653 - DNA, 25 bp, Homo sapien
ctacaccgtggtgcagcccagcgac

SEQ ID NO: 2119654 - DNA, 25 bp, Homo sapien
gtgaagacgaagagcaccacgtcct

SEQ ID NO: 2119655 - DNA, 25 bp, Homo sapien
tctctccaccatcgcctatgtggag

SEQ ID NO: 2119656 - DNA, 25 bp, Homo sapien
tgttcagcgccccaagctgcggagg

SEQ ID NO: 2119657 - DNA, 25 bp, Homo sapien
gcagtgtggtgtccagccggatcca

SEQ ID NO: 2119658 - DNA, 25 bp, Homo sapien
tcctcagtctggtatatgataatgg

SEQ ID NO: 2119659 - DNA, 25 bp, Homo sapien
ctgtgcctcttatcctcagtctggt

SEQ ID NO: 2119660 - DNA, 25 bp, Homo sapien
cagtctggtatatgataatggaata

SEQ ID NO: 2119661 - DNA, 25 bp, Homo sapien
aatacaagagaattcctgaaatctg

SEQ ID NO: 2119662 - DNA, 25 bp, Homo sapien
tccacagaacacatttgaagagccc

SEQ ID NO: 2119663 - DNA, 25 bp, Homo sapien
acagaacacatttgaagagccccag

SEQ ID NO: 2119664 - DNA, 25 bp, Homo sapien
cacagaacacatttgaagagcccca

SEQ ID NO: 2119665 - DNA, 25 bp, Homo sapien
ctccacagaacacatttgaagagcc

SEQ ID NO: 2119666 - DNA, 25 bp, Homo sapien
cacagggaacagagcatccagtgac

SEQ ID NO: 2119667 - DNA, 25 bp, Homo sapien
cagggaacagagcatccagtgactt

SEQ ID NO: 2119668 - DNA, 25 bp, Homo sapien
aacagagcatccagtgactttagag

SEQ ID NO: 2119669 - DNA, 25 bp, Homo sapien
caaccacagggaacagagcatccag

SEQ ID NO: 2119670 - DNA, 25 bp, Homo sapien
tagctgaaccagctccgaagctgcc

SEQ ID NO: 2119671 - DNA, 25 bp, Homo sapien
gacacaggcccttctacccaaaata

SEQ ID NO: 2119672 - DNA, 25 bp, Homo sapien
ggaactggcttcacagcctgacaca

SEQ ID NO: 2119673 - DNA, 25 bp, Homo sapien
aggtctgaaaactcagcgtccagag

SEQ ID NO: 2119674 - DNA, 25 bp, Homo sapien
tttcctagagtacttttcatactcc

SEQ ID NO: 2119675 - DNA, 25 bp, Homo sapien
ctctgcattctcataacctgctttg

SEQ ID NO: 2119676 - DNA, 25 bp, Homo sapien
ttttcctagagtacttttcatactc

SEQ ID NO: 2119677 - DNA, 25 bp, Homo sapien
gcattctcataacctgctttgtttt

SEQ ID NO: 2119678 - DNA, 25 bp, Homo sapien
taagggactgatggctggttgagcg

SEQ ID NO: 2119679 - DNA, 25 bp, Homo sapien
ttttgcatggtccacgaacactggc

SEQ ID NO: 2119680 - DNA, 25 bp, Homo sapien
tcatggctgcccctgcatggagaga

SEQ ID NO: 2119681 - DNA, 25 bp, Homo sapien
gatagccaagagctaaggttttccg

SEQ ID NO: 2119682 - DNA, 25 bp, Homo sapien
gtggtggttattgactccaactccc

SEQ ID NO: 2119683 - DNA, 25 bp, Homo sapien
gcatcggcactagcagcctctgtga

SEQ ID NO: 2119684 - DNA, 25 bp, Homo sapien
gctttgggcttaatgagtcccttgc

SEQ ID NO: 2119685 - DNA, 25 bp, Homo sapien
tgggcaccctaaaattgctttgggc

SEQ ID NO: 2119686 - DNA, 25 bp, Homo sapien
ctgatgtagatcaggtggcgtatgc

SEQ ID NO: 2119687 - DNA, 25 bp, Homo sapien
gatgtagatcaggtggcgtatgcca

SEQ ID NO: 2119688 - DNA, 25 bp, Homo sapien
tcaggtggcgtatgccaccaacatc

SEQ ID NO: 2119689 - DNA, 25 bp, Homo sapien
aggatcagtttattatccaagccct

SEQ ID NO: 2119690 - DNA, 25 bp, Homo sapien
tcagtcggcttgtagaggcgggtac

SEQ ID NO: 2119691 - DNA, 25 bp, Homo sapien
aggtggggatggctcagtcggcttg

SEQ ID NO: 2119692 - DNA, 25 bp, Homo sapien
tggctcagtcggcttgtagaggcgg

SEQ ID NO: 2119693 - DNA, 25 bp, Homo sapien
gggatggctcagtcggcttgtagag

SEQ ID NO: 2119694 - DNA, 25 bp, Homo sapien
tgctgaatatggtagtagcccagca

SEQ ID NO: 2119695 - DNA, 25 bp, Homo sapien
caggtagccaaagagctcaggatta

SEQ ID NO: 2119696 - DNA, 25 bp, Homo sapien
ctgctgaatatggtagtagcccagc

SEQ ID NO: 2119697 - DNA, 25 bp, Homo sapien
catcccaacaaatgttggcagggca

SEQ ID NO: 2119698 - DNA, 25 bp, Homo sapien
cccaataagccaactcctcctctag

SEQ ID NO: 2119699 - DNA, 25 bp, Homo sapien
tcctctaggacatcccaacaaatgt

SEQ ID NO: 2119700 - DNA, 25 bp, Homo sapien
aacaaatgttggcagggcagtgcag

SEQ ID NO: 2119701 - DNA, 25 bp, Homo sapien
tgggtatgggtctccttgccactta

SEQ ID NO: 2119702 - DNA, 25 bp, Homo sapien
tatgggtctccttgccacttagctt

SEQ ID NO: 2119703 - DNA, 25 bp, Homo sapien
agaaagtcctgggtatgggtctcct

SEQ ID NO: 2119704 - DNA, 25 bp, Homo sapien
aagtcctgggtatgggtctccttgc

SEQ ID NO: 2119705 - DNA, 25 bp, Homo sapien
gaagttgccagagaagtaatccagc

SEQ ID NO: 2119706 - DNA, 25 bp, Homo sapien
aaaaccgttgttctgctgctactgc

SEQ ID NO: 2119707 - DNA, 25 bp, Homo sapien
gagcagctccaggtatagcagatgt

SEQ ID NO: 2119708 - DNA, 25 bp, Homo sapien
cccatcccatgttccatagtagtga

SEQ ID NO: 2119709 - DNA, 25 bp, Homo sapien
tgaacaaggactctcatggccaagg

SEQ ID NO: 2119710 - DNA, 25 bp, Homo sapien
catggccaaggactttttaaggaag

SEQ ID NO: 2119711 - DNA, 25 bp, Homo sapien
tccaggaagaatggagtgtatgaac

SEQ ID NO: 2119712 - DNA, 25 bp, Homo sapien
taaggaagcccaggagacgaaccag

SEQ ID NO: 2119713 - DNA, 25 bp, Homo sapien
ccaggagcacaggaaccaacaagat

SEQ ID NO: 2119714 - DNA, 25 bp, Homo sapien
ttagtttctggcgagccagggccac

SEQ ID NO: 2119715 - DNA, 25 bp, Homo sapien
taccagtgcacatgcctgcagtggc

SEQ ID NO: 2119716 - DNA, 25 bp, Homo sapien
cagggccacagcataatagcactgg

SEQ ID NO: 2119717 - DNA, 25 bp, Homo sapien
tggttagctgatcctgactagcagg

SEQ ID NO: 2119718 - DNA, 25 bp, Homo sapien
gactagcaggaattgccatgatctg

SEQ ID NO: 2119719 - DNA, 25 bp, Homo sapien
ctgcaggtaatggttagctgatcct

SEQ ID NO: 2119720 - DNA, 25 bp, Homo sapien
gggctccttcttatctgtaaccaga

SEQ ID NO: 2119721 - DNA, 25 bp, Homo sapien
tgcttggggtacttctcagacaacc

SEQ ID NO: 2119722 - DNA, 25 bp, Homo sapien
gggtacttctcagacaacccagtgg

SEQ ID NO: 2119723 - DNA, 25 bp, Homo sapien
aattcaacctcccagtccagactag

SEQ ID NO: 2119724 - DNA, 25 bp, Homo sapien
tcccagtccagactagttgcttggg

SEQ ID NO: 2119725 - DNA, 25 bp, Homo sapien
tgtgaacacttaaaggcagggtttc

SEQ ID NO: 2119726 - DNA, 25 bp, Homo sapien
gtctccaatgaaagcccagtacagt

SEQ ID NO: 2119727 - DNA, 25 bp, Homo sapien
tcatcaggcatttgagggacactgc

SEQ ID NO: 2119728 - DNA, 25 bp, Homo sapien
agtacagtatctggccccagctcag

SEQ ID NO: 2119729 - DNA, 25 bp, Homo sapien
tagtcagccttaataggcatgcatg

SEQ ID NO: 2119730 - DNA, 25 bp, Homo sapien
ccttaataggcatgcatgtatgttg

SEQ ID NO: 2119731 - DNA, 25 bp, Homo sapien
cctagtcagccttaataggcatgca

SEQ ID NO: 2119732 - DNA, 25 bp, Homo sapien
tcagccttaataggcatgcatgtat

SEQ ID NO: 2119733 - DNA, 25 bp, Homo sapien
tcctgtagccagcagtaataggatt

SEQ ID NO: 2119734 - DNA, 25 bp, Homo sapien
ctgtagccagcagtaataggatttc

SEQ ID NO: 2119735 - DNA, 25 bp, Homo sapien
cctgtagccagcagtaataggattt

SEQ ID NO: 2119736 - DNA, 25 bp, Homo sapien
cagagagttcttaatgggccagagt

SEQ ID NO: 2119737 - DNA, 25 bp, Homo sapien
gcagcagagagttcttaatgggcca

SEQ ID NO: 2119738 - DNA, 25 bp, Homo sapien
tgtttgcaaaaaagattcccagttc

SEQ ID NO: 2119739 - DNA, 25 bp, Homo sapien
cccagttccgcttctcatttagctg

SEQ ID NO: 2119740 - DNA, 25 bp, Homo sapien
gggcagattgcctcctcacgtgggt

SEQ ID NO: 2119741 - DNA, 25 bp, Homo sapien
acggccgggtactccaacagacctg

SEQ ID NO: 2119742 - DNA, 25 bp, Homo sapien
aacgggcagattgcctcctcacgtg

SEQ ID NO: 2119743 - DNA, 25 bp, Homo sapien
tcacacggccgggtactccaacaga

SEQ ID NO: 2119744 - DNA, 25 bp, Homo sapien
aaatgacataagcaaccaatgagtc

SEQ ID NO: 2119745 - DNA, 25 bp, Homo sapien
atttgtagttcgtcccttgcttcct

SEQ ID NO: 2119746 - DNA, 25 bp, Homo sapien
tatcttcctcgaccacatgcagtga

SEQ ID NO: 2119747 - DNA, 25 bp, Homo sapien
gagtatacttagagatgaatgaaga

SEQ ID NO: 2119748 - DNA, 25 bp, Homo sapien
tagctgggtggcaatatatgtatca

SEQ ID NO: 2119749 - DNA, 25 bp, Homo sapien
taaacaatggatagacagaagatga

SEQ ID NO: 2119750 - DNA, 25 bp, Homo sapien
gaggatttgaacagcaccataaacc

SEQ ID NO: 2119751 - DNA, 25 bp, Homo sapien
tgtgcaacaaacagttaaaacctca

SEQ ID NO: 2119752 - DNA, 25 bp, Homo sapien
ggcctgtttcaatggctctctgact

SEQ ID NO: 2119753 - DNA, 25 bp, Homo sapien
ctctaaagccttaatctggccctgc

SEQ ID NO: 2119754 - DNA, 25 bp, Homo sapien
tcttctagggcctctaaagccttaa

SEQ ID NO: 2119755 - DNA, 25 bp, Homo sapien
gattctttttagcatgaaactgtcc

SEQ ID NO: 2119756 - DNA, 25 bp, Homo sapien
gttgtttttcttttgcattacatac

SEQ ID NO: 2119757 - DNA, 25 bp, Homo sapien
attgttgtttttcttttgcattaca

SEQ ID NO: 2119758 - DNA, 25 bp, Homo sapien
tattgttgtttttcttttgcattac

SEQ ID NO: 2119759 - DNA, 25 bp, Homo sapien
tgttgtttttcttttgcattacata

SEQ ID NO: 2119760 - DNA, 25 bp, Homo sapien
gagccaccgcacctggccttcaatg

SEQ ID NO: 2119761 - DNA, 25 bp, Homo sapien
gtgtgtgccactgggcccagctaat

SEQ ID NO: 2119762 - DNA, 25 bp, Homo sapien
gccaccgcacctggccttcaatggc

SEQ ID NO: 2119763 - DNA, 25 bp, Homo sapien
gtgagccaccgcacctggccttcaa

SEQ ID NO: 2119764 - DNA, 25 bp, Homo sapien
gacatcaaatagtaagggactgcct

SEQ ID NO: 2119765 - DNA, 25 bp, Homo sapien
taaatttctactccctccgacatca

SEQ ID NO: 2119766 - DNA, 25 bp, Homo sapien
gatgttgaggtagccaagaatccct

SEQ ID NO: 2119767 - DNA, 25 bp, Homo sapien
tctgcttcctgattaagatgttgag

SEQ ID NO: 2119768 - DNA, 25 bp, Homo sapien
gcttgccatagagatgaaatcatcc

SEQ ID NO: 2119769 - DNA, 25 bp, Homo sapien
tagaagctgacctggaaactggaga

SEQ ID NO: 2119770 - DNA, 25 bp, Homo sapien
cctgtgacatgggttctggatctcc

SEQ ID NO: 2119771 - DNA, 25 bp, Homo sapien
tcctgattaaccctcagactggctg

SEQ ID NO: 2119772 - DNA, 25 bp, Homo sapien
gggccacagtaatacccatgagtag

SEQ ID NO: 2119773 - DNA, 25 bp, Homo sapien
tacccatgagtaggtttagatctga

SEQ ID NO: 2119774 - DNA, 25 bp, Homo sapien
tgagagttagatcaatcatcctggg

SEQ ID NO: 2119775 - DNA, 25 bp, Homo sapien
tagatctgatgaggtttatgtcagt

SEQ ID NO: 2119776 - DNA, 25 bp, Homo sapien
tcggggcgactgttaggcttcctgc

SEQ ID NO: 2119777 - DNA, 25 bp, Homo sapien
tgctaacgggccacgacttcacaaa

SEQ ID NO: 2119778 - DNA, 25 bp, Homo sapien
gggactcagattgggtccctcacta

SEQ ID NO: 2119779 - DNA, 25 bp, Homo sapien
gaagtttagctaggactgtcgggca

SEQ ID NO: 2119780 - DNA, 25 bp, Homo sapien
gggtggagacgcatccccaaatcaa

SEQ ID NO: 2119781 - DNA, 25 bp, Homo sapien
tgttggtgctctcgggtgcagcctc

SEQ ID NO: 2119782 - DNA, 25 bp, Homo sapien
cacaccacacaaaatagtccggagg

SEQ ID NO: 2119783 - DNA, 25 bp, Homo sapien
tgttcctctcgtaacagccagtggg

SEQ ID NO: 2119784 - DNA, 25 bp, Homo sapien
gactcagatgagacggttaatgcaa

SEQ ID NO: 2119785 - DNA, 25 bp, Homo sapien
tactccaggcctgactacaaacagc

SEQ ID NO: 2119786 - DNA, 25 bp, Homo sapien
caaagtgggctatctcagaactgag

SEQ ID NO: 2119787 - DNA, 25 bp, Homo sapien
tatgccactacagaagaaagaccgt

SEQ ID NO: 2119788 - DNA, 25 bp, Homo sapien
gcagctatggttatgaaaggcctaa

SEQ ID NO: 2119789 - DNA, 25 bp, Homo sapien
gaccctgagtctagaaattccagtg

SEQ ID NO: 2119790 - DNA, 25 bp, Homo sapien
tgttggtagccagatattctcccct

SEQ ID NO: 2119791 - DNA, 25 bp, Homo sapien
tgccatgcaacactagaacagagtt

SEQ ID NO: 2119792 - DNA, 25 bp, Homo sapien
gagacaaggtcagagcctgagccat

SEQ ID NO: 2119793 - DNA, 25 bp, Homo sapien
cttcctgggaagtgctacaaagagt

SEQ ID NO: 2119794 - DNA, 25 bp, Homo sapien
tgctacaaagagttcctgagacaag

SEQ ID NO: 2119795 - DNA, 25 bp, Homo sapien
ctgagacaaggtcagagcctgagcc

SEQ ID NO: 2119796 - DNA, 25 bp, Homo sapien
tcagatctggtatctgtgtcattag

SEQ ID NO: 2119797 - DNA, 25 bp, Homo sapien
tgtgctttgaaagtcgcccaaaagg

SEQ ID NO: 2119798 - DNA, 25 bp, Homo sapien
gccctggccagaaaacgtcatactc

SEQ ID NO: 2119799 - DNA, 25 bp, Homo sapien
caacaagccgattgaaaggagcatc

SEQ ID NO: 2119800 - DNA, 25 bp, Homo sapien
taggaatcatcaggaaaggttccag

SEQ ID NO: 2119801 - DNA, 25 bp, Homo sapien
ttccagaagttgacgttgcagggag

SEQ ID NO: 2119802 - DNA, 25 bp, Homo sapien
tgcagggaggaagcctttagtcatc

SEQ ID NO: 2119803 - DNA, 25 bp, Homo sapien
gcctttagtcatcggtttcctctgg

SEQ ID NO: 2119804 - DNA, 25 bp, Homo sapien
tgacaacccagtaccatcggtaacc

SEQ ID NO: 2119805 - DNA, 25 bp, Homo sapien
catcggaccagcctccactgctctt

SEQ ID NO: 2119806 - DNA, 25 bp, Homo sapien
gcctccactgctcttctgtggagaa

SEQ ID NO: 2119807 - DNA, 25 bp, Homo sapien
aacattggaaaagcatgtgcctatc

SEQ ID NO: 2119808 - DNA, 25 bp, Homo sapien
caagctgatccccacaataggaggc

SEQ ID NO: 2119809 - DNA, 25 bp, Homo sapien
gggctgagccataaagtacctgact

SEQ ID NO: 2119810 - DNA, 25 bp, Homo sapien
caaatccctgaccttagagagcaac

SEQ ID NO: 2119811 - DNA, 25 bp, Homo sapien
cattctcatactaggaaggccctgg

SEQ ID NO: 2119812 - DNA, 25 bp, Homo sapien
ttaggtgccagctcatagatttggg

SEQ ID NO: 2119813 - DNA, 25 bp, Homo sapien
ggcattaggtgccagctcatagatt

SEQ ID NO: 2119814 - DNA, 25 bp, Homo sapien
tttggcattaggtgccagctcatag

SEQ ID NO: 2119815 - DNA, 25 bp, Homo sapien
cattaggtgccagctcatagatttg

SEQ ID NO: 2119816 - DNA, 25 bp, Homo sapien
gaggtaacttctctaaaagctggct

SEQ ID NO: 2119817 - DNA, 25 bp, Homo sapien
gctcttgggctgtatggatctatga

SEQ ID NO: 2119818 - DNA, 25 bp, Homo sapien
ttgtatgaccgccttcctggaagca

SEQ ID NO: 2119819 - DNA, 25 bp, Homo sapien
taagataagagaccacatggcatcc

SEQ ID NO: 2119820 - DNA, 25 bp, Homo sapien
tcacctcagctaaggagccatttgt

SEQ ID NO: 2119821 - DNA, 25 bp, Homo sapien
tcttttgcacaggaagctagctaca

SEQ ID NO: 2119822 - DNA, 25 bp, Homo sapien
gccacaggctgtcataaagaatcac

SEQ ID NO: 2119823 - DNA, 25 bp, Homo sapien
taaagcttagcaaaagtggcctgaa

SEQ ID NO: 2119824 - DNA, 25 bp, Homo sapien
tggtgactctgaactgaactcttca

SEQ ID NO: 2119825 - DNA, 25 bp, Homo sapien
gactctgaactgaactcttcaggca

SEQ ID NO: 2119826 - DNA, 25 bp, Homo sapien
ctgaactgaactcttcaggcaattc

SEQ ID NO: 2119827 - DNA, 25 bp, Homo sapien
tctggtgactctgaactgaactctt

SEQ ID NO: 2119828 - DNA, 25 bp, Homo sapien
ctaaaggtcctttcagcattgcgat

SEQ ID NO: 2119829 - DNA, 25 bp, Homo sapien
gggagagagccctaggtctgacctt

SEQ ID NO: 2119830 - DNA, 25 bp, Homo sapien
aggtagcccagccaaacagtttgta

SEQ ID NO: 2119831 - DNA, 25 bp, Homo sapien
gaaaaaagtgtccagctattcccac

SEQ ID NO: 2119832 - DNA, 25 bp, Homo sapien
gtggctgacccaaagggctccccat

SEQ ID NO: 2119833 - DNA, 25 bp, Homo sapien
ccccatcagctaaaggccaaacaag

SEQ ID NO: 2119834 - DNA, 25 bp, Homo sapien
gccaaacaagggcacctaattgtgc

SEQ ID NO: 2119835 - DNA, 25 bp, Homo sapien
ggtggctgacccaaagggctcccca

SEQ ID NO: 2119836 - DNA, 25 bp, Homo sapien
cagggatctctggtcatccaaaatg

SEQ ID NO: 2119837 - DNA, 25 bp, Homo sapien
tccaaaatgctttctggcccagaga

SEQ ID NO: 2119838 - DNA, 25 bp, Homo sapien
catgacaggaaccttgaggttagca

SEQ ID NO: 2119839 - DNA, 25 bp, Homo sapien
tttctggcccagagatccccatgac

SEQ ID NO: 2119840 - DNA, 25 bp, Homo sapien
tggactctccagagaagacgctggg

SEQ ID NO: 2119841 - DNA, 25 bp, Homo sapien
tggcactggtcaaaaagtccagact

SEQ ID NO: 2119842 - DNA, 25 bp, Homo sapien
aaaagtccagacttctggacaccac

SEQ ID NO: 2119843 - DNA, 25 bp, Homo sapien
tggacaccaccccaagcttactgaa

SEQ ID NO: 2119844 - DNA, 25 bp, Homo sapien
gacgcttctggccctaatcaaaaag

SEQ ID NO: 2119845 - DNA, 25 bp, Homo sapien
gggggacgcttctggccctaatcaa

SEQ ID NO: 2119846 - DNA, 25 bp, Homo sapien
gcagggggacgcttctggccctaat

SEQ ID NO: 2119847 - DNA, 25 bp, Homo sapien
gggacgcttctggccctaatcaaaa

SEQ ID NO: 2119848 - DNA, 25 bp, Homo sapien
tgggcttcactctttagcgtcactt

SEQ ID NO: 2119849 - DNA, 25 bp, Homo sapien
taaaagaagtgcagacccatcatta

SEQ ID NO: 2119850 - DNA, 25 bp, Homo sapien
gactggaaactgaccatttttggct

SEQ ID NO: 2119851 - DNA, 25 bp, Homo sapien
cagatgggcaaagcccctatccggg

SEQ ID NO: 2119852 - DNA, 25 bp, Homo sapien
catttcaactggaagacaagggcac

SEQ ID NO: 2119853 - DNA, 25 bp, Homo sapien
tgtcatccgaagctcctcaagaagc

SEQ ID NO: 2119854 - DNA, 25 bp, Homo sapien
cacactggaaactgagagttactcc

SEQ ID NO: 2119855 - DNA, 25 bp, Homo sapien
gagttactcctccaattaccatatg

SEQ ID NO: 2119856 - DNA, 25 bp, Homo sapien
gacttggaagtggtaactggtacag

SEQ ID NO: 2119857 - DNA, 25 bp, Homo sapien
gctaggacctcttccagactctcaa

SEQ ID NO: 2119858 - DNA, 25 bp, Homo sapien
tggtacagttatctgctaggacctc

SEQ ID NO: 2119859 - DNA, 25 bp, Homo sapien
gacctcttccagactctcaatacag

SEQ ID NO: 2119860 - DNA, 25 bp, Homo sapien
gaaggatgtgccctaccaacgcaat

SEQ ID NO: 2119861 - DNA, 25 bp, Homo sapien
tcacactgccttcatcaggtcggaa

SEQ ID NO: 2119862 - DNA, 25 bp, Homo sapien
tggccagagaatagtcatcacagcg

SEQ ID NO: 2119863 - DNA, 25 bp, Homo sapien
agttctagtatcttccttggccaga

SEQ ID NO: 2119864 - DNA, 25 bp, Homo sapien
taatcagggattcaagagtgcaaga

SEQ ID NO: 2119865 - DNA, 25 bp, Homo sapien
ttcttttcgggcctagacgctgctc

SEQ ID NO: 2119866 - DNA, 25 bp, Homo sapien
actggatgctcacccttagtaggca

SEQ ID NO: 2119867 - DNA, 25 bp, Homo sapien
gaagtcctgatcaaagaaggtccct

SEQ ID NO: 2119868 - DNA, 25 bp, Homo sapien
caggcaacctacggaaccagagaaa

SEQ ID NO: 2119869 - DNA, 25 bp, Homo sapien
cactgggttccacatgataatctaa

SEQ ID NO: 2119870 - DNA, 25 bp, Homo sapien
taataagagccatctgataaagcca

SEQ ID NO: 2119871 - DNA, 25 bp, Homo sapien
taatatcaggacaaagagcactggg

SEQ ID NO: 2119872 - DNA, 25 bp, Homo sapien
tgcagatcagcctacaactaagagc

SEQ ID NO: 2119873 - DNA, 25 bp, Homo sapien
tcaaatagctgcttcccggtggtgt

SEQ ID NO: 2119874 - DNA, 25 bp, Homo sapien
ctggtcaaatagctgcttcccggtg

SEQ ID NO: 2119875 - DNA, 25 bp, Homo sapien
aaatagctgcttcccggtggtgttg

SEQ ID NO: 2119876 - DNA, 25 bp, Homo sapien
ggtcaaatagctgcttcccggtggt

SEQ ID NO: 2119877 - DNA, 25 bp, Homo sapien
ttgagcaaccctcctggcacaatct

SEQ ID NO: 2119878 - DNA, 25 bp, Homo sapien
tgggcttgagcaaccctcctggcac

SEQ ID NO: 2119879 - DNA, 25 bp, Homo sapien
gcttgagcaaccctcctggcacaat

SEQ ID NO: 2119880 - DNA, 25 bp, Homo sapien
gggcttgagcaaccctcctggcaca

SEQ ID NO: 2119881 - DNA, 25 bp, Homo sapien
gtttaagccccagctataccacttc

SEQ ID NO: 2119882 - DNA, 25 bp, Homo sapien
tgatcaaaagcattagaaaaactgg

SEQ ID NO: 2119883 - DNA, 25 bp, Homo sapien
gctatatgaccttaaacagataatt

SEQ ID NO: 2119884 - DNA, 25 bp, Homo sapien
aactggaaatgctatgtgccctggt

SEQ ID NO: 2119885 - DNA, 25 bp, Homo sapien
ccttttgacatgtggaggcaaccta

SEQ ID NO: 2119886 - DNA, 25 bp, Homo sapien
ttttgacatgtggaggcaacctaca

SEQ ID NO: 2119887 - DNA, 25 bp, Homo sapien
cttttgacatgtggaggcaacctac

SEQ ID NO: 2119888 - DNA, 25 bp, Homo sapien
ctccttttgacatgtggaggcaacc

SEQ ID NO: 2119889 - DNA, 25 bp, Homo sapien
tgaggtaggcacagactatgcagcc

SEQ ID NO: 2119890 - DNA, 25 bp, Homo sapien
tgtagaggctaagagactccaagac

SEQ ID NO: 2119891 - DNA, 25 bp, Homo sapien
aaatggactcagacaagcagcaact

SEQ ID NO: 2119892 - DNA, 25 bp, Homo sapien
tcccaggagtgagaccgttagcctc

SEQ ID NO: 2119893 - DNA, 25 bp, Homo sapien
acttccctcaagccaatagttttca

SEQ ID NO: 2119894 - DNA, 25 bp, Homo sapien
gtgtcctggtactgcagaccaaaga

SEQ ID NO: 2119895 - DNA, 25 bp, Homo sapien
tgtcctggtactgcagaccaaagaa

SEQ ID NO: 2119896 - DNA, 25 bp, Homo sapien
ttccctcaagccaatagttttcacc

SEQ ID NO: 2119897 - DNA, 25 bp, Homo sapien
attgaagtcgccatacttagactgg

SEQ ID NO: 2119898 - DNA, 25 bp, Homo sapien
agaacaggcgctgagtgatgtcctg

SEQ ID NO: 2119899 - DNA, 25 bp, Homo sapien
cttatgcacttccttattgaagtcg

SEQ ID NO: 2119900 - DNA, 25 bp, Homo sapien
aaagaacaggcgctgagtgatgtcc

SEQ ID NO: 2119901 - DNA, 25 bp, Homo sapien
ctgagcatgccacggtgttcctcat

SEQ ID NO: 2119902 - DNA, 25 bp, Homo sapien
atctccagatcttgagcaatcttca

SEQ ID NO: 2119903 - DNA, 25 bp, Homo sapien
caccatacatctccagatcttgagc

SEQ ID NO: 2119904 - DNA, 25 bp, Homo sapien
tacatctccagatcttgagcaatct

SEQ ID NO: 2119905 - DNA, 25 bp, Homo sapien
atacatctccagatcttgagcaatc

SEQ ID NO: 2119906 - DNA, 25 bp, Homo sapien
ttcactccaggggaagcctatcttg

SEQ ID NO: 2119907 - DNA, 25 bp, Homo sapien
ggcttttttgtcaatgggcttgatg

SEQ ID NO: 2119908 - DNA, 25 bp, Homo sapien
tgacaaatttcttatcattgaaaga

SEQ ID NO: 2119909 - DNA, 25 bp, Homo sapien
tcaatgggcttgatgacaaatttct

SEQ ID NO: 2119910 - DNA, 25 bp, Homo sapien
tcaggcttgcgacggcgcatgtata

SEQ ID NO: 2119911 - DNA, 25 bp, Homo sapien
ttccccatgcacaaggccaagatcc

SEQ ID NO: 2119912 - DNA, 25 bp, Homo sapien
cacaaggccaagatccgcttgttaa

SEQ ID NO: 2119913 - DNA, 25 bp, Homo sapien
cttgcgacggcgcatgtatagttca

SEQ ID NO: 2119914 - DNA, 25 bp, Homo sapien
tgctgagccttcttagtctgttcct

SEQ ID NO: 2119915 - DNA, 25 bp, Homo sapien
tcttagtctgttcctcgatctgctt

SEQ ID NO: 2119916 - DNA, 25 bp, Homo sapien
agtctgttcctcgatctgcttcagc

SEQ ID NO: 2119917 - DNA, 25 bp, Homo sapien
gagccttcttagtctgttcctcgat

SEQ ID NO: 2119918 - DNA, 25 bp, Homo sapien
taaagacgacacaatagcttcgttc

SEQ ID NO: 2119919 - DNA, 25 bp, Homo sapien
cacagagataaagacgacacaatag

SEQ ID NO: 2119920 - DNA, 25 bp, Homo sapien
acagagataaagacgacacaatagc

SEQ ID NO: 2119921 - DNA, 25 bp, Homo sapien
gcacagagataaagacgacacaata

SEQ ID NO: 2119922 - DNA, 25 bp, Homo sapien
tccagagccctacgggtctgttctt

SEQ ID NO: 2119923 - DNA, 25 bp, Homo sapien
agccctacgggtctgttcttccagt

SEQ ID NO: 2119924 - DNA, 25 bp, Homo sapien
gttccagagccctacgggtctgttc

SEQ ID NO: 2119925 - DNA, 25 bp, Homo sapien
agagccctacgggtctgttcttcca

SEQ ID NO: 2119926 - DNA, 25 bp, Homo sapien
cagctgttcctgagtctttttctgg

SEQ ID NO: 2119927 - DNA, 25 bp, Homo sapien
tccttggcctcttcagcttcttgac

SEQ ID NO: 2119928 - DNA, 25 bp, Homo sapien
ctgagtctttttctggtcccgggag

SEQ ID NO: 2119929 - DNA, 25 bp, Homo sapien
tgttcctgagtctttttctggtccc

SEQ ID NO: 2119930 - DNA, 25 bp, Homo sapien
tcactctccttcttctgtcgggcca

SEQ ID NO: 2119931 - DNA, 25 bp, Homo sapien
ccatctccagctgggagattcgagc

SEQ ID NO: 2119932 - DNA, 25 bp, Homo sapien
tgtcgggccatctccagctgggaga

SEQ ID NO: 2119933 - DNA, 25 bp, Homo sapien
tgggagattcgagctgtcagctctg

SEQ ID NO: 2119934 - DNA, 25 bp, Homo sapien
tgtccagtgacagaaggagagaaag

SEQ ID NO: 2119935 - DNA, 25 bp, Homo sapien
gtccagtgacagaaggagagaaaga

SEQ ID NO: 2119936 - DNA, 25 bp, Homo sapien
ctgtccagtgacagaaggagagaaa

SEQ ID NO: 2119937 - DNA, 25 bp, Homo sapien
gcccgtaggtcagcactagcctctg

SEQ ID NO: 2119938 - DNA, 25 bp, Homo sapien
agctcagcacgggtcttctccaagt

SEQ ID NO: 2119939 - DNA, 25 bp, Homo sapien
atggcagtcttcagctcagcacggg

SEQ ID NO: 2119940 - DNA, 25 bp, Homo sapien
ggtccttggccatagcatcagcccg

SEQ ID NO: 2119941 - DNA, 25 bp, Homo sapien
ggcccagtcgcatgttctcagcatg

SEQ ID NO: 2119942 - DNA, 25 bp, Homo sapien
agggtcttgtatttgtctcggccca

SEQ ID NO: 2119943 - DNA, 25 bp, Homo sapien
ttacatagactcaaattcgtcaatg

SEQ ID NO: 2119944 - DNA, 25 bp, Homo sapien
aaattcgtcaatgcgctgcttggtg

SEQ ID NO: 2119945 - DNA, 25 bp, Homo sapien
tgtggaagggactaggccagaatcc

SEQ ID NO: 2119946 - DNA, 25 bp, Homo sapien
catagagctcactttagaccggcct

SEQ ID NO: 2119947 - DNA, 25 bp, Homo sapien
taaacttggatcagggcacaggctt

SEQ ID NO: 2119948 - DNA, 25 bp, Homo sapien
caagtggaaagtacctctaggctgg

SEQ ID NO: 2119949 - DNA, 25 bp, Homo sapien
tatcaccaagtgagctaattcacag

SEQ ID NO: 2119950 - DNA, 25 bp, Homo sapien
atatcaccaagtgagctaattcaca

SEQ ID NO: 2119951 - DNA, 25 bp, Homo sapien
ctgctcagccaaattttggcttcga

SEQ ID NO: 2119952 - DNA, 25 bp, Homo sapien
gcagttctcccagagtcggcccggc

SEQ ID NO: 2119953 - DNA, 25 bp, Homo sapien
agagggcagttctcccagagtcggc

SEQ ID NO: 2119954 - DNA, 25 bp, Homo sapien
gagggcagttctcccagagtcggcc

SEQ ID NO: 2119955 - DNA, 25 bp, Homo sapien
gggcagttctcccagagtcggcccg

SEQ ID NO: 2119956 - DNA, 25 bp, Homo sapien
cactctgcatgggagtttggaggcc

SEQ ID NO: 2119957 - DNA, 25 bp, Homo sapien
ctctgcatgggagtttggaggcccc

SEQ ID NO: 2119958 - DNA, 25 bp, Homo sapien
caccacgttggccatcttcactctg

SEQ ID NO: 2119959 - DNA, 25 bp, Homo sapien
cttcactctgcatgggagtttggag

SEQ ID NO: 2119960 - DNA, 25 bp, Homo sapien
ctgtttagtgacagaatcaaggact

SEQ ID NO: 2119961 - DNA, 25 bp, Homo sapien
ttcctgcaagtgtagcccccacaaa

SEQ ID NO: 2119962 - DNA, 25 bp, Homo sapien
gaggtcctgaggtacctagcgccac

SEQ ID NO: 2119963 - DNA, 25 bp, Homo sapien
tgtgaaggcttagggtactgggccc

SEQ ID NO: 2119964 - DNA, 25 bp, Homo sapien
cctgcaggatatgggccagtgagtc

SEQ ID NO: 2119965 - DNA, 25 bp, Homo sapien
ccctgaaagctgagagttgtcctgc

SEQ ID NO: 2119966 - DNA, 25 bp, Homo sapien
gggacatcatcacgggtccgggcac

SEQ ID NO: 2119967 - DNA, 25 bp, Homo sapien
tcaggaccatagagggcccatgaca

SEQ ID NO: 2119968 - DNA, 25 bp, Homo sapien
ggcagctttgctggacactgctggg

SEQ ID NO: 2119969 - DNA, 25 bp, Homo sapien
gatgtgccataggaggtcaggacca

SEQ ID NO: 2119970 - DNA, 25 bp, Homo sapien
gtgtcagtgaggccaacaggaacct

SEQ ID NO: 2119971 - DNA, 25 bp, Homo sapien
acggtatgattcagtgctccacttc

SEQ ID NO: 2119972 - DNA, 25 bp, Homo sapien
catgcatcaacaaaacggtatgatt

SEQ ID NO: 2119973 - DNA, 25 bp, Homo sapien
agtgaggccaacaggaacctgaaca

SEQ ID NO: 2119974 - DNA, 25 bp, Homo sapien
gcagggtccaactagaagctgagct

SEQ ID NO: 2119975 - DNA, 25 bp, Homo sapien
attgtcagcagggtccaactagaag

SEQ ID NO: 2119976 - DNA, 25 bp, Homo sapien
tgtcagcagggtccaactagaagct

SEQ ID NO: 2119977 - DNA, 25 bp, Homo sapien
ggtccaactagaagctgagcttcca

SEQ ID NO: 2119978 - DNA, 25 bp, Homo sapien
aacaaccagactatttgaaggtact

SEQ ID NO: 2119979 - DNA, 25 bp, Homo sapien
gtttctttgggagatccacaatgaa

SEQ ID NO: 2119980 - DNA, 25 bp, Homo sapien
gagatccacaatgaatttgtgcagg

SEQ ID NO: 2119981 - DNA, 25 bp, Homo sapien
tccttggagtgtgccaaaaactgca

SEQ ID NO: 2119982 - DNA, 25 bp, Homo sapien
tgtgcaggacttgcgtttccttgga

SEQ ID NO: 2119983 - DNA, 25 bp, Homo sapien
caggggtatgcgctcaataagctca

SEQ ID NO: 2119984 - DNA, 25 bp, Homo sapien
taagctcatgttcccatccagtctc

SEQ ID NO: 2119985 - DNA, 25 bp, Homo sapien
caataagctcatgttcccatccagt

SEQ ID NO: 2119986 - DNA, 25 bp, Homo sapien
aacaattccaacaggggtatgcgct

SEQ ID NO: 2119987 - DNA, 25 bp, Homo sapien
tgaggcacgttttgctgactaccta

SEQ ID NO: 2119988 - DNA, 25 bp, Homo sapien
cacgtggacacctgaaacaaggatc

SEQ ID NO: 2119989 - DNA, 25 bp, Homo sapien
tctggttagccaaggcacgtggaca

SEQ ID NO: 2119990 - DNA, 25 bp, Homo sapien
caaggatccgagcaaggtaagtagt

SEQ ID NO: 2119991 - DNA, 25 bp, Homo sapien
gaattgcaaccctgtggtgcacacc

SEQ ID NO: 2119992 - DNA, 25 bp, Homo sapien
tgctgcttgaactcactcctaagtg

SEQ ID NO: 2119993 - DNA, 25 bp, Homo sapien
tgctttcgccacttgtggattccct

SEQ ID NO: 2119994 - DNA, 25 bp, Homo sapien
ttaagcctcttagctcatagccttg

SEQ ID NO: 2119995 - DNA, 25 bp, Homo sapien
tagccttgctgactcatactctgag

SEQ ID NO: 2119996 - DNA, 25 bp, Homo sapien
agctctctcttcacttatgcctgga

SEQ ID NO: 2119997 - DNA, 25 bp, Homo sapien
tgcatagaatcatactcccagctct

SEQ ID NO: 2119998 - DNA, 25 bp, Homo sapien
caccatcctctgcatagaatcatac

SEQ ID NO: 2119999 - DNA, 25 bp, Homo sapien
ctcttcacttatgcctggaatgagg

SEQ ID NO: 2120000 - DNA, 25 bp, Homo sapien
ctttgtaaaccacaaagtactgtgt

SEQ ID NO: 2120001 - DNA, 25 bp, Homo sapien
tgaggcttgacagatcaagggagaa

SEQ ID NO: 2120002 - DNA, 25 bp, Homo sapien
gctttgtaaaccacaaagtactgtg

SEQ ID NO: 2120003 - DNA, 25 bp, Homo sapien
atttgaggcttgacagatcaaggga

SEQ ID NO: 2120004 - DNA, 25 bp, Homo sapien
gagggtcatcctctgttcttaccat

SEQ ID NO: 2120005 - DNA, 25 bp, Homo sapien
tatgtatcagtgctccctggtccct

SEQ ID NO: 2120006 - DNA, 25 bp, Homo sapien
ttgctacagcgagttgattccaggc

SEQ ID NO: 2120007 - DNA, 25 bp, Homo sapien
gattccaggcaaatagaagtatccc

SEQ ID NO: 2120008 - DNA, 25 bp, Homo sapien
gctgccctcttgtagagagctccac

SEQ ID NO: 2120009 - DNA, 25 bp, Homo sapien
ggaatcgctgccctcttgtagagag

SEQ ID NO: 2120010 - DNA, 25 bp, Homo sapien
gaggtccacctcgaagggaatcgct

SEQ ID NO: 2120011 - DNA, 25 bp, Homo sapien
cctcgaagggaatcgctgccctctt

SEQ ID NO: 2120012 - DNA, 25 bp, Homo sapien
gctctgcgacagacgcatgcacgat

SEQ ID NO: 2120013 - DNA, 25 bp, Homo sapien
tagaggcatagcactctgcggctgg

SEQ ID NO: 2120014 - DNA, 25 bp, Homo sapien
gtccgccccgcagacaagaaagaga

SEQ ID NO: 2120015 - DNA, 25 bp, Homo sapien
taggacctaaccaggaagcgctgct

SEQ ID NO: 2120016 - DNA, 25 bp, Homo sapien
ctccagaggcttgactgcagactca

SEQ ID NO: 2120017 - DNA, 25 bp, Homo sapien
cctccagaggcttgactgcagactc

SEQ ID NO: 2120018 - DNA, 25 bp, Homo sapien
gtacctccagaggcttgactgcaga

SEQ ID NO: 2120019 - DNA, 25 bp, Homo sapien
tacctccagaggcttgactgcagac

SEQ ID NO: 2120020 - DNA, 25 bp, Homo sapien
cccctcctcatttttatcatccgaa

SEQ ID NO: 2120021 - DNA, 25 bp, Homo sapien
ctcctcatttttatcatccgaaggc

SEQ ID NO: 2120022 - DNA, 25 bp, Homo sapien
tcagttaatttctccacctttctcc

SEQ ID NO: 2120023 - DNA, 25 bp, Homo sapien
tctccccctcctcatttttatcatc

SEQ ID NO: 2120024 - DNA, 25 bp, Homo sapien
tgcattcaagaaggagtagtcctcc

SEQ ID NO: 2120025 - DNA, 25 bp, Homo sapien
tcagctttaccttggtcaatcaggc

SEQ ID NO: 2120026 - DNA, 25 bp, Homo sapien
tgggttatagttcagatgagactct

SEQ ID NO: 2120027 - DNA, 25 bp, Homo sapien
cagtgccaagggactggcttaccca

SEQ ID NO: 2120028 - DNA, 25 bp, Homo sapien
gagaaacttctgcttcgggttgtgg

SEQ ID NO: 2120029 - DNA, 25 bp, Homo sapien
cctgctttgattagtgagagctctc

SEQ ID NO: 2120030 - DNA, 25 bp, Homo sapien
taagaacttctcaggatgcctaatc

SEQ ID NO: 2120031 - DNA, 25 bp, Homo sapien
tggtgagcctactagtcaaagagga

SEQ ID NO: 2120032 - DNA, 25 bp, Homo sapien
gatcatcaaccaaatagcctgttct

SEQ ID NO: 2120033 - DNA, 25 bp, Homo sapien
aagatcatcaaccaaatagcctgtt

SEQ ID NO: 2120034 - DNA, 25 bp, Homo sapien
catcaaccaaatagcctgttctcag

SEQ ID NO: 2120035 - DNA, 25 bp, Homo sapien
aaccaaatagcctgttctcagacac

SEQ ID NO: 2120036 - DNA, 25 bp, Homo sapien
ccttggtcatggaggggactctgat

SEQ ID NO: 2120037 - DNA, 25 bp, Homo sapien
ctgtcagtggagtggtgccttggtc

SEQ ID NO: 2120038 - DNA, 25 bp, Homo sapien
tgtcagtggagtggtgccttggtca

SEQ ID NO: 2120039 - DNA, 25 bp, Homo sapien
cagtggagtggtgccttggtcatgg

SEQ ID NO: 2120040 - DNA, 25 bp, Homo sapien
tttccagagcctcccacataggagc

SEQ ID NO: 2120041 - DNA, 25 bp, Homo sapien
cctatggttggaggccagccaagca

SEQ ID NO: 2120042 - DNA, 25 bp, Homo sapien
aaaaggaccttgtctcagcccctgg

SEQ ID NO: 2120043 - DNA, 25 bp, Homo sapien
cccacataggagctcaaaaggacct

SEQ ID NO: 2120044 - DNA, 25 bp, Homo sapien
ttctgtggggaagtgagatcttcct

SEQ ID NO: 2120045 - DNA, 25 bp, Homo sapien
caagagcttctgtggggaagtgaga

SEQ ID NO: 2120046 - DNA, 25 bp, Homo sapien
agcttctgtggggaagtgagatctt

SEQ ID NO: 2120047 - DNA, 25 bp, Homo sapien
tctgtggggaagtgagatcttcctg

SEQ ID NO: 2120048 - DNA, 25 bp, Homo sapien
cttgtcaaatacacggagcgtggca

SEQ ID NO: 2120049 - DNA, 25 bp, Homo sapien
taccacatggagtgtccaactcagc

SEQ ID NO: 2120050 - DNA, 25 bp, Homo sapien
gcttgtcaaatacacggagcgtggc

SEQ ID NO: 2120051 - DNA, 25 bp, Homo sapien
cactctaccacatggagtgtccaac

SEQ ID NO: 2120052 - DNA, 25 bp, Homo sapien
aggcatacataccagggcccaggga

SEQ ID NO: 2120053 - DNA, 25 bp, Homo sapien
cagcactctcatggtgtgtgtagac

SEQ ID NO: 2120054 - DNA, 25 bp, Homo sapien
ggtgtcctcagatataatgcctcag

SEQ ID NO: 2120055 - DNA, 25 bp, Homo sapien
tctgtaactaaagtactgggctgtg

SEQ ID NO: 2120056 - DNA, 25 bp, Homo sapien
gaaaagatctccagaagagcgggaa

SEQ ID NO: 2120057 - DNA, 25 bp, Homo sapien
gtgacctttcttaggcagatggctg

SEQ ID NO: 2120058 - DNA, 25 bp, Homo sapien
tacaggacaagctagtaaagaattc

SEQ ID NO: 2120059 - DNA, 25 bp, Homo sapien
gactcccagggatatctcaaagtca

SEQ ID NO: 2120060 - DNA, 25 bp, Homo sapien
gatgcatctcaagtaagccagctgc

SEQ ID NO: 2120061 - DNA, 25 bp, Homo sapien
ttctagtatctctgccgggggcttc

SEQ ID NO: 2120062 - DNA, 25 bp, Homo sapien
ggctctgggcccttctagtatctct

SEQ ID NO: 2120063 - DNA, 25 bp, Homo sapien
gggcttctggtactcctctctaaat

SEQ ID NO: 2120064 - DNA, 25 bp, Homo sapien
caattgagcaccctggagatggatg

SEQ ID NO: 2120065 - DNA, 25 bp, Homo sapien
gaagtggctggtacaacgtggctca

SEQ ID NO: 2120066 - DNA, 25 bp, Homo sapien
tgaccggagccactacacgtgtgaa

SEQ ID NO: 2120067 - DNA, 25 bp, Homo sapien
tgtgagccacaaggttccaggagat

SEQ ID NO: 2120068 - DNA, 25 bp, Homo sapien
tatgattcccggataggcagtggca

SEQ ID NO: 2120069 - DNA, 25 bp, Homo sapien
ctatgattcccggataggcagtggc

SEQ ID NO: 2120070 - DNA, 25 bp, Homo sapien
catccatcaactgaacagaggtgca

SEQ ID NO: 2120071 - DNA, 25 bp, Homo sapien
cagaaagaagtttgaggatctcaga

SEQ ID NO: 2120072 - DNA, 25 bp, Homo sapien
ggcccagaagagtggcatacatgtg

SEQ ID NO: 2120073 - DNA, 25 bp, Homo sapien
acatgtgttgtcttcatcacatcca

SEQ ID NO: 2120074 - DNA, 25 bp, Homo sapien
tccaatggcttggatcatataactc

SEQ ID NO: 2120075 - DNA, 25 bp, Homo sapien
caaatgctttagtgcttggactgct

SEQ ID NO: 2120076 - DNA, 25 bp, Homo sapien
tataactctggctgactagtagacc

SEQ ID NO: 2120077 - DNA, 25 bp, Homo sapien
taaaaccacagcacggaatcaaatg

SEQ ID NO: 2120078 - DNA, 25 bp, Homo sapien
tttgtgatgaggagatcttggctag

SEQ ID NO: 2120079 - DNA, 25 bp, Homo sapien
tgtgatgaggagatcttggctagga

SEQ ID NO: 2120080 - DNA, 25 bp, Homo sapien
ttgtgatgaggagatcttggctagg

SEQ ID NO: 2120081 - DNA, 25 bp, Homo sapien
tgatgaggagatcttggctaggagc

SEQ ID NO: 2120082 - DNA, 25 bp, Homo sapien
cctgagtccgccagccatgttcagt

SEQ ID NO: 2120083 - DNA, 25 bp, Homo sapien
tgtcagcggcccattaatgctgcac

SEQ ID NO: 2120084 - DNA, 25 bp, Homo sapien
ctttctcctaaattaagtccaggat

SEQ ID NO: 2120085 - DNA, 25 bp, Homo sapien
cagtcagtatcttggttacagggcc

SEQ ID NO: 2120086 - DNA, 25 bp, Homo sapien
ccagaagccttattgggccactaac

SEQ ID NO: 2120087 - DNA, 25 bp, Homo sapien
tccttcagaagagagatctggatcc

SEQ ID NO: 2120088 - DNA, 25 bp, Homo sapien
gagtgactgagaaagcaaaacccat

SEQ ID NO: 2120089 - DNA, 25 bp, Homo sapien
cagttttttcaatggtgtagcagga

SEQ ID NO: 2120090 - DNA, 25 bp, Homo sapien
tccatcagtcagttgaggccacaag

SEQ ID NO: 2120091 - DNA, 25 bp, Homo sapien
tagtagactcgagtggctccatcag

SEQ ID NO: 2120092 - DNA, 25 bp, Homo sapien
tccagaggctggttcgtgatgacat

SEQ ID NO: 2120093 - DNA, 25 bp, Homo sapien
tcccggatgcccaggtagtagactc

SEQ ID NO: 2120094 - DNA, 25 bp, Homo sapien
ccctatccggttcttgtcagacttt

SEQ ID NO: 2120095 - DNA, 25 bp, Homo sapien
tcaggtgaataagaatgacatcccc

SEQ ID NO: 2120096 - DNA, 25 bp, Homo sapien
tccttctcgtagaagacaccatgag

SEQ ID NO: 2120097 - DNA, 25 bp, Homo sapien
ggtatagggacgagtggcaaaattc

SEQ ID NO: 2120098 - DNA, 25 bp, Homo sapien
cagcatcggtgggtgcatggccttc

SEQ ID NO: 2120099 - DNA, 25 bp, Homo sapien
agtcatcagctttcagtggcccaga

SEQ ID NO: 2120100 - DNA, 25 bp, Homo sapien
cagttgtagatatggctgccccccg

SEQ ID NO: 2120101 - DNA, 25 bp, Homo sapien
cccgggggaacagagtcatcagctt

SEQ ID NO: 2120102 - DNA, 25 bp, Homo sapien
ctcttttacaggtgatgagaggccc

SEQ ID NO: 2120103 - DNA, 25 bp, Homo sapien
tttacaggtgatgagaggcccaatt

SEQ ID NO: 2120104 - DNA, 25 bp, Homo sapien
ttgcaatgtctcgtggagcatctac

SEQ ID NO: 2120105 - DNA, 25 bp, Homo sapien
ccagttgcaatgtctcgtggagcat

SEQ ID NO: 2120106 - DNA, 25 bp, Homo sapien
tgaaaggggtactcataagaaagga

SEQ ID NO: 2120107 - DNA, 25 bp, Homo sapien
cttgagaagatcctttccttagcaa

SEQ ID NO: 2120108 - DNA, 25 bp, Homo sapien
agtaagacagtttcccttgagaaga

SEQ ID NO: 2120109 - DNA, 25 bp, Homo sapien
ctagggcaagtaagacagtttccct

SEQ ID NO: 2120110 - DNA, 25 bp, Homo sapien
catggtctacatcctggcgttgagg

SEQ ID NO: 2120111 - DNA, 25 bp, Homo sapien
ttctcattgagatgccagctgaggt

SEQ ID NO: 2120112 - DNA, 25 bp, Homo sapien
catctaccacactgaagaggaggaa

SEQ ID NO: 2120113 - DNA, 25 bp, Homo sapien
aagaaatcatggtctacatcctggc

SEQ ID NO: 2120114 - DNA, 25 bp, Homo sapien
cgggtagtcagcatctgtccatgga

SEQ ID NO: 2120115 - DNA, 25 bp, Homo sapien
catgttcagctcaggtaaattccca

SEQ ID NO: 2120116 - DNA, 25 bp, Homo sapien
caagtgccaggccacacgtttctgt

SEQ ID NO: 2120117 - DNA, 25 bp, Homo sapien
tcagtgtggtgtccacgggtagtca

SEQ ID NO: 2120118 - DNA, 25 bp, Homo sapien
gttcacttggcagctaattaaccag

SEQ ID NO: 2120119 - DNA, 25 bp, Homo sapien
ttcacttggcagctaattaaccagg

SEQ ID NO: 2120120 - DNA, 25 bp, Homo sapien
ctcgaaagtgactgttcacttggca

SEQ ID NO: 2120121 - DNA, 25 bp, Homo sapien
cgaaagtgactgttcacttggcagc

SEQ ID NO: 2120122 - DNA, 25 bp, Homo sapien
ggccatagtcccattgaatctcatg

SEQ ID NO: 2120123 - DNA, 25 bp, Homo sapien
catgggcctcaatgaagtactgtcg

SEQ ID NO: 2120124 - DNA, 25 bp, Homo sapien
tactgtcgaactttgcctgtgagca

SEQ ID NO: 2120125 - DNA, 25 bp, Homo sapien
tggagcaagacttgaccttgtagag

SEQ ID NO: 2120126 - DNA, 25 bp, Homo sapien
catcttgaaaggcttcatatcgcac

SEQ ID NO: 2120127 - DNA, 25 bp, Homo sapien
tatcgcactttccagtaagtgcccc

SEQ ID NO: 2120128 - DNA, 25 bp, Homo sapien
aagatgcctatcttcctccaaatgc

SEQ ID NO: 2120129 - DNA, 25 bp, Homo sapien
taagtgcccccaattcggctggagc

SEQ ID NO: 2120130 - DNA, 25 bp, Homo sapien
cagctgatgtaagatctattgtcca

SEQ ID NO: 2120131 - DNA, 25 bp, Homo sapien
attgtatctccctatccagctgatg

SEQ ID NO: 2120132 - DNA, 25 bp, Homo sapien
agatctagaatcaactggcacacac

SEQ ID NO: 2120133 - DNA, 25 bp, Homo sapien
catctctccttcctatggtggattt

SEQ ID NO: 2120134 - DNA, 25 bp, Homo sapien
tctcataaaagaccccatggggctg

SEQ ID NO: 2120135 - DNA, 25 bp, Homo sapien
ggaggcacggttgtagaagaccacc

SEQ ID NO: 2120136 - DNA, 25 bp, Homo sapien
agaagaccacctgaatggtgtcacc

SEQ ID NO: 2120137 - DNA, 25 bp, Homo sapien
gtacacagtgccttcatagtctttc

SEQ ID NO: 2120138 - DNA, 25 bp, Homo sapien
atcctgagcagtgggaccggcatga

SEQ ID NO: 2120139 - DNA, 25 bp, Homo sapien
gatctgcagcagagaagtacatcca

SEQ ID NO: 2120140 - DNA, 25 bp, Homo sapien
tactttctcaaagggcttggcaacc

SEQ ID NO: 2120141 - DNA, 25 bp, Homo sapien
agtacatccaagtgagacaagcagg

SEQ ID NO: 2120142 - DNA, 25 bp, Homo sapien
catgcatccgattggagtcttggaa

SEQ ID NO: 2120143 - DNA, 25 bp, Homo sapien
tcaatatcctctgaaagcagtcgga

SEQ ID NO: 2120144 - DNA, 25 bp, Homo sapien
cagtcggaaatccaacatagcagct

SEQ ID NO: 2120145 - DNA, 25 bp, Homo sapien
tggcattgctgtaccagctcttgtt

SEQ ID NO: 2120146 - DNA, 25 bp, Homo sapien
gttagagaacagaaacccattaatg

SEQ ID NO: 2120147 - DNA, 25 bp, Homo sapien
ttagagaacagaaacccattaatgg

SEQ ID NO: 2120148 - DNA, 25 bp, Homo sapien
ggaacatgactccatgcacatcagt

SEQ ID NO: 2120149 - DNA, 25 bp, Homo sapien
gacaaaggtatgaggaaagagcata

SEQ ID NO: 2120150 - DNA, 25 bp, Homo sapien
tggaacatgactccatgcacatcag

SEQ ID NO: 2120151 - DNA, 25 bp, Homo sapien
aacatgactccatgcacatcagtct

SEQ ID NO: 2120152 - DNA, 25 bp, Homo sapien
gcctgcctggcaataaatctcaaat

SEQ ID NO: 2120153 - DNA, 25 bp, Homo sapien
tcttgcagcttggtagcgttggcga

SEQ ID NO: 2120154 - DNA, 25 bp, Homo sapien
ggtcagggcaatagtcccactctac

SEQ ID NO: 2120155 - DNA, 25 bp, Homo sapien
tctcagactggttgtgccattcccg

SEQ ID NO: 2120156 - DNA, 25 bp, Homo sapien
gatcctgaatgtaccatcagtgtat

SEQ ID NO: 2120157 - DNA, 25 bp, Homo sapien
taccatcagtgtattccctgaatac

SEQ ID NO: 2120158 - DNA, 25 bp, Homo sapien
cagtccttggccgagggatcctgaa

SEQ ID NO: 2120159 - DNA, 25 bp, Homo sapien
gagcccatccttgttgctcaggaaa

SEQ ID NO: 2120160 - DNA, 25 bp, Homo sapien
ggggcggctggcattattcttgaat

SEQ ID NO: 2120161 - DNA, 25 bp, Homo sapien
gcagccagtggccagacagtagtag

SEQ ID NO: 2120162 - DNA, 25 bp, Homo sapien
tcttgaataccacagtcaggatatc

SEQ ID NO: 2120163 - DNA, 25 bp, Homo sapien
tagtagattctagcactccatgagc

SEQ ID NO: 2120164 - DNA, 25 bp, Homo sapien
ctgaagcagacgtgatgcatgtcct

SEQ ID NO: 2120165 - DNA, 25 bp, Homo sapien
gttctttcactaagtgtccccactc

SEQ ID NO: 2120166 - DNA, 25 bp, Homo sapien
agcagacgtgatgcatgtcctttgt

SEQ ID NO: 2120167 - DNA, 25 bp, Homo sapien
gaagcctgaagcagacgtgatgcat

SEQ ID NO: 2120168 - DNA, 25 bp, Homo sapien
aggaatattagccaagtctaagcca

SEQ ID NO: 2120169 - DNA, 25 bp, Homo sapien
atattagccaagtctaagccatagc

SEQ ID NO: 2120170 - DNA, 25 bp, Homo sapien
gaatattagccaagtctaagccata

SEQ ID NO: 2120171 - DNA, 25 bp, Homo sapien
aacaggaatattagccaagtctaag

SEQ ID NO: 2120172 - DNA, 25 bp, Homo sapien
catactgtatccaagggtatataga

SEQ ID NO: 2120173 - DNA, 25 bp, Homo sapien
tcatactgtatccaagggtatatag

SEQ ID NO: 2120174 - DNA, 25 bp, Homo sapien
aacctccagttgcaccgggtcagaa

SEQ ID NO: 2120175 - DNA, 25 bp, Homo sapien
gaggcagtggtgagtgaatcccatc

SEQ ID NO: 2120176 - DNA, 25 bp, Homo sapien
agtgtaacaaggaacctccagttgc

SEQ ID NO: 2120177 - DNA, 25 bp, Homo sapien
gcaccgggtcagaaatttctctcaa

SEQ ID NO: 2120178 - DNA, 25 bp, Homo sapien
agcagagtcattgggcccagggcca

SEQ ID NO: 2120179 - DNA, 25 bp, Homo sapien
acacaagcagagtcattgggcccag

SEQ ID NO: 2120180 - DNA, 25 bp, Homo sapien
acaagcagagtcattgggcccaggg

SEQ ID NO: 2120181 - DNA, 25 bp, Homo sapien
agatccaggaaacacaagcagagtc

SEQ ID NO: 2120182 - DNA, 25 bp, Homo sapien
ctccaggtagccaatcttgtattta

SEQ ID NO: 2120183 - DNA, 25 bp, Homo sapien
tccaggtagccaatcttgtatttac

SEQ ID NO: 2120184 - DNA, 25 bp, Homo sapien
aatagcttctttttgccagggagtt

SEQ ID NO: 2120185 - DNA, 25 bp, Homo sapien
tagcttctttttgccagggagtttg

SEQ ID NO: 2120186 - DNA, 25 bp, Homo sapien
gcttctttttgccagggagtttgac

SEQ ID NO: 2120187 - DNA, 25 bp, Homo sapien
tctttttgccagggagtttgaccca

SEQ ID NO: 2120188 - DNA, 25 bp, Homo sapien
catcctgtaggttaatactgcctgg

SEQ ID NO: 2120189 - DNA, 25 bp, Homo sapien
aaattcccgatccatgtcactccgt

SEQ ID NO: 2120190 - DNA, 25 bp, Homo sapien
gatcctgggacccatgggttgccac

SEQ ID NO: 2120191 - DNA, 25 bp, Homo sapien
tattgctctccaagaaagtttcatc

SEQ ID NO: 2120192 - DNA, 25 bp, Homo sapien
ttgccagagaagtgttagtaagccc

SEQ ID NO: 2120193 - DNA, 25 bp, Homo sapien
tatgtctacctctaccaaattgtgg

SEQ ID NO: 2120194 - DNA, 25 bp, Homo sapien
cacagaaatgggcaatagccgattc

SEQ ID NO: 2120195 - DNA, 25 bp, Homo sapien
aaggtggaaatgtctatctgttgcc

SEQ ID NO: 2120196 - DNA, 25 bp, Homo sapien
tccaaaccaccttcctagactcatc

SEQ ID NO: 2120197 - DNA, 25 bp, Homo sapien
cagttggggtgatttcttcaccatc

SEQ ID NO: 2120198 - DNA, 25 bp, Homo sapien
aagactttcctgatctcctagttcc

SEQ ID NO: 2120199 - DNA, 25 bp, Homo sapien
ttttaaagtccagtcaaatcttcac

SEQ ID NO: 2120200 - DNA, 25 bp, Homo sapien
aaggttggcatagagtttcccattg

SEQ ID NO: 2120201 - DNA, 25 bp, Homo sapien
ctaaggttggcatagagtttcccat

SEQ ID NO: 2120202 - DNA, 25 bp, Homo sapien
cctaaggttggcatagagtttccca

SEQ ID NO: 2120203 - DNA, 25 bp, Homo sapien
taaggttggcatagagtttcccatt

SEQ ID NO: 2120204 - DNA, 25 bp, Homo sapien
ggtgtgtagatccacatcttggccc

SEQ ID NO: 2120205 - DNA, 25 bp, Homo sapien
caggccactcgttctccttggtaca

SEQ ID NO: 2120206 - DNA, 25 bp, Homo sapien
tgtaccaggccactcgttctccttg

SEQ ID NO: 2120207 - DNA, 25 bp, Homo sapien
aagctctctgcatgaaagtggatgg

SEQ ID NO: 2120208 - DNA, 25 bp, Homo sapien
agtgaagagggtctccatgccagca

SEQ ID NO: 2120209 - DNA, 25 bp, Homo sapien
ggcagtgcatcagccatgtcccagg

SEQ ID NO: 2120210 - DNA, 25 bp, Homo sapien
cctgggaacagatccaccacatctg

SEQ ID NO: 2120211 - DNA, 25 bp, Homo sapien
catgccagcatggacatggtcagtc

SEQ ID NO: 2120212 - DNA, 25 bp, Homo sapien
gatgacggtgagagggcttaagtgt

SEQ ID NO: 2120213 - DNA, 25 bp, Homo sapien
tcagtctctttggtgatgacggtga

SEQ ID NO: 2120214 - DNA, 25 bp, Homo sapien
atgacggtgagagggcttaagtgtt

SEQ ID NO: 2120215 - DNA, 25 bp, Homo sapien
ctctttggtgatgacggtgagaggg

SEQ ID NO: 2120216 - DNA, 25 bp, Homo sapien
tttatagacgctgaaaaatagcggc

SEQ ID NO: 2120217 - DNA, 25 bp, Homo sapien
gatatccctggtacctgacacttgt

SEQ ID NO: 2120218 - DNA, 25 bp, Homo sapien
taacaaccatacctaacacagaggc

SEQ ID NO: 2120219 - DNA, 25 bp, Homo sapien
cacctagcagacaggaagtacccaa

SEQ ID NO: 2120220 - DNA, 25 bp, Homo sapien
ccttcttcaatgtctctggggggca

SEQ ID NO: 2120221 - DNA, 25 bp, Homo sapien
tattgcgtcgtagctttctctgtcg

SEQ ID NO: 2120222 - DNA, 25 bp, Homo sapien
tgtcgatgttggtaccaaaccactc

SEQ ID NO: 2120223 - DNA, 25 bp, Homo sapien
gaagggtgacactaatggcaaccaa

SEQ ID NO: 2120224 - DNA, 25 bp, Homo sapien
caagagccagaacaacgagcagaag

SEQ ID NO: 2120225 - DNA, 25 bp, Homo sapien
tactgtttgaaagacagaagcttga

SEQ ID NO: 2120226 - DNA, 25 bp, Homo sapien
acagaagcttgaagctgtcatccag

SEQ ID NO: 2120227 - DNA, 25 bp, Homo sapien
gacagaagcttgaagctgtcatcca

SEQ ID NO: 2120228 - DNA, 25 bp, Homo sapien
ggttatcttaacagctcacttggcc

SEQ ID NO: 2120229 - DNA, 25 bp, Homo sapien
ccaggtgcccacgtagagcaaagaa

SEQ ID NO: 2120230 - DNA, 25 bp, Homo sapien
ggttagtgactagtccatggcctgc

SEQ ID NO: 2120231 - DNA, 25 bp, Homo sapien
gagcttctagctccagaggttgtac

SEQ ID NO: 2120232 - DNA, 25 bp, Homo sapien
tgctacctagacagacagattgctg

SEQ ID NO: 2120233 - DNA, 25 bp, Homo sapien
taactgcaggccaaaacagttctgc

SEQ ID NO: 2120234 - DNA, 25 bp, Homo sapien
gactggaattcctagcatgtacttg

SEQ ID NO: 2120235 - DNA, 25 bp, Homo sapien
gccctgaggtaatccaaacgcaatc

SEQ ID NO: 2120236 - DNA, 25 bp, Homo sapien
gagctcaagattaatctgttcaggg

SEQ ID NO: 2120237 - DNA, 25 bp, Homo sapien
tggtgggtagactattcattactga

SEQ ID NO: 2120238 - DNA, 25 bp, Homo sapien
cagtcttgagaggatgtaagtatcc

SEQ ID NO: 2120239 - DNA, 25 bp, Homo sapien
ggatatttaatgctctgaatttccc

SEQ ID NO: 2120240 - DNA, 25 bp, Homo sapien
ccatgatcaggagctataggattca

SEQ ID NO: 2120241 - DNA, 25 bp, Homo sapien
ggctttcccatgatcaggagctata

SEQ ID NO: 2120242 - DNA, 25 bp, Homo sapien
tttcccatgatcaggagctatagga

SEQ ID NO: 2120243 - DNA, 25 bp, Homo sapien
tccaggctttcccatgatcaggagc

SEQ ID NO: 2120244 - DNA, 25 bp, Homo sapien
tgagtttggaggcactttcacaagg

SEQ ID NO: 2120245 - DNA, 25 bp, Homo sapien
tagcaacttctgaattttcggtgtc

SEQ ID NO: 2120246 - DNA, 25 bp, Homo sapien
ctaggacagctgctgaaacagcccc

SEQ ID NO: 2120247 - DNA, 25 bp, Homo sapien
tttcggtgtcattaaatgtaacact

SEQ ID NO: 2120248 - DNA, 25 bp, Homo sapien
taaagtaacataagtggtaggtctg

SEQ ID NO: 2120249 - DNA, 25 bp, Homo sapien
ctggagatgtggcagccccatcagc

SEQ ID NO: 2120250 - DNA, 25 bp, Homo sapien
taagtggtaggtctgttatattccc

SEQ ID NO: 2120251 - DNA, 25 bp, Homo sapien
tgttcagattatcttgatagagatc

SEQ ID NO: 2120252 - DNA, 25 bp, Homo sapien
gaatacgaataataaagcatgggtg

SEQ ID NO: 2120253 - DNA, 25 bp, Homo sapien
gcatgggtgaggtatctcctctgga

SEQ ID NO: 2120254 - DNA, 25 bp, Homo sapien
gaaacataacatcagcttctacttt

SEQ ID NO: 2120255 - DNA, 25 bp, Homo sapien
gtttctgcttaggaaacataacatc

SEQ ID NO: 2120256 - DNA, 25 bp, Homo sapien
aagccaagattaccataccactgag

SEQ ID NO: 2120257 - DNA, 25 bp, Homo sapien
taactgcaaagccaagattaccata

SEQ ID NO: 2120258 - DNA, 25 bp, Homo sapien
ttaccataccactgagaattgttgt

SEQ ID NO: 2120259 - DNA, 25 bp, Homo sapien
cactgagaattgttgttacttggtg

SEQ ID NO: 2120260 - DNA, 25 bp, Homo sapien
caggagaggatgcagtgttgtcttt

SEQ ID NO: 2120261 - DNA, 25 bp, Homo sapien
caaaggagagtgttcaacaagacta

SEQ ID NO: 2120262 - DNA, 25 bp, Homo sapien
catgcaacagaatcgtgtcccaacc

SEQ ID NO: 2120263 - DNA, 25 bp, Homo sapien
ctgtcgaatgggtagccaaaggaga

SEQ ID NO: 2120264 - DNA, 25 bp, Homo sapien
tgatctccaacacacaacacaactt

SEQ ID NO: 2120265 - DNA, 25 bp, Homo sapien
tgtgcataggtaaaactcattgaac

SEQ ID NO: 2120266 - DNA, 25 bp, Homo sapien
taaaactcattgaacagggtggtga

SEQ ID NO: 2120267 - DNA, 25 bp, Homo sapien
cacacaacacaactttcttgggaat

SEQ ID NO: 2120268 - DNA, 25 bp, Homo sapien
aagaagccccaagcatatgacaacc

SEQ ID NO: 2120269 - DNA, 25 bp, Homo sapien
agccccaagcatatgacaaccagca

SEQ ID NO: 2120270 - DNA, 25 bp, Homo sapien
ctttccagagcccaagaagccccaa

SEQ ID NO: 2120271 - DNA, 25 bp, Homo sapien
ccaagaagccccaagcatatgacaa

SEQ ID NO: 2120272 - DNA, 25 bp, Homo sapien
atagattatgagattgccatgaatc

SEQ ID NO: 2120273 - DNA, 25 bp, Homo sapien
gctcattggctggatggcagtctct

SEQ ID NO: 2120274 - DNA, 25 bp, Homo sapien
cagcagagtgctgacaagtgtggga

SEQ ID NO: 2120275 - DNA, 25 bp, Homo sapien
tctattctacctgccttcaggaacc

SEQ ID NO: 2120276 - DNA, 25 bp, Homo sapien
acagggacacagaatttacaccaca

SEQ ID NO: 2120277 - DNA, 25 bp, Homo sapien
cactggtgtgataatgatggcaact

SEQ ID NO: 2120278 - DNA, 25 bp, Homo sapien
taggatcaatatccagtagaagagg

SEQ ID NO: 2120279 - DNA, 25 bp, Homo sapien
ccacagtcgaagtgattctgcagca

SEQ ID NO: 2120280 - DNA, 25 bp, Homo sapien
catacaccctaaattttgctaagga

SEQ ID NO: 2120281 - DNA, 25 bp, Homo sapien
ttctcatggtcccaagcttcccata

SEQ ID NO: 2120282 - DNA, 25 bp, Homo sapien
gaatgaggccaggtatgatatgctc

SEQ ID NO: 2120283 - DNA, 25 bp, Homo sapien
ctaccccatattactcatctcttca

SEQ ID NO: 2120284 - DNA, 25 bp, Homo sapien
ctgtcactagttggtgctattgtca

SEQ ID NO: 2120285 - DNA, 25 bp, Homo sapien
tgttatctagggtttgtgacaattc

SEQ ID NO: 2120286 - DNA, 25 bp, Homo sapien
ttgtgacaattctgaacgatcatat

SEQ ID NO: 2120287 - DNA, 25 bp, Homo sapien
ttctgaacgatcatatttcctgtca

SEQ ID NO: 2120288 - DNA, 25 bp, Homo sapien
tgtgacccggaactggctccgtttg

SEQ ID NO: 2120289 - DNA, 25 bp, Homo sapien
cgtttgtctgctctttcttgtagtc

SEQ ID NO: 2120290 - DNA, 25 bp, Homo sapien
tgaaggcccatggatcacagttgca

SEQ ID NO: 2120291 - DNA, 25 bp, Homo sapien
tcttgtagtcttgacttgacttcaa

SEQ ID NO: 2120292 - DNA, 25 bp, Homo sapien
tcacaatgtttagctggcagaaact

SEQ ID NO: 2120293 - DNA, 25 bp, Homo sapien
ctggcttcaagccttctgtttcact

SEQ ID NO: 2120294 - DNA, 25 bp, Homo sapien
tcactgcacttatgtctcccagaca

SEQ ID NO: 2120295 - DNA, 25 bp, Homo sapien
tagctggcagaaactctggcttcaa

SEQ ID NO: 2120296 - DNA, 25 bp, Homo sapien
tccaggactccaaatttttcatccg

SEQ ID NO: 2120297 - DNA, 25 bp, Homo sapien
gactccaaatttttcatccgtatat

SEQ ID NO: 2120298 - DNA, 25 bp, Homo sapien
cctgggaaagggttcactgtcatcc

SEQ ID NO: 2120299 - DNA, 25 bp, Homo sapien
ccgcctgggaaagggttcactgtca

SEQ ID NO: 2120300 - DNA, 25 bp, Homo sapien
tattggcgatagtaccttcagctgc

SEQ ID NO: 2120301 - DNA, 25 bp, Homo sapien
gatccaaaaacttctattggcgata

SEQ ID NO: 2120302 - DNA, 25 bp, Homo sapien
tcctacagggatccagagccagatg

SEQ ID NO: 2120303 - DNA, 25 bp, Homo sapien
gagccagatgctgattttatcccca

SEQ ID NO: 2120304 - DNA, 25 bp, Homo sapien
ttggccctcagtgcagatctcagct

SEQ ID NO: 2120305 - DNA, 25 bp, Homo sapien
ctttcattagacctccagtgacagc

SEQ ID NO: 2120306 - DNA, 25 bp, Homo sapien
caggcataaagttcctacatctttc

SEQ ID NO: 2120307 - DNA, 25 bp, Homo sapien
catatcaggcataaagttcctacat

SEQ ID NO: 2120308 - DNA, 25 bp, Homo sapien
gtggaggtgataagatcatcaaagc

SEQ ID NO: 2120309 - DNA, 25 bp, Homo sapien
tggaggtgataagatcatcaaagcc

SEQ ID NO: 2120310 - DNA, 25 bp, Homo sapien
ggtggaggtgataagatcatcaaag

SEQ ID NO: 2120311 - DNA, 25 bp, Homo sapien
ttgtcaatcatggatagcaggctat

SEQ ID NO: 2120312 - DNA, 25 bp, Homo sapien
tgtcaatcatggatagcaggctatc

SEQ ID NO: 2120313 - DNA, 25 bp, Homo sapien
cttgtcaatcatggatagcaggcta

SEQ ID NO: 2120314 - DNA, 25 bp, Homo sapien
aaattgcacctgttcatcctgagac

SEQ ID NO: 2120315 - DNA, 25 bp, Homo sapien
acctgatgtgttggccaggtcgcca

SEQ ID NO: 2120316 - DNA, 25 bp, Homo sapien
tgagacaccatctccgaagttatgg

SEQ ID NO: 2120317 - DNA, 25 bp, Homo sapien
ggcaacaaagatcaccaccgtgtac

SEQ ID NO: 2120318 - DNA, 25 bp, Homo sapien
aggccagtggcggtgtgcacccttt

SEQ ID NO: 2120319 - DNA, 25 bp, Homo sapien
gcaccctttcgtacttcataatcag

SEQ ID NO: 2120320 - DNA, 25 bp, Homo sapien
tcacagagatattgacaatgaagag

SEQ ID NO: 2120321 - DNA, 25 bp, Homo sapien
cagagatattgacaatgaagaggcc

SEQ ID NO: 2120322 - DNA, 25 bp, Homo sapien
cacaagagtattgggcaaagcgact

SEQ ID NO: 2120323 - DNA, 25 bp, Homo sapien
caaagcgactgaagtggcctgtcat

SEQ ID NO: 2120324 - DNA, 25 bp, Homo sapien
ggaaatagaagccatggtaatcaca

SEQ ID NO: 2120325 - DNA, 25 bp, Homo sapien
ccaaggaattacacagataatgcac

SEQ ID NO: 2120326 - DNA, 25 bp, Homo sapien
atatcttaaacaattcaaagaactt

SEQ ID NO: 2120327 - DNA, 25 bp, Homo sapien
caattcaaagaactttctaggttat

SEQ ID NO: 2120328 - DNA, 25 bp, Homo sapien
cattgtcttgtattggagtaatcca

SEQ ID NO: 2120329 - DNA, 25 bp, Homo sapien
tggaatgtgacaaaggagcacaggt

SEQ ID NO: 2120330 - DNA, 25 bp, Homo sapien
ctggtaaaacttctggcaaatggaa

SEQ ID NO: 2120331 - DNA, 25 bp, Homo sapien
ctcacaatcgagatgataatgatgc

SEQ ID NO: 2120332 - DNA, 25 bp, Homo sapien
ctagtgccattaatggcaagatgag

SEQ ID NO: 2120333 - DNA, 25 bp, Homo sapien
gcaaaaacaattctcaggtcaaggt

SEQ ID NO: 2120334 - DNA, 25 bp, Homo sapien
caggtcaaggtatttccctgaagat

SEQ ID NO: 2120335 - DNA, 25 bp, Homo sapien
tgaagattttgaagtatacgggaaa

SEQ ID NO: 2120336 - DNA, 25 bp, Homo sapien
gagctgctaattgccagccagtgga

SEQ ID NO: 2120337 - DNA, 25 bp, Homo sapien
gaattctctgcatggcagcaccagg

SEQ ID NO: 2120338 - DNA, 25 bp, Homo sapien
cagctgattgtgtagacaagcacca

SEQ ID NO: 2120339 - DNA, 25 bp, Homo sapien
ccatgctgccagatataggtgtgga

SEQ ID NO: 2120340 - DNA, 25 bp, Homo sapien
ttctgagctatgaacttgttccact

SEQ ID NO: 2120341 - DNA, 25 bp, Homo sapien
taataagattccatttggcacaaga

SEQ ID NO: 2120342 - DNA, 25 bp, Homo sapien
ttggaacctaaaagaggttctgagc

SEQ ID NO: 2120343 - DNA, 25 bp, Homo sapien
ttggttgtgctccaaatcaccagcc

SEQ ID NO: 2120344 - DNA, 25 bp, Homo sapien
tttctgatatctgcctgacctgcga

SEQ ID NO: 2120345 - DNA, 25 bp, Homo sapien
cgagatctttctcgcactgccttgg

SEQ ID NO: 2120346 - DNA, 25 bp, Homo sapien
tgcccgatcccacattggatagatc

SEQ ID NO: 2120347 - DNA, 25 bp, Homo sapien
actgccttggctagtctgtgaccaa

SEQ ID NO: 2120348 - DNA, 25 bp, Homo sapien
gcaagattctttcgagacatctgaa

SEQ ID NO: 2120349 - DNA, 25 bp, Homo sapien
tctgggcaagattctttcgagacat

SEQ ID NO: 2120350 - DNA, 25 bp, Homo sapien
tctttcgagacatctgaatgttcat

SEQ ID NO: 2120351 - DNA, 25 bp, Homo sapien
gattctttcgagacatctgaatgtt

SEQ ID NO: 2120352 - DNA, 25 bp, Homo sapien
cccatttgacccaacttttccagat

SEQ ID NO: 2120353 - DNA, 25 bp, Homo sapien
ccatttgacccaacttttccagatt

SEQ ID NO: 2120354 - DNA, 25 bp, Homo sapien
tcttcataaatattcccccatccct

SEQ ID NO: 2120355 - DNA, 25 bp, Homo sapien
cataaatattcccccatccctttat

SEQ ID NO: 2120356 - DNA, 25 bp, Homo sapien
tttcttcataaatattcccccatcc

SEQ ID NO: 2120357 - DNA, 25 bp, Homo sapien
cttcataaatattcccccatccctt

SEQ ID NO: 2120358 - DNA, 25 bp, Homo sapien
cttctaggtctgaatgaaagcagtc

SEQ ID NO: 2120359 - DNA, 25 bp, Homo sapien
aggtcctccggcactgactgactgg

SEQ ID NO: 2120360 - DNA, 25 bp, Homo sapien
gaaagcagtcttggcttcactatgg

SEQ ID NO: 2120361 - DNA, 25 bp, Homo sapien
atgcagcttctaggtctgaatgaaa

SEQ ID NO: 2120362 - DNA, 25 bp, Homo sapien
agatgattccagtgttcctggctgc

SEQ ID NO: 2120363 - DNA, 25 bp, Homo sapien
cctggctgctatgggtggcgagtca

SEQ ID NO: 2120364 - DNA, 25 bp, Homo sapien
ctatgggtggcgagtcaatgtccag

SEQ ID NO: 2120365 - DNA, 25 bp, Homo sapien
gtggcgagtcaatgtccaggtggca

SEQ ID NO: 2120366 - DNA, 25 bp, Homo sapien
cattatccagcaagatttcgagagt

SEQ ID NO: 2120367 - DNA, 25 bp, Homo sapien
gcaagatttcgagagtggctccctt

SEQ ID NO: 2120368 - DNA, 25 bp, Homo sapien
agcaagatttcgagagtggctccct

SEQ ID NO: 2120369 - DNA, 25 bp, Homo sapien
aggcattatccagcaagatttcgag

SEQ ID NO: 2120370 - DNA, 25 bp, Homo sapien
agcccatcatccacgtagatcttgc

SEQ ID NO: 2120371 - DNA, 25 bp, Homo sapien
tgccggaggagccaccattttctac

SEQ ID NO: 2120372 - DNA, 25 bp, Homo sapien
ctgccggaggagccaccattttcta

SEQ ID NO: 2120373 - DNA, 25 bp, Homo sapien
ccatcatcagagtggcatagatgac

SEQ ID NO: 2120374 - DNA, 25 bp, Homo sapien
tatcgacatactgctcaactccaaa

SEQ ID NO: 2120375 - DNA, 25 bp, Homo sapien
atgatcccgtcgctggtcttcagga

SEQ ID NO: 2120376 - DNA, 25 bp, Homo sapien
tcaatgcctataccatcatgagcca

SEQ ID NO: 2120377 - DNA, 25 bp, Homo sapien
cggcaatcaggtgctgcatgcgaac

SEQ ID NO: 2120378 - DNA, 25 bp, Homo sapien
aactggtaatgcatgccaggaggcg

SEQ ID NO: 2120379 - DNA, 25 bp, Homo sapien
tgtggggtaactggtaatgcatgcc

SEQ ID NO: 2120380 - DNA, 25 bp, Homo sapien
actggaaggaggcttccacgacgcc

SEQ ID NO: 2120381 - DNA, 25 bp, Homo sapien
cacgacgcccacatcggtgacttct

SEQ ID NO: 2120382 - DNA, 25 bp, Homo sapien
ccaggcctccgggactgcatccttg

SEQ ID NO: 2120383 - DNA, 25 bp, Homo sapien
cggtggtccacattctcagcccagg

SEQ ID NO: 2120384 - DNA, 25 bp, Homo sapien
ttgaagaaacctccggccttgccaa

SEQ ID NO: 2120385 - DNA, 25 bp, Homo sapien
aaagacgctatggtacagatgggcc

SEQ ID NO: 2120386 - DNA, 25 bp, Homo sapien
aggctgcaggtgttcaaaggttgcc

SEQ ID NO: 2120387 - DNA, 25 bp, Homo sapien
tggttcaagcccacatttgacactg

SEQ ID NO: 2120388 - DNA, 25 bp, Homo sapien
gaatgctatgtggacagcccaagcc

SEQ ID NO: 2120389 - DNA, 25 bp, Homo sapien
gatcatgtttagaccttctggtaga

SEQ ID NO: 2120390 - DNA, 25 bp, Homo sapien
gtacattaggcagaatgtgcacttc

SEQ ID NO: 2120391 - DNA, 25 bp, Homo sapien
tacagctagttcctgtcccacaact

SEQ ID NO: 2120392 - DNA, 25 bp, Homo sapien
gcaaaggagtgctgtctacagcaag

SEQ ID NO: 2120393 - DNA, 25 bp, Homo sapien
tgtgcacttcatcaccaggttctag

SEQ ID NO: 2120394 - DNA, 25 bp, Homo sapien
ccctcaatccatgtagggacatctg

SEQ ID NO: 2120395 - DNA, 25 bp, Homo sapien
ggacatctgagtatgcctctttcta

SEQ ID NO: 2120396 - DNA, 25 bp, Homo sapien
tgtcaattcaatcccagctttctca

SEQ ID NO: 2120397 - DNA, 25 bp, Homo sapien
tagctcccacctatacatctcatgc

SEQ ID NO: 2120398 - DNA, 25 bp, Homo sapien
tgcagagagtgagtcatcttttgga

SEQ ID NO: 2120399 - DNA, 25 bp, Homo sapien
ataccagttattccctctttgagag

SEQ ID NO: 2120400 - DNA, 25 bp, Homo sapien
cttataccagttattccctctttga

SEQ ID NO: 2120401 - DNA, 25 bp, Homo sapien
ctgcagagagtgagtcatcttttgg

SEQ ID NO: 2120402 - DNA, 25 bp, Homo sapien
tggacgtgtccaacaaccttgagca

SEQ ID NO: 2120403 - DNA, 25 bp, Homo sapien
catccatttgtgtccggagagcgct

SEQ ID NO: 2120404 - DNA, 25 bp, Homo sapien
cagaacaattgggaaggcgccctgt

SEQ ID NO: 2120405 - DNA, 25 bp, Homo sapien
tggacctgcattgcctctgagaaca

SEQ ID NO: 2120406 - DNA, 25 bp, Homo sapien
tgtcacagtccatccaagtacctct

SEQ ID NO: 2120407 - DNA, 25 bp, Homo sapien
tgttaccacctagcatgttagcagc

SEQ ID NO: 2120408 - DNA, 25 bp, Homo sapien
ggctttctggaaggtagcaacacca

SEQ ID NO: 2120409 - DNA, 25 bp, Homo sapien
catataacgggtaggaggaaggact

SEQ ID NO: 2120410 - DNA, 25 bp, Homo sapien
tctgaaagggttgagtcaacttcct

SEQ ID NO: 2120411 - DNA, 25 bp, Homo sapien
tagtcagcatgtgttccaagggtaa

SEQ ID NO: 2120412 - DNA, 25 bp, Homo sapien
gtgtgtaattcatgtccggttgtca

SEQ ID NO: 2120413 - DNA, 25 bp, Homo sapien
caagggtaacttttcgcattgggtg

SEQ ID NO: 2120414 - DNA, 25 bp, Homo sapien
cagtttaagacgtcctcttccgatc

SEQ ID NO: 2120415 - DNA, 25 bp, Homo sapien
ggaagtagtaatccgagcactggac

SEQ ID NO: 2120416 - DNA, 25 bp, Homo sapien
gactggaaatcagatcagacctgtt

SEQ ID NO: 2120417 - DNA, 25 bp, Homo sapien
gattggttaatatgggaggatctcc

SEQ ID NO: 2120418 - DNA, 25 bp, Homo sapien
cattccttgaccttctaatgttgtc

SEQ ID NO: 2120419 - DNA, 25 bp, Homo sapien
tccttcgaagactggatacactgct

SEQ ID NO: 2120420 - DNA, 25 bp, Homo sapien
tcgaagactggatacactgctttag

SEQ ID NO: 2120421 - DNA, 25 bp, Homo sapien
agactggatacactgctttagcatg

SEQ ID NO: 2120422 - DNA, 25 bp, Homo sapien
agtctgtgccgccagtcgttccagc

SEQ ID NO: 2120423 - DNA, 25 bp, Homo sapien
gtgccgccagtcgttccagcagagt

SEQ ID NO: 2120424 - DNA, 25 bp, Homo sapien
ttaagtctgtgccgccagtcgttcc

SEQ ID NO: 2120425 - DNA, 25 bp, Homo sapien
ccagcagagtcctttccgtcatgct

SEQ ID NO: 2120426 - DNA, 25 bp, Homo sapien
cctggcagttctgtgtaatgttaga

SEQ ID NO: 2120427 - DNA, 25 bp, Homo sapien
agcctggcagttctgtgtaatgtta

SEQ ID NO: 2120428 - DNA, 25 bp, Homo sapien
ggcagttctgtgtaatgttagaaag

SEQ ID NO: 2120429 - DNA, 25 bp, Homo sapien
aagcctggcagttctgtgtaatgtt

SEQ ID NO: 2120430 - DNA, 25 bp, Homo sapien
acagatgcaaactttagagctggac

SEQ ID NO: 2120431 - DNA, 25 bp, Homo sapien
tgcctctggatggtgaaataaaaag

SEQ ID NO: 2120432 - DNA, 25 bp, Homo sapien
gaatattagtagtgtttgcctctgg

SEQ ID NO: 2120433 - DNA, 25 bp, Homo sapien
ccattcaccgaatggtgagggaaga

SEQ ID NO: 2120434 - DNA, 25 bp, Homo sapien
gggcaactcagtgggaccctgtgta

SEQ ID NO: 2120435 - DNA, 25 bp, Homo sapien
tccactacagtattatttaggatgc

SEQ ID NO: 2120436 - DNA, 25 bp, Homo sapien
gaaatacagtggattacaggctggg

SEQ ID NO: 2120437 - DNA, 25 bp, Homo sapien
taactattggaactgtaacactaaa

SEQ ID NO: 2120438 - DNA, 25 bp, Homo sapien
tcagggattcatcttcctcctggtt

SEQ ID NO: 2120439 - DNA, 25 bp, Homo sapien
cagggattcatcttcctcctggttt

SEQ ID NO: 2120440 - DNA, 25 bp, Homo sapien
ctattcagggattcatcttcctcct

SEQ ID NO: 2120441 - DNA, 25 bp, Homo sapien
attcagggattcatcttcctcctgg

SEQ ID NO: 2120442 - DNA, 25 bp, Homo sapien
gttcacttaggatttggctctttgc

SEQ ID NO: 2120443 - DNA, 25 bp, Homo sapien
cttctggatgatcaggtttaatctg

SEQ ID NO: 2120444 - DNA, 25 bp, Homo sapien
tctggatgatcaggtttaatctggt

SEQ ID NO: 2120445 - DNA, 25 bp, Homo sapien
gatgatcaggtttaatctggtaatc

SEQ ID NO: 2120446 - DNA, 25 bp, Homo sapien
tctggtaatctggtttgatttcagt

SEQ ID NO: 2120447 - DNA, 25 bp, Homo sapien
gaccctcgaactgtgccgatcttgg

SEQ ID NO: 2120448 - DNA, 25 bp, Homo sapien
tcgaactgtgccgatcttggttagg

SEQ ID NO: 2120449 - DNA, 25 bp, Homo sapien
tgtgccgatcttggttagggtagtc

SEQ ID NO: 2120450 - DNA, 25 bp, Homo sapien
gggtaggaccctcgaactgtgccga

SEQ ID NO: 2120451 - DNA, 25 bp, Homo sapien
ctctttccttatcaatttatccaga

SEQ ID NO: 2120452 - DNA, 25 bp, Homo sapien
agtataggcagcatagatgagctgc

SEQ ID NO: 2120453 - DNA, 25 bp, Homo sapien
tttccttatcaatttatccagagta

SEQ ID NO: 2120454 - DNA, 25 bp, Homo sapien
gtataggcagcatagatgagctgct

SEQ ID NO: 2120455 - DNA, 25 bp, Homo sapien
caaatcttttggccttgttttcctg

SEQ ID NO: 2120456 - DNA, 25 bp, Homo sapien
ctgcctgtctcatccaatgagcata

SEQ ID NO: 2120457 - DNA, 25 bp, Homo sapien
ccaatgagcataataataaatctcc

SEQ ID NO: 2120458 - DNA, 25 bp, Homo sapien
ttcctgccaagactcatgactcctg

SEQ ID NO: 2120459 - DNA, 25 bp, Homo sapien
gtccagttaggtcctttggtgcatc

SEQ ID NO: 2120460 - DNA, 25 bp, Homo sapien
ggtccagttaggtcctttggtgcat

SEQ ID NO: 2120461 - DNA, 25 bp, Homo sapien
ctgttattgattttctttgaccatg

SEQ ID NO: 2120462 - DNA, 25 bp, Homo sapien
ccatcagtctgttattgattttctt

SEQ ID NO: 2120463 - DNA, 25 bp, Homo sapien
ctgacaacttgatccatccatcagt

SEQ ID NO: 2120464 - DNA, 25 bp, Homo sapien
tgacaacttgatccatccatcagtc

SEQ ID NO: 2120465 - DNA, 25 bp, Homo sapien
tcttgagaaggcttagaggggtcct

SEQ ID NO: 2120466 - DNA, 25 bp, Homo sapien
gcaaaccgatccctctgggctgatt

SEQ ID NO: 2120467 - DNA, 25 bp, Homo sapien
tgggctgattgtctctagcttcaga

SEQ ID NO: 2120468 - DNA, 25 bp, Homo sapien
tatagctaagaagacttagctcttg

SEQ ID NO: 2120469 - DNA, 25 bp, Homo sapien
atcacagcttgatcagttgtgttaa

SEQ ID NO: 2120470 - DNA, 25 bp, Homo sapien
acagcttgatcagttgtgttaacat

SEQ ID NO: 2120471 - DNA, 25 bp, Homo sapien
tcacagcttgatcagttgtgttaac

SEQ ID NO: 2120472 - DNA, 25 bp, Homo sapien
cacagcttgatcagttgtgttaaca

SEQ ID NO: 2120473 - DNA, 25 bp, Homo sapien
gctgagatttgatgcccacgggaag

SEQ ID NO: 2120474 - DNA, 25 bp, Homo sapien
gaaggatggcaataaattcgagcac

SEQ ID NO: 2120475 - DNA, 25 bp, Homo sapien
taagaggtggtagcactagtggtca

SEQ ID NO: 2120476 - DNA, 25 bp, Homo sapien
cgataacagataaaggcagggccct

SEQ ID NO: 2120477 - DNA, 25 bp, Homo sapien
gtctgcattgcctgtatagagattg

SEQ ID NO: 2120478 - DNA, 25 bp, Homo sapien
ggccttggttcgggatagtctgcat

SEQ ID NO: 2120479 - DNA, 25 bp, Homo sapien
ccagtggggccttggttcgggatag

SEQ ID NO: 2120480 - DNA, 25 bp, Homo sapien
ttggttcgggatagtctgcattgcc

SEQ ID NO: 2120481 - DNA, 25 bp, Homo sapien
gctgcatatgaacgttttacctcct

SEQ ID NO: 2120482 - DNA, 25 bp, Homo sapien
aagctgcatatgaacgttttacctc

SEQ ID NO: 2120483 - DNA, 25 bp, Homo sapien
taaagctgcatatgaacgttttacc

SEQ ID NO: 2120484 - DNA, 25 bp, Homo sapien
tgcatatgaacgttttacctccttt

SEQ ID NO: 2120485 - DNA, 25 bp, Homo sapien
tgtgtagtagccgatggcaaggacc

SEQ ID NO: 2120486 - DNA, 25 bp, Homo sapien
gggacctgccctatcactggtgaag

SEQ ID NO: 2120487 - DNA, 25 bp, Homo sapien
gaccagctcttgtaatcatgcagga

SEQ ID NO: 2120488 - DNA, 25 bp, Homo sapien
catgcaggatattgaactgagtcac

SEQ ID NO: 2120489 - DNA, 25 bp, Homo sapien
cttgaagagtctttctcttcttgcc

SEQ ID NO: 2120490 - DNA, 25 bp, Homo sapien
gggagtcctggctactgttgcccat

SEQ ID NO: 2120491 - DNA, 25 bp, Homo sapien
tctgctcttgaagagtctttctctt

SEQ ID NO: 2120492 - DNA, 25 bp, Homo sapien
tgcctccttttttgctacctcctgg

SEQ ID NO: 2120493 - DNA, 25 bp, Homo sapien
agtttttggccttcagatgtttggc

SEQ ID NO: 2120494 - DNA, 25 bp, Homo sapien
actgcttttccctgtttcatggtgt

SEQ ID NO: 2120495 - DNA, 25 bp, Homo sapien
tgagcctgagtcttctttaagccat

SEQ ID NO: 2120496 - DNA, 25 bp, Homo sapien
gttttcaatagaacctgagcctgag

SEQ ID NO: 2120497 - DNA, 25 bp, Homo sapien
tcttgaagatcagagtcctagccaa

SEQ ID NO: 2120498 - DNA, 25 bp, Homo sapien
cccctcttgaagatcagagtcctag

SEQ ID NO: 2120499 - DNA, 25 bp, Homo sapien
ttgaagatcagagtcctagccaaca

SEQ ID NO: 2120500 - DNA, 25 bp, Homo sapien
tctgtccccctcttgaagatcagag

SEQ ID NO: 2120501 - DNA, 25 bp, Homo sapien
cttgtagatgatgggaactctttgc

SEQ ID NO: 2120502 - DNA, 25 bp, Homo sapien
gatattaataacaagcaggaaagcc

SEQ ID NO: 2120503 - DNA, 25 bp, Homo sapien
ttcattcacatattggttgatgtcg

SEQ ID NO: 2120504 - DNA, 25 bp, Homo sapien
gttgatgtcgttctctggaatcttg

SEQ ID NO: 2120505 - DNA, 25 bp, Homo sapien
tccactgtgcggtgtccaagcattg

SEQ ID NO: 2120506 - DNA, 25 bp, Homo sapien
caaatatttcatgctgggtagtcag

SEQ ID NO: 2120507 - DNA, 25 bp, Homo sapien
tagtcagcaaacgttgatcaagtcc

SEQ ID NO: 2120508 - DNA, 25 bp, Homo sapien
tgcaccttgcaatcatctacacatt

SEQ ID NO: 2120509 - DNA, 25 bp, Homo sapien
ctgatatgtagtaaaatatgaggaa

SEQ ID NO: 2120510 - DNA, 25 bp, Homo sapien
ccattttgaattatctgatatgtag

SEQ ID NO: 2120511 - DNA, 25 bp, Homo sapien
taaagattgaggacccattaaaggc

SEQ ID NO: 2120512 - DNA, 25 bp, Homo sapien
atgaggaaagattaaaggctttgac

SEQ ID NO: 2120513 - DNA, 25 bp, Homo sapien
gtagtaaggattgacgactggttaa

SEQ ID NO: 2120514 - DNA, 25 bp, Homo sapien
taaggattgacgactggttaaagac

SEQ ID NO: 2120515 - DNA, 25 bp, Homo sapien
gtaaggattgacgactggttaaaga

SEQ ID NO: 2120516 - DNA, 25 bp, Homo sapien
cttgtgtagtaaggattgacgactg

SEQ ID NO: 2120517 - DNA, 25 bp, Homo sapien
gaagatcgatagaaagatttgccat

SEQ ID NO: 2120518 - DNA, 25 bp, Homo sapien
aaagcttcgccacattctataactt

SEQ ID NO: 2120519 - DNA, 25 bp, Homo sapien
tatgtaatagggtgtgaggactgcc

SEQ ID NO: 2120520 - DNA, 25 bp, Homo sapien
aactttggagagtttctctgtagta

SEQ ID NO: 2120521 - DNA, 25 bp, Homo sapien
gtgtgagaaatgattaaaggctttg

SEQ ID NO: 2120522 - DNA, 25 bp, Homo sapien
gtagtaaggtgtgagaaatgattaa

SEQ ID NO: 2120523 - DNA, 25 bp, Homo sapien
aggtgtgagaaatgattaaaggctt

SEQ ID NO: 2120524 - DNA, 25 bp, Homo sapien
gtaaggtgtgagaaatgattaaagg

SEQ ID NO: 2120525 - DNA, 25 bp, Homo sapien
tatgtccagtaaggcttgagtattg

SEQ ID NO: 2120526 - DNA, 25 bp, Homo sapien
ccagtaaggcttgagtattggttaa

SEQ ID NO: 2120527 - DNA, 25 bp, Homo sapien
tgtccagtaaggcttgagtattggt

SEQ ID NO: 2120528 - DNA, 25 bp, Homo sapien
ttatgtccagtaaggcttgagtatt

SEQ ID NO: 2120529 - DNA, 25 bp, Homo sapien
ttctcgtatccttcaatcttatcag

SEQ ID NO: 2120530 - DNA, 25 bp, Homo sapien
gatgacattctcgtatccttcaatc

SEQ ID NO: 2120531 - DNA, 25 bp, Homo sapien
tccataataagatggtctctggtac

SEQ ID NO: 2120532 - DNA, 25 bp, Homo sapien
tatcagattcctgatcaggattcca

SEQ ID NO: 2120533 - DNA, 25 bp, Homo sapien
gatcatccacaaatagtcctggctc

SEQ ID NO: 2120534 - DNA, 25 bp, Homo sapien
taccataccccagatcatccacaaa

SEQ ID NO: 2120535 - DNA, 25 bp, Homo sapien
ttgagctccgggtcctcaatgctac

SEQ ID NO: 2120536 - DNA, 25 bp, Homo sapien
tcaatgctaccataccccagatcat

SEQ ID NO: 2120537 - DNA, 25 bp, Homo sapien
tttgctttgtatgcagccgcttgct

SEQ ID NO: 2120538 - DNA, 25 bp, Homo sapien
tccaaggatagaacctatatagggc

SEQ ID NO: 2120539 - DNA, 25 bp, Homo sapien
gctcttttgtggaggaggtcccata

SEQ ID NO: 2120540 - DNA, 25 bp, Homo sapien
cctcttgatggacagccaggcgtag

SEQ ID NO: 2120541 - DNA, 25 bp, Homo sapien
ttgccatgtacacataggcgctcaa

SEQ ID NO: 2120542 - DNA, 25 bp, Homo sapien
cataggcgctcaattttgtccagag

SEQ ID NO: 2120543 - DNA, 25 bp, Homo sapien
tacacataggcgctcaattttgtcc

SEQ ID NO: 2120544 - DNA, 25 bp, Homo sapien
catgtacacataggcgctcaatttt

SEQ ID NO: 2120545 - DNA, 25 bp, Homo sapien
atgcaacagtttgcgagtcgggtcc

SEQ ID NO: 2120546 - DNA, 25 bp, Homo sapien
aaatgcaacagtttgcgagtcgggt

SEQ ID NO: 2120547 - DNA, 25 bp, Homo sapien
gaggtggagagcaaatgcaacagtt

SEQ ID NO: 2120548 - DNA, 25 bp, Homo sapien
caacagtttgcgagtcgggtcccgc

SEQ ID NO: 2120549 - DNA, 25 bp, Homo sapien
ggcttgctccggaccgtcccgctct

SEQ ID NO: 2120550 - DNA, 25 bp, Homo sapien
ctggcgtggtgcgtcccttcggctc

SEQ ID NO: 2120551 - DNA, 25 bp, Homo sapien
gagcggctagctcggccctttttcc

SEQ ID NO: 2120552 - DNA, 25 bp, Homo sapien
cctgtacagcactggagcggctagc

SEQ ID NO: 2120553 - DNA, 25 bp, Homo sapien
tccgggcggcggcttcgaagccgcc

SEQ ID NO: 2120554 - DNA, 25 bp, Homo sapien
ggcagctccgggcggcggcttcgaa

SEQ ID NO: 2120555 - DNA, 25 bp, Homo sapien
gcagctccgggcggcggcttcgaag

SEQ ID NO: 2120556 - DNA, 25 bp, Homo sapien
gctccgggcggcggcttcgaagccg

SEQ ID NO: 2120557 - DNA, 25 bp, Homo sapien
ttccttgcttcctccgagtctttag

SEQ ID NO: 2120558 - DNA, 25 bp, Homo sapien
tccttgcttcctccgagtctttagc

SEQ ID NO: 2120559 - DNA, 25 bp, Homo sapien
tgcttcctccgagtctttagcagct

SEQ ID NO: 2120560 - DNA, 25 bp, Homo sapien
cttgcttcctccgagtctttagcag

SEQ ID NO: 2120561 - DNA, 25 bp, Homo sapien
tggacaagatctgccctgctaggct

SEQ ID NO: 2120562 - DNA, 25 bp, Homo sapien
cgctcgcagccaaagggagttacct

SEQ ID NO: 2120563 - DNA, 25 bp, Homo sapien
gcctcaaagtctcgtgcagaagaag

SEQ ID NO: 2120564 - DNA, 25 bp, Homo sapien
aaacagagggttctctccgcgtgca

SEQ ID NO: 2120565 - DNA, 25 bp, Homo sapien
gggcccgggttctggatcacttcgc

SEQ ID NO: 2120566 - DNA, 25 bp, Homo sapien
ttctggaaagctcctcggtaggtct

SEQ ID NO: 2120567 - DNA, 25 bp, Homo sapien
gcgcacgctctggaacagattctgg

SEQ ID NO: 2120568 - DNA, 25 bp, Homo sapien
cggtaggtcttggacggcggccgag

SEQ ID NO: 2120569 - DNA, 25 bp, Homo sapien
ttggggagaaccatcctcaccctgc

SEQ ID NO: 2120570 - DNA, 25 bp, Homo sapien
ctgcctggggctagtctcttgctgc

SEQ ID NO: 2120571 - DNA, 25 bp, Homo sapien
ctgctgcctggggctagtctcttgc

SEQ ID NO: 2120572 - DNA, 25 bp, Homo sapien
cttggggagaaccatcctcaccctg

SEQ ID NO: 2120573 - DNA, 25 bp, Homo sapien
tcatcctcgtccggaggtgctggca

SEQ ID NO: 2120574 - DNA, 25 bp, Homo sapien
gccgactgcggctgtgaaggttgct

SEQ ID NO: 2120575 - DNA, 25 bp, Homo sapien
gcggctgtgaaggttgctgttcctc

SEQ ID NO: 2120576 - DNA, 25 bp, Homo sapien
gctctgggacgcaacctctctcggg

SEQ ID NO: 2120577 - DNA, 25 bp, Homo sapien
taaggtcagcggagcagctgcttaa

SEQ ID NO: 2120578 - DNA, 25 bp, Homo sapien
gatgtctttaaggtcagcggagcag

SEQ ID NO: 2120579 - DNA, 25 bp, Homo sapien
ctcaggatgtctttaaggtcagcgg

SEQ ID NO: 2120580 - DNA, 25 bp, Homo sapien
tcagcggagcagctgcttaagccgg

SEQ ID NO: 2120581 - DNA, 25 bp, Homo sapien
gctgctgttgctgaaggagttgcat

SEQ ID NO: 2120582 - DNA, 25 bp, Homo sapien
tgctgctgttgctgaaggagttgca

SEQ ID NO: 2120583 - DNA, 25 bp, Homo sapien
ctgctgctgttgctgaaggagttgc

SEQ ID NO: 2120584 - DNA, 25 bp, Homo sapien
tgccttacacaactccttggcgttg

SEQ ID NO: 2120585 - DNA, 25 bp, Homo sapien
aactccttggcgttgtcagaaatgg

SEQ ID NO: 2120586 - DNA, 25 bp, Homo sapien
aggcccatggacaccgacactgcct

SEQ ID NO: 2120587 - DNA, 25 bp, Homo sapien
ttgtcagaaatggtcgaagtgcccc

SEQ ID NO: 2120588 - DNA, 25 bp, Homo sapien
ggactcagatgctccaacgcctcca

SEQ ID NO: 2120589 - DNA, 25 bp, Homo sapien
ctcagatgctccaacgcctccacac

SEQ ID NO: 2120590 - DNA, 25 bp, Homo sapien
ctggactcagatgctccaacgcctc

SEQ ID NO: 2120591 - DNA, 25 bp, Homo sapien
actcagatgctccaacgcctccaca

SEQ ID NO: 2120592 - DNA, 25 bp, Homo sapien
ggcacaaggagtgggacgcacagcg

SEQ ID NO: 2120593 - DNA, 25 bp, Homo sapien
caaaagtggggcgtacatgcaatcc

SEQ ID NO: 2120594 - DNA, 25 bp, Homo sapien
tagcagagaacctttgcattcggcc

SEQ ID NO: 2120595 - DNA, 25 bp, Homo sapien
cagcgggtggaactcccaaaagtgg

SEQ ID NO: 2120596 - DNA, 25 bp, Homo sapien
ccagtgctccggacttgtagagaga

SEQ ID NO: 2120597 - DNA, 25 bp, Homo sapien
agtagtcgcgactctggtacgcagc

SEQ ID NO: 2120598 - DNA, 25 bp, Homo sapien
tagacggcagttcaagtgtcccgga

SEQ ID NO: 2120599 - DNA, 25 bp, Homo sapien
ttctccagcttgatgcgagcgtggg

SEQ ID NO: 2120600 - DNA, 25 bp, Homo sapien
aactggccttcttcggctgtgaaga

SEQ ID NO: 2120601 - DNA, 25 bp, Homo sapien
gaagagagtgtgccaggatgaggaa

SEQ ID NO: 2120602 - DNA, 25 bp, Homo sapien
cccaccaccaccacacggtccatac

SEQ ID NO: 2120603 - DNA, 25 bp, Homo sapien
caccacccccaccaccaccacacgg

SEQ ID NO: 2120604 - DNA, 25 bp, Homo sapien
cccccaccaccaccacacggtccat

SEQ ID NO: 2120605 - DNA, 25 bp, Homo sapien
ccccaccaccaccacacggtccata

SEQ ID NO: 2120606 - DNA, 25 bp, Homo sapien
ccagggtaccacacatcaggtgcgg

SEQ ID NO: 2120607 - DNA, 25 bp, Homo sapien
cggtgaagtcgctttcctggcccgc

SEQ ID NO: 2120608 - DNA, 25 bp, Homo sapien
actgggatagggcactctgctcacc

SEQ ID NO: 2120609 - DNA, 25 bp, Homo sapien
cttttgacacaagtgggactgggat

SEQ ID NO: 2120610 - DNA, 25 bp, Homo sapien
cgcatgtccccgtaaggtccggagt

SEQ ID NO: 2120611 - DNA, 25 bp, Homo sapien
catgtccccgtaaggtccggagtag

SEQ ID NO: 2120612 - DNA, 25 bp, Homo sapien
gtccggagtagctatccatccaggg

SEQ ID NO: 2120613 - DNA, 25 bp, Homo sapien
ccgtaaggtccggagtagctatcca

SEQ ID NO: 2120614 - DNA, 25 bp, Homo sapien
tgccctgggccgaaaggcgacattt

SEQ ID NO: 2120615 - DNA, 25 bp, Homo sapien
aatctgagtgttcgcgcaggtagga

SEQ ID NO: 2120616 - DNA, 25 bp, Homo sapien
aggtaggagccgctagataccccag

SEQ ID NO: 2120617 - DNA, 25 bp, Homo sapien
ccaggggcaatctgagtgttcgcgc

SEQ ID NO: 2120618 - DNA, 25 bp, Homo sapien
tctgtttgggacctcgagtaccagg

SEQ ID NO: 2120619 - DNA, 25 bp, Homo sapien
ggcccgtgcaataggatttctgttt

SEQ ID NO: 2120620 - DNA, 25 bp, Homo sapien
cgagtaccaggaggtagtgagaatt

SEQ ID NO: 2120621 - DNA, 25 bp, Homo sapien
gagggcttgggagctttatctctga

SEQ ID NO: 2120622 - DNA, 25 bp, Homo sapien
tctttttgactctaatctgcgcagg

SEQ ID NO: 2120623 - DNA, 25 bp, Homo sapien
gaggatacccgctgagaagctattg

SEQ ID NO: 2120624 - DNA, 25 bp, Homo sapien
gctattgggccggtctttttgactc

SEQ ID NO: 2120625 - DNA, 25 bp, Homo sapien
ggctgaaagtgaaatcctaacagac

SEQ ID NO: 2120626 - DNA, 25 bp, Homo sapien
tcttgcctttcaccaaattgtatcc

SEQ ID NO: 2120627 - DNA, 25 bp, Homo sapien
ttaagaaatctcttgcctttcacca

SEQ ID NO: 2120628 - DNA, 25 bp, Homo sapien
aaatctcttgcctttcaccaaattg

SEQ ID NO: 2120629 - DNA, 25 bp, Homo sapien
tctcttgcctttcaccaaattgtat

SEQ ID NO: 2120630 - DNA, 25 bp, Homo sapien
gcttcttgccaaaatattggttcct

SEQ ID NO: 2120631 - DNA, 25 bp, Homo sapien
tattggttcctgaagcctatgggca

SEQ ID NO: 2120632 - DNA, 25 bp, Homo sapien
cctgaagcctatgggcagaaataat

SEQ ID NO: 2120633 - DNA, 25 bp, Homo sapien
caggtgttgattgttgggatccaga

SEQ ID NO: 2120634 - DNA, 25 bp, Homo sapien
agtgttaatctttggctgacttgag

SEQ ID NO: 2120635 - DNA, 25 bp, Homo sapien
cagtgttaatctttggctgacttga

SEQ ID NO: 2120636 - DNA, 25 bp, Homo sapien
ctgatttcttatagatccggggcat

SEQ ID NO: 2120637 - DNA, 25 bp, Homo sapien
aagatggaacagatgacctccgagg

SEQ ID NO: 2120638 - DNA, 25 bp, Homo sapien
gatgacctccgaggaatccctctct

SEQ ID NO: 2120639 - DNA, 25 bp, Homo sapien
gagcactctgcattcgtttccctgg

SEQ ID NO: 2120640 - DNA, 25 bp, Homo sapien
tacaaagtccggtacaaagccagcc

SEQ ID NO: 2120641 - DNA, 25 bp, Homo sapien
tccagctctccgtgaggacttcctg

SEQ ID NO: 2120642 - DNA, 25 bp, Homo sapien
aaaatacccatattccagctctccg

SEQ ID NO: 2120643 - DNA, 25 bp, Homo sapien
tacccatattccagctctccgtgag

SEQ ID NO: 2120644 - DNA, 25 bp, Homo sapien
catattccagctctccgtgaggact

SEQ ID NO: 2120645 - DNA, 25 bp, Homo sapien
atggagaaaatatcacctaatcttt

SEQ ID NO: 2120646 - DNA, 25 bp, Homo sapien
tggagaaaatatcacctaatctttc

SEQ ID NO: 2120647 - DNA, 25 bp, Homo sapien
gcttccttttgctaaagccaacaca

SEQ ID NO: 2120648 - DNA, 25 bp, Homo sapien
ccttttgctaaagccaacacacatc

SEQ ID NO: 2120649 - DNA, 25 bp, Homo sapien
tgtgacccagtagacagaacaatgg

SEQ ID NO: 2120650 - DNA, 25 bp, Homo sapien
taggcaaacatcacacgttggcacc

SEQ ID NO: 2120651 - DNA, 25 bp, Homo sapien
cagcaaggatgcacacatttaggca

SEQ ID NO: 2120652 - DNA, 25 bp, Homo sapien
tcgccctggaaagcatatggatagc

SEQ ID NO: 2120653 - DNA, 25 bp, Homo sapien
tgccttcatatggagtgtgtgcaaa

SEQ ID NO: 2120654 - DNA, 25 bp, Homo sapien
cattctgtacctgcccactttggaa

SEQ ID NO: 2120655 - DNA, 25 bp, Homo sapien
gatattgagtaacagcctccgatgc

SEQ ID NO: 2120656 - DNA, 25 bp, Homo sapien
aaagagcagttgagagtgctggcca

SEQ ID NO: 2120657 - DNA, 25 bp, Homo sapien
gagtactactagagggaaaggagcc

SEQ ID NO: 2120658 - DNA, 25 bp, Homo sapien
gccttcatgaacctaagtagaaata

SEQ ID NO: 2120659 - DNA, 25 bp, Homo sapien
tgaagacttgctgtatgtgcctgcc

SEQ ID NO: 2120660 - DNA, 25 bp, Homo sapien
taattaacagtggacttcttaaaca

SEQ ID NO: 2120661 - DNA, 25 bp, Homo sapien
gcatgctcgagtatacagctcctcc

SEQ ID NO: 2120662 - DNA, 25 bp, Homo sapien
cccttgaggcttggctccactcctt

SEQ ID NO: 2120663 - DNA, 25 bp, Homo sapien
ctccccttgaggcttggctccactc

SEQ ID NO: 2120664 - DNA, 25 bp, Homo sapien
gggcatgctcgagtatacagctcct

SEQ ID NO: 2120665 - DNA, 25 bp, Homo sapien
tagtgatcatcaaacacctgggaag

SEQ ID NO: 2120666 - DNA, 25 bp, Homo sapien
tgatcatcaaacacctgggaagatg

SEQ ID NO: 2120667 - DNA, 25 bp, Homo sapien
tcttagtgatcatcaaacacctggg

SEQ ID NO: 2120668 - DNA, 25 bp, Homo sapien
catcaaacacctgggaagatgaaaa

SEQ ID NO: 2120669 - DNA, 25 bp, Homo sapien
cttactaggatagtctggaaaggag

SEQ ID NO: 2120670 - DNA, 25 bp, Homo sapien
taacttaagaagtcatctgatccat

SEQ ID NO: 2120671 - DNA, 25 bp, Homo sapien
cttaatacaggagcactatcttaga

SEQ ID NO: 2120672 - DNA, 25 bp, Homo sapien
tgaacaatggtcagacatcagaact

SEQ ID NO: 2120673 - DNA, 25 bp, Homo sapien
aatcaatcctattatacctctttag

SEQ ID NO: 2120674 - DNA, 25 bp, Homo sapien
tgaaaatttttgatagaagcatgca

SEQ ID NO: 2120675 - DNA, 25 bp, Homo sapien
taattttgtgagtacacaatggatg

SEQ ID NO: 2120676 - DNA, 25 bp, Homo sapien
tagagaatgaggtatacatccctca

SEQ ID NO: 2120677 - DNA, 25 bp, Homo sapien
caaagagtctgtccacaatgaaagt

SEQ ID NO: 2120678 - DNA, 25 bp, Homo sapien
taaagcggccggatgaccatttcat

SEQ ID NO: 2120679 - DNA, 25 bp, Homo sapien
tggcaaaccactcaacaaatggctt

SEQ ID NO: 2120680 - DNA, 25 bp, Homo sapien
tccaggatggaatgaacacacacgt

SEQ ID NO: 2120681 - DNA, 25 bp, Homo sapien
gactacagaggattctggacactcg

SEQ ID NO: 2120682 - DNA, 25 bp, Homo sapien
tgggtctctcaagcaccaggcccaa

SEQ ID NO: 2120683 - DNA, 25 bp, Homo sapien
ggacactcgtaggacagctcccttt

SEQ ID NO: 2120684 - DNA, 25 bp, Homo sapien
ttcctttgggtctctcaagcaccag

SEQ ID NO: 2120685 - DNA, 25 bp, Homo sapien
tgaaattggtttccctgacactttg

SEQ ID NO: 2120686 - DNA, 25 bp, Homo sapien
ttttatggttgagactggcatccca

SEQ ID NO: 2120687 - DNA, 25 bp, Homo sapien
ggatactgacttgaccctttctgag

SEQ ID NO: 2120688 - DNA, 25 bp, Homo sapien
gagacttctggtgttgttactcaca

SEQ ID NO: 2120689 - DNA, 25 bp, Homo sapien
cgagggttacacgttcacttattat

SEQ ID NO: 2120690 - DNA, 25 bp, Homo sapien
cacctttactttccaccaatggcct

SEQ ID NO: 2120691 - DNA, 25 bp, Homo sapien
ttggtttgaatgttcagcacagtca

SEQ ID NO: 2120692 - DNA, 25 bp, Homo sapien
gtggaaagtaatagtcaatgggcaa

SEQ ID NO: 2120693 - DNA, 25 bp, Homo sapien
gaaagtaatagtcaatgggcaaaac

SEQ ID NO: 2120694 - DNA, 25 bp, Homo sapien
gtaatagtcaatgggcaaaacatgg

SEQ ID NO: 2120695 - DNA, 25 bp, Homo sapien
gtcaatgggcaaaacatggtccctg

SEQ ID NO: 2120696 - DNA, 25 bp, Homo sapien
tccatagtgacacccagaagcttca

SEQ ID NO: 2120697 - DNA, 25 bp, Homo sapien
atgtgagagctccatagtgacaccc

SEQ ID NO: 2120698 - DNA, 25 bp, Homo sapien
ttcagcggctcttttgaagaagacc

SEQ ID NO: 2120699 - DNA, 25 bp, Homo sapien
gaccttgcagcttccacatgtgaga

SEQ ID NO: 2120700 - DNA, 25 bp, Homo sapien
atggtgtaattctttgagttcagaa

SEQ ID NO: 2120701 - DNA, 25 bp, Homo sapien
taaattgggacctattgtaaacatc

SEQ ID NO: 2120702 - DNA, 25 bp, Homo sapien
tgtaaacatcagtgaggatggtgta

SEQ ID NO: 2120703 - DNA, 25 bp, Homo sapien
ctttgagttcagaatgtaaactaca

SEQ ID NO: 2120704 - DNA, 25 bp, Homo sapien
aataaagcaccagatagcaatcctg

SEQ ID NO: 2120705 - DNA, 25 bp, Homo sapien
aagcaccagatagcaatcctggaaa

SEQ ID NO: 2120706 - DNA, 25 bp, Homo sapien
gcaccagatagcaatcctggaaaaa

SEQ ID NO: 2120707 - DNA, 25 bp, Homo sapien
taaagcaccagatagcaatcctgga

SEQ ID NO: 2120708 - DNA, 25 bp, Homo sapien
ccttaggctttgagcaaacacagac

SEQ ID NO: 2120709 - DNA, 25 bp, Homo sapien
tgactgattgtatagcccttaggct

SEQ ID NO: 2120710 - DNA, 25 bp, Homo sapien
tttgggtctgacctagcacagtccc

SEQ ID NO: 2120711 - DNA, 25 bp, Homo sapien
aaacacagacattacccagggagtg

SEQ ID NO: 2120712 - DNA, 25 bp, Homo sapien
aaacttaagtatgattcaaaggcca

SEQ ID NO: 2120713 - DNA, 25 bp, Homo sapien
aacttaagtatgattcaaaggccat

SEQ ID NO: 2120714 - DNA, 25 bp, Homo sapien
tttcttcatagtcgtatccttccat

SEQ ID NO: 2120715 - DNA, 25 bp, Homo sapien
ggctggcatgaggtccactgcatgc

SEQ ID NO: 2120716 - DNA, 25 bp, Homo sapien
gtgtctttcttcatagtcgtatcct

SEQ ID NO: 2120717 - DNA, 25 bp, Homo sapien
tggcatgaggtccactgcatgccag

SEQ ID NO: 2120718 - DNA, 25 bp, Homo sapien
ctgctctgaaacacgcagaacttct

SEQ ID NO: 2120719 - DNA, 25 bp, Homo sapien
tgctctgaaacacgcagaacttctc

SEQ ID NO: 2120720 - DNA, 25 bp, Homo sapien
gctgctctgaaacacgcagaacttc

SEQ ID NO: 2120721 - DNA, 25 bp, Homo sapien
ccagagtctctttcttcgggtattt

SEQ ID NO: 2120722 - DNA, 25 bp, Homo sapien
ctgataatgagtttccagagtctct

SEQ ID NO: 2120723 - DNA, 25 bp, Homo sapien
caaatacaagagttgatagacctga

SEQ ID NO: 2120724 - DNA, 25 bp, Homo sapien
tgatagacctgataatgagtttcca

SEQ ID NO: 2120725 - DNA, 25 bp, Homo sapien
catttccgaagacgacaagatggac

SEQ ID NO: 2120726 - DNA, 25 bp, Homo sapien
caagatggacaatttttccttcgga

SEQ ID NO: 2120727 - DNA, 25 bp, Homo sapien
tatcaatagtgcaatcatttctgct

SEQ ID NO: 2120728 - DNA, 25 bp, Homo sapien
tttctgctggcgcacaggtacttct

SEQ ID NO: 2120729 - DNA, 25 bp, Homo sapien
cctgaggtagcaatgctgggatgct

SEQ ID NO: 2120730 - DNA, 25 bp, Homo sapien
aggtagcaatgctgggatgctcttg

SEQ ID NO: 2120731 - DNA, 25 bp, Homo sapien
tgaggtagcaatgctgggatgctct

SEQ ID NO: 2120732 - DNA, 25 bp, Homo sapien
tcctgaggtagcaatgctgggatgc

SEQ ID NO: 2120733 - DNA, 25 bp, Homo sapien
gggcacatgtctgcaagcgtgcata

SEQ ID NO: 2120734 - DNA, 25 bp, Homo sapien
tgtgcatgggcacatgtctgcaagc

SEQ ID NO: 2120735 - DNA, 25 bp, Homo sapien
catgggcacatgtctgcaagcgtgc

SEQ ID NO: 2120736 - DNA, 25 bp, Homo sapien
acatgtctgcaagcgtgcatacaca

SEQ ID NO: 2120737 - DNA, 25 bp, Homo sapien
gaaggaagagagacttgaatttatc

SEQ ID NO: 2120738 - DNA, 25 bp, Homo sapien
tgggaaggaagagagacttgaattt

SEQ ID NO: 2120739 - DNA, 25 bp, Homo sapien
gggaaggaagagagacttgaattta

SEQ ID NO: 2120740 - DNA, 25 bp, Homo sapien
aggaagagagacttgaatttatcat

SEQ ID NO: 2120741 - DNA, 25 bp, Homo sapien
catagccttcaatgtgtgacactgt

SEQ ID NO: 2120742 - DNA, 25 bp, Homo sapien
gttgttgtcgtgtccagcacacact

SEQ ID NO: 2120743 - DNA, 25 bp, Homo sapien
gccttggcccacttgaccacgtgta

SEQ ID NO: 2120744 - DNA, 25 bp, Homo sapien
tgaggctagagagcaaggctgcaaa

SEQ ID NO: 2120745 - DNA, 25 bp, Homo sapien
gaagctacgtctacaataatacaca

SEQ ID NO: 2120746 - DNA, 25 bp, Homo sapien
gctacgtctacaataatacacaggt

SEQ ID NO: 2120747 - DNA, 25 bp, Homo sapien
tcccagaagctacgtctacaataat

SEQ ID NO: 2120748 - DNA, 25 bp, Homo sapien
gctcccagaagctacgtctacaata

SEQ ID NO: 2120749 - DNA, 25 bp, Homo sapien
accatgagccccatccaggagtact

SEQ ID NO: 2120750 - DNA, 25 bp, Homo sapien
catccaggagtactgaatgacagcc

SEQ ID NO: 2120751 - DNA, 25 bp, Homo sapien
tcgtccacgtgtaagttgcggaagc

SEQ ID NO: 2120752 - DNA, 25 bp, Homo sapien
catctggtcgtccacgtgtaagttg

SEQ ID NO: 2120753 - DNA, 25 bp, Homo sapien
ctggagttgacattggtgaaggatc

SEQ ID NO: 2120754 - DNA, 25 bp, Homo sapien
tggagttgacattggtgaaggatcg

SEQ ID NO: 2120755 - DNA, 25 bp, Homo sapien
cagatcaggggcgaagtagagcatc

SEQ ID NO: 2120756 - DNA, 25 bp, Homo sapien
gaaaaccagatcaggggcgaagtag

SEQ ID NO: 2120757 - DNA, 25 bp, Homo sapien
aaccagatcaggggcgaagtagagc

SEQ ID NO: 2120758 - DNA, 25 bp, Homo sapien
aaaaccagatcaggggcgaagtaga

SEQ ID NO: 2120759 - DNA, 25 bp, Homo sapien
gacacactggctgtacatccgggac

SEQ ID NO: 2120760 - DNA, 25 bp, Homo sapien
gagagaggtgcctcattcggacaca

SEQ ID NO: 2120761 - DNA, 25 bp, Homo sapien
catccgggacttgtgcatgcggtac

SEQ ID NO: 2120762 - DNA, 25 bp, Homo sapien
tggagccatccaaactcttgagaga

SEQ ID NO: 2120763 - DNA, 25 bp, Homo sapien
acagggaaccatctacttggcttcc

SEQ ID NO: 2120764 - DNA, 25 bp, Homo sapien
tgcccacgaaggagcattagacaaa

SEQ ID NO: 2120765 - DNA, 25 bp, Homo sapien
gggaagcatgcccacgaaggagcat

SEQ ID NO: 2120766 - DNA, 25 bp, Homo sapien
aaccatctacttggcttcctgttag

SEQ ID NO: 2120767 - DNA, 25 bp, Homo sapien
tgcacggagtccaggagcttggtga

SEQ ID NO: 2120768 - DNA, 25 bp, Homo sapien
tgagctggtagaagcgtcttgagca

SEQ ID NO: 2120769 - DNA, 25 bp, Homo sapien
ttttgcatgcaatgatacgatcgag

SEQ ID NO: 2120770 - DNA, 25 bp, Homo sapien
tgatgtagttcattcgaagttcatc

SEQ ID NO: 2120771 - DNA, 25 bp, Homo sapien
gacactgtgacccgtgttcttttct

SEQ ID NO: 2120772 - DNA, 25 bp, Homo sapien
ttttcttcctggaccacactcaaag

SEQ ID NO: 2120773 - DNA, 25 bp, Homo sapien
ctggaccacactcaaagccagaggg

SEQ ID NO: 2120774 - DNA, 25 bp, Homo sapien
cacaatatccagctgggacactgtg

SEQ ID NO: 2120775 - DNA, 25 bp, Homo sapien
gtgaactgatgcagctctctcgcaa

SEQ ID NO: 2120776 - DNA, 25 bp, Homo sapien
tagcaggtcaaaagtgaactgatgc

SEQ ID NO: 2120777 - DNA, 25 bp, Homo sapien
cttgattagcaggtcaaaagtgaac

SEQ ID NO: 2120778 - DNA, 25 bp, Homo sapien
tgaactgatgcagctctctcgcaat

SEQ ID NO: 2120779 - DNA, 25 bp, Homo sapien
ccagaaaggatcttgggcacttgca

SEQ ID NO: 2120780 - DNA, 25 bp, Homo sapien
tgcacagagatgatctctgccatca

SEQ ID NO: 2120781 - DNA, 25 bp, Homo sapien
tctgccatcatttccggaaagtcca

SEQ ID NO: 2120782 - DNA, 25 bp, Homo sapien
tcatttccggaaagtccacgctcac

SEQ ID NO: 2120783 - DNA, 25 bp, Homo sapien
gggtgtggaaatagatgggcttgac

SEQ ID NO: 2120784 - DNA, 25 bp, Homo sapien
tgggtgtggaaatagatgggcttga

SEQ ID NO: 2120785 - DNA, 25 bp, Homo sapien
taagtaaacgtttgtgtggctggca

SEQ ID NO: 2120786 - DNA, 25 bp, Homo sapien
ttagctctctaaacttcccgtggca

SEQ ID NO: 2120787 - DNA, 25 bp, Homo sapien
cagataggagccacaatgggaagca

SEQ ID NO: 2120788 - DNA, 25 bp, Homo sapien
cacaacttgacactgggccatatga

SEQ ID NO: 2120789 - DNA, 25 bp, Homo sapien
tgcccaaaagaagcaaacaggcttg

SEQ ID NO: 2120790 - DNA, 25 bp, Homo sapien
aaaatcagtaactccccatgggcct

SEQ ID NO: 2120791 - DNA, 25 bp, Homo sapien
tccacttgctgggagggtatcatct

SEQ ID NO: 2120792 - DNA, 25 bp, Homo sapien
cacaaaacactgaagggaggacata

SEQ ID NO: 2120793 - DNA, 25 bp, Homo sapien
agtggccagtccctcacaggtgagt

SEQ ID NO: 2120794 - DNA, 25 bp, Homo sapien
cgagcactgccaacttgtttggaga

SEQ ID NO: 2120795 - DNA, 25 bp, Homo sapien
cagtgagtgatcctcatcttctagc

SEQ ID NO: 2120796 - DNA, 25 bp, Homo sapien
tctagctcaccagctaagtgggtct

SEQ ID NO: 2120797 - DNA, 25 bp, Homo sapien
tttcaaagatatatgacagtccttc

SEQ ID NO: 2120798 - DNA, 25 bp, Homo sapien
gaacaacaatattgcctatggcata

SEQ ID NO: 2120799 - DNA, 25 bp, Homo sapien
aaaacttgctatgtatgcctatatg

SEQ ID NO: 2120800 - DNA, 25 bp, Homo sapien
cctcagcaactacccaaaggacaga

SEQ ID NO: 2120801 - DNA, 25 bp, Homo sapien
agagagtctcctgaaatgcagcttt

SEQ ID NO: 2120802 - DNA, 25 bp, Homo sapien
ggctgtctggagagagtctcctgaa

SEQ ID NO: 2120803 - DNA, 25 bp, Homo sapien
gctgtctggagagagtctcctgaaa

SEQ ID NO: 2120804 - DNA, 25 bp, Homo sapien
tggagagagtctcctgaaatgcagc

SEQ ID NO: 2120805 - DNA, 25 bp, Homo sapien
tgtaggacagttagcaccaagggct

SEQ ID NO: 2120806 - DNA, 25 bp, Homo sapien
gaggtcctaggcaacagaagtgtca

SEQ ID NO: 2120807 - DNA, 25 bp, Homo sapien
cctacctgtgggcagaaatggacct

SEQ ID NO: 2120808 - DNA, 25 bp, Homo sapien
agtgccaccgtgagaaatgagcccc

SEQ ID NO: 2120809 - DNA, 25 bp, Homo sapien
aaagtcacacatgtagtccaacaaa

SEQ ID NO: 2120810 - DNA, 25 bp, Homo sapien
gataagaggacattagcagcttttc

SEQ ID NO: 2120811 - DNA, 25 bp, Homo sapien
taactcgatcctgcagccataacag

SEQ ID NO: 2120812 - DNA, 25 bp, Homo sapien
ttagctggcagaccagtaagccaat

SEQ ID NO: 2120813 - DNA, 25 bp, Homo sapien
gaccagtaagccaatattttacaca

SEQ ID NO: 2120814 - DNA, 25 bp, Homo sapien
gggcagttctcaaggcctgtggcat

SEQ ID NO: 2120815 - DNA, 25 bp, Homo sapien
ctcctgggggcagttctcaaggcct

SEQ ID NO: 2120816 - DNA, 25 bp, Homo sapien
ggcctgtggcatgaaaacgactttg

SEQ ID NO: 2120817 - DNA, 25 bp, Homo sapien
catgaaaacgactttgatcagtgag

SEQ ID NO: 2120818 - DNA, 25 bp, Homo sapien
cttaggaagttcatcgagtccttga

SEQ ID NO: 2120819 - DNA, 25 bp, Homo sapien
caggtggaactgcactctaaggata

SEQ ID NO: 2120820 - DNA, 25 bp, Homo sapien
tgtcaacacacagtacttaggcagg

SEQ ID NO: 2120821 - DNA, 25 bp, Homo sapien
aagtctcattttgaagccctggcca

SEQ ID NO: 2120822 - DNA, 25 bp, Homo sapien
cctggatttacacttctttctgtac

SEQ ID NO: 2120823 - DNA, 25 bp, Homo sapien
ctctcctggatttacacttctttct

SEQ ID NO: 2120824 - DNA, 25 bp, Homo sapien
ctttctgtacccaagttcactagtt

SEQ ID NO: 2120825 - DNA, 25 bp, Homo sapien
tttctgtacccaagttcactagttc

SEQ ID NO: 2120826 - DNA, 25 bp, Homo sapien
ccatgcccaggagggccagtttaga

SEQ ID NO: 2120827 - DNA, 25 bp, Homo sapien
ctcgaccataagagatgaccatgcc

SEQ ID NO: 2120828 - DNA, 25 bp, Homo sapien
ataagagatgaccatgcccaggagg

SEQ ID NO: 2120829 - DNA, 25 bp, Homo sapien
caggagggccagtttagagacccac

SEQ ID NO: 2120830 - DNA, 25 bp, Homo sapien
tatagtgaaggcactggaagctcaa

SEQ ID NO: 2120831 - DNA, 25 bp, Homo sapien
taatgttcagcactcccatgcgagg

SEQ ID NO: 2120832 - DNA, 25 bp, Homo sapien
caaagatgatgagtagttttcccaa

SEQ ID NO: 2120833 - DNA, 25 bp, Homo sapien
gccatcctatgtgagtgtgaatcca

SEQ ID NO: 2120834 - DNA, 25 bp, Homo sapien
tcagacatgtgagcactacgggtgg

SEQ ID NO: 2120835 - DNA, 25 bp, Homo sapien
ctgagactgtcacttgggctaagca

SEQ ID NO: 2120836 - DNA, 25 bp, Homo sapien
ccatcataggtggtggaaacactgc

SEQ ID NO: 2120837 - DNA, 25 bp, Homo sapien
tacgggtggtgccagtttagagctc

SEQ ID NO: 2120838 - DNA, 25 bp, Homo sapien
caatgttcctgtgtagaataaccag

SEQ ID NO: 2120839 - DNA, 25 bp, Homo sapien
tagtccttatgagccacctaggcca

SEQ ID NO: 2120840 - DNA, 25 bp, Homo sapien
acaaaccagacgtcaaagggcagcg

SEQ ID NO: 2120841 - DNA, 25 bp, Homo sapien
taacaagctgacattggacaaacca

SEQ ID NO: 2120842 - DNA, 25 bp, Homo sapien
agaggtcatctctgaaggcggttct

SEQ ID NO: 2120843 - DNA, 25 bp, Homo sapien
acttagcagtatgtatcagggtgcc

SEQ ID NO: 2120844 - DNA, 25 bp, Homo sapien
tgaagcctcttttcgcatgccatgg

SEQ ID NO: 2120845 - DNA, 25 bp, Homo sapien
tcagggtgcctgaacctcatgttgt

SEQ ID NO: 2120846 - DNA, 25 bp, Homo sapien
cgagtggggcggactgctgcagagt

SEQ ID NO: 2120847 - DNA, 25 bp, Homo sapien
cagagttggcggtagggtctgcgtc

SEQ ID NO: 2120848 - DNA, 25 bp, Homo sapien
tttctccggaattgtaaggcgccgc

SEQ ID NO: 2120849 - DNA, 25 bp, Homo sapien
tgtaaggcgccgcttgctgccgagt

SEQ ID NO: 2120850 - DNA, 25 bp, Homo sapien
gtgaggttgactttctgaagcacaa

SEQ ID NO: 2120851 - DNA, 25 bp, Homo sapien
tgctatgagtgctgaggagtgaggt

SEQ ID NO: 2120852 - DNA, 25 bp, Homo sapien
gagagctaggtgctatgagtgctga

SEQ ID NO: 2120853 - DNA, 25 bp, Homo sapien
tgaagcacaagcttcactctgatta

SEQ ID NO: 2120854 - DNA, 25 bp, Homo sapien
ttgtcccataccgttgcataatctg

SEQ ID NO: 2120855 - DNA, 25 bp, Homo sapien
ttgttggccttgtcccataccgttg

SEQ ID NO: 2120856 - DNA, 25 bp, Homo sapien
ccataccgttgcataatctgatcat

SEQ ID NO: 2120857 - DNA, 25 bp, Homo sapien
gccttgtcccataccgttgcataat

SEQ ID NO: 2120858 - DNA, 25 bp, Homo sapien
ggttagatttaagtcaaagatattc

SEQ ID NO: 2120859 - DNA, 25 bp, Homo sapien
taaggaatcttcgaacgtgaatatt

SEQ ID NO: 2120860 - DNA, 25 bp, Homo sapien
aataatgttgcagttttcggttaga

SEQ ID NO: 2120861 - DNA, 25 bp, Homo sapien
tcgaacgtgaatattccagaaattt

SEQ ID NO: 2120862 - DNA, 25 bp, Homo sapien
cacggtgcgcgcacccactgacctc

SEQ ID NO: 2120863 - DNA, 25 bp, Homo sapien
cgcgcacccactgacctccgcccaa

SEQ ID NO: 2120864 - DNA, 25 bp, Homo sapien
ccgcccaatgtctggcactccctag

SEQ ID NO: 2120865 - DNA, 25 bp, Homo sapien
cgcacccactgacctccgcccaatg

SEQ ID NO: 2120866 - DNA, 25 bp, Homo sapien
caactgattggttaaggcctaccca

SEQ ID NO: 2120867 - DNA, 25 bp, Homo sapien
ccacatcacgagagcaatctgtttt

SEQ ID NO: 2120868 - DNA, 25 bp, Homo sapien
ggaaggagttgcactttgagtccaa

SEQ ID NO: 2120869 - DNA, 25 bp, Homo sapien
ccaaatacctaatgggagaggcagg

SEQ ID NO: 2120870 - DNA, 25 bp, Homo sapien
agtagaacaagaagtttgatttgta

SEQ ID NO: 2120871 - DNA, 25 bp, Homo sapien
gaagggggcaaagagtagaacaaga

SEQ ID NO: 2120872 - DNA, 25 bp, Homo sapien
actgactgtgaacaatcagttgaga

SEQ ID NO: 2120873 - DNA, 25 bp, Homo sapien
taactcactaccctcagaccagccc

SEQ ID NO: 2120874 - DNA, 25 bp, Homo sapien
gatctgagctgtaatgcaggagtgt

SEQ ID NO: 2120875 - DNA, 25 bp, Homo sapien
aaatcccaggtgtacacaggtctga

SEQ ID NO: 2120876 - DNA, 25 bp, Homo sapien
ctgtaatgcaggagtgtggctgtgc

SEQ ID NO: 2120877 - DNA, 25 bp, Homo sapien
acacaggtctgatctgagctgtaat

SEQ ID NO: 2120878 - DNA, 25 bp, Homo sapien
cagagtggggatttgggcccctcca

SEQ ID NO: 2120879 - DNA, 25 bp, Homo sapien
caacagagtggggatttgggcccct

SEQ ID NO: 2120880 - DNA, 25 bp, Homo sapien
ccatatgcctttaatcagcttctgc

SEQ ID NO: 2120881 - DNA, 25 bp, Homo sapien
tatgcctttaatcagcttctgctcc

SEQ ID NO: 2120882 - DNA, 25 bp, Homo sapien
ttctgctcctctggcaatatgggca

SEQ ID NO: 2120883 - DNA, 25 bp, Homo sapien
tctgctcctctggcaatatgggcat

SEQ ID NO: 2120884 - DNA, 25 bp, Homo sapien
ttgactatcctctcattgaatgctt

SEQ ID NO: 2120885 - DNA, 25 bp, Homo sapien
tagctctatactgagggaccccaaa

SEQ ID NO: 2120886 - DNA, 25 bp, Homo sapien
ctttgggatgggtgtagtgccatgg

SEQ ID NO: 2120887 - DNA, 25 bp, Homo sapien
tcagttctgttctgaatagctctat

SEQ ID NO: 2120888 - DNA, 25 bp, Homo sapien
cagctggagtcctagggcgctgact

SEQ ID NO: 2120889 - DNA, 25 bp, Homo sapien
ggctattgtgcgtcgcgctctcgcc

SEQ ID NO: 2120890 - DNA, 25 bp, Homo sapien
agcgctgggctaccgcggctattgt

SEQ ID NO: 2120891 - DNA, 25 bp, Homo sapien
cccagtttccgtagggaagcgctgg

SEQ ID NO: 2120892 - DNA, 25 bp, Homo sapien
tcaaatttagacgtggggggctgta

SEQ ID NO: 2120893 - DNA, 25 bp, Homo sapien
tttagacgtggggggctgtatacca

SEQ ID NO: 2120894 - DNA, 25 bp, Homo sapien
tgacattaatgatcataagttctga

SEQ ID NO: 2120895 - DNA, 25 bp, Homo sapien
ttagtgacattaatgatcataagtt

SEQ ID NO: 2120896 - DNA, 25 bp, Homo sapien
gatattgagacctgcttgtagctct

SEQ ID NO: 2120897 - DNA, 25 bp, Homo sapien
ctttggctataaagttgcaagtctc

SEQ ID NO: 2120898 - DNA, 25 bp, Homo sapien
tgtagctctgcgcatattgatgttc

SEQ ID NO: 2120899 - DNA, 25 bp, Homo sapien
tgctaattgtgctgccaagtctgct

SEQ ID NO: 2120900 - DNA, 25 bp, Homo sapien
tcaccatctagagttggagaagtag

SEQ ID NO: 2120901 - DNA, 25 bp, Homo sapien
caataggagtggctggcaaaaagag

SEQ ID NO: 2120902 - DNA, 25 bp, Homo sapien
gaagtaggagccaactttctggtta

SEQ ID NO: 2120903 - DNA, 25 bp, Homo sapien
aaaaagagtgatccctggacagtgg

SEQ ID NO: 2120904 - DNA, 25 bp, Homo sapien
tctttgcggaacctgcgacgtggag

SEQ ID NO: 2120905 - DNA, 25 bp, Homo sapien
cgatcacggcacctctaggaaagag

SEQ ID NO: 2120906 - DNA, 25 bp, Homo sapien
cacgggtccagctagacacgcttag

SEQ ID NO: 2120907 - DNA, 25 bp, Homo sapien
tttaacactcaagccggattctcag

SEQ ID NO: 2120908 - DNA, 25 bp, Homo sapien
tgggcgatgctgtccccgggtctcc

SEQ ID NO: 2120909 - DNA, 25 bp, Homo sapien
tgtccccgggtctcctggagactcc

SEQ ID NO: 2120910 - DNA, 25 bp, Homo sapien
cctgggcgatgctgtccccgggtct

SEQ ID NO: 2120911 - DNA, 25 bp, Homo sapien
gggtctcctggagactcctccgctt

SEQ ID NO: 2120912 - DNA, 25 bp, Homo sapien
ggtcccttttgtcgcagatcccaag

SEQ ID NO: 2120913 - DNA, 25 bp, Homo sapien
cctcggtcccttttgtcgcagatcc

SEQ ID NO: 2120914 - DNA, 25 bp, Homo sapien
cttttgtcgcagatcccaagctcac

SEQ ID NO: 2120915 - DNA, 25 bp, Homo sapien
tcccttttgtcgcagatcccaagct

SEQ ID NO: 2120916 - DNA, 25 bp, Homo sapien
tgaagaaccattacagactggaaga

SEQ ID NO: 2120917 - DNA, 25 bp, Homo sapien
gcaatgtgggatcctagataagatc

SEQ ID NO: 2120918 - DNA, 25 bp, Homo sapien
ggccataagtggaaaacctgctaaa

SEQ ID NO: 2120919 - DNA, 25 bp, Homo sapien
caaatgaagatgatatgtctgggct

SEQ ID NO: 2120920 - DNA, 25 bp, Homo sapien
tactaatgtaatgatgcctgggatt

SEQ ID NO: 2120921 - DNA, 25 bp, Homo sapien
tatttactaatgtaatgatgcctgg

SEQ ID NO: 2120922 - DNA, 25 bp, Homo sapien
taaagaaagtaggtagggctgtaga

SEQ ID NO: 2120923 - DNA, 25 bp, Homo sapien
gtgcccagccagaatccttatcttt

SEQ ID NO: 2120924 - DNA, 25 bp, Homo sapien
gatggtattgcgaacagattcattt

SEQ ID NO: 2120925 - DNA, 25 bp, Homo sapien
gatttctccttctacggggatgtct

SEQ ID NO: 2120926 - DNA, 25 bp, Homo sapien
gtcaaactcccggatgcgagatctc

SEQ ID NO: 2120927 - DNA, 25 bp, Homo sapien
tctcataggaatggtgatttctcct

SEQ ID NO: 2120928 - DNA, 25 bp, Homo sapien
ttttccttgggtacaaaacatgcat

SEQ ID NO: 2120929 - DNA, 25 bp, Homo sapien
ctcaaaagagtattacttttccttg

SEQ ID NO: 2120930 - DNA, 25 bp, Homo sapien
tttccttgggtacaaaacatgcatg

SEQ ID NO: 2120931 - DNA, 25 bp, Homo sapien
cagtcatcagactaaatgataggct

SEQ ID NO: 2120932 - DNA, 25 bp, Homo sapien
tacttacgataaggtacagtgagat

SEQ ID NO: 2120933 - DNA, 25 bp, Homo sapien
tgtaaattagcagcctccagaaatg

SEQ ID NO: 2120934 - DNA, 25 bp, Homo sapien
gagatagattaagcaaacccttaaa

SEQ ID NO: 2120935 - DNA, 25 bp, Homo sapien
tgtacactacataatactctacttg

SEQ ID NO: 2120936 - DNA, 25 bp, Homo sapien
tgactatgttactgtggtttacgtg

SEQ ID NO: 2120937 - DNA, 25 bp, Homo sapien
tcattgttatgttggagtatacttc

SEQ ID NO: 2120938 - DNA, 25 bp, Homo sapien
caaacctagtatgttgacagtcata

SEQ ID NO: 2120939 - DNA, 25 bp, Homo sapien
caaaggatcaaagggccccacaaat

SEQ ID NO: 2120940 - DNA, 25 bp, Homo sapien
ctgaagatctgtaatatgtaggttg

SEQ ID NO: 2120941 - DNA, 25 bp, Homo sapien
cctgaagatctgtaatatgtaggtt

SEQ ID NO: 2120942 - DNA, 25 bp, Homo sapien
tatctgcagagtctctttgcagcat

SEQ ID NO: 2120943 - DNA, 25 bp, Homo sapien
ctgcaaattggggccctccatcttt

SEQ ID NO: 2120944 - DNA, 25 bp, Homo sapien
gggccctccatctttttcactatct

SEQ ID NO: 2120945 - DNA, 25 bp, Homo sapien
ttcactatctgcagagtctctttgc

SEQ ID NO: 2120946 - DNA, 25 bp, Homo sapien
agttgagggtgatggtaactgcacc

SEQ ID NO: 2120947 - DNA, 25 bp, Homo sapien
atgttccctccaagaagttttgagt

SEQ ID NO: 2120948 - DNA, 25 bp, Homo sapien
tccctccaagaagttttgagttgag

SEQ ID NO: 2120949 - DNA, 25 bp, Homo sapien
ggtaactgcaccaaaccagacaatg

SEQ ID NO: 2120950 - DNA, 25 bp, Homo sapien
tggatcagccaaaagtaccagccgg

SEQ ID NO: 2120951 - DNA, 25 bp, Homo sapien
tatagaccaggcaaacatcacaatc

SEQ ID NO: 2120952 - DNA, 25 bp, Homo sapien
tcagcattgctactgtcaagggaag

SEQ ID NO: 2120953 - DNA, 25 bp, Homo sapien
ccacaaaaagccgaaccatgaagtt

SEQ ID NO: 2120954 - DNA, 25 bp, Homo sapien
cactgcaaaaacgtaactaattgta

SEQ ID NO: 2120955 - DNA, 25 bp, Homo sapien
ccactgcaaaaacgtaactaattgt

SEQ ID NO: 2120956 - DNA, 25 bp, Homo sapien
gtcagctcttttaaacgccatccct

SEQ ID NO: 2120957 - DNA, 25 bp, Homo sapien
aacctaatcatcgttttactcatca

SEQ ID NO: 2120958 - DNA, 25 bp, Homo sapien
tcctctcgctgggtgctacagctta

SEQ ID NO: 2120959 - DNA, 25 bp, Homo sapien
cgttttactcatcaagaatcaccct

SEQ ID NO: 2120960 - DNA, 25 bp, Homo sapien
taaacattcatgagcttggcatcat

SEQ ID NO: 2120961 - DNA, 25 bp, Homo sapien
ctaaacattcatgagcttggcatca

SEQ ID NO: 2120962 - DNA, 25 bp, Homo sapien
aaaacaggataaacagctagggctc

SEQ ID NO: 2120963 - DNA, 25 bp, Homo sapien
tctgcggtttggaggctggctatca

SEQ ID NO: 2120964 - DNA, 25 bp, Homo sapien
ctctgcggtttggaggctggctatc

SEQ ID NO: 2120965 - DNA, 25 bp, Homo sapien
aacagctagggctctgcggtttgga

SEQ ID NO: 2120966 - DNA, 25 bp, Homo sapien
ggtgacagtgctatatggctccctt

SEQ ID NO: 2120967 - DNA, 25 bp, Homo sapien
cggtgactccatcatgccttaagga

SEQ ID NO: 2120968 - DNA, 25 bp, Homo sapien
aagtcactggttgtcacccaaatgg

SEQ ID NO: 2120969 - DNA, 25 bp, Homo sapien
gcaatgtgtttaagagctgcacctg

SEQ ID NO: 2120970 - DNA, 25 bp, Homo sapien
tctgaatattggttaatgcatgttt

SEQ ID NO: 2120971 - DNA, 25 bp, Homo sapien
agaatttcccctgatcaaaatctga

SEQ ID NO: 2120972 - DNA, 25 bp, Homo sapien
tgttttctcattctccgtgtatgaa

SEQ ID NO: 2120973 - DNA, 25 bp, Homo sapien
gtgtatgaacccactcctaacctct

SEQ ID NO: 2120974 - DNA, 25 bp, Homo sapien
gactagagtgccaaccaagatgctg

SEQ ID NO: 2120975 - DNA, 25 bp, Homo sapien
gagaaaactgctaagctcaccatga

SEQ ID NO: 2120976 - DNA, 25 bp, Homo sapien
tcatattgccttaaaggagccctgt

SEQ ID NO: 2120977 - DNA, 25 bp, Homo sapien
tactttctagttaagaggccagact

SEQ ID NO: 2120978 - DNA, 25 bp, Homo sapien
gaacaagctgccttaagtcccaata

SEQ ID NO: 2120979 - DNA, 25 bp, Homo sapien
gacagattacgaaacaactttggca

SEQ ID NO: 2120980 - DNA, 25 bp, Homo sapien
aatcattccctaagtcacccaagag

SEQ ID NO: 2120981 - DNA, 25 bp, Homo sapien
caaagctgtggccttaggaatttct

SEQ ID NO: 2120982 - DNA, 25 bp, Homo sapien
cttccagacatttaggtcttaactt

SEQ ID NO: 2120983 - DNA, 25 bp, Homo sapien
ctgtgttgagggttacaacttccag

SEQ ID NO: 2120984 - DNA, 25 bp, Homo sapien
ttaggtcttaacttccatcacagaa

SEQ ID NO: 2120985 - DNA, 25 bp, Homo sapien
cgtccttgccgtcttcacttctata

SEQ ID NO: 2120986 - DNA, 25 bp, Homo sapien
cccgtccttgccgtcttcacttcta

SEQ ID NO: 2120987 - DNA, 25 bp, Homo sapien
tccttgccgtcttcacttctataat

SEQ ID NO: 2120988 - DNA, 25 bp, Homo sapien
aagcatgaaagttcccaaatcctgc

SEQ ID NO: 2120989 - DNA, 25 bp, Homo sapien
gaatgaacaggcagtccaaatactg

SEQ ID NO: 2120990 - DNA, 25 bp, Homo sapien
tgtccaaatacaggcttggtagcct

SEQ ID NO: 2120991 - DNA, 25 bp, Homo sapien
ggtagccttctaatcacattttggg

SEQ ID NO: 2120992 - DNA, 25 bp, Homo sapien
gatggcaatgatgcaccacattctg

SEQ ID NO: 2120993 - DNA, 25 bp, Homo sapien
cagagtaaacaagagcagcgcagtg

SEQ ID NO: 2120994 - DNA, 25 bp, Homo sapien
cattctgtggcctaagtaaacccca

SEQ ID NO: 2120995 - DNA, 25 bp, Homo sapien
cagatgctgctgatacagtgttcca

SEQ ID NO: 2120996 - DNA, 25 bp, Homo sapien
ggaactgactgctgacagacctggg

SEQ ID NO: 2120997 - DNA, 25 bp, Homo sapien
aatggagtattgaaaaggaccaaga

SEQ ID NO: 2120998 - DNA, 25 bp, Homo sapien
atggagtattgaaaaggaccaagaa

SEQ ID NO: 2120999 - DNA, 25 bp, Homo sapien
aagaaattactagcagtgatggcaa

SEQ ID NO: 2121000 - DNA, 25 bp, Homo sapien
tggagtattgaaaaggaccaagaaa

SEQ ID NO: 2121001 - DNA, 25 bp, Homo sapien
tttttcacagatttattatttatag

SEQ ID NO: 2121002 - DNA, 25 bp, Homo sapien
gatttttcacagatttattatttat

SEQ ID NO: 2121003 - DNA, 25 bp, Homo sapien
acagatttttcacagatttattatt

SEQ ID NO: 2121004 - DNA, 25 bp, Homo sapien
tttcacagatttattatttatagaa

SEQ ID NO: 2121005 - DNA, 25 bp, Homo sapien
ttttagttgcacatttaatagtcac

SEQ ID NO: 2121006 - DNA, 25 bp, Homo sapien
tagttgcacatttaatagtcacaaa

SEQ ID NO: 2121007 - DNA, 25 bp, Homo sapien
gtttttagttgcacatttaatagtc

SEQ ID NO: 2121008 - DNA, 25 bp, Homo sapien
gttgcacatttaatagtcacaaatc

SEQ ID NO: 2121009 - DNA, 25 bp, Homo sapien
ggtcatggtcatgcttcccaatttc

SEQ ID NO: 2121010 - DNA, 25 bp, Homo sapien
tcttgcccaattgtcctggatagga

SEQ ID NO: 2121011 - DNA, 25 bp, Homo sapien
actttgcactcttgggataaatcac

SEQ ID NO: 2121012 - DNA, 25 bp, Homo sapien
ctttatcggttgaggacattccttc

SEQ ID NO: 2121013 - DNA, 25 bp, Homo sapien
caggtccaggtgcacataatgctcc

SEQ ID NO: 2121014 - DNA, 25 bp, Homo sapien
tctttaagtatagcttctggagtac

SEQ ID NO: 2121015 - DNA, 25 bp, Homo sapien
tcactgagatcaggtccaggtccag

SEQ ID NO: 2121016 - DNA, 25 bp, Homo sapien
tgaagtctagattctcatcactgag

SEQ ID NO: 2121017 - DNA, 25 bp, Homo sapien
tctcaacagtgatagcagggtaccc

SEQ ID NO: 2121018 - DNA, 25 bp, Homo sapien
taagtcaagacaacctcgctctagc

SEQ ID NO: 2121019 - DNA, 25 bp, Homo sapien
catggttagccaatcaggacagaga

SEQ ID NO: 2121020 - DNA, 25 bp, Homo sapien
gagatatactaggtggctcccacac

SEQ ID NO: 2121021 - DNA, 25 bp, Homo sapien
ccgacagcaaatgtggcttgtggcc

SEQ ID NO: 2121022 - DNA, 25 bp, Homo sapien
ccctcgggtcaccatcttgttgatg

SEQ ID NO: 2121023 - DNA, 25 bp, Homo sapien
taccctcgggtcaccatcttgttga

SEQ ID NO: 2121024 - DNA, 25 bp, Homo sapien
tgtaccctcgggtcaccatcttgtt

SEQ ID NO: 2121025 - DNA, 25 bp, Homo sapien
tggtgtaccctcgggtcaccatctt

SEQ ID NO: 2121026 - DNA, 25 bp, Homo sapien
atagagcttgtttggtgaatcttca

SEQ ID NO: 2121027 - DNA, 25 bp, Homo sapien
caaagtatagagcttgtttggtgaa

SEQ ID NO: 2121028 - DNA, 25 bp, Homo sapien
agcttgtttggtgaatcttcatcct

SEQ ID NO: 2121029 - DNA, 25 bp, Homo sapien
tgtttggtgaatcttcatcctcatt

SEQ ID NO: 2121030 - DNA, 25 bp, Homo sapien
cgaaagtggtaacaggtacataggt

SEQ ID NO: 2121031 - DNA, 25 bp, Homo sapien
tttcgaaagtggtaacaggtacata

SEQ ID NO: 2121032 - DNA, 25 bp, Homo sapien
tcgaaagtggtaacaggtacatagg

SEQ ID NO: 2121033 - DNA, 25 bp, Homo sapien
ttcgaaagtggtaacaggtacatag

SEQ ID NO: 2121034 - DNA, 25 bp, Homo sapien
cagccttccatcaggctggcacact

SEQ ID NO: 2121035 - DNA, 25 bp, Homo sapien
aggcccccgcgtgtctgggaaagag

SEQ ID NO: 2121036 - DNA, 25 bp, Homo sapien
tcaaatgggacctgtggcactgtca

SEQ ID NO: 2121037 - DNA, 25 bp, Homo sapien
cccggggggtctactgagtggatgc

SEQ ID NO: 2121038 - DNA, 25 bp, Homo sapien
agctgtgcttgaggaaaggtctgtt

SEQ ID NO: 2121039 - DNA, 25 bp, Homo sapien
accaaccgaacacatcccatgccct

SEQ ID NO: 2121040 - DNA, 25 bp, Homo sapien
ctgttgagagggtagacgggctcca

SEQ ID NO: 2121041 - DNA, 25 bp, Homo sapien
cctttgctgagtggccctcaaccaa

SEQ ID NO: 2121042 - DNA, 25 bp, Homo sapien
gggctcggcgagagccagcccggtc

SEQ ID NO: 2121043 - DNA, 25 bp, Homo sapien
tgcgctccatgagccggccccgcga

SEQ ID NO: 2121044 - DNA, 25 bp, Homo sapien
gggctcagctgcctcgacagcgggc

SEQ ID NO: 2121045 - DNA, 25 bp, Homo sapien
tccctctctggggacgaggctaaaa

SEQ ID NO: 2121046 - DNA, 25 bp, Homo sapien
accagaaaacgtccagcagaggcat

SEQ ID NO: 2121047 - DNA, 25 bp, Homo sapien
gaagcaagaccagaaaacgtccagc

SEQ ID NO: 2121048 - DNA, 25 bp, Homo sapien
caagaccagaaaacgtccagcagag

SEQ ID NO: 2121049 - DNA, 25 bp, Homo sapien
gaccagaaaacgtccagcagaggca

SEQ ID NO: 2121050 - DNA, 25 bp, Homo sapien
ctcatggtcaacacagctagcaagt

SEQ ID NO: 2121051 - DNA, 25 bp, Homo sapien
cagataggtgaagggcttgactcca

SEQ ID NO: 2121052 - DNA, 25 bp, Homo sapien
aacacagctagcaagttgtggctca

SEQ ID NO: 2121053 - DNA, 25 bp, Homo sapien
gctcagataggtgaagggcttgact

SEQ ID NO: 2121054 - DNA, 25 bp, Homo sapien
gaactgcagagtctttccgggagag

SEQ ID NO: 2121055 - DNA, 25 bp, Homo sapien
actgcagagtctttccgggagaggc

SEQ ID NO: 2121056 - DNA, 25 bp, Homo sapien
ccagaactgcagagtctttccggga

SEQ ID NO: 2121057 - DNA, 25 bp, Homo sapien
gcccagaactgcagagtctttccgg

SEQ ID NO: 2121058 - DNA, 25 bp, Homo sapien
aagatttctgctacaaagtgaaggc

SEQ ID NO: 2121059 - DNA, 25 bp, Homo sapien
tatccctctgatttggaggttctga

SEQ ID NO: 2121060 - DNA, 25 bp, Homo sapien
tagcatatgaacttttgcatcaaag

SEQ ID NO: 2121061 - DNA, 25 bp, Homo sapien
gaatccaaaagttataaagacagcc

SEQ ID NO: 2121062 - DNA, 25 bp, Homo sapien
tcttcacctgcagcaatgggaagca

SEQ ID NO: 2121063 - DNA, 25 bp, Homo sapien
cagcgttcttcttcacctgcagcaa

SEQ ID NO: 2121064 - DNA, 25 bp, Homo sapien
gttcttcttcacctgcagcaatggg

SEQ ID NO: 2121065 - DNA, 25 bp, Homo sapien
tcttcttcacctgcagcaatgggaa

SEQ ID NO: 2121066 - DNA, 25 bp, Homo sapien
gacacgtacagaaggagccacagga

SEQ ID NO: 2121067 - DNA, 25 bp, Homo sapien
ctgagattttcaggcgagccgggcc

SEQ ID NO: 2121068 - DNA, 25 bp, Homo sapien
ctctgagattttcaggcgagccggg

SEQ ID NO: 2121069 - DNA, 25 bp, Homo sapien
cacgtacagaaggagccacaggaac

SEQ ID NO: 2121070 - DNA, 25 bp, Homo sapien
tgagccggatcccagggcttgggaa

SEQ ID NO: 2121071 - DNA, 25 bp, Homo sapien
aacacctgctgtatccacaagccat

SEQ ID NO: 2121072 - DNA, 25 bp, Homo sapien
gggaaacacctgctgtatccacaag

SEQ ID NO: 2121073 - DNA, 25 bp, Homo sapien
gaaacacctgctgtatccacaagcc

SEQ ID NO: 2121074 - DNA, 25 bp, Homo sapien
ggcggtgtccccaggtaacccatgc

SEQ ID NO: 2121075 - DNA, 25 bp, Homo sapien
gtgtccccaggtaacccatgccaaa

SEQ ID NO: 2121076 - DNA, 25 bp, Homo sapien
tccccaggtaacccatgccaaagtc

SEQ ID NO: 2121077 - DNA, 25 bp, Homo sapien
cggtgtccccaggtaacccatgcca

SEQ ID NO: 2121078 - DNA, 25 bp, Homo sapien
gtctaataccttcatatgcctccag

SEQ ID NO: 2121079 - DNA, 25 bp, Homo sapien
cggtctaataccttcatatgcctcc

SEQ ID NO: 2121080 - DNA, 25 bp, Homo sapien
gccatggccttgtaccccaggggta

SEQ ID NO: 2121081 - DNA, 25 bp, Homo sapien
ggtctaataccttcatatgcctcca

SEQ ID NO: 2121082 - DNA, 25 bp, Homo sapien
ttcctccaagcagaggagtttccct

SEQ ID NO: 2121083 - DNA, 25 bp, Homo sapien
agtgtgggacatagcccccggcagt

SEQ ID NO: 2121084 - DNA, 25 bp, Homo sapien
tccaagcagaggagtttcccttttg

SEQ ID NO: 2121085 - DNA, 25 bp, Homo sapien
tttgctctccggttgggcgggagtg

SEQ ID NO: 2121086 - DNA, 25 bp, Homo sapien
cacgtccgtggcttcgggaaccgca

SEQ ID NO: 2121087 - DNA, 25 bp, Homo sapien
cacggagtccacgtccgtggcttcg

SEQ ID NO: 2121088 - DNA, 25 bp, Homo sapien
tggcttcgggaaccgcaacgccgga

SEQ ID NO: 2121089 - DNA, 25 bp, Homo sapien
gagtccacgtccgtggcttcgggaa

SEQ ID NO: 2121090 - DNA, 25 bp, Homo sapien
caggggtgaggttttagacaaatgg

SEQ ID NO: 2121091 - DNA, 25 bp, Homo sapien
ataggactcaacgatgaaaaccggg

SEQ ID NO: 2121092 - DNA, 25 bp, Homo sapien
acataggactcaacgatgaaaaccg

SEQ ID NO: 2121093 - DNA, 25 bp, Homo sapien
ggacataggactcaacgatgaaaac

SEQ ID NO: 2121094 - DNA, 25 bp, Homo sapien
ccttgtctgggatcctttccagtgt

SEQ ID NO: 2121095 - DNA, 25 bp, Homo sapien
ctccttgtctgggatcctttccagt

SEQ ID NO: 2121096 - DNA, 25 bp, Homo sapien
gtctgggatcctttccagtgtccct

SEQ ID NO: 2121097 - DNA, 25 bp, Homo sapien
ttgtctgggatcctttccagtgtcc

SEQ ID NO: 2121098 - DNA, 25 bp, Homo sapien
cggactcgccagaaagtcacccaaa

SEQ ID NO: 2121099 - DNA, 25 bp, Homo sapien
ggactcgccagaaagtcacccaaat

SEQ ID NO: 2121100 - DNA, 25 bp, Homo sapien
agtcacccaaatctgggtgggcggg

SEQ ID NO: 2121101 - DNA, 25 bp, Homo sapien
gactcgccagaaagtcacccaaatc

SEQ ID NO: 2121102 - DNA, 25 bp, Homo sapien
cgctgacacagagcgagcgggcagg

SEQ ID NO: 2121103 - DNA, 25 bp, Homo sapien
gggactgctccgtccgggacacacg

SEQ ID NO: 2121104 - DNA, 25 bp, Homo sapien
aggagggactgctccgtccgggaca

SEQ ID NO: 2121105 - DNA, 25 bp, Homo sapien
ccctttgggttcgggcgctgacaca

SEQ ID NO: 2121106 - DNA, 25 bp, Homo sapien
aggaccccaggcttgttggaaggag

SEQ ID NO: 2121107 - DNA, 25 bp, Homo sapien
gctcaatgattaaccaagcagtggc

SEQ ID NO: 2121108 - DNA, 25 bp, Homo sapien
tattatgtggctcaatgattaacca

SEQ ID NO: 2121109 - DNA, 25 bp, Homo sapien
aggtggttattatgtggctcaatga

SEQ ID NO: 2121110 - DNA, 25 bp, Homo sapien
cctctcagcagcaatcatgtggttg

SEQ ID NO: 2121111 - DNA, 25 bp, Homo sapien
ccagccagctgagaacattcagtgt

SEQ ID NO: 2121112 - DNA, 25 bp, Homo sapien
tgagaacattcagtgtctgggcctg

SEQ ID NO: 2121113 - DNA, 25 bp, Homo sapien
agtgtctgggcctgattgaatttga

SEQ ID NO: 2121114 - DNA, 25 bp, Homo sapien
gccagctgagaacattcagtgtctg

SEQ ID NO: 2121115 - DNA, 25 bp, Homo sapien
gcaccttgggctggtacgacccagg

SEQ ID NO: 2121116 - DNA, 25 bp, Homo sapien
cagggacctaggatcccaggagcac

SEQ ID NO: 2121117 - DNA, 25 bp, Homo sapien
cataaaggtgactggagctggctag

SEQ ID NO: 2121118 - DNA, 25 bp, Homo sapien
ttcactcattaacttgtggctgaat

SEQ ID NO: 2121119 - DNA, 25 bp, Homo sapien
tggctggacctgaaccataaacaaa

SEQ ID NO: 2121120 - DNA, 25 bp, Homo sapien
aaggtatttgcacccaagattctgg

SEQ ID NO: 2121121 - DNA, 25 bp, Homo sapien
acaaatcagtgttgtctaaggtatt

SEQ ID NO: 2121122 - DNA, 25 bp, Homo sapien
caagggctctccaatcgtgagagct

SEQ ID NO: 2121123 - DNA, 25 bp, Homo sapien
gtatccagatatgcagattccaagg

SEQ ID NO: 2121124 - DNA, 25 bp, Homo sapien
tgtatccagatatgcagattccaag

SEQ ID NO: 2121125 - DNA, 25 bp, Homo sapien
tttaaaggctatattctgcaggcag

SEQ ID NO: 2121126 - DNA, 25 bp, Homo sapien
tctgtatccagatatgcagattcca

SEQ ID NO: 2121127 - DNA, 25 bp, Homo sapien
ggttggggaagtcagctggcttcag

SEQ ID NO: 2121128 - DNA, 25 bp, Homo sapien
ttggggaagtcagctggcttcagca

SEQ ID NO: 2121129 - DNA, 25 bp, Homo sapien
gttggggaagtcagctggcttcagc

SEQ ID NO: 2121130 - DNA, 25 bp, Homo sapien
agaaatggggttaggagggtgctga

SEQ ID NO: 2121131 - DNA, 25 bp, Homo sapien
aagaaatggggttaggagggtgctg

SEQ ID NO: 2121132 - DNA, 25 bp, Homo sapien
cctgttgcttgaagccactcacatg

SEQ ID NO: 2121133 - DNA, 25 bp, Homo sapien
atcctgttgcttgaagccactcaca

SEQ ID NO: 2121134 - DNA, 25 bp, Homo sapien
tcctgttgcttgaagccactcacat

SEQ ID NO: 2121135 - DNA, 25 bp, Homo sapien
aatcctgttgcttgaagccactcac

SEQ ID NO: 2121136 - DNA, 25 bp, Homo sapien
caaagagtcctcgtccagaaaaccg

SEQ ID NO: 2121137 - DNA, 25 bp, Homo sapien
aagagtcctcgtccagaaaaccgtg

SEQ ID NO: 2121138 - DNA, 25 bp, Homo sapien
agagtcctcgtccagaaaaccgtgg

SEQ ID NO: 2121139 - DNA, 25 bp, Homo sapien
gcccccaaagagtcctcgtccagaa

SEQ ID NO: 2121140 - DNA, 25 bp, Homo sapien
cagtttcatcgaggcacaattattc

SEQ ID NO: 2121141 - DNA, 25 bp, Homo sapien
acctccagtttcatcgaggcacaat

SEQ ID NO: 2121142 - DNA, 25 bp, Homo sapien
ttcatcgaggcacaattattcaagg

SEQ ID NO: 2121143 - DNA, 25 bp, Homo sapien
catcgaggcacaattattcaaggtc

SEQ ID NO: 2121144 - DNA, 25 bp, Homo sapien
caggccacaagtccttgcttgtact

SEQ ID NO: 2121145 - DNA, 25 bp, Homo sapien
cacaagtccttgcttgtactccact

SEQ ID NO: 2121146 - DNA, 25 bp, Homo sapien
agtccttgcttgtactccactctct

SEQ ID NO: 2121147 - DNA, 25 bp, Homo sapien
cttgcttgtactccactctctgctt

SEQ ID NO: 2121148 - DNA, 25 bp, Homo sapien
aaggcccagtggctactgatggtac

SEQ ID NO: 2121149 - DNA, 25 bp, Homo sapien
gaaggcccagtggctactgatggta

SEQ ID NO: 2121150 - DNA, 25 bp, Homo sapien
ggcccagtggctactgatggtacac

SEQ ID NO: 2121151 - DNA, 25 bp, Homo sapien
ccagtggctactgatggtacactgc

SEQ ID NO: 2121152 - DNA, 25 bp, Homo sapien
gaccccataggagaccagcacttac

SEQ ID NO: 2121153 - DNA, 25 bp, Homo sapien
gtggggccaacagatcagaggaccc

SEQ ID NO: 2121154 - DNA, 25 bp, Homo sapien
gccaacagatcagaggaccccatag

SEQ ID NO: 2121155 - DNA, 25 bp, Homo sapien
gctcggtggggccaacagatcagag

SEQ ID NO: 2121156 - DNA, 25 bp, Homo sapien
gacacaggctctcaatggacaggga

SEQ ID NO: 2121157 - DNA, 25 bp, Homo sapien
tacggttacgatggcgcttcttggc

SEQ ID NO: 2121158 - DNA, 25 bp, Homo sapien
tgtccactgaggatgccggaacgag

SEQ ID NO: 2121159 - DNA, 25 bp, Homo sapien
gcactaagctcggtgaggacgctct

SEQ ID NO: 2121160 - DNA, 25 bp, Homo sapien
gatgtcgtctaggtgagcatagctg

SEQ ID NO: 2121161 - DNA, 25 bp, Homo sapien
gagaccacagctctactcgttgctg

SEQ ID NO: 2121162 - DNA, 25 bp, Homo sapien
gtacagctcaggcaagttgtcatac

SEQ ID NO: 2121163 - DNA, 25 bp, Homo sapien
cccacacgtgctggaggatgtcgtc

SEQ ID NO: 2121164 - DNA, 25 bp, Homo sapien
caactgtggctatttctactgatga

SEQ ID NO: 2121165 - DNA, 25 bp, Homo sapien
tgtggctatttctactgatgaagtg

SEQ ID NO: 2121166 - DNA, 25 bp, Homo sapien
tggctatttctactgatgaagtggc

SEQ ID NO: 2121167 - DNA, 25 bp, Homo sapien
gctatttctactgatgaagtggcct

SEQ ID NO: 2121168 - DNA, 25 bp, Homo sapien
ggctgagagcctcagcttggcattt

SEQ ID NO: 2121169 - DNA, 25 bp, Homo sapien
ctgagagcctcagcttggcatttga

SEQ ID NO: 2121170 - DNA, 25 bp, Homo sapien
tgagagcctcagcttggcatttgac

SEQ ID NO: 2121171 - DNA, 25 bp, Homo sapien
gctgagagcctcagcttggcatttg

SEQ ID NO: 2121172 - DNA, 25 bp, Homo sapien
ggactgctggctggacttcagcctg

SEQ ID NO: 2121173 - DNA, 25 bp, Homo sapien
agccaggactgctggctggacttca

SEQ ID NO: 2121174 - DNA, 25 bp, Homo sapien
ctgagccggagccaggactgctggc

SEQ ID NO: 2121175 - DNA, 25 bp, Homo sapien
ccaggactgctggctggacttcagc

SEQ ID NO: 2121176 - DNA, 25 bp, Homo sapien
cttcctgtgccactggttcagcctc

SEQ ID NO: 2121177 - DNA, 25 bp, Homo sapien
ttcctgtgccactggttcagcctca

SEQ ID NO: 2121178 - DNA, 25 bp, Homo sapien
tcctgtgccactggttcagcctcag

SEQ ID NO: 2121179 - DNA, 25 bp, Homo sapien
tcttcctgtgccactggttcagcct

SEQ ID NO: 2121180 - DNA, 25 bp, Homo sapien
cagtgtcagaaatggagtgtccttc

SEQ ID NO: 2121181 - DNA, 25 bp, Homo sapien
tactgtcaagttcgctggaggaggc

SEQ ID NO: 2121182 - DNA, 25 bp, Homo sapien
caaaggtgggttccccgcctgaatg

SEQ ID NO: 2121183 - DNA, 25 bp, Homo sapien
tctggtaagtgaggccccaacacct

SEQ ID NO: 2121184 - DNA, 25 bp, Homo sapien
ggcggtgagaggggtggagaagccc

SEQ ID NO: 2121185 - DNA, 25 bp, Homo sapien
gagaagcccagaggagcaggtttgg

SEQ ID NO: 2121186 - DNA, 25 bp, Homo sapien
tggggggcggtgagaggggtggaga

SEQ ID NO: 2121187 - DNA, 25 bp, Homo sapien
tggagaagcccagaggagcaggttt

SEQ ID NO: 2121188 - DNA, 25 bp, Homo sapien
ctggaagctatgccaacggagcttc

SEQ ID NO: 2121189 - DNA, 25 bp, Homo sapien
tctccagcgactctgagttgaggct

SEQ ID NO: 2121190 - DNA, 25 bp, Homo sapien
tgtacttctccatgaacgcggtaag

SEQ ID NO: 2121191 - DNA, 25 bp, Homo sapien
caaactgccggttgatctccagcga

SEQ ID NO: 2121192 - DNA, 25 bp, Homo sapien
ggttgatctggcctgcaaactgccg

SEQ ID NO: 2121193 - DNA, 25 bp, Homo sapien
cgcaagtagcgcatggcttgctgaa

SEQ ID NO: 2121194 - DNA, 25 bp, Homo sapien
tggcccgtgcgctgcacgtggatga

SEQ ID NO: 2121195 - DNA, 25 bp, Homo sapien
gggtggcaccccaaatacgtgctgt

SEQ ID NO: 2121196 - DNA, 25 bp, Homo sapien
tacgtgctgtccccggtaatctggg

SEQ ID NO: 2121197 - DNA, 25 bp, Homo sapien
tggacttgaccccagacttgcggaa

SEQ ID NO: 2121198 - DNA, 25 bp, Homo sapien
gctcaggcaggtcccggaaatactg

SEQ ID NO: 2121199 - DNA, 25 bp, Homo sapien
tagcagacattgtcaggcgaggtct

SEQ ID NO: 2121200 - DNA, 25 bp, Homo sapien
ggcgaggtctcattcatttgacgca

SEQ ID NO: 2121201 - DNA, 25 bp, Homo sapien
gccaaccactgatccttggggagga

SEQ ID NO: 2121202 - DNA, 25 bp, Homo sapien
tctcggttctcatcggggagcagca

SEQ ID NO: 2121203 - DNA, 25 bp, Homo sapien
ccttcttagagacattgaggtggaa

SEQ ID NO: 2121204 - DNA, 25 bp, Homo sapien
agaggcaatgtcacttaagaagtag

SEQ ID NO: 2121205 - DNA, 25 bp, Homo sapien
tttcttgcagtcactgatcatgtgc

SEQ ID NO: 2121206 - DNA, 25 bp, Homo sapien
ggtggctgccatgttgtcactcagg

SEQ ID NO: 2121207 - DNA, 25 bp, Homo sapien
aatgaggctgcgtttgctcttgatc

SEQ ID NO: 2121208 - DNA, 25 bp, Homo sapien
tgatcatgtgcgacaggccctgggt

SEQ ID NO: 2121209 - DNA, 25 bp, Homo sapien
tcttccatgtagaggctcaggctta

SEQ ID NO: 2121210 - DNA, 25 bp, Homo sapien
cttgaagcgctcagcagcatcacgc

SEQ ID NO: 2121211 - DNA, 25 bp, Homo sapien
tcctgcaagccagctccgtgtgctg

SEQ ID NO: 2121212 - DNA, 25 bp, Homo sapien
tcaggcttacccctgcagcttgggc

SEQ ID NO: 2121213 - DNA, 25 bp, Homo sapien
ttagacagcataaagagatgacggg

SEQ ID NO: 2121214 - DNA, 25 bp, Homo sapien
cctgaggcttaatagggtaggctgc

SEQ ID NO: 2121215 - DNA, 25 bp, Homo sapien
gcctctcaggccctaccatgatggg

SEQ ID NO: 2121216 - DNA, 25 bp, Homo sapien
tagcgctggccagactgagacagtg

SEQ ID NO: 2121217 - DNA, 25 bp, Homo sapien
tgtggatgccttccatagccgcagg

SEQ ID NO: 2121218 - DNA, 25 bp, Homo sapien
gagaacacgatgcagcaccacagct

SEQ ID NO: 2121219 - DNA, 25 bp, Homo sapien
agcaccacaaagtcgcggcagggat

SEQ ID NO: 2121220 - DNA, 25 bp, Homo sapien
tcggtgacatagtggtacagctcca

SEQ ID NO: 2121221 - DNA, 25 bp, Homo sapien
acgaggcaggtcagagcgccacatc

SEQ ID NO: 2121222 - DNA, 25 bp, Homo sapien
cccaagccgcaaggctccatgaggt

SEQ ID NO: 2121223 - DNA, 25 bp, Homo sapien
tgagcatgagggctcgcacacccga

SEQ ID NO: 2121224 - DNA, 25 bp, Homo sapien
gcacaggttgttccggatccaggga

SEQ ID NO: 2121225 - DNA, 25 bp, Homo sapien
caggtgtccaaagactttgttgtac

SEQ ID NO: 2121226 - DNA, 25 bp, Homo sapien
gttgtaccagtcaggagaacggccc

SEQ ID NO: 2121227 - DNA, 25 bp, Homo sapien
tcacagctttgtctcagggcccgct

SEQ ID NO: 2121228 - DNA, 25 bp, Homo sapien
agctttgtctcagggcccgctgcct

SEQ ID NO: 2121229 - DNA, 25 bp, Homo sapien
cagtgtcagtgcgtggccaaaggct

SEQ ID NO: 2121230 - DNA, 25 bp, Homo sapien
tccttgcagcaaacaagacggcttg

SEQ ID NO: 2121231 - DNA, 25 bp, Homo sapien
gtcgataaagtgtgaaacccaagtc

SEQ ID NO: 2121232 - DNA, 25 bp, Homo sapien
gctccagctggctaagataggccct

SEQ ID NO: 2121233 - DNA, 25 bp, Homo sapien
ctttgcctataccagtatgttctgc

SEQ ID NO: 2121234 - DNA, 25 bp, Homo sapien
gcatggtgccatccccccatgaagt

SEQ ID NO: 2121235 - DNA, 25 bp, Homo sapien
gggcccacttgcatggtgccatccc

SEQ ID NO: 2121236 - DNA, 25 bp, Homo sapien
gtctccattgcaacatgcttcttca

SEQ ID NO: 2121237 - DNA, 25 bp, Homo sapien
tttgctttggttacctgggcttctg

SEQ ID NO: 2121238 - DNA, 25 bp, Homo sapien
agtttgagaccttagatttcagtct

SEQ ID NO: 2121239 - DNA, 25 bp, Homo sapien
tgagtagtcttctcacagggtgctg

SEQ ID NO: 2121240 - DNA, 25 bp, Homo sapien
cagggtgctggacaacaataatctc

SEQ ID NO: 2121241 - DNA, 25 bp, Homo sapien
gggcaactctgtgacaccttcctga

SEQ ID NO: 2121242 - DNA, 25 bp, Homo sapien
ttcaggatgagagcaacagtctggg

SEQ ID NO: 2121243 - DNA, 25 bp, Homo sapien
ttcagggcactcctttgaaatgtaa

SEQ ID NO: 2121244 - DNA, 25 bp, Homo sapien
tgctgcacgccctgaatttttatca

SEQ ID NO: 2121245 - DNA, 25 bp, Homo sapien
aagagtagctctcggagcctgctgc

SEQ ID NO: 2121246 - DNA, 25 bp, Homo sapien
ctaaagagtagctctcggagcctgc

SEQ ID NO: 2121247 - DNA, 25 bp, Homo sapien
gctccagttcttcatcatccctcat

SEQ ID NO: 2121248 - DNA, 25 bp, Homo sapien
tatagctccagttcttcatcatccc

SEQ ID NO: 2121249 - DNA, 25 bp, Homo sapien
tagctccagttcttcatcatccctc

SEQ ID NO: 2121250 - DNA, 25 bp, Homo sapien
ctccatatagctccagttcttcatc

SEQ ID NO: 2121251 - DNA, 25 bp, Homo sapien
cagatgtctgggtagaaaaagccac

SEQ ID NO: 2121252 - DNA, 25 bp, Homo sapien
aagtggcagatgtctgggtagaaaa

SEQ ID NO: 2121253 - DNA, 25 bp, Homo sapien
tggcagatgtctgggtagaaaaagc

SEQ ID NO: 2121254 - DNA, 25 bp, Homo sapien
gatgtctgggtagaaaaagccacca

SEQ ID NO: 2121255 - DNA, 25 bp, Homo sapien
caaggaccgtgaggcttctacacca

SEQ ID NO: 2121256 - DNA, 25 bp, Homo sapien
gtcagagtgcgacttccatgaaggg

SEQ ID NO: 2121257 - DNA, 25 bp, Homo sapien
ggcaggtggccaaacacttccatgc

SEQ ID NO: 2121258 - DNA, 25 bp, Homo sapien
tacaccagcctttagttcccatggg

SEQ ID NO: 2121259 - DNA, 25 bp, Homo sapien
gcttctgctgccgccactgtctgct

SEQ ID NO: 2121260 - DNA, 25 bp, Homo sapien
ttctgctgccgccactgtctgctcc

SEQ ID NO: 2121261 - DNA, 25 bp, Homo sapien
ctgctgccgccactgtctgctccat

SEQ ID NO: 2121262 - DNA, 25 bp, Homo sapien
catttccctgcttgcctgcttctgc

SEQ ID NO: 2121263 - DNA, 25 bp, Homo sapien
accccatgctacagtccaccacaca

SEQ ID NO: 2121264 - DNA, 25 bp, Homo sapien
aggatgatcaactgtggttctatat

SEQ ID NO: 2121265 - DNA, 25 bp, Homo sapien
tttaagatgacttgctctataaaac

SEQ ID NO: 2121266 - DNA, 25 bp, Homo sapien
tctataaaactttttgtcaggtcca

SEQ ID NO: 2121267 - DNA, 25 bp, Homo sapien
atatttaagatgacttgctctataa

SEQ ID NO: 2121268 - DNA, 25 bp, Homo sapien
agatgacttgctctataaaactttt

SEQ ID NO: 2121269 - DNA, 25 bp, Homo sapien
ataaaataacggtcttcagtttctg

SEQ ID NO: 2121270 - DNA, 25 bp, Homo sapien
taaaataacggtcttcagtttctgc

SEQ ID NO: 2121271 - DNA, 25 bp, Homo sapien
ctgtaaatgtccgtcctcctacttg

SEQ ID NO: 2121272 - DNA, 25 bp, Homo sapien
taaatgtccgtcctcctacttgtct

SEQ ID NO: 2121273 - DNA, 25 bp, Homo sapien
aatgtccgtcctcctacttgtctgg

SEQ ID NO: 2121274 - DNA, 25 bp, Homo sapien
tgtccgtcctcctacttgtctggag

SEQ ID NO: 2121275 - DNA, 25 bp, Homo sapien
gcattgattctggtatactgcttaa

SEQ ID NO: 2121276 - DNA, 25 bp, Homo sapien
cctttattgtcttagcagtttccag

SEQ ID NO: 2121277 - DNA, 25 bp, Homo sapien
tcaaatcccaaaagtctctcagaaa

SEQ ID NO: 2121278 - DNA, 25 bp, Homo sapien
cagccatagcaatgacatgagtgac

SEQ ID NO: 2121279 - DNA, 25 bp, Homo sapien
gatatccaaagtcactgaacatggt

SEQ ID NO: 2121280 - DNA, 25 bp, Homo sapien
catattcttatagagaggccgtctg

SEQ ID NO: 2121281 - DNA, 25 bp, Homo sapien
aacctacagagaggaccatattctt

SEQ ID NO: 2121282 - DNA, 25 bp, Homo sapien
tcagccaggcatctacatacagttc

SEQ ID NO: 2121283 - DNA, 25 bp, Homo sapien
taatgatttttagtgtggcatactt

SEQ ID NO: 2121284 - DNA, 25 bp, Homo sapien
cataatgatttttagtgtggcatac

SEQ ID NO: 2121285 - DNA, 25 bp, Homo sapien
atgatttttagtgtggcatacttgg

SEQ ID NO: 2121286 - DNA, 25 bp, Homo sapien
aatgatttttagtgtggcatacttg

SEQ ID NO: 2121287 - DNA, 25 bp, Homo sapien
tttcagagggttgagggacccatga

SEQ ID NO: 2121288 - DNA, 25 bp, Homo sapien
tgcgaacagccttctacacaacaca

SEQ ID NO: 2121289 - DNA, 25 bp, Homo sapien
cagccttctacacaacacacccttc

SEQ ID NO: 2121290 - DNA, 25 bp, Homo sapien
cctttcagagggttgagggacccat

SEQ ID NO: 2121291 - DNA, 25 bp, Homo sapien
gaccagagggcacagtcaatgcctg

SEQ ID NO: 2121292 - DNA, 25 bp, Homo sapien
cacagtcaatgcctgacgtatgtgc

SEQ ID NO: 2121293 - DNA, 25 bp, Homo sapien
gagggcacagtcaatgcctgacgta

SEQ ID NO: 2121294 - DNA, 25 bp, Homo sapien
gcctgacgtatgtgctttagaagta

SEQ ID NO: 2121295 - DNA, 25 bp, Homo sapien
gattgcagtgggccgcgcagagccg

SEQ ID NO: 2121296 - DNA, 25 bp, Homo sapien
caaataactggtcgaatcggttggt

SEQ ID NO: 2121297 - DNA, 25 bp, Homo sapien
taactggtcgaatcggttggtgacc

SEQ ID NO: 2121298 - DNA, 25 bp, Homo sapien
aaataactggtcgaatcggttggtg

SEQ ID NO: 2121299 - DNA, 25 bp, Homo sapien
ataactggtcgaatcggttggtgac

SEQ ID NO: 2121300 - DNA, 25 bp, Homo sapien
tggccccagggcctccaacgccggc

SEQ ID NO: 2121301 - DNA, 25 bp, Homo sapien
tctttttctccgctgccttcagcac

SEQ ID NO: 2121302 - DNA, 25 bp, Homo sapien
ctccaacgccggcccgccggcttct

SEQ ID NO: 2121303 - DNA, 25 bp, Homo sapien
tttttctttttctccgctgccttca

SEQ ID NO: 2121304 - DNA, 25 bp, Homo sapien
ctgcttgcctgccgcgttggagttg

SEQ ID NO: 2121305 - DNA, 25 bp, Homo sapien
ctttctgggactccttgcgcagctg

SEQ ID NO: 2121306 - DNA, 25 bp, Homo sapien
ttggtctgggccgcggcctgagcta

SEQ ID NO: 2121307 - DNA, 25 bp, Homo sapien
cagcgggttcttgcggtctttctgg

SEQ ID NO: 2121308 - DNA, 25 bp, Homo sapien
cttctttcttaagcgccatgggcgg

SEQ ID NO: 2121309 - DNA, 25 bp, Homo sapien
ctttcttaagcgccatgggcggctg

SEQ ID NO: 2121310 - DNA, 25 bp, Homo sapien
ttcttaagcgccatgggcggctgcg

SEQ ID NO: 2121311 - DNA, 25 bp, Homo sapien
cttaagcgccatgggcggctgcgtc

SEQ ID NO: 2121312 - DNA, 25 bp, Homo sapien
ttgatcaggtgttcttccaattcat

SEQ ID NO: 2121313 - DNA, 25 bp, Homo sapien
tgatcaggtgttcttccaattcatc

SEQ ID NO: 2121314 - DNA, 25 bp, Homo sapien
gttgatcaggtgttcttccaattca

SEQ ID NO: 2121315 - DNA, 25 bp, Homo sapien
ctatcagctgaaaattcgcctcgtt

SEQ ID NO: 2121316 - DNA, 25 bp, Homo sapien
gacttttcaaatcttcgttcacaag

SEQ ID NO: 2121317 - DNA, 25 bp, Homo sapien
gctgaaaattcgcctcgttcaccct

SEQ ID NO: 2121318 - DNA, 25 bp, Homo sapien
tcacaaggtggtcgcctttctggtc

SEQ ID NO: 2121319 - DNA, 25 bp, Homo sapien
tcgaatatgtcggtcaataatcggt

SEQ ID NO: 2121320 - DNA, 25 bp, Homo sapien
actaccacgacctcgaatatgtcgg

SEQ ID NO: 2121321 - DNA, 25 bp, Homo sapien
cgacctcgaatatgtcggtcaataa

SEQ ID NO: 2121322 - DNA, 25 bp, Homo sapien
ttccaagactaccacgacctcgaat

SEQ ID NO: 2121323 - DNA, 25 bp, Homo sapien
ccactatgcctatcaaattcacgtt

SEQ ID NO: 2121324 - DNA, 25 bp, Homo sapien
gtttgccacgagaatcaaatccatc

SEQ ID NO: 2121325 - DNA, 25 bp, Homo sapien
ttcacgtttgccacgagaatcaaat

SEQ ID NO: 2121326 - DNA, 25 bp, Homo sapien
gcctatcaaattcacgtttgccacg

SEQ ID NO: 2121327 - DNA, 25 bp, Homo sapien
ggtctccaaaattgatctccagctg

SEQ ID NO: 2121328 - DNA, 25 bp, Homo sapien
aaggtctccaaaattgatctccagc

SEQ ID NO: 2121329 - DNA, 25 bp, Homo sapien
ccaaggtctccaaaattgatctcca

SEQ ID NO: 2121330 - DNA, 25 bp, Homo sapien
caaggtctccaaaattgatctccag

SEQ ID NO: 2121331 - DNA, 25 bp, Homo sapien
tggaatccttaagcatgcaaaagct

SEQ ID NO: 2121332 - DNA, 25 bp, Homo sapien
accagggttgtcttatggcatccag

SEQ ID NO: 2121333 - DNA, 25 bp, Homo sapien
ttcagtctttaggtgtgaatggtat

SEQ ID NO: 2121334 - DNA, 25 bp, Homo sapien
taagcatgcaaaagctttgaacaga

SEQ ID NO: 2121335 - DNA, 25 bp, Homo sapien
caaatcaaagtttaacatgtcccag

SEQ ID NO: 2121336 - DNA, 25 bp, Homo sapien
gacaaatcaaagtttaacatgtccc

SEQ ID NO: 2121337 - DNA, 25 bp, Homo sapien
catgtcccagttgaccatgtgtgaa

SEQ ID NO: 2121338 - DNA, 25 bp, Homo sapien
cacacagcataaaatttgacaaatc

SEQ ID NO: 2121339 - DNA, 25 bp, Homo sapien
caaccccaccctcactcttgtccat

SEQ ID NO: 2121340 - DNA, 25 bp, Homo sapien
tcccgagtgaacacactagacacgt

SEQ ID NO: 2121341 - DNA, 25 bp, Homo sapien
tcaggccccacaaacaccgggaata

SEQ ID NO: 2121342 - DNA, 25 bp, Homo sapien
tgaacacactagacacgtcaggccc

SEQ ID NO: 2121343 - DNA, 25 bp, Homo sapien
ctcctggttcccgagtgaacacact

SEQ ID NO: 2121344 - DNA, 25 bp, Homo sapien
ggcagctgcaggaagcctcgggcat

SEQ ID NO: 2121345 - DNA, 25 bp, Homo sapien
gatgcaggagaacatctggcagctg

SEQ ID NO: 2121346 - DNA, 25 bp, Homo sapien
cctggacccagagatgcaggagaac

SEQ ID NO: 2121347 - DNA, 25 bp, Homo sapien
ctgtatgtgggggatcctggaccca

SEQ ID NO: 2121348 - DNA, 25 bp, Homo sapien
gggccatccctgttgacacaaagag

SEQ ID NO: 2121349 - DNA, 25 bp, Homo sapien
tccctgttgacacaaagagcagctc

SEQ ID NO: 2121350 - DNA, 25 bp, Homo sapien
gcggggccatccctgttgacacaaa

SEQ ID NO: 2121351 - DNA, 25 bp, Homo sapien
tctgagcggggccatccctgttgac

SEQ ID NO: 2121352 - DNA, 25 bp, Homo sapien
gtgctaatgtctccccctgctggac

SEQ ID NO: 2121353 - DNA, 25 bp, Homo sapien
tgctggacttccatagcactgcggg

SEQ ID NO: 2121354 - DNA, 25 bp, Homo sapien
gcgcctgggataaacccggagcttg

SEQ ID NO: 2121355 - DNA, 25 bp, Homo sapien
gcttgccatagcacaagacctggga

SEQ ID NO: 2121356 - DNA, 25 bp, Homo sapien
gagccagtcccattagtttgcgccc

SEQ ID NO: 2121357 - DNA, 25 bp, Homo sapien
gagatgctgccgagcgagccagtcc

SEQ ID NO: 2121358 - DNA, 25 bp, Homo sapien
actgctgtccagctcgcatagactc

SEQ ID NO: 2121359 - DNA, 25 bp, Homo sapien
cgggccctgctcagtgtacttagaa

SEQ ID NO: 2121360 - DNA, 25 bp, Homo sapien
gaagtgggggtttccccacagcaca

SEQ ID NO: 2121361 - DNA, 25 bp, Homo sapien
agcacaagctcggtccccgggctcc

SEQ ID NO: 2121362 - DNA, 25 bp, Homo sapien
ccccacagcacaagctcggtccccg

SEQ ID NO: 2121363 - DNA, 25 bp, Homo sapien
ggtttccccacagcacaagctcggt

SEQ ID NO: 2121364 - DNA, 25 bp, Homo sapien
tcccgccggcttcggtgtcgctctt

SEQ ID NO: 2121365 - DNA, 25 bp, Homo sapien
gcagaggtctcggtgaccgccccga

SEQ ID NO: 2121366 - DNA, 25 bp, Homo sapien
gctcgacttcccgagacgcttcggg

SEQ ID NO: 2121367 - DNA, 25 bp, Homo sapien
gatcccgcccgattccgctcgactt

SEQ ID NO: 2121368 - DNA, 25 bp, Homo sapien
atcgccacaagccacttgccgagcc

SEQ ID NO: 2121369 - DNA, 25 bp, Homo sapien
tcttggccagcggtgtggcgagccg

SEQ ID NO: 2121370 - DNA, 25 bp, Homo sapien
agcgcccacacgaccatcgccacaa

SEQ ID NO: 2121371 - DNA, 25 bp, Homo sapien
ctccaggatacgggctccaggttct

SEQ ID NO: 2121372 - DNA, 25 bp, Homo sapien
gtcacagggacagatgcttgcacac

SEQ ID NO: 2121373 - DNA, 25 bp, Homo sapien
ccctcctcgatgtcgatgtctgctt

SEQ ID NO: 2121374 - DNA, 25 bp, Homo sapien
cccccctcctcgatgtcgatgtctg

SEQ ID NO: 2121375 - DNA, 25 bp, Homo sapien
cctcctcgatgtcgatgtctgcttt

SEQ ID NO: 2121376 - DNA, 25 bp, Homo sapien
cccctcctcgatgtcgatgtctgct

SEQ ID NO: 2121377 - DNA, 25 bp, Homo sapien
ccacccccaacaaagattccttcat

SEQ ID NO: 2121378 - DNA, 25 bp, Homo sapien
ggtggcagtcttatatacccccacc

SEQ ID NO: 2121379 - DNA, 25 bp, Homo sapien
gaggtggcagtcttatataccccca

SEQ ID NO: 2121380 - DNA, 25 bp, Homo sapien
ctggaggtggcagtcttatataccc

SEQ ID NO: 2121381 - DNA, 25 bp, Homo sapien
ttttcggatagatcaccaagccctt

SEQ ID NO: 2121382 - DNA, 25 bp, Homo sapien
cttgtagtactcatagggccgccct

SEQ ID NO: 2121383 - DNA, 25 bp, Homo sapien
tcatggtgcttcttgaactccaggc

SEQ ID NO: 2121384 - DNA, 25 bp, Homo sapien
tcgagaactgtgctacaggcagctg

SEQ ID NO: 2121385 - DNA, 25 bp, Homo sapien
tgatcttcatggtgcgtgtgcggca

SEQ ID NO: 2121386 - DNA, 25 bp, Homo sapien
catggtgcgtgtgcggcacacaccg

SEQ ID NO: 2121387 - DNA, 25 bp, Homo sapien
tcttcatggtgcgtgtgcggcacac

SEQ ID NO: 2121388 - DNA, 25 bp, Homo sapien
cttgcccaaccttcatgatgatctt

SEQ ID NO: 2121389 - DNA, 25 bp, Homo sapien
tagtcagctgctcaggcgtcacagc

SEQ ID NO: 2121390 - DNA, 25 bp, Homo sapien
gagccccgactaccaggggcctgtg

SEQ ID NO: 2121391 - DNA, 25 bp, Homo sapien
gcctgtgtggccatcttgacagtgt

SEQ ID NO: 2121392 - DNA, 25 bp, Homo sapien
tgctcaggcgtcacagcattgggat

SEQ ID NO: 2121393 - DNA, 25 bp, Homo sapien
tagcttcagtagtaggaccgtcagg

SEQ ID NO: 2121394 - DNA, 25 bp, Homo sapien
gccgcgaacaatgccaccttggagt

SEQ ID NO: 2121395 - DNA, 25 bp, Homo sapien
gatgtagacagggtgcccgtagtcc

SEQ ID NO: 2121396 - DNA, 25 bp, Homo sapien
tgcggtgccgcttgcgtagcttcag

SEQ ID NO: 2121397 - DNA, 25 bp, Homo sapien
ggttacccacctgtgctagggccca

SEQ ID NO: 2121398 - DNA, 25 bp, Homo sapien
cattaattaccgtgagagtgaggga

SEQ ID NO: 2121399 - DNA, 25 bp, Homo sapien
caggataagcctcgtaggagggtca

SEQ ID NO: 2121400 - DNA, 25 bp, Homo sapien
gatagcggacaagcagtcctgggaa

SEQ ID NO: 2121401 - DNA, 25 bp, Homo sapien
ggtggatggtgtgagggccagctcc

SEQ ID NO: 2121402 - DNA, 25 bp, Homo sapien
gcctgcaaggcgcactcaagtggca

SEQ ID NO: 2121403 - DNA, 25 bp, Homo sapien
tcaagtggcagtctgttagcagccg

SEQ ID NO: 2121404 - DNA, 25 bp, Homo sapien
tgttagcagccgtgctggcaaggaa

SEQ ID NO: 2121405 - DNA, 25 bp, Homo sapien
tccaaaaagactagtatttacacaa

SEQ ID NO: 2121406 - DNA, 25 bp, Homo sapien
caaaaacccttccgactgccacctg

SEQ ID NO: 2121407 - DNA, 25 bp, Homo sapien
tatttacacaaatggcaacagaaac

SEQ ID NO: 2121408 - DNA, 25 bp, Homo sapien
taattcagagtttatacaaaacatc

SEQ ID NO: 2121409 - DNA, 25 bp, Homo sapien
ggctaaccagcagattgccccactt

SEQ ID NO: 2121410 - DNA, 25 bp, Homo sapien
tggattttacttcacactcccacag

SEQ ID NO: 2121411 - DNA, 25 bp, Homo sapien
cttctgggctaaccagcagattgcc

SEQ ID NO: 2121412 - DNA, 25 bp, Homo sapien
atggcacccatgctagggcaaggga

SEQ ID NO: 2121413 - DNA, 25 bp, Homo sapien
gaagcatcctgtatccctgactcac

SEQ ID NO: 2121414 - DNA, 25 bp, Homo sapien
ggaagcatcctgtatccctgactca

SEQ ID NO: 2121415 - DNA, 25 bp, Homo sapien
ctgggaagcatcctgtatccctgac

SEQ ID NO: 2121416 - DNA, 25 bp, Homo sapien
gggaagcatcctgtatccctgactc

SEQ ID NO: 2121417 - DNA, 25 bp, Homo sapien
tgacagcaagggttctacccaggaa

SEQ ID NO: 2121418 - DNA, 25 bp, Homo sapien
agttcccctgacagcaagggttcta

SEQ ID NO: 2121419 - DNA, 25 bp, Homo sapien
tgctagccagttcccctgacagcaa

SEQ ID NO: 2121420 - DNA, 25 bp, Homo sapien
gccagtgaggctgctagccagttcc

SEQ ID NO: 2121421 - DNA, 25 bp, Homo sapien
cttcgtacttctgaagcccagggac

SEQ ID NO: 2121422 - DNA, 25 bp, Homo sapien
ggcttcgtacttctgaagcccaggg

SEQ ID NO: 2121423 - DNA, 25 bp, Homo sapien
ctcttaggcttcgtacttctgaagc

SEQ ID NO: 2121424 - DNA, 25 bp, Homo sapien
taggcttcgtacttctgaagcccag

SEQ ID NO: 2121425 - DNA, 25 bp, Homo sapien
ggtgtgacaagaaacctctctcatt

SEQ ID NO: 2121426 - DNA, 25 bp, Homo sapien
gaaacctctctcattcagggccatc

SEQ ID NO: 2121427 - DNA, 25 bp, Homo sapien
gacaagaaacctctctcattcaggg

SEQ ID NO: 2121428 - DNA, 25 bp, Homo sapien
aggtgtgacaagaaacctctctcat

SEQ ID NO: 2121429 - DNA, 25 bp, Homo sapien
gagatggctccagggtatttctgat

SEQ ID NO: 2121430 - DNA, 25 bp, Homo sapien
tatgaattcgggagatggctccagg

SEQ ID NO: 2121431 - DNA, 25 bp, Homo sapien
ctaggtatgaattcgggagatggct

SEQ ID NO: 2121432 - DNA, 25 bp, Homo sapien
ggtatgaattcgggagatggctcca

SEQ ID NO: 2121433 - DNA, 25 bp, Homo sapien
tgtggtatccaatttcccaagagac

SEQ ID NO: 2121434 - DNA, 25 bp, Homo sapien
ggtttgcccagaaatcgcatggagt

SEQ ID NO: 2121435 - DNA, 25 bp, Homo sapien
gaaggcaaaatccatacacctctca

SEQ ID NO: 2121436 - DNA, 25 bp, Homo sapien
gcatggagtcattcaaaaactcaag

SEQ ID NO: 2121437 - DNA, 25 bp, Homo sapien
tcgggtagttgaccttaagtcgtgc

SEQ ID NO: 2121438 - DNA, 25 bp, Homo sapien
taactgagtgatttgacctgctgta

SEQ ID NO: 2121439 - DNA, 25 bp, Homo sapien
tggagagaaaccaattgaatgctgg

SEQ ID NO: 2121440 - DNA, 25 bp, Homo sapien
tctgacaacaattgggcagtaggat

SEQ ID NO: 2121441 - DNA, 25 bp, Homo sapien
tgggaatatatcagtaggcctcccc

SEQ ID NO: 2121442 - DNA, 25 bp, Homo sapien
tgagctaccgcactggaacttggat

SEQ ID NO: 2121443 - DNA, 25 bp, Homo sapien
aaatgagtccatgcggtcccaatga

SEQ ID NO: 2121444 - DNA, 25 bp, Homo sapien
gcccctgcagagtgtgccaacaaga

SEQ ID NO: 2121445 - DNA, 25 bp, Homo sapien
tggcctaggcatctccagtgagaag

SEQ ID NO: 2121446 - DNA, 25 bp, Homo sapien
gattggtccacatgcgtcttctctg

SEQ ID NO: 2121447 - DNA, 25 bp, Homo sapien
gaggcctagctgaattaaagtccac

SEQ ID NO: 2121448 - DNA, 25 bp, Homo sapien
gctttgaatccacaatggccatagg

SEQ ID NO: 2121449 - DNA, 25 bp, Homo sapien
cttagagcgtgtatccagagatgac

SEQ ID NO: 2121450 - DNA, 25 bp, Homo sapien
tgagcaaggcagatttctgatgccc

SEQ ID NO: 2121451 - DNA, 25 bp, Homo sapien
tagatgccatcgactgcctaaagcc

SEQ ID NO: 2121452 - DNA, 25 bp, Homo sapien
aagccacccagtgtcattgaccgag

SEQ ID NO: 2121453 - DNA, 25 bp, Homo sapien
gctcagagccaaccatgtctctggc

SEQ ID NO: 2121454 - DNA, 25 bp, Homo sapien
gagccaaccatgtctctggcattta

SEQ ID NO: 2121455 - DNA, 25 bp, Homo sapien
cttagaggtcagtactgccagctcc

SEQ ID NO: 2121456 - DNA, 25 bp, Homo sapien
gaggtcagtactgccagctcctgct

SEQ ID NO: 2121457 - DNA, 25 bp, Homo sapien
tgtgaagattgccaacaactaccag

SEQ ID NO: 2121458 - DNA, 25 bp, Homo sapien
agctgaaattatgagaggtgggcca

SEQ ID NO: 2121459 - DNA, 25 bp, Homo sapien
taatagatgctatgcccatcagcac

SEQ ID NO: 2121460 - DNA, 25 bp, Homo sapien
aaatccagtggacacttctaggagc

SEQ ID NO: 2121461 - DNA, 25 bp, Homo sapien
cactttggcaggaccatttcttgca

SEQ ID NO: 2121462 - DNA, 25 bp, Homo sapien
gagctgagttcccattgtccgcaaa

SEQ ID NO: 2121463 - DNA, 25 bp, Homo sapien
tccgcaaatcgggaccagctgtgag

SEQ ID NO: 2121464 - DNA, 25 bp, Homo sapien
cacattcctgtgcaagccttcaagc

SEQ ID NO: 2121465 - DNA, 25 bp, Homo sapien
ttatatctctcccctcagttttatg

SEQ ID NO: 2121466 - DNA, 25 bp, Homo sapien
caccaatctcgtgggctcagaccat

SEQ ID NO: 2121467 - DNA, 25 bp, Homo sapien
ctttcaccaatctcgtgggctcaga

SEQ ID NO: 2121468 - DNA, 25 bp, Homo sapien
attgcacagcctccagatggtccct

SEQ ID NO: 2121469 - DNA, 25 bp, Homo sapien
tgccttctttcaccaatctcgtggg

SEQ ID NO: 2121470 - DNA, 25 bp, Homo sapien
ccatgagacctagagacagctggga

SEQ ID NO: 2121471 - DNA, 25 bp, Homo sapien
cagtacccgtattcaatacgggtag

SEQ ID NO: 2121472 - DNA, 25 bp, Homo sapien
tgggtccatgagacctagagacagc

SEQ ID NO: 2121473 - DNA, 25 bp, Homo sapien
gatggtacagtacccgtattcaata

SEQ ID NO: 2121474 - DNA, 25 bp, Homo sapien
cctgtgaaaatttatggcttgagaa

SEQ ID NO: 2121475 - DNA, 25 bp, Homo sapien
tttatggcttgagaaagttcttgca

SEQ ID NO: 2121476 - DNA, 25 bp, Homo sapien
gctgtctcaggactcgctcaggttt

SEQ ID NO: 2121477 - DNA, 25 bp, Homo sapien
actcgctcaggtttccggcctctgg

SEQ ID NO: 2121478 - DNA, 25 bp, Homo sapien
agtggctgtcgagtgccagcttccc

SEQ ID NO: 2121479 - DNA, 25 bp, Homo sapien
ctggcctaaccgggaaaatctcctg

SEQ ID NO: 2121480 - DNA, 25 bp, Homo sapien
ggcctgtatggaatcggcttggact

SEQ ID NO: 2121481 - DNA, 25 bp, Homo sapien
ccagagtggctgtcgagtgccagct

SEQ ID NO: 2121482 - DNA, 25 bp, Homo sapien
cccaaggaatgtaatcaagatgtaa

SEQ ID NO: 2121483 - DNA, 25 bp, Homo sapien
gaatgtggcctggacggtttcccaa

SEQ ID NO: 2121484 - DNA, 25 bp, Homo sapien
aggagctggtcgatagggttgtcac

SEQ ID NO: 2121485 - DNA, 25 bp, Homo sapien
ccagcgttgccatagtgctctgtgg

SEQ ID NO: 2121486 - DNA, 25 bp, Homo sapien
tgaaatcattgctccagcccaccgg

SEQ ID NO: 2121487 - DNA, 25 bp, Homo sapien
gcccaccggactgggacctcggcca

SEQ ID NO: 2121488 - DNA, 25 bp, Homo sapien
tcagattccgggcctctgaaatcat

SEQ ID NO: 2121489 - DNA, 25 bp, Homo sapien
ctcagattccgggcctctgaaatca

SEQ ID NO: 2121490 - DNA, 25 bp, Homo sapien
tgatttgtgataacataatgttcct

SEQ ID NO: 2121491 - DNA, 25 bp, Homo sapien
gggcgccagccctgactttaatctt

SEQ ID NO: 2121492 - DNA, 25 bp, Homo sapien
cccagctggaatacttgtagtatct

SEQ ID NO: 2121493 - DNA, 25 bp, Homo sapien
cattggcattggaactagggcgcca

SEQ ID NO: 2121494 - DNA, 25 bp, Homo sapien
agctccgtggcatcgataagcccca

SEQ ID NO: 2121495 - DNA, 25 bp, Homo sapien
tctttcctcctcctcgactcctgac

SEQ ID NO: 2121496 - DNA, 25 bp, Homo sapien
ttctctttcctcctcctcgactcct

SEQ ID NO: 2121497 - DNA, 25 bp, Homo sapien
ctctttcctcctcctcgactcctga

SEQ ID NO: 2121498 - DNA, 25 bp, Homo sapien
tctctttcctcctcctcgactcctg

SEQ ID NO: 2121499 - DNA, 25 bp, Homo sapien
cattcagccaccagcgaagcatcct

SEQ ID NO: 2121500 - DNA, 25 bp, Homo sapien
tcttctcttctgcaactaataacca

SEQ ID NO: 2121501 - DNA, 25 bp, Homo sapien
tcttctgcaactaataaccattccc

SEQ ID NO: 2121502 - DNA, 25 bp, Homo sapien
gcaactaataaccattcccaacagc

SEQ ID NO: 2121503 - DNA, 25 bp, Homo sapien
cctgtaccggtatccaggtggtgga

SEQ ID NO: 2121504 - DNA, 25 bp, Homo sapien
tgtctgcccacttagggcctgtacc

SEQ ID NO: 2121505 - DNA, 25 bp, Homo sapien
gggatcacatccactttcattagct

SEQ ID NO: 2121506 - DNA, 25 bp, Homo sapien
ggtggatgggatcacatccactttc

SEQ ID NO: 2121507 - DNA, 25 bp, Homo sapien
gagtataagattttgcacgttggat

SEQ ID NO: 2121508 - DNA, 25 bp, Homo sapien
tgcacgttggatggtttgctccatg

SEQ ID NO: 2121509 - DNA, 25 bp, Homo sapien
tataagattttgcacgttggatggt

SEQ ID NO: 2121510 - DNA, 25 bp, Homo sapien
agattttgcacgttggatggtttgc

SEQ ID NO: 2121511 - DNA, 25 bp, Homo sapien
agtcctgagcaagccatgatgaggc

SEQ ID NO: 2121512 - DNA, 25 bp, Homo sapien
agcaagccatgatgaggcatctgct

SEQ ID NO: 2121513 - DNA, 25 bp, Homo sapien
taaattgccagtaggctggtatcca

SEQ ID NO: 2121514 - DNA, 25 bp, Homo sapien
ctaaattgccagtaggctggtatcc

SEQ ID NO: 2121515 - DNA, 25 bp, Homo sapien
tcgacacacacatatcatcgtccca

SEQ ID NO: 2121516 - DNA, 25 bp, Homo sapien
acacacatatcatcgtcccaggtct

SEQ ID NO: 2121517 - DNA, 25 bp, Homo sapien
gggtgtgggtggcgtcaggcccaga

SEQ ID NO: 2121518 - DNA, 25 bp, Homo sapien
atcatcgtcccaggtctcactgtca

SEQ ID NO: 2121519 - DNA, 25 bp, Homo sapien
aaatggggataatatggtatttctc

SEQ ID NO: 2121520 - DNA, 25 bp, Homo sapien
cacttcacctctctccacttctgtc

SEQ ID NO: 2121521 - DNA, 25 bp, Homo sapien
caactgtgtgatgttgagcaagtca

SEQ ID NO: 2121522 - DNA, 25 bp, Homo sapien
cttcacctctctccacttctgtctc

SEQ ID NO: 2121523 - DNA, 25 bp, Homo sapien
tcccccttggtgatgtccctgagat

SEQ ID NO: 2121524 - DNA, 25 bp, Homo sapien
gacagtagaggtgagcgtccagcta

SEQ ID NO: 2121525 - DNA, 25 bp, Homo sapien
tctgctattccagggatggacagta

SEQ ID NO: 2121526 - DNA, 25 bp, Homo sapien
gggcctgaagataaatgtccccctc

SEQ ID NO: 2121527 - DNA, 25 bp, Homo sapien
gagtacagtgtatcactcttggtct

SEQ ID NO: 2121528 - DNA, 25 bp, Homo sapien
catgagtacagtgtatcactcttgg

SEQ ID NO: 2121529 - DNA, 25 bp, Homo sapien
agtacagtgtatcactcttggtctc

SEQ ID NO: 2121530 - DNA, 25 bp, Homo sapien
tgagtacagtgtatcactcttggtc

SEQ ID NO: 2121531 - DNA, 25 bp, Homo sapien
cagaggcccaaaccagaactgagca

SEQ ID NO: 2121532 - DNA, 25 bp, Homo sapien
ggcccaaaccagaactgagcagttg

SEQ ID NO: 2121533 - DNA, 25 bp, Homo sapien
gaggcccaaaccagaactgagcagt

SEQ ID NO: 2121534 - DNA, 25 bp, Homo sapien
gcccaaaccagaactgagcagttga

SEQ ID NO: 2121535 - DNA, 25 bp, Homo sapien
ccaggtctctgtcggttccttgggt

SEQ ID NO: 2121536 - DNA, 25 bp, Homo sapien
cggttccttgggttctctagactgg

SEQ ID NO: 2121537 - DNA, 25 bp, Homo sapien
ccccaggtctctgtcggttccttgg

SEQ ID NO: 2121538 - DNA, 25 bp, Homo sapien
ctctgtcggttccttgggttctcta

SEQ ID NO: 2121539 - DNA, 25 bp, Homo sapien
gactggggccatggcagtaggtggg

SEQ ID NO: 2121540 - DNA, 25 bp, Homo sapien
tggtggtcgaaaggactggggccat

SEQ ID NO: 2121541 - DNA, 25 bp, Homo sapien
tgagaaatggtggtcgaaaggactg

SEQ ID NO: 2121542 - DNA, 25 bp, Homo sapien
agaaatggtggtcgaaaggactggg

SEQ ID NO: 2121543 - DNA, 25 bp, Homo sapien
gtgctgggccttcattgtgaaatag

SEQ ID NO: 2121544 - DNA, 25 bp, Homo sapien
cattgtgaaatagtgaagcttccac

SEQ ID NO: 2121545 - DNA, 25 bp, Homo sapien
accgtgctgggccttcattgtgaaa

SEQ ID NO: 2121546 - DNA, 25 bp, Homo sapien
tcattgtgaaatagtgaagcttcca

SEQ ID NO: 2121547 - DNA, 25 bp, Homo sapien
aggagtctttggcagatgaagctat

SEQ ID NO: 2121548 - DNA, 25 bp, Homo sapien
atgaagctatcagggaggttttgga

SEQ ID NO: 2121549 - DNA, 25 bp, Homo sapien
tctttggcagatgaagctatcaggg

SEQ ID NO: 2121550 - DNA, 25 bp, Homo sapien
gcagatgaagctatcagggaggttt

SEQ ID NO: 2121551 - DNA, 25 bp, Homo sapien
ccttgatggttgctcagcaggctca

SEQ ID NO: 2121552 - DNA, 25 bp, Homo sapien
gctcattcagagaatctgccactag

SEQ ID NO: 2121553 - DNA, 25 bp, Homo sapien
ggctcattcagagaatctgccacta

SEQ ID NO: 2121554 - DNA, 25 bp, Homo sapien
ttgtgccttgatggttgctcagcag

SEQ ID NO: 2121555 - DNA, 25 bp, Homo sapien
cactctggatgggtggctgctgctc

SEQ ID NO: 2121556 - DNA, 25 bp, Homo sapien
tgctcccagtacagcctgcctgaga

SEQ ID NO: 2121557 - DNA, 25 bp, Homo sapien
atcttttgctcttcataaactcagc

SEQ ID NO: 2121558 - DNA, 25 bp, Homo sapien
ggcttcaccacccactctggatggg

SEQ ID NO: 2121559 - DNA, 25 bp, Homo sapien
gttgtgtccatctatgatgtcattt

SEQ ID NO: 2121560 - DNA, 25 bp, Homo sapien
gagttgtgtccatctatgatgtcat

SEQ ID NO: 2121561 - DNA, 25 bp, Homo sapien
tagagttgtgtccatctatgatgtc

SEQ ID NO: 2121562 - DNA, 25 bp, Homo sapien
agttgtgtccatctatgatgtcatt

SEQ ID NO: 2121563 - DNA, 25 bp, Homo sapien
acaccatgagggatggaggtgttat

SEQ ID NO: 2121564 - DNA, 25 bp, Homo sapien
ggccatgaggacacaagggcaaaca

SEQ ID NO: 2121565 - DNA, 25 bp, Homo sapien
aggacacaagggcaaacaccatgag

SEQ ID NO: 2121566 - DNA, 25 bp, Homo sapien
caaacaccatgagggatggaggtgt

SEQ ID NO: 2121567 - DNA, 25 bp, Homo sapien
cgtgggtagaggacctgctcagttt

SEQ ID NO: 2121568 - DNA, 25 bp, Homo sapien
cttttccgtgggtagaggacctgct

SEQ ID NO: 2121569 - DNA, 25 bp, Homo sapien
agaagagccttttccgtgggtagag

SEQ ID NO: 2121570 - DNA, 25 bp, Homo sapien
cagaagagccttttccgtgggtaga

SEQ ID NO: 2121571 - DNA, 25 bp, Homo sapien
tcccgattatgaaaggcacacaggc

SEQ ID NO: 2121572 - DNA, 25 bp, Homo sapien
cagtacatgaaagggctgctccgaa

SEQ ID NO: 2121573 - DNA, 25 bp, Homo sapien
ttgaaagggcctttgataagagccg

SEQ ID NO: 2121574 - DNA, 25 bp, Homo sapien
gataagagccgagggcagtacatga

SEQ ID NO: 2121575 - DNA, 25 bp, Homo sapien
tgctgcttccactaccattatcacc

SEQ ID NO: 2121576 - DNA, 25 bp, Homo sapien
ttatcaccagcttaacaaaatccat

SEQ ID NO: 2121577 - DNA, 25 bp, Homo sapien
taccattatcaccagcttaacaaaa

SEQ ID NO: 2121578 - DNA, 25 bp, Homo sapien
ttccactaccattatcaccagctta

SEQ ID NO: 2121579 - DNA, 25 bp, Homo sapien
ggttcagaggcctgtacagattttc

SEQ ID NO: 2121580 - DNA, 25 bp, Homo sapien
gaaatctcggttcagaggcctgtac

SEQ ID NO: 2121581 - DNA, 25 bp, Homo sapien
gatacacccgagaaatctcggttca

SEQ ID NO: 2121582 - DNA, 25 bp, Homo sapien
cacccgagaaatctcggttcagagg

SEQ ID NO: 2121583 - DNA, 25 bp, Homo sapien
atccgctctgcccggtctgtgcaag

SEQ ID NO: 2121584 - DNA, 25 bp, Homo sapien
ctgtgcaaggagctcggaggcagca

SEQ ID NO: 2121585 - DNA, 25 bp, Homo sapien
gctctgcccggtctgtgcaaggagc

SEQ ID NO: 2121586 - DNA, 25 bp, Homo sapien
tgtgcaaggagctcggaggcagcag

SEQ ID NO: 2121587 - DNA, 25 bp, Homo sapien
gggcgatactctttcctctggctcc

SEQ ID NO: 2121588 - DNA, 25 bp, Homo sapien
ccctcccagggtttagcatgggcca

SEQ ID NO: 2121589 - DNA, 25 bp, Homo sapien
actgtgggggcgatactctttcctc

SEQ ID NO: 2121590 - DNA, 25 bp, Homo sapien
cccagggtttagcatgggccacaga

SEQ ID NO: 2121591 - DNA, 25 bp, Homo sapien
tatgtcctagcatcccttgtcctgg

SEQ ID NO: 2121592 - DNA, 25 bp, Homo sapien
gccacttgccatttggaagctgccc

SEQ ID NO: 2121593 - DNA, 25 bp, Homo sapien
cagcacagaaggctttgttggtcta

SEQ ID NO: 2121594 - DNA, 25 bp, Homo sapien
tagggttgctctgatacctatgtcc

SEQ ID NO: 2121595 - DNA, 25 bp, Homo sapien
gtgaacgggagccgcccagaggctc

SEQ ID NO: 2121596 - DNA, 25 bp, Homo sapien
cagaggctccccgaaatccaagggg

SEQ ID NO: 2121597 - DNA, 25 bp, Homo sapien
cgcccagaggctccccgaaatccaa

SEQ ID NO: 2121598 - DNA, 25 bp, Homo sapien
gagtgaacgggagccgcccagaggc

SEQ ID NO: 2121599 - DNA, 25 bp, Homo sapien
agaggactcctacatctggatcccg

SEQ ID NO: 2121600 - DNA, 25 bp, Homo sapien
caagcacagactcaagagagaggag

SEQ ID NO: 2121601 - DNA, 25 bp, Homo sapien
ttcttggccgggaagaatgcgtgca

SEQ ID NO: 2121602 - DNA, 25 bp, Homo sapien
agctgcgggactgcggacttgcctc

SEQ ID NO: 2121603 - DNA, 25 bp, Homo sapien
cgccataggttgagtggcaccgctc

SEQ ID NO: 2121604 - DNA, 25 bp, Homo sapien
caaggatgcatccagatttgcctgc

SEQ ID NO: 2121605 - DNA, 25 bp, Homo sapien
aatggaatatgtccaaggatgcatc

SEQ ID NO: 2121606 - DNA, 25 bp, Homo sapien
gcaccgctcttaatggaatatgtcc

SEQ ID NO: 2121607 - DNA, 25 bp, Homo sapien
aatggcaaataataacttgctgtaa

SEQ ID NO: 2121608 - DNA, 25 bp, Homo sapien
caaataataacttgctgtaaagtgc

SEQ ID NO: 2121609 - DNA, 25 bp, Homo sapien
taacttgctgtaaagtgctaatggt

SEQ ID NO: 2121610 - DNA, 25 bp, Homo sapien
gtaaagtgctaatggtgcaatttca

SEQ ID NO: 2121611 - DNA, 25 bp, Homo sapien
aaagaaaggcccaaagcttgcccag

SEQ ID NO: 2121612 - DNA, 25 bp, Homo sapien
gcagaggtggtaaggcccatgatca

SEQ ID NO: 2121613 - DNA, 25 bp, Homo sapien
taagtgcaaatctcgtcctgtgctg

SEQ ID NO: 2121614 - DNA, 25 bp, Homo sapien
gatggcagcttagcctcttggtgaa

SEQ ID NO: 2121615 - DNA, 25 bp, Homo sapien
gtcagtgtagaagccccaactggct

SEQ ID NO: 2121616 - DNA, 25 bp, Homo sapien
ggttgtaagcactctgtgccacttg

SEQ ID NO: 2121617 - DNA, 25 bp, Homo sapien
ctagaccccattcaggcactctggt

SEQ ID NO: 2121618 - DNA, 25 bp, Homo sapien
accccattcaggcactctggttgta

SEQ ID NO: 2121619 - DNA, 25 bp, Homo sapien
caacaaccttgaagatgactccagt

SEQ ID NO: 2121620 - DNA, 25 bp, Homo sapien
catttcctatgtggaccctcagttc

SEQ ID NO: 2121621 - DNA, 25 bp, Homo sapien
ggaaactgcccttgcgcacttggag

SEQ ID NO: 2121622 - DNA, 25 bp, Homo sapien
tgactccagtgtgagcgaagaccta

SEQ ID NO: 2121623 - DNA, 25 bp, Homo sapien
tccacaggctaaggtgagtgccagc

SEQ ID NO: 2121624 - DNA, 25 bp, Homo sapien
gaccctgacttctggacgcacagtg

SEQ ID NO: 2121625 - DNA, 25 bp, Homo sapien
gctgctctgcgtcggaaatatcgaa

SEQ ID NO: 2121626 - DNA, 25 bp, Homo sapien
accagaaaaggtgccgagacgacga

SEQ ID NO: 2121627 - DNA, 25 bp, Homo sapien
aaaggctgattgtttcctcgattca

SEQ ID NO: 2121628 - DNA, 25 bp, Homo sapien
tgcttctctgaaaagcgtgtggctt

SEQ ID NO: 2121629 - DNA, 25 bp, Homo sapien
ggtcggagatccgagagctctgctt

SEQ ID NO: 2121630 - DNA, 25 bp, Homo sapien
cggtcgtggcggtcggagatccgag

SEQ ID NO: 2121631 - DNA, 25 bp, Homo sapien
ggcgggctccagctgacttcacaat

SEQ ID NO: 2121632 - DNA, 25 bp, Homo sapien
cgggctccagctgacttcacaatca

SEQ ID NO: 2121633 - DNA, 25 bp, Homo sapien
gaggcgggctccagctgacttcaca

SEQ ID NO: 2121634 - DNA, 25 bp, Homo sapien
gggctccagctgacttcacaatcac

SEQ ID NO: 2121635 - DNA, 25 bp, Homo sapien
tggagccacgcaatggtgagcaaag

SEQ ID NO: 2121636 - DNA, 25 bp, Homo sapien
tgccatggaccctgctctcaagaag

SEQ ID NO: 2121637 - DNA, 25 bp, Homo sapien
caagaagctcccgagctggcgagct

SEQ ID NO: 2121638 - DNA, 25 bp, Homo sapien
tgagcctggagccacgcaatggtga

SEQ ID NO: 2121639 - DNA, 25 bp, Homo sapien
ctcctgctcgttctctggccctcat

SEQ ID NO: 2121640 - DNA, 25 bp, Homo sapien
gacagcacggtctcatttatttcca

SEQ ID NO: 2121641 - DNA, 25 bp, Homo sapien
cagatgccagcgatggtgtattggt

SEQ ID NO: 2121642 - DNA, 25 bp, Homo sapien
tgttcaacaaaccagatgccagcga

SEQ ID NO: 2121643 - DNA, 25 bp, Homo sapien
tacgacagcacggtctcatttattt

SEQ ID NO: 2121644 - DNA, 25 bp, Homo sapien
caagttctaccccagaatgcattgg

SEQ ID NO: 2121645 - DNA, 25 bp, Homo sapien
tcaaagcatgacaggacggcatctg

SEQ ID NO: 2121646 - DNA, 25 bp, Homo sapien
ccatgccctctggatgccgggagag

SEQ ID NO: 2121647 - DNA, 25 bp, Homo sapien
gtgttgactgtccttcaccgggcct

SEQ ID NO: 2121648 - DNA, 25 bp, Homo sapien
tgcggctaggttgtaagataaggac

SEQ ID NO: 2121649 - DNA, 25 bp, Homo sapien
gaaaagaggacaggtaggaatagct

SEQ ID NO: 2121650 - DNA, 25 bp, Homo sapien
tagccaggcttgtacacagaaccat

SEQ ID NO: 2121651 - DNA, 25 bp, Homo sapien
taaggacaggaatgtagccaggctt

SEQ ID NO: 2121652 - DNA, 25 bp, Homo sapien
gacttctccagcagtaggttcggcc

SEQ ID NO: 2121653 - DNA, 25 bp, Homo sapien
gctgatccatgggtgctcgggtgga

SEQ ID NO: 2121654 - DNA, 25 bp, Homo sapien
tccatgggtgctcgggtggaaggcg

SEQ ID NO: 2121655 - DNA, 25 bp, Homo sapien
ttcttcacacatgctattaaaagag

SEQ ID NO: 2121656 - DNA, 25 bp, Homo sapien
gtaggtatccaatacatgctgcttg

SEQ ID NO: 2121657 - DNA, 25 bp, Homo sapien
aatgaataaaagtctgagggaaaca

SEQ ID NO: 2121658 - DNA, 25 bp, Homo sapien
tgctgtatgtctcctctacatgaag

SEQ ID NO: 2121659 - DNA, 25 bp, Homo sapien
gggcagggtctatggcttgtcattt

SEQ ID NO: 2121660 - DNA, 25 bp, Homo sapien
agggcctccactaagtgcttgctgt

SEQ ID NO: 2121661 - DNA, 25 bp, Homo sapien
ggcctccactaagtgcttgctgtgg

SEQ ID NO: 2121662 - DNA, 25 bp, Homo sapien
gaccagggcctccactaagtgcttg

SEQ ID NO: 2121663 - DNA, 25 bp, Homo sapien
gggcctccactaagtgcttgctgtg

SEQ ID NO: 2121664 - DNA, 25 bp, Homo sapien
attaaagtgccttccggatcagaca

SEQ ID NO: 2121665 - DNA, 25 bp, Homo sapien
ttaaagtgccttccggatcagacag

SEQ ID NO: 2121666 - DNA, 25 bp, Homo sapien
gattaaagtgccttccggatcagac

SEQ ID NO: 2121667 - DNA, 25 bp, Homo sapien
aaagtgccttccggatcagacagtg

SEQ ID NO: 2121668 - DNA, 25 bp, Homo sapien
ttcccagttacagcttcctttataa

SEQ ID NO: 2121669 - DNA, 25 bp, Homo sapien
gattcttcccagttacagcttcctt

SEQ ID NO: 2121670 - DNA, 25 bp, Homo sapien
tcttcccagttacagcttcctttat

SEQ ID NO: 2121671 - DNA, 25 bp, Homo sapien
ccggattcttcccagttacagcttc

SEQ ID NO: 2121672 - DNA, 25 bp, Homo sapien
ctcgggaggtcaacgatgcaatgag

SEQ ID NO: 2121673 - DNA, 25 bp, Homo sapien
actccactcggggtaatagagcaag

SEQ ID NO: 2121674 - DNA, 25 bp, Homo sapien
tgtgcctgtagtcccgaaaagtggg

SEQ ID NO: 2121675 - DNA, 25 bp, Homo sapien
cactccactccactcggggtaatag

SEQ ID NO: 2121676 - DNA, 25 bp, Homo sapien
ggtcctttggttgagacctcagcat

SEQ ID NO: 2121677 - DNA, 25 bp, Homo sapien
cagcatcttgggctttgggccagtg

SEQ ID NO: 2121678 - DNA, 25 bp, Homo sapien
ccccagtgcataaaatgggtccttt

SEQ ID NO: 2121679 - DNA, 25 bp, Homo sapien
cataaaatgggtcctttggttgaga

SEQ ID NO: 2121680 - DNA, 25 bp, Homo sapien
gagaaagcaacttttgggccgggca

SEQ ID NO: 2121681 - DNA, 25 bp, Homo sapien
aaagcaacttttgggccgggcactg

SEQ ID NO: 2121682 - DNA, 25 bp, Homo sapien
aagcaacttttgggccgggcactgt

SEQ ID NO: 2121683 - DNA, 25 bp, Homo sapien
cactgtgaccaatggatggaagcca

SEQ ID NO: 2121684 - DNA, 25 bp, Homo sapien
gaacaaggaggtgacagactgccct

SEQ ID NO: 2121685 - DNA, 25 bp, Homo sapien
catattaagggtaccagagtcacac

SEQ ID NO: 2121686 - DNA, 25 bp, Homo sapien
taggtcttgctcttggatccagtcc

SEQ ID NO: 2121687 - DNA, 25 bp, Homo sapien
gcagacaaatgccttgtggcacatg

SEQ ID NO: 2121688 - DNA, 25 bp, Homo sapien
caaatgccttgtggcacatgtgcgg

SEQ ID NO: 2121689 - DNA, 25 bp, Homo sapien
atgtgcggacgtggctgttcactga

SEQ ID NO: 2121690 - DNA, 25 bp, Homo sapien
ggtctccggatgaatttgcagacaa

SEQ ID NO: 2121691 - DNA, 25 bp, Homo sapien
actagaaacttccagagcgcacagg

SEQ ID NO: 2121692 - DNA, 25 bp, Homo sapien
ctagacgtctaaagccagtatcact

SEQ ID NO: 2121693 - DNA, 25 bp, Homo sapien
ttggagcctccaacaatcttcagga

SEQ ID NO: 2121694 - DNA, 25 bp, Homo sapien
gcattatcccctatgtcacttggag

SEQ ID NO: 2121695 - DNA, 25 bp, Homo sapien
gctcagcacgagtttcctcatggcc

SEQ ID NO: 2121696 - DNA, 25 bp, Homo sapien
ttggggtcaatgatgggactgccaa

SEQ ID NO: 2121697 - DNA, 25 bp, Homo sapien
cctggcttgagtaggagagagtctg

SEQ ID NO: 2121698 - DNA, 25 bp, Homo sapien
catagtgggtgccaggtaatccggg

SEQ ID NO: 2121699 - DNA, 25 bp, Homo sapien
tgatgaggtcaatttcacatggctt

SEQ ID NO: 2121700 - DNA, 25 bp, Homo sapien
tttccgagcgaggagcccataatcc

SEQ ID NO: 2121701 - DNA, 25 bp, Homo sapien
tgtcacgaccaatcatttccgagcg

SEQ ID NO: 2121702 - DNA, 25 bp, Homo sapien
tgatctgatcgctggtgatgaggtc

SEQ ID NO: 2121703 - DNA, 25 bp, Homo sapien
gctttccggactttggccaggatcc

SEQ ID NO: 2121704 - DNA, 25 bp, Homo sapien
gcccaagcccgggacggccactgtc

SEQ ID NO: 2121705 - DNA, 25 bp, Homo sapien
gatggctttccggactttggccagg

SEQ ID NO: 2121706 - DNA, 25 bp, Homo sapien
caaggatggctttccggactttggc

SEQ ID NO: 2121707 - DNA, 25 bp, Homo sapien
cttccccagaattctcttcctgctt

SEQ ID NO: 2121708 - DNA, 25 bp, Homo sapien
cccgacacttccccagaattctctt

SEQ ID NO: 2121709 - DNA, 25 bp, Homo sapien
acacttccccagaattctcttcctg

SEQ ID NO: 2121710 - DNA, 25 bp, Homo sapien
ccgacacttccccagaattctcttc

SEQ ID NO: 2121711 - DNA, 25 bp, Homo sapien
gcgccggaagagccttggacctgct

SEQ ID NO: 2121712 - DNA, 25 bp, Homo sapien
gagggggcgccggaagagccttgga

SEQ ID NO: 2121713 - DNA, 25 bp, Homo sapien
ccggaagagccttggacctgctgac

SEQ ID NO: 2121714 - DNA, 25 bp, Homo sapien
gggcgccggaagagccttggacctg

SEQ ID NO: 2121715 - DNA, 25 bp, Homo sapien
aagagaaatgcccacagcctgtagc

SEQ ID NO: 2121716 - DNA, 25 bp, Homo sapien
attttgctcactctgaggcttgaag

SEQ ID NO: 2121717 - DNA, 25 bp, Homo sapien
agcatacggctgaacaggcagggtt

SEQ ID NO: 2121718 - DNA, 25 bp, Homo sapien
agcctgtagcatacggctgaacagg

SEQ ID NO: 2121719 - DNA, 25 bp, Homo sapien
gggaggctagatgtttgggatgatc

SEQ ID NO: 2121720 - DNA, 25 bp, Homo sapien
atgatcttgctgacaaagctgtgaa

SEQ ID NO: 2121721 - DNA, 25 bp, Homo sapien
gatcttgctgacaaagctgtgaatc

SEQ ID NO: 2121722 - DNA, 25 bp, Homo sapien
aaggatgagggaggctagatgtttg

SEQ ID NO: 2121723 - DNA, 25 bp, Homo sapien
caggcactggtgccaaccatcctgt

SEQ ID NO: 2121724 - DNA, 25 bp, Homo sapien
tggaggaggttccttcgaggactgc

SEQ ID NO: 2121725 - DNA, 25 bp, Homo sapien
tctaatggtttagtcatccacaggc

SEQ ID NO: 2121726 - DNA, 25 bp, Homo sapien
gtctaatggtttagtcatccacagg

SEQ ID NO: 2121727 - DNA, 25 bp, Homo sapien
agtggagaaggggctgctgccacac

SEQ ID NO: 2121728 - DNA, 25 bp, Homo sapien
ggcagtggagaaggggctgctgcca

SEQ ID NO: 2121729 - DNA, 25 bp, Homo sapien
caggcagtggagaaggggctgctgc

SEQ ID NO: 2121730 - DNA, 25 bp, Homo sapien
cagtggagaaggggctgctgccaca

SEQ ID NO: 2121731 - DNA, 25 bp, Homo sapien
tgttgaacggaaggagggctgcgtc

SEQ ID NO: 2121732 - DNA, 25 bp, Homo sapien
aggaatgttgaacggaaggagggct

SEQ ID NO: 2121733 - DNA, 25 bp, Homo sapien
agggctgcgtcgttggccgaggaga

SEQ ID NO: 2121734 - DNA, 25 bp, Homo sapien
acggaaggagggctgcgtcgttggc

SEQ ID NO: 2121735 - DNA, 25 bp, Homo sapien
agcctcctcgtacagggcacacaca

SEQ ID NO: 2121736 - DNA, 25 bp, Homo sapien
ggcaacccagcctcctcgtacaggg

SEQ ID NO: 2121737 - DNA, 25 bp, Homo sapien
catggcaacccagcctcctcgtaca

SEQ ID NO: 2121738 - DNA, 25 bp, Homo sapien
aacccagcctcctcgtacagggcac

SEQ ID NO: 2121739 - DNA, 25 bp, Homo sapien
gatacaattctccagagctcgtggc

SEQ ID NO: 2121740 - DNA, 25 bp, Homo sapien
cagatacaattctccagagctcgtg

SEQ ID NO: 2121741 - DNA, 25 bp, Homo sapien
acaattctccagagctcgtggcagt

SEQ ID NO: 2121742 - DNA, 25 bp, Homo sapien
tacaattctccagagctcgtggcag

SEQ ID NO: 2121743 - DNA, 25 bp, Homo sapien
cctcctcaccgtccttaaaagccag

SEQ ID NO: 2121744 - DNA, 25 bp, Homo sapien
ctcttcacctcctcaccgtccttaa

SEQ ID NO: 2121745 - DNA, 25 bp, Homo sapien
tcacctcctcaccgtccttaaaagc

SEQ ID NO: 2121746 - DNA, 25 bp, Homo sapien
tcctcaccgtccttaaaagccagca

SEQ ID NO: 2121747 - DNA, 25 bp, Homo sapien
caaagagtactgacctcccagccag

SEQ ID NO: 2121748 - DNA, 25 bp, Homo sapien
gttcaaagagtactgacctcccagc

SEQ ID NO: 2121749 - DNA, 25 bp, Homo sapien
ttcaaagagtactgacctcccagcc

SEQ ID NO: 2121750 - DNA, 25 bp, Homo sapien
tgttcaaagagtactgacctcccag

SEQ ID NO: 2121751 - DNA, 25 bp, Homo sapien
tgtccaccccgctgaggttttgatg

SEQ ID NO: 2121752 - DNA, 25 bp, Homo sapien
catgaaatcccgacattatgtgggc

SEQ ID NO: 2121753 - DNA, 25 bp, Homo sapien
aaagcgctggcttaattgggcccct

SEQ ID NO: 2121754 - DNA, 25 bp, Homo sapien
caagaatattgagcatgaaatcccg

SEQ ID NO: 2121755 - DNA, 25 bp, Homo sapien
aagggagtgttccaacgtggccgct

SEQ ID NO: 2121756 - DNA, 25 bp, Homo sapien
tcccgcaagggagtgttccaacgtg

SEQ ID NO: 2121757 - DNA, 25 bp, Homo sapien
gagtgttccaacgtggccgcttctt

SEQ ID NO: 2121758 - DNA, 25 bp, Homo sapien
cctctgctcccgcaagggagtgttc

SEQ ID NO: 2121759 - DNA, 25 bp, Homo sapien
attcccggaatgtcttcccttgaag

SEQ ID NO: 2121760 - DNA, 25 bp, Homo sapien
ttattcccggaatgtcttcccttga

SEQ ID NO: 2121761 - DNA, 25 bp, Homo sapien
aaggcttggaataggggagctccca

SEQ ID NO: 2121762 - DNA, 25 bp, Homo sapien
acagcagactttattcccggaatgt

SEQ ID NO: 2121763 - DNA, 25 bp, Homo sapien
aatagcatggctgataaatccaaac

SEQ ID NO: 2121764 - DNA, 25 bp, Homo sapien
cttctgggaatttcagcatgtaaac

SEQ ID NO: 2121765 - DNA, 25 bp, Homo sapien
tgtttggaagtcttggcttctggga

SEQ ID NO: 2121766 - DNA, 25 bp, Homo sapien
tcagcatgtaaactgtgggcccggg

SEQ ID NO: 2121767 - DNA, 25 bp, Homo sapien
ttagagtgggtcgagcaaatcctgg

SEQ ID NO: 2121768 - DNA, 25 bp, Homo sapien
caatgggcgtggaggcgcgcacttt

SEQ ID NO: 2121769 - DNA, 25 bp, Homo sapien
gctccaatgggcgtggaggcgcgca

SEQ ID NO: 2121770 - DNA, 25 bp, Homo sapien
tccaatgggcgtggaggcgcgcact

SEQ ID NO: 2121771 - DNA, 25 bp, Homo sapien
ggctccaatgggcgtggaggcgcgc

SEQ ID NO: 2121772 - DNA, 25 bp, Homo sapien
gccgggtgagccaagggccatggcc

SEQ ID NO: 2121773 - DNA, 25 bp, Homo sapien
gcggccgggtgagccaagggccatg

SEQ ID NO: 2121774 - DNA, 25 bp, Homo sapien
ccagttttctagaccgccgctgcgg

SEQ ID NO: 2121775 - DNA, 25 bp, Homo sapien
caggtgtccaaaggtccaccccgtg

SEQ ID NO: 2121776 - DNA, 25 bp, Homo sapien
cccctggattttcgtcgcactcgta

SEQ ID NO: 2121777 - DNA, 25 bp, Homo sapien
accccctggattttcgtcgcactcg

SEQ ID NO: 2121778 - DNA, 25 bp, Homo sapien
ccccctggattttcgtcgcactcgt

SEQ ID NO: 2121779 - DNA, 25 bp, Homo sapien
ccctggattttcgtcgcactcgtac

SEQ ID NO: 2121780 - DNA, 25 bp, Homo sapien
gacctctggcgtggaagaagttacc

SEQ ID NO: 2121781 - DNA, 25 bp, Homo sapien
cacaggcgtctctgtgcagatctgg

SEQ ID NO: 2121782 - DNA, 25 bp, Homo sapien
cactgagcgggcctgagtttgaaac

SEQ ID NO: 2121783 - DNA, 25 bp, Homo sapien
agaagttaccccagtcccactgagc

SEQ ID NO: 2121784 - DNA, 25 bp, Homo sapien
aaaggcaaaacctggcatagcggcc

SEQ ID NO: 2121785 - DNA, 25 bp, Homo sapien
tttgatgttaatcaccaggctgagc

SEQ ID NO: 2121786 - DNA, 25 bp, Homo sapien
gcagttgggcttgttacgcttggcc

SEQ ID NO: 2121787 - DNA, 25 bp, Homo sapien
cgcttggccgctccaagcagaaact

SEQ ID NO: 2121788 - DNA, 25 bp, Homo sapien
ccaactgtggcaggaaatggtccaa

SEQ ID NO: 2121789 - DNA, 25 bp, Homo sapien
acccaactgtggcaggaaatggtcc

SEQ ID NO: 2121790 - DNA, 25 bp, Homo sapien
agctgggcctggctcgccacctcag

SEQ ID NO: 2121791 - DNA, 25 bp, Homo sapien
ctccacccaactgtggcaggaaatg

SEQ ID NO: 2121792 - DNA, 25 bp, Homo sapien
tttagtgtaggcacttggcggcagc

SEQ ID NO: 2121793 - DNA, 25 bp, Homo sapien
gctttagtgtaggcacttggcggca

SEQ ID NO: 2121794 - DNA, 25 bp, Homo sapien
ttagtgtaggcacttggcggcagcg

SEQ ID NO: 2121795 - DNA, 25 bp, Homo sapien
ctttagtgtaggcacttggcggcag

SEQ ID NO: 2121796 - DNA, 25 bp, Homo sapien
gcacctccgtattcccagcattagt

SEQ ID NO: 2121797 - DNA, 25 bp, Homo sapien
atgcacctccgtattcccagcatta

SEQ ID NO: 2121798 - DNA, 25 bp, Homo sapien
atgccatgcacctccgtattcccag

SEQ ID NO: 2121799 - DNA, 25 bp, Homo sapien
tccgtattcccagcattagtgccac

SEQ ID NO: 2121800 - DNA, 25 bp, Homo sapien
gccaggctaggaccctagactcagg

SEQ ID NO: 2121801 - DNA, 25 bp, Homo sapien
cctgattcttggctcctcaagcaca

SEQ ID NO: 2121802 - DNA, 25 bp, Homo sapien
ccctagactcaggaaaggtggcaga

SEQ ID NO: 2121803 - DNA, 25 bp, Homo sapien
ctgcagtccctgattcttggctcct

SEQ ID NO: 2121804 - DNA, 25 bp, Homo sapien
cttgcttctttccattgtccaaaag

SEQ ID NO: 2121805 - DNA, 25 bp, Homo sapien
tctttccattgtccaaaagcgccat

SEQ ID NO: 2121806 - DNA, 25 bp, Homo sapien
gcttctttccattgtccaaaagcgc

SEQ ID NO: 2121807 - DNA, 25 bp, Homo sapien
ttctttccattgtccaaaagcgcca

SEQ ID NO: 2121808 - DNA, 25 bp, Homo sapien
gccgcatctgtaaatatctaaggaa

SEQ ID NO: 2121809 - DNA, 25 bp, Homo sapien
cagacatgatgtgaggttagccagc

SEQ ID NO: 2121810 - DNA, 25 bp, Homo sapien
atagcccctccctctttgttatgct

SEQ ID NO: 2121811 - DNA, 25 bp, Homo sapien
agccagcagaaccaggcattcctgg

SEQ ID NO: 2121812 - DNA, 25 bp, Homo sapien
cacagcaaatgtgctccagctggga

SEQ ID NO: 2121813 - DNA, 25 bp, Homo sapien
ggttgaaagagcagcctgcaaactg

SEQ ID NO: 2121814 - DNA, 25 bp, Homo sapien
tacccgaatactgggttgaaagagc

SEQ ID NO: 2121815 - DNA, 25 bp, Homo sapien
cagcctgcaaactgtgaggtaccac

SEQ ID NO: 2121816 - DNA, 25 bp, Homo sapien
cttgtatctctcaccctttgcctga

SEQ ID NO: 2121817 - DNA, 25 bp, Homo sapien
cctcatgtctaagcttactatgccc

SEQ ID NO: 2121818 - DNA, 25 bp, Homo sapien
actgcttctactggacccaaaagtc

SEQ ID NO: 2121819 - DNA, 25 bp, Homo sapien
tactgcctgggactgcattctgcaa

SEQ ID NO: 2121820 - DNA, 25 bp, Homo sapien
accgtgcctggtcaaccgtctggaa

SEQ ID NO: 2121821 - DNA, 25 bp, Homo sapien
gactgctcatgaaaacaatgaggca

SEQ ID NO: 2121822 - DNA, 25 bp, Homo sapien
ggaaatctggacagttctagaccct

SEQ ID NO: 2121823 - DNA, 25 bp, Homo sapien
tctagaccctttaagatgttagctc

SEQ ID NO: 2121824 - DNA, 25 bp, Homo sapien
cacagattatcccgctttttaatct

SEQ ID NO: 2121825 - DNA, 25 bp, Homo sapien
gattatcccgctttttaatctcatc

SEQ ID NO: 2121826 - DNA, 25 bp, Homo sapien
cagattatcccgctttttaatctca

SEQ ID NO: 2121827 - DNA, 25 bp, Homo sapien
attatcccgctttttaatctcatct

SEQ ID NO: 2121828 - DNA, 25 bp, Homo sapien
accagcttcagacaacccgagcact

SEQ ID NO: 2121829 - DNA, 25 bp, Homo sapien
ctaccagcttcagacaacccgagca

SEQ ID NO: 2121830 - DNA, 25 bp, Homo sapien
gcttgccccggacatctttgctggc

SEQ ID NO: 2121831 - DNA, 25 bp, Homo sapien
ttaaagcttgccccggacatctttg

SEQ ID NO: 2121832 - DNA, 25 bp, Homo sapien
gccaagccagatggccccttgaggt

SEQ ID NO: 2121833 - DNA, 25 bp, Homo sapien
cttgaggtccctcctgattcgagga

SEQ ID NO: 2121834 - DNA, 25 bp, Homo sapien
gcagccaagccagatggccccttga

SEQ ID NO: 2121835 - DNA, 25 bp, Homo sapien
gtccctcctgattcgaggattctct

SEQ ID NO: 2121836 - DNA, 25 bp, Homo sapien
tggagtctggcaagaactacagagc

SEQ ID NO: 2121837 - DNA, 25 bp, Homo sapien
gcaggaaaactgctaaagttgagag

SEQ ID NO: 2121838 - DNA, 25 bp, Homo sapien
aaagagggaacttcaaaccagcaga

SEQ ID NO: 2121839 - DNA, 25 bp, Homo sapien
ctggcaagaactacagagcaggaaa

SEQ ID NO: 2121840 - DNA, 25 bp, Homo sapien
actgccctgaggtccataaagaagc

SEQ ID NO: 2121841 - DNA, 25 bp, Homo sapien
aggatccaacaggacaagcccactg

SEQ ID NO: 2121842 - DNA, 25 bp, Homo sapien
ccctgcctgggatactcatcagagc

SEQ ID NO: 2121843 - DNA, 25 bp, Homo sapien
ggcaaagtgccaggatccaacagga

SEQ ID NO: 2121844 - DNA, 25 bp, Homo sapien
agtgcagcccccgactgggctggcc

SEQ ID NO: 2121845 - DNA, 25 bp, Homo sapien
gagtgcagcccccgactgggctggc

SEQ ID NO: 2121846 - DNA, 25 bp, Homo sapien
ccagaggtggcaatgttagtgacag

SEQ ID NO: 2121847 - DNA, 25 bp, Homo sapien
ggagcagtctgctgctaatgtagca

SEQ ID NO: 2121848 - DNA, 25 bp, Homo sapien
gattatctgtgatggctacagcaga

SEQ ID NO: 2121849 - DNA, 25 bp, Homo sapien
caagagtctgctggcacaagggcaa

SEQ ID NO: 2121850 - DNA, 25 bp, Homo sapien
gcacatatcctaagtgtacaactca

SEQ ID NO: 2121851 - DNA, 25 bp, Homo sapien
tctgttgctgtgcattagttttcct

SEQ ID NO: 2121852 - DNA, 25 bp, Homo sapien
cacaggcaacgatggatatggtttc

SEQ ID NO: 2121853 - DNA, 25 bp, Homo sapien
tacatacagtgaagtgcacatatcc

SEQ ID NO: 2121854 - DNA, 25 bp, Homo sapien
ctctgactgctttggaacaccccct

SEQ ID NO: 2121855 - DNA, 25 bp, Homo sapien
tctctgactgctttggaacaccccc

SEQ ID NO: 2121856 - DNA, 25 bp, Homo sapien
ggacttgtctattgtggcattttgg

SEQ ID NO: 2121857 - DNA, 25 bp, Homo sapien
ttggacttgtctattgtggcatttt

SEQ ID NO: 2121858 - DNA, 25 bp, Homo sapien
ttcttccaggcattaaaggccagca

SEQ ID NO: 2121859 - DNA, 25 bp, Homo sapien
cggataccctaaattcatggaccat

SEQ ID NO: 2121860 - DNA, 25 bp, Homo sapien
catggaccataaaggtaagaaggtg

SEQ ID NO: 2121861 - DNA, 25 bp, Homo sapien
gctgaggtagctgttctgaacagga

SEQ ID NO: 2121862 - DNA, 25 bp, Homo sapien
cctgaatccctgagttgcattctta

SEQ ID NO: 2121863 - DNA, 25 bp, Homo sapien
ccctgaatccctgagttgcattctt

SEQ ID NO: 2121864 - DNA, 25 bp, Homo sapien
cttcttgtgtacccagggggaggat

SEQ ID NO: 2121865 - DNA, 25 bp, Homo sapien
ctgaatccctgagttgcattcttac

SEQ ID NO: 2121866 - DNA, 25 bp, Homo sapien
gccaggaaaccactcgaagttcatc

SEQ ID NO: 2121867 - DNA, 25 bp, Homo sapien
gaaaccactcgaagttcatctgacc

SEQ ID NO: 2121868 - DNA, 25 bp, Homo sapien
caggaaaccactcgaagttcatctg

SEQ ID NO: 2121869 - DNA, 25 bp, Homo sapien
ggaaaccactcgaagttcatctgac

SEQ ID NO: 2121870 - DNA, 25 bp, Homo sapien
tcttgacccagtccaaaggagagat

SEQ ID NO: 2121871 - DNA, 25 bp, Homo sapien
gggccagggcaactttttctcactc

SEQ ID NO: 2121872 - DNA, 25 bp, Homo sapien
aaggagagatgtgacccacccaaag

SEQ ID NO: 2121873 - DNA, 25 bp, Homo sapien
caaagggataatgtgttaatggcag

SEQ ID NO: 2121874 - DNA, 25 bp, Homo sapien
cctggatctggtgcagattgcttgt

SEQ ID NO: 2121875 - DNA, 25 bp, Homo sapien
tggtgcagattgcttgtcaaggcca

SEQ ID NO: 2121876 - DNA, 25 bp, Homo sapien
ggatctggtgcagattgcttgtcaa

SEQ ID NO: 2121877 - DNA, 25 bp, Homo sapien
gcaaggccttggccaaaaggctcct

SEQ ID NO: 2121878 - DNA, 25 bp, Homo sapien
gttctgttttaccaaggaagtgatg

SEQ ID NO: 2121879 - DNA, 25 bp, Homo sapien
tgagatcagacggagacctagggcc

SEQ ID NO: 2121880 - DNA, 25 bp, Homo sapien
gaagtgatgatggtgagatcagacg

SEQ ID NO: 2121881 - DNA, 25 bp, Homo sapien
atgatggtgagatcagacggagacc

SEQ ID NO: 2121882 - DNA, 25 bp, Homo sapien
tcctccccaagatattcgttgcttc

SEQ ID NO: 2121883 - DNA, 25 bp, Homo sapien
ctccccaagatattcgttgcttcaa

SEQ ID NO: 2121884 - DNA, 25 bp, Homo sapien
tccccaagatattcgttgcttcaac

SEQ ID NO: 2121885 - DNA, 25 bp, Homo sapien
cctcctccccaagatattcgttgct

SEQ ID NO: 2121886 - DNA, 25 bp, Homo sapien
gactgcccgcttgtatttctacata

SEQ ID NO: 2121887 - DNA, 25 bp, Homo sapien
agactcctctaatcccgactgcccg

SEQ ID NO: 2121888 - DNA, 25 bp, Homo sapien
ccgactgcccgcttgtatttctaca

SEQ ID NO: 2121889 - DNA, 25 bp, Homo sapien
tctaatcccgactgcccgcttgtat

SEQ ID NO: 2121890 - DNA, 25 bp, Homo sapien
ctgcccgaggacaaggcggcccttg

SEQ ID NO: 2121891 - DNA, 25 bp, Homo sapien
acagctcccagcttagctgctgagg

SEQ ID NO: 2121892 - DNA, 25 bp, Homo sapien
tagctgctgaggaagactgagtttg

SEQ ID NO: 2121893 - DNA, 25 bp, Homo sapien
tgaaggacagctcccagcttagctg

SEQ ID NO: 2121894 - DNA, 25 bp, Homo sapien
ccgctggccatgcaccctcagtctg

SEQ ID NO: 2121895 - DNA, 25 bp, Homo sapien
tggccatgcaccctcagtctgtcgc

SEQ ID NO: 2121896 - DNA, 25 bp, Homo sapien
cccgctggccatgcaccctcagtct

SEQ ID NO: 2121897 - DNA, 25 bp, Homo sapien
tcccgctggccatgcaccctcagtc

SEQ ID NO: 2121898 - DNA, 25 bp, Homo sapien
ggctttacttagtgcgcctctcgct

SEQ ID NO: 2121899 - DNA, 25 bp, Homo sapien
tctcgcttccgcctctcgttcgcac

SEQ ID NO: 2121900 - DNA, 25 bp, Homo sapien
gcgccggacgcagacaccgggcttt

SEQ ID NO: 2121901 - DNA, 25 bp, Homo sapien
gacaccgggctttacttagtgcgcc

SEQ ID NO: 2121902 - DNA, 25 bp, Homo sapien
ctggagggaacaggcaggcgcgagg

SEQ ID NO: 2121903 - DNA, 25 bp, Homo sapien
gagggaacaggcaggcgcgaggcca

SEQ ID NO: 2121904 - DNA, 25 bp, Homo sapien
ggctggagggaacaggcaggcgcga

SEQ ID NO: 2121905 - DNA, 25 bp, Homo sapien
gggtccgggctggagggaacaggca

SEQ ID NO: 2121906 - DNA, 25 bp, Homo sapien
cccgctcggagtcggcgcaaggttt

SEQ ID NO: 2121907 - DNA, 25 bp, Homo sapien
atagtcagcgcggcggcgtctttcc

SEQ ID NO: 2121908 - DNA, 25 bp, Homo sapien
tcggcgcaaggtttgtcgctcggcc

SEQ ID NO: 2121909 - DNA, 25 bp, Homo sapien
gccagggacagtcgccatcgctgcg

SEQ ID NO: 2121910 - DNA, 25 bp, Homo sapien
gccacagatggtcagcgagcagcac

SEQ ID NO: 2121911 - DNA, 25 bp, Homo sapien
agccacagatggtcagcgagcagca

SEQ ID NO: 2121912 - DNA, 25 bp, Homo sapien
gcaccgcgcgaggaggcaccggctg

SEQ ID NO: 2121913 - DNA, 25 bp, Homo sapien
ccatgggggccgcatggcgctgctc

SEQ ID NO: 2121914 - DNA, 25 bp, Homo sapien
gcagcaccgcgcgaggaggcaccgg

SEQ ID NO: 2121915 - DNA, 25 bp, Homo sapien
gccgcatggcgctgctcagctccct

SEQ ID NO: 2121916 - DNA, 25 bp, Homo sapien
aatttggtgcaagctgcgtccagcc

SEQ ID NO: 2121917 - DNA, 25 bp, Homo sapien
gtgggctctgggacgccgccgcaga

SEQ ID NO: 2121918 - DNA, 25 bp, Homo sapien
tgcaaagattgcaatttggtgcaag

SEQ ID NO: 2121919 - DNA, 25 bp, Homo sapien
gggcggctttggtcaggttgctgta

SEQ ID NO: 2121920 - DNA, 25 bp, Homo sapien
aaagggagtcagggggccgcagagg

SEQ ID NO: 2121921 - DNA, 25 bp, Homo sapien
gaaagggagtcagggggccgcagag

SEQ ID NO: 2121922 - DNA, 25 bp, Homo sapien
ggaaagggagtcagggggccgcaga

SEQ ID NO: 2121923 - DNA, 25 bp, Homo sapien
gtgtccaggctacagtccaggctgt

SEQ ID NO: 2121924 - DNA, 25 bp, Homo sapien
gcagcaagtcccagaccgtgtaggt

SEQ ID NO: 2121925 - DNA, 25 bp, Homo sapien
gagagtgaagttccgaaagtggcct

SEQ ID NO: 2121926 - DNA, 25 bp, Homo sapien
tacgcctcgatacagttgctacacg

SEQ ID NO: 2121927 - DNA, 25 bp, Homo sapien
cgaggtcgaactcgtcatatttttc

SEQ ID NO: 2121928 - DNA, 25 bp, Homo sapien
gcctttcgtgcaggaccggattgag

SEQ ID NO: 2121929 - DNA, 25 bp, Homo sapien
gattgagtactcttccgcctgtaag

SEQ ID NO: 2121930 - DNA, 25 bp, Homo sapien
tatttatgcagcacgaggtcgaact

SEQ ID NO: 2121931 - DNA, 25 bp, Homo sapien
gccagtcccaggacgttcagttcca

SEQ ID NO: 2121932 - DNA, 25 bp, Homo sapien
agccagtcccaggacgttcagttcc

SEQ ID NO: 2121933 - DNA, 25 bp, Homo sapien
agagagcattggacaagggtgggaa

SEQ ID NO: 2121934 - DNA, 25 bp, Homo sapien
tgggaaaggccggaagagagctatg

SEQ ID NO: 2121935 - DNA, 25 bp, Homo sapien
gagcacaggaggagttcgctggttt

SEQ ID NO: 2121936 - DNA, 25 bp, Homo sapien
gagggagagagcattggacaagggt

SEQ ID NO: 2121937 - DNA, 25 bp, Homo sapien
atcatacagctggattcgagagcca

SEQ ID NO: 2121938 - DNA, 25 bp, Homo sapien
ccttcgtgcccatcatacagctgga

SEQ ID NO: 2121939 - DNA, 25 bp, Homo sapien
gtcttttcccttcgtgcccatcata

SEQ ID NO: 2121940 - DNA, 25 bp, Homo sapien
ctggattcgagagccaggtgggtct

SEQ ID NO: 2121941 - DNA, 25 bp, Homo sapien
tgagggtggggcgtcatctcgcagg

SEQ ID NO: 2121942 - DNA, 25 bp, Homo sapien
tcatctcgcagggatcccatttggg

SEQ ID NO: 2121943 - DNA, 25 bp, Homo sapien
tggctctgaaacagaggttcccagc

SEQ ID NO: 2121944 - DNA, 25 bp, Homo sapien
tcccagcttggtttctagaagtaag

SEQ ID NO: 2121945 - DNA, 25 bp, Homo sapien
ctgcgggaaggatgggaagtagcca

SEQ ID NO: 2121946 - DNA, 25 bp, Homo sapien
gccatgaagaagaccgggggatgtg

SEQ ID NO: 2121947 - DNA, 25 bp, Homo sapien
tgggaagtagccatgaagaagaccg

SEQ ID NO: 2121948 - DNA, 25 bp, Homo sapien
gaagaccgggggatgtgtgtctgta

SEQ ID NO: 2121949 - DNA, 25 bp, Homo sapien
ttcctggaggttcccgttgctatgg

SEQ ID NO: 2121950 - DNA, 25 bp, Homo sapien
ccttcctggaggttcccgttgctat

SEQ ID NO: 2121951 - DNA, 25 bp, Homo sapien
ctggaggttcccgttgctatggtga

SEQ ID NO: 2121952 - DNA, 25 bp, Homo sapien
ggaggttcccgttgctatggtgact

SEQ ID NO: 2121953 - DNA, 25 bp, Homo sapien
ggggagggcaggtttgatgcccagt

SEQ ID NO: 2121954 - DNA, 25 bp, Homo sapien
ctggggagggcaggtttgatgccca

SEQ ID NO: 2121955 - DNA, 25 bp, Homo sapien
tggggagggcaggtttgatgcccag

SEQ ID NO: 2121956 - DNA, 25 bp, Homo sapien
cactggcagctggaatccacatgtg

SEQ ID NO: 2121957 - DNA, 25 bp, Homo sapien
tgtaggggtccagatttgtccagat

SEQ ID NO: 2121958 - DNA, 25 bp, Homo sapien
gtccagatttgtccagatccccaga

SEQ ID NO: 2121959 - DNA, 25 bp, Homo sapien
ccagcatcggagaatggtgcttgta

SEQ ID NO: 2121960 - DNA, 25 bp, Homo sapien
tccaaatgctgtgccttgccagaaa

SEQ ID NO: 2121961 - DNA, 25 bp, Homo sapien
cctcctccaaatgctgtgccttgcc

SEQ ID NO: 2121962 - DNA, 25 bp, Homo sapien
gctgtgccttgccagaaagatgaga

SEQ ID NO: 2121963 - DNA, 25 bp, Homo sapien
aatgctgtgccttgccagaaagatg

SEQ ID NO: 2121964 - DNA, 25 bp, Homo sapien
cttgtcttcctaatgtacccttggg

SEQ ID NO: 2121965 - DNA, 25 bp, Homo sapien
tccttcatggattctaacttgcttc

SEQ ID NO: 2121966 - DNA, 25 bp, Homo sapien
caaatcctccctataggccttctct

SEQ ID NO: 2121967 - DNA, 25 bp, Homo sapien
cagggctgcttgtcttcctaatgta

SEQ ID NO: 2121968 - DNA, 25 bp, Homo sapien
ttgcagggcacccagcgctggcatt

SEQ ID NO: 2121969 - DNA, 25 bp, Homo sapien
cacctccaggcagtattgcttgcag

SEQ ID NO: 2121970 - DNA, 25 bp, Homo sapien
agtataaaggggcaccgggtctgca

SEQ ID NO: 2121971 - DNA, 25 bp, Homo sapien
tggcattcctgctgggtcacgctga

SEQ ID NO: 2121972 - DNA, 25 bp, Homo sapien
ggtgctcggggagctgatagctatg

SEQ ID NO: 2121973 - DNA, 25 bp, Homo sapien
gtgctcggggagctgatagctatgc

SEQ ID NO: 2121974 - DNA, 25 bp, Homo sapien
ccaatggataaggaaggtgtggtgg

SEQ ID NO: 2121975 - DNA, 25 bp, Homo sapien
ctgccaatggataaggaaggtgtgg

SEQ ID NO: 2121976 - DNA, 25 bp, Homo sapien
cgctttggtgaagtatccagcaacc

SEQ ID NO: 2121977 - DNA, 25 bp, Homo sapien
cttggtttccagacgctttggtgaa

SEQ ID NO: 2121978 - DNA, 25 bp, Homo sapien
ttccagacgctttggtgaagtatcc

SEQ ID NO: 2121979 - DNA, 25 bp, Homo sapien
agcacttggtttccagacgctttgg

SEQ ID NO: 2121980 - DNA, 25 bp, Homo sapien
tttgggggcctcagactccttgaac

SEQ ID NO: 2121981 - DNA, 25 bp, Homo sapien
ggtggtagtggtggaaataggagtg

SEQ ID NO: 2121982 - DNA, 25 bp, Homo sapien
tagtggtggaaataggagtggtgga

SEQ ID NO: 2121983 - DNA, 25 bp, Homo sapien
gttttgggggcctcagactccttga

SEQ ID NO: 2121984 - DNA, 25 bp, Homo sapien
aaggacaccacggtatggaggagca

SEQ ID NO: 2121985 - DNA, 25 bp, Homo sapien
tggagaaggacaccacggtatggag

SEQ ID NO: 2121986 - DNA, 25 bp, Homo sapien
aacaaggacgcagagccggatcctg

SEQ ID NO: 2121987 - DNA, 25 bp, Homo sapien
cagagccggatcctgctagggctga

SEQ ID NO: 2121988 - DNA, 25 bp, Homo sapien
tcactcttcccgtgtcaggccctcc

SEQ ID NO: 2121989 - DNA, 25 bp, Homo sapien
cactcttcccgtgtcaggccctcct

SEQ ID NO: 2121990 - DNA, 25 bp, Homo sapien
actcttcccgtgtcaggccctcctc

SEQ ID NO: 2121991 - DNA, 25 bp, Homo sapien
ccaaagccgggtggcagtagcctat

SEQ ID NO: 2121992 - DNA, 25 bp, Homo sapien
ggagcagttctcgagcctacctcaa

SEQ ID NO: 2121993 - DNA, 25 bp, Homo sapien
cccttgggagtatgtgcaccttctg

SEQ ID NO: 2121994 - DNA, 25 bp, Homo sapien
ttgaggcccagcaactcagttcctg

SEQ ID NO: 2121995 - DNA, 25 bp, Homo sapien
aggttctccttcatggaggcctggg

SEQ ID NO: 2121996 - DNA, 25 bp, Homo sapien
caggttctccttcatggaggcctgg

SEQ ID NO: 2121997 - DNA, 25 bp, Homo sapien
tacataagcatgtctggaaaggagc

SEQ ID NO: 2121998 - DNA, 25 bp, Homo sapien
tatcagcattcagatgtcccaggca

SEQ ID NO: 2121999 - DNA, 25 bp, Homo sapien
tgtttcgcaattgggacagtaaccc

SEQ ID NO: 2122000 - DNA, 25 bp, Homo sapien
taatcagtctgggacctagccgagg

SEQ ID NO: 2122001 - DNA, 25 bp, Homo sapien
gactctcaccgaaacacagaggcag

SEQ ID NO: 2122002 - DNA, 25 bp, Homo sapien
gactcagtcataggaactagtgcaa

SEQ ID NO: 2122003 - DNA, 25 bp, Homo sapien
gcccggctctgctgtctgtgatgga

SEQ ID NO: 2122004 - DNA, 25 bp, Homo sapien
gaaagtcctactcatgaagcacagt

SEQ ID NO: 2122005 - DNA, 25 bp, Homo sapien
tctgtaaagcccgagggcaccacag

SEQ ID NO: 2122006 - DNA, 25 bp, Homo sapien
agcccgagggcaccacagaattctg

SEQ ID NO: 2122007 - DNA, 25 bp, Homo sapien
tgtaaagcccgagggcaccacagaa

SEQ ID NO: 2122008 - DNA, 25 bp, Homo sapien
ctcttctgtaaagcccgagggcacc

SEQ ID NO: 2122009 - DNA, 25 bp, Homo sapien
ctctatgtcccctttctggcattta

SEQ ID NO: 2122010 - DNA, 25 bp, Homo sapien
tatgtcccctttctggcatttactg

SEQ ID NO: 2122011 - DNA, 25 bp, Homo sapien
cccctttctggcatttactgagagc

SEQ ID NO: 2122012 - DNA, 25 bp, Homo sapien
tcccctttctggcatttactgagag

SEQ ID NO: 2122013 - DNA, 25 bp, Homo sapien
caagggaattgagagcacatgcaaa

SEQ ID NO: 2122014 - DNA, 25 bp, Homo sapien
tgcagactgggatgattgaaactca

SEQ ID NO: 2122015 - DNA, 25 bp, Homo sapien
cattgagtgggactaacatatcatt

SEQ ID NO: 2122016 - DNA, 25 bp, Homo sapien
cagacttaggatttggccatttgag

SEQ ID NO: 2122017 - DNA, 25 bp, Homo sapien
gatccatggattagttagaagggtg

SEQ ID NO: 2122018 - DNA, 25 bp, Homo sapien
gtcaatgactttagaacgtttgttc

SEQ ID NO: 2122019 - DNA, 25 bp, Homo sapien
cactttcattcagatcagaatatat

SEQ ID NO: 2122020 - DNA, 25 bp, Homo sapien
gcagcatcttgcaaattcttctatg

SEQ ID NO: 2122021 - DNA, 25 bp, Homo sapien
tactttgccttgaggtattcctcca

SEQ ID NO: 2122022 - DNA, 25 bp, Homo sapien
tttcctggtttgtactttgccttga

SEQ ID NO: 2122023 - DNA, 25 bp, Homo sapien
tcctggtttgtactttgccttgagg

SEQ ID NO: 2122024 - DNA, 25 bp, Homo sapien
ctggtttgtactttgccttgaggta

SEQ ID NO: 2122025 - DNA, 25 bp, Homo sapien
tcctgttgctggcagaatgtcattt

SEQ ID NO: 2122026 - DNA, 25 bp, Homo sapien
tgtgtcccctgcaatgtgtgtcagc

SEQ ID NO: 2122027 - DNA, 25 bp, Homo sapien
caatgtgtgtcagcaccaccattcg

SEQ ID NO: 2122028 - DNA, 25 bp, Homo sapien
tgctggcagaatgtcatttgcatct

SEQ ID NO: 2122029 - DNA, 25 bp, Homo sapien
ctcttcccgcttgccccgtaccagt

SEQ ID NO: 2122030 - DNA, 25 bp, Homo sapien
ccgcttgccccgtaccagttggtga

SEQ ID NO: 2122031 - DNA, 25 bp, Homo sapien
cttgccccgtaccagttggtgactg

SEQ ID NO: 2122032 - DNA, 25 bp, Homo sapien
gccccgtaccagttggtgactggcg

SEQ ID NO: 2122033 - DNA, 25 bp, Homo sapien
cgtgagggttcgcctctgcctggcc

SEQ ID NO: 2122034 - DNA, 25 bp, Homo sapien
cctgggggcgtgagggttcgcctct

SEQ ID NO: 2122035 - DNA, 25 bp, Homo sapien
cccatccctcaagcggctgccggga

SEQ ID NO: 2122036 - DNA, 25 bp, Homo sapien
gggccgccaagccttggcgccccgc

SEQ ID NO: 2122037 - DNA, 25 bp, Homo sapien
ccgcatgtgcagctctactccgagg

SEQ ID NO: 2122038 - DNA, 25 bp, Homo sapien
gagcagggagcagccgcatgtgcag

SEQ ID NO: 2122039 - DNA, 25 bp, Homo sapien
cgcatgtgcagctctactccgaggg

SEQ ID NO: 2122040 - DNA, 25 bp, Homo sapien
atgtgcagctctactccgaggggtg

SEQ ID NO: 2122041 - DNA, 25 bp, Homo sapien
caggcggctactgtcctgccatcgg

SEQ ID NO: 2122042 - DNA, 25 bp, Homo sapien
agggacccgttcctgcgcgacagtg

SEQ ID NO: 2122043 - DNA, 25 bp, Homo sapien
gttcacgacctctgacaggcggcta

SEQ ID NO: 2122044 - DNA, 25 bp, Homo sapien
acacccactctcttgaggcccggga

SEQ ID NO: 2122045 - DNA, 25 bp, Homo sapien
tccgagcgcaactctaggtagcagc

SEQ ID NO: 2122046 - DNA, 25 bp, Homo sapien
ggtagcagcacaacgtcagcaggtg

SEQ ID NO: 2122047 - DNA, 25 bp, Homo sapien
gcttctcccggttccaatggctgct

SEQ ID NO: 2122048 - DNA, 25 bp, Homo sapien
caccgaggctgcttagggtgccaga

SEQ ID NO: 2122049 - DNA, 25 bp, Homo sapien
gccgccgcccctactaggtgactca

SEQ ID NO: 2122050 - DNA, 25 bp, Homo sapien
ggccgccgccgcccctactaggtga

SEQ ID NO: 2122051 - DNA, 25 bp, Homo sapien
ccgccgcccctactaggtgactcac

SEQ ID NO: 2122052 - DNA, 25 bp, Homo sapien
ccgccgccgcccctactaggtgact

SEQ ID NO: 2122053 - DNA, 25 bp, Homo sapien
gagaacctcatcacgagcagaaggg

SEQ ID NO: 2122054 - DNA, 25 bp, Homo sapien
ggagcgtcgccaacttttctcgagg

SEQ ID NO: 2122055 - DNA, 25 bp, Homo sapien
cagaagggccaagccgttagtcggc

SEQ ID NO: 2122056 - DNA, 25 bp, Homo sapien
tagacacgaaaaaacaagcaccgcg

SEQ ID NO: 2122057 - DNA, 25 bp, Homo sapien
aggtaagtgtgaacaagcccacgtt

SEQ ID NO: 2122058 - DNA, 25 bp, Homo sapien
gggcgctgatcctcactagaacgcc

SEQ ID NO: 2122059 - DNA, 25 bp, Homo sapien
gaacgccgaggacaatcagtctcaa

SEQ ID NO: 2122060 - DNA, 25 bp, Homo sapien
cacgttctggtcagcgcacaaggac

SEQ ID NO: 2122061 - DNA, 25 bp, Homo sapien
tcacctcgaatgattcctagttatg

SEQ ID NO: 2122062 - DNA, 25 bp, Homo sapien
atcacctcgaatgattcctagttat

SEQ ID NO: 2122063 - DNA, 25 bp, Homo sapien
aggcttagcaagacctgaggaaaac

SEQ ID NO: 2122064 - DNA, 25 bp, Homo sapien
acaggcttagcaagacctgaggaaa

SEQ ID NO: 2122065 - DNA, 25 bp, Homo sapien
caggcttagcaagacctgaggaaaa

SEQ ID NO: 2122066 - DNA, 25 bp, Homo sapien
tggtacttacatttaagcctatgat

SEQ ID NO: 2122067 - DNA, 25 bp, Homo sapien
ggtctctagtgagtatctaagttca

SEQ ID NO: 2122068 - DNA, 25 bp, Homo sapien
atagccagtctagtgggtgtgaaat

SEQ ID NO: 2122069 - DNA, 25 bp, Homo sapien
gctctgcaagatcttaaggattttc

SEQ ID NO: 2122070 - DNA, 25 bp, Homo sapien
ggcctgtcagtggaccagtctggat

SEQ ID NO: 2122071 - DNA, 25 bp, Homo sapien
gatcatctaagccaaatacagccag

SEQ ID NO: 2122072 - DNA, 25 bp, Homo sapien
tatatataggtagcaaggacaaggg

SEQ ID NO: 2122073 - DNA, 25 bp, Homo sapien
tgattgagagcatgaaaccagggtt

SEQ ID NO: 2122074 - DNA, 25 bp, Homo sapien
gtatggagcctctcgtgacctggca

SEQ ID NO: 2122075 - DNA, 25 bp, Homo sapien
acctggcacgtgagttagaatctga

SEQ ID NO: 2122076 - DNA, 25 bp, Homo sapien
ttagggaactttgatatacgatggg

SEQ ID NO: 2122077 - DNA, 25 bp, Homo sapien
gaggtatacagcaggtcaaagtgga

SEQ ID NO: 2122078 - DNA, 25 bp, Homo sapien
agtagtactacttggtcttatgtcc

SEQ ID NO: 2122079 - DNA, 25 bp, Homo sapien
tcttatgtcctgaactatgaatcac

SEQ ID NO: 2122080 - DNA, 25 bp, Homo sapien
tgtaagagtgtagtttatgaaacag

SEQ ID NO: 2122081 - DNA, 25 bp, Homo sapien
cagaccaaaataagcatgaggcact

SEQ ID NO: 2122082 - DNA, 25 bp, Homo sapien
accttgtaggccataagagaatgaa

SEQ ID NO: 2122083 - DNA, 25 bp, Homo sapien
cagaaaccttgtaggccataagaga

SEQ ID NO: 2122084 - DNA, 25 bp, Homo sapien
aaccttgtaggccataagagaatga

SEQ ID NO: 2122085 - DNA, 25 bp, Homo sapien
cagcagaaaccttgtaggccataag

SEQ ID NO: 2122086 - DNA, 25 bp, Homo sapien
atccattagaatatcagtggatttc

SEQ ID NO: 2122087 - DNA, 25 bp, Homo sapien
aaaggaatatccattagaatatcag

SEQ ID NO: 2122088 - DNA, 25 bp, Homo sapien
tatccattagaatatcagtggattt

SEQ ID NO: 2122089 - DNA, 25 bp, Homo sapien
ggaatatccattagaatatcagtgg

SEQ ID NO: 2122090 - DNA, 25 bp, Homo sapien
cagacgagatcaggctcattcaggg

SEQ ID NO: 2122091 - DNA, 25 bp, Homo sapien
caagatcagacgagatcaggctcat

SEQ ID NO: 2122092 - DNA, 25 bp, Homo sapien
atcagacgagatcaggctcattcag

SEQ ID NO: 2122093 - DNA, 25 bp, Homo sapien
agatcagacgagatcaggctcattc

SEQ ID NO: 2122094 - DNA, 25 bp, Homo sapien
accaacaccaagaggcagctttaca

SEQ ID NO: 2122095 - DNA, 25 bp, Homo sapien
tacacttgggagataatatggtttt

SEQ ID NO: 2122096 - DNA, 25 bp, Homo sapien
caagaggcagctttacacttgggag

SEQ ID NO: 2122097 - DNA, 25 bp, Homo sapien
aatatggtttttagtgctctataca

SEQ ID NO: 2122098 - DNA, 25 bp, Homo sapien
tttctcagtgaaaaagaaacatgga

SEQ ID NO: 2122099 - DNA, 25 bp, Homo sapien
tttttctcagtgaaaaagaaacatg

SEQ ID NO: 2122100 - DNA, 25 bp, Homo sapien
ttctcagtgaaaaagaaacatggag

SEQ ID NO: 2122101 - DNA, 25 bp, Homo sapien
tgctttcttttttctcagtgaaaaa

SEQ ID NO: 2122102 - DNA, 25 bp, Homo sapien
agtctcctccagggacctacttctt

SEQ ID NO: 2122103 - DNA, 25 bp, Homo sapien
agcttccttaaaaggcctatttgca

SEQ ID NO: 2122104 - DNA, 25 bp, Homo sapien
gagtatgatttgagtatgatttcac

SEQ ID NO: 2122105 - DNA, 25 bp, Homo sapien
atgatttcactaatggagtaagtca

SEQ ID NO: 2122106 - DNA, 25 bp, Homo sapien
ctcttccccagttttgtcctcttct

SEQ ID NO: 2122107 - DNA, 25 bp, Homo sapien
tcaccacgctgtaccatgccaatgt

SEQ ID NO: 2122108 - DNA, 25 bp, Homo sapien
gaacagccttcaacttctttgcaca

SEQ ID NO: 2122109 - DNA, 25 bp, Homo sapien
ggcacttgtttcgaagcatttcagc

SEQ ID NO: 2122110 - DNA, 25 bp, Homo sapien
cagtcttaaggtatgttgtttgccc

SEQ ID NO: 2122111 - DNA, 25 bp, Homo sapien
actggcaagagtctgttacaagcag

SEQ ID NO: 2122112 - DNA, 25 bp, Homo sapien
agaatccattcacactggcaagagt

SEQ ID NO: 2122113 - DNA, 25 bp, Homo sapien
ggcaagagtctgttacaagcagcat

SEQ ID NO: 2122114 - DNA, 25 bp, Homo sapien
gattgttccaaccatactagactgt

SEQ ID NO: 2122115 - DNA, 25 bp, Homo sapien
gtttgtacaaagcccttttcacata

SEQ ID NO: 2122116 - DNA, 25 bp, Homo sapien
caaagcccttttcacatacagaatc

SEQ ID NO: 2122117 - DNA, 25 bp, Homo sapien
ttgtacaaagcccttttcacataca

SEQ ID NO: 2122118 - DNA, 25 bp, Homo sapien
tacaaagcccttttcacatacagaa

SEQ ID NO: 2122119 - DNA, 25 bp, Homo sapien
taagttttgtgcatgactgactcac

SEQ ID NO: 2122120 - DNA, 25 bp, Homo sapien
cttctgggaacaaagtgagcattgc

SEQ ID NO: 2122121 - DNA, 25 bp, Homo sapien
gctccgttagtggaaaacaagccag

SEQ ID NO: 2122122 - DNA, 25 bp, Homo sapien
tgatggcactcctcatgtatagtcc

SEQ ID NO: 2122123 - DNA, 25 bp, Homo sapien
gaatgcatgtgctgcttgcacctaa

SEQ ID NO: 2122124 - DNA, 25 bp, Homo sapien
tggccttgcctcttagccctgatgg

SEQ ID NO: 2122125 - DNA, 25 bp, Homo sapien
caccttgcttgtacctcggctctga

SEQ ID NO: 2122126 - DNA, 25 bp, Homo sapien
caagcccctgatagtgtgtagatgg

SEQ ID NO: 2122127 - DNA, 25 bp, Homo sapien
ctttggagatgtcatcatcccttac

SEQ ID NO: 2122128 - DNA, 25 bp, Homo sapien
gggacattttcctgaagacgtatct

SEQ ID NO: 2122129 - DNA, 25 bp, Homo sapien
agttatttgtggaagctgtggtgaa

SEQ ID NO: 2122130 - DNA, 25 bp, Homo sapien
gattctaggtggtcctgtctttggc

SEQ ID NO: 2122131 - DNA, 25 bp, Homo sapien
attcatcagtcccagcatattacct

SEQ ID NO: 2122132 - DNA, 25 bp, Homo sapien
tgacttacatttccccagtgattag

SEQ ID NO: 2122133 - DNA, 25 bp, Homo sapien
catcagtcccagcatattaccttct

SEQ ID NO: 2122134 - DNA, 25 bp, Homo sapien
ccattctgtggggtttcctacactt

SEQ ID NO: 2122135 - DNA, 25 bp, Homo sapien
tctttaggtgggagctggccacatc

SEQ ID NO: 2122136 - DNA, 25 bp, Homo sapien
ttgatgctaggagggtaacatgtcc

SEQ ID NO: 2122137 - DNA, 25 bp, Homo sapien
ggaggctttgagtcatgcagtatca

SEQ ID NO: 2122138 - DNA, 25 bp, Homo sapien
aacactgagttcaaccacatgggca

SEQ ID NO: 2122139 - DNA, 25 bp, Homo sapien
tcagggtcttaatcaattctgggac

SEQ ID NO: 2122140 - DNA, 25 bp, Homo sapien
gggactccagttacagttgtatctg

SEQ ID NO: 2122141 - DNA, 25 bp, Homo sapien
gatgcaccaaatggcaaatcttcag

SEQ ID NO: 2122142 - DNA, 25 bp, Homo sapien
tgtgcctctacaacctcagttctaa

SEQ ID NO: 2122143 - DNA, 25 bp, Homo sapien
cttttatgacaaaagcagttttcat

SEQ ID NO: 2122144 - DNA, 25 bp, Homo sapien
tttttgtgatgttgtcttttatgac

SEQ ID NO: 2122145 - DNA, 25 bp, Homo sapien
tttgtgatgttgtcttttatgacaa

SEQ ID NO: 2122146 - DNA, 25 bp, Homo sapien
gtcttttatgacaaaagcagttttc

SEQ ID NO: 2122147 - DNA, 25 bp, Homo sapien
ccacttataagaacacacttataag

SEQ ID NO: 2122148 - DNA, 25 bp, Homo sapien
tcatcccataacccaggtattgagt

SEQ ID NO: 2122149 - DNA, 25 bp, Homo sapien
tgagtccagaatccactagctattc

SEQ ID NO: 2122150 - DNA, 25 bp, Homo sapien
aggtattgagtccagaatccactag

SEQ ID NO: 2122151 - DNA, 25 bp, Homo sapien
tcacttgacaaaatggtgtaacaat

SEQ ID NO: 2122152 - DNA, 25 bp, Homo sapien
gaagtaagttaaagccaaggcaagc

SEQ ID NO: 2122153 - DNA, 25 bp, Homo sapien
agtgagcactgaagtaagttaaagc

SEQ ID NO: 2122154 - DNA, 25 bp, Homo sapien
gagcactgaagtaagttaaagccaa

SEQ ID NO: 2122155 - DNA, 25 bp, Homo sapien
cactgaagtaagttaaagccaaggc

SEQ ID NO: 2122156 - DNA, 25 bp, Homo sapien
tagatgacgccaggtgaaacagctc

SEQ ID NO: 2122157 - DNA, 25 bp, Homo sapien
cagttattattgaagatggctgact

SEQ ID NO: 2122158 - DNA, 25 bp, Homo sapien
agacgactcgtgtgcttttaacaga

SEQ ID NO: 2122159 - DNA, 25 bp, Homo sapien
ggtttcagtggatataaatgtccat

SEQ ID NO: 2122160 - DNA, 25 bp, Homo sapien
tggtgaggatctataagtcataaac

SEQ ID NO: 2122161 - DNA, 25 bp, Homo sapien
gaggatctataagtcataaactcag

SEQ ID NO: 2122162 - DNA, 25 bp, Homo sapien
gtgaggatctataagtcataaactc

SEQ ID NO: 2122163 - DNA, 25 bp, Homo sapien
ccttggtgaggatctataagtcata

SEQ ID NO: 2122164 - DNA, 25 bp, Homo sapien
ttaaaatcagggtttgacatcttgg

SEQ ID NO: 2122165 - DNA, 25 bp, Homo sapien
tcttggtctgccagttgacttcttt

SEQ ID NO: 2122166 - DNA, 25 bp, Homo sapien
aaaatcagggtttgacatcttggtc

SEQ ID NO: 2122167 - DNA, 25 bp, Homo sapien
tgacatcttggtctgccagttgact

SEQ ID NO: 2122168 - DNA, 25 bp, Homo sapien
tgatgtgtctaaagcctgagcccat

SEQ ID NO: 2122169 - DNA, 25 bp, Homo sapien
ttgatgtgtctaaagcctgagccca

SEQ ID NO: 2122170 - DNA, 25 bp, Homo sapien
cagggaagaagaaattcaatagggc

SEQ ID NO: 2122171 - DNA, 25 bp, Homo sapien
ggaagaagaaattcaatagggccat

SEQ ID NO: 2122172 - DNA, 25 bp, Homo sapien
gggaagaagaaattcaatagggcca

SEQ ID NO: 2122173 - DNA, 25 bp, Homo sapien
ttttattgcggcgaacacgcctact

SEQ ID NO: 2122174 - DNA, 25 bp, Homo sapien
ttgcggcgaacacgcctactttctt

SEQ ID NO: 2122175 - DNA, 25 bp, Homo sapien
ggcgaacacgcctactttcttcttc

SEQ ID NO: 2122176 - DNA, 25 bp, Homo sapien
ttgcttcttttattgcggcgaacac

SEQ ID NO: 2122177 - DNA, 25 bp, Homo sapien
gaagtgataaaggatcaactgagta

SEQ ID NO: 2122178 - DNA, 25 bp, Homo sapien
agaagtgataaaggatcaactgagt

SEQ ID NO: 2122179 - DNA, 25 bp, Homo sapien
tcagaagtgataaaggatcaactga

SEQ ID NO: 2122180 - DNA, 25 bp, Homo sapien
aagtgataaaggatcaactgagtag

SEQ ID NO: 2122181 - DNA, 25 bp, Homo sapien
caccatgccctaccaagaaggtagt

SEQ ID NO: 2122182 - DNA, 25 bp, Homo sapien
catgccctaccaagaaggtagttct

SEQ ID NO: 2122183 - DNA, 25 bp, Homo sapien
ccaccatgccctaccaagaaggtag

SEQ ID NO: 2122184 - DNA, 25 bp, Homo sapien
ccatgccctaccaagaaggtagttc

SEQ ID NO: 2122185 - DNA, 25 bp, Homo sapien
gcccagagctatgtattctacaaac

SEQ ID NO: 2122186 - DNA, 25 bp, Homo sapien
cagcagcccagagctatgtattcta

SEQ ID NO: 2122187 - DNA, 25 bp, Homo sapien
gcagcccagagctatgtattctaca

SEQ ID NO: 2122188 - DNA, 25 bp, Homo sapien
gcagcagcccagagctatgtattct

SEQ ID NO: 2122189 - DNA, 25 bp, Homo sapien
gtttagtgtagacttatatatccac

SEQ ID NO: 2122190 - DNA, 25 bp, Homo sapien
tacacagtgatgtttagtgtagact

SEQ ID NO: 2122191 - DNA, 25 bp, Homo sapien
ttgtacaaaagagagtcatcttatt

SEQ ID NO: 2122192 - DNA, 25 bp, Homo sapien
atatatccacttggctgtttaatag

SEQ ID NO: 2122193 - DNA, 25 bp, Homo sapien
agtttccagactgactcacttcttc

SEQ ID NO: 2122194 - DNA, 25 bp, Homo sapien
cagagcagtttccagactgactcac

SEQ ID NO: 2122195 - DNA, 25 bp, Homo sapien
ttcagagcagtttccagactgactc

SEQ ID NO: 2122196 - DNA, 25 bp, Homo sapien
gagcagtttccagactgactcactt

SEQ ID NO: 2122197 - DNA, 25 bp, Homo sapien
ttaactcttcaaggtaaatgacttg

SEQ ID NO: 2122198 - DNA, 25 bp, Homo sapien
gcaaacctgagcttagatagttaaa

SEQ ID NO: 2122199 - DNA, 25 bp, Homo sapien
gacttgttctttgacacttgtgagg

SEQ ID NO: 2122200 - DNA, 25 bp, Homo sapien
gaatttataatcaacacctgataag

SEQ ID NO: 2122201 - DNA, 25 bp, Homo sapien
caaagtacaagggatgctaacagga

SEQ ID NO: 2122202 - DNA, 25 bp, Homo sapien
gatgatactgacaaaggccaaagga

SEQ ID NO: 2122203 - DNA, 25 bp, Homo sapien
gaaactgcaaacgtaaggacatccc

SEQ ID NO: 2122204 - DNA, 25 bp, Homo sapien
tcacatctgtgtctaaaagctggca

SEQ ID NO: 2122205 - DNA, 25 bp, Homo sapien
gatgtaagcggcagggaaactttgt

SEQ ID NO: 2122206 - DNA, 25 bp, Homo sapien
tctatgcaacgctcctttgtgggtt

SEQ ID NO: 2122207 - DNA, 25 bp, Homo sapien
tctctttctatgcaacgctcctttg

SEQ ID NO: 2122208 - DNA, 25 bp, Homo sapien
tcactcttggtatggtccaagttct

SEQ ID NO: 2122209 - DNA, 25 bp, Homo sapien
gttctggtctagttgcatctgttcc

SEQ ID NO: 2122210 - DNA, 25 bp, Homo sapien
taaccaagttctggtctagttgcat

SEQ ID NO: 2122211 - DNA, 25 bp, Homo sapien
caagttctggtctagttgcatctgt

SEQ ID NO: 2122212 - DNA, 25 bp, Homo sapien
tggtctagttgcatctgttcccatt

SEQ ID NO: 2122213 - DNA, 25 bp, Homo sapien
ctggaattccaggaatccctggaat

SEQ ID NO: 2122214 - DNA, 25 bp, Homo sapien
cattgggtccaggaggtcctgcttt

SEQ ID NO: 2122215 - DNA, 25 bp, Homo sapien
gggccattgggtccaggaggtcctg

SEQ ID NO: 2122216 - DNA, 25 bp, Homo sapien
ggtccaggaggtcctgctttctttc

SEQ ID NO: 2122217 - DNA, 25 bp, Homo sapien
cagggggtccttgaggaccaggagg

SEQ ID NO: 2122218 - DNA, 25 bp, Homo sapien
gtccttgaggaccaggaggacctgg

SEQ ID NO: 2122219 - DNA, 25 bp, Homo sapien
cagaaggtccctggaggccaggggg

SEQ ID NO: 2122220 - DNA, 25 bp, Homo sapien
tggaggccagggggtccttgaggac

SEQ ID NO: 2122221 - DNA, 25 bp, Homo sapien
ttttctcgagttccagctttatcag

SEQ ID NO: 2122222 - DNA, 25 bp, Homo sapien
ctggttttctcgagttccagcttta

SEQ ID NO: 2122223 - DNA, 25 bp, Homo sapien
ttctcgagttccagctttatcagca

SEQ ID NO: 2122224 - DNA, 25 bp, Homo sapien
ggttttctcgagttccagctttatc

SEQ ID NO: 2122225 - DNA, 25 bp, Homo sapien
gatagagagtagtcactatgagtaa

SEQ ID NO: 2122226 - DNA, 25 bp, Homo sapien
atgagaaggatagagagtagtcact

SEQ ID NO: 2122227 - DNA, 25 bp, Homo sapien
gtcactatgagtaatggctgcttgc

SEQ ID NO: 2122228 - DNA, 25 bp, Homo sapien
agtagtcactatgagtaatggctgc

SEQ ID NO: 2122229 - DNA, 25 bp, Homo sapien
ttgaattgctgacccttggccctgt

SEQ ID NO: 2122230 - DNA, 25 bp, Homo sapien
ttgctgacccttggccctgtagatg

SEQ ID NO: 2122231 - DNA, 25 bp, Homo sapien
attcttgacttgaattgctgaccct

SEQ ID NO: 2122232 - DNA, 25 bp, Homo sapien
tggccctgtagatgcaccacagctg

SEQ ID NO: 2122233 - DNA, 25 bp, Homo sapien
gctgcggggatgtagcttaaacacc

SEQ ID NO: 2122234 - DNA, 25 bp, Homo sapien
cgagaccagtcattgagcactccac

SEQ ID NO: 2122235 - DNA, 25 bp, Homo sapien
gaagtaggtgccgtccaccagtacc

SEQ ID NO: 2122236 - DNA, 25 bp, Homo sapien
ggttcatagtgatgcgagaccagtc

SEQ ID NO: 2122237 - DNA, 25 bp, Homo sapien
tccacagtgcccctatgtggcctgc

SEQ ID NO: 2122238 - DNA, 25 bp, Homo sapien
tggcctgcaccggatctgcattctg

SEQ ID NO: 2122239 - DNA, 25 bp, Homo sapien
gagttaggcctaagaccgtactcac

SEQ ID NO: 2122240 - DNA, 25 bp, Homo sapien
ccattggatggtcttggctggctcc

SEQ ID NO: 2122241 - DNA, 25 bp, Homo sapien
tcttgcccgtctcgatgctgcgtgt

SEQ ID NO: 2122242 - DNA, 25 bp, Homo sapien
cagacgcctgcggtatagcaagtgt

SEQ ID NO: 2122243 - DNA, 25 bp, Homo sapien
tcagcgtgcaccatcttgacggcga

SEQ ID NO: 2122244 - DNA, 25 bp, Homo sapien
gcctgatggccccaaagaacgtggt

SEQ ID NO: 2122245 - DNA, 25 bp, Homo sapien
taacgtccacttgggttgcagcaaa

SEQ ID NO: 2122246 - DNA, 25 bp, Homo sapien
catgtgacccaagtacggattcagg

SEQ ID NO: 2122247 - DNA, 25 bp, Homo sapien
cactttataggagttagggccagac

SEQ ID NO: 2122248 - DNA, 25 bp, Homo sapien
tcattagcaaccagacaacggaggc

SEQ ID NO: 2122249 - DNA, 25 bp, Homo sapien
aatttggtctacaacatcctgcgtg

SEQ ID NO: 2122250 - DNA, 25 bp, Homo sapien
tgtgccagagattacgttttccctg

SEQ ID NO: 2122251 - DNA, 25 bp, Homo sapien
ggtccagtgatttacctgcattacg

SEQ ID NO: 2122252 - DNA, 25 bp, Homo sapien
ctgggtgcctgcctcatgtgatgat

SEQ ID NO: 2122253 - DNA, 25 bp, Homo sapien
gagccagtgggctttgagtttaagc

SEQ ID NO: 2122254 - DNA, 25 bp, Homo sapien
ggcattgagtcctgcttcctacagg

SEQ ID NO: 2122255 - DNA, 25 bp, Homo sapien
actactctgttttgaaggctctggg

SEQ ID NO: 2122256 - DNA, 25 bp, Homo sapien
tcttctgataactgcgtgtgcacca

SEQ ID NO: 2122257 - DNA, 25 bp, Homo sapien
caggatgatcggcttcttgacgtac

SEQ ID NO: 2122258 - DNA, 25 bp, Homo sapien
tttaagctccggatctgggcctgca

SEQ ID NO: 2122259 - DNA, 25 bp, Homo sapien
tgtcacggagttgtagtgctcgccg

SEQ ID NO: 2122260 - DNA, 25 bp, Homo sapien
taggcatagcgcaggtagaccagga

SEQ ID NO: 2122261 - DNA, 25 bp, Homo sapien
ggtgaagttatacgcaacatgacca

SEQ ID NO: 2122262 - DNA, 25 bp, Homo sapien
tgcagtagtacgatcccggcccact

SEQ ID NO: 2122263 - DNA, 25 bp, Homo sapien
tcgaatttcgtttcccaccctgtga

SEQ ID NO: 2122264 - DNA, 25 bp, Homo sapien
taaactgagcctactgaggagatgc

SEQ ID NO: 2122265 - DNA, 25 bp, Homo sapien
gagtaaaccttatctagcctatcag

SEQ ID NO: 2122266 - DNA, 25 bp, Homo sapien
catctcctgagtagtctagcttaag

SEQ ID NO: 2122267 - DNA, 25 bp, Homo sapien
caaaacaaagtactagcggatctct

SEQ ID NO: 2122268 - DNA, 25 bp, Homo sapien
aaaggaaacttactcgattcagatc

SEQ ID NO: 2122269 - DNA, 25 bp, Homo sapien
ctttgtgcccaactggggccaccac

SEQ ID NO: 2122270 - DNA, 25 bp, Homo sapien
tgtgcccaactggggccaccaccac

SEQ ID NO: 2122271 - DNA, 25 bp, Homo sapien
tctctggcgctcagaaagagggaag

SEQ ID NO: 2122272 - DNA, 25 bp, Homo sapien
accacatttttcgtggcagtcagag

SEQ ID NO: 2122273 - DNA, 25 bp, Homo sapien
tcttttagggttgcctctcggctgg

SEQ ID NO: 2122274 - DNA, 25 bp, Homo sapien
tagaagagcagttgtgatctgagcc

SEQ ID NO: 2122275 - DNA, 25 bp, Homo sapien
atggaatttagccatgaccaatgac

SEQ ID NO: 2122276 - DNA, 25 bp, Homo sapien
tggaatttagccatgaccaatgaca

SEQ ID NO: 2122277 - DNA, 25 bp, Homo sapien
ttcacatggaatttagccatgacca

SEQ ID NO: 2122278 - DNA, 25 bp, Homo sapien
acatggaatttagccatgaccaatg

SEQ ID NO: 2122279 - DNA, 25 bp, Homo sapien
ctccctaggttgaggagtccaggga

SEQ ID NO: 2122280 - DNA, 25 bp, Homo sapien
aggagtccagggactctagccgccg

SEQ ID NO: 2122281 - DNA, 25 bp, Homo sapien
cgcaccactcccacggtttgaagat

SEQ ID NO: 2122282 - DNA, 25 bp, Homo sapien
aagatccggtcgcttgagcgcgaag

SEQ ID NO: 2122283 - DNA, 25 bp, Homo sapien
ttttaccatgagctcctcgtcgccg

SEQ ID NO: 2122284 - DNA, 25 bp, Homo sapien
tgaggcgaggctgaattcggagcgc

SEQ ID NO: 2122285 - DNA, 25 bp, Homo sapien
acaagcaaaaccctaggcgctgttt

SEQ ID NO: 2122286 - DNA, 25 bp, Homo sapien
acgagcgagtgcgttttaggagcca

SEQ ID NO: 2122287 - DNA, 25 bp, Homo sapien
aagcatcaaaggacttccgggagcc

SEQ ID NO: 2122288 - DNA, 25 bp, Homo sapien
ggacaaaaccggaagaagcacctca

SEQ ID NO: 2122289 - DNA, 25 bp, Homo sapien
tagactcattttaccaggcagcccg

SEQ ID NO: 2122290 - DNA, 25 bp, Homo sapien
taaagaagaattaggcgagcgcgga

SEQ ID NO: 2122291 - DNA, 25 bp, Homo sapien
tacttcgtccagtaactgtctacca

SEQ ID NO: 2122292 - DNA, 25 bp, Homo sapien
ccggcgggttcagtcgccacttcta

SEQ ID NO: 2122293 - DNA, 25 bp, Homo sapien
tgtctaccagtttcgaacagctcgg

SEQ ID NO: 2122294 - DNA, 25 bp, Homo sapien
ggcagctgtaactcgtcctcagcag

SEQ ID NO: 2122295 - DNA, 25 bp, Homo sapien
tagtttataaagtgttctcgagccc

SEQ ID NO: 2122296 - DNA, 25 bp, Homo sapien
gcaaatgatctagacgcttgctggg

SEQ ID NO: 2122297 - DNA, 25 bp, Homo sapien
acgctggcaccaaaaggtacttcag

SEQ ID NO: 2122298 - DNA, 25 bp, Homo sapien
tgatagcaatggcactgagttaagt

SEQ ID NO: 2122299 - DNA, 25 bp, Homo sapien
attttcagcagagttgttcatggtt

SEQ ID NO: 2122300 - DNA, 25 bp, Homo sapien
agagttgttcatggttttgggcagc

SEQ ID NO: 2122301 - DNA, 25 bp, Homo sapien
ggaattggcagtgtgattttcagca

SEQ ID NO: 2122302 - DNA, 25 bp, Homo sapien
ggcagtgtgattttcagcagagttg

SEQ ID NO: 2122303 - DNA, 25 bp, Homo sapien
cacagtcgtcgagctgggattcaaa

SEQ ID NO: 2122304 - DNA, 25 bp, Homo sapien
cagtgattaatcacagtcgtcgagc

SEQ ID NO: 2122305 - DNA, 25 bp, Homo sapien
aaacaccttaccaagttctcagcaa

SEQ ID NO: 2122306 - DNA, 25 bp, Homo sapien
caagtttctcttcacgttcctcaca

SEQ ID NO: 2122307 - DNA, 25 bp, Homo sapien
aggccgccctcaacttcttacaaag

SEQ ID NO: 2122308 - DNA, 25 bp, Homo sapien
aattccatttcgtatcagtctagcc

SEQ ID NO: 2122309 - DNA, 25 bp, Homo sapien
taaaagctccatagcagcactgact

SEQ ID NO: 2122310 - DNA, 25 bp, Homo sapien
ctattatctgctgacaggccgccct

SEQ ID NO: 2122311 - DNA, 25 bp, Homo sapien
catctcaaataccatttatgttctt

SEQ ID NO: 2122312 - DNA, 25 bp, Homo sapien
ccttggttaaatcaggagggctgtc

SEQ ID NO: 2122313 - DNA, 25 bp, Homo sapien
tcaaatgggtcaactacaaatcact

SEQ ID NO: 2122314 - DNA, 25 bp, Homo sapien
ggattctccatggtgggccattaca

SEQ ID NO: 2122315 - DNA, 25 bp, Homo sapien
aactttggctgagtggtcacccttg

SEQ ID NO: 2122316 - DNA, 25 bp, Homo sapien
ctgttccacagaaaagcattaccca

SEQ ID NO: 2122317 - DNA, 25 bp, Homo sapien
tgttccacagaaaagcattacccat

SEQ ID NO: 2122318 - DNA, 25 bp, Homo sapien
tattcacgaacacgctcatcatctg

SEQ ID NO: 2122319 - DNA, 25 bp, Homo sapien
attgcagacaacctatgctccaact

SEQ ID NO: 2122320 - DNA, 25 bp, Homo sapien
cttgaagagtctctttctctcagga

SEQ ID NO: 2122321 - DNA, 25 bp, Homo sapien
agctgatatcaatccacctctgaag

SEQ ID NO: 2122322 - DNA, 25 bp, Homo sapien
tggcgagatgagttagaagttgatg

SEQ ID NO: 2122323 - DNA, 25 bp, Homo sapien
ggcgagatgagttagaagttgatgc

SEQ ID NO: 2122324 - DNA, 25 bp, Homo sapien
ctggcgagatgagttagaagttgat

SEQ ID NO: 2122325 - DNA, 25 bp, Homo sapien
tggcttgagccatgttccgagtgag

SEQ ID NO: 2122326 - DNA, 25 bp, Homo sapien
cttgagccatgttccgagtgagaat

SEQ ID NO: 2122327 - DNA, 25 bp, Homo sapien
ttggcttgagccatgttccgagtga

SEQ ID NO: 2122328 - DNA, 25 bp, Homo sapien
agccatgttccgagtgagaatgaag

SEQ ID NO: 2122329 - DNA, 25 bp, Homo sapien
gttggcagacttggataaccagctc

SEQ ID NO: 2122330 - DNA, 25 bp, Homo sapien
tggcagacttggataaccagctcca

SEQ ID NO: 2122331 - DNA, 25 bp, Homo sapien
agttggcagacttggataaccagct

SEQ ID NO: 2122332 - DNA, 25 bp, Homo sapien
gcagacttggataaccagctccaaa

SEQ ID NO: 2122333 - DNA, 25 bp, Homo sapien
gctgccttggctattccctgatccg

SEQ ID NO: 2122334 - DNA, 25 bp, Homo sapien
tatttccgatgttgctcataccagt

SEQ ID NO: 2122335 - DNA, 25 bp, Homo sapien
ggctattccctgatccggtaatgct

SEQ ID NO: 2122336 - DNA, 25 bp, Homo sapien
ccctgatccggtaatgctccatatt

SEQ ID NO: 2122337 - DNA, 25 bp, Homo sapien
gtaagactgcaagttcctatccaag

SEQ ID NO: 2122338 - DNA, 25 bp, Homo sapien
aattctatctcccttgcattgggca

SEQ ID NO: 2122339 - DNA, 25 bp, Homo sapien
tatacagaatcagggcatcttctct

SEQ ID NO: 2122340 - DNA, 25 bp, Homo sapien
tgtgcatgcatagtcagccagagat

SEQ ID NO: 2122341 - DNA, 25 bp, Homo sapien
catcagataagtcttttgcaagtat

SEQ ID NO: 2122342 - DNA, 25 bp, Homo sapien
tttttaagtggctgctctaggaaat

SEQ ID NO: 2122343 - DNA, 25 bp, Homo sapien
tccttcatcagataagtcttttgca

SEQ ID NO: 2122344 - DNA, 25 bp, Homo sapien
gtggctgctctaggaaatacaatgt

SEQ ID NO: 2122345 - DNA, 25 bp, Homo sapien
ggcacaaatgcatttatgactgcta

SEQ ID NO: 2122346 - DNA, 25 bp, Homo sapien
cagagaacttaatgggtaaatgtgt

SEQ ID NO: 2122347 - DNA, 25 bp, Homo sapien
cttactgttagcatggtagaggttg

SEQ ID NO: 2122348 - DNA, 25 bp, Homo sapien
cattagccttaagaagtttcggatt

SEQ ID NO: 2122349 - DNA, 25 bp, Homo sapien
tctgtttctttagtctcctctagga

SEQ ID NO: 2122350 - DNA, 25 bp, Homo sapien
taggatgtaactctttctcagactt

SEQ ID NO: 2122351 - DNA, 25 bp, Homo sapien
tctttagtctcctctaggatgtaac

SEQ ID NO: 2122352 - DNA, 25 bp, Homo sapien
gtctcctctaggatgtaactctttc

SEQ ID NO: 2122353 - DNA, 25 bp, Homo sapien
cctggcctagcatcgtatttttgag

SEQ ID NO: 2122354 - DNA, 25 bp, Homo sapien
cgcctggcctagcatcgtatttttg

SEQ ID NO: 2122355 - DNA, 25 bp, Homo sapien
gcctagcatcgtatttttgaggtta

SEQ ID NO: 2122356 - DNA, 25 bp, Homo sapien
tagcatcgtatttttgaggttagcc

SEQ ID NO: 2122357 - DNA, 25 bp, Homo sapien
tctcttctaacagctcaggagtctt

SEQ ID NO: 2122358 - DNA, 25 bp, Homo sapien
gactttgctcatgagaaatagtctc

SEQ ID NO: 2122359 - DNA, 25 bp, Homo sapien
gaaatgtgtggggatctgatctctt

SEQ ID NO: 2122360 - DNA, 25 bp, Homo sapien
cattttcctggctactctgactttg

SEQ ID NO: 2122361 - DNA, 25 bp, Homo sapien
tctgtggagtgtttgttcatcatcc

SEQ ID NO: 2122362 - DNA, 25 bp, Homo sapien
ccttttcttcttgttcttcctgttg

SEQ ID NO: 2122363 - DNA, 25 bp, Homo sapien
tcccgggctctgtggagtgtttgtt

SEQ ID NO: 2122364 - DNA, 25 bp, Homo sapien
ctcttcctccttttcttcttgttct

SEQ ID NO: 2122365 - DNA, 25 bp, Homo sapien
ctgtcggttcccatagcccctagga

SEQ ID NO: 2122366 - DNA, 25 bp, Homo sapien
cggttcccatagcccctaggatggg

SEQ ID NO: 2122367 - DNA, 25 bp, Homo sapien
ttcccatagcccctaggatgggtgt

SEQ ID NO: 2122368 - DNA, 25 bp, Homo sapien
cccatagcccctaggatgggtgtcc

SEQ ID NO: 2122369 - DNA, 25 bp, Homo sapien
taagaagctggaatacaacatgatg

SEQ ID NO: 2122370 - DNA, 25 bp, Homo sapien
ccctcgttgtacagagctgaagcag

SEQ ID NO: 2122371 - DNA, 25 bp, Homo sapien
gatagccatagattatacagagcca

SEQ ID NO: 2122372 - DNA, 25 bp, Homo sapien
cacttgacactttactgaatgcaaa

SEQ ID NO: 2122373 - DNA, 25 bp, Homo sapien
ttatagatgctttgctataatctct

SEQ ID NO: 2122374 - DNA, 25 bp, Homo sapien
tggcaagaagcctaaccagaaggtc

SEQ ID NO: 2122375 - DNA, 25 bp, Homo sapien
caagaagcctaaccagaaggtcaaa

SEQ ID NO: 2122376 - DNA, 25 bp, Homo sapien
tgttgtggcaagaagcctaaccaga

SEQ ID NO: 2122377 - DNA, 25 bp, Homo sapien
tgcaaaacaaagaaggtttggaggc

SEQ ID NO: 2122378 - DNA, 25 bp, Homo sapien
ctcatccttcaggatgacattattt

SEQ ID NO: 2122379 - DNA, 25 bp, Homo sapien
tcaggatgacattatttctcctcat

SEQ ID NO: 2122380 - DNA, 25 bp, Homo sapien
ctgtctcatccttcaggatgacatt

SEQ ID NO: 2122381 - DNA, 25 bp, Homo sapien
atccttcaggatgacattatttctc

SEQ ID NO: 2122382 - DNA, 25 bp, Homo sapien
taacagaaagtagggtataaggaga

SEQ ID NO: 2122383 - DNA, 25 bp, Homo sapien
gggtgttccaatcataggtgagcca

SEQ ID NO: 2122384 - DNA, 25 bp, Homo sapien
gttccaatcataggtgagccaggct

SEQ ID NO: 2122385 - DNA, 25 bp, Homo sapien
cttgactgtgggtgttccaatcata

SEQ ID NO: 2122386 - DNA, 25 bp, Homo sapien
ctgtgggtgttccaatcataggtga

SEQ ID NO: 2122387 - DNA, 25 bp, Homo sapien
cggaaatacttccatagggtccagt

SEQ ID NO: 2122388 - DNA, 25 bp, Homo sapien
agtaatttcggaaatacttccatag

SEQ ID NO: 2122389 - DNA, 25 bp, Homo sapien
catagggtccagtttcgtacccaag

SEQ ID NO: 2122390 - DNA, 25 bp, Homo sapien
tccagtttcgtacccaagctgaacg

SEQ ID NO: 2122391 - DNA, 25 bp, Homo sapien
tagggagcaagggtctgggcaacag

SEQ ID NO: 2122392 - DNA, 25 bp, Homo sapien
gggagcaagggtctgggcaacaggg

SEQ ID NO: 2122393 - DNA, 25 bp, Homo sapien
ctgagtagggagcaagggtctgggc

SEQ ID NO: 2122394 - DNA, 25 bp, Homo sapien
agtagggagcaagggtctgggcaac

SEQ ID NO: 2122395 - DNA, 25 bp, Homo sapien
gctgctgaccaccaaagcctctgaa

SEQ ID NO: 2122396 - DNA, 25 bp, Homo sapien
tgcattatgactcggggccttgacc

SEQ ID NO: 2122397 - DNA, 25 bp, Homo sapien
ggccttgaccttcgctgctgaccac

SEQ ID NO: 2122398 - DNA, 25 bp, Homo sapien
gctttgcattatgactcggggcctt

SEQ ID NO: 2122399 - DNA, 25 bp, Homo sapien
gaaaatccgagcaatgccagtggcc

SEQ ID NO: 2122400 - DNA, 25 bp, Homo sapien
gagaaagatcatgagtcttcaccag

SEQ ID NO: 2122401 - DNA, 25 bp, Homo sapien
catcacatattctcgcacaattggg

SEQ ID NO: 2122402 - DNA, 25 bp, Homo sapien
gcacaattgggatccaaaatatcct

SEQ ID NO: 2122403 - DNA, 25 bp, Homo sapien
tcaaggctgagctactcacagggca

SEQ ID NO: 2122404 - DNA, 25 bp, Homo sapien
acttcaaggctgagctactcacagg

SEQ ID NO: 2122405 - DNA, 25 bp, Homo sapien
ggctgagctactcacagggcacaca

SEQ ID NO: 2122406 - DNA, 25 bp, Homo sapien
gtacttcaaggctgagctactcaca

SEQ ID NO: 2122407 - DNA, 25 bp, Homo sapien
aaacctttacgctgcttgaggaaga

SEQ ID NO: 2122408 - DNA, 25 bp, Homo sapien
ctggtcggcacaagagagcttcagc

SEQ ID NO: 2122409 - DNA, 25 bp, Homo sapien
cacaaaacctttacgctgcttgagg

SEQ ID NO: 2122410 - DNA, 25 bp, Homo sapien
agtggaggctcctggtcggcacaag

SEQ ID NO: 2122411 - DNA, 25 bp, Homo sapien
ggaaggtctcctgattgaaaacttc

SEQ ID NO: 2122412 - DNA, 25 bp, Homo sapien
tgaaaacttcgttctcaccaaagga

SEQ ID NO: 2122413 - DNA, 25 bp, Homo sapien
ggtctcctgattgaaaacttcgttc

SEQ ID NO: 2122414 - DNA, 25 bp, Homo sapien
cctgattgaaaacttcgttctcacc

SEQ ID NO: 2122415 - DNA, 25 bp, Homo sapien
caggatccgcgagtgaagccccggc

SEQ ID NO: 2122416 - DNA, 25 bp, Homo sapien
caacagtggtaatgggccgattgaa

SEQ ID NO: 2122417 - DNA, 25 bp, Homo sapien
agccccaggatccgcgagtgaagcc

SEQ ID NO: 2122418 - DNA, 25 bp, Homo sapien
aagccccggccatggaaggtacaga

SEQ ID NO: 2122419 - DNA, 25 bp, Homo sapien
gagtgcgtgatacttgtctactgtc

SEQ ID NO: 2122420 - DNA, 25 bp, Homo sapien
ggcctcttaatcctgggaattggaa

SEQ ID NO: 2122421 - DNA, 25 bp, Homo sapien
actgtcttctggtttggcctcttaa

SEQ ID NO: 2122422 - DNA, 25 bp, Homo sapien
tgtgttggtcaaagagcttgcgcag

SEQ ID NO: 2122423 - DNA, 25 bp, Homo sapien
gacggaatcctgtctgcttggacca

SEQ ID NO: 2122424 - DNA, 25 bp, Homo sapien
tagaactctatcacaactgacggaa

SEQ ID NO: 2122425 - DNA, 25 bp, Homo sapien
ggcagctacagttcaggtccctggt

SEQ ID NO: 2122426 - DNA, 25 bp, Homo sapien
tgattcataagactccccaactggg

SEQ ID NO: 2122427 - DNA, 25 bp, Homo sapien
gtccaaggccatccctaagctctgt

SEQ ID NO: 2122428 - DNA, 25 bp, Homo sapien
ctccaggcagttggtttgtaaagcg

SEQ ID NO: 2122429 - DNA, 25 bp, Homo sapien
tgtaaagcgggtggagccctcctct

SEQ ID NO: 2122430 - DNA, 25 bp, Homo sapien
tctagctatcagcatgactgctgtg

SEQ ID NO: 2122431 - DNA, 25 bp, Homo sapien
ttggcccctcgatgtttctggaaga

SEQ ID NO: 2122432 - DNA, 25 bp, Homo sapien
tctggaagatcttagtttcccactc

SEQ ID NO: 2122433 - DNA, 25 bp, Homo sapien
tggaagatcttagtttcccactctt

SEQ ID NO: 2122434 - DNA, 25 bp, Homo sapien
agttaaccccattggcccctcgatg

SEQ ID NO: 2122435 - DNA, 25 bp, Homo sapien
ggaatgagccatgattctcgggagc

SEQ ID NO: 2122436 - DNA, 25 bp, Homo sapien
gatggcaaggtagctcaaaggccac

SEQ ID NO: 2122437 - DNA, 25 bp, Homo sapien
cttggaatgagccatgattctcggg

SEQ ID NO: 2122438 - DNA, 25 bp, Homo sapien
tgagccatgattctcgggagcctga

SEQ ID NO: 2122439 - DNA, 25 bp, Homo sapien
tagaccaaatttgtgctgccagcag

SEQ ID NO: 2122440 - DNA, 25 bp, Homo sapien
gctgccagcagaacttgaccatgcc

SEQ ID NO: 2122441 - DNA, 25 bp, Homo sapien
ggaccaggttagaccaaatttgtgc

SEQ ID NO: 2122442 - DNA, 25 bp, Homo sapien
ctgatgagggaccaggttagaccaa

SEQ ID NO: 2122443 - DNA, 25 bp, Homo sapien
cttccagtccaggaacaaccaggca

SEQ ID NO: 2122444 - DNA, 25 bp, Homo sapien
aaagcactggtagcggccacaagga

SEQ ID NO: 2122445 - DNA, 25 bp, Homo sapien
gcaggtagacgaacaatggctgcaa

SEQ ID NO: 2122446 - DNA, 25 bp, Homo sapien
caaggatgtaaacagcaggtagacg

SEQ ID NO: 2122447 - DNA, 25 bp, Homo sapien
tccttacccaggccgaacgcctgcc

SEQ ID NO: 2122448 - DNA, 25 bp, Homo sapien
ttccttacccaggccgaacgcctgc

SEQ ID NO: 2122449 - DNA, 25 bp, Homo sapien
ccttacccaggccgaacgcctgcca

SEQ ID NO: 2122450 - DNA, 25 bp, Homo sapien
cttacccaggccgaacgcctgccac

SEQ ID NO: 2122451 - DNA, 25 bp, Homo sapien
cgtaatggggaaatagtccctgatg

SEQ ID NO: 2122452 - DNA, 25 bp, Homo sapien
gtccctgatgtgggtccagacacac

SEQ ID NO: 2122453 - DNA, 25 bp, Homo sapien
gaaatagtccctgatgtgggtccag

SEQ ID NO: 2122454 - DNA, 25 bp, Homo sapien
gggaaatagtccctgatgtgggtcc

SEQ ID NO: 2122455 - DNA, 25 bp, Homo sapien
agttgtgctcaggtgataggtcctt

SEQ ID NO: 2122456 - DNA, 25 bp, Homo sapien
tttggccatgaggtactccctaaca

SEQ ID NO: 2122457 - DNA, 25 bp, Homo sapien
gaagttgcagaaggcgccaaaggtc

SEQ ID NO: 2122458 - DNA, 25 bp, Homo sapien
ctgggaaggtcttcgagaagcctgt

SEQ ID NO: 2122459 - DNA, 25 bp, Homo sapien
gaagctccagtaagtatggtcagaa

SEQ ID NO: 2122460 - DNA, 25 bp, Homo sapien
agctccagtaagtatggtcagaagc

SEQ ID NO: 2122461 - DNA, 25 bp, Homo sapien
ctccagtaagtatggtcagaagcac

SEQ ID NO: 2122462 - DNA, 25 bp, Homo sapien
ccagaagctccagtaagtatggtca

SEQ ID NO: 2122463 - DNA, 25 bp, Homo sapien
gactactatgccataatgacatggg

SEQ ID NO: 2122464 - DNA, 25 bp, Homo sapien
tcaatgccaggcagcttagctctag

SEQ ID NO: 2122465 - DNA, 25 bp, Homo sapien
taaaagggtgcatttccaagcagaa

SEQ ID NO: 2122466 - DNA, 25 bp, Homo sapien
tgaggctagtttgctcaagaccaca

SEQ ID NO: 2122467 - DNA, 25 bp, Homo sapien
tcccactacaatgcccacgaggttg

SEQ ID NO: 2122468 - DNA, 25 bp, Homo sapien
cccttgcgcttctggaggatgaggg

SEQ ID NO: 2122469 - DNA, 25 bp, Homo sapien
ctggagggctgtgcgcacgaacccc

SEQ ID NO: 2122470 - DNA, 25 bp, Homo sapien
actttgcagggcctcacccacacct

SEQ ID NO: 2122471 - DNA, 25 bp, Homo sapien
gcatcatctatatgccagggcagcc

SEQ ID NO: 2122472 - DNA, 25 bp, Homo sapien
tgagctagctcagaaggactggatg

SEQ ID NO: 2122473 - DNA, 25 bp, Homo sapien
caatccccttgatattgaacctggg

SEQ ID NO: 2122474 - DNA, 25 bp, Homo sapien
tttggcctcttagaaactagttgag

SEQ ID NO: 2122475 - DNA, 25 bp, Homo sapien
tattgatctcttacagtgtgccagg

SEQ ID NO: 2122476 - DNA, 25 bp, Homo sapien
caggttcagaaagggatggccactc

SEQ ID NO: 2122477 - DNA, 25 bp, Homo sapien
gaacagtgccctgggtagacagtca

SEQ ID NO: 2122478 - DNA, 25 bp, Homo sapien
tagacagtcaggctcaaattccgtg

SEQ ID NO: 2122479 - DNA, 25 bp, Homo sapien
tcttgcactaaacagggtttcccta

SEQ ID NO: 2122480 - DNA, 25 bp, Homo sapien
cttgcactaaacagggtttccctat

SEQ ID NO: 2122481 - DNA, 25 bp, Homo sapien
tggaagaacatttgtttgcttgcca

SEQ ID NO: 2122482 - DNA, 25 bp, Homo sapien
taggatgagacccaccctggaagaa

SEQ ID NO: 2122483 - DNA, 25 bp, Homo sapien
ggccctcatctattttgatgaaatc

SEQ ID NO: 2122484 - DNA, 25 bp, Homo sapien
ggatgagacccaccctggaagaaca

SEQ ID NO: 2122485 - DNA, 25 bp, Homo sapien
ctccaatttattttctaaacacaag

SEQ ID NO: 2122486 - DNA, 25 bp, Homo sapien
tagaaaccaaagatacggcggaagc

SEQ ID NO: 2122487 - DNA, 25 bp, Homo sapien
catagaagacacaacagtagaaacc

SEQ ID NO: 2122488 - DNA, 25 bp, Homo sapien
agtggagccttgacagaagctttgt

SEQ ID NO: 2122489 - DNA, 25 bp, Homo sapien
tggaacttgtacatcctgctatcct

SEQ ID NO: 2122490 - DNA, 25 bp, Homo sapien
ctgactctcgcatcccagatcagct

SEQ ID NO: 2122491 - DNA, 25 bp, Homo sapien
tgggcctgactctcgcatcccagat

SEQ ID NO: 2122492 - DNA, 25 bp, Homo sapien
cttgggcctgactctcgcatcccag

SEQ ID NO: 2122493 - DNA, 25 bp, Homo sapien
ccctcttctttggtggggccaggct

SEQ ID NO: 2122494 - DNA, 25 bp, Homo sapien
tgccaagagagatcggaaaagagaa

SEQ ID NO: 2122495 - DNA, 25 bp, Homo sapien
gccaagagagatcggaaaagagaag

SEQ ID NO: 2122496 - DNA, 25 bp, Homo sapien
agaggaaagtgttaggacctcctct

SEQ ID NO: 2122497 - DNA, 25 bp, Homo sapien
tatgctggtcgaacagtttgtgcag

SEQ ID NO: 2122498 - DNA, 25 bp, Homo sapien
tgtgcagagcatccatataaagtgc

SEQ ID NO: 2122499 - DNA, 25 bp, Homo sapien
aaaacagcttttgggtctctgagca

SEQ ID NO: 2122500 - DNA, 25 bp, Homo sapien
tctctgagcagccatagtgggtctt

SEQ ID NO: 2122501 - DNA, 25 bp, Homo sapien
gaaggaattcctcatgccctcccct

SEQ ID NO: 2122502 - DNA, 25 bp, Homo sapien
gcagatgagtctcttcttcaaggca

SEQ ID NO: 2122503 - DNA, 25 bp, Homo sapien
cagaggactcaaatgatgaccaggc

SEQ ID NO: 2122504 - DNA, 25 bp, Homo sapien
aatgactgtgtgcagctcttcagaa

SEQ ID NO: 2122505 - DNA, 25 bp, Homo sapien
tgcttagcttcggaaatcagatgag

SEQ ID NO: 2122506 - DNA, 25 bp, Homo sapien
agcttcggaaatcagatgagatcgg

SEQ ID NO: 2122507 - DNA, 25 bp, Homo sapien
atgagatcgggcacgttcatggtgg

SEQ ID NO: 2122508 - DNA, 25 bp, Homo sapien
tgagatcgggcacgttcatggtggt

SEQ ID NO: 2122509 - DNA, 25 bp, Homo sapien
agtctccagctctggttgctatgcc

SEQ ID NO: 2122510 - DNA, 25 bp, Homo sapien
cagctctggttgctatgcctgcctc

SEQ ID NO: 2122511 - DNA, 25 bp, Homo sapien
tctccagctctggttgctatgcctg

SEQ ID NO: 2122512 - DNA, 25 bp, Homo sapien
tccagctctggttgctatgcctgcc

SEQ ID NO: 2122513 - DNA, 25 bp, Homo sapien
cttctgccaagggtacttcttcagc

SEQ ID NO: 2122514 - DNA, 25 bp, Homo sapien
tgccaagggtacttcttcagccata

SEQ ID NO: 2122515 - DNA, 25 bp, Homo sapien
cctattctcccttctgccaagggta

SEQ ID NO: 2122516 - DNA, 25 bp, Homo sapien
tctgccaagggtacttcttcagcca

SEQ ID NO: 2122517 - DNA, 25 bp, Homo sapien
tggctatatagttgatgttgagcct

SEQ ID NO: 2122518 - DNA, 25 bp, Homo sapien
gttggctatatagttgatgttgagc

SEQ ID NO: 2122519 - DNA, 25 bp, Homo sapien
ctatatagttgatgttgagcctttt

SEQ ID NO: 2122520 - DNA, 25 bp, Homo sapien
gctatatagttgatgttgagccttt

SEQ ID NO: 2122521 - DNA, 25 bp, Homo sapien
cattggagctggtcttcttaaacac

SEQ ID NO: 2122522 - DNA, 25 bp, Homo sapien
ccattggagctggtcttcttaaaca

SEQ ID NO: 2122523 - DNA, 25 bp, Homo sapien
cttcccattggagctggtcttctta

SEQ ID NO: 2122524 - DNA, 25 bp, Homo sapien
tcccattggagctggtcttcttaaa

SEQ ID NO: 2122525 - DNA, 25 bp, Homo sapien
ctatcccttttgccctctcatttgc

SEQ ID NO: 2122526 - DNA, 25 bp, Homo sapien
ccttttgccctctcatttgcccagc

SEQ ID NO: 2122527 - DNA, 25 bp, Homo sapien
atcccttttgccctctcatttgccc

SEQ ID NO: 2122528 - DNA, 25 bp, Homo sapien
ttttgccctctcatttgcccagctg

SEQ ID NO: 2122529 - DNA, 25 bp, Homo sapien
agacccctgagaccttgaaggatgt

SEQ ID NO: 2122530 - DNA, 25 bp, Homo sapien
gacccctgagaccttgaaggatgta

SEQ ID NO: 2122531 - DNA, 25 bp, Homo sapien
ctgagaccttgaaggatgtacccac

SEQ ID NO: 2122532 - DNA, 25 bp, Homo sapien
cccctgagaccttgaaggatgtacc

SEQ ID NO: 2122533 - DNA, 25 bp, Homo sapien
gtggaacaacttcccatgttattct

SEQ ID NO: 2122534 - DNA, 25 bp, Homo sapien
ctgttgtggaacaacttcccatgtt

SEQ ID NO: 2122535 - DNA, 25 bp, Homo sapien
tgtggaacaacttcccatgttattc

SEQ ID NO: 2122536 - DNA, 25 bp, Homo sapien
gttgtggaacaacttcccatgttat

SEQ ID NO: 2122537 - DNA, 25 bp, Homo sapien
caccgtgtccacatggtccacgaag

SEQ ID NO: 2122538 - DNA, 25 bp, Homo sapien
ggttccaccgtgtccacatggtcca

SEQ ID NO: 2122539 - DNA, 25 bp, Homo sapien
caatgggttccaccgtgtccacatg

SEQ ID NO: 2122540 - DNA, 25 bp, Homo sapien
cgtgtccacatggtccacgaagtcc

SEQ ID NO: 2122541 - DNA, 25 bp, Homo sapien
ctagtttccattcctctttccccag

SEQ ID NO: 2122542 - DNA, 25 bp, Homo sapien
tttctgcacggtctttcctggactt

SEQ ID NO: 2122543 - DNA, 25 bp, Homo sapien
ttctgcacggtctttcctggacttt

SEQ ID NO: 2122544 - DNA, 25 bp, Homo sapien
cattcctctttccccaggcttccct

SEQ ID NO: 2122545 - DNA, 25 bp, Homo sapien
tcaggatcaaccaggacaacaccgt

SEQ ID NO: 2122546 - DNA, 25 bp, Homo sapien
cattgtcccctagcttgtgcagtag

SEQ ID NO: 2122547 - DNA, 25 bp, Homo sapien
ttccaagtcatcacggccatagcga

SEQ ID NO: 2122548 - DNA, 25 bp, Homo sapien
gccatagcgaaaggcacatgtcaac

SEQ ID NO: 2122549 - DNA, 25 bp, Homo sapien
cagatcttttcggaacgtcagacca

SEQ ID NO: 2122550 - DNA, 25 bp, Homo sapien
acagaacagggcaggttggtcacca

SEQ ID NO: 2122551 - DNA, 25 bp, Homo sapien
ctgcagtgtcacagaacagggcagg

SEQ ID NO: 2122552 - DNA, 25 bp, Homo sapien
gtgtcacagaacagggcaggttggt

SEQ ID NO: 2122553 - DNA, 25 bp, Homo sapien
cagaacagggcaggttggtcaccat

SEQ ID NO: 2122554 - DNA, 25 bp, Homo sapien
tcttggagactgtctcctctgggtt

SEQ ID NO: 2122555 - DNA, 25 bp, Homo sapien
ctgggttttcagcacagaaactctt

SEQ ID NO: 2122556 - DNA, 25 bp, Homo sapien
gaaactcttcacttcaaagtcaatc

SEQ ID NO: 2122557 - DNA, 25 bp, Homo sapien
tcacttcaaagtcaatcccacaggg

SEQ ID NO: 2122558 - DNA, 25 bp, Homo sapien
gcctgcctccggtggtgcaaattgt

SEQ ID NO: 2122559 - DNA, 25 bp, Homo sapien
gaagcggcggatggtctgggctgag

SEQ ID NO: 2122560 - DNA, 25 bp, Homo sapien
ttccggacaaccagccgcacatagt

SEQ ID NO: 2122561 - DNA, 25 bp, Homo sapien
gctgagctgacagaaggaagcggcg

SEQ ID NO: 2122562 - DNA, 25 bp, Homo sapien
attgacagagatgggttctccgtgg

SEQ ID NO: 2122563 - DNA, 25 bp, Homo sapien
acattgacagagatgggttctccgt

SEQ ID NO: 2122564 - DNA, 25 bp, Homo sapien
acagagatgggttctccgtggtagt

SEQ ID NO: 2122565 - DNA, 25 bp, Homo sapien
tgacagagatgggttctccgtggta

SEQ ID NO: 2122566 - DNA, 25 bp, Homo sapien
cagtcttggtgtacttgtctagtga

SEQ ID NO: 2122567 - DNA, 25 bp, Homo sapien
acagtcttggtgtacttgtctagtg

SEQ ID NO: 2122568 - DNA, 25 bp, Homo sapien
cacagtcttggtgtacttgtctagt

SEQ ID NO: 2122569 - DNA, 25 bp, Homo sapien
catgcttaagtttgccatccagtgc

SEQ ID NO: 2122570 - DNA, 25 bp, Homo sapien
gccaggttggtatcttcatgcttaa

SEQ ID NO: 2122571 - DNA, 25 bp, Homo sapien
gctggaattagcagctacagtctcc

SEQ ID NO: 2122572 - DNA, 25 bp, Homo sapien
caggattggggttactgcaaagctc

SEQ ID NO: 2122573 - DNA, 25 bp, Homo sapien
tcgttttagggtgtttggggcatga

SEQ ID NO: 2122574 - DNA, 25 bp, Homo sapien
ttagggtgtttggggcatgaagagt

SEQ ID NO: 2122575 - DNA, 25 bp, Homo sapien
ctggaggttgtagtattcgttttag

SEQ ID NO: 2122576 - DNA, 25 bp, Homo sapien
ttttagggtgtttggggcatgaaga

SEQ ID NO: 2122577 - DNA, 25 bp, Homo sapien
gactctgactttgtaggacaccagg

SEQ ID NO: 2122578 - DNA, 25 bp, Homo sapien
cacaggacaccatcaggttgactct

SEQ ID NO: 2122579 - DNA, 25 bp, Homo sapien
catcaggttgactctgactttgtag

SEQ ID NO: 2122580 - DNA, 25 bp, Homo sapien
ggacaccatcaggttgactctgact

SEQ ID NO: 2122581 - DNA, 25 bp, Homo sapien
cttcggatggatcaggaccaagggt

SEQ ID NO: 2122582 - DNA, 25 bp, Homo sapien
catgagatggcttcggatggatcag

SEQ ID NO: 2122583 - DNA, 25 bp, Homo sapien
gatcaggaccaagggtagctccaca

SEQ ID NO: 2122584 - DNA, 25 bp, Homo sapien
caagggtagctccacaccaacatcg

SEQ ID NO: 2122585 - DNA, 25 bp, Homo sapien
cacatttctatcgtcataacatgga

SEQ ID NO: 2122586 - DNA, 25 bp, Homo sapien
cgtcataacatggagggtggaaatg

SEQ ID NO: 2122587 - DNA, 25 bp, Homo sapien
ggaatggggcttcccaatcttgtat

SEQ ID NO: 2122588 - DNA, 25 bp, Homo sapien
tttcacatttctatcgtcataacat

SEQ ID NO: 2122589 - DNA, 25 bp, Homo sapien
agcagaagagaatggaaggttagga

SEQ ID NO: 2122590 - DNA, 25 bp, Homo sapien
cagaagagaatggaaggttaggaac

SEQ ID NO: 2122591 - DNA, 25 bp, Homo sapien
agcagcagaagagaatggaaggtta

SEQ ID NO: 2122592 - DNA, 25 bp, Homo sapien
gaagcagcagaagagaatggaaggt

SEQ ID NO: 2122593 - DNA, 25 bp, Homo sapien
ccgcgtaaactcctcgatgactatg

SEQ ID NO: 2122594 - DNA, 25 bp, Homo sapien
gcctttccgcgtaaactcctcgatg

SEQ ID NO: 2122595 - DNA, 25 bp, Homo sapien
ctcctcgatgactatgtcctcagag

SEQ ID NO: 2122596 - DNA, 25 bp, Homo sapien
taaactcctcgatgactatgtcctc

SEQ ID NO: 2122597 - DNA, 25 bp, Homo sapien
gagtgttacagtgggggctcccaca

SEQ ID NO: 2122598 - DNA, 25 bp, Homo sapien
gctcccacacagacgggcaccagag

SEQ ID NO: 2122599 - DNA, 25 bp, Homo sapien
attagagtgttacagtgggggctcc

SEQ ID NO: 2122600 - DNA, 25 bp, Homo sapien
tgaacaaactgatttattagagtgt

SEQ ID NO: 2122601 - DNA, 25 bp, Homo sapien
cccaggaataagagtttagatttgc

SEQ ID NO: 2122602 - DNA, 25 bp, Homo sapien
attccgttctttcggcagcctccag

SEQ ID NO: 2122603 - DNA, 25 bp, Homo sapien
atccaggcctcgtcgtgaccaaagg

SEQ ID NO: 2122604 - DNA, 25 bp, Homo sapien
ttgcacagagactggtattccgttc

SEQ ID NO: 2122605 - DNA, 25 bp, Homo sapien
gcaggcgcagccgaagctgttgtac

SEQ ID NO: 2122606 - DNA, 25 bp, Homo sapien
gaagcggctgatgatggatgtcttc

SEQ ID NO: 2122607 - DNA, 25 bp, Homo sapien
agctgttgtacatgaagcggctgat

SEQ ID NO: 2122608 - DNA, 25 bp, Homo sapien
caggcgcagccgaagctgttgtaca

SEQ ID NO: 2122609 - DNA, 25 bp, Homo sapien
acaagaagtcaattccaacagttgc

SEQ ID NO: 2122610 - DNA, 25 bp, Homo sapien
agacaagaagtcaattccaacagtt

SEQ ID NO: 2122611 - DNA, 25 bp, Homo sapien
tagacaagaagtcaattccaacagt

SEQ ID NO: 2122612 - DNA, 25 bp, Homo sapien
gacaagaagtcaattccaacagttg

SEQ ID NO: 2122613 - DNA, 25 bp, Homo sapien
ttgtaatgtcatagacaaccactgc

SEQ ID NO: 2122614 - DNA, 25 bp, Homo sapien
aatgtagctaggaattaggctgtga

SEQ ID NO: 2122615 - DNA, 25 bp, Homo sapien
gaattaggctgtgaaagcgctcctg

SEQ ID NO: 2122616 - DNA, 25 bp, Homo sapien
caatagttgaatcacgaatgtagct

SEQ ID NO: 2122617 - DNA, 25 bp, Homo sapien
acatgatgacaacatcgtcacctct

SEQ ID NO: 2122618 - DNA, 25 bp, Homo sapien
gctcgcacgtgttctacccacttat

SEQ ID NO: 2122619 - DNA, 25 bp, Homo sapien
tgttctacccacttatctgtctcct

SEQ ID NO: 2122620 - DNA, 25 bp, Homo sapien
acctctttctgctcgcacgtgttct

SEQ ID NO: 2122621 - DNA, 25 bp, Homo sapien
cacgttgtaaccggttttggcactg

SEQ ID NO: 2122622 - DNA, 25 bp, Homo sapien
tgtaaccggttttggcactggtctc

SEQ ID NO: 2122623 - DNA, 25 bp, Homo sapien
ggatttttcttcaccctgttctgca

SEQ ID NO: 2122624 - DNA, 25 bp, Homo sapien
gtaaccggttttggcactggtctca

SEQ ID NO: 2122625 - DNA, 25 bp, Homo sapien
cagacagagcacaattaaagtatca

SEQ ID NO: 2122626 - DNA, 25 bp, Homo sapien
caattaaagtatcatagaaagaaac

SEQ ID NO: 2122627 - DNA, 25 bp, Homo sapien
agcacaattaaagtatcatagaaag

SEQ ID NO: 2122628 - DNA, 25 bp, Homo sapien
ctacagacagagcacaattaaagta

SEQ ID NO: 2122629 - DNA, 25 bp, Homo sapien
agggcagaagccacacgccggaaca

SEQ ID NO: 2122630 - DNA, 25 bp, Homo sapien
gggcagaagccacacgccggaacag

SEQ ID NO: 2122631 - DNA, 25 bp, Homo sapien
aagggcagaagccacacgccggaac

SEQ ID NO: 2122632 - DNA, 25 bp, Homo sapien
agaagggcagaagccacacgccgga

SEQ ID NO: 2122633 - DNA, 25 bp, Homo sapien
ggaattctgatcttacaatccctct

SEQ ID NO: 2122634 - DNA, 25 bp, Homo sapien
tagaagaggaattctgatcttacaa

SEQ ID NO: 2122635 - DNA, 25 bp, Homo sapien
ctaggagatgtagaagaggaattct

SEQ ID NO: 2122636 - DNA, 25 bp, Homo sapien
gatgtagaagaggaattctgatctt

SEQ ID NO: 2122637 - DNA, 25 bp, Homo sapien
cagatgtcttttagctgtcggagaa

SEQ ID NO: 2122638 - DNA, 25 bp, Homo sapien
ggtaaggtagaattcccaggtgctg

SEQ ID NO: 2122639 - DNA, 25 bp, Homo sapien
gctgcaagaagcttccacccagtag

SEQ ID NO: 2122640 - DNA, 25 bp, Homo sapien
gaggagaactggtatggcaagccca

SEQ ID NO: 2122641 - DNA, 25 bp, Homo sapien
accagaagattcatacacttttgag

SEQ ID NO: 2122642 - DNA, 25 bp, Homo sapien
tatcccatccttgcactaccagaag

SEQ ID NO: 2122643 - DNA, 25 bp, Homo sapien
tattgaatatcatgcactagtccct

SEQ ID NO: 2122644 - DNA, 25 bp, Homo sapien
gagactccagtgagacgctgttttc

SEQ ID NO: 2122645 - DNA, 25 bp, Homo sapien
tcccgccgccctgtcccagccggag

SEQ ID NO: 2122646 - DNA, 25 bp, Homo sapien
ctcccgccgccctgtcccagccgga

SEQ ID NO: 2122647 - DNA, 25 bp, Homo sapien
gccgccctgtcccagccggagcttt

SEQ ID NO: 2122648 - DNA, 25 bp, Homo sapien
ccgccgccctgtcccagccggagct

SEQ ID NO: 2122649 - DNA, 25 bp, Homo sapien
acatctggcagccctcgctaatctc

SEQ ID NO: 2122650 - DNA, 25 bp, Homo sapien
tctggcagccctcgctaatctcttt

SEQ ID NO: 2122651 - DNA, 25 bp, Homo sapien
atctggcagccctcgctaatctctt

SEQ ID NO: 2122652 - DNA, 25 bp, Homo sapien
catctggcagccctcgctaatctct

SEQ ID NO: 2122653 - DNA, 25 bp, Homo sapien
acaccttttatgagtggcgctactg

SEQ ID NO: 2122654 - DNA, 25 bp, Homo sapien
cttcctgttcagtagagggatcaaa

SEQ ID NO: 2122655 - DNA, 25 bp, Homo sapien
tcagtagagggatcaaatacaaaat

SEQ ID NO: 2122656 - DNA, 25 bp, Homo sapien
atacaccttttatgagtggcgctac

SEQ ID NO: 2122657 - DNA, 25 bp, Homo sapien
gcatggcacctaaaaggaactacaa

SEQ ID NO: 2122658 - DNA, 25 bp, Homo sapien
aaccgcctaataatgcacttctcag

SEQ ID NO: 2122659 - DNA, 25 bp, Homo sapien
cttctaaaactataagcatggcacc

SEQ ID NO: 2122660 - DNA, 25 bp, Homo sapien
tatccctgtcgttaactgatgcata

SEQ ID NO: 2122661 - DNA, 25 bp, Homo sapien
tatgattgaagaaagacacaaagtt

SEQ ID NO: 2122662 - DNA, 25 bp, Homo sapien
tagtgtaagctaagtatccagtgtt

SEQ ID NO: 2122663 - DNA, 25 bp, Homo sapien
tgttttaggcccttacattcactca

SEQ ID NO: 2122664 - DNA, 25 bp, Homo sapien
cggtaattgccctatacgggtgtat

SEQ ID NO: 2122665 - DNA, 25 bp, Homo sapien
cttgctctgcagtatatgcacctcc

SEQ ID NO: 2122666 - DNA, 25 bp, Homo sapien
ttgctctgcagtatatgcacctccc

SEQ ID NO: 2122667 - DNA, 25 bp, Homo sapien
gagtcatgtcaggaaaaacctgatt

SEQ ID NO: 2122668 - DNA, 25 bp, Homo sapien
gacaatttcgaattcagaataatta

SEQ ID NO: 2122669 - DNA, 25 bp, Homo sapien
cccaaagacaatttcgaattcagaa

SEQ ID NO: 2122670 - DNA, 25 bp, Homo sapien
ttgagtcatgtcaggaaaaacctga

SEQ ID NO: 2122671 - DNA, 25 bp, Homo sapien
ttatttgagctttctcacgagatgg

SEQ ID NO: 2122672 - DNA, 25 bp, Homo sapien
gatgggcatagaagatccaaaattt

SEQ ID NO: 2122673 - DNA, 25 bp, Homo sapien
gagctttctcacgagatgggcatag

SEQ ID NO: 2122674 - DNA, 25 bp, Homo sapien
cacgagatgggcatagaagatccaa

SEQ ID NO: 2122675 - DNA, 25 bp, Homo sapien
aaacagtcttctcagtgagtcccac

SEQ ID NO: 2122676 - DNA, 25 bp, Homo sapien
cagtcttctcagtgagtcccacaat

SEQ ID NO: 2122677 - DNA, 25 bp, Homo sapien
aacagtcttctcagtgagtcccaca

SEQ ID NO: 2122678 - DNA, 25 bp, Homo sapien
tggcatgagatcgggacgactggga

SEQ ID NO: 2122679 - DNA, 25 bp, Homo sapien
agatcgggacgactgggagttcata

SEQ ID NO: 2122680 - DNA, 25 bp, Homo sapien
catgagatcgggacgactgggagtt

SEQ ID NO: 2122681 - DNA, 25 bp, Homo sapien
tgagatcgggacgactgggagttca

SEQ ID NO: 2122682 - DNA, 25 bp, Homo sapien
tgatccagcgaggtctacaagatgc

SEQ ID NO: 2122683 - DNA, 25 bp, Homo sapien
gtctacaagatgcagcttggagcga

SEQ ID NO: 2122684 - DNA, 25 bp, Homo sapien
tcttttagacgatccccttcagcct

SEQ ID NO: 2122685 - DNA, 25 bp, Homo sapien
cagcttggagcgaaagctgctattc

SEQ ID NO: 2122686 - DNA, 25 bp, Homo sapien
aaaaagtaggttgcaggatgggtct

SEQ ID NO: 2122687 - DNA, 25 bp, Homo sapien
gtaaggggtgatgtagaatttttca

SEQ ID NO: 2122688 - DNA, 25 bp, Homo sapien
ctgattcattgactgttcttaagcc

SEQ ID NO: 2122689 - DNA, 25 bp, Homo sapien
gtgctggggccagccaaaaaagtag

SEQ ID NO: 2122690 - DNA, 25 bp, Homo sapien
tctccaagagcactgattacatttc

SEQ ID NO: 2122691 - DNA, 25 bp, Homo sapien
cttgctctgtcagcatagcgaaggg

SEQ ID NO: 2122692 - DNA, 25 bp, Homo sapien
tgctctgtcagcatagcgaagggta

SEQ ID NO: 2122693 - DNA, 25 bp, Homo sapien
ttgctctgtcagcatagcgaagggt

SEQ ID NO: 2122694 - DNA, 25 bp, Homo sapien
tagcaacaagacttgtagctgttgt

SEQ ID NO: 2122695 - DNA, 25 bp, Homo sapien
gtagcaacaagacttgtagctgttg

SEQ ID NO: 2122696 - DNA, 25 bp, Homo sapien
gcaacaagacttgtagctgttgtac

SEQ ID NO: 2122697 - DNA, 25 bp, Homo sapien
agcaacaagacttgtagctgttgta

SEQ ID NO: 2122698 - DNA, 25 bp, Homo sapien
tagatccaggcagggtacctccatg

SEQ ID NO: 2122699 - DNA, 25 bp, Homo sapien
gttatagatccaggcagggtacctc

SEQ ID NO: 2122700 - DNA, 25 bp, Homo sapien
atccaggcagggtacctccatgggc

SEQ ID NO: 2122701 - DNA, 25 bp, Homo sapien
ccaggcagggtacctccatgggcct

SEQ ID NO: 2122702 - DNA, 25 bp, Homo sapien
gcttagatactctatgcctaaagat

SEQ ID NO: 2122703 - DNA, 25 bp, Homo sapien
tgtgggaaacattatcttgcttaga

SEQ ID NO: 2122704 - DNA, 25 bp, Homo sapien
agggaatacaaacagtaactgtggg

SEQ ID NO: 2122705 - DNA, 25 bp, Homo sapien
tcccacagggatataggctaacaat

SEQ ID NO: 2122706 - DNA, 25 bp, Homo sapien
cgcgcccggctgaattcctctttta

SEQ ID NO: 2122707 - DNA, 25 bp, Homo sapien
accgcgcccggctgaattcctcttt

SEQ ID NO: 2122708 - DNA, 25 bp, Homo sapien
ccaccgcgcccggctgaattcctct

SEQ ID NO: 2122709 - DNA, 25 bp, Homo sapien
gcgcccggctgaattcctcttttaa

SEQ ID NO: 2122710 - DNA, 25 bp, Homo sapien
tgataatacctatatcaaaggtgga

SEQ ID NO: 2122711 - DNA, 25 bp, Homo sapien
caatctatcctcctagtcaggtaga

SEQ ID NO: 2122712 - DNA, 25 bp, Homo sapien
aaatatatcccataggccttttgga

SEQ ID NO: 2122713 - DNA, 25 bp, Homo sapien
caaaagtctgggaaaagtgtgtcca

SEQ ID NO: 2122714 - DNA, 25 bp, Homo sapien
ccatcagggattgtagattctctga

SEQ ID NO: 2122715 - DNA, 25 bp, Homo sapien
tctccatcagggattgtagattctc

SEQ ID NO: 2122716 - DNA, 25 bp, Homo sapien
ttctcctctaccagggactgattct

SEQ ID NO: 2122717 - DNA, 25 bp, Homo sapien
tcttctccatcagggattgtagatt

SEQ ID NO: 2122718 - DNA, 25 bp, Homo sapien
tcattttttcattcgcttgctctgt

SEQ ID NO: 2122719 - DNA, 25 bp, Homo sapien
ggcgttcattttttcattcgcttgc

SEQ ID NO: 2122720 - DNA, 25 bp, Homo sapien
tgagctcttctagcttggcgttcat

SEQ ID NO: 2122721 - DNA, 25 bp, Homo sapien
tctagcttggcgttcattttttcat

SEQ ID NO: 2122722 - DNA, 25 bp, Homo sapien
ccaaagtctccactagcttttgaag

SEQ ID NO: 2122723 - DNA, 25 bp, Homo sapien
gctgcaggttacaaattatctctac

SEQ ID NO: 2122724 - DNA, 25 bp, Homo sapien
ttgctgcaggttacaaattatctct

SEQ ID NO: 2122725 - DNA, 25 bp, Homo sapien
tctccactagcttttgaagatccag

SEQ ID NO: 2122726 - DNA, 25 bp, Homo sapien
taaaagaggcttatggtattccctg

SEQ ID NO: 2122727 - DNA, 25 bp, Homo sapien
taagttagcctacactgtgaggaca

SEQ ID NO: 2122728 - DNA, 25 bp, Homo sapien
cctaaggactaagagatggaacacc

SEQ ID NO: 2122729 - DNA, 25 bp, Homo sapien
tctagaaaacactgggcaagaccag

SEQ ID NO: 2122730 - DNA, 25 bp, Homo sapien
agcacttagtaagattacatagcta

SEQ ID NO: 2122731 - DNA, 25 bp, Homo sapien
gagcccaggctctcaattactgtac

SEQ ID NO: 2122732 - DNA, 25 bp, Homo sapien
ggctctagagcccaggctctcaatt

SEQ ID NO: 2122733 - DNA, 25 bp, Homo sapien
atacagcacttagtaagattacata

SEQ ID NO: 2122734 - DNA, 25 bp, Homo sapien
ttcttgctccaccgcagtatcaatg

SEQ ID NO: 2122735 - DNA, 25 bp, Homo sapien
ggcttcttgctccaccgcagtatca

SEQ ID NO: 2122736 - DNA, 25 bp, Homo sapien
gcttcttgctccaccgcagtatcaa

SEQ ID NO: 2122737 - DNA, 25 bp, Homo sapien
cttcttgctccaccgcagtatcaat

SEQ ID NO: 2122738 - DNA, 25 bp, Homo sapien
tggagttccttaggcactatttcat

SEQ ID NO: 2122739 - DNA, 25 bp, Homo sapien
aatggagttccttaggcactatttc

SEQ ID NO: 2122740 - DNA, 25 bp, Homo sapien
ctttacaacagtggctctgcataca

SEQ ID NO: 2122741 - DNA, 25 bp, Homo sapien
gcaaatggagttccttaggcactat

SEQ ID NO: 2122742 - DNA, 25 bp, Homo sapien
catgctgagtggtaaaagcgtcaga

SEQ ID NO: 2122743 - DNA, 25 bp, Homo sapien
tggtaaaagcgtcagaagacctgct

SEQ ID NO: 2122744 - DNA, 25 bp, Homo sapien
agagcatgctgagtggtaaaagcgt

SEQ ID NO: 2122745 - DNA, 25 bp, Homo sapien
tgagtggtaaaagcgtcagaagacc

SEQ ID NO: 2122746 - DNA, 25 bp, Homo sapien
agactgtagacatgaacaaatactg

SEQ ID NO: 2122747 - DNA, 25 bp, Homo sapien
cagtacaactcccattatactatat

SEQ ID NO: 2122748 - DNA, 25 bp, Homo sapien
caaatactgccctaggaaatagttt

SEQ ID NO: 2122749 - DNA, 25 bp, Homo sapien
actgtagacatgaacaaatactgcc

SEQ ID NO: 2122750 - DNA, 25 bp, Homo sapien
tgatgccagccaggcaggggtggaa

SEQ ID NO: 2122751 - DNA, 25 bp, Homo sapien
tagatgatgccagccaggcaggggt

SEQ ID NO: 2122752 - DNA, 25 bp, Homo sapien
tgccagccaggcaggggtggaagtc

SEQ ID NO: 2122753 - DNA, 25 bp, Homo sapien
ctagatgatgccagccaggcagggg

SEQ ID NO: 2122754 - DNA, 25 bp, Homo sapien
atctccaaggtgaagtttgtcatgg

SEQ ID NO: 2122755 - DNA, 25 bp, Homo sapien
tccaaggtgaagtttgtcatggtgg

SEQ ID NO: 2122756 - DNA, 25 bp, Homo sapien
ggtggtgaattcctccaacacagct

SEQ ID NO: 2122757 - DNA, 25 bp, Homo sapien
tttgtcatggtggtgaattcctcca

SEQ ID NO: 2122758 - DNA, 25 bp, Homo sapien
catagtcaaatattacatatctaga

SEQ ID NO: 2122759 - DNA, 25 bp, Homo sapien
tagtcaaatattacatatctagaca

SEQ ID NO: 2122760 - DNA, 25 bp, Homo sapien
tttttgcagacatttacatagtcaa

SEQ ID NO: 2122761 - DNA, 25 bp, Homo sapien
tacatagtcaaatattacatatcta

SEQ ID NO: 2122762 - DNA, 25 bp, Homo sapien
ttgctgtctgaagttcaagaaccaa

SEQ ID NO: 2122763 - DNA, 25 bp, Homo sapien
ctaattctagctcttttatgttatc

SEQ ID NO: 2122764 - DNA, 25 bp, Homo sapien
ctgaagttcaagaaccaattcttcc

SEQ ID NO: 2122765 - DNA, 25 bp, Homo sapien
ccttttgcagattgatgacttctaa

SEQ ID NO: 2122766 - DNA, 25 bp, Homo sapien
ttagtttcagaagtttggactgctc

SEQ ID NO: 2122767 - DNA, 25 bp, Homo sapien
tcagaagtttggactgctcattcag

SEQ ID NO: 2122768 - DNA, 25 bp, Homo sapien
cgctctgtggattcctttagtttca

SEQ ID NO: 2122769 - DNA, 25 bp, Homo sapien
ttggagacagtacgctctgtggatt

SEQ ID NO: 2122770 - DNA, 25 bp, Homo sapien
cgcattaactgtacccgctggtttt

SEQ ID NO: 2122771 - DNA, 25 bp, Homo sapien
tctttcatttgacgcattaactgta

SEQ ID NO: 2122772 - DNA, 25 bp, Homo sapien
ttgacgcattaactgtacccgctgg

SEQ ID NO: 2122773 - DNA, 25 bp, Homo sapien
tcatttgacgcattaactgtacccg

SEQ ID NO: 2122774 - DNA, 25 bp, Homo sapien
gcagctcatattgcctcttacggtc

SEQ ID NO: 2122775 - DNA, 25 bp, Homo sapien
agcagctcatattgcctcttacggt

SEQ ID NO: 2122776 - DNA, 25 bp, Homo sapien
tttccgcttatctgcaacctcccgt

SEQ ID NO: 2122777 - DNA, 25 bp, Homo sapien
gcttatctgcaacctcccgttgttt

SEQ ID NO: 2122778 - DNA, 25 bp, Homo sapien
ttcactcgagctgcagtgccttcca

SEQ ID NO: 2122779 - DNA, 25 bp, Homo sapien
gcagtgccttccattccacggctct

SEQ ID NO: 2122780 - DNA, 25 bp, Homo sapien
aaaatgtcagtacctctcgaagagc

SEQ ID NO: 2122781 - DNA, 25 bp, Homo sapien
tcagatggcgtttggcttcctcagt

SEQ ID NO: 2122782 - DNA, 25 bp, Homo sapien
gatggcgtttggcttcctcagtact

SEQ ID NO: 2122783 - DNA, 25 bp, Homo sapien
tggcttcctcagtactgaccataac

SEQ ID NO: 2122784 - DNA, 25 bp, Homo sapien
cgtttggcttcctcagtactgacca

SEQ ID NO: 2122785 - DNA, 25 bp, Homo sapien
tccgaaacttgaccacgcacttcag

SEQ ID NO: 2122786 - DNA, 25 bp, Homo sapien
tgactccgaaacttgaccacgcact

SEQ ID NO: 2122787 - DNA, 25 bp, Homo sapien
gaccacgcacttcagtaagggagaa

SEQ ID NO: 2122788 - DNA, 25 bp, Homo sapien
acttgaccacgcacttcagtaaggg

SEQ ID NO: 2122789 - DNA, 25 bp, Homo sapien
tgataacccacttccatatgaccaa

SEQ ID NO: 2122790 - DNA, 25 bp, Homo sapien
ttagcagcgagggggttgtatacca

SEQ ID NO: 2122791 - DNA, 25 bp, Homo sapien
agtcaaatttagcagcgagggggtt

SEQ ID NO: 2122792 - DNA, 25 bp, Homo sapien
ttctgataacccacttccatatgac

SEQ ID NO: 2122793 - DNA, 25 bp, Homo sapien
ctcccagcgttgttttggtctgtct

SEQ ID NO: 2122794 - DNA, 25 bp, Homo sapien
caaaatgatttcgttcctcaaacag

SEQ ID NO: 2122795 - DNA, 25 bp, Homo sapien
gctgctttcaagtttgctgacctgt

SEQ ID NO: 2122796 - DNA, 25 bp, Homo sapien
ctgctttcaagtttgctgacctgta

SEQ ID NO: 2122797 - DNA, 25 bp, Homo sapien
tgctttcaagtttgctgacctgtat

SEQ ID NO: 2122798 - DNA, 25 bp, Homo sapien
gctgttccttttcactgactgattc

SEQ ID NO: 2122799 - DNA, 25 bp, Homo sapien
agctgctgattttgctcacacactt

SEQ ID NO: 2122800 - DNA, 25 bp, Homo sapien
aagctgctgattttgctcacacact

SEQ ID NO: 2122801 - DNA, 25 bp, Homo sapien
tctgtctgctggctacctggaggag

SEQ ID NO: 2122802 - DNA, 25 bp, Homo sapien
tctgaacaatattttagatcctcga

SEQ ID NO: 2122803 - DNA, 25 bp, Homo sapien
tagatcctcgatgtccatgctttgc

SEQ ID NO: 2122804 - DNA, 25 bp, Homo sapien
tttagatcctcgatgtccatgcttt

SEQ ID NO: 2122805 - DNA, 25 bp, Homo sapien
ctgaacaatattttagatcctcgat

SEQ ID NO: 2122806 - DNA, 25 bp, Homo sapien
ctccagcgtatctgagaccacaagc

SEQ ID NO: 2122807 - DNA, 25 bp, Homo sapien
tccagcgtatctgagaccacaagca

SEQ ID NO: 2122808 - DNA, 25 bp, Homo sapien
ggttccgacactttgtggggtcaca

SEQ ID NO: 2122809 - DNA, 25 bp, Homo sapien
ttccgacactttgtggggtcacagc

SEQ ID NO: 2122810 - DNA, 25 bp, Homo sapien
gctggcggttccgacactttgtggg

SEQ ID NO: 2122811 - DNA, 25 bp, Homo sapien
gcggttccgacactttgtggggtca

SEQ ID NO: 2122812 - DNA, 25 bp, Homo sapien
taaagaagctcaatcctggggtcac

SEQ ID NO: 2122813 - DNA, 25 bp, Homo sapien
tgaaggagccttcggaatcctgggt

SEQ ID NO: 2122814 - DNA, 25 bp, Homo sapien
gtttgaaggagccttcggaatcctg

SEQ ID NO: 2122815 - DNA, 25 bp, Homo sapien
acctcggtaggatcctccagtttga

SEQ ID NO: 2122816 - DNA, 25 bp, Homo sapien
agcacctgctccacatcgcacatct

SEQ ID NO: 2122817 - DNA, 25 bp, Homo sapien
gagtcttctttgacagcacctgctc

SEQ ID NO: 2122818 - DNA, 25 bp, Homo sapien
cctgctccacatcgcacatctcttt

SEQ ID NO: 2122819 - DNA, 25 bp, Homo sapien
ccacatcgcacatctctttcaggat

SEQ ID NO: 2122820 - DNA, 25 bp, Homo sapien
cttccctggagccttgttttcttgg

SEQ ID NO: 2122821 - DNA, 25 bp, Homo sapien
ggagatagcctgaactgctcacaaa

SEQ ID NO: 2122822 - DNA, 25 bp, Homo sapien
tcaggacaggaaagatcacaacctc

SEQ ID NO: 2122823 - DNA, 25 bp, Homo sapien
gaatgaaagatctaagccaggcctc

SEQ ID NO: 2122824 - DNA, 25 bp, Homo sapien
gctaaggcccacatccaacaaaggt

SEQ ID NO: 2122825 - DNA, 25 bp, Homo sapien
tctccctctagcacagaaggatctt

SEQ ID NO: 2122826 - DNA, 25 bp, Homo sapien
cactgttgccacctacaggaggctg

SEQ ID NO: 2122827 - DNA, 25 bp, Homo sapien
tttcagtcctcggttcagccctatg

SEQ ID NO: 2122828 - DNA, 25 bp, Homo sapien
tatgagtcaaacaggtggcactgtt

SEQ ID NO: 2122829 - DNA, 25 bp, Homo sapien
cagctcctctccgagtggtctgcct

SEQ ID NO: 2122830 - DNA, 25 bp, Homo sapien
cagctatacaggcagtggaggcagc

SEQ ID NO: 2122831 - DNA, 25 bp, Homo sapien
gggcccagacggagcagcagccggg

SEQ ID NO: 2122832 - DNA, 25 bp, Homo sapien
aggcagcgggcccagacggagcagc

SEQ ID NO: 2122833 - DNA, 25 bp, Homo sapien
atttcctccagtggcagctatacag

SEQ ID NO: 2122834 - DNA, 25 bp, Homo sapien
gcaggccaaaccagatacagtcgca

SEQ ID NO: 2122835 - DNA, 25 bp, Homo sapien
ttgagaaggacgagcccgatgtaca

SEQ ID NO: 2122836 - DNA, 25 bp, Homo sapien
cattgaagttgtgcaggtcattgag

SEQ ID NO: 2122837 - DNA, 25 bp, Homo sapien
gaagagcaggccaaaccagatacag

SEQ ID NO: 2122838 - DNA, 25 bp, Homo sapien
ggagcaggttgacaggtatgctggg

SEQ ID NO: 2122839 - DNA, 25 bp, Homo sapien
agcaggttgacaggtatgctgggga

SEQ ID NO: 2122840 - DNA, 25 bp, Homo sapien
gggagcaggttgacaggtatgctgg

SEQ ID NO: 2122841 - DNA, 25 bp, Homo sapien
gtggggagcaggttgacaggtatgc

SEQ ID NO: 2122842 - DNA, 25 bp, Homo sapien
caaggatgcatatgtgaccagtaga

SEQ ID NO: 2122843 - DNA, 25 bp, Homo sapien
gcaggaatgccagggaccagtccat

SEQ ID NO: 2122844 - DNA, 25 bp, Homo sapien
atatgtgaccagtagagagatgacc

SEQ ID NO: 2122845 - DNA, 25 bp, Homo sapien
caatagcaaggatgcatatgtgacc

SEQ ID NO: 2122846 - DNA, 25 bp, Homo sapien
gctgtctacaaagccgcaggagcag

SEQ ID NO: 2122847 - DNA, 25 bp, Homo sapien
gggctgtctacaaagccgcaggagc

SEQ ID NO: 2122848 - DNA, 25 bp, Homo sapien
gtgcagatgcaggggctgtctacaa

SEQ ID NO: 2122849 - DNA, 25 bp, Homo sapien
agatgcaggggctgtctacaaagcc

SEQ ID NO: 2122850 - DNA, 25 bp, Homo sapien
aaggccagccgccacaagcagcata

SEQ ID NO: 2122851 - DNA, 25 bp, Homo sapien
ctgcagtgacacacgcaagctatgc

SEQ ID NO: 2122852 - DNA, 25 bp, Homo sapien
gccattggatgtccagtcccacaag

SEQ ID NO: 2122853 - DNA, 25 bp, Homo sapien
gccacaagcagcataatgaggagca

SEQ ID NO: 2122854 - DNA, 25 bp, Homo sapien
ggagggcaattccagcggctgctcc

SEQ ID NO: 2122855 - DNA, 25 bp, Homo sapien
tccaatatgaaggaatggggctgtg

SEQ ID NO: 2122856 - DNA, 25 bp, Homo sapien
tgctccaatatgaaggaatggggct

SEQ ID NO: 2122857 - DNA, 25 bp, Homo sapien
aggccaggagggcaattccagcggc

SEQ ID NO: 2122858 - DNA, 25 bp, Homo sapien
taggagcagtagcagaatcttggga

SEQ ID NO: 2122859 - DNA, 25 bp, Homo sapien
caggacaactccaaaaaataggagc

SEQ ID NO: 2122860 - DNA, 25 bp, Homo sapien
ttgggtggtaagtctctgggttcca

SEQ ID NO: 2122861 - DNA, 25 bp, Homo sapien
cccaggcttgggtggtaagtctctg

SEQ ID NO: 2122862 - DNA, 25 bp, Homo sapien
tgaccatcacatcagtctcaaacac

SEQ ID NO: 2122863 - DNA, 25 bp, Homo sapien
cattcagctgtcttccgcaaggaca

SEQ ID NO: 2122864 - DNA, 25 bp, Homo sapien
aacacagtagctccgcattcagctg

SEQ ID NO: 2122865 - DNA, 25 bp, Homo sapien
ctgtcttccgcaaggacatcagggt

SEQ ID NO: 2122866 - DNA, 25 bp, Homo sapien
ttcagttcagtccaggagaagtcac

SEQ ID NO: 2122867 - DNA, 25 bp, Homo sapien
ggaaccaggatccagcattgagtct

SEQ ID NO: 2122868 - DNA, 25 bp, Homo sapien
ctgtgattcgggttgggaatacaga

SEQ ID NO: 2122869 - DNA, 25 bp, Homo sapien
ctgtgggctgtgattcgggttggga

SEQ ID NO: 2122870 - DNA, 25 bp, Homo sapien
gctcttctaatgctggtaccgtctg

SEQ ID NO: 2122871 - DNA, 25 bp, Homo sapien
tctttctgatcagggcctgccagcg

SEQ ID NO: 2122872 - DNA, 25 bp, Homo sapien
tcggcgcaagtcgaacatgatggaa

SEQ ID NO: 2122873 - DNA, 25 bp, Homo sapien
ccaatgtctggatcacaaaagtgtc

SEQ ID NO: 2122874 - DNA, 25 bp, Homo sapien
catcatcatggcctagggaaggcag

SEQ ID NO: 2122875 - DNA, 25 bp, Homo sapien
tgaccacagaatggggtatgtgagc

SEQ ID NO: 2122876 - DNA, 25 bp, Homo sapien
gacaggggcaaacagttttgaccac

SEQ ID NO: 2122877 - DNA, 25 bp, Homo sapien
taggggcagcctcaaaatcatcctc

SEQ ID NO: 2122878 - DNA, 25 bp, Homo sapien
tatatctggcgcattccaggtgccc

SEQ ID NO: 2122879 - DNA, 25 bp, Homo sapien
ccaatagtggcagatcttgataggg

SEQ ID NO: 2122880 - DNA, 25 bp, Homo sapien
tccctgacgtccatatatctggcgc

SEQ ID NO: 2122881 - DNA, 25 bp, Homo sapien
cgttggacattagcccgatcttcat

SEQ ID NO: 2122882 - DNA, 25 bp, Homo sapien
caccgagacattatccttatgcaat

SEQ ID NO: 2122883 - DNA, 25 bp, Homo sapien
aataggttcaccgagacattatcct

SEQ ID NO: 2122884 - DNA, 25 bp, Homo sapien
cactacaaataggttcaccgagaca

SEQ ID NO: 2122885 - DNA, 25 bp, Homo sapien
tgttcactacaaataggttcaccga

SEQ ID NO: 2122886 - DNA, 25 bp, Homo sapien
aataagccagatagggtaacgcatc

SEQ ID NO: 2122887 - DNA, 25 bp, Homo sapien
gatagggtaacgcatctgctgcagc

SEQ ID NO: 2122888 - DNA, 25 bp, Homo sapien
agctggcagtcgttggtggtgaccg

SEQ ID NO: 2122889 - DNA, 25 bp, Homo sapien
tcgttggtggtgaccgaatccaccc

SEQ ID NO: 2122890 - DNA, 25 bp, Homo sapien
ccatatgattaggtaggtttgaggg

SEQ ID NO: 2122891 - DNA, 25 bp, Homo sapien
cacaaaagcagcatggtggaaacac

SEQ ID NO: 2122892 - DNA, 25 bp, Homo sapien
aattgttgatccttgtcagcagcac

SEQ ID NO: 2122893 - DNA, 25 bp, Homo sapien
aaattgttgatccttgtcagcagca

SEQ ID NO: 2122894 - DNA, 25 bp, Homo sapien
catgaaattgttgatccttgtcagc

SEQ ID NO: 2122895 - DNA, 25 bp, Homo sapien
ccatcatgaaattgttgatccttgt

SEQ ID NO: 2122896 - DNA, 25 bp, Homo sapien
ggccctcatggttcaaaacctcctg

SEQ ID NO: 2122897 - DNA, 25 bp, Homo sapien
catctcaggtcaaaaccccaaaggg

SEQ ID NO: 2122898 - DNA, 25 bp, Homo sapien
tgtttgggcaatgtagactggcttg

SEQ ID NO: 2122899 - DNA, 25 bp, Homo sapien
tccatagcagcttagggaatgccca

SEQ ID NO: 2122900 - DNA, 25 bp, Homo sapien
gaagaaaaggctgcgcacagcaaaa

SEQ ID NO: 2122901 - DNA, 25 bp, Homo sapien
aaggctgcgcacagcaaaaagccac

SEQ ID NO: 2122902 - DNA, 25 bp, Homo sapien
aaaggctgcgcacagcaaaaagcca

SEQ ID NO: 2122903 - DNA, 25 bp, Homo sapien
ttgaagaaaaggctgcgcacagcaa

SEQ ID NO: 2122904 - DNA, 25 bp, Homo sapien
ctgggccggaaattggaccctgcgc

SEQ ID NO: 2122905 - DNA, 25 bp, Homo sapien
gcagcccagaggagcgaaaacttgt

SEQ ID NO: 2122906 - DNA, 25 bp, Homo sapien
ttgtggaaatcggaccttgccctcg

SEQ ID NO: 2122907 - DNA, 25 bp, Homo sapien
actcccgagccgcaaacacattggg

SEQ ID NO: 2122908 - DNA, 25 bp, Homo sapien
cttccctccgtgtggagatacgaac

SEQ ID NO: 2122909 - DNA, 25 bp, Homo sapien
tacgaactaggtcgaatgtgggtgt

SEQ ID NO: 2122910 - DNA, 25 bp, Homo sapien
tactagactcttcatcctccgtcag

SEQ ID NO: 2122911 - DNA, 25 bp, Homo sapien
tggccgactccttagttctacttcc

SEQ ID NO: 2122912 - DNA, 25 bp, Homo sapien
ttaaaccgctttagctgtccagttc

SEQ ID NO: 2122913 - DNA, 25 bp, Homo sapien
ctataggttaaaccgctttagctgt

SEQ ID NO: 2122914 - DNA, 25 bp, Homo sapien
aggttaaaccgctttagctgtccag

SEQ ID NO: 2122915 - DNA, 25 bp, Homo sapien
aaaccgctttagctgtccagttctc

SEQ ID NO: 2122916 - DNA, 25 bp, Homo sapien
tatataatgtccagagttttagctg

SEQ ID NO: 2122917 - DNA, 25 bp, Homo sapien
gaagagtgccagtcaattgttttgg

SEQ ID NO: 2122918 - DNA, 25 bp, Homo sapien
acagtactctccctcttattcatgg

SEQ ID NO: 2122919 - DNA, 25 bp, Homo sapien
tactctaactgggtccataactgga

SEQ ID NO: 2122920 - DNA, 25 bp, Homo sapien
aagaagcgggagctcaagcagagaa

SEQ ID NO: 2122921 - DNA, 25 bp, Homo sapien
tccgtgtcgcccgtcgtggcttctg

SEQ ID NO: 2122922 - DNA, 25 bp, Homo sapien
actcacactgctcggaccaagaagg

SEQ ID NO: 2122923 - DNA, 25 bp, Homo sapien
gagaatgggtgctgtgaggaccgct

SEQ ID NO: 2122924 - DNA, 25 bp, Homo sapien
gctcttgcccgggactggcttagga

SEQ ID NO: 2122925 - DNA, 25 bp, Homo sapien
tcatagcactcagggcacttacagc

SEQ ID NO: 2122926 - DNA, 25 bp, Homo sapien
ggcaaggtctgcgagctgtagcccc

SEQ ID NO: 2122927 - DNA, 25 bp, Homo sapien
taccagtcccggttggtacaggtgc

SEQ ID NO: 2122928 - DNA, 25 bp, Homo sapien
cttcagtgtctcagggttcactagg

SEQ ID NO: 2122929 - DNA, 25 bp, Homo sapien
agtgtctcagggttcactaggaggg

SEQ ID NO: 2122930 - DNA, 25 bp, Homo sapien
tgtgcttcagtgtctcagggttcac

SEQ ID NO: 2122931 - DNA, 25 bp, Homo sapien
aggctgtgcttcagtgtctcagggt

SEQ ID NO: 2122932 - DNA, 25 bp, Homo sapien
ctcaagtacgatttcctcatatttg

SEQ ID NO: 2122933 - DNA, 25 bp, Homo sapien
catatttgaacatgccatcactgcc

SEQ ID NO: 2122934 - DNA, 25 bp, Homo sapien
tcatatttgaacatgccatcactgc

SEQ ID NO: 2122935 - DNA, 25 bp, Homo sapien
cctctcaagtacgatttcctcatat

SEQ ID NO: 2122936 - DNA, 25 bp, Homo sapien
tgggtggaaaggcacagtctgttca

SEQ ID NO: 2122937 - DNA, 25 bp, Homo sapien
gaagtgggtggaaaggcacagtctg

SEQ ID NO: 2122938 - DNA, 25 bp, Homo sapien
ctgcagaagtgggtggaaaggcaca

SEQ ID NO: 2122939 - DNA, 25 bp, Homo sapien
cagaagtgggtggaaaggcacagtc

SEQ ID NO: 2122940 - DNA, 25 bp, Homo sapien
tccaccagggataatcttggtaata

SEQ ID NO: 2122941 - DNA, 25 bp, Homo sapien
caccagggataatcttggtaataaa

SEQ ID NO: 2122942 - DNA, 25 bp, Homo sapien
gggattgtcgatgccacctgcgata

SEQ ID NO: 2122943 - DNA, 25 bp, Homo sapien
tcatcagggacatggggattgtcga

SEQ ID NO: 2122944 - DNA, 25 bp, Homo sapien
cattcacccgcagcacacagtcatt

SEQ ID NO: 2122945 - DNA, 25 bp, Homo sapien
ggtggaggctgtcgcctccgcacca

SEQ ID NO: 2122946 - DNA, 25 bp, Homo sapien
ggttgacctccatgatggtctcggg

SEQ ID NO: 2122947 - DNA, 25 bp, Homo sapien
ctttgggccctttgagcaggttgac

SEQ ID NO: 2122948 - DNA, 25 bp, Homo sapien
tgttgtcgatcccaaatccaaaccc

SEQ ID NO: 2122949 - DNA, 25 bp, Homo sapien
gttaaagtgttgtcgatcccaaatc

SEQ ID NO: 2122950 - DNA, 25 bp, Homo sapien
cccgggggatccaaacgctaagctg

SEQ ID NO: 2122951 - DNA, 25 bp, Homo sapien
gggatccaaacgctaagctgccatc

SEQ ID NO: 2122952 - DNA, 25 bp, Homo sapien
taggcgtccatccttctgagcagca

SEQ ID NO: 2122953 - DNA, 25 bp, Homo sapien
cagccggtccccaatctgtaggcgt

SEQ ID NO: 2122954 - DNA, 25 bp, Homo sapien
agcacccccctcaatgatcttggtg

SEQ ID NO: 2122955 - DNA, 25 bp, Homo sapien
tgggatgtgctggttgccaataccc

SEQ ID NO: 2122956 - DNA, 25 bp, Homo sapien
accatttgggcatccccatgaagtc

SEQ ID NO: 2122957 - DNA, 25 bp, Homo sapien
tgggcatccccatgaagtctgtctc

SEQ ID NO: 2122958 - DNA, 25 bp, Homo sapien
ttgggcatccccatgaagtctgtct

SEQ ID NO: 2122959 - DNA, 25 bp, Homo sapien
atttgggcatccccatgaagtctgt

SEQ ID NO: 2122960 - DNA, 25 bp, Homo sapien
gatgtgttcttcagtgaggccacag

SEQ ID NO: 2122961 - DNA, 25 bp, Homo sapien
catcctgcagattggtgttgttcac

SEQ ID NO: 2122962 - DNA, 25 bp, Homo sapien
ggagcgtacatgtcgttgaggtgga

SEQ ID NO: 2122963 - DNA, 25 bp, Homo sapien
tacatgtcgttgaggtggaggctgc

SEQ ID NO: 2122964 - DNA, 25 bp, Homo sapien
tgccaatgctgactctatggcaagt

SEQ ID NO: 2122965 - DNA, 25 bp, Homo sapien
cctcagataaaccttattggctgct

SEQ ID NO: 2122966 - DNA, 25 bp, Homo sapien
cacgatggggtactgagcaaagttt

SEQ ID NO: 2122967 - DNA, 25 bp, Homo sapien
ttattggctgctacagtgccaccac

SEQ ID NO: 2122968 - DNA, 25 bp, Homo sapien
taataatccctcacatctctatagc

SEQ ID NO: 2122969 - DNA, 25 bp, Homo sapien
cttgcagcagtcctatgaggaaggc

SEQ ID NO: 2122970 - DNA, 25 bp, Homo sapien
taatccctcacatctctatagccta

SEQ ID NO: 2122971 - DNA, 25 bp, Homo sapien
ggaaggcagcacatacatcattagc

SEQ ID NO: 2122972 - DNA, 25 bp, Homo sapien
gcatgtgcctgggaataggagagta

SEQ ID NO: 2122973 - DNA, 25 bp, Homo sapien
tatggcttatgtggttgtcagccaa

SEQ ID NO: 2122974 - DNA, 25 bp, Homo sapien
aggagcagggtagctgaccttgctc

SEQ ID NO: 2122975 - DNA, 25 bp, Homo sapien
ccacagccccgagataacccaggct

SEQ ID NO: 2122976 - DNA, 25 bp, Homo sapien
accgggccggtcagagtcccgccag

SEQ ID NO: 2122977 - DNA, 25 bp, Homo sapien
ttgaaatggttgcagcagagcgggc

SEQ ID NO: 2122978 - DNA, 25 bp, Homo sapien
cagcagagcgggctgcaactatctc

SEQ ID NO: 2122979 - DNA, 25 bp, Homo sapien
gcaactatctcagggcaggaaactc

SEQ ID NO: 2122980 - DNA, 25 bp, Homo sapien
ggccaagccggagcccgagaacttg

SEQ ID NO: 2122981 - DNA, 25 bp, Homo sapien
cggagcccgagaacttgcgggccct

SEQ ID NO: 2122982 - DNA, 25 bp, Homo sapien
cacctctgcgaagccctcctccagg

SEQ ID NO: 2122983 - DNA, 25 bp, Homo sapien
caagccggagcccgagaacttgcgg

SEQ ID NO: 2122984 - DNA, 25 bp, Homo sapien
tttgtgcaggatgatcttgcgaggc

SEQ ID NO: 2122985 - DNA, 25 bp, Homo sapien
ataagatccggtctcccctgcgcag

SEQ ID NO: 2122986 - DNA, 25 bp, Homo sapien
tcctctcctcctacgatgttgaagc

SEQ ID NO: 2122987 - DNA, 25 bp, Homo sapien
ttgtgcaggatgatcttgcgaggct

SEQ ID NO: 2122988 - DNA, 25 bp, Homo sapien
cttcaggtctgtactgggccacaat

SEQ ID NO: 2122989 - DNA, 25 bp, Homo sapien
actggccggcccgtttcagagcagc

SEQ ID NO: 2122990 - DNA, 25 bp, Homo sapien
gcagcctgctcatgagttgcattcc

SEQ ID NO: 2122991 - DNA, 25 bp, Homo sapien
ccacaatggtgactgactggccggc

SEQ ID NO: 2122992 - DNA, 25 bp, Homo sapien
tccagatctagtgctgagaaagcgc

SEQ ID NO: 2122993 - DNA, 25 bp, Homo sapien
ccgggtcggagtccagatctagtgc

SEQ ID NO: 2122994 - DNA, 25 bp, Homo sapien
cgcgggagaccacggacacaaagcg

SEQ ID NO: 2122995 - DNA, 25 bp, Homo sapien
tagtgctgagaaagcgccagctccg

SEQ ID NO: 2122996 - DNA, 25 bp, Homo sapien
ttccatccctttcggcttggcgacg

SEQ ID NO: 2122997 - DNA, 25 bp, Homo sapien
ctctcatcgcggaaatagagcacct

SEQ ID NO: 2122998 - DNA, 25 bp, Homo sapien
aggacaaaggtaggcgctttccatc

SEQ ID NO: 2122999 - DNA, 25 bp, Homo sapien
tagtaatcggcccacagggcctagg

SEQ ID NO: 2123000 - DNA, 25 bp, Homo sapien
cctcgatcagaagagcctcgtggaa

SEQ ID NO: 2123001 - DNA, 25 bp, Homo sapien
gaagagcctcgtggaaaaggtcgca

SEQ ID NO: 2123002 - DNA, 25 bp, Homo sapien
tcgtggaaaaggtcgcaggctctct

SEQ ID NO: 2123003 - DNA, 25 bp, Homo sapien
cctgcacttctgtcctcgatcagaa

SEQ ID NO: 2123004 - DNA, 25 bp, Homo sapien
ctcagaccaacaagctctctctcct

SEQ ID NO: 2123005 - DNA, 25 bp, Homo sapien
agaccaacaagctctctctcctgtg

SEQ ID NO: 2123006 - DNA, 25 bp, Homo sapien
aacaagctctctctcctgtgagtta

SEQ ID NO: 2123007 - DNA, 25 bp, Homo sapien
acaagctctctctcctgtgagttac

SEQ ID NO: 2123008 - DNA, 25 bp, Homo sapien
ctaaggtgcgttcctgatcagtaag

SEQ ID NO: 2123009 - DNA, 25 bp, Homo sapien
caggtggtgggtacacttgataaga

SEQ ID NO: 2123010 - DNA, 25 bp, Homo sapien
gcagctcagggtaaaagcctcaata

SEQ ID NO: 2123011 - DNA, 25 bp, Homo sapien
gagtctttggctcttgcaacccata

SEQ ID NO: 2123012 - DNA, 25 bp, Homo sapien
gatcttgccttctcacctattccgg

SEQ ID NO: 2123013 - DNA, 25 bp, Homo sapien
tcacagccagcctatctatcccaca

SEQ ID NO: 2123014 - DNA, 25 bp, Homo sapien
gccagcctatctatcccacatctga

SEQ ID NO: 2123015 - DNA, 25 bp, Homo sapien
gaccccttgaatacagcttgttcag

SEQ ID NO: 2123016 - DNA, 25 bp, Homo sapien
gcctggaccccttgaatacagcttg

SEQ ID NO: 2123017 - DNA, 25 bp, Homo sapien
aactttcaaggactgctacaaccat

SEQ ID NO: 2123018 - DNA, 25 bp, Homo sapien
ttttactatgtcagccaaactttca

SEQ ID NO: 2123019 - DNA, 25 bp, Homo sapien
gccaaactttcaaggactgctacaa

SEQ ID NO: 2123020 - DNA, 25 bp, Homo sapien
tgtcagccaaactttcaaggactgc

SEQ ID NO: 2123021 - DNA, 25 bp, Homo sapien
actgctgtacctccctaactggtct

SEQ ID NO: 2123022 - DNA, 25 bp, Homo sapien
tcctaaagcttgaatttgtagcccc

SEQ ID NO: 2123023 - DNA, 25 bp, Homo sapien
tgccccaaggctttacaaactcaat

SEQ ID NO: 2123024 - DNA, 25 bp, Homo sapien
cctgtccaagtatctataacgactc

SEQ ID NO: 2123025 - DNA, 25 bp, Homo sapien
ggcggctgattaacaactttttaca

SEQ ID NO: 2123026 - DNA, 25 bp, Homo sapien
tgttaacaacccacaataggcggct

SEQ ID NO: 2123027 - DNA, 25 bp, Homo sapien
gaaaggtggttaagaagcattcaca

SEQ ID NO: 2123028 - DNA, 25 bp, Homo sapien
gatttatctaaagtctactaggcag

SEQ ID NO: 2123029 - DNA, 25 bp, Homo sapien
cagaaccgtgtgagacaaagatttc

SEQ ID NO: 2123030 - DNA, 25 bp, Homo sapien
tgggcagaaccgtgtgagacaaaga

SEQ ID NO: 2123031 - DNA, 25 bp, Homo sapien
ctatgggcagaaccgtgtgagacaa

SEQ ID NO: 2123032 - DNA, 25 bp, Homo sapien
cggctatgggcagaaccgtgtgaga

SEQ ID NO: 2123033 - DNA, 25 bp, Homo sapien
gttcatcatttgttctcgtaagtca

SEQ ID NO: 2123034 - DNA, 25 bp, Homo sapien
tttcacttgttcggagggacccaga

SEQ ID NO: 2123035 - DNA, 25 bp, Homo sapien
cgtaagtcatgtatcttcgattcaa

SEQ ID NO: 2123036 - DNA, 25 bp, Homo sapien
tatcttcgattcaaagcgactgtat

SEQ ID NO: 2123037 - DNA, 25 bp, Homo sapien
ggttagcttagcaaagggcctcagc

SEQ ID NO: 2123038 - DNA, 25 bp, Homo sapien
gccataagacattaagtgcccctga

SEQ ID NO: 2123039 - DNA, 25 bp, Homo sapien
gaaccaagtgtagagtgaagggcca

SEQ ID NO: 2123040 - DNA, 25 bp, Homo sapien
tcgccccagagttaagctaagtgta

SEQ ID NO: 2123041 - DNA, 25 bp, Homo sapien
ttacttcagatgaggaacacgtttg

SEQ ID NO: 2123042 - DNA, 25 bp, Homo sapien
tacttcagatgaggaacacgtttgg

SEQ ID NO: 2123043 - DNA, 25 bp, Homo sapien
ttcagatgaggaacacgtttggttc

SEQ ID NO: 2123044 - DNA, 25 bp, Homo sapien
gatgaggaacacgtttggttctaag

SEQ ID NO: 2123045 - DNA, 25 bp, Homo sapien
gtgaaagatgaagtgatcatccaac

SEQ ID NO: 2123046 - DNA, 25 bp, Homo sapien
gaaagatgaagtgatcatccaaccc

SEQ ID NO: 2123047 - DNA, 25 bp, Homo sapien
accctaaatgccaagacactggcac

SEQ ID NO: 2123048 - DNA, 25 bp, Homo sapien
aagatgaagtgatcatccaacccta

SEQ ID NO: 2123049 - DNA, 25 bp, Homo sapien
gatctgctcactttctccgtgtggg

SEQ ID NO: 2123050 - DNA, 25 bp, Homo sapien
gacatgcagaatgtcaccataagag

SEQ ID NO: 2123051 - DNA, 25 bp, Homo sapien
gagtccgatcataatcaaacagggc

SEQ ID NO: 2123052 - DNA, 25 bp, Homo sapien
gtgtggggtcaccagccttgcctgc

SEQ ID NO: 2123053 - DNA, 25 bp, Homo sapien
ccttgctcatgatcatgacgactca

SEQ ID NO: 2123054 - DNA, 25 bp, Homo sapien
gttgctctcaagcaacttctaatag

SEQ ID NO: 2123055 - DNA, 25 bp, Homo sapien
aaaccatgttgagtaccgactctac

SEQ ID NO: 2123056 - DNA, 25 bp, Homo sapien
aaggaatcaaggcacaaacgttgct

SEQ ID NO: 2123057 - DNA, 25 bp, Homo sapien
tgttagactcaatcatccccgtcct

SEQ ID NO: 2123058 - DNA, 25 bp, Homo sapien
tcaatcatccccgtcctggcatgga

SEQ ID NO: 2123059 - DNA, 25 bp, Homo sapien
cccgtcctggcatggaacttcacag

SEQ ID NO: 2123060 - DNA, 25 bp, Homo sapien
cacagttttcaatcgagctctttct

SEQ ID NO: 2123061 - DNA, 25 bp, Homo sapien
cacatcagactaaactccaggcttc

SEQ ID NO: 2123062 - DNA, 25 bp, Homo sapien
caaccctctttacctactggctgat

SEQ ID NO: 2123063 - DNA, 25 bp, Homo sapien
gctgtgaactttaagagctccctct

SEQ ID NO: 2123064 - DNA, 25 bp, Homo sapien
aatgttctgataggacagagccagc

SEQ ID NO: 2123065 - DNA, 25 bp, Homo sapien
tggaaactttcgagagaggcggaaa

SEQ ID NO: 2123066 - DNA, 25 bp, Homo sapien
aatggaaactttcgagagaggcgga

SEQ ID NO: 2123067 - DNA, 25 bp, Homo sapien
actttcgagagaggcggaaactctt

SEQ ID NO: 2123068 - DNA, 25 bp, Homo sapien
tgtaaaatggaaactttcgagagag

SEQ ID NO: 2123069 - DNA, 25 bp, Homo sapien
aggttaaggttggagcagttaattg

SEQ ID NO: 2123070 - DNA, 25 bp, Homo sapien
tctttgctccataataatcgtcact

SEQ ID NO: 2123071 - DNA, 25 bp, Homo sapien
gttctttgctccataataatcgtca

SEQ ID NO: 2123072 - DNA, 25 bp, Homo sapien
tgctccataataatcgtcacttaac

SEQ ID NO: 2123073 - DNA, 25 bp, Homo sapien
cataataatcgtcacttaaccccgg

SEQ ID NO: 2123074 - DNA, 25 bp, Homo sapien
ccactatctccattcatgccacaag

SEQ ID NO: 2123075 - DNA, 25 bp, Homo sapien
cagtgaacggtgtgtaagttggact

SEQ ID NO: 2123076 - DNA, 25 bp, Homo sapien
cacaagtacagtgaacggtgtgtaa

SEQ ID NO: 2123077 - DNA, 25 bp, Homo sapien
tcatgccacaagtacagtgaacggt

SEQ ID NO: 2123078 - DNA, 25 bp, Homo sapien
tggatggtttccaaatcgtatttca

SEQ ID NO: 2123079 - DNA, 25 bp, Homo sapien
cagagccctcttggtctgccaagtc

SEQ ID NO: 2123080 - DNA, 25 bp, Homo sapien
caagtccctccctatgtactacaag

SEQ ID NO: 2123081 - DNA, 25 bp, Homo sapien
tcatctgaatcaaattgacctggat

SEQ ID NO: 2123082 - DNA, 25 bp, Homo sapien
gccaccagaggcctgccacatccag

SEQ ID NO: 2123083 - DNA, 25 bp, Homo sapien
gagctgccaactgagtcaggccacc

SEQ ID NO: 2123084 - DNA, 25 bp, Homo sapien
gactccaattcagaacacaccactg

SEQ ID NO: 2123085 - DNA, 25 bp, Homo sapien
caaaactcaaatgctccaggagcga

SEQ ID NO: 2123086 - DNA, 25 bp, Homo sapien
gaactgctttcgctgtcactggtgt

SEQ ID NO: 2123087 - DNA, 25 bp, Homo sapien
aactgctttcgctgtcactggtgtt

SEQ ID NO: 2123088 - DNA, 25 bp, Homo sapien
cgtgtcactggctcatatgacaaaa

SEQ ID NO: 2123089 - DNA, 25 bp, Homo sapien
gtcactggctcatatgacaaaatag

SEQ ID NO: 2123090 - DNA, 25 bp, Homo sapien
tggctcatatgacaaaatagcatcc

SEQ ID NO: 2123091 - DNA, 25 bp, Homo sapien
cactggctcatatgacaaaatagca

SEQ ID NO: 2123092 - DNA, 25 bp, Homo sapien
cggtccttcattgggcccaggatga

SEQ ID NO: 2123093 - DNA, 25 bp, Homo sapien
ttgactcggtccttcattgggccca

SEQ ID NO: 2123094 - DNA, 25 bp, Homo sapien
gatcaggtcatcattgactcggtcc

SEQ ID NO: 2123095 - DNA, 25 bp, Homo sapien
tttatgtggaaattcggagatcagg

SEQ ID NO: 2123096 - DNA, 25 bp, Homo sapien
ccataaaacattagagcaacaattc

SEQ ID NO: 2123097 - DNA, 25 bp, Homo sapien
ataaaacattagagcaacaattccc

SEQ ID NO: 2123098 - DNA, 25 bp, Homo sapien
cataaaacattagagcaacaattcc

SEQ ID NO: 2123099 - DNA, 25 bp, Homo sapien
aaaaatactgactggtccattctca

SEQ ID NO: 2123100 - DNA, 25 bp, Homo sapien
gcagtgatccgccccaaaccaaaaa

SEQ ID NO: 2123101 - DNA, 25 bp, Homo sapien
aggggcagtgatccgccccaaacca

SEQ ID NO: 2123102 - DNA, 25 bp, Homo sapien
aatactgactggtccattctcatct

SEQ ID NO: 2123103 - DNA, 25 bp, Homo sapien
tgcaactgcccgcactgactggatg

SEQ ID NO: 2123104 - DNA, 25 bp, Homo sapien
tcattatcacgtcgaggccgggtag

SEQ ID NO: 2123105 - DNA, 25 bp, Homo sapien
tggcccgcctcgatgaacttgttgt

SEQ ID NO: 2123106 - DNA, 25 bp, Homo sapien
tgttctcgggacaccacaaagtggt

SEQ ID NO: 2123107 - DNA, 25 bp, Homo sapien
gacagatagcttcgtcaaggcgctg

SEQ ID NO: 2123108 - DNA, 25 bp, Homo sapien
caagtcccaagcagaaatccagtga

SEQ ID NO: 2123109 - DNA, 25 bp, Homo sapien
cagatgtgctatggctttggtcagc

SEQ ID NO: 2123110 - DNA, 25 bp, Homo sapien
tcgatctctgaagtagacaggccct

SEQ ID NO: 2123111 - DNA, 25 bp, Homo sapien
aatggcaatggggtaaagttgtgct

SEQ ID NO: 2123112 - DNA, 25 bp, Homo sapien
cttgatagcattgccggaaacatct

SEQ ID NO: 2123113 - DNA, 25 bp, Homo sapien
cagtctcttgatagcattgccggaa

SEQ ID NO: 2123114 - DNA, 25 bp, Homo sapien
gctgcagtctcttgatagcattgcc

SEQ ID NO: 2123115 - DNA, 25 bp, Homo sapien
ctttgtcatagatcttatttgcttg

SEQ ID NO: 2123116 - DNA, 25 bp, Homo sapien
gctttgtcatagatcttatttgctt

SEQ ID NO: 2123117 - DNA, 25 bp, Homo sapien
ggctttgtcatagatcttatttgct

SEQ ID NO: 2123118 - DNA, 25 bp, Homo sapien
taaatctcttccagtgagtcaccct

SEQ ID NO: 2123119 - DNA, 25 bp, Homo sapien
ttcaggggatgggacccaaatgtag

SEQ ID NO: 2123120 - DNA, 25 bp, Homo sapien
ttataaatctcttccagtgagtcac

SEQ ID NO: 2123121 - DNA, 25 bp, Homo sapien
tcaggggatgggacccaaatgtagt

SEQ ID NO: 2123122 - DNA, 25 bp, Homo sapien
aacaataggcaattccacgcggagc

SEQ ID NO: 2123123 - DNA, 25 bp, Homo sapien
gagaatgaccaaatgcgagtgccct

SEQ ID NO: 2123124 - DNA, 25 bp, Homo sapien
gcacctgtgctagcgcttgggaaag

SEQ ID NO: 2123125 - DNA, 25 bp, Homo sapien
ccaaccagctgggatagaagatgcc

SEQ ID NO: 2123126 - DNA, 25 bp, Homo sapien
cagtaagcgaatcttagctctacag

SEQ ID NO: 2123127 - DNA, 25 bp, Homo sapien
gaatcttagctctacagctcaaatg

SEQ ID NO: 2123128 - DNA, 25 bp, Homo sapien
tgtacagcataaagtctactttcct

SEQ ID NO: 2123129 - DNA, 25 bp, Homo sapien
gctctacagctcaaatgtacagcat

SEQ ID NO: 2123130 - DNA, 25 bp, Homo sapien
tgggaaaaagcaacaaggtttcaca

SEQ ID NO: 2123131 - DNA, 25 bp, Homo sapien
aaaagcaacaaggtttcacagctca

SEQ ID NO: 2123132 - DNA, 25 bp, Homo sapien
gaaaaagcaacaaggtttcacagct

SEQ ID NO: 2123133 - DNA, 25 bp, Homo sapien
aaagcaacaaggtttcacagctcac

SEQ ID NO: 2123134 - DNA, 25 bp, Homo sapien
gcctgcacttgtggcggtgaagatt

SEQ ID NO: 2123135 - DNA, 25 bp, Homo sapien
gtgaagattcccttgatcacagtca

SEQ ID NO: 2123136 - DNA, 25 bp, Homo sapien
cttgtggcggtgaagattcccttga

SEQ ID NO: 2123137 - DNA, 25 bp, Homo sapien
tgctgcctgcacttgtggcggtgaa

SEQ ID NO: 2123138 - DNA, 25 bp, Homo sapien
cacgttggcttcaaaggagcacagt

SEQ ID NO: 2123139 - DNA, 25 bp, Homo sapien
tcccctgcgtcgtccctccagtatg

SEQ ID NO: 2123140 - DNA, 25 bp, Homo sapien
gcgagggaggcacgttggcttcaaa

SEQ ID NO: 2123141 - DNA, 25 bp, Homo sapien
ctccagtatggaggcgagggaggca

SEQ ID NO: 2123142 - DNA, 25 bp, Homo sapien
acagagttcccggattcggctggta

SEQ ID NO: 2123143 - DNA, 25 bp, Homo sapien
caagtgcctcaatcctagggccaag

SEQ ID NO: 2123144 - DNA, 25 bp, Homo sapien
cagccctaacccagcgggctaggaa

SEQ ID NO: 2123145 - DNA, 25 bp, Homo sapien
tcggctggtagtgcttaaagcatcc

SEQ ID NO: 2123146 - DNA, 25 bp, Homo sapien
cagagtcacagtcggctgtcacttt

SEQ ID NO: 2123147 - DNA, 25 bp, Homo sapien
gggtcccatgctttatacagttagc

SEQ ID NO: 2123148 - DNA, 25 bp, Homo sapien
tcaagccattgtactgcccagggaa

SEQ ID NO: 2123149 - DNA, 25 bp, Homo sapien
gctgtcactttatccctttttgcct

SEQ ID NO: 2123150 - DNA, 25 bp, Homo sapien
atcagagaatcaacctccctgctca

SEQ ID NO: 2123151 - DNA, 25 bp, Homo sapien
tgagcacggttgagactttgccact

SEQ ID NO: 2123152 - DNA, 25 bp, Homo sapien
cggttgagactttgccacttagtta

SEQ ID NO: 2123153 - DNA, 25 bp, Homo sapien
ggctgagcacggttgagactttgcc

SEQ ID NO: 2123154 - DNA, 25 bp, Homo sapien
ccactagtatcatgcttactttgaa

SEQ ID NO: 2123155 - DNA, 25 bp, Homo sapien
ctggtaaacccactagtatcatgct

SEQ ID NO: 2123156 - DNA, 25 bp, Homo sapien
ggtaaacccactagtatcatgctta

SEQ ID NO: 2123157 - DNA, 25 bp, Homo sapien
aacactggtaaacccactagtatca

SEQ ID NO: 2123158 - DNA, 25 bp, Homo sapien
ggtggaagaccaagcacacaacttt

SEQ ID NO: 2123159 - DNA, 25 bp, Homo sapien
tactttaagaaggtctctgagccac

SEQ ID NO: 2123160 - DNA, 25 bp, Homo sapien
cacaactttcacaaagggcctgtca

SEQ ID NO: 2123161 - DNA, 25 bp, Homo sapien
tcatcactaaggagagagccctctg

SEQ ID NO: 2123162 - DNA, 25 bp, Homo sapien
ctcccaccttgtgtacctcttggga

SEQ ID NO: 2123163 - DNA, 25 bp, Homo sapien
tcccatctggttggtgctatttgaa

SEQ ID NO: 2123164 - DNA, 25 bp, Homo sapien
tcccaccttgtgtacctcttgggaa

SEQ ID NO: 2123165 - DNA, 25 bp, Homo sapien
tgtggactcccatctggttggtgct

SEQ ID NO: 2123166 - DNA, 25 bp, Homo sapien
tgtgaagacagagcctcaacagtgt

SEQ ID NO: 2123167 - DNA, 25 bp, Homo sapien
gactcctccgcacaagttgcaatgg

SEQ ID NO: 2123168 - DNA, 25 bp, Homo sapien
aaacactggtagctggcaggtcact

SEQ ID NO: 2123169 - DNA, 25 bp, Homo sapien
gaatgtgggaaagcaagcaacctgc

SEQ ID NO: 2123170 - DNA, 25 bp, Homo sapien
tgtacctccactaggagaacatcag

SEQ ID NO: 2123171 - DNA, 25 bp, Homo sapien
caaaaccaggaggagatagggctct

SEQ ID NO: 2123172 - DNA, 25 bp, Homo sapien
agcacagcacggcagtgttaagggt

SEQ ID NO: 2123173 - DNA, 25 bp, Homo sapien
acggcagtgttaagggtgtgtctcc

SEQ ID NO: 2123174 - DNA, 25 bp, Homo sapien
atttattcatgggtagaccataagg

SEQ ID NO: 2123175 - DNA, 25 bp, Homo sapien
tcttcctctgttagagatgaaggag

SEQ ID NO: 2123176 - DNA, 25 bp, Homo sapien
taaggtttgataatacagttcttcc

SEQ ID NO: 2123177 - DNA, 25 bp, Homo sapien
gatgaaggagtcaaggcatgatcag

SEQ ID NO: 2123178 - DNA, 25 bp, Homo sapien
catgcttggaaggtaatggctggtc

SEQ ID NO: 2123179 - DNA, 25 bp, Homo sapien
taaacgagtgatggtagtaaaggag

SEQ ID NO: 2123180 - DNA, 25 bp, Homo sapien
gagcagagcgggtaaaaggttcaac

SEQ ID NO: 2123181 - DNA, 25 bp, Homo sapien
tagatgcttgatcaacttgtgttgc

SEQ ID NO: 2123182 - DNA, 25 bp, Homo sapien
tgcaactgcagtttaggtacatgaa

SEQ ID NO: 2123183 - DNA, 25 bp, Homo sapien
taactcagtacagaagtcccatcct

SEQ ID NO: 2123184 - DNA, 25 bp, Homo sapien
aatgggaatgcacaattgggtactc

SEQ ID NO: 2123185 - DNA, 25 bp, Homo sapien
ccacagaatggctgtaagacttaca

SEQ ID NO: 2123186 - DNA, 25 bp, Homo sapien
aggcagagcccattaaaaaattatc

SEQ ID NO: 2123187 - DNA, 25 bp, Homo sapien
tctgtatctacatgaaggcagagcc

SEQ ID NO: 2123188 - DNA, 25 bp, Homo sapien
caaacttcctatgccattagataaa

SEQ ID NO: 2123189 - DNA, 25 bp, Homo sapien
cactcagagcttagctagaagacaa

SEQ ID NO: 2123190 - DNA, 25 bp, Homo sapien
ttctgtttcaacacaatggctctta

SEQ ID NO: 2123191 - DNA, 25 bp, Homo sapien
tttactgcttttgttgctgcctgtt

SEQ ID NO: 2123192 - DNA, 25 bp, Homo sapien
tgtcatgttgggtgtggttctcagc

SEQ ID NO: 2123193 - DNA, 25 bp, Homo sapien
caacacaatggctcttagtcctcat

SEQ ID NO: 2123194 - DNA, 25 bp, Homo sapien
gctttgctgactgcattttatcctt

SEQ ID NO: 2123195 - DNA, 25 bp, Homo sapien
ttttatccttaaaggactgcaatgc

SEQ ID NO: 2123196 - DNA, 25 bp, Homo sapien
ccagctttgctgactgcattttatc

SEQ ID NO: 2123197 - DNA, 25 bp, Homo sapien
ttatccttaaaggactgcaatgctg

SEQ ID NO: 2123198 - DNA, 25 bp, Homo sapien
aaattacgttgaagcgggactgttg

SEQ ID NO: 2123199 - DNA, 25 bp, Homo sapien
tgaagcgggactgttgatgaccgtt

SEQ ID NO: 2123200 - DNA, 25 bp, Homo sapien
ttgatgaccgttgggggcaatgtaa

SEQ ID NO: 2123201 - DNA, 25 bp, Homo sapien
gcaatgtaatgttttttgatgagga

SEQ ID NO: 2123202 - DNA, 25 bp, Homo sapien
tgcctctccctgtttgtctttcctt

SEQ ID NO: 2123203 - DNA, 25 bp, Homo sapien
gcacgttggcttgttccattctgtt

SEQ ID NO: 2123204 - DNA, 25 bp, Homo sapien
caggcacgttggcttgttccattct

SEQ ID NO: 2123205 - DNA, 25 bp, Homo sapien
ggcacgttggcttgttccattctgt

SEQ ID NO: 2123206 - DNA, 25 bp, Homo sapien
aggcacgttggcttgttccattctg

SEQ ID NO: 2123207 - DNA, 25 bp, Homo sapien
tccagcaaccagaacttcatcattt

SEQ ID NO: 2123208 - DNA, 25 bp, Homo sapien
cagcaaccagaacttcatcattttc

SEQ ID NO: 2123209 - DNA, 25 bp, Homo sapien
ccagcaaccagaacttcatcatttt

SEQ ID NO: 2123210 - DNA, 25 bp, Homo sapien
tgtatagggccaaaagagaaacatt

SEQ ID NO: 2123211 - DNA, 25 bp, Homo sapien
gggccaaaagagaaacattggctac

SEQ ID NO: 2123212 - DNA, 25 bp, Homo sapien
cttgcctttgtatagggccaaaaga

SEQ ID NO: 2123213 - DNA, 25 bp, Homo sapien
cttcttgcctttgtatagggccaaa

SEQ ID NO: 2123214 - DNA, 25 bp, Homo sapien
catatgaaaatttattactacaggg

SEQ ID NO: 2123215 - DNA, 25 bp, Homo sapien
actacagggttttcaccattaatat

SEQ ID NO: 2123216 - DNA, 25 bp, Homo sapien
tattactacagggttttcaccatta

SEQ ID NO: 2123217 - DNA, 25 bp, Homo sapien
ggcatatgaaaatttattactacag

SEQ ID NO: 2123218 - DNA, 25 bp, Homo sapien
gataccaaccctaaacagctaactg

SEQ ID NO: 2123219 - DNA, 25 bp, Homo sapien
tgggaatacatgtagctgttcttca

SEQ ID NO: 2123220 - DNA, 25 bp, Homo sapien
gaccatgttcataggtaatagtcaa

SEQ ID NO: 2123221 - DNA, 25 bp, Homo sapien
tagtacaagctggtaatgggaatac

SEQ ID NO: 2123222 - DNA, 25 bp, Homo sapien
ggttgagatgaagtagtggaaaaca

SEQ ID NO: 2123223 - DNA, 25 bp, Homo sapien
aaataggttttcagtaggttgagat

SEQ ID NO: 2123224 - DNA, 25 bp, Homo sapien
cccatggaaaataggttttcagtag

SEQ ID NO: 2123225 - DNA, 25 bp, Homo sapien
ttcagtaggttgagatgaagtagtg

SEQ ID NO: 2123226 - DNA, 25 bp, Homo sapien
tgcacaacttcggttgacctcctct

SEQ ID NO: 2123227 - DNA, 25 bp, Homo sapien
gcttgccctgcacaacttcggttga

SEQ ID NO: 2123228 - DNA, 25 bp, Homo sapien
caggcttgccctgcacaacttcggt

SEQ ID NO: 2123229 - DNA, 25 bp, Homo sapien
tgccctgcacaacttcggttgacct

SEQ ID NO: 2123230 - DNA, 25 bp, Homo sapien
cacggtgcaggaccattagcccatg

SEQ ID NO: 2123231 - DNA, 25 bp, Homo sapien
cggtgcaggaccattagcccatgcc

SEQ ID NO: 2123232 - DNA, 25 bp, Homo sapien
acggtgcaggaccattagcccatgc

SEQ ID NO: 2123233 - DNA, 25 bp, Homo sapien
ggtgcaggaccattagcccatgcca

SEQ ID NO: 2123234 - DNA, 25 bp, Homo sapien
ttagccaggtgagtagtcctctggc

SEQ ID NO: 2123235 - DNA, 25 bp, Homo sapien
tagccaggtgagtagtcctctggct

SEQ ID NO: 2123236 - DNA, 25 bp, Homo sapien
gtcggtgactgcggcctctgtccgt

SEQ ID NO: 2123237 - DNA, 25 bp, Homo sapien
tgtcggtgactgcggcctctgtccg

SEQ ID NO: 2123238 - DNA, 25 bp, Homo sapien
ctgtcggtgactgcggcctctgtcc

SEQ ID NO: 2123239 - DNA, 25 bp, Homo sapien
tgagcaaattacaccacaataagtg

SEQ ID NO: 2123240 - DNA, 25 bp, Homo sapien
acttatttgagtgtagggacatttt

SEQ ID NO: 2123241 - DNA, 25 bp, Homo sapien
aagtgttccagcagttcattaaaaa

SEQ ID NO: 2123242 - DNA, 25 bp, Homo sapien
tatttgcagtgcctgatgtatagta

SEQ ID NO: 2123243 - DNA, 25 bp, Homo sapien
cacgcttctggcgtctcagaatgtc

SEQ ID NO: 2123244 - DNA, 25 bp, Homo sapien
tgaatgaagccgtagtccgcttgtc

SEQ ID NO: 2123245 - DNA, 25 bp, Homo sapien
tctctggttgtgccgtggtgaatga

SEQ ID NO: 2123246 - DNA, 25 bp, Homo sapien
tgtccagccgttaggaaggtcctgc

SEQ ID NO: 2123247 - DNA, 25 bp, Homo sapien
tgtacctggcctgatttatgtatta

SEQ ID NO: 2123248 - DNA, 25 bp, Homo sapien
tacaagcgtggcaccaccatacccg

SEQ ID NO: 2123249 - DNA, 25 bp, Homo sapien
actgtacctggcctgatttatgtat

SEQ ID NO: 2123250 - DNA, 25 bp, Homo sapien
gactacaagcgtggcaccaccatac

SEQ ID NO: 2123251 - DNA, 25 bp, Homo sapien
tgaagttccctgagacagctctcca

SEQ ID NO: 2123252 - DNA, 25 bp, Homo sapien
caaactgttcattcttctgtcagac

SEQ ID NO: 2123253 - DNA, 25 bp, Homo sapien
gctaagcagcccctaatgagaggct

SEQ ID NO: 2123254 - DNA, 25 bp, Homo sapien
tgtgcacaagtgctgagagtctgag

SEQ ID NO: 2123255 - DNA, 25 bp, Homo sapien
tcagaagaaagccatagggcagtag

SEQ ID NO: 2123256 - DNA, 25 bp, Homo sapien
ggcagtaatcctcctagagtccaag

SEQ ID NO: 2123257 - DNA, 25 bp, Homo sapien
tatggctgcttcagagtcagaagaa

SEQ ID NO: 2123258 - DNA, 25 bp, Homo sapien
tgccaggtaactccctgaagggtgg

SEQ ID NO: 2123259 - DNA, 25 bp, Homo sapien
taacctctgccgagcgaagacactt

SEQ ID NO: 2123260 - DNA, 25 bp, Homo sapien
atattgcgctcccatcaccgaacgt

SEQ ID NO: 2123261 - DNA, 25 bp, Homo sapien
gccagtcttcagaaagtcgcgaact

SEQ ID NO: 2123262 - DNA, 25 bp, Homo sapien
gctcagcgttcagtgaagcctgcca

SEQ ID NO: 2123263 - DNA, 25 bp, Homo sapien
tctaggtctatgatcgcggcagcct

SEQ ID NO: 2123264 - DNA, 25 bp, Homo sapien
cgggatctaggtctatgatcgcggc

SEQ ID NO: 2123265 - DNA, 25 bp, Homo sapien
gttcgaagtcgggatctaggtctat

SEQ ID NO: 2123266 - DNA, 25 bp, Homo sapien
ctctggggttcgaagtcgggatcta

SEQ ID NO: 2123267 - DNA, 25 bp, Homo sapien
ccagatctggctccacctcgggcgg

SEQ ID NO: 2123268 - DNA, 25 bp, Homo sapien
agatctggctccacctcgggcggct

SEQ ID NO: 2123269 - DNA, 25 bp, Homo sapien
ggctcggacggctggttagcgatct

SEQ ID NO: 2123270 - DNA, 25 bp, Homo sapien
tcgggcggctcggacggctggttag

SEQ ID NO: 2123271 - DNA, 25 bp, Homo sapien
ccggctctgggagccgagagggcaa

SEQ ID NO: 2123272 - DNA, 25 bp, Homo sapien
ccgagagggcaacaggatcggctct

SEQ ID NO: 2123273 - DNA, 25 bp, Homo sapien
ggacctgttacagcccccaggattc

SEQ ID NO: 2123274 - DNA, 25 bp, Homo sapien
tttccccaggcattccggcgggagc

SEQ ID NO: 2123275 - DNA, 25 bp, Homo sapien
ttgaagtagggtacagtacggacca

SEQ ID NO: 2123276 - DNA, 25 bp, Homo sapien
actcgtagatctgggcaagtgtcag

SEQ ID NO: 2123277 - DNA, 25 bp, Homo sapien
ggtacagtacggaccatccactcgt

SEQ ID NO: 2123278 - DNA, 25 bp, Homo sapien
gatctgggcaagtgtcagtcgcttc

SEQ ID NO: 2123279 - DNA, 25 bp, Homo sapien
tacttggttatatgctgacctcacc

SEQ ID NO: 2123280 - DNA, 25 bp, Homo sapien
tgtacttggttatatgctgacctca

SEQ ID NO: 2123281 - DNA, 25 bp, Homo sapien
cttctgtacttggttatatgctgac

SEQ ID NO: 2123282 - DNA, 25 bp, Homo sapien
cttggttatatgctgacctcaccac

SEQ ID NO: 2123283 - DNA, 25 bp, Homo sapien
ttgcccctgggttgacaatggtgag

SEQ ID NO: 2123284 - DNA, 25 bp, Homo sapien
gtattggaagctgtatgttttccct

SEQ ID NO: 2123285 - DNA, 25 bp, Homo sapien
cttcagtgccttgggtattggaagc

SEQ ID NO: 2123286 - DNA, 25 bp, Homo sapien
tcagtgccttgggtattggaagctg

SEQ ID NO: 2123287 - DNA, 25 bp, Homo sapien
gaaccttgatgaacttgctgtgcag

SEQ ID NO: 2123288 - DNA, 25 bp, Homo sapien
ggcctcgttgtgaaccttgatgaac

SEQ ID NO: 2123289 - DNA, 25 bp, Homo sapien
tgtgaaccttgatgaacttgctgtg

SEQ ID NO: 2123290 - DNA, 25 bp, Homo sapien
tcgttgtgaaccttgatgaacttgc

SEQ ID NO: 2123291 - DNA, 25 bp, Homo sapien
tcttgcctccctcagggttcagcat

SEQ ID NO: 2123292 - DNA, 25 bp, Homo sapien
gcggggggctttgccgctcttgcct

SEQ ID NO: 2123293 - DNA, 25 bp, Homo sapien
cggcggcggggggctttgccgctct

SEQ ID NO: 2123294 - DNA, 25 bp, Homo sapien
cttgcctccctcagggttcagcatc

SEQ ID NO: 2123295 - DNA, 25 bp, Homo sapien
tgctatcatagaaagggtgggaacc

SEQ ID NO: 2123296 - DNA, 25 bp, Homo sapien
tcacggtttcgagagcaagggctgc

SEQ ID NO: 2123297 - DNA, 25 bp, Homo sapien
catttgaactgcttcgtggacggaa

SEQ ID NO: 2123298 - DNA, 25 bp, Homo sapien
gagaccactccgagatagcagggaa

SEQ ID NO: 2123299 - DNA, 25 bp, Homo sapien
ctgtggtgattagggggtactgtac

SEQ ID NO: 2123300 - DNA, 25 bp, Homo sapien
ctatgaggtgctgtggtgattaggg

SEQ ID NO: 2123301 - DNA, 25 bp, Homo sapien
gtgctgtggtgattagggggtactg

SEQ ID NO: 2123302 - DNA, 25 bp, Homo sapien
aggtgctgtggtgattagggggtac

SEQ ID NO: 2123303 - DNA, 25 bp, Homo sapien
agtagatatgaacacgcctggctcc

SEQ ID NO: 2123304 - DNA, 25 bp, Homo sapien
gacacaggaaatgatgggaacccac

SEQ ID NO: 2123305 - DNA, 25 bp, Homo sapien
ccttctaagggtgatttggcctggc

SEQ ID NO: 2123306 - DNA, 25 bp, Homo sapien
tcatagaagagtgtggctgcaccct

SEQ ID NO: 2123307 - DNA, 25 bp, Homo sapien
tctatgaaacgttccggaggcgcag

SEQ ID NO: 2123308 - DNA, 25 bp, Homo sapien
tagaaactctcgaccattgccggaa

SEQ ID NO: 2123309 - DNA, 25 bp, Homo sapien
gacaataccgactgcagaggaggtg

SEQ ID NO: 2123310 - DNA, 25 bp, Homo sapien
ggcggcagcaagtcgatttcactca

SEQ ID NO: 2123311 - DNA, 25 bp, Homo sapien
tgagggtaaacatcgggaggcccca

SEQ ID NO: 2123312 - DNA, 25 bp, Homo sapien
tcctgagggtaaacatcgggaggcc

SEQ ID NO: 2123313 - DNA, 25 bp, Homo sapien
ggtgttcgtagctcaagatcccgaa

SEQ ID NO: 2123314 - DNA, 25 bp, Homo sapien
cttcaggggccggtgttcgtagctc

SEQ ID NO: 2123315 - DNA, 25 bp, Homo sapien
agacagcaggctggttattgaaacc

SEQ ID NO: 2123316 - DNA, 25 bp, Homo sapien
gcaggattgaagctgacgttcttgg

SEQ ID NO: 2123317 - DNA, 25 bp, Homo sapien
agctgacgttcttggcactgccatg

SEQ ID NO: 2123318 - DNA, 25 bp, Homo sapien
ttacattcaaggccgtcagttcatc

SEQ ID NO: 2123319 - DNA, 25 bp, Homo sapien
taggttgtccctataagtcttccca

SEQ ID NO: 2123320 - DNA, 25 bp, Homo sapien
ccagtgtcaggaagggtattacaac

SEQ ID NO: 2123321 - DNA, 25 bp, Homo sapien
ctttttggctagttgcgtgagtggc

SEQ ID NO: 2123322 - DNA, 25 bp, Homo sapien
ggcactctgggatcgtgcagtcacc

SEQ ID NO: 2123323 - DNA, 25 bp, Homo sapien
gccaagtcagtgaaccaagtgttaa

SEQ ID NO: 2123324 - DNA, 25 bp, Homo sapien
tgtatttggctaagtacccaaacac

SEQ ID NO: 2123325 - DNA, 25 bp, Homo sapien
actgtgtatttggctaagtacccaa

SEQ ID NO: 2123326 - DNA, 25 bp, Homo sapien
tgtgtatttggctaagtacccaaac

SEQ ID NO: 2123327 - DNA, 25 bp, Homo sapien
tggctaagtacccaaacacctcttc

SEQ ID NO: 2123328 - DNA, 25 bp, Homo sapien
tcttaaccttggtctcagagattgc

SEQ ID NO: 2123329 - DNA, 25 bp, Homo sapien
gaaagggtcaacatgtctcttctta

SEQ ID NO: 2123330 - DNA, 25 bp, Homo sapien
cagagattgctgcatagtaggcaca

SEQ ID NO: 2123331 - DNA, 25 bp, Homo sapien
taggcacaggtcatcttaatgagcc

SEQ ID NO: 2123332 - DNA, 25 bp, Homo sapien
catggccagcttctcggtgtaatcc

SEQ ID NO: 2123333 - DNA, 25 bp, Homo sapien
cggattgccacctctacatcatggg

SEQ ID NO: 2123334 - DNA, 25 bp, Homo sapien
taactgctcccataagtacttggtg

SEQ ID NO: 2123335 - DNA, 25 bp, Homo sapien
gggcaagggccctatcgtggaacca

SEQ ID NO: 2123336 - DNA, 25 bp, Homo sapien
gaggcagcagcagtttaagcaattc

SEQ ID NO: 2123337 - DNA, 25 bp, Homo sapien
ggtcaggaactcatgtctgtccagc

SEQ ID NO: 2123338 - DNA, 25 bp, Homo sapien
ggcggatcttctcaaaacactcaag

SEQ ID NO: 2123339 - DNA, 25 bp, Homo sapien
aacactcaagcacccaggtcaggaa

SEQ ID NO: 2123340 - DNA, 25 bp, Homo sapien
gagggcacataagcaggtcactaaa

SEQ ID NO: 2123341 - DNA, 25 bp, Homo sapien
cagtctccgtgtacagaagtaggca

SEQ ID NO: 2123342 - DNA, 25 bp, Homo sapien
taacatgagatgagtgactgctcac

SEQ ID NO: 2123343 - DNA, 25 bp, Homo sapien
tatgcagactgaacaaattccccag

SEQ ID NO: 2123344 - DNA, 25 bp, Homo sapien
tggtcaagtggtgagccggtcttaa

SEQ ID NO: 2123345 - DNA, 25 bp, Homo sapien
tctgctatcagtcagtgagtagtgc

SEQ ID NO: 2123346 - DNA, 25 bp, Homo sapien
tgagtgaaggcactgttaccctctg

SEQ ID NO: 2123347 - DNA, 25 bp, Homo sapien
gtgccaaaccaaggcactaggacag

SEQ ID NO: 2123348 - DNA, 25 bp, Homo sapien
tccttgatctgctgctcgatctccc

SEQ ID NO: 2123349 - DNA, 25 bp, Homo sapien
gcatttatcgaaagaccagcgaact

SEQ ID NO: 2123350 - DNA, 25 bp, Homo sapien
agcttcctggcatttatcgaaagac

SEQ ID NO: 2123351 - DNA, 25 bp, Homo sapien
gaccagcgaacttcaactgcctgtc

SEQ ID NO: 2123352 - DNA, 25 bp, Homo sapien
caatccaaagattcggttacaaagg

SEQ ID NO: 2123353 - DNA, 25 bp, Homo sapien
cagagcgttcaaaactatggctgtc

SEQ ID NO: 2123354 - DNA, 25 bp, Homo sapien
tgaagtacccgtccaatggtgaagc

SEQ ID NO: 2123355 - DNA, 25 bp, Homo sapien
tccttgctaggtcccaatccaaaga

SEQ ID NO: 2123356 - DNA, 25 bp, Homo sapien
gctgacagcccattcacatagcaat

SEQ ID NO: 2123357 - DNA, 25 bp, Homo sapien
tcacatagcaatgacaccacagcat

SEQ ID NO: 2123358 - DNA, 25 bp, Homo sapien
ggctaccaccatagcacgatgccga

SEQ ID NO: 2123359 - DNA, 25 bp, Homo sapien
acgatgccgaccagaacgcttgcag

SEQ ID NO: 2123360 - DNA, 25 bp, Homo sapien
tggaacccttctcatctgcggcttc

SEQ ID NO: 2123361 - DNA, 25 bp, Homo sapien
ggaacccttctcatctgcggcttct

SEQ ID NO: 2123362 - DNA, 25 bp, Homo sapien
gagccagaggcgatggaacccttct

SEQ ID NO: 2123363 - DNA, 25 bp, Homo sapien
ggtcatcggcaggatcatcaaaggg

SEQ ID NO: 2123364 - DNA, 25 bp, Homo sapien
catgtcgaatcagttcacagaacag

SEQ ID NO: 2123365 - DNA, 25 bp, Homo sapien
caaaggcaaggtcccctcgggagat

SEQ ID NO: 2123366 - DNA, 25 bp, Homo sapien
taagttaaagaattccacccgctca

SEQ ID NO: 2123367 - DNA, 25 bp, Homo sapien
aatgtccatagattctgagagccct

SEQ ID NO: 2123368 - DNA, 25 bp, Homo sapien
gaactagggtcaatgtccatagatt

SEQ ID NO: 2123369 - DNA, 25 bp, Homo sapien
tccatagattctgagagccctggat

SEQ ID NO: 2123370 - DNA, 25 bp, Homo sapien
actggaactagggtcaatgtccata

SEQ ID NO: 2123371 - DNA, 25 bp, Homo sapien
aaatgggtggcgtactgcacgtgtc

SEQ ID NO: 2123372 - DNA, 25 bp, Homo sapien
ttctcaggggatggactgcccttcc

SEQ ID NO: 2123373 - DNA, 25 bp, Homo sapien
tcgtggctggtcgtaaagaacccca

SEQ ID NO: 2123374 - DNA, 25 bp, Homo sapien
ccttcccctcacagggcatagtagg

SEQ ID NO: 2123375 - DNA, 25 bp, Homo sapien
agcaccatcagactccagcaccgat

SEQ ID NO: 2123376 - DNA, 25 bp, Homo sapien
gcaccatcagactccagcaccgatc

SEQ ID NO: 2123377 - DNA, 25 bp, Homo sapien
caccatcagactccagcaccgatct

SEQ ID NO: 2123378 - DNA, 25 bp, Homo sapien
accatcagactccagcaccgatctc

SEQ ID NO: 2123379 - DNA, 25 bp, Homo sapien
aaccgctggttgcactcatggctgc

SEQ ID NO: 2123380 - DNA, 25 bp, Homo sapien
tgctgtccctttgcggttcagaacc

SEQ ID NO: 2123381 - DNA, 25 bp, Homo sapien
tggcatggcgggcatcatctcgctg

SEQ ID NO: 2123382 - DNA, 25 bp, Homo sapien
cagaaccttcaagatatccttggtg

SEQ ID NO: 2123383 - DNA, 25 bp, Homo sapien
tgtcaggtctccaggattcagaggc

SEQ ID NO: 2123384 - DNA, 25 bp, Homo sapien
agaggcacaataggagcaagctggt

SEQ ID NO: 2123385 - DNA, 25 bp, Homo sapien
cagaggcacaataggagcaagctgg

SEQ ID NO: 2123386 - DNA, 25 bp, Homo sapien
ttggtcataatgtgaaaggtgctgg

SEQ ID NO: 2123387 - DNA, 25 bp, Homo sapien
ttcaggccggttgcgtcgccgcttc

SEQ ID NO: 2123388 - DNA, 25 bp, Homo sapien
ggtgctggaacttagcaaagatatc

SEQ ID NO: 2123389 - DNA, 25 bp, Homo sapien
gagccgtgacctggtgttggtcata

SEQ ID NO: 2123390 - DNA, 25 bp, Homo sapien
atgaggccactgatgctgagtgaat

SEQ ID NO: 2123391 - DNA, 25 bp, Homo sapien
tatgacatgccaagggcaaagctcg

SEQ ID NO: 2123392 - DNA, 25 bp, Homo sapien
ccatgaggtcgaagatgaactgcac

SEQ ID NO: 2123393 - DNA, 25 bp, Homo sapien
tgctgcaccagaggcaagtggtatg

SEQ ID NO: 2123394 - DNA, 25 bp, Homo sapien
caggctagtagtgtagctgcccacc

SEQ ID NO: 2123395 - DNA, 25 bp, Homo sapien
gctgcccaccagatccgaggatttg

SEQ ID NO: 2123396 - DNA, 25 bp, Homo sapien
caggcatgatagtgccgcaggacag

SEQ ID NO: 2123397 - DNA, 25 bp, Homo sapien
aggacagccacgatgcacaggcaca

SEQ ID NO: 2123398 - DNA, 25 bp, Homo sapien
gctacaggaggtgtacagatcatag

SEQ ID NO: 2123399 - DNA, 25 bp, Homo sapien
gataagcaaggatacagcgctctgc

SEQ ID NO: 2123400 - DNA, 25 bp, Homo sapien
catcggaccggttcatcccatgctt

SEQ ID NO: 2123401 - DNA, 25 bp, Homo sapien
tgttctttaaatggctacaggaggt

SEQ ID NO: 2123402 - DNA, 25 bp, Homo sapien
cacagacgtgcataagggcattgca

SEQ ID NO: 2123403 - DNA, 25 bp, Homo sapien
ggtgcccagcgcatatttgattccg

SEQ ID NO: 2123404 - DNA, 25 bp, Homo sapien
agactcttgcctagccccgtgtagg

SEQ ID NO: 2123405 - DNA, 25 bp, Homo sapien
tgtagcggttagcagggttctcact

SEQ ID NO: 2123406 - DNA, 25 bp, Homo sapien
cacaagtgccattgttagaggagca

SEQ ID NO: 2123407 - DNA, 25 bp, Homo sapien
tgcagaggagatcgttgaaaccaca

SEQ ID NO: 2123408 - DNA, 25 bp, Homo sapien
acacaggattgcgatgtcattcacc

SEQ ID NO: 2123409 - DNA, 25 bp, Homo sapien
cactcagtgacttgcaatagccggt

SEQ ID NO: 2123410 - DNA, 25 bp, Homo sapien
cactgccgagcgatgaggatggcaa

SEQ ID NO: 2123411 - DNA, 25 bp, Homo sapien
ttccaggagcaaacactgccgagcg

SEQ ID NO: 2123412 - DNA, 25 bp, Homo sapien
ggatggcagcacagcgaatcagatc

SEQ ID NO: 2123413 - DNA, 25 bp, Homo sapien
ccagcgagtcatgaaaagataggtc

SEQ ID NO: 2123414 - DNA, 25 bp, Homo sapien
taggggttacagattggtagttcac

SEQ ID NO: 2123415 - DNA, 25 bp, Homo sapien
gccgtccagtgtgtattgaaatttg

SEQ ID NO: 2123416 - DNA, 25 bp, Homo sapien
aggatggccgtccagtgtgtattga

SEQ ID NO: 2123417 - DNA, 25 bp, Homo sapien
aatttgaggtctagaaatgctaggg

SEQ ID NO: 2123418 - DNA, 25 bp, Homo sapien
atcagactggcaaggattgagctgc

SEQ ID NO: 2123419 - DNA, 25 bp, Homo sapien
gaggatgcggcaggtaagccgggcc

SEQ ID NO: 2123420 - DNA, 25 bp, Homo sapien
aggtgaaggaggatgcggcaggtaa

SEQ ID NO: 2123421 - DNA, 25 bp, Homo sapien
gattgagctgcggtgtcttgaaaag

SEQ ID NO: 2123422 - DNA, 25 bp, Homo sapien
gagcggattcctactgtaggcttgt

SEQ ID NO: 2123423 - DNA, 25 bp, Homo sapien
gaggagcggattcctactgtaggct

SEQ ID NO: 2123424 - DNA, 25 bp, Homo sapien
gtcgcaggaggagcggattcctact

SEQ ID NO: 2123425 - DNA, 25 bp, Homo sapien
gcaggtggcggtcgcaggaggagcg

SEQ ID NO: 2123426 - DNA, 25 bp, Homo sapien
cagccttgagaacagcaaacacggc

SEQ ID NO: 2123427 - DNA, 25 bp, Homo sapien
acacggctccatccacgatgcggtt

SEQ ID NO: 2123428 - DNA, 25 bp, Homo sapien
aaacacggctccatccacgatgcgg

SEQ ID NO: 2123429 - DNA, 25 bp, Homo sapien
aaacacagccttgagaacagcaaac

SEQ ID NO: 2123430 - DNA, 25 bp, Homo sapien
gatgctgcgcagcacgtacttggca

SEQ ID NO: 2123431 - DNA, 25 bp, Homo sapien
tccagactggctgtctccacagaga

SEQ ID NO: 2123432 - DNA, 25 bp, Homo sapien
tctccacagagatgttgcggccacc

SEQ ID NO: 2123433 - DNA, 25 bp, Homo sapien
tggcatagacatccagactggctgt

SEQ ID NO: 2123434 - DNA, 25 bp, Homo sapien
gcctgggcactactcaacactgggt

SEQ ID NO: 2123435 - DNA, 25 bp, Homo sapien
aacactgggtcttgcaggtcattgc

SEQ ID NO: 2123436 - DNA, 25 bp, Homo sapien
aaatgagctgcatgaggcgctgcgc

SEQ ID NO: 2123437 - DNA, 25 bp, Homo sapien
tcctcattgtccagcagtcgatgtg

SEQ ID NO: 2123438 - DNA, 25 bp, Homo sapien
tacttcatagggtcataaagattaa

SEQ ID NO: 2123439 - DNA, 25 bp, Homo sapien
tattactattcagttcctgagccat

SEQ ID NO: 2123440 - DNA, 25 bp, Homo sapien
tgctcagcaagtagtagctattact

SEQ ID NO: 2123441 - DNA, 25 bp, Homo sapien
aatgccaaatatacacggcccacac

SEQ ID NO: 2123442 - DNA, 25 bp, Homo sapien
agctccaaggaagactggcgcatgg

SEQ ID NO: 2123443 - DNA, 25 bp, Homo sapien
agactggcgcatggtccactggtcc

SEQ ID NO: 2123444 - DNA, 25 bp, Homo sapien
ccaaggaagactggcgcatggtcca

SEQ ID NO: 2123445 - DNA, 25 bp, Homo sapien
tgttaggggtctgcttgatcatgag

SEQ ID NO: 2123446 - DNA, 25 bp, Homo sapien
aaaacctcgattgtggccttggcga

SEQ ID NO: 2123447 - DNA, 25 bp, Homo sapien
tgttggaaaacctcgattgtggcct

SEQ ID NO: 2123448 - DNA, 25 bp, Homo sapien
aacctcgattgtggccttggcgatg

SEQ ID NO: 2123449 - DNA, 25 bp, Homo sapien
ggaaaacctcgattgtggccttggc

SEQ ID NO: 2123450 - DNA, 25 bp, Homo sapien
gggcatgttgcttgcagtacttcca

SEQ ID NO: 2123451 - DNA, 25 bp, Homo sapien
atgttgcttgcagtacttccagaag

SEQ ID NO: 2123452 - DNA, 25 bp, Homo sapien
ctgggcatgttgcttgcagtacttc

SEQ ID NO: 2123453 - DNA, 25 bp, Homo sapien
gcatgttgcttgcagtacttccaga

SEQ ID NO: 2123454 - DNA, 25 bp, Homo sapien
ggatgggtcctaacatgtttctatc

SEQ ID NO: 2123455 - DNA, 25 bp, Homo sapien
gcagcctttaacacatgtccctgga

SEQ ID NO: 2123456 - DNA, 25 bp, Homo sapien
gcttttgtcgatcacgttctttgcg

SEQ ID NO: 2123457 - DNA, 25 bp, Homo sapien
cagccatacaccagagcgctctaga

SEQ ID NO: 2123458 - DNA, 25 bp, Homo sapien
cagtttagcaatgaggggggccacc

SEQ ID NO: 2123459 - DNA, 25 bp, Homo sapien
ggtaaggagtccctcgcgttgttca

SEQ ID NO: 2123460 - DNA, 25 bp, Homo sapien
gcgttgttcatcctgccctttcaga

SEQ ID NO: 2123461 - DNA, 25 bp, Homo sapien
caccagcgataagaagggctgctgg

SEQ ID NO: 2123462 - DNA, 25 bp, Homo sapien
cctttcagacatgttagcaccagcg

SEQ ID NO: 2123463 - DNA, 25 bp, Homo sapien
tgcaatcatctaagtactggtcatc

SEQ ID NO: 2123464 - DNA, 25 bp, Homo sapien
tggtttgcaatcatctaagtactgg

SEQ ID NO: 2123465 - DNA, 25 bp, Homo sapien
tctaagtactggtcatctcgccaat

SEQ ID NO: 2123466 - DNA, 25 bp, Homo sapien
tggtcatctcgccaattattcacaa

SEQ ID NO: 2123467 - DNA, 25 bp, Homo sapien
agccgcagtttgagtgcctcatgca

SEQ ID NO: 2123468 - DNA, 25 bp, Homo sapien
caggttgagccgcagtttgagtgcc

SEQ ID NO: 2123469 - DNA, 25 bp, Homo sapien
gttgagccgcagtttgagtgcctca

SEQ ID NO: 2123470 - DNA, 25 bp, Homo sapien
tgagccgcagtttgagtgcctcatg

SEQ ID NO: 2123471 - DNA, 25 bp, Homo sapien
tggcgcgacctcggcttactgcaaa

SEQ ID NO: 2123472 - DNA, 25 bp, Homo sapien
ggcgcgacctcggcttactgcaaac

SEQ ID NO: 2123473 - DNA, 25 bp, Homo sapien
aggagcatggcccactccgtggtct

SEQ ID NO: 2123474 - DNA, 25 bp, Homo sapien
cactccgtggtctgctgggtgctgc

SEQ ID NO: 2123475 - DNA, 25 bp, Homo sapien
cagtgccgctgatgatgatctccag

SEQ ID NO: 2123476 - DNA, 25 bp, Homo sapien
ttgttggactgcatgtcgacagtgc

SEQ ID NO: 2123477 - DNA, 25 bp, Homo sapien
taccttgcgagatgctagacatgtc

SEQ ID NO: 2123478 - DNA, 25 bp, Homo sapien
tgtccaacacagtagtgaagagctc

SEQ ID NO: 2123479 - DNA, 25 bp, Homo sapien
tcttcgccaggttcatgtatgcacg

SEQ ID NO: 2123480 - DNA, 25 bp, Homo sapien
aatgtcccattgatgagcacgctca

SEQ ID NO: 2123481 - DNA, 25 bp, Homo sapien
gtgatgacatctcgggtctgcttgg

SEQ ID NO: 2123482 - DNA, 25 bp, Homo sapien
gacatctcgggtctgcttgggcagt

SEQ ID NO: 2123483 - DNA, 25 bp, Homo sapien
cagctggcgaaccttttccagactg

SEQ ID NO: 2123484 - DNA, 25 bp, Homo sapien
gtggcagcagctggcgaaccttttc

SEQ ID NO: 2123485 - DNA, 25 bp, Homo sapien
gaagccagcaatcttgttgcccttg

SEQ ID NO: 2123486 - DNA, 25 bp, Homo sapien
tgaagatggaatcgaagccagcaat

SEQ ID NO: 2123487 - DNA, 25 bp, Homo sapien
cttggtatcgataagggagccctgt

SEQ ID NO: 2123488 - DNA, 25 bp, Homo sapien
tcttgttgcccttggtatcgataag

SEQ ID NO: 2123489 - DNA, 25 bp, Homo sapien
atgggctcctgaatctgatgagtct

SEQ ID NO: 2123490 - DNA, 25 bp, Homo sapien
gatgggctcctgaatctgatgagtc

SEQ ID NO: 2123491 - DNA, 25 bp, Homo sapien
cagaaaatgaaaaacaataagctgt

SEQ ID NO: 2123492 - DNA, 25 bp, Homo sapien
aaatgaaaaacaataagctgttggg

SEQ ID NO: 2123493 - DNA, 25 bp, Homo sapien
gaaaatgaaaaacaataagctgttg

SEQ ID NO: 2123494 - DNA, 25 bp, Homo sapien
aatgaaaaacaataagctgttggga

SEQ ID NO: 2123495 - DNA, 25 bp, Homo sapien
cagccccaagagagtggtgctgacg

SEQ ID NO: 2123496 - DNA, 25 bp, Homo sapien
cccctcaaaaagatcccagggcgag

SEQ ID NO: 2123497 - DNA, 25 bp, Homo sapien
tggtgctgacggcttcaacccctca

SEQ ID NO: 2123498 - DNA, 25 bp, Homo sapien
tcccagggcgagatcttctgtttgg

SEQ ID NO: 2123499 - DNA, 25 bp, Homo sapien
cagtggcagtggctccaggtaatag

SEQ ID NO: 2123500 - DNA, 25 bp, Homo sapien
tgtggtagagcagcaaccgctgctg

SEQ ID NO: 2123501 - DNA, 25 bp, Homo sapien
tctcaggctctagcagggtaggagc

SEQ ID NO: 2123502 - DNA, 25 bp, Homo sapien
tcttcttgcgttcctcagtactggg

SEQ ID NO: 2123503 - DNA, 25 bp, Homo sapien
ggaagagggtgagtgggttgtagct

SEQ ID NO: 2123504 - DNA, 25 bp, Homo sapien
agagggtgagtgggttgtagctgaa

SEQ ID NO: 2123505 - DNA, 25 bp, Homo sapien
ggttgtagctgaatggggtcgggga

SEQ ID NO: 2123506 - DNA, 25 bp, Homo sapien
aagagggtgagtgggttgtagctga

SEQ ID NO: 2123507 - DNA, 25 bp, Homo sapien
caggaggtccggaggcactgtcaca

SEQ ID NO: 2123508 - DNA, 25 bp, Homo sapien
tctgggtgtacaggcctatggagcc

SEQ ID NO: 2123509 - DNA, 25 bp, Homo sapien
aggtgtgttatagaaccagggtttg

SEQ ID NO: 2123510 - DNA, 25 bp, Homo sapien
gagccttgcctgtagttaaggtgtg

SEQ ID NO: 2123511 - DNA, 25 bp, Homo sapien
tcctcaggggaatggcatcatcctt

SEQ ID NO: 2123512 - DNA, 25 bp, Homo sapien
ccttgacatccatagctcctcaggg

SEQ ID NO: 2123513 - DNA, 25 bp, Homo sapien
agtgggctgacctctaggctcctca

SEQ ID NO: 2123514 - DNA, 25 bp, Homo sapien
tgtccttgacatccatagctcctca

SEQ ID NO: 2123515 - DNA, 25 bp, Homo sapien
gaggagggttctaaacccatgacgc

SEQ ID NO: 2123516 - DNA, 25 bp, Homo sapien
cagcttctgcattggtaagcgcaca

SEQ ID NO: 2123517 - DNA, 25 bp, Homo sapien
cacagaggtcttataagaggagggt

SEQ ID NO: 2123518 - DNA, 25 bp, Homo sapien
ttgctgctgccggtacacagaggtc

SEQ ID NO: 2123519 - DNA, 25 bp, Homo sapien
tgagtgtccttgtgaagatcccaag

SEQ ID NO: 2123520 - DNA, 25 bp, Homo sapien
aaaagagaacaactcaaactcagga

SEQ ID NO: 2123521 - DNA, 25 bp, Homo sapien
aatgcttgctgccatctcatctctt

SEQ ID NO: 2123522 - DNA, 25 bp, Homo sapien
tcttgtgtctcccaccctgagtgtc

SEQ ID NO: 2123523 - DNA, 25 bp, Homo sapien
acagatgactgtcccaacatgccct

SEQ ID NO: 2123524 - DNA, 25 bp, Homo sapien
atggacagatgactgtcccaacatg

SEQ ID NO: 2123525 - DNA, 25 bp, Homo sapien
agatgactgtcccaacatgccctga

SEQ ID NO: 2123526 - DNA, 25 bp, Homo sapien
gacagatgactgtcccaacatgccc

SEQ ID NO: 2123527 - DNA, 25 bp, Homo sapien
ccctagtctcacaatcccaggctct

SEQ ID NO: 2123528 - DNA, 25 bp, Homo sapien
tatgcagagcagcttgcctcatccc

SEQ ID NO: 2123529 - DNA, 25 bp, Homo sapien
aaggagagagggaatcagggccgag

SEQ ID NO: 2123530 - DNA, 25 bp, Homo sapien
aatcagggccgagagtatgcagagc

SEQ ID NO: 2123531 - DNA, 25 bp, Homo sapien
aatcccacatgagaaacataaggag

SEQ ID NO: 2123532 - DNA, 25 bp, Homo sapien
tgtgttgctgcaatcccacatgaga

SEQ ID NO: 2123533 - DNA, 25 bp, Homo sapien
gctgcaatcccacatgagaaacata

SEQ ID NO: 2123534 - DNA, 25 bp, Homo sapien
cctgtgtgttgctgcaatcccacat

SEQ ID NO: 2123535 - DNA, 25 bp, Homo sapien
gctggagtagctggggggcaccatg

SEQ ID NO: 2123536 - DNA, 25 bp, Homo sapien
ggtaaggctggctggagtagctggg

SEQ ID NO: 2123537 - DNA, 25 bp, Homo sapien
gtaaggctggctggagtagctgggg

SEQ ID NO: 2123538 - DNA, 25 bp, Homo sapien
aggtcagtccatgtccataggtggg

SEQ ID NO: 2123539 - DNA, 25 bp, Homo sapien
gcacatagccactgggccgctgttg

SEQ ID NO: 2123540 - DNA, 25 bp, Homo sapien
gctggtgcacatagccactgggccg

SEQ ID NO: 2123541 - DNA, 25 bp, Homo sapien
ggaggtcagtccatgtccataggtg

SEQ ID NO: 2123542 - DNA, 25 bp, Homo sapien
aatgctcccttatacctctgcatct

SEQ ID NO: 2123543 - DNA, 25 bp, Homo sapien
tgctcccttatacctctgcatctct

SEQ ID NO: 2123544 - DNA, 25 bp, Homo sapien
gctcccttatacctctgcatctctt

SEQ ID NO: 2123545 - DNA, 25 bp, Homo sapien
atgctcccttatacctctgcatctc

SEQ ID NO: 2123546 - DNA, 25 bp, Homo sapien
caaatggagtgcgactctgtttcaa

SEQ ID NO: 2123547 - DNA, 25 bp, Homo sapien
tctctgggcctcaaagaactgttaa

SEQ ID NO: 2123548 - DNA, 25 bp, Homo sapien
cttctgtggttatgggctatgtggc

SEQ ID NO: 2123549 - DNA, 25 bp, Homo sapien
catgaaactattggtctccagggtc

SEQ ID NO: 2123550 - DNA, 25 bp, Homo sapien
tcggctcattgtgcgattacagctc

SEQ ID NO: 2123551 - DNA, 25 bp, Homo sapien
ctcggctcattgtgcgattacagct

SEQ ID NO: 2123552 - DNA, 25 bp, Homo sapien
cggctcattgtgcgattacagctca

SEQ ID NO: 2123553 - DNA, 25 bp, Homo sapien
tctcggctcattgtgcgattacagc

SEQ ID NO: 2123554 - DNA, 25 bp, Homo sapien
gcttgactaacgttaaccatggtgg

SEQ ID NO: 2123555 - DNA, 25 bp, Homo sapien
cattctctgatgagtcaggcccaca

SEQ ID NO: 2123556 - DNA, 25 bp, Homo sapien
agtgctggccacacaatgggcagtt

SEQ ID NO: 2123557 - DNA, 25 bp, Homo sapien
tctatacatggttacaaggcctcaa

SEQ ID NO: 2123558 - DNA, 25 bp, Homo sapien
tatcatgggtgtctgctgcagtgtc

SEQ ID NO: 2123559 - DNA, 25 bp, Homo sapien
ggtacttatcatgggtgtctgctgc

SEQ ID NO: 2123560 - DNA, 25 bp, Homo sapien
tacttatcatgggtgtctgctgcag

SEQ ID NO: 2123561 - DNA, 25 bp, Homo sapien
cttatcatgggtgtctgctgcagtg

SEQ ID NO: 2123562 - DNA, 25 bp, Homo sapien
ttgaacggacgcctgcctggacgcc

SEQ ID NO: 2123563 - DNA, 25 bp, Homo sapien
tgctgctgccggatgtggtactgct

SEQ ID NO: 2123564 - DNA, 25 bp, Homo sapien
gctgctcaggtaggatggctgttga

SEQ ID NO: 2123565 - DNA, 25 bp, Homo sapien
tgctgctgctgccggatgtggtact

SEQ ID NO: 2123566 - DNA, 25 bp, Homo sapien
gggttggggaggagccgcctgttgc

SEQ ID NO: 2123567 - DNA, 25 bp, Homo sapien
gggaggagccgcctgttgctgctgt

SEQ ID NO: 2123568 - DNA, 25 bp, Homo sapien
ttggggaggagccgcctgttgctgc

SEQ ID NO: 2123569 - DNA, 25 bp, Homo sapien
ggttggggaggagccgcctgttgct

SEQ ID NO: 2123570 - DNA, 25 bp, Homo sapien
gctgttgttgaagttgccggaccaa

SEQ ID NO: 2123571 - DNA, 25 bp, Homo sapien
ttgaagttgccggaccaaagctgct

SEQ ID NO: 2123572 - DNA, 25 bp, Homo sapien
agttgccggaccaaagctgctgtct

SEQ ID NO: 2123573 - DNA, 25 bp, Homo sapien
ggtctgctgaagcccctggcgctgg

SEQ ID NO: 2123574 - DNA, 25 bp, Homo sapien
aatatgttggtactgggctgtggct

SEQ ID NO: 2123575 - DNA, 25 bp, Homo sapien
cgtccaaatatgttggtactgggct

SEQ ID NO: 2123576 - DNA, 25 bp, Homo sapien
caaatatgttggtactgggctgtgg

SEQ ID NO: 2123577 - DNA, 25 bp, Homo sapien
cagtagcgtccaaatatgttggtac

SEQ ID NO: 2123578 - DNA, 25 bp, Homo sapien
actactggtgctagcccaggaatgg

SEQ ID NO: 2123579 - DNA, 25 bp, Homo sapien
tccagtgcacaagcagttcctccag

SEQ ID NO: 2123580 - DNA, 25 bp, Homo sapien
ctggtgctagcccaggaatgggatt

SEQ ID NO: 2123581 - DNA, 25 bp, Homo sapien
cacatccagtgcacaagcagttcct

SEQ ID NO: 2123582 - DNA, 25 bp, Homo sapien
aatggagcctgaggggagggcccca

SEQ ID NO: 2123583 - DNA, 25 bp, Homo sapien
ttattaaaaatggagcctgagggga

SEQ ID NO: 2123584 - DNA, 25 bp, Homo sapien
atggagcctgaggggagggccccaa

SEQ ID NO: 2123585 - DNA, 25 bp, Homo sapien
taaaaatggagcctgaggggagggc

SEQ ID NO: 2123586 - DNA, 25 bp, Homo sapien
agctctgtgtattgggtgcaacagc

SEQ ID NO: 2123587 - DNA, 25 bp, Homo sapien
aaaacccaacagctcaatgcctcac

SEQ ID NO: 2123588 - DNA, 25 bp, Homo sapien
tgtagtaaaccagttggctctcctg

SEQ ID NO: 2123589 - DNA, 25 bp, Homo sapien
cctggacagccttggatctagaact

SEQ ID NO: 2123590 - DNA, 25 bp, Homo sapien
gcaagtcatcctgggtaactgccaa

SEQ ID NO: 2123591 - DNA, 25 bp, Homo sapien
cctagctaggcagggcagaagactc

SEQ ID NO: 2123592 - DNA, 25 bp, Homo sapien
ttttgtgccagagatggctcaagtc

SEQ ID NO: 2123593 - DNA, 25 bp, Homo sapien
taactccttttgtgccagagatggc

SEQ ID NO: 2123594 - DNA, 25 bp, Homo sapien
ctccttttgtgccagagatggctca

SEQ ID NO: 2123595 - DNA, 25 bp, Homo sapien
ccttttgtgccagagatggctcaag

SEQ ID NO: 2123596 - DNA, 25 bp, Homo sapien
cacgggggggcgcggtccctgccat

SEQ ID NO: 2123597 - DNA, 25 bp, Homo sapien
caagcgactgaaccgggccacggac

SEQ ID NO: 2123598 - DNA, 25 bp, Homo sapien
cgaatccccgagatcagctctccgg

SEQ ID NO: 2123599 - DNA, 25 bp, Homo sapien
tgttccccgggctgctgcaagcgac

SEQ ID NO: 2123600 - DNA, 25 bp, Homo sapien
acggaccacccatatcgcctccagg

SEQ ID NO: 2123601 - DNA, 25 bp, Homo sapien
ctacgagggcttggaatggattggg

SEQ ID NO: 2123602 - DNA, 25 bp, Homo sapien
aggacccactgtgaatccccaaggc

SEQ ID NO: 2123603 - DNA, 25 bp, Homo sapien
tccaacttgcaatttgggagaagac

SEQ ID NO: 2123604 - DNA, 25 bp, Homo sapien
ggaatggaccaatattgagaactgc

SEQ ID NO: 2123605 - DNA, 25 bp, Homo sapien
agagggaagtatgcgtcatccaaga

SEQ ID NO: 2123606 - DNA, 25 bp, Homo sapien
gaaagagggaagtatgcgtcatcca

SEQ ID NO: 2123607 - DNA, 25 bp, Homo sapien
tggaaagagggaagtatgcgtcatc

SEQ ID NO: 2123608 - DNA, 25 bp, Homo sapien
ggaagtatgcgtcatccaagatggt

SEQ ID NO: 2123609 - DNA, 25 bp, Homo sapien
aatgtagagagcaggtcgtccaagc

SEQ ID NO: 2123610 - DNA, 25 bp, Homo sapien
cagcttcagaaaggggactccctca

SEQ ID NO: 2123611 - DNA, 25 bp, Homo sapien
tacaggtgcccagcaatgtagagag

SEQ ID NO: 2123612 - DNA, 25 bp, Homo sapien
gcaggtcgtccaagcaccacagctt

SEQ ID NO: 2123613 - DNA, 25 bp, Homo sapien
tcaaaactgagctctcgagggacac

SEQ ID NO: 2123614 - DNA, 25 bp, Homo sapien
cctcaaaactgagctctcgagggac

SEQ ID NO: 2123615 - DNA, 25 bp, Homo sapien
aacctcaaaactgagctctcgaggg

SEQ ID NO: 2123616 - DNA, 25 bp, Homo sapien
ctgacttgaacctcaaaactgagct

SEQ ID NO: 2123617 - DNA, 25 bp, Homo sapien
ggtcacagcatcagcccaataggca

SEQ ID NO: 2123618 - DNA, 25 bp, Homo sapien
gtcacagcatcagcccaataggcag

SEQ ID NO: 2123619 - DNA, 25 bp, Homo sapien
tcacagcatcagcccaataggcagc

SEQ ID NO: 2123620 - DNA, 25 bp, Homo sapien
tggtactcgggcaccccttagcttc

SEQ ID NO: 2123621 - DNA, 25 bp, Homo sapien
aaagtgtgtggcgttccggatgccc

SEQ ID NO: 2123622 - DNA, 25 bp, Homo sapien
caggaaacgtttctcgccgatcggg

SEQ ID NO: 2123623 - DNA, 25 bp, Homo sapien
aggctcctgccaaccgtgggcttgg

SEQ ID NO: 2123624 - DNA, 25 bp, Homo sapien
aagttggcagtgaaccagaccggca

SEQ ID NO: 2123625 - DNA, 25 bp, Homo sapien
gagacagtcttcgttgggctcctgg

SEQ ID NO: 2123626 - DNA, 25 bp, Homo sapien
cacatagacgttcaggtagagacag

SEQ ID NO: 2123627 - DNA, 25 bp, Homo sapien
gtagcgacgatatccaagttggcag

SEQ ID NO: 2123628 - DNA, 25 bp, Homo sapien
ccaagcagagtgatggttagaagca

SEQ ID NO: 2123629 - DNA, 25 bp, Homo sapien
tgatggttagaagcattttcacaga

SEQ ID NO: 2123630 - DNA, 25 bp, Homo sapien
catgctgcagggcacacaaccacat

SEQ ID NO: 2123631 - DNA, 25 bp, Homo sapien
atgcatgctgcagggcacacaacca

SEQ ID NO: 2123632 - DNA, 25 bp, Homo sapien
ggaccgagacccgtcagagctctca

SEQ ID NO: 2123633 - DNA, 25 bp, Homo sapien
accgagacccgtcagagctctcagg

SEQ ID NO: 2123634 - DNA, 25 bp, Homo sapien
ctggaccgagacccgtcagagctct

SEQ ID NO: 2123635 - DNA, 25 bp, Homo sapien
ccgagacccgtcagagctctcaggc

SEQ ID NO: 2123636 - DNA, 25 bp, Homo sapien
atcctcccgcgggtagctgccagcc

SEQ ID NO: 2123637 - DNA, 25 bp, Homo sapien
tcccgcgggtagctgccagccgtga

SEQ ID NO: 2123638 - DNA, 25 bp, Homo sapien
gggtagctgccagccgtgacccata

SEQ ID NO: 2123639 - DNA, 25 bp, Homo sapien
caggtggaatggcaacaggggggcc

SEQ ID NO: 2123640 - DNA, 25 bp, Homo sapien
ttgttgggctttcgggcgcattcct

SEQ ID NO: 2123641 - DNA, 25 bp, Homo sapien
ggctttcgggcgcattccttggaaa

SEQ ID NO: 2123642 - DNA, 25 bp, Homo sapien
ctttcgggcgcattccttggaaatc

SEQ ID NO: 2123643 - DNA, 25 bp, Homo sapien
tcttgttgggctttcgggcgcattc

SEQ ID NO: 2123644 - DNA, 25 bp, Homo sapien
cctgggctacttggaggaaggctgg

SEQ ID NO: 2123645 - DNA, 25 bp, Homo sapien
gcctgggctacttggaggaaggctg

SEQ ID NO: 2123646 - DNA, 25 bp, Homo sapien
agcctgggctacttggaggaaggct

SEQ ID NO: 2123647 - DNA, 25 bp, Homo sapien
tatccgctaagtcctcgccctgttt

SEQ ID NO: 2123648 - DNA, 25 bp, Homo sapien
atcttcatccccgtcattatccgct

SEQ ID NO: 2123649 - DNA, 25 bp, Homo sapien
attatccgctaagtcctcgccctgt

SEQ ID NO: 2123650 - DNA, 25 bp, Homo sapien
tcatccccgtcattatccgctaagt

SEQ ID NO: 2123651 - DNA, 25 bp, Homo sapien
ccgccgcgccctgcagcccccaaat

SEQ ID NO: 2123652 - DNA, 25 bp, Homo sapien
cagccgccgcgccctgcagccccca

SEQ ID NO: 2123653 - DNA, 25 bp, Homo sapien
agccgccgcgccctgcagcccccaa

SEQ ID NO: 2123654 - DNA, 25 bp, Homo sapien
gccgcgccctgcagcccccaaatac

SEQ ID NO: 2123655 - DNA, 25 bp, Homo sapien
tctccccatcgagaaggggaggggc

SEQ ID NO: 2123656 - DNA, 25 bp, Homo sapien
tgtagaccatgacgggtttagcacc

SEQ ID NO: 2123657 - DNA, 25 bp, Homo sapien
cataactggcgaggatgctgccatc

SEQ ID NO: 2123658 - DNA, 25 bp, Homo sapien
taagagcctccgtggatgtagacca

SEQ ID NO: 2123659 - DNA, 25 bp, Homo sapien
tgagggtgatgacgatgacattgcc

SEQ ID NO: 2123660 - DNA, 25 bp, Homo sapien
cttggcagcctgatctccagtactc

SEQ ID NO: 2123661 - DNA, 25 bp, Homo sapien
gaggctgacgcaggatgcaccaatg

SEQ ID NO: 2123662 - DNA, 25 bp, Homo sapien
ctcacccagcggagggcctggatct

SEQ ID NO: 2123663 - DNA, 25 bp, Homo sapien
gaaggcaatattctcgctcacccag

SEQ ID NO: 2123664 - DNA, 25 bp, Homo sapien
tagcaccaggtcagatctgtcgtgt

SEQ ID NO: 2123665 - DNA, 25 bp, Homo sapien
ccatggtttaaatgggctaggaagg

SEQ ID NO: 2123666 - DNA, 25 bp, Homo sapien
gaggctgccccatggtttaaatggg

SEQ ID NO: 2123667 - DNA, 25 bp, Homo sapien
catagccataaatctcttcattcct

SEQ ID NO: 2123668 - DNA, 25 bp, Homo sapien
ttacggcgggtctcagggttgtcac

SEQ ID NO: 2123669 - DNA, 25 bp, Homo sapien
cttgatggtctctcgcagggtgtcc

SEQ ID NO: 2123670 - DNA, 25 bp, Homo sapien
tcactggttggtagttcacagccca

SEQ ID NO: 2123671 - DNA, 25 bp, Homo sapien
gaagacagtccaccatatccacggt

SEQ ID NO: 2123672 - DNA, 25 bp, Homo sapien
tagtggcccggtaatgatctcggac

SEQ ID NO: 2123673 - DNA, 25 bp, Homo sapien
cacttcctcaaagcggttggccttg

SEQ ID NO: 2123674 - DNA, 25 bp, Homo sapien
gagtagtcacgagggttctccacca

SEQ ID NO: 2123675 - DNA, 25 bp, Homo sapien
gacccttggtttcagcccgatgtga

SEQ ID NO: 2123676 - DNA, 25 bp, Homo sapien
tggggcagcccggtactgttgaacc

SEQ ID NO: 2123677 - DNA, 25 bp, Homo sapien
aaccctgcggcaaaggtgttatagg

SEQ ID NO: 2123678 - DNA, 25 bp, Homo sapien
gtgttataggggtgcaatgtctgca

SEQ ID NO: 2123679 - DNA, 25 bp, Homo sapien
tgttgaaccctgcggcaaaggtgtt

SEQ ID NO: 2123680 - DNA, 25 bp, Homo sapien
gggtgcgtgcgtatacatatatgtg

SEQ ID NO: 2123681 - DNA, 25 bp, Homo sapien
tgggtgcgtgcgtatacatatatgt

SEQ ID NO: 2123682 - DNA, 25 bp, Homo sapien
tgtgggtgcgtgcgtatacatatat

SEQ ID NO: 2123683 - DNA, 25 bp, Homo sapien
gtgggtgcgtgcgtatacatatatg

SEQ ID NO: 2123684 - DNA, 25 bp, Homo sapien
gctctttaaagctcccaagtctgga

SEQ ID NO: 2123685 - DNA, 25 bp, Homo sapien
tccttggtctgattgtgtgagcact

SEQ ID NO: 2123686 - DNA, 25 bp, Homo sapien
tcggtttaccgaggactcatctgcg

SEQ ID NO: 2123687 - DNA, 25 bp, Homo sapien
aggctcttagcactcatgggttgga

SEQ ID NO: 2123688 - DNA, 25 bp, Homo sapien
ttttgttactatatgcaggatccac

SEQ ID NO: 2123689 - DNA, 25 bp, Homo sapien
gcccatctccagtgtaccatattag

SEQ ID NO: 2123690 - DNA, 25 bp, Homo sapien
tacttgtgtcaagtcaatcactgcc

SEQ ID NO: 2123691 - DNA, 25 bp, Homo sapien
tggactagatgactctcgggtgact

SEQ ID NO: 2123692 - DNA, 25 bp, Homo sapien
gaactctagatacgctgtgggtgat

SEQ ID NO: 2123693 - DNA, 25 bp, Homo sapien
tgcagttactcaaggcagcttacgg

SEQ ID NO: 2123694 - DNA, 25 bp, Homo sapien
gctgcaagtccttaagtgccctggg

SEQ ID NO: 2123695 - DNA, 25 bp, Homo sapien
gctcataactgaacactgggcatca

SEQ ID NO: 2123696 - DNA, 25 bp, Homo sapien
ctgcaattgacaatccaaactgaga

SEQ ID NO: 2123697 - DNA, 25 bp, Homo sapien
agtgggcacaacagaaactcagact

SEQ ID NO: 2123698 - DNA, 25 bp, Homo sapien
tgcaattgacaatccaaactgagag

SEQ ID NO: 2123699 - DNA, 25 bp, Homo sapien
tgagtgggcacaacagaaactcaga

SEQ ID NO: 2123700 - DNA, 25 bp, Homo sapien
gatcgaagtgtacagaacaccatgg

SEQ ID NO: 2123701 - DNA, 25 bp, Homo sapien
taagtaagctctataaggctctcag

SEQ ID NO: 2123702 - DNA, 25 bp, Homo sapien
cagagactgaggacttaaatgaagc

SEQ ID NO: 2123703 - DNA, 25 bp, Homo sapien
caactgcctgtgagccttgaacaag

SEQ ID NO: 2123704 - DNA, 25 bp, Homo sapien
aggctctctgaagacgcctccattt

SEQ ID NO: 2123705 - DNA, 25 bp, Homo sapien
gctctctgaagacgcctccattttg

SEQ ID NO: 2123706 - DNA, 25 bp, Homo sapien
tctctgaagacgcctccattttggt

SEQ ID NO: 2123707 - DNA, 25 bp, Homo sapien
ggctctctgaagacgcctccatttt

SEQ ID NO: 2123708 - DNA, 25 bp, Homo sapien
cctttcccagagaatgtctgcaggc

SEQ ID NO: 2123709 - DNA, 25 bp, Homo sapien
ctttcccagagaatgtctgcaggcg

SEQ ID NO: 2123710 - DNA, 25 bp, Homo sapien
ccctttcccagagaatgtctgcagg

SEQ ID NO: 2123711 - DNA, 25 bp, Homo sapien
caaggtcacaccgttccaaagcggt

SEQ ID NO: 2123712 - DNA, 25 bp, Homo sapien
gaagctcagataagtaactcctcaa

SEQ ID NO: 2123713 - DNA, 25 bp, Homo sapien
cggtaggataggtaggatgaaacaa

SEQ ID NO: 2123714 - DNA, 25 bp, Homo sapien
tctttcgacccatttaggaagcctg

SEQ ID NO: 2123715 - DNA, 25 bp, Homo sapien
cacctgttctgtgcccgcccggtcc

SEQ ID NO: 2123716 - DNA, 25 bp, Homo sapien
tcaaacgccctgacttccgcccacc

SEQ ID NO: 2123717 - DNA, 25 bp, Homo sapien
gagcacttgtgtcccagcgccggac

SEQ ID NO: 2123718 - DNA, 25 bp, Homo sapien
tgtgcccgcccggtccatcgccgca

SEQ ID NO: 2123719 - DNA, 25 bp, Homo sapien
tgaggccacccagacaggtccccta

SEQ ID NO: 2123720 - DNA, 25 bp, Homo sapien
ggggagcgcctatccctgaggccac

SEQ ID NO: 2123721 - DNA, 25 bp, Homo sapien
gcgcctgcgtcccaattcatcaccg

SEQ ID NO: 2123722 - DNA, 25 bp, Homo sapien
catgtctgtgcagggggagtggtcc

SEQ ID NO: 2123723 - DNA, 25 bp, Homo sapien
gcgcagtatgtctttcagggagcca

SEQ ID NO: 2123724 - DNA, 25 bp, Homo sapien
cagaggcagctagcatgaagacggt

SEQ ID NO: 2123725 - DNA, 25 bp, Homo sapien
aactaggatgagctgcagggaccac

SEQ ID NO: 2123726 - DNA, 25 bp, Homo sapien
tgatgacataggtccaccacagtgt

SEQ ID NO: 2123727 - DNA, 25 bp, Homo sapien
gcaggcagaggcctgtgcaccggca

SEQ ID NO: 2123728 - DNA, 25 bp, Homo sapien
aggcagaggcctgtgcaccggcagg

SEQ ID NO: 2123729 - DNA, 25 bp, Homo sapien
ttgatcgagtaatccccagcaggca

SEQ ID NO: 2123730 - DNA, 25 bp, Homo sapien
gaaggaaggttttgatcgagtaatc

SEQ ID NO: 2123731 - DNA, 25 bp, Homo sapien
ctcactgatgtgactccagaaacag

SEQ ID NO: 2123732 - DNA, 25 bp, Homo sapien
atctcttgtacccagtggtcccaga

SEQ ID NO: 2123733 - DNA, 25 bp, Homo sapien
gggtatctgacagcacagggttaag

SEQ ID NO: 2123734 - DNA, 25 bp, Homo sapien
gtttcataattggagacgctgtcgg

SEQ ID NO: 2123735 - DNA, 25 bp, Homo sapien
gaccaacccctgctccaacttatct

SEQ ID NO: 2123736 - DNA, 25 bp, Homo sapien
ccaacccctgctccaacttatctgc

SEQ ID NO: 2123737 - DNA, 25 bp, Homo sapien
gtggccttgaccaacccctgctcca

SEQ ID NO: 2123738 - DNA, 25 bp, Homo sapien
ttgaccaacccctgctccaacttat

SEQ ID NO: 2123739 - DNA, 25 bp, Homo sapien
tttaatgtgtaacatttcaggcaga

SEQ ID NO: 2123740 - DNA, 25 bp, Homo sapien
ttaatgtgtaacatttcaggcagag

SEQ ID NO: 2123741 - DNA, 25 bp, Homo sapien
gtttaatgtgtaacatttcaggcag

SEQ ID NO: 2123742 - DNA, 25 bp, Homo sapien
caagtaactacttcttttgccctgt

SEQ ID NO: 2123743 - DNA, 25 bp, Homo sapien
tcatttgcagcttcagctactcaag

SEQ ID NO: 2123744 - DNA, 25 bp, Homo sapien
tcaaaatcagaggaaggaggtatgt

SEQ ID NO: 2123745 - DNA, 25 bp, Homo sapien
ccagaagtacagtgatttcctcatt

SEQ ID NO: 2123746 - DNA, 25 bp, Homo sapien
tctgccatcttaggttgccatgagc

SEQ ID NO: 2123747 - DNA, 25 bp, Homo sapien
taggcatgacctagggaaaaaccca

SEQ ID NO: 2123748 - DNA, 25 bp, Homo sapien
ccatcttgcattggaggtcccagaa

SEQ ID NO: 2123749 - DNA, 25 bp, Homo sapien
gggagcagactcctgttgtgcagac

SEQ ID NO: 2123750 - DNA, 25 bp, Homo sapien
ggtagctttgcaggacctggtttgg

SEQ ID NO: 2123751 - DNA, 25 bp, Homo sapien
gggtcatcaagcagtaacggttact

SEQ ID NO: 2123752 - DNA, 25 bp, Homo sapien
agagccatttaacccgacctgtgtg

SEQ ID NO: 2123753 - DNA, 25 bp, Homo sapien
cgttgccactgagccagagccattt

SEQ ID NO: 2123754 - DNA, 25 bp, Homo sapien
ctgtcccaggtttcggcaccaaatg

SEQ ID NO: 2123755 - DNA, 25 bp, Homo sapien
atgtgaagagagtccagcaacacgc

SEQ ID NO: 2123756 - DNA, 25 bp, Homo sapien
cctcctgtcccaggtttcggcacca

SEQ ID NO: 2123757 - DNA, 25 bp, Homo sapien
ccatgtgaagagagtccagcaacac

SEQ ID NO: 2123758 - DNA, 25 bp, Homo sapien
ccaggaggtttttgaggcgatcgga

SEQ ID NO: 2123759 - DNA, 25 bp, Homo sapien
gttacccaaagcatccgggatggtc

SEQ ID NO: 2123760 - DNA, 25 bp, Homo sapien
tgtaggcaagctgagtccaaaaggc

SEQ ID NO: 2123761 - DNA, 25 bp, Homo sapien
ggagggtgtattgtacaaagtacat

SEQ ID NO: 2123762 - DNA, 25 bp, Homo sapien
tggatcttacaaagtacaaagggtg

SEQ ID NO: 2123763 - DNA, 25 bp, Homo sapien
ttaagggtgggggagcatattacaa

SEQ ID NO: 2123764 - DNA, 25 bp, Homo sapien
ttgagttcgtgtgaacgacagatgg

SEQ ID NO: 2123765 - DNA, 25 bp, Homo sapien
gcgaggctttgtacctaatgcgcat

SEQ ID NO: 2123766 - DNA, 25 bp, Homo sapien
gacaaagagcgaggctttgtaccta

SEQ ID NO: 2123767 - DNA, 25 bp, Homo sapien
tattggctgccgaatgccaaaggct

SEQ ID NO: 2123768 - DNA, 25 bp, Homo sapien
tcgcgcgctcttttctcgggacggg

SEQ ID NO: 2123769 - DNA, 25 bp, Homo sapien
ttctcgggacgggagaggccgtgta

SEQ ID NO: 2123770 - DNA, 25 bp, Homo sapien
gagctccgtcgtctcgtttccggcg

SEQ ID NO: 2123771 - DNA, 25 bp, Homo sapien
gcggtcgcgcgctcttttctcggga

SEQ ID NO: 2123772 - DNA, 25 bp, Homo sapien
cgcgctcttttctcgggacgggaga

SEQ ID NO: 2123773 - DNA, 25 bp, Homo sapien
gtcgtctcgtttccggcggtcgcgc

SEQ ID NO: 2123774 - DNA, 25 bp, Homo sapien
tacacggcctctcccgtcccgagaa

SEQ ID NO: 2123775 - DNA, 25 bp, Homo sapien
gcgcgaccgccggaaacgagacgac

SEQ ID NO: 2123776 - DNA, 25 bp, Homo sapien
tctcccgtcccgagaaaagagcgcg

SEQ ID NO: 2123777 - DNA, 25 bp, Homo sapien
gtcccgagaaaagagcgcgcgaccg

SEQ ID NO: 2123778 - DNA, 25 bp, Homo sapien
ccgccggaaacgagacgacggagct

SEQ ID NO: 2123779 - DNA, 25 bp, Homo sapien
cgccggaaacgagacgacggagctc

SEQ ID NO: 2123780 - DNA, 25 bp, Homo sapien
gtcgccgttactccgaggagatacc

SEQ ID NO: 2123781 - DNA, 25 bp, Homo sapien
ccgttactccgaggagataccagtc

SEQ ID NO: 2123782 - DNA, 25 bp, Homo sapien
gccgttactccgaggagataccagt

SEQ ID NO: 2123783 - DNA, 25 bp, Homo sapien
gttactccgaggagataccagtcgg

SEQ ID NO: 2123784 - DNA, 25 bp, Homo sapien
tccgaggagataccagtcggtagag

SEQ ID NO: 2123785 - DNA, 25 bp, Homo sapien
tactccgaggagataccagtcggta

SEQ ID NO: 2123786 - DNA, 25 bp, Homo sapien
ccgactggtatctcctcggagtaac

SEQ ID NO: 2123787 - DNA, 25 bp, Homo sapien
taccgactggtatctcctcggagta

SEQ ID NO: 2123788 - DNA, 25 bp, Homo sapien
ctctaccgactggtatctcctcgga

SEQ ID NO: 2123789 - DNA, 25 bp, Homo sapien
ggtatctcctcggagtaacggcgac

SEQ ID NO: 2123790 - DNA, 25 bp, Homo sapien
ctggtatctcctcggagtaacggcg

SEQ ID NO: 2123791 - DNA, 25 bp, Homo sapien
gactggtatctcctcggagtaacgg

SEQ ID NO: 2123792 - DNA, 25 bp, Homo sapien
tggcgcttccgaggccccttgaggc

SEQ ID NO: 2123793 - DNA, 25 bp, Homo sapien
gaggctagggcgaagctaggtttgg

SEQ ID NO: 2123794 - DNA, 25 bp, Homo sapien
ctagggcgaagctaggtttggaggg

SEQ ID NO: 2123795 - DNA, 25 bp, Homo sapien
tggatggcgcttccgaggccccttg

SEQ ID NO: 2123796 - DNA, 25 bp, Homo sapien
gtggatggcgcttccgaggcccctt

SEQ ID NO: 2123797 - DNA, 25 bp, Homo sapien
atggcgcttccgaggccccttgagg

SEQ ID NO: 2123798 - DNA, 25 bp, Homo sapien
aaggggcctcggaagcgccatccac

SEQ ID NO: 2123799 - DNA, 25 bp, Homo sapien
gcctcaaggggcctcggaagcgcca

SEQ ID NO: 2123800 - DNA, 25 bp, Homo sapien
tccaaacctagcttcgccctagcct

SEQ ID NO: 2123801 - DNA, 25 bp, Homo sapien
caaacctagcttcgccctagcctct

SEQ ID NO: 2123802 - DNA, 25 bp, Homo sapien
ctcaaggggcctcggaagcgccatc

SEQ ID NO: 2123803 - DNA, 25 bp, Homo sapien
ccctccaaacctagcttcgccctag

SEQ ID NO: 2123804 - DNA, 25 bp, Homo sapien
gcctcaaggggcctcggaagcgcca

SEQ ID NO: 2123805 - DNA, 25 bp, Homo sapien
tccaaacctagcttcgccctagcct

SEQ ID NO: 2123806 - DNA, 25 bp, Homo sapien
ttcgccctagcctcttccttcgctg

SEQ ID NO: 2123807 - DNA, 25 bp, Homo sapien
tgtggcggcagagacaaggcctcaa

SEQ ID NO: 2123808 - DNA, 25 bp, Homo sapien
aaggggcctcggaagcgccatccac

SEQ ID NO: 2123809 - DNA, 25 bp, Homo sapien
tgagaaggcagtgtggcggcagaga

SEQ ID NO: 2123810 - DNA, 25 bp, Homo sapien
tcatctccgaatcttacccgtgtca

SEQ ID NO: 2123811 - DNA, 25 bp, Homo sapien
ccctgtttctttgtgcaactcatct

SEQ ID NO: 2123812 - DNA, 25 bp, Homo sapien
ctcaactcgcttcgcttcgggcttt

SEQ ID NO: 2123813 - DNA, 25 bp, Homo sapien
ccattttcgttcctgccctgtttct

SEQ ID NO: 2123814 - DNA, 25 bp, Homo sapien
tttctcaactcgcttcgcttcgggc

SEQ ID NO: 2123815 - DNA, 25 bp, Homo sapien
tgtgcaactcatctccgaatcttac

SEQ ID NO: 2123816 - DNA, 25 bp, Homo sapien
agaaacagggcaggaacgaaaatgg

SEQ ID NO: 2123817 - DNA, 25 bp, Homo sapien
gcccgaagcgaagcgagttgagaaa

SEQ ID NO: 2123818 - DNA, 25 bp, Homo sapien
tgacacgggtaagattcggagatga

SEQ ID NO: 2123819 - DNA, 25 bp, Homo sapien
agatgagttgcacaaagaaacaggg

SEQ ID NO: 2123820 - DNA, 25 bp, Homo sapien
gtaagattcggagatgagttgcaca

SEQ ID NO: 2123821 - DNA, 25 bp, Homo sapien
aaagcccgaagcgaagcgagttgag

SEQ ID NO: 2123822 - DNA, 25 bp, Homo sapien
aactgggaggcactttgctgtctgc

SEQ ID NO: 2123823 - DNA, 25 bp, Homo sapien
ggaactgggaggcactttgctgtct

SEQ ID NO: 2123824 - DNA, 25 bp, Homo sapien
tttgctgtctgcaatcgaagttgag

SEQ ID NO: 2123825 - DNA, 25 bp, Homo sapien
ggcactttgctgtctgcaatcgaag

SEQ ID NO: 2123826 - DNA, 25 bp, Homo sapien
agaagtcgaggttagagggaactgg

SEQ ID NO: 2123827 - DNA, 25 bp, Homo sapien
gaggcactttgctgtctgcaatcga

SEQ ID NO: 2123828 - DNA, 25 bp, Homo sapien
ccagttccctctaacctcgacttct

SEQ ID NO: 2123829 - DNA, 25 bp, Homo sapien
gattgcagacagcaaagtgcctccc

SEQ ID NO: 2123830 - DNA, 25 bp, Homo sapien
tcaacttcgattgcagacagcaaag

SEQ ID NO: 2123831 - DNA, 25 bp, Homo sapien
agacagcaaagtgcctcccagttcc

SEQ ID NO: 2123832 - DNA, 25 bp, Homo sapien
cttcgattgcagacagcaaagtgcc

SEQ ID NO: 2123833 - DNA, 25 bp, Homo sapien
gcagacagcaaagtgcctcccagtt

SEQ ID NO: 2123834 - DNA, 25 bp, Homo sapien
ggcccagtatttaggcgacagtgaa

SEQ ID NO: 2123835 - DNA, 25 bp, Homo sapien
gaatttattactctgaagagggttc

SEQ ID NO: 2123836 - DNA, 25 bp, Homo sapien
tattggtggtcatcagaagtaggtg

SEQ ID NO: 2123837 - DNA, 25 bp, Homo sapien
tggtcatcagaagtaggtgatagga

SEQ ID NO: 2123838 - DNA, 25 bp, Homo sapien
ggcgacagtgaatttattactctga

SEQ ID NO: 2123839 - DNA, 25 bp, Homo sapien
ccaaattatattggtggtcatcaga

SEQ ID NO: 2123840 - DNA, 25 bp, Homo sapien
tctgatgaccaccaatataatttgg

SEQ ID NO: 2123841 - DNA, 25 bp, Homo sapien
gaaccctcttcagagtaataaattc

SEQ ID NO: 2123842 - DNA, 25 bp, Homo sapien
tatcacctacttctgatgaccacca

SEQ ID NO: 2123843 - DNA, 25 bp, Homo sapien
taaattcactgtcgcctaaatactg

SEQ ID NO: 2123844 - DNA, 25 bp, Homo sapien
tcagagtaataaattcactgtcgcc

SEQ ID NO: 2123845 - DNA, 25 bp, Homo sapien
tcactgtcgcctaaatactgggcct

SEQ ID NO: 2123846 - DNA, 25 bp, Homo sapien
taagtagtacacaattgaggaacac

SEQ ID NO: 2123847 - DNA, 25 bp, Homo sapien
tatttccacggtatgtactgtgggc

SEQ ID NO: 2123848 - DNA, 25 bp, Homo sapien
tcatagccactttgagagacaggta

SEQ ID NO: 2123849 - DNA, 25 bp, Homo sapien
tttatcatcccctttagaacagctg

SEQ ID NO: 2123850 - DNA, 25 bp, Homo sapien
tactgtatgccagtagtgagccagc

SEQ ID NO: 2123851 - DNA, 25 bp, Homo sapien
tcaaacctaaggatgcctaacctca

SEQ ID NO: 2123852 - DNA, 25 bp, Homo sapien
cataccgtggaaataacagtggtac

SEQ ID NO: 2123853 - DNA, 25 bp, Homo sapien
tacctgtctctcaaagtggctatga

SEQ ID NO: 2123854 - DNA, 25 bp, Homo sapien
aatgctggctcactactggcataca

SEQ ID NO: 2123855 - DNA, 25 bp, Homo sapien
tatgggctgtgaggttaggcatcct

SEQ ID NO: 2123856 - DNA, 25 bp, Homo sapien
tcctagcccacagtacataccgtgg

SEQ ID NO: 2123857 - DNA, 25 bp, Homo sapien
tggaaagacaaatgactactaaagc

SEQ ID NO: 2123858 - DNA, 25 bp, Homo sapien
tttaacttggagaagcaaaaccata

SEQ ID NO: 2123859 - DNA, 25 bp, Homo sapien
tggagaagcaaaaccatactccaag

SEQ ID NO: 2123860 - DNA, 25 bp, Homo sapien
gagaagcaaaaccatactccaagaa

SEQ ID NO: 2123861 - DNA, 25 bp, Homo sapien
agaagcaaaaccatactccaagaaa

SEQ ID NO: 2123862 - DNA, 25 bp, Homo sapien
acttggagaagcaaaaccatactcc

SEQ ID NO: 2123863 - DNA, 25 bp, Homo sapien
taacttggagaagcaaaaccatact

SEQ ID NO: 2123864 - DNA, 25 bp, Homo sapien
tatggttttgcttctccaagttaaa

SEQ ID NO: 2123865 - DNA, 25 bp, Homo sapien
tggagtatggttttgcttctccaag

SEQ ID NO: 2123866 - DNA, 25 bp, Homo sapien
tcttggagtatggttttgcttctcc

SEQ ID NO: 2123867 - DNA, 25 bp, Homo sapien
gtatggttttgcttctccaagttaa

SEQ ID NO: 2123868 - DNA, 25 bp, Homo sapien
gagtatggttttgcttctccaagtt

SEQ ID NO: 2123869 - DNA, 25 bp, Homo sapien
tttcttggagtatggttttgcttct

SEQ ID NO: 2123870 - DNA, 25 bp, Homo sapien
accgccaatacctgcaaatgggcaa

SEQ ID NO: 2123871 - DNA, 25 bp, Homo sapien
ccgccaatacctgcaaatgggcaac

SEQ ID NO: 2123872 - DNA, 25 bp, Homo sapien
accaccgccaatacctgcaaatggg

SEQ ID NO: 2123873 - DNA, 25 bp, Homo sapien
gccaatacctgcaaatgggcaacag

SEQ ID NO: 2123874 - DNA, 25 bp, Homo sapien
cgccaatacctgcaaatgggcaaca

SEQ ID NO: 2123875 - DNA, 25 bp, Homo sapien
caccgccaatacctgcaaatgggca

SEQ ID NO: 2123876 - DNA, 25 bp, Homo sapien
tgttgcccatttgcaggtattggcg

SEQ ID NO: 2123877 - DNA, 25 bp, Homo sapien
ttgcccatttgcaggtattggcggt

SEQ ID NO: 2123878 - DNA, 25 bp, Homo sapien
gttgcccatttgcaggtattggcgg

SEQ ID NO: 2123879 - DNA, 25 bp, Homo sapien
ctgttgcccatttgcaggtattggc

SEQ ID NO: 2123880 - DNA, 25 bp, Homo sapien
cccatttgcaggtattggcggtggt

SEQ ID NO: 2123881 - DNA, 25 bp, Homo sapien
tgcccatttgcaggtattggcggtg

SEQ ID NO: 2123882 - DNA, 25 bp, Homo sapien
ctgaaagaatgggaactgttaaggt

SEQ ID NO: 2123883 - DNA, 25 bp, Homo sapien
gaatgggaactgttaaggttatgaa

SEQ ID NO: 2123884 - DNA, 25 bp, Homo sapien
cctgaaagaatgggaactgttaagg

SEQ ID NO: 2123885 - DNA, 25 bp, Homo sapien
aagaatgggaactgttaaggttatg

SEQ ID NO: 2123886 - DNA, 25 bp, Homo sapien
agaatgggaactgttaaggttatga

SEQ ID NO: 2123887 - DNA, 25 bp, Homo sapien
ttcataaccttaacagttcccattc

SEQ ID NO: 2123888 - DNA, 25 bp, Homo sapien
cataaccttaacagttcccattctt

SEQ ID NO: 2123889 - DNA, 25 bp, Homo sapien
ccttaacagttcccattctttcagg

SEQ ID NO: 2123890 - DNA, 25 bp, Homo sapien
tcataaccttaacagttcccattct

SEQ ID NO: 2123891 - DNA, 25 bp, Homo sapien
accttaacagttcccattctttcag

SEQ ID NO: 2123892 - DNA, 25 bp, Homo sapien
cccgacatcactgaggaagaaatga

SEQ ID NO: 2123893 - DNA, 25 bp, Homo sapien
agaagaccttcacccaacgaagccg

SEQ ID NO: 2123894 - DNA, 25 bp, Homo sapien
aatcttcctcccgacatcactgagg

SEQ ID NO: 2123895 - DNA, 25 bp, Homo sapien
cacccaacgaagccgtctttttgtg

SEQ ID NO: 2123896 - DNA, 25 bp, Homo sapien
tgggaaatcttcctcccgacatcac

SEQ ID NO: 2123897 - DNA, 25 bp, Homo sapien
tcccgacatcactgaggaagaaatg

SEQ ID NO: 2123898 - DNA, 25 bp, Homo sapien
cacaaaaagacggcttcgttgggtg

SEQ ID NO: 2123899 - DNA, 25 bp, Homo sapien
cggcttcgttgggtgaaggtcttct

SEQ ID NO: 2123900 - DNA, 25 bp, Homo sapien
tcatttcttcctcagtgatgtcggg

SEQ ID NO: 2123901 - DNA, 25 bp, Homo sapien
cctcagtgatgtcgggaggaagatt

SEQ ID NO: 2123902 - DNA, 25 bp, Homo sapien
catttcttcctcagtgatgtcggga

SEQ ID NO: 2123903 - DNA, 25 bp, Homo sapien
gtgatgtcgggaggaagatttccca

SEQ ID NO: 2123904 - DNA, 25 bp, Homo sapien
gcaggcgaagtcttcattcataagg

SEQ ID NO: 2123905 - DNA, 25 bp, Homo sapien
ccttatgaatgaagacttcgcctgc

SEQ ID NO: 2123906 - DNA, 25 bp, Homo sapien
agttttttgcctaggatactggagc

SEQ ID NO: 2123907 - DNA, 25 bp, Homo sapien
tcaactaggctaagctgatagggct

SEQ ID NO: 2123908 - DNA, 25 bp, Homo sapien
tactggagctaaagtatgccctttg

SEQ ID NO: 2123909 - DNA, 25 bp, Homo sapien
ccatgatcaagagatgggtatctca

SEQ ID NO: 2123910 - DNA, 25 bp, Homo sapien
gcatggtatacgtctgtagtctaac

SEQ ID NO: 2123911 - DNA, 25 bp, Homo sapien
aaaggcaacgcaccacggtgcctgg

SEQ ID NO: 2123912 - DNA, 25 bp, Homo sapien
tgagatacccatctcttgatcatgg

SEQ ID NO: 2123913 - DNA, 25 bp, Homo sapien
tagctccagtatcctaggcaaaaaa

SEQ ID NO: 2123914 - DNA, 25 bp, Homo sapien
ccaaagggcatactttagctccagt

SEQ ID NO: 2123915 - DNA, 25 bp, Homo sapien
aatcagccctatcagcttagcctag

SEQ ID NO: 2123916 - DNA, 25 bp, Homo sapien
gttagactacagacgtataccatgc

SEQ ID NO: 2123917 - DNA, 25 bp, Homo sapien
aaataaaccaggcaccgtggtgcgt

SEQ ID NO: 2123918 - DNA, 25 bp, Homo sapien
aactagggtggccaaagagctgaag

SEQ ID NO: 2123919 - DNA, 25 bp, Homo sapien
gcaaactagggtggccaaagagctg

SEQ ID NO: 2123920 - DNA, 25 bp, Homo sapien
actagggtggccaaagagctgaagc

SEQ ID NO: 2123921 - DNA, 25 bp, Homo sapien
tggccaaagagctgaagcacacagt

SEQ ID NO: 2123922 - DNA, 25 bp, Homo sapien
agagctgaagcacacagttaagttc

SEQ ID NO: 2123923 - DNA, 25 bp, Homo sapien
gccaaagagctgaagcacacagtta

SEQ ID NO: 2123924 - DNA, 25 bp, Homo sapien
ctacatgtgatttattgcaaggcca

SEQ ID NO: 2123925 - DNA, 25 bp, Homo sapien
catgtgatttattgcaaggccatca

SEQ ID NO: 2123926 - DNA, 25 bp, Homo sapien
tacatgtgatttattgcaaggccat

SEQ ID NO: 2123927 - DNA, 25 bp, Homo sapien
tgtgatttattgcaaggccatcaga

SEQ ID NO: 2123928 - DNA, 25 bp, Homo sapien
actacatgtgatttattgcaaggcc

SEQ ID NO: 2123929 - DNA, 25 bp, Homo sapien
aactacatgtgatttattgcaaggc

SEQ ID NO: 2123930 - DNA, 25 bp, Homo sapien
tggccttgcaataaatcacatgtag

SEQ ID NO: 2123931 - DNA, 25 bp, Homo sapien
tgatggccttgcaataaatcacatg

SEQ ID NO: 2123932 - DNA, 25 bp, Homo sapien
tctgatggccttgcaataaatcaca

SEQ ID NO: 2123933 - DNA, 25 bp, Homo sapien
gatggccttgcaataaatcacatgt

SEQ ID NO: 2123934 - DNA, 25 bp, Homo sapien
gccttgcaataaatcacatgtagtt

SEQ ID NO: 2123935 - DNA, 25 bp, Homo sapien
ggccttgcaataaatcacatgtagt

SEQ ID NO: 2123936 - DNA, 25 bp, Homo sapien
actgtgtgcttcagctctttggcca

SEQ ID NO: 2123937 - DNA, 25 bp, Homo sapien
taactgtgtgcttcagctctttggc

SEQ ID NO: 2123938 - DNA, 25 bp, Homo sapien
gcttcagctctttggccaccctagt

SEQ ID NO: 2123939 - DNA, 25 bp, Homo sapien
aactgtgtgcttcagctctttggcc

SEQ ID NO: 2123940 - DNA, 25 bp, Homo sapien
cagctctttggccaccctagtttgc

SEQ ID NO: 2123941 - DNA, 25 bp, Homo sapien
gaacttaactgtgtgcttcagctct

SEQ ID NO: 2123942 - DNA, 25 bp, Homo sapien
ctgttgatggctgctaaggtgttct

SEQ ID NO: 2123943 - DNA, 25 bp, Homo sapien
actgttgatggctgctaaggtgttc

SEQ ID NO: 2123944 - DNA, 25 bp, Homo sapien
tagactgttgatggctgctaaggtg

SEQ ID NO: 2123945 - DNA, 25 bp, Homo sapien
tgttgatggctgctaaggtgttctt

SEQ ID NO: 2123946 - DNA, 25 bp, Homo sapien
gactgttgatggctgctaaggtgtt

SEQ ID NO: 2123947 - DNA, 25 bp, Homo sapien
gttgatggctgctaaggtgttcttt

SEQ ID NO: 2123948 - DNA, 25 bp, Homo sapien
gaacaccttagcagccatcaacagt

SEQ ID NO: 2123949 - DNA, 25 bp, Homo sapien
aacaccttagcagccatcaacagtc

SEQ ID NO: 2123950 - DNA, 25 bp, Homo sapien
agaacaccttagcagccatcaacag

SEQ ID NO: 2123951 - DNA, 25 bp, Homo sapien
aagaacaccttagcagccatcaaca

SEQ ID NO: 2123952 - DNA, 25 bp, Homo sapien
aaagaacaccttagcagccatcaac

SEQ ID NO: 2123953 - DNA, 25 bp, Homo sapien
caccttagcagccatcaacagtcta

SEQ ID NO: 2123954 - DNA, 25 bp, Homo sapien
gcatcccttacagttcgaaaccttc

SEQ ID NO: 2123955 - DNA, 25 bp, Homo sapien
catagtgcatcccttacagttcgaa

SEQ ID NO: 2123956 - DNA, 25 bp, Homo sapien
agtggagctggacaatatgccactc

SEQ ID NO: 2123957 - DNA, 25 bp, Homo sapien
aaagtggagctggacaatatgccac

SEQ ID NO: 2123958 - DNA, 25 bp, Homo sapien
gtgcatcccttacagttcgaaacct

SEQ ID NO: 2123959 - DNA, 25 bp, Homo sapien
tagtgcatcccttacagttcgaaac

SEQ ID NO: 2123960 - DNA, 25 bp, Homo sapien
gaaggtttcgaactgtaagggatgc

SEQ ID NO: 2123961 - DNA, 25 bp, Homo sapien
gtggcatattgtccagctccacttt

SEQ ID NO: 2123962 - DNA, 25 bp, Homo sapien
ttcgaactgtaagggatgcactatg

SEQ ID NO: 2123963 - DNA, 25 bp, Homo sapien
gagtggcatattgtccagctccact

SEQ ID NO: 2123964 - DNA, 25 bp, Homo sapien
aggtttcgaactgtaagggatgcac

SEQ ID NO: 2123965 - DNA, 25 bp, Homo sapien
gtttcgaactgtaagggatgcacta

SEQ ID NO: 2123966 - DNA, 25 bp, Homo sapien
tagagagggctgtagtcattgtgga

SEQ ID NO: 2123967 - DNA, 25 bp, Homo sapien
aggtagagagggctgtagtcattgt

SEQ ID NO: 2123968 - DNA, 25 bp, Homo sapien
gagagggctgtagtcattgtggatg

SEQ ID NO: 2123969 - DNA, 25 bp, Homo sapien
tcattgtggatgatcgaggaaggcc

SEQ ID NO: 2123970 - DNA, 25 bp, Homo sapien
cattgtggatgatcgaggaaggccc

SEQ ID NO: 2123971 - DNA, 25 bp, Homo sapien
ggtagagagggctgtagtcattgtg

SEQ ID NO: 2123972 - DNA, 25 bp, Homo sapien
cacaatgactacagccctctctacc

SEQ ID NO: 2123973 - DNA, 25 bp, Homo sapien
gggccttcctcgatcatccacaatg

SEQ ID NO: 2123974 - DNA, 25 bp, Homo sapien
tccacaatgactacagccctctcta

SEQ ID NO: 2123975 - DNA, 25 bp, Homo sapien
acaatgactacagccctctctacct

SEQ ID NO: 2123976 - DNA, 25 bp, Homo sapien
ggccttcctcgatcatccacaatga

SEQ ID NO: 2123977 - DNA, 25 bp, Homo sapien
catccacaatgactacagccctctc

SEQ ID NO: 2123978 - DNA, 25 bp, Homo sapien
gggccttcctcgatcatccacaatg

SEQ ID NO: 2123979 - DNA, 25 bp, Homo sapien
gcatctgtccagagctttccgagca

SEQ ID NO: 2123980 - DNA, 25 bp, Homo sapien
cgagcagctggcttccctgagaact

SEQ ID NO: 2123981 - DNA, 25 bp, Homo sapien
ttccagcagttcgttggacacatac

SEQ ID NO: 2123982 - DNA, 25 bp, Homo sapien
ggaaggagccttcactgcatctgtc

SEQ ID NO: 2123983 - DNA, 25 bp, Homo sapien
tcaacaatgccttttcctgagggcc

SEQ ID NO: 2123984 - DNA, 25 bp, Homo sapien
gtgtttaccacaagtcatttctcag

SEQ ID NO: 2123985 - DNA, 25 bp, Homo sapien
gcagtatctcttagtgtttaccaca

SEQ ID NO: 2123986 - DNA, 25 bp, Homo sapien
tcatgtagtcagtgttaagtctctc

SEQ ID NO: 2123987 - DNA, 25 bp, Homo sapien
cattcggtaggttgtcatgtagtca

SEQ ID NO: 2123988 - DNA, 25 bp, Homo sapien
cttatattaatagacgtgggatgac

SEQ ID NO: 2123989 - DNA, 25 bp, Homo sapien
tttggtactaagctttctcgtatga

SEQ ID NO: 2123990 - DNA, 25 bp, Homo sapien
tcatacgagaaagcttagtaccaaa

SEQ ID NO: 2123991 - DNA, 25 bp, Homo sapien
ctgagaaatgacttgtggtaaacac

SEQ ID NO: 2123992 - DNA, 25 bp, Homo sapien
gagagacttaacactgactacatga

SEQ ID NO: 2123993 - DNA, 25 bp, Homo sapien
gactacatgacaacctaccgaatga

SEQ ID NO: 2123994 - DNA, 25 bp, Homo sapien
gtcatcccacgtctattaatataag

SEQ ID NO: 2123995 - DNA, 25 bp, Homo sapien
tgtggtaaacactaagagatactgc

SEQ ID NO: 2123996 - DNA, 25 bp, Homo sapien
ttccagagaagctggttataaaaaa

SEQ ID NO: 2123997 - DNA, 25 bp, Homo sapien
gaagctggttataaaaaaccagcaa

SEQ ID NO: 2123998 - DNA, 25 bp, Homo sapien
aagctggttataaaaaaccagcaat

SEQ ID NO: 2123999 - DNA, 25 bp, Homo sapien
tccagagaagctggttataaaaaac

SEQ ID NO: 2124000 - DNA, 25 bp, Homo sapien
agctggttataaaaaaccagcaatt

SEQ ID NO: 2124001 - DNA, 25 bp, Homo sapien
aattgctggttttttataaccagct

SEQ ID NO: 2124002 - DNA, 25 bp, Homo sapien
gttttttataaccagcttctctgga

SEQ ID NO: 2124003 - DNA, 25 bp, Homo sapien
ttttttataaccagcttctctggaa

SEQ ID NO: 2124004 - DNA, 25 bp, Homo sapien
ttgctggttttttataaccagcttc

SEQ ID NO: 2124005 - DNA, 25 bp, Homo sapien
attgctggttttttataaccagctt

SEQ ID NO: 2124006 - DNA, 25 bp, Homo sapien
gcagtcttgatagatttccctatta

SEQ ID NO: 2124007 - DNA, 25 bp, Homo sapien
tgcagtcttgatagatttccctatt

SEQ ID NO: 2124008 - DNA, 25 bp, Homo sapien
tatgcagtcttgatagatttcccta

SEQ ID NO: 2124009 - DNA, 25 bp, Homo sapien
cagtcttgatagatttccctattag

SEQ ID NO: 2124010 - DNA, 25 bp, Homo sapien
gtatgcagtcttgatagatttccct

SEQ ID NO: 2124011 - DNA, 25 bp, Homo sapien
atgcagtcttgatagatttccctat

SEQ ID NO: 2124012 - DNA, 25 bp, Homo sapien
ctaatagggaaatctatcaagactg

SEQ ID NO: 2124013 - DNA, 25 bp, Homo sapien
agggaaatctatcaagactgcatac

SEQ ID NO: 2124014 - DNA, 25 bp, Homo sapien
atagggaaatctatcaagactgcat

SEQ ID NO: 2124015 - DNA, 25 bp, Homo sapien
tagggaaatctatcaagactgcata

SEQ ID NO: 2124016 - DNA, 25 bp, Homo sapien
taatagggaaatctatcaagactgc

SEQ ID NO: 2124017 - DNA, 25 bp, Homo sapien
aatagggaaatctatcaagactgca

SEQ ID NO: 2124018 - DNA, 25 bp, Homo sapien
tgaatatgccatgcgctggaaggca

SEQ ID NO: 2124019 - DNA, 25 bp, Homo sapien
atgaatatgccatgcgctggaaggc

SEQ ID NO: 2124020 - DNA, 25 bp, Homo sapien
atgccatgcgctggaaggcactcat

SEQ ID NO: 2124021 - DNA, 25 bp, Homo sapien
tatgccatgcgctggaaggcactca

SEQ ID NO: 2124022 - DNA, 25 bp, Homo sapien
atatgccatgcgctggaaggcactc

SEQ ID NO: 2124023 - DNA, 25 bp, Homo sapien
tgccatgcgctggaaggcactcatt

SEQ ID NO: 2124024 - DNA, 25 bp, Homo sapien
aatgagtgccttccagcgcatggca

SEQ ID NO: 2124025 - DNA, 25 bp, Homo sapien
gccttccagcgcatggcatattcat

SEQ ID NO: 2124026 - DNA, 25 bp, Homo sapien
tgccttccagcgcatggcatattca

SEQ ID NO: 2124027 - DNA, 25 bp, Homo sapien
atgagtgccttccagcgcatggcat

SEQ ID NO: 2124028 - DNA, 25 bp, Homo sapien
tgagtgccttccagcgcatggcata

SEQ ID NO: 2124029 - DNA, 25 bp, Homo sapien
gagtgccttccagcgcatggcatat

SEQ ID NO: 2124030 - DNA, 25 bp, Homo sapien
ggtgcaaaaacgaaagcaactggag

SEQ ID NO: 2124031 - DNA, 25 bp, Homo sapien
gcaaaaacgaaagcaactggagctc

SEQ ID NO: 2124032 - DNA, 25 bp, Homo sapien
aagaggtgcaaaaacgaaagcaact

SEQ ID NO: 2124033 - DNA, 25 bp, Homo sapien
caagaggtgcaaaaacgaaagcaac

SEQ ID NO: 2124034 - DNA, 25 bp, Homo sapien
gaggtgcaaaaacgaaagcaactgg

SEQ ID NO: 2124035 - DNA, 25 bp, Homo sapien
gtgcaaaaacgaaagcaactggagc

SEQ ID NO: 2124036 - DNA, 25 bp, Homo sapien
gctccagttgctttcgtttttgcac

SEQ ID NO: 2124037 - DNA, 25 bp, Homo sapien
gagctccagttgctttcgtttttgc

SEQ ID NO: 2124038 - DNA, 25 bp, Homo sapien
gttgctttcgtttttgcacctcttg

SEQ ID NO: 2124039 - DNA, 25 bp, Homo sapien
ctccagttgctttcgtttttgcacc

SEQ ID NO: 2124040 - DNA, 25 bp, Homo sapien
ccagttgctttcgtttttgcacctc

SEQ ID NO: 2124041 - DNA, 25 bp, Homo sapien
cagttgctttcgtttttgcacctct

SEQ ID NO: 2124042 - DNA, 25 bp, Homo sapien
tcctactgccatgctacctcgtgta

SEQ ID NO: 2124043 - DNA, 25 bp, Homo sapien
cagtaggccagtctccttggttgag

SEQ ID NO: 2124044 - DNA, 25 bp, Homo sapien
cacttaacagtgagtttcctggtga

SEQ ID NO: 2124045 - DNA, 25 bp, Homo sapien
cctgttaatctgctcaagttctgaa

SEQ ID NO: 2124046 - DNA, 25 bp, Homo sapien
cagctgaatgctggtctcatgaggt

SEQ ID NO: 2124047 - DNA, 25 bp, Homo sapien
tgcccatggtcctagaagttacctg

SEQ ID NO: 2124048 - DNA, 25 bp, Homo sapien
taaatacacgaggtagcatggcagt

SEQ ID NO: 2124049 - DNA, 25 bp, Homo sapien
cagaacttgagcagattaacaggag

SEQ ID NO: 2124050 - DNA, 25 bp, Homo sapien
gaaacctcatgagaccagcattcag

SEQ ID NO: 2124051 - DNA, 25 bp, Homo sapien
gagactcaaccaaggagactggcct

SEQ ID NO: 2124052 - DNA, 25 bp, Homo sapien
tatcagttcaccaggaaactcactg

SEQ ID NO: 2124053 - DNA, 25 bp, Homo sapien
ggtaacttctaggaccatgggcagc

SEQ ID NO: 2124054 - DNA, 25 bp, Homo sapien
gcaggaaggattcaagggaaccttc

SEQ ID NO: 2124055 - DNA, 25 bp, Homo sapien
agcaggaaggattcaagggaacctt

SEQ ID NO: 2124056 - DNA, 25 bp, Homo sapien
gaaggttcccttgaatccttcctgc

SEQ ID NO: 2124057 - DNA, 25 bp, Homo sapien
aaggttcccttgaatccttcctgct

SEQ ID NO: 2124058 - DNA, 25 bp, Homo sapien
tgcggcgacagcaggaaggattcaa

SEQ ID NO: 2124059 - DNA, 25 bp, Homo sapien
gattcaagggaaccttccctgatgc

SEQ ID NO: 2124060 - DNA, 25 bp, Homo sapien
caagaagaaatgatgcggcgacagc

SEQ ID NO: 2124061 - DNA, 25 bp, Homo sapien
agcgcaggcgccgtgaagaagagat

SEQ ID NO: 2124062 - DNA, 25 bp, Homo sapien
agatgcggcggcagcaagaagaaat

SEQ ID NO: 2124063 - DNA, 25 bp, Homo sapien
gacagcaggaaggattcaagggaac

SEQ ID NO: 2124064 - DNA, 25 bp, Homo sapien
gcatctcttcttcacggcgcctgcg

SEQ ID NO: 2124065 - DNA, 25 bp, Homo sapien
atttcttcttgctgccgccgcatct

SEQ ID NO: 2124066 - DNA, 25 bp, Homo sapien
ttcccttgaatccttcctgctgtcg

SEQ ID NO: 2124067 - DNA, 25 bp, Homo sapien
tgaatccttcctgctgtcgccgcat

SEQ ID NO: 2124068 - DNA, 25 bp, Homo sapien
gctgtcgccgcatcatttcttcttg

SEQ ID NO: 2124069 - DNA, 25 bp, Homo sapien
cgcatcagggaaggttcccttgaat

SEQ ID NO: 2124070 - DNA, 25 bp, Homo sapien
gaatgcactgctgtcttggactgtc

SEQ ID NO: 2124071 - DNA, 25 bp, Homo sapien
catgtgcccgtgatgtaccagacca

SEQ ID NO: 2124072 - DNA, 25 bp, Homo sapien
caaccttggctagtcctctgctgtc

SEQ ID NO: 2124073 - DNA, 25 bp, Homo sapien
aagaggagatcttgcctcacaagca

SEQ ID NO: 2124074 - DNA, 25 bp, Homo sapien
gaattgtctgctaggttaccggtta

SEQ ID NO: 2124075 - DNA, 25 bp, Homo sapien
taataggaggctctggcttacgtcc

SEQ ID NO: 2124076 - DNA, 25 bp, Homo sapien
tcacagagctactaggacgtaagcc

SEQ ID NO: 2124077 - DNA, 25 bp, Homo sapien
tcaaggaccacacactaagggaagt

SEQ ID NO: 2124078 - DNA, 25 bp, Homo sapien
tcaagacagtccaagacagcagtgc

SEQ ID NO: 2124079 - DNA, 25 bp, Homo sapien
catcacgggcacatgggagatatac

SEQ ID NO: 2124080 - DNA, 25 bp, Homo sapien
gacagcagaggactagccaaggttg

SEQ ID NO: 2124081 - DNA, 25 bp, Homo sapien
ggactggtctggtacatcacgggca

SEQ ID NO: 2124082 - DNA, 25 bp, Homo sapien
cggatgggtcagatggctatgggag

SEQ ID NO: 2124083 - DNA, 25 bp, Homo sapien
agattcggatgggtcagatggctat

SEQ ID NO: 2124084 - DNA, 25 bp, Homo sapien
agagagcaggagattcggatgggtc

SEQ ID NO: 2124085 - DNA, 25 bp, Homo sapien
gagagcaggagattcggatgggtca

SEQ ID NO: 2124086 - DNA, 25 bp, Homo sapien
ttcggatgggtcagatggctatggg

SEQ ID NO: 2124087 - DNA, 25 bp, Homo sapien
gagcaggagattcggatgggtcaga

SEQ ID NO: 2124088 - DNA, 25 bp, Homo sapien
atagccatctgacccatccgaatct

SEQ ID NO: 2124089 - DNA, 25 bp, Homo sapien
ctgacccatccgaatctcctgctct

SEQ ID NO: 2124090 - DNA, 25 bp, Homo sapien
tctgacccatccgaatctcctgctc

SEQ ID NO: 2124091 - DNA, 25 bp, Homo sapien
gacccatccgaatctcctgctctct

SEQ ID NO: 2124092 - DNA, 25 bp, Homo sapien
ccatagccatctgacccatccgaat

SEQ ID NO: 2124093 - DNA, 25 bp, Homo sapien
ctcccatagccatctgacccatccg

SEQ ID NO: 2124094 - DNA, 25 bp, Homo sapien
ataaacaacagaggtgccatgcccc

SEQ ID NO: 2124095 - DNA, 25 bp, Homo sapien
tgctatgggcataaacaacagaggt

SEQ ID NO: 2124096 - DNA, 25 bp, Homo sapien
gctatgggcataaacaacagaggtg

SEQ ID NO: 2124097 - DNA, 25 bp, Homo sapien
tgggcataaacaacagaggtgccat

SEQ ID NO: 2124098 - DNA, 25 bp, Homo sapien
tatgggcataaacaacagaggtgcc

SEQ ID NO: 2124099 - DNA, 25 bp, Homo sapien
ggcataaacaacagaggtgccatgc

SEQ ID NO: 2124100 - DNA, 25 bp, Homo sapien
ggcacctctgttgtttatgcccata

SEQ ID NO: 2124101 - DNA, 25 bp, Homo sapien
gcacctctgttgtttatgcccatag

SEQ ID NO: 2124102 - DNA, 25 bp, Homo sapien
acctctgttgtttatgcccatagca

SEQ ID NO: 2124103 - DNA, 25 bp, Homo sapien
gggcatggcacctctgttgtttatg

SEQ ID NO: 2124104 - DNA, 25 bp, Homo sapien
gcatggcacctctgttgtttatgcc

SEQ ID NO: 2124105 - DNA, 25 bp, Homo sapien
catggcacctctgttgtttatgccc

SEQ ID NO: 2124106 - DNA, 25 bp, Homo sapien
tgccactatgatgccggatggaact

SEQ ID NO: 2124107 - DNA, 25 bp, Homo sapien
gacctgccactatgatgccggatgg

SEQ ID NO: 2124108 - DNA, 25 bp, Homo sapien
tccaggacctgccactatgatgccg

SEQ ID NO: 2124109 - DNA, 25 bp, Homo sapien
tatgatgccggatggaactttggga

SEQ ID NO: 2124110 - DNA, 25 bp, Homo sapien
tgatgccggatggaactttgggatt

SEQ ID NO: 2124111 - DNA, 25 bp, Homo sapien
caggacctgccactatgatgccgga

SEQ ID NO: 2124112 - DNA, 25 bp, Homo sapien
aatcccaaagttccatccggcatca

SEQ ID NO: 2124113 - DNA, 25 bp, Homo sapien
agttccatccggcatcatagtggca

SEQ ID NO: 2124114 - DNA, 25 bp, Homo sapien
cggcatcatagtggcaggtcctgga

SEQ ID NO: 2124115 - DNA, 25 bp, Homo sapien
tccatccggcatcatagtggcaggt

SEQ ID NO: 2124116 - DNA, 25 bp, Homo sapien
ccaaagttccatccggcatcatagt

SEQ ID NO: 2124117 - DNA, 25 bp, Homo sapien
catccggcatcatagtggcaggtcc

SEQ ID NO: 2124118 - DNA, 25 bp, Homo sapien
aatggaaatagcctccagtggaggg

SEQ ID NO: 2124119 - DNA, 25 bp, Homo sapien
caggagccttgaatagttgaatgga

SEQ ID NO: 2124120 - DNA, 25 bp, Homo sapien
gatgggtgggaagcttccaacaatg

SEQ ID NO: 2124121 - DNA, 25 bp, Homo sapien
tgaatggaaatagcctccagtggag

SEQ ID NO: 2124122 - DNA, 25 bp, Homo sapien
ggagccttgaatagttgaatggaaa

SEQ ID NO: 2124123 - DNA, 25 bp, Homo sapien
gttgaatggaaatagcctccagtgg

SEQ ID NO: 2124124 - DNA, 25 bp, Homo sapien
ccctccactggaggctatttccatt

SEQ ID NO: 2124125 - DNA, 25 bp, Homo sapien
tccattcaactattcaaggctcctg

SEQ ID NO: 2124126 - DNA, 25 bp, Homo sapien
tttccattcaactattcaaggctcc

SEQ ID NO: 2124127 - DNA, 25 bp, Homo sapien
cattgttggaagcttcccacccatc

SEQ ID NO: 2124128 - DNA, 25 bp, Homo sapien
cactggaggctatttccattcaact

SEQ ID NO: 2124129 - DNA, 25 bp, Homo sapien
tccactggaggctatttccattcaa

SEQ ID NO: 2124130 - DNA, 25 bp, Homo sapien
aacaactgaacgctttggtcaggct

SEQ ID NO: 2124131 - DNA, 25 bp, Homo sapien
ctgaacgctttggtcaggctgctac

SEQ ID NO: 2124132 - DNA, 25 bp, Homo sapien
actgaacgctttggtcaggctgcta

SEQ ID NO: 2124133 - DNA, 25 bp, Homo sapien
ccaacaactgaacgctttggtcagg

SEQ ID NO: 2124134 - DNA, 25 bp, Homo sapien
caactgaacgctttggtcaggctgc

SEQ ID NO: 2124135 - DNA, 25 bp, Homo sapien
cccaccaacaactgaacgctttggt

SEQ ID NO: 2124136 - DNA, 25 bp, Homo sapien
cagcctgaccaaagcgttcagttgt

SEQ ID NO: 2124137 - DNA, 25 bp, Homo sapien
accaaagcgttcagttgttggtggg

SEQ ID NO: 2124138 - DNA, 25 bp, Homo sapien
gcagcctgaccaaagcgttcagttg

SEQ ID NO: 2124139 - DNA, 25 bp, Homo sapien
cctgaccaaagcgttcagttgttgg

SEQ ID NO: 2124140 - DNA, 25 bp, Homo sapien
gtagcagcctgaccaaagcgttcag

SEQ ID NO: 2124141 - DNA, 25 bp, Homo sapien
tagcagcctgaccaaagcgttcagt

SEQ ID NO: 2124142 - DNA, 25 bp, Homo sapien
tagttagatctaccctgcctgtact

SEQ ID NO: 2124143 - DNA, 25 bp, Homo sapien
tactctagggagtatgctggaggca

SEQ ID NO: 2124144 - DNA, 25 bp, Homo sapien
tctaccctgcctgtactactctagg

SEQ ID NO: 2124145 - DNA, 25 bp, Homo sapien
ttccaatagttagatctaccctgcc

SEQ ID NO: 2124146 - DNA, 25 bp, Homo sapien
ttgcagtgtctagtttctcaaaacc

SEQ ID NO: 2124147 - DNA, 25 bp, Homo sapien
cctgcctgtactactctagggagta

SEQ ID NO: 2124148 - DNA, 25 bp, Homo sapien
ggttttgagaaactagacactgcaa

SEQ ID NO: 2124149 - DNA, 25 bp, Homo sapien
tgcctccagcatactccctagagta

SEQ ID NO: 2124150 - DNA, 25 bp, Homo sapien
ggcagggtagatctaactattggaa

SEQ ID NO: 2124151 - DNA, 25 bp, Homo sapien
gtacaggcagggtagatctaactat

SEQ ID NO: 2124152 - DNA, 25 bp, Homo sapien
tactccctagagtagtacaggcagg

SEQ ID NO: 2124153 - DNA, 25 bp, Homo sapien
tagagtagtacaggcagggtagatc

SEQ ID NO: 2124154 - DNA, 25 bp, Homo sapien
agcgtacatacggttctgttatacc

SEQ ID NO: 2124155 - DNA, 25 bp, Homo sapien
aaaatcttgtgttaacttgcctcca

SEQ ID NO: 2124156 - DNA, 25 bp, Homo sapien
aaatcttgtgttaacttgcctccat

SEQ ID NO: 2124157 - DNA, 25 bp, Homo sapien
gcgtacatacggttctgttataccc

SEQ ID NO: 2124158 - DNA, 25 bp, Homo sapien
cagcgtacatacggttctgttatac

SEQ ID NO: 2124159 - DNA, 25 bp, Homo sapien
ggtataacagaaccgtatgtacgct

SEQ ID NO: 2124160 - DNA, 25 bp, Homo sapien
gggtataacagaaccgtatgtacgc

SEQ ID NO: 2124161 - DNA, 25 bp, Homo sapien
atggaggcaagttaacacaagattt

SEQ ID NO: 2124162 - DNA, 25 bp, Homo sapien
tggaggcaagttaacacaagatttt

SEQ ID NO: 2124163 - DNA, 25 bp, Homo sapien
gtataacagaaccgtatgtacgctg

SEQ ID NO: 2124164 - DNA, 25 bp, Homo sapien
aggacacccaggaatgacccttttg

SEQ ID NO: 2124165 - DNA, 25 bp, Homo sapien
gataggcctagtacaatcttgggaa

SEQ ID NO: 2124166 - DNA, 25 bp, Homo sapien
cacccaggaatgacccttttgtgtc

SEQ ID NO: 2124167 - DNA, 25 bp, Homo sapien
gaatgacccttttgtgtctatgatg

SEQ ID NO: 2124168 - DNA, 25 bp, Homo sapien
tcacagcttttcttgataggcctag

SEQ ID NO: 2124169 - DNA, 25 bp, Homo sapien
tagtacaatcttgggaacagggtta

SEQ ID NO: 2124170 - DNA, 25 bp, Homo sapien
caaaagggtcattcctgggtgtcct

SEQ ID NO: 2124171 - DNA, 25 bp, Homo sapien
catcatagacacaaaagggtcattc

SEQ ID NO: 2124172 - DNA, 25 bp, Homo sapien
tgtactaggcctatcaagaaaagct

SEQ ID NO: 2124173 - DNA, 25 bp, Homo sapien
ctaggcctatcaagaaaagctgtga

SEQ ID NO: 2124174 - DNA, 25 bp, Homo sapien
tgttcccaagattgtactaggccta

SEQ ID NO: 2124175 - DNA, 25 bp, Homo sapien
taaccctgttcccaagattgtacta

SEQ ID NO: 2124176 - DNA, 25 bp, Homo sapien
actgtgtttgatttgtctcatatat

SEQ ID NO: 2124177 - DNA, 25 bp, Homo sapien
ctgtgtttgatttgtctcatatatt

SEQ ID NO: 2124178 - DNA, 25 bp, Homo sapien
gcctatcttaggtagtcatgctgtg

SEQ ID NO: 2124179 - DNA, 25 bp, Homo sapien
tcgcctatcttaggtagtcatgctg

SEQ ID NO: 2124180 - DNA, 25 bp, Homo sapien
cgcctatcttaggtagtcatgctgt

SEQ ID NO: 2124181 - DNA, 25 bp, Homo sapien
cctatcttaggtagtcatgctgtgc

SEQ ID NO: 2124182 - DNA, 25 bp, Homo sapien
cacagcatgactacctaagataggc

SEQ ID NO: 2124183 - DNA, 25 bp, Homo sapien
acagcatgactacctaagataggcg

SEQ ID NO: 2124184 - DNA, 25 bp, Homo sapien
cagcatgactacctaagataggcga

SEQ ID NO: 2124185 - DNA, 25 bp, Homo sapien
gcacagcatgactacctaagatagg

SEQ ID NO: 2124186 - DNA, 25 bp, Homo sapien
aatatatgagacaaatcaaacacag

SEQ ID NO: 2124187 - DNA, 25 bp, Homo sapien
atatatgagacaaatcaaacacagt

SEQ ID NO: 2124188 - DNA, 25 bp, Homo sapien
actgtgtttgatttgtctcatatat

SEQ ID NO: 2124189 - DNA, 25 bp, Homo sapien
tgaaaaatggagcagtaatgcagca

SEQ ID NO: 2124190 - DNA, 25 bp, Homo sapien
ctatcttaggtagtcatgctgtgca

SEQ ID NO: 2124191 - DNA, 25 bp, Homo sapien
gcagtaatgcagcatcaacctatta

SEQ ID NO: 2124192 - DNA, 25 bp, Homo sapien
ggtgtactgtgtttgatttgtctca

SEQ ID NO: 2124193 - DNA, 25 bp, Homo sapien
catatatttggagtttttctgaaaa

SEQ ID NO: 2124194 - DNA, 25 bp, Homo sapien
cagaaaaactccaaatatatgagac

SEQ ID NO: 2124195 - DNA, 25 bp, Homo sapien
tgcacagcatgactacctaagatag

SEQ ID NO: 2124196 - DNA, 25 bp, Homo sapien
aatatatgagacaaatcaaacacag

SEQ ID NO: 2124197 - DNA, 25 bp, Homo sapien
caaacacagtacaccaatgaaaaaa

SEQ ID NO: 2124198 - DNA, 25 bp, Homo sapien
taataggttgatgctgcattactgc

SEQ ID NO: 2124199 - DNA, 25 bp, Homo sapien
gcattactgctccatttttcagaaa

SEQ ID NO: 2124200 - DNA, 25 bp, Homo sapien
ggaagcgttggttgaatgattactg

SEQ ID NO: 2124201 - DNA, 25 bp, Homo sapien
aggttggtattagggtcaaagtgct

SEQ ID NO: 2124202 - DNA, 25 bp, Homo sapien
cctttgttacgacagagtagagaca

SEQ ID NO: 2124203 - DNA, 25 bp, Homo sapien
cacagcctttgttacgacagagtag

SEQ ID NO: 2124204 - DNA, 25 bp, Homo sapien
gcccacagcctttgttacgacagag

SEQ ID NO: 2124205 - DNA, 25 bp, Homo sapien
ggaagattgggaccccagggtgatg

SEQ ID NO: 2124206 - DNA, 25 bp, Homo sapien
atggaagattgggaccccagggtga

SEQ ID NO: 2124207 - DNA, 25 bp, Homo sapien
attgggaccccagggtgatggcaac

SEQ ID NO: 2124208 - DNA, 25 bp, Homo sapien
accccagggtgatggcaacaggaat

SEQ ID NO: 2124209 - DNA, 25 bp, Homo sapien
cccagatcagcttagcttcctgggt

SEQ ID NO: 2124210 - DNA, 25 bp, Homo sapien
ctgataacaagagacccagatcagc

SEQ ID NO: 2124211 - DNA, 25 bp, Homo sapien
tctgggaaatgctcttgctaacccc

SEQ ID NO: 2124212 - DNA, 25 bp, Homo sapien
cctgggtattatctcttctgggaaa

SEQ ID NO: 2124213 - DNA, 25 bp, Homo sapien
agaaatctacagttcgctttcggca

SEQ ID NO: 2124214 - DNA, 25 bp, Homo sapien
aaatctacagttcgctttcggcagc

SEQ ID NO: 2124215 - DNA, 25 bp, Homo sapien
gagaaatctacagttcgctttcggc

SEQ ID NO: 2124216 - DNA, 25 bp, Homo sapien
gaaatctacagttcgctttcggcag

SEQ ID NO: 2124217 - DNA, 25 bp, Homo sapien
attgggggcagaatccaagtacata

SEQ ID NO: 2124218 - DNA, 25 bp, Homo sapien
gaagtgaactgcttgtagcagggcc

SEQ ID NO: 2124219 - DNA, 25 bp, Homo sapien
tcacattcagaggtttttgctcctg

SEQ ID NO: 2124220 - DNA, 25 bp, Homo sapien
gcacagtgtggtcccatagtacagc

SEQ ID NO: 2124221 - DNA, 25 bp, Homo sapien
cccggcgcaaggtctctgctgactt

SEQ ID NO: 2124222 - DNA, 25 bp, Homo sapien
tccagggcttgggatatatttagcg

SEQ ID NO: 2124223 - DNA, 25 bp, Homo sapien
gcagctggaaccagtccggatcaga

SEQ ID NO: 2124224 - DNA, 25 bp, Homo sapien
ggaaccagtccggatcagactgtca

SEQ ID NO: 2124225 - DNA, 25 bp, Homo sapien
gctggaaccagtccggatcagactg

SEQ ID NO: 2124226 - DNA, 25 bp, Homo sapien
ccagtccggatcagactgtcaagtc

SEQ ID NO: 2124227 - DNA, 25 bp, Homo sapien
ccctcatggaatcggggtgctcctg

SEQ ID NO: 2124228 - DNA, 25 bp, Homo sapien
ggtacatggagtagcatcactctca

SEQ ID NO: 2124229 - DNA, 25 bp, Homo sapien
atggagtagcatcactctcagggcc

SEQ ID NO: 2124230 - DNA, 25 bp, Homo sapien
ggtaggtacatggagtagcatcact

SEQ ID NO: 2124231 - DNA, 25 bp, Homo sapien
cccaatattatcttatgaccaaata

SEQ ID NO: 2124232 - DNA, 25 bp, Homo sapien
ttaggagaaacctgtctcatagcct

SEQ ID NO: 2124233 - DNA, 25 bp, Homo sapien
ctcatagcctcatagcccacccagt

SEQ ID NO: 2124234 - DNA, 25 bp, Homo sapien
tatcttatgaccaaatattaggaga

SEQ ID NO: 2124235 - DNA, 25 bp, Homo sapien
ggttgtgccaagaatgccccaaaat

SEQ ID NO: 2124236 - DNA, 25 bp, Homo sapien
cccagtcatgtctaccgactctgca

SEQ ID NO: 2124237 - DNA, 25 bp, Homo sapien
tgtgccaagaatgccccaaaatcca

SEQ ID NO: 2124238 - DNA, 25 bp, Homo sapien
gactctgcaccctggttgtgccaag

SEQ ID NO: 2124239 - DNA, 25 bp, Homo sapien
catatacagtcaccactactaagga

SEQ ID NO: 2124240 - DNA, 25 bp, Homo sapien
taaacgcaggaagtggaatctggcc

SEQ ID NO: 2124241 - DNA, 25 bp, Homo sapien
tactaaggaatctgtctggtgccaa

SEQ ID NO: 2124242 - DNA, 25 bp, Homo sapien
tgactggccttcacccagttaaacg

SEQ ID NO: 2124243 - DNA, 25 bp, Homo sapien
taaccaggtcagaggtatgatccac

SEQ ID NO: 2124244 - DNA, 25 bp, Homo sapien
ggttaacagcaaatggcaactctgc

SEQ ID NO: 2124245 - DNA, 25 bp, Homo sapien
tatgatccacaggttggccagacag

SEQ ID NO: 2124246 - DNA, 25 bp, Homo sapien
cctctaagggtactatggagcctac

SEQ ID NO: 2124247 - DNA, 25 bp, Homo sapien
tgtgcttggaacacacggttaccat

SEQ ID NO: 2124248 - DNA, 25 bp, Homo sapien
gaacacacggttaccatcaaagaca

SEQ ID NO: 2124249 - DNA, 25 bp, Homo sapien
ttggaacacacggttaccatcaaag

SEQ ID NO: 2124250 - DNA, 25 bp, Homo sapien
gcttggaacacacggttaccatcaa

SEQ ID NO: 2124251 - DNA, 25 bp, Homo sapien
tcccactcttgtgtcccctggtctt

SEQ ID NO: 2124252 - DNA, 25 bp, Homo sapien
gaggaataagacaataagggagaga

SEQ ID NO: 2124253 - DNA, 25 bp, Homo sapien
gtctagccgctctttcacccatctg

SEQ ID NO: 2124254 - DNA, 25 bp, Homo sapien
aagacaccctctattccagtctagc

SEQ ID NO: 2124255 - DNA, 25 bp, Homo sapien
cagatcatcatctgaatcgtcagat

SEQ ID NO: 2124256 - DNA, 25 bp, Homo sapien
ccttgaccagggagatttcaacccg

SEQ ID NO: 2124257 - DNA, 25 bp, Homo sapien
tagccttcttagctagtgcatcagg

SEQ ID NO: 2124258 - DNA, 25 bp, Homo sapien
cccgagatggcatcaagaagacaga

SEQ ID NO: 2124259 - DNA, 25 bp, Homo sapien
gaggtcctatctagacatcaactgt

SEQ ID NO: 2124260 - DNA, 25 bp, Homo sapien
cctggtatctaagattctaagggaa

SEQ ID NO: 2124261 - DNA, 25 bp, Homo sapien
cacatggccaacaatatcctggtat

SEQ ID NO: 2124262 - DNA, 25 bp, Homo sapien
tctaagggaatcattgaggtcctat

SEQ ID NO: 2124263 - DNA, 25 bp, Homo sapien
tatgcctgtccgaaaaatatgcttg

SEQ ID NO: 2124264 - DNA, 25 bp, Homo sapien
tcaacatcaggtgagtcaagacccc

SEQ ID NO: 2124265 - DNA, 25 bp, Homo sapien
cagtcaggccatagcattccagcaa

SEQ ID NO: 2124266 - DNA, 25 bp, Homo sapien
gggagaatcctgctcttgacagcct

SEQ ID NO: 2124267 - DNA, 25 bp, Homo sapien
aacagttatttggtagagtgataaa

SEQ ID NO: 2124268 - DNA, 25 bp, Homo sapien
caaacagttatttggtagagtgata

SEQ ID NO: 2124269 - DNA, 25 bp, Homo sapien
caacaaacagttatttggtagagtg

SEQ ID NO: 2124270 - DNA, 25 bp, Homo sapien
agttatttggtagagtgataaaagc

SEQ ID NO: 2124271 - DNA, 25 bp, Homo sapien
aagagtaaaggggttgcatttattg

SEQ ID NO: 2124272 - DNA, 25 bp, Homo sapien
agagtaaaggggttgcatttattgt

SEQ ID NO: 2124273 - DNA, 25 bp, Homo sapien
gagtaaaggggttgcatttattgta

SEQ ID NO: 2124274 - DNA, 25 bp, Homo sapien
tttcctaccataccgttaatctgga

SEQ ID NO: 2124275 - DNA, 25 bp, Homo sapien
taccataccgttaatctggagtctc

SEQ ID NO: 2124276 - DNA, 25 bp, Homo sapien
tcctaccataccgttaatctggagt

SEQ ID NO: 2124277 - DNA, 25 bp, Homo sapien
ccataccgttaatctggagtctcat

SEQ ID NO: 2124278 - DNA, 25 bp, Homo sapien
ctttggaactatctcttaaatccat

SEQ ID NO: 2124279 - DNA, 25 bp, Homo sapien
tgagcaaagctgtagtatacaaaat

SEQ ID NO: 2124280 - DNA, 25 bp, Homo sapien
tatagtagcagaagttttagccagt

SEQ ID NO: 2124281 - DNA, 25 bp, Homo sapien
tgaatttccatacgctagcaatgaa

SEQ ID NO: 2124282 - DNA, 25 bp, Homo sapien
ggattggaagacattatatgatgaa

SEQ ID NO: 2124283 - DNA, 25 bp, Homo sapien
cctcttgggcagttacaattgtaaa

SEQ ID NO: 2124284 - DNA, 25 bp, Homo sapien
ggcagctggcaaggtaaacctcttg

SEQ ID NO: 2124285 - DNA, 25 bp, Homo sapien
caattgtaaagaactgtaaagtaag

SEQ ID NO: 2124286 - DNA, 25 bp, Homo sapien
aaagaactgtaaagtaagccaggtg

SEQ ID NO: 2124287 - DNA, 25 bp, Homo sapien
taatcgaggactacttagatcgcga

SEQ ID NO: 2124288 - DNA, 25 bp, Homo sapien
aagtgaagttctagggccagcctca

SEQ ID NO: 2124289 - DNA, 25 bp, Homo sapien
tccagggagtggctcataagacaac

SEQ ID NO: 2124290 - DNA, 25 bp, Homo sapien
ggttctgcgaactgcgaccaagtcc

SEQ ID NO: 2124291 - DNA, 25 bp, Homo sapien
ttaaaaaccattcatccacataggt

SEQ ID NO: 2124292 - DNA, 25 bp, Homo sapien
caagagttcttaccctggagtctgt

SEQ ID NO: 2124293 - DNA, 25 bp, Homo sapien
ttcggtaggtcctagaagcctcttc

SEQ ID NO: 2124294 - DNA, 25 bp, Homo sapien
caagagtcagctacaaagggttgta

SEQ ID NO: 2124295 - DNA, 25 bp, Homo sapien
ctacaaccacacatttgattgtctg

SEQ ID NO: 2124296 - DNA, 25 bp, Homo sapien
tctcctacaaccacacatttgattg

SEQ ID NO: 2124297 - DNA, 25 bp, Homo sapien
acaaccacacatttgattgtctgca

SEQ ID NO: 2124298 - DNA, 25 bp, Homo sapien
tcatctcctacaaccacacatttga

SEQ ID NO: 2124299 - DNA, 25 bp, Homo sapien
cagtggggggatatactcctcagga

SEQ ID NO: 2124300 - DNA, 25 bp, Homo sapien
gtggggggatatactcctcaggaaa

SEQ ID NO: 2124301 - DNA, 25 bp, Homo sapien
agacagtggggggatatactcctca

SEQ ID NO: 2124302 - DNA, 25 bp, Homo sapien
tcaaagacagtggggggatatactc

SEQ ID NO: 2124303 - DNA, 25 bp, Homo sapien
gagtgttcgcagtcatcatactcct

SEQ ID NO: 2124304 - DNA, 25 bp, Homo sapien
ccagcagtgtcccacgtgttcaggc

SEQ ID NO: 2124305 - DNA, 25 bp, Homo sapien
ttaggagagtgttcgcagtcatcat

SEQ ID NO: 2124306 - DNA, 25 bp, Homo sapien
cccacgtgttcaggctaatgatttg

SEQ ID NO: 2124307 - DNA, 25 bp, Homo sapien
cattggcataagaggatgggttccc

SEQ ID NO: 2124308 - DNA, 25 bp, Homo sapien
cacattggcataagaggatgggttc

SEQ ID NO: 2124309 - DNA, 25 bp, Homo sapien
cagcagaacaggcacattggggcaa

SEQ ID NO: 2124310 - DNA, 25 bp, Homo sapien
tggcataagaggatgggttcccagt

SEQ ID NO: 2124311 - DNA, 25 bp, Homo sapien
agcttctaaaaatacctcatgcacc

SEQ ID NO: 2124312 - DNA, 25 bp, Homo sapien
cagggccgaatattccagatacttc

SEQ ID NO: 2124313 - DNA, 25 bp, Homo sapien
tgcatcagggccgaatattccagat

SEQ ID NO: 2124314 - DNA, 25 bp, Homo sapien
tctaaaaatacctcatgcaccccat

SEQ ID NO: 2124315 - DNA, 25 bp, Homo sapien
ggtgttctttgtagcagggtaaagc

SEQ ID NO: 2124316 - DNA, 25 bp, Homo sapien
ctataagaggatgtacttcttggtg

SEQ ID NO: 2124317 - DNA, 25 bp, Homo sapien
tgttctttgtagcagggtaaagcac

SEQ ID NO: 2124318 - DNA, 25 bp, Homo sapien
gatgtacttcttggtgttctttgta

SEQ ID NO: 2124319 - DNA, 25 bp, Homo sapien
acaacagtcgcccagaagtgactta

SEQ ID NO: 2124320 - DNA, 25 bp, Homo sapien
caacagtcgcccagaagtgacttac

SEQ ID NO: 2124321 - DNA, 25 bp, Homo sapien
aaacaacagtcgcccagaagtgact

SEQ ID NO: 2124322 - DNA, 25 bp, Homo sapien
acagtcgcccagaagtgacttactg

SEQ ID NO: 2124323 - DNA, 25 bp, Homo sapien
atggcggcagcagtgatggtagctg

SEQ ID NO: 2124324 - DNA, 25 bp, Homo sapien
ggcggcagcagtgatggtagctgct

SEQ ID NO: 2124325 - DNA, 25 bp, Homo sapien
cggcagcagtgatggtagctgctgt

SEQ ID NO: 2124326 - DNA, 25 bp, Homo sapien
tggcggcagcagtgatggtagctgc

SEQ ID NO: 2124327 - DNA, 25 bp, Homo sapien
gggccgcctccagcggaatcttcgt

SEQ ID NO: 2124328 - DNA, 25 bp, Homo sapien
tccagcggaatcttcgtcgctgtcc

SEQ ID NO: 2124329 - DNA, 25 bp, Homo sapien
gcctccagcggaatcttcgtcgctg

SEQ ID NO: 2124330 - DNA, 25 bp, Homo sapien
cggaatcttcgtcgctgtccgtgtc

SEQ ID NO: 2124331 - DNA, 25 bp, Homo sapien
gagccacctaaaaggcgcactgtga

SEQ ID NO: 2124332 - DNA, 25 bp, Homo sapien
gaacaccccattgtcctaagcctga

SEQ ID NO: 2124333 - DNA, 25 bp, Homo sapien
tagggcgcaggacactatttcacga

SEQ ID NO: 2124334 - DNA, 25 bp, Homo sapien
gcttcactcctcaagaaaacgggcc

SEQ ID NO: 2124335 - DNA, 25 bp, Homo sapien
gtcaattcttcatttgccgtgagtt

SEQ ID NO: 2124336 - DNA, 25 bp, Homo sapien
tcttcatttgccgtgagttcagtga

SEQ ID NO: 2124337 - DNA, 25 bp, Homo sapien
aattcttcatttgccgtgagttcag

SEQ ID NO: 2124338 - DNA, 25 bp, Homo sapien
cttcatttgccgtgagttcagtgat

SEQ ID NO: 2124339 - DNA, 25 bp, Homo sapien
tctgccacctcattgatgtctgaat

SEQ ID NO: 2124340 - DNA, 25 bp, Homo sapien
tcttctgccacctcattgatgtctg

SEQ ID NO: 2124341 - DNA, 25 bp, Homo sapien
ccacctcattgatgtctgaatagtc

SEQ ID NO: 2124342 - DNA, 25 bp, Homo sapien
ttcatcttctgccacctcattgatg

SEQ ID NO: 2124343 - DNA, 25 bp, Homo sapien
agccaaagcaaaggcatagagagca

SEQ ID NO: 2124344 - DNA, 25 bp, Homo sapien
gcccaaactggactatacagcagga

SEQ ID NO: 2124345 - DNA, 25 bp, Homo sapien
tacagcaggataatgcactggaatg

SEQ ID NO: 2124346 - DNA, 25 bp, Homo sapien
caatggcagacagcgggtatagaaa

SEQ ID NO: 2124347 - DNA, 25 bp, Homo sapien
ctgatgttttgattctacaatgtag

SEQ ID NO: 2124348 - DNA, 25 bp, Homo sapien
gatgttttgattctacaatgtagca

SEQ ID NO: 2124349 - DNA, 25 bp, Homo sapien
ctaagtctgatgttttgattctaca

SEQ ID NO: 2124350 - DNA, 25 bp, Homo sapien
tgttttgattctacaatgtagcacc

SEQ ID NO: 2124351 - DNA, 25 bp, Homo sapien
taaattccctatcaacatcacatcc

SEQ ID NO: 2124352 - DNA, 25 bp, Homo sapien
tttaaattccctatcaacatcacat

SEQ ID NO: 2124353 - DNA, 25 bp, Homo sapien
ttaaattccctatcaacatcacatc

SEQ ID NO: 2124354 - DNA, 25 bp, Homo sapien
accaagaaggtgatctcctcaatat

SEQ ID NO: 2124355 - DNA, 25 bp, Homo sapien
atacaaccgccttaagcttccttgc

SEQ ID NO: 2124356 - DNA, 25 bp, Homo sapien
aaatattatacaaccgccttaagct

SEQ ID NO: 2124357 - DNA, 25 bp, Homo sapien
aaccaagaaggtgatctcctcaata

SEQ ID NO: 2124358 - DNA, 25 bp, Homo sapien
atgtcttcacaatcagcatcatagt

SEQ ID NO: 2124359 - DNA, 25 bp, Homo sapien
tcttcacaatcagcatcatagtcat

SEQ ID NO: 2124360 - DNA, 25 bp, Homo sapien
tcacaatcagcatcatagtcatctt

SEQ ID NO: 2124361 - DNA, 25 bp, Homo sapien
tgtcttcacaatcagcatcatagtc

SEQ ID NO: 2124362 - DNA, 25 bp, Homo sapien
gaagagaaacccctttggcatgtaa

SEQ ID NO: 2124363 - DNA, 25 bp, Homo sapien
ggaagagaaacccctttggcatgta

SEQ ID NO: 2124364 - DNA, 25 bp, Homo sapien
aggaagagaaacccctttggcatgt

SEQ ID NO: 2124365 - DNA, 25 bp, Homo sapien
gggcaatgatggagggcaagatgat

SEQ ID NO: 2124366 - DNA, 25 bp, Homo sapien
gaaggggcaatgatggagggcaaga

SEQ ID NO: 2124367 - DNA, 25 bp, Homo sapien
caatgatggagggcaagatgatgcc

SEQ ID NO: 2124368 - DNA, 25 bp, Homo sapien
tgatggagggcaagatgatgccttc

SEQ ID NO: 2124369 - DNA, 25 bp, Homo sapien
gcctgtgttgcttcctgaggtccca

SEQ ID NO: 2124370 - DNA, 25 bp, Homo sapien
catgctgcataatcccagccaatgg

SEQ ID NO: 2124371 - DNA, 25 bp, Homo sapien
tctgcctgtgttgcttcctgaggtc

SEQ ID NO: 2124372 - DNA, 25 bp, Homo sapien
atcatgctgcataatcccagccaat

SEQ ID NO: 2124373 - DNA, 25 bp, Homo sapien
ctccgccaaacagatgggacattct

SEQ ID NO: 2124374 - DNA, 25 bp, Homo sapien
cttcctctttctccgagcactccgc

SEQ ID NO: 2124375 - DNA, 25 bp, Homo sapien
tcttcctctttctccgagcactccg

SEQ ID NO: 2124376 - DNA, 25 bp, Homo sapien
tactcattgaaaattagcacagatt

SEQ ID NO: 2124377 - DNA, 25 bp, Homo sapien
tctcataggccttaatctcaggtct

SEQ ID NO: 2124378 - DNA, 25 bp, Homo sapien
gcacagattctatctgctatggtat

SEQ ID NO: 2124379 - DNA, 25 bp, Homo sapien
tttagacataaattagggagaactc

SEQ ID NO: 2124380 - DNA, 25 bp, Homo sapien
gcagggagaatttcctgatcccaga

SEQ ID NO: 2124381 - DNA, 25 bp, Homo sapien
gaatgtaaacaatggagatgtatca

SEQ ID NO: 2124382 - DNA, 25 bp, Homo sapien
tgtcctaaggctatagagagttaac

SEQ ID NO: 2124383 - DNA, 25 bp, Homo sapien
cctggagttagaatgtaaacaatgg

SEQ ID NO: 2124384 - DNA, 25 bp, Homo sapien
ttgaagccatagtcaaacccactgc

SEQ ID NO: 2124385 - DNA, 25 bp, Homo sapien
ctcttggtttggtatctgtcacttt

SEQ ID NO: 2124386 - DNA, 25 bp, Homo sapien
gacacccagcatatcataccacagt

SEQ ID NO: 2124387 - DNA, 25 bp, Homo sapien
accacagtcgggcaggcccataacg

SEQ ID NO: 2124388 - DNA, 25 bp, Homo sapien
gccatcgcattcctagtcatgctag

SEQ ID NO: 2124389 - DNA, 25 bp, Homo sapien
cattcctagtcatgctagaaggaag

SEQ ID NO: 2124390 - DNA, 25 bp, Homo sapien
tcgcattcctagtcatgctagaagg

SEQ ID NO: 2124391 - DNA, 25 bp, Homo sapien
tgtaagccatcgcattcctagtcat

SEQ ID NO: 2124392 - DNA, 25 bp, Homo sapien
tagagcgagttagtggagttattca

SEQ ID NO: 2124393 - DNA, 25 bp, Homo sapien
aagagttactcatgttagtagagcg

SEQ ID NO: 2124394 - DNA, 25 bp, Homo sapien
cactgaaaaggaacctacacagtgt

SEQ ID NO: 2124395 - DNA, 25 bp, Homo sapien
tatgcccctttcaatcaagattctg

SEQ ID NO: 2124396 - DNA, 25 bp, Homo sapien
atcccaaatgatattgtcctcccag

SEQ ID NO: 2124397 - DNA, 25 bp, Homo sapien
aaatggagtaccaaggtttgtcatc

SEQ ID NO: 2124398 - DNA, 25 bp, Homo sapien
caaaacaggaggttccaacagccgg

SEQ ID NO: 2124399 - DNA, 25 bp, Homo sapien
tgatattgtcctcccagcgtccata

SEQ ID NO: 2124400 - DNA, 25 bp, Homo sapien
ctgctgtggttcctccttgatgact

SEQ ID NO: 2124401 - DNA, 25 bp, Homo sapien
ctcctgttttccctaagagaattcg

SEQ ID NO: 2124402 - DNA, 25 bp, Homo sapien
ctaagagaattcgactcttcttcag

SEQ ID NO: 2124403 - DNA, 25 bp, Homo sapien
tcctccttgatgactcctgttttcc

SEQ ID NO: 2124404 - DNA, 25 bp, Homo sapien
cattggagagattccatggatcttt

SEQ ID NO: 2124405 - DNA, 25 bp, Homo sapien
catcattggagagattccatggatc

SEQ ID NO: 2124406 - DNA, 25 bp, Homo sapien
tactcatcattggagagattccatg

SEQ ID NO: 2124407 - DNA, 25 bp, Homo sapien
ataatactcatcattggagagattc

SEQ ID NO: 2124408 - DNA, 25 bp, Homo sapien
tgatgtgctttagcaaaggttggac

SEQ ID NO: 2124409 - DNA, 25 bp, Homo sapien
ttttgatgtgctttagcaaaggttg

SEQ ID NO: 2124410 - DNA, 25 bp, Homo sapien
ttttttgatgtgctttagcaaaggt

SEQ ID NO: 2124411 - DNA, 25 bp, Homo sapien
cagaggtgggcgatggaactgccgg

SEQ ID NO: 2124412 - DNA, 25 bp, Homo sapien
cattttcctcactatattctgcaag

SEQ ID NO: 2124413 - DNA, 25 bp, Homo sapien
tcctgaggtgtgcgcataaaaaaca

SEQ ID NO: 2124414 - DNA, 25 bp, Homo sapien
tgccatgccaacctgcatcattaag

SEQ ID NO: 2124415 - DNA, 25 bp, Homo sapien
gttgccatgccaacctgcatcatta

SEQ ID NO: 2124416 - DNA, 25 bp, Homo sapien
attggccaggatggagagaacccag

SEQ ID NO: 2124417 - DNA, 25 bp, Homo sapien
tggtgctccaggatcttttccaggt

SEQ ID NO: 2124418 - DNA, 25 bp, Homo sapien
ccatatttacaatctggtgctccag

SEQ ID NO: 2124419 - DNA, 25 bp, Homo sapien
gatgtatggcagtaaacagtttccc

SEQ ID NO: 2124420 - DNA, 25 bp, Homo sapien
ccactatctttcagagtcagtaggg

SEQ ID NO: 2124421 - DNA, 25 bp, Homo sapien
tactactaccctagaccccagtgta

SEQ ID NO: 2124422 - DNA, 25 bp, Homo sapien
gtgtagcccaacacacaacgtgtga

SEQ ID NO: 2124423 - DNA, 25 bp, Homo sapien
gctagctctgccattacctctatga

SEQ ID NO: 2124424 - DNA, 25 bp, Homo sapien
ctaattcccgaatatagtaaccctg

SEQ ID NO: 2124425 - DNA, 25 bp, Homo sapien
taaccctgtcttgtccgaatgatca

SEQ ID NO: 2124426 - DNA, 25 bp, Homo sapien
cactgctggccaaccacaaaaatat

SEQ ID NO: 2124427 - DNA, 25 bp, Homo sapien
gcccaggaacttcaaacaagggaca

SEQ ID NO: 2124428 - DNA, 25 bp, Homo sapien
tatatcttccattcgtatcctccgt

SEQ ID NO: 2124429 - DNA, 25 bp, Homo sapien
cgtatcctccgtggccgatctttac

SEQ ID NO: 2124430 - DNA, 25 bp, Homo sapien
agcgcagagctttagcctcttccgg

SEQ ID NO: 2124431 - DNA, 25 bp, Homo sapien
tgtgcgtttgaagtcagcgcagagc

SEQ ID NO: 2124432 - DNA, 25 bp, Homo sapien
cagacttaagcacccaccagtttga

SEQ ID NO: 2124433 - DNA, 25 bp, Homo sapien
tgcagctatcatgctataataagca

SEQ ID NO: 2124434 - DNA, 25 bp, Homo sapien
tcatgctataataagcacagcactg

SEQ ID NO: 2124435 - DNA, 25 bp, Homo sapien
tggtaaacgaaaatcagacttaagc

SEQ ID NO: 2124436 - DNA, 25 bp, Homo sapien
aaggatttctcaccatagccagcat

SEQ ID NO: 2124437 - DNA, 25 bp, Homo sapien
aggatttctcaccatagccagcatc

SEQ ID NO: 2124438 - DNA, 25 bp, Homo sapien
ttaatgactaatacaaactagtata

SEQ ID NO: 2124439 - DNA, 25 bp, Homo sapien
acaatggcgtggtctcagctcccgg

SEQ ID NO: 2124440 - DNA, 25 bp, Homo sapien
atggcgtggtctcagctcccggcaa

SEQ ID NO: 2124441 - DNA, 25 bp, Homo sapien
gcgtggtctcagctcccggcaacct

SEQ ID NO: 2124442 - DNA, 25 bp, Homo sapien
ttagtccaggctggactacaatggc

SEQ ID NO: 2124443 - DNA, 25 bp, Homo sapien
agcaatgaaggcccttgtggtgttc

SEQ ID NO: 2124444 - DNA, 25 bp, Homo sapien
aatgaaggcccttgtggtgttccaa

SEQ ID NO: 2124445 - DNA, 25 bp, Homo sapien
tgaaggcccttgtggtgttccaagg

SEQ ID NO: 2124446 - DNA, 25 bp, Homo sapien
caatgaaggcccttgtggtgttcca

SEQ ID NO: 2124447 - DNA, 25 bp, Homo sapien
tcttcactggctgcggttctttatc

SEQ ID NO: 2124448 - DNA, 25 bp, Homo sapien
cttcactggctgcggttctttatca

SEQ ID NO: 2124449 - DNA, 25 bp, Homo sapien
ttcttcactggctgcggttctttat

SEQ ID NO: 2124450 - DNA, 25 bp, Homo sapien
cagaaaaccttgatccacgggcaaa

SEQ ID NO: 2124451 - DNA, 25 bp, Homo sapien
acatcaatcacttcccagcgggaca

SEQ ID NO: 2124452 - DNA, 25 bp, Homo sapien
tcctctttgtaacgctcttgatgct

SEQ ID NO: 2124453 - DNA, 25 bp, Homo sapien
tgttgacattgtgcgcaccacatca

SEQ ID NO: 2124454 - DNA, 25 bp, Homo sapien
gttcctcccgttcacgtgaaagctg

SEQ ID NO: 2124455 - DNA, 25 bp, Homo sapien
ttcctcccgttcacgtgaaagctga

SEQ ID NO: 2124456 - DNA, 25 bp, Homo sapien
catcttttgtagtccgtatgcgcac

SEQ ID NO: 2124457 - DNA, 25 bp, Homo sapien
gcatcaatgacagctggttttcgga

SEQ ID NO: 2124458 - DNA, 25 bp, Homo sapien
tgtagtccgtatgcgcacataggca

SEQ ID NO: 2124459 - DNA, 25 bp, Homo sapien
tgtctcacagcgaacatactctttc

SEQ ID NO: 2124460 - DNA, 25 bp, Homo sapien
ggaagaaaaatcacaggaccataag

SEQ ID NO: 2124461 - DNA, 25 bp, Homo sapien
agaaaaatcacaggaccataagcaa

SEQ ID NO: 2124462 - DNA, 25 bp, Homo sapien
ctgaacagtgtgagcagcagaggaa

SEQ ID NO: 2124463 - DNA, 25 bp, Homo sapien
tgaacagtgtgagcagcagaggaag

SEQ ID NO: 2124464 - DNA, 25 bp, Homo sapien
cttctcaggaggacccttaagcttc

SEQ ID NO: 2124465 - DNA, 25 bp, Homo sapien
tcaggaggacccttaagcttctcct

SEQ ID NO: 2124466 - DNA, 25 bp, Homo sapien
cttaagccgcctcagttgctcttga

SEQ ID NO: 2124467 - DNA, 25 bp, Homo sapien
gctcttgaatcctccgccgttcttt

SEQ ID NO: 2124468 - DNA, 25 bp, Homo sapien
tggtcccttcaaccttgataagttc

SEQ ID NO: 2124469 - DNA, 25 bp, Homo sapien
caattttggtcccttcaaccttgat

SEQ ID NO: 2124470 - DNA, 25 bp, Homo sapien
tgtccaatggcaccacatgccccac

SEQ ID NO: 2124471 - DNA, 25 bp, Homo sapien
catttgtttgataatagagggggca

SEQ ID NO: 2124472 - DNA, 25 bp, Homo sapien
ccatagtaatacttggaaagggaga

SEQ ID NO: 2124473 - DNA, 25 bp, Homo sapien
gacactatgtgagcatcaaaattaa

SEQ ID NO: 2124474 - DNA, 25 bp, Homo sapien
aatttgggacactatgtgagcatca

SEQ ID NO: 2124475 - DNA, 25 bp, Homo sapien
gcttgagggagtcaaatttgggaca

SEQ ID NO: 2124476 - DNA, 25 bp, Homo sapien
cagtggttccaactcgccgtttctt

SEQ ID NO: 2124477 - DNA, 25 bp, Homo sapien
acagtggttccaactcgccgtttct

SEQ ID NO: 2124478 - DNA, 25 bp, Homo sapien
tgaacagtggttccaactcgccgtt

SEQ ID NO: 2124479 - DNA, 25 bp, Homo sapien
gacagcgtcaccatagggtctgtgc

SEQ ID NO: 2124480 - DNA, 25 bp, Homo sapien
cagcgtcaccatagggtctgtgcgg

SEQ ID NO: 2124481 - DNA, 25 bp, Homo sapien
agcgtcaccatagggtctgtgcggc

SEQ ID NO: 2124482 - DNA, 25 bp, Homo sapien
acagcgtcaccatagggtctgtgcg

SEQ ID NO: 2124483 - DNA, 25 bp, Homo sapien
agaggcgtttacgcacgttttcgcg

SEQ ID NO: 2124484 - DNA, 25 bp, Homo sapien
tagaggcgtttacgcacgttttcgc

SEQ ID NO: 2124485 - DNA, 25 bp, Homo sapien
cgtttacgcacgttttcgcggagtg

SEQ ID NO: 2124486 - DNA, 25 bp, Homo sapien
gcaatcacggaacatttgattctta

SEQ ID NO: 2124487 - DNA, 25 bp, Homo sapien
tgaatttagggccagtaaggaataa

SEQ ID NO: 2124488 - DNA, 25 bp, Homo sapien
gccagtaaggaataaggatctgaac

SEQ ID NO: 2124489 - DNA, 25 bp, Homo sapien
taaggatctgaacagtgacctttgc

SEQ ID NO: 2124490 - DNA, 25 bp, Homo sapien
aagccaaggtcagtgaatcgcttga

SEQ ID NO: 2124491 - DNA, 25 bp, Homo sapien
actggattaacatctctactttatc

SEQ ID NO: 2124492 - DNA, 25 bp, Homo sapien
tgcctaagcctagtggtggctcatg

SEQ ID NO: 2124493 - DNA, 25 bp, Homo sapien
tcatgcctaagcctagtggtggctc

SEQ ID NO: 2124494 - DNA, 25 bp, Homo sapien
ctagatggaaaaagaaccggctgat

SEQ ID NO: 2124495 - DNA, 25 bp, Homo sapien
gggaggcctcgccactcagaattgg

SEQ ID NO: 2124496 - DNA, 25 bp, Homo sapien
ggcagagagcaacccctagtgggct

SEQ ID NO: 2124497 - DNA, 25 bp, Homo sapien
gctgatggtcagtgaataccctggg

SEQ ID NO: 2124498 - DNA, 25 bp, Homo sapien
ggtggtgatgactgtgccccttttc

SEQ ID NO: 2124499 - DNA, 25 bp, Homo sapien
gccccttttctatcgaccttgtgtg

SEQ ID NO: 2124500 - DNA, 25 bp, Homo sapien
caaagaaggctattctcgaggaagg

SEQ ID NO: 2124501 - DNA, 25 bp, Homo sapien
tggaagcagtcactttgagcagagg

SEQ ID NO: 2124502 - DNA, 25 bp, Homo sapien
aagatggaggccgatgcccgttcca

SEQ ID NO: 2124503 - DNA, 25 bp, Homo sapien
gcccgttccatctatgttggcaatg

SEQ ID NO: 2124504 - DNA, 25 bp, Homo sapien
ccagtgatcatgtcattgaggagaa

SEQ ID NO: 2124505 - DNA, 25 bp, Homo sapien
aatgttgactatggtgcaacagcag

SEQ ID NO: 2124506 - DNA, 25 bp, Homo sapien
cacagagatccagcatggattgaga

SEQ ID NO: 2124507 - DNA, 25 bp, Homo sapien
tggattgagagatctgagtcaatga

SEQ ID NO: 2124508 - DNA, 25 bp, Homo sapien
tcacagagatccagcatggattgag

SEQ ID NO: 2124509 - DNA, 25 bp, Homo sapien
tcatcacagagatccagcatggatt

SEQ ID NO: 2124510 - DNA, 25 bp, Homo sapien
ttgatagctttctctaagcgagcta

SEQ ID NO: 2124511 - DNA, 25 bp, Homo sapien
agctttctctaagcgagctaatttg

SEQ ID NO: 2124512 - DNA, 25 bp, Homo sapien
gaactgccatcattttctgggtgac

SEQ ID NO: 2124513 - DNA, 25 bp, Homo sapien
gaaagaaaacgccacttggtcatca

SEQ ID NO: 2124514 - DNA, 25 bp, Homo sapien
cacacgtgtacaccctaaacatttt

SEQ ID NO: 2124515 - DNA, 25 bp, Homo sapien
tttcccctgcacgatcctcacagta

SEQ ID NO: 2124516 - DNA, 25 bp, Homo sapien
gatcctcacagtatttggcacagag

SEQ ID NO: 2124517 - DNA, 25 bp, Homo sapien
ccctgcacgatcctcacagtatttg

SEQ ID NO: 2124518 - DNA, 25 bp, Homo sapien
atcactttgtaataatctggaacaa

SEQ ID NO: 2124519 - DNA, 25 bp, Homo sapien
ctaaatccattggattgacaatcac

SEQ ID NO: 2124520 - DNA, 25 bp, Homo sapien
caaatttcttattaactgggtgatg

SEQ ID NO: 2124521 - DNA, 25 bp, Homo sapien
cttacgtatggtctctaaatccatt

SEQ ID NO: 2124522 - DNA, 25 bp, Homo sapien
ctctcccgactctgatacttgtgct

SEQ ID NO: 2124523 - DNA, 25 bp, Homo sapien
tgacaaacttaacagccgtactact

SEQ ID NO: 2124524 - DNA, 25 bp, Homo sapien
tctttctgactgtccaatccttcac

SEQ ID NO: 2124525 - DNA, 25 bp, Homo sapien
ctgccccttctgacaaacttaacag

SEQ ID NO: 2124526 - DNA, 25 bp, Homo sapien
tcagtctttctgactgtccaatcct

SEQ ID NO: 2124527 - DNA, 25 bp, Homo sapien
taaacttgtgtggagtagtccctag

SEQ ID NO: 2124528 - DNA, 25 bp, Homo sapien
catactaggcgtttcatgatttggc

SEQ ID NO: 2124529 - DNA, 25 bp, Homo sapien
gcatgagtgcttgataccaccttaa

SEQ ID NO: 2124530 - DNA, 25 bp, Homo sapien
gaccttagttcaggccgtcagtatt

SEQ ID NO: 2124531 - DNA, 25 bp, Homo sapien
taacttctaataaccatcctctttg

SEQ ID NO: 2124532 - DNA, 25 bp, Homo sapien
ctgacctgttggtaattttccctct

SEQ ID NO: 2124533 - DNA, 25 bp, Homo sapien
ggtcttctctctaacacctgacctg

SEQ ID NO: 2124534 - DNA, 25 bp, Homo sapien
caactctcaatctctactttcttac

SEQ ID NO: 2124535 - DNA, 25 bp, Homo sapien
tacaacaatttagatggacctcaag

SEQ ID NO: 2124536 - DNA, 25 bp, Homo sapien
tttgactgctcttgcggaacagggc

SEQ ID NO: 2124537 - DNA, 25 bp, Homo sapien
tgtttgaacaaacgctggtacaacc

SEQ ID NO: 2124538 - DNA, 25 bp, Homo sapien
gaacggataagtggaacaggaacag

SEQ ID NO: 2124539 - DNA, 25 bp, Homo sapien
cagtcttagtatactgactctcagg

SEQ ID NO: 2124540 - DNA, 25 bp, Homo sapien
tctggtaacagacgttcacaatctc

SEQ ID NO: 2124541 - DNA, 25 bp, Homo sapien
tctcctgggcagtcttagtatactg

SEQ ID NO: 2124542 - DNA, 25 bp, Homo sapien
ctcagtcaatgtctggtaacagacg

SEQ ID NO: 2124543 - DNA, 25 bp, Homo sapien
tagggccctggggtcattgggtcca

SEQ ID NO: 2124544 - DNA, 25 bp, Homo sapien
aatatccttctcaagttgagtcaaa

SEQ ID NO: 2124545 - DNA, 25 bp, Homo sapien
tatccttctcaagttgagtcaaatg

SEQ ID NO: 2124546 - DNA, 25 bp, Homo sapien
ggtccaggctttctaattctgcttc

SEQ ID NO: 2124547 - DNA, 25 bp, Homo sapien
atctgagggttcttttatacctggc

SEQ ID NO: 2124548 - DNA, 25 bp, Homo sapien
tctgagggttcttttatacctggcc

SEQ ID NO: 2124549 - DNA, 25 bp, Homo sapien
gtatctgagggttcttttatacctg

SEQ ID NO: 2124550 - DNA, 25 bp, Homo sapien
tatctgagggttcttttatacctgg

SEQ ID NO: 2124551 - DNA, 25 bp, Homo sapien
cagagcaggtaaatcaatgtggaac

SEQ ID NO: 2124552 - DNA, 25 bp, Homo sapien
cagttttagataaggtgttaagctg

SEQ ID NO: 2124553 - DNA, 25 bp, Homo sapien
ggtggaagtgattacaagaggtaac

SEQ ID NO: 2124554 - DNA, 25 bp, Homo sapien
ttctgcaaaaccctacggcacagtg

SEQ ID NO: 2124555 - DNA, 25 bp, Homo sapien
catcttgaaatacagaggcatctcg

SEQ ID NO: 2124556 - DNA, 25 bp, Homo sapien
ttgaaatacagaggcatctcgagac

SEQ ID NO: 2124557 - DNA, 25 bp, Homo sapien
cttgaaatacagaggcatctcgaga

SEQ ID NO: 2124558 - DNA, 25 bp, Homo sapien
tcttgaaatacagaggcatctcgag

SEQ ID NO: 2124559 - DNA, 25 bp, Homo sapien
ccttcaatatctacatcagagtctt

SEQ ID NO: 2124560 - DNA, 25 bp, Homo sapien
ccagcctacctcggccctggcgcat

SEQ ID NO: 2124561 - DNA, 25 bp, Homo sapien
cttcctcgcccagcctacctcggcc

SEQ ID NO: 2124562 - DNA, 25 bp, Homo sapien
tcaatatctacatcagagtcttcct

SEQ ID NO: 2124563 - DNA, 25 bp, Homo sapien
gggctggagtcttaggtttcccatc

SEQ ID NO: 2124564 - DNA, 25 bp, Homo sapien
tggggctggagtcttaggtttccca

SEQ ID NO: 2124565 - DNA, 25 bp, Homo sapien
gctggagtcttaggtttcccatcct

SEQ ID NO: 2124566 - DNA, 25 bp, Homo sapien
tggagtcttaggtttcccatcctcc

SEQ ID NO: 2124567 - DNA, 25 bp, Homo sapien
gacactggcttgaggctgttgtaca

SEQ ID NO: 2124568 - DNA, 25 bp, Homo sapien
ttcatctgcaagatcaccatctcca

SEQ ID NO: 2124569 - DNA, 25 bp, Homo sapien
catcttctccttcagacataagcaa

SEQ ID NO: 2124570 - DNA, 25 bp, Homo sapien
gaaaggattgtctccttcttcatca

SEQ ID NO: 2124571 - DNA, 25 bp, Homo sapien
cgtctccctcataggacatcatgct

SEQ ID NO: 2124572 - DNA, 25 bp, Homo sapien
tccttgtgttctcctgaagcatgcg

SEQ ID NO: 2124573 - DNA, 25 bp, Homo sapien
tattccaccagatcccacatcagag

SEQ ID NO: 2124574 - DNA, 25 bp, Homo sapien
tctcctgaagcatgcggggttgttt

SEQ ID NO: 2124575 - DNA, 25 bp, Homo sapien
tgttgctatcctccaaaccatggga

SEQ ID NO: 2124576 - DNA, 25 bp, Homo sapien
gatgttgctatcctccaaaccatgg

SEQ ID NO: 2124577 - DNA, 25 bp, Homo sapien
tgctatcctccaaaccatgggaagc

SEQ ID NO: 2124578 - DNA, 25 bp, Homo sapien
ctgatgttgctatcctccaaaccat

SEQ ID NO: 2124579 - DNA, 25 bp, Homo sapien
tgggcccctcaacatcatagctggg

SEQ ID NO: 2124580 - DNA, 25 bp, Homo sapien
aatgtttgatggatgaaaagtaatc

SEQ ID NO: 2124581 - DNA, 25 bp, Homo sapien
aagtaatctgatgttgggcccctca

SEQ ID NO: 2124582 - DNA, 25 bp, Homo sapien
tggccctagtaggtgcccaggaaat

SEQ ID NO: 2124583 - DNA, 25 bp, Homo sapien
gaagaaactcccttacacctgaaca

SEQ ID NO: 2124584 - DNA, 25 bp, Homo sapien
tcccctggacactaaagtgactggt

SEQ ID NO: 2124585 - DNA, 25 bp, Homo sapien
cacaagaacctgaatggaagaaact

SEQ ID NO: 2124586 - DNA, 25 bp, Homo sapien
gactggttctggactattctacatg

SEQ ID NO: 2124587 - DNA, 25 bp, Homo sapien
gaagcttgtgtcttgggtgttcgac

SEQ ID NO: 2124588 - DNA, 25 bp, Homo sapien
ttgggatcaggctcctcatagctcc

SEQ ID NO: 2124589 - DNA, 25 bp, Homo sapien
tcttgggtgttcgacttgggatcag

SEQ ID NO: 2124590 - DNA, 25 bp, Homo sapien
gatcaggctcctcatagctcccata

SEQ ID NO: 2124591 - DNA, 25 bp, Homo sapien
cctcatcttcttcctcctctgatac

SEQ ID NO: 2124592 - DNA, 25 bp, Homo sapien
ctcggcccagagcgctgctcttcct

SEQ ID NO: 2124593 - DNA, 25 bp, Homo sapien
ctcctcatcttcttcctcctctgat

SEQ ID NO: 2124594 - DNA, 25 bp, Homo sapien
cggcccagagcgctgctcttcctcc

SEQ ID NO: 2124595 - DNA, 25 bp, Homo sapien
tgacaggtggacctggcttagtacg

SEQ ID NO: 2124596 - DNA, 25 bp, Homo sapien
ctgacaggtggacctggcttagtac

SEQ ID NO: 2124597 - DNA, 25 bp, Homo sapien
cccagcaatggagtggaaatcctca

SEQ ID NO: 2124598 - DNA, 25 bp, Homo sapien
tcattcatcagagtccaagtcactg

SEQ ID NO: 2124599 - DNA, 25 bp, Homo sapien
ccagcaatggagtggaaatcctcac

SEQ ID NO: 2124600 - DNA, 25 bp, Homo sapien
atcagagtccaagtcactgtcccca

SEQ ID NO: 2124601 - DNA, 25 bp, Homo sapien
ctgaccaaggaggcccaaaggaagc

SEQ ID NO: 2124602 - DNA, 25 bp, Homo sapien
tgaccaaggaggcccaaaggaagcc

SEQ ID NO: 2124603 - DNA, 25 bp, Homo sapien
ccacctaggctggagaacagggaag

SEQ ID NO: 2124604 - DNA, 25 bp, Homo sapien
cacctaggctggagaacagggaagg

SEQ ID NO: 2124605 - DNA, 25 bp, Homo sapien
atgagcttgctcttttccgtagtgg

SEQ ID NO: 2124606 - DNA, 25 bp, Homo sapien
cattgccccaggaagattaggagag

SEQ ID NO: 2124607 - DNA, 25 bp, Homo sapien
gaggacacggaaaaatgagcttgct

SEQ ID NO: 2124608 - DNA, 25 bp, Homo sapien
cacgcctggccggaaatttcctaat

SEQ ID NO: 2124609 - DNA, 25 bp, Homo sapien
cagagtccactagaacccaattctc

SEQ ID NO: 2124610 - DNA, 25 bp, Homo sapien
agagtccactagaacccaattctct

SEQ ID NO: 2124611 - DNA, 25 bp, Homo sapien
ttaggaactaggcattgcataatta

SEQ ID NO: 2124612 - DNA, 25 bp, Homo sapien
catttaggaactaggcattgcataa

SEQ ID NO: 2124613 - DNA, 25 bp, Homo sapien
tttgcctccaatccatttaggaact

SEQ ID NO: 2124614 - DNA, 25 bp, Homo sapien
tacggtaatttgcctccaatccatt

SEQ ID NO: 2124615 - DNA, 25 bp, Homo sapien
cccaaggatctgatagagtgcttat

SEQ ID NO: 2124616 - DNA, 25 bp, Homo sapien
ccccaacttgatggtgagctctttg

SEQ ID NO: 2124617 - DNA, 25 bp, Homo sapien
tgcacagaaccatatcctaagcatg

SEQ ID NO: 2124618 - DNA, 25 bp, Homo sapien
agcccttccagcattaaaggactgg

SEQ ID NO: 2124619 - DNA, 25 bp, Homo sapien
gttccttgacatgttggcttctcca

SEQ ID NO: 2124620 - DNA, 25 bp, Homo sapien
caggggagctcacaacaacacagca

SEQ ID NO: 2124621 - DNA, 25 bp, Homo sapien
gcagctggtttcatcagggtattga

SEQ ID NO: 2124622 - DNA, 25 bp, Homo sapien
cttgtggactgttggactgagggtc

SEQ ID NO: 2124623 - DNA, 25 bp, Homo sapien
gaagaaagcccagacctctaagaag

SEQ ID NO: 2124624 - DNA, 25 bp, Homo sapien
acctctaagaagaagcagagctcca

SEQ ID NO: 2124625 - DNA, 25 bp, Homo sapien
agaaccgtgagaacgcgtccagcaa

SEQ ID NO: 2124626 - DNA, 25 bp, Homo sapien
tcacctcgggcacgcccaaggagaa

SEQ ID NO: 2124627 - DNA, 25 bp, Homo sapien
agcaaagcgttctcggcggcagcgc

SEQ ID NO: 2124628 - DNA, 25 bp, Homo sapien
gtagacagccacgtggagccgttcc

SEQ ID NO: 2124629 - DNA, 25 bp, Homo sapien
gacgcgcaggcggagaagtccaaca

SEQ ID NO: 2124630 - DNA, 25 bp, Homo sapien
acggcggcaaggtcggcccggacag

SEQ ID NO: 2124631 - DNA, 25 bp, Homo sapien
gatccagatcaagagccagagggtg

SEQ ID NO: 2124632 - DNA, 25 bp, Homo sapien
gagaagggcattgcgcttccagccg

SEQ ID NO: 2124633 - DNA, 25 bp, Homo sapien
gagccgggcgatcagaagatccaga

SEQ ID NO: 2124634 - DNA, 25 bp, Homo sapien
acaagtgctatgagaaggtccgccg

SEQ ID NO: 2124635 - DNA, 25 bp, Homo sapien
tgtgacaagccttacagaggagctg

SEQ ID NO: 2124636 - DNA, 25 bp, Homo sapien
gggcaatcatacactgacaggcaga

SEQ ID NO: 2124637 - DNA, 25 bp, Homo sapien
gctcaagcttttgctcccatggtaa

SEQ ID NO: 2124638 - DNA, 25 bp, Homo sapien
gagcaagccatgaagacattcctga

SEQ ID NO: 2124639 - DNA, 25 bp, Homo sapien
ctggtcgttgctccagagatctttg

SEQ ID NO: 2124640 - DNA, 25 bp, Homo sapien
ccaaagctgagaatcgggtagagca

SEQ ID NO: 2124641 - DNA, 25 bp, Homo sapien
agctgagaatcgggtagagcaggac

SEQ ID NO: 2124642 - DNA, 25 bp, Homo sapien
cccaaagctgagaatcgggtagagc

SEQ ID NO: 2124643 - DNA, 25 bp, Homo sapien
aaagctgagaatcgggtagagcagg

SEQ ID NO: 2124644 - DNA, 25 bp, Homo sapien
gagactcaaagccttggttcattct

SEQ ID NO: 2124645 - DNA, 25 bp, Homo sapien
aactaaggagacacgtatcaaaacg

SEQ ID NO: 2124646 - DNA, 25 bp, Homo sapien
cggagatgagacgaagagactcaaa

SEQ ID NO: 2124647 - DNA, 25 bp, Homo sapien
ccaagtctggcacggattttcacta

SEQ ID NO: 2124648 - DNA, 25 bp, Homo sapien
ctggtaaagatatggccacctgtga

SEQ ID NO: 2124649 - DNA, 25 bp, Homo sapien
tgtgagagctcaaagaccaataagg

SEQ ID NO: 2124650 - DNA, 25 bp, Homo sapien
gagagaaattggtcccctggatgaa

SEQ ID NO: 2124651 - DNA, 25 bp, Homo sapien
cacaccctatgggagttctgccaga

SEQ ID NO: 2124652 - DNA, 25 bp, Homo sapien
tctttgagtccgtgccacctttaag

SEQ ID NO: 2124653 - DNA, 25 bp, Homo sapien
ccgtcttcacaatgaatcttgctgc

SEQ ID NO: 2124654 - DNA, 25 bp, Homo sapien
agctgtgttctttccgtcttcacaa

SEQ ID NO: 2124655 - DNA, 25 bp, Homo sapien
actcgggtctctttccacaccgtgg

SEQ ID NO: 2124656 - DNA, 25 bp, Homo sapien
gttaaaggtgattcacgttcgtcaa

SEQ ID NO: 2124657 - DNA, 25 bp, Homo sapien
tccaccagctagctctgcacattgt

SEQ ID NO: 2124658 - DNA, 25 bp, Homo sapien
ctctcctcgagttgtgacttcattt

SEQ ID NO: 2124659 - DNA, 25 bp, Homo sapien
tcacgttcgtcaaaatccatgactc

SEQ ID NO: 2124660 - DNA, 25 bp, Homo sapien
agtacggtcttgaaatggcggcgac

SEQ ID NO: 2124661 - DNA, 25 bp, Homo sapien
tagtacggtcttgaaatggcggcga

SEQ ID NO: 2124662 - DNA, 25 bp, Homo sapien
ctagtacggtcttgaaatggcggcg

SEQ ID NO: 2124663 - DNA, 25 bp, Homo sapien
tacggtcttgaaatggcggcgacgg

SEQ ID NO: 2124664 - DNA, 25 bp, Homo sapien
agcggcggcagcagttacaggcttc

SEQ ID NO: 2124665 - DNA, 25 bp, Homo sapien
cagttacaggcttcaaaccctggga

SEQ ID NO: 2124666 - DNA, 25 bp, Homo sapien
ccctgggaactctaattgaccatct

SEQ ID NO: 2124667 - DNA, 25 bp, Homo sapien
ctgggaactctaattgaccatctac

SEQ ID NO: 2124668 - DNA, 25 bp, Homo sapien
tatttggaggtagtagtacaagggc

SEQ ID NO: 2124669 - DNA, 25 bp, Homo sapien
aaagaggtaattggtcctgctgccg

SEQ ID NO: 2124670 - DNA, 25 bp, Homo sapien
tggagcttctcgagggagagcaaaa

SEQ ID NO: 2124671 - DNA, 25 bp, Homo sapien
ctaccagcaagaacgtatttggagg

SEQ ID NO: 2124672 - DNA, 25 bp, Homo sapien
gtcggccacgttgcccacggaagac

SEQ ID NO: 2124673 - DNA, 25 bp, Homo sapien
gctgtcggccacgttgcccacggaa

SEQ ID NO: 2124674 - DNA, 25 bp, Homo sapien
tgtgctgtcggccacgttgcccacg

SEQ ID NO: 2124675 - DNA, 25 bp, Homo sapien
tgtcggccacgttgcccacggaaga

SEQ ID NO: 2124676 - DNA, 25 bp, Homo sapien
tggaaggaaagcatacgtttcgttg

SEQ ID NO: 2124677 - DNA, 25 bp, Homo sapien
cttggaaggaaagcatacgtttcgt

SEQ ID NO: 2124678 - DNA, 25 bp, Homo sapien
cagccttcgacactggaagtgtata

SEQ ID NO: 2124679 - DNA, 25 bp, Homo sapien
gatattctcgatgtgccaactcagc

SEQ ID NO: 2124680 - DNA, 25 bp, Homo sapien
taaaagcacaccagtattgtctggc

SEQ ID NO: 2124681 - DNA, 25 bp, Homo sapien
tccagagctgcatgcagtgtctctc

SEQ ID NO: 2124682 - DNA, 25 bp, Homo sapien
ggtatggcccatatgcaactcaaac

SEQ ID NO: 2124683 - DNA, 25 bp, Homo sapien
tggaaaaggcgacaagtgttaatgc

SEQ ID NO: 2124684 - DNA, 25 bp, Homo sapien
ggtatgcacgttacagaaaagaagg

SEQ ID NO: 2124685 - DNA, 25 bp, Homo sapien
acaagtgttaatgcatgggtatgca

SEQ ID NO: 2124686 - DNA, 25 bp, Homo sapien
tcgataatgctcaattgcctcctgc

SEQ ID NO: 2124687 - DNA, 25 bp, Homo sapien
gagacgtaagcttgtactgcccctt

SEQ ID NO: 2124688 - DNA, 25 bp, Homo sapien
gaaatcaggtttgagacgcaatgca

SEQ ID NO: 2124689 - DNA, 25 bp, Homo sapien
atgtcacccgctgctaccaaggcgg

SEQ ID NO: 2124690 - DNA, 25 bp, Homo sapien
tccaagcgacccagggctttgagca

SEQ ID NO: 2124691 - DNA, 25 bp, Homo sapien
cttggcttcttccaagcgacccagg

SEQ ID NO: 2124692 - DNA, 25 bp, Homo sapien
ccaggtcactgcgaacacagtacaa

SEQ ID NO: 2124693 - DNA, 25 bp, Homo sapien
ggtcactgcgaacacagtacaaatc

SEQ ID NO: 2124694 - DNA, 25 bp, Homo sapien
tattctgaggcgattcgtgccgtca

SEQ ID NO: 2124695 - DNA, 25 bp, Homo sapien
tagaacagatatgccaaagcctggc

SEQ ID NO: 2124696 - DNA, 25 bp, Homo sapien
cataagatcatgacggagcccagtg

SEQ ID NO: 2124697 - DNA, 25 bp, Homo sapien
tctagctcagcagaaaggctccaaa

SEQ ID NO: 2124698 - DNA, 25 bp, Homo sapien
taatcagggctattgcatacagcag

SEQ ID NO: 2124699 - DNA, 25 bp, Homo sapien
ttttcaaactaggtgtctccagagc

SEQ ID NO: 2124700 - DNA, 25 bp, Homo sapien
taaagaagtcagcaacctaaggcag

SEQ ID NO: 2124701 - DNA, 25 bp, Homo sapien
taaggcaggcgcaatgtctcagcct

SEQ ID NO: 2124702 - DNA, 25 bp, Homo sapien
gggtcacagcgcatcatcagaagag

SEQ ID NO: 2124703 - DNA, 25 bp, Homo sapien
tacgcatggaataggaggtttcacc

SEQ ID NO: 2124704 - DNA, 25 bp, Homo sapien
catcatgtgacttttcggtgcgttc

SEQ ID NO: 2124705 - DNA, 25 bp, Homo sapien
ctacagaataggactgagggagcca

SEQ ID NO: 2124706 - DNA, 25 bp, Homo sapien
taatgcgagcgcaaacatcgcttgc

SEQ ID NO: 2124707 - DNA, 25 bp, Homo sapien
tcgcttgcgcaacctaacagcatcg

SEQ ID NO: 2124708 - DNA, 25 bp, Homo sapien
gattgcacctaggttgaggtccctg

SEQ ID NO: 2124709 - DNA, 25 bp, Homo sapien
gcaatcgctgcgaactgctgcgcta

SEQ ID NO: 2124710 - DNA, 25 bp, Homo sapien
caagtaggatatcataaagccaggc

SEQ ID NO: 2124711 - DNA, 25 bp, Homo sapien
ggaagtcagttgctataaggctcta

SEQ ID NO: 2124712 - DNA, 25 bp, Homo sapien
tttcaagtgctacctagagggcgca

SEQ ID NO: 2124713 - DNA, 25 bp, Homo sapien
cttacactgggacttaactgggaag

SEQ ID NO: 2124714 - DNA, 25 bp, Homo sapien
agaaggtgatatcattattccttct

SEQ ID NO: 2124715 - DNA, 25 bp, Homo sapien
ggaagaaggtgatatcattattcct

SEQ ID NO: 2124716 - DNA, 25 bp, Homo sapien
gggaagaaggtgatatcattattcc

SEQ ID NO: 2124717 - DNA, 25 bp, Homo sapien
gaagaaggtgatatcattattcctt

SEQ ID NO: 2124718 - DNA, 25 bp, Homo sapien
aagattactccaagctactgcaaag

SEQ ID NO: 2124719 - DNA, 25 bp, Homo sapien
tcaaagtgatgaattgcaagccaaa

SEQ ID NO: 2124720 - DNA, 25 bp, Homo sapien
tactgcaaagttcggttgcgtctca

SEQ ID NO: 2124721 - DNA, 25 bp, Homo sapien
tcggttgcgtctcaattgctttcaa

SEQ ID NO: 2124722 - DNA, 25 bp, Homo sapien
ctcagccctacaaatggctgggact

SEQ ID NO: 2124723 - DNA, 25 bp, Homo sapien
ccacctcagccctacaaatggctgg

SEQ ID NO: 2124724 - DNA, 25 bp, Homo sapien
ctacaggagcacactgccacaccca

SEQ ID NO: 2124725 - DNA, 25 bp, Homo sapien
ctcccacctcagccctacaaatggc

SEQ ID NO: 2124726 - DNA, 25 bp, Homo sapien
cctgtcccgtgtatatctcctgtaa

SEQ ID NO: 2124727 - DNA, 25 bp, Homo sapien
cactggtgaaattgtttaccacaag

SEQ ID NO: 2124728 - DNA, 25 bp, Homo sapien
tgtgcaagactacttcactggtgaa

SEQ ID NO: 2124729 - DNA, 25 bp, Homo sapien
aattggtaggtagaaccagaagctt

SEQ ID NO: 2124730 - DNA, 25 bp, Homo sapien
tgtcaaaaatgcgtgcctctttcaa

SEQ ID NO: 2124731 - DNA, 25 bp, Homo sapien
tcaagacatttcctaaattgatata

SEQ ID NO: 2124732 - DNA, 25 bp, Homo sapien
tgcctctttcaagacatttcctaaa

SEQ ID NO: 2124733 - DNA, 25 bp, Homo sapien
agaaagtttgggtcaagggtgacag

SEQ ID NO: 2124734 - DNA, 25 bp, Homo sapien
tagggcacgaagataagctgccaca

SEQ ID NO: 2124735 - DNA, 25 bp, Homo sapien
gggcacgaagataagctgccacagc

SEQ ID NO: 2124736 - DNA, 25 bp, Homo sapien
cttagggcacgaagataagctgcca

SEQ ID NO: 2124737 - DNA, 25 bp, Homo sapien
ggcacgaagataagctgccacagct

SEQ ID NO: 2124738 - DNA, 25 bp, Homo sapien
tagtatacacaagccaggttgccgt

SEQ ID NO: 2124739 - DNA, 25 bp, Homo sapien
ggttgccgtgcaccactgcgtgatt

SEQ ID NO: 2124740 - DNA, 25 bp, Homo sapien
tgtagttcgatagcccgcctgtagg

SEQ ID NO: 2124741 - DNA, 25 bp, Homo sapien
tattgccagatctatcaggccttgc

SEQ ID NO: 2124742 - DNA, 25 bp, Homo sapien
cacagacggagagctgtattataac

SEQ ID NO: 2124743 - DNA, 25 bp, Homo sapien
tctaatgctttacgatacaagcgaa

SEQ ID NO: 2124744 - DNA, 25 bp, Homo sapien
tggctaggttattcagagagtctgc

SEQ ID NO: 2124745 - DNA, 25 bp, Homo sapien
tacaagcgaactgcctcttcaatgt

SEQ ID NO: 2124746 - DNA, 25 bp, Homo sapien
tgctcaagtacatttaaacccctaa

SEQ ID NO: 2124747 - DNA, 25 bp, Homo sapien
caagtctattcattctcaaattcta

SEQ ID NO: 2124748 - DNA, 25 bp, Homo sapien
ccttaagaactttgctcaagtacat

SEQ ID NO: 2124749 - DNA, 25 bp, Homo sapien
tgtttcaaacataatgaggtacacc

SEQ ID NO: 2124750 - DNA, 25 bp, Homo sapien
tgctgctgcagtacacttgctaaat

SEQ ID NO: 2124751 - DNA, 25 bp, Homo sapien
ttataatgcatcagagcttcctgca

SEQ ID NO: 2124752 - DNA, 25 bp, Homo sapien
tacacttgctaaatttgaatgggca

SEQ ID NO: 2124753 - DNA, 25 bp, Homo sapien
gaatagcctccttataatgcatcag

SEQ ID NO: 2124754 - DNA, 25 bp, Homo sapien
agtgtttcccatattagagtaggca

SEQ ID NO: 2124755 - DNA, 25 bp, Homo sapien
taggcatcagcaaaggtaggactga

SEQ ID NO: 2124756 - DNA, 25 bp, Homo sapien
caggattaatttggatggcacgcgt

SEQ ID NO: 2124757 - DNA, 25 bp, Homo sapien
cgtataacactgcaaggctccctga

SEQ ID NO: 2124758 - DNA, 25 bp, Homo sapien
tttcagagccgtgcggtaagaagct

SEQ ID NO: 2124759 - DNA, 25 bp, Homo sapien
gccgtgcggtaagaagctatggctt

SEQ ID NO: 2124760 - DNA, 25 bp, Homo sapien
gccaagttacaataagcatcaggaa

SEQ ID NO: 2124761 - DNA, 25 bp, Homo sapien
ggcttaagtttcagagccgtgcggt

SEQ ID NO: 2124762 - DNA, 25 bp, Homo sapien
ttatctaagcacaggttgccgtgcc

SEQ ID NO: 2124763 - DNA, 25 bp, Homo sapien
gtgcctctcagcaatagccttcctg

SEQ ID NO: 2124764 - DNA, 25 bp, Homo sapien
aggcaacctattcttctctaactgg

SEQ ID NO: 2124765 - DNA, 25 bp, Homo sapien
tctaactggtcagccacaatactga

SEQ ID NO: 2124766 - DNA, 25 bp, Homo sapien
ggatgattcccaaagtcggaactca

SEQ ID NO: 2124767 - DNA, 25 bp, Homo sapien
tgtgcatgcctggaatagactgcat

SEQ ID NO: 2124768 - DNA, 25 bp, Homo sapien
caaatttatcaggattgtgcatgcc

SEQ ID NO: 2124769 - DNA, 25 bp, Homo sapien
ggaactcacatatcctacacgcagc

SEQ ID NO: 2124770 - DNA, 25 bp, Homo sapien
tctgggctcagggcataacagaaca

SEQ ID NO: 2124771 - DNA, 25 bp, Homo sapien
ctgggctcagggcataacagaacac

SEQ ID NO: 2124772 - DNA, 25 bp, Homo sapien
gatcaatgaaatgattggcttctgc

SEQ ID NO: 2124773 - DNA, 25 bp, Homo sapien
gcaaaaagctcatttcgagcgccct

SEQ ID NO: 2124774 - DNA, 25 bp, Homo sapien
ttacaaggatatgaattccatcctg

SEQ ID NO: 2124775 - DNA, 25 bp, Homo sapien
gatggatgcgatcagctgcttttcc

SEQ ID NO: 2124776 - DNA, 25 bp, Homo sapien
gcgcccttagtatagccattcatat

SEQ ID NO: 2124777 - DNA, 25 bp, Homo sapien
aagcgcaccactcgtcccagggtat

SEQ ID NO: 2124778 - DNA, 25 bp, Homo sapien
gggcatataagccaatttctcggaa

SEQ ID NO: 2124779 - DNA, 25 bp, Homo sapien
cttcaggtgagggaacatattagca

SEQ ID NO: 2124780 - DNA, 25 bp, Homo sapien
tcagctggcgaagtttcctgatcag

SEQ ID NO: 2124781 - DNA, 25 bp, Homo sapien
tcacatctggtagactatcaagaaa

SEQ ID NO: 2124782 - DNA, 25 bp, Homo sapien
tgtcataaatgtgcccattggactt

SEQ ID NO: 2124783 - DNA, 25 bp, Homo sapien
cattggacttaaaatcgatgactgc

SEQ ID NO: 2124784 - DNA, 25 bp, Homo sapien
gccattcagaactatccgattgtca

SEQ ID NO: 2124785 - DNA, 25 bp, Homo sapien
taatcatttcaataactgcttctgc

SEQ ID NO: 2124786 - DNA, 25 bp, Homo sapien
cagtccattgctaatactgaatcca

SEQ ID NO: 2124787 - DNA, 25 bp, Homo sapien
tattcataggaataacaggcatatt

SEQ ID NO: 2124788 - DNA, 25 bp, Homo sapien
catattaagagctgtgttactgcta

SEQ ID NO: 2124789 - DNA, 25 bp, Homo sapien
catcttctggtaacccgtactgaga

SEQ ID NO: 2124790 - DNA, 25 bp, Homo sapien
tactgagaacgggtggttacaataa

SEQ ID NO: 2124791 - DNA, 25 bp, Homo sapien
gattaaagttacagtatacgatggc

SEQ ID NO: 2124792 - DNA, 25 bp, Homo sapien
ctctccagttgcagccttattgttg

SEQ ID NO: 2124793 - DNA, 25 bp, Homo sapien
gagtacactattgggaacacgcttc

SEQ ID NO: 2124794 - DNA, 25 bp, Homo sapien
tgtggtgtgcccattacagagtgga

SEQ ID NO: 2124795 - DNA, 25 bp, Homo sapien
gagtgtccaagcagacatcagccag

SEQ ID NO: 2124796 - DNA, 25 bp, Homo sapien
gaaaacgcaacagccagagtacact

SEQ ID NO: 2124797 - DNA, 25 bp, Homo sapien
ctaagcaagtgagctgggatgctgc

SEQ ID NO: 2124798 - DNA, 25 bp, Homo sapien
gcaactcgagaagcaagagtctctc

SEQ ID NO: 2124799 - DNA, 25 bp, Homo sapien
gagctgggatgctgcaactcgagaa

SEQ ID NO: 2124800 - DNA, 25 bp, Homo sapien
tgctgcaactcgagaagcaagagtc

SEQ ID NO: 2124801 - DNA, 25 bp, Homo sapien
gcttcacagctatgtcttcatattc

SEQ ID NO: 2124802 - DNA, 25 bp, Homo sapien
gataaatactttagaaccagaagcc

SEQ ID NO: 2124803 - DNA, 25 bp, Homo sapien
tccacttgtacctgaactgagttca

SEQ ID NO: 2124804 - DNA, 25 bp, Homo sapien
catacaggaccatgcaaagatattc

SEQ ID NO: 2124805 - DNA, 25 bp, Homo sapien
taaccctctggcctaacagtaacac

SEQ ID NO: 2124806 - DNA, 25 bp, Homo sapien
caacaggcttaatcatgtggtcagg

SEQ ID NO: 2124807 - DNA, 25 bp, Homo sapien
ggtcaggtttgttgccagctgcata

SEQ ID NO: 2124808 - DNA, 25 bp, Homo sapien
cacatctgtagatagagccgctcta

SEQ ID NO: 2124809 - DNA, 25 bp, Homo sapien
gctgcataatgctcccacatctgta

SEQ ID NO: 2124810 - DNA, 25 bp, Homo sapien
taggggtaattctcctgtgcagtct

SEQ ID NO: 2124811 - DNA, 25 bp, Homo sapien
ggggtaattctcctgtgcagtcttt

SEQ ID NO: 2124812 - DNA, 25 bp, Homo sapien
gggtaattctcctgtgcagtcttta

SEQ ID NO: 2124813 - DNA, 25 bp, Homo sapien
ggtaattctcctgtgcagtctttat

SEQ ID NO: 2124814 - DNA, 25 bp, Homo sapien
taaccatcccatggaagaccaaggg

SEQ ID NO: 2124815 - DNA, 25 bp, Homo sapien
aatccatggaatcacaaagcggccg

SEQ ID NO: 2124816 - DNA, 25 bp, Homo sapien
gagcggctacttttcgtgccaggaa

SEQ ID NO: 2124817 - DNA, 25 bp, Homo sapien
tctggtcgccgcaaaattctacgga

SEQ ID NO: 2124818 - DNA, 25 bp, Homo sapien
ggatcgcaagacaacatcttaattt

SEQ ID NO: 2124819 - DNA, 25 bp, Homo sapien
taatttctgtagtacgatttaaatg

SEQ ID NO: 2124820 - DNA, 25 bp, Homo sapien
tctaatcagaattaagtcttccaag

SEQ ID NO: 2124821 - DNA, 25 bp, Homo sapien
aacaattagtttccagtaatatcta

SEQ ID NO: 2124822 - DNA, 25 bp, Homo sapien
tgcgatgaacaacgccaggcgcagg

SEQ ID NO: 2124823 - DNA, 25 bp, Homo sapien
aggcgcaggcccctttatagtgccc

SEQ ID NO: 2124824 - DNA, 25 bp, Homo sapien
gcaggcccctttatagtgcccggac

SEQ ID NO: 2124825 - DNA, 25 bp, Homo sapien
gagtgtgtgcaaagatccggagcaa

SEQ ID NO: 2124826 - DNA, 25 bp, Homo sapien
ctgtagtgaaagacaaagatacact

SEQ ID NO: 2124827 - DNA, 25 bp, Homo sapien
ttgttgcaaacttttcccactcagg

SEQ ID NO: 2124828 - DNA, 25 bp, Homo sapien
taaagccgaaactttgctctgcaaa

SEQ ID NO: 2124829 - DNA, 25 bp, Homo sapien
tttcttaagaaagccagaactcggc

SEQ ID NO: 2124830 - DNA, 25 bp, Homo sapien
tcttgcaagcggggcagctcttttt

SEQ ID NO: 2124831 - DNA, 25 bp, Homo sapien
ttgcaagcggggcagctcttttttg

SEQ ID NO: 2124832 - DNA, 25 bp, Homo sapien
tgcaagcggggcagctcttttttgc

SEQ ID NO: 2124833 - DNA, 25 bp, Homo sapien
cttgcaagcggggcagctctttttt

SEQ ID NO: 2124834 - DNA, 25 bp, Homo sapien
acccactggtgtcatcactgcttga

SEQ ID NO: 2124835 - DNA, 25 bp, Homo sapien
gtcatcactgcttgactgaacatta

SEQ ID NO: 2124836 - DNA, 25 bp, Homo sapien
catcactgcttgactgaacattaag

SEQ ID NO: 2124837 - DNA, 25 bp, Homo sapien
ggtgtcatcactgcttgactgaaca

SEQ ID NO: 2124838 - DNA, 25 bp, Homo sapien
ctcttcggagctcttctggccacag

SEQ ID NO: 2124839 - DNA, 25 bp, Homo sapien
gtctcttcggagctcttctggccac

SEQ ID NO: 2124840 - DNA, 25 bp, Homo sapien
tctcttcggagctcttctggccaca

SEQ ID NO: 2124841 - DNA, 25 bp, Homo sapien
tgtctcttcggagctcttctggcca

SEQ ID NO: 2124842 - DNA, 25 bp, Homo sapien
accactccttgactggacattaagg

SEQ ID NO: 2124843 - DNA, 25 bp, Homo sapien
ccttgactggacattaaggatgcaa

SEQ ID NO: 2124844 - DNA, 25 bp, Homo sapien
ctggtgtcaccactccttgactgga

SEQ ID NO: 2124845 - DNA, 25 bp, Homo sapien
ggtgtcaccactccttgactggaca

SEQ ID NO: 2124846 - DNA, 25 bp, Homo sapien
ctcttcggagctcttctggccacag

SEQ ID NO: 2124847 - DNA, 25 bp, Homo sapien
gtctcttcggagctcttctggccac

SEQ ID NO: 2124848 - DNA, 25 bp, Homo sapien
tctcttcggagctcttctggccaca

SEQ ID NO: 2124849 - DNA, 25 bp, Homo sapien
tgtctcttcggagctcttctggcca

SEQ ID NO: 2124850 - DNA, 25 bp, Homo sapien
tcccacagtaactctgttcccctcc

SEQ ID NO: 2124851 - DNA, 25 bp, Homo sapien
cctcctttggaactactcaatcctt

SEQ ID NO: 2124852 - DNA, 25 bp, Homo sapien
tcccctcctttggaactactcaatc

SEQ ID NO: 2124853 - DNA, 25 bp, Homo sapien
ctttggaactactcaatccttccat

SEQ ID NO: 2124854 - DNA, 25 bp, Homo sapien
tcatgggtgtgacattcctcatcag

SEQ ID NO: 2124855 - DNA, 25 bp, Homo sapien
tttccaataacttagctttcttctc

SEQ ID NO: 2124856 - DNA, 25 bp, Homo sapien
gtgacattcctcatcagaatcagag

SEQ ID NO: 2124857 - DNA, 25 bp, Homo sapien
ggtgtgacattcctcatcagaatca

SEQ ID NO: 2124858 - DNA, 25 bp, Homo sapien
gaattcagttaagctccaagccacc

SEQ ID NO: 2124859 - DNA, 25 bp, Homo sapien
cttctgatccaaagaggtaaggaac

SEQ ID NO: 2124860 - DNA, 25 bp, Homo sapien
cgagcaggtaggttctgaattcagt

SEQ ID NO: 2124861 - DNA, 25 bp, Homo sapien
aaggaactgccacgggaaacaggct

SEQ ID NO: 2124862 - DNA, 25 bp, Homo sapien
aatttcagcagattatttagcacaa

SEQ ID NO: 2124863 - DNA, 25 bp, Homo sapien
tgtaaatatactccctctaccacct

SEQ ID NO: 2124864 - DNA, 25 bp, Homo sapien
aaggagacaccaacaaatggaaaga

SEQ ID NO: 2124865 - DNA, 25 bp, Homo sapien
tagcagttaagaatcggttatttta

SEQ ID NO: 2124866 - DNA, 25 bp, Homo sapien
caaatcattaccgttgtcatcgtca

SEQ ID NO: 2124867 - DNA, 25 bp, Homo sapien
aaatcatcactattgtcatcgggaa

SEQ ID NO: 2124868 - DNA, 25 bp, Homo sapien
tgtcatcatcactaataactattgg

SEQ ID NO: 2124869 - DNA, 25 bp, Homo sapien
tgtcgtcgggaacttccaaatcatt

SEQ ID NO: 2124870 - DNA, 25 bp, Homo sapien
gttagcctcaggatcacttggtggt

SEQ ID NO: 2124871 - DNA, 25 bp, Homo sapien
tcctcggtggctccacaatagtttt

SEQ ID NO: 2124872 - DNA, 25 bp, Homo sapien
aaacttcagggttagcctcaggatc

SEQ ID NO: 2124873 - DNA, 25 bp, Homo sapien
ttttccctgattgttccaccacagg

SEQ ID NO: 2124874 - DNA, 25 bp, Homo sapien
aatcacagagctgccagcagcatga

SEQ ID NO: 2124875 - DNA, 25 bp, Homo sapien
ccacgtgaatcacagagctgccagc

SEQ ID NO: 2124876 - DNA, 25 bp, Homo sapien
tcacagagctgccagcagcatgagc

SEQ ID NO: 2124877 - DNA, 25 bp, Homo sapien
acagagctgccagcagcatgagctg

SEQ ID NO: 2124878 - DNA, 25 bp, Homo sapien
ccttcatcattctcaacgatctcac

SEQ ID NO: 2124879 - DNA, 25 bp, Homo sapien
gccttcatcattctcaacgatctca

SEQ ID NO: 2124880 - DNA, 25 bp, Homo sapien
aacttctctaaacaaaactgtctga

SEQ ID NO: 2124881 - DNA, 25 bp, Homo sapien
caagcccagtgcaacttctctaaac

SEQ ID NO: 2124882 - DNA, 25 bp, Homo sapien
caacttctctaaacaaaactgtctg

SEQ ID NO: 2124883 - DNA, 25 bp, Homo sapien
ttcaacttttgctgcaccgggtttc

SEQ ID NO: 2124884 - DNA, 25 bp, Homo sapien
tctttgaaggcccacgcttcttatg

SEQ ID NO: 2124885 - DNA, 25 bp, Homo sapien
ctagtcttgcgtttttcaacttttg

SEQ ID NO: 2124886 - DNA, 25 bp, Homo sapien
tttgaaggcccacgcttcttatgtc

SEQ ID NO: 2124887 - DNA, 25 bp, Homo sapien
cacagacggatctgttaaacaggtc

SEQ ID NO: 2124888 - DNA, 25 bp, Homo sapien
caaggtcttgcaagaaacatccagg

SEQ ID NO: 2124889 - DNA, 25 bp, Homo sapien
taaacaggtcgtagattctctgaac

SEQ ID NO: 2124890 - DNA, 25 bp, Homo sapien
aacatccagggactttgcatttagg

SEQ ID NO: 2124891 - DNA, 25 bp, Homo sapien
gcagagtcgcagactttcaagccaa

SEQ ID NO: 2124892 - DNA, 25 bp, Homo sapien
cagcctatgcgtagtttctctggca

SEQ ID NO: 2124893 - DNA, 25 bp, Homo sapien
catctcaccagtgctgcataagcca

SEQ ID NO: 2124894 - DNA, 25 bp, Homo sapien
ctggatcttggcaaagcgccgccac

SEQ ID NO: 2124895 - DNA, 25 bp, Homo sapien
ggacaagatctagtttctgccctcc

SEQ ID NO: 2124896 - DNA, 25 bp, Homo sapien
gagcaatcgctatggccgtgggatt

SEQ ID NO: 2124897 - DNA, 25 bp, Homo sapien
gcaaagttagaaaggccattctggg

SEQ ID NO: 2124898 - DNA, 25 bp, Homo sapien
ccattctgggtgtggcaaaacatga

SEQ ID NO: 2124899 - DNA, 25 bp, Homo sapien
catttcatggatcaaggtatcccgg

SEQ ID NO: 2124900 - DNA, 25 bp, Homo sapien
tggataccatcaatcagccaggagg

SEQ ID NO: 2124901 - DNA, 25 bp, Homo sapien
tatagttatggcaacgggtgaccct

SEQ ID NO: 2124902 - DNA, 25 bp, Homo sapien
taatacttccatgcgtcaccatgag

SEQ ID NO: 2124903 - DNA, 25 bp, Homo sapien
ggtcaggccggctcaaattacggaa

SEQ ID NO: 2124904 - DNA, 25 bp, Homo sapien
tctgggttgtcagagacccgggcac

SEQ ID NO: 2124905 - DNA, 25 bp, Homo sapien
gatgttagccttgggcccaaagcaa

SEQ ID NO: 2124906 - DNA, 25 bp, Homo sapien
tggaggccccagcaaaacgtaactg

SEQ ID NO: 2124907 - DNA, 25 bp, Homo sapien
tccaacgatttggtgtagcagccaa

SEQ ID NO: 2124908 - DNA, 25 bp, Homo sapien
cttgcatttggcacagatgaagcgg

SEQ ID NO: 2124909 - DNA, 25 bp, Homo sapien
gcacaatacgggtcccatctttctg

SEQ ID NO: 2124910 - DNA, 25 bp, Homo sapien
gagttaatggcaccatgaccagaga

SEQ ID NO: 2124911 - DNA, 25 bp, Homo sapien
aagtgttttcatcacatccccaagg

SEQ ID NO: 2124912 - DNA, 25 bp, Homo sapien
cctagtgtttaagtgttgcctctca

SEQ ID NO: 2124913 - DNA, 25 bp, Homo sapien
taccagtaaaggatatagctcacat

SEQ ID NO: 2124914 - DNA, 25 bp, Homo sapien
gaactcaagtaagacccaaggtaga

SEQ ID NO: 2124915 - DNA, 25 bp, Homo sapien
ttgaggagggtctgacaagtgtagc

SEQ ID NO: 2124916 - DNA, 25 bp, Homo sapien
gtagcattctttgaaatttccgaga

SEQ ID NO: 2124917 - DNA, 25 bp, Homo sapien
ctgacaagtgtagcattctttgaaa

SEQ ID NO: 2124918 - DNA, 25 bp, Homo sapien
ggagggtctgacaagtgtagcattc

SEQ ID NO: 2124919 - DNA, 25 bp, Homo sapien
tctccatgtctttgtgcgctgtggg

SEQ ID NO: 2124920 - DNA, 25 bp, Homo sapien
gcgctgtgggtcctagtccctgaca

SEQ ID NO: 2124921 - DNA, 25 bp, Homo sapien
tgtgcgctgtgggtcctagtccctg

SEQ ID NO: 2124922 - DNA, 25 bp, Homo sapien
tgtctttgtgcgctgtgggtcctag

SEQ ID NO: 2124923 - DNA, 25 bp, Homo sapien
ttgaaggtagccctgagcatggctg

SEQ ID NO: 2124924 - DNA, 25 bp, Homo sapien
tagccctgagcatggctggtatcct

SEQ ID NO: 2124925 - DNA, 25 bp, Homo sapien
tgagcatggctggtatcctgttttc

SEQ ID NO: 2124926 - DNA, 25 bp, Homo sapien
tcagtgtaactgtttccattctggg

SEQ ID NO: 2124927 - DNA, 25 bp, Homo sapien
ctattctacgctggtgcagactgtc

SEQ ID NO: 2124928 - DNA, 25 bp, Homo sapien
cctttcctgcctgcggagagagact

SEQ ID NO: 2124929 - DNA, 25 bp, Homo sapien
tcaactggccctatggagacccttt

SEQ ID NO: 2124930 - DNA, 25 bp, Homo sapien
gagaccctttcctgcctgcggagag

SEQ ID NO: 2124931 - DNA, 25 bp, Homo sapien
gagaagtctctagggggtgcctctc

SEQ ID NO: 2124932 - DNA, 25 bp, Homo sapien
accctttggcagtggcgccttctgg

SEQ ID NO: 2124933 - DNA, 25 bp, Homo sapien
gccaggtagaaagagtagtccccac

SEQ ID NO: 2124934 - DNA, 25 bp, Homo sapien
ccaaaattgaggtctcggccgtggc

SEQ ID NO: 2124935 - DNA, 25 bp, Homo sapien
taaaccagccctgcaaacggacact

SEQ ID NO: 2124936 - DNA, 25 bp, Homo sapien
tgcggcgtccgcaagtgtctcctgg

SEQ ID NO: 2124937 - DNA, 25 bp, Homo sapien
agagtcgtcagtattcagcccggcg

SEQ ID NO: 2124938 - DNA, 25 bp, Homo sapien
tgctaatgatcaccctaatcaccgg

SEQ ID NO: 2124939 - DNA, 25 bp, Homo sapien
gtccctgaacctgaaggtaactctc

SEQ ID NO: 2124940 - DNA, 25 bp, Homo sapien
cttcaaggaaggcacgtccagctct

SEQ ID NO: 2124941 - DNA, 25 bp, Homo sapien
ttcaaggaaggcacgtccagctctc

SEQ ID NO: 2124942 - DNA, 25 bp, Homo sapien
tttcttcaaggaaggcacgtccagc

SEQ ID NO: 2124943 - DNA, 25 bp, Homo sapien
tctccacgacgcacggacagagaaa

SEQ ID NO: 2124944 - DNA, 25 bp, Homo sapien
ccgagggctgtgaggttcctagtac

SEQ ID NO: 2124945 - DNA, 25 bp, Homo sapien
agctctgatgttgggatcaccactg

SEQ ID NO: 2124946 - DNA, 25 bp, Homo sapien
cgtctcaaggtaaaggccgagggct

SEQ ID NO: 2124947 - DNA, 25 bp, Homo sapien
ctgcctttccggtcttgggggatgg

SEQ ID NO: 2124948 - DNA, 25 bp, Homo sapien
gctgcctttccggtcttgggggatg

SEQ ID NO: 2124949 - DNA, 25 bp, Homo sapien
tgcctttccggtcttgggggatgga

SEQ ID NO: 2124950 - DNA, 25 bp, Homo sapien
tgctgcctttccggtcttgggggat

SEQ ID NO: 2124951 - DNA, 25 bp, Homo sapien
gaacttgtcagtgaggaactgcatg

SEQ ID NO: 2124952 - DNA, 25 bp, Homo sapien
aacttgtcagtgaggaactgcatgg

SEQ ID NO: 2124953 - DNA, 25 bp, Homo sapien
ggaacttgtcagtgaggaactgcat

SEQ ID NO: 2124954 - DNA, 25 bp, Homo sapien
acttgtcagtgaggaactgcatggc

SEQ ID NO: 2124955 - DNA, 25 bp, Homo sapien
gcagctccggagctccaaaggtagc

SEQ ID NO: 2124956 - DNA, 25 bp, Homo sapien
ctcatcttgtaggaagatgctggct

SEQ ID NO: 2124957 - DNA, 25 bp, Homo sapien
aaggtagcagctgctcatcttgtag

SEQ ID NO: 2124958 - DNA, 25 bp, Homo sapien
agctccggagctccaaaggtagcag

SEQ ID NO: 2124959 - DNA, 25 bp, Homo sapien
gattccccgaaaagtaatgagctct

SEQ ID NO: 2124960 - DNA, 25 bp, Homo sapien
cccgaaaagtaatgagctctcctcc

SEQ ID NO: 2124961 - DNA, 25 bp, Homo sapien
tccccgaaaagtaatgagctctcct

SEQ ID NO: 2124962 - DNA, 25 bp, Homo sapien
caggattccccgaaaagtaatgagc

SEQ ID NO: 2124963 - DNA, 25 bp, Homo sapien
tggttctccaacgactggtcctgtt

SEQ ID NO: 2124964 - DNA, 25 bp, Homo sapien
cacggcggcaagctggatagatgct

SEQ ID NO: 2124965 - DNA, 25 bp, Homo sapien
ccagatatgtaagaaaccgattgtc

SEQ ID NO: 2124966 - DNA, 25 bp, Homo sapien
gctggatagatgcttgttgattcaa

SEQ ID NO: 2124967 - DNA, 25 bp, Homo sapien
caccccaacatccatgtctgtctta

SEQ ID NO: 2124968 - DNA, 25 bp, Homo sapien
ctgccaccccaacatccatgtctgt

SEQ ID NO: 2124969 - DNA, 25 bp, Homo sapien
gccaccccaacatccatgtctgtct

SEQ ID NO: 2124970 - DNA, 25 bp, Homo sapien
accccaacatccatgtctgtcttac

SEQ ID NO: 2124971 - DNA, 25 bp, Homo sapien
cagtaagattagtggtaatagtaga

SEQ ID NO: 2124972 - DNA, 25 bp, Homo sapien
ttatcgccagtccctactcggacgg

SEQ ID NO: 2124973 - DNA, 25 bp, Homo sapien
cggacggcatataggaagatcaggc

SEQ ID NO: 2124974 - DNA, 25 bp, Homo sapien
agacctcagtaagattagtggtaat

SEQ ID NO: 2124975 - DNA, 25 bp, Homo sapien
taatgtttcgatggacaagcatgca

SEQ ID NO: 2124976 - DNA, 25 bp, Homo sapien
tactcaccatgtgaaagaacccgtt

SEQ ID NO: 2124977 - DNA, 25 bp, Homo sapien
tgcgtggtacaaatcaggactgtgt

SEQ ID NO: 2124978 - DNA, 25 bp, Homo sapien
caaagagagggtatggttgccaccg

SEQ ID NO: 2124979 - DNA, 25 bp, Homo sapien
tgcaaggtaagcttccatgattctt

SEQ ID NO: 2124980 - DNA, 25 bp, Homo sapien
gcaaggtaagcttccatgattcttc

SEQ ID NO: 2124981 - DNA, 25 bp, Homo sapien
aaggtaagcttccatgattcttccc

SEQ ID NO: 2124982 - DNA, 25 bp, Homo sapien
caaggtaagcttccatgattcttcc

SEQ ID NO: 2124983 - DNA, 25 bp, Homo sapien
tcaaaccgcattctcgggaggctgt

SEQ ID NO: 2124984 - DNA, 25 bp, Homo sapien
gggagctaaaccatgagaacacggg

SEQ ID NO: 2124985 - DNA, 25 bp, Homo sapien
catgagacacctgtggcctggtaaa

SEQ ID NO: 2124986 - DNA, 25 bp, Homo sapien
caaaggatgtgcgttacatggcgac

SEQ ID NO: 2124987 - DNA, 25 bp, Homo sapien
ttctcaggggcagacgacttaggac

SEQ ID NO: 2124988 - DNA, 25 bp, Homo sapien
tttttctcacgggagatttgtcacc

SEQ ID NO: 2124989 - DNA, 25 bp, Homo sapien
tgtgattatgtgttggaacaccatg

SEQ ID NO: 2124990 - DNA, 25 bp, Homo sapien
ccatgcacttggtacatttttctca

SEQ ID NO: 2124991 - DNA, 25 bp, Homo sapien
gcaagggacaacacggacatgctta

SEQ ID NO: 2124992 - DNA, 25 bp, Homo sapien
tccatggaataataggcgcgaatct

SEQ ID NO: 2124993 - DNA, 25 bp, Homo sapien
tgacaggcaacactaacctaccttg

SEQ ID NO: 2124994 - DNA, 25 bp, Homo sapien
tccatgggacggaatgaatacattg

SEQ ID NO: 2124995 - DNA, 25 bp, Homo sapien
cagattaccccattgtgaaagtgcc

SEQ ID NO: 2124996 - DNA, 25 bp, Homo sapien
caaactgtgacttctaatgctggag

SEQ ID NO: 2124997 - DNA, 25 bp, Homo sapien
tcagtgcacgacatcagcagattct

SEQ ID NO: 2124998 - DNA, 25 bp, Homo sapien
tgatcagcccgccttaaagtgtgct

SEQ ID NO: 2124999 - DNA, 25 bp, Homo sapien
tggcatgtagtgtcacgaacccggc

SEQ ID NO: 2125000 - DNA, 25 bp, Homo sapien
gaaacattctccgattgtccccatg

SEQ ID NO: 2125001 - DNA, 25 bp, Homo sapien
ggtcccatagtatccctcatagctg

SEQ ID NO: 2125002 - DNA, 25 bp, Homo sapien
cctggagttcattcgtggaaagcct

SEQ ID NO: 2125003 - DNA, 25 bp, Homo sapien
agaagcccgccatctgacaaacagt

SEQ ID NO: 2125004 - DNA, 25 bp, Homo sapien
cacctttagagaatcgcagtccgag

SEQ ID NO: 2125005 - DNA, 25 bp, Homo sapien
tctctgaaggaagccaaatgcacat

SEQ ID NO: 2125006 - DNA, 25 bp, Homo sapien
caaacagttgtaaggtgatcaagcc

SEQ ID NO: 2125007 - DNA, 25 bp, Homo sapien
tggcttctgcgcgtgcacttgacgc

SEQ ID NO: 2125008 - DNA, 25 bp, Homo sapien
aaccagcgcgccctttgttggcaga

SEQ ID NO: 2125009 - DNA, 25 bp, Homo sapien
caggaacagtgaggccttcgggaca

SEQ ID NO: 2125010 - DNA, 25 bp, Homo sapien
cagtgccgcgacttctcattggtcc

SEQ ID NO: 2125011 - DNA, 25 bp, Homo sapien
gctgctgtgtaaggtcctcaatttc

SEQ ID NO: 2125012 - DNA, 25 bp, Homo sapien
tagctgctgtgtaaggtcctcaatt

SEQ ID NO: 2125013 - DNA, 25 bp, Homo sapien
ctagctgctgtgtaaggtcctcaat

SEQ ID NO: 2125014 - DNA, 25 bp, Homo sapien
agctgctgtgtaaggtcctcaattt

SEQ ID NO: 2125015 - DNA, 25 bp, Homo sapien
tcaaaggccctggaacttgtcgttg

SEQ ID NO: 2125016 - DNA, 25 bp, Homo sapien
ggaacttgtcgttgaagaactgcat

SEQ ID NO: 2125017 - DNA, 25 bp, Homo sapien
ctggaacttgtcgttgaagaactgc

SEQ ID NO: 2125018 - DNA, 25 bp, Homo sapien
ggccctggaacttgtcgttgaagaa

SEQ ID NO: 2125019 - DNA, 25 bp, Homo sapien
aaggaggaaactcgcttggctgcag

SEQ ID NO: 2125020 - DNA, 25 bp, Homo sapien
tgcagctccggacgctggctccaac

SEQ ID NO: 2125021 - DNA, 25 bp, Homo sapien
cctggctaaggaggataaggaggaa

SEQ ID NO: 2125022 - DNA, 25 bp, Homo sapien
taaggaggaaactcgcttggctgca

SEQ ID NO: 2125023 - DNA, 25 bp, Homo sapien
gatgcaagacatgcagccctgctct

SEQ ID NO: 2125024 - DNA, 25 bp, Homo sapien
acctgggttaaacagtgccagatgc

SEQ ID NO: 2125025 - DNA, 25 bp, Homo sapien
tgtcccagctaacacctgggttaaa

SEQ ID NO: 2125026 - DNA, 25 bp, Homo sapien
catttagaagtctggacattctttt

SEQ ID NO: 2125027 - DNA, 25 bp, Homo sapien
taagaaaagtccattaccaagatat

SEQ ID NO: 2125028 - DNA, 25 bp, Homo sapien
gaaaaccaatcgactgtgaatgaac

SEQ ID NO: 2125029 - DNA, 25 bp, Homo sapien
cacgtattgagtactgaggtcaaga

SEQ ID NO: 2125030 - DNA, 25 bp, Homo sapien
gaaagagtacattgcagttctagag

SEQ ID NO: 2125031 - DNA, 25 bp, Homo sapien
ggagctgcagccaagcgagtttcct

SEQ ID NO: 2125032 - DNA, 25 bp, Homo sapien
tccctggcgctggaagaacagttcc

SEQ ID NO: 2125033 - DNA, 25 bp, Homo sapien
tgtgccgggtgttgctccgttccct

SEQ ID NO: 2125034 - DNA, 25 bp, Homo sapien
ccatagtgccctgggtctaggtgct

SEQ ID NO: 2125035 - DNA, 25 bp, Homo sapien
ggctgacgaaccagccaccatcgtg

SEQ ID NO: 2125036 - DNA, 25 bp, Homo sapien
agagcaggttcacagatcccgaggt

SEQ ID NO: 2125037 - DNA, 25 bp, Homo sapien
gctgccgaagggtcggctgacaact

SEQ ID NO: 2125038 - DNA, 25 bp, Homo sapien
tctgagagcgaattgatagagcagg

SEQ ID NO: 2125039 - DNA, 25 bp, Homo sapien
cctgagctttaaccaatcgggacac

SEQ ID NO: 2125040 - DNA, 25 bp, Homo sapien
tgccaaccagcacgccctttgtggg

SEQ ID NO: 2125041 - DNA, 25 bp, Homo sapien
agcgagtggcttcctcgcgcccttg

SEQ ID NO: 2125042 - DNA, 25 bp, Homo sapien
attggtccccgtctgccaaccagca

SEQ ID NO: 2125043 - DNA, 25 bp, Homo sapien
gagcgggccacgcgacagaaacagt

SEQ ID NO: 2125044 - DNA, 25 bp, Homo sapien
ctgagcgggccacgcgacagaaaca

SEQ ID NO: 2125045 - DNA, 25 bp, Homo sapien
tgagcgggccacgcgacagaaacag

SEQ ID NO: 2125046 - DNA, 25 bp, Homo sapien
agcgggccacgcgacagaaacagtg

SEQ ID NO: 2125047 - DNA, 25 bp, Homo sapien
acaacgtccccttggtcatccaccg

SEQ ID NO: 2125048 - DNA, 25 bp, Homo sapien
cgcatctgcccaattctcagccgac

SEQ ID NO: 2125049 - DNA, 25 bp, Homo sapien
tagaatgagtagtccacaacgtccc

SEQ ID NO: 2125050 - DNA, 25 bp, Homo sapien
tggtaacggcgggagcggagagctg

SEQ ID NO: 2125051 - DNA, 25 bp, Homo sapien
taactctccttgcagtggaagcttg

SEQ ID NO: 2125052 - DNA, 25 bp, Homo sapien
gtaactctccttgcagtggaagctt

SEQ ID NO: 2125053 - DNA, 25 bp, Homo sapien
gttcccggaagttggggagctctga

SEQ ID NO: 2125054 - DNA, 25 bp, Homo sapien
ccgagggctctgaagttcccggaag

SEQ ID NO: 2125055 - DNA, 25 bp, Homo sapien
cgagggctctgaagttcccggaagt

SEQ ID NO: 2125056 - DNA, 25 bp, Homo sapien
ttcccggaagttggggagctctgat

SEQ ID NO: 2125057 - DNA, 25 bp, Homo sapien
tgggggatggacaggcggctgctgg

SEQ ID NO: 2125058 - DNA, 25 bp, Homo sapien
cttgggggatggacaggcggctgct

SEQ ID NO: 2125059 - DNA, 25 bp, Homo sapien
tgctgctgcctttccggtcttgggg

SEQ ID NO: 2125060 - DNA, 25 bp, Homo sapien
ggatggacaggcggctgctggttac

SEQ ID NO: 2125061 - DNA, 25 bp, Homo sapien
tgctgtgtaaggtcctcaatttccc

SEQ ID NO: 2125062 - DNA, 25 bp, Homo sapien
tcaatttccctctgcagccagatgc

SEQ ID NO: 2125063 - DNA, 25 bp, Homo sapien
ctagctgctgtgtaaggtcctcaat

SEQ ID NO: 2125064 - DNA, 25 bp, Homo sapien
agctgctgtgtaaggtcctcaattt

SEQ ID NO: 2125065 - DNA, 25 bp, Homo sapien
gggaaccacctagccctgcaaccag

SEQ ID NO: 2125066 - DNA, 25 bp, Homo sapien
cggtggggaaccacctagccctgca

SEQ ID NO: 2125067 - DNA, 25 bp, Homo sapien
gactgactcacccacccgtcacctg

SEQ ID NO: 2125068 - DNA, 25 bp, Homo sapien
ggactgactcacccacccgtcacct

SEQ ID NO: 2125069 - DNA, 25 bp, Homo sapien
aacttgtcagtgaggaactgcatgg

SEQ ID NO: 2125070 - DNA, 25 bp, Homo sapien
gaacttgtcagtgaggaactgcatg

SEQ ID NO: 2125071 - DNA, 25 bp, Homo sapien
ggaacttgtcagtgaggaactgcat

SEQ ID NO: 2125072 - DNA, 25 bp, Homo sapien
acttgtcagtgaggaactgcatggc

SEQ ID NO: 2125073 - DNA, 25 bp, Homo sapien
tgtgaaacagagtaggctcagggac

SEQ ID NO: 2125074 - DNA, 25 bp, Homo sapien
taccatgattgtggaaaggggcatg

SEQ ID NO: 2125075 - DNA, 25 bp, Homo sapien
gcccacagccctcctaaggtaccat

SEQ ID NO: 2125076 - DNA, 25 bp, Homo sapien
ctgtgaaacagagtaggctcaggga

SEQ ID NO: 2125077 - DNA, 25 bp, Homo sapien
ctccggagctccaaaggtggcagct

SEQ ID NO: 2125078 - DNA, 25 bp, Homo sapien
aaggtggcagctgttcatcttgtag

SEQ ID NO: 2125079 - DNA, 25 bp, Homo sapien
gtggcagctgttcatcttgtaggaa

SEQ ID NO: 2125080 - DNA, 25 bp, Homo sapien
cagctccggagctccaaaggtggca

SEQ ID NO: 2125081 - DNA, 25 bp, Homo sapien
gctgttggctgcgtataggacacca

SEQ ID NO: 2125082 - DNA, 25 bp, Homo sapien
cacctccaaccgagagactgtcttg

SEQ ID NO: 2125083 - DNA, 25 bp, Homo sapien
caggtatcttccctttggctcagct

SEQ ID NO: 2125084 - DNA, 25 bp, Homo sapien
accaaggatgtggaagccgccttcc

SEQ ID NO: 2125085 - DNA, 25 bp, Homo sapien
tctcctgtccttgttcgacaccctg

SEQ ID NO: 2125086 - DNA, 25 bp, Homo sapien
agaacctacacacacctcctcactg

SEQ ID NO: 2125087 - DNA, 25 bp, Homo sapien
aatctgtgcccaaatctgggacctg

SEQ ID NO: 2125088 - DNA, 25 bp, Homo sapien
ttcgacaccctgtctctcggcgatg

SEQ ID NO: 2125089 - DNA, 25 bp, Homo sapien
cactcagctcgccagacctccggag

SEQ ID NO: 2125090 - DNA, 25 bp, Homo sapien
ctcagctcgccagacctccggagcc

SEQ ID NO: 2125091 - DNA, 25 bp, Homo sapien
aggcactcagctcgccagacctccg

SEQ ID NO: 2125092 - DNA, 25 bp, Homo sapien
ggcactcagctcgccagacctccgg

SEQ ID NO: 2125093 - DNA, 25 bp, Homo sapien
ggcaaacactggtgttggcctcatc

SEQ ID NO: 2125094 - DNA, 25 bp, Homo sapien
tggcaaacactggtgttggcctcat

SEQ ID NO: 2125095 - DNA, 25 bp, Homo sapien
aggtcggggcatggaaacatactga

SEQ ID NO: 2125096 - DNA, 25 bp, Homo sapien
gcttatgtacaaggcgtttgaggtc

SEQ ID NO: 2125097 - DNA, 25 bp, Homo sapien
gggtgcacgacagcatattcaagct

SEQ ID NO: 2125098 - DNA, 25 bp, Homo sapien
cttgcattggatgaccagcacgcta

SEQ ID NO: 2125099 - DNA, 25 bp, Homo sapien
aggtctgccccaatgtcagcggacc

SEQ ID NO: 2125100 - DNA, 25 bp, Homo sapien
tagggacagttgtccctggatgctg

SEQ ID NO: 2125101 - DNA, 25 bp, Homo sapien
gccttctagggacagttgtccctgg

SEQ ID NO: 2125102 - DNA, 25 bp, Homo sapien
ccaggtctgccccaatgtcagcgga

SEQ ID NO: 2125103 - DNA, 25 bp, Homo sapien
aacggtaagtcgctgcactcatctc

SEQ ID NO: 2125104 - DNA, 25 bp, Homo sapien
cactcatctccggaatcagagtctt

SEQ ID NO: 2125105 - DNA, 25 bp, Homo sapien
aaatgatcaccctgatcaacggtaa

SEQ ID NO: 2125106 - DNA, 25 bp, Homo sapien
tcttgggtagacagccctgcgggcc

SEQ ID NO: 2125107 - DNA, 25 bp, Homo sapien
cttcaaggaagacgtgtccagctct

SEQ ID NO: 2125108 - DNA, 25 bp, Homo sapien
ttttcttcaaggaagacgtgtccag

SEQ ID NO: 2125109 - DNA, 25 bp, Homo sapien
ttcaaggaagacgtgtccagctctc

SEQ ID NO: 2125110 - DNA, 25 bp, Homo sapien
tttcttcaaggaagacgtgtccagc

SEQ ID NO: 2125111 - DNA, 25 bp, Homo sapien
tctggtgcaccctctagggatttct

SEQ ID NO: 2125112 - DNA, 25 bp, Homo sapien
gggatggacaggcagctgctggtca

SEQ ID NO: 2125113 - DNA, 25 bp, Homo sapien
cctttccaatcttgggggatggaca

SEQ ID NO: 2125114 - DNA, 25 bp, Homo sapien
tgctgcctttccaatcttgggggat

SEQ ID NO: 2125115 - DNA, 25 bp, Homo sapien
ggatggacaggcagctgctggtcac

SEQ ID NO: 2125116 - DNA, 25 bp, Homo sapien
cggaaggaacccgtttggctgcagc

SEQ ID NO: 2125117 - DNA, 25 bp, Homo sapien
tgagaacgactttattggaaactgc

SEQ ID NO: 2125118 - DNA, 25 bp, Homo sapien
ccctggctgaagaggatacggaagg

SEQ ID NO: 2125119 - DNA, 25 bp, Homo sapien
atgcagcagaagagcggaagccctg

SEQ ID NO: 2125120 - DNA, 25 bp, Homo sapien
gccgtctacaggataccaaggatgt

SEQ ID NO: 2125121 - DNA, 25 bp, Homo sapien
ccttctgtgtagcttcaggtgggca

SEQ ID NO: 2125122 - DNA, 25 bp, Homo sapien
gggctgttggccgtctacaggatac

SEQ ID NO: 2125123 - DNA, 25 bp, Homo sapien
tctacaggataccaaggatgtggaa

SEQ ID NO: 2125124 - DNA, 25 bp, Homo sapien
tacaaagagagggatgtcaaactcg

SEQ ID NO: 2125125 - DNA, 25 bp, Homo sapien
caaactcgaatgctttctggcctga

SEQ ID NO: 2125126 - DNA, 25 bp, Homo sapien
gggatgtcaaactcgaatgctttct

SEQ ID NO: 2125127 - DNA, 25 bp, Homo sapien
tcgaatgctttctggcctgatgaaa

SEQ ID NO: 2125128 - DNA, 25 bp, Homo sapien
ggatacgaattgttaagaggcagtc

SEQ ID NO: 2125129 - DNA, 25 bp, Homo sapien
aggatacgaattgttaagaggcagt

SEQ ID NO: 2125130 - DNA, 25 bp, Homo sapien
caatcatctcctagggcagtaagcg

SEQ ID NO: 2125131 - DNA, 25 bp, Homo sapien
gagcacaggctgagacttcgaaaaa

SEQ ID NO: 2125132 - DNA, 25 bp, Homo sapien
ccaagggtggactggaaacttacat

SEQ ID NO: 2125133 - DNA, 25 bp, Homo sapien
cctagaggcaacagaggcttcgctg

SEQ ID NO: 2125134 - DNA, 25 bp, Homo sapien
gggaccagtctggcggcgcggcggg

SEQ ID NO: 2125135 - DNA, 25 bp, Homo sapien
aggggaccagtctggcggcgcggcg

SEQ ID NO: 2125136 - DNA, 25 bp, Homo sapien
ggggaccagtctggcggcgcggcgg

SEQ ID NO: 2125137 - DNA, 25 bp, Homo sapien
gcaggtgcccctcgaggtcctcgag

SEQ ID NO: 2125138 - DNA, 25 bp, Homo sapien
ggtcctcgagcagagccaacgagtg

SEQ ID NO: 2125139 - DNA, 25 bp, Homo sapien
ccaggtggctcacgtcgcggagctc

SEQ ID NO: 2125140 - DNA, 25 bp, Homo sapien
gtacaggctgtctgtgcggcgcccc

SEQ ID NO: 2125141 - DNA, 25 bp, Homo sapien
gggtagacgcggggccgcgagccac

SEQ ID NO: 2125142 - DNA, 25 bp, Homo sapien
ctaagcgccgaccggcgcccctaga

SEQ ID NO: 2125143 - DNA, 25 bp, Homo sapien
gcggggccgcgagccaccggggcgc

SEQ ID NO: 2125144 - DNA, 25 bp, Homo sapien
cgcccctagaggcggggtagacgcg

SEQ ID NO: 2125145 - DNA, 25 bp, Homo sapien
gcataggcaccaggcatttcattaa

SEQ ID NO: 2125146 - DNA, 25 bp, Homo sapien
cccttggttggcgaggcagtgaaca

SEQ ID NO: 2125147 - DNA, 25 bp, Homo sapien
cctcaaaggctagatgcggctcctc

SEQ ID NO: 2125148 - DNA, 25 bp, Homo sapien
catagctgccttgactcttggtggt

SEQ ID NO: 2125149 - DNA, 25 bp, Homo sapien
tttactgaaacacgcttaggcccca

SEQ ID NO: 2125150 - DNA, 25 bp, Homo sapien
catgcagtgtgaaggattctaccca

SEQ ID NO: 2125151 - DNA, 25 bp, Homo sapien
gagtctatatgagtctacggctgta

SEQ ID NO: 2125152 - DNA, 25 bp, Homo sapien
gagagttaggcatgctgggccctca

SEQ ID NO: 2125153 - DNA, 25 bp, Homo sapien
tcgtgcatagtggagtcgttatatt

SEQ ID NO: 2125154 - DNA, 25 bp, Homo sapien
gaactcgtgcatagtggagtcgtta

SEQ ID NO: 2125155 - DNA, 25 bp, Homo sapien
ctatactccgatgaactcgtgcata

SEQ ID NO: 2125156 - DNA, 25 bp, Homo sapien
tccgatgaactcgtgcatagtggag

SEQ ID NO: 2125157 - DNA, 25 bp, Homo sapien
tgttgcgatcatgaagggaaaaaag

SEQ ID NO: 2125158 - DNA, 25 bp, Homo sapien
aaaagataaatactctttcttctgc

SEQ ID NO: 2125159 - DNA, 25 bp, Homo sapien
ctgttgcgatcatgaagggaaaaaa

SEQ ID NO: 2125160 - DNA, 25 bp, Homo sapien
taaatactctttcttctgcattgca

SEQ ID NO: 2125161 - DNA, 25 bp, Homo sapien
tgagtgttggcctagatccacattc

SEQ ID NO: 2125162 - DNA, 25 bp, Homo sapien
gctgctgacagggtcacataagtgg

SEQ ID NO: 2125163 - DNA, 25 bp, Homo sapien
tctgatcacactatggagggatgcc

SEQ ID NO: 2125164 - DNA, 25 bp, Homo sapien
caagagaggttctgcactggaaatc

SEQ ID NO: 2125165 - DNA, 25 bp, Homo sapien
cccgatggtcagcaagatggtgaat

SEQ ID NO: 2125166 - DNA, 25 bp, Homo sapien
ttgtgctgccaacccgatggtcagc

SEQ ID NO: 2125167 - DNA, 25 bp, Homo sapien
ccttgtggacaaactgcttagtgag

SEQ ID NO: 2125168 - DNA, 25 bp, Homo sapien
ttagtgagagaaggcttgctcgcgt

SEQ ID NO: 2125169 - DNA, 25 bp, Homo sapien
cgcctcccttcaccactctgcacaa

SEQ ID NO: 2125170 - DNA, 25 bp, Homo sapien
cttcaccactctgcacaaaatccaa

SEQ ID NO: 2125171 - DNA, 25 bp, Homo sapien
ttcaccactctgcacaaaatccaat

SEQ ID NO: 2125172 - DNA, 25 bp, Homo sapien
ctcccttcaccactctgcacaaaat

SEQ ID NO: 2125173 - DNA, 25 bp, Homo sapien
cacacagtaacgcacactgttctgg

SEQ ID NO: 2125174 - DNA, 25 bp, Homo sapien
cacagtaacgcacactgttctggaa

SEQ ID NO: 2125175 - DNA, 25 bp, Homo sapien
aagtgtagtcttccaacagaatgct

SEQ ID NO: 2125176 - DNA, 25 bp, Homo sapien
gtcttccaacagaatgcttcgtcag

SEQ ID NO: 2125177 - DNA, 25 bp, Homo sapien
cacttggaatgcgaaagcgcatgct

SEQ ID NO: 2125178 - DNA, 25 bp, Homo sapien
caggtggtcatactctctgccccag

SEQ ID NO: 2125179 - DNA, 25 bp, Homo sapien
aaagcgcatgctcaggtggtcatac

SEQ ID NO: 2125180 - DNA, 25 bp, Homo sapien
ccagcggatgggtctggcgctccca

SEQ ID NO: 2125181 - DNA, 25 bp, Homo sapien
aggcacctggcgtatgcccctggct

SEQ ID NO: 2125182 - DNA, 25 bp, Homo sapien
ggacaaacttatggctgcacccact

SEQ ID NO: 2125183 - DNA, 25 bp, Homo sapien
cacctggcgtatgcccctggctgga

SEQ ID NO: 2125184 - DNA, 25 bp, Homo sapien
gcccctggctggacaaacttatggc

SEQ ID NO: 2125185 - DNA, 25 bp, Homo sapien
ctgaggcacagtaggccgactgggg

SEQ ID NO: 2125186 - DNA, 25 bp, Homo sapien
gaggcacagtaggccgactgggggt

SEQ ID NO: 2125187 - DNA, 25 bp, Homo sapien
gctgaggcacagtaggccgactggg

SEQ ID NO: 2125188 - DNA, 25 bp, Homo sapien
tgaggcacagtaggccgactggggg

SEQ ID NO: 2125189 - DNA, 25 bp, Homo sapien
ctgactgctgcaaaccaggatgctg

SEQ ID NO: 2125190 - DNA, 25 bp, Homo sapien
gactgctgcaaaccaggatgctggg

SEQ ID NO: 2125191 - DNA, 25 bp, Homo sapien
ggatgctgggaggaatggtgatgag

SEQ ID NO: 2125192 - DNA, 25 bp, Homo sapien
ctgggaggaatggtgatgaggaagg

SEQ ID NO: 2125193 - DNA, 25 bp, Homo sapien
gggatatgacggcagtccaagattc

SEQ ID NO: 2125194 - DNA, 25 bp, Homo sapien
gattcccttataaaggcgagtgctc

SEQ ID NO: 2125195 - DNA, 25 bp, Homo sapien
gccttatggctgcagttgggtataa

SEQ ID NO: 2125196 - DNA, 25 bp, Homo sapien
tataaaggcgagtgctctaatcagg

SEQ ID NO: 2125197 - DNA, 25 bp, Homo sapien
tcaccgcgcccagcttaaagaaaca

SEQ ID NO: 2125198 - DNA, 25 bp, Homo sapien
cagttttacatgcaaagtgtgtaaa

SEQ ID NO: 2125199 - DNA, 25 bp, Homo sapien
agtgtgtaaagaaagtgaaatgtgt

SEQ ID NO: 2125200 - DNA, 25 bp, Homo sapien
cgcgcccagcttaaagaaacagttt

SEQ ID NO: 2125201 - DNA, 25 bp, Homo sapien
tgtggcaggtgtgatagaattgttt

SEQ ID NO: 2125202 - DNA, 25 bp, Homo sapien
gtgatagaattgtttgctctgaaaa

SEQ ID NO: 2125203 - DNA, 25 bp, Homo sapien
gcctggctgaatgaagctgactggc

SEQ ID NO: 2125204 - DNA, 25 bp, Homo sapien
ggatgctatcccactgctggatttg

SEQ ID NO: 2125205 - DNA, 25 bp, Homo sapien
taggattcagactgggccccaaagt

SEQ ID NO: 2125206 - DNA, 25 bp, Homo sapien
cagactgggccccaaagtatgggtg

SEQ ID NO: 2125207 - DNA, 25 bp, Homo sapien
ccaaagtatgggtgtaagtctgaca

SEQ ID NO: 2125208 - DNA, 25 bp, Homo sapien
gtgtaagtctgacaggtagaaagga

SEQ ID NO: 2125209 - DNA, 25 bp, Homo sapien
acagcagacagaacacgtccaacca

SEQ ID NO: 2125210 - DNA, 25 bp, Homo sapien
tgacagcagacagaacacgtccaac

SEQ ID NO: 2125211 - DNA, 25 bp, Homo sapien
gacagcagacagaacacgtccaacc

SEQ ID NO: 2125212 - DNA, 25 bp, Homo sapien
ttgacagcagacagaacacgtccaa

SEQ ID NO: 2125213 - DNA, 25 bp, Homo sapien
tggctcctccacgaattggcttaaa

SEQ ID NO: 2125214 - DNA, 25 bp, Homo sapien
cacgaattggcttaaacatgtcaca

SEQ ID NO: 2125215 - DNA, 25 bp, Homo sapien
ctccattggctcctccacgaattgg

SEQ ID NO: 2125216 - DNA, 25 bp, Homo sapien
aacatgtcacatcagaattttggaa

SEQ ID NO: 2125217 - DNA, 25 bp, Homo sapien
gcagcaacaatttccataagattca

SEQ ID NO: 2125218 - DNA, 25 bp, Homo sapien
cagtccatgccaattaatgcagcaa

SEQ ID NO: 2125219 - DNA, 25 bp, Homo sapien
tttcaataccggaggcagcaaaggc

SEQ ID NO: 2125220 - DNA, 25 bp, Homo sapien
gattcaagtcaacaaactgttgtgc

SEQ ID NO: 2125221 - DNA, 25 bp, Homo sapien
ctgaacatctttcgtgcaggcccca

SEQ ID NO: 2125222 - DNA, 25 bp, Homo sapien
tgggttctttgacccctgaacatct

SEQ ID NO: 2125223 - DNA, 25 bp, Homo sapien
gaacatctttcgtgcaggccccagt

SEQ ID NO: 2125224 - DNA, 25 bp, Homo sapien
atctttcgtgcaggccccagtggtc

SEQ ID NO: 2125225 - DNA, 25 bp, Homo sapien
cgatctttccctctgagccaaaggc

SEQ ID NO: 2125226 - DNA, 25 bp, Homo sapien
cggtggccccgcagccgcactgcag

SEQ ID NO: 2125227 - DNA, 25 bp, Homo sapien
aaaggcagcgccggcctttggcagc

SEQ ID NO: 2125228 - DNA, 25 bp, Homo sapien
cctgggccccgatctttccctctga

SEQ ID NO: 2125229 - DNA, 25 bp, Homo sapien
ggtaacaagaattgggtgacaggca

SEQ ID NO: 2125230 - DNA, 25 bp, Homo sapien
agttggatttgggtaacaagaattg

SEQ ID NO: 2125231 - DNA, 25 bp, Homo sapien
gatttgggtaacaagaattgggtga

SEQ ID NO: 2125232 - DNA, 25 bp, Homo sapien
caagaattgggtgacaggcagtgaa

SEQ ID NO: 2125233 - DNA, 25 bp, Homo sapien
tctgctggatatcatgagagaccct

SEQ ID NO: 2125234 - DNA, 25 bp, Homo sapien
cacagggctgtagtgggaagtgggc

SEQ ID NO: 2125235 - DNA, 25 bp, Homo sapien
gcagctgactcaagatctctgctgg

SEQ ID NO: 2125236 - DNA, 25 bp, Homo sapien
tcatgagagaccctgtcagagccac

SEQ ID NO: 2125237 - DNA, 25 bp, Homo sapien
tccagctgtcctccaaactgtgtgc

SEQ ID NO: 2125238 - DNA, 25 bp, Homo sapien
gctgtcctccaaactgtgtgctcag

SEQ ID NO: 2125239 - DNA, 25 bp, Homo sapien
cagctgtcctccaaactgtgtgctc

SEQ ID NO: 2125240 - DNA, 25 bp, Homo sapien
tcattccagccacttgtccagctgt

SEQ ID NO: 2125241 - DNA, 25 bp, Homo sapien
gagtggttccatgccaccagagtca

SEQ ID NO: 2125242 - DNA, 25 bp, Homo sapien
aaaagccttgcttgtagtcatccaa

SEQ ID NO: 2125243 - DNA, 25 bp, Homo sapien
cagtgacgggcaccaataggcattt

SEQ ID NO: 2125244 - DNA, 25 bp, Homo sapien
tgagatgtacccactctagtgccaa

SEQ ID NO: 2125245 - DNA, 25 bp, Homo sapien
tatagatatgggacctgaggctcag

SEQ ID NO: 2125246 - DNA, 25 bp, Homo sapien
tgaaacctgaatacgctctgcggat

SEQ ID NO: 2125247 - DNA, 25 bp, Homo sapien
tgggccagacaattcacatacatga

SEQ ID NO: 2125248 - DNA, 25 bp, Homo sapien
tccaagcgaggtcttaagccagtgt

SEQ ID NO: 2125249 - DNA, 25 bp, Homo sapien
gcctgaccctgtggtttgaacacaa

SEQ ID NO: 2125250 - DNA, 25 bp, Homo sapien
ggcctgagagggtggcttcatccat

SEQ ID NO: 2125251 - DNA, 25 bp, Homo sapien
atctctcgcagaggtagcacaccgg

SEQ ID NO: 2125252 - DNA, 25 bp, Homo sapien
tgaactgggactgccaatctctcgc

SEQ ID NO: 2125253 - DNA, 25 bp, Homo sapien
gagcgggccactcttcttatgtaat

SEQ ID NO: 2125254 - DNA, 25 bp, Homo sapien
gaatgggggccacctgacaaggata

SEQ ID NO: 2125255 - DNA, 25 bp, Homo sapien
cattagagttctgtgggatcccaaa

SEQ ID NO: 2125256 - DNA, 25 bp, Homo sapien
gatcccaaaccatccaggaatgtag

SEQ ID NO: 2125257 - DNA, 25 bp, Homo sapien
ttgtctgtgggcacgcatcggacac

SEQ ID NO: 2125258 - DNA, 25 bp, Homo sapien
ccttgtctgtgggcacgcatcggac

SEQ ID NO: 2125259 - DNA, 25 bp, Homo sapien
tgtctgtgggcacgcatcggacaca

SEQ ID NO: 2125260 - DNA, 25 bp, Homo sapien
ctgtgggcacgcatcggacacagtt

SEQ ID NO: 2125261 - DNA, 25 bp, Homo sapien
ctccagagaatagcctgtcttcagt

SEQ ID NO: 2125262 - DNA, 25 bp, Homo sapien
agagaatagcctgtcttcagtcttt

SEQ ID NO: 2125263 - DNA, 25 bp, Homo sapien
gagaatagcctgtcttcagtcttta

SEQ ID NO: 2125264 - DNA, 25 bp, Homo sapien
ttttctccagagaatagcctgtctt

SEQ ID NO: 2125265 - DNA, 25 bp, Homo sapien
tacaggctgctccttaagcttcagc

SEQ ID NO: 2125266 - DNA, 25 bp, Homo sapien
tgctccttaagcttcagcccaaatc

SEQ ID NO: 2125267 - DNA, 25 bp, Homo sapien
aaaccctacaggctgctccttaagc

SEQ ID NO: 2125268 - DNA, 25 bp, Homo sapien
tgttcccaaaccctacaggctgctc

SEQ ID NO: 2125269 - DNA, 25 bp, Homo sapien
tgttggggagaactatgccagcacc

SEQ ID NO: 2125270 - DNA, 25 bp, Homo sapien
gggagaactatgccagcacccttga

SEQ ID NO: 2125271 - DNA, 25 bp, Homo sapien
tggggagaactatgccagcaccctt

SEQ ID NO: 2125272 - DNA, 25 bp, Homo sapien
agttgttggggagaactatgccagc

SEQ ID NO: 2125273 - DNA, 25 bp, Homo sapien
cttgagttcatagcaagggagcaca

SEQ ID NO: 2125274 - DNA, 25 bp, Homo sapien
gttacaactacaatgatcccctggg

SEQ ID NO: 2125275 - DNA, 25 bp, Homo sapien
aaaggcctggatttggacactgaca

SEQ ID NO: 2125276 - DNA, 25 bp, Homo sapien
gaataagcgagagtgaccaaaggcc

SEQ ID NO: 2125277 - DNA, 25 bp, Homo sapien
ccatgtggcctagggtgtctctact

SEQ ID NO: 2125278 - DNA, 25 bp, Homo sapien
ggtttctcccagcttgataatggct

SEQ ID NO: 2125279 - DNA, 25 bp, Homo sapien
ggctgtacggccatgaccatgtggc

SEQ ID NO: 2125280 - DNA, 25 bp, Homo sapien
ttttcaatgtcagagccttgtctgg

SEQ ID NO: 2125281 - DNA, 25 bp, Homo sapien
tctgcgttgaaaagactttcaactc

SEQ ID NO: 2125282 - DNA, 25 bp, Homo sapien
ccatctgcgttgaaaagactttcaa

SEQ ID NO: 2125283 - DNA, 25 bp, Homo sapien
gagccatctgcgttgaaaagacttt

SEQ ID NO: 2125284 - DNA, 25 bp, Homo sapien
agagccatctgcgttgaaaagactt

SEQ ID NO: 2125285 - DNA, 25 bp, Homo sapien
ctgtcccaaaccctgtccctaggct

SEQ ID NO: 2125286 - DNA, 25 bp, Homo sapien
gcaccttggtcccatcgatcacata

SEQ ID NO: 2125287 - DNA, 25 bp, Homo sapien
cccagcggtgtggataaccaagaat

SEQ ID NO: 2125288 - DNA, 25 bp, Homo sapien
gatcacatactcctttgcccattga

SEQ ID NO: 2125289 - DNA, 25 bp, Homo sapien
tccccggatccagaagagggtgaca

SEQ ID NO: 2125290 - DNA, 25 bp, Homo sapien
aagagggtgacagagtcagttctct

SEQ ID NO: 2125291 - DNA, 25 bp, Homo sapien
ctccccggatccagaagagggtgac

SEQ ID NO: 2125292 - DNA, 25 bp, Homo sapien
gggtgacagagtcagttctctccat

SEQ ID NO: 2125293 - DNA, 25 bp, Homo sapien
gttggtaagcactaaagtagcctac

SEQ ID NO: 2125294 - DNA, 25 bp, Homo sapien
cattgcttggctcagcgaaggtttc

SEQ ID NO: 2125295 - DNA, 25 bp, Homo sapien
cattggctctggagccattgcttgg

SEQ ID NO: 2125296 - DNA, 25 bp, Homo sapien
cactctgtcgctgtggccattggct

SEQ ID NO: 2125297 - DNA, 25 bp, Homo sapien
aaaatttgtcttcattggcatctga

SEQ ID NO: 2125298 - DNA, 25 bp, Homo sapien
cttcattggcatctgacagggaagg

SEQ ID NO: 2125299 - DNA, 25 bp, Homo sapien
tggcatctgacagggaaggaggccc

SEQ ID NO: 2125300 - DNA, 25 bp, Homo sapien
tcattggcatctgacagggaaggag

SEQ ID NO: 2125301 - DNA, 25 bp, Homo sapien
ccgttatattactctgtagaactaa

SEQ ID NO: 2125302 - DNA, 25 bp, Homo sapien
tattactctgtagaactaaccagtt

SEQ ID NO: 2125303 - DNA, 25 bp, Homo sapien
caaaggttaccgttatattactctg

SEQ ID NO: 2125304 - DNA, 25 bp, Homo sapien
ggttaccgttatattactctgtaga

SEQ ID NO: 2125305 - DNA, 25 bp, Homo sapien
gcacaaatgataaattagaggcagg

SEQ ID NO: 2125306 - DNA, 25 bp, Homo sapien
ggcaggataacaagtcccactctta

SEQ ID NO: 2125307 - DNA, 25 bp, Homo sapien
cccactcttagagggatctgcattc

SEQ ID NO: 2125308 - DNA, 25 bp, Homo sapien
cccaagcaggtgttcatctttcttc

SEQ ID NO: 2125309 - DNA, 25 bp, Homo sapien
tgctcttatctttcctgtttacagc

SEQ ID NO: 2125310 - DNA, 25 bp, Homo sapien
cccgaaagagcttctaggtcctgct

SEQ ID NO: 2125311 - DNA, 25 bp, Homo sapien
ttctcagtctgcccgaaagagcttc

SEQ ID NO: 2125312 - DNA, 25 bp, Homo sapien
agagcttctaggtcctgcttgctga

SEQ ID NO: 2125313 - DNA, 25 bp, Homo sapien
ttccaggctctaagctgtgccgcca

SEQ ID NO: 2125314 - DNA, 25 bp, Homo sapien
attccaggctctaagctgtgccgcc

SEQ ID NO: 2125315 - DNA, 25 bp, Homo sapien
tccaggctctaagctgtgccgccat

SEQ ID NO: 2125316 - DNA, 25 bp, Homo sapien
agctcaaaccctgatgcgagtcttc

SEQ ID NO: 2125317 - DNA, 25 bp, Homo sapien
aggatgcaattgagcccatgcttac

SEQ ID NO: 2125318 - DNA, 25 bp, Homo sapien
gctcaaaccctgatgcgagtcttct

SEQ ID NO: 2125319 - DNA, 25 bp, Homo sapien
atgagtcgtcctccccacgagatgg

SEQ ID NO: 2125320 - DNA, 25 bp, Homo sapien
tcgtcctccccacgagatggtgagc

SEQ ID NO: 2125321 - DNA, 25 bp, Homo sapien
tgtctgttggtgcacatgagtcgtc

SEQ ID NO: 2125322 - DNA, 25 bp, Homo sapien
tgttggtgcacatgagtcgtcctcc

SEQ ID NO: 2125323 - DNA, 25 bp, Homo sapien
tctctatgacattgtcccaacttcg

SEQ ID NO: 2125324 - DNA, 25 bp, Homo sapien
tcctagagtctctatgacattgtcc

SEQ ID NO: 2125325 - DNA, 25 bp, Homo sapien
gaagtctacccttgctcctagagtc

SEQ ID NO: 2125326 - DNA, 25 bp, Homo sapien
ctagtagaagtctacccttgctcct

SEQ ID NO: 2125327 - DNA, 25 bp, Homo sapien
agaccacaggctagaaggagtgtcc

SEQ ID NO: 2125328 - DNA, 25 bp, Homo sapien
gtccaaagtctagggcctacagaaa

SEQ ID NO: 2125329 - DNA, 25 bp, Homo sapien
gggacaagccgttcagcgtcctgtc

SEQ ID NO: 2125330 - DNA, 25 bp, Homo sapien
tcagcgtcctgtccaaagtctaggg

SEQ ID NO: 2125331 - DNA, 25 bp, Homo sapien
aagacaatggcagcgctgtcagcta

SEQ ID NO: 2125332 - DNA, 25 bp, Homo sapien
ctggcagaaagacaagtgtgtggtt

SEQ ID NO: 2125333 - DNA, 25 bp, Homo sapien
aaaagacaatggcagcgctgtcagc

SEQ ID NO: 2125334 - DNA, 25 bp, Homo sapien
caatggcagcgctgtcagctacggg

SEQ ID NO: 2125335 - DNA, 25 bp, Homo sapien
aagtcactggcccaaggttgacagc

SEQ ID NO: 2125336 - DNA, 25 bp, Homo sapien
tgcctccagcttgcaggattcccgt

SEQ ID NO: 2125337 - DNA, 25 bp, Homo sapien
cagctagtgagtggctctgtcacag

SEQ ID NO: 2125338 - DNA, 25 bp, Homo sapien
cctgctgtctaacaggccaggctgg

SEQ ID NO: 2125339 - DNA, 25 bp, Homo sapien
taaaaaggccattcgcaagctcaag

SEQ ID NO: 2125340 - DNA, 25 bp, Homo sapien
gagatagagcccttttcaggagacc

SEQ ID NO: 2125341 - DNA, 25 bp, Homo sapien
gaaatggccgacctggatgagctga

SEQ ID NO: 2125342 - DNA, 25 bp, Homo sapien
tcaaaggcctgtcggaattcttccg

SEQ ID NO: 2125343 - DNA, 25 bp, Homo sapien
cgacctcgagtgggcagtcgctgtc

SEQ ID NO: 2125344 - DNA, 25 bp, Homo sapien
ctcgagtgggcagtcgctgtcgcat

SEQ ID NO: 2125345 - DNA, 25 bp, Homo sapien
acctcgagtgggcagtcgctgtcgc

SEQ ID NO: 2125346 - DNA, 25 bp, Homo sapien
gacgacctcgagtgggcagtcgctg

SEQ ID NO: 2125347 - DNA, 25 bp, Homo sapien
tgcccgaggagaggaacacgttcac

SEQ ID NO: 2125348 - DNA, 25 bp, Homo sapien
ctgcccgaggagaggaacacgttca

SEQ ID NO: 2125349 - DNA, 25 bp, Homo sapien
attgagctgcgcctcccgaagcagc

SEQ ID NO: 2125350 - DNA, 25 bp, Homo sapien
ggctctggagattgagctgcgcctc

SEQ ID NO: 2125351 - DNA, 25 bp, Homo sapien
gaagcagctcctctacactcggggg

SEQ ID NO: 2125352 - DNA, 25 bp, Homo sapien
ccgaagcagctcctctacactcggg

SEQ ID NO: 2125353 - DNA, 25 bp, Homo sapien
agggggtgggggttatggctgtcat

SEQ ID NO: 2125354 - DNA, 25 bp, Homo sapien
tagggggtgggggttatggctgtca

SEQ ID NO: 2125355 - DNA, 25 bp, Homo sapien
aaaagaggcagaagttcagcggcat

SEQ ID NO: 2125356 - DNA, 25 bp, Homo sapien
taaaagaggcagaagttcagcggca

SEQ ID NO: 2125357 - DNA, 25 bp, Homo sapien
cataaaagaggcagaagttcagcgg

SEQ ID NO: 2125358 - DNA, 25 bp, Homo sapien
ataaaagaggcagaagttcagcggc

SEQ ID NO: 2125359 - DNA, 25 bp, Homo sapien
cttagtcccgctgtaagtgatgtca

SEQ ID NO: 2125360 - DNA, 25 bp, Homo sapien
tagtcccgctgtaagtgatgtcagg

SEQ ID NO: 2125361 - DNA, 25 bp, Homo sapien
gctgtaagtgatgtcaggtctagga

SEQ ID NO: 2125362 - DNA, 25 bp, Homo sapien
cccgctgtaagtgatgtcaggtcta

SEQ ID NO: 2125363 - DNA, 25 bp, Homo sapien
gagcctttgtgggccgtgttccctg

SEQ ID NO: 2125364 - DNA, 25 bp, Homo sapien
gcctttgtgggccgtgttccctgca

SEQ ID NO: 2125365 - DNA, 25 bp, Homo sapien
agcctttgtgggccgtgttccctgc

SEQ ID NO: 2125366 - DNA, 25 bp, Homo sapien
tttcttggatgtcaagaacttttac

SEQ ID NO: 2125367 - DNA, 25 bp, Homo sapien
gttctttcttggatgtcaagaactt

SEQ ID NO: 2125368 - DNA, 25 bp, Homo sapien
accaggaagtccaatctggagttct

SEQ ID NO: 2125369 - DNA, 25 bp, Homo sapien
caatctggagttctttcttggatgt

SEQ ID NO: 2125370 - DNA, 25 bp, Homo sapien
tgctcagttacgaaaagaggctcag

SEQ ID NO: 2125371 - DNA, 25 bp, Homo sapien
tctgcgaccctaccaaggaaatgac

SEQ ID NO: 2125372 - DNA, 25 bp, Homo sapien
tgatccccaccttgagtgctcagtt

SEQ ID NO: 2125373 - DNA, 25 bp, Homo sapien
gggaccaagcccttatctcaatgat

SEQ ID NO: 2125374 - DNA, 25 bp, Homo sapien
ctgaaaaatagcacagtggagacac

SEQ ID NO: 2125375 - DNA, 25 bp, Homo sapien
cacaagtctggcctccgagtactgt

SEQ ID NO: 2125376 - DNA, 25 bp, Homo sapien
cttagtggcctcatcagaagagcgg

SEQ ID NO: 2125377 - DNA, 25 bp, Homo sapien
aagagcggaaggtctgccccacaag

SEQ ID NO: 2125378 - DNA, 25 bp, Homo sapien
ggcctccgagtactgttcctcatat

SEQ ID NO: 2125379 - DNA, 25 bp, Homo sapien
gaaagggtgtattcctgcctggcaa

SEQ ID NO: 2125380 - DNA, 25 bp, Homo sapien
cttccagtgggtaaagtaagcagct

SEQ ID NO: 2125381 - DNA, 25 bp, Homo sapien
gcaggaaagcgtggacaggccacca

SEQ ID NO: 2125382 - DNA, 25 bp, Homo sapien
ccagtgcccatagggtggctgttta

SEQ ID NO: 2125383 - DNA, 25 bp, Homo sapien
cacaccctgggtggtagtctcatcc

SEQ ID NO: 2125384 - DNA, 25 bp, Homo sapien
tattccaggcagtttgcttgtcggc

SEQ ID NO: 2125385 - DNA, 25 bp, Homo sapien
caccgcttctcctctaggatgggca

SEQ ID NO: 2125386 - DNA, 25 bp, Homo sapien
agactgcgtggagcaaagctgaggc

SEQ ID NO: 2125387 - DNA, 25 bp, Homo sapien
ctgtagccaaaataaagacacttgg

SEQ ID NO: 2125388 - DNA, 25 bp, Homo sapien
ataaagacacttgggtgcatcctgg

SEQ ID NO: 2125389 - DNA, 25 bp, Homo sapien
tagccaaaataaagacacttgggtg

SEQ ID NO: 2125390 - DNA, 25 bp, Homo sapien
ccaaaataaagacacttgggtgcat

SEQ ID NO: 2125391 - DNA, 25 bp, Homo sapien
gaatccaataatggtccgcctccgc

SEQ ID NO: 2125392 - DNA, 25 bp, Homo sapien
taaacaacgagtgtcgcaaacttgc

SEQ ID NO: 2125393 - DNA, 25 bp, Homo sapien
cttggtctcgctgggaaaagttaga

SEQ ID NO: 2125394 - DNA, 25 bp, Homo sapien
cggctgtctctgtgttaaacaacga

SEQ ID NO: 2125395 - DNA, 25 bp, Homo sapien
tatcacgagcgacaaggagggtagc

SEQ ID NO: 2125396 - DNA, 25 bp, Homo sapien
tccatgccaggagggtttgggccac

SEQ ID NO: 2125397 - DNA, 25 bp, Homo sapien
gagacttgggaaccgagcatcctga

SEQ ID NO: 2125398 - DNA, 25 bp, Homo sapien
tcagagctcgtactggcaaaaggca

SEQ ID NO: 2125399 - DNA, 25 bp, Homo sapien
gatactcatcccagacagatccagg

SEQ ID NO: 2125400 - DNA, 25 bp, Homo sapien
tgtggaccaagcttggaggcctccg

SEQ ID NO: 2125401 - DNA, 25 bp, Homo sapien
aaatttgtctctgagtggtgccgac

SEQ ID NO: 2125402 - DNA, 25 bp, Homo sapien
tagccgtgacttgggaaatttctcc

SEQ ID NO: 2125403 - DNA, 25 bp, Homo sapien
ctggaggctaattctttcaggcaga

SEQ ID NO: 2125404 - DNA, 25 bp, Homo sapien
taattctttcaggcagaaccctcac

SEQ ID NO: 2125405 - DNA, 25 bp, Homo sapien
gctaattctttcaggcagaaccctc

SEQ ID NO: 2125406 - DNA, 25 bp, Homo sapien
aggctaattctttcaggcagaaccc

SEQ ID NO: 2125407 - DNA, 25 bp, Homo sapien
ggcaggtacagcacgctgggttttt

SEQ ID NO: 2125408 - DNA, 25 bp, Homo sapien
aggtacagcacgctgggtttttttg

SEQ ID NO: 2125409 - DNA, 25 bp, Homo sapien
gagaggcaggtacagcacgctgggt

SEQ ID NO: 2125410 - DNA, 25 bp, Homo sapien
tggtacgggaggtggaatcttgcct

SEQ ID NO: 2125411 - DNA, 25 bp, Homo sapien
tgcaggtcatcgccggtggcgggac

SEQ ID NO: 2125412 - DNA, 25 bp, Homo sapien
gtggcgggacacttggtgtcttcct

SEQ ID NO: 2125413 - DNA, 25 bp, Homo sapien
cgccggtggcgggacacttggtgtc

SEQ ID NO: 2125414 - DNA, 25 bp, Homo sapien
gtcatcgccggtggcgggacacttg

SEQ ID NO: 2125415 - DNA, 25 bp, Homo sapien
tgtcagcctgaggagttgaagtcac

SEQ ID NO: 2125416 - DNA, 25 bp, Homo sapien
tccgttgtttcagatggctccgagc

SEQ ID NO: 2125417 - DNA, 25 bp, Homo sapien
tccggaaggcacaaaaagaggctgc

SEQ ID NO: 2125418 - DNA, 25 bp, Homo sapien
aaagggtgcccgctactgacttggg

SEQ ID NO: 2125419 - DNA, 25 bp, Homo sapien
ggagtagttcccaagacaggatgca

SEQ ID NO: 2125420 - DNA, 25 bp, Homo sapien
taaatcttcagttgtgcgtgaagcc

SEQ ID NO: 2125421 - DNA, 25 bp, Homo sapien
taaataaatcttcagttgtgcgtga

SEQ ID NO: 2125422 - DNA, 25 bp, Homo sapien
tcagttgtgcgtgaagccacaaaca

SEQ ID NO: 2125423 - DNA, 25 bp, Homo sapien
aatcttcagttgtgcgtgaagccac

SEQ ID NO: 2125424 - DNA, 25 bp, Homo sapien
caggttccttccagccgagcagctt

SEQ ID NO: 2125425 - DNA, 25 bp, Homo sapien
gttccttccagccgagcagcttcct

SEQ ID NO: 2125426 - DNA, 25 bp, Homo sapien
ttccagccgagcagcttccttttgg

SEQ ID NO: 2125427 - DNA, 25 bp, Homo sapien
ccagccgagcagcttccttttggac

SEQ ID NO: 2125428 - DNA, 25 bp, Homo sapien
tgattggagactcagctgtgttctt

SEQ ID NO: 2125429 - DNA, 25 bp, Homo sapien
tgttctttattggtgagtgggaact

SEQ ID NO: 2125430 - DNA, 25 bp, Homo sapien
tgagtgggaactcgttctgccaccc

SEQ ID NO: 2125431 - DNA, 25 bp, Homo sapien
attggtgagtgggaactcgttctgc

SEQ ID NO: 2125432 - DNA, 25 bp, Homo sapien
tgaaatcgtcatttctgccagcatc

SEQ ID NO: 2125433 - DNA, 25 bp, Homo sapien
ccagcatctaggttggcactgctgc

SEQ ID NO: 2125434 - DNA, 25 bp, Homo sapien
ccttcttctgtagcaaggccttgaa

SEQ ID NO: 2125435 - DNA, 25 bp, Homo sapien
tagcaaggccttgaaatcgtcattt

SEQ ID NO: 2125436 - DNA, 25 bp, Homo sapien
tactggggttatcggtggtttcata

SEQ ID NO: 2125437 - DNA, 25 bp, Homo sapien
ttgaaaattgtgcaataattctccg

SEQ ID NO: 2125438 - DNA, 25 bp, Homo sapien
tcagctgctgagggacgagaccttg

SEQ ID NO: 2125439 - DNA, 25 bp, Homo sapien
ttctccgagccagtgggttagtggt

SEQ ID NO: 2125440 - DNA, 25 bp, Homo sapien
gctagatctgagtgaacaaatggct

SEQ ID NO: 2125441 - DNA, 25 bp, Homo sapien
tcctgcctatcgctgttgacagaca

SEQ ID NO: 2125442 - DNA, 25 bp, Homo sapien
gcacttgtgagttacctcggctaga

SEQ ID NO: 2125443 - DNA, 25 bp, Homo sapien
tgagctgggcgcagatcctgcctat

SEQ ID NO: 2125444 - DNA, 25 bp, Homo sapien
cagttgagctaaaaggtggcttctc

SEQ ID NO: 2125445 - DNA, 25 bp, Homo sapien
ccagctggagtgtgggcagttgagc

SEQ ID NO: 2125446 - DNA, 25 bp, Homo sapien
tgggcaatacgacctatcaaagttg

SEQ ID NO: 2125447 - DNA, 25 bp, Homo sapien
gcttgtctctggaaccttactgcat

SEQ ID NO: 2125448 - DNA, 25 bp, Homo sapien
gcaacaagagatagggagttaaccc

SEQ ID NO: 2125449 - DNA, 25 bp, Homo sapien
tcagactgacaggtacagagagact

SEQ ID NO: 2125450 - DNA, 25 bp, Homo sapien
acgagggtaaggcacttgcatggcc

SEQ ID NO: 2125451 - DNA, 25 bp, Homo sapien
taaagagtgcaaatcacagggctgg

SEQ ID NO: 2125452 - DNA, 25 bp, Homo sapien
atagttactgtcttaacctttacag

SEQ ID NO: 2125453 - DNA, 25 bp, Homo sapien
caaagaagaatgtgctacagagacc

SEQ ID NO: 2125454 - DNA, 25 bp, Homo sapien
aaaagagagtggtttacattatcca

SEQ ID NO: 2125455 - DNA, 25 bp, Homo sapien
tgtcaatctcccatctagatgatgg

SEQ ID NO: 2125456 - DNA, 25 bp, Homo sapien
gaaatcgtaggctgaactggaatcc

SEQ ID NO: 2125457 - DNA, 25 bp, Homo sapien
taaggctgagtgctctgtctagaac

SEQ ID NO: 2125458 - DNA, 25 bp, Homo sapien
tcttgactgcatactaggactggcc

SEQ ID NO: 2125459 - DNA, 25 bp, Homo sapien
gagtgctagccctctgtatgtcagc

SEQ ID NO: 2125460 - DNA, 25 bp, Homo sapien
cccgtctgcaatttcctggctcatg

SEQ ID NO: 2125461 - DNA, 25 bp, Homo sapien
ggcgcagcccgtctgcaatttcctg

SEQ ID NO: 2125462 - DNA, 25 bp, Homo sapien
tccaggcgcagcccgtctgcaattt

SEQ ID NO: 2125463 - DNA, 25 bp, Homo sapien
ctgcaatttcctggctcatgtaact

SEQ ID NO: 2125464 - DNA, 25 bp, Homo sapien
aaggatgtgcttgatctgttctgca

SEQ ID NO: 2125465 - DNA, 25 bp, Homo sapien
ggatgtgcttgatctgttctgcagc

SEQ ID NO: 2125466 - DNA, 25 bp, Homo sapien
atgtgcttgatctgttctgcagctc

SEQ ID NO: 2125467 - DNA, 25 bp, Homo sapien
ctgcagctcctgtcataaaaggttt

SEQ ID NO: 2125468 - DNA, 25 bp, Homo sapien
acagtagtccgcagagcaaccatgc

SEQ ID NO: 2125469 - DNA, 25 bp, Homo sapien
cacagtagtccgcagagcaaccatg

SEQ ID NO: 2125470 - DNA, 25 bp, Homo sapien
tgagtaggccgaagaaacaagaagt

SEQ ID NO: 2125471 - DNA, 25 bp, Homo sapien
tgggccatcgcaagatccacttggg

SEQ ID NO: 2125472 - DNA, 25 bp, Homo sapien
taagatttcaatggtgcagcagttc

SEQ ID NO: 2125473 - DNA, 25 bp, Homo sapien
ttataaagccgggatgccactcagg

SEQ ID NO: 2125474 - DNA, 25 bp, Homo sapien
caataagacgcttgggccgaaacaa

SEQ ID NO: 2125475 - DNA, 25 bp, Homo sapien
tcttattgcggctccggaagcaggc

SEQ ID NO: 2125476 - DNA, 25 bp, Homo sapien
tgaaagccgcatctcaattgaccgt

SEQ ID NO: 2125477 - DNA, 25 bp, Homo sapien
tttttcacgcgtgcgcagtaggagc

SEQ ID NO: 2125478 - DNA, 25 bp, Homo sapien
aacgctgaaccgctccagttgccgt

SEQ ID NO: 2125479 - DNA, 25 bp, Homo sapien
gttgttgaacgctgaaccgctccag

SEQ ID NO: 2125480 - DNA, 25 bp, Homo sapien
gaaccgctccagttgccgtacaagc

SEQ ID NO: 2125481 - DNA, 25 bp, Homo sapien
caagcccctttagaagccccgccat

SEQ ID NO: 2125482 - DNA, 25 bp, Homo sapien
gcgtccgtcccggactccggagatg

SEQ ID NO: 2125483 - DNA, 25 bp, Homo sapien
ccgtcccggactccggagatggact

SEQ ID NO: 2125484 - DNA, 25 bp, Homo sapien
cattctccttgatcgctctggccgc

SEQ ID NO: 2125485 - DNA, 25 bp, Homo sapien
cccattctccttgatcgctctggcc

SEQ ID NO: 2125486 - DNA, 25 bp, Homo sapien
gagtggatatttccatcataacgcc

SEQ ID NO: 2125487 - DNA, 25 bp, Homo sapien
ttcaaaagggaactcggccagacac

SEQ ID NO: 2125488 - DNA, 25 bp, Homo sapien
ggccagacactttacaacaagggta

SEQ ID NO: 2125489 - DNA, 25 bp, Homo sapien
aaggtccaacacacaaccggagtgg

SEQ ID NO: 2125490 - DNA, 25 bp, Homo sapien
gccttcttgtcagcactgtcactcc

SEQ ID NO: 2125491 - DNA, 25 bp, Homo sapien
cttgtcagcactgtcactcccagag

SEQ ID NO: 2125492 - DNA, 25 bp, Homo sapien
ctttactgcattgccaccacctttg

SEQ ID NO: 2125493 - DNA, 25 bp, Homo sapien
ccacctttgggaccttgagccttct

SEQ ID NO: 2125494 - DNA, 25 bp, Homo sapien
gagcttatagcgacaaaagggcagg

SEQ ID NO: 2125495 - DNA, 25 bp, Homo sapien
caatccaatgatcaagcccttaggc

SEQ ID NO: 2125496 - DNA, 25 bp, Homo sapien
gagctgaaccctaaaaggccagagg

SEQ ID NO: 2125497 - DNA, 25 bp, Homo sapien
caaacatgaagcctaggagaaagtg

SEQ ID NO: 2125498 - DNA, 25 bp, Homo sapien
tactgtgcggccacttcattgaatc

SEQ ID NO: 2125499 - DNA, 25 bp, Homo sapien
ctgtgcggccacttcattgaatctc

SEQ ID NO: 2125500 - DNA, 25 bp, Homo sapien
tcactatactgtgcggccacttcat

SEQ ID NO: 2125501 - DNA, 25 bp, Homo sapien
tttatcttcactatactgtgcggcc

SEQ ID NO: 2125502 - DNA, 25 bp, Homo sapien
tactgtagcttgagagaatttccca

SEQ ID NO: 2125503 - DNA, 25 bp, Homo sapien
taagtgatatcaagtggcccagaag

SEQ ID NO: 2125504 - DNA, 25 bp, Homo sapien
cataagtactctcaacactgctgga

SEQ ID NO: 2125505 - DNA, 25 bp, Homo sapien
gaagttagccgtgcaagtttggtca

SEQ ID NO: 2125506 - DNA, 25 bp, Homo sapien
ttcttgaaatggtcccaccatggac

SEQ ID NO: 2125507 - DNA, 25 bp, Homo sapien
gcttcttgaaatggtcccaccatgg

SEQ ID NO: 2125508 - DNA, 25 bp, Homo sapien
ttgaaatggtcccaccatggaccct

SEQ ID NO: 2125509 - DNA, 25 bp, Homo sapien
tcttgaaatggtcccaccatggacc

SEQ ID NO: 2125510 - DNA, 25 bp, Homo sapien
ttttcttccttcgaccataataata

SEQ ID NO: 2125511 - DNA, 25 bp, Homo sapien
tgatatccaaattttgtcttaaccg

SEQ ID NO: 2125512 - DNA, 25 bp, Homo sapien
cgaccataataatatgatatccaaa

SEQ ID NO: 2125513 - DNA, 25 bp, Homo sapien
tgtaaacacaggcttatccatccca

SEQ ID NO: 2125514 - DNA, 25 bp, Homo sapien
agaatacaggttaaagggagtctgc

SEQ ID NO: 2125515 - DNA, 25 bp, Homo sapien
tacagttgacattcacttagcccca

SEQ ID NO: 2125516 - DNA, 25 bp, Homo sapien
aaacccatacttagagctttcacag

SEQ ID NO: 2125517 - DNA, 25 bp, Homo sapien
tcacagaatacaaggagcatccaat

SEQ ID NO: 2125518 - DNA, 25 bp, Homo sapien
tgaaaggcataacgtgccacgtact

SEQ ID NO: 2125519 - DNA, 25 bp, Homo sapien
cacgtactatgttaagacagtggag

SEQ ID NO: 2125520 - DNA, 25 bp, Homo sapien
taatttatgggacagactgagagtc

SEQ ID NO: 2125521 - DNA, 25 bp, Homo sapien
gagttgatatctgcttcccctgaag

SEQ ID NO: 2125522 - DNA, 25 bp, Homo sapien
aaaatttagatgcacagaacattgg

SEQ ID NO: 2125523 - DNA, 25 bp, Homo sapien
gcactcggttagtctagtacaaaac

SEQ ID NO: 2125524 - DNA, 25 bp, Homo sapien
taatgtaacccatacactgaagatg

SEQ ID NO: 2125525 - DNA, 25 bp, Homo sapien
tacaaaacaactcatggaacaactg

SEQ ID NO: 2125526 - DNA, 25 bp, Homo sapien
gctggtctttcactcccaggaggtc

SEQ ID NO: 2125527 - DNA, 25 bp, Homo sapien
tggatattcaaaggtgcaatcccat

SEQ ID NO: 2125528 - DNA, 25 bp, Homo sapien
tcaaaggtgcaatcccattactaat

SEQ ID NO: 2125529 - DNA, 25 bp, Homo sapien
ccaggaggtcaccatgtttttcttt

SEQ ID NO: 2125530 - DNA, 25 bp, Homo sapien
tacaggtagtgctgactctatagct

SEQ ID NO: 2125531 - DNA, 25 bp, Homo sapien
tagtcattgatgatctgcccaaaga

SEQ ID NO: 2125532 - DNA, 25 bp, Homo sapien
tgtactaactcttcattgggaatgg

SEQ ID NO: 2125533 - DNA, 25 bp, Homo sapien
tgaatgttaccaccttgcaagatgg

SEQ ID NO: 2125534 - DNA, 25 bp, Homo sapien
tgaacggaccagaaacctcaatcgg

SEQ ID NO: 2125535 - DNA, 25 bp, Homo sapien
tttcccaatgaaaaagtgctgagca

SEQ ID NO: 2125536 - DNA, 25 bp, Homo sapien
catggtcctagcaaggatgaacgga

SEQ ID NO: 2125537 - DNA, 25 bp, Homo sapien
gagaactgcacaaccaactctttga

SEQ ID NO: 2125538 - DNA, 25 bp, Homo sapien
ccttaaagagaaacatgctctagtc

SEQ ID NO: 2125539 - DNA, 25 bp, Homo sapien
catgctgaagcgaacttcttgcctc

SEQ ID NO: 2125540 - DNA, 25 bp, Homo sapien
taatccagactgtaatcctcacgtg

SEQ ID NO: 2125541 - DNA, 25 bp, Homo sapien
tactctagcactattcttctccttg

SEQ ID NO: 2125542 - DNA, 25 bp, Homo sapien
ggcagaccctctgtggagaagaaag

SEQ ID NO: 2125543 - DNA, 25 bp, Homo sapien
aaatcaagtgtgtgtcttctgcaac

SEQ ID NO: 2125544 - DNA, 25 bp, Homo sapien
aatagtatggcttatgggtttctcc

SEQ ID NO: 2125545 - DNA, 25 bp, Homo sapien
ggaatgttctaaagggccctccata

SEQ ID NO: 2125546 - DNA, 25 bp, Homo sapien
gcctgtcttataaatggcgctaagc

SEQ ID NO: 2125547 - DNA, 25 bp, Homo sapien
ttttgactcttaaatgcctgtctta

SEQ ID NO: 2125548 - DNA, 25 bp, Homo sapien
cgctaagcagggaaaagctaattat

SEQ ID NO: 2125549 - DNA, 25 bp, Homo sapien
tgtttgactgaaatgtgaaccacat

SEQ ID NO: 2125550 - DNA, 25 bp, Homo sapien
cctgggcctcttaggataggagcct

SEQ ID NO: 2125551 - DNA, 25 bp, Homo sapien
ttatcccctggccactagggtgggc

SEQ ID NO: 2125552 - DNA, 25 bp, Homo sapien
tcaaagtgagtaaaagcaggcaggg

SEQ ID NO: 2125553 - DNA, 25 bp, Homo sapien
tgacactgtcagctccgtactctat

SEQ ID NO: 2125554 - DNA, 25 bp, Homo sapien
agatgaaggtgccagcaggattggt

SEQ ID NO: 2125555 - DNA, 25 bp, Homo sapien
gaggctgaagagtccaagatgaagg

SEQ ID NO: 2125556 - DNA, 25 bp, Homo sapien
tggaggctgaagagtccaagatgaa

SEQ ID NO: 2125557 - DNA, 25 bp, Homo sapien
tgccagcaggattggtatctggtga

SEQ ID NO: 2125558 - DNA, 25 bp, Homo sapien
cctaggcgcaaaaggagtgtgactt

SEQ ID NO: 2125559 - DNA, 25 bp, Homo sapien
gaatcattttctagcagccttggca

SEQ ID NO: 2125560 - DNA, 25 bp, Homo sapien
tagctgctcacaaaggatggaagac

SEQ ID NO: 2125561 - DNA, 25 bp, Homo sapien
tggagcaagctatgtcctaggcgca

SEQ ID NO: 2125562 - DNA, 25 bp, Homo sapien
aactggttccagctggtatgagacc

SEQ ID NO: 2125563 - DNA, 25 bp, Homo sapien
aaggcctccctagtgtggtgctcag

SEQ ID NO: 2125564 - DNA, 25 bp, Homo sapien
tccctgggcgtctcctgttgaatgg

SEQ ID NO: 2125565 - DNA, 25 bp, Homo sapien
cctgtgggtgctgaacaaatgaaca

SEQ ID NO: 2125566 - DNA, 25 bp, Homo sapien
gctgacattctaatgggtaagagag

SEQ ID NO: 2125567 - DNA, 25 bp, Homo sapien
tgcctggcccaaaatctttgctctt

SEQ ID NO: 2125568 - DNA, 25 bp, Homo sapien
aatctttgctcttatagagctgaca

SEQ ID NO: 2125569 - DNA, 25 bp, Homo sapien
cccaaaatctttgctcttatagagc

SEQ ID NO: 2125570 - DNA, 25 bp, Homo sapien
gaagacgacatgtgttagacttctt

SEQ ID NO: 2125571 - DNA, 25 bp, Homo sapien
tctgatactgattgtgctagggctc

SEQ ID NO: 2125572 - DNA, 25 bp, Homo sapien
aaatatttttctacggttgcctcag

SEQ ID NO: 2125573 - DNA, 25 bp, Homo sapien
tctggtgatcacttgcttttgaaat

SEQ ID NO: 2125574 - DNA, 25 bp, Homo sapien
ccgaggaagggccttgatccgtctc

SEQ ID NO: 2125575 - DNA, 25 bp, Homo sapien
aagacactcgcccaagcttcctcca

SEQ ID NO: 2125576 - DNA, 25 bp, Homo sapien
ctggcgaccaagacactcgcccaag

SEQ ID NO: 2125577 - DNA, 25 bp, Homo sapien
tccagatgccgaggaagggccttga

SEQ ID NO: 2125578 - DNA, 25 bp, Homo sapien
atccggagcctgcagcggagaagct

SEQ ID NO: 2125579 - DNA, 25 bp, Homo sapien
ccggagcctgcagcggagaagctgc

SEQ ID NO: 2125580 - DNA, 25 bp, Homo sapien
agcggagaagctgccgctgttgcca

SEQ ID NO: 2125581 - DNA, 25 bp, Homo sapien
ggagcctgcagcggagaagctgccg

SEQ ID NO: 2125582 - DNA, 25 bp, Homo sapien
tccttgcttcgcaagctcgcggtct

SEQ ID NO: 2125583 - DNA, 25 bp, Homo sapien
caagctcgcggtctagttgccaagt

SEQ ID NO: 2125584 - DNA, 25 bp, Homo sapien
gagataagagttcagcggagagctc

SEQ ID NO: 2125585 - DNA, 25 bp, Homo sapien
cgcggtctagttgccaagttggaga

SEQ ID NO: 2125586 - DNA, 25 bp, Homo sapien
ggtccagtacgataacagcatttat

SEQ ID NO: 2125587 - DNA, 25 bp, Homo sapien
cattcagcaagtattactgaatctg

SEQ ID NO: 2125588 - DNA, 25 bp, Homo sapien
tcctccctgagtttatagacctcct

SEQ ID NO: 2125589 - DNA, 25 bp, Homo sapien
gaagtgtgtgagctgaggcagggac

SEQ ID NO: 2125590 - DNA, 25 bp, Homo sapien
atgaagtttgcaccgccagacacca

SEQ ID NO: 2125591 - DNA, 25 bp, Homo sapien
agacaccagagggttaactaggatg

SEQ ID NO: 2125592 - DNA, 25 bp, Homo sapien
agatgaagtttgcaccgccagacac

SEQ ID NO: 2125593 - DNA, 25 bp, Homo sapien
taactaggatgcagttgggttgatt

SEQ ID NO: 2125594 - DNA, 25 bp, Homo sapien
tccccacagtttggccgaaagtcat

SEQ ID NO: 2125595 - DNA, 25 bp, Homo sapien
tagagatttgaagcacgtgtccatg

SEQ ID NO: 2125596 - DNA, 25 bp, Homo sapien
gaagcacgtgtccatgattgtgctg

SEQ ID NO: 2125597 - DNA, 25 bp, Homo sapien
gtgtccatgattgtgctgagctgga

SEQ ID NO: 2125598 - DNA, 25 bp, Homo sapien
gccttcctggtttcactttagcttc

SEQ ID NO: 2125599 - DNA, 25 bp, Homo sapien
ccagatcctcaatccatcttcagca

SEQ ID NO: 2125600 - DNA, 25 bp, Homo sapien
cctctctgcttgcctggcggcagtc

SEQ ID NO: 2125601 - DNA, 25 bp, Homo sapien
tctctgcttgcctggcggcagtctg

SEQ ID NO: 2125602 - DNA, 25 bp, Homo sapien
ataccccagatcctcaatccatctt

SEQ ID NO: 2125603 - DNA, 25 bp, Homo sapien
tgagggtctactctgcctctagaag

SEQ ID NO: 2125604 - DNA, 25 bp, Homo sapien
cttggacctgctgagggtctactct

SEQ ID NO: 2125605 - DNA, 25 bp, Homo sapien
ggccatgccttctttccggttgggc

SEQ ID NO: 2125606 - DNA, 25 bp, Homo sapien
aggcagtttcctccccgtattcctg

SEQ ID NO: 2125607 - DNA, 25 bp, Homo sapien
gcaacctcatagatcccatcctgtg

SEQ ID NO: 2125608 - DNA, 25 bp, Homo sapien
ggctgaatttcttaacgtggcatcc

SEQ ID NO: 2125609 - DNA, 25 bp, Homo sapien
tcatctttagtgaccacaatataaa

SEQ ID NO: 2125610 - DNA, 25 bp, Homo sapien
cgtggcatccaagtctggctcctgc

SEQ ID NO: 2125611 - DNA, 25 bp, Homo sapien
ttccatatcaatctagaaacagcta

SEQ ID NO: 2125612 - DNA, 25 bp, Homo sapien
tatgccagacataccaaaaaggaag

SEQ ID NO: 2125613 - DNA, 25 bp, Homo sapien
gaaggcacacctgatgcttgaaatg

SEQ ID NO: 2125614 - DNA, 25 bp, Homo sapien
gatcctattatatggatgcttcaaa

SEQ ID NO: 2125615 - DNA, 25 bp, Homo sapien
taggaaattgctgccgaccccgcca

SEQ ID NO: 2125616 - DNA, 25 bp, Homo sapien
ctttaggaaattgctgccgaccccg

SEQ ID NO: 2125617 - DNA, 25 bp, Homo sapien
acccaccccttgtgtctgcaaggga

SEQ ID NO: 2125618 - DNA, 25 bp, Homo sapien
accacccaccccttgtgtctgcaag

SEQ ID NO: 2125619 - DNA, 25 bp, Homo sapien
ggcaccccagagtcctcaactggac

SEQ ID NO: 2125620 - DNA, 25 bp, Homo sapien
gcaggcaccccagagtcctcaactg

SEQ ID NO: 2125621 - DNA, 25 bp, Homo sapien
caggcaccccagagtcctcaactgg

SEQ ID NO: 2125622 - DNA, 25 bp, Homo sapien
aggcaccccagagtcctcaactgga

SEQ ID NO: 2125623 - DNA, 25 bp, Homo sapien
ttccaaggggcatcaagtggcagct

SEQ ID NO: 2125624 - DNA, 25 bp, Homo sapien
tgaaaatttccaaggggcatcaagt

SEQ ID NO: 2125625 - DNA, 25 bp, Homo sapien
tataatgaagacagcgtgtttatgc

SEQ ID NO: 2125626 - DNA, 25 bp, Homo sapien
cgtgtttatgcaagcagtttgtgga

SEQ ID NO: 2125627 - DNA, 25 bp, Homo sapien
tgtttgcagggaatctgaagcatgt

SEQ ID NO: 2125628 - DNA, 25 bp, Homo sapien
tgcagggaatctgaagcatgtggtc

SEQ ID NO: 2125629 - DNA, 25 bp, Homo sapien
gaagcatgtggtctagttgacagaa

SEQ ID NO: 2125630 - DNA, 25 bp, Homo sapien
gcatgtggtctagttgacagaaaga

SEQ ID NO: 2125631 - DNA, 25 bp, Homo sapien
tttcctccctgcgaacatgtcttgt

SEQ ID NO: 2125632 - DNA, 25 bp, Homo sapien
tgcgaacatgtcttgttggaatgct

SEQ ID NO: 2125633 - DNA, 25 bp, Homo sapien
gtcttgttggaatgctttgacatgg

SEQ ID NO: 2125634 - DNA, 25 bp, Homo sapien
tccctgcgaacatgtcttgttggaa

SEQ ID NO: 2125635 - DNA, 25 bp, Homo sapien
caccggctggccaagggtaatccct

SEQ ID NO: 2125636 - DNA, 25 bp, Homo sapien
tggccaagggtaatccctacaatga

SEQ ID NO: 2125637 - DNA, 25 bp, Homo sapien
ggctggccaagggtaatccctacaa

SEQ ID NO: 2125638 - DNA, 25 bp, Homo sapien
gacaccggctggccaagggtaatcc

SEQ ID NO: 2125639 - DNA, 25 bp, Homo sapien
ttgggtggggcaaaatagagcaaat

SEQ ID NO: 2125640 - DNA, 25 bp, Homo sapien
gagagcgagagttggtctccagttc

SEQ ID NO: 2125641 - DNA, 25 bp, Homo sapien
gagcaaatagctttcaaactctaaa

SEQ ID NO: 2125642 - DNA, 25 bp, Homo sapien
cagatgtaaggctgtattattcctc

SEQ ID NO: 2125643 - DNA, 25 bp, Homo sapien
cacctagaagctgaagggagcctct

SEQ ID NO: 2125644 - DNA, 25 bp, Homo sapien
tctgaccttctggtggcgtccaagg

SEQ ID NO: 2125645 - DNA, 25 bp, Homo sapien
gcgtccaaggcctaatcatgatatg

SEQ ID NO: 2125646 - DNA, 25 bp, Homo sapien
agttaatagattgtgcctgccaggc

SEQ ID NO: 2125647 - DNA, 25 bp, Homo sapien
cttcagggctccacagttagcgact

SEQ ID NO: 2125648 - DNA, 25 bp, Homo sapien
ggctccacagttagcgactgtttct

SEQ ID NO: 2125649 - DNA, 25 bp, Homo sapien
gttagcgactgtttctttggctcca

SEQ ID NO: 2125650 - DNA, 25 bp, Homo sapien
cacagttagcgactgtttctttggc

SEQ ID NO: 2125651 - DNA, 25 bp, Homo sapien
caagagtataccactcttttggctt

SEQ ID NO: 2125652 - DNA, 25 bp, Homo sapien
gaaggccagtcaagagtataccact

SEQ ID NO: 2125653 - DNA, 25 bp, Homo sapien
cagtcaagagtataccactcttttg

SEQ ID NO: 2125654 - DNA, 25 bp, Homo sapien
ggccagtcaagagtataccactctt

SEQ ID NO: 2125655 - DNA, 25 bp, Homo sapien
catggcactgaccagcaactgtggt

SEQ ID NO: 2125656 - DNA, 25 bp, Homo sapien
gaactacccaagtacaagcatcttg

SEQ ID NO: 2125657 - DNA, 25 bp, Homo sapien
tataccccgccaaaatttctgacag

SEQ ID NO: 2125658 - DNA, 25 bp, Homo sapien
tgtggtcttacacaaggtcatcctg

SEQ ID NO: 2125659 - DNA, 25 bp, Homo sapien
agtcactttccacatatagacttac

SEQ ID NO: 2125660 - DNA, 25 bp, Homo sapien
tgccatgagctggaaaacaagttct

SEQ ID NO: 2125661 - DNA, 25 bp, Homo sapien
gtggtgatgttctgttctgacagtc

SEQ ID NO: 2125662 - DNA, 25 bp, Homo sapien
ttggaggtggtgatgttctgttctg

SEQ ID NO: 2125663 - DNA, 25 bp, Homo sapien
ctttgcagctccaagcacattttgg

SEQ ID NO: 2125664 - DNA, 25 bp, Homo sapien
cccgaagagcataattgagtgcatg

SEQ ID NO: 2125665 - DNA, 25 bp, Homo sapien
gaagtgcctagagacgggccataaa

SEQ ID NO: 2125666 - DNA, 25 bp, Homo sapien
aagtgattaaatgtgcccgaagagc

SEQ ID NO: 2125667 - DNA, 25 bp, Homo sapien
acttccccaagccatggtcgggtca

SEQ ID NO: 2125668 - DNA, 25 bp, Homo sapien
cagggacttccccaagccatggtcg

SEQ ID NO: 2125669 - DNA, 25 bp, Homo sapien
ttccccaagccatggtcgggtcatg

SEQ ID NO: 2125670 - DNA, 25 bp, Homo sapien
ccaagccatggtcgggtcatgaagg

SEQ ID NO: 2125671 - DNA, 25 bp, Homo sapien
cattttctgccagggtaagtgggcc

SEQ ID NO: 2125672 - DNA, 25 bp, Homo sapien
tggaggctctttagacaactgagat

SEQ ID NO: 2125673 - DNA, 25 bp, Homo sapien
gattcaggtgctgtcttgagcacag

SEQ ID NO: 2125674 - DNA, 25 bp, Homo sapien
tccagcagtgctaagggtcattttc

SEQ ID NO: 2125675 - DNA, 25 bp, Homo sapien
tacctgggaatctaaaaggctatgc

SEQ ID NO: 2125676 - DNA, 25 bp, Homo sapien
caagagtgtgctcagtgtgaaaaac

SEQ ID NO: 2125677 - DNA, 25 bp, Homo sapien
caggatgataggcattcccaaggct

SEQ ID NO: 2125678 - DNA, 25 bp, Homo sapien
tctgtacaagtgaagtgctaaggca

SEQ ID NO: 2125679 - DNA, 25 bp, Homo sapien
tcttcactgtacaattccgtttgtg

SEQ ID NO: 2125680 - DNA, 25 bp, Homo sapien
tctttcttcactgtacaattccgtt

SEQ ID NO: 2125681 - DNA, 25 bp, Homo sapien
tgtacaattccgtttgtgttggcat

SEQ ID NO: 2125682 - DNA, 25 bp, Homo sapien
cactgtacaattccgtttgtgttgg

SEQ ID NO: 2125683 - DNA, 25 bp, Homo sapien
aatttgcccctgtttccattttatg

SEQ ID NO: 2125684 - DNA, 25 bp, Homo sapien
gtcttacagccaaagcaacattcag

SEQ ID NO: 2125685 - DNA, 25 bp, Homo sapien
gtgagaatctcaagggttgacaaag

SEQ ID NO: 2125686 - DNA, 25 bp, Homo sapien
gatgctggtgagaatctcaagggtt

SEQ ID NO: 2125687 - DNA, 25 bp, Homo sapien
caggccagtccactctatagttttg

SEQ ID NO: 2125688 - DNA, 25 bp, Homo sapien
cccatcatgagatgaggagtctctg

SEQ ID NO: 2125689 - DNA, 25 bp, Homo sapien
catcatgagatgaggagtctctggg

SEQ ID NO: 2125690 - DNA, 25 bp, Homo sapien
ctatagttttgccactacacatttc

SEQ ID NO: 2125691 - DNA, 25 bp, Homo sapien
tttaagctgtagaagcctgaactga

SEQ ID NO: 2125692 - DNA, 25 bp, Homo sapien
tgaatgctctattcctgagaagcaa

SEQ ID NO: 2125693 - DNA, 25 bp, Homo sapien
agcctgaactgagaatgaatgctct

SEQ ID NO: 2125694 - DNA, 25 bp, Homo sapien
cctgaactgagaatgaatgctctat

SEQ ID NO: 2125695 - DNA, 25 bp, Homo sapien
gataatactgaaagcttgactaagg

SEQ ID NO: 2125696 - DNA, 25 bp, Homo sapien
gcttgactaaggtcatctgtcacat

SEQ ID NO: 2125697 - DNA, 25 bp, Homo sapien
ttaatgataatactgaaagcttgac

SEQ ID NO: 2125698 - DNA, 25 bp, Homo sapien
tactgaaagcttgactaaggtcatc

SEQ ID NO: 2125699 - DNA, 25 bp, Homo sapien
gaaaagagctcattggtgatacatg

SEQ ID NO: 2125700 - DNA, 25 bp, Homo sapien
agggactgaagatgtaagaaaagag

SEQ ID NO: 2125701 - DNA, 25 bp, Homo sapien
aagagctcattggtgatacatgacc

SEQ ID NO: 2125702 - DNA, 25 bp, Homo sapien
ctgaagatgtaagaaaagagctcat

SEQ ID NO: 2125703 - DNA, 25 bp, Homo sapien
ggcagtgacacgatgaaatttctct

SEQ ID NO: 2125704 - DNA, 25 bp, Homo sapien
gaacaggtataaccgggcagtgaca

SEQ ID NO: 2125705 - DNA, 25 bp, Homo sapien
gaaaggtaatagattgacagcactg

SEQ ID NO: 2125706 - DNA, 25 bp, Homo sapien
tgtgctgtgctgaactcaccagtat

SEQ ID NO: 2125707 - DNA, 25 bp, Homo sapien
tatctgccaatcataaaacctcctg

SEQ ID NO: 2125708 - DNA, 25 bp, Homo sapien
tagacttgaggattttccagtgccc

SEQ ID NO: 2125709 - DNA, 25 bp, Homo sapien
gcccctattgaaggttatctgccaa

SEQ ID NO: 2125710 - DNA, 25 bp, Homo sapien
tagtgctccctagatggatcaccct

SEQ ID NO: 2125711 - DNA, 25 bp, Homo sapien
attccaggactagtgagaagcgggt

SEQ ID NO: 2125712 - DNA, 25 bp, Homo sapien
gaagggacttgatcagattccagga

SEQ ID NO: 2125713 - DNA, 25 bp, Homo sapien
tgaactggttgtcagacatgggaaa

SEQ ID NO: 2125714 - DNA, 25 bp, Homo sapien
tagctaacaatcacgggtatcacca

SEQ ID NO: 2125715 - DNA, 25 bp, Homo sapien
taccactagcctctagtgggtgagg

SEQ ID NO: 2125716 - DNA, 25 bp, Homo sapien
tgctttgtccctatggcatccctac

SEQ ID NO: 2125717 - DNA, 25 bp, Homo sapien
cataggaacgagctaggacatgctt

SEQ ID NO: 2125718 - DNA, 25 bp, Homo sapien
ggcactagccccttcatcagaaaac

SEQ ID NO: 2125719 - DNA, 25 bp, Homo sapien
cttgtgcgtgcgtcacgtagttctt

SEQ ID NO: 2125720 - DNA, 25 bp, Homo sapien
tcagagaagtttgttgttaccaacc

SEQ ID NO: 2125721 - DNA, 25 bp, Homo sapien
tttaccttccttgtgatgggttcaa

SEQ ID NO: 2125722 - DNA, 25 bp, Homo sapien
ccgttgttggtgaggagctgtgatc

SEQ ID NO: 2125723 - DNA, 25 bp, Homo sapien
gatgtatgacgattacaggattcaa

SEQ ID NO: 2125724 - DNA, 25 bp, Homo sapien
gacgattacaggattcaagtgacaa

SEQ ID NO: 2125725 - DNA, 25 bp, Homo sapien
tatgacgattacaggattcaagtga

SEQ ID NO: 2125726 - DNA, 25 bp, Homo sapien
ccagagatgtatgacgattacagga

SEQ ID NO: 2125727 - DNA, 25 bp, Homo sapien
tgcattctttgttcgacaagcagtg

SEQ ID NO: 2125728 - DNA, 25 bp, Homo sapien
ctttgttcgacaagcagtgtctggg

SEQ ID NO: 2125729 - DNA, 25 bp, Homo sapien
ctctgcattctttgttcgacaagca

SEQ ID NO: 2125730 - DNA, 25 bp, Homo sapien
cattctttgttcgacaagcagtgtc

SEQ ID NO: 2125731 - DNA, 25 bp, Homo sapien
atgatgggtctcaggctgtagactg

SEQ ID NO: 2125732 - DNA, 25 bp, Homo sapien
aggctgtagactgctctctacggtc

SEQ ID NO: 2125733 - DNA, 25 bp, Homo sapien
ataatgatgggtctcaggctgtaga

SEQ ID NO: 2125734 - DNA, 25 bp, Homo sapien
caggctgtagactgctctctacggt

SEQ ID NO: 2125735 - DNA, 25 bp, Homo sapien
atctgtgccattcaacatcttcatt

SEQ ID NO: 2125736 - DNA, 25 bp, Homo sapien
catctgtgccattcaacatcttcat

SEQ ID NO: 2125737 - DNA, 25 bp, Homo sapien
tctgagaaataatgtcagagaattg

SEQ ID NO: 2125738 - DNA, 25 bp, Homo sapien
tgagaaataatgtcagagaattgaa

SEQ ID NO: 2125739 - DNA, 25 bp, Homo sapien
gagaaataatgtcagagaattgaag

SEQ ID NO: 2125740 - DNA, 25 bp, Homo sapien
ctttctgagaaataatgtcagagaa

SEQ ID NO: 2125741 - DNA, 25 bp, Homo sapien
tcctttatagaactgttgagacgca

SEQ ID NO: 2125742 - DNA, 25 bp, Homo sapien
caagacttaggcaatctgagctcca

SEQ ID NO: 2125743 - DNA, 25 bp, Homo sapien
tagctgtggccactgtttcagagcc

SEQ ID NO: 2125744 - DNA, 25 bp, Homo sapien
tgagacgcaaaggtagctgcatcct

SEQ ID NO: 2125745 - DNA, 25 bp, Homo sapien
agacatgctaacattcatgcctctg

SEQ ID NO: 2125746 - DNA, 25 bp, Homo sapien
tggtcttattatggcaaccttctgt

SEQ ID NO: 2125747 - DNA, 25 bp, Homo sapien
tctgttcttctgcactaaaggccat

SEQ ID NO: 2125748 - DNA, 25 bp, Homo sapien
accaatcttgggatgaagggaggat

SEQ ID NO: 2125749 - DNA, 25 bp, Homo sapien
ggccttttttgggacatcttgacac

SEQ ID NO: 2125750 - DNA, 25 bp, Homo sapien
tagcgtatgtacttgtccctaacgg

SEQ ID NO: 2125751 - DNA, 25 bp, Homo sapien
tcatttgacaggtaccctaaaaaca

SEQ ID NO: 2125752 - DNA, 25 bp, Homo sapien
taatataggagtcagtcccatcttc

SEQ ID NO: 2125753 - DNA, 25 bp, Homo sapien
gcttagcaaccatttatgagcgaca

SEQ ID NO: 2125754 - DNA, 25 bp, Homo sapien
tcctcatagcttagcaaccatttat

SEQ ID NO: 2125755 - DNA, 25 bp, Homo sapien
tttatgagcgacaacatacaatgtt

SEQ ID NO: 2125756 - DNA, 25 bp, Homo sapien
caaccatttatgagcgacaacatac

SEQ ID NO: 2125757 - DNA, 25 bp, Homo sapien
ccttaaaacgataacgtttgctatg

SEQ ID NO: 2125758 - DNA, 25 bp, Homo sapien
ctatggatggctttatgggtttgtt

SEQ ID NO: 2125759 - DNA, 25 bp, Homo sapien
agctttgggtcagcaaataagaggg

SEQ ID NO: 2125760 - DNA, 25 bp, Homo sapien
ggctttatgggtttgtttcatgagc

SEQ ID NO: 2125761 - DNA, 25 bp, Homo sapien
tcccgcctcttgcctccctgagagc

SEQ ID NO: 2125762 - DNA, 25 bp, Homo sapien
tcctttttctggagaatggggtctc

SEQ ID NO: 2125763 - DNA, 25 bp, Homo sapien
cctttttctggagaatggggtctcg

SEQ ID NO: 2125764 - DNA, 25 bp, Homo sapien
tcaagctatcctcccgcctcttgcc

SEQ ID NO: 2125765 - DNA, 25 bp, Homo sapien
ccccagggtcttgagtcggagaccg

SEQ ID NO: 2125766 - DNA, 25 bp, Homo sapien
agggtcttgagtcggagaccgccgc

SEQ ID NO: 2125767 - DNA, 25 bp, Homo sapien
ccagggtcttgagtcggagaccgcc

SEQ ID NO: 2125768 - DNA, 25 bp, Homo sapien
gtcttgagtcggagaccgccgccct

SEQ ID NO: 2125769 - DNA, 25 bp, Homo sapien
gaagagatgcgcgtccacgggcatt

SEQ ID NO: 2125770 - DNA, 25 bp, Homo sapien
cgctgtgtgccaggccgagaggaca

SEQ ID NO: 2125771 - DNA, 25 bp, Homo sapien
cgagaggacagtgacgtcgccgcgg

SEQ ID NO: 2125772 - DNA, 25 bp, Homo sapien
gcggccggagcgctgtgtgccaggc

SEQ ID NO: 2125773 - DNA, 25 bp, Homo sapien
ggagcacttggtgtccccgctgcag

SEQ ID NO: 2125774 - DNA, 25 bp, Homo sapien
atgcctcagaagaagtgctcccagg

SEQ ID NO: 2125775 - DNA, 25 bp, Homo sapien
tgcctcagaagaagtgctcccaggg

SEQ ID NO: 2125776 - DNA, 25 bp, Homo sapien
gctccggggagcacttggtgtcccc

SEQ ID NO: 2125777 - DNA, 25 bp, Homo sapien
caaaccagggcaggatcgatttttc

SEQ ID NO: 2125778 - DNA, 25 bp, Homo sapien
cagagtaatcatcaggagccgggtc

SEQ ID NO: 2125779 - DNA, 25 bp, Homo sapien
gctggcctgcatgaagatcgagtcc

SEQ ID NO: 2125780 - DNA, 25 bp, Homo sapien
ttctgatcaagacataggagtgctc

SEQ ID NO: 2125781 - DNA, 25 bp, Homo sapien
ttagacgaaatgtgcctccaacacc

SEQ ID NO: 2125782 - DNA, 25 bp, Homo sapien
tagacgaaatgtgcctccaacaccc

SEQ ID NO: 2125783 - DNA, 25 bp, Homo sapien
tgtgcctccaacaccctcaacacct

SEQ ID NO: 2125784 - DNA, 25 bp, Homo sapien
aaatgtgcctccaacaccctcaaca

SEQ ID NO: 2125785 - DNA, 25 bp, Homo sapien
tagcctgagattgcaaccacactgg

SEQ ID NO: 2125786 - DNA, 25 bp, Homo sapien
tactgatacttgctccagccatggc

SEQ ID NO: 2125787 - DNA, 25 bp, Homo sapien
tggaactggcactaacactggcact

SEQ ID NO: 2125788 - DNA, 25 bp, Homo sapien
tggactccccaaagacgaaatgctt

SEQ ID NO: 2125789 - DNA, 25 bp, Homo sapien
gggctcagggactccgtggggcacg

SEQ ID NO: 2125790 - DNA, 25 bp, Homo sapien
gtggggcacggttttctcatcttgt

SEQ ID NO: 2125791 - DNA, 25 bp, Homo sapien
gactccgtggggcacggttttctca

SEQ ID NO: 2125792 - DNA, 25 bp, Homo sapien
ggggcacggttttctcatcttgttc

SEQ ID NO: 2125793 - DNA, 25 bp, Homo sapien
tagagttggtgtgtttagaaggccc

SEQ ID NO: 2125794 - DNA, 25 bp, Homo sapien
ggcccagtgtatgcactgtagaaaa

SEQ ID NO: 2125795 - DNA, 25 bp, Homo sapien
cattgcgctttagagttggtgtgtt

SEQ ID NO: 2125796 - DNA, 25 bp, Homo sapien
gtttagaaggcccagtgtatgcact

SEQ ID NO: 2125797 - DNA, 25 bp, Homo sapien
ggagaggcctggagcaccatcctgg

SEQ ID NO: 2125798 - DNA, 25 bp, Homo sapien
atgggtgtgtgcttcagtcacaggg

SEQ ID NO: 2125799 - DNA, 25 bp, Homo sapien
gcctggagcaccatcctgggtccca

SEQ ID NO: 2125800 - DNA, 25 bp, Homo sapien
gggtcccagtcccacccgagtgatg

SEQ ID NO: 2125801 - DNA, 25 bp, Homo sapien
acttttgcaatagcacaatggttga

SEQ ID NO: 2125802 - DNA, 25 bp, Homo sapien
ggttgatggacagtaaacatgctac

SEQ ID NO: 2125803 - DNA, 25 bp, Homo sapien
aacatgctactggtttcaaacactt

SEQ ID NO: 2125804 - DNA, 25 bp, Homo sapien
tggagcagtactgcatgtcccccag

SEQ ID NO: 2125805 - DNA, 25 bp, Homo sapien
agccaaatgggttactgtcctcgta

SEQ ID NO: 2125806 - DNA, 25 bp, Homo sapien
ctagccaaatgggttactgtcctcg

SEQ ID NO: 2125807 - DNA, 25 bp, Homo sapien
tagccaaatgggttactgtcctcgt

SEQ ID NO: 2125808 - DNA, 25 bp, Homo sapien
gccaaatgggttactgtcctcgtac

SEQ ID NO: 2125809 - DNA, 25 bp, Homo sapien
taggggaggataccggacactcgga

SEQ ID NO: 2125810 - DNA, 25 bp, Homo sapien
ctaggggaggataccggacactcgg

SEQ ID NO: 2125811 - DNA, 25 bp, Homo sapien
aagcccaccaagagaacctcaggcc

SEQ ID NO: 2125812 - DNA, 25 bp, Homo sapien
cccagggctcccaagggtccaattg

SEQ ID NO: 2125813 - DNA, 25 bp, Homo sapien
ggctcccaagggtccaattgtcact

SEQ ID NO: 2125814 - DNA, 25 bp, Homo sapien
agggtccaattgtcactctgttttc

SEQ ID NO: 2125815 - DNA, 25 bp, Homo sapien
tcagaaaacatgaacttcactggca

SEQ ID NO: 2125816 - DNA, 25 bp, Homo sapien
catgtacatcgcacttctcagaaaa

SEQ ID NO: 2125817 - DNA, 25 bp, Homo sapien
aataagtcctttcagacaccacatg

SEQ ID NO: 2125818 - DNA, 25 bp, Homo sapien
tctgccggcctctgacaataagtcc

SEQ ID NO: 2125819 - DNA, 25 bp, Homo sapien
agctgctgtcataaccatgagctca

SEQ ID NO: 2125820 - DNA, 25 bp, Homo sapien
agtccaaaagaggagcagcgttcca

SEQ ID NO: 2125821 - DNA, 25 bp, Homo sapien
ttccttcatagctgctgtcataacc

SEQ ID NO: 2125822 - DNA, 25 bp, Homo sapien
agcgttccaactccctagggctggg

SEQ ID NO: 2125823 - DNA, 25 bp, Homo sapien
ctttcaacacgtcggctgaactggg

SEQ ID NO: 2125824 - DNA, 25 bp, Homo sapien
taaatgctggcacgcttgactgttt

SEQ ID NO: 2125825 - DNA, 25 bp, Homo sapien
gcttgttactaggtcctggtggcga

SEQ ID NO: 2125826 - DNA, 25 bp, Homo sapien
gggagagagctagcatcttccttag

SEQ ID NO: 2125827 - DNA, 25 bp, Homo sapien
ctcctgtgaagtcagcggtgcggac

SEQ ID NO: 2125828 - DNA, 25 bp, Homo sapien
gtttgcagggagctcctgtgaagtc

SEQ ID NO: 2125829 - DNA, 25 bp, Homo sapien
actgtttgcagggagctcctgtgaa

SEQ ID NO: 2125830 - DNA, 25 bp, Homo sapien
tgaagtcagcggtgcggaccgcaca

SEQ ID NO: 2125831 - DNA, 25 bp, Homo sapien
tcttcgtttatttgaggtctcttgg

SEQ ID NO: 2125832 - DNA, 25 bp, Homo sapien
ttctaatccataggcatggaatgcc

SEQ ID NO: 2125833 - DNA, 25 bp, Homo sapien
agcctttaagtttctataacaatat

SEQ ID NO: 2125834 - DNA, 25 bp, Homo sapien
ggtctcttggggtcccatatgaatt

SEQ ID NO: 2125835 - DNA, 25 bp, Homo sapien
tgtgcatatttacgaggtacagagt

SEQ ID NO: 2125836 - DNA, 25 bp, Homo sapien
caatgtgtaatgactataccagagt

SEQ ID NO: 2125837 - DNA, 25 bp, Homo sapien
caatagatcactaaagcttcttgct

SEQ ID NO: 2125838 - DNA, 25 bp, Homo sapien
tcctcctatcgatctgtaatattgt

SEQ ID NO: 2125839 - DNA, 25 bp, Homo sapien
aatcaaaagcaatcccatgagccct

SEQ ID NO: 2125840 - DNA, 25 bp, Homo sapien
ctgcctcattggccaaaggccaggg

SEQ ID NO: 2125841 - DNA, 25 bp, Homo sapien
atcaaaagcaatcccatgagccctg

SEQ ID NO: 2125842 - DNA, 25 bp, Homo sapien
cctgcctcattggccaaaggccagg

SEQ ID NO: 2125843 - DNA, 25 bp, Homo sapien
tcaggaagcccaatcatccactccc

SEQ ID NO: 2125844 - DNA, 25 bp, Homo sapien
cctcaggaagcccaatcatccactc

SEQ ID NO: 2125845 - DNA, 25 bp, Homo sapien
aggaagcccaatcatccactccctc

SEQ ID NO: 2125846 - DNA, 25 bp, Homo sapien
gcccaatcatccactccctcccgga

SEQ ID NO: 2125847 - DNA, 25 bp, Homo sapien
cagtgatacccaaatggttgtggca

SEQ ID NO: 2125848 - DNA, 25 bp, Homo sapien
tagtcccatttagaggaggtctggc

SEQ ID NO: 2125849 - DNA, 25 bp, Homo sapien
gatagcagggctaagattagtccca

SEQ ID NO: 2125850 - DNA, 25 bp, Homo sapien
caccatactcatgagaagagggcac

SEQ ID NO: 2125851 - DNA, 25 bp, Homo sapien
tattggtccttgagccaggtgtctc

SEQ ID NO: 2125852 - DNA, 25 bp, Homo sapien
tgtctctttgatcgtgcccgctgct

SEQ ID NO: 2125853 - DNA, 25 bp, Homo sapien
actccttattggtccttgagccagg

SEQ ID NO: 2125854 - DNA, 25 bp, Homo sapien
cagcaggcaagaccctgaggcgttc

SEQ ID NO: 2125855 - DNA, 25 bp, Homo sapien
ttcctgacacggatgggagctttgg

SEQ ID NO: 2125856 - DNA, 25 bp, Homo sapien
cctgacacggatgggagctttggga

SEQ ID NO: 2125857 - DNA, 25 bp, Homo sapien
tcctgacacggatgggagctttggg

SEQ ID NO: 2125858 - DNA, 25 bp, Homo sapien
tgacacggatgggagctttgggagg

SEQ ID NO: 2125859 - DNA, 25 bp, Homo sapien
gaccaggaacagctttggtgagtct

SEQ ID NO: 2125860 - DNA, 25 bp, Homo sapien
accccacctccagtcgcaggtctca

SEQ ID NO: 2125861 - DNA, 25 bp, Homo sapien
aaagaccaggaacagctttggtgag

SEQ ID NO: 2125862 - DNA, 25 bp, Homo sapien
cttcaccccacctccagtcgcaggt

SEQ ID NO: 2125863 - DNA, 25 bp, Homo sapien
gtgaagatgtgggtctcgggctgca

SEQ ID NO: 2125864 - DNA, 25 bp, Homo sapien
agatgtgggtctcgggctgcagcat

SEQ ID NO: 2125865 - DNA, 25 bp, Homo sapien
aagatgtgggtctcgggctgcagca

SEQ ID NO: 2125866 - DNA, 25 bp, Homo sapien
tgaagatgtgggtctcgggctgcag

SEQ ID NO: 2125867 - DNA, 25 bp, Homo sapien
gatccccagaaggagaaaccagttg

SEQ ID NO: 2125868 - DNA, 25 bp, Homo sapien
cactggagtacagggcagagacaaa

SEQ ID NO: 2125869 - DNA, 25 bp, Homo sapien
cagaaggagaaaccagttgctgctc

SEQ ID NO: 2125870 - DNA, 25 bp, Homo sapien
caaggtcactggagtacagggcaga

SEQ ID NO: 2125871 - DNA, 25 bp, Homo sapien
gggctggaggatcagagttgagcat

SEQ ID NO: 2125872 - DNA, 25 bp, Homo sapien
ctgtggctgcagtagaagagggtca

SEQ ID NO: 2125873 - DNA, 25 bp, Homo sapien
gctgcagtagaagagggtcaagggt

SEQ ID NO: 2125874 - DNA, 25 bp, Homo sapien
tagaagagggtcaagggtggcacag

SEQ ID NO: 2125875 - DNA, 25 bp, Homo sapien
ggaaaggaaagtgcatgagagaata

SEQ ID NO: 2125876 - DNA, 25 bp, Homo sapien
tgctcttcccatccactaaactccg

SEQ ID NO: 2125877 - DNA, 25 bp, Homo sapien
taggcactgggaaactacacctctt

SEQ ID NO: 2125878 - DNA, 25 bp, Homo sapien
tcttcccaatacgacaagtgcccct

SEQ ID NO: 2125879 - DNA, 25 bp, Homo sapien
ctgagtgggcagaaaccaaagcctg

SEQ ID NO: 2125880 - DNA, 25 bp, Homo sapien
tgtattctcctttcagggagcaggc

SEQ ID NO: 2125881 - DNA, 25 bp, Homo sapien
tattctcctttcagggagcaggcta

SEQ ID NO: 2125882 - DNA, 25 bp, Homo sapien
cctgtattctcctttcagggagcag

SEQ ID NO: 2125883 - DNA, 25 bp, Homo sapien
attctcctttcagggagcaggctac

SEQ ID NO: 2125884 - DNA, 25 bp, Homo sapien
caacgacccccattccccagctatt

SEQ ID NO: 2125885 - DNA, 25 bp, Homo sapien
cacaacgacccccattccccagcta

SEQ ID NO: 2125886 - DNA, 25 bp, Homo sapien
acaacgacccccattccccagctat

SEQ ID NO: 2125887 - DNA, 25 bp, Homo sapien
gacccccattccccagctattccca

SEQ ID NO: 2125888 - DNA, 25 bp, Homo sapien
gagatgcatcccagatgtccaatag

SEQ ID NO: 2125889 - DNA, 25 bp, Homo sapien
gtccaataggcagcgagatggagct

SEQ ID NO: 2125890 - DNA, 25 bp, Homo sapien
tgtccaataggcagcgagatggagc

SEQ ID NO: 2125891 - DNA, 25 bp, Homo sapien
gatgtccaataggcagcgagatgga

SEQ ID NO: 2125892 - DNA, 25 bp, Homo sapien
catgagtgcacaggtatgtcagcaa

SEQ ID NO: 2125893 - DNA, 25 bp, Homo sapien
aaaaggccccagcatccaaaagagt

SEQ ID NO: 2125894 - DNA, 25 bp, Homo sapien
taaaaactctggcatatgaactcac

SEQ ID NO: 2125895 - DNA, 25 bp, Homo sapien
ttcagaaactggataccaaataggc

SEQ ID NO: 2125896 - DNA, 25 bp, Homo sapien
ttaaaaatcgaattattcgctgatt

SEQ ID NO: 2125897 - DNA, 25 bp, Homo sapien
gagttttgaaccttttattcaatgc

SEQ ID NO: 2125898 - DNA, 25 bp, Homo sapien
ccctctgactgatgtttgttgcttt

SEQ ID NO: 2125899 - DNA, 25 bp, Homo sapien
aatcgaattattcgctgatttaggg

SEQ ID NO: 2125900 - DNA, 25 bp, Homo sapien
caagttgtaattggatgtcatccga

SEQ ID NO: 2125901 - DNA, 25 bp, Homo sapien
catccgaatcaattgtcttgggtaa

SEQ ID NO: 2125902 - DNA, 25 bp, Homo sapien
tggatgtcatccgaatcaattgtct

SEQ ID NO: 2125903 - DNA, 25 bp, Homo sapien
aaggacaagttgtaattggatgtca

SEQ ID NO: 2125904 - DNA, 25 bp, Homo sapien
cctgtgccacccttgaccctcttct

SEQ ID NO: 2125905 - DNA, 25 bp, Homo sapien
cacttgtcgtattgggaagaggtgt

SEQ ID NO: 2125906 - DNA, 25 bp, Homo sapien
gcctattctctcatgcactttcctt

SEQ ID NO: 2125907 - DNA, 25 bp, Homo sapien
aagtctctgaccaggctttggtttc

SEQ ID NO: 2125908 - DNA, 25 bp, Homo sapien
tttccctatggatgtactgaggaca

SEQ ID NO: 2125909 - DNA, 25 bp, Homo sapien
tataggttgctgtgaccgctgccac

SEQ ID NO: 2125910 - DNA, 25 bp, Homo sapien
tgaccctagaagcatggatcccgtg

SEQ ID NO: 2125911 - DNA, 25 bp, Homo sapien
gaggacaaataaatacccgctgcac

SEQ ID NO: 2125912 - DNA, 25 bp, Homo sapien
attggcctttgtggcaagagcggga

SEQ ID NO: 2125913 - DNA, 25 bp, Homo sapien
aaggcagcgcaagagctcattggcc

SEQ ID NO: 2125914 - DNA, 25 bp, Homo sapien
tcagaccgtctgactggttctgact

SEQ ID NO: 2125915 - DNA, 25 bp, Homo sapien
tcattggtcgccagccacagcggcg

SEQ ID NO: 2125916 - DNA, 25 bp, Homo sapien
ataatggccaatttgccacatttac

SEQ ID NO: 2125917 - DNA, 25 bp, Homo sapien
tttgccacatttactgaatttcctg

SEQ ID NO: 2125918 - DNA, 25 bp, Homo sapien
catttactgaatttcctgattgtca

SEQ ID NO: 2125919 - DNA, 25 bp, Homo sapien
cacatttactgaatttcctgattgt

SEQ ID NO: 2125920 - DNA, 25 bp, Homo sapien
cttccacttgattgattcggctatt

SEQ ID NO: 2125921 - DNA, 25 bp, Homo sapien
tccacttgattgattcggctattga

SEQ ID NO: 2125922 - DNA, 25 bp, Homo sapien
ccacttgattgattcggctattgat

SEQ ID NO: 2125923 - DNA, 25 bp, Homo sapien
gaccatgtgaaagggaccacaaccg

SEQ ID NO: 2125924 - DNA, 25 bp, Homo sapien
tttaaagccttatgatcaccaagcc

SEQ ID NO: 2125925 - DNA, 25 bp, Homo sapien
gaagcaaagatgtatagctcaccac

SEQ ID NO: 2125926 - DNA, 25 bp, Homo sapien
ccacaaccggagctctagaagcaaa

SEQ ID NO: 2125927 - DNA, 25 bp, Homo sapien
agagttgatctctgtgagcctatca

SEQ ID NO: 2125928 - DNA, 25 bp, Homo sapien
taatcctgaggctacagagttgatc

SEQ ID NO: 2125929 - DNA, 25 bp, Homo sapien
tgggccgtgccctgaatgaggctct

SEQ ID NO: 2125930 - DNA, 25 bp, Homo sapien
tctgtgagcctatcatgggccgtgc

SEQ ID NO: 2125931 - DNA, 25 bp, Homo sapien
caggtctgtgcggtccgcaccgctg

SEQ ID NO: 2125932 - DNA, 25 bp, Homo sapien
gtccgcaccgctgacttcacaggag

SEQ ID NO: 2125933 - DNA, 25 bp, Homo sapien
tgtgcggtccgcaccgctgacttca

SEQ ID NO: 2125934 - DNA, 25 bp, Homo sapien
ggtccgcaccgctgacttcacagga

SEQ ID NO: 2125935 - DNA, 25 bp, Homo sapien
tagggaccaacaggacttcaatgaa

SEQ ID NO: 2125936 - DNA, 25 bp, Homo sapien
ggtagggaccaacaggacttcaatg

SEQ ID NO: 2125937 - DNA, 25 bp, Homo sapien
ggaccaacaggacttcaatgaagac

SEQ ID NO: 2125938 - DNA, 25 bp, Homo sapien
gggaccaacaggacttcaatgaaga

SEQ ID NO: 2125939 - DNA, 25 bp, Homo sapien
actggatgggtcctccgcggtgtca

SEQ ID NO: 2125940 - DNA, 25 bp, Homo sapien
agatacagcaaccaattcctcaggg

SEQ ID NO: 2125941 - DNA, 25 bp, Homo sapien
cagaggctggctccgaaggagctct

SEQ ID NO: 2125942 - DNA, 25 bp, Homo sapien
ctctcgcctgaagcacttgatgaaa

SEQ ID NO: 2125943 - DNA, 25 bp, Homo sapien
tcaggcccggtgaccgggacactgg

SEQ ID NO: 2125944 - DNA, 25 bp, Homo sapien
gctcggtcaccgttcacgcctgtgt

SEQ ID NO: 2125945 - DNA, 25 bp, Homo sapien
ggggctcggtcaccgttcacgcctg

SEQ ID NO: 2125946 - DNA, 25 bp, Homo sapien
catcagagggggctcggtcaccgtt

SEQ ID NO: 2125947 - DNA, 25 bp, Homo sapien
cctccacgccccattcagcccctct

SEQ ID NO: 2125948 - DNA, 25 bp, Homo sapien
ctccacgccccattcagcccctctg

SEQ ID NO: 2125949 - DNA, 25 bp, Homo sapien
cccctccacgccccattcagcccct

SEQ ID NO: 2125950 - DNA, 25 bp, Homo sapien
tccacgccccattcagcccctctgc

SEQ ID NO: 2125951 - DNA, 25 bp, Homo sapien
gtagggaccgacaggacttcgttga

SEQ ID NO: 2125952 - DNA, 25 bp, Homo sapien
gaccgacaggacttcgttgaagaca

SEQ ID NO: 2125953 - DNA, 25 bp, Homo sapien
cgacaggacttcgttgaagacaccg

SEQ ID NO: 2125954 - DNA, 25 bp, Homo sapien
gggaccgacaggacttcgttgaaga

SEQ ID NO: 2125955 - DNA, 25 bp, Homo sapien
gtcagcaggtggaaggaagggagtg

SEQ ID NO: 2125956 - DNA, 25 bp, Homo sapien
gtggaaggaagggagtgaagatcat

SEQ ID NO: 2125957 - DNA, 25 bp, Homo sapien
ggtggaaggaagggagtgaagatca

SEQ ID NO: 2125958 - DNA, 25 bp, Homo sapien
caggtcagcaggtggaaggaaggga

SEQ ID NO: 2125959 - DNA, 25 bp, Homo sapien
ccaccggatgggtcctccgtggcgt

SEQ ID NO: 2125960 - DNA, 25 bp, Homo sapien
tgggtcctccgtggcgtcagacaca

SEQ ID NO: 2125961 - DNA, 25 bp, Homo sapien
ccacccattcctcagggtcgttttg

SEQ ID NO: 2125962 - DNA, 25 bp, Homo sapien
cattcctcagggtcgttttgcagcc

SEQ ID NO: 2125963 - DNA, 25 bp, Homo sapien
cagagtgacaagtggaccctcggga

SEQ ID NO: 2125964 - DNA, 25 bp, Homo sapien
gcagagtgacaagtggaccctcggg

SEQ ID NO: 2125965 - DNA, 25 bp, Homo sapien
gtggtctcagattccgagtgcccgg

SEQ ID NO: 2125966 - DNA, 25 bp, Homo sapien
ctgtggctccggtggtctcagattc

SEQ ID NO: 2125967 - DNA, 25 bp, Homo sapien
ctgtgtctgtggctccggtggtctc

SEQ ID NO: 2125968 - DNA, 25 bp, Homo sapien
ctcagattccgagtgcccggtatcc

SEQ ID NO: 2125969 - DNA, 25 bp, Homo sapien
agcagcagaaggggcttggtcaccg

SEQ ID NO: 2125970 - DNA, 25 bp, Homo sapien
gcagcagaaggggcttggtcaccgt

SEQ ID NO: 2125971 - DNA, 25 bp, Homo sapien
ttatttcaggcctggtgactgggac

SEQ ID NO: 2125972 - DNA, 25 bp, Homo sapien
catttatttcaggcctggtgactgg

SEQ ID NO: 2125973 - DNA, 25 bp, Homo sapien
tatttcaggcctggtgactgggaca

SEQ ID NO: 2125974 - DNA, 25 bp, Homo sapien
tttatttcaggcctggtgactggga

SEQ ID NO: 2125975 - DNA, 25 bp, Homo sapien
ttcacccgacgtgttgaaagttaca

SEQ ID NO: 2125976 - DNA, 25 bp, Homo sapien
cccgacgtgttgaaagttacatcaa

SEQ ID NO: 2125977 - DNA, 25 bp, Homo sapien
cgtgttgaaagttacatcaaatgcc

SEQ ID NO: 2125978 - DNA, 25 bp, Homo sapien
cccacttcacccgacgtgttgaaag

SEQ ID NO: 2125979 - DNA, 25 bp, Homo sapien
aaaactcaccattgattggccacag

SEQ ID NO: 2125980 - DNA, 25 bp, Homo sapien
agctgccagctgtggaaaactcacc

SEQ ID NO: 2125981 - DNA, 25 bp, Homo sapien
ccaggacccaggaacaagcagcgct

SEQ ID NO: 2125982 - DNA, 25 bp, Homo sapien
aggacccaggaacaagcagcgctgc

SEQ ID NO: 2125983 - DNA, 25 bp, Homo sapien
ttattccgtcgtcattcctgcatgt

SEQ ID NO: 2125984 - DNA, 25 bp, Homo sapien
attccgtcgtcattcctgcatgtaa

SEQ ID NO: 2125985 - DNA, 25 bp, Homo sapien
tattccgtcgtcattcctgcatgta

SEQ ID NO: 2125986 - DNA, 25 bp, Homo sapien
tgacaagtgccagtgttagtgccag

SEQ ID NO: 2125987 - DNA, 25 bp, Homo sapien
tccagggcctatgccatggctgaag

SEQ ID NO: 2125988 - DNA, 25 bp, Homo sapien
tcctttccgtggcagtaaatgaggc

SEQ ID NO: 2125989 - DNA, 25 bp, Homo sapien
aatgcaagtgccagttgccagtgcc

SEQ ID NO: 2125990 - DNA, 25 bp, Homo sapien
cttcttctgaggcatggagcccctg

SEQ ID NO: 2125991 - DNA, 25 bp, Homo sapien
ggggacaccaagtgctccccggagc

SEQ ID NO: 2125992 - DNA, 25 bp, Homo sapien
tctgaggcatggagcccctgctcag

SEQ ID NO: 2125993 - DNA, 25 bp, Homo sapien
tcttctgaggcatggagcccctgct

SEQ ID NO: 2125994 - DNA, 25 bp, Homo sapien
gccgaatgcccgtggacgcgcatct

SEQ ID NO: 2125995 - DNA, 25 bp, Homo sapien
cgtccgcggtagaggtgacacccag

SEQ ID NO: 2125996 - DNA, 25 bp, Homo sapien
aatgcccgtggacgcgcatctcttc

SEQ ID NO: 2125997 - DNA, 25 bp, Homo sapien
gccaaagccgcaggtgagaacgtcc

SEQ ID NO: 2125998 - DNA, 25 bp, Homo sapien
cgcggcgacgtcactgtcctctcgg

SEQ ID NO: 2125999 - DNA, 25 bp, Homo sapien
gggtcttcttagcagccgccgcagc

SEQ ID NO: 2126000 - DNA, 25 bp, Homo sapien
ctggggctccgggtcttcttagcag

SEQ ID NO: 2126001 - DNA, 25 bp, Homo sapien
cgacgtcactgtcctctcggcctgg

SEQ ID NO: 2126002 - DNA, 25 bp, Homo sapien
tggagctgctcagaggcaactgata

SEQ ID NO: 2126003 - DNA, 25 bp, Homo sapien
ctgtagaagagaccaccaaggcagg

SEQ ID NO: 2126004 - DNA, 25 bp, Homo sapien
ctgctcagaggcaactgatagtggg

SEQ ID NO: 2126005 - DNA, 25 bp, Homo sapien
tggtggtgcatgggaaggctggagc

SEQ ID NO: 2126006 - DNA, 25 bp, Homo sapien
tcagcttgggtcatcctctggtggc

SEQ ID NO: 2126007 - DNA, 25 bp, Homo sapien
tctggtggcccctcttcaaaagtgt

SEQ ID NO: 2126008 - DNA, 25 bp, Homo sapien
cccctcttcaaaagtgtaaagcatt

SEQ ID NO: 2126009 - DNA, 25 bp, Homo sapien
ttgggtcatcctctggtggcccctc

SEQ ID NO: 2126010 - DNA, 25 bp, Homo sapien
gggtgtattgccaagccctctctgc

SEQ ID NO: 2126011 - DNA, 25 bp, Homo sapien
ttaccatctcatagagaagagttct

SEQ ID NO: 2126012 - DNA, 25 bp, Homo sapien
agagttctttcctagcagggtgtat

SEQ ID NO: 2126013 - DNA, 25 bp, Homo sapien
ccatggtttgttaaccagcaggaat

SEQ ID NO: 2126014 - DNA, 25 bp, Homo sapien
ggatgagaagagctcctcggcccat

SEQ ID NO: 2126015 - DNA, 25 bp, Homo sapien
aggatgagaagagctcctcggccca

SEQ ID NO: 2126016 - DNA, 25 bp, Homo sapien
ggggatgtggcgaggatgagaagag

SEQ ID NO: 2126017 - DNA, 25 bp, Homo sapien
gggatgtggcgaggatgagaagagc

SEQ ID NO: 2126018 - DNA, 25 bp, Homo sapien
catttccaggttggtgtccaagagg

SEQ ID NO: 2126019 - DNA, 25 bp, Homo sapien
tttccaggttggtgtccaagaggga

SEQ ID NO: 2126020 - DNA, 25 bp, Homo sapien
ccaggttggtgtccaagagggacct

SEQ ID NO: 2126021 - DNA, 25 bp, Homo sapien
tccaggttggtgtccaagagggacc

SEQ ID NO: 2126022 - DNA, 25 bp, Homo sapien
cgaggcagtgagaactcttcgtcgc

SEQ ID NO: 2126023 - DNA, 25 bp, Homo sapien
ctcttcgtcgctggctggaaagcat

SEQ ID NO: 2126024 - DNA, 25 bp, Homo sapien
agtgagaactcttcgtcgctggctg

SEQ ID NO: 2126025 - DNA, 25 bp, Homo sapien
gagaactcttcgtcgctggctggaa

SEQ ID NO: 2126026 - DNA, 25 bp, Homo sapien
caaccgtgaacctgaggaagtgact

SEQ ID NO: 2126027 - DNA, 25 bp, Homo sapien
catacatgatagaacaaccgtgaac

SEQ ID NO: 2126028 - DNA, 25 bp, Homo sapien
tggctggatcttggcagtcatacat

SEQ ID NO: 2126029 - DNA, 25 bp, Homo sapien
tgccttctttgggtaagtaaagctg

SEQ ID NO: 2126030 - DNA, 25 bp, Homo sapien
aggagcgcgccggtgcgagtcgccg

SEQ ID NO: 2126031 - DNA, 25 bp, Homo sapien
ccaggagcgcgccggtgcgagtcgc

SEQ ID NO: 2126032 - DNA, 25 bp, Homo sapien
gagcgcgccggtgcgagtcgccgca

SEQ ID NO: 2126033 - DNA, 25 bp, Homo sapien
gtgctgccaggagcgcgccggtgcg

SEQ ID NO: 2126034 - DNA, 25 bp, Homo sapien
tgtcgctgctgtcgccacggtcgcc

SEQ ID NO: 2126035 - DNA, 25 bp, Homo sapien
ttccgcctccgccacggaggcctcc

SEQ ID NO: 2126036 - DNA, 25 bp, Homo sapien
tcagcctctacctctgcttccgcct

SEQ ID NO: 2126037 - DNA, 25 bp, Homo sapien
ctgccgcgacctcccttcccgcgag

SEQ ID NO: 2126038 - DNA, 25 bp, Homo sapien
cgccacctcggccgccaccttcgca

SEQ ID NO: 2126039 - DNA, 25 bp, Homo sapien
gccacctcggccgccaccttcgcat

SEQ ID NO: 2126040 - DNA, 25 bp, Homo sapien
actgaacttctcgtacagcattgcc

SEQ ID NO: 2126041 - DNA, 25 bp, Homo sapien
ccgcttggcgtccaccggttgctgg

SEQ ID NO: 2126042 - DNA, 25 bp, Homo sapien
ggaccacatgatgcgcactggcctg

SEQ ID NO: 2126043 - DNA, 25 bp, Homo sapien
tggcgtccaccggttgctggtagtt

SEQ ID NO: 2126044 - DNA, 25 bp, Homo sapien
ccaccggttgctggtagttgacata

SEQ ID NO: 2126045 - DNA, 25 bp, Homo sapien
gcttttggaagtgcacgaacccgta

SEQ ID NO: 2126046 - DNA, 25 bp, Homo sapien
tttatgcgacttgaatctcccgacg

SEQ ID NO: 2126047 - DNA, 25 bp, Homo sapien
cacaggccactttgcaggagaggat

SEQ ID NO: 2126048 - DNA, 25 bp, Homo sapien
ccgagaagatgttgtacagcgcctt

SEQ ID NO: 2126049 - DNA, 25 bp, Homo sapien
tactctttactagctgcgctggccg

SEQ ID NO: 2126050 - DNA, 25 bp, Homo sapien
gatacactggagcactctgcaggca

SEQ ID NO: 2126051 - DNA, 25 bp, Homo sapien
tacagaaatgttaaggtccacggat

SEQ ID NO: 2126052 - DNA, 25 bp, Homo sapien
cagttaaggagaccaccgggatgct

SEQ ID NO: 2126053 - DNA, 25 bp, Homo sapien
ttatcccttcggtctacagcggagc

SEQ ID NO: 2126054 - DNA, 25 bp, Homo sapien
cattgaggacagtactagagacagg

SEQ ID NO: 2126055 - DNA, 25 bp, Homo sapien
ttgagtgtattctcaaggccacccc

SEQ ID NO: 2126056 - DNA, 25 bp, Homo sapien
ttcataaatatccaggcgacccgag

SEQ ID NO: 2126057 - DNA, 25 bp, Homo sapien
tgggaccaggcacttcattctagag

SEQ ID NO: 2126058 - DNA, 25 bp, Homo sapien
gcacttacagtcctctgctgacact

SEQ ID NO: 2126059 - DNA, 25 bp, Homo sapien
agaatacgtgctgggcaggtgaaat

SEQ ID NO: 2126060 - DNA, 25 bp, Homo sapien
gtgaaattctatggccaccgtcgtc

SEQ ID NO: 2126061 - DNA, 25 bp, Homo sapien
tccaatcacatagcacttacagtcc

SEQ ID NO: 2126062 - DNA, 25 bp, Homo sapien
tgtgtggacggtgtgaattgacaga

SEQ ID NO: 2126063 - DNA, 25 bp, Homo sapien
caacgagcaattcacgggaagaggc

SEQ ID NO: 2126064 - DNA, 25 bp, Homo sapien
tatttagaggaatttggtagtggcg

SEQ ID NO: 2126065 - DNA, 25 bp, Homo sapien
tccctgcagctatgcaacgagcaat

SEQ ID NO: 2126066 - DNA, 25 bp, Homo sapien
ggccacattcaaacgctttccaatt

SEQ ID NO: 2126067 - DNA, 25 bp, Homo sapien
agggccacattcaaacgctttccaa

SEQ ID NO: 2126068 - DNA, 25 bp, Homo sapien
cagggccacattcaaacgctttcca

SEQ ID NO: 2126069 - DNA, 25 bp, Homo sapien
aacagggccacattcaaacgctttc

SEQ ID NO: 2126070 - DNA, 25 bp, Homo sapien
gggcaggttctgaccctagggatca

SEQ ID NO: 2126071 - DNA, 25 bp, Homo sapien
ttttctgagcatacatattgcctgg

SEQ ID NO: 2126072 - DNA, 25 bp, Homo sapien
cacatacatggctgttgcaggaagt

SEQ ID NO: 2126073 - DNA, 25 bp, Homo sapien
tattgcctgggcttatatgttgctt

SEQ ID NO: 2126074 - DNA, 25 bp, Homo sapien
taataacagcttgttcataggctct

SEQ ID NO: 2126075 - DNA, 25 bp, Homo sapien
taaaacttggatgcttaagaggcct

SEQ ID NO: 2126076 - DNA, 25 bp, Homo sapien
tgtcatgtagctattaatctgtggc

SEQ ID NO: 2126077 - DNA, 25 bp, Homo sapien
gccctgaaattaactgccctagata

SEQ ID NO: 2126078 - DNA, 25 bp, Homo sapien
gaggtttggtctcccgatctctgtg

SEQ ID NO: 2126079 - DNA, 25 bp, Homo sapien
gatagctgcgtaatcatactgcggc

SEQ ID NO: 2126080 - DNA, 25 bp, Homo sapien
tgtggtagccaccttaggcgtgtac

SEQ ID NO: 2126081 - DNA, 25 bp, Homo sapien
tcttttatccccgagcagcctggat

SEQ ID NO: 2126082 - DNA, 25 bp, Homo sapien
gcggcgatggcactgttccgaccca

SEQ ID NO: 2126083 - DNA, 25 bp, Homo sapien
cggcggcgatggcactgttccgacc

SEQ ID NO: 2126084 - DNA, 25 bp, Homo sapien
cggcgatggcactgttccgacccac

SEQ ID NO: 2126085 - DNA, 25 bp, Homo sapien
ggcggcgatggcactgttccgaccc

SEQ ID NO: 2126086 - DNA, 25 bp, Homo sapien
acgcaataaaaagggtcccgcatgc

SEQ ID NO: 2126087 - DNA, 25 bp, Homo sapien
tacgcaataaaaagggtcccgcatg

SEQ ID NO: 2126088 - DNA, 25 bp, Homo sapien
cgcaataaaaagggtcccgcatgca

SEQ ID NO: 2126089 - DNA, 25 bp, Homo sapien
gcaataaaaagggtcccgcatgcac

SEQ ID NO: 2126090 - DNA, 25 bp, Homo sapien
tgtttctttcttcattctcgaagcc

SEQ ID NO: 2126091 - DNA, 25 bp, Homo sapien
tctttcttcattctcgaagcctgtt

SEQ ID NO: 2126092 - DNA, 25 bp, Homo sapien
tttctttcttcattctcgaagcctg

SEQ ID NO: 2126093 - DNA, 25 bp, Homo sapien
tctccttggcaagcttctgtttctt

SEQ ID NO: 2126094 - DNA, 25 bp, Homo sapien
tcaaagaagaacttctgaacagctt

SEQ ID NO: 2126095 - DNA, 25 bp, Homo sapien
aagaagaacttctgaacagcttcag

SEQ ID NO: 2126096 - DNA, 25 bp, Homo sapien
cttcaaagaagaacttctgaacagc

SEQ ID NO: 2126097 - DNA, 25 bp, Homo sapien
agaagaacttctgaacagcttcagc

SEQ ID NO: 2126098 - DNA, 25 bp, Homo sapien
agctgtgagtacttacaattctctg

SEQ ID NO: 2126099 - DNA, 25 bp, Homo sapien
aactgagattttattatgttgacat

SEQ ID NO: 2126100 - DNA, 25 bp, Homo sapien
ttaactgagattttattatgttgac

SEQ ID NO: 2126101 - DNA, 25 bp, Homo sapien
tatttttaactgagattttattatg

SEQ ID NO: 2126102 - DNA, 25 bp, Homo sapien
ttttaactgagattttattatgttg

SEQ ID NO: 2126103 - DNA, 25 bp, Homo sapien
atgtactgtttaactatgattcagg

SEQ ID NO: 2126104 - DNA, 25 bp, Homo sapien
tactgtttaactatgattcaggaat

SEQ ID NO: 2126105 - DNA, 25 bp, Homo sapien
cagcaaaatgtgccccctaaaaaca

SEQ ID NO: 2126106 - DNA, 25 bp, Homo sapien
cctaaaaacatgtacactcttcagt

SEQ ID NO: 2126107 - DNA, 25 bp, Homo sapien
tagctgcctggttagtcactgacca

SEQ ID NO: 2126108 - DNA, 25 bp, Homo sapien
tctaactgcccctctatacatgtct

SEQ ID NO: 2126109 - DNA, 25 bp, Homo sapien
tgcccctctatacatgtctgggctg

SEQ ID NO: 2126110 - DNA, 25 bp, Homo sapien
ttcttagctgcctggttagtcactg

SEQ ID NO: 2126111 - DNA, 25 bp, Homo sapien
tatctgcatgatataccaattttct

SEQ ID NO: 2126112 - DNA, 25 bp, Homo sapien
gcatgatataccaattttctcaatc

SEQ ID NO: 2126113 - DNA, 25 bp, Homo sapien
cagttgaggcacaagcaataataaa

SEQ ID NO: 2126114 - DNA, 25 bp, Homo sapien
aacagttgaggcacaagcaataata

SEQ ID NO: 2126115 - DNA, 25 bp, Homo sapien
atgatggtacagcaggtgacctggt

SEQ ID NO: 2126116 - DNA, 25 bp, Homo sapien
actgaagttgcagtaagagaaacaa

SEQ ID NO: 2126117 - DNA, 25 bp, Homo sapien
gtttaggaaactgaagttgcagtaa

SEQ ID NO: 2126118 - DNA, 25 bp, Homo sapien
gagaaacaatagcaggagtcctcca

SEQ ID NO: 2126119 - DNA, 25 bp, Homo sapien
gtctttgtctaaagtgaaggagaaa

SEQ ID NO: 2126120 - DNA, 25 bp, Homo sapien
gtgaaggagaaatataagaaagcca

SEQ ID NO: 2126121 - DNA, 25 bp, Homo sapien
ctgtctttgtctaaagtgaaggaga

SEQ ID NO: 2126122 - DNA, 25 bp, Homo sapien
aagtgaaggagaaatataagaaagc

SEQ ID NO: 2126123 - DNA, 25 bp, Homo sapien
ggtgaaccatgttacaagctgacac

SEQ ID NO: 2126124 - DNA, 25 bp, Homo sapien
tcctttacgccttcccctgcaggtg

SEQ ID NO: 2126125 - DNA, 25 bp, Homo sapien
tgcccttattccctgatcctttacg

SEQ ID NO: 2126126 - DNA, 25 bp, Homo sapien
atgttacaagctgacacttccatgg

SEQ ID NO: 2126127 - DNA, 25 bp, Homo sapien
gctgcaggtcctctggcggcagtac

SEQ ID NO: 2126128 - DNA, 25 bp, Homo sapien
tcctctggcggcagtaccggttgac

SEQ ID NO: 2126129 - DNA, 25 bp, Homo sapien
cagtaccggttgactcagctaggga

SEQ ID NO: 2126130 - DNA, 25 bp, Homo sapien
ctccacctgacactttggctgcagg

SEQ ID NO: 2126131 - DNA, 25 bp, Homo sapien
gcttagcagtctctgggtagcagtg

SEQ ID NO: 2126132 - DNA, 25 bp, Homo sapien
ttagcagtctctgggtagcagtggc

SEQ ID NO: 2126133 - DNA, 25 bp, Homo sapien
gtctctgggtagcagtggcggcagg

SEQ ID NO: 2126134 - DNA, 25 bp, Homo sapien
cagtctctgggtagcagtggcggca

SEQ ID NO: 2126135 - DNA, 25 bp, Homo sapien
cagcttgctccattagtttggcctt

SEQ ID NO: 2126136 - DNA, 25 bp, Homo sapien
ctcagcttgctccattagtttggcc

SEQ ID NO: 2126137 - DNA, 25 bp, Homo sapien
tcatctccttgctcagtgatagatt

SEQ ID NO: 2126138 - DNA, 25 bp, Homo sapien
atctccttgctcagtgatagatttc

SEQ ID NO: 2126139 - DNA, 25 bp, Homo sapien
aatacttaaaagaccctccaagatg

SEQ ID NO: 2126140 - DNA, 25 bp, Homo sapien
atacttaaaagaccctccaagatga

SEQ ID NO: 2126141 - DNA, 25 bp, Homo sapien
tagtgtccttttattttcaaataga

SEQ ID NO: 2126142 - DNA, 25 bp, Homo sapien
ctctctgtgaagcattggggatcaa

SEQ ID NO: 2126143 - DNA, 25 bp, Homo sapien
aagtacatttccaaaagagatagtg

SEQ ID NO: 2126144 - DNA, 25 bp, Homo sapien
gatcaagtacatttccaaaagagat

SEQ ID NO: 2126145 - DNA, 25 bp, Homo sapien
ccttgtaagagagcaggctttatct

SEQ ID NO: 2126146 - DNA, 25 bp, Homo sapien
taaatgtgtcaaattcagcaatggc

SEQ ID NO: 2126147 - DNA, 25 bp, Homo sapien
tgtgctaaatgtgtcaaattcagca

SEQ ID NO: 2126148 - DNA, 25 bp, Homo sapien
gaatctcataatggaatacagaaaa

SEQ ID NO: 2126149 - DNA, 25 bp, Homo sapien
tgagaagtactagaccaaaaagtcc

SEQ ID NO: 2126150 - DNA, 25 bp, Homo sapien
gacaagcataagtctgcagccacgg

SEQ ID NO: 2126151 - DNA, 25 bp, Homo sapien
cagacagtttgtttggtggttgaaa

SEQ ID NO: 2126152 - DNA, 25 bp, Homo sapien
tggtgcctttacaccttccagagag

SEQ ID NO: 2126153 - DNA, 25 bp, Homo sapien
tgtgcttggagaacccttcctgtca

SEQ ID NO: 2126154 - DNA, 25 bp, Homo sapien
gaagtctgtcacttagcagagattg

SEQ ID NO: 2126155 - DNA, 25 bp, Homo sapien
cagcctgatgccagttggagcttta

SEQ ID NO: 2126156 - DNA, 25 bp, Homo sapien
agcagagattgagcactgtgcttgg

SEQ ID NO: 2126157 - DNA, 25 bp, Homo sapien
gtcttcatgcctaatttcagtaagt

SEQ ID NO: 2126158 - DNA, 25 bp, Homo sapien
tctctttcagagaccccaataggag

SEQ ID NO: 2126159 - DNA, 25 bp, Homo sapien
ccccaataggagatctggtcttttc

SEQ ID NO: 2126160 - DNA, 25 bp, Homo sapien
tgttctctaatctcgtcttcatgcc

SEQ ID NO: 2126161 - DNA, 25 bp, Homo sapien
tctccaaaagacagcttccgtacat

SEQ ID NO: 2126162 - DNA, 25 bp, Homo sapien
catatagtgcgagaaagccggtgcc

SEQ ID NO: 2126163 - DNA, 25 bp, Homo sapien
gctgggcatatgaggataccccata

SEQ ID NO: 2126164 - DNA, 25 bp, Homo sapien
attggaggctggcatcggactccca

SEQ ID NO: 2126165 - DNA, 25 bp, Homo sapien
ggctcatgagagtgcccgggtacat

SEQ ID NO: 2126166 - DNA, 25 bp, Homo sapien
ctagaggtcacgtcgttcaccggca

SEQ ID NO: 2126167 - DNA, 25 bp, Homo sapien
ccattgtactagacggcccaggata

SEQ ID NO: 2126168 - DNA, 25 bp, Homo sapien
cccaagttgctgtagtcggtcgagc

SEQ ID NO: 2126169 - DNA, 25 bp, Homo sapien
gatacacgctccagtcttctcgcgg

SEQ ID NO: 2126170 - DNA, 25 bp, Homo sapien
ggatggtgatatatctattgcaatg

SEQ ID NO: 2126171 - DNA, 25 bp, Homo sapien
tttgatgatcagtgtaaactacacg

SEQ ID NO: 2126172 - DNA, 25 bp, Homo sapien
cagtgtaaactacacgatacttttc

SEQ ID NO: 2126173 - DNA, 25 bp, Homo sapien
tttctctggatggtgatatatctat

SEQ ID NO: 2126174 - DNA, 25 bp, Homo sapien
tgtctctcggaaaggcccaggttaa

SEQ ID NO: 2126175 - DNA, 25 bp, Homo sapien
ctgtctctcggaaaggcccaggtta

SEQ ID NO: 2126176 - DNA, 25 bp, Homo sapien
gtgttaggtagttccccagggctga

SEQ ID NO: 2126177 - DNA, 25 bp, Homo sapien
cctgctgtatctcaataggttgaaa

SEQ ID NO: 2126178 - DNA, 25 bp, Homo sapien
cattcggagactataacctgctgta

SEQ ID NO: 2126179 - DNA, 25 bp, Homo sapien
taggttgaaatccacgaacagcaga

SEQ ID NO: 2126180 - DNA, 25 bp, Homo sapien
cctccacagttccagccagaaaaga

SEQ ID NO: 2126181 - DNA, 25 bp, Homo sapien
ttccttaaagctttctggcacagca

SEQ ID NO: 2126182 - DNA, 25 bp, Homo sapien
tccttaaagctttctggcacagcag

SEQ ID NO: 2126183 - DNA, 25 bp, Homo sapien
cagttccagccagaaaagacttcat

SEQ ID NO: 2126184 - DNA, 25 bp, Homo sapien
ttgggttctgcaggttggtagacat

SEQ ID NO: 2126185 - DNA, 25 bp, Homo sapien
ggttctgcaggttggtagacattgc

SEQ ID NO: 2126186 - DNA, 25 bp, Homo sapien
tgggttctgcaggttggtagacatt

SEQ ID NO: 2126187 - DNA, 25 bp, Homo sapien
ttctgcaggttggtagacattgcca

SEQ ID NO: 2126188 - DNA, 25 bp, Homo sapien
ttgaaggaccaaaagaagcaatttg

SEQ ID NO: 2126189 - DNA, 25 bp, Homo sapien
atttgaaggaccaaaagaagcaatt

SEQ ID NO: 2126190 - DNA, 25 bp, Homo sapien
taatttgaaggaccaaaagaagcaa

SEQ ID NO: 2126191 - DNA, 25 bp, Homo sapien
aatttgaaggaccaaaagaagcaat

SEQ ID NO: 2126192 - DNA, 25 bp, Homo sapien
tttattgaggatttaacttcaatgt

SEQ ID NO: 2126193 - DNA, 25 bp, Homo sapien
aagaggaatccctatttttctattg

SEQ ID NO: 2126194 - DNA, 25 bp, Homo sapien
taaatcgaggagtagatggagaaga

SEQ ID NO: 2126195 - DNA, 25 bp, Homo sapien
gaatagtaaatcgaggagtagatgg

SEQ ID NO: 2126196 - DNA, 25 bp, Homo sapien
ttaagaatagtaaatcgaggagtag

SEQ ID NO: 2126197 - DNA, 25 bp, Homo sapien
tagtaaatcgaggagtagatggaga

SEQ ID NO: 2126198 - DNA, 25 bp, Homo sapien
cgctagaggtgaactccaaggagtt

SEQ ID NO: 2126199 - DNA, 25 bp, Homo sapien
ggccgctagaggtgaactccaagga

SEQ ID NO: 2126200 - DNA, 25 bp, Homo sapien
tatccaggtccggtctgcgggtgct

SEQ ID NO: 2126201 - DNA, 25 bp, Homo sapien
ccaaggagttatccaggtccggtct

SEQ ID NO: 2126202 - DNA, 25 bp, Homo sapien
caagaggagggggaacgaaatgaag

SEQ ID NO: 2126203 - DNA, 25 bp, Homo sapien
agaggagggggaacgaaatgaagag

SEQ ID NO: 2126204 - DNA, 25 bp, Homo sapien
gcaagaggagggggaacgaaatgaa

SEQ ID NO: 2126205 - DNA, 25 bp, Homo sapien
tgcaagaggagggggaacgaaatga

SEQ ID NO: 2126206 - DNA, 25 bp, Homo sapien
tcccggagaagagtttgaacctgcc

SEQ ID NO: 2126207 - DNA, 25 bp, Homo sapien
gccacgctcccggagaagagtttga

SEQ ID NO: 2126208 - DNA, 25 bp, Homo sapien
cacgctcccggagaagagtttgaac

SEQ ID NO: 2126209 - DNA, 25 bp, Homo sapien
acgtgacctcgcgatcgccgccacg

SEQ ID NO: 2126210 - DNA, 25 bp, Homo sapien
tggtgtcgaactccgccatgttggg

SEQ ID NO: 2126211 - DNA, 25 bp, Homo sapien
ctccagttccgagatggtgtcgaac

SEQ ID NO: 2126212 - DNA, 25 bp, Homo sapien
tccagttccgagatggtgtcgaact

SEQ ID NO: 2126213 - DNA, 25 bp, Homo sapien
cctccagttccgagatggtgtcgaa

SEQ ID NO: 2126214 - DNA, 25 bp, Homo sapien
tcgtcatcgtcgggcccagataccg

SEQ ID NO: 2126215 - DNA, 25 bp, Homo sapien
cgtcatcgtcgggcccagataccga

SEQ ID NO: 2126216 - DNA, 25 bp, Homo sapien
tcatcgtcgggcccagataccgacg

SEQ ID NO: 2126217 - DNA, 25 bp, Homo sapien
atcgtcgggcccagataccgacgac

SEQ ID NO: 2126218 - DNA, 25 bp, Homo sapien
cgaggcgggggcggcgcttcctcct

SEQ ID NO: 2126219 - DNA, 25 bp, Homo sapien
gaggcgggggcggcgcttcctcctc

SEQ ID NO: 2126220 - DNA, 25 bp, Homo sapien
gcgggggcggcgcttcctcctcctc

SEQ ID NO: 2126221 - DNA, 25 bp, Homo sapien
cgggggcggcgcttcctcctcctct

SEQ ID NO: 2126222 - DNA, 25 bp, Homo sapien
cgcactaatacagggtcgggagcat

SEQ ID NO: 2126223 - DNA, 25 bp, Homo sapien
tacagggtcgggagcatatctccgc

SEQ ID NO: 2126224 - DNA, 25 bp, Homo sapien
agcatatctccgcagatgctcctcg

SEQ ID NO: 2126225 - DNA, 25 bp, Homo sapien
ggcaccccgcactaatacagggtcg

SEQ ID NO: 2126226 - DNA, 25 bp, Homo sapien
taggctatctgcaaaattcttggac

SEQ ID NO: 2126227 - DNA, 25 bp, Homo sapien
taaaaccgtgcaataagttggcatc

SEQ ID NO: 2126228 - DNA, 25 bp, Homo sapien
gtctccctagtgacaaaaggaatgg

SEQ ID NO: 2126229 - DNA, 25 bp, Homo sapien
tacctgtgcagggtcgaatggaacc

SEQ ID NO: 2126230 - DNA, 25 bp, Homo sapien
accagacaaatgaactgtccactgc

SEQ ID NO: 2126231 - DNA, 25 bp, Homo sapien
cagacaaatgaactgtccactgctt

SEQ ID NO: 2126232 - DNA, 25 bp, Homo sapien
gacaaatgaactgtccactgcttcc

SEQ ID NO: 2126233 - DNA, 25 bp, Homo sapien
caaatgaactgtccactgcttccat

SEQ ID NO: 2126234 - DNA, 25 bp, Homo sapien
ctcttttccagtacactcagtgaaa

SEQ ID NO: 2126235 - DNA, 25 bp, Homo sapien
tcttttccagtacactcagtgaaat

SEQ ID NO: 2126236 - DNA, 25 bp, Homo sapien
gctttcacgtctgtgctcgaccaat

SEQ ID NO: 2126237 - DNA, 25 bp, Homo sapien
tgtgctcgaccaattttgagaaaac

SEQ ID NO: 2126238 - DNA, 25 bp, Homo sapien
cctgttagaacggagggaaattcag

SEQ ID NO: 2126239 - DNA, 25 bp, Homo sapien
tatcaaacttgttgctcaagccaaa

SEQ ID NO: 2126240 - DNA, 25 bp, Homo sapien
tagaacggagggaaattcagtatca

SEQ ID NO: 2126241 - DNA, 25 bp, Homo sapien
tcagtatcaaacttgttgctcaagc

SEQ ID NO: 2126242 - DNA, 25 bp, Homo sapien
ccttgcctctatccatcacattcct

SEQ ID NO: 2126243 - DNA, 25 bp, Homo sapien
acattgaccgggagagcctttttca

SEQ ID NO: 2126244 - DNA, 25 bp, Homo sapien
agcagccatttcacattgaccggga

SEQ ID NO: 2126245 - DNA, 25 bp, Homo sapien
aacatgcattcacacggccaatgct

SEQ ID NO: 2126246 - DNA, 25 bp, Homo sapien
gcagcagagacaaccacacagcagc

SEQ ID NO: 2126247 - DNA, 25 bp, Homo sapien
tggaggccactaagccctcttttcc

SEQ ID NO: 2126248 - DNA, 25 bp, Homo sapien
cactagagtctcctccagaaattgg

SEQ ID NO: 2126249 - DNA, 25 bp, Homo sapien
gagggaatttggaggccactaagcc

SEQ ID NO: 2126250 - DNA, 25 bp, Homo sapien
cagaaattggtgagtgagggaattt

SEQ ID NO: 2126251 - DNA, 25 bp, Homo sapien
gaccaagcagaactaatagacattt

SEQ ID NO: 2126252 - DNA, 25 bp, Homo sapien
aacacagctctagaccaagcagaac

SEQ ID NO: 2126253 - DNA, 25 bp, Homo sapien
cactcaaaaccacgtaactacttgg

SEQ ID NO: 2126254 - DNA, 25 bp, Homo sapien
gagcaacgagattcataaagcaggt

SEQ ID NO: 2126255 - DNA, 25 bp, Homo sapien
ggagaagatcctttgtgaccaacaa

SEQ ID NO: 2126256 - DNA, 25 bp, Homo sapien
gattaaatgtcactgcaatgggtgg

SEQ ID NO: 2126257 - DNA, 25 bp, Homo sapien
ttcctggcgaaccatgaagggatga

SEQ ID NO: 2126258 - DNA, 25 bp, Homo sapien
gcaatgacacttgaccaaacttggg

SEQ ID NO: 2126259 - DNA, 25 bp, Homo sapien
taggctcaggatgccccatatgcag

SEQ ID NO: 2126260 - DNA, 25 bp, Homo sapien
ggtggtatctctacgagtctgcaaa

SEQ ID NO: 2126261 - DNA, 25 bp, Homo sapien
aaaccacagggttagtaggctcagg

SEQ ID NO: 2126262 - DNA, 25 bp, Homo sapien
tgcccaagaccaaaaaggtggtatc

SEQ ID NO: 2126263 - DNA, 25 bp, Homo sapien
gggatgtacctcactgggcagaaac

SEQ ID NO: 2126264 - DNA, 25 bp, Homo sapien
gggatctctgatctcaagggacatt

SEQ ID NO: 2126265 - DNA, 25 bp, Homo sapien
attcatctggttctcttccacacct

SEQ ID NO: 2126266 - DNA, 25 bp, Homo sapien
gggacattgacctgatgtcagtaga

SEQ ID NO: 2126267 - DNA, 25 bp, Homo sapien
tgcatttgttaagtagtgttttact

SEQ ID NO: 2126268 - DNA, 25 bp, Homo sapien
ttgcatttgttaagtagtgttttac

SEQ ID NO: 2126269 - DNA, 25 bp, Homo sapien
tttgctatttatccaggaatctttc

SEQ ID NO: 2126270 - DNA, 25 bp, Homo sapien
aattttgctatttatccaggaatct

SEQ ID NO: 2126271 - DNA, 25 bp, Homo sapien
gatagtttctatttctgtgcggtca

SEQ ID NO: 2126272 - DNA, 25 bp, Homo sapien
tcattgtgcctttctgattcttctc

SEQ ID NO: 2126273 - DNA, 25 bp, Homo sapien
tattctctgaggatagtttctattt

SEQ ID NO: 2126274 - DNA, 25 bp, Homo sapien
tgtcgaggagtttatcaatttcttg

SEQ ID NO: 2126275 - DNA, 25 bp, Homo sapien
ctattaacttctgaattgatcttct

SEQ ID NO: 2126276 - DNA, 25 bp, Homo sapien
attaacttctgaattgatcttctgg

SEQ ID NO: 2126277 - DNA, 25 bp, Homo sapien
tattaacttctgaattgatcttctg

SEQ ID NO: 2126278 - DNA, 25 bp, Homo sapien
tctattaacttctgaattgatcttc

SEQ ID NO: 2126279 - DNA, 25 bp, Homo sapien
cacttatgtgcttaaaatttcttac

SEQ ID NO: 2126280 - DNA, 25 bp, Homo sapien
tagtcaacttccagtgcaaagcaag

SEQ ID NO: 2126281 - DNA, 25 bp, Homo sapien
gctagtttcacatttcctcttagtc

SEQ ID NO: 2126282 - DNA, 25 bp, Homo sapien
ttcctcttagtcaacttccagtgca

SEQ ID NO: 2126283 - DNA, 25 bp, Homo sapien
cctcttagtcaacttccagtgcaaa

SEQ ID NO: 2126284 - DNA, 25 bp, Homo sapien
ttccaaatctacaaggcactaaggg

SEQ ID NO: 2126285 - DNA, 25 bp, Homo sapien
tatgggatattttggtaagaattct

SEQ ID NO: 2126286 - DNA, 25 bp, Homo sapien
taaaactcctcagtcaggtcggaat

SEQ ID NO: 2126287 - DNA, 25 bp, Homo sapien
agggtaggaaatgacaggtaacaca

SEQ ID NO: 2126288 - DNA, 25 bp, Homo sapien
tccagtaagggattacagagcatca

SEQ ID NO: 2126289 - DNA, 25 bp, Homo sapien
ggcaaccttgccctacacctgaaat

SEQ ID NO: 2126290 - DNA, 25 bp, Homo sapien
gatgagtcaaccagcatagcgaaca

SEQ ID NO: 2126291 - DNA, 25 bp, Homo sapien
tgcaggcatacacattactaaaggt

SEQ ID NO: 2126292 - DNA, 25 bp, Homo sapien
tttatgaagccagaatcttgggcca

SEQ ID NO: 2126293 - DNA, 25 bp, Homo sapien
caccagtgtgctgtgtcattttagc

SEQ ID NO: 2126294 - DNA, 25 bp, Homo sapien
aaactgctccagttaatcaggtgaa

SEQ ID NO: 2126295 - DNA, 25 bp, Homo sapien
tcagatattagtgtttacaggccat

SEQ ID NO: 2126296 - DNA, 25 bp, Homo sapien
cttcgacaatgaggacgtgaggtac

SEQ ID NO: 2126297 - DNA, 25 bp, Homo sapien
taattaacacgtcagccagtcggca

SEQ ID NO: 2126298 - DNA, 25 bp, Homo sapien
gaactaaggtctagcaagcatcagg

SEQ ID NO: 2126299 - DNA, 25 bp, Homo sapien
gaggtaggtccagattattgtcccc

SEQ ID NO: 2126300 - DNA, 25 bp, Homo sapien
taaagctgtcccaacaggaatcctc

SEQ ID NO: 2126301 - DNA, 25 bp, Homo sapien
tgttacttgtttcaaagtccaggca

SEQ ID NO: 2126302 - DNA, 25 bp, Homo sapien
tggatatcctgttcttgcagccaga

SEQ ID NO: 2126303 - DNA, 25 bp, Homo sapien
tatgtggttagtccaaggagggcaa

SEQ ID NO: 2126304 - DNA, 25 bp, Homo sapien
caatgctgctttgggtggctgacca

SEQ ID NO: 2126305 - DNA, 25 bp, Homo sapien
taaccatgttaatatcgccttgggc

SEQ ID NO: 2126306 - DNA, 25 bp, Homo sapien
ttgggcaatatcacccttgggagat

SEQ ID NO: 2126307 - DNA, 25 bp, Homo sapien
ctttgggtggctgaccaaacttttg

SEQ ID NO: 2126308 - DNA, 25 bp, Homo sapien
aattttagaagaagtgccatgacat

SEQ ID NO: 2126309 - DNA, 25 bp, Homo sapien
gtgccatgacatgctgagaataatg

SEQ ID NO: 2126310 - DNA, 25 bp, Homo sapien
aagtgccatgacatgctgagaataa

SEQ ID NO: 2126311 - DNA, 25 bp, Homo sapien
gccatgacatgctgagaataatgta

SEQ ID NO: 2126312 - DNA, 25 bp, Homo sapien
gtccccaccctgcaacaagccctgg

SEQ ID NO: 2126313 - DNA, 25 bp, Homo sapien
ccagtccccaccctgcaacaagccc

SEQ ID NO: 2126314 - DNA, 25 bp, Homo sapien
caccctgcaacaagccctggtgtgt

SEQ ID NO: 2126315 - DNA, 25 bp, Homo sapien
accctgcaacaagccctggtgtgtg

SEQ ID NO: 2126316 - DNA, 25 bp, Homo sapien
gaaagagctccttatgctctccatc

SEQ ID NO: 2126317 - DNA, 25 bp, Homo sapien
gacgtacccacaagaaagagctcct

SEQ ID NO: 2126318 - DNA, 25 bp, Homo sapien
tttctgaaatcaggtgacgtaccca

SEQ ID NO: 2126319 - DNA, 25 bp, Homo sapien
tgctctccatctcttcggattgctg

SEQ ID NO: 2126320 - DNA, 25 bp, Homo sapien
gtcgccccttgcattgcactctgct

SEQ ID NO: 2126321 - DNA, 25 bp, Homo sapien
tccagcttcaagtcgccccttgcat

SEQ ID NO: 2126322 - DNA, 25 bp, Homo sapien
gccccttgcattgcactctgcttca

SEQ ID NO: 2126323 - DNA, 25 bp, Homo sapien
cagtgttcatcttccagcttcaagt

SEQ ID NO: 2126324 - DNA, 25 bp, Homo sapien
cagtaaacaatatcggatactctac

SEQ ID NO: 2126325 - DNA, 25 bp, Homo sapien
tcagtaaacaatatcggatactcta

SEQ ID NO: 2126326 - DNA, 25 bp, Homo sapien
gggatgtgagaagggttcaacatac

SEQ ID NO: 2126327 - DNA, 25 bp, Homo sapien
aaacctgtgccatggaattctacca

SEQ ID NO: 2126328 - DNA, 25 bp, Homo sapien
acctgtgccatggaattctaccaaa

SEQ ID NO: 2126329 - DNA, 25 bp, Homo sapien
ggccaatattaattaccctgatacc

SEQ ID NO: 2126330 - DNA, 25 bp, Homo sapien
cctccctctgtgggttggctgggtt

SEQ ID NO: 2126331 - DNA, 25 bp, Homo sapien
ttggctgggttctttatggatccac

SEQ ID NO: 2126332 - DNA, 25 bp, Homo sapien
gggttggctgggttctttatggatc

SEQ ID NO: 2126333 - DNA, 25 bp, Homo sapien
ctccctctgtgggttggctgggttc

SEQ ID NO: 2126334 - DNA, 25 bp, Homo sapien
gggcactttgcaacctgtgcccttc

SEQ ID NO: 2126335 - DNA, 25 bp, Homo sapien
cagcaatttttgcaagacatcttgg

SEQ ID NO: 2126336 - DNA, 25 bp, Homo sapien
caattcataactttccaggttaaag

SEQ ID NO: 2126337 - DNA, 25 bp, Homo sapien
agaagcttttgtccaattcataact

SEQ ID NO: 2126338 - DNA, 25 bp, Homo sapien
tgtttggctgaccattacagacatt

SEQ ID NO: 2126339 - DNA, 25 bp, Homo sapien
actgtttggctgaccattacagaca

SEQ ID NO: 2126340 - DNA, 25 bp, Homo sapien
tttggctgaccattacagacattcc

SEQ ID NO: 2126341 - DNA, 25 bp, Homo sapien
tggctgaccattacagacattcctg

SEQ ID NO: 2126342 - DNA, 25 bp, Homo sapien
caaaatcccgaagcccgtgatgtca

SEQ ID NO: 2126343 - DNA, 25 bp, Homo sapien
ccgggcaggtcccatgcatgaggct

SEQ ID NO: 2126344 - DNA, 25 bp, Homo sapien
tctccgggcaggtcccatgcatgag

SEQ ID NO: 2126345 - DNA, 25 bp, Homo sapien
ctgaggtctccgggcaggtcccatg

SEQ ID NO: 2126346 - DNA, 25 bp, Homo sapien
gaggtctccgggcaggtcccatgca

SEQ ID NO: 2126347 - DNA, 25 bp, Homo sapien
cttgtggtgcaaccttgatgatctg

SEQ ID NO: 2126348 - DNA, 25 bp, Homo sapien
ggctgtgtggttgcccttctctaca

SEQ ID NO: 2126349 - DNA, 25 bp, Homo sapien
cgagctgcttgctgacatggtaaac

SEQ ID NO: 2126350 - DNA, 25 bp, Homo sapien
cacagaaccgagctgcttgctgaca

SEQ ID NO: 2126351 - DNA, 25 bp, Homo sapien
taagatgtggccccgggtgtgagat

SEQ ID NO: 2126352 - DNA, 25 bp, Homo sapien
agatgtggccccgggtgtgagattc

SEQ ID NO: 2126353 - DNA, 25 bp, Homo sapien
ttaagatgtggccccgggtgtgaga

SEQ ID NO: 2126354 - DNA, 25 bp, Homo sapien
atgtggccccgggtgtgagattcac

SEQ ID NO: 2126355 - DNA, 25 bp, Homo sapien
ttgaagtgataagggaaatagatct

SEQ ID NO: 2126356 - DNA, 25 bp, Homo sapien
taagaattaggccaaatagctactg

SEQ ID NO: 2126357 - DNA, 25 bp, Homo sapien
ctggcgcaaaggacaaaatagtgct

SEQ ID NO: 2126358 - DNA, 25 bp, Homo sapien
acaagtttaagttcgagctgcaatg

SEQ ID NO: 2126359 - DNA, 25 bp, Homo sapien
atgcacaaaaaagtactggcgcaaa

SEQ ID NO: 2126360 - DNA, 25 bp, Homo sapien
ttgaagcttgtgcatccatcacgaa

SEQ ID NO: 2126361 - DNA, 25 bp, Homo sapien
atttcttctacttgattgaatcggc

SEQ ID NO: 2126362 - DNA, 25 bp, Homo sapien
ctgataccatttcttctacttgatt

SEQ ID NO: 2126363 - DNA, 25 bp, Homo sapien
tgtgcatccatcacgaagttcttgt

SEQ ID NO: 2126364 - DNA, 25 bp, Homo sapien
ataacctcttacaaccatcaatctc

SEQ ID NO: 2126365 - DNA, 25 bp, Homo sapien
cctcttacaaccatcaatctccagg

SEQ ID NO: 2126366 - DNA, 25 bp, Homo sapien
tcttacaaccatcaatctccaggat

SEQ ID NO: 2126367 - DNA, 25 bp, Homo sapien
aacctcttacaaccatcaatctcca

SEQ ID NO: 2126368 - DNA, 25 bp, Homo sapien
gtattaagctctatctcaaagatgt

SEQ ID NO: 2126369 - DNA, 25 bp, Homo sapien
aagagattgacatctgtattaagct

SEQ ID NO: 2126370 - DNA, 25 bp, Homo sapien
taattgcttatttacaaagagattg

SEQ ID NO: 2126371 - DNA, 25 bp, Homo sapien
gagattgacatctgtattaagctct

SEQ ID NO: 2126372 - DNA, 25 bp, Homo sapien
gcccagaagccagaacgttgactag

SEQ ID NO: 2126373 - DNA, 25 bp, Homo sapien
aactgattatctggctgagtttaga

SEQ ID NO: 2126374 - DNA, 25 bp, Homo sapien
cactacctagataaagatgattcca

SEQ ID NO: 2126375 - DNA, 25 bp, Homo sapien
gcaatgtaactataacactacctag

SEQ ID NO: 2126376 - DNA, 25 bp, Homo sapien
tttgaacactgtcccagttaccatg

SEQ ID NO: 2126377 - DNA, 25 bp, Homo sapien
gaggacttgggatctatcaaaggag

SEQ ID NO: 2126378 - DNA, 25 bp, Homo sapien
taaaatctctttgggcctggattgg

SEQ ID NO: 2126379 - DNA, 25 bp, Homo sapien
tagcccaggtgagagataagagcct

SEQ ID NO: 2126380 - DNA, 25 bp, Homo sapien
cagtctgataatggaccggccttta

SEQ ID NO: 2126381 - DNA, 25 bp, Homo sapien
gacataattcctaggcttggccttc

SEQ ID NO: 2126382 - DNA, 25 bp, Homo sapien
cccttctttcagacataattcctag

SEQ ID NO: 2126383 - DNA, 25 bp, Homo sapien
cattggatgggtagaggactttccc

SEQ ID NO: 2126384 - DNA, 25 bp, Homo sapien
agacatcacacatcggtaggatctg

SEQ ID NO: 2126385 - DNA, 25 bp, Homo sapien
catcggtaggatctgtgatgcccca

SEQ ID NO: 2126386 - DNA, 25 bp, Homo sapien
cacacatcggtaggatctgtgatgc

SEQ ID NO: 2126387 - DNA, 25 bp, Homo sapien
acatcacacatcggtaggatctgtg

SEQ ID NO: 2126388 - DNA, 25 bp, Homo sapien
gaaatagtttcccttggtggcaatg

SEQ ID NO: 2126389 - DNA, 25 bp, Homo sapien
atgaaatagtttcccttggtggcaa

SEQ ID NO: 2126390 - DNA, 25 bp, Homo sapien
tgaaatagtttcccttggtggcaat

SEQ ID NO: 2126391 - DNA, 25 bp, Homo sapien
ggcctgctctatggttcacaataca

SEQ ID NO: 2126392 - DNA, 25 bp, Homo sapien
ttataaccttcccttaggcctgctc

SEQ ID NO: 2126393 - DNA, 25 bp, Homo sapien
ttcacaatacaggtgggaaagatgt

SEQ ID NO: 2126394 - DNA, 25 bp, Homo sapien
ttcccttaggcctgctctatggttc

SEQ ID NO: 2126395 - DNA, 25 bp, Homo sapien
cctagaggttcaaaacagatgttca

SEQ ID NO: 2126396 - DNA, 25 bp, Homo sapien
ggcacagaagatgacatcaggcttt

SEQ ID NO: 2126397 - DNA, 25 bp, Homo sapien
ggtatcaagcaagaggtcccatatc

SEQ ID NO: 2126398 - DNA, 25 bp, Homo sapien
tcaggctttagaataggtaggcaca

SEQ ID NO: 2126399 - DNA, 25 bp, Homo sapien
aatgctggaggaatggtcagcgttg

SEQ ID NO: 2126400 - DNA, 25 bp, Homo sapien
atggtcagcgttgaaggaagtaagc

SEQ ID NO: 2126401 - DNA, 25 bp, Homo sapien
gaaatgctggaggaatggtcagcgt

SEQ ID NO: 2126402 - DNA, 25 bp, Homo sapien
aaatgctggaggaatggtcagcgtt

SEQ ID NO: 2126403 - DNA, 25 bp, Homo sapien
ctgaactatagccaaatggatgtga

SEQ ID NO: 2126404 - DNA, 25 bp, Homo sapien
gaactatagccaaatggatgtgacc

SEQ ID NO: 2126405 - DNA, 25 bp, Homo sapien
aactatagccaaatggatgtgaccg

SEQ ID NO: 2126406 - DNA, 25 bp, Homo sapien
tgaactatagccaaatggatgtgac

SEQ ID NO: 2126407 - DNA, 25 bp, Homo sapien
gccatagtatcccatagcatttgga

SEQ ID NO: 2126408 - DNA, 25 bp, Homo sapien
tcccatagcatttggattgtggaca

SEQ ID NO: 2126409 - DNA, 25 bp, Homo sapien
tttggattgtggacataggaggaca

SEQ ID NO: 2126410 - DNA, 25 bp, Homo sapien
aacttgtctgccatagtatcccata

SEQ ID NO: 2126411 - DNA, 25 bp, Homo sapien
gctcctcccattgtgagctagaata

SEQ ID NO: 2126412 - DNA, 25 bp, Homo sapien
tcccattgtgagctagaatactcac

SEQ ID NO: 2126413 - DNA, 25 bp, Homo sapien
ccagtcgttgtgctcctcccattgt

SEQ ID NO: 2126414 - DNA, 25 bp, Homo sapien
atggctggagtccagtcgttgtgct

SEQ ID NO: 2126415 - DNA, 25 bp, Homo sapien
tctggatcaaaatagtaactccttt

SEQ ID NO: 2126416 - DNA, 25 bp, Homo sapien
tctctgtgtactctggatcaaaata

SEQ ID NO: 2126417 - DNA, 25 bp, Homo sapien
ctagagtgctagaacaaaagctggc

SEQ ID NO: 2126418 - DNA, 25 bp, Homo sapien
agtaactcctttctagagtgctaga

SEQ ID NO: 2126419 - DNA, 25 bp, Homo sapien
tcttaagaacattaccagctccagg

SEQ ID NO: 2126420 - DNA, 25 bp, Homo sapien
aatgtgtggtatcagctggactcag

SEQ ID NO: 2126421 - DNA, 25 bp, Homo sapien
tcatcaaatctgctcaagaagggct

SEQ ID NO: 2126422 - DNA, 25 bp, Homo sapien
tttaaatcactcacagagggtggga

SEQ ID NO: 2126423 - DNA, 25 bp, Homo sapien
cactgacagctgaagatagaagaac

SEQ ID NO: 2126424 - DNA, 25 bp, Homo sapien
gccaggagactgataaaagggctca

SEQ ID NO: 2126425 - DNA, 25 bp, Homo sapien
taatataggtgtgagatccagacca

SEQ ID NO: 2126426 - DNA, 25 bp, Homo sapien
gaatataccattctgggtcctgagg

SEQ ID NO: 2126427 - DNA, 25 bp, Homo sapien
gatatagtactatgcagacacaagg

SEQ ID NO: 2126428 - DNA, 25 bp, Homo sapien
ggtggactgtgccaacgctactcct

SEQ ID NO: 2126429 - DNA, 25 bp, Homo sapien
tgacagtattatgcctgggccagtc

SEQ ID NO: 2126430 - DNA, 25 bp, Homo sapien
ttttgaccccagaagccctagactg

SEQ ID NO: 2126431 - DNA, 25 bp, Homo sapien
gaagaataggcttgttgttttacag

SEQ ID NO: 2126432 - DNA, 25 bp, Homo sapien
tagtgatccattccctttgacgatc

SEQ ID NO: 2126433 - DNA, 25 bp, Homo sapien
tttacagtgttagtgatccattccc

SEQ ID NO: 2126434 - DNA, 25 bp, Homo sapien
ttcctcagaagaataggcttgttgt

SEQ ID NO: 2126435 - DNA, 25 bp, Homo sapien
caatctcaggtgtccatatttgcag

SEQ ID NO: 2126436 - DNA, 25 bp, Homo sapien
taggtaagattgtgctgtctccctc

SEQ ID NO: 2126437 - DNA, 25 bp, Homo sapien
cttggtcccacccattatacatgaa

SEQ ID NO: 2126438 - DNA, 25 bp, Homo sapien
caattctcagttgcactttccttgg

SEQ ID NO: 2126439 - DNA, 25 bp, Homo sapien
caaactgttaatgtgcctaatgaca

SEQ ID NO: 2126440 - DNA, 25 bp, Homo sapien
tgtatttgtcgaggttgctatgcac

SEQ ID NO: 2126441 - DNA, 25 bp, Homo sapien
ccttttgaaggacagcatggttggt

SEQ ID NO: 2126442 - DNA, 25 bp, Homo sapien
catggttggtgacacctaaggcccc

SEQ ID NO: 2126443 - DNA, 25 bp, Homo sapien
tctcagcatcatagaagggggtact

SEQ ID NO: 2126444 - DNA, 25 bp, Homo sapien
cttgacttctcagcatcatagaagg

SEQ ID NO: 2126445 - DNA, 25 bp, Homo sapien
cagcatcatagaagggggtactgat

SEQ ID NO: 2126446 - DNA, 25 bp, Homo sapien
catagaagggggtactgatttccta

SEQ ID NO: 2126447 - DNA, 25 bp, Homo sapien
tggcaactgatcacaacaatgtctt

SEQ ID NO: 2126448 - DNA, 25 bp, Homo sapien
ctttccctgggactatgaatgtgca

SEQ ID NO: 2126449 - DNA, 25 bp, Homo sapien
tgttcagcagtggatgacctctagt

SEQ ID NO: 2126450 - DNA, 25 bp, Homo sapien
gtcaagacctttgcactaggatagt

SEQ ID NO: 2126451 - DNA, 25 bp, Homo sapien
tagtcacagtcccaattttgagtag

SEQ ID NO: 2126452 - DNA, 25 bp, Homo sapien
cattggattagacagcactctgaac

SEQ ID NO: 2126453 - DNA, 25 bp, Homo sapien
taaacaaaggcaccctactgcgctt

SEQ ID NO: 2126454 - DNA, 25 bp, Homo sapien
tgtgttggccacctaaaactctttg

SEQ ID NO: 2126455 - DNA, 25 bp, Homo sapien
catgacctaatgtaaaaaagagtgt

SEQ ID NO: 2126456 - DNA, 25 bp, Homo sapien
tgtttgaaggtttacacaggtccag

SEQ ID NO: 2126457 - DNA, 25 bp, Homo sapien
gctttgttcccatccttgatgctgc

SEQ ID NO: 2126458 - DNA, 25 bp, Homo sapien
gctgcactaattgactaatcaccta

SEQ ID NO: 2126459 - DNA, 25 bp, Homo sapien
gtatcgggaggcagtaagaatcatc

SEQ ID NO: 2126460 - DNA, 25 bp, Homo sapien
gacttgccgcataactcggcttagg

SEQ ID NO: 2126461 - DNA, 25 bp, Homo sapien
taccgctttggcagagaatgactct

SEQ ID NO: 2126462 - DNA, 25 bp, Homo sapien
tctgcagttaagctaagggcgtgtt

SEQ ID NO: 2126463 - DNA, 25 bp, Homo sapien
aaattctatactttctcctagtgtc

SEQ ID NO: 2126464 - DNA, 25 bp, Homo sapien
ccaacaccctttatggcgtatttct

SEQ ID NO: 2126465 - DNA, 25 bp, Homo sapien
gggctgcggatacctggttttatta

SEQ ID NO: 2126466 - DNA, 25 bp, Homo sapien
gccgtggatacctgccttttaattc

SEQ ID NO: 2126467 - DNA, 25 bp, Homo sapien
gtcctgcatttatcaccatgctgca

SEQ ID NO: 2126468 - DNA, 25 bp, Homo sapien
cctgcatttatcaccatgctgcaca

SEQ ID NO: 2126469 - DNA, 25 bp, Homo sapien
gggtcctgcatttatcaccatgctg

SEQ ID NO: 2126470 - DNA, 25 bp, Homo sapien
ctgcatttatcaccatgctgcacat

SEQ ID NO: 2126471 - DNA, 25 bp, Homo sapien
ctcagaaattgaccccacatacact

SEQ ID NO: 2126472 - DNA, 25 bp, Homo sapien
gcaggactactgcatgctgccagcc

SEQ ID NO: 2126473 - DNA, 25 bp, Homo sapien
tcagaaattgaccccacatacactc

SEQ ID NO: 2126474 - DNA, 25 bp, Homo sapien
agaaattgaccccacatacactcaa

SEQ ID NO: 2126475 - DNA, 25 bp, Homo sapien
cctgatgttgcttacatgggtgctc

SEQ ID NO: 2126476 - DNA, 25 bp, Homo sapien
aactgcttctgttgtggttgtccca

SEQ ID NO: 2126477 - DNA, 25 bp, Homo sapien
cagcccagggtactactgcagtggc

SEQ ID NO: 2126478 - DNA, 25 bp, Homo sapien
tataccgcaggtgcctaagacaacc

SEQ ID NO: 2126479 - DNA, 25 bp, Homo sapien
cagaggaacatagcagcttttacta

SEQ ID NO: 2126480 - DNA, 25 bp, Homo sapien
tgcagaggaacatagcagcttttac

SEQ ID NO: 2126481 - DNA, 25 bp, Homo sapien
ctgcagaggaacatagcagctttta

SEQ ID NO: 2126482 - DNA, 25 bp, Homo sapien
gcagaggaacatagcagcttttact

SEQ ID NO: 2126483 - DNA, 25 bp, Homo sapien
cacagccttaactgctgaggattcc

SEQ ID NO: 2126484 - DNA, 25 bp, Homo sapien
ccacagccttaactgctgaggattc

SEQ ID NO: 2126485 - DNA, 25 bp, Homo sapien
agccttaactgctgaggattcctca

SEQ ID NO: 2126486 - DNA, 25 bp, Homo sapien
cagccttaactgctgaggattcctc

SEQ ID NO: 2126487 - DNA, 25 bp, Homo sapien
cctctgtatcatgactggggtgcac

SEQ ID NO: 2126488 - DNA, 25 bp, Homo sapien
tcctctgtatcatgactggggtgca

SEQ ID NO: 2126489 - DNA, 25 bp, Homo sapien
ctctgtatcatgactggggtgcaca

SEQ ID NO: 2126490 - DNA, 25 bp, Homo sapien
gggatcatgcaatgtgcagcctgac

SEQ ID NO: 2126491 - DNA, 25 bp, Homo sapien
gtgctgggagactttcattgaagca

SEQ ID NO: 2126492 - DNA, 25 bp, Homo sapien
gcatatcatgtctggtggggagcca

SEQ ID NO: 2126493 - DNA, 25 bp, Homo sapien
ggaatgccaagatatagccacagtg

SEQ ID NO: 2126494 - DNA, 25 bp, Homo sapien
acagctggtcccttccaaaacaatc

SEQ ID NO: 2126495 - DNA, 25 bp, Homo sapien
gaagaggaccacatcaaataccaat

SEQ ID NO: 2126496 - DNA, 25 bp, Homo sapien
caaagatcagtaccacctccatggt

SEQ ID NO: 2126497 - DNA, 25 bp, Homo sapien
accaccgggacgagcaggctgtata

SEQ ID NO: 2126498 - DNA, 25 bp, Homo sapien
tgcagtgatgaagttttccacctga

SEQ ID NO: 2126499 - DNA, 25 bp, Homo sapien
tgtgacttagaagatggcagctcgg

SEQ ID NO: 2126500 - DNA, 25 bp, Homo sapien
agttttccacctgagcttccttatc

SEQ ID NO: 2126501 - DNA, 25 bp, Homo sapien
gattgaaactgcacttgcacctgtg

SEQ ID NO: 2126502 - DNA, 25 bp, Homo sapien
attgctgagaagatacgcaagggtc

SEQ ID NO: 2126503 - DNA, 25 bp, Homo sapien
agatacgcaagggtcacattcccca

SEQ ID NO: 2126504 - DNA, 25 bp, Homo sapien
taaaatcactgggaactctgcagaa

SEQ ID NO: 2126505 - DNA, 25 bp, Homo sapien
gggtagagtagaagcccttagccta

SEQ ID NO: 2126506 - DNA, 25 bp, Homo sapien
gcctgctcctttgcattgtggctgc

SEQ ID NO: 2126507 - DNA, 25 bp, Homo sapien
cattgtggctgcaggttgtgtcttt

SEQ ID NO: 2126508 - DNA, 25 bp, Homo sapien
tgcattgtggctgcaggttgtgtct

SEQ ID NO: 2126509 - DNA, 25 bp, Homo sapien
ggctgcaggttgtgtctttcttttg

SEQ ID NO: 2126510 - DNA, 25 bp, Homo sapien
caccttcttgggtagagccagttca

SEQ ID NO: 2126511 - DNA, 25 bp, Homo sapien
ccttcttgggtagagccagttcatc

SEQ ID NO: 2126512 - DNA, 25 bp, Homo sapien
ttccaccttcttgggtagagccagt

SEQ ID NO: 2126513 - DNA, 25 bp, Homo sapien
cttcttgggtagagccagttcatca

SEQ ID NO: 2126514 - DNA, 25 bp, Homo sapien
aagtgctgggtgctagaaggtcctg

SEQ ID NO: 2126515 - DNA, 25 bp, Homo sapien
tgctgggtgctagaaggtcctgttg

SEQ ID NO: 2126516 - DNA, 25 bp, Homo sapien
tgctagaaggtcctgttgtttatgg

SEQ ID NO: 2126517 - DNA, 25 bp, Homo sapien
gggtgctagaaggtcctgttgttta

SEQ ID NO: 2126518 - DNA, 25 bp, Homo sapien
tagctttgcctcgactcctttcttt

SEQ ID NO: 2126519 - DNA, 25 bp, Homo sapien
tttagctttgcctcgactcctttct

SEQ ID NO: 2126520 - DNA, 25 bp, Homo sapien
ttagctttgcctcgactcctttctt

SEQ ID NO: 2126521 - DNA, 25 bp, Homo sapien
ccagccgtcgtgcactacctaaatg

SEQ ID NO: 2126522 - DNA, 25 bp, Homo sapien
tttcctgacctgttgcacttcctct

SEQ ID NO: 2126523 - DNA, 25 bp, Homo sapien
gcaacatgcaccagccgttgccgtg

SEQ ID NO: 2126524 - DNA, 25 bp, Homo sapien
taaatgcctccgccggcaacatgca

SEQ ID NO: 2126525 - DNA, 25 bp, Homo sapien
cccgtaaggacgcagtgattgcact

SEQ ID NO: 2126526 - DNA, 25 bp, Homo sapien
ttgcaacccccgtaaggacgcagtg

SEQ ID NO: 2126527 - DNA, 25 bp, Homo sapien
tgattgcactccgtgcaaacgccgc

SEQ ID NO: 2126528 - DNA, 25 bp, Homo sapien
tgcaaacgccgccatcttaagtctt

SEQ ID NO: 2126529 - DNA, 25 bp, Homo sapien
ctattaactggcgagtttctggact

SEQ ID NO: 2126530 - DNA, 25 bp, Homo sapien
tggcgagtttctggacttttgttag

SEQ ID NO: 2126531 - DNA, 25 bp, Homo sapien
taactggcgagtttctggacttttg

SEQ ID NO: 2126532 - DNA, 25 bp, Homo sapien
caatactattaactggcgagtttct

SEQ ID NO: 2126533 - DNA, 25 bp, Homo sapien
ggccacttctctagccaacgtgagg

SEQ ID NO: 2126534 - DNA, 25 bp, Homo sapien
caggccacgcgatcccaaagtgtgt

SEQ ID NO: 2126535 - DNA, 25 bp, Homo sapien
tgtagcctcgctaacggccacttct

SEQ ID NO: 2126536 - DNA, 25 bp, Homo sapien
tctctagccaacgtgaggctcatca

SEQ ID NO: 2126537 - DNA, 25 bp, Homo sapien
gcgatcagcgagaaagaaattattc

SEQ ID NO: 2126538 - DNA, 25 bp, Homo sapien
aattattctccgatattttgaagag

SEQ ID NO: 2126539 - DNA, 25 bp, Homo sapien
gcttcgtcagtagaagttaggcgat

SEQ ID NO: 2126540 - DNA, 25 bp, Homo sapien
caacttccaagcttcgtcagtagaa

SEQ ID NO: 2126541 - DNA, 25 bp, Homo sapien
gaacgacccatatatccctcctagg

SEQ ID NO: 2126542 - DNA, 25 bp, Homo sapien
tggaatccattttggcgcgacatgg

SEQ ID NO: 2126543 - DNA, 25 bp, Homo sapien
gctgttcctaggaaagctctgagga

SEQ ID NO: 2126544 - DNA, 25 bp, Homo sapien
taggcccaagaggttaggctgttcc

SEQ ID NO: 2126545 - DNA, 25 bp, Homo sapien
tggatacacaggttgtttccagttg

SEQ ID NO: 2126546 - DNA, 25 bp, Homo sapien
tctgtaggatagattcttaaaagtc

SEQ ID NO: 2126547 - DNA, 25 bp, Homo sapien
tcatgcgtcattatatactggtact

SEQ ID NO: 2126548 - DNA, 25 bp, Homo sapien
gtacaaaagtatccttgttcatgcg

SEQ ID NO: 2126549 - DNA, 25 bp, Homo sapien
cataatatatttaacgtctcctcca

SEQ ID NO: 2126550 - DNA, 25 bp, Homo sapien
atatctgtatatgtcttaagtattt

SEQ ID NO: 2126551 - DNA, 25 bp, Homo sapien
atatatttaacgtctcctccaaaag

SEQ ID NO: 2126552 - DNA, 25 bp, Homo sapien
taatatatttaacgtctcctccaaa

SEQ ID NO: 2126553 - DNA, 25 bp, Homo sapien
tctcccctcaattaagaaatttcta

SEQ ID NO: 2126554 - DNA, 25 bp, Homo sapien
actcaactgcttgctagattctccc

SEQ ID NO: 2126555 - DNA, 25 bp, Homo sapien
ttgctagattctcccctcaattaag

SEQ ID NO: 2126556 - DNA, 25 bp, Homo sapien
ggaattttgattggccactgttaca

SEQ ID NO: 2126557 - DNA, 25 bp, Homo sapien
ccactgtttacagggttgttgcact

SEQ ID NO: 2126558 - DNA, 25 bp, Homo sapien
aaaatgttttgcacacagcagctaa

SEQ ID NO: 2126559 - DNA, 25 bp, Homo sapien
tgcactaataaattccacgtcctgg

SEQ ID NO: 2126560 - DNA, 25 bp, Homo sapien
cgtcctggacctaaatgattgctaa

SEQ ID NO: 2126561 - DNA, 25 bp, Homo sapien
tttcaaacaaacaatgcaaaattgg

SEQ ID NO: 2126562 - DNA, 25 bp, Homo sapien
cagtcgtcaatgcaatttcaaacaa

SEQ ID NO: 2126563 - DNA, 25 bp, Homo sapien
catcaagtgttttgccttctcccaa

SEQ ID NO: 2126564 - DNA, 25 bp, Homo sapien
taaaactaatgttctggccgggcgc

SEQ ID NO: 2126565 - DNA, 25 bp, Homo sapien
taacctcttaaatctgtgtaagaca

SEQ ID NO: 2126566 - DNA, 25 bp, Homo sapien
aaaaatctaagtctagcttgtcaag

SEQ ID NO: 2126567 - DNA, 25 bp, Homo sapien
tgtaagacattctatttaatgcaac

SEQ ID NO: 2126568 - DNA, 25 bp, Homo sapien
tactaatagtcagttcctgcaaatg

SEQ ID NO: 2126569 - DNA, 25 bp, Homo sapien
gatcccacttgtatacaatattcag

SEQ ID NO: 2126570 - DNA, 25 bp, Homo sapien
gaaagcaaattagtagccatgggat

SEQ ID NO: 2126571 - DNA, 25 bp, Homo sapien
tgcgtgggtccacttttatgtattt

SEQ ID NO: 2126572 - DNA, 25 bp, Homo sapien
ctaaaacactaatgtgtattgtgcc

SEQ ID NO: 2126573 - DNA, 25 bp, Homo sapien
tcatccaggttgttttgtgcatcag

SEQ ID NO: 2126574 - DNA, 25 bp, Homo sapien
aatatagtatgtaactatacgtcag

SEQ ID NO: 2126575 - DNA, 25 bp, Homo sapien
tgtaactatacgtcagagattggct

SEQ ID NO: 2126576 - DNA, 25 bp, Homo sapien
tccaggttgttttgtgcatcagctt

SEQ ID NO: 2126577 - DNA, 25 bp, Homo sapien
catcacaccatattaagaagacacg

SEQ ID NO: 2126578 - DNA, 25 bp, Homo sapien
tacagcttgctgacaatgttacagg

SEQ ID NO: 2126579 - DNA, 25 bp, Homo sapien
gaaaaacatatctggtcaataccca

SEQ ID NO: 2126580 - DNA, 25 bp, Homo sapien
gaagacacgtactcaagggtccata

SEQ ID NO: 2126581 - DNA, 25 bp, Homo sapien
tacaaagacaatactgtcaagatgt

SEQ ID NO: 2126582 - DNA, 25 bp, Homo sapien
tctatgtttgtggatacaaagacaa

SEQ ID NO: 2126583 - DNA, 25 bp, Homo sapien
acaaagacaatactgtcaagatgtc

SEQ ID NO: 2126584 - DNA, 25 bp, Homo sapien
tgaagaaccgtgcaaccataaaagg

SEQ ID NO: 2126585 - DNA, 25 bp, Homo sapien
ccataaaaggtgtaacatgcatgta

SEQ ID NO: 2126586 - DNA, 25 bp, Homo sapien
aacatgcatgtaactggaataacag

SEQ ID NO: 2126587 - DNA, 25 bp, Homo sapien
cagaatattgaagaaccgtgcaacc

SEQ ID NO: 2126588 - DNA, 25 bp, Homo sapien
ccgaagttccttttactcaatacat

SEQ ID NO: 2126589 - DNA, 25 bp, Homo sapien
atcactaaaggcctgtgtaccgaag

SEQ ID NO: 2126590 - DNA, 25 bp, Homo sapien
tgtgtaccgaagttccttttactca

SEQ ID NO: 2126591 - DNA, 25 bp, Homo sapien
cactaaaggcctgtgtaccgaagtt

SEQ ID NO: 2126592 - DNA, 25 bp, Homo sapien
atggctaaaagtaaggctggtgcag

SEQ ID NO: 2126593 - DNA, 25 bp, Homo sapien
tacctcagtaactaaaagggcactc

SEQ ID NO: 2126594 - DNA, 25 bp, Homo sapien
acagatgaccaaataaataagggag

SEQ ID NO: 2126595 - DNA, 25 bp, Homo sapien
taatggacacatagctacatacatg

SEQ ID NO: 2126596 - DNA, 25 bp, Homo sapien
aaagtgacaacatattacctcgctc

SEQ ID NO: 2126597 - DNA, 25 bp, Homo sapien
caagtaaatatagataacaggactc

SEQ ID NO: 2126598 - DNA, 25 bp, Homo sapien
aaaggtgctgaaacaactagaggac

SEQ ID NO: 2126599 - DNA, 25 bp, Homo sapien
gataaactatatgacatctacaagg

SEQ ID NO: 2126600 - DNA, 25 bp, Homo sapien
agcacgtccgcttaaatatttccac

SEQ ID NO: 2126601 - DNA, 25 bp, Homo sapien
taggtatacgcacctaatcaaaggt

SEQ ID NO: 2126602 - DNA, 25 bp, Homo sapien
tcacaaatgatatggaaggcctgaa

SEQ ID NO: 2126603 - DNA, 25 bp, Homo sapien
gattctaattgtatggaaggtccag

SEQ ID NO: 2126604 - DNA, 25 bp, Homo sapien
taagacaattcacctcaagcagagt

SEQ ID NO: 2126605 - DNA, 25 bp, Homo sapien
gaatcccctcaggtttcaaatatgg

SEQ ID NO: 2126606 - DNA, 25 bp, Homo sapien
acagacagaggatatcacggtagcc

SEQ ID NO: 2126607 - DNA, 25 bp, Homo sapien
gatacccagggaaagcttagatctt

SEQ ID NO: 2126608 - DNA, 25 bp, Homo sapien
cagtcgtcatggtgaacttaagtgc

SEQ ID NO: 2126609 - DNA, 25 bp, Homo sapien
ggagctccctgatgaggccaaagca

SEQ ID NO: 2126610 - DNA, 25 bp, Homo sapien
aaaattgtgatgtgctccagtcgtc

SEQ ID NO: 2126611 - DNA, 25 bp, Homo sapien
gattcaatgaatagcaccagcccac

SEQ ID NO: 2126612 - DNA, 25 bp, Homo sapien
aatgtgatctattttgtcaaatgga

SEQ ID NO: 2126613 - DNA, 25 bp, Homo sapien
ggaacacctatgatgcattttaatg

SEQ ID NO: 2126614 - DNA, 25 bp, Homo sapien
cctgggattataccacaaagtggct

SEQ ID NO: 2126615 - DNA, 25 bp, Homo sapien
tgggaacctgggattataccacaaa

SEQ ID NO: 2126616 - DNA, 25 bp, Homo sapien
actttggcaggctaaagctggcaga

SEQ ID NO: 2126617 - DNA, 25 bp, Homo sapien
tttggcaggctaaagctggcagatt

SEQ ID NO: 2126618 - DNA, 25 bp, Homo sapien
gcactttggcaggctaaagctggca

SEQ ID NO: 2126619 - DNA, 25 bp, Homo sapien
cttcagcccaggagtccctgagacc

SEQ ID NO: 2126620 - DNA, 25 bp, Homo sapien
gagtaaagtggcgcaatcgcaatct

SEQ ID NO: 2126621 - DNA, 25 bp, Homo sapien
ggagtaaagtggcgcaatcgcaatc

SEQ ID NO: 2126622 - DNA, 25 bp, Homo sapien
gaaaaccaaattcagatcagcctct

SEQ ID NO: 2126623 - DNA, 25 bp, Homo sapien
tcttgttctagcttcctaaggtaga

SEQ ID NO: 2126624 - DNA, 25 bp, Homo sapien
aacttacactaattcttgaaagcca

SEQ ID NO: 2126625 - DNA, 25 bp, Homo sapien
tactattacaacatgtcgcattgtc

SEQ ID NO: 2126626 - DNA, 25 bp, Homo sapien
tatgtggtagacagatcacccttgc

SEQ ID NO: 2126627 - DNA, 25 bp, Homo sapien
caagccaagagaccaatcaagtgac

SEQ ID NO: 2126628 - DNA, 25 bp, Homo sapien
acccttgcagtagtgtagagaacaa

SEQ ID NO: 2126629 - DNA, 25 bp, Homo sapien
gctatagtccacattaaggtagtga

SEQ ID NO: 2126630 - DNA, 25 bp, Homo sapien
tgagccaaggtcatgccattgcatt

SEQ ID NO: 2126631 - DNA, 25 bp, Homo sapien
tggggaggcagaggttgcagtgagc

SEQ ID NO: 2126632 - DNA, 25 bp, Homo sapien
gcctgggcaacaagagcgaactcca

SEQ ID NO: 2126633 - DNA, 25 bp, Homo sapien
gagaaccacttgaactggggaggca

SEQ ID NO: 2126634 - DNA, 25 bp, Homo sapien
tctgcttagtaacacatcttatgcc

SEQ ID NO: 2126635 - DNA, 25 bp, Homo sapien
gtaatatatggtagcaatactggct

SEQ ID NO: 2126636 - DNA, 25 bp, Homo sapien
gtaattatatcattgcctcctgagg

SEQ ID NO: 2126637 - DNA, 25 bp, Homo sapien
tatttctcctacaagaccagtctga

SEQ ID NO: 2126638 - DNA, 25 bp, Homo sapien
tgcaggcatgatagaagacacaaac

SEQ ID NO: 2126639 - DNA, 25 bp, Homo sapien
gaagctagagggtatactgatccca

SEQ ID NO: 2126640 - DNA, 25 bp, Homo sapien
tcactagagcaatccagggaagatg

SEQ ID NO: 2126641 - DNA, 25 bp, Homo sapien
gcttcatttgctacacgggctccta

SEQ ID NO: 2126642 - DNA, 25 bp, Homo sapien
ttactcccagggaaagtctgcagaa

SEQ ID NO: 2126643 - DNA, 25 bp, Homo sapien
tgtgtacaaattactcccagggaaa

SEQ ID NO: 2126644 - DNA, 25 bp, Homo sapien
ggcagtcagtatgtgtacaaattac

SEQ ID NO: 2126645 - DNA, 25 bp, Homo sapien
cagtatgtgtacaaattactcccag

SEQ ID NO: 2126646 - DNA, 25 bp, Homo sapien
atgaagagctctttcaactccagag

SEQ ID NO: 2126647 - DNA, 25 bp, Homo sapien
tgaagagctctttcaactccagagc

SEQ ID NO: 2126648 - DNA, 25 bp, Homo sapien
aatgaagagctctttcaactccaga

SEQ ID NO: 2126649 - DNA, 25 bp, Homo sapien
tgagactactcaatctgaaactgag

SEQ ID NO: 2126650 - DNA, 25 bp, Homo sapien
aatcacctattcttgctggacgcgg

SEQ ID NO: 2126651 - DNA, 25 bp, Homo sapien
gtaatctctttgagactactcaatc

SEQ ID NO: 2126652 - DNA, 25 bp, Homo sapien
aaactgaggcgataacttctgaatg

SEQ ID NO: 2126653 - DNA, 25 bp, Homo sapien
tgttaaactggccttcggtaggaga

SEQ ID NO: 2126654 - DNA, 25 bp, Homo sapien
tactggtccctcataatgcagctgg

SEQ ID NO: 2126655 - DNA, 25 bp, Homo sapien
taacccagtgaaagatctagatgcc

SEQ ID NO: 2126656 - DNA, 25 bp, Homo sapien
ttgccttgagacaggtactggtccc

SEQ ID NO: 2126657 - DNA, 25 bp, Homo sapien
taatttcctgtcaggttaatcacat

SEQ ID NO: 2126658 - DNA, 25 bp, Homo sapien
ttcatttcattagggttggtttctg

SEQ ID NO: 2126659 - DNA, 25 bp, Homo sapien
tcttcatttcattagggttggtttc

SEQ ID NO: 2126660 - DNA, 25 bp, Homo sapien
tttaatttcctgtcaggttaatcac

SEQ ID NO: 2126661 - DNA, 25 bp, Homo sapien
gcttcatcgattcttctgttggaca

SEQ ID NO: 2126662 - DNA, 25 bp, Homo sapien
ttacatgatttccaatggcctatct

SEQ ID NO: 2126663 - DNA, 25 bp, Homo sapien
ttccaatggcctatctacaagtttg

SEQ ID NO: 2126664 - DNA, 25 bp, Homo sapien
cgattcttctgttggacacattaaa

SEQ ID NO: 2126665 - DNA, 25 bp, Homo sapien
cacgactgccttctggcgtgaaagt

SEQ ID NO: 2126666 - DNA, 25 bp, Homo sapien
aattcttcccgtgcaggtctagtgg

SEQ ID NO: 2126667 - DNA, 25 bp, Homo sapien
agttttctggtgaagtctgctgaca

SEQ ID NO: 2126668 - DNA, 25 bp, Homo sapien
catacctgatgttcgagattcttag

SEQ ID NO: 2126669 - DNA, 25 bp, Homo sapien
ttcacaccaccgttacagtattagc

SEQ ID NO: 2126670 - DNA, 25 bp, Homo sapien
tgaaccttaaacagtctcttacact

SEQ ID NO: 2126671 - DNA, 25 bp, Homo sapien
tgcaaacgttgtggttaccatgaac

SEQ ID NO: 2126672 - DNA, 25 bp, Homo sapien
tattagcatattctcagtttgactg

SEQ ID NO: 2126673 - DNA, 25 bp, Homo sapien
tgatctcaccattgcttaaagaggt

SEQ ID NO: 2126674 - DNA, 25 bp, Homo sapien
ttgaaaaacgtgtattccactgctg

SEQ ID NO: 2126675 - DNA, 25 bp, Homo sapien
tgtcttttaggtccatatgggcaac

SEQ ID NO: 2126676 - DNA, 25 bp, Homo sapien
taaagaggtgtgctgaagtcccatc

SEQ ID NO: 2126677 - DNA, 25 bp, Homo sapien
ctggaagtattgagacatgtagttt

SEQ ID NO: 2126678 - DNA, 25 bp, Homo sapien
gagacatgtagtttttgatgttcac

SEQ ID NO: 2126679 - DNA, 25 bp, Homo sapien
tatgtatgtttaaccatccttaaat

SEQ ID NO: 2126680 - DNA, 25 bp, Homo sapien
gcaaaaggttatctccccatgtgat

SEQ ID NO: 2126681 - DNA, 25 bp, Homo sapien
caaagatgttaagtattgggccggg

SEQ ID NO: 2126682 - DNA, 25 bp, Homo sapien
gctctgggccggtcatatagggcct

SEQ ID NO: 2126683 - DNA, 25 bp, Homo sapien
ggtgttaagatttcagctctgggcc

SEQ ID NO: 2126684 - DNA, 25 bp, Homo sapien
tatagggcctttaatgtgttgagac

SEQ ID NO: 2126685 - DNA, 25 bp, Homo sapien
taatggattacaaaatcaggtagag

SEQ ID NO: 2126686 - DNA, 25 bp, Homo sapien
tgctggtaccacagttttttgataa

SEQ ID NO: 2126687 - DNA, 25 bp, Homo sapien
ccactggtcagtgaatctgttttta

SEQ ID NO: 2126688 - DNA, 25 bp, Homo sapien
tatgagttatgtctgggctttcctg

SEQ ID NO: 2126689 - DNA, 25 bp, Homo sapien
caactcaagttgtctgttgcgggaa

SEQ ID NO: 2126690 - DNA, 25 bp, Homo sapien
tctcaacccggccaatgcttaggga

SEQ ID NO: 2126691 - DNA, 25 bp, Homo sapien
taagccgaggaggacgtatgtcgcc

SEQ ID NO: 2126692 - DNA, 25 bp, Homo sapien
tgcattccagggatacactgtactg

SEQ ID NO: 2126693 - DNA, 25 bp, Homo sapien
attcttaaaatatgccctttactag

SEQ ID NO: 2126694 - DNA, 25 bp, Homo sapien
aatatgccctttactaggttgtggt

SEQ ID NO: 2126695 - DNA, 25 bp, Homo sapien
gcaccaggttctagttgtgaattct

SEQ ID NO: 2126696 - DNA, 25 bp, Homo sapien
ccacggcaccaggttctagttgtga

SEQ ID NO: 2126697 - DNA, 25 bp, Homo sapien
tcctcttcttacagagaaagcattc

SEQ ID NO: 2126698 - DNA, 25 bp, Homo sapien
ctttaaatactaagtgtaacattag

SEQ ID NO: 2126699 - DNA, 25 bp, Homo sapien
tgaaataaatctgctgtaggccagg

SEQ ID NO: 2126700 - DNA, 25 bp, Homo sapien
tgctaagcctaactaactgtatgtg

SEQ ID NO: 2126701 - DNA, 25 bp, Homo sapien
cagtcaagtgcaggtttggtctaca

SEQ ID NO: 2126702 - DNA, 25 bp, Homo sapien
gaaataggccatgacagcaattgct

SEQ ID NO: 2126703 - DNA, 25 bp, Homo sapien
tgtgaatctcaactggcccaattgt

SEQ ID NO: 2126704 - DNA, 25 bp, Homo sapien
tctgaggaaatgtctcagcctcgga

SEQ ID NO: 2126705 - DNA, 25 bp, Homo sapien
cccatgttgaactggtgaatgtcga

SEQ ID NO: 2126706 - DNA, 25 bp, Homo sapien
tgtgcaaagaactatgaactctgcc

SEQ ID NO: 2126707 - DNA, 25 bp, Homo sapien
ttattgtatggcaatctatctgtcc

SEQ ID NO: 2126708 - DNA, 25 bp, Homo sapien
ttgttttatatgattgagcacttct

SEQ ID NO: 2126709 - DNA, 25 bp, Homo sapien
tggcaatctatctgtccactcagaa

SEQ ID NO: 2126710 - DNA, 25 bp, Homo sapien
tactataacctcttgctgaattaac

SEQ ID NO: 2126711 - DNA, 25 bp, Homo sapien
taaggcctacgcaaagatccatctt

SEQ ID NO: 2126712 - DNA, 25 bp, Homo sapien
tattaatagttgcttcaggtgtaac

SEQ ID NO: 2126713 - DNA, 25 bp, Homo sapien
tagtcttgattcgtaacataaggcc

SEQ ID NO: 2126714 - DNA, 25 bp, Homo sapien
catgactggatttgcgtacgttgta

SEQ ID NO: 2126715 - DNA, 25 bp, Homo sapien
tgtgctcctggcaactttgtgaaga

SEQ ID NO: 2126716 - DNA, 25 bp, Homo sapien
tgtagtctatattaaagccagatac

SEQ ID NO: 2126717 - DNA, 25 bp, Homo sapien
gatacttcaattaccctggatctcc

SEQ ID NO: 2126718 - DNA, 25 bp, Homo sapien
ctactctgttccagttgtgtctgtg

SEQ ID NO: 2126719 - DNA, 25 bp, Homo sapien
agatgcctccgtgagaggctggtgg

SEQ ID NO: 2126720 - DNA, 25 bp, Homo sapien
tcagccctggggtcagtaaccacaa

SEQ ID NO: 2126721 - DNA, 25 bp, Homo sapien
acagagcaatggtaagttggttaac

SEQ ID NO: 2126722 - DNA, 25 bp, Homo sapien
gtaaccacaagccatggctcccgga

SEQ ID NO: 2126723 - DNA, 25 bp, Homo sapien
gagatcaggcatgaactcccacggg

SEQ ID NO: 2126724 - DNA, 25 bp, Homo sapien
ggcatgaactcccacgggtgttcac

SEQ ID NO: 2126725 - DNA, 25 bp, Homo sapien
tagagatcaggcatgaactcccacg

SEQ ID NO: 2126726 - DNA, 25 bp, Homo sapien
catgaactcccacgggtgttcacgg

SEQ ID NO: 2126727 - DNA, 25 bp, Homo sapien
cttgccttattgctgtggtgaaaac

SEQ ID NO: 2126728 - DNA, 25 bp, Homo sapien
ttgtgtcagatagcttgctgtttca

SEQ ID NO: 2126729 - DNA, 25 bp, Homo sapien
tgtaggcattaaaattccttgggta

SEQ ID NO: 2126730 - DNA, 25 bp, Homo sapien
tgaatgcaagtgatgagattgggca

SEQ ID NO: 2126731 - DNA, 25 bp, Homo sapien
tttatgaggtttttaggtgactgaa

SEQ ID NO: 2126732 - DNA, 25 bp, Homo sapien
ctctgattggcacaaaagtatactt

SEQ ID NO: 2126733 - DNA, 25 bp, Homo sapien
tctctgattggcacaaaagtatact

SEQ ID NO: 2126734 - DNA, 25 bp, Homo sapien
atttatgaggtttttaggtgactga

SEQ ID NO: 2126735 - DNA, 25 bp, Homo sapien
tcctgttgtgaccagtggcctccat

SEQ ID NO: 2126736 - DNA, 25 bp, Homo sapien
ttggatgtttgcctaacaagctcct

SEQ ID NO: 2126737 - DNA, 25 bp, Homo sapien
tctccaaggcatcccgatcaacatc

SEQ ID NO: 2126738 - DNA, 25 bp, Homo sapien
cccgatcaacatcatctggatttgg

SEQ ID NO: 2126739 - DNA, 25 bp, Homo sapien
tgagggaagaatgtgggcgagagcc

SEQ ID NO: 2126740 - DNA, 25 bp, Homo sapien
gaatgtgggcgagagcctttattgt

SEQ ID NO: 2126741 - DNA, 25 bp, Homo sapien
aagaagaggcatgccacaccgtcag

SEQ ID NO: 2126742 - DNA, 25 bp, Homo sapien
caccgtcagggttcacccaggaaag

SEQ ID NO: 2126743 - DNA, 25 bp, Homo sapien
taagaaacatagagccaggggaaca

SEQ ID NO: 2126744 - DNA, 25 bp, Homo sapien
cagactctggaaaagtctaaacaat

SEQ ID NO: 2126745 - DNA, 25 bp, Homo sapien
aggtgtgtgtcaccctgcctagctt

SEQ ID NO: 2126746 - DNA, 25 bp, Homo sapien
gagagttaaagaggcttaagagata

SEQ ID NO: 2126747 - DNA, 25 bp, Homo sapien
tgactgcagctccgtgggatcacag

SEQ ID NO: 2126748 - DNA, 25 bp, Homo sapien
ggtggactcccaggcattgctattc

SEQ ID NO: 2126749 - DNA, 25 bp, Homo sapien
tctctgaggcatcagtagtgtttct

SEQ ID NO: 2126750 - DNA, 25 bp, Homo sapien
tcctgacaccagaacaccatcatgg

SEQ ID NO: 2126751 - DNA, 25 bp, Homo sapien
tgtcttccgccctcagggaaaagta

SEQ ID NO: 2126752 - DNA, 25 bp, Homo sapien
tcttccgccctcagggaaaagtagc

SEQ ID NO: 2126753 - DNA, 25 bp, Homo sapien
ttccgccctcagggaaaagtagcat

SEQ ID NO: 2126754 - DNA, 25 bp, Homo sapien
ctgtcttccgccctcagggaaaagt

SEQ ID NO: 2126755 - DNA, 25 bp, Homo sapien
tcaaacagataatcagcaactgctg

SEQ ID NO: 2126756 - DNA, 25 bp, Homo sapien
caggtcactcccagcacagagatgt

SEQ ID NO: 2126757 - DNA, 25 bp, Homo sapien
ccagaccaggacttggcttccagga

SEQ ID NO: 2126758 - DNA, 25 bp, Homo sapien
gcatcacactccgaaatttccctaa

SEQ ID NO: 2126759 - DNA, 25 bp, Homo sapien
gcctcaggatcattcaggctcagtt

SEQ ID NO: 2126760 - DNA, 25 bp, Homo sapien
ctccgcctcaggatcattcaggctc

SEQ ID NO: 2126761 - DNA, 25 bp, Homo sapien
cgcctcaggatcattcaggctcagt

SEQ ID NO: 2126762 - DNA, 25 bp, Homo sapien
ctgctccgcctcaggatcattcagg

SEQ ID NO: 2126763 - DNA, 25 bp, Homo sapien
agtgattcagtgctctttcagtttc

SEQ ID NO: 2126764 - DNA, 25 bp, Homo sapien
agcagagtgattcagtgctctttca

SEQ ID NO: 2126765 - DNA, 25 bp, Homo sapien
cagagtgattcagtgctctttcagt

SEQ ID NO: 2126766 - DNA, 25 bp, Homo sapien
gagtgattcagtgctctttcagttt

SEQ ID NO: 2126767 - DNA, 25 bp, Homo sapien
ggccctgccagtaaaaagagcccag

SEQ ID NO: 2126768 - DNA, 25 bp, Homo sapien
ccctgccagtaaaaagagcccagca

SEQ ID NO: 2126769 - DNA, 25 bp, Homo sapien
aaagagcccagcacctttctcatca

SEQ ID NO: 2126770 - DNA, 25 bp, Homo sapien
ggtggccctgccagtaaaaagagcc

SEQ ID NO: 2126771 - DNA, 25 bp, Homo sapien
tgactttgccctgaaagcagccttt

SEQ ID NO: 2126772 - DNA, 25 bp, Homo sapien
ggctcatgttggtgactttgccctg

SEQ ID NO: 2126773 - DNA, 25 bp, Homo sapien
tctgcctgttggctcatgttggtga

SEQ ID NO: 2126774 - DNA, 25 bp, Homo sapien
gttggtgactttgccctgaaagcag

SEQ ID NO: 2126775 - DNA, 25 bp, Homo sapien
ttcctagcactctgtgtgctgatgt

SEQ ID NO: 2126776 - DNA, 25 bp, Homo sapien
gctgatgtagttctggagaagtgat

SEQ ID NO: 2126777 - DNA, 25 bp, Homo sapien
tgtagttctggagaagtgatagcac

SEQ ID NO: 2126778 - DNA, 25 bp, Homo sapien
gatgtagttctggagaagtgatagc

SEQ ID NO: 2126779 - DNA, 25 bp, Homo sapien
agtcaatgcttaagggcttccctgg

SEQ ID NO: 2126780 - DNA, 25 bp, Homo sapien
tctttgaagactgctatgaaggcct

SEQ ID NO: 2126781 - DNA, 25 bp, Homo sapien
tgagctccaagacaggtaagacaca

SEQ ID NO: 2126782 - DNA, 25 bp, Homo sapien
tatcacccgaggttcttctctgagc

SEQ ID NO: 2126783 - DNA, 25 bp, Homo sapien
ttgtgagacacgtcctctgtggtgc

SEQ ID NO: 2126784 - DNA, 25 bp, Homo sapien
tcttggagccgtgatgggaacctgg

SEQ ID NO: 2126785 - DNA, 25 bp, Homo sapien
gccgtgatgggaacctggatccaca

SEQ ID NO: 2126786 - DNA, 25 bp, Homo sapien
gctttgtgagacacgtcctctgtgg

SEQ ID NO: 2126787 - DNA, 25 bp, Homo sapien
tggcactcgggccgcacgtcgaaca

SEQ ID NO: 2126788 - DNA, 25 bp, Homo sapien
ctagtcaaataaggcatatccattt

SEQ ID NO: 2126789 - DNA, 25 bp, Homo sapien
cattttcaaactgcttgccccggta

SEQ ID NO: 2126790 - DNA, 25 bp, Homo sapien
tgcttgccccggtagaagaggtgct

SEQ ID NO: 2126791 - DNA, 25 bp, Homo sapien
tgaattatatcattcagtccaacat

SEQ ID NO: 2126792 - DNA, 25 bp, Homo sapien
ctgaattatatcattcagtccaaca

SEQ ID NO: 2126793 - DNA, 25 bp, Homo sapien
acagggtttagcctcaatctgtgta

SEQ ID NO: 2126794 - DNA, 25 bp, Homo sapien
gaattatatcattcagtccaacatc

SEQ ID NO: 2126795 - DNA, 25 bp, Homo sapien
ttaccttatatagtccaaagctagg

SEQ ID NO: 2126796 - DNA, 25 bp, Homo sapien
taggatcagtaagatgggcacgagc

SEQ ID NO: 2126797 - DNA, 25 bp, Homo sapien
tagcaacactaggtatgtgtgcttg

SEQ ID NO: 2126798 - DNA, 25 bp, Homo sapien
caacactaggtatgtgtgcttgaaa

SEQ ID NO: 2126799 - DNA, 25 bp, Homo sapien
ttatgttctctttgatttatgatgt

SEQ ID NO: 2126800 - DNA, 25 bp, Homo sapien
tgttctctttgatttatgatgtata

SEQ ID NO: 2126801 - DNA, 25 bp, Homo sapien
tgtatatttccattagtccttttac

SEQ ID NO: 2126802 - DNA, 25 bp, Homo sapien
tgatgtatatttccattagtccttt

SEQ ID NO: 2126803 - DNA, 25 bp, Homo sapien
aacgtcttcatcggcagcgacagag

SEQ ID NO: 2126804 - DNA, 25 bp, Homo sapien
acgtcttcatcggcagcgacagagt

SEQ ID NO: 2126805 - DNA, 25 bp, Homo sapien
taacgtcttcatcggcagcgacaga

SEQ ID NO: 2126806 - DNA, 25 bp, Homo sapien
ataacgtcttcatcggcagcgacag

SEQ ID NO: 2126807 - DNA, 25 bp, Homo sapien
caaacgaaagaggataggctccagg

SEQ ID NO: 2126808 - DNA, 25 bp, Homo sapien
aacgaaagaggataggctccaggtt

SEQ ID NO: 2126809 - DNA, 25 bp, Homo sapien
ctgcaaacgaaagaggataggctcc

SEQ ID NO: 2126810 - DNA, 25 bp, Homo sapien
cgaaagaggataggctccaggtttc

SEQ ID NO: 2126811 - DNA, 25 bp, Homo sapien
tttatccaaaggtgtattcaagcag

SEQ ID NO: 2126812 - DNA, 25 bp, Homo sapien
ttatccaaaggtgtattcaagcagt

SEQ ID NO: 2126813 - DNA, 25 bp, Homo sapien
ctttatccaaaggtgtattcaagca

SEQ ID NO: 2126814 - DNA, 25 bp, Homo sapien
atattcagagttatttctccttaaa

SEQ ID NO: 2126815 - DNA, 25 bp, Homo sapien
tcactcatctcgagtctttcaccag

SEQ ID NO: 2126816 - DNA, 25 bp, Homo sapien
ttcactcatctcgagtctttcacca

SEQ ID NO: 2126817 - DNA, 25 bp, Homo sapien
cttttcactcatctcgagtctttca

SEQ ID NO: 2126818 - DNA, 25 bp, Homo sapien
gctttcttttcactcatctcgagtc

SEQ ID NO: 2126819 - DNA, 25 bp, Homo sapien
tggctttcagtactagcggatggca

SEQ ID NO: 2126820 - DNA, 25 bp, Homo sapien
tctggctttcagtactagcggatgg

SEQ ID NO: 2126821 - DNA, 25 bp, Homo sapien
tctctggctttcagtactagcggat

SEQ ID NO: 2126822 - DNA, 25 bp, Homo sapien
ggctttcagtactagcggatggcat

SEQ ID NO: 2126823 - DNA, 25 bp, Homo sapien
tgaacacctacttcactcacctgaa

SEQ ID NO: 2126824 - DNA, 25 bp, Homo sapien
cacttccagtgtacaagaactcatc

SEQ ID NO: 2126825 - DNA, 25 bp, Homo sapien
caatagtgcattctgtcatatgacc

SEQ ID NO: 2126826 - DNA, 25 bp, Homo sapien
gatccaacaggaataggtccataat

SEQ ID NO: 2126827 - DNA, 25 bp, Homo sapien
ggatactgtaaatgtagacataatc

SEQ ID NO: 2126828 - DNA, 25 bp, Homo sapien
gctggatactgtaaatgtagacata

SEQ ID NO: 2126829 - DNA, 25 bp, Homo sapien
gacatttgaaatcggcctttttgtg

SEQ ID NO: 2126830 - DNA, 25 bp, Homo sapien
tagacatttgaaatcggcctttttg

SEQ ID NO: 2126831 - DNA, 25 bp, Homo sapien
gatgctttgtatactttggaggcac

SEQ ID NO: 2126832 - DNA, 25 bp, Homo sapien
tgatgctttgtatactttggaggca

SEQ ID NO: 2126833 - DNA, 25 bp, Homo sapien
ctgatgctttgtatactttggaggc

SEQ ID NO: 2126834 - DNA, 25 bp, Homo sapien
tgctgttgaggagttagttgaaaag

SEQ ID NO: 2126835 - DNA, 25 bp, Homo sapien
gaggagttagttgaaaagcctcaat

SEQ ID NO: 2126836 - DNA, 25 bp, Homo sapien
tgttgaggagttagttgaaaagcct

SEQ ID NO: 2126837 - DNA, 25 bp, Homo sapien
gagttagttgaaaagcctcaattgc

SEQ ID NO: 2126838 - DNA, 25 bp, Homo sapien
gagggcattttctaccaccacatga

SEQ ID NO: 2126839 - DNA, 25 bp, Homo sapien
ggtatatagcactcttggcttgctg

SEQ ID NO: 2126840 - DNA, 25 bp, Homo sapien
tgtttatcagaggagttcaggtcca

SEQ ID NO: 2126841 - DNA, 25 bp, Homo sapien
tttttgctacaactccaatctgaac

SEQ ID NO: 2126842 - DNA, 25 bp, Homo sapien
ccctgcttgggcacaagacattaag

SEQ ID NO: 2126843 - DNA, 25 bp, Homo sapien
tcccagaccctgcttgggcacaaga

SEQ ID NO: 2126844 - DNA, 25 bp, Homo sapien
gaccctgcttgggcacaagacatta

SEQ ID NO: 2126845 - DNA, 25 bp, Homo sapien
cagaccctgcttgggcacaagacat

SEQ ID NO: 2126846 - DNA, 25 bp, Homo sapien
ctgtacagccaattctcttgttggg

SEQ ID NO: 2126847 - DNA, 25 bp, Homo sapien
tacacaaggatgaactctaggctgg

SEQ ID NO: 2126848 - DNA, 25 bp, Homo sapien
aaatccactagacctcctggcgtgg

SEQ ID NO: 2126849 - DNA, 25 bp, Homo sapien
tagtatcttgttcaagtataagatg

SEQ ID NO: 2126850 - DNA, 25 bp, Homo sapien
ataagatgtatctgaggtccaaatc

SEQ ID NO: 2126851 - DNA, 25 bp, Homo sapien
taaagtcagtgaatccttccctggt

SEQ ID NO: 2126852 - DNA, 25 bp, Homo sapien
accctggattcccacacatcctgta

SEQ ID NO: 2126853 - DNA, 25 bp, Homo sapien
acagccaatacaaggcacatattct

SEQ ID NO: 2126854 - DNA, 25 bp, Homo sapien
atgaggtggcaagaccctggattcc

SEQ ID NO: 2126855 - DNA, 25 bp, Homo sapien
catcctgtacagccaatacaaggca

SEQ ID NO: 2126856 - DNA, 25 bp, Homo sapien
ttctgtatgacccagagtggaggag

SEQ ID NO: 2126857 - DNA, 25 bp, Homo sapien
gtttagccaagccaagcacttaagg

SEQ ID NO: 2126858 - DNA, 25 bp, Homo sapien
gaagacatcgagcatcctccaagtg

SEQ ID NO: 2126859 - DNA, 25 bp, Homo sapien
gagcatacaaggtattttcaaaggg

SEQ ID NO: 2126860 - DNA, 25 bp, Homo sapien
gcttctgtatgtgaccagtacacaa

SEQ ID NO: 2126861 - DNA, 25 bp, Homo sapien
ttctgtatgtgaccagtacacaatt

SEQ ID NO: 2126862 - DNA, 25 bp, Homo sapien
atgcttctgtatgtgaccagtacac

SEQ ID NO: 2126863 - DNA, 25 bp, Homo sapien
ctgtatgtgaccagtacacaattca

SEQ ID NO: 2126864 - DNA, 25 bp, Homo sapien
aacttttcttcactttctgagaagg

SEQ ID NO: 2126865 - DNA, 25 bp, Homo sapien
tttcttcactttctgagaaggacat

SEQ ID NO: 2126866 - DNA, 25 bp, Homo sapien
tacaacttttcttcactttctgaga

SEQ ID NO: 2126867 - DNA, 25 bp, Homo sapien
cttttcttcactttctgagaaggac

SEQ ID NO: 2126868 - DNA, 25 bp, Homo sapien
tttgtctctgtagacagggctcata

SEQ ID NO: 2126869 - DNA, 25 bp, Homo sapien
ttgtctctgtagacagggctcatat

SEQ ID NO: 2126870 - DNA, 25 bp, Homo sapien
gtgaagtcaaatatatctatgcttt

SEQ ID NO: 2126871 - DNA, 25 bp, Homo sapien
cctgctggagtcccgtagcaggaaa

SEQ ID NO: 2126872 - DNA, 25 bp, Homo sapien
gggacggcgccaaatatatcgaact

SEQ ID NO: 2126873 - DNA, 25 bp, Homo sapien
ttttgggatgtgtctcaggccccac

SEQ ID NO: 2126874 - DNA, 25 bp, Homo sapien
gactttttgctgctggctccccatt

SEQ ID NO: 2126875 - DNA, 25 bp, Homo sapien
tttttgctgctggctccccattatt

SEQ ID NO: 2126876 - DNA, 25 bp, Homo sapien
ttgctgctggctccccattatttcc

SEQ ID NO: 2126877 - DNA, 25 bp, Homo sapien
actttttgctgctggctccccatta

SEQ ID NO: 2126878 - DNA, 25 bp, Homo sapien
tgctggtttgagagactcggcgacc

SEQ ID NO: 2126879 - DNA, 25 bp, Homo sapien
tggtttgagagactcggcgacccac

SEQ ID NO: 2126880 - DNA, 25 bp, Homo sapien
gctggtttgagagactcggcgaccc

SEQ ID NO: 2126881 - DNA, 25 bp, Homo sapien
ctggtttgagagactcggcgaccca

SEQ ID NO: 2126882 - DNA, 25 bp, Homo sapien
gaataagcagaagcattgtgatggg

SEQ ID NO: 2126883 - DNA, 25 bp, Homo sapien
ttccaaaagactattgccatgagct

SEQ ID NO: 2126884 - DNA, 25 bp, Homo sapien
tgactagaccgcttccacttcttgg

SEQ ID NO: 2126885 - DNA, 25 bp, Homo sapien
agctttgttcttgaccagtccagtt

SEQ ID NO: 2126886 - DNA, 25 bp, Homo sapien
ggtatggtcctgacacccttgtaga

SEQ ID NO: 2126887 - DNA, 25 bp, Homo sapien
tgtatgagtttacttctgcagtctc

SEQ ID NO: 2126888 - DNA, 25 bp, Homo sapien
aacatttggccgattaatcaagaca

SEQ ID NO: 2126889 - DNA, 25 bp, Homo sapien
catgtatctatgcaattgacccaaa

SEQ ID NO: 2126890 - DNA, 25 bp, Homo sapien
taaggccattaaggacaggatggtg

SEQ ID NO: 2126891 - DNA, 25 bp, Homo sapien
ctgctaaggccattaaggacaggat

SEQ ID NO: 2126892 - DNA, 25 bp, Homo sapien
gatggtgatgcctcggctgactgac

SEQ ID NO: 2126893 - DNA, 25 bp, Homo sapien
gctgactgacgtgagaagattgtca

SEQ ID NO: 2126894 - DNA, 25 bp, Homo sapien
tcttggcccctggccctatgcctgc

SEQ ID NO: 2126895 - DNA, 25 bp, Homo sapien
ggcccctggccctatgcctgcaaca

SEQ ID NO: 2126896 - DNA, 25 bp, Homo sapien
ttggcccctggccctatgcctgcaa

SEQ ID NO: 2126897 - DNA, 25 bp, Homo sapien
tggcccctggccctatgcctgcaac

SEQ ID NO: 2126898 - DNA, 25 bp, Homo sapien
ccacctgaatcaccgagtacatgtt

SEQ ID NO: 2126899 - DNA, 25 bp, Homo sapien
cacctgaatcaccgagtacatgttg

SEQ ID NO: 2126900 - DNA, 25 bp, Homo sapien
cctctgacactgaggtggcatactt

SEQ ID NO: 2126901 - DNA, 25 bp, Homo sapien
tctgacactgaggtggcatacttct

SEQ ID NO: 2126902 - DNA, 25 bp, Homo sapien
ctgacactgaggtggcatacttctc

SEQ ID NO: 2126903 - DNA, 25 bp, Homo sapien
tgacactgaggtggcatacttctcc

SEQ ID NO: 2126904 - DNA, 25 bp, Homo sapien
gtacacctcggcgaagcccaagtac

SEQ ID NO: 2126905 - DNA, 25 bp, Homo sapien
aggtcctgcaggtacacctcggcga

SEQ ID NO: 2126906 - DNA, 25 bp, Homo sapien
gtcctgcaggtacacctcggcgaag

SEQ ID NO: 2126907 - DNA, 25 bp, Homo sapien
cctgcaggtacacctcggcgaagcc

SEQ ID NO: 2126908 - DNA, 25 bp, Homo sapien
gactgaaagtctcccagttgaggca

SEQ ID NO: 2126909 - DNA, 25 bp, Homo sapien
taggatggcggagacatggacttca

SEQ ID NO: 2126910 - DNA, 25 bp, Homo sapien
catagaccgaagaccctcaaaggaa

SEQ ID NO: 2126911 - DNA, 25 bp, Homo sapien
ggaaaggacttcgttcatagaccga

SEQ ID NO: 2126912 - DNA, 25 bp, Homo sapien
tccaggatggtaagagggttttcac

SEQ ID NO: 2126913 - DNA, 25 bp, Homo sapien
tgaagcatgctacccggcttgacct

SEQ ID NO: 2126914 - DNA, 25 bp, Homo sapien
ttctccaatcttctcgtaaggtctt

SEQ ID NO: 2126915 - DNA, 25 bp, Homo sapien
aaggtctttaacaggccctgaagca

SEQ ID NO: 2126916 - DNA, 25 bp, Homo sapien
caggaaatctgctgtcgcaagagga

SEQ ID NO: 2126917 - DNA, 25 bp, Homo sapien
caagaggagggctttgacttacttc

SEQ ID NO: 2126918 - DNA, 25 bp, Homo sapien
gggacctagcaaagagtcaggagaa

SEQ ID NO: 2126919 - DNA, 25 bp, Homo sapien
tcatatcaccagtagaagggtcctg

SEQ ID NO: 2126920 - DNA, 25 bp, Homo sapien
caagactcaatgtcttgagaagttg

SEQ ID NO: 2126921 - DNA, 25 bp, Homo sapien
gactcaatgtcttgagaagttggtg

SEQ ID NO: 2126922 - DNA, 25 bp, Homo sapien
aagactcaatgtcttgagaagttgg

SEQ ID NO: 2126923 - DNA, 25 bp, Homo sapien
tcaagactcaatgtcttgagaagtt

SEQ ID NO: 2126924 - DNA, 25 bp, Homo sapien
tacagcgtccaaaagtgtgtcatct

SEQ ID NO: 2126925 - DNA, 25 bp, Homo sapien
gacaggaagtattcaaaggacagac

SEQ ID NO: 2126926 - DNA, 25 bp, Homo sapien
tagattattaactgcattaagcccc

SEQ ID NO: 2126927 - DNA, 25 bp, Homo sapien
ccagtatcctagaaacaatttgggt

SEQ ID NO: 2126928 - DNA, 25 bp, Homo sapien
tacctctgttgctactgtgagagtc

SEQ ID NO: 2126929 - DNA, 25 bp, Homo sapien
gcgctgtaatacctctgttgctact

SEQ ID NO: 2126930 - DNA, 25 bp, Homo sapien
agttgttgcgctgtaatacctctgt

SEQ ID NO: 2126931 - DNA, 25 bp, Homo sapien
catacctttttaatgtggattggag

SEQ ID NO: 2126932 - DNA, 25 bp, Homo sapien
gcttagttaacgatcagttggttgt

SEQ ID NO: 2126933 - DNA, 25 bp, Homo sapien
tacatgtgggctatctacttttccc

SEQ ID NO: 2126934 - DNA, 25 bp, Homo sapien
tctacatgtgggctatctacttttc

SEQ ID NO: 2126935 - DNA, 25 bp, Homo sapien
atttttgtgtgcttagttaacgatc

SEQ ID NO: 2126936 - DNA, 25 bp, Homo sapien
aagagggctggcaattgaggcacag

SEQ ID NO: 2126937 - DNA, 25 bp, Homo sapien
agagggctggcaattgaggcacaga

SEQ ID NO: 2126938 - DNA, 25 bp, Homo sapien
ttagtggtccatattgtagaatttc

SEQ ID NO: 2126939 - DNA, 25 bp, Homo sapien
agtggtccatattgtagaatttccc

SEQ ID NO: 2126940 - DNA, 25 bp, Homo sapien
tggtccatattgtagaatttccctg

SEQ ID NO: 2126941 - DNA, 25 bp, Homo sapien
gtccatattgtagaatttccctgtg

SEQ ID NO: 2126942 - DNA, 25 bp, Homo sapien
ctactttgtaaaagccactctaggg

SEQ ID NO: 2126943 - DNA, 25 bp, Homo sapien
tgtaaaagccactctagggtcagaa

SEQ ID NO: 2126944 - DNA, 25 bp, Homo sapien
aaagccactctagggtcagaataca

SEQ ID NO: 2126945 - DNA, 25 bp, Homo sapien
cactctagggtcagaatacatccag

SEQ ID NO: 2126946 - DNA, 25 bp, Homo sapien
tatccccttacctgcactgacaggt

SEQ ID NO: 2126947 - DNA, 25 bp, Homo sapien
tgctgatgttgcatggctgttgctg

SEQ ID NO: 2126948 - DNA, 25 bp, Homo sapien
ggtcttagctacttgctgatgttgc

SEQ ID NO: 2126949 - DNA, 25 bp, Homo sapien
cagagtgctcattgtctgaacagaa

SEQ ID NO: 2126950 - DNA, 25 bp, Homo sapien
gtgtctatggctctcgtctaccaga

SEQ ID NO: 2126951 - DNA, 25 bp, Homo sapien
taatccggtgcacattgtaggcctc

SEQ ID NO: 2126952 - DNA, 25 bp, Homo sapien
caacagacattaattgggcgcctgc

SEQ ID NO: 2126953 - DNA, 25 bp, Homo sapien
ggcgcctgctctgtgatctccatgg

SEQ ID NO: 2126954 - DNA, 25 bp, Homo sapien
ccatcaagagttgggaaaggaggcc

SEQ ID NO: 2126955 - DNA, 25 bp, Homo sapien
ggtagcctgggctcaaatctgctct

SEQ ID NO: 2126956 - DNA, 25 bp, Homo sapien
gactcaattgaggaagcagtggcct

SEQ ID NO: 2126957 - DNA, 25 bp, Homo sapien
tctgctctcacacttagcaatgtgg

SEQ ID NO: 2126958 - DNA, 25 bp, Homo sapien
tgtgaactatagaaacagcttgtcg

SEQ ID NO: 2126959 - DNA, 25 bp, Homo sapien
gaatttaaattggaatggccctgaa

SEQ ID NO: 2126960 - DNA, 25 bp, Homo sapien
taacaaccttatgttgcaggacaca

SEQ ID NO: 2126961 - DNA, 25 bp, Homo sapien
taagagaacttatgatagcattggc

SEQ ID NO: 2126962 - DNA, 25 bp, Homo sapien
tgtcacataattaaagctactccag

SEQ ID NO: 2126963 - DNA, 25 bp, Homo sapien
cattttctccccgtcctttgtgcta

SEQ ID NO: 2126964 - DNA, 25 bp, Homo sapien
tgtgcctgttaatctaaagtatgtg

SEQ ID NO: 2126965 - DNA, 25 bp, Homo sapien
taactgtcagccttttttgtgcctg

SEQ ID NO: 2126966 - DNA, 25 bp, Homo sapien
tgaagaaggctccatgtacacttga

SEQ ID NO: 2126967 - DNA, 25 bp, Homo sapien
cttgagaataatatgtatactgtgg

SEQ ID NO: 2126968 - DNA, 25 bp, Homo sapien
tttatgacttagcatatggtctgtg

SEQ ID NO: 2126969 - DNA, 25 bp, Homo sapien
tgggctccaggaattctcctacttt

SEQ ID NO: 2126970 - DNA, 25 bp, Homo sapien
ctggcccctaatcaattttagtttg

SEQ ID NO: 2126971 - DNA, 25 bp, Homo sapien
tctcaaattggaaagttagcttatt

SEQ ID NO: 2126972 - DNA, 25 bp, Homo sapien
tcctaatatctcaaattggaaagtt

SEQ ID NO: 2126973 - DNA, 25 bp, Homo sapien
tggcccctaatcaattttagtttga

SEQ ID NO: 2126974 - DNA, 25 bp, Homo sapien
ccatggcgaaaaccggcacagaagt

SEQ ID NO: 2126975 - DNA, 25 bp, Homo sapien
taggttcacagagctagctatacag

SEQ ID NO: 2126976 - DNA, 25 bp, Homo sapien
tgtcaaatgtagatagatccctttg

SEQ ID NO: 2126977 - DNA, 25 bp, Homo sapien
tgtctgttgacacaatcatgaggtt

SEQ ID NO: 2126978 - DNA, 25 bp, Homo sapien
aattacccgggtgcggtggcgagtg

SEQ ID NO: 2126979 - DNA, 25 bp, Homo sapien
attacccgggtgcggtggcgagtgc

SEQ ID NO: 2126980 - DNA, 25 bp, Homo sapien
ccactactgggttaagtgacctaat

SEQ ID NO: 2126981 - DNA, 25 bp, Homo sapien
gcattctgcctaggacatcgtttca

SEQ ID NO: 2126982 - DNA, 25 bp, Homo sapien
ggcttcttgaagaggagctaatgcc

SEQ ID NO: 2126983 - DNA, 25 bp, Homo sapien
tgaaccatttacctgatagactggg

SEQ ID NO: 2126984 - DNA, 25 bp, Homo sapien
catcctcaagaatgtctgcaaaagg

SEQ ID NO: 2126985 - DNA, 25 bp, Homo sapien
gatatggttttgacccagaaggatg

SEQ ID NO: 2126986 - DNA, 25 bp, Homo sapien
ccttttgcttgtggtacatgtagcc

SEQ ID NO: 2126987 - DNA, 25 bp, Homo sapien
gaatgagcctgatggtagtagtgcc

SEQ ID NO: 2126988 - DNA, 25 bp, Homo sapien
ggttattctacgcttgtaatctgct

SEQ ID NO: 2126989 - DNA, 25 bp, Homo sapien
aacttgttagtgacctgattttgtg

SEQ ID NO: 2126990 - DNA, 25 bp, Homo sapien
tccctatgctaggacatggctgtgt

SEQ ID NO: 2126991 - DNA, 25 bp, Homo sapien
catgcgcgcgtgttttgcatttcta

SEQ ID NO: 2126992 - DNA, 25 bp, Homo sapien
cgagcccgaccagttttccctattg

SEQ ID NO: 2126993 - DNA, 25 bp, Homo sapien
tgtctgacaccaactgggtatcctg

SEQ ID NO: 2126994 - DNA, 25 bp, Homo sapien
tttcaaactatgtgagggcctacct

SEQ ID NO: 2126995 - DNA, 25 bp, Homo sapien
tctaagctctgtaccaggaacagga

SEQ ID NO: 2126996 - DNA, 25 bp, Homo sapien
caggaagctccttgaactttgagtt

SEQ ID NO: 2126997 - DNA, 25 bp, Homo sapien
gatttctaagtacgcgtagattttc

SEQ ID NO: 2126998 - DNA, 25 bp, Homo sapien
atatttcagttagaaggtggtacca

SEQ ID NO: 2126999 - DNA, 25 bp, Homo sapien
cctttttgtcaactattatccttgc

SEQ ID NO: 2127000 - DNA, 25 bp, Homo sapien
tagagttgttaatccaaaagcagca

SEQ ID NO: 2127001 - DNA, 25 bp, Homo sapien
tcactaagtaggcagtttacactga

SEQ ID NO: 2127002 - DNA, 25 bp, Homo sapien
gccaaatctggccaaccgcttgttt

SEQ ID NO: 2127003 - DNA, 25 bp, Homo sapien
cagttctctatatcagggtccagca

SEQ ID NO: 2127004 - DNA, 25 bp, Homo sapien
ggtccagcaaactggcccaagagcc

SEQ ID NO: 2127005 - DNA, 25 bp, Homo sapien
caccatgactgatgtgacaggtgta

SEQ ID NO: 2127006 - DNA, 25 bp, Homo sapien
gctgagggtgtgttgtcagacacca

SEQ ID NO: 2127007 - DNA, 25 bp, Homo sapien
tattttctatggctatgtattaaga

SEQ ID NO: 2127008 - DNA, 25 bp, Homo sapien
tgtattttattatgcggccgccagg

SEQ ID NO: 2127009 - DNA, 25 bp, Homo sapien
gggaccttaatgtgattatgcctgt

SEQ ID NO: 2127010 - DNA, 25 bp, Homo sapien
catctttccattagcattgcgccat

SEQ ID NO: 2127011 - DNA, 25 bp, Homo sapien
gagctactttgtctctctgcgtatc

SEQ ID NO: 2127012 - DNA, 25 bp, Homo sapien
cagccagagcttgtacatctttcca

SEQ ID NO: 2127013 - DNA, 25 bp, Homo sapien
taatgacaggttatttgcaggccac

SEQ ID NO: 2127014 - DNA, 25 bp, Homo sapien
ggcacttgtgattgctagaaacaga

SEQ ID NO: 2127015 - DNA, 25 bp, Homo sapien
gaggattctcttcaggttcgtagcc

SEQ ID NO: 2127016 - DNA, 25 bp, Homo sapien
gaaacagattctctgttgagctcac

SEQ ID NO: 2127017 - DNA, 25 bp, Homo sapien
tagaatgcaacccagtcatgtagca

SEQ ID NO: 2127018 - DNA, 25 bp, Homo sapien
ggcattattggttctcatcactcag

SEQ ID NO: 2127019 - DNA, 25 bp, Homo sapien
tgtagcatccagaagtacctgaacc

SEQ ID NO: 2127020 - DNA, 25 bp, Homo sapien
aagcaaccctttgtgaggtcacaga

SEQ ID NO: 2127021 - DNA, 25 bp, Homo sapien
ttggcacataatacaccactgcatg

SEQ ID NO: 2127022 - DNA, 25 bp, Homo sapien
gcccggccagattcatagttttcaa

SEQ ID NO: 2127023 - DNA, 25 bp, Homo sapien
gaaccaatctcaaatatatcccatg

SEQ ID NO: 2127024 - DNA, 25 bp, Homo sapien
ccagtacactatgttaaggtttcag

SEQ ID NO: 2127025 - DNA, 25 bp, Homo sapien
caggattatgaagtattaattcttc

SEQ ID NO: 2127026 - DNA, 25 bp, Homo sapien
aaatttggctttcaggattatgaag

SEQ ID NO: 2127027 - DNA, 25 bp, Homo sapien
tttggctttcaggattatgaagtat

SEQ ID NO: 2127028 - DNA, 25 bp, Homo sapien
ctaaatttggctttcaggattatga

SEQ ID NO: 2127029 - DNA, 25 bp, Homo sapien
ggaatctcttccttgtcgtgggtct

SEQ ID NO: 2127030 - DNA, 25 bp, Homo sapien
gcagaatattcatacgaataccatg

SEQ ID NO: 2127031 - DNA, 25 bp, Homo sapien
catgttattaccatcccttagagga

SEQ ID NO: 2127032 - DNA, 25 bp, Homo sapien
catgaatattcttcacgggccatgt

SEQ ID NO: 2127033 - DNA, 25 bp, Homo sapien
aaccagttctgatcacctatcccta

SEQ ID NO: 2127034 - DNA, 25 bp, Homo sapien
cctggcatatcatggttgatgtaca

SEQ ID NO: 2127035 - DNA, 25 bp, Homo sapien
ggttgatgtacatagcaatgatcat

SEQ ID NO: 2127036 - DNA, 25 bp, Homo sapien
gaaaccagttctgatcacctatccc

SEQ ID NO: 2127037 - DNA, 25 bp, Homo sapien
tcggaatttggcctttagtaagcat

SEQ ID NO: 2127038 - DNA, 25 bp, Homo sapien
tagcaaagtgtaatacctgagctgg

SEQ ID NO: 2127039 - DNA, 25 bp, Homo sapien
gaatttggcctttagtaagcataga

SEQ ID NO: 2127040 - DNA, 25 bp, Homo sapien
gtaagcatagaatagcaaagtgtaa

SEQ ID NO: 2127041 - DNA, 25 bp, Homo sapien
tgttactcatactgatgcttcctgc

SEQ ID NO: 2127042 - DNA, 25 bp, Homo sapien
tttgttatgcataaaatcacctggg

SEQ ID NO: 2127043 - DNA, 25 bp, Homo sapien
ggtcaagagcaacattaagatctgc

SEQ ID NO: 2127044 - DNA, 25 bp, Homo sapien
aaagattctgtaatagctcctgaga

SEQ ID NO: 2127045 - DNA, 25 bp, Homo sapien
gaaaatataattgtgatgctaagtg

SEQ ID NO: 2127046 - DNA, 25 bp, Homo sapien
atctgagatccatggtgtggctggc

SEQ ID NO: 2127047 - DNA, 25 bp, Homo sapien
agaaaatataattgtgatgctaagt

SEQ ID NO: 2127048 - DNA, 25 bp, Homo sapien
ctgagatccatggtgtggctggctg

SEQ ID NO: 2127049 - DNA, 25 bp, Homo sapien
ggtaggtggttttctgagcagcttc

SEQ ID NO: 2127050 - DNA, 25 bp, Homo sapien
tttagggtaggtggttttctgagca

SEQ ID NO: 2127051 - DNA, 25 bp, Homo sapien
gagcagcttctgcttggttctctcc

SEQ ID NO: 2127052 - DNA, 25 bp, Homo sapien
gcttggttctctcctttaaggcttg

SEQ ID NO: 2127053 - DNA, 25 bp, Homo sapien
taccattctatattggaacacagcc

SEQ ID NO: 2127054 - DNA, 25 bp, Homo sapien
aactgttgctattgctgacacttgc

SEQ ID NO: 2127055 - DNA, 25 bp, Homo sapien
tatcttcctaagagtttctcatgag

SEQ ID NO: 2127056 - DNA, 25 bp, Homo sapien
tcagggcccaggtaatcatccaaat

SEQ ID NO: 2127057 - DNA, 25 bp, Homo sapien
ctctcttgatgttacagccagcagc

SEQ ID NO: 2127058 - DNA, 25 bp, Homo sapien
tgctttttgctatccggttacactg

SEQ ID NO: 2127059 - DNA, 25 bp, Homo sapien
tatccggttacactgggttaatcca

SEQ ID NO: 2127060 - DNA, 25 bp, Homo sapien
tgggttaatccagttagttgtaagc

SEQ ID NO: 2127061 - DNA, 25 bp, Homo sapien
ttagttgtaagctcccatttttcag

SEQ ID NO: 2127062 - DNA, 25 bp, Homo sapien
ctctttgccgtaaacctggaatttg

SEQ ID NO: 2127063 - DNA, 25 bp, Homo sapien
aatttggacctatggctgcctggga

SEQ ID NO: 2127064 - DNA, 25 bp, Homo sapien
aggcgtgaggatttggatgtgtttc

SEQ ID NO: 2127065 - DNA, 25 bp, Homo sapien
ctgagaacataggcgtgaggatttg

SEQ ID NO: 2127066 - DNA, 25 bp, Homo sapien
caatgttaatgttggccgaaagctc

SEQ ID NO: 2127067 - DNA, 25 bp, Homo sapien
gatcttgggtcgctgtacttggctc

SEQ ID NO: 2127068 - DNA, 25 bp, Homo sapien
cacatttgggcagtacgcattcgga

SEQ ID NO: 2127069 - DNA, 25 bp, Homo sapien
cgtaaaaagggagcacttggagaca

SEQ ID NO: 2127070 - DNA, 25 bp, Homo sapien
ggattaaagatgtgcaccgccacgc

SEQ ID NO: 2127071 - DNA, 25 bp, Homo sapien
ggtgatctgcccgcctggacctccc

SEQ ID NO: 2127072 - DNA, 25 bp, Homo sapien
tgaactcttaaccttaggtgatctg

SEQ ID NO: 2127073 - DNA, 25 bp, Homo sapien
tgggattaaagatgtgcaccgccac

SEQ ID NO: 2127074 - DNA, 25 bp, Homo sapien
tgcgatgcgatcttccaatgagcag

SEQ ID NO: 2127075 - DNA, 25 bp, Homo sapien
cgatgcgatcttccaatgagcaggc

SEQ ID NO: 2127076 - DNA, 25 bp, Homo sapien
ggctgcgatgcgatcttccaatgag

SEQ ID NO: 2127077 - DNA, 25 bp, Homo sapien
cggcgcaaccccgctttgggcggct

SEQ ID NO: 2127078 - DNA, 25 bp, Homo sapien
cttagcattacgaccggactcacca

SEQ ID NO: 2127079 - DNA, 25 bp, Homo sapien
tgtaagatagggtggtggaaccaca

SEQ ID NO: 2127080 - DNA, 25 bp, Homo sapien
atccccgagcccaatggccagagtg

SEQ ID NO: 2127081 - DNA, 25 bp, Homo sapien
gccagagtgtccacacgcgaagaaa

SEQ ID NO: 2127082 - DNA, 25 bp, Homo sapien
gaatgtgcccaagtttgccgcaaga

SEQ ID NO: 2127083 - DNA, 25 bp, Homo sapien
tagcagatgtttccgagaaggacac

SEQ ID NO: 2127084 - DNA, 25 bp, Homo sapien
tataacagtgttggcgtctctctcg

SEQ ID NO: 2127085 - DNA, 25 bp, Homo sapien
cagatgtcctagtctgccgcaggta

SEQ ID NO: 2127086 - DNA, 25 bp, Homo sapien
acgtggccaatctcgccgcatcggt

SEQ ID NO: 2127087 - DNA, 25 bp, Homo sapien
tgccgcagcggtagcagttgacctg

SEQ ID NO: 2127088 - DNA, 25 bp, Homo sapien
cttgctgcaattgatggccacgtgg

SEQ ID NO: 2127089 - DNA, 25 bp, Homo sapien
ctagatgtcgggatttgccgcagcg

SEQ ID NO: 2127090 - DNA, 25 bp, Homo sapien
ggtaattaaagctcacttgcctgag

SEQ ID NO: 2127091 - DNA, 25 bp, Homo sapien
gagagtagcctcaatctatcgacct

SEQ ID NO: 2127092 - DNA, 25 bp, Homo sapien
gcagaagcaacacgttaattgtggg

SEQ ID NO: 2127093 - DNA, 25 bp, Homo sapien
ggtgctcagaatgactatttaataa

SEQ ID NO: 2127094 - DNA, 25 bp, Homo sapien
ccccagccgatcaatcttatagctg

SEQ ID NO: 2127095 - DNA, 25 bp, Homo sapien
tcccagaatgtcctctaccagttgc

SEQ ID NO: 2127096 - DNA, 25 bp, Homo sapien
tgtatggttcacaaggcctccacct

SEQ ID NO: 2127097 - DNA, 25 bp, Homo sapien
tgtatccttctctcccagaatgtcc

SEQ ID NO: 2127098 - DNA, 25 bp, Homo sapien
tgccccttttgtacatccttgctgg

SEQ ID NO: 2127099 - DNA, 25 bp, Homo sapien
gaccttgacaatgaacataaaggtc

SEQ ID NO: 2127100 - DNA, 25 bp, Homo sapien
cttttgtacatccttgctggtcttc

SEQ ID NO: 2127101 - DNA, 25 bp, Homo sapien
ataaaggtccctgagcaaggctgcc

SEQ ID NO: 2127102 - DNA, 25 bp, Homo sapien
tgctgatgcagagggccaaaatgtt

SEQ ID NO: 2127103 - DNA, 25 bp, Homo sapien
cttccttgctgatgcagagggccaa

SEQ ID NO: 2127104 - DNA, 25 bp, Homo sapien
ccttgctgatgcagagggccaaaat

SEQ ID NO: 2127105 - DNA, 25 bp, Homo sapien
tccttgctgatgcagagggccaaaa

SEQ ID NO: 2127106 - DNA, 25 bp, Homo sapien
ctcccataggccttttaccctctgg

SEQ ID NO: 2127107 - DNA, 25 bp, Homo sapien
ccctctggggacaagaagttctcat

SEQ ID NO: 2127108 - DNA, 25 bp, Homo sapien
cctcccataggccttttaccctctg

SEQ ID NO: 2127109 - DNA, 25 bp, Homo sapien
taccctctggggacaagaagttctc

SEQ ID NO: 2127110 - DNA, 25 bp, Homo sapien
cacacccccggtgagcctcatccag

SEQ ID NO: 2127111 - DNA, 25 bp, Homo sapien
agaacttttggaagcagctccccaa

SEQ ID NO: 2127112 - DNA, 25 bp, Homo sapien
gtgccccacacccccggtgagcctc

SEQ ID NO: 2127113 - DNA, 25 bp, Homo sapien
ccaaagaggtgctgactgcctgagt

SEQ ID NO: 2127114 - DNA, 25 bp, Homo sapien
aatgaggggctgaaatgagagggtg

SEQ ID NO: 2127115 - DNA, 25 bp, Homo sapien
gggctgaaatgagagggtgcagttg

SEQ ID NO: 2127116 - DNA, 25 bp, Homo sapien
cagcacagacgctgttcaatgaggg

SEQ ID NO: 2127117 - DNA, 25 bp, Homo sapien
agcagcacagacgctgttcaatgag

SEQ ID NO: 2127118 - DNA, 25 bp, Homo sapien
tggcaaccaaaccagctgccatagg

SEQ ID NO: 2127119 - DNA, 25 bp, Homo sapien
ctggcaaccaaaccagctgccatag

SEQ ID NO: 2127120 - DNA, 25 bp, Homo sapien
tgtccaccaggagtaaaccacggaa

SEQ ID NO: 2127121 - DNA, 25 bp, Homo sapien
gggctgtccaccaggagtaaaccac

SEQ ID NO: 2127122 - DNA, 25 bp, Homo sapien
gcaagccttcgggctgtgagcttct

SEQ ID NO: 2127123 - DNA, 25 bp, Homo sapien
gccagactctcaggagggagcaagc

SEQ ID NO: 2127124 - DNA, 25 bp, Homo sapien
ggtgcgtgcattccctctccgtctc

SEQ ID NO: 2127125 - DNA, 25 bp, Homo sapien
caggtgcgtgcattccctctccgtc

SEQ ID NO: 2127126 - DNA, 25 bp, Homo sapien
aggtgcgtgcattccctctccgtct

SEQ ID NO: 2127127 - DNA, 25 bp, Homo sapien
taagcacccggtcatcaaagagaat

SEQ ID NO: 2127128 - DNA, 25 bp, Homo sapien
tatctaagcagagacggagggtcct

SEQ ID NO: 2127129 - DNA, 25 bp, Homo sapien
caggaggaagtaagcacccggtcat

SEQ ID NO: 2127130 - DNA, 25 bp, Homo sapien
cattcagccagtggttaaactccag

SEQ ID NO: 2127131 - DNA, 25 bp, Homo sapien
gtcatttcatccgtccttaggcaat

SEQ ID NO: 2127132 - DNA, 25 bp, Homo sapien
tgatcggtacagtagttttgacccc

SEQ ID NO: 2127133 - DNA, 25 bp, Homo sapien
atcactgagcacactatagctcaga

SEQ ID NO: 2127134 - DNA, 25 bp, Homo sapien
tagttcagacattcaatcactgagc

SEQ ID NO: 2127135 - DNA, 25 bp, Homo sapien
tgaatgaaaagtacagggagatccc

SEQ ID NO: 2127136 - DNA, 25 bp, Homo sapien
catggaataaatcacacatggtcat

SEQ ID NO: 2127137 - DNA, 25 bp, Homo sapien
tcctttttagcctgtagatgtgatg

SEQ ID NO: 2127138 - DNA, 25 bp, Homo sapien
caacagaagtggtacatgtatttca

SEQ ID NO: 2127139 - DNA, 25 bp, Homo sapien
gggagattccggattcaaactcatc

SEQ ID NO: 2127140 - DNA, 25 bp, Homo sapien
agagcctgggagattccggattcaa

SEQ ID NO: 2127141 - DNA, 25 bp, Homo sapien
gattccggattcaaactcatccggc

SEQ ID NO: 2127142 - DNA, 25 bp, Homo sapien
ccggattcaaactcatccggcttct

SEQ ID NO: 2127143 - DNA, 25 bp, Homo sapien
aaaatatgcttcactgaactttttc

SEQ ID NO: 2127144 - DNA, 25 bp, Homo sapien
taaagaaaatatgcttcactgaact

SEQ ID NO: 2127145 - DNA, 25 bp, Homo sapien
ctgagcgataaagaaaatatgcttc

SEQ ID NO: 2127146 - DNA, 25 bp, Homo sapien
tgaactttttcttcaattcgcgtac

SEQ ID NO: 2127147 - DNA, 25 bp, Homo sapien
ctgtgagagtacagctcctgggaag

SEQ ID NO: 2127148 - DNA, 25 bp, Homo sapien
ttcgtccaaatgaatctttatgagg

SEQ ID NO: 2127149 - DNA, 25 bp, Homo sapien
tgaatctttatgaggtggctgccat

SEQ ID NO: 2127150 - DNA, 25 bp, Homo sapien
tcatgcacagctgtgagagtacagc

SEQ ID NO: 2127151 - DNA, 25 bp, Homo sapien
tttactcgcctacctactccagccg

SEQ ID NO: 2127152 - DNA, 25 bp, Homo sapien
tccttttactcgcctacctactcca

SEQ ID NO: 2127153 - DNA, 25 bp, Homo sapien
cttttactcgcctacctactccagc

SEQ ID NO: 2127154 - DNA, 25 bp, Homo sapien
ctacctactccagccgccactgcct

SEQ ID NO: 2127155 - DNA, 25 bp, Homo sapien
agacggtccctcgagccctctcctc

SEQ ID NO: 2127156 - DNA, 25 bp, Homo sapien
gctggccagcccgtcccgcgacaga

SEQ ID NO: 2127157 - DNA, 25 bp, Homo sapien
cagaggagccgctttgtggctggta

SEQ ID NO: 2127158 - DNA, 25 bp, Homo sapien
gtcccgcgacagacggtccctcgag

SEQ ID NO: 2127159 - DNA, 25 bp, Homo sapien
ttgcttcctcgctcgcctggctttg

SEQ ID NO: 2127160 - DNA, 25 bp, Homo sapien
gccagggcccctttgcttcctcgct

SEQ ID NO: 2127161 - DNA, 25 bp, Homo sapien
cctgctgttcctggtctgcctcctg

SEQ ID NO: 2127162 - DNA, 25 bp, Homo sapien
cgctcgcctggctttgcagcgccat

SEQ ID NO: 2127163 - DNA, 25 bp, Homo sapien
ctcagactccggctctgggctaccc

SEQ ID NO: 2127164 - DNA, 25 bp, Homo sapien
tgccgaagatggagccgttgcacca

SEQ ID NO: 2127165 - DNA, 25 bp, Homo sapien
tcccgacagagttatggatgccgaa

SEQ ID NO: 2127166 - DNA, 25 bp, Homo sapien
tctagcagcatggagtagaggatcc

SEQ ID NO: 2127167 - DNA, 25 bp, Homo sapien
gcttggaactccacttggcgatttt

SEQ ID NO: 2127168 - DNA, 25 bp, Homo sapien
ccactgacgcactatcttcatcggg

SEQ ID NO: 2127169 - DNA, 25 bp, Homo sapien
ggatcacaaggtctgaggcaccaag

SEQ ID NO: 2127170 - DNA, 25 bp, Homo sapien
caagagacttcctttgacaaccact

SEQ ID NO: 2127171 - DNA, 25 bp, Homo sapien
gcctgcacaccgctgctgtgccaat

SEQ ID NO: 2127172 - DNA, 25 bp, Homo sapien
aggcagcaaataaacctgtctggag

SEQ ID NO: 2127173 - DNA, 25 bp, Homo sapien
gagtcctgctgacctccgttatcca

SEQ ID NO: 2127174 - DNA, 25 bp, Homo sapien
gagctttccatgtttgagatattct

SEQ ID NO: 2127175 - DNA, 25 bp, Homo sapien
tttggccagatctaaggaaaccttg

SEQ ID NO: 2127176 - DNA, 25 bp, Homo sapien
caacatctggtctgaccggtttcac

SEQ ID NO: 2127177 - DNA, 25 bp, Homo sapien
tcaacatctggtctgaccggtttca

SEQ ID NO: 2127178 - DNA, 25 bp, Homo sapien
cctctttgaagcaaatatacttcat

SEQ ID NO: 2127179 - DNA, 25 bp, Homo sapien
taatgaccccaggacctctttgaag

SEQ ID NO: 2127180 - DNA, 25 bp, Homo sapien
ttaggctctaatgaccccaggacct

SEQ ID NO: 2127181 - DNA, 25 bp, Homo sapien
tctctccaaaaccttaggctctaat

SEQ ID NO: 2127182 - DNA, 25 bp, Homo sapien
tgcttataaacctcaataccctcac

SEQ ID NO: 2127183 - DNA, 25 bp, Homo sapien
ttcctcttgcttataaacctcaata

SEQ ID NO: 2127184 - DNA, 25 bp, Homo sapien
attccccaactatgttcctcttgct

SEQ ID NO: 2127185 - DNA, 25 bp, Homo sapien
tcttgcttataaacctcaataccct

SEQ ID NO: 2127186 - DNA, 25 bp, Homo sapien
tgagtcagagccccgggccaactca

SEQ ID NO: 2127187 - DNA, 25 bp, Homo sapien
tcagagccccgggccaactcagccc

SEQ ID NO: 2127188 - DNA, 25 bp, Homo sapien
gagtcagagccccgggccaactcag

SEQ ID NO: 2127189 - DNA, 25 bp, Homo sapien
gagccccgggccaactcagcccgag

SEQ ID NO: 2127190 - DNA, 25 bp, Homo sapien
gcagaatatggtgccaggacagcca

SEQ ID NO: 2127191 - DNA, 25 bp, Homo sapien
tggtagaacccaagctttcggattc

SEQ ID NO: 2127192 - DNA, 25 bp, Homo sapien
tttcggattccttgtggcatgctcc

SEQ ID NO: 2127193 - DNA, 25 bp, Homo sapien
gagggagatattggtaaaatttgca

SEQ ID NO: 2127194 - DNA, 25 bp, Homo sapien
ctcgtattgtgctctgatagcggac

SEQ ID NO: 2127195 - DNA, 25 bp, Homo sapien
ttgtgctctgatagcggacagtcat

SEQ ID NO: 2127196 - DNA, 25 bp, Homo sapien
aatttagctcgtattgtgctctgat

SEQ ID NO: 2127197 - DNA, 25 bp, Homo sapien
ctactgctagtaatttagctcgtat

SEQ ID NO: 2127198 - DNA, 25 bp, Homo sapien
ctgagcctttggcatctctctgctt

SEQ ID NO: 2127199 - DNA, 25 bp, Homo sapien
tgagcctttggcatctctctgcttc

SEQ ID NO: 2127200 - DNA, 25 bp, Homo sapien
tttggcatctctctgcttctctttc

SEQ ID NO: 2127201 - DNA, 25 bp, Homo sapien
gcctttggcatctctctgcttctct

SEQ ID NO: 2127202 - DNA, 25 bp, Homo sapien
tcactgctcactctctgattcaaca

SEQ ID NO: 2127203 - DNA, 25 bp, Homo sapien
tgctcactctctgattcaacaggta

SEQ ID NO: 2127204 - DNA, 25 bp, Homo sapien
gctcactctctgattcaacaggtac

SEQ ID NO: 2127205 - DNA, 25 bp, Homo sapien
actgctcactctctgattcaacagg

SEQ ID NO: 2127206 - DNA, 25 bp, Homo sapien
tcaggctactcgagaaacaaacact

SEQ ID NO: 2127207 - DNA, 25 bp, Homo sapien
gctgaaaggctcaggaggagacact

SEQ ID NO: 2127208 - DNA, 25 bp, Homo sapien
tctctggatgcctgcaagggctcta

SEQ ID NO: 2127209 - DNA, 25 bp, Homo sapien
ccaaaggcgcttgggaaccagaaag

SEQ ID NO: 2127210 - DNA, 25 bp, Homo sapien
gctggccataggctggcctagtact

SEQ ID NO: 2127211 - DNA, 25 bp, Homo sapien
tggccataggctggcctagtactgg

SEQ ID NO: 2127212 - DNA, 25 bp, Homo sapien
ccataggctggcctagtactggaga

SEQ ID NO: 2127213 - DNA, 25 bp, Homo sapien
ttgctggccataggctggcctagta

SEQ ID NO: 2127214 - DNA, 25 bp, Homo sapien
gcaaaacagttctcattccctgggg

SEQ ID NO: 2127215 - DNA, 25 bp, Homo sapien
gagagcaaaacagttctcattccct

SEQ ID NO: 2127216 - DNA, 25 bp, Homo sapien
ctaggagagcaaaacagttctcatt

SEQ ID NO: 2127217 - DNA, 25 bp, Homo sapien
gagcaaaacagttctcattccctgg

SEQ ID NO: 2127218 - DNA, 25 bp, Homo sapien
gctgggcttgcagttctcttgggtc

SEQ ID NO: 2127219 - DNA, 25 bp, Homo sapien
taggctttccccaagaatgatgctt

SEQ ID NO: 2127220 - DNA, 25 bp, Homo sapien
tctcccaccagataaggacatcttg

SEQ ID NO: 2127221 - DNA, 25 bp, Homo sapien
tggaggtggtattgaccagccctct

SEQ ID NO: 2127222 - DNA, 25 bp, Homo sapien
tcccagagccacactattgtgaaca

SEQ ID NO: 2127223 - DNA, 25 bp, Homo sapien
cccagagccacactattgtgaacat

SEQ ID NO: 2127224 - DNA, 25 bp, Homo sapien
tctgtccctcttcagtgagggcact

SEQ ID NO: 2127225 - DNA, 25 bp, Homo sapien
cctcttcagtgagggcacttcccag

SEQ ID NO: 2127226 - DNA, 25 bp, Homo sapien
agactgaggcacatgcacccaaggg

SEQ ID NO: 2127227 - DNA, 25 bp, Homo sapien
gatatttaggaatcaaggtttcttc

SEQ ID NO: 2127228 - DNA, 25 bp, Homo sapien
gaggcacatgcacccaagggcagtc

SEQ ID NO: 2127229 - DNA, 25 bp, Homo sapien
gcacagatatttaggaatcaaggtt

SEQ ID NO: 2127230 - DNA, 25 bp, Homo sapien
tggctgattttctcgagtatctttg

SEQ ID NO: 2127231 - DNA, 25 bp, Homo sapien
acagatgagaacttcttgtccccag

SEQ ID NO: 2127232 - DNA, 25 bp, Homo sapien
caggatgttgcctggacactccctt

SEQ ID NO: 2127233 - DNA, 25 bp, Homo sapien
ccggagacttccctgtacttgcagt

SEQ ID NO: 2127234 - DNA, 25 bp, Homo sapien
ttaagtttttgaagcgatgggatct

SEQ ID NO: 2127235 - DNA, 25 bp, Homo sapien
tttaagtttttgaagcgatgggatc

SEQ ID NO: 2127236 - DNA, 25 bp, Homo sapien
agtttttgaagcgatgggatcttgc

SEQ ID NO: 2127237 - DNA, 25 bp, Homo sapien
taagtttttgaagcgatgggatctt

SEQ ID NO: 2127238 - DNA, 25 bp, Homo sapien
tatggaggccaatgaaagcaacggc

SEQ ID NO: 2127239 - DNA, 25 bp, Homo sapien
attcggcagcccaaacggtcagtga

SEQ ID NO: 2127240 - DNA, 25 bp, Homo sapien
gaagatcatacccatcgcgagggct

SEQ ID NO: 2127241 - DNA, 25 bp, Homo sapien
ccccgcggttgctgtgattcggcag

SEQ ID NO: 2127242 - DNA, 25 bp, Homo sapien
caaaggtctgcaagaagtcaaaatc

SEQ ID NO: 2127243 - DNA, 25 bp, Homo sapien
aagcttttatcccaggtagcaacaa

SEQ ID NO: 2127244 - DNA, 25 bp, Homo sapien
caacaaaggtctgcaagaagtcaaa

SEQ ID NO: 2127245 - DNA, 25 bp, Homo sapien
gtagcaacaaaggtctgcaagaagt

SEQ ID NO: 2127246 - DNA, 25 bp, Homo sapien
ggtgcggacacctctcttgcttggg

SEQ ID NO: 2127247 - DNA, 25 bp, Homo sapien
agcaattccgaaggcccagatgcgg

SEQ ID NO: 2127248 - DNA, 25 bp, Homo sapien
gaatcccgtaggtgaagtagcgcag

SEQ ID NO: 2127249 - DNA, 25 bp, Homo sapien
cgttggcggaacactcgcatgttga

SEQ ID NO: 2127250 - DNA, 25 bp, Homo sapien
aaggcctgaggtagccccaatacac

SEQ ID NO: 2127251 - DNA, 25 bp, Homo sapien
tgatgtggcctgacacaagacgccc

SEQ ID NO: 2127252 - DNA, 25 bp, Homo sapien
agtccagggatggagtcactgatgt

SEQ ID NO: 2127253 - DNA, 25 bp, Homo sapien
ccaggtctccttgatttctgagaac

SEQ ID NO: 2127254 - DNA, 25 bp, Homo sapien
tgtctgttaaacatcctccatgagg

SEQ ID NO: 2127255 - DNA, 25 bp, Homo sapien
taagagattcacacacaactatggg

SEQ ID NO: 2127256 - DNA, 25 bp, Homo sapien
gaaacaggcctcaagaattggcaca

SEQ ID NO: 2127257 - DNA, 25 bp, Homo sapien
taccaacattaagagccacagagtc

SEQ ID NO: 2127258 - DNA, 25 bp, Homo sapien
tgcaacctgtgttggccagctagac

SEQ ID NO: 2127259 - DNA, 25 bp, Homo sapien
ggactgcactgcctatctcagacat

SEQ ID NO: 2127260 - DNA, 25 bp, Homo sapien
ggaaaccattgggacattcacccag

SEQ ID NO: 2127261 - DNA, 25 bp, Homo sapien
tctcagacatctcagacacatggct

SEQ ID NO: 2127262 - DNA, 25 bp, Homo sapien
caatcattggcagggccatcatgcc

SEQ ID NO: 2127263 - DNA, 25 bp, Homo sapien
gaaaagacagacgacgataaggccc

SEQ ID NO: 2127264 - DNA, 25 bp, Homo sapien
agaagccatcgcaaaggcccaggaa

SEQ ID NO: 2127265 - DNA, 25 bp, Homo sapien
tgggcccaccagctcaaatgcaatg

SEQ ID NO: 2127266 - DNA, 25 bp, Homo sapien
gaaggccacatggtagtccccaaaa

SEQ ID NO: 2127267 - DNA, 25 bp, Homo sapien
tccccaaaacagttgcggagtaggc

SEQ ID NO: 2127268 - DNA, 25 bp, Homo sapien
gaagaggattacagccccgatgatg

SEQ ID NO: 2127269 - DNA, 25 bp, Homo sapien
cacaccggcaaagtagaaggccaca

SEQ ID NO: 2127270 - DNA, 25 bp, Homo sapien
ggtgactaacaagctgggtccagga

SEQ ID NO: 2127271 - DNA, 25 bp, Homo sapien
ggatggcaatgacctcctcagcaaa

SEQ ID NO: 2127272 - DNA, 25 bp, Homo sapien
gggagcagactgttaaccaaccata

SEQ ID NO: 2127273 - DNA, 25 bp, Homo sapien
gactccaaggagattgtcaggtggc

SEQ ID NO: 2127274 - DNA, 25 bp, Homo sapien
cccagctgcctgtttgtaacggaaa

SEQ ID NO: 2127275 - DNA, 25 bp, Homo sapien
tgtgctaactgaacacagcctggca

SEQ ID NO: 2127276 - DNA, 25 bp, Homo sapien
tctaagcaaagtggcctaggatgcc

SEQ ID NO: 2127277 - DNA, 25 bp, Homo sapien
ttaactgtggtgcataagaggctgc

SEQ ID NO: 2127278 - DNA, 25 bp, Homo sapien
gccaagattgcatggtctggagtga

SEQ ID NO: 2127279 - DNA, 25 bp, Homo sapien
tctccaagccaagattgcatggtct

SEQ ID NO: 2127280 - DNA, 25 bp, Homo sapien
caagccaagattgcatggtctggag

SEQ ID NO: 2127281 - DNA, 25 bp, Homo sapien
ggtctccaagccaagattgcatggt

SEQ ID NO: 2127282 - DNA, 25 bp, Homo sapien
gaagttcccggattctagcagagtg

SEQ ID NO: 2127283 - DNA, 25 bp, Homo sapien
gaactttgcgcttggtgaccgctag

SEQ ID NO: 2127284 - DNA, 25 bp, Homo sapien
tcagagaggaccgaattttggcgct

SEQ ID NO: 2127285 - DNA, 25 bp, Homo sapien
ttttggcgctaaggtcggtactctc

SEQ ID NO: 2127286 - DNA, 25 bp, Homo sapien
cggttgtcatgggtgggcggattcc

SEQ ID NO: 2127287 - DNA, 25 bp, Homo sapien
gaagatgcatttccgtggcgcggct

SEQ ID NO: 2127288 - DNA, 25 bp, Homo sapien
gcggattcccgtctgaatagcaggg

SEQ ID NO: 2127289 - DNA, 25 bp, Homo sapien
ggaaatggatggagacccgcggcgg

SEQ ID NO: 2127290 - DNA, 25 bp, Homo sapien
cagggcccgaggctaggtcttcccg

SEQ ID NO: 2127291 - DNA, 25 bp, Homo sapien
gctacggcccctggtgtcggtggag

SEQ ID NO: 2127292 - DNA, 25 bp, Homo sapien
aggagctgagctcggacacgcagca

SEQ ID NO: 2127293 - DNA, 25 bp, Homo sapien
tatccgtctggcttgctggcagttg

SEQ ID NO: 2127294 - DNA, 25 bp, Homo sapien
gagtctgggctcctgtaggtctttc

SEQ ID NO: 2127295 - DNA, 25 bp, Homo sapien
ttggaggttgcagaggagggcggag

SEQ ID NO: 2127296 - DNA, 25 bp, Homo sapien
gtaggtctttcgctagcagccgcct

SEQ ID NO: 2127297 - DNA, 25 bp, Homo sapien
atcctggcgggcctcgagtctgggc

SEQ ID NO: 2127298 - DNA, 25 bp, Homo sapien
ccggagttctgaaagagtttttatg

SEQ ID NO: 2127299 - DNA, 25 bp, Homo sapien
cagcatggttgattccccggagttc

SEQ ID NO: 2127300 - DNA, 25 bp, Homo sapien
tgattccccggagttctgaaagagt

SEQ ID NO: 2127301 - DNA, 25 bp, Homo sapien
cgcttgaagggtgggccaagtcttt

SEQ ID NO: 2127302 - DNA, 25 bp, Homo sapien
agcctaggaaatcccgcgtgctccc

SEQ ID NO: 2127303 - DNA, 25 bp, Homo sapien
cactcttgaggctccgtccaggctt

SEQ ID NO: 2127304 - DNA, 25 bp, Homo sapien
cgcgtgctcccctgtgtgatcggga

SEQ ID NO: 2127305 - DNA, 25 bp, Homo sapien
actcttgaggctccgtccaggcttg

SEQ ID NO: 2127306 - DNA, 25 bp, Homo sapien
ctggaagtttcagactcaacatcat

SEQ ID NO: 2127307 - DNA, 25 bp, Homo sapien
gtctggaagtttcagactcaacatc

SEQ ID NO: 2127308 - DNA, 25 bp, Homo sapien
ttgtctggaagtttcagactcaaca

SEQ ID NO: 2127309 - DNA, 25 bp, Homo sapien
tctggaagtttcagactcaacatca

SEQ ID NO: 2127310 - DNA, 25 bp, Homo sapien
aggcctagcagcctgtccctcagtt

SEQ ID NO: 2127311 - DNA, 25 bp, Homo sapien
tgttctaaacatacagtttgctcca

SEQ ID NO: 2127312 - DNA, 25 bp, Homo sapien
ctagcagcctgtccctcagttttgt

SEQ ID NO: 2127313 - DNA, 25 bp, Homo sapien
ggctcagcagcttccgttgttctaa

SEQ ID NO: 2127314 - DNA, 25 bp, Homo sapien
tgaccagatactgccagtcaaggcc

SEQ ID NO: 2127315 - DNA, 25 bp, Homo sapien
gcagcaggatcatgaccagatactg

SEQ ID NO: 2127316 - DNA, 25 bp, Homo sapien
caggatcatgaccagatactgccag

SEQ ID NO: 2127317 - DNA, 25 bp, Homo sapien
tcatgaccagatactgccagtcaag

SEQ ID NO: 2127318 - DNA, 25 bp, Homo sapien
tctgatagttgagtccacatccaca

SEQ ID NO: 2127319 - DNA, 25 bp, Homo sapien
tcacctgctctgatagttgagtcca

SEQ ID NO: 2127320 - DNA, 25 bp, Homo sapien
tgtcacctgctctgatagttgagtc

SEQ ID NO: 2127321 - DNA, 25 bp, Homo sapien
cctgctctgatagttgagtccacat

SEQ ID NO: 2127322 - DNA, 25 bp, Homo sapien
tcctgatttcctcttagcaattttc

SEQ ID NO: 2127323 - DNA, 25 bp, Homo sapien
ttagcaattttccatcctctgacct

SEQ ID NO: 2127324 - DNA, 25 bp, Homo sapien
tggtccttggctgtaaagtcccact

SEQ ID NO: 2127325 - DNA, 25 bp, Homo sapien
ttggctgtaaagtcccactggccca

SEQ ID NO: 2127326 - DNA, 25 bp, Homo sapien
atacttaagttctgaggcttttagc

SEQ ID NO: 2127327 - DNA, 25 bp, Homo sapien
tctccacctttcagaatcattttag

SEQ ID NO: 2127328 - DNA, 25 bp, Homo sapien
ctcaggtgactcaatacttaagttc

SEQ ID NO: 2127329 - DNA, 25 bp, Homo sapien
ctccacctttcagaatcattttagg

SEQ ID NO: 2127330 - DNA, 25 bp, Homo sapien
accagttcagtcatgagtgaagtca

SEQ ID NO: 2127331 - DNA, 25 bp, Homo sapien
ttcagtcatgagtgaagtcatctgg

SEQ ID NO: 2127332 - DNA, 25 bp, Homo sapien
catcctgagacaattggtggcaggc

SEQ ID NO: 2127333 - DNA, 25 bp, Homo sapien
ccaggttcttagttctgggtttcag

SEQ ID NO: 2127334 - DNA, 25 bp, Homo sapien
gcaaatgggagactggattagctgt

SEQ ID NO: 2127335 - DNA, 25 bp, Homo sapien
tatggggtcccaatcttggtgtcca

SEQ ID NO: 2127336 - DNA, 25 bp, Homo sapien
gtgccaccggtgttccaactgttta

SEQ ID NO: 2127337 - DNA, 25 bp, Homo sapien
ctgtagctgtactacaagcccacca

SEQ ID NO: 2127338 - DNA, 25 bp, Homo sapien
gtagctgtactacaagcccaccaag

SEQ ID NO: 2127339 - DNA, 25 bp, Homo sapien
agctgtactacaagcccaccaagct

SEQ ID NO: 2127340 - DNA, 25 bp, Homo sapien
cagcagactcctggttgggaagccc

SEQ ID NO: 2127341 - DNA, 25 bp, Homo sapien
aagttgagtaggtacgcagttggcc

SEQ ID NO: 2127342 - DNA, 25 bp, Homo sapien
cttggattcatacaaagaacagggc

SEQ ID NO: 2127343 - DNA, 25 bp, Homo sapien
cctgaccttcgggagagactcaaaa

SEQ ID NO: 2127344 - DNA, 25 bp, Homo sapien
tgtttattaaagttccacgagctgc

SEQ ID NO: 2127345 - DNA, 25 bp, Homo sapien
gagtgatctcatgtaaccccagttt

SEQ ID NO: 2127346 - DNA, 25 bp, Homo sapien
taaagacatgcagtgaaagtgaacc

SEQ ID NO: 2127347 - DNA, 25 bp, Homo sapien
cagatctgaaggaaataggcatacc

SEQ ID NO: 2127348 - DNA, 25 bp, Homo sapien
ggcgtgagccaaagttagatgttat

SEQ ID NO: 2127349 - DNA, 25 bp, Homo sapien
tgagccaaagttagatgttatatgc

SEQ ID NO: 2127350 - DNA, 25 bp, Homo sapien
catcttgtgtcagattactgtgagt

SEQ ID NO: 2127351 - DNA, 25 bp, Homo sapien
atcttgtgtcagattactgtgagtc

SEQ ID NO: 2127352 - DNA, 25 bp, Homo sapien
tccgtggcgtagtcgccgctgccat

SEQ ID NO: 2127353 - DNA, 25 bp, Homo sapien
ctccggaccccaggcccgttgctgc

SEQ ID NO: 2127354 - DNA, 25 bp, Homo sapien
caggcccgttgctgcggggggctcc

SEQ ID NO: 2127355 - DNA, 25 bp, Homo sapien
ctgcggggggctccgtggcgtagtc

SEQ ID NO: 2127356 - DNA, 25 bp, Homo sapien
tgcctgagcaacgtctccgagcagg

SEQ ID NO: 2127357 - DNA, 25 bp, Homo sapien
atggctgcctgagcaacgtctccga

SEQ ID NO: 2127358 - DNA, 25 bp, Homo sapien
aagataatggctgcctgagcaacgt

SEQ ID NO: 2127359 - DNA, 25 bp, Homo sapien
cctgagcaacgtctccgagcaggcg

SEQ ID NO: 2127360 - DNA, 25 bp, Homo sapien
ccgcggagccttttcgaggaatcga

SEQ ID NO: 2127361 - DNA, 25 bp, Homo sapien
tcagaacgcaaatttctcgccacaa

SEQ ID NO: 2127362 - DNA, 25 bp, Homo sapien
cacaattcaaaatggcggaggaggg

SEQ ID NO: 2127363 - DNA, 25 bp, Homo sapien
catggtgggcgtcataacagctttc

SEQ ID NO: 2127364 - DNA, 25 bp, Homo sapien
tatttcgatgttataaaccacactg

SEQ ID NO: 2127365 - DNA, 25 bp, Homo sapien
gctacatggtagtctattatgtggt

SEQ ID NO: 2127366 - DNA, 25 bp, Homo sapien
aagtaacctgaacgtatttccagct

SEQ ID NO: 2127367 - DNA, 25 bp, Homo sapien
cactgtaattagcatctttgcacat

SEQ ID NO: 2127368 - DNA, 25 bp, Homo sapien
agtcaaatgattggctcgaatccct

SEQ ID NO: 2127369 - DNA, 25 bp, Homo sapien
tcaaatgattggctcgaatcccttg

SEQ ID NO: 2127370 - DNA, 25 bp, Homo sapien
gattggctcgaatcccttgagccat

SEQ ID NO: 2127371 - DNA, 25 bp, Homo sapien
aatgattggctcgaatcccttgagc

SEQ ID NO: 2127372 - DNA, 25 bp, Homo sapien
tctaattatagtatatgtgttgttg

SEQ ID NO: 2127373 - DNA, 25 bp, Homo sapien
tgttctaattatagtatatgtgttg

SEQ ID NO: 2127374 - DNA, 25 bp, Homo sapien
taattatagtatatgtgttgttgaa

SEQ ID NO: 2127375 - DNA, 25 bp, Homo sapien
tttgcacaggggtcatgataatctt

SEQ ID NO: 2127376 - DNA, 25 bp, Homo sapien
tctgcaggatattctccaggagaac

SEQ ID NO: 2127377 - DNA, 25 bp, Homo sapien
aaagaccaaatctacatctgattgg

SEQ ID NO: 2127378 - DNA, 25 bp, Homo sapien
aaacactctgcaggatattctccag

SEQ ID NO: 2127379 - DNA, 25 bp, Homo sapien
agaccaaatctacatctgattggtg

SEQ ID NO: 2127380 - DNA, 25 bp, Homo sapien
caactcttccccgatatgtcctgtt

SEQ ID NO: 2127381 - DNA, 25 bp, Homo sapien
ccgatatgtcctgttgatgaggaga

SEQ ID NO: 2127382 - DNA, 25 bp, Homo sapien
ttccccgatatgtcctgttgatgag

SEQ ID NO: 2127383 - DNA, 25 bp, Homo sapien
tgtcctgttgatgaggagaacacat

SEQ ID NO: 2127384 - DNA, 25 bp, Homo sapien
tctggttttagaaaccacaatacaa

SEQ ID NO: 2127385 - DNA, 25 bp, Homo sapien
gagtgtagtgatcttgtgcaaaaaa

SEQ ID NO: 2127386 - DNA, 25 bp, Homo sapien
tgtaacacaaaacatgttgtgaaag

SEQ ID NO: 2127387 - DNA, 25 bp, Homo sapien
tgttgtgaaagagtgtagtgatctt

SEQ ID NO: 2127388 - DNA, 25 bp, Homo sapien
gaagtttaaagcttaaggatcactc

SEQ ID NO: 2127389 - DNA, 25 bp, Homo sapien
taagtgtgccaatttgtaacatatt

SEQ ID NO: 2127390 - DNA, 25 bp, Homo sapien
gaaaagtgctgtgaagtgtctgtat

SEQ ID NO: 2127391 - DNA, 25 bp, Homo sapien
ggatcactcttaagacgtctacaaa

SEQ ID NO: 2127392 - DNA, 25 bp, Homo sapien
tccttgctgggaagcatctgcgtgt

SEQ ID NO: 2127393 - DNA, 25 bp, Homo sapien
tgaagtccttggtgctagctgggct

SEQ ID NO: 2127394 - DNA, 25 bp, Homo sapien
cttgctgggaagcatctgcgtgtgt

SEQ ID NO: 2127395 - DNA, 25 bp, Homo sapien
gctgggcttttgtgacaactttcac

SEQ ID NO: 2127396 - DNA, 25 bp, Homo sapien
gggtcgtaaaatgaacaagcctgtg

SEQ ID NO: 2127397 - DNA, 25 bp, Homo sapien
tgttcccagcgtcagtctcttgtgt

SEQ ID NO: 2127398 - DNA, 25 bp, Homo sapien
atgtgtgttcccagcgtcagtctct

SEQ ID NO: 2127399 - DNA, 25 bp, Homo sapien
tacagctgggtcgtaaaatgaacaa

SEQ ID NO: 2127400 - DNA, 25 bp, Homo sapien
gatcctggcaccgatatttctgaga

SEQ ID NO: 2127401 - DNA, 25 bp, Homo sapien
catactggccttgctttattcccaa

SEQ ID NO: 2127402 - DNA, 25 bp, Homo sapien
ctgataatgggtcttcatactggcc

SEQ ID NO: 2127403 - DNA, 25 bp, Homo sapien
gactaccctggtctggaatccaacc

SEQ ID NO: 2127404 - DNA, 25 bp, Homo sapien
tctttccagtgtgacagctaaggtc

SEQ ID NO: 2127405 - DNA, 25 bp, Homo sapien
ggtcctggtcagcttcattagacat

SEQ ID NO: 2127406 - DNA, 25 bp, Homo sapien
caacctgaagattccccatctgtaa

SEQ ID NO: 2127407 - DNA, 25 bp, Homo sapien
tgtaacagcttgcttgtcagttgct

SEQ ID NO: 2127408 - DNA, 25 bp, Homo sapien
tccttgcttcattacagtccctaac

SEQ ID NO: 2127409 - DNA, 25 bp, Homo sapien
tctccttgcttcattacagtcccta

SEQ ID NO: 2127410 - DNA, 25 bp, Homo sapien
catctccttgcttcattacagtccc

SEQ ID NO: 2127411 - DNA, 25 bp, Homo sapien
ctccttgcttcattacagtccctaa

SEQ ID NO: 2127412 - DNA, 25 bp, Homo sapien
gtgggcctatttgctatagcagtac

SEQ ID NO: 2127413 - DNA, 25 bp, Homo sapien
aaaactgtctgtgggcctatttgct

SEQ ID NO: 2127414 - DNA, 25 bp, Homo sapien
tgtctgtgggcctatttgctatagc

SEQ ID NO: 2127415 - DNA, 25 bp, Homo sapien
ttggaaaactgtctgtgggcctatt

SEQ ID NO: 2127416 - DNA, 25 bp, Homo sapien
gcactgtagcaggttcattgcatgt

SEQ ID NO: 2127417 - DNA, 25 bp, Homo sapien
gtgtgccttctgcataccttgattg

SEQ ID NO: 2127418 - DNA, 25 bp, Homo sapien
ggttcattgcatgttgtgtgccttc

SEQ ID NO: 2127419 - DNA, 25 bp, Homo sapien
gtgccttctgcataccttgattgta

SEQ ID NO: 2127420 - DNA, 25 bp, Homo sapien
cagggaggtccttttcatatacaat

SEQ ID NO: 2127421 - DNA, 25 bp, Homo sapien
agggaggtccttttcatatacaatc

SEQ ID NO: 2127422 - DNA, 25 bp, Homo sapien
gggaggtccttttcatatacaatct

SEQ ID NO: 2127423 - DNA, 25 bp, Homo sapien
tcaggaagttaggcttgggtttcat

SEQ ID NO: 2127424 - DNA, 25 bp, Homo sapien
tatactgcttcaggaagttaggctt

SEQ ID NO: 2127425 - DNA, 25 bp, Homo sapien
ttatactgcttcaggaagttaggct

SEQ ID NO: 2127426 - DNA, 25 bp, Homo sapien
tgcttcaggaagttaggcttgggtt

SEQ ID NO: 2127427 - DNA, 25 bp, Homo sapien
ttttgaaaggatcaacaaaattgat

SEQ ID NO: 2127428 - DNA, 25 bp, Homo sapien
ccaggagctggttttttgaaaggat

SEQ ID NO: 2127429 - DNA, 25 bp, Homo sapien
tagagacacaaacaacccttcaaaa

SEQ ID NO: 2127430 - DNA, 25 bp, Homo sapien
caacccttcaaaaaaatcagtgaat

SEQ ID NO: 2127431 - DNA, 25 bp, Homo sapien
cagaccattgtgatcttgatatgat

SEQ ID NO: 2127432 - DNA, 25 bp, Homo sapien
taagttttggtgtcttgcgtttcca

SEQ ID NO: 2127433 - DNA, 25 bp, Homo sapien
gcagtgcttttgtgtgtcctgtaag

SEQ ID NO: 2127434 - DNA, 25 bp, Homo sapien
tattattgatttagagtttcagacc

SEQ ID NO: 2127435 - DNA, 25 bp, Homo sapien
tcctcaagcctctgtacaaaaccga

SEQ ID NO: 2127436 - DNA, 25 bp, Homo sapien
gtggaggccgcatttgcataataaa

SEQ ID NO: 2127437 - DNA, 25 bp, Homo sapien
tctttttgcaagctatgtaaatggc

SEQ ID NO: 2127438 - DNA, 25 bp, Homo sapien
cgctcctaaatccactccttgtgtg

SEQ ID NO: 2127439 - DNA, 25 bp, Homo sapien
cagttgggctatgggaaaccttgcc

SEQ ID NO: 2127440 - DNA, 25 bp, Homo sapien
ctggccagttgggctatgggaaacc

SEQ ID NO: 2127441 - DNA, 25 bp, Homo sapien
gccagttgggctatgggaaaccttg

SEQ ID NO: 2127442 - DNA, 25 bp, Homo sapien
gttgggctatgggaaaccttgccat

SEQ ID NO: 2127443 - DNA, 25 bp, Homo sapien
caatctaacctccagagaacttgcc

SEQ ID NO: 2127444 - DNA, 25 bp, Homo sapien
gcaatctaacctccagagaacttgc

SEQ ID NO: 2127445 - DNA, 25 bp, Homo sapien
tgcaatctaacctccagagaacttg

SEQ ID NO: 2127446 - DNA, 25 bp, Homo sapien
gattcaagtttcaatacaggggagc

SEQ ID NO: 2127447 - DNA, 25 bp, Homo sapien
agattcaagtttcaatacaggggag

SEQ ID NO: 2127448 - DNA, 25 bp, Homo sapien
cagattcaagtttcaatacagggga

SEQ ID NO: 2127449 - DNA, 25 bp, Homo sapien
attcaagtttcaatacaggggagct

SEQ ID NO: 2127450 - DNA, 25 bp, Homo sapien
ggtggggtgctcaatttttccagag

SEQ ID NO: 2127451 - DNA, 25 bp, Homo sapien
gtggggtgctcaatttttccagagc

SEQ ID NO: 2127452 - DNA, 25 bp, Homo sapien
tccccagtccatggagtgaggagtg

SEQ ID NO: 2127453 - DNA, 25 bp, Homo sapien
ccccagtccatggagtgaggagtga

SEQ ID NO: 2127454 - DNA, 25 bp, Homo sapien
aaggcaagggcaagtgttgcccttg

SEQ ID NO: 2127455 - DNA, 25 bp, Homo sapien
ggcccaaagggagccaattctggag

SEQ ID NO: 2127456 - DNA, 25 bp, Homo sapien
cccaaagggagccaattctggagct

SEQ ID NO: 2127457 - DNA, 25 bp, Homo sapien
caaagggagccaattctggagctac

SEQ ID NO: 2127458 - DNA, 25 bp, Homo sapien
cctggtgtattgtgtggctagatgc

SEQ ID NO: 2127459 - DNA, 25 bp, Homo sapien
cattgctacccttagagagtaaagt

SEQ ID NO: 2127460 - DNA, 25 bp, Homo sapien
gatgttcctcgggattcatatcttg

SEQ ID NO: 2127461 - DNA, 25 bp, Homo sapien
gatgcaaagtcattgctacccttag

SEQ ID NO: 2127462 - DNA, 25 bp, Homo sapien
aggaggatgtttgccgagggaagca

SEQ ID NO: 2127463 - DNA, 25 bp, Homo sapien
tataaggtagtagtgaccacaaggg

SEQ ID NO: 2127464 - DNA, 25 bp, Homo sapien
ctcaggtagagggtgtgctcaagca

SEQ ID NO: 2127465 - DNA, 25 bp, Homo sapien
gtttccagatcctcaggtagagggt

SEQ ID NO: 2127466 - DNA, 25 bp, Homo sapien
tgccatgacattgctgactgccatg

SEQ ID NO: 2127467 - DNA, 25 bp, Homo sapien
gatttagcacctgaatgaacagaaa

SEQ ID NO: 2127468 - DNA, 25 bp, Homo sapien
catttgtttattgtcgaaatagtgg

SEQ ID NO: 2127469 - DNA, 25 bp, Homo sapien
atggatttagcacctgaatgaacag

SEQ ID NO: 2127470 - DNA, 25 bp, Homo sapien
aggtcaaaaatttactgtgtggtgg

SEQ ID NO: 2127471 - DNA, 25 bp, Homo sapien
tgtgtggtggtggtatttccctttc

SEQ ID NO: 2127472 - DNA, 25 bp, Homo sapien
taggtcaaaaatttactgtgtggtg

SEQ ID NO: 2127473 - DNA, 25 bp, Homo sapien
tactgtgtggtggtggtatttccct

SEQ ID NO: 2127474 - DNA, 25 bp, Homo sapien
aagtgtggaaaccgcgctgctgagt

SEQ ID NO: 2127475 - DNA, 25 bp, Homo sapien
cggagtcccgctccgggaaagtgtg

SEQ ID NO: 2127476 - DNA, 25 bp, Homo sapien
ctgaggaattcagcgatttcagcat

SEQ ID NO: 2127477 - DNA, 25 bp, Homo sapien
ctgtagggcgggaaggccgtgagcc

SEQ ID NO: 2127478 - DNA, 25 bp, Homo sapien
tcgaattgacgcttttctgtgtggc

SEQ ID NO: 2127479 - DNA, 25 bp, Homo sapien
tgtgtggcttctggcgcttctctct

SEQ ID NO: 2127480 - DNA, 25 bp, Homo sapien
ccttcgcgctctcggtggcggtcga

SEQ ID NO: 2127481 - DNA, 25 bp, Homo sapien
cctttgcggaaattggcttgtggcc

SEQ ID NO: 2127482 - DNA, 25 bp, Homo sapien
gcggacaggtttaagttggaggcca

SEQ ID NO: 2127483 - DNA, 25 bp, Homo sapien
gaggctgcggacaggtttaagttgg

SEQ ID NO: 2127484 - DNA, 25 bp, Homo sapien
gctgcggacaggtttaagttggagg

SEQ ID NO: 2127485 - DNA, 25 bp, Homo sapien
gacaggtttaagttggaggccagac

SEQ ID NO: 2127486 - DNA, 25 bp, Homo sapien
agtgccgcctcctttcggactggtg

SEQ ID NO: 2127487 - DNA, 25 bp, Homo sapien
acgcagctcggcagagtgccgcctc

SEQ ID NO: 2127488 - DNA, 25 bp, Homo sapien
gcagagtgccgcctcctttcggact

SEQ ID NO: 2127489 - DNA, 25 bp, Homo sapien
gcctcctttcggactggtgcagggt

SEQ ID NO: 2127490 - DNA, 25 bp, Homo sapien
ctgtgaggtgagtaggagcgctgcc

SEQ ID NO: 2127491 - DNA, 25 bp, Homo sapien
ggtggaatgaactggggtaagtcga

SEQ ID NO: 2127492 - DNA, 25 bp, Homo sapien
gtggcggccgcagggggtggaatga

SEQ ID NO: 2127493 - DNA, 25 bp, Homo sapien
tgaggtgagtaggagcgctgccata

SEQ ID NO: 2127494 - DNA, 25 bp, Homo sapien
acagcgcctgctgcctgagcccgcc

SEQ ID NO: 2127495 - DNA, 25 bp, Homo sapien
cctgctgcctgagcccgccagcgac

SEQ ID NO: 2127496 - DNA, 25 bp, Homo sapien
agcgcctgctgcctgagcccgccag

SEQ ID NO: 2127497 - DNA, 25 bp, Homo sapien
ctacagcgcctgctgcctgagcccg

SEQ ID NO: 2127498 - DNA, 25 bp, Homo sapien
tcagtgctgccaaagccacgaacat

SEQ ID NO: 2127499 - DNA, 25 bp, Homo sapien
cttgctcagtgctgccaaagccacg

SEQ ID NO: 2127500 - DNA, 25 bp, Homo sapien
gctcagtgctgccaaagccacgaac

SEQ ID NO: 2127501 - DNA, 25 bp, Homo sapien
ttgctcagtgctgccaaagccacga

SEQ ID NO: 2127502 - DNA, 25 bp, Homo sapien
aagcttttgattcagcgtgttgtgg

SEQ ID NO: 2127503 - DNA, 25 bp, Homo sapien
ctttccagaacagcatagacgaccc

SEQ ID NO: 2127504 - DNA, 25 bp, Homo sapien
tagacgacccttcttcaccaaaagc

SEQ ID NO: 2127505 - DNA, 25 bp, Homo sapien
gaacagcatagacgacccttcttca

SEQ ID NO: 2127506 - DNA, 25 bp, Homo sapien
ttatatttctgtgcgatcggttgtg

SEQ ID NO: 2127507 - DNA, 25 bp, Homo sapien
tatatttctgtgcgatcggttgtga

SEQ ID NO: 2127508 - DNA, 25 bp, Homo sapien
atatttctgtgcgatcggttgtgat

SEQ ID NO: 2127509 - DNA, 25 bp, Homo sapien
tgcaggcatccaacatatcagcttc

SEQ ID NO: 2127510 - DNA, 25 bp, Homo sapien
gcaggcatccaacatatcagcttcc

SEQ ID NO: 2127511 - DNA, 25 bp, Homo sapien
taatatgaggcactgtcccaaaggc

SEQ ID NO: 2127512 - DNA, 25 bp, Homo sapien
tgatgtagaaacaatgagagatcca

SEQ ID NO: 2127513 - DNA, 25 bp, Homo sapien
tcccaaaggctagtgcatgatgtag

SEQ ID NO: 2127514 - DNA, 25 bp, Homo sapien
ggttctgtctacactaagcagctgt

SEQ ID NO: 2127515 - DNA, 25 bp, Homo sapien
agcttcagtagctgattggatcaag

SEQ ID NO: 2127516 - DNA, 25 bp, Homo sapien
ttcagtagctgattggatcaagtgg

SEQ ID NO: 2127517 - DNA, 25 bp, Homo sapien
acaagcttcagtagctgattggatc

SEQ ID NO: 2127518 - DNA, 25 bp, Homo sapien
cacgagaactacgtgacacatgcac

SEQ ID NO: 2127519 - DNA, 25 bp, Homo sapien
ggttatctacatctctttgtaagtc

SEQ ID NO: 2127520 - DNA, 25 bp, Homo sapien
tatttaggatggttatatcttgttg

SEQ ID NO: 2127521 - DNA, 25 bp, Homo sapien
cccaatactgccagtggggtgttga

SEQ ID NO: 2127522 - DNA, 25 bp, Homo sapien
tctctaggaacttcttttattaatc

SEQ ID NO: 2127523 - DNA, 25 bp, Homo sapien
ttttttaatatctgcggggtcgaca

SEQ ID NO: 2127524 - DNA, 25 bp, Homo sapien
tagggcttcaattacttactggttc

SEQ ID NO: 2127525 - DNA, 25 bp, Homo sapien
tctgcggggtcgacagtaatgtccc

SEQ ID NO: 2127526 - DNA, 25 bp, Homo sapien
gaatgtgttagggaccagttgctcc

SEQ ID NO: 2127527 - DNA, 25 bp, Homo sapien
tcatttgcaggaagagggatttaat

SEQ ID NO: 2127528 - DNA, 25 bp, Homo sapien
cagtgatgcctaaacttaactggaa

SEQ ID NO: 2127529 - DNA, 25 bp, Homo sapien
gggttatttgtagttcagtgatgcc

SEQ ID NO: 2127530 - DNA, 25 bp, Homo sapien
cacgtgcacctgtgactacagctac

SEQ ID NO: 2127531 - DNA, 25 bp, Homo sapien
cgagcctaccaggtgagatgccact

SEQ ID NO: 2127532 - DNA, 25 bp, Homo sapien
tagtctctgttagcggctcaggtcc

SEQ ID NO: 2127533 - DNA, 25 bp, Homo sapien
cgcgattctgatccggcctttagtc

SEQ ID NO: 2127534 - DNA, 25 bp, Homo sapien
gaaagtcatggctaactgggagcag

SEQ ID NO: 2127535 - DNA, 25 bp, Homo sapien
gattaggttttttcctgcatagcct

SEQ ID NO: 2127536 - DNA, 25 bp, Homo sapien
ccaaaattggtgttccatgtctgaa

SEQ ID NO: 2127537 - DNA, 25 bp, Homo sapien
tgatgcagcccacttctatctttgt

SEQ ID NO: 2127538 - DNA, 25 bp, Homo sapien
gttttaggaacacagcaattgcagt

SEQ ID NO: 2127539 - DNA, 25 bp, Homo sapien
tgtcatccttgcacaatggacatgc

SEQ ID NO: 2127540 - DNA, 25 bp, Homo sapien
tatatgtgctgccaaagtgaccact

SEQ ID NO: 2127541 - DNA, 25 bp, Homo sapien
tagtatatgtgctgccaaagtgacc

SEQ ID NO: 2127542 - DNA, 25 bp, Homo sapien
aatcttctctgtatctttccaattt

SEQ ID NO: 2127543 - DNA, 25 bp, Homo sapien
aggaaagccggcagtgacagacctc

SEQ ID NO: 2127544 - DNA, 25 bp, Homo sapien
caggatctctgactagccagggtgt

SEQ ID NO: 2127545 - DNA, 25 bp, Homo sapien
tataatcttgccctatgttggccag

SEQ ID NO: 2127546 - DNA, 25 bp, Homo sapien
tgagatcagactctccctgagtgga

SEQ ID NO: 2127547 - DNA, 25 bp, Homo sapien
aatactatgaacttttcttgtagca

SEQ ID NO: 2127548 - DNA, 25 bp, Homo sapien
gttttgactgtctgtgtcactatta

SEQ ID NO: 2127549 - DNA, 25 bp, Homo sapien
tctagttcattgaagtgtgagctta

SEQ ID NO: 2127550 - DNA, 25 bp, Homo sapien
tgagcttagctgtctgtttgtgctc

SEQ ID NO: 2127551 - DNA, 25 bp, Homo sapien
gcatcaatgttcattaaggatatta

SEQ ID NO: 2127552 - DNA, 25 bp, Homo sapien
aatgttcattaaggatattagtcta

SEQ ID NO: 2127553 - DNA, 25 bp, Homo sapien
tcaatgttcattaaggatattagtc

SEQ ID NO: 2127554 - DNA, 25 bp, Homo sapien
catcaatgttcattaaggatattag

SEQ ID NO: 2127555 - DNA, 25 bp, Homo sapien
ccaacttgatcgtgacagacaagct

SEQ ID NO: 2127556 - DNA, 25 bp, Homo sapien
caacttgatcgtgacagacaagctt

SEQ ID NO: 2127557 - DNA, 25 bp, Homo sapien
gccaacttgatcgtgacagacaagc

SEQ ID NO: 2127558 - DNA, 25 bp, Homo sapien
tcagaacatctaaccctggctgtcc

SEQ ID NO: 2127559 - DNA, 25 bp, Homo sapien
gatgctcacgtgctctctcggttgc

SEQ ID NO: 2127560 - DNA, 25 bp, Homo sapien
gggctatccccgctgctactgaaca

SEQ ID NO: 2127561 - DNA, 25 bp, Homo sapien
gaacgggtagaaaggacagatgctc

SEQ ID NO: 2127562 - DNA, 25 bp, Homo sapien
gtccggacactgtaactccgtggcc

SEQ ID NO: 2127563 - DNA, 25 bp, Homo sapien
ccggacactgtaactccgtggccat

SEQ ID NO: 2127564 - DNA, 25 bp, Homo sapien
tccggacactgtaactccgtggcca

SEQ ID NO: 2127565 - DNA, 25 bp, Homo sapien
ccaggtcgcagctgctcgggacttg

SEQ ID NO: 2127566 - DNA, 25 bp, Homo sapien
gaggcagagtttacttgctggttgt

SEQ ID NO: 2127567 - DNA, 25 bp, Homo sapien
gtggtccaggatcagatcgccaggt

SEQ ID NO: 2127568 - DNA, 25 bp, Homo sapien
gaggctctgtttccccctgcgtggt

SEQ ID NO: 2127569 - DNA, 25 bp, Homo sapien
gtatctgatcattcataggcagcag

SEQ ID NO: 2127570 - DNA, 25 bp, Homo sapien
ctagaatgggcgtaccccgtgagga

SEQ ID NO: 2127571 - DNA, 25 bp, Homo sapien
gagagttcgcagtcctctaggaagg

SEQ ID NO: 2127572 - DNA, 25 bp, Homo sapien
tcacggatgatggtctgtagctccc

SEQ ID NO: 2127573 - DNA, 25 bp, Homo sapien
ccaaagtttgccaaggccaagaaca

SEQ ID NO: 2127574 - DNA, 25 bp, Homo sapien
tctccaaagtttgccaaggccaaga

SEQ ID NO: 2127575 - DNA, 25 bp, Homo sapien
ccaatctccaaagtttgccaaggcc

SEQ ID NO: 2127576 - DNA, 25 bp, Homo sapien
atctccaaagtttgccaaggccaag

SEQ ID NO: 2127577 - DNA, 25 bp, Homo sapien
tggaatggccaaggagttgtctttc

SEQ ID NO: 2127578 - DNA, 25 bp, Homo sapien
gcctggaatggccaaggagttgtct

SEQ ID NO: 2127579 - DNA, 25 bp, Homo sapien
cctggaatggccaaggagttgtctt

SEQ ID NO: 2127580 - DNA, 25 bp, Homo sapien
ctgcctggaatggccaaggagttgt

SEQ ID NO: 2127581 - DNA, 25 bp, Homo sapien
taggcaccttaaaccagcctcctag

SEQ ID NO: 2127582 - DNA, 25 bp, Homo sapien
ataggcaccttaaaccagcctccta

SEQ ID NO: 2127583 - DNA, 25 bp, Homo sapien
cataggcaccttaaaccagcctcct

SEQ ID NO: 2127584 - DNA, 25 bp, Homo sapien
taaccgtaatctctcctactggaaa

SEQ ID NO: 2127585 - DNA, 25 bp, Homo sapien
cagactccagatcttcttcattcca

SEQ ID NO: 2127586 - DNA, 25 bp, Homo sapien
tgttttaatatgaaccagactccag

SEQ ID NO: 2127587 - DNA, 25 bp, Homo sapien
caacgctaggctgaattatttgtta

SEQ ID NO: 2127588 - DNA, 25 bp, Homo sapien
aaacgatccgcagaaaacatgaagt

SEQ ID NO: 2127589 - DNA, 25 bp, Homo sapien
caaacgatccgcagaaaacatgaag

SEQ ID NO: 2127590 - DNA, 25 bp, Homo sapien
acgatccgcagaaaacatgaagtca

SEQ ID NO: 2127591 - DNA, 25 bp, Homo sapien
aacgatccgcagaaaacatgaagtc

SEQ ID NO: 2127592 - DNA, 25 bp, Homo sapien
agcagaacaggagttgtctatgctc

SEQ ID NO: 2127593 - DNA, 25 bp, Homo sapien
tcttttggaataaatcctcaggcaa

SEQ ID NO: 2127594 - DNA, 25 bp, Homo sapien
ctcttttggaataaatcctcaggca

SEQ ID NO: 2127595 - DNA, 25 bp, Homo sapien
caggagttgtctatgctcttttgga

SEQ ID NO: 2127596 - DNA, 25 bp, Homo sapien
tcaccccatatcaggaccttgaaag

SEQ ID NO: 2127597 - DNA, 25 bp, Homo sapien
tttctcaccccatatcaggaccttg

SEQ ID NO: 2127598 - DNA, 25 bp, Homo sapien
cctttctcaccccatatcaggacct

SEQ ID NO: 2127599 - DNA, 25 bp, Homo sapien
ctttctcaccccatatcaggacctt

SEQ ID NO: 2127600 - DNA, 25 bp, Homo sapien
ggagtggtcaccatgcattctttat

SEQ ID NO: 2127601 - DNA, 25 bp, Homo sapien
caccatgcattctttatatggcagc

SEQ ID NO: 2127602 - DNA, 25 bp, Homo sapien
agctgattcaatccctcttccacaa

SEQ ID NO: 2127603 - DNA, 25 bp, Homo sapien
ttatatggcagctgattcaatccct

SEQ ID NO: 2127604 - DNA, 25 bp, Homo sapien
gccacagcagaaagcttcctcattc

SEQ ID NO: 2127605 - DNA, 25 bp, Homo sapien
cacagcagaaagcttcctcattcca

SEQ ID NO: 2127606 - DNA, 25 bp, Homo sapien
cttctttatgagcctctgttcttct

SEQ ID NO: 2127607 - DNA, 25 bp, Homo sapien
acagcagaaagcttcctcattccat

SEQ ID NO: 2127608 - DNA, 25 bp, Homo sapien
aatttcactccttcatacttgtacc

SEQ ID NO: 2127609 - DNA, 25 bp, Homo sapien
caaatttcactccttcatacttgta

SEQ ID NO: 2127610 - DNA, 25 bp, Homo sapien
gcttctcattatgctgaccccacaa

SEQ ID NO: 2127611 - DNA, 25 bp, Homo sapien
ccacaatttcccttctcaaatttca

SEQ ID NO: 2127612 - DNA, 25 bp, Homo sapien
tgttctccccaagatagcatcacca

SEQ ID NO: 2127613 - DNA, 25 bp, Homo sapien
cccaagatagcatcaccacatcctc

SEQ ID NO: 2127614 - DNA, 25 bp, Homo sapien
ctccccaagatagcatcaccacatc

SEQ ID NO: 2127615 - DNA, 25 bp, Homo sapien
gttctccccaagatagcatcaccac

SEQ ID NO: 2127616 - DNA, 25 bp, Homo sapien
cgtaaaccttgttccattgcctcac

SEQ ID NO: 2127617 - DNA, 25 bp, Homo sapien
caattcgtatggatcgacagcagtc

SEQ ID NO: 2127618 - DNA, 25 bp, Homo sapien
tctcctcatcactctgaatcaggat

SEQ ID NO: 2127619 - DNA, 25 bp, Homo sapien
gaatcaggatctttccaattcgtat

SEQ ID NO: 2127620 - DNA, 25 bp, Homo sapien
acagcttcaattacagtatttccag

SEQ ID NO: 2127621 - DNA, 25 bp, Homo sapien
gatgataacactgggttgaactcca

SEQ ID NO: 2127622 - DNA, 25 bp, Homo sapien
gactgagtaggatgataacactggg

SEQ ID NO: 2127623 - DNA, 25 bp, Homo sapien
tgaactccatgttctataagaacct

SEQ ID NO: 2127624 - DNA, 25 bp, Homo sapien
ccacctcaggactatatggagccct

SEQ ID NO: 2127625 - DNA, 25 bp, Homo sapien
acctcaggactatatggagccctag

SEQ ID NO: 2127626 - DNA, 25 bp, Homo sapien
cacctcaggactatatggagcccta

SEQ ID NO: 2127627 - DNA, 25 bp, Homo sapien
tatggtaggatgttttggtaacacc

SEQ ID NO: 2127628 - DNA, 25 bp, Homo sapien
tctgaaaagctttgacagtagtcag

SEQ ID NO: 2127629 - DNA, 25 bp, Homo sapien
tggatacctaatcagacttggttaa

SEQ ID NO: 2127630 - DNA, 25 bp, Homo sapien
cagagagcaatgatctttggatacc

SEQ ID NO: 2127631 - DNA, 25 bp, Homo sapien
ggtgcaacaggatgaacttcagtag

SEQ ID NO: 2127632 - DNA, 25 bp, Homo sapien
cttcagtagttaaaattgtgatctc

SEQ ID NO: 2127633 - DNA, 25 bp, Homo sapien
agttaaaattgtgatctctggaaac

SEQ ID NO: 2127634 - DNA, 25 bp, Homo sapien
atttctgtccaaaatgtgtaggtgc

SEQ ID NO: 2127635 - DNA, 25 bp, Homo sapien
tcaaaggtctctagcagaaacatcc

SEQ ID NO: 2127636 - DNA, 25 bp, Homo sapien
gcaaactacagtgggacaaagaact

SEQ ID NO: 2127637 - DNA, 25 bp, Homo sapien
ctaggtctgccaactgaatgaggac

SEQ ID NO: 2127638 - DNA, 25 bp, Homo sapien
ttgtcagcatccagacatccccggt

SEQ ID NO: 2127639 - DNA, 25 bp, Homo sapien
gaggcccacaacagcttcctatggg

SEQ ID NO: 2127640 - DNA, 25 bp, Homo sapien
taatccaatctacaccaggcttcct

SEQ ID NO: 2127641 - DNA, 25 bp, Homo sapien
aatataatccaatctacaccaggct

SEQ ID NO: 2127642 - DNA, 25 bp, Homo sapien
gccatgggagtataattaatcaagt

SEQ ID NO: 2127643 - DNA, 25 bp, Homo sapien
tgcctcatttgctaaaaagacccaa

SEQ ID NO: 2127644 - DNA, 25 bp, Homo sapien
agtcctgcaagtgattaaccctaca

SEQ ID NO: 2127645 - DNA, 25 bp, Homo sapien
tatcaatcgaggaacaaagacatgt

SEQ ID NO: 2127646 - DNA, 25 bp, Homo sapien
aaaaatgtcccacgctcagagtcct

SEQ ID NO: 2127647 - DNA, 25 bp, Homo sapien
tccaacatgggcaatattgcaagac

SEQ ID NO: 2127648 - DNA, 25 bp, Homo sapien
gcaaggcccaactctaggttaccta

SEQ ID NO: 2127649 - DNA, 25 bp, Homo sapien
aacatgggcaatattgcaagactct

SEQ ID NO: 2127650 - DNA, 25 bp, Homo sapien
ggtctaaacatcctgattagaaggc

SEQ ID NO: 2127651 - DNA, 25 bp, Homo sapien
aacatgacaataatagggaacagac

SEQ ID NO: 2127652 - DNA, 25 bp, Homo sapien
tcttatcttacgcttgaagtgggct

SEQ ID NO: 2127653 - DNA, 25 bp, Homo sapien
gggaatagaagtacatgaagttctt

SEQ ID NO: 2127654 - DNA, 25 bp, Homo sapien
ataatagggaacagactcgagtggg

SEQ ID NO: 2127655 - DNA, 25 bp, Homo sapien
taaccaatgcagagaagtccttaaa

SEQ ID NO: 2127656 - DNA, 25 bp, Homo sapien
gaataaccaatgcagagaagtcctt

SEQ ID NO: 2127657 - DNA, 25 bp, Homo sapien
ctagaataaccaatgcagagaagtc

SEQ ID NO: 2127658 - DNA, 25 bp, Homo sapien
tagacgaatggctaactagaataac

SEQ ID NO: 2127659 - DNA, 25 bp, Homo sapien
ggcagatgtaaatcctacctaggca

SEQ ID NO: 2127660 - DNA, 25 bp, Homo sapien
catgtgcctattccctgtgctgata

SEQ ID NO: 2127661 - DNA, 25 bp, Homo sapien
gacttctgggtactatgagtcctag

SEQ ID NO: 2127662 - DNA, 25 bp, Homo sapien
aaaatgctgccaacctaggattcta

SEQ ID NO: 2127663 - DNA, 25 bp, Homo sapien
tgaaatcataactgagcattgcaat

SEQ ID NO: 2127664 - DNA, 25 bp, Homo sapien
tacatatgggctgtcctgtaatccc

SEQ ID NO: 2127665 - DNA, 25 bp, Homo sapien
gttagattcaattacatatgggctg

SEQ ID NO: 2127666 - DNA, 25 bp, Homo sapien
cacttccctataaatttataggtat

SEQ ID NO: 2127667 - DNA, 25 bp, Homo sapien
ctgaggacttctgccggacccgcaa

SEQ ID NO: 2127668 - DNA, 25 bp, Homo sapien
tttgctgagctttccgcgacggccg

SEQ ID NO: 2127669 - DNA, 25 bp, Homo sapien
tgccggacccgcaacagcgcagagg

SEQ ID NO: 2127670 - DNA, 25 bp, Homo sapien
gcgacggccgccctgaggacttctg

SEQ ID NO: 2127671 - DNA, 25 bp, Homo sapien
tgggcgtcaggctatcacaagcatg

SEQ ID NO: 2127672 - DNA, 25 bp, Homo sapien
ccagcgtgggcgtcaggctatcaca

SEQ ID NO: 2127673 - DNA, 25 bp, Homo sapien
gtcaggctatcacaagcatgtgaca

SEQ ID NO: 2127674 - DNA, 25 bp, Homo sapien
tccttcgagcactccagttctggca

SEQ ID NO: 2127675 - DNA, 25 bp, Homo sapien
taaatttcacaaagctatagggtat

SEQ ID NO: 2127676 - DNA, 25 bp, Homo sapien
gctatagggtataagataaatacac

SEQ ID NO: 2127677 - DNA, 25 bp, Homo sapien
ctaaataaacagagatatccggtgc

SEQ ID NO: 2127678 - DNA, 25 bp, Homo sapien
catggcggtgtgtggctaaagtccc

SEQ ID NO: 2127679 - DNA, 25 bp, Homo sapien
catcatctcttgctgtggaaacgga

SEQ ID NO: 2127680 - DNA, 25 bp, Homo sapien
gctgtggaaacggaaacatagcagt

SEQ ID NO: 2127681 - DNA, 25 bp, Homo sapien
tggaaacggaaacatagcagttttc

SEQ ID NO: 2127682 - DNA, 25 bp, Homo sapien
ctcttgctgtggaaacggaaacata

SEQ ID NO: 2127683 - DNA, 25 bp, Homo sapien
tgccaacagtatgctgggtaacatt

SEQ ID NO: 2127684 - DNA, 25 bp, Homo sapien
acagtatgctgggtaacattgtaga

SEQ ID NO: 2127685 - DNA, 25 bp, Homo sapien
atgccaacagtatgctgggtaacat

SEQ ID NO: 2127686 - DNA, 25 bp, Homo sapien
ccaacagtatgctgggtaacattgt

SEQ ID NO: 2127687 - DNA, 25 bp, Homo sapien
tttcaggaagctatctcggctctta

SEQ ID NO: 2127688 - DNA, 25 bp, Homo sapien
ttctctgatcattttcattcatgcg

SEQ ID NO: 2127689 - DNA, 25 bp, Homo sapien
ctttctctgatcattttcattcatg

SEQ ID NO: 2127690 - DNA, 25 bp, Homo sapien
ctatctcggctcttagagtgcttaa

SEQ ID NO: 2127691 - DNA, 25 bp, Homo sapien
gctggcactttagttgaacacaggt

SEQ ID NO: 2127692 - DNA, 25 bp, Homo sapien
ttatgccataaattcatagagaata

SEQ ID NO: 2127693 - DNA, 25 bp, Homo sapien
atgccataaattcatagagaatagg

SEQ ID NO: 2127694 - DNA, 25 bp, Homo sapien
aggctggcactttagttgaacacag

SEQ ID NO: 2127695 - DNA, 25 bp, Homo sapien
tcagtgatgcgctactttccatcct

SEQ ID NO: 2127696 - DNA, 25 bp, Homo sapien
tcagaagccatgtgcagtcagaccc

SEQ ID NO: 2127697 - DNA, 25 bp, Homo sapien
tcctcttcattgaacatttgttctg

SEQ ID NO: 2127698 - DNA, 25 bp, Homo sapien
gaaatctatgatctgtccgtgctcc

SEQ ID NO: 2127699 - DNA, 25 bp, Homo sapien
taattattgtctcaatttcagctcc

SEQ ID NO: 2127700 - DNA, 25 bp, Homo sapien
gcagtctagcagtctatcacttttg

SEQ ID NO: 2127701 - DNA, 25 bp, Homo sapien
cttgctagcagtctagcagtctatc

SEQ ID NO: 2127702 - DNA, 25 bp, Homo sapien
aattattgtctcaatttcagctcct

SEQ ID NO: 2127703 - DNA, 25 bp, Homo sapien
ctttaaaggctaactccttcaccat

SEQ ID NO: 2127704 - DNA, 25 bp, Homo sapien
ggcatggagtaaaggccccagaaga

SEQ ID NO: 2127705 - DNA, 25 bp, Homo sapien
gagactttaaaggctaactccttca

SEQ ID NO: 2127706 - DNA, 25 bp, Homo sapien
aggctaactccttcaccatcacagt

SEQ ID NO: 2127707 - DNA, 25 bp, Homo sapien
aagtcacattagggagaattcaatc

SEQ ID NO: 2127708 - DNA, 25 bp, Homo sapien
gaaggcagactaggacgtgccagcc

SEQ ID NO: 2127709 - DNA, 25 bp, Homo sapien
taacaaatctgtagcaaaccagcgg

SEQ ID NO: 2127710 - DNA, 25 bp, Homo sapien
ccaggagtgatgtcagtaagaaggc

SEQ ID NO: 2127711 - DNA, 25 bp, Homo sapien
tatttcccgacacagcagacttcaa

SEQ ID NO: 2127712 - DNA, 25 bp, Homo sapien
tgccaccaccgccactgctcagcac

SEQ ID NO: 2127713 - DNA, 25 bp, Homo sapien
caccgccactgctcagcaccgccat

SEQ ID NO: 2127714 - DNA, 25 bp, Homo sapien
gggctccgcactgccaccaccgcca

SEQ ID NO: 2127715 - DNA, 25 bp, Homo sapien
tccgcactgccaccaccgccactgc

SEQ ID NO: 2127716 - DNA, 25 bp, Homo sapien
acgtccccgttgaatagagcctcac

SEQ ID NO: 2127717 - DNA, 25 bp, Homo sapien
gggaatggcaggatccacagccgaa

SEQ ID NO: 2127718 - DNA, 25 bp, Homo sapien
acgggaatggcaggatccacagccg

SEQ ID NO: 2127719 - DNA, 25 bp, Homo sapien
ccacgtccccgttgaatagagcctc

SEQ ID NO: 2127720 - DNA, 25 bp, Homo sapien
tccattgatgcagagctagaaacag

SEQ ID NO: 2127721 - DNA, 25 bp, Homo sapien
atagggcctctatatgttcctgtgt

SEQ ID NO: 2127722 - DNA, 25 bp, Homo sapien
ccattgatgcagagctagaaacaga

SEQ ID NO: 2127723 - DNA, 25 bp, Homo sapien
aatagggcctctatatgttcctgtg

SEQ ID NO: 2127724 - DNA, 25 bp, Homo sapien
tatgggatttcggaaaactgaaaga

SEQ ID NO: 2127725 - DNA, 25 bp, Homo sapien
tgggatttcggaaaactgaaagaga

SEQ ID NO: 2127726 - DNA, 25 bp, Homo sapien
gatttcggaaaactgaaagagataa

SEQ ID NO: 2127727 - DNA, 25 bp, Homo sapien
ctatgggatttcggaaaactgaaag

SEQ ID NO: 2127728 - DNA, 25 bp, Homo sapien
ccagtgtcctggtcaattgttttct

SEQ ID NO: 2127729 - DNA, 25 bp, Homo sapien
gaaacaccagtgtcctggtcaattg

SEQ ID NO: 2127730 - DNA, 25 bp, Homo sapien
agccaggaaacaccagtgtcctggt

SEQ ID NO: 2127731 - DNA, 25 bp, Homo sapien
caggaaacaccagtgtcctggtcaa

SEQ ID NO: 2127732 - DNA, 25 bp, Homo sapien
tttggggcccagtagaatctgaggg

SEQ ID NO: 2127733 - DNA, 25 bp, Homo sapien
aacaacaaatcaagatggtcataat

SEQ ID NO: 2127734 - DNA, 25 bp, Homo sapien
gggtattgagtggcgttcaaagaac

SEQ ID NO: 2127735 - DNA, 25 bp, Homo sapien
attaacaaacatcagtggaacaact

SEQ ID NO: 2127736 - DNA, 25 bp, Homo sapien
tcaatatcgtcaggttctattgtgc

SEQ ID NO: 2127737 - DNA, 25 bp, Homo sapien
tatcgtcaggttctattgtgcttat

SEQ ID NO: 2127738 - DNA, 25 bp, Homo sapien
cgtcaggttctattgtgcttatatg

SEQ ID NO: 2127739 - DNA, 25 bp, Homo sapien
caatatcgtcaggttctattgtgct

SEQ ID NO: 2127740 - DNA, 25 bp, Homo sapien
ctcccaatcatcattcaagtcctgt

SEQ ID NO: 2127741 - DNA, 25 bp, Homo sapien
gtttgaataaggtaactgtccagtc

SEQ ID NO: 2127742 - DNA, 25 bp, Homo sapien
tactccgtaccttactgagatctgg

SEQ ID NO: 2127743 - DNA, 25 bp, Homo sapien
tggcttttggacagttactccgtac

SEQ ID NO: 2127744 - DNA, 25 bp, Homo sapien
ccctgcctggatgggtgtttttgga

SEQ ID NO: 2127745 - DNA, 25 bp, Homo sapien
tgtcatgggttagaattaactcctc

SEQ ID NO: 2127746 - DNA, 25 bp, Homo sapien
gtcatgggttagaattaactcctct

SEQ ID NO: 2127747 - DNA, 25 bp, Homo sapien
acaaatcttggggcaaaagcaaggt

SEQ ID NO: 2127748 - DNA, 25 bp, Homo sapien
gaaaacaaatcttggggcaaaagca

SEQ ID NO: 2127749 - DNA, 25 bp, Homo sapien
aacaaatcttggggcaaaagcaagg

SEQ ID NO: 2127750 - DNA, 25 bp, Homo sapien
aaacaaatcttggggcaaaagcaag

SEQ ID NO: 2127751 - DNA, 25 bp, Homo sapien
aacacacacagaagatgtagtctcc

SEQ ID NO: 2127752 - DNA, 25 bp, Homo sapien
tgcaacacacacagaagatgtagtc

SEQ ID NO: 2127753 - DNA, 25 bp, Homo sapien
gcaacacacacagaagatgtagtct

SEQ ID NO: 2127754 - DNA, 25 bp, Homo sapien
cacacacagaagatgtagtctccat

SEQ ID NO: 2127755 - DNA, 25 bp, Homo sapien
aactcggtggagagaagtcctccca

SEQ ID NO: 2127756 - DNA, 25 bp, Homo sapien
cactaaactcggtggagagaagtcc

SEQ ID NO: 2127757 - DNA, 25 bp, Homo sapien
taaactcggtggagagaagtcctcc

SEQ ID NO: 2127758 - DNA, 25 bp, Homo sapien
cctcactaaactcggtggagagaag

SEQ ID NO: 2127759 - DNA, 25 bp, Homo sapien
ctgagagataagaatgtaggaggca

SEQ ID NO: 2127760 - DNA, 25 bp, Homo sapien
ataagaatgtaggaggcagcaagtc

SEQ ID NO: 2127761 - DNA, 25 bp, Homo sapien
gagagataagaatgtaggaggcagc

SEQ ID NO: 2127762 - DNA, 25 bp, Homo sapien
gagataagaatgtaggaggcagcaa

SEQ ID NO: 2127763 - DNA, 25 bp, Homo sapien
gaagctggacatttatccctgcagt

SEQ ID NO: 2127764 - DNA, 25 bp, Homo sapien
tgtggcctttgtatagattcttccc

SEQ ID NO: 2127765 - DNA, 25 bp, Homo sapien
caggttctggcacatagaagctgga

SEQ ID NO: 2127766 - DNA, 25 bp, Homo sapien
tgtatagattcttccctggtgcccc

SEQ ID NO: 2127767 - DNA, 25 bp, Homo sapien
ggaaattctcttactccactcaatt

SEQ ID NO: 2127768 - DNA, 25 bp, Homo sapien
gcctatcttctttcctactatgaca

SEQ ID NO: 2127769 - DNA, 25 bp, Homo sapien
tccactcaattatcatgtgattaac

SEQ ID NO: 2127770 - DNA, 25 bp, Homo sapien
aaaacggcccctgagtcacacaatg

SEQ ID NO: 2127771 - DNA, 25 bp, Homo sapien
tgctccagtcacacgcagaagctga

SEQ ID NO: 2127772 - DNA, 25 bp, Homo sapien
tcactgaggtaggacaaaaggttgc

SEQ ID NO: 2127773 - DNA, 25 bp, Homo sapien
gaagaagaggacaagcgctgctcca

SEQ ID NO: 2127774 - DNA, 25 bp, Homo sapien
tacaaggtatatagcccaggaaatg

SEQ ID NO: 2127775 - DNA, 25 bp, Homo sapien
ctctcctcaggttaggcattagtaa

SEQ ID NO: 2127776 - DNA, 25 bp, Homo sapien
tctctacctcagaaaagtacccctg

SEQ ID NO: 2127777 - DNA, 25 bp, Homo sapien
caaccaggagtcttgccactcaatg

SEQ ID NO: 2127778 - DNA, 25 bp, Homo sapien
gaaaatttcgataaagactccagtg

SEQ ID NO: 2127779 - DNA, 25 bp, Homo sapien
ccaatgcagaaaagtgagtgatttc

SEQ ID NO: 2127780 - DNA, 25 bp, Homo sapien
taggcagtggaagcgacccacagag

SEQ ID NO: 2127781 - DNA, 25 bp, Homo sapien
aaaatcaactgatcaggggaggggc

SEQ ID NO: 2127782 - DNA, 25 bp, Homo sapien
cgacccacagagagtgagtagaagc

SEQ ID NO: 2127783 - DNA, 25 bp, Homo sapien
gaaggatacaattcccattgagcac

SEQ ID NO: 2127784 - DNA, 25 bp, Homo sapien
cccattgagcaccttccatcacaca

SEQ ID NO: 2127785 - DNA, 25 bp, Homo sapien
taagagccttgatcatgtaatcttc

SEQ ID NO: 2127786 - DNA, 25 bp, Homo sapien
accagcagagggtaggctcgacgat

SEQ ID NO: 2127787 - DNA, 25 bp, Homo sapien
tttctcattgctactccttacttcc

SEQ ID NO: 2127788 - DNA, 25 bp, Homo sapien
ttaaggagtttctcattgctactcc

SEQ ID NO: 2127789 - DNA, 25 bp, Homo sapien
cggtttaaggagtttctcattgcta

SEQ ID NO: 2127790 - DNA, 25 bp, Homo sapien
caccaacttttagcagtagacggtt

SEQ ID NO: 2127791 - DNA, 25 bp, Homo sapien
tcactggccatcagacaactgcaga

SEQ ID NO: 2127792 - DNA, 25 bp, Homo sapien
gaggtgttggagaggacgtggataa

SEQ ID NO: 2127793 - DNA, 25 bp, Homo sapien
tggccatcagacaactgcagatcaa

SEQ ID NO: 2127794 - DNA, 25 bp, Homo sapien
aaggaaacaagaggtgttggagagg

SEQ ID NO: 2127795 - DNA, 25 bp, Homo sapien
taaatcagaatttcggagaacatcg

SEQ ID NO: 2127796 - DNA, 25 bp, Homo sapien
agaaaagtcagtgaggttttggtgc

SEQ ID NO: 2127797 - DNA, 25 bp, Homo sapien
ggagaacatcggctacccttagaaa

SEQ ID NO: 2127798 - DNA, 25 bp, Homo sapien
cagttgtctgtaaatcagaatttcg

SEQ ID NO: 2127799 - DNA, 25 bp, Homo sapien
ctcctggtgggcagtactgttcctt

SEQ ID NO: 2127800 - DNA, 25 bp, Homo sapien
caggtgtgcaaaccaggaccagaca

SEQ ID NO: 2127801 - DNA, 25 bp, Homo sapien
tggagagccccatgaacaggtgtgc

SEQ ID NO: 2127802 - DNA, 25 bp, Homo sapien
ccatcgtggaaaggcagttctggag

SEQ ID NO: 2127803 - DNA, 25 bp, Homo sapien
ccacttaattcagctgctagggaat

SEQ ID NO: 2127804 - DNA, 25 bp, Homo sapien
taccacttaattcagctgctaggga

SEQ ID NO: 2127805 - DNA, 25 bp, Homo sapien
ctaccacttaattcagctgctaggg

SEQ ID NO: 2127806 - DNA, 25 bp, Homo sapien
aactaccacttaattcagctgctag

SEQ ID NO: 2127807 - DNA, 25 bp, Homo sapien
tgttgtccgcaataagaagctatgg

SEQ ID NO: 2127808 - DNA, 25 bp, Homo sapien
catttgcagtgcctgaccatcttcg

SEQ ID NO: 2127809 - DNA, 25 bp, Homo sapien
gttgggtctggaacaacttcagtaa

SEQ ID NO: 2127810 - DNA, 25 bp, Homo sapien
tcaagtgaagaccatagcaatcaaa

SEQ ID NO: 2127811 - DNA, 25 bp, Homo sapien
tgttatgaagatgtacctgggactg

SEQ ID NO: 2127812 - DNA, 25 bp, Homo sapien
gcaacacttttgctaaatccagagg

SEQ ID NO: 2127813 - DNA, 25 bp, Homo sapien
ctggctcaagcacaaggaagagtgg

SEQ ID NO: 2127814 - DNA, 25 bp, Homo sapien
atgatgcagttacctccctcaaggc

SEQ ID NO: 2127815 - DNA, 25 bp, Homo sapien
tagtttccaaaggaatggtaccatc

SEQ ID NO: 2127816 - DNA, 25 bp, Homo sapien
ggtctattaagggatgcgacttatt

SEQ ID NO: 2127817 - DNA, 25 bp, Homo sapien
ccaaaggaatggtaccatcttctct

SEQ ID NO: 2127818 - DNA, 25 bp, Homo sapien
taagggatgcgacttattcctggtt

SEQ ID NO: 2127819 - DNA, 25 bp, Homo sapien
agactgtttgtggtccattcaggga

SEQ ID NO: 2127820 - DNA, 25 bp, Homo sapien
gactgtttgtggtccattcagggat

SEQ ID NO: 2127821 - DNA, 25 bp, Homo sapien
atttcagagactgtttgtggtccat

SEQ ID NO: 2127822 - DNA, 25 bp, Homo sapien
ttttgcctgcattgtccaaacccat

SEQ ID NO: 2127823 - DNA, 25 bp, Homo sapien
gtgatgtcagatgtagtgctggaat

SEQ ID NO: 2127824 - DNA, 25 bp, Homo sapien
tgctggaatgtgttggcccaatctg

SEQ ID NO: 2127825 - DNA, 25 bp, Homo sapien
gagtggttttgcctgcattgtccaa

SEQ ID NO: 2127826 - DNA, 25 bp, Homo sapien
caaatttgaattccacgaggcaaga

SEQ ID NO: 2127827 - DNA, 25 bp, Homo sapien
aatttgaattccacgaggcaagaat

SEQ ID NO: 2127828 - DNA, 25 bp, Homo sapien
caagaatgatccacacaatccacca

SEQ ID NO: 2127829 - DNA, 25 bp, Homo sapien
agaatgatccacacaatccaccaga

SEQ ID NO: 2127830 - DNA, 25 bp, Homo sapien
cacaaacacttctatggggcaagca

SEQ ID NO: 2127831 - DNA, 25 bp, Homo sapien
ttgtttcccaaaatacgaattggca

SEQ ID NO: 2127832 - DNA, 25 bp, Homo sapien
cccaaaatacgaattggcacattgt

SEQ ID NO: 2127833 - DNA, 25 bp, Homo sapien
tctatggggcaagcattcaacttct

SEQ ID NO: 2127834 - DNA, 25 bp, Homo sapien
agtatgtgacaacatgagagatgtt

SEQ ID NO: 2127835 - DNA, 25 bp, Homo sapien
ataaggtgaaattcactttcgataa

SEQ ID NO: 2127836 - DNA, 25 bp, Homo sapien
gtatgtgacaacatgagagatgttc

SEQ ID NO: 2127837 - DNA, 25 bp, Homo sapien
ttataaggtgaaattcactttcgat

SEQ ID NO: 2127838 - DNA, 25 bp, Homo sapien
ttcagtgaagctagcacttgtttgc

SEQ ID NO: 2127839 - DNA, 25 bp, Homo sapien
agatggatcattttaaaaaccgtgt

SEQ ID NO: 2127840 - DNA, 25 bp, Homo sapien
aagatggatcattttaaaaaccgtg

SEQ ID NO: 2127841 - DNA, 25 bp, Homo sapien
tttttgttcagtgaagctagcactt

SEQ ID NO: 2127842 - DNA, 25 bp, Homo sapien
caagatgccgcaccttagacacatt

SEQ ID NO: 2127843 - DNA, 25 bp, Homo sapien
atgccgcaccttagacacattggtt

SEQ ID NO: 2127844 - DNA, 25 bp, Homo sapien
cgcaccttagacacattggttttgg

SEQ ID NO: 2127845 - DNA, 25 bp, Homo sapien
agatgccgcaccttagacacattgg

SEQ ID NO: 2127846 - DNA, 25 bp, Homo sapien
cctgccaaactaaacttcataaatg

SEQ ID NO: 2127847 - DNA, 25 bp, Homo sapien
ccctgcaacaacatgccaaattgtg

SEQ ID NO: 2127848 - DNA, 25 bp, Homo sapien
ttgtgaagaccatcaaggcgaggaa

SEQ ID NO: 2127849 - DNA, 25 bp, Homo sapien
atcctgccaaactaaacttcataaa

SEQ ID NO: 2127850 - DNA, 25 bp, Homo sapien
aatgaggttttggtacactgagtgt

SEQ ID NO: 2127851 - DNA, 25 bp, Homo sapien
caatgaggttttggtacactgagtg

SEQ ID NO: 2127852 - DNA, 25 bp, Homo sapien
aggttttggtacactgagtgttcat

SEQ ID NO: 2127853 - DNA, 25 bp, Homo sapien
tgaggttttggtacactgagtgttc

SEQ ID NO: 2127854 - DNA, 25 bp, Homo sapien
cagttgtctgtaaatcagagctcag

SEQ ID NO: 2127855 - DNA, 25 bp, Homo sapien
gctcaggggaacattggctaccctt

SEQ ID NO: 2127856 - DNA, 25 bp, Homo sapien
gaacattggctacccttagaatcat

SEQ ID NO: 2127857 - DNA, 25 bp, Homo sapien
gttgtctgtaaatcagagctcaggg

SEQ ID NO: 2127858 - DNA, 25 bp, Homo sapien
gacccatagacaatgctgttttcaa

SEQ ID NO: 2127859 - DNA, 25 bp, Homo sapien
gttgacccatagacaatgctgtttt

SEQ ID NO: 2127860 - DNA, 25 bp, Homo sapien
ctctgttgacccatagacaatgctg

SEQ ID NO: 2127861 - DNA, 25 bp, Homo sapien
cccatagacaatgctgttttcaatc

SEQ ID NO: 2127862 - DNA, 25 bp, Homo sapien
tcccaagaggcatccaaggccttgg

SEQ ID NO: 2127863 - DNA, 25 bp, Homo sapien
cttggaccctggaagtgtgtggttt

SEQ ID NO: 2127864 - DNA, 25 bp, Homo sapien
gattgtagaccatggcagcatctgg

SEQ ID NO: 2127865 - DNA, 25 bp, Homo sapien
cagaactcttctcttgttatcccaa

SEQ ID NO: 2127866 - DNA, 25 bp, Homo sapien
tacattacttcctactacaaaagat

SEQ ID NO: 2127867 - DNA, 25 bp, Homo sapien
atattctggtgaagagaattctcac

SEQ ID NO: 2127868 - DNA, 25 bp, Homo sapien
tccctgaattatccagcttaacaat

SEQ ID NO: 2127869 - DNA, 25 bp, Homo sapien
catagaaaattgataaaggtggtag

SEQ ID NO: 2127870 - DNA, 25 bp, Homo sapien
ctctcggtagtgtccacaactatta

SEQ ID NO: 2127871 - DNA, 25 bp, Homo sapien
tctcggtagtgtccacaactattac

SEQ ID NO: 2127872 - DNA, 25 bp, Homo sapien
agcaatgcaccttttcttaggtcct

SEQ ID NO: 2127873 - DNA, 25 bp, Homo sapien
tgtcctgagaggattcattatgaga

SEQ ID NO: 2127874 - DNA, 25 bp, Homo sapien
cctgagaggattcattatgagaaaa

SEQ ID NO: 2127875 - DNA, 25 bp, Homo sapien
acaatgtcctgagaggattcattat

SEQ ID NO: 2127876 - DNA, 25 bp, Homo sapien
gagaggattcattatgagaaaaatg

SEQ ID NO: 2127877 - DNA, 25 bp, Homo sapien
taggaatacaacttacaaggagtgt

SEQ ID NO: 2127878 - DNA, 25 bp, Homo sapien
ggaatacaacttacaaggagtgtga

SEQ ID NO: 2127879 - DNA, 25 bp, Homo sapien
aggaatacaacttacaaggagtgtg

SEQ ID NO: 2127880 - DNA, 25 bp, Homo sapien
gaatacaacttacaaggagtgtgaa

SEQ ID NO: 2127881 - DNA, 25 bp, Homo sapien
ccggaagtcgatttgcaactgggag

SEQ ID NO: 2127882 - DNA, 25 bp, Homo sapien
aggcgggcggtctgccgaagtgctg

SEQ ID NO: 2127883 - DNA, 25 bp, Homo sapien
gggtgccccggaagtcgatttgcaa

SEQ ID NO: 2127884 - DNA, 25 bp, Homo sapien
cgatttgcaactgggaggcgggcgg

SEQ ID NO: 2127885 - DNA, 25 bp, Homo sapien
tatcttgttcaggtccctcagtgga

SEQ ID NO: 2127886 - DNA, 25 bp, Homo sapien
tctctgctcgaacttctggcgcttt

SEQ ID NO: 2127887 - DNA, 25 bp, Homo sapien
gtttatcttgttcaggtccctcagt

SEQ ID NO: 2127888 - DNA, 25 bp, Homo sapien
ccgtttatcttgttcaggtccctca

SEQ ID NO: 2127889 - DNA, 25 bp, Homo sapien
ggagatgactctcggaaacggtccg

SEQ ID NO: 2127890 - DNA, 25 bp, Homo sapien
aggactgagcgtgtccatcttcgca

SEQ ID NO: 2127891 - DNA, 25 bp, Homo sapien
cgcagctggcttgggaattccgtac

SEQ ID NO: 2127892 - DNA, 25 bp, Homo sapien
aattccgtacaacgcgaacgcgcat

SEQ ID NO: 2127893 - DNA, 25 bp, Homo sapien
ggtacaatgcttgttatatgaggag

SEQ ID NO: 2127894 - DNA, 25 bp, Homo sapien
atgcttgttatatgaggagatgtgc

SEQ ID NO: 2127895 - DNA, 25 bp, Homo sapien
caagaatcagtgttgttatctttaa

SEQ ID NO: 2127896 - DNA, 25 bp, Homo sapien
gcaagaatcagtgttgttatcttta

SEQ ID NO: 2127897 - DNA, 25 bp, Homo sapien
tggagtactgttgcgtaggctggac

SEQ ID NO: 2127898 - DNA, 25 bp, Homo sapien
gaggaagttgctggccccgccttac

SEQ ID NO: 2127899 - DNA, 25 bp, Homo sapien
gctggactgcttgagagatctgagg

SEQ ID NO: 2127900 - DNA, 25 bp, Homo sapien
cgcagaggtggagtactgttgcgta

SEQ ID NO: 2127901 - DNA, 25 bp, Homo sapien
ttggaaagctgagccggatcagagt

SEQ ID NO: 2127902 - DNA, 25 bp, Homo sapien
ccccgaaagcgtggctccttccgca

SEQ ID NO: 2127903 - DNA, 25 bp, Homo sapien
ccttccgcagctgattggaaagctg

SEQ ID NO: 2127904 - DNA, 25 bp, Homo sapien
gagtccttctcaactggcggctcca

SEQ ID NO: 2127905 - DNA, 25 bp, Homo sapien
tcatcagttccactggtggccgcca

SEQ ID NO: 2127906 - DNA, 25 bp, Homo sapien
catcagttccactggtggccgccat

SEQ ID NO: 2127907 - DNA, 25 bp, Homo sapien
gctcatcagttccactggtggccgc

SEQ ID NO: 2127908 - DNA, 25 bp, Homo sapien
cggctcatcagttccactggtggcc

SEQ ID NO: 2127909 - DNA, 25 bp, Homo sapien
tcgttgccatacgactctgctggga

SEQ ID NO: 2127910 - DNA, 25 bp, Homo sapien
atcgttgccatacgactctgctggg

SEQ ID NO: 2127911 - DNA, 25 bp, Homo sapien
gagagaaagcgcatgtgccacagac

SEQ ID NO: 2127912 - DNA, 25 bp, Homo sapien
gctgggagagaaagcgcatgtgcca

SEQ ID NO: 2127913 - DNA, 25 bp, Homo sapien
gcaggagataaatcaccttctcagg

SEQ ID NO: 2127914 - DNA, 25 bp, Homo sapien
caaaggagtgaagaatgccaggtca

SEQ ID NO: 2127915 - DNA, 25 bp, Homo sapien
tgtctagttaatgctcaagagggct

SEQ ID NO: 2127916 - DNA, 25 bp, Homo sapien
tataatgaacacaatgagccaccgg

SEQ ID NO: 2127917 - DNA, 25 bp, Homo sapien
cttgtaatagacttcagcatgctgc

SEQ ID NO: 2127918 - DNA, 25 bp, Homo sapien
taacttgctgagaatagtgataagc

SEQ ID NO: 2127919 - DNA, 25 bp, Homo sapien
cttaatgatgaagaaagacaactca

SEQ ID NO: 2127920 - DNA, 25 bp, Homo sapien
caaaacacaactgtttaacttgctg

SEQ ID NO: 2127921 - DNA, 25 bp, Homo sapien
gagcatcatacactataattacatg

SEQ ID NO: 2127922 - DNA, 25 bp, Homo sapien
aatttgccttcgctcctctgttgtc

SEQ ID NO: 2127923 - DNA, 25 bp, Homo sapien
aaacaaatttgccttcgctcctctg

SEQ ID NO: 2127924 - DNA, 25 bp, Homo sapien
atttgccttcgctcctctgttgtct

SEQ ID NO: 2127925 - DNA, 25 bp, Homo sapien
caaatttgccttcgctcctctgttg

SEQ ID NO: 2127926 - DNA, 25 bp, Homo sapien
ctcaaaatttttccggaactcagag

SEQ ID NO: 2127927 - DNA, 25 bp, Homo sapien
ggtccaacacatctatcctaagggt

SEQ ID NO: 2127928 - DNA, 25 bp, Homo sapien
ggaactcagagtaaatttggtcatc

SEQ ID NO: 2127929 - DNA, 25 bp, Homo sapien
caggaactgtgggtcaactgatgaa

SEQ ID NO: 2127930 - DNA, 25 bp, Homo sapien
aacttcaagcagaatggcctccact

SEQ ID NO: 2127931 - DNA, 25 bp, Homo sapien
tcaacaatcccattaaacttcaagc

SEQ ID NO: 2127932 - DNA, 25 bp, Homo sapien
agccctgagaacaatctagtcgcag

SEQ ID NO: 2127933 - DNA, 25 bp, Homo sapien
caatctagtcgcagcaaagtaccat

SEQ ID NO: 2127934 - DNA, 25 bp, Homo sapien
ttacacagaaacaattccagaggga

SEQ ID NO: 2127935 - DNA, 25 bp, Homo sapien
cagaaacaattccagagggaagaaa

SEQ ID NO: 2127936 - DNA, 25 bp, Homo sapien
cacagaaacaattccagagggaaga

SEQ ID NO: 2127937 - DNA, 25 bp, Homo sapien
tacacagaaacaattccagagggaa

SEQ ID NO: 2127938 - DNA, 25 bp, Homo sapien
ggttccgagcaatttcaatggcaaa

SEQ ID NO: 2127939 - DNA, 25 bp, Homo sapien
gatataaacagctttgttatagcct

SEQ ID NO: 2127940 - DNA, 25 bp, Homo sapien
tgttatagccttcccggttccgagc

SEQ ID NO: 2127941 - DNA, 25 bp, Homo sapien
caatggcaaagaattgtatcctggg

SEQ ID NO: 2127942 - DNA, 25 bp, Homo sapien
tctcctccattgttgactcctttct

SEQ ID NO: 2127943 - DNA, 25 bp, Homo sapien
cttttttctcctccattgttgactc

SEQ ID NO: 2127944 - DNA, 25 bp, Homo sapien
tctctcctccattcttggtgttctc

SEQ ID NO: 2127945 - DNA, 25 bp, Homo sapien
ttctctcctccattcttggtgttct

SEQ ID NO: 2127946 - DNA, 25 bp, Homo sapien
cctttgtcagttttgtcttctctgt

SEQ ID NO: 2127947 - DNA, 25 bp, Homo sapien
atagctttttcaccacttttgttga

SEQ ID NO: 2127948 - DNA, 25 bp, Homo sapien
cagttttgtcttctctgttgattcc

SEQ ID NO: 2127949 - DNA, 25 bp, Homo sapien
ttacatagctttttcaccacttttg

SEQ ID NO: 2127950 - DNA, 25 bp, Homo sapien
gtcagccaagaaacagtataccagg

SEQ ID NO: 2127951 - DNA, 25 bp, Homo sapien
agctcctgactgttagactagaaag

SEQ ID NO: 2127952 - DNA, 25 bp, Homo sapien
tctgtgcaagtagcaccgtggtact

SEQ ID NO: 2127953 - DNA, 25 bp, Homo sapien
tcttacttgaccagtagtgtcagcc

SEQ ID NO: 2127954 - DNA, 25 bp, Homo sapien
tatgtaaggacttctaatcccaaca

SEQ ID NO: 2127955 - DNA, 25 bp, Homo sapien
cagtctcttgctcttctaatatgaa

SEQ ID NO: 2127956 - DNA, 25 bp, Homo sapien
caagtttagagaacttcactacagg

SEQ ID NO: 2127957 - DNA, 25 bp, Homo sapien
catatatagcaaagaaatcagggag

SEQ ID NO: 2127958 - DNA, 25 bp, Homo sapien
gaaatgaaatcttctacagtcaagc

SEQ ID NO: 2127959 - DNA, 25 bp, Homo sapien
aggatcaaccggtactagtcactgc

SEQ ID NO: 2127960 - DNA, 25 bp, Homo sapien
caaggaaaggatcaaccggtactag

SEQ ID NO: 2127961 - DNA, 25 bp, Homo sapien
tctatgcagaaatgctacaagccag

SEQ ID NO: 2127962 - DNA, 25 bp, Homo sapien
gacactcaggccaagatactatgct

SEQ ID NO: 2127963 - DNA, 25 bp, Homo sapien
tatggtgcctatgctaccagggacc

SEQ ID NO: 2127964 - DNA, 25 bp, Homo sapien
ttcacatggtcttcgcaacctgcag

SEQ ID NO: 2127965 - DNA, 25 bp, Homo sapien
gcttgatttcttgcaaccagcacag

SEQ ID NO: 2127966 - DNA, 25 bp, Homo sapien
aaaagccattagacggtggctggca

SEQ ID NO: 2127967 - DNA, 25 bp, Homo sapien
tctaaccagtttcagcagtcaagct

SEQ ID NO: 2127968 - DNA, 25 bp, Homo sapien
gaagcacgtactctgaaaagccatt

SEQ ID NO: 2127969 - DNA, 25 bp, Homo sapien
catcatcatgctgtggttagccttg

SEQ ID NO: 2127970 - DNA, 25 bp, Homo sapien
tatagggcagccacagtattctttg

SEQ ID NO: 2127971 - DNA, 25 bp, Homo sapien
cttgaattcctgttcccttataggg

SEQ ID NO: 2127972 - DNA, 25 bp, Homo sapien
ccagtctttggacagatgcctcttg

SEQ ID NO: 2127973 - DNA, 25 bp, Homo sapien
tgttcccttatagggcagccacagt

SEQ ID NO: 2127974 - DNA, 25 bp, Homo sapien
tggtccaagctctatacaatcgatg

SEQ ID NO: 2127975 - DNA, 25 bp, Homo sapien
tgtcggacagggaacaatctcaggt

SEQ ID NO: 2127976 - DNA, 25 bp, Homo sapien
aatgagaattgtccacactgagtgc

SEQ ID NO: 2127977 - DNA, 25 bp, Homo sapien
tattatcgcacagtcctatgggtca

SEQ ID NO: 2127978 - DNA, 25 bp, Homo sapien
tacaattaaatatcaccacacacct

SEQ ID NO: 2127979 - DNA, 25 bp, Homo sapien
aatctaatgtttctccatagcaaag

SEQ ID NO: 2127980 - DNA, 25 bp, Homo sapien
caatggaagcgtaggtaatgagaaa

SEQ ID NO: 2127981 - DNA, 25 bp, Homo sapien
taaccgtattatctggcagtctccc

SEQ ID NO: 2127982 - DNA, 25 bp, Homo sapien
taaaagatctctacacccaaaacta

SEQ ID NO: 2127983 - DNA, 25 bp, Homo sapien
gcactgtcttatatatagaaggccc

SEQ ID NO: 2127984 - DNA, 25 bp, Homo sapien
cctaagtactccaccaaaataactg

SEQ ID NO: 2127985 - DNA, 25 bp, Homo sapien
cccaaaactatacgacaatgatgaa

SEQ ID NO: 2127986 - DNA, 25 bp, Homo sapien
tatatcagggatatacctgcactcc

SEQ ID NO: 2127987 - DNA, 25 bp, Homo sapien
catacacacaataaagtctgcaata

SEQ ID NO: 2127988 - DNA, 25 bp, Homo sapien
gacaaacgttgaatgttctcaccca

SEQ ID NO: 2127989 - DNA, 25 bp, Homo sapien
aattgaactaatggacatcaagagt

SEQ ID NO: 2127990 - DNA, 25 bp, Homo sapien
taagtcctagctagagtaatcagac

SEQ ID NO: 2127991 - DNA, 25 bp, Homo sapien
tatatacaacagatccacagtgagt

SEQ ID NO: 2127992 - DNA, 25 bp, Homo sapien
cagcatggcactggaataaaaagga

SEQ ID NO: 2127993 - DNA, 25 bp, Homo sapien
taaaaaggagtcagacggaccaatg

SEQ ID NO: 2127994 - DNA, 25 bp, Homo sapien
attttattgagtttttttgcatcaa

SEQ ID NO: 2127995 - DNA, 25 bp, Homo sapien
ttttattgagtttttttgcatcaat

SEQ ID NO: 2127996 - DNA, 25 bp, Homo sapien
catccaagagtctgttctcattcac

SEQ ID NO: 2127997 - DNA, 25 bp, Homo sapien
gccaagtccacttcatatctgagcc

SEQ ID NO: 2127998 - DNA, 25 bp, Homo sapien
ctagccaagtccacttcatatctga

SEQ ID NO: 2127999 - DNA, 25 bp, Homo sapien
caagtccacttcatatctgagccca

SEQ ID NO: 2128000 - DNA, 25 bp, Homo sapien
gatggctacttcattagtggatttc

SEQ ID NO: 2128001 - DNA, 25 bp, Homo sapien
atggctacttcattagtggatttcc

SEQ ID NO: 2128002 - DNA, 25 bp, Homo sapien
tcagatggctacttcattagtggat

SEQ ID NO: 2128003 - DNA, 25 bp, Homo sapien
cagatggctacttcattagtggatt

SEQ ID NO: 2128004 - DNA, 25 bp, Homo sapien
cacagggctcatgctaacgttctct

SEQ ID NO: 2128005 - DNA, 25 bp, Homo sapien
gctaacgttctctttatcgtttcta

SEQ ID NO: 2128006 - DNA, 25 bp, Homo sapien
ttgcacagggctcatgctaacgttc

SEQ ID NO: 2128007 - DNA, 25 bp, Homo sapien
gggctcatgctaacgttctctttat

SEQ ID NO: 2128008 - DNA, 25 bp, Homo sapien
agagacaccagaggggctccaatga

SEQ ID NO: 2128009 - DNA, 25 bp, Homo sapien
agacaccagaggggctccaatgaaa

SEQ ID NO: 2128010 - DNA, 25 bp, Homo sapien
tgagagacaccagaggggctccaat

SEQ ID NO: 2128011 - DNA, 25 bp, Homo sapien
ctgtgagagacaccagaggggctcc

SEQ ID NO: 2128012 - DNA, 25 bp, Homo sapien
tagagataaaagctctgtcccgtgg

SEQ ID NO: 2128013 - DNA, 25 bp, Homo sapien
catcacgttgacaagggcagtacag

SEQ ID NO: 2128014 - DNA, 25 bp, Homo sapien
ggacctcagcacaactagtggaact

SEQ ID NO: 2128015 - DNA, 25 bp, Homo sapien
tctggaatagagctagacatgcagg

SEQ ID NO: 2128016 - DNA, 25 bp, Homo sapien
ttcaatagccaattcgatcaggtgg

SEQ ID NO: 2128017 - DNA, 25 bp, Homo sapien
atagccaattcgatcaggtggaaga

SEQ ID NO: 2128018 - DNA, 25 bp, Homo sapien
aatagccaattcgatcaggtggaag

SEQ ID NO: 2128019 - DNA, 25 bp, Homo sapien
gaggagctaattatcctaaatattt

SEQ ID NO: 2128020 - DNA, 25 bp, Homo sapien
cagaaagtcaacaaggatacccagg

SEQ ID NO: 2128021 - DNA, 25 bp, Homo sapien
tcccacacattaataatgggggact

SEQ ID NO: 2128022 - DNA, 25 bp, Homo sapien
cgagacagaaagtcaacaaggatac

SEQ ID NO: 2128023 - DNA, 25 bp, Homo sapien
tcaactgcaaaggcacacataggct

SEQ ID NO: 2128024 - DNA, 25 bp, Homo sapien
tgtgagtatgtacaccaacagaggt

SEQ ID NO: 2128025 - DNA, 25 bp, Homo sapien
tacaggtactatttttgaccactgg

SEQ ID NO: 2128026 - DNA, 25 bp, Homo sapien
tgtaggtggcaatttatgggctctc

SEQ ID NO: 2128027 - DNA, 25 bp, Homo sapien
gccatataatcagggctacaggtac

SEQ ID NO: 2128028 - DNA, 25 bp, Homo sapien
tgagtgaatgcagactgaggatgat

SEQ ID NO: 2128029 - DNA, 25 bp, Homo sapien
gatggtttgctcaacttatttgaag

SEQ ID NO: 2128030 - DNA, 25 bp, Homo sapien
ctaactccagatagttgtggatggt

SEQ ID NO: 2128031 - DNA, 25 bp, Homo sapien
gattccagagtaagtggtccacagt

SEQ ID NO: 2128032 - DNA, 25 bp, Homo sapien
agactggctctgcggcaaggcgaaa

SEQ ID NO: 2128033 - DNA, 25 bp, Homo sapien
tggctctgcggcaaggcgaaatcgc

SEQ ID NO: 2128034 - DNA, 25 bp, Homo sapien
gctctgcggcaaggcgaaatcgccc

SEQ ID NO: 2128035 - DNA, 25 bp, Homo sapien
actggctctgcggcaaggcgaaatc

SEQ ID NO: 2128036 - DNA, 25 bp, Homo sapien
accggcgttggcgtgtaggagcaga

SEQ ID NO: 2128037 - DNA, 25 bp, Homo sapien
gccgctagcggtaatgatgttgctg

SEQ ID NO: 2128038 - DNA, 25 bp, Homo sapien
cgacaggcccgcgatctggcagaga

SEQ ID NO: 2128039 - DNA, 25 bp, Homo sapien
gtgcctcggcacaaaactgccgcta

SEQ ID NO: 2128040 - DNA, 25 bp, Homo sapien
cgcagtagcctttgcaacgcggcgg

SEQ ID NO: 2128041 - DNA, 25 bp, Homo sapien
ccccagctgctgttgtgcgcagtag

SEQ ID NO: 2128042 - DNA, 25 bp, Homo sapien
aacggaggtgcttgggccctcagag

SEQ ID NO: 2128043 - DNA, 25 bp, Homo sapien
aggatctgggaatcgctgggaccct

SEQ ID NO: 2128044 - DNA, 25 bp, Homo sapien
cggtccacagaagcactagagctaa

SEQ ID NO: 2128045 - DNA, 25 bp, Homo sapien
tcagaatctgagtccacggaggcct

SEQ ID NO: 2128046 - DNA, 25 bp, Homo sapien
ccaaggagatgctttgtccgtcaga

SEQ ID NO: 2128047 - DNA, 25 bp, Homo sapien
tccctcagagatggtgggctgcccg

SEQ ID NO: 2128048 - DNA, 25 bp, Homo sapien
gattctggccacatatcgcaaggct

SEQ ID NO: 2128049 - DNA, 25 bp, Homo sapien
tgcaacccgggaagtattgaggccc

SEQ ID NO: 2128050 - DNA, 25 bp, Homo sapien
tcatcttagaggtttccaaacgggc

SEQ ID NO: 2128051 - DNA, 25 bp, Homo sapien
gcctgtagtctaagtaacgctgcca

SEQ ID NO: 2128052 - DNA, 25 bp, Homo sapien
tacaatagcagacagaaagggaagc

SEQ ID NO: 2128053 - DNA, 25 bp, Homo sapien
agggaagccagccacaatttagagt

SEQ ID NO: 2128054 - DNA, 25 bp, Homo sapien
tctagataatgcaacaagatggaaa

SEQ ID NO: 2128055 - DNA, 25 bp, Homo sapien
agagacagcaagtggtcaatcacat

SEQ ID NO: 2128056 - DNA, 25 bp, Homo sapien
tgtcagatggatagattgtaaaaag

SEQ ID NO: 2128057 - DNA, 25 bp, Homo sapien
agatggatagattgtaaaaagtttc

SEQ ID NO: 2128058 - DNA, 25 bp, Homo sapien
tcagatggatagattgtaaaaagtt

SEQ ID NO: 2128059 - DNA, 25 bp, Homo sapien
tggatagattgtaaaaagtttctcc

SEQ ID NO: 2128060 - DNA, 25 bp, Homo sapien
aaacagaaaaaaagcagaggctgaa

SEQ ID NO: 2128061 - DNA, 25 bp, Homo sapien
tggaaaacagaaaaaaagcagaggc

SEQ ID NO: 2128062 - DNA, 25 bp, Homo sapien
gaaaacagaaaaaaagcagaggctg

SEQ ID NO: 2128063 - DNA, 25 bp, Homo sapien
acagaaaaaaagcagaggctgaaat

SEQ ID NO: 2128064 - DNA, 25 bp, Homo sapien
ggcaggccaacgttcagactcaggt

SEQ ID NO: 2128065 - DNA, 25 bp, Homo sapien
ggccaacgttcagactcaggtaata

SEQ ID NO: 2128066 - DNA, 25 bp, Homo sapien
aggccaacgttcagactcaggtaat

SEQ ID NO: 2128067 - DNA, 25 bp, Homo sapien
caacgttcagactcaggtaatacag

SEQ ID NO: 2128068 - DNA, 25 bp, Homo sapien
caaagcctctaagaaagatggaact

SEQ ID NO: 2128069 - DNA, 25 bp, Homo sapien
tctaagaaagatggaactatgtgaa

SEQ ID NO: 2128070 - DNA, 25 bp, Homo sapien
agcctctaagaaagatggaactatg

SEQ ID NO: 2128071 - DNA, 25 bp, Homo sapien
cctctaagaaagatggaactatgtg

SEQ ID NO: 2128072 - DNA, 25 bp, Homo sapien
aatgccacattatctacaactatct

SEQ ID NO: 2128073 - DNA, 25 bp, Homo sapien
ttacactttatgcaaaaattaactg

SEQ ID NO: 2128074 - DNA, 25 bp, Homo sapien
tacactttatgcaaaaattaactga

SEQ ID NO: 2128075 - DNA, 25 bp, Homo sapien
gaaataatgccacattatctacaac

SEQ ID NO: 2128076 - DNA, 25 bp, Homo sapien
atgggactatgtgaaaagaccaaat

SEQ ID NO: 2128077 - DNA, 25 bp, Homo sapien
aaagaaatgaacaaagcctccaaga

SEQ ID NO: 2128078 - DNA, 25 bp, Homo sapien
gactatgtgaaaagaccaaatctac

SEQ ID NO: 2128079 - DNA, 25 bp, Homo sapien
gcctccaagaaatatgggactatgt

SEQ ID NO: 2128080 - DNA, 25 bp, Homo sapien
tggcttttatatgtttgattcctgg

SEQ ID NO: 2128081 - DNA, 25 bp, Homo sapien
ggcttttatatgtttgattcctggt

SEQ ID NO: 2128082 - DNA, 25 bp, Homo sapien
ttcttcctagccttgttcgtcgtta

SEQ ID NO: 2128083 - DNA, 25 bp, Homo sapien
ccttgttcgtcgttacattttgtca

SEQ ID NO: 2128084 - DNA, 25 bp, Homo sapien
ttatttggacctgtcataatgatgt

SEQ ID NO: 2128085 - DNA, 25 bp, Homo sapien
tcctagccttgttcgtcgttacatt

SEQ ID NO: 2128086 - DNA, 25 bp, Homo sapien
tgctcatgaacaagactatcgtctc

SEQ ID NO: 2128087 - DNA, 25 bp, Homo sapien
gactatcgtctctttgttggcattg

SEQ ID NO: 2128088 - DNA, 25 bp, Homo sapien
actgtgtctactttgctcatgaaca

SEQ ID NO: 2128089 - DNA, 25 bp, Homo sapien
caagactatcgtctctttgttggca

SEQ ID NO: 2128090 - DNA, 25 bp, Homo sapien
tgagactgaattctaccttcaaggt

SEQ ID NO: 2128091 - DNA, 25 bp, Homo sapien
tctaccttcaaggtagaattgggaa

SEQ ID NO: 2128092 - DNA, 25 bp, Homo sapien
caaggtagaattgggaagcaacttt

SEQ ID NO: 2128093 - DNA, 25 bp, Homo sapien
ttgagactgaattctaccttcaagg

SEQ ID NO: 2128094 - DNA, 25 bp, Homo sapien
tcatcgggtctccaaggtgtcctct

SEQ ID NO: 2128095 - DNA, 25 bp, Homo sapien
tcgggtctccaaggtgtcctctagc

SEQ ID NO: 2128096 - DNA, 25 bp, Homo sapien
catcgggtctccaaggtgtcctcta

SEQ ID NO: 2128097 - DNA, 25 bp, Homo sapien
atcgggtctccaaggtgtcctctag

SEQ ID NO: 2128098 - DNA, 25 bp, Homo sapien
gacaaatagaatctaggacttcttg

SEQ ID NO: 2128099 - DNA, 25 bp, Homo sapien
gagattgacttactgcctactaagg

SEQ ID NO: 2128100 - DNA, 25 bp, Homo sapien
ggatagggagattgacttactgcct

SEQ ID NO: 2128101 - DNA, 25 bp, Homo sapien
cagaatcagacaaatagaatctagg

SEQ ID NO: 2128102 - DNA, 25 bp, Homo sapien
ccagttgttcttttccatgtttagt

SEQ ID NO: 2128103 - DNA, 25 bp, Homo sapien
accagttgttcttttccatgtttag

SEQ ID NO: 2128104 - DNA, 25 bp, Homo sapien
tcccatttgacgctaagacacttgc

SEQ ID NO: 2128105 - DNA, 25 bp, Homo sapien
ctaagacacttgctgtaacagaggt

SEQ ID NO: 2128106 - DNA, 25 bp, Homo sapien
ttccccttgatgtcccatttgacgc

SEQ ID NO: 2128107 - DNA, 25 bp, Homo sapien
tgtaacagaggtgtagatgtttcag

SEQ ID NO: 2128108 - DNA, 25 bp, Homo sapien
tgacaggattagcagctgtggcaac

SEQ ID NO: 2128109 - DNA, 25 bp, Homo sapien
tgagctggcacattagcctccatga

SEQ ID NO: 2128110 - DNA, 25 bp, Homo sapien
ctgtggcaacatgccagtctcctaa

SEQ ID NO: 2128111 - DNA, 25 bp, Homo sapien
taaggaccgcaaatgaagttgagct

SEQ ID NO: 2128112 - DNA, 25 bp, Homo sapien
atagacaacttggcagcaagagctg

SEQ ID NO: 2128113 - DNA, 25 bp, Homo sapien
tagacaacttggcagcaagagctgt

SEQ ID NO: 2128114 - DNA, 25 bp, Homo sapien
gatagacaacttggcagcaagagct

SEQ ID NO: 2128115 - DNA, 25 bp, Homo sapien
gcttcttaagcctctgattagcaga

SEQ ID NO: 2128116 - DNA, 25 bp, Homo sapien
ctaaactccaagcttcttaagcctc

SEQ ID NO: 2128117 - DNA, 25 bp, Homo sapien
ccaagcttcttaagcctctgattag

SEQ ID NO: 2128118 - DNA, 25 bp, Homo sapien
ttcttaagcctctgattagcagaca

SEQ ID NO: 2128119 - DNA, 25 bp, Homo sapien
cagggctaggagatccccaagagaa

SEQ ID NO: 2128120 - DNA, 25 bp, Homo sapien
ttccagggctaggagatccccaaga

SEQ ID NO: 2128121 - DNA, 25 bp, Homo sapien
taggagatccccaagagaaatggct

SEQ ID NO: 2128122 - DNA, 25 bp, Homo sapien
gggctaggagatccccaagagaaat

SEQ ID NO: 2128123 - DNA, 25 bp, Homo sapien
gatacctcctgttcatatggtaagg

SEQ ID NO: 2128124 - DNA, 25 bp, Homo sapien
tccatgattcccttccattagatca

SEQ ID NO: 2128125 - DNA, 25 bp, Homo sapien
tagatcatttgctgttcccttaaca

SEQ ID NO: 2128126 - DNA, 25 bp, Homo sapien
acatggttggatgcattacctgagc

SEQ ID NO: 2128127 - DNA, 25 bp, Homo sapien
gaaatgtctagtctcaaagaggctg

SEQ ID NO: 2128128 - DNA, 25 bp, Homo sapien
tcccctgccctaagtaaggaataga

SEQ ID NO: 2128129 - DNA, 25 bp, Homo sapien
ggttactgtgtagattacagccaca

SEQ ID NO: 2128130 - DNA, 25 bp, Homo sapien
cacctgggccatttgaagcccttgt

SEQ ID NO: 2128131 - DNA, 25 bp, Homo sapien
taccaactggctccacagtttagat

SEQ ID NO: 2128132 - DNA, 25 bp, Homo sapien
gcttttgaggtacaattttggctac

SEQ ID NO: 2128133 - DNA, 25 bp, Homo sapien
ttttggctaccaactggctccacag

SEQ ID NO: 2128134 - DNA, 25 bp, Homo sapien
cacagtttagatcttggtggggaaa

SEQ ID NO: 2128135 - DNA, 25 bp, Homo sapien
tcaggtaacgttgcaacaggaaggg

SEQ ID NO: 2128136 - DNA, 25 bp, Homo sapien
gaaatgatgtgggccttcaaaaatg

SEQ ID NO: 2128137 - DNA, 25 bp, Homo sapien
tgaaaacagcaggatcaggtaacgt

SEQ ID NO: 2128138 - DNA, 25 bp, Homo sapien
caggatcaggtaacgttgcaacagg

SEQ ID NO: 2128139 - DNA, 25 bp, Homo sapien
tggatgaggctctatggctgtatac

SEQ ID NO: 2128140 - DNA, 25 bp, Homo sapien
atggatgaggctctatggctgtata

SEQ ID NO: 2128141 - DNA, 25 bp, Homo sapien
tgtttggtgcaatatatgtcagcat

SEQ ID NO: 2128142 - DNA, 25 bp, Homo sapien
ggggttggagctctgtttggtgcaa

SEQ ID NO: 2128143 - DNA, 25 bp, Homo sapien
tgaattttcatagattgcagcattt

SEQ ID NO: 2128144 - DNA, 25 bp, Homo sapien
tgcagcatttctaatttgtgcacaa

SEQ ID NO: 2128145 - DNA, 25 bp, Homo sapien
gaattttcatagattgcagcatttc

SEQ ID NO: 2128146 - DNA, 25 bp, Homo sapien
tctaatttgtgcacaatctctgcag

SEQ ID NO: 2128147 - DNA, 25 bp, Homo sapien
gaggtagaaattggcctgcgttatc

SEQ ID NO: 2128148 - DNA, 25 bp, Homo sapien
ggcctgcgttatctggatttctccc

SEQ ID NO: 2128149 - DNA, 25 bp, Homo sapien
tgggctgaggtagaaattggcctgc

SEQ ID NO: 2128150 - DNA, 25 bp, Homo sapien
tccttgtcgtttgtgggctgaggta

SEQ ID NO: 2128151 - DNA, 25 bp, Homo sapien
ggtttgatcctgtctggcgagcatc

SEQ ID NO: 2128152 - DNA, 25 bp, Homo sapien
gtctggcgagcatcagcatctttcc

SEQ ID NO: 2128153 - DNA, 25 bp, Homo sapien
ttatcgacaagcatccccattcagc

SEQ ID NO: 2128154 - DNA, 25 bp, Homo sapien
catatgcatctcagtggtttgatcc

SEQ ID NO: 2128155 - DNA, 25 bp, Homo sapien
ctttgtggaaagccagccttcccag

SEQ ID NO: 2128156 - DNA, 25 bp, Homo sapien
agccaagggcctattttcatcctga

SEQ ID NO: 2128157 - DNA, 25 bp, Homo sapien
cttcccagccaagggcctattttca

SEQ ID NO: 2128158 - DNA, 25 bp, Homo sapien
ccttggtgctgcccggcaaaggttg

SEQ ID NO: 2128159 - DNA, 25 bp, Homo sapien
accagcaagaacagtgggtactgat

SEQ ID NO: 2128160 - DNA, 25 bp, Homo sapien
gaacagtgggtactgatagttcatt

SEQ ID NO: 2128161 - DNA, 25 bp, Homo sapien
cagcaagaacagtgggtactgatag

SEQ ID NO: 2128162 - DNA, 25 bp, Homo sapien
caagaacagtgggtactgatagttc

SEQ ID NO: 2128163 - DNA, 25 bp, Homo sapien
cgttctagagttgattctaagaggc

SEQ ID NO: 2128164 - DNA, 25 bp, Homo sapien
catttgcccaccttgaacactgctg

SEQ ID NO: 2128165 - DNA, 25 bp, Homo sapien
ggttgttcctactgccatttgccca

SEQ ID NO: 2128166 - DNA, 25 bp, Homo sapien
tcatctgcaagaacaccgttctaga

SEQ ID NO: 2128167 - DNA, 25 bp, Homo sapien
gcacatccagggtagtacggccata

SEQ ID NO: 2128168 - DNA, 25 bp, Homo sapien
gggcacatccagggtagtacggcca

SEQ ID NO: 2128169 - DNA, 25 bp, Homo sapien
cacatccagggtagtacggccatag

SEQ ID NO: 2128170 - DNA, 25 bp, Homo sapien
ggcacatccagggtagtacggccat

SEQ ID NO: 2128171 - DNA, 25 bp, Homo sapien
gatggccaaccagaagctgcagtgt

SEQ ID NO: 2128172 - DNA, 25 bp, Homo sapien
tcaaaattgactagaaagctggcat

SEQ ID NO: 2128173 - DNA, 25 bp, Homo sapien
tgccatttgccgataccagctcagt

SEQ ID NO: 2128174 - DNA, 25 bp, Homo sapien
gatttgagtccccatgatggatgcc

SEQ ID NO: 2128175 - DNA, 25 bp, Homo sapien
tgtttgtcggtacaggtcaagccca

SEQ ID NO: 2128176 - DNA, 25 bp, Homo sapien
tgttccctggttgacgtaattctgg

SEQ ID NO: 2128177 - DNA, 25 bp, Homo sapien
aaggccatgattttccagagggagc

SEQ ID NO: 2128178 - DNA, 25 bp, Homo sapien
tcacatttttggcactgttccctgg

SEQ ID NO: 2128179 - DNA, 25 bp, Homo sapien
agcctggaaatgcttaagttgttca

SEQ ID NO: 2128180 - DNA, 25 bp, Homo sapien
gattgactggctcttttatttatac

SEQ ID NO: 2128181 - DNA, 25 bp, Homo sapien
tgttcatattttttgagcgattgac

SEQ ID NO: 2128182 - DNA, 25 bp, Homo sapien
taattactacttgtaaagcctggaa

SEQ ID NO: 2128183 - DNA, 25 bp, Homo sapien
ccattatttaatgcctttctttgta

SEQ ID NO: 2128184 - DNA, 25 bp, Homo sapien
tagctctccttgttgaattgaacac

SEQ ID NO: 2128185 - DNA, 25 bp, Homo sapien
tgtatcttttcatctttgtttgttt

SEQ ID NO: 2128186 - DNA, 25 bp, Homo sapien
aacactttaccattatttaatgcct

SEQ ID NO: 2128187 - DNA, 25 bp, Homo sapien
caggattgggtagtagtcattctga

SEQ ID NO: 2128188 - DNA, 25 bp, Homo sapien
gcagagcaagattagaaacctgctt

SEQ ID NO: 2128189 - DNA, 25 bp, Homo sapien
tctgaacaaacaagatcttaattta

SEQ ID NO: 2128190 - DNA, 25 bp, Homo sapien
aagatcttaatttatgtctaagcag

SEQ ID NO: 2128191 - DNA, 25 bp, Homo sapien
tttccatgtgggctcggtattggtt

SEQ ID NO: 2128192 - DNA, 25 bp, Homo sapien
tgtgggctcggtattggtttcccca

SEQ ID NO: 2128193 - DNA, 25 bp, Homo sapien
aaaagttcagatttgagtccacaga

SEQ ID NO: 2128194 - DNA, 25 bp, Homo sapien
tcatttctcaatgaatcaggcagaa

SEQ ID NO: 2128195 - DNA, 25 bp, Homo sapien
taatgttgatagtgtgatgttaaag

SEQ ID NO: 2128196 - DNA, 25 bp, Homo sapien
ttaactgtctgtcttgtagatctgt

SEQ ID NO: 2128197 - DNA, 25 bp, Homo sapien
ttgatagtgtgatgttaaagtctcc

SEQ ID NO: 2128198 - DNA, 25 bp, Homo sapien
gttaactgtctgtcttgtagatctg

SEQ ID NO: 2128199 - DNA, 25 bp, Homo sapien
tgaccgtcattgtgttagacatcac

SEQ ID NO: 2128200 - DNA, 25 bp, Homo sapien
tagaagtttcaaaagtccaccaatc

SEQ ID NO: 2128201 - DNA, 25 bp, Homo sapien
cagatccggattatttagaagtttc

SEQ ID NO: 2128202 - DNA, 25 bp, Homo sapien
tagatgacgggcctaatgtgaccgt

SEQ ID NO: 2128203 - DNA, 25 bp, Homo sapien
caaatcctgtttgttcttcacagca

SEQ ID NO: 2128204 - DNA, 25 bp, Homo sapien
tcctgtttgttcttcacagcaggca

SEQ ID NO: 2128205 - DNA, 25 bp, Homo sapien
cctgtttgttcttcacagcaggcat

SEQ ID NO: 2128206 - DNA, 25 bp, Homo sapien
aatcctgtttgttcttcacagcagg

SEQ ID NO: 2128207 - DNA, 25 bp, Homo sapien
acatgaacatcatgatcagccagcc

SEQ ID NO: 2128208 - DNA, 25 bp, Homo sapien
catgaacatcatgatcagccagcct

SEQ ID NO: 2128209 - DNA, 25 bp, Homo sapien
atacaagggctgttgtagaggagtt

SEQ ID NO: 2128210 - DNA, 25 bp, Homo sapien
aaagaacatagctttcagagctgca

SEQ ID NO: 2128211 - DNA, 25 bp, Homo sapien
tagaggagttgaaatcaagggcgct

SEQ ID NO: 2128212 - DNA, 25 bp, Homo sapien
tcaagggcgctatgaaagaacatag

SEQ ID NO: 2128213 - DNA, 25 bp, Homo sapien
tgaggtttggtggatccacgcccct

SEQ ID NO: 2128214 - DNA, 25 bp, Homo sapien
caacaggtagtgaaacagcttaaga

SEQ ID NO: 2128215 - DNA, 25 bp, Homo sapien
ccaagagcactaggattgtgataca

SEQ ID NO: 2128216 - DNA, 25 bp, Homo sapien
gaactagtggtaaaacatccaagag

SEQ ID NO: 2128217 - DNA, 25 bp, Homo sapien
tctcctggcacgaatataaagcaca

SEQ ID NO: 2128218 - DNA, 25 bp, Homo sapien
tagaatcttcttacacacgctgagt

SEQ ID NO: 2128219 - DNA, 25 bp, Homo sapien
tgggctcctgctttattgtctctgt

SEQ ID NO: 2128220 - DNA, 25 bp, Homo sapien
cacacagctgagttcttagagttga

SEQ ID NO: 2128221 - DNA, 25 bp, Homo sapien
gttctgatttgattgcgctgtgttc

SEQ ID NO: 2128222 - DNA, 25 bp, Homo sapien
ctcgagttctgatttgattgcgctg

SEQ ID NO: 2128223 - DNA, 25 bp, Homo sapien
aatctcgagttctgatttgattgcg

SEQ ID NO: 2128224 - DNA, 25 bp, Homo sapien
gatttgattgcgctgtgttctgaga

SEQ ID NO: 2128225 - DNA, 25 bp, Homo sapien
tatggagagttggaagtactagaaa

SEQ ID NO: 2128226 - DNA, 25 bp, Homo sapien
tggggagagtttaggatagacttta

SEQ ID NO: 2128227 - DNA, 25 bp, Homo sapien
ctagaaatatttgctgcttaaggtc

SEQ ID NO: 2128228 - DNA, 25 bp, Homo sapien
ggatggtatgcaagattctattggg

SEQ ID NO: 2128229 - DNA, 25 bp, Homo sapien
aacagaatgaaattgttgtattgac

SEQ ID NO: 2128230 - DNA, 25 bp, Homo sapien
cacaacagaatgaaattgttgtatt

SEQ ID NO: 2128231 - DNA, 25 bp, Homo sapien
gaatgaaattgttgtattgacttat

SEQ ID NO: 2128232 - DNA, 25 bp, Homo sapien
cagaatgaaattgttgtattgactt

SEQ ID NO: 2128233 - DNA, 25 bp, Homo sapien
tcaaggtaaacgataatcgtcagca

SEQ ID NO: 2128234 - DNA, 25 bp, Homo sapien
acgataatcgtcagcaaacagggac

SEQ ID NO: 2128235 - DNA, 25 bp, Homo sapien
tgtatttatttatgcagctattgta

SEQ ID NO: 2128236 - DNA, 25 bp, Homo sapien
ggtaaacgataatcgtcagcaaaca

SEQ ID NO: 2128237 - DNA, 25 bp, Homo sapien
actctgaagaatgatggtgttattt

SEQ ID NO: 2128238 - DNA, 25 bp, Homo sapien
ggtgactgtggcctttacagaatag

SEQ ID NO: 2128239 - DNA, 25 bp, Homo sapien
actgtggcctttacagaatagtttg

SEQ ID NO: 2128240 - DNA, 25 bp, Homo sapien
aactctgaagaatgatggtgttatt

SEQ ID NO: 2128241 - DNA, 25 bp, Homo sapien
gggacattctgtggagacctaggac

SEQ ID NO: 2128242 - DNA, 25 bp, Homo sapien
tctaaatggcaggagttgtagcaga

SEQ ID NO: 2128243 - DNA, 25 bp, Homo sapien
tagagttggaagagcctgatacatc

SEQ ID NO: 2128244 - DNA, 25 bp, Homo sapien
tatagatttaatgggtcagaacaca

SEQ ID NO: 2128245 - DNA, 25 bp, Homo sapien
tgtacataacacattctaccgctaa

SEQ ID NO: 2128246 - DNA, 25 bp, Homo sapien
gaggagaggtggcattgtacataac

SEQ ID NO: 2128247 - DNA, 25 bp, Homo sapien
ttcccattccgttcctggtgttgaa

SEQ ID NO: 2128248 - DNA, 25 bp, Homo sapien
acttttttatggattcgaggagagg

SEQ ID NO: 2128249 - DNA, 25 bp, Homo sapien
acttgtaagtaaagcaggtatgaac

SEQ ID NO: 2128250 - DNA, 25 bp, Homo sapien
cacttcagtgagtagtaaacttgta

SEQ ID NO: 2128251 - DNA, 25 bp, Homo sapien
tctgtttgataaggacacatgttag

SEQ ID NO: 2128252 - DNA, 25 bp, Homo sapien
cacatgttaggaggttttcaacact

SEQ ID NO: 2128253 - DNA, 25 bp, Homo sapien
taagcacagtggcttaggcatgaga

SEQ ID NO: 2128254 - DNA, 25 bp, Homo sapien
taaactgtcataggtgtctgtgggc

SEQ ID NO: 2128255 - DNA, 25 bp, Homo sapien
ccaggtcttagtctttgtgaggatc

SEQ ID NO: 2128256 - DNA, 25 bp, Homo sapien
aattcttgtgaaataccttccaggt

SEQ ID NO: 2128257 - DNA, 25 bp, Homo sapien
gataatgaatactgagctaagtgga

SEQ ID NO: 2128258 - DNA, 25 bp, Homo sapien
aattgccagatgttccctgtgggcg

SEQ ID NO: 2128259 - DNA, 25 bp, Homo sapien
tgtgggcggtatgggtttgagaacc

SEQ ID NO: 2128260 - DNA, 25 bp, Homo sapien
agataccagtaacacccctaccctg

SEQ ID NO: 2128261 - DNA, 25 bp, Homo sapien
gccactgtacctggcctcatttttc

SEQ ID NO: 2128262 - DNA, 25 bp, Homo sapien
actgtacctggcctcatttttctat

SEQ ID NO: 2128263 - DNA, 25 bp, Homo sapien
gagccactgtacctggcctcatttt

SEQ ID NO: 2128264 - DNA, 25 bp, Homo sapien
cactgtacctggcctcatttttcta

SEQ ID NO: 2128265 - DNA, 25 bp, Homo sapien
agctgggtctacaggttcccgccat

SEQ ID NO: 2128266 - DNA, 25 bp, Homo sapien
ctgggtctacaggttcccgccatca

SEQ ID NO: 2128267 - DNA, 25 bp, Homo sapien
ggtctacaggttcccgccatcacgc

SEQ ID NO: 2128268 - DNA, 25 bp, Homo sapien
tgggtctacaggttcccgccatcac

SEQ ID NO: 2128269 - DNA, 25 bp, Homo sapien
aagaccagtcttctcaacatagacc

SEQ ID NO: 2128270 - DNA, 25 bp, Homo sapien
ccagtcttctcaacatagaccctgt

SEQ ID NO: 2128271 - DNA, 25 bp, Homo sapien
gcagtctagtgtgaatgacagagtg

SEQ ID NO: 2128272 - DNA, 25 bp, Homo sapien
gaatccgatctatctttagggagat

SEQ ID NO: 2128273 - DNA, 25 bp, Homo sapien
atctttagggagataaagagtaatc

SEQ ID NO: 2128274 - DNA, 25 bp, Homo sapien
ccgatctatctttagggagataaag

SEQ ID NO: 2128275 - DNA, 25 bp, Homo sapien
tcaggagatgaatccgatctatctt

SEQ ID NO: 2128276 - DNA, 25 bp, Homo sapien
tgtagatcttgatgataagagtaat

SEQ ID NO: 2128277 - DNA, 25 bp, Homo sapien
gaggcggtctttggtatcccggtca

SEQ ID NO: 2128278 - DNA, 25 bp, Homo sapien
ttttgctaatctttgggcctagaaa

SEQ ID NO: 2128279 - DNA, 25 bp, Homo sapien
ctgtgggattgagacctcgaagtcg

SEQ ID NO: 2128280 - DNA, 25 bp, Homo sapien
ggtatcccggtcatttttgctaatc

SEQ ID NO: 2128281 - DNA, 25 bp, Homo sapien
agaaagagggaggacgcgccaattc

SEQ ID NO: 2128282 - DNA, 25 bp, Homo sapien
gggaggacgcgccaattctcctgcc

SEQ ID NO: 2128283 - DNA, 25 bp, Homo sapien
tgagcctcggcccaacaaaatggcg

SEQ ID NO: 2128284 - DNA, 25 bp, Homo sapien
cggtgtcgctttgtttccgcggctc

SEQ ID NO: 2128285 - DNA, 25 bp, Homo sapien
aagaaggtgaatttccgtagccaat

SEQ ID NO: 2128286 - DNA, 25 bp, Homo sapien
ttccgtagccaataagactctgtgc

SEQ ID NO: 2128287 - DNA, 25 bp, Homo sapien
tagccaataagactctgtgctttgg

SEQ ID NO: 2128288 - DNA, 25 bp, Homo sapien
caacaggcccccaaagaaggtgaat

SEQ ID NO: 2128289 - DNA, 25 bp, Homo sapien
ccctgcgaaaaggtggaggggatca

SEQ ID NO: 2128290 - DNA, 25 bp, Homo sapien
tttgaattagctttcatatgaagtg

SEQ ID NO: 2128291 - DNA, 25 bp, Homo sapien
atgaagtgccttaagtagactcttc

SEQ ID NO: 2128292 - DNA, 25 bp, Homo sapien
gaattagctttcatatgaagtgcct

SEQ ID NO: 2128293 - DNA, 25 bp, Homo sapien
gaagtgccttaagtagactcttcat

SEQ ID NO: 2128294 - DNA, 25 bp, Homo sapien
cttgaactcaggagatggaggtttc

SEQ ID NO: 2128295 - DNA, 25 bp, Homo sapien
acttgaactcaggagatggaggttt

SEQ ID NO: 2128296 - DNA, 25 bp, Homo sapien
gaactcaggagatggaggtttcagt

SEQ ID NO: 2128297 - DNA, 25 bp, Homo sapien
tttcagtgagccaagatcacaccac

SEQ ID NO: 2128298 - DNA, 25 bp, Homo sapien
cagtgtaacttatacatggcctaaa

SEQ ID NO: 2128299 - DNA, 25 bp, Homo sapien
ctgcttgagtatggtgttaactacc

SEQ ID NO: 2128300 - DNA, 25 bp, Homo sapien
tcttttaaggtgacccatctgtgat

SEQ ID NO: 2128301 - DNA, 25 bp, Homo sapien
gctcagttagaaaaggactccctgg

SEQ ID NO: 2128302 - DNA, 25 bp, Homo sapien
caaagaagatgtgtagtgccttaac

SEQ ID NO: 2128303 - DNA, 25 bp, Homo sapien
tgtagtgccttaacaagcaatcctc

SEQ ID NO: 2128304 - DNA, 25 bp, Homo sapien
cccagtgaactttatggaacattta

SEQ ID NO: 2128305 - DNA, 25 bp, Homo sapien
taatcatttaaccaaagaagatgtg

SEQ ID NO: 2128306 - DNA, 25 bp, Homo sapien
gtatatatgctgccaaagtaagcat

SEQ ID NO: 2128307 - DNA, 25 bp, Homo sapien
atgcccagcctgcatgaacttttta

SEQ ID NO: 2128308 - DNA, 25 bp, Homo sapien
ccaggtagctatgaccacaggctca

SEQ ID NO: 2128309 - DNA, 25 bp, Homo sapien
gctcaagcaacctttcccactgtgg

SEQ ID NO: 2128310 - DNA, 25 bp, Homo sapien
tcacacattgttatctgttgcagag

SEQ ID NO: 2128311 - DNA, 25 bp, Homo sapien
tcgcttcaggtacccttgaagtgag

SEQ ID NO: 2128312 - DNA, 25 bp, Homo sapien
ctagaactgcggcaatacagctgct

SEQ ID NO: 2128313 - DNA, 25 bp, Homo sapien
ttcaggtacccttgaagtgagctga

SEQ ID NO: 2128314 - DNA, 25 bp, Homo sapien
gtgaagctagaactgcggcaataca

SEQ ID NO: 2128315 - DNA, 25 bp, Homo sapien
cttggagacgatttagtgcgctttt

SEQ ID NO: 2128316 - DNA, 25 bp, Homo sapien
cgatttagtgcgcttttgaccaagg

SEQ ID NO: 2128317 - DNA, 25 bp, Homo sapien
agacgatttagtgcgcttttgacca

SEQ ID NO: 2128318 - DNA, 25 bp, Homo sapien
tttagtgcgcttttgaccaagggaa

SEQ ID NO: 2128319 - DNA, 25 bp, Homo sapien
tgggtaacagagcaattctctgtcc

SEQ ID NO: 2128320 - DNA, 25 bp, Homo sapien
tcaggaggctgtggccggacgatca

SEQ ID NO: 2128321 - DNA, 25 bp, Homo sapien
gctgtggccggacgatcacttgagt

SEQ ID NO: 2128322 - DNA, 25 bp, Homo sapien
tgtggccggacgatcacttgagtcc

SEQ ID NO: 2128323 - DNA, 25 bp, Homo sapien
tcagaccagtctgtgaaacatagtg

SEQ ID NO: 2128324 - DNA, 25 bp, Homo sapien
gtttcagaccagtctgtgaaacata

SEQ ID NO: 2128325 - DNA, 25 bp, Homo sapien
gagtttcagaccagtctgtgaaaca

SEQ ID NO: 2128326 - DNA, 25 bp, Homo sapien
ttcagaccagtctgtgaaacatagt

SEQ ID NO: 2128327 - DNA, 25 bp, Homo sapien
ttgtcatgaaaatcaggtgtacgtt

SEQ ID NO: 2128328 - DNA, 25 bp, Homo sapien
tttgtcatgaaaatcaggtgtacgt

SEQ ID NO: 2128329 - DNA, 25 bp, Homo sapien
cgtatttgtcatgaaaatcaggtgt

SEQ ID NO: 2128330 - DNA, 25 bp, Homo sapien
tatttgtcatgaaaatcaggtgtac

SEQ ID NO: 2128331 - DNA, 25 bp, Homo sapien
ccatgtaacaatacagaaagtggct

SEQ ID NO: 2128332 - DNA, 25 bp, Homo sapien
atatgtccatgtaacaatacagaaa

SEQ ID NO: 2128333 - DNA, 25 bp, Homo sapien
tccatgtaacaatacagaaagtggc

SEQ ID NO: 2128334 - DNA, 25 bp, Homo sapien
tgtccatgtaacaatacagaaagtg

SEQ ID NO: 2128335 - DNA, 25 bp, Homo sapien
caagtccctcctaactagatatgta

SEQ ID NO: 2128336 - DNA, 25 bp, Homo sapien
aaagggctgccttgtgatccagtaa

SEQ ID NO: 2128337 - DNA, 25 bp, Homo sapien
gattacacaatctctcaagtccctc

SEQ ID NO: 2128338 - DNA, 25 bp, Homo sapien
gacactttgaatgcatagactgaga

SEQ ID NO: 2128339 - DNA, 25 bp, Homo sapien
ttgggagcctgaggcagaagaagtg

SEQ ID NO: 2128340 - DNA, 25 bp, Homo sapien
ttgaacccaggaggcagaggttgca

SEQ ID NO: 2128341 - DNA, 25 bp, Homo sapien
gtgagccaagatcgcaccactgcac

SEQ ID NO: 2128342 - DNA, 25 bp, Homo sapien
caagatcgcaccactgcactccagc

SEQ ID NO: 2128343 - DNA, 25 bp, Homo sapien
gattccctcaaccacaactacctaa

SEQ ID NO: 2128344 - DNA, 25 bp, Homo sapien
aacatttgttcaacatctgtttatc

SEQ ID NO: 2128345 - DNA, 25 bp, Homo sapien
tctatactacccactcaatacactg

SEQ ID NO: 2128346 - DNA, 25 bp, Homo sapien
aactgccagagtattttatattctc

SEQ ID NO: 2128347 - DNA, 25 bp, Homo sapien
ttccattctattccgacttgtgttg

SEQ ID NO: 2128348 - DNA, 25 bp, Homo sapien
cctccattcctttggggtaactctg

SEQ ID NO: 2128349 - DNA, 25 bp, Homo sapien
attctattccgacttgtgttgctac

SEQ ID NO: 2128350 - DNA, 25 bp, Homo sapien
ctttggggtaactctgccaacaggg

SEQ ID NO: 2128351 - DNA, 25 bp, Homo sapien
caattcattattacaccagctggga

SEQ ID NO: 2128352 - DNA, 25 bp, Homo sapien
ttaatttggcatcaattatgagctg

SEQ ID NO: 2128353 - DNA, 25 bp, Homo sapien
tcaataatgccatatcttaatgggt

SEQ ID NO: 2128354 - DNA, 25 bp, Homo sapien
atgggtacacagtgctttaatttgg

SEQ ID NO: 2128355 - DNA, 25 bp, Homo sapien
aaacctatttaagaagctgcacagc

SEQ ID NO: 2128356 - DNA, 25 bp, Homo sapien
cataaaggctaaagtgatcaagctt

SEQ ID NO: 2128357 - DNA, 25 bp, Homo sapien
aggctaaagtgatcaagcttagttt

SEQ ID NO: 2128358 - DNA, 25 bp, Homo sapien
tatttaagaagctgcacagcatttg

SEQ ID NO: 2128359 - DNA, 25 bp, Homo sapien
cactccgcccttgggtctggtgaca

SEQ ID NO: 2128360 - DNA, 25 bp, Homo sapien
gatgaatatgccaaaacagccaagg

SEQ ID NO: 2128361 - DNA, 25 bp, Homo sapien
tagtcttcagacaggctacgagttt

SEQ ID NO: 2128362 - DNA, 25 bp, Homo sapien
tcaaaggtgatctgcaatagttcca

SEQ ID NO: 2128363 - DNA, 25 bp, Homo sapien
agctaatatagacaggttacctgac

SEQ ID NO: 2128364 - DNA, 25 bp, Homo sapien
taatatagacaggttacctgactga

SEQ ID NO: 2128365 - DNA, 25 bp, Homo sapien
tatagacaggttacctgactgaaat

SEQ ID NO: 2128366 - DNA, 25 bp, Homo sapien
ttagctaatatagacaggttacctg

SEQ ID NO: 2128367 - DNA, 25 bp, Homo sapien
aagacttagaacagcgtccggcaca

SEQ ID NO: 2128368 - DNA, 25 bp, Homo sapien
tccatcctagctgttgtcaagtccc

SEQ ID NO: 2128369 - DNA, 25 bp, Homo sapien
tgtagaacaaaactaatcacaggac

SEQ ID NO: 2128370 - DNA, 25 bp, Homo sapien
taacagtaaaaagagggagaggctc

SEQ ID NO: 2128371 - DNA, 25 bp, Homo sapien
gcagaccgtggcagcgataaatcca

SEQ ID NO: 2128372 - DNA, 25 bp, Homo sapien
cgataaatccacgtacgcaggctcc

SEQ ID NO: 2128373 - DNA, 25 bp, Homo sapien
caatcggagaagtcacagtagctgc

SEQ ID NO: 2128374 - DNA, 25 bp, Homo sapien
taaacctctggagctacgcagaccg

SEQ ID NO: 2128375 - DNA, 25 bp, Homo sapien
ttatctgagcgtggtagtgcacctg

SEQ ID NO: 2128376 - DNA, 25 bp, Homo sapien
gatgctaaagtctaccagttgggag

SEQ ID NO: 2128377 - DNA, 25 bp, Homo sapien
tgttcagccagacaacaagtgagag

SEQ ID NO: 2128378 - DNA, 25 bp, Homo sapien
cagttgggagttctttataggcacc

SEQ ID NO: 2128379 - DNA, 25 bp, Homo sapien
gccctcaagctgtttatgtccactg

SEQ ID NO: 2128380 - DNA, 25 bp, Homo sapien
gctgtgtttgccctcaagctgttta

SEQ ID NO: 2128381 - DNA, 25 bp, Homo sapien
ttggcatatagaaattcagctgtgt

SEQ ID NO: 2128382 - DNA, 25 bp, Homo sapien
tgtttatgtccactgaacttctcat

SEQ ID NO: 2128383 - DNA, 25 bp, Homo sapien
cacttcctccagcaggtctactgtt

SEQ ID NO: 2128384 - DNA, 25 bp, Homo sapien
aggtctactgttccgctgctgctcc

SEQ ID NO: 2128385 - DNA, 25 bp, Homo sapien
caagaagtttggttgacgaaaatgc

SEQ ID NO: 2128386 - DNA, 25 bp, Homo sapien
tcctgctcaaaacgggccggcctaa

SEQ ID NO: 2128387 - DNA, 25 bp, Homo sapien
caattgtcaggtttccaagaatcac

SEQ ID NO: 2128388 - DNA, 25 bp, Homo sapien
catttgcctagagaactcagcctaa

SEQ ID NO: 2128389 - DNA, 25 bp, Homo sapien
tcccttggtccataagatgaagctc

SEQ ID NO: 2128390 - DNA, 25 bp, Homo sapien
gcctaatggagctggaaccttaaag

SEQ ID NO: 2128391 - DNA, 25 bp, Homo sapien
gaattgcaagtcataccctcaacag

SEQ ID NO: 2128392 - DNA, 25 bp, Homo sapien
caggaattgcaagtcataccctcaa

SEQ ID NO: 2128393 - DNA, 25 bp, Homo sapien
caagtcataccctcaacagaaatgg

SEQ ID NO: 2128394 - DNA, 25 bp, Homo sapien
aaatggtaacagaattcacacccat

SEQ ID NO: 2128395 - DNA, 25 bp, Homo sapien
ggcgcaatacatgaaccaggaagtc

SEQ ID NO: 2128396 - DNA, 25 bp, Homo sapien
tgattaggtaatgaagacagagtcc

SEQ ID NO: 2128397 - DNA, 25 bp, Homo sapien
gatccaggttcctatatgaaggcca

SEQ ID NO: 2128398 - DNA, 25 bp, Homo sapien
gaacagactaagacaaaggtgatcc

SEQ ID NO: 2128399 - DNA, 25 bp, Homo sapien
gaagggattattgtcactgctacag

SEQ ID NO: 2128400 - DNA, 25 bp, Homo sapien
tagtacatgaatggcaggtcatccc

SEQ ID NO: 2128401 - DNA, 25 bp, Homo sapien
tcatcaatagcttcctgtagggtct

SEQ ID NO: 2128402 - DNA, 25 bp, Homo sapien
caaagtcagtgacgccgtaacagtc

SEQ ID NO: 2128403 - DNA, 25 bp, Homo sapien
gactcctttgctgtgacccttctga

SEQ ID NO: 2128404 - DNA, 25 bp, Homo sapien
gatatgacaccctcaatagactgca

SEQ ID NO: 2128405 - DNA, 25 bp, Homo sapien
gatactaactctatatagccccggt

SEQ ID NO: 2128406 - DNA, 25 bp, Homo sapien
gaggctggctaactacattcaaagg

SEQ ID NO: 2128407 - DNA, 25 bp, Homo sapien
tagttgaagtcaaaagcggcatttc

SEQ ID NO: 2128408 - DNA, 25 bp, Homo sapien
catgccagtgacctgtatgtaacac

SEQ ID NO: 2128409 - DNA, 25 bp, Homo sapien
tgctacacaggaagcgcaagtcatg

SEQ ID NO: 2128410 - DNA, 25 bp, Homo sapien
cgatgaaggctgagctattactacc

SEQ ID NO: 2128411 - DNA, 25 bp, Homo sapien
gattataccttacttctgccttgcc

SEQ ID NO: 2128412 - DNA, 25 bp, Homo sapien
tcggatgaactctgctatcattggg

SEQ ID NO: 2128413 - DNA, 25 bp, Homo sapien
tcagggccacaagtatagaatatat

SEQ ID NO: 2128414 - DNA, 25 bp, Homo sapien
agtggctccaaatccaagttctcgg

SEQ ID NO: 2128415 - DNA, 25 bp, Homo sapien
ttaatatgtgctttgttggttgcca

SEQ ID NO: 2128416 - DNA, 25 bp, Homo sapien
tatctctaggaccaataatttctgg

SEQ ID NO: 2128417 - DNA, 25 bp, Homo sapien
tttatgtacgcaggaggcacacgtc

SEQ ID NO: 2128418 - DNA, 25 bp, Homo sapien
gccacggagcagtataggatccctc

SEQ ID NO: 2128419 - DNA, 25 bp, Homo sapien
tctaagtgacttgctgaccgatcct

SEQ ID NO: 2128420 - DNA, 25 bp, Homo sapien
gtcttatttctcgtttatgatctaa

SEQ ID NO: 2128421 - DNA, 25 bp, Homo sapien
gctgaccgatccttcttgaccaaag

SEQ ID NO: 2128422 - DNA, 25 bp, Homo sapien
ctcgtttatgatctaagtgacttgc

SEQ ID NO: 2128423 - DNA, 25 bp, Homo sapien
gcaaagtggtggtccataaccatca

SEQ ID NO: 2128424 - DNA, 25 bp, Homo sapien
cataacagacaatcctggaagaatc

SEQ ID NO: 2128425 - DNA, 25 bp, Homo sapien
gactcacaagaaaagaccgtctcca

SEQ ID NO: 2128426 - DNA, 25 bp, Homo sapien
atcagccccattacaggaatacaga

SEQ ID NO: 2128427 - DNA, 25 bp, Homo sapien
caatcagtacgtccatatttgctgt

SEQ ID NO: 2128428 - DNA, 25 bp, Homo sapien
tctctcatacattgcaactagaaga

SEQ ID NO: 2128429 - DNA, 25 bp, Homo sapien
tatgttccagccatcggcctagtgc

SEQ ID NO: 2128430 - DNA, 25 bp, Homo sapien
tagggttcactttggctctctcata

SEQ ID NO: 2128431 - DNA, 25 bp, Homo sapien
cccctgctggcaaaaactgttacaa

SEQ ID NO: 2128432 - DNA, 25 bp, Homo sapien
tgaaccagagaaatatttatgccct

SEQ ID NO: 2128433 - DNA, 25 bp, Homo sapien
ttacaacttgtaccatgaaccagag

SEQ ID NO: 2128434 - DNA, 25 bp, Homo sapien
catgaacccaataaacacacaggca

SEQ ID NO: 2128435 - DNA, 25 bp, Homo sapien
gcttctgtagcttgtagtgaaatta

SEQ ID NO: 2128436 - DNA, 25 bp, Homo sapien
tctgtagcttgtagtgaaattaact

SEQ ID NO: 2128437 - DNA, 25 bp, Homo sapien
tgaggaggatattatcagaatcaag

SEQ ID NO: 2128438 - DNA, 25 bp, Homo sapien
aatcaagagttacaatagttgcttc

SEQ ID NO: 2128439 - DNA, 25 bp, Homo sapien
gacaaaatggatagatgaagtatgg

SEQ ID NO: 2128440 - DNA, 25 bp, Homo sapien
gattatgtgaattcatgatagtcct

SEQ ID NO: 2128441 - DNA, 25 bp, Homo sapien
aaagacagacaaaatggatagatga

SEQ ID NO: 2128442 - DNA, 25 bp, Homo sapien
ttttatatctgggagacagattatg

SEQ ID NO: 2128443 - DNA, 25 bp, Homo sapien
cacgttgtacaagttccacatccac

SEQ ID NO: 2128444 - DNA, 25 bp, Homo sapien
tgagggactcatctaccatagaatg

SEQ ID NO: 2128445 - DNA, 25 bp, Homo sapien
ctttaatgatatctccacgttgtac

SEQ ID NO: 2128446 - DNA, 25 bp, Homo sapien
ttcaataacacgaccatccactgga

SEQ ID NO: 2128447 - DNA, 25 bp, Homo sapien
gctccaacatgtgttgcgcagataa

SEQ ID NO: 2128448 - DNA, 25 bp, Homo sapien
agcaatcactgtgctgccaggtttc

SEQ ID NO: 2128449 - DNA, 25 bp, Homo sapien
ggaaccagcaatcactgtgctgcca

SEQ ID NO: 2128450 - DNA, 25 bp, Homo sapien
tgacccgttctggttaatggaacca

SEQ ID NO: 2128451 - DNA, 25 bp, Homo sapien
caatccataccaagagggtggcaat

SEQ ID NO: 2128452 - DNA, 25 bp, Homo sapien
ttacaatccataccaagagggtggc

SEQ ID NO: 2128453 - DNA, 25 bp, Homo sapien
aatccataccaagagggtggcaatg

SEQ ID NO: 2128454 - DNA, 25 bp, Homo sapien
tacaatccataccaagagggtggca

SEQ ID NO: 2128455 - DNA, 25 bp, Homo sapien
cgtattatcgtttctgttcgggaga

SEQ ID NO: 2128456 - DNA, 25 bp, Homo sapien
gaggcttggaaagcaaatcgtatta

SEQ ID NO: 2128457 - DNA, 25 bp, Homo sapien
gggacatgcaatacacagaactgtg

SEQ ID NO: 2128458 - DNA, 25 bp, Homo sapien
ttggagtggccagtcccagtgaaca

SEQ ID NO: 2128459 - DNA, 25 bp, Homo sapien
ggctgttcctagagggtgttcactg

SEQ ID NO: 2128460 - DNA, 25 bp, Homo sapien
tccagttattcttatgtagcaagcc

SEQ ID NO: 2128461 - DNA, 25 bp, Homo sapien
gagatctgggcatcaataatcatgg

SEQ ID NO: 2128462 - DNA, 25 bp, Homo sapien
tctatgcaggtacccaaggtttcag

SEQ ID NO: 2128463 - DNA, 25 bp, Homo sapien
tggcacaacctggaaatctatgcag

SEQ ID NO: 2128464 - DNA, 25 bp, Homo sapien
caatgaggactttatactgctgagc

SEQ ID NO: 2128465 - DNA, 25 bp, Homo sapien
tacatcgttattaatgacaagacca

SEQ ID NO: 2128466 - DNA, 25 bp, Homo sapien
tccactcccggttaccaatgaggac

SEQ ID NO: 2128467 - DNA, 25 bp, Homo sapien
gctactaatacagcagtccgacctt

SEQ ID NO: 2128468 - DNA, 25 bp, Homo sapien
ctaatataggggcagcacaaaataa

SEQ ID NO: 2128469 - DNA, 25 bp, Homo sapien
tgtgtctgcaatggctatcaagcca

SEQ ID NO: 2128470 - DNA, 25 bp, Homo sapien
taagcccatagatttcagaatatgg

SEQ ID NO: 2128471 - DNA, 25 bp, Homo sapien
tccagtcatcagaactacttctaag

SEQ ID NO: 2128472 - DNA, 25 bp, Homo sapien
gttttactgttgtctccagtcatca

SEQ ID NO: 2128473 - DNA, 25 bp, Homo sapien
gaaggtagaacttcagcaaacacct

SEQ ID NO: 2128474 - DNA, 25 bp, Homo sapien
ccttatcaaaaccacatcagctgct

SEQ ID NO: 2128475 - DNA, 25 bp, Homo sapien
cacattagccattgccagagctggg

SEQ ID NO: 2128476 - DNA, 25 bp, Homo sapien
tgtgcctgtgccaatagcaattccc

SEQ ID NO: 2128477 - DNA, 25 bp, Homo sapien
ttccaaccagattataaattagagc

SEQ ID NO: 2128478 - DNA, 25 bp, Homo sapien
tttatccgaatcctcttgactgtct

SEQ ID NO: 2128479 - DNA, 25 bp, Homo sapien
tcttgataagtcaatacttgccact

SEQ ID NO: 2128480 - DNA, 25 bp, Homo sapien
cagcagctatgggaattccaaccag

SEQ ID NO: 2128481 - DNA, 25 bp, Homo sapien
gaagaaagtactacagaaacagatg

SEQ ID NO: 2128482 - DNA, 25 bp, Homo sapien
gagaagaaagtactacagaaacaga

SEQ ID NO: 2128483 - DNA, 25 bp, Homo sapien
aagaaagtactacagaaacagatga

SEQ ID NO: 2128484 - DNA, 25 bp, Homo sapien
gcaaaaccaaaccaatgggcataaa

SEQ ID NO: 2128485 - DNA, 25 bp, Homo sapien
taaccaaaagtaaatgagatgctcg

SEQ ID NO: 2128486 - DNA, 25 bp, Homo sapien
caaataaccaaaagtaaatgagatg

SEQ ID NO: 2128487 - DNA, 25 bp, Homo sapien
ttcaaataaccaaaagtaaatgaga

SEQ ID NO: 2128488 - DNA, 25 bp, Homo sapien
aataaccaaaagtaaatgagatgct

SEQ ID NO: 2128489 - DNA, 25 bp, Homo sapien
tataattaacaatccggtccagcaa

SEQ ID NO: 2128490 - DNA, 25 bp, Homo sapien
ttagggagcgtttatcagacagtag

SEQ ID NO: 2128491 - DNA, 25 bp, Homo sapien
gctccgggcaggcagttcataactc

SEQ ID NO: 2128492 - DNA, 25 bp, Homo sapien
caggagtgagtgcttgtcaggttca

SEQ ID NO: 2128493 - DNA, 25 bp, Homo sapien
tataatgcagtgtcatcatcttccc

SEQ ID NO: 2128494 - DNA, 25 bp, Homo sapien
catcatcttccctgaagtctcccac

SEQ ID NO: 2128495 - DNA, 25 bp, Homo sapien
ttataatgcagtgtcatcatcttcc

SEQ ID NO: 2128496 - DNA, 25 bp, Homo sapien
tgtcatcatcttccctgaagtctcc

SEQ ID NO: 2128497 - DNA, 25 bp, Homo sapien
tagtcttacaagtaccagatctctg

SEQ ID NO: 2128498 - DNA, 25 bp, Homo sapien
gctaaaaagcgtcataacctaggga

SEQ ID NO: 2128499 - DNA, 25 bp, Homo sapien
gctaccaggcactcacaagggaatt

SEQ ID NO: 2128500 - DNA, 25 bp, Homo sapien
taccgagtacaaatcctatgtgcca

SEQ ID NO: 2128501 - DNA, 25 bp, Homo sapien
gagacgcctggttttggctacaaaa

SEQ ID NO: 2128502 - DNA, 25 bp, Homo sapien
ctacagtagatggatattgcacaac

SEQ ID NO: 2128503 - DNA, 25 bp, Homo sapien
aaggcacatccttggcagaaatatg

SEQ ID NO: 2128504 - DNA, 25 bp, Homo sapien
gtccactgctgttttcggtaccaaa

SEQ ID NO: 2128505 - DNA, 25 bp, Homo sapien
cagtaagatatcctccccttctttg

SEQ ID NO: 2128506 - DNA, 25 bp, Homo sapien
ttctttgccactcagagacgacttc

SEQ ID NO: 2128507 - DNA, 25 bp, Homo sapien
gccactcagagacgacttctttatg

SEQ ID NO: 2128508 - DNA, 25 bp, Homo sapien
tcagagacgacttctttatgaattt

SEQ ID NO: 2128509 - DNA, 25 bp, Homo sapien
ttggggttgctcagctggttcaggc

SEQ ID NO: 2128510 - DNA, 25 bp, Homo sapien
gctcttggggttgctcagctggttc

SEQ ID NO: 2128511 - DNA, 25 bp, Homo sapien
tcttggggttgctcagctggttcag

SEQ ID NO: 2128512 - DNA, 25 bp, Homo sapien
ctcttggggttgctcagctggttca

SEQ ID NO: 2128513 - DNA, 25 bp, Homo sapien
caaaggcattgtgaacttgtagaca

SEQ ID NO: 2128514 - DNA, 25 bp, Homo sapien
ttcaaaggcattgtgaacttgtaga

SEQ ID NO: 2128515 - DNA, 25 bp, Homo sapien
aaggcattgtgaacttgtagacagg

SEQ ID NO: 2128516 - DNA, 25 bp, Homo sapien
aggcattgtgaacttgtagacaggg

SEQ ID NO: 2128517 - DNA, 25 bp, Homo sapien
tgaagagagggtcaactctgccact

SEQ ID NO: 2128518 - DNA, 25 bp, Homo sapien
aagggcactggatatgggcctcgaa

SEQ ID NO: 2128519 - DNA, 25 bp, Homo sapien
cacagctgacaagagatgcctgtca

SEQ ID NO: 2128520 - DNA, 25 bp, Homo sapien
gatatgggcctcgaatctgcagctt

SEQ ID NO: 2128521 - DNA, 25 bp, Homo sapien
ggctcacttacctggtcatatattt

SEQ ID NO: 2128522 - DNA, 25 bp, Homo sapien
tgcttgttaagttcacactggctca

SEQ ID NO: 2128523 - DNA, 25 bp, Homo sapien
ccccagcagaagattacttcaagac

SEQ ID NO: 2128524 - DNA, 25 bp, Homo sapien
aagaccggagttccctctggactga

SEQ ID NO: 2128525 - DNA, 25 bp, Homo sapien
cgaagatccgggtgacgctgcgaac

SEQ ID NO: 2128526 - DNA, 25 bp, Homo sapien
gtcggcgccgctgcgtttcccggaa

SEQ ID NO: 2128527 - DNA, 25 bp, Homo sapien
tgaagaatgtgcgagacccagggtc

SEQ ID NO: 2128528 - DNA, 25 bp, Homo sapien
gcccacaagggtagcggcgaagatc

SEQ ID NO: 2128529 - DNA, 25 bp, Homo sapien
tccggcacgccgcgaaccgcaagga

SEQ ID NO: 2128530 - DNA, 25 bp, Homo sapien
ccggcacgccgcgaaccgcaaggaa

SEQ ID NO: 2128531 - DNA, 25 bp, Homo sapien
cggcacgccgcgaaccgcaaggaac

SEQ ID NO: 2128532 - DNA, 25 bp, Homo sapien
gtccggcacgccgcgaaccgcaagg

SEQ ID NO: 2128533 - DNA, 25 bp, Homo sapien
tagtgagacgtgcggcttccgtttg

SEQ ID NO: 2128534 - DNA, 25 bp, Homo sapien
gtgagacgtgcggcttccgtttgtc

SEQ ID NO: 2128535 - DNA, 25 bp, Homo sapien
gagacgtgcggcttccgtttgtcac

SEQ ID NO: 2128536 - DNA, 25 bp, Homo sapien
ctagtgagacgtgcggcttccgttt

SEQ ID NO: 2128537 - DNA, 25 bp, Homo sapien
ccttcccggccgctgctctcggcgc

SEQ ID NO: 2128538 - DNA, 25 bp, Homo sapien
acagcccatcgcggtcggcgcgctg

SEQ ID NO: 2128539 - DNA, 25 bp, Homo sapien
tccctggcgctgtccgtctgcgagg

SEQ ID NO: 2128540 - DNA, 25 bp, Homo sapien
tctcggcgcgccctgctgagcagcc

SEQ ID NO: 2128541 - DNA, 25 bp, Homo sapien
cttgcagaatgcggaacaccgcgcg

SEQ ID NO: 2128542 - DNA, 25 bp, Homo sapien
acagggcccacactaccgccccaca

SEQ ID NO: 2128543 - DNA, 25 bp, Homo sapien
cagaatgcggaacaccgcgcgggca

SEQ ID NO: 2128544 - DNA, 25 bp, Homo sapien
aacaccgcgcgggcaggaacagggc

SEQ ID NO: 2128545 - DNA, 25 bp, Homo sapien
agagaggtcggtgattcggtcaacg

SEQ ID NO: 2128546 - DNA, 25 bp, Homo sapien
tgattcggtcaacgagggagccgac

SEQ ID NO: 2128547 - DNA, 25 bp, Homo sapien
cgactgccgacgtgcgctccggagg

SEQ ID NO: 2128548 - DNA, 25 bp, Homo sapien
gtcaacgagggagccgactgccgac

SEQ ID NO: 2128549 - DNA, 25 bp, Homo sapien
ttccctttaacgtccagcttgtcca

SEQ ID NO: 2128550 - DNA, 25 bp, Homo sapien
cttgtccagcgtcagcttgttagaa

SEQ ID NO: 2128551 - DNA, 25 bp, Homo sapien
taacgtccagcttgtccagcgtcag

SEQ ID NO: 2128552 - DNA, 25 bp, Homo sapien
agcttgtccagcgtcagcttgttag

SEQ ID NO: 2128553 - DNA, 25 bp, Homo sapien
aaaccagtggaccagaagagtcagc

SEQ ID NO: 2128554 - DNA, 25 bp, Homo sapien
caatttcccttggcaatccaaacca

SEQ ID NO: 2128555 - DNA, 25 bp, Homo sapien
aatttcccttggcaatccaaaccag

SEQ ID NO: 2128556 - DNA, 25 bp, Homo sapien
gaagagtcagcaaataccatagttc

SEQ ID NO: 2128557 - DNA, 25 bp, Homo sapien
cttcataggaacattgaagtcgact

SEQ ID NO: 2128558 - DNA, 25 bp, Homo sapien
gtttgttatctggttgttcttcata

SEQ ID NO: 2128559 - DNA, 25 bp, Homo sapien
tgttcttcataggaacattgaagtc

SEQ ID NO: 2128560 - DNA, 25 bp, Homo sapien
tgttatctggttgttcttcatagga

SEQ ID NO: 2128561 - DNA, 25 bp, Homo sapien
aatgaataactctgccaggtatggg

SEQ ID NO: 2128562 - DNA, 25 bp, Homo sapien
tgacttatctgagccatttgaatgg

SEQ ID NO: 2128563 - DNA, 25 bp, Homo sapien
tctcttacatagttcttcattttgc

SEQ ID NO: 2128564 - DNA, 25 bp, Homo sapien
tacatataaccttagtaactactgg

SEQ ID NO: 2128565 - DNA, 25 bp, Homo sapien
tgatgcttgggacagcagccttaat

SEQ ID NO: 2128566 - DNA, 25 bp, Homo sapien
tgagcagtatgaaagttaaaaacca

SEQ ID NO: 2128567 - DNA, 25 bp, Homo sapien
cagtaacaacgtgcttgacaacttc

SEQ ID NO: 2128568 - DNA, 25 bp, Homo sapien
agatgaagacacttgagcagtatga

SEQ ID NO: 2128569 - DNA, 25 bp, Homo sapien
aaaaccagtaacaacgtgcttgaca

SEQ ID NO: 2128570 - DNA, 25 bp, Homo sapien
catgaaagcggaggttctccagcag

SEQ ID NO: 2128571 - DNA, 25 bp, Homo sapien
tgttcccagaagcatcttttccctt

SEQ ID NO: 2128572 - DNA, 25 bp, Homo sapien
ggcctacacagtccttcaagaacag

SEQ ID NO: 2128573 - DNA, 25 bp, Homo sapien
cagctgggttggcacaggctttctc

SEQ ID NO: 2128574 - DNA, 25 bp, Homo sapien
ctattttggctggctcggctttaac

SEQ ID NO: 2128575 - DNA, 25 bp, Homo sapien
tctattttggctggctcggctttaa

SEQ ID NO: 2128576 - DNA, 25 bp, Homo sapien
cttctattttggctggctcggcttt

SEQ ID NO: 2128577 - DNA, 25 bp, Homo sapien
agcttctattttggctggctcggct

SEQ ID NO: 2128578 - DNA, 25 bp, Homo sapien
tggcagattgactcctaccatggag

SEQ ID NO: 2128579 - DNA, 25 bp, Homo sapien
tgcaaagtagttcagctccttcttc

SEQ ID NO: 2128580 - DNA, 25 bp, Homo sapien
atcaaaaacccaccagccttctgtg

SEQ ID NO: 2128581 - DNA, 25 bp, Homo sapien
tctccaaggcctttgcaaagtagtt

SEQ ID NO: 2128582 - DNA, 25 bp, Homo sapien
caagttatggcctactaccaggcaa

SEQ ID NO: 2128583 - DNA, 25 bp, Homo sapien
gcccagcctgtagttcctttattaa

SEQ ID NO: 2128584 - DNA, 25 bp, Homo sapien
cccagtgtgactgagctatatgaca

SEQ ID NO: 2128585 - DNA, 25 bp, Homo sapien
taccaggcaaacaatacttaaagca

SEQ ID NO: 2128586 - DNA, 25 bp, Homo sapien
tatccagtgagaaaccctatgctag

SEQ ID NO: 2128587 - DNA, 25 bp, Homo sapien
tacaagagatacctaacagccaaag

SEQ ID NO: 2128588 - DNA, 25 bp, Homo sapien
tccaaagcactagggttacatgcct

SEQ ID NO: 2128589 - DNA, 25 bp, Homo sapien
tgtgggtgaacagatggcaagaaac

SEQ ID NO: 2128590 - DNA, 25 bp, Homo sapien
tccttttaaggtatggctccagaca

SEQ ID NO: 2128591 - DNA, 25 bp, Homo sapien
cctagaagctgatggacaacagatt

SEQ ID NO: 2128592 - DNA, 25 bp, Homo sapien
agtactgcctaactttgccctatgt

SEQ ID NO: 2128593 - DNA, 25 bp, Homo sapien
tgagtttctatttcaaggcacagga

SEQ ID NO: 2128594 - DNA, 25 bp, Homo sapien
accaataatcatctcattgactttg

SEQ ID NO: 2128595 - DNA, 25 bp, Homo sapien
tatcatggagagctatttcacatcc

SEQ ID NO: 2128596 - DNA, 25 bp, Homo sapien
tattatcatggagagctatttcaca

SEQ ID NO: 2128597 - DNA, 25 bp, Homo sapien
tcatggagagctatttcacatccac

SEQ ID NO: 2128598 - DNA, 25 bp, Homo sapien
ctgctattatcatggagagctattt

SEQ ID NO: 2128599 - DNA, 25 bp, Homo sapien
tcttcatcaaacagagaagtgccaa

SEQ ID NO: 2128600 - DNA, 25 bp, Homo sapien
cagtgacaaagtcaacaggcaaggt

SEQ ID NO: 2128601 - DNA, 25 bp, Homo sapien
caggcaaggtaatcttcacaccatt

SEQ ID NO: 2128602 - DNA, 25 bp, Homo sapien
tccagccagcaggtatgccagaagc

SEQ ID NO: 2128603 - DNA, 25 bp, Homo sapien
gcccctagaagtggctttcaccacc

SEQ ID NO: 2128604 - DNA, 25 bp, Homo sapien
agaagtggctttcaccacctcatcc

SEQ ID NO: 2128605 - DNA, 25 bp, Homo sapien
tagaagtggctttcaccacctcatc

SEQ ID NO: 2128606 - DNA, 25 bp, Homo sapien
cctagaagtggctttcaccacctca

SEQ ID NO: 2128607 - DNA, 25 bp, Homo sapien
aaactgtaaggcagtgtgctcccca

SEQ ID NO: 2128608 - DNA, 25 bp, Homo sapien
ggtattagctttgtataggaccgct

SEQ ID NO: 2128609 - DNA, 25 bp, Homo sapien
taaagagacatagaagaagttctcc

SEQ ID NO: 2128610 - DNA, 25 bp, Homo sapien
tccccaacccaaaaggtagctgata

SEQ ID NO: 2128611 - DNA, 25 bp, Homo sapien
ccccagtgctcacatggctgacttt

SEQ ID NO: 2128612 - DNA, 25 bp, Homo sapien
ggctgactttatcctccgtgttcca

SEQ ID NO: 2128613 - DNA, 25 bp, Homo sapien
cgtgttccatttggcacagcaagtg

SEQ ID NO: 2128614 - DNA, 25 bp, Homo sapien
cttccaggagctccaaactggcacc

SEQ ID NO: 2128615 - DNA, 25 bp, Homo sapien
tctcactgcacagtccacccttatc

SEQ ID NO: 2128616 - DNA, 25 bp, Homo sapien
ctctcactgcacagtccacccttat

SEQ ID NO: 2128617 - DNA, 25 bp, Homo sapien
ctcactgcacagtccacccttatcc

SEQ ID NO: 2128618 - DNA, 25 bp, Homo sapien
tattgctgagagcatccaccccagg

SEQ ID NO: 2128619 - DNA, 25 bp, Homo sapien
ctaaatattgctgagagcatccacc

SEQ ID NO: 2128620 - DNA, 25 bp, Homo sapien
tgctgagagcatccaccccaggaag

SEQ ID NO: 2128621 - DNA, 25 bp, Homo sapien
aatattgctgagagcatccacccca

SEQ ID NO: 2128622 - DNA, 25 bp, Homo sapien
tcttggccactagctgaatcttgac

SEQ ID NO: 2128623 - DNA, 25 bp, Homo sapien
tagaatgcacaatggtttagtcact

SEQ ID NO: 2128624 - DNA, 25 bp, Homo sapien
ttaagggttcctggcactgcatctc

SEQ ID NO: 2128625 - DNA, 25 bp, Homo sapien
gaatcttgacatggaaggttttagc

SEQ ID NO: 2128626 - DNA, 25 bp, Homo sapien
tgtgacaaaactataccgagagaat

SEQ ID NO: 2128627 - DNA, 25 bp, Homo sapien
tagacatctgatccgttcctcaaga

SEQ ID NO: 2128628 - DNA, 25 bp, Homo sapien
caatgtctgccataaagtaggccct

SEQ ID NO: 2128629 - DNA, 25 bp, Homo sapien
gaaatatatgtggaacagagccttc

SEQ ID NO: 2128630 - DNA, 25 bp, Homo sapien
gaagatttgggaatgaatcactgat

SEQ ID NO: 2128631 - DNA, 25 bp, Homo sapien
gagacacttatgcttctagaagatt

SEQ ID NO: 2128632 - DNA, 25 bp, Homo sapien
gaaacactgttaatgccaaagacaa

SEQ ID NO: 2128633 - DNA, 25 bp, Homo sapien
tcactgatgggtatacacagaaaat

SEQ ID NO: 2128634 - DNA, 25 bp, Homo sapien
gactcctgcagggataactctaaca

SEQ ID NO: 2128635 - DNA, 25 bp, Homo sapien
tacaaattggataaaggagcactaa

SEQ ID NO: 2128636 - DNA, 25 bp, Homo sapien
gcctagagggcatcaagtacaaatt

SEQ ID NO: 2128637 - DNA, 25 bp, Homo sapien
acagctagctgtacaccctgcctag

SEQ ID NO: 2128638 - DNA, 25 bp, Homo sapien
catcatgtcagggacggaggcacat

SEQ ID NO: 2128639 - DNA, 25 bp, Homo sapien
tcttagagattttgcctcccaggca

SEQ ID NO: 2128640 - DNA, 25 bp, Homo sapien
gaaacagtggcttcgagtctcaaaa

SEQ ID NO: 2128641 - DNA, 25 bp, Homo sapien
cacattggaaaagcatcagccactg

SEQ ID NO: 2128642 - DNA, 25 bp, Homo sapien
gggtttaaatctgttgtccttcagc

SEQ ID NO: 2128643 - DNA, 25 bp, Homo sapien
gacaccatcatagtgaagcaaattg

SEQ ID NO: 2128644 - DNA, 25 bp, Homo sapien
tcttccttttatgggtagcaaacaa

SEQ ID NO: 2128645 - DNA, 25 bp, Homo sapien
tatctggaatcagcatgtgacacca

SEQ ID NO: 2128646 - DNA, 25 bp, Homo sapien
gagccccgctattggtataattcag

SEQ ID NO: 2128647 - DNA, 25 bp, Homo sapien
tacactggacctaggcaaaaccact

SEQ ID NO: 2128648 - DNA, 25 bp, Homo sapien
tgtcagagcagttgggttttacccc

SEQ ID NO: 2128649 - DNA, 25 bp, Homo sapien
caagatcacgccagcttggacgaca

SEQ ID NO: 2128650 - DNA, 25 bp, Homo sapien
cattatatcccgtacatatacacaa

SEQ ID NO: 2128651 - DNA, 25 bp, Homo sapien
tcagaacatcacattatatcccgta

SEQ ID NO: 2128652 - DNA, 25 bp, Homo sapien
caattattggcagggtacaatggct

SEQ ID NO: 2128653 - DNA, 25 bp, Homo sapien
ttatctatacatagatcagaacatc

SEQ ID NO: 2128654 - DNA, 25 bp, Homo sapien
gaggtgtgtaaaccctctcttcata

SEQ ID NO: 2128655 - DNA, 25 bp, Homo sapien
tcctatagctgtcatatagctcagg

SEQ ID NO: 2128656 - DNA, 25 bp, Homo sapien
cattcctgctgggtttcttgcatag

SEQ ID NO: 2128657 - DNA, 25 bp, Homo sapien
cctaggtcctagaatcatccacttg

SEQ ID NO: 2128658 - DNA, 25 bp, Homo sapien
tctggctaagactcccagtattatg

SEQ ID NO: 2128659 - DNA, 25 bp, Homo sapien
cattaaggtatgctccttgtatgcc

SEQ ID NO: 2128660 - DNA, 25 bp, Homo sapien
tactgattaggatgccttttatctc

SEQ ID NO: 2128661 - DNA, 25 bp, Homo sapien
ctcttgttggattgctctggctaag

SEQ ID NO: 2128662 - DNA, 25 bp, Homo sapien
ggtcactgttggtgtatagaagagc

SEQ ID NO: 2128663 - DNA, 25 bp, Homo sapien
aaaggggtcaagttcttgatttgat

SEQ ID NO: 2128664 - DNA, 25 bp, Homo sapien
ctgcttggtcactgttggtgtatag

SEQ ID NO: 2128665 - DNA, 25 bp, Homo sapien
gtacattaatcttgtatccagaaac

SEQ ID NO: 2128666 - DNA, 25 bp, Homo sapien
attgtttggtctttcaactcttgca

SEQ ID NO: 2128667 - DNA, 25 bp, Homo sapien
aattgtttggtctttcaactcttgc

SEQ ID NO: 2128668 - DNA, 25 bp, Homo sapien
ttgtttggtctttcaactcttgcat

SEQ ID NO: 2128669 - DNA, 25 bp, Homo sapien
cacagtgtaagcattcaaagtattg

SEQ ID NO: 2128670 - DNA, 25 bp, Homo sapien
agtgtaggtgcttggagcattgtcc

SEQ ID NO: 2128671 - DNA, 25 bp, Homo sapien
agtattgtcaacagtgtaggtgctt

SEQ ID NO: 2128672 - DNA, 25 bp, Homo sapien
gtccacagtgtaagcattcaaagta

SEQ ID NO: 2128673 - DNA, 25 bp, Homo sapien
gagtactgagagcattaccaatgtc

SEQ ID NO: 2128674 - DNA, 25 bp, Homo sapien
gctagaagggttcagaatgccatca

SEQ ID NO: 2128675 - DNA, 25 bp, Homo sapien
tagtctcaatctcagtactggcagt

SEQ ID NO: 2128676 - DNA, 25 bp, Homo sapien
gaagagcttggcgtactgtcaaaac

SEQ ID NO: 2128677 - DNA, 25 bp, Homo sapien
taactgagacacttagtccatttac

SEQ ID NO: 2128678 - DNA, 25 bp, Homo sapien
tttaactgagacacttagtccattt

SEQ ID NO: 2128679 - DNA, 25 bp, Homo sapien
actctatgacttttaactgagacac

SEQ ID NO: 2128680 - DNA, 25 bp, Homo sapien
cactctatgacttttaactgagaca

SEQ ID NO: 2128681 - DNA, 25 bp, Homo sapien
tgtggttggatagccttttcctcca

SEQ ID NO: 2128682 - DNA, 25 bp, Homo sapien
gagaggattagaaagtctagtcttg

SEQ ID NO: 2128683 - DNA, 25 bp, Homo sapien
gaaagtctagtcttgaatccaaatg

SEQ ID NO: 2128684 - DNA, 25 bp, Homo sapien
gttaacatcccttcaaatgtggttg

SEQ ID NO: 2128685 - DNA, 25 bp, Homo sapien
gaaataatcgacatcaggaaaagca

SEQ ID NO: 2128686 - DNA, 25 bp, Homo sapien
aagccttgaccaggcaatacagaca

SEQ ID NO: 2128687 - DNA, 25 bp, Homo sapien
cagaatagggatgcacatatttatt

SEQ ID NO: 2128688 - DNA, 25 bp, Homo sapien
aatacagacagaatagggatgcaca

SEQ ID NO: 2128689 - DNA, 25 bp, Homo sapien
gtggtacaggccatctgtatggaga

SEQ ID NO: 2128690 - DNA, 25 bp, Homo sapien
gagaaagggctctaaactgggccat

SEQ ID NO: 2128691 - DNA, 25 bp, Homo sapien
ccctcatagggagatagagattttt

SEQ ID NO: 2128692 - DNA, 25 bp, Homo sapien
tgttgttattagcaggaggtggtac

SEQ ID NO: 2128693 - DNA, 25 bp, Homo sapien
tgcttgtttccctcgaggagtggcc

SEQ ID NO: 2128694 - DNA, 25 bp, Homo sapien
tcatgcttgtttccctcgaggagtg

SEQ ID NO: 2128695 - DNA, 25 bp, Homo sapien
aggagtggcccatacactgcctcca

SEQ ID NO: 2128696 - DNA, 25 bp, Homo sapien
tttccctcgaggagtggcccataca

SEQ ID NO: 2128697 - DNA, 25 bp, Homo sapien
tcccagaacataatcgtccctccct

SEQ ID NO: 2128698 - DNA, 25 bp, Homo sapien
agaacataatcgtccctccctctct

SEQ ID NO: 2128699 - DNA, 25 bp, Homo sapien
cccagaacataatcgtccctccctc

SEQ ID NO: 2128700 - DNA, 25 bp, Homo sapien
gcagttacatcattccagtgaccat

SEQ ID NO: 2128701 - DNA, 25 bp, Homo sapien
gttacatcattccagtgaccatcag

SEQ ID NO: 2128702 - DNA, 25 bp, Homo sapien
tgagcagttacatcattccagtgac

SEQ ID NO: 2128703 - DNA, 25 bp, Homo sapien
aagtattttagagaagagtttctgg

SEQ ID NO: 2128704 - DNA, 25 bp, Homo sapien
tcttcaacctgttagcatgctcaac

SEQ ID NO: 2128705 - DNA, 25 bp, Homo sapien
tgcagtctgacttccactcccaata

SEQ ID NO: 2128706 - DNA, 25 bp, Homo sapien
taaggctaccaatcacctgtcaaat

SEQ ID NO: 2128707 - DNA, 25 bp, Homo sapien
tcagtgtttccatagcccctacttg

SEQ ID NO: 2128708 - DNA, 25 bp, Homo sapien
gaggcttggaactacatatccttta

SEQ ID NO: 2128709 - DNA, 25 bp, Homo sapien
tccaccgtagactcattttcccaat

SEQ ID NO: 2128710 - DNA, 25 bp, Homo sapien
tactgtctcctatcttccaccgtag

SEQ ID NO: 2128711 - DNA, 25 bp, Homo sapien
cctgcttgaaacctttgaggcttgg

SEQ ID NO: 2128712 - DNA, 25 bp, Homo sapien
cagagctcctttagaggtgctgaaa

SEQ ID NO: 2128713 - DNA, 25 bp, Homo sapien
agaaacttccggagtctgtgggctg

SEQ ID NO: 2128714 - DNA, 25 bp, Homo sapien
ttgcctgaattgagcagagctcctt

SEQ ID NO: 2128715 - DNA, 25 bp, Homo sapien
taggaagaaacttccggagtctgtg

SEQ ID NO: 2128716 - DNA, 25 bp, Homo sapien
cggtttccatgtgagtgtggatcca

SEQ ID NO: 2128717 - DNA, 25 bp, Homo sapien
ggtttccatgtgagtgtggatccac

SEQ ID NO: 2128718 - DNA, 25 bp, Homo sapien
gtttccatgtgagtgtggatccact

SEQ ID NO: 2128719 - DNA, 25 bp, Homo sapien
tttccatgtgagtgtggatccactg

SEQ ID NO: 2128720 - DNA, 25 bp, Homo sapien
gcatgcactgaccaacagccttccc

SEQ ID NO: 2128721 - DNA, 25 bp, Homo sapien
tgcactctcccacagacacccctag

SEQ ID NO: 2128722 - DNA, 25 bp, Homo sapien
cagcatgcactgaccaacagccttc

SEQ ID NO: 2128723 - DNA, 25 bp, Homo sapien
actctcccacagacacccctagctg

SEQ ID NO: 2128724 - DNA, 25 bp, Homo sapien
tttcttttgggcctatgtgtgtctc

SEQ ID NO: 2128725 - DNA, 25 bp, Homo sapien
atcttcctccatccctttcttttgg

SEQ ID NO: 2128726 - DNA, 25 bp, Homo sapien
agccttaaagatcaaaggcagataa

SEQ ID NO: 2128727 - DNA, 25 bp, Homo sapien
cagccttaaagatcaaaggcagata

SEQ ID NO: 2128728 - DNA, 25 bp, Homo sapien
taaagaattctcttctaacccaata

SEQ ID NO: 2128729 - DNA, 25 bp, Homo sapien
caaagtactccaaagatgcagaaga

SEQ ID NO: 2128730 - DNA, 25 bp, Homo sapien
cactaaagtgagcataggcactaca

SEQ ID NO: 2128731 - DNA, 25 bp, Homo sapien
agaagagagtagagcaccacaaggc

SEQ ID NO: 2128732 - DNA, 25 bp, Homo sapien
ttaaagagtactagcaaagtactcc

SEQ ID NO: 2128733 - DNA, 25 bp, Homo sapien
ctcagaagtaatcagtgttaacagc

SEQ ID NO: 2128734 - DNA, 25 bp, Homo sapien
aacagctctttgtgtagctttttgg

SEQ ID NO: 2128735 - DNA, 25 bp, Homo sapien
taacagctctttgtgtagctttttg

SEQ ID NO: 2128736 - DNA, 25 bp, Homo sapien
tcaactcctcagaagtaatcagtgt

SEQ ID NO: 2128737 - DNA, 25 bp, Homo sapien
ccctggctgctggttaaggccttca

SEQ ID NO: 2128738 - DNA, 25 bp, Homo sapien
gattagaaccctgatgccctgggca

SEQ ID NO: 2128739 - DNA, 25 bp, Homo sapien
gtcaacctgcctataagccacaatg

SEQ ID NO: 2128740 - DNA, 25 bp, Homo sapien
gaatctgtccaagaagtcaacctgc

SEQ ID NO: 2128741 - DNA, 25 bp, Homo sapien
aagtgccagtgacttcatagaatgc

SEQ ID NO: 2128742 - DNA, 25 bp, Homo sapien
cactgaagtgccagtgacttcatag

SEQ ID NO: 2128743 - DNA, 25 bp, Homo sapien
tgttaatccagtgctttcccactga

SEQ ID NO: 2128744 - DNA, 25 bp, Homo sapien
tgctttcccactgaagtgccagtga

SEQ ID NO: 2128745 - DNA, 25 bp, Homo sapien
gggtagcgctgatccaattcctggt

SEQ ID NO: 2128746 - DNA, 25 bp, Homo sapien
ccaattcctggtacctatattgtaa

SEQ ID NO: 2128747 - DNA, 25 bp, Homo sapien
cctggtacctatattgtaatgaaat

SEQ ID NO: 2128748 - DNA, 25 bp, Homo sapien
caaacacatttgacactgggtagcg

SEQ ID NO: 2128749 - DNA, 25 bp, Homo sapien
cctttagagtgataacaataccatt

SEQ ID NO: 2128750 - DNA, 25 bp, Homo sapien
tggagaaccaaagggttcattgatc

SEQ ID NO: 2128751 - DNA, 25 bp, Homo sapien
gctggagaaccaaagggttcattga

SEQ ID NO: 2128752 - DNA, 25 bp, Homo sapien
ttaaacctttagagtgataacaata

SEQ ID NO: 2128753 - DNA, 25 bp, Homo sapien
tggaaatctggactctaattgcttg

SEQ ID NO: 2128754 - DNA, 25 bp, Homo sapien
ctttggcctattggaaatctggact

SEQ ID NO: 2128755 - DNA, 25 bp, Homo sapien
gactctaattgcttgttttggtgta

SEQ ID NO: 2128756 - DNA, 25 bp, Homo sapien
taattgcttgttttggtgtagtcat

SEQ ID NO: 2128757 - DNA, 25 bp, Homo sapien
tttgtggcagaaacccactcatcca

SEQ ID NO: 2128758 - DNA, 25 bp, Homo sapien
ttgtggcagaaacccactcatccat

SEQ ID NO: 2128759 - DNA, 25 bp, Homo sapien
gtggcagaaacccactcatccatct

SEQ ID NO: 2128760 - DNA, 25 bp, Homo sapien
ggcagaaacccactcatccatctgt

SEQ ID NO: 2128761 - DNA, 25 bp, Homo sapien
cccaagaaagagtgtgctagatgag

SEQ ID NO: 2128762 - DNA, 25 bp, Homo sapien
ggttagcccagcctaaagtagcaga

SEQ ID NO: 2128763 - DNA, 25 bp, Homo sapien
gcaactcgccctttggaagtgcata

SEQ ID NO: 2128764 - DNA, 25 bp, Homo sapien
taaacatgtaaatgggcaactcgcc

SEQ ID NO: 2128765 - DNA, 25 bp, Homo sapien
tttcattcccatctctgattggcag

SEQ ID NO: 2128766 - DNA, 25 bp, Homo sapien
gctaagcttggcctgaatgtttctg

SEQ ID NO: 2128767 - DNA, 25 bp, Homo sapien
ccttcttggcaagagtgcaactttt

SEQ ID NO: 2128768 - DNA, 25 bp, Homo sapien
ggttctccctttaacttgcagagag

SEQ ID NO: 2128769 - DNA, 25 bp, Homo sapien
ccttcaatgagtgccatgctggtgg

SEQ ID NO: 2128770 - DNA, 25 bp, Homo sapien
tatttcctcaaagtctgcaagcaag

SEQ ID NO: 2128771 - DNA, 25 bp, Homo sapien
taaatatagacacatccagccccat

SEQ ID NO: 2128772 - DNA, 25 bp, Homo sapien
gagagcaagtcacagtccatttctg

SEQ ID NO: 2128773 - DNA, 25 bp, Homo sapien
agttgattttcacactcctccagaa

SEQ ID NO: 2128774 - DNA, 25 bp, Homo sapien
ttcacactcctccagaaatctgtct

SEQ ID NO: 2128775 - DNA, 25 bp, Homo sapien
ttaatattaaggagagttgattttc

SEQ ID NO: 2128776 - DNA, 25 bp, Homo sapien
taatattaaggagagttgattttca

SEQ ID NO: 2128777 - DNA, 25 bp, Homo sapien
tgtaaagtagaatcatcccctagct

SEQ ID NO: 2128778 - DNA, 25 bp, Homo sapien
taggagtagcaaccgcatttagaat

SEQ ID NO: 2128779 - DNA, 25 bp, Homo sapien
gaaagatgactggaacaacaggtgg

SEQ ID NO: 2128780 - DNA, 25 bp, Homo sapien
gatgtcctaggcctacccaatatag

SEQ ID NO: 2128781 - DNA, 25 bp, Homo sapien
ttatctaagactggaataaccaatg

SEQ ID NO: 2128782 - DNA, 25 bp, Homo sapien
agttagagatttcctccaatgggtg

SEQ ID NO: 2128783 - DNA, 25 bp, Homo sapien
ttcctggaggcactgtagttagaga

SEQ ID NO: 2128784 - DNA, 25 bp, Homo sapien
cattagttcgaaccaaatcctggca

SEQ ID NO: 2128785 - DNA, 25 bp, Homo sapien
tggctgcaggggttcaccactctga

SEQ ID NO: 2128786 - DNA, 25 bp, Homo sapien
cactatggaccggtaggaaatattt

SEQ ID NO: 2128787 - DNA, 25 bp, Homo sapien
tctgacactatggaccggtaggaaa

SEQ ID NO: 2128788 - DNA, 25 bp, Homo sapien
gggttcaccactctgacactatgga

SEQ ID NO: 2128789 - DNA, 25 bp, Homo sapien
tgaaataccgccactgaggactagg

SEQ ID NO: 2128790 - DNA, 25 bp, Homo sapien
gtgtcaccaaaaggccagtggcggt

SEQ ID NO: 2128791 - DNA, 25 bp, Homo sapien
cagagatcttgcagagggtgtcacc

SEQ ID NO: 2128792 - DNA, 25 bp, Homo sapien
tagtaatagcttgggagcgcaccag

SEQ ID NO: 2128793 - DNA, 25 bp, Homo sapien
ggattctagcattaattcaccacca

SEQ ID NO: 2128794 - DNA, 25 bp, Homo sapien
ctaaaaggtggattctagcattaat

SEQ ID NO: 2128795 - DNA, 25 bp, Homo sapien
tctagcattaattcaccaccattat

SEQ ID NO: 2128796 - DNA, 25 bp, Homo sapien
ggtggattctagcattaattcacca

SEQ ID NO: 2128797 - DNA, 25 bp, Homo sapien
gccacctggataatgcgatacaatg

SEQ ID NO: 2128798 - DNA, 25 bp, Homo sapien
tcctgacctgggcacaaatgcagcc

SEQ ID NO: 2128799 - DNA, 25 bp, Homo sapien
cagctcctggctatattaggctcca

SEQ ID NO: 2128800 - DNA, 25 bp, Homo sapien
caatgaaattccaaccaagcagaag

SEQ ID NO: 2128801 - DNA, 25 bp, Homo sapien
gcataattacttttaggactttcat

SEQ ID NO: 2128802 - DNA, 25 bp, Homo sapien
tgtttaaccactttctggcacaagt

SEQ ID NO: 2128803 - DNA, 25 bp, Homo sapien
gttcctaacccagacacagatttta

SEQ ID NO: 2128804 - DNA, 25 bp, Homo sapien
tcttaccatataatctaacaactga

SEQ ID NO: 2128805 - DNA, 25 bp, Homo sapien
tcgatgtaacatagtcacttttata

SEQ ID NO: 2128806 - DNA, 25 bp, Homo sapien
acattgttaatgtgacaagttttat

SEQ ID NO: 2128807 - DNA, 25 bp, Homo sapien
tttcctttcgatgtaacatagtcac

SEQ ID NO: 2128808 - DNA, 25 bp, Homo sapien
attgcttttcctttcgatgtaacat

SEQ ID NO: 2128809 - DNA, 25 bp, Homo sapien
cagccaatttgtttctcaggaactt

SEQ ID NO: 2128810 - DNA, 25 bp, Homo sapien
caaactgccttgaactgggtctagt

SEQ ID NO: 2128811 - DNA, 25 bp, Homo sapien
caagaagttccaggttcccagttgg

SEQ ID NO: 2128812 - DNA, 25 bp, Homo sapien
tgctaccaccaacatgaggaggaaa

SEQ ID NO: 2128813 - DNA, 25 bp, Homo sapien
ataaaatttgccagtttgtcttgcc

SEQ ID NO: 2128814 - DNA, 25 bp, Homo sapien
aatttgccagtttgtcttgccatcc

SEQ ID NO: 2128815 - DNA, 25 bp, Homo sapien
ctgcaggtacataaaatttgccagt

SEQ ID NO: 2128816 - DNA, 25 bp, Homo sapien
taaaatttgccagtttgtcttgcca

SEQ ID NO: 2128817 - DNA, 25 bp, Homo sapien
ccgttgaagatgtgtcgaaggcaaa

SEQ ID NO: 2128818 - DNA, 25 bp, Homo sapien
tccgttgaagatgtgtcgaaggcaa

SEQ ID NO: 2128819 - DNA, 25 bp, Homo sapien
gttgaagatgtgtcgaaggcaaaga

SEQ ID NO: 2128820 - DNA, 25 bp, Homo sapien
tgaagatgtgtcgaaggcaaagaag

SEQ ID NO: 2128821 - DNA, 25 bp, Homo sapien
caagtagtcaaagtgttatctgtca

SEQ ID NO: 2128822 - DNA, 25 bp, Homo sapien
tctgtcaaagcaatttgcttctcat

SEQ ID NO: 2128823 - DNA, 25 bp, Homo sapien
ttgattttgccataagcacgcttgt

SEQ ID NO: 2128824 - DNA, 25 bp, Homo sapien
caaagcaatttgcttctcattgatt

SEQ ID NO: 2128825 - DNA, 25 bp, Homo sapien
gactggtagctgagactgaccaatc

SEQ ID NO: 2128826 - DNA, 25 bp, Homo sapien
tggtagctgagactgaccaatcttc

SEQ ID NO: 2128827 - DNA, 25 bp, Homo sapien
gagactgaccaatcttcagcttcat

SEQ ID NO: 2128828 - DNA, 25 bp, Homo sapien
tagctgagactgaccaatcttcagc

SEQ ID NO: 2128829 - DNA, 25 bp, Homo sapien
aaacccctgctaacttgggccacag

SEQ ID NO: 2128830 - DNA, 25 bp, Homo sapien
actgttccaaattctcttgttgagc

SEQ ID NO: 2128831 - DNA, 25 bp, Homo sapien
cacaggcttgcccacaacctttgac

SEQ ID NO: 2128832 - DNA, 25 bp, Homo sapien
tctacagacacttgtaactgttcca

SEQ ID NO: 2128833 - DNA, 25 bp, Homo sapien
gtggacataacaggataacttggcc

SEQ ID NO: 2128834 - DNA, 25 bp, Homo sapien
tatcagagtctagaaaatccacaag

SEQ ID NO: 2128835 - DNA, 25 bp, Homo sapien
taacatctctggtaacacagccgga

SEQ ID NO: 2128836 - DNA, 25 bp, Homo sapien
tcaacatgagtagcattaacaaggt

SEQ ID NO: 2128837 - DNA, 25 bp, Homo sapien
tttggaggacatgtcaaaagttaac

SEQ ID NO: 2128838 - DNA, 25 bp, Homo sapien
tgaccaattcctggaggaatacttt

SEQ ID NO: 2128839 - DNA, 25 bp, Homo sapien
tgctgctcaaatgttactggagtgc

SEQ ID NO: 2128840 - DNA, 25 bp, Homo sapien
gacattcatgctgagtcttgccttg

SEQ ID NO: 2128841 - DNA, 25 bp, Homo sapien
tctcagtcttgagaatgatcagtac

SEQ ID NO: 2128842 - DNA, 25 bp, Homo sapien
gatcagtactaatccgtggacattc

SEQ ID NO: 2128843 - DNA, 25 bp, Homo sapien
tcacctccagaactcatggtggcct

SEQ ID NO: 2128844 - DNA, 25 bp, Homo sapien
ggtggcctccattaattatgattat

SEQ ID NO: 2128845 - DNA, 25 bp, Homo sapien
ccagaactcatggtggcctccatta

SEQ ID NO: 2128846 - DNA, 25 bp, Homo sapien
cctccagaactcatggtggcctcca

SEQ ID NO: 2128847 - DNA, 25 bp, Homo sapien
gttttgtgctcgaaactagaaacaa

SEQ ID NO: 2128848 - DNA, 25 bp, Homo sapien
cttaatttggcccatagttgtaaga

SEQ ID NO: 2128849 - DNA, 25 bp, Homo sapien
actacctccaatggacaaggcagag

SEQ ID NO: 2128850 - DNA, 25 bp, Homo sapien
catagttgtaagaggtactacctcc

SEQ ID NO: 2128851 - DNA, 25 bp, Homo sapien
cttctgaagtctcatttgcttccat

SEQ ID NO: 2128852 - DNA, 25 bp, Homo sapien
gtcttgcacgcaagcagcttcttct

SEQ ID NO: 2128853 - DNA, 25 bp, Homo sapien
ccttgacaaccgacatatctagatt

SEQ ID NO: 2128854 - DNA, 25 bp, Homo sapien
caaccgacatatctagattttcact

SEQ ID NO: 2128855 - DNA, 25 bp, Homo sapien
tatctccttccttgacaaccgacat

SEQ ID NO: 2128856 - DNA, 25 bp, Homo sapien
cttccttgacaaccgacatatctag

SEQ ID NO: 2128857 - DNA, 25 bp, Homo sapien
tagctgggataagcactcttgtttc

SEQ ID NO: 2128858 - DNA, 25 bp, Homo sapien
gaaagctttactctggcggcatgga

SEQ ID NO: 2128859 - DNA, 25 bp, Homo sapien
tctttgcagggagtaaagggtagaa

SEQ ID NO: 2128860 - DNA, 25 bp, Homo sapien
gagtttatctggtgtctcaccacag

SEQ ID NO: 2128861 - DNA, 25 bp, Homo sapien
tcactcatgggctttgctatccagt

SEQ ID NO: 2128862 - DNA, 25 bp, Homo sapien
gatcaaggaaccactctgaccagac

SEQ ID NO: 2128863 - DNA, 25 bp, Homo sapien
gaacttcggtcaaaattagctttca

SEQ ID NO: 2128864 - DNA, 25 bp, Homo sapien
cagtaaggctgaacttcggtcaaaa

SEQ ID NO: 2128865 - DNA, 25 bp, Homo sapien
tgtggtctaaaagttgaagctgtca

SEQ ID NO: 2128866 - DNA, 25 bp, Homo sapien
ctgtggtctaaaagttgaagctgtc

SEQ ID NO: 2128867 - DNA, 25 bp, Homo sapien
gtctaaaagttgaagctgtcatgat

SEQ ID NO: 2128868 - DNA, 25 bp, Homo sapien
tggtctaaaagttgaagctgtcatg

SEQ ID NO: 2128869 - DNA, 25 bp, Homo sapien
tagatatcatttttgcagctgtggc

SEQ ID NO: 2128870 - DNA, 25 bp, Homo sapien
tcaattgtcggttctctggcctgaa

SEQ ID NO: 2128871 - DNA, 25 bp, Homo sapien
ctttcaatcatttaggaaggcggcc

SEQ ID NO: 2128872 - DNA, 25 bp, Homo sapien
gccgcttacaaccagaaccaaagag

SEQ ID NO: 2128873 - DNA, 25 bp, Homo sapien
aagggtatgttggtgagtgccaaat

SEQ ID NO: 2128874 - DNA, 25 bp, Homo sapien
tatgttggtgagtgccaaatcctga

SEQ ID NO: 2128875 - DNA, 25 bp, Homo sapien
ggtacatgcttcctattccaaaggt

SEQ ID NO: 2128876 - DNA, 25 bp, Homo sapien
tattccaaaggtcaggaccattaaa

SEQ ID NO: 2128877 - DNA, 25 bp, Homo sapien
caccatctttatttttctctccacc

SEQ ID NO: 2128878 - DNA, 25 bp, Homo sapien
catctttatttttctctccaccccg

SEQ ID NO: 2128879 - DNA, 25 bp, Homo sapien
atcaccatctttatttttctctcca

SEQ ID NO: 2128880 - DNA, 25 bp, Homo sapien
tcagaaaagcaatacctgtagagac

SEQ ID NO: 2128881 - DNA, 25 bp, Homo sapien
ctcagaaaagcaatacctgtagaga

SEQ ID NO: 2128882 - DNA, 25 bp, Homo sapien
cttgaatgtttcagtgtatttgtca

SEQ ID NO: 2128883 - DNA, 25 bp, Homo sapien
cagtgtatttgtcaaggttagccat

SEQ ID NO: 2128884 - DNA, 25 bp, Homo sapien
ttcagtgtatttgtcaaggttagcc

SEQ ID NO: 2128885 - DNA, 25 bp, Homo sapien
gtttcagtgtatttgtcaaggttag

SEQ ID NO: 2128886 - DNA, 25 bp, Homo sapien
gataatacatgagcaaggtcagcca

SEQ ID NO: 2128887 - DNA, 25 bp, Homo sapien
tcggacaacgggacaactgctaatg

SEQ ID NO: 2128888 - DNA, 25 bp, Homo sapien
cactctccttgctcatgaggcggga

SEQ ID NO: 2128889 - DNA, 25 bp, Homo sapien
catggcgggatagttggtcacgaaa

SEQ ID NO: 2128890 - DNA, 25 bp, Homo sapien
cacacccctgttgactgtgaatatt

SEQ ID NO: 2128891 - DNA, 25 bp, Homo sapien
caaaggcgtaattaaagagatatct

SEQ ID NO: 2128892 - DNA, 25 bp, Homo sapien
ttaaagaggaatcaggtaaatctat

SEQ ID NO: 2128893 - DNA, 25 bp, Homo sapien
tggttgacaattctggcctttggaa

SEQ ID NO: 2128894 - DNA, 25 bp, Homo sapien
tatactggaccaattttggctaacc

SEQ ID NO: 2128895 - DNA, 25 bp, Homo sapien
agtacctaacaaagtgacaaccaag

SEQ ID NO: 2128896 - DNA, 25 bp, Homo sapien
tggctaaccactgttgatcctgagg

SEQ ID NO: 2128897 - DNA, 25 bp, Homo sapien
tgtatcggcaacttccacaggttta

SEQ ID NO: 2128898 - DNA, 25 bp, Homo sapien
tctgaaaaccctcgtaaggaagtgc

SEQ ID NO: 2128899 - DNA, 25 bp, Homo sapien
taaatgtcaacctgataagctgagg

SEQ ID NO: 2128900 - DNA, 25 bp, Homo sapien
tccaaagtcatctcctcagagtagg

SEQ ID NO: 2128901 - DNA, 25 bp, Homo sapien
catagcagggtgtgtagttccaaat

SEQ ID NO: 2128902 - DNA, 25 bp, Homo sapien
tagctgtatattctcgaacaagtta

SEQ ID NO: 2128903 - DNA, 25 bp, Homo sapien
atctggaaagtggggttaattattg

SEQ ID NO: 2128904 - DNA, 25 bp, Homo sapien
tgtatattctcgaacaagttactta

SEQ ID NO: 2128905 - DNA, 25 bp, Homo sapien
gctgtatattctcgaacaagttact

SEQ ID NO: 2128906 - DNA, 25 bp, Homo sapien
tctaaaggtcatttgttctggaacg

SEQ ID NO: 2128907 - DNA, 25 bp, Homo sapien
taataactaggaagggacggccaga

SEQ ID NO: 2128908 - DNA, 25 bp, Homo sapien
ttctggaacgtgatggtagaatcca

SEQ ID NO: 2128909 - DNA, 25 bp, Homo sapien
aattcacccctcacagattgacaca

SEQ ID NO: 2128910 - DNA, 25 bp, Homo sapien
tgtgtcatgctcatgtagtctgcag

SEQ ID NO: 2128911 - DNA, 25 bp, Homo sapien
tgagtaagtctcactgatatcttgg

SEQ ID NO: 2128912 - DNA, 25 bp, Homo sapien
tacaaaatacactgacttgctcctg

SEQ ID NO: 2128913 - DNA, 25 bp, Homo sapien
acagagagtgccatcctgtgtcatg

SEQ ID NO: 2128914 - DNA, 25 bp, Homo sapien
cagctcttctgaagattcccagaac

SEQ ID NO: 2128915 - DNA, 25 bp, Homo sapien
acctcagctcttctgaagattccca

SEQ ID NO: 2128916 - DNA, 25 bp, Homo sapien
gtccaagaagtattgctgacctcag

SEQ ID NO: 2128917 - DNA, 25 bp, Homo sapien
ggaaggtcagtccaagaagtattgc

SEQ ID NO: 2128918 - DNA, 25 bp, Homo sapien
tctcagtaacttgcttggtgggtgg

SEQ ID NO: 2128919 - DNA, 25 bp, Homo sapien
gaaaactccaactcgagcattcaag

SEQ ID NO: 2128920 - DNA, 25 bp, Homo sapien
gcattcaagtcagcgaggagatctt

SEQ ID NO: 2128921 - DNA, 25 bp, Homo sapien
tcttcacaatcatgccaaaactgag

SEQ ID NO: 2128922 - DNA, 25 bp, Homo sapien
ggaataaaaagtatccagccaggca

SEQ ID NO: 2128923 - DNA, 25 bp, Homo sapien
aaaaaatgcgttagaggctctcaac

SEQ ID NO: 2128924 - DNA, 25 bp, Homo sapien
caagaggcatacctgggcttaaggt

SEQ ID NO: 2128925 - DNA, 25 bp, Homo sapien
ccctaacaagatagaaaggtgtgca

SEQ ID NO: 2128926 - DNA, 25 bp, Homo sapien
ttgttagtgccggagatgaaagact

SEQ ID NO: 2128927 - DNA, 25 bp, Homo sapien
agaaaggatgtaaggcccacgttgt

SEQ ID NO: 2128928 - DNA, 25 bp, Homo sapien
aaggcccacgttgttagtgccggag

SEQ ID NO: 2128929 - DNA, 25 bp, Homo sapien
cccacgttgttagtgccggagatga

SEQ ID NO: 2128930 - DNA, 25 bp, Homo sapien
tcaggtagaagcacactaggtcaag

SEQ ID NO: 2128931 - DNA, 25 bp, Homo sapien
tgaaggctgatgcatgtcaggaagc

SEQ ID NO: 2128932 - DNA, 25 bp, Homo sapien
cagtgttggctagaagaccaggtat

SEQ ID NO: 2128933 - DNA, 25 bp, Homo sapien
tatagagggagtactgaaatggcat

SEQ ID NO: 2128934 - DNA, 25 bp, Homo sapien
cttccagtatatgacacttgaggag

SEQ ID NO: 2128935 - DNA, 25 bp, Homo sapien
cagtatatgacacttgaggagaaag

SEQ ID NO: 2128936 - DNA, 25 bp, Homo sapien
tccagtatatgacacttgaggagaa

SEQ ID NO: 2128937 - DNA, 25 bp, Homo sapien
gtatatgacacttgaggagaaagaa

SEQ ID NO: 2128938 - DNA, 25 bp, Homo sapien
tcagctacagttaccatgccaaggg

SEQ ID NO: 2128939 - DNA, 25 bp, Homo sapien
tggtaaacaagcagtctccatgatg

SEQ ID NO: 2128940 - DNA, 25 bp, Homo sapien
gaagaaccaagctgccatgatctga

SEQ ID NO: 2128941 - DNA, 25 bp, Homo sapien
tcagatttgcaagacacagggaaat

SEQ ID NO: 2128942 - DNA, 25 bp, Homo sapien
aaacctaatatataccttcagatca

SEQ ID NO: 2128943 - DNA, 25 bp, Homo sapien
tccacttgaggatttacatgctggg

SEQ ID NO: 2128944 - DNA, 25 bp, Homo sapien
acctaatatataccttcagatcagc

SEQ ID NO: 2128945 - DNA, 25 bp, Homo sapien
ataaaacctaatatataccttcaga

SEQ ID NO: 2128946 - DNA, 25 bp, Homo sapien
tttctttacttttgcaagtcttcat

SEQ ID NO: 2128947 - DNA, 25 bp, Homo sapien
cagctgagaacttctccctttcttt

SEQ ID NO: 2128948 - DNA, 25 bp, Homo sapien
ctttctttacttttgcaagtcttca

SEQ ID NO: 2128949 - DNA, 25 bp, Homo sapien
ttctcccacagctgagaacttctcc

SEQ ID NO: 2128950 - DNA, 25 bp, Homo sapien
aaattccagcgttgatgcatcaccc

SEQ ID NO: 2128951 - DNA, 25 bp, Homo sapien
gttgcaaaattccagcgttgatgca

SEQ ID NO: 2128952 - DNA, 25 bp, Homo sapien
cctcagcaaatttggccccagtgtt

SEQ ID NO: 2128953 - DNA, 25 bp, Homo sapien
ttggccccagtgttgcaaaattcca

SEQ ID NO: 2128954 - DNA, 25 bp, Homo sapien
gctctgacagaatagaagttccact

SEQ ID NO: 2128955 - DNA, 25 bp, Homo sapien
tcagtgggctatgcaggtatagtag

SEQ ID NO: 2128956 - DNA, 25 bp, Homo sapien
tagtagggttgaccagtgatccaaa

SEQ ID NO: 2128957 - DNA, 25 bp, Homo sapien
ttagtataatcagctgctctgacag

SEQ ID NO: 2128958 - DNA, 25 bp, Homo sapien
gacctccaaaaggtcgagatcatta

SEQ ID NO: 2128959 - DNA, 25 bp, Homo sapien
tacctcctgaagtacctgcgtgaag

SEQ ID NO: 2128960 - DNA, 25 bp, Homo sapien
aatatatgctaaaataaagacagta

SEQ ID NO: 2128961 - DNA, 25 bp, Homo sapien
aataaagacagtatatacatcctaa

SEQ ID NO: 2128962 - DNA, 25 bp, Homo sapien
tctttctccttttgtggaacacaca

SEQ ID NO: 2128963 - DNA, 25 bp, Homo sapien
gtctttctccttttgtggaacacac

SEQ ID NO: 2128964 - DNA, 25 bp, Homo sapien
ctttctccttttgtggaacacacat

SEQ ID NO: 2128965 - DNA, 25 bp, Homo sapien
tcctcctgattgcttccaccaaata

SEQ ID NO: 2128966 - DNA, 25 bp, Homo sapien
gcttccaccaaataagctttggatg

SEQ ID NO: 2128967 - DNA, 25 bp, Homo sapien
ttttcctcctgattgcttccaccaa

SEQ ID NO: 2128968 - DNA, 25 bp, Homo sapien
ccaaataagctttggatgcaggcat

SEQ ID NO: 2128969 - DNA, 25 bp, Homo sapien
aaggaaggaatgaatacaggagaga

SEQ ID NO: 2128970 - DNA, 25 bp, Homo sapien
aggaaggaatgaatacaggagagaa

SEQ ID NO: 2128971 - DNA, 25 bp, Homo sapien
aaggaatgaatacaggagagaagga

SEQ ID NO: 2128972 - DNA, 25 bp, Homo sapien
ggaaggaaggaatgaatacaggaga

SEQ ID NO: 2128973 - DNA, 25 bp, Homo sapien
ccataaccatgcttagacttgacaa

SEQ ID NO: 2128974 - DNA, 25 bp, Homo sapien
tagacttgacaagttgtacagttcc

SEQ ID NO: 2128975 - DNA, 25 bp, Homo sapien
caacgaaatgacatttaaggatggt

SEQ ID NO: 2128976 - DNA, 25 bp, Homo sapien
catttaaggatggtccaagttcatt

SEQ ID NO: 2128977 - DNA, 25 bp, Homo sapien
tcatacaattatttttgtttgttca

SEQ ID NO: 2128978 - DNA, 25 bp, Homo sapien
catacaattatttttgtttgttcaa

SEQ ID NO: 2128979 - DNA, 25 bp, Homo sapien
gaaatgaacacagcactggacaagg

SEQ ID NO: 2128980 - DNA, 25 bp, Homo sapien
gtaaagcccaacaactcaaggtctg

SEQ ID NO: 2128981 - DNA, 25 bp, Homo sapien
tgggagaaacctgaagtgtgcctgt

SEQ ID NO: 2128982 - DNA, 25 bp, Homo sapien
tctgaaagtgacaagggctgaatct

SEQ ID NO: 2128983 - DNA, 25 bp, Homo sapien
tgccagatcataagggttagcaaag

SEQ ID NO: 2128984 - DNA, 25 bp, Homo sapien
gccagatcataagggttagcaaagg

SEQ ID NO: 2128985 - DNA, 25 bp, Homo sapien
cacagcatgtacctcgatgtctctg

SEQ ID NO: 2128986 - DNA, 25 bp, Homo sapien
tcaagtgccctaggcttccaccatg

SEQ ID NO: 2128987 - DNA, 25 bp, Homo sapien
ttcaagtgtccacactgcaatggcc

SEQ ID NO: 2128988 - DNA, 25 bp, Homo sapien
tctagcctgatttattattgcaccc

SEQ ID NO: 2128989 - DNA, 25 bp, Homo sapien
caaaaacgaattgttggcctctcag

SEQ ID NO: 2128990 - DNA, 25 bp, Homo sapien
caacaacaaaaatacggaagcctct

SEQ ID NO: 2128991 - DNA, 25 bp, Homo sapien
taattactctaaaaagcgcacatgg

SEQ ID NO: 2128992 - DNA, 25 bp, Homo sapien
gaagcctctaagcagacattagggt

SEQ ID NO: 2128993 - DNA, 25 bp, Homo sapien
gagaaactatctttgcctaatggtg

SEQ ID NO: 2128994 - DNA, 25 bp, Homo sapien
ctctctagagaaactatctttgcct

SEQ ID NO: 2128995 - DNA, 25 bp, Homo sapien
ctagagaaactatctttgcctaatg

SEQ ID NO: 2128996 - DNA, 25 bp, Homo sapien
tctctagagaaactatctttgccta

SEQ ID NO: 2128997 - DNA, 25 bp, Homo sapien
tggtcatcataacaacggactgggc

SEQ ID NO: 2128998 - DNA, 25 bp, Homo sapien
tgcagtgataaaaccgtcttccagg

SEQ ID NO: 2128999 - DNA, 25 bp, Homo sapien
caatcagaagcggagttacaaaccc

SEQ ID NO: 2129000 - DNA, 25 bp, Homo sapien
aatatattccctatgagacctggca

SEQ ID NO: 2129001 - DNA, 25 bp, Homo sapien
ttcggaactcattagtggaaaagta

SEQ ID NO: 2129002 - DNA, 25 bp, Homo sapien
aatcttgtcttgaaagccgtcttcg

SEQ ID NO: 2129003 - DNA, 25 bp, Homo sapien
ggatgctgtcatgcaaatcttgtct

SEQ ID NO: 2129004 - DNA, 25 bp, Homo sapien
catggagttggatgctgtcatgcaa

SEQ ID NO: 2129005 - DNA, 25 bp, Homo sapien
tggtggaagctgtatggttactcac

SEQ ID NO: 2129006 - DNA, 25 bp, Homo sapien
tccccatagcagtaagatagagcag

SEQ ID NO: 2129007 - DNA, 25 bp, Homo sapien
taaatgtttatggtgactccaagct

SEQ ID NO: 2129008 - DNA, 25 bp, Homo sapien
caataatcgtggatcgtaatgctcc

SEQ ID NO: 2129009 - DNA, 25 bp, Homo sapien
tccctgtggcttgggtattgcagat

SEQ ID NO: 2129010 - DNA, 25 bp, Homo sapien
tgaatgaattgatcaggttgctgcc

SEQ ID NO: 2129011 - DNA, 25 bp, Homo sapien
gacaagacacagttatagatgccct

SEQ ID NO: 2129012 - DNA, 25 bp, Homo sapien
aatacaaacgtagatgggcaggcct

SEQ ID NO: 2129013 - DNA, 25 bp, Homo sapien
aaagggtgtcctcagctaagcagca

SEQ ID NO: 2129014 - DNA, 25 bp, Homo sapien
tatggtaaccaaagtaggtgtttgc

SEQ ID NO: 2129015 - DNA, 25 bp, Homo sapien
tagccctccattgaaagtcaccact

SEQ ID NO: 2129016 - DNA, 25 bp, Homo sapien
gcttcagtatgtattagccctccat

SEQ ID NO: 2129017 - DNA, 25 bp, Homo sapien
gcttactgtatgcaatatgaaaggc

SEQ ID NO: 2129018 - DNA, 25 bp, Homo sapien
ggcttctctttgtggaattaccagc

SEQ ID NO: 2129019 - DNA, 25 bp, Homo sapien
cccagagagtgataaatgagaagtc

SEQ ID NO: 2129020 - DNA, 25 bp, Homo sapien
gaattggctgcttaactgagtgaca

SEQ ID NO: 2129021 - DNA, 25 bp, Homo sapien
taagttgcgcaagagttccacagat

SEQ ID NO: 2129022 - DNA, 25 bp, Homo sapien
aatatggtggtaaagacagtgaagt

SEQ ID NO: 2129023 - DNA, 25 bp, Homo sapien
caccactccatcaaaatatggtggt

SEQ ID NO: 2129024 - DNA, 25 bp, Homo sapien
cagtgaagttgtttctggacggact

SEQ ID NO: 2129025 - DNA, 25 bp, Homo sapien
ttctggacggactttaggagggcac

SEQ ID NO: 2129026 - DNA, 25 bp, Homo sapien
catttctgcagcagaagaaacactt

SEQ ID NO: 2129027 - DNA, 25 bp, Homo sapien
tacatttctgcagcagaagaaacac

SEQ ID NO: 2129028 - DNA, 25 bp, Homo sapien
ttacatttctgcagcagaagaaaca

SEQ ID NO: 2129029 - DNA, 25 bp, Homo sapien
tttctgcagcagaagaaacacttac

SEQ ID NO: 2129030 - DNA, 25 bp, Homo sapien
tgatgccatctaccccacaatggtc

SEQ ID NO: 2129031 - DNA, 25 bp, Homo sapien
tgggactcaaaccactagatacagt

SEQ ID NO: 2129032 - DNA, 25 bp, Homo sapien
catgaggctctacaatcaataggtg

SEQ ID NO: 2129033 - DNA, 25 bp, Homo sapien
gaagcctacctcgtattctgttgta

SEQ ID NO: 2129034 - DNA, 25 bp, Homo sapien
gaggtgctgcctcagagtcagtgac

SEQ ID NO: 2129035 - DNA, 25 bp, Homo sapien
ttggtgacatcatctacgtctggac

SEQ ID NO: 2129036 - DNA, 25 bp, Homo sapien
caggattagttcctgctggtttatt

SEQ ID NO: 2129037 - DNA, 25 bp, Homo sapien
ctgtttctgcaggattagttcctgc

SEQ ID NO: 2129038 - DNA, 25 bp, Homo sapien
gacatcatctacgtctggacattga

SEQ ID NO: 2129039 - DNA, 25 bp, Homo sapien
atctgaccagtaccaaatccttggg

SEQ ID NO: 2129040 - DNA, 25 bp, Homo sapien
tctaacttcccatgcaaactgccag

SEQ ID NO: 2129041 - DNA, 25 bp, Homo sapien
aatccttgggcagcattatatgaca

SEQ ID NO: 2129042 - DNA, 25 bp, Homo sapien
cattgaatgacaagtcttctgtggc

SEQ ID NO: 2129043 - DNA, 25 bp, Homo sapien
taatttcataggtggctgcaagagc

SEQ ID NO: 2129044 - DNA, 25 bp, Homo sapien
tggctgcaagagctctaagggaaag

SEQ ID NO: 2129045 - DNA, 25 bp, Homo sapien
tacatgtcctaagagtcaagaattt

SEQ ID NO: 2129046 - DNA, 25 bp, Homo sapien
tagggcttgggtcctcctttacatg

SEQ ID NO: 2129047 - DNA, 25 bp, Homo sapien
gacctgtagtgggtcaggataggac

SEQ ID NO: 2129048 - DNA, 25 bp, Homo sapien
acctgtagtgggtcaggataggaca

SEQ ID NO: 2129049 - DNA, 25 bp, Homo sapien
agacctgtagtgggtcaggatagga

SEQ ID NO: 2129050 - DNA, 25 bp, Homo sapien
tgtagagccctgaaaccttgaatga

SEQ ID NO: 2129051 - DNA, 25 bp, Homo sapien
aattgaattacaggagcgatttccc

SEQ ID NO: 2129052 - DNA, 25 bp, Homo sapien
catttgcatgcagctctagcacaga

SEQ ID NO: 2129053 - DNA, 25 bp, Homo sapien
tacaagagtcttggcctgacaatcc

SEQ ID NO: 2129054 - DNA, 25 bp, Homo sapien
cctgggggaactcactgctctaaaa

SEQ ID NO: 2129055 - DNA, 25 bp, Homo sapien
gtcctgggggaactcactgctctaa

SEQ ID NO: 2129056 - DNA, 25 bp, Homo sapien
acaccatctctggacccactcaggt

SEQ ID NO: 2129057 - DNA, 25 bp, Homo sapien
tctctggacccactcaggtcctggg

SEQ ID NO: 2129058 - DNA, 25 bp, Homo sapien
atactttgggaaggtttctcatcaa

SEQ ID NO: 2129059 - DNA, 25 bp, Homo sapien
taatgagtaaggtaaattcactgcc

SEQ ID NO: 2129060 - DNA, 25 bp, Homo sapien
tgtgctcactaataatgtcttgcca

SEQ ID NO: 2129061 - DNA, 25 bp, Homo sapien
gtcttgccatttgctataggcttac

SEQ ID NO: 2129062 - DNA, 25 bp, Homo sapien
caggcttgtaagatttccaccgaga

SEQ ID NO: 2129063 - DNA, 25 bp, Homo sapien
gatgatacaagtagtttgcacagca

SEQ ID NO: 2129064 - DNA, 25 bp, Homo sapien
taagtgtgtccagttagtcttgagt

SEQ ID NO: 2129065 - DNA, 25 bp, Homo sapien
ttatatatgtcacggcactctccag

SEQ ID NO: 2129066 - DNA, 25 bp, Homo sapien
tgtttaccttactgtaagcacactg

SEQ ID NO: 2129067 - DNA, 25 bp, Homo sapien
tggcatgaagctctgtacacttcct

SEQ ID NO: 2129068 - DNA, 25 bp, Homo sapien
gaactagtgcacaaacctaatatgt

SEQ ID NO: 2129069 - DNA, 25 bp, Homo sapien
taccatgtttaccttactgtaagca

SEQ ID NO: 2129070 - DNA, 25 bp, Homo sapien
gaatagtttagttctgagtgctcag

SEQ ID NO: 2129071 - DNA, 25 bp, Homo sapien
taagcagattttactggctgcaggc

SEQ ID NO: 2129072 - DNA, 25 bp, Homo sapien
gagtgctcagggctataagcagatt

SEQ ID NO: 2129073 - DNA, 25 bp, Homo sapien
aatacagactaggagggccaccttc

SEQ ID NO: 2129074 - DNA, 25 bp, Homo sapien
attcttgttcaaatgtggttaagct

SEQ ID NO: 2129075 - DNA, 25 bp, Homo sapien
cttgttcaaatgtggttaagctggg

SEQ ID NO: 2129076 - DNA, 25 bp, Homo sapien
ccaaagcctgcattcttgttcaaat

SEQ ID NO: 2129077 - DNA, 25 bp, Homo sapien
gccaaagcctgcattcttgttcaaa

SEQ ID NO: 2129078 - DNA, 25 bp, Homo sapien
gagttattcgccttccaaatgaaag

SEQ ID NO: 2129079 - DNA, 25 bp, Homo sapien
tcaacaagagttattcgccttccaa

SEQ ID NO: 2129080 - DNA, 25 bp, Homo sapien
cttacttgttccaaaagcgtcacct

SEQ ID NO: 2129081 - DNA, 25 bp, Homo sapien
aaaagcgtcacctctgcctaagtca

SEQ ID NO: 2129082 - DNA, 25 bp, Homo sapien
cgcctctgtcaagctggtgctaacc

SEQ ID NO: 2129083 - DNA, 25 bp, Homo sapien
gagcgcctctgtcaagctggtgcta

SEQ ID NO: 2129084 - DNA, 25 bp, Homo sapien
tttaggagcgcctctgtcaagctgg

SEQ ID NO: 2129085 - DNA, 25 bp, Homo sapien
cacaggctttaggagcgcctctgtc

SEQ ID NO: 2129086 - DNA, 25 bp, Homo sapien
cttctttggaataattctcaaattt

SEQ ID NO: 2129087 - DNA, 25 bp, Homo sapien
ataattctcaaatttcaaaatggaa

SEQ ID NO: 2129088 - DNA, 25 bp, Homo sapien
ggaataattctcaaatttcaaaatg

SEQ ID NO: 2129089 - DNA, 25 bp, Homo sapien
ttctttggaataattctcaaatttc

SEQ ID NO: 2129090 - DNA, 25 bp, Homo sapien
ttatcgcatttcaactttcaatgtt

SEQ ID NO: 2129091 - DNA, 25 bp, Homo sapien
tatcgcatttcaactttcaatgtta

SEQ ID NO: 2129092 - DNA, 25 bp, Homo sapien
atcgcatttcaactttcaatgttac

SEQ ID NO: 2129093 - DNA, 25 bp, Homo sapien
ctggaaaagaagatgtagggtggcc

SEQ ID NO: 2129094 - DNA, 25 bp, Homo sapien
ccctggaaaagaagatgtagggtgg

SEQ ID NO: 2129095 - DNA, 25 bp, Homo sapien
agaagatgtagggtggcctacattt

SEQ ID NO: 2129096 - DNA, 25 bp, Homo sapien
ggaaaagaagatgtagggtggccta

SEQ ID NO: 2129097 - DNA, 25 bp, Homo sapien
aatcagtattagatcccaaggaaac

SEQ ID NO: 2129098 - DNA, 25 bp, Homo sapien
ctactgagtgtttaaaactgaaggg

SEQ ID NO: 2129099 - DNA, 25 bp, Homo sapien
ggagtatttacaaggactaatcagt

SEQ ID NO: 2129100 - DNA, 25 bp, Homo sapien
ccgttcttttcaagcatcaatggag

SEQ ID NO: 2129101 - DNA, 25 bp, Homo sapien
taacccactctaacaatcagtgtcc

SEQ ID NO: 2129102 - DNA, 25 bp, Homo sapien
ggcatactcaaagggtttaactgaa

SEQ ID NO: 2129103 - DNA, 25 bp, Homo sapien
gaaatggacaaagttcttgaaagac

SEQ ID NO: 2129104 - DNA, 25 bp, Homo sapien
gcacacaaagttgataatcttcatg

SEQ ID NO: 2129105 - DNA, 25 bp, Homo sapien
ggaaaggcatatctggcagcagccc

SEQ ID NO: 2129106 - DNA, 25 bp, Homo sapien
acaacacagcgccactcttataaga

SEQ ID NO: 2129107 - DNA, 25 bp, Homo sapien
cacagcgccactcttataagaattc

SEQ ID NO: 2129108 - DNA, 25 bp, Homo sapien
tatctggcagcagccctcgataatc

SEQ ID NO: 2129109 - DNA, 25 bp, Homo sapien
ttcttcctgttcactactggggtca

SEQ ID NO: 2129110 - DNA, 25 bp, Homo sapien
atcatagttcaaggatttatcagta

SEQ ID NO: 2129111 - DNA, 25 bp, Homo sapien
ctgttcactactggggtcaaacaca

SEQ ID NO: 2129112 - DNA, 25 bp, Homo sapien
caaaatcatagttcaaggatttatc

SEQ ID NO: 2129113 - DNA, 25 bp, Homo sapien
atatgccttttatgagtggtgctac

SEQ ID NO: 2129114 - DNA, 25 bp, Homo sapien
ttaaatatgccttttatgagtggtg

SEQ ID NO: 2129115 - DNA, 25 bp, Homo sapien
atttaaatatgccttttatgagtgg

SEQ ID NO: 2129116 - DNA, 25 bp, Homo sapien
aaatatgccttttatgagtggtgct

SEQ ID NO: 2129117 - DNA, 25 bp, Homo sapien
cagtctgctcagtgagtatcacaat

SEQ ID NO: 2129118 - DNA, 25 bp, Homo sapien
taaaacagtctgctcagtgagtatc

SEQ ID NO: 2129119 - DNA, 25 bp, Homo sapien
aacagtctgctcagtgagtatcaca

SEQ ID NO: 2129120 - DNA, 25 bp, Homo sapien
ctaaaacagtctgctcagtgagtat

SEQ ID NO: 2129121 - DNA, 25 bp, Homo sapien
acagcctattataagagtatggtta

SEQ ID NO: 2129122 - DNA, 25 bp, Homo sapien
gttattaccacttagagaaccttga

SEQ ID NO: 2129123 - DNA, 25 bp, Homo sapien
aagttgttgcgctgctccaaatagg

SEQ ID NO: 2129124 - DNA, 25 bp, Homo sapien
gagccaacttggaatctccgtagga

SEQ ID NO: 2129125 - DNA, 25 bp, Homo sapien
ctagattggagccagcaggactcac

SEQ ID NO: 2129126 - DNA, 25 bp, Homo sapien
catagcgaagggtatttagtttcct

SEQ ID NO: 2129127 - DNA, 25 bp, Homo sapien
tcagcatagcgaagggtatttagtt

SEQ ID NO: 2129128 - DNA, 25 bp, Homo sapien
cagcatagcgaagggtatttagttt

SEQ ID NO: 2129129 - DNA, 25 bp, Homo sapien
gcatagcgaagggtatttagtttcc

SEQ ID NO: 2129130 - DNA, 25 bp, Homo sapien
ctatctggcgatcagtattaacaac

SEQ ID NO: 2129131 - DNA, 25 bp, Homo sapien
gatgattaagttcaactatctggcg

SEQ ID NO: 2129132 - DNA, 25 bp, Homo sapien
caactatctggcgatcagtattaac

SEQ ID NO: 2129133 - DNA, 25 bp, Homo sapien
taagttcaactatctggcgatcagt

SEQ ID NO: 2129134 - DNA, 25 bp, Homo sapien
ttacacatttatagatccaggcagg

SEQ ID NO: 2129135 - DNA, 25 bp, Homo sapien
acatttatagatccaggcagggtac

SEQ ID NO: 2129136 - DNA, 25 bp, Homo sapien
tacacatttatagatccaggcaggg

SEQ ID NO: 2129137 - DNA, 25 bp, Homo sapien
cacatttatagatccaggcagggta

SEQ ID NO: 2129138 - DNA, 25 bp, Homo sapien
tatatcagatctcaacattgttggt

SEQ ID NO: 2129139 - DNA, 25 bp, Homo sapien
tctgttaggtgctctgtaattaacc

SEQ ID NO: 2129140 - DNA, 25 bp, Homo sapien
tatgtgaacaattttcatgagacag

SEQ ID NO: 2129141 - DNA, 25 bp, Homo sapien
caaaattgtgtaggtgctgaatgct

SEQ ID NO: 2129142 - DNA, 25 bp, Homo sapien
agatcatatggttgtaagtgtgagg

SEQ ID NO: 2129143 - DNA, 25 bp, Homo sapien
tagattgatatctacagctttgttc

SEQ ID NO: 2129144 - DNA, 25 bp, Homo sapien
tccattttttcgtgttctctctgat

SEQ ID NO: 2129145 - DNA, 25 bp, Homo sapien
agtgtgaggtcttacttctgtgttc

SEQ ID NO: 2129146 - DNA, 25 bp, Homo sapien
catttgtaacaataatcttgtcttt

SEQ ID NO: 2129147 - DNA, 25 bp, Homo sapien
gaaggcacaagtacatttgtaacaa

SEQ ID NO: 2129148 - DNA, 25 bp, Homo sapien
ccctgagaaggcacaagtacatttg

SEQ ID NO: 2129149 - DNA, 25 bp, Homo sapien
cttgtctttatatagatgtttggtc

SEQ ID NO: 2129150 - DNA, 25 bp, Homo sapien
cagccagtctctgagcaacttgagc

SEQ ID NO: 2129151 - DNA, 25 bp, Homo sapien
gcaacttgagcaacgctagttgtta

SEQ ID NO: 2129152 - DNA, 25 bp, Homo sapien
ccagtctctgagcaacttgagcaac

SEQ ID NO: 2129153 - DNA, 25 bp, Homo sapien
aacgctagttgttactgtttgccca

SEQ ID NO: 2129154 - DNA, 25 bp, Homo sapien
gactggcaaaagcttggtggtagca

SEQ ID NO: 2129155 - DNA, 25 bp, Homo sapien
cagaagtaaaggcaataagatcgga

SEQ ID NO: 2129156 - DNA, 25 bp, Homo sapien
caataaacctgtttgactggagaga

SEQ ID NO: 2129157 - DNA, 25 bp, Homo sapien
gaagctgtatttaggacatagtcaa

SEQ ID NO: 2129158 - DNA, 25 bp, Homo sapien
tatatggcgtctatgagagactcaa

SEQ ID NO: 2129159 - DNA, 25 bp, Homo sapien
tgatggccctatattacttgaacag

SEQ ID NO: 2129160 - DNA, 25 bp, Homo sapien
cttgaacagtacaacagtccttagg

SEQ ID NO: 2129161 - DNA, 25 bp, Homo sapien
caaattcttcaattgtgatggccct

SEQ ID NO: 2129162 - DNA, 25 bp, Homo sapien
accatacccggcttacttgttgtat

SEQ ID NO: 2129163 - DNA, 25 bp, Homo sapien
ccatacccggcttacttgttgtatt

SEQ ID NO: 2129164 - DNA, 25 bp, Homo sapien
gagaaggatgggctggtccctgtgt

SEQ ID NO: 2129165 - DNA, 25 bp, Homo sapien
gtccctgtgtcaccagctgaactct

SEQ ID NO: 2129166 - DNA, 25 bp, Homo sapien
ctgtgtcaccagctgaactctcacg

SEQ ID NO: 2129167 - DNA, 25 bp, Homo sapien
gctggctgtgatggagaaggatggg

SEQ ID NO: 2129168 - DNA, 25 bp, Homo sapien
tcctctgcactgcttatgaaattca

SEQ ID NO: 2129169 - DNA, 25 bp, Homo sapien
ctcctctgcactgcttatgaaattc

SEQ ID NO: 2129170 - DNA, 25 bp, Homo sapien
ggtctatagcgacgtttctctgttg

SEQ ID NO: 2129171 - DNA, 25 bp, Homo sapien
tgcaggtctatagcgacgtttctct

SEQ ID NO: 2129172 - DNA, 25 bp, Homo sapien
tagcgacgtttctctgttgtaaaag

SEQ ID NO: 2129173 - DNA, 25 bp, Homo sapien
aaaatgcaggtctatagcgacgttt

SEQ ID NO: 2129174 - DNA, 25 bp, Homo sapien
caatccatggcctcatcaactgttt

SEQ ID NO: 2129175 - DNA, 25 bp, Homo sapien
aatccatggcctcatcaactgtttt

SEQ ID NO: 2129176 - DNA, 25 bp, Homo sapien
tttggaatagcattggaaaaacaat

SEQ ID NO: 2129177 - DNA, 25 bp, Homo sapien
tcagtgcctgctcctatttgctcct

SEQ ID NO: 2129178 - DNA, 25 bp, Homo sapien
gtctctcactctgcatatctgacat

SEQ ID NO: 2129179 - DNA, 25 bp, Homo sapien
tcttcagtgcctgctcctatttgct

SEQ ID NO: 2129180 - DNA, 25 bp, Homo sapien
tctcactctgcatatctgacatatg

SEQ ID NO: 2129181 - DNA, 25 bp, Homo sapien
cttttctacttttagcaaagcagtt

SEQ ID NO: 2129182 - DNA, 25 bp, Homo sapien
gtgctttcgggctacactcttattt

SEQ ID NO: 2129183 - DNA, 25 bp, Homo sapien
ctttcgggctacactcttatttaca

SEQ ID NO: 2129184 - DNA, 25 bp, Homo sapien
tacttttctacttttagcaaagcag

SEQ ID NO: 2129185 - DNA, 25 bp, Homo sapien
ctgctctaatgtccaggataaacac

SEQ ID NO: 2129186 - DNA, 25 bp, Homo sapien
tgctctaatgtccaggataaacaca

SEQ ID NO: 2129187 - DNA, 25 bp, Homo sapien
ccagtctttgtcatatctacagtca

SEQ ID NO: 2129188 - DNA, 25 bp, Homo sapien
tcagtggtaagttgcaggtgcatag

SEQ ID NO: 2129189 - DNA, 25 bp, Homo sapien
caggtgcataggtgtaagtcccagt

SEQ ID NO: 2129190 - DNA, 25 bp, Homo sapien
ctttgtcatatctacagtcacactc

SEQ ID NO: 2129191 - DNA, 25 bp, Homo sapien
ttctgcgtagggtttgtagtcatgc

SEQ ID NO: 2129192 - DNA, 25 bp, Homo sapien
tgttttctagggtcctatcctgtag

SEQ ID NO: 2129193 - DNA, 25 bp, Homo sapien
ctgtagagtttctgcgtagggtttg

SEQ ID NO: 2129194 - DNA, 25 bp, Homo sapien
ctagggtcctatcctgtagagtttc

SEQ ID NO: 2129195 - DNA, 25 bp, Homo sapien
ctatctatgacaaatccacagccaa

SEQ ID NO: 2129196 - DNA, 25 bp, Homo sapien
aataaattaggtattgatgggacat

SEQ ID NO: 2129197 - DNA, 25 bp, Homo sapien
taagagctatctatgacaaatccac

SEQ ID NO: 2129198 - DNA, 25 bp, Homo sapien
aaattaggtattgatgggacatatc

SEQ ID NO: 2129199 - DNA, 25 bp, Homo sapien
agtgtgttgctgtgtcaagaggcca

SEQ ID NO: 2129200 - DNA, 25 bp, Homo sapien
gcagtgtgttgctgtgtcaagaggc

SEQ ID NO: 2129201 - DNA, 25 bp, Homo sapien
gaagtcaagtctcagtcagagctca

SEQ ID NO: 2129202 - DNA, 25 bp, Homo sapien
agtcaagtctcagtcagagctcatt

SEQ ID NO: 2129203 - DNA, 25 bp, Homo sapien
cattcgtttcttttcgcacccatta

SEQ ID NO: 2129204 - DNA, 25 bp, Homo sapien
caatttcgtgtaaggaacttgggct

SEQ ID NO: 2129205 - DNA, 25 bp, Homo sapien
aggccaatttcgtgtaaggaacttg

SEQ ID NO: 2129206 - DNA, 25 bp, Homo sapien
ttcgtgtaaggaacttgggctggaa

SEQ ID NO: 2129207 - DNA, 25 bp, Homo sapien
tggagggggtgaagggattctttgc

SEQ ID NO: 2129208 - DNA, 25 bp, Homo sapien
ctggagggggtgaagggattctttg

SEQ ID NO: 2129209 - DNA, 25 bp, Homo sapien
ttccacggagaaggcacgcgcccga

SEQ ID NO: 2129210 - DNA, 25 bp, Homo sapien
agctcaggctgctccgcctgtattg

SEQ ID NO: 2129211 - DNA, 25 bp, Homo sapien
aggcacgcgcccgagagctcagagc

SEQ ID NO: 2129212 - DNA, 25 bp, Homo sapien
cctgtattgggtcttggagttttct

SEQ ID NO: 2129213 - DNA, 25 bp, Homo sapien
tgataaccgagactggatgccctcg

SEQ ID NO: 2129214 - DNA, 25 bp, Homo sapien
gatgcggaaccagtaagctcaggca

SEQ ID NO: 2129215 - DNA, 25 bp, Homo sapien
ctctcctggagacgttgataaccga

SEQ ID NO: 2129216 - DNA, 25 bp, Homo sapien
aagaaactgctgtactccgggatgg

SEQ ID NO: 2129217 - DNA, 25 bp, Homo sapien
aatgatcatctcagtcccgatgtca

SEQ ID NO: 2129218 - DNA, 25 bp, Homo sapien
ttcagagctgttgccgtagccgctg

SEQ ID NO: 2129219 - DNA, 25 bp, Homo sapien
acagttcagatccttgaagctccat

SEQ ID NO: 2129220 - DNA, 25 bp, Homo sapien
gaagcagatgttgagggctctgtct

SEQ ID NO: 2129221 - DNA, 25 bp, Homo sapien
aagtgcctaatgtgtgtgacccttg

SEQ ID NO: 2129222 - DNA, 25 bp, Homo sapien
taatgtgtgtgacccttgtgaacag

SEQ ID NO: 2129223 - DNA, 25 bp, Homo sapien
tgtgaacagcttgggcagaaccgaa

SEQ ID NO: 2129224 - DNA, 25 bp, Homo sapien
cagagcggtaaattaagtgcctaat

SEQ ID NO: 2129225 - DNA, 25 bp, Homo sapien
gccacatggtactgcttccctggat

SEQ ID NO: 2129226 - DNA, 25 bp, Homo sapien
ctttcaccttgacccgaacagaggg

SEQ ID NO: 2129227 - DNA, 25 bp, Homo sapien
ggaatccaccggcaccacatcgatg

SEQ ID NO: 2129228 - DNA, 25 bp, Homo sapien
ccacatcgatggccacatggtactg

SEQ ID NO: 2129229 - DNA, 25 bp, Homo sapien
atgatgcacaaatggtctgtattcc

SEQ ID NO: 2129230 - DNA, 25 bp, Homo sapien
tgatgcacaaatggtctgtattccc

SEQ ID NO: 2129231 - DNA, 25 bp, Homo sapien
gatgcacaaatggtctgtattccca

SEQ ID NO: 2129232 - DNA, 25 bp, Homo sapien
aagctgatgatctgccgcatccagg

SEQ ID NO: 2129233 - DNA, 25 bp, Homo sapien
cgatcaaagctgatgatctgccgca

SEQ ID NO: 2129234 - DNA, 25 bp, Homo sapien
tgttggtgagtttcatgcgatcaaa

SEQ ID NO: 2129235 - DNA, 25 bp, Homo sapien
agcagggtgagtccgggtgaacata

SEQ ID NO: 2129236 - DNA, 25 bp, Homo sapien
tctgggacaggtcaacactgctgcc

SEQ ID NO: 2129237 - DNA, 25 bp, Homo sapien
gtaagccgttactgtggtgaactca

SEQ ID NO: 2129238 - DNA, 25 bp, Homo sapien
ccttgctctatcacgtgcactcggg

SEQ ID NO: 2129239 - DNA, 25 bp, Homo sapien
tgttttaacaccttcagtgggcaag

SEQ ID NO: 2129240 - DNA, 25 bp, Homo sapien
tttccattcgcctgagacatgacca

SEQ ID NO: 2129241 - DNA, 25 bp, Homo sapien
tcgcctgagacatgaccaagtttac

SEQ ID NO: 2129242 - DNA, 25 bp, Homo sapien
ctggagccatttccattcgcctgag

SEQ ID NO: 2129243 - DNA, 25 bp, Homo sapien
gagccatttccattcgcctgagaca

SEQ ID NO: 2129244 - DNA, 25 bp, Homo sapien
tatctctaaatcctttagcaaaagg

SEQ ID NO: 2129245 - DNA, 25 bp, Homo sapien
atctctaaatcctttagcaaaagga

SEQ ID NO: 2129246 - DNA, 25 bp, Homo sapien
tcttccagtatctctaaatccttta

SEQ ID NO: 2129247 - DNA, 25 bp, Homo sapien
ctgtttcttccagtatctctaaatc

SEQ ID NO: 2129248 - DNA, 25 bp, Homo sapien
gtgtgtctgcgccaaaggttttaaa

SEQ ID NO: 2129249 - DNA, 25 bp, Homo sapien
gaaggcctccatgggtaggtctcta

SEQ ID NO: 2129250 - DNA, 25 bp, Homo sapien
aaatcgagagtgaaagaaggcctcc

SEQ ID NO: 2129251 - DNA, 25 bp, Homo sapien
ggtaggtctctaaaagcccatccaa

SEQ ID NO: 2129252 - DNA, 25 bp, Homo sapien
gtaaatgaaacataggtgaaaagca

SEQ ID NO: 2129253 - DNA, 25 bp, Homo sapien
caggagccggtaaaacaagaggttg

SEQ ID NO: 2129254 - DNA, 25 bp, Homo sapien
tggacaaatcttgtagcatagaggc

SEQ ID NO: 2129255 - DNA, 25 bp, Homo sapien
catagaggcaggttgacattgggca

SEQ ID NO: 2129256 - DNA, 25 bp, Homo sapien
tatgcctctggacagggcattccaa

SEQ ID NO: 2129257 - DNA, 25 bp, Homo sapien
agggaagataacataggcacttcca

SEQ ID NO: 2129258 - DNA, 25 bp, Homo sapien
cataggcacttccatcatgagtggg

SEQ ID NO: 2129259 - DNA, 25 bp, Homo sapien
tgagtggggctaaagactgagaact

SEQ ID NO: 2129260 - DNA, 25 bp, Homo sapien
tgaaccgctttttgaattggtgacc

SEQ ID NO: 2129261 - DNA, 25 bp, Homo sapien
taattgctggataccaatgaacatg

SEQ ID NO: 2129262 - DNA, 25 bp, Homo sapien
cacttatcagtctagatggcataga

SEQ ID NO: 2129263 - DNA, 25 bp, Homo sapien
tgcttgtagatactgatcactggag

SEQ ID NO: 2129264 - DNA, 25 bp, Homo sapien
gaaaggagcaactaagtgcttctgg

SEQ ID NO: 2129265 - DNA, 25 bp, Homo sapien
ttttgaagctcaaggccactgtaat

SEQ ID NO: 2129266 - DNA, 25 bp, Homo sapien
gctttttaagcccaataactgttga

SEQ ID NO: 2129267 - DNA, 25 bp, Homo sapien
tagcatcaattttcactggtggagt

SEQ ID NO: 2129268 - DNA, 25 bp, Homo sapien
cagttaacgtggtgaactagcttca

SEQ ID NO: 2129269 - DNA, 25 bp, Homo sapien
aatttaaagacaatcaatgctggga

SEQ ID NO: 2129270 - DNA, 25 bp, Homo sapien
ccaaactaagggatttgtcagcagc

SEQ ID NO: 2129271 - DNA, 25 bp, Homo sapien
ctatcactatattaggactttgaca

SEQ ID NO: 2129272 - DNA, 25 bp, Homo sapien
tgacagccatggtccaaactaaggg

SEQ ID NO: 2129273 - DNA, 25 bp, Homo sapien
tattaggactttgacagccatggtc

SEQ ID NO: 2129274 - DNA, 25 bp, Homo sapien
gaacatcatatggtgtacttacaaa

SEQ ID NO: 2129275 - DNA, 25 bp, Homo sapien
taggtatagccttctatacacctgg

SEQ ID NO: 2129276 - DNA, 25 bp, Homo sapien
cacatacatcaggatacttcttggt

SEQ ID NO: 2129277 - DNA, 25 bp, Homo sapien
ccattatctctgtggagtggtacac

SEQ ID NO: 2129278 - DNA, 25 bp, Homo sapien
ttttcacatcaatgttcatcaggga

SEQ ID NO: 2129279 - DNA, 25 bp, Homo sapien
gatgaagccaacttgatcttggtga

SEQ ID NO: 2129280 - DNA, 25 bp, Homo sapien
agccaacttgatcttggtgaataag

SEQ ID NO: 2129281 - DNA, 25 bp, Homo sapien
gaagccaacttgatcttggtgaata

SEQ ID NO: 2129282 - DNA, 25 bp, Homo sapien
ggtcacaacaagcaatgacggatag

SEQ ID NO: 2129283 - DNA, 25 bp, Homo sapien
tctgttattaggctgccagtgactg

SEQ ID NO: 2129284 - DNA, 25 bp, Homo sapien
cagaaatatgatggtcgtggaagtg

SEQ ID NO: 2129285 - DNA, 25 bp, Homo sapien
aaggagctggttcagccacatactc

SEQ ID NO: 2129286 - DNA, 25 bp, Homo sapien
tgtctggttgtttagatacgtgcat

SEQ ID NO: 2129287 - DNA, 25 bp, Homo sapien
catgtctggttgtttagatacgtgc

SEQ ID NO: 2129288 - DNA, 25 bp, Homo sapien
atggagtatacttagctcacatttc

SEQ ID NO: 2129289 - DNA, 25 bp, Homo sapien
tccaatggagtatacttagctcaca

SEQ ID NO: 2129290 - DNA, 25 bp, Homo sapien
ggcaaccatgaaatcctgttggtag

SEQ ID NO: 2129291 - DNA, 25 bp, Homo sapien
tatcccagcactgtctgttaagaat

SEQ ID NO: 2129292 - DNA, 25 bp, Homo sapien
tcctttatgggaattggtccaagct

SEQ ID NO: 2129293 - DNA, 25 bp, Homo sapien
tagaagggaagcttccaagtcacag

SEQ ID NO: 2129294 - DNA, 25 bp, Homo sapien
caattgttgtcttagatggaggtga

SEQ ID NO: 2129295 - DNA, 25 bp, Homo sapien
ggaagaatcaattgttgtcttagat

SEQ ID NO: 2129296 - DNA, 25 bp, Homo sapien
taaaggagcacggtaggaagaatca

SEQ ID NO: 2129297 - DNA, 25 bp, Homo sapien
ctagtgagttaaaggagcacggtag

SEQ ID NO: 2129298 - DNA, 25 bp, Homo sapien
gagccaaatctcctatggtgtattt

SEQ ID NO: 2129299 - DNA, 25 bp, Homo sapien
gatcttgcttgttgattgggtcgaa

SEQ ID NO: 2129300 - DNA, 25 bp, Homo sapien
gaaatcataaatatccatccaggcc

SEQ ID NO: 2129301 - DNA, 25 bp, Homo sapien
tccaggccccgactggatcttgctt

SEQ ID NO: 2129302 - DNA, 25 bp, Homo sapien
ctcctggagcaagtcgtgctggata

SEQ ID NO: 2129303 - DNA, 25 bp, Homo sapien
cttatgcagggataacaatctcctc

SEQ ID NO: 2129304 - DNA, 25 bp, Homo sapien
gggataacaatctcctcattgcagc

SEQ ID NO: 2129305 - DNA, 25 bp, Homo sapien
ggagcaagtcgtgctggataaccat

SEQ ID NO: 2129306 - DNA, 25 bp, Homo sapien
actgggtgcaggcgaaggacccaag

SEQ ID NO: 2129307 - DNA, 25 bp, Homo sapien
gggtgcaggcgaaggacccaaggtg

SEQ ID NO: 2129308 - DNA, 25 bp, Homo sapien
ggtgcaggcgaaggacccaaggtgg

SEQ ID NO: 2129309 - DNA, 25 bp, Homo sapien
tgggtgcaggcgaaggacccaaggt

SEQ ID NO: 2129310 - DNA, 25 bp, Homo sapien
cttcatccgttaaggcttaaactct

SEQ ID NO: 2129311 - DNA, 25 bp, Homo sapien
cgttaaggcttaaactctgagacaa

SEQ ID NO: 2129312 - DNA, 25 bp, Homo sapien
taaggcttaaactctgagacaatgg

SEQ ID NO: 2129313 - DNA, 25 bp, Homo sapien
catccgttaaggcttaaactctgag

SEQ ID NO: 2129314 - DNA, 25 bp, Homo sapien
gaaactccagttagatagatgagaa

SEQ ID NO: 2129315 - DNA, 25 bp, Homo sapien
gatagatgagaagtgttagataatt

SEQ ID NO: 2129316 - DNA, 25 bp, Homo sapien
ctccagctagtgaaactccagttag

SEQ ID NO: 2129317 - DNA, 25 bp, Homo sapien
tagtgaaactccagttagatagatg

SEQ ID NO: 2129318 - DNA, 25 bp, Homo sapien
cgtgtcttctgatagtagactttgc

SEQ ID NO: 2129319 - DNA, 25 bp, Homo sapien
tactctgaagactaacatcctttac

SEQ ID NO: 2129320 - DNA, 25 bp, Homo sapien
catcctttaccagagttctgcatca

SEQ ID NO: 2129321 - DNA, 25 bp, Homo sapien
cttctgatagtagactttgctgaat

SEQ ID NO: 2129322 - DNA, 25 bp, Homo sapien
accaactgctgctctcctcaaaccc

SEQ ID NO: 2129323 - DNA, 25 bp, Homo sapien
caactgctgctctcctcaaacccat

SEQ ID NO: 2129324 - DNA, 25 bp, Homo sapien
ctcaccaactgctgctctcctcaaa

SEQ ID NO: 2129325 - DNA, 25 bp, Homo sapien
tcaccaactgctgctctcctcaaac

SEQ ID NO: 2129326 - DNA, 25 bp, Homo sapien
acatctttcacatccctcttaaaca

SEQ ID NO: 2129327 - DNA, 25 bp, Homo sapien
tatagccaacaccatatacatcttt

SEQ ID NO: 2129328 - DNA, 25 bp, Homo sapien
ggggactccagaattatagccaaca

SEQ ID NO: 2129329 - DNA, 25 bp, Homo sapien
attatagccaacaccatatacatct

SEQ ID NO: 2129330 - DNA, 25 bp, Homo sapien
tcagtagatccttcagtgaagatag

SEQ ID NO: 2129331 - DNA, 25 bp, Homo sapien
tagttgagttaaaatgattattcag

SEQ ID NO: 2129332 - DNA, 25 bp, Homo sapien
caagaatgcaatatagttgagttaa

SEQ ID NO: 2129333 - DNA, 25 bp, Homo sapien
ttatcactgaataaagtaatacacc

SEQ ID NO: 2129334 - DNA, 25 bp, Homo sapien
ttgaagccatgaaccagcaagctgc

SEQ ID NO: 2129335 - DNA, 25 bp, Homo sapien
caaactgccgtctgagtgaactcac

SEQ ID NO: 2129336 - DNA, 25 bp, Homo sapien
catgctttcagctaccacaacagga

SEQ ID NO: 2129337 - DNA, 25 bp, Homo sapien
tcataactcatgaggcaaacagtgc

SEQ ID NO: 2129338 - DNA, 25 bp, Homo sapien
tacggagcaggctgataaaagcaag

SEQ ID NO: 2129339 - DNA, 25 bp, Homo sapien
ctcagctgcaaagtacggagcaggc

SEQ ID NO: 2129340 - DNA, 25 bp, Homo sapien
ctgcaaagtacggagcaggctgata

SEQ ID NO: 2129341 - DNA, 25 bp, Homo sapien
gagcaggctgataaaagcaagttac

SEQ ID NO: 2129342 - DNA, 25 bp, Homo sapien
tccacgaaagtgcagtgggtggtat

SEQ ID NO: 2129343 - DNA, 25 bp, Homo sapien
gggtggctcaggtattacataaata

SEQ ID NO: 2129344 - DNA, 25 bp, Homo sapien
ggtggtatggctggaagctaacggg

SEQ ID NO: 2129345 - DNA, 25 bp, Homo sapien
catttgatccacgaaagtgcagtgg

SEQ ID NO: 2129346 - DNA, 25 bp, Homo sapien
tattatagctagtcaataacgtttg

SEQ ID NO: 2129347 - DNA, 25 bp, Homo sapien
aacagatcttgaattttacatttgg

SEQ ID NO: 2129348 - DNA, 25 bp, Homo sapien
gtaactactattccatcaactgtaa

SEQ ID NO: 2129349 - DNA, 25 bp, Homo sapien
tactatgatggcttaattgatcaaa

SEQ ID NO: 2129350 - DNA, 25 bp, Homo sapien
tgttatagtcaaagatgcaggcatc

SEQ ID NO: 2129351 - DNA, 25 bp, Homo sapien
aattatcgggatacaactgtcaggt

SEQ ID NO: 2129352 - DNA, 25 bp, Homo sapien
taaatgctatggctataaacctctg

SEQ ID NO: 2129353 - DNA, 25 bp, Homo sapien
tacgcaaaaattcacacgaagaggc

SEQ ID NO: 2129354 - DNA, 25 bp, Homo sapien
ccattcttcacttgtttggtggcaa

SEQ ID NO: 2129355 - DNA, 25 bp, Homo sapien
cccattcttcacttgtttggtggca

SEQ ID NO: 2129356 - DNA, 25 bp, Homo sapien
tcccattcttcacttgtttggtggc

SEQ ID NO: 2129357 - DNA, 25 bp, Homo sapien
tctttcccactgttactgatttcca

SEQ ID NO: 2129358 - DNA, 25 bp, Homo sapien
tgccgggaagttcaaaccaggtgga

SEQ ID NO: 2129359 - DNA, 25 bp, Homo sapien
caccatggccataaacacccaagcc

SEQ ID NO: 2129360 - DNA, 25 bp, Homo sapien
tccttttgggcttggtctatggggc

SEQ ID NO: 2129361 - DNA, 25 bp, Homo sapien
tgggcttggtctatggggctcataa

SEQ ID NO: 2129362 - DNA, 25 bp, Homo sapien
tatggggctcataaagtttccactc

SEQ ID NO: 2129363 - DNA, 25 bp, Homo sapien
ggtctatggggctcataaagtttcc

SEQ ID NO: 2129364 - DNA, 25 bp, Homo sapien
gtttcacgcagctttttacgcttgt

SEQ ID NO: 2129365 - DNA, 25 bp, Homo sapien
ttcacgcagctttttacgcttgtct

SEQ ID NO: 2129366 - DNA, 25 bp, Homo sapien
aaggtttcacgcagctttttacgct

SEQ ID NO: 2129367 - DNA, 25 bp, Homo sapien
aggtttcacgcagctttttacgctt

SEQ ID NO: 2129368 - DNA, 25 bp, Homo sapien
attcttgacggcatcaaaatattgg

SEQ ID NO: 2129369 - DNA, 25 bp, Homo sapien
gggcgaacgtggaacaccatgtcca

SEQ ID NO: 2129370 - DNA, 25 bp, Homo sapien
actgcccgagttggacgtccatagg

SEQ ID NO: 2129371 - DNA, 25 bp, Homo sapien
agagccaggatagaaactgcccgag

SEQ ID NO: 2129372 - DNA, 25 bp, Homo sapien
agaggttttctgccatggggcgaac

SEQ ID NO: 2129373 - DNA, 25 bp, Homo sapien
gcgaaacacactttacggccgtaca

SEQ ID NO: 2129374 - DNA, 25 bp, Homo sapien
cgaaacacactttacggccgtacat

SEQ ID NO: 2129375 - DNA, 25 bp, Homo sapien
ggcaagtgcaggactataaaatatg

SEQ ID NO: 2129376 - DNA, 25 bp, Homo sapien
tctctgggcaagtgcaggactataa

SEQ ID NO: 2129377 - DNA, 25 bp, Homo sapien
gacttcttttcttcattgttgtctc

SEQ ID NO: 2129378 - DNA, 25 bp, Homo sapien
cttcttttcttcattgttgtctctc

SEQ ID NO: 2129379 - DNA, 25 bp, Homo sapien
ttttcttcattgttgtctctctcac

SEQ ID NO: 2129380 - DNA, 25 bp, Homo sapien
tcttttcttcattgttgtctctctc

SEQ ID NO: 2129381 - DNA, 25 bp, Homo sapien
ttttccaggcatatttgcaaactgt

SEQ ID NO: 2129382 - DNA, 25 bp, Homo sapien
atatttgcaaactgtacactaggac

SEQ ID NO: 2129383 - DNA, 25 bp, Homo sapien
aggcatatttgcaaactgtacacta

SEQ ID NO: 2129384 - DNA, 25 bp, Homo sapien
gcatatttgcaaactgtacactagg

SEQ ID NO: 2129385 - DNA, 25 bp, Homo sapien
gaaagggacagggggtcaagcctca

SEQ ID NO: 2129386 - DNA, 25 bp, Homo sapien
aaagggacagggggtcaagcctcat

SEQ ID NO: 2129387 - DNA, 25 bp, Homo sapien
ggaccaggaggcatacctgcagttg

SEQ ID NO: 2129388 - DNA, 25 bp, Homo sapien
ccaggaggcatacctgcagttggac

SEQ ID NO: 2129389 - DNA, 25 bp, Homo sapien
ggggaccaggaggcatacctgcagt

SEQ ID NO: 2129390 - DNA, 25 bp, Homo sapien
accaggaggcatacctgcagttgga

SEQ ID NO: 2129391 - DNA, 25 bp, Homo sapien
tgaatcaagttgggtggggcactta

SEQ ID NO: 2129392 - DNA, 25 bp, Homo sapien
ctgaatcaagttgggtggggcactt

SEQ ID NO: 2129393 - DNA, 25 bp, Homo sapien
gaatcaagttgggtggggcacttaa

SEQ ID NO: 2129394 - DNA, 25 bp, Homo sapien
ctgccttggtattattgatctgtga

SEQ ID NO: 2129395 - DNA, 25 bp, Homo sapien
cagtgggcagaagtagagtaatctc

SEQ ID NO: 2129396 - DNA, 25 bp, Homo sapien
tattattgatctgtgacttgccact

SEQ ID NO: 2129397 - DNA, 25 bp, Homo sapien
gctgcactcatatcatccgctttgg

SEQ ID NO: 2129398 - DNA, 25 bp, Homo sapien
catgaatcactcaaagtttaggtca

SEQ ID NO: 2129399 - DNA, 25 bp, Homo sapien
tcaaatccttgagcactcagtctag

SEQ ID NO: 2129400 - DNA, 25 bp, Homo sapien
cactcagtctagtgaagatgttgtc

SEQ ID NO: 2129401 - DNA, 25 bp, Homo sapien
tccttgagcactcagtctagtgaag

SEQ ID NO: 2129402 - DNA, 25 bp, Homo sapien
aatcatctcaaatccttgagcactc

SEQ ID NO: 2129403 - DNA, 25 bp, Homo sapien
gagggatcgtgtcactcccaggcct

SEQ ID NO: 2129404 - DNA, 25 bp, Homo sapien
caaatgctgagggatcgtgtcactc

SEQ ID NO: 2129405 - DNA, 25 bp, Homo sapien
tgagggatcgtgtcactcccaggcc

SEQ ID NO: 2129406 - DNA, 25 bp, Homo sapien
tgctgagggatcgtgtcactcccag

SEQ ID NO: 2129407 - DNA, 25 bp, Homo sapien
gtaataccacctcctgtgaatgtgt

SEQ ID NO: 2129408 - DNA, 25 bp, Homo sapien
ggtccagccatagcaaagcaagtac

SEQ ID NO: 2129409 - DNA, 25 bp, Homo sapien
taggcccgtgagagcatatacatgt

SEQ ID NO: 2129410 - DNA, 25 bp, Homo sapien
aaacactgttatatttaggcccgtg

SEQ ID NO: 2129411 - DNA, 25 bp, Homo sapien
gaagtttcactgtcaaattatctat

SEQ ID NO: 2129412 - DNA, 25 bp, Homo sapien
taatttggggagatcccaagaggtc

SEQ ID NO: 2129413 - DNA, 25 bp, Homo sapien
tacctaatttgtgaaagtttatgaa

SEQ ID NO: 2129414 - DNA, 25 bp, Homo sapien
tatgcctatgtagagttagtaatca

SEQ ID NO: 2129415 - DNA, 25 bp, Homo sapien
tttgatttcagaccaactgtggctg

SEQ ID NO: 2129416 - DNA, 25 bp, Homo sapien
gatttcagaccaactgtggctgaac

SEQ ID NO: 2129417 - DNA, 25 bp, Homo sapien
gtttttgatttcagaccaactgtgg

SEQ ID NO: 2129418 - DNA, 25 bp, Homo sapien
tttcagaccaactgtggctgaacct

SEQ ID NO: 2129419 - DNA, 25 bp, Homo sapien
tgttagcacccacgtcagtcaagtg

SEQ ID NO: 2129420 - DNA, 25 bp, Homo sapien
tcagttctgtaacaatggagacagg

SEQ ID NO: 2129421 - DNA, 25 bp, Homo sapien
cagatgcagctacttctatgataga

SEQ ID NO: 2129422 - DNA, 25 bp, Homo sapien
tgtccagttatttaggttcaaagcc

SEQ ID NO: 2129423 - DNA, 25 bp, Homo sapien
agagtctcactgttgtctcttgtca

SEQ ID NO: 2129424 - DNA, 25 bp, Homo sapien
gtctcactgttgtctcttgtcactc

SEQ ID NO: 2129425 - DNA, 25 bp, Homo sapien
ctccccactccctcgttcaagcgat

SEQ ID NO: 2129426 - DNA, 25 bp, Homo sapien
tagagtgcatcggcacaatctctgc

SEQ ID NO: 2129427 - DNA, 25 bp, Homo sapien
tctgaaacatagctctgtatagttg

SEQ ID NO: 2129428 - DNA, 25 bp, Homo sapien
atggaaagaatttacttaatcctct

SEQ ID NO: 2129429 - DNA, 25 bp, Homo sapien
gattgaatcatcagctgcattgact

SEQ ID NO: 2129430 - DNA, 25 bp, Homo sapien
tcctgatgctaaaccctggagatgc

SEQ ID NO: 2129431 - DNA, 25 bp, Homo sapien
ggtttctggttggtcctggcctgaa

SEQ ID NO: 2129432 - DNA, 25 bp, Homo sapien
ttggtcctggcctgaaatacgggaa

SEQ ID NO: 2129433 - DNA, 25 bp, Homo sapien
cagcccggagttccggattagtgga

SEQ ID NO: 2129434 - DNA, 25 bp, Homo sapien
gccaatgacagcgttggtaacagcc

SEQ ID NO: 2129435 - DNA, 25 bp, Homo sapien
gagctgctcctcatatctgtgtttc

SEQ ID NO: 2129436 - DNA, 25 bp, Homo sapien
gatcgctaggttcttgcagtctgga

SEQ ID NO: 2129437 - DNA, 25 bp, Homo sapien
actagtcaaacggtcagcggctggg

SEQ ID NO: 2129438 - DNA, 25 bp, Homo sapien
cctgcaacaaatccgctcaggtaag

SEQ ID NO: 2129439 - DNA, 25 bp, Homo sapien
tgatgcgatgaattcgagagagagc

SEQ ID NO: 2129440 - DNA, 25 bp, Homo sapien
ggagtgcggcggaagcggcgggact

SEQ ID NO: 2129441 - DNA, 25 bp, Homo sapien
tcgagagagagcgaaactaggacga

SEQ ID NO: 2129442 - DNA, 25 bp, Homo sapien
aactaggacgaggagtgcggcggaa

SEQ ID NO: 2129443 - DNA, 25 bp, Homo sapien
aagggaaagtcactccggagctcgc

SEQ ID NO: 2129444 - DNA, 25 bp, Homo sapien
tataagccccgcactttggactggt

SEQ ID NO: 2129445 - DNA, 25 bp, Homo sapien
tgttagatcccagccgtagatacgg

SEQ ID NO: 2129446 - DNA, 25 bp, Homo sapien
aaagggccggattgccttcacagga

SEQ ID NO: 2129447 - DNA, 25 bp, Homo sapien
ccttctggccggcttactgggtagg

SEQ ID NO: 2129448 - DNA, 25 bp, Homo sapien
gcagtttcaatagcaccaggccact

SEQ ID NO: 2129449 - DNA, 25 bp, Homo sapien
tgtagtagagttcctctgctgaaac

SEQ ID NO: 2129450 - DNA, 25 bp, Homo sapien
cagggaagttgtgccagttcatcaa

SEQ ID NO: 2129451 - DNA, 25 bp, Homo sapien
cactgaactcggcttattcttttta

SEQ ID NO: 2129452 - DNA, 25 bp, Homo sapien
agccactgaactcggcttattcttt

SEQ ID NO: 2129453 - DNA, 25 bp, Homo sapien
gccactgaactcggcttattctttt

SEQ ID NO: 2129454 - DNA, 25 bp, Homo sapien
ccactgaactcggcttattcttttt

SEQ ID NO: 2129455 - DNA, 25 bp, Homo sapien
gaaaccattttcaattccgagatta

SEQ ID NO: 2129456 - DNA, 25 bp, Homo sapien
tgaagctccttatgtcagatacata

SEQ ID NO: 2129457 - DNA, 25 bp, Homo sapien
tttggcatcatacttaagaaaccat

SEQ ID NO: 2129458 - DNA, 25 bp, Homo sapien
tggtgtgaagtagagctccaaattc

SEQ ID NO: 2129459 - DNA, 25 bp, Homo sapien
gttttcaagtttgtgcatataaagg

SEQ ID NO: 2129460 - DNA, 25 bp, Homo sapien
ctggtgagaacattcttgccagggg

SEQ ID NO: 2129461 - DNA, 25 bp, Homo sapien
ggtgagaacattcttgccaggggga

SEQ ID NO: 2129462 - DNA, 25 bp, Homo sapien
gagaacattcttgccagggggaact

SEQ ID NO: 2129463 - DNA, 25 bp, Homo sapien
cttgccagggggaactctgcagagt

SEQ ID NO: 2129464 - DNA, 25 bp, Homo sapien
cacatatatgagtgaaagcatgtgg

SEQ ID NO: 2129465 - DNA, 25 bp, Homo sapien
gatttccttcttttcaatgaatgaa

SEQ ID NO: 2129466 - DNA, 25 bp, Homo sapien
tttcaatgaatgaatagtattccac

SEQ ID NO: 2129467 - DNA, 25 bp, Homo sapien
ccttcttttcaatgaatgaatagta

SEQ ID NO: 2129468 - DNA, 25 bp, Homo sapien
caaggaactggcattccagggtaca

SEQ ID NO: 2129469 - DNA, 25 bp, Homo sapien
actggcattccagggtacaatgctc

SEQ ID NO: 2129470 - DNA, 25 bp, Homo sapien
tcatcaaggaactggcattccaggg

SEQ ID NO: 2129471 - DNA, 25 bp, Homo sapien
ggtacttggagaagtatatagaatt

SEQ ID NO: 2129472 - DNA, 25 bp, Homo sapien
ttataccataattataacggtcaaa

SEQ ID NO: 2129473 - DNA, 25 bp, Homo sapien
tttgaccgttataattatggtataa

SEQ ID NO: 2129474 - DNA, 25 bp, Homo sapien
tgtccaatgccttgaggaggcataa

SEQ ID NO: 2129475 - DNA, 25 bp, Homo sapien
gctctcacttgatgcataagactca

SEQ ID NO: 2129476 - DNA, 25 bp, Homo sapien
aacgaagggcttataaattgctctc

SEQ ID NO: 2129477 - DNA, 25 bp, Homo sapien
gaggcacagataaatgcaattgact

SEQ ID NO: 2129478 - DNA, 25 bp, Homo sapien
tctccttacttaaaacactttcatc

SEQ ID NO: 2129479 - DNA, 25 bp, Homo sapien
cattttaagtgatttctccttactt

SEQ ID NO: 2129480 - DNA, 25 bp, Homo sapien
cttacttaaaacactttcatctagt

SEQ ID NO: 2129481 - DNA, 25 bp, Homo sapien
tccttacttaaaacactttcatcta

SEQ ID NO: 2129482 - DNA, 25 bp, Homo sapien
cagaatcagagttgctttgggttgg

SEQ ID NO: 2129483 - DNA, 25 bp, Homo sapien
ggacgtcctcaaccatgcagagaaa

SEQ ID NO: 2129484 - DNA, 25 bp, Homo sapien
gtcagcttgccagaatcagagttgc

SEQ ID NO: 2129485 - DNA, 25 bp, Homo sapien
tctcaggactgttgtctggcctctc

SEQ ID NO: 2129486 - DNA, 25 bp, Homo sapien
tcaaaacagtcactacagacagggt

SEQ ID NO: 2129487 - DNA, 25 bp, Homo sapien
tctatcatacaatgcagcgtctgag

SEQ ID NO: 2129488 - DNA, 25 bp, Homo sapien
cagacagggttagctataaacggtg

SEQ ID NO: 2129489 - DNA, 25 bp, Homo sapien
tacaaactgataaaatcttgggcct

SEQ ID NO: 2129490 - DNA, 25 bp, Homo sapien
agctcaatgtgcactgccccatgtg

SEQ ID NO: 2129491 - DNA, 25 bp, Homo sapien
attgtggccactcacatggtctagc

SEQ ID NO: 2129492 - DNA, 25 bp, Homo sapien
tcagctcaatgtgcactgccccatg

SEQ ID NO: 2129493 - DNA, 25 bp, Homo sapien
tcacatggtctagcccctgggtctg

SEQ ID NO: 2129494 - DNA, 25 bp, Homo sapien
gtgttatccttttacaagtgccatg

SEQ ID NO: 2129495 - DNA, 25 bp, Homo sapien
tgtgttatccttttacaagtgccat

SEQ ID NO: 2129496 - DNA, 25 bp, Homo sapien
gtgtgttatccttttacaagtgcca

SEQ ID NO: 2129497 - DNA, 25 bp, Homo sapien
atcttctgctcagaggcggtggtgg

SEQ ID NO: 2129498 - DNA, 25 bp, Homo sapien
gctcaggggcggctacggcaggggc

SEQ ID NO: 2129499 - DNA, 25 bp, Homo sapien
ttgccaagatcagcatacgtaggtg

SEQ ID NO: 2129500 - DNA, 25 bp, Homo sapien
gccaaatccatagccctcagtgaag

SEQ ID NO: 2129501 - DNA, 25 bp, Homo sapien
gcttgagcttgtaaattccaatcca

SEQ ID NO: 2129502 - DNA, 25 bp, Homo sapien
tttggtggtctgtgttggctgagct

SEQ ID NO: 2129503 - DNA, 25 bp, Homo sapien
gtctgtgttggctgagcttgagctt

SEQ ID NO: 2129504 - DNA, 25 bp, Homo sapien
gtggtctgtgttggctgagcttgag

SEQ ID NO: 2129505 - DNA, 25 bp, Homo sapien
agtccatctgtacttggtttccaga

SEQ ID NO: 2129506 - DNA, 25 bp, Homo sapien
cgtactcagtccatctgtacttggt

SEQ ID NO: 2129507 - DNA, 25 bp, Homo sapien
ctgtaaacgtgaggccgtactcagt

SEQ ID NO: 2129508 - DNA, 25 bp, Homo sapien
tactcagtccatctgtacttggttt

SEQ ID NO: 2129509 - DNA, 25 bp, Homo sapien
ttcccagtgttaggtgaaaaggatg

SEQ ID NO: 2129510 - DNA, 25 bp, Homo sapien
tccacagtaatcttggtgcctagtg

SEQ ID NO: 2129511 - DNA, 25 bp, Homo sapien
gaaaaggatgaatcgaaggtcagct

SEQ ID NO: 2129512 - DNA, 25 bp, Homo sapien
gcttcagtccacgtgcaagctgatc

SEQ ID NO: 2129513 - DNA, 25 bp, Homo sapien
ggcccaacaatgtcgaaaaccatgt

SEQ ID NO: 2129514 - DNA, 25 bp, Homo sapien
tgtcgaaaaccatgtcgcagcccag

SEQ ID NO: 2129515 - DNA, 25 bp, Homo sapien
gtcactcgggattttgtagtctcaa

SEQ ID NO: 2129516 - DNA, 25 bp, Homo sapien
gctctgggtcactcgggattttgta

SEQ ID NO: 2129517 - DNA, 25 bp, Homo sapien
caggcaagattgacggtggtctcca

SEQ ID NO: 2129518 - DNA, 25 bp, Homo sapien
gctgtccaggcaagattgacggtgg

SEQ ID NO: 2129519 - DNA, 25 bp, Homo sapien
gtccaggcaagattgacggtggtct

SEQ ID NO: 2129520 - DNA, 25 bp, Homo sapien
gcaagattgacggtggtctccaact

SEQ ID NO: 2129521 - DNA, 25 bp, Homo sapien
cttgtggccaccagcattgacgttc

SEQ ID NO: 2129522 - DNA, 25 bp, Homo sapien
aagcttgtggccaccagcattgacg

SEQ ID NO: 2129523 - DNA, 25 bp, Homo sapien
ccagcattgacgttcttgccatcca

SEQ ID NO: 2129524 - DNA, 25 bp, Homo sapien
gaaattccagtcctagaccaagctt

SEQ ID NO: 2129525 - DNA, 25 bp, Homo sapien
cctgcagaccttttggtgtaaaaga

SEQ ID NO: 2129526 - DNA, 25 bp, Homo sapien
ctgcagaccttttggtgtaaaagag

SEQ ID NO: 2129527 - DNA, 25 bp, Homo sapien
ccctgcagaccttttggtgtaaaag

SEQ ID NO: 2129528 - DNA, 25 bp, Homo sapien
accacactaattttctctgtagcat

SEQ ID NO: 2129529 - DNA, 25 bp, Homo sapien
aatattcaacacttcatgaagttgc

SEQ ID NO: 2129530 - DNA, 25 bp, Homo sapien
cttgcatagggaccacactaatttt

SEQ ID NO: 2129531 - DNA, 25 bp, Homo sapien
tgaagttgcatgtaatccttgcata

SEQ ID NO: 2129532 - DNA, 25 bp, Homo sapien
agagagctctatgccatccttttta

SEQ ID NO: 2129533 - DNA, 25 bp, Homo sapien
tacaagatgaatcattatctctgtg

SEQ ID NO: 2129534 - DNA, 25 bp, Homo sapien
caagatgaatcattatctctgtgca

SEQ ID NO: 2129535 - DNA, 25 bp, Homo sapien
gtgcagagagctctatgccatcctt

SEQ ID NO: 2129536 - DNA, 25 bp, Homo sapien
ggcggccgctcgaacgccgcgcggc

SEQ ID NO: 2129537 - DNA, 25 bp, Homo sapien
cggccgctcgaacgccgcgcggcgg

SEQ ID NO: 2129538 - DNA, 25 bp, Homo sapien
ccgctcgaacgccgcgcggcggagg

SEQ ID NO: 2129539 - DNA, 25 bp, Homo sapien
gccgctcgaacgccgcgcggcggag

SEQ ID NO: 2129540 - DNA, 25 bp, Homo sapien
ctccgcagagctgtcgggacgcagc

SEQ ID NO: 2129541 - DNA, 25 bp, Homo sapien
cagagctgtcgggacgcagcgcctt

SEQ ID NO: 2129542 - DNA, 25 bp, Homo sapien
cgggcctccgctaaacctccgcaga

SEQ ID NO: 2129543 - DNA, 25 bp, Homo sapien
gctaaacctccgcagagctgtcggg

SEQ ID NO: 2129544 - DNA, 25 bp, Homo sapien
tttgtgagttcaggtccggcagaga

SEQ ID NO: 2129545 - DNA, 25 bp, Homo sapien
gagacgaagaatgcggcctgctact

SEQ ID NO: 2129546 - DNA, 25 bp, Homo sapien
gagcgcggagagacgaagaatgcgg

SEQ ID NO: 2129547 - DNA, 25 bp, Homo sapien
ttcacttttgtgagttcaggtccgg

SEQ ID NO: 2129548 - DNA, 25 bp, Homo sapien
ttatccatctctcctagattttata

SEQ ID NO: 2129549 - DNA, 25 bp, Homo sapien
atttatccatctctcctagatttta

SEQ ID NO: 2129550 - DNA, 25 bp, Homo sapien
tatccatctctcctagattttatag

SEQ ID NO: 2129551 - DNA, 25 bp, Homo sapien
tccatctctcctagattttatagtt

SEQ ID NO: 2129552 - DNA, 25 bp, Homo sapien
gtattgtttaaaactgccctatgta

SEQ ID NO: 2129553 - DNA, 25 bp, Homo sapien
tcttcatattgattattagccataa

SEQ ID NO: 2129554 - DNA, 25 bp, Homo sapien
tcataatttggtaacatgtaccttc

SEQ ID NO: 2129555 - DNA, 25 bp, Homo sapien
aaaactgccctatgtagtttcataa

SEQ ID NO: 2129556 - DNA, 25 bp, Homo sapien
tctgtgaaatagatataatccagtg

SEQ ID NO: 2129557 - DNA, 25 bp, Homo sapien
catagtcctcattaagaattgctga

SEQ ID NO: 2129558 - DNA, 25 bp, Homo sapien
ggttctaaatttacagacagaatct

SEQ ID NO: 2129559 - DNA, 25 bp, Homo sapien
cttttcactatacttacaggcacca

SEQ ID NO: 2129560 - DNA, 25 bp, Homo sapien
ctgtatttgcctttgttcttcccgt

SEQ ID NO: 2129561 - DNA, 25 bp, Homo sapien
ggctttctcctgtatttgcctttgt

SEQ ID NO: 2129562 - DNA, 25 bp, Homo sapien
tctcctgtatttgcctttgttcttc

SEQ ID NO: 2129563 - DNA, 25 bp, Homo sapien
tcctgtatttgcctttgttcttccc

SEQ ID NO: 2129564 - DNA, 25 bp, Homo sapien
gagaacacttctcccaaccatactt

SEQ ID NO: 2129565 - DNA, 25 bp, Homo sapien
acttctcccaaccatacttcagttt

SEQ ID NO: 2129566 - DNA, 25 bp, Homo sapien
cctcctctgccaccggcttttctcg

SEQ ID NO: 2129567 - DNA, 25 bp, Homo sapien
tctgccaccggcttttctcggggaa

SEQ ID NO: 2129568 - DNA, 25 bp, Homo sapien
taaggtttaggatggtcttgcatgc

SEQ ID NO: 2129569 - DNA, 25 bp, Homo sapien
tacaaacagccatagcgctgggctg

SEQ ID NO: 2129570 - DNA, 25 bp, Homo sapien
tatagagagctacaacaatgcccaa

SEQ ID NO: 2129571 - DNA, 25 bp, Homo sapien
gaatctcttgaaaggtgtctccatg

SEQ ID NO: 2129572 - DNA, 25 bp, Homo sapien
tcggagtcccgctgaattcttcgta

SEQ ID NO: 2129573 - DNA, 25 bp, Homo sapien
tgctattacacatttccctcggagt

SEQ ID NO: 2129574 - DNA, 25 bp, Homo sapien
ttcttcgtatacctcctccaagtgg

SEQ ID NO: 2129575 - DNA, 25 bp, Homo sapien
tccaagtgggataacggtatagctc

SEQ ID NO: 2129576 - DNA, 25 bp, Homo sapien
aggctgtttgcatcaattctatttt

SEQ ID NO: 2129577 - DNA, 25 bp, Homo sapien
ccgcctccgcctttagcagcttcca

SEQ ID NO: 2129578 - DNA, 25 bp, Homo sapien
ccgcctttagcagcttccaccgagc

SEQ ID NO: 2129579 - DNA, 25 bp, Homo sapien
cttccaccgagctctctaagcgctg

SEQ ID NO: 2129580 - DNA, 25 bp, Homo sapien
gctctctaagcgctgcagttccagc

SEQ ID NO: 2129581 - DNA, 25 bp, Homo sapien
cagcggctgcggttgtttgggtcct

SEQ ID NO: 2129582 - DNA, 25 bp, Homo sapien
ctaggggctgaaacagcggttggca

SEQ ID NO: 2129583 - DNA, 25 bp, Homo sapien
cggctgcggttgtttgggtcctgaa

SEQ ID NO: 2129584 - DNA, 25 bp, Homo sapien
ctgcggttgtttgggtcctgaaaag

SEQ ID NO: 2129585 - DNA, 25 bp, Homo sapien
agatgcaatatatacacggatcacc

SEQ ID NO: 2129586 - DNA, 25 bp, Homo sapien
atgcaatatatacacggatcaccat

SEQ ID NO: 2129587 - DNA, 25 bp, Homo sapien
gatgcaatatatacacggatcacca

SEQ ID NO: 2129588 - DNA, 25 bp, Homo sapien
accctaaagaccgtatagcaccatc

SEQ ID NO: 2129589 - DNA, 25 bp, Homo sapien
aaccctaaagaccgtatagcaccat

SEQ ID NO: 2129590 - DNA, 25 bp, Homo sapien
taaccctaaagaccgtatagcacca

SEQ ID NO: 2129591 - DNA, 25 bp, Homo sapien
attacaatgcctcggtaggcctcca

SEQ ID NO: 2129592 - DNA, 25 bp, Homo sapien
cagaagtgcactcctccttgtctca

SEQ ID NO: 2129593 - DNA, 25 bp, Homo sapien
caatccccaccagttacagcatgtg

SEQ ID NO: 2129594 - DNA, 25 bp, Homo sapien
ccagaataattacaatgcctcggta

SEQ ID NO: 2129595 - DNA, 25 bp, Homo sapien
caaaacgtggcatatacctgtgtca

SEQ ID NO: 2129596 - DNA, 25 bp, Homo sapien
tataccttgacctataccagaccag

SEQ ID NO: 2129597 - DNA, 25 bp, Homo sapien
tattcccctatatgcacatgcccag

SEQ ID NO: 2129598 - DNA, 25 bp, Homo sapien
tatagacagactacttggaagctgc

SEQ ID NO: 2129599 - DNA, 25 bp, Homo sapien
gaaacatgtaaagtgggaggctagg

SEQ ID NO: 2129600 - DNA, 25 bp, Homo sapien
catgtaaagtgggaggctaggcctg

SEQ ID NO: 2129601 - DNA, 25 bp, Homo sapien
aacatgtaaagtgggaggctaggcc

SEQ ID NO: 2129602 - DNA, 25 bp, Homo sapien
aaacatgtaaagtgggaggctaggc

SEQ ID NO: 2129603 - DNA, 25 bp, Homo sapien
caggtctacctttactcttgtttca

SEQ ID NO: 2129604 - DNA, 25 bp, Homo sapien
ccaactactgaatcctttgagaagt

SEQ ID NO: 2129605 - DNA, 25 bp, Homo sapien
tagcctcaaatgatcgtcccccgct

SEQ ID NO: 2129606 - DNA, 25 bp, Homo sapien
tacctgaatcacaagaccaattatg

SEQ ID NO: 2129607 - DNA, 25 bp, Homo sapien
tgattgtaggtacccgttaatagaa

SEQ ID NO: 2129608 - DNA, 25 bp, Homo sapien
cttgattgtaggtacccgttaatag

SEQ ID NO: 2129609 - DNA, 25 bp, Homo sapien
ttgattgtaggtacccgttaataga

SEQ ID NO: 2129610 - DNA, 25 bp, Homo sapien
ccgttaatagaagtttactaggcat

SEQ ID NO: 2129611 - DNA, 25 bp, Homo sapien
cataaaagcaagctcgccaaaccat

SEQ ID NO: 2129612 - DNA, 25 bp, Homo sapien
gctcatataactgcttctgcatttt

SEQ ID NO: 2129613 - DNA, 25 bp, Homo sapien
agatctcttattacataaaagcaag

SEQ ID NO: 2129614 - DNA, 25 bp, Homo sapien
cttctgcattttaagatctcttatt

SEQ ID NO: 2129615 - DNA, 25 bp, Homo sapien
taatttgggtgcataaaagccagtc

SEQ ID NO: 2129616 - DNA, 25 bp, Homo sapien
caccagaattgtgagggacatccca

SEQ ID NO: 2129617 - DNA, 25 bp, Homo sapien
gaagacactctgagggaaagacacc

SEQ ID NO: 2129618 - DNA, 25 bp, Homo sapien
ccaagacagcgtatttgagcatgcc

SEQ ID NO: 2129619 - DNA, 25 bp, Homo sapien
taactgacagcaaacgggtattgga

SEQ ID NO: 2129620 - DNA, 25 bp, Homo sapien
ggcaaacaggtataactgacagcaa

SEQ ID NO: 2129621 - DNA, 25 bp, Homo sapien
caaacgggtattggattctgcccat

SEQ ID NO: 2129622 - DNA, 25 bp, Homo sapien
ctgagcatctgactaactggcaaac

SEQ ID NO: 2129623 - DNA, 25 bp, Homo sapien
atcatacctgaagggctccccatga

SEQ ID NO: 2129624 - DNA, 25 bp, Homo sapien
ccacatggtaatcatcatacctgaa

SEQ ID NO: 2129625 - DNA, 25 bp, Homo sapien
tcatcatacctgaagggctccccat

SEQ ID NO: 2129626 - DNA, 25 bp, Homo sapien
tggtgggtccacatggtaatcatca

SEQ ID NO: 2129627 - DNA, 25 bp, Homo sapien
agcaagccctcaaatgcaggaaaga

SEQ ID NO: 2129628 - DNA, 25 bp, Homo sapien
cacacaatgccccaattcaacttat

SEQ ID NO: 2129629 - DNA, 25 bp, Homo sapien
tcataatcctttggcagattgttca

SEQ ID NO: 2129630 - DNA, 25 bp, Homo sapien
gtgaagcaagccctcaaatgcagga

SEQ ID NO: 2129631 - DNA, 25 bp, Homo sapien
cctagagttctcgtgacagatgttc

SEQ ID NO: 2129632 - DNA, 25 bp, Homo sapien
gcattaaagtgtaatctaagatttc

SEQ ID NO: 2129633 - DNA, 25 bp, Homo sapien
cctggctccctagagttctcgtgac

SEQ ID NO: 2129634 - DNA, 25 bp, Homo sapien
gcagcattaaagtgtaatctaagat

SEQ ID NO: 2129635 - DNA, 25 bp, Homo sapien
tggagagtaatgaccaagtatttct

SEQ ID NO: 2129636 - DNA, 25 bp, Homo sapien
cagttggagagtaatgaccaagtat

SEQ ID NO: 2129637 - DNA, 25 bp, Homo sapien
catcagttggagagtaatgaccaag

SEQ ID NO: 2129638 - DNA, 25 bp, Homo sapien
cagccatcagttggagagtaatgac

SEQ ID NO: 2129639 - DNA, 25 bp, Homo sapien
tcttcattggctgcaatatcttttt

SEQ ID NO: 2129640 - DNA, 25 bp, Homo sapien
ccgcgatactggctttcattgaaaa

SEQ ID NO: 2129641 - DNA, 25 bp, Homo sapien
catccacttccgattctcttcattg

SEQ ID NO: 2129642 - DNA, 25 bp, Homo sapien
ggtaacctgtggctggtcgactatt

SEQ ID NO: 2129643 - DNA, 25 bp, Homo sapien
gactggtcgacagaatcatctacct

SEQ ID NO: 2129644 - DNA, 25 bp, Homo sapien
gaatcatctacctccttggggacag

SEQ ID NO: 2129645 - DNA, 25 bp, Homo sapien
ttcagaatgacctgactggtcgaca

SEQ ID NO: 2129646 - DNA, 25 bp, Homo sapien
gagagactaacttccataatactag

SEQ ID NO: 2129647 - DNA, 25 bp, Homo sapien
tcaagcctaagaaggcatacactgc

SEQ ID NO: 2129648 - DNA, 25 bp, Homo sapien
cctaagaaggcatacactgcattat

SEQ ID NO: 2129649 - DNA, 25 bp, Homo sapien
gcctaagaaggcatacactgcatta

SEQ ID NO: 2129650 - DNA, 25 bp, Homo sapien
ctgtcaagcctaagaaggcatacac

SEQ ID NO: 2129651 - DNA, 25 bp, Homo sapien
atatatatctagctaggccagggaa

SEQ ID NO: 2129652 - DNA, 25 bp, Homo sapien
accatcagctgtagtattgcggaga

SEQ ID NO: 2129653 - DNA, 25 bp, Homo sapien
tcctggttggtactggcggttgtct

SEQ ID NO: 2129654 - DNA, 25 bp, Homo sapien
taggcagggccctagaacttccaag

SEQ ID NO: 2129655 - DNA, 25 bp, Homo sapien
tagagtccaacagattggtattaat

SEQ ID NO: 2129656 - DNA, 25 bp, Homo sapien
gagtccaacagattggtattaattc

SEQ ID NO: 2129657 - DNA, 25 bp, Homo sapien
atagagtccaacagattggtattaa

SEQ ID NO: 2129658 - DNA, 25 bp, Homo sapien
aatagagtccaacagattggtatta

SEQ ID NO: 2129659 - DNA, 25 bp, Homo sapien
tagtatactttctgttcatctggtt

SEQ ID NO: 2129660 - DNA, 25 bp, Homo sapien
gtatactttctgttcatctggttct

SEQ ID NO: 2129661 - DNA, 25 bp, Homo sapien
ttatttagtatactttctgttcatc

SEQ ID NO: 2129662 - DNA, 25 bp, Homo sapien
tttagtatactttctgttcatctgg

SEQ ID NO: 2129663 - DNA, 25 bp, Homo sapien
tatgaacatgcagtctctcttggag

SEQ ID NO: 2129664 - DNA, 25 bp, Homo sapien
gattgcttcaaatctcacagcagag

SEQ ID NO: 2129665 - DNA, 25 bp, Homo sapien
gaacatgcctttgccaatagagtcg

SEQ ID NO: 2129666 - DNA, 25 bp, Homo sapien
taaagctaacgaggacatttctctg

SEQ ID NO: 2129667 - DNA, 25 bp, Homo sapien
tgtgccattaaccaaacccacttct

SEQ ID NO: 2129668 - DNA, 25 bp, Homo sapien
gggtatccataactccaatatgtat

SEQ ID NO: 2129669 - DNA, 25 bp, Homo sapien
gtggtgatcgtctctctgttcttgg

SEQ ID NO: 2129670 - DNA, 25 bp, Homo sapien
tacagtgtggcaacaaacatgagat

SEQ ID NO: 2129671 - DNA, 25 bp, Homo sapien
ccagcccatgagtgcagttgccaag

SEQ ID NO: 2129672 - DNA, 25 bp, Homo sapien
taggagcacttacctaatgcctgta

SEQ ID NO: 2129673 - DNA, 25 bp, Homo sapien
gagctgcaggatcagagttgcccaa

SEQ ID NO: 2129674 - DNA, 25 bp, Homo sapien
acatcccttgcatgagtgtgccctg

SEQ ID NO: 2129675 - DNA, 25 bp, Homo sapien
catatcaatgatccaacacaaagtc

SEQ ID NO: 2129676 - DNA, 25 bp, Homo sapien
agggaagaaattcaagctgactgca

SEQ ID NO: 2129677 - DNA, 25 bp, Homo sapien
caaagaaatggtctgaaattgcatc

SEQ ID NO: 2129678 - DNA, 25 bp, Homo sapien
ggagcaaagggttcaagatgtagcc

SEQ ID NO: 2129679 - DNA, 25 bp, Homo sapien
accacaaaagcagtatggaggaaac

SEQ ID NO: 2129680 - DNA, 25 bp, Homo sapien
taccacaaaagcagtatggaggaaa

SEQ ID NO: 2129681 - DNA, 25 bp, Homo sapien
acaaaagcagtatggaggaaactgc

SEQ ID NO: 2129682 - DNA, 25 bp, Homo sapien
tgcaaaagtgaaaacgccggataaa

SEQ ID NO: 2129683 - DNA, 25 bp, Homo sapien
aataacgaaatatactactgactca

SEQ ID NO: 2129684 - DNA, 25 bp, Homo sapien
aaataacgaaatatactactgactc

SEQ ID NO: 2129685 - DNA, 25 bp, Homo sapien
taacgaaatatactactgactcatt

SEQ ID NO: 2129686 - DNA, 25 bp, Homo sapien
aaaataacgaaatatactactgact

SEQ ID NO: 2129687 - DNA, 25 bp, Homo sapien
tgtattttagtcagactacattagt

SEQ ID NO: 2129688 - DNA, 25 bp, Homo sapien
gctgctttgcttgcacttctgcttc

SEQ ID NO: 2129689 - DNA, 25 bp, Homo sapien
tcatgcttgctgctttgcttgcact

SEQ ID NO: 2129690 - DNA, 25 bp, Homo sapien
catgcttgctgctttgcttgcactt

SEQ ID NO: 2129691 - DNA, 25 bp, Homo sapien
cttgctgctttgcttgcacttctgc

SEQ ID NO: 2129692 - DNA, 25 bp, Homo sapien
cattggtgtatacaggatggcttgg

SEQ ID NO: 2129693 - DNA, 25 bp, Homo sapien
gatggcttggcaggtaacaacacta

SEQ ID NO: 2129694 - DNA, 25 bp, Homo sapien
tacacttaagttgccatagtaatgg

SEQ ID NO: 2129695 - DNA, 25 bp, Homo sapien
catgtgaaaacccaactaatctatt

SEQ ID NO: 2129696 - DNA, 25 bp, Homo sapien
taatgaggcaacttaggaatgagag

SEQ ID NO: 2129697 - DNA, 25 bp, Homo sapien
ggtacatattcttgttcatgaaaat

SEQ ID NO: 2129698 - DNA, 25 bp, Homo sapien
taatcgcagtaatatagcatcaaaa

SEQ ID NO: 2129699 - DNA, 25 bp, Homo sapien
tgcaagaactttttaatcgcagtaa

SEQ ID NO: 2129700 - DNA, 25 bp, Homo sapien
gatatatcattccatcatagctgtg

SEQ ID NO: 2129701 - DNA, 25 bp, Homo sapien
tttcactgaggcaaggaacttggat

SEQ ID NO: 2129702 - DNA, 25 bp, Homo sapien
ggaaatgatcgccaacctgttttat

SEQ ID NO: 2129703 - DNA, 25 bp, Homo sapien
gcttacttggcatcccactttcatg

SEQ ID NO: 2129704 - DNA, 25 bp, Homo sapien
tattcttcataaacatcagctaaaa

SEQ ID NO: 2129705 - DNA, 25 bp, Homo sapien
attcttcataaacatcagctaaaaa

SEQ ID NO: 2129706 - DNA, 25 bp, Homo sapien
ctattcttcataaacatcagctaaa

SEQ ID NO: 2129707 - DNA, 25 bp, Homo sapien
taagactgagttttttgatgaccca

SEQ ID NO: 2129708 - DNA, 25 bp, Homo sapien
tacattcccaaagcatagcatcgtg

SEQ ID NO: 2129709 - DNA, 25 bp, Homo sapien
gaaaatggttccgttcagcctcact

SEQ ID NO: 2129710 - DNA, 25 bp, Homo sapien
tgcagcattcagtaagaccaggatg

SEQ ID NO: 2129711 - DNA, 25 bp, Homo sapien
actcctgggcgcatgtgaccctatt

SEQ ID NO: 2129712 - DNA, 25 bp, Homo sapien
cgcatgtgaccctattgccttggcc

SEQ ID NO: 2129713 - DNA, 25 bp, Homo sapien
gggcgcatgtgaccctattgccttg

SEQ ID NO: 2129714 - DNA, 25 bp, Homo sapien
tcaatctcctggaccctactgaccc

SEQ ID NO: 2129715 - DNA, 25 bp, Homo sapien
tgacaggccccaaataccgtatatt

SEQ ID NO: 2129716 - DNA, 25 bp, Homo sapien
tgtacactgaaatctgggaaccaat

SEQ ID NO: 2129717 - DNA, 25 bp, Homo sapien
tctatcatgttgaatggcaagtcca

SEQ ID NO: 2129718 - DNA, 25 bp, Homo sapien
cacagggagggtaaatacttcttag

SEQ ID NO: 2129719 - DNA, 25 bp, Homo sapien
ttttcagtcttcttacatgtaaatg

SEQ ID NO: 2129720 - DNA, 25 bp, Homo sapien
ttgctacagttgtctcatccacaga

SEQ ID NO: 2129721 - DNA, 25 bp, Homo sapien
tacagttgtctcatccacagatttt

SEQ ID NO: 2129722 - DNA, 25 bp, Homo sapien
tccatcttagcagaggaaagtgaat

SEQ ID NO: 2129723 - DNA, 25 bp, Homo sapien
ctttgaaatgggcaacgcaactgac

SEQ ID NO: 2129724 - DNA, 25 bp, Homo sapien
tgtgttccgtaaagcagcctgaatc

SEQ ID NO: 2129725 - DNA, 25 bp, Homo sapien
cacatcgtcacctccaatctgtagg

SEQ ID NO: 2129726 - DNA, 25 bp, Homo sapien
gcctgaatcacacatgttcctcaca

SEQ ID NO: 2129727 - DNA, 25 bp, Homo sapien
cacaaccaggatctatataaatcta

SEQ ID NO: 2129728 - DNA, 25 bp, Homo sapien
tgaggtaggtaatgtctctagaggc

SEQ ID NO: 2129729 - DNA, 25 bp, Homo sapien
tctagaggcccaatgacaggagaat

SEQ ID NO: 2129730 - DNA, 25 bp, Homo sapien
gtattaagcatagaattagagaggg

SEQ ID NO: 2129731 - DNA, 25 bp, Homo sapien
cacctttctttccatataagtatta

SEQ ID NO: 2129732 - DNA, 25 bp, Homo sapien
gttctttccacacatgagactccaa

SEQ ID NO: 2129733 - DNA, 25 bp, Homo sapien
agttgttctttccacacatgagact

SEQ ID NO: 2129734 - DNA, 25 bp, Homo sapien
acatgagactccaacatccttttct

SEQ ID NO: 2129735 - DNA, 25 bp, Homo sapien
tttccacacatgagactccaacatc

SEQ ID NO: 2129736 - DNA, 25 bp, Homo sapien
cagacaccacaaaatctatgatgac

SEQ ID NO: 2129737 - DNA, 25 bp, Homo sapien
gcctctcctgtcaagcaactatgat

SEQ ID NO: 2129738 - DNA, 25 bp, Homo sapien
gacattcggcatcagtccagtataa

SEQ ID NO: 2129739 - DNA, 25 bp, Homo sapien
tagctgggtgcgtaaattttctgac

SEQ ID NO: 2129740 - DNA, 25 bp, Homo sapien
tagtcctaaagtaatgcctctcctg

SEQ ID NO: 2129741 - DNA, 25 bp, Homo sapien
taagtgaacgagaggatgggcggtc

SEQ ID NO: 2129742 - DNA, 25 bp, Homo sapien
ttcactaacagctggagaggtctct

SEQ ID NO: 2129743 - DNA, 25 bp, Homo sapien
tctcacatctagtaagtgaacgaga

SEQ ID NO: 2129744 - DNA, 25 bp, Homo sapien
tgttcactaacagctggagaggtct

SEQ ID NO: 2129745 - DNA, 25 bp, Homo sapien
ttccagtaatattgtccccagtgtc

SEQ ID NO: 2129746 - DNA, 25 bp, Homo sapien
tcttctatcccagccagcaaatgat

SEQ ID NO: 2129747 - DNA, 25 bp, Homo sapien
ccagtgtcctgatatatcttctatc

SEQ ID NO: 2129748 - DNA, 25 bp, Homo sapien
tccagtaatattgtccccagtgtcc

SEQ ID NO: 2129749 - DNA, 25 bp, Homo sapien
tcattttctattgaggccacacaga

SEQ ID NO: 2129750 - DNA, 25 bp, Homo sapien
gttgtctcagatttgtagtgtcccc

SEQ ID NO: 2129751 - DNA, 25 bp, Homo sapien
caatgaacagtacaaaagcgttact

SEQ ID NO: 2129752 - DNA, 25 bp, Homo sapien
ccttctctgctacataactgtgatt

SEQ ID NO: 2129753 - DNA, 25 bp, Homo sapien
gttttggtgagatctgccgcactat

SEQ ID NO: 2129754 - DNA, 25 bp, Homo sapien
gagcagcaaggaggatacttgtatg

SEQ ID NO: 2129755 - DNA, 25 bp, Homo sapien
aatttgagcagcctctagttttggt

SEQ ID NO: 2129756 - DNA, 25 bp, Homo sapien
tacttgtatggatgggatctaccac

SEQ ID NO: 2129757 - DNA, 25 bp, Homo sapien
tgtattccaaaattttagtcaccat

SEQ ID NO: 2129758 - DNA, 25 bp, Homo sapien
tgatgtattccaaaattttagtcac

SEQ ID NO: 2129759 - DNA, 25 bp, Homo sapien
gatgtattccaaaattttagtcacc

SEQ ID NO: 2129760 - DNA, 25 bp, Homo sapien
ctttgatgtattccaaaattttagt

SEQ ID NO: 2129761 - DNA, 25 bp, Homo sapien
ctattgatcccaaacgaaatcacaa

SEQ ID NO: 2129762 - DNA, 25 bp, Homo sapien
aatactgagccgtattaaatacttt

SEQ ID NO: 2129763 - DNA, 25 bp, Homo sapien
aaacgaaatcacaagttagaatcac

SEQ ID NO: 2129764 - DNA, 25 bp, Homo sapien
gatcccaaacgaaatcacaagttag

SEQ ID NO: 2129765 - DNA, 25 bp, Homo sapien
aagttgatgaaagtactataagaac

SEQ ID NO: 2129766 - DNA, 25 bp, Homo sapien
catttccattataagtccaactcat

SEQ ID NO: 2129767 - DNA, 25 bp, Homo sapien
tcatttccattataagtccaactca

SEQ ID NO: 2129768 - DNA, 25 bp, Homo sapien
atgctgtatttcacaaagcctgttt

SEQ ID NO: 2129769 - DNA, 25 bp, Homo sapien
tgcttttatttgcatgtcggtcaag

SEQ ID NO: 2129770 - DNA, 25 bp, Homo sapien
ttatttgcatgtcggtcaagacata

SEQ ID NO: 2129771 - DNA, 25 bp, Homo sapien
cttttatttgcatgtcggtcaagac

SEQ ID NO: 2129772 - DNA, 25 bp, Homo sapien
ttgcatgtcggtcaagacatatttg

SEQ ID NO: 2129773 - DNA, 25 bp, Homo sapien
tcaatagccaaaatgagagagtaaa

SEQ ID NO: 2129774 - DNA, 25 bp, Homo sapien
caatagccaaaatgagagagtaaag

SEQ ID NO: 2129775 - DNA, 25 bp, Homo sapien
tagccaaaatgagagagtaaagtat

SEQ ID NO: 2129776 - DNA, 25 bp, Homo sapien
aatagccaaaatgagagagtaaagt

SEQ ID NO: 2129777 - DNA, 25 bp, Homo sapien
gccatcaccacaatgggcctgacag

SEQ ID NO: 2129778 - DNA, 25 bp, Homo sapien
catcaccacaatgggcctgacagct

SEQ ID NO: 2129779 - DNA, 25 bp, Homo sapien
tgccatcaccacaatgggcctgaca

SEQ ID NO: 2129780 - DNA, 25 bp, Homo sapien
actgccatcaccacaatgggcctga

SEQ ID NO: 2129781 - DNA, 25 bp, Homo sapien
caaactggaaatcagggacatattt

SEQ ID NO: 2129782 - DNA, 25 bp, Homo sapien
aactggaaatcagggacatatttaa

SEQ ID NO: 2129783 - DNA, 25 bp, Homo sapien
ggaaatcagggacatatttaacaaa

SEQ ID NO: 2129784 - DNA, 25 bp, Homo sapien
ctggaaatcagggacatatttaaca

SEQ ID NO: 2129785 - DNA, 25 bp, Homo sapien
caagggtgatagtggagcttgaaga

SEQ ID NO: 2129786 - DNA, 25 bp, Homo sapien
gtcagcgtctttggcaagggtgata

SEQ ID NO: 2129787 - DNA, 25 bp, Homo sapien
tctttggcaagggtgatagtggagc

SEQ ID NO: 2129788 - DNA, 25 bp, Homo sapien
cagcgtctttggcaagggtgatagt

SEQ ID NO: 2129789 - DNA, 25 bp, Homo sapien
ccaacatatggcagtctgaaatgca

SEQ ID NO: 2129790 - DNA, 25 bp, Homo sapien
cactgactgagctatttggctgatc

SEQ ID NO: 2129791 - DNA, 25 bp, Homo sapien
atttggctgatcttcgcaaggctcc

SEQ ID NO: 2129792 - DNA, 25 bp, Homo sapien
acctgggaacactgactgagctatt

SEQ ID NO: 2129793 - DNA, 25 bp, Homo sapien
ctgtcccttcactgatttgtacatc

SEQ ID NO: 2129794 - DNA, 25 bp, Homo sapien
tcactgatttgtacatcaaaagccc

SEQ ID NO: 2129795 - DNA, 25 bp, Homo sapien
caaaagccctacgatgcctttctac

SEQ ID NO: 2129796 - DNA, 25 bp, Homo sapien
catcaaaagccctacgatgcctttc

SEQ ID NO: 2129797 - DNA, 25 bp, Homo sapien
ttgctcacatcttcccttgactagg

SEQ ID NO: 2129798 - DNA, 25 bp, Homo sapien
atgggaaaagagcagtatttggaca

SEQ ID NO: 2129799 - DNA, 25 bp, Homo sapien
ttggacaggagtgtaccactcctct

SEQ ID NO: 2129800 - DNA, 25 bp, Homo sapien
cctctaggtacagttgctcacatct

SEQ ID NO: 2129801 - DNA, 25 bp, Homo sapien
tgtttttatagtgactggtactggt

SEQ ID NO: 2129802 - DNA, 25 bp, Homo sapien
cgttctttactagatgtgttcacaa

SEQ ID NO: 2129803 - DNA, 25 bp, Homo sapien
tgtatgacacgttctttactagatg

SEQ ID NO: 2129804 - DNA, 25 bp, Homo sapien
gacacgttctttactagatgtgttc

SEQ ID NO: 2129805 - DNA, 25 bp, Homo sapien
tatgacacgttctttactagatgtg

SEQ ID NO: 2129806 - DNA, 25 bp, Homo sapien
cgataggccttgatgttcaggccca

SEQ ID NO: 2129807 - DNA, 25 bp, Homo sapien
gataggccttgatgttcaggcccag

SEQ ID NO: 2129808 - DNA, 25 bp, Homo sapien
cagccgataggccttgatgttcagg

SEQ ID NO: 2129809 - DNA, 25 bp, Homo sapien
gccgataggccttgatgttcaggcc

SEQ ID NO: 2129810 - DNA, 25 bp, Homo sapien
aaggtgccttgtaatgttaggcata

SEQ ID NO: 2129811 - DNA, 25 bp, Homo sapien
aggtgccttgtaatgttaggcataa

SEQ ID NO: 2129812 - DNA, 25 bp, Homo sapien
caaggtgccttgtaatgttaggcat

SEQ ID NO: 2129813 - DNA, 25 bp, Homo sapien
gattgttcccacatgtagtatacta

SEQ ID NO: 2129814 - DNA, 25 bp, Homo sapien
tgctctcccttgaggactgtagctg

SEQ ID NO: 2129815 - DNA, 25 bp, Homo sapien
tctcccttgaggactgtagctgctt

SEQ ID NO: 2129816 - DNA, 25 bp, Homo sapien
gtctgcctctgattgttcccacatg

SEQ ID NO: 2129817 - DNA, 25 bp, Homo sapien
ctggtcatcagttggcggtggcctt

SEQ ID NO: 2129818 - DNA, 25 bp, Homo sapien
tggtcatcagttggcggtggccttt

SEQ ID NO: 2129819 - DNA, 25 bp, Homo sapien
cagttcgaagcgatgtctggtcatc

SEQ ID NO: 2129820 - DNA, 25 bp, Homo sapien
cgaagcgatgtctggtcatcagttg

SEQ ID NO: 2129821 - DNA, 25 bp, Homo sapien
gacactgttgctcacatcttcttgg

SEQ ID NO: 2129822 - DNA, 25 bp, Homo sapien
ttatcacctcttcgatgtggaaact

SEQ ID NO: 2129823 - DNA, 25 bp, Homo sapien
ctattactggctcctcattatcacc

SEQ ID NO: 2129824 - DNA, 25 bp, Homo sapien
ggtctctattactggctcctcatta

SEQ ID NO: 2129825 - DNA, 25 bp, Homo sapien
ggctgaatagtgttgacaatgatga

SEQ ID NO: 2129826 - DNA, 25 bp, Homo sapien
ttgaactgcttactgttagaaagag

SEQ ID NO: 2129827 - DNA, 25 bp, Homo sapien
tgtatcattcttaatcacggctggc

SEQ ID NO: 2129828 - DNA, 25 bp, Homo sapien
aactaacgtttacattggctgaata

SEQ ID NO: 2129829 - DNA, 25 bp, Homo sapien
catctcttttaatgccgattttcaa

SEQ ID NO: 2129830 - DNA, 25 bp, Homo sapien
atctcttttaatgccgattttcaaa

SEQ ID NO: 2129831 - DNA, 25 bp, Homo sapien
tctcttttaatgccgattttcaaaa

SEQ ID NO: 2129832 - DNA, 25 bp, Homo sapien
tcactaccttcagtcctcaagagag

SEQ ID NO: 2129833 - DNA, 25 bp, Homo sapien
ggcactgtgatcctcacactggcag

SEQ ID NO: 2129834 - DNA, 25 bp, Homo sapien
tcgtttcacctcaggatggcttcca

SEQ ID NO: 2129835 - DNA, 25 bp, Homo sapien
gccattgtcgtttcacctcaggatg

SEQ ID NO: 2129836 - DNA, 25 bp, Homo sapien
ttcttccgtctctgaggtataccat

SEQ ID NO: 2129837 - DNA, 25 bp, Homo sapien
ggttgaagctttcttccgtctctga

SEQ ID NO: 2129838 - DNA, 25 bp, Homo sapien
catgtgaatctgatgcactgactgg

SEQ ID NO: 2129839 - DNA, 25 bp, Homo sapien
tgatgcactgactggttgaagcttt

SEQ ID NO: 2129840 - DNA, 25 bp, Homo sapien
tcaggataaccatagtctgtccttc

SEQ ID NO: 2129841 - DNA, 25 bp, Homo sapien
cacatcaggataaccatagtctgtc

SEQ ID NO: 2129842 - DNA, 25 bp, Homo sapien
gataaccatagtctgtccttccatt

SEQ ID NO: 2129843 - DNA, 25 bp, Homo sapien
ttccacatcaggataaccatagtct

SEQ ID NO: 2129844 - DNA, 25 bp, Homo sapien
ttcctctggcactctagatcttcct

SEQ ID NO: 2129845 - DNA, 25 bp, Homo sapien
tcacttttgcctgaacataatatca

SEQ ID NO: 2129846 - DNA, 25 bp, Homo sapien
caatactttcattcctctggcactc

SEQ ID NO: 2129847 - DNA, 25 bp, Homo sapien
ccactaccaaaatgtatatgaaatc

SEQ ID NO: 2129848 - DNA, 25 bp, Homo sapien
cccttaatgtttgccaagtttactg

SEQ ID NO: 2129849 - DNA, 25 bp, Homo sapien
taatgtttgccaagtttactgtcag

SEQ ID NO: 2129850 - DNA, 25 bp, Homo sapien
tgtttgccaagtttactgtcagttt

SEQ ID NO: 2129851 - DNA, 25 bp, Homo sapien
cttaatgtttgccaagtttactgtc

SEQ ID NO: 2129852 - DNA, 25 bp, Homo sapien
gggtcccaccaggagttatggccat

SEQ ID NO: 2129853 - DNA, 25 bp, Homo sapien
gacttacagtggttctgccagcctg

SEQ ID NO: 2129854 - DNA, 25 bp, Homo sapien
tcacccttgggtgtggacttacagt

SEQ ID NO: 2129855 - DNA, 25 bp, Homo sapien
tctgagtccatgtggcaggcttgcc

SEQ ID NO: 2129856 - DNA, 25 bp, Homo sapien
taaaggaagggcagagctgattaac

SEQ ID NO: 2129857 - DNA, 25 bp, Homo sapien
gatccttagatatgtcacctgcaaa

SEQ ID NO: 2129858 - DNA, 25 bp, Homo sapien
ggaatacaaaatggaatagctctga

SEQ ID NO: 2129859 - DNA, 25 bp, Homo sapien
gcctttgggcctaattttgccactg

SEQ ID NO: 2129860 - DNA, 25 bp, Homo sapien
ggtgctgtccctcaacgcagcaaac

SEQ ID NO: 2129861 - DNA, 25 bp, Homo sapien
caaaggtgctgtccctcaacgcagc

SEQ ID NO: 2129862 - DNA, 25 bp, Homo sapien
gcagtgctaggggtcaaacacacaa

SEQ ID NO: 2129863 - DNA, 25 bp, Homo sapien
agcagcagtgctaggggtcaaacac

SEQ ID NO: 2129864 - DNA, 25 bp, Homo sapien
caagttattggacttttggctaaga

SEQ ID NO: 2129865 - DNA, 25 bp, Homo sapien
agttattggacttttggctaagaag

SEQ ID NO: 2129866 - DNA, 25 bp, Homo sapien
tggacttttggctaagaaggacaaa

SEQ ID NO: 2129867 - DNA, 25 bp, Homo sapien
tattggacttttggctaagaaggac

SEQ ID NO: 2129868 - DNA, 25 bp, Homo sapien
tctctgaaaacattaacttttggta

SEQ ID NO: 2129869 - DNA, 25 bp, Homo sapien
tacaaactaatagtgacttatatat

SEQ ID NO: 2129870 - DNA, 25 bp, Homo sapien
tgttataacccactgtggaaagtgg

SEQ ID NO: 2129871 - DNA, 25 bp, Homo sapien
ggaaagtggccaacattattatccc

SEQ ID NO: 2129872 - DNA, 25 bp, Homo sapien
taaatcaattatgcctttcttaaca

SEQ ID NO: 2129873 - DNA, 25 bp, Homo sapien
gcttgagtcacaactctagtgttgc

SEQ ID NO: 2129874 - DNA, 25 bp, Homo sapien
tagaatgcagtagattggattagct

SEQ ID NO: 2129875 - DNA, 25 bp, Homo sapien
caattatgcctttcttaacacagtc

SEQ ID NO: 2129876 - DNA, 25 bp, Homo sapien
atatatgatcacctttactttgtag

SEQ ID NO: 2129877 - DNA, 25 bp, Homo sapien
tatgatcacctttactttgtagttt

SEQ ID NO: 2129878 - DNA, 25 bp, Homo sapien
tttccttcagttcattgtgtgccat

SEQ ID NO: 2129879 - DNA, 25 bp, Homo sapien
ttttccttcagttcattgtgtgcca

SEQ ID NO: 2129880 - DNA, 25 bp, Homo sapien
tcacatttgctttctgctgacttct

SEQ ID NO: 2129881 - DNA, 25 bp, Homo sapien
ttaggcattgccatcactgactttg

SEQ ID NO: 2129882 - DNA, 25 bp, Homo sapien
attgccatcactgactttgtcacat

SEQ ID NO: 2129883 - DNA, 25 bp, Homo sapien
catcactgactttgtcacatttgct

SEQ ID NO: 2129884 - DNA, 25 bp, Homo sapien
agcaagcaaggggtatgtcaaaggg

SEQ ID NO: 2129885 - DNA, 25 bp, Homo sapien
caagcaaggggtatgtcaaaggggc

SEQ ID NO: 2129886 - DNA, 25 bp, Homo sapien
gcaaggggtatgtcaaaggggctgc

SEQ ID NO: 2129887 - DNA, 25 bp, Homo sapien
caaggggtatgtcaaaggggctgca

SEQ ID NO: 2129888 - DNA, 25 bp, Homo sapien
taaaaatccggcctattggagatgt

SEQ ID NO: 2129889 - DNA, 25 bp, Homo sapien
ttggagatgtcctcagcaaggttct

SEQ ID NO: 2129890 - DNA, 25 bp, Homo sapien
aatccggcctattggagatgtcctc

SEQ ID NO: 2129891 - DNA, 25 bp, Homo sapien
cctcagcaaggttctcttggtcatt

SEQ ID NO: 2129892 - DNA, 25 bp, Homo sapien
gcaggtggtacatgaacaagtagct

SEQ ID NO: 2129893 - DNA, 25 bp, Homo sapien
tagtgatagtgttgccctaactagg

SEQ ID NO: 2129894 - DNA, 25 bp, Homo sapien
gaaatccagtattcagtagtgacta

SEQ ID NO: 2129895 - DNA, 25 bp, Homo sapien
gatggatagtggtgacagttgctca

SEQ ID NO: 2129896 - DNA, 25 bp, Homo sapien
gtgtcagtagcaaatgcttcaacat

SEQ ID NO: 2129897 - DNA, 25 bp, Homo sapien
atcagctccaacttaaagttctttc

SEQ ID NO: 2129898 - DNA, 25 bp, Homo sapien
tttagttcttactgtgtcagtagca

SEQ ID NO: 2129899 - DNA, 25 bp, Homo sapien
ttcagtagattattttagttcttac

SEQ ID NO: 2129900 - DNA, 25 bp, Homo sapien
gctgttttccaaatgtccgatgtat

SEQ ID NO: 2129901 - DNA, 25 bp, Homo sapien
ttttccaaatgtccgatgtatgcca

SEQ ID NO: 2129902 - DNA, 25 bp, Homo sapien
tgttttccaaatgtccgatgtatgc

SEQ ID NO: 2129903 - DNA, 25 bp, Homo sapien
ctgctgttttccaaatgtccgatgt

SEQ ID NO: 2129904 - DNA, 25 bp, Homo sapien
gcataaaaactcaggtatcagaaag

SEQ ID NO: 2129905 - DNA, 25 bp, Homo sapien
tgatcgctgtagcttctcaaatggt

SEQ ID NO: 2129906 - DNA, 25 bp, Homo sapien
cagtggcttgatcgctgtagcttct

SEQ ID NO: 2129907 - DNA, 25 bp, Homo sapien
caaatggtcattagatgttttagag

SEQ ID NO: 2129908 - DNA, 25 bp, Homo sapien
tggtaacctcttggtctgccacact

SEQ ID NO: 2129909 - DNA, 25 bp, Homo sapien
aactctgacactagtccttccagtg

SEQ ID NO: 2129910 - DNA, 25 bp, Homo sapien
gataagccgccagttaattcttgac

SEQ ID NO: 2129911 - DNA, 25 bp, Homo sapien
tccagtgctttgagtgaggaaaagc

SEQ ID NO: 2129912 - DNA, 25 bp, Homo sapien
gcagaaattattcccttggataagc

SEQ ID NO: 2129913 - DNA, 25 bp, Homo sapien
gtaaattttgtactaagctcatttg

SEQ ID NO: 2129914 - DNA, 25 bp, Homo sapien
tgtactaagctcatttgtctttgtc

SEQ ID NO: 2129915 - DNA, 25 bp, Homo sapien
aattttgtactaagctcatttgtct

SEQ ID NO: 2129916 - DNA, 25 bp, Homo sapien
taagctcatttgtctttgtcggcat

SEQ ID NO: 2129917 - DNA, 25 bp, Homo sapien
tttgtattcattctggtagaaaaca

SEQ ID NO: 2129918 - DNA, 25 bp, Homo sapien
ttttgtattcattctggtagaaaac

SEQ ID NO: 2129919 - DNA, 25 bp, Homo sapien
aaaacaaggatgcaagttacttggc

SEQ ID NO: 2129920 - DNA, 25 bp, Homo sapien
ataaaagctgctatcgaagctatgg

SEQ ID NO: 2129921 - DNA, 25 bp, Homo sapien
aagctgctatcgaagctatggtttc

SEQ ID NO: 2129922 - DNA, 25 bp, Homo sapien
tatcgaagctatggtttctgctgct

SEQ ID NO: 2129923 - DNA, 25 bp, Homo sapien
gctatcgaagctatggtttctgctg

SEQ ID NO: 2129924 - DNA, 25 bp, Homo sapien
catgcatgctggaaagtacttaaca

SEQ ID NO: 2129925 - DNA, 25 bp, Homo sapien
agaagcatctggataactttctttc

SEQ ID NO: 2129926 - DNA, 25 bp, Homo sapien
tcatgcatgctggaaagtacttaac

SEQ ID NO: 2129927 - DNA, 25 bp, Homo sapien
tataaagaagcatctggataacttt

SEQ ID NO: 2129928 - DNA, 25 bp, Homo sapien
tataaatggactaaattctgcaatt

SEQ ID NO: 2129929 - DNA, 25 bp, Homo sapien
aatataaatggactaaattctgcaa

SEQ ID NO: 2129930 - DNA, 25 bp, Homo sapien
ttaaatataaatggactaaattctg

SEQ ID NO: 2129931 - DNA, 25 bp, Homo sapien
taaatataaatggactaaattctgc

SEQ ID NO: 2129932 - DNA, 25 bp, Homo sapien
catgtacctttcagcagctgacaca

SEQ ID NO: 2129933 - DNA, 25 bp, Homo sapien
cagggaacctgcatcctttaggagg

SEQ ID NO: 2129934 - DNA, 25 bp, Homo sapien
tgcagtcaagccagggatatcaggc

SEQ ID NO: 2129935 - DNA, 25 bp, Homo sapien
aggcatcccttggtgctcccctgga

SEQ ID NO: 2129936 - DNA, 25 bp, Homo sapien
cctggaccgctctgttctgaagtgg

SEQ ID NO: 2129937 - DNA, 25 bp, Homo sapien
tctctctgctctcaataacatgaat

SEQ ID NO: 2129938 - DNA, 25 bp, Homo sapien
gttttactgactcctaatccctgca

SEQ ID NO: 2129939 - DNA, 25 bp, Homo sapien
aacatgaattacttggtccgtggac

SEQ ID NO: 2129940 - DNA, 25 bp, Homo sapien
gtggactcaaccgtggtcccaatcc

SEQ ID NO: 2129941 - DNA, 25 bp, Homo sapien
tgtccaagatgctgagttgaatact

SEQ ID NO: 2129942 - DNA, 25 bp, Homo sapien
caaatttatgctgtcgggctaggca

SEQ ID NO: 2129943 - DNA, 25 bp, Homo sapien
tatgctgtcgggctaggcagctgaa

SEQ ID NO: 2129944 - DNA, 25 bp, Homo sapien
tcgggctaggcagctgaatgagttc

SEQ ID NO: 2129945 - DNA, 25 bp, Homo sapien
ctttgtagaaccgatcaagcggaag

SEQ ID NO: 2129946 - DNA, 25 bp, Homo sapien
tagaaccgatcaagcggaaggatgg

SEQ ID NO: 2129947 - DNA, 25 bp, Homo sapien
tctctttgtagaaccgatcaagcgg

SEQ ID NO: 2129948 - DNA, 25 bp, Homo sapien
cgatcaagcggaaggatgggtatta

SEQ ID NO: 2129949 - DNA, 25 bp, Homo sapien
tattgaaaataagtgatgctaattg

SEQ ID NO: 2129950 - DNA, 25 bp, Homo sapien
tggctgcaatttgtgttattgaaaa

SEQ ID NO: 2129951 - DNA, 25 bp, Homo sapien
ttgaaaataagtgatgctaattggt

SEQ ID NO: 2129952 - DNA, 25 bp, Homo sapien
aaaataagtgatgctaattggtcca

SEQ ID NO: 2129953 - DNA, 25 bp, Homo sapien
aattaggcgtttgccatttggctca

SEQ ID NO: 2129954 - DNA, 25 bp, Homo sapien
caaaattaggcgtttgccatttggc

SEQ ID NO: 2129955 - DNA, 25 bp, Homo sapien
cccttgtgacaaaattaggcgtttg

SEQ ID NO: 2129956 - DNA, 25 bp, Homo sapien
gtgacaaaattaggcgtttgccatt

SEQ ID NO: 2129957 - DNA, 25 bp, Homo sapien
tcaatgaattgagttgctctatcaa

SEQ ID NO: 2129958 - DNA, 25 bp, Homo sapien
taaaactgcaaaacgggctagttca

SEQ ID NO: 2129959 - DNA, 25 bp, Homo sapien
tactggcctaggaaggactgctaaa

SEQ ID NO: 2129960 - DNA, 25 bp, Homo sapien
tatcaattgaaaggtcataagcagg

SEQ ID NO: 2129961 - DNA, 25 bp, Homo sapien
catctgagaagaactttgttgggat

SEQ ID NO: 2129962 - DNA, 25 bp, Homo sapien
gatctgtgttccctacgtgcaggta

SEQ ID NO: 2129963 - DNA, 25 bp, Homo sapien
ggcatctgagaagaactttgttggg

SEQ ID NO: 2129964 - DNA, 25 bp, Homo sapien
ttccctacgtgcaggtaatattgaa

SEQ ID NO: 2129965 - DNA, 25 bp, Homo sapien
tgtacacccttctgaccccagagat

SEQ ID NO: 2129966 - DNA, 25 bp, Homo sapien
tgtgtttgtacacccttctgacccc

SEQ ID NO: 2129967 - DNA, 25 bp, Homo sapien
ggtgataatggagagatctttgtgg

SEQ ID NO: 2129968 - DNA, 25 bp, Homo sapien
gtttgtgtttgtacacccttctgac

SEQ ID NO: 2129969 - DNA, 25 bp, Homo sapien
tgtgttgatggtttacagactccgt

SEQ ID NO: 2129970 - DNA, 25 bp, Homo sapien
ctcagcatggctcgcagatggaatg

SEQ ID NO: 2129971 - DNA, 25 bp, Homo sapien
aattcattcgttcctcaatcttctg

SEQ ID NO: 2129972 - DNA, 25 bp, Homo sapien
cagactccgtatagtccagtgaaag

SEQ ID NO: 2129973 - DNA, 25 bp, Homo sapien
cctaaaggctgattttcctgaagag

SEQ ID NO: 2129974 - DNA, 25 bp, Homo sapien
aaggctgattttcctgaagagtcat

SEQ ID NO: 2129975 - DNA, 25 bp, Homo sapien
taaaggctgattttcctgaagagtc

SEQ ID NO: 2129976 - DNA, 25 bp, Homo sapien
cttgtgccctaaaggctgattttcc

SEQ ID NO: 2129977 - DNA, 25 bp, Homo sapien
aaataacccaatttctgctctcagg

SEQ ID NO: 2129978 - DNA, 25 bp, Homo sapien
caatttctgctctcaggccattcat

SEQ ID NO: 2129979 - DNA, 25 bp, Homo sapien
aacccaatttctgctctcaggccat

SEQ ID NO: 2129980 - DNA, 25 bp, Homo sapien
taacccaatttctgctctcaggcca

SEQ ID NO: 2129981 - DNA, 25 bp, Homo sapien
ttcctccgctttgcggtgcatagct

SEQ ID NO: 2129982 - DNA, 25 bp, Homo sapien
cagggtaaagaactcttcctccgct

SEQ ID NO: 2129983 - DNA, 25 bp, Homo sapien
cggtgcatagctcatgcaacataca

SEQ ID NO: 2129984 - DNA, 25 bp, Homo sapien
ttgcagggtaaagaactcttcctcc

SEQ ID NO: 2129985 - DNA, 25 bp, Homo sapien
gagagattggaattcttgtttgcca

SEQ ID NO: 2129986 - DNA, 25 bp, Homo sapien
gagattggaattcttgtttgccaat

SEQ ID NO: 2129987 - DNA, 25 bp, Homo sapien
gattggaattcttgtttgccaataa

SEQ ID NO: 2129988 - DNA, 25 bp, Homo sapien
gggagagattggaattcttgtttgc

SEQ ID NO: 2129989 - DNA, 25 bp, Homo sapien
ggtccaatcacatcctctagtaact

SEQ ID NO: 2129990 - DNA, 25 bp, Homo sapien
tagatactgcctattgaattcaggt

SEQ ID NO: 2129991 - DNA, 25 bp, Homo sapien
taacttcccaagtgtaacagatgcc

SEQ ID NO: 2129992 - DNA, 25 bp, Homo sapien
tcacatatttctccccatgatctgg

SEQ ID NO: 2129993 - DNA, 25 bp, Homo sapien
aatgataagacttttgcatcaagaa

SEQ ID NO: 2129994 - DNA, 25 bp, Homo sapien
tacaatcaaccttcctcttgcccat

SEQ ID NO: 2129995 - DNA, 25 bp, Homo sapien
gcgagagttgctaatcttaagccat

SEQ ID NO: 2129996 - DNA, 25 bp, Homo sapien
tgcagctgcctttgggcgagagttg

SEQ ID NO: 2129997 - DNA, 25 bp, Homo sapien
gctaaggaactcattctttactgct

SEQ ID NO: 2129998 - DNA, 25 bp, Homo sapien
tgcaatctcatttgtgcctgaaatt

SEQ ID NO: 2129999 - DNA, 25 bp, Homo sapien
gcaatctcatttgtgcctgaaattc

SEQ ID NO: 2130000 - DNA, 25 bp, Homo sapien
tgctaaggaactcattctttactgc

SEQ ID NO: 2130001 - DNA, 25 bp, Homo sapien
atcacagatcccacaacttctgtca

SEQ ID NO: 2130002 - DNA, 25 bp, Homo sapien
tgaagccaggctgcgagtacacgtt

SEQ ID NO: 2130003 - DNA, 25 bp, Homo sapien
tggatgatcgcacccagttgcaggt

SEQ ID NO: 2130004 - DNA, 25 bp, Homo sapien
ccgcttgacgtgatagacgggttcg

SEQ ID NO: 2130005 - DNA, 25 bp, Homo sapien
tgggaactccctgcaagtaatcact

SEQ ID NO: 2130006 - DNA, 25 bp, Homo sapien
ggtgagtcccccgtgttccagcatg

SEQ ID NO: 2130007 - DNA, 25 bp, Homo sapien
ccccgtgttccagcatgccgctcac

SEQ ID NO: 2130008 - DNA, 25 bp, Homo sapien
gtgagtcccccgtgttccagcatgc

SEQ ID NO: 2130009 - DNA, 25 bp, Homo sapien
gtcccccgtgttccagcatgccgct

SEQ ID NO: 2130010 - DNA, 25 bp, Homo sapien
cagaggttggcgtctcctcgtcgga

SEQ ID NO: 2130011 - DNA, 25 bp, Homo sapien
ggtgcgagcccagttcgccgtgatc

SEQ ID NO: 2130012 - DNA, 25 bp, Homo sapien
cctcgtcggagtgatcctggcaatg

SEQ ID NO: 2130013 - DNA, 25 bp, Homo sapien
tctcggagcaccgggtgcaggctct

SEQ ID NO: 2130014 - DNA, 25 bp, Homo sapien
ctgcgtgaagcccaacttgattctt

SEQ ID NO: 2130015 - DNA, 25 bp, Homo sapien
cctgcgtgaagcccaacttgattct

SEQ ID NO: 2130016 - DNA, 25 bp, Homo sapien
tcccctggcggagtcattcttttct

SEQ ID NO: 2130017 - DNA, 25 bp, Homo sapien
tgtctgccagcgaggagatctcctg

SEQ ID NO: 2130018 - DNA, 25 bp, Homo sapien
gacacttgaggaaatgcgtctccag

SEQ ID NO: 2130019 - DNA, 25 bp, Homo sapien
tgcgaataaacctcatgcggctgct

SEQ ID NO: 2130020 - DNA, 25 bp, Homo sapien
agaagttagaacctcttatgaaaag

SEQ ID NO: 2130021 - DNA, 25 bp, Homo sapien
gagaaatccgcgctgctcccagtgc

SEQ ID NO: 2130022 - DNA, 25 bp, Homo sapien
gtcaacagaagttagaacctcttat

SEQ ID NO: 2130023 - DNA, 25 bp, Homo sapien
aagagaaatccgcgctgctcccagt

SEQ ID NO: 2130024 - DNA, 25 bp, Homo sapien
gatctccagtgaaagtaatcgcgtg

SEQ ID NO: 2130025 - DNA, 25 bp, Homo sapien
gagttgccgccgaatccttctcaga

SEQ ID NO: 2130026 - DNA, 25 bp, Homo sapien
tcgctggatcgtcgctgtgggcttc

SEQ ID NO: 2130027 - DNA, 25 bp, Homo sapien
tgcttatcagaaacgccgagacagc

SEQ ID NO: 2130028 - DNA, 25 bp, Homo sapien
ggcctggcaactcatactaacgcat

SEQ ID NO: 2130029 - DNA, 25 bp, Homo sapien
gaagctttgtctacagcagctgcgc

SEQ ID NO: 2130030 - DNA, 25 bp, Homo sapien
taacacatgctcttcgacctgcagc

SEQ ID NO: 2130031 - DNA, 25 bp, Homo sapien
taccaacagaatgcagagacttgac

SEQ ID NO: 2130032 - DNA, 25 bp, Homo sapien
taacagttgacctaatgacaagacc

SEQ ID NO: 2130033 - DNA, 25 bp, Homo sapien
tagaaaggttagaaaggagtcagct

SEQ ID NO: 2130034 - DNA, 25 bp, Homo sapien
taatcaaggatcgtatgcctgcagc

SEQ ID NO: 2130035 - DNA, 25 bp, Homo sapien
taatagtacgtgcatcatcattggc

SEQ ID NO: 2130036 - DNA, 25 bp, Homo sapien
tgacctgattttccaggtgtgtccg

SEQ ID NO: 2130037 - DNA, 25 bp, Homo sapien
acacacactggcctgcgcccactgt

SEQ ID NO: 2130038 - DNA, 25 bp, Homo sapien
gcgcacggtgcgcacacacactggc

SEQ ID NO: 2130039 - DNA, 25 bp, Homo sapien
ctgattttccaggtgtgtccgtcac

SEQ ID NO: 2130040 - DNA, 25 bp, Homo sapien
ttgacactgtgtattgtatccggtt

SEQ ID NO: 2130041 - DNA, 25 bp, Homo sapien
tccttgacactgtgtattgtatccg

SEQ ID NO: 2130042 - DNA, 25 bp, Homo sapien
ccttgacactgtgtattgtatccgg

SEQ ID NO: 2130043 - DNA, 25 bp, Homo sapien
cttgacactgtgtattgtatccggt

SEQ ID NO: 2130044 - DNA, 25 bp, Homo sapien
tgtgcaatggtcaaaggatcaaaag

SEQ ID NO: 2130045 - DNA, 25 bp, Homo sapien
aagcagccttccagtaagtcaaaga

SEQ ID NO: 2130046 - DNA, 25 bp, Homo sapien
gggaaattaggtcttgatatgagct

SEQ ID NO: 2130047 - DNA, 25 bp, Homo sapien
gtcaaagaagctaacaaaatgtgca

SEQ ID NO: 2130048 - DNA, 25 bp, Homo sapien
tgggccaggccatacaccttcaaag

SEQ ID NO: 2130049 - DNA, 25 bp, Homo sapien
atacaccttcaaagaaaatggtagc

SEQ ID NO: 2130050 - DNA, 25 bp, Homo sapien
tgatgatataaaatggcagagctgg

SEQ ID NO: 2130051 - DNA, 25 bp, Homo sapien
aatggtagcagggaacattgtcttc

SEQ ID NO: 2130052 - DNA, 25 bp, Homo sapien
gagccttgggtcattggccctctat

SEQ ID NO: 2130053 - DNA, 25 bp, Homo sapien
gcagcgtcagtcacaagctccaagt

SEQ ID NO: 2130054 - DNA, 25 bp, Homo sapien
gtttgttttgctaggcccactggag

SEQ ID NO: 2130055 - DNA, 25 bp, Homo sapien
tatgaagggacaacttctctcccag

SEQ ID NO: 2130056 - DNA, 25 bp, Homo sapien
ttttctggtctgctgcttagtaaat

SEQ ID NO: 2130057 - DNA, 25 bp, Homo sapien
ggtctgctgcttagtaaatccagat

SEQ ID NO: 2130058 - DNA, 25 bp, Homo sapien
aaaactgaagtctgggttcatgtga

SEQ ID NO: 2130059 - DNA, 25 bp, Homo sapien
tgaagtctgggttcatgtgaatcat

SEQ ID NO: 2130060 - DNA, 25 bp, Homo sapien
gcttatatgattcactgccttcttc

SEQ ID NO: 2130061 - DNA, 25 bp, Homo sapien
ggatagcttatatgattcactgcct

SEQ ID NO: 2130062 - DNA, 25 bp, Homo sapien
tatcccttggatagcttatatgatt

SEQ ID NO: 2130063 - DNA, 25 bp, Homo sapien
gccttcttcaactcttgccacttgg

SEQ ID NO: 2130064 - DNA, 25 bp, Homo sapien
gaggagctgttcgaatgccaggaac

SEQ ID NO: 2130065 - DNA, 25 bp, Homo sapien
acgagggcctagtggccgaggccga

SEQ ID NO: 2130066 - DNA, 25 bp, Homo sapien
aactgctcgagtgccaggtgcaggt

SEQ ID NO: 2130067 - DNA, 25 bp, Homo sapien
ctgttcgaatgccaggaactgctcg

SEQ ID NO: 2130068 - DNA, 25 bp, Homo sapien
tctctatttatttctactggaaggg

SEQ ID NO: 2130069 - DNA, 25 bp, Homo sapien
ttatttctactggaagggctatcat

SEQ ID NO: 2130070 - DNA, 25 bp, Homo sapien
tctatttatttctactggaagggct

SEQ ID NO: 2130071 - DNA, 25 bp, Homo sapien
atttatttctactggaagggctatc

SEQ ID NO: 2130072 - DNA, 25 bp, Homo sapien
cctgtacgttgcctggacttgagca

SEQ ID NO: 2130073 - DNA, 25 bp, Homo sapien
gtacgttgcctggacttgagcatag

SEQ ID NO: 2130074 - DNA, 25 bp, Homo sapien
cctgcctgtacgttgcctggacttg

SEQ ID NO: 2130075 - DNA, 25 bp, Homo sapien
atttcccctgcctgtacgttgcctg

SEQ ID NO: 2130076 - DNA, 25 bp, Homo sapien
tatcctgctttacattttaaagtgc

SEQ ID NO: 2130077 - DNA, 25 bp, Homo sapien
aaagtgctttcacataagtttattc

SEQ ID NO: 2130078 - DNA, 25 bp, Homo sapien
tgctttcacataagtttattctttc

SEQ ID NO: 2130079 - DNA, 25 bp, Homo sapien
tacattgtatcctgctttacatttt

SEQ ID NO: 2130080 - DNA, 25 bp, Homo sapien
tggaattatcatatgttctgatgtt

SEQ ID NO: 2130081 - DNA, 25 bp, Homo sapien
ggaatggaattatcatatgttctga

SEQ ID NO: 2130082 - DNA, 25 bp, Homo sapien
atatgttctgatgtttacttttagc

SEQ ID NO: 2130083 - DNA, 25 bp, Homo sapien
aattatcatatgttctgatgtttac

SEQ ID NO: 2130084 - DNA, 25 bp, Homo sapien
tgggaaatgtcaaagcaaagtgttt

SEQ ID NO: 2130085 - DNA, 25 bp, Homo sapien
agtggtttgggaaatgtcaaagcaa

SEQ ID NO: 2130086 - DNA, 25 bp, Homo sapien
aaagtgtttttgattccatgatttt

SEQ ID NO: 2130087 - DNA, 25 bp, Homo sapien
gtttgggaaatgtcaaagcaaagtg

SEQ ID NO: 2130088 - DNA, 25 bp, Homo sapien
ttcaaaggtcttgatttatcatttg

SEQ ID NO: 2130089 - DNA, 25 bp, Homo sapien
tatccatttatgagctggtttctgg

SEQ ID NO: 2130090 - DNA, 25 bp, Homo sapien
atttatgagctggtttctggccttc

SEQ ID NO: 2130091 - DNA, 25 bp, Homo sapien
gaatgccttatccatttatgagctg

SEQ ID NO: 2130092 - DNA, 25 bp, Homo sapien
ctgaaagaatgccttatccatttat

SEQ ID NO: 2130093 - DNA, 25 bp, Homo sapien
tgaatggagtctgttccctggcagc

SEQ ID NO: 2130094 - DNA, 25 bp, Homo sapien
gcagctgtgtaaatgggtggccatt

SEQ ID NO: 2130095 - DNA, 25 bp, Homo sapien
tgagcaaatctctgatatgggatca

SEQ ID NO: 2130096 - DNA, 25 bp, Homo sapien
tcagactgtcccactaacatgagga

SEQ ID NO: 2130097 - DNA, 25 bp, Homo sapien
agcatcagtagactctgtgtccttc

SEQ ID NO: 2130098 - DNA, 25 bp, Homo sapien
aatctcccttcggttcagagtcagc

SEQ ID NO: 2130099 - DNA, 25 bp, Homo sapien
tctcttgatggaggaactctacctg

SEQ ID NO: 2130100 - DNA, 25 bp, Homo sapien
tagccccaggtttatatagtgactc

SEQ ID NO: 2130101 - DNA, 25 bp, Homo sapien
tagagaaggctcacaagcagggagt

SEQ ID NO: 2130102 - DNA, 25 bp, Homo sapien
cttactgtggtaaggccattctgtg

SEQ ID NO: 2130103 - DNA, 25 bp, Homo sapien
gcttatgaatccacggtgcttcagg

SEQ ID NO: 2130104 - DNA, 25 bp, Homo sapien
caagtgctcagttgttctttaaagc

SEQ ID NO: 2130105 - DNA, 25 bp, Homo sapien
tctttaaagcagcttatgaatccac

SEQ ID NO: 2130106 - DNA, 25 bp, Homo sapien
gagacctgaagtggtttgatgactt

SEQ ID NO: 2130107 - DNA, 25 bp, Homo sapien
gactcctaaacgctgtcttctttga

SEQ ID NO: 2130108 - DNA, 25 bp, Homo sapien
tagcatcacataagtagttgacatc

SEQ ID NO: 2130109 - DNA, 25 bp, Homo sapien
gatgacttgactagcatcacataag

SEQ ID NO: 2130110 - DNA, 25 bp, Homo sapien
ccagtgccctcagctagtaggacca

SEQ ID NO: 2130111 - DNA, 25 bp, Homo sapien
cctttaaacccagtgccctcagcta

SEQ ID NO: 2130112 - DNA, 25 bp, Homo sapien
ccctttaaacccagtgccctcagct

SEQ ID NO: 2130113 - DNA, 25 bp, Homo sapien
aaacccagtgccctcagctagtagg

SEQ ID NO: 2130114 - DNA, 25 bp, Homo sapien
tccatcaacgaaatttaccctatcc

SEQ ID NO: 2130115 - DNA, 25 bp, Homo sapien
caatactccatcaacgaaatttacc

SEQ ID NO: 2130116 - DNA, 25 bp, Homo sapien
cagaaggattctgtgtgatccttac

SEQ ID NO: 2130117 - DNA, 25 bp, Homo sapien
tatccccagaaggattctgtgtgat

SEQ ID NO: 2130118 - DNA, 25 bp, Homo sapien
tcctaaggtcagttatcaacagcag

SEQ ID NO: 2130119 - DNA, 25 bp, Homo sapien
gacagcaacatctattgtgaggcac

SEQ ID NO: 2130120 - DNA, 25 bp, Homo sapien
tattcgaccaagacctcaaaagatg

SEQ ID NO: 2130121 - DNA, 25 bp, Homo sapien
ggctgagacccaattataccctgta

SEQ ID NO: 2130122 - DNA, 25 bp, Homo sapien
tacagaatccttggtcaaacatcag

SEQ ID NO: 2130123 - DNA, 25 bp, Homo sapien
tcttagcacctgaggagatttaggg

SEQ ID NO: 2130124 - DNA, 25 bp, Homo sapien
aaagaacttacacaatgcaatgaga

SEQ ID NO: 2130125 - DNA, 25 bp, Homo sapien
aatttaaactgccttgtctctcacc

SEQ ID NO: 2130126 - DNA, 25 bp, Homo sapien
gtaggtatatatattatgcggcgca

SEQ ID NO: 2130127 - DNA, 25 bp, Homo sapien
ttatgccctccactacacttcccag

SEQ ID NO: 2130128 - DNA, 25 bp, Homo sapien
gggatatcccatctcctcgagcatt

SEQ ID NO: 2130129 - DNA, 25 bp, Homo sapien
taatatattatggactacagtcatc

SEQ ID NO: 2130130 - DNA, 25 bp, Homo sapien
cttgcttgatcataggaatcactgg

SEQ ID NO: 2130131 - DNA, 25 bp, Homo sapien
gatcataggaatcactggaatgcgc

SEQ ID NO: 2130132 - DNA, 25 bp, Homo sapien
gcttgatcataggaatcactggaat

SEQ ID NO: 2130133 - DNA, 25 bp, Homo sapien
tcataggaatcactggaatgcgcat

SEQ ID NO: 2130134 - DNA, 25 bp, Homo sapien
aaatttatttggaatctcgacatac

SEQ ID NO: 2130135 - DNA, 25 bp, Homo sapien
gtaggccaggacttgcatgttaaac

SEQ ID NO: 2130136 - DNA, 25 bp, Homo sapien
cttaggtggcaccagtagggattac

SEQ ID NO: 2130137 - DNA, 25 bp, Homo sapien
cataacctggtgactgcctgcaaaa

SEQ ID NO: 2130138 - DNA, 25 bp, Homo sapien
catgtgcctggtctagatcagctcc

SEQ ID NO: 2130139 - DNA, 25 bp, Homo sapien
aagaaggtatacaagaggccaacaa

SEQ ID NO: 2130140 - DNA, 25 bp, Homo sapien
aaaaaacgttgaacatcactagtca

SEQ ID NO: 2130141 - DNA, 25 bp, Homo sapien
aaaccagaactgattctcctcagtc

SEQ ID NO: 2130142 - DNA, 25 bp, Homo sapien
gattctcctcagtctatggagaaaa

SEQ ID NO: 2130143 - DNA, 25 bp, Homo sapien
gatgaaatatttcaggtatttgacc

SEQ ID NO: 2130144 - DNA, 25 bp, Homo sapien
ttgcttctaaatccataccagatga

SEQ ID NO: 2130145 - DNA, 25 bp, Homo sapien
aatatttcaggtatttgacctccat

SEQ ID NO: 2130146 - DNA, 25 bp, Homo sapien
cttgcttctaaatccataccagatg

SEQ ID NO: 2130147 - DNA, 25 bp, Homo sapien
agctctgattgtacattaatgattt

SEQ ID NO: 2130148 - DNA, 25 bp, Homo sapien
tacattaatgatttgaagtatacca

SEQ ID NO: 2130149 - DNA, 25 bp, Homo sapien
atcttgtactttaggctttttgcag

SEQ ID NO: 2130150 - DNA, 25 bp, Homo sapien
tcttgtactttaggctttttgcagt

SEQ ID NO: 2130151 - DNA, 25 bp, Homo sapien
gaaggtatagagagccctggccgta

SEQ ID NO: 2130152 - DNA, 25 bp, Homo sapien
tcattgtctgaagcggcactggaga

SEQ ID NO: 2130153 - DNA, 25 bp, Homo sapien
gagaattgatgatcggacacgctga

SEQ ID NO: 2130154 - DNA, 25 bp, Homo sapien
gaaaaatctcgctgaatccgcctgc

SEQ ID NO: 2130155 - DNA, 25 bp, Homo sapien
tcttagagacttaataatagctgcc

SEQ ID NO: 2130156 - DNA, 25 bp, Homo sapien
cagagtaaagtgatgatgtgtagtc

SEQ ID NO: 2130157 - DNA, 25 bp, Homo sapien
ctcttagagacttaataatagctgc

SEQ ID NO: 2130158 - DNA, 25 bp, Homo sapien
aataatagctgccagagtaaagtga

SEQ ID NO: 2130159 - DNA, 25 bp, Homo sapien
ctgaaacttcttttctaacctctgc

SEQ ID NO: 2130160 - DNA, 25 bp, Homo sapien
tgaaacttcttttctaacctctgca

SEQ ID NO: 2130161 - DNA, 25 bp, Homo sapien
gaaacttcttttctaacctctgcat

SEQ ID NO: 2130162 - DNA, 25 bp, Homo sapien
actgaaacttcttttctaacctctg

SEQ ID NO: 2130163 - DNA, 25 bp, Homo sapien
acatctatcatatcagattccattt

SEQ ID NO: 2130164 - DNA, 25 bp, Homo sapien
catctatcatatcagattccatttc

SEQ ID NO: 2130165 - DNA, 25 bp, Homo sapien
gatatgaaaatgtgccttattccca

SEQ ID NO: 2130166 - DNA, 25 bp, Homo sapien
tgagctaagtactgataaatgattt

SEQ ID NO: 2130167 - DNA, 25 bp, Homo sapien
aatgatttgagcaaattcactccct

SEQ ID NO: 2130168 - DNA, 25 bp, Homo sapien
cctgcaactctccatactgagaaat

SEQ ID NO: 2130169 - DNA, 25 bp, Homo sapien
gcctctccatagaggatgaggaagg

SEQ ID NO: 2130170 - DNA, 25 bp, Homo sapien
ggacactggattggatgatattgca

SEQ ID NO: 2130171 - DNA, 25 bp, Homo sapien
tttttctagcctctccatagaggat

SEQ ID NO: 2130172 - DNA, 25 bp, Homo sapien
attagggcagtatgtttttctagcc

SEQ ID NO: 2130173 - DNA, 25 bp, Homo sapien
tcaaaactgtcaggtactctttcat

SEQ ID NO: 2130174 - DNA, 25 bp, Homo sapien
gatgaactagttgtagttattgaac

SEQ ID NO: 2130175 - DNA, 25 bp, Homo sapien
gaaatctacattcacttgatgaact

SEQ ID NO: 2130176 - DNA, 25 bp, Homo sapien
aaatattcaaaactgtcaggtactc

SEQ ID NO: 2130177 - DNA, 25 bp, Homo sapien
tccttcatcctgttgcgtagtaaca

SEQ ID NO: 2130178 - DNA, 25 bp, Homo sapien
gacttttatagtccaaagaaccaga

SEQ ID NO: 2130179 - DNA, 25 bp, Homo sapien
tcacatccttcagagtcagagtcca

SEQ ID NO: 2130180 - DNA, 25 bp, Homo sapien
tgtcagatgttggagacttttatag

SEQ ID NO: 2130181 - DNA, 25 bp, Homo sapien
ctctgtgtctgagtccatcagatac

SEQ ID NO: 2130182 - DNA, 25 bp, Homo sapien
tcccacatggttcagagctaaagtc

SEQ ID NO: 2130183 - DNA, 25 bp, Homo sapien
cccaggctttcagagtgtgagtcca

SEQ ID NO: 2130184 - DNA, 25 bp, Homo sapien
agaatcagagctcatccccaggctt

SEQ ID NO: 2130185 - DNA, 25 bp, Homo sapien
gatgtaccccaggtaaagaggctga

SEQ ID NO: 2130186 - DNA, 25 bp, Homo sapien
tctgagtcaaggtgatatctttccc

SEQ ID NO: 2130187 - DNA, 25 bp, Homo sapien
tctcttcatccatttgacgtctctc

SEQ ID NO: 2130188 - DNA, 25 bp, Homo sapien
tcatccatttgacgtctctcatttg

SEQ ID NO: 2130189 - DNA, 25 bp, Homo sapien
tcactttcaaactcaatgttgttgt

SEQ ID NO: 2130190 - DNA, 25 bp, Homo sapien
catccaatggtaccagcatcatttt

SEQ ID NO: 2130191 - DNA, 25 bp, Homo sapien
tggacatccaatggtaccagcatca

SEQ ID NO: 2130192 - DNA, 25 bp, Homo sapien
atttggacatccaatggtaccagca

SEQ ID NO: 2130193 - DNA, 25 bp, Homo sapien
gaagcaggcagaagactgtttgttt

SEQ ID NO: 2130194 - DNA, 25 bp, Homo sapien
agtccaagaaccagaccacaagtct

SEQ ID NO: 2130195 - DNA, 25 bp, Homo sapien
gggaagtccaagaaccagaccacaa

SEQ ID NO: 2130196 - DNA, 25 bp, Homo sapien
gaagtccaagaaccagaccacaagt

SEQ ID NO: 2130197 - DNA, 25 bp, Homo sapien
ctagggaagtccaagaaccagacca

SEQ ID NO: 2130198 - DNA, 25 bp, Homo sapien
agagtggagattggcgtttggatgc

SEQ ID NO: 2130199 - DNA, 25 bp, Homo sapien
agattggcgtttggatgccacgctg

SEQ ID NO: 2130200 - DNA, 25 bp, Homo sapien
gtggagattggcgtttggatgccac

SEQ ID NO: 2130201 - DNA, 25 bp, Homo sapien
gtgagagtggagattggcgtttgga

SEQ ID NO: 2130202 - DNA, 25 bp, Homo sapien
ctggcttattcattaagtctgtcta

SEQ ID NO: 2130203 - DNA, 25 bp, Homo sapien
aaaaatggttggcagattttcttat

SEQ ID NO: 2130204 - DNA, 25 bp, Homo sapien
ggcttattcattaagtctgtctatt

SEQ ID NO: 2130205 - DNA, 25 bp, Homo sapien
ttttcttatatttctgctctacttt

SEQ ID NO: 2130206 - DNA, 25 bp, Homo sapien
agtgtagacacttgtggatggttga

SEQ ID NO: 2130207 - DNA, 25 bp, Homo sapien
ttttggctatcaattctgacccctt

SEQ ID NO: 2130208 - DNA, 25 bp, Homo sapien
cagtgtagacacttgtggatggttg

SEQ ID NO: 2130209 - DNA, 25 bp, Homo sapien
ccaaaatttggaattttggctatca

SEQ ID NO: 2130210 - DNA, 25 bp, Homo sapien
ctcatacagatgaaattatttggag

SEQ ID NO: 2130211 - DNA, 25 bp, Homo sapien
acagatgaaattatttggagagaac

SEQ ID NO: 2130212 - DNA, 25 bp, Homo sapien
attctctaacctgatttaatatttt

SEQ ID NO: 2130213 - DNA, 25 bp, Homo sapien
tctctaacctgatttaatattttca

SEQ ID NO: 2130214 - DNA, 25 bp, Homo sapien
cttgaatatttcatcaaatcctttc

SEQ ID NO: 2130215 - DNA, 25 bp, Homo sapien
tcagtggactttgaagatggatcat

SEQ ID NO: 2130216 - DNA, 25 bp, Homo sapien
tggactttgaagatggatcatcatt

SEQ ID NO: 2130217 - DNA, 25 bp, Homo sapien
tgaatatttcatcaaatcctttcca

SEQ ID NO: 2130218 - DNA, 25 bp, Homo sapien
caaatatcgtctttgttgacgtcta

SEQ ID NO: 2130219 - DNA, 25 bp, Homo sapien
gccaaatatcgtctttgttgacgtc

SEQ ID NO: 2130220 - DNA, 25 bp, Homo sapien
tggccaaatatcgtctttgttgacg

SEQ ID NO: 2130221 - DNA, 25 bp, Homo sapien
aatatcgtctttgttgacgtctaac

SEQ ID NO: 2130222 - DNA, 25 bp, Homo sapien
tcatccccttcttcactaatatctt

SEQ ID NO: 2130223 - DNA, 25 bp, Homo sapien
cttcttcactaatatcttctaatcc

SEQ ID NO: 2130224 - DNA, 25 bp, Homo sapien
tcatcatccatatggggaaccaagt

SEQ ID NO: 2130225 - DNA, 25 bp, Homo sapien
catccatatggggaaccaagtagta

SEQ ID NO: 2130226 - DNA, 25 bp, Homo sapien
gatctcaagaagagggcaactgaga

SEQ ID NO: 2130227 - DNA, 25 bp, Homo sapien
caagaagagggcaactgagaacaag

SEQ ID NO: 2130228 - DNA, 25 bp, Homo sapien
tagaaaaaggaagcttgaaatccat

SEQ ID NO: 2130229 - DNA, 25 bp, Homo sapien
aaataggttgagaaacatagtgtaa

SEQ ID NO: 2130230 - DNA, 25 bp, Homo sapien
tgattctcccatttagtagtagggc

SEQ ID NO: 2130231 - DNA, 25 bp, Homo sapien
tcccatttagtagtagggctcaagt

SEQ ID NO: 2130232 - DNA, 25 bp, Homo sapien
catttagtagtagggctcaagtcat

SEQ ID NO: 2130233 - DNA, 25 bp, Homo sapien
tctcccatttagtagtagggctcaa

SEQ ID NO: 2130234 - DNA, 25 bp, Homo sapien
gaataggattcatttgagacccaga

SEQ ID NO: 2130235 - DNA, 25 bp, Homo sapien
ggagacacctctttgaatcccataa

SEQ ID NO: 2130236 - DNA, 25 bp, Homo sapien
tatctgtagtccttatagtggctct

SEQ ID NO: 2130237 - DNA, 25 bp, Homo sapien
gagttgtaactctcagcaattagga

SEQ ID NO: 2130238 - DNA, 25 bp, Homo sapien
gggtcagttccattattagggtcac

SEQ ID NO: 2130239 - DNA, 25 bp, Homo sapien
tagtatcagacctatctttgggatc

SEQ ID NO: 2130240 - DNA, 25 bp, Homo sapien
gagccagcatcaccactgggatcag

SEQ ID NO: 2130241 - DNA, 25 bp, Homo sapien
gttggaattatcaccacttgcagag

SEQ ID NO: 2130242 - DNA, 25 bp, Homo sapien
atcagatgtgtggtcctggccagtt

SEQ ID NO: 2130243 - DNA, 25 bp, Homo sapien
ggaatcagatgtgtggtcctggcca

SEQ ID NO: 2130244 - DNA, 25 bp, Homo sapien
aatcagatgtgtggtcctggccagt

SEQ ID NO: 2130245 - DNA, 25 bp, Homo sapien
tagcatgactacaaccagtggtggt

SEQ ID NO: 2130246 - DNA, 25 bp, Homo sapien
gctagggctggtgacataaaactgt

SEQ ID NO: 2130247 - DNA, 25 bp, Homo sapien
tgcatagttgtatccagcagcacta

SEQ ID NO: 2130248 - DNA, 25 bp, Homo sapien
tgacacctgcaatatagctaggact

SEQ ID NO: 2130249 - DNA, 25 bp, Homo sapien
cacctgatggtatggcaaacttcac

SEQ ID NO: 2130250 - DNA, 25 bp, Homo sapien
ggtggttcagcttctactataatat

SEQ ID NO: 2130251 - DNA, 25 bp, Homo sapien
tgattcacagcacctgatggtatgg

SEQ ID NO: 2130252 - DNA, 25 bp, Homo sapien
acttcacaacatctggtggttcagc

SEQ ID NO: 2130253 - DNA, 25 bp, Homo sapien
gtccgcaattgtgcacataggtgca

SEQ ID NO: 2130254 - DNA, 25 bp, Homo sapien
tgtgcacataggtgcatggatccat

SEQ ID NO: 2130255 - DNA, 25 bp, Homo sapien
gaaagtccaagtccgcaattgtgca

SEQ ID NO: 2130256 - DNA, 25 bp, Homo sapien
tccaagtccgcaattgtgcacatag

SEQ ID NO: 2130257 - DNA, 25 bp, Homo sapien
ttcttttcattaatcagggccaagg

SEQ ID NO: 2130258 - DNA, 25 bp, Homo sapien
ttgaccccaccacaagttcgcacaa

SEQ ID NO: 2130259 - DNA, 25 bp, Homo sapien
tgaaaggtcttacgtcccattgacc

SEQ ID NO: 2130260 - DNA, 25 bp, Homo sapien
tccatatggatgatttttctgaaag

SEQ ID NO: 2130261 - DNA, 25 bp, Homo sapien
tctctcaactgctgttaacctcaca

SEQ ID NO: 2130262 - DNA, 25 bp, Homo sapien
tgttgaagaaacttgcgctgataaa

SEQ ID NO: 2130263 - DNA, 25 bp, Homo sapien
agatgttgaagaaacttgcgctgat

SEQ ID NO: 2130264 - DNA, 25 bp, Homo sapien
gatgttgaagaaacttgcgctgata

SEQ ID NO: 2130265 - DNA, 25 bp, Homo sapien
gttgaagaaacttgcgctgataaag

SEQ ID NO: 2130266 - DNA, 25 bp, Homo sapien
ttcagactgttattcattttctcca

SEQ ID NO: 2130267 - DNA, 25 bp, Homo sapien
ccatgaggtttagataaaagtccag

SEQ ID NO: 2130268 - DNA, 25 bp, Homo sapien
aaaagtccagtccacatttatcttc

SEQ ID NO: 2130269 - DNA, 25 bp, Homo sapien
atattcttgactcccaatggcttta

SEQ ID NO: 2130270 - DNA, 25 bp, Homo sapien
taaattatgttcatgagcactgcct

SEQ ID NO: 2130271 - DNA, 25 bp, Homo sapien
cattaaattatgttcatgagcactg

SEQ ID NO: 2130272 - DNA, 25 bp, Homo sapien
ttaaattatgttcatgagcactgcc

SEQ ID NO: 2130273 - DNA, 25 bp, Homo sapien
aaattatgttcatgagcactgcctt

SEQ ID NO: 2130274 - DNA, 25 bp, Homo sapien
gttttgcagatcttgaagtttcccc

SEQ ID NO: 2130275 - DNA, 25 bp, Homo sapien
tatggtaagtcccattgcaactccc

SEQ ID NO: 2130276 - DNA, 25 bp, Homo sapien
cccagcatatgcttctgttggtttt

SEQ ID NO: 2130277 - DNA, 25 bp, Homo sapien
gaagtttccccagcatatgcttctg

SEQ ID NO: 2130278 - DNA, 25 bp, Homo sapien
caagatcttcacacctgtcagatct

SEQ ID NO: 2130279 - DNA, 25 bp, Homo sapien
agttctctgttgggaaaaagtgtag

SEQ ID NO: 2130280 - DNA, 25 bp, Homo sapien
ggaataaggatcatgtaatcttgtg

SEQ ID NO: 2130281 - DNA, 25 bp, Homo sapien
tgtaatcttgtgtaagttctctgtt

SEQ ID NO: 2130282 - DNA, 25 bp, Homo sapien
gttgggaataaggatcatgtaatct

SEQ ID NO: 2130283 - DNA, 25 bp, Homo sapien
tcccttcacagtttacctcagaggc

SEQ ID NO: 2130284 - DNA, 25 bp, Homo sapien
ttctgactccgtgcctgtgcctggg

SEQ ID NO: 2130285 - DNA, 25 bp, Homo sapien
tgcctgggccggcaagtaggacccc

SEQ ID NO: 2130286 - DNA, 25 bp, Homo sapien
ccagagtgacctcaagaaatagcag

SEQ ID NO: 2130287 - DNA, 25 bp, Homo sapien
gaggccactggggcctctagccacc

SEQ ID NO: 2130288 - DNA, 25 bp, Homo sapien
cacccccacgccctgtgacgttgac

SEQ ID NO: 2130289 - DNA, 25 bp, Homo sapien
ggcgctggacacccgcgctgatctg

SEQ ID NO: 2130290 - DNA, 25 bp, Homo sapien
gcgctggacacccgcgctgatctgc

SEQ ID NO: 2130291 - DNA, 25 bp, Homo sapien
cgctggacacccgcgctgatctgct

SEQ ID NO: 2130292 - DNA, 25 bp, Homo sapien
accacacgcgatggcctgcaggatg

SEQ ID NO: 2130293 - DNA, 25 bp, Homo sapien
tatggtgaccgaggccgcgctgtcc

SEQ ID NO: 2130294 - DNA, 25 bp, Homo sapien
attttgtggtttggagcggccgctc

SEQ ID NO: 2130295 - DNA, 25 bp, Homo sapien
cgctgtccggcgttggagattttgt

SEQ ID NO: 2130296 - DNA, 25 bp, Homo sapien
caagggtatgcctcggcagatgaag

SEQ ID NO: 2130297 - DNA, 25 bp, Homo sapien
gcagcaagggtatgcctcggcagat

SEQ ID NO: 2130298 - DNA, 25 bp, Homo sapien
ggacggtggcgtagagggggactga

SEQ ID NO: 2130299 - DNA, 25 bp, Homo sapien
tgggcagcaagggtatgcctcggca

SEQ ID NO: 2130300 - DNA, 25 bp, Homo sapien
ctggtagagggcagaggtggcgatc

SEQ ID NO: 2130301 - DNA, 25 bp, Homo sapien
tggtagagggcagaggtggcgatcc

SEQ ID NO: 2130302 - DNA, 25 bp, Homo sapien
ttggcggccagtcctcggcaccggg

SEQ ID NO: 2130303 - DNA, 25 bp, Homo sapien
agtccgcaacccttggcggccagtc

SEQ ID NO: 2130304 - DNA, 25 bp, Homo sapien
cagtcctcggcaccgggcccggagc

SEQ ID NO: 2130305 - DNA, 25 bp, Homo sapien
acccttggcggccagtcctcggcac

SEQ ID NO: 2130306 - DNA, 25 bp, Homo sapien
ccttgtggatgagctttagggccat

SEQ ID NO: 2130307 - DNA, 25 bp, Homo sapien
tcgcgggccagttcgaggaactcct

SEQ ID NO: 2130308 - DNA, 25 bp, Homo sapien
tcgttgggcctcgttatggtggcct

SEQ ID NO: 2130309 - DNA, 25 bp, Homo sapien
tggcctgccagtggagcatatcgtc

SEQ ID NO: 2130310 - DNA, 25 bp, Homo sapien
tggtttgaataggtagtcggaggga

SEQ ID NO: 2130311 - DNA, 25 bp, Homo sapien
aattccgttggtaaatttgatcttg

SEQ ID NO: 2130312 - DNA, 25 bp, Homo sapien
tcttgggtggtttgaataggtagtc

SEQ ID NO: 2130313 - DNA, 25 bp, Homo sapien
gtaaatttgatcttgggtggtttga

SEQ ID NO: 2130314 - DNA, 25 bp, Homo sapien
catactccctcctgtcgcgtatttc

SEQ ID NO: 2130315 - DNA, 25 bp, Homo sapien
gccatactccctcctgtcgcgtatt

SEQ ID NO: 2130316 - DNA, 25 bp, Homo sapien
ctgccatactccctcctgtcgcgta

SEQ ID NO: 2130317 - DNA, 25 bp, Homo sapien
tactccctcctgtcgcgtatttccg

SEQ ID NO: 2130318 - DNA, 25 bp, Homo sapien
ttattaaggcgatggaattatattt

SEQ ID NO: 2130319 - DNA, 25 bp, Homo sapien
tattaaggcgatggaattatatttt

SEQ ID NO: 2130320 - DNA, 25 bp, Homo sapien
ttaaggcgatggaattatattttga

SEQ ID NO: 2130321 - DNA, 25 bp, Homo sapien
tattattaaggcgatggaattatat

SEQ ID NO: 2130322 - DNA, 25 bp, Homo sapien
cttccacatcaatagggcagaaata

SEQ ID NO: 2130323 - DNA, 25 bp, Homo sapien
tctggacttatcctgaacttccaca

SEQ ID NO: 2130324 - DNA, 25 bp, Homo sapien
tgtattgaaagtttggagtcacaga

SEQ ID NO: 2130325 - DNA, 25 bp, Homo sapien
agaaatagatgaaatcctcagaaac

SEQ ID NO: 2130326 - DNA, 25 bp, Homo sapien
caggaactgccgaaagatggtcttt

SEQ ID NO: 2130327 - DNA, 25 bp, Homo sapien
gaatgtggatcccttcaccaatcag

SEQ ID NO: 2130328 - DNA, 25 bp, Homo sapien
gagatggtcacccttgagtatggta

SEQ ID NO: 2130329 - DNA, 25 bp, Homo sapien
tggtagctggaggtagccaatctct

SEQ ID NO: 2130330 - DNA, 25 bp, Homo sapien
tctgcagaacctgacaaaatggcct

SEQ ID NO: 2130331 - DNA, 25 bp, Homo sapien
tagtctgcagaacctgacaaaatgg

SEQ ID NO: 2130332 - DNA, 25 bp, Homo sapien
gaacctgacaaaatggccttttgcc

SEQ ID NO: 2130333 - DNA, 25 bp, Homo sapien
gcagaacctgacaaaatggcctttt

SEQ ID NO: 2130334 - DNA, 25 bp, Homo sapien
gaagttccaacattgcgcctgagag

SEQ ID NO: 2130335 - DNA, 25 bp, Homo sapien
gaggatacagtatgtctgctggaag

SEQ ID NO: 2130336 - DNA, 25 bp, Homo sapien
gagagtttcaacattacccatggga

SEQ ID NO: 2130337 - DNA, 25 bp, Homo sapien
gggaacactaccattgcctctagga

SEQ ID NO: 2130338 - DNA, 25 bp, Homo sapien
ttcggccaaggttttcagacggaga

SEQ ID NO: 2130339 - DNA, 25 bp, Homo sapien
cggccaaggttttcagacggagagc

SEQ ID NO: 2130340 - DNA, 25 bp, Homo sapien
tcagttcgactaggcttcccttagg

SEQ ID NO: 2130341 - DNA, 25 bp, Homo sapien
agagggacaaatcagttcgactagg

SEQ ID NO: 2130342 - DNA, 25 bp, Homo sapien
ggtatcattcgtaatgtctcttccc

SEQ ID NO: 2130343 - DNA, 25 bp, Homo sapien
gacagactttttacaagtgactcaa

SEQ ID NO: 2130344 - DNA, 25 bp, Homo sapien
cacagtagtctcacgaattttagta

SEQ ID NO: 2130345 - DNA, 25 bp, Homo sapien
tattcattagcgctctgttcagatt

SEQ ID NO: 2130346 - DNA, 25 bp, Homo sapien
gaattcagacgttacaaaatttcaa

SEQ ID NO: 2130347 - DNA, 25 bp, Homo sapien
ctttaccgccttcctctggccctag

SEQ ID NO: 2130348 - DNA, 25 bp, Homo sapien
tgtagcactccaataaaagatgatt

SEQ ID NO: 2130349 - DNA, 25 bp, Homo sapien
caggattaaataagctatacagaaa

SEQ ID NO: 2130350 - DNA, 25 bp, Homo sapien
cgtaagactcaccccctccaactgt

SEQ ID NO: 2130351 - DNA, 25 bp, Homo sapien
taagactcaccccctccaactgtgc

SEQ ID NO: 2130352 - DNA, 25 bp, Homo sapien
ccgtaagactcaccccctccaactg

SEQ ID NO: 2130353 - DNA, 25 bp, Homo sapien
gtaagactcaccccctccaactgtg

SEQ ID NO: 2130354 - DNA, 25 bp, Homo sapien
ttggctgcatgtacacttacagatg

SEQ ID NO: 2130355 - DNA, 25 bp, Homo sapien
ggctgcatgtacacttacagatgca

SEQ ID NO: 2130356 - DNA, 25 bp, Homo sapien
tggctgcatgtacacttacagatgc

SEQ ID NO: 2130357 - DNA, 25 bp, Homo sapien
caattacagctcaacaggctggcat

SEQ ID NO: 2130358 - DNA, 25 bp, Homo sapien
cagactgggatgaggcataccttac

SEQ ID NO: 2130359 - DNA, 25 bp, Homo sapien
tgtagcagtcaaaacaccgtggttc

SEQ ID NO: 2130360 - DNA, 25 bp, Homo sapien
taactagtcagtcgtggaatcagga

SEQ ID NO: 2130361 - DNA, 25 bp, Homo sapien
caatgtaacaaccagttgcagtgcg

SEQ ID NO: 2130362 - DNA, 25 bp, Homo sapien
tgtaacaaccagttgcagtgcggat

SEQ ID NO: 2130363 - DNA, 25 bp, Homo sapien
cagccaatgtaacaaccagttgcag

SEQ ID NO: 2130364 - DNA, 25 bp, Homo sapien
cttgcaccagccaatgtaacaacca

SEQ ID NO: 2130365 - DNA, 25 bp, Homo sapien
aattgtactgtatccattatcccat

SEQ ID NO: 2130366 - DNA, 25 bp, Homo sapien
cttttccaaattgtactgtatccat

SEQ ID NO: 2130367 - DNA, 25 bp, Homo sapien
actgtatccattatcccatttttca

SEQ ID NO: 2130368 - DNA, 25 bp, Homo sapien
ccatttttcacaaagacataaacac

SEQ ID NO: 2130369 - DNA, 25 bp, Homo sapien
ctcccattttcggaagaaaatctcg

SEQ ID NO: 2130370 - DNA, 25 bp, Homo sapien
cggaagaaaatctcgaggaggattc

SEQ ID NO: 2130371 - DNA, 25 bp, Homo sapien
cattttcggaagaaaatctcgagga

SEQ ID NO: 2130372 - DNA, 25 bp, Homo sapien
agaaaatctcgaggaggattcttca

SEQ ID NO: 2130373 - DNA, 25 bp, Homo sapien
attattacggactgaactgggtagc

SEQ ID NO: 2130374 - DNA, 25 bp, Homo sapien
tagcaaacagttgctcctaaagtgg

SEQ ID NO: 2130375 - DNA, 25 bp, Homo sapien
ttgctcctaaagtggccagtcccag

SEQ ID NO: 2130376 - DNA, 25 bp, Homo sapien
tagcaattattacggactgaactgg

SEQ ID NO: 2130377 - DNA, 25 bp, Homo sapien
ttcaaaggcacggttctatattact

SEQ ID NO: 2130378 - DNA, 25 bp, Homo sapien
ttaacaaattccctattgaggcacg

SEQ ID NO: 2130379 - DNA, 25 bp, Homo sapien
tcaaatacttgagatcacagtacac

SEQ ID NO: 2130380 - DNA, 25 bp, Homo sapien
tatgtactggcatgaatggaagtcc

SEQ ID NO: 2130381 - DNA, 25 bp, Homo sapien
gctggcttgtagcatataccttttt

SEQ ID NO: 2130382 - DNA, 25 bp, Homo sapien
cacaatgatttaactgctccaaaaa

SEQ ID NO: 2130383 - DNA, 25 bp, Homo sapien
tagggagtgactcttctttgctgct

SEQ ID NO: 2130384 - DNA, 25 bp, Homo sapien
atttaactgctccaaaaatttgctg

SEQ ID NO: 2130385 - DNA, 25 bp, Homo sapien
aaactcaatgttgaccgtcttgctc

SEQ ID NO: 2130386 - DNA, 25 bp, Homo sapien
ccgtcttgctccatgtaaactctac

SEQ ID NO: 2130387 - DNA, 25 bp, Homo sapien
tgttgaccgtcttgctccatgtaaa

SEQ ID NO: 2130388 - DNA, 25 bp, Homo sapien
caatgttgaccgtcttgctccatgt

SEQ ID NO: 2130389 - DNA, 25 bp, Homo sapien
cctcgacctctgtccagtaccctca

SEQ ID NO: 2130390 - DNA, 25 bp, Homo sapien
gtccagtaccctcattacaagccaa

SEQ ID NO: 2130391 - DNA, 25 bp, Homo sapien
gacctctgtccagtaccctcattac

SEQ ID NO: 2130392 - DNA, 25 bp, Homo sapien
ctctgtccagtaccctcattacaag

SEQ ID NO: 2130393 - DNA, 25 bp, Homo sapien
agctgagttctgttggcaagggcac

SEQ ID NO: 2130394 - DNA, 25 bp, Homo sapien
gtttcaagacgtgagttgtttttgc

SEQ ID NO: 2130395 - DNA, 25 bp, Homo sapien
tttttgcaggtacttctatttcgga

SEQ ID NO: 2130396 - DNA, 25 bp, Homo sapien
gcactgagtgtttcaagacgtgagt

SEQ ID NO: 2130397 - DNA, 25 bp, Homo sapien
gaggaaaagacattagcttggaaag

SEQ ID NO: 2130398 - DNA, 25 bp, Homo sapien
agatgtgtgaggaaaagacattagc

SEQ ID NO: 2130399 - DNA, 25 bp, Homo sapien
cactgttaagctgtagtatgtttca

SEQ ID NO: 2130400 - DNA, 25 bp, Homo sapien
tggtcccactgttaagctgtagtat

SEQ ID NO: 2130401 - DNA, 25 bp, Homo sapien
tacaaagggtgaaacacttatcatc

SEQ ID NO: 2130402 - DNA, 25 bp, Homo sapien
tcagttaacttcaatatttaggtca

SEQ ID NO: 2130403 - DNA, 25 bp, Homo sapien
tctagtcaggcattgagctgggtct

SEQ ID NO: 2130404 - DNA, 25 bp, Homo sapien
tcatctgtgggtctgctgttattgt

SEQ ID NO: 2130405 - DNA, 25 bp, Homo sapien
tgctgtatctctactgccatctggt

SEQ ID NO: 2130406 - DNA, 25 bp, Homo sapien
tcagtacaagtgaaaagtgtgcaac

SEQ ID NO: 2130407 - DNA, 25 bp, Homo sapien
taggaatccactggtggttctgctg

SEQ ID NO: 2130408 - DNA, 25 bp, Homo sapien
ggtgggaaccattgctcagtacaag

SEQ ID NO: 2130409 - DNA, 25 bp, Homo sapien
tgtacatatctatatcttctgggtg

SEQ ID NO: 2130410 - DNA, 25 bp, Homo sapien
cagcttctagtgctgtacatatcta

SEQ ID NO: 2130411 - DNA, 25 bp, Homo sapien
ggactgcccgtgatccatgagcttg

SEQ ID NO: 2130412 - DNA, 25 bp, Homo sapien
atgagcttggggtcaggcataaact

SEQ ID NO: 2130413 - DNA, 25 bp, Homo sapien
acgccacacatcttgtagttttctg

SEQ ID NO: 2130414 - DNA, 25 bp, Homo sapien
cattatttgcaacgccacacatctt

SEQ ID NO: 2130415 - DNA, 25 bp, Homo sapien
tttgcaacgccacacatcttgtagt

SEQ ID NO: 2130416 - DNA, 25 bp, Homo sapien
tcatcattatttgcaacgccacaca

SEQ ID NO: 2130417 - DNA, 25 bp, Homo sapien
cattcacagtttgtgtgttaaccac

SEQ ID NO: 2130418 - DNA, 25 bp, Homo sapien
aatattgtttacactgcattcacag

SEQ ID NO: 2130419 - DNA, 25 bp, Homo sapien
tgcaagctaatacttctacctaagt

SEQ ID NO: 2130420 - DNA, 25 bp, Homo sapien
taagtgcccttaaaggtcatcaaat

SEQ ID NO: 2130421 - DNA, 25 bp, Homo sapien
taggaagcctgtgtagcatatggcc

SEQ ID NO: 2130422 - DNA, 25 bp, Homo sapien
taggaggcacagtcaactttgacag

SEQ ID NO: 2130423 - DNA, 25 bp, Homo sapien
gaaccagtagaaggattgctaagca

SEQ ID NO: 2130424 - DNA, 25 bp, Homo sapien
catatggccctctcaaataggtaga

SEQ ID NO: 2130425 - DNA, 25 bp, Homo sapien
taggctgagtcggacagatgcttga

SEQ ID NO: 2130426 - DNA, 25 bp, Homo sapien
tagtttactgtcacctgcaagcaga

SEQ ID NO: 2130427 - DNA, 25 bp, Homo sapien
tggaggccagaatgtcacaagacag

SEQ ID NO: 2130428 - DNA, 25 bp, Homo sapien
gctattacagtaacccagaaaagtg

SEQ ID NO: 2130429 - DNA, 25 bp, Homo sapien
tgcaaccagcatagcagaacgtgtg

SEQ ID NO: 2130430 - DNA, 25 bp, Homo sapien
tgaggtgacaaaccagcatgctgta

SEQ ID NO: 2130431 - DNA, 25 bp, Homo sapien
tactacctaccaggcacttcatggg

SEQ ID NO: 2130432 - DNA, 25 bp, Homo sapien
tcttgtcgtcatttggaaccaggct

SEQ ID NO: 2130433 - DNA, 25 bp, Homo sapien
aatcattaatctcaccatttgaaca

SEQ ID NO: 2130434 - DNA, 25 bp, Homo sapien
caccctttttgctatcaagggaaag

SEQ ID NO: 2130435 - DNA, 25 bp, Homo sapien
gaggctaagtcaggtatgtattaca

SEQ ID NO: 2130436 - DNA, 25 bp, Homo sapien
cctaggtattggagctgaaatgctg

SEQ ID NO: 2130437 - DNA, 25 bp, Homo sapien
gcagaagagaatgtgtataaaccca

SEQ ID NO: 2130438 - DNA, 25 bp, Homo sapien
agaaaatgcatggtatgtacttatg

SEQ ID NO: 2130439 - DNA, 25 bp, Homo sapien
taaacgatcaacaaaaaccatcagg

SEQ ID NO: 2130440 - DNA, 25 bp, Homo sapien
tgcctgattgcagaagtaaacgatc

SEQ ID NO: 2130441 - DNA, 25 bp, Homo sapien
cttacagccaccaagagtgctgaac

SEQ ID NO: 2130442 - DNA, 25 bp, Homo sapien
cagccaccaagagtgctgaacaatc

SEQ ID NO: 2130443 - DNA, 25 bp, Homo sapien
ccaccaagagtgctgaacaatcatc

SEQ ID NO: 2130444 - DNA, 25 bp, Homo sapien
tacagccaccaagagtgctgaacaa

SEQ ID NO: 2130445 - DNA, 25 bp, Homo sapien
tacccataatttttccactgacttc

SEQ ID NO: 2130446 - DNA, 25 bp, Homo sapien
tttccactgacttctgaaatttgga

SEQ ID NO: 2130447 - DNA, 25 bp, Homo sapien
acccataatttttccactgacttct

SEQ ID NO: 2130448 - DNA, 25 bp, Homo sapien
atttttccactgacttctgaaattt

SEQ ID NO: 2130449 - DNA, 25 bp, Homo sapien
gccaatcgtattccaagcaatgaca

SEQ ID NO: 2130450 - DNA, 25 bp, Homo sapien
tttttacagcagtacatagtctgga

SEQ ID NO: 2130451 - DNA, 25 bp, Homo sapien
gcaatgacactactaaaatcagatc

SEQ ID NO: 2130452 - DNA, 25 bp, Homo sapien
gattgttacaccaactattaaagcc

SEQ ID NO: 2130453 - DNA, 25 bp, Homo sapien
tatccatatctttctggccctcttt

SEQ ID NO: 2130454 - DNA, 25 bp, Homo sapien
ggctgccttaggtatgtgttttaac

SEQ ID NO: 2130455 - DNA, 25 bp, Homo sapien
cccaaggctgccttaggtatgtgtt

SEQ ID NO: 2130456 - DNA, 25 bp, Homo sapien
tggccctcttttgcggacctctttg

SEQ ID NO: 2130457 - DNA, 25 bp, Homo sapien
tttccacttagattgtacttaatgt

SEQ ID NO: 2130458 - DNA, 25 bp, Homo sapien
tcctgttgtcatagtgggcagaatc

SEQ ID NO: 2130459 - DNA, 25 bp, Homo sapien
gcagaatcaagggttccagaccatt

SEQ ID NO: 2130460 - DNA, 25 bp, Homo sapien
ttcctgttgtcatagtgggcagaat

SEQ ID NO: 2130461 - DNA, 25 bp, Homo sapien
cctgttgtcatagtgggcagaatca

SEQ ID NO: 2130462 - DNA, 25 bp, Homo sapien
caccactctaagcagtaagtgacct

SEQ ID NO: 2130463 - DNA, 25 bp, Homo sapien
cactctaagcagtaagtgacctttc

SEQ ID NO: 2130464 - DNA, 25 bp, Homo sapien
cccccttcccattgtcatagtttga

SEQ ID NO: 2130465 - DNA, 25 bp, Homo sapien
tctaagcagtaagtgacctttccat

SEQ ID NO: 2130466 - DNA, 25 bp, Homo sapien
tgtaatttattccagagaaccgagg

SEQ ID NO: 2130467 - DNA, 25 bp, Homo sapien
ttgtaatttattccagagaaccgag

SEQ ID NO: 2130468 - DNA, 25 bp, Homo sapien
gttatgaaatcgaatgttatgacta

SEQ ID NO: 2130469 - DNA, 25 bp, Homo sapien
cgtgttatgaaatcgaatgttatga

SEQ ID NO: 2130470 - DNA, 25 bp, Homo sapien
tatgaaatcgaatgttatgactata

SEQ ID NO: 2130471 - DNA, 25 bp, Homo sapien
ttacgtgttatgaaatcgaatgtta

SEQ ID NO: 2130472 - DNA, 25 bp, Homo sapien
tgtcctgtttggactcatgagtcat

SEQ ID NO: 2130473 - DNA, 25 bp, Homo sapien
acatcagtcataagatgggtagacg

SEQ ID NO: 2130474 - DNA, 25 bp, Homo sapien
gcgtggttgataaatgcttgttccc

SEQ ID NO: 2130475 - DNA, 25 bp, Homo sapien
tgggtagacgtaaagactgtcctgt

SEQ ID NO: 2130476 - DNA, 25 bp, Homo sapien
aatgatcagatagccatatagtaca

SEQ ID NO: 2130477 - DNA, 25 bp, Homo sapien
tctcacggttcataacttgagtatc

SEQ ID NO: 2130478 - DNA, 25 bp, Homo sapien
gcacatgttctatcctataaggaat

SEQ ID NO: 2130479 - DNA, 25 bp, Homo sapien
gaatgtagcttgattttggaactcc

SEQ ID NO: 2130480 - DNA, 25 bp, Homo sapien
tgtaactccttagctttagccagta

SEQ ID NO: 2130481 - DNA, 25 bp, Homo sapien
ccagtttgcaaatgttatgctgcat

SEQ ID NO: 2130482 - DNA, 25 bp, Homo sapien
gatgcatgtcataaaccagtttgca

SEQ ID NO: 2130483 - DNA, 25 bp, Homo sapien
cagttttgttcaggagtcatagagt

SEQ ID NO: 2130484 - DNA, 25 bp, Homo sapien
acgcgcgcgcgcgggagatcgaggc

SEQ ID NO: 2130485 - DNA, 25 bp, Homo sapien
cgcgcgggagatcgaggcgcccgcg

SEQ ID NO: 2130486 - DNA, 25 bp, Homo sapien
ggccaaaggggggtctcgcgcacgc

SEQ ID NO: 2130487 - DNA, 25 bp, Homo sapien
gcgcgcgcgggagatcgaggcgccc

SEQ ID NO: 2130488 - DNA, 25 bp, Homo sapien
actgtgaccgcgctctggatggctg

SEQ ID NO: 2130489 - DNA, 25 bp, Homo sapien
ctccgtgccgccagtcggactgtga

SEQ ID NO: 2130490 - DNA, 25 bp, Homo sapien
gtggatcccttaaggtcctcacatt

SEQ ID NO: 2130491 - DNA, 25 bp, Homo sapien
gcagctgtggatcccttaaggtcct

SEQ ID NO: 2130492 - DNA, 25 bp, Homo sapien
cgccaccgctgctacccacgccgtg

SEQ ID NO: 2130493 - DNA, 25 bp, Homo sapien
accgctgctacccacgccgtgctgc

SEQ ID NO: 2130494 - DNA, 25 bp, Homo sapien
cgctgctacccacgccgtgctgccc

SEQ ID NO: 2130495 - DNA, 25 bp, Homo sapien
ttggtgcagcggtcgccaccgctgc

SEQ ID NO: 2130496 - DNA, 25 bp, Homo sapien
tgagtgtctcgaagaaattgtagat

SEQ ID NO: 2130497 - DNA, 25 bp, Homo sapien
tatgagtgtctcgaagaaattgtag

SEQ ID NO: 2130498 - DNA, 25 bp, Homo sapien
ttatatgagtgtctcgaagaaattg

SEQ ID NO: 2130499 - DNA, 25 bp, Homo sapien
tatatgagtgtctcgaagaaattgt

SEQ ID NO: 2130500 - DNA, 25 bp, Homo sapien
taaagtcagatgctgtcactcaatg

SEQ ID NO: 2130501 - DNA, 25 bp, Homo sapien
tcacgtaggactgcttaataaattg

SEQ ID NO: 2130502 - DNA, 25 bp, Homo sapien
gatcgatcacatacaaacatttagc

SEQ ID NO: 2130503 - DNA, 25 bp, Homo sapien
ggcacttatctccttttcacgtagg

SEQ ID NO: 2130504 - DNA, 25 bp, Homo sapien
gaaccagtaaggacttctggcctca

SEQ ID NO: 2130505 - DNA, 25 bp, Homo sapien
cctgcagcggagctctgcagataaa

SEQ ID NO: 2130506 - DNA, 25 bp, Homo sapien
ggctcccagggttctacttataatg

SEQ ID NO: 2130507 - DNA, 25 bp, Homo sapien
atgttctatcccagtttccccggag

SEQ ID NO: 2130508 - DNA, 25 bp, Homo sapien
ggcacagtcaagctgatgagccata

SEQ ID NO: 2130509 - DNA, 25 bp, Homo sapien
aataaaagaagtgccaagtggaagt

SEQ ID NO: 2130510 - DNA, 25 bp, Homo sapien
ggaagtggtagaagaaagcaaaaca

SEQ ID NO: 2130511 - DNA, 25 bp, Homo sapien
tataaaagaagaacgagatgacaac

SEQ ID NO: 2130512 - DNA, 25 bp, Homo sapien
acttagcaaagttcattcaccaata

SEQ ID NO: 2130513 - DNA, 25 bp, Homo sapien
cttagcaaagttcattcaccaatat

SEQ ID NO: 2130514 - DNA, 25 bp, Homo sapien
aatccaagacttccaccgcctgaat

SEQ ID NO: 2130515 - DNA, 25 bp, Homo sapien
tctggcgtgtgcaatccaagacttc

SEQ ID NO: 2130516 - DNA, 25 bp, Homo sapien
gccattctagagtctggcgtgtgca

SEQ ID NO: 2130517 - DNA, 25 bp, Homo sapien
ctagagtctggcgtgtgcaatccaa

SEQ ID NO: 2130518 - DNA, 25 bp, Homo sapien
cagaagaaatctaagttatcagggc

SEQ ID NO: 2130519 - DNA, 25 bp, Homo sapien
gagtgagcattacccatattagtta

SEQ ID NO: 2130520 - DNA, 25 bp, Homo sapien
agttactgccttttacgagttcaga

SEQ ID NO: 2130521 - DNA, 25 bp, Homo sapien
cgagttcagaatttaccaaggacaa

SEQ ID NO: 2130522 - DNA, 25 bp, Homo sapien
gaacctcctctgataccattgtggg

SEQ ID NO: 2130523 - DNA, 25 bp, Homo sapien
catcagcttcaagtaccgcttcagg

SEQ ID NO: 2130524 - DNA, 25 bp, Homo sapien
cattgtgggagagtcgactcctgaa

SEQ ID NO: 2130525 - DNA, 25 bp, Homo sapien
tatgtgcagtaccagccattccagc

SEQ ID NO: 2130526 - DNA, 25 bp, Homo sapien
gatatcattaagtagtcttcagaag

SEQ ID NO: 2130527 - DNA, 25 bp, Homo sapien
tagtcttcagaagtgctcttgacat

SEQ ID NO: 2130528 - DNA, 25 bp, Homo sapien
tgaatcacagtttctgtatctgaat

SEQ ID NO: 2130529 - DNA, 25 bp, Homo sapien
gtaactgtagaaccaggaacacctc

SEQ ID NO: 2130530 - DNA, 25 bp, Homo sapien
ttataacttcagaaccaaacccatc

SEQ ID NO: 2130531 - DNA, 25 bp, Homo sapien
gaaccaaacccatcttctttagcat

SEQ ID NO: 2130532 - DNA, 25 bp, Homo sapien
taatggtgtattccccatatgctct

SEQ ID NO: 2130533 - DNA, 25 bp, Homo sapien
ttcagcctccgctttaaatatatac

SEQ ID NO: 2130534 - DNA, 25 bp, Homo sapien
catggaataaccacctaaattaata

SEQ ID NO: 2130535 - DNA, 25 bp, Homo sapien
tcatggaataaccacctaaattaat

SEQ ID NO: 2130536 - DNA, 25 bp, Homo sapien
ttcttgagaagaatctttaactgcc

SEQ ID NO: 2130537 - DNA, 25 bp, Homo sapien
agcactccagctactgaatgtccac

SEQ ID NO: 2130538 - DNA, 25 bp, Homo sapien
gagaagaatctttaactgccatgta

SEQ ID NO: 2130539 - DNA, 25 bp, Homo sapien
tcccgctgcattcggctctggtcaa

SEQ ID NO: 2130540 - DNA, 25 bp, Homo sapien
atgatggctactgataagtcactac

SEQ ID NO: 2130541 - DNA, 25 bp, Homo sapien
cactacagtgcccttattttcttac

SEQ ID NO: 2130542 - DNA, 25 bp, Homo sapien
tcactacagtgcccttattttctta

SEQ ID NO: 2130543 - DNA, 25 bp, Homo sapien
tgatggctactgataagtcactaca

SEQ ID NO: 2130544 - DNA, 25 bp, Homo sapien
cctacaatgacttccatgtaaactt

SEQ ID NO: 2130545 - DNA, 25 bp, Homo sapien
cagggacaactgttttattaacatc

SEQ ID NO: 2130546 - DNA, 25 bp, Homo sapien
catatgccgcagcccagacaacagg

SEQ ID NO: 2130547 - DNA, 25 bp, Homo sapien
acttcatctgctatttcagcgcaac

SEQ ID NO: 2130548 - DNA, 25 bp, Homo sapien
tagccaattcatggtggcattcaca

SEQ ID NO: 2130549 - DNA, 25 bp, Homo sapien
aaacataatgcattaagcaaggttc

SEQ ID NO: 2130550 - DNA, 25 bp, Homo sapien
ggcctaaaggctgagtaaatacata

SEQ ID NO: 2130551 - DNA, 25 bp, Homo sapien
tggcactcacttatacaggtaggat

SEQ ID NO: 2130552 - DNA, 25 bp, Homo sapien
tgcttgacaatcttcataccttcgg

SEQ ID NO: 2130553 - DNA, 25 bp, Homo sapien
ctgatgcttgacaatcttcatacct

SEQ ID NO: 2130554 - DNA, 25 bp, Homo sapien
tgacaatcttcataccttcgggaaa

SEQ ID NO: 2130555 - DNA, 25 bp, Homo sapien
tcttcataccttcgggaaactcttc

SEQ ID NO: 2130556 - DNA, 25 bp, Homo sapien
accactctggtagtaaatttcacaa

SEQ ID NO: 2130557 - DNA, 25 bp, Homo sapien
tgacaccaagttaccactctggtag

SEQ ID NO: 2130558 - DNA, 25 bp, Homo sapien
catttatacttttttggttctgttg

SEQ ID NO: 2130559 - DNA, 25 bp, Homo sapien
tgttgaatgagttactacagatgac

SEQ ID NO: 2130560 - DNA, 25 bp, Homo sapien
ttgaaggtactgtgctgctgtacta

SEQ ID NO: 2130561 - DNA, 25 bp, Homo sapien
attaatgccgtcacaaatttgaagg

SEQ ID NO: 2130562 - DNA, 25 bp, Homo sapien
tacttctgctttctaatgctgagtc

SEQ ID NO: 2130563 - DNA, 25 bp, Homo sapien
tactgtgctgctgtactacttctgc

SEQ ID NO: 2130564 - DNA, 25 bp, Homo sapien
taaagagcaaacaagcatagtttta

SEQ ID NO: 2130565 - DNA, 25 bp, Homo sapien
caaacaggtacatggagagtagaac

SEQ ID NO: 2130566 - DNA, 25 bp, Homo sapien
gaactgccaagtaaaccatcgatat

SEQ ID NO: 2130567 - DNA, 25 bp, Homo sapien
ttatctatagcatacacaaacaggt

SEQ ID NO: 2130568 - DNA, 25 bp, Homo sapien
tgacatttggtcagactgttttaaa

SEQ ID NO: 2130569 - DNA, 25 bp, Homo sapien
taaaaagtaatgagcagcactctac

SEQ ID NO: 2130570 - DNA, 25 bp, Homo sapien
ggtgccaaaactagttggcattcac

SEQ ID NO: 2130571 - DNA, 25 bp, Homo sapien
tcactatgtgaaaacaatactagtt

SEQ ID NO: 2130572 - DNA, 25 bp, Homo sapien
caaatatggcaagggtacactgtga

SEQ ID NO: 2130573 - DNA, 25 bp, Homo sapien
gatatcacatgtcgtttaaagccag

SEQ ID NO: 2130574 - DNA, 25 bp, Homo sapien
tgtgaacggccaacaaatgcctgtt

SEQ ID NO: 2130575 - DNA, 25 bp, Homo sapien
aatccagatggcgttgaagctccct

SEQ ID NO: 2130576 - DNA, 25 bp, Homo sapien
taataatcccacataacagtagcga

SEQ ID NO: 2130577 - DNA, 25 bp, Homo sapien
caagctttgaaacccggtgagacag

SEQ ID NO: 2130578 - DNA, 25 bp, Homo sapien
tttcaaagggctatgggatcccctg

SEQ ID NO: 2130579 - DNA, 25 bp, Homo sapien
cacaaagcgttgttaaagggatgca

SEQ ID NO: 2130580 - DNA, 25 bp, Homo sapien
tactcatatggtggcaacacatggg

SEQ ID NO: 2130581 - DNA, 25 bp, Homo sapien
ggaatgcagaattgtaggccccacc

SEQ ID NO: 2130582 - DNA, 25 bp, Homo sapien
catatggctagctccttcttgcgac

SEQ ID NO: 2130583 - DNA, 25 bp, Homo sapien
tttcagcaagttccctaggtgagcc

SEQ ID NO: 2130584 - DNA, 25 bp, Homo sapien
aagtggtccaatccattgctaaggg

SEQ ID NO: 2130585 - DNA, 25 bp, Homo sapien
tggccaggtgacatggaccttagca

SEQ ID NO: 2130586 - DNA, 25 bp, Homo sapien
ttataaaggactgagagctacttcc

SEQ ID NO: 2130587 - DNA, 25 bp, Homo sapien
gctcaagtcccttatcggcataata

SEQ ID NO: 2130588 - DNA, 25 bp, Homo sapien
ctatggcccttgactgtttgattat

SEQ ID NO: 2130589 - DNA, 25 bp, Homo sapien
ttgttacttggaatatgtcatccca

SEQ ID NO: 2130590 - DNA, 25 bp, Homo sapien
aaataattctcagctgacagtgttt

SEQ ID NO: 2130591 - DNA, 25 bp, Homo sapien
gtggagtccccataaacagaacaga

SEQ ID NO: 2130592 - DNA, 25 bp, Homo sapien
ggcaataatagccagcataccagaa

SEQ ID NO: 2130593 - DNA, 25 bp, Homo sapien
gattgtggaagttaatagattccag

SEQ ID NO: 2130594 - DNA, 25 bp, Homo sapien
cagtctgtgatttggggaatgtttc

SEQ ID NO: 2130595 - DNA, 25 bp, Homo sapien
ggaagacatttgaagtatgtcatac

SEQ ID NO: 2130596 - DNA, 25 bp, Homo sapien
ctggtgatgcctctaggcagcaaaa

SEQ ID NO: 2130597 - DNA, 25 bp, Homo sapien
tgcctctaggcagcaaaaaggcttc

SEQ ID NO: 2130598 - DNA, 25 bp, Homo sapien
gcttcttctggtaggtcctgatatc

SEQ ID NO: 2130599 - DNA, 25 bp, Homo sapien
ggtaggtcctgatatcttgatataa

SEQ ID NO: 2130600 - DNA, 25 bp, Homo sapien
ctgagctgggaccatttcttccaac

SEQ ID NO: 2130601 - DNA, 25 bp, Homo sapien
tgagctgggaccatttcttccaact

SEQ ID NO: 2130602 - DNA, 25 bp, Homo sapien
tcagggacaagtttagcagggctgc

SEQ ID NO: 2130603 - DNA, 25 bp, Homo sapien
gctgtggtcaaactggctgggtata

SEQ ID NO: 2130604 - DNA, 25 bp, Homo sapien
ggaaaataccaagcacctagatgtg

SEQ ID NO: 2130605 - DNA, 25 bp, Homo sapien
gcaccagacggacctgcctatgggt

SEQ ID NO: 2130606 - DNA, 25 bp, Homo sapien
ggagaatgaggaagatacgcagata

SEQ ID NO: 2130607 - DNA, 25 bp, Homo sapien
gaggaagatacgcagatacatctta

SEQ ID NO: 2130608 - DNA, 25 bp, Homo sapien
gcagatacatcttattggcatttga

SEQ ID NO: 2130609 - DNA, 25 bp, Homo sapien
tattggcatttgagtggggctccca

SEQ ID NO: 2130610 - DNA, 25 bp, Homo sapien
gagattcattcatcgatattttgtc

SEQ ID NO: 2130611 - DNA, 25 bp, Homo sapien
gatggtatgttgtgtccagtgtcca

SEQ ID NO: 2130612 - DNA, 25 bp, Homo sapien
tgtctacacacgcatatctcatttt

SEQ ID NO: 2130613 - DNA, 25 bp, Homo sapien
cactgccagatggtatgttgtgtcc

SEQ ID NO: 2130614 - DNA, 25 bp, Homo sapien
ttctcagcagcaaactggaacctgg

SEQ ID NO: 2130615 - DNA, 25 bp, Homo sapien
tgtgcttcagtatttgtgtcagcag

SEQ ID NO: 2130616 - DNA, 25 bp, Homo sapien
aaagtatttttcgtcacctgcactg

SEQ ID NO: 2130617 - DNA, 25 bp, Homo sapien
tctggagggaaggttgctttctcag

SEQ ID NO: 2130618 - DNA, 25 bp, Homo sapien
ttaggatctttccaaagcctcggtc

SEQ ID NO: 2130619 - DNA, 25 bp, Homo sapien
taggatctttccaaagcctcggtca

SEQ ID NO: 2130620 - DNA, 25 bp, Homo sapien
aggatctttccaaagcctcggtcat

SEQ ID NO: 2130621 - DNA, 25 bp, Homo sapien
tctgggtggtcaaaattctgtattt

SEQ ID NO: 2130622 - DNA, 25 bp, Homo sapien
ctgggtggtcaaaattctgtatttt

SEQ ID NO: 2130623 - DNA, 25 bp, Homo sapien
tgggtggtcaaaattctgtattttc

SEQ ID NO: 2130624 - DNA, 25 bp, Homo sapien
ctgggatcttctttttcttcctcac

SEQ ID NO: 2130625 - DNA, 25 bp, Homo sapien
actgggatcttctttttcttcctca

SEQ ID NO: 2130626 - DNA, 25 bp, Homo sapien
cactgggatcttctttttcttcctc

SEQ ID NO: 2130627 - DNA, 25 bp, Homo sapien
caaatgactgtataatgaggcaata

SEQ ID NO: 2130628 - DNA, 25 bp, Homo sapien
tgaggcaataataactgaaggaatc

SEQ ID NO: 2130629 - DNA, 25 bp, Homo sapien
tttatgcaacagcaaatgtctgcca

SEQ ID NO: 2130630 - DNA, 25 bp, Homo sapien
caataataactgaaggaatcaaggg

SEQ ID NO: 2130631 - DNA, 25 bp, Homo sapien
aataaaaatgttgctgctattttca

SEQ ID NO: 2130632 - DNA, 25 bp, Homo sapien
tcaaataaaaatgttgctgctattt

SEQ ID NO: 2130633 - DNA, 25 bp, Homo sapien
atgttgctgctattttcataaagac

SEQ ID NO: 2130634 - DNA, 25 bp, Homo sapien
aatgttgctgctattttcataaaga

SEQ ID NO: 2130635 - DNA, 25 bp, Homo sapien
tagttggcacgaactgacatccttg

SEQ ID NO: 2130636 - DNA, 25 bp, Homo sapien
cagatacacatctgccttaatgaag

SEQ ID NO: 2130637 - DNA, 25 bp, Homo sapien
gccaatataaaggttgctctcccat

SEQ ID NO: 2130638 - DNA, 25 bp, Homo sapien
tgaagcaaagatctgactgtggaaa

SEQ ID NO: 2130639 - DNA, 25 bp, Homo sapien
gcaggttcataagcgctgccagaac

SEQ ID NO: 2130640 - DNA, 25 bp, Homo sapien
ttcataagcgctgccagaacagtga

SEQ ID NO: 2130641 - DNA, 25 bp, Homo sapien
gctgccagaacagtgataaatggct

SEQ ID NO: 2130642 - DNA, 25 bp, Homo sapien
ctgcgtgcaggttcataagcgctgc

SEQ ID NO: 2130643 - DNA, 25 bp, Homo sapien
tgtctaaagtcctaaagagttccaa

SEQ ID NO: 2130644 - DNA, 25 bp, Homo sapien
ttttcctagttggtgtgcctgctca

SEQ ID NO: 2130645 - DNA, 25 bp, Homo sapien
taatgattgacttctgtcactgcca

SEQ ID NO: 2130646 - DNA, 25 bp, Homo sapien
ggattgtcagccttggtagcctttg

SEQ ID NO: 2130647 - DNA, 25 bp, Homo sapien
aaactggtgtagtggcaggcctttg

SEQ ID NO: 2130648 - DNA, 25 bp, Homo sapien
aaattaaactggtgtagtggcaggc

SEQ ID NO: 2130649 - DNA, 25 bp, Homo sapien
attaaactggtgtagtggcaggcct

SEQ ID NO: 2130650 - DNA, 25 bp, Homo sapien
actggtgtagtggcaggcctttgta

SEQ ID NO: 2130651 - DNA, 25 bp, Homo sapien
ggggtcactgcttgtaggtttcctg

SEQ ID NO: 2130652 - DNA, 25 bp, Homo sapien
gcaaggggtcactgcttgtaggttt

SEQ ID NO: 2130653 - DNA, 25 bp, Homo sapien
actgttctctctgatgcaaggggtc

SEQ ID NO: 2130654 - DNA, 25 bp, Homo sapien
tcactgttctctctgatgcaagggg

SEQ ID NO: 2130655 - DNA, 25 bp, Homo sapien
caatgcctgactggcactggactgt

SEQ ID NO: 2130656 - DNA, 25 bp, Homo sapien
tgaatgtagcaatgcctgactggca

SEQ ID NO: 2130657 - DNA, 25 bp, Homo sapien
ggactgtgttaattgcttgcagaag

SEQ ID NO: 2130658 - DNA, 25 bp, Homo sapien
gggttgtcagtgaatgtagcaatgc

SEQ ID NO: 2130659 - DNA, 25 bp, Homo sapien
ctactgttgcatattaagctgttcc

SEQ ID NO: 2130660 - DNA, 25 bp, Homo sapien
cactgttttagctccgacatatgag

SEQ ID NO: 2130661 - DNA, 25 bp, Homo sapien
cgtgattgttagcttcctaagaccc

SEQ ID NO: 2130662 - DNA, 25 bp, Homo sapien
cagaagcggatgttggcacctcact

SEQ ID NO: 2130663 - DNA, 25 bp, Homo sapien
gaaagcatgccagacaggaacacag

SEQ ID NO: 2130664 - DNA, 25 bp, Homo sapien
tctctctgtcagtatggctgtgtcc

SEQ ID NO: 2130665 - DNA, 25 bp, Homo sapien
gccactgtctgcctaggcctttgtc

SEQ ID NO: 2130666 - DNA, 25 bp, Homo sapien
gaacacaggttttcaatccgatctg

SEQ ID NO: 2130667 - DNA, 25 bp, Homo sapien
ataaatctgtaactgattatgatca

SEQ ID NO: 2130668 - DNA, 25 bp, Homo sapien
aagcagtgggagttgaaaaggagaa

SEQ ID NO: 2130669 - DNA, 25 bp, Homo sapien
cagtgggagttgaaaaggagaagga

SEQ ID NO: 2130670 - DNA, 25 bp, Homo sapien
gaagcagtgggagttgaaaaggaga

SEQ ID NO: 2130671 - DNA, 25 bp, Homo sapien
aatcatgaatttgagccaatacctc

SEQ ID NO: 2130672 - DNA, 25 bp, Homo sapien
gaatttgagccaatacctcagagag

SEQ ID NO: 2130673 - DNA, 25 bp, Homo sapien
tttgagccaatacctcagagagagc

SEQ ID NO: 2130674 - DNA, 25 bp, Homo sapien
ctcagagagagccacatctgttgcc

SEQ ID NO: 2130675 - DNA, 25 bp, Homo sapien
agtgcttatcgccatttgagtaggg

SEQ ID NO: 2130676 - DNA, 25 bp, Homo sapien
tcagcgcgggagttggcagttacag

SEQ ID NO: 2130677 - DNA, 25 bp, Homo sapien
aagtgaggtagtccggagtcagcgc

SEQ ID NO: 2130678 - DNA, 25 bp, Homo sapien
ctgaggttggttgctgcggtgattc

SEQ ID NO: 2130679 - DNA, 25 bp, Homo sapien
cccttcggagtttgatgtgatcgta

SEQ ID NO: 2130680 - DNA, 25 bp, Homo sapien
taatagggacgggtatgtgtagcct

SEQ ID NO: 2130681 - DNA, 25 bp, Homo sapien
aagatggcggatactctcccttcgg

SEQ ID NO: 2130682 - DNA, 25 bp, Homo sapien
gacacgtttcccgtcaagatggcgg

SEQ ID NO: 2130683 - DNA, 25 bp, Homo sapien
ttctttatcacatatcgacgatttc

SEQ ID NO: 2130684 - DNA, 25 bp, Homo sapien
cacatatcgacgatttccagtgata

SEQ ID NO: 2130685 - DNA, 25 bp, Homo sapien
tatcacatatcgacgatttccagtg

SEQ ID NO: 2130686 - DNA, 25 bp, Homo sapien
catatcgacgatttccagtgatatc

SEQ ID NO: 2130687 - DNA, 25 bp, Homo sapien
taagatatgctatttcatactgcac

SEQ ID NO: 2130688 - DNA, 25 bp, Homo sapien
agatatgctatttcatactgcactc

SEQ ID NO: 2130689 - DNA, 25 bp, Homo sapien
aagatatgctatttcatactgcact

SEQ ID NO: 2130690 - DNA, 25 bp, Homo sapien
accgggttagatcgtggaaagtgag

SEQ ID NO: 2130691 - DNA, 25 bp, Homo sapien
gggctaatagatggcttcgcctagc

SEQ ID NO: 2130692 - DNA, 25 bp, Homo sapien
cagctccaattccacttgcgcatct

SEQ ID NO: 2130693 - DNA, 25 bp, Homo sapien
tctcccaaactctgcgggggctaat

SEQ ID NO: 2130694 - DNA, 25 bp, Homo sapien
ggtccaggctcgaccaagaacagag

SEQ ID NO: 2130695 - DNA, 25 bp, Homo sapien
gcgtccgactacctgagtgggtcca

SEQ ID NO: 2130696 - DNA, 25 bp, Homo sapien
gaactgttcgcaagtcttcagcagc

SEQ ID NO: 2130697 - DNA, 25 bp, Homo sapien
agaacagagatccagtccgagaagg

SEQ ID NO: 2130698 - DNA, 25 bp, Homo sapien
tgtctctatcgtgggtcctccggcc

SEQ ID NO: 2130699 - DNA, 25 bp, Homo sapien
tgactcctctagatcccctcgcact

SEQ ID NO: 2130700 - DNA, 25 bp, Homo sapien
tccggccctcgctttctcgccctga

SEQ ID NO: 2130701 - DNA, 25 bp, Homo sapien
actctgtctctatcgtgggtcctcc

SEQ ID NO: 2130702 - DNA, 25 bp, Homo sapien
gatcaaagacttgcggcaggcagat

SEQ ID NO: 2130703 - DNA, 25 bp, Homo sapien
gaggatccggacctgctcaacagta

SEQ ID NO: 2130704 - DNA, 25 bp, Homo sapien
tggtgcaatcggtgaacaaagtttc

SEQ ID NO: 2130705 - DNA, 25 bp, Homo sapien
cagtctcttcagcttggtgtacaca

SEQ ID NO: 2130706 - DNA, 25 bp, Homo sapien
taaaatgctttgtagtcgaaataaa

SEQ ID NO: 2130707 - DNA, 25 bp, Homo sapien
tttggatggcaacaaatgaattaga

SEQ ID NO: 2130708 - DNA, 25 bp, Homo sapien
ggccactatctgaagtcccttgtaa

SEQ ID NO: 2130709 - DNA, 25 bp, Homo sapien
tactcttacaatccataattgcctg

SEQ ID NO: 2130710 - DNA, 25 bp, Homo sapien
tttagttgttctagcagaaaatgga

SEQ ID NO: 2130711 - DNA, 25 bp, Homo sapien
ttagttgttctagcagaaaatggaa

SEQ ID NO: 2130712 - DNA, 25 bp, Homo sapien
aatggaaaaagggatgccgccactt

SEQ ID NO: 2130713 - DNA, 25 bp, Homo sapien
tggaaaaagggatgccgccacttta

SEQ ID NO: 2130714 - DNA, 25 bp, Homo sapien
tcattgttagctcccattttctgct

SEQ ID NO: 2130715 - DNA, 25 bp, Homo sapien
gctatccgatcaataaaataacctc

SEQ ID NO: 2130716 - DNA, 25 bp, Homo sapien
taacctccttcattactggtgtacc

SEQ ID NO: 2130717 - DNA, 25 bp, Homo sapien
gggttaaagaggctatccgatcaat

SEQ ID NO: 2130718 - DNA, 25 bp, Homo sapien
tccttcattactggtgtaccatttc

SEQ ID NO: 2130719 - DNA, 25 bp, Homo sapien
gaacagatagtatacacatctggga

SEQ ID NO: 2130720 - DNA, 25 bp, Homo sapien
gctgaatctgcattgaagaacaccg

SEQ ID NO: 2130721 - DNA, 25 bp, Homo sapien
ggacatcgacagagataaggcctgc

SEQ ID NO: 2130722 - DNA, 25 bp, Homo sapien
tgcctgtgtataaagctgaatctgc

SEQ ID NO: 2130723 - DNA, 25 bp, Homo sapien
tcacaagcacaaaatgccattttct

SEQ ID NO: 2130724 - DNA, 25 bp, Homo sapien
tatattttagcatacacccagtcaa

SEQ ID NO: 2130725 - DNA, 25 bp, Homo sapien
tccactaaaatgatcctcgcaccag

SEQ ID NO: 2130726 - DNA, 25 bp, Homo sapien
gcacagagactgattatagagttca

SEQ ID NO: 2130727 - DNA, 25 bp, Homo sapien
taagacatacaagaacatcacccaa

SEQ ID NO: 2130728 - DNA, 25 bp, Homo sapien
cagaccccattctgtagatacgtaa

SEQ ID NO: 2130729 - DNA, 25 bp, Homo sapien
tctgtagatacgtaacctcaaagtt

SEQ ID NO: 2130730 - DNA, 25 bp, Homo sapien
tgaagcccttttataagcgtcagac

SEQ ID NO: 2130731 - DNA, 25 bp, Homo sapien
ggaatcccaacatgtaatacagctg

SEQ ID NO: 2130732 - DNA, 25 bp, Homo sapien
tgtgatgtccttttcggtttggacc

SEQ ID NO: 2130733 - DNA, 25 bp, Homo sapien
tacaccaagtttctacttctcaaga

SEQ ID NO: 2130734 - DNA, 25 bp, Homo sapien
ctacttctcaagagatggtcagcac

SEQ ID NO: 2130735 - DNA, 25 bp, Homo sapien
tccatgtcactaagacatacaagct

SEQ ID NO: 2130736 - DNA, 25 bp, Homo sapien
gagaaccctctttgataaatgaaga

SEQ ID NO: 2130737 - DNA, 25 bp, Homo sapien
atttctctaggtttatcctcattac

SEQ ID NO: 2130738 - DNA, 25 bp, Homo sapien
gcagatgagattaactcttgccgta

SEQ ID NO: 2130739 - DNA, 25 bp, Homo sapien
cctcattactatctttcaccctaga

SEQ ID NO: 2130740 - DNA, 25 bp, Homo sapien
ttgccgtaagttgggatttcaagtc

SEQ ID NO: 2130741 - DNA, 25 bp, Homo sapien
agggctaatggcaccacctgcctct

SEQ ID NO: 2130742 - DNA, 25 bp, Homo sapien
ctgatctgtcagtcccaacagcagg

SEQ ID NO: 2130743 - DNA, 25 bp, Homo sapien
tgatgccacttcagtactgatctgt

SEQ ID NO: 2130744 - DNA, 25 bp, Homo sapien
gctaatggcaccacctgcctctatg

SEQ ID NO: 2130745 - DNA, 25 bp, Homo sapien
ctcaaaggttttggtcttaggactg

SEQ ID NO: 2130746 - DNA, 25 bp, Homo sapien
ataggcagttctcaaaggttttggt

SEQ ID NO: 2130747 - DNA, 25 bp, Homo sapien
cttaaataggcagttctcaaaggtt

SEQ ID NO: 2130748 - DNA, 25 bp, Homo sapien
gcagttctcaaaggttttggtctta

SEQ ID NO: 2130749 - DNA, 25 bp, Homo sapien
tggctgcaactaagagtgctttggg

SEQ ID NO: 2130750 - DNA, 25 bp, Homo sapien
ctttggctgcaactaagagtgcttt

SEQ ID NO: 2130751 - DNA, 25 bp, Homo sapien
gctttggctgcaactaagagtgctt

SEQ ID NO: 2130752 - DNA, 25 bp, Homo sapien
actgctttggctgcaactaagagtg

SEQ ID NO: 2130753 - DNA, 25 bp, Homo sapien
ctgtgctctgtaagaattggtcagc

SEQ ID NO: 2130754 - DNA, 25 bp, Homo sapien
tgtgctctgtaagaattggtcagca

SEQ ID NO: 2130755 - DNA, 25 bp, Homo sapien
ttggaaccatgcctggattgaaatt

SEQ ID NO: 2130756 - DNA, 25 bp, Homo sapien
cacaatacatagttctgcttcccag

SEQ ID NO: 2130757 - DNA, 25 bp, Homo sapien
tcagcctgagtggtcagttttgcaa

SEQ ID NO: 2130758 - DNA, 25 bp, Homo sapien
ccagtacaatgtcggtttcctccat

SEQ ID NO: 2130759 - DNA, 25 bp, Homo sapien
tcatccaggtattctgcatccagct

SEQ ID NO: 2130760 - DNA, 25 bp, Homo sapien
agtcatccaggtattctgcatccag

SEQ ID NO: 2130761 - DNA, 25 bp, Homo sapien
ccaggtattctgcatccagctgctg

SEQ ID NO: 2130762 - DNA, 25 bp, Homo sapien
gtagtcatccaggtattctgcatcc

SEQ ID NO: 2130763 - DNA, 25 bp, Homo sapien
gtgatgaccagccaatacttgggct

SEQ ID NO: 2130764 - DNA, 25 bp, Homo sapien
tccatggcctcgatcttggtggcac

SEQ ID NO: 2130765 - DNA, 25 bp, Homo sapien
ggctccactgaccagtagatgttgt

SEQ ID NO: 2130766 - DNA, 25 bp, Homo sapien
tgctcactgggcctcttagtcaggg

SEQ ID NO: 2130767 - DNA, 25 bp, Homo sapien
cttcaacttgtactttcagattaat

SEQ ID NO: 2130768 - DNA, 25 bp, Homo sapien
cttgtactttcagattaatggtcat

SEQ ID NO: 2130769 - DNA, 25 bp, Homo sapien
tcaacttgtactttcagattaatgg

SEQ ID NO: 2130770 - DNA, 25 bp, Homo sapien
caacttgtactttcagattaatggt

SEQ ID NO: 2130771 - DNA, 25 bp, Homo sapien
tcactcaaccttttcagattgctgt

SEQ ID NO: 2130772 - DNA, 25 bp, Homo sapien
tgtgtgcctctgttatagaactcag

SEQ ID NO: 2130773 - DNA, 25 bp, Homo sapien
ttgtgtgtgcctctgttatagaact

SEQ ID NO: 2130774 - DNA, 25 bp, Homo sapien
tgttatagaactcagttacaggcat

SEQ ID NO: 2130775 - DNA, 25 bp, Homo sapien
gcctctgttatagaactcagttaca

SEQ ID NO: 2130776 - DNA, 25 bp, Homo sapien
aacaatattttgttggtcctgtccg

SEQ ID NO: 2130777 - DNA, 25 bp, Homo sapien
tattttgttggtcctgtccgaggag

SEQ ID NO: 2130778 - DNA, 25 bp, Homo sapien
tttgttggtcctgtccgaggagcct

SEQ ID NO: 2130779 - DNA, 25 bp, Homo sapien
aatattttgttggtcctgtccgagg

SEQ ID NO: 2130780 - DNA, 25 bp, Homo sapien
tgttttcttgtcatttgcctcttcc

SEQ ID NO: 2130781 - DNA, 25 bp, Homo sapien
ctgttaacagcttgttttcttgtca

SEQ ID NO: 2130782 - DNA, 25 bp, Homo sapien
ttttcttgtcatttgcctcttcctt

SEQ ID NO: 2130783 - DNA, 25 bp, Homo sapien
cagcttgttttcttgtcatttgcct

SEQ ID NO: 2130784 - DNA, 25 bp, Homo sapien
cagctccatgacgtttttcttatag

SEQ ID NO: 2130785 - DNA, 25 bp, Homo sapien
gctccatgacgtttttcttatagaa

SEQ ID NO: 2130786 - DNA, 25 bp, Homo sapien
ctacagctccatgacgtttttctta

SEQ ID NO: 2130787 - DNA, 25 bp, Homo sapien
acagctccatgacgtttttcttata

SEQ ID NO: 2130788 - DNA, 25 bp, Homo sapien
tagtattcccatcatatgccataat

SEQ ID NO: 2130789 - DNA, 25 bp, Homo sapien
ttcagtgtaagtgggaaagtgttct

SEQ ID NO: 2130790 - DNA, 25 bp, Homo sapien
aagtgttctttagtattcccatcat

SEQ ID NO: 2130791 - DNA, 25 bp, Homo sapien
cagtgtaagtgggaaagtgttcttt

SEQ ID NO: 2130792 - DNA, 25 bp, Homo sapien
cacaagtatcacaaaaggttccaaa

SEQ ID NO: 2130793 - DNA, 25 bp, Homo sapien
caaaattggcaatgctattatcaac

SEQ ID NO: 2130794 - DNA, 25 bp, Homo sapien
gggtaaactttcctcacaagtatca

SEQ ID NO: 2130795 - DNA, 25 bp, Homo sapien
tcatgtatgagagacagccaattat

SEQ ID NO: 2130796 - DNA, 25 bp, Homo sapien
tgaggagttttacaactgtacctta

SEQ ID NO: 2130797 - DNA, 25 bp, Homo sapien
tgggacctggtaatacataatgaag

SEQ ID NO: 2130798 - DNA, 25 bp, Homo sapien
tctatggatgtacacaaaaagggac

SEQ ID NO: 2130799 - DNA, 25 bp, Homo sapien
catgtcataagtgaagaaattagct

SEQ ID NO: 2130800 - DNA, 25 bp, Homo sapien
caattttctgaagcgaaatgaaatc

SEQ ID NO: 2130801 - DNA, 25 bp, Homo sapien
gcaattttctgaagcgaaatgaaat

SEQ ID NO: 2130802 - DNA, 25 bp, Homo sapien
gcctccagaactaagcagcctgatg

SEQ ID NO: 2130803 - DNA, 25 bp, Homo sapien
aaacatctcagtgctatctccattc

SEQ ID NO: 2130804 - DNA, 25 bp, Homo sapien
tctttgtatttgtccgctgtaaaca

SEQ ID NO: 2130805 - DNA, 25 bp, Homo sapien
tctacttccacgtgatgagccatat

SEQ ID NO: 2130806 - DNA, 25 bp, Homo sapien
caacactcccaaagaacgcttaggg

SEQ ID NO: 2130807 - DNA, 25 bp, Homo sapien
cagaaggcgggcattttcctgcaac

SEQ ID NO: 2130808 - DNA, 25 bp, Homo sapien
gactgcatgggtcagaaggcgggca

SEQ ID NO: 2130809 - DNA, 25 bp, Homo sapien
tcctggcgataagaggcctgggact

SEQ ID NO: 2130810 - DNA, 25 bp, Homo sapien
ggcccaaggcatagaattagttttg

SEQ ID NO: 2130811 - DNA, 25 bp, Homo sapien
aaggcttgacttataggaagtggca

SEQ ID NO: 2130812 - DNA, 25 bp, Homo sapien
gattcactcgagtggccagaagagg

SEQ ID NO: 2130813 - DNA, 25 bp, Homo sapien
caataatttgactgattcactcgag

SEQ ID NO: 2130814 - DNA, 25 bp, Homo sapien
ttagaattaagatcatcaggctctg

SEQ ID NO: 2130815 - DNA, 25 bp, Homo sapien
tttccctgaagagtgttcatagcca

SEQ ID NO: 2130816 - DNA, 25 bp, Homo sapien
tctgaagtttcatcgcctcagccat

SEQ ID NO: 2130817 - DNA, 25 bp, Homo sapien
ggctctgattcggtcccattttggc

SEQ ID NO: 2130818 - DNA, 25 bp, Homo sapien
aatagaacagtaagagtcattggtc

SEQ ID NO: 2130819 - DNA, 25 bp, Homo sapien
gaacagtaagagtcattggtctggg

SEQ ID NO: 2130820 - DNA, 25 bp, Homo sapien
gccccacaatagaacagtaagagtc

SEQ ID NO: 2130821 - DNA, 25 bp, Homo sapien
gagtcattggtctgggattctggaa

SEQ ID NO: 2130822 - DNA, 25 bp, Homo sapien
tataaccaaagtagacttattattc

SEQ ID NO: 2130823 - DNA, 25 bp, Homo sapien
ttgagtatctttataaccaaagtag

SEQ ID NO: 2130824 - DNA, 25 bp, Homo sapien
ccaaagtagacttattattctctcc

SEQ ID NO: 2130825 - DNA, 25 bp, Homo sapien
ctaatcatccctcttgagtatcttt

SEQ ID NO: 2130826 - DNA, 25 bp, Homo sapien
tacttctgtcgcttcttggaaggaa

SEQ ID NO: 2130827 - DNA, 25 bp, Homo sapien
ctacttctgtcgcttcttggaagga

SEQ ID NO: 2130828 - DNA, 25 bp, Homo sapien
gaacagttcaaatgctacatcctac

SEQ ID NO: 2130829 - DNA, 25 bp, Homo sapien
ggtctggaggcactcaacacaattg

SEQ ID NO: 2130830 - DNA, 25 bp, Homo sapien
gatgatatactccttggtctggagg

SEQ ID NO: 2130831 - DNA, 25 bp, Homo sapien
tctcttcgcactggacaaagtcttg

SEQ ID NO: 2130832 - DNA, 25 bp, Homo sapien
tgttttatgggaacaggtactgtct

SEQ ID NO: 2130833 - DNA, 25 bp, Homo sapien
tcagtgttttatgggaacaggtact

SEQ ID NO: 2130834 - DNA, 25 bp, Homo sapien
caatgcattgatgttccattgatgt

SEQ ID NO: 2130835 - DNA, 25 bp, Homo sapien
ggtactgtctccagtacaatgcatt

SEQ ID NO: 2130836 - DNA, 25 bp, Homo sapien
ctatgtattgccacacctctctttt

SEQ ID NO: 2130837 - DNA, 25 bp, Homo sapien
catctgttacaaagtaagaccaatt

SEQ ID NO: 2130838 - DNA, 25 bp, Homo sapien
tatcatctgttacaaagtaagacca

SEQ ID NO: 2130839 - DNA, 25 bp, Homo sapien
gtatcatctgttacaaagtaagacc

SEQ ID NO: 2130840 - DNA, 25 bp, Homo sapien
cagtatcatctgttacaaagtaaga

SEQ ID NO: 2130841 - DNA, 25 bp, Homo sapien
ataatgaccgttaagctcagaccca

SEQ ID NO: 2130842 - DNA, 25 bp, Homo sapien
atgaccgttaagctcagacccattc

SEQ ID NO: 2130843 - DNA, 25 bp, Homo sapien
taatgaccgttaagctcagacccat

SEQ ID NO: 2130844 - DNA, 25 bp, Homo sapien
cataatgaccgttaagctcagaccc

SEQ ID NO: 2130845 - DNA, 25 bp, Homo sapien
tctgctgcagtggattgagggttgg

SEQ ID NO: 2130846 - DNA, 25 bp, Homo sapien
ggtccaggtgcagcaaatggagact

SEQ ID NO: 2130847 - DNA, 25 bp, Homo sapien
tagggctgcatgagcaattccatgt

SEQ ID NO: 2130848 - DNA, 25 bp, Homo sapien
ggagactgcatcttatctttatccc

SEQ ID NO: 2130849 - DNA, 25 bp, Homo sapien
agttttgtgaggacagtatacatac

SEQ ID NO: 2130850 - DNA, 25 bp, Homo sapien
cagttttgtgaggacagtatacata

SEQ ID NO: 2130851 - DNA, 25 bp, Homo sapien
ccagttttgtgaggacagtatacat

SEQ ID NO: 2130852 - DNA, 25 bp, Homo sapien
acagtgcatattaaacttgttacat

SEQ ID NO: 2130853 - DNA, 25 bp, Homo sapien
gcatattaaacttgttacattatga

SEQ ID NO: 2130854 - DNA, 25 bp, Homo sapien
cagtgcatattaaacttgttacatt

SEQ ID NO: 2130855 - DNA, 25 bp, Homo sapien
tattaaacttgttacattatgatta

SEQ ID NO: 2130856 - DNA, 25 bp, Homo sapien
tggaagtaggggatgaggcatcatc

SEQ ID NO: 2130857 - DNA, 25 bp, Homo sapien
ctggaagtaggggatgaggcatcat

SEQ ID NO: 2130858 - DNA, 25 bp, Homo sapien
agtaggggatgaggcatcatcataa

SEQ ID NO: 2130859 - DNA, 25 bp, Homo sapien
gaagtaggggatgaggcatcatcat

SEQ ID NO: 2130860 - DNA, 25 bp, Homo sapien
gagtggactgtgaatctgtgctgca

SEQ ID NO: 2130861 - DNA, 25 bp, Homo sapien
taccagctctggagagtggactgtg

SEQ ID NO: 2130862 - DNA, 25 bp, Homo sapien
catggcaactgatgcaggaggtaag

SEQ ID NO: 2130863 - DNA, 25 bp, Homo sapien
ggcaatagtattgagatggttcatc

SEQ ID NO: 2130864 - DNA, 25 bp, Homo sapien
gatgttcacacgctaatgccactgc

SEQ ID NO: 2130865 - DNA, 25 bp, Homo sapien
attcattaattgccagctgctcagc

SEQ ID NO: 2130866 - DNA, 25 bp, Homo sapien
cgtgtgaccatttcctatcaattca

SEQ ID NO: 2130867 - DNA, 25 bp, Homo sapien
cagagctaatcagatggtgttggta

SEQ ID NO: 2130868 - DNA, 25 bp, Homo sapien
cgatcaagtttcagtccattgttat

SEQ ID NO: 2130869 - DNA, 25 bp, Homo sapien
gatcaagtttcagtccattgttatt

SEQ ID NO: 2130870 - DNA, 25 bp, Homo sapien
caagtttcagtccattgttattttt

SEQ ID NO: 2130871 - DNA, 25 bp, Homo sapien
caaattcgatcaagtttcagtccat

SEQ ID NO: 2130872 - DNA, 25 bp, Homo sapien
tagagaaggagcaggagaaggactc

SEQ ID NO: 2130873 - DNA, 25 bp, Homo sapien
agaaggagcaggagaaggactctct

SEQ ID NO: 2130874 - DNA, 25 bp, Homo sapien
ctagagaaggagcaggagaaggact

SEQ ID NO: 2130875 - DNA, 25 bp, Homo sapien
gagaaggagcaggagaaggactctc

SEQ ID NO: 2130876 - DNA, 25 bp, Homo sapien
gtctggctcccaggacgatgattct

SEQ ID NO: 2130877 - DNA, 25 bp, Homo sapien
tctgagagggagagctggacacact

SEQ ID NO: 2130878 - DNA, 25 bp, Homo sapien
atgatgatccatctgagagggagag

SEQ ID NO: 2130879 - DNA, 25 bp, Homo sapien
tccaaatgatgatccatctgagagg

SEQ ID NO: 2130880 - DNA, 25 bp, Homo sapien
caaaagatgttgtgactgtgtcagg

SEQ ID NO: 2130881 - DNA, 25 bp, Homo sapien
tgtcaggcgtattgtatcacatata

SEQ ID NO: 2130882 - DNA, 25 bp, Homo sapien
taatcactcttaaatgggcaactgc

SEQ ID NO: 2130883 - DNA, 25 bp, Homo sapien
tgaatgatacagtaaaggaagatct

SEQ ID NO: 2130884 - DNA, 25 bp, Homo sapien
cacaatgtagtaacaaccaggtagt

SEQ ID NO: 2130885 - DNA, 25 bp, Homo sapien
tcactcatttgtagactctcgttct

SEQ ID NO: 2130886 - DNA, 25 bp, Homo sapien
cactcatttgtagactctcgttctt

SEQ ID NO: 2130887 - DNA, 25 bp, Homo sapien
ctagaatcagttgtacacaatgtag

SEQ ID NO: 2130888 - DNA, 25 bp, Homo sapien
agttcctctctattgttgggcatca

SEQ ID NO: 2130889 - DNA, 25 bp, Homo sapien
aattttttgatggttagtccattat

SEQ ID NO: 2130890 - DNA, 25 bp, Homo sapien
tcctctctattgttgggcatcataa

SEQ ID NO: 2130891 - DNA, 25 bp, Homo sapien
ttttttgatggttagtccattatct

SEQ ID NO: 2130892 - DNA, 25 bp, Homo sapien
agagggtatagcctttcactgtcag

SEQ ID NO: 2130893 - DNA, 25 bp, Homo sapien
gagccccagagggtatagcctttca

SEQ ID NO: 2130894 - DNA, 25 bp, Homo sapien
ttttggagccccagagggtatagcc

SEQ ID NO: 2130895 - DNA, 25 bp, Homo sapien
ctgcattttggagccccagagggta

SEQ ID NO: 2130896 - DNA, 25 bp, Homo sapien
gagtttgggtagtttaatatcatga

SEQ ID NO: 2130897 - DNA, 25 bp, Homo sapien
aagagtttgggtagtttaatatcat

SEQ ID NO: 2130898 - DNA, 25 bp, Homo sapien
acctgactttctttctgacaactat

SEQ ID NO: 2130899 - DNA, 25 bp, Homo sapien
cctgactttctttctgacaactatt

SEQ ID NO: 2130900 - DNA, 25 bp, Homo sapien
tgatattggggacatttctttctct

SEQ ID NO: 2130901 - DNA, 25 bp, Homo sapien
gtaggtaccctccttccttgatgct

SEQ ID NO: 2130902 - DNA, 25 bp, Homo sapien
ctggtaggtaccctccttccttgat

SEQ ID NO: 2130903 - DNA, 25 bp, Homo sapien
ctgcatttctggtaggtaccctcct

SEQ ID NO: 2130904 - DNA, 25 bp, Homo sapien
gaaatgccattgattgtctttatta

SEQ ID NO: 2130905 - DNA, 25 bp, Homo sapien
gcactatgtaaaggatccgaaccat

SEQ ID NO: 2130906 - DNA, 25 bp, Homo sapien
aagcactatgtaaaggatccgaacc

SEQ ID NO: 2130907 - DNA, 25 bp, Homo sapien
gaaattatagtttgcagcttgtagt

SEQ ID NO: 2130908 - DNA, 25 bp, Homo sapien
tagtttgcagcttgtagtgggaaag

SEQ ID NO: 2130909 - DNA, 25 bp, Homo sapien
cacgttgtgagcatgtaccatagaa

SEQ ID NO: 2130910 - DNA, 25 bp, Homo sapien
gcacgttgtgagcatgtaccataga

SEQ ID NO: 2130911 - DNA, 25 bp, Homo sapien
acgttgtgagcatgtaccatagaac

SEQ ID NO: 2130912 - DNA, 25 bp, Homo sapien
cgttgtgagcatgtaccatagaact

SEQ ID NO: 2130913 - DNA, 25 bp, Homo sapien
gtcccacaagcaataaatttcctag

SEQ ID NO: 2130914 - DNA, 25 bp, Homo sapien
tgtcccacaagcaataaatttccta

SEQ ID NO: 2130915 - DNA, 25 bp, Homo sapien
cccacaagcaataaatttcctagtc

SEQ ID NO: 2130916 - DNA, 25 bp, Homo sapien
ctgtcccacaagcaataaatttcct

SEQ ID NO: 2130917 - DNA, 25 bp, Homo sapien
ggtcacatcgattttcagcagcagt

SEQ ID NO: 2130918 - DNA, 25 bp, Homo sapien
accctggactctatttggcccattg

SEQ ID NO: 2130919 - DNA, 25 bp, Homo sapien
ggatgacagtgtagcagaggtcaca

SEQ ID NO: 2130920 - DNA, 25 bp, Homo sapien
ttttaacatggatgagataaccctg

SEQ ID NO: 2130921 - DNA, 25 bp, Homo sapien
ttttgctgtggaatttcttgtgtgg

SEQ ID NO: 2130922 - DNA, 25 bp, Homo sapien
tcttgtgtggcaagttgtgccattc

SEQ ID NO: 2130923 - DNA, 25 bp, Homo sapien
cttgtgtggcaagttgtgccattca

SEQ ID NO: 2130924 - DNA, 25 bp, Homo sapien
ttgtgtggcaagttgtgccattcat

SEQ ID NO: 2130925 - DNA, 25 bp, Homo sapien
attggaatttgaactggtacctctt

SEQ ID NO: 2130926 - DNA, 25 bp, Homo sapien
tattggaatttgaactggtacctct

SEQ ID NO: 2130927 - DNA, 25 bp, Homo sapien
gaggacagactatcagcaaaaatga

SEQ ID NO: 2130928 - DNA, 25 bp, Homo sapien
gtcagctgtatcttgtccaagggtg

SEQ ID NO: 2130929 - DNA, 25 bp, Homo sapien
gtccagggaatccagcgggcaatgc

SEQ ID NO: 2130930 - DNA, 25 bp, Homo sapien
ctgaatgttggtcaacagagtctcc

SEQ ID NO: 2130931 - DNA, 25 bp, Homo sapien
ttttgtttatagaaatattgttgac

SEQ ID NO: 2130932 - DNA, 25 bp, Homo sapien
tcctggatgcgagcattatccaaag

SEQ ID NO: 2130933 - DNA, 25 bp, Homo sapien
tatccaaagcaactttcagcagacc

SEQ ID NO: 2130934 - DNA, 25 bp, Homo sapien
tctatagagctccagtcgcagctcc

SEQ ID NO: 2130935 - DNA, 25 bp, Homo sapien
caactgcaagttgtctttcaaggtt

SEQ ID NO: 2130936 - DNA, 25 bp, Homo sapien
ttttaacatcctcaggccactgtca

SEQ ID NO: 2130937 - DNA, 25 bp, Homo sapien
tgctcccggcgctttgattcaaatt

SEQ ID NO: 2130938 - DNA, 25 bp, Homo sapien
actagtggtggcttgcttaagtgcc

SEQ ID NO: 2130939 - DNA, 25 bp, Homo sapien
gccactgtcactagtggtggcttgc

SEQ ID NO: 2130940 - DNA, 25 bp, Homo sapien
ctatttcaatatctggaattccagt

SEQ ID NO: 2130941 - DNA, 25 bp, Homo sapien
ttgttttctatttcaatatctggaa

SEQ ID NO: 2130942 - DNA, 25 bp, Homo sapien
cactatcatgaggagtcccattgtt

SEQ ID NO: 2130943 - DNA, 25 bp, Homo sapien
cttgcatagcagcactatcatgagg

SEQ ID NO: 2130944 - DNA, 25 bp, Homo sapien
cctattcgtgcctatgatcagttgg

SEQ ID NO: 2130945 - DNA, 25 bp, Homo sapien
cgtgcctatgatcagttggagttcc

SEQ ID NO: 2130946 - DNA, 25 bp, Homo sapien
cctatgatcagttggagttccggca

SEQ ID NO: 2130947 - DNA, 25 bp, Homo sapien
tcagttggagttccggcatcagtgt

SEQ ID NO: 2130948 - DNA, 25 bp, Homo sapien
gaattttaatccagacccagtgtgc

SEQ ID NO: 2130949 - DNA, 25 bp, Homo sapien
ttgaggacagtagcgaaacagaccc

SEQ ID NO: 2130950 - DNA, 25 bp, Homo sapien
gaactgctgacactgatccttggag

SEQ ID NO: 2130951 - DNA, 25 bp, Homo sapien
tatatatcctaagcctatgagccgg

SEQ ID NO: 2130952 - DNA, 25 bp, Homo sapien
aggctgaatacaactgttgtgccat

SEQ ID NO: 2130953 - DNA, 25 bp, Homo sapien
caggctgaatacaactgttgtgcca

SEQ ID NO: 2130954 - DNA, 25 bp, Homo sapien
tcaggctgaatacaactgttgtgcc

SEQ ID NO: 2130955 - DNA, 25 bp, Homo sapien
catttatgtaaagccagcgaggacc

SEQ ID NO: 2130956 - DNA, 25 bp, Homo sapien
taacgttatgtatagtagaacaggg

SEQ ID NO: 2130957 - DNA, 25 bp, Homo sapien
gttgaaatgagcatagaaaagcatc

SEQ ID NO: 2130958 - DNA, 25 bp, Homo sapien
aaactggtcagtctaatgcaagaac

SEQ ID NO: 2130959 - DNA, 25 bp, Homo sapien
tcttcttctcttggacagcctccat

SEQ ID NO: 2130960 - DNA, 25 bp, Homo sapien
aatcttcttctcttggacagcctcc

SEQ ID NO: 2130961 - DNA, 25 bp, Homo sapien
ggaatcttcttctcttggacagcct

SEQ ID NO: 2130962 - DNA, 25 bp, Homo sapien
gcaggaatcttcttctcttggacag

SEQ ID NO: 2130963 - DNA, 25 bp, Homo sapien
tatttgatcgactccagctgatcgt

SEQ ID NO: 2130964 - DNA, 25 bp, Homo sapien
tcatcatatttgatcgactccagct

SEQ ID NO: 2130965 - DNA, 25 bp, Homo sapien
tgatcgactccagctgatcgtcacc

SEQ ID NO: 2130966 - DNA, 25 bp, Homo sapien
tcatatttgatcgactccagctgat

SEQ ID NO: 2130967 - DNA, 25 bp, Homo sapien
gattcagctaatacatgccattaca

SEQ ID NO: 2130968 - DNA, 25 bp, Homo sapien
ttttgttattcctgaaccatctctg

SEQ ID NO: 2130969 - DNA, 25 bp, Homo sapien
cgatccctcttgtccattatgttta

SEQ ID NO: 2130970 - DNA, 25 bp, Homo sapien
catctctgtcttttcggctttttga

SEQ ID NO: 2130971 - DNA, 25 bp, Homo sapien
tattttgaggctgaaccttgagggc

SEQ ID NO: 2130972 - DNA, 25 bp, Homo sapien
tccagaaatacaaacaggagatggt

SEQ ID NO: 2130973 - DNA, 25 bp, Homo sapien
aaatacaaacaggagatggtaccat

SEQ ID NO: 2130974 - DNA, 25 bp, Homo sapien
taatagtataccaaccaaagaaagc

SEQ ID NO: 2130975 - DNA, 25 bp, Homo sapien
tataccaaccaaagaaagcccagga

SEQ ID NO: 2130976 - DNA, 25 bp, Homo sapien
gactattgtagatgagatgactctt

SEQ ID NO: 2130977 - DNA, 25 bp, Homo sapien
agatggatttgggttgtatggacat

SEQ ID NO: 2130978 - DNA, 25 bp, Homo sapien
gattctttcgattcattaacatgac

SEQ ID NO: 2130979 - DNA, 25 bp, Homo sapien
tgcttactatagacctctagtataa

SEQ ID NO: 2130980 - DNA, 25 bp, Homo sapien
tacagtgtggctgacaccaatatcc

SEQ ID NO: 2130981 - DNA, 25 bp, Homo sapien
cagtgtggctgacaccaatatcctc

SEQ ID NO: 2130982 - DNA, 25 bp, Homo sapien
agtgtggctgacaccaatatcctcc

SEQ ID NO: 2130983 - DNA, 25 bp, Homo sapien
acagtgtggctgacaccaatatcct

SEQ ID NO: 2130984 - DNA, 25 bp, Homo sapien
tgggtcagccgcaactctaggactg

SEQ ID NO: 2130985 - DNA, 25 bp, Homo sapien
gtgtataaccatatctcctccggtg

SEQ ID NO: 2130986 - DNA, 25 bp, Homo sapien
gactgcaggtacttgtgggtcagcc

SEQ ID NO: 2130987 - DNA, 25 bp, Homo sapien
tgcaaggtcgagaaaggtggatact

SEQ ID NO: 2130988 - DNA, 25 bp, Homo sapien
aattcactgccgataagtagccgaa

SEQ ID NO: 2130989 - DNA, 25 bp, Homo sapien
tcgtgcatgtctgcccaaagagctt

SEQ ID NO: 2130990 - DNA, 25 bp, Homo sapien
tgccgataagtagccgaagtctcat

SEQ ID NO: 2130991 - DNA, 25 bp, Homo sapien
cataattgtagtcgtgcatgtctgc

SEQ ID NO: 2130992 - DNA, 25 bp, Homo sapien
cacagaaaggaaacggagcctttgt

SEQ ID NO: 2130993 - DNA, 25 bp, Homo sapien
gcctcttctgtagaactaacaaaag

SEQ ID NO: 2130994 - DNA, 25 bp, Homo sapien
caaaagcacaagtgccgagagcagt

SEQ ID NO: 2130995 - DNA, 25 bp, Homo sapien
gaaacggagcctttgttatctcttg

SEQ ID NO: 2130996 - DNA, 25 bp, Homo sapien
agtccgtttctgtcccgagagtggc

SEQ ID NO: 2130997 - DNA, 25 bp, Homo sapien
aattctgaacggctctctgatgggc

SEQ ID NO: 2130998 - DNA, 25 bp, Homo sapien
gatgactaaaccacctccagcgtag

SEQ ID NO: 2130999 - DNA, 25 bp, Homo sapien
gagtggctcttcaacctgccctgaa

SEQ ID NO: 2131000 - DNA, 25 bp, Homo sapien
gattcttcattgtctacaacagtac

SEQ ID NO: 2131001 - DNA, 25 bp, Homo sapien
ctaaaaattgcagactattttcgtc

SEQ ID NO: 2131002 - DNA, 25 bp, Homo sapien
cgtctcttgttcaggaatttcaatg

SEQ ID NO: 2131003 - DNA, 25 bp, Homo sapien
caacagtacctcttaaattttcttg

SEQ ID NO: 2131004 - DNA, 25 bp, Homo sapien
gcaagttgttcagaagattctctgc

SEQ ID NO: 2131005 - DNA, 25 bp, Homo sapien
ctctgctgtgcaggtccaactgttt

SEQ ID NO: 2131006 - DNA, 25 bp, Homo sapien
cacacatatatgtgcgggtgtggga

SEQ ID NO: 2131007 - DNA, 25 bp, Homo sapien
acatatatgtgcgggtgtgggaagc

SEQ ID NO: 2131008 - DNA, 25 bp, Homo sapien
aataaaagttgtttacacaacacag

SEQ ID NO: 2131009 - DNA, 25 bp, Homo sapien
taaggtgaataactttaagatctgc

SEQ ID NO: 2131010 - DNA, 25 bp, Homo sapien
tccaggtttgagaatttctctgtaa

SEQ ID NO: 2131011 - DNA, 25 bp, Homo sapien
ctggtgttgagggaaatctttagct

SEQ ID NO: 2131012 - DNA, 25 bp, Homo sapien
tgattttggtaaggcctctcatatt

SEQ ID NO: 2131013 - DNA, 25 bp, Homo sapien
ggtaaggcctctcatattaacttgg

SEQ ID NO: 2131014 - DNA, 25 bp, Homo sapien
caccacacgcgacctcttaattcat

SEQ ID NO: 2131015 - DNA, 25 bp, Homo sapien
ttaacttggtcaggctagctaaagg

SEQ ID NO: 2131016 - DNA, 25 bp, Homo sapien
tatggcttagcacatacagccaagt

SEQ ID NO: 2131017 - DNA, 25 bp, Homo sapien
cattcaataccttgtggttgttagc

SEQ ID NO: 2131018 - DNA, 25 bp, Homo sapien
gacagtagtaagtgattccatctaa

SEQ ID NO: 2131019 - DNA, 25 bp, Homo sapien
tacctatgaagacaaagacttgctg

SEQ ID NO: 2131020 - DNA, 25 bp, Homo sapien
ccaggtctagagtgacatttcaaga

SEQ ID NO: 2131021 - DNA, 25 bp, Homo sapien
tctctttttggctatcaagggtaaa

SEQ ID NO: 2131022 - DNA, 25 bp, Homo sapien
tatacaaggtgtaactaggatatgc

SEQ ID NO: 2131023 - DNA, 25 bp, Homo sapien
gagtaaggatgatcaccaacctcat

SEQ ID NO: 2131024 - DNA, 25 bp, Homo sapien
gaaaccgtataggaattagaactca

SEQ ID NO: 2131025 - DNA, 25 bp, Homo sapien
tgaaaccgtataggaattagaactc

SEQ ID NO: 2131026 - DNA, 25 bp, Homo sapien
atctggatgtttataacgcctggca

SEQ ID NO: 2131027 - DNA, 25 bp, Homo sapien
tactagaagtgatagttgcaaaaac

SEQ ID NO: 2131028 - DNA, 25 bp, Homo sapien
tatcccagaatttggatggttgccc

SEQ ID NO: 2131029 - DNA, 25 bp, Homo sapien
gccatatcctttgcgatatcccaga

SEQ ID NO: 2131030 - DNA, 25 bp, Homo sapien
tttgtggttatttctatagcccttg

SEQ ID NO: 2131031 - DNA, 25 bp, Homo sapien
gtggttatttctatagcccttgtaa

SEQ ID NO: 2131032 - DNA, 25 bp, Homo sapien
tggttatttctatagcccttgtaaa

SEQ ID NO: 2131033 - DNA, 25 bp, Homo sapien
tgtggttatttctatagcccttgta

SEQ ID NO: 2131034 - DNA, 25 bp, Homo sapien
gtcttcagagtgttgtgtatctaat

SEQ ID NO: 2131035 - DNA, 25 bp, Homo sapien
tataacatggaactgctcttcagat

SEQ ID NO: 2131036 - DNA, 25 bp, Homo sapien
tgcgtggtttataacatggaactgc

SEQ ID NO: 2131037 - DNA, 25 bp, Homo sapien
aagagtttgctctgcgtggtttata

SEQ ID NO: 2131038 - DNA, 25 bp, Homo sapien
tttgctctgcgtggtttataacatg

SEQ ID NO: 2131039 - DNA, 25 bp, Homo sapien
tgggatgcggaggtgtcctgcaatc

SEQ ID NO: 2131040 - DNA, 25 bp, Homo sapien
gtgtcctgcaatcagtagcacatca

SEQ ID NO: 2131041 - DNA, 25 bp, Homo sapien
tgtcctgcaatcagtagcacatcac

SEQ ID NO: 2131042 - DNA, 25 bp, Homo sapien
gggatgcggaggtgtcctgcaatca

SEQ ID NO: 2131043 - DNA, 25 bp, Homo sapien
ttggatctactccttccatcctgac

SEQ ID NO: 2131044 - DNA, 25 bp, Homo sapien
ccatcctgacctcttcttgtttggc

SEQ ID NO: 2131045 - DNA, 25 bp, Homo sapien
aatttagtgcatttggatctactcc

SEQ ID NO: 2131046 - DNA, 25 bp, Homo sapien
tgtaagcatactgcaccaaggaatt

SEQ ID NO: 2131047 - DNA, 25 bp, Homo sapien
gatcgaatccctaagcagtttgaag

SEQ ID NO: 2131048 - DNA, 25 bp, Homo sapien
cagaagttctgtacagccttgggca

SEQ ID NO: 2131049 - DNA, 25 bp, Homo sapien
agtgtatttgtgtgccacgttcaga

SEQ ID NO: 2131050 - DNA, 25 bp, Homo sapien
gccttgggcatctccaaatgatcga

SEQ ID NO: 2131051 - DNA, 25 bp, Homo sapien
gaaaaatggtctcttcatcaggcac

SEQ ID NO: 2131052 - DNA, 25 bp, Homo sapien
ggcacattaatgtcatcactgcaca

SEQ ID NO: 2131053 - DNA, 25 bp, Homo sapien
tttttattacctcaatgaagtgttc

SEQ ID NO: 2131054 - DNA, 25 bp, Homo sapien
gaaatttcattagctggaagcagga

SEQ ID NO: 2131055 - DNA, 25 bp, Homo sapien
catcatggatcttctctcaggcaaa

SEQ ID NO: 2131056 - DNA, 25 bp, Homo sapien
caaaagatgatacttcatagcttcc

SEQ ID NO: 2131057 - DNA, 25 bp, Homo sapien
tctaggctttgtccgagggctttgc

SEQ ID NO: 2131058 - DNA, 25 bp, Homo sapien
gacactcaagatcaccagtaaacat

SEQ ID NO: 2131059 - DNA, 25 bp, Homo sapien
ccaatatgtagccaactgttggtcc

SEQ ID NO: 2131060 - DNA, 25 bp, Homo sapien
tatgtagccaactgttggtcctgag

SEQ ID NO: 2131061 - DNA, 25 bp, Homo sapien
ggtgccaatatgtagccaactgttg

SEQ ID NO: 2131062 - DNA, 25 bp, Homo sapien
agccaactgttggtcctgaggtcat

SEQ ID NO: 2131063 - DNA, 25 bp, Homo sapien
taagccgtgccgatgtgttgacatg

SEQ ID NO: 2131064 - DNA, 25 bp, Homo sapien
gactccaaattgaagcctacggcca

SEQ ID NO: 2131065 - DNA, 25 bp, Homo sapien
tgttgacatgggaggcatcacagtc

SEQ ID NO: 2131066 - DNA, 25 bp, Homo sapien
tcacagtccagattttgccaactgg

SEQ ID NO: 2131067 - DNA, 25 bp, Homo sapien
catgaccacctacagcatacattgg

SEQ ID NO: 2131068 - DNA, 25 bp, Homo sapien
taattccactgtcgtccctcagggt

SEQ ID NO: 2131069 - DNA, 25 bp, Homo sapien
gcttctaggagttgacatactggct

SEQ ID NO: 2131070 - DNA, 25 bp, Homo sapien
ctcagggtcccatctttctacagta

SEQ ID NO: 2131071 - DNA, 25 bp, Homo sapien
tgttgtttaatgcaacaacaccaac

SEQ ID NO: 2131072 - DNA, 25 bp, Homo sapien
ttgttgtttaatgcaacaacaccaa

SEQ ID NO: 2131073 - DNA, 25 bp, Homo sapien
gaatccattgtatgtggcaactccc

SEQ ID NO: 2131074 - DNA, 25 bp, Homo sapien
tccacttgttagtgtgtgggtcaaa

SEQ ID NO: 2131075 - DNA, 25 bp, Homo sapien
cacctccacgtcttttggacattgg

SEQ ID NO: 2131076 - DNA, 25 bp, Homo sapien
gaacttccatcacgtccaccaatag

SEQ ID NO: 2131077 - DNA, 25 bp, Homo sapien
tgtgtatggctgtctagatctctag

SEQ ID NO: 2131078 - DNA, 25 bp, Homo sapien
tttgagcttcttgtgtatggctgtc

SEQ ID NO: 2131079 - DNA, 25 bp, Homo sapien
tgtaaatgtgtccttcacttccaga

SEQ ID NO: 2131080 - DNA, 25 bp, Homo sapien
gaatatgtgcctaggcgatgatttt

SEQ ID NO: 2131081 - DNA, 25 bp, Homo sapien
gaacatgacctgctaatgtgtgatg

SEQ ID NO: 2131082 - DNA, 25 bp, Homo sapien
tcagtagagggattcaatgagagac

SEQ ID NO: 2131083 - DNA, 25 bp, Homo sapien
ggaaagcacgcatccctagaaatgc

SEQ ID NO: 2131084 - DNA, 25 bp, Homo sapien
ggtctaatgcatgaagccagtcctg

SEQ ID NO: 2131085 - DNA, 25 bp, Homo sapien
ggaggaaaagtccaatagagttaca

SEQ ID NO: 2131086 - DNA, 25 bp, Homo sapien
gaggaaaagtccaatagagttacaa

SEQ ID NO: 2131087 - DNA, 25 bp, Homo sapien
gcaacagcatctcgaggaacactca

SEQ ID NO: 2131088 - DNA, 25 bp, Homo sapien
cacgtagagtttgtctccaagaggg

SEQ ID NO: 2131089 - DNA, 25 bp, Homo sapien
tgtgttcaaataagtatgtccgtca

SEQ ID NO: 2131090 - DNA, 25 bp, Homo sapien
ggtgccacagttgaccatgaatcac

SEQ ID NO: 2131091 - DNA, 25 bp, Homo sapien
ttagggtagcttcaccactacaaca

SEQ ID NO: 2131092 - DNA, 25 bp, Homo sapien
ctcttccaatgttaacaggaacttc

SEQ ID NO: 2131093 - DNA, 25 bp, Homo sapien
gcaccagctcttccaatgttaacag

SEQ ID NO: 2131094 - DNA, 25 bp, Homo sapien
tagcttcaccactacaacacatgca

SEQ ID NO: 2131095 - DNA, 25 bp, Homo sapien
ggtagccccgggaaacatacatgtc

SEQ ID NO: 2131096 - DNA, 25 bp, Homo sapien
tacattctatacaagtgaggccctg

SEQ ID NO: 2131097 - DNA, 25 bp, Homo sapien
cagttatgtttgagtgccctgggcc

SEQ ID NO: 2131098 - DNA, 25 bp, Homo sapien
aagagctgtcaggtaagtcccaagg

SEQ ID NO: 2131099 - DNA, 25 bp, Homo sapien
gaagttttgtagaagttcttgcatg

SEQ ID NO: 2131100 - DNA, 25 bp, Homo sapien
tctgtgtggtatagaagttttgtag

SEQ ID NO: 2131101 - DNA, 25 bp, Homo sapien
aagttttgtagaagttcttgcatgc

SEQ ID NO: 2131102 - DNA, 25 bp, Homo sapien
tcagcttctgtgtggtatagaagtt

SEQ ID NO: 2131103 - DNA, 25 bp, Homo sapien
gacttagtatctccagcagtgtgga

SEQ ID NO: 2131104 - DNA, 25 bp, Homo sapien
tgaaaaatctcttctacctcaggtg

SEQ ID NO: 2131105 - DNA, 25 bp, Homo sapien
gtgatatcttccacagacaagaggg

SEQ ID NO: 2131106 - DNA, 25 bp, Homo sapien
cagtgttccctccatatcaaaaagg

SEQ ID NO: 2131107 - DNA, 25 bp, Homo sapien
aaggggttctctagatacaggatcc

SEQ ID NO: 2131108 - DNA, 25 bp, Homo sapien
tttgagctgtgttttgtagatctcc

SEQ ID NO: 2131109 - DNA, 25 bp, Homo sapien
ttggctcttggcttagtgttgttgg

SEQ ID NO: 2131110 - DNA, 25 bp, Homo sapien
ttttcatgtctatgagcatggagtg

SEQ ID NO: 2131111 - DNA, 25 bp, Homo sapien
gtttgatgtggtggatgctggctcg

SEQ ID NO: 2131112 - DNA, 25 bp, Homo sapien
accatttcccgtgaacacccatggg

SEQ ID NO: 2131113 - DNA, 25 bp, Homo sapien
cgtgaacacccatgggaggtcatgc

SEQ ID NO: 2131114 - DNA, 25 bp, Homo sapien
cgcatgcgtggcaccatttcccgtg

SEQ ID NO: 2131115 - DNA, 25 bp, Homo sapien
gaagcttctgctgacagctcgtgct

SEQ ID NO: 2131116 - DNA, 25 bp, Homo sapien
ttctgctgacagctcgtgctattgt

SEQ ID NO: 2131117 - DNA, 25 bp, Homo sapien
tgctgacagctcgtgctattgttgc

SEQ ID NO: 2131118 - DNA, 25 bp, Homo sapien
ctgacagctcgtgctattgttgcca

SEQ ID NO: 2131119 - DNA, 25 bp, Homo sapien
attccccctaatcttaaagccacag

SEQ ID NO: 2131120 - DNA, 25 bp, Homo sapien
tattccccctaatcttaaagccaca

SEQ ID NO: 2131121 - DNA, 25 bp, Homo sapien
gataaagtgtgcatagccacacaag

SEQ ID NO: 2131122 - DNA, 25 bp, Homo sapien
taaagtgtgcatagccacacaaggt

SEQ ID NO: 2131123 - DNA, 25 bp, Homo sapien
aaagtgtgcatagccacacaaggtc

SEQ ID NO: 2131124 - DNA, 25 bp, Homo sapien
aggataaagtgtgcatagccacaca

SEQ ID NO: 2131125 - DNA, 25 bp, Homo sapien
tcctcagaggcaacttcttttagca

SEQ ID NO: 2131126 - DNA, 25 bp, Homo sapien
cctcagaggcaacttcttttagcat

SEQ ID NO: 2131127 - DNA, 25 bp, Homo sapien
cttcctcagaggcaacttcttttag

SEQ ID NO: 2131128 - DNA, 25 bp, Homo sapien
ttccttcctcagaggcaacttcttt

SEQ ID NO: 2131129 - DNA, 25 bp, Homo sapien
tgggttcgaactttagcggtggtca

SEQ ID NO: 2131130 - DNA, 25 bp, Homo sapien
gagacagtgggttcgaactttagcg

SEQ ID NO: 2131131 - DNA, 25 bp, Homo sapien
tggagacagtgggttcgaactttag

SEQ ID NO: 2131132 - DNA, 25 bp, Homo sapien
acagtgggttcgaactttagcggtg

SEQ ID NO: 2131133 - DNA, 25 bp, Homo sapien
taatggttgaatagtgaacaatgac

SEQ ID NO: 2131134 - DNA, 25 bp, Homo sapien
gtcatgaacatagctaacattgtca

SEQ ID NO: 2131135 - DNA, 25 bp, Homo sapien
gctaacattgtcagatgattccaat

SEQ ID NO: 2131136 - DNA, 25 bp, Homo sapien
taacattgtgtttgtaatggttgaa

SEQ ID NO: 2131137 - DNA, 25 bp, Homo sapien
tgtagttatagacatctgcattttt

SEQ ID NO: 2131138 - DNA, 25 bp, Homo sapien
tatagacatctgcatttttagaagc

SEQ ID NO: 2131139 - DNA, 25 bp, Homo sapien
tagacatctgcatttttagaagcat

SEQ ID NO: 2131140 - DNA, 25 bp, Homo sapien
gttatagacatctgcatttttagaa

SEQ ID NO: 2131141 - DNA, 25 bp, Homo sapien
gaatcttgtaactgtaactttccaa

SEQ ID NO: 2131142 - DNA, 25 bp, Homo sapien
tatgctacaatctatagctaagtgg

SEQ ID NO: 2131143 - DNA, 25 bp, Homo sapien
tttattgaatcttgtaactgtaact

SEQ ID NO: 2131144 - DNA, 25 bp, Homo sapien
ggctatgctacaatctatagctaag

SEQ ID NO: 2131145 - DNA, 25 bp, Homo sapien
ttcttccctcggctgcatttagcct

SEQ ID NO: 2131146 - DNA, 25 bp, Homo sapien
tttcttccctcggctgcatttagcc

SEQ ID NO: 2131147 - DNA, 25 bp, Homo sapien
tcttccctcggctgcatttagcctt

SEQ ID NO: 2131148 - DNA, 25 bp, Homo sapien
cttccctcggctgcatttagccttt

SEQ ID NO: 2131149 - DNA, 25 bp, Homo sapien
tcatcagctcggcaatagtggtctg

SEQ ID NO: 2131150 - DNA, 25 bp, Homo sapien
ctgtggcattgggtctagaggcaca

SEQ ID NO: 2131151 - DNA, 25 bp, Homo sapien
tagtggtctgtaatgtgatgctggc

SEQ ID NO: 2131152 - DNA, 25 bp, Homo sapien
gatgctggcaactttgttgtcctca

SEQ ID NO: 2131153 - DNA, 25 bp, Homo sapien
caagggtaacgctgttctaataaca

SEQ ID NO: 2131154 - DNA, 25 bp, Homo sapien
agtgtgttggtcaaatgttcttgca

SEQ ID NO: 2131155 - DNA, 25 bp, Homo sapien
tatccaacaagggtaacgctgttct

SEQ ID NO: 2131156 - DNA, 25 bp, Homo sapien
caaggtttgttcactcaagttggtg

SEQ ID NO: 2131157 - DNA, 25 bp, Homo sapien
ctcccaaagtggtcaatttcactgt

SEQ ID NO: 2131158 - DNA, 25 bp, Homo sapien
agactcccaaagtggtcaatttcac

SEQ ID NO: 2131159 - DNA, 25 bp, Homo sapien
tttcactgtcttttactggatcctt

SEQ ID NO: 2131160 - DNA, 25 bp, Homo sapien
actgtcttttactggatccttctcc

SEQ ID NO: 2131161 - DNA, 25 bp, Homo sapien
gcagcagtgacaacacctggcaatt

SEQ ID NO: 2131162 - DNA, 25 bp, Homo sapien
cagcagtgacaacacctggcaattt

SEQ ID NO: 2131163 - DNA, 25 bp, Homo sapien
caatttttaataggcttctcagtca

SEQ ID NO: 2131164 - DNA, 25 bp, Homo sapien
cctggcaatttttaataggcttctc

SEQ ID NO: 2131165 - DNA, 25 bp, Homo sapien
gtagcccactacagtgcctccctcc

SEQ ID NO: 2131166 - DNA, 25 bp, Homo sapien
ttccttggtccattctacactgaag

SEQ ID NO: 2131167 - DNA, 25 bp, Homo sapien
aaggttcgtggaggccccaagcagc

SEQ ID NO: 2131168 - DNA, 25 bp, Homo sapien
aggttcgtggaggccccaagcagcg

SEQ ID NO: 2131169 - DNA, 25 bp, Homo sapien
ctcccacatttacccacatggagtt

SEQ ID NO: 2131170 - DNA, 25 bp, Homo sapien
tctcccacatttacccacatggagt

SEQ ID NO: 2131171 - DNA, 25 bp, Homo sapien
ttctcccacatttacccacatggag

SEQ ID NO: 2131172 - DNA, 25 bp, Homo sapien
ggacatgctcctcatattcataatt

SEQ ID NO: 2131173 - DNA, 25 bp, Homo sapien
ttaaaagtgactgagtcctacatac

SEQ ID NO: 2131174 - DNA, 25 bp, Homo sapien
tttccttttcatctcgctattaact

SEQ ID NO: 2131175 - DNA, 25 bp, Homo sapien
tattaacttccacatgaagctttgt

SEQ ID NO: 2131176 - DNA, 25 bp, Homo sapien
ttttcatctcgctattaacttccac

SEQ ID NO: 2131177 - DNA, 25 bp, Homo sapien
aacttccacatgaagctttgtgaag

SEQ ID NO: 2131178 - DNA, 25 bp, Homo sapien
tagctgacatttggttgacaggaat

SEQ ID NO: 2131179 - DNA, 25 bp, Homo sapien
ttatgtagctgacatttggttgaca

SEQ ID NO: 2131180 - DNA, 25 bp, Homo sapien
tgtagctgacatttggttgacagga

SEQ ID NO: 2131181 - DNA, 25 bp, Homo sapien
gctgacatttggttgacaggaattt

SEQ ID NO: 2131182 - DNA, 25 bp, Homo sapien
cacattggctgcaagacttcttcct

SEQ ID NO: 2131183 - DNA, 25 bp, Homo sapien
ccttgataaatgtcgttgcttctct

SEQ ID NO: 2131184 - DNA, 25 bp, Homo sapien
ttagcattcgatacacattggctgc

SEQ ID NO: 2131185 - DNA, 25 bp, Homo sapien
ccttttccttgataaatgtcgttgc

SEQ ID NO: 2131186 - DNA, 25 bp, Homo sapien
tcttcattctcattcgtcaaaatcc

SEQ ID NO: 2131187 - DNA, 25 bp, Homo sapien
ttcacggggtcctgccttcttgacc

SEQ ID NO: 2131188 - DNA, 25 bp, Homo sapien
ccttaggaaaggtgtgcttcacggg

SEQ ID NO: 2131189 - DNA, 25 bp, Homo sapien
tctcattcgtcaaaatccttaggaa

SEQ ID NO: 2131190 - DNA, 25 bp, Homo sapien
gctttctctttcactttcaactcac

SEQ ID NO: 2131191 - DNA, 25 bp, Homo sapien
agatcccttatgctttctctttcac

SEQ ID NO: 2131192 - DNA, 25 bp, Homo sapien
taagatcccttatgctttctctttc

SEQ ID NO: 2131193 - DNA, 25 bp, Homo sapien
atcccttatgctttctctttcactt

SEQ ID NO: 2131194 - DNA, 25 bp, Homo sapien
tgctggaggtcatctaaggcttgtc

SEQ ID NO: 2131195 - DNA, 25 bp, Homo sapien
taattcggtgagaactgaagttgct

SEQ ID NO: 2131196 - DNA, 25 bp, Homo sapien
tgaggatagtatgactggctgcttc

SEQ ID NO: 2131197 - DNA, 25 bp, Homo sapien
gcttctcagtaaggctgaaatgcag

SEQ ID NO: 2131198 - DNA, 25 bp, Homo sapien
gacggtagtagtgcaccctcgaagg

SEQ ID NO: 2131199 - DNA, 25 bp, Homo sapien
ggctctctcgtgatgggtgaaacta

SEQ ID NO: 2131200 - DNA, 25 bp, Homo sapien
tgacaccctgcagcctgagagaaat

SEQ ID NO: 2131201 - DNA, 25 bp, Homo sapien
gactgttaataaatgggactctcca

SEQ ID NO: 2131202 - DNA, 25 bp, Homo sapien
cccagaagagctgcatgaatgttgt

SEQ ID NO: 2131203 - DNA, 25 bp, Homo sapien
cattattggtgtttgtgatcataac

SEQ ID NO: 2131204 - DNA, 25 bp, Homo sapien
actttcaatttgtatctgtgacaca

SEQ ID NO: 2131205 - DNA, 25 bp, Homo sapien
ggtatggatatatgtcaatatatcc

SEQ ID NO: 2131206 - DNA, 25 bp, Homo sapien
tctctggaaacacttggtagaactt

SEQ ID NO: 2131207 - DNA, 25 bp, Homo sapien
cagatgtttcctcactccccatagg

SEQ ID NO: 2131208 - DNA, 25 bp, Homo sapien
ggtagaactttgtctggccttccaa

SEQ ID NO: 2131209 - DNA, 25 bp, Homo sapien
gactcaatatagatgacaggtctga

SEQ ID NO: 2131210 - DNA, 25 bp, Homo sapien
aaagcagagagttatgcctttagac

SEQ ID NO: 2131211 - DNA, 25 bp, Homo sapien
gcttagagccaaagcagagagttat

SEQ ID NO: 2131212 - DNA, 25 bp, Homo sapien
agcagagagttatgcctttagacat

SEQ ID NO: 2131213 - DNA, 25 bp, Homo sapien
ttagagccaaagcagagagttatgc

SEQ ID NO: 2131214 - DNA, 25 bp, Homo sapien
gacactttcagttttttatctacac

SEQ ID NO: 2131215 - DNA, 25 bp, Homo sapien
tattactgactttgttattttcaac

SEQ ID NO: 2131216 - DNA, 25 bp, Homo sapien
gaaaacctctccacatacataatta

SEQ ID NO: 2131217 - DNA, 25 bp, Homo sapien
ctgttacattttgcttttggagaag

SEQ ID NO: 2131218 - DNA, 25 bp, Homo sapien
atgatggttcgtgcctaagtctccc

SEQ ID NO: 2131219 - DNA, 25 bp, Homo sapien
gcctaagtctcccaaatcatccaag

SEQ ID NO: 2131220 - DNA, 25 bp, Homo sapien
aaatcatccaagacaatcacttcaa

SEQ ID NO: 2131221 - DNA, 25 bp, Homo sapien
ctggaaagaatgatggttcgtgcct

SEQ ID NO: 2131222 - DNA, 25 bp, Homo sapien
ctgcgtgaccctttccaaagtgatg

SEQ ID NO: 2131223 - DNA, 25 bp, Homo sapien
agtattcctttggagtataagccat

SEQ ID NO: 2131224 - DNA, 25 bp, Homo sapien
aagtattcctttggagtataagcca

SEQ ID NO: 2131225 - DNA, 25 bp, Homo sapien
tttctgttgtgggataggttcaccc

SEQ ID NO: 2131226 - DNA, 25 bp, Homo sapien
aattctttattatccaagcagccag

SEQ ID NO: 2131227 - DNA, 25 bp, Homo sapien
ctttattatccaagcagccaggaag

SEQ ID NO: 2131228 - DNA, 25 bp, Homo sapien
ttctttattatccaagcagccagga

SEQ ID NO: 2131229 - DNA, 25 bp, Homo sapien
gaattgtcttggtctcacatcgtct

SEQ ID NO: 2131230 - DNA, 25 bp, Homo sapien
tgaatcttgagtaacttttcccttg

SEQ ID NO: 2131231 - DNA, 25 bp, Homo sapien
tcaaatttctgaatcttgagtaact

SEQ ID NO: 2131232 - DNA, 25 bp, Homo sapien
caaatttctgaatcttgagtaactt

SEQ ID NO: 2131233 - DNA, 25 bp, Homo sapien
tttctgaatcttgagtaacttttcc

SEQ ID NO: 2131234 - DNA, 25 bp, Homo sapien
caatataatttattgtcgctgccat

SEQ ID NO: 2131235 - DNA, 25 bp, Homo sapien
tctggtggttttgggaatttccagc

SEQ ID NO: 2131236 - DNA, 25 bp, Homo sapien
ggttttgggaatttccagcagtctg

SEQ ID NO: 2131237 - DNA, 25 bp, Homo sapien
tggatgtgcatctcatttggtttgc

SEQ ID NO: 2131238 - DNA, 25 bp, Homo sapien
cttgtagttcttcttcctgacttgg

SEQ ID NO: 2131239 - DNA, 25 bp, Homo sapien
tcctttttacttagactgaatcttg

SEQ ID NO: 2131240 - DNA, 25 bp, Homo sapien
tacttagactgaatcttgtagttct

SEQ ID NO: 2131241 - DNA, 25 bp, Homo sapien
ttttacttagactgaatcttgtagt

SEQ ID NO: 2131242 - DNA, 25 bp, Homo sapien
cttggctctttggtacaggcaacct

SEQ ID NO: 2131243 - DNA, 25 bp, Homo sapien
caggcaacctttagctctatggtag

SEQ ID NO: 2131244 - DNA, 25 bp, Homo sapien
tatttgtcgaggtgtggtttgtcca

SEQ ID NO: 2131245 - DNA, 25 bp, Homo sapien
tctatggtaggcttttggtgtgtac

SEQ ID NO: 2131246 - DNA, 25 bp, Homo sapien
aattcctgattgaataaagagactt

SEQ ID NO: 2131247 - DNA, 25 bp, Homo sapien
attcctgattgaataaagagacttt

SEQ ID NO: 2131248 - DNA, 25 bp, Homo sapien
taatgataacttttcctttccttgc

SEQ ID NO: 2131249 - DNA, 25 bp, Homo sapien
aatgataacttttcctttccttgca

SEQ ID NO: 2131250 - DNA, 25 bp, Homo sapien
atgataacttttcctttccttgcaa

SEQ ID NO: 2131251 - DNA, 25 bp, Homo sapien
tgataacttttcctttccttgcaaa

SEQ ID NO: 2131252 - DNA, 25 bp, Homo sapien
aagcttgtctgaattaggtttcctg

SEQ ID NO: 2131253 - DNA, 25 bp, Homo sapien
tgggaaatccaaagaagcttgtctg

SEQ ID NO: 2131254 - DNA, 25 bp, Homo sapien
ccaaagaagcttgtctgaattaggt

SEQ ID NO: 2131255 - DNA, 25 bp, Homo sapien
ggagggagttatctttttccagatc

SEQ ID NO: 2131256 - DNA, 25 bp, Homo sapien
atcaaggtatttcccatgcatacag

SEQ ID NO: 2131257 - DNA, 25 bp, Homo sapien
ctatggatttagtggatcaaggtat

SEQ ID NO: 2131258 - DNA, 25 bp, Homo sapien
tttagtggatcaaggtatttcccat

SEQ ID NO: 2131259 - DNA, 25 bp, Homo sapien
ttctcacactcatatgtagaatctt

SEQ ID NO: 2131260 - DNA, 25 bp, Homo sapien
taaaccctgaactgtccgacttagc

SEQ ID NO: 2131261 - DNA, 25 bp, Homo sapien
aatcaggaaagctagatgtataaac

SEQ ID NO: 2131262 - DNA, 25 bp, Homo sapien
tagcttgatgacactgctatagcca

SEQ ID NO: 2131263 - DNA, 25 bp, Homo sapien
tcaatttgggcatccaacatacaaa

SEQ ID NO: 2131264 - DNA, 25 bp, Homo sapien
taatatatacgtcggtatttcacga

SEQ ID NO: 2131265 - DNA, 25 bp, Homo sapien
ttgcgacaccaggaatataatatat

SEQ ID NO: 2131266 - DNA, 25 bp, Homo sapien
ctatatacgtcggtattttccgaca

SEQ ID NO: 2131267 - DNA, 25 bp, Homo sapien
gacacctatactatatacgtcggta

SEQ ID NO: 2131268 - DNA, 25 bp, Homo sapien
gattttgataaggttcttggaattg

SEQ ID NO: 2131269 - DNA, 25 bp, Homo sapien
gataatttctgaaatgctcgatata

SEQ ID NO: 2131270 - DNA, 25 bp, Homo sapien
aaatgctcgatataatcaagcaaag

SEQ ID NO: 2131271 - DNA, 25 bp, Homo sapien
tgcactgatgacagtagataatttc

SEQ ID NO: 2131272 - DNA, 25 bp, Homo sapien
tgtagcttcgcatcaaggttaaaag

SEQ ID NO: 2131273 - DNA, 25 bp, Homo sapien
gcatcaaggttaaaagattccatca

SEQ ID NO: 2131274 - DNA, 25 bp, Homo sapien
ctaatactgttgtaaaccgaaggtg

SEQ ID NO: 2131275 - DNA, 25 bp, Homo sapien
aaatccatatttgtcacccctgtcc

SEQ ID NO: 2131276 - DNA, 25 bp, Homo sapien
aaactcaggatccactatatgatta

SEQ ID NO: 2131277 - DNA, 25 bp, Homo sapien
aaaactcaggatccactatatgatt

SEQ ID NO: 2131278 - DNA, 25 bp, Homo sapien
ctcaggatccactatatgattactt

SEQ ID NO: 2131279 - DNA, 25 bp, Homo sapien
cccaggcgggtatggagggactcct

SEQ ID NO: 2131280 - DNA, 25 bp, Homo sapien
tggcagcgggtaccacccaggcggg

SEQ ID NO: 2131281 - DNA, 25 bp, Homo sapien
ctggggcatcctggcgctggcagcg

SEQ ID NO: 2131282 - DNA, 25 bp, Homo sapien
cagcgggtaccacccaggcgggtat

SEQ ID NO: 2131283 - DNA, 25 bp, Homo sapien
catatccctagtaggttgtattctt

SEQ ID NO: 2131284 - DNA, 25 bp, Homo sapien
tcatatccctagtaggttgtattct

SEQ ID NO: 2131285 - DNA, 25 bp, Homo sapien
tatccctagtaggttgtattcttag

SEQ ID NO: 2131286 - DNA, 25 bp, Homo sapien
cctagtaggttgtattcttaggtat

SEQ ID NO: 2131287 - DNA, 25 bp, Homo sapien
tttctgtttgagctcttgtatcatt

SEQ ID NO: 2131288 - DNA, 25 bp, Homo sapien
tattttctgtttgagctcttgtatc

SEQ ID NO: 2131289 - DNA, 25 bp, Homo sapien
ttatgaaattgttgtagtgaaaatt

SEQ ID NO: 2131290 - DNA, 25 bp, Homo sapien
attatgaaattgttgtagtgaaaat

SEQ ID NO: 2131291 - DNA, 25 bp, Homo sapien
ttcattagcatagagtgtaaatgct

SEQ ID NO: 2131292 - DNA, 25 bp, Homo sapien
cattagcatagagtgtaaatgctgc

SEQ ID NO: 2131293 - DNA, 25 bp, Homo sapien
ttagcatagagtgtaaatgctgcca

SEQ ID NO: 2131294 - DNA, 25 bp, Homo sapien
tagcatagagtgtaaatgctgccat

SEQ ID NO: 2131295 - DNA, 25 bp, Homo sapien
caccaaatgtctgaatctgtggttc

SEQ ID NO: 2131296 - DNA, 25 bp, Homo sapien
gtctgaatctgtggttcctctcata

SEQ ID NO: 2131297 - DNA, 25 bp, Homo sapien
gagcaggattaccaaggcaacaact

SEQ ID NO: 2131298 - DNA, 25 bp, Homo sapien
tctgtggttcctctcatactgagca

SEQ ID NO: 2131299 - DNA, 25 bp, Homo sapien
agccatcatcatgattacatttgat

SEQ ID NO: 2131300 - DNA, 25 bp, Homo sapien
cagccatcatcatgattacatttga

SEQ ID NO: 2131301 - DNA, 25 bp, Homo sapien
tgattacatttgatgtgggtcacat

SEQ ID NO: 2131302 - DNA, 25 bp, Homo sapien
tcagccatcatcatgattacatttg

SEQ ID NO: 2131303 - DNA, 25 bp, Homo sapien
gattattttgggaagctgctccaaa

SEQ ID NO: 2131304 - DNA, 25 bp, Homo sapien
aaattgccacaagccccacttggtt

SEQ ID NO: 2131305 - DNA, 25 bp, Homo sapien
aatatatagtttctcttcaaatgtg

SEQ ID NO: 2131306 - DNA, 25 bp, Homo sapien
tatgcaaaattccaaatatatagtt

SEQ ID NO: 2131307 - DNA, 25 bp, Homo sapien
tcaaagacttcataagattcacatc

SEQ ID NO: 2131308 - DNA, 25 bp, Homo sapien
ttccatcaatatatcatcagtgttg

SEQ ID NO: 2131309 - DNA, 25 bp, Homo sapien
catctccaagggaccacaaaataaa

SEQ ID NO: 2131310 - DNA, 25 bp, Homo sapien
catcaatatatcatcagtgttgttc

SEQ ID NO: 2131311 - DNA, 25 bp, Homo sapien
gagaaagtaggtggctgcccaagag

SEQ ID NO: 2131312 - DNA, 25 bp, Homo sapien
ctggagaaagtaggtggctgcccaa

SEQ ID NO: 2131313 - DNA, 25 bp, Homo sapien
aaagtaggtggctgcccaagaggca

SEQ ID NO: 2131314 - DNA, 25 bp, Homo sapien
gaaagtaggtggctgcccaagaggc

SEQ ID NO: 2131315 - DNA, 25 bp, Homo sapien
gtggaattcaatctcaggcacattg

SEQ ID NO: 2131316 - DNA, 25 bp, Homo sapien
agaggtggaattcaatctcaggcac

SEQ ID NO: 2131317 - DNA, 25 bp, Homo sapien
tctcaggcacattgactggcaatcc

SEQ ID NO: 2131318 - DNA, 25 bp, Homo sapien
ttcaatctcaggcacattgactggc

SEQ ID NO: 2131319 - DNA, 25 bp, Homo sapien
gcaaggaggcccagcacatgtgcat

SEQ ID NO: 2131320 - DNA, 25 bp, Homo sapien
gagcaaggaggcccagcacatgtgc

SEQ ID NO: 2131321 - DNA, 25 bp, Homo sapien
gagagagcaaggaggcccagcacat

SEQ ID NO: 2131322 - DNA, 25 bp, Homo sapien
ctccagggccagagagagagcaagg

SEQ ID NO: 2131323 - DNA, 25 bp, Homo sapien
aaatgggccttgtcatctttaggcc

SEQ ID NO: 2131324 - DNA, 25 bp, Homo sapien
ctgagagcacactcccagaggtcgc

SEQ ID NO: 2131325 - DNA, 25 bp, Homo sapien
ttgtcatctttaggcctccagtgca

SEQ ID NO: 2131326 - DNA, 25 bp, Homo sapien
agagcacactcccagaggtcgctga

SEQ ID NO: 2131327 - DNA, 25 bp, Homo sapien
ttcttttgagagcaccactcccaga

SEQ ID NO: 2131328 - DNA, 25 bp, Homo sapien
aggcttgccaccttctggccccaag

SEQ ID NO: 2131329 - DNA, 25 bp, Homo sapien
tgaggcttgccaccttctggcccca

SEQ ID NO: 2131330 - DNA, 25 bp, Homo sapien
caaatgaggcttgccaccttctggc

SEQ ID NO: 2131331 - DNA, 25 bp, Homo sapien
aatgaggcttgccaccttctggccc

SEQ ID NO: 2131332 - DNA, 25 bp, Homo sapien
ggccatggtgcaaccacatcttcct

SEQ ID NO: 2131333 - DNA, 25 bp, Homo sapien
gggtggccatggtgcaaccacatct

SEQ ID NO: 2131334 - DNA, 25 bp, Homo sapien
ggtggccatggtgcaaccacatctt

SEQ ID NO: 2131335 - DNA, 25 bp, Homo sapien
tggccatggtgcaaccacatcttcc

SEQ ID NO: 2131336 - DNA, 25 bp, Homo sapien
ctagaatgtggacactggtgaagtg

SEQ ID NO: 2131337 - DNA, 25 bp, Homo sapien
tgtggacactggtgaagtggctaca

SEQ ID NO: 2131338 - DNA, 25 bp, Homo sapien
gtgaagtggctacatctctgtggcg

SEQ ID NO: 2131339 - DNA, 25 bp, Homo sapien
gacactggtgaagtggctacatctc

SEQ ID NO: 2131340 - DNA, 25 bp, Homo sapien
agcacagagagattacagagccacg

SEQ ID NO: 2131341 - DNA, 25 bp, Homo sapien
ctggtaagcacagagagattacaga

SEQ ID NO: 2131342 - DNA, 25 bp, Homo sapien
cacagagagattacagagccacggt

SEQ ID NO: 2131343 - DNA, 25 bp, Homo sapien
gtaagcacagagagattacagagcc

SEQ ID NO: 2131344 - DNA, 25 bp, Homo sapien
ctatggtagttccagtgtttaagat

SEQ ID NO: 2131345 - DNA, 25 bp, Homo sapien
ccttaactatggtagttccagtgtt

SEQ ID NO: 2131346 - DNA, 25 bp, Homo sapien
ctagtccttaactatggtagttcca

SEQ ID NO: 2131347 - DNA, 25 bp, Homo sapien
tggtagttccagtgtttaagatgtg

SEQ ID NO: 2131348 - DNA, 25 bp, Homo sapien
taggtagcaagattgtgcactgaag

SEQ ID NO: 2131349 - DNA, 25 bp, Homo sapien
aggtagcaagattgtgcactgaagg

SEQ ID NO: 2131350 - DNA, 25 bp, Homo sapien
attgagttgaacacaatcaaagtac

SEQ ID NO: 2131351 - DNA, 25 bp, Homo sapien
tgagttgaacacaatcaaagtacag

SEQ ID NO: 2131352 - DNA, 25 bp, Homo sapien
tgattgagttgaacacaatcaaagt

SEQ ID NO: 2131353 - DNA, 25 bp, Homo sapien
ttgagttgaacacaatcaaagtaca

SEQ ID NO: 2131354 - DNA, 25 bp, Homo sapien
ctgttgtttccgagaaagacaaaca

SEQ ID NO: 2131355 - DNA, 25 bp, Homo sapien
tgttgtttccgagaaagacaaacag

SEQ ID NO: 2131356 - DNA, 25 bp, Homo sapien
gttgtttccgagaaagacaaacagc

SEQ ID NO: 2131357 - DNA, 25 bp, Homo sapien
gcgttatttctcgacatgattgagg

SEQ ID NO: 2131358 - DNA, 25 bp, Homo sapien
gctttgggtcttcgccgggctgtct

SEQ ID NO: 2131359 - DNA, 25 bp, Homo sapien
tgtgctctggtaaggcaagaactct

SEQ ID NO: 2131360 - DNA, 25 bp, Homo sapien
caagaactctgcctgtatctgcgtt

SEQ ID NO: 2131361 - DNA, 25 bp, Homo sapien
tccagtcgcggaggatcttaacgga

SEQ ID NO: 2131362 - DNA, 25 bp, Homo sapien
tcttcttctgaagggtaggccttaa

SEQ ID NO: 2131363 - DNA, 25 bp, Homo sapien
tgaagggtaggccttaaaccgatgc

SEQ ID NO: 2131364 - DNA, 25 bp, Homo sapien
aaaccgatgcttatacatccagtcg

SEQ ID NO: 2131365 - DNA, 25 bp, Homo sapien
tggagacacaagttctggagaagac

SEQ ID NO: 2131366 - DNA, 25 bp, Homo sapien
acagacgcctcggtgctctgcaggt

SEQ ID NO: 2131367 - DNA, 25 bp, Homo sapien
caggctttgtacattgtctggacca

SEQ ID NO: 2131368 - DNA, 25 bp, Homo sapien
tctacgctgttgaagcatatccggg

SEQ ID NO: 2131369 - DNA, 25 bp, Homo sapien
acataaacaggtttaccacagtaca

SEQ ID NO: 2131370 - DNA, 25 bp, Homo sapien
gaacataaacaggtttaccacagta

SEQ ID NO: 2131371 - DNA, 25 bp, Homo sapien
tcctgccaaacagggcctgatgcct

SEQ ID NO: 2131372 - DNA, 25 bp, Homo sapien
ttcctgccaaacagggcctgatgcc

SEQ ID NO: 2131373 - DNA, 25 bp, Homo sapien
ggccagggaactccttatgaatgga

SEQ ID NO: 2131374 - DNA, 25 bp, Homo sapien
catcaaatagttcagctacaatggc

SEQ ID NO: 2131375 - DNA, 25 bp, Homo sapien
gctctttgttcagtatgtatcccac

SEQ ID NO: 2131376 - DNA, 25 bp, Homo sapien
ctgaagccacaggtttaaaaggaag

SEQ ID NO: 2131377 - DNA, 25 bp, Homo sapien
gaaaagctttgttactcgagtgtca

SEQ ID NO: 2131378 - DNA, 25 bp, Homo sapien
aaaactctccaagaagcgtgctgca

SEQ ID NO: 2131379 - DNA, 25 bp, Homo sapien
gtggaccaccacatatgaaaagctt

SEQ ID NO: 2131380 - DNA, 25 bp, Homo sapien
gcaaccaccgtcttacaggagctta

SEQ ID NO: 2131381 - DNA, 25 bp, Homo sapien
taaagatctagcacctccagaaggg

SEQ ID NO: 2131382 - DNA, 25 bp, Homo sapien
cacagcgtgtcacctctgggtcatc

SEQ ID NO: 2131383 - DNA, 25 bp, Homo sapien
aactgagctgtggtctagggcttta

SEQ ID NO: 2131384 - DNA, 25 bp, Homo sapien
caaaaatttgcaagtagaggcacca

SEQ ID NO: 2131385 - DNA, 25 bp, Homo sapien
tttaaacatacaagagtagcctctg

SEQ ID NO: 2131386 - DNA, 25 bp, Homo sapien
ggtaacacaatacaagcaagcagct

SEQ ID NO: 2131387 - DNA, 25 bp, Homo sapien
acactgtatcctgggtctccatgag

SEQ ID NO: 2131388 - DNA, 25 bp, Homo sapien
taactcaatctttgagctctgagca

SEQ ID NO: 2131389 - DNA, 25 bp, Homo sapien
gtaatactgttagccttgaagtgtg

SEQ ID NO: 2131390 - DNA, 25 bp, Homo sapien
gggaacaagttgaaaattctgagaa

SEQ ID NO: 2131391 - DNA, 25 bp, Homo sapien
ccttgaagtgtgaaccaaaatgaca

SEQ ID NO: 2131392 - DNA, 25 bp, Homo sapien
tcaagtgtttgactgaaggactggg

SEQ ID NO: 2131393 - DNA, 25 bp, Homo sapien
tgtaggaaagatgatttctaatata

SEQ ID NO: 2131394 - DNA, 25 bp, Homo sapien
gaagcagaagcaaatgtaggaaaga

SEQ ID NO: 2131395 - DNA, 25 bp, Homo sapien
tttctaatataagagaattatgcat

SEQ ID NO: 2131396 - DNA, 25 bp, Homo sapien
aagcagaagcaaatgtaggaaagat

SEQ ID NO: 2131397 - DNA, 25 bp, Homo sapien
gaattgcagtagcaggtattcccaa

SEQ ID NO: 2131398 - DNA, 25 bp, Homo sapien
aattgcagtagcaggtattcccaaa

SEQ ID NO: 2131399 - DNA, 25 bp, Homo sapien
ggaagagatctgctaagcatgtaag

SEQ ID NO: 2131400 - DNA, 25 bp, Homo sapien
gaagagatctgctaagcatgtaaga

SEQ ID NO: 2131401 - DNA, 25 bp, Homo sapien
tggaagagatctgctaagcatgtaa

SEQ ID NO: 2131402 - DNA, 25 bp, Homo sapien
tgtagttgtcgaaaagctcattttc

SEQ ID NO: 2131403 - DNA, 25 bp, Homo sapien
gtagttgtcgaaaagctcattttct

SEQ ID NO: 2131404 - DNA, 25 bp, Homo sapien
atgtagttgtcgaaaagctcatttt

SEQ ID NO: 2131405 - DNA, 25 bp, Homo sapien
gcttcctgtttgctgcgacactctt

SEQ ID NO: 2131406 - DNA, 25 bp, Homo sapien
tgtttgctgcgacactcttcacagt

SEQ ID NO: 2131407 - DNA, 25 bp, Homo sapien
gcgacactcttcacagtaatacttg

SEQ ID NO: 2131408 - DNA, 25 bp, Homo sapien
tgctgcgacactcttcacagtaata

SEQ ID NO: 2131409 - DNA, 25 bp, Homo sapien
tgaagttgatccatatatttaaatc

SEQ ID NO: 2131410 - DNA, 25 bp, Homo sapien
tatttaaatctcttcaagtgtacag

SEQ ID NO: 2131411 - DNA, 25 bp, Homo sapien
cacccggtaagagagttttgtatat

SEQ ID NO: 2131412 - DNA, 25 bp, Homo sapien
gagttttgtatatcgatgaagttga

SEQ ID NO: 2131413 - DNA, 25 bp, Homo sapien
gattggtggcatcacctgaagtgtt

SEQ ID NO: 2131414 - DNA, 25 bp, Homo sapien
ctggattggtggcatcacctgaagt

SEQ ID NO: 2131415 - DNA, 25 bp, Homo sapien
tggtggcatcacctgaagtgttaaa

SEQ ID NO: 2131416 - DNA, 25 bp, Homo sapien
ttccacagtgaaccacaacagcaac

SEQ ID NO: 2131417 - DNA, 25 bp, Homo sapien
gactgatagaaaaggatgtaaccag

SEQ ID NO: 2131418 - DNA, 25 bp, Homo sapien
ggatgtaaccagactcagagttctt

SEQ ID NO: 2131419 - DNA, 25 bp, Homo sapien
caatgtcgtcatcaaacaacaacca

SEQ ID NO: 2131420 - DNA, 25 bp, Homo sapien
tcccgagactgatagaaaaggatgt

SEQ ID NO: 2131421 - DNA, 25 bp, Homo sapien
cagtgcttgatcctttccaaaataa

SEQ ID NO: 2131422 - DNA, 25 bp, Homo sapien
ttcttgaaaaatcagtgcttgatcc

SEQ ID NO: 2131423 - DNA, 25 bp, Homo sapien
aagaaatgaggcagaaagtatctct

SEQ ID NO: 2131424 - DNA, 25 bp, Homo sapien
aaataaccagaaaagaaatgaggca

SEQ ID NO: 2131425 - DNA, 25 bp, Homo sapien
tccttaggaatgacactgtagccta

SEQ ID NO: 2131426 - DNA, 25 bp, Homo sapien
ttacatccttaggaatgacactgta

SEQ ID NO: 2131427 - DNA, 25 bp, Homo sapien
tgccatagttggttgatatcgatat

SEQ ID NO: 2131428 - DNA, 25 bp, Homo sapien
gatatcgatatggttaatagaattc

SEQ ID NO: 2131429 - DNA, 25 bp, Homo sapien
actcaatatcatcagagaagtgctt

SEQ ID NO: 2131430 - DNA, 25 bp, Homo sapien
agagaagtgcttatcatcaacatcc

SEQ ID NO: 2131431 - DNA, 25 bp, Homo sapien
gagaagtgcttatcatcaacatcct

SEQ ID NO: 2131432 - DNA, 25 bp, Homo sapien
caatatcatcagagaagtgcttatc

SEQ ID NO: 2131433 - DNA, 25 bp, Homo sapien
ctcctacacattcaagacttatcat

SEQ ID NO: 2131434 - DNA, 25 bp, Homo sapien
aattcttctcctacacattcaagac

SEQ ID NO: 2131435 - DNA, 25 bp, Homo sapien
taaattcttctcctacacattcaag

SEQ ID NO: 2131436 - DNA, 25 bp, Homo sapien
tcttctcctacacattcaagactta

SEQ ID NO: 2131437 - DNA, 25 bp, Homo sapien
tctctgtggaagtatttcaaaactt

SEQ ID NO: 2131438 - DNA, 25 bp, Homo sapien
acactagcgtacattgttccattca

SEQ ID NO: 2131439 - DNA, 25 bp, Homo sapien
tctcccacaacactagcgtacattg

SEQ ID NO: 2131440 - DNA, 25 bp, Homo sapien
atcctctctgtggaagtatttcaaa

SEQ ID NO: 2131441 - DNA, 25 bp, Homo sapien
catatgtttcttttcattttcatgt

SEQ ID NO: 2131442 - DNA, 25 bp, Homo sapien
tcagatcatatgtttcttttcattt

SEQ ID NO: 2131443 - DNA, 25 bp, Homo sapien
gatcatatgtttcttttcattttca

SEQ ID NO: 2131444 - DNA, 25 bp, Homo sapien
cagatcatatgtttcttttcatttt

SEQ ID NO: 2131445 - DNA, 25 bp, Homo sapien
tatggacgtgtatccctttggatcc

SEQ ID NO: 2131446 - DNA, 25 bp, Homo sapien
tataagtccactagagataaccact

SEQ ID NO: 2131447 - DNA, 25 bp, Homo sapien
tactgcaatagacattatggacgtg

SEQ ID NO: 2131448 - DNA, 25 bp, Homo sapien
tttggatccccatactctccaggac

SEQ ID NO: 2131449 - DNA, 25 bp, Homo sapien
caagttgaaatatagacattcccgt

SEQ ID NO: 2131450 - DNA, 25 bp, Homo sapien
cacttgaatgtgttgatcacagatc

SEQ ID NO: 2131451 - DNA, 25 bp, Homo sapien
cattcccgttacaagaatcaaggag

SEQ ID NO: 2131452 - DNA, 25 bp, Homo sapien
caaggagtattctgccaaggaagga

SEQ ID NO: 2131453 - DNA, 25 bp, Homo sapien
cactttcctgttgagttacatgttt

SEQ ID NO: 2131454 - DNA, 25 bp, Homo sapien
ttaggatctttagaccactttcctg

SEQ ID NO: 2131455 - DNA, 25 bp, Homo sapien
ggatctttagaccactttcctgttg

SEQ ID NO: 2131456 - DNA, 25 bp, Homo sapien
tagaccactttcctgttgagttaca

SEQ ID NO: 2131457 - DNA, 25 bp, Homo sapien
gagtcacgagaattaaagtcagttc

SEQ ID NO: 2131458 - DNA, 25 bp, Homo sapien
tgttgtaccttaatgacgtaatgga

SEQ ID NO: 2131459 - DNA, 25 bp, Homo sapien
ccactgaggtttagtatttaaatca

SEQ ID NO: 2131460 - DNA, 25 bp, Homo sapien
gaaattaatcctacttagaactgac

SEQ ID NO: 2131461 - DNA, 25 bp, Homo sapien
tctgtgctcataggttcaattgttt

SEQ ID NO: 2131462 - DNA, 25 bp, Homo sapien
tgtgctcataggttcaattgttttg

SEQ ID NO: 2131463 - DNA, 25 bp, Homo sapien
taagttcaaacacgtgatgtttgtc

SEQ ID NO: 2131464 - DNA, 25 bp, Homo sapien
attccacaaataagttcaaacacgt

SEQ ID NO: 2131465 - DNA, 25 bp, Homo sapien
taggcagatgtctgctttgccaagc

SEQ ID NO: 2131466 - DNA, 25 bp, Homo sapien
ctaactctccttaatcttactgtgt

SEQ ID NO: 2131467 - DNA, 25 bp, Homo sapien
ccttaatcttactgtgtaggcagat

SEQ ID NO: 2131468 - DNA, 25 bp, Homo sapien
gcacaacaccagaattaaatccaac

SEQ ID NO: 2131469 - DNA, 25 bp, Homo sapien
aaaatgaggctatgactgttgtgac

SEQ ID NO: 2131470 - DNA, 25 bp, Homo sapien
agtgtgcaaacatgacaacgatgta

SEQ ID NO: 2131471 - DNA, 25 bp, Homo sapien
acatgacaacgatgtaaaatgaggc

SEQ ID NO: 2131472 - DNA, 25 bp, Homo sapien
gaggctatgactgttgtgacaggaa

SEQ ID NO: 2131473 - DNA, 25 bp, Homo sapien
tcattggcagattccccatttttag

SEQ ID NO: 2131474 - DNA, 25 bp, Homo sapien
cattggcagattccccatttttagg

SEQ ID NO: 2131475 - DNA, 25 bp, Homo sapien
aagaacttgttgactaagacactaa

SEQ ID NO: 2131476 - DNA, 25 bp, Homo sapien
gatcatacaaggtataatcatacag

SEQ ID NO: 2131477 - DNA, 25 bp, Homo sapien
ttcttaagagatcatacaaggtata

SEQ ID NO: 2131478 - DNA, 25 bp, Homo sapien
agaacttgttgactaagacactaaa

SEQ ID NO: 2131479 - DNA, 25 bp, Homo sapien
agttgctgtgaactgtatcatgatt

SEQ ID NO: 2131480 - DNA, 25 bp, Homo sapien
cagaaacacagtggcattgctacag

SEQ ID NO: 2131481 - DNA, 25 bp, Homo sapien
aacacagtggcattgctacagttgc

SEQ ID NO: 2131482 - DNA, 25 bp, Homo sapien
ggcattgctacagttgctgtgaact

SEQ ID NO: 2131483 - DNA, 25 bp, Homo sapien
cactggagtagctgaagttgatttc

SEQ ID NO: 2131484 - DNA, 25 bp, Homo sapien
tagttaccatagacctgtagttcca

SEQ ID NO: 2131485 - DNA, 25 bp, Homo sapien
aaagcaacataaactacaggtccat

SEQ ID NO: 2131486 - DNA, 25 bp, Homo sapien
tatatctgctagaagctgtttggtg

SEQ ID NO: 2131487 - DNA, 25 bp, Homo sapien
acttgataaactctttgacatgttt

SEQ ID NO: 2131488 - DNA, 25 bp, Homo sapien
tatgggattttgatcagtacttgat

SEQ ID NO: 2131489 - DNA, 25 bp, Homo sapien
tacgtctgcccaaatttgagggttg

SEQ ID NO: 2131490 - DNA, 25 bp, Homo sapien
tcagcttctgaatttagagggatgg

SEQ ID NO: 2131491 - DNA, 25 bp, Homo sapien
cccctgaatctctgggttgtaagca

SEQ ID NO: 2131492 - DNA, 25 bp, Homo sapien
cagatgggcgttgcagacataaagc

SEQ ID NO: 2131493 - DNA, 25 bp, Homo sapien
cctatggagcgttctttcccctgaa

SEQ ID NO: 2131494 - DNA, 25 bp, Homo sapien
catgtataatcgcaacagatgggcg

SEQ ID NO: 2131495 - DNA, 25 bp, Homo sapien
ggcagggccagttccatggcacgta

SEQ ID NO: 2131496 - DNA, 25 bp, Homo sapien
cagggccagttccatggcacgtaaa

SEQ ID NO: 2131497 - DNA, 25 bp, Homo sapien
gggccagttccatggcacgtaaaac

SEQ ID NO: 2131498 - DNA, 25 bp, Homo sapien
aaaggcagggccagttccatggcac

SEQ ID NO: 2131499 - DNA, 25 bp, Homo sapien
agaaatctcactcaatgtgccagca

SEQ ID NO: 2131500 - DNA, 25 bp, Homo sapien
ccagcaaatataggccagaagtgtg

SEQ ID NO: 2131501 - DNA, 25 bp, Homo sapien
cttttcctaaaggcagaaatctcac

SEQ ID NO: 2131502 - DNA, 25 bp, Homo sapien
tgtgcgtgtgggatgaggtggaggg

SEQ ID NO: 2131503 - DNA, 25 bp, Homo sapien
ggtagaagcaggggggctcaagtaa

SEQ ID NO: 2131504 - DNA, 25 bp, Homo sapien
gtagaagcaggggggctcaagtaaa

SEQ ID NO: 2131505 - DNA, 25 bp, Homo sapien
aagtcctcggtttctaagacagctg

SEQ ID NO: 2131506 - DNA, 25 bp, Homo sapien
agcagccaaaaagtcctcggtttct

SEQ ID NO: 2131507 - DNA, 25 bp, Homo sapien
gctgccaagttgactaaaagggtga

SEQ ID NO: 2131508 - DNA, 25 bp, Homo sapien
gtattatagctttgccttggcccat

SEQ ID NO: 2131509 - DNA, 25 bp, Homo sapien
tcacttccactttcacgaaagacat

SEQ ID NO: 2131510 - DNA, 25 bp, Homo sapien
catcacttccactttcacgaaagac

SEQ ID NO: 2131511 - DNA, 25 bp, Homo sapien
gataccggtaatacatcacttccac

SEQ ID NO: 2131512 - DNA, 25 bp, Homo sapien
ctgataccggtaatacatcacttcc

SEQ ID NO: 2131513 - DNA, 25 bp, Homo sapien
agagcgtggcttcttcggttgagca

SEQ ID NO: 2131514 - DNA, 25 bp, Homo sapien
tcttaagagcgtggcttcttcggtt

SEQ ID NO: 2131515 - DNA, 25 bp, Homo sapien
cctgctctcttaagagcgtggcttc

SEQ ID NO: 2131516 - DNA, 25 bp, Homo sapien
gctctcttaagagcgtggcttcttc

SEQ ID NO: 2131517 - DNA, 25 bp, Homo sapien
atattatgctcaataatggcttctt

SEQ ID NO: 2131518 - DNA, 25 bp, Homo sapien
aatattatgctcaataatggcttct

SEQ ID NO: 2131519 - DNA, 25 bp, Homo sapien
tattatgctcaataatggcttcttc

SEQ ID NO: 2131520 - DNA, 25 bp, Homo sapien
ctgagtttttccagcgtggtcatgg

SEQ ID NO: 2131521 - DNA, 25 bp, Homo sapien
gctgagtttttccagcgtggtcatg

SEQ ID NO: 2131522 - DNA, 25 bp, Homo sapien
tgaacgaatacaatcattgacaact

SEQ ID NO: 2131523 - DNA, 25 bp, Homo sapien
cagcggaaatgaacgaatacaatca

SEQ ID NO: 2131524 - DNA, 25 bp, Homo sapien
gctgtctctaaatgccgtcttcttc

SEQ ID NO: 2131525 - DNA, 25 bp, Homo sapien
ttattgcagcggaaatgaacgaata

SEQ ID NO: 2131526 - DNA, 25 bp, Homo sapien
ggctttcatcaaggtaaatcaggga

SEQ ID NO: 2131527 - DNA, 25 bp, Homo sapien
cattcatctggtgcaggaatcctga

SEQ ID NO: 2131528 - DNA, 25 bp, Homo sapien
gaaaggcaaatcctcagatgacaga

SEQ ID NO: 2131529 - DNA, 25 bp, Homo sapien
tatattctagctccaggcacatagt

SEQ ID NO: 2131530 - DNA, 25 bp, Homo sapien
cagcttcagtgttaggacattctcc

SEQ ID NO: 2131531 - DNA, 25 bp, Homo sapien
ccagcttcagtgttaggacattctc

SEQ ID NO: 2131532 - DNA, 25 bp, Homo sapien
gcttcagtgttaggacattctccat

SEQ ID NO: 2131533 - DNA, 25 bp, Homo sapien
tccagcttcagtgttaggacattct

SEQ ID NO: 2131534 - DNA, 25 bp, Homo sapien
cacataaagctttacatctctgaaa

SEQ ID NO: 2131535 - DNA, 25 bp, Homo sapien
tcttccattaagagcactttctcca

SEQ ID NO: 2131536 - DNA, 25 bp, Homo sapien
tgtttcttccattaagagcactttc

SEQ ID NO: 2131537 - DNA, 25 bp, Homo sapien
acacataaagctttacatctctgaa

SEQ ID NO: 2131538 - DNA, 25 bp, Homo sapien
gagagttgtcaagacggttgagtac

SEQ ID NO: 2131539 - DNA, 25 bp, Homo sapien
ttataggctgattgaataggtgaca

SEQ ID NO: 2131540 - DNA, 25 bp, Homo sapien
gaataggtgacaacattgccatagg

SEQ ID NO: 2131541 - DNA, 25 bp, Homo sapien
ccataggtatccattgggggtgcaa

SEQ ID NO: 2131542 - DNA, 25 bp, Homo sapien
tcatctccatcagctctagtatctg

SEQ ID NO: 2131543 - DNA, 25 bp, Homo sapien
catctccatcagctctagtatctgc

SEQ ID NO: 2131544 - DNA, 25 bp, Homo sapien
ggaccaagagccagtagcagtgata

SEQ ID NO: 2131545 - DNA, 25 bp, Homo sapien
gacagtccaacggagggaccaagag

SEQ ID NO: 2131546 - DNA, 25 bp, Homo sapien
cggtcccagcgcagaccgatgggct

SEQ ID NO: 2131547 - DNA, 25 bp, Homo sapien
tgaggcgcggtgatttcagcagcct

SEQ ID NO: 2131548 - DNA, 25 bp, Homo sapien
gccaaacagctgttcacgaacagaa

SEQ ID NO: 2131549 - DNA, 25 bp, Homo sapien
gctttctctaagctatgggccaaac

SEQ ID NO: 2131550 - DNA, 25 bp, Homo sapien
cagctgttcacgaacagaaaaagcc

SEQ ID NO: 2131551 - DNA, 25 bp, Homo sapien
ggctgctttctctaagctatgggcc

SEQ ID NO: 2131552 - DNA, 25 bp, Homo sapien
tcttaagcggtcatctggctgagac

SEQ ID NO: 2131553 - DNA, 25 bp, Homo sapien
tggctgagaccacataaggcggaat

SEQ ID NO: 2131554 - DNA, 25 bp, Homo sapien
caaaattcatggtgttcaaggccca

SEQ ID NO: 2131555 - DNA, 25 bp, Homo sapien
tagagccgttgtcatcgcatacgac

SEQ ID NO: 2131556 - DNA, 25 bp, Homo sapien
ttcttaatatagataggcacccctg

SEQ ID NO: 2131557 - DNA, 25 bp, Homo sapien
tgttgagccgcactccattcatgtg

SEQ ID NO: 2131558 - DNA, 25 bp, Homo sapien
cagatggctctattggcagcggcca

SEQ ID NO: 2131559 - DNA, 25 bp, Homo sapien
tctgtgctcgccctacatagaggac

SEQ ID NO: 2131560 - DNA, 25 bp, Homo sapien
taaaggcaattcagcgcagttattc

SEQ ID NO: 2131561 - DNA, 25 bp, Homo sapien
tatcacaaaggagcccaaactaagg

SEQ ID NO: 2131562 - DNA, 25 bp, Homo sapien
aattgcctcaccttgactgttcagg

SEQ ID NO: 2131563 - DNA, 25 bp, Homo sapien
actaaggaggcaccaactaaggctg

SEQ ID NO: 2131564 - DNA, 25 bp, Homo sapien
tgcaagtgaaatgtagagaatctcc

SEQ ID NO: 2131565 - DNA, 25 bp, Homo sapien
gaggcatatgacttaatccaagaga

SEQ ID NO: 2131566 - DNA, 25 bp, Homo sapien
gagacaacctattccttacctttga

SEQ ID NO: 2131567 - DNA, 25 bp, Homo sapien
tgaggagaacaggaaactgcaagtg

SEQ ID NO: 2131568 - DNA, 25 bp, Homo sapien
catcacggcattgtttacgcatgta

SEQ ID NO: 2131569 - DNA, 25 bp, Homo sapien
tcaacacgggaatagaatactatgc

SEQ ID NO: 2131570 - DNA, 25 bp, Homo sapien
caataatgtaaagcaagttggctca

SEQ ID NO: 2131571 - DNA, 25 bp, Homo sapien
tttgcagtcagtaattaataacggt

SEQ ID NO: 2131572 - DNA, 25 bp, Homo sapien
tatcagcactcatcccttatcagca

SEQ ID NO: 2131573 - DNA, 25 bp, Homo sapien
tgctcaatatcctcaaagagaggtt

SEQ ID NO: 2131574 - DNA, 25 bp, Homo sapien
aaacagagccagtcatgccatacaa

SEQ ID NO: 2131575 - DNA, 25 bp, Homo sapien
tattcagggatttagtctgctcaat

SEQ ID NO: 2131576 - DNA, 25 bp, Homo sapien
gagtagaaggaagtagattagcacc

SEQ ID NO: 2131577 - DNA, 25 bp, Homo sapien
tgtacaatgtaacgtgaaagtcctg

SEQ ID NO: 2131578 - DNA, 25 bp, Homo sapien
tcagcaaggataggattgagattca

SEQ ID NO: 2131579 - DNA, 25 bp, Homo sapien
gacaagtttcccaccatgtacaatg

SEQ ID NO: 2131580 - DNA, 25 bp, Homo sapien
caagcttataaatgccttgacagct

SEQ ID NO: 2131581 - DNA, 25 bp, Homo sapien
tataaatgccttgacagctacatct

SEQ ID NO: 2131582 - DNA, 25 bp, Homo sapien
aatgccttgacagctacatcttcct

SEQ ID NO: 2131583 - DNA, 25 bp, Homo sapien
cttgacagctacatcttcctttgat

SEQ ID NO: 2131584 - DNA, 25 bp, Homo sapien
aaattgttttcccacaccgtagcat

SEQ ID NO: 2131585 - DNA, 25 bp, Homo sapien
ttcccacaccgtagcattcttacag

SEQ ID NO: 2131586 - DNA, 25 bp, Homo sapien
tgttttcccacaccgtagcattctt

SEQ ID NO: 2131587 - DNA, 25 bp, Homo sapien
acaccgtagcattcttacagaggag

SEQ ID NO: 2131588 - DNA, 25 bp, Homo sapien
cttttactaccgtctgcgtgtgcgt

SEQ ID NO: 2131589 - DNA, 25 bp, Homo sapien
tgcgtgtgcgcgcgctttcatgaat

SEQ ID NO: 2131590 - DNA, 25 bp, Homo sapien
gtgtgcgcgcgctttcatgaatttt

SEQ ID NO: 2131591 - DNA, 25 bp, Homo sapien
ttactgcttttactaccgtctgcgt

SEQ ID NO: 2131592 - DNA, 25 bp, Homo sapien
aactaacagtggtttcaagcctggg

SEQ ID NO: 2131593 - DNA, 25 bp, Homo sapien
tctcataactaacagtggtttcaag

SEQ ID NO: 2131594 - DNA, 25 bp, Homo sapien
acagtggtttcaagcctgggcttac

SEQ ID NO: 2131595 - DNA, 25 bp, Homo sapien
tcataactaacagtggtttcaagcc

SEQ ID NO: 2131596 - DNA, 25 bp, Homo sapien
caccatgtcactacataagaaaaat

SEQ ID NO: 2131597 - DNA, 25 bp, Homo sapien
tcaccatgtcactacataagaaaaa

SEQ ID NO: 2131598 - DNA, 25 bp, Homo sapien
cttatccatacggtccttggccctt

SEQ ID NO: 2131599 - DNA, 25 bp, Homo sapien
tctttgaagacgaattggacccatt

SEQ ID NO: 2131600 - DNA, 25 bp, Homo sapien
taaccagttctttgaagacgaattg

SEQ ID NO: 2131601 - DNA, 25 bp, Homo sapien
accagttctttgaagacgaattgga

SEQ ID NO: 2131602 - DNA, 25 bp, Homo sapien
tgaagacgaattggacccattcaag

SEQ ID NO: 2131603 - DNA, 25 bp, Homo sapien
atactttccatctccactctgtctg

SEQ ID NO: 2131604 - DNA, 25 bp, Homo sapien
ttccatctccactctgtctgcattt

SEQ ID NO: 2131605 - DNA, 25 bp, Homo sapien
tttccatctccactctgtctgcatt

SEQ ID NO: 2131606 - DNA, 25 bp, Homo sapien
actttccatctccactctgtctgca

SEQ ID NO: 2131607 - DNA, 25 bp, Homo sapien
ggtgttgagattctctttgcttaag

SEQ ID NO: 2131608 - DNA, 25 bp, Homo sapien
gttgccttcttgttgctgtatgctt

SEQ ID NO: 2131609 - DNA, 25 bp, Homo sapien
tctctttgcttaagttgccttcttg

SEQ ID NO: 2131610 - DNA, 25 bp, Homo sapien
ttactctggcttttgggtgttgaga

SEQ ID NO: 2131611 - DNA, 25 bp, Homo sapien
tccaaagtttgcaagctgctttaag

SEQ ID NO: 2131612 - DNA, 25 bp, Homo sapien
ctaagactgggctatgacggtataa

SEQ ID NO: 2131613 - DNA, 25 bp, Homo sapien
gctttaagaaggattgtaatagcct

SEQ ID NO: 2131614 - DNA, 25 bp, Homo sapien
cactttttctgccaactgaaaggat

SEQ ID NO: 2131615 - DNA, 25 bp, Homo sapien
acaaagactgactccctgtttctag

SEQ ID NO: 2131616 - DNA, 25 bp, Homo sapien
tcacaaagactgactccctgtttct

SEQ ID NO: 2131617 - DNA, 25 bp, Homo sapien
ctagtctaaagctgcgatggtgacc

SEQ ID NO: 2131618 - DNA, 25 bp, Homo sapien
ctaaagctgcgatggtgaccaaaat

SEQ ID NO: 2131619 - DNA, 25 bp, Homo sapien
ctctttctgccggaagatttataaa

SEQ ID NO: 2131620 - DNA, 25 bp, Homo sapien
atagctctttctgccggaagattta

SEQ ID NO: 2131621 - DNA, 25 bp, Homo sapien
ttagctcataccatgtatagaccat

SEQ ID NO: 2131622 - DNA, 25 bp, Homo sapien
ttataaatcttagctcataccatgt

SEQ ID NO: 2131623 - DNA, 25 bp, Homo sapien
tgacggtgtcaaatccagggataag

SEQ ID NO: 2131624 - DNA, 25 bp, Homo sapien
tcaaatccagggataagcaggtaac

SEQ ID NO: 2131625 - DNA, 25 bp, Homo sapien
tttaatgacggtgtcaaatccaggg

SEQ ID NO: 2131626 - DNA, 25 bp, Homo sapien
tcagtttaatgacggtgtcaaatcc

SEQ ID NO: 2131627 - DNA, 25 bp, Homo sapien
gagacacttcgctattacattttgc

SEQ ID NO: 2131628 - DNA, 25 bp, Homo sapien
gctattacattttgctcctcctgta

SEQ ID NO: 2131629 - DNA, 25 bp, Homo sapien
gctcctcctgtaaccgtcccttcat

SEQ ID NO: 2131630 - DNA, 25 bp, Homo sapien
cacaggtgtgaggagacacttcgct

SEQ ID NO: 2131631 - DNA, 25 bp, Homo sapien
gaggctgtccgcatatatcatactc

SEQ ID NO: 2131632 - DNA, 25 bp, Homo sapien
caaaggatacttaaggcagactagg

SEQ ID NO: 2131633 - DNA, 25 bp, Homo sapien
ctagagaacaagcatcccacagcac

SEQ ID NO: 2131634 - DNA, 25 bp, Homo sapien
gggtctggtacttcgatcgcctttc

SEQ ID NO: 2131635 - DNA, 25 bp, Homo sapien
ttttctcagagaagtttgatttttc

SEQ ID NO: 2131636 - DNA, 25 bp, Homo sapien
ttttcttgtgtgtttttcttgtgat

SEQ ID NO: 2131637 - DNA, 25 bp, Homo sapien
gagaagtttgatttttcttgtgtgt

SEQ ID NO: 2131638 - DNA, 25 bp, Homo sapien
ttcttgtgtgtttttcttgtgatac

SEQ ID NO: 2131639 - DNA, 25 bp, Homo sapien
gttctcctcggtcctctgctcactc

SEQ ID NO: 2131640 - DNA, 25 bp, Homo sapien
tgttctcctcggtcctctgctcact

SEQ ID NO: 2131641 - DNA, 25 bp, Homo sapien
tgaatggcgagggggagggacttaa

SEQ ID NO: 2131642 - DNA, 25 bp, Homo sapien
ttgaatggcgagggggagggactta

SEQ ID NO: 2131643 - DNA, 25 bp, Homo sapien
tgtgctgcctgtgtcgccgctggca

SEQ ID NO: 2131644 - DNA, 25 bp, Homo sapien
tcgcagtccgcagagcagccggagt

SEQ ID NO: 2131645 - DNA, 25 bp, Homo sapien
ccggagtcgctgaggttgtttctga

SEQ ID NO: 2131646 - DNA, 25 bp, Homo sapien
cactctgcgcactctgtttggcttg

SEQ ID NO: 2131647 - DNA, 25 bp, Homo sapien
gcccgctccacggagactgcgactg

SEQ ID NO: 2131648 - DNA, 25 bp, Homo sapien
tccacggagactgcgactgctgtag

SEQ ID NO: 2131649 - DNA, 25 bp, Homo sapien
ggcttccgcccgctccacggagact

SEQ ID NO: 2131650 - DNA, 25 bp, Homo sapien
cgctccacggagactgcgactgctg

SEQ ID NO: 2131651 - DNA, 25 bp, Homo sapien
agagaaacagcaccgggaaccctgt

SEQ ID NO: 2131652 - DNA, 25 bp, Homo sapien
aagagaaacagcaccgggaaccctg

SEQ ID NO: 2131653 - DNA, 25 bp, Homo sapien
aacagcaccgggaaccctgtgcgct

SEQ ID NO: 2131654 - DNA, 25 bp, Homo sapien
agaaacagcaccgggaaccctgtgc

SEQ ID NO: 2131655 - DNA, 25 bp, Homo sapien
gccgcagtggcgcaaatagcaattc

SEQ ID NO: 2131656 - DNA, 25 bp, Homo sapien
ccgtaagcgcttcacatgagcagcc

SEQ ID NO: 2131657 - DNA, 25 bp, Homo sapien
ccctaagccgcaggcgggtgaagca

SEQ ID NO: 2131658 - DNA, 25 bp, Homo sapien
cagaggaacgcggaataaatcattc

SEQ ID NO: 2131659 - DNA, 25 bp, Homo sapien
tgcattctgcggcccttctaccaaa

SEQ ID NO: 2131660 - DNA, 25 bp, Homo sapien
agttgcctctacacgccctgcctct

SEQ ID NO: 2131661 - DNA, 25 bp, Homo sapien
agtttgttgcgacaccccttgaagg

SEQ ID NO: 2131662 - DNA, 25 bp, Homo sapien
aattctgctccaggcgccagttgcc

SEQ ID NO: 2131663 - DNA, 25 bp, Homo sapien
ttgtcctcggacagaggatatatca

SEQ ID NO: 2131664 - DNA, 25 bp, Homo sapien
cctcggacagaggatatatcagata

SEQ ID NO: 2131665 - DNA, 25 bp, Homo sapien
atattgtcctcggacagaggatata

SEQ ID NO: 2131666 - DNA, 25 bp, Homo sapien
tgtcctcggacagaggatatatcag

SEQ ID NO: 2131667 - DNA, 25 bp, Homo sapien
gttaagatattccatcctcttccat

SEQ ID NO: 2131668 - DNA, 25 bp, Homo sapien
cattcatccatccagttgatctgta

SEQ ID NO: 2131669 - DNA, 25 bp, Homo sapien
taagatattccatcctcttccatcc

SEQ ID NO: 2131670 - DNA, 25 bp, Homo sapien
gttgatctgtactttttaagcaccc

SEQ ID NO: 2131671 - DNA, 25 bp, Homo sapien
cagcttcttcacaagattacaaagt

SEQ ID NO: 2131672 - DNA, 25 bp, Homo sapien
ttcttcacaagattacaaagttgag

SEQ ID NO: 2131673 - DNA, 25 bp, Homo sapien
caagattacaaagttgagagcagct

SEQ ID NO: 2131674 - DNA, 25 bp, Homo sapien
gcttcttcacaagattacaaagttg

SEQ ID NO: 2131675 - DNA, 25 bp, Homo sapien
atctgaattaaaacccactgtcgtt

SEQ ID NO: 2131676 - DNA, 25 bp, Homo sapien
agtcctcatagtgctctgcaatcag

SEQ ID NO: 2131677 - DNA, 25 bp, Homo sapien
tgtcgttcagtcctcatagtgctct

SEQ ID NO: 2131678 - DNA, 25 bp, Homo sapien
tgaattaaaacccactgtcgttcag

SEQ ID NO: 2131679 - DNA, 25 bp, Homo sapien
tccacatgcgaagtcaaaatgtctt

SEQ ID NO: 2131680 - DNA, 25 bp, Homo sapien
gagtagcgttgggatttatctctaa

SEQ ID NO: 2131681 - DNA, 25 bp, Homo sapien
ggtatttgtatatcctgcactcaca

SEQ ID NO: 2131682 - DNA, 25 bp, Homo sapien
caagtcatttagtcattctgtgcct

SEQ ID NO: 2131683 - DNA, 25 bp, Homo sapien
tgagaagtggattccatcaatgctg

SEQ ID NO: 2131684 - DNA, 25 bp, Homo sapien
gagaagtggattccatcaatgctgc

SEQ ID NO: 2131685 - DNA, 25 bp, Homo sapien
tttcacatttgggtctaaacttctc

SEQ ID NO: 2131686 - DNA, 25 bp, Homo sapien
acatttgggtctaaacttctctgag

SEQ ID NO: 2131687 - DNA, 25 bp, Homo sapien
gagtacctataaaagtgtccaccat

SEQ ID NO: 2131688 - DNA, 25 bp, Homo sapien
gcaactttcagattgacataactgc

SEQ ID NO: 2131689 - DNA, 25 bp, Homo sapien
gatgttagcataattgacactctgt

SEQ ID NO: 2131690 - DNA, 25 bp, Homo sapien
ggcaaggaatcattataaaggaggg

SEQ ID NO: 2131691 - DNA, 25 bp, Homo sapien
gtttgttgtattaacccgcacaaca

SEQ ID NO: 2131692 - DNA, 25 bp, Homo sapien
ttacagtttgttgtattaacccgca

SEQ ID NO: 2131693 - DNA, 25 bp, Homo sapien
accaggtacacttgttacagtttgt

SEQ ID NO: 2131694 - DNA, 25 bp, Homo sapien
ccaggtacacttgttacagtttgtt

SEQ ID NO: 2131695 - DNA, 25 bp, Homo sapien
gcacatctccggtcttgtacactag

SEQ ID NO: 2131696 - DNA, 25 bp, Homo sapien
tagcaggaccgcgaaaatgtacgtc

SEQ ID NO: 2131697 - DNA, 25 bp, Homo sapien
taatttctcacgatcaatgcgagcg

SEQ ID NO: 2131698 - DNA, 25 bp, Homo sapien
gtagtttttctcctgggcgccagag

SEQ ID NO: 2131699 - DNA, 25 bp, Homo sapien
tttcttggaagttcattaagctgcc

SEQ ID NO: 2131700 - DNA, 25 bp, Homo sapien
tcaagacaaatcagaaatttcttgg

SEQ ID NO: 2131701 - DNA, 25 bp, Homo sapien
aaatcagaaatttcttggaagttca

SEQ ID NO: 2131702 - DNA, 25 bp, Homo sapien
gaaatttcttggaagttcattaagc

SEQ ID NO: 2131703 - DNA, 25 bp, Homo sapien
agctatctgtgactgatcccttagg

SEQ ID NO: 2131704 - DNA, 25 bp, Homo sapien
acttcttcaacttggagatttctac

SEQ ID NO: 2131705 - DNA, 25 bp, Homo sapien
ctacatagggtttggaatctaggaa

SEQ ID NO: 2131706 - DNA, 25 bp, Homo sapien
cccttaggaataactttcctcacag

SEQ ID NO: 2131707 - DNA, 25 bp, Homo sapien
agtagaaaatatagcttaagaagtc

SEQ ID NO: 2131708 - DNA, 25 bp, Homo sapien
gtagaaaatatagcttaagaagtct

SEQ ID NO: 2131709 - DNA, 25 bp, Homo sapien
gaaaatatagcttaagaagtcttgt

SEQ ID NO: 2131710 - DNA, 25 bp, Homo sapien
agaaaatatagcttaagaagtcttg

SEQ ID NO: 2131711 - DNA, 25 bp, Homo sapien
aagtccctcgctactttaaagtcat

SEQ ID NO: 2131712 - DNA, 25 bp, Homo sapien
caagtccctcgctactttaaagtca

SEQ ID NO: 2131713 - DNA, 25 bp, Homo sapien
actgaagccttttgccatatgtttg

SEQ ID NO: 2131714 - DNA, 25 bp, Homo sapien
aactgaagccttttgccatatgttt

SEQ ID NO: 2131715 - DNA, 25 bp, Homo sapien
ccaaatgtagttagttcaactgagc

SEQ ID NO: 2131716 - DNA, 25 bp, Homo sapien
atgtagttagttcaactgagctcac

SEQ ID NO: 2131717 - DNA, 25 bp, Homo sapien
cccaaatgtagttagttcaactgag

SEQ ID NO: 2131718 - DNA, 25 bp, Homo sapien
aaatgtagttagttcaactgagctc

SEQ ID NO: 2131719 - DNA, 25 bp, Homo sapien
tctttgaggaaagccaccatcttca

SEQ ID NO: 2131720 - DNA, 25 bp, Homo sapien
tatggtccgcatccttatccgtcac

SEQ ID NO: 2131721 - DNA, 25 bp, Homo sapien
ctgactgattcaaaggaggtttgcc

SEQ ID NO: 2131722 - DNA, 25 bp, Homo sapien
ggaactgattactgaatactggcct

SEQ ID NO: 2131723 - DNA, 25 bp, Homo sapien
agcattaggcccactgtctgcatcc

SEQ ID NO: 2131724 - DNA, 25 bp, Homo sapien
gcctggattagtggacggtagaacc

SEQ ID NO: 2131725 - DNA, 25 bp, Homo sapien
tctaaaatggagagcgtaactgcag

SEQ ID NO: 2131726 - DNA, 25 bp, Homo sapien
gaaatatttggtcggatgacaccag

SEQ ID NO: 2131727 - DNA, 25 bp, Homo sapien
aattacctgaaagaccactgtgcct

SEQ ID NO: 2131728 - DNA, 25 bp, Homo sapien
tacatcagctatctcagtatttggg

SEQ ID NO: 2131729 - DNA, 25 bp, Homo sapien
tacaacgacagttatggtgccagca

SEQ ID NO: 2131730 - DNA, 25 bp, Homo sapien
gcaaccaggatcttgacatagtcac

SEQ ID NO: 2131731 - DNA, 25 bp, Homo sapien
gagagaatcaggctgtcctaagtca

SEQ ID NO: 2131732 - DNA, 25 bp, Homo sapien
ggtgtggtgcctggcgacatcttac

SEQ ID NO: 2131733 - DNA, 25 bp, Homo sapien
tggggtagcccattcagaattctgc

SEQ ID NO: 2131734 - DNA, 25 bp, Homo sapien
tctgggtttggggtagcccattcag

SEQ ID NO: 2131735 - DNA, 25 bp, Homo sapien
tttggggtagcccattcagaattct

SEQ ID NO: 2131736 - DNA, 25 bp, Homo sapien
cgctgtagggatctgaactgcttga

SEQ ID NO: 2131737 - DNA, 25 bp, Homo sapien
agtgtcgggccaaatcagggctgtc

SEQ ID NO: 2131738 - DNA, 25 bp, Homo sapien
caaaggtgttatcgagaggcagttc

SEQ ID NO: 2131739 - DNA, 25 bp, Homo sapien
tagccacagtcagaaacgctgtagg

SEQ ID NO: 2131740 - DNA, 25 bp, Homo sapien
gtctggtgtgtacggacacaggtac

SEQ ID NO: 2131741 - DNA, 25 bp, Homo sapien
cggtctggtgtgtacggacacaggt

SEQ ID NO: 2131742 - DNA, 25 bp, Homo sapien
ggtctggtgtgtacggacacaggta

SEQ ID NO: 2131743 - DNA, 25 bp, Homo sapien
ttgtgttagaaacttggatacctac

SEQ ID NO: 2131744 - DNA, 25 bp, Homo sapien
gaaagttgtgttagaaacttggata

SEQ ID NO: 2131745 - DNA, 25 bp, Homo sapien
agttgtgttagaaacttggatacct

SEQ ID NO: 2131746 - DNA, 25 bp, Homo sapien
tagaaagttgtgttagaaacttgga

SEQ ID NO: 2131747 - DNA, 25 bp, Homo sapien
tacagacaaaattgcccctactata

SEQ ID NO: 2131748 - DNA, 25 bp, Homo sapien
tgtaaagttctacatcaactgaaaa

SEQ ID NO: 2131749 - DNA, 25 bp, Homo sapien
gattgttttgatccctctttgaagt

SEQ ID NO: 2131750 - DNA, 25 bp, Homo sapien
tattgggtacatctgtagaatatga

SEQ ID NO: 2131751 - DNA, 25 bp, Homo sapien
cacagattttcccaagtgaagctag

SEQ ID NO: 2131752 - DNA, 25 bp, Homo sapien
taatgtgatgtatctagcccagact

SEQ ID NO: 2131753 - DNA, 25 bp, Homo sapien
tgactgtagatttgatgcaccaaaa

SEQ ID NO: 2131754 - DNA, 25 bp, Homo sapien
gatcctcatgcacacaatggtactg

SEQ ID NO: 2131755 - DNA, 25 bp, Homo sapien
tatatctcactgcagatttcaatag

SEQ ID NO: 2131756 - DNA, 25 bp, Homo sapien
cactgcagatttcaatagttgatgt

SEQ ID NO: 2131757 - DNA, 25 bp, Homo sapien
cagatttcaatagttgatgtcctgg

SEQ ID NO: 2131758 - DNA, 25 bp, Homo sapien
gatttcaatagttgatgtcctggaa

SEQ ID NO: 2131759 - DNA, 25 bp, Homo sapien
tacatcatggctgttgattcagagc

SEQ ID NO: 2131760 - DNA, 25 bp, Homo sapien
gaaagcacaaggttcactaggacat

SEQ ID NO: 2131761 - DNA, 25 bp, Homo sapien
gagtagtttggctagttcagctcac

SEQ ID NO: 2131762 - DNA, 25 bp, Homo sapien
taaaaatgtctcttgccctggatac

SEQ ID NO: 2131763 - DNA, 25 bp, Homo sapien
ggtatatcttgctacctgcagggca

SEQ ID NO: 2131764 - DNA, 25 bp, Homo sapien
ctgtacggagttaatgggaacacta

SEQ ID NO: 2131765 - DNA, 25 bp, Homo sapien
ccaggctagtcatgacacaagcaat

SEQ ID NO: 2131766 - DNA, 25 bp, Homo sapien
gatagcatgtacattcatggaacct

SEQ ID NO: 2131767 - DNA, 25 bp, Homo sapien
tattcataatgtggacagggtggtc

SEQ ID NO: 2131768 - DNA, 25 bp, Homo sapien
attcataatgtggacagggtggtca

SEQ ID NO: 2131769 - DNA, 25 bp, Homo sapien
tttattcataatgtggacagggtgg

SEQ ID NO: 2131770 - DNA, 25 bp, Homo sapien
atacatgaaagatgaattaatgaat

SEQ ID NO: 2131771 - DNA, 25 bp, Homo sapien
gtttagaaacgaggcataatggtgt

SEQ ID NO: 2131772 - DNA, 25 bp, Homo sapien
gatgatatcagggatactgggtgat

SEQ ID NO: 2131773 - DNA, 25 bp, Homo sapien
cagaatgtactggatatgacaagga

SEQ ID NO: 2131774 - DNA, 25 bp, Homo sapien
gaagcagaatctgtactagtactta

SEQ ID NO: 2131775 - DNA, 25 bp, Homo sapien
tacataggtaggcatgtatgcatgt

SEQ ID NO: 2131776 - DNA, 25 bp, Homo sapien
tagccatttgatgaagacataaatt

SEQ ID NO: 2131777 - DNA, 25 bp, Homo sapien
gtatgcatgtatacaattatggtaa

SEQ ID NO: 2131778 - DNA, 25 bp, Homo sapien
tgaagacataaattaaacccataaa

SEQ ID NO: 2131779 - DNA, 25 bp, Homo sapien
tgtaagtgccaagaagttcattcct

SEQ ID NO: 2131780 - DNA, 25 bp, Homo sapien
tataatgaccctctattaccaaggt

SEQ ID NO: 2131781 - DNA, 25 bp, Homo sapien
taccaaggtatgtgcactgaagaaa

SEQ ID NO: 2131782 - DNA, 25 bp, Homo sapien
taaagctggcgttaagaatctcctg

SEQ ID NO: 2131783 - DNA, 25 bp, Homo sapien
taacttatcttgagggggttggatg

SEQ ID NO: 2131784 - DNA, 25 bp, Homo sapien
tatacttgcagatcatcctgtaaga

SEQ ID NO: 2131785 - DNA, 25 bp, Homo sapien
tgttggaaaatgtgatctgatataa

SEQ ID NO: 2131786 - DNA, 25 bp, Homo sapien
taagatttgaacatgcccacattag

SEQ ID NO: 2131787 - DNA, 25 bp, Homo sapien
ggcattctgcttgtaatattactca

SEQ ID NO: 2131788 - DNA, 25 bp, Homo sapien
gactctaggcaatgaacccagccaa

SEQ ID NO: 2131789 - DNA, 25 bp, Homo sapien
tattactcagtaaatgcgcaacact

SEQ ID NO: 2131790 - DNA, 25 bp, Homo sapien
ggaagcttagcctaggagattaaaa

SEQ ID NO: 2131791 - DNA, 25 bp, Homo sapien
gactctacctcaatactgatttcaa

SEQ ID NO: 2131792 - DNA, 25 bp, Homo sapien
gagtgaaaagtgcattgaaaacagc

SEQ ID NO: 2131793 - DNA, 25 bp, Homo sapien
tttaatggacaattgtctacacctt

SEQ ID NO: 2131794 - DNA, 25 bp, Homo sapien
ctttctcttcctgataaggttctct

SEQ ID NO: 2131795 - DNA, 25 bp, Homo sapien
ttcccatggttagggacaattaaca

SEQ ID NO: 2131796 - DNA, 25 bp, Homo sapien
catggttagggacaattaacaaagg

SEQ ID NO: 2131797 - DNA, 25 bp, Homo sapien
acattcccatggttagggacaatta

SEQ ID NO: 2131798 - DNA, 25 bp, Homo sapien
tcttatagcttgggccgtgaaattc

SEQ ID NO: 2131799 - DNA, 25 bp, Homo sapien
tatcattttctagggattcctgtgc

SEQ ID NO: 2131800 - DNA, 25 bp, Homo sapien
gtttatcattttctagggattcctg

SEQ ID NO: 2131801 - DNA, 25 bp, Homo sapien
gtgcattaggtgttctggagttaaa

SEQ ID NO: 2131802 - DNA, 25 bp, Homo sapien
ggattcctgtgcattaggtgttctg

SEQ ID NO: 2131803 - DNA, 25 bp, Homo sapien
aaatagaaaatcttgctgtgtgcgg

SEQ ID NO: 2131804 - DNA, 25 bp, Homo sapien
agaaaatcttgctgtgtgcggtggc

SEQ ID NO: 2131805 - DNA, 25 bp, Homo sapien
aagaatcattcaccaacaaattgaa

SEQ ID NO: 2131806 - DNA, 25 bp, Homo sapien
actaaaagaccaggcattacaactg

SEQ ID NO: 2131807 - DNA, 25 bp, Homo sapien
tacttcgaatcatgtggttgatttt

SEQ ID NO: 2131808 - DNA, 25 bp, Homo sapien
tgtccactcaatccagggctgagtt

SEQ ID NO: 2131809 - DNA, 25 bp, Homo sapien
ttctgtagatgtccactcaatccag

SEQ ID NO: 2131810 - DNA, 25 bp, Homo sapien
ctgtagatgtccactcaatccaggg

SEQ ID NO: 2131811 - DNA, 25 bp, Homo sapien
agctccttgggtccaccctcagcct

SEQ ID NO: 2131812 - DNA, 25 bp, Homo sapien
caatgtccctgatgctgaaggccat

SEQ ID NO: 2131813 - DNA, 25 bp, Homo sapien
tgcacccccaatgtccctgatgctg

SEQ ID NO: 2131814 - DNA, 25 bp, Homo sapien
ccccaatgtccctgatgctgaaggc

SEQ ID NO: 2131815 - DNA, 25 bp, Homo sapien
cttggaaaggctgctattgtcggta

SEQ ID NO: 2131816 - DNA, 25 bp, Homo sapien
agctctatacccatggagtggttag

SEQ ID NO: 2131817 - DNA, 25 bp, Homo sapien
aaggctgctattgtcggtaaattct

SEQ ID NO: 2131818 - DNA, 25 bp, Homo sapien
agtggttagttacagagacagggct

SEQ ID NO: 2131819 - DNA, 25 bp, Homo sapien
ggtgcaagatcgcacaacctccttc

SEQ ID NO: 2131820 - DNA, 25 bp, Homo sapien
gggtgcaagatcgcacaacctcctt

SEQ ID NO: 2131821 - DNA, 25 bp, Homo sapien
tgcaagatcgcacaacctccttcat

SEQ ID NO: 2131822 - DNA, 25 bp, Homo sapien
gggggtgcaagatcgcacaacctcc

SEQ ID NO: 2131823 - DNA, 25 bp, Homo sapien
tccagatctccatagttgtagactc

SEQ ID NO: 2131824 - DNA, 25 bp, Homo sapien
cagatctccatagttgtagactctt

SEQ ID NO: 2131825 - DNA, 25 bp, Homo sapien
gaatccagatctccatagttgtaga

SEQ ID NO: 2131826 - DNA, 25 bp, Homo sapien
atccagatctccatagttgtagact

SEQ ID NO: 2131827 - DNA, 25 bp, Homo sapien
tgaatgtttttggtcccattggccc

SEQ ID NO: 2131828 - DNA, 25 bp, Homo sapien
gatcgactgccattttttgagtacc

SEQ ID NO: 2131829 - DNA, 25 bp, Homo sapien
cacagctgctagcatatttgctgca

SEQ ID NO: 2131830 - DNA, 25 bp, Homo sapien
tgtgcaaagctgatcgactgccatt

SEQ ID NO: 2131831 - DNA, 25 bp, Homo sapien
tcctgccactttcccttcagatttc

SEQ ID NO: 2131832 - DNA, 25 bp, Homo sapien
tttcctgccactttcccttcagatt

SEQ ID NO: 2131833 - DNA, 25 bp, Homo sapien
ctttcctgccactttcccttcagat

SEQ ID NO: 2131834 - DNA, 25 bp, Homo sapien
ctgccactttcccttcagatttccg

SEQ ID NO: 2131835 - DNA, 25 bp, Homo sapien
ggcagatatagagaaatcggaaata

SEQ ID NO: 2131836 - DNA, 25 bp, Homo sapien
tctcagtcagttctgtttctgccat

SEQ ID NO: 2131837 - DNA, 25 bp, Homo sapien
tactcctcggagaatctcagtcagt

SEQ ID NO: 2131838 - DNA, 25 bp, Homo sapien
gaaatcggaaatatactcctcggag

SEQ ID NO: 2131839 - DNA, 25 bp, Homo sapien
tgaagttgtgttgatttgatagcaa

SEQ ID NO: 2131840 - DNA, 25 bp, Homo sapien
aaattgacctgctatctactaaacc

SEQ ID NO: 2131841 - DNA, 25 bp, Homo sapien
tagctcataaatatccagcactgac

SEQ ID NO: 2131842 - DNA, 25 bp, Homo sapien
agttattcaccacggtcaaagtttg

SEQ ID NO: 2131843 - DNA, 25 bp, Homo sapien
ctagagttccagctcatttttagat

SEQ ID NO: 2131844 - DNA, 25 bp, Homo sapien
aacaaagccgttgagagttggtgcc

SEQ ID NO: 2131845 - DNA, 25 bp, Homo sapien
ttgagagttggtgccagattttccc

SEQ ID NO: 2131846 - DNA, 25 bp, Homo sapien
tttagatgcttctgcaacaaagccg

SEQ ID NO: 2131847 - DNA, 25 bp, Homo sapien
attttcactgttgcacaggagccac

SEQ ID NO: 2131848 - DNA, 25 bp, Homo sapien
gatgccaatcttcattatggtccct

SEQ ID NO: 2131849 - DNA, 25 bp, Homo sapien
caggagccacattctcttcaaaggg

SEQ ID NO: 2131850 - DNA, 25 bp, Homo sapien
ctaaatcacctagagtggacaattt

SEQ ID NO: 2131851 - DNA, 25 bp, Homo sapien
ttccgggatcacatagttccggtcc

SEQ ID NO: 2131852 - DNA, 25 bp, Homo sapien
aacttccgggatcacatagttccgg

SEQ ID NO: 2131853 - DNA, 25 bp, Homo sapien
gaacttccgggatcacatagttccg

SEQ ID NO: 2131854 - DNA, 25 bp, Homo sapien
acttccgggatcacatagttccggt

SEQ ID NO: 2131855 - DNA, 25 bp, Homo sapien
gcttaatgctgcaatttagaaaatg

SEQ ID NO: 2131856 - DNA, 25 bp, Homo sapien
gaatgaaaattacagggtttcagat

SEQ ID NO: 2131857 - DNA, 25 bp, Homo sapien
ggagaatgaaaattacagggtttca

SEQ ID NO: 2131858 - DNA, 25 bp, Homo sapien
cagatatgatctgaataattgctta

SEQ ID NO: 2131859 - DNA, 25 bp, Homo sapien
tagattcaggatcggagttgccatc

SEQ ID NO: 2131860 - DNA, 25 bp, Homo sapien
tactcctcctgaggatagccaaggg

SEQ ID NO: 2131861 - DNA, 25 bp, Homo sapien
catccccttcagtgcgattgctggg

SEQ ID NO: 2131862 - DNA, 25 bp, Homo sapien
tgggtgtagcacgatcaaagtactc

SEQ ID NO: 2131863 - DNA, 25 bp, Homo sapien
tcataggccaatggatgtgactgag

SEQ ID NO: 2131864 - DNA, 25 bp, Homo sapien
tcaagatatgaggtgttactggtgc

SEQ ID NO: 2131865 - DNA, 25 bp, Homo sapien
aattgcattctaggactcaagatat

SEQ ID NO: 2131866 - DNA, 25 bp, Homo sapien
ttttcaattcataggccaatggatg

SEQ ID NO: 2131867 - DNA, 25 bp, Homo sapien
ctcttcccctcataaggcacagcat

SEQ ID NO: 2131868 - DNA, 25 bp, Homo sapien
aggcacagcatactacgagaagggc

SEQ ID NO: 2131869 - DNA, 25 bp, Homo sapien
ataaggcacagcatactacgagaag

SEQ ID NO: 2131870 - DNA, 25 bp, Homo sapien
taaggcacagcatactacgagaagg

SEQ ID NO: 2131871 - DNA, 25 bp, Homo sapien
tgtccggggaggagagagataggac

SEQ ID NO: 2131872 - DNA, 25 bp, Homo sapien
ctgtccggggaggagagagatagga

SEQ ID NO: 2131873 - DNA, 25 bp, Homo sapien
cggggaggagagagataggacagga

SEQ ID NO: 2131874 - DNA, 25 bp, Homo sapien
tccggggaggagagagataggacag

SEQ ID NO: 2131875 - DNA, 25 bp, Homo sapien
tggccgcgctgctgaccggccgggc

SEQ ID NO: 2131876 - DNA, 25 bp, Homo sapien
cgcgctgctgaccggccgggcgccg

SEQ ID NO: 2131877 - DNA, 25 bp, Homo sapien
caggccccatgccaccccggaagct

SEQ ID NO: 2131878 - DNA, 25 bp, Homo sapien
tgctctccagcctacggttctcagt

SEQ ID NO: 2131879 - DNA, 25 bp, Homo sapien
attgtcaatatgcagaacgatgcag

SEQ ID NO: 2131880 - DNA, 25 bp, Homo sapien
acgggcattgtcaatatgcagaacg

SEQ ID NO: 2131881 - DNA, 25 bp, Homo sapien
tcaatatgcagaacgatgcaggcat

SEQ ID NO: 2131882 - DNA, 25 bp, Homo sapien
cgggcattgtcaatatgcagaacga

SEQ ID NO: 2131883 - DNA, 25 bp, Homo sapien
gcggagcccatggatgtcgttctcc

SEQ ID NO: 2131884 - DNA, 25 bp, Homo sapien
atgtcgttctccacagactggcgca

SEQ ID NO: 2131885 - DNA, 25 bp, Homo sapien
tgtcgttctccacagactggcgcat

SEQ ID NO: 2131886 - DNA, 25 bp, Homo sapien
cttgcggagcccatggatgtcgttc

SEQ ID NO: 2131887 - DNA, 25 bp, Homo sapien
gtcaagtgacattggtgtcatcaat

SEQ ID NO: 2131888 - DNA, 25 bp, Homo sapien
ctgcagtcaagtgacattggtgtca

SEQ ID NO: 2131889 - DNA, 25 bp, Homo sapien
cagtcaagtgacattggtgtcatca

SEQ ID NO: 2131890 - DNA, 25 bp, Homo sapien
gcagtcaagtgacattggtgtcatc

SEQ ID NO: 2131891 - DNA, 25 bp, Homo sapien
agctcctccctgagagcctcaatct

SEQ ID NO: 2131892 - DNA, 25 bp, Homo sapien
ccacggtcaacctaaagctggcaat

SEQ ID NO: 2131893 - DNA, 25 bp, Homo sapien
tccctgagagcctcaatctctgtct

SEQ ID NO: 2131894 - DNA, 25 bp, Homo sapien
ctccacggtcaacctaaagctggca

SEQ ID NO: 2131895 - DNA, 25 bp, Homo sapien
tcaaactgctgaggccagtatttgt

SEQ ID NO: 2131896 - DNA, 25 bp, Homo sapien
ctcctcaaactgctgaggccagtat

SEQ ID NO: 2131897 - DNA, 25 bp, Homo sapien
aactgctgaggccagtatttgtcta

SEQ ID NO: 2131898 - DNA, 25 bp, Homo sapien
gttctcctcaaactgctgaggccag

SEQ ID NO: 2131899 - DNA, 25 bp, Homo sapien
tgtgagcgtcatctcagcagctcca

SEQ ID NO: 2131900 - DNA, 25 bp, Homo sapien
tgagcgtcatctcagcagctccaac

SEQ ID NO: 2131901 - DNA, 25 bp, Homo sapien
ctgtgagcgtcatctcagcagctcc

SEQ ID NO: 2131902 - DNA, 25 bp, Homo sapien
gtgagcgtcatctcagcagctccaa

SEQ ID NO: 2131903 - DNA, 25 bp, Homo sapien
cacctccctcgggttgttctccaag

SEQ ID NO: 2131904 - DNA, 25 bp, Homo sapien
atggagtccaggtcgatctccaagg

SEQ ID NO: 2131905 - DNA, 25 bp, Homo sapien
catctgtagggagtagcgggcctcc

SEQ ID NO: 2131906 - DNA, 25 bp, Homo sapien
ctgtagggagtagcgggcctccacc

SEQ ID NO: 2131907 - DNA, 25 bp, Homo sapien
gtgcagcaggatcccgatgagctgc

SEQ ID NO: 2131908 - DNA, 25 bp, Homo sapien
gcagcaggatcccgatgagctgcac

SEQ ID NO: 2131909 - DNA, 25 bp, Homo sapien
ccaggtgcagcaggatcccgatgag

SEQ ID NO: 2131910 - DNA, 25 bp, Homo sapien
caggtgcagcaggatcccgatgagc

SEQ ID NO: 2131911 - DNA, 25 bp, Homo sapien
tgttcagcagggcctcattactcct

SEQ ID NO: 2131912 - DNA, 25 bp, Homo sapien
ctggcactgtctctctgcccgggtc

SEQ ID NO: 2131913 - DNA, 25 bp, Homo sapien
agggcctcattactcctgggcctgg

SEQ ID NO: 2131914 - DNA, 25 bp, Homo sapien
ggcactgtctctctgcccgggtctg

SEQ ID NO: 2131915 - DNA, 25 bp, Homo sapien
caggcggcggtaggtggcgatctca

SEQ ID NO: 2131916 - DNA, 25 bp, Homo sapien
cttccagcaggcggcggtaggtggc

SEQ ID NO: 2131917 - DNA, 25 bp, Homo sapien
ttccagcaggcggcggtaggtggcg

SEQ ID NO: 2131918 - DNA, 25 bp, Homo sapien
gcggcggtaggtggcgatctcagcc

SEQ ID NO: 2131919 - DNA, 25 bp, Homo sapien
gccatccactttccggcgggtggtg

SEQ ID NO: 2131920 - DNA, 25 bp, Homo sapien
actttgccatccactttccggcggg

SEQ ID NO: 2131921 - DNA, 25 bp, Homo sapien
tttgccatccactttccggcgggtg

SEQ ID NO: 2131922 - DNA, 25 bp, Homo sapien
tgccatccactttccggcgggtggt

SEQ ID NO: 2131923 - DNA, 25 bp, Homo sapien
actctgtactttttattggcctcct

SEQ ID NO: 2131924 - DNA, 25 bp, Homo sapien
tccccaaagggtaccctgcttctgc

SEQ ID NO: 2131925 - DNA, 25 bp, Homo sapien
ctcctgctccccaaagggtaccctg

SEQ ID NO: 2131926 - DNA, 25 bp, Homo sapien
caaagggtaccctgcttctgctggc

SEQ ID NO: 2131927 - DNA, 25 bp, Homo sapien
tcttagctggtatgacagcagtcca

SEQ ID NO: 2131928 - DNA, 25 bp, Homo sapien
gaagccgcatgaatcattaagtgaa

SEQ ID NO: 2131929 - DNA, 25 bp, Homo sapien
catataagcaggcacatgaagccgc

SEQ ID NO: 2131930 - DNA, 25 bp, Homo sapien
gaactcttgggtatggcaaatcagg

SEQ ID NO: 2131931 - DNA, 25 bp, Homo sapien
gggcatagcaacctttacgacagca

SEQ ID NO: 2131932 - DNA, 25 bp, Homo sapien
ttaagcaggcattttgtcatcaggc

SEQ ID NO: 2131933 - DNA, 25 bp, Homo sapien
ccaacagggagtgtgtctttaccaa

SEQ ID NO: 2131934 - DNA, 25 bp, Homo sapien
tggtcccaataggatagcatcgttg

SEQ ID NO: 2131935 - DNA, 25 bp, Homo sapien
ggagaggcacttccatctattttag

SEQ ID NO: 2131936 - DNA, 25 bp, Homo sapien
taaaggtgatggtagtaactatcca

SEQ ID NO: 2131937 - DNA, 25 bp, Homo sapien
tctgcggatttctttttaggacact

SEQ ID NO: 2131938 - DNA, 25 bp, Homo sapien
gaaatattatgctgatctgcagccg

SEQ ID NO: 2131939 - DNA, 25 bp, Homo sapien
tgaagattcccgagcaaagttgagg

SEQ ID NO: 2131940 - DNA, 25 bp, Homo sapien
gatttaagtcattgcccatggctca

SEQ ID NO: 2131941 - DNA, 25 bp, Homo sapien
ctaaggccaaagagctaattaagca

SEQ ID NO: 2131942 - DNA, 25 bp, Homo sapien
ctttgaacatgagagagaattgaac

SEQ ID NO: 2131943 - DNA, 25 bp, Homo sapien
tttttattagccacttaaatatcat

SEQ ID NO: 2131944 - DNA, 25 bp, Homo sapien
atttttattagccacttaaatatca

SEQ ID NO: 2131945 - DNA, 25 bp, Homo sapien
caatgcgatggtctgtgtcactgga

SEQ ID NO: 2131946 - DNA, 25 bp, Homo sapien
ctgactacgatggagggcaataacc

SEQ ID NO: 2131947 - DNA, 25 bp, Homo sapien
gaatcacctctggacggtctggcct

SEQ ID NO: 2131948 - DNA, 25 bp, Homo sapien
gaatgatccagagatgccggcatcc

SEQ ID NO: 2131949 - DNA, 25 bp, Homo sapien
aaaccaagaagagggtgcccagtca

SEQ ID NO: 2131950 - DNA, 25 bp, Homo sapien
tgaaaacgctacttaacctgctggg

SEQ ID NO: 2131951 - DNA, 25 bp, Homo sapien
tgatatcacagaggaggaatcttcc

SEQ ID NO: 2131952 - DNA, 25 bp, Homo sapien
taagaagttattctgcacgcccagt

SEQ ID NO: 2131953 - DNA, 25 bp, Homo sapien
cagaaacagagaagactgcaatctc

SEQ ID NO: 2131954 - DNA, 25 bp, Homo sapien
cacagaggaaatcaatagaacttac

SEQ ID NO: 2131955 - DNA, 25 bp, Homo sapien
taaatcttagcccttccaactgcat

SEQ ID NO: 2131956 - DNA, 25 bp, Homo sapien
caaaagcaatgtatccaagcttcaa

SEQ ID NO: 2131957 - DNA, 25 bp, Homo sapien
actggggtccaaatcaagcaaggaa

SEQ ID NO: 2131958 - DNA, 25 bp, Homo sapien
ctggggtccaaatcaagcaaggaat

SEQ ID NO: 2131959 - DNA, 25 bp, Homo sapien
gcaaggaatcatgacctgaagttac

SEQ ID NO: 2131960 - DNA, 25 bp, Homo sapien
aagcaaggaatcatgacctgaagtt

SEQ ID NO: 2131961 - DNA, 25 bp, Homo sapien
catcatcctattagttttcttaaca

SEQ ID NO: 2131962 - DNA, 25 bp, Homo sapien
aacaattttactgatctttgtcggt

SEQ ID NO: 2131963 - DNA, 25 bp, Homo sapien
caattttactgatctttgtcggtgt

SEQ ID NO: 2131964 - DNA, 25 bp, Homo sapien
tctttgtcggtgtcttcttctccat

SEQ ID NO: 2131965 - DNA, 25 bp, Homo sapien
tcctataccgactatcttttctgat

SEQ ID NO: 2131966 - DNA, 25 bp, Homo sapien
taagaatttcctataccgactatct

SEQ ID NO: 2131967 - DNA, 25 bp, Homo sapien
tttcctataccgactatcttttctg

SEQ ID NO: 2131968 - DNA, 25 bp, Homo sapien
tatactaagaatttcctataccgac

SEQ ID NO: 2131969 - DNA, 25 bp, Homo sapien
ttttctcaactggagatattgtcgc

SEQ ID NO: 2131970 - DNA, 25 bp, Homo sapien
tctcaactggagatattgtcgcttc

SEQ ID NO: 2131971 - DNA, 25 bp, Homo sapien
tcaactggagatattgtcgcttcat

SEQ ID NO: 2131972 - DNA, 25 bp, Homo sapien
cagttttctcaactggagatattgt

SEQ ID NO: 2131973 - DNA, 25 bp, Homo sapien
tacagaaacccagatttaaggagca

SEQ ID NO: 2131974 - DNA, 25 bp, Homo sapien
cccagatttaaggagcatgtgacat

SEQ ID NO: 2131975 - DNA, 25 bp, Homo sapien
gagcatgtgacatactgatgctgac

SEQ ID NO: 2131976 - DNA, 25 bp, Homo sapien
tagcagaacatgtcactacagaaac

SEQ ID NO: 2131977 - DNA, 25 bp, Homo sapien
ttttttggcttttccagattgtcac

SEQ ID NO: 2131978 - DNA, 25 bp, Homo sapien
tttttggcttttccagattgtcaca

SEQ ID NO: 2131979 - DNA, 25 bp, Homo sapien
ttttgttagtattaactgctactcc

SEQ ID NO: 2131980 - DNA, 25 bp, Homo sapien
tcagcaagaagaagtaaactcatta

SEQ ID NO: 2131981 - DNA, 25 bp, Homo sapien
cagcaagaagaagtaaactcattat

SEQ ID NO: 2131982 - DNA, 25 bp, Homo sapien
gttagtattaactgctactccatca

SEQ ID NO: 2131983 - DNA, 25 bp, Homo sapien
ctgagggtagaagaatcttgagctc

SEQ ID NO: 2131984 - DNA, 25 bp, Homo sapien
cacaggcatccatagcattgatttt

SEQ ID NO: 2131985 - DNA, 25 bp, Homo sapien
cttcctttggtacaccaaaagctat

SEQ ID NO: 2131986 - DNA, 25 bp, Homo sapien
agctatattctcttgtacttggacc

SEQ ID NO: 2131987 - DNA, 25 bp, Homo sapien
tctcttgtacttggaccccacaggc

SEQ ID NO: 2131988 - DNA, 25 bp, Homo sapien
ggatctcacatttcctactccagga

SEQ ID NO: 2131989 - DNA, 25 bp, Homo sapien
tctctgatacaacgatgaggaccat

SEQ ID NO: 2131990 - DNA, 25 bp, Homo sapien
tttctctgatacaacgatgaggacc

SEQ ID NO: 2131991 - DNA, 25 bp, Homo sapien
ttgccaacggatctcacatttccta

SEQ ID NO: 2131992 - DNA, 25 bp, Homo sapien
gatgcatacaggtacagattgactg

SEQ ID NO: 2131993 - DNA, 25 bp, Homo sapien
gccaccaatatagcatccagttcca

SEQ ID NO: 2131994 - DNA, 25 bp, Homo sapien
caagggcttctctggtatcatagta

SEQ ID NO: 2131995 - DNA, 25 bp, Homo sapien
tataagagctagtagaaaaccactt

SEQ ID NO: 2131996 - DNA, 25 bp, Homo sapien
ccacattggtgacagggaaggcaat

SEQ ID NO: 2131997 - DNA, 25 bp, Homo sapien
ctgtttttcacccaccacattggtg

SEQ ID NO: 2131998 - DNA, 25 bp, Homo sapien
gctgtttttcacccaccacattggt

SEQ ID NO: 2131999 - DNA, 25 bp, Homo sapien
ccaccacattggtgacagggaaggc

SEQ ID NO: 2132000 - DNA, 25 bp, Homo sapien
cagttctcctcacctttactttttg

SEQ ID NO: 2132001 - DNA, 25 bp, Homo sapien
tcctcacctttactttttgatagct

SEQ ID NO: 2132002 - DNA, 25 bp, Homo sapien
ttcgttccccagaacgctcccttgc

SEQ ID NO: 2132003 - DNA, 25 bp, Homo sapien
agaacgctcccttgcattccaccat

SEQ ID NO: 2132004 - DNA, 25 bp, Homo sapien
ttgtataaaagcaggtcattggcaa

SEQ ID NO: 2132005 - DNA, 25 bp, Homo sapien
gcaggtcattggcaatgatacacat

SEQ ID NO: 2132006 - DNA, 25 bp, Homo sapien
ctgaacgtaaattgtataaaagcag

SEQ ID NO: 2132007 - DNA, 25 bp, Homo sapien
catgtgcaactgaacgtaaattgta

SEQ ID NO: 2132008 - DNA, 25 bp, Homo sapien
ccttccaggctactccaaatgtcat

SEQ ID NO: 2132009 - DNA, 25 bp, Homo sapien
ttcctccttccaggctactccaaat

SEQ ID NO: 2132010 - DNA, 25 bp, Homo sapien
cctccttccaggctactccaaatgt

SEQ ID NO: 2132011 - DNA, 25 bp, Homo sapien
tccttccaggctactccaaatgtca

SEQ ID NO: 2132012 - DNA, 25 bp, Homo sapien
gacagcatctcaccatgagcctgtg

SEQ ID NO: 2132013 - DNA, 25 bp, Homo sapien
cccagggactttgacaaacttaatg

SEQ ID NO: 2132014 - DNA, 25 bp, Homo sapien
acaggccatgatgcgaacttgctca

SEQ ID NO: 2132015 - DNA, 25 bp, Homo sapien
catctttgcagtaaccagttcccca

SEQ ID NO: 2132016 - DNA, 25 bp, Homo sapien
cgtgtacagtttaatctgtacaggc

SEQ ID NO: 2132017 - DNA, 25 bp, Homo sapien
aaactcgtgtacagtttaatctgta

SEQ ID NO: 2132018 - DNA, 25 bp, Homo sapien
gattaaactcgtgtacagtttaatc

SEQ ID NO: 2132019 - DNA, 25 bp, Homo sapien
tcgtgtacagtttaatctgtacagg

SEQ ID NO: 2132020 - DNA, 25 bp, Homo sapien
ttctcctatagcttggatgtacctt

SEQ ID NO: 2132021 - DNA, 25 bp, Homo sapien
cttctcctatagcttggatgtacct

SEQ ID NO: 2132022 - DNA, 25 bp, Homo sapien
gttttccttgaagtataatatgaca

SEQ ID NO: 2132023 - DNA, 25 bp, Homo sapien
tctcctatagcttggatgtacctta

SEQ ID NO: 2132024 - DNA, 25 bp, Homo sapien
cactggtctgtttttcgtactcatc

SEQ ID NO: 2132025 - DNA, 25 bp, Homo sapien
ggtctgtttttcgtactcatctgcc

SEQ ID NO: 2132026 - DNA, 25 bp, Homo sapien
ctggtctgtttttcgtactcatctg

SEQ ID NO: 2132027 - DNA, 25 bp, Homo sapien
tttcactggtctgtttttcgtactc

SEQ ID NO: 2132028 - DNA, 25 bp, Homo sapien
tatgtacctgaatacacaacataaa

SEQ ID NO: 2132029 - DNA, 25 bp, Homo sapien
agacagaagctgtatggacagtaat

SEQ ID NO: 2132030 - DNA, 25 bp, Homo sapien
ccaggcatgaaccacgtttttctca

SEQ ID NO: 2132031 - DNA, 25 bp, Homo sapien
gcatgaaccacgtttttctcattcc

SEQ ID NO: 2132032 - DNA, 25 bp, Homo sapien
cctgaggcaaaataattgtctcttc

SEQ ID NO: 2132033 - DNA, 25 bp, Homo sapien
aacctgaggcaaaataattgtctct

SEQ ID NO: 2132034 - DNA, 25 bp, Homo sapien
gatgacttgaaacctgaggcaaaat

SEQ ID NO: 2132035 - DNA, 25 bp, Homo sapien
gacttgaaacctgaggcaaaataat

SEQ ID NO: 2132036 - DNA, 25 bp, Homo sapien
ttccaagtgttgtagtgttattctg

SEQ ID NO: 2132037 - DNA, 25 bp, Homo sapien
aacggcttgggatctgtacttttca

SEQ ID NO: 2132038 - DNA, 25 bp, Homo sapien
aacttggggatctataacggcttgg

SEQ ID NO: 2132039 - DNA, 25 bp, Homo sapien
tcagaattccttcgcaacttgggga

SEQ ID NO: 2132040 - DNA, 25 bp, Homo sapien
ttcaatatctggcaggtatctaggg

SEQ ID NO: 2132041 - DNA, 25 bp, Homo sapien
agggacccaggtaccccactgtgat

SEQ ID NO: 2132042 - DNA, 25 bp, Homo sapien
tatctggcaggtatctagggaccca

SEQ ID NO: 2132043 - DNA, 25 bp, Homo sapien
cactgtgtgatgaacggcagaagtg

SEQ ID NO: 2132044 - DNA, 25 bp, Homo sapien
tggtaatggtagtagcggtagccat

SEQ ID NO: 2132045 - DNA, 25 bp, Homo sapien
gatcagtagtggtaatggtagtagc

SEQ ID NO: 2132046 - DNA, 25 bp, Homo sapien
caactctgatcagtagtggtaatgg

SEQ ID NO: 2132047 - DNA, 25 bp, Homo sapien
ttgccaactctgatcagtagtggta

SEQ ID NO: 2132048 - DNA, 25 bp, Homo sapien
gactctggtttagcaatggacttag

SEQ ID NO: 2132049 - DNA, 25 bp, Homo sapien
gaggaaaatgtctgccgactctggt

SEQ ID NO: 2132050 - DNA, 25 bp, Homo sapien
caggtgggagttggatggataatgc

SEQ ID NO: 2132051 - DNA, 25 bp, Homo sapien
tgccaggggcacagcaaaatgactg

SEQ ID NO: 2132052 - DNA, 25 bp, Homo sapien
tatgtaattctcttacttgcattat

SEQ ID NO: 2132053 - DNA, 25 bp, Homo sapien
cctttacggcacagatcatggacct

SEQ ID NO: 2132054 - DNA, 25 bp, Homo sapien
tggacctcaatcagctcatatgtaa

SEQ ID NO: 2132055 - DNA, 25 bp, Homo sapien
cagatcatggacctcaatcagctca

SEQ ID NO: 2132056 - DNA, 25 bp, Homo sapien
tttactgtggttcgccagatttggg

SEQ ID NO: 2132057 - DNA, 25 bp, Homo sapien
ggaaatggatttactacataactgc

SEQ ID NO: 2132058 - DNA, 25 bp, Homo sapien
tcaagctctaatatagaagcccaaa

SEQ ID NO: 2132059 - DNA, 25 bp, Homo sapien
taactgctaacaagaccacctagat

SEQ ID NO: 2132060 - DNA, 25 bp, Homo sapien
gcatgtggtcagttgtggagaatat

SEQ ID NO: 2132061 - DNA, 25 bp, Homo sapien
tttaggtatagtagtgcttgcttta

SEQ ID NO: 2132062 - DNA, 25 bp, Homo sapien
tattctgcaattggtcaataagatg

SEQ ID NO: 2132063 - DNA, 25 bp, Homo sapien
ggtcagttgtggagaatatcccatg

SEQ ID NO: 2132064 - DNA, 25 bp, Homo sapien
accattaataactctaatcctgacg

SEQ ID NO: 2132065 - DNA, 25 bp, Homo sapien
gctcacaccattaataactctaatc

SEQ ID NO: 2132066 - DNA, 25 bp, Homo sapien
aactctaatcctgacgacaaatgcc

SEQ ID NO: 2132067 - DNA, 25 bp, Homo sapien
taataactctaatcctgacgacaaa

SEQ ID NO: 2132068 - DNA, 25 bp, Homo sapien
aacaaaagttccattgaatatgtga

SEQ ID NO: 2132069 - DNA, 25 bp, Homo sapien
ccattgaatatgtgacataggcaga

SEQ ID NO: 2132070 - DNA, 25 bp, Homo sapien
tgaatatgtgacataggcagagaag

SEQ ID NO: 2132071 - DNA, 25 bp, Homo sapien
gttccattgaatatgtgacataggc

SEQ ID NO: 2132072 - DNA, 25 bp, Homo sapien
tgggcccctgaaacatggccccagc

SEQ ID NO: 2132073 - DNA, 25 bp, Homo sapien
agccccatgcagagccgcctcatga

SEQ ID NO: 2132074 - DNA, 25 bp, Homo sapien
ctcatgaagcacaggaacccagcgc

SEQ ID NO: 2132075 - DNA, 25 bp, Homo sapien
tgaatgttgtggctgtgccactgac

SEQ ID NO: 2132076 - DNA, 25 bp, Homo sapien
tccaggagtccgtgtaagaagagca

SEQ ID NO: 2132077 - DNA, 25 bp, Homo sapien
gctgggctctgtactgataaaaggg

SEQ ID NO: 2132078 - DNA, 25 bp, Homo sapien
cataagcaaacgtgatgtagttcat

SEQ ID NO: 2132079 - DNA, 25 bp, Homo sapien
ctttgatgtaacttggaaagcctgc

SEQ ID NO: 2132080 - DNA, 25 bp, Homo sapien
cttcacagtaactcttcccaccacc

SEQ ID NO: 2132081 - DNA, 25 bp, Homo sapien
ccccatccccatctttagaaaacat

SEQ ID NO: 2132082 - DNA, 25 bp, Homo sapien
ttcttcacagtaactcttcccacca

SEQ ID NO: 2132083 - DNA, 25 bp, Homo sapien
ttttcttcacagtaactcttcccac

SEQ ID NO: 2132084 - DNA, 25 bp, Homo sapien
tcagggcttgaacacttaagagaat

SEQ ID NO: 2132085 - DNA, 25 bp, Homo sapien
ttaagagaatctacaccctgcctga

SEQ ID NO: 2132086 - DNA, 25 bp, Homo sapien
aagagaatctacaccctgcctgaaa

SEQ ID NO: 2132087 - DNA, 25 bp, Homo sapien
cctgaatcacatcatcagggcttga

SEQ ID NO: 2132088 - DNA, 25 bp, Homo sapien
aagggtttaaatctgcttgcactag

SEQ ID NO: 2132089 - DNA, 25 bp, Homo sapien
tgtatgtgacatatagtggcctata

SEQ ID NO: 2132090 - DNA, 25 bp, Homo sapien
taccactgaggtgttaatataacat

SEQ ID NO: 2132091 - DNA, 25 bp, Homo sapien
gaccacatttgattcaactgagacc

SEQ ID NO: 2132092 - DNA, 25 bp, Homo sapien
agatgttactgtgacaactacccag

SEQ ID NO: 2132093 - DNA, 25 bp, Homo sapien
tacccagagtcgcacaactgctact

SEQ ID NO: 2132094 - DNA, 25 bp, Homo sapien
ggaaccacgagaagatgctatcctg

SEQ ID NO: 2132095 - DNA, 25 bp, Homo sapien
gaagtgaagcagattcatacagcct

SEQ ID NO: 2132096 - DNA, 25 bp, Homo sapien
ggcggtttcaaatcatcaatgcaga

SEQ ID NO: 2132097 - DNA, 25 bp, Homo sapien
tcaatgcagaatacgagcctacaga

SEQ ID NO: 2132098 - DNA, 25 bp, Homo sapien
ttctaaagactgtatggaggcaacc

SEQ ID NO: 2132099 - DNA, 25 bp, Homo sapien
ggtgcaggataacacccctagtgaa

SEQ ID NO: 2132100 - DNA, 25 bp, Homo sapien
tggatataaaccaggcttgccaaac

SEQ ID NO: 2132101 - DNA, 25 bp, Homo sapien
ggcaacatgggttcgcaaaccttgt

SEQ ID NO: 2132102 - DNA, 25 bp, Homo sapien
catgggttcgcaaaccttgtagatg

SEQ ID NO: 2132103 - DNA, 25 bp, Homo sapien
ggatataaaccaggcttgccaaaca

SEQ ID NO: 2132104 - DNA, 25 bp, Homo sapien
tttcaatgaaaagtaaatactcgtc

SEQ ID NO: 2132105 - DNA, 25 bp, Homo sapien
ttcaatgaaaagtaaatactcgtct

SEQ ID NO: 2132106 - DNA, 25 bp, Homo sapien
ctttcaatgaaaagtaaatactcgt

SEQ ID NO: 2132107 - DNA, 25 bp, Homo sapien
caatgaaaagtaaatactcgtcttt

SEQ ID NO: 2132108 - DNA, 25 bp, Homo sapien
ggaaacctgcaactagctctctgat

SEQ ID NO: 2132109 - DNA, 25 bp, Homo sapien
tccaatctactaatcaggacaccct

SEQ ID NO: 2132110 - DNA, 25 bp, Homo sapien
tgagatagggactagaatattccaa

SEQ ID NO: 2132111 - DNA, 25 bp, Homo sapien
tctccatcattgagatagggactag

SEQ ID NO: 2132112 - DNA, 25 bp, Homo sapien
ctcaattggcttgcaggataacaca

SEQ ID NO: 2132113 - DNA, 25 bp, Homo sapien
cctttctgctttctatctgtcccat

SEQ ID NO: 2132114 - DNA, 25 bp, Homo sapien
ctttcctttctgctttctatctgtc

SEQ ID NO: 2132115 - DNA, 25 bp, Homo sapien
ttcctttctgctttctatctgtccc

SEQ ID NO: 2132116 - DNA, 25 bp, Homo sapien
tcctttctgctttctatctgtccca

SEQ ID NO: 2132117 - DNA, 25 bp, Homo sapien
gaacaaagatagatactcgccttaa

SEQ ID NO: 2132118 - DNA, 25 bp, Homo sapien
gagaacaaagatagatactcgcctt

SEQ ID NO: 2132119 - DNA, 25 bp, Homo sapien
caaggagaacaaagatagatactcg

SEQ ID NO: 2132120 - DNA, 25 bp, Homo sapien
aaagatagatactcgccttaaattc

SEQ ID NO: 2132121 - DNA, 25 bp, Homo sapien
ccacagattgagttgggcctctcca

SEQ ID NO: 2132122 - DNA, 25 bp, Homo sapien
tgctataggattcatataggctacc

SEQ ID NO: 2132123 - DNA, 25 bp, Homo sapien
gataatcttggattgttgggcccac

SEQ ID NO: 2132124 - DNA, 25 bp, Homo sapien
tctccatctggccattgctatagga

SEQ ID NO: 2132125 - DNA, 25 bp, Homo sapien
ttcaaattcagctaatgcttttgaa

SEQ ID NO: 2132126 - DNA, 25 bp, Homo sapien
cttcaaattcagctaatgcttttga

SEQ ID NO: 2132127 - DNA, 25 bp, Homo sapien
tcaaattcagctaatgcttttgaac

SEQ ID NO: 2132128 - DNA, 25 bp, Homo sapien
agaagatgaagaccgacaagatttc

SEQ ID NO: 2132129 - DNA, 25 bp, Homo sapien
gaagaagatgaagaccgacaagatt

SEQ ID NO: 2132130 - DNA, 25 bp, Homo sapien
gatgaagaccgacaagatttcttct

SEQ ID NO: 2132131 - DNA, 25 bp, Homo sapien
aagatgaagaccgacaagatttctt

SEQ ID NO: 2132132 - DNA, 25 bp, Homo sapien
tgaagaactgcttgaagaatcagag

SEQ ID NO: 2132133 - DNA, 25 bp, Homo sapien
ctgaagaactgcttgaagaatcaga

SEQ ID NO: 2132134 - DNA, 25 bp, Homo sapien
catgcgtagagctttgggatgattt

SEQ ID NO: 2132135 - DNA, 25 bp, Homo sapien
tgctgaggcttcttacatccttttc

SEQ ID NO: 2132136 - DNA, 25 bp, Homo sapien
ggatgatttgtatgaacggttcttc

SEQ ID NO: 2132137 - DNA, 25 bp, Homo sapien
tctgattcatgcgtagagctttggg

SEQ ID NO: 2132138 - DNA, 25 bp, Homo sapien
cctttgcttgttctcgctcttcaca

SEQ ID NO: 2132139 - DNA, 25 bp, Homo sapien
ctttgcttgttctcgctcttcacac

SEQ ID NO: 2132140 - DNA, 25 bp, Homo sapien
ttcttactatgtttcttgtgctgtt

SEQ ID NO: 2132141 - DNA, 25 bp, Homo sapien
tcttactatgtttcttgtgctgttt

SEQ ID NO: 2132142 - DNA, 25 bp, Homo sapien
cttcttactatgtttcttgtgctgt

SEQ ID NO: 2132143 - DNA, 25 bp, Homo sapien
gggaactcggcaaactcattcttgc

SEQ ID NO: 2132144 - DNA, 25 bp, Homo sapien
tgtatattgaagttgccagcagcca

SEQ ID NO: 2132145 - DNA, 25 bp, Homo sapien
cacagtgggatttgataggcaactc

SEQ ID NO: 2132146 - DNA, 25 bp, Homo sapien
tatgccccttactggcacagtggga

SEQ ID NO: 2132147 - DNA, 25 bp, Homo sapien
aaaataggatgtgtaagagtcaaag

SEQ ID NO: 2132148 - DNA, 25 bp, Homo sapien
aataggatgtgtaagagtcaaaggc

SEQ ID NO: 2132149 - DNA, 25 bp, Homo sapien
aaataggatgtgtaagagtcaaagg

SEQ ID NO: 2132150 - DNA, 25 bp, Homo sapien
cttatgctgtaaactcctgtccttc

SEQ ID NO: 2132151 - DNA, 25 bp, Homo sapien
atgctgtaaactcctgtccttcttg

SEQ ID NO: 2132152 - DNA, 25 bp, Homo sapien
ttacttatgctgtaaactcctgtcc

SEQ ID NO: 2132153 - DNA, 25 bp, Homo sapien
tacttatgctgtaaactcctgtcct

SEQ ID NO: 2132154 - DNA, 25 bp, Homo sapien
catacggcgtactagaggtctggca

SEQ ID NO: 2132155 - DNA, 25 bp, Homo sapien
tacggacacaggaagatcaatgatg

SEQ ID NO: 2132156 - DNA, 25 bp, Homo sapien
gacccaggttgcatccgtcttgtaa

SEQ ID NO: 2132157 - DNA, 25 bp, Homo sapien
tctaaacagcgacctaaggacccag

SEQ ID NO: 2132158 - DNA, 25 bp, Homo sapien
ccttgggtttagtgaaatgagaatc

SEQ ID NO: 2132159 - DNA, 25 bp, Homo sapien
cccttgggtttagtgaaatgagaat

SEQ ID NO: 2132160 - DNA, 25 bp, Homo sapien
ctgtgctctctagcttccccttggg

SEQ ID NO: 2132161 - DNA, 25 bp, Homo sapien
tctagcttccccttgggtttagtga

SEQ ID NO: 2132162 - DNA, 25 bp, Homo sapien
gaagttctgtatatcgagtatcgtt

SEQ ID NO: 2132163 - DNA, 25 bp, Homo sapien
tatatcgagtatcgttagtagtctc

SEQ ID NO: 2132164 - DNA, 25 bp, Homo sapien
cgttagtagtctcctcatagaaata

SEQ ID NO: 2132165 - DNA, 25 bp, Homo sapien
gtagtctcctcatagaaatattgaa

SEQ ID NO: 2132166 - DNA, 25 bp, Homo sapien
gggcggcctcactgaacaccaacat

SEQ ID NO: 2132167 - DNA, 25 bp, Homo sapien
tatcattgttcagggcggcctcact

SEQ ID NO: 2132168 - DNA, 25 bp, Homo sapien
ttcagggcggcctcactgaacacca

SEQ ID NO: 2132169 - DNA, 25 bp, Homo sapien
attggaccgtatcattgttcagggc

SEQ ID NO: 2132170 - DNA, 25 bp, Homo sapien
ggaatgaactacatactgcttcaaa

SEQ ID NO: 2132171 - DNA, 25 bp, Homo sapien
tcgataaggaatgaactacatactg

SEQ ID NO: 2132172 - DNA, 25 bp, Homo sapien
ttgtagttttccgtggttcattcga

SEQ ID NO: 2132173 - DNA, 25 bp, Homo sapien
ccgtggttcattcgataaggaatga

SEQ ID NO: 2132174 - DNA, 25 bp, Homo sapien
ttacaaactttccaaaataatgatc

SEQ ID NO: 2132175 - DNA, 25 bp, Homo sapien
gacagctcctgccaaggtagtaata

SEQ ID NO: 2132176 - DNA, 25 bp, Homo sapien
atccagcatccaaccaccagtgtga

SEQ ID NO: 2132177 - DNA, 25 bp, Homo sapien
tgcttgtaattgcactcagctgggc

SEQ ID NO: 2132178 - DNA, 25 bp, Homo sapien
tggaaatatcctctgtttctgcgaa

SEQ ID NO: 2132179 - DNA, 25 bp, Homo sapien
aatatgctttgtttgaactgttcgt

SEQ ID NO: 2132180 - DNA, 25 bp, Homo sapien
aaaatatgctttgtttgaactgttc

SEQ ID NO: 2132181 - DNA, 25 bp, Homo sapien
ataaaatatgctttgtttgaactgt

SEQ ID NO: 2132182 - DNA, 25 bp, Homo sapien
tatgctttgtttgaactgttcgtac

SEQ ID NO: 2132183 - DNA, 25 bp, Homo sapien
tgcagagccctcttttaactccagc

SEQ ID NO: 2132184 - DNA, 25 bp, Homo sapien
tgtgccaaactgttcaactgccctt

SEQ ID NO: 2132185 - DNA, 25 bp, Homo sapien
taacggagaaaccataggtaattgc

SEQ ID NO: 2132186 - DNA, 25 bp, Homo sapien
cctggaccaggatgaccaagagcga

SEQ ID NO: 2132187 - DNA, 25 bp, Homo sapien
caaattgcatgcctctgatgatcct

SEQ ID NO: 2132188 - DNA, 25 bp, Homo sapien
caactagatgtatttgtaggacact

SEQ ID NO: 2132189 - DNA, 25 bp, Homo sapien
taagtttggcacatgcacatgatca

SEQ ID NO: 2132190 - DNA, 25 bp, Homo sapien
gatgatcctcagtcaccaaaattgt

SEQ ID NO: 2132191 - DNA, 25 bp, Homo sapien
tgtgcttgtgtaggtgtgtttttgt

SEQ ID NO: 2132192 - DNA, 25 bp, Homo sapien
gaccagccttgaagcgtctgttcat

SEQ ID NO: 2132193 - DNA, 25 bp, Homo sapien
ctgaaggattttgactctaaattcc

SEQ ID NO: 2132194 - DNA, 25 bp, Homo sapien
caaccaaaaaggtgttgatgagtca

SEQ ID NO: 2132195 - DNA, 25 bp, Homo sapien
cccattgaagagtaattttaattgc

SEQ ID NO: 2132196 - DNA, 25 bp, Homo sapien
caaaagagccctgagaagtggaaac

SEQ ID NO: 2132197 - DNA, 25 bp, Homo sapien
tatcaactgagactaagccttcagc

SEQ ID NO: 2132198 - DNA, 25 bp, Homo sapien
tgatgagagtgtttaggcagagtcc

SEQ ID NO: 2132199 - DNA, 25 bp, Homo sapien
agctgggctccaccttctatcgcag

SEQ ID NO: 2132200 - DNA, 25 bp, Homo sapien
gtgcaggctgaactaaattttggga

SEQ ID NO: 2132201 - DNA, 25 bp, Homo sapien
agtgcaggctgaactaaattttggg

SEQ ID NO: 2132202 - DNA, 25 bp, Homo sapien
cagaactaaggctgtcagaaaaata

SEQ ID NO: 2132203 - DNA, 25 bp, Homo sapien
gtcagaaaaatagcgggatggaaac

SEQ ID NO: 2132204 - DNA, 25 bp, Homo sapien
tgtcagaaaaatagcgggatggaaa

SEQ ID NO: 2132205 - DNA, 25 bp, Homo sapien
agcacagtaaagacagaactaaggc

SEQ ID NO: 2132206 - DNA, 25 bp, Homo sapien
tgagtcattcagagtacccacgtac

SEQ ID NO: 2132207 - DNA, 25 bp, Homo sapien
tgtgcatcttgcaaaacacactcag

SEQ ID NO: 2132208 - DNA, 25 bp, Homo sapien
caactagtctagtgtgacaatgaga

SEQ ID NO: 2132209 - DNA, 25 bp, Homo sapien
tagcaggttagtttcatagaggcaa

SEQ ID NO: 2132210 - DNA, 25 bp, Homo sapien
aaaagttggagacatgagaaaggtc

SEQ ID NO: 2132211 - DNA, 25 bp, Homo sapien
ttggagacatgagaaaggtcccctt

SEQ ID NO: 2132212 - DNA, 25 bp, Homo sapien
ggagacatgagaaaggtccccttta

SEQ ID NO: 2132213 - DNA, 25 bp, Homo sapien
catgagaaaggtcccctttacttgt

SEQ ID NO: 2132214 - DNA, 25 bp, Homo sapien
gagccaaaacaagatgcctgaacat

SEQ ID NO: 2132215 - DNA, 25 bp, Homo sapien
ctgtgaaggctcgtttaagatgggt

SEQ ID NO: 2132216 - DNA, 25 bp, Homo sapien
agatgcctgaacatagacatacaga

SEQ ID NO: 2132217 - DNA, 25 bp, Homo sapien
ttttgatgctcttctactttgactg

SEQ ID NO: 2132218 - DNA, 25 bp, Homo sapien
ttctggagacattagaaggtttctc

SEQ ID NO: 2132219 - DNA, 25 bp, Homo sapien
ttctcaaggctatttgagtgatcag

SEQ ID NO: 2132220 - DNA, 25 bp, Homo sapien
cattctgtcagagcgaccttctgga

SEQ ID NO: 2132221 - DNA, 25 bp, Homo sapien
gagtgatcagcttttgacctctctg

SEQ ID NO: 2132222 - DNA, 25 bp, Homo sapien
aggagactgtgactttatgtaattc

SEQ ID NO: 2132223 - DNA, 25 bp, Homo sapien
gagactgtgactttatgtaattcga

SEQ ID NO: 2132224 - DNA, 25 bp, Homo sapien
gactgtgactttatgtaattcgata

SEQ ID NO: 2132225 - DNA, 25 bp, Homo sapien
actgtgactttatgtaattcgatat

SEQ ID NO: 2132226 - DNA, 25 bp, Homo sapien
cttttctcagtaccgagttctgaag

SEQ ID NO: 2132227 - DNA, 25 bp, Homo sapien
tcagtaccgagttctgaagatggta

SEQ ID NO: 2132228 - DNA, 25 bp, Homo sapien
ttcttttctcagtaccgagttctga

SEQ ID NO: 2132229 - DNA, 25 bp, Homo sapien
tctcagtaccgagttctgaagatgg

SEQ ID NO: 2132230 - DNA, 25 bp, Homo sapien
gaaataggtgctattaccaatcccg

SEQ ID NO: 2132231 - DNA, 25 bp, Homo sapien
cataaaatctgtccaatattcaaga

SEQ ID NO: 2132232 - DNA, 25 bp, Homo sapien
taccaatcccgtagtccaattttga

SEQ ID NO: 2132233 - DNA, 25 bp, Homo sapien
gtccaattttgaatctgatccagaa

SEQ ID NO: 2132234 - DNA, 25 bp, Homo sapien
tatggcagccatctactctgacagg

SEQ ID NO: 2132235 - DNA, 25 bp, Homo sapien
tgacaggtcctgaagtaaccagtac

SEQ ID NO: 2132236 - DNA, 25 bp, Homo sapien
gatgagggtcataaaagcagagcac

SEQ ID NO: 2132237 - DNA, 25 bp, Homo sapien
caattcccggtatacaacatggaga

SEQ ID NO: 2132238 - DNA, 25 bp, Homo sapien
ttaagcaatgggagtagtgaaggaa

SEQ ID NO: 2132239 - DNA, 25 bp, Homo sapien
caatttaagcaatgggagtagtgaa

SEQ ID NO: 2132240 - DNA, 25 bp, Homo sapien
tttaagcaatgggagtagtgaagga

SEQ ID NO: 2132241 - DNA, 25 bp, Homo sapien
agtcaatttaagcaatgggagtagt

SEQ ID NO: 2132242 - DNA, 25 bp, Homo sapien
tgtcgtatcttgcactgaaggaaca

SEQ ID NO: 2132243 - DNA, 25 bp, Homo sapien
ggaacattccctgtccaggacctgg

SEQ ID NO: 2132244 - DNA, 25 bp, Homo sapien
gactgggactgcgagtaatgcgtag

SEQ ID NO: 2132245 - DNA, 25 bp, Homo sapien
tgcgtagtgggatgtgtcgtatctt

SEQ ID NO: 2132246 - DNA, 25 bp, Homo sapien
tgtcttaatccaatatctggcaacg

SEQ ID NO: 2132247 - DNA, 25 bp, Homo sapien
tcttgtgaaattaggataatatggt

SEQ ID NO: 2132248 - DNA, 25 bp, Homo sapien
gtggaaaaggcaactgtcttaatcc

SEQ ID NO: 2132249 - DNA, 25 bp, Homo sapien
aggtggaaaaggcaactgtcttaat

SEQ ID NO: 2132250 - DNA, 25 bp, Homo sapien
catgaagccagtgttgctgttgttg

SEQ ID NO: 2132251 - DNA, 25 bp, Homo sapien
tgttttctgttggaggtaagggcca

SEQ ID NO: 2132252 - DNA, 25 bp, Homo sapien
tgttgttgttttctgttggaggtaa

SEQ ID NO: 2132253 - DNA, 25 bp, Homo sapien
tgctgttgttgttttctgttggagg

SEQ ID NO: 2132254 - DNA, 25 bp, Homo sapien
cttaatcatgggctggccatatggc

SEQ ID NO: 2132255 - DNA, 25 bp, Homo sapien
ttactgcttaatcatgggctggcca

SEQ ID NO: 2132256 - DNA, 25 bp, Homo sapien
ctgcttaatcatgggctggccatat

SEQ ID NO: 2132257 - DNA, 25 bp, Homo sapien
taatcatgggctggccatatggccc

SEQ ID NO: 2132258 - DNA, 25 bp, Homo sapien
aagccttctagattgcaaaagagaa

SEQ ID NO: 2132259 - DNA, 25 bp, Homo sapien
ttccccagtacacttcttcccactc

SEQ ID NO: 2132260 - DNA, 25 bp, Homo sapien
attgttgacaagaagggtactcatc

SEQ ID NO: 2132261 - DNA, 25 bp, Homo sapien
gagatgtagttcctccacttaggga

SEQ ID NO: 2132262 - DNA, 25 bp, Homo sapien
tgggtttatgatcctatgtgggcac

SEQ ID NO: 2132263 - DNA, 25 bp, Homo sapien
tagggagtaggtcagctgaaaaccc

SEQ ID NO: 2132264 - DNA, 25 bp, Homo sapien
gactctagtcatagtggcagacacc

SEQ ID NO: 2132265 - DNA, 25 bp, Homo sapien
gagctcagccgtgtcaaggctcaat

SEQ ID NO: 2132266 - DNA, 25 bp, Homo sapien
tgttcatggacagtttctgcagtca

SEQ ID NO: 2132267 - DNA, 25 bp, Homo sapien
cagccggtcagtgaggcaaagccag

SEQ ID NO: 2132268 - DNA, 25 bp, Homo sapien
ggcagcaccactaggtagcagccat

SEQ ID NO: 2132269 - DNA, 25 bp, Homo sapien
gcagcaccactaggtagcagccatg

SEQ ID NO: 2132270 - DNA, 25 bp, Homo sapien
agtaatgttattgccagtgaaggtg

SEQ ID NO: 2132271 - DNA, 25 bp, Homo sapien
atacacctgaacaactcctggatag

SEQ ID NO: 2132272 - DNA, 25 bp, Homo sapien
cacatatgggttcaggaaggccttg

SEQ ID NO: 2132273 - DNA, 25 bp, Homo sapien
gtcacagacggctattttcacactg

SEQ ID NO: 2132274 - DNA, 25 bp, Homo sapien
gggcctcaggagaatcatagtcaga

SEQ ID NO: 2132275 - DNA, 25 bp, Homo sapien
cctcaggagaatcatagtcagatga

SEQ ID NO: 2132276 - DNA, 25 bp, Homo sapien
tatgggcctcaggagaatcatagtc

SEQ ID NO: 2132277 - DNA, 25 bp, Homo sapien
tctctatgggcctcaggagaatcat

SEQ ID NO: 2132278 - DNA, 25 bp, Homo sapien
gctgaacccgttatctactccattg

SEQ ID NO: 2132279 - DNA, 25 bp, Homo sapien
tctgtcaagtcattgctgaacccgt

SEQ ID NO: 2132280 - DNA, 25 bp, Homo sapien
cattgaatcctgtggcctctatatc

SEQ ID NO: 2132281 - DNA, 25 bp, Homo sapien
tatctactccattgaatcctgtggc

SEQ ID NO: 2132282 - DNA, 25 bp, Homo sapien
tttgttgttgttgcatttttagtag

SEQ ID NO: 2132283 - DNA, 25 bp, Homo sapien
ttttgttgttgttgcatttttagta

SEQ ID NO: 2132284 - DNA, 25 bp, Homo sapien
tttaccactatggaggcaagacccc

SEQ ID NO: 2132285 - DNA, 25 bp, Homo sapien
aatgttatctcggagctgggcacgg

SEQ ID NO: 2132286 - DNA, 25 bp, Homo sapien
tatgttaggcaagaccagtgcagcc

SEQ ID NO: 2132287 - DNA, 25 bp, Homo sapien
gcagcatataccatggtggccccta

SEQ ID NO: 2132288 - DNA, 25 bp, Homo sapien
tcatatctgtgaatatttagctcaa

SEQ ID NO: 2132289 - DNA, 25 bp, Homo sapien
tctcacttccacgggtacttcaaac

SEQ ID NO: 2132290 - DNA, 25 bp, Homo sapien
cattcattggtaggtttatatttca

SEQ ID NO: 2132291 - DNA, 25 bp, Homo sapien
gctcaaacaagctatttctcacttc

SEQ ID NO: 2132292 - DNA, 25 bp, Homo sapien
cgtggaagctgcatcgtccagggct

SEQ ID NO: 2132293 - DNA, 25 bp, Homo sapien
ccgtggaagctgcatcgtccagggc

SEQ ID NO: 2132294 - DNA, 25 bp, Homo sapien
tggaagctgcatcgtccagggctgc

SEQ ID NO: 2132295 - DNA, 25 bp, Homo sapien
tccgtggaagctgcatcgtccaggg

SEQ ID NO: 2132296 - DNA, 25 bp, Homo sapien
cattgccaacccctgaatagagagc

SEQ ID NO: 2132297 - DNA, 25 bp, Homo sapien
catgcacccgtggatggtcaaaagt

SEQ ID NO: 2132298 - DNA, 25 bp, Homo sapien
taaagagttgcaaccgtggctccaa

SEQ ID NO: 2132299 - DNA, 25 bp, Homo sapien
gatattatgcttgtcagtctggctg

SEQ ID NO: 2132300 - DNA, 25 bp, Homo sapien
tcttagaggggcagacttcaaaaca

SEQ ID NO: 2132301 - DNA, 25 bp, Homo sapien
cttagaggggcagacttcaaaacaa

SEQ ID NO: 2132302 - DNA, 25 bp, Homo sapien
gggacatgtgcgtgggggtttccat

SEQ ID NO: 2132303 - DNA, 25 bp, Homo sapien
ccataggacagtcaaggcactagct

SEQ ID NO: 2132304 - DNA, 25 bp, Homo sapien
ttcaaaatttgaagtccataggaca

SEQ ID NO: 2132305 - DNA, 25 bp, Homo sapien
tcaaaatttgaagtccataggacag

SEQ ID NO: 2132306 - DNA, 25 bp, Homo sapien
cagtcaaggcactagctgttaccat

SEQ ID NO: 2132307 - DNA, 25 bp, Homo sapien
gccacagtgcaggaatgccaccaag

SEQ ID NO: 2132308 - DNA, 25 bp, Homo sapien
tgccaccaagtaccataaacatatg

SEQ ID NO: 2132309 - DNA, 25 bp, Homo sapien
taccataaacatatgtcaaagaaac

SEQ ID NO: 2132310 - DNA, 25 bp, Homo sapien
catatgtcaaagaaacaattgtcat

SEQ ID NO: 2132311 - DNA, 25 bp, Homo sapien
ctggaactccttgtctgtcttctcc

SEQ ID NO: 2132312 - DNA, 25 bp, Homo sapien
ttctggaactccttgtctgtcttct

SEQ ID NO: 2132313 - DNA, 25 bp, Homo sapien
cacggataacttccttctggaactc

SEQ ID NO: 2132314 - DNA, 25 bp, Homo sapien
ccttctggaactccttgtctgtctt

SEQ ID NO: 2132315 - DNA, 25 bp, Homo sapien
tgttgctcagcatgtagtgtaataa

SEQ ID NO: 2132316 - DNA, 25 bp, Homo sapien
tattcacgaagtacccatttctctt

SEQ ID NO: 2132317 - DNA, 25 bp, Homo sapien
taatcaccgcatggtacactagcag

SEQ ID NO: 2132318 - DNA, 25 bp, Homo sapien
tttctcttccggtgctctccagctg

SEQ ID NO: 2132319 - DNA, 25 bp, Homo sapien
tcctttatatcactaacaggtgtag

SEQ ID NO: 2132320 - DNA, 25 bp, Homo sapien
ttggttatcattagctctgtgcact

SEQ ID NO: 2132321 - DNA, 25 bp, Homo sapien
ttatatcactaacaggtgtagccat

SEQ ID NO: 2132322 - DNA, 25 bp, Homo sapien
cattagctctgtgcactttttcctt

SEQ ID NO: 2132323 - DNA, 25 bp, Homo sapien
ttttgcatctatacaggtcacagca

SEQ ID NO: 2132324 - DNA, 25 bp, Homo sapien
ttgcatctatacaggtcacagcaga

SEQ ID NO: 2132325 - DNA, 25 bp, Homo sapien
tttgcatctatacaggtcacagcag

SEQ ID NO: 2132326 - DNA, 25 bp, Homo sapien
gttcttgctggtattattgataatg

SEQ ID NO: 2132327 - DNA, 25 bp, Homo sapien
gttgatgtaaccatccagtaaattg

SEQ ID NO: 2132328 - DNA, 25 bp, Homo sapien
actctacactggttggaatgaagac

SEQ ID NO: 2132329 - DNA, 25 bp, Homo sapien
gatttttggggactctggccatcag

SEQ ID NO: 2132330 - DNA, 25 bp, Homo sapien
tcagatgtcatcgacctgagatggc

SEQ ID NO: 2132331 - DNA, 25 bp, Homo sapien
ctcctggcgcaaggaaggtaaggct

SEQ ID NO: 2132332 - DNA, 25 bp, Homo sapien
ttttggcacaaggaatgtaagctgt

SEQ ID NO: 2132333 - DNA, 25 bp, Homo sapien
agctgtgtccattattttgacttgc

SEQ ID NO: 2132334 - DNA, 25 bp, Homo sapien
tggcaggactgcaaccagagatggt

SEQ ID NO: 2132335 - DNA, 25 bp, Homo sapien
gatcacctccatgaagtaagtgcta

SEQ ID NO: 2132336 - DNA, 25 bp, Homo sapien
tgttgaatattagcgcctgagcact

SEQ ID NO: 2132337 - DNA, 25 bp, Homo sapien
tcattagggaacaacgccaagtgtc

SEQ ID NO: 2132338 - DNA, 25 bp, Homo sapien
accagtgctgatgagcttttttttc

SEQ ID NO: 2132339 - DNA, 25 bp, Homo sapien
cttttggtgctttattcataaagtc

SEQ ID NO: 2132340 - DNA, 25 bp, Homo sapien
ggtgctttattcataaagtctttgc

SEQ ID NO: 2132341 - DNA, 25 bp, Homo sapien
gctttattcataaagtctttgccca

SEQ ID NO: 2132342 - DNA, 25 bp, Homo sapien
cacacagctacatgacaatgagatc

SEQ ID NO: 2132343 - DNA, 25 bp, Homo sapien
taaacatcccaaagcatagtgcata

SEQ ID NO: 2132344 - DNA, 25 bp, Homo sapien
gaaattgaatgtgttccaaacccac

SEQ ID NO: 2132345 - DNA, 25 bp, Homo sapien
ttggtttagggcgtggttctgccac

SEQ ID NO: 2132346 - DNA, 25 bp, Homo sapien
cctataacgctcaattacaatatct

SEQ ID NO: 2132347 - DNA, 25 bp, Homo sapien
ctttaccatcaaacctataacgctc

SEQ ID NO: 2132348 - DNA, 25 bp, Homo sapien
ttaccatcaaacctataacgctcaa

SEQ ID NO: 2132349 - DNA, 25 bp, Homo sapien
tttaccatcaaacctataacgctca

SEQ ID NO: 2132350 - DNA, 25 bp, Homo sapien
tagtctcagaatattgcttcctcag

SEQ ID NO: 2132351 - DNA, 25 bp, Homo sapien
tggcagttgcacataaaagaactct

SEQ ID NO: 2132352 - DNA, 25 bp, Homo sapien
tttgccatattccacgtagttctca

SEQ ID NO: 2132353 - DNA, 25 bp, Homo sapien
gatttgcctctcttgccatgtctgt

SEQ ID NO: 2132354 - DNA, 25 bp, Homo sapien
cattgcataattaatcctacaggct

SEQ ID NO: 2132355 - DNA, 25 bp, Homo sapien
cttgcccacaggtcatgctgtgaac

SEQ ID NO: 2132356 - DNA, 25 bp, Homo sapien
cctacaggcttaattggagtgaaga

SEQ ID NO: 2132357 - DNA, 25 bp, Homo sapien
tattagcaactgatcttggagaact

SEQ ID NO: 2132358 - DNA, 25 bp, Homo sapien
cataacgtggaacagttttctctga

SEQ ID NO: 2132359 - DNA, 25 bp, Homo sapien
gaagtccctgtggtcaaaatgaaat

SEQ ID NO: 2132360 - DNA, 25 bp, Homo sapien
tatctctgatgcttataaaagtggg

SEQ ID NO: 2132361 - DNA, 25 bp, Homo sapien
cctaccgtaagtgtatgagcttctg

SEQ ID NO: 2132362 - DNA, 25 bp, Homo sapien
cattctggttattaattcctggtca

SEQ ID NO: 2132363 - DNA, 25 bp, Homo sapien
ttttataagggatattcgctttcac

SEQ ID NO: 2132364 - DNA, 25 bp, Homo sapien
actgtatcccttgctgtgaagaagc

SEQ ID NO: 2132365 - DNA, 25 bp, Homo sapien
gggatattcgctttcacttggctct

SEQ ID NO: 2132366 - DNA, 25 bp, Homo sapien
ccctgatgccgcatttgacctttca

SEQ ID NO: 2132367 - DNA, 25 bp, Homo sapien
cctgatgccgcatttgacctttcag

SEQ ID NO: 2132368 - DNA, 25 bp, Homo sapien
tcttctctatgtgggttaaatattc

SEQ ID NO: 2132369 - DNA, 25 bp, Homo sapien
tacccactactgaagttggtcttgc

SEQ ID NO: 2132370 - DNA, 25 bp, Homo sapien
tctatgtgggttaaatattctttca

SEQ ID NO: 2132371 - DNA, 25 bp, Homo sapien
gggctgatacccactactgaagttg

SEQ ID NO: 2132372 - DNA, 25 bp, Homo sapien
ctggccagaagacaaatgtacatca

SEQ ID NO: 2132373 - DNA, 25 bp, Homo sapien
tggccagaagacaaatgtacatcat

SEQ ID NO: 2132374 - DNA, 25 bp, Homo sapien
gttttgggatgtttccgatttcaga

SEQ ID NO: 2132375 - DNA, 25 bp, Homo sapien
tttgggatgtttccgatttcagagc

SEQ ID NO: 2132376 - DNA, 25 bp, Homo sapien
atgttttgggatgtttccgatttca

SEQ ID NO: 2132377 - DNA, 25 bp, Homo sapien
tgggatgtttccgatttcagagcca

SEQ ID NO: 2132378 - DNA, 25 bp, Homo sapien
gttacatgatttagttgaaagggag

SEQ ID NO: 2132379 - DNA, 25 bp, Homo sapien
aaatactttcatgcaaaatgccatt

SEQ ID NO: 2132380 - DNA, 25 bp, Homo sapien
ttccttcaaaaccttcaacagccat

SEQ ID NO: 2132381 - DNA, 25 bp, Homo sapien
aagggagttaaaatactttcatgca

SEQ ID NO: 2132382 - DNA, 25 bp, Homo sapien
cactactcgcaattttggaatgtat

SEQ ID NO: 2132383 - DNA, 25 bp, Homo sapien
gtcagtagaacattaaactcactac

SEQ ID NO: 2132384 - DNA, 25 bp, Homo sapien
ggttatatgtcaactacttttggag

SEQ ID NO: 2132385 - DNA, 25 bp, Homo sapien
ctgaaggacataatacagaagttct

SEQ ID NO: 2132386 - DNA, 25 bp, Homo sapien
tgagtgctccaacgttggatgcaaa

SEQ ID NO: 2132387 - DNA, 25 bp, Homo sapien
tgcctttataggtgaagtcgtgaag

SEQ ID NO: 2132388 - DNA, 25 bp, Homo sapien
ccatctactattgctgaggtctatc

SEQ ID NO: 2132389 - DNA, 25 bp, Homo sapien
tacagccaatgttgttatcgataag

SEQ ID NO: 2132390 - DNA, 25 bp, Homo sapien
tggattttttgcctggaaggtctgt

SEQ ID NO: 2132391 - DNA, 25 bp, Homo sapien
ttttccagatataatattctagtgt

SEQ ID NO: 2132392 - DNA, 25 bp, Homo sapien
gatataatattctagtgtaaaagct

SEQ ID NO: 2132393 - DNA, 25 bp, Homo sapien
cgctttttttatcattgacctttgg

SEQ ID NO: 2132394 - DNA, 25 bp, Homo sapien
tttagaacgctttttttatcattga

SEQ ID NO: 2132395 - DNA, 25 bp, Homo sapien
ggcaatgacaatgattcctgaagga

SEQ ID NO: 2132396 - DNA, 25 bp, Homo sapien
ccattgtaattttagatgatagcat

SEQ ID NO: 2132397 - DNA, 25 bp, Homo sapien
tgtttatgagtagaaaggttaccca

SEQ ID NO: 2132398 - DNA, 25 bp, Homo sapien
attattggggttgaatgtttatgag

SEQ ID NO: 2132399 - DNA, 25 bp, Homo sapien
tggggttgaatgtttatgagtagaa

SEQ ID NO: 2132400 - DNA, 25 bp, Homo sapien
tattggggttgaatgtttatgagta

SEQ ID NO: 2132401 - DNA, 25 bp, Homo sapien
atccaagtagcgatgatgtgggaaa

SEQ ID NO: 2132402 - DNA, 25 bp, Homo sapien
catccaagtagcgatgatgtgggaa

SEQ ID NO: 2132403 - DNA, 25 bp, Homo sapien
tccaagtagcgatgatgtgggaaat

SEQ ID NO: 2132404 - DNA, 25 bp, Homo sapien
gcagataaaatacgggacaacaaag

SEQ ID NO: 2132405 - DNA, 25 bp, Homo sapien
ccccagtgggatgtgtaagtagcag

SEQ ID NO: 2132406 - DNA, 25 bp, Homo sapien
tgtcttagcttttcagcgtacaaaa

SEQ ID NO: 2132407 - DNA, 25 bp, Homo sapien
ataatctttttaccccagtgggatg

SEQ ID NO: 2132408 - DNA, 25 bp, Homo sapien
tcatttagagggaaaatagtagtaa

SEQ ID NO: 2132409 - DNA, 25 bp, Homo sapien
aatagtagtaatcccaatcaccaag

SEQ ID NO: 2132410 - DNA, 25 bp, Homo sapien
aagatcatttagagggaaaatagta

SEQ ID NO: 2132411 - DNA, 25 bp, Homo sapien
gggaaaatagtagtaatcccaatca

SEQ ID NO: 2132412 - DNA, 25 bp, Homo sapien
aatagattgatgtctattgtgtaca

SEQ ID NO: 2132413 - DNA, 25 bp, Homo sapien
ggcacttgtgttaccgatataaaga

SEQ ID NO: 2132414 - DNA, 25 bp, Homo sapien
ctcttgactattcacagtgtgcttg

SEQ ID NO: 2132415 - DNA, 25 bp, Homo sapien
tattgtgtacatgatgtagttcaca

SEQ ID NO: 2132416 - DNA, 25 bp, Homo sapien
ttcaacagagagataatggccttca

SEQ ID NO: 2132417 - DNA, 25 bp, Homo sapien
tttgttgtgatggtgccatcgccat

SEQ ID NO: 2132418 - DNA, 25 bp, Homo sapien
ctttgttgtgatggtgccatcgcca

SEQ ID NO: 2132419 - DNA, 25 bp, Homo sapien
gacccagtgacctcatgacagttcc

SEQ ID NO: 2132420 - DNA, 25 bp, Homo sapien
ccagtgacctcatgacagttccagg

SEQ ID NO: 2132421 - DNA, 25 bp, Homo sapien
gtgacctcatgacagttccaggttc

SEQ ID NO: 2132422 - DNA, 25 bp, Homo sapien
atcccgtaattcggcttctgaccca

SEQ ID NO: 2132423 - DNA, 25 bp, Homo sapien
accattggcatccacttcgttgatc

SEQ ID NO: 2132424 - DNA, 25 bp, Homo sapien
aatggtgtcgttaccattggcatcc

SEQ ID NO: 2132425 - DNA, 25 bp, Homo sapien
gggaagtcaatggtgtcgttaccat

SEQ ID NO: 2132426 - DNA, 25 bp, Homo sapien
cattggcatccacttcgttgatcat

SEQ ID NO: 2132427 - DNA, 25 bp, Homo sapien
cagacaagattgggcacattcaggg

SEQ ID NO: 2132428 - DNA, 25 bp, Homo sapien
gacaagattgggcacattcagggtg

SEQ ID NO: 2132429 - DNA, 25 bp, Homo sapien
cctgcttcacttccaagatcagaca

SEQ ID NO: 2132430 - DNA, 25 bp, Homo sapien
ggcccaaccctgcttcacttccaag

SEQ ID NO: 2132431 - DNA, 25 bp, Homo sapien
tccattctctggactccacttcttg

SEQ ID NO: 2132432 - DNA, 25 bp, Homo sapien
tctggactccacttcttggctgcca

SEQ ID NO: 2132433 - DNA, 25 bp, Homo sapien
tctactggaatcaacatctctgcct

SEQ ID NO: 2132434 - DNA, 25 bp, Homo sapien
aattctactggaatcaacatctctg

SEQ ID NO: 2132435 - DNA, 25 bp, Homo sapien
tttcacattttgagaaaatcctgac

SEQ ID NO: 2132436 - DNA, 25 bp, Homo sapien
ttttcacattttgagaaaatcctga

SEQ ID NO: 2132437 - DNA, 25 bp, Homo sapien
attttcacattttgagaaaatcctg

SEQ ID NO: 2132438 - DNA, 25 bp, Homo sapien
ctattttcacattttgagaaaatcc

SEQ ID NO: 2132439 - DNA, 25 bp, Homo sapien
aatgggcctctcgttgtaaattctc

SEQ ID NO: 2132440 - DNA, 25 bp, Homo sapien
cagaatgggcctctcgttgtaaatt

SEQ ID NO: 2132441 - DNA, 25 bp, Homo sapien
gaatgggcctctcgttgtaaattct

SEQ ID NO: 2132442 - DNA, 25 bp, Homo sapien
tgggcctctcgttgtaaattctcca

SEQ ID NO: 2132443 - DNA, 25 bp, Homo sapien
tcttttctgtcagaagagttaccat

SEQ ID NO: 2132444 - DNA, 25 bp, Homo sapien
catttttatgtagaaggctacaaat

SEQ ID NO: 2132445 - DNA, 25 bp, Homo sapien
gaaggctacaaatcattttgggtct

SEQ ID NO: 2132446 - DNA, 25 bp, Homo sapien
aaatcattttgggtctataggagaa

SEQ ID NO: 2132447 - DNA, 25 bp, Homo sapien
tttgggtctataggagaaatcattt

SEQ ID NO: 2132448 - DNA, 25 bp, Homo sapien
agtggtttctcctgtccataactca

SEQ ID NO: 2132449 - DNA, 25 bp, Homo sapien
tttatctggagttgaagctacctac

SEQ ID NO: 2132450 - DNA, 25 bp, Homo sapien
gtggtttctcctgtccataactcag

SEQ ID NO: 2132451 - DNA, 25 bp, Homo sapien
ccaaaagtttatctggagttgaagc

SEQ ID NO: 2132452 - DNA, 25 bp, Homo sapien
actctgtgttatgggtgtcaacttc

SEQ ID NO: 2132453 - DNA, 25 bp, Homo sapien
ctgtgttatgggtgtcaacttcaat

SEQ ID NO: 2132454 - DNA, 25 bp, Homo sapien
tcactctgtgttatgggtgtcaact

SEQ ID NO: 2132455 - DNA, 25 bp, Homo sapien
tctgtgttatgggtgtcaacttcaa

SEQ ID NO: 2132456 - DNA, 25 bp, Homo sapien
tcttgtagaaaccatgtattttttc

SEQ ID NO: 2132457 - DNA, 25 bp, Homo sapien
gtattttttcctcctgaaatgccat

SEQ ID NO: 2132458 - DNA, 25 bp, Homo sapien
ccatgtattttttcctcctgaaatg

SEQ ID NO: 2132459 - DNA, 25 bp, Homo sapien
tgtattttttcctcctgaaatgcca

SEQ ID NO: 2132460 - DNA, 25 bp, Homo sapien
ggttgcattgtgttagcccttttac

SEQ ID NO: 2132461 - DNA, 25 bp, Homo sapien
cagtgtcactatctttgaaaagtac

SEQ ID NO: 2132462 - DNA, 25 bp, Homo sapien
acagtgtcactatctttgaaaagta

SEQ ID NO: 2132463 - DNA, 25 bp, Homo sapien
ttgtgttagcccttttacaatctat

SEQ ID NO: 2132464 - DNA, 25 bp, Homo sapien
gggaagaagcggctgtgggtgtagc

SEQ ID NO: 2132465 - DNA, 25 bp, Homo sapien
cagcgcagcaaagccgctgtatcca

SEQ ID NO: 2132466 - DNA, 25 bp, Homo sapien
cccaggcaaaaagggtgtggcgtgg

SEQ ID NO: 2132467 - DNA, 25 bp, Homo sapien
aaatattcctgcctgccgggcctaa

SEQ ID NO: 2132468 - DNA, 25 bp, Homo sapien
tgtcatagaacaggcccattccatc

SEQ ID NO: 2132469 - DNA, 25 bp, Homo sapien
catcctctccaattactttttcata

SEQ ID NO: 2132470 - DNA, 25 bp, Homo sapien
tcactgtcatagaacaggcccattc

SEQ ID NO: 2132471 - DNA, 25 bp, Homo sapien
atagaacaggcccattccatcctct

SEQ ID NO: 2132472 - DNA, 25 bp, Homo sapien
ggagatttattgcaatcaggctctt

SEQ ID NO: 2132473 - DNA, 25 bp, Homo sapien
ctgagaacacccatcctggaagaaa

SEQ ID NO: 2132474 - DNA, 25 bp, Homo sapien
ggtgtgattgccttggtaattcagg

SEQ ID NO: 2132475 - DNA, 25 bp, Homo sapien
cagtagcctctctaggggtaggtgt

SEQ ID NO: 2132476 - DNA, 25 bp, Homo sapien
ctagttggttgtttgataaaatgag

SEQ ID NO: 2132477 - DNA, 25 bp, Homo sapien
tgccagtgcccattacttaaattgg

SEQ ID NO: 2132478 - DNA, 25 bp, Homo sapien
ctgccagtgcccattacttaaattg

SEQ ID NO: 2132479 - DNA, 25 bp, Homo sapien
ccagtgcccattacttaaattggtg

SEQ ID NO: 2132480 - DNA, 25 bp, Homo sapien
ggtatcctgctgagtcttgctggcc

SEQ ID NO: 2132481 - DNA, 25 bp, Homo sapien
tcttacggaaaagccgacagcatcc

SEQ ID NO: 2132482 - DNA, 25 bp, Homo sapien
tggcctcagttctgaacccttcagg

SEQ ID NO: 2132483 - DNA, 25 bp, Homo sapien
aaaatcacgggatagtcttccagtg

SEQ ID NO: 2132484 - DNA, 25 bp, Homo sapien
taagatcttgccaaattgagacaag

SEQ ID NO: 2132485 - DNA, 25 bp, Homo sapien
gattgcattgcgttagcccttttaa

SEQ ID NO: 2132486 - DNA, 25 bp, Homo sapien
gagacaagtattcgagaagagctgg

SEQ ID NO: 2132487 - DNA, 25 bp, Homo sapien
aaccgtggcactatctttgaaaagc

SEQ ID NO: 2132488 - DNA, 25 bp, Homo sapien
ttggtttgcccagcggcaagcatct

SEQ ID NO: 2132489 - DNA, 25 bp, Homo sapien
ggtttgcccagcggcaagcatctca

SEQ ID NO: 2132490 - DNA, 25 bp, Homo sapien
tttgcccagcggcaagcatctcagt

SEQ ID NO: 2132491 - DNA, 25 bp, Homo sapien
cttggtttgcccagcggcaagcatc

SEQ ID NO: 2132492 - DNA, 25 bp, Homo sapien
aacatctctgtttgctccgcagaca

SEQ ID NO: 2132493 - DNA, 25 bp, Homo sapien
aaggcccaataaacatctctgtttg

SEQ ID NO: 2132494 - DNA, 25 bp, Homo sapien
tacttggtcagatgaactaaatcct

SEQ ID NO: 2132495 - DNA, 25 bp, Homo sapien
agggaacctcaacaagcacagaaga

SEQ ID NO: 2132496 - DNA, 25 bp, Homo sapien
gagtggcagtaaaccacatttcact

SEQ ID NO: 2132497 - DNA, 25 bp, Homo sapien
gagcaagttctctaactgtaaaact

SEQ ID NO: 2132498 - DNA, 25 bp, Homo sapien
taaatatcaaacaggagagagcaag

SEQ ID NO: 2132499 - DNA, 25 bp, Homo sapien
agataccaattcattctgccgaatg

SEQ ID NO: 2132500 - DNA, 25 bp, Homo sapien
aaataggagaatttcttggctatgg

SEQ ID NO: 2132501 - DNA, 25 bp, Homo sapien
ctccacctttggtatagcacgacat

SEQ ID NO: 2132502 - DNA, 25 bp, Homo sapien
ttggtatagcacgacattcaggtag

SEQ ID NO: 2132503 - DNA, 25 bp, Homo sapien
agcacgacattcaggtagtggtgag

SEQ ID NO: 2132504 - DNA, 25 bp, Homo sapien
gcaaggcacgttccatggcatcaga

SEQ ID NO: 2132505 - DNA, 25 bp, Homo sapien
cacaattcaactcgcgatggagggc

SEQ ID NO: 2132506 - DNA, 25 bp, Homo sapien
gaagtacccagagccatgcatgtgg

SEQ ID NO: 2132507 - DNA, 25 bp, Homo sapien
tgtggactctcatagcccagaagga

SEQ ID NO: 2132508 - DNA, 25 bp, Homo sapien
atcaagaatattgattgactgttta

SEQ ID NO: 2132509 - DNA, 25 bp, Homo sapien
caagaatattgattgactgtttaac

SEQ ID NO: 2132510 - DNA, 25 bp, Homo sapien
gaatcaagaatattgattgactgtt

SEQ ID NO: 2132511 - DNA, 25 bp, Homo sapien
gaatattgattgactgtttaacatt

SEQ ID NO: 2132512 - DNA, 25 bp, Homo sapien
agcagagagtatttcagccttcttg

SEQ ID NO: 2132513 - DNA, 25 bp, Homo sapien
ctccatggtttgacacagatgtgta

SEQ ID NO: 2132514 - DNA, 25 bp, Homo sapien
tatttcagccttcttgtaaggaggc

SEQ ID NO: 2132515 - DNA, 25 bp, Homo sapien
taagtgtactgaggcatcattctcc

SEQ ID NO: 2132516 - DNA, 25 bp, Homo sapien
taagtaaggttacgctgtgtctgca

SEQ ID NO: 2132517 - DNA, 25 bp, Homo sapien
tcaagagacccatgtttaagtaagg

SEQ ID NO: 2132518 - DNA, 25 bp, Homo sapien
cagagtaatctacagcaggctgaca

SEQ ID NO: 2132519 - DNA, 25 bp, Homo sapien
tcagtgtgtctctattgctctcaag

SEQ ID NO: 2132520 - DNA, 25 bp, Homo sapien
gagcccattaggatcttgtttaaat

SEQ ID NO: 2132521 - DNA, 25 bp, Homo sapien
ggtctctctttcgatttgcatctag

SEQ ID NO: 2132522 - DNA, 25 bp, Homo sapien
tgtttaaatcctttatggtctctct

SEQ ID NO: 2132523 - DNA, 25 bp, Homo sapien
ttataaggtgcaaatgcagagccca

SEQ ID NO: 2132524 - DNA, 25 bp, Homo sapien
aactgagtcatgttgtttaaccctc

SEQ ID NO: 2132525 - DNA, 25 bp, Homo sapien
gctattgaaccaaacagcgtatttt

SEQ ID NO: 2132526 - DNA, 25 bp, Homo sapien
tgtttgcctaatgtgcctaatgtag

SEQ ID NO: 2132527 - DNA, 25 bp, Homo sapien
ttaagtcgtaggcaaaaactgagtc

SEQ ID NO: 2132528 - DNA, 25 bp, Homo sapien
tctcttgagatgcttggactagtca

SEQ ID NO: 2132529 - DNA, 25 bp, Homo sapien
gccgtcaaacacttttctcttgaga

SEQ ID NO: 2132530 - DNA, 25 bp, Homo sapien
gaagctatgtcaatcctggcatcaa

SEQ ID NO: 2132531 - DNA, 25 bp, Homo sapien
gcaccaatagatgcttgaaaccctt

SEQ ID NO: 2132532 - DNA, 25 bp, Homo sapien
ctttctgatataagtcatccttctt

SEQ ID NO: 2132533 - DNA, 25 bp, Homo sapien
gtcatccttcttaatctgaatattt

SEQ ID NO: 2132534 - DNA, 25 bp, Homo sapien
ctaataattgacttccttgaatact

SEQ ID NO: 2132535 - DNA, 25 bp, Homo sapien
gacttccttgaatactcaacatttt

SEQ ID NO: 2132536 - DNA, 25 bp, Homo sapien
ccaagtgcgttgagtgttcaacaaa

SEQ ID NO: 2132537 - DNA, 25 bp, Homo sapien
gcaacgtcctagctaccaagtgcgt

SEQ ID NO: 2132538 - DNA, 25 bp, Homo sapien
tcaacaaaaggccatacactagagt

SEQ ID NO: 2132539 - DNA, 25 bp, Homo sapien
gtgattgcaagcttcctgacctgtg

SEQ ID NO: 2132540 - DNA, 25 bp, Homo sapien
tgacaccaaattgtcccgaacatgt

SEQ ID NO: 2132541 - DNA, 25 bp, Homo sapien
tgttgtaggttaccgagtgcatgca

SEQ ID NO: 2132542 - DNA, 25 bp, Homo sapien
cacataaggctgataaatgagattt

SEQ ID NO: 2132543 - DNA, 25 bp, Homo sapien
caattgcgttcaggagccatgacac

SEQ ID NO: 2132544 - DNA, 25 bp, Homo sapien
caggattgtactcaattaagttcat

SEQ ID NO: 2132545 - DNA, 25 bp, Homo sapien
tgcacaggattgtactcaattaagt

SEQ ID NO: 2132546 - DNA, 25 bp, Homo sapien
ttgcacaggattgtactcaattaag

SEQ ID NO: 2132547 - DNA, 25 bp, Homo sapien
cacaggattgtactcaattaagttc

SEQ ID NO: 2132548 - DNA, 25 bp, Homo sapien
ctgtccagtcactggttctctcctc

SEQ ID NO: 2132549 - DNA, 25 bp, Homo sapien
tgtccagtcactggttctctcctca

SEQ ID NO: 2132550 - DNA, 25 bp, Homo sapien
gtccagtcactggttctctcctcat

SEQ ID NO: 2132551 - DNA, 25 bp, Homo sapien
tttagaaaacttgacaagcgagtaa

SEQ ID NO: 2132552 - DNA, 25 bp, Homo sapien
tagaaaacttgacaagcgagtaaga

SEQ ID NO: 2132553 - DNA, 25 bp, Homo sapien
ttagaaaacttgacaagcgagtaag

SEQ ID NO: 2132554 - DNA, 25 bp, Homo sapien
caatccaagactccagcaaatataa

SEQ ID NO: 2132555 - DNA, 25 bp, Homo sapien
tcaatccaagactccagcaaatata

SEQ ID NO: 2132556 - DNA, 25 bp, Homo sapien
tggctatatgcaggcacaatcccac

SEQ ID NO: 2132557 - DNA, 25 bp, Homo sapien
ccactctgtcagatggaggaacatt

SEQ ID NO: 2132558 - DNA, 25 bp, Homo sapien
tcaacaccagtgtcatgggaacaca

SEQ ID NO: 2132559 - DNA, 25 bp, Homo sapien
caccatccgggtatgttgaacacta

SEQ ID NO: 2132560 - DNA, 25 bp, Homo sapien
ttttaacagattgcatcagcaccac

SEQ ID NO: 2132561 - DNA, 25 bp, Homo sapien
gtctttatacaaagtttattatctc

SEQ ID NO: 2132562 - DNA, 25 bp, Homo sapien
ctgtctttatacaaagtttattatc

SEQ ID NO: 2132563 - DNA, 25 bp, Homo sapien
tctttatacaaagtttattatctcc

SEQ ID NO: 2132564 - DNA, 25 bp, Homo sapien
ctttatacaaagtttattatctcct

SEQ ID NO: 2132565 - DNA, 25 bp, Homo sapien
acagctcgagtatggttgaatgcat

SEQ ID NO: 2132566 - DNA, 25 bp, Homo sapien
gacagctcgagtatggttgaatgca

SEQ ID NO: 2132567 - DNA, 25 bp, Homo sapien
agacagctcgagtatggttgaatgc

SEQ ID NO: 2132568 - DNA, 25 bp, Homo sapien
cagacagctcgagtatggttgaatg

SEQ ID NO: 2132569 - DNA, 25 bp, Homo sapien
atgactaatgcagttgtagagagac

SEQ ID NO: 2132570 - DNA, 25 bp, Homo sapien
ccctgatcggatgactaatgcagtt

SEQ ID NO: 2132571 - DNA, 25 bp, Homo sapien
gatcggatgactaatgcagttgtag

SEQ ID NO: 2132572 - DNA, 25 bp, Homo sapien
cggatgactaatgcagttgtagaga

SEQ ID NO: 2132573 - DNA, 25 bp, Homo sapien
cttgcaaggtggacaaagaataggg

SEQ ID NO: 2132574 - DNA, 25 bp, Homo sapien
gcaaggtggacaaagaataggggag

SEQ ID NO: 2132575 - DNA, 25 bp, Homo sapien
caaggtggacaaagaataggggagg

SEQ ID NO: 2132576 - DNA, 25 bp, Homo sapien
ttgcttgcaaggtggacaaagaata

SEQ ID NO: 2132577 - DNA, 25 bp, Homo sapien
tcccttcaagaagttctagttcaca

SEQ ID NO: 2132578 - DNA, 25 bp, Homo sapien
gtctaggtccaggttcccttcaaga

SEQ ID NO: 2132579 - DNA, 25 bp, Homo sapien
tcctctgggttgaaatcaagatcca

SEQ ID NO: 2132580 - DNA, 25 bp, Homo sapien
gtcccacaggggctcactaaacaac

SEQ ID NO: 2132581 - DNA, 25 bp, Homo sapien
cgcactcaagtgtctttccgataag

SEQ ID NO: 2132582 - DNA, 25 bp, Homo sapien
ctctgagggtagactgaatagtgca

SEQ ID NO: 2132583 - DNA, 25 bp, Homo sapien
gcttcctaggttgatgtcactctga

SEQ ID NO: 2132584 - DNA, 25 bp, Homo sapien
tccttaatggaaaaactcgcactca

SEQ ID NO: 2132585 - DNA, 25 bp, Homo sapien
aggatcacacatagcattcagttgg

SEQ ID NO: 2132586 - DNA, 25 bp, Homo sapien
ggctacatgccattctagttcatgg

SEQ ID NO: 2132587 - DNA, 25 bp, Homo sapien
tttttctagcgatgcaggatcacac

SEQ ID NO: 2132588 - DNA, 25 bp, Homo sapien
aaagcattcaagcatacttggctac

SEQ ID NO: 2132589 - DNA, 25 bp, Homo sapien
tagcctatagcaagcaaattgtttt

SEQ ID NO: 2132590 - DNA, 25 bp, Homo sapien
tactcttataccttgcattgctagc

SEQ ID NO: 2132591 - DNA, 25 bp, Homo sapien
gaagaaatgtgggaataccactact

SEQ ID NO: 2132592 - DNA, 25 bp, Homo sapien
tttggctcactcttcattctgtgag

SEQ ID NO: 2132593 - DNA, 25 bp, Homo sapien
atctcttggagtgacttatttcctc

SEQ ID NO: 2132594 - DNA, 25 bp, Homo sapien
tctcttggagtgacttatttcctct

SEQ ID NO: 2132595 - DNA, 25 bp, Homo sapien
ttatctcttggagtgacttatttcc

SEQ ID NO: 2132596 - DNA, 25 bp, Homo sapien
cttttatctcttggagtgacttatt

SEQ ID NO: 2132597 - DNA, 25 bp, Homo sapien
tctgggacgattaaaccggactgcc

SEQ ID NO: 2132598 - DNA, 25 bp, Homo sapien
ccggactgccaaggtagagccaata

SEQ ID NO: 2132599 - DNA, 25 bp, Homo sapien
tggaagaattggttaggctggctat

SEQ ID NO: 2132600 - DNA, 25 bp, Homo sapien
gaaggattgagctttgcaaaaacaa

SEQ ID NO: 2132601 - DNA, 25 bp, Homo sapien
acagctttgcatgggtgtgacctaa

SEQ ID NO: 2132602 - DNA, 25 bp, Homo sapien
atgaaatgatgtattggacaccttt

SEQ ID NO: 2132603 - DNA, 25 bp, Homo sapien
ggaagccatagcactcatatgcata

SEQ ID NO: 2132604 - DNA, 25 bp, Homo sapien
tccatgcagtcaacccacattttac

SEQ ID NO: 2132605 - DNA, 25 bp, Homo sapien
acatgggcaattcagaagacataac

SEQ ID NO: 2132606 - DNA, 25 bp, Homo sapien
tcttgaaagcctcatggcttctaat

SEQ ID NO: 2132607 - DNA, 25 bp, Homo sapien
gaatggactgaaaatacatgggcaa

SEQ ID NO: 2132608 - DNA, 25 bp, Homo sapien
tgatttcttgatggcagtgtttgcc

SEQ ID NO: 2132609 - DNA, 25 bp, Homo sapien
aatacttgatatggtgtcataattt

SEQ ID NO: 2132610 - DNA, 25 bp, Homo sapien
cagtgtctcataacaaaacatggag

SEQ ID NO: 2132611 - DNA, 25 bp, Homo sapien
aaacatggaggcttattcagaggaa

SEQ ID NO: 2132612 - DNA, 25 bp, Homo sapien
tgcctctgggtcaggtatgtaacct

SEQ ID NO: 2132613 - DNA, 25 bp, Homo sapien
taacctgttcaatccgtgtggcaag

SEQ ID NO: 2132614 - DNA, 25 bp, Homo sapien
cattagagaagtgtttctcggttaa

SEQ ID NO: 2132615 - DNA, 25 bp, Homo sapien
tagagaagtgtttctcggttaagat

SEQ ID NO: 2132616 - DNA, 25 bp, Homo sapien
agaagtgtttctcggttaagattgt

SEQ ID NO: 2132617 - DNA, 25 bp, Homo sapien
cctcattagagaagtgtttctcggt

SEQ ID NO: 2132618 - DNA, 25 bp, Homo sapien
aggcaatggtcctcatggctatgcg

SEQ ID NO: 2132619 - DNA, 25 bp, Homo sapien
tcctcatggctatgcgactctagag

SEQ ID NO: 2132620 - DNA, 25 bp, Homo sapien
tagagccacatccacaatcgccatt

SEQ ID NO: 2132621 - DNA, 25 bp, Homo sapien
catggctatgcgactctagagccac

SEQ ID NO: 2132622 - DNA, 25 bp, Homo sapien
cagactccttttccttagaactatt

SEQ ID NO: 2132623 - DNA, 25 bp, Homo sapien
gaatcagactccttttccttagaac

SEQ ID NO: 2132624 - DNA, 25 bp, Homo sapien
ctgccagtgaatcagactccttttc

SEQ ID NO: 2132625 - DNA, 25 bp, Homo sapien
gccagtgaatcagactccttttcct

SEQ ID NO: 2132626 - DNA, 25 bp, Homo sapien
tcacccctccttccattaatatatt

SEQ ID NO: 2132627 - DNA, 25 bp, Homo sapien
cccctccttccattaatatatttgt

SEQ ID NO: 2132628 - DNA, 25 bp, Homo sapien
taatatatttgtaaccatctatggg

SEQ ID NO: 2132629 - DNA, 25 bp, Homo sapien
tatttgtaaccatctatggggctca

SEQ ID NO: 2132630 - DNA, 25 bp, Homo sapien
ttccaaatgaatccaccaatgagca

SEQ ID NO: 2132631 - DNA, 25 bp, Homo sapien
tttccaaatgaatccaccaatgagc

SEQ ID NO: 2132632 - DNA, 25 bp, Homo sapien
accaatgagcagccattcctcatta

SEQ ID NO: 2132633 - DNA, 25 bp, Homo sapien
agacctgatcattgtaggaatcatg

SEQ ID NO: 2132634 - DNA, 25 bp, Homo sapien
caaattggaaagacctgatcattgt

SEQ ID NO: 2132635 - DNA, 25 bp, Homo sapien
gcttcttctatatcttggagttggt

SEQ ID NO: 2132636 - DNA, 25 bp, Homo sapien
tcttctatatcttggagttggttag

SEQ ID NO: 2132637 - DNA, 25 bp, Homo sapien
caaatgaaatgattgtgcatgaggt

SEQ ID NO: 2132638 - DNA, 25 bp, Homo sapien
agtcttcctttgctatatttgaact

SEQ ID NO: 2132639 - DNA, 25 bp, Homo sapien
tcggctctgcaccataactaaagtc

SEQ ID NO: 2132640 - DNA, 25 bp, Homo sapien
gaggtgcactctctttcggctctgc

SEQ ID NO: 2132641 - DNA, 25 bp, Homo sapien
cagaaagacacggaaagttttggag

SEQ ID NO: 2132642 - DNA, 25 bp, Homo sapien
ttttggagcttattgtaaaccacta

SEQ ID NO: 2132643 - DNA, 25 bp, Homo sapien
cacggaaagttttggagcttattgt

SEQ ID NO: 2132644 - DNA, 25 bp, Homo sapien
gagcttattgtaaaccactactttg

SEQ ID NO: 2132645 - DNA, 25 bp, Homo sapien
gattctctgagcgtcttattggctt

SEQ ID NO: 2132646 - DNA, 25 bp, Homo sapien
atttctagattctctgagcgtctta

SEQ ID NO: 2132647 - DNA, 25 bp, Homo sapien
tctctgagcgtcttattggctttaa

SEQ ID NO: 2132648 - DNA, 25 bp, Homo sapien
tctagattctctgagcgtcttattg

SEQ ID NO: 2132649 - DNA, 25 bp, Homo sapien
ttcttctgtgtccacggacattaga

SEQ ID NO: 2132650 - DNA, 25 bp, Homo sapien
tcttctgtgtccacggacattagac

SEQ ID NO: 2132651 - DNA, 25 bp, Homo sapien
gggaatgagacctaatgtccacccc

SEQ ID NO: 2132652 - DNA, 25 bp, Homo sapien
gaatgagacctaatgtccaccccca

SEQ ID NO: 2132653 - DNA, 25 bp, Homo sapien
atgggaatgagacctaatgtccacc

SEQ ID NO: 2132654 - DNA, 25 bp, Homo sapien
aatgagacctaatgtccacccccat

SEQ ID NO: 2132655 - DNA, 25 bp, Homo sapien
tagcacagcagcagccttccttgtg

SEQ ID NO: 2132656 - DNA, 25 bp, Homo sapien
cacagcagcagccttccttgtgcat

SEQ ID NO: 2132657 - DNA, 25 bp, Homo sapien
agcacagcagcagccttccttgtgc

SEQ ID NO: 2132658 - DNA, 25 bp, Homo sapien
catagcacagcagcagccttccttg

SEQ ID NO: 2132659 - DNA, 25 bp, Homo sapien
cagtatgaataatccaaagcttgcc

SEQ ID NO: 2132660 - DNA, 25 bp, Homo sapien
tccaagacttttatattaaagtcat

SEQ ID NO: 2132661 - DNA, 25 bp, Homo sapien
agagccaaacagtatgaataatcca

SEQ ID NO: 2132662 - DNA, 25 bp, Homo sapien
caaagcttgccggaatccaagactt

SEQ ID NO: 2132663 - DNA, 25 bp, Homo sapien
ggtatgggcttattcagttcttcct

SEQ ID NO: 2132664 - DNA, 25 bp, Homo sapien
tggtatgggcttattcagttcttcc

SEQ ID NO: 2132665 - DNA, 25 bp, Homo sapien
ctggtatgggcttattcagttcttc

SEQ ID NO: 2132666 - DNA, 25 bp, Homo sapien
ggctggtatgggcttattcagttct

SEQ ID NO: 2132667 - DNA, 25 bp, Homo sapien
agtgaaatttctgggtgcttttcca

SEQ ID NO: 2132668 - DNA, 25 bp, Homo sapien
tcctttccacagtgaaatttctggg

SEQ ID NO: 2132669 - DNA, 25 bp, Homo sapien
tccacagtgaaatttctgggtgctt

SEQ ID NO: 2132670 - DNA, 25 bp, Homo sapien
gtgaaatttctgggtgcttttccat

SEQ ID NO: 2132671 - DNA, 25 bp, Homo sapien
tgactacctggaattccctgccctt

SEQ ID NO: 2132672 - DNA, 25 bp, Homo sapien
cctggaattccctgccctttcctag

SEQ ID NO: 2132673 - DNA, 25 bp, Homo sapien
ttctgactacctggaattccctgcc

SEQ ID NO: 2132674 - DNA, 25 bp, Homo sapien
gatttctgactacctggaattccct

SEQ ID NO: 2132675 - DNA, 25 bp, Homo sapien
tcactttggcttccgatcctgttgc

SEQ ID NO: 2132676 - DNA, 25 bp, Homo sapien
tgttcatctgcacagtcttcagctt

SEQ ID NO: 2132677 - DNA, 25 bp, Homo sapien
gctgctccagaaggattaggaactt

SEQ ID NO: 2132678 - DNA, 25 bp, Homo sapien
acttccactgtaagatcattttcgg

SEQ ID NO: 2132679 - DNA, 25 bp, Homo sapien
ttgtccatgattcccgtttctccag

SEQ ID NO: 2132680 - DNA, 25 bp, Homo sapien
tgtaagatcattttcggctgctcca

SEQ ID NO: 2132681 - DNA, 25 bp, Homo sapien
tgccatgcttggttaatctatccca

SEQ ID NO: 2132682 - DNA, 25 bp, Homo sapien
ttagtatcaaatgggttcatgtcca

SEQ ID NO: 2132683 - DNA, 25 bp, Homo sapien
aatagtctgggttaattgcaggtca

SEQ ID NO: 2132684 - DNA, 25 bp, Homo sapien
tacaattatcaccacgctgccatgc

SEQ ID NO: 2132685 - DNA, 25 bp, Homo sapien
caaagtgtctgtgttaaggtgctcc

SEQ ID NO: 2132686 - DNA, 25 bp, Homo sapien
tgtctgtgttaaggtgctcccactc

SEQ ID NO: 2132687 - DNA, 25 bp, Homo sapien
ctgtgttaaggtgctcccactcatc

SEQ ID NO: 2132688 - DNA, 25 bp, Homo sapien
aagtgtctgtgttaaggtgctccca

SEQ ID NO: 2132689 - DNA, 25 bp, Homo sapien
ggaaccatatcaggcataccagacc

SEQ ID NO: 2132690 - DNA, 25 bp, Homo sapien
catatcaggcataccagacctgtac

SEQ ID NO: 2132691 - DNA, 25 bp, Homo sapien
ctgtgaaaggaaccatatcaggcat

SEQ ID NO: 2132692 - DNA, 25 bp, Homo sapien
ggcataccagacctgtactacatac

SEQ ID NO: 2132693 - DNA, 25 bp, Homo sapien
caaagggcttgttaaacctacactg

SEQ ID NO: 2132694 - DNA, 25 bp, Homo sapien
ttgttaaacctacactggtcactct

SEQ ID NO: 2132695 - DNA, 25 bp, Homo sapien
gggcttgttaaacctacactggtca

SEQ ID NO: 2132696 - DNA, 25 bp, Homo sapien
tgttaaacctacactggtcactctt

SEQ ID NO: 2132697 - DNA, 25 bp, Homo sapien
cttgaagcgctttttgtaataaagt

SEQ ID NO: 2132698 - DNA, 25 bp, Homo sapien
gaagcgctttttgtaataaagtcat

SEQ ID NO: 2132699 - DNA, 25 bp, Homo sapien
ttgaagcgctttttgtaataaagtc

SEQ ID NO: 2132700 - DNA, 25 bp, Homo sapien
tgaagcgctttttgtaataaagtca

SEQ ID NO: 2132701 - DNA, 25 bp, Homo sapien
ggctgctggtttgacacttcccctg

SEQ ID NO: 2132702 - DNA, 25 bp, Homo sapien
ctgctggtttgacacttcccctgct

SEQ ID NO: 2132703 - DNA, 25 bp, Homo sapien
tgggctgctggtttgacacttcccc

SEQ ID NO: 2132704 - DNA, 25 bp, Homo sapien
tctatcttcattgccacttttgggc

SEQ ID NO: 2132705 - DNA, 25 bp, Homo sapien
gaaatcaaaccacctctcaaggtat

SEQ ID NO: 2132706 - DNA, 25 bp, Homo sapien
tgtgtttctcaggtaattgtaatcc

SEQ ID NO: 2132707 - DNA, 25 bp, Homo sapien
caaggtatgcaatgacatggttatc

SEQ ID NO: 2132708 - DNA, 25 bp, Homo sapien
gctcatgtcgggagatgatgtaaga

SEQ ID NO: 2132709 - DNA, 25 bp, Homo sapien
ttttgtgtagcttgtatagcaatta

SEQ ID NO: 2132710 - DNA, 25 bp, Homo sapien
attactaaggtattgattttgtaca

SEQ ID NO: 2132711 - DNA, 25 bp, Homo sapien
tttttgtgtagcttgtatagcaatt

SEQ ID NO: 2132712 - DNA, 25 bp, Homo sapien
tgtatagcaattactaaggtattga

SEQ ID NO: 2132713 - DNA, 25 bp, Homo sapien
gtccatcttctcactatctgggtaa

SEQ ID NO: 2132714 - DNA, 25 bp, Homo sapien
catcttctcactatctgggtaagac

SEQ ID NO: 2132715 - DNA, 25 bp, Homo sapien
ctattctaggtttttcatggaagat

SEQ ID NO: 2132716 - DNA, 25 bp, Homo sapien
aagttctattctaggtttttcatgg

SEQ ID NO: 2132717 - DNA, 25 bp, Homo sapien
tccatgttgacagcccactcgtact

SEQ ID NO: 2132718 - DNA, 25 bp, Homo sapien
tgacagcccactcgtactccttttt

SEQ ID NO: 2132719 - DNA, 25 bp, Homo sapien
tatgagaggtgtgatatgagcctcc

SEQ ID NO: 2132720 - DNA, 25 bp, Homo sapien
ttatatgagaggtgtgatatgagcc

SEQ ID NO: 2132721 - DNA, 25 bp, Homo sapien
tgaggtataaagtctgccacagaga

SEQ ID NO: 2132722 - DNA, 25 bp, Homo sapien
tagtttaggcctgttgatgatcaca

SEQ ID NO: 2132723 - DNA, 25 bp, Homo sapien
taaaacatcggaggcctttagcagc

SEQ ID NO: 2132724 - DNA, 25 bp, Homo sapien
tcaacaaatgctagggcagtaccat

SEQ ID NO: 2132725 - DNA, 25 bp, Homo sapien
caacagccacttgcacatgtttttt

SEQ ID NO: 2132726 - DNA, 25 bp, Homo sapien
cgcaacagccacttgcacatgtttt

SEQ ID NO: 2132727 - DNA, 25 bp, Homo sapien
cagccacttgcacatgttttttcag

SEQ ID NO: 2132728 - DNA, 25 bp, Homo sapien
acagccacttgcacatgttttttca

SEQ ID NO: 2132729 - DNA, 25 bp, Homo sapien
tttcaggatattctttcggcagcca

SEQ ID NO: 2132730 - DNA, 25 bp, Homo sapien
tattctttcggcagccactgagatt

SEQ ID NO: 2132731 - DNA, 25 bp, Homo sapien
tggacatctagaccctcattggagg

SEQ ID NO: 2132732 - DNA, 25 bp, Homo sapien
aactaaagtagagacattggatttc

SEQ ID NO: 2132733 - DNA, 25 bp, Homo sapien
tagttaacttggagcaattaatctg

SEQ ID NO: 2132734 - DNA, 25 bp, Homo sapien
caccgactgcgtgatacgtattgga

SEQ ID NO: 2132735 - DNA, 25 bp, Homo sapien
agttggcctggcagttgtagttaac

SEQ ID NO: 2132736 - DNA, 25 bp, Homo sapien
ggaattgcttcgagttcaagtaaag

SEQ ID NO: 2132737 - DNA, 25 bp, Homo sapien
ccactaatgagcacagagtaatagc

SEQ ID NO: 2132738 - DNA, 25 bp, Homo sapien
acagagtaatagcagatagcgtgag

SEQ ID NO: 2132739 - DNA, 25 bp, Homo sapien
tgcctgcttagatgcgttactgcca

SEQ ID NO: 2132740 - DNA, 25 bp, Homo sapien
cgtgagaacatatgcggccatgtga

SEQ ID NO: 2132741 - DNA, 25 bp, Homo sapien
tgattcttcaaagtgcccgcatcgg

SEQ ID NO: 2132742 - DNA, 25 bp, Homo sapien
taagagggcctcaacacacgtgatt

SEQ ID NO: 2132743 - DNA, 25 bp, Homo sapien
tgcccgggaagctgccgatttcagg

SEQ ID NO: 2132744 - DNA, 25 bp, Homo sapien
agcagttgcaattaccacggtcgcc

SEQ ID NO: 2132745 - DNA, 25 bp, Homo sapien
ccccgcgctccgcttgttgctccgg

SEQ ID NO: 2132746 - DNA, 25 bp, Homo sapien
cccaccgggttcctcgctgccgcct

SEQ ID NO: 2132747 - DNA, 25 bp, Homo sapien
ttcctcttcattggcggcccggttc

SEQ ID NO: 2132748 - DNA, 25 bp, Homo sapien
gcgctccgcttgttgctccggcccc

SEQ ID NO: 2132749 - DNA, 25 bp, Homo sapien
agacctactgtctacagaaagtcca

SEQ ID NO: 2132750 - DNA, 25 bp, Homo sapien
cacagacctactgtctacagaaagt

SEQ ID NO: 2132751 - DNA, 25 bp, Homo sapien
cagacctactgtctacagaaagtcc

SEQ ID NO: 2132752 - DNA, 25 bp, Homo sapien
gacctactgtctacagaaagtccac

SEQ ID NO: 2132753 - DNA, 25 bp, Homo sapien
tgttaacatcttgaactgtccattt

SEQ ID NO: 2132754 - DNA, 25 bp, Homo sapien
cattgttaacatcttgaactgtcca

SEQ ID NO: 2132755 - DNA, 25 bp, Homo sapien
ttgttaacatcttgaactgtccatt

SEQ ID NO: 2132756 - DNA, 25 bp, Homo sapien
attgttaacatcttgaactgtccat

SEQ ID NO: 2132757 - DNA, 25 bp, Homo sapien
taaatcagacgtcactaccacagtg

SEQ ID NO: 2132758 - DNA, 25 bp, Homo sapien
tttaaatacggctcccaatgtccca

SEQ ID NO: 2132759 - DNA, 25 bp, Homo sapien
taagccctggcatgctatatataag

SEQ ID NO: 2132760 - DNA, 25 bp, Homo sapien
taatgaaacagcttggcctaagaac

SEQ ID NO: 2132761 - DNA, 25 bp, Homo sapien
atctgccaaagtttttatttgaatg

SEQ ID NO: 2132762 - DNA, 25 bp, Homo sapien
cacatcatctgccaaagtttttatt

SEQ ID NO: 2132763 - DNA, 25 bp, Homo sapien
ctgccaaagtttttatttgaatgtt

SEQ ID NO: 2132764 - DNA, 25 bp, Homo sapien
catcatctgccaaagtttttatttg

SEQ ID NO: 2132765 - DNA, 25 bp, Homo sapien
cgttcatcatataatggctgagctg

SEQ ID NO: 2132766 - DNA, 25 bp, Homo sapien
gacaaattcaaagatcgttcatcat

SEQ ID NO: 2132767 - DNA, 25 bp, Homo sapien
tcatcgcgacttgagaatcaatagg

SEQ ID NO: 2132768 - DNA, 25 bp, Homo sapien
gctgcaggaaactcactcatcgcga

SEQ ID NO: 2132769 - DNA, 25 bp, Homo sapien
tcttacttactttgtggcactgtca

SEQ ID NO: 2132770 - DNA, 25 bp, Homo sapien
actagcttagtcaagttaatgaacc

SEQ ID NO: 2132771 - DNA, 25 bp, Homo sapien
tattcagggtataagtagacttctc

SEQ ID NO: 2132772 - DNA, 25 bp, Homo sapien
taaatttaagtttcggctcagctac

SEQ ID NO: 2132773 - DNA, 25 bp, Homo sapien
tttggcagtggcagaaatatactgg

SEQ ID NO: 2132774 - DNA, 25 bp, Homo sapien
agatttggcagtggcagaaatatac

SEQ ID NO: 2132775 - DNA, 25 bp, Homo sapien
gtggcagaaatatactggacaacca

SEQ ID NO: 2132776 - DNA, 25 bp, Homo sapien
gaaatatactggacaaccatctcac

SEQ ID NO: 2132777 - DNA, 25 bp, Homo sapien
tcattctgttggagctagaaaaatc

SEQ ID NO: 2132778 - DNA, 25 bp, Homo sapien
ttctgttggagctagaaaaatctcc

SEQ ID NO: 2132779 - DNA, 25 bp, Homo sapien
gttggagctagaaaaatctccctac

SEQ ID NO: 2132780 - DNA, 25 bp, Homo sapien
tctgttggagctagaaaaatctccc

SEQ ID NO: 2132781 - DNA, 25 bp, Homo sapien
tggtttggttctcttcaggcctttg

SEQ ID NO: 2132782 - DNA, 25 bp, Homo sapien
caggcctttgcatttaatattactt

SEQ ID NO: 2132783 - DNA, 25 bp, Homo sapien
atggtttggttctcttcaggccttt

SEQ ID NO: 2132784 - DNA, 25 bp, Homo sapien
cttccagaatctgagagcttctcca

SEQ ID NO: 2132785 - DNA, 25 bp, Homo sapien
tctcagtattaccttcattgtcagc

SEQ ID NO: 2132786 - DNA, 25 bp, Homo sapien
ctgtaggtattctccagttggcaga

SEQ ID NO: 2132787 - DNA, 25 bp, Homo sapien
cacaaagaccatatcggcagagtca

SEQ ID NO: 2132788 - DNA, 25 bp, Homo sapien
cagcttttccatgggcaaggttctc

SEQ ID NO: 2132789 - DNA, 25 bp, Homo sapien
tttggcccattgagcaacacgtgca

SEQ ID NO: 2132790 - DNA, 25 bp, Homo sapien
gaattcttcctaatactagaaggat

SEQ ID NO: 2132791 - DNA, 25 bp, Homo sapien
tgaattcttcctaatactagaagga

SEQ ID NO: 2132792 - DNA, 25 bp, Homo sapien
aattcttcctaatactagaaggatt

SEQ ID NO: 2132793 - DNA, 25 bp, Homo sapien
agcaatgatgcaagtcgacgaacag

SEQ ID NO: 2132794 - DNA, 25 bp, Homo sapien
caatgatgcaagtcgacgaacaggc

SEQ ID NO: 2132795 - DNA, 25 bp, Homo sapien
aatgatgcaagtcgacgaacaggca

SEQ ID NO: 2132796 - DNA, 25 bp, Homo sapien
gcaatgatgcaagtcgacgaacagg

SEQ ID NO: 2132797 - DNA, 25 bp, Homo sapien
tggggactcaatctaaaatagtcct

SEQ ID NO: 2132798 - DNA, 25 bp, Homo sapien
gaactcaaaagaggcttcacttaca

SEQ ID NO: 2132799 - DNA, 25 bp, Homo sapien
tcctggggactcaatctaaaatagt

SEQ ID NO: 2132800 - DNA, 25 bp, Homo sapien
tgaactcaaaagaggcttcacttac

SEQ ID NO: 2132801 - DNA, 25 bp, Homo sapien
tgatgaagtatgcttttctaaccat

SEQ ID NO: 2132802 - DNA, 25 bp, Homo sapien
gggtgctggcagtaacccatcgttc

SEQ ID NO: 2132803 - DNA, 25 bp, Homo sapien
ggcagtaacccatcgttctgatgaa

SEQ ID NO: 2132804 - DNA, 25 bp, Homo sapien
aacccatcgttctgatgaagtatgc

SEQ ID NO: 2132805 - DNA, 25 bp, Homo sapien
tataacatcagtgaaaaccttgcac

SEQ ID NO: 2132806 - DNA, 25 bp, Homo sapien
aggctataaacccagctttgagagc

SEQ ID NO: 2132807 - DNA, 25 bp, Homo sapien
tgccaaatgataggaaaggctataa

SEQ ID NO: 2132808 - DNA, 25 bp, Homo sapien
tatcctctcccttgtgtcagaagag

SEQ ID NO: 2132809 - DNA, 25 bp, Homo sapien
caaataaggctaccgctccacgtta

SEQ ID NO: 2132810 - DNA, 25 bp, Homo sapien
gtaaaggctttagctccacaccaag

SEQ ID NO: 2132811 - DNA, 25 bp, Homo sapien
catcctgggatcctatgtaagcaaa

SEQ ID NO: 2132812 - DNA, 25 bp, Homo sapien
caatagcctcatagaccaggtgtcc

SEQ ID NO: 2132813 - DNA, 25 bp, Homo sapien
cagctactactggactaggaagaag

SEQ ID NO: 2132814 - DNA, 25 bp, Homo sapien
catacaatatgaagctgggatctgc

SEQ ID NO: 2132815 - DNA, 25 bp, Homo sapien
gtataaaaagcatttccgagtggag

SEQ ID NO: 2132816 - DNA, 25 bp, Homo sapien
agagcactatgcaaagttgtcatgc

SEQ ID NO: 2132817 - DNA, 25 bp, Homo sapien
tcacagataacgtaaaagggtggta

SEQ ID NO: 2132818 - DNA, 25 bp, Homo sapien
ttgactctcacagataacgtaaaag

SEQ ID NO: 2132819 - DNA, 25 bp, Homo sapien
aaagggtggtaattcacatattggt

SEQ ID NO: 2132820 - DNA, 25 bp, Homo sapien
ggtggtatacagtttgactctcaca

SEQ ID NO: 2132821 - DNA, 25 bp, Homo sapien
aaattgttgtccagccagtctgttt

SEQ ID NO: 2132822 - DNA, 25 bp, Homo sapien
tctcattgctgctgataactaagac

SEQ ID NO: 2132823 - DNA, 25 bp, Homo sapien
caagaagcctctctccaataggaga

SEQ ID NO: 2132824 - DNA, 25 bp, Homo sapien
taactaagacttcggccaaatcaag

SEQ ID NO: 2132825 - DNA, 25 bp, Homo sapien
tcattcctttagaacacccacaagg

SEQ ID NO: 2132826 - DNA, 25 bp, Homo sapien
ggtacactgtttgactctctcattt

SEQ ID NO: 2132827 - DNA, 25 bp, Homo sapien
catttcatctattacggtacactgt

SEQ ID NO: 2132828 - DNA, 25 bp, Homo sapien
tcaatcattcctttagaacacccac

SEQ ID NO: 2132829 - DNA, 25 bp, Homo sapien
tggaaccaagcttctaagaaccctg

SEQ ID NO: 2132830 - DNA, 25 bp, Homo sapien
aattgaacacagtgagccaggttcc

SEQ ID NO: 2132831 - DNA, 25 bp, Homo sapien
gccatgctggatgactgctagacaa

SEQ ID NO: 2132832 - DNA, 25 bp, Homo sapien
cataaggagtgcaatctgagaggct

SEQ ID NO: 2132833 - DNA, 25 bp, Homo sapien
gaatgattttacctagtaccctgga

SEQ ID NO: 2132834 - DNA, 25 bp, Homo sapien
gcaaatggttgactccctctactgg

SEQ ID NO: 2132835 - DNA, 25 bp, Homo sapien
tactttattgtcaccactggccact

SEQ ID NO: 2132836 - DNA, 25 bp, Homo sapien
gttcacagtagacatcaaggctgaa

SEQ ID NO: 2132837 - DNA, 25 bp, Homo sapien
ccacatggaaggttcaaccaagttc

SEQ ID NO: 2132838 - DNA, 25 bp, Homo sapien
cacatggaaggttcaaccaagttct

SEQ ID NO: 2132839 - DNA, 25 bp, Homo sapien
catggaaggttcaaccaagttctaa

SEQ ID NO: 2132840 - DNA, 25 bp, Homo sapien
gccacatggaaggttcaaccaagtt

SEQ ID NO: 2132841 - DNA, 25 bp, Homo sapien
tgcagctgcattctcatgaccagag

SEQ ID NO: 2132842 - DNA, 25 bp, Homo sapien
tcctgcatggtgaatcccaaagctt

SEQ ID NO: 2132843 - DNA, 25 bp, Homo sapien
tggaaccacaattctgccaaaggtc

SEQ ID NO: 2132844 - DNA, 25 bp, Homo sapien
gaattgaatatagcatcctgcatgg

SEQ ID NO: 2132845 - DNA, 25 bp, Homo sapien
caaaccttcaattggaacatgagac

SEQ ID NO: 2132846 - DNA, 25 bp, Homo sapien
tagttaggatccacagtattgcctg

SEQ ID NO: 2132847 - DNA, 25 bp, Homo sapien
tctgcaggctcaattatgacaaggg

SEQ ID NO: 2132848 - DNA, 25 bp, Homo sapien
ggcaatgacacctactgtctgcagg

SEQ ID NO: 2132849 - DNA, 25 bp, Homo sapien
gattgctggttaaagaaaccctgag

SEQ ID NO: 2132850 - DNA, 25 bp, Homo sapien
tgaacatattcttgtgaagacaggg

SEQ ID NO: 2132851 - DNA, 25 bp, Homo sapien
gaagtttctcatctgatatacccga

SEQ ID NO: 2132852 - DNA, 25 bp, Homo sapien
tatacccgatcgtaattcatgaaca

SEQ ID NO: 2132853 - DNA, 25 bp, Homo sapien
agaaggcttcgagctctccacagaa

SEQ ID NO: 2132854 - DNA, 25 bp, Homo sapien
tacattctaaaagtcccacacgagg

SEQ ID NO: 2132855 - DNA, 25 bp, Homo sapien
gagctgtccgaaaggctacgattga

SEQ ID NO: 2132856 - DNA, 25 bp, Homo sapien
ctacgattgaatgctgggaggctga

SEQ ID NO: 2132857 - DNA, 25 bp, Homo sapien
catagctcccaaacccactcttact

SEQ ID NO: 2132858 - DNA, 25 bp, Homo sapien
atagctcccaaacccactcttactc

SEQ ID NO: 2132859 - DNA, 25 bp, Homo sapien
gccatagctcccaaacccactctta

SEQ ID NO: 2132860 - DNA, 25 bp, Homo sapien
ctgccatagctcccaaacccactct

SEQ ID NO: 2132861 - DNA, 25 bp, Homo sapien
taaaatgctcccgatccacagtggg

SEQ ID NO: 2132862 - DNA, 25 bp, Homo sapien
gaagctggttcacattacacggtac

SEQ ID NO: 2132863 - DNA, 25 bp, Homo sapien
tcccgtgggacatttgaggatacca

SEQ ID NO: 2132864 - DNA, 25 bp, Homo sapien
tctacagtggtatcacgacgggctt

SEQ ID NO: 2132865 - DNA, 25 bp, Homo sapien
tagaaaagcagcgagttgacaaaga

SEQ ID NO: 2132866 - DNA, 25 bp, Homo sapien
cttttcgctggctccctgactgcaa

SEQ ID NO: 2132867 - DNA, 25 bp, Homo sapien
tgctagtaaatcctacagagttgtc

SEQ ID NO: 2132868 - DNA, 25 bp, Homo sapien
gagttgtcaatttatccatcaccgt

SEQ ID NO: 2132869 - DNA, 25 bp, Homo sapien
aaaaccccaacgaacacagatagag

SEQ ID NO: 2132870 - DNA, 25 bp, Homo sapien
cccaacgaacacagatagaggacat

SEQ ID NO: 2132871 - DNA, 25 bp, Homo sapien
ttcagaagaataagcgttgggagga

SEQ ID NO: 2132872 - DNA, 25 bp, Homo sapien
tccactaaagcacacgattccattc

SEQ ID NO: 2132873 - DNA, 25 bp, Homo sapien
tcagacaaattatcattgctggagc

SEQ ID NO: 2132874 - DNA, 25 bp, Homo sapien
aaaatcagacaaattatcattgctg

SEQ ID NO: 2132875 - DNA, 25 bp, Homo sapien
taagacacatgtgccaataaaatca

SEQ ID NO: 2132876 - DNA, 25 bp, Homo sapien
gacaaattatcattgctggagccca

SEQ ID NO: 2132877 - DNA, 25 bp, Homo sapien
cagctcatccaataagagtccaaga

SEQ ID NO: 2132878 - DNA, 25 bp, Homo sapien
aataagagtccaagaccttcatggc

SEQ ID NO: 2132879 - DNA, 25 bp, Homo sapien
tcatccaataagagtccaagacctt

SEQ ID NO: 2132880 - DNA, 25 bp, Homo sapien
cttttccagctcatccaataagagt

SEQ ID NO: 2132881 - DNA, 25 bp, Homo sapien
cataaatgctttgaggcattgaata

SEQ ID NO: 2132882 - DNA, 25 bp, Homo sapien
ttcataaatgctttgaggcattgaa

SEQ ID NO: 2132883 - DNA, 25 bp, Homo sapien
aatgctttgaggcattgaataagtt

SEQ ID NO: 2132884 - DNA, 25 bp, Homo sapien
taaatgctttgaggcattgaataag

SEQ ID NO: 2132885 - DNA, 25 bp, Homo sapien
gctcttgccaatagtaaaagacttc

SEQ ID NO: 2132886 - DNA, 25 bp, Homo sapien
tttggggtcaattgctcttgccaat

SEQ ID NO: 2132887 - DNA, 25 bp, Homo sapien
ttgctcttgccaatagtaaaagact

SEQ ID NO: 2132888 - DNA, 25 bp, Homo sapien
ttgccaatagtaaaagacttctttc

SEQ ID NO: 2132889 - DNA, 25 bp, Homo sapien
tctcttctccaacaatgcaaatagc

SEQ ID NO: 2132890 - DNA, 25 bp, Homo sapien
tccaacaatgcaaatagcagaaagt

SEQ ID NO: 2132891 - DNA, 25 bp, Homo sapien
gcaaatagcagaaagtatttttact

SEQ ID NO: 2132892 - DNA, 25 bp, Homo sapien
atgttctcttctccaacaatgcaaa

SEQ ID NO: 2132893 - DNA, 25 bp, Homo sapien
cacaagaaacttattaacctgacca

SEQ ID NO: 2132894 - DNA, 25 bp, Homo sapien
gaaagcccaggtgattaaagaagaa

SEQ ID NO: 2132895 - DNA, 25 bp, Homo sapien
caatataggaattgtgttcctgtcc

SEQ ID NO: 2132896 - DNA, 25 bp, Homo sapien
aatattggtatctccacacaatgcc

SEQ ID NO: 2132897 - DNA, 25 bp, Homo sapien
tatagcccctaaaagtttatctaga

SEQ ID NO: 2132898 - DNA, 25 bp, Homo sapien
aaccttccacaattggtgaaaatcg

SEQ ID NO: 2132899 - DNA, 25 bp, Homo sapien
tcctgattttctaaaccttccacaa

SEQ ID NO: 2132900 - DNA, 25 bp, Homo sapien
caattggtgaaaatcgttccctgtt

SEQ ID NO: 2132901 - DNA, 25 bp, Homo sapien
ttttagtcctgaacggaggaattca

SEQ ID NO: 2132902 - DNA, 25 bp, Homo sapien
tcctgaacggaggaattcattcctt

SEQ ID NO: 2132903 - DNA, 25 bp, Homo sapien
taaatgtattcgaaaatcaagctca

SEQ ID NO: 2132904 - DNA, 25 bp, Homo sapien
ggcatttataaactgcatgcaggcc

SEQ ID NO: 2132905 - DNA, 25 bp, Homo sapien
cattgagacggtgtgataattcagt

SEQ ID NO: 2132906 - DNA, 25 bp, Homo sapien
tccatttctgctcgaatgtcattga

SEQ ID NO: 2132907 - DNA, 25 bp, Homo sapien
cgaatgtcattgagacggtgtgata

SEQ ID NO: 2132908 - DNA, 25 bp, Homo sapien
tctgctcgaatgtcattgagacggt

SEQ ID NO: 2132909 - DNA, 25 bp, Homo sapien
tgttttgtggtttgtcaaaggatat

SEQ ID NO: 2132910 - DNA, 25 bp, Homo sapien
ttgttttgtggtttgtcaaaggata

SEQ ID NO: 2132911 - DNA, 25 bp, Homo sapien
attgttttgtggtttgtcaaaggat

SEQ ID NO: 2132912 - DNA, 25 bp, Homo sapien
gtccttcagcatattatatagaaga

SEQ ID NO: 2132913 - DNA, 25 bp, Homo sapien
tgtccttcagcatattatatagaag

SEQ ID NO: 2132914 - DNA, 25 bp, Homo sapien
gcaaaaaatgttgtagaatagataa

SEQ ID NO: 2132915 - DNA, 25 bp, Homo sapien
aaaaaatgttgtagaatagataaga

SEQ ID NO: 2132916 - DNA, 25 bp, Homo sapien
taaatcgatgtctaatctttgcctg

SEQ ID NO: 2132917 - DNA, 25 bp, Homo sapien
gcagtgtagcactatctgtgaaaca

SEQ ID NO: 2132918 - DNA, 25 bp, Homo sapien
gatgtctaatctttgcctgtatttg

SEQ ID NO: 2132919 - DNA, 25 bp, Homo sapien
gaagtctggatccataccactgcag

SEQ ID NO: 2132920 - DNA, 25 bp, Homo sapien
ttcaactttcgccttgttcacacaa

SEQ ID NO: 2132921 - DNA, 25 bp, Homo sapien
actttcgccttgttcacacaagaat

SEQ ID NO: 2132922 - DNA, 25 bp, Homo sapien
caactttcgccttgttcacacaaga

SEQ ID NO: 2132923 - DNA, 25 bp, Homo sapien
tcaactttcgccttgttcacacaag

SEQ ID NO: 2132924 - DNA, 25 bp, Homo sapien
tctgcttgagcttcctgtcgagctg

SEQ ID NO: 2132925 - DNA, 25 bp, Homo sapien
ctgcttgagcttcctgtcgagctgt

SEQ ID NO: 2132926 - DNA, 25 bp, Homo sapien
aaactcattgtgacatgacacaaag

SEQ ID NO: 2132927 - DNA, 25 bp, Homo sapien
cactgtgcggtaaaggcctgtgcta

SEQ ID NO: 2132928 - DNA, 25 bp, Homo sapien
gaaaggtgacttagctgcaacagag

SEQ ID NO: 2132929 - DNA, 25 bp, Homo sapien
taagtaagcaactactcactgtgcg

SEQ ID NO: 2132930 - DNA, 25 bp, Homo sapien
cccatgagtggtctagaaaagtgat

SEQ ID NO: 2132931 - DNA, 25 bp, Homo sapien
ctgatgaacttgagagtacttgtgc

SEQ ID NO: 2132932 - DNA, 25 bp, Homo sapien
ccctacacctggcaatggaggtgct

SEQ ID NO: 2132933 - DNA, 25 bp, Homo sapien
ctccgggtagaggtggcgcgggtgg

SEQ ID NO: 2132934 - DNA, 25 bp, Homo sapien
cataaggtagattaagtgatattcc

SEQ ID NO: 2132935 - DNA, 25 bp, Homo sapien
tctcttcatggacacttcaggttta

SEQ ID NO: 2132936 - DNA, 25 bp, Homo sapien
ctcttcatggacacttcaggtttat

SEQ ID NO: 2132937 - DNA, 25 bp, Homo sapien
ttctcttcatggacacttcaggttt

SEQ ID NO: 2132938 - DNA, 25 bp, Homo sapien
ctttgactcttaaccagaaacagtt

SEQ ID NO: 2132939 - DNA, 25 bp, Homo sapien
gactcttaaccagaaacagttctca

SEQ ID NO: 2132940 - DNA, 25 bp, Homo sapien
tgccaatttggcaaagagatctgga

SEQ ID NO: 2132941 - DNA, 25 bp, Homo sapien
tggcaaagagatctggattctcaaa

SEQ ID NO: 2132942 - DNA, 25 bp, Homo sapien
ggtttgattaggttttggcagctgc

SEQ ID NO: 2132943 - DNA, 25 bp, Homo sapien
attctgactgattagctctaccaag

SEQ ID NO: 2132944 - DNA, 25 bp, Homo sapien
tctgactgattagctctaccaagtg

SEQ ID NO: 2132945 - DNA, 25 bp, Homo sapien
atttggtttgattaggttttggcag

SEQ ID NO: 2132946 - DNA, 25 bp, Homo sapien
gaatcaaggcactgcgaatgacaag

SEQ ID NO: 2132947 - DNA, 25 bp, Homo sapien
tattgaccacagtatgaatcaaggc

SEQ ID NO: 2132948 - DNA, 25 bp, Homo sapien
cagaggcatgagctctcctatgttc

SEQ ID NO: 2132949 - DNA, 25 bp, Homo sapien
tacacgtagtgaggacagaggcatg

SEQ ID NO: 2132950 - DNA, 25 bp, Homo sapien
tattgtcaatatgtaaagacggagc

SEQ ID NO: 2132951 - DNA, 25 bp, Homo sapien
tggtgacttatacttaaacaacgtc

SEQ ID NO: 2132952 - DNA, 25 bp, Homo sapien
tctctctacaattggtgacttatac

SEQ ID NO: 2132953 - DNA, 25 bp, Homo sapien
acgtcatgtatctctggctgaaaca

SEQ ID NO: 2132954 - DNA, 25 bp, Homo sapien
aaccctgacaacatcttctatgcag

SEQ ID NO: 2132955 - DNA, 25 bp, Homo sapien
tgaggaactttgaaacagaggactg

SEQ ID NO: 2132956 - DNA, 25 bp, Homo sapien
acaggaccacaaccctgacaacatc

SEQ ID NO: 2132957 - DNA, 25 bp, Homo sapien
cctgacaacatcttctatgcagcct

SEQ ID NO: 2132958 - DNA, 25 bp, Homo sapien
gaatcctgccaatcatatgaatgag

SEQ ID NO: 2132959 - DNA, 25 bp, Homo sapien
agaggtccatgatcaaggaaccaag

SEQ ID NO: 2132960 - DNA, 25 bp, Homo sapien
agaatgaaggccctcagtccaatca

SEQ ID NO: 2132961 - DNA, 25 bp, Homo sapien
gtccaatcactctggaggaactgaa

SEQ ID NO: 2132962 - DNA, 25 bp, Homo sapien
tccaggaacaaaggagttcagtcta

SEQ ID NO: 2132963 - DNA, 25 bp, Homo sapien
gaggtagtcagtgaaatgttccaaa

SEQ ID NO: 2132964 - DNA, 25 bp, Homo sapien
gggaatgccatgattatcacaaaac

SEQ ID NO: 2132965 - DNA, 25 bp, Homo sapien
ggagtttcaatctcctcctgaagag

SEQ ID NO: 2132966 - DNA, 25 bp, Homo sapien
gaggtgaatgagtcaagacgatagt

SEQ ID NO: 2132967 - DNA, 25 bp, Homo sapien
tttgccagaagctgtggtacatgcg

SEQ ID NO: 2132968 - DNA, 25 bp, Homo sapien
catgcgagaaaacaatagtaaacag

SEQ ID NO: 2132969 - DNA, 25 bp, Homo sapien
caagctcagtgtctaatgagggagg

SEQ ID NO: 2132970 - DNA, 25 bp, Homo sapien
actttagaaaagagtccagctggaa

SEQ ID NO: 2132971 - DNA, 25 bp, Homo sapien
tcatcaaggctacattgcagtggca

SEQ ID NO: 2132972 - DNA, 25 bp, Homo sapien
taggagacagataagctctaggcag

SEQ ID NO: 2132973 - DNA, 25 bp, Homo sapien
acttcagagggacggcttgattggc

SEQ ID NO: 2132974 - DNA, 25 bp, Homo sapien
ataccttcaaagttctgtacatttg

SEQ ID NO: 2132975 - DNA, 25 bp, Homo sapien
ttcaaagttctgtacatttgttccc

SEQ ID NO: 2132976 - DNA, 25 bp, Homo sapien
ccttcaaagttctgtacatttgttc

SEQ ID NO: 2132977 - DNA, 25 bp, Homo sapien
caaagttctgtacatttgttcccct

SEQ ID NO: 2132978 - DNA, 25 bp, Homo sapien
tatagcctcccacaatttaagctga

SEQ ID NO: 2132979 - DNA, 25 bp, Homo sapien
tctactgactggcaaaatacacgag

SEQ ID NO: 2132980 - DNA, 25 bp, Homo sapien
aagtcagcattagtggacaatggca

SEQ ID NO: 2132981 - DNA, 25 bp, Homo sapien
caaatgatagctggttgcctacctt

SEQ ID NO: 2132982 - DNA, 25 bp, Homo sapien
tgtcattaaccctattctcttccat

SEQ ID NO: 2132983 - DNA, 25 bp, Homo sapien
tctcttccattctcgagtgtgactt

SEQ ID NO: 2132984 - DNA, 25 bp, Homo sapien
ctctttataaaagcgtcagttcttg

SEQ ID NO: 2132985 - DNA, 25 bp, Homo sapien
ccataaattgttgtatcagtccatt

SEQ ID NO: 2132986 - DNA, 25 bp, Homo sapien
aatgttgatcttaacaggcaaattt

SEQ ID NO: 2132987 - DNA, 25 bp, Homo sapien
atgttgatcttaacaggcaaattta

SEQ ID NO: 2132988 - DNA, 25 bp, Homo sapien
tgattcattattgggaatcacttgc

SEQ ID NO: 2132989 - DNA, 25 bp, Homo sapien
gtgattcattattgggaatcacttg

SEQ ID NO: 2132990 - DNA, 25 bp, Homo sapien
gattcattattgggaatcacttgca

SEQ ID NO: 2132991 - DNA, 25 bp, Homo sapien
tctggagtaaagacagactttttac

SEQ ID NO: 2132992 - DNA, 25 bp, Homo sapien
tttacttctcaaagagttaagaaca

SEQ ID NO: 2132993 - DNA, 25 bp, Homo sapien
acagactttttacttctcaaagagt

SEQ ID NO: 2132994 - DNA, 25 bp, Homo sapien
cttctggagtaaagacagacttttt

SEQ ID NO: 2132995 - DNA, 25 bp, Homo sapien
actgtcccagaatagttagttccaa

SEQ ID NO: 2132996 - DNA, 25 bp, Homo sapien
tcccagaatagttagttccaaggaa

SEQ ID NO: 2132997 - DNA, 25 bp, Homo sapien
tttttttgaataccgctgacagctt

SEQ ID NO: 2132998 - DNA, 25 bp, Homo sapien
ctgctttttttgaataccgctgaca

SEQ ID NO: 2132999 - DNA, 25 bp, Homo sapien
gaaacccaggagagtatgaagtcat

SEQ ID NO: 2133000 - DNA, 25 bp, Homo sapien
catgaaagttcaatcggaagggact

SEQ ID NO: 2133001 - DNA, 25 bp, Homo sapien
gagccacaaacatggaaggtcactg

SEQ ID NO: 2133002 - DNA, 25 bp, Homo sapien
gctcttccataggtacagggactct

SEQ ID NO: 2133003 - DNA, 25 bp, Homo sapien
caacacgaaccttgtagtctaccca

SEQ ID NO: 2133004 - DNA, 25 bp, Homo sapien
cacgaaccttgtagtctacccacat

SEQ ID NO: 2133005 - DNA, 25 bp, Homo sapien
tctccaacacgaaccttgtagtcta

SEQ ID NO: 2133006 - DNA, 25 bp, Homo sapien
ccatctccaacacgaaccttgtagt

SEQ ID NO: 2133007 - DNA, 25 bp, Homo sapien
gaaatttgctgggtccttttagtga

SEQ ID NO: 2133008 - DNA, 25 bp, Homo sapien
agaatgaaatttgctgggtcctttt

SEQ ID NO: 2133009 - DNA, 25 bp, Homo sapien
taactgcatttgcagtcatattaag

SEQ ID NO: 2133010 - DNA, 25 bp, Homo sapien
gcatttgcagtcatattaagagaaa

SEQ ID NO: 2133011 - DNA, 25 bp, Homo sapien
aatactctgctttacgtcaaggtcc

SEQ ID NO: 2133012 - DNA, 25 bp, Homo sapien
acacacctattctgccaggtcactg

SEQ ID NO: 2133013 - DNA, 25 bp, Homo sapien
gtcaaggtccgtttcagttagcaag

SEQ ID NO: 2133014 - DNA, 25 bp, Homo sapien
ctgtgtccagcccaaaaatgagtgt

SEQ ID NO: 2133015 - DNA, 25 bp, Homo sapien
gctgttttgggatccaaaattctca

SEQ ID NO: 2133016 - DNA, 25 bp, Homo sapien
tctaatgcttctgcgttcttttgaa

SEQ ID NO: 2133017 - DNA, 25 bp, Homo sapien
tcttctaatgcttctgcgttctttt

SEQ ID NO: 2133018 - DNA, 25 bp, Homo sapien
ttctgagctgttttgggatccaaaa

SEQ ID NO: 2133019 - DNA, 25 bp, Homo sapien
aacgtttcttatgtcttcatatggc

SEQ ID NO: 2133020 - DNA, 25 bp, Homo sapien
gcatgtcttcattaacctccagaat

SEQ ID NO: 2133021 - DNA, 25 bp, Homo sapien
tatggcatgcgatatgatcccagaa

SEQ ID NO: 2133022 - DNA, 25 bp, Homo sapien
cagcatgtcttcattaacctccaga

SEQ ID NO: 2133023 - DNA, 25 bp, Homo sapien
cagttgcttaaggaatacaggtgtc

SEQ ID NO: 2133024 - DNA, 25 bp, Homo sapien
tagcatcctggccatctctctgata

SEQ ID NO: 2133025 - DNA, 25 bp, Homo sapien
tagtccccagatatgcagtccttaa

SEQ ID NO: 2133026 - DNA, 25 bp, Homo sapien
cagacagttgcatgcccagtaggaa

SEQ ID NO: 2133027 - DNA, 25 bp, Homo sapien
gactagtggtatttgcaacgtaaca

SEQ ID NO: 2133028 - DNA, 25 bp, Homo sapien
gacctgtactttaagcaatgcttga

SEQ ID NO: 2133029 - DNA, 25 bp, Homo sapien
cagagcttaacatgagtactttcca

SEQ ID NO: 2133030 - DNA, 25 bp, Homo sapien
aaaatggtgtaaagtgaattgctca

SEQ ID NO: 2133031 - DNA, 25 bp, Homo sapien
tagtcaatgcctaaacatatctgat

SEQ ID NO: 2133032 - DNA, 25 bp, Homo sapien
ctgtaggatctcatgttgcaagtgg

SEQ ID NO: 2133033 - DNA, 25 bp, Homo sapien
gatctcatgttgcaagtggtccttg

SEQ ID NO: 2133034 - DNA, 25 bp, Homo sapien
tatgtacatactaaacgttgtagac

SEQ ID NO: 2133035 - DNA, 25 bp, Homo sapien
tcttaagctctgctaattcgttgag

SEQ ID NO: 2133036 - DNA, 25 bp, Homo sapien
cacaactccaaattgttcaggctca

SEQ ID NO: 2133037 - DNA, 25 bp, Homo sapien
acaactccaaattgttcaggctcac

SEQ ID NO: 2133038 - DNA, 25 bp, Homo sapien
gctaattcgttgagtatcttctgct

SEQ ID NO: 2133039 - DNA, 25 bp, Homo sapien
aacctcccagctgagtttgtggtcc

SEQ ID NO: 2133040 - DNA, 25 bp, Homo sapien
cagctgagtttgtggtccctcatgt

SEQ ID NO: 2133041 - DNA, 25 bp, Homo sapien
tcccagctgagtttgtggtccctca

SEQ ID NO: 2133042 - DNA, 25 bp, Homo sapien
ttaacctcccagctgagtttgtggt

SEQ ID NO: 2133043 - DNA, 25 bp, Homo sapien
cccagacatgtagctaagaatggtg

SEQ ID NO: 2133044 - DNA, 25 bp, Homo sapien
actttattgggcaaatcctgattga

SEQ ID NO: 2133045 - DNA, 25 bp, Homo sapien
tccttgatgtgaatgcagctaaact

SEQ ID NO: 2133046 - DNA, 25 bp, Homo sapien
tgcacagcctcagaattatttatgg

SEQ ID NO: 2133047 - DNA, 25 bp, Homo sapien
aatttctgagagtcgtcccttattt

SEQ ID NO: 2133048 - DNA, 25 bp, Homo sapien
tttctgagagtcgtcccttattttc

SEQ ID NO: 2133049 - DNA, 25 bp, Homo sapien
tctgagagtcgtcccttattttcca

SEQ ID NO: 2133050 - DNA, 25 bp, Homo sapien
ctgagagtcgtcccttattttccat

SEQ ID NO: 2133051 - DNA, 25 bp, Homo sapien
actgagacgaggctgtaacattttc

SEQ ID NO: 2133052 - DNA, 25 bp, Homo sapien
caaatgtgagcttgaacaggatact

SEQ ID NO: 2133053 - DNA, 25 bp, Homo sapien
caggcaagagttactgctatgatgc

SEQ ID NO: 2133054 - DNA, 25 bp, Homo sapien
gatcttaaatcccaaagactgggca

SEQ ID NO: 2133055 - DNA, 25 bp, Homo sapien
ctttgaataaggtggtttgctctag

SEQ ID NO: 2133056 - DNA, 25 bp, Homo sapien
tctttgaataaggtggtttgctcta

SEQ ID NO: 2133057 - DNA, 25 bp, Homo sapien
tttctttgaataaggtggtttgctc

SEQ ID NO: 2133058 - DNA, 25 bp, Homo sapien
tttgaataaggtggtttgctctagc

SEQ ID NO: 2133059 - DNA, 25 bp, Homo sapien
cagcttgtaagatgactggtcaaac

SEQ ID NO: 2133060 - DNA, 25 bp, Homo sapien
tgtgcaatgccttcactaggaaggc

SEQ ID NO: 2133061 - DNA, 25 bp, Homo sapien
tctaaaattatcacagagctttatt

SEQ ID NO: 2133062 - DNA, 25 bp, Homo sapien
gacatgagctctccttgttaaggtt

SEQ ID NO: 2133063 - DNA, 25 bp, Homo sapien
tgatccgctgatttagtatctctga

SEQ ID NO: 2133064 - DNA, 25 bp, Homo sapien
ttcctcacaaatgtcggcaataaaa

SEQ ID NO: 2133065 - DNA, 25 bp, Homo sapien
caggaaattttaggatatctcgata

SEQ ID NO: 2133066 - DNA, 25 bp, Homo sapien
tgcttgcactttctacgtgttccag

SEQ ID NO: 2133067 - DNA, 25 bp, Homo sapien
tatggccatagattgagcccctccg

SEQ ID NO: 2133068 - DNA, 25 bp, Homo sapien
gatagcaccgagattgtaaggacaa

SEQ ID NO: 2133069 - DNA, 25 bp, Homo sapien
taccaataacgctaaagggctgctg

SEQ ID NO: 2133070 - DNA, 25 bp, Homo sapien
cccttgaagaagcaaagtgtggact

SEQ ID NO: 2133071 - DNA, 25 bp, Homo sapien
cccggcctgaaatcctatatatgaa

SEQ ID NO: 2133072 - DNA, 25 bp, Homo sapien
gcccggcctgaaatcctatatatga

SEQ ID NO: 2133073 - DNA, 25 bp, Homo sapien
cgcccggcctgaaatcctatatatg

SEQ ID NO: 2133074 - DNA, 25 bp, Homo sapien
atagattttgtctgtaacactgtga

SEQ ID NO: 2133075 - DNA, 25 bp, Homo sapien
tgttatagattttgtctgtaacact

SEQ ID NO: 2133076 - DNA, 25 bp, Homo sapien
tatagattttgtctgtaacactgtg

SEQ ID NO: 2133077 - DNA, 25 bp, Homo sapien
tgtaacactgtgacacagattttgt

SEQ ID NO: 2133078 - DNA, 25 bp, Homo sapien
ttctcctcatcataatgtatgttac

SEQ ID NO: 2133079 - DNA, 25 bp, Homo sapien
tctcctcatcataatgtatgttact

SEQ ID NO: 2133080 - DNA, 25 bp, Homo sapien
cctataccacctgtactactgctga

SEQ ID NO: 2133081 - DNA, 25 bp, Homo sapien
taattaatacataagcatctcacct

SEQ ID NO: 2133082 - DNA, 25 bp, Homo sapien
taacctttaccaaattgatagctga

SEQ ID NO: 2133083 - DNA, 25 bp, Homo sapien
taatctccaaatagttatgtatggg

SEQ ID NO: 2133084 - DNA, 25 bp, Homo sapien
caaattccgatttgcaaagccattt

SEQ ID NO: 2133085 - DNA, 25 bp, Homo sapien
tccctccatcgaatgtcaaaggagt

SEQ ID NO: 2133086 - DNA, 25 bp, Homo sapien
tcaatatccctgtgaatggacttgt

SEQ ID NO: 2133087 - DNA, 25 bp, Homo sapien
taataaagggcccagcaaattccga

SEQ ID NO: 2133088 - DNA, 25 bp, Homo sapien
tcacttttgccgacagacagtaaag

SEQ ID NO: 2133089 - DNA, 25 bp, Homo sapien
gacctgtcagaacaaggtacttcag

SEQ ID NO: 2133090 - DNA, 25 bp, Homo sapien
taagtacagttgtatgacctgtcag

SEQ ID NO: 2133091 - DNA, 25 bp, Homo sapien
cttttaaatggtagtgctcactcag

SEQ ID NO: 2133092 - DNA, 25 bp, Homo sapien
aatgccgtctacatcgacctttttg

SEQ ID NO: 2133093 - DNA, 25 bp, Homo sapien
catcaacatcaggtaaaatgccgtc

SEQ ID NO: 2133094 - DNA, 25 bp, Homo sapien
caattctgatcccaagcaacatcaa

SEQ ID NO: 2133095 - DNA, 25 bp, Homo sapien
atcaggtaaaatgccgtctacatcg

SEQ ID NO: 2133096 - DNA, 25 bp, Homo sapien
taggaaacctacatgacgtgaatat

SEQ ID NO: 2133097 - DNA, 25 bp, Homo sapien
ataagcccctgtgactagcccatag

SEQ ID NO: 2133098 - DNA, 25 bp, Homo sapien
gaagagggtggcaacttaactgaac

SEQ ID NO: 2133099 - DNA, 25 bp, Homo sapien
tcaaagtcgtggacataggaaacct

SEQ ID NO: 2133100 - DNA, 25 bp, Homo sapien
gtgaatactcaatcaaaaggccaaa

SEQ ID NO: 2133101 - DNA, 25 bp, Homo sapien
aagtactcctaagcggaacacttat

SEQ ID NO: 2133102 - DNA, 25 bp, Homo sapien
cctaagcggaacacttatgatttgt

SEQ ID NO: 2133103 - DNA, 25 bp, Homo sapien
tttctgtagatatggcatttcgcca

SEQ ID NO: 2133104 - DNA, 25 bp, Homo sapien
tgaggtattcaccaaagttctttcc

SEQ ID NO: 2133105 - DNA, 25 bp, Homo sapien
acactgcttcggcataaatacccca

SEQ ID NO: 2133106 - DNA, 25 bp, Homo sapien
ggagacaagtgcataccccaaactg

SEQ ID NO: 2133107 - DNA, 25 bp, Homo sapien
ttccaaaaatcatcccgggaagatg

SEQ ID NO: 2133108 - DNA, 25 bp, Homo sapien
tcttgcagcatcagcaatataacct

SEQ ID NO: 2133109 - DNA, 25 bp, Homo sapien
catttaattatcacctaggaactac

SEQ ID NO: 2133110 - DNA, 25 bp, Homo sapien
gactgcaatctatacaaatttgact

SEQ ID NO: 2133111 - DNA, 25 bp, Homo sapien
tataacctaggccaacaaatcaaat

SEQ ID NO: 2133112 - DNA, 25 bp, Homo sapien
cttcatgactattcgtattggacgg

SEQ ID NO: 2133113 - DNA, 25 bp, Homo sapien
tcatgactattcgtattggacggtc

SEQ ID NO: 2133114 - DNA, 25 bp, Homo sapien
catgactattcgtattggacggtcc

SEQ ID NO: 2133115 - DNA, 25 bp, Homo sapien
tgactattcgtattggacggtccat

SEQ ID NO: 2133116 - DNA, 25 bp, Homo sapien
taaacccaggaatatacagtacttc

SEQ ID NO: 2133117 - DNA, 25 bp, Homo sapien
gtgtccagccattacttagcaaggg

SEQ ID NO: 2133118 - DNA, 25 bp, Homo sapien
tataatattggacatagggattggc

SEQ ID NO: 2133119 - DNA, 25 bp, Homo sapien
ggcaatagatgggttaaaatatcat

SEQ ID NO: 2133120 - DNA, 25 bp, Homo sapien
taacatggaactgaatgagcaaagg

SEQ ID NO: 2133121 - DNA, 25 bp, Homo sapien
tgttatatcctgcttggcttcagag

SEQ ID NO: 2133122 - DNA, 25 bp, Homo sapien
catctgatgatgtcctaatgcctac

SEQ ID NO: 2133123 - DNA, 25 bp, Homo sapien
tcagagcagataagaaggcagtaac

SEQ ID NO: 2133124 - DNA, 25 bp, Homo sapien
gttgccatcgcttttggcagtttag

SEQ ID NO: 2133125 - DNA, 25 bp, Homo sapien
tggcagtttagtcaggaagtctttg

SEQ ID NO: 2133126 - DNA, 25 bp, Homo sapien
tttgttgccatcgcttttggcagtt

SEQ ID NO: 2133127 - DNA, 25 bp, Homo sapien
ggcagtttagtcaggaagtctttgc

SEQ ID NO: 2133128 - DNA, 25 bp, Homo sapien
ctccccttgactccgaccccatgac

SEQ ID NO: 2133129 - DNA, 25 bp, Homo sapien
catgacaggtcctagtgtgtgttgg

SEQ ID NO: 2133130 - DNA, 25 bp, Homo sapien
gacaggtcctagtgtgtgttggtcc

SEQ ID NO: 2133131 - DNA, 25 bp, Homo sapien
ccctccccttgactccgaccccatg

SEQ ID NO: 2133132 - DNA, 25 bp, Homo sapien
gctctagattgcaacagtgttctta

SEQ ID NO: 2133133 - DNA, 25 bp, Homo sapien
agcgggtatctacagaagctctaga

SEQ ID NO: 2133134 - DNA, 25 bp, Homo sapien
gacattttgggatcatgcttaatga

SEQ ID NO: 2133135 - DNA, 25 bp, Homo sapien
gagaatagggcaagagaatgtcatc

SEQ ID NO: 2133136 - DNA, 25 bp, Homo sapien
caagttatcaagtagcagcgatttg

SEQ ID NO: 2133137 - DNA, 25 bp, Homo sapien
aattatataagtttgatctatggaa

SEQ ID NO: 2133138 - DNA, 25 bp, Homo sapien
tgccaccatgacctgttgacattac

SEQ ID NO: 2133139 - DNA, 25 bp, Homo sapien
tggaatgtcagaacagaagattggt

SEQ ID NO: 2133140 - DNA, 25 bp, Homo sapien
gaatttcttgatgtcacgttccaga

SEQ ID NO: 2133141 - DNA, 25 bp, Homo sapien
ccacaaacttatcgtgttgattttc

SEQ ID NO: 2133142 - DNA, 25 bp, Homo sapien
ggttgctcttgagaatttgagctga

SEQ ID NO: 2133143 - DNA, 25 bp, Homo sapien
tgttccattgatgcaaggttgctct

SEQ ID NO: 2133144 - DNA, 25 bp, Homo sapien
aaatgcttaaataaataaaggatat

SEQ ID NO: 2133145 - DNA, 25 bp, Homo sapien
gaaactctcaatgggtgaccaagaa

SEQ ID NO: 2133146 - DNA, 25 bp, Homo sapien
gcattgccagaagggtaaaaaatat

SEQ ID NO: 2133147 - DNA, 25 bp, Homo sapien
tattaggtaggcaccagaactcata

SEQ ID NO: 2133148 - DNA, 25 bp, Homo sapien
tatgatatgcaaagtaacagcccca

SEQ ID NO: 2133149 - DNA, 25 bp, Homo sapien
gaaaataatctgaaccagccttcat

SEQ ID NO: 2133150 - DNA, 25 bp, Homo sapien
gggaagactgtcatacagagataca

SEQ ID NO: 2133151 - DNA, 25 bp, Homo sapien
aaaagagaccttcacatgacaggtg

SEQ ID NO: 2133152 - DNA, 25 bp, Homo sapien
aaagactttcacataggccgggcgc

SEQ ID NO: 2133153 - DNA, 25 bp, Homo sapien
taggtcctattctcctcactgatga

SEQ ID NO: 2133154 - DNA, 25 bp, Homo sapien
catcatcagtttgtgactaggtcct

SEQ ID NO: 2133155 - DNA, 25 bp, Homo sapien
tttgcaaagcttgtccacacggcct

SEQ ID NO: 2133156 - DNA, 25 bp, Homo sapien
taagtagctgagatatgatcctctc

SEQ ID NO: 2133157 - DNA, 25 bp, Homo sapien
tatttgctttcgatacgataaagag

SEQ ID NO: 2133158 - DNA, 25 bp, Homo sapien
tgttaccgttacctctcagaaccat

SEQ ID NO: 2133159 - DNA, 25 bp, Homo sapien
tcgatacgataaagagggtttgtta

SEQ ID NO: 2133160 - DNA, 25 bp, Homo sapien
ttgttaccgttacctctcagaacca

SEQ ID NO: 2133161 - DNA, 25 bp, Homo sapien
ggttctgagtcaggcctatgataaa

SEQ ID NO: 2133162 - DNA, 25 bp, Homo sapien
cagtaattgaacagagttgctgtgc

SEQ ID NO: 2133163 - DNA, 25 bp, Homo sapien
taggcaagccaagtatgattttttc

SEQ ID NO: 2133164 - DNA, 25 bp, Homo sapien
caaggctagagcttaactcaatgga

SEQ ID NO: 2133165 - DNA, 25 bp, Homo sapien
ccacagagatctattcaatcattaa

SEQ ID NO: 2133166 - DNA, 25 bp, Homo sapien
aatgatctacccatgaatttcagta

SEQ ID NO: 2133167 - DNA, 25 bp, Homo sapien
taatatattaaagggcgcaggagcc

SEQ ID NO: 2133168 - DNA, 25 bp, Homo sapien
ttcagtatgtttcaagaaatccttg

SEQ ID NO: 2133169 - DNA, 25 bp, Homo sapien
cagtaagtgtatacccagtgccaat

SEQ ID NO: 2133170 - DNA, 25 bp, Homo sapien
tttcattatacatcaagctaaggag

SEQ ID NO: 2133171 - DNA, 25 bp, Homo sapien
gctaaggagctttacattatacaat

SEQ ID NO: 2133172 - DNA, 25 bp, Homo sapien
tcacgctatttattattaacgtaat

SEQ ID NO: 2133173 - DNA, 25 bp, Homo sapien
tacctaaaatcactacaaagtacat

SEQ ID NO: 2133174 - DNA, 25 bp, Homo sapien
aatgaaagcacccaacacccatacc

SEQ ID NO: 2133175 - DNA, 25 bp, Homo sapien
cttcaaaagacaagagcttgattcc

SEQ ID NO: 2133176 - DNA, 25 bp, Homo sapien
gattccatactctaatactgtgtca

SEQ ID NO: 2133177 - DNA, 25 bp, Homo sapien
tcatttgagcaaaaagcaccttcaa

SEQ ID NO: 2133178 - DNA, 25 bp, Homo sapien
gatttctgtacccttgctgaatgtc

SEQ ID NO: 2133179 - DNA, 25 bp, Homo sapien
aaataaccatagaagcagcaacacc

SEQ ID NO: 2133180 - DNA, 25 bp, Homo sapien
tcccgtatttggttgatagagtcca

SEQ ID NO: 2133181 - DNA, 25 bp, Homo sapien
tacaatagtcatcatgcaattcata

SEQ ID NO: 2133182 - DNA, 25 bp, Homo sapien
catcatgcaattcatattccaagca

SEQ ID NO: 2133183 - DNA, 25 bp, Homo sapien
atagtcatcatgcaattcatattcc

SEQ ID NO: 2133184 - DNA, 25 bp, Homo sapien
cattacaatagtcatcatgcaattc

SEQ ID NO: 2133185 - DNA, 25 bp, Homo sapien
tccgtctccagctattaaagaattg

SEQ ID NO: 2133186 - DNA, 25 bp, Homo sapien
ggataactgacaaccatagtggact

SEQ ID NO: 2133187 - DNA, 25 bp, Homo sapien
aagtaaccctaagtccctagtgcat

SEQ ID NO: 2133188 - DNA, 25 bp, Homo sapien
cctagtgcataacatgattcagagg

SEQ ID NO: 2133189 - DNA, 25 bp, Homo sapien
taatgtggaccttagtgcagatgcc

SEQ ID NO: 2133190 - DNA, 25 bp, Homo sapien
gtcaccatgttaatgtggaccttag

SEQ ID NO: 2133191 - DNA, 25 bp, Homo sapien
ccaatcagcctagcgcattatagcc

SEQ ID NO: 2133192 - DNA, 25 bp, Homo sapien
tgacctgggctaggtaacccctgct

SEQ ID NO: 2133193 - DNA, 25 bp, Homo sapien
tctccaagattctcatagagcttca

SEQ ID NO: 2133194 - DNA, 25 bp, Homo sapien
agttcggaagttgttgagatcacca

SEQ ID NO: 2133195 - DNA, 25 bp, Homo sapien
actgttctcgggcagtctttgtaaa

SEQ ID NO: 2133196 - DNA, 25 bp, Homo sapien
gaactcttctatgctcactgtcttt

SEQ ID NO: 2133197 - DNA, 25 bp, Homo sapien
cttggcccacacataggcattttca

SEQ ID NO: 2133198 - DNA, 25 bp, Homo sapien
taaaggcaaccccaagcagttttgc

SEQ ID NO: 2133199 - DNA, 25 bp, Homo sapien
cattaaaggcaaccccaagcagttt

SEQ ID NO: 2133200 - DNA, 25 bp, Homo sapien
tttcattaaaggcaaccccaagcag

SEQ ID NO: 2133201 - DNA, 25 bp, Homo sapien
caagattgatgacaaaattggagca

SEQ ID NO: 2133202 - DNA, 25 bp, Homo sapien
aagtgtcctgtgaaacatggctact

SEQ ID NO: 2133203 - DNA, 25 bp, Homo sapien
taccacaatggtacttcaagattga

SEQ ID NO: 2133204 - DNA, 25 bp, Homo sapien
tgaaacatggctacttctgcactga

SEQ ID NO: 2133205 - DNA, 25 bp, Homo sapien
tagcttgagcccaggggtctgaggc

SEQ ID NO: 2133206 - DNA, 25 bp, Homo sapien
tctttactgataggaggctgttagc

SEQ ID NO: 2133207 - DNA, 25 bp, Homo sapien
taatgtttacggaaggaccaggaga

SEQ ID NO: 2133208 - DNA, 25 bp, Homo sapien
gaccaggagaattagcccacacttg

SEQ ID NO: 2133209 - DNA, 25 bp, Homo sapien
gaatgagggattcacttagtctgcc

SEQ ID NO: 2133210 - DNA, 25 bp, Homo sapien
tattattccacatttgggcaataca

SEQ ID NO: 2133211 - DNA, 25 bp, Homo sapien
tccaatccaggaccatgtccacata

SEQ ID NO: 2133212 - DNA, 25 bp, Homo sapien
caaaggtcccatgcatttcagggtc

SEQ ID NO: 2133213 - DNA, 25 bp, Homo sapien
caggaccatgtccacatatgtgcgt

SEQ ID NO: 2133214 - DNA, 25 bp, Homo sapien
cttctcttattgttttctctcactg

SEQ ID NO: 2133215 - DNA, 25 bp, Homo sapien
tctcttattgttttctctcactgct

SEQ ID NO: 2133216 - DNA, 25 bp, Homo sapien
tcttattgttttctctcactgcttc

SEQ ID NO: 2133217 - DNA, 25 bp, Homo sapien
ctcttctcttattgttttctctcac

SEQ ID NO: 2133218 - DNA, 25 bp, Homo sapien
gcaagttttgccctcctggtcttct

SEQ ID NO: 2133219 - DNA, 25 bp, Homo sapien
tcttctggcgttctaacttttcttg

SEQ ID NO: 2133220 - DNA, 25 bp, Homo sapien
tatatcaatgagttgtttctttttc

SEQ ID NO: 2133221 - DNA, 25 bp, Homo sapien
ttcagctttctcttttgcaagtttt

SEQ ID NO: 2133222 - DNA, 25 bp, Homo sapien
tatctccccatacccgtttttcaca

SEQ ID NO: 2133223 - DNA, 25 bp, Homo sapien
ttcatctcacccactttttccctcc

SEQ ID NO: 2133224 - DNA, 25 bp, Homo sapien
atctccccatacccgtttttcacat

SEQ ID NO: 2133225 - DNA, 25 bp, Homo sapien
cttgagggtagctaaatgtgtgagt

SEQ ID NO: 2133226 - DNA, 25 bp, Homo sapien
ttgagggtagctaaatgtgtgagtg

SEQ ID NO: 2133227 - DNA, 25 bp, Homo sapien
tgagggtagctaaatgtgtgagtgt

SEQ ID NO: 2133228 - DNA, 25 bp, Homo sapien
gaattaatcttggagcaattaaagt

SEQ ID NO: 2133229 - DNA, 25 bp, Homo sapien
cagaattaatcttggagcaattaaa

SEQ ID NO: 2133230 - DNA, 25 bp, Homo sapien
agaattaatcttggagcaattaaag

SEQ ID NO: 2133231 - DNA, 25 bp, Homo sapien
ccttggaatccgctttcgacggtct

SEQ ID NO: 2133232 - DNA, 25 bp, Homo sapien
gattccttggaatccgctttcgacg

SEQ ID NO: 2133233 - DNA, 25 bp, Homo sapien
gaatccgctttcgacggtctctgaa

SEQ ID NO: 2133234 - DNA, 25 bp, Homo sapien
tttcgacggtctctgaatgctgcac

SEQ ID NO: 2133235 - DNA, 25 bp, Homo sapien
aatactatgtgaggtggaatgtgtt

SEQ ID NO: 2133236 - DNA, 25 bp, Homo sapien
tgactgccacagctaaatcgagtga

SEQ ID NO: 2133237 - DNA, 25 bp, Homo sapien
gctaaatcgagtgatatttttaacc

SEQ ID NO: 2133238 - DNA, 25 bp, Homo sapien
tgatgaccaaggtgcttcccaacca

SEQ ID NO: 2133239 - DNA, 25 bp, Homo sapien
cgagtttcgttttacctctggacat

SEQ ID NO: 2133240 - DNA, 25 bp, Homo sapien
atctgtaaaagtccccggttctgct

SEQ ID NO: 2133241 - DNA, 25 bp, Homo sapien
aataacgggactagcaggaaaagat

SEQ ID NO: 2133242 - DNA, 25 bp, Homo sapien
aaaagatgatctagctaggaagggc

SEQ ID NO: 2133243 - DNA, 25 bp, Homo sapien
gcagacttgtaaactctgtgccttc

SEQ ID NO: 2133244 - DNA, 25 bp, Homo sapien
aagcagagcagtaagtacatctccg

SEQ ID NO: 2133245 - DNA, 25 bp, Homo sapien
tggtaatgaaaatggcaagcagagc

SEQ ID NO: 2133246 - DNA, 25 bp, Homo sapien
aacagtaatacccatctataagcga

SEQ ID NO: 2133247 - DNA, 25 bp, Homo sapien
ccgctgattgtggttgactctgatt

SEQ ID NO: 2133248 - DNA, 25 bp, Homo sapien
tgatgactgtcaaactctggcgttg

SEQ ID NO: 2133249 - DNA, 25 bp, Homo sapien
ggagtgccgcactaaaggaaaagag

SEQ ID NO: 2133250 - DNA, 25 bp, Homo sapien
taaacagcttggaatgaacgaccag

SEQ ID NO: 2133251 - DNA, 25 bp, Homo sapien
tacttggtacacaggtggagtgccg

SEQ ID NO: 2133252 - DNA, 25 bp, Homo sapien
tagccatgacttttcacgtgggtga

SEQ ID NO: 2133253 - DNA, 25 bp, Homo sapien
tgagaataagaatctacccacagtc

SEQ ID NO: 2133254 - DNA, 25 bp, Homo sapien
gagaacaagaacctctagcacttga

SEQ ID NO: 2133255 - DNA, 25 bp, Homo sapien
cacttcagaagcctacgtccattgt

SEQ ID NO: 2133256 - DNA, 25 bp, Homo sapien
gtaaacaatgaacaaggagactgct

SEQ ID NO: 2133257 - DNA, 25 bp, Homo sapien
caattgtaatactaccaacagggag

SEQ ID NO: 2133258 - DNA, 25 bp, Homo sapien
gatgaagatgcaactaaagctacaa

SEQ ID NO: 2133259 - DNA, 25 bp, Homo sapien
aagattcttccccacgggcagtgaa

SEQ ID NO: 2133260 - DNA, 25 bp, Homo sapien
ctgaaggaggtaagaggaatgagat

SEQ ID NO: 2133261 - DNA, 25 bp, Homo sapien
ttctgaaggaggtaagaggaatgag

SEQ ID NO: 2133262 - DNA, 25 bp, Homo sapien
atttctgtagaaagaagtcaattta

SEQ ID NO: 2133263 - DNA, 25 bp, Homo sapien
aggtaagaggaatgagattaggagc

SEQ ID NO: 2133264 - DNA, 25 bp, Homo sapien
aattcacaatagccataatgatatt

SEQ ID NO: 2133265 - DNA, 25 bp, Homo sapien
attcacaatagccataatgatattt

SEQ ID NO: 2133266 - DNA, 25 bp, Homo sapien
ttcacaatagccataatgatatttg

SEQ ID NO: 2133267 - DNA, 25 bp, Homo sapien
cccataactaaagggaatatcttca

SEQ ID NO: 2133268 - DNA, 25 bp, Homo sapien
gagttttggtttagcctgtccatca

SEQ ID NO: 2133269 - DNA, 25 bp, Homo sapien
tgtccatcatttcaaaatccccata

SEQ ID NO: 2133270 - DNA, 25 bp, Homo sapien
ggtctgagtttaatattgaagctgc

SEQ ID NO: 2133271 - DNA, 25 bp, Homo sapien
gcaacctgagcacaaaccaagacta

SEQ ID NO: 2133272 - DNA, 25 bp, Homo sapien
cagcatggtcatcacaatactctca

SEQ ID NO: 2133273 - DNA, 25 bp, Homo sapien
catatgaactacacagctcagctga

SEQ ID NO: 2133274 - DNA, 25 bp, Homo sapien
tatcaccaggaactaaatggcacag

SEQ ID NO: 2133275 - DNA, 25 bp, Homo sapien
caaggtagttactttaggagctaca

SEQ ID NO: 2133276 - DNA, 25 bp, Homo sapien
tatctttacagtaggcctcacagcc

SEQ ID NO: 2133277 - DNA, 25 bp, Homo sapien
catatgttggtaagatccgtgctct

SEQ ID NO: 2133278 - DNA, 25 bp, Homo sapien
tcagtaaagagtcccaccaaattgt

SEQ ID NO: 2133279 - DNA, 25 bp, Homo sapien
cacaatgattactaagagcagcagc

SEQ ID NO: 2133280 - DNA, 25 bp, Homo sapien
ccgtgctcataggtgatggtggcca

SEQ ID NO: 2133281 - DNA, 25 bp, Homo sapien
caatacacgcttgacaatatggaag

SEQ ID NO: 2133282 - DNA, 25 bp, Homo sapien
caaaggctgacattcggaacattac

SEQ ID NO: 2133283 - DNA, 25 bp, Homo sapien
ttcattagttatcatgcaggtcatg

SEQ ID NO: 2133284 - DNA, 25 bp, Homo sapien
gacaaaaccataaacagctcattta

SEQ ID NO: 2133285 - DNA, 25 bp, Homo sapien
agttcaacaaattaggccacagata

SEQ ID NO: 2133286 - DNA, 25 bp, Homo sapien
gcacctagaacactgaataagacaa

SEQ ID NO: 2133287 - DNA, 25 bp, Homo sapien
tcttggattagcccttgttgcacag

SEQ ID NO: 2133288 - DNA, 25 bp, Homo sapien
gatcttggattagcccttgttgcac

SEQ ID NO: 2133289 - DNA, 25 bp, Homo sapien
cttggattagcccttgttgcacagg

SEQ ID NO: 2133290 - DNA, 25 bp, Homo sapien
tggattagcccttgttgcacaggga

SEQ ID NO: 2133291 - DNA, 25 bp, Homo sapien
atcacccaatcctgtttaaaacagc

SEQ ID NO: 2133292 - DNA, 25 bp, Homo sapien
taccatcacccaatcctgtttaaaa

SEQ ID NO: 2133293 - DNA, 25 bp, Homo sapien
tgtaccatcacccaatcctgtttaa

SEQ ID NO: 2133294 - DNA, 25 bp, Homo sapien
ccatcacccaatcctgtttaaaaca

SEQ ID NO: 2133295 - DNA, 25 bp, Homo sapien
aaaaaccatggctaccctagtggct

SEQ ID NO: 2133296 - DNA, 25 bp, Homo sapien
tacatgtagtagtgctattgcccaa

SEQ ID NO: 2133297 - DNA, 25 bp, Homo sapien
tatttccaggtacacaactcacagg

SEQ ID NO: 2133298 - DNA, 25 bp, Homo sapien
tatctgaaggactgtgatcccacat

SEQ ID NO: 2133299 - DNA, 25 bp, Homo sapien
gcagtattactcattcaattgaaaa

SEQ ID NO: 2133300 - DNA, 25 bp, Homo sapien
aagcagtattactcattcaattgaa

SEQ ID NO: 2133301 - DNA, 25 bp, Homo sapien
cagtattactcattcaattgaaaaa

SEQ ID NO: 2133302 - DNA, 25 bp, Homo sapien
taaagcagtattactcattcaattg

SEQ ID NO: 2133303 - DNA, 25 bp, Homo sapien
tgtaggtataagtagaggcagctag

SEQ ID NO: 2133304 - DNA, 25 bp, Homo sapien
tgatgggacggtattgatatttgca

SEQ ID NO: 2133305 - DNA, 25 bp, Homo sapien
gatatttgcataacagctgcatatg

SEQ ID NO: 2133306 - DNA, 25 bp, Homo sapien
acagaaattgtgatgggacggtatt

SEQ ID NO: 2133307 - DNA, 25 bp, Homo sapien
ccaagtaatagtcaattaggttgac

SEQ ID NO: 2133308 - DNA, 25 bp, Homo sapien
actgaccaagtaatagtcaattagg

SEQ ID NO: 2133309 - DNA, 25 bp, Homo sapien
tagtcaattaggttgactgctgtca

SEQ ID NO: 2133310 - DNA, 25 bp, Homo sapien
gaaactgaccaagtaatagtcaatt

SEQ ID NO: 2133311 - DNA, 25 bp, Homo sapien
tctgctggctctacgaatccaactc

SEQ ID NO: 2133312 - DNA, 25 bp, Homo sapien
gaattagggacatctatagcctgac

SEQ ID NO: 2133313 - DNA, 25 bp, Homo sapien
tttatcaccaacaccatctgctggc

SEQ ID NO: 2133314 - DNA, 25 bp, Homo sapien
gaactttgacactcatgggttacag

SEQ ID NO: 2133315 - DNA, 25 bp, Homo sapien
agcattctagcctccttcaaaggaa

SEQ ID NO: 2133316 - DNA, 25 bp, Homo sapien
taatgactccataggtactaaccac

SEQ ID NO: 2133317 - DNA, 25 bp, Homo sapien
tcaagctggtattatgaaagactgc

SEQ ID NO: 2133318 - DNA, 25 bp, Homo sapien
tttgtagaaaaagaagtcctgcgcc

SEQ ID NO: 2133319 - DNA, 25 bp, Homo sapien
gaattggcccaacgctacagtgcta

SEQ ID NO: 2133320 - DNA, 25 bp, Homo sapien
tcagcattgggaggtttaactcagc

SEQ ID NO: 2133321 - DNA, 25 bp, Homo sapien
gcaggtgagtagttatatctccaca

SEQ ID NO: 2133322 - DNA, 25 bp, Homo sapien
tatgactaacatcttgctcatcctg

SEQ ID NO: 2133323 - DNA, 25 bp, Homo sapien
gcttgatagtattctggccccaagc

SEQ ID NO: 2133324 - DNA, 25 bp, Homo sapien
catgccatgttccatggcagtgagc

SEQ ID NO: 2133325 - DNA, 25 bp, Homo sapien
gaagagcttgatagtattctggccc

SEQ ID NO: 2133326 - DNA, 25 bp, Homo sapien
ttgagaagagcttgatagtattctg

SEQ ID NO: 2133327 - DNA, 25 bp, Homo sapien
aatgaagataatggtaacgatccag

SEQ ID NO: 2133328 - DNA, 25 bp, Homo sapien
gaggatgatttctccggcatagaat

SEQ ID NO: 2133329 - DNA, 25 bp, Homo sapien
gatccagtctggaggatgatttctc

SEQ ID NO: 2133330 - DNA, 25 bp, Homo sapien
tccggcatagaatattcatcacagc

SEQ ID NO: 2133331 - DNA, 25 bp, Homo sapien
ttggacaagtgatgtgtctgagcta

SEQ ID NO: 2133332 - DNA, 25 bp, Homo sapien
gacaaactctattcaacttaaccag

SEQ ID NO: 2133333 - DNA, 25 bp, Homo sapien
cccaaagcaggggttgagttggaca

SEQ ID NO: 2133334 - DNA, 25 bp, Homo sapien
tagcacagcaaaagctagaagacaa

SEQ ID NO: 2133335 - DNA, 25 bp, Homo sapien
gaggcaatcactggacgtgctgcta

SEQ ID NO: 2133336 - DNA, 25 bp, Homo sapien
tgtagtgtaccaaacggaggctgga

SEQ ID NO: 2133337 - DNA, 25 bp, Homo sapien
taaaggccatatgtagaccagagaa

SEQ ID NO: 2133338 - DNA, 25 bp, Homo sapien
ccccataggttagaagtagtatctg

SEQ ID NO: 2133339 - DNA, 25 bp, Homo sapien
cccatactgacattgatttccctga

SEQ ID NO: 2133340 - DNA, 25 bp, Homo sapien
cttttttcccatactgacattgatt

SEQ ID NO: 2133341 - DNA, 25 bp, Homo sapien
catactgacattgatttccctgatt

SEQ ID NO: 2133342 - DNA, 25 bp, Homo sapien
ttgatttccctgatttttatctgaa

SEQ ID NO: 2133343 - DNA, 25 bp, Homo sapien
gtcccttgataacctccctgcatgt

SEQ ID NO: 2133344 - DNA, 25 bp, Homo sapien
tgcatgtttaattccatgatgattc

SEQ ID NO: 2133345 - DNA, 25 bp, Homo sapien
ccttgataacctccctgcatgttta

SEQ ID NO: 2133346 - DNA, 25 bp, Homo sapien
taacctccctgcatgtttaattcca

SEQ ID NO: 2133347 - DNA, 25 bp, Homo sapien
gagcctcacgagagcttcatgcagt

SEQ ID NO: 2133348 - DNA, 25 bp, Homo sapien
tgccagcctgtgaatgcagcctagc

SEQ ID NO: 2133349 - DNA, 25 bp, Homo sapien
gtatccacacgaagctcatctgcca

SEQ ID NO: 2133350 - DNA, 25 bp, Homo sapien
tcatgcagtagatccctggcagctt

SEQ ID NO: 2133351 - DNA, 25 bp, Homo sapien
agccttcacttcgtacttctgctca

SEQ ID NO: 2133352 - DNA, 25 bp, Homo sapien
tcacaggagactagcacaagttcct

SEQ ID NO: 2133353 - DNA, 25 bp, Homo sapien
atcagccttcacttcgtacttctgc

SEQ ID NO: 2133354 - DNA, 25 bp, Homo sapien
gagactagcacaagttcctgcttca

SEQ ID NO: 2133355 - DNA, 25 bp, Homo sapien
cctttggaccacagcattgaaactg

SEQ ID NO: 2133356 - DNA, 25 bp, Homo sapien
gactgggcatacaggtgtagaacaa

SEQ ID NO: 2133357 - DNA, 25 bp, Homo sapien
tacatgcacagagcttagttaacac

SEQ ID NO: 2133358 - DNA, 25 bp, Homo sapien
tagggatagggcaccaacatacatg

SEQ ID NO: 2133359 - DNA, 25 bp, Homo sapien
acttctgtgcaaagaacgcctttcc

SEQ ID NO: 2133360 - DNA, 25 bp, Homo sapien
cacattgatattgttcacggtatga

SEQ ID NO: 2133361 - DNA, 25 bp, Homo sapien
ttggtattgttcctatgcataggga

SEQ ID NO: 2133362 - DNA, 25 bp, Homo sapien
catagggatgtagatctgctagagg

SEQ ID NO: 2133363 - DNA, 25 bp, Homo sapien
ttccttcttaccgaagactttgtca

SEQ ID NO: 2133364 - DNA, 25 bp, Homo sapien
ttcttaccgaagactttgtcaagtg

SEQ ID NO: 2133365 - DNA, 25 bp, Homo sapien
taccgaagactttgtcaagtgaaat

SEQ ID NO: 2133366 - DNA, 25 bp, Homo sapien
atccacacctaaatctacatcatta

SEQ ID NO: 2133367 - DNA, 25 bp, Homo sapien
tctttttgttcatcaaaggctttga

SEQ ID NO: 2133368 - DNA, 25 bp, Homo sapien
tgtgccccatgtgaaggtgaataga

SEQ ID NO: 2133369 - DNA, 25 bp, Homo sapien
ccggctatgcatgcgctaacagatt

SEQ ID NO: 2133370 - DNA, 25 bp, Homo sapien
ggtgaatagattctgatactatgaa

SEQ ID NO: 2133371 - DNA, 25 bp, Homo sapien
tttgcagcaataaatgatgggatgt

SEQ ID NO: 2133372 - DNA, 25 bp, Homo sapien
gggatgtaaggcttcacatcaacct

SEQ ID NO: 2133373 - DNA, 25 bp, Homo sapien
aatgatgggatgtaaggcttcacat

SEQ ID NO: 2133374 - DNA, 25 bp, Homo sapien
tcacatcaacctgcaacttactggt

SEQ ID NO: 2133375 - DNA, 25 bp, Homo sapien
tccttgagatgatgacgcccaacta

SEQ ID NO: 2133376 - DNA, 25 bp, Homo sapien
actaacacatcctgcctgttgtatg

SEQ ID NO: 2133377 - DNA, 25 bp, Homo sapien
catggtgccgttcttgtctgtgcta

SEQ ID NO: 2133378 - DNA, 25 bp, Homo sapien
aactgagaactactgaggttttgcc

SEQ ID NO: 2133379 - DNA, 25 bp, Homo sapien
ctttccaaaggtactcgtctgttat

SEQ ID NO: 2133380 - DNA, 25 bp, Homo sapien
tgagatagctccattgtggcgagag

SEQ ID NO: 2133381 - DNA, 25 bp, Homo sapien
tcacttagatgagatagctccattg

SEQ ID NO: 2133382 - DNA, 25 bp, Homo sapien
tggcgagagcgtgacctttccaaag

SEQ ID NO: 2133383 - DNA, 25 bp, Homo sapien
gaataattgtgggaggagtcttgca

SEQ ID NO: 2133384 - DNA, 25 bp, Homo sapien
tgctgcctcctgtaaaaagaattct

SEQ ID NO: 2133385 - DNA, 25 bp, Homo sapien
tatgtactagggattggaagctgac

SEQ ID NO: 2133386 - DNA, 25 bp, Homo sapien
aaaatggcttctcttacagtgtgca

SEQ ID NO: 2133387 - DNA, 25 bp, Homo sapien
gataaaggaagcaccatcccgagag

SEQ ID NO: 2133388 - DNA, 25 bp, Homo sapien
tatcatgggtaatctggatgggccc

SEQ ID NO: 2133389 - DNA, 25 bp, Homo sapien
caatgtgacatacgtagaagaccca

SEQ ID NO: 2133390 - DNA, 25 bp, Homo sapien
tccaactgggcctaaaagggacaga

SEQ ID NO: 2133391 - DNA, 25 bp, Homo sapien
tctggctcatctccaagaactagga

SEQ ID NO: 2133392 - DNA, 25 bp, Homo sapien
catcaaaaggtgatggctgaacctc

SEQ ID NO: 2133393 - DNA, 25 bp, Homo sapien
cactgggactctggacatctaaata

SEQ ID NO: 2133394 - DNA, 25 bp, Homo sapien
gctattctattgaaggctctccaga

SEQ ID NO: 2133395 - DNA, 25 bp, Homo sapien
tagcataattggagtacagccaaat

SEQ ID NO: 2133396 - DNA, 25 bp, Homo sapien
caactctgccttgatatttacactt

SEQ ID NO: 2133397 - DNA, 25 bp, Homo sapien
taagttccacatttacaactctgcc

SEQ ID NO: 2133398 - DNA, 25 bp, Homo sapien
tggatgctggaggcccatatataaa

SEQ ID NO: 2133399 - DNA, 25 bp, Homo sapien
atctgcacactcagatggtaggaag

SEQ ID NO: 2133400 - DNA, 25 bp, Homo sapien
cagaacactgaagaggtgactctga

SEQ ID NO: 2133401 - DNA, 25 bp, Homo sapien
gccaacagaacactgaagaggtgac

SEQ ID NO: 2133402 - DNA, 25 bp, Homo sapien
tctgaactgtatcacaccaagctgg

SEQ ID NO: 2133403 - DNA, 25 bp, Homo sapien
cgatcgagtttgaaggctttgtgca

SEQ ID NO: 2133404 - DNA, 25 bp, Homo sapien
tctgttgtatgctctaattcagccc

SEQ ID NO: 2133405 - DNA, 25 bp, Homo sapien
tctgtctgttgtatgctctaattca

SEQ ID NO: 2133406 - DNA, 25 bp, Homo sapien
gggagagtggagttggagtgtgcat

SEQ ID NO: 2133407 - DNA, 25 bp, Homo sapien
gtatgctctaattcagccctggagt

SEQ ID NO: 2133408 - DNA, 25 bp, Homo sapien
cagcaagtatcagcataggtaccat

SEQ ID NO: 2133409 - DNA, 25 bp, Homo sapien
aattagtttctattgttgattgccc

SEQ ID NO: 2133410 - DNA, 25 bp, Homo sapien
aagtatcagcataggtaccattagc

SEQ ID NO: 2133411 - DNA, 25 bp, Homo sapien
gattgcccaactgtttggtcaaaca

SEQ ID NO: 2133412 - DNA, 25 bp, Homo sapien
gcacagccaggtgcttttgttcagg

SEQ ID NO: 2133413 - DNA, 25 bp, Homo sapien
ctagcacagccaggtgcttttgttc

SEQ ID NO: 2133414 - DNA, 25 bp, Homo sapien
cacagccaggtgcttttgttcaggc

SEQ ID NO: 2133415 - DNA, 25 bp, Homo sapien
tagcacagccaggtgcttttgttca

SEQ ID NO: 2133416 - DNA, 25 bp, Homo sapien
ggaccactgaaactccctcgggctc

SEQ ID NO: 2133417 - DNA, 25 bp, Homo sapien
ccaatactgcatgtgaatctgtagg

SEQ ID NO: 2133418 - DNA, 25 bp, Homo sapien
ctgagattgccaatactgcatgtga

SEQ ID NO: 2133419 - DNA, 25 bp, Homo sapien
atgccattgtctcccggaccactga

SEQ ID NO: 2133420 - DNA, 25 bp, Homo sapien
tattcttggaaatgacttgaagtaa

SEQ ID NO: 2133421 - DNA, 25 bp, Homo sapien
tggaaatgacttgaagtaattacag

SEQ ID NO: 2133422 - DNA, 25 bp, Homo sapien
cagatataggtgaataattctgtct

SEQ ID NO: 2133423 - DNA, 25 bp, Homo sapien
cttggaaatgacttgaagtaattac

SEQ ID NO: 2133424 - DNA, 25 bp, Homo sapien
gcaagtgaaagtacgtatggaaaat

SEQ ID NO: 2133425 - DNA, 25 bp, Homo sapien
cactcaagggctgtgtagcagaagt

SEQ ID NO: 2133426 - DNA, 25 bp, Homo sapien
gatgataccttttcatagctccctg

SEQ ID NO: 2133427 - DNA, 25 bp, Homo sapien
tgttgaatccagaaagaaaacacct

SEQ ID NO: 2133428 - DNA, 25 bp, Homo sapien
gctgattgttatcaactctggctgc

SEQ ID NO: 2133429 - DNA, 25 bp, Homo sapien
gagctgattgttatcaactctggct

SEQ ID NO: 2133430 - DNA, 25 bp, Homo sapien
ttgagctgattgttatcaactctgg

SEQ ID NO: 2133431 - DNA, 25 bp, Homo sapien
ctgattgttatcaactctggctgcc

SEQ ID NO: 2133432 - DNA, 25 bp, Homo sapien
ctttgagcaagataatacaggttga

SEQ ID NO: 2133433 - DNA, 25 bp, Homo sapien
tataaatacctgacacaaactttgt

SEQ ID NO: 2133434 - DNA, 25 bp, Homo sapien
ttttgagtgccaatgtgatgccaca

SEQ ID NO: 2133435 - DNA, 25 bp, Homo sapien
gggcaattagaagtcacaaaaggac

SEQ ID NO: 2133436 - DNA, 25 bp, Homo sapien
gggatcaagatcctttgtgacagct

SEQ ID NO: 2133437 - DNA, 25 bp, Homo sapien
gttgaatgtggggatcaagatcctt

SEQ ID NO: 2133438 - DNA, 25 bp, Homo sapien
gaaaaatgctttttggagataccca

SEQ ID NO: 2133439 - DNA, 25 bp, Homo sapien
ctttgtgacagcttgcaagagggag

SEQ ID NO: 2133440 - DNA, 25 bp, Homo sapien
aagaggcatttgtggctgaccatag

SEQ ID NO: 2133441 - DNA, 25 bp, Homo sapien
tggctgaccatagataaggcactgt

SEQ ID NO: 2133442 - DNA, 25 bp, Homo sapien
ttgatggcgccttcatcaaagctgc

SEQ ID NO: 2133443 - DNA, 25 bp, Homo sapien
tagataaggcactgtttgatggcgc

SEQ ID NO: 2133444 - DNA, 25 bp, Homo sapien
ttagcttcacgaaatgcaacccaag

SEQ ID NO: 2133445 - DNA, 25 bp, Homo sapien
tcacgaaatgcaacccaagaccatc

SEQ ID NO: 2133446 - DNA, 25 bp, Homo sapien
gcttcacgaaatgcaacccaagacc

SEQ ID NO: 2133447 - DNA, 25 bp, Homo sapien
ctaattagcttcacgaaatgcaacc

SEQ ID NO: 2133448 - DNA, 25 bp, Homo sapien
gcagtaatcttaatgaactggagcc

SEQ ID NO: 2133449 - DNA, 25 bp, Homo sapien
tgaactggagcctgaaaaccatcaa

SEQ ID NO: 2133450 - DNA, 25 bp, Homo sapien
cagcagaggcaccaattgcagtaat

SEQ ID NO: 2133451 - DNA, 25 bp, Homo sapien
cagtagtgaaatcctcagcagaggc

SEQ ID NO: 2133452 - DNA, 25 bp, Homo sapien
aattagaccatttagtaggatcctc

SEQ ID NO: 2133453 - DNA, 25 bp, Homo sapien
tcctcagttataacagcatctgttt

SEQ ID NO: 2133454 - DNA, 25 bp, Homo sapien
taggatcctcagttataacagcatc

SEQ ID NO: 2133455 - DNA, 25 bp, Homo sapien
ttaattagaccatttagtaggatcc

SEQ ID NO: 2133456 - DNA, 25 bp, Homo sapien
ctcactcctgtgcctctatggggag

SEQ ID NO: 2133457 - DNA, 25 bp, Homo sapien
cactcctgtgcctctatggggagtg

SEQ ID NO: 2133458 - DNA, 25 bp, Homo sapien
ggggtggctgacggtcacattctct

SEQ ID NO: 2133459 - DNA, 25 bp, Homo sapien
ggtggctgacggtcacattctctca

SEQ ID NO: 2133460 - DNA, 25 bp, Homo sapien
cagcagcgtgcgttctgagtcacgt

SEQ ID NO: 2133461 - DNA, 25 bp, Homo sapien
cgtgcgttctgagtcacgtagagaa

SEQ ID NO: 2133462 - DNA, 25 bp, Homo sapien
cgttctgagtcacgtagagaacact

SEQ ID NO: 2133463 - DNA, 25 bp, Homo sapien
ctgagtcacgtagagaacactcttc

SEQ ID NO: 2133464 - DNA, 25 bp, Homo sapien
tttctcacaaccctctgattcagct

SEQ ID NO: 2133465 - DNA, 25 bp, Homo sapien
ggacacagatgcttacagtgtaggg

SEQ ID NO: 2133466 - DNA, 25 bp, Homo sapien
cgcccaaggagtgatataaaggtct

SEQ ID NO: 2133467 - DNA, 25 bp, Homo sapien
taaaggtctatatacaggacacaga

SEQ ID NO: 2133468 - DNA, 25 bp, Homo sapien
aacaagaactagatggagccaccat

SEQ ID NO: 2133469 - DNA, 25 bp, Homo sapien
gactggctggcttctagtccaaaga

SEQ ID NO: 2133470 - DNA, 25 bp, Homo sapien
cccaactcggcagactggctggctt

SEQ ID NO: 2133471 - DNA, 25 bp, Homo sapien
tggcttctagtccaaagacactttg

SEQ ID NO: 2133472 - DNA, 25 bp, Homo sapien
cctgagatttgattacccaactcgg

SEQ ID NO: 2133473 - DNA, 25 bp, Homo sapien
aaaattcgaatctttcagatttcag

SEQ ID NO: 2133474 - DNA, 25 bp, Homo sapien
aattcgaatctttcagatttcaggc

SEQ ID NO: 2133475 - DNA, 25 bp, Homo sapien
ctaaaattcgaatctttcagatttc

SEQ ID NO: 2133476 - DNA, 25 bp, Homo sapien
ttcgaatctttcagatttcaggcat

SEQ ID NO: 2133477 - DNA, 25 bp, Homo sapien
cacactcaacagtatcgctgaagag

SEQ ID NO: 2133478 - DNA, 25 bp, Homo sapien
actcaacagtatcgctgaagagatg

SEQ ID NO: 2133479 - DNA, 25 bp, Homo sapien
cactcaacagtatcgctgaagagat

SEQ ID NO: 2133480 - DNA, 25 bp, Homo sapien
cctcacactcaacagtatcgctgaa

SEQ ID NO: 2133481 - DNA, 25 bp, Homo sapien
ctcttcttccagtcatttgtagtct

SEQ ID NO: 2133482 - DNA, 25 bp, Homo sapien
cttcttccagtcatttgtagtctct

SEQ ID NO: 2133483 - DNA, 25 bp, Homo sapien
cttccagtcatttgtagtctctgca

SEQ ID NO: 2133484 - DNA, 25 bp, Homo sapien
tcttccagtcatttgtagtctctgc

SEQ ID NO: 2133485 - DNA, 25 bp, Homo sapien
accttccttgaagcgcggatggcgg

SEQ ID NO: 2133486 - DNA, 25 bp, Homo sapien
aggaggacggacgtctccgcgtcct

SEQ ID NO: 2133487 - DNA, 25 bp, Homo sapien
tcggtcccgtagtcggaaactgatg

SEQ ID NO: 2133488 - DNA, 25 bp, Homo sapien
gtggccgcgattacagacagaggtt

SEQ ID NO: 2133489 - DNA, 25 bp, Homo sapien
gagtaggaggcatagtggggaaggt

SEQ ID NO: 2133490 - DNA, 25 bp, Homo sapien
ggaggagtaggaggcatagtgggga

SEQ ID NO: 2133491 - DNA, 25 bp, Homo sapien
aggagtaggaggcatagtggggaag

SEQ ID NO: 2133492 - DNA, 25 bp, Homo sapien
ggagtaggaggcatagtggggaagg

SEQ ID NO: 2133493 - DNA, 25 bp, Homo sapien
gccatattaacaaggcgagccccgt

SEQ ID NO: 2133494 - DNA, 25 bp, Homo sapien
tacttgggcctgacaaccgtgaggt

SEQ ID NO: 2133495 - DNA, 25 bp, Homo sapien
caggtagaacctccatcggaacggg

SEQ ID NO: 2133496 - DNA, 25 bp, Homo sapien
ggttatccatgaaaacggtcctgcc

SEQ ID NO: 2133497 - DNA, 25 bp, Homo sapien
gagtgagtagctccaaggtgccact

SEQ ID NO: 2133498 - DNA, 25 bp, Homo sapien
caaatcaacttaagagcaagggcac

SEQ ID NO: 2133499 - DNA, 25 bp, Homo sapien
catgctgctccaatggcccagagat

SEQ ID NO: 2133500 - DNA, 25 bp, Homo sapien
catctggaccagtgtgaacgacaaa

SEQ ID NO: 2133501 - DNA, 25 bp, Homo sapien
catggggttagatcatgaatagatt

SEQ ID NO: 2133502 - DNA, 25 bp, Homo sapien
taatgctctccctgtttgtgagggc

SEQ ID NO: 2133503 - DNA, 25 bp, Homo sapien
atatgtgggtcatggggttagatca

SEQ ID NO: 2133504 - DNA, 25 bp, Homo sapien
ctattccttcccagaagacctggtt

SEQ ID NO: 2133505 - DNA, 25 bp, Homo sapien
cagaggctgtaaagaagtctaggtt

SEQ ID NO: 2133506 - DNA, 25 bp, Homo sapien
ggcactgcatacaggattctaggca

SEQ ID NO: 2133507 - DNA, 25 bp, Homo sapien
cactgcatacaggattctaggcacc

SEQ ID NO: 2133508 - DNA, 25 bp, Homo sapien
cgaagtagggcactgcatacaggat

SEQ ID NO: 2133509 - DNA, 25 bp, Homo sapien
tagggcactgcatacaggattctag

SEQ ID NO: 2133510 - DNA, 25 bp, Homo sapien
aattgtcgacaaaacctgatttcat

SEQ ID NO: 2133511 - DNA, 25 bp, Homo sapien
tgtacaaattgtcgacaaaacctga

SEQ ID NO: 2133512 - DNA, 25 bp, Homo sapien
tttaagctgtacaaattgtcgacaa

SEQ ID NO: 2133513 - DNA, 25 bp, Homo sapien
taagctgtacaaattgtcgacaaaa

SEQ ID NO: 2133514 - DNA, 25 bp, Homo sapien
tatagagatacaaataaccgtggca

SEQ ID NO: 2133515 - DNA, 25 bp, Homo sapien
tgatgtacaaggacagtagtggcac

SEQ ID NO: 2133516 - DNA, 25 bp, Homo sapien
tccaccgaagtaaagcatccatgcc

SEQ ID NO: 2133517 - DNA, 25 bp, Homo sapien
ccactgacgtggcagaagctgccct

SEQ ID NO: 2133518 - DNA, 25 bp, Homo sapien
tgtttatcaggctcaacccaaggtg

SEQ ID NO: 2133519 - DNA, 25 bp, Homo sapien
taagaatgtttatcaggctcaaccc

SEQ ID NO: 2133520 - DNA, 25 bp, Homo sapien
tcaggctcaacccaaggtgaaacaa

SEQ ID NO: 2133521 - DNA, 25 bp, Homo sapien
ccttgataagaatgtttatcaggct

SEQ ID NO: 2133522 - DNA, 25 bp, Homo sapien
atcaaacccagaagggtactgcatg

SEQ ID NO: 2133523 - DNA, 25 bp, Homo sapien
gaatcaaacccagaagggtactgca

SEQ ID NO: 2133524 - DNA, 25 bp, Homo sapien
cccagaagggtactgcatgtaatac

SEQ ID NO: 2133525 - DNA, 25 bp, Homo sapien
agggtactgcatgtaatacctttgc

SEQ ID NO: 2133526 - DNA, 25 bp, Homo sapien
cattttctgtaggtagtgtcacaaa

SEQ ID NO: 2133527 - DNA, 25 bp, Homo sapien
attttctgtaggtagtgtcacaaat

SEQ ID NO: 2133528 - DNA, 25 bp, Homo sapien
ttttctgtaggtagtgtcacaaatg

SEQ ID NO: 2133529 - DNA, 25 bp, Homo sapien
cttgcccattacctactttccccat

SEQ ID NO: 2133530 - DNA, 25 bp, Homo sapien
cacatccaagtgtctagcatccaca

SEQ ID NO: 2133531 - DNA, 25 bp, Homo sapien
aattcactagcaaatgagattgtga

SEQ ID NO: 2133532 - DNA, 25 bp, Homo sapien
gactagcgtgtatgtaatatcctcc

SEQ ID NO: 2133533 - DNA, 25 bp, Homo sapien
tgtattacttctaatatgcaccaca

SEQ ID NO: 2133534 - DNA, 25 bp, Homo sapien
cagcagtcatttctagcagcagggc

SEQ ID NO: 2133535 - DNA, 25 bp, Homo sapien
ttaaatctggaatactagagatatc

SEQ ID NO: 2133536 - DNA, 25 bp, Homo sapien
ttcatctgagaaagtaaagcttctg

SEQ ID NO: 2133537 - DNA, 25 bp, Homo sapien
taaagcttctgagggttaaatctgg

SEQ ID NO: 2133538 - DNA, 25 bp, Homo sapien
tcttgacattggagaatttttgttc

SEQ ID NO: 2133539 - DNA, 25 bp, Homo sapien
ctagcagattataatccacccagag

SEQ ID NO: 2133540 - DNA, 25 bp, Homo sapien
agattataatccacccagagaaaca

SEQ ID NO: 2133541 - DNA, 25 bp, Homo sapien
gcagattataatccacccagagaaa

SEQ ID NO: 2133542 - DNA, 25 bp, Homo sapien
tagcagattataatccacccagaga

SEQ ID NO: 2133543 - DNA, 25 bp, Homo sapien
ggaccactgattgacagttgctgac

SEQ ID NO: 2133544 - DNA, 25 bp, Homo sapien
tgtaagtccaccaaggaccactgat

SEQ ID NO: 2133545 - DNA, 25 bp, Homo sapien
gattgacagttgctgacataatgtc

SEQ ID NO: 2133546 - DNA, 25 bp, Homo sapien
atctgtctgcctgtaagtccaccaa

SEQ ID NO: 2133547 - DNA, 25 bp, Homo sapien
attttcctccatagctgtctcagtg

SEQ ID NO: 2133548 - DNA, 25 bp, Homo sapien
gattcacaagtagaacaccacagtc

SEQ ID NO: 2133549 - DNA, 25 bp, Homo sapien
tctcagtgaactgcgagttgtgctg

SEQ ID NO: 2133550 - DNA, 25 bp, Homo sapien
caatcttatttgagtatagcttgat

SEQ ID NO: 2133551 - DNA, 25 bp, Homo sapien
tacagctgtgtgaaaaccgttgcca

SEQ ID NO: 2133552 - DNA, 25 bp, Homo sapien
tgtgaaaaccgttgccaaaactggc

SEQ ID NO: 2133553 - DNA, 25 bp, Homo sapien
gcagatacagctgtgtgaaaaccgt

SEQ ID NO: 2133554 - DNA, 25 bp, Homo sapien
cttgcaaataggaagcagatacagc

SEQ ID NO: 2133555 - DNA, 25 bp, Homo sapien
tctgcagttgcttgtttgttttatt

SEQ ID NO: 2133556 - DNA, 25 bp, Homo sapien
tttctgcagttgcttgtttgtttta

SEQ ID NO: 2133557 - DNA, 25 bp, Homo sapien
ctttctgcagttgcttgtttgtttt

SEQ ID NO: 2133558 - DNA, 25 bp, Homo sapien
gcattttgtccagctgctttaaagc

SEQ ID NO: 2133559 - DNA, 25 bp, Homo sapien
tctctccagagaggaagatcccagc

SEQ ID NO: 2133560 - DNA, 25 bp, Homo sapien
ctttaaagcgctttgcttgcagcag

SEQ ID NO: 2133561 - DNA, 25 bp, Homo sapien
tccagctgctttaaagcgctttgct

SEQ ID NO: 2133562 - DNA, 25 bp, Homo sapien
cattctggtcaacaagtaattggag

SEQ ID NO: 2133563 - DNA, 25 bp, Homo sapien
gaataggttctcctagaattggaac

SEQ ID NO: 2133564 - DNA, 25 bp, Homo sapien
gggccatataaacagtgacattctg

SEQ ID NO: 2133565 - DNA, 25 bp, Homo sapien
tggcaaaaggcaatctttggcaaag

SEQ ID NO: 2133566 - DNA, 25 bp, Homo sapien
tctgtggtctaaattcatagcattt

SEQ ID NO: 2133567 - DNA, 25 bp, Homo sapien
aggaataaaattctggtccagtgtc

SEQ ID NO: 2133568 - DNA, 25 bp, Homo sapien
cagtgtctgtgatgaaaaaatagat

SEQ ID NO: 2133569 - DNA, 25 bp, Homo sapien
tgatgaagtggttctataaggaata

SEQ ID NO: 2133570 - DNA, 25 bp, Homo sapien
caaatgaagtaatgaatagtgactt

SEQ ID NO: 2133571 - DNA, 25 bp, Homo sapien
cttcatcttcaacagaggggcagct

SEQ ID NO: 2133572 - DNA, 25 bp, Homo sapien
tctgagctgcccctaattttcctgc

SEQ ID NO: 2133573 - DNA, 25 bp, Homo sapien
tgccactgtcaacagcaaagcagga

SEQ ID NO: 2133574 - DNA, 25 bp, Homo sapien
cagctgccactgtcaacagcaaagc

SEQ ID NO: 2133575 - DNA, 25 bp, Homo sapien
gaagtattaagacttgccagcagtc

SEQ ID NO: 2133576 - DNA, 25 bp, Homo sapien
cagcagtcagactttgcatttggcc

SEQ ID NO: 2133577 - DNA, 25 bp, Homo sapien
tgaaattaattgctcccagaagtga

SEQ ID NO: 2133578 - DNA, 25 bp, Homo sapien
gggtgcagcttatataaccgtctga

SEQ ID NO: 2133579 - DNA, 25 bp, Homo sapien
atcatgaataatgtaactacgggca

SEQ ID NO: 2133580 - DNA, 25 bp, Homo sapien
tgaataatgtaactacgggcaagtg

SEQ ID NO: 2133581 - DNA, 25 bp, Homo sapien
catgaataatgtaactacgggcaag

SEQ ID NO: 2133582 - DNA, 25 bp, Homo sapien
ataatgtaactacgggcaagtgtgg

SEQ ID NO: 2133583 - DNA, 25 bp, Homo sapien
tattgatagcatgagaatctactcc

SEQ ID NO: 2133584 - DNA, 25 bp, Homo sapien
tgcacataatcacatagctttgaat

SEQ ID NO: 2133585 - DNA, 25 bp, Homo sapien
aatcacatagctttgaattctgaca

SEQ ID NO: 2133586 - DNA, 25 bp, Homo sapien
ccacaacggtatttggttcaatgta

SEQ ID NO: 2133587 - DNA, 25 bp, Homo sapien
tataaatcctacagatattgccagg

SEQ ID NO: 2133588 - DNA, 25 bp, Homo sapien
caggatattgggatgttttatgaac

SEQ ID NO: 2133589 - DNA, 25 bp, Homo sapien
tattatcctgctattagtgaggcaa

SEQ ID NO: 2133590 - DNA, 25 bp, Homo sapien
tagaagagtgacatttcccaattca

SEQ ID NO: 2133591 - DNA, 25 bp, Homo sapien
cttaactgggacagtgacctcagtt

SEQ ID NO: 2133592 - DNA, 25 bp, Homo sapien
aactgggacagtgacctcagttagc

SEQ ID NO: 2133593 - DNA, 25 bp, Homo sapien
ttaactgggacagtgacctcagtta

SEQ ID NO: 2133594 - DNA, 25 bp, Homo sapien
taactgggacagtgacctcagttag

SEQ ID NO: 2133595 - DNA, 25 bp, Homo sapien
ctgcgtaacttagtgggcggaagtt

SEQ ID NO: 2133596 - DNA, 25 bp, Homo sapien
catacattgtagacttcgtttatat

SEQ ID NO: 2133597 - DNA, 25 bp, Homo sapien
atacattgtagacttcgtttatatc

SEQ ID NO: 2133598 - DNA, 25 bp, Homo sapien
cagttatgaggaccagagatgaggt

SEQ ID NO: 2133599 - DNA, 25 bp, Homo sapien
tgcagttatgaggaccagagatgag

SEQ ID NO: 2133600 - DNA, 25 bp, Homo sapien
cccactgacggtgcagttatgagga

SEQ ID NO: 2133601 - DNA, 25 bp, Homo sapien
tgacggtgcagttatgaggaccaga

SEQ ID NO: 2133602 - DNA, 25 bp, Homo sapien
tgttttatccctgaatacagcctct

SEQ ID NO: 2133603 - DNA, 25 bp, Homo sapien
gatgaattaccaactgagagtagtg

SEQ ID NO: 2133604 - DNA, 25 bp, Homo sapien
tttcaccacacaagtataaacttca

SEQ ID NO: 2133605 - DNA, 25 bp, Homo sapien
ttcctaaagatagacagatgagaga

SEQ ID NO: 2133606 - DNA, 25 bp, Homo sapien
tcttgtacttccataagcgactgag

SEQ ID NO: 2133607 - DNA, 25 bp, Homo sapien
attcttgtacttccataagcgactg

SEQ ID NO: 2133608 - DNA, 25 bp, Homo sapien
gtacttccataagcgactgagaatt

SEQ ID NO: 2133609 - DNA, 25 bp, Homo sapien
ttccataagcgactgagaatttttt

SEQ ID NO: 2133610 - DNA, 25 bp, Homo sapien
tattgctggctatgacaataccttt

SEQ ID NO: 2133611 - DNA, 25 bp, Homo sapien
ccaggattacgcctcttcttccaat

SEQ ID NO: 2133612 - DNA, 25 bp, Homo sapien
ggtcttattgctggctatgacaata

SEQ ID NO: 2133613 - DNA, 25 bp, Homo sapien
tggctatgacaataccttttcccag

SEQ ID NO: 2133614 - DNA, 25 bp, Homo sapien
tggaagttatcagaagacttaaggc

SEQ ID NO: 2133615 - DNA, 25 bp, Homo sapien
ttcattctttttgcgttggaagtta

SEQ ID NO: 2133616 - DNA, 25 bp, Homo sapien
acttaaggcgggtgtgaacactgtc

SEQ ID NO: 2133617 - DNA, 25 bp, Homo sapien
tatcagaagacttaaggcgggtgtg

SEQ ID NO: 2133618 - DNA, 25 bp, Homo sapien
tccctttcatagatgcagtctcctt

SEQ ID NO: 2133619 - DNA, 25 bp, Homo sapien
caggcccttctggaacattataccc

SEQ ID NO: 2133620 - DNA, 25 bp, Homo sapien
cttctggaacattataccctatcat

SEQ ID NO: 2133621 - DNA, 25 bp, Homo sapien
gcccttctggaacattataccctat

SEQ ID NO: 2133622 - DNA, 25 bp, Homo sapien
ccacaggcccttctggaacattata

SEQ ID NO: 2133623 - DNA, 25 bp, Homo sapien
caacaaaaattgagtctgggctggc

SEQ ID NO: 2133624 - DNA, 25 bp, Homo sapien
ctctggggctgtacccgaagaaagt

SEQ ID NO: 2133625 - DNA, 25 bp, Homo sapien
tattcaacaaaaattgagtctgggc

SEQ ID NO: 2133626 - DNA, 25 bp, Homo sapien
actctggggctgtacccgaagaaag

SEQ ID NO: 2133627 - DNA, 25 bp, Homo sapien
atcttcacaatcagtcatcattgac

SEQ ID NO: 2133628 - DNA, 25 bp, Homo sapien
cacggattaatggacagggttgtca

SEQ ID NO: 2133629 - DNA, 25 bp, Homo sapien
gcatccagggagcacggattaatgg

SEQ ID NO: 2133630 - DNA, 25 bp, Homo sapien
cagatgaattggctcgattttccat

SEQ ID NO: 2133631 - DNA, 25 bp, Homo sapien
tgcaatgctgcacaaggtacaaatt

SEQ ID NO: 2133632 - DNA, 25 bp, Homo sapien
accttgctaccagcgtcagacttct

SEQ ID NO: 2133633 - DNA, 25 bp, Homo sapien
gctaccagcgtcagacttcttagct

SEQ ID NO: 2133634 - DNA, 25 bp, Homo sapien
ttgctaccagcgtcagacttcttag

SEQ ID NO: 2133635 - DNA, 25 bp, Homo sapien
ttcaccttgctaccagcgtcagact

SEQ ID NO: 2133636 - DNA, 25 bp, Homo sapien
agtttaaccaacctggtactgctat

SEQ ID NO: 2133637 - DNA, 25 bp, Homo sapien
taatatctaggccctttgagaagtt

SEQ ID NO: 2133638 - DNA, 25 bp, Homo sapien
ggctcaaaatctttcgagtcatatc

SEQ ID NO: 2133639 - DNA, 25 bp, Homo sapien
tgactgaagggatttttgacatggc

SEQ ID NO: 2133640 - DNA, 25 bp, Homo sapien
aggtccagtcataagtaacaggtca

SEQ ID NO: 2133641 - DNA, 25 bp, Homo sapien
tcataagtaacaggtcactagccag

SEQ ID NO: 2133642 - DNA, 25 bp, Homo sapien
tccagtcataagtaacaggtcacta

SEQ ID NO: 2133643 - DNA, 25 bp, Homo sapien
cagtcataagtaacaggtcactagc

SEQ ID NO: 2133644 - DNA, 25 bp, Homo sapien
gttttccgatcaactttgcactgct

SEQ ID NO: 2133645 - DNA, 25 bp, Homo sapien
gtccacagttttccgatcaactttg

SEQ ID NO: 2133646 - DNA, 25 bp, Homo sapien
ttttccgatcaactttgcactgctc

SEQ ID NO: 2133647 - DNA, 25 bp, Homo sapien
gagtccacagttttccgatcaactt

SEQ ID NO: 2133648 - DNA, 25 bp, Homo sapien
tccaatggatacgacaggaggcagg

SEQ ID NO: 2133649 - DNA, 25 bp, Homo sapien
attctgtgttctactttctgcgccc

SEQ ID NO: 2133650 - DNA, 25 bp, Homo sapien
tgctggctagaagagagcggttccc

SEQ ID NO: 2133651 - DNA, 25 bp, Homo sapien
gaggagaacctttccggagcaaaga

SEQ ID NO: 2133652 - DNA, 25 bp, Homo sapien
tttgcttaacctttagcttgtccat

SEQ ID NO: 2133653 - DNA, 25 bp, Homo sapien
taaacataccccaagactttgctta

SEQ ID NO: 2133654 - DNA, 25 bp, Homo sapien
catatcctaaacataccccaagact

SEQ ID NO: 2133655 - DNA, 25 bp, Homo sapien
caagactttgcttaacctttagctt

SEQ ID NO: 2133656 - DNA, 25 bp, Homo sapien
aatccctccttggttacagtgctct

SEQ ID NO: 2133657 - DNA, 25 bp, Homo sapien
tacatcattataacccagcgccttt

SEQ ID NO: 2133658 - DNA, 25 bp, Homo sapien
actctggtagacatgatcacttctg

SEQ ID NO: 2133659 - DNA, 25 bp, Homo sapien
cagcgccttttctgggcttactaaa

SEQ ID NO: 2133660 - DNA, 25 bp, Homo sapien
aagaacatataaaccaagtacctca

SEQ ID NO: 2133661 - DNA, 25 bp, Homo sapien
agaacatataaaccaagtacctcac

SEQ ID NO: 2133662 - DNA, 25 bp, Homo sapien
ggttctggtgagtatgattagagtg

SEQ ID NO: 2133663 - DNA, 25 bp, Homo sapien
ttctggtgagtatgattagagtgat

SEQ ID NO: 2133664 - DNA, 25 bp, Homo sapien
gggttctggtgagtatgattagagt

SEQ ID NO: 2133665 - DNA, 25 bp, Homo sapien
gttctggtgagtatgattagagtga

SEQ ID NO: 2133666 - DNA, 25 bp, Homo sapien
gctgagcttctacataaagggcatc

SEQ ID NO: 2133667 - DNA, 25 bp, Homo sapien
tcaaagtcctgcactatgcctagtg

SEQ ID NO: 2133668 - DNA, 25 bp, Homo sapien
ttctttggtttggtaacagcaggta

SEQ ID NO: 2133669 - DNA, 25 bp, Homo sapien
caggtaaatggaggatgagatattc

SEQ ID NO: 2133670 - DNA, 25 bp, Homo sapien
cttccttctttatggacaagttaga

SEQ ID NO: 2133671 - DNA, 25 bp, Homo sapien
ctttctagcactgtcttgttgcagg

SEQ ID NO: 2133672 - DNA, 25 bp, Homo sapien
aagttagaatagtatgtgtttgcct

SEQ ID NO: 2133673 - DNA, 25 bp, Homo sapien
cagtaatagcctcattggaaatccc

SEQ ID NO: 2133674 - DNA, 25 bp, Homo sapien
gccattttacaatggcggccctggg

SEQ ID NO: 2133675 - DNA, 25 bp, Homo sapien
taaatattggccacttggcactgct

SEQ ID NO: 2133676 - DNA, 25 bp, Homo sapien
tatatggtccctagcaaactttgcc

SEQ ID NO: 2133677 - DNA, 25 bp, Homo sapien
cactgctagagtcagatagtaaggg

SEQ ID NO: 2133678 - DNA, 25 bp, Homo sapien
ttctacaacatttttggcgtccgga

SEQ ID NO: 2133679 - DNA, 25 bp, Homo sapien
cctcttccgagggtagaagaaactg

SEQ ID NO: 2133680 - DNA, 25 bp, Homo sapien
tgagtaatatgcgaaccaatttttt

SEQ ID NO: 2133681 - DNA, 25 bp, Homo sapien
gcttgaagaagggtgagtaatatgc

SEQ ID NO: 2133682 - DNA, 25 bp, Homo sapien
gtctatgcaagatacaagcccctga

SEQ ID NO: 2133683 - DNA, 25 bp, Homo sapien
tagttataaagctccccacagagtc

SEQ ID NO: 2133684 - DNA, 25 bp, Homo sapien
gtagttcggcttctccctgtgacca

SEQ ID NO: 2133685 - DNA, 25 bp, Homo sapien
tctgtgtgcaactgaagctcgatcc

SEQ ID NO: 2133686 - DNA, 25 bp, Homo sapien
taccagatggccattagtggtgggc

SEQ ID NO: 2133687 - DNA, 25 bp, Homo sapien
ggtgatgctgatatgagccttttcc

SEQ ID NO: 2133688 - DNA, 25 bp, Homo sapien
gaatcttgatgtccaatgacggtga

SEQ ID NO: 2133689 - DNA, 25 bp, Homo sapien
gtgggcttgcccgaatcttgatgtc

SEQ ID NO: 2133690 - DNA, 25 bp, Homo sapien
aggctgatgaaagggcttgtcagtt

SEQ ID NO: 2133691 - DNA, 25 bp, Homo sapien
ggtttgagaatactagcctccattt

SEQ ID NO: 2133692 - DNA, 25 bp, Homo sapien
tagcctccatttggccaccagggac

SEQ ID NO: 2133693 - DNA, 25 bp, Homo sapien
agacattctggagaggctgatgaaa

SEQ ID NO: 2133694 - DNA, 25 bp, Homo sapien
gagcagtgaagccaattggttgatt

SEQ ID NO: 2133695 - DNA, 25 bp, Homo sapien
gttgattatgtttgctgtcaccagc

SEQ ID NO: 2133696 - DNA, 25 bp, Homo sapien
caattggttgattatgtttgctgtc

SEQ ID NO: 2133697 - DNA, 25 bp, Homo sapien
aagccaattggttgattatgtttgc

SEQ ID NO: 2133698 - DNA, 25 bp, Homo sapien
cttttactattaaatggtcaactga

SEQ ID NO: 2133699 - DNA, 25 bp, Homo sapien
tactattaaatggtcaactgaaaca

SEQ ID NO: 2133700 - DNA, 25 bp, Homo sapien
gaatatttggtgaccttgtcagctc

SEQ ID NO: 2133701 - DNA, 25 bp, Homo sapien
catatcaccaagagcaaaacaatcc

SEQ ID NO: 2133702 - DNA, 25 bp, Homo sapien
tgcaatcagggcagtgtcaaagtga

SEQ ID NO: 2133703 - DNA, 25 bp, Homo sapien
ggcctataattgtgctgatgtcatc

SEQ ID NO: 2133704 - DNA, 25 bp, Homo sapien
taggatatctgcaatcagggcagtg

SEQ ID NO: 2133705 - DNA, 25 bp, Homo sapien
catagaactattcattaggatatct

SEQ ID NO: 2133706 - DNA, 25 bp, Homo sapien
ggccacatcctttttgaaaccttca

SEQ ID NO: 2133707 - DNA, 25 bp, Homo sapien
tctggaaagaatttaatccctcttg

SEQ ID NO: 2133708 - DNA, 25 bp, Homo sapien
taatccctcttgtactccattatga

SEQ ID NO: 2133709 - DNA, 25 bp, Homo sapien
tcccacctctggaaagaatttaatc

SEQ ID NO: 2133710 - DNA, 25 bp, Homo sapien
gctgaaggatgcttcttgagtacat

SEQ ID NO: 2133711 - DNA, 25 bp, Homo sapien
tgaaggatgcttcttgagtacattg

SEQ ID NO: 2133712 - DNA, 25 bp, Homo sapien
aacatcaccaacagataggctgggg

SEQ ID NO: 2133713 - DNA, 25 bp, Homo sapien
ggctgaaggatgcttcttgagtaca

SEQ ID NO: 2133714 - DNA, 25 bp, Homo sapien
taagcaagccaactgatgattgttg

SEQ ID NO: 2133715 - DNA, 25 bp, Homo sapien
tgatgattgttgagtgaatggaaga

SEQ ID NO: 2133716 - DNA, 25 bp, Homo sapien
ccaactgatgattgttgagtgaatg

SEQ ID NO: 2133717 - DNA, 25 bp, Homo sapien
agtaagcaagccaactgatgattgt

SEQ ID NO: 2133718 - DNA, 25 bp, Homo sapien
gaataccttcattatatggaggaga

SEQ ID NO: 2133719 - DNA, 25 bp, Homo sapien
ctataacaaatcattgttgtagcca

SEQ ID NO: 2133720 - DNA, 25 bp, Homo sapien
aacaaatcattgttgtagccaatac

SEQ ID NO: 2133721 - DNA, 25 bp, Homo sapien
taacaaatcattgttgtagccaata

SEQ ID NO: 2133722 - DNA, 25 bp, Homo sapien
tataacaaatcattgttgtagccaa

SEQ ID NO: 2133723 - DNA, 25 bp, Homo sapien
gaactgtccagccaaatgcacgtac

SEQ ID NO: 2133724 - DNA, 25 bp, Homo sapien
tccctggtgtcaacaatgggccata

SEQ ID NO: 2133725 - DNA, 25 bp, Homo sapien
tcttaagaggcttggttttgcctgc

SEQ ID NO: 2133726 - DNA, 25 bp, Homo sapien
catatcctgaccctagccttctaga

SEQ ID NO: 2133727 - DNA, 25 bp, Homo sapien
ttatagcaggtatcgaaattctaca

SEQ ID NO: 2133728 - DNA, 25 bp, Homo sapien
cgaaattctacagcgctggaagcca

SEQ ID NO: 2133729 - DNA, 25 bp, Homo sapien
tctacagcgctggaagccatctcca

SEQ ID NO: 2133730 - DNA, 25 bp, Homo sapien
ggtatcgaaattctacagcgctgga

SEQ ID NO: 2133731 - DNA, 25 bp, Homo sapien
cttggtttttaccactttgacatca

SEQ ID NO: 2133732 - DNA, 25 bp, Homo sapien
tggtttttaccactttgacatcatt

SEQ ID NO: 2133733 - DNA, 25 bp, Homo sapien
gtttttaccactttgacatcattca

SEQ ID NO: 2133734 - DNA, 25 bp, Homo sapien
tctcttggtttttaccactttgaca

SEQ ID NO: 2133735 - DNA, 25 bp, Homo sapien
tgaagtatcattgataacagtgtca

SEQ ID NO: 2133736 - DNA, 25 bp, Homo sapien
tgcagagtcaaaggccaacaagctt

SEQ ID NO: 2133737 - DNA, 25 bp, Homo sapien
gataacagtgtcaaaaagattgtgc

SEQ ID NO: 2133738 - DNA, 25 bp, Homo sapien
aaaagattgtgcagagtcaaaggcc

SEQ ID NO: 2133739 - DNA, 25 bp, Homo sapien
tttggtgccattagatttgctgtct

SEQ ID NO: 2133740 - DNA, 25 bp, Homo sapien
tgccatcgcagtaacagacagctct

SEQ ID NO: 2133741 - DNA, 25 bp, Homo sapien
tgccattagatttgctgtctgccat

SEQ ID NO: 2133742 - DNA, 25 bp, Homo sapien
taacagacagctctggagcagatgt

SEQ ID NO: 2133743 - DNA, 25 bp, Homo sapien
tagtatcccaaggacacagtaaaga

SEQ ID NO: 2133744 - DNA, 25 bp, Homo sapien
ctagtatcccaaggacacagtaaag

SEQ ID NO: 2133745 - DNA, 25 bp, Homo sapien
gaatgcagattcacagcatggccag

SEQ ID NO: 2133746 - DNA, 25 bp, Homo sapien
cagtaaagaatgcagattcacagca

SEQ ID NO: 2133747 - DNA, 25 bp, Homo sapien
cctagcaggatctgctcctctggtt

SEQ ID NO: 2133748 - DNA, 25 bp, Homo sapien
tgtgtcttcgttctccacaaggttt

SEQ ID NO: 2133749 - DNA, 25 bp, Homo sapien
tcgttctccacaaggtttctttgaa

SEQ ID NO: 2133750 - DNA, 25 bp, Homo sapien
tgctgtgtcttcgttctccacaagg

SEQ ID NO: 2133751 - DNA, 25 bp, Homo sapien
tgtcttcgttctccacaaggtttct

SEQ ID NO: 2133752 - DNA, 25 bp, Homo sapien
caggttttactagcaatggcattgt

SEQ ID NO: 2133753 - DNA, 25 bp, Homo sapien
tgtgacagagcaggttttactagca

SEQ ID NO: 2133754 - DNA, 25 bp, Homo sapien
gttgcaggatcaggccatgtgacag

SEQ ID NO: 2133755 - DNA, 25 bp, Homo sapien
aatggcattgttgacctcagatgag

SEQ ID NO: 2133756 - DNA, 25 bp, Homo sapien
ttccccgatcatttctattccctaa

SEQ ID NO: 2133757 - DNA, 25 bp, Homo sapien
tgtaaaatagcagccaaaaagggag

SEQ ID NO: 2133758 - DNA, 25 bp, Homo sapien
gtctcttccccgatcatttctattc

SEQ ID NO: 2133759 - DNA, 25 bp, Homo sapien
ggagtggtctcttccccgatcattt

SEQ ID NO: 2133760 - DNA, 25 bp, Homo sapien
gcctagatttgatgtcacatccagg

SEQ ID NO: 2133761 - DNA, 25 bp, Homo sapien
tatatgctctcagaaactgtttgtc

SEQ ID NO: 2133762 - DNA, 25 bp, Homo sapien
aatgtttgcctcatgcagacaactt

SEQ ID NO: 2133763 - DNA, 25 bp, Homo sapien
gagatacgagtagcagctggtcaca

SEQ ID NO: 2133764 - DNA, 25 bp, Homo sapien
ctaaagatgtggcacttgatcagag

SEQ ID NO: 2133765 - DNA, 25 bp, Homo sapien
aaagatgtggcacttgatcagagac

SEQ ID NO: 2133766 - DNA, 25 bp, Homo sapien
taaagatgtggcacttgatcagaga

SEQ ID NO: 2133767 - DNA, 25 bp, Homo sapien
ctctaaagatgtggcacttgatcag

SEQ ID NO: 2133768 - DNA, 25 bp, Homo sapien
gaaataatgccgcatatctacaact

SEQ ID NO: 2133769 - DNA, 25 bp, Homo sapien
aatgccgcatatctacaactatctg

SEQ ID NO: 2133770 - DNA, 25 bp, Homo sapien
ataatgccgcatatctacaactatc

SEQ ID NO: 2133771 - DNA, 25 bp, Homo sapien
ctcagaaataatgccgcatatctac

SEQ ID NO: 2133772 - DNA, 25 bp, Homo sapien
tacttgaaaagaggcttcattgtta

SEQ ID NO: 2133773 - DNA, 25 bp, Homo sapien
ctttacttgaaaagaggcttcattg

SEQ ID NO: 2133774 - DNA, 25 bp, Homo sapien
gaaaagaggcttcattgttaatgtg

SEQ ID NO: 2133775 - DNA, 25 bp, Homo sapien
aagaggcttcattgttaatgtgtac

SEQ ID NO: 2133776 - DNA, 25 bp, Homo sapien
gagtaatctggacccacaaactgca

SEQ ID NO: 2133777 - DNA, 25 bp, Homo sapien
cataaatggaggtttagggtgctta

SEQ ID NO: 2133778 - DNA, 25 bp, Homo sapien
tttcataaatggaggtttagggtgc

SEQ ID NO: 2133779 - DNA, 25 bp, Homo sapien
ttagggtgcttaatgagtaatctgg

SEQ ID NO: 2133780 - DNA, 25 bp, Homo sapien
aaagcagtattctatgtgggaagca

SEQ ID NO: 2133781 - DNA, 25 bp, Homo sapien
tttgcacactgggtaaatagaccca

SEQ ID NO: 2133782 - DNA, 25 bp, Homo sapien
caaatcttggtgtcagtgtttagct

SEQ ID NO: 2133783 - DNA, 25 bp, Homo sapien
tcactgcgttattgagcactcctta

SEQ ID NO: 2133784 - DNA, 25 bp, Homo sapien
ctttccatatttggcttctccctgg

SEQ ID NO: 2133785 - DNA, 25 bp, Homo sapien
gataggtctctggtcctgactttcc

SEQ ID NO: 2133786 - DNA, 25 bp, Homo sapien
tggtcctgactttccatatttggct

SEQ ID NO: 2133787 - DNA, 25 bp, Homo sapien
ccatatttggcttctccctggctct

SEQ ID NO: 2133788 - DNA, 25 bp, Homo sapien
tagaatgatggatccatgcttctta

SEQ ID NO: 2133789 - DNA, 25 bp, Homo sapien
agtagaatgatggatccatgcttct

SEQ ID NO: 2133790 - DNA, 25 bp, Homo sapien
gagtagaatgatggatccatgcttc

SEQ ID NO: 2133791 - DNA, 25 bp, Homo sapien
gaatgatggatccatgcttcttaat

SEQ ID NO: 2133792 - DNA, 25 bp, Homo sapien
tctgtctcctctgatttatcagcca

SEQ ID NO: 2133793 - DNA, 25 bp, Homo sapien
gctctgtctcctctgatttatcagc

SEQ ID NO: 2133794 - DNA, 25 bp, Homo sapien
ctgtctcctctgatttatcagccat

SEQ ID NO: 2133795 - DNA, 25 bp, Homo sapien
tggctctgtctcctctgatttatca

SEQ ID NO: 2133796 - DNA, 25 bp, Homo sapien
caatacttcctcaagctttttgtta

SEQ ID NO: 2133797 - DNA, 25 bp, Homo sapien
ccaatacttcctcaagctttttgtt

SEQ ID NO: 2133798 - DNA, 25 bp, Homo sapien
caaacctgcaggtcccgagttagca

SEQ ID NO: 2133799 - DNA, 25 bp, Homo sapien
ggagccatacagtcccttcactttt

SEQ ID NO: 2133800 - DNA, 25 bp, Homo sapien
tctgctttgtagtgccaaaaccttc

SEQ ID NO: 2133801 - DNA, 25 bp, Homo sapien
gatgtaacaaactatccattgagaa

SEQ ID NO: 2133802 - DNA, 25 bp, Homo sapien
tattccccatataaagtctgactgt

SEQ ID NO: 2133803 - DNA, 25 bp, Homo sapien
caaccgagcagactgttaaacacct

SEQ ID NO: 2133804 - DNA, 25 bp, Homo sapien
gactgtatactgtgtcctcaaagat

SEQ ID NO: 2133805 - DNA, 25 bp, Homo sapien
cctcaaagatataagggctgcaacc

SEQ ID NO: 2133806 - DNA, 25 bp, Homo sapien
tgtgtgtgtgtaagccctcttctgc

SEQ ID NO: 2133807 - DNA, 25 bp, Homo sapien
tccaagggagacaggagcatgactt

SEQ ID NO: 2133808 - DNA, 25 bp, Homo sapien
tatgggcagtctagaggtcccttgt

SEQ ID NO: 2133809 - DNA, 25 bp, Homo sapien
gagcggacagtatacctcactgagg

SEQ ID NO: 2133810 - DNA, 25 bp, Homo sapien
cacatccctttctatctgtattcct

SEQ ID NO: 2133811 - DNA, 25 bp, Homo sapien
tcctattcatgagtatggaacgttt

SEQ ID NO: 2133812 - DNA, 25 bp, Homo sapien
ttctagaagaggttcttcacatccc

SEQ ID NO: 2133813 - DNA, 25 bp, Homo sapien
tatacattgactttgcatcctgaga

SEQ ID NO: 2133814 - DNA, 25 bp, Homo sapien
taatatcctggaagtacttctccat

SEQ ID NO: 2133815 - DNA, 25 bp, Homo sapien
ctcttttatgcctgtagggtaaaat

SEQ ID NO: 2133816 - DNA, 25 bp, Homo sapien
gtaatcaccaactcttttatgcctg

SEQ ID NO: 2133817 - DNA, 25 bp, Homo sapien
taacactggtgtttgtgagtaatca

SEQ ID NO: 2133818 - DNA, 25 bp, Homo sapien
cttctcctccactctatagtgacat

SEQ ID NO: 2133819 - DNA, 25 bp, Homo sapien
tctcctccactctatagtgacatct

SEQ ID NO: 2133820 - DNA, 25 bp, Homo sapien
tcctccactctatagtgacatcttg

SEQ ID NO: 2133821 - DNA, 25 bp, Homo sapien
cctccactctatagtgacatcttgt

SEQ ID NO: 2133822 - DNA, 25 bp, Homo sapien
taatcattacatttaggattctggt

SEQ ID NO: 2133823 - DNA, 25 bp, Homo sapien
tcatctgaataagggtccaaaaaag

SEQ ID NO: 2133824 - DNA, 25 bp, Homo sapien
atctttggctctctcgcaaagcccc

SEQ ID NO: 2133825 - DNA, 25 bp, Homo sapien
gcccccctgggtatgctcataatca

SEQ ID NO: 2133826 - DNA, 25 bp, Homo sapien
tgtaaaatagacaagttctcatgca

SEQ ID NO: 2133827 - DNA, 25 bp, Homo sapien
aaatagacaagttctcatgcaccat

SEQ ID NO: 2133828 - DNA, 25 bp, Homo sapien
cttgtaaaatagacaagttctcatg

SEQ ID NO: 2133829 - DNA, 25 bp, Homo sapien
taaaatagacaagttctcatgcacc

SEQ ID NO: 2133830 - DNA, 25 bp, Homo sapien
gaacagctgcttgtgatgacatagg

SEQ ID NO: 2133831 - DNA, 25 bp, Homo sapien
gacataggcagtcttctccagcctt

SEQ ID NO: 2133832 - DNA, 25 bp, Homo sapien
tcccctgtttgggataggaacagct

SEQ ID NO: 2133833 - DNA, 25 bp, Homo sapien
tcaggcagcagtttacgcctttctc

SEQ ID NO: 2133834 - DNA, 25 bp, Homo sapien
cacctgaacttggttcatgagaggg

SEQ ID NO: 2133835 - DNA, 25 bp, Homo sapien
gctttaagaatagttccacctgaac

SEQ ID NO: 2133836 - DNA, 25 bp, Homo sapien
tgggaagtgctccacctttgcatga

SEQ ID NO: 2133837 - DNA, 25 bp, Homo sapien
gctttccaaaagaggttggctgcca

SEQ ID NO: 2133838 - DNA, 25 bp, Homo sapien
gagtcacaaatttactgaagtctcc

SEQ ID NO: 2133839 - DNA, 25 bp, Homo sapien
agagtcacaaatttactgaagtctc

SEQ ID NO: 2133840 - DNA, 25 bp, Homo sapien
aaaaactgtccacagggtcaaccat

SEQ ID NO: 2133841 - DNA, 25 bp, Homo sapien
ccctaggtagaaatctatcagtact

SEQ ID NO: 2133842 - DNA, 25 bp, Homo sapien
caatcttccctaggtagaaatctat

SEQ ID NO: 2133843 - DNA, 25 bp, Homo sapien
tagaaatctatcagtacttcatggc

SEQ ID NO: 2133844 - DNA, 25 bp, Homo sapien
tcagtacttcatggctagaagtcat

SEQ ID NO: 2133845 - DNA, 25 bp, Homo sapien
ttccacttcttagatgcctaacacc

SEQ ID NO: 2133846 - DNA, 25 bp, Homo sapien
gcctaacaccaatctctaactcctc

SEQ ID NO: 2133847 - DNA, 25 bp, Homo sapien
ggtttgcataagtaccatgtctgat

SEQ ID NO: 2133848 - DNA, 25 bp, Homo sapien
aagacctactgtggaggtttgcata

SEQ ID NO: 2133849 - DNA, 25 bp, Homo sapien
catttccatcaaggtgctcagcaaa

SEQ ID NO: 2133850 - DNA, 25 bp, Homo sapien
ggtcctccagtaaacaggattcagc

SEQ ID NO: 2133851 - DNA, 25 bp, Homo sapien
cctgctaccacagttttcatgatca

SEQ ID NO: 2133852 - DNA, 25 bp, Homo sapien
cagcaaagcaaaggtcctccagtaa

SEQ ID NO: 2133853 - DNA, 25 bp, Homo sapien
cactgagaaaacttcgttttggcga

SEQ ID NO: 2133854 - DNA, 25 bp, Homo sapien
ctgagaaaacttcgttttggcgact

SEQ ID NO: 2133855 - DNA, 25 bp, Homo sapien
gttttggcgacttcttttagatgaa

SEQ ID NO: 2133856 - DNA, 25 bp, Homo sapien
tcgttttggcgacttcttttagatg

SEQ ID NO: 2133857 - DNA, 25 bp, Homo sapien
ttacattacctgttttcagacccat

SEQ ID NO: 2133858 - DNA, 25 bp, Homo sapien
cttacattacctgttttcagaccca

SEQ ID NO: 2133859 - DNA, 25 bp, Homo sapien
agcagcctctgtggttggttctttt

SEQ ID NO: 2133860 - DNA, 25 bp, Homo sapien
caataacatgtaaatcagcagcctc

SEQ ID NO: 2133861 - DNA, 25 bp, Homo sapien
tcatcctcactgaaactcaacttgg

SEQ ID NO: 2133862 - DNA, 25 bp, Homo sapien
tgttgtcactcttcctactagcttc

SEQ ID NO: 2133863 - DNA, 25 bp, Homo sapien
atgagtttcaccaataccgtagtac

SEQ ID NO: 2133864 - DNA, 25 bp, Homo sapien
gagtttcaccaataccgtagtacca

SEQ ID NO: 2133865 - DNA, 25 bp, Homo sapien
ttcaccaataccgtagtaccaagat

SEQ ID NO: 2133866 - DNA, 25 bp, Homo sapien
caccaataccgtagtaccaagataa

SEQ ID NO: 2133867 - DNA, 25 bp, Homo sapien
tttcatcagcatactgccttttcct

SEQ ID NO: 2133868 - DNA, 25 bp, Homo sapien
tcatcagcatactgccttttcctaa

SEQ ID NO: 2133869 - DNA, 25 bp, Homo sapien
ctctttcatcagcatactgcctttt

SEQ ID NO: 2133870 - DNA, 25 bp, Homo sapien
catcagcatactgccttttcctaaa

SEQ ID NO: 2133871 - DNA, 25 bp, Homo sapien
ggcaaatgctgcttaccgtcacttt

SEQ ID NO: 2133872 - DNA, 25 bp, Homo sapien
cacttttcccagagatagttcatca

SEQ ID NO: 2133873 - DNA, 25 bp, Homo sapien
tatccaaagacgaagtttaccagca

SEQ ID NO: 2133874 - DNA, 25 bp, Homo sapien
cacatggtaaatagttcaagcagaa

SEQ ID NO: 2133875 - DNA, 25 bp, Homo sapien
aaattaccactttgctttgatgtca

SEQ ID NO: 2133876 - DNA, 25 bp, Homo sapien
tcattatcttaatatcctgggaaga

SEQ ID NO: 2133877 - DNA, 25 bp, Homo sapien
tttttgtgccttaattgaagcctcc

SEQ ID NO: 2133878 - DNA, 25 bp, Homo sapien
tcttataagtatattcctcaaatgt

SEQ ID NO: 2133879 - DNA, 25 bp, Homo sapien
taatccacttgtaccattaggacag

SEQ ID NO: 2133880 - DNA, 25 bp, Homo sapien
gctgaagtctcttgtagctcccaaa

SEQ ID NO: 2133881 - DNA, 25 bp, Homo sapien
aagattctggcgctatcaacctgca

SEQ ID NO: 2133882 - DNA, 25 bp, Homo sapien
gacctccacagatgaatcagtgctg

SEQ ID NO: 2133883 - DNA, 25 bp, Homo sapien
gatgcctggtacacttgaaggactt

SEQ ID NO: 2133884 - DNA, 25 bp, Homo sapien
ctcagagaattcattaagtggtgcc

SEQ ID NO: 2133885 - DNA, 25 bp, Homo sapien
acttctcagatctattgttaggtcc

SEQ ID NO: 2133886 - DNA, 25 bp, Homo sapien
gctgaccttgagatttctcgctatt

SEQ ID NO: 2133887 - DNA, 25 bp, Homo sapien
ctaagagcttttgttgtgacttttg

SEQ ID NO: 2133888 - DNA, 25 bp, Homo sapien
gatggattaggcagcatatcagcaa

SEQ ID NO: 2133889 - DNA, 25 bp, Homo sapien
ttgttgtgacttttgatggattagg

SEQ ID NO: 2133890 - DNA, 25 bp, Homo sapien
agacaacgtctttcaccctaagagc

SEQ ID NO: 2133891 - DNA, 25 bp, Homo sapien
tctgtagtaatttgtgagtagagcc

SEQ ID NO: 2133892 - DNA, 25 bp, Homo sapien
catatccactctcctcattgaggca

SEQ ID NO: 2133893 - DNA, 25 bp, Homo sapien
tagagccttggacgtgatacttcgc

SEQ ID NO: 2133894 - DNA, 25 bp, Homo sapien
gaggcaactgccatacagatctgaa

SEQ ID NO: 2133895 - DNA, 25 bp, Homo sapien
tgttgtctgtcagcacagactctgg

SEQ ID NO: 2133896 - DNA, 25 bp, Homo sapien
cagactctggcagaatgctgttttc

SEQ ID NO: 2133897 - DNA, 25 bp, Homo sapien
ctgtggaaaagactggatgactaat

SEQ ID NO: 2133898 - DNA, 25 bp, Homo sapien
tattactcctaatggcttttttcaa

SEQ ID NO: 2133899 - DNA, 25 bp, Homo sapien
agttagttataactttctctggtgc

SEQ ID NO: 2133900 - DNA, 25 bp, Homo sapien
tagttagttataactttctctggtg

SEQ ID NO: 2133901 - DNA, 25 bp, Homo sapien
ttagttataactttctctggtgcct

SEQ ID NO: 2133902 - DNA, 25 bp, Homo sapien
gttagttataactttctctggtgcc

SEQ ID NO: 2133903 - DNA, 25 bp, Homo sapien
taatgctgagaattctctcatgtaa

SEQ ID NO: 2133904 - DNA, 25 bp, Homo sapien
taaccacccacaagttaatgctgag

SEQ ID NO: 2133905 - DNA, 25 bp, Homo sapien
catctcttaaccacccacaagttaa

SEQ ID NO: 2133906 - DNA, 25 bp, Homo sapien
gaatagctttcaaatctgttgggtt

SEQ ID NO: 2133907 - DNA, 25 bp, Homo sapien
ctgccacatcacttattttgtccca

SEQ ID NO: 2133908 - DNA, 25 bp, Homo sapien
gtctgccacatcacttattttgtcc

SEQ ID NO: 2133909 - DNA, 25 bp, Homo sapien
tattcacttagtgcattttctgtag

SEQ ID NO: 2133910 - DNA, 25 bp, Homo sapien
tctgtagcaatacttttgacagcat

SEQ ID NO: 2133911 - DNA, 25 bp, Homo sapien
tctccaaactggttcgtccactcac

SEQ ID NO: 2133912 - DNA, 25 bp, Homo sapien
tcgtccactcacagttactcttggt

SEQ ID NO: 2133913 - DNA, 25 bp, Homo sapien
tccaaactggttcgtccactcacag

SEQ ID NO: 2133914 - DNA, 25 bp, Homo sapien
ctcacagttactcttggtcttaaag

SEQ ID NO: 2133915 - DNA, 25 bp, Homo sapien
tgaggaacctgaaactttggcagtt

SEQ ID NO: 2133916 - DNA, 25 bp, Homo sapien
tatattgaggaacctgaaactttgg

SEQ ID NO: 2133917 - DNA, 25 bp, Homo sapien
ccttatattgaggaacctgaaactt

SEQ ID NO: 2133918 - DNA, 25 bp, Homo sapien
ttgaggaacctgaaactttggcagt

SEQ ID NO: 2133919 - DNA, 25 bp, Homo sapien
caaccacccggacttttctgatatg

SEQ ID NO: 2133920 - DNA, 25 bp, Homo sapien
caacgtgggaaaccaaagggtgatg

SEQ ID NO: 2133921 - DNA, 25 bp, Homo sapien
gaaggcaagtgattccggattcctg

SEQ ID NO: 2133922 - DNA, 25 bp, Homo sapien
ctcactccgcattttgccagaaggc

SEQ ID NO: 2133923 - DNA, 25 bp, Homo sapien
agctgaacaagtggtacaatcccat

SEQ ID NO: 2133924 - DNA, 25 bp, Homo sapien
gacatatttggtaaaggcaagtcca

SEQ ID NO: 2133925 - DNA, 25 bp, Homo sapien
gggagttatgcaaatccaatttcag

SEQ ID NO: 2133926 - DNA, 25 bp, Homo sapien
ggagttatgcaaatccaatttcaga

SEQ ID NO: 2133927 - DNA, 25 bp, Homo sapien
tgaactactgacatatttggtaaag

SEQ ID NO: 2133928 - DNA, 25 bp, Homo sapien
attcagcaaacacttatgctcctcc

SEQ ID NO: 2133929 - DNA, 25 bp, Homo sapien
tcagcaaacacttatgctcctccat

SEQ ID NO: 2133930 - DNA, 25 bp, Homo sapien
cattcagcaaacacttatgctcctc

SEQ ID NO: 2133931 - DNA, 25 bp, Homo sapien
ttcagcaaacacttatgctcctcca

SEQ ID NO: 2133932 - DNA, 25 bp, Homo sapien
aacttcaagtttcattgtaatggag

SEQ ID NO: 2133933 - DNA, 25 bp, Homo sapien
ttcaagtttcattgtaatggagaat

SEQ ID NO: 2133934 - DNA, 25 bp, Homo sapien
caagtttcattgtaatggagaatgg

SEQ ID NO: 2133935 - DNA, 25 bp, Homo sapien
acttcaagtttcattgtaatggaga

SEQ ID NO: 2133936 - DNA, 25 bp, Homo sapien
ggcaatcaggaattttaacagcacc

SEQ ID NO: 2133937 - DNA, 25 bp, Homo sapien
caatcaggaattttaacagcaccaa

SEQ ID NO: 2133938 - DNA, 25 bp, Homo sapien
ggaattttaacagcaccaatatcaa

SEQ ID NO: 2133939 - DNA, 25 bp, Homo sapien
aaaaggcaatcaggaattttaacag

SEQ ID NO: 2133940 - DNA, 25 bp, Homo sapien
gacggcagaagatgtatcagtctgt

SEQ ID NO: 2133941 - DNA, 25 bp, Homo sapien
atcaggatgacagtggaatgggacc

SEQ ID NO: 2133942 - DNA, 25 bp, Homo sapien
tctgaattttttacgatggtttcca

SEQ ID NO: 2133943 - DNA, 25 bp, Homo sapien
gaatgggaccatacagacgtaggtg

SEQ ID NO: 2133944 - DNA, 25 bp, Homo sapien
ctgccaatgcacttttttcccaata

SEQ ID NO: 2133945 - DNA, 25 bp, Homo sapien
gtactgtttctttgtcaagcaggag

SEQ ID NO: 2133946 - DNA, 25 bp, Homo sapien
actgccaatgcacttttttcccaat

SEQ ID NO: 2133947 - DNA, 25 bp, Homo sapien
tcccaataaactgccggtgtactgt

SEQ ID NO: 2133948 - DNA, 25 bp, Homo sapien
cactgctttccctgcgagggcattt

SEQ ID NO: 2133949 - DNA, 25 bp, Homo sapien
ctttccctgcgagggcatttgccaa

SEQ ID NO: 2133950 - DNA, 25 bp, Homo sapien
actgctttccctgcgagggcatttg

SEQ ID NO: 2133951 - DNA, 25 bp, Homo sapien
tgctttccctgcgagggcatttgcc

SEQ ID NO: 2133952 - DNA, 25 bp, Homo sapien
actggctgaatttcacagtgcccat

SEQ ID NO: 2133953 - DNA, 25 bp, Homo sapien
gcactggctgaatttcacagtgccc

SEQ ID NO: 2133954 - DNA, 25 bp, Homo sapien
ctggttggcactggctgaatttcac

SEQ ID NO: 2133955 - DNA, 25 bp, Homo sapien
tggcactggctgaatttcacagtgc

SEQ ID NO: 2133956 - DNA, 25 bp, Homo sapien
atgaggctctgtataactagatgac

SEQ ID NO: 2133957 - DNA, 25 bp, Homo sapien
gaggctctgtataactagatgacta

SEQ ID NO: 2133958 - DNA, 25 bp, Homo sapien
gaatgaggctctgtataactagatg

SEQ ID NO: 2133959 - DNA, 25 bp, Homo sapien
ctctgtataactagatgactatttg

SEQ ID NO: 2133960 - DNA, 25 bp, Homo sapien
tatgggagtagcttgtaggtccttg

SEQ ID NO: 2133961 - DNA, 25 bp, Homo sapien
catgggctatatgggagtagcttgt

SEQ ID NO: 2133962 - DNA, 25 bp, Homo sapien
aatttgagagcataggatggccacc

SEQ ID NO: 2133963 - DNA, 25 bp, Homo sapien
ctttgtggcaggaagacatgggcta

SEQ ID NO: 2133964 - DNA, 25 bp, Homo sapien
tgatttgtgaagtaatgatgctgaa

SEQ ID NO: 2133965 - DNA, 25 bp, Homo sapien
gggaagagcatgtcatcataaaact

SEQ ID NO: 2133966 - DNA, 25 bp, Homo sapien
tcagcattgtggcaaggaaaatatt

SEQ ID NO: 2133967 - DNA, 25 bp, Homo sapien
ccagttggaaaggtaaagtattcag

SEQ ID NO: 2133968 - DNA, 25 bp, Homo sapien
tctctggtagtactaaggctatttt

SEQ ID NO: 2133969 - DNA, 25 bp, Homo sapien
cttcatctctggtagtactaaggct

SEQ ID NO: 2133970 - DNA, 25 bp, Homo sapien
tagggaagtttggtatagtgcttcc

SEQ ID NO: 2133971 - DNA, 25 bp, Homo sapien
gggaagtttggtatagtgcttccat

SEQ ID NO: 2133972 - DNA, 25 bp, Homo sapien
ttccaaggcaactggtaatgcaaga

SEQ ID NO: 2133973 - DNA, 25 bp, Homo sapien
caactggtaatgcaagaagtctaga

SEQ ID NO: 2133974 - DNA, 25 bp, Homo sapien
tatggtccaaatatagtcttcagag

SEQ ID NO: 2133975 - DNA, 25 bp, Homo sapien
gaagtctagaggcatatggtccaaa

SEQ ID NO: 2133976 - DNA, 25 bp, Homo sapien
catccgtctttggtcagtacgttaa

SEQ ID NO: 2133977 - DNA, 25 bp, Homo sapien
gaacatccgtctttggtcagtacgt

SEQ ID NO: 2133978 - DNA, 25 bp, Homo sapien
tggagaacatccgtctttggtcagt

SEQ ID NO: 2133979 - DNA, 25 bp, Homo sapien
tctcatggagaacatccgtctttgg

SEQ ID NO: 2133980 - DNA, 25 bp, Homo sapien
ccagattatctgatgattaaggcca

SEQ ID NO: 2133981 - DNA, 25 bp, Homo sapien
gccttgcagtaataattagggaatg

SEQ ID NO: 2133982 - DNA, 25 bp, Homo sapien
taacaatgtttagttgccttgcagt

SEQ ID NO: 2133983 - DNA, 25 bp, Homo sapien
tccactcttgagtagtcagcataac

SEQ ID NO: 2133984 - DNA, 25 bp, Homo sapien
gtgttttcccaaatgactatagcag

SEQ ID NO: 2133985 - DNA, 25 bp, Homo sapien
ttccaggaatactggccagagggcc

SEQ ID NO: 2133986 - DNA, 25 bp, Homo sapien
tctgctggcagctcgtgccattgtt

SEQ ID NO: 2133987 - DNA, 25 bp, Homo sapien
catcataaatctgaagcggacctgg

SEQ ID NO: 2133988 - DNA, 25 bp, Homo sapien
gctgatgtcagtgttatatcttcca

SEQ ID NO: 2133989 - DNA, 25 bp, Homo sapien
ttttgctgatggattaggccccggg

SEQ ID NO: 2133990 - DNA, 25 bp, Homo sapien
caagtgacacgacaaatgatctgcc

SEQ ID NO: 2133991 - DNA, 25 bp, Homo sapien
tgttttcctgttagccctgtgcagt

SEQ ID NO: 2133992 - DNA, 25 bp, Homo sapien
gcttctgacggctgctggaatgcca

SEQ ID NO: 2133993 - DNA, 25 bp, Homo sapien
aatggcgtgctatgtttgttaatgc

SEQ ID NO: 2133994 - DNA, 25 bp, Homo sapien
tagaatggcgtgctatgtttgttaa

SEQ ID NO: 2133995 - DNA, 25 bp, Homo sapien
cactgagtttagaatggcgtgctat

SEQ ID NO: 2133996 - DNA, 25 bp, Homo sapien
tgagtttagaatggcgtgctatgtt

SEQ ID NO: 2133997 - DNA, 25 bp, Homo sapien
tgagcactatcatcttgatcttggc

SEQ ID NO: 2133998 - DNA, 25 bp, Homo sapien
gaggtttcctagtctgtatgctgag

SEQ ID NO: 2133999 - DNA, 25 bp, Homo sapien
taaatgacccataaagctaagctcc

SEQ ID NO: 2134000 - DNA, 25 bp, Homo sapien
ctgaaaaccagtatcgtggccccca

SEQ ID NO: 2134001 - DNA, 25 bp, Homo sapien
tattattgcaactattgatgtagaa

SEQ ID NO: 2134002 - DNA, 25 bp, Homo sapien
ttcatgctataaaccaacacaatca

SEQ ID NO: 2134003 - DNA, 25 bp, Homo sapien
gaatgtaagagcagagtgatttgca

SEQ ID NO: 2134004 - DNA, 25 bp, Homo sapien
gatttagtggtttgtgagagcctcc

SEQ ID NO: 2134005 - DNA, 25 bp, Homo sapien
cagcaagcctggaattaggtaattc

SEQ ID NO: 2134006 - DNA, 25 bp, Homo sapien
gcagctctataatccctgggtatgg

SEQ ID NO: 2134007 - DNA, 25 bp, Homo sapien
ccacggacgtttcagcagctctata

SEQ ID NO: 2134008 - DNA, 25 bp, Homo sapien
taggtaattccacggacgtttcagc

SEQ ID NO: 2134009 - DNA, 25 bp, Homo sapien
ttactggttattgtttttgctgctt

SEQ ID NO: 2134010 - DNA, 25 bp, Homo sapien
tgctgctttcttctggggattgctt

SEQ ID NO: 2134011 - DNA, 25 bp, Homo sapien
tttgctgctttcttctggggattgc

SEQ ID NO: 2134012 - DNA, 25 bp, Homo sapien
tttttgctgctttcttctggggatt

SEQ ID NO: 2134013 - DNA, 25 bp, Homo sapien
ctggagggtgagttcataatttcct

SEQ ID NO: 2134014 - DNA, 25 bp, Homo sapien
tggagggtgagttcataatttcctg

SEQ ID NO: 2134015 - DNA, 25 bp, Homo sapien
ggagggtgagttcataatttcctgg

SEQ ID NO: 2134016 - DNA, 25 bp, Homo sapien
taatggagtctgatggttcatcttt

SEQ ID NO: 2134017 - DNA, 25 bp, Homo sapien
tataatggagtctgatggttcatct

SEQ ID NO: 2134018 - DNA, 25 bp, Homo sapien
agattataatggagtctgatggttc

SEQ ID NO: 2134019 - DNA, 25 bp, Homo sapien
gattataatggagtctgatggttca

SEQ ID NO: 2134020 - DNA, 25 bp, Homo sapien
tgagcacaagaaggcttcctttccc

SEQ ID NO: 2134021 - DNA, 25 bp, Homo sapien
cagtgagcacaagaaggcttccttt

SEQ ID NO: 2134022 - DNA, 25 bp, Homo sapien
ggcagtgagcacaagaaggcttcct

SEQ ID NO: 2134023 - DNA, 25 bp, Homo sapien
agcacaagaaggcttcctttcccag

SEQ ID NO: 2134024 - DNA, 25 bp, Homo sapien
gctttcagatggcaagtcaaatatt

SEQ ID NO: 2134025 - DNA, 25 bp, Homo sapien
tctctcccaacacgttgtgaggaag

SEQ ID NO: 2134026 - DNA, 25 bp, Homo sapien
tgacctggaccaatccctcttgagg

SEQ ID NO: 2134027 - DNA, 25 bp, Homo sapien
ttaaatctctcccaacacgttgtga

SEQ ID NO: 2134028 - DNA, 25 bp, Homo sapien
gttgggctgtaagtattcattctgc

SEQ ID NO: 2134029 - DNA, 25 bp, Homo sapien
ggctgcccctttgatgccttcaggt

SEQ ID NO: 2134030 - DNA, 25 bp, Homo sapien
aaagtgaagcaacaggagaggctct

SEQ ID NO: 2134031 - DNA, 25 bp, Homo sapien
gctgcagagaaagccctgacaagtt

SEQ ID NO: 2134032 - DNA, 25 bp, Homo sapien
ctgacttcgcacagaacaaggctgc

SEQ ID NO: 2134033 - DNA, 25 bp, Homo sapien
agcattcacgacctccaactaaggg

SEQ ID NO: 2134034 - DNA, 25 bp, Homo sapien
ctccttcctaccccagtgaataccg

SEQ ID NO: 2134035 - DNA, 25 bp, Homo sapien
atttcacagcattcacgacctccaa

SEQ ID NO: 2134036 - DNA, 25 bp, Homo sapien
ttcctaccccagtgaataccgttgc

SEQ ID NO: 2134037 - DNA, 25 bp, Homo sapien
tagagggatgcaagtacagtatgtc

SEQ ID NO: 2134038 - DNA, 25 bp, Homo sapien
gggatgcaagtacagtatgtctcat

SEQ ID NO: 2134039 - DNA, 25 bp, Homo sapien
gaaatttagagggatgcaagtacag

SEQ ID NO: 2134040 - DNA, 25 bp, Homo sapien
aagtacagtatgtctcattaagcag

SEQ ID NO: 2134041 - DNA, 25 bp, Homo sapien
tgtcaaccttagcaaacaaaccagc

SEQ ID NO: 2134042 - DNA, 25 bp, Homo sapien
aactgaaagttgctgtcaaccttag

SEQ ID NO: 2134043 - DNA, 25 bp, Homo sapien
ttagcaaacaaaccagctaacacca

SEQ ID NO: 2134044 - DNA, 25 bp, Homo sapien
ccattacagcactggttaagtagat

SEQ ID NO: 2134045 - DNA, 25 bp, Homo sapien
cattgtaggtcattagggaaaactg

SEQ ID NO: 2134046 - DNA, 25 bp, Homo sapien
cgctcttggtaaagaataacccaca

SEQ ID NO: 2134047 - DNA, 25 bp, Homo sapien
ccttgtctgatacatagattggaag

SEQ ID NO: 2134048 - DNA, 25 bp, Homo sapien
caaacacctgatcttgattggaaag

SEQ ID NO: 2134049 - DNA, 25 bp, Homo sapien
taggtatgaacattatgggtgccat

SEQ ID NO: 2134050 - DNA, 25 bp, Homo sapien
catagcacttagctcgtggatgctt

SEQ ID NO: 2134051 - DNA, 25 bp, Homo sapien
tagctcgtggatgcttgtctgaatc

SEQ ID NO: 2134052 - DNA, 25 bp, Homo sapien
cttgtctgaatcattaggtatgaac

SEQ ID NO: 2134053 - DNA, 25 bp, Homo sapien
tccagctgtgtaaacatgattgcag

SEQ ID NO: 2134054 - DNA, 25 bp, Homo sapien
tgcagaacttaagtatcgtctaatg

SEQ ID NO: 2134055 - DNA, 25 bp, Homo sapien
tggcacaccatagctgggctggagc

SEQ ID NO: 2134056 - DNA, 25 bp, Homo sapien
ccctgcggagtcggcttgctcagct

SEQ ID NO: 2134057 - DNA, 25 bp, Homo sapien
acgctgtagccctgtctgccagact

SEQ ID NO: 2134058 - DNA, 25 bp, Homo sapien
ccagattccggtggtactgaagtag

SEQ ID NO: 2134059 - DNA, 25 bp, Homo sapien
ggcagatgtttctaccaccgttatg

SEQ ID NO: 2134060 - DNA, 25 bp, Homo sapien
gaaagtacccattcccacgctgtag

SEQ ID NO: 2134061 - DNA, 25 bp, Homo sapien
gatccccctggacctgaattagcat

SEQ ID NO: 2134062 - DNA, 25 bp, Homo sapien
ttagatccccctggacctgaattag

SEQ ID NO: 2134063 - DNA, 25 bp, Homo sapien
gaacaaagcggttgattagatcccc

SEQ ID NO: 2134064 - DNA, 25 bp, Homo sapien
ctttacgtgaacaaagcggttgatt

SEQ ID NO: 2134065 - DNA, 25 bp, Homo sapien
caacagcctgaaggatagtggacat

SEQ ID NO: 2134066 - DNA, 25 bp, Homo sapien
gagagtgaccaaactgacagtgagc

SEQ ID NO: 2134067 - DNA, 25 bp, Homo sapien
tgagcatgatgtccagcggagcctg

SEQ ID NO: 2134068 - DNA, 25 bp, Homo sapien
tactgctgtcaacgatgtgctgaac

SEQ ID NO: 2134069 - DNA, 25 bp, Homo sapien
gggccatagaattgtctccactggg

SEQ ID NO: 2134070 - DNA, 25 bp, Homo sapien
taaggattgtaggtcacgttgtctc

SEQ ID NO: 2134071 - DNA, 25 bp, Homo sapien
gtctcttctcagtaagtggttgcat

SEQ ID NO: 2134072 - DNA, 25 bp, Homo sapien
ccagtcaatttgatgggccatagaa

SEQ ID NO: 2134073 - DNA, 25 bp, Homo sapien
aaacaaaggccttcctgcataacca

SEQ ID NO: 2134074 - DNA, 25 bp, Homo sapien
ttttaggcatagtatttgtttgctt

SEQ ID NO: 2134075 - DNA, 25 bp, Homo sapien
cttttgtatctgtgataaaacaaag

SEQ ID NO: 2134076 - DNA, 25 bp, Homo sapien
tttgcttttgtatctgtgataaaac

SEQ ID NO: 2134077 - DNA, 25 bp, Homo sapien
cagtctgctgtaaccagattaaaca

SEQ ID NO: 2134078 - DNA, 25 bp, Homo sapien
ctctaatgataggagctgagacagg

SEQ ID NO: 2134079 - DNA, 25 bp, Homo sapien
caacctctgggtgatcattagctgt

SEQ ID NO: 2134080 - DNA, 25 bp, Homo sapien
gtttcacatgaaaggctttggcacc

SEQ ID NO: 2134081 - DNA, 25 bp, Homo sapien
agcctttgccggctgggctgaccgt

SEQ ID NO: 2134082 - DNA, 25 bp, Homo sapien
gatggagcctttgccggctgggctg

SEQ ID NO: 2134083 - DNA, 25 bp, Homo sapien
tgccggctgggctgaccgtacacat

SEQ ID NO: 2134084 - DNA, 25 bp, Homo sapien
cctttgccggctgggctgaccgtac

SEQ ID NO: 2134085 - DNA, 25 bp, Homo sapien
tattttcgctcccaaatctgatttc

SEQ ID NO: 2134086 - DNA, 25 bp, Homo sapien
gattattttcgctcccaaatctgat

SEQ ID NO: 2134087 - DNA, 25 bp, Homo sapien
ctggattattttcgctcccaaatct

SEQ ID NO: 2134088 - DNA, 25 bp, Homo sapien
ttttcgctcccaaatctgatttcca

SEQ ID NO: 2134089 - DNA, 25 bp, Homo sapien
catctggccgctgttctgtggcaag

SEQ ID NO: 2134090 - DNA, 25 bp, Homo sapien
cactgtcttgatgtgcatagtcttc

SEQ ID NO: 2134091 - DNA, 25 bp, Homo sapien
gatgtgcatagtcttctgatgctcc

SEQ ID NO: 2134092 - DNA, 25 bp, Homo sapien
agcactggccttggcggtctctgcc

SEQ ID NO: 2134093 - DNA, 25 bp, Homo sapien
acgccgcccgacccgcagccctggg

SEQ ID NO: 2134094 - DNA, 25 bp, Homo sapien
gctgccgacagtcgcgcccggctaa

SEQ ID NO: 2134095 - DNA, 25 bp, Homo sapien
tccaggccgcgcagacgccgcccga

SEQ ID NO: 2134096 - DNA, 25 bp, Homo sapien
ggcggctgccgacagtcgcgcccgg

SEQ ID NO: 2134097 - DNA, 25 bp, Homo sapien
attggccagggcctggcgtagccgg

SEQ ID NO: 2134098 - DNA, 25 bp, Homo sapien
tttctccagactccgcggccagtag

SEQ ID NO: 2134099 - DNA, 25 bp, Homo sapien
cggccagtagtttgcggcatccgga

SEQ ID NO: 2134100 - DNA, 25 bp, Homo sapien
tcggcagcttgagctttctccggct

SEQ ID NO: 2134101 - DNA, 25 bp, Homo sapien
caaaggtgaacttcgctgcttgatc

SEQ ID NO: 2134102 - DNA, 25 bp, Homo sapien
agaaccttgctatttatctccttgg

SEQ ID NO: 2134103 - DNA, 25 bp, Homo sapien
tcatggcagacttgaattgtgagtc

SEQ ID NO: 2134104 - DNA, 25 bp, Homo sapien
tctgcactgctagttcctggtttgg

SEQ ID NO: 2134105 - DNA, 25 bp, Homo sapien
tgaatcaagaaatctcaactccgag

SEQ ID NO: 2134106 - DNA, 25 bp, Homo sapien
tctcaactccgagcaacaggaggtt

SEQ ID NO: 2134107 - DNA, 25 bp, Homo sapien
caggaggttaaatactggttgatga

SEQ ID NO: 2134108 - DNA, 25 bp, Homo sapien
gttgtaagtctccaatccacagcct

SEQ ID NO: 2134109 - DNA, 25 bp, Homo sapien
gtatggttaaggtattgtgaatcac

SEQ ID NO: 2134110 - DNA, 25 bp, Homo sapien
ccagtcttttgagtatggttaaggt

SEQ ID NO: 2134111 - DNA, 25 bp, Homo sapien
tggaactgtccagtcttttgagtat

SEQ ID NO: 2134112 - DNA, 25 bp, Homo sapien
taaggtattgtgaatcacacatgcc

SEQ ID NO: 2134113 - DNA, 25 bp, Homo sapien
ttgttttcaggataaccgtgtgtta

SEQ ID NO: 2134114 - DNA, 25 bp, Homo sapien
ttttcaggataaccgtgtgttagag

SEQ ID NO: 2134115 - DNA, 25 bp, Homo sapien
tgttttcaggataaccgtgtgttag

SEQ ID NO: 2134116 - DNA, 25 bp, Homo sapien
ttcaggataaccgtgtgttagaggc

SEQ ID NO: 2134117 - DNA, 25 bp, Homo sapien
caccttgggttctcgtggctggaag

SEQ ID NO: 2134118 - DNA, 25 bp, Homo sapien
ctgaacctacgggaactgattggag

SEQ ID NO: 2134119 - DNA, 25 bp, Homo sapien
gaccacagtggacaatctgaaccta

SEQ ID NO: 2134120 - DNA, 25 bp, Homo sapien
tatggtgccaatcataagccacctt

SEQ ID NO: 2134121 - DNA, 25 bp, Homo sapien
ggccacaagcctatccagagttccc

SEQ ID NO: 2134122 - DNA, 25 bp, Homo sapien
gccacaagcctatccagagttcccg

SEQ ID NO: 2134123 - DNA, 25 bp, Homo sapien
tttcatcatgtcctgctttttctcc

SEQ ID NO: 2134124 - DNA, 25 bp, Homo sapien
tcatcatgtcctgctttttctccat

SEQ ID NO: 2134125 - DNA, 25 bp, Homo sapien
ctttcatcatgtcctgctttttctc

SEQ ID NO: 2134126 - DNA, 25 bp, Homo sapien
ttcatcatgtcctgctttttctcca

SEQ ID NO: 2134127 - DNA, 25 bp, Homo sapien
gccactaggcattggacagagacca

SEQ ID NO: 2134128 - DNA, 25 bp, Homo sapien
cagccactaggcattggacagagac

SEQ ID NO: 2134129 - DNA, 25 bp, Homo sapien
tccagccactaggcattggacagag

SEQ ID NO: 2134130 - DNA, 25 bp, Homo sapien
ccactaggcattggacagagaccag

SEQ ID NO: 2134131 - DNA, 25 bp, Homo sapien
ttgaaggcttttggcatgctgatgc

SEQ ID NO: 2134132 - DNA, 25 bp, Homo sapien
catttgaaggcttttggcatgctga

SEQ ID NO: 2134133 - DNA, 25 bp, Homo sapien
ctgttgaggaatgtgagggccattt

SEQ ID NO: 2134134 - DNA, 25 bp, Homo sapien
agggccatttgaaggcttttggcat

SEQ ID NO: 2134135 - DNA, 25 bp, Homo sapien
actgtcagacaagtggtggtgttat

SEQ ID NO: 2134136 - DNA, 25 bp, Homo sapien
ctttttgatgggaaaaccacaacat

SEQ ID NO: 2134137 - DNA, 25 bp, Homo sapien
cacaaagcggccttgaggaatagcc

SEQ ID NO: 2134138 - DNA, 25 bp, Homo sapien
gaagtgaggctttagttaagtctgc

SEQ ID NO: 2134139 - DNA, 25 bp, Homo sapien
ttagcctactagaggagatactgcc

SEQ ID NO: 2134140 - DNA, 25 bp, Homo sapien
gcctactagaggagatactgcctca

SEQ ID NO: 2134141 - DNA, 25 bp, Homo sapien
tagcctactagaggagatactgcct

SEQ ID NO: 2134142 - DNA, 25 bp, Homo sapien
cctactagaggagatactgcctcac

SEQ ID NO: 2134143 - DNA, 25 bp, Homo sapien
tggtttgaatagcttgtgaaagtgg

SEQ ID NO: 2134144 - DNA, 25 bp, Homo sapien
gtttgaatagcttgtgaaagtgggg

SEQ ID NO: 2134145 - DNA, 25 bp, Homo sapien
tgttgctgttgccgtagttgtttgg

SEQ ID NO: 2134146 - DNA, 25 bp, Homo sapien
ggtttgaatagcttgtgaaagtggg

SEQ ID NO: 2134147 - DNA, 25 bp, Homo sapien
agagtaatggcaagtttcaaggtca

SEQ ID NO: 2134148 - DNA, 25 bp, Homo sapien
aatggcaagtttcaaggtcattggc

SEQ ID NO: 2134149 - DNA, 25 bp, Homo sapien
gagtaatggcaagtttcaaggtcat

SEQ ID NO: 2134150 - DNA, 25 bp, Homo sapien
gtaatggcaagtttcaaggtcattg

SEQ ID NO: 2134151 - DNA, 25 bp, Homo sapien
gccctttgtgcacagaaatcaataa

SEQ ID NO: 2134152 - DNA, 25 bp, Homo sapien
tgtcatcagggagtggcctgccctt

SEQ ID NO: 2134153 - DNA, 25 bp, Homo sapien
agggagtggcctgccctttgtgcac

SEQ ID NO: 2134154 - DNA, 25 bp, Homo sapien
tgtgcacagaaatcaataattgtca

SEQ ID NO: 2134155 - DNA, 25 bp, Homo sapien
tcagtcaactgtggcctgattagag

SEQ ID NO: 2134156 - DNA, 25 bp, Homo sapien
caactgtggcctgattagagggagc

SEQ ID NO: 2134157 - DNA, 25 bp, Homo sapien
aactgtggcctgattagagggagca

SEQ ID NO: 2134158 - DNA, 25 bp, Homo sapien
gtcaactgtggcctgattagaggga

SEQ ID NO: 2134159 - DNA, 25 bp, Homo sapien
aatatcgtgaaaatggccatactgc

SEQ ID NO: 2134160 - DNA, 25 bp, Homo sapien
aggaagaatcaatatcgtgaaaatg

SEQ ID NO: 2134161 - DNA, 25 bp, Homo sapien
ggaagaacatttcatgctcatgggt

SEQ ID NO: 2134162 - DNA, 25 bp, Homo sapien
tggaagaacatttcatgctcatggg

SEQ ID NO: 2134163 - DNA, 25 bp, Homo sapien
aagttgaggaagtctgattcatcag

SEQ ID NO: 2134164 - DNA, 25 bp, Homo sapien
taacgggtcatgattgtgaatctgg

SEQ ID NO: 2134165 - DNA, 25 bp, Homo sapien
gattcatcaggctgtaccgcttaag

SEQ ID NO: 2134166 - DNA, 25 bp, Homo sapien
ctttttgttcccaacatcacacttt

SEQ ID NO: 2134167 - DNA, 25 bp, Homo sapien
aatatgtcataccagagcctgaggg

SEQ ID NO: 2134168 - DNA, 25 bp, Homo sapien
gagaggactgagagaccactgctga

SEQ ID NO: 2134169 - DNA, 25 bp, Homo sapien
tgagtcggctaacagatgccagagg

SEQ ID NO: 2134170 - DNA, 25 bp, Homo sapien
gactcctgtgctgcgatttgttaca

SEQ ID NO: 2134171 - DNA, 25 bp, Homo sapien
cacaattctctggaggattctttgc

SEQ ID NO: 2134172 - DNA, 25 bp, Homo sapien
caattctctggaggattctttgcca

SEQ ID NO: 2134173 - DNA, 25 bp, Homo sapien
tcttcacaattctctggaggattct

SEQ ID NO: 2134174 - DNA, 25 bp, Homo sapien
tgacagtcttcacaattctctggag

SEQ ID NO: 2134175 - DNA, 25 bp, Homo sapien
tgggtacctccggccagaagtgctt

SEQ ID NO: 2134176 - DNA, 25 bp, Homo sapien
aacaggacaattagagttagggcca

SEQ ID NO: 2134177 - DNA, 25 bp, Homo sapien
agagttagggccaggataccaaaca

SEQ ID NO: 2134178 - DNA, 25 bp, Homo sapien
caccagtccacaaatcttaagtgat

SEQ ID NO: 2134179 - DNA, 25 bp, Homo sapien
ggactgtggtgtaggaaagcccagg

SEQ ID NO: 2134180 - DNA, 25 bp, Homo sapien
cggactgtggtgtaggaaagcccag

SEQ ID NO: 2134181 - DNA, 25 bp, Homo sapien
ccttgtgttaagctgagggatcacc

SEQ ID NO: 2134182 - DNA, 25 bp, Homo sapien
tgctttttggcgctggagctgatat

SEQ ID NO: 2134183 - DNA, 25 bp, Homo sapien
ccaagctgctgagctaattactaag

SEQ ID NO: 2134184 - DNA, 25 bp, Homo sapien
ggcagccttgactaaacagcaaatg

SEQ ID NO: 2134185 - DNA, 25 bp, Homo sapien
acttccaatgtttcatcagtgccat

SEQ ID NO: 2134186 - DNA, 25 bp, Homo sapien
tcagtgccatttccgcttctgaata

SEQ ID NO: 2134187 - DNA, 25 bp, Homo sapien
tgctgtagaaagtgtgctccatgtc

SEQ ID NO: 2134188 - DNA, 25 bp, Homo sapien
taaagtcgtgcacttccaatgtttc

SEQ ID NO: 2134189 - DNA, 25 bp, Homo sapien
cccacgaagtagatgccagtgtatc

SEQ ID NO: 2134190 - DNA, 25 bp, Homo sapien
gaagacccacgaagtagatgccagt

SEQ ID NO: 2134191 - DNA, 25 bp, Homo sapien
ttgaagacccacgaagtagatgcca

SEQ ID NO: 2134192 - DNA, 25 bp, Homo sapien
acatttttgaagacccacgaagtag

SEQ ID NO: 2134193 - DNA, 25 bp, Homo sapien
agaaaatctcggttttcaataggct

SEQ ID NO: 2134194 - DNA, 25 bp, Homo sapien
ggacccaaatcactgactgttcaaa

SEQ ID NO: 2134195 - DNA, 25 bp, Homo sapien
ggattgatccaatacatggtcacgt

SEQ ID NO: 2134196 - DNA, 25 bp, Homo sapien
ggtcacgttatcacaaatctccaga

SEQ ID NO: 2134197 - DNA, 25 bp, Homo sapien
agttgtgatgcaactgctttgcaaa

SEQ ID NO: 2134198 - DNA, 25 bp, Homo sapien
ttgtgatgcaactgctttgcaaatg

SEQ ID NO: 2134199 - DNA, 25 bp, Homo sapien
tgcaaagttgtgatgcaactgcttt

SEQ ID NO: 2134200 - DNA, 25 bp, Homo sapien
aataaatgcaaagttgtgatgcaac

SEQ ID NO: 2134201 - DNA, 25 bp, Homo sapien
tcacttgcttgtctggcgtgacggg

SEQ ID NO: 2134202 - DNA, 25 bp, Homo sapien
tgcttgtctggcgtgacgggtcttc

SEQ ID NO: 2134203 - DNA, 25 bp, Homo sapien
cttgtctggcgtgacgggtcttctc

SEQ ID NO: 2134204 - DNA, 25 bp, Homo sapien
acttgcttgtctggcgtgacgggtc

SEQ ID NO: 2134205 - DNA, 25 bp, Homo sapien
tcctggagattccaagtttcttaaa

SEQ ID NO: 2134206 - DNA, 25 bp, Homo sapien
tgattttgaatgagcctcctggaga

SEQ ID NO: 2134207 - DNA, 25 bp, Homo sapien
gaggaaggttcactagcaagagttc

SEQ ID NO: 2134208 - DNA, 25 bp, Homo sapien
ttaagctccttagcctgatcatgga

SEQ ID NO: 2134209 - DNA, 25 bp, Homo sapien
gcagtatggatatgggtagtagcct

SEQ ID NO: 2134210 - DNA, 25 bp, Homo sapien
cagatgactcgtcctccttggtagc

SEQ ID NO: 2134211 - DNA, 25 bp, Homo sapien
ctagtaaaggttcacagacgcggcg

SEQ ID NO: 2134212 - DNA, 25 bp, Homo sapien
cagttacaaggcatgatgacacgac

SEQ ID NO: 2134213 - DNA, 25 bp, Homo sapien
agaccctccccagcatgcgggccac

SEQ ID NO: 2134214 - DNA, 25 bp, Homo sapien
cctccccagcatgcgggccacccac

SEQ ID NO: 2134215 - DNA, 25 bp, Homo sapien
ttagaccctccccagcatgcgggcc

SEQ ID NO: 2134216 - DNA, 25 bp, Homo sapien
accctccccagcatgcgggccaccc

SEQ ID NO: 2134217 - DNA, 25 bp, Homo sapien
catgaagagaggaattacctacaag

SEQ ID NO: 2134218 - DNA, 25 bp, Homo sapien
gcatttattatatgttgccagcagt

SEQ ID NO: 2134219 - DNA, 25 bp, Homo sapien
gggccagatgcctcataggcagaaa

SEQ ID NO: 2134220 - DNA, 25 bp, Homo sapien
ggcagaaattcattgaatagcatgc

SEQ ID NO: 2134221 - DNA, 25 bp, Homo sapien
tcaactcttaaatgggagaaaatga

SEQ ID NO: 2134222 - DNA, 25 bp, Homo sapien
tgaaccccctttagcaaggacgata

SEQ ID NO: 2134223 - DNA, 25 bp, Homo sapien
aggaatttattgtggcttgctctat

SEQ ID NO: 2134224 - DNA, 25 bp, Homo sapien
ctgaaccccctttagcaaggacgat

SEQ ID NO: 2134225 - DNA, 25 bp, Homo sapien
tctgaaccccctttagcaaggacga

SEQ ID NO: 2134226 - DNA, 25 bp, Homo sapien
tggtaccaggttgatatgacttgtc

SEQ ID NO: 2134227 - DNA, 25 bp, Homo sapien
ccttaggaattcagtggaacttatc

SEQ ID NO: 2134228 - DNA, 25 bp, Homo sapien
tcttagttttcgtttgtgcctttga

SEQ ID NO: 2134229 - DNA, 25 bp, Homo sapien
tacatcaggtttcagcacacaactt

SEQ ID NO: 2134230 - DNA, 25 bp, Homo sapien
ggcaactttccagtatcatagctca

SEQ ID NO: 2134231 - DNA, 25 bp, Homo sapien
tagggaagtcgcattttcacaaaac

SEQ ID NO: 2134232 - DNA, 25 bp, Homo sapien
ccactgcatgcagcgagattttcac

SEQ ID NO: 2134233 - DNA, 25 bp, Homo sapien
ttggttctctctgcggtcagtcaag

SEQ ID NO: 2134234 - DNA, 25 bp, Homo sapien
tcagaaatgggagtcgttgcaggaa

SEQ ID NO: 2134235 - DNA, 25 bp, Homo sapien
aaggtgatgaccattatagagtcag

SEQ ID NO: 2134236 - DNA, 25 bp, Homo sapien
gagttgcttgcttccaagtaagttt

SEQ ID NO: 2134237 - DNA, 25 bp, Homo sapien
ccctcttgtaggtgtaagctagaag

SEQ ID NO: 2134238 - DNA, 25 bp, Homo sapien
gcctccgggattctgttaacactgc

SEQ ID NO: 2134239 - DNA, 25 bp, Homo sapien
gattagaggaactcagtccgtctgc

SEQ ID NO: 2134240 - DNA, 25 bp, Homo sapien
taacattcctagaacgagtggctcc

SEQ ID NO: 2134241 - DNA, 25 bp, Homo sapien
cactgcccagatgttacgacgtcca

SEQ ID NO: 2134242 - DNA, 25 bp, Homo sapien
tccctcataaggatctttcatgtta

SEQ ID NO: 2134243 - DNA, 25 bp, Homo sapien
aaagatgtatatggcctgaagtacc

SEQ ID NO: 2134244 - DNA, 25 bp, Homo sapien
aaagggaggattatggagacaagaa

SEQ ID NO: 2134245 - DNA, 25 bp, Homo sapien
gtgaggggaagcagaaatatgggat

SEQ ID NO: 2134246 - DNA, 25 bp, Homo sapien
agggaggattatggagacaagaaaa

SEQ ID NO: 2134247 - DNA, 25 bp, Homo sapien
tgccggagttaggaagaacagcaga

SEQ ID NO: 2134248 - DNA, 25 bp, Homo sapien
gaaagagagctcctctttgagttag

SEQ ID NO: 2134249 - DNA, 25 bp, Homo sapien
ctgccggagttaggaagaacagcag

SEQ ID NO: 2134250 - DNA, 25 bp, Homo sapien
agctcctctttgagttagctgactg

SEQ ID NO: 2134251 - DNA, 25 bp, Homo sapien
tacagagccagcttttgaagacatg

SEQ ID NO: 2134252 - DNA, 25 bp, Homo sapien
tagcctcaaagctttataggtcctg

SEQ ID NO: 2134253 - DNA, 25 bp, Homo sapien
gaggccagatgtgggtgattcccta

SEQ ID NO: 2134254 - DNA, 25 bp, Homo sapien
aaagtattaggtcttcctgctccgg

SEQ ID NO: 2134255 - DNA, 25 bp, Homo sapien
tatacttcattgtagctttcatccg

SEQ ID NO: 2134256 - DNA, 25 bp, Homo sapien
gctttcatccggatagtagccagaa

SEQ ID NO: 2134257 - DNA, 25 bp, Homo sapien
gggacctcctctgcatatacttcat

SEQ ID NO: 2134258 - DNA, 25 bp, Homo sapien
gtgggacctcctctgcatatacttc

SEQ ID NO: 2134259 - DNA, 25 bp, Homo sapien
cacagtaagtcagtaaccaagttca

SEQ ID NO: 2134260 - DNA, 25 bp, Homo sapien
cacaggattaggcattgagtaacta

SEQ ID NO: 2134261 - DNA, 25 bp, Homo sapien
gcccctgattccctgtgctacagtt

SEQ ID NO: 2134262 - DNA, 25 bp, Homo sapien
acacatgtgagccaagcctgatggg

SEQ ID NO: 2134263 - DNA, 25 bp, Homo sapien
tctttgatactactccctccatatt

SEQ ID NO: 2134264 - DNA, 25 bp, Homo sapien
ttctttgatactactccctccatat

SEQ ID NO: 2134265 - DNA, 25 bp, Homo sapien
ctttgatactactccctccatattc

SEQ ID NO: 2134266 - DNA, 25 bp, Homo sapien
cttctttgatactactccctccata

SEQ ID NO: 2134267 - DNA, 25 bp, Homo sapien
aacccaggcagtgtgactagcttgc

SEQ ID NO: 2134268 - DNA, 25 bp, Homo sapien
gccccagctgactccaagctaggag

SEQ ID NO: 2134269 - DNA, 25 bp, Homo sapien
tgctgacgagagttttgaaagggcc

SEQ ID NO: 2134270 - DNA, 25 bp, Homo sapien
ggcccattgtctccgctttctgtag

SEQ ID NO: 2134271 - DNA, 25 bp, Homo sapien
tctcttgacttcttaatctgctcgc

SEQ ID NO: 2134272 - DNA, 25 bp, Homo sapien
gatctcttgacttcttaatctgctc

SEQ ID NO: 2134273 - DNA, 25 bp, Homo sapien
tggctaaactaactgtggtgtattc

SEQ ID NO: 2134274 - DNA, 25 bp, Homo sapien
tcttgacttcttaatctgctcgcct

SEQ ID NO: 2134275 - DNA, 25 bp, Homo sapien
tggcaggcattgcaccgacctcctt

SEQ ID NO: 2134276 - DNA, 25 bp, Homo sapien
ttccaatcaatcgaaagccccggtc

SEQ ID NO: 2134277 - DNA, 25 bp, Homo sapien
aggagagctcacaacgcgtgcccag

SEQ ID NO: 2134278 - DNA, 25 bp, Homo sapien
cagttccagaccaacgacggcttgg

SEQ ID NO: 2134279 - DNA, 25 bp, Homo sapien
cttggacaccacgtgtggcagaggt

SEQ ID NO: 2134280 - DNA, 25 bp, Homo sapien
ggacaccacgtgtggcagaggtgga

SEQ ID NO: 2134281 - DNA, 25 bp, Homo sapien
ttggacaccacgtgtggcagaggtg

SEQ ID NO: 2134282 - DNA, 25 bp, Homo sapien
acaccacgtgtggcagaggtggagc

SEQ ID NO: 2134283 - DNA, 25 bp, Homo sapien
tttggtaaaagaggaatccatgtgc

SEQ ID NO: 2134284 - DNA, 25 bp, Homo sapien
gccaggtgtggtatttggtaaaaga

SEQ ID NO: 2134285 - DNA, 25 bp, Homo sapien
tctctgtctgggcaagaatacaagt

SEQ ID NO: 2134286 - DNA, 25 bp, Homo sapien
ctgtctgggcaagaatacaagtcag

SEQ ID NO: 2134287 - DNA, 25 bp, Homo sapien
caagaagcactccatttgtgcaggt

SEQ ID NO: 2134288 - DNA, 25 bp, Homo sapien
tagtcacagcgagagtcaagaagca

SEQ ID NO: 2134289 - DNA, 25 bp, Homo sapien
tgtgcaggtgtaagtgccactagtg

SEQ ID NO: 2134290 - DNA, 25 bp, Homo sapien
gaatggtagtgcgtggcatctcatc

SEQ ID NO: 2134291 - DNA, 25 bp, Homo sapien
catcagcagaatctttcaccaacgg

SEQ ID NO: 2134292 - DNA, 25 bp, Homo sapien
cagtatactcgagcagtcaatttct

SEQ ID NO: 2134293 - DNA, 25 bp, Homo sapien
cggtgggtcccagtatactcgagca

SEQ ID NO: 2134294 - DNA, 25 bp, Homo sapien
caccaacggtgggtcccagtatact

SEQ ID NO: 2134295 - DNA, 25 bp, Homo sapien
tcacaatgaacttgcagctggcccg

SEQ ID NO: 2134296 - DNA, 25 bp, Homo sapien
ccggttgtaggctcggtcataggca

SEQ ID NO: 2134297 - DNA, 25 bp, Homo sapien
tcataggcagtgtaacgaatcacat

SEQ ID NO: 2134298 - DNA, 25 bp, Homo sapien
gaatcacatgctctccttcgggaaa

SEQ ID NO: 2134299 - DNA, 25 bp, Homo sapien
agttgtcccccgctgaggtgcaggt

SEQ ID NO: 2134300 - DNA, 25 bp, Homo sapien
accgccatcacagtggtattcacag

SEQ ID NO: 2134301 - DNA, 25 bp, Homo sapien
cacaggtggcaccatagttgtcccc

SEQ ID NO: 2134302 - DNA, 25 bp, Homo sapien
aggtagccgtgctgcggaggtttca

SEQ ID NO: 2134303 - DNA, 25 bp, Homo sapien
aatatcggttggaaggatcaggagc

SEQ ID NO: 2134304 - DNA, 25 bp, Homo sapien
gagtcgctgtttctcatagaattga

SEQ ID NO: 2134305 - DNA, 25 bp, Homo sapien
cagcagctgagttgacgttgacgtt

SEQ ID NO: 2134306 - DNA, 25 bp, Homo sapien
agagatctgcattttataatatcgg

SEQ ID NO: 2134307 - DNA, 25 bp, Homo sapien
gatagtatccacctccaaagggttg

SEQ ID NO: 2134308 - DNA, 25 bp, Homo sapien
tcagtactggatagctacatagcac

SEQ ID NO: 2134309 - DNA, 25 bp, Homo sapien
gacctctccctaccagtggctttgg

SEQ ID NO: 2134310 - DNA, 25 bp, Homo sapien
cacgtgggtatccagccccttgtag

SEQ ID NO: 2134311 - DNA, 25 bp, Homo sapien
tgcagcttgcagtcctaccccagat

SEQ ID NO: 2134312 - DNA, 25 bp, Homo sapien
ctggccagggccttcgctcggtctc

SEQ ID NO: 2134313 - DNA, 25 bp, Homo sapien
ggccttcgctcggtctccaggattt

SEQ ID NO: 2134314 - DNA, 25 bp, Homo sapien
ccccttgttaccttccttgcactgg

SEQ ID NO: 2134315 - DNA, 25 bp, Homo sapien
agttcaatgatggtcacatgccgca

SEQ ID NO: 2134316 - DNA, 25 bp, Homo sapien
ggtcacatgccgcaaatccagtcca

SEQ ID NO: 2134317 - DNA, 25 bp, Homo sapien
caccagttcaatgatggtcacatgc

SEQ ID NO: 2134318 - DNA, 25 bp, Homo sapien
tggctgtcccaccagttcaatgatg

SEQ ID NO: 2134319 - DNA, 25 bp, Homo sapien
tgacaggttccatgtagcggtctcg

SEQ ID NO: 2134320 - DNA, 25 bp, Homo sapien
gctcagtaggtagtcatcaatgaat

SEQ ID NO: 2134321 - DNA, 25 bp, Homo sapien
ggtcaataccctgcttgtcaatcaa

SEQ ID NO: 2134322 - DNA, 25 bp, Homo sapien
atatgtccctttgctcccgacgctg

SEQ ID NO: 2134323 - DNA, 25 bp, Homo sapien
taaggaaaatccagctacacttgct

SEQ ID NO: 2134324 - DNA, 25 bp, Homo sapien
agagtcctgtccctagaactgtggg

SEQ ID NO: 2134325 - DNA, 25 bp, Homo sapien
gactttaaccatgccctggctcaag

SEQ ID NO: 2134326 - DNA, 25 bp, Homo sapien
taaaaggatgcctggaaacaccgca

SEQ ID NO: 2134327 - DNA, 25 bp, Homo sapien
cacatgaactcattgtatctgcctc

SEQ ID NO: 2134328 - DNA, 25 bp, Homo sapien
aaatttcccacatgaactcattgta

SEQ ID NO: 2134329 - DNA, 25 bp, Homo sapien
tgctgcctctcacagttcccatatt

SEQ ID NO: 2134330 - DNA, 25 bp, Homo sapien
tctcacagttcccatatttccctgg

SEQ ID NO: 2134331 - DNA, 25 bp, Homo sapien
catcttcaaaggactacaaaggagg

SEQ ID NO: 2134332 - DNA, 25 bp, Homo sapien
tgtcacgtgacagagttgggctttg

SEQ ID NO: 2134333 - DNA, 25 bp, Homo sapien
ggatattacctagccaacttagtga

SEQ ID NO: 2134334 - DNA, 25 bp, Homo sapien
ggtcaaaggaagacgtgactcatct

SEQ ID NO: 2134335 - DNA, 25 bp, Homo sapien
cacactggattaagggcagccacag

SEQ ID NO: 2134336 - DNA, 25 bp, Homo sapien
gaaatccctttcaacagagtcagct

SEQ ID NO: 2134337 - DNA, 25 bp, Homo sapien
tggaaggcataacttgggatcccgg

SEQ ID NO: 2134338 - DNA, 25 bp, Homo sapien
gggatcccgggctgtaacttgctct

SEQ ID NO: 2134339 - DNA, 25 bp, Homo sapien
cactgtgtcaaccagaagagccaag

SEQ ID NO: 2134340 - DNA, 25 bp, Homo sapien
aagtgttatctcaattggcccagtg

SEQ ID NO: 2134341 - DNA, 25 bp, Homo sapien
gactaaatcacgaggatgcccagtg

SEQ ID NO: 2134342 - DNA, 25 bp, Homo sapien
tacctttcgcattaggaccagtctg

SEQ ID NO: 2134343 - DNA, 25 bp, Homo sapien
ggagcacagaatagcctcactaata

SEQ ID NO: 2134344 - DNA, 25 bp, Homo sapien
aaggaattgaatcaggtgaatgatc

SEQ ID NO: 2134345 - DNA, 25 bp, Homo sapien
ctagtagaggtagtgggaactctgc

SEQ ID NO: 2134346 - DNA, 25 bp, Homo sapien
aattgtctagtagaaacaaagccaa

SEQ ID NO: 2134347 - DNA, 25 bp, Homo sapien
ttgataatccaaagaggagggctgc

SEQ ID NO: 2134348 - DNA, 25 bp, Homo sapien
tggctgacatcccttacaggtaaag

SEQ ID NO: 2134349 - DNA, 25 bp, Homo sapien
cctttgcactggtctgggctgtaga

SEQ ID NO: 2134350 - DNA, 25 bp, Homo sapien
gcacggttctgttatggagctcgct

SEQ ID NO: 2134351 - DNA, 25 bp, Homo sapien
ggattatgccttcctagcattggta

SEQ ID NO: 2134352 - DNA, 25 bp, Homo sapien
ttggcacccaagtcattctctacgg

SEQ ID NO: 2134353 - DNA, 25 bp, Homo sapien
aggaaccccaattaacacaggcaag

SEQ ID NO: 2134354 - DNA, 25 bp, Homo sapien
tgtaaaccatcatgaactactgcca

SEQ ID NO: 2134355 - DNA, 25 bp, Homo sapien
aactatgctgtaatatatcttggtc

SEQ ID NO: 2134356 - DNA, 25 bp, Homo sapien
cctgttggtggaattgctgagtgaa

SEQ ID NO: 2134357 - DNA, 25 bp, Homo sapien
gaatttgttcaacagcacagtagga

SEQ ID NO: 2134358 - DNA, 25 bp, Homo sapien
tgtgccatcacttacagatctatct

SEQ ID NO: 2134359 - DNA, 25 bp, Homo sapien
ggcagtctggctcaattccaagctt

SEQ ID NO: 2134360 - DNA, 25 bp, Homo sapien
aggcagtctggctcaattccaagct

SEQ ID NO: 2134361 - DNA, 25 bp, Homo sapien
tgtctcaaggctttgggtcccagag

SEQ ID NO: 2134362 - DNA, 25 bp, Homo sapien
tgccggagctgggttgcgatcttcc

SEQ ID NO: 2134363 - DNA, 25 bp, Homo sapien
caagtgacaggtaggtcaacagcca

SEQ ID NO: 2134364 - DNA, 25 bp, Homo sapien
ccttgaaaccggcactgggacttct

SEQ ID NO: 2134365 - DNA, 25 bp, Homo sapien
ctggctgaaagtgtttccagctcct

SEQ ID NO: 2134366 - DNA, 25 bp, Homo sapien
gaaactgcacacatataaagaagta

SEQ ID NO: 2134367 - DNA, 25 bp, Homo sapien
acttctggctgaaagtgtttccagc

SEQ ID NO: 2134368 - DNA, 25 bp, Homo sapien
tttgctgaggaataagggagttgga

SEQ ID NO: 2134369 - DNA, 25 bp, Homo sapien
aggatagtgcctaggtttgctctca

SEQ ID NO: 2134370 - DNA, 25 bp, Homo sapien
tgctctcattagacctctctcaatg

SEQ ID NO: 2134371 - DNA, 25 bp, Homo sapien
gtataagaatttgaacttgtggcag

SEQ ID NO: 2134372 - DNA, 25 bp, Homo sapien
ggcagacgaggaggataaaacagaa

SEQ ID NO: 2134373 - DNA, 25 bp, Homo sapien
atcggatttcatggaaataatcaag

SEQ ID NO: 2134374 - DNA, 25 bp, Homo sapien
aaatctccatcgttttaggtttgca

SEQ ID NO: 2134375 - DNA, 25 bp, Homo sapien
taggtttgcactggtcagaacttgc

SEQ ID NO: 2134376 - DNA, 25 bp, Homo sapien
ctggtcagaacttgctcagtgtggc

SEQ ID NO: 2134377 - DNA, 25 bp, Homo sapien
atgacactattatgtacgcgtagaa

SEQ ID NO: 2134378 - DNA, 25 bp, Homo sapien
ggtgttatgctgaccccaaataacc

SEQ ID NO: 2134379 - DNA, 25 bp, Homo sapien
ttccactgcccggtgttatgctgac

SEQ ID NO: 2134380 - DNA, 25 bp, Homo sapien
tatgtacgcgtagaacatcttgttc

SEQ ID NO: 2134381 - DNA, 25 bp, Homo sapien
tttggctttgacacccgattgccag

SEQ ID NO: 2134382 - DNA, 25 bp, Homo sapien
tggatgccttcctcacccttcttgg

SEQ ID NO: 2134383 - DNA, 25 bp, Homo sapien
ggctactgatgtgccataccaggat

SEQ ID NO: 2134384 - DNA, 25 bp, Homo sapien
ggtaaggattctcgttctgtcccac

SEQ ID NO: 2134385 - DNA, 25 bp, Homo sapien
ccatttgctggcaatagcctataat

SEQ ID NO: 2134386 - DNA, 25 bp, Homo sapien
tttgctggcaatagcctataatctt

SEQ ID NO: 2134387 - DNA, 25 bp, Homo sapien
tgctggcaatagcctataatctttg

SEQ ID NO: 2134388 - DNA, 25 bp, Homo sapien
catttgctggcaatagcctataatc

SEQ ID NO: 2134389 - DNA, 25 bp, Homo sapien
aggtcctggcatcttgtccatggca

SEQ ID NO: 2134390 - DNA, 25 bp, Homo sapien
gtccatggcaaatgctggacacaaa

SEQ ID NO: 2134391 - DNA, 25 bp, Homo sapien
tcttgtccatggcaaatgctggaca

SEQ ID NO: 2134392 - DNA, 25 bp, Homo sapien
tgtccatggcaaatgctggacacaa

SEQ ID NO: 2134393 - DNA, 25 bp, Homo sapien
cataatggcactggtggcaagtcca

SEQ ID NO: 2134394 - DNA, 25 bp, Homo sapien
gccataatggcactggtggcaagtc

SEQ ID NO: 2134395 - DNA, 25 bp, Homo sapien
ataatggcactggtggcaagtccat

SEQ ID NO: 2134396 - DNA, 25 bp, Homo sapien
attgccataatggcactggtggcaa

SEQ ID NO: 2134397 - DNA, 25 bp, Homo sapien
aaatttcatgctgtgcacactggag

SEQ ID NO: 2134398 - DNA, 25 bp, Homo sapien
tcttcaacatcaccatagatggtgg

SEQ ID NO: 2134399 - DNA, 25 bp, Homo sapien
tcaccatagatggtgggctcttggg

SEQ ID NO: 2134400 - DNA, 25 bp, Homo sapien
agaaaaatttcatgctgtgcacact

SEQ ID NO: 2134401 - DNA, 25 bp, Homo sapien
aaatgtgcatagaacattgttctgg

SEQ ID NO: 2134402 - DNA, 25 bp, Homo sapien
tgaggacaaaatgtgcatagaacat

SEQ ID NO: 2134403 - DNA, 25 bp, Homo sapien
tctggttgcctatgaaaatagaagg

SEQ ID NO: 2134404 - DNA, 25 bp, Homo sapien
cattgttctggttgcctatgaaaat

SEQ ID NO: 2134405 - DNA, 25 bp, Homo sapien
tccgtaatgctatcttcacctttgg

SEQ ID NO: 2134406 - DNA, 25 bp, Homo sapien
tgatgtccgtaatgctatcttcacc

SEQ ID NO: 2134407 - DNA, 25 bp, Homo sapien
tgtccgtaatgctatcttcaccttt

SEQ ID NO: 2134408 - DNA, 25 bp, Homo sapien
cactgtaacacaggggctttggtta

SEQ ID NO: 2134409 - DNA, 25 bp, Homo sapien
tcaagtaaagtaatggtgttataag

SEQ ID NO: 2134410 - DNA, 25 bp, Homo sapien
cttctgggccacatcgatgtcatct

SEQ ID NO: 2134411 - DNA, 25 bp, Homo sapien
catcgatgtcatctaagtcaggcag

SEQ ID NO: 2134412 - DNA, 25 bp, Homo sapien
tctctcacggttatttcttccactc

SEQ ID NO: 2134413 - DNA, 25 bp, Homo sapien
tactgatattcccaacttcttctct

SEQ ID NO: 2134414 - DNA, 25 bp, Homo sapien
tgatctcaatgatcatccattccaa

SEQ ID NO: 2134415 - DNA, 25 bp, Homo sapien
ctctgatctcaatgatcatccattc

SEQ ID NO: 2134416 - DNA, 25 bp, Homo sapien
ctgatctcaatgatcatccattcca

SEQ ID NO: 2134417 - DNA, 25 bp, Homo sapien
tctgatctcaatgatcatccattcc

SEQ ID NO: 2134418 - DNA, 25 bp, Homo sapien
gattagaagcagtagtgcctactaa

SEQ ID NO: 2134419 - DNA, 25 bp, Homo sapien
agattagaagcagtagtgcctacta

SEQ ID NO: 2134420 - DNA, 25 bp, Homo sapien
attagaagcagtagtgcctactaac

SEQ ID NO: 2134421 - DNA, 25 bp, Homo sapien
agattgctggtgctctgttcagact

SEQ ID NO: 2134422 - DNA, 25 bp, Homo sapien
cagattgctggtgctctgttcagac

SEQ ID NO: 2134423 - DNA, 25 bp, Homo sapien
tcattcagattgctggtgctctgtt

SEQ ID NO: 2134424 - DNA, 25 bp, Homo sapien
ttcagattgctggtgctctgttcag

SEQ ID NO: 2134425 - DNA, 25 bp, Homo sapien
tcatgtgcaggctgctctggcaaca

SEQ ID NO: 2134426 - DNA, 25 bp, Homo sapien
ccgtatatcatcatgtgcaggctgc

SEQ ID NO: 2134427 - DNA, 25 bp, Homo sapien
gtgcaggctgctctggcaacattac

SEQ ID NO: 2134428 - DNA, 25 bp, Homo sapien
tgtgcaggctgctctggcaacatta

SEQ ID NO: 2134429 - DNA, 25 bp, Homo sapien
ctggttcaacaggattcactgaatc

SEQ ID NO: 2134430 - DNA, 25 bp, Homo sapien
gctcttccaaaatgggcttatcaat

SEQ ID NO: 2134431 - DNA, 25 bp, Homo sapien
tgtaagacagcatgtaaagagcgtc

SEQ ID NO: 2134432 - DNA, 25 bp, Homo sapien
cagaataatcattaagctgggctct

SEQ ID NO: 2134433 - DNA, 25 bp, Homo sapien
tctggagatggcttggctcttccaa

SEQ ID NO: 2134434 - DNA, 25 bp, Homo sapien
tctttcttcctgatcttgatcaccc

SEQ ID NO: 2134435 - DNA, 25 bp, Homo sapien
cgtgaagcatctgctgagtcctttt

SEQ ID NO: 2134436 - DNA, 25 bp, Homo sapien
tcttcctgatcttgatcaccccctg

SEQ ID NO: 2134437 - DNA, 25 bp, Homo sapien
tgatcttgatcaccccctgaaacat

SEQ ID NO: 2134438 - DNA, 25 bp, Homo sapien
cctgtgtcagctcaatagcttgctg

SEQ ID NO: 2134439 - DNA, 25 bp, Homo sapien
tgtgtcagctcaatagcttgctgct

SEQ ID NO: 2134440 - DNA, 25 bp, Homo sapien
agctcaatagcttgctgctttttaa

SEQ ID NO: 2134441 - DNA, 25 bp, Homo sapien
tgtcagctcaatagcttgctgcttt

SEQ ID NO: 2134442 - DNA, 25 bp, Homo sapien
cggtaaaatagccacggaattggag

SEQ ID NO: 2134443 - DNA, 25 bp, Homo sapien
aaaatagccacggaattggaggcat

SEQ ID NO: 2134444 - DNA, 25 bp, Homo sapien
agacggtaaaatagccacggaattg

SEQ ID NO: 2134445 - DNA, 25 bp, Homo sapien
gtaaaatagccacggaattggaggc

SEQ ID NO: 2134446 - DNA, 25 bp, Homo sapien
ccacgcgcctgggatatggcatgca

SEQ ID NO: 2134447 - DNA, 25 bp, Homo sapien
tctggcaggcagagtatcggaaaca

SEQ ID NO: 2134448 - DNA, 25 bp, Homo sapien
tctgtcctcgtgtagtccgtgggtt

SEQ ID NO: 2134449 - DNA, 25 bp, Homo sapien
catgcagggcaggtcgttgtatcat

SEQ ID NO: 2134450 - DNA, 25 bp, Homo sapien
acgcagagcccctcccctggagaca

SEQ ID NO: 2134451 - DNA, 25 bp, Homo sapien
gcagagcccctcccctggagacatt

SEQ ID NO: 2134452 - DNA, 25 bp, Homo sapien
ctgggcggaacggacgcagagcccc

SEQ ID NO: 2134453 - DNA, 25 bp, Homo sapien
gggcggaacggacgcagagcccctc

SEQ ID NO: 2134454 - DNA, 25 bp, Homo sapien
cggtgcgccaaagcacacttccgta

SEQ ID NO: 2134455 - DNA, 25 bp, Homo sapien
agcacacttccgtacggagcacaag

SEQ ID NO: 2134456 - DNA, 25 bp, Homo sapien
gagcacgcttccgtacggcgcgtga

SEQ ID NO: 2134457 - DNA, 25 bp, Homo sapien
agctctgttgagtcggcttccggtg

SEQ ID NO: 2134458 - DNA, 25 bp, Homo sapien
aacgtagagaacgatccaccgctgg

SEQ ID NO: 2134459 - DNA, 25 bp, Homo sapien
agaacgtagagaacgatccaccgct

SEQ ID NO: 2134460 - DNA, 25 bp, Homo sapien
cgtagagaacgatccaccgctgggt

SEQ ID NO: 2134461 - DNA, 25 bp, Homo sapien
caccgctgggtctctcacagtcaaa

SEQ ID NO: 2134462 - DNA, 25 bp, Homo sapien
ctaacaacaggtccaacctcagaaa

SEQ ID NO: 2134463 - DNA, 25 bp, Homo sapien
caggtccaacctcagaaaagatgtc

SEQ ID NO: 2134464 - DNA, 25 bp, Homo sapien
gtagcttcataaggaatgttcccca

SEQ ID NO: 2134465 - DNA, 25 bp, Homo sapien
cttcaactgctcttcagtagcttca

SEQ ID NO: 2134466 - DNA, 25 bp, Homo sapien
tgaattcgcgcccattcaggttccg

SEQ ID NO: 2134467 - DNA, 25 bp, Homo sapien
ggcactaagtgctgtctcttggtct

SEQ ID NO: 2134468 - DNA, 25 bp, Homo sapien
cacagaagccataaccctttggctt

SEQ ID NO: 2134469 - DNA, 25 bp, Homo sapien
cactcgaagtgctctcccactgaat

SEQ ID NO: 2134470 - DNA, 25 bp, Homo sapien
tcttcagctcttctttgttcttttc

SEQ ID NO: 2134471 - DNA, 25 bp, Homo sapien
ttcagctcttctttgttcttttcac

SEQ ID NO: 2134472 - DNA, 25 bp, Homo sapien
cttcagctcttctttgttcttttca

SEQ ID NO: 2134473 - DNA, 25 bp, Homo sapien
tcaagtaataaacaagctgcgtggc

SEQ ID NO: 2134474 - DNA, 25 bp, Homo sapien
tccagagcaagggtatagaaatttc

SEQ ID NO: 2134475 - DNA, 25 bp, Homo sapien
tatgcatccctacagtgcttgccag

SEQ ID NO: 2134476 - DNA, 25 bp, Homo sapien
catgcttaggtctgcagtgacccta

SEQ ID NO: 2134477 - DNA, 25 bp, Homo sapien
tgctaatggactcaggggcatcctc

SEQ ID NO: 2134478 - DNA, 25 bp, Homo sapien
tgactcaatgacaggggcaccagtg

SEQ ID NO: 2134479 - DNA, 25 bp, Homo sapien
tgctttgctaatggactcaggggca

SEQ ID NO: 2134480 - DNA, 25 bp, Homo sapien
cctcaggactgatggtctctccata

SEQ ID NO: 2134481 - DNA, 25 bp, Homo sapien
tgagggttctgaagtaacatgttcc

SEQ ID NO: 2134482 - DNA, 25 bp, Homo sapien
taagccagttgagggttctgaagta

SEQ ID NO: 2134483 - DNA, 25 bp, Homo sapien
gccagttgagggttctgaagtaaca

SEQ ID NO: 2134484 - DNA, 25 bp, Homo sapien
tctgaagtaacatgttccgtgcctc

SEQ ID NO: 2134485 - DNA, 25 bp, Homo sapien
cagggcaatttccggatccacaatt

SEQ ID NO: 2134486 - DNA, 25 bp, Homo sapien
tttccggatccacaattctcatcac

SEQ ID NO: 2134487 - DNA, 25 bp, Homo sapien
gggcaatttccggatccacaattct

SEQ ID NO: 2134488 - DNA, 25 bp, Homo sapien
caatttccggatccacaattctcat

SEQ ID NO: 2134489 - DNA, 25 bp, Homo sapien
ttccataaaagaaccagaagcactc

SEQ ID NO: 2134490 - DNA, 25 bp, Homo sapien
ccataaaagaaccagaagcactcac

SEQ ID NO: 2134491 - DNA, 25 bp, Homo sapien
ccgaccatttccataaaagaaccag

SEQ ID NO: 2134492 - DNA, 25 bp, Homo sapien
atttccataaaagaaccagaagcac

SEQ ID NO: 2134493 - DNA, 25 bp, Homo sapien
aaaagtgaaaagacaaacctatgag

SEQ ID NO: 2134494 - DNA, 25 bp, Homo sapien
aaagtgaaaagacaaacctatgagc

SEQ ID NO: 2134495 - DNA, 25 bp, Homo sapien
agtgaaaagacaaacctatgagctg

SEQ ID NO: 2134496 - DNA, 25 bp, Homo sapien
gtgaaaagacaaacctatgagctgt

SEQ ID NO: 2134497 - DNA, 25 bp, Homo sapien
tgcaatcagcgttgggatatttgtc

SEQ ID NO: 2134498 - DNA, 25 bp, Homo sapien
aatcagcgttgggatatttgtctgg

SEQ ID NO: 2134499 - DNA, 25 bp, Homo sapien
ggatatttgtctggcgatgcagaat

SEQ ID NO: 2134500 - DNA, 25 bp, Homo sapien
tatttgtctggcgatgcagaatttt

SEQ ID NO: 2134501 - DNA, 25 bp, Homo sapien
gctggttcattgacacattggatcc

SEQ ID NO: 2134502 - DNA, 25 bp, Homo sapien
ctgaggattctgctggttcattgac

SEQ ID NO: 2134503 - DNA, 25 bp, Homo sapien
tctgctggttcattgacacattgga

SEQ ID NO: 2134504 - DNA, 25 bp, Homo sapien
gacacattggatcctgagccaggcc

SEQ ID NO: 2134505 - DNA, 25 bp, Homo sapien
gcatagaagcttgcatcagaggagg

SEQ ID NO: 2134506 - DNA, 25 bp, Homo sapien
atcagaggaggtgcgccattgacat

SEQ ID NO: 2134507 - DNA, 25 bp, Homo sapien
tagaagcttgcatcagaggaggtgc

SEQ ID NO: 2134508 - DNA, 25 bp, Homo sapien
ggtgcgccattgacatgcattccac

SEQ ID NO: 2134509 - DNA, 25 bp, Homo sapien
cagggccaggtcctgtgacagcagc

SEQ ID NO: 2134510 - DNA, 25 bp, Homo sapien
tttgccctggtgctggaactccacc

SEQ ID NO: 2134511 - DNA, 25 bp, Homo sapien
ccgttccatggacactggtccactt

SEQ ID NO: 2134512 - DNA, 25 bp, Homo sapien
tccatggacactggtccacttcctg

SEQ ID NO: 2134513 - DNA, 25 bp, Homo sapien
ttgcccccgttccatggacactggt

SEQ ID NO: 2134514 - DNA, 25 bp, Homo sapien
tccacttcctggcattccaacctga

SEQ ID NO: 2134515 - DNA, 25 bp, Homo sapien
cttgaactcgctcaattgatgcagg

SEQ ID NO: 2134516 - DNA, 25 bp, Homo sapien
tcccacgggcgagtgctgtagggtt

SEQ ID NO: 2134517 - DNA, 25 bp, Homo sapien
tcaattgatgcaggcccggcgggtc

SEQ ID NO: 2134518 - DNA, 25 bp, Homo sapien
aactcgctcaattgatgcaggcccg

SEQ ID NO: 2134519 - DNA, 25 bp, Homo sapien
gaggatgactgccacgcagctcttt

SEQ ID NO: 2134520 - DNA, 25 bp, Homo sapien
ttctgaacgcgaggatgactgccac

SEQ ID NO: 2134521 - DNA, 25 bp, Homo sapien
cttttgggttctgaacgcgaggatg

SEQ ID NO: 2134522 - DNA, 25 bp, Homo sapien
gcgaggatgactgccacgcagctct

SEQ ID NO: 2134523 - DNA, 25 bp, Homo sapien
agtacagcctcggacagatgcccat

SEQ ID NO: 2134524 - DNA, 25 bp, Homo sapien
cagatgcccatatcatccatgttct

SEQ ID NO: 2134525 - DNA, 25 bp, Homo sapien
agggagtacagcctcggacagatgc

SEQ ID NO: 2134526 - DNA, 25 bp, Homo sapien
agcctcggacagatgcccatatcat

SEQ ID NO: 2134527 - DNA, 25 bp, Homo sapien
tccccgtggatcattcggagcatct

SEQ ID NO: 2134528 - DNA, 25 bp, Homo sapien
ttgggacattcgcaggcaaggatcc

SEQ ID NO: 2134529 - DNA, 25 bp, Homo sapien
caaggatccccgctgcatagctgct

SEQ ID NO: 2134530 - DNA, 25 bp, Homo sapien
taacaagcctcgaggggttgggaca

SEQ ID NO: 2134531 - DNA, 25 bp, Homo sapien
tctccagttacagaaagtaaagtgc

SEQ ID NO: 2134532 - DNA, 25 bp, Homo sapien
ctctccagttacagaaagtaaagtg

SEQ ID NO: 2134533 - DNA, 25 bp, Homo sapien
ctctgatctagcatgggtcctcttg

SEQ ID NO: 2134534 - DNA, 25 bp, Homo sapien
tgccatccaagggtggacccctctg

SEQ ID NO: 2134535 - DNA, 25 bp, Homo sapien
tgggtggaccctgatgaggtggtcc

SEQ ID NO: 2134536 - DNA, 25 bp, Homo sapien
ccattagaggtctgggctcgggtaa

SEQ ID NO: 2134537 - DNA, 25 bp, Homo sapien
tgcacgggcctctaatcctctggca

SEQ ID NO: 2134538 - DNA, 25 bp, Homo sapien
cattgcacgggcctctaatcctctg

SEQ ID NO: 2134539 - DNA, 25 bp, Homo sapien
ctctggcatctaaccctcttgcctc

SEQ ID NO: 2134540 - DNA, 25 bp, Homo sapien
atcctctggcatctaaccctcttgc

SEQ ID NO: 2134541 - DNA, 25 bp, Homo sapien
ctccattgcacgagcttccatcgca

SEQ ID NO: 2134542 - DNA, 25 bp, Homo sapien
ttgcacgagcttccatcgcacgggc

SEQ ID NO: 2134543 - DNA, 25 bp, Homo sapien
cattgcacgagcttccatcgcacgg

SEQ ID NO: 2134544 - DNA, 25 bp, Homo sapien
tccattgcacgagcttccatcgcac

SEQ ID NO: 2134545 - DNA, 25 bp, Homo sapien
ccatgttaattggactgggaccctg

SEQ ID NO: 2134546 - DNA, 25 bp, Homo sapien
tgggaccctgcattccactaggtat

SEQ ID NO: 2134547 - DNA, 25 bp, Homo sapien
atccctcggacttccattgcacggg

SEQ ID NO: 2134548 - DNA, 25 bp, Homo sapien
ggcctctggtatccatgcctctggc

SEQ ID NO: 2134549 - DNA, 25 bp, Homo sapien
gagacaagacttcggttccacacct

SEQ ID NO: 2134550 - DNA, 25 bp, Homo sapien
tgaagagggagcatgtacacacagg

SEQ ID NO: 2134551 - DNA, 25 bp, Homo sapien
tccacaaccaagtcgagatgaagag

SEQ ID NO: 2134552 - DNA, 25 bp, Homo sapien
tatctaaatggccactaacagctct

SEQ ID NO: 2134553 - DNA, 25 bp, Homo sapien
cgggactaaagccgccaggctggct

SEQ ID NO: 2134554 - DNA, 25 bp, Homo sapien
tgcccgggactaaagccgccaggct

SEQ ID NO: 2134555 - DNA, 25 bp, Homo sapien
ggactaaagccgccaggctggcttc

SEQ ID NO: 2134556 - DNA, 25 bp, Homo sapien
cccgggactaaagccgccaggctgg

SEQ ID NO: 2134557 - DNA, 25 bp, Homo sapien
tgaagacccaggatcgtcacatggt

SEQ ID NO: 2134558 - DNA, 25 bp, Homo sapien
tccattaggaacttcaggaccagac

SEQ ID NO: 2134559 - DNA, 25 bp, Homo sapien
ggtcaatctggcctgaacaagaaaa

SEQ ID NO: 2134560 - DNA, 25 bp, Homo sapien
taaggaggcagtcagacagtgttgc

SEQ ID NO: 2134561 - DNA, 25 bp, Homo sapien
tcaggaggcaacatggcaatctggt

SEQ ID NO: 2134562 - DNA, 25 bp, Homo sapien
caggaggcaacatggcaatctggtc

SEQ ID NO: 2134563 - DNA, 25 bp, Homo sapien
taaagaagagtctagctgagtggat

SEQ ID NO: 2134564 - DNA, 25 bp, Homo sapien
tagacaaggagctagtcctactcag

SEQ ID NO: 2134565 - DNA, 25 bp, Homo sapien
gattgagggccgctgagagaacaat

SEQ ID NO: 2134566 - DNA, 25 bp, Homo sapien
caggagctgacctactgaagggtaa

SEQ ID NO: 2134567 - DNA, 25 bp, Homo sapien
tagcagggtacagcgatctccaaaa

SEQ ID NO: 2134568 - DNA, 25 bp, Homo sapien
gagcaagaaaaataagggtagcagg

SEQ ID NO: 2134569 - DNA, 25 bp, Homo sapien
ctggattctttctgcctaaatgatg

SEQ ID NO: 2134570 - DNA, 25 bp, Homo sapien
gatgacggacatttactaccttaaa

SEQ ID NO: 2134571 - DNA, 25 bp, Homo sapien
ttaggatgcaggtcatcttttttca

SEQ ID NO: 2134572 - DNA, 25 bp, Homo sapien
gaagtgattttgttctgagagaagg

SEQ ID NO: 2134573 - DNA, 25 bp, Homo sapien
gggttaggatgcaggtcatcttttt

SEQ ID NO: 2134574 - DNA, 25 bp, Homo sapien
tgatttgagtcattcaagggttagg

SEQ ID NO: 2134575 - DNA, 25 bp, Homo sapien
tttctcctagaagactccgaagtgc

SEQ ID NO: 2134576 - DNA, 25 bp, Homo sapien
tcaaagttgactgcctagactgata

SEQ ID NO: 2134577 - DNA, 25 bp, Homo sapien
caatactgcagtaagggtagaaaac

SEQ ID NO: 2134578 - DNA, 25 bp, Homo sapien
tgttgctgacacactcaaaccagtg

SEQ ID NO: 2134579 - DNA, 25 bp, Homo sapien
ggcctgatagagagaaaccatgttc

SEQ ID NO: 2134580 - DNA, 25 bp, Homo sapien
ccttaatgccactacgagagagatg

SEQ ID NO: 2134581 - DNA, 25 bp, Homo sapien
aacgtagttacagggtagggctgca

SEQ ID NO: 2134582 - DNA, 25 bp, Homo sapien
tacctatccgcaaggaagcaggcag

SEQ ID NO: 2134583 - DNA, 25 bp, Homo sapien
gccaatttgttcacccggatttcag

SEQ ID NO: 2134584 - DNA, 25 bp, Homo sapien
tttacatagggagggataccactgc

SEQ ID NO: 2134585 - DNA, 25 bp, Homo sapien
cacttcaagatatgatggctgccaa

SEQ ID NO: 2134586 - DNA, 25 bp, Homo sapien
tctacggcttgagggataaaactgt

SEQ ID NO: 2134587 - DNA, 25 bp, Homo sapien
gaaagccctgtcaaagcaagagatg

SEQ ID NO: 2134588 - DNA, 25 bp, Homo sapien
gttaggaaagccctgtcaaagcaag

SEQ ID NO: 2134589 - DNA, 25 bp, Homo sapien
gaagttaggaaagccctgtcaaagc

SEQ ID NO: 2134590 - DNA, 25 bp, Homo sapien
taggaaagccctgtcaaagcaagag

SEQ ID NO: 2134591 - DNA, 25 bp, Homo sapien
taagacgggaagaataatgactacc

SEQ ID NO: 2134592 - DNA, 25 bp, Homo sapien
tccaaaaggaacatggcccttctga

SEQ ID NO: 2134593 - DNA, 25 bp, Homo sapien
caaggaatgcgagaaagcagcttca

SEQ ID NO: 2134594 - DNA, 25 bp, Homo sapien
atttggaagcaagagtaagacggga

SEQ ID NO: 2134595 - DNA, 25 bp, Homo sapien
ctggggtgcgaaaatgctctcaatt

SEQ ID NO: 2134596 - DNA, 25 bp, Homo sapien
ggggtgcgaaaatgctctcaatttt

SEQ ID NO: 2134597 - DNA, 25 bp, Homo sapien
ctctggggtgcgaaaatgctctcaa

SEQ ID NO: 2134598 - DNA, 25 bp, Homo sapien
tctggggtgcgaaaatgctctcaat

SEQ ID NO: 2134599 - DNA, 25 bp, Homo sapien
aggccgcagagttgccagtagcagc

SEQ ID NO: 2134600 - DNA, 25 bp, Homo sapien
acgatatccatagcgtttacagtgt

SEQ ID NO: 2134601 - DNA, 25 bp, Homo sapien
ggtaatccaaacgatatccatagcg

SEQ ID NO: 2134602 - DNA, 25 bp, Homo sapien
tggcatggtgaaggccgcagagttg

SEQ ID NO: 2134603 - DNA, 25 bp, Homo sapien
cttctttgaacgttcgtagcctctc

SEQ ID NO: 2134604 - DNA, 25 bp, Homo sapien
gccttctttgaacgttcgtagcctc

SEQ ID NO: 2134605 - DNA, 25 bp, Homo sapien
ttgccttctttgaacgttcgtagcc

SEQ ID NO: 2134606 - DNA, 25 bp, Homo sapien
ctttgaacgttcgtagcctctcgac

SEQ ID NO: 2134607 - DNA, 25 bp, Homo sapien
tctttgcgtcacaagtcccagtttg

SEQ ID NO: 2134608 - DNA, 25 bp, Homo sapien
gtcacaagtcccagtttgctcacat

SEQ ID NO: 2134609 - DNA, 25 bp, Homo sapien
ctttgcctctttgcgtcacaagtcc

SEQ ID NO: 2134610 - DNA, 25 bp, Homo sapien
tgatccccgtggagtcttttcatta

SEQ ID NO: 2134611 - DNA, 25 bp, Homo sapien
ataaggctgtttggtggtattcaga

SEQ ID NO: 2134612 - DNA, 25 bp, Homo sapien
ttttcaattggtttgtagtcctcaa

SEQ ID NO: 2134613 - DNA, 25 bp, Homo sapien
aatctcttgatgattgcagacatat

SEQ ID NO: 2134614 - DNA, 25 bp, Homo sapien
cttgatgattgcagacatataaggc

SEQ ID NO: 2134615 - DNA, 25 bp, Homo sapien
gagtctcgctctgttttctaggctg

SEQ ID NO: 2134616 - DNA, 25 bp, Homo sapien
tcgctctgttttctaggctgaagtg

SEQ ID NO: 2134617 - DNA, 25 bp, Homo sapien
agtctcgctctgttttctaggctga

SEQ ID NO: 2134618 - DNA, 25 bp, Homo sapien
tctcgctctgttttctaggctgaag

SEQ ID NO: 2134619 - DNA, 25 bp, Homo sapien
gagtacctcccaggaaacagtctga

SEQ ID NO: 2134620 - DNA, 25 bp, Homo sapien
tactagtggccattcagcaaggacc

SEQ ID NO: 2134621 - DNA, 25 bp, Homo sapien
tcagaggatatgacagcttaccagc

SEQ ID NO: 2134622 - DNA, 25 bp, Homo sapien
gaaggcccagaatcccgctagaata

SEQ ID NO: 2134623 - DNA, 25 bp, Homo sapien
aagtttctccgaggagaagcagccc

SEQ ID NO: 2134624 - DNA, 25 bp, Homo sapien
tagcaaagtttctccgaggagaagc

SEQ ID NO: 2134625 - DNA, 25 bp, Homo sapien
aaagtttctccgaggagaagcagcc

SEQ ID NO: 2134626 - DNA, 25 bp, Homo sapien
gcaaagtttctccgaggagaagcag

SEQ ID NO: 2134627 - DNA, 25 bp, Homo sapien
gactggactgtcagccacttgctgc

SEQ ID NO: 2134628 - DNA, 25 bp, Homo sapien
tgactggactgtcagccacttgctg

SEQ ID NO: 2134629 - DNA, 25 bp, Homo sapien
actggactgtcagccacttgctgca

SEQ ID NO: 2134630 - DNA, 25 bp, Homo sapien
tcactgacacagaggcttctagcct

SEQ ID NO: 2134631 - DNA, 25 bp, Homo sapien
aatacgtgaacttccggttgctgct

SEQ ID NO: 2134632 - DNA, 25 bp, Homo sapien
ctgcctgaagcaactctcaagatgc

SEQ ID NO: 2134633 - DNA, 25 bp, Homo sapien
ggtgagaaagtctcttcaggtgcct

SEQ ID NO: 2134634 - DNA, 25 bp, Homo sapien
ctgaacaccacagggtaaaacacct

SEQ ID NO: 2134635 - DNA, 25 bp, Homo sapien
ctttttgtgaaccagctgctgctcc

SEQ ID NO: 2134636 - DNA, 25 bp, Homo sapien
cctttttgtgaaccagctgctgctc

SEQ ID NO: 2134637 - DNA, 25 bp, Homo sapien
taaatagtgctggtttgcggttcac

SEQ ID NO: 2134638 - DNA, 25 bp, Homo sapien
gaggcactgcatccggaagtggaat

SEQ ID NO: 2134639 - DNA, 25 bp, Homo sapien
catccggaagtggaattaaggctaa

SEQ ID NO: 2134640 - DNA, 25 bp, Homo sapien
aatagtgctggtttgcggttcacac

SEQ ID NO: 2134641 - DNA, 25 bp, Homo sapien
cagttacttttaccggagatcttca

SEQ ID NO: 2134642 - DNA, 25 bp, Homo sapien
cctaacttttgttcgcctgggaatg

SEQ ID NO: 2134643 - DNA, 25 bp, Homo sapien
ggtctacaggtaacgagctccccta

SEQ ID NO: 2134644 - DNA, 25 bp, Homo sapien
aaaccagacttgcagtattactggc

SEQ ID NO: 2134645 - DNA, 25 bp, Homo sapien
cctggttcatagcaaccaaactcat

SEQ ID NO: 2134646 - DNA, 25 bp, Homo sapien
tacctggttcatagcaaccaaactc

SEQ ID NO: 2134647 - DNA, 25 bp, Homo sapien
atgtctgtggcaaccactacctggt

SEQ ID NO: 2134648 - DNA, 25 bp, Homo sapien
tgtggcaaccactacctggttcata

SEQ ID NO: 2134649 - DNA, 25 bp, Homo sapien
aggtggttatttatctgataagttg

SEQ ID NO: 2134650 - DNA, 25 bp, Homo sapien
ggtggttatttatctgataagttga

SEQ ID NO: 2134651 - DNA, 25 bp, Homo sapien
tggaagacataagatatgcagagta

SEQ ID NO: 2134652 - DNA, 25 bp, Homo sapien
ggatggaagacataagatatgcaga

SEQ ID NO: 2134653 - DNA, 25 bp, Homo sapien
aacatcagagcctaattgtctgggt

SEQ ID NO: 2134654 - DNA, 25 bp, Homo sapien
catcagagcctaattgtctgggttc

SEQ ID NO: 2134655 - DNA, 25 bp, Homo sapien
tgtctgggttccttgatagccatct

SEQ ID NO: 2134656 - DNA, 25 bp, Homo sapien
tgatagccatctcccttggagaaga

SEQ ID NO: 2134657 - DNA, 25 bp, Homo sapien
gttttgcacatgaagctgatatgac

SEQ ID NO: 2134658 - DNA, 25 bp, Homo sapien
ccagttttgcacatgaagctgatat

SEQ ID NO: 2134659 - DNA, 25 bp, Homo sapien
cagttttgcacatgaagctgatatg

SEQ ID NO: 2134660 - DNA, 25 bp, Homo sapien
agttttgcacatgaagctgatatga

SEQ ID NO: 2134661 - DNA, 25 bp, Homo sapien
agccggaacatgattcatcttagtt

SEQ ID NO: 2134662 - DNA, 25 bp, Homo sapien
aggaggacaaaagccggaacatgat

SEQ ID NO: 2134663 - DNA, 25 bp, Homo sapien
ggacaaaagccggaacatgattcat

SEQ ID NO: 2134664 - DNA, 25 bp, Homo sapien
caaaagccggaacatgattcatctt

SEQ ID NO: 2134665 - DNA, 25 bp, Homo sapien
gccaatgatagggatggtcacattc

SEQ ID NO: 2134666 - DNA, 25 bp, Homo sapien
tttttggaatgcctccacaagaaca

SEQ ID NO: 2134667 - DNA, 25 bp, Homo sapien
gaatgcctccacaagaacagttttg

SEQ ID NO: 2134668 - DNA, 25 bp, Homo sapien
gttttgccagagttgttcaagccaa

SEQ ID NO: 2134669 - DNA, 25 bp, Homo sapien
gccagtatctaatgctcttagttcc

SEQ ID NO: 2134670 - DNA, 25 bp, Homo sapien
ccagtatctaatgctcttagttcct

SEQ ID NO: 2134671 - DNA, 25 bp, Homo sapien
gtatctaatgctcttagttccttac

SEQ ID NO: 2134672 - DNA, 25 bp, Homo sapien
cagtatctaatgctcttagttcctt

SEQ ID NO: 2134673 - DNA, 25 bp, Homo sapien
aaggaaggattatttcactggattc

SEQ ID NO: 2134674 - DNA, 25 bp, Homo sapien
ctaggaaggaaggattatttcactg

SEQ ID NO: 2134675 - DNA, 25 bp, Homo sapien
tatttcactggattctggggtccat

SEQ ID NO: 2134676 - DNA, 25 bp, Homo sapien
aaggattatttcactggattctggg

SEQ ID NO: 2134677 - DNA, 25 bp, Homo sapien
gagcgggagtagctatacttcagac

SEQ ID NO: 2134678 - DNA, 25 bp, Homo sapien
agagcgggagtagctatacttcaga

SEQ ID NO: 2134679 - DNA, 25 bp, Homo sapien
aaagagcgggagtagctatacttca

SEQ ID NO: 2134680 - DNA, 25 bp, Homo sapien
aacccaaaagagcgggagtagctat

SEQ ID NO: 2134681 - DNA, 25 bp, Homo sapien
aaagtgtagtcagttccgatttcat

SEQ ID NO: 2134682 - DNA, 25 bp, Homo sapien
caaaagtgtagtcagttccgatttc

SEQ ID NO: 2134683 - DNA, 25 bp, Homo sapien
aaaagtgtagtcagttccgatttca

SEQ ID NO: 2134684 - DNA, 25 bp, Homo sapien
aacaaaagtgtagtcagttccgatt

SEQ ID NO: 2134685 - DNA, 25 bp, Homo sapien
cattcaggtcatagatggaaagttc

SEQ ID NO: 2134686 - DNA, 25 bp, Homo sapien
tagtagtttggccatgcttcccggc

SEQ ID NO: 2134687 - DNA, 25 bp, Homo sapien
tggaatccaggacgaaaacaagccc

SEQ ID NO: 2134688 - DNA, 25 bp, Homo sapien
ccatgggcctgtgcatagtagtttg

SEQ ID NO: 2134689 - DNA, 25 bp, Homo sapien
tctctttcactagcttctttagaag

SEQ ID NO: 2134690 - DNA, 25 bp, Homo sapien
agtagatagtcaataatatcacaag

SEQ ID NO: 2134691 - DNA, 25 bp, Homo sapien
ctttcactagcttctttagaagtag

SEQ ID NO: 2134692 - DNA, 25 bp, Homo sapien
ctttagaagtagatagtcaataata

SEQ ID NO: 2134693 - DNA, 25 bp, Homo sapien
taatagccagcgcagtccttcaact

SEQ ID NO: 2134694 - DNA, 25 bp, Homo sapien
tcttggagattgagatgctcgaggt

SEQ ID NO: 2134695 - DNA, 25 bp, Homo sapien
cagagcctgtgttattcttggagat

SEQ ID NO: 2134696 - DNA, 25 bp, Homo sapien
tagttggcaagtatcaatgacagct

SEQ ID NO: 2134697 - DNA, 25 bp, Homo sapien
gcttagcttcgattgagcattgttc

SEQ ID NO: 2134698 - DNA, 25 bp, Homo sapien
tcgattgagcattgttctagatgct

SEQ ID NO: 2134699 - DNA, 25 bp, Homo sapien
aggcttagcttcgattgagcattgt

SEQ ID NO: 2134700 - DNA, 25 bp, Homo sapien
tagcttcgattgagcattgttctag

SEQ ID NO: 2134701 - DNA, 25 bp, Homo sapien
gacatattctttttagaccataatc

SEQ ID NO: 2134702 - DNA, 25 bp, Homo sapien
tgacatattctttttagaccataat

SEQ ID NO: 2134703 - DNA, 25 bp, Homo sapien
tccttcaattgtagcaaagcttcgt

SEQ ID NO: 2134704 - DNA, 25 bp, Homo sapien
gctctcattctcctagaacattcac

SEQ ID NO: 2134705 - DNA, 25 bp, Homo sapien
agcttcgtagtattctgagctctca

SEQ ID NO: 2134706 - DNA, 25 bp, Homo sapien
agctggagtctataagccactcctt

SEQ ID NO: 2134707 - DNA, 25 bp, Homo sapien
tataggaaccaaaggcttcttcaca
